United States Patent Application Publication US 2019/0201553 A1 - sequence listing, part 2

SEQ ID NO: 32128 - DNA, 20 bp, Artificial Sequence
  chemically synthesized
gagtcagtttagggttattc

SEQ ID NO: 32129 - DNA, 20 bp, Artificial Sequence
  chemically synthesized
tctgtgtaggaacacatggt

SEQ ID NO: 32130 - DNA, 20 bp, Artificial Sequence
  chemically synthesized
catgcatggctaaaaggtta

SEQ ID NO: 32131 - DNA, 20 bp, Artificial Sequence
  chemically synthesized
aaggaaaaaggtcatggaga

SEQ ID NO: 32132 - DNA, 20 bp, Artificial Sequence
  chemically synthesized
aataacaaagagcaagatgc

SEQ ID NO: 32133 - DNA, 20 bp, Artificial Sequence
  chemically synthesized
ctaggtaatcctaggtaaca

SEQ ID NO: 32134 - DNA, 20 bp, Artificial Sequence
  chemically synthesized
aggtaacaaagagttattgt

SEQ ID NO: 32135 - DNA, 20 bp, Artificial Sequence
  chemically synthesized
aagccctcaggtcctgaggg

SEQ ID NO: 32136 - DNA, 20 bp, Artificial Sequence
  chemically synthesized
tcctgagggctgggtggttc

SEQ ID NO: 32137 - DNA, 20 bp, Artificial Sequence
  chemically synthesized
cccccaagctgggcctaagc

SEQ ID NO: 32138 - DNA, 20 bp, Artificial Sequence
  chemically synthesized
ttctagtccctgcatgctgg

SEQ ID NO: 32139 - DNA, 20 bp, Artificial Sequence
  chemically synthesized
cggagccacttttggaggga

SEQ ID NO: 32140 - DNA, 20 bp, Artificial Sequence
  chemically synthesized
tttggagggaagggatagaa

SEQ ID NO: 32141 - DNA, 20 bp, Artificial Sequence
  chemically synthesized
gggagttgagcagttcagag

SEQ ID NO: 32142 - DNA, 20 bp, Artificial Sequence
  chemically synthesized
ttgagcagttcagaggaggg

SEQ ID NO: 32143 - DNA, 20 bp, Artificial Sequence
  chemically synthesized
gcctggtcttcctgagggct

SEQ ID NO: 32144 - DNA, 20 bp, Artificial Sequence
  chemically synthesized
ctcccaccttcccacaaagg

SEQ ID NO: 32145 - DNA, 20 bp, Artificial Sequence
  chemically synthesized
cctgctggcaggaccaattt

SEQ ID NO: 32146 - DNA, 20 bp, Artificial Sequence
  chemically synthesized
ccagaacaaggtatgtggaa

SEQ ID NO: 32147 - DNA, 20 bp, Artificial Sequence
  chemically synthesized
ggtatgtggaagtgggttgt

SEQ ID NO: 32148 - DNA, 20 bp, Artificial Sequence
  chemically synthesized
aactagagcctccttttggc

SEQ ID NO: 32149 - DNA, 20 bp, Artificial Sequence
  chemically synthesized
accttcctctggaagccgtt

SEQ ID NO: 32150 - DNA, 20 bp, Artificial Sequence
  chemically synthesized
tttatgctcattttacagat

SEQ ID NO: 32151 - DNA, 20 bp, Artificial Sequence
  chemically synthesized
gagaaatcaaatgactatcc

SEQ ID NO: 32152 - DNA, 20 bp, Artificial Sequence
  chemically synthesized
tatcccagagttacaatcta

SEQ ID NO: 32153 - DNA, 20 bp, Artificial Sequence
  chemically synthesized
tctcagacctccttgttctt

SEQ ID NO: 32154 - DNA, 20 bp, Artificial Sequence
  chemically synthesized
attggtgacatactagaaat

SEQ ID NO: 32155 - DNA, 20 bp, Artificial Sequence
  chemically synthesized
attgagaagttgattttcat

SEQ ID NO: 32156 - DNA, 20 bp, Artificial Sequence
  chemically synthesized
gattttcatcagagtaaatg

SEQ ID NO: 32157 - DNA, 20 bp, Artificial Sequence
  chemically synthesized
tttattgatgactgcagttt

SEQ ID NO: 32158 - DNA, 20 bp, Artificial Sequence
  chemically synthesized
atgactgcagtttaggaatt

SEQ ID NO: 32159 - DNA, 20 bp, Artificial Sequence
  chemically synthesized
atatggtacaccggcatgag

SEQ ID NO: 32160 - DNA, 20 bp, Artificial Sequence
  chemically synthesized
cactagctgccctcatgatc

SEQ ID NO: 32161 - DNA, 20 bp, Artificial Sequence
  chemically synthesized
atctagaatatctagttgat

SEQ ID NO: 32162 - DNA, 20 bp, Artificial Sequence
  chemically synthesized
ctgatgtatgagagagaggg

SEQ ID NO: 32163 - DNA, 20 bp, Artificial Sequence
  chemically synthesized
actggctctgaaaaaaagtt

SEQ ID NO: 32164 - DNA, 20 bp, Artificial Sequence
  chemically synthesized
tctcatttaagcctttttga

SEQ ID NO: 32165 - DNA, 20 bp, Artificial Sequence
  chemically synthesized
tgaaaccagcaccactaatt

SEQ ID NO: 32166 - DNA, 20 bp, Artificial Sequence
  chemically synthesized
cactaattatgagtctagtc

SEQ ID NO: 32167 - DNA, 20 bp, Artificial Sequence
  chemically synthesized
aaatataattttaaggcatt

SEQ ID NO: 32168 - DNA, 20 bp, Artificial Sequence
  chemically synthesized
gtgatgaacgtgttaaggac

SEQ ID NO: 32169 - DNA, 20 bp, Artificial Sequence
  chemically synthesized
ctcagatcgtcaggctaaat

SEQ ID NO: 32170 - DNA, 20 bp, Artificial Sequence
  chemically synthesized
aggacaaggaggaagccaca

SEQ ID NO: 32171 - DNA, 20 bp, Artificial Sequence
  chemically synthesized
cttgtttaagagatttaccc

SEQ ID NO: 32172 - DNA, 20 bp, Artificial Sequence
  chemically synthesized
ttacccaggagtgagatata

SEQ ID NO: 32173 - DNA, 20 bp, Artificial Sequence
  chemically synthesized
caggagtgagatatattgag

SEQ ID NO: 32174 - DNA, 20 bp, Artificial Sequence
  chemically synthesized
gtaaattacaaggtcagggc

SEQ ID NO: 32175 - DNA, 20 bp, Artificial Sequence
  chemically synthesized
tgagcgaggctggcttattt

SEQ ID NO: 32176 - DNA, 20 bp, Artificial Sequence
  chemically synthesized
tattttaaggcttttttttt

SEQ ID NO: 32177 - DNA, 20 bp, Artificial Sequence
  chemically synthesized
caaagtggcatttaccactc

SEQ ID NO: 32178 - DNA, 20 bp, Artificial Sequence
  chemically synthesized
cagacggcttggctactggc

SEQ ID NO: 32179 - DNA, 20 bp, Artificial Sequence
  chemically synthesized
tgtttctttctcaactggag

SEQ ID NO: 32180 - DNA, 20 bp, Artificial Sequence
  chemically synthesized
ctgagtcccagccgagggcg

SEQ ID NO: 32181 - DNA, 20 bp, Artificial Sequence
  chemically synthesized
cctctcaaaacaatgaggag

SEQ ID NO: 32182 - DNA, 20 bp, Artificial Sequence
  chemically synthesized
gttttaactgttccttaaac

SEQ ID NO: 32183 - DNA, 20 bp, Artificial Sequence
  chemically synthesized
cgggggacaactcctaaaga

SEQ ID NO: 32184 - DNA, 20 bp, Artificial Sequence
  chemically synthesized
atacagcctatccgttaaat

SEQ ID NO: 32185 - DNA, 20 bp, Artificial Sequence
  chemically synthesized
gataaaaatggacgtcccca

SEQ ID NO: 32186 - DNA, 20 bp, Artificial Sequence
  chemically synthesized
tcactgatcctcccacagtc

SEQ ID NO: 32187 - DNA, 20 bp, Artificial Sequence
  chemically synthesized
cctcccacagtctggggtgt

SEQ ID NO: 32188 - DNA, 20 bp, Artificial Sequence
  chemically synthesized
tttttccacggaagtatttt

SEQ ID NO: 32189 - DNA, 20 bp, Artificial Sequence
  chemically synthesized
tagggccatagaacattgta

SEQ ID NO: 32190 - DNA, 20 bp, Artificial Sequence
  chemically synthesized
agttcacctgtcacccaggg

SEQ ID NO: 32191 - DNA, 20 bp, Artificial Sequence
  chemically synthesized
cccaggggggaatagaaagc

SEQ ID NO: 32192 - DNA, 20 bp, Artificial Sequence
  chemically synthesized
taggaagccaaaaagtttcc

SEQ ID NO: 32193 - DNA, 20 bp, Artificial Sequence
  chemically synthesized
aagacatttgttgaggtgcc

SEQ ID NO: 32194 - DNA, 20 bp, Artificial Sequence
  chemically synthesized
atcctcaagccagaactggt

SEQ ID NO: 32195 - DNA, 20 bp, Artificial Sequence
  chemically synthesized
ggtcaggatttttctgcttt

SEQ ID NO: 32196 - DNA, 20 bp, Artificial Sequence
  chemically synthesized
ggatttttctgctttgggga

SEQ ID NO: 32197 - DNA, 20 bp, Artificial Sequence
  chemically synthesized
tggatataaaatttctagaa

SEQ ID NO: 32198 - DNA, 20 bp, Artificial Sequence
  chemically synthesized
atcaattggaccaatattta

SEQ ID NO: 32199 - DNA, 20 bp, Artificial Sequence
  chemically synthesized
gctcagacgtgccaggcaca

SEQ ID NO: 32200 - DNA, 20 bp, Artificial Sequence
  chemically synthesized
gtcagtgagggcttaggcct

SEQ ID NO: 32201 - DNA, 20 bp, Artificial Sequence
  chemically synthesized
gggcttaggccttggggttg

SEQ ID NO: 32202 - DNA, 20 bp, Artificial Sequence
  chemically synthesized
gcaacacgcacagaacactc

SEQ ID NO: 32203 - DNA, 20 bp, Artificial Sequence
  chemically synthesized
gcacagaacactcatggatt

SEQ ID NO: 32204 - DNA, 20 bp, Artificial Sequence
  chemically synthesized
cacggaagtcccctgacccc

SEQ ID NO: 32205 - DNA, 20 bp, Artificial Sequence
  chemically synthesized
tatcccttcaggactaggtg

SEQ ID NO: 32206 - DNA, 20 bp, Artificial Sequence
  chemically synthesized
ccttcccagccacctctcca

SEQ ID NO: 32207 - DNA, 20 bp, Artificial Sequence
  chemically synthesized
aataacccctttaacctgct

SEQ ID NO: 32208 - DNA, 20 bp, Artificial Sequence
  chemically synthesized
ctttaacctgctaagaatac

SEQ ID NO: 32209 - DNA, 20 bp, Artificial Sequence
  chemically synthesized
tggccctggccacccatcac

SEQ ID NO: 32210 - DNA, 20 bp, Artificial Sequence
  chemically synthesized
catcacccgagtgcctttga

SEQ ID NO: 32211 - DNA, 20 bp, Artificial Sequence
  chemically synthesized
cctttgacagggtgctgcgg

SEQ ID NO: 32212 - DNA, 20 bp, Artificial Sequence
  chemically synthesized
tggctatggagcctcccgcc

SEQ ID NO: 32213 - DNA, 20 bp, Artificial Sequence
  chemically synthesized
cccggtcaagtccaagtcat

SEQ ID NO: 32214 - DNA, 20 bp, Artificial Sequence
  chemically synthesized
gaggagctgacggagagcga

SEQ ID NO: 32215 - DNA, 20 bp, Artificial Sequence
  chemically synthesized
cgacgaagactcggtggccg

SEQ ID NO: 32216 - DNA, 20 bp, Artificial Sequence
  chemically synthesized
tggccgcggctgctccccgg

SEQ ID NO: 32217 - DNA, 20 bp, Artificial Sequence
  chemically synthesized
taagcgcatcaagctcgaga

SEQ ID NO: 32218 - DNA, 20 bp, Artificial Sequence
  chemically synthesized
cggagcactcctcggagaac

SEQ ID NO: 32219 - DNA, 20 bp, Artificial Sequence
  chemically synthesized
ccgcccggggagctggacgg

SEQ ID NO: 32220 - DNA, 20 bp, Artificial Sequence
  chemically synthesized
gggcagacgcagcgacactt

SEQ ID NO: 32221 - DNA, 20 bp, Artificial Sequence
  chemically synthesized
tgtgcaactatgcctgtgcc

SEQ ID NO: 32222 - DNA, 20 bp, Artificial Sequence
  chemically synthesized
atgaaaaaatggcacagtga

SEQ ID NO: 32223 - DNA, 20 bp, Artificial Sequence
  chemically synthesized
aatggcacagtgatcgagtg

SEQ ID NO: 32224 - DNA, 20 bp, Artificial Sequence
  chemically synthesized
gttgaataatgatataaaaa

SEQ ID NO: 32225 - DNA, 20 bp, Artificial Sequence
  chemically synthesized
ccctccagccccactccctg

SEQ ID NO: 32226 - DNA, 20 bp, Artificial Sequence
  chemically synthesized
caaacagaagtaacgaagct

SEQ ID NO: 32227 - DNA, 20 bp, Artificial Sequence
  chemically synthesized
agtaacgaagctaagaatat

SEQ ID NO: 32228 - DNA, 20 bp, Artificial Sequence
  chemically synthesized
ttcctttatgttctcaccgt

SEQ ID NO: 32229 - DNA, 20 bp, Artificial Sequence
  chemically synthesized
gtgaggaggaaaaacagtct

SEQ ID NO: 32230 - DNA, 20 bp, Artificial Sequence
  chemically synthesized
ttggattaaccctctataga

SEQ ID NO: 32231 - DNA, 20 bp, Artificial Sequence
  chemically synthesized
gagctaaatgtctgtctcta

SEQ ID NO: 32232 - DNA, 20 bp, Artificial Sequence
  chemically synthesized
ggaaaggaagaaaaaaggcc

SEQ ID NO: 32233 - DNA, 20 bp, Artificial Sequence
  chemically synthesized
ctatcatttggttttaaaat

SEQ ID NO: 32234 - DNA, 20 bp, Artificial Sequence
  chemically synthesized
ggttttaaaatatgagtgcc

SEQ ID NO: 32235 - DNA, 20 bp, Artificial Sequence
  chemically synthesized
acttgtagcttaattcagca

SEQ ID NO: 32236 - DNA, 20 bp, Artificial Sequence
  chemically synthesized
ttttttaaacaatgattaaa

SEQ ID NO: 32237 - DNA, 20 bp, Artificial Sequence
  chemically synthesized
cgcaattaaatacactagta

SEQ ID NO: 32238 - DNA, 20 bp, Artificial Sequence
  chemically synthesized
tgatacaatgatgattaact

SEQ ID NO: 32239 - DNA, 20 bp, Artificial Sequence
  chemically synthesized
attcttaaaaaaagaagaga

SEQ ID NO: 32240 - DNA, 20 bp, Artificial Sequence
  chemically synthesized
aaaagaagagaaagaatttt

SEQ ID NO: 32241 - DNA, 20 bp, Artificial Sequence
  chemically synthesized
ctatttgtgttaacatggaa

SEQ ID NO: 32242 - DNA, 20 bp, Artificial Sequence
  chemically synthesized
tctaatcagagatacagagg

SEQ ID NO: 32243 - DNA, 20 bp, Artificial Sequence
  chemically synthesized
atacttaagggaaaagttgc

SEQ ID NO: 32244 - DNA, 20 bp, Artificial Sequence
  chemically synthesized
gacgcaacattgcaagcgct

SEQ ID NO: 32245 - DNA, 20 bp, Artificial Sequence
  chemically synthesized
gcaagcgctgtgaatggaaa

SEQ ID NO: 32246 - DNA, 20 bp, Artificial Sequence
  chemically synthesized
agaatacacttaacatagaa

SEQ ID NO: 32247 - DNA, 20 bp, Artificial Sequence
  chemically synthesized
tgctttcgcttctacagtgc

SEQ ID NO: 32248 - DNA, 20 bp, Artificial Sequence
  chemically synthesized
tttaggggggaactgcattt

SEQ ID NO: 32249 - DNA, 20 bp, Artificial Sequence
  chemically synthesized
ggtagtggaaattctatgcc

SEQ ID NO: 32250 - DNA, 20 bp, Artificial Sequence
  chemically synthesized
tggtcttttttctgtatttc

SEQ ID NO: 32251 - DNA, 20 bp, Artificial Sequence
  chemically synthesized
ctgtatttctagaatggtat

SEQ ID NO: 32252 - DNA, 20 bp, Artificial Sequence
  chemically synthesized
agtatatttttttaatttgg

SEQ ID NO: 32253 - DNA, 20 bp, Artificial Sequence
  chemically synthesized
ggcggtttgggggagcctgc

SEQ ID NO: 32254 - DNA, 20 bp, Artificial Sequence
  chemically synthesized
ggagcctgctagaatgtcac

SEQ ID NO: 32255 - DNA, 20 bp, Artificial Sequence
  chemically synthesized
gtcacatggatggctgtcat

SEQ ID NO: 32256 - DNA, 20 bp, Artificial Sequence
  chemically synthesized
tgctttatatttagattgga

SEQ ID NO: 32257 - DNA, 20 bp, Artificial Sequence
  chemically synthesized
cttttttgtaaatggcaatg

SEQ ID NO: 32258 - DNA, 20 bp, Artificial Sequence
  chemically synthesized
gaaattttatcttttactat

SEQ ID NO: 32259 - DNA, 20 bp, Artificial Sequence
  chemically synthesized
gaaggccagtcagtcttttt

SEQ ID NO: 32260 - DNA, 20 bp, Artificial Sequence
  chemically synthesized
agttttaaggctttccagtt

SEQ ID NO: 32261 - DNA, 20 bp, Artificial Sequence
  chemically synthesized
cagctctttggtttccatgt

SEQ ID NO: 32262 - DNA, 20 bp, Artificial Sequence
  chemically synthesized
aagaaaagaaagcagccact

SEQ ID NO: 32263 - DNA, 20 bp, Artificial Sequence
  chemically synthesized
gccagacatagtgaaatctt

SEQ ID NO: 32264 - DNA, 20 bp, Artificial Sequence
  chemically synthesized
gattactttaggtgttttga

SEQ ID NO: 32265 - DNA, 20 bp, Artificial Sequence
  chemically synthesized
ggtgttttgatagggtcttc

SEQ ID NO: 32266 - DNA, 20 bp, Artificial Sequence
  chemically synthesized
ggatgacagcaaataagggc

SEQ ID NO: 32267 - DNA, 20 bp, Artificial Sequence
  chemically synthesized
tgtccctgttcccagtgtag

SEQ ID NO: 32268 - DNA, 20 bp, Artificial Sequence
  chemically synthesized
cctgttcccagtgtagatga

SEQ ID NO: 32269 - DNA, 20 bp, Artificial Sequence
  chemically synthesized
tcatgccttttatctgaggc

SEQ ID NO: 32270 - DNA, 20 bp, Artificial Sequence
  chemically synthesized
atgttttctgaaaagccagt

SEQ ID NO: 32271 - DNA, 20 bp, Artificial Sequence
  chemically synthesized
gccagtttgggtgggaagga

SEQ ID NO: 32272 - DNA, 20 bp, Artificial Sequence
  chemically synthesized
gaaggagagagtggggctag

SEQ ID NO: 32273 - DNA, 20 bp, Artificial Sequence
  chemically synthesized
gctagaggaatccactgaga

SEQ ID NO: 32274 - DNA, 20 bp, Artificial Sequence
  chemically synthesized
tccactgagaaaggatgttg

SEQ ID NO: 32275 - DNA, 20 bp, Artificial Sequence
  chemically synthesized
ggagaatattacataggagg

SEQ ID NO: 32276 - DNA, 20 bp, Artificial Sequence
  chemically synthesized
atattacataggaggtgggg

SEQ ID NO: 32277 - DNA, 20 bp, Artificial Sequence
  chemically synthesized
aaagatatactgtatgtgtt

SEQ ID NO: 32278 - DNA, 20 bp, Artificial Sequence
  chemically synthesized
tggattaggtttctccaaaa

SEQ ID NO: 32279 - DNA, 20 bp, Artificial Sequence
  chemically synthesized
ttactcttttattaggagct

SEQ ID NO: 32280 - DNA, 20 bp, Artificial Sequence
  chemically synthesized
aggttttgcatcctgacaga

SEQ ID NO: 32281 - DNA, 20 bp, Artificial Sequence
  chemically synthesized
cctgacagacagaattaatg

SEQ ID NO: 32282 - DNA, 20 bp, Artificial Sequence
  chemically synthesized
caaatttcttaaatcaaatg

SEQ ID NO: 32283 - DNA, 20 bp, Artificial Sequence
  chemically synthesized
aaatcaaatggggaatgggg

SEQ ID NO: 32284 - DNA, 20 bp, Artificial Sequence
  chemically synthesized
ttaaataaatttactgggag

SEQ ID NO: 32285 - DNA, 20 bp, Artificial Sequence
  chemically synthesized
tgcacatttccaatagtaag

SEQ ID NO: 32286 - DNA, 20 bp, Artificial Sequence
  chemically synthesized
taacaggcttgacgtgctga

SEQ ID NO: 32287 - DNA, 20 bp, Artificial Sequence
  chemically synthesized
ttgagaacaacttaataaac

SEQ ID NO: 32288 - DNA, 20 bp, Artificial Sequence
  chemically synthesized
tggcagaaagtgtgaagtag

SEQ ID NO: 32289 - DNA, 20 bp, Artificial Sequence
  chemically synthesized
cacagtttgctgaaaggtac

SEQ ID NO: 32290 - DNA, 20 bp, Artificial Sequence
  chemically synthesized
tatttcgggccttcctgaaa

SEQ ID NO: 32291 - DNA, 20 bp, Artificial Sequence
  chemically synthesized
tccctgggcctggtgtgttc

SEQ ID NO: 32292 - DNA, 20 bp, Artificial Sequence
  chemically synthesized
tgtgggaactttgccgatat

SEQ ID NO: 32293 - DNA, 20 bp, Artificial Sequence
  chemically synthesized
gaactttgccgatatgagga

SEQ ID NO: 32294 - DNA, 20 bp, Artificial Sequence
  chemically synthesized
cgatatgaggatgggattgg

SEQ ID NO: 32295 - DNA, 20 bp, Artificial Sequence
  chemically synthesized
tggacatcagaacacataga

SEQ ID NO: 32296 - DNA, 20 bp, Artificial Sequence
  chemically synthesized
tatagctatgaactgtggac

SEQ ID NO: 32297 - DNA, 20 bp, Artificial Sequence
  chemically synthesized
gccagtgactcagcctttag

SEQ ID NO: 32298 - DNA, 20 bp, Artificial Sequence
  chemically synthesized
cccagcgtcatctacggtca

SEQ ID NO: 32299 - DNA, 20 bp, Artificial Sequence
  chemically synthesized
aagagaccaatccagttcac

SEQ ID NO: 32300 - DNA, 20 bp, Artificial Sequence
  chemically synthesized
acgtgtatcagatctttcat

SEQ ID NO: 32301 - DNA, 20 bp, Artificial Sequence
  chemically synthesized
ccatgatatactttgtctat

SEQ ID NO: 32302 - DNA, 20 bp, Artificial Sequence
  chemically synthesized
tatactttgtctattagaat

SEQ ID NO: 32303 - DNA, 20 bp, Artificial Sequence
  chemically synthesized
attggtagcaggttggacga

SEQ ID NO: 32304 - DNA, 20 bp, Artificial Sequence
  chemically synthesized
gttggacgaaagggtttgat

SEQ ID NO: 32305 - DNA, 20 bp, Artificial Sequence
  chemically synthesized
cagtgacttagcgctggact

SEQ ID NO: 32306 - DNA, 20 bp, Artificial Sequence
  chemically synthesized
acttagcgctggactgggaa

SEQ ID NO: 32307 - DNA, 20 bp, Artificial Sequence
  chemically synthesized
aggtctccgctgctctgctc

SEQ ID NO: 32308 - DNA, 20 bp, Artificial Sequence
  chemically synthesized
tccgctgctctgctcagggg

SEQ ID NO: 32309 - DNA, 20 bp, Artificial Sequence
  chemically synthesized
ggaggccccaggcccctgct

SEQ ID NO: 32310 - DNA, 20 bp, Artificial Sequence
  chemically synthesized
gtcgccatggcaacgaggcc

SEQ ID NO: 32311 - DNA, 20 bp, Artificial Sequence
  chemically synthesized
gcaatttgagagcaactctt

SEQ ID NO: 32312 - DNA, 20 bp, Artificial Sequence
  chemically synthesized
tgtttccttccaggtgtgtc

SEQ ID NO: 32313 - DNA, 20 bp, Artificial Sequence
  chemically synthesized
ggactatcatacaattgggc

SEQ ID NO: 32314 - DNA, 20 bp, Artificial Sequence
  chemically synthesized
ttgggcaggggtggggggac

SEQ ID NO: 32315 - DNA, 20 bp, Artificial Sequence
  chemically synthesized
agatacttggggaggggagg

SEQ ID NO: 32316 - DNA, 20 bp, Artificial Sequence
  chemically synthesized
ctcaagatgtgtggcagttt

SEQ ID NO: 32317 - DNA, 20 bp, Artificial Sequence
  chemically synthesized
tgagaaaatttgaagccccc

SEQ ID NO: 32318 - DNA, 20 bp, Artificial Sequence
  chemically synthesized
aaatttgaagcccccagggg

SEQ ID NO: 32319 - DNA, 20 bp, Artificial Sequence
  chemically synthesized
aagaagccgttgtgcgaaga

SEQ ID NO: 32320 - DNA, 20 bp, Artificial Sequence
  chemically synthesized
tgtgcgaagacagagtcctg

SEQ ID NO: 32321 - DNA, 20 bp, Artificial Sequence
  chemically synthesized
aacagacccacattggaaca

SEQ ID NO: 32322 - DNA, 20 bp, Artificial Sequence
  chemically synthesized
gcccgtggaccatcgctgtc

SEQ ID NO: 32323 - DNA, 20 bp, Artificial Sequence
  chemically synthesized
cctgtattgtggaaatgcgc

SEQ ID NO: 32324 - DNA, 20 bp, Artificial Sequence
  chemically synthesized
ctgtttcctacagacaccca

SEQ ID NO: 32325 - DNA, 20 bp, Artificial Sequence
  chemically synthesized
ttcctacagacacccatcgg

SEQ ID NO: 32326 - DNA, 20 bp, Artificial Sequence
  chemically synthesized
agatggcataaattttcaag

SEQ ID NO: 32327 - DNA, 20 bp, Artificial Sequence
  chemically synthesized
agaatcaaaatgcaaaactt

SEQ ID NO: 32328 - DNA, 20 bp, Artificial Sequence
  chemically synthesized
ataatgcataatatggcacg

SEQ ID NO: 32329 - DNA, 20 bp, Artificial Sequence
  chemically synthesized
tgcttttggtggctaccatg

SEQ ID NO: 32330 - DNA, 20 bp, Artificial Sequence
  chemically synthesized
tggtggctaccatgcaggat

SEQ ID NO: 32331 - DNA, 20 bp, Artificial Sequence
  chemically synthesized
tactgcttggagatccagaa

SEQ ID NO: 32332 - DNA, 20 bp, Artificial Sequence
  chemically synthesized
gatagccaaataattggcat

SEQ ID NO: 32333 - DNA, 20 bp, Artificial Sequence
  chemically synthesized
actctgtttaactgatcaaa

SEQ ID NO: 32334 - DNA, 20 bp, Artificial Sequence
  chemically synthesized
gtggcttacacatacagacc

SEQ ID NO: 32335 - DNA, 20 bp, Artificial Sequence
  chemically synthesized
tggcctttggtaaaggcatg

SEQ ID NO: 32336 - DNA, 20 bp, Artificial Sequence
  chemically synthesized
tgacaaataaccctgattgc

SEQ ID NO: 32337 - DNA, 20 bp, Artificial Sequence
  chemically synthesized
ttgctgaaacataagaccat

SEQ ID NO: 32338 - DNA, 20 bp, Artificial Sequence
  chemically synthesized
actccttgctgatgcctaga

SEQ ID NO: 32339 - DNA, 20 bp, Artificial Sequence
  chemically synthesized
ccagaactgaaacaacaatc

SEQ ID NO: 32340 - DNA, 20 bp, Artificial Sequence
  chemically synthesized
actttttatatatttcttct

SEQ ID NO: 32341 - DNA, 20 bp, Artificial Sequence
  chemically synthesized
cagagtcagtttgtaaataa

SEQ ID NO: 32342 - DNA, 20 bp, Artificial Sequence
  chemically synthesized
taagtggatatctctaaaag

SEQ ID NO: 32343 - DNA, 20 bp, Artificial Sequence
  chemically synthesized
gtgggatttttaaggggcaa

SEQ ID NO: 32344 - DNA, 20 bp, Artificial Sequence
  chemically synthesized
ggggcaagaggataacagaa

SEQ ID NO: 32345 - DNA, 20 bp, Artificial Sequence
  chemically synthesized
gaggataacagaagtggata

SEQ ID NO: 32346 - DNA, 20 bp, Artificial Sequence
  chemically synthesized
agacaacaaaaatttattta

SEQ ID NO: 32347 - DNA, 20 bp, Artificial Sequence
  chemically synthesized
ttttttttttttttttaaga

SEQ ID NO: 32348 - DNA, 20 bp, Artificial Sequence
  chemically synthesized
tctcgctctgtcacccaggc

SEQ ID NO: 32349 - DNA, 20 bp, Artificial Sequence
  chemically synthesized
ctcaccacaacctccgccta

SEQ ID NO: 32350 - DNA, 20 bp, Artificial Sequence
  chemically synthesized
acctccgcctactgggttca

SEQ ID NO: 32351 - DNA, 20 bp, Artificial Sequence
  chemically synthesized
cggcgtttcaccgtgttagc

SEQ ID NO: 32352 - DNA, 20 bp, Artificial Sequence
  chemically synthesized
tcctaggcctcccatagtgc

SEQ ID NO: 32353 - DNA, 20 bp, Artificial Sequence
  chemically synthesized
ggaagacatctctctgtgtg

SEQ ID NO: 32354 - DNA, 20 bp, Artificial Sequence
  chemically synthesized
agtcaagatcatggttatcc

SEQ ID NO: 32355 - DNA, 20 bp, Artificial Sequence
  chemically synthesized
aagaggctcacaaatctgcc

SEQ ID NO: 32356 - DNA, 20 bp, Artificial Sequence
  chemically synthesized
ttctcactgtgtcctctctg

SEQ ID NO: 32357 - DNA, 20 bp, Artificial Sequence
  chemically synthesized
catgagcacagactagagga

SEQ ID NO: 32358 - DNA, 20 bp, Artificial Sequence
  chemically synthesized
gaggacagagtcccagccac

SEQ ID NO: 32359 - DNA, 20 bp, Artificial Sequence
  chemically synthesized
tattattattattgttgaga

SEQ ID NO: 32360 - DNA, 20 bp, Artificial Sequence
  chemically synthesized
tctcactctattgcccaggc

SEQ ID NO: 32361 - DNA, 20 bp, Artificial Sequence
  chemically synthesized
ctcactgcaacctctacctc

SEQ ID NO: 32362 - DNA, 20 bp, Artificial Sequence
  chemically synthesized
ggttctcctgcctcagcctc

SEQ ID NO: 32363 - DNA, 20 bp, Artificial Sequence
  chemically synthesized
gcctcagcctcctgagtggc

SEQ ID NO: 32364 - DNA, 20 bp, Artificial Sequence
  chemically synthesized
ttttgtatttttagtagaga

SEQ ID NO: 32365 - DNA, 20 bp, Artificial Sequence
  chemically synthesized
gcctcggcctcccaaagtgc

SEQ ID NO: 32366 - DNA, 20 bp, Artificial Sequence
  chemically synthesized
actgtataaaaaaggtctgt

SEQ ID NO: 32367 - DNA, 20 bp, Artificial Sequence
  chemically synthesized
taaaaaaggtctgttagaat

SEQ ID NO: 32368 - DNA, 20 bp, Artificial Sequence
  chemically synthesized
agcacccagcatccagcatg

SEQ ID NO: 32369 - DNA, 20 bp, Artificial Sequence
  chemically synthesized
ttaaagaaaactcttaggca

SEQ ID NO: 32370 - DNA, 20 bp, Artificial Sequence
  chemically synthesized
ttaggcaaggagtgcaatct

SEQ ID NO: 32371 - DNA, 20 bp, Artificial Sequence
  chemically synthesized
tggaatctgctgaggtctaa

SEQ ID NO: 32372 - DNA, 20 bp, Artificial Sequence
  chemically synthesized
attttctgggcacttttgct

SEQ ID NO: 32373 - DNA, 20 bp, Artificial Sequence
  chemically synthesized
accaagcccttcaagtggtc

SEQ ID NO: 32374 - DNA, 20 bp, Artificial Sequence
  chemically synthesized
agtgtccccggaagtaatag

SEQ ID NO: 32375 - DNA, 20 bp, Artificial Sequence
  chemically synthesized
cccggaagtaatagtaggat

SEQ ID NO: 32376 - DNA, 20 bp, Artificial Sequence
  chemically synthesized
cacatagctttgactccttt

SEQ ID NO: 32377 - DNA, 20 bp, Artificial Sequence
  chemically synthesized
gtgtgaaggaagcagatttg

SEQ ID NO: 32378 - DNA, 20 bp, Artificial Sequence
  chemically synthesized
ggaagcagatttgaggaatt

SEQ ID NO: 32379 - DNA, 20 bp, Artificial Sequence
  chemically synthesized
caagcacaccttccttcttc

SEQ ID NO: 32380 - DNA, 20 bp, Artificial Sequence
  chemically synthesized
tccttcttcaagagttcatc

SEQ ID NO: 32381 - DNA, 20 bp, Artificial Sequence
  chemically synthesized
ctcttcagtttgcattcccc

SEQ ID NO: 32382 - DNA, 20 bp, Artificial Sequence
  chemically synthesized
ttttctatcttagtttaaat

SEQ ID NO: 32383 - DNA, 20 bp, Artificial Sequence
  chemically synthesized
caggaagtacttaagcttta

SEQ ID NO: 32384 - DNA, 20 bp, Artificial Sequence
  chemically synthesized
gaatacttttatatacatga

SEQ ID NO: 32385 - DNA, 20 bp, Artificial Sequence
  chemically synthesized
ttctataaattagataagaa

SEQ ID NO: 32386 - DNA, 20 bp, Artificial Sequence
  chemically synthesized
aagaatagactgaagttgaa

SEQ ID NO: 32387 - DNA, 20 bp, Artificial Sequence
  chemically synthesized
taatcactcattttagagat

SEQ ID NO: 32388 - DNA, 20 bp, Artificial Sequence
  chemically synthesized
attcttttcttatctaattt

SEQ ID NO: 32389 - DNA, 20 bp, Artificial Sequence
  chemically synthesized
ttttttaaaatacaaagcaa

SEQ ID NO: 32390 - DNA, 20 bp, Artificial Sequence
  chemically synthesized
atatcctaatttaaactaag

SEQ ID NO: 32391 - DNA, 20 bp, Artificial Sequence
  chemically synthesized
ctctcctaggcagtcagagg

SEQ ID NO: 32392 - DNA, 20 bp, Artificial Sequence
  chemically synthesized
ggggacactgatttataaaa

SEQ ID NO: 32393 - DNA, 20 bp, Artificial Sequence
  chemically synthesized
ataaaataagaattataaaa

SEQ ID NO: 32394 - DNA, 20 bp, Artificial Sequence
  chemically synthesized
gaaactccaagcaaaagtgc

SEQ ID NO: 32395 - DNA, 20 bp, Artificial Sequence
  chemically synthesized
tatttacaaactgactctga

SEQ ID NO: 32396 - DNA, 20 bp, Artificial Sequence
  chemically synthesized
gaaatatataaaaagtgggg

SEQ ID NO: 32397 - DNA, 20 bp, Artificial Sequence
  chemically synthesized
agtgggggtagaaacacaga

SEQ ID NO: 32398 - DNA, 20 bp, Artificial Sequence
  chemically synthesized
catttagggaggaagccatc

SEQ ID NO: 32399 - DNA, 20 bp, Artificial Sequence
  chemically synthesized
ttggtgaaattagctctgga

SEQ ID NO: 32400 - DNA, 20 bp, Artificial Sequence
  chemically synthesized
aattagctctggacaagaaa

SEQ ID NO: 32401 - DNA, 20 bp, Artificial Sequence
  chemically synthesized
agcagtaaaaaataccaaac

SEQ ID NO: 32402 - DNA, 20 bp, Artificial Sequence
  chemically synthesized
ttctgtgcaaattaactggg

SEQ ID NO: 32403 - DNA, 20 bp, Artificial Sequence
  chemically synthesized
gtgcaaattaactgggccag

SEQ ID NO: 32404 - DNA, 20 bp, Artificial Sequence
  chemically synthesized
gaaggtttgggaacctaaaa

SEQ ID NO: 32405 - DNA, 20 bp, Artificial Sequence
  chemically synthesized
cctaaaattagaatatttaa

SEQ ID NO: 32406 - DNA, 20 bp, Artificial Sequence
  chemically synthesized
cacactttttaaaagacaac

SEQ ID NO: 32407 - DNA, 20 bp, Artificial Sequence
  chemically synthesized
taaaagacaacatagaatgt

SEQ ID NO: 32408 - DNA, 20 bp, Artificial Sequence
  chemically synthesized
cggcttcttggaggctactg

SEQ ID NO: 32409 - DNA, 20 bp, Artificial Sequence
  chemically synthesized
aatgggggtgtgtgaagaac

SEQ ID NO: 32410 - DNA, 20 bp, Artificial Sequence
  chemically synthesized
gaaacacttgcccttatgac

SEQ ID NO: 32411 - DNA, 20 bp, Artificial Sequence
  chemically synthesized
ttatgactgagaaaacttag

SEQ ID NO: 32412 - DNA, 20 bp, Artificial Sequence
  chemically synthesized
caaaataataataaaattat

SEQ ID NO: 32413 - DNA, 20 bp, Artificial Sequence
  chemically synthesized
agaggcgaacaaatctctga

SEQ ID NO: 32414 - DNA, 20 bp, Artificial Sequence
  chemically synthesized
gaaatagtttttgccacttt

SEQ ID NO: 32415 - DNA, 20 bp, Artificial Sequence
  chemically synthesized
tgacgctgggaaatagagag

SEQ ID NO: 32416 - DNA, 20 bp, Artificial Sequence
  chemically synthesized
agagaaagagagagagagag

SEQ ID NO: 32417 - DNA, 20 bp, Artificial Sequence
  chemically synthesized
tttaaaagttagcagtcttt

SEQ ID NO: 32418 - DNA, 20 bp, Artificial Sequence
  chemically synthesized
tgggaagttgtctgaaaaaa

SEQ ID NO: 32419 - DNA, 20 bp, Artificial Sequence
  chemically synthesized
ggcccagggacaatggagta

SEQ ID NO: 32420 - DNA, 20 bp, Artificial Sequence
  chemically synthesized
gggggaaaagaggcttaaaa

SEQ ID NO: 32421 - DNA, 20 bp, Artificial Sequence
  chemically synthesized
aaataaacagttctatatct

SEQ ID NO: 32422 - DNA, 20 bp, Artificial Sequence
  chemically synthesized
agtttctggtttaaaatctg

SEQ ID NO: 32423 - DNA, 20 bp, Artificial Sequence
  chemically synthesized
tggtttaaaatctgtgagaa

SEQ ID NO: 32424 - DNA, 20 bp, Artificial Sequence
  chemically synthesized
gtttctattgttcatcagct

SEQ ID NO: 32425 - DNA, 20 bp, Artificial Sequence
  chemically synthesized
tccccattccccatttgatt

SEQ ID NO: 32426 - DNA, 20 bp, Artificial Sequence
  chemically synthesized
acgctaagagcagcatatac

SEQ ID NO: 32427 - DNA, 20 bp, Artificial Sequence
  chemically synthesized
agcattttggattcagtttt

SEQ ID NO: 32428 - DNA, 20 bp, Artificial Sequence
  chemically synthesized
ttcccacccaaactggcttt

SEQ ID NO: 32429 - DNA, 20 bp, Artificial Sequence
  chemically synthesized
acattgactttctttatact

SEQ ID NO: 32430 - DNA, 20 bp, Artificial Sequence
  chemically synthesized
aaagtggggttattttgtta

SEQ ID NO: 32431 - DNA, 20 bp, Artificial Sequence
  chemically synthesized
tctaagataaagcaaggatg

SEQ ID NO: 32432 - DNA, 20 bp, Artificial Sequence
  chemically synthesized
gataaagcaaggatgggaga

SEQ ID NO: 32433 - DNA, 20 bp, Artificial Sequence
  chemically synthesized
tttagggtataatacacgca

SEQ ID NO: 32434 - DNA, 20 bp, Artificial Sequence
  chemically synthesized
atacacgcatcagaatgccc

SEQ ID NO: 32435 - DNA, 20 bp, Artificial Sequence
  chemically synthesized
ccaatagaacttaacaaaga

SEQ ID NO: 32436 - DNA, 20 bp, Artificial Sequence
  chemically synthesized
ataaaaaaaaaaataaaaac

SEQ ID NO: 32437 - DNA, 20 bp, Artificial Sequence
  chemically synthesized
aaacagctttcattacagga

SEQ ID NO: 32438 - DNA, 20 bp, Artificial Sequence
  chemically synthesized
catttaattcaaataccatt

SEQ ID NO: 32439 - DNA, 20 bp, Artificial Sequence
  chemically synthesized
tcaaataccattctagaaat

SEQ ID NO: 32440 - DNA, 20 bp, Artificial Sequence
  chemically synthesized
gagcggtgtgtatccaaggc

SEQ ID NO: 32441 - DNA, 20 bp, Artificial Sequence
  chemically synthesized
caacctctgtatctctgatt

SEQ ID NO: 32442 - DNA, 20 bp, Artificial Sequence
  chemically synthesized
gcagatgctagcttaataaa

SEQ ID NO: 32443 - DNA, 20 bp, Artificial Sequence
  chemically synthesized
aatagcacacagtgtatgga

SEQ ID NO: 32444 - DNA, 20 bp, Artificial Sequence
  chemically synthesized
aattctttctcttctttttt

SEQ ID NO: 32445 - DNA, 20 bp, Artificial Sequence
  chemically synthesized
tcacatttaaatgcaagtct

SEQ ID NO: 32446 - DNA, 20 bp, Artificial Sequence
  chemically synthesized
tttttaggtagccattgttg

SEQ ID NO: 32447 - DNA, 20 bp, Artificial Sequence
  chemically synthesized
attgttgtgagaaatacaat

SEQ ID NO: 32448 - DNA, 20 bp, Artificial Sequence
  chemically synthesized
aagctacaagtttataacaa

SEQ ID NO: 32449 - DNA, 20 bp, Artificial Sequence
  chemically synthesized
tcatattttaaaaccaaatg

SEQ ID NO: 32450 - DNA, 20 bp, Artificial Sequence
  chemically synthesized
aactgtacatgatatgtatt

SEQ ID NO: 32451 - DNA, 20 bp, Artificial Sequence
  chemically synthesized
aacatgtaaattattgcaca

SEQ ID NO: 32452 - DNA, 20 bp, Artificial Sequence
  chemically synthesized
ggaaaaaaaaaaaaaaggaa

SEQ ID NO: 32453 - DNA, 20 bp, Artificial Sequence
  chemically synthesized
aaaaaaaaaggaaaaagaaa

SEQ ID NO: 32454 - DNA, 20 bp, Artificial Sequence
  chemically synthesized
aaaggaaaaagaaaaaagaa

SEQ ID NO: 32455 - DNA, 20 bp, Artificial Sequence
  chemically synthesized
aaaagaaaaaagaaaaagaa

SEQ ID NO: 32456 - DNA, 20 bp, Artificial Sequence
  chemically synthesized
tttgtttaaatcacatggga

SEQ ID NO: 32457 - DNA, 20 bp, Artificial Sequence
  chemically synthesized
gccagctctctaagtctcct

SEQ ID NO: 32458 - DNA, 20 bp, Artificial Sequence
  chemically synthesized
agtgttctgtgcgtgttgca

SEQ ID NO: 32459 - DNA, 20 bp, Artificial Sequence
  chemically synthesized
tcctgccattaaactcagtt

SEQ ID NO: 32460 - DNA, 20 bp, Artificial Sequence
  chemically synthesized
ttttatatccaatccccaaa

SEQ ID NO: 32461 - DNA, 20 bp, Artificial Sequence
  chemically synthesized
tctgtttcctccttgttaag

SEQ ID NO: 32462 - DNA, 20 bp, Artificial Sequence
  chemically synthesized
gggacgtccatttttatctc

SEQ ID NO: 32463 - DNA, 20 bp, Artificial Sequence
  chemically synthesized
aagaatgtttaaaaaatctg

SEQ ID NO: 32464 - DNA, 20 bp, Artificial Sequence
  chemically synthesized
cgccatgacaggcagcaggc

SEQ ID NO: 32465 - DNA, 20 bp, Artificial Sequence
  chemically synthesized
ggctgggactcagctccagt

SEQ ID NO: 32466 - DNA, 20 bp, Artificial Sequence
  chemically synthesized
gggactcagctccagttgag

SEQ ID NO: 32467 - DNA, 20 bp, Artificial Sequence
  chemically synthesized
cagctccagttgagaaagaa

SEQ ID NO: 32468 - DNA, 20 bp, Artificial Sequence
  chemically synthesized
tggtagccaaaggacgagga

SEQ ID NO: 32469 - DNA, 20 bp, Artificial Sequence
  chemically synthesized
aaaaagccttaaaatataac

SEQ ID NO: 32470 - DNA, 20 bp, Artificial Sequence
  chemically synthesized
tctaccagggaggttaagag

SEQ ID NO: 32471 - DNA, 20 bp, Artificial Sequence
  chemically synthesized
tgatgcctccatttagcaag

SEQ ID NO: 32472 - DNA, 20 bp, Artificial Sequence
  chemically synthesized
gcctccatttagcaagtcag

SEQ ID NO: 32473 - DNA, 20 bp, Artificial Sequence
  chemically synthesized
atgtggaagggggaaaaaag

SEQ ID NO: 32474 - DNA, 20 bp, Artificial Sequence
  chemically synthesized
aaaaaggcagaaagattttg

SEQ ID NO: 32475 - DNA, 20 bp, Artificial Sequence
  chemically synthesized
tcctttcaaaaaggcttaaa

SEQ ID NO: 32476 - DNA, 20 bp, Artificial Sequence
  chemically synthesized
tctctctcatacatcaggtc

SEQ ID NO: 32477 - DNA, 20 bp, Artificial Sequence
  chemically synthesized
ttcataacatctttgatgat

SEQ ID NO: 32478 - DNA, 20 bp, Artificial Sequence
  chemically synthesized
gagcataaaaacagtacctg

SEQ ID NO: 32479 - DNA, 20 bp, Artificial Sequence
  chemically synthesized
acccagccagcatgcaggga

SEQ ID NO: 32480 - DNA, 20 bp, Artificial Sequence
  chemically synthesized
attttctaaaacagtatctt

SEQ ID NO: 32481 - DNA, 20 bp, Artificial Sequence
  chemically synthesized
tgcatttttctctaaaacca

SEQ ID NO: 32482 - DNA, 20 bp, Artificial Sequence
  chemically synthesized
gctcccagcctccagtgagg

SEQ ID NO: 32483 - DNA, 20 bp, Artificial Sequence
  chemically synthesized
ttaaaaagtaagggcaattt

SEQ ID NO: 32484 - DNA, 20 bp, Artificial Sequence
  chemically synthesized
tatacacatggacatttgta

SEQ ID NO: 32485 - DNA, 20 bp, Artificial Sequence
  chemically synthesized
agtgcagaagtttatctgtg

SEQ ID NO: 32486 - DNA, 20 bp, Artificial Sequence
  chemically synthesized
ggactgagctgggccatact

SEQ ID NO: 32487 - DNA, 20 bp, Artificial Sequence
  chemically synthesized
cattccaataatgccagcac

SEQ ID NO: 32488 - DNA, 20 bp, Artificial Sequence
  chemically synthesized
tgattggggagggcgggaga

SEQ ID NO: 32489 - DNA, 20 bp, Artificial Sequence
  chemically synthesized
tttgtcatggtatttttcaa

SEQ ID NO: 32490 - DNA, 20 bp, Artificial Sequence
  chemically synthesized
gtatttttcaatgagaaatc

SEQ ID NO: 32491 - DNA, 20 bp, Artificial Sequence
  chemically synthesized
gtgcttcagcaggcctccag

SEQ ID NO: 32492 - DNA, 20 bp, Artificial Sequence
  chemically synthesized
agatggggaaactgaggcca

SEQ ID NO: 32493 - DNA, 20 bp, Artificial Sequence
  chemically synthesized
gattaaccacaatgtgaaga

SEQ ID NO: 32494 - DNA, 20 bp, Artificial Sequence
  chemically synthesized
cctctacctctgcttcccct

SEQ ID NO: 32495 - DNA, 20 bp, Artificial Sequence
  chemically synthesized
agcctaagaagctatttact

SEQ ID NO: 32496 - DNA, 20 bp, Artificial Sequence
  chemically synthesized
accacctcagacttactgaa

SEQ ID NO: 32497 - DNA, 20 bp, Artificial Sequence
  chemically synthesized
cagtatttccacttggggcc

SEQ ID NO: 32498 - DNA, 20 bp, Artificial Sequence
  chemically synthesized
ttcaccctgggtcttcaaaa

SEQ ID NO: 32499 - DNA, 20 bp, Artificial Sequence
  chemically synthesized
aaatcgcactctcttttgtt

SEQ ID NO: 32500 - DNA, 20 bp, Artificial Sequence
  chemically synthesized
aagtgtattctgcaaaaaca

SEQ ID NO: 32501 - DNA, 20 bp, Artificial Sequence
  chemically synthesized
ataattatagacactacaat

SEQ ID NO: 32502 - DNA, 20 bp, Artificial Sequence
  chemically synthesized
gaataggatggtacttaaaa

SEQ ID NO: 32503 - DNA, 20 bp, Artificial Sequence
  chemically synthesized
ttacactttaagcttttgcc

SEQ ID NO: 32504 - DNA, 20 bp, Artificial Sequence
  chemically synthesized
ctagccgctgtgggcagtac

SEQ ID NO: 32505 - DNA, 20 bp, Artificial Sequence
  chemically synthesized
cccacagcaggcttcattta

SEQ ID NO: 32506 - DNA, 20 bp, Artificial Sequence
  chemically synthesized
gtagaaaaggtaaggcctgc

SEQ ID NO: 32507 - DNA, 20 bp, Artificial Sequence
  chemically synthesized
agaaattgctctacccccat

SEQ ID NO: 32508 - DNA, 20 bp, Artificial Sequence
  chemically synthesized
tgctatggaaattcaaagga

SEQ ID NO: 32509 - DNA, 20 bp, Artificial Sequence
  chemically synthesized
gagttaaacctggagagcca

SEQ ID NO: 32510 - DNA, 20 bp, Artificial Sequence
  chemically synthesized
agaaaggatatcctagataa

SEQ ID NO: 32511 - DNA, 20 bp, Artificial Sequence
  chemically synthesized
attttcaacaaatgactgtg

SEQ ID NO: 32512 - DNA, 20 bp, Artificial Sequence
  chemically synthesized
actgaaggtcagagaaccag

SEQ ID NO: 32513 - DNA, 20 bp, Artificial Sequence
  chemically synthesized
caaaggcacacacaggactc

SEQ ID NO: 32514 - DNA, 20 bp, Artificial Sequence
  chemically synthesized
agtgggggagctcactattt

SEQ ID NO: 32515 - DNA, 20 bp, Artificial Sequence
  chemically synthesized
cgatgcctccctgccccact

SEQ ID NO: 32516 - DNA, 20 bp, Artificial Sequence
  chemically synthesized
ccctgccccactcgagaaat

SEQ ID NO: 32517 - DNA, 20 bp, Artificial Sequence
  chemically synthesized
ggctgtgaagatggatgcga

SEQ ID NO: 32518 - DNA, 20 bp, Artificial Sequence
  chemically synthesized
attatcatttcgatcggtct

SEQ ID NO: 32519 - DNA, 20 bp, Artificial Sequence
  chemically synthesized
cgatcggtcttgagaaaata

SEQ ID NO: 32520 - DNA, 20 bp, Artificial Sequence
  chemically synthesized
agaaaatactagaataagct

SEQ ID NO: 32521 - DNA, 20 bp, Artificial Sequence
  chemically synthesized
caaggggagggatagcatta

SEQ ID NO: 32522 - DNA, 20 bp, Artificial Sequence
  chemically synthesized
gaacttagagtaaaataaat

SEQ ID NO: 32523 - DNA, 20 bp, Artificial Sequence
  chemically synthesized
ttagagtaaaataaataaag

SEQ ID NO: 32524 - DNA, 20 bp, Artificial Sequence
  chemically synthesized
agtaaaataaataaagaaag

SEQ ID NO: 32525 - DNA, 20 bp, Artificial Sequence
  chemically synthesized
aaataaataaagaaagaaag

SEQ ID NO: 32526 - DNA, 20 bp, Artificial Sequence
  chemically synthesized
aaataaagaaagaaagaaag

SEQ ID NO: 32527 - DNA, 20 bp, Artificial Sequence
  chemically synthesized
actgccacctcagggccgcg

SEQ ID NO: 32528 - DNA, 20 bp, Artificial Sequence
  chemically synthesized
gaaccagaactggccattct

SEQ ID NO: 32529 - DNA, 20 bp, Artificial Sequence
  chemically synthesized
tatggttaacacagagctgc

SEQ ID NO: 32530 - DNA, 20 bp, Artificial Sequence
  chemically synthesized
catgacggcaagtccttctt

SEQ ID NO: 32531 - DNA, 20 bp, Artificial Sequence
  chemically synthesized
tcaggtctactaggaacagg

SEQ ID NO: 32532 - DNA, 20 bp, Artificial Sequence
  chemically synthesized
cctcaaccttctactgctgg

SEQ ID NO: 32533 - DNA, 20 bp, Artificial Sequence
  chemically synthesized
tttgatttatggggaggagg

SEQ ID NO: 32534 - DNA, 20 bp, Artificial Sequence
  chemically synthesized
gcacccccatctctgtccca

SEQ ID NO: 32535 - DNA, 20 bp, Artificial Sequence
  chemically synthesized
agtggtggccgcagctcagg

SEQ ID NO: 32536 - DNA, 20 bp, Artificial Sequence
  chemically synthesized
acatgctggaaggcaagaag

SEQ ID NO: 32537 - DNA, 20 bp, Artificial Sequence
  chemically synthesized
cctggctaagagcaactgca

SEQ ID NO: 32538 - DNA, 20 bp, Artificial Sequence
  chemically synthesized
ctgttctagtcctgctgtca

SEQ ID NO: 32539 - DNA, 20 bp, Artificial Sequence
  chemically synthesized
gctgatacatggagcagagc

SEQ ID NO: 32540 - DNA, 20 bp, Artificial Sequence
  chemically synthesized
agccgagaatatccggaact

SEQ ID NO: 32541 - DNA, 20 bp, Artificial Sequence
  chemically synthesized
tatccggaactggagaaaag

SEQ ID NO: 32542 - DNA, 20 bp, Artificial Sequence
  chemically synthesized
tttaaatccacaggaagcaa

SEQ ID NO: 32543 - DNA, 20 bp, Artificial Sequence
  chemically synthesized
attatacagtgccttgcttt

SEQ ID NO: 32544 - DNA, 20 bp, Artificial Sequence
  chemically synthesized
aaatctttctttcaaacatt

SEQ ID NO: 32545 - DNA, 20 bp, Artificial Sequence
  chemically synthesized
atttactgataaaggcactg

SEQ ID NO: 32546 - DNA, 20 bp, Artificial Sequence
  chemically synthesized
ttactttgcgagatgtttga

SEQ ID NO: 32547 - DNA, 20 bp, Artificial Sequence
  chemically synthesized
ggatagtgtgggtagttgga

SEQ ID NO: 32548 - DNA, 20 bp, Artificial Sequence
  chemically synthesized
tctaatatatatcccgtggt

SEQ ID NO: 32549 - DNA, 20 bp, Artificial Sequence
  chemically synthesized
cctgtggaatgctgcagttg

SEQ ID NO: 32550 - DNA, 20 bp, Artificial Sequence
  chemically synthesized
tgcttcagcagacaacaaag

SEQ ID NO: 32551 - DNA, 20 bp, Artificial Sequence
  chemically synthesized
atttagagctcctctgttaa

SEQ ID NO: 32552 - DNA, 20 bp, Artificial Sequence
  chemically synthesized
ttgtccagactctgacagtg

SEQ ID NO: 32553 - DNA, 20 bp, Artificial Sequence
  chemically synthesized
gtcaaaaacagccacattca

SEQ ID NO: 32554 - DNA, 20 bp, Artificial Sequence
  chemically synthesized
gaaacagcagtgattgtgga

SEQ ID NO: 32555 - DNA, 20 bp, Artificial Sequence
  chemically synthesized
ggaggggggcaaaaaaagaa

SEQ ID NO: 32556 - DNA, 20 bp, Artificial Sequence
  chemically synthesized
gagaggaaaggttaaccact

SEQ ID NO: 32557 - DNA, 20 bp, Artificial Sequence
  chemically synthesized
ttttatcaagttcaagccaa

SEQ ID NO: 32558 - DNA, 20 bp, Artificial Sequence
  chemically synthesized
accaccaaggcatagccttg

SEQ ID NO: 32559 - DNA, 20 bp, Artificial Sequence
  chemically synthesized
gtggagcaaggccactccag

SEQ ID NO: 32560 - DNA, 20 bp, Artificial Sequence
  chemically synthesized
aagccaatcaactcatttaa

SEQ ID NO: 32561 - DNA, 20 bp, Artificial Sequence
  chemically synthesized
ctgtcccagcaacctagata

SEQ ID NO: 32562 - DNA, 20 bp, Artificial Sequence
  chemically synthesized
gtggaccatggctcctttcc

SEQ ID NO: 32563 - DNA, 20 bp, Artificial Sequence
  chemically synthesized
tttgcctccttctcacacaa

SEQ ID NO: 32564 - DNA, 20 bp, Artificial Sequence
  chemically synthesized
tgtgtagttaagtactgaag

SEQ ID NO: 32565 - DNA, 20 bp, Artificial Sequence
  chemically synthesized
aagtactgaagtgagaaatt

SEQ ID NO: 32566 - DNA, 20 bp, Artificial Sequence
  chemically synthesized
cctaccaatctaagatactg

SEQ ID NO: 32567 - DNA, 20 bp, Artificial Sequence
  chemically synthesized
agaaaatggctacatcaggc

SEQ ID NO: 32568 - DNA, 20 bp, Artificial Sequence
  chemically synthesized
ggctttgagatgaataatgc

SEQ ID NO: 32569 - DNA, 20 bp, Artificial Sequence
  chemically synthesized
cagagtctgagcccacagtc

SEQ ID NO: 32570 - DNA, 20 bp, Artificial Sequence
  chemically synthesized
atttgcccttttccctgcta

SEQ ID NO: 32571 - DNA, 20 bp, Artificial Sequence
  chemically synthesized
attttaagattactattcta

SEQ ID NO: 32572 - DNA, 20 bp, Artificial Sequence
  chemically synthesized
gccacacaccgagagtggaa

SEQ ID NO: 32573 - DNA, 20 bp, Artificial Sequence
  chemically synthesized
cactcccttatttatgagca

SEQ ID NO: 32574 - DNA, 20 bp, Artificial Sequence
  chemically synthesized
ccattctatctaaggaagct

SEQ ID NO: 32575 - DNA, 20 bp, Artificial Sequence
  chemically synthesized
cctttaatgggaaatctgga

SEQ ID NO: 32576 - DNA, 20 bp, Artificial Sequence
  chemically synthesized
ctgacttggttttcccaact

SEQ ID NO: 32577 - DNA, 20 bp, Artificial Sequence
  chemically synthesized
ttacaatttattctcattat

SEQ ID NO: 32578 - DNA, 20 bp, Artificial Sequence
  chemically synthesized
ttttaactgaacaatgtctc

SEQ ID NO: 32579 - DNA, 20 bp, Artificial Sequence
  chemically synthesized
acaggattacagcaaatgtg

SEQ ID NO: 32580 - DNA, 20 bp, Artificial Sequence
  chemically synthesized
atagtttgcttcccccaatg

SEQ ID NO: 32581 - DNA, 20 bp, Artificial Sequence
  chemically synthesized
cccaaaacaaatttatcttc

SEQ ID NO: 32582 - DNA, 20 bp, Artificial Sequence
  chemically synthesized
tttgaccagcacctatctca

SEQ ID NO: 32583 - DNA, 20 bp, Artificial Sequence
  chemically synthesized
aagcacctgaaggaagctga

SEQ ID NO: 32584 - DNA, 20 bp, Artificial Sequence
  chemically synthesized
ctcggcatgaagggtataac

SEQ ID NO: 32585 - DNA, 20 bp, Artificial Sequence
  chemically synthesized
ctacctagtcaccttagcaa

SEQ ID NO: 32586 - DNA, 20 bp, Artificial Sequence
  chemically synthesized
aaatctccgtctcaccaaaa

SEQ ID NO: 32587 - DNA, 20 bp, Artificial Sequence
  chemically synthesized
cgtctcaccaaaaaaagaaa

SEQ ID NO: 32588 - DNA, 20 bp, Artificial Sequence
  chemically synthesized
agaaaaaagaaaaaaaaaaa

SEQ ID NO: 32589 - DNA, 20 bp, Artificial Sequence
  chemically synthesized
aaaagaaaaaaaaaaaaaag

SEQ ID NO: 32590 - DNA, 20 bp, Artificial Sequence
  chemically synthesized
tccttagcacccaaataggt

SEQ ID NO: 32591 - DNA, 20 bp, Artificial Sequence
  chemically synthesized
aagaccagcctgggcaacag

SEQ ID NO: 32592 - DNA, 20 bp, Artificial Sequence
  chemically synthesized
acaactaattgggctaatgt

SEQ ID NO: 32593 - DNA, 20 bp, Artificial Sequence
  chemically synthesized
agaataaatgtatttctagg

SEQ ID NO: 32594 - DNA, 20 bp, Artificial Sequence
  chemically synthesized
ttaccaacttctataaaatc

SEQ ID NO: 32595 - DNA, 20 bp, Artificial Sequence
  chemically synthesized
tacagaacacgtccaccagt

SEQ ID NO: 32596 - DNA, 20 bp, Artificial Sequence
  chemically synthesized
cccacctaccaccacagtgt

SEQ ID NO: 32597 - DNA, 20 bp, Artificial Sequence
  chemically synthesized
ccaccacagtgttgagaatt

SEQ ID NO: 32598 - DNA, 20 bp, Artificial Sequence
  chemically synthesized
tgtttaatttcttccacaga

SEQ ID NO: 32599 - DNA, 20 bp, Artificial Sequence
  chemically synthesized
atctaaggcatttcgagaac

SEQ ID NO: 32600 - DNA, 20 bp, Artificial Sequence
  chemically synthesized
caaatgtcatcctattccga

SEQ ID NO: 32601 - DNA, 20 bp, Artificial Sequence
  chemically synthesized
tcctaagagcccccactagc

SEQ ID NO: 32602 - DNA, 20 bp, Artificial Sequence
  chemically synthesized
taccttgccaaaggccttgg

SEQ ID NO: 32603 - DNA, 20 bp, Artificial Sequence
  chemically synthesized
cttagacaacaatgcaaggg

SEQ ID NO: 32604 - DNA, 20 bp, Artificial Sequence
  chemically synthesized
caatgcaagggggagaaact

SEQ ID NO: 32605 - DNA, 20 bp, Artificial Sequence
  chemically synthesized
ccactactggcaataaacag

SEQ ID NO: 32606 - DNA, 20 bp, Artificial Sequence
  chemically synthesized
tgaggcacacctacattact

SEQ ID NO: 32607 - DNA, 20 bp, Artificial Sequence
  chemically synthesized
tatttattagttacacctca

SEQ ID NO: 32608 - DNA, 20 bp, Artificial Sequence
  chemically synthesized
ccaattcctagtttgggtca

SEQ ID NO: 32609 - DNA, 20 bp, Artificial Sequence
  chemically synthesized
aaaagggagaggaaaaagga

SEQ ID NO: 32610 - DNA, 20 bp, Artificial Sequence
  chemically synthesized
acaaattatttcattcccat

SEQ ID NO: 32611 - DNA, 20 bp, Artificial Sequence
  chemically synthesized
tagctattttttaaaacacc

SEQ ID NO: 32612 - DNA, 20 bp, Artificial Sequence
  chemically synthesized
agggaattgttcatgaaatc

SEQ ID NO: 32613 - DNA, 20 bp, Artificial Sequence
  chemically synthesized
tggaagtccaatacacgttt

SEQ ID NO: 32614 - DNA, 20 bp, Artificial Sequence
  chemically synthesized
ctgtaaacacttaatgagct

SEQ ID NO: 32615 - DNA, 20 bp, Artificial Sequence
  chemically synthesized
gtttgatcaagtcagatttt

SEQ ID NO: 32616 - DNA, 20 bp, Artificial Sequence
  chemically synthesized
gtctttaagttaatcaatcc

SEQ ID NO: 32617 - DNA, 20 bp, Artificial Sequence
  chemically synthesized
cccctaacatcaggaatcag

SEQ ID NO: 32618 - DNA, 20 bp, Artificial Sequence
  chemically synthesized
ccctttgctgatgatccagt

SEQ ID NO: 32619 - DNA, 20 bp, Artificial Sequence
  chemically synthesized
tggggtgagtcaaaagtctg

SEQ ID NO: 32620 - DNA, 20 bp, Artificial Sequence
  chemically synthesized
ccccatacccacttcccttc

SEQ ID NO: 32621 - DNA, 20 bp, Artificial Sequence
  chemically synthesized
aggcagatgaggtgacaagg

SEQ ID NO: 32622 - DNA, 20 bp, Artificial Sequence
  chemically synthesized
cagatgactgtccaactcat

SEQ ID NO: 32623 - DNA, 20 bp, Artificial Sequence
  chemically synthesized
cccacacaggcatccaaagg

SEQ ID NO: 32624 - DNA, 20 bp, Artificial Sequence
  chemically synthesized
agggaaggaaggagagcccc

SEQ ID NO: 32625 - DNA, 20 bp, Artificial Sequence
  chemically synthesized
gcccctgagaaaaaatggca

SEQ ID NO: 32626 - DNA, 20 bp, Artificial Sequence
  chemically synthesized
cacttatttatattattgtt

SEQ ID NO: 32627 - DNA, 20 bp, Artificial Sequence
  chemically synthesized
aacaatgcaactcaagacta

SEQ ID NO: 32628 - DNA, 20 bp, Artificial Sequence
  chemically synthesized
agcctaataaaactgcacag

SEQ ID NO: 32629 - DNA, 20 bp, Artificial Sequence
  chemically synthesized
ggatctcaggtattgctcct

SEQ ID NO: 32630 - DNA, 20 bp, Artificial Sequence
  chemically synthesized
ctaatattaaaatatgaatt

SEQ ID NO: 32631 - DNA, 20 bp, Artificial Sequence
  chemically synthesized
gtgaaaagagattttttaaa

SEQ ID NO: 32632 - DNA, 20 bp, Artificial Sequence
  chemically synthesized
aactgttttcaatcatcatc

SEQ ID NO: 32633 - DNA, 20 bp, Artificial Sequence
  chemically synthesized
gatcatggtagcacagtaga

SEQ ID NO: 32634 - DNA, 20 bp, Artificial Sequence
  chemically synthesized
gagcactcaattggtgatca

SEQ ID NO: 32635 - DNA, 20 bp, Artificial Sequence
  chemically synthesized
ataaattctagtcctgtcac

SEQ ID NO: 32636 - DNA, 20 bp, Artificial Sequence
  chemically synthesized
ggggaggtacttaatctcta

SEQ ID NO: 32637 - DNA, 20 bp, Artificial Sequence
  chemically synthesized
ctggggaaggagtgaaccag

SEQ ID NO: 32638 - DNA, 20 bp, Artificial Sequence
  chemically synthesized
ggctctgaccaggtggaaag

SEQ ID NO: 32639 - DNA, 20 bp, Artificial Sequence
  chemically synthesized
gtccaaccaggagacccaag

SEQ ID NO: 32640 - DNA, 20 bp, Artificial Sequence
  chemically synthesized
tattggctgcttcgttgatt

SEQ ID NO: 32641 - DNA, 20 bp, Artificial Sequence
  chemically synthesized
cttcgttgattctagaaaaa

SEQ ID NO: 32642 - DNA, 20 bp, Artificial Sequence
  chemically synthesized
attctagaaaaaaaagaaag

SEQ ID NO: 32643 - DNA, 20 bp, Artificial Sequence
  chemically synthesized
ggagctcagcatcgggacac

SEQ ID NO: 32644 - DNA, 20 bp, Artificial Sequence
  chemically synthesized
tccaaggcaaaaagcaaata

SEQ ID NO: 32645 - DNA, 20 bp, Artificial Sequence
  chemically synthesized
gaagtataaggagttctgga

SEQ ID NO: 32646 - DNA, 20 bp, Artificial Sequence
  chemically synthesized
caaaaaagctagaggatcgg

SEQ ID NO: 32647 - DNA, 20 bp, Artificial Sequence
  chemically synthesized
agaaaagaagggacggatac

SEQ ID NO: 32648 - DNA, 20 bp, Artificial Sequence
  chemically synthesized
ctctacctgggtctatcatt

SEQ ID NO: 32649 - DNA, 20 bp, Artificial Sequence
  chemically synthesized
ccctcccaaaacaacggtgg

SEQ ID NO: 32650 - DNA, 20 bp, Artificial Sequence
  chemically synthesized
gccatcctttgacacccacc

SEQ ID NO: 32651 - DNA, 20 bp, Artificial Sequence
  chemically synthesized
ccatagaaatcacagagagg

SEQ ID NO: 32652 - DNA, 20 bp, Artificial Sequence
  chemically synthesized
taatgataaaggcagctcac

SEQ ID NO: 32653 - DNA, 20 bp, Artificial Sequence
  chemically synthesized
ttaaatgctcttctagctct

SEQ ID NO: 32654 - DNA, 20 bp, Artificial Sequence
  chemically synthesized
agaatgcaaagcaagacaag

SEQ ID NO: 32655 - DNA, 20 bp, Artificial Sequence
  chemically synthesized
cccttgcctttcttgaaaag

SEQ ID NO: 32656 - DNA, 20 bp, Artificial Sequence
  chemically synthesized
tgaagctgcttccgttcaag

SEQ ID NO: 32657 - DNA, 20 bp, Artificial Sequence
  chemically synthesized
tcagatgttttggagtctct

SEQ ID NO: 32658 - DNA, 20 bp, Artificial Sequence
  chemically synthesized
cagcttttctaagacatatg

SEQ ID NO: 32659 - DNA, 20 bp, Artificial Sequence
  chemically synthesized
tgtcttccaaacagcacaag

SEQ ID NO: 32660 - DNA, 20 bp, Artificial Sequence
  chemically synthesized
acgacagatgcaaacacaaa

SEQ ID NO: 32661 - DNA, 20 bp, Artificial Sequence
  chemically synthesized
cagagaagcttcctgggtgt

SEQ ID NO: 32662 - DNA, 20 bp, Artificial Sequence
  chemically synthesized
gccaaagagaagcgttgcta

SEQ ID NO: 32663 - DNA, 20 bp, Artificial Sequence
  chemically synthesized
aagcctagaggacctcctcc

SEQ ID NO: 32664 - DNA, 20 bp, Artificial Sequence
  chemically synthesized
tccaaagaaaagtggctcag

SEQ ID NO: 32665 - DNA, 20 bp, Artificial Sequence
  chemically synthesized
tctggtctaaagattcaagc

SEQ ID NO: 32666 - DNA, 20 bp, Artificial Sequence
  chemically synthesized
taaagattcaagctgagaaa

SEQ ID NO: 32667 - DNA, 20 bp, Artificial Sequence
  chemically synthesized
cttggatgttatgaggattc

SEQ ID NO: 32668 - DNA, 20 bp, Artificial Sequence
  chemically synthesized
atgtgccagcccacttcttt

SEQ ID NO: 32669 - DNA, 20 bp, Artificial Sequence
  chemically synthesized
aagaggacaacggatttccg

SEQ ID NO: 32670 - DNA, 20 bp, Artificial Sequence
  chemically synthesized
agcagagccacacggacgtc

SEQ ID NO: 32671 - DNA, 20 bp, Artificial Sequence
  chemically synthesized
tcgatggtctacctgagacc

SEQ ID NO: 32672 - DNA, 20 bp, Artificial Sequence
  chemically synthesized
ctgagaaaacaaacgaaggg

SEQ ID NO: 32673 - DNA, 20 bp, Artificial Sequence
  chemically synthesized
caaacgaagggaaagaaatg

SEQ ID NO: 32674 - DNA, 20 bp, Artificial Sequence
  chemically synthesized
gaacaaaaagattaggagga

SEQ ID NO: 32675 - DNA, 20 bp, Artificial Sequence
  chemically synthesized
gttttcccttcgaagtatgt

SEQ ID NO: 32676 - DNA, 20 bp, Artificial Sequence
  chemically synthesized
catcttctgtctctccccag

SEQ ID NO: 32677 - DNA, 20 bp, Artificial Sequence
  chemically synthesized
ctaaggcttaggtggagcct

SEQ ID NO: 32678 - DNA, 20 bp, Artificial Sequence
  chemically synthesized
cctgagagcccgggatgcag

SEQ ID NO: 32679 - DNA, 20 bp, Artificial Sequence
  chemically synthesized
gtcaacgtattttccaagcc

SEQ ID NO: 32680 - DNA, 20 bp, Artificial Sequence
  chemically synthesized
aatgtaggtgttcaaaggca

SEQ ID NO: 32681 - DNA, 20 bp, Artificial Sequence
  chemically synthesized
ccgatgcgctgatgtggaac

SEQ ID NO: 32682 - DNA, 20 bp, Artificial Sequence
  chemically synthesized
acacacactcgcctctcaaa

SEQ ID NO: 32683 - DNA, 20 bp, Artificial Sequence
  chemically synthesized
agctctaaattatttggtct

SEQ ID NO: 32684 - DNA, 20 bp, Artificial Sequence
  chemically synthesized
catccatttggaggagacac

SEQ ID NO: 32685 - DNA, 20 bp, Artificial Sequence
  chemically synthesized
caccacctctggttaccccc

SEQ ID NO: 32686 - DNA, 20 bp, Artificial Sequence
  chemically synthesized
ggttaccccctgagaaaggc

SEQ ID NO: 32687 - DNA, 20 bp, Artificial Sequence
  chemically synthesized
cccacttgaggctgtccaca

SEQ ID NO: 32688 - DNA, 20 bp, Artificial Sequence
  chemically synthesized
atccctgatcaggactgaaa

SEQ ID NO: 32689 - DNA, 20 bp, Artificial Sequence
  chemically synthesized
gatcaggactgaaaaaagaa

SEQ ID NO: 32690 - DNA, 20 bp, Artificial Sequence
  chemically synthesized
ggagaacaagccatctgaaa

SEQ ID NO: 32691 - DNA, 20 bp, Artificial Sequence
  chemically synthesized
ctacttgggaggctgaggca

SEQ ID NO: 32692 - DNA, 20 bp, Artificial Sequence
  chemically synthesized
ttgcatacacatacactaaa

SEQ ID NO: 32693 - DNA, 20 bp, Artificial Sequence
  chemically synthesized
cacatacactaaaacagaaa

SEQ ID NO: 32694 - DNA, 20 bp, Artificial Sequence
  chemically synthesized
cagaaaaaagaaaaaaaaaa

SEQ ID NO: 32695 - DNA, 20 bp, Artificial Sequence
  chemically synthesized
aaagagagacagagagagag

SEQ ID NO: 32696 - DNA, 20 bp, Artificial Sequence
  chemically synthesized
agacaggctctagcttgttt

SEQ ID NO: 32697 - DNA, 20 bp, Artificial Sequence
  chemically synthesized
ctggcttccaggtgagcgag

SEQ ID NO: 32698 - DNA, 20 bp, Artificial Sequence
  chemically synthesized
aaaaggttataatttgagga

SEQ ID NO: 32699 - DNA, 20 bp, Artificial Sequence
  chemically synthesized
cccagagtgacacctcctcc

SEQ ID NO: 32700 - DNA, 20 bp, Artificial Sequence
  chemically synthesized
agtcaggccttcctagttac

SEQ ID NO: 32701 - DNA, 20 bp, Artificial Sequence
  chemically synthesized
ccagcccactagaaggagat

SEQ ID NO: 32702 - DNA, 20 bp, Artificial Sequence
  chemically synthesized
agcccagtgctttcaggcag

SEQ ID NO: 32703 - DNA, 20 bp, Artificial Sequence
  chemically synthesized
aggaagtgaacaagtcaatt

SEQ ID NO: 32704 - DNA, 20 bp, Artificial Sequence
  chemically synthesized
acctctcctcaccccagcac

SEQ ID NO: 32705 - DNA, 20 bp, Artificial Sequence
  chemically synthesized
ttaccgagcagtaagtgagg

SEQ ID NO: 32706 - DNA, 20 bp, Artificial Sequence
  chemically synthesized
agagaggggcacctgggatg

SEQ ID NO: 32707 - DNA, 20 bp, Artificial Sequence
  chemically synthesized
aagagtgcagacataagact

SEQ ID NO: 32708 - DNA, 20 bp, Artificial Sequence
  chemically synthesized
agcagattctaaagagaggc

SEQ ID NO: 32709 - DNA, 20 bp, Artificial Sequence
  chemically synthesized
atttaggaagaagaagtggc

SEQ ID NO: 32710 - DNA, 20 bp, Artificial Sequence
  chemically synthesized
gaagtggcggagaatggaat

SEQ ID NO: 32711 - DNA, 20 bp, Artificial Sequence
  chemically synthesized
gaccagccccgaaaaagggc

SEQ ID NO: 32712 - DNA, 20 bp, Artificial Sequence
  chemically synthesized
cagggaaaggaacaaggcaa

SEQ ID NO: 32713 - DNA, 20 bp, Artificial Sequence
  chemically synthesized
ctcttcaacaaagctccagt

SEQ ID NO: 32714 - DNA, 20 bp, Artificial Sequence
  chemically synthesized
gtgctttcttctatgattcc

SEQ ID NO: 32715 - DNA, 20 bp, Artificial Sequence
  chemically synthesized
aaacccaattttaggggagg

SEQ ID NO: 32716 - DNA, 20 bp, Artificial Sequence
  chemically synthesized
atttgcttatgcctataatc

SEQ ID NO: 32717 - DNA, 20 bp, Artificial Sequence
  chemically synthesized
tgagatttagctatcttttc

SEQ ID NO: 32718 - DNA, 20 bp, Artificial Sequence
  chemically synthesized
gcctgtcatgaagcagactc

SEQ ID NO: 32719 - DNA, 20 bp, Artificial Sequence
  chemically synthesized
aggaagcattgctctagatc

SEQ ID NO: 32720 - DNA, 20 bp, Artificial Sequence
  chemically synthesized
acaaacccagcagagaacgt

SEQ ID NO: 32721 - DNA, 20 bp, Artificial Sequence
  chemically synthesized
gagttcacttaaaagtccat

SEQ ID NO: 32722 - DNA, 20 bp, Artificial Sequence
  chemically synthesized
cacacatctctcaactcttg

SEQ ID NO: 32723 - DNA, 20 bp, Artificial Sequence
  chemically synthesized
caaatacaggcgctacaaaa

SEQ ID NO: 32724 - DNA, 20 bp, Artificial Sequence
  chemically synthesized
aaataggtgtgaaagcgggg

SEQ ID NO: 32725 - DNA, 20 bp, Artificial Sequence
  chemically synthesized
ggtgactgcactcatgctgc

SEQ ID NO: 32726 - DNA, 20 bp, Artificial Sequence
  chemically synthesized
gcctgccttctttccttaca

SEQ ID NO: 32727 - DNA, 20 bp, Artificial Sequence
  chemically synthesized
acagcagtaagttgaccact

SEQ ID NO: 32728 - DNA, 20 bp, Artificial Sequence
  chemically synthesized
gggcatgggactgtgcttat

SEQ ID NO: 32729 - DNA, 20 bp, Artificial Sequence
  chemically synthesized
tcctaaattactccaatgac

SEQ ID NO: 32730 - DNA, 20 bp, Artificial Sequence
  chemically synthesized
attctcccctctctctggca

SEQ ID NO: 32731 - DNA, 20 bp, Artificial Sequence
  chemically synthesized
ttttctgaaaattgaaaaat

SEQ ID NO: 32732 - DNA, 20 bp, Artificial Sequence
  chemically synthesized
aattcagaaagccaaagata

SEQ ID NO: 32733 - DNA, 20 bp, Artificial Sequence
  chemically synthesized
tcgcattccgtttataagaa

SEQ ID NO: 32734 - DNA, 20 bp, Artificial Sequence
  chemically synthesized
gcaagcttagccccttcttt

SEQ ID NO: 32735 - DNA, 20 bp, Artificial Sequence
  chemically synthesized
aagatattgatgtgccaaca

SEQ ID NO: 32736 - DNA, 20 bp, Artificial Sequence
  chemically synthesized
tgatgtgccaacagtagaaa

SEQ ID NO: 32737 - DNA, 20 bp, Artificial Sequence
  chemically synthesized
tagccagggctcaaatggcc

SEQ ID NO: 32738 - DNA, 20 bp, Artificial Sequence
  chemically synthesized
aagggatctctgttcttcca

SEQ ID NO: 32739 - DNA, 20 bp, Artificial Sequence
  chemically synthesized
ctctgagccaaacccttggt

SEQ ID NO: 32740 - DNA, 20 bp, Artificial Sequence
  chemically synthesized
ctcaaatactacaaaagtag

SEQ ID NO: 32741 - DNA, 20 bp, Artificial Sequence
  chemically synthesized
ataggggagttattttaaac

SEQ ID NO: 32742 - DNA, 20 bp, Artificial Sequence
  chemically synthesized
aggttcaagactgaagctgc

SEQ ID NO: 32743 - DNA, 20 bp, Artificial Sequence
  chemically synthesized
aagctgccaagaaaagcttc

SEQ ID NO: 32744 - DNA, 20 bp, Artificial Sequence
  chemically synthesized
actggaattcatttgtcttg

SEQ ID NO: 32745 - DNA, 20 bp, Artificial Sequence
  chemically synthesized
gttctcctggacggttctgc

SEQ ID NO: 32746 - DNA, 20 bp, Artificial Sequence
  chemically synthesized
accagatgcagaggcaggtc

SEQ ID NO: 32747 - DNA, 20 bp, Artificial Sequence
  chemically synthesized
ggcaacacgtgttgcaacct

SEQ ID NO: 32748 - DNA, 20 bp, Artificial Sequence
  chemically synthesized
acacgtgttgcaacctagag

SEQ ID NO: 32749 - DNA, 20 bp, Artificial Sequence
  chemically synthesized
attcattgccaggcaaaact

SEQ ID NO: 32750 - DNA, 20 bp, Artificial Sequence
  chemically synthesized
gcaaaacttgagaaatacat

SEQ ID NO: 32751 - DNA, 20 bp, Artificial Sequence
  chemically synthesized
agtaaatgaatcaccaaggc

SEQ ID NO: 32752 - DNA, 20 bp, Artificial Sequence
  chemically synthesized
acttaactagcccaaacgtt

SEQ ID NO: 32753 - DNA, 20 bp, Artificial Sequence
  chemically synthesized
agatagaagagcatgcaaaa

SEQ ID NO: 32754 - DNA, 20 bp, Artificial Sequence
  chemically synthesized
tctgagcacatgggataata

SEQ ID NO: 32755 - DNA, 20 bp, Artificial Sequence
  chemically synthesized
tttgctggacagtgtggaaa

SEQ ID NO: 32756 - DNA, 20 bp, Artificial Sequence
  chemically synthesized
tatgtaggctatgtccatac

SEQ ID NO: 32757 - DNA, 20 bp, Artificial Sequence
  chemically synthesized
ttgcccaaaaaagcaaactt

SEQ ID NO: 32758 - DNA, 20 bp, Artificial Sequence
  chemically synthesized
gcttgcaacaattaaaagat

SEQ ID NO: 32759 - DNA, 20 bp, Artificial Sequence
  chemically synthesized
cttccatctttgaggcaaat

SEQ ID NO: 32760 - DNA, 20 bp, Artificial Sequence
  chemically synthesized
tagattccaaaaaatagcag

SEQ ID NO: 32761 - DNA, 20 bp, Artificial Sequence
  chemically synthesized
atggcagcagggctgggaaa

SEQ ID NO: 32762 - DNA, 20 bp, Artificial Sequence
  chemically synthesized
aaatctagatttgatcaaat

SEQ ID NO: 32763 - DNA, 20 bp, Artificial Sequence
  chemically synthesized
aactggtgatttgatcaaat

SEQ ID NO: 32764 - DNA, 20 bp, Artificial Sequence
  chemically synthesized
ttttgggatgatgtgttcta

SEQ ID NO: 32765 - DNA, 20 bp, Artificial Sequence
  chemically synthesized
gacatttcaatcaggttgaa

SEQ ID NO: 32766 - DNA, 20 bp, Artificial Sequence
  chemically synthesized
tttgtgcttacctaacgaag

SEQ ID NO: 32767 - DNA, 20 bp, Artificial Sequence
  chemically synthesized
cttacctaacgaaggcagaa

SEQ ID NO: 32768 - DNA, 20 bp, Artificial Sequence
  chemically synthesized
taacgaaggcagaaacagaa

SEQ ID NO: 32769 - DNA, 20 bp, Artificial Sequence
  chemically synthesized
aggcagaaacagaaaaagaa

SEQ ID NO: 32770 - DNA, 20 bp, Artificial Sequence
  chemically synthesized
cctggccaatttgaaaggat

SEQ ID NO: 32771 - DNA, 20 bp, Artificial Sequence
  chemically synthesized
cttaccacagccttgttcag

SEQ ID NO: 32772 - DNA, 20 bp, Artificial Sequence
  chemically synthesized
ccccccagaacccatcgtcc

SEQ ID NO: 32773 - DNA, 20 bp, Artificial Sequence
  chemically synthesized
agttgttgcctggcaccgct

SEQ ID NO: 32774 - DNA, 20 bp, Artificial Sequence
  chemically synthesized
cccaaccagctagcagtaac

SEQ ID NO: 32775 - DNA, 20 bp, Artificial Sequence
  chemically synthesized
cacccacgagggagctgcca

SEQ ID NO: 32776 - DNA, 20 bp, Artificial Sequence
  chemically synthesized
atctgcccaaggttgcacaa

SEQ ID NO: 32777 - DNA, 20 bp, Artificial Sequence
  chemically synthesized
tttcgtgtaatcaaagagaa

SEQ ID NO: 32778 - DNA, 20 bp, Artificial Sequence
  chemically synthesized
tgtaatcaaagagaagaaga

SEQ ID NO: 32779 - DNA, 20 bp, Artificial Sequence
  chemically synthesized
ttcccagtttttatttgcta

SEQ ID NO: 32780 - DNA, 20 bp, Artificial Sequence
  chemically synthesized
acaggaagaggccaagaaga

SEQ ID NO: 32781 - DNA, 20 bp, Artificial Sequence
  chemically synthesized
acagtcagcaggtatttaaa

SEQ ID NO: 32782 - DNA, 20 bp, Artificial Sequence
  chemically synthesized
tcagcaggtatttaaaaaag

SEQ ID NO: 32783 - DNA, 20 bp, Artificial Sequence
  chemically synthesized
caggtatttaaaaaagaaag

SEQ ID NO: 32784 - DNA, 20 bp, Artificial Sequence
  chemically synthesized
ttaagcccctcctggcaacc

SEQ ID NO: 32785 - DNA, 20 bp, Artificial Sequence
  chemically synthesized
tcctggcaacctcagaaatt

SEQ ID NO: 32786 - DNA, 20 bp, Artificial Sequence
  chemically synthesized
acacaaatcccgttggaccc

SEQ ID NO: 32787 - DNA, 20 bp, Artificial Sequence
  chemically synthesized
cctctcacactaacactaaa

SEQ ID NO: 32788 - DNA, 20 bp, Artificial Sequence
  chemically synthesized
gccccctcctttgcgttctg

SEQ ID NO: 32789 - DNA, 20 bp, Artificial Sequence
  chemically synthesized
tcgaatctaattaagatcag

SEQ ID NO: 32790 - DNA, 20 bp, Artificial Sequence
  chemically synthesized
cacagaagttcttcaaattt

SEQ ID NO: 32791 - DNA, 20 bp, Artificial Sequence
  chemically synthesized
gtggtggcgttaatgtttct

SEQ ID NO: 32792 - DNA, 20 bp, Artificial Sequence
  chemically synthesized
cttggtatgtgaatggcgaa

SEQ ID NO: 32793 - DNA, 20 bp, Artificial Sequence
  chemically synthesized
ggcgaaaaagaaaaaaaagg

SEQ ID NO: 32794 - DNA, 20 bp, Artificial Sequence
  chemically synthesized
agaaaaaaaaggaaagaaaa

SEQ ID NO: 32795 - DNA, 20 bp, Artificial Sequence
  chemically synthesized
accaaaatttaatggtgact

SEQ ID NO: 32796 - DNA, 20 bp, Artificial Sequence
  chemically synthesized
atactttttatttacttcct

SEQ ID NO: 32797 - DNA, 20 bp, Artificial Sequence
  chemically synthesized
cactagattatgccaatcta

SEQ ID NO: 32798 - DNA, 20 bp, Artificial Sequence
  chemically synthesized
gtttgggggagagagagagg

SEQ ID NO: 32799 - DNA, 20 bp, Artificial Sequence
  chemically synthesized
tcttagtaaagcaattacat

SEQ ID NO: 32800 - DNA, 20 bp, Artificial Sequence
  chemically synthesized
aggctgtgaagtcggagagg

SEQ ID NO: 32801 - DNA, 20 bp, Artificial Sequence
  chemically synthesized
tcattaaacattcgttttaa

SEQ ID NO: 32802 - DNA, 20 bp, Artificial Sequence
  chemically synthesized
agctcagagcagcagctgaa

SEQ ID NO: 32803 - DNA, 20 bp, Artificial Sequence
  chemically synthesized
gtgccagccatctatctaaa

SEQ ID NO: 32804 - DNA, 20 bp, Artificial Sequence
  chemically synthesized
agaagaaacctaaagcattg

SEQ ID NO: 32805 - DNA, 20 bp, Artificial Sequence
  chemically synthesized
ccctgcaatgttcgtgggga

SEQ ID NO: 32806 - DNA, 20 bp, Artificial Sequence
  chemically synthesized
acaaactgtacttaacgtta

SEQ ID NO: 32807 - DNA, 20 bp, Artificial Sequence
  chemically synthesized
tggtgaacttttaatcttga

SEQ ID NO: 32808 - DNA, 20 bp, Artificial Sequence
  chemically synthesized
attttgcaagattgaaaatc

SEQ ID NO: 32809 - DNA, 20 bp, Artificial Sequence
  chemically synthesized
ctggaaggacctaatggtca

SEQ ID NO: 32810 - DNA, 20 bp, Artificial Sequence
  chemically synthesized
tgcttccaaagggaaaccag

SEQ ID NO: 32811 - DNA, 20 bp, Artificial Sequence
  chemically synthesized
atgcagacatcagctgacat

SEQ ID NO: 32812 - DNA, 20 bp, Artificial Sequence
  chemically synthesized
tttccaattactagtctgga

SEQ ID NO: 32813 - DNA, 20 bp, Artificial Sequence
  chemically synthesized
acatttaaaaaattctagtg

SEQ ID NO: 32814 - DNA, 20 bp, Artificial Sequence
  chemically synthesized
ctctccaacccaggtgaaag

SEQ ID NO: 32815 - DNA, 20 bp, Artificial Sequence
  chemically synthesized
agctggtgtgcaagtcagac

SEQ ID NO: 32816 - DNA, 20 bp, Artificial Sequence
  chemically synthesized
atttcatttgaactgctatc

SEQ ID NO: 32817 - DNA, 20 bp, Artificial Sequence
  chemically synthesized
aaggaaatcggaaagagaag

SEQ ID NO: 32818 - DNA, 20 bp, Artificial Sequence
  chemically synthesized
ctcttatccttgggccctgc

SEQ ID NO: 32819 - DNA, 20 bp, Artificial Sequence
  chemically synthesized
gtgccacattttaacattta

SEQ ID NO: 32820 - DNA, 20 bp, Artificial Sequence
  chemically synthesized
atgggatgtgacagggcaaa

SEQ ID NO: 32821 - DNA, 20 bp, Artificial Sequence
  chemically synthesized
attagattaaaaacaaaagt

SEQ ID NO: 32822 - DNA, 20 bp, Artificial Sequence
  chemically synthesized
ctggcaacaccgcaatcaca

SEQ ID NO: 32823 - DNA, 20 bp, Artificial Sequence
  chemically synthesized
gttaagcaatccacttgtat

SEQ ID NO: 32824 - DNA, 20 bp, Artificial Sequence
  chemically synthesized
gtcacacagctccaagatca

SEQ ID NO: 32825 - DNA, 20 bp, Artificial Sequence
  chemically synthesized
aagatccaagagtatcttta

SEQ ID NO: 32826 - DNA, 20 bp, Artificial Sequence
  chemically synthesized
aaaatattagggtgtgatgg

SEQ ID NO: 32827 - DNA, 20 bp, Artificial Sequence
  chemically synthesized
gtataccttgagttggtgaa

SEQ ID NO: 32828 - DNA, 20 bp, Artificial Sequence
  chemically synthesized
tagtgctttgtgctccaaca

SEQ ID NO: 32829 - DNA, 20 bp, Artificial Sequence
  chemically synthesized
ttttatgcatcattacatat

SEQ ID NO: 32830 - DNA, 20 bp, Artificial Sequence
  chemically synthesized
aaaaagcttccttgtgtttt

SEQ ID NO: 32831 - DNA, 20 bp, Artificial Sequence
  chemically synthesized
ttagaaagttcaaaaagcaa

SEQ ID NO: 32832 - DNA, 20 bp, Artificial Sequence
  chemically synthesized
attggcaatgctaacaacag

SEQ ID NO: 32833 - DNA, 20 bp, Artificial Sequence
  chemically synthesized
ttggggagacaactccaaga

SEQ ID NO: 32834 - DNA, 20 bp, Artificial Sequence
  chemically synthesized
cgctatagatcaaaggagaa

SEQ ID NO: 32835 - DNA, 20 bp, Artificial Sequence
  chemically synthesized
caacctaactcaatgccatt

SEQ ID NO: 32836 - DNA, 20 bp, Artificial Sequence
  chemically synthesized
ttgcagaatgacgaatgagc

SEQ ID NO: 32837 - DNA, 20 bp, Artificial Sequence
  chemically synthesized
aagttacattttaaaactga

SEQ ID NO: 32838 - DNA, 20 bp, Artificial Sequence
  chemically synthesized
aggagcacatgtagagagct

SEQ ID NO: 32839 - DNA, 20 bp, Artificial Sequence
  chemically synthesized
tcctggaaattaagtttgtg

SEQ ID NO: 32840 - DNA, 20 bp, Artificial Sequence
  chemically synthesized
gatgcccatttacctaggta

SEQ ID NO: 32841 - DNA, 20 bp, Artificial Sequence
  chemically synthesized
tgttaaaagtgggctctaag

SEQ ID NO: 32842 - DNA, 20 bp, Artificial Sequence
  chemically synthesized
cccaaatgaaatctgaacaa

SEQ ID NO: 32843 - DNA, 20 bp, Artificial Sequence
  chemically synthesized
cctttattaaacattttcat

SEQ ID NO: 32844 - DNA, 20 bp, Artificial Sequence
  chemically synthesized
attatatgccacattcacta

SEQ ID NO: 32845 - DNA, 20 bp, Artificial Sequence
  chemically synthesized
caacaaggaatggggtgatt

SEQ ID NO: 32846 - DNA, 20 bp, Artificial Sequence
  chemically synthesized
ttttgtttttttaagctttc

SEQ ID NO: 32847 - DNA, 20 bp, Artificial Sequence
  chemically synthesized
actgtctgtaacagcaggag

SEQ ID NO: 32848 - DNA, 20 bp, Artificial Sequence
  chemically synthesized
agttctatttacaatttgtc

SEQ ID NO: 32849 - DNA, 20 bp, Artificial Sequence
  chemically synthesized
atgaaaatcctaggtactta

SEQ ID NO: 32850 - DNA, 20 bp, Artificial Sequence
  chemically synthesized
cagaagtcagtcgtttttat

SEQ ID NO: 32851 - DNA, 20 bp, Artificial Sequence
  chemically synthesized
attcagaatcacataaataa

SEQ ID NO: 32852 - DNA, 20 bp, Artificial Sequence
  chemically synthesized
gaatcacataaataaagaga

SEQ ID NO: 32853 - DNA, 20 bp, Artificial Sequence
  chemically synthesized
ccagttcagtctgagctagg

SEQ ID NO: 32854 - DNA, 20 bp, Artificial Sequence
  chemically synthesized
cagtctgagctaggagagaa

SEQ ID NO: 32855 - DNA, 20 bp, Artificial Sequence
  chemically synthesized
gagaatcagaatggatacaa

SEQ ID NO: 32856 - DNA, 20 bp, Artificial Sequence
  chemically synthesized
gtctatgttcatgattttaa

SEQ ID NO: 32857 - DNA, 20 bp, Artificial Sequence
  chemically synthesized
taaaatatgagactaaaaaa

SEQ ID NO: 32858 - DNA, 20 bp, Artificial Sequence
  chemically synthesized
cccatctattcaccaggtaa

SEQ ID NO: 32859 - DNA, 20 bp, Artificial Sequence
  chemically synthesized
ctacttgggaggctgaggca

SEQ ID NO: 32860 - DNA, 20 bp, Artificial Sequence
  chemically synthesized
tgtttccttcctcatcataa

SEQ ID NO: 32861 - DNA, 20 bp, Artificial Sequence
  chemically synthesized
gaattgtgcagacgtgcttt

SEQ ID NO: 32862 - DNA, 20 bp, Artificial Sequence
  chemically synthesized
gtcggaatttatgtgcaatg

SEQ ID NO: 32863 - DNA, 20 bp, Artificial Sequence
  chemically synthesized
acaggtgattaaacacaatg

SEQ ID NO: 32864 - DNA, 20 bp, Artificial Sequence
  chemically synthesized
cctcctctaaatacagaggc

SEQ ID NO: 32865 - DNA, 20 bp, Artificial Sequence
  chemically synthesized
taaggtaaatgtggtggatt

SEQ ID NO: 32866 - DNA, 20 bp, Artificial Sequence
  chemically synthesized
gaaagtatctgagtgctatc

SEQ ID NO: 32867 - DNA, 20 bp, Artificial Sequence
  chemically synthesized
tatcacagaaagcactaaaa

SEQ ID NO: 32868 - DNA, 20 bp, Artificial Sequence
  chemically synthesized
acagaaagcactaaaaaaag

SEQ ID NO: 32869 - DNA, 20 bp, Artificial Sequence
  chemically synthesized
tcaaattctagagggggaga

SEQ ID NO: 32870 - DNA, 20 bp, Artificial Sequence
  chemically synthesized
agctgggtggtaggtagatg

SEQ ID NO: 32871 - DNA, 20 bp, Artificial Sequence
  chemically synthesized
ggcatggcatgtctgtcatc

SEQ ID NO: 32872 - DNA, 20 bp, Artificial Sequence
  chemically synthesized
ttccttttcccttgagctgc

SEQ ID NO: 32873 - DNA, 20 bp, Artificial Sequence
  chemically synthesized
aatacgtgtgtgtatttttc

SEQ ID NO: 32874 - DNA, 20 bp, Artificial Sequence
  chemically synthesized
aatttttacattgtgttata

SEQ ID NO: 32875 - DNA, 20 bp, Artificial Sequence
  chemically synthesized
aatgagaaggtggggatggg

SEQ ID NO: 32876 - DNA, 20 bp, Artificial Sequence
  chemically synthesized
gaaggtggggatggggaaga

SEQ ID NO: 32877 - DNA, 20 bp, Artificial Sequence
  chemically synthesized
ctgtgttctggacgtaagca

SEQ ID NO: 32878 - DNA, 20 bp, Artificial Sequence
  chemically synthesized
ggacagtcacatagagtaat

SEQ ID NO: 32879 - DNA, 20 bp, Artificial Sequence
  chemically synthesized
tacagcacctctgaaaatga

SEQ ID NO: 32880 - DNA, 20 bp, Artificial Sequence
  chemically synthesized
ccgtttgtgctcgataaaaa

SEQ ID NO: 32881 - DNA, 20 bp, Artificial Sequence
  chemically synthesized
gtggtctggttcatcatctg

SEQ ID NO: 32882 - DNA, 20 bp, Artificial Sequence
  chemically synthesized
caagaggctcggctgtggtt

SEQ ID NO: 32883 - DNA, 20 bp, Artificial Sequence
  chemically synthesized
ttattagagtgccagagagg

SEQ ID NO: 32884 - DNA, 20 bp, Artificial Sequence
  chemically synthesized
taggcttctctatataatac

SEQ ID NO: 32885 - DNA, 20 bp, Artificial Sequence
  chemically synthesized
aggcaaatcatcacatatgt

SEQ ID NO: 32886 - DNA, 20 bp, Artificial Sequence
  chemically synthesized
aatgtgtctggtttgtaagt

SEQ ID NO: 32887 - DNA, 20 bp, Artificial Sequence
  chemically synthesized
tgtctggtttgtaagtttag

SEQ ID NO: 32888 - DNA, 20 bp, Artificial Sequence
  chemically synthesized
atagttaacacagggaacat

SEQ ID NO: 32889 - DNA, 20 bp, Artificial Sequence
  chemically synthesized
gaaagcttaaataataacta

SEQ ID NO: 32890 - DNA, 20 bp, Artificial Sequence
  chemically synthesized
ctggttaaaaaaaaaagtgg

SEQ ID NO: 32891 - DNA, 20 bp, Artificial Sequence
  chemically synthesized
accaagttgtccattgtgcc

SEQ ID NO: 32892 - DNA, 20 bp, Artificial Sequence
  chemically synthesized
aacagacatggcttcataaa

SEQ ID NO: 32893 - DNA, 20 bp, Artificial Sequence
  chemically synthesized
ccacatttacactgctgtaa

SEQ ID NO: 32894 - DNA, 20 bp, Artificial Sequence
  chemically synthesized
ctcagcagtgccacaaaatc

SEQ ID NO: 32895 - DNA, 20 bp, Artificial Sequence
  chemically synthesized
atgggatacttttgagtact

SEQ ID NO: 32896 - DNA, 20 bp, Artificial Sequence
  chemically synthesized
tagtcattttttttttattc

SEQ ID NO: 32897 - DNA, 20 bp, Artificial Sequence
  chemically synthesized
tggcatctatgatataaaaa

SEQ ID NO: 32898 - DNA, 20 bp, Artificial Sequence
  chemically synthesized
tgccagttaataaaactgaa

SEQ ID NO: 32899 - DNA, 20 bp, Artificial Sequence
  chemically synthesized
tttaatgaacttaaagccac

SEQ ID NO: 32900 - DNA, 20 bp, Artificial Sequence
  chemically synthesized
aaatagattttaatttgagt

SEQ ID NO: 32901 - DNA, 20 bp, Artificial Sequence
  chemically synthesized
atactggccaaaagataaat

SEQ ID NO: 32902 - DNA, 20 bp, Artificial Sequence
  chemically synthesized
cgtaaattattgctaattaa

SEQ ID NO: 32903 - DNA, 20 bp, Artificial Sequence
  chemically synthesized
acatttggctagtggtgttc

SEQ ID NO: 32904 - DNA, 20 bp, Artificial Sequence
  chemically synthesized
aatcagacaaagtgggacac

SEQ ID NO: 32905 - DNA, 20 bp, Artificial Sequence
  chemically synthesized
aattctctctacgaggggag

SEQ ID NO: 32906 - DNA, 20 bp, Artificial Sequence
  chemically synthesized
ctctacgaggggaggaagaa

SEQ ID NO: 32907 - DNA, 20 bp, Artificial Sequence
  chemically synthesized
ttcctctctgtgtagttgca

SEQ ID NO: 32908 - DNA, 20 bp, Artificial Sequence
  chemically synthesized
gaaattcagagaggaaaagc

SEQ ID NO: 32909 - DNA, 20 bp, Artificial Sequence
  chemically synthesized
ccccggcaagggtggaccgt

SEQ ID NO: 32910 - DNA, 20 bp, Artificial Sequence
  chemically synthesized
taccaaaaatgccggccccg

SEQ ID NO: 32911 - DNA, 20 bp, Artificial Sequence
  chemically synthesized
gacatacggggtgatggggg

SEQ ID NO: 32912 - DNA, 20 bp, Artificial Sequence
  chemically synthesized
aaagctcgttcctccccgga

SEQ ID NO: 32913 - DNA, 20 bp, Artificial Sequence
  chemically synthesized
ctcctgccccctctgagcac

SEQ ID NO: 32914 - DNA, 20 bp, Artificial Sequence
  chemically synthesized
tgagcacccagaaaatgagg

SEQ ID NO: 32915 - DNA, 20 bp, Artificial Sequence
  chemically synthesized
actgcatcaaaaatttaaag

SEQ ID NO: 32916 - DNA, 20 bp, Artificial Sequence
  chemically synthesized
agctgtggacaagagacgtc

SEQ ID NO: 32917 - DNA, 20 bp, Artificial Sequence
  chemically synthesized
gagtcaaagagaaggccgtc

SEQ ID NO: 32918 - DNA, 20 bp, Artificial Sequence
  chemically synthesized
gtttggcttcggtttggggg

SEQ ID NO: 32919 - DNA, 20 bp, Artificial Sequence
  chemically synthesized
cattgcattccttttcgaaa

SEQ ID NO: 32920 - DNA, 20 bp, Artificial Sequence
  chemically synthesized
ctattattgggttacttacg

SEQ ID NO: 32921 - DNA, 20 bp, Artificial Sequence
  chemically synthesized
ttcacatcgggagagccggg

SEQ ID NO: 32922 - DNA, 20 bp, Artificial Sequence
  chemically synthesized
gttagaaagaaggagactcc

SEQ ID NO: 32923 - DNA, 20 bp, Artificial Sequence
  chemically synthesized
cttttgacatccaaaataaa

SEQ ID NO: 32924 - DNA, 20 bp, Artificial Sequence
  chemically synthesized
gcggtggcgtggccgggaga

SEQ ID NO: 32925 - DNA, 20 bp, Artificial Sequence
  chemically synthesized
aaaatgaaagattattcaaa

SEQ ID NO: 32926 - DNA, 20 bp, Artificial Sequence
  chemically synthesized
ttgcccgaggagaggacagc

SEQ ID NO: 32927 - DNA, 20 bp, Artificial Sequence
  chemically synthesized
gtccccggctcctaagggtc

SEQ ID NO: 32928 - DNA, 20 bp, Artificial Sequence
  chemically synthesized
gcaaaagcacagagggatgg

SEQ ID NO: 32929 - DNA, 20 bp, Artificial Sequence
  chemically synthesized
ctgtgctgttacccagggaa

SEQ ID NO: 32930 - DNA, 20 bp, Artificial Sequence
  chemically synthesized
cctgcgattggaaagtttat

SEQ ID NO: 32931 - DNA, 20 bp, Artificial Sequence
  chemically synthesized
tggaaggagttggggggaga

SEQ ID NO: 32932 - DNA, 20 bp, Artificial Sequence
  chemically synthesized
aaagtttcaagtctactgtg

SEQ ID NO: 32933 - DNA, 20 bp, Artificial Sequence
  chemically synthesized
gagcttcggacccctctaag

SEQ ID NO: 32934 - DNA, 20 bp, Artificial Sequence
  chemically synthesized
aaccagccttggagtcacca

SEQ ID NO: 32935 - DNA, 20 bp, Artificial Sequence
  chemically synthesized
gggaaggtgaagagagggaa

SEQ ID NO: 32936 - DNA, 20 bp, Artificial Sequence
  chemically synthesized
ctttgaaaaataaataaata

SEQ ID NO: 32937 - DNA, 20 bp, Artificial Sequence
  chemically synthesized
atctgaaaagcttggttctg

SEQ ID NO: 32938 - DNA, 20 bp, Artificial Sequence
  chemically synthesized
tgaatcctcccgcttcttaa

SEQ ID NO: 32939 - DNA, 20 bp, Artificial Sequence
  chemically synthesized
ctaatttccagggaacgtct

SEQ ID NO: 32940 - DNA, 20 bp, Artificial Sequence
  chemically synthesized
gaacagttgtgctctgcccg

SEQ ID NO: 32941 - DNA, 20 bp, Artificial Sequence
  chemically synthesized
atgcatttttaaatttttca

SEQ ID NO: 32942 - DNA, 20 bp, Artificial Sequence
  chemically synthesized
aggttgcttcccactcaccg

SEQ ID NO: 32943 - DNA, 20 bp, Artificial Sequence
  chemically synthesized
gtctaaaaaacgattcccgg

SEQ ID NO: 32944 - DNA, 20 bp, Artificial Sequence
  chemically synthesized
agtagtcatccccacaatag

SEQ ID NO: 32945 - DNA, 20 bp, Artificial Sequence
  chemically synthesized
aaaataaataaaacaaggca

SEQ ID NO: 32946 - DNA, 20 bp, Artificial Sequence
  chemically synthesized
aaaatctcacaatctctcat

SEQ ID NO: 32947 - DNA, 20 bp, Artificial Sequence
  chemically synthesized
ggaaagtttggcagcaaggg

SEQ ID NO: 32948 - DNA, 20 bp, Artificial Sequence
  chemically synthesized
gctaggaggcagaacaagat

SEQ ID NO: 32949 - DNA, 20 bp, Artificial Sequence
  chemically synthesized
tggggggaaagaacggttag

SEQ ID NO: 32950 - DNA, 20 bp, Artificial Sequence
  chemically synthesized
ccgccgcgcacacccagtgc

SEQ ID NO: 32951 - DNA, 20 bp, Artificial Sequence
  chemically synthesized
aaaagtgtaagcttgtggac

SEQ ID NO: 32952 - DNA, 20 bp, Artificial Sequence
  chemically synthesized
atttcttcctcccctcgtag

SEQ ID NO: 32953 - DNA, 20 bp, Artificial Sequence
  chemically synthesized
gccggagtttaggccggagc

SEQ ID NO: 32954 - DNA, 20 bp, Artificial Sequence
  chemically synthesized
gggaatttgcattaaaatgc

SEQ ID NO: 32955 - DNA, 20 bp, Artificial Sequence
  chemically synthesized
gcagagaaattatcagatgc

SEQ ID NO: 32956 - DNA, 20 bp, Artificial Sequence
  chemically synthesized
aaggaaatgttgattgccac

SEQ ID NO: 32957 - DNA, 20 bp, Artificial Sequence
  chemically synthesized
caaatcagtagactacacca

SEQ ID NO: 32958 - DNA, 20 bp, Artificial Sequence
  chemically synthesized
tgttaaacgtatttcataca

SEQ ID NO: 32959 - DNA, 20 bp, Artificial Sequence
  chemically synthesized
caataatttacgttaagagc

SEQ ID NO: 32960 - DNA, 20 bp, Artificial Sequence
  chemically synthesized
ctttaactatttgataccta

SEQ ID NO: 32961 - DNA, 20 bp, Artificial Sequence
  chemically synthesized
cctaaataatattcccactt

SEQ ID NO: 32962 - DNA, 20 bp, Artificial Sequence
  chemically synthesized
tgggaacaaaaaaaaaaaaa

SEQ ID NO: 32963 - DNA, 20 bp, Artificial Sequence
  chemically synthesized
ttcagacaacaggaatattt

SEQ ID NO: 32964 - DNA, 20 bp, Artificial Sequence
  chemically synthesized
aaatggaagcaaatgtaaga

SEQ ID NO: 32965 - DNA, 20 bp, Artificial Sequence
  chemically synthesized
ttttggccagtatgttgggc

SEQ ID NO: 32966 - DNA, 20 bp, Artificial Sequence
  chemically synthesized
attaggaggagtaccagagg

SEQ ID NO: 32967 - DNA, 20 bp, Artificial Sequence
  chemically synthesized
taaaaaaaaaagcaaacagg

SEQ ID NO: 32968 - DNA, 20 bp, Artificial Sequence
  chemically synthesized
atccgctggtgattatgtgt

SEQ ID NO: 32969 - DNA, 20 bp, Artificial Sequence
  chemically synthesized
tgaagcattttggagctcat

SEQ ID NO: 32970 - DNA, 20 bp, Artificial Sequence
  chemically synthesized
aggcgaagtatttcaagtct

SEQ ID NO: 32971 - DNA, 20 bp, Artificial Sequence
  chemically synthesized
gccaccaagtgcaaacatgt

SEQ ID NO: 32972 - DNA, 20 bp, Artificial Sequence
  chemically synthesized
tattataggcattccatttc

SEQ ID NO: 32973 - DNA, 20 bp, Artificial Sequence
  chemically synthesized
tcccatttagctaatgtgtc

SEQ ID NO: 32974 - DNA, 20 bp, Artificial Sequence
  chemically synthesized
tggcactgctgagagtgaga

SEQ ID NO: 32975 - DNA, 20 bp, Artificial Sequence
  chemically synthesized
acaacttggtgtataggaaa

SEQ ID NO: 32976 - DNA, 20 bp, Artificial Sequence
  chemically synthesized
tgggtattatatagagaagc

SEQ ID NO: 32977 - DNA, 20 bp, Artificial Sequence
  chemically synthesized
aatgcaatggcagcctctgc

SEQ ID NO: 32978 - DNA, 20 bp, Artificial Sequence
  chemically synthesized
agcaggtaaatgagaagcaa

SEQ ID NO: 32979 - DNA, 20 bp, Artificial Sequence
  chemically synthesized
ctgttgcttacgtccagaac

SEQ ID NO: 32980 - DNA, 20 bp, Artificial Sequence
  chemically synthesized
attatttctcctctccccct

SEQ ID NO: 32981 - DNA, 20 bp, Artificial Sequence
  chemically synthesized
aaaacacagtgtctgtcaag

SEQ ID NO: 32982 - DNA, 20 bp, Artificial Sequence
  chemically synthesized
tcaaagtgagatgtcagtaa

SEQ ID NO: 32983 - DNA, 20 bp, Artificial Sequence
  chemically synthesized
atatttgaattgtgtcacaa

SEQ ID NO: 32984 - DNA, 20 bp, Artificial Sequence
  chemically synthesized
gatatattgatgaatctcta

SEQ ID NO: 32985 - DNA, 20 bp, Artificial Sequence
  chemically synthesized
actattttataggcaggaag

SEQ ID NO: 32986 - DNA, 20 bp, Artificial Sequence
  chemically synthesized
cttcctaagataaataaagc

SEQ ID NO: 32987 - DNA, 20 bp, Artificial Sequence
  chemically synthesized
gaattcgggactttcagata

SEQ ID NO: 32988 - DNA, 20 bp, Artificial Sequence
  chemically synthesized
tgtgaaactgctgttccctt

SEQ ID NO: 32989 - DNA, 20 bp, Artificial Sequence
  chemically synthesized
agttagctttttgagagact

SEQ ID NO: 32990 - DNA, 20 bp, Artificial Sequence
  chemically synthesized
aatcaaatacaatatgcttt

SEQ ID NO: 32991 - DNA, 20 bp, Artificial Sequence
  chemically synthesized
tacaatatgcttttcagaat

SEQ ID NO: 32992 - DNA, 20 bp, Artificial Sequence
  chemically synthesized
accttcaaaatccagagagt

SEQ ID NO: 32993 - DNA, 20 bp, Artificial Sequence
  chemically synthesized
gctgtatttgtaaataagac

SEQ ID NO: 32994 - DNA, 20 bp, Artificial Sequence
  chemically synthesized
ttttgtcaaagtacaatgtc

SEQ ID NO: 32995 - DNA, 20 bp, Artificial Sequence
  chemically synthesized
gacattacccttgtggtgac

SEQ ID NO: 32996 - DNA, 20 bp, Artificial Sequence
  chemically synthesized
atcttttataaataatgttt

SEQ ID NO: 32997 - DNA, 20 bp, Artificial Sequence
  chemically synthesized
gctggaaaatgcaactgggt

SEQ ID NO: 32998 - DNA, 20 bp, Artificial Sequence
  chemically synthesized
caatgaaaatgtttaataaa

SEQ ID NO: 32999 - DNA, 20 bp, Artificial Sequence
  chemically synthesized
tggctttgcgtgctggtcag

SEQ ID NO: 33000 - DNA, 20 bp, Artificial Sequence
  chemically synthesized
aaatattaaatttaaccgaa

SEQ ID NO: 33001 - DNA, 20 bp, Artificial Sequence
  chemically synthesized
aggaaatgtaacctgacaaa

SEQ ID NO: 33002 - DNA, 20 bp, Artificial Sequence
  chemically synthesized
tgccacctcccaattcacca

SEQ ID NO: 33003 - DNA, 20 bp, Artificial Sequence
  chemically synthesized
ttttttgcatgtgctggtat

SEQ ID NO: 33004 - DNA, 20 bp, Artificial Sequence
  chemically synthesized
ttttataatgtgttccttta

SEQ ID NO: 33005 - DNA, 20 bp, Artificial Sequence
  chemically synthesized
ggtagatccacaaaacgtat

SEQ ID NO: 33006 - DNA, 20 bp, Artificial Sequence
  chemically synthesized
gaactgaatcagtctctgcc

SEQ ID NO: 33007 - DNA, 20 bp, Artificial Sequence
  chemically synthesized
ttaaaaactcccattaaaat

SEQ ID NO: 33008 - DNA, 20 bp, Artificial Sequence
  chemically synthesized
acctgcaagggtgccttcaa

SEQ ID NO: 33009 - DNA, 20 bp, Artificial Sequence
  chemically synthesized
aaaactgaacattggctact

SEQ ID NO: 33010 - DNA, 20 bp, Artificial Sequence
  chemically synthesized
ttatgtttttgttatgttaa

SEQ ID NO: 33011 - DNA, 20 bp, Artificial Sequence
  chemically synthesized
tggagctgtgtgactggtag

SEQ ID NO: 33012 - DNA, 20 bp, Artificial Sequence
  chemically synthesized
gctgtgtgactggtagcaag

SEQ ID NO: 33013 - DNA, 20 bp, Artificial Sequence
  chemically synthesized
gggcccaaggataagagagt

SEQ ID NO: 33014 - DNA, 20 bp, Artificial Sequence
  chemically synthesized
ttccggtaagatcaactcta

SEQ ID NO: 33015 - DNA, 20 bp, Artificial Sequence
  chemically synthesized
gttcattgggaattctgtca

SEQ ID NO: 33016 - DNA, 20 bp, Artificial Sequence
  chemically synthesized
ctggtgccgaatggaggaaa

SEQ ID NO: 33017 - DNA, 20 bp, Artificial Sequence
  chemically synthesized
ttgctggtttccctttggaa

SEQ ID NO: 33018 - DNA, 20 bp, Artificial Sequence
  chemically synthesized
aaaaaatgaggaaatcatag

SEQ ID NO: 33019 - DNA, 20 bp, Artificial Sequence
  chemically synthesized
tggcctgtcagcctgctgaa

SEQ ID NO: 33020 - DNA, 20 bp, Artificial Sequence
  chemically synthesized
tctcctcctcagatgcccca

SEQ ID NO: 33021 - DNA, 20 bp, Artificial Sequence
  chemically synthesized
tgaggcacttccagatacat

SEQ ID NO: 33022 - DNA, 20 bp, Artificial Sequence
  chemically synthesized
agtttatcactggttaacaa

SEQ ID NO: 33023 - DNA, 20 bp, Artificial Sequence
  chemically synthesized
attaaaacgaatgtttaatg

SEQ ID NO: 33024 - DNA, 20 bp, Artificial Sequence
  chemically synthesized
gatggaaaatgaacagtgtg

SEQ ID NO: 33025 - DNA, 20 bp, Artificial Sequence
  chemically synthesized
tgtggggctgagtgggcagt

SEQ ID NO: 33026 - DNA, 20 bp, Artificial Sequence
  chemically synthesized
tattcagctgacccggtatt

SEQ ID NO: 33027 - DNA, 20 bp, Artificial Sequence
  chemically synthesized
tctctctcccccaaacttta

SEQ ID NO: 33028 - DNA, 20 bp, Artificial Sequence
  chemically synthesized
tgacacagccctagaagcag

SEQ ID NO: 33029 - DNA, 20 bp, Artificial Sequence
  chemically synthesized
agggtagattgttatataat

SEQ ID NO: 33030 - DNA, 20 bp, Artificial Sequence
  chemically synthesized
caggaagtaaataaaaagta

SEQ ID NO: 33031 - DNA, 20 bp, Artificial Sequence
  chemically synthesized
tacttaaagggagtggaggg

SEQ ID NO: 33032 - DNA, 20 bp, Artificial Sequence
  chemically synthesized
ggcccagaagctgtctttct

SEQ ID NO: 33033 - DNA, 20 bp, Artificial Sequence
  chemically synthesized
taacgccaccaccaccaaaa

SEQ ID NO: 33034 - DNA, 20 bp, Artificial Sequence
  chemically synthesized
tttttaaaaaactggaaatg

SEQ ID NO: 33035 - DNA, 20 bp, Artificial Sequence
  chemically synthesized
gattactgggggtacagtga

SEQ ID NO: 33036 - DNA, 20 bp, Artificial Sequence
  chemically synthesized
cgtcgggcaacacagaggga

SEQ ID NO: 33037 - DNA, 20 bp, Artificial Sequence
  chemically synthesized
tctgctccggagaaggtggt

SEQ ID NO: 33038 - DNA, 20 bp, Artificial Sequence
  chemically synthesized
tagccagactggtttagcag

SEQ ID NO: 33039 - DNA, 20 bp, Artificial Sequence
  chemically synthesized
aagcactttgtttatcttga

SEQ ID NO: 33040 - DNA, 20 bp, Artificial Sequence
  chemically synthesized
ggcgtgcctgcgtgtgcagg

SEQ ID NO: 33041 - DNA, 20 bp, Artificial Sequence
  chemically synthesized
aggaaggctcaaggaaggct

SEQ ID NO: 33042 - DNA, 20 bp, Artificial Sequence
  chemically synthesized
ctggggctaaagctgggttc

SEQ ID NO: 33043 - DNA, 20 bp, Artificial Sequence
  chemically synthesized
gtctttgtaacctgagctgg

SEQ ID NO: 33044 - DNA, 20 bp, Artificial Sequence
  chemically synthesized
tggtaagaaagggaggaggg

SEQ ID NO: 33045 - DNA, 20 bp, Artificial Sequence
  chemically synthesized
ttcctcaatctgtaaagtgg

SEQ ID NO: 33046 - DNA, 20 bp, Artificial Sequence
  chemically synthesized
tcgctccgggggctgcacct

SEQ ID NO: 33047 - DNA, 20 bp, Artificial Sequence
  chemically synthesized
tttcaatcttctgggaaaga

SEQ ID NO: 33048 - DNA, 20 bp, Artificial Sequence
  chemically synthesized
gtagtcatttccccatctgt

SEQ ID NO: 33049 - DNA, 20 bp, Artificial Sequence
  chemically synthesized
ctgaaatcaagtgagggtcc

SEQ ID NO: 33050 - DNA, 20 bp, Artificial Sequence
  chemically synthesized
ggagactgcagtgggctgaa

SEQ ID NO: 33051 - DNA, 20 bp, Artificial Sequence
  chemically synthesized
atcgtaccttcaaaggctgg

SEQ ID NO: 33052 - DNA, 20 bp, Artificial Sequence
  chemically synthesized
ccttcaaaggctggggagaa

SEQ ID NO: 33053 - DNA, 20 bp, Artificial Sequence
  chemically synthesized
gctaacatagacctccactg

SEQ ID NO: 33054 - DNA, 20 bp, Artificial Sequence
  chemically synthesized
agacctccactgagagaatt

SEQ ID NO: 33055 - DNA, 20 bp, Artificial Sequence
  chemically synthesized
ggtgggatggaggtggctgc

SEQ ID NO: 33056 - DNA, 20 bp, Artificial Sequence
  chemically synthesized
gtgctaagtagttccccgct

SEQ ID NO: 33057 - DNA, 20 bp, Artificial Sequence
  chemically synthesized
ctatttaaaaatcttttggg

SEQ ID NO: 33058 - DNA, 20 bp, Artificial Sequence
  chemically synthesized
ttttgcagaagttcagggtg

SEQ ID NO: 33059 - DNA, 20 bp, Artificial Sequence
  chemically synthesized
aaaccatgcctgttttatat

SEQ ID NO: 33060 - DNA, 20 bp, Artificial Sequence
  chemically synthesized
tagaaagtgaaatcattgtt

SEQ ID NO: 33061 - DNA, 20 bp, Artificial Sequence
  chemically synthesized
atagaaaaaacctactgtgg

SEQ ID NO: 33062 - DNA, 20 bp, Artificial Sequence
  chemically synthesized
agccctgctgccatcctcta

SEQ ID NO: 33063 - DNA, 20 bp, Artificial Sequence
  chemically synthesized
tacccttctgtgaaagccat

SEQ ID NO: 33064 - DNA, 20 bp, Artificial Sequence
  chemically synthesized
ggggctcacctgcaaagaca

SEQ ID NO: 33065 - DNA, 20 bp, Artificial Sequence
  chemically synthesized
cttggattcgtgattcccca

SEQ ID NO: 33066 - DNA, 20 bp, Artificial Sequence
  chemically synthesized
tgttttttttgaaaaactcc

SEQ ID NO: 33067 - DNA, 20 bp, Artificial Sequence
  chemically synthesized
aatagaagtacgtttttgaa

SEQ ID NO: 33068 - DNA, 20 bp, Artificial Sequence
  chemically synthesized
caaaataaaatcttaaaaaa

SEQ ID NO: 33069 - DNA, 20 bp, Artificial Sequence
  chemically synthesized
aaatcttaaaaaacaagaaa

SEQ ID NO: 33070 - DNA, 20 bp, Artificial Sequence
  chemically synthesized
agttgtgtgcctgtgtgtgt

SEQ ID NO: 33071 - DNA, 20 bp, Artificial Sequence
  chemically synthesized
gtgtgtagaaagggagagag

SEQ ID NO: 33072 - DNA, 20 bp, Artificial Sequence
  chemically synthesized
gagagagaataggaaagtct

SEQ ID NO: 33073 - DNA, 20 bp, Artificial Sequence
  chemically synthesized
agtttttgaaagctatccat

SEQ ID NO: 33074 - DNA, 20 bp, Artificial Sequence
  chemically synthesized
cttttacccacagagtctac

SEQ ID NO: 33075 - DNA, 20 bp, Artificial Sequence
  chemically synthesized
tggttttgcagttgtattta

SEQ ID NO: 33076 - DNA, 20 bp, Artificial Sequence
  chemically synthesized
ggcgatagggttacagaaga

SEQ ID NO: 33077 - DNA, 20 bp, Artificial Sequence
  chemically synthesized
ttgtagtatttgagattttt

SEQ ID NO: 33078 - DNA, 20 bp, Artificial Sequence
  chemically synthesized
ggggacaagtgtcctatggg

SEQ ID NO: 33079 - DNA, 20 bp, Artificial Sequence
  chemically synthesized
ccatttgagccctggctatt

SEQ ID NO: 33080 - DNA, 20 bp, Artificial Sequence
  chemically synthesized
agaggagattgaccacactc

SEQ ID NO: 33081 - DNA, 20 bp, Artificial Sequence
  chemically synthesized
gacaatggaaggcagctgtt

SEQ ID NO: 33082 - DNA, 20 bp, Artificial Sequence
  chemically synthesized
tgatctgatgggtggtatag

SEQ ID NO: 33083 - DNA, 20 bp, Artificial Sequence
  chemically synthesized
ggccacttatttaattttcc

SEQ ID NO: 33084 - DNA, 20 bp, Artificial Sequence
  chemically synthesized
tgatttcaggtcctcagact

SEQ ID NO: 33085 - DNA, 20 bp, Artificial Sequence
  chemically synthesized
ctttctgaatttttcaattt

SEQ ID NO: 33086 - DNA, 20 bp, Artificial Sequence
  chemically synthesized
attctcctgccagagagagg

SEQ ID NO: 33087 - DNA, 20 bp, Artificial Sequence
  chemically synthesized
ttttaacactccaagtctag

SEQ ID NO: 33088 - DNA, 20 bp, Artificial Sequence
  chemically synthesized
tttgtcattggagtaattta

SEQ ID NO: 33089 - DNA, 20 bp, Artificial Sequence
  chemically synthesized
gtgtcagaacagaactggcc

SEQ ID NO: 33090 - DNA, 20 bp, Artificial Sequence
  chemically synthesized
tgtctctcaatatggaggtt

SEQ ID NO: 33091 - DNA, 20 bp, Artificial Sequence
  chemically synthesized
aggggttcctggtgtacttg

SEQ ID NO: 33092 - DNA, 20 bp, Artificial Sequence
  chemically synthesized
ttcaggacccaccttgaatg

SEQ ID NO: 33093 - DNA, 20 bp, Artificial Sequence
  chemically synthesized
agagtttctgaggaatcata

SEQ ID NO: 33094 - DNA, 20 bp, Artificial Sequence
  chemically synthesized
taaccctgtcattttacaga

SEQ ID NO: 33095 - DNA, 20 bp, Artificial Sequence
  chemically synthesized
ccaatcacctgtgctgttgc

SEQ ID NO: 33096 - DNA, 20 bp, Artificial Sequence
  chemically synthesized
tctcaggggcagatggccct

SEQ ID NO: 33097 - DNA, 20 bp, Artificial Sequence
  chemically synthesized
tattgtttctatgcctctct

SEQ ID NO: 33098 - DNA, 20 bp, Artificial Sequence
  chemically synthesized
agtgacgacttcatggaggc

SEQ ID NO: 33099 - DNA, 20 bp, Artificial Sequence
  chemically synthesized
gtgttggcccagcggtgccc

SEQ ID NO: 33100 - DNA, 20 bp, Artificial Sequence
  chemically synthesized
cctgggagctcaagtcaggg

SEQ ID NO: 33101 - DNA, 20 bp, Artificial Sequence
  chemically synthesized
ctcacgctgcttgattgaac

SEQ ID NO: 33102 - DNA, 20 bp, Artificial Sequence
  chemically synthesized
atttcccccttcctccctgg

SEQ ID NO: 33103 - DNA, 20 bp, Artificial Sequence
  chemically synthesized
cacaactctgatttttttcc

SEQ ID NO: 33104 - DNA, 20 bp, Artificial Sequence
  chemically synthesized
tctccaagtcttgggactgc

SEQ ID NO: 33105 - DNA, 20 bp, Artificial Sequence
  chemically synthesized
ggatttaggactgtgaacct

SEQ ID NO: 33106 - DNA, 20 bp, Artificial Sequence
  chemically synthesized
gagaattcaaagtagtggaa

SEQ ID NO: 33107 - DNA, 20 bp, Artificial Sequence
  chemically synthesized
gaggtgcctgtctggaaggc

SEQ ID NO: 33108 - DNA, 20 bp, Artificial Sequence
  chemically synthesized
ggggaagagccgctcaaaga

SEQ ID NO: 33109 - DNA, 20 bp, Artificial Sequence
  chemically synthesized
ttgctctgtgtgttcatttt

SEQ ID NO: 33110 - DNA, 20 bp, Artificial Sequence
  chemically synthesized
ctcatacttgagacactaaa

SEQ ID NO: 33111 - DNA, 20 bp, Artificial Sequence
  chemically synthesized
tcattttactgatttatttg

SEQ ID NO: 33112 - DNA, 20 bp, Artificial Sequence
  chemically synthesized
tccctccaacccttgccttc

SEQ ID NO: 33113 - DNA, 20 bp, Artificial Sequence
  chemically synthesized
cagagtgttgaaagcttgga

SEQ ID NO: 33114 - DNA, 20 bp, Artificial Sequence
  chemically synthesized
gaaggaaaaaaaaagaactg

SEQ ID NO: 33115 - DNA, 20 bp, Artificial Sequence
  chemically synthesized
acggaaaagagtggagtcac

SEQ ID NO: 33116 - DNA, 20 bp, Artificial Sequence
  chemically synthesized
agtgcccctgccaggaggag

SEQ ID NO: 33117 - DNA, 20 bp, Artificial Sequence
  chemically synthesized
gaggagggagaatctgaaag

SEQ ID NO: 33118 - DNA, 20 bp, Artificial Sequence
  chemically synthesized
aacggttcttggtgttgggc

SEQ ID NO: 33119 - DNA, 20 bp, Artificial Sequence
  chemically synthesized
agaggtgaggaagttggcca

SEQ ID NO: 33120 - DNA, 20 bp, Artificial Sequence
  chemically synthesized
aatgtgtggctcggtgactg

SEQ ID NO: 33121 - DNA, 20 bp, Artificial Sequence
  chemically synthesized
gtggctcggtgactgggaga

SEQ ID NO: 33122 - DNA, 20 bp, Artificial Sequence
  chemically synthesized
ttgctgtttattgggatggg

SEQ ID NO: 33123 - DNA, 20 bp, Artificial Sequence
  chemically synthesized
agacaacttgatcttttgat

SEQ ID NO: 33124 - DNA, 20 bp, Artificial Sequence
  chemically synthesized
cctgtgatttcggagtctga

SEQ ID NO: 33125 - DNA, 20 bp, Artificial Sequence
  chemically synthesized
ggtagacagtgctgggcctg

SEQ ID NO: 33126 - DNA, 20 bp, Artificial Sequence
  chemically synthesized
ctcaactacttttgtttgtg

SEQ ID NO: 33127 - DNA, 20 bp, Artificial Sequence
  chemically synthesized
gcagtaagcaccatgacatg

SEQ ID NO: 33128 - DNA, 20 bp, Artificial Sequence
  chemically synthesized
gaccatatgattttaaagct

SEQ ID NO: 33129 - DNA, 20 bp, Artificial Sequence
  chemically synthesized
tttttttttgttcttttgct

SEQ ID NO: 33130 - DNA, 20 bp, Artificial Sequence
  chemically synthesized
ccacatttctgccatatgtc

SEQ ID NO: 33131 - DNA, 20 bp, Artificial Sequence
  chemically synthesized
gacacagttttctagctttt

SEQ ID NO: 33132 - DNA, 20 bp, Artificial Sequence
  chemically synthesized
gacattatttgaggttgctg

SEQ ID NO: 33133 - DNA, 20 bp, Artificial Sequence
  chemically synthesized
ttttccaggggtttgacaga

SEQ ID NO: 33134 - DNA, 20 bp, Artificial Sequence
  chemically synthesized
tgactcttcctctgatgcag

SEQ ID NO: 33135 - DNA, 20 bp, Artificial Sequence
  chemically synthesized
tgcctcccctccatgccctc

SEQ ID NO: 33136 - DNA, 20 bp, Artificial Sequence
  chemically synthesized
caggcatttggaacaatctg

SEQ ID NO: 33137 - DNA, 20 bp, Artificial Sequence
  chemically synthesized
agtaaccctgtgaagaggca

SEQ ID NO: 33138 - DNA, 20 bp, Artificial Sequence
  chemically synthesized
ggcattgtccctaagcacca

SEQ ID NO: 33139 - DNA, 20 bp, Artificial Sequence
  chemically synthesized
gggtgaaatcttgcagtgac

SEQ ID NO: 33140 - DNA, 20 bp, Artificial Sequence
  chemically synthesized
agtggtactcttcagagttc

SEQ ID NO: 33141 - DNA, 20 bp, Artificial Sequence
  chemically synthesized
tttcttgctttctttttttt

SEQ ID NO: 33142 - DNA, 20 bp, Artificial Sequence
  chemically synthesized
ataaagctctgacaaaagat

SEQ ID NO: 33143 - DNA, 20 bp, Artificial Sequence
  chemically synthesized
ataggtggaggagagggtcc

SEQ ID NO: 33144 - DNA, 20 bp, Artificial Sequence
  chemically synthesized
ggtcagagcctcctgaggct

SEQ ID NO: 33145 - DNA, 20 bp, Artificial Sequence
  chemically synthesized
aggaggtgtttggacaagag

SEQ ID NO: 33146 - DNA, 20 bp, Artificial Sequence
  chemically synthesized
atagtttctgggtgacagga

SEQ ID NO: 33147 - DNA, 20 bp, Artificial Sequence
  chemically synthesized
cttaaattcatattttaata

SEQ ID NO: 33148 - DNA, 20 bp, Artificial Sequence
  chemically synthesized
taggagcaatacctgagatc

SEQ ID NO: 33149 - DNA, 20 bp, Artificial Sequence
  chemically synthesized
agagctcaaatctgtgctag

SEQ ID NO: 33150 - DNA, 20 bp, Artificial Sequence
  chemically synthesized
gtttatttttccgtttgctc

SEQ ID NO: 33151 - DNA, 20 bp, Artificial Sequence
  chemically synthesized
cctagtgcaacacaagttgt

SEQ ID NO: 33152 - DNA, 20 bp, Artificial Sequence
  chemically synthesized
gtgcaacacaagttgtgtag

SEQ ID NO: 33153 - DNA, 20 bp, Artificial Sequence
  chemically synthesized
ataattcactagtaaaataa

SEQ ID NO: 33154 - DNA, 20 bp, Artificial Sequence
  chemically synthesized
agaggggctgatataacttc

SEQ ID NO: 33155 - DNA, 20 bp, Artificial Sequence
  chemically synthesized
gatgagcacactgctgtaat

SEQ ID NO: 33156 - DNA, 20 bp, Artificial Sequence
  chemically synthesized
gagaccagcctgaccaacat

SEQ ID NO: 33157 - DNA, 20 bp, Artificial Sequence
  chemically synthesized
ctactcaggaggctgaggga

SEQ ID NO: 33158 - DNA, 20 bp, Artificial Sequence
  chemically synthesized
tcaaaaaaaaaaaaaaaaaa

SEQ ID NO: 33159 - DNA, 20 bp, Artificial Sequence
  chemically synthesized
ttggctgccattgaatcaaa

SEQ ID NO: 33160 - DNA, 20 bp, Artificial Sequence
  chemically synthesized
ggatgtttaccaacaacttt

SEQ ID NO: 33161 - DNA, 20 bp, Artificial Sequence
  chemically synthesized
acagaggaggatgcagcgac

SEQ ID NO: 33162 - DNA, 20 bp, Artificial Sequence
  chemically synthesized
atcatacacattttaccagt

SEQ ID NO: 33163 - DNA, 20 bp, Artificial Sequence
  chemically synthesized
gcccgtggcaaacactgtct

SEQ ID NO: 33164 - DNA, 20 bp, Artificial Sequence
  chemically synthesized
atttccttttttgcccctgg

SEQ ID NO: 33165 - DNA, 20 bp, Artificial Sequence
  chemically synthesized
aaatatcacttagaggagtt

SEQ ID NO: 33166 - DNA, 20 bp, Artificial Sequence
  chemically synthesized
ccagagaagataatggcagc

SEQ ID NO: 33167 - DNA, 20 bp, Artificial Sequence
  chemically synthesized
acacattgtagggtgatctc

SEQ ID NO: 33168 - DNA, 20 bp, Artificial Sequence
  chemically synthesized
tgatctcccagaaaagccag

SEQ ID NO: 33169 - DNA, 20 bp, Artificial Sequence
  chemically synthesized
ctttggatgcctgtgtgggg

SEQ ID NO: 33170 - DNA, 20 bp, Artificial Sequence
  chemically synthesized
tcagtggaatggaaaatgaa

SEQ ID NO: 33171 - DNA, 20 bp, Artificial Sequence
  chemically synthesized
ctactggatcatcagcaaag

SEQ ID NO: 33172 - DNA, 20 bp, Artificial Sequence
  chemically synthesized
ctatagtaaggtgatagttc

SEQ ID NO: 33173 - DNA, 20 bp, Artificial Sequence
  chemically synthesized
ctgcatggaaggactttgct

SEQ ID NO: 33174 - DNA, 20 bp, Artificial Sequence
  chemically synthesized
gggatgctagctaaagggaa

SEQ ID NO: 33175 - DNA, 20 bp, Artificial Sequence
  chemically synthesized
atcgtgaagtaatcgtgaag

SEQ ID NO: 33176 - DNA, 20 bp, Artificial Sequence
  chemically synthesized
ggcccctgctggctgctggg

SEQ ID NO: 33177 - DNA, 20 bp, Artificial Sequence
  chemically synthesized
taggtgttttaaaaaatagc

SEQ ID NO: 33178 - DNA, 20 bp, Artificial Sequence
  chemically synthesized
cccttgtaatttagagactc

SEQ ID NO: 33179 - DNA, 20 bp, Artificial Sequence
  chemically synthesized
ttgcctgtctttgagcagga

SEQ ID NO: 33180 - DNA, 20 bp, Artificial Sequence
  chemically synthesized
tgtgctgattgagggcccat

SEQ ID NO: 33181 - DNA, 20 bp, Artificial Sequence
  chemically synthesized
atgtaagcatcacaacaggc

SEQ ID NO: 33182 - DNA, 20 bp, Artificial Sequence
  chemically synthesized
catacaggtaataacatagg

SEQ ID NO: 33183 - DNA, 20 bp, Artificial Sequence
  chemically synthesized
cggaaggctctcttggtgat

SEQ ID NO: 33184 - DNA, 20 bp, Artificial Sequence
  chemically synthesized
ccatattttaaattccagct

SEQ ID NO: 33185 - DNA, 20 bp, Artificial Sequence
  chemically synthesized
tgtatttattgccctaggcg

SEQ ID NO: 33186 - DNA, 20 bp, Artificial Sequence
  chemically synthesized
attcaaatgaatgcccattt

SEQ ID NO: 33187 - DNA, 20 bp, Artificial Sequence
  chemically synthesized
atgccttagatgtttaccta

SEQ ID NO: 33188 - DNA, 20 bp, Artificial Sequence
  chemically synthesized
tggaatacaactcaacagta

SEQ ID NO: 33189 - DNA, 20 bp, Artificial Sequence
  chemically synthesized
ctccacaccatggatgaatc

SEQ ID NO: 33190 - DNA, 20 bp, Artificial Sequence
  chemically synthesized
cagaatcattctgctctgtg

SEQ ID NO: 33191 - DNA, 20 bp, Artificial Sequence
  chemically synthesized
gagtccatttgtaacaaatt

SEQ ID NO: 33192 - DNA, 20 bp, Artificial Sequence
  chemically synthesized
caaagtacatttcagggaaa

SEQ ID NO: 33193 - DNA, 20 bp, Artificial Sequence
  chemically synthesized
aggggaggaaatctgttttc

SEQ ID NO: 33194 - DNA, 20 bp, Artificial Sequence
  chemically synthesized
caactaagtttttttcttcc

SEQ ID NO: 33195 - DNA, 20 bp, Artificial Sequence
  chemically synthesized
tgctgcatttaaaacagcat

SEQ ID NO: 33196 - DNA, 20 bp, Artificial Sequence
  chemically synthesized
ggttaaaattaccattttga

SEQ ID NO: 33197 - DNA, 20 bp, Artificial Sequence
  chemically synthesized
atatgctatttgttgaattc

SEQ ID NO: 33198 - DNA, 20 bp, Artificial Sequence
  chemically synthesized
aaatataatagaagcaagta

SEQ ID NO: 33199 - DNA, 20 bp, Artificial Sequence
  chemically synthesized
ggagaaagagtccctgtatt

SEQ ID NO: 33200 - DNA, 20 bp, Artificial Sequence
  chemically synthesized
tccaggaggtaagagaagaa

SEQ ID NO: 33201 - DNA, 20 bp, Artificial Sequence
  chemically synthesized
cggaagggatttttacttgg

SEQ ID NO: 33202 - DNA, 20 bp, Artificial Sequence
  chemically synthesized
tacggggaactaagactgga

SEQ ID NO: 33203 - DNA, 20 bp, Artificial Sequence
  chemically synthesized
cgtagggtttcctttcacta

SEQ ID NO: 33204 - DNA, 20 bp, Artificial Sequence
  chemically synthesized
ggagtgggcaggaatgacgt

SEQ ID NO: 33205 - DNA, 20 bp, Artificial Sequence
  chemically synthesized
tagaggggaaagaacctctg

SEQ ID NO: 33206 - DNA, 20 bp, Artificial Sequence
  chemically synthesized
tcaggtgcttcctcttctac

SEQ ID NO: 33207 - DNA, 20 bp, Artificial Sequence
  chemically synthesized
ggccgccgtgtgtttactgc

SEQ ID NO: 33208 - DNA, 20 bp, Artificial Sequence
  chemically synthesized
ttaggaacaaacttccagcg

SEQ ID NO: 33209 - DNA, 20 bp, Artificial Sequence
  chemically synthesized
gttgtgggcaaaatgacata

SEQ ID NO: 33210 - DNA, 20 bp, Artificial Sequence
  chemically synthesized
atgacataaaagaaatggaa

SEQ ID NO: 33211 - DNA, 20 bp, Artificial Sequence
  chemically synthesized
attggggtctaaggtaccct

SEQ ID NO: 33212 - DNA, 20 bp, Artificial Sequence
  chemically synthesized
gagaccagcctgaccaacat

SEQ ID NO: 33213 - DNA, 20 bp, Artificial Sequence
  chemically synthesized
accccgtctctaccaaaaat

SEQ ID NO: 33214 - DNA, 20 bp, Artificial Sequence
  chemically synthesized
ctacttgggaggctgaggca

SEQ ID NO: 33215 - DNA, 20 bp, Artificial Sequence
  chemically synthesized
aacaagagcgaaactccacc

SEQ ID NO: 33216 - DNA, 20 bp, Artificial Sequence
  chemically synthesized
tattttcatgttaagcaaaa

SEQ ID NO: 33217 - DNA, 20 bp, Artificial Sequence
  chemically synthesized
tcatgttcctagaaggaaag

SEQ ID NO: 33218 - DNA, 20 bp, Artificial Sequence
  chemically synthesized
atttaaatgtttctacataa

SEQ ID NO: 33219 - DNA, 20 bp, Artificial Sequence
  chemically synthesized
cctttctgcagcttccttag

SEQ ID NO: 33220 - DNA, 20 bp, Artificial Sequence
  chemically synthesized
tccttagatagaatggttga

SEQ ID NO: 33221 - DNA, 20 bp, Artificial Sequence
  chemically synthesized
taaaggctggtgtggttgcc

SEQ ID NO: 33222 - DNA, 20 bp, Artificial Sequence
  chemically synthesized
cccgagtcttttttattctg

SEQ ID NO: 33223 - DNA, 20 bp, Artificial Sequence
  chemically synthesized
tatcttagattggtaggtct

SEQ ID NO: 33224 - DNA, 20 bp, Artificial Sequence
  chemically synthesized
gtacttaactacacatatgt

SEQ ID NO: 33225 - DNA, 20 bp, Artificial Sequence
  chemically synthesized
tatgtgcagaaagtgaactc

SEQ ID NO: 33226 - DNA, 20 bp, Artificial Sequence
  chemically synthesized
gctgttcagtcaaatccatt

SEQ ID NO: 33227 - DNA, 20 bp, Artificial Sequence
  chemically synthesized
gagaaccagagcagaaggtt

SEQ ID NO: 33228 - DNA, 20 bp, Artificial Sequence
  chemically synthesized
accagagcagaaggttggag

SEQ ID NO: 33229 - DNA, 20 bp, Artificial Sequence
  chemically synthesized
ctcagccttcttgttgaaaa

SEQ ID NO: 33230 - DNA, 20 bp, Artificial Sequence
  chemically synthesized
aggcaacttcacttctcacc

SEQ ID NO: 33231 - DNA, 20 bp, Artificial Sequence
  chemically synthesized
ggtttatttttcccttatag

SEQ ID NO: 33232 - DNA, 20 bp, Artificial Sequence
  chemically synthesized
cataatgaggtgttcctaag

SEQ ID NO: 33233 - DNA, 20 bp, Artificial Sequence
  chemically synthesized
ctccaaattcccccttctct

SEQ ID NO: 33234 - DNA, 20 bp, Artificial Sequence
  chemically synthesized
aggactaaagagagagaaga

SEQ ID NO: 33235 - DNA, 20 bp, Artificial Sequence
  chemically synthesized
agatgctggaaacagaggtt

SEQ ID NO: 33236 - DNA, 20 bp, Artificial Sequence
  chemically synthesized
ggagaaagagaggcaaggaa

SEQ ID NO: 33237 - DNA, 20 bp, Artificial Sequence
  chemically synthesized
gtcgatagtgacctgcattt

SEQ ID NO: 33238 - DNA, 20 bp, Artificial Sequence
  chemically synthesized
aagggggaaaaaaaagcaac

SEQ ID NO: 33239 - DNA, 20 bp, Artificial Sequence
  chemically synthesized
gggaaaaaaaagcaaccaag

SEQ ID NO: 33240 - DNA, 20 bp, Artificial Sequence
  chemically synthesized
accaagaaagaaaaagaagg

SEQ ID NO: 33241 - DNA, 20 bp, Artificial Sequence
  chemically synthesized
aaagaaggaaagaaaaaaag

SEQ ID NO: 33242 - DNA, 20 bp, Artificial Sequence
  chemically synthesized
aagaaaaaaagggagaaaag

SEQ ID NO: 33243 - DNA, 20 bp, Artificial Sequence
  chemically synthesized
aaaaaagggagaaaaggaag

SEQ ID NO: 33244 - DNA, 20 bp, Artificial Sequence
  chemically synthesized
accagaagaacaaaaatagg

SEQ ID NO: 33245 - DNA, 20 bp, Artificial Sequence
  chemically synthesized
aaaataggaaagaaaaataa

SEQ ID NO: 33246 - DNA, 20 bp, Artificial Sequence
  chemically synthesized
atttgggttctgccttggac

SEQ ID NO: 33247 - DNA, 20 bp, Artificial Sequence
  chemically synthesized
catcatttctgtaatgtttg

SEQ ID NO: 33248 - DNA, 20 bp, Artificial Sequence
  chemically synthesized
gttggatatttaaaatgtca

SEQ ID NO: 33249 - DNA, 20 bp, Artificial Sequence
  chemically synthesized
gaaagagatgattacacatt

SEQ ID NO: 33250 - DNA, 20 bp, Artificial Sequence
  chemically synthesized
gtactaacctgtccttcaaa

SEQ ID NO: 33251 - DNA, 20 bp, Artificial Sequence
  chemically synthesized
aattacaactgtttggaagc

SEQ ID NO: 33252 - DNA, 20 bp, Artificial Sequence
  chemically synthesized
gtccgctccgtgaacaggaa

SEQ ID NO: 33253 - DNA, 20 bp, Artificial Sequence
  chemically synthesized
tttttttttttaatggagga

SEQ ID NO: 33254 - DNA, 20 bp, Artificial Sequence
  chemically synthesized
aaccaaactaaactctcaag

SEQ ID NO: 33255 - DNA, 20 bp, Artificial Sequence
  chemically synthesized
ctaggtgggtttcctgagct

SEQ ID NO: 33256 - DNA, 20 bp, Artificial Sequence
  chemically synthesized
aaaggctctcccaccatcac

SEQ ID NO: 33257 - DNA, 20 bp, Artificial Sequence
  chemically synthesized
cagaatgtactagggttctg

SEQ ID NO: 33258 - DNA, 20 bp, Artificial Sequence
  chemically synthesized
tgtgctggagcatgtgggga

SEQ ID NO: 33259 - DNA, 20 bp, Artificial Sequence
  chemically synthesized
agatgtagggggtggagcgt

SEQ ID NO: 33260 - DNA, 20 bp, Artificial Sequence
  chemically synthesized
tcacgagccatggaaatgga

SEQ ID NO: 33261 - DNA, 20 bp, Artificial Sequence
  chemically synthesized
atgggggtgcaggtagggga

SEQ ID NO: 33262 - DNA, 20 bp, Artificial Sequence
  chemically synthesized
aaacaaattgagagaggaag

SEQ ID NO: 33263 - DNA, 20 bp, Artificial Sequence
  chemically synthesized
ggtccttccagccaggtcat

SEQ ID NO: 33264 - DNA, 20 bp, Artificial Sequence
  chemically synthesized
ttagaatggctctccaacag

SEQ ID NO: 33265 - DNA, 20 bp, Artificial Sequence
  chemically synthesized
tacagggagacttggatcca

SEQ ID NO: 33266 - DNA, 20 bp, Artificial Sequence
  chemically synthesized
taacaaaagcagcttttgag

SEQ ID NO: 33267 - DNA, 20 bp, Artificial Sequence
  chemically synthesized
cgtttcattttcagattttg

SEQ ID NO: 33268 - DNA, 20 bp, Artificial Sequence
  chemically synthesized
cacgtggacctgctaggtgg

SEQ ID NO: 33269 - DNA, 20 bp, Artificial Sequence
  chemically synthesized
atgttactcatatggaatca

SEQ ID NO: 33270 - DNA, 20 bp, Artificial Sequence
  chemically synthesized
ggcagcctagttttattcct

SEQ ID NO: 33271 - DNA, 20 bp, Artificial Sequence
  chemically synthesized
acataataggttttaattct

SEQ ID NO: 33272 - DNA, 20 bp, Artificial Sequence
  chemically synthesized
agaatggccagttctggttc

SEQ ID NO: 33273 - DNA, 20 bp, Artificial Sequence
  chemically synthesized
acaccagtcactcaatagtg

SEQ ID NO: 33274 - DNA, 20 bp, Artificial Sequence
  chemically synthesized
ctaagttctgggatacatgt

SEQ ID NO: 33275 - DNA, 20 bp, Artificial Sequence
  chemically synthesized
ctctgctctggcaggtgtta

SEQ ID NO: 33276 - DNA, 20 bp, Artificial Sequence
  chemically synthesized
ggtatctaatacttaacctg

SEQ ID NO: 33277 - DNA, 20 bp, Artificial Sequence
  chemically synthesized
gaagctggacaattcgggtg

SEQ ID NO: 33278 - DNA, 20 bp, Artificial Sequence
  chemically synthesized
agagagtgatttttcacatt

SEQ ID NO: 33279 - DNA, 20 bp, Artificial Sequence
  chemically synthesized
tagcaaatatgatttatttt

SEQ ID NO: 33280 - DNA, 20 bp, Artificial Sequence
  chemically synthesized
aaagatggaaacacttaggg

SEQ ID NO: 33281 - DNA, 20 bp, Artificial Sequence
  chemically synthesized
atggaaacacttagggccag

SEQ ID NO: 33282 - DNA, 20 bp, Artificial Sequence
  chemically synthesized
caagtccctgcttcctaaag

SEQ ID NO: 33283 - DNA, 20 bp, Artificial Sequence
  chemically synthesized
ccctgcttcctaaaggaaga

SEQ ID NO: 33284 - DNA, 20 bp, Artificial Sequence
  chemically synthesized
cctccccatggctttgaaaa

SEQ ID NO: 33285 - DNA, 20 bp, Artificial Sequence
  chemically synthesized
gccacccacattcattgggg

SEQ ID NO: 33286 - DNA, 20 bp, Artificial Sequence
  chemically synthesized
catggttgtgtcccttattt

SEQ ID NO: 33287 - DNA, 20 bp, Artificial Sequence
  chemically synthesized
ttgtgaaagctgaagatgtc

SEQ ID NO: 33288 - DNA, 20 bp, Artificial Sequence
  chemically synthesized
actaaatgaagcctgctgtg

SEQ ID NO: 33289 - DNA, 20 bp, Artificial Sequence
  chemically synthesized
agaggttgaatgaatgcatg

SEQ ID NO: 33290 - DNA, 20 bp, Artificial Sequence
  chemically synthesized
aatactttgggcccagagcc

SEQ ID NO: 33291 - DNA, 20 bp, Artificial Sequence
  chemically synthesized
gtctttggcttagttgcttt

SEQ ID NO: 33292 - DNA, 20 bp, Artificial Sequence
  chemically synthesized
ttatgttaaagacacagctt

SEQ ID NO: 33293 - DNA, 20 bp, Artificial Sequence
  chemically synthesized
tctctacttcctccctttat

SEQ ID NO: 33294 - DNA, 20 bp, Artificial Sequence
  chemically synthesized
gaccatgagagagtttcagg

SEQ ID NO: 33295 - DNA, 20 bp, Artificial Sequence
  chemically synthesized
tattgctttcttttgttttt

SEQ ID NO: 33296 - DNA, 20 bp, Artificial Sequence
  chemically synthesized
ctataatactctgataagtc

SEQ ID NO: 33297 - DNA, 20 bp, Artificial Sequence
  chemically synthesized
caagagctagatgcggctga

SEQ ID NO: 33298 - DNA, 20 bp, Artificial Sequence
  chemically synthesized
ctttttgaagacccagggtg

SEQ ID NO: 33299 - DNA, 20 bp, Artificial Sequence
  chemically synthesized
tacacacccagtgattagtt

SEQ ID NO: 33300 - DNA, 20 bp, Artificial Sequence
  chemically synthesized
aaagttggtacccaatatat

SEQ ID NO: 33301 - DNA, 20 bp, Artificial Sequence
  chemically synthesized
acaggttgaaacaccttcca

SEQ ID NO: 33302 - DNA, 20 bp, Artificial Sequence
  chemically synthesized
acatttgaaaaaagattgag

SEQ ID NO: 33303 - DNA, 20 bp, Artificial Sequence
  chemically synthesized
aatgtgtcccatttgagaga

SEQ ID NO: 33304 - DNA, 20 bp, Artificial Sequence
  chemically synthesized
tgattcagcttgagtgtgca

SEQ ID NO: 33305 - DNA, 20 bp, Artificial Sequence
  chemically synthesized
agtgtgcatgagaatcacct

SEQ ID NO: 33306 - DNA, 20 bp, Artificial Sequence
  chemically synthesized
agtaagtctgaggtggtgcc

SEQ ID NO: 33307 - DNA, 20 bp, Artificial Sequence
  chemically synthesized
gtgggcctgggtctgcgctg

SEQ ID NO: 33308 - DNA, 20 bp, Artificial Sequence
  chemically synthesized
acttgcctaagagcactaac

SEQ ID NO: 33309 - DNA, 20 bp, Artificial Sequence
  chemically synthesized
cagagcccatctctggctgg

SEQ ID NO: 33310 - DNA, 20 bp, Artificial Sequence
  chemically synthesized
atgtcgattttacttaccaa

SEQ ID NO: 33311 - DNA, 20 bp, Artificial Sequence
  chemically synthesized
tgtgtttagtggaagaagca

SEQ ID NO: 33312 - DNA, 20 bp, Artificial Sequence
  chemically synthesized
gtaaatagcttcttaggctg

SEQ ID NO: 33313 - DNA, 20 bp, Artificial Sequence
  chemically synthesized
aagtactgcttaatggatca

SEQ ID NO: 33314 - DNA, 20 bp, Artificial Sequence
  chemically synthesized
tagctagggttttttacaac

SEQ ID NO: 33315 - DNA, 20 bp, Artificial Sequence
  chemically synthesized
ctcttcccagagtaagtggc

SEQ ID NO: 33316 - DNA, 20 bp, Artificial Sequence
  chemically synthesized
cctgggttgcctgtgtttcc

SEQ ID NO: 33317 - DNA, 20 bp, Artificial Sequence
  chemically synthesized
agagtatggcccagctcagt

SEQ ID NO: 33318 - DNA, 20 bp, Artificial Sequence
  chemically synthesized
gaagaggggggcagagggac

SEQ ID NO: 33319 - DNA, 20 bp, Artificial Sequence
  chemically synthesized
agaccgaaattgaaaacaaa

SEQ ID NO: 33320 - DNA, 20 bp, Artificial Sequence
  chemically synthesized
tccccacgcctgggatgagt

SEQ ID NO: 33321 - DNA, 20 bp, Artificial Sequence
  chemically synthesized
aatgtccatgtgtatagaga

SEQ ID NO: 33322 - DNA, 20 bp, Artificial Sequence
  chemically synthesized
gcacacatctttagccaagg

SEQ ID NO: 33323 - DNA, 20 bp, Artificial Sequence
  chemically synthesized
ctaatttttctcctggtttt

SEQ ID NO: 33324 - DNA, 20 bp, Artificial Sequence
  chemically synthesized
gttttctgaaagatactgtt

SEQ ID NO: 33325 - DNA, 20 bp, Artificial Sequence
  chemically synthesized
acacaaaaaagcaggttcaa

SEQ ID NO: 33326 - DNA, 20 bp, Artificial Sequence
  chemically synthesized
tgaaaaataacctgctgtgg

SEQ ID NO: 33327 - DNA, 20 bp, Artificial Sequence
  chemically synthesized
cctgctgtggaaagaaaaaa

SEQ ID NO: 33328 - DNA, 20 bp, Artificial Sequence
  chemically synthesized
aaaggaaaaaggtcatggag

SEQ ID NO: 33329 - DNA, 20 bp, Artificial Sequence
  chemically synthesized
tggaagtgggttgtgggggt

SEQ ID NO: 33330 - DNA, 20 bp, Artificial Sequence
  chemically synthesized
agataggaattccaagactc

SEQ ID NO: 33331 - DNA, 20 bp, Artificial Sequence
  chemically synthesized
tttttcacattggtgacata

SEQ ID NO: 33332 - DNA, 20 bp, Artificial Sequence
  chemically synthesized
tgattttcatcagagtaaat

SEQ ID NO: 33333 - DNA, 20 bp, Artificial Sequence
  chemically synthesized
gatgactgcagtttaggaat

SEQ ID NO: 33334 - DNA, 20 bp, Artificial Sequence
  chemically synthesized
acactagctgccctcatgat

SEQ ID NO: 33335 - DNA, 20 bp, Artificial Sequence
  chemically synthesized
attttttttttttttccttc

SEQ ID NO: 33336 - DNA, 20 bp, Artificial Sequence
  chemically synthesized
cagcccttcttttaaaagaa

SEQ ID NO: 33337 - DNA, 20 bp, Artificial Sequence
  chemically synthesized
atattttaaggctttttttt

SEQ ID NO: 33338 - DNA, 20 bp, Artificial Sequence
  chemically synthesized
tcctcccacagtctggggtg

SEQ ID NO: 33339 - DNA, 20 bp, Artificial Sequence
  chemically synthesized
tctatgaaatgtttgcctat

SEQ ID NO: 33340 - DNA, 20 bp, Artificial Sequence
  chemically synthesized
cacctgtcacccagggggga

SEQ ID NO: 33341 - DNA, 20 bp, Artificial Sequence
  chemically synthesized
gaagacatttgttgaggtgc

SEQ ID NO: 33342 - DNA, 20 bp, Artificial Sequence
  chemically synthesized
cgcacagaacactcatggat

SEQ ID NO: 33343 - DNA, 20 bp, Artificial Sequence
  chemically synthesized
ctcatggattaagaatctac

SEQ ID NO: 33344 - DNA, 20 bp, Artificial Sequence
  chemically synthesized
gtatcccttcaggactaggt

SEQ ID NO: 33345 - DNA, 20 bp, Artificial Sequence
  chemically synthesized
caataacccctttaacctgc

SEQ ID NO: 33346 - DNA, 20 bp, Artificial Sequence
  chemically synthesized
tttagcgtgtacagtaccct

SEQ ID NO: 33347 - DNA, 20 bp, Artificial Sequence
  chemically synthesized
acaaacagaagtaacgaagc

SEQ ID NO: 33348 - DNA, 20 bp, Artificial Sequence
  chemically synthesized
ctgtttccagttccgttctg

SEQ ID NO: 33349 - DNA, 20 bp, Artificial Sequence
  chemically synthesized
tgagagaaaaagagagagag

SEQ ID NO: 33350 - DNA, 20 bp, Artificial Sequence
  chemically synthesized
tttggattaaccctctatag

SEQ ID NO: 33351 - DNA, 20 bp, Artificial Sequence
  chemically synthesized
taaatgtatcaattggaaag

SEQ ID NO: 33352 - DNA, 20 bp, Artificial Sequence
  chemically synthesized
ggccttgaattgacaaatta

SEQ ID NO: 33353 - DNA, 20 bp, Artificial Sequence
  chemically synthesized
ttgctcctggtgagagctta

SEQ ID NO: 33354 - DNA, 20 bp, Artificial Sequence
  chemically synthesized
ttttaaaaatactggcacca

SEQ ID NO: 33355 - DNA, 20 bp, Artificial Sequence
  chemically synthesized
aggtttgacagaggggaaca

SEQ ID NO: 33356 - DNA, 20 bp, Artificial Sequence
  chemically synthesized
gtgacattcttaaaaaaaga

SEQ ID NO: 33357 - DNA, 20 bp, Artificial Sequence
  chemically synthesized
cattcttaaaaaaagaagag

SEQ ID NO: 33358 - DNA, 20 bp, Artificial Sequence
  chemically synthesized
tatacttaagggaaaagttg

SEQ ID NO: 33359 - DNA, 20 bp, Artificial Sequence
  chemically synthesized
tgcaagcgctgtgaatggaa

SEQ ID NO: 33360 - DNA, 20 bp, Artificial Sequence
  chemically synthesized
ggaaacagaatacacttaac

SEQ ID NO: 33361 - DNA, 20 bp, Artificial Sequence
  chemically synthesized
acttttttaaatataaatgt

SEQ ID NO: 33362 - DNA, 20 bp, Artificial Sequence
  chemically synthesized
atggtcttttttctgtattt

SEQ ID NO: 33363 - DNA, 20 bp, Artificial Sequence
  chemically synthesized
gcttcaaaaaaaaaaaaaag

SEQ ID NO: 33364 - DNA, 20 bp, Artificial Sequence
  chemically synthesized
tggcggtttgggggagcctg

SEQ ID NO: 33365 - DNA, 20 bp, Artificial Sequence
  chemically synthesized
tcttaccttcatatgcagta

SEQ ID NO: 33366 - DNA, 20 bp, Artificial Sequence
  chemically synthesized
accttcatatgcagtaaaag

SEQ ID NO: 33367 - DNA, 20 bp, Artificial Sequence
  chemically synthesized
tcatatgcagtaaaagaaag

SEQ ID NO: 33368 - DNA, 20 bp, Artificial Sequence
  chemically synthesized
gtgctttatatttagattgg

SEQ ID NO: 33369 - DNA, 20 bp, Artificial Sequence
  chemically synthesized
tcatatgcaaagcatattaa

SEQ ID NO: 33370 - DNA, 20 bp, Artificial Sequence
  chemically synthesized
acttttttgtaaatggcaat

SEQ ID NO: 33371 - DNA, 20 bp, Artificial Sequence
  chemically synthesized
cacactctgtaaattacttg

SEQ ID NO: 33372 - DNA, 20 bp, Artificial Sequence
  chemically synthesized
tagttttaaggctttccagt

SEQ ID NO: 33373 - DNA, 20 bp, Artificial Sequence
  chemically synthesized
ttccagtttagaatagtttt

SEQ ID NO: 33374 - DNA, 20 bp, Artificial Sequence
  chemically synthesized
aaaacttactccatctctta

SEQ ID NO: 33375 - DNA, 20 bp, Artificial Sequence
  chemically synthesized
ttgttttgtttaaaaaagag

SEQ ID NO: 33376 - DNA, 20 bp, Artificial Sequence
  chemically synthesized
gagaaaaaaagagagagacg

SEQ ID NO: 33377 - DNA, 20 bp, Artificial Sequence
  chemically synthesized
aaaaagagagagacgaaaga

SEQ ID NO: 33378 - DNA, 20 bp, Artificial Sequence
  chemically synthesized
taggtctattttaaaaatcc

SEQ ID NO: 33379 - DNA, 20 bp, Artificial Sequence
  chemically synthesized
gtcatgccttttatctgagg

SEQ ID NO: 33380 - DNA, 20 bp, Artificial Sequence
  chemically synthesized
gttttatctttctaaagtat

SEQ ID NO: 33381 - DNA, 20 bp, Artificial Sequence
  chemically synthesized
gtggggctagaggaatccac

SEQ ID NO: 33382 - DNA, 20 bp, Artificial Sequence
  chemically synthesized
atccactgagaaaggatgtt

SEQ ID NO: 33383 - DNA, 20 bp, Artificial Sequence
  chemically synthesized
cttgatgtttgtcactgaac

SEQ ID NO: 33384 - DNA, 20 bp, Artificial Sequence
  chemically synthesized
caaaatgctgctcaagacag

SEQ ID NO: 33385 - DNA, 20 bp, Artificial Sequence
  chemically synthesized
taggttttgcatcctgacag

SEQ ID NO: 33386 - DNA, 20 bp, Artificial Sequence
  chemically synthesized
atttctgaagctgatgaaca

SEQ ID NO: 33387 - DNA, 20 bp, Artificial Sequence
  chemically synthesized
tatttctcacagattttaaa

SEQ ID NO: 33388 - DNA, 20 bp, Artificial Sequence
  chemically synthesized
cttcatttgcactggccatg

SEQ ID NO: 33389 - DNA, 20 bp, Artificial Sequence
  chemically synthesized
gcttaggtataattccaatt

SEQ ID NO: 33390 - DNA, 20 bp, Artificial Sequence
  chemically synthesized
aaagccctgcatatttccca

SEQ ID NO: 33391 - DNA, 20 bp, Artificial Sequence
  chemically synthesized
aaataaacgaacccattgtt

SEQ ID NO: 33392 - DNA, 20 bp, Artificial Sequence
  chemically synthesized
tcagatctttcatagggatg

SEQ ID NO: 33393 - DNA, 20 bp, Artificial Sequence
  chemically synthesized
cccatgatatactttgtcta

SEQ ID NO: 33394 - DNA, 20 bp, Artificial Sequence
  chemically synthesized
attgccttcccccttccaaa

SEQ ID NO: 33395 - DNA, 20 bp, Artificial Sequence
  chemically synthesized
cttcccccttccaaaaaaga

SEQ ID NO: 33396 - DNA, 20 bp, Artificial Sequence
  chemically synthesized
aaaagaaaactgcatgtttg

SEQ ID NO: 33397 - DNA, 20 bp, Artificial Sequence
  chemically synthesized
tttaaaaagctagttagaga

SEQ ID NO: 33398 - DNA, 20 bp, Artificial Sequence
  chemically synthesized
gctcgagagcccttaagttc

SEQ ID NO: 33399 - DNA, 20 bp, Artificial Sequence
  chemically synthesized
gtgggtaggaggaacagatt

SEQ ID NO: 33400 - DNA, 20 bp, Artificial Sequence
  chemically synthesized
cagatggcataaattttcaa

SEQ ID NO: 33401 - DNA, 20 bp, Artificial Sequence
  chemically synthesized
tcacagcaatgctctattcc

SEQ ID NO: 33402 - DNA, 20 bp, Artificial Sequence
  chemically synthesized
ttactgcttggagatccaga

SEQ ID NO: 33403 - DNA, 20 bp, Artificial Sequence
  chemically synthesized
cttggagatccagaagagaa

SEQ ID NO: 33404 - DNA, 20 bp, Artificial Sequence
  chemically synthesized
ccagaggccacatcagtaag

SEQ ID NO: 33405 - DNA, 20 bp, Artificial Sequence
  chemically synthesized
ctaccaacagatgtgtgcac

SEQ ID NO: 33406 - DNA, 20 bp, Artificial Sequence
  chemically synthesized
cagacaagaagttatttcat

SEQ ID NO: 33407 - DNA, 20 bp, Artificial Sequence
  chemically synthesized
gctgaactccttgctgatgc

SEQ ID NO: 33408 - DNA, 20 bp, Artificial Sequence
  chemically synthesized
aagacaacaaaaatttattt

SEQ ID NO: 33409 - DNA, 20 bp, Artificial Sequence
  chemically synthesized
tttttttttttttttttaag

SEQ ID NO: 33410 - DNA, 20 bp, Artificial Sequence
  chemically synthesized
cactgtataaaaaaggtctg

SEQ ID NO: 33411 - DNA, 20 bp, Artificial Sequence
  chemically synthesized
gaattggggtccatgatggg

SEQ ID NO: 33412 - DNA, 20 bp, Artificial Sequence
  chemically synthesized
atgttgaatatcagcctgtt

SEQ ID NO: 33413 - DNA, 20 bp, Artificial Sequence
  chemically synthesized
tcaaaaaccagtgatcattt

SEQ ID NO: 33414 - DNA, 20 bp, Artificial Sequence
  chemically synthesized
ccccggaagtaatagtagga

SEQ ID NO: 33415 - DNA, 20 bp, Artificial Sequence
  chemically synthesized
atcttgagttcctaaccagc

SEQ ID NO: 33416 - DNA, 20 bp, Artificial Sequence
  chemically synthesized
ccaggaagtacttaagcttt

SEQ ID NO: 33417 - DNA, 20 bp, Artificial Sequence
  chemically synthesized
agaatacttttatatacatg

SEQ ID NO: 33418 - DNA, 20 bp, Artificial Sequence
  chemically synthesized
ttgtgattctataaattaga

SEQ ID NO: 33419 - DNA, 20 bp, Artificial Sequence
  chemically synthesized
attctataaattagataaga

SEQ ID NO: 33420 - DNA, 20 bp, Artificial Sequence
  chemically synthesized
gtaatcactcattttagaga

SEQ ID NO: 33421 - DNA, 20 bp, Artificial Sequence
  chemically synthesized
cctaatttaaactaagatag

SEQ ID NO: 33422 - DNA, 20 bp, Artificial Sequence
  chemically synthesized
aaaaatcatgtcaacgcata

SEQ ID NO: 33423 - DNA, 20 bp, Artificial Sequence
  chemically synthesized
cacaaaaggcttgggaaagt

SEQ ID NO: 33424 - DNA, 20 bp, Artificial Sequence
  chemically synthesized
cttctccacagtgaagagga

SEQ ID NO: 33425 - DNA, 20 bp, Artificial Sequence
  chemically synthesized
tagctctggacaagaaacca

SEQ ID NO: 33426 - DNA, 20 bp, Artificial Sequence
  chemically synthesized
ccaccaaaagcatatatttg

SEQ ID NO: 33427 - DNA, 20 bp, Artificial Sequence
  chemically synthesized
attataagtcagacagttag

SEQ ID NO: 33428 - DNA, 20 bp, Artificial Sequence
  chemically synthesized
cttcttggaggctactgtca

SEQ ID NO: 33429 - DNA, 20 bp, Artificial Sequence
  chemically synthesized
gggctctcgagcttccatcc

SEQ ID NO: 33430 - DNA, 20 bp, Artificial Sequence
  chemically synthesized
acacttgcccttatgactga

SEQ ID NO: 33431 - DNA, 20 bp, Artificial Sequence
  chemically synthesized
attataaagaaacaaaaaat

SEQ ID NO: 33432 - DNA, 20 bp, Artificial Sequence
  chemically synthesized
tgatgtaaaagcagcacaac

SEQ ID NO: 33433 - DNA, 20 bp, Artificial Sequence
  chemically synthesized
ggcgaacaaatctctgaaga

SEQ ID NO: 33434 - DNA, 20 bp, Artificial Sequence
  chemically synthesized
agttgctctcaaattgcacc

SEQ ID NO: 33435 - DNA, 20 bp, Artificial Sequence
  chemically synthesized
tttgccactttacagaaagg

SEQ ID NO: 33436 - DNA, 20 bp, Artificial Sequence
  chemically synthesized
acggagggggaaaagaggct

SEQ ID NO: 33437 - DNA, 20 bp, Artificial Sequence
  chemically synthesized
ggaaaagaggcttaaaacaa

SEQ ID NO: 33438 - DNA, 20 bp, Artificial Sequence
  chemically synthesized
tatctacagaatgccctggg

SEQ ID NO: 33439 - DNA, 20 bp, Artificial Sequence
  chemically synthesized
cagcacgtcaagcctgttac

SEQ ID NO: 33440 - DNA, 20 bp, Artificial Sequence
  chemically synthesized
taattctgtctgtcaggatg

SEQ ID NO: 33441 - DNA, 20 bp, Artificial Sequence
  chemically synthesized
attaaaatgaatactgtata

SEQ ID NO: 33442 - DNA, 20 bp, Artificial Sequence
  chemically synthesized
agttttggagaaacctaatc

SEQ ID NO: 33443 - DNA, 20 bp, Artificial Sequence
  chemically synthesized
ccacccaaactggcttttca

SEQ ID NO: 33444 - DNA, 20 bp, Artificial Sequence
  chemically synthesized
ttctttatactttagaaaga

SEQ ID NO: 33445 - DNA, 20 bp, Artificial Sequence
  chemically synthesized
gtcatccaggaagaccctat

SEQ ID NO: 33446 - DNA, 20 bp, Artificial Sequence
  chemically synthesized
ttttctccctcttttttaaa

SEQ ID NO: 33447 - DNA, 20 bp, Artificial Sequence
  chemically synthesized
tccctcttttttaaacaaaa

SEQ ID NO: 33448 - DNA, 20 bp, Artificial Sequence
  chemically synthesized
cttttttaaacaaaacaaaa

SEQ ID NO: 33449 - DNA, 20 bp, Artificial Sequence
  chemically synthesized
ttaaacaaaacaaaacaaaa

SEQ ID NO: 33450 - DNA, 20 bp, Artificial Sequence
  chemically synthesized
caaaacaaaacaaaacaaaa

SEQ ID NO: 33451 - DNA, 20 bp, Artificial Sequence
  chemically synthesized
taagtttttaacatcagact

SEQ ID NO: 33452 - DNA, 20 bp, Artificial Sequence
  chemically synthesized
gaaaacaccttccatttctt

SEQ ID NO: 33453 - DNA, 20 bp, Artificial Sequence
  chemically synthesized
tattctaaactggaaagcct

SEQ ID NO: 33454 - DNA, 20 bp, Artificial Sequence
  chemically synthesized
aagactgactggccttctct

SEQ ID NO: 33455 - DNA, 20 bp, Artificial Sequence
  chemically synthesized
ttaatgcagacaactgccaa

SEQ ID NO: 33456 - DNA, 20 bp, Artificial Sequence
  chemically synthesized
atctaaataaaaaaaaaaat

SEQ ID NO: 33457 - DNA, 20 bp, Artificial Sequence
  chemically synthesized
atttagtttttggcaatgaa

SEQ ID NO: 33458 - DNA, 20 bp, Artificial Sequence
  chemically synthesized
tttggcaatgaaaaaaactg

SEQ ID NO: 33459 - DNA, 20 bp, Artificial Sequence
  chemically synthesized
aaaattaaaaaaataaaaat

SEQ ID NO: 33460 - DNA, 20 bp, Artificial Sequence
  chemically synthesized
taatcattgtttaaaaaaaa

SEQ ID NO: 33461 - DNA, 20 bp, Artificial Sequence
  chemically synthesized
aaaaaaaataaaactttggg

SEQ ID NO: 33462 - DNA, 20 bp, Artificial Sequence
  chemically synthesized
gatccaaggcactcatattt

SEQ ID NO: 33463 - DNA, 20 bp, Artificial Sequence
  chemically synthesized
ttcctcctcacgttataaaa

SEQ ID NO: 33464 - DNA, 20 bp, Artificial Sequence
  chemically synthesized
catgctgtctaagtttaaaa

SEQ ID NO: 33465 - DNA, 20 bp, Artificial Sequence
  chemically synthesized
aaaagaaaaagaaaaagaaa

SEQ ID NO: 33466 - DNA, 20 bp, Artificial Sequence
  chemically synthesized
atgtttaaaaaatctgaaag

SEQ ID NO: 33467 - DNA, 20 bp, Artificial Sequence
  chemically synthesized
atcctagtttaaggaacagt

SEQ ID NO: 33468 - DNA, 20 bp, Artificial Sequence
  chemically synthesized
agccaaaggacgaggatgag

SEQ ID NO: 33469 - DNA, 20 bp, Artificial Sequence
  chemically synthesized
aaggacgaggatgagaaaaa

SEQ ID NO: 33470 - DNA, 20 bp, Artificial Sequence
  chemically synthesized
aaggcagaaagattttgaaa

SEQ ID NO: 33471 - DNA, 20 bp, Artificial Sequence
  chemically synthesized
ggtcccaaataggctggaaa

SEQ ID NO: 33472 - DNA, 20 bp, Artificial Sequence
  chemically synthesized
taaaattatattttacctta

SEQ ID NO: 33473 - DNA, 20 bp, Artificial Sequence
  chemically synthesized
cctatctgtaaaatgagcat

SEQ ID NO: 33474 - DNA, 20 bp, Artificial Sequence
  chemically synthesized
gtgtcatctccctcccatct

SEQ ID NO: 33475 - DNA, 20 bp, Artificial Sequence
  chemically synthesized
aagcaaactgtattattttc

SEQ ID NO: 33476 - DNA, 20 bp, Artificial Sequence
  chemically synthesized
ttctaaaacagtatctttca

SEQ ID NO: 33477 - DNA, 20 bp, Artificial Sequence
  chemically synthesized
caatgatgtgcatttttctc

SEQ ID NO: 33478 - DNA, 20 bp, Artificial Sequence
  chemically synthesized
agatgtgtaagcagcaaggg

SEQ ID NO: 33479 - DNA, 20 bp, Artificial Sequence
  chemically synthesized
tggggagggcgggagacaag

SEQ ID NO: 33480 - DNA, 20 bp, Artificial Sequence
  chemically synthesized
acatttcatcctctctgacc

SEQ ID NO: 33481 - DNA, 20 bp, Artificial Sequence
  chemically synthesized
ccgttcactaagtttgctgc

SEQ ID NO: 33482 - DNA, 20 bp, Artificial Sequence
  chemically synthesized
tttttgttttctaagttgta

SEQ ID NO: 33483 - DNA, 20 bp, Artificial Sequence
  chemically synthesized
ctgacttggtctcacaattg

SEQ ID NO: 33484 - DNA, 20 bp, Artificial Sequence
  chemically synthesized
ccctgcagaattagacagct

SEQ ID NO: 33485 - DNA, 20 bp, Artificial Sequence
  chemically synthesized
cctttaggactggaacagtc

SEQ ID NO: 33486 - DNA, 20 bp, Artificial Sequence
  chemically synthesized
ctgcagatttccaaatgtgc

SEQ ID NO: 33487 - DNA, 20 bp, Artificial Sequence
  chemically synthesized
agcccaactttaacaggtat

SEQ ID NO: 33488 - DNA, 20 bp, Artificial Sequence
  chemically synthesized
ctttaaaaagtgtattctgc

SEQ ID NO: 33489 - DNA, 20 bp, Artificial Sequence
  chemically synthesized
ataacatcaatcactcattt

SEQ ID NO: 33490 - DNA, 20 bp, Artificial Sequence
  chemically synthesized
gccgctgtgggcagtacaaa

SEQ ID NO: 33491 - DNA, 20 bp, Artificial Sequence
  chemically synthesized
agagaggctttgggaaagag

SEQ ID NO: 33492 - DNA, 20 bp, Artificial Sequence
  chemically synthesized
aaatactagaataagctaaa

SEQ ID NO: 33493 - DNA, 20 bp, Artificial Sequence
  chemically synthesized
aactggccattctccagaat

SEQ ID NO: 33494 - DNA, 20 bp, Artificial Sequence
  chemically synthesized
ctctaacatttcttcaggaa

SEQ ID NO: 33495 - DNA, 20 bp, Artificial Sequence
  chemically synthesized
gacggcaagtccttctttca

SEQ ID NO: 33496 - DNA, 20 bp, Artificial Sequence
  chemically synthesized
tctggcaaagtcccacagaa

SEQ ID NO: 33497 - DNA, 20 bp, Artificial Sequence
  chemically synthesized
agattgaggcttcccagccc

SEQ ID NO: 33498 - DNA, 20 bp, Artificial Sequence
  chemically synthesized
agagaaacaagtaactcctt

SEQ ID NO: 33499 - DNA, 20 bp, Artificial Sequence
  chemically synthesized
gcagggatcctaggaaaagt

SEQ ID NO: 33500 - DNA, 20 bp, Artificial Sequence
  chemically synthesized
aaggttaagatcagcttcct

SEQ ID NO: 33501 - DNA, 20 bp, Artificial Sequence
  chemically synthesized
tactgataaaggcactgcaa

SEQ ID NO: 33502 - DNA, 20 bp, Artificial Sequence
  chemically synthesized
ggattacagtaaggaaaatc

SEQ ID NO: 33503 - DNA, 20 bp, Artificial Sequence
  chemically synthesized
aactggggtcctctgctgtc

SEQ ID NO: 33504 - DNA, 20 bp, Artificial Sequence
  chemically synthesized
cccttatcaccattccagta

SEQ ID NO: 33505 - DNA, 20 bp, Artificial Sequence
  chemically synthesized
aggacttaaaaaaaaaaaaa

SEQ ID NO: 33506 - DNA, 20 bp, Artificial Sequence
  chemically synthesized
aaaaaccaaccaaccaaaca

SEQ ID NO: 33507 - DNA, 20 bp, Artificial Sequence
  chemically synthesized
aaatcaaaataggaaataca

SEQ ID NO: 33508 - DNA, 20 bp, Artificial Sequence
  chemically synthesized
catgcctttaagctaactgc

SEQ ID NO: 33509 - DNA, 20 bp, Artificial Sequence
  chemically synthesized
gaaaaataaacctagacctg

SEQ ID NO: 33510 - DNA, 20 bp, Artificial Sequence
  chemically synthesized
caatcaactcatttaaaaag

SEQ ID NO: 33511 - DNA, 20 bp, Artificial Sequence
  chemically synthesized
tactgaagtgagaaattcaa

SEQ ID NO: 33512 - DNA, 20 bp, Artificial Sequence
  chemically synthesized
taagataatttgatatccta

SEQ ID NO: 33513 - DNA, 20 bp, Artificial Sequence
  chemically synthesized
aatacagattcagattaagg

SEQ ID NO: 33514 - DNA, 20 bp, Artificial Sequence
  chemically synthesized
tgcctttataaaatccagaa

SEQ ID NO: 33515 - DNA, 20 bp, Artificial Sequence
  chemically synthesized
ttataaaatccagaacaaaa

SEQ ID NO: 33516 - DNA, 20 bp, Artificial Sequence
  chemically synthesized
taaggaagctgcagaaaggt

SEQ ID NO: 33517 - DNA, 20 bp, Artificial Sequence
  chemically synthesized
ttacttttgacctgggtttt

SEQ ID NO: 33518 - DNA, 20 bp, Artificial Sequence
  chemically synthesized
tgtactgcaggggaattcgg

SEQ ID NO: 33519 - DNA, 20 bp, Artificial Sequence
  chemically synthesized
gtatcaatagccaaagatcc

SEQ ID NO: 33520 - DNA, 20 bp, Artificial Sequence
  chemically synthesized
agcctaaagccactgctacc

SEQ ID NO: 33521 - DNA, 20 bp, Artificial Sequence
  chemically synthesized
ctaccacacccagccatacc

SEQ ID NO: 33522 - DNA, 20 bp, Artificial Sequence
  chemically synthesized
aatgcaaaaagctaagttct

SEQ ID NO: 33523 - DNA, 20 bp, Artificial Sequence
  chemically synthesized
gctgggctgactgcccacgt

SEQ ID NO: 33524 - DNA, 20 bp, Artificial Sequence
  chemically synthesized
gagaggaagatggatgtagg

SEQ ID NO: 33525 - DNA, 20 bp, Artificial Sequence
  chemically synthesized
aagatggatgtaggaaaaac

SEQ ID NO: 33526 - DNA, 20 bp, Artificial Sequence
  chemically synthesized
acacagcgagaccctgtctc

SEQ ID NO: 33527 - DNA, 20 bp, Artificial Sequence
  chemically synthesized
aatgtatttctagggaagaa

SEQ ID NO: 33528 - DNA, 20 bp, Artificial Sequence
  chemically synthesized
gaagcctgctggaattctag

SEQ ID NO: 33529 - DNA, 20 bp, Artificial Sequence
  chemically synthesized
gaaatgatgggaagagaccc

SEQ ID NO: 33530 - DNA, 20 bp, Artificial Sequence
  chemically synthesized
tgcaagggggagaaactgaa

SEQ ID NO: 33531 - DNA, 20 bp, Artificial Sequence
  chemically synthesized
atacacacaaaaggtacctg

SEQ ID NO: 33532 - DNA, 20 bp, Artificial Sequence
  chemically synthesized
caataccccttcccccaacc

SEQ ID NO: 33533 - DNA, 20 bp, Artificial Sequence
  chemically synthesized
cactattcttagctattttt

SEQ ID NO: 33534 - DNA, 20 bp, Artificial Sequence
  chemically synthesized
gaattgttcatgaaatccca

SEQ ID NO: 33535 - DNA, 20 bp, Artificial Sequence
  chemically synthesized
gggaaagttctggaagtcgg

SEQ ID NO: 33536 - DNA, 20 bp, Artificial Sequence
  chemically synthesized
agaggggggaaaatcttttg

SEQ ID NO: 33537 - DNA, 20 bp, Artificial Sequence
  chemically synthesized
ctgcggctgtgccctggatg

SEQ ID NO: 33538 - DNA, 20 bp, Artificial Sequence
  chemically synthesized
cacataaaaatttaagacgg

SEQ ID NO: 33539 - DNA, 20 bp, Artificial Sequence
  chemically synthesized
ccctctgcctctctacattc

SEQ ID NO: 33540 - DNA, 20 bp, Artificial Sequence
  chemically synthesized
ctgtaccaccagaagtcctg

SEQ ID NO: 33541 - DNA, 20 bp, Artificial Sequence
  chemically synthesized
cggaaaaagtctcagcctaa

SEQ ID NO: 33542 - DNA, 20 bp, Artificial Sequence
  chemically synthesized
taatgttcttgatatgttaa

SEQ ID NO: 33543 - DNA, 20 bp, Artificial Sequence
  chemically synthesized
gttttcaatcatcatcagag

SEQ ID NO: 33544 - DNA, 20 bp, Artificial Sequence
  chemically synthesized
ggatggctactggcttggag

SEQ ID NO: 33545 - DNA, 20 bp, Artificial Sequence
  chemically synthesized
aggcattgtgactttttatt

SEQ ID NO: 33546 - DNA, 20 bp, Artificial Sequence
  chemically synthesized
gtattaaggcccaacccagc

SEQ ID NO: 33547 - DNA, 20 bp, Artificial Sequence
  chemically synthesized
gcttccttgctccaaactat

SEQ ID NO: 33548 - DNA, 20 bp, Artificial Sequence
  chemically synthesized
aaaacagagcgtccccccaa

SEQ ID NO: 33549 - DNA, 20 bp, Artificial Sequence
  chemically synthesized
agggagggggaaatccctcc

SEQ ID NO: 33550 - DNA, 20 bp, Artificial Sequence
  chemically synthesized
tctggtctgtcaaacccctg

SEQ ID NO: 33551 - DNA, 20 bp, Artificial Sequence
  chemically synthesized
ccaggaaagccctggctata

SEQ ID NO: 33552 - DNA, 20 bp, Artificial Sequence
  chemically synthesized
tgataaaggcagctcactaa

SEQ ID NO: 33553 - DNA, 20 bp, Artificial Sequence
  chemically synthesized
tgatttcattatagcctctg

SEQ ID NO: 33554 - DNA, 20 bp, Artificial Sequence
  chemically synthesized
tcataaacaagcactattaa

SEQ ID NO: 33555 - DNA, 20 bp, Artificial Sequence
  chemically synthesized
ttgcctttcttgaaaagcta

SEQ ID NO: 33556 - DNA, 20 bp, Artificial Sequence
  chemically synthesized
aaaagctagaaaactgtgtc

SEQ ID NO: 33557 - DNA, 20 bp, Artificial Sequence
  chemically synthesized
tccgttcaagccagaaaagt

SEQ ID NO: 33558 - DNA, 20 bp, Artificial Sequence
  chemically synthesized
gcggggagaagggaagaagt

SEQ ID NO: 33559 - DNA, 20 bp, Artificial Sequence
  chemically synthesized
caacaacaaattacacaaat

SEQ ID NO: 33560 - DNA, 20 bp, Artificial Sequence
  chemically synthesized
agcatttggcaggcaaagga

SEQ ID NO: 33561 - DNA, 20 bp, Artificial Sequence
  chemically synthesized
agagccacacggacgtctca

SEQ ID NO: 33562 - DNA, 20 bp, Artificial Sequence
  chemically synthesized
atggtctacctgagacctga

SEQ ID NO: 33563 - DNA, 20 bp, Artificial Sequence
  chemically synthesized
aaaaagattaggaggaggag

SEQ ID NO: 33564 - DNA, 20 bp, Artificial Sequence
  chemically synthesized
gccactcaatgccatatcta

SEQ ID NO: 33565 - DNA, 20 bp, Artificial Sequence
  chemically synthesized
aacccttgacaggagccagt

SEQ ID NO: 33566 - DNA, 20 bp, Artificial Sequence
  chemically synthesized
ccactcttttccgttaccaa

SEQ ID NO: 33567 - DNA, 20 bp, Artificial Sequence
  chemically synthesized
aacagagcgctaatctgatt

SEQ ID NO: 33568 - DNA, 20 bp, Artificial Sequence
  chemically synthesized
tacatgttgcaccatttcat

SEQ ID NO: 33569 - DNA, 20 bp, Artificial Sequence
  chemically synthesized
tctaaattatttggtctaaa

SEQ ID NO: 33570 - DNA, 20 bp, Artificial Sequence
  chemically synthesized
tgttcctggcttgtggtgag

SEQ ID NO: 33571 - DNA, 20 bp, Artificial Sequence
  chemically synthesized
ggtcttgcatacacatacac

SEQ ID NO: 33572 - DNA, 20 bp, Artificial Sequence
  chemically synthesized
caccaagaaggcacaaaaaa

SEQ ID NO: 33573 - DNA, 20 bp, Artificial Sequence
  chemically synthesized
caatgacccactcctattat

SEQ ID NO: 33574 - DNA, 20 bp, Artificial Sequence
  chemically synthesized
gaatctgggctccgctcttc

SEQ ID NO: 33575 - DNA, 20 bp, Artificial Sequence
  chemically synthesized
acataagactaaagaatgtg

SEQ ID NO: 33576 - DNA, 20 bp, Artificial Sequence
  chemically synthesized
atgtttgagtaaaagagctg

SEQ ID NO: 33577 - DNA, 20 bp, Artificial Sequence
  chemically synthesized
cagccccgaaaaagggcaga

SEQ ID NO: 33578 - DNA, 20 bp, Artificial Sequence
  chemically synthesized
gaggaacaagaaccttactc

SEQ ID NO: 33579 - DNA, 20 bp, Artificial Sequence
  chemically synthesized
gaccagcctgggcaacatag

SEQ ID NO: 33580 - DNA, 20 bp, Artificial Sequence
  chemically synthesized
tgctgagctctcataataca

SEQ ID NO: 33581 - DNA, 20 bp, Artificial Sequence
  chemically synthesized
aacctccatattgagagaca

SEQ ID NO: 33582 - DNA, 20 bp, Artificial Sequence
  chemically synthesized
tgatgtgaaagttaaagatt

SEQ ID NO: 33583 - DNA, 20 bp, Artificial Sequence
  chemically synthesized
taaattactccaatgacaaa

SEQ ID NO: 33584 - DNA, 20 bp, Artificial Sequence
  chemically synthesized
gacatgaggtgtgaatgatg

SEQ ID NO: 33585 - DNA, 20 bp, Artificial Sequence
  chemically synthesized
gatcagccaccaaccgaacc

SEQ ID NO: 33586 - DNA, 20 bp, Artificial Sequence
  chemically synthesized
cctttgtcaacccagcatga

SEQ ID NO: 33587 - DNA, 20 bp, Artificial Sequence
  chemically synthesized
gagagagagcggacattttg

SEQ ID NO: 33588 - DNA, 20 bp, Artificial Sequence
  chemically synthesized
ttttcttttaaatacaactg

SEQ ID NO: 33589 - DNA, 20 bp, Artificial Sequence
  chemically synthesized
agagacagtgaggtctacaa

SEQ ID NO: 33590 - DNA, 20 bp, Artificial Sequence
  chemically synthesized
tttctacatggatagctttc

SEQ ID NO: 33591 - DNA, 20 bp, Artificial Sequence
  chemically synthesized
caaaatcattcattgccagg

SEQ ID NO: 33592 - DNA, 20 bp, Artificial Sequence
  chemically synthesized
ttaaacttcagccagagatc

SEQ ID NO: 33593 - DNA, 20 bp, Artificial Sequence
  chemically synthesized
cggaccacaggaactagtgt

SEQ ID NO: 33594 - DNA, 20 bp, Artificial Sequence
  chemically synthesized
gcatgcctattaaaaatccc

SEQ ID NO: 33595 - DNA, 20 bp, Artificial Sequence
  chemically synthesized
ccctttttcagcatgcttct

SEQ ID NO: 33596 - DNA, 20 bp, Artificial Sequence
  chemically synthesized
ggtatttgctggacagtgtg

SEQ ID NO: 33597 - DNA, 20 bp, Artificial Sequence
  chemically synthesized
aattcaactatttctttttc

SEQ ID NO: 33598 - DNA, 20 bp, Artificial Sequence
  chemically synthesized
attctttggagtttttcaaa

SEQ ID NO: 33599 - DNA, 20 bp, Artificial Sequence
  chemically synthesized
attccaaaaaatagcaggga

SEQ ID NO: 33600 - DNA, 20 bp, Artificial Sequence
  chemically synthesized
atgatttcactttctagata

SEQ ID NO: 33601 - DNA, 20 bp, Artificial Sequence
  chemically synthesized
gattttcaagggaagagaag

SEQ ID NO: 33602 - DNA, 20 bp, Artificial Sequence
  chemically synthesized
agtctaggagacccagcaaa

SEQ ID NO: 33603 - DNA, 20 bp, Artificial Sequence
  chemically synthesized
tgaaaggatggagaatacag

SEQ ID NO: 33604 - DNA, 20 bp, Artificial Sequence
  chemically synthesized
ggagaggccaccacgcagct

SEQ ID NO: 33605 - DNA, 20 bp, Artificial Sequence
  chemically synthesized
tgttgactgcagtttccatt

SEQ ID NO: 33606 - DNA, 20 bp, Artificial Sequence
  chemically synthesized
agccttgttcagccagaaat

SEQ ID NO: 33607 - DNA, 20 bp, Artificial Sequence
  chemically synthesized
accaagccacacacaaacag

SEQ ID NO: 33608 - DNA, 20 bp, Artificial Sequence
  chemically synthesized
ttctctttcccagaagattg

SEQ ID NO: 33609 - DNA, 20 bp, Artificial Sequence
  chemically synthesized
cataatgtcacaataaacta

SEQ ID NO: 33610 - DNA, 20 bp, Artificial Sequence
  chemically synthesized
gaagataagaaaatcgagaa

SEQ ID NO: 33611 - DNA, 20 bp, Artificial Sequence
  chemically synthesized
aaagaaagaaaaaggaaaaa

SEQ ID NO: 33612 - DNA, 20 bp, Artificial Sequence
  chemically synthesized
cctacctctttcgagctcct

SEQ ID NO: 33613 - DNA, 20 bp, Artificial Sequence
  chemically synthesized
gcgcaccctgggacccctga

SEQ ID NO: 33614 - DNA, 20 bp, Artificial Sequence
  chemically synthesized
ggtttttttttttttccttt

SEQ ID NO: 33615 - DNA, 20 bp, Artificial Sequence
  chemically synthesized
cattattatgactttacttg

SEQ ID NO: 33616 - DNA, 20 bp, Artificial Sequence
  chemically synthesized
cactccctttaagtacttcg

SEQ ID NO: 33617 - DNA, 20 bp, Artificial Sequence
  chemically synthesized
aagcattaactggtttggat

SEQ ID NO: 33618 - DNA, 20 bp, Artificial Sequence
  chemically synthesized
agttaaataaaccgacatgg

SEQ ID NO: 33619 - DNA, 20 bp, Artificial Sequence
  chemically synthesized
tcagagcagcagctgaatga

SEQ ID NO: 33620 - DNA, 20 bp, Artificial Sequence
  chemically synthesized
tgccatcaaactgctaacaa

SEQ ID NO: 33621 - DNA, 20 bp, Artificial Sequence
  chemically synthesized
aactgtacttaacgttaaaa

SEQ ID NO: 33622 - DNA, 20 bp, Artificial Sequence
  chemically synthesized
taacgttaaaagaaaacgga

SEQ ID NO: 33623 - DNA, 20 bp, Artificial Sequence
  chemically synthesized
ccactgaggcagctaataca

SEQ ID NO: 33624 - DNA, 20 bp, Artificial Sequence
  chemically synthesized
aacttttaatcttgagaaga

SEQ ID NO: 33625 - DNA, 20 bp, Artificial Sequence
  chemically synthesized
taataggccaatcaaaaatg

SEQ ID NO: 33626 - DNA, 20 bp, Artificial Sequence
  chemically synthesized
atcgtcacggactttgttca

SEQ ID NO: 33627 - DNA, 20 bp, Artificial Sequence
  chemically synthesized
tctaaacatggtaatttatc

SEQ ID NO: 33628 - DNA, 20 bp, Artificial Sequence
  chemically synthesized
gtaaacatccactgtggtat

SEQ ID NO: 33629 - DNA, 20 bp, Artificial Sequence
  chemically synthesized
gggcaaatcagaattagatt

SEQ ID NO: 33630 - DNA, 20 bp, Artificial Sequence
  chemically synthesized
ttttttctccttaacataac

SEQ ID NO: 33631 - DNA, 20 bp, Artificial Sequence
  chemically synthesized
tgcagggattggccaaatat

SEQ ID NO: 33632 - DNA, 20 bp, Artificial Sequence
  chemically synthesized
tcagtggattcgcctctatc

SEQ ID NO: 33633 - DNA, 20 bp, Artificial Sequence
  chemically synthesized
acaacagtgagaatacaaac

SEQ ID NO: 33634 - DNA, 20 bp, Artificial Sequence
  chemically synthesized
cacattataaaaatcttctt

SEQ ID NO: 33635 - DNA, 20 bp, Artificial Sequence
  chemically synthesized
atatggaataagttacattt

SEQ ID NO: 33636 - DNA, 20 bp, Artificial Sequence
  chemically synthesized
aattaattaggtcatgttgt

SEQ ID NO: 33637 - DNA, 20 bp, Artificial Sequence
  chemically synthesized
tccaaattgatacataacat

SEQ ID NO: 33638 - DNA, 20 bp, Artificial Sequence
  chemically synthesized
aagctggtactactgtatgt

SEQ ID NO: 33639 - DNA, 20 bp, Artificial Sequence
  chemically synthesized
ttcactaagagaaaggtgtg

SEQ ID NO: 33640 - DNA, 20 bp, Artificial Sequence
  chemically synthesized
tctgtaacagcaggagacag

SEQ ID NO: 33641 - DNA, 20 bp, Artificial Sequence
  chemically synthesized
atatcacgtggacctattct

SEQ ID NO: 33642 - DNA, 20 bp, Artificial Sequence
  chemically synthesized
tctctgacattgtactttga

SEQ ID NO: 33643 - DNA, 20 bp, Artificial Sequence
  chemically synthesized
aaaatcctaggtacttatta

SEQ ID NO: 33644 - DNA, 20 bp, Artificial Sequence
  chemically synthesized
gattcctatgtgcaataagc

SEQ ID NO: 33645 - DNA, 20 bp, Artificial Sequence
  chemically synthesized
aatatgagactaaaaaaaaa

SEQ ID NO: 33646 - DNA, 20 bp, Artificial Sequence
  chemically synthesized
gagactaaaaaaaaagaaaa

SEQ ID NO: 33647 - DNA, 20 bp, Artificial Sequence
  chemically synthesized
taaaaaaaaagaaaacaaaa

SEQ ID NO: 33648 - DNA, 20 bp, Artificial Sequence
  chemically synthesized
aaaaagaaaacaaaacaaaa

SEQ ID NO: 33649 - DNA, 20 bp, Artificial Sequence
  chemically synthesized
ctgcctctactgaaaataca

SEQ ID NO: 33650 - DNA, 20 bp, Artificial Sequence
  chemically synthesized
tccagcctgggcaacaagag

SEQ ID NO: 33651 - DNA, 20 bp, Artificial Sequence
  chemically synthesized
taaaaaaaaaaaaaaaaaaa

SEQ ID NO: 33652 - DNA, 20 bp, Artificial Sequence
  chemically synthesized
atgatatgcactacctttcc

SEQ ID NO: 33653 - DNA, 20 bp, Artificial Sequence
  chemically synthesized
caaaatcaagatacatctgt

SEQ ID NO: 33654 - DNA, 20 bp, Artificial Sequence
  chemically synthesized
agcacctctgaaaatgaaaa

SEQ ID NO: 33655 - DNA, 20 bp, Artificial Sequence
  chemically synthesized
caaatcatcacatatgtaaa

SEQ ID NO: 33656 - DNA, 20 bp, Artificial Sequence
  chemically synthesized
gcttaaataataactacaag

SEQ ID NO: 33657 - DNA, 20 bp, Artificial Sequence
  chemically synthesized
catttacactgctgtaataa

SEQ ID NO: 33658 - DNA, 20 bp, Artificial Sequence
  chemically synthesized
gcagcataattcacactgcc

SEQ ID NO: 33659 - DNA, 20 bp, Artificial Sequence
  chemically synthesized
aaaaaaaaaatcacaaaata

SEQ ID NO: 33660 - DNA, 20 bp, Artificial Sequence
  chemically synthesized
tccaggatgctgccagttaa

SEQ ID NO: 33661 - DNA, 20 bp, Artificial Sequence
  chemically synthesized
tagttaaaggtaatgtggtt

SEQ ID NO: 33662 - DNA, 20 bp, Artificial Sequence
  chemically synthesized
tgactgaactgatttacaat

SEQ ID NO: 33663 - DNA, 20 bp, Artificial Sequence
  chemically synthesized
gatgatcaaatgtacagata

SEQ ID NO: 33664 - DNA, 20 bp, Artificial Sequence
  chemically synthesized
gtttaacatcggtctccttg

SEQ ID NO: 33665 - DNA, 20 bp, Artificial Sequence
  chemically synthesized
agtggtgttcagagaaatac

SEQ ID NO: 33666 - DNA, 20 bp, Artificial Sequence
  chemically synthesized
atgcaaattcccctttccct

SEQ ID NO: 33667 - DNA, 20 bp, Artificial Sequence
  chemically synthesized
aaatgttggtaaggagcgag

SEQ ID NO: 33668 - DNA, 20 bp, Artificial Sequence
  chemically synthesized
gaaaaaggaagtgaggtttg

SEQ ID NO: 33669 - DNA, 20 bp, Artificial Sequence
  chemically synthesized
tgccggccccgaaagaaagc

SEQ ID NO: 33670 - DNA, 20 bp, Artificial Sequence
  chemically synthesized
ccccaccaccacccctttaa

SEQ ID NO: 33671 - DNA, 20 bp, Artificial Sequence
  chemically synthesized
accaagtataggtggtcctt

SEQ ID NO: 33672 - DNA, 20 bp, Artificial Sequence
  chemically synthesized
tagcattgttcattattttg

SEQ ID NO: 33673 - DNA, 20 bp, Artificial Sequence
  chemically synthesized
tctggatggacagagacaca

SEQ ID NO: 33674 - DNA, 20 bp, Artificial Sequence
  chemically synthesized
tagggaagacctgttggaaa

SEQ ID NO: 33675 - DNA, 20 bp, Artificial Sequence
  chemically synthesized
attgattttcctttttaaaa

SEQ ID NO: 33676 - DNA, 20 bp, Artificial Sequence
  chemically synthesized
tctctctcaatgttgagcat

SEQ ID NO: 33677 - DNA, 20 bp, Artificial Sequence
  chemically synthesized
gcaagcccggggccctcgct

SEQ ID NO: 33678 - DNA, 20 bp, Artificial Sequence
  chemically synthesized
ctgttgctgtacattttacg

SEQ ID NO: 33679 - DNA, 20 bp, Artificial Sequence
  chemically synthesized
atttttaaatttttcacgag

SEQ ID NO: 33680 - DNA, 20 bp, Artificial Sequence
  chemically synthesized
gtaaaagagataaaggggga

SEQ ID NO: 33681 - DNA, 20 bp, Artificial Sequence
  chemically synthesized
agggagtgagtacaagtcta

SEQ ID NO: 33682 - DNA, 20 bp, Artificial Sequence
  chemically synthesized
atacataaaaataaaataaa

SEQ ID NO: 33683 - DNA, 20 bp, Artificial Sequence
  chemically synthesized
aataatataccagcaatgat

SEQ ID NO: 33684 - DNA, 20 bp, Artificial Sequence
  chemically synthesized
taacactatatagtgaccct

SEQ ID NO: 33685 - DNA, 20 bp, Artificial Sequence
  chemically synthesized
cccctctagaatttgatcat

SEQ ID NO: 33686 - DNA, 20 bp, Artificial Sequence
  chemically synthesized
cgagctgctcgtttaaaaga

SEQ ID NO: 33687 - DNA, 20 bp, Artificial Sequence
  chemically synthesized
agtgtctgtcaagcaagaat

SEQ ID NO: 33688 - DNA, 20 bp, Artificial Sequence
  chemically synthesized
atagcagagcctagagaagc

SEQ ID NO: 33689 - DNA, 20 bp, Artificial Sequence
  chemically synthesized
ttataggcaggaagcaagaa

SEQ ID NO: 33690 - DNA, 20 bp, Artificial Sequence
  chemically synthesized
ttatttatgtgattctgaat

SEQ ID NO: 33691 - DNA, 20 bp, Artificial Sequence
  chemically synthesized
tgaattttcagcatggcagt

SEQ ID NO: 33692 - DNA, 20 bp, Artificial Sequence
  chemically synthesized
cagcatggcagttaaaacaa

SEQ ID NO: 33693 - DNA, 20 bp, Artificial Sequence
  chemically synthesized
aaaaaaacaccactaccaca

SEQ ID NO: 33694 - DNA, 20 bp, Artificial Sequence
  chemically synthesized
tttattctgtgaaagcttaa

SEQ ID NO: 33695 - DNA, 20 bp, Artificial Sequence
  chemically synthesized
gtgaaagcttaaaaaaacaa

SEQ ID NO: 33696 - DNA, 20 bp, Artificial Sequence
  chemically synthesized
cacacacacacacacacaca

SEQ ID NO: 33697 - DNA, 20 bp, Artificial Sequence
  chemically synthesized
gtactaaattggggtacata

SEQ ID NO: 33698 - DNA, 20 bp, Artificial Sequence
  chemically synthesized
ctgcactccctatgcatttt

SEQ ID NO: 33699 - DNA, 20 bp, Artificial Sequence
  chemically synthesized
cctttgatctatagcgaaat

SEQ ID NO: 33700 - DNA, 20 bp, Artificial Sequence
  chemically synthesized
cttcatttgtacttttttta

SEQ ID NO: 33701 - DNA, 20 bp, Artificial Sequence
  chemically synthesized
aagcagttgtggtagatcca

SEQ ID NO: 33702 - DNA, 20 bp, Artificial Sequence
  chemically synthesized
aaaatacacgtttcctgaaa

SEQ ID NO: 33703 - DNA, 20 bp, Artificial Sequence
  chemically synthesized
tagaggcgaatccactgatt

SEQ ID NO: 33704 - DNA, 20 bp, Artificial Sequence
  chemically synthesized
tgcaagggtgccttcaaaaa

SEQ ID NO: 33705 - DNA, 20 bp, Artificial Sequence
  chemically synthesized
tttgctttttgaactttcta

SEQ ID NO: 33706 - DNA, 20 bp, Artificial Sequence
  chemically synthesized
atccctgcacctcctcaaac

SEQ ID NO: 33707 - DNA, 20 bp, Artificial Sequence
  chemically synthesized
tcaaacaaaaacaaacctca

SEQ ID NO: 33708 - DNA, 20 bp, Artificial Sequence
  chemically synthesized
cgatcctttcagtttccagt

SEQ ID NO: 33709 - DNA, 20 bp, Artificial Sequence
  chemically synthesized
aaaaattattcctttacatt

SEQ ID NO: 33710 - DNA, 20 bp, Artificial Sequence
  chemically synthesized
aaagatactcttggatcttt

SEQ ID NO: 33711 - DNA, 20 bp, Artificial Sequence
  chemically synthesized
acaactgctgtccttttaac

SEQ ID NO: 33712 - DNA, 20 bp, Artificial Sequence
  chemically synthesized
aatgaggaaatcataggaag

SEQ ID NO: 33713 - DNA, 20 bp, Artificial Sequence
  chemically synthesized
tacacgagtgccctggtggt

SEQ ID NO: 33714 - DNA, 20 bp, Artificial Sequence
  chemically synthesized
agtgtaactgatattctgat

SEQ ID NO: 33715 - DNA, 20 bp, Artificial Sequence
  chemically synthesized
tcagctgacccggtatttaa

SEQ ID NO: 33716 - DNA, 20 bp, Artificial Sequence
  chemically synthesized
tgacccggtatttaagaaaa

SEQ ID NO: 33717 - DNA, 20 bp, Artificial Sequence
  chemically synthesized
aagattacagtattagagtt

SEQ ID NO: 33718 - DNA, 20 bp, Artificial Sequence
  chemically synthesized
gccaccaccaccaaaaaaag

SEQ ID NO: 33719 - DNA, 20 bp, Artificial Sequence
  chemically synthesized
caccaaaaaaagaaaaacaa

SEQ ID NO: 33720 - DNA, 20 bp, Artificial Sequence
  chemically synthesized
aaaagaaaaacaaaaaaaca

SEQ ID NO: 33721 - DNA, 20 bp, Artificial Sequence
  chemically synthesized
caaaaaaacaaaaaacaaag

SEQ ID NO: 33722 - DNA, 20 bp, Artificial Sequence
  chemically synthesized
aaacaaaaaacaaagcaaaa

SEQ ID NO: 33723 - DNA, 20 bp, Artificial Sequence
  chemically synthesized
aaaaacaaagcaaaacaaaa

SEQ ID NO: 33724 - DNA, 20 bp, Artificial Sequence
  chemically synthesized
aacaaaacaaaaccttttta

SEQ ID NO: 33725 - DNA, 20 bp, Artificial Sequence
  chemically synthesized
agttttaaaaggaaaaaaaa

SEQ ID NO: 33726 - DNA, 20 bp, Artificial Sequence
  chemically synthesized
aaggaaaaaaaaaaaaaccc

SEQ ID NO: 33727 - DNA, 20 bp, Artificial Sequence
  chemically synthesized
aacaaccaccttctgacgct

SEQ ID NO: 33728 - DNA, 20 bp, Artificial Sequence
  chemically synthesized
ccccaatgccagggcactgc

SEQ ID NO: 33729 - DNA, 20 bp, Artificial Sequence
  chemically synthesized
gtaaattaatggatatgatt

SEQ ID NO: 33730 - DNA, 20 bp, Artificial Sequence
  chemically synthesized
ttaatggatatgatttaaaa

SEQ ID NO: 33731 - DNA, 20 bp, Artificial Sequence
  chemically synthesized
gggcaacacagagggaggag

SEQ ID NO: 33732 - DNA, 20 bp, Artificial Sequence
  chemically synthesized
ctccttttctagtagcaaat

SEQ ID NO: 33733 - DNA, 20 bp, Artificial Sequence
  chemically synthesized
gctcagtgctgggcacatgg

SEQ ID NO: 33734 - DNA, 20 bp, Artificial Sequence
  chemically synthesized
atggattacacaatgtattc

SEQ ID NO: 33735 - DNA, 20 bp, Artificial Sequence
  chemically synthesized
gttgaaatccttttaaagat

SEQ ID NO: 33736 - DNA, 20 bp, Artificial Sequence
  chemically synthesized
agtgaaatcattgttataga

SEQ ID NO: 33737 - DNA, 20 bp, Artificial Sequence
  chemically synthesized
aaaacctactgtggttagaa

SEQ ID NO: 33738 - DNA, 20 bp, Artificial Sequence
  chemically synthesized
taacagagagacactgatct

SEQ ID NO: 33739 - DNA, 20 bp, Artificial Sequence
  chemically synthesized
gttgcaagctgttttttttg

SEQ ID NO: 33740 - DNA, 20 bp, Artificial Sequence
  chemically synthesized
tcctttggataatgatgatc

SEQ ID NO: 33741 - DNA, 20 bp, Artificial Sequence
  chemically synthesized
ggtaacaaaataaaatctta

SEQ ID NO: 33742 - DNA, 20 bp, Artificial Sequence
  chemically synthesized
aaaaacaagaaaaaagaaaa

SEQ ID NO: 33743 - DNA, 20 bp, Artificial Sequence
  chemically synthesized
aagaaaaaagaaaaaaaaac

SEQ ID NO: 33744 - DNA, 20 bp, Artificial Sequence
  chemically synthesized
aaagaaaaaaaaacaaaaac

SEQ ID NO: 33745 - DNA, 20 bp, Artificial Sequence
  chemically synthesized
ttacccacagagtctacaga

SEQ ID NO: 33746 - DNA, 20 bp, Artificial Sequence
  chemically synthesized
cctgcagaaccttgacctgt

SEQ ID NO: 33747 - DNA, 20 bp, Artificial Sequence
  chemically synthesized
cctcactggaagggatcctc

SEQ ID NO: 33748 - DNA, 20 bp, Artificial Sequence
  chemically synthesized
gcagttgtatttaaaagaaa

SEQ ID NO: 33749 - DNA, 20 bp, Artificial Sequence
  chemically synthesized
agaaggggctaagcttgcac

SEQ ID NO: 33750 - DNA, 20 bp, Artificial Sequence
  chemically synthesized
ctcatagtgttgagtcagag

SEQ ID NO: 33751 - DNA, 20 bp, Artificial Sequence
  chemically synthesized
cacttatttaattttcctca

SEQ ID NO: 33752 - DNA, 20 bp, Artificial Sequence
  chemically synthesized
aaatgtttcctcaaaataaa

SEQ ID NO: 33753 - DNA, 20 bp, Artificial Sequence
  chemically synthesized
tggcaaatgacaatgcctat

SEQ ID NO: 33754 - DNA, 20 bp, Artificial Sequence
  chemically synthesized
tctgatgatgagtaggctct

SEQ ID NO: 33755 - DNA, 20 bp, Artificial Sequence
  chemically synthesized
ctgctctatcgcagacattt

SEQ ID NO: 33756 - DNA, 20 bp, Artificial Sequence
  chemically synthesized
aggtctaggtttgatagata

SEQ ID NO: 33757 - DNA, 20 bp, Artificial Sequence
  chemically synthesized
ctaacctggggagcccatgg

SEQ ID NO: 33758 - DNA, 20 bp, Artificial Sequence
  chemically synthesized
ccatggtaaaacccaagcaa

SEQ ID NO: 33759 - DNA, 20 bp, Artificial Sequence
  chemically synthesized
tatgtcctgcttgctttttt

SEQ ID NO: 33760 - DNA, 20 bp, Artificial Sequence
  chemically synthesized
agtcttttttgagtttccag

SEQ ID NO: 33761 - DNA, 20 bp, Artificial Sequence
  chemically synthesized
cattgtgtttaatagtacaa

SEQ ID NO: 33762 - DNA, 20 bp, Artificial Sequence
  chemically synthesized
actttaggtgtgtattgtag

SEQ ID NO: 33763 - DNA, 20 bp, Artificial Sequence
  chemically synthesized
gggctctaggtggcttcctt

SEQ ID NO: 33764 - DNA, 20 bp, Artificial Sequence
  chemically synthesized
tgttgggcatagaaagcctt

SEQ ID NO: 33765 - DNA, 20 bp, Artificial Sequence
  chemically synthesized
ttctggacatacttcgaagg

SEQ ID NO: 33766 - DNA, 20 bp, Artificial Sequence
  chemically synthesized
cctcatttcttgagagactc

SEQ ID NO: 33767 - DNA, 20 bp, Artificial Sequence
  chemically synthesized
gtttttctctgatgatgatt

SEQ ID NO: 33768 - DNA, 20 bp, Artificial Sequence
  chemically synthesized
ctatttgctattaaaatttg

SEQ ID NO: 33769 - DNA, 20 bp, Artificial Sequence
  chemically synthesized
aaaaaatagctaagaatagt

SEQ ID NO: 33770 - DNA, 20 bp, Artificial Sequence
  chemically synthesized
aatgtctgcaccccaccctg

SEQ ID NO: 33771 - DNA, 20 bp, Artificial Sequence
  chemically synthesized
gggctccctggactcaaact

SEQ ID NO: 33772 - DNA, 20 bp, Artificial Sequence
  chemically synthesized
ttaataaagctaaagcgaaa

SEQ ID NO: 33773 - DNA, 20 bp, Artificial Sequence
  chemically synthesized
aaagctaaagcgaaacaaaa

SEQ ID NO: 33774 - DNA, 20 bp, Artificial Sequence
  chemically synthesized
ggatttgggttcttaacatg

SEQ ID NO: 33775 - DNA, 20 bp, Artificial Sequence
  chemically synthesized
ctttttagtagtgctgcatt

SEQ ID NO: 33776 - DNA, 20 bp, Artificial Sequence
  chemically synthesized
gaaactccacctcagaaaca

SEQ ID NO: 33777 - DNA, 20 bp, Artificial Sequence
  chemically synthesized
gttattattttcatgttaag

SEQ ID NO: 33778 - DNA, 20 bp, Artificial Sequence
  chemically synthesized
gtgtcagcaaaaaatgaaac

SEQ ID NO: 33779 - DNA, 20 bp, Artificial Sequence
  chemically synthesized
tgtaagtgttactgtgtttt

SEQ ID NO: 33780 - DNA, 20 bp, Artificial Sequence
  chemically synthesized
gggctccattctagagttgg

SEQ ID NO: 33781 - DNA, 20 bp, Artificial Sequence
  chemically synthesized
ccaatttccatacagatgac

SEQ ID NO: 33782 - DNA, 20 bp, Artificial Sequence
  chemically synthesized
aattcccccttctcttaaga

SEQ ID NO: 33783 - DNA, 20 bp, Artificial Sequence
  chemically synthesized
aaagcaacccggtttatctg

SEQ ID NO: 33784 - DNA, 20 bp, Artificial Sequence
  chemically synthesized
cctaacttaaatattacaat

SEQ ID NO: 33785 - DNA, 20 bp, Artificial Sequence
  chemically synthesized
acgggatatatattagaggg

SEQ ID NO: 33786 - DNA, 20 bp, Artificial Sequence
  chemically synthesized
gagaaaccacaacccgaaca

SEQ ID NO: 33787 - DNA, 20 bp, Artificial Sequence
  chemically synthesized
acaacccgaacaaaaaactc

SEQ ID NO: 33788 - DNA, 20 bp, Artificial Sequence
  chemically synthesized
ttgtggaaaaaaaatgccct

SEQ ID NO: 33789 - DNA, 20 bp, Artificial Sequence
  chemically synthesized
gtagggggtggagcgtcaag

SEQ ID NO: 33790 - DNA, 20 bp, Artificial Sequence
  chemically synthesized
ttaagcccttttagtggagc

SEQ ID NO: 33791 - DNA, 20 bp, Artificial Sequence
  chemically synthesized
aggaaaatgtggaggattgc

SEQ ID NO: 33792 - DNA, 20 bp, Artificial Sequence
  chemically synthesized
ttcctcctccccataaatca

SEQ ID NO: 33793 - DNA, 20 bp, Artificial Sequence
  chemically synthesized
caagcagtcttagagagact

SEQ ID NO: 33794 - DNA, 20 bp, Artificial Sequence
  chemically synthesized
ccagggaggagggaaaaaaa

SEQ ID NO: 33795 - DNA, 20 bp, Artificial Sequence
  chemically synthesized
ggagggaaaaaaaaaaaaca

SEQ ID NO: 33796 - DNA, 20 bp, Artificial Sequence
  chemically synthesized
gtttccacagtgcccacgaa

SEQ ID NO: 33797 - DNA, 20 bp, Artificial Sequence
  chemically synthesized
gtttgtctgactcagaggaa

SEQ ID NO: 33798 - DNA, 20 bp, Artificial Sequence
  chemically synthesized
agaaacaattgaggtggggg

SEQ ID NO: 33799 - DNA, 20 bp, Artificial Sequence
  chemically synthesized
taaagaacatcaggatttgg

SEQ ID NO: 33800 - DNA, 20 bp, Artificial Sequence
  chemically synthesized
tgtctcactgaaaaaaaaaa

SEQ ID NO: 33801 - DNA, 20 bp, Artificial Sequence
  chemically synthesized
aaaaaacagggaaattatct

SEQ ID NO: 33802 - DNA, 20 bp, Artificial Sequence
  chemically synthesized
agatgttcttgaggaaacca

SEQ ID NO: 33803 - DNA, 20 bp, Artificial Sequence
  chemically synthesized
ggtgggtcctggacaggagg

SEQ ID NO: 33804 - DNA, 20 bp, Artificial Sequence
  chemically synthesized
ctagggttttttacaactta

SEQ ID NO: 33805 - DNA, 20 bp, Artificial Sequence
  chemically synthesized
ttttttacaacttagaaaac

SEQ ID NO: 33806 - DNA, 20 bp, Artificial Sequence
  chemically synthesized
acaacttagaaaacaaaaac

SEQ ID NO: 33807 - DNA, 20 bp, Artificial Sequence
  chemically synthesized
tagaaaacaaaaacaaaaac

SEQ ID NO: 33808 - DNA, 20 bp, Artificial Sequence
  chemically synthesized
acaaaaacaaaaacaaaaac

SEQ ID NO: 33809 - DNA, 20 bp, Artificial Sequence
  chemically synthesized
acttagtgaacggctgaggc

SEQ ID NO: 33810 - DNA, 20 bp, Artificial Sequence
  chemically synthesized
ctcttaatattaagctaatg

SEQ ID NO: 33811 - DNA, 20 bp, Artificial Sequence
  chemically synthesized
aagtgggactctgtcccata

SEQ ID NO: 33812 - DNA, 20 bp, Artificial Sequence
  chemically synthesized
agaccacctctcccctttcc

SEQ ID NO: 33813 - DNA, 20 bp, Artificial Sequence
  chemically synthesized
ttgtcaaaaagaccgaaatt

SEQ ID NO: 33814 - DNA, 20 bp, Artificial Sequence
  chemically synthesized
aaaaagaccgaaattgaaaa

SEQ ID NO: 33815 - DNA, 20 bp, Artificial Sequence
  chemically synthesized
taatcacccctggtagtaat

SEQ ID NO: 33816 - DNA, 20 bp, Artificial Sequence
  chemically synthesized
gtcagtttattgctctaaat

SEQ ID NO: 33817 - DNA, 20 bp, Artificial Sequence
  chemically synthesized
gaatactaaaatgcgatagt

SEQ ID NO: 33818 - DNA, 20 bp, Artificial Sequence
  chemically synthesized
ggttcacgttgttagcctct

SEQ ID NO: 33819 - DNA, 20 bp, Artificial Sequence
  chemically synthesized
agcaagctcaccaggcacat

SEQ ID NO: 33820 - DNA, 20 bp, Artificial Sequence
  chemically synthesized
cgagtgttgaataatgatat

SEQ ID NO: 33821 - DNA, 20 bp, Artificial Sequence
  chemically synthesized
tattttataacgtgaggagg

SEQ ID NO: 33822 - DNA, 20 bp, Artificial Sequence
  chemically synthesized
ttgaattgacaaattaacag

SEQ ID NO: 33823 - DNA, 20 bp, Artificial Sequence
  chemically synthesized
tatgagtgccttggatctat

SEQ ID NO: 33824 - DNA, 20 bp, Artificial Sequence
  chemically synthesized
ctttagtttaattttataaa

SEQ ID NO: 33825 - DNA, 20 bp, Artificial Sequence
  chemically synthesized
acgtggtactatttgccatt

SEQ ID NO: 33826 - DNA, 20 bp, Artificial Sequence
  chemically synthesized
ctcattgaggagcatttttt

SEQ ID NO: 33827 - DNA, 20 bp, Artificial Sequence
  chemically synthesized
tttttaaaaactaaaaaaaa

SEQ ID NO: 33828 - DNA, 20 bp, Artificial Sequence
  chemically synthesized
agtgcaaggatttttttgta

SEQ ID NO: 33829 - DNA, 20 bp, Artificial Sequence
  chemically synthesized
gttaagaaaaatttttttta

SEQ ID NO: 33830 - DNA, 20 bp, Artificial Sequence
  chemically synthesized
ctcttcaggttgtaaaaaaa

SEQ ID NO: 33831 - DNA, 20 bp, Artificial Sequence
  chemically synthesized
aaaaaaaaggaaaaaaaaaa

SEQ ID NO: 33832 - DNA, 20 bp, Artificial Sequence
  chemically synthesized
ttgcagtttttttcattgcc

SEQ ID NO: 33833 - DNA, 20 bp, Artificial Sequence
  chemically synthesized
tattgcttatgtgccctgtt

SEQ ID NO: 33834 - DNA, 20 bp, Artificial Sequence
  chemically synthesized
tctttgttaagttctattgg

SEQ ID NO: 33835 - DNA, 20 bp, Artificial Sequence
  chemically synthesized
ggtgttttcagtctgatgtt

SEQ ID NO: 33836 - DNA, 20 bp, Artificial Sequence
  chemically synthesized
atccattcaaacataagtga

SEQ ID NO: 33837 - DNA, 20 bp, Artificial Sequence
  chemically synthesized
acattgttcttatttttgta

SEQ ID NO: 33838 - DNA, 20 bp, Artificial Sequence
  chemically synthesized
ttcttatttttgtaaaaaac

SEQ ID NO: 33839 - DNA, 20 bp, Artificial Sequence
  chemically synthesized
tgttttggattaggtttctc

SEQ ID NO: 33840 - DNA, 20 bp, Artificial Sequence
  chemically synthesized
tccaccctattaaatgtcca

SEQ ID NO: 33841 - DNA, 20 bp, Artificial Sequence
  chemically synthesized
tttcctttctgtaaagtggc

SEQ ID NO: 33842 - DNA, 20 bp, Artificial Sequence
  chemically synthesized
cccccttccaaaaaagaaaa

SEQ ID NO: 33843 - DNA, 20 bp, Artificial Sequence
  chemically synthesized
tatattttttaataaaaagt

SEQ ID NO: 33844 - DNA, 20 bp, Artificial Sequence
  chemically synthesized
ttaataaaaagtaaaaacaa

SEQ ID NO: 33845 - DNA, 20 bp, Artificial Sequence
  chemically synthesized
tttcaaggagaatcaaaatg

SEQ ID NO: 33846 - DNA, 20 bp, Artificial Sequence
  chemically synthesized
ttaatgcagacaaacaaaca

SEQ ID NO: 33847 - DNA, 20 bp, Artificial Sequence
  chemically synthesized
actgtggagaagaaccccct

SEQ ID NO: 33848 - DNA, 20 bp, Artificial Sequence
  chemically synthesized
gtttgagaaataattgtttc

SEQ ID NO: 33849 - DNA, 20 bp, Artificial Sequence
  chemically synthesized
aaaaccagtgatcatttaaa

SEQ ID NO: 33850 - DNA, 20 bp, Artificial Sequence
  chemically synthesized
gtttccaagagcattcagat

SEQ ID NO: 33851 - DNA, 20 bp, Artificial Sequence
  chemically synthesized
acctaagatcacagtgtgaa

SEQ ID NO: 33852 - DNA, 20 bp, Artificial Sequence
  chemically synthesized
attattctgatctctaaaat

SEQ ID NO: 33853 - DNA, 20 bp, Artificial Sequence
  chemically synthesized
atctctaaaatgagtgatta

SEQ ID NO: 33854 - DNA, 20 bp, Artificial Sequence
  chemically synthesized
atttatagaatcacaaggaa

SEQ ID NO: 33855 - DNA, 20 bp, Artificial Sequence
  chemically synthesized
atgtatataaaagtattcta

SEQ ID NO: 33856 - DNA, 20 bp, Artificial Sequence
  chemically synthesized
aagatagaaaaacagacaat

SEQ ID NO: 33857 - DNA, 20 bp, Artificial Sequence
  chemically synthesized
aaaaacagacaatgactgct

SEQ ID NO: 33858 - DNA, 20 bp, Artificial Sequence
  chemically synthesized
gtcagaggaaagaaatataa

SEQ ID NO: 33859 - DNA, 20 bp, Artificial Sequence
  chemically synthesized
tgaactcttgaagaaggaag

SEQ ID NO: 33860 - DNA, 20 bp, Artificial Sequence
  chemically synthesized
ccagactcaaaattcctcaa

SEQ ID NO: 33861 - DNA, 20 bp, Artificial Sequence
  chemically synthesized
cctactattacttccgggga

SEQ ID NO: 33862 - DNA, 20 bp, Artificial Sequence
  chemically synthesized
aagatattcctgaccacttg

SEQ ID NO: 33863 - DNA, 20 bp, Artificial Sequence
  chemically synthesized
attcctgaccacttgaaggg

SEQ ID NO: 33864 - DNA, 20 bp, Artificial Sequence
  chemically synthesized
gtgcccagaaaatatgctgc

SEQ ID NO: 33865 - DNA, 20 bp, Artificial Sequence
  chemically synthesized
ggggcactcagttagacctc

SEQ ID NO: 33866 - DNA, 20 bp, Artificial Sequence
  chemically synthesized
cagttagacctcagcagatt

SEQ ID NO: 33867 - DNA, 20 bp, Artificial Sequence
  chemically synthesized
caagattgcactccttgcct

SEQ ID NO: 33868 - DNA, 20 bp, Artificial Sequence
  chemically synthesized
agagttttctttaaatgatc

SEQ ID NO: 33869 - DNA, 20 bp, Artificial Sequence
  chemically synthesized
tgctggatgctgggtgctgc

SEQ ID NO: 33870 - DNA, 20 bp, Artificial Sequence
  chemically synthesized
gtaataatctgtccgggcgc

SEQ ID NO: 33871 - DNA, 20 bp, Artificial Sequence
  chemically synthesized
aataatctgaacagcccaca

SEQ ID NO: 33872 - DNA, 20 bp, Artificial Sequence
  chemically synthesized
aggacacagtgagaacccct

SEQ ID NO: 33873 - DNA, 20 bp, Artificial Sequence
  chemically synthesized
ggcagatttgtgagcctctt

SEQ ID NO: 33874 - DNA, 20 bp, Artificial Sequence
  chemically synthesized
cccaaattgtcaatcttgta

SEQ ID NO: 33875 - DNA, 20 bp, Artificial Sequence
  chemically synthesized
actccagcctgggtgacaga

SEQ ID NO: 33876 - DNA, 20 bp, Artificial Sequence
  chemically synthesized
aatggctagccctaacacaa

SEQ ID NO: 33877 - DNA, 20 bp, Artificial Sequence
  chemically synthesized
gggaaaagacagtctttttg

SEQ ID NO: 33878 - DNA, 20 bp, Artificial Sequence
  chemically synthesized
aaagacagtctttttgttct

SEQ ID NO: 33879 - DNA, 20 bp, Artificial Sequence
  chemically synthesized
ggctgaacttgtctcaagac

SEQ ID NO: 33880 - DNA, 20 bp, Artificial Sequence
  chemically synthesized
cttgtctcaagacccaggat

SEQ ID NO: 33881 - DNA, 20 bp, Artificial Sequence
  chemically synthesized
tcacagaaaccctaatggtc

SEQ ID NO: 33882 - DNA, 20 bp, Artificial Sequence
  chemically synthesized
ggcagagcatggggcaggga

SEQ ID NO: 33883 - DNA, 20 bp, Artificial Sequence
  chemically synthesized
actccctttgatcagttaaa

SEQ ID NO: 33884 - DNA, 20 bp, Artificial Sequence
  chemically synthesized
ctggacaagaaaccagaaaa

SEQ ID NO: 33885 - DNA, 20 bp, Artificial Sequence
  chemically synthesized
gaaaccagaaaacctggctt

SEQ ID NO: 33886 - DNA, 20 bp, Artificial Sequence
  chemically synthesized
tctagccagaaggtggatag

SEQ ID NO: 33887 - DNA, 20 bp, Artificial Sequence
  chemically synthesized
aaacctattttaatttgcta

SEQ ID NO: 33888 - DNA, 20 bp, Artificial Sequence
  chemically synthesized
ggccagaaagaatttttacc

SEQ ID NO: 33889 - DNA, 20 bp, Artificial Sequence
  chemically synthesized
ttctaaggaatagagcattg

SEQ ID NO: 33890 - DNA, 20 bp, Artificial Sequence
  chemically synthesized
tttcctgatgtaagtactaa

SEQ ID NO: 33891 - DNA, 20 bp, Artificial Sequence
  chemically synthesized
atgtaagtactaaagaagtt

SEQ ID NO: 33892 - DNA, 20 bp, Artificial Sequence
  chemically synthesized
aagtactaaagaagttttat

SEQ ID NO: 33893 - DNA, 20 bp, Artificial Sequence
  chemically synthesized
tgcattaagatatatttcct

SEQ ID NO: 33894 - DNA, 20 bp, Artificial Sequence
  chemically synthesized
actgacatttatcaccttct

SEQ ID NO: 33895 - DNA, 20 bp, Artificial Sequence
  chemically synthesized
caaaagcatatatttgaaaa

SEQ ID NO: 33896 - DNA, 20 bp, Artificial Sequence
  chemically synthesized
ctacattaattatgatattg

SEQ ID NO: 33897 - DNA, 20 bp, Artificial Sequence
  chemically synthesized
gatattgctatgatttattc

SEQ ID NO: 33898 - DNA, 20 bp, Artificial Sequence
  chemically synthesized
atttattcccaagttttgca

SEQ ID NO: 33899 - DNA, 20 bp, Artificial Sequence
  chemically synthesized
caatacaggtaattaggttg

SEQ ID NO: 33900 - DNA, 20 bp, Artificial Sequence
  chemically synthesized
tccacgggccctctctatgg

SEQ ID NO: 33901 - DNA, 20 bp, Artificial Sequence
  chemically synthesized
gattcactgttccaatgtgg

SEQ ID NO: 33902 - DNA, 20 bp, Artificial Sequence
  chemically synthesized
gttccaatgtgggtctgttt

SEQ ID NO: 33903 - DNA, 20 bp, Artificial Sequence
  chemically synthesized
gcaggactctgtcttcgcac

SEQ ID NO: 33904 - DNA, 20 bp, Artificial Sequence
  chemically synthesized
cacgcgtccaccccacccct

SEQ ID NO: 33905 - DNA, 20 bp, Artificial Sequence
  chemically synthesized
ttctcagaacttaagggctc

SEQ ID NO: 33906 - DNA, 20 bp, Artificial Sequence
  chemically synthesized
agtacaggtgtgacttggcc

SEQ ID NO: 33907 - DNA, 20 bp, Artificial Sequence
  chemically synthesized
caatgattttctgttctcta

SEQ ID NO: 33908 - DNA, 20 bp, Artificial Sequence
  chemically synthesized
tcgagccactggcatcttaa

SEQ ID NO: 33909 - DNA, 20 bp, Artificial Sequence
  chemically synthesized
aagttcaacgtcaaagcagc

SEQ ID NO: 33910 - DNA, 20 bp, Artificial Sequence
  chemically synthesized
aaattgcaccaaaaactgcc

SEQ ID NO: 33911 - DNA, 20 bp, Artificial Sequence
  chemically synthesized
cctgtagtttctttcaaaca

SEQ ID NO: 33912 - DNA, 20 bp, Artificial Sequence
  chemically synthesized
tttaaaagcacagcccccct

SEQ ID NO: 33913 - DNA, 20 bp, Artificial Sequence
  chemically synthesized
ccccctatgggtttaggggc

SEQ ID NO: 33914 - DNA, 20 bp, Artificial Sequence
  chemically synthesized
ctttagaggatacttgggga

SEQ ID NO: 33915 - DNA, 20 bp, Artificial Sequence
  chemically synthesized
tgatacacgtgctcccttga

SEQ ID NO: 33916 - DNA, 20 bp, Artificial Sequence
  chemically synthesized
aaccatcgagctgtgttcag

SEQ ID NO: 33917 - DNA, 20 bp, Artificial Sequence
  chemically synthesized
aagtacaatgacccgtgtga

SEQ ID NO: 33918 - DNA, 20 bp, Artificial Sequence
  chemically synthesized
gtccatttctctaacaatgg

SEQ ID NO: 33919 - DNA, 20 bp, Artificial Sequence
  chemically synthesized
attttctattgggaaatatg

SEQ ID NO: 33920 - DNA, 20 bp, Artificial Sequence
  chemically synthesized
tgtgtgtacggagggggaaa

SEQ ID NO: 33921 - DNA, 20 bp, Artificial Sequence
  chemically synthesized
aagcaggagaggatggggcc

SEQ ID NO: 33922 - DNA, 20 bp, Artificial Sequence
  chemically synthesized
tcaagttctcacttctagca

SEQ ID NO: 33923 - DNA, 20 bp, Artificial Sequence
  chemically synthesized
ggaggtaatataggcactgg

SEQ ID NO: 33924 - DNA, 20 bp, Artificial Sequence
  chemically synthesized
atataggcactggaagagtt

SEQ ID NO: 33925 - DNA, 20 bp, Artificial Sequence
  chemically synthesized
agaaatagaatttgcggtat

SEQ ID NO: 33926 - DNA, 20 bp, Artificial Sequence
  chemically synthesized
tttattaagttgttctcaaa

SEQ ID NO: 33927 - DNA, 20 bp, Artificial Sequence
  chemically synthesized
gcctgttacaaaaacttact

SEQ ID NO: 33928 - DNA, 20 bp, Artificial Sequence
  chemically synthesized
aatgtgcatgttattttata

SEQ ID NO: 33929 - DNA, 20 bp, Artificial Sequence
  chemically synthesized
atatcatgttggctaggttc

SEQ ID NO: 33930 - DNA, 20 bp, Artificial Sequence
  chemically synthesized
ttctcatgtttctattgttc

SEQ ID NO: 33931 - DNA, 20 bp, Artificial Sequence
  chemically synthesized
ccatgtaaatcaaacataat

SEQ ID NO: 33932 - DNA, 20 bp, Artificial Sequence
  chemically synthesized
ataatctgtgatttatcacc

SEQ ID NO: 33933 - DNA, 20 bp, Artificial Sequence
  chemically synthesized
tgcactcctccccattcccc

SEQ ID NO: 33934 - DNA, 20 bp, Artificial Sequence
  chemically synthesized
aaagagtaatagggacacac

SEQ ID NO: 33935 - DNA, 20 bp, Artificial Sequence
  chemically synthesized
ctatctgtcttgagcagcat

SEQ ID NO: 33936 - DNA, 20 bp, Artificial Sequence
  chemically synthesized
gtcttgagcagcattttgga

SEQ ID NO: 33937 - DNA, 20 bp, Artificial Sequence
  chemically synthesized
attctccaacatcctttctc

SEQ ID NO: 33938 - DNA, 20 bp, Artificial Sequence
  chemically synthesized
actctctccttcccacccaa

SEQ ID NO: 33939 - DNA, 20 bp, Artificial Sequence
  chemically synthesized
ctaccacaagaagacaacag

SEQ ID NO: 33940 - DNA, 20 bp, Artificial Sequence
  chemically synthesized
caagaagacaacagaacggc

SEQ ID NO: 33941 - DNA, 20 bp, Artificial Sequence
  chemically synthesized
gacaacagaacggcttttgt

SEQ ID NO: 33942 - DNA, 20 bp, Artificial Sequence
  chemically synthesized
ggacacgatatcacagaggt

SEQ ID NO: 33943 - DNA, 20 bp, Artificial Sequence
  chemically synthesized
agtatttgtaaaagtgacaa

SEQ ID NO: 33944 - DNA, 20 bp, Artificial Sequence
  chemically synthesized
aaagtgacaacacagatttc

SEQ ID NO: 33945 - DNA, 20 bp, Artificial Sequence
  chemically synthesized
atgcatctcaggaaatcagt

SEQ ID NO: 33946 - DNA, 20 bp, Artificial Sequence
  chemically synthesized
aggaaatcagtggctgattc

SEQ ID NO: 33947 - DNA, 20 bp, Artificial Sequence
  chemically synthesized
tgtctggctacacccctagt

SEQ ID NO: 33948 - DNA, 20 bp, Artificial Sequence
  chemically synthesized
aacaaaacaaaacctgatgc

SEQ ID NO: 33949 - DNA, 20 bp, Artificial Sequence
  chemically synthesized
caaaacctgatgcctttgtt

SEQ ID NO: 33950 - DNA, 20 bp, Artificial Sequence
  chemically synthesized
gatgcctttgtttccagatt

SEQ ID NO: 33951 - DNA, 20 bp, Artificial Sequence
  chemically synthesized
ctcttacatggaaaccaaag

SEQ ID NO: 33952 - DNA, 20 bp, Artificial Sequence
  chemically synthesized
gcaaaaaatttaaaggaaat

SEQ ID NO: 33953 - DNA, 20 bp, Artificial Sequence
  chemically synthesized
agtttaagatgctattacca

SEQ ID NO: 33954 - DNA, 20 bp, Artificial Sequence
  chemically synthesized
ttaccagcaagttttttcac

SEQ ID NO: 33955 - DNA, 20 bp, Artificial Sequence
  chemically synthesized
agttttttcacttatgtttg

SEQ ID NO: 33956 - DNA, 20 bp, Artificial Sequence
  chemically synthesized
gatttctgctaagagatgga

SEQ ID NO: 33957 - DNA, 20 bp, Artificial Sequence
  chemically synthesized
gaaagccttaaaactatgtc

SEQ ID NO: 33958 - DNA, 20 bp, Artificial Sequence
  chemically synthesized
gtgtgtcaaatgaggacaca

SEQ ID NO: 33959 - DNA, 20 bp, Artificial Sequence
  chemically synthesized
actgccaaaaaaacacagac

SEQ ID NO: 33960 - DNA, 20 bp, Artificial Sequence
  chemically synthesized
taaaagatcaaattaagtgc

SEQ ID NO: 33961 - DNA, 20 bp, Artificial Sequence
  chemically synthesized
taaaatttcaagttacgaca

SEQ ID NO: 33962 - DNA, 20 bp, Artificial Sequence
  chemically synthesized
acaaaaaagtattgactaaa

SEQ ID NO: 33963 - DNA, 20 bp, Artificial Sequence
  chemically synthesized
taaagcgggctttctcttta

SEQ ID NO: 33964 - DNA, 20 bp, Artificial Sequence
  chemically synthesized
aatctaaatataaagcacca

SEQ ID NO: 33965 - DNA, 20 bp, Artificial Sequence
  chemically synthesized
aatgaaaaaaactgcaaaac

SEQ ID NO: 33966 - DNA, 20 bp, Artificial Sequence
  chemically synthesized
ctacataacaaaccaacgtt

SEQ ID NO: 33967 - DNA, 20 bp, Artificial Sequence
  chemically synthesized
gctcccccaaaccgccatta

SEQ ID NO: 33968 - DNA, 20 bp, Artificial Sequence
  chemically synthesized
tcatctgtaatgtcacactt

SEQ ID NO: 33969 - DNA, 20 bp, Artificial Sequence
  chemically synthesized
aacaagcaacagttaaaaat

SEQ ID NO: 33970 - DNA, 20 bp, Artificial Sequence
  chemically synthesized
atcttaaacctttccccaat

SEQ ID NO: 33971 - DNA, 20 bp, Artificial Sequence
  chemically synthesized
gttcccccctaaacataatg

SEQ ID NO: 33972 - DNA, 20 bp, Artificial Sequence
  chemically synthesized
ttcttaacatttatatttaa

SEQ ID NO: 33973 - DNA, 20 bp, Artificial Sequence
  chemically synthesized
tcatttctatgttaagtgta

SEQ ID NO: 33974 - DNA, 20 bp, Artificial Sequence
  chemically synthesized
gtgtattctgtttccattca

SEQ ID NO: 33975 - DNA, 20 bp, Artificial Sequence
  chemically synthesized
atagtcaagtaaatggctgg

SEQ ID NO: 33976 - DNA, 20 bp, Artificial Sequence
  chemically synthesized
gctggcaaagtttttttttt

SEQ ID NO: 33977 - DNA, 20 bp, Artificial Sequence
  chemically synthesized
tttttaaaaaatgctcctca

SEQ ID NO: 33978 - DNA, 20 bp, Artificial Sequence
  chemically synthesized
cacttaattgtcctatctga

SEQ ID NO: 33979 - DNA, 20 bp, Artificial Sequence
  chemically synthesized
tttatactcaacctctgtat

SEQ ID NO: 33980 - DNA, 20 bp, Artificial Sequence
  chemically synthesized
gaacaccaactggggcagat

SEQ ID NO: 33981 - DNA, 20 bp, Artificial Sequence
  chemically synthesized
ttaatcatcattgtatcaat

SEQ ID NO: 33982 - DNA, 20 bp, Artificial Sequence
  chemically synthesized
atattagcttatatacctgt

SEQ ID NO: 33983 - DNA, 20 bp, Artificial Sequence
  chemically synthesized
caatatggtatacaaggtct

SEQ ID NO: 33984 - DNA, 20 bp, Artificial Sequence
  chemically synthesized
acaaggtcttaaagtttatc

SEQ ID NO: 33985 - DNA, 20 bp, Artificial Sequence
  chemically synthesized
tagtgtatttaattgcgttc

SEQ ID NO: 33986 - DNA, 20 bp, Artificial Sequence
  chemically synthesized
cattacacattcaatttaat

SEQ ID NO: 33987 - DNA, 20 bp, Artificial Sequence
  chemically synthesized
taagctctcaccaggagcaa

SEQ ID NO: 33988 - DNA, 20 bp, Artificial Sequence
  chemically synthesized
gtagcttttatactggtata

SEQ ID NO: 33989 - DNA, 20 bp, Artificial Sequence
  chemically synthesized
ttttatactggtataatcag

SEQ ID NO: 33990 - DNA, 20 bp, Artificial Sequence
  chemically synthesized
aaattaaactaaaggaaaaa

SEQ ID NO: 33991 - DNA, 20 bp, Artificial Sequence
  chemically synthesized
tagaattatatgctagttcc

SEQ ID NO: 33992 - DNA, 20 bp, Artificial Sequence
  chemically synthesized
acccaatgctgaattaagct

SEQ ID NO: 33993 - DNA, 20 bp, Artificial Sequence
  chemically synthesized
caagtagaaagaaccatcga

SEQ ID NO: 33994 - DNA, 20 bp, Artificial Sequence
  chemically synthesized
caaatgatagaataaacttg

SEQ ID NO: 33995 - DNA, 20 bp, Artificial Sequence
  chemically synthesized
agagacagacatttagctca

SEQ ID NO: 33996 - DNA, 20 bp, Artificial Sequence
  chemically synthesized
ctatagagggttaatccaaa

SEQ ID NO: 33997 - DNA, 20 bp, Artificial Sequence
  chemically synthesized
gaacggaactggaaacagca

SEQ ID NO: 33998 - DNA, 20 bp, Artificial Sequence
  chemically synthesized
taacataccatacatgctgt

SEQ ID NO: 33999 - DNA, 20 bp, Artificial Sequence
  chemically synthesized
tattgcacaagagaaaggct

SEQ ID NO: 34000 - DNA, 20 bp, Artificial Sequence
  chemically synthesized
gtgacaagcactctcatatt

SEQ ID NO: 34001 - DNA, 20 bp, Artificial Sequence
  chemically synthesized
catattcttagcttcgttac

SEQ ID NO: 34002 - DNA, 20 bp, Artificial Sequence
  chemically synthesized
ttcttagcttcgttacttct

SEQ ID NO: 34003 - DNA, 20 bp, Artificial Sequence
  chemically synthesized
tagcttcgttacttctgttt

SEQ ID NO: 34004 - DNA, 20 bp, Artificial Sequence
  chemically synthesized
ttcgttacttctgtttgttt

SEQ ID NO: 34005 - DNA, 20 bp, Artificial Sequence
  chemically synthesized
ttacttctgtttgtttgttt

SEQ ID NO: 34006 - DNA, 20 bp, Artificial Sequence
  chemically synthesized
ggggtattaatatacctcta

SEQ ID NO: 34007 - DNA, 20 bp, Artificial Sequence
  chemically synthesized
gatcactgtgccattttttc

SEQ ID NO: 34008 - DNA, 20 bp, Artificial Sequence
  chemically synthesized
acgtccttccccacctggcc

SEQ ID NO: 34009 - DNA, 20 bp, Artificial Sequence
  chemically synthesized
catgcgttttcatgtgcctg

SEQ ID NO: 34010 - DNA, 20 bp, Artificial Sequence
  chemically synthesized
tttataaggcctttcgcccg

SEQ ID NO: 34011 - DNA, 20 bp, Artificial Sequence
  chemically synthesized
tgtggcttctcctgtggaca

SEQ ID NO: 34012 - DNA, 20 bp, Artificial Sequence
  chemically synthesized
tgctccgacgaggaggcaaa

SEQ ID NO: 34013 - DNA, 20 bp, Artificial Sequence
  chemically synthesized
ggggcaggtcgaactccttc

SEQ ID NO: 34014 - DNA, 20 bp, Artificial Sequence
  chemically synthesized
cgaactccttctcgagcttg

SEQ ID NO: 34015 - DNA, 20 bp, Artificial Sequence
  chemically synthesized
gcgagctggggctgcccagc

SEQ ID NO: 34016 - DNA, 20 bp, Artificial Sequence
  chemically synthesized
cctcggcctcggccaggtgg

SEQ ID NO: 34017 - DNA, 20 bp, Artificial Sequence
  chemically synthesized
cctcggccaggtggccgcgc

SEQ ID NO: 34018 - DNA, 20 bp, Artificial Sequence
  chemically synthesized
tcggacttgaccgtcatggg

SEQ ID NO: 34019 - DNA, 20 bp, Artificial Sequence
  chemically synthesized
tgtgcatgtgcgtcttcatg

SEQ ID NO: 34020 - DNA, 20 bp, Artificial Sequence
  chemically synthesized
tgtgcgtcttcatgtggcgc

SEQ ID NO: 34021 - DNA, 20 bp, Artificial Sequence
  chemically synthesized
ggtcgcacaggttgcacttg

SEQ ID NO: 34022 - DNA, 20 bp, Artificial Sequence
  chemically synthesized
gggggctgggagggaggagg

SEQ ID NO: 34023 - DNA, 20 bp, Artificial Sequence
  chemically synthesized
gggggggcgtcgccaggaag

SEQ ID NO: 34024 - DNA, 20 bp, Artificial Sequence
  chemically synthesized
tggcgggaggctccatagcc

SEQ ID NO: 34025 - DNA, 20 bp, Artificial Sequence
  chemically synthesized
cggggtcaggggacttccgt

SEQ ID NO: 34026 - DNA, 20 bp, Artificial Sequence
  chemically synthesized
acttccgtgttcgctttcta

SEQ ID NO: 34027 - DNA, 20 bp, Artificial Sequence
  chemically synthesized
gaaaccatgcactggtgaat

SEQ ID NO: 34028 - DNA, 20 bp, Artificial Sequence
  chemically synthesized
aaataatacaacaccaacat

SEQ ID NO: 34029 - DNA, 20 bp, Artificial Sequence
  chemically synthesized
tcactgaggcgggcatcagc

SEQ ID NO: 34030 - DNA, 20 bp, Artificial Sequence
  chemically synthesized
gcagaaaaatcctgaccagt

SEQ ID NO: 34031 - DNA, 20 bp, Artificial Sequence
  chemically synthesized
aactttccagttccatcagc

SEQ ID NO: 34032 - DNA, 20 bp, Artificial Sequence
  chemically synthesized
gccatctcatctccatgtgc

SEQ ID NO: 34033 - DNA, 20 bp, Artificial Sequence
  chemically synthesized
aaggtgacccaaggaaactt

SEQ ID NO: 34034 - DNA, 20 bp, Artificial Sequence
  chemically synthesized
aactttttggcttcctaaat

SEQ ID NO: 34035 - DNA, 20 bp, Artificial Sequence
  chemically synthesized
acaatgttctatggccctaa

SEQ ID NO: 34036 - DNA, 20 bp, Artificial Sequence
  chemically synthesized
acgtccatttttatctcaaa

SEQ ID NO: 34037 - DNA, 20 bp, Artificial Sequence
  chemically synthesized
aatctgaaagaaaaacttca

SEQ ID NO: 34038 - DNA, 20 bp, Artificial Sequence
  chemically synthesized
gacttaagcagacacagcat

SEQ ID NO: 34039 - DNA, 20 bp, Artificial Sequence
  chemically synthesized
tgctacactatcctcctcct

SEQ ID NO: 34040 - DNA, 20 bp, Artificial Sequence
  chemically synthesized
ccaagccgtctggagagggg

SEQ ID NO: 34041 - DNA, 20 bp, Artificial Sequence
  chemically synthesized
tgccactttggcaaagaagg

SEQ ID NO: 34042 - DNA, 20 bp, Artificial Sequence
  chemically synthesized
tatatatggaataactgacc

SEQ ID NO: 34043 - DNA, 20 bp, Artificial Sequence
  chemically synthesized
atgagaaaaacaaaacttcc

SEQ ID NO: 34044 - DNA, 20 bp, Artificial Sequence
  chemically synthesized
ctcctgggtaaatctcttaa

SEQ ID NO: 34045 - DNA, 20 bp, Artificial Sequence
  chemically synthesized
tagatggtaagataccaaaa

SEQ ID NO: 34046 - DNA, 20 bp, Artificial Sequence
  chemically synthesized
tggaagggggaaaaaaggca

SEQ ID NO: 34047 - DNA, 20 bp, Artificial Sequence
  chemically synthesized
gtatcacattatctgcctat

SEQ ID NO: 34048 - DNA, 20 bp, Artificial Sequence
  chemically synthesized
cctctcttcaaagggaaata

SEQ ID NO: 34049 - DNA, 20 bp, Artificial Sequence
  chemically synthesized
gttccaactacatgatcctc

SEQ ID NO: 34050 - DNA, 20 bp, Artificial Sequence
  chemically synthesized
cgatctgagttgggcaagta

SEQ ID NO: 34051 - DNA, 20 bp, Artificial Sequence
  chemically synthesized
ttatattttaccttataaaa

SEQ ID NO: 34052 - DNA, 20 bp, Artificial Sequence
  chemically synthesized
ctagactcataattagtggt

SEQ ID NO: 34053 - DNA, 20 bp, Artificial Sequence
  chemically synthesized
tctcatttgtatcctttcaa

SEQ ID NO: 34054 - DNA, 20 bp, Artificial Sequence
  chemically synthesized
cttataatgagcatacaaca

SEQ ID NO: 34055 - DNA, 20 bp, Artificial Sequence
  chemically synthesized
aatgtcaatgagaagggctg

SEQ ID NO: 34056 - DNA, 20 bp, Artificial Sequence
  chemically synthesized
agggctgttacgattgagac

SEQ ID NO: 34057 - DNA, 20 bp, Artificial Sequence
  chemically synthesized
actaaagattacatggagag

SEQ ID NO: 34058 - DNA, 20 bp, Artificial Sequence
  chemically synthesized
ccatattatattacagtgct

SEQ ID NO: 34059 - DNA, 20 bp, Artificial Sequence
  chemically synthesized
tactttgttcataacatctt

SEQ ID NO: 34060 - DNA, 20 bp, Artificial Sequence
  chemically synthesized
tgatgatttagaaagactgg

SEQ ID NO: 34061 - DNA, 20 bp, Artificial Sequence
  chemically synthesized
gtgtggcaaaattagggcta

SEQ ID NO: 34062 - DNA, 20 bp, Artificial Sequence
  chemically synthesized
agagcctcattgggcattta

SEQ ID NO: 34063 - DNA, 20 bp, Artificial Sequence
  chemically synthesized
cctcattgggcatttacggg

SEQ ID NO: 34064 - DNA, 20 bp, Artificial Sequence
  chemically synthesized
ttgggcatttacggggattg

SEQ ID NO: 34065 - DNA, 20 bp, Artificial Sequence
  chemically synthesized
aatcagctattagcccacct

SEQ ID NO: 34066 - DNA, 20 bp, Artificial Sequence
  chemically synthesized
aaagtcatgtgatctaagcc

SEQ ID NO: 34067 - DNA, 20 bp, Artificial Sequence
  chemically synthesized
gaggcctagctctattatcc

SEQ ID NO: 34068 - DNA, 20 bp, Artificial Sequence
  chemically synthesized
attgtaactctgggatagtc

SEQ ID NO: 34069 - DNA, 20 bp, Artificial Sequence
  chemically synthesized
ctatcaggtcgaatgtgaat

SEQ ID NO: 34070 - DNA, 20 bp, Artificial Sequence
  chemically synthesized
tgagttttcattactaccag

SEQ ID NO: 34071 - DNA, 20 bp, Artificial Sequence
  chemically synthesized
taaccacattacacaccccg

SEQ ID NO: 34072 - DNA, 20 bp, Artificial Sequence
  chemically synthesized
gccgccaagtggaatgggca

SEQ ID NO: 34073 - DNA, 20 bp, Artificial Sequence
  chemically synthesized
aatgggcatcaggtttgttc

SEQ ID NO: 34074 - DNA, 20 bp, Artificial Sequence
  chemically synthesized
accaggctgaagaccgagaa

SEQ ID NO: 34075 - DNA, 20 bp, Artificial Sequence
  chemically synthesized
tcccttccctccaaaagtgg

SEQ ID NO: 34076 - DNA, 20 bp, Artificial Sequence
  chemically synthesized
tctgcaatctgtgacctaac

SEQ ID NO: 34077 - DNA, 20 bp, Artificial Sequence
  chemically synthesized
tgacctaacccaggcttagg

SEQ ID NO: 34078 - DNA, 20 bp, Artificial Sequence
  chemically synthesized
ttgggggaagggagcagatg

SEQ ID NO: 34079 - DNA, 20 bp, Artificial Sequence
  chemically synthesized
ccacccagccctcaggacct

SEQ ID NO: 34080 - DNA, 20 bp, Artificial Sequence
  chemically synthesized
acacaataactctttgttac

SEQ ID NO: 34081 - DNA, 20 bp, Artificial Sequence
  chemically synthesized
ggagttaacaaaaataaaca

SEQ ID NO: 34082 - DNA, 20 bp, Artificial Sequence
  chemically synthesized
cacacttcttttcttcttga

SEQ ID NO: 34083 - DNA, 20 bp, Artificial Sequence
  chemically synthesized
ttcttcttgaacctgctttt

SEQ ID NO: 34084 - DNA, 20 bp, Artificial Sequence
  chemically synthesized
ccccctaaccttttagccat

SEQ ID NO: 34085 - DNA, 20 bp, Artificial Sequence
  chemically synthesized
atttgtataaatggacaaat

SEQ ID NO: 34086 - DNA, 20 bp, Artificial Sequence
  chemically synthesized
aataaccctaaactgactcc

SEQ ID NO: 34087 - DNA, 20 bp, Artificial Sequence
  chemically synthesized
ttctgcactcatcccaggcg

SEQ ID NO: 34088 - DNA, 20 bp, Artificial Sequence
  chemically synthesized
aggagaggcccctccagtgc

SEQ ID NO: 34089 - DNA, 20 bp, Artificial Sequence
  chemically synthesized
tcacatttcaattccattaa

SEQ ID NO: 34090 - DNA, 20 bp, Artificial Sequence
  chemically synthesized
aagagtggtgagttatttcc

SEQ ID NO: 34091 - DNA, 20 bp, Artificial Sequence
  chemically synthesized
ggtgagttatttcccagagt

SEQ ID NO: 34092 - DNA, 20 bp, Artificial Sequence
  chemically synthesized
gttatttcccagagtttctg

SEQ ID NO: 34093 - DNA, 20 bp, Artificial Sequence
  chemically synthesized
ggtctttttgacaaaagtga

SEQ ID NO: 34094 - DNA, 20 bp, Artificial Sequence
  chemically synthesized
tttttgacaaaagtgaaagg

SEQ ID NO: 34095 - DNA, 20 bp, Artificial Sequence
  chemically synthesized
ggagaggtggtctttggttc

SEQ ID NO: 34096 - DNA, 20 bp, Artificial Sequence
  chemically synthesized
tcatttgcttatttatttgt

SEQ ID NO: 34097 - DNA, 20 bp, Artificial Sequence
  chemically synthesized
ttgcttatttatttgttgtt

SEQ ID NO: 34098 - DNA, 20 bp, Artificial Sequence
  chemically synthesized
gtgggtagcctggaaacatg

SEQ ID NO: 34099 - DNA, 20 bp, Artificial Sequence
  chemically synthesized
ggggggattttatctgcaag

SEQ ID NO: 34100 - DNA, 20 bp, Artificial Sequence
  chemically synthesized
caaaatgctgataggaaatg

SEQ ID NO: 34101 - DNA, 20 bp, Artificial Sequence
  chemically synthesized
aggaaatgagtagatttgtg

SEQ ID NO: 34102 - DNA, 20 bp, Artificial Sequence
  chemically synthesized
ttttatgggacagagtccca

SEQ ID NO: 34103 - DNA, 20 bp, Artificial Sequence
  chemically synthesized
aactggaaaccttacacaga

SEQ ID NO: 34104 - DNA, 20 bp, Artificial Sequence
  chemically synthesized
caatacaaagcaatggaaga

SEQ ID NO: 34105 - DNA, 20 bp, Artificial Sequence
  chemically synthesized
tcaatgaaacatttgtagca

SEQ ID NO: 34106 - DNA, 20 bp, Artificial Sequence
  chemically synthesized
tttttttgagaagaggaaaa

SEQ ID NO: 34107 - DNA, 20 bp, Artificial Sequence
  chemically synthesized
aaaatttggtttgtgcaatc

SEQ ID NO: 34108 - DNA, 20 bp, Artificial Sequence
  chemically synthesized
tttgtgcaatctggggattt

SEQ ID NO: 34109 - DNA, 20 bp, Artificial Sequence
  chemically synthesized
tacggtttatgtggtaagtg

SEQ ID NO: 34110 - DNA, 20 bp, Artificial Sequence
  chemically synthesized
ggagacgctctgtgtgttct

SEQ ID NO: 34111 - DNA, 20 bp, Artificial Sequence
  chemically synthesized
ttctagaggtttggagttca

SEQ ID NO: 34112 - DNA, 20 bp, Artificial Sequence
  chemically synthesized
actttgatggtgaacaaaca

SEQ ID NO: 34113 - DNA, 20 bp, Artificial Sequence
  chemically synthesized
gaacaaacagtatgttttcc

SEQ ID NO: 34114 - DNA, 20 bp, Artificial Sequence
  chemically synthesized
gcacagccaaggcagttggg

SEQ ID NO: 34115 - DNA, 20 bp, Artificial Sequence
  chemically synthesized
aaacaagtatgtctacattt

SEQ ID NO: 34116 - DNA, 20 bp, Artificial Sequence
  chemically synthesized
agagtgtggcgtaaaattac

SEQ ID NO: 34117 - DNA, 20 bp, Artificial Sequence
  chemically synthesized
atctgagaatccatctttgc

SEQ ID NO: 34118 - DNA, 20 bp, Artificial Sequence
  chemically synthesized
gtttttgcctcagccgttca

SEQ ID NO: 34119 - DNA, 20 bp, Artificial Sequence
  chemically synthesized
tactctgggaagagaccctg

SEQ ID NO: 34120 - DNA, 20 bp, Artificial Sequence
  chemically synthesized
ctcatctgactatctggcag

SEQ ID NO: 34121 - DNA, 20 bp, Artificial Sequence
  chemically synthesized
tctgactatctggcagcata

SEQ ID NO: 34122 - DNA, 20 bp, Artificial Sequence
  chemically synthesized
tatctggcagcatagtttgt

SEQ ID NO: 34123 - DNA, 20 bp, Artificial Sequence
  chemically synthesized
gcagcatagtttgtttttgt

SEQ ID NO: 34124 - DNA, 20 bp, Artificial Sequence
  chemically synthesized
tagtttgtttttgtttttgt

SEQ ID NO: 34125 - DNA, 20 bp, Artificial Sequence
  chemically synthesized
gtttttgtttttgtttttgt

SEQ ID NO: 34126 - DNA, 20 bp, Artificial Sequence
  chemically synthesized
tgacttgcccatggctacac

SEQ ID NO: 34127 - DNA, 20 bp, Artificial Sequence
  chemically synthesized
actgatgattaaccacaatg

SEQ ID NO: 34128 - DNA, 20 bp, Artificial Sequence
  chemically synthesized
ttcactgcccaacaagaagg

SEQ ID NO: 34129 - DNA, 20 bp, Artificial Sequence
  chemically synthesized
tccagcccagcagcgctaca

SEQ ID NO: 34130 - DNA, 20 bp, Artificial Sequence
  chemically synthesized
ttgctgtgttcaccctctac

SEQ ID NO: 34131 - DNA, 20 bp, Artificial Sequence
  chemically synthesized
caaagccaactggggacccc

SEQ ID NO: 34132 - DNA, 20 bp, Artificial Sequence
  chemically synthesized
ctggggaccccagctgattc

SEQ ID NO: 34133 - DNA, 20 bp, Artificial Sequence
  chemically synthesized
taaattgttaatagcctccc

SEQ ID NO: 34134 - DNA, 20 bp, Artificial Sequence
  chemically synthesized
gatgccttcaattatttcat

SEQ ID NO: 34135 - DNA, 20 bp, Artificial Sequence
  chemically synthesized
gcaaagtaaagtatcacaat

SEQ ID NO: 34136 - DNA, 20 bp, Artificial Sequence
  chemically synthesized
agggcctcttcttttcccac

SEQ ID NO: 34137 - DNA, 20 bp, Artificial Sequence
  chemically synthesized
ctttgttagtgctcttaggc

SEQ ID NO: 34138 - DNA, 20 bp, Artificial Sequence
  chemically synthesized
acccccgatcagcatcacct

SEQ ID NO: 34139 - DNA, 20 bp, Artificial Sequence
  chemically synthesized
ctatgttgaataaattctcc

SEQ ID NO: 34140 - DNA, 20 bp, Artificial Sequence
  chemically synthesized
gtaagggaagtatgaacgct

SEQ ID NO: 34141 - DNA, 20 bp, Artificial Sequence
  chemically synthesized
cagagacccatgggccatga

SEQ ID NO: 34142 - DNA, 20 bp, Artificial Sequence
  chemically synthesized
ctggaacagtcaaaaacaaa

SEQ ID NO: 34143 - DNA, 20 bp, Artificial Sequence
  chemically synthesized
tagcatgagacaacacccaa

SEQ ID NO: 34144 - DNA, 20 bp, Artificial Sequence
  chemically synthesized
acccaaaccagcttgtgcca

SEQ ID NO: 34145 - DNA, 20 bp, Artificial Sequence
  chemically synthesized
tgccagacagattgtgtcct

SEQ ID NO: 34146 - DNA, 20 bp, Artificial Sequence
  chemically synthesized
ggacacagcaggaactggac

SEQ ID NO: 34147 - DNA, 20 bp, Artificial Sequence
  chemically synthesized
tcttacacttttctggtgga

SEQ ID NO: 34148 - DNA, 20 bp, Artificial Sequence
  chemically synthesized
ccttacacattattaggttg

SEQ ID NO: 34149 - DNA, 20 bp, Artificial Sequence
  chemically synthesized
aaaatagtgactcttatttt

SEQ ID NO: 34150 - DNA, 20 bp, Artificial Sequence
  chemically synthesized
aaaatatgcagcaaactggg

SEQ ID NO: 34151 - DNA, 20 bp, Artificial Sequence
  chemically synthesized
atgcagcaaactgggaatgg

SEQ ID NO: 34152 - DNA, 20 bp, Artificial Sequence
  chemically synthesized
ctggaatttaagtcattaaa

SEQ ID NO: 34153 - DNA, 20 bp, Artificial Sequence
  chemically synthesized
taagtcattaaatcaagttt

SEQ ID NO: 34154 - DNA, 20 bp, Artificial Sequence
  chemically synthesized
tggtttcctcaagaacatct

SEQ ID NO: 34155 - DNA, 20 bp, Artificial Sequence
  chemically synthesized
tccttgactattaacatgct

SEQ ID NO: 34156 - DNA, 20 bp, Artificial Sequence
  chemically synthesized
tactaatcaacaggtaatac

SEQ ID NO: 34157 - DNA, 20 bp, Artificial Sequence
  chemically synthesized
aagcaaaaagcatcattcca

SEQ ID NO: 34158 - DNA, 20 bp, Artificial Sequence
  chemically synthesized
atcattccaacacgtttaat

SEQ ID NO: 34159 - DNA, 20 bp, Artificial Sequence
  chemically synthesized
tcactaaaatgtacgtgtgt

SEQ ID NO: 34160 - DNA, 20 bp, Artificial Sequence
  chemically synthesized
gtgttagcgtgtgcatgcat

SEQ ID NO: 34161 - DNA, 20 bp, Artificial Sequence
  chemically synthesized
gtgactgtgtgcatgtgtgt

SEQ ID NO: 34162 - DNA, 20 bp, Artificial Sequence
  chemically synthesized
tgtgtgtatatttcctaaac

SEQ ID NO: 34163 - DNA, 20 bp, Artificial Sequence
  chemically synthesized
catatgtttttagataattt

SEQ ID NO: 34164 - DNA, 20 bp, Artificial Sequence
  chemically synthesized
ctacacttaaaatgcatcct

SEQ ID NO: 34165 - DNA, 20 bp, Artificial Sequence
  chemically synthesized
ggaacccattccagttctga

SEQ ID NO: 34166 - DNA, 20 bp, Artificial Sequence
  chemically synthesized
cagtgcagctagtctgagct

SEQ ID NO: 34167 - DNA, 20 bp, Artificial Sequence
  chemically synthesized
gccgcatctagctcttgacc

SEQ ID NO: 34168 - DNA, 20 bp, Artificial Sequence
  chemically synthesized
atagataccagttcttctca

SEQ ID NO: 34169 - DNA, 20 bp, Artificial Sequence
  chemically synthesized
tcaatctgtaatgaaaatgt

SEQ ID NO: 34170 - DNA, 20 bp, Artificial Sequence
  chemically synthesized
catgtgcattttttttcctt

SEQ ID NO: 34171 - DNA, 20 bp, Artificial Sequence
  chemically synthesized
tccttcattgcttttttact

SEQ ID NO: 34172 - DNA, 20 bp, Artificial Sequence
  chemically synthesized
cctgaaactctctcatggtc

SEQ ID NO: 34173 - DNA, 20 bp, Artificial Sequence
  chemically synthesized
tcaatgctatcctcttagag

SEQ ID NO: 34174 - DNA, 20 bp, Artificial Sequence
  chemically synthesized
accttttaagagttctcctc

SEQ ID NO: 34175 - DNA, 20 bp, Artificial Sequence
  chemically synthesized
ataattccaaaaaaaaaaaa

SEQ ID NO: 34176 - DNA, 20 bp, Artificial Sequence
  chemically synthesized
gttccatctttgtgttgaaa

SEQ ID NO: 34177 - DNA, 20 bp, Artificial Sequence
  chemically synthesized
agataaatttttattacact

SEQ ID NO: 34178 - DNA, 20 bp, Artificial Sequence
  chemically synthesized
attgtcttaggacaattttt

SEQ ID NO: 34179 - DNA, 20 bp, Artificial Sequence
  chemically synthesized
tcttaggacaattttttttt

SEQ ID NO: 34180 - DNA, 20 bp, Artificial Sequence
  chemically synthesized
cagtacaaagaaaacacgga

SEQ ID NO: 34181 - DNA, 20 bp, Artificial Sequence
  chemically synthesized
ggacacagatttctcccaca

SEQ ID NO: 34182 - DNA, 20 bp, Artificial Sequence
  chemically synthesized
tccatttggaagggagggag

SEQ ID NO: 34183 - DNA, 20 bp, Artificial Sequence
  chemically synthesized
taaaaagaaaaagcaggtaa

SEQ ID NO: 34184 - DNA, 20 bp, Artificial Sequence
  chemically synthesized
attcacatcaaaatattgca

SEQ ID NO: 34185 - DNA, 20 bp, Artificial Sequence
  chemically synthesized
gaccatctaaataaatcctc

SEQ ID NO: 34186 - DNA, 20 bp, Artificial Sequence
  chemically synthesized
ctgaagatttctgtgacatc

SEQ ID NO: 34187 - DNA, 20 bp, Artificial Sequence
  chemically synthesized
actccatgaaggttcatctg

SEQ ID NO: 34188 - DNA, 20 bp, Artificial Sequence
  chemically synthesized
ttctgttttccccccacctc

SEQ ID NO: 34189 - DNA, 20 bp, Artificial Sequence
  chemically synthesized
gcccgctaaggcaaaattta

SEQ ID NO: 34190 - DNA, 20 bp, Artificial Sequence
  chemically synthesized
cttccttgcaatactgcctc

SEQ ID NO: 34191 - DNA, 20 bp, Artificial Sequence
  chemically synthesized
tctatttcagatgtctcatt

SEQ ID NO: 34192 - DNA, 20 bp, Artificial Sequence
  chemically synthesized
tgtctcattgccagtttaag

SEQ ID NO: 34193 - DNA, 20 bp, Artificial Sequence
  chemically synthesized
aaatgactgtgcaagaaaca

SEQ ID NO: 34194 - DNA, 20 bp, Artificial Sequence
  chemically synthesized
tctgagtcctcagctgagga

SEQ ID NO: 34195 - DNA, 20 bp, Artificial Sequence
  chemically synthesized
tattcccactgccaccactc

SEQ ID NO: 34196 - DNA, 20 bp, Artificial Sequence
  chemically synthesized
ccccaactctgccactcacc

SEQ ID NO: 34197 - DNA, 20 bp, Artificial Sequence
  chemically synthesized
aatcctttctttctggccct

SEQ ID NO: 34198 - DNA, 20 bp, Artificial Sequence
  chemically synthesized
tccatctttaaaaggagaag

SEQ ID NO: 34199 - DNA, 20 bp, Artificial Sequence
  chemically synthesized
gagaagactggattagatgg

SEQ ID NO: 34200 - DNA, 20 bp, Artificial Sequence
  chemically synthesized
ccttataggagagttcaggg

SEQ ID NO: 34201 - DNA, 20 bp, Artificial Sequence
  chemically synthesized
cttggtccccaggctaatcc

SEQ ID NO: 34202 - DNA, 20 bp, Artificial Sequence
  chemically synthesized
gcttagagagtgagcctgat

SEQ ID NO: 34203 - DNA, 20 bp, Artificial Sequence
  chemically synthesized
cctcctgggacacagtcttg

SEQ ID NO: 34204 - DNA, 20 bp, Artificial Sequence
  chemically synthesized
gtcttgcaaagtttacatgt

SEQ ID NO: 34205 - DNA, 20 bp, Artificial Sequence
  chemically synthesized
gctaaccaacataatttcag

SEQ ID NO: 34206 - DNA, 20 bp, Artificial Sequence
  chemically synthesized
ccaggctcattgaaaattgg

SEQ ID NO: 34207 - DNA, 20 bp, Artificial Sequence
  chemically synthesized
gaaaaatcactctctaattt

SEQ ID NO: 34208 - DNA, 20 bp, Artificial Sequence
  chemically synthesized
taatttatcagtttccatta

SEQ ID NO: 34209 - DNA, 20 bp, Artificial Sequence
  chemically synthesized
tatttctgtcacccgaattg

SEQ ID NO: 34210 - DNA, 20 bp, Artificial Sequence
  chemically synthesized
gaaagccttgcaaaccacac

SEQ ID NO: 34211 - DNA, 20 bp, Artificial Sequence
  chemically synthesized
cgatgagaatgatcatttgc

SEQ ID NO: 34212 - DNA, 20 bp, Artificial Sequence
  chemically synthesized
gagaatgatcatttgcaaac

SEQ ID NO: 34213 - DNA, 20 bp, Artificial Sequence
  chemically synthesized
taacacctgccagagcagag

SEQ ID NO: 34214 - DNA, 20 bp, Artificial Sequence
  chemically synthesized
tctgcatcaactcacaacaa

SEQ ID NO: 34215 - DNA, 20 bp, Artificial Sequence
  chemically synthesized
aagaaagaaataatcaaaca

SEQ ID NO: 34216 - DNA, 20 bp, Artificial Sequence
  chemically synthesized
tggtgtttccaagagactcc

SEQ ID NO: 34217 - DNA, 20 bp, Artificial Sequence
  chemically synthesized
cactgcagcccggccaggtg

SEQ ID NO: 34218 - DNA, 20 bp, Artificial Sequence
  chemically synthesized
catctgtcctggcctttatg

SEQ ID NO: 34219 - DNA, 20 bp, Artificial Sequence
  chemically synthesized
tgtggacagggaggacaggg

SEQ ID NO: 34220 - DNA, 20 bp, Artificial Sequence
  chemically synthesized
actctgtgacagtcttggcc

SEQ ID NO: 34221 - DNA, 20 bp, Artificial Sequence
  chemically synthesized
agaaattatgagaactaatt

SEQ ID NO: 34222 - DNA, 20 bp, Artificial Sequence
  chemically synthesized
ctctgcccggggcatgctgc

SEQ ID NO: 34223 - DNA, 20 bp, Artificial Sequence
  chemically synthesized
ccacagaacaaaacacaggc

SEQ ID NO: 34224 - DNA, 20 bp, Artificial Sequence
  chemically synthesized
aaacacaggccttggctttg

SEQ ID NO: 34225 - DNA, 20 bp, Artificial Sequence
  chemically synthesized
caggccttggctttgacgtg

SEQ ID NO: 34226 - DNA, 20 bp, Artificial Sequence
  chemically synthesized
tggctttgacgtgctttgtt

SEQ ID NO: 34227 - DNA, 20 bp, Artificial Sequence
  chemically synthesized
ttttttttttttccctcctc

SEQ ID NO: 34228 - DNA, 20 bp, Artificial Sequence
  chemically synthesized
gttcttggctctactaattc

SEQ ID NO: 34229 - DNA, 20 bp, Artificial Sequence
  chemically synthesized
ggtgggacccggagaccatt

SEQ ID NO: 34230 - DNA, 20 bp, Artificial Sequence
  chemically synthesized
tttgttttgagtctctctaa

SEQ ID NO: 34231 - DNA, 20 bp, Artificial Sequence
  chemically synthesized
agcccctcaggctgaaatcc

SEQ ID NO: 34232 - DNA, 20 bp, Artificial Sequence
  chemically synthesized
gagtgtggacggcaggctga

SEQ ID NO: 34233 - DNA, 20 bp, Artificial Sequence
  chemically synthesized
agggtctgtcaccattttaa

SEQ ID NO: 34234 - DNA, 20 bp, Artificial Sequence
  chemically synthesized
tatcagcgtgggacaggttc

SEQ ID NO: 34235 - DNA, 20 bp, Artificial Sequence
  chemically synthesized
tcttacaaaatctgaaaatg

SEQ ID NO: 34236 - DNA, 20 bp, Artificial Sequence
  chemically synthesized
ttctgtccctcccttccacc

SEQ ID NO: 34237 - DNA, 20 bp, Artificial Sequence
  chemically synthesized
cctcccttccaccaaccgtt

SEQ ID NO: 34238 - DNA, 20 bp, Artificial Sequence
  chemically synthesized
gacaggttgggacaactcca

SEQ ID NO: 34239 - DNA, 20 bp, Artificial Sequence
  chemically synthesized
actcagctttctcactcaaa

SEQ ID NO: 34240 - DNA, 20 bp, Artificial Sequence
  chemically synthesized
tggttctccaactaaaagtt

SEQ ID NO: 34241 - DNA, 20 bp, Artificial Sequence
  chemically synthesized
aagagcccctcaataaataa

SEQ ID NO: 34242 - DNA, 20 bp, Artificial Sequence
  chemically synthesized
caggggaaaccttccctagt

SEQ ID NO: 34243 - DNA, 20 bp, Artificial Sequence
  chemically synthesized
tgggtcagccttgacccagg

SEQ ID NO: 34244 - DNA, 20 bp, Artificial Sequence
  chemically synthesized
cttgaaagtggctgctggtc

SEQ ID NO: 34245 - DNA, 20 bp, Artificial Sequence
  chemically synthesized
ctttcttccttcctctctca

SEQ ID NO: 34246 - DNA, 20 bp, Artificial Sequence
  chemically synthesized
gaaagaacagtgtgaagtac

SEQ ID NO: 34247 - DNA, 20 bp, Artificial Sequence
  chemically synthesized
tttttgaactcatagttcta

SEQ ID NO: 34248 - DNA, 20 bp, Artificial Sequence
  chemically synthesized
aatagtttttgctccactaa

SEQ ID NO: 34249 - DNA, 20 bp, Artificial Sequence
  chemically synthesized
gcaaagccctgctgtgctca

SEQ ID NO: 34250 - DNA, 20 bp, Artificial Sequence
  chemically synthesized
cctgctgtgctcaaggagat

SEQ ID NO: 34251 - DNA, 20 bp, Artificial Sequence
  chemically synthesized
tcccaaacctagccacccat

SEQ ID NO: 34252 - DNA, 20 bp, Artificial Sequence
  chemically synthesized
ctacaccaggcccttcgcac

SEQ ID NO: 34253 - DNA, 20 bp, Artificial Sequence
  chemically synthesized
ggcccttcgcacctctgctt

SEQ ID NO: 34254 - DNA, 20 bp, Artificial Sequence
  chemically synthesized
aagagcaactgcagcagaaa

SEQ ID NO: 34255 - DNA, 20 bp, Artificial Sequence
  chemically synthesized
atggctcgtgaatttttttg

SEQ ID NO: 34256 - DNA, 20 bp, Artificial Sequence
  chemically synthesized
gcacatacaactcagggctc

SEQ ID NO: 34257 - DNA, 20 bp, Artificial Sequence
  chemically synthesized
agggcattttttttccacaa

SEQ ID NO: 34258 - DNA, 20 bp, Artificial Sequence
  chemically synthesized
tcaaaagaaaggggttggac

SEQ ID NO: 34259 - DNA, 20 bp, Artificial Sequence
  chemically synthesized
tggactgatgtttcccagtg

SEQ ID NO: 34260 - DNA, 20 bp, Artificial Sequence
  chemically synthesized
ctgatgtttcccagtggagg

SEQ ID NO: 34261 - DNA, 20 bp, Artificial Sequence
  chemically synthesized
ggcagacctgttaaggggcg

SEQ ID NO: 34262 - DNA, 20 bp, Artificial Sequence
  chemically synthesized
ttttggacattttgcatctc

SEQ ID NO: 34263 - DNA, 20 bp, Artificial Sequence
  chemically synthesized
atctctcatgattctatctt

SEQ ID NO: 34264 - DNA, 20 bp, Artificial Sequence
  chemically synthesized
tcatgattctatcttgagag

SEQ ID NO: 34265 - DNA, 20 bp, Artificial Sequence
  chemically synthesized
tcttgagagtttagtttggt

SEQ ID NO: 34266 - DNA, 20 bp, Artificial Sequence
  chemically synthesized
agagtttagtttggttggag

SEQ ID NO: 34267 - DNA, 20 bp, Artificial Sequence
  chemically synthesized
gtttggttggagtttagttt

SEQ ID NO: 34268 - DNA, 20 bp, Artificial Sequence
  chemically synthesized
tttgagttttttgttcgggt

SEQ ID NO: 34269 - DNA, 20 bp, Artificial Sequence
  chemically synthesized
aaaaaaaattggagctgtat

SEQ ID NO: 34270 - DNA, 20 bp, Artificial Sequence
  chemically synthesized
aactggagaaaagtgagaaa

SEQ ID NO: 34271 - DNA, 20 bp, Artificial Sequence
  chemically synthesized
gtgagaaatggagctttttt

SEQ ID NO: 34272 - DNA, 20 bp, Artificial Sequence
  chemically synthesized
acagttgtaatttccactgc

SEQ ID NO: 34273 - DNA, 20 bp, Artificial Sequence
  chemically synthesized
tgtgacaactttgccacaaa

SEQ ID NO: 34274 - DNA, 20 bp, Artificial Sequence
  chemically synthesized
ggaagcaagaagaatagagg

SEQ ID NO: 34275 - DNA, 20 bp, Artificial Sequence
  chemically synthesized
gaatagagggactgcttatt

SEQ ID NO: 34276 - DNA, 20 bp, Artificial Sequence
  chemically synthesized
cactgcatcccaaggttaag

SEQ ID NO: 34277 - DNA, 20 bp, Artificial Sequence
  chemically synthesized
ctgaaaacagggcagaagac

SEQ ID NO: 34278 - DNA, 20 bp, Artificial Sequence
  chemically synthesized
ttagtaccacactacattta

SEQ ID NO: 34279 - DNA, 20 bp, Artificial Sequence
  chemically synthesized
catttaactggattcagttc

SEQ ID NO: 34280 - DNA, 20 bp, Artificial Sequence
  chemically synthesized
gttcatgtgattatacagtg

SEQ ID NO: 34281 - DNA, 20 bp, Artificial Sequence
  chemically synthesized
gcagagtcaagctggaagat

SEQ ID NO: 34282 - DNA, 20 bp, Artificial Sequence
  chemically synthesized
ttcaaacattacagaaatga

SEQ ID NO: 34283 - DNA, 20 bp, Artificial Sequence
  chemically synthesized
tttgctgataaatgctcaaa

SEQ ID NO: 34284 - DNA, 20 bp, Artificial Sequence
  chemically synthesized
aagaaaacctgcacttcagc

SEQ ID NO: 34285 - DNA, 20 bp, Artificial Sequence
  chemically synthesized
cagcccatgattactttgcg

SEQ ID NO: 34286 - DNA, 20 bp, Artificial Sequence
  chemically synthesized
tgtttgagaagaatcaggca

SEQ ID NO: 34287 - DNA, 20 bp, Artificial Sequence
  chemically synthesized
gaacaatgctagccaacaat

SEQ ID NO: 34288 - DNA, 20 bp, Artificial Sequence
  chemically synthesized
agccaacaatcagggtttac

SEQ ID NO: 34289 - DNA, 20 bp, Artificial Sequence
  chemically synthesized
ctccattcaggcctttgaaa

SEQ ID NO: 34290 - DNA, 20 bp, Artificial Sequence
  chemically synthesized
ctgcagtccctttagcccca

SEQ ID NO: 34291 - DNA, 20 bp, Artificial Sequence
  chemically synthesized
aatcaactgctgtctatgtc

SEQ ID NO: 34292 - DNA, 20 bp, Artificial Sequence
  chemically synthesized
actgctgtctatgtcatgtg

SEQ ID NO: 34293 - DNA, 20 bp, Artificial Sequence
  chemically synthesized
tgagctggcatattagcaga

SEQ ID NO: 34294 - DNA, 20 bp, Artificial Sequence
  chemically synthesized
ctaaaacagaagatgtatct

SEQ ID NO: 34295 - DNA, 20 bp, Artificial Sequence
  chemically synthesized
actcgcccaaagcactagaa

SEQ ID NO: 34296 - DNA, 20 bp, Artificial Sequence
  chemically synthesized
tttccttctttttctttctt

SEQ ID NO: 34297 - DNA, 20 bp, Artificial Sequence
  chemically synthesized
cattataaatgagttggtct

SEQ ID NO: 34298 - DNA, 20 bp, Artificial Sequence
  chemically synthesized
catagcttctgttaaaaatc

SEQ ID NO: 34299 - DNA, 20 bp, Artificial Sequence
  chemically synthesized
aatcagaagcttgttagatg

SEQ ID NO: 34300 - DNA, 20 bp, Artificial Sequence
  chemically synthesized
gcgtatgaggggtcttgtcg

SEQ ID NO: 34301 - DNA, 20 bp, Artificial Sequence
  chemically synthesized
cctctgttaattagaaagcc

SEQ ID NO: 34302 - DNA, 20 bp, Artificial Sequence
  chemically synthesized
tgcaggtcactatcgacagc

SEQ ID NO: 34303 - DNA, 20 bp, Artificial Sequence
  chemically synthesized
ctatcgacagctcatgcttt

SEQ ID NO: 34304 - DNA, 20 bp, Artificial Sequence
  chemically synthesized
tcagaaaatgcagtcaccac

SEQ ID NO: 34305 - DNA, 20 bp, Artificial Sequence
  chemically synthesized
acacgcaaggtccgcacaca

SEQ ID NO: 34306 - DNA, 20 bp, Artificial Sequence
  chemically synthesized
cttgcctctctttctccaac

SEQ ID NO: 34307 - DNA, 20 bp, Artificial Sequence
  chemically synthesized
cacattcaccagaaagggaa

SEQ ID NO: 34308 - DNA, 20 bp, Artificial Sequence
  chemically synthesized
taggttttacagataaaccg

SEQ ID NO: 34309 - DNA, 20 bp, Artificial Sequence
  chemically synthesized
gttgcttttcactgaaacag

SEQ ID NO: 34310 - DNA, 20 bp, Artificial Sequence
  chemically synthesized
ctgtacttccaacatggctc

SEQ ID NO: 34311 - DNA, 20 bp, Artificial Sequence
  chemically synthesized
gagaaaaaatgcacatgggc

SEQ ID NO: 34312 - DNA, 20 bp, Artificial Sequence
  chemically synthesized
aaaaagaaatcctctgtggc

SEQ ID NO: 34313 - DNA, 20 bp, Artificial Sequence
  chemically synthesized
ggaagtctggccttggagtt

SEQ ID NO: 34314 - DNA, 20 bp, Artificial Sequence
  chemically synthesized
agcaacctagatatgagaaa

SEQ ID NO: 34315 - DNA, 20 bp, Artificial Sequence
  chemically synthesized
gagctcaacccagagaaggc

SEQ ID NO: 34316 - DNA, 20 bp, Artificial Sequence
  chemically synthesized
tggaaataatacattgctgc

SEQ ID NO: 34317 - DNA, 20 bp, Artificial Sequence
  chemically synthesized
ttcaacaagaaggctgagga

SEQ ID NO: 34318 - DNA, 20 bp, Artificial Sequence
  chemically synthesized
tgaggaatgagattgcacat

SEQ ID NO: 34319 - DNA, 20 bp, Artificial Sequence
  chemically synthesized
gtacaaaaaaaatcttttta

SEQ ID NO: 34320 - DNA, 20 bp, Artificial Sequence
  chemically synthesized
caagctgttctccattctga

SEQ ID NO: 34321 - DNA, 20 bp, Artificial Sequence
  chemically synthesized
catcctagggagactggtac

SEQ ID NO: 34322 - DNA, 20 bp, Artificial Sequence
  chemically synthesized
gctcctttccagagaatgac

SEQ ID NO: 34323 - DNA, 20 bp, Artificial Sequence
  chemically synthesized
ctgtgatggacatgagatcc

SEQ ID NO: 34324 - DNA, 20 bp, Artificial Sequence
  chemically synthesized
tgcacagaaatgagcagcat

SEQ ID NO: 34325 - DNA, 20 bp, Artificial Sequence
  chemically synthesized
agcagcatgatggattagct

SEQ ID NO: 34326 - DNA, 20 bp, Artificial Sequence
  chemically synthesized
gtgaacatgccaactcaaca

SEQ ID NO: 34327 - DNA, 20 bp, Artificial Sequence
  chemically synthesized
gaacaaattaatatttaatt

SEQ ID NO: 34328 - DNA, 20 bp, Artificial Sequence
  chemically synthesized
tatcagaataaaaaagactc

SEQ ID NO: 34329 - DNA, 20 bp, Artificial Sequence
  chemically synthesized
atttaggagcgctagacaca

SEQ ID NO: 34330 - DNA, 20 bp, Artificial Sequence
  chemically synthesized
tgagtttccctgcctccaac

SEQ ID NO: 34331 - DNA, 20 bp, Artificial Sequence
  chemically synthesized
tccctaacctatattttgca

SEQ ID NO: 34332 - DNA, 20 bp, Artificial Sequence
  chemically synthesized
agcccatgttacatctccag

SEQ ID NO: 34333 - DNA, 20 bp, Artificial Sequence
  chemically synthesized
gggagcagtgtagtgggcag

SEQ ID NO: 34334 - DNA, 20 bp, Artificial Sequence
  chemically synthesized
tgggaaatcgtcttctcaaa

SEQ ID NO: 34335 - DNA, 20 bp, Artificial Sequence
  chemically synthesized
attagatatttaaaaatgaa

SEQ ID NO: 34336 - DNA, 20 bp, Artificial Sequence
  chemically synthesized
tatttaaaaatgaatacaga

SEQ ID NO: 34337 - DNA, 20 bp, Artificial Sequence
  chemically synthesized
acaaaaaaaggcatgaaaaa

SEQ ID NO: 34338 - DNA, 20 bp, Artificial Sequence
  chemically synthesized
gcagcagaatgtaaaaagca

SEQ ID NO: 34339 - DNA, 20 bp, Artificial Sequence
  chemically synthesized
ccctgataacatctgccact

SEQ ID NO: 34340 - DNA, 20 bp, Artificial Sequence
  chemically synthesized
tgccactaaaggtttactga

SEQ ID NO: 34341 - DNA, 20 bp, Artificial Sequence
  chemically synthesized
tatatgaacaattagatatt

SEQ ID NO: 34342 - DNA, 20 bp, Artificial Sequence
  chemically synthesized
tctgtgctattacttttgac

SEQ ID NO: 34343 - DNA, 20 bp, Artificial Sequence
  chemically synthesized
aaacatttaaattatcctgg

SEQ ID NO: 34344 - DNA, 20 bp, Artificial Sequence
  chemically synthesized
tgtctcacgggctgttcaaa

SEQ ID NO: 34345 - DNA, 20 bp, Artificial Sequence
  chemically synthesized
gcctgtaaaagatacctgag

SEQ ID NO: 34346 - DNA, 20 bp, Artificial Sequence
  chemically synthesized
gataataggacaatgccata

SEQ ID NO: 34347 - DNA, 20 bp, Artificial Sequence
  chemically synthesized
tttaggtaatgtcatctatg

SEQ ID NO: 34348 - DNA, 20 bp, Artificial Sequence
  chemically synthesized
taatgtcatctatgatcagt

SEQ ID NO: 34349 - DNA, 20 bp, Artificial Sequence
  chemically synthesized
gaaaccctgttatggctgta

SEQ ID NO: 34350 - DNA, 20 bp, Artificial Sequence
  chemically synthesized
ccctgttatggctgtaaata

SEQ ID NO: 34351 - DNA, 20 bp, Artificial Sequence
  chemically synthesized
aggggaattcggtaaaactt

SEQ ID NO: 34352 - DNA, 20 bp, Artificial Sequence
  chemically synthesized
aattcggtaaaactttctag

SEQ ID NO: 34353 - DNA, 20 bp, Artificial Sequence
  chemically synthesized
cctaaagccactgctaccca

SEQ ID NO: 34354 - DNA, 20 bp, Artificial Sequence
  chemically synthesized
gccactgctacccaaaacga

SEQ ID NO: 34355 - DNA, 20 bp, Artificial Sequence
  chemically synthesized
ctgctacccaaaacgatttt

SEQ ID NO: 34356 - DNA, 20 bp, Artificial Sequence
  chemically synthesized
tacccaaaacgattttgttt

SEQ ID NO: 34357 - DNA, 20 bp, Artificial Sequence
  chemically synthesized
caaaacgattttgtttgttt

SEQ ID NO: 34358 - DNA, 20 bp, Artificial Sequence
  chemically synthesized
acgattttgtttgtttgttt

SEQ ID NO: 34359 - DNA, 20 bp, Artificial Sequence
  chemically synthesized
ttttgtttgtttgtttgttt

SEQ ID NO: 34360 - DNA, 20 bp, Artificial Sequence
  chemically synthesized
gtttgtttgtttgtttgttt

SEQ ID NO: 34361 - DNA, 20 bp, Artificial Sequence
  chemically synthesized
tgtttgtttgtttgtttgtt

SEQ ID NO: 34362 - DNA, 20 bp, Artificial Sequence
  chemically synthesized
tttgttttttgtttctgagg

SEQ ID NO: 34363 - DNA, 20 bp, Artificial Sequence
  chemically synthesized
aatctccgcctcccgggttc

SEQ ID NO: 34364 - DNA, 20 bp, Artificial Sequence
  chemically synthesized
tgcctcagcctcccaagtag

SEQ ID NO: 34365 - DNA, 20 bp, Artificial Sequence
  chemically synthesized
ttctgtatttttggtagaga

SEQ ID NO: 34366 - DNA, 20 bp, Artificial Sequence
  chemically synthesized
cacctcagcctcccaaagtg

SEQ ID NO: 34367 - DNA, 20 bp, Artificial Sequence
  chemically synthesized
tcctaaataataggtggtca

SEQ ID NO: 34368 - DNA, 20 bp, Artificial Sequence
  chemically synthesized
accttagaccccaattaaac

SEQ ID NO: 34369 - DNA, 20 bp, Artificial Sequence
  chemically synthesized
ccccaattaaactgttgctt

SEQ ID NO: 34370 - DNA, 20 bp, Artificial Sequence
  chemically synthesized
gcatttggaacccagtgcta

SEQ ID NO: 34371 - DNA, 20 bp, Artificial Sequence
  chemically synthesized
cctaactaatttctgccgct

SEQ ID NO: 34372 - DNA, 20 bp, Artificial Sequence
  chemically synthesized
ccaagtgaccagccacaaac

SEQ ID NO: 34373 - DNA, 20 bp, Artificial Sequence
  chemically synthesized
gtgaccagccacaaacaaaa

SEQ ID NO: 34374 - DNA, 20 bp, Artificial Sequence
  chemically synthesized
acactctgggtcactagcat

SEQ ID NO: 34375 - DNA, 20 bp, Artificial Sequence
  chemically synthesized
ccccctctcaccccatccaa

SEQ ID NO: 34376 - DNA, 20 bp, Artificial Sequence
  chemically synthesized
aaatgtttactcaagttcag

SEQ ID NO: 34377 - DNA, 20 bp, Artificial Sequence
  chemically synthesized
caatacagaccctgatgggc

SEQ ID NO: 34378 - DNA, 20 bp, Artificial Sequence
  chemically synthesized
aatgggggcaaaggcaaaag

SEQ ID NO: 34379 - DNA, 20 bp, Artificial Sequence
  chemically synthesized
aaaggcaaaaggaaagcttt

SEQ ID NO: 34380 - DNA, 20 bp, Artificial Sequence
  chemically synthesized
ccttccgttctcatttcctt

SEQ ID NO: 34381 - DNA, 20 bp, Artificial Sequence
  chemically synthesized
attaatttcatgtgttccca

SEQ ID NO: 34382 - DNA, 20 bp, Artificial Sequence
  chemically synthesized
atacagggactctttctcct

SEQ ID NO: 34383 - DNA, 20 bp, Artificial Sequence
  chemically synthesized
tcaacaaatagcatataaat

SEQ ID NO: 34384 - DNA, 20 bp, Artificial Sequence
  chemically synthesized
cagtaacatgttatgctaca

SEQ ID NO: 34385 - DNA, 20 bp, Artificial Sequence
  chemically synthesized
accctggagaagagcaaatg

SEQ ID NO: 34386 - DNA, 20 bp, Artificial Sequence
  chemically synthesized
ttctaaaaacgtattcttaa

SEQ ID NO: 34387 - DNA, 20 bp, Artificial Sequence
  chemically synthesized
cctgaggtcaggagttcaag

SEQ ID NO: 34388 - DNA, 20 bp, Artificial Sequence
  chemically synthesized
ctcgggaggctgaggcagga

SEQ ID NO: 34389 - DNA, 20 bp, Artificial Sequence
  chemically synthesized
acccaacactacgcaggcac

SEQ ID NO: 34390 - DNA, 20 bp, Artificial Sequence
  chemically synthesized
agatgctacattgttagcat

SEQ ID NO: 34391 - DNA, 20 bp, Artificial Sequence
  chemically synthesized
tcaggaggctgaggtgacag

SEQ ID NO: 34392 - DNA, 20 bp, Artificial Sequence
  chemically synthesized
caaaagacaactaattgggc

SEQ ID NO: 34393 - DNA, 20 bp, Artificial Sequence
  chemically synthesized
gcctgctggaattctaggaa

SEQ ID NO: 34394 - DNA, 20 bp, Artificial Sequence
  chemically synthesized
tcacatactcaccagtactc

SEQ ID NO: 34395 - DNA, 20 bp, Artificial Sequence
  chemically synthesized
gcgcttctcagacccaaatg

SEQ ID NO: 34396 - DNA, 20 bp, Artificial Sequence
  chemically synthesized
cttggttccactccagtggt

SEQ ID NO: 34397 - DNA, 20 bp, Artificial Sequence
  chemically synthesized
ttccactccagtggtgggtg

SEQ ID NO: 34398 - DNA, 20 bp, Artificial Sequence
  chemically synthesized
ctccagtggtgggtgttttg

SEQ ID NO: 34399 - DNA, 20 bp, Artificial Sequence
  chemically synthesized
gtggtgggtgttttgttttg

SEQ ID NO: 34400 - DNA, 20 bp, Artificial Sequence
  chemically synthesized
ggtgttttgttttgtttcgc

SEQ ID NO: 34401 - DNA, 20 bp, Artificial Sequence
  chemically synthesized
tcattcattttaagtgtaca

SEQ ID NO: 34402 - DNA, 20 bp, Artificial Sequence
  chemically synthesized
ctcatacaggatatcgtctt

SEQ ID NO: 34403 - DNA, 20 bp, Artificial Sequence
  chemically synthesized
ttaatttcttccacagagca

SEQ ID NO: 34404 - DNA, 20 bp, Artificial Sequence
  chemically synthesized
ttccacagagcagaatgatt

SEQ ID NO: 34405 - DNA, 20 bp, Artificial Sequence
  chemically synthesized
ttgagttgtattccaccata

SEQ ID NO: 34406 - DNA, 20 bp, Artificial Sequence
  chemically synthesized
ctacaatggacactgtgtag

SEQ ID NO: 34407 - DNA, 20 bp, Artificial Sequence
  chemically synthesized
aggcatttcgagaacacaga

SEQ ID NO: 34408 - DNA, 20 bp, Artificial Sequence
  chemically synthesized
tcgagaacacagaaaaggtt

SEQ ID NO: 34409 - DNA, 20 bp, Artificial Sequence
  chemically synthesized
ccaaaccctatatcccagct

SEQ ID NO: 34410 - DNA, 20 bp, Artificial Sequence
  chemically synthesized
ctgcccagtgctgtggacag

SEQ ID NO: 34411 - DNA, 20 bp, Artificial Sequence
  chemically synthesized
caaagcttcagtgcaggaaa

SEQ ID NO: 34412 - DNA, 20 bp, Artificial Sequence
  chemically synthesized
cctccccctcccccatcctc

SEQ ID NO: 34413 - DNA, 20 bp, Artificial Sequence
  chemically synthesized
tggcctcaggcagtggcgga

SEQ ID NO: 34414 - DNA, 20 bp, Artificial Sequence
  chemically synthesized
gaagacgtgggctgggagct

SEQ ID NO: 34415 - DNA, 20 bp, Artificial Sequence
  chemically synthesized
cgtgggctgggagctgggag

SEQ ID NO: 34416 - DNA, 20 bp, Artificial Sequence
  chemically synthesized
aataactcctagctcattcc

SEQ ID NO: 34417 - DNA, 20 bp, Artificial Sequence
  chemically synthesized
aaaataggaataataatagt

SEQ ID NO: 34418 - DNA, 20 bp, Artificial Sequence
  chemically synthesized
taataatagtatatgcttca

SEQ ID NO: 34419 - DNA, 20 bp, Artificial Sequence
  chemically synthesized
cctagagcagagtaagtgct

SEQ ID NO: 34420 - DNA, 20 bp, Artificial Sequence
  chemically synthesized
atcaggccctttccccaatt

SEQ ID NO: 34421 - DNA, 20 bp, Artificial Sequence
  chemically synthesized
gaggggagagtgcagacagg

SEQ ID NO: 34422 - DNA, 20 bp, Artificial Sequence
  chemically synthesized
agcctgtgataaaagcaact

SEQ ID NO: 34423 - DNA, 20 bp, Artificial Sequence
  chemically synthesized
caactgttagcttgcactag

SEQ ID NO: 34424 - DNA, 20 bp, Artificial Sequence
  chemically synthesized
ggggcatagagccagccctg

SEQ ID NO: 34425 - DNA, 20 bp, Artificial Sequence
  chemically synthesized
tagaaccccctataaactag

SEQ ID NO: 34426 - DNA, 20 bp, Artificial Sequence
  chemically synthesized
ttgcccatggggcacagtca

SEQ ID NO: 34427 - DNA, 20 bp, Artificial Sequence
  chemically synthesized
cagacattctctgcctgttg

SEQ ID NO: 34428 - DNA, 20 bp, Artificial Sequence
  chemically synthesized
cacgtatgtgttgtgatccc

SEQ ID NO: 34429 - DNA, 20 bp, Artificial Sequence
  chemically synthesized
tgttgtgatccctgtggttt

SEQ ID NO: 34430 - DNA, 20 bp, Artificial Sequence
  chemically synthesized
atccctgtggtttgagagtt

SEQ ID NO: 34431 - DNA, 20 bp, Artificial Sequence
  chemically synthesized
tgagagtctctaaattacaa

SEQ ID NO: 34432 - DNA, 20 bp, Artificial Sequence
  chemically synthesized
gtgaaaagtcaattgataat

SEQ ID NO: 34433 - DNA, 20 bp, Artificial Sequence
  chemically synthesized
ctttaggataaccggagggg

SEQ ID NO: 34434 - DNA, 20 bp, Artificial Sequence
  chemically synthesized
agcaatgcacctgtgcagga

SEQ ID NO: 34435 - DNA, 20 bp, Artificial Sequence
  chemically synthesized
ttaagcaatggaagtccaat

SEQ ID NO: 34436 - DNA, 20 bp, Artificial Sequence
  chemically synthesized
gcaagtgtccagggcagaac

SEQ ID NO: 34437 - DNA, 20 bp, Artificial Sequence
  chemically synthesized
actttgctgcaggttcaagg

SEQ ID NO: 34438 - DNA, 20 bp, Artificial Sequence
  chemically synthesized
gtagcacttaatttctgtct

SEQ ID NO: 34439 - DNA, 20 bp, Artificial Sequence
  chemically synthesized
cacgattacttcacgataaa

SEQ ID NO: 34440 - DNA, 20 bp, Artificial Sequence
  chemically synthesized
cgaagcatcgcctttaactg

SEQ ID NO: 34441 - DNA, 20 bp, Artificial Sequence
  chemically synthesized
taactgctctgtttgatcaa

SEQ ID NO: 34442 - DNA, 20 bp, Artificial Sequence
  chemically synthesized
agcaggccaaggatatatga

SEQ ID NO: 34443 - DNA, 20 bp, Artificial Sequence
  chemically synthesized
gaattagaacattccaggta

SEQ ID NO: 34444 - DNA, 20 bp, Artificial Sequence
  chemically synthesized
atgatgatgataataataat

SEQ ID NO: 34445 - DNA, 20 bp, Artificial Sequence
  chemically synthesized
gcacattgtcctaaatgaaa

SEQ ID NO: 34446 - DNA, 20 bp, Artificial Sequence
  chemically synthesized
tagaagggggagcctggacc

SEQ ID NO: 34447 - DNA, 20 bp, Artificial Sequence
  chemically synthesized
ccataaaggtcagggtgttg

SEQ ID NO: 34448 - DNA, 20 bp, Artificial Sequence
  chemically synthesized
tagccacctctggcacctgc

SEQ ID NO: 34449 - DNA, 20 bp, Artificial Sequence
  chemically synthesized
ttttcaaattttaatagcaa

SEQ ID NO: 34450 - DNA, 20 bp, Artificial Sequence
  chemically synthesized
tctctgaggagctagagact

SEQ ID NO: 34451 - DNA, 20 bp, Artificial Sequence
  chemically synthesized
ctgtccaactcatccagaaa

SEQ ID NO: 34452 - DNA, 20 bp, Artificial Sequence
  chemically synthesized
gcattgatgagaggcagggc

SEQ ID NO: 34453 - DNA, 20 bp, Artificial Sequence
  chemically synthesized
ttcttcttcattttccattc

SEQ ID NO: 34454 - DNA, 20 bp, Artificial Sequence
  chemically synthesized
acagctacagtccatttctc

SEQ ID NO: 34455 - DNA, 20 bp, Artificial Sequence
  chemically synthesized
tacaatgtgttccccagtat

SEQ ID NO: 34456 - DNA, 20 bp, Artificial Sequence
  chemically synthesized
aaagagcctgaggcccaata

SEQ ID NO: 34457 - DNA, 20 bp, Artificial Sequence
  chemically synthesized
aacgtcccactttctcaaga

SEQ ID NO: 34458 - DNA, 20 bp, Artificial Sequence
  chemically synthesized
ctgctagacctcaagcagga

SEQ ID NO: 34459 - DNA, 20 bp, Artificial Sequence
  chemically synthesized
aggcactcaccccactgcca

SEQ ID NO: 34460 - DNA, 20 bp, Artificial Sequence
  chemically synthesized
ccaggctgtttactcttagc

SEQ ID NO: 34461 - DNA, 20 bp, Artificial Sequence
  chemically synthesized
ctgcctgaggctgcctgcca

SEQ ID NO: 34462 - DNA, 20 bp, Artificial Sequence
  chemically synthesized
ctgccagtgagattgcatgt

SEQ ID NO: 34463 - DNA, 20 bp, Artificial Sequence
  chemically synthesized
gttcccccattatgcactgc

SEQ ID NO: 34464 - DNA, 20 bp, Artificial Sequence
  chemically synthesized
gctctttaacctctccaagc

SEQ ID NO: 34465 - DNA, 20 bp, Artificial Sequence
  chemically synthesized
tgtgaagcaagcctagctgg

SEQ ID NO: 34466 - DNA, 20 bp, Artificial Sequence
  chemically synthesized
ggcacatcttctgaaacaag

SEQ ID NO: 34467 - DNA, 20 bp, Artificial Sequence
  chemically synthesized
aattttgcacttatttatat

SEQ ID NO: 34468 - DNA, 20 bp, Artificial Sequence
  chemically synthesized
tttcagaaacactaccttca

SEQ ID NO: 34469 - DNA, 20 bp, Artificial Sequence
  chemically synthesized
gaaacactaccttcattctg

SEQ ID NO: 34470 - DNA, 20 bp, Artificial Sequence
  chemically synthesized
aaatgaagaacactcttgta

SEQ ID NO: 34471 - DNA, 20 bp, Artificial Sequence
  chemically synthesized
aatcacttccaaatacttta

SEQ ID NO: 34472 - DNA, 20 bp, Artificial Sequence
  chemically synthesized
tggtttgtaagttctctttc

SEQ ID NO: 34473 - DNA, 20 bp, Artificial Sequence
  chemically synthesized
aggccttttgcaagtactga

SEQ ID NO: 34474 - DNA, 20 bp, Artificial Sequence
  chemically synthesized
ttttttttttttttttgaga

SEQ ID NO: 34475 - DNA, 20 bp, Artificial Sequence
  chemically synthesized
tccctcagcctcctgagtag

SEQ ID NO: 34476 - DNA, 20 bp, Artificial Sequence
  chemically synthesized
gcatgtgcgaccatgcctgg

SEQ ID NO: 34477 - DNA, 20 bp, Artificial Sequence
  chemically synthesized
gtttatatttttaatagaga

SEQ ID NO: 34478 - DNA, 20 bp, Artificial Sequence
  chemically synthesized
agccactgcgcccagcctta

SEQ ID NO: 34479 - DNA, 20 bp, Artificial Sequence
  chemically synthesized
aattatggaataaagtagta

SEQ ID NO: 34480 - DNA, 20 bp, Artificial Sequence
  chemically synthesized
taggtgaaatctcaggctaa

SEQ ID NO: 34481 - DNA, 20 bp, Artificial Sequence
  chemically synthesized
ccagaagtcctggaaaactg

SEQ ID NO: 34482 - DNA, 20 bp, Artificial Sequence
  chemically synthesized
cagagatcaggtccctccaa

SEQ ID NO: 34483 - DNA, 20 bp, Artificial Sequence
  chemically synthesized
caggtccctccaaatgagct

SEQ ID NO: 34484 - DNA, 20 bp, Artificial Sequence
  chemically synthesized
aatgagcttacagtttatga

SEQ ID NO: 34485 - DNA, 20 bp, Artificial Sequence
  chemically synthesized
ggtgaaacaaaatgatggat

SEQ ID NO: 34486 - DNA, 20 bp, Artificial Sequence
  chemically synthesized
acagacagaataacttcttc

SEQ ID NO: 34487 - DNA, 20 bp, Artificial Sequence
  chemically synthesized
tcagattcagaagagtagca

SEQ ID NO: 34488 - DNA, 20 bp, Artificial Sequence
  chemically synthesized
agcagggggtttctcgctag

SEQ ID NO: 34489 - DNA, 20 bp, Artificial Sequence
  chemically synthesized
gtattgctcctaaagaaaga

SEQ ID NO: 34490 - DNA, 20 bp, Artificial Sequence
  chemically synthesized
agcagtgttcacacccaatc

SEQ ID NO: 34491 - DNA, 20 bp, Artificial Sequence
  chemically synthesized
atttaagaaataccagtgaa

SEQ ID NO: 34492 - DNA, 20 bp, Artificial Sequence
  chemically synthesized
tgttcttgatatgttaataa

SEQ ID NO: 34493 - DNA, 20 bp, Artificial Sequence
  chemically synthesized
ggctgtctagggggatggct

SEQ ID NO: 34494 - DNA, 20 bp, Artificial Sequence
  chemically synthesized
gtccctggaagacagtaggc

SEQ ID NO: 34495 - DNA, 20 bp, Artificial Sequence
  chemically synthesized
cataaccctccctcctatcc

SEQ ID NO: 34496 - DNA, 20 bp, Artificial Sequence
  chemically synthesized
tcccaataccagtggctctt

SEQ ID NO: 34497 - DNA, 20 bp, Artificial Sequence
  chemically synthesized
tttcaggcttacaaagcctt

SEQ ID NO: 34498 - DNA, 20 bp, Artificial Sequence
  chemically synthesized
aggactaatttaacccgcct

SEQ ID NO: 34499 - DNA, 20 bp, Artificial Sequence
  chemically synthesized
caatattctggatcttttgt

SEQ ID NO: 34500 - DNA, 20 bp, Artificial Sequence
  chemically synthesized
cctcctgaaaattggttatt

SEQ ID NO: 34501 - DNA, 20 bp, Artificial Sequence
  chemically synthesized
aaattggttattggctgctt

SEQ ID NO: 34502 - DNA, 20 bp, Artificial Sequence
  chemically synthesized
agaagcctgctggaagccta

SEQ ID NO: 34503 - DNA, 20 bp, Artificial Sequence
  chemically synthesized
ccccagggctcatgctgcac

SEQ ID NO: 34504 - DNA, 20 bp, Artificial Sequence
  chemically synthesized
cccttcctttcttagtcact

SEQ ID NO: 34505 - DNA, 20 bp, Artificial Sequence
  chemically synthesized
aaagtcaacctctgactact

SEQ ID NO: 34506 - DNA, 20 bp, Artificial Sequence
  chemically synthesized
tacagctgatgtatttactg

SEQ ID NO: 34507 - DNA, 20 bp, Artificial Sequence
  chemically synthesized
gtatttactgagaagcttct

SEQ ID NO: 34508 - DNA, 20 bp, Artificial Sequence
  chemically synthesized
agcttcttcaagctttctac

SEQ ID NO: 34509 - DNA, 20 bp, Artificial Sequence
  chemically synthesized
aggtacatatctgtccctga

SEQ ID NO: 34510 - DNA, 20 bp, Artificial Sequence
  chemically synthesized
tgaaaatgcttaaaagatca

SEQ ID NO: 34511 - DNA, 20 bp, Artificial Sequence
  chemically synthesized
cctaccagtgagcgcccacc

SEQ ID NO: 34512 - DNA, 20 bp, Artificial Sequence
  chemically synthesized
agacctgccatttaacctct

SEQ ID NO: 34513 - DNA, 20 bp, Artificial Sequence
  chemically synthesized
caatttgacaatactcctca

SEQ ID NO: 34514 - DNA, 20 bp, Artificial Sequence
  chemically synthesized
agggcttactcaaaaaaaaa

SEQ ID NO: 34515 - DNA, 20 bp, Artificial Sequence
  chemically synthesized
agaagggacggatactcaga

SEQ ID NO: 34516 - DNA, 20 bp, Artificial Sequence
  chemically synthesized
gtcctttggcaccccattct

SEQ ID NO: 34517 - DNA, 20 bp, Artificial Sequence
  chemically synthesized
tgaaatgtgttggagcagct

SEQ ID NO: 34518 - DNA, 20 bp, Artificial Sequence
  chemically synthesized
catccacacagggaacaagc

SEQ ID NO: 34519 - DNA, 20 bp, Artificial Sequence
  chemically synthesized
catttggtaaataacccaaa

SEQ ID NO: 34520 - DNA, 20 bp, Artificial Sequence
  chemically synthesized
gcagggtatgggacaccaca

SEQ ID NO: 34521 - DNA, 20 bp, Artificial Sequence
  chemically synthesized
acccacgtgcctttgtgcat

SEQ ID NO: 34522 - DNA, 20 bp, Artificial Sequence
  chemically synthesized
accactgatgacagcccccc

SEQ ID NO: 34523 - DNA, 20 bp, Artificial Sequence
  chemically synthesized
ctcaaataatgtctataatg

SEQ ID NO: 34524 - DNA, 20 bp, Artificial Sequence
  chemically synthesized
ttatacatgggtacttataa

SEQ ID NO: 34525 - DNA, 20 bp, Artificial Sequence
  chemically synthesized
taaacatgttggcgtaactg

SEQ ID NO: 34526 - DNA, 20 bp, Artificial Sequence
  chemically synthesized
tatcccaacagacagagggc

SEQ ID NO: 34527 - DNA, 20 bp, Artificial Sequence
  chemically synthesized
ttgtgctcttgttgacttga

SEQ ID NO: 34528 - DNA, 20 bp, Artificial Sequence
  chemically synthesized
agaaaagttaaaaccttgtg

SEQ ID NO: 34529 - DNA, 20 bp, Artificial Sequence
  chemically synthesized
tgaagtgcttttacattttc

SEQ ID NO: 34530 - DNA, 20 bp, Artificial Sequence
  chemically synthesized
tgaggacaggcaaggggaag

SEQ ID NO: 34531 - DNA, 20 bp, Artificial Sequence
  chemically synthesized
gaagaactgtttccacatgc

SEQ ID NO: 34532 - DNA, 20 bp, Artificial Sequence
  chemically synthesized
gggctgcctccgcacctgag

SEQ ID NO: 34533 - DNA, 20 bp, Artificial Sequence
  chemically synthesized
gcttgctgtcctaagtcggc

SEQ ID NO: 34534 - DNA, 20 bp, Artificial Sequence
  chemically synthesized
tcggctactgcttctaagtc

SEQ ID NO: 34535 - DNA, 20 bp, Artificial Sequence
  chemically synthesized
gcatactatgggataattac

SEQ ID NO: 34536 - DNA, 20 bp, Artificial Sequence
  chemically synthesized
taattactatggattattat

SEQ ID NO: 34537 - DNA, 20 bp, Artificial Sequence
  chemically synthesized
cacaaaagacatattacaca

SEQ ID NO: 34538 - DNA, 20 bp, Artificial Sequence
  chemically synthesized
atattacacacgcagatttc

SEQ ID NO: 34539 - DNA, 20 bp, Artificial Sequence
  chemically synthesized
cctgaaattctctcatgtca

SEQ ID NO: 34540 - DNA, 20 bp, Artificial Sequence
  chemically synthesized
tgatgtgaaagaggagacag

SEQ ID NO: 34541 - DNA, 20 bp, Artificial Sequence
  chemically synthesized
ttttcctgttctgaagagga

SEQ ID NO: 34542 - DNA, 20 bp, Artificial Sequence
  chemically synthesized
tggacacggcaggaaacagc

SEQ ID NO: 34543 - DNA, 20 bp, Artificial Sequence
  chemically synthesized
tgagctcccccttgggttac

SEQ ID NO: 34544 - DNA, 20 bp, Artificial Sequence
  chemically synthesized
tgggttacctatgattccag

SEQ ID NO: 34545 - DNA, 20 bp, Artificial Sequence
  chemically synthesized
ggaacctgtcactggttctt

SEQ ID NO: 34546 - DNA, 20 bp, Artificial Sequence
  chemically synthesized
tctcatcagactccgaaatc

SEQ ID NO: 34547 - DNA, 20 bp, Artificial Sequence
  chemically synthesized
gaaatcacaggcttctggtc

SEQ ID NO: 34548 - DNA, 20 bp, Artificial Sequence
  chemically synthesized
agctgagaaacaagaaagca

SEQ ID NO: 34549 - DNA, 20 bp, Artificial Sequence
  chemically synthesized
gagaaacaagaaagcaattt

SEQ ID NO: 34550 - DNA, 20 bp, Artificial Sequence
  chemically synthesized
cccccaataatttacttggt

SEQ ID NO: 34551 - DNA, 20 bp, Artificial Sequence
  chemically synthesized
tttacttggtctcagctttg

SEQ ID NO: 34552 - DNA, 20 bp, Artificial Sequence
  chemically synthesized
tttggctggcttggatgtta

SEQ ID NO: 34553 - DNA, 20 bp, Artificial Sequence
  chemically synthesized
gaacctgtggaaaagaggac

SEQ ID NO: 34554 - DNA, 20 bp, Artificial Sequence
  chemically synthesized
ctgagaagtccaggaaaaga

SEQ ID NO: 34555 - DNA, 20 bp, Artificial Sequence
  chemically synthesized
acagagaaggaaaaagaaca

SEQ ID NO: 34556 - DNA, 20 bp, Artificial Sequence
  chemically synthesized
cccaccagtcagcaaatcct

SEQ ID NO: 34557 - DNA, 20 bp, Artificial Sequence
  chemically synthesized
ttgcctaaaatttgccttct

SEQ ID NO: 34558 - DNA, 20 bp, Artificial Sequence
  chemically synthesized
actgcttctgcctcactttc

SEQ ID NO: 34559 - DNA, 20 bp, Artificial Sequence
  chemically synthesized
tcatatgacatcactcctcc

SEQ ID NO: 34560 - DNA, 20 bp, Artificial Sequence
  chemically synthesized
cttcctcacctctttggagc

SEQ ID NO: 34561 - DNA, 20 bp, Artificial Sequence
  chemically synthesized
ccccaccttattttcgtgca

SEQ ID NO: 34562 - DNA, 20 bp, Artificial Sequence
  chemically synthesized
aagggggtgccacaagagca

SEQ ID NO: 34563 - DNA, 20 bp, Artificial Sequence
  chemically synthesized
ccacaagagcagggagtttt

SEQ ID NO: 34564 - DNA, 20 bp, Artificial Sequence
  chemically synthesized
gcagcccaacctgggggcac

SEQ ID NO: 34565 - DNA, 20 bp, Artificial Sequence
  chemically synthesized
gggcactttagctttggatc

SEQ ID NO: 34566 - DNA, 20 bp, Artificial Sequence
  chemically synthesized
gctttggatcttgggtttga

SEQ ID NO: 34567 - DNA, 20 bp, Artificial Sequence
  chemically synthesized
aggccctgagacccacaggg

SEQ ID NO: 34568 - DNA, 20 bp, Artificial Sequence
  chemically synthesized
aatgtaaatggaggggttga

SEQ ID NO: 34569 - DNA, 20 bp, Artificial Sequence
  chemically synthesized
aaccaaacgaaagtctttcc

SEQ ID NO: 34570 - DNA, 20 bp, Artificial Sequence
  chemically synthesized
cactggggctgtgcagccaa

SEQ ID NO: 34571 - DNA, 20 bp, Artificial Sequence
  chemically synthesized
cggcattactctccctccat

SEQ ID NO: 34572 - DNA, 20 bp, Artificial Sequence
  chemically synthesized
actctccctccattcttgct

SEQ ID NO: 34573 - DNA, 20 bp, Artificial Sequence
  chemically synthesized
gtgctaatggccacttgtta

SEQ ID NO: 34574 - DNA, 20 bp, Artificial Sequence
  chemically synthesized
ttcataatgctaatatttcc

SEQ ID NO: 34575 - DNA, 20 bp, Artificial Sequence
  chemically synthesized
tttaagttaacagagcgcta

SEQ ID NO: 34576 - DNA, 20 bp, Artificial Sequence
  chemically synthesized
actgcactattaatgacaac

SEQ ID NO: 34577 - DNA, 20 bp, Artificial Sequence
  chemically synthesized
ggggagtcattaattcttct

SEQ ID NO: 34578 - DNA, 20 bp, Artificial Sequence
  chemically synthesized
tcttctccaagctttcaaca

SEQ ID NO: 34579 - DNA, 20 bp, Artificial Sequence
  chemically synthesized
ctatgaaggcaagggttgga

SEQ ID NO: 34580 - DNA, 20 bp, Artificial Sequence
  chemically synthesized
aataaatcagtaaaatgatg

SEQ ID NO: 34581 - DNA, 20 bp, Artificial Sequence
  chemically synthesized
ttgctcggccaaagacatag

SEQ ID NO: 34582 - DNA, 20 bp, Artificial Sequence
  chemically synthesized
atgaatatgtgtgcagccac

SEQ ID NO: 34583 - DNA, 20 bp, Artificial Sequence
  chemically synthesized
ggagagcagtcagagaggaa

SEQ ID NO: 34584 - DNA, 20 bp, Artificial Sequence
  chemically synthesized
agaggaagcctgctttcctc

SEQ ID NO: 34585 - DNA, 20 bp, Artificial Sequence
  chemically synthesized
tggaactcagaatcattcat

SEQ ID NO: 34586 - DNA, 20 bp, Artificial Sequence
  chemically synthesized
acctcccttggcctgtgtcc

SEQ ID NO: 34587 - DNA, 20 bp, Artificial Sequence
  chemically synthesized
ctcgcctctcaaatgagaaa

SEQ ID NO: 34588 - DNA, 20 bp, Artificial Sequence
  chemically synthesized
agaaaggcagctttgagaga

SEQ ID NO: 34589 - DNA, 20 bp, Artificial Sequence
  chemically synthesized
attttgcatatctaattgga

SEQ ID NO: 34590 - DNA, 20 bp, Artificial Sequence
  chemically synthesized
gacgttcacagccttatgaa

SEQ ID NO: 34591 - DNA, 20 bp, Artificial Sequence
  chemically synthesized
gatgacggataggagaacaa

SEQ ID NO: 34592 - DNA, 20 bp, Artificial Sequence
  chemically synthesized
tttggaggagacacagagaa

SEQ ID NO: 34593 - DNA, 20 bp, Artificial Sequence
  chemically synthesized
gtttcacctcttagacgtct

SEQ ID NO: 34594 - DNA, 20 bp, Artificial Sequence
  chemically synthesized
cagagtcaggatgactctca

SEQ ID NO: 34595 - DNA, 20 bp, Artificial Sequence
  chemically synthesized
tccctcaggagccatctgcc

SEQ ID NO: 34596 - DNA, 20 bp, Artificial Sequence
  chemically synthesized
tagcctctagccagaactcc

SEQ ID NO: 34597 - DNA, 20 bp, Artificial Sequence
  chemically synthesized
actctctcttctcaacaagc

SEQ ID NO: 34598 - DNA, 20 bp, Artificial Sequence
  chemically synthesized
ctccatgaagagaagctgtt

SEQ ID NO: 34599 - DNA, 20 bp, Artificial Sequence
  chemically synthesized
gcttgtggtgagcaaaactc

SEQ ID NO: 34600 - DNA, 20 bp, Artificial Sequence
  chemically synthesized
ctccctggattgagtcgaga

SEQ ID NO: 34601 - DNA, 20 bp, Artificial Sequence
  chemically synthesized
agtgctccaagcactctctg

SEQ ID NO: 34602 - DNA, 20 bp, Artificial Sequence
  chemically synthesized
gcttccaggctggagctctg

SEQ ID NO: 34603 - DNA, 20 bp, Artificial Sequence
  chemically synthesized
aaaaaaattaaattgggtgg

SEQ ID NO: 34604 - DNA, 20 bp, Artificial Sequence
  chemically synthesized
ctgtgaattccattgataag

SEQ ID NO: 34605 - DNA, 20 bp, Artificial Sequence
  chemically synthesized
ctccctctggtgagacaggc

SEQ ID NO: 34606 - DNA, 20 bp, Artificial Sequence
  chemically synthesized
ctctggtgagacaggctcta

SEQ ID NO: 34607 - DNA, 20 bp, Artificial Sequence
  chemically synthesized
cttgtttccagaatgccact

SEQ ID NO: 34608 - DNA, 20 bp, Artificial Sequence
  chemically synthesized
ccacgtgctccttccccaac

SEQ ID NO: 34609 - DNA, 20 bp, Artificial Sequence
  chemically synthesized
cagaatctgcaagcagagtt

SEQ ID NO: 34610 - DNA, 20 bp, Artificial Sequence
  chemically synthesized
atcaagcagcgtgagcaaag

SEQ ID NO: 34611 - DNA, 20 bp, Artificial Sequence
  chemically synthesized
tacctctctgaaacacagcc

SEQ ID NO: 34612 - DNA, 20 bp, Artificial Sequence
  chemically synthesized
gagtggactgacacagacat

SEQ ID NO: 34613 - DNA, 20 bp, Artificial Sequence
  chemically synthesized
gactcttgatcacccaactt

SEQ ID NO: 34614 - DNA, 20 bp, Artificial Sequence
  chemically synthesized
cccactgtgaggtcttactg

SEQ ID NO: 34615 - DNA, 20 bp, Artificial Sequence
  chemically synthesized
tgggttatgaaaaagggaag

SEQ ID NO: 34616 - DNA, 20 bp, Artificial Sequence
  chemically synthesized
ataagcctgtgatgactcat

SEQ ID NO: 34617 - DNA, 20 bp, Artificial Sequence
  chemically synthesized
tgccagctttgggtgctcta

SEQ ID NO: 34618 - DNA, 20 bp, Artificial Sequence
  chemically synthesized
aagatgctttcccatgtctg

SEQ ID NO: 34619 - DNA, 20 bp, Artificial Sequence
  chemically synthesized
caccccagcacacagaaaag

SEQ ID NO: 34620 - DNA, 20 bp, Artificial Sequence
  chemically synthesized
gatgtgcttattatgtgcac

SEQ ID NO: 34621 - DNA, 20 bp, Artificial Sequence
  chemically synthesized
cccactcctattattaaaac

SEQ ID NO: 34622 - DNA, 20 bp, Artificial Sequence
  chemically synthesized
gcatcaggacaactgggagt

SEQ ID NO: 34623 - DNA, 20 bp, Artificial Sequence
  chemically synthesized
gcatgagtcatcaatgaagc

SEQ ID NO: 34624 - DNA, 20 bp, Artificial Sequence
  chemically synthesized
ggactctgtagttatcagac

SEQ ID NO: 34625 - DNA, 20 bp, Artificial Sequence
  chemically synthesized
agtaaaagagctggaaaacc

SEQ ID NO: 34626 - DNA, 20 bp, Artificial Sequence
  chemically synthesized
ccatgagttcaggttcagga

SEQ ID NO: 34627 - DNA, 20 bp, Artificial Sequence
  chemically synthesized
gtctctggaatgaagaggaa

SEQ ID NO: 34628 - DNA, 20 bp, Artificial Sequence
  chemically synthesized
ggatcgaaggtagacaaaag

SEQ ID NO: 34629 - DNA, 20 bp, Artificial Sequence
  chemically synthesized
tagacaaaaggaaggatttc

SEQ ID NO: 34630 - DNA, 20 bp, Artificial Sequence
  chemically synthesized
accattctctgcaacagcac

SEQ ID NO: 34631 - DNA, 20 bp, Artificial Sequence
  chemically synthesized
aacagcacaggtgattgggt

SEQ ID NO: 34632 - DNA, 20 bp, Artificial Sequence
  chemically synthesized
aggtgattgggtggtggttt

SEQ ID NO: 34633 - DNA, 20 bp, Artificial Sequence
  chemically synthesized
ttgggtggtggttttgttgc

SEQ ID NO: 34634 - DNA, 20 bp, Artificial Sequence
  chemically synthesized
gctggccatggagaggccat

SEQ ID NO: 34635 - DNA, 20 bp, Artificial Sequence
  chemically synthesized
gatgctcaataagtattcac

SEQ ID NO: 34636 - DNA, 20 bp, Artificial Sequence
  chemically synthesized
aactatctatgctcaaagag

SEQ ID NO: 34637 - DNA, 20 bp, Artificial Sequence
  chemically synthesized
tcaaagagctgtgctttctt

SEQ ID NO: 34638 - DNA, 20 bp, Artificial Sequence
  chemically synthesized
attacttgaaggccagaggc

SEQ ID NO: 34639 - DNA, 20 bp, Artificial Sequence
  chemically synthesized
aaatttggaaggccacagag

SEQ ID NO: 34640 - DNA, 20 bp, Artificial Sequence
  chemically synthesized
ttggaaggccacagagggaa

SEQ ID NO: 34641 - DNA, 20 bp, Artificial Sequence
  chemically synthesized
agcaaaaccctgtctctaca

SEQ ID NO: 34642 - DNA, 20 bp, Artificial Sequence
  chemically synthesized
taaataaaataaaataattg

SEQ ID NO: 34643 - DNA, 20 bp, Artificial Sequence
  chemically synthesized
aaagaaaatataaaatttgg

SEQ ID NO: 34644 - DNA, 20 bp, Artificial Sequence
  chemically synthesized
acatcatagataaaggagtc

SEQ ID NO: 34645 - DNA, 20 bp, Artificial Sequence
  chemically synthesized
tacttagtactaacatttaa

SEQ ID NO: 34646 - DNA, 20 bp, Artificial Sequence
  chemically synthesized
ttttaaaatgtctgcgatag

SEQ ID NO: 34647 - DNA, 20 bp, Artificial Sequence
  chemically synthesized
atgtctgcgatagagcagat

SEQ ID NO: 34648 - DNA, 20 bp, Artificial Sequence
  chemically synthesized
agggcatcgcacatgtgaat

SEQ ID NO: 34649 - DNA, 20 bp, Artificial Sequence
  chemically synthesized
cccagcagagaacgttgaga

SEQ ID NO: 34650 - DNA, 20 bp, Artificial Sequence
  chemically synthesized
aggcattcctgggggccggg

SEQ ID NO: 34651 - DNA, 20 bp, Artificial Sequence
  chemically synthesized
ccaccagccgtatttcctgg

SEQ ID NO: 34652 - DNA, 20 bp, Artificial Sequence
  chemically synthesized
ttgagagaaaatggacagaa

SEQ ID NO: 34653 - DNA, 20 bp, Artificial Sequence
  chemically synthesized
tggtaggtactaccaaacca

SEQ ID NO: 34654 - DNA, 20 bp, Artificial Sequence
  chemically synthesized
tttaaggcattttgcggtct

SEQ ID NO: 34655 - DNA, 20 bp, Artificial Sequence
  chemically synthesized
aggcagctgaaagtcagtac

SEQ ID NO: 34656 - DNA, 20 bp, Artificial Sequence
  chemically synthesized
ctttttaatgatgtgaaagt

SEQ ID NO: 34657 - DNA, 20 bp, Artificial Sequence
  chemically synthesized
taaagattaaaaacatgttg

SEQ ID NO: 34658 - DNA, 20 bp, Artificial Sequence
  chemically synthesized
gaaatcgctcctgaaatctg

SEQ ID NO: 34659 - DNA, 20 bp, Artificial Sequence
  chemically synthesized
ggctggaaccactggaatct

SEQ ID NO: 34660 - DNA, 20 bp, Artificial Sequence
  chemically synthesized
gacacatgcagctgggagcc

SEQ ID NO: 34661 - DNA, 20 bp, Artificial Sequence
  chemically synthesized
gaattcacgtgggcatggga

SEQ ID NO: 34662 - DNA, 20 bp, Artificial Sequence
  chemically synthesized
aaactcagtgaagacaaaga

SEQ ID NO: 34663 - DNA, 20 bp, Artificial Sequence
  chemically synthesized
cataactcaggaattcatgg

SEQ ID NO: 34664 - DNA, 20 bp, Artificial Sequence
  chemically synthesized
ctctctagacttggagtgtt

SEQ ID NO: 34665 - DNA, 20 bp, Artificial Sequence
  chemically synthesized
atgtgtgtatgatatagtat

SEQ ID NO: 34666 - DNA, 20 bp, Artificial Sequence
  chemically synthesized
ataccttgcgtggcaaggta

SEQ ID NO: 34667 - DNA, 20 bp, Artificial Sequence
  chemically synthesized
cccttacaataaactcttct

SEQ ID NO: 34668 - DNA, 20 bp, Artificial Sequence
  chemically synthesized
acaataaactcttctgcagg

SEQ ID NO: 34669 - DNA, 20 bp, Artificial Sequence
  chemically synthesized
tgccaccaaattttttaaaa

SEQ ID NO: 34670 - DNA, 20 bp, Artificial Sequence
  chemically synthesized
catttgtgtacacattcgca

SEQ ID NO: 34671 - DNA, 20 bp, Artificial Sequence
  chemically synthesized
agaaggagaaattatcctca

SEQ ID NO: 34672 - DNA, 20 bp, Artificial Sequence
  chemically synthesized
aataagtggcctttgatgta

SEQ ID NO: 34673 - DNA, 20 bp, Artificial Sequence
  chemically synthesized
cttctccagtgggttcccac

SEQ ID NO: 34674 - DNA, 20 bp, Artificial Sequence
  chemically synthesized
gttcccaccggtgttttcgt

SEQ ID NO: 34675 - DNA, 20 bp, Artificial Sequence
  chemically synthesized
tgtgatgtggttaggccagt

SEQ ID NO: 34676 - DNA, 20 bp, Artificial Sequence
  chemically synthesized
tgcacgaagcccaccagtga

SEQ ID NO: 34677 - DNA, 20 bp, Artificial Sequence
  chemically synthesized
tcaagtcacacagcgacagt

SEQ ID NO: 34678 - DNA, 20 bp, Artificial Sequence
  chemically synthesized
cagtcctcccttaaagggaa

SEQ ID NO: 34679 - DNA, 20 bp, Artificial Sequence
  chemically synthesized
cagccacgtgagcacgtccc

SEQ ID NO: 34680 - DNA, 20 bp, Artificial Sequence
  chemically synthesized
tgtattttttaaacatagga

SEQ ID NO: 34681 - DNA, 20 bp, Artificial Sequence
  chemically synthesized
aatacttctttccatctggg

SEQ ID NO: 34682 - DNA, 20 bp, Artificial Sequence
  chemically synthesized
tcaagactgaagctgccaag

SEQ ID NO: 34683 - DNA, 20 bp, Artificial Sequence
  chemically synthesized
atatgtcagttatgttccaa

SEQ ID NO: 34684 - DNA, 20 bp, Artificial Sequence
  chemically synthesized
ttttagacaggataaggtca

SEQ ID NO: 34685 - DNA, 20 bp, Artificial Sequence
  chemically synthesized
actagtgctccagagagaca

SEQ ID NO: 34686 - DNA, 20 bp, Artificial Sequence
  chemically synthesized
gattgaaacaaaaattgcct

SEQ ID NO: 34687 - DNA, 20 bp, Artificial Sequence
  chemically synthesized
tctctgtagactctgtgggt

SEQ ID NO: 34688 - DNA, 20 bp, Artificial Sequence
  chemically synthesized
ataagtaagaagtaactgtg

SEQ ID NO: 34689 - DNA, 20 bp, Artificial Sequence
  chemically synthesized
catggcagaaccgtaaagaa

SEQ ID NO: 34690 - DNA, 20 bp, Artificial Sequence
  chemically synthesized
cacaaaggacagcctgccat

SEQ ID NO: 34691 - DNA, 20 bp, Artificial Sequence
  chemically synthesized
gacagcctgccatccaggat

SEQ ID NO: 34692 - DNA, 20 bp, Artificial Sequence
  chemically synthesized
agataaatagtatggagata

SEQ ID NO: 34693 - DNA, 20 bp, Artificial Sequence
  chemically synthesized
tatggagataatttgcttaa

SEQ ID NO: 34694 - DNA, 20 bp, Artificial Sequence
  chemically synthesized
taagtcagattttgatgaaa

SEQ ID NO: 34695 - DNA, 20 bp, Artificial Sequence
  chemically synthesized
tgaaaagtggtttctacatg

SEQ ID NO: 34696 - DNA, 20 bp, Artificial Sequence
  chemically synthesized
atagctttcaaaaacttcta

SEQ ID NO: 34697 - DNA, 20 bp, Artificial Sequence
  chemically synthesized
gtatatagatgcatatgtat

SEQ ID NO: 34698 - DNA, 20 bp, Artificial Sequence
  chemically synthesized
atcttatgatgacagtgttg

SEQ ID NO: 34699 - DNA, 20 bp, Artificial Sequence
  chemically synthesized
gatgacagtgttgatgtgtt

SEQ ID NO: 34700 - DNA, 20 bp, Artificial Sequence
  chemically synthesized
ccaaacgttcaagaattgac

SEQ ID NO: 34701 - DNA, 20 bp, Artificial Sequence
  chemically synthesized
ataatttatttaagccaaat

SEQ ID NO: 34702 - DNA, 20 bp, Artificial Sequence
  chemically synthesized
aaatacctctccattatcag

SEQ ID NO: 34703 - DNA, 20 bp, Artificial Sequence
  chemically synthesized
ctccattatcaggggtgctt

SEQ ID NO: 34704 - DNA, 20 bp, Artificial Sequence
  chemically synthesized
tgagccaagactgtcctagc

SEQ ID NO: 34705 - DNA, 20 bp, Artificial Sequence
  chemically synthesized
tatctctggcatgaatgtta

SEQ ID NO: 34706 - DNA, 20 bp, Artificial Sequence
  chemically synthesized
tgccattcattcggcctgtt

SEQ ID NO: 34707 - DNA, 20 bp, Artificial Sequence
  chemically synthesized
ttagggctaaactttatgtt

SEQ ID NO: 34708 - DNA, 20 bp, Artificial Sequence
  chemically synthesized
ctaaactttatgttccttgt

SEQ ID NO: 34709 - DNA, 20 bp, Artificial Sequence
  chemically synthesized
tttatgttccttgtttttgt

SEQ ID NO: 34710 - DNA, 20 bp, Artificial Sequence
  chemically synthesized
ttttgtttttttttcttttt

SEQ ID NO: 34711 - DNA, 20 bp, Artificial Sequence
  chemically synthesized
tttttcttttttcttgtttt

SEQ ID NO: 34712 - DNA, 20 bp, Artificial Sequence
  chemically synthesized
gagcatgcaaaatcagaaac

SEQ ID NO: 34713 - DNA, 20 bp, Artificial Sequence
  chemically synthesized
acaaggaacacatatttcac

SEQ ID NO: 34714 - DNA, 20 bp, Artificial Sequence
  chemically synthesized
gagcacatgggataataaaa

SEQ ID NO: 34715 - DNA, 20 bp, Artificial Sequence
  chemically synthesized
actttgaatgccctttttca

SEQ ID NO: 34716 - DNA, 20 bp, Artificial Sequence
  chemically synthesized
ctaaaagccaatggtaaaca

SEQ ID NO: 34717 - DNA, 20 bp, Artificial Sequence
  chemically synthesized
ggtaaacaccaagtttaaaa

SEQ ID NO: 34718 - DNA, 20 bp, Artificial Sequence
  chemically synthesized
cgcatgtcccagaacaggcc

SEQ ID NO: 34719 - DNA, 20 bp, Artificial Sequence
  chemically synthesized
ggctatgtccatacagagaa

SEQ ID NO: 34720 - DNA, 20 bp, Artificial Sequence
  chemically synthesized
taattgaatttaaaatacct

SEQ ID NO: 34721 - DNA, 20 bp, Artificial Sequence
  chemically synthesized
aaaatacacattacattctt

SEQ ID NO: 34722 - DNA, 20 bp, Artificial Sequence
  chemically synthesized
ctttggagtttttcaaaaaa

SEQ ID NO: 34723 - DNA, 20 bp, Artificial Sequence
  chemically synthesized
tccattatactgcacttcaa

SEQ ID NO: 34724 - DNA, 20 bp, Artificial Sequence
  chemically synthesized
cagcaatttgaaagatgcct

SEQ ID NO: 34725 - DNA, 20 bp, Artificial Sequence
  chemically synthesized
atccaagccttaatctccac

SEQ ID NO: 34726 - DNA, 20 bp, Artificial Sequence
  chemically synthesized
caggtgagccccattcagca

SEQ ID NO: 34727 - DNA, 20 bp, Artificial Sequence
  chemically synthesized
aagggtcagaacccaggtgt

SEQ ID NO: 34728 - DNA, 20 bp, Artificial Sequence
  chemically synthesized
tctctgttaacactaaaagt

SEQ ID NO: 34729 - DNA, 20 bp, Artificial Sequence
  chemically synthesized
accagtcttggtaatttctc

SEQ ID NO: 34730 - DNA, 20 bp, Artificial Sequence
  chemically synthesized
atgttatcttcttccttcat

SEQ ID NO: 34731 - DNA, 20 bp, Artificial Sequence
  chemically synthesized
attcgtgtttggtaatcaaa

SEQ ID NO: 34732 - DNA, 20 bp, Artificial Sequence
  chemically synthesized
gcagggctgggaaaaaagaa

SEQ ID NO: 34733 - DNA, 20 bp, Artificial Sequence
  chemically synthesized
gtggtttttttctaaccaca

SEQ ID NO: 34734 - DNA, 20 bp, Artificial Sequence
  chemically synthesized
acagtaggttttttctataa

SEQ ID NO: 34735 - DNA, 20 bp, Artificial Sequence
  chemically synthesized
ctttctagatataaaacagg

SEQ ID NO: 34736 - DNA, 20 bp, Artificial Sequence
  chemically synthesized
caccctgaacttctgcaaaa

SEQ ID NO: 34737 - DNA, 20 bp, Artificial Sequence
  chemically synthesized
atttgatcaaattcagaaac

SEQ ID NO: 34738 - DNA, 20 bp, Artificial Sequence
  chemically synthesized
tattttgctctttcttcccc

SEQ ID NO: 34739 - DNA, 20 bp, Artificial Sequence
  chemically synthesized
tcttccccaaaagattttta

SEQ ID NO: 34740 - DNA, 20 bp, Artificial Sequence
  chemically synthesized
ttaaatagttttcatcttta

SEQ ID NO: 34741 - DNA, 20 bp, Artificial Sequence
  chemically synthesized
atctttaaaaggatttcaac

SEQ ID NO: 34742 - DNA, 20 bp, Artificial Sequence
  chemically synthesized
aataagacaaacaaagcagc

SEQ ID NO: 34743 - DNA, 20 bp, Artificial Sequence
  chemically synthesized
gggaagtgtacattaattac

SEQ ID NO: 34744 - DNA, 20 bp, Artificial Sequence
  chemically synthesized
ttgcatcagggacaaatgag

SEQ ID NO: 34745 - DNA, 20 bp, Artificial Sequence
  chemically synthesized
tgattttaatctgcagcgca

SEQ ID NO: 34746 - DNA, 20 bp, Artificial Sequence
  chemically synthesized
gcccaaagatagtgtaattt

SEQ ID NO: 34747 - DNA, 20 bp, Artificial Sequence
  chemically synthesized
tgatggtttataggcctcct

SEQ ID NO: 34748 - DNA, 20 bp, Artificial Sequence
  chemically synthesized
taaagaagaagatgcaatga

SEQ ID NO: 34749 - DNA, 20 bp, Artificial Sequence
  chemically synthesized
aaagggctgacctataatgc

SEQ ID NO: 34750 - DNA, 20 bp, Artificial Sequence
  chemically synthesized
aaattatcactagtcaacag

SEQ ID NO: 34751 - DNA, 20 bp, Artificial Sequence
  chemically synthesized
ccctctgaggtctccccggt

SEQ ID NO: 34752 - DNA, 20 bp, Artificial Sequence
  chemically synthesized
tctcaccattcgatatttat

SEQ ID NO: 34753 - DNA, 20 bp, Artificial Sequence
  chemically synthesized
tgcctcttgggacatcaaat

SEQ ID NO: 34754 - DNA, 20 bp, Artificial Sequence
  chemically synthesized
aggccatcatcagagatgtg

SEQ ID NO: 34755 - DNA, 20 bp, Artificial Sequence
  chemically synthesized
cagagatgtggcctgatttt

SEQ ID NO: 34756 - DNA, 20 bp, Artificial Sequence
  chemically synthesized
catgatacgccttttatcat

SEQ ID NO: 34757 - DNA, 20 bp, Artificial Sequence
  chemically synthesized
gagacccagcaaataaaact

SEQ ID NO: 34758 - DNA, 20 bp, Artificial Sequence
  chemically synthesized
caagagaaggggtgaggggg

SEQ ID NO: 34759 - DNA, 20 bp, Artificial Sequence
  chemically synthesized
gacagagtgcgaagtaaaag

SEQ ID NO: 34760 - DNA, 20 bp, Artificial Sequence
  chemically synthesized
gctttggagctcttgaccca

SEQ ID NO: 34761 - DNA, 20 bp, Artificial Sequence
  chemically synthesized
acggggcctccgcatgaagt

SEQ ID NO: 34762 - DNA, 20 bp, Artificial Sequence
  chemically synthesized
gtaggcgcttctcaactacc

SEQ ID NO: 34763 - DNA, 20 bp, Artificial Sequence
  chemically synthesized
aatacaggaaaacagtaaca

SEQ ID NO: 34764 - DNA, 20 bp, Artificial Sequence
  chemically synthesized
catctgcaacgaacctcagg

SEQ ID NO: 34765 - DNA, 20 bp, Artificial Sequence
  chemically synthesized
gatcatatggagctgttgac

SEQ ID NO: 34766 - DNA, 20 bp, Artificial Sequence
  chemically synthesized
gtttccattcaaaacttccc

SEQ ID NO: 34767 - DNA, 20 bp, Artificial Sequence
  chemically synthesized
agaaatgaaaacctcctcga

SEQ ID NO: 34768 - DNA, 20 bp, Artificial Sequence
  chemically synthesized
gtctctccctccctgtataa

SEQ ID NO: 34769 - DNA, 20 bp, Artificial Sequence
  chemically synthesized
cctcaccacttcttaaaagt

SEQ ID NO: 34770 - DNA, 20 bp, Artificial Sequence
  chemically synthesized
ccacttcttaaaagtccgag

SEQ ID NO: 34771 - DNA, 20 bp, Artificial Sequence
  chemically synthesized
caaacagtaaaacctcctcc

SEQ ID NO: 34772 - DNA, 20 bp, Artificial Sequence
  chemically synthesized
ctctgtttctcaggaccctc

SEQ ID NO: 34773 - DNA, 20 bp, Artificial Sequence
  chemically synthesized
gggaaatgactacttgcaaa

SEQ ID NO: 34774 - DNA, 20 bp, Artificial Sequence
  chemically synthesized
ggaacattcttctctttccc

SEQ ID NO: 34775 - DNA, 20 bp, Artificial Sequence
  chemically synthesized
gagggacaactgtccagcac

SEQ ID NO: 34776 - DNA, 20 bp, Artificial Sequence
  chemically synthesized
gagggtggcggccgcaggcc

SEQ ID NO: 34777 - DNA, 20 bp, Artificial Sequence
  chemically synthesized
ctaccaaatgaggctaatgg

SEQ ID NO: 34778 - DNA, 20 bp, Artificial Sequence
  chemically synthesized
gcccccggagcgagtaatgt

SEQ ID NO: 34779 - DNA, 20 bp, Artificial Sequence
  chemically synthesized
ctccatttcacagagaggtg

SEQ ID NO: 34780 - DNA, 20 bp, Artificial Sequence
  chemically synthesized
gagtcataaccgtaatagta

SEQ ID NO: 34781 - DNA, 20 bp, Artificial Sequence
  chemically synthesized
aatagtaatgagcttttgtg

SEQ ID NO: 34782 - DNA, 20 bp, Artificial Sequence
  chemically synthesized
aaggccctatgaggcaagcc

SEQ ID NO: 34783 - DNA, 20 bp, Artificial Sequence
  chemically synthesized
ccccgtgattctccccactt

SEQ ID NO: 34784 - DNA, 20 bp, Artificial Sequence
  chemically synthesized
actttacagattgaggaagc

SEQ ID NO: 34785 - DNA, 20 bp, Artificial Sequence
  chemically synthesized
tgggagagaagactgcctct

SEQ ID NO: 34786 - DNA, 20 bp, Artificial Sequence
  chemically synthesized
cccagaggcccccaaatttt

SEQ ID NO: 34787 - DNA, 20 bp, Artificial Sequence
  chemically synthesized
ggcctagccaggggaagtaa

SEQ ID NO: 34788 - DNA, 20 bp, Artificial Sequence
  chemically synthesized
aaagccctggtgtcccctag

SEQ ID NO: 34789 - DNA, 20 bp, Artificial Sequence
  chemically synthesized
cctaggtgggattctatgaa

SEQ ID NO: 34790 - DNA, 20 bp, Artificial Sequence
  chemically synthesized
gaagttattgggatgatgac

SEQ ID NO: 34791 - DNA, 20 bp, Artificial Sequence
  chemically synthesized
aacaaaacaagcccaaacac

SEQ ID NO: 34792 - DNA, 20 bp, Artificial Sequence
  chemically synthesized
tattatcgttctcagccacc

SEQ ID NO: 34793 - DNA, 20 bp, Artificial Sequence
  chemically synthesized
atttaaaaaaaaaaaaaaaa

SEQ ID NO: 34794 - DNA, 20 bp, Artificial Sequence
  chemically synthesized
aaaaaaaaaaaaagagtttc

SEQ ID NO: 34795 - DNA, 20 bp, Artificial Sequence
  chemically synthesized
aaggaaaaaaaaaacactga

SEQ ID NO: 34796 - DNA, 20 bp, Artificial Sequence
  chemically synthesized
tcgagctcctaaaaactaga

SEQ ID NO: 34797 - DNA, 20 bp, Artificial Sequence
  chemically synthesized
aaactagacatcgattatgt

SEQ ID NO: 34798 - DNA, 20 bp, Artificial Sequence
  chemically synthesized
ctttctattcaagataaaca

SEQ ID NO: 34799 - DNA, 20 bp, Artificial Sequence
  chemically synthesized
ggagcagatggacttgacca

SEQ ID NO: 34800 - DNA, 20 bp, Artificial Sequence
  chemically synthesized
cctggctaccctactccggt

SEQ ID NO: 34801 - DNA, 20 bp, Artificial Sequence
  chemically synthesized
gttctgcaagaatattttaa

SEQ ID NO: 34802 - DNA, 20 bp, Artificial Sequence
  chemically synthesized
gcaagaatattttaagtgag

SEQ ID NO: 34803 - DNA, 20 bp, Artificial Sequence
  chemically synthesized
aataatattaatgaaacaaa

SEQ ID NO: 34804 - DNA, 20 bp, Artificial Sequence
  chemically synthesized
atagattcataagccttggc

SEQ ID NO: 34805 - DNA, 20 bp, Artificial Sequence
  chemically synthesized
cactaccattaaactcaaga

SEQ ID NO: 34806 - DNA, 20 bp, Artificial Sequence
  chemically synthesized
tggtcgggaagttacccaca

SEQ ID NO: 34807 - DNA, 20 bp, Artificial Sequence
  chemically synthesized
tatctcactggtggtctatt

SEQ ID NO: 34808 - DNA, 20 bp, Artificial Sequence
  chemically synthesized
ctggtggtctattaatagtt

SEQ ID NO: 34809 - DNA, 20 bp, Artificial Sequence
  chemically synthesized
tttgagcgtcagaaggtggt

SEQ ID NO: 34810 - DNA, 20 bp, Artificial Sequence
  chemically synthesized
tcagaaggtggttgttgctt

SEQ ID NO: 34811 - DNA, 20 bp, Artificial Sequence
  chemically synthesized
tggttgttgctttttggttt

SEQ ID NO: 34812 - DNA, 20 bp, Artificial Sequence
  chemically synthesized
tttaaaactattctgtcatt

SEQ ID NO: 34813 - DNA, 20 bp, Artificial Sequence
  chemically synthesized
tgtcatttccagttttttaa

SEQ ID NO: 34814 - DNA, 20 bp, Artificial Sequence
  chemically synthesized
tttccagttttttaaaaagg

SEQ ID NO: 34815 - DNA, 20 bp, Artificial Sequence
  chemically synthesized
agttttttaaaaaggttttg

SEQ ID NO: 34816 - DNA, 20 bp, Artificial Sequence
  chemically synthesized
tttaaaaaggttttgttttg

SEQ ID NO: 34817 - DNA, 20 bp, Artificial Sequence
  chemically synthesized
aaaggttttgttttgttttg

SEQ ID NO: 34818 - DNA, 20 bp, Artificial Sequence
  chemically synthesized
ttgttttgttttgctttgtt

SEQ ID NO: 34819 - DNA, 20 bp, Artificial Sequence
  chemically synthesized
ttttgctttgttttttgttt

SEQ ID NO: 34820 - DNA, 20 bp, Artificial Sequence
  chemically synthesized
ttttttggtggtggtggcgt

SEQ ID NO: 34821 - DNA, 20 bp, Artificial Sequence
  chemically synthesized
cgttaatgtttcttcagaaa

SEQ ID NO: 34822 - DNA, 20 bp, Artificial Sequence
  chemically synthesized
cttctgggccactctgggta

SEQ ID NO: 34823 - DNA, 20 bp, Artificial Sequence
  chemically synthesized
ggccactctgggtattatga

SEQ ID NO: 34824 - DNA, 20 bp, Artificial Sequence
  chemically synthesized
cttacaatagttactctctg

SEQ ID NO: 34825 - DNA, 20 bp, Artificial Sequence
  chemically synthesized
tagttactctctgcctggtt

SEQ ID NO: 34826 - DNA, 20 bp, Artificial Sequence
  chemically synthesized
gaaaattccttggcataagg

SEQ ID NO: 34827 - DNA, 20 bp, Artificial Sequence
  chemically synthesized
tattatgactttacttgaaa

SEQ ID NO: 34828 - DNA, 20 bp, Artificial Sequence
  chemically synthesized
aaaacagtttgccacagtga

SEQ ID NO: 34829 - DNA, 20 bp, Artificial Sequence
  chemically synthesized
acagtgagatggattcactt

SEQ ID NO: 34830 - DNA, 20 bp, Artificial Sequence
  chemically synthesized
aacagtacaatttttttaaa

SEQ ID NO: 34831 - DNA, 20 bp, Artificial Sequence
  chemically synthesized
aaggtagatttaaagcatta

SEQ ID NO: 34832 - DNA, 20 bp, Artificial Sequence
  chemically synthesized
agatttaaagcattaactgg

SEQ ID NO: 34833 - DNA, 20 bp, Artificial Sequence
  chemically synthesized
ttaactggtttggattaaaa

SEQ ID NO: 34834 - DNA, 20 bp, Artificial Sequence
  chemically synthesized
caaaagacttatgcaaagcc

SEQ ID NO: 34835 - DNA, 20 bp, Artificial Sequence
  chemically synthesized
acatgattttgaaggagcta

SEQ ID NO: 34836 - DNA, 20 bp, Artificial Sequence
  chemically synthesized
atttgtgtacttgacattta

SEQ ID NO: 34837 - DNA, 20 bp, Artificial Sequence
  chemically synthesized
taacaatctaccctgggtac

SEQ ID NO: 34838 - DNA, 20 bp, Artificial Sequence
  chemically synthesized
aatttgtactccatataagc

SEQ ID NO: 34839 - DNA, 20 bp, Artificial Sequence
  chemically synthesized
cagtcacttttgacttacca

SEQ ID NO: 34840 - DNA, 20 bp, Artificial Sequence
  chemically synthesized
aaagcacagctcctccatgc

SEQ ID NO: 34841 - DNA, 20 bp, Artificial Sequence
  chemically synthesized
tctaatactgtaatctttct

SEQ ID NO: 34842 - DNA, 20 bp, Artificial Sequence
  chemically synthesized
tgctgcttctagggctgtgt

SEQ ID NO: 34843 - DNA, 20 bp, Artificial Sequence
  chemically synthesized
ctcctggatagactgaataa

SEQ ID NO: 34844 - DNA, 20 bp, Artificial Sequence
  chemically synthesized
aataaggcttgtgatgacta

SEQ ID NO: 34845 - DNA, 20 bp, Artificial Sequence
  chemically synthesized
ttgttaggatccctttcttg

SEQ ID NO: 34846 - DNA, 20 bp, Artificial Sequence
  chemically synthesized
ggtgatgcaagatagaagga

SEQ ID NO: 34847 - DNA, 20 bp, Artificial Sequence
  chemically synthesized
agaaggagagagatttatac

SEQ ID NO: 34848 - DNA, 20 bp, Artificial Sequence
  chemically synthesized
aagcagcatgcataagttag

SEQ ID NO: 34849 - DNA, 20 bp, Artificial Sequence
  chemically synthesized
agcatgcataagttagtgtt

SEQ ID NO: 34850 - DNA, 20 bp, Artificial Sequence
  chemically synthesized
gcataagttagtgttgcttg

SEQ ID NO: 34851 - DNA, 20 bp, Artificial Sequence
  chemically synthesized
actcagccccacataaagta

SEQ ID NO: 34852 - DNA, 20 bp, Artificial Sequence
  chemically synthesized
tttcaaatagcaaattatcc

SEQ ID NO: 34853 - DNA, 20 bp, Artificial Sequence
  chemically synthesized
taatttatttgtgttctgga

SEQ ID NO: 34854 - DNA, 20 bp, Artificial Sequence
  chemically synthesized
attaacaactttaaactgaa

SEQ ID NO: 34855 - DNA, 20 bp, Artificial Sequence
  chemically synthesized
ctcggaggttaaaattatag

SEQ ID NO: 34856 - DNA, 20 bp, Artificial Sequence
  chemically synthesized
tttattttctttcattaaac

SEQ ID NO: 34857 - DNA, 20 bp, Artificial Sequence
  chemically synthesized
tcagaatatcagttacactg

SEQ ID NO: 34858 - DNA, 20 bp, Artificial Sequence
  chemically synthesized
tatcagttacactgttctga

SEQ ID NO: 34859 - DNA, 20 bp, Artificial Sequence
  chemically synthesized
tcggaaaccgttagttagca

SEQ ID NO: 34860 - DNA, 20 bp, Artificial Sequence
  chemically synthesized
gaaacctaaagcattgttag

SEQ ID NO: 34861 - DNA, 20 bp, Artificial Sequence
  chemically synthesized
tcttaatacactataatagc

SEQ ID NO: 34862 - DNA, 20 bp, Artificial Sequence
  chemically synthesized
acagtcttctccccaaatga

SEQ ID NO: 34863 - DNA, 20 bp, Artificial Sequence
  chemically synthesized
aatacacaaaacatgatcaa

SEQ ID NO: 34864 - DNA, 20 bp, Artificial Sequence
  chemically synthesized
catgatcaaaagtgattaac

SEQ ID NO: 34865 - DNA, 20 bp, Artificial Sequence
  chemically synthesized
ttaatcttgagaagaaaaaa

SEQ ID NO: 34866 - DNA, 20 bp, Artificial Sequence
  chemically synthesized
ttttttacatcatcaatttt

SEQ ID NO: 34867 - DNA, 20 bp, Artificial Sequence
  chemically synthesized
tcataaagcaatttagcctt

SEQ ID NO: 34868 - DNA, 20 bp, Artificial Sequence
  chemically synthesized
ttagcctttgaagattaaag

SEQ ID NO: 34869 - DNA, 20 bp, Artificial Sequence
  chemically synthesized
aagaagtgcttaaaattcaa

SEQ ID NO: 34870 - DNA, 20 bp, Artificial Sequence
  chemically synthesized
tgagctttagcaaattatca

SEQ ID NO: 34871 - DNA, 20 bp, Artificial Sequence
  chemically synthesized
taagattcatccaaaaagca

SEQ ID NO: 34872 - DNA, 20 bp, Artificial Sequence
  chemically synthesized
aaagcaaagggtttttcttc

SEQ ID NO: 34873 - DNA, 20 bp, Artificial Sequence
  chemically synthesized
aaattgtaatatcttccaga

SEQ ID NO: 34874 - DNA, 20 bp, Artificial Sequence
  chemically synthesized
gactgagcttaaactaaaca

SEQ ID NO: 34875 - DNA, 20 bp, Artificial Sequence
  chemically synthesized
actgcatagtcctccaacag

SEQ ID NO: 34876 - DNA, 20 bp, Artificial Sequence
  chemically synthesized
aacatccactgtggtataaa

SEQ ID NO: 34877 - DNA, 20 bp, Artificial Sequence
  chemically synthesized
ggtataaaaacagctttttc

SEQ ID NO: 34878 - DNA, 20 bp, Artificial Sequence
  chemically synthesized
cttggagtggcattaatttt

SEQ ID NO: 34879 - DNA, 20 bp, Artificial Sequence
  chemically synthesized
gtggcattaattttagaagt

SEQ ID NO: 34880 - DNA, 20 bp, Artificial Sequence
  chemically synthesized
caggagggagaggagcaagg

SEQ ID NO: 34881 - DNA, 20 bp, Artificial Sequence
  chemically synthesized
cttctgaggagtgcaaatcc

SEQ ID NO: 34882 - DNA, 20 bp, Artificial Sequence
  chemically synthesized
aggagtgcaaatcctgttgc

SEQ ID NO: 34883 - DNA, 20 bp, Artificial Sequence
  chemically synthesized
ctgttgcttgagatttgcct

SEQ ID NO: 34884 - DNA, 20 bp, Artificial Sequence
  chemically synthesized
attagagagtatcgtgggaa

SEQ ID NO: 34885 - DNA, 20 bp, Artificial Sequence
  chemically synthesized
tatcgtgggaacctggattt

SEQ ID NO: 34886 - DNA, 20 bp, Artificial Sequence
  chemically synthesized
tactagtctggagaagaatc

SEQ ID NO: 34887 - DNA, 20 bp, Artificial Sequence
  chemically synthesized
gtgcaagtcagactgagaat

SEQ ID NO: 34888 - DNA, 20 bp, Artificial Sequence
  chemically synthesized
agcttcgaaaggccacgtgt

SEQ ID NO: 34889 - DNA, 20 bp, Artificial Sequence
  chemically synthesized
gacccaaaagctctctgctg

SEQ ID NO: 34890 - DNA, 20 bp, Artificial Sequence
  chemically synthesized
gaaaaatctcaggtactacc

SEQ ID NO: 34891 - DNA, 20 bp, Artificial Sequence
  chemically synthesized
aggtccacagtcctgaccaa

SEQ ID NO: 34892 - DNA, 20 bp, Artificial Sequence
  chemically synthesized
atgtgacagggcaaatcaga

SEQ ID NO: 34893 - DNA, 20 bp, Artificial Sequence
  chemically synthesized
atcagaattagattaaaaac

SEQ ID NO: 34894 - DNA, 20 bp, Artificial Sequence
  chemically synthesized
aatttcccctaactgccttc

SEQ ID NO: 34895 - DNA, 20 bp, Artificial Sequence
  chemically synthesized
tcaagtgattttccctatta

SEQ ID NO: 34896 - DNA, 20 bp, Artificial Sequence
  chemically synthesized
gcaatccacttgtatgtaga

SEQ ID NO: 34897 - DNA, 20 bp, Artificial Sequence
  chemically synthesized
catagtctttgaagctgctc

SEQ ID NO: 34898 - DNA, 20 bp, Artificial Sequence
  chemically synthesized
gttttagttaaaaggacagc

SEQ ID NO: 34899 - DNA, 20 bp, Artificial Sequence
  chemically synthesized
atcagaattaaatttttcct

SEQ ID NO: 34900 - DNA, 20 bp, Artificial Sequence
  chemically synthesized
aaaaacataacatgagaagg

SEQ ID NO: 34901 - DNA, 20 bp, Artificial Sequence
  chemically synthesized
tcattcttcagtagccaatg

SEQ ID NO: 34902 - DNA, 20 bp, Artificial Sequence
  chemically synthesized
ggtgtgatggagagaaactc

SEQ ID NO: 34903 - DNA, 20 bp, Artificial Sequence
  chemically synthesized
tggagagaaactcacgagat

SEQ ID NO: 34904 - DNA, 20 bp, Artificial Sequence
  chemically synthesized
agatttaacattggttaatg

SEQ ID NO: 34905 - DNA, 20 bp, Artificial Sequence
  chemically synthesized
agttggtgaaggagaatact

SEQ ID NO: 34906 - DNA, 20 bp, Artificial Sequence
  chemically synthesized
aatacttcaggtttggttct

SEQ ID NO: 34907 - DNA, 20 bp, Artificial Sequence
  chemically synthesized
gtttggttctcttagttttt

SEQ ID NO: 34908 - DNA, 20 bp, Artificial Sequence
  chemically synthesized
ggttctcttagttttttgag

SEQ ID NO: 34909 - DNA, 20 bp, Artificial Sequence
  chemically synthesized
cttagttttttgaggtttgt

SEQ ID NO: 34910 - DNA, 20 bp, Artificial Sequence
  chemically synthesized
tgtttttgtttgaggaggtg

SEQ ID NO: 34911 - DNA, 20 bp, Artificial Sequence
  chemically synthesized
acaggaacagacttggcaca

SEQ ID NO: 34912 - DNA, 20 bp, Artificial Sequence
  chemically synthesized
atttccctaaaaattaacag

SEQ ID NO: 34913 - DNA, 20 bp, Artificial Sequence
  chemically synthesized
gaatataaatttaaatgccc

SEQ ID NO: 34914 - DNA, 20 bp, Artificial Sequence
  chemically synthesized
aaatgccctgatgcttagca

SEQ ID NO: 34915 - DNA, 20 bp, Artificial Sequence
  chemically synthesized
atgcttagcaaaaagcttcc

SEQ ID NO: 34916 - DNA, 20 bp, Artificial Sequence
  chemically synthesized
cgaggtaggtatacaacagc

SEQ ID NO: 34917 - DNA, 20 bp, Artificial Sequence
  chemically synthesized
ttctttttgaaggcaccctt

SEQ ID NO: 34918 - DNA, 20 bp, Artificial Sequence
  chemically synthesized
attccattctttattttaat

SEQ ID NO: 34919 - DNA, 20 bp, Artificial Sequence
  chemically synthesized
tttaatgggagtttttaatc

SEQ ID NO: 34920 - DNA, 20 bp, Artificial Sequence
  chemically synthesized
actgggaattctctggcaga

SEQ ID NO: 34921 - DNA, 20 bp, Artificial Sequence
  chemically synthesized
gccttctcgcctcttttaca

SEQ ID NO: 34922 - DNA, 20 bp, Artificial Sequence
  chemically synthesized
acctttaggtatatataatt

SEQ ID NO: 34923 - DNA, 20 bp, Artificial Sequence
  chemically synthesized
cttctaattcgccagttctt

SEQ ID NO: 34924 - DNA, 20 bp, Artificial Sequence
  chemically synthesized
tcttagcagcttatttttcc

SEQ ID NO: 34925 - DNA, 20 bp, Artificial Sequence
  chemically synthesized
gcagcttatttttccaagtg

SEQ ID NO: 34926 - DNA, 20 bp, Artificial Sequence
  chemically synthesized
ggaaacgtgtatttttcttt

SEQ ID NO: 34927 - DNA, 20 bp, Artificial Sequence
  chemically synthesized
acgttttgtggatctaccac

SEQ ID NO: 34928 - DNA, 20 bp, Artificial Sequence
  chemically synthesized
ccacaactgcttctgacagc

SEQ ID NO: 34929 - DNA, 20 bp, Artificial Sequence
  chemically synthesized
ttaatggaattccagttgaa

SEQ ID NO: 34930 - DNA, 20 bp, Artificial Sequence
  chemically synthesized
cagaagtcctttagatcagt

SEQ ID NO: 34931 - DNA, 20 bp, Artificial Sequence
  chemically synthesized
actccaagagaagaaaagga

SEQ ID NO: 34932 - DNA, 20 bp, Artificial Sequence
  chemically synthesized
tgtctttcacactgggctat

SEQ ID NO: 34933 - DNA, 20 bp, Artificial Sequence
  chemically synthesized
ttccccagactagctgcata

SEQ ID NO: 34934 - DNA, 20 bp, Artificial Sequence
  chemically synthesized
tgcatattaagcttgctgtg

SEQ ID NO: 34935 - DNA, 20 bp, Artificial Sequence
  chemically synthesized
aacagcaaaagcctttgctg

SEQ ID NO: 34936 - DNA, 20 bp, Artificial Sequence
  chemically synthesized
tggaataagttacattttaa

SEQ ID NO: 34937 - DNA, 20 bp, Artificial Sequence
  chemically synthesized
aactgattagaaatacagtc

SEQ ID NO: 34938 - DNA, 20 bp, Artificial Sequence
  chemically synthesized
agaaatacagtctgatgttt

SEQ ID NO: 34939 - DNA, 20 bp, Artificial Sequence
  chemically synthesized
tgatgtttactggcttcaaa

SEQ ID NO: 34940 - DNA, 20 bp, Artificial Sequence
  chemically synthesized
ttgagtttggcatcaagtat

SEQ ID NO: 34941 - DNA, 20 bp, Artificial Sequence
  chemically synthesized
caggttacatttcctggaaa

SEQ ID NO: 34942 - DNA, 20 bp, Artificial Sequence
  chemically synthesized
ccctggtcgtaaaggggaga

SEQ ID NO: 34943 - DNA, 20 bp, Artificial Sequence
  chemically synthesized
aattgatacataacataaaa

SEQ ID NO: 34944 - DNA, 20 bp, Artificial Sequence
  chemically synthesized
gatacataacataaaaacct

SEQ ID NO: 34945 - DNA, 20 bp, Artificial Sequence
  chemically synthesized
aacaagcagaaaggtactaa

SEQ ID NO: 34946 - DNA, 20 bp, Artificial Sequence
  chemically synthesized
agaaaggtactaaagatgct

SEQ ID NO: 34947 - DNA, 20 bp, Artificial Sequence
  chemically synthesized
tggcaaggtgccaggctggg

SEQ ID NO: 34948 - DNA, 20 bp, Artificial Sequence
  chemically synthesized
gctgggtccagcttgatgct

SEQ ID NO: 34949 - DNA, 20 bp, Artificial Sequence
  chemically synthesized
tactgtatgtaaaaacagac

SEQ ID NO: 34950 - DNA, 20 bp, Artificial Sequence
  chemically synthesized
ggtgtgaacagaccaaccaa

SEQ ID NO: 34951 - DNA, 20 bp, Artificial Sequence
  chemically synthesized
atcttggtgcatctccctag

SEQ ID NO: 34952 - DNA, 20 bp, Artificial Sequence
  chemically synthesized
ccccccaaaggaaagccaaa

SEQ ID NO: 34953 - DNA, 20 bp, Artificial Sequence
  chemically synthesized
agaaatcacaaaaatctaaa

SEQ ID NO: 34954 - DNA, 20 bp, Artificial Sequence
  chemically synthesized
aaaatctaaaaaatgtttcc

SEQ ID NO: 34955 - DNA, 20 bp, Artificial Sequence
  chemically synthesized
aaaatgtttccctaggattt

SEQ ID NO: 34956 - DNA, 20 bp, Artificial Sequence
  chemically synthesized
tggaagctgcagtgtgaaat

SEQ ID NO: 34957 - DNA, 20 bp, Artificial Sequence
  chemically synthesized
tgcctgtcctgaccctgcct

SEQ ID NO: 34958 - DNA, 20 bp, Artificial Sequence
  chemically synthesized
ttgcaacacaacaaggaatg

SEQ ID NO: 34959 - DNA, 20 bp, Artificial Sequence
  chemically synthesized
gtgatttaagaaattacagc

SEQ ID NO: 34960 - DNA, 20 bp, Artificial Sequence
  chemically synthesized
tgtgtgtgtgtgtgtggtta

SEQ ID NO: 34961 - DNA, 20 bp, Artificial Sequence
  chemically synthesized
tgtgtgtggttattttgttt

SEQ ID NO: 34962 - DNA, 20 bp, Artificial Sequence
  chemically synthesized
tattttgtttttttgttttt

SEQ ID NO: 34963 - DNA, 20 bp, Artificial Sequence
  chemically synthesized
ttcttgaagtgaatacatat

SEQ ID NO: 34964 - DNA, 20 bp, Artificial Sequence
  chemically synthesized
accacaagggtaatgtctga

SEQ ID NO: 34965 - DNA, 20 bp, Artificial Sequence
  chemically synthesized
agatatattttttttttcct

SEQ ID NO: 34966 - DNA, 20 bp, Artificial Sequence
  chemically synthesized
tttccttttggctttcctta

SEQ ID NO: 34967 - DNA, 20 bp, Artificial Sequence
  chemically synthesized
tttagcagccatgcgggcca

SEQ ID NO: 34968 - DNA, 20 bp, Artificial Sequence
  chemically synthesized
atgcgggccactgtgtttaa

SEQ ID NO: 34969 - DNA, 20 bp, Artificial Sequence
  chemically synthesized
tatttacaatttgtcttaga

SEQ ID NO: 34970 - DNA, 20 bp, Artificial Sequence
  chemically synthesized
ttctctgtcttatttacaaa

SEQ ID NO: 34971 - DNA, 20 bp, Artificial Sequence
  chemically synthesized
tacagcttgtatataggact

SEQ ID NO: 34972 - DNA, 20 bp, Artificial Sequence
  chemically synthesized
gaaaacaatattctctactc

SEQ ID NO: 34973 - DNA, 20 bp, Artificial Sequence
  chemically synthesized
aagtaaaatgttcaccagta

SEQ ID NO: 34974 - DNA, 20 bp, Artificial Sequence
  chemically synthesized
tatattgttttttgtggtag

SEQ ID NO: 34975 - DNA, 20 bp, Artificial Sequence
  chemically synthesized
tttttgtggtagtggtgttt

SEQ ID NO: 34976 - DNA, 20 bp, Artificial Sequence
  chemically synthesized
gaaaattcacttcagaagtc

SEQ ID NO: 34977 - DNA, 20 bp, Artificial Sequence
  chemically synthesized
aattctgaaaagcatattgt

SEQ ID NO: 34978 - DNA, 20 bp, Artificial Sequence
  chemically synthesized
cctgatataaatgtctatgt

SEQ ID NO: 34979 - DNA, 20 bp, Artificial Sequence
  chemically synthesized
atgacagcccaaacctaatt

SEQ ID NO: 34980 - DNA, 20 bp, Artificial Sequence
  chemically synthesized
tcaaatctgacatgatggga

SEQ ID NO: 34981 - DNA, 20 bp, Artificial Sequence
  chemically synthesized
ggtcttttctataagggaac

SEQ ID NO: 34982 - DNA, 20 bp, Artificial Sequence
  chemically synthesized
taaataaaatgaaaaaagca

SEQ ID NO: 34983 - DNA, 20 bp, Artificial Sequence
  chemically synthesized
aaagaatcctctaaaaaata

SEQ ID NO: 34984 - DNA, 20 bp, Artificial Sequence
  chemically synthesized
ttgggaggctgaggcaggag

SEQ ID NO: 34985 - DNA, 20 bp, Artificial Sequence
  chemically synthesized
aaaaaaaaaaaaaaaaaaaa

SEQ ID NO: 34986 - DNA, 20 bp, Artificial Sequence
  chemically synthesized
gaaaatgcataccattttac

SEQ ID NO: 34987 - DNA, 20 bp, Artificial Sequence
  chemically synthesized
ctatctgaaagtcccgaatt

SEQ ID NO: 34988 - DNA, 20 bp, Artificial Sequence
  chemically synthesized
atcttaggaagaagatctgt

SEQ ID NO: 34989 - DNA, 20 bp, Artificial Sequence
  chemically synthesized
aagatctgtcactgttttat

SEQ ID NO: 34990 - DNA, 20 bp, Artificial Sequence
  chemically synthesized
aataaagcctttcctaccca

SEQ ID NO: 34991 - DNA, 20 bp, Artificial Sequence
  chemically synthesized
ggttgccaaacacattcttc

SEQ ID NO: 34992 - DNA, 20 bp, Artificial Sequence
  chemically synthesized
tctctttccttaatacaagg

SEQ ID NO: 34993 - DNA, 20 bp, Artificial Sequence
  chemically synthesized
acacaattcaaatatctact

SEQ ID NO: 34994 - DNA, 20 bp, Artificial Sequence
  chemically synthesized
atctactgaatgattactgt

SEQ ID NO: 34995 - DNA, 20 bp, Artificial Sequence
  chemically synthesized
gcagacttggaattgtgcag

SEQ ID NO: 34996 - DNA, 20 bp, Artificial Sequence
  chemically synthesized
cacacagccgtcttccagaa

SEQ ID NO: 34997 - DNA, 20 bp, Artificial Sequence
  chemically synthesized
ttactgtgaattatgagaag

SEQ ID NO: 34998 - DNA, 20 bp, Artificial Sequence
  chemically synthesized
gccagttccagggtgggaac

SEQ ID NO: 34999 - DNA, 20 bp, Artificial Sequence
  chemically synthesized
tttgtaattattcatgcacg

SEQ ID NO: 35000 - DNA, 20 bp, Artificial Sequence
  chemically synthesized
tgaatatcttagacatctta

SEQ ID NO: 35001 - DNA, 20 bp, Artificial Sequence
  chemically synthesized
gagagcttttcgtctcagtt

SEQ ID NO: 35002 - DNA, 20 bp, Artificial Sequence
  chemically synthesized
gcttttcgtctcagttaaat

SEQ ID NO: 35003 - DNA, 20 bp, Artificial Sequence
  chemically synthesized
cgctataaaatatattttaa

SEQ ID NO: 35004 - DNA, 20 bp, Artificial Sequence
  chemically synthesized
aaatatattttaaatttgct

SEQ ID NO: 35005 - DNA, 20 bp, Artificial Sequence
  chemically synthesized
attttaaatttgcttttggt

SEQ ID NO: 35006 - DNA, 20 bp, Artificial Sequence
  chemically synthesized
aaatatctcttatttcccta

SEQ ID NO: 35007 - DNA, 20 bp, Artificial Sequence
  chemically synthesized
gtaaggccttccccccagca

SEQ ID NO: 35008 - DNA, 20 bp, Artificial Sequence
  chemically synthesized
tttgggacctcagtaagaag

SEQ ID NO: 35009 - DNA, 20 bp, Artificial Sequence
  chemically synthesized
gtaagaagtgtggttttaat

SEQ ID NO: 35010 - DNA, 20 bp, Artificial Sequence
  chemically synthesized
taattcttgcttgacagaca

SEQ ID NO: 35011 - DNA, 20 bp, Artificial Sequence
  chemically synthesized
cgcaagtgttactccatatt

SEQ ID NO: 35012 - DNA, 20 bp, Artificial Sequence
  chemically synthesized
ctccatatttggtgatttag

SEQ ID NO: 35013 - DNA, 20 bp, Artificial Sequence
  chemically synthesized
acaaatccccttccgcctgc

SEQ ID NO: 35014 - DNA, 20 bp, Artificial Sequence
  chemically synthesized
atgtcacataaggtaaatgt

SEQ ID NO: 35015 - DNA, 20 bp, Artificial Sequence
  chemically synthesized
caagaaatacactccacaaa

SEQ ID NO: 35016 - DNA, 20 bp, Artificial Sequence
  chemically synthesized
acaaatgcagcttccctagc

SEQ ID NO: 35017 - DNA, 20 bp, Artificial Sequence
  chemically synthesized
ctaaaaaaagaaagaaaatg

SEQ ID NO: 35018 - DNA, 20 bp, Artificial Sequence
  chemically synthesized
aaaagaaagaaaatgccatg

SEQ ID NO: 35019 - DNA, 20 bp, Artificial Sequence
  chemically synthesized
gtctaacatgctcaagcaaa

SEQ ID NO: 35020 - DNA, 20 bp, Artificial Sequence
  chemically synthesized
tgagggtcactatatagtgt

SEQ ID NO: 35021 - DNA, 20 bp, Artificial Sequence
  chemically synthesized
cttttcgagtaagcatgtct

SEQ ID NO: 35022 - DNA, 20 bp, Artificial Sequence
  chemically synthesized
ggtgtcatcccaccacgggg

SEQ ID NO: 35023 - DNA, 20 bp, Artificial Sequence
  chemically synthesized
tgtgtacctatcctgcctac

SEQ ID NO: 35024 - DNA, 20 bp, Artificial Sequence
  chemically synthesized
gttctggacgtaagcaacag

SEQ ID NO: 35025 - DNA, 20 bp, Artificial Sequence
  chemically synthesized
gaaagcacttcacaactcct

SEQ ID NO: 35026 - DNA, 20 bp, Artificial Sequence
  chemically synthesized
aaatgaaaagaaaacatgca

SEQ ID NO: 35027 - DNA, 20 bp, Artificial Sequence
  chemically synthesized
aacatgcaaacagcttttct

SEQ ID NO: 35028 - DNA, 20 bp, Artificial Sequence
  chemically synthesized
ctcatttacctgctatgtgt

SEQ ID NO: 35029 - DNA, 20 bp, Artificial Sequence
  chemically synthesized
tgacctggatgccaacctcc

SEQ ID NO: 35030 - DNA, 20 bp, Artificial Sequence
  chemically synthesized
atgccaacctccacgggatt

SEQ ID NO: 35031 - DNA, 20 bp, Artificial Sequence
  chemically synthesized
gggattggatgcttttttca

SEQ ID NO: 35032 - DNA, 20 bp, Artificial Sequence
  chemically synthesized
tctcgattggtgaaggggaa

SEQ ID NO: 35033 - DNA, 20 bp, Artificial Sequence
  chemically synthesized
gaaggggaaggtggcttatc

SEQ ID NO: 35034 - DNA, 20 bp, Artificial Sequence
  chemically synthesized
ctaagcagaggctgccattg

SEQ ID NO: 35035 - DNA, 20 bp, Artificial Sequence
  chemically synthesized
agaggctgccattgcattgt

SEQ ID NO: 35036 - DNA, 20 bp, Artificial Sequence
  chemically synthesized
tctggttcatcatctgtaag

SEQ ID NO: 35037 - DNA, 20 bp, Artificial Sequence
  chemically synthesized
ccatcccaccacatcatgta

SEQ ID NO: 35038 - DNA, 20 bp, Artificial Sequence
  chemically synthesized
ccacatcatgtaaagtgttt

SEQ ID NO: 35039 - DNA, 20 bp, Artificial Sequence
  chemically synthesized
cacccacagcaacaaatgtg

SEQ ID NO: 35040 - DNA, 20 bp, Artificial Sequence
  chemically synthesized
gcaacaaatgtgtctggttt

SEQ ID NO: 35041 - DNA, 20 bp, Artificial Sequence
  chemically synthesized
gttaacacagggaacataaa

SEQ ID NO: 35042 - DNA, 20 bp, Artificial Sequence
  chemically synthesized
aaaaagtggatagaaaccaa

SEQ ID NO: 35043 - DNA, 20 bp, Artificial Sequence
  chemically synthesized
tatactcctaagtaaacaga

SEQ ID NO: 35044 - DNA, 20 bp, Artificial Sequence
  chemically synthesized
gaatgcctataatattctaa

SEQ ID NO: 35045 - DNA, 20 bp, Artificial Sequence
  chemically synthesized
aattttctgaatgagctcca

SEQ ID NO: 35046 - DNA, 20 bp, Artificial Sequence
  chemically synthesized
aaggtagacatgtctttctt

SEQ ID NO: 35047 - DNA, 20 bp, Artificial Sequence
  chemically synthesized
tagacatgtctttctttcct

SEQ ID NO: 35048 - DNA, 20 bp, Artificial Sequence
  chemically synthesized
aatactccagcatctacttt

SEQ ID NO: 35049 - DNA, 20 bp, Artificial Sequence
  chemically synthesized
ttaccagcttctatcatttt

SEQ ID NO: 35050 - DNA, 20 bp, Artificial Sequence
  chemically synthesized
ggaaaagagagttggtaagt

SEQ ID NO: 35051 - DNA, 20 bp, Artificial Sequence
  chemically synthesized
aagtctctgcttgtgaaatc

SEQ ID NO: 35052 - DNA, 20 bp, Artificial Sequence
  chemically synthesized
aaagccacagagaatcaaaa

SEQ ID NO: 35053 - DNA, 20 bp, Artificial Sequence
  chemically synthesized
atttgagtgtagaatattgg

SEQ ID NO: 35054 - DNA, 20 bp, Artificial Sequence
  chemically synthesized
aaagacagtaaagtaagcac

SEQ ID NO: 35055 - DNA, 20 bp, Artificial Sequence
  chemically synthesized
taatgtcattcttctcttac

SEQ ID NO: 35056 - DNA, 20 bp, Artificial Sequence
  chemically synthesized
aatattcctgttgtctgaat

SEQ ID NO: 35057 - DNA, 20 bp, Artificial Sequence
  chemically synthesized
tttaagtacacattgataaa

SEQ ID NO: 35058 - DNA, 20 bp, Artificial Sequence
  chemically synthesized
cacattgataaatgtggctt

SEQ ID NO: 35059 - DNA, 20 bp, Artificial Sequence
  chemically synthesized
ttagcattagctacaagttc

SEQ ID NO: 35060 - DNA, 20 bp, Artificial Sequence
  chemically synthesized
aaaattttttatttccaccg

SEQ ID NO: 35061 - DNA, 20 bp, Artificial Sequence
  chemically synthesized
tcttctaaatgtagtgactg

SEQ ID NO: 35062 - DNA, 20 bp, Artificial Sequence
  chemically synthesized
tgaagtggtaattcagaggt

SEQ ID NO: 35063 - DNA, 20 bp, Artificial Sequence
  chemically synthesized
attatattctaatgtatgaa

SEQ ID NO: 35064 - DNA, 20 bp, Artificial Sequence
  chemically synthesized
gtgttcagagaaataccaaa

SEQ ID NO: 35065 - DNA, 20 bp, Artificial Sequence
  chemically synthesized
acaattctcatggtgtagtc

SEQ ID NO: 35066 - DNA, 20 bp, Artificial Sequence
  chemically synthesized
ccggctacaaagcagggagt

SEQ ID NO: 35067 - DNA, 20 bp, Artificial Sequence
  chemically synthesized
ggaggaagaaatagaaaata

SEQ ID NO: 35068 - DNA, 20 bp, Artificial Sequence
  chemically synthesized
ggggaaagggagatgtgtct

SEQ ID NO: 35069 - DNA, 20 bp, Artificial Sequence
  chemically synthesized
aaagggagatgtgtcttcaa

SEQ ID NO: 35070 - DNA, 20 bp, Artificial Sequence
  chemically synthesized
tttgctttccaagtccttct

SEQ ID NO: 35071 - DNA, 20 bp, Artificial Sequence
  chemically synthesized
gtgctggctgcaggctcccg

SEQ ID NO: 35072 - DNA, 20 bp, Artificial Sequence
  chemically synthesized
ccagttggtgaaaaaggaag

SEQ ID NO: 35073 - DNA, 20 bp, Artificial Sequence
  chemically synthesized
acacacctcaagcgcgggtc

SEQ ID NO: 35074 - DNA, 20 bp, Artificial Sequence
  chemically synthesized
ctgagattcattctgtgtcc

SEQ ID NO: 35075 - DNA, 20 bp, Artificial Sequence
  chemically synthesized
gatgataactattactattg

SEQ ID NO: 35076 - DNA, 20 bp, Artificial Sequence
  chemically synthesized
ccagccgaggccaccgaggt

SEQ ID NO: 35077 - DNA, 20 bp, Artificial Sequence
  chemically synthesized
ggggtgtcggccgcgcgccc

SEQ ID NO: 35078 - DNA, 20 bp, Artificial Sequence
  chemically synthesized
ctggtacaggttcaagttcg

SEQ ID NO: 35079 - DNA, 20 bp, Artificial Sequence
  chemically synthesized
cgcgcaacgtgccggggtgg

SEQ ID NO: 35080 - DNA, 20 bp, Artificial Sequence
  chemically synthesized
gaggggaggggaggcgcaga

SEQ ID NO: 35081 - DNA, 20 bp, Artificial Sequence
  chemically synthesized
acagttgccctgcaaaataa

SEQ ID NO: 35082 - DNA, 20 bp, Artificial Sequence
  chemically synthesized
aataaaaatgctttgcaaag

SEQ ID NO: 35083 - DNA, 20 bp, Artificial Sequence
  chemically synthesized
tgcaaagccgagtttcaccc

SEQ ID NO: 35084 - DNA, 20 bp, Artificial Sequence
  chemically synthesized
cgcgccgcgctcggtcctct

SEQ ID NO: 35085 - DNA, 20 bp, Artificial Sequence
  chemically synthesized
gcaggaggctcccgcacacg

SEQ ID NO: 35086 - DNA, 20 bp, Artificial Sequence
  chemically synthesized
gtgcttgtaaacattcagac

SEQ ID NO: 35087 - DNA, 20 bp, Artificial Sequence
  chemically synthesized
ctctccgtgccgtcggcgcc

SEQ ID NO: 35088 - DNA, 20 bp, Artificial Sequence
  chemically synthesized
cgccctaagtttgcaactga

SEQ ID NO: 35089 - DNA, 20 bp, Artificial Sequence
  chemically synthesized
tgaaggggtttgggggaaga

SEQ ID NO: 35090 - DNA, 20 bp, Artificial Sequence
  chemically synthesized
ttgtaaatttttttctagat

SEQ ID NO: 35091 - DNA, 20 bp, Artificial Sequence
  chemically synthesized
ttttttctagatgagagatt

SEQ ID NO: 35092 - DNA, 20 bp, Artificial Sequence
  chemically synthesized
gtcacagaaaagggttggca

SEQ ID NO: 35093 - DNA, 20 bp, Artificial Sequence
  chemically synthesized
agaaaagggttggcagagcg

SEQ ID NO: 35094 - DNA, 20 bp, Artificial Sequence
  chemically synthesized
gggttggcagagcgtttggc

SEQ ID NO: 35095 - DNA, 20 bp, Artificial Sequence
  chemically synthesized
agaaattgtacattctcttg

SEQ ID NO: 35096 - DNA, 20 bp, Artificial Sequence
  chemically synthesized
tcacctcttttctccccggg

SEQ ID NO: 35097 - DNA, 20 bp, Artificial Sequence
  chemically synthesized
ttccccaccagctcccaccc

SEQ ID NO: 35098 - DNA, 20 bp, Artificial Sequence
  chemically synthesized
gcaatggttccagatgggat

SEQ ID NO: 35099 - DNA, 20 bp, Artificial Sequence
  chemically synthesized
tctcttttacctcgactctc

SEQ ID NO: 35100 - DNA, 20 bp, Artificial Sequence
  chemically synthesized
tgcacacacccctctctccc

SEQ ID NO: 35101 - DNA, 20 bp, Artificial Sequence
  chemically synthesized
cacccctctctccccctcgc

SEQ ID NO: 35102 - DNA, 20 bp, Artificial Sequence
  chemically synthesized
gcttctagtcctgcgcgctc

SEQ ID NO: 35103 - DNA, 20 bp, Artificial Sequence
  chemically synthesized
tgggttacttacgcgagaat

SEQ ID NO: 35104 - DNA, 20 bp, Artificial Sequence
  chemically synthesized
ttacttacgcgagaattccc

SEQ ID NO: 35105 - DNA, 20 bp, Artificial Sequence
  chemically synthesized
attcccgtttgcttaagtgc

SEQ ID NO: 35106 - DNA, 20 bp, Artificial Sequence
  chemically synthesized
tgcttaagtgctggggtttg

SEQ ID NO: 35107 - DNA, 20 bp, Artificial Sequence
  chemically synthesized
atgaattgtgggagagccgt

SEQ ID NO: 35108 - DNA, 20 bp, Artificial Sequence
  chemically synthesized
acacacgcggactctaaaat

SEQ ID NO: 35109 - DNA, 20 bp, Artificial Sequence
  chemically synthesized
acggcaacgcggaatccagc

SEQ ID NO: 35110 - DNA, 20 bp, Artificial Sequence
  chemically synthesized
agcacagagggatgggaaga

SEQ ID NO: 35111 - DNA, 20 bp, Artificial Sequence
  chemically synthesized
cgtgctgccgctgtcaaaaa

SEQ ID NO: 35112 - DNA, 20 bp, Artificial Sequence
  chemically synthesized
tcactctggcgtgggatact

SEQ ID NO: 35113 - DNA, 20 bp, Artificial Sequence
  chemically synthesized
atgtacagcaacagcacccc

SEQ ID NO: 35114 - DNA, 20 bp, Artificial Sequence
  chemically synthesized
aacagcaccccctgcgattg

SEQ ID NO: 35115 - DNA, 20 bp, Artificial Sequence
  chemically synthesized
ccgccgccggggagatcgca

SEQ ID NO: 35116 - DNA, 20 bp, Artificial Sequence
  chemically synthesized
cccctcttcagtctaaaggg

SEQ ID NO: 35117 - DNA, 20 bp, Artificial Sequence
  chemically synthesized
taaactcacccacccggtgg

SEQ ID NO: 35118 - DNA, 20 bp, Artificial Sequence
  chemically synthesized
cccacccggtgggggggctt

SEQ ID NO: 35119 - DNA, 20 bp, Artificial Sequence
  chemically synthesized
tattgttttaagcgagggcc

SEQ ID NO: 35120 - DNA, 20 bp, Artificial Sequence
  chemically synthesized
ccgcagccctgccggcaagc

SEQ ID NO: 35121 - DNA, 20 bp, Artificial Sequence
  chemically synthesized
gccggcaagcggctgtttat

SEQ ID NO: 35122 - DNA, 20 bp, Artificial Sequence
  chemically synthesized
ttattcctgtttcgtcttag

SEQ ID NO: 35123 - DNA, 20 bp, Artificial Sequence
  chemically synthesized
gtctactgtgttagaaaatg

SEQ ID NO: 35124 - DNA, 20 bp, Artificial Sequence
  chemically synthesized
gactggcttgcctagctcgg

SEQ ID NO: 35125 - DNA, 20 bp, Artificial Sequence
  chemically synthesized
gacccctctaaggaagaaaa

SEQ ID NO: 35126 - DNA, 20 bp, Artificial Sequence
  chemically synthesized
tgagagagatgtgggctgta

SEQ ID NO: 35127 - DNA, 20 bp, Artificial Sequence
  chemically synthesized
ctgtactgggattgtgtcaa

SEQ ID NO: 35128 - DNA, 20 bp, Artificial Sequence
  chemically synthesized
gggattgtgtcaatgtggtt

SEQ ID NO: 35129 - DNA, 20 bp, Artificial Sequence
  chemically synthesized
caatgtggtttgttgtttgt

SEQ ID NO: 35130 - DNA, 20 bp, Artificial Sequence
  chemically synthesized
gttgtttgttgttgtttccc

SEQ ID NO: 35131 - DNA, 20 bp, Artificial Sequence
  chemically synthesized
tgtgggagggagacctcaaa

SEQ ID NO: 35132 - DNA, 20 bp, Artificial Sequence
  chemically synthesized
caaattctgtttaagaagcg

SEQ ID NO: 35133 - DNA, 20 bp, Artificial Sequence
  chemically synthesized
attcactagaagttaagctc

SEQ ID NO: 35134 - DNA, 20 bp, Artificial Sequence
  chemically synthesized
agcatctctattccaccaca

SEQ ID NO: 35135 - DNA, 20 bp, Artificial Sequence
  chemically synthesized
ccttcaggtaacaatagtga

SEQ ID NO: 35136 - DNA, 20 bp, Artificial Sequence
  chemically synthesized
tgagccagattctttcagaa

SEQ ID NO: 35137 - DNA, 20 bp, Artificial Sequence
  chemically synthesized
attctttcagaaccaagctt

SEQ ID NO: 35138 - DNA, 20 bp, Artificial Sequence
  chemically synthesized
ttgtggaaatatatatatat

SEQ ID NO: 35139 - DNA, 20 bp, Artificial Sequence
  chemically synthesized
tttatatataatggtgtgta

SEQ ID NO: 35140 - DNA, 20 bp, Artificial Sequence
  chemically synthesized
ataaataactggcaacattt

SEQ ID NO: 35141 - DNA, 20 bp, Artificial Sequence
  chemically synthesized
tagcagacctacttgtaact

SEQ ID NO: 35142 - DNA, 20 bp, Artificial Sequence
  chemically synthesized
gtaactaagtgcttaatttc

SEQ ID NO: 35143 - DNA, 20 bp, Artificial Sequence
  chemically synthesized
ttacactacagccaaccccg

SEQ ID NO: 35144 - DNA, 20 bp, Artificial Sequence
  chemically synthesized
gggaacaatattcaaatctg

SEQ ID NO: 35145 - DNA, 20 bp, Artificial Sequence
  chemically synthesized
ggctcactattgttacctga

SEQ ID NO: 35146 - DNA, 20 bp, Artificial Sequence
  chemically synthesized
attcttttggtgactccaag

SEQ ID NO: 35147 - DNA, 20 bp, Artificial Sequence
  chemically synthesized
atggtgtcacacacaagcta

SEQ ID NO: 35148 - DNA, 20 bp, Artificial Sequence
  chemically synthesized
gcttaacttctagtgaatcc

SEQ ID NO: 35149 - DNA, 20 bp, Artificial Sequence
  chemically synthesized
aagacgaaacaggaataaac

SEQ ID NO: 35150 - DNA, 20 bp, Artificial Sequence
  chemically synthesized
agcgcgtgcaagcccggggc

SEQ ID NO: 35151 - DNA, 20 bp, Artificial Sequence
  chemically synthesized
aaagcccccccaccgggtgg

SEQ ID NO: 35152 - DNA, 20 bp, Artificial Sequence
  chemically synthesized
ctcctctccccccaactcct

SEQ ID NO: 35153 - DNA, 20 bp, Artificial Sequence
  chemically synthesized
ggcgccaggggactttacag

SEQ ID NO: 35154 - DNA, 20 bp, Artificial Sequence
  chemically synthesized
gtatcccacgccagagtgaa

SEQ ID NO: 35155 - DNA, 20 bp, Artificial Sequence
  chemically synthesized
gcgtgtgtgcattaaagaga

SEQ ID NO: 35156 - DNA, 20 bp, Artificial Sequence
  chemically synthesized
aacattttcttcccatccct

SEQ ID NO: 35157 - DNA, 20 bp, Artificial Sequence
  chemically synthesized
actgggactcccgggactgc

SEQ ID NO: 35158 - DNA, 20 bp, Artificial Sequence
  chemically synthesized
acccttaggagccggggact

SEQ ID NO: 35159 - DNA, 20 bp, Artificial Sequence
  chemically synthesized
tttcagttgcattcagaccc

SEQ ID NO: 35160 - DNA, 20 bp, Artificial Sequence
  chemically synthesized
cccagtcgcttggcggggcg

SEQ ID NO: 35161 - DNA, 20 bp, Artificial Sequence
  chemically synthesized
ccgcagccctccaaacttag

SEQ ID NO: 35162 - DNA, 20 bp, Artificial Sequence
  chemically synthesized
gaggctcagctctcaacttc

SEQ ID NO: 35163 - DNA, 20 bp, Artificial Sequence
  chemically synthesized
tttgctgtcctctcctcggg

SEQ ID NO: 35164 - DNA, 20 bp, Artificial Sequence
  chemically synthesized
cccgagcgcagccgcgggct

SEQ ID NO: 35165 - DNA, 20 bp, Artificial Sequence
  chemically synthesized
ggtgtccgggagcaactcta

SEQ ID NO: 35166 - DNA, 20 bp, Artificial Sequence
  chemically synthesized
tctacctggcttccctccgc

SEQ ID NO: 35167 - DNA, 20 bp, Artificial Sequence
  chemically synthesized
tccccctccccgcactggcc

SEQ ID NO: 35168 - DNA, 20 bp, Artificial Sequence
  chemically synthesized
cctgatgtgtgtccattggt

SEQ ID NO: 35169 - DNA, 20 bp, Artificial Sequence
  chemically synthesized
ttctctcctgctcgccctgc

SEQ ID NO: 35170 - DNA, 20 bp, Artificial Sequence
  chemically synthesized
cacttgaacttgcagctcag

SEQ ID NO: 35171 - DNA, 20 bp, Artificial Sequence
  chemically synthesized
tttttttttttttttttttt

SEQ ID NO: 35172 - DNA, 20 bp, Artificial Sequence
  chemically synthesized
tcctcctctttcctcctttc

SEQ ID NO: 35173 - DNA, 20 bp, Artificial Sequence
  chemically synthesized
tctcttttcgaaaaggaatg

SEQ ID NO: 35174 - DNA, 20 bp, Artificial Sequence
  chemically synthesized
ttccactccccccccgcccc

SEQ ID NO: 35175 - DNA, 20 bp, Artificial Sequence
  chemically synthesized
ggagctggtggggaaaggga

SEQ ID NO: 35176 - DNA, 20 bp, Artificial Sequence
  chemically synthesized
ggagtgagtacaagtctaaa

SEQ ID NO: 35177 - DNA, 20 bp, Artificial Sequence
  chemically synthesized
ccggggagaaaagaggtgag

SEQ ID NO: 35178 - DNA, 20 bp, Artificial Sequence
  chemically synthesized
cttttgttccggccagaggt

SEQ ID NO: 35179 - DNA, 20 bp, Artificial Sequence
  chemically synthesized
ctgccttttgtgccggctcc

SEQ ID NO: 35180 - DNA, 20 bp, Artificial Sequence
  chemically synthesized
ccctcctcttactatttttt

SEQ ID NO: 35181 - DNA, 20 bp, Artificial Sequence
  chemically synthesized
agattttcaaaaaaagtgga

SEQ ID NO: 35182 - DNA, 20 bp, Artificial Sequence
  chemically synthesized
tcaaaaaaagtggaagtgga

SEQ ID NO: 35183 - DNA, 20 bp, Artificial Sequence
  chemically synthesized
ttgggaaaaatctcgtgtct

SEQ ID NO: 35184 - DNA, 20 bp, Artificial Sequence
  chemically synthesized
gcgaaatcggctgggtgaaa

SEQ ID NO: 35185 - DNA, 20 bp, Artificial Sequence
  chemically synthesized
gggaccgcgaggaggtcacc

SEQ ID NO: 35186 - DNA, 20 bp, Artificial Sequence
  chemically synthesized
cggggaagggcaggggagaa

SEQ ID NO: 35187 - DNA, 20 bp, Artificial Sequence
  chemically synthesized
gtcttgccctcttccccagg

SEQ ID NO: 35188 - DNA, 20 bp, Artificial Sequence
  chemically synthesized
ggcgggcggtgggcacttag

SEQ ID NO: 35189 - DNA, 20 bp, Artificial Sequence
  chemically synthesized
acattccccccctactcaat

SEQ ID NO: 35190 - DNA, 20 bp, Artificial Sequence
  chemically synthesized
ttcttactttaaatttttga

SEQ ID NO: 35191 - DNA, 20 bp, Artificial Sequence
  chemically synthesized
aggaccacctatacttggtt

SEQ ID NO: 35192 - DNA, 20 bp, Artificial Sequence
  chemically synthesized
tcctgtcccggggttaaagg

SEQ ID NO: 35193 - DNA, 20 bp, Artificial Sequence
  chemically synthesized
agcctcccccacctcctgcc

SEQ ID NO: 35194 - DNA, 20 bp, Artificial Sequence
  chemically synthesized
cgattctcgtccggggagga

SEQ ID NO: 35195 - DNA, 20 bp, Artificial Sequence
  chemically synthesized
gttcttcattttgactttaa

SEQ ID NO: 35196 - DNA, 20 bp, Artificial Sequence
  chemically synthesized
gcgccgggctcggagcacgg

SEQ ID NO: 35197 - DNA, 20 bp, Artificial Sequence
  chemically synthesized
ggctcggagcacggtgcagt

SEQ ID NO: 35198 - DNA, 20 bp, Artificial Sequence
  chemically synthesized
ggaaccgggagtgcgcgctc

SEQ ID NO: 35199 - DNA, 20 bp, Artificial Sequence
  chemically synthesized
tggccgaagagggggatatg

SEQ ID NO: 35200 - DNA, 20 bp, Artificial Sequence
  chemically synthesized
cacagacctcggtggcctcg

SEQ ID NO: 35201 - DNA, 20 bp, Artificial Sequence
  chemically synthesized
gatcccccaaagtaaaaagt

SEQ ID NO: 35202 - DNA, 20 bp, Artificial Sequence
  chemically synthesized
cacagaatgaatctcaggac

SEQ ID NO: 35203 - DNA, 20 bp, Artificial Sequence
  chemically synthesized
gactgcaccaggttaaccag

SEQ ID NO: 35204 - DNA, 20 bp, Artificial Sequence
  chemically synthesized
gagcctgcagccagcacgct

SEQ ID NO: 35205 - DNA, 20 bp, Artificial Sequence
  chemically synthesized
cctgccccgggcctgtagcc

SEQ ID NO: 35206 - DNA, 20 bp, Artificial Sequence
  chemically synthesized
cccgggcctgtagcccccgg

SEQ ID NO: 35207 - DNA, 20 bp, Artificial Sequence
  chemically synthesized
cctgtagcccccggctttgc

SEQ ID NO: 35208 - DNA, 20 bp, Artificial Sequence
  chemically synthesized
ccccggctttgcttttgttt

SEQ ID NO: 35209 - DNA, 20 bp, Artificial Sequence
  chemically synthesized
tttcctctctgaatttcagc

SEQ ID NO: 35210 - DNA, 20 bp, Artificial Sequence
  chemically synthesized
ctctctgaatttcagcctcc

SEQ ID NO: 35211 - DNA, 20 bp, Artificial Sequence
  chemically synthesized
cccctccgctccccggcagc

SEQ ID NO: 35212 - DNA, 20 bp, Artificial Sequence
  chemically synthesized
ctccttaccaacatttccta

SEQ ID NO: 35213 - DNA, 20 bp, Artificial Sequence
  chemically synthesized
tgagacgttccaggctgtct

SEQ ID NO: 35214 - DNA, 20 bp, Artificial Sequence
  chemically synthesized
agagaattcgcggctaatta

SEQ ID NO: 35215 - DNA, 20 bp, Artificial Sequence
  chemically synthesized
ttccacttcaatcgaggact

SEQ ID NO: 35216 - DNA, 20 bp, Artificial Sequence
  chemically synthesized
aggactccctgctttgtagc

SEQ ID NO: 35217 - DNA, 20 bp, Artificial Sequence
  chemically synthesized
tttgtagccggagtttaggc

SEQ ID NO: 35218 - DNA, 20 bp, Artificial Sequence
  chemically synthesized
ggtaaatggctgagggttag

SEQ ID NO: 35219 - DNA, 20 bp, Artificial Sequence
  chemically synthesized
tcagatgcccagaaaggaaa

SEQ ID NO: 35220 - DNA, 20 bp, Artificial Sequence
  chemically synthesized
ttttctttgtgtcccacttt

SEQ ID NO: 35221 - DNA, 20 bp, Artificial Sequence
  chemically synthesized
atataccagcaatgataaaa

SEQ ID NO: 35222 - DNA, 20 bp, Artificial Sequence
  chemically synthesized
ttctctgaacaccactagcc

SEQ ID NO: 35223 - DNA, 20 bp, Artificial Sequence
  chemically synthesized
gcatagaaaatgttgaggtt

SEQ ID NO: 35224 - DNA, 20 bp, Artificial Sequence
  chemically synthesized
tctgaattaccacttcattt

SEQ ID NO: 35225 - DNA, 20 bp, Artificial Sequence
  chemically synthesized
attaccacttcatttcccgg

SEQ ID NO: 35226 - DNA, 20 bp, Artificial Sequence
  chemically synthesized
atttagaagactttaaccaa

SEQ ID NO: 35227 - DNA, 20 bp, Artificial Sequence
  chemically synthesized
tgcaaaggttctatgtacta

SEQ ID NO: 35228 - DNA, 20 bp, Artificial Sequence
  chemically synthesized
aaggcacaatgcagaggcac

SEQ ID NO: 35229 - DNA, 20 bp, Artificial Sequence
  chemically synthesized
tatgttgggcaaagaaacat

SEQ ID NO: 35230 - DNA, 20 bp, Artificial Sequence
  chemically synthesized
aataaatttaacctgagttc

SEQ ID NO: 35231 - DNA, 20 bp, Artificial Sequence
  chemically synthesized
cactcaaattaaaatctatt

SEQ ID NO: 35232 - DNA, 20 bp, Artificial Sequence
  chemically synthesized
aaatctattttttgattctc

SEQ ID NO: 35233 - DNA, 20 bp, Artificial Sequence
  chemically synthesized
agttcattaaatgtaaaatt

SEQ ID NO: 35234 - DNA, 20 bp, Artificial Sequence
  chemically synthesized
cagcttgctaaagaaggtca

SEQ ID NO: 35235 - DNA, 20 bp, Artificial Sequence
  chemically synthesized
taaagaaggtcagactgatt

SEQ ID NO: 35236 - DNA, 20 bp, Artificial Sequence
  chemically synthesized
ctgtttaagacttgtacatt

SEQ ID NO: 35237 - DNA, 20 bp, Artificial Sequence
  chemically synthesized
aagacttgtacattttctgc

SEQ ID NO: 35238 - DNA, 20 bp, Artificial Sequence
  chemically synthesized
ttattaactggcagcatcct

SEQ ID NO: 35239 - DNA, 20 bp, Artificial Sequence
  chemically synthesized
catcctggatgttttgtatt

SEQ ID NO: 35240 - DNA, 20 bp, Artificial Sequence
  chemically synthesized
ttttttttgatagagcaagc

SEQ ID NO: 35241 - DNA, 20 bp, Artificial Sequence
  chemically synthesized
ccaactctcttttccccttt

SEQ ID NO: 35242 - DNA, 20 bp, Artificial Sequence
  chemically synthesized
taccttgttataccatccgc

SEQ ID NO: 35243 - DNA, 20 bp, Artificial Sequence
  chemically synthesized
ctcagccttgctctgaaatg

SEQ ID NO: 35244 - DNA, 20 bp, Artificial Sequence
  chemically synthesized
gccttgctctgaaatgtggt

SEQ ID NO: 35245 - DNA, 20 bp, Artificial Sequence
  chemically synthesized
atgtggtgtttgcttgacca

SEQ ID NO: 35246 - DNA, 20 bp, Artificial Sequence
  chemically synthesized
atagatgccaccaagtgcaa

SEQ ID NO: 35247 - DNA, 20 bp, Artificial Sequence
  chemically synthesized
gaataaaaaaaaaatgacta

SEQ ID NO: 35248 - DNA, 20 bp, Artificial Sequence
  chemically synthesized
tgcccgtgcatttggtattt

SEQ ID NO: 35249 - DNA, 20 bp, Artificial Sequence
  chemically synthesized
actgctgagagtgagagcag

SEQ ID NO: 35250 - DNA, 20 bp, Artificial Sequence
  chemically synthesized
gcagtgtgaattatgctgcg

SEQ ID NO: 35251 - DNA, 20 bp, Artificial Sequence
  chemically synthesized
gcgacatgattattatttag

SEQ ID NO: 35252 - DNA, 20 bp, Artificial Sequence
  chemically synthesized
tccgtttcataggtgcatgc

SEQ ID NO: 35253 - DNA, 20 bp, Artificial Sequence
  chemically synthesized
gcacatttttcatgtgacat

SEQ ID NO: 35254 - DNA, 20 bp, Artificial Sequence
  chemically synthesized
tttctaatttatgaagccat

SEQ ID NO: 35255 - DNA, 20 bp, Artificial Sequence
  chemically synthesized
cattcacacacaaagggtgt

SEQ ID NO: 35256 - DNA, 20 bp, Artificial Sequence
  chemically synthesized
tataggaaaaaagaaacaaa

SEQ ID NO: 35257 - DNA, 20 bp, Artificial Sequence
  chemically synthesized
tctatccactttttttttta

SEQ ID NO: 35258 - DNA, 20 bp, Artificial Sequence
  chemically synthesized
gtttttcttgtagttattat

SEQ ID NO: 35259 - DNA, 20 bp, Artificial Sequence
  chemically synthesized
ctctggagttatgcaaggaa

SEQ ID NO: 35260 - DNA, 20 bp, Artificial Sequence
  chemically synthesized
gactgttttctttacatatg

SEQ ID NO: 35261 - DNA, 20 bp, Artificial Sequence
  chemically synthesized
tgggatggcatggggttgag

SEQ ID NO: 35262 - DNA, 20 bp, Artificial Sequence
  chemically synthesized
cctctctggcactctaataa

SEQ ID NO: 35263 - DNA, 20 bp, Artificial Sequence
  chemically synthesized
tggcactctaataattgtgc

SEQ ID NO: 35264 - DNA, 20 bp, Artificial Sequence
  chemically synthesized
ggaaacaatgcaatggcagc

SEQ ID NO: 35265 - DNA, 20 bp, Artificial Sequence
  chemically synthesized
atccaggtcacgccagagga

SEQ ID NO: 35266 - DNA, 20 bp, Artificial Sequence
  chemically synthesized
aggtcacgccagaggatgac

SEQ ID NO: 35267 - DNA, 20 bp, Artificial Sequence
  chemically synthesized
aaatgagaagcaaggagaaa

SEQ ID NO: 35268 - DNA, 20 bp, Artificial Sequence
  chemically synthesized
agcaaggagaaaagctgttt

SEQ ID NO: 35269 - DNA, 20 bp, Artificial Sequence
  chemically synthesized
ccaagcagtaaggagttgtg

SEQ ID NO: 35270 - DNA, 20 bp, Artificial Sequence
  chemically synthesized
aatgttaaaataatcatttc

SEQ ID NO: 35271 - DNA, 20 bp, Artificial Sequence
  chemically synthesized
agacaccttctctctggatc

SEQ ID NO: 35272 - DNA, 20 bp, Artificial Sequence
  chemically synthesized
ttctctctggatctgtcgat

SEQ ID NO: 35273 - DNA, 20 bp, Artificial Sequence
  chemically synthesized
caccttctcattttgaagta

SEQ ID NO: 35274 - DNA, 20 bp, Artificial Sequence
  chemically synthesized
ttgagctttactacacctag

SEQ ID NO: 35275 - DNA, 20 bp, Artificial Sequence
  chemically synthesized
catttgcagttcagccaatg

SEQ ID NO: 35276 - DNA, 20 bp, Artificial Sequence
  chemically synthesized
ttaggggttcagctcgttct

SEQ ID NO: 35277 - DNA, 20 bp, Artificial Sequence
  chemically synthesized
gaggtggtggaaagagttaa

SEQ ID NO: 35278 - DNA, 20 bp, Artificial Sequence
  chemically synthesized
gcagttgctgaagcgcacag

SEQ ID NO: 35279 - DNA, 20 bp, Artificial Sequence
  chemically synthesized
cgcacagacatgcttactcg

SEQ ID NO: 35280 - DNA, 20 bp, Artificial Sequence
  chemically synthesized
catgttggaaatttcaaaag

SEQ ID NO: 35281 - DNA, 20 bp, Artificial Sequence
  chemically synthesized
tgcctcctcagctaaatgat

SEQ ID NO: 35282 - DNA, 20 bp, Artificial Sequence
  chemically synthesized
gtgctctctcttgtctctga

SEQ ID NO: 35283 - DNA, 20 bp, Artificial Sequence
  chemically synthesized
atgtggttttgacagatgta

SEQ ID NO: 35284 - DNA, 20 bp, Artificial Sequence
  chemically synthesized
ttttgacagatgtatcttga

SEQ ID NO: 35285 - DNA, 20 bp, Artificial Sequence
  chemically synthesized
agatgtatcttgattttgtt

SEQ ID NO: 35286 - DNA, 20 bp, Artificial Sequence
  chemically synthesized
caaatgtccagtccagactc

SEQ ID NO: 35287 - DNA, 20 bp, Artificial Sequence
  chemically synthesized
gcagggaggcagctaggtgt

SEQ ID NO: 35288 - DNA, 20 bp, Artificial Sequence
  chemically synthesized
atagtgaccctcaaaacatt

SEQ ID NO: 35289 - DNA, 20 bp, Artificial Sequence
  chemically synthesized
gcatgttagacaaaagtcaa

SEQ ID NO: 35290 - DNA, 20 bp, Artificial Sequence
  chemically synthesized
acatgccatgcctgttggtg

SEQ ID NO: 35291 - DNA, 20 bp, Artificial Sequence
  chemically synthesized
cacccagctcccgaaaggca

SEQ ID NO: 35292 - DNA, 20 bp, Artificial Sequence
  chemically synthesized
cccgaaaggcaagaggtttg

SEQ ID NO: 35293 - DNA, 20 bp, Artificial Sequence
  chemically synthesized
gaaaggtagtgcatatcatg

SEQ ID NO: 35294 - DNA, 20 bp, Artificial Sequence
  chemically synthesized
actggaacttgtctctccga

SEQ ID NO: 35295 - DNA, 20 bp, Artificial Sequence
  chemically synthesized
ataataggtcagtggtctag

SEQ ID NO: 35296 - DNA, 20 bp, Artificial Sequence
  chemically synthesized
tggcattttctttctttttt

SEQ ID NO: 35297 - DNA, 20 bp, Artificial Sequence
  chemically synthesized
taccttatgtgacatgtagg

SEQ ID NO: 35298 - DNA, 20 bp, Artificial Sequence
  chemically synthesized
aaaatgaacagaagtgtaag

SEQ ID NO: 35299 - DNA, 20 bp, Artificial Sequence
  chemically synthesized
atgaagcaagagcaggcgga

SEQ ID NO: 35300 - DNA, 20 bp, Artificial Sequence
  chemically synthesized
tcgtatttacatatcgagct

SEQ ID NO: 35301 - DNA, 20 bp, Artificial Sequence
  chemically synthesized
tcccaaataggttattcagt

SEQ ID NO: 35302 - DNA, 20 bp, Artificial Sequence
  chemically synthesized
tatgtagggaaataagagat

SEQ ID NO: 35303 - DNA, 20 bp, Artificial Sequence
  chemically synthesized
gtgcatgaataattacaaag

SEQ ID NO: 35304 - DNA, 20 bp, Artificial Sequence
  chemically synthesized
caaagtcttgatttctttca

SEQ ID NO: 35305 - DNA, 20 bp, Artificial Sequence
  chemically synthesized
ataattcacagtaatgaatt

SEQ ID NO: 35306 - DNA, 20 bp, Artificial Sequence
  chemically synthesized
gcacgtctgcacaattccaa

SEQ ID NO: 35307 - DNA, 20 bp, Artificial Sequence
  chemically synthesized
attgatgaatctctagaaga

SEQ ID NO: 35308 - DNA, 20 bp, Artificial Sequence
  chemically synthesized
atttaagcgtgctgggtagg

SEQ ID NO: 35309 - DNA, 20 bp, Artificial Sequence
  chemically synthesized
gctttattaaagtgatgtaa

SEQ ID NO: 35310 - DNA, 20 bp, Artificial Sequence
  chemically synthesized
gatcttcttcctaagataaa

SEQ ID NO: 35311 - DNA, 20 bp, Artificial Sequence
  chemically synthesized
tgtactcaggcctctccaag

SEQ ID NO: 35312 - DNA, 20 bp, Artificial Sequence
  chemically synthesized
tttttttttttttttttaga

SEQ ID NO: 35313 - DNA, 20 bp, Artificial Sequence
  chemically synthesized
gcccaggctggagtgcagtg

SEQ ID NO: 35314 - DNA, 20 bp, Artificial Sequence
  chemically synthesized
aacctctgcctcctaggttc

SEQ ID NO: 35315 - DNA, 20 bp, Artificial Sequence
  chemically synthesized
tgcctcagcctcccaagtag

SEQ ID NO: 35316 - DNA, 20 bp, Artificial Sequence
  chemically synthesized
ggcgtgtgccactacgccca

SEQ ID NO: 35317 - DNA, 20 bp, Artificial Sequence
  chemically synthesized
ttttgtattttcagtagagg

SEQ ID NO: 35318 - DNA, 20 bp, Artificial Sequence
  chemically synthesized
tcctgacctcaggtgatcca

SEQ ID NO: 35319 - DNA, 20 bp, Artificial Sequence
  chemically synthesized
tggcttggcctcccaaagtg

SEQ ID NO: 35320 - DNA, 20 bp, Artificial Sequence
  chemically synthesized
cctcccaaagtgctgggatt

SEQ ID NO: 35321 - DNA, 20 bp, Artificial Sequence
  chemically synthesized
gcccaaactgagtatttttt

SEQ ID NO: 35322 - DNA, 20 bp, Artificial Sequence
  chemically synthesized
gtacacatagatgttaatca

SEQ ID NO: 35323 - DNA, 20 bp, Artificial Sequence
  chemically synthesized
atttaaatattcaaaatatt

SEQ ID NO: 35324 - DNA, 20 bp, Artificial Sequence
  chemically synthesized
tattaatttagctgggaatt

SEQ ID NO: 35325 - DNA, 20 bp, Artificial Sequence
  chemically synthesized
agcagcctttgacttgcagt

SEQ ID NO: 35326 - DNA, 20 bp, Artificial Sequence
  chemically synthesized
ttgcagtcagagctttcaat

SEQ ID NO: 35327 - DNA, 20 bp, Artificial Sequence
  chemically synthesized
gtcagagctttcaatagggg

SEQ ID NO: 35328 - DNA, 20 bp, Artificial Sequence
  chemically synthesized
agctttcaataggggttttg

SEQ ID NO: 35329 - DNA, 20 bp, Artificial Sequence
  chemically synthesized
tcaataggggttttgttttg

SEQ ID NO: 35330 - DNA, 20 bp, Artificial Sequence
  chemically synthesized
tgatggggggaaatattcat

SEQ ID NO: 35331 - DNA, 20 bp, Artificial Sequence
  chemically synthesized
cccaaacattatcccatcat

SEQ ID NO: 35332 - DNA, 20 bp, Artificial Sequence
  chemically synthesized
ttatcccatcatgtcagatt

SEQ ID NO: 35333 - DNA, 20 bp, Artificial Sequence
  chemically synthesized
catcatgtcagatttgaggt

SEQ ID NO: 35334 - DNA, 20 bp, Artificial Sequence
  chemically synthesized
tgcacataggaatctttaaa

SEQ ID NO: 35335 - DNA, 20 bp, Artificial Sequence
  chemically synthesized
taggtttgggctgtcataaa

SEQ ID NO: 35336 - DNA, 20 bp, Artificial Sequence
  chemically synthesized
ttaaaagtaaatcaaataca

SEQ ID NO: 35337 - DNA, 20 bp, Artificial Sequence
  chemically synthesized
accttttctttttgtatcca

SEQ ID NO: 35338 - DNA, 20 bp, Artificial Sequence
  chemically synthesized
tttttcttttctctttattt

SEQ ID NO: 35339 - DNA, 20 bp, Artificial Sequence
  chemically synthesized
aaaatccagagagtagagaa

SEQ ID NO: 35340 - DNA, 20 bp, Artificial Sequence
  chemically synthesized
tattgttttctaataagtac

SEQ ID NO: 35341 - DNA, 20 bp, Artificial Sequence
  chemically synthesized
ctaggattttcatagggagc

SEQ ID NO: 35342 - DNA, 20 bp, Artificial Sequence
  chemically synthesized
acagagaaaggttgtgaact

SEQ ID NO: 35343 - DNA, 20 bp, Artificial Sequence
  chemically synthesized
aggttgtgaactggcagctt

SEQ ID NO: 35344 - DNA, 20 bp, Artificial Sequence
  chemically synthesized
aattgtaaatagaactgtca

SEQ ID NO: 35345 - DNA, 20 bp, Artificial Sequence
  chemically synthesized
atagaactgtcacagtgatt

SEQ ID NO: 35346 - DNA, 20 bp, Artificial Sequence
  chemically synthesized
ttggcattgtcaggactttt

SEQ ID NO: 35347 - DNA, 20 bp, Artificial Sequence
  chemically synthesized
tcctagtcatcttttataaa

SEQ ID NO: 35348 - DNA, 20 bp, Artificial Sequence
  chemically synthesized
agatcatcctgtgtgtgatg

SEQ ID NO: 35349 - DNA, 20 bp, Artificial Sequence
  chemically synthesized
gtgtgtgatgtggagattgt

SEQ ID NO: 35350 - DNA, 20 bp, Artificial Sequence
  chemically synthesized
agaacaggagcagaggggga

SEQ ID NO: 35351 - DNA, 20 bp, Artificial Sequence
  chemically synthesized
caaagtttccctcccgttct

SEQ ID NO: 35352 - DNA, 20 bp, Artificial Sequence
  chemically synthesized
gttctctgtgtttattctgt

SEQ ID NO: 35353 - DNA, 20 bp, Artificial Sequence
  chemically synthesized
tttactataaaggatctgaa

SEQ ID NO: 35354 - DNA, 20 bp, Artificial Sequence
  chemically synthesized
gctcagggaggaggcgagtt

SEQ ID NO: 35355 - DNA, 20 bp, Artificial Sequence
  chemically synthesized
gaaaatcattaatttcacac

SEQ ID NO: 35356 - DNA, 20 bp, Artificial Sequence
  chemically synthesized
atttcacactgcagcttcca

SEQ ID NO: 35357 - DNA, 20 bp, Artificial Sequence
  chemically synthesized
caaatcctagggaaacattt

SEQ ID NO: 35358 - DNA, 20 bp, Artificial Sequence
  chemically synthesized
gggaaacattttttagattt

SEQ ID NO: 35359 - DNA, 20 bp, Artificial Sequence
  chemically synthesized
tttttgtgatttctcaatga

SEQ ID NO: 35360 - DNA, 20 bp, Artificial Sequence
  chemically synthesized
ataaaggagaataggtgaat

SEQ ID NO: 35361 - DNA, 20 bp, Artificial Sequence
  chemically synthesized
cagtaagaaaggaaacaaat

SEQ ID NO: 35362 - DNA, 20 bp, Artificial Sequence
  chemically synthesized
agcacagctagggagatgca

SEQ ID NO: 35363 - DNA, 20 bp, Artificial Sequence
  chemically synthesized
aaaatttaccccaagcccaa

SEQ ID NO: 35364 - DNA, 20 bp, Artificial Sequence
  chemically synthesized
ctgtttttacatacagtagt

SEQ ID NO: 35365 - DNA, 20 bp, Artificial Sequence
  chemically synthesized
caccttgccacttttttagc

SEQ ID NO: 35366 - DNA, 20 bp, Artificial Sequence
  chemically synthesized
accaagcatctttagtacct

SEQ ID NO: 35367 - DNA, 20 bp, Artificial Sequence
  chemically synthesized
ctttagtacctttctgcttg

SEQ ID NO: 35368 - DNA, 20 bp, Artificial Sequence
  chemically synthesized
tgtcagcagtgttgttattt

SEQ ID NO: 35369 - DNA, 20 bp, Artificial Sequence
  chemically synthesized
gttatttcaaggattaaaaa

SEQ ID NO: 35370 - DNA, 20 bp, Artificial Sequence
  chemically synthesized
ttaacattatttcaaatcaa

SEQ ID NO: 35371 - DNA, 20 bp, Artificial Sequence
  chemically synthesized
taggtaaatgggcatcctta

SEQ ID NO: 35372 - DNA, 20 bp, Artificial Sequence
  chemically synthesized
tttacctttgtaatttgcca

SEQ ID NO: 35373 - DNA, 20 bp, Artificial Sequence
  chemically synthesized
atgtgctcctagagaccaaa

SEQ ID NO: 35374 - DNA, 20 bp, Artificial Sequence
  chemically synthesized
aacatcagactgtatttcta

SEQ ID NO: 35375 - DNA, 20 bp, Artificial Sequence
  chemically synthesized
gggttcattggaatttgtct

SEQ ID NO: 35376 - DNA, 20 bp, Artificial Sequence
  chemically synthesized
catttttaaaacatttcagc

SEQ ID NO: 35377 - DNA, 20 bp, Artificial Sequence
  chemically synthesized
attgagttaggttggcaagg

SEQ ID NO: 35378 - DNA, 20 bp, Artificial Sequence
  chemically synthesized
ctgatcccagcagggaatag

SEQ ID NO: 35379 - DNA, 20 bp, Artificial Sequence
  chemically synthesized
cagatgcggagctggaatat

SEQ ID NO: 35380 - DNA, 20 bp, Artificial Sequence
  chemically synthesized
ccataataaagctgtacaca

SEQ ID NO: 35381 - DNA, 20 bp, Artificial Sequence
  chemically synthesized
tggaaaaatgctcgatatgc

SEQ ID NO: 35382 - DNA, 20 bp, Artificial Sequence
  chemically synthesized
gtatggagaaatgcaacata

SEQ ID NO: 35383 - DNA, 20 bp, Artificial Sequence
  chemically synthesized
tgtttcatatggttaattac

SEQ ID NO: 35384 - DNA, 20 bp, Artificial Sequence
  chemically synthesized
aaattttaaatagccacagt

SEQ ID NO: 35385 - DNA, 20 bp, Artificial Sequence
  chemically synthesized
cagcttttcccgttaaaagt

SEQ ID NO: 35386 - DNA, 20 bp, Artificial Sequence
  chemically synthesized
gagtacagtgtaaatatttg

SEQ ID NO: 35387 - DNA, 20 bp, Artificial Sequence
  chemically synthesized
gagagagagagagagagaca

SEQ ID NO: 35388 - DNA, 20 bp, Artificial Sequence
  chemically synthesized
ccattatatttttgagtcca

SEQ ID NO: 35389 - DNA, 20 bp, Artificial Sequence
  chemically synthesized
atttttgagtccacattgct

SEQ ID NO: 35390 - DNA, 20 bp, Artificial Sequence
  chemically synthesized
cacattgcttgaggttttaa

SEQ ID NO: 35391 - DNA, 20 bp, Artificial Sequence
  chemically synthesized
caaaacgtataaagaaaaat

SEQ ID NO: 35392 - DNA, 20 bp, Artificial Sequence
  chemically synthesized
ctgctaagaactggcgaatt

SEQ ID NO: 35393 - DNA, 20 bp, Artificial Sequence
  chemically synthesized
ggatctgatgcaatgctgct

SEQ ID NO: 35394 - DNA, 20 bp, Artificial Sequence
  chemically synthesized
cctctaaggcaacgcgcagt

SEQ ID NO: 35395 - DNA, 20 bp, Artificial Sequence
  chemically synthesized
tatacctaaaggtgagatga

SEQ ID NO: 35396 - DNA, 20 bp, Artificial Sequence
  chemically synthesized
gggacctttggtcactcaca

SEQ ID NO: 35397 - DNA, 20 bp, Artificial Sequence
  chemically synthesized
tttggtcactcacaatgagt

SEQ ID NO: 35398 - DNA, 20 bp, Artificial Sequence
  chemically synthesized
aatgaacaattgcacctaca

SEQ ID NO: 35399 - DNA, 20 bp, Artificial Sequence
  chemically synthesized
aattgcacctacaatttgat

SEQ ID NO: 35400 - DNA, 20 bp, Artificial Sequence
  chemically synthesized
gttttagatagaggcgaatc

SEQ ID NO: 35401 - DNA, 20 bp, Artificial Sequence
  chemically synthesized
tatacctacctcgcctttct

SEQ ID NO: 35402 - DNA, 20 bp, Artificial Sequence
  chemically synthesized
gaactttctaaaaaacacaa

SEQ ID NO: 35403 - DNA, 20 bp, Artificial Sequence
  chemically synthesized
taatttttagggaaataaag

SEQ ID NO: 35404 - DNA, 20 bp, Artificial Sequence
  chemically synthesized
tttagggaaataaagtgtag

SEQ ID NO: 35405 - DNA, 20 bp, Artificial Sequence
  chemically synthesized
gttcctgtacattttaaata

SEQ ID NO: 35406 - DNA, 20 bp, Artificial Sequence
  chemically synthesized
cttcaccaactcaaggtata

SEQ ID NO: 35407 - DNA, 20 bp, Artificial Sequence
  chemically synthesized
actcaaggtataccatgatt

SEQ ID NO: 35408 - DNA, 20 bp, Artificial Sequence
  chemically synthesized
aactcccctgccccgatcct

SEQ ID NO: 35409 - DNA, 20 bp, Artificial Sequence
  chemically synthesized
aatgttaaatcttaaatctc

SEQ ID NO: 35410 - DNA, 20 bp, Artificial Sequence
  chemically synthesized
actgaacattggctactgaa

SEQ ID NO: 35411 - DNA, 20 bp, Artificial Sequence
  chemically synthesized
taaatcgtaaccttctcatg

SEQ ID NO: 35412 - DNA, 20 bp, Artificial Sequence
  chemically synthesized
ccttttaactaaaacatttg

SEQ ID NO: 35413 - DNA, 20 bp, Artificial Sequence
  chemically synthesized
aaaatcttattctacataca

SEQ ID NO: 35414 - DNA, 20 bp, Artificial Sequence
  chemically synthesized
tcttattctacatacaagtg

SEQ ID NO: 35415 - DNA, 20 bp, Artificial Sequence
  chemically synthesized
acaagtcagcacagacacgt

SEQ ID NO: 35416 - DNA, 20 bp, Artificial Sequence
  chemically synthesized
attgttgttggacctgtctt

SEQ ID NO: 35417 - DNA, 20 bp, Artificial Sequence
  chemically synthesized
ctgggtccccctcccctcct

SEQ ID NO: 35418 - DNA, 20 bp, Artificial Sequence
  chemically synthesized
gtatttaaagaggaatatct

SEQ ID NO: 35419 - DNA, 20 bp, Artificial Sequence
  chemically synthesized
gcattccactttactttctg

SEQ ID NO: 35420 - DNA, 20 bp, Artificial Sequence
  chemically synthesized
catttgctctgtagtgtagc

SEQ ID NO: 35421 - DNA, 20 bp, Artificial Sequence
  chemically synthesized
tgtagcattggtttctaaac

SEQ ID NO: 35422 - DNA, 20 bp, Artificial Sequence
  chemically synthesized
aacttttgtttttaatctaa

SEQ ID NO: 35423 - DNA, 20 bp, Artificial Sequence
  chemically synthesized
aagaaatcagggggtagtac

SEQ ID NO: 35424 - DNA, 20 bp, Artificial Sequence
  chemically synthesized
gagatttttctcccttctct

SEQ ID NO: 35425 - DNA, 20 bp, Artificial Sequence
  chemically synthesized
caaatgaaatccccacagca

SEQ ID NO: 35426 - DNA, 20 bp, Artificial Sequence
  chemically synthesized
ataggacttaacatatactt

SEQ ID NO: 35427 - DNA, 20 bp, Artificial Sequence
  chemically synthesized
gtgtgagttagcattcaagc

SEQ ID NO: 35428 - DNA, 20 bp, Artificial Sequence
  chemically synthesized
tgtctgcatgacccgttcac

SEQ ID NO: 35429 - DNA, 20 bp, Artificial Sequence
  chemically synthesized
agaaaggcaaatctcaagca

SEQ ID NO: 35430 - DNA, 20 bp, Artificial Sequence
  chemically synthesized
agaccttgctcctctccctc

SEQ ID NO: 35431 - DNA, 20 bp, Artificial Sequence
  chemically synthesized
tcctgtgcttctcctttctt

SEQ ID NO: 35432 - DNA, 20 bp, Artificial Sequence
  chemically synthesized
ccactccaagccaatgaaaa

SEQ ID NO: 35433 - DNA, 20 bp, Artificial Sequence
  chemically synthesized
agctgtttttataccacagt

SEQ ID NO: 35434 - DNA, 20 bp, Artificial Sequence
  chemically synthesized
gagagacaacttgaggggga

SEQ ID NO: 35435 - DNA, 20 bp, Artificial Sequence
  chemically synthesized
attgcctatgagcgactctg

SEQ ID NO: 35436 - DNA, 20 bp, Artificial Sequence
  chemically synthesized
gggctgtttttgataaatta

SEQ ID NO: 35437 - DNA, 20 bp, Artificial Sequence
  chemically synthesized
ataaattaccatgtttagag

SEQ ID NO: 35438 - DNA, 20 bp, Artificial Sequence
  chemically synthesized
tagagataggtttggctctt

SEQ ID NO: 35439 - DNA, 20 bp, Artificial Sequence
  chemically synthesized
ataggtttggctcttaaggg

SEQ ID NO: 35440 - DNA, 20 bp, Artificial Sequence
  chemically synthesized
tttatgaacaaagtccgtga

SEQ ID NO: 35441 - DNA, 20 bp, Artificial Sequence
  chemically synthesized
tccgtgacgatgtttgcagc

SEQ ID NO: 35442 - DNA, 20 bp, Artificial Sequence
  chemically synthesized
tctgtttgtatcttagcccc

SEQ ID NO: 35443 - DNA, 20 bp, Artificial Sequence
  chemically synthesized
ctttggcttgactagaagct

SEQ ID NO: 35444 - DNA, 20 bp, Artificial Sequence
  chemically synthesized
gcttgactagaagctctatg

SEQ ID NO: 35445 - DNA, 20 bp, Artificial Sequence
  chemically synthesized
aaatcataggaagaaaaacc

SEQ ID NO: 35446 - DNA, 20 bp, Artificial Sequence
  chemically synthesized
tctttaatcttcaaaggcta

SEQ ID NO: 35447 - DNA, 20 bp, Artificial Sequence
  chemically synthesized
aggtccttccagtaattgcg

SEQ ID NO: 35448 - DNA, 20 bp, Artificial Sequence
  chemically synthesized
aattgcgaattgttttgcat

SEQ ID NO: 35449 - DNA, 20 bp, Artificial Sequence
  chemically synthesized
aaggagaaaaaaaaggtgaa

SEQ ID NO: 35450 - DNA, 20 bp, Artificial Sequence
  chemically synthesized
ggtgaaaattgtttatagca

SEQ ID NO: 35451 - DNA, 20 bp, Artificial Sequence
  chemically synthesized
ttgtttatagcaccaagatt

SEQ ID NO: 35452 - DNA, 20 bp, Artificial Sequence
  chemically synthesized
atgatgtaaaaaaattaaag

SEQ ID NO: 35453 - DNA, 20 bp, Artificial Sequence
  chemically synthesized
taaagcagtgttttttcttc

SEQ ID NO: 35454 - DNA, 20 bp, Artificial Sequence
  chemically synthesized
ctcaagattaaaagttcacc

SEQ ID NO: 35455 - DNA, 20 bp, Artificial Sequence
  chemically synthesized
ctgttgttaatcacttttga

SEQ ID NO: 35456 - DNA, 20 bp, Artificial Sequence
  chemically synthesized
caaaatgatgcatcttcttg

SEQ ID NO: 35457 - DNA, 20 bp, Artificial Sequence
  chemically synthesized
gtctaaccttgagtaattac

SEQ ID NO: 35458 - DNA, 20 bp, Artificial Sequence
  chemically synthesized
tgagtaattacatatgtttt

SEQ ID NO: 35459 - DNA, 20 bp, Artificial Sequence
  chemically synthesized
cgttttcttttaacgttaag

SEQ ID NO: 35460 - DNA, 20 bp, Artificial Sequence
  chemically synthesized
gaagactgtaaaatttaagt

SEQ ID NO: 35461 - DNA, 20 bp, Artificial Sequence
  chemically synthesized
tacatagagaaatatgtatt

SEQ ID NO: 35462 - DNA, 20 bp, Artificial Sequence
  chemically synthesized
gttccccacgaacattgcag

SEQ ID NO: 35463 - DNA, 20 bp, Artificial Sequence
  chemically synthesized
tgcagggcagttttattgtt

SEQ ID NO: 35464 - DNA, 20 bp, Artificial Sequence
  chemically synthesized
agaactacaaacctttctaa

SEQ ID NO: 35465 - DNA, 20 bp, Artificial Sequence
  chemically synthesized
caaacctttctaacaatgct

SEQ ID NO: 35466 - DNA, 20 bp, Artificial Sequence
  chemically synthesized
ggcacctaaaggacttgggc

SEQ ID NO: 35467 - DNA, 20 bp, Artificial Sequence
  chemically synthesized
tcttttatcttttagatcaa

SEQ ID NO: 35468 - DNA, 20 bp, Artificial Sequence
  chemically synthesized
gtgaaaacaaggtgctaact

SEQ ID NO: 35469 - DNA, 20 bp, Artificial Sequence
  chemically synthesized
acaaggtgctaactaacggt

SEQ ID NO: 35470 - DNA, 20 bp, Artificial Sequence
  chemically synthesized
ggtttccgatttttgagagc

SEQ ID NO: 35471 - DNA, 20 bp, Artificial Sequence
  chemically synthesized
tttttgagagcctgtgattt

SEQ ID NO: 35472 - DNA, 20 bp, Artificial Sequence
  chemically synthesized
ctgtattattgatgttcatc

SEQ ID NO: 35473 - DNA, 20 bp, Artificial Sequence
  chemically synthesized
ttgatgttcatctttggttt

SEQ ID NO: 35474 - DNA, 20 bp, Artificial Sequence
  chemically synthesized
tcagaacagtgtaactgata

SEQ ID NO: 35475 - DNA, 20 bp, Artificial Sequence
  chemically synthesized
actgatattctgattaaaac

SEQ ID NO: 35476 - DNA, 20 bp, Artificial Sequence
  chemically synthesized
ccatccataccatgctaaaa

SEQ ID NO: 35477 - DNA, 20 bp, Artificial Sequence
  chemically synthesized
ataccatgctaaaagcatgc

SEQ ID NO: 35478 - DNA, 20 bp, Artificial Sequence
  chemically synthesized
ggggtccatctgtgagatcc

SEQ ID NO: 35479 - DNA, 20 bp, Artificial Sequence
  chemically synthesized
gctttttatttgtgtgtgtc

SEQ ID NO: 35480 - DNA, 20 bp, Artificial Sequence
  chemically synthesized
ctccggccaactgcatgcat

SEQ ID NO: 35481 - DNA, 20 bp, Artificial Sequence
  chemically synthesized
cactatcattttcttgatgt

SEQ ID NO: 35482 - DNA, 20 bp, Artificial Sequence
  chemically synthesized
aagcaacactaacttatgca

SEQ ID NO: 35483 - DNA, 20 bp, Artificial Sequence
  chemically synthesized
ccttattattcagtctatcc

SEQ ID NO: 35484 - DNA, 20 bp, Artificial Sequence
  chemically synthesized
ctatccaggagttttgccat

SEQ ID NO: 35485 - DNA, 20 bp, Artificial Sequence
  chemically synthesized
cacagccctagaagcagcaa

SEQ ID NO: 35486 - DNA, 20 bp, Artificial Sequence
  chemically synthesized
aaaacgtgagcatggaggag

SEQ ID NO: 35487 - DNA, 20 bp, Artificial Sequence
  chemically synthesized
agtcaaaagtgactggaaac

SEQ ID NO: 35488 - DNA, 20 bp, Artificial Sequence
  chemically synthesized
tggagtacaaatttcattct

SEQ ID NO: 35489 - DNA, 20 bp, Artificial Sequence
  chemically synthesized
gcataatctagtgtacccag

SEQ ID NO: 35490 - DNA, 20 bp, Artificial Sequence
  chemically synthesized
cattagctccttcaaaatca

SEQ ID NO: 35491 - DNA, 20 bp, Artificial Sequence
  chemically synthesized
ggaatttacagatggtgaaa

SEQ ID NO: 35492 - DNA, 20 bp, Artificial Sequence
  chemically synthesized
ttgttttaatccaaaccagt

SEQ ID NO: 35493 - DNA, 20 bp, Artificial Sequence
  chemically synthesized
atctacctttaaaaaaattg

SEQ ID NO: 35494 - DNA, 20 bp, Artificial Sequence
  chemically synthesized
gaatccatctcactgtggca

SEQ ID NO: 35495 - DNA, 20 bp, Artificial Sequence
  chemically synthesized
taaaaaactggaaatgacag

SEQ ID NO: 35496 - DNA, 20 bp, Artificial Sequence
  chemically synthesized
tctcaaaatttgaagaactt

SEQ ID NO: 35497 - DNA, 20 bp, Artificial Sequence
  chemically synthesized
caaatttcttcctgatctta

SEQ ID NO: 35498 - DNA, 20 bp, Artificial Sequence
  chemically synthesized
ttcttcctgatcttaattag

SEQ ID NO: 35499 - DNA, 20 bp, Artificial Sequence
  chemically synthesized
ttcgattgtgcggtgggtgt

SEQ ID NO: 35500 - DNA, 20 bp, Artificial Sequence
  chemically synthesized
ggcggtgtggcaggaacaaa

SEQ ID NO: 35501 - DNA, 20 bp, Artificial Sequence
  chemically synthesized
aggcagcttccaacgctggt

SEQ ID NO: 35502 - DNA, 20 bp, Artificial Sequence
  chemically synthesized
gtcttgagttcttcatttag

SEQ ID NO: 35503 - DNA, 20 bp, Artificial Sequence
  chemically synthesized
gcttatttcccactgggtct

SEQ ID NO: 35504 - DNA, 20 bp, Artificial Sequence
  chemically synthesized
ggcactgccaaaacacgctc

SEQ ID NO: 35505 - DNA, 20 bp, Artificial Sequence
  chemically synthesized
gtcctgccaaagtgtatgga

SEQ ID NO: 35506 - DNA, 20 bp, Artificial Sequence
  chemically synthesized
gaaataataaaagccctggc

SEQ ID NO: 35507 - DNA, 20 bp, Artificial Sequence
  chemically synthesized
gccaaggcttatgaatctat

SEQ ID NO: 35508 - DNA, 20 bp, Artificial Sequence
  chemically synthesized
ttccgtactggttgtaaaaa

SEQ ID NO: 35509 - DNA, 20 bp, Artificial Sequence
  chemically synthesized
aagtcagggtaaattaatgg

SEQ ID NO: 35510 - DNA, 20 bp, Artificial Sequence
  chemically synthesized
tcccagtatttaatttattt

SEQ ID NO: 35511 - DNA, 20 bp, Artificial Sequence
  chemically synthesized
gtgttagtgtgagagggtcg

SEQ ID NO: 35512 - DNA, 20 bp, Artificial Sequence
  chemically synthesized
gaaaagattctgtgggtcca

SEQ ID NO: 35513 - DNA, 20 bp, Artificial Sequence
  chemically synthesized
taatttctgaggttgccagg

SEQ ID NO: 35514 - DNA, 20 bp, Artificial Sequence
  chemically synthesized
cctggccatggtgtagccag

SEQ ID NO: 35515 - DNA, 20 bp, Artificial Sequence
  chemically synthesized
actggtttagcagacagaat

SEQ ID NO: 35516 - DNA, 20 bp, Artificial Sequence
  chemically synthesized
gtttagcagacagaatgata

SEQ ID NO: 35517 - DNA, 20 bp, Artificial Sequence
  chemically synthesized
tgcgccctgaacttgaagca

SEQ ID NO: 35518 - DNA, 20 bp, Artificial Sequence
  chemically synthesized
aagcgcagacataatcgatg

SEQ ID NO: 35519 - DNA, 20 bp, Artificial Sequence
  chemically synthesized
cagatgaacttggccgaggg

SEQ ID NO: 35520 - DNA, 20 bp, Artificial Sequence
  chemically synthesized
ccagtgcagccaagcctttt

SEQ ID NO: 35521 - DNA, 20 bp, Artificial Sequence
  chemically synthesized
atgcgggttctatcatcttt

SEQ ID NO: 35522 - DNA, 20 bp, Artificial Sequence
  chemically synthesized
taacccgagggccagatggg

SEQ ID NO: 35523 - DNA, 20 bp, Artificial Sequence
  chemically synthesized
tttttttttttttaaatggc

SEQ ID NO: 35524 - DNA, 20 bp, Artificial Sequence
  chemically synthesized
ccaggaccgatggcaaaccc

SEQ ID NO: 35525 - DNA, 20 bp, Artificial Sequence
  chemically synthesized
ccgatggcaaacccatgtgt

SEQ ID NO: 35526 - DNA, 20 bp, Artificial Sequence
  chemically synthesized
tggcaaacccatgtgtttgg

SEQ ID NO: 35527 - DNA, 20 bp, Artificial Sequence
  chemically synthesized
tgtgtttgggcttgttttgt

SEQ ID NO: 35528 - DNA, 20 bp, Artificial Sequence
  chemically synthesized
cttatcttcttggcctcttc

SEQ ID NO: 35529 - DNA, 20 bp, Artificial Sequence
  chemically synthesized
cttggcctcttcctgtgttt

SEQ ID NO: 35530 - DNA, 20 bp, Artificial Sequence
  chemically synthesized
gaatcccacctaggggacac

SEQ ID NO: 35531 - DNA, 20 bp, Artificial Sequence
  chemically synthesized
aggggacaccagggctttca

SEQ ID NO: 35532 - DNA, 20 bp, Artificial Sequence
  chemically synthesized
ggctaggcctcataagggag

SEQ ID NO: 35533 - DNA, 20 bp, Artificial Sequence
  chemically synthesized
ctgggaaaatttgggggcct

SEQ ID NO: 35534 - DNA, 20 bp, Artificial Sequence
  chemically synthesized
cttctttcttttcttcttct

SEQ ID NO: 35535 - DNA, 20 bp, Artificial Sequence
  chemically synthesized
tctttgattacacgaaataa

SEQ ID NO: 35536 - DNA, 20 bp, Artificial Sequence
  chemically synthesized
tttctagttgtgcaaccttg

SEQ ID NO: 35537 - DNA, 20 bp, Artificial Sequence
  chemically synthesized
gcagatttcattccctaagc

SEQ ID NO: 35538 - DNA, 20 bp, Artificial Sequence
  chemically synthesized
ctgtaaagtggggagaatca

SEQ ID NO: 35539 - DNA, 20 bp, Artificial Sequence
  chemically synthesized
ttactattacggttatgact

SEQ ID NO: 35540 - DNA, 20 bp, Artificial Sequence
  chemically synthesized
ctaaagagctcagggtctca

SEQ ID NO: 35541 - DNA, 20 bp, Artificial Sequence
  chemically synthesized
tagacgtgtgttgccttacg

SEQ ID NO: 35542 - DNA, 20 bp, Artificial Sequence
  chemically synthesized
tgtgacacagttactctggg

SEQ ID NO: 35543 - DNA, 20 bp, Artificial Sequence
  chemically synthesized
caccctctgctacctcttca

SEQ ID NO: 35544 - DNA, 20 bp, Artificial Sequence
  chemically synthesized
tgctacctcttcagtacgtt

SEQ ID NO: 35545 - DNA, 20 bp, Artificial Sequence
  chemically synthesized
ccctcccatgggttctgtgg

SEQ ID NO: 35546 - DNA, 20 bp, Artificial Sequence
  chemically synthesized
aaaagttgcaatgtaaggaa

SEQ ID NO: 35547 - DNA, 20 bp, Artificial Sequence
  chemically synthesized
ggtcctgagaaacagaggga

SEQ ID NO: 35548 - DNA, 20 bp, Artificial Sequence
  chemically synthesized
gaaacagagggaggaggttt

SEQ ID NO: 35549 - DNA, 20 bp, Artificial Sequence
  chemically synthesized
aggaggttttactgtttgtg

SEQ ID NO: 35550 - DNA, 20 bp, Artificial Sequence
  chemically synthesized
ctcggacttttaagaagtgg

SEQ ID NO: 35551 - DNA, 20 bp, Artificial Sequence
  chemically synthesized
tgagtgagtgtgcgtggcag

SEQ ID NO: 35552 - DNA, 20 bp, Artificial Sequence
  chemically synthesized
atgggttctggggggtcata

SEQ ID NO: 35553 - DNA, 20 bp, Artificial Sequence
  chemically synthesized
ggggtcataatctgcttcga

SEQ ID NO: 35554 - DNA, 20 bp, Artificial Sequence
  chemically synthesized
aggcatgctggaaacttgag

SEQ ID NO: 35555 - DNA, 20 bp, Artificial Sequence
  chemically synthesized
acagctccatatgatccgca

SEQ ID NO: 35556 - DNA, 20 bp, Artificial Sequence
  chemically synthesized
cgcatgtggcttccccagag

SEQ ID NO: 35557 - DNA, 20 bp, Artificial Sequence
  chemically synthesized
aagacctgaggttcgttgca

SEQ ID NO: 35558 - DNA, 20 bp, Artificial Sequence
  chemically synthesized
tgtattccaaaaccaaatgt

SEQ ID NO: 35559 - DNA, 20 bp, Artificial Sequence
  chemically synthesized
ggtcacatccaggttgtctt

SEQ ID NO: 35560 - DNA, 20 bp, Artificial Sequence
  chemically synthesized
tccatgtgggtcaagagctc

SEQ ID NO: 35561 - DNA, 20 bp, Artificial Sequence
  chemically synthesized
gtcaccctggaagagaagct

SEQ ID NO: 35562 - DNA, 20 bp, Artificial Sequence
  chemically synthesized
tgaaatgataaaaggcgtat

SEQ ID NO: 35563 - DNA, 20 bp, Artificial Sequence
  chemically synthesized
tatttccctcgctcgcaccc

SEQ ID NO: 35564 - DNA, 20 bp, Artificial Sequence
  chemically synthesized
ccacatctctgatgatggcc

SEQ ID NO: 35565 - DNA, 20 bp, Artificial Sequence
  chemically synthesized
ccttttgtttctttttcttt

SEQ ID NO: 35566 - DNA, 20 bp, Artificial Sequence
  chemically synthesized
cgggtagtatttctacttca

SEQ ID NO: 35567 - DNA, 20 bp, Artificial Sequence
  chemically synthesized
gttcctggtgctaagtagtt

SEQ ID NO: 35568 - DNA, 20 bp, Artificial Sequence
  chemically synthesized
ttaagaatgcgttggctggg

SEQ ID NO: 35569 - DNA, 20 bp, Artificial Sequence
  chemically synthesized
gcattataggtcagcccttt

SEQ ID NO: 35570 - DNA, 20 bp, Artificial Sequence
  chemically synthesized
acagttgtcatgtaatttat

SEQ ID NO: 35571 - DNA, 20 bp, Artificial Sequence
  chemically synthesized
gacatagacacactgcactt

SEQ ID NO: 35572 - DNA, 20 bp, Artificial Sequence
  chemically synthesized
cactgcacttgaaggcttgg

SEQ ID NO: 35573 - DNA, 20 bp, Artificial Sequence
  chemically synthesized
ttgggctaatctaaatgcgc

SEQ ID NO: 35574 - DNA, 20 bp, Artificial Sequence
  chemically synthesized
aatggtaaaggataaacata

SEQ ID NO: 35575 - DNA, 20 bp, Artificial Sequence
  chemically synthesized
taaaggataaacatatgctg

SEQ ID NO: 35576 - DNA, 20 bp, Artificial Sequence
  chemically synthesized
ctttgtttgtcttatttatt

SEQ ID NO: 35577 - DNA, 20 bp, Artificial Sequence
  chemically synthesized
agagcaaaatatagccaacc

SEQ ID NO: 35578 - DNA, 20 bp, Artificial Sequence
  chemically synthesized
agaacacatcatcccaaaat

SEQ ID NO: 35579 - DNA, 20 bp, Artificial Sequence
  chemically synthesized
attctgaatttgatcaaatc

SEQ ID NO: 35580 - DNA, 20 bp, Artificial Sequence
  chemically synthesized
agtttctgaatttgatcaaa

SEQ ID NO: 35581 - DNA, 20 bp, Artificial Sequence
  chemically synthesized
ttcagggtgagagaaaccat

SEQ ID NO: 35582 - DNA, 20 bp, Artificial Sequence
  chemically synthesized
agagcattatgataaactat

SEQ ID NO: 35583 - DNA, 20 bp, Artificial Sequence
  chemically synthesized
gccatggagaaattaccaag

SEQ ID NO: 35584 - DNA, 20 bp, Artificial Sequence
  chemically synthesized
atttaaggtcttttgggcat

SEQ ID NO: 35585 - DNA, 20 bp, Artificial Sequence
  chemically synthesized
gacccttattgtatcatgct

SEQ ID NO: 35586 - DNA, 20 bp, Artificial Sequence
  chemically synthesized
ggctcccttcacctgttagc

SEQ ID NO: 35587 - DNA, 20 bp, Artificial Sequence
  chemically synthesized
cttgtaaagtaggtaaaata

SEQ ID NO: 35588 - DNA, 20 bp, Artificial Sequence
  chemically synthesized
gcatagtatgaacaccactg

SEQ ID NO: 35589 - DNA, 20 bp, Artificial Sequence
  chemically synthesized
aagacagcagaatattattt

SEQ ID NO: 35590 - DNA, 20 bp, Artificial Sequence
  chemically synthesized
ctcaaagatggaagctatgg

SEQ ID NO: 35591 - DNA, 20 bp, Artificial Sequence
  chemically synthesized
atggaagctatggtggagat

SEQ ID NO: 35592 - DNA, 20 bp, Artificial Sequence
  chemically synthesized
agctatggtggagattaagg

SEQ ID NO: 35593 - DNA, 20 bp, Artificial Sequence
  chemically synthesized
gtggagattaaggcttggat

SEQ ID NO: 35594 - DNA, 20 bp, Artificial Sequence
  chemically synthesized
ggattcgtgattccccaaca

SEQ ID NO: 35595 - DNA, 20 bp, Artificial Sequence
  chemically synthesized
atggaatggtgataattcac

SEQ ID NO: 35596 - DNA, 20 bp, Artificial Sequence
  chemically synthesized
tcacagaagtttccagcctt

SEQ ID NO: 35597 - DNA, 20 bp, Artificial Sequence
  chemically synthesized
tccatcttttaattgttgca

SEQ ID NO: 35598 - DNA, 20 bp, Artificial Sequence
  chemically synthesized
gaatgtaatgtgtattttct

SEQ ID NO: 35599 - DNA, 20 bp, Artificial Sequence
  chemically synthesized
gtaatgtgtattttctccaa

SEQ ID NO: 35600 - DNA, 20 bp, Artificial Sequence
  chemically synthesized
gtaactacatcaaaatagaa

SEQ ID NO: 35601 - DNA, 20 bp, Artificial Sequence
  chemically synthesized
cctccttcctcctcccaaaa

SEQ ID NO: 35602 - DNA, 20 bp, Artificial Sequence
  chemically synthesized
gagtccctggagttaggaat

SEQ ID NO: 35603 - DNA, 20 bp, Artificial Sequence
  chemically synthesized
tgttaaaggcatccgatgca

SEQ ID NO: 35604 - DNA, 20 bp, Artificial Sequence
  chemically synthesized
tgcaatccattttttaaact

SEQ ID NO: 35605 - DNA, 20 bp, Artificial Sequence
  chemically synthesized
ttttaaacttggtgtttacc

SEQ ID NO: 35606 - DNA, 20 bp, Artificial Sequence
  chemically synthesized
ttaccattggcttttagcac

SEQ ID NO: 35607 - DNA, 20 bp, Artificial Sequence
  chemically synthesized
ttggcttttagcacggatgt

SEQ ID NO: 35608 - DNA, 20 bp, Artificial Sequence
  chemically synthesized
gtggcattgaatgagatatg

SEQ ID NO: 35609 - DNA, 20 bp, Artificial Sequence
  chemically synthesized
acacaggcactcttgagatc

SEQ ID NO: 35610 - DNA, 20 bp, Artificial Sequence
  chemically synthesized
attactgcctctttaattta

SEQ ID NO: 35611 - DNA, 20 bp, Artificial Sequence
  chemically synthesized
ctctttaatttataatgttt

SEQ ID NO: 35612 - DNA, 20 bp, Artificial Sequence
  chemically synthesized
ctgtaagggcactggtaatc

SEQ ID NO: 35613 - DNA, 20 bp, Artificial Sequence
  chemically synthesized
gggcactggtaatcagctgt

SEQ ID NO: 35614 - DNA, 20 bp, Artificial Sequence
  chemically synthesized
aaaaacaaaaacaaggaaca

SEQ ID NO: 35615 - DNA, 20 bp, Artificial Sequence
  chemically synthesized
caaaattatgtattcagaca

SEQ ID NO: 35616 - DNA, 20 bp, Artificial Sequence
  chemically synthesized
tatgtattcagacatgaagt

SEQ ID NO: 35617 - DNA, 20 bp, Artificial Sequence
  chemically synthesized
agctgtgtcacaatgtgata

SEQ ID NO: 35618 - DNA, 20 bp, Artificial Sequence
  chemically synthesized
attatatttaccatggcata

SEQ ID NO: 35619 - DNA, 20 bp, Artificial Sequence
  chemically synthesized
gatgataaatgaagataccc

SEQ ID NO: 35620 - DNA, 20 bp, Artificial Sequence
  chemically synthesized
tatgggaacataattgactt

SEQ ID NO: 35621 - DNA, 20 bp, Artificial Sequence
  chemically synthesized
caaagttttagatctctggc

SEQ ID NO: 35622 - DNA, 20 bp, Artificial Sequence
  chemically synthesized
atagtccattacattaatgt

SEQ ID NO: 35623 - DNA, 20 bp, Artificial Sequence
  chemically synthesized
gtctgtgcttaaagctccta

SEQ ID NO: 35624 - DNA, 20 bp, Artificial Sequence
  chemically synthesized
tttggcttaaataaattatt

SEQ ID NO: 35625 - DNA, 20 bp, Artificial Sequence
  chemically synthesized
taaataaattatttagggtt

SEQ ID NO: 35626 - DNA, 20 bp, Artificial Sequence
  chemically synthesized
ttaaaccttggtcaattctt

SEQ ID NO: 35627 - DNA, 20 bp, Artificial Sequence
  chemically synthesized
tccagtgactttctgtgcct

SEQ ID NO: 35628 - DNA, 20 bp, Artificial Sequence
  chemically synthesized
tgtgccttggtgattcattt

SEQ ID NO: 35629 - DNA, 20 bp, Artificial Sequence
  chemically synthesized
gattgagctcctgtgtgctc

SEQ ID NO: 35630 - DNA, 20 bp, Artificial Sequence
  chemically synthesized
atgatttctaaatgtatttc

SEQ ID NO: 35631 - DNA, 20 bp, Artificial Sequence
  chemically synthesized
ctcaagttttgcctggcaat

SEQ ID NO: 35632 - DNA, 20 bp, Artificial Sequence
  chemically synthesized
ttttgcctggcaatgaatga

SEQ ID NO: 35633 - DNA, 20 bp, Artificial Sequence
  chemically synthesized
tcttgtgtggtacacctata

SEQ ID NO: 35634 - DNA, 20 bp, Artificial Sequence
  chemically synthesized
aggaaagtctttagaattca

SEQ ID NO: 35635 - DNA, 20 bp, Artificial Sequence
  chemically synthesized
tgattccatcaaatcaatat

SEQ ID NO: 35636 - DNA, 20 bp, Artificial Sequence
  chemically synthesized
aagtctgttgttcacatagc

SEQ ID NO: 35637 - DNA, 20 bp, Artificial Sequence
  chemically synthesized
ctcccctgagttgagaagac

SEQ ID NO: 35638 - DNA, 20 bp, Artificial Sequence
  chemically synthesized
cctgaaagatattaagtcca

SEQ ID NO: 35639 - DNA, 20 bp, Artificial Sequence
  chemically synthesized
agagaaaacggccaggcaat

SEQ ID NO: 35640 - DNA, 20 bp, Artificial Sequence
  chemically synthesized
ctagttccagaggctgatca

SEQ ID NO: 35641 - DNA, 20 bp, Artificial Sequence
  chemically synthesized
gttctgaacactgggagtgc

SEQ ID NO: 35642 - DNA, 20 bp, Artificial Sequence
  chemically synthesized
ggcaaaggactgcaaggggc

SEQ ID NO: 35643 - DNA, 20 bp, Artificial Sequence
  chemically synthesized
gagcttgggctgacatgcaa

SEQ ID NO: 35644 - DNA, 20 bp, Artificial Sequence
  chemically synthesized
cacaaggccctttttagaga

SEQ ID NO: 35645 - DNA, 20 bp, Artificial Sequence
  chemically synthesized
ttttagagagtgtgattctc

SEQ ID NO: 35646 - DNA, 20 bp, Artificial Sequence
  chemically synthesized
gattctctgaagcttttctt

SEQ ID NO: 35647 - DNA, 20 bp, Artificial Sequence
  chemically synthesized
ccagatggaaagaagtattt

SEQ ID NO: 35648 - DNA, 20 bp, Artificial Sequence
  chemically synthesized
ttattatttttaggtgtgat

SEQ ID NO: 35649 - DNA, 20 bp, Artificial Sequence
  chemically synthesized
aaaagaaaaaaaacgagttc

SEQ ID NO: 35650 - DNA, 20 bp, Artificial Sequence
  chemically synthesized
tgtttaaaaaatacatacag

SEQ ID NO: 35651 - DNA, 20 bp, Artificial Sequence
  chemically synthesized
ctggaagatgtggacttggg

SEQ ID NO: 35652 - DNA, 20 bp, Artificial Sequence
  chemically synthesized
tctctctacttttgtagtat

SEQ ID NO: 35653 - DNA, 20 bp, Artificial Sequence
  chemically synthesized
actggtggagagcagtatgg

SEQ ID NO: 35654 - DNA, 20 bp, Artificial Sequence
  chemically synthesized
gtatggccttgtttagtcgg

SEQ ID NO: 35655 - DNA, 20 bp, Artificial Sequence
  chemically synthesized
gtcggtgttgtttcttcacc

SEQ ID NO: 35656 - DNA, 20 bp, Artificial Sequence
  chemically synthesized
gcatgaggcagagtcagatg

SEQ ID NO: 35657 - DNA, 20 bp, Artificial Sequence
  chemically synthesized
gaggcagagtcagatgtggc

SEQ ID NO: 35658 - DNA, 20 bp, Artificial Sequence
  chemically synthesized
gagtcagatgtggcgtttgc

SEQ ID NO: 35659 - DNA, 20 bp, Artificial Sequence
  chemically synthesized
ggctggtagtgttatgaaga

SEQ ID NO: 35660 - DNA, 20 bp, Artificial Sequence
  chemically synthesized
gagccctggctattagagaa

SEQ ID NO: 35661 - DNA, 20 bp, Artificial Sequence
  chemically synthesized
agaaagatgatttgcctgag

SEQ ID NO: 35662 - DNA, 20 bp, Artificial Sequence
  chemically synthesized
acttgaaagctaggtcactg

SEQ ID NO: 35663 - DNA, 20 bp, Artificial Sequence
  chemically synthesized
caggcccaggcccgggtccc

SEQ ID NO: 35664 - DNA, 20 bp, Artificial Sequence
  chemically synthesized
tttacaaaatgtccgctctc

SEQ ID NO: 35665 - DNA, 20 bp, Artificial Sequence
  chemically synthesized
gtcactcagttatctgagag

SEQ ID NO: 35666 - DNA, 20 bp, Artificial Sequence
  chemically synthesized
gccatctaagtgcctgatac

SEQ ID NO: 35667 - DNA, 20 bp, Artificial Sequence
  chemically synthesized
tgcctgatacttgggtttac

SEQ ID NO: 35668 - DNA, 20 bp, Artificial Sequence
  chemically synthesized
cagattaaattaaattttag

SEQ ID NO: 35669 - DNA, 20 bp, Artificial Sequence
  chemically synthesized
taaattaaattttaggctgg

SEQ ID NO: 35670 - DNA, 20 bp, Artificial Sequence
  chemically synthesized
gaaatgtaacctggcaccct

SEQ ID NO: 35671 - DNA, 20 bp, Artificial Sequence
  chemically synthesized
ccatttcatccctttccaaa

SEQ ID NO: 35672 - DNA, 20 bp, Artificial Sequence
  chemically synthesized
ttccaaaaagtgtttagaca

SEQ ID NO: 35673 - DNA, 20 bp, Artificial Sequence
  chemically synthesized
tagacaaatagtttcccaga

SEQ ID NO: 35674 - DNA, 20 bp, Artificial Sequence
  chemically synthesized
ttttttctgcaaagaagggg

SEQ ID NO: 35675 - DNA, 20 bp, Artificial Sequence
  chemically synthesized
acccactggagaagggcatg

SEQ ID NO: 35676 - DNA, 20 bp, Artificial Sequence
  chemically synthesized
gcagaatgtctggctgcccc

SEQ ID NO: 35677 - DNA, 20 bp, Artificial Sequence
  chemically synthesized
tggctgccccttcagattcc

SEQ ID NO: 35678 - DNA, 20 bp, Artificial Sequence
  chemically synthesized
gcaaatatcttcactctcct

SEQ ID NO: 35679 - DNA, 20 bp, Artificial Sequence
  chemically synthesized
atagtgttgagtcagagcaa

SEQ ID NO: 35680 - DNA, 20 bp, Artificial Sequence
  chemically synthesized
gatgctctttacttttataa

SEQ ID NO: 35681 - DNA, 20 bp, Artificial Sequence
  chemically synthesized
attttaaaaaatttggtggc

SEQ ID NO: 35682 - DNA, 20 bp, Artificial Sequence
  chemically synthesized
cagactccagaatttatact

SEQ ID NO: 35683 - DNA, 20 bp, Artificial Sequence
  chemically synthesized
gtaatgcattatgcaaataa

SEQ ID NO: 35684 - DNA, 20 bp, Artificial Sequence
  chemically synthesized
attcagtttacatatccaaa

SEQ ID NO: 35685 - DNA, 20 bp, Artificial Sequence
  chemically synthesized
atgtcttgaaaaaaaaagtg

SEQ ID NO: 35686 - DNA, 20 bp, Artificial Sequence
  chemically synthesized
aaaataaacaaaacctgcag

SEQ ID NO: 35687 - DNA, 20 bp, Artificial Sequence
  chemically synthesized
ataaataattttgcaattat

SEQ ID NO: 35688 - DNA, 20 bp, Artificial Sequence
  chemically synthesized
gcaaggtatattctattatc

SEQ ID NO: 35689 - DNA, 20 bp, Artificial Sequence
  chemically synthesized
ttatttgaagaggatacaat

SEQ ID NO: 35690 - DNA, 20 bp, Artificial Sequence
  chemically synthesized
acaataattgcttgccagtg

SEQ ID NO: 35691 - DNA, 20 bp, Artificial Sequence
  chemically synthesized
atagccatgaattcctgagt

SEQ ID NO: 35692 - DNA, 20 bp, Artificial Sequence
  chemically synthesized
aaacgatctctttgtcttca

SEQ ID NO: 35693 - DNA, 20 bp, Artificial Sequence
  chemically synthesized
agaactggcctcagaaatct

SEQ ID NO: 35694 - DNA, 20 bp, Artificial Sequence
  chemically synthesized
ttactgctgttgcaaagcac

SEQ ID NO: 35695 - DNA, 20 bp, Artificial Sequence
  chemically synthesized
caaagcacgtcagatttcag

SEQ ID NO: 35696 - DNA, 20 bp, Artificial Sequence
  chemically synthesized
tgcataaagtaagcgttcca

SEQ ID NO: 35697 - DNA, 20 bp, Artificial Sequence
  chemically synthesized
cacctgacaggtgtaatgtt

SEQ ID NO: 35698 - DNA, 20 bp, Artificial Sequence
  chemically synthesized
tcctcaggttccctttcttg

SEQ ID NO: 35699 - DNA, 20 bp, Artificial Sequence
  chemically synthesized
cctggtgtacttgggagaaa

SEQ ID NO: 35700 - DNA, 20 bp, Artificial Sequence
  chemically synthesized
acttgggagaaaagaagctt

SEQ ID NO: 35701 - DNA, 20 bp, Artificial Sequence
  chemically synthesized
ggtagtacctaccagagact

SEQ ID NO: 35702 - DNA, 20 bp, Artificial Sequence
  chemically synthesized
ctccctgtttcctgctggta

SEQ ID NO: 35703 - DNA, 20 bp, Artificial Sequence
  chemically synthesized
agaaggaactctccttttgc

SEQ ID NO: 35704 - DNA, 20 bp, Artificial Sequence
  chemically synthesized
ttttgctgtggattgtaggg

SEQ ID NO: 35705 - DNA, 20 bp, Artificial Sequence
  chemically synthesized
tggattgtagggagcagatt

SEQ ID NO: 35706 - DNA, 20 bp, Artificial Sequence
  chemically synthesized
ggagcagatttggtgcttac

SEQ ID NO: 35707 - DNA, 20 bp, Artificial Sequence
  chemically synthesized
caccatgtggatggtgtcca

SEQ ID NO: 35708 - DNA, 20 bp, Artificial Sequence
  chemically synthesized
ttggggcaccccatcccacg

SEQ ID NO: 35709 - DNA, 20 bp, Artificial Sequence
  chemically synthesized
ctctttctcaacgttctctg

SEQ ID NO: 35710 - DNA, 20 bp, Artificial Sequence
  chemically synthesized
cccatgccctctctggtgtg

SEQ ID NO: 35711 - DNA, 20 bp, Artificial Sequence
  chemically synthesized
ggtgattctcagatctagag

SEQ ID NO: 35712 - DNA, 20 bp, Artificial Sequence
  chemically synthesized
gtagtagccaaattctctga

SEQ ID NO: 35713 - DNA, 20 bp, Artificial Sequence
  chemically synthesized
tcctgtgactcctttatcta

SEQ ID NO: 35714 - DNA, 20 bp, Artificial Sequence
  chemically synthesized
ttgacagagggaatgagaca

SEQ ID NO: 35715 - DNA, 20 bp, Artificial Sequence
  chemically synthesized
gagacaagatgattttaggt

SEQ ID NO: 35716 - DNA, 20 bp, Artificial Sequence
  chemically synthesized
caattattttattttattta

SEQ ID NO: 35717 - DNA, 20 bp, Artificial Sequence
  chemically synthesized
tattaagctttttgtagaga

SEQ ID NO: 35718 - DNA, 20 bp, Artificial Sequence
  chemically synthesized
gcccaggctggtcttgaact

SEQ ID NO: 35719 - DNA, 20 bp, Artificial Sequence
  chemically synthesized
ctctgtggccttccaaattt

SEQ ID NO: 35720 - DNA, 20 bp, Artificial Sequence
  chemically synthesized
ttttctctcctcccctaaaa

SEQ ID NO: 35721 - DNA, 20 bp, Artificial Sequence
  chemically synthesized
ttcttgttcctctagtcgac

SEQ ID NO: 35722 - DNA, 20 bp, Artificial Sequence
  chemically synthesized
agcacagctctttgagcata

SEQ ID NO: 35723 - DNA, 20 bp, Artificial Sequence
  chemically synthesized
ggtagacttggcccagagcc

SEQ ID NO: 35724 - DNA, 20 bp, Artificial Sequence
  chemically synthesized
aggagccagaggtggcccgc

SEQ ID NO: 35725 - DNA, 20 bp, Artificial Sequence
  chemically synthesized
ctttgcagaggaacttgcac

SEQ ID NO: 35726 - DNA, 20 bp, Artificial Sequence
  chemically synthesized
gcttttatcggtgatggctg

SEQ ID NO: 35727 - DNA, 20 bp, Artificial Sequence
  chemically synthesized
gctggaatgcttttcttaac

SEQ ID NO: 35728 - DNA, 20 bp, Artificial Sequence
  chemically synthesized
tggagctttgttgaagagcc

SEQ ID NO: 35729 - DNA, 20 bp, Artificial Sequence
  chemically synthesized
tcttcttgccttgttccttt

SEQ ID NO: 35730 - DNA, 20 bp, Artificial Sequence
  chemically synthesized
ctcccaaagtgtggcccttc

SEQ ID NO: 35731 - DNA, 20 bp, Artificial Sequence
  chemically synthesized
tttacatggtgtgcccaggg

SEQ ID NO: 35732 - DNA, 20 bp, Artificial Sequence
  chemically synthesized
atggtgtgcccagggaatag

SEQ ID NO: 35733 - DNA, 20 bp, Artificial Sequence
  chemically synthesized
ttttgtctaccttcgatccc

SEQ ID NO: 35734 - DNA, 20 bp, Artificial Sequence
  chemically synthesized
agacgacaaagtatctcatc

SEQ ID NO: 35735 - DNA, 20 bp, Artificial Sequence
  chemically synthesized
tcatcaccagctttgggctg

SEQ ID NO: 35736 - DNA, 20 bp, Artificial Sequence
  chemically synthesized
ctattatcttgtaacccatt

SEQ ID NO: 35737 - DNA, 20 bp, Artificial Sequence
  chemically synthesized
tatgcctctctttagaatct

SEQ ID NO: 35738 - DNA, 20 bp, Artificial Sequence
  chemically synthesized
agtccaatggcaagatatct

SEQ ID NO: 35739 - DNA, 20 bp, Artificial Sequence
  chemically synthesized
cttatgtctgcactcttatg

SEQ ID NO: 35740 - DNA, 20 bp, Artificial Sequence
  chemically synthesized
tgtctgcactcttatgtcct

SEQ ID NO: 35741 - DNA, 20 bp, Artificial Sequence
  chemically synthesized
ctgcttgcttttttaaaaac

SEQ ID NO: 35742 - DNA, 20 bp, Artificial Sequence
  chemically synthesized
tgcttcattgatgactcatg

SEQ ID NO: 35743 - DNA, 20 bp, Artificial Sequence
  chemically synthesized
cctctctgtccttgtccata

SEQ ID NO: 35744 - DNA, 20 bp, Artificial Sequence
  chemically synthesized
tgcactgacatctggagaac

SEQ ID NO: 35745 - DNA, 20 bp, Artificial Sequence
  chemically synthesized
aaggttttggaagagcggag

SEQ ID NO: 35746 - DNA, 20 bp, Artificial Sequence
  chemically synthesized
ccagcagagccaagtctttt

SEQ ID NO: 35747 - DNA, 20 bp, Artificial Sequence
  chemically synthesized
ttttgagtttccagcaaaac

SEQ ID NO: 35748 - DNA, 20 bp, Artificial Sequence
  chemically synthesized
ttaataataggagtgggtca

SEQ ID NO: 35749 - DNA, 20 bp, Artificial Sequence
  chemically synthesized
caaagctggcatgagtcatc

SEQ ID NO: 35750 - DNA, 20 bp, Artificial Sequence
  chemically synthesized
cacaggcttatggccacaag

SEQ ID NO: 35751 - DNA, 20 bp, Artificial Sequence
  chemically synthesized
cacaaggctagattttcaat

SEQ ID NO: 35752 - DNA, 20 bp, Artificial Sequence
  chemically synthesized
ccctgcctgaaagcactggg

SEQ ID NO: 35753 - DNA, 20 bp, Artificial Sequence
  chemically synthesized
gggtcccacagatatttatg

SEQ ID NO: 35754 - DNA, 20 bp, Artificial Sequence
  chemically synthesized
cccacagatatttatggagg

SEQ ID NO: 35755 - DNA, 20 bp, Artificial Sequence
  chemically synthesized
aggcctgactctgtcagcaa

SEQ ID NO: 35756 - DNA, 20 bp, Artificial Sequence
  chemically synthesized
tctttggaggaggtgtcact

SEQ ID NO: 35757 - DNA, 20 bp, Artificial Sequence
  chemically synthesized
aaccttttggagggcaggag

SEQ ID NO: 35758 - DNA, 20 bp, Artificial Sequence
  chemically synthesized
tttaatctgtactttgctca

SEQ ID NO: 35759 - DNA, 20 bp, Artificial Sequence
  chemically synthesized
atctgtactttgctcacgct

SEQ ID NO: 35760 - DNA, 20 bp, Artificial Sequence
  chemically synthesized
cttgattgaacagagaaaga

SEQ ID NO: 35761 - DNA, 20 bp, Artificial Sequence
  chemically synthesized
cagggaaggtgtgaggctgg

SEQ ID NO: 35762 - DNA, 20 bp, Artificial Sequence
  chemically synthesized
gggatagctggtggtgtctt

SEQ ID NO: 35763 - DNA, 20 bp, Artificial Sequence
  chemically synthesized
ccccatggtcaagcagtgaa

SEQ ID NO: 35764 - DNA, 20 bp, Artificial Sequence
  chemically synthesized
gtcaagcagtgaactctgct

SEQ ID NO: 35765 - DNA, 20 bp, Artificial Sequence
  chemically synthesized
tgagttcggaagggactggg

SEQ ID NO: 35766 - DNA, 20 bp, Artificial Sequence
  chemically synthesized
ctggggcctgctttcctttg

SEQ ID NO: 35767 - DNA, 20 bp, Artificial Sequence
  chemically synthesized
tggctttgactggctcttgg

SEQ ID NO: 35768 - DNA, 20 bp, Artificial Sequence
  chemically synthesized
ggctcttggatgagtttaaa

SEQ ID NO: 35769 - DNA, 20 bp, Artificial Sequence
  chemically synthesized
tctttttttttttttctttt

SEQ ID NO: 35770 - DNA, 20 bp, Artificial Sequence
  chemically synthesized
ttgtaaagacagtcagacca

SEQ ID NO: 35771 - DNA, 20 bp, Artificial Sequence
  chemically synthesized
aactagatttatttgcacaa

SEQ ID NO: 35772 - DNA, 20 bp, Artificial Sequence
  chemically synthesized
agcctccgcctcccaggttc

SEQ ID NO: 35773 - DNA, 20 bp, Artificial Sequence
  chemically synthesized
tgcctcagcctcccaagtag

SEQ ID NO: 35774 - DNA, 20 bp, Artificial Sequence
  chemically synthesized
aggtgcatgccatcacacct

SEQ ID NO: 35775 - DNA, 20 bp, Artificial Sequence
  chemically synthesized
tttttttttttaagtagaga

SEQ ID NO: 35776 - DNA, 20 bp, Artificial Sequence
  chemically synthesized
cgcctcggcctcccaaaatg

SEQ ID NO: 35777 - DNA, 20 bp, Artificial Sequence
  chemically synthesized
gctatttaattctattttca

SEQ ID NO: 35778 - DNA, 20 bp, Artificial Sequence
  chemically synthesized
ctagttcagttgtggccctt

SEQ ID NO: 35779 - DNA, 20 bp, Artificial Sequence
  chemically synthesized
ccttctgggcttcctttgct

SEQ ID NO: 35780 - DNA, 20 bp, Artificial Sequence
  chemically synthesized
cagcctggaagcctctcaga

SEQ ID NO: 35781 - DNA, 20 bp, Artificial Sequence
  chemically synthesized
ccctcaagtctgtccttctc

SEQ ID NO: 35782 - DNA, 20 bp, Artificial Sequence
  chemically synthesized
ccaggtctcgactcaatcca

SEQ ID NO: 35783 - DNA, 20 bp, Artificial Sequence
  chemically synthesized
tttgctcaccacaagccagg

SEQ ID NO: 35784 - DNA, 20 bp, Artificial Sequence
  chemically synthesized
tgtctggaaggcagagaatc

SEQ ID NO: 35785 - DNA, 20 bp, Artificial Sequence
  chemically synthesized
tcagggatgagtccgtgctg

SEQ ID NO: 35786 - DNA, 20 bp, Artificial Sequence
  chemically synthesized
ctttagcgtgtgagtgggga

SEQ ID NO: 35787 - DNA, 20 bp, Artificial Sequence
  chemically synthesized
agcaggcccttggaagggtg

SEQ ID NO: 35788 - DNA, 20 bp, Artificial Sequence
  chemically synthesized
gggaagatccagacaggaca

SEQ ID NO: 35789 - DNA, 20 bp, Artificial Sequence
  chemically synthesized
aaaggggttcccatggggtg

SEQ ID NO: 35790 - DNA, 20 bp, Artificial Sequence
  chemically synthesized
tggcttgaggggatctgggc

SEQ ID NO: 35791 - DNA, 20 bp, Artificial Sequence
  chemically synthesized
ccctcacaggctagactatc

SEQ ID NO: 35792 - DNA, 20 bp, Artificial Sequence
  chemically synthesized
catgtgggtgggcaaagtgg

SEQ ID NO: 35793 - DNA, 20 bp, Artificial Sequence
  chemically synthesized
taggtgtgtattgtagtaaa

SEQ ID NO: 35794 - DNA, 20 bp, Artificial Sequence
  chemically synthesized
ttcataaggctgtgaacgtc

SEQ ID NO: 35795 - DNA, 20 bp, Artificial Sequence
  chemically synthesized
atatgcaaaatggagttgct

SEQ ID NO: 35796 - DNA, 20 bp, Artificial Sequence
  chemically synthesized
aaaatggagttgctgggggc

SEQ ID NO: 35797 - DNA, 20 bp, Artificial Sequence
  chemically synthesized
ctcactttttacaatttagc

SEQ ID NO: 35798 - DNA, 20 bp, Artificial Sequence
  chemically synthesized
gctcagccacaagcccaaat

SEQ ID NO: 35799 - DNA, 20 bp, Artificial Sequence
  chemically synthesized
cagtgacaggtggggctcta

SEQ ID NO: 35800 - DNA, 20 bp, Artificial Sequence
  chemically synthesized
ctttaaaacatctgaggaaa

SEQ ID NO: 35801 - DNA, 20 bp, Artificial Sequence
  chemically synthesized
cagtgctccttagccttcca

SEQ ID NO: 35802 - DNA, 20 bp, Artificial Sequence
  chemically synthesized
gaggaagcacctcatcattt

SEQ ID NO: 35803 - DNA, 20 bp, Artificial Sequence
  chemically synthesized
cttcatagaaacagagtgtt

SEQ ID NO: 35804 - DNA, 20 bp, Artificial Sequence
  chemically synthesized
ccttagtgtcttacatgact

SEQ ID NO: 35805 - DNA, 20 bp, Artificial Sequence
  chemically synthesized
acttatttcaacttattttc

SEQ ID NO: 35806 - DNA, 20 bp, Artificial Sequence
  chemically synthesized
tggaaaatacgttgactgag

SEQ ID NO: 35807 - DNA, 20 bp, Artificial Sequence
  chemically synthesized
aaatacgttgactgagtgat

SEQ ID NO: 35808 - DNA, 20 bp, Artificial Sequence
  chemically synthesized
agagtgtagctctttgagtc

SEQ ID NO: 35809 - DNA, 20 bp, Artificial Sequence
  chemically synthesized
ctttgagtcttcagttttga

SEQ ID NO: 35810 - DNA, 20 bp, Artificial Sequence
  chemically synthesized
tctgcatgaatagcatcttt

SEQ ID NO: 35811 - DNA, 20 bp, Artificial Sequence
  chemically synthesized
gctagggtgggaaagggtat

SEQ ID NO: 35812 - DNA, 20 bp, Artificial Sequence
  chemically synthesized
catcccgggctctcaggtag

SEQ ID NO: 35813 - DNA, 20 bp, Artificial Sequence
  chemically synthesized
gagtaatgccgtggaggcag

SEQ ID NO: 35814 - DNA, 20 bp, Artificial Sequence
  chemically synthesized
acctaagccttaggaaagac

SEQ ID NO: 35815 - DNA, 20 bp, Artificial Sequence
  chemically synthesized
agccttaggaaagactttcg

SEQ ID NO: 35816 - DNA, 20 bp, Artificial Sequence
  chemically synthesized
gcccccaggttgggctgcct

SEQ ID NO: 35817 - DNA, 20 bp, Artificial Sequence
  chemically synthesized
atggcattgagtggcctcct

SEQ ID NO: 35818 - DNA, 20 bp, Artificial Sequence
  chemically synthesized
gggtaaggggtgcatggtga

SEQ ID NO: 35819 - DNA, 20 bp, Artificial Sequence
  chemically synthesized
gctccttgaaggacgtagag

SEQ ID NO: 35820 - DNA, 20 bp, Artificial Sequence
  chemically synthesized
gaggagtgatgtcatatgac

SEQ ID NO: 35821 - DNA, 20 bp, Artificial Sequence
  chemically synthesized
tggtggggacgtgagaaggg

SEQ ID NO: 35822 - DNA, 20 bp, Artificial Sequence
  chemically synthesized
atacttcgaagggaaaaccg

SEQ ID NO: 35823 - DNA, 20 bp, Artificial Sequence
  chemically synthesized
ggtgactgggagaatagaat

SEQ ID NO: 35824 - DNA, 20 bp, Artificial Sequence
  chemically synthesized
tgaggggaaagagagtagcc

SEQ ID NO: 35825 - DNA, 20 bp, Artificial Sequence
  chemically synthesized
cagttgactgcctatagctg

SEQ ID NO: 35826 - DNA, 20 bp, Artificial Sequence
  chemically synthesized
cgagttctttggggagggcc

SEQ ID NO: 35827 - DNA, 20 bp, Artificial Sequence
  chemically synthesized
tgatcttttgatccagaaag

SEQ ID NO: 35828 - DNA, 20 bp, Artificial Sequence
  chemically synthesized
ttttgatccagaaagatgcg

SEQ ID NO: 35829 - DNA, 20 bp, Artificial Sequence
  chemically synthesized
tgtttcttgcatttctttcc

SEQ ID NO: 35830 - DNA, 20 bp, Artificial Sequence
  chemically synthesized
tcttgcatttctttcccttc

SEQ ID NO: 35831 - DNA, 20 bp, Artificial Sequence
  chemically synthesized
gactctcactgccacgtgtc

SEQ ID NO: 35832 - DNA, 20 bp, Artificial Sequence
  chemically synthesized
cgtgtcttgtgcttccacag

SEQ ID NO: 35833 - DNA, 20 bp, Artificial Sequence
  chemically synthesized
gctcaggtccacggttagcc

SEQ ID NO: 35834 - DNA, 20 bp, Artificial Sequence
  chemically synthesized
gcaagggcctgaatcaaaca

SEQ ID NO: 35835 - DNA, 20 bp, Artificial Sequence
  chemically synthesized
ctgaatcaaacaaattgctt

SEQ ID NO: 35836 - DNA, 20 bp, Artificial Sequence
  chemically synthesized
aacaaattgctttcttgttt

SEQ ID NO: 35837 - DNA, 20 bp, Artificial Sequence
  chemically synthesized
tgaatctttagaccagaagc

SEQ ID NO: 35838 - DNA, 20 bp, Artificial Sequence
  chemically synthesized
gtctgatgagaaataagagt

SEQ ID NO: 35839 - DNA, 20 bp, Artificial Sequence
  chemically synthesized
ttttctttggaggaggtcct

SEQ ID NO: 35840 - DNA, 20 bp, Artificial Sequence
  chemically synthesized
ataggagagctccttggtcc

SEQ ID NO: 35841 - DNA, 20 bp, Artificial Sequence
  chemically synthesized
taagtagcagtgggtagggc

SEQ ID NO: 35842 - DNA, 20 bp, Artificial Sequence
  chemically synthesized
aacatccctcaaggtaggcc

SEQ ID NO: 35843 - DNA, 20 bp, Artificial Sequence
  chemically synthesized
ccctctgtcccctctatggt

SEQ ID NO: 35844 - DNA, 20 bp, Artificial Sequence
  chemically synthesized
cacggcccctgtagctgagc

SEQ ID NO: 35845 - DNA, 20 bp, Artificial Sequence
  chemically synthesized
ttcttcctgggccaagctga

SEQ ID NO: 35846 - DNA, 20 bp, Artificial Sequence
  chemically synthesized
tgccgtgtccattctcctag

SEQ ID NO: 35847 - DNA, 20 bp, Artificial Sequence
  chemically synthesized
cctagcaacgcttctctttg

SEQ ID NO: 35848 - DNA, 20 bp, Artificial Sequence
  chemically synthesized
agtttgccatagtacctgag

SEQ ID NO: 35849 - DNA, 20 bp, Artificial Sequence
  chemically synthesized
agttttgtcctttgcctgcc

SEQ ID NO: 35850 - DNA, 20 bp, Artificial Sequence
  chemically synthesized
tctcgcagcaactggcaacc

SEQ ID NO: 35851 - DNA, 20 bp, Artificial Sequence
  chemically synthesized
cagactcagggacccggctg

SEQ ID NO: 35852 - DNA, 20 bp, Artificial Sequence
  chemically synthesized
ggtgtaattctgcacaccca

SEQ ID NO: 35853 - DNA, 20 bp, Artificial Sequence
  chemically synthesized
gtgtcctgaaccaagtgtgg

SEQ ID NO: 35854 - DNA, 20 bp, Artificial Sequence
  chemically synthesized
tgaaccaagtgtggatgagt

SEQ ID NO: 35855 - DNA, 20 bp, Artificial Sequence
  chemically synthesized
tggatgagtttgagcttcct

SEQ ID NO: 35856 - DNA, 20 bp, Artificial Sequence
  chemically synthesized
gtgtaatttgttgttgttgt

SEQ ID NO: 35857 - DNA, 20 bp, Artificial Sequence
  chemically synthesized
cttagctgttgctcaactac

SEQ ID NO: 35858 - DNA, 20 bp, Artificial Sequence
  chemically synthesized
caccatgacatgagagaatt

SEQ ID NO: 35859 - DNA, 20 bp, Artificial Sequence
  chemically synthesized
atgagagaatttcaggttta

SEQ ID NO: 35860 - DNA, 20 bp, Artificial Sequence
  chemically synthesized
ggtttattgtgatttctttt

SEQ ID NO: 35861 - DNA, 20 bp, Artificial Sequence
  chemically synthesized
aggaaccaacaccgaagacc

SEQ ID NO: 35862 - DNA, 20 bp, Artificial Sequence
  chemically synthesized
caccgaagaccatatgattt

SEQ ID NO: 35863 - DNA, 20 bp, Artificial Sequence
  chemically synthesized
ttgtgaatttttttttgttc

SEQ ID NO: 35864 - DNA, 20 bp, Artificial Sequence
  chemically synthesized
ctgtcctttgttacaggagc

SEQ ID NO: 35865 - DNA, 20 bp, Artificial Sequence
  chemically synthesized
ctgtgaagacgtgtcctgta

SEQ ID NO: 35866 - DNA, 20 bp, Artificial Sequence
  chemically synthesized
cgtgtcctgtatacagtttc

SEQ ID NO: 35867 - DNA, 20 bp, Artificial Sequence
  chemically synthesized
tcctgtatacagtttcaaca

SEQ ID NO: 35868 - DNA, 20 bp, Artificial Sequence
  chemically synthesized
cacccgtcgccccccacccc

SEQ ID NO: 35869 - DNA, 20 bp, Artificial Sequence
  chemically synthesized
cccacccgctttctgtcttg

SEQ ID NO: 35870 - DNA, 20 bp, Artificial Sequence
  chemically synthesized
gaaaatgtaaaagcacttca

SEQ ID NO: 35871 - DNA, 20 bp, Artificial Sequence
  chemically synthesized
cttcacaaggttttaacttt

SEQ ID NO: 35872 - DNA, 20 bp, Artificial Sequence
  chemically synthesized
acttttctggcttgaacgga

SEQ ID NO: 35873 - DNA, 20 bp, Artificial Sequence
  chemically synthesized
acaagagcacaatagtcttt

SEQ ID NO: 35874 - DNA, 20 bp, Artificial Sequence
  chemically synthesized
tagtctttgtaggttttgga

SEQ ID NO: 35875 - DNA, 20 bp, Artificial Sequence
  chemically synthesized
gtaggttttggacacagttt

SEQ ID NO: 35876 - DNA, 20 bp, Artificial Sequence
  chemically synthesized
cttccttcctttcttccttg

SEQ ID NO: 35877 - DNA, 20 bp, Artificial Sequence
  chemically synthesized
gccctctgtctgttgggata

SEQ ID NO: 35878 - DNA, 20 bp, Artificial Sequence
  chemically synthesized
gggatattatgtttttttaa

SEQ ID NO: 35879 - DNA, 20 bp, Artificial Sequence
  chemically synthesized
tattatgtttttttaatagt

SEQ ID NO: 35880 - DNA, 20 bp, Artificial Sequence
  chemically synthesized
aattgagtacatatgtacgt

SEQ ID NO: 35881 - DNA, 20 bp, Artificial Sequence
  chemically synthesized
tgtacgttactgtttatttt

SEQ ID NO: 35882 - DNA, 20 bp, Artificial Sequence
  chemically synthesized
taaacagctcagttacgcca

SEQ ID NO: 35883 - DNA, 20 bp, Artificial Sequence
  chemically synthesized
cagtcagggtgttaaaaggc

SEQ ID NO: 35884 - DNA, 20 bp, Artificial Sequence
  chemically synthesized
ttaaaaggcacatgcttttc

SEQ ID NO: 35885 - DNA, 20 bp, Artificial Sequence
  chemically synthesized
gcaatttaattacattaatt

SEQ ID NO: 35886 - DNA, 20 bp, Artificial Sequence
  chemically synthesized
attgaatgtttaggcggaaa

SEQ ID NO: 35887 - DNA, 20 bp, Artificial Sequence
  chemically synthesized
cagaaaaatggatatatatc

SEQ ID NO: 35888 - DNA, 20 bp, Artificial Sequence
  chemically synthesized
tttaggagactgctgggcac

SEQ ID NO: 35889 - DNA, 20 bp, Artificial Sequence
  chemically synthesized
tgcacaaaggcacgtgggtg

SEQ ID NO: 35890 - DNA, 20 bp, Artificial Sequence
  chemically synthesized
ggtgctgtgttttgtatagc

SEQ ID NO: 35891 - DNA, 20 bp, Artificial Sequence
  chemically synthesized
tggatctgaggaacactgtc

SEQ ID NO: 35892 - DNA, 20 bp, Artificial Sequence
  chemically synthesized
aacactgtctgaagttttcc

SEQ ID NO: 35893 - DNA, 20 bp, Artificial Sequence
  chemically synthesized
aggtgttctttctgacctct

SEQ ID NO: 35894 - DNA, 20 bp, Artificial Sequence
  chemically synthesized
tgtcaaaggatggctgggaa

SEQ ID NO: 35895 - DNA, 20 bp, Artificial Sequence
  chemically synthesized
tgctaacatcccttgcctat

SEQ ID NO: 35896 - DNA, 20 bp, Artificial Sequence
  chemically synthesized
ttcactatcttctcgcacca

SEQ ID NO: 35897 - DNA, 20 bp, Artificial Sequence
  chemically synthesized
gacgaaccaggtggggctgc

SEQ ID NO: 35898 - DNA, 20 bp, Artificial Sequence
  chemically synthesized
gcttctgggtatttacggga

SEQ ID NO: 35899 - DNA, 20 bp, Artificial Sequence
  chemically synthesized
atgcagatttttctgcccac

SEQ ID NO: 35900 - DNA, 20 bp, Artificial Sequence
  chemically synthesized
tctgcccaccgttgttttgg

SEQ ID NO: 35901 - DNA, 20 bp, Artificial Sequence
  chemically synthesized
cccatttaagagtcagccac

SEQ ID NO: 35902 - DNA, 20 bp, Artificial Sequence
  chemically synthesized
acagagtggccagctgtgtc

SEQ ID NO: 35903 - DNA, 20 bp, Artificial Sequence
  chemically synthesized
gagctgtctgtgccctgaac

SEQ ID NO: 35904 - DNA, 20 bp, Artificial Sequence
  chemically synthesized
ggacaagaaggtaaaagagg

SEQ ID NO: 35905 - DNA, 20 bp, Artificial Sequence
  chemically synthesized
taagggaaggacaggaaagc

SEQ ID NO: 35906 - DNA, 20 bp, Artificial Sequence
  chemically synthesized
gcttgttccctgtgtggatg

SEQ ID NO: 35907 - DNA, 20 bp, Artificial Sequence
  chemically synthesized
cactcggctgactacctgat

SEQ ID NO: 35908 - DNA, 20 bp, Artificial Sequence
  chemically synthesized
gtgccaaaggacacccttga

SEQ ID NO: 35909 - DNA, 20 bp, Artificial Sequence
  chemically synthesized
ccttcttttctctccgatcc

SEQ ID NO: 35910 - DNA, 20 bp, Artificial Sequence
  chemically synthesized
ctctccgatcctctagcttt

SEQ ID NO: 35911 - DNA, 20 bp, Artificial Sequence
  chemically synthesized
gaggcaggagaaagggtagt

SEQ ID NO: 35912 - DNA, 20 bp, Artificial Sequence
  chemically synthesized
atgcagccgcaggggtagac

SEQ ID NO: 35913 - DNA, 20 bp, Artificial Sequence
  chemically synthesized
cttatacttctgggtccacc

SEQ ID NO: 35914 - DNA, 20 bp, Artificial Sequence
  chemically synthesized
tgcacacagggtagggaagt

SEQ ID NO: 35915 - DNA, 20 bp, Artificial Sequence
  chemically synthesized
ggaagttgtggcttgcagaa

SEQ ID NO: 35916 - DNA, 20 bp, Artificial Sequence
  chemically synthesized
gctgtttttttggggggacg

SEQ ID NO: 35917 - DNA, 20 bp, Artificial Sequence
  chemically synthesized
ttggggggacgctctgtttt

SEQ ID NO: 35918 - DNA, 20 bp, Artificial Sequence
  chemically synthesized
aggggaggcatgtgatagga

SEQ ID NO: 35919 - DNA, 20 bp, Artificial Sequence
  chemically synthesized
cctctctatataatttcaag

SEQ ID NO: 35920 - DNA, 20 bp, Artificial Sequence
  chemically synthesized
attgtccctaagcaccagta

SEQ ID NO: 35921 - DNA, 20 bp, Artificial Sequence
  chemically synthesized
agcaccagtagaaagcttga

SEQ ID NO: 35922 - DNA, 20 bp, Artificial Sequence
  chemically synthesized
tgagagaacgttctgactag

SEQ ID NO: 35923 - DNA, 20 bp, Artificial Sequence
  chemically synthesized
ggggagacagagacagagtt

SEQ ID NO: 35924 - DNA, 20 bp, Artificial Sequence
  chemically synthesized
ttcagcagactcattctgct

SEQ ID NO: 35925 - DNA, 20 bp, Artificial Sequence
  chemically synthesized
ctgctatttgctttttgcct

SEQ ID NO: 35926 - DNA, 20 bp, Artificial Sequence
  chemically synthesized
tgcccggctgagcatctctg

SEQ ID NO: 35927 - DNA, 20 bp, Artificial Sequence
  chemically synthesized
aatgtgccgctcgaagccat

SEQ ID NO: 35928 - DNA, 20 bp, Artificial Sequence
  chemically synthesized
cgaagccatgtaggcttcca

SEQ ID NO: 35929 - DNA, 20 bp, Artificial Sequence
  chemically synthesized
tccagcaggcttctagcaga

SEQ ID NO: 35930 - DNA, 20 bp, Artificial Sequence
  chemically synthesized
cctcgttcctttcctgcatt

SEQ ID NO: 35931 - DNA, 20 bp, Artificial Sequence
  chemically synthesized
cagccaataaccaattttca

SEQ ID NO: 35932 - DNA, 20 bp, Artificial Sequence
  chemically synthesized
aggtttagatgaatgtgaat

SEQ ID NO: 35933 - DNA, 20 bp, Artificial Sequence
  chemically synthesized
ccagaatattgtcccttgca

SEQ ID NO: 35934 - DNA, 20 bp, Artificial Sequence
  chemically synthesized
gtcacatttccctggcagct

SEQ ID NO: 35935 - DNA, 20 bp, Artificial Sequence
  chemically synthesized
agggtgaacaagggccatct

SEQ ID NO: 35936 - DNA, 20 bp, Artificial Sequence
  chemically synthesized
gggccatctgggtgtttgct

SEQ ID NO: 35937 - DNA, 20 bp, Artificial Sequence
  chemically synthesized
ctgctgggtgtggaaaccac

SEQ ID NO: 35938 - DNA, 20 bp, Artificial Sequence
  chemically synthesized
ctgaaagagccactggtatt

SEQ ID NO: 35939 - DNA, 20 bp, Artificial Sequence
  chemically synthesized
tgagcgccacacattatttt

SEQ ID NO: 35940 - DNA, 20 bp, Artificial Sequence
  chemically synthesized
ctgcggtgggtggcatgggt

SEQ ID NO: 35941 - DNA, 20 bp, Artificial Sequence
  chemically synthesized
gtctcctggttggaccccat

SEQ ID NO: 35942 - DNA, 20 bp, Artificial Sequence
  chemically synthesized
gctaacatgatcaagggtga

SEQ ID NO: 35943 - DNA, 20 bp, Artificial Sequence
  chemically synthesized
catcttgggactaggagtga

SEQ ID NO: 35944 - DNA, 20 bp, Artificial Sequence
  chemically synthesized
tgtattaagatgacagacac

SEQ ID NO: 35945 - DNA, 20 bp, Artificial Sequence
  chemically synthesized
ccaggccttaaaagacaagg

SEQ ID NO: 35946 - DNA, 20 bp, Artificial Sequence
  chemically synthesized
gctcattttacccactcgag

SEQ ID NO: 35947 - DNA, 20 bp, Artificial Sequence
  chemically synthesized
cactcgagacttgattctct

SEQ ID NO: 35948 - DNA, 20 bp, Artificial Sequence
  chemically synthesized
ttaagtacctcccctggtca

SEQ ID NO: 35949 - DNA, 20 bp, Artificial Sequence
  chemically synthesized
gctaccatgatcagaggtaa

SEQ ID NO: 35950 - DNA, 20 bp, Artificial Sequence
  chemically synthesized
gtaaatttgtttttctctga

SEQ ID NO: 35951 - DNA, 20 bp, Artificial Sequence
  chemically synthesized
tttctctgatgatgattgaa

SEQ ID NO: 35952 - DNA, 20 bp, Artificial Sequence
  chemically synthesized
atcaagaacattacaacaca

SEQ ID NO: 35953 - DNA, 20 bp, Artificial Sequence
  chemically synthesized
acattacaacacaaagagtt

SEQ ID NO: 35954 - DNA, 20 bp, Artificial Sequence
  chemically synthesized
atattttaatattagaaagc

SEQ ID NO: 35955 - DNA, 20 bp, Artificial Sequence
  chemically synthesized
agcatgggattgggtgtgaa

SEQ ID NO: 35956 - DNA, 20 bp, Artificial Sequence
  chemically synthesized
tgaagaagttattctgtctg

SEQ ID NO: 35957 - DNA, 20 bp, Artificial Sequence
  chemically synthesized
attaggctgagactttttcc

SEQ ID NO: 35958 - DNA, 20 bp, Artificial Sequence
  chemically synthesized
ctttttccgatggtttattt

SEQ ID NO: 35959 - DNA, 20 bp, Artificial Sequence
  chemically synthesized
ggagggagctgacacgttca

SEQ ID NO: 35960 - DNA, 20 bp, Artificial Sequence
  chemically synthesized
agcaaatctgctatccatca

SEQ ID NO: 35961 - DNA, 20 bp, Artificial Sequence
  chemically synthesized
gctatccatcattttgtttc

SEQ ID NO: 35962 - DNA, 20 bp, Artificial Sequence
  chemically synthesized
ctcatttggagggacctgat

SEQ ID NO: 35963 - DNA, 20 bp, Artificial Sequence
  chemically synthesized
ggagggacctgatctctgat

SEQ ID NO: 35964 - DNA, 20 bp, Artificial Sequence
  chemically synthesized
ttgttacaacatgcaaacct

SEQ ID NO: 35965 - DNA, 20 bp, Artificial Sequence
  chemically synthesized
ttttccaggacttctggtgg

SEQ ID NO: 35966 - DNA, 20 bp, Artificial Sequence
  chemically synthesized
ctccctgaagctctgttagc

SEQ ID NO: 35967 - DNA, 20 bp, Artificial Sequence
  chemically synthesized
gtaaaataattagaataaaa

SEQ ID NO: 35968 - DNA, 20 bp, Artificial Sequence
  chemically synthesized
taacttctcagaatgcatct

SEQ ID NO: 35969 - DNA, 20 bp, Artificial Sequence
  chemically synthesized
tgggtagatcacctgaggtc

SEQ ID NO: 35970 - DNA, 20 bp, Artificial Sequence
  chemically synthesized
tcaggaggctgagggaggag

SEQ ID NO: 35971 - DNA, 20 bp, Artificial Sequence
  chemically synthesized
aaaccaggtaaagtatttgg

SEQ ID NO: 35972 - DNA, 20 bp, Artificial Sequence
  chemically synthesized
cttcatttcccccaaaggac

SEQ ID NO: 35973 - DNA, 20 bp, Artificial Sequence
  chemically synthesized
ttgttctggcaagtagcact

SEQ ID NO: 35974 - DNA, 20 bp, Artificial Sequence
  chemically synthesized
gaatcaaagcagaatgaagg

SEQ ID NO: 35975 - DNA, 20 bp, Artificial Sequence
  chemically synthesized
atataaataagtgcaaaatt

SEQ ID NO: 35976 - DNA, 20 bp, Artificial Sequence
  chemically synthesized
aacaactttccagaaacagg

SEQ ID NO: 35977 - DNA, 20 bp, Artificial Sequence
  chemically synthesized
aggaggatgcagcgacccag

SEQ ID NO: 35978 - DNA, 20 bp, Artificial Sequence
  chemically synthesized
atgcttgcaagcccacccag

SEQ ID NO: 35979 - DNA, 20 bp, Artificial Sequence
  chemically synthesized
ttgcaagcccacccagctag

SEQ ID NO: 35980 - DNA, 20 bp, Artificial Sequence
  chemically synthesized
cattttaccagtgaagaaac

SEQ ID NO: 35981 - DNA, 20 bp, Artificial Sequence
  chemically synthesized
tgttcatcttacctatccac

SEQ ID NO: 35982 - DNA, 20 bp, Artificial Sequence
  chemically synthesized
aggtgccccgactgtgagtt

SEQ ID NO: 35983 - DNA, 20 bp, Artificial Sequence
  chemically synthesized
gagttgggaagtgtggggtg

SEQ ID NO: 35984 - DNA, 20 bp, Artificial Sequence
  chemically synthesized
tctgatgtaagttcctgctg

SEQ ID NO: 35985 - DNA, 20 bp, Artificial Sequence
  chemically synthesized
gccccctgtcccctccccgc

SEQ ID NO: 35986 - DNA, 20 bp, Artificial Sequence
  chemically synthesized
cacaggtcctgtgctgcccc

SEQ ID NO: 35987 - DNA, 20 bp, Artificial Sequence
  chemically synthesized
cccccacagctttgcaggct

SEQ ID NO: 35988 - DNA, 20 bp, Artificial Sequence
  chemically synthesized
ctgctctctccgaatcttag

SEQ ID NO: 35989 - DNA, 20 bp, Artificial Sequence
  chemically synthesized
cttagtcctgcttgaggtct

SEQ ID NO: 35990 - DNA, 20 bp, Artificial Sequence
  chemically synthesized
gcagcttccggagctgcaca

SEQ ID NO: 35991 - DNA, 20 bp, Artificial Sequence
  chemically synthesized
tgcacatggggcttgaggtc

SEQ ID NO: 35992 - DNA, 20 bp, Artificial Sequence
  chemically synthesized
ggggcttgaggtctggtgct

SEQ ID NO: 35993 - DNA, 20 bp, Artificial Sequence
  chemically synthesized
agacagatggcagagtacca

SEQ ID NO: 35994 - DNA, 20 bp, Artificial Sequence
  chemically synthesized
gtggcccaggtgctgcccag

SEQ ID NO: 35995 - DNA, 20 bp, Artificial Sequence
  chemically synthesized
agcctctccactcaaggttg

SEQ ID NO: 35996 - DNA, 20 bp, Artificial Sequence
  chemically synthesized
ctgtccacccctttggtccg

SEQ ID NO: 35997 - DNA, 20 bp, Artificial Sequence
  chemically synthesized
ttgagaaagtgggacgttga

SEQ ID NO: 35998 - DNA, 20 bp, Artificial Sequence
  chemically synthesized
tcctgaaggaataaggcacg

SEQ ID NO: 35999 - DNA, 20 bp, Artificial Sequence
  chemically synthesized
cagatactgttctccagctc

SEQ ID NO: 36000 - DNA, 20 bp, Artificial Sequence
  chemically synthesized
ccccaccacccaccaccacc

SEQ ID NO: 36001 - DNA, 20 bp, Artificial Sequence
  chemically synthesized
ttcctgttctattagacaaa

SEQ ID NO: 36002 - DNA, 20 bp, Artificial Sequence
  chemically synthesized
tggatgagttggacagtcat

SEQ ID NO: 36003 - DNA, 20 bp, Artificial Sequence
  chemically synthesized
ggacagtcatctgagtttga

SEQ ID NO: 36004 - DNA, 20 bp, Artificial Sequence
  chemically synthesized
catattagtacatccatcag

SEQ ID NO: 36005 - DNA, 20 bp, Artificial Sequence
  chemically synthesized
ttggacctatagatgacctc

SEQ ID NO: 36006 - DNA, 20 bp, Artificial Sequence
  chemically synthesized
ctccccttgtcacctcatct

SEQ ID NO: 36007 - DNA, 20 bp, Artificial Sequence
  chemically synthesized
ttcctggtaccaggatgatg

SEQ ID NO: 36008 - DNA, 20 bp, Artificial Sequence
  chemically synthesized
ccagcctgggtgtgcatctt

SEQ ID NO: 36009 - DNA, 20 bp, Artificial Sequence
  chemically synthesized
cccgtctacatagaggccct

SEQ ID NO: 36010 - DNA, 20 bp, Artificial Sequence
  chemically synthesized
ctccccacctccatgggcct

SEQ ID NO: 36011 - DNA, 20 bp, Artificial Sequence
  chemically synthesized
gctcacttccatcctgcaga

SEQ ID NO: 36012 - DNA, 20 bp, Artificial Sequence
  chemically synthesized
cttccatcctgcagaggaag

SEQ ID NO: 36013 - DNA, 20 bp, Artificial Sequence
  chemically synthesized
cgtaggtagtgactggtaag

SEQ ID NO: 36014 - DNA, 20 bp, Artificial Sequence
  chemically synthesized
tagtgactggtaagagccga

SEQ ID NO: 36015 - DNA, 20 bp, Artificial Sequence
  chemically synthesized
taagagccgattgagtttct

SEQ ID NO: 36016 - DNA, 20 bp, Artificial Sequence
  chemically synthesized
ttctaattcaattcaggagc

SEQ ID NO: 36017 - DNA, 20 bp, Artificial Sequence
  chemically synthesized
cttggcctgctaacctgagg

SEQ ID NO: 36018 - DNA, 20 bp, Artificial Sequence
  chemically synthesized
ctaacctgagggctagtttc

SEQ ID NO: 36019 - DNA, 20 bp, Artificial Sequence
  chemically synthesized
cctgagggctagtttctagg

SEQ ID NO: 36020 - DNA, 20 bp, Artificial Sequence
  chemically synthesized
ttaacttaaagacagttcat

SEQ ID NO: 36021 - DNA, 20 bp, Artificial Sequence
  chemically synthesized
tcaaacagagcagttaaagg

SEQ ID NO: 36022 - DNA, 20 bp, Artificial Sequence
  chemically synthesized
cagagcagttaaaggcgatg

SEQ ID NO: 36023 - DNA, 20 bp, Artificial Sequence
  chemically synthesized
aaggcgatgcttcgttttac

SEQ ID NO: 36024 - DNA, 20 bp, Artificial Sequence
  chemically synthesized
cagtggtattcctttcaatg

SEQ ID NO: 36025 - DNA, 20 bp, Artificial Sequence
  chemically synthesized
gaatgtttctctagctcatt

SEQ ID NO: 36026 - DNA, 20 bp, Artificial Sequence
  chemically synthesized
gaaatagctctagctctagc

SEQ ID NO: 36027 - DNA, 20 bp, Artificial Sequence
  chemically synthesized
cactgggggaggagtagaga

SEQ ID NO: 36028 - DNA, 20 bp, Artificial Sequence
  chemically synthesized
gatcttgcttccttccatgt

SEQ ID NO: 36029 - DNA, 20 bp, Artificial Sequence
  chemically synthesized
agcttatagtccctttggaa

SEQ ID NO: 36030 - DNA, 20 bp, Artificial Sequence
  chemically synthesized
actgtccatggggaaatggg

SEQ ID NO: 36031 - DNA, 20 bp, Artificial Sequence
  chemically synthesized
tgggtcctgctttacaaaaa

SEQ ID NO: 36032 - DNA, 20 bp, Artificial Sequence
  chemically synthesized
ttacaaaaattcagtttgca

SEQ ID NO: 36033 - DNA, 20 bp, Artificial Sequence
  chemically synthesized
atgactgtgacatccagtga

SEQ ID NO: 36034 - DNA, 20 bp, Artificial Sequence
  chemically synthesized
tgtaagtaagtctgtgtggt

SEQ ID NO: 36035 - DNA, 20 bp, Artificial Sequence
  chemically synthesized
atcctcctctcttccctctt

SEQ ID NO: 36036 - DNA, 20 bp, Artificial Sequence
  chemically synthesized
tgctctgtctctgcctggga

SEQ ID NO: 36037 - DNA, 20 bp, Artificial Sequence
  chemically synthesized
gtaaacgtgtattggacttc

SEQ ID NO: 36038 - DNA, 20 bp, Artificial Sequence
  chemically synthesized
ttggacttccattgcttaag

SEQ ID NO: 36039 - DNA, 20 bp, Artificial Sequence
  chemically synthesized
cttccattgcttaagtcatg

SEQ ID NO: 36040 - DNA, 20 bp, Artificial Sequence
  chemically synthesized
acttccagaactttcccggt

SEQ ID NO: 36041 - DNA, 20 bp, Artificial Sequence
  chemically synthesized
actttcccggttctggtttt

SEQ ID NO: 36042 - DNA, 20 bp, Artificial Sequence
  chemically synthesized
ctgggatttcatgaacaatt

SEQ ID NO: 36043 - DNA, 20 bp, Artificial Sequence
  chemically synthesized
atccatttcctgcacaggtg

SEQ ID NO: 36044 - DNA, 20 bp, Artificial Sequence
  chemically synthesized
tgacctctggatcccttctc

SEQ ID NO: 36045 - DNA, 20 bp, Artificial Sequence
  chemically synthesized
ctctggatcccttctctttg

SEQ ID NO: 36046 - DNA, 20 bp, Artificial Sequence
  chemically synthesized
ttctcttttccagagctgca

SEQ ID NO: 36047 - DNA, 20 bp, Artificial Sequence
  chemically synthesized
agagctgcagtatgtttctt

SEQ ID NO: 36048 - DNA, 20 bp, Artificial Sequence
  chemically synthesized
caccatttagagcctggaat

SEQ ID NO: 36049 - DNA, 20 bp, Artificial Sequence
  chemically synthesized
ccccaggctcccatggtggc

SEQ ID NO: 36050 - DNA, 20 bp, Artificial Sequence
  chemically synthesized
tctttgagcaggaaaagaat

SEQ ID NO: 36051 - DNA, 20 bp, Artificial Sequence
  chemically synthesized
aggtaccttttgtgtgtatg

SEQ ID NO: 36052 - DNA, 20 bp, Artificial Sequence
  chemically synthesized
gtgccccatgggcaaaccag

SEQ ID NO: 36053 - DNA, 20 bp, Artificial Sequence
  chemically synthesized
gtgcataagtaagagcagat

SEQ ID NO: 36054 - DNA, 20 bp, Artificial Sequence
  chemically synthesized
ctagtctagtgcaagctaac

SEQ ID NO: 36055 - DNA, 20 bp, Artificial Sequence
  chemically synthesized
cttttatcacaggctccagg

SEQ ID NO: 36056 - DNA, 20 bp, Artificial Sequence
  chemically synthesized
ggctccaggaagggtttggc

SEQ ID NO: 36057 - DNA, 20 bp, Artificial Sequence
  chemically synthesized
tggcagacctctccatcggt

SEQ ID NO: 36058 - DNA, 20 bp, Artificial Sequence
  chemically synthesized
ggctctcttggtgatggaga

SEQ ID NO: 36059 - DNA, 20 bp, Artificial Sequence
  chemically synthesized
tcccaaaattgtaaaggagg

SEQ ID NO: 36060 - DNA, 20 bp, Artificial Sequence
  chemically synthesized
ttggggaaagggcctgataa

SEQ ID NO: 36061 - DNA, 20 bp, Artificial Sequence
  chemically synthesized
ccagtctgtattgccccaag

SEQ ID NO: 36062 - DNA, 20 bp, Artificial Sequence
  chemically synthesized
ccaagtctggctttgccaat

SEQ ID NO: 36063 - DNA, 20 bp, Artificial Sequence
  chemically synthesized
tctcatctcactgagctctg

SEQ ID NO: 36064 - DNA, 20 bp, Artificial Sequence
  chemically synthesized
cccatcttggcaaaaattgc

SEQ ID NO: 36065 - DNA, 20 bp, Artificial Sequence
  chemically synthesized
gagataatttattacaacct

SEQ ID NO: 36066 - DNA, 20 bp, Artificial Sequence
  chemically synthesized
tgaccaggccatggtcactg

SEQ ID NO: 36067 - DNA, 20 bp, Artificial Sequence
  chemically synthesized
tcagcatcaccctctctcac

SEQ ID NO: 36068 - DNA, 20 bp, Artificial Sequence
  chemically synthesized
ccctaggcgtaagaatgtgc

SEQ ID NO: 36069 - DNA, 20 bp, Artificial Sequence
  chemically synthesized
atgtaggtgtgcctcaccca

SEQ ID NO: 36070 - DNA, 20 bp, Artificial Sequence
  chemically synthesized
cccatggggcttcactttct

SEQ ID NO: 36071 - DNA, 20 bp, Artificial Sequence
  chemically synthesized
attgccagtagtggtctctg

SEQ ID NO: 36072 - DNA, 20 bp, Artificial Sequence
  chemically synthesized
gtggtctctgttctgttttc

SEQ ID NO: 36073 - DNA, 20 bp, Artificial Sequence
  chemically synthesized
actccccgtaccttccttta

SEQ ID NO: 36074 - DNA, 20 bp, Artificial Sequence
  chemically synthesized
cctgtctcccccaggggtcc

SEQ ID NO: 36075 - DNA, 20 bp, Artificial Sequence
  chemically synthesized
ggaatcttaatttcctgcac

SEQ ID NO: 36076 - DNA, 20 bp, Artificial Sequence
  chemically synthesized
cccagagtccaatttatttg

SEQ ID NO: 36077 - DNA, 20 bp, Artificial Sequence
  chemically synthesized
caaatgaatgcccattttaa

SEQ ID NO: 36078 - DNA, 20 bp, Artificial Sequence
  chemically synthesized
tcatttccttagtgtagtgg

SEQ ID NO: 36079 - DNA, 20 bp, Artificial Sequence
  chemically synthesized
ccaaacagatagctgggata

SEQ ID NO: 36080 - DNA, 20 bp, Artificial Sequence
  chemically synthesized
ctgtgttctcgaaatgcctt

SEQ ID NO: 36081 - DNA, 20 bp, Artificial Sequence
  chemically synthesized
aggggtcagagggttaggga

SEQ ID NO: 36082 - DNA, 20 bp, Artificial Sequence
  chemically synthesized
ttgacagcaaaggggcatga

SEQ ID NO: 36083 - DNA, 20 bp, Artificial Sequence
  chemically synthesized
actggtggacgtgttctgta

SEQ ID NO: 36084 - DNA, 20 bp, Artificial Sequence
  chemically synthesized
caagtctgtctgtaaccttt

SEQ ID NO: 36085 - DNA, 20 bp, Artificial Sequence
  chemically synthesized
atgagaatgccctttgtatt

SEQ ID NO: 36086 - DNA, 20 bp, Artificial Sequence
  chemically synthesized
ggagagagcaaggggaggaa

SEQ ID NO: 36087 - DNA, 20 bp, Artificial Sequence
  chemically synthesized
tctgttttcctagaattcca

SEQ ID NO: 36088 - DNA, 20 bp, Artificial Sequence
  chemically synthesized
aaaggggagggagtacccaa

SEQ ID NO: 36089 - DNA, 20 bp, Artificial Sequence
  chemically synthesized
cattagcccaattagttgtc

SEQ ID NO: 36090 - DNA, 20 bp, Artificial Sequence
  chemically synthesized
agcccaattagttgtctttt

SEQ ID NO: 36091 - DNA, 20 bp, Artificial Sequence
  chemically synthesized
caattagttgtcttttgttt

SEQ ID NO: 36092 - DNA, 20 bp, Artificial Sequence
  chemically synthesized
tagttgtcttttgtttgttt

SEQ ID NO: 36093 - DNA, 20 bp, Artificial Sequence
  chemically synthesized
tgtcttttgtttgtttgttt

SEQ ID NO: 36094 - DNA, 20 bp, Artificial Sequence
  chemically synthesized
cctggctaattttgtagaga

SEQ ID NO: 36095 - DNA, 20 bp, Artificial Sequence
  chemically synthesized
tgccttgacctcccaaagtg

SEQ ID NO: 36096 - DNA, 20 bp, Artificial Sequence
  chemically synthesized
gtgctgaattcctgtaaagt

SEQ ID NO: 36097 - DNA, 20 bp, Artificial Sequence
  chemically synthesized
aattcctgtaaagtgagggt

SEQ ID NO: 36098 - DNA, 20 bp, Artificial Sequence
  chemically synthesized
ttcctacatccatcttcctc

SEQ ID NO: 36099 - DNA, 20 bp, Artificial Sequence
  chemically synthesized
tatctgaacttcatttattt

SEQ ID NO: 36100 - DNA, 20 bp, Artificial Sequence
  chemically synthesized
tatttgggtgctaaggactg

SEQ ID NO: 36101 - DNA, 20 bp, Artificial Sequence
  chemically synthesized
acacggagtgatgatgccta

SEQ ID NO: 36102 - DNA, 20 bp, Artificial Sequence
  chemically synthesized
tttttctttttttggtgaga

SEQ ID NO: 36103 - DNA, 20 bp, Artificial Sequence
  chemically synthesized
tgcctcagcctcccgagtag

SEQ ID NO: 36104 - DNA, 20 bp, Artificial Sequence
  chemically synthesized
ttttgtatttttagtagaga

SEQ ID NO: 36105 - DNA, 20 bp, Artificial Sequence
  chemically synthesized
tgccccggcctcccaaagtg

SEQ ID NO: 36106 - DNA, 20 bp, Artificial Sequence
  chemically synthesized
ctgaagggggccaaaagtgt

SEQ ID NO: 36107 - DNA, 20 bp, Artificial Sequence
  chemically synthesized
catttaaaacagcattaaga

SEQ ID NO: 36108 - DNA, 20 bp, Artificial Sequence
  chemically synthesized
ttaagaatacgtttttagaa

SEQ ID NO: 36109 - DNA, 20 bp, Artificial Sequence
  chemically synthesized
agagttgcacaaccacgtag

SEQ ID NO: 36110 - DNA, 20 bp, Artificial Sequence
  chemically synthesized
tcttctccagggtgtggggt

SEQ ID NO: 36111 - DNA, 20 bp, Artificial Sequence
  chemically synthesized
tagcataacatgttactgca

SEQ ID NO: 36112 - DNA, 20 bp, Artificial Sequence
  chemically synthesized
tcaagtagatatcagaaggg

SEQ ID NO: 36113 - DNA, 20 bp, Artificial Sequence
  chemically synthesized
ttctatgaggttggagaagg

SEQ ID NO: 36114 - DNA, 20 bp, Artificial Sequence
  chemically synthesized
atgaggttggagaaggatga

SEQ ID NO: 36115 - DNA, 20 bp, Artificial Sequence
  chemically synthesized
attgaggccttgaagtatga

SEQ ID NO: 36116 - DNA, 20 bp, Artificial Sequence
  chemically synthesized
caggaaggaaatgagaacgg

SEQ ID NO: 36117 - DNA, 20 bp, Artificial Sequence
  chemically synthesized
gactggaatagaaaattgga

SEQ ID NO: 36118 - DNA, 20 bp, Artificial Sequence
  chemically synthesized
ggattgtggagctctggaat

SEQ ID NO: 36119 - DNA, 20 bp, Artificial Sequence
  chemically synthesized
aggatggagttggttgaccg

SEQ ID NO: 36120 - DNA, 20 bp, Artificial Sequence
  chemically synthesized
ggtctgttactaatatagag

SEQ ID NO: 36121 - DNA, 20 bp, Artificial Sequence
  chemically synthesized
agaggactgtttaaatcttg

SEQ ID NO: 36122 - DNA, 20 bp, Artificial Sequence
  chemically synthesized
tgggatactcagggcatgga

SEQ ID NO: 36123 - DNA, 20 bp, Artificial Sequence
  chemically synthesized
atctctctttaatagtgtcc

SEQ ID NO: 36124 - DNA, 20 bp, Artificial Sequence
  chemically synthesized
ttcaaatgtcagactttctt

SEQ ID NO: 36125 - DNA, 20 bp, Artificial Sequence
  chemically synthesized
ctttcttttcagcttccttc

SEQ ID NO: 36126 - DNA, 20 bp, Artificial Sequence
  chemically synthesized
ttgagataggtgctggtcaa

SEQ ID NO: 36127 - DNA, 20 bp, Artificial Sequence
  chemically synthesized
taggtgctggtcaaacaagc

SEQ ID NO: 36128 - DNA, 20 bp, Artificial Sequence
  chemically synthesized
ggtcacttggcacacagtgt

SEQ ID NO: 36129 - DNA, 20 bp, Artificial Sequence
  chemically synthesized
taatggcacgcagggccgcc

SEQ ID NO: 36130 - DNA, 20 bp, Artificial Sequence
  chemically synthesized
tgtgtttactgccaagaaat

SEQ ID NO: 36131 - DNA, 20 bp, Artificial Sequence
  chemically synthesized
taagggcttctaggagactt

SEQ ID NO: 36132 - DNA, 20 bp, Artificial Sequence
  chemically synthesized
ctcacagtgtgaatttagtt

SEQ ID NO: 36133 - DNA, 20 bp, Artificial Sequence
  chemically synthesized
ttttccccaaactctaaagc

SEQ ID NO: 36134 - DNA, 20 bp, Artificial Sequence
  chemically synthesized
ttttttttctttgaagataa

SEQ ID NO: 36135 - DNA, 20 bp, Artificial Sequence
  chemically synthesized
ttttgggtatggctgggtgt

SEQ ID NO: 36136 - DNA, 20 bp, Artificial Sequence
  chemically synthesized
tgggtggatcacctaaggtc

SEQ ID NO: 36137 - DNA, 20 bp, Artificial Sequence
  chemically synthesized
ttgggaggctgaggcaggag

SEQ ID NO: 36138 - DNA, 20 bp, Artificial Sequence
  chemically synthesized
aatcgcttgaacccgggagg

SEQ ID NO: 36139 - DNA, 20 bp, Artificial Sequence
  chemically synthesized
gaggcggagattgcggtgag

SEQ ID NO: 36140 - DNA, 20 bp, Artificial Sequence
  chemically synthesized
acaaacaaacaaacaaacaa

SEQ ID NO: 36141 - DNA, 20 bp, Artificial Sequence
  chemically synthesized
acaaaatcgttttgggtagc

SEQ ID NO: 36142 - DNA, 20 bp, Artificial Sequence
  chemically synthesized
tttgggtagcagtggcttta

SEQ ID NO: 36143 - DNA, 20 bp, Artificial Sequence
  chemically synthesized
tttggatctttggctattga

SEQ ID NO: 36144 - DNA, 20 bp, Artificial Sequence
  chemically synthesized
tttcatgttaagcaaaacta

SEQ ID NO: 36145 - DNA, 20 bp, Artificial Sequence
  chemically synthesized
caaactatttacagccataa

SEQ ID NO: 36146 - DNA, 20 bp, Artificial Sequence
  chemically synthesized
ttaaatgctgtcaaattgta

SEQ ID NO: 36147 - DNA, 20 bp, Artificial Sequence
  chemically synthesized
tcatgactcaggtatctttt

SEQ ID NO: 36148 - DNA, 20 bp, Artificial Sequence
  chemically synthesized
ttacaggctttgatgaaata

SEQ ID NO: 36149 - DNA, 20 bp, Artificial Sequence
  chemically synthesized
aaactcttccaggataattt

SEQ ID NO: 36150 - DNA, 20 bp, Artificial Sequence
  chemically synthesized
agaataaattgtaagtgtta

SEQ ID NO: 36151 - DNA, 20 bp, Artificial Sequence
  chemically synthesized
ttaatatctaattgttcata

SEQ ID NO: 36152 - DNA, 20 bp, Artificial Sequence
  chemically synthesized
attgttcatatattgcttcc

SEQ ID NO: 36153 - DNA, 20 bp, Artificial Sequence
  chemically synthesized
ggagttggagtacttgcatt

SEQ ID NO: 36154 - DNA, 20 bp, Artificial Sequence
  chemically synthesized
atatttagaccaaattctta

SEQ ID NO: 36155 - DNA, 20 bp, Artificial Sequence
  chemically synthesized
ccattaaaggttcataaatt

SEQ ID NO: 36156 - DNA, 20 bp, Artificial Sequence
  chemically synthesized
atttccagttttcacctttc

SEQ ID NO: 36157 - DNA, 20 bp, Artificial Sequence
  chemically synthesized
taccgcattaaaattaagcc

SEQ ID NO: 36158 - DNA, 20 bp, Artificial Sequence
  chemically synthesized
gccttctttttcatgccttt

SEQ ID NO: 36159 - DNA, 20 bp, Artificial Sequence
  chemically synthesized
ctttttcatgcctttttttg

SEQ ID NO: 36160 - DNA, 20 bp, Artificial Sequence
  chemically synthesized
ctttttttgttttgttttgt

SEQ ID NO: 36161 - DNA, 20 bp, Artificial Sequence
  chemically synthesized
tggattttataaaggcatca

SEQ ID NO: 36162 - DNA, 20 bp, Artificial Sequence
  chemically synthesized
attcatttttaaatatctaa

SEQ ID NO: 36163 - DNA, 20 bp, Artificial Sequence
  chemically synthesized
aagataatctacatttgaga

SEQ ID NO: 36164 - DNA, 20 bp, Artificial Sequence
  chemically synthesized
gctctgctgacattagcatg

SEQ ID NO: 36165 - DNA, 20 bp, Artificial Sequence
  chemically synthesized
gacttgcaaaatataggtta

SEQ ID NO: 36166 - DNA, 20 bp, Artificial Sequence
  chemically synthesized
atcaaattatcttactcttt

SEQ ID NO: 36167 - DNA, 20 bp, Artificial Sequence
  chemically synthesized
cttaaaggaggggcatttgc

SEQ ID NO: 36168 - DNA, 20 bp, Artificial Sequence
  chemically synthesized
taaaattaaatattaatttg

SEQ ID NO: 36169 - DNA, 20 bp, Artificial Sequence
  chemically synthesized
gggcgtgggctgagccatgg

SEQ ID NO: 36170 - DNA, 20 bp, Artificial Sequence
  chemically synthesized
atggccaggtttgagagaca

SEQ ID NO: 36171 - DNA, 20 bp, Artificial Sequence
  chemically synthesized
gctatcaaggccttcctgag

SEQ ID NO: 36172 - DNA, 20 bp, Artificial Sequence
  chemically synthesized
tctgtggatagggaaaattt

SEQ ID NO: 36173 - DNA, 20 bp, Artificial Sequence
  chemically synthesized
tagccattttctttcagtat

SEQ ID NO: 36174 - DNA, 20 bp, Artificial Sequence
  chemically synthesized
tgtgtgtgtgtgtgcctaag

SEQ ID NO: 36175 - DNA, 20 bp, Artificial Sequence
  chemically synthesized
ggcaaggtgggccagtagag

SEQ ID NO: 36176 - DNA, 20 bp, Artificial Sequence
  chemically synthesized
aaatccatttcagaatggag

SEQ ID NO: 36177 - DNA, 20 bp, Artificial Sequence
  chemically synthesized
cttgacctgctgatagaaca

SEQ ID NO: 36178 - DNA, 20 bp, Artificial Sequence
  chemically synthesized
tgctgatagaacaaggggct

SEQ ID NO: 36179 - DNA, 20 bp, Artificial Sequence
  chemically synthesized
atagatccctaaacatacta

SEQ ID NO: 36180 - DNA, 20 bp, Artificial Sequence
  chemically synthesized
gcattgctggtatttataga

SEQ ID NO: 36181 - DNA, 20 bp, Artificial Sequence
  chemically synthesized
tctcaccccagaatagcaag

SEQ ID NO: 36182 - DNA, 20 bp, Artificial Sequence
  chemically synthesized
tctcatatctaggttgctgg

SEQ ID NO: 36183 - DNA, 20 bp, Artificial Sequence
  chemically synthesized
ttcccaggaacctaatattc

SEQ ID NO: 36184 - DNA, 20 bp, Artificial Sequence
  chemically synthesized
cagcttcgtgacgttggatg

SEQ ID NO: 36185 - DNA, 20 bp, Artificial Sequence
  chemically synthesized
agggtttttctttttaaatg

SEQ ID NO: 36186 - DNA, 20 bp, Artificial Sequence
  chemically synthesized
ttttctttttaaatgagttg

SEQ ID NO: 36187 - DNA, 20 bp, Artificial Sequence
  chemically synthesized
ttggcttttgccactttaca

SEQ ID NO: 36188 - DNA, 20 bp, Artificial Sequence
  chemically synthesized
ttacacattgttttccaggt

SEQ ID NO: 36189 - DNA, 20 bp, Artificial Sequence
  chemically synthesized
gtctgccctggctcacaccg

SEQ ID NO: 36190 - DNA, 20 bp, Artificial Sequence
  chemically synthesized
cacaccgttctgtttttgca

SEQ ID NO: 36191 - DNA, 20 bp, Artificial Sequence
  chemically synthesized
gtgacttcaaggaagaaggg

SEQ ID NO: 36192 - DNA, 20 bp, Artificial Sequence
  chemically synthesized
ggtggtggtgagggtgtaca

SEQ ID NO: 36193 - DNA, 20 bp, Artificial Sequence
  chemically synthesized
attgttttttgtatttccta

SEQ ID NO: 36194 - DNA, 20 bp, Artificial Sequence
  chemically synthesized
atttcctattttgatttaaa

SEQ ID NO: 36195 - DNA, 20 bp, Artificial Sequence
  chemically synthesized
attttgatttaaatactgtt

SEQ ID NO: 36196 - DNA, 20 bp, Artificial Sequence
  chemically synthesized
tactgttttttgtttggttg

SEQ ID NO: 36197 - DNA, 20 bp, Artificial Sequence
  chemically synthesized
aagtcctaaacaagtgccac

SEQ ID NO: 36198 - DNA, 20 bp, Artificial Sequence
  chemically synthesized
agtgccacagaggatttctt

SEQ ID NO: 36199 - DNA, 20 bp, Artificial Sequence
  chemically synthesized
cttgataaaatttggagcac

SEQ ID NO: 36200 - DNA, 20 bp, Artificial Sequence
  chemically synthesized
aagtgagaattcccataatt

SEQ ID NO: 36201 - DNA, 20 bp, Artificial Sequence
  chemically synthesized
tatttaaaaggcagggaggg

SEQ ID NO: 36202 - DNA, 20 bp, Artificial Sequence
  chemically synthesized
agtttctgttccacaatcac

SEQ ID NO: 36203 - DNA, 20 bp, Artificial Sequence
  chemically synthesized
gctgtttcagtgaaaagcaa

SEQ ID NO: 36204 - DNA, 20 bp, Artificial Sequence
  chemically synthesized
cttccctttctggtgaatgt

SEQ ID NO: 36205 - DNA, 20 bp, Artificial Sequence
  chemically synthesized
tattttcagctgaatgtgag

SEQ ID NO: 36206 - DNA, 20 bp, Artificial Sequence
  chemically synthesized
gaatgtgagtgcagatttca

SEQ ID NO: 36207 - DNA, 20 bp, Artificial Sequence
  chemically synthesized
cctgcatttgcagaaaatct

SEQ ID NO: 36208 - DNA, 20 bp, Artificial Sequence
  chemically synthesized
gcagataatcattacatcta

SEQ ID NO: 36209 - DNA, 20 bp, Artificial Sequence
  chemically synthesized
aatcattacatctaacaagc

SEQ ID NO: 36210 - DNA, 20 bp, Artificial Sequence
  chemically synthesized
gaccaactcatttataatgg

SEQ ID NO: 36211 - DNA, 20 bp, Artificial Sequence
  chemically synthesized
ataaaaagaaatcctccttc

SEQ ID NO: 36212 - DNA, 20 bp, Artificial Sequence
  chemically synthesized
ctccttctagtgctttgggc

SEQ ID NO: 36213 - DNA, 20 bp, Artificial Sequence
  chemically synthesized
ctgaagcatccagatacatc

SEQ ID NO: 36214 - DNA, 20 bp, Artificial Sequence
  chemically synthesized
catccagatacatcttctgt

SEQ ID NO: 36215 - DNA, 20 bp, Artificial Sequence
  chemically synthesized
aatatgccagctcattcatt

SEQ ID NO: 36216 - DNA, 20 bp, Artificial Sequence
  chemically synthesized
aaacacatgacatagacagc

SEQ ID NO: 36217 - DNA, 20 bp, Artificial Sequence
  chemically synthesized
atttgagtcccaatttgagg

SEQ ID NO: 36218 - DNA, 20 bp, Artificial Sequence
  chemically synthesized
cttttcaaaggcctgaatgg

SEQ ID NO: 36219 - DNA, 20 bp, Artificial Sequence
  chemically synthesized
gaggggaaaacggctgtaaa

SEQ ID NO: 36220 - DNA, 20 bp, Artificial Sequence
  chemically synthesized
agcaacacttctctcgcctg

SEQ ID NO: 36221 - DNA, 20 bp, Artificial Sequence
  chemically synthesized
gaaataatataaatcacact

SEQ ID NO: 36222 - DNA, 20 bp, Artificial Sequence
  chemically synthesized
aagtaatcatgggctgaagt

SEQ ID NO: 36223 - DNA, 20 bp, Artificial Sequence
  chemically synthesized
tgcagtgcctttatcagtaa

SEQ ID NO: 36224 - DNA, 20 bp, Artificial Sequence
  chemically synthesized
cttaaacatcatcatttctg

SEQ ID NO: 36225 - DNA, 20 bp, Artificial Sequence
  chemically synthesized
catttctgtaatgtttgaaa

SEQ ID NO: 36226 - DNA, 20 bp, Artificial Sequence
  chemically synthesized
ctgtaatgtttgaaagaaag

SEQ ID NO: 36227 - DNA, 20 bp, Artificial Sequence
  chemically synthesized
actctgccaatcaatgatct

SEQ ID NO: 36228 - DNA, 20 bp, Artificial Sequence
  chemically synthesized
tttaaaatgtcatcagaaag

SEQ ID NO: 36229 - DNA, 20 bp, Artificial Sequence
  chemically synthesized
actgaagcagcagtcttctg

SEQ ID NO: 36230 - DNA, 20 bp, Artificial Sequence
  chemically synthesized
gatcttaaccttgggatgca

SEQ ID NO: 36231 - DNA, 20 bp, Artificial Sequence
  chemically synthesized
ataagcagtccctctattct

SEQ ID NO: 36232 - DNA, 20 bp, Artificial Sequence
  chemically synthesized
cctctattcttcttgcttcc

SEQ ID NO: 36233 - DNA, 20 bp, Artificial Sequence
  chemically synthesized
ctgtggatttaaatgccaaa

SEQ ID NO: 36234 - DNA, 20 bp, Artificial Sequence
  chemically synthesized
gcagtggcagtggaaattac

SEQ ID NO: 36235 - DNA, 20 bp, Artificial Sequence
  chemically synthesized
gagaaggtctctatacctag

SEQ ID NO: 36236 - DNA, 20 bp, Artificial Sequence
  chemically synthesized
ccatggggctgtctgtgtgt

SEQ ID NO: 36237 - DNA, 20 bp, Artificial Sequence
  chemically synthesized
ccatggaaatggagaagaaa

SEQ ID NO: 36238 - DNA, 20 bp, Artificial Sequence
  chemically synthesized
atccctgtcctccttcacct

SEQ ID NO: 36239 - DNA, 20 bp, Artificial Sequence
  chemically synthesized
acctgccagcttgtgggctg

SEQ ID NO: 36240 - DNA, 20 bp, Artificial Sequence
  chemically synthesized
tgactcctgagagcatgtgt

SEQ ID NO: 36241 - DNA, 20 bp, Artificial Sequence
  chemically synthesized
gagagaaggccctgggttct

SEQ ID NO: 36242 - DNA, 20 bp, Artificial Sequence
  chemically synthesized
gtttttacttttcctaggat

SEQ ID NO: 36243 - DNA, 20 bp, Artificial Sequence
  chemically synthesized
tcctaggatccctgcttcat

SEQ ID NO: 36244 - DNA, 20 bp, Artificial Sequence
  chemically synthesized
atttttgttttcaaggagtt

SEQ ID NO: 36245 - DNA, 20 bp, Artificial Sequence
  chemically synthesized
tcccaagcagagatgggtgg

SEQ ID NO: 36246 - DNA, 20 bp, Artificial Sequence
  chemically synthesized
tatcccattccagggccctt

SEQ ID NO: 36247 - DNA, 20 bp, Artificial Sequence
  chemically synthesized
ctcaatctccttgagcacag

SEQ ID NO: 36248 - DNA, 20 bp, Artificial Sequence
  chemically synthesized
tctgaggcagggaggcagct

SEQ ID NO: 36249 - DNA, 20 bp, Artificial Sequence
  chemically synthesized
cctgtaatgcccctcccagg

SEQ ID NO: 36250 - DNA, 20 bp, Artificial Sequence
  chemically synthesized
ttagaactatgagttcaaaa

SEQ ID NO: 36251 - DNA, 20 bp, Artificial Sequence
  chemically synthesized
atgagaatagaggaaaatgt

SEQ ID NO: 36252 - DNA, 20 bp, Artificial Sequence
  chemically synthesized
ttacacagcatttggaaagt

SEQ ID NO: 36253 - DNA, 20 bp, Artificial Sequence
  chemically synthesized
atttggaaagtgaatgatta

SEQ ID NO: 36254 - DNA, 20 bp, Artificial Sequence
  chemically synthesized
ccattgagtaaatacactat

SEQ ID NO: 36255 - DNA, 20 bp, Artificial Sequence
  chemically synthesized
ttagtgaatcatttactagg

SEQ ID NO: 36256 - DNA, 20 bp, Artificial Sequence
  chemically synthesized
aggaagaaaagttcactgca

SEQ ID NO: 36257 - DNA, 20 bp, Artificial Sequence
  chemically synthesized
gagaaccagtggtagataca

SEQ ID NO: 36258 - DNA, 20 bp, Artificial Sequence
  chemically synthesized
ggcctcctcccggggaagtc

SEQ ID NO: 36259 - DNA, 20 bp, Artificial Sequence
  chemically synthesized
ccgcaggccataaatgcaaa

SEQ ID NO: 36260 - DNA, 20 bp, Artificial Sequence
  chemically synthesized
gcaaagtatgatttaacaaa

SEQ ID NO: 36261 - DNA, 20 bp, Artificial Sequence
  chemically synthesized
agttgtcccaacctgtcaac

SEQ ID NO: 36262 - DNA, 20 bp, Artificial Sequence
  chemically synthesized
ttggtggaagggagggacag

SEQ ID NO: 36263 - DNA, 20 bp, Artificial Sequence
  chemically synthesized
agggacagaagcgtttcatt

SEQ ID NO: 36264 - DNA, 20 bp, Artificial Sequence
  chemically synthesized
ccacgctgataccttacatg

SEQ ID NO: 36265 - DNA, 20 bp, Artificial Sequence
  chemically synthesized
ccacactctccaccgcctga

SEQ ID NO: 36266 - DNA, 20 bp, Artificial Sequence
  chemically synthesized
atctgtgggccggtgacaga

SEQ ID NO: 36267 - DNA, 20 bp, Artificial Sequence
  chemically synthesized
aggttgaggccctggaagca

SEQ ID NO: 36268 - DNA, 20 bp, Artificial Sequence
  chemically synthesized
agcaaaaggatttcagcctg

SEQ ID NO: 36269 - DNA, 20 bp, Artificial Sequence
  chemically synthesized
cctgttcctagtagacctga

SEQ ID NO: 36270 - DNA, 20 bp, Artificial Sequence
  chemically synthesized
gatgttgtgctgttggttgg

SEQ ID NO: 36271 - DNA, 20 bp, Artificial Sequence
  chemically synthesized
aatttgctcagggaactctt

SEQ ID NO: 36272 - DNA, 20 bp, Artificial Sequence
  chemically synthesized
gattggtcagtggtataaat

SEQ ID NO: 36273 - DNA, 20 bp, Artificial Sequence
  chemically synthesized
aagcacgtcaaagccaaggc

SEQ ID NO: 36274 - DNA, 20 bp, Artificial Sequence
  chemically synthesized
gcagcatgccccgggcagag

SEQ ID NO: 36275 - DNA, 20 bp, Artificial Sequence
  chemically synthesized
cacctcaggcgagagggcag

SEQ ID NO: 36276 - DNA, 20 bp, Artificial Sequence
  chemically synthesized
tgctagaccattttttttgg

SEQ ID NO: 36277 - DNA, 20 bp, Artificial Sequence
  chemically synthesized
tgtgttaaccataggacata

SEQ ID NO: 36278 - DNA, 20 bp, Artificial Sequence
  chemically synthesized
ttaggcctgtgaagtgcctt

SEQ ID NO: 36279 - DNA, 20 bp, Artificial Sequence
  chemically synthesized
tagtgccagaaaggcaagtg

SEQ ID NO: 36280 - DNA, 20 bp, Artificial Sequence
  chemically synthesized
gtatgaccagtgtccagacg

SEQ ID NO: 36281 - DNA, 20 bp, Artificial Sequence
  chemically synthesized
ggccctgaggtggcagtggg

SEQ ID NO: 36282 - DNA, 20 bp, Artificial Sequence
  chemically synthesized
cttgagagctgaggcaggag

SEQ ID NO: 36283 - DNA, 20 bp, Artificial Sequence
  chemically synthesized
gaggcggaggttgcagtgag

SEQ ID NO: 36284 - DNA, 20 bp, Artificial Sequence
  chemically synthesized
tcaattaaaaaaaaaaaaaa

SEQ ID NO: 36285 - DNA, 20 bp, Artificial Sequence
  chemically synthesized
ttccataaaggccaggacag

SEQ ID NO: 36286 - DNA, 20 bp, Artificial Sequence
  chemically synthesized
gttggaggccttgccctcct

SEQ ID NO: 36287 - DNA, 20 bp, Artificial Sequence
  chemically synthesized
gtctctcacagcaccactgc

SEQ ID NO: 36288 - DNA, 20 bp, Artificial Sequence
  chemically synthesized
tcaggagtctcttggaaaca

SEQ ID NO: 36289 - DNA, 20 bp, Artificial Sequence
  chemically synthesized
gagtctcttggaaacaccat

SEQ ID NO: 36290 - DNA, 20 bp, Artificial Sequence
  chemically synthesized
gggatacatgtgcagaatgt

SEQ ID NO: 36291 - DNA, 20 bp, Artificial Sequence
  chemically synthesized
cataagtatacatgtaccat

SEQ ID NO: 36292 - DNA, 20 bp, Artificial Sequence
  chemically synthesized
ccctccccttgcccctccac

SEQ ID NO: 36293 - DNA, 20 bp, Artificial Sequence
  chemically synthesized
cccttgcccctccacccatg

SEQ ID NO: 36294 - DNA, 20 bp, Artificial Sequence
  chemically synthesized
tccacccatgtttggttttc

SEQ ID NO: 36295 - DNA, 20 bp, Artificial Sequence
  chemically synthesized
ttgtgagttgatgcagataa

SEQ ID NO: 36296 - DNA, 20 bp, Artificial Sequence
  chemically synthesized
atttgggagttgtgtgttct

SEQ ID NO: 36297 - DNA, 20 bp, Artificial Sequence
  chemically synthesized
tggcaggtgttatcagaatc

SEQ ID NO: 36298 - DNA, 20 bp, Artificial Sequence
  chemically synthesized
taacctgggagaaacgcaag

SEQ ID NO: 36299 - DNA, 20 bp, Artificial Sequence
  chemically synthesized
agaaacgcaagtgtggtttg

SEQ ID NO: 36300 - DNA, 20 bp, Artificial Sequence
  chemically synthesized
aggctttccaggtgtccaaa

SEQ ID NO: 36301 - DNA, 20 bp, Artificial Sequence
  chemically synthesized
agtggggcagggaggcatcg

SEQ ID NO: 36302 - DNA, 20 bp, Artificial Sequence
  chemically synthesized
gaggcatcggggtgtttgtg

SEQ ID NO: 36303 - DNA, 20 bp, Artificial Sequence
  chemically synthesized
gtcccttctaactacaaagg

SEQ ID NO: 36304 - DNA, 20 bp, Artificial Sequence
  chemically synthesized
atggaaactgataaattaga

SEQ ID NO: 36305 - DNA, 20 bp, Artificial Sequence
  chemically synthesized
gagtgatttttcacattaca

SEQ ID NO: 36306 - DNA, 20 bp, Artificial Sequence
  chemically synthesized
gaaagattgttaacttttca

SEQ ID NO: 36307 - DNA, 20 bp, Artificial Sequence
  chemically synthesized
cttttcaaaaggtttcacca

SEQ ID NO: 36308 - DNA, 20 bp, Artificial Sequence
  chemically synthesized
gagctcccccactgaattta

SEQ ID NO: 36309 - DNA, 20 bp, Artificial Sequence
  chemically synthesized
tcccccactgaatttaaagt

SEQ ID NO: 36310 - DNA, 20 bp, Artificial Sequence
  chemically synthesized
gaaattatgttggttagcaa

SEQ ID NO: 36311 - DNA, 20 bp, Artificial Sequence
  chemically synthesized
ttacagaaattcattttaca

SEQ ID NO: 36312 - DNA, 20 bp, Artificial Sequence
  chemically synthesized
aggtcaaggaccacagggtg

SEQ ID NO: 36313 - DNA, 20 bp, Artificial Sequence
  chemically synthesized
agggtgctgggctttgctgt

SEQ ID NO: 36314 - DNA, 20 bp, Artificial Sequence
  chemically synthesized
tgccaggctctggcatgagg

SEQ ID NO: 36315 - DNA, 20 bp, Artificial Sequence
  chemically synthesized
cttttcccttgacatttagc

SEQ ID NO: 36316 - DNA, 20 bp, Artificial Sequence
  chemically synthesized
gacatttagcctgggtttgg

SEQ ID NO: 36317 - DNA, 20 bp, Artificial Sequence
  chemically synthesized
ctcattggctcaggacacac

SEQ ID NO: 36318 - DNA, 20 bp, Artificial Sequence
  chemically synthesized
tcaggctcactctctaagcc

SEQ ID NO: 36319 - DNA, 20 bp, Artificial Sequence
  chemically synthesized
aggggaacaggtgtatcctg

SEQ ID NO: 36320 - DNA, 20 bp, Artificial Sequence
  chemically synthesized
aaacacttagggccagaaag

SEQ ID NO: 36321 - DNA, 20 bp, Artificial Sequence
  chemically synthesized
gtctctccagaggaacaagt

SEQ ID NO: 36322 - DNA, 20 bp, Artificial Sequence
  chemically synthesized
aagggcacccctatcctccc

SEQ ID NO: 36323 - DNA, 20 bp, Artificial Sequence
  chemically synthesized
atttggagggatggtcaagt

SEQ ID NO: 36324 - DNA, 20 bp, Artificial Sequence
  chemically synthesized
aaagtagtgtaggaaaatct

SEQ ID NO: 36325 - DNA, 20 bp, Artificial Sequence
  chemically synthesized
actggcaatgagacatctga

SEQ ID NO: 36326 - DNA, 20 bp, Artificial Sequence
  chemically synthesized
ggaagaacatggctatcaac

SEQ ID NO: 36327 - DNA, 20 bp, Artificial Sequence
  chemically synthesized
acagaacagatgaaccttca

SEQ ID NO: 36328 - DNA, 20 bp, Artificial Sequence
  chemically synthesized
aagatgtcacagaaatcttc

SEQ ID NO: 36329 - DNA, 20 bp, Artificial Sequence
  chemically synthesized
ccatttactctgtgcccacc

SEQ ID NO: 36330 - DNA, 20 bp, Artificial Sequence
  chemically synthesized
tactctgtgcccaccttggg

SEQ ID NO: 36331 - DNA, 20 bp, Artificial Sequence
  chemically synthesized
gcttctctctaagcatcttt

SEQ ID NO: 36332 - DNA, 20 bp, Artificial Sequence
  chemically synthesized
atatcctttctcttggctct

SEQ ID NO: 36333 - DNA, 20 bp, Artificial Sequence
  chemically synthesized
tggctctccaggtttaactc

SEQ ID NO: 36334 - DNA, 20 bp, Artificial Sequence
  chemically synthesized
gctgtgggagaaatctgtgt

SEQ ID NO: 36335 - DNA, 20 bp, Artificial Sequence
  chemically synthesized
actgcccacagcggctagcc

SEQ ID NO: 36336 - DNA, 20 bp, Artificial Sequence
  chemically synthesized
cacattttgcatagtgaggt

SEQ ID NO: 36337 - DNA, 20 bp, Artificial Sequence
  chemically synthesized
aagttccgccattctaaggc

SEQ ID NO: 36338 - DNA, 20 bp, Artificial Sequence
  chemically synthesized
cctattcaaccttttgaaat

SEQ ID NO: 36339 - DNA, 20 bp, Artificial Sequence
  chemically synthesized
caaagatggaacacaatgtc

SEQ ID NO: 36340 - DNA, 20 bp, Artificial Sequence
  chemically synthesized
gaacacaatgtctttggctt

SEQ ID NO: 36341 - DNA, 20 bp, Artificial Sequence
  chemically synthesized
cttagttgcttttcagaaaa

SEQ ID NO: 36342 - DNA, 20 bp, Artificial Sequence
  chemically synthesized
gattttttttttttggaatt

SEQ ID NO: 36343 - DNA, 20 bp, Artificial Sequence
  chemically synthesized
tttttttttggaattatatg

SEQ ID NO: 36344 - DNA, 20 bp, Artificial Sequence
  chemically synthesized
tgctttgcttatgttaaaga

SEQ ID NO: 36345 - DNA, 20 bp, Artificial Sequence
  chemically synthesized
agacacagcttgcagaaaaa

SEQ ID NO: 36346 - DNA, 20 bp, Artificial Sequence
  chemically synthesized
gaaaaattttgtttaggcct

SEQ ID NO: 36347 - DNA, 20 bp, Artificial Sequence
  chemically synthesized
aaaaggtgaagttagtaacc

SEQ ID NO: 36348 - DNA, 20 bp, Artificial Sequence
  chemically synthesized
gaggatagcattgatcaaaa

SEQ ID NO: 36349 - DNA, 20 bp, Artificial Sequence
  chemically synthesized
tcaaaaaagagttttaaaat

SEQ ID NO: 36350 - DNA, 20 bp, Artificial Sequence
  chemically synthesized
aaggaatctaaggaccatga

SEQ ID NO: 36351 - DNA, 20 bp, Artificial Sequence
  chemically synthesized
tatattgtagtgtctataat

SEQ ID NO: 36352 - DNA, 20 bp, Artificial Sequence
  chemically synthesized
tgtctataattattgctttc

SEQ ID NO: 36353 - DNA, 20 bp, Artificial Sequence
  chemically synthesized
aatacactttttaaagaaca

SEQ ID NO: 36354 - DNA, 20 bp, Artificial Sequence
  chemically synthesized
catttctagaacaaaagaga

SEQ ID NO: 36355 - DNA, 20 bp, Artificial Sequence
  chemically synthesized
taaagctggcacattttcat

SEQ ID NO: 36356 - DNA, 20 bp, Artificial Sequence
  chemically synthesized
actcaagtcacaggcatagc

SEQ ID NO: 36357 - DNA, 20 bp, Artificial Sequence
  chemically synthesized
agctgcactgttgttatttg

SEQ ID NO: 36358 - DNA, 20 bp, Artificial Sequence
  chemically synthesized
tgtgtggcttgaacctagta

SEQ ID NO: 36359 - DNA, 20 bp, Artificial Sequence
  chemically synthesized
catggaagagctgagggact

SEQ ID NO: 36360 - DNA, 20 bp, Artificial Sequence
  chemically synthesized
cattccacgtgggacagctc

SEQ ID NO: 36361 - DNA, 20 bp, Artificial Sequence
  chemically synthesized
cagggaaattatctaaaaac

SEQ ID NO: 36362 - DNA, 20 bp, Artificial Sequence
  chemically synthesized
taacacacatatgtacacat

SEQ ID NO: 36363 - DNA, 20 bp, Artificial Sequence
  chemically synthesized
tgtactcctgtggagagtcc

SEQ ID NO: 36364 - DNA, 20 bp, Artificial Sequence
  chemically synthesized
agtcattaaacgtgttggaa

SEQ ID NO: 36365 - DNA, 20 bp, Artificial Sequence
  chemically synthesized
aaacgtgttggaatgatgct

SEQ ID NO: 36366 - DNA, 20 bp, Artificial Sequence
  chemically synthesized
tggaatgatgctttttgctt

SEQ ID NO: 36367 - DNA, 20 bp, Artificial Sequence
  chemically synthesized
tggaaatctgcagtattacc

SEQ ID NO: 36368 - DNA, 20 bp, Artificial Sequence
  chemically synthesized
atgtggctgtattacacacc

SEQ ID NO: 36369 - DNA, 20 bp, Artificial Sequence
  chemically synthesized
gctgtattacacacccagtg

SEQ ID NO: 36370 - DNA, 20 bp, Artificial Sequence
  chemically synthesized
gttcttgaggaaaccaaaaa

SEQ ID NO: 36371 - DNA, 20 bp, Artificial Sequence
  chemically synthesized
taaattccaggaacatccca

SEQ ID NO: 36372 - DNA, 20 bp, Artificial Sequence
  chemically synthesized
aacattaaatcaaagccatt

SEQ ID NO: 36373 - DNA, 20 bp, Artificial Sequence
  chemically synthesized
aaaagtgtaagacatttgaa

SEQ ID NO: 36374 - DNA, 20 bp, Artificial Sequence
  chemically synthesized
acagctgcgttcgctgacat

SEQ ID NO: 36375 - DNA, 20 bp, Artificial Sequence
  chemically synthesized
acacaatctgtctggcacaa

SEQ ID NO: 36376 - DNA, 20 bp, Artificial Sequence
  chemically synthesized
tttcctaatggagggatcct

SEQ ID NO: 36377 - DNA, 20 bp, Artificial Sequence
  chemically synthesized
gagggatccttagggattcc

SEQ ID NO: 36378 - DNA, 20 bp, Artificial Sequence
  chemically synthesized
ttagggattccctaagctta

SEQ ID NO: 36379 - DNA, 20 bp, Artificial Sequence
  chemically synthesized
ggtctctgcccagggaattt

SEQ ID NO: 36380 - DNA, 20 bp, Artificial Sequence
  chemically synthesized
cccttaccctaagacagcag

SEQ ID NO: 36381 - DNA, 20 bp, Artificial Sequence
  chemically synthesized
ccctaagacagcagtgctga

SEQ ID NO: 36382 - DNA, 20 bp, Artificial Sequence
  chemically synthesized
agaatttattcaacatagaa

SEQ ID NO: 36383 - DNA, 20 bp, Artificial Sequence
  chemically synthesized
gctgcttccccaccctcaat

SEQ ID NO: 36384 - DNA, 20 bp, Artificial Sequence
  chemically synthesized
tgggaaggcagagctgctcc

SEQ ID NO: 36385 - DNA, 20 bp, Artificial Sequence
  chemically synthesized
atttccagttcatgtgggaa

SEQ ID NO: 36386 - DNA, 20 bp, Artificial Sequence
  chemically synthesized
taccaaagagaatattatgg

SEQ ID NO: 36387 - DNA, 20 bp, Artificial Sequence
  chemically synthesized
agaatcagctggggtcccca

SEQ ID NO: 36388 - DNA, 20 bp, Artificial Sequence
  chemically synthesized
cagctggggtccccagttgg

SEQ ID NO: 36389 - DNA, 20 bp, Artificial Sequence
  chemically synthesized
gggtgagtctcacaaagaca

SEQ ID NO: 36390 - DNA, 20 bp, Artificial Sequence
  chemically synthesized
tgtgctttttttctaaagta

SEQ ID NO: 36391 - DNA, 20 bp, Artificial Sequence
  chemically synthesized
atagcttcttaggctgatag

SEQ ID NO: 36392 - DNA, 20 bp, Artificial Sequence
  chemically synthesized
ggcccaggcagcagagcagg

SEQ ID NO: 36393 - DNA, 20 bp, Artificial Sequence
  chemically synthesized
cctcccccaagacggttaag

SEQ ID NO: 36394 - DNA, 20 bp, Artificial Sequence
  chemically synthesized
agaccactggatcaggagtc

SEQ ID NO: 36395 - DNA, 20 bp, Artificial Sequence
  chemically synthesized
gtcacttaatttctcatggc

SEQ ID NO: 36396 - DNA, 20 bp, Artificial Sequence
  chemically synthesized
gggacagacttgatgatagc

SEQ ID NO: 36397 - DNA, 20 bp, Artificial Sequence
  chemically synthesized
tgtagagatctggtcctgcc

SEQ ID NO: 36398 - DNA, 20 bp, Artificial Sequence
  chemically synthesized
gagatctggtcctgccgtca

SEQ ID NO: 36399 - DNA, 20 bp, Artificial Sequence
  chemically synthesized
cgtcagcttgtttagggcta

SEQ ID NO: 36400 - DNA, 20 bp, Artificial Sequence
  chemically synthesized
tagggctaatgggtttgtag

SEQ ID NO: 36401 - DNA, 20 bp, Artificial Sequence
  chemically synthesized
ttgtagacaagtttgccaac

SEQ ID NO: 36402 - DNA, 20 bp, Artificial Sequence
  chemically synthesized
gattcatgcgaggggctagg

SEQ ID NO: 36403 - DNA, 20 bp, Artificial Sequence
  chemically synthesized
tacaaggatccaagtacctg

SEQ ID NO: 36404 - DNA, 20 bp, Artificial Sequence
  chemically synthesized
cacagagatacctgggttgc

SEQ ID NO: 36405 - DNA, 20 bp, Artificial Sequence
  chemically synthesized
gtgtttcctaagaaaaggat

SEQ ID NO: 36406 - DNA, 20 bp, Artificial Sequence
  chemically synthesized
gaggcaaaaacaagtgcaaa

SEQ ID NO: 36407 - DNA, 20 bp, Artificial Sequence
  chemically synthesized
aacaagtgcaaagatggatt

SEQ ID NO: 36408 - DNA, 20 bp, Artificial Sequence
  chemically synthesized
aaacagtcaaatgtagacat

SEQ ID NO: 36409 - DNA, 20 bp, Artificial Sequence
  chemically synthesized
ttgtttgttaagtccggtct

SEQ ID NO: 36410 - DNA, 20 bp, Artificial Sequence
  chemically synthesized
gcttgtgttggttcactttg

SEQ ID NO: 36411 - DNA, 20 bp, Artificial Sequence
  chemically synthesized
ggttcactttgtggtgttta

SEQ ID NO: 36412 - DNA, 20 bp, Artificial Sequence
  chemically synthesized
gtagatgttctcaggctagg

SEQ ID NO: 36413 - DNA, 20 bp, Artificial Sequence
  chemically synthesized
aggctaggtggtgcttccac

SEQ ID NO: 36414 - DNA, 20 bp, Artificial Sequence
  chemically synthesized
tcttgtcccaactgccttgg

SEQ ID NO: 36415 - DNA, 20 bp, Artificial Sequence
  chemically synthesized
tattaagctaatggaaaaca

SEQ ID NO: 36416 - DNA, 20 bp, Artificial Sequence
  chemically synthesized
actgtttgttcaccatcaaa

SEQ ID NO: 36417 - DNA, 20 bp, Artificial Sequence
  chemically synthesized
accacataaaccgtaaaatc

SEQ ID NO: 36418 - DNA, 20 bp, Artificial Sequence
  chemically synthesized
caaaaaaatctcagtgctac

SEQ ID NO: 36419 - DNA, 20 bp, Artificial Sequence
  chemically synthesized
ctacaaatgtttcattgact

SEQ ID NO: 36420 - DNA, 20 bp, Artificial Sequence
  chemically synthesized
gtaaaatggtgaagatgggt

SEQ ID NO: 36421 - DNA, 20 bp, Artificial Sequence
  chemically synthesized
gaagtctaatctttatcttc

SEQ ID NO: 36422 - DNA, 20 bp, Artificial Sequence
  chemically synthesized
tgtgagaagccacatctgtg

SEQ ID NO: 36423 - DNA, 20 bp, Artificial Sequence
  chemically synthesized
ctgtgtaaggtttccagttg

SEQ ID NO: 36424 - DNA, 20 bp, Artificial Sequence
  chemically synthesized
ccagctcagtccagaaatgc

SEQ ID NO: 36425 - DNA, 20 bp, Artificial Sequence
  chemically synthesized
gtgggactctgtcccataaa

SEQ ID NO: 36426 - DNA, 20 bp, Artificial Sequence
  chemically synthesized
ctactcatttcctatcagca

SEQ ID NO: 36427 - DNA, 20 bp, Artificial Sequence
  chemically synthesized
tttcctatcagcattttgct

SEQ ID NO: 36428 - DNA, 20 bp, Artificial Sequence
  chemically synthesized
atcagcattttgctttttgc

SEQ ID NO: 36429 - DNA, 20 bp, Artificial Sequence
  chemically synthesized
gccttgcagataaaatcccc

SEQ ID NO: 36430 - DNA, 20 bp, Artificial Sequence
  chemically synthesized
tccaggctacccacaatatt

SEQ ID NO: 36431 - DNA, 20 bp, Artificial Sequence
  chemically synthesized
aatattaccagttttcccct

SEQ ID NO: 36432 - DNA, 20 bp, Artificial Sequence
  chemically synthesized
gaaataactcaccactcttc

SEQ ID NO: 36433 - DNA, 20 bp, Artificial Sequence
  chemically synthesized
ggaattgaaatgtgatatcc

SEQ ID NO: 36434 - DNA, 20 bp, Artificial Sequence
  chemically synthesized
atcctgtggtttatgatgca

SEQ ID NO: 36435 - DNA, 20 bp, Artificial Sequence
  chemically synthesized
atgcacgttgtttgtagctg

SEQ ID NO: 36436 - DNA, 20 bp, Artificial Sequence
  chemically synthesized
acgttgtttgtagctgtagt

SEQ ID NO: 36437 - DNA, 20 bp, Artificial Sequence
  chemically synthesized
tgtagctgtagtgcttgatt

SEQ ID NO: 36438 - DNA, 20 bp, Artificial Sequence
  chemically synthesized
actgaaggagttacttccaa

SEQ ID NO: 36439 - DNA, 20 bp, Artificial Sequence
  chemically synthesized
gtcttgtcttgctccgtggc

SEQ ID NO: 36440 - DNA, 20 bp, Artificial Sequence
  chemically synthesized
caaggccagaatcaaaagga

SEQ ID NO: 36441 - DNA, 20 bp, Artificial Sequence
  chemically synthesized
taattttgactaatttttct

SEQ ID NO: 36442 - DNA, 20 bp, Artificial Sequence
  chemically synthesized
accaccatttacttgttcaa

SEQ ID NO: 36443 - DNA, 20 bp, Artificial Sequence
  chemically synthesized
ttaaatttgtccatttatac

SEQ ID NO: 36444 - DNA, 20 bp, Artificial Sequence
  chemically synthesized
tacaaatgttttctgaaaga

SEQ ID NO: 36445 - DNA, 20 bp, Artificial Sequence
  chemically synthesized
gatactgttttagaaaataa

SEQ ID NO: 36446 - DNA, 20 bp, Artificial Sequence
  chemically synthesized
ctgttttagaaaataataca

SEQ ID NO: 36447 - DNA, 20 bp, Artificial Sequence
  chemically synthesized
ctaaaaggttagggggtggg

SEQ ID NO: 36448 - DNA, 20 bp, Artificial Sequence
  chemically synthesized
agagttaaggctctaagggg

SEQ ID NO: 36449 - DNA, 20 bp, Artificial Sequence
  chemically synthesized
agcagggcatgcaccctgag

SEQ ID NO: 36450 - DNA, 20 bp, Artificial Sequence
  chemically synthesized
ctgagaccagattcaaagcc

SEQ ID NO: 36451 - DNA, 20 bp, Artificial Sequence
  chemically synthesized
ggcctaagcctgggttaggt

SEQ ID NO: 36452 - DNA, 20 bp, Artificial Sequence
  chemically synthesized
gggttaggtcacagattgca

SEQ ID NO: 36453 - DNA, 20 bp, Artificial Sequence
  chemically synthesized
aaggtttaggaggttgggct

SEQ ID NO: 36454 - DNA, 20 bp, Artificial Sequence
  chemically synthesized
gcctggtcttcctgagggct

SEQ ID NO: 36455 - DNA, 20 bp, Artificial Sequence
  chemically synthesized
ggtcttcctgagggctggga

SEQ ID NO: 36456 - DNA, 20 bp, Artificial Sequence
  chemically synthesized
gatttgactggtaggaaagt

SEQ ID NO: 36457 - DNA, 20 bp, Artificial Sequence
  chemically synthesized
cttcccacaaagggagggta

SEQ ID NO: 36458 - DNA, 20 bp, Artificial Sequence
  chemically synthesized
ggcggcattaacctgctgcc

SEQ ID NO: 36459 - DNA, 20 bp, Artificial Sequence
  chemically synthesized
ctcacattcacattcgacct

SEQ ID NO: 36460 - DNA, 20 bp, Artificial Sequence
  chemically synthesized
attcgacctgatagtttaca

SEQ ID NO: 36461 - DNA, 20 bp, Artificial Sequence
  chemically synthesized
ttcccaacaattcttacagg

SEQ ID NO: 36462 - DNA, 20 bp, Artificial Sequence
  chemically synthesized
ctccttgttcttctgaatct

SEQ ID NO: 36463 - DNA, 20 bp, Artificial Sequence
  chemically synthesized
aagccagtaggtgggctaat

SEQ ID NO: 36464 - DNA, 20 bp, Artificial Sequence
  chemically synthesized
ccttttgatgtctcaagttc

SEQ ID NO: 36465 - DNA, 20 bp, Artificial Sequence
  chemically synthesized
cctatgcttaggggccaggt

SEQ ID NO: 36466 - DNA, 20 bp, Artificial Sequence
  chemically synthesized
atgaggctctcaaattgaga

SEQ ID NO: 36467 - DNA, 20 bp, Artificial Sequence
  chemically synthesized
gtaacacatttattgatgac

SEQ ID NO: 36468 - DNA, 20 bp, Artificial Sequence
  chemically synthesized
ccggcatgagctgagtgaaa

SEQ ID NO: 36469 - DNA, 20 bp, Artificial Sequence
  chemically synthesized
ttagtggactggtaataatt

SEQ ID NO: 36470 - DNA, 20 bp, Artificial Sequence
  chemically synthesized
aacagcccttctcattgaca

SEQ ID NO: 36471 - DNA, 20 bp, Artificial Sequence
  chemically synthesized
tcacataactggctctgaaa

SEQ ID NO: 36472 - DNA, 20 bp, Artificial Sequence
  chemically synthesized
cttgatgtagtgctgtatgc

SEQ ID NO: 36473 - DNA, 20 bp, Artificial Sequence
  chemically synthesized
ccactaattatgagtctagt

SEQ ID NO: 36474 - DNA, 20 bp, Artificial Sequence
  chemically synthesized
gtctagtcctggatttcaat

SEQ ID NO: 36475 - DNA, 20 bp, Artificial Sequence
  chemically synthesized
agtgatgaacgtgttaagga

SEQ ID NO: 36476 - DNA, 20 bp, Artificial Sequence
  chemically synthesized
ggatcatgtagttggaacca

SEQ ID NO: 36477 - DNA, 20 bp, Artificial Sequence
  chemically synthesized
atttataaaaatgttctcaa

SEQ ID NO: 36478 - DNA, 20 bp, Artificial Sequence
  chemically synthesized
agataatgtgatactaatgt

SEQ ID NO: 36479 - DNA, 20 bp, Artificial Sequence
  chemically synthesized
ttcccccttccacattagac

SEQ ID NO: 36480 - DNA, 20 bp, Artificial Sequence
  chemically synthesized
tttggtatcttaccatctaa

SEQ ID NO: 36481 - DNA, 20 bp, Artificial Sequence
  chemically synthesized
cttaccatctaatcttgttt

SEQ ID NO: 36482 - DNA, 20 bp, Artificial Sequence
  chemically synthesized
ccaggagtgagatatattga

SEQ ID NO: 36483 - DNA, 20 bp, Artificial Sequence
  chemically synthesized
caggagtccattatttagac

SEQ ID NO: 36484 - DNA, 20 bp, Artificial Sequence
  chemically synthesized
tagacaagtgcttgagcgag

SEQ ID NO: 36485 - DNA, 20 bp, Artificial Sequence
  chemically synthesized
gctggcttattttggaatac

SEQ ID NO: 36486 - DNA, 20 bp, Artificial Sequence
  chemically synthesized
ggggctcctgagaagaccct

SEQ ID NO: 36487 - DNA, 20 bp, Artificial Sequence
  chemically synthesized
gctaaatggaggcatcatat

SEQ ID NO: 36488 - DNA, 20 bp, Artificial Sequence
  chemically synthesized
ttctcactcttaacctccct

SEQ ID NO: 36489 - DNA, 20 bp, Artificial Sequence
  chemically synthesized
ccttcttttaaaagaaggag

SEQ ID NO: 36490 - DNA, 20 bp, Artificial Sequence
  chemically synthesized
gttatttctcagttatattt

SEQ ID NO: 36491 - DNA, 20 bp, Artificial Sequence
  chemically synthesized
tttttttttcagaatctctg

SEQ ID NO: 36492 - DNA, 20 bp, Artificial Sequence
  chemically synthesized
ttttcagaatctctgggaag

SEQ ID NO: 36493 - DNA, 20 bp, Artificial Sequence
  chemically synthesized
ttaagcagggcccctctcca

SEQ ID NO: 36494 - DNA, 20 bp, Artificial Sequence
  chemically synthesized
tgactagctgaactgtatct

SEQ ID NO: 36495 - DNA, 20 bp, Artificial Sequence
  chemically synthesized
ctgctgcctgtcatggcgct

SEQ ID NO: 36496 - DNA, 20 bp, Artificial Sequence
  chemically synthesized
tccttaaactaggatgctgt

SEQ ID NO: 36497 - DNA, 20 bp, Artificial Sequence
  chemically synthesized
tctgaccgggggacaactcc

SEQ ID NO: 36498 - DNA, 20 bp, Artificial Sequence
  chemically synthesized
gcctatccgttaaatctgaa

SEQ ID NO: 36499 - DNA, 20 bp, Artificial Sequence
  chemically synthesized
aatctgaatgaagtttttct

SEQ ID NO: 36500 - DNA, 20 bp, Artificial Sequence
  chemically synthesized
tttaacaatatcaacaatta

SEQ ID NO: 36501 - DNA, 20 bp, Artificial Sequence
  chemically synthesized
ccttttttgatacctctatg

SEQ ID NO: 36502 - DNA, 20 bp, Artificial Sequence
  chemically synthesized
acccaggggggaatagaaag

SEQ ID NO: 36503 - DNA, 20 bp, Artificial Sequence
  chemically synthesized
agctgggatttaggaagcca

SEQ ID NO: 36504 - DNA, 20 bp, Artificial Sequence
  chemically synthesized
gtttccttgggtcaccttgt

SEQ ID NO: 36505 - DNA, 20 bp, Artificial Sequence
  chemically synthesized
acagaggcacatggagatga

SEQ ID NO: 36506 - DNA, 20 bp, Artificial Sequence
  chemically synthesized
aactacagctgatggaactg

SEQ ID NO: 36507 - DNA, 20 bp, Artificial Sequence
  chemically synthesized
catcctcaagccagaactgg

SEQ ID NO: 36508 - DNA, 20 bp, Artificial Sequence
  chemically synthesized
gccagaactggtcaggattt

SEQ ID NO: 36509 - DNA, 20 bp, Artificial Sequence
  chemically synthesized
tggtcaggatttttctgctt

SEQ ID NO: 36510 - DNA, 20 bp, Artificial Sequence
  chemically synthesized
tggatataaaatttctagaa

SEQ ID NO: 36511 - DNA, 20 bp, Artificial Sequence
  chemically synthesized
ggcacagggggtaggtcagt

SEQ ID NO: 36512 - DNA, 20 bp, Artificial Sequence
  chemically synthesized
gcaattgctgatgcccgcct

SEQ ID NO: 36513 - DNA, 20 bp, Artificial Sequence
  chemically synthesized
caaacagccattcaccagtg

SEQ ID NO: 36514 - DNA, 20 bp, Artificial Sequence
  chemically synthesized
tgcaacacgcacagaacact

SEQ ID NO: 36515 - DNA, 20 bp, Artificial Sequence
  chemically synthesized
tccttcccagccacctctcc

SEQ ID NO: 36516 - DNA, 20 bp, Artificial Sequence
  chemically synthesized
ataccaggatcagtatcgag

SEQ ID NO: 36517 - DNA, 20 bp, Artificial Sequence
  chemically synthesized
aggcttccggcctggcagaa

SEQ ID NO: 36518 - DNA, 20 bp, Artificial Sequence
  chemically synthesized
gcgctttccacccactcccc

SEQ ID NO: 36519 - DNA, 20 bp, Artificial Sequence
  chemically synthesized
atggctatggagcctcccgc

SEQ ID NO: 36520 - DNA, 20 bp, Artificial Sequence
  chemically synthesized
cggagagcgagagggtggac

SEQ ID NO: 36521 - DNA, 20 bp, Artificial Sequence
  chemically synthesized
ggcagctcaaagatcccttc

SEQ ID NO: 36522 - DNA, 20 bp, Artificial Sequence
  chemically synthesized
cggagcactcctcggagaac

SEQ ID NO: 36523 - DNA, 20 bp, Artificial Sequence
  chemically synthesized
actcctcggagaacgggagt

SEQ ID NO: 36524 - DNA, 20 bp, Artificial Sequence
  chemically synthesized
acgcatggccaggtggggaa

SEQ ID NO: 36525 - DNA, 20 bp, Artificial Sequence
  chemically synthesized
gccctccagccccactccct

SEQ ID NO: 36526 - DNA, 20 bp, Artificial Sequence
  chemically synthesized
taggatttttttctagtccc

SEQ ID NO: 36527 - DNA, 20 bp, Artificial Sequence
  chemically synthesized
taacgaagctaagaatatga

SEQ ID NO: 36528 - DNA, 20 bp, Artificial Sequence
  chemically synthesized
agagtgcttgtcaccagcac

SEQ ID NO: 36529 - DNA, 20 bp, Artificial Sequence
  chemically synthesized
ttttttttcctttatgttct

SEQ ID NO: 36530 - DNA, 20 bp, Artificial Sequence
  chemically synthesized
tgcaataatttacatgttgt

SEQ ID NO: 36531 - DNA, 20 bp, Artificial Sequence
  chemically synthesized
tcgttgctgagcaaacatgt

SEQ ID NO: 36532 - DNA, 20 bp, Artificial Sequence
  chemically synthesized
attctgtaatacatatcatg

SEQ ID NO: 36533 - DNA, 20 bp, Artificial Sequence
  chemically synthesized
cgtgaggaggaaaaacagtc

SEQ ID NO: 36534 - DNA, 20 bp, Artificial Sequence
  chemically synthesized
caaattaacagaaaaacaga

SEQ ID NO: 36535 - DNA, 20 bp, Artificial Sequence
  chemically synthesized
agaacaagtttattctatca

SEQ ID NO: 36536 - DNA, 20 bp, Artificial Sequence
  chemically synthesized
ctttctacttgttataaact

SEQ ID NO: 36537 - DNA, 20 bp, Artificial Sequence
  chemically synthesized
tagttaatcatcatttttcc

SEQ ID NO: 36538 - DNA, 20 bp, Artificial Sequence
  chemically synthesized
tagtttaattttataaacaa

SEQ ID NO: 36539 - DNA, 20 bp, Artificial Sequence
  chemically synthesized
aaagctactttgctcctggt

SEQ ID NO: 36540 - DNA, 20 bp, Artificial Sequence
  chemically synthesized
gtgagagcttaaaagaaatg

SEQ ID NO: 36541 - DNA, 20 bp, Artificial Sequence
  chemically synthesized
aagaaatgggctgttttgcc

SEQ ID NO: 36542 - DNA, 20 bp, Artificial Sequence
  chemically synthesized
aaagttttattttttttaaa

SEQ ID NO: 36543 - DNA, 20 bp, Artificial Sequence
  chemically synthesized
ggagttcattttatgaagat

SEQ ID NO: 36544 - DNA, 20 bp, Artificial Sequence
  chemically synthesized
tgaaaggaagaggctgacaa

SEQ ID NO: 36545 - DNA, 20 bp, Artificial Sequence
  chemically synthesized
gaggggaacagaagaaaata

SEQ ID NO: 36546 - DNA, 20 bp, Artificial Sequence
  chemically synthesized
ataagctaatattgatacaa

SEQ ID NO: 36547 - DNA, 20 bp, Artificial Sequence
  chemically synthesized
gctatttgtgttaacatgga

SEQ ID NO: 36548 - DNA, 20 bp, Artificial Sequence
  chemically synthesized
tgttaacatggaagaggatt

SEQ ID NO: 36549 - DNA, 20 bp, Artificial Sequence
  chemically synthesized
taagtgcactgtacaatttt

SEQ ID NO: 36550 - DNA, 20 bp, Artificial Sequence
  chemically synthesized
gccagccatttacttgacta

SEQ ID NO: 36551 - DNA, 20 bp, Artificial Sequence
  chemically synthesized
aatacacttaacatagaaat

SEQ ID NO: 36552 - DNA, 20 bp, Artificial Sequence
  chemically synthesized
cacttaacatagaaatgaat

SEQ ID NO: 36553 - DNA, 20 bp, Artificial Sequence
  chemically synthesized
acatagaaatgaatgattgc

SEQ ID NO: 36554 - DNA, 20 bp, Artificial Sequence
  chemically synthesized
ttgctttcgcttctacagtg

SEQ ID NO: 36555 - DNA, 20 bp, Artificial Sequence
  chemically synthesized
tttttttaaaaaacacttca

SEQ ID NO: 36556 - DNA, 20 bp, Artificial Sequence
  chemically synthesized
aaaaaaaacatacattgggg

SEQ ID NO: 36557 - DNA, 20 bp, Artificial Sequence
  chemically synthesized
aacatacattggggaaaggt

SEQ ID NO: 36558 - DNA, 20 bp, Artificial Sequence
  chemically synthesized
tataggaaaatgcacactca

SEQ ID NO: 36559 - DNA, 20 bp, Artificial Sequence
  chemically synthesized
aggcactatagtatttatat

SEQ ID NO: 36560 - DNA, 20 bp, Artificial Sequence
  chemically synthesized
ttgaagcttgtatttttaac

SEQ ID NO: 36561 - DNA, 20 bp, Artificial Sequence
  chemically synthesized
taatatagtgcaaattattt

SEQ ID NO: 36562 - DNA, 20 bp, Artificial Sequence
  chemically synthesized
cagatgagaagccatataat

SEQ ID NO: 36563 - DNA, 20 bp, Artificial Sequence
  chemically synthesized
cagtactgcaagctaataac

SEQ ID NO: 36564 - DNA, 20 bp, Artificial Sequence
  chemically synthesized
taacgttggtttgttatgta

SEQ ID NO: 36565 - DNA, 20 bp, Artificial Sequence
  chemically synthesized
aaggaaaaaaaaaaaaaaac

SEQ ID NO: 36566 - DNA, 20 bp, Artificial Sequence
  chemically synthesized
aaaaaaaaaaaccaatgttt

SEQ ID NO: 36567 - DNA, 20 bp, Artificial Sequence
  chemically synthesized
tttcattgccaaaaactaaa

SEQ ID NO: 36568 - DNA, 20 bp, Artificial Sequence
  chemically synthesized
aaactaaatggtgctttata

SEQ ID NO: 36569 - DNA, 20 bp, Artificial Sequence
  chemically synthesized
caaagcatattaaagagaaa

SEQ ID NO: 36570 - DNA, 20 bp, Artificial Sequence
  chemically synthesized
ttttctattcctgtaatgaa

SEQ ID NO: 36571 - DNA, 20 bp, Artificial Sequence
  chemically synthesized
ctatgggagtcactatttat

SEQ ID NO: 36572 - DNA, 20 bp, Artificial Sequence
  chemically synthesized
taatttgatcttttattttt

SEQ ID NO: 36573 - DNA, 20 bp, Artificial Sequence
  chemically synthesized
atgaccaaaggtcattacaa

SEQ ID NO: 36574 - DNA, 20 bp, Artificial Sequence
  chemically synthesized
acaacctggctttttattgt

SEQ ID NO: 36575 - DNA, 20 bp, Artificial Sequence
  chemically synthesized
tctattggaaaaaccactgt

SEQ ID NO: 36576 - DNA, 20 bp, Artificial Sequence
  chemically synthesized
aaaaaattaaagtacacatt

SEQ ID NO: 36577 - DNA, 20 bp, Artificial Sequence
  chemically synthesized
aaattacttgcaagaaaata

SEQ ID NO: 36578 - DNA, 20 bp, Artificial Sequence
  chemically synthesized
agaaggccagtcagtctttt

SEQ ID NO: 36579 - DNA, 20 bp, Artificial Sequence
  chemically synthesized
gacatatctcaaaccctgga

SEQ ID NO: 36580 - DNA, 20 bp, Artificial Sequence
  chemically synthesized
tcaaaccctggacatagttt

SEQ ID NO: 36581 - DNA, 20 bp, Artificial Sequence
  chemically synthesized
tggacatagttttaaggctt

SEQ ID NO: 36582 - DNA, 20 bp, Artificial Sequence
  chemically synthesized
tttaaggctttccagtttag

SEQ ID NO: 36583 - DNA, 20 bp, Artificial Sequence
  chemically synthesized
aatagttttcaagaaatgga

SEQ ID NO: 36584 - DNA, 20 bp, Artificial Sequence
  chemically synthesized
gttcttttctattctcccat

SEQ ID NO: 36585 - DNA, 20 bp, Artificial Sequence
  chemically synthesized
tatcttagaacataatgtaa

SEQ ID NO: 36586 - DNA, 20 bp, Artificial Sequence
  chemically synthesized
tttttaaaaaaaatcagctc

SEQ ID NO: 36587 - DNA, 20 bp, Artificial Sequence
  chemically synthesized
aaaatctggaaacaaaggca

SEQ ID NO: 36588 - DNA, 20 bp, Artificial Sequence
  chemically synthesized
ctggaaacaaaggcatcagg

SEQ ID NO: 36589 - DNA, 20 bp, Artificial Sequence
  chemically synthesized
aacaaaggcatcaggttttg

SEQ ID NO: 36590 - DNA, 20 bp, Artificial Sequence
  chemically synthesized
aggcatcaggttttgttttg

SEQ ID NO: 36591 - DNA, 20 bp, Artificial Sequence
  chemically synthesized
tcaggttttgttttgttttg

SEQ ID NO: 36592 - DNA, 20 bp, Artificial Sequence
  chemically synthesized
ttttgttttgttttgttttg

SEQ ID NO: 36593 - DNA, 20 bp, Artificial Sequence
  chemically synthesized
gtgaaatctttggaatcagc

SEQ ID NO: 36594 - DNA, 20 bp, Artificial Sequence
  chemically synthesized
actgatttcctgagatgcat

SEQ ID NO: 36595 - DNA, 20 bp, Artificial Sequence
  chemically synthesized
atcccaggaaccctagatgc

SEQ ID NO: 36596 - DNA, 20 bp, Artificial Sequence
  chemically synthesized
tagatgctacagattacttt

SEQ ID NO: 36597 - DNA, 20 bp, Artificial Sequence
  chemically synthesized
tactgcatgttgcagcatct

SEQ ID NO: 36598 - DNA, 20 bp, Artificial Sequence
  chemically synthesized
tgccttttatctgaggcaag

SEQ ID NO: 36599 - DNA, 20 bp, Artificial Sequence
  chemically synthesized
ttctaaagtataaagaaagt

SEQ ID NO: 36600 - DNA, 20 bp, Artificial Sequence
  chemically synthesized
aagtcaatgttttctgaaaa

SEQ ID NO: 36601 - DNA, 20 bp, Artificial Sequence
  chemically synthesized
cgtgcggtaccttgagaact

SEQ ID NO: 36602 - DNA, 20 bp, Artificial Sequence
  chemically synthesized
acttagaaaagatatactgt

SEQ ID NO: 36603 - DNA, 20 bp, Artificial Sequence
  chemically synthesized
aaaagatatactgtatgtgt

SEQ ID NO: 36604 - DNA, 20 bp, Artificial Sequence
  chemically synthesized
tatactgtatgtgttttgga

SEQ ID NO: 36605 - DNA, 20 bp, Artificial Sequence
  chemically synthesized
aaataattccccagtgccat

SEQ ID NO: 36606 - DNA, 20 bp, Artificial Sequence
  chemically synthesized
ggagctatgagtgcaactgt

SEQ ID NO: 36607 - DNA, 20 bp, Artificial Sequence
  chemically synthesized
atatgctgctcttagcgtaa

SEQ ID NO: 36608 - DNA, 20 bp, Artificial Sequence
  chemically synthesized
gcaaacatctggtgataaat

SEQ ID NO: 36609 - DNA, 20 bp, Artificial Sequence
  chemically synthesized
atctggtgataaatcacaga

SEQ ID NO: 36610 - DNA, 20 bp, Artificial Sequence
  chemically synthesized
ggtgataaatcacagattat

SEQ ID NO: 36611 - DNA, 20 bp, Artificial Sequence
  chemically synthesized
atgtctcttaaaatcctcaa

SEQ ID NO: 36612 - DNA, 20 bp, Artificial Sequence
  chemically synthesized
tcctcaagtaagtttttgta

SEQ ID NO: 36613 - DNA, 20 bp, Artificial Sequence
  chemically synthesized
tgttctctacatacctgaac

SEQ ID NO: 36614 - DNA, 20 bp, Artificial Sequence
  chemically synthesized
ataccgcaaattctatttct

SEQ ID NO: 36615 - DNA, 20 bp, Artificial Sequence
  chemically synthesized
gaacccatttgctatcctct

SEQ ID NO: 36616 - DNA, 20 bp, Artificial Sequence
  chemically synthesized
tggcagaaagtgtgaagtag

SEQ ID NO: 36617 - DNA, 20 bp, Artificial Sequence
  chemically synthesized
agggcattctgtagatatag

SEQ ID NO: 36618 - DNA, 20 bp, Artificial Sequence
  chemically synthesized
cttgaaaggaagtggcggga

SEQ ID NO: 36619 - DNA, 20 bp, Artificial Sequence
  chemically synthesized
ttggagaaataaggaaatga

SEQ ID NO: 36620 - DNA, 20 bp, Artificial Sequence
  chemically synthesized
tgaggtggtttattcacaga

SEQ ID NO: 36621 - DNA, 20 bp, Artificial Sequence
  chemically synthesized
acacagtttgctgaaaggta

SEQ ID NO: 36622 - DNA, 20 bp, Artificial Sequence
  chemically synthesized
aagcctcaggccccatcctc

SEQ ID NO: 36623 - DNA, 20 bp, Artificial Sequence
  chemically synthesized
agagactgagggaggaaata

SEQ ID NO: 36624 - DNA, 20 bp, Artificial Sequence
  chemically synthesized
agggaggaaatacagtgttt

SEQ ID NO: 36625 - DNA, 20 bp, Artificial Sequence
  chemically synthesized
ttgtaactgtgtgttcctca

SEQ ID NO: 36626 - DNA, 20 bp, Artificial Sequence
  chemically synthesized
ggaactttgccgatatgagg

SEQ ID NO: 36627 - DNA, 20 bp, Artificial Sequence
  chemically synthesized
ggattggcagagttctctca

SEQ ID NO: 36628 - DNA, 20 bp, Artificial Sequence
  chemically synthesized
ttctctcaacctgcttggaa

SEQ ID NO: 36629 - DNA, 20 bp, Artificial Sequence
  chemically synthesized
ttaaaaggcatgagccatct

SEQ ID NO: 36630 - DNA, 20 bp, Artificial Sequence
  chemically synthesized
atgggttgtccggtctgcac

SEQ ID NO: 36631 - DNA, 20 bp, Artificial Sequence
  chemically synthesized
atctcgttatcccattagcc

SEQ ID NO: 36632 - DNA, 20 bp, Artificial Sequence
  chemically synthesized
ctcagcctttaggggaatgg

SEQ ID NO: 36633 - DNA, 20 bp, Artificial Sequence
  chemically synthesized
cagctcgatggttgatccaa

SEQ ID NO: 36634 - DNA, 20 bp, Artificial Sequence
  chemically synthesized
cccctaaacccatagggggg

SEQ ID NO: 36635 - DNA, 20 bp, Artificial Sequence
  chemically synthesized
attggtagcaggttggacga

SEQ ID NO: 36636 - DNA, 20 bp, Artificial Sequence
  chemically synthesized
gtagcaggttggacgaaagg

SEQ ID NO: 36637 - DNA, 20 bp, Artificial Sequence
  chemically synthesized
gacttagcgctggactggga

SEQ ID NO: 36638 - DNA, 20 bp, Artificial Sequence
  chemically synthesized
ggggagaggaggccccaggc

SEQ ID NO: 36639 - DNA, 20 bp, Artificial Sequence
  chemically synthesized
cacatccggactcccagttc

SEQ ID NO: 36640 - DNA, 20 bp, Artificial Sequence
  chemically synthesized
ccaaaaaagaaaagaaaact

SEQ ID NO: 36641 - DNA, 20 bp, Artificial Sequence
  chemically synthesized
catgtttgaaagaaactaca

SEQ ID NO: 36642 - DNA, 20 bp, Artificial Sequence
  chemically synthesized
tgagagcaactcttttgggt

SEQ ID NO: 36643 - DNA, 20 bp, Artificial Sequence
  chemically synthesized
ttgggttctggttttctctt

SEQ ID NO: 36644 - DNA, 20 bp, Artificial Sequence
  chemically synthesized
ttcgcctcttgtaaatcatt

SEQ ID NO: 36645 - DNA, 20 bp, Artificial Sequence
  chemically synthesized
acgttgaacttgatgacatt

SEQ ID NO: 36646 - DNA, 20 bp, Artificial Sequence
  chemically synthesized
gacatttcatgttttcgttg

SEQ ID NO: 36647 - DNA, 20 bp, Artificial Sequence
  chemically synthesized
tttcgttgtgctgcttttac

SEQ ID NO: 36648 - DNA, 20 bp, Artificial Sequence
  chemically synthesized
ttgtgctgcttttacatcag

SEQ ID NO: 36649 - DNA, 20 bp, Artificial Sequence
  chemically synthesized
cttttacatcagttttgatt

SEQ ID NO: 36650 - DNA, 20 bp, Artificial Sequence
  chemically synthesized
cccgctctcctcaaccaaag

SEQ ID NO: 36651 - DNA, 20 bp, Artificial Sequence
  chemically synthesized
aaccaaaggactgtttctta

SEQ ID NO: 36652 - DNA, 20 bp, Artificial Sequence
  chemically synthesized
gttttctcagtcataagggc

SEQ ID NO: 36653 - DNA, 20 bp, Artificial Sequence
  chemically synthesized
tgtttccttccaggtgtgtc

SEQ ID NO: 36654 - DNA, 20 bp, Artificial Sequence
  chemically synthesized
agatacttggggaggggagg

SEQ ID NO: 36655 - DNA, 20 bp, Artificial Sequence
  chemically synthesized
aggggaggctgagtttgaaa

SEQ ID NO: 36656 - DNA, 20 bp, Artificial Sequence
  chemically synthesized
tgccagtggctcgacctgtg

SEQ ID NO: 36657 - DNA, 20 bp, Artificial Sequence
  chemically synthesized
ccagagagctcaagatgtgt

SEQ ID NO: 36658 - DNA, 20 bp, Artificial Sequence
  chemically synthesized
tcagcgtggtctgtcatcct

SEQ ID NO: 36659 - DNA, 20 bp, Artificial Sequence
  chemically synthesized
tctgtcatcctgctagtttg

SEQ ID NO: 36660 - DNA, 20 bp, Artificial Sequence
  chemically synthesized
atgcgcatgagtccccaacc

SEQ ID NO: 36661 - DNA, 20 bp, Artificial Sequence
  chemically synthesized
tctatgttgtcttttaaaaa

SEQ ID NO: 36662 - DNA, 20 bp, Artificial Sequence
  chemically synthesized
aacattgacacaataaatgt

SEQ ID NO: 36663 - DNA, 20 bp, Artificial Sequence
  chemically synthesized
ataaatgttggagctttagg

SEQ ID NO: 36664 - DNA, 20 bp, Artificial Sequence
  chemically synthesized
atgttggagctttaggtggt

SEQ ID NO: 36665 - DNA, 20 bp, Artificial Sequence
  chemically synthesized
tttgcttgttctttaatttt

SEQ ID NO: 36666 - DNA, 20 bp, Artificial Sequence
  chemically synthesized
taatgcttataagacaatga

SEQ ID NO: 36667 - DNA, 20 bp, Artificial Sequence
  chemically synthesized
ttataagacaatgaggctgc

SEQ ID NO: 36668 - DNA, 20 bp, Artificial Sequence
  chemically synthesized
ttatgattttgtacttctgt

SEQ ID NO: 36669 - DNA, 20 bp, Artificial Sequence
  chemically synthesized
cccatcgggtgggtaggagg

SEQ ID NO: 36670 - DNA, 20 bp, Artificial Sequence
  chemically synthesized
atgtaggaggggaactaggt

SEQ ID NO: 36671 - DNA, 20 bp, Artificial Sequence
  chemically synthesized
aattaatgtagtagtaatat

SEQ ID NO: 36672 - DNA, 20 bp, Artificial Sequence
  chemically synthesized
gctgtttattaatgctgaag

SEQ ID NO: 36673 - DNA, 20 bp, Artificial Sequence
  chemically synthesized
gcataatatggcacgccgaa

SEQ ID NO: 36674 - DNA, 20 bp, Artificial Sequence
  chemically synthesized
ccgaatcctgtttttcaaat

SEQ ID NO: 36675 - DNA, 20 bp, Artificial Sequence
  chemically synthesized
atgcttttggtggctaccat

SEQ ID NO: 36676 - DNA, 20 bp, Artificial Sequence
  chemically synthesized
gatttgaatttgtcttttaa

SEQ ID NO: 36677 - DNA, 20 bp, Artificial Sequence
  chemically synthesized
taaagaaggtgataaatgtc

SEQ ID NO: 36678 - DNA, 20 bp, Artificial Sequence
  chemically synthesized
acttacatcaggaaatttgg

SEQ ID NO: 36679 - DNA, 20 bp, Artificial Sequence
  chemically synthesized
ttaatttgcacagaactttt

SEQ ID NO: 36680 - DNA, 20 bp, Artificial Sequence
  chemically synthesized
tttctcagtttggtattttt

SEQ ID NO: 36681 - DNA, 20 bp, Artificial Sequence
  chemically synthesized
aaacaacatagcaaattaaa

SEQ ID NO: 36682 - DNA, 20 bp, Artificial Sequence
  chemically synthesized
gagctcagacacctgtgtgc

SEQ ID NO: 36683 - DNA, 20 bp, Artificial Sequence
  chemically synthesized
tcctacctatccaccttctg

SEQ ID NO: 36684 - DNA, 20 bp, Artificial Sequence
  chemically synthesized
tccaccttctggctagatta

SEQ ID NO: 36685 - DNA, 20 bp, Artificial Sequence
  chemically synthesized
taattggcatgtgaattatt

SEQ ID NO: 36686 - DNA, 20 bp, Artificial Sequence
  chemically synthesized
cgacttctactttatggagg

SEQ ID NO: 36687 - DNA, 20 bp, Artificial Sequence
  chemically synthesized
tactttatggaggtggagat

SEQ ID NO: 36688 - DNA, 20 bp, Artificial Sequence
  chemically synthesized
gattgaggcttaccaaggtt

SEQ ID NO: 36689 - DNA, 20 bp, Artificial Sequence
  chemically synthesized
taagagagaaagcagagaag

SEQ ID NO: 36690 - DNA, 20 bp, Artificial Sequence
  chemically synthesized
aaagcagagaagccaggttt

SEQ ID NO: 36691 - DNA, 20 bp, Artificial Sequence
  chemically synthesized
ccagagctaatttcaccaaa

SEQ ID NO: 36692 - DNA, 20 bp, Artificial Sequence
  chemically synthesized
aatgttcacagacacacaca

SEQ ID NO: 36693 - DNA, 20 bp, Artificial Sequence
  chemically synthesized
ccttgccatcacctttcccc

SEQ ID NO: 36694 - DNA, 20 bp, Artificial Sequence
  chemically synthesized
ggcttttccatgacaaataa

SEQ ID NO: 36695 - DNA, 20 bp, Artificial Sequence
  chemically synthesized
taaccctgattgcacgagtg

SEQ ID NO: 36696 - DNA, 20 bp, Artificial Sequence
  chemically synthesized
ttgctgaaacataagaccat

SEQ ID NO: 36697 - DNA, 20 bp, Artificial Sequence
  chemically synthesized
aagaccattagggtttctgt

SEQ ID NO: 36698 - DNA, 20 bp, Artificial Sequence
  chemically synthesized
actacactttcatttctggt

SEQ ID NO: 36699 - DNA, 20 bp, Artificial Sequence
  chemically synthesized
tttatatatttcttctcaga

SEQ ID NO: 36700 - DNA, 20 bp, Artificial Sequence
  chemically synthesized
ataagtggatatctctaaaa

SEQ ID NO: 36701 - DNA, 20 bp, Artificial Sequence
  chemically synthesized
taacagaagtggataaagga

SEQ ID NO: 36702 - DNA, 20 bp, Artificial Sequence
  chemically synthesized
acaaaaagactgtcttttcc

SEQ ID NO: 36703 - DNA, 20 bp, Artificial Sequence
  chemically synthesized
ggttcaagggatcctcctgc

SEQ ID NO: 36704 - DNA, 20 bp, Artificial Sequence
  chemically synthesized
ttttgtatttttagtagata

SEQ ID NO: 36705 - DNA, 20 bp, Artificial Sequence
  chemically synthesized
ctcctaggcctcccatagtg

SEQ ID NO: 36706 - DNA, 20 bp, Artificial Sequence
  chemically synthesized
ctagacttttgaaaccccat

SEQ ID NO: 36707 - DNA, 20 bp, Artificial Sequence
  chemically synthesized
tcctctctgcagagtggaac

SEQ ID NO: 36708 - DNA, 20 bp, Artificial Sequence
  chemically synthesized
ggaggagaccaaatacaggg

SEQ ID NO: 36709 - DNA, 20 bp, Artificial Sequence
  chemically synthesized
cccaagccttttgtgggctg

SEQ ID NO: 36710 - DNA, 20 bp, Artificial Sequence
  chemically synthesized
tgcctcagcctcctgagtgg

SEQ ID NO: 36711 - DNA, 20 bp, Artificial Sequence
  chemically synthesized
ttttgtatttttagtagaga

SEQ ID NO: 36712 - DNA, 20 bp, Artificial Sequence
  chemically synthesized
tgcctcggcctcccaaagtg

SEQ ID NO: 36713 - DNA, 20 bp, Artificial Sequence
  chemically synthesized
ggtgtaagccaccgcgcccg

SEQ ID NO: 36714 - DNA, 20 bp, Artificial Sequence
  chemically synthesized
atccagcatgttgaatatca

SEQ ID NO: 36715 - DNA, 20 bp, Artificial Sequence
  chemically synthesized
tatcagcctgtttgagaaat

SEQ ID NO: 36716 - DNA, 20 bp, Artificial Sequence
  chemically synthesized
gcagcatattttctgggcac

SEQ ID NO: 36717 - DNA, 20 bp, Artificial Sequence
  chemically synthesized
attttctgggcacttttgct

SEQ ID NO: 36718 - DNA, 20 bp, Artificial Sequence
  chemically synthesized
gcttggagtttccaagagca

SEQ ID NO: 36719 - DNA, 20 bp, Artificial Sequence
  chemically synthesized
caagtggtcaggaatatctt

SEQ ID NO: 36720 - DNA, 20 bp, Artificial Sequence
  chemically synthesized
ttcaggttttgtatgcgttg

SEQ ID NO: 36721 - DNA, 20 bp, Artificial Sequence
  chemically synthesized
cagtgtccccggaagtaata

SEQ ID NO: 36722 - DNA, 20 bp, Artificial Sequence
  chemically synthesized
tctgttcttacagtatgcca

SEQ ID NO: 36723 - DNA, 20 bp, Artificial Sequence
  chemically synthesized
ttggagtatagtgtgaagga

SEQ ID NO: 36724 - DNA, 20 bp, Artificial Sequence
  chemically synthesized
gcctaggagagacagtactc

SEQ ID NO: 36725 - DNA, 20 bp, Artificial Sequence
  chemically synthesized
aaaatccagaagcagtcatt

SEQ ID NO: 36726 - DNA, 20 bp, Artificial Sequence
  chemically synthesized
gtcattgtctgtttttctat

SEQ ID NO: 36727 - DNA, 20 bp, Artificial Sequence
  chemically synthesized
acgaaccacatggcctttct

SEQ ID NO: 36728 - DNA, 20 bp, Artificial Sequence
  chemically synthesized
aaaatgctcccaggaagtac

SEQ ID NO: 36729 - DNA, 20 bp, Artificial Sequence
  chemically synthesized
catgatagaatcaattttcc

SEQ ID NO: 36730 - DNA, 20 bp, Artificial Sequence
  chemically synthesized
agatcagaataataagggcc

SEQ ID NO: 36731 - DNA, 20 bp, Artificial Sequence
  chemically synthesized
gtgtgaaaaaaacatcatag

SEQ ID NO: 36732 - DNA, 22 bp, Artificial Sequence
  chemically synthesized
caagcttggctatgatgttttt

SEQ ID NO: 36733 - DNA, 22 bp, Artificial Sequence
  chemically synthesized
aagcttggctatgatgtttttt

SEQ ID NO: 36734 - DNA, 22 bp, Artificial Sequence
  chemically synthesized
ggctatgatgtttttttcacac

SEQ ID NO: 36735 - DNA, 22 bp, Artificial Sequence
  chemically synthesized
gctatgatgtttttttcacact

SEQ ID NO: 36736 - DNA, 22 bp, Artificial Sequence
  chemically synthesized
tgatgtttttttcacactgtga

SEQ ID NO: 36737 - DNA, 22 bp, Artificial Sequence
  chemically synthesized
ttttcacactgtgatcttaggt

SEQ ID NO: 36738 - DNA, 22 bp, Artificial Sequence
  chemically synthesized
tttcacactgtgatcttaggta

SEQ ID NO: 36739 - DNA, 22 bp, Artificial Sequence
  chemically synthesized
ttcacactgtgatcttaggtac

SEQ ID NO: 36740 - DNA, 22 bp, Artificial Sequence
  chemically synthesized
tcacactgtgatcttaggtact

SEQ ID NO: 36741 - DNA, 22 bp, Artificial Sequence
  chemically synthesized
cacactgtgatcttaggtactt

SEQ ID NO: 36742 - DNA, 22 bp, Artificial Sequence
  chemically synthesized
acactgtgatcttaggtacttc

SEQ ID NO: 36743 - DNA, 22 bp, Artificial Sequence
  chemically synthesized
tgatcttaggtacttcacttaa

SEQ ID NO: 36744 - DNA, 22 bp, Artificial Sequence
  chemically synthesized
aggtacttcacttaatctttgg

SEQ ID NO: 36745 - DNA, 22 bp, Artificial Sequence
  chemically synthesized
ggtacttcacttaatctttggg

SEQ ID NO: 36746 - DNA, 22 bp, Artificial Sequence
  chemically synthesized
cacttaatctttgggcccttat

SEQ ID NO: 36747 - DNA, 22 bp, Artificial Sequence
  chemically synthesized
acttaatctttgggcccttatt

SEQ ID NO: 36748 - DNA, 22 bp, Artificial Sequence
  chemically synthesized
aatctttgggcccttattattc

SEQ ID NO: 36749 - DNA, 22 bp, Artificial Sequence
  chemically synthesized
atctttgggcccttattattct

SEQ ID NO: 36750 - DNA, 22 bp, Artificial Sequence
  chemically synthesized
tgggcccttattattctgatct

SEQ ID NO: 36751 - DNA, 22 bp, Artificial Sequence
  chemically synthesized
gggcccttattattctgatctc

SEQ ID NO: 36752 - DNA, 22 bp, Artificial Sequence
  chemically synthesized
ggcccttattattctgatctct

SEQ ID NO: 36753 - DNA, 22 bp, Artificial Sequence
  chemically synthesized
attattctgatctctaaaatga

SEQ ID NO: 36754 - DNA, 22 bp, Artificial Sequence
  chemically synthesized
ttattctgatctctaaaatgag

SEQ ID NO: 36755 - DNA, 22 bp, Artificial Sequence
  chemically synthesized
ttctgatctctaaaatgagtga

SEQ ID NO: 36756 - DNA, 22 bp, Artificial Sequence
  chemically synthesized
tgatctctaaaatgagtgatta

SEQ ID NO: 36757 - DNA, 22 bp, Artificial Sequence
  chemically synthesized
atctctaaaatgagtgattact

SEQ ID NO: 36758 - DNA, 22 bp, Artificial Sequence
  chemically synthesized
taaaatgagtgattactaggat

SEQ ID NO: 36759 - DNA, 22 bp, Artificial Sequence
  chemically synthesized
aaatgagtgattactaggattc

SEQ ID NO: 36760 - DNA, 22 bp, Artificial Sequence
  chemically synthesized
ctaggattcctttcaacttcag

SEQ ID NO: 36761 - DNA, 22 bp, Artificial Sequence
  chemically synthesized
ggattcctttcaacttcagtct

SEQ ID NO: 36762 - DNA, 22 bp, Artificial Sequence
  chemically synthesized
ctttcaacttcagtctattctt

SEQ ID NO: 36763 - DNA, 22 bp, Artificial Sequence
  chemically synthesized
tcaacttcagtctattcttttc

SEQ ID NO: 36764 - DNA, 22 bp, Artificial Sequence
  chemically synthesized
caacttcagtctattcttttct

SEQ ID NO: 36765 - DNA, 22 bp, Artificial Sequence
  chemically synthesized
aacttcagtctattcttttctt

SEQ ID NO: 36766 - DNA, 22 bp, Artificial Sequence
  chemically synthesized
cagtctattcttttcttatcta

SEQ ID NO: 36767 - DNA, 22 bp, Artificial Sequence
  chemically synthesized
agtctattcttttcttatctaa

SEQ ID NO: 36768 - DNA, 22 bp, Artificial Sequence
  chemically synthesized
ttcttttcttatctaatttata

SEQ ID NO: 36769 - DNA, 22 bp, Artificial Sequence
  chemically synthesized
ttttcttatctaatttatagaa

SEQ ID NO: 36770 - DNA, 22 bp, Artificial Sequence
  chemically synthesized
ttcttatctaatttatagaatc

SEQ ID NO: 36771 - DNA, 22 bp, Artificial Sequence
  chemically synthesized
tcttatctaatttatagaatca

SEQ ID NO: 36772 - DNA, 22 bp, Artificial Sequence
  chemically synthesized
cttatctaatttatagaatcac

SEQ ID NO: 36773 - DNA, 22 bp, Artificial Sequence
  chemically synthesized
ttatctaatttatagaatcaca

SEQ ID NO: 36774 - DNA, 22 bp, Artificial Sequence
  chemically synthesized
atctaatttatagaatcacaag

SEQ ID NO: 36775 - DNA, 22 bp, Artificial Sequence
  chemically synthesized
tctaatttatagaatcacaagg

SEQ ID NO: 36776 - DNA, 22 bp, Artificial Sequence
  chemically synthesized
atttatagaatcacaaggaaaa

SEQ ID NO: 36777 - DNA, 22 bp, Artificial Sequence
  chemically synthesized
atagaatcacaaggaaaattga

SEQ ID NO: 36778 - DNA, 22 bp, Artificial Sequence
  chemically synthesized
tagaatcacaaggaaaattgat

SEQ ID NO: 36779 - DNA, 22 bp, Artificial Sequence
  chemically synthesized
attctatcatgtatataaaagt

SEQ ID NO: 36780 - DNA, 22 bp, Artificial Sequence
  chemically synthesized
tatcatgtatataaaagtattc

SEQ ID NO: 36781 - DNA, 22 bp, Artificial Sequence
  chemically synthesized
tcatgtatataaaagtattcta

SEQ ID NO: 36782 - DNA, 22 bp, Artificial Sequence
  chemically synthesized
tataaagcttaagtacttcctg

SEQ ID NO: 36783 - DNA, 22 bp, Artificial Sequence
  chemically synthesized
taaagcttaagtacttcctggg

SEQ ID NO: 36784 - DNA, 22 bp, Artificial Sequence
  chemically synthesized
aagtacttcctgggagcatttt

SEQ ID NO: 36785 - DNA, 22 bp, Artificial Sequence
  chemically synthesized
agtacttcctgggagcattttt

SEQ ID NO: 36786 - DNA, 22 bp, Artificial Sequence
  chemically synthesized
cctgggagcattttttaaaata

SEQ ID NO: 36787 - DNA, 22 bp, Artificial Sequence
  chemically synthesized
ctgggagcattttttaaaatac

SEQ ID NO: 36788 - DNA, 22 bp, Artificial Sequence
  chemically synthesized
ggagcattttttaaaatacaaa

SEQ ID NO: 36789 - DNA, 22 bp, Artificial Sequence
  chemically synthesized
tttaaaatacaaagcaaaaaga

SEQ ID NO: 36790 - DNA, 22 bp, Artificial Sequence
  chemically synthesized
ttaaaatacaaagcaaaaagaa

SEQ ID NO: 36791 - DNA, 22 bp, Artificial Sequence
  chemically synthesized
taaaatacaaagcaaaaagaaa

SEQ ID NO: 36792 - DNA, 22 bp, Artificial Sequence
  chemically synthesized
aaaatacaaagcaaaaagaaag

SEQ ID NO: 36793 - DNA, 22 bp, Artificial Sequence
  chemically synthesized
aaatacaaagcaaaaagaaagg

SEQ ID NO: 36794 - DNA, 22 bp, Artificial Sequence
  chemically synthesized
gtaataagatatcctaatttaa

SEQ ID NO: 36795 - DNA, 22 bp, Artificial Sequence
  chemically synthesized
atttaaactaagatagaaaaac

SEQ ID NO: 36796 - DNA, 22 bp, Artificial Sequence
  chemically synthesized
aaactaagatagaaaaacagac

SEQ ID NO: 36797 - DNA, 22 bp, Artificial Sequence
  chemically synthesized
aactaagatagaaaaacagaca

SEQ ID NO: 36798 - DNA, 22 bp, Artificial Sequence
  chemically synthesized
agatagaaaaacagacaatgac

SEQ ID NO: 36799 - DNA, 22 bp, Artificial Sequence
  chemically synthesized
cttctggattttactggaagtg

SEQ ID NO: 36800 - DNA, 22 bp, Artificial Sequence
  chemically synthesized
ctggattttactggaagtgaga

SEQ ID NO: 36801 - DNA, 22 bp, Artificial Sequence
  chemically synthesized
tggattttactggaagtgagaa

SEQ ID NO: 36802 - DNA, 22 bp, Artificial Sequence
  chemically synthesized
gattttactggaagtgagaagt

SEQ ID NO: 36803 - DNA, 22 bp, Artificial Sequence
  chemically synthesized
tactggaagtgagaagttccat

SEQ ID NO: 36804 - DNA, 22 bp, Artificial Sequence
  chemically synthesized
actggaagtgagaagttccatg

SEQ ID NO: 36805 - DNA, 22 bp, Artificial Sequence
  chemically synthesized
ctggaagtgagaagttccatga

SEQ ID NO: 36806 - DNA, 22 bp, Artificial Sequence
  chemically synthesized
gaagtgagaagttccatgactt

SEQ ID NO: 36807 - DNA, 22 bp, Artificial Sequence
  chemically synthesized
catgacttaatgtaactccagg

SEQ ID NO: 36808 - DNA, 22 bp, Artificial Sequence
  chemically synthesized
aatgtaactccaggggaatgca

SEQ ID NO: 36809 - DNA, 22 bp, Artificial Sequence
  chemically synthesized
atgtaactccaggggaatgcaa

SEQ ID NO: 36810 - DNA, 22 bp, Artificial Sequence
  chemically synthesized
caggggaatgcaaactgaagag

SEQ ID NO: 36811 - DNA, 22 bp, Artificial Sequence
  chemically synthesized
aagagtactgtctctcctaggc

SEQ ID NO: 36812 - DNA, 22 bp, Artificial Sequence
  chemically synthesized
tctctcctaggcagtcagagga

SEQ ID NO: 36813 - DNA, 22 bp, Artificial Sequence
  chemically synthesized
tcctaggcagtcagaggaaaga

SEQ ID NO: 36814 - DNA, 22 bp, Artificial Sequence
  chemically synthesized
ctaggcagtcagaggaaagaaa

SEQ ID NO: 36815 - DNA, 22 bp, Artificial Sequence
  chemically synthesized
ggcagtcagaggaaagaaatat

SEQ ID NO: 36816 - DNA, 22 bp, Artificial Sequence
  chemically synthesized
tttctctgctggttaggaactc

SEQ ID NO: 36817 - DNA, 22 bp, Artificial Sequence
  chemically synthesized
ctctgctggttaggaactcaag

SEQ ID NO: 36818 - DNA, 22 bp, Artificial Sequence
  chemically synthesized
tctgctggttaggaactcaaga

SEQ ID NO: 36819 - DNA, 22 bp, Artificial Sequence
  chemically synthesized
tgctggttaggaactcaagatg

SEQ ID NO: 36820 - DNA, 22 bp, Artificial Sequence
  chemically synthesized
ctggttaggaactcaagatgaa

SEQ ID NO: 36821 - DNA, 22 bp, Artificial Sequence
  chemically synthesized
gttaggaactcaagatgaactc

SEQ ID NO: 36822 - DNA, 22 bp, Artificial Sequence
  chemically synthesized
ggaactcaagatgaactcttga

SEQ ID NO: 36823 - DNA, 22 bp, Artificial Sequence
  chemically synthesized
aagatgaactcttgaagaagga

SEQ ID NO: 36824 - DNA, 22 bp, Artificial Sequence
  chemically synthesized
ttgaagaaggaaggtgtgcttg

SEQ ID NO: 36825 - DNA, 22 bp, Artificial Sequence
  chemically synthesized
gaagaaggaaggtgtgcttgca

SEQ ID NO: 36826 - DNA, 22 bp, Artificial Sequence
  chemically synthesized
aagaaggaaggtgtgcttgcat

SEQ ID NO: 36827 - DNA, 22 bp, Artificial Sequence
  chemically synthesized
gcatcaccagttattttggaac

SEQ ID NO: 36828 - DNA, 22 bp, Artificial Sequence
  chemically synthesized
catcaccagttattttggaact

SEQ ID NO: 36829 - DNA, 22 bp, Artificial Sequence
  chemically synthesized
ttttggaacttccaccagactc

SEQ ID NO: 36830 - DNA, 22 bp, Artificial Sequence
  chemically synthesized
tggaacttccaccagactcaaa

SEQ ID NO: 36831 - DNA, 22 bp, Artificial Sequence
  chemically synthesized
ggaacttccaccagactcaaaa

SEQ ID NO: 36832 - DNA, 22 bp, Artificial Sequence
  chemically synthesized
gaacttccaccagactcaaaat

SEQ ID NO: 36833 - DNA, 22 bp, Artificial Sequence
  chemically synthesized
ccaccagactcaaaattcctca

SEQ ID NO: 36834 - DNA, 22 bp, Artificial Sequence
  chemically synthesized
caccagactcaaaattcctcaa

SEQ ID NO: 36835 - DNA, 22 bp, Artificial Sequence
  chemically synthesized
aaaattcctcaaatctgcttcc

SEQ ID NO: 36836 - DNA, 22 bp, Artificial Sequence
  chemically synthesized
ctcaaatctgcttccttcacac

SEQ ID NO: 36837 - DNA, 22 bp, Artificial Sequence
  chemically synthesized
aaatctgcttccttcacactat

SEQ ID NO: 36838 - DNA, 22 bp, Artificial Sequence
  chemically synthesized
cttccttcacactatactccaa

SEQ ID NO: 36839 - DNA, 22 bp, Artificial Sequence
  chemically synthesized
ccttcacactatactccaaaag

SEQ ID NO: 36840 - DNA, 22 bp, Artificial Sequence
  chemically synthesized
cttcacactatactccaaaagg

SEQ ID NO: 36841 - DNA, 22 bp, Artificial Sequence
  chemically synthesized
cacactatactccaaaaggagt

SEQ ID NO: 36842 - DNA, 22 bp, Artificial Sequence
  chemically synthesized
acactatactccaaaaggagtc

SEQ ID NO: 36843 - DNA, 22 bp, Artificial Sequence
  chemically synthesized
tactccaaaaggagtcaaagct

SEQ ID NO: 36844 - DNA, 22 bp, Artificial Sequence
  chemically synthesized
caaaaggagtcaaagctatgtg

SEQ ID NO: 36845 - DNA, 22 bp, Artificial Sequence
  chemically synthesized
tgtggcatactgtaagaacaga

SEQ ID NO: 36846 - DNA, 22 bp, Artificial Sequence
  chemically synthesized
taagaacagaaccaacagccta

SEQ ID NO: 36847 - DNA, 22 bp, Artificial Sequence
  chemically synthesized
caaaatacttccattctaatcc

SEQ ID NO: 36848 - DNA, 22 bp, Artificial Sequence
  chemically synthesized
ccattctaatcctactattact

SEQ ID NO: 36849 - DNA, 22 bp, Artificial Sequence
  chemically synthesized
cattctaatcctactattactt

SEQ ID NO: 36850 - DNA, 22 bp, Artificial Sequence
  chemically synthesized
taatcctactattacttccggg

SEQ ID NO: 36851 - DNA, 22 bp, Artificial Sequence
  chemically synthesized
atcctactattacttccgggga

SEQ ID NO: 36852 - DNA, 22 bp, Artificial Sequence
  chemically synthesized
ctattacttccggggacactga

SEQ ID NO: 36853 - DNA, 22 bp, Artificial Sequence
  chemically synthesized
ttacttccggggacactgattt

SEQ ID NO: 36854 - DNA, 22 bp, Artificial Sequence
  chemically synthesized
cttccggggacactgatttata

SEQ ID NO: 36855 - DNA, 22 bp, Artificial Sequence
  chemically synthesized
ccggggacactgatttataaaa

SEQ ID NO: 36856 - DNA, 22 bp, Artificial Sequence
  chemically synthesized
cggggacactgatttataaaat

SEQ ID NO: 36857 - DNA, 22 bp, Artificial Sequence
  chemically synthesized
atttataaaataagaattataa

SEQ ID NO: 36858 - DNA, 22 bp, Artificial Sequence
  chemically synthesized
ataaaataagaattataaaata

SEQ ID NO: 36859 - DNA, 22 bp, Artificial Sequence
  chemically synthesized
taaaataagaattataaaataa

SEQ ID NO: 36860 - DNA, 22 bp, Artificial Sequence
  chemically synthesized
taaaataagaatttttaaaaat

SEQ ID NO: 36861 - DNA, 22 bp, Artificial Sequence
  chemically synthesized
ttaaaaataggaataaatatag

SEQ ID NO: 36862 - DNA, 22 bp, Artificial Sequence
  chemically synthesized
taaaaataggaataaatatagc

SEQ ID NO: 36863 - DNA, 22 bp, Artificial Sequence
  chemically synthesized
aaaaataggaataaatatagcc

SEQ ID NO: 36864 - DNA, 22 bp, Artificial Sequence
  chemically synthesized
aaaataggaataaatatagcca

SEQ ID NO: 36865 - DNA, 22 bp, Artificial Sequence
  chemically synthesized
cgtcaatgttaacctcactatc

SEQ ID NO: 36866 - DNA, 22 bp, Artificial Sequence
  chemically synthesized
gtcaatgttaacctcactatca

SEQ ID NO: 36867 - DNA, 22 bp, Artificial Sequence
  chemically synthesized
acctcactatcaaaaaaaaaaa

SEQ ID NO: 36868 - DNA, 22 bp, Artificial Sequence
  chemically synthesized
actatcaaaaaaaaaaaaaaat

SEQ ID NO: 36869 - DNA, 22 bp, Artificial Sequence
  chemically synthesized
tcaaaaaaaaaaaaaaatcatg

SEQ ID NO: 36870 - DNA, 22 bp, Artificial Sequence
  chemically synthesized
aaagatattcctgaccacttga

SEQ ID NO: 36871 - DNA, 22 bp, Artificial Sequence
  chemically synthesized
ctgaccacttgaagggcttggt

SEQ ID NO: 36872 - DNA, 22 bp, Artificial Sequence
  chemically synthesized
accacttgaagggcttggtttt

SEQ ID NO: 36873 - DNA, 22 bp, Artificial Sequence
  chemically synthesized
gaagggcttggttttaatctga

SEQ ID NO: 36874 - DNA, 22 bp, Artificial Sequence
  chemically synthesized
aagggcttggttttaatctgaa

SEQ ID NO: 36875 - DNA, 22 bp, Artificial Sequence
  chemically synthesized
ggttttaatctgaatgctcttg

SEQ ID NO: 36876 - DNA, 22 bp, Artificial Sequence
  chemically synthesized
gttttaatctgaatgctcttgg

SEQ ID NO: 36877 - DNA, 22 bp, Artificial Sequence
  chemically synthesized
taatctgaatgctcttggaaac

SEQ ID NO: 36878 - DNA, 22 bp, Artificial Sequence
  chemically synthesized
aatctgaatgctcttggaaact

SEQ ID NO: 36879 - DNA, 22 bp, Artificial Sequence
  chemically synthesized
atctgaatgctcttggaaactc

SEQ ID NO: 36880 - DNA, 22 bp, Artificial Sequence
  chemically synthesized
aatgctcttggaaactccaagc

SEQ ID NO: 36881 - DNA, 22 bp, Artificial Sequence
  chemically synthesized
ttggaaactccaagcaaaagtg

SEQ ID NO: 36882 - DNA, 22 bp, Artificial Sequence
  chemically synthesized
ggaaactccaagcaaaagtgcc

SEQ ID NO: 36883 - DNA, 22 bp, Artificial Sequence
  chemically synthesized
gaaactccaagcaaaagtgccc

SEQ ID NO: 36884 - DNA, 22 bp, Artificial Sequence
  chemically synthesized
caagcaaaagtgcccagaaaat

SEQ ID NO: 36885 - DNA, 22 bp, Artificial Sequence
  chemically synthesized
ccaaggtttggggcactcagtt

SEQ ID NO: 36886 - DNA, 22 bp, Artificial Sequence
  chemically synthesized
ggggcactcagttagacctcag

SEQ ID NO: 36887 - DNA, 22 bp, Artificial Sequence
  chemically synthesized
gggcactcagttagacctcagc

SEQ ID NO: 36888 - DNA, 22 bp, Artificial Sequence
  chemically synthesized
agttagacctcagcagattcca

SEQ ID NO: 36889 - DNA, 22 bp, Artificial Sequence
  chemically synthesized
gacctcagcagattccaagatt

SEQ ID NO: 36890 - DNA, 22 bp, Artificial Sequence
  chemically synthesized
agcagattccaagattgcactc

SEQ ID NO: 36891 - DNA, 22 bp, Artificial Sequence
  chemically synthesized
caagattgcactccttgcctaa

SEQ ID NO: 36892 - DNA, 22 bp, Artificial Sequence
  chemically synthesized
cactccttgcctaagagttttc

SEQ ID NO: 36893 - DNA, 22 bp, Artificial Sequence
  chemically synthesized
cttgcctaagagttttctttaa

SEQ ID NO: 36894 - DNA, 22 bp, Artificial Sequence
  chemically synthesized
gcctaagagttttctttaaatg

SEQ ID NO: 36895 - DNA, 22 bp, Artificial Sequence
  chemically synthesized
cctaagagttttctttaaatga

SEQ ID NO: 36896 - DNA, 22 bp, Artificial Sequence
  chemically synthesized
agagttttctttaaatgatcac

SEQ ID NO: 36897 - DNA, 22 bp, Artificial Sequence
  chemically synthesized
tctttaaatgatcactggtttt

SEQ ID NO: 36898 - DNA, 22 bp, Artificial Sequence
  chemically synthesized
ctttaaatgatcactggttttt

SEQ ID NO: 36899 - DNA, 22 bp, Artificial Sequence
  chemically synthesized
tttaaatgatcactggtttttg

SEQ ID NO: 36900 - DNA, 22 bp, Artificial Sequence
  chemically synthesized
taaatgatcactggtttttgaa

SEQ ID NO: 36901 - DNA, 22 bp, Artificial Sequence
  chemically synthesized
aaatgatcactggtttttgaaa

SEQ ID NO: 36902 - DNA, 22 bp, Artificial Sequence
  chemically synthesized
aatgatcactggtttttgaaac

SEQ ID NO: 36903 - DNA, 22 bp, Artificial Sequence
  chemically synthesized
gtttttgaaacaattatttctc

SEQ ID NO: 36904 - DNA, 22 bp, Artificial Sequence
  chemically synthesized
ttgaaacaattatttctcaaac

SEQ ID NO: 36905 - DNA, 22 bp, Artificial Sequence
  chemically synthesized
tgaaacaattatttctcaaaca

SEQ ID NO: 36906 - DNA, 22 bp, Artificial Sequence
  chemically synthesized
gaaacaattatttctcaaacag

SEQ ID NO: 36907 - DNA, 22 bp, Artificial Sequence
  chemically synthesized
aaacaattatttctcaaacagg

SEQ ID NO: 36908 - DNA, 22 bp, Artificial Sequence
  chemically synthesized
tttctcaaacaggctgatattc

SEQ ID NO: 36909 - DNA, 22 bp, Artificial Sequence
  chemically synthesized
ctcaaacaggctgatattcaac

SEQ ID NO: 36910 - DNA, 22 bp, Artificial Sequence
  chemically synthesized
tcaaacaggctgatattcaaca

SEQ ID NO: 36911 - DNA, 22 bp, Artificial Sequence
  chemically synthesized
aaacaggctgatattcaacatg

SEQ ID NO: 36912 - DNA, 22 bp, Artificial Sequence
  chemically synthesized
atattcaacatgctggatgctg

SEQ ID NO: 36913 - DNA, 22 bp, Artificial Sequence
  chemically synthesized
aacatgctggatgctgggtgct

SEQ ID NO: 36914 - DNA, 22 bp, Artificial Sequence
  chemically synthesized
gatgctgggtgctgcaggggct

SEQ ID NO: 36915 - DNA, 22 bp, Artificial Sequence
  chemically synthesized
ggtgctgcaggggctttgagtg

SEQ ID NO: 36916 - DNA, 22 bp, Artificial Sequence
  chemically synthesized
caggggctttgagtgtctttct

SEQ ID NO: 36917 - DNA, 22 bp, Artificial Sequence
  chemically synthesized
tgagtgtctttctctcccatca

SEQ ID NO: 36918 - DNA, 22 bp, Artificial Sequence
  chemically synthesized
gagtgtctttctctcccatcat

SEQ ID NO: 36919 - DNA, 22 bp, Artificial Sequence
  chemically synthesized
agtgtctttctctcccatcatg

SEQ ID NO: 36920 - DNA, 22 bp, Artificial Sequence
  chemically synthesized
tctctcccatcatggaccccaa

SEQ ID NO: 36921 - DNA, 22 bp, Artificial Sequence
  chemically synthesized
ctctcccatcatggaccccaat

SEQ ID NO: 36922 - DNA, 22 bp, Artificial Sequence
  chemically synthesized
tctcccatcatggaccccaatt

SEQ ID NO: 36923 - DNA, 22 bp, Artificial Sequence
  chemically synthesized
tcccatcatggaccccaattct

SEQ ID NO: 36924 - DNA, 22 bp, Artificial Sequence
  chemically synthesized
ccatcatggaccccaattctaa

SEQ ID NO: 36925 - DNA, 22 bp, Artificial Sequence
  chemically synthesized
taacagaccttttttatacagt

SEQ ID NO: 36926 - DNA, 22 bp, Artificial Sequence
  chemically synthesized
acagaccttttttatacagtgt

SEQ ID NO: 36927 - DNA, 22 bp, Artificial Sequence
  chemically synthesized
ttttatacagtgtaataatctg

SEQ ID NO: 36928 - DNA, 22 bp, Artificial Sequence
  chemically synthesized
tttatacagtgtaataatctgt

SEQ ID NO: 36929 - DNA, 22 bp, Artificial Sequence
  chemically synthesized
ttatacagtgtaataatctgtc

SEQ ID NO: 36930 - DNA, 22 bp, Artificial Sequence
  chemically synthesized
tatacagtgtaataatctgtcc

SEQ ID NO: 36931 - DNA, 22 bp, Artificial Sequence
  chemically synthesized
atacagtgtaataatctgtccg

SEQ ID NO: 36932 - DNA, 22 bp, Artificial Sequence
  chemically synthesized
tacagtgtaataatctgtccgg

SEQ ID NO: 36933 - DNA, 22 bp, Artificial Sequence
  chemically synthesized
tccgggcgcggtggcttacacc

SEQ ID NO: 36934 - DNA, 22 bp, Artificial Sequence
  chemically synthesized
acacctgtaatcccagcacttt

SEQ ID NO: 36935 - DNA, 22 bp, Artificial Sequence
  chemically synthesized
cacctgtaatcccagcactttg

SEQ ID NO: 36936 - DNA, 22 bp, Artificial Sequence
  chemically synthesized
taatcccagcactttgggaggc

SEQ ID NO: 36937 - DNA, 22 bp, Artificial Sequence
  chemically synthesized
tgggaggccgaggcaggtggct

SEQ ID NO: 36938 - DNA, 22 bp, Artificial Sequence
  chemically synthesized
gggaggccgaggcaggtggctc

SEQ ID NO: 36939 - DNA, 22 bp, Artificial Sequence
  chemically synthesized
ggaggccgaggcaggtggctca

SEQ ID NO: 36940 - DNA, 22 bp, Artificial Sequence
  chemically synthesized
atgaggtcaggagttcgagacc

SEQ ID NO: 36941 - DNA, 22 bp, Artificial Sequence
  chemically synthesized
gagaccagcctgaccaacatgg

SEQ ID NO: 36942 - DNA, 22 bp, Artificial Sequence
  chemically synthesized
accaacatggtgaaaccccgtc

SEQ ID NO: 36943 - DNA, 22 bp, Artificial Sequence
  chemically synthesized
tactaaaaatacaaaaattagc

SEQ ID NO: 36944 - DNA, 22 bp, Artificial Sequence
  chemically synthesized
ctaaaaatacaaaaattagcca

SEQ ID NO: 36945 - DNA, 22 bp, Artificial Sequence
  chemically synthesized
aaaatacaaaaattagccaggt

SEQ ID NO: 36946 - DNA, 22 bp, Artificial Sequence
  chemically synthesized
gccaggtggtacgcacctgtaa

SEQ ID NO: 36947 - DNA, 22 bp, Artificial Sequence
  chemically synthesized
taatcccagccactcaggaggc

SEQ ID NO: 36948 - DNA, 22 bp, Artificial Sequence
  chemically synthesized
aggaggctgaggcaggagaacc

SEQ ID NO: 36949 - DNA, 22 bp, Artificial Sequence
  chemically synthesized
aggcaggagaaccacttgaacc

SEQ ID NO: 36950 - DNA, 22 bp, Artificial Sequence
  chemically synthesized
gaacccgggaggtagaggttgc

SEQ ID NO: 36951 - DNA, 22 bp, Artificial Sequence
  chemically synthesized
aacccgggaggtagaggttgca

SEQ ID NO: 36952 - DNA, 22 bp, Artificial Sequence
  chemically synthesized
cagtgagccaagatcgtgccat

SEQ ID NO: 36953 - DNA, 22 bp, Artificial Sequence
  chemically synthesized
cactccagcctgggcaatagag

SEQ ID NO: 36954 - DNA, 22 bp, Artificial Sequence
  chemically synthesized
cagcctgggcaatagagtgaga

SEQ ID NO: 36955 - DNA, 22 bp, Artificial Sequence
  chemically synthesized
ggcaatagagtgagactccatc

SEQ ID NO: 36956 - DNA, 22 bp, Artificial Sequence
  chemically synthesized
catctcaacaataataataata

SEQ ID NO: 36957 - DNA, 22 bp, Artificial Sequence
  chemically synthesized
aacaataataataataataata

SEQ ID NO: 36958 - DNA, 22 bp, Artificial Sequence
  chemically synthesized
aacagcccacaaaaggcttggg

SEQ ID NO: 36959 - DNA, 22 bp, Artificial Sequence
  chemically synthesized
gggaaagtaaaaacaatgccct

SEQ ID NO: 36960 - DNA, 22 bp, Artificial Sequence
  chemically synthesized
ggaaagtaaaaacaatgccctg

SEQ ID NO: 36961 - DNA, 22 bp, Artificial Sequence
  chemically synthesized
tatttggtctcctccatccaag

SEQ ID NO: 36962 - DNA, 22 bp, Artificial Sequence
  chemically synthesized
ggtctcctccatccaagtggct

SEQ ID NO: 36963 - DNA, 22 bp, Artificial Sequence
  chemically synthesized
gtctcctccatccaagtggctg

SEQ ID NO: 36964 - DNA, 22 bp, Artificial Sequence
  chemically synthesized
ctccatccaagtggctgggact

SEQ ID NO: 36965 - DNA, 22 bp, Artificial Sequence
  chemically synthesized
catccaagtggctgggactctg

SEQ ID NO: 36966 - DNA, 22 bp, Artificial Sequence
  chemically synthesized
ggactctgtcctctagtctgtg

SEQ ID NO: 36967 - DNA, 22 bp, Artificial Sequence
  chemically synthesized
tgtcctctagtctgtgctcatg

SEQ ID NO: 36968 - DNA, 22 bp, Artificial Sequence
  chemically synthesized
tcctctagtctgtgctcatgtc

SEQ ID NO: 36969 - DNA, 22 bp, Artificial Sequence
  chemically synthesized
tagtctgtgctcatgtcaggca

SEQ ID NO: 36970 - DNA, 22 bp, Artificial Sequence
  chemically synthesized
gtctgtgctcatgtcaggcaac

SEQ ID NO: 36971 - DNA, 22 bp, Artificial Sequence
  chemically synthesized
tgctcatgtcaggcaaccaatt

SEQ ID NO: 36972 - DNA, 22 bp, Artificial Sequence
  chemically synthesized
atgtcaggcaaccaatttatct

SEQ ID NO: 36973 - DNA, 22 bp, Artificial Sequence
  chemically synthesized
atctctctgcaatctgaagttc

SEQ ID NO: 36974 - DNA, 22 bp, Artificial Sequence
  chemically synthesized
tctctctgcaatctgaagttcc

SEQ ID NO: 36975 - DNA, 22 bp, Artificial Sequence
  chemically synthesized
tctgcaatctgaagttccactc

SEQ ID NO: 36976 - DNA, 22 bp, Artificial Sequence
  chemically synthesized
tgcaatctgaagttccactctg

SEQ ID NO: 36977 - DNA, 22 bp, Artificial Sequence
  chemically synthesized
caatctgaagttccactctgca

SEQ ID NO: 36978 - DNA, 22 bp, Artificial Sequence
  chemically synthesized
aagttccactctgcagagagga

SEQ ID NO: 36979 - DNA, 22 bp, Artificial Sequence
  chemically synthesized
cactctgcagagaggacacagt

SEQ ID NO: 36980 - DNA, 22 bp, Artificial Sequence
  chemically synthesized
tgcagagaggacacagtgagaa

SEQ ID NO: 36981 - DNA, 22 bp, Artificial Sequence
  chemically synthesized
cagagaggacacagtgagaacc

SEQ ID NO: 36982 - DNA, 22 bp, Artificial Sequence
  chemically synthesized
gcagatttgtgagcctcttccc

SEQ ID NO: 36983 - DNA, 22 bp, Artificial Sequence
  chemically synthesized
gtgagcctcttccctgcttctg

SEQ ID NO: 36984 - DNA, 22 bp, Artificial Sequence
  chemically synthesized
tgagcctcttccctgcttctgc

SEQ ID NO: 36985 - DNA, 22 bp, Artificial Sequence
  chemically synthesized
ttccctgcttctgccattcatg

SEQ ID NO: 36986 - DNA, 22 bp, Artificial Sequence
  chemically synthesized
ccctgcttctgccattcatgga

SEQ ID NO: 36987 - DNA, 22 bp, Artificial Sequence
  chemically synthesized
cctgcttctgccattcatggat

SEQ ID NO: 36988 - DNA, 22 bp, Artificial Sequence
  chemically synthesized
cttctgccattcatggataacc

SEQ ID NO: 36989 - DNA, 22 bp, Artificial Sequence
  chemically synthesized
ctgccattcatggataaccatg

SEQ ID NO: 36990 - DNA, 22 bp, Artificial Sequence
  chemically synthesized
tgccattcatggataaccatga

SEQ ID NO: 36991 - DNA, 22 bp, Artificial Sequence
  chemically synthesized
ccattcatggataaccatgatc

SEQ ID NO: 36992 - DNA, 22 bp, Artificial Sequence
  chemically synthesized
atggataaccatgatcttgact

SEQ ID NO: 36993 - DNA, 22 bp, Artificial Sequence
  chemically synthesized
gactcatcacacagagagatgt

SEQ ID NO: 36994 - DNA, 22 bp, Artificial Sequence
  chemically synthesized
actcatcacacagagagatgtc

SEQ ID NO: 36995 - DNA, 22 bp, Artificial Sequence
  chemically synthesized
atcacacagagagatgtcttcc

SEQ ID NO: 36996 - DNA, 22 bp, Artificial Sequence
  chemically synthesized
cccaaattgtcaatcttgtatg

SEQ ID NO: 36997 - DNA, 22 bp, Artificial Sequence
  chemically synthesized
ccaaattgtcaatcttgtatgg

SEQ ID NO: 36998 - DNA, 22 bp, Artificial Sequence
  chemically synthesized
tcaatcttgtatggggtttcaa

SEQ ID NO: 36999 - DNA, 22 bp, Artificial Sequence
  chemically synthesized
gtatggggtttcaaaagtctag

SEQ ID NO: 37000 - DNA, 22 bp, Artificial Sequence
  chemically synthesized
tatggggtttcaaaagtctagc

SEQ ID NO: 37001 - DNA, 22 bp, Artificial Sequence
  chemically synthesized
caaaagtctagccctaggccag

SEQ ID NO: 37002 - DNA, 22 bp, Artificial Sequence
  chemically synthesized
aaaagtctagccctaggccagg

SEQ ID NO: 37003 - DNA, 22 bp, Artificial Sequence
  chemically synthesized
gccctaggccaggtgaggtagt

SEQ ID NO: 37004 - DNA, 22 bp, Artificial Sequence
  chemically synthesized
ggccaggtgaggtagtgcaatg

SEQ ID NO: 37005 - DNA, 22 bp, Artificial Sequence
  chemically synthesized
taatcccagcactatgggaggc

SEQ ID NO: 37006 - DNA, 22 bp, Artificial Sequence
  chemically synthesized
atcccagcactatgggaggcct

SEQ ID NO: 37007 - DNA, 22 bp, Artificial Sequence
  chemically synthesized
tgggaggcctaggagggtggat

SEQ ID NO: 37008 - DNA, 22 bp, Artificial Sequence
  chemically synthesized
ggagggtggatcacgagatcag

SEQ ID NO: 37009 - DNA, 22 bp, Artificial Sequence
  chemically synthesized
gctaacacggtgaaacgccgta

SEQ ID NO: 37010 - DNA, 22 bp, Artificial Sequence
  chemically synthesized
acacggtgaaacgccgtatcta

SEQ ID NO: 37011 - DNA, 22 bp, Artificial Sequence
  chemically synthesized
ctaaaaatacaaaaaatattag

SEQ ID NO: 37012 - DNA, 22 bp, Artificial Sequence
  chemically synthesized
aaaatacaaaaaatattagctg

SEQ ID NO: 37013 - DNA, 22 bp, Artificial Sequence
  chemically synthesized
gctgggcgtggtggcgcgtgcc

SEQ ID NO: 37014 - DNA, 22 bp, Artificial Sequence
  chemically synthesized
ggcgtggtggcgcgtgcctgta

SEQ ID NO: 37015 - DNA, 22 bp, Artificial Sequence
  chemically synthesized
tagtcccagctacttgggaagc

SEQ ID NO: 37016 - DNA, 22 bp, Artificial Sequence
  chemically synthesized
cttgggaagctgaggcaggagg

SEQ ID NO: 37017 - DNA, 22 bp, Artificial Sequence
  chemically synthesized
gggaagctgaggcaggaggatc

SEQ ID NO: 37018 - DNA, 22 bp, Artificial Sequence
  chemically synthesized
ggaagctgaggcaggaggatcc

SEQ ID NO: 37019 - DNA, 22 bp, Artificial Sequence
  chemically synthesized
aggcaggaggatcccttgaacc

SEQ ID NO: 37020 - DNA, 22 bp, Artificial Sequence
  chemically synthesized
gaacccagtaggcggaggttgt

SEQ ID NO: 37021 - DNA, 22 bp, Artificial Sequence
  chemically synthesized
aacccagtaggcggaggttgtg

SEQ ID NO: 37022 - DNA, 22 bp, Artificial Sequence
  chemically synthesized
tggtgagctgagtccttgccac

SEQ ID NO: 37023 - DNA, 22 bp, Artificial Sequence
  chemically synthesized
agtccttgccactgcactccag

SEQ ID NO: 37024 - DNA, 22 bp, Artificial Sequence
  chemically synthesized
gccactgcactccagcctgggt

SEQ ID NO: 37025 - DNA, 22 bp, Artificial Sequence
  chemically synthesized
ccactgcactccagcctgggtg

SEQ ID NO: 37026 - DNA, 22 bp, Artificial Sequence
  chemically synthesized
cactccagcctgggtgacagag

SEQ ID NO: 37027 - DNA, 22 bp, Artificial Sequence
  chemically synthesized
cagcctgggtgacagagcgaga

SEQ ID NO: 37028 - DNA, 22 bp, Artificial Sequence
  chemically synthesized
ggtgacagagcgagattctgtc

SEQ ID NO: 37029 - DNA, 22 bp, Artificial Sequence
  chemically synthesized
tgtcttaaaaaaaaaaaaaaaa

SEQ ID NO: 37030 - DNA, 22 bp, Artificial Sequence
  chemically synthesized
tcttaaaaaaaaaaaaaaaaaa

SEQ ID NO: 37031 - DNA, 22 bp, Artificial Sequence
  chemically synthesized
aaaaaaaaaaaaaaaaaaaaaa

SEQ ID NO: 37032 - DNA, 22 bp, Artificial Sequence
  chemically synthesized
aaaaaaaaaaaaaaaaaaaaaa

SEQ ID NO: 37033 - DNA, 22 bp, Artificial Sequence
  chemically synthesized
gccctaacacaataccgtttcc

SEQ ID NO: 37034 - DNA, 22 bp, Artificial Sequence
  chemically synthesized
acacaataccgtttcctaataa

SEQ ID NO: 37035 - DNA, 22 bp, Artificial Sequence
  chemically synthesized
cctaataaattctgtaaataaa

SEQ ID NO: 37036 - DNA, 22 bp, Artificial Sequence
  chemically synthesized
ctaataaattctgtaaataaat

SEQ ID NO: 37037 - DNA, 22 bp, Artificial Sequence
  chemically synthesized
ataaattctgtaaataaatttt

SEQ ID NO: 37038 - DNA, 22 bp, Artificial Sequence
  chemically synthesized
tgtaaataaatttttgttgtct

SEQ ID NO: 37039 - DNA, 22 bp, Artificial Sequence
  chemically synthesized
taaataaatttttgttgtcttt

SEQ ID NO: 37040 - DNA, 22 bp, Artificial Sequence
  chemically synthesized
ttgttgtctttcaactttaaaa

SEQ ID NO: 37041 - DNA, 22 bp, Artificial Sequence
  chemically synthesized
tgttgtctttcaactttaaaag

SEQ ID NO: 37042 - DNA, 22 bp, Artificial Sequence
  chemically synthesized
gttgtctttcaactttaaaagc

SEQ ID NO: 37043 - DNA, 22 bp, Artificial Sequence
  chemically synthesized
ttgtctttcaactttaaaagcc

SEQ ID NO: 37044 - DNA, 22 bp, Artificial Sequence
  chemically synthesized
tctttcaactttaaaagccatg

SEQ ID NO: 37045 - DNA, 22 bp, Artificial Sequence
  chemically synthesized
tcaactttaaaagccatgggaa

SEQ ID NO: 37046 - DNA, 22 bp, Artificial Sequence
  chemically synthesized
caactttaaaagccatgggaaa

SEQ ID NO: 37047 - DNA, 22 bp, Artificial Sequence
  chemically synthesized
aactttaaaagccatgggaaaa

SEQ ID NO: 37048 - DNA, 22 bp, Artificial Sequence
  chemically synthesized
taaaagccatgggaaaagacag

SEQ ID NO: 37049 - DNA, 22 bp, Artificial Sequence
  chemically synthesized
aaaagccatgggaaaagacagt

SEQ ID NO: 37050 - DNA, 22 bp, Artificial Sequence
  chemically synthesized
aaagccatgggaaaagacagtc

SEQ ID NO: 37051 - DNA, 22 bp, Artificial Sequence
  chemically synthesized
tttgttctgtttgttttgaggg

SEQ ID NO: 37052 - DNA, 22 bp, Artificial Sequence
  chemically synthesized
ttgttctgtttgttttgagggg

SEQ ID NO: 37053 - DNA, 22 bp, Artificial Sequence
  chemically synthesized
tgttctgtttgttttgaggggg

SEQ ID NO: 37054 - DNA, 22 bp, Artificial Sequence
  chemically synthesized
gttctgtttgttttgagggggt

SEQ ID NO: 37055 - DNA, 22 bp, Artificial Sequence
  chemically synthesized
ttctgtttgttttgagggggtt

SEQ ID NO: 37056 - DNA, 22 bp, Artificial Sequence
  chemically synthesized
tgtttgttttgagggggttctt

SEQ ID NO: 37057 - DNA, 22 bp, Artificial Sequence
  chemically synthesized
tttgttttgagggggttcttct

SEQ ID NO: 37058 - DNA, 22 bp, Artificial Sequence
  chemically synthesized
gttttgagggggttcttctcca

SEQ ID NO: 37059 - DNA, 22 bp, Artificial Sequence
  chemically synthesized
ttttgagggggttcttctccac

SEQ ID NO: 37060 - DNA, 22 bp, Artificial Sequence
  chemically synthesized
tgagggggttcttctccacagt

SEQ ID NO: 37061 - DNA, 22 bp, Artificial Sequence
  chemically synthesized
gagggggttcttctccacagtg

SEQ ID NO: 37062 - DNA, 22 bp, Artificial Sequence
  chemically synthesized
agggggttcttctccacagtga

SEQ ID NO: 37063 - DNA, 22 bp, Artificial Sequence
  chemically synthesized
ttctccacagtgaagaggataa

SEQ ID NO: 37064 - DNA, 22 bp, Artificial Sequence
  chemically synthesized
ctccacagtgaagaggataaaa

SEQ ID NO: 37065 - DNA, 22 bp, Artificial Sequence
  chemically synthesized
tccacagtgaagaggataaaac

SEQ ID NO: 37066 - DNA, 22 bp, Artificial Sequence
  chemically synthesized
cacagtgaagaggataaaacaa

SEQ ID NO: 37067 - DNA, 22 bp, Artificial Sequence
  chemically synthesized
tatccacttctgttatcctctt

SEQ ID NO: 37068 - DNA, 22 bp, Artificial Sequence
  chemically synthesized
atccacttctgttatcctcttg

SEQ ID NO: 37069 - DNA, 22 bp, Artificial Sequence
  chemically synthesized
tccacttctgttatcctcttgc

SEQ ID NO: 37070 - DNA, 22 bp, Artificial Sequence
  chemically synthesized
ctgttatcctcttgccccttaa

SEQ ID NO: 37071 - DNA, 22 bp, Artificial Sequence
  chemically synthesized
tgttatcctcttgccccttaaa

SEQ ID NO: 37072 - DNA, 22 bp, Artificial Sequence
  chemically synthesized
ttatcctcttgccccttaaaaa

SEQ ID NO: 37073 - DNA, 22 bp, Artificial Sequence
  chemically synthesized
tcctcttgccccttaaaaatcc

SEQ ID NO: 37074 - DNA, 22 bp, Artificial Sequence
  chemically synthesized
ttgccccttaaaaatcccactt

SEQ ID NO: 37075 - DNA, 22 bp, Artificial Sequence
  chemically synthesized
gccccttaaaaatcccactttt

SEQ ID NO: 37076 - DNA, 22 bp, Artificial Sequence
  chemically synthesized
ccccttaaaaatcccactttta

SEQ ID NO: 37077 - DNA, 22 bp, Artificial Sequence
  chemically synthesized
aaaaatcccacttttagagata

SEQ ID NO: 37078 - DNA, 22 bp, Artificial Sequence
  chemically synthesized
aaaatcccacttttagagatat

SEQ ID NO: 37079 - DNA, 22 bp, Artificial Sequence
  chemically synthesized
ttagagatatccacttatttac

SEQ ID NO: 37080 - DNA, 22 bp, Artificial Sequence
  chemically synthesized
tagagatatccacttatttaca

SEQ ID NO: 37081 - DNA, 22 bp, Artificial Sequence
  chemically synthesized
agagatatccacttatttacaa

SEQ ID NO: 37082 - DNA, 22 bp, Artificial Sequence
  chemically synthesized
gagatatccacttatttacaaa

SEQ ID NO: 37083 - DNA, 22 bp, Artificial Sequence
  chemically synthesized
atttacaaactgactctgagaa

SEQ ID NO: 37084 - DNA, 22 bp, Artificial Sequence
  chemically synthesized
tttacaaactgactctgagaag

SEQ ID NO: 37085 - DNA, 22 bp, Artificial Sequence
  chemically synthesized
acaaactgactctgagaagaaa

SEQ ID NO: 37086 - DNA, 22 bp, Artificial Sequence
  chemically synthesized
caaactgactctgagaagaaat

SEQ ID NO: 37087 - DNA, 22 bp, Artificial Sequence
  chemically synthesized
actctgagaagaaatatataaa

SEQ ID NO: 37088 - DNA, 22 bp, Artificial Sequence
  chemically synthesized
tgagaagaaatatataaaaagt

SEQ ID NO: 37089 - DNA, 22 bp, Artificial Sequence
  chemically synthesized
agaagaaatatataaaaagtgg

SEQ ID NO: 37090 - DNA, 22 bp, Artificial Sequence
  chemically synthesized
caaaggctgaacttgtctcaag

SEQ ID NO: 37091 - DNA, 22 bp, Artificial Sequence
  chemically synthesized
aacttgtctcaagacccaggat

SEQ ID NO: 37092 - DNA, 22 bp, Artificial Sequence
  chemically synthesized
gtctcaagacccaggattgttg

SEQ ID NO: 37093 - DNA, 22 bp, Artificial Sequence
  chemically synthesized
tctcaagacccaggattgttgt

SEQ ID NO: 37094 - DNA, 22 bp, Artificial Sequence
  chemically synthesized
aagacccaggattgttgtttca

SEQ ID NO: 37095 - DNA, 22 bp, Artificial Sequence
  chemically synthesized
ttgtttcagttctggcctccct

SEQ ID NO: 37096 - DNA, 22 bp, Artificial Sequence
  chemically synthesized
tttcagttctggcctccctttg

SEQ ID NO: 37097 - DNA, 22 bp, Artificial Sequence
  chemically synthesized
cagttctggcctccctttggaa

SEQ ID NO: 37098 - DNA, 22 bp, Artificial Sequence
  chemically synthesized
agttctggcctccctttggaag

SEQ ID NO: 37099 - DNA, 22 bp, Artificial Sequence
  chemically synthesized
tggcctccctttggaagtggtg

SEQ ID NO: 37100 - DNA, 22 bp, Artificial Sequence
  chemically synthesized
gcctccctttggaagtggtgtc

SEQ ID NO: 37101 - DNA, 22 bp, Artificial Sequence
  chemically synthesized
cctttggaagtggtgtcactct

SEQ ID NO: 37102 - DNA, 22 bp, Artificial Sequence
  chemically synthesized
tggaagtggtgtcactctttct

SEQ ID NO: 37103 - DNA, 22 bp, Artificial Sequence
  chemically synthesized
ggaagtggtgtcactctttcta

SEQ ID NO: 37104 - DNA, 22 bp, Artificial Sequence
  chemically synthesized
gaagtggtgtcactctttctag

SEQ ID NO: 37105 - DNA, 22 bp, Artificial Sequence
  chemically synthesized
tttctaggcatcagcaaggagt

SEQ ID NO: 37106 - DNA, 22 bp, Artificial Sequence
  chemically synthesized
tctaggcatcagcaaggagttc

SEQ ID NO: 37107 - DNA, 22 bp, Artificial Sequence
  chemically synthesized
ctaggcatcagcaaggagttca

SEQ ID NO: 37108 - DNA, 22 bp, Artificial Sequence
  chemically synthesized
taggcatcagcaaggagttcag

SEQ ID NO: 37109 - DNA, 22 bp, Artificial Sequence
  chemically synthesized
ggcatcagcaaggagttcagca

SEQ ID NO: 37110 - DNA, 22 bp, Artificial Sequence
  chemically synthesized
agcacatttagggaggaagcca

SEQ ID NO: 37111 - DNA, 22 bp, Artificial Sequence
  chemically synthesized
agggaggaagccatcacagaaa

SEQ ID NO: 37112 - DNA, 22 bp, Artificial Sequence
  chemically synthesized
gggaggaagccatcacagaaac

SEQ ID NO: 37113 - DNA, 22 bp, Artificial Sequence
  chemically synthesized
atggtcttatgtttcagcaaca

SEQ ID NO: 37114 - DNA, 22 bp, Artificial Sequence
  chemically synthesized
atgtttcagcaacacataggca

SEQ ID NO: 37115 - DNA, 22 bp, Artificial Sequence
  chemically synthesized
tgtttcagcaacacataggcag

SEQ ID NO: 37116 - DNA, 22 bp, Artificial Sequence
  chemically synthesized
cagcaacacataggcagagcat

SEQ ID NO: 37117 - DNA, 22 bp, Artificial Sequence
  chemically synthesized
agcaacacataggcagagcatg

SEQ ID NO: 37118 - DNA, 22 bp, Artificial Sequence
  chemically synthesized
ctttatgaaataacttcttgtc

SEQ ID NO: 37119 - DNA, 22 bp, Artificial Sequence
  chemically synthesized
tttatgaaataacttcttgtct

SEQ ID NO: 37120 - DNA, 22 bp, Artificial Sequence
  chemically synthesized
tatgaaataacttcttgtctgg

SEQ ID NO: 37121 - DNA, 22 bp, Artificial Sequence
  chemically synthesized
atgaaataacttcttgtctgga

SEQ ID NO: 37122 - DNA, 22 bp, Artificial Sequence
  chemically synthesized
tgaaataacttcttgtctggaa

SEQ ID NO: 37123 - DNA, 22 bp, Artificial Sequence
  chemically synthesized
cttgtctggaagtcccaactaa

SEQ ID NO: 37124 - DNA, 22 bp, Artificial Sequence
  chemically synthesized
ttgtctggaagtcccaactaat

SEQ ID NO: 37125 - DNA, 22 bp, Artificial Sequence
  chemically synthesized
gtctggaagtcccaactaattg

SEQ ID NO: 37126 - DNA, 22 bp, Artificial Sequence
  chemically synthesized
tctggaagtcccaactaattga

SEQ ID NO: 37127 - DNA, 22 bp, Artificial Sequence
  chemically synthesized
gaagtcccaactaattgatagg

SEQ ID NO: 37128 - DNA, 22 bp, Artificial Sequence
  chemically synthesized
attgataggaagtcacaaacag

SEQ ID NO: 37129 - DNA, 22 bp, Artificial Sequence
  chemically synthesized
ataggaagtcacaaacaggcca

SEQ ID NO: 37130 - DNA, 22 bp, Artificial Sequence
  chemically synthesized
gtgcaatcagggttatttgtca

SEQ ID NO: 37131 - DNA, 22 bp, Artificial Sequence
  chemically synthesized
tttgtcatggaaaagccacagg

SEQ ID NO: 37132 - DNA, 22 bp, Artificial Sequence
  chemically synthesized
gtcatggaaaagccacagggga

SEQ ID NO: 37133 - DNA, 22 bp, Artificial Sequence
  chemically synthesized
tcatggaaaagccacaggggaa

SEQ ID NO: 37134 - DNA, 22 bp, Artificial Sequence
  chemically synthesized
caacctccctttctcagtgcac

SEQ ID NO: 37135 - DNA, 22 bp, Artificial Sequence
  chemically synthesized
cctttctcagtgcacacatctg

SEQ ID NO: 37136 - DNA, 22 bp, Artificial Sequence
  chemically synthesized
tctcagtgcacacatctgttgg

SEQ ID NO: 37137 - DNA, 22 bp, Artificial Sequence
  chemically synthesized
ctcagtgcacacatctgttggt

SEQ ID NO: 37138 - DNA, 22 bp, Artificial Sequence
  chemically synthesized
tcagtgcacacatctgttggta

SEQ ID NO: 37139 - DNA, 22 bp, Artificial Sequence
  chemically synthesized
agtgcacacatctgttggtagg

SEQ ID NO: 37140 - DNA, 22 bp, Artificial Sequence
  chemically synthesized
ttggtaggaagaggcaactctg

SEQ ID NO: 37141 - DNA, 22 bp, Artificial Sequence
  chemically synthesized
gtaggaagaggcaactctgcat

SEQ ID NO: 37142 - DNA, 22 bp, Artificial Sequence
  chemically synthesized
tgcatgcctttaccaaaggcca

SEQ ID NO: 37143 - DNA, 22 bp, Artificial Sequence
  chemically synthesized
catgcctttaccaaaggccatc

SEQ ID NO: 37144 - DNA, 22 bp, Artificial Sequence
  chemically synthesized
taccaaaggccatcctgggtct

SEQ ID NO: 37145 - DNA, 22 bp, Artificial Sequence
  chemically synthesized
accaaaggccatcctgggtctg

SEQ ID NO: 37146 - DNA, 22 bp, Artificial Sequence
  chemically synthesized
ccaaaggccatcctgggtctgt

SEQ ID NO: 37147 - DNA, 22 bp, Artificial Sequence
  chemically synthesized
ggtctgtatgtgtaagccacat

SEQ ID NO: 37148 - DNA, 22 bp, Artificial Sequence
  chemically synthesized
tatgtgtaagccacatgtgtgt

SEQ ID NO: 37149 - DNA, 22 bp, Artificial Sequence
  chemically synthesized
tgaacatttatgacttatgtgc

SEQ ID NO: 37150 - DNA, 22 bp, Artificial Sequence
  chemically synthesized
atgacttatgtgctaacacagg

SEQ ID NO: 37151 - DNA, 22 bp, Artificial Sequence
  chemically synthesized
tgacttatgtgctaacacagga

SEQ ID NO: 37152 - DNA, 22 bp, Artificial Sequence
  chemically synthesized
atgtgctaacacaggaaaagat

SEQ ID NO: 37153 - DNA, 22 bp, Artificial Sequence
  chemically synthesized
tgtgctaacacaggaaaagata

SEQ ID NO: 37154 - DNA, 22 bp, Artificial Sequence
  chemically synthesized
acacaggaaaagatactccctt

SEQ ID NO: 37155 - DNA, 22 bp, Artificial Sequence
  chemically synthesized
cctttgatcagttaaacagagt

SEQ ID NO: 37156 - DNA, 22 bp, Artificial Sequence
  chemically synthesized
tgatcagttaaacagagtttgg

SEQ ID NO: 37157 - DNA, 22 bp, Artificial Sequence
  chemically synthesized
gatcagttaaacagagtttggt

SEQ ID NO: 37158 - DNA, 22 bp, Artificial Sequence
  chemically synthesized
atcagttaaacagagtttggtg

SEQ ID NO: 37159 - DNA, 22 bp, Artificial Sequence
  chemically synthesized
aacagagtttggtgaaattagc

SEQ ID NO: 37160 - DNA, 22 bp, Artificial Sequence
  chemically synthesized
ggtgaaattagctctggacaag

SEQ ID NO: 37161 - DNA, 22 bp, Artificial Sequence
  chemically synthesized
gtgaaattagctctggacaaga

SEQ ID NO: 37162 - DNA, 22 bp, Artificial Sequence
  chemically synthesized
gctctggacaagaaaccagaaa

SEQ ID NO: 37163 - DNA, 22 bp, Artificial Sequence
  chemically synthesized
tggacaagaaaccagaaaacct

SEQ ID NO: 37164 - DNA, 22 bp, Artificial Sequence
  chemically synthesized
gacaagaaaccagaaaacctgg

SEQ ID NO: 37165 - DNA, 22 bp, Artificial Sequence
  chemically synthesized
gcttctctgctttctctcttac

SEQ ID NO: 37166 - DNA, 22 bp, Artificial Sequence
  chemically synthesized
ctctgctttctctcttactgat

SEQ ID NO: 37167 - DNA, 22 bp, Artificial Sequence
  chemically synthesized
tctgctttctctcttactgatg

SEQ ID NO: 37168 - DNA, 22 bp, Artificial Sequence
  chemically synthesized
tgctttctctcttactgatgtg

SEQ ID NO: 37169 - DNA, 22 bp, Artificial Sequence
  chemically synthesized
ctttctctcttactgatgtggc

SEQ ID NO: 37170 - DNA, 22 bp, Artificial Sequence
  chemically synthesized
tctctcttactgatgtggcctc

SEQ ID NO: 37171 - DNA, 22 bp, Artificial Sequence
  chemically synthesized
ctctcttactgatgtggcctct

SEQ ID NO: 37172 - DNA, 22 bp, Artificial Sequence
  chemically synthesized
tctcttactgatgtggcctctg

SEQ ID NO: 37173 - DNA, 22 bp, Artificial Sequence
  chemically synthesized
tcttactgatgtggcctctggc

SEQ ID NO: 37174 - DNA, 22 bp, Artificial Sequence
  chemically synthesized
ttactgatgtggcctctggcaa

SEQ ID NO: 37175 - DNA, 22 bp, Artificial Sequence
  chemically synthesized
actgatgtggcctctggcaagc

SEQ ID NO: 37176 - DNA, 22 bp, Artificial Sequence
  chemically synthesized
ctgatgtggcctctggcaagcc

SEQ ID NO: 37177 - DNA, 22 bp, Artificial Sequence
  chemically synthesized
atgtggcctctggcaagccctt

SEQ ID NO: 37178 - DNA, 22 bp, Artificial Sequence
  chemically synthesized
tggcaagcccttaaccttggta

SEQ ID NO: 37179 - DNA, 22 bp, Artificial Sequence
  chemically synthesized
gcaagcccttaaccttggtaag

SEQ ID NO: 37180 - DNA, 22 bp, Artificial Sequence
  chemically synthesized
aaccttggtaagcctcaatctc

SEQ ID NO: 37181 - DNA, 22 bp, Artificial Sequence
  chemically synthesized
accttggtaagcctcaatctcc

SEQ ID NO: 37182 - DNA, 22 bp, Artificial Sequence
  chemically synthesized
ggtaagcctcaatctccacctc

SEQ ID NO: 37183 - DNA, 22 bp, Artificial Sequence
  chemically synthesized
gtaagcctcaatctccacctcc

SEQ ID NO: 37184 - DNA, 22 bp, Artificial Sequence
  chemically synthesized
aatctccacctccataaagtag

SEQ ID NO: 37185 - DNA, 22 bp, Artificial Sequence
  chemically synthesized
cacctccataaagtagaagtcg

SEQ ID NO: 37186 - DNA, 22 bp, Artificial Sequence
  chemically synthesized
cataaagtagaagtcgtgagat

SEQ ID NO: 37187 - DNA, 22 bp, Artificial Sequence
  chemically synthesized
tcccagagagcaggtgaaataa

SEQ ID NO: 37188 - DNA, 22 bp, Artificial Sequence
  chemically synthesized
tatacagtataaggtagttcac

SEQ ID NO: 37189 - DNA, 22 bp, Artificial Sequence
  chemically synthesized
actactgtagacagtcattatt

SEQ ID NO: 37190 - DNA, 22 bp, Artificial Sequence
  chemically synthesized
ctgtagacagtcattatttatt

SEQ ID NO: 37191 - DNA, 22 bp, Artificial Sequence
  chemically synthesized
tagacagtcattatttattatg

SEQ ID NO: 37192 - DNA, 22 bp, Artificial Sequence
  chemically synthesized
tttattatgaataagcaggaaa

SEQ ID NO: 37193 - DNA, 22 bp, Artificial Sequence
  chemically synthesized
attatgaataagcaggaaataa

SEQ ID NO: 37194 - DNA, 22 bp, Artificial Sequence
  chemically synthesized
ttatgaataagcaggaaataat

SEQ ID NO: 37195 - DNA, 22 bp, Artificial Sequence
  chemically synthesized
tgaataagcaggaaataattca

SEQ ID NO: 37196 - DNA, 22 bp, Artificial Sequence
  chemically synthesized
acatgccaattatttggctatc

SEQ ID NO: 37197 - DNA, 22 bp, Artificial Sequence
  chemically synthesized
tttggctatcttttcactaagc

SEQ ID NO: 37198 - DNA, 22 bp, Artificial Sequence
  chemically synthesized
ggctatcttttcactaagctag

SEQ ID NO: 37199 - DNA, 22 bp, Artificial Sequence
  chemically synthesized
gctatcttttcactaagctagg

SEQ ID NO: 37200 - DNA, 22 bp, Artificial Sequence
  chemically synthesized
tcttttcactaagctaggtaat

SEQ ID NO: 37201 - DNA, 22 bp, Artificial Sequence
  chemically synthesized
ttcactaagctaggtaatctag

SEQ ID NO: 37202 - DNA, 22 bp, Artificial Sequence
  chemically synthesized
tcactaagctaggtaatctagc

SEQ ID NO: 37203 - DNA, 22 bp, Artificial Sequence
  chemically synthesized
cactaagctaggtaatctagcc

SEQ ID NO: 37204 - DNA, 22 bp, Artificial Sequence
  chemically synthesized
actaagctaggtaatctagcca

SEQ ID NO: 37205 - DNA, 22 bp, Artificial Sequence
  chemically synthesized
agctaggtaatctagccagaag

SEQ ID NO: 37206 - DNA, 22 bp, Artificial Sequence
  chemically synthesized
ggtaatctagccagaaggtgga

SEQ ID NO: 37207 - DNA, 22 bp, Artificial Sequence
  chemically synthesized
gccagaaggtggataggtagga

SEQ ID NO: 37208 - DNA, 22 bp, Artificial Sequence
  chemically synthesized
tccccacttaggttcacggcct

SEQ ID NO: 37209 - DNA, 22 bp, Artificial Sequence
  chemically synthesized
ccccacttaggttcacggcctg

SEQ ID NO: 37210 - DNA, 22 bp, Artificial Sequence
  chemically synthesized
cccacttaggttcacggcctgt

SEQ ID NO: 37211 - DNA, 22 bp, Artificial Sequence
  chemically synthesized
aggttcacggcctgtatgtgaa

SEQ ID NO: 37212 - DNA, 22 bp, Artificial Sequence
  chemically synthesized
ggttcacggcctgtatgtgaat

SEQ ID NO: 37213 - DNA, 22 bp, Artificial Sequence
  chemically synthesized
acggcctgtatgtgaatctaca

SEQ ID NO: 37214 - DNA, 22 bp, Artificial Sequence
  chemically synthesized
tatgtgaatctacagcacacag

SEQ ID NO: 37215 - DNA, 22 bp, Artificial Sequence
  chemically synthesized
cagcacacaggtgtctgagctc

SEQ ID NO: 37216 - DNA, 22 bp, Artificial Sequence
  chemically synthesized
agctctattattgacaaaccta

SEQ ID NO: 37217 - DNA, 22 bp, Artificial Sequence
  chemically synthesized
tattattgacaaacctatttta

SEQ ID NO: 37218 - DNA, 22 bp, Artificial Sequence
  chemically synthesized
ttattgacaaacctattttaat

SEQ ID NO: 37219 - DNA, 22 bp, Artificial Sequence
  chemically synthesized
ttgacaaacctattttaatttg

SEQ ID NO: 37220 - DNA, 22 bp, Artificial Sequence
  chemically synthesized
acaaacctattttaatttgcta

SEQ ID NO: 37221 - DNA, 22 bp, Artificial Sequence
  chemically synthesized
ttttaatttgctatgttgtttc

SEQ ID NO: 37222 - DNA, 22 bp, Artificial Sequence
  chemically synthesized
taatttgctatgttgtttctaa

SEQ ID NO: 37223 - DNA, 22 bp, Artificial Sequence
  chemically synthesized
aatttgctatgttgtttctaat

SEQ ID NO: 37224 - DNA, 22 bp, Artificial Sequence
  chemically synthesized
atttgctatgttgtttctaatt

SEQ ID NO: 37225 - DNA, 22 bp, Artificial Sequence
  chemically synthesized
gctatgttgtttctaattctct

SEQ ID NO: 37226 - DNA, 22 bp, Artificial Sequence
  chemically synthesized
ctatgttgtttctaattctctt

SEQ ID NO: 37227 - DNA, 22 bp, Artificial Sequence
  chemically synthesized
tgttgtttctaattctcttctg

SEQ ID NO: 37228 - DNA, 22 bp, Artificial Sequence
  chemically synthesized
tttctaattctcttctggatct

SEQ ID NO: 37229 - DNA, 22 bp, Artificial Sequence
  chemically synthesized
ctaattctcttctggatctcca

SEQ ID NO: 37230 - DNA, 22 bp, Artificial Sequence
  chemically synthesized
taattctcttctggatctccaa

SEQ ID NO: 37231 - DNA, 22 bp, Artificial Sequence
  chemically synthesized
attctcttctggatctccaagc

SEQ ID NO: 37232 - DNA, 22 bp, Artificial Sequence
  chemically synthesized
tcttctggatctccaagcagta

SEQ ID NO: 37233 - DNA, 22 bp, Artificial Sequence
  chemically synthesized
ttctggatctccaagcagtaaa

SEQ ID NO: 37234 - DNA, 22 bp, Artificial Sequence
  chemically synthesized
ctggatctccaagcagtaaaaa

SEQ ID NO: 37235 - DNA, 22 bp, Artificial Sequence
  chemically synthesized
tggatctccaagcagtaaaaaa

SEQ ID NO: 37236 - DNA, 22 bp, Artificial Sequence
  chemically synthesized
gatctccaagcagtaaaaaata

SEQ ID NO: 37237 - DNA, 22 bp, Artificial Sequence
  chemically synthesized
caagcagtaaaaaataccaaac

SEQ ID NO: 37238 - DNA, 22 bp, Artificial Sequence
  chemically synthesized
agaaaagttctgtgcaaattaa

SEQ ID NO: 37239 - DNA, 22 bp, Artificial Sequence
  chemically synthesized
tgtgcaaattaactgggccaga

SEQ ID NO: 37240 - DNA, 22 bp, Artificial Sequence
  chemically synthesized
tgcaaattaactgggccagaaa

SEQ ID NO: 37241 - DNA, 22 bp, Artificial Sequence
  chemically synthesized
actgggccagaaagaattttta

SEQ ID NO: 37242 - DNA, 22 bp, Artificial Sequence
  chemically synthesized
ggccagaaagaatttttaccac

SEQ ID NO: 37243 - DNA, 22 bp, Artificial Sequence
  chemically synthesized
ttaccacctgtttgtagatgta

SEQ ID NO: 37244 - DNA, 22 bp, Artificial Sequence
  chemically synthesized
taccacctgtttgtagatgtaa

SEQ ID NO: 37245 - DNA, 22 bp, Artificial Sequence
  chemically synthesized
accacctgtttgtagatgtaac

SEQ ID NO: 37246 - DNA, 22 bp, Artificial Sequence
  chemically synthesized
ccacctgtttgtagatgtaact

SEQ ID NO: 37247 - DNA, 22 bp, Artificial Sequence
  chemically synthesized
tttgtagatgtaacttatttgt

SEQ ID NO: 37248 - DNA, 22 bp, Artificial Sequence
  chemically synthesized
gtagatgtaacttatttgtggc

SEQ ID NO: 37249 - DNA, 22 bp, Artificial Sequence
  chemically synthesized
tagatgtaacttatttgtggca

SEQ ID NO: 37250 - DNA, 22 bp, Artificial Sequence
  chemically synthesized
atttgtggcactaatttctaag

SEQ ID NO: 37251 - DNA, 22 bp, Artificial Sequence
  chemically synthesized
tttgtggcactaatttctaagg

SEQ ID NO: 37252 - DNA, 22 bp, Artificial Sequence
  chemically synthesized
gtggcactaatttctaaggaat

SEQ ID NO: 37253 - DNA, 22 bp, Artificial Sequence
  chemically synthesized
tggcactaatttctaaggaata

SEQ ID NO: 37254 - DNA, 22 bp, Artificial Sequence
  chemically synthesized
atttctaaggaatagagcattg

SEQ ID NO: 37255 - DNA, 22 bp, Artificial Sequence
  chemically synthesized
ctaaggaatagagcattgctgt

SEQ ID NO: 37256 - DNA, 22 bp, Artificial Sequence
  chemically synthesized
taaggaatagagcattgctgtg

SEQ ID NO: 37257 - DNA, 22 bp, Artificial Sequence
  chemically synthesized
aggaatagagcattgctgtgat

SEQ ID NO: 37258 - DNA, 22 bp, Artificial Sequence
  chemically synthesized
ctgtgattgtctgttctgatgt

SEQ ID NO: 37259 - DNA, 22 bp, Artificial Sequence
  chemically synthesized
tgattgtctgttctgatgtgaa

SEQ ID NO: 37260 - DNA, 22 bp, Artificial Sequence
  chemically synthesized
tctgttctgatgtgaacttctt

SEQ ID NO: 37261 - DNA, 22 bp, Artificial Sequence
  chemically synthesized
ttctgatgtgaacttctttcct

SEQ ID NO: 37262 - DNA, 22 bp, Artificial Sequence
  chemically synthesized
tgatgtgaacttctttcctcct

SEQ ID NO: 37263 - DNA, 22 bp, Artificial Sequence
  chemically synthesized
atgtgaacttctttcctcctat

SEQ ID NO: 37264 - DNA, 22 bp, Artificial Sequence
  chemically synthesized
ctttcctcctataatttccccc

SEQ ID NO: 37265 - DNA, 22 bp, Artificial Sequence
  chemically synthesized
tttcctcctataatttcccccc

SEQ ID NO: 37266 - DNA, 22 bp, Artificial Sequence
  chemically synthesized
tcctcctataatttcccccctc

SEQ ID NO: 37267 - DNA, 22 bp, Artificial Sequence
  chemically synthesized
cctcctataatttcccccctct

SEQ ID NO: 37268 - DNA, 22 bp, Artificial Sequence
  chemically synthesized
ctcctataatttcccccctcta

SEQ ID NO: 37269 - DNA, 22 bp, Artificial Sequence
  chemically synthesized
ctataatttcccccctctaaaa

SEQ ID NO: 37270 - DNA, 22 bp, Artificial Sequence
  chemically synthesized
taatttcccccctctaaaatct

SEQ ID NO: 37271 - DNA, 22 bp, Artificial Sequence
  chemically synthesized
cccccctctaaaatctgcccca

SEQ ID NO: 37272 - DNA, 22 bp, Artificial Sequence
  chemically synthesized
ccccctctaaaatctgccccaa

SEQ ID NO: 37273 - DNA, 22 bp, Artificial Sequence
  chemically synthesized
taaaatctgccccaaatttcct

SEQ ID NO: 37274 - DNA, 22 bp, Artificial Sequence
  chemically synthesized
aaatctgccccaaatttcctga

SEQ ID NO: 37275 - DNA, 22 bp, Artificial Sequence
  chemically synthesized
ccccaaatttcctgatgtaagt

SEQ ID NO: 37276 - DNA, 22 bp, Artificial Sequence
  chemically synthesized
cctgatgtaagtactaaagaag

SEQ ID NO: 37277 - DNA, 22 bp, Artificial Sequence
  chemically synthesized
ctgatgtaagtactaaagaagt

SEQ ID NO: 37278 - DNA, 22 bp, Artificial Sequence
  chemically synthesized
atgtaagtactaaagaagtttt

SEQ ID NO: 37279 - DNA, 22 bp, Artificial Sequence
  chemically synthesized
aagaagttttatgtttgtttgt

SEQ ID NO: 37280 - DNA, 22 bp, Artificial Sequence
  chemically synthesized
tatgtttgtttgtctgcattaa

SEQ ID NO: 37281 - DNA, 22 bp, Artificial Sequence
  chemically synthesized
atgtttgtttgtctgcattaag

SEQ ID NO: 37282 - DNA, 22 bp, Artificial Sequence
  chemically synthesized
tgtttgtttgtctgcattaaga

SEQ ID NO: 37283 - DNA, 22 bp, Artificial Sequence
  chemically synthesized
gtttgtctgcattaagatatat

SEQ ID NO: 37284 - DNA, 22 bp, Artificial Sequence
  chemically synthesized
tttgtctgcattaagatatatt

SEQ ID NO: 37285 - DNA, 22 bp, Artificial Sequence
  chemically synthesized
gtctgcattaagatatatttcc

SEQ ID NO: 37286 - DNA, 22 bp, Artificial Sequence
  chemically synthesized
tctgcattaagatatatttcct

SEQ ID NO: 37287 - DNA, 22 bp, Artificial Sequence
  chemically synthesized
cattaagatatatttcctgaag

SEQ ID NO: 37288 - DNA, 22 bp, Artificial Sequence
  chemically synthesized
agatatatttcctgaaggtttg

SEQ ID NO: 37289 - DNA, 22 bp, Artificial Sequence
  chemically synthesized
cctgaaggtttgggaacctaaa

SEQ ID NO: 37290 - DNA, 22 bp, Artificial Sequence
  chemically synthesized
ctgaaggtttgggaacctaaaa

SEQ ID NO: 37291 - DNA, 22 bp, Artificial Sequence
  chemically synthesized
aaggtttgggaacctaaaatta

SEQ ID NO: 37292 - DNA, 22 bp, Artificial Sequence
  chemically synthesized
gggaacctaaaattagaatatt

SEQ ID NO: 37293 - DNA, 22 bp, Artificial Sequence
  chemically synthesized
ggaacctaaaattagaatattt

SEQ ID NO: 37294 - DNA, 22 bp, Artificial Sequence
  chemically synthesized
aaattagaatatttaataagaa

SEQ ID NO: 37295 - DNA, 22 bp, Artificial Sequence
  chemically synthesized
gaatatttaataagaaactact

SEQ ID NO: 37296 - DNA, 22 bp, Artificial Sequence
  chemically synthesized
aataagaaactactgacattta

SEQ ID NO: 37297 - DNA, 22 bp, Artificial Sequence
  chemically synthesized
ataagaaactactgacatttat

SEQ ID NO: 37298 - DNA, 22 bp, Artificial Sequence
  chemically synthesized
ctgacatttatcaccttcttta

SEQ ID NO: 37299 - DNA, 22 bp, Artificial Sequence
  chemically synthesized
acatttatcaccttctttagga

SEQ ID NO: 37300 - DNA, 22 bp, Artificial Sequence
  chemically synthesized
atcaccttctttaggatttacc

SEQ ID NO: 37301 - DNA, 22 bp, Artificial Sequence
  chemically synthesized
tcaccttctttaggatttaccg

SEQ ID NO: 37302 - DNA, 22 bp, Artificial Sequence
  chemically synthesized
ctttaggatttaccgctcgccc

SEQ ID NO: 37303 - DNA, 22 bp, Artificial Sequence
  chemically synthesized
tttaggatttaccgctcgccca

SEQ ID NO: 37304 - DNA, 22 bp, Artificial Sequence
  chemically synthesized
taggatttaccgctcgcccagt

SEQ ID NO: 37305 - DNA, 22 bp, Artificial Sequence
  chemically synthesized
aggatttaccgctcgcccagtg

SEQ ID NO: 37306 - DNA, 22 bp, Artificial Sequence
  chemically synthesized
ggatttaccgctcgcccagtga

SEQ ID NO: 37307 - DNA, 22 bp, Artificial Sequence
  chemically synthesized
accgctcgcccagtgatgttct

SEQ ID NO: 37308 - DNA, 22 bp, Artificial Sequence
  chemically synthesized
ccgctcgcccagtgatgttctt

SEQ ID NO: 37309 - DNA, 22 bp, Artificial Sequence
  chemically synthesized
gcccagtgatgttctttcctaa

SEQ ID NO: 37310 - DNA, 22 bp, Artificial Sequence
  chemically synthesized
tttcctaagctaaattaaaaga

SEQ ID NO: 37311 - DNA, 22 bp, Artificial Sequence
  chemically synthesized
tcctaagctaaattaaaagaca

SEQ ID NO: 37312 - DNA, 22 bp, Artificial Sequence
  chemically synthesized
cctaagctaaattaaaagacaa

SEQ ID NO: 37313 - DNA, 22 bp, Artificial Sequence
  chemically synthesized
ctaagctaaattaaaagacaaa

SEQ ID NO: 37314 - DNA, 22 bp, Artificial Sequence
  chemically synthesized
agctaaattaaaagacaaattc

SEQ ID NO: 37315 - DNA, 22 bp, Artificial Sequence
  chemically synthesized
aattaaaagacaaattcaaatc

SEQ ID NO: 37316 - DNA, 22 bp, Artificial Sequence
  chemically synthesized
aaagacaaattcaaatcctgca

SEQ ID NO: 37317 - DNA, 22 bp, Artificial Sequence
  chemically synthesized
aaatcctgcatggtagccacca

SEQ ID NO: 37318 - DNA, 22 bp, Artificial Sequence
  chemically synthesized
catggtagccaccaaaagcata

SEQ ID NO: 37319 - DNA, 22 bp, Artificial Sequence
  chemically synthesized
gaaaaacaggattcggcgtgcc

SEQ ID NO: 37320 - DNA, 22 bp, Artificial Sequence
  chemically synthesized
aaaaacaggattcggcgtgcca

SEQ ID NO: 37321 - DNA, 22 bp, Artificial Sequence
  chemically synthesized
ggcgtgccatattatgcattat

SEQ ID NO: 37322 - DNA, 22 bp, Artificial Sequence
  chemically synthesized
tgcattatttaatggtatgcaa

SEQ ID NO: 37323 - DNA, 22 bp, Artificial Sequence
  chemically synthesized
tttaatggtatgcaaattataa

SEQ ID NO: 37324 - DNA, 22 bp, Artificial Sequence
  chemically synthesized
aatggtatgcaaattataagtc

SEQ ID NO: 37325 - DNA, 22 bp, Artificial Sequence
  chemically synthesized
atggtatgcaaattataagtca

SEQ ID NO: 37326 - DNA, 22 bp, Artificial Sequence
  chemically synthesized
taagtcagacagttaggaaaac

SEQ ID NO: 37327 - DNA, 22 bp, Artificial Sequence
  chemically synthesized
ggaaaaccacacttcagcatta

SEQ ID NO: 37328 - DNA, 22 bp, Artificial Sequence
  chemically synthesized
cagcattaataaacagcaatat

SEQ ID NO: 37329 - DNA, 22 bp, Artificial Sequence
  chemically synthesized
agcattaataaacagcaatatt

SEQ ID NO: 37330 - DNA, 22 bp, Artificial Sequence
  chemically synthesized
ataaacagcaatattactacta

SEQ ID NO: 37331 - DNA, 22 bp, Artificial Sequence
  chemically synthesized
ctactacattaattatgatatt

SEQ ID NO: 37332 - DNA, 22 bp, Artificial Sequence
  chemically synthesized
ctacattaattatgatattgct

SEQ ID NO: 37333 - DNA, 22 bp, Artificial Sequence
  chemically synthesized
cattaattatgatattgctatg

SEQ ID NO: 37334 - DNA, 22 bp, Artificial Sequence
  chemically synthesized
attatgatattgctatgattta

SEQ ID NO: 37335 - DNA, 22 bp, Artificial Sequence
  chemically synthesized
tgatattgctatgatttattcc

SEQ ID NO: 37336 - DNA, 22 bp, Artificial Sequence
  chemically synthesized
ctatgatttattcccaagtttt

SEQ ID NO: 37337 - DNA, 22 bp, Artificial Sequence
  chemically synthesized
tgatttattcccaagttttgca

SEQ ID NO: 37338 - DNA, 22 bp, Artificial Sequence
  chemically synthesized
attcccaagttttgcattttga

SEQ ID NO: 37339 - DNA, 22 bp, Artificial Sequence
  chemically synthesized
ttcccaagttttgcattttgat

SEQ ID NO: 37340 - DNA, 22 bp, Artificial Sequence
  chemically synthesized
ccaagttttgcattttgattct

SEQ ID NO: 37341 - DNA, 22 bp, Artificial Sequence
  chemically synthesized
tgcattttgattctccttgaaa

SEQ ID NO: 37342 - DNA, 22 bp, Artificial Sequence
  chemically synthesized
gcattttgattctccttgaaaa

SEQ ID NO: 37343 - DNA, 22 bp, Artificial Sequence
  chemically synthesized
cattttgattctccttgaaaat

SEQ ID NO: 37344 - DNA, 22 bp, Artificial Sequence
  chemically synthesized
tgattctccttgaaaatttatg

SEQ ID NO: 37345 - DNA, 22 bp, Artificial Sequence
  chemically synthesized
gattctccttgaaaatttatgc

SEQ ID NO: 37346 - DNA, 22 bp, Artificial Sequence
  chemically synthesized
attctccttgaaaatttatgcc

SEQ ID NO: 37347 - DNA, 22 bp, Artificial Sequence
  chemically synthesized
tccttgaaaatttatgccatct

SEQ ID NO: 37348 - DNA, 22 bp, Artificial Sequence
  chemically synthesized
cttgaaaatttatgccatctga

SEQ ID NO: 37349 - DNA, 22 bp, Artificial Sequence
  chemically synthesized
gaaaatttatgccatctgataa

SEQ ID NO: 37350 - DNA, 22 bp, Artificial Sequence
  chemically synthesized
aaaatttatgccatctgataag

SEQ ID NO: 37351 - DNA, 22 bp, Artificial Sequence
  chemically synthesized
atgccatctgataagcggtaac

SEQ ID NO: 37352 - DNA, 22 bp, Artificial Sequence
  chemically synthesized
tgccatctgataagcggtaacc

SEQ ID NO: 37353 - DNA, 22 bp, Artificial Sequence
  chemically synthesized
ataagcggtaacctagttcccc

SEQ ID NO: 37354 - DNA, 22 bp, Artificial Sequence
  chemically synthesized
gttcccctcctacatctcctgc

SEQ ID NO: 37355 - DNA, 22 bp, Artificial Sequence
  chemically synthesized
ccctcctacatctcctgcccat

SEQ ID NO: 37356 - DNA, 22 bp, Artificial Sequence
  chemically synthesized
ctacatctcctgcccatttctc

SEQ ID NO: 37357 - DNA, 22 bp, Artificial Sequence
  chemically synthesized
catctcctgcccatttctcaaa

SEQ ID NO: 37358 - DNA, 22 bp, Artificial Sequence
  chemically synthesized
ctgcccatttctcaaatctgtt

SEQ ID NO: 37359 - DNA, 22 bp, Artificial Sequence
  chemically synthesized
cccatttctcaaatctgttcct

SEQ ID NO: 37360 - DNA, 22 bp, Artificial Sequence
  chemically synthesized
ctcaaatctgttcctcctaccc

SEQ ID NO: 37361 - DNA, 22 bp, Artificial Sequence
  chemically synthesized
tcaaatctgttcctcctaccca

SEQ ID NO: 37362 - DNA, 22 bp, Artificial Sequence
  chemically synthesized
aaatctgttcctcctacccacc

SEQ ID NO: 37363 - DNA, 22 bp, Artificial Sequence
  chemically synthesized
ttcctcctacccacccgatggg

SEQ ID NO: 37364 - DNA, 22 bp, Artificial Sequence
  chemically synthesized
ctcctacccacccgatgggtgt

SEQ ID NO: 37365 - DNA, 22 bp, Artificial Sequence
  chemically synthesized
ctacccacccgatgggtgtctg

SEQ ID NO: 37366 - DNA, 22 bp, Artificial Sequence
  chemically synthesized
cccacccgatgggtgtctgtag

SEQ ID NO: 37367 - DNA, 22 bp, Artificial Sequence
  chemically synthesized
taggaaacaggtacagaagtac

SEQ ID NO: 37368 - DNA, 22 bp, Artificial Sequence
  chemically synthesized
attgtcttataagcattaaaaa

SEQ ID NO: 37369 - DNA, 22 bp, Artificial Sequence
  chemically synthesized
tcttataagcattaaaaattaa

SEQ ID NO: 37370 - DNA, 22 bp, Artificial Sequence
  chemically synthesized
ataagcattaaaaattaaagaa

SEQ ID NO: 37371 - DNA, 22 bp, Artificial Sequence
  chemically synthesized
taagcattaaaaattaaagaac

SEQ ID NO: 37372 - DNA, 22 bp, Artificial Sequence
  chemically synthesized
aaaattaaagaacaagcaaaca

SEQ ID NO: 37373 - DNA, 22 bp, Artificial Sequence
  chemically synthesized
aagaacaagcaaacaccaccta

SEQ ID NO: 37374 - DNA, 22 bp, Artificial Sequence
  chemically synthesized
aagctccaacatttattgtgtc

SEQ ID NO: 37375 - DNA, 22 bp, Artificial Sequence
  chemically synthesized
caacatttattgtgtcaatgtt

SEQ ID NO: 37376 - DNA, 22 bp, Artificial Sequence
  chemically synthesized
attgtgtcaatgttaagcacac

SEQ ID NO: 37377 - DNA, 22 bp, Artificial Sequence
  chemically synthesized
ttgtgtcaatgttaagcacact

SEQ ID NO: 37378 - DNA, 22 bp, Artificial Sequence
  chemically synthesized
tgtcaatgttaagcacactttt

SEQ ID NO: 37379 - DNA, 22 bp, Artificial Sequence
  chemically synthesized
agcacactttttaaaagacaac

SEQ ID NO: 37380 - DNA, 22 bp, Artificial Sequence
  chemically synthesized
tttaaaagacaacatagaatgt

SEQ ID NO: 37381 - DNA, 22 bp, Artificial Sequence
  chemically synthesized
ttaaaagacaacatagaatgta

SEQ ID NO: 37382 - DNA, 22 bp, Artificial Sequence
  chemically synthesized
taaaagacaacatagaatgtat

SEQ ID NO: 37383 - DNA, 22 bp, Artificial Sequence
  chemically synthesized
aaaagacaacatagaatgtata

SEQ ID NO: 37384 - DNA, 22 bp, Artificial Sequence
  chemically synthesized
aaagacaacatagaatgtatag

SEQ ID NO: 37385 - DNA, 22 bp, Artificial Sequence
  chemically synthesized
gggactcatgcgcatttccaca

SEQ ID NO: 37386 - DNA, 22 bp, Artificial Sequence
  chemically synthesized
atgcgcatttccacaatacagg

SEQ ID NO: 37387 - DNA, 22 bp, Artificial Sequence
  chemically synthesized
ccacaatacaggtaattaggtt

SEQ ID NO: 37388 - DNA, 22 bp, Artificial Sequence
  chemically synthesized
cacaatacaggtaattaggttg

SEQ ID NO: 37389 - DNA, 22 bp, Artificial Sequence
  chemically synthesized
ggttggctggtttcagaagggc

SEQ ID NO: 37390 - DNA, 22 bp, Artificial Sequence
  chemically synthesized
gctggtttcagaagggccaggg

SEQ ID NO: 37391 - DNA, 22 bp, Artificial Sequence
  chemically synthesized
gtttcagaagggccagggcatc

SEQ ID NO: 37392 - DNA, 22 bp, Artificial Sequence
  chemically synthesized
cagaagggccagggcatcactc

SEQ ID NO: 37393 - DNA, 22 bp, Artificial Sequence
  chemically synthesized
agaagggccagggcatcactca

SEQ ID NO: 37394 - DNA, 22 bp, Artificial Sequence
  chemically synthesized
atgacagcgatggtccacgggc

SEQ ID NO: 37395 - DNA, 22 bp, Artificial Sequence
  chemically synthesized
tctatgggactgattcactgtt

SEQ ID NO: 37396 - DNA, 22 bp, Artificial Sequence
  chemically synthesized
tatgggactgattcactgttcc

SEQ ID NO: 37397 - DNA, 22 bp, Artificial Sequence
  chemically synthesized
tgggactgattcactgttccaa

SEQ ID NO: 37398 - DNA, 22 bp, Artificial Sequence
  chemically synthesized
attcactgttccaatgtgggtc

SEQ ID NO: 37399 - DNA, 22 bp, Artificial Sequence
  chemically synthesized
actgttccaatgtgggtctgtt

SEQ ID NO: 37400 - DNA, 22 bp, Artificial Sequence
  chemically synthesized
ttccaatgtgggtctgtttttt

SEQ ID NO: 37401 - DNA, 22 bp, Artificial Sequence
  chemically synthesized
caatgtgggtctgtttttttgt

SEQ ID NO: 37402 - DNA, 22 bp, Artificial Sequence
  chemically synthesized
tttttttgtttttactttttat

SEQ ID NO: 37403 - DNA, 22 bp, Artificial Sequence
  chemically synthesized
ttttgtttttactttttattaa

SEQ ID NO: 37404 - DNA, 22 bp, Artificial Sequence
  chemically synthesized
tttgtttttactttttattaaa

SEQ ID NO: 37405 - DNA, 22 bp, Artificial Sequence
  chemically synthesized
ttgtttttactttttattaaaa

SEQ ID NO: 37406 - DNA, 22 bp, Artificial Sequence
  chemically synthesized
tgtttttactttttattaaaaa

SEQ ID NO: 37407 - DNA, 22 bp, Artificial Sequence
  chemically synthesized
gtttttactttttattaaaaaa

SEQ ID NO: 37408 - DNA, 22 bp, Artificial Sequence
  chemically synthesized
tttttactttttattaaaaaat

SEQ ID NO: 37409 - DNA, 22 bp, Artificial Sequence
  chemically synthesized
ttactttttattaaaaaatata

SEQ ID NO: 37410 - DNA, 22 bp, Artificial Sequence
  chemically synthesized
tactttttattaaaaaatataa

SEQ ID NO: 37411 - DNA, 22 bp, Artificial Sequence
  chemically synthesized
actttttattaaaaaatataaa

SEQ ID NO: 37412 - DNA, 22 bp, Artificial Sequence
  chemically synthesized
ctttttattaaaaaatataaat

SEQ ID NO: 37413 - DNA, 22 bp, Artificial Sequence
  chemically synthesized
tttattaaaaaatataaataaa

SEQ ID NO: 37414 - DNA, 22 bp, Artificial Sequence
  chemically synthesized
ttattaaaaaatataaataaaa

SEQ ID NO: 37415 - DNA, 22 bp, Artificial Sequence
  chemically synthesized
tattaaaaaatataaataaaat

SEQ ID NO: 37416 - DNA, 22 bp, Artificial Sequence
  chemically synthesized
attaaaaaatataaataaaatg

SEQ ID NO: 37417 - DNA, 22 bp, Artificial Sequence
  chemically synthesized
ttaaaaaatataaataaaatgg

SEQ ID NO: 37418 - DNA, 22 bp, Artificial Sequence
  chemically synthesized
aaaaatataaataaaatggcgc

SEQ ID NO: 37419 - DNA, 22 bp, Artificial Sequence
  chemically synthesized
caggcctaggctggaaggactc

SEQ ID NO: 37420 - DNA, 22 bp, Artificial Sequence
  chemically synthesized
ggctggaaggactctgcaggac

SEQ ID NO: 37421 - DNA, 22 bp, Artificial Sequence
  chemically synthesized
gaaggactctgcaggactctgt

SEQ ID NO: 37422 - DNA, 22 bp, Artificial Sequence
  chemically synthesized
tgcaggactctgtcttcgcaca

SEQ ID NO: 37423 - DNA, 22 bp, Artificial Sequence
  chemically synthesized
caggactctgtcttcgcacaac

SEQ ID NO: 37424 - DNA, 22 bp, Artificial Sequence
  chemically synthesized
tgtcttcgcacaacggcttctt

SEQ ID NO: 37425 - DNA, 22 bp, Artificial Sequence
  chemically synthesized
tcttcgcacaacggcttcttgg

SEQ ID NO: 37426 - DNA, 22 bp, Artificial Sequence
  chemically synthesized
cgcacaacggcttcttggaggc

SEQ ID NO: 37427 - DNA, 22 bp, Artificial Sequence
  chemically synthesized
gcacaacggcttcttggaggct

SEQ ID NO: 37428 - DNA, 22 bp, Artificial Sequence
  chemically synthesized
cttggaggctactgtcagaaaa

SEQ ID NO: 37429 - DNA, 22 bp, Artificial Sequence
  chemically synthesized
ttggaggctactgtcagaaaac

SEQ ID NO: 37430 - DNA, 22 bp, Artificial Sequence
  chemically synthesized
ggaggctactgtcagaaaacat

SEQ ID NO: 37431 - DNA, 22 bp, Artificial Sequence
  chemically synthesized
gaggctactgtcagaaaacatc

SEQ ID NO: 37432 - DNA, 22 bp, Artificial Sequence
  chemically synthesized
ctgtcagaaaacatcacaaact

SEQ ID NO: 37433 - DNA, 22 bp, Artificial Sequence
  chemically synthesized
tcagaaaacatcacaaactagc

SEQ ID NO: 37434 - DNA, 22 bp, Artificial Sequence
  chemically synthesized
gcaggatgacagaccacgctga

SEQ ID NO: 37435 - DNA, 22 bp, Artificial Sequence
  chemically synthesized
acgtcgactgggcggcacgcgt

SEQ ID NO: 37436 - DNA, 22 bp, Artificial Sequence
  chemically synthesized
ggcggcacgcgtccaccccacc

SEQ ID NO: 37437 - DNA, 22 bp, Artificial Sequence
  chemically synthesized
ggggcttcaaattttctcagaa

SEQ ID NO: 37438 - DNA, 22 bp, Artificial Sequence
  chemically synthesized
caaattttctcagaacttaagg

SEQ ID NO: 37439 - DNA, 22 bp, Artificial Sequence
  chemically synthesized
aaattttctcagaacttaaggg

SEQ ID NO: 37440 - DNA, 22 bp, Artificial Sequence
  chemically synthesized
tctcagaacttaagggctctcg

SEQ ID NO: 37441 - DNA, 22 bp, Artificial Sequence
  chemically synthesized
ctcagaacttaagggctctcga

SEQ ID NO: 37442 - DNA, 22 bp, Artificial Sequence
  chemically synthesized
tcagaacttaagggctctcgag

SEQ ID NO: 37443 - DNA, 22 bp, Artificial Sequence
  chemically synthesized
agaacttaagggctctcgagct

SEQ ID NO: 37444 - DNA, 22 bp, Artificial Sequence
  chemically synthesized
aagggctctcgagcttccatcc

SEQ ID NO: 37445 - DNA, 22 bp, Artificial Sequence
  chemically synthesized
agggctctcgagcttccatccg

SEQ ID NO: 37446 - DNA, 22 bp, Artificial Sequence
  chemically synthesized
tcgagcttccatccgaaaactg

SEQ ID NO: 37447 - DNA, 22 bp, Artificial Sequence
  chemically synthesized
gagcttccatccgaaaactgcc

SEQ ID NO: 37448 - DNA, 22 bp, Artificial Sequence
  chemically synthesized
ccatccgaaaactgccacacat

SEQ ID NO: 37449 - DNA, 22 bp, Artificial Sequence
  chemically synthesized
catccgaaaactgccacacatc

SEQ ID NO: 37450 - DNA, 22 bp, Artificial Sequence
  chemically synthesized
ccacacatcttgagctctctgg

SEQ ID NO: 37451 - DNA, 22 bp, Artificial Sequence
  chemically synthesized
gagctctctgggtactacgccg

SEQ ID NO: 37452 - DNA, 22 bp, Artificial Sequence
  chemically synthesized
agctctctgggtactacgccga

SEQ ID NO: 37453 - DNA, 22 bp, Artificial Sequence
  chemically synthesized
tctgggtactacgccgaatggg

SEQ ID NO: 37454 - DNA, 22 bp, Artificial Sequence
  chemically synthesized
tgggtactacgccgaatggggg

SEQ ID NO: 37455 - DNA, 22 bp, Artificial Sequence
  chemically synthesized
ggtactacgccgaatgggggtg

SEQ ID NO: 37456 - DNA, 22 bp, Artificial Sequence
  chemically synthesized
cgccgaatgggggtgtgtgaag

SEQ ID NO: 37457 - DNA, 22 bp, Artificial Sequence
  chemically synthesized
gaaagaggttggagacagagga

SEQ ID NO: 37458 - DNA, 22 bp, Artificial Sequence
  chemically synthesized
gagacagaggagggggaaaaaa

SEQ ID NO: 37459 - DNA, 22 bp, Artificial Sequence
  chemically synthesized
ggcccaatgattttctgttctc

SEQ ID NO: 37460 - DNA, 22 bp, Artificial Sequence
  chemically synthesized
gcccaatgattttctgttctct

SEQ ID NO: 37461 - DNA, 22 bp, Artificial Sequence
  chemically synthesized
tctgttctctaactagcttttt

SEQ ID NO: 37462 - DNA, 22 bp, Artificial Sequence
  chemically synthesized
ctgttctctaactagcttttta

SEQ ID NO: 37463 - DNA, 22 bp, Artificial Sequence
  chemically synthesized
tgttctctaactagctttttaa

SEQ ID NO: 37464 - DNA, 22 bp, Artificial Sequence
  chemically synthesized
ttctctaactagctttttaaaa

SEQ ID NO: 37465 - DNA, 22 bp, Artificial Sequence
  chemically synthesized
tctaactagctttttaaaaatt

SEQ ID NO: 37466 - DNA, 22 bp, Artificial Sequence
  chemically synthesized
taactagctttttaaaaattag

SEQ ID NO: 37467 - DNA, 22 bp, Artificial Sequence
  chemically synthesized
actagctttttaaaaattagaa

SEQ ID NO: 37468 - DNA, 22 bp, Artificial Sequence
  chemically synthesized
gctttttaaaaattagaactta

SEQ ID NO: 37469 - DNA, 22 bp, Artificial Sequence
  chemically synthesized
tttaaaaattagaacttaaacc

SEQ ID NO: 37470 - DNA, 22 bp, Artificial Sequence
  chemically synthesized
ttaaaaattagaacttaaacca

SEQ ID NO: 37471 - DNA, 22 bp, Artificial Sequence
  chemically synthesized
taaaaattagaacttaaaccaa

SEQ ID NO: 37472 - DNA, 22 bp, Artificial Sequence
  chemically synthesized
aaaaattagaacttaaaccaac

SEQ ID NO: 37473 - DNA, 22 bp, Artificial Sequence
  chemically synthesized
aaaattagaacttaaaccaacc

SEQ ID NO: 37474 - DNA, 22 bp, Artificial Sequence
  chemically synthesized
gaacttaaaccaaccacaggtc

SEQ ID NO: 37475 - DNA, 22 bp, Artificial Sequence
  chemically synthesized
aaaccaaccacaggtcgagcca

SEQ ID NO: 37476 - DNA, 22 bp, Artificial Sequence
  chemically synthesized
aaccaaccacaggtcgagccac

SEQ ID NO: 37477 - DNA, 22 bp, Artificial Sequence
  chemically synthesized
gcatcttaagcatgatttcaaa

SEQ ID NO: 37478 - DNA, 22 bp, Artificial Sequence
  chemically synthesized
aagcatgatttcaaactcagcc

SEQ ID NO: 37479 - DNA, 22 bp, Artificial Sequence
  chemically synthesized
agcatgatttcaaactcagcct

SEQ ID NO: 37480 - DNA, 22 bp, Artificial Sequence
  chemically synthesized
caaactcagcctcccctcccca

SEQ ID NO: 37481 - DNA, 22 bp, Artificial Sequence
  chemically synthesized
aaactcagcctcccctccccaa

SEQ ID NO: 37482 - DNA, 22 bp, Artificial Sequence
  chemically synthesized
agcctcccctccccaagtatct

SEQ ID NO: 37483 - DNA, 22 bp, Artificial Sequence
  chemically synthesized
ccctccccaagtatctctgacc

SEQ ID NO: 37484 - DNA, 22 bp, Artificial Sequence
  chemically synthesized
cccaagtatctctgacctctga

SEQ ID NO: 37485 - DNA, 22 bp, Artificial Sequence
  chemically synthesized
tgacctctgagtcgtcttccca

SEQ ID NO: 37486 - DNA, 22 bp, Artificial Sequence
  chemically synthesized
acctctgagtcgtcttcccatg

SEQ ID NO: 37487 - DNA, 22 bp, Artificial Sequence
  chemically synthesized
tgagtcgtcttcccatgcctcc

SEQ ID NO: 37488 - DNA, 22 bp, Artificial Sequence
  chemically synthesized
agtcgtcttcccatgcctccct

SEQ ID NO: 37489 - DNA, 22 bp, Artificial Sequence
  chemically synthesized
cccatgcctccctcccttccgt

SEQ ID NO: 37490 - DNA, 22 bp, Artificial Sequence
  chemically synthesized
ccatgcctccctcccttccgtc

SEQ ID NO: 37491 - DNA, 22 bp, Artificial Sequence
  chemically synthesized
cctcccttccgtccccccaagg

SEQ ID NO: 37492 - DNA, 22 bp, Artificial Sequence
  chemically synthesized
ccttccgtccccccaaggagga

SEQ ID NO: 37493 - DNA, 22 bp, Artificial Sequence
  chemically synthesized
ccgtccccccaaggaggaccca

SEQ ID NO: 37494 - DNA, 22 bp, Artificial Sequence
  chemically synthesized
cgtccccccaaggaggacccag

SEQ ID NO: 37495 - DNA, 22 bp, Artificial Sequence
  chemically synthesized
cccaattgtatgatagtcctaa

SEQ ID NO: 37496 - DNA, 22 bp, Artificial Sequence
  chemically synthesized
tatgatagtcctaataaactcg

SEQ ID NO: 37497 - DNA, 22 bp, Artificial Sequence
  chemically synthesized
ataaactcgggacacacctgga

SEQ ID NO: 37498 - DNA, 22 bp, Artificial Sequence
  chemically synthesized
gggacacacctggaaggaaaca

SEQ ID NO: 37499 - DNA, 22 bp, Artificial Sequence
  chemically synthesized
gaaggaaacacttgcccttatg

SEQ ID NO: 37500 - DNA, 22 bp, Artificial Sequence
  chemically synthesized
gcccttatgactgagaaaactt

SEQ ID NO: 37501 - DNA, 22 bp, Artificial Sequence
  chemically synthesized
cccttatgactgagaaaactta

SEQ ID NO: 37502 - DNA, 22 bp, Artificial Sequence
  chemically synthesized
atgactgagaaaacttagtaag

SEQ ID NO: 37503 - DNA, 22 bp, Artificial Sequence
  chemically synthesized
tgactgagaaaacttagtaaga

SEQ ID NO: 37504 - DNA, 22 bp, Artificial Sequence
  chemically synthesized
agaaaacttagtaagaaacagt

SEQ ID NO: 37505 - DNA, 22 bp, Artificial Sequence
  chemically synthesized
agtaagaaacagtcctttggtt

SEQ ID NO: 37506 - DNA, 22 bp, Artificial Sequence
  chemically synthesized
gtaagaaacagtcctttggttg

SEQ ID NO: 37507 - DNA, 22 bp, Artificial Sequence
  chemically synthesized
tggttgaggagagcgggagagg

SEQ ID NO: 37508 - DNA, 22 bp, Artificial Sequence
  chemically synthesized
ggttgaggagagcgggagaggg

SEQ ID NO: 37509 - DNA, 22 bp, Artificial Sequence
  chemically synthesized
gttgaggagagcgggagaggga

SEQ ID NO: 37510 - DNA, 22 bp, Artificial Sequence
  chemically synthesized
aggagagcgggagagggaggag

SEQ ID NO: 37511 - DNA, 22 bp, Artificial Sequence
  chemically synthesized
ctcaaaataataataaaattat

SEQ ID NO: 37512 - DNA, 22 bp, Artificial Sequence
  chemically synthesized
tcaaaataataataaaattata

SEQ ID NO: 37513 - DNA, 22 bp, Artificial Sequence
  chemically synthesized
aaaataataataaaattataaa

SEQ ID NO: 37514 - DNA, 22 bp, Artificial Sequence
  chemically synthesized
taaagaaacaaaaaatcaaaac

SEQ ID NO: 37515 - DNA, 22 bp, Artificial Sequence
  chemically synthesized
atgtaaaagcagcacaacgaaa

SEQ ID NO: 37516 - DNA, 22 bp, Artificial Sequence
  chemically synthesized
aacgtcaaagcagccaatgatt

SEQ ID NO: 37517 - DNA, 22 bp, Artificial Sequence
  chemically synthesized
acaagaggcgaacaaatctctg

SEQ ID NO: 37518 - DNA, 22 bp, Artificial Sequence
  chemically synthesized
caagaggcgaacaaatctctga

SEQ ID NO: 37519 - DNA, 22 bp, Artificial Sequence
  chemically synthesized
tgaagagaaaaccagaacccaa

SEQ ID NO: 37520 - DNA, 22 bp, Artificial Sequence
  chemically synthesized
aagagaaaaccagaacccaaaa

SEQ ID NO: 37521 - DNA, 22 bp, Artificial Sequence
  chemically synthesized
ctctcaaattgcaccaaaaact

SEQ ID NO: 37522 - DNA, 22 bp, Artificial Sequence
  chemically synthesized
tcaaattgcaccaaaaactgcc

SEQ ID NO: 37523 - DNA, 22 bp, Artificial Sequence
  chemically synthesized
aaattgcaccaaaaactgcctg

SEQ ID NO: 37524 - DNA, 22 bp, Artificial Sequence
  chemically synthesized
caccaaaaactgcctgtagttt

SEQ ID NO: 37525 - DNA, 22 bp, Artificial Sequence
  chemically synthesized
cctgtagtttctttcaaacatg

SEQ ID NO: 37526 - DNA, 22 bp, Artificial Sequence
  chemically synthesized
tagtttctttcaaacatgcagt

SEQ ID NO: 37527 - DNA, 22 bp, Artificial Sequence
  chemically synthesized
ctttcaaacatgcagttttctt

SEQ ID NO: 37528 - DNA, 22 bp, Artificial Sequence
  chemically synthesized
tttcaaacatgcagttttcttt

SEQ ID NO: 37529 - DNA, 22 bp, Artificial Sequence
  chemically synthesized
tcaaacatgcagttttcttttc

SEQ ID NO: 37530 - DNA, 22 bp, Artificial Sequence
  chemically synthesized
caaacatgcagttttcttttct

SEQ ID NO: 37531 - DNA, 22 bp, Artificial Sequence
  chemically synthesized
aaacatgcagttttcttttctt

SEQ ID NO: 37532 - DNA, 22 bp, Artificial Sequence
  chemically synthesized
tcttttcttttttggaaggggg

SEQ ID NO: 37533 - DNA, 22 bp, Artificial Sequence
  chemically synthesized
cttttcttttttggaaggggga

SEQ ID NO: 37534 - DNA, 22 bp, Artificial Sequence
  chemically synthesized
ttttcttttttggaagggggaa

SEQ ID NO: 37535 - DNA, 22 bp, Artificial Sequence
  chemically synthesized
ttcttttttggaagggggaagg

SEQ ID NO: 37536 - DNA, 22 bp, Artificial Sequence
  chemically synthesized
tcttttttggaagggggaaggc

SEQ ID NO: 37537 - DNA, 22 bp, Artificial Sequence
  chemically synthesized
cttttttggaagggggaaggca

SEQ ID NO: 37538 - DNA, 22 bp, Artificial Sequence
  chemically synthesized
ttttttggaagggggaaggcaa

SEQ ID NO: 37539 - DNA, 22 bp, Artificial Sequence
  chemically synthesized
ttttggaagggggaaggcaatg

SEQ ID NO: 37540 - DNA, 22 bp, Artificial Sequence
  chemically synthesized
tttggaagggggaaggcaatgg

SEQ ID NO: 37541 - DNA, 22 bp, Artificial Sequence
  chemically synthesized
ttggaagggggaaggcaatggt

SEQ ID NO: 37542 - DNA, 22 bp, Artificial Sequence
  chemically synthesized
tggaagggggaaggcaatggtg

SEQ ID NO: 37543 - DNA, 22 bp, Artificial Sequence
  chemically synthesized
ggaagggggaaggcaatggtga

SEQ ID NO: 37544 - DNA, 22 bp, Artificial Sequence
  chemically synthesized
gaagggggaaggcaatggtgaa

SEQ ID NO: 37545 - DNA, 22 bp, Artificial Sequence
  chemically synthesized
ttttcctccggggttcctccct

SEQ ID NO: 37546 - DNA, 22 bp, Artificial Sequence
  chemically synthesized
tcctccggggttcctcccttgc

SEQ ID NO: 37547 - DNA, 22 bp, Artificial Sequence
  chemically synthesized
cctccggggttcctcccttgct

SEQ ID NO: 37548 - DNA, 22 bp, Artificial Sequence
  chemically synthesized
ctccggggttcctcccttgctg

SEQ ID NO: 37549 - DNA, 22 bp, Artificial Sequence
  chemically synthesized
cggggttcctcccttgctgtgg

SEQ ID NO: 37550 - DNA, 22 bp, Artificial Sequence
  chemically synthesized
ctcccttgctgtggacattgac

SEQ ID NO: 37551 - DNA, 22 bp, Artificial Sequence
  chemically synthesized
ccttgctgtggacattgacttg

SEQ ID NO: 37552 - DNA, 22 bp, Artificial Sequence
  chemically synthesized
gctgtggacattgacttgaagc

SEQ ID NO: 37553 - DNA, 22 bp, Artificial Sequence
  chemically synthesized
ctgtggacattgacttgaagca

SEQ ID NO: 37554 - DNA, 22 bp, Artificial Sequence
  chemically synthesized
tggacattgacttgaagcagca

SEQ ID NO: 37555 - DNA, 22 bp, Artificial Sequence
  chemically synthesized
acttgaagcagcagaactggga

SEQ ID NO: 37556 - DNA, 22 bp, Artificial Sequence
  chemically synthesized
gaagcagcagaactgggagtcc

SEQ ID NO: 37557 - DNA, 22 bp, Artificial Sequence
  chemically synthesized
aagcagcagaactgggagtccg

SEQ ID NO: 37558 - DNA, 22 bp, Artificial Sequence
  chemically synthesized
ggagtccggatgtgccgaggaa

SEQ ID NO: 37559 - DNA, 22 bp, Artificial Sequence
  chemically synthesized
ccactgtggcattccaggcctc

SEQ ID NO: 37560 - DNA, 22 bp, Artificial Sequence
  chemically synthesized
tggcattccaggcctcgttgcc

SEQ ID NO: 37561 - DNA, 22 bp, Artificial Sequence
  chemically synthesized
caggcctcgttgccatggcgac

SEQ ID NO: 37562 - DNA, 22 bp, Artificial Sequence
  chemically synthesized
gttgccatggcgacccgaagca

SEQ ID NO: 37563 - DNA, 22 bp, Artificial Sequence
  chemically synthesized
ccatggcgacccgaagcagggg

SEQ ID NO: 37564 - DNA, 22 bp, Artificial Sequence
  chemically synthesized
gggcctcctctcccctgacttg

SEQ ID NO: 37565 - DNA, 22 bp, Artificial Sequence
  chemically synthesized
ctctcccctgacttggcgccgc

SEQ ID NO: 37566 - DNA, 22 bp, Artificial Sequence
  chemically synthesized
tcccctgacttggcgccgcagg

SEQ ID NO: 37567 - DNA, 22 bp, Artificial Sequence
  chemically synthesized
ccctgacttggcgccgcaggag

SEQ ID NO: 37568 - DNA, 22 bp, Artificial Sequence
  chemically synthesized
acttggcgccgcaggaggcccg

SEQ ID NO: 37569 - DNA, 22 bp, Artificial Sequence
  chemically synthesized
ggcgccgcaggaggcccggggt

SEQ ID NO: 37570 - DNA, 22 bp, Artificial Sequence
  chemically synthesized
gcgccgcaggaggcccggggtc

SEQ ID NO: 37571 - DNA, 22 bp, Artificial Sequence
  chemically synthesized
gatctcagctgctctcacgcat

SEQ ID NO: 37572 - DNA, 22 bp, Artificial Sequence
  chemically synthesized
agctgctctcacgcatcccacc

SEQ ID NO: 37573 - DNA, 22 bp, Artificial Sequence
  chemically synthesized
ctctcacgcatcccacccctga

SEQ ID NO: 37574 - DNA, 22 bp, Artificial Sequence
  chemically synthesized
tcacgcatcccacccctgagca

SEQ ID NO: 37575 - DNA, 22 bp, Artificial Sequence
  chemically synthesized
acgcatcccacccctgagcaga

SEQ ID NO: 37576 - DNA, 22 bp, Artificial Sequence
  chemically synthesized
agcagagcagcggagacctggg

SEQ ID NO: 37577 - DNA, 22 bp, Artificial Sequence
  chemically synthesized
ggctgaggggcatgctgcgtcc

SEQ ID NO: 37578 - DNA, 22 bp, Artificial Sequence
  chemically synthesized
aggggcatgctgcgtccaggtg

SEQ ID NO: 37579 - DNA, 22 bp, Artificial Sequence
  chemically synthesized
cgtccaggtgggttctggggaa

SEQ ID NO: 37580 - DNA, 22 bp, Artificial Sequence
  chemically synthesized
tggggaatcccattcccagtcc

SEQ ID NO: 37581 - DNA, 22 bp, Artificial Sequence
  chemically synthesized
gggaatcccattcccagtccag

SEQ ID NO: 37582 - DNA, 22 bp, Artificial Sequence
  chemically synthesized
ccagtccagcgctaagtcactg

SEQ ID NO: 37583 - DNA, 22 bp, Artificial Sequence
  chemically synthesized
agtcactgtcgtcgaggcccct

SEQ ID NO: 37584 - DNA, 22 bp, Artificial Sequence
  chemically synthesized
tcgtcgaggcccctttagctga

SEQ ID NO: 37585 - DNA, 22 bp, Artificial Sequence
  chemically synthesized
tagctgataccccaatcaaacc

SEQ ID NO: 37586 - DNA, 22 bp, Artificial Sequence
  chemically synthesized
agctgataccccaatcaaaccc

SEQ ID NO: 37587 - DNA, 22 bp, Artificial Sequence
  chemically synthesized
gctgataccccaatcaaaccct

SEQ ID NO: 37588 - DNA, 22 bp, Artificial Sequence
  chemically synthesized
ataccccaatcaaaccctttcg

SEQ ID NO: 37589 - DNA, 22 bp, Artificial Sequence
  chemically synthesized
tcgtccaacctgctaccaatat

SEQ ID NO: 37590 - DNA, 22 bp, Artificial Sequence
  chemically synthesized
cgtccaacctgctaccaatatt

SEQ ID NO: 37591 - DNA, 22 bp, Artificial Sequence
  chemically synthesized
gtccaacctgctaccaatattc

SEQ ID NO: 37592 - DNA, 22 bp, Artificial Sequence
  chemically synthesized
ctaccaatattcaaattctaat

SEQ ID NO: 37593 - DNA, 22 bp, Artificial Sequence
  chemically synthesized
ccaatattcaaattctaataga

SEQ ID NO: 37594 - DNA, 22 bp, Artificial Sequence
  chemically synthesized
aaattctaatagacaaagtata

SEQ ID NO: 37595 - DNA, 22 bp, Artificial Sequence
  chemically synthesized
taatagacaaagtatatcatgg

SEQ ID NO: 37596 - DNA, 22 bp, Artificial Sequence
  chemically synthesized
atagacaaagtatatcatgggc

SEQ ID NO: 37597 - DNA, 22 bp, Artificial Sequence
  chemically synthesized
acagctatttaaaagcacagcc

SEQ ID NO: 37598 - DNA, 22 bp, Artificial Sequence
  chemically synthesized
tttaaaagcacagcccccctat

SEQ ID NO: 37599 - DNA, 22 bp, Artificial Sequence
  chemically synthesized
aaaagcacagcccccctatggg

SEQ ID NO: 37600 - DNA, 22 bp, Artificial Sequence
  chemically synthesized
aaagcacagcccccctatgggt

SEQ ID NO: 37601 - DNA, 22 bp, Artificial Sequence
  chemically synthesized
tgggtttaggggctcccgcttt

SEQ ID NO: 37602 - DNA, 22 bp, Artificial Sequence
  chemically synthesized
aggggctcccgctttagaggat

SEQ ID NO: 37603 - DNA, 22 bp, Artificial Sequence
  chemically synthesized
ggggctcccgctttagaggata

SEQ ID NO: 37604 - DNA, 22 bp, Artificial Sequence
  chemically synthesized
ccgctttagaggatacttgggg

SEQ ID NO: 37605 - DNA, 22 bp, Artificial Sequence
  chemically synthesized
tagaggatacttggggaaatgg

SEQ ID NO: 37606 - DNA, 22 bp, Artificial Sequence
  chemically synthesized
agaggatacttggggaaatggc

SEQ ID NO: 37607 - DNA, 22 bp, Artificial Sequence
  chemically synthesized
gaggatacttggggaaatggct

SEQ ID NO: 37608 - DNA, 22 bp, Artificial Sequence
  chemically synthesized
ggggaaatggcttaatttgcct

SEQ ID NO: 37609 - DNA, 22 bp, Artificial Sequence
  chemically synthesized
gggaaatggcttaatttgcctt

SEQ ID NO: 37610 - DNA, 22 bp, Artificial Sequence
  chemically synthesized
aatttgccttttctaccatccc

SEQ ID NO: 37611 - DNA, 22 bp, Artificial Sequence
  chemically synthesized
atttgccttttctaccatccct

SEQ ID NO: 37612 - DNA, 22 bp, Artificial Sequence
  chemically synthesized
gccttttctaccatccctatga

SEQ ID NO: 37613 - DNA, 22 bp, Artificial Sequence
  chemically synthesized
ccttttctaccatccctatgaa

SEQ ID NO: 37614 - DNA, 22 bp, Artificial Sequence
  chemically synthesized
ttctaccatccctatgaaagat

SEQ ID NO: 37615 - DNA, 22 bp, Artificial Sequence
  chemically synthesized
tctaccatccctatgaaagatc

SEQ ID NO: 37616 - DNA, 22 bp, Artificial Sequence
  chemically synthesized
ctaccatccctatgaaagatct

SEQ ID NO: 37617 - DNA, 22 bp, Artificial Sequence
  chemically synthesized
taccatccctatgaaagatctg

SEQ ID NO: 37618 - DNA, 22 bp, Artificial Sequence
  chemically synthesized
ccatccctatgaaagatctgat

SEQ ID NO: 37619 - DNA, 22 bp, Artificial Sequence
  chemically synthesized
tgaaagatctgatacacgtgct

SEQ ID NO: 37620 - DNA, 22 bp, Artificial Sequence
  chemically synthesized
atacacgtgctcccttgaaata

SEQ ID NO: 37621 - DNA, 22 bp, Artificial Sequence
  chemically synthesized
ccttgaaatagtttttgccact

SEQ ID NO: 37622 - DNA, 22 bp, Artificial Sequence
  chemically synthesized
gaaatagtttttgccactttac

SEQ ID NO: 37623 - DNA, 22 bp, Artificial Sequence
  chemically synthesized
aaatagtttttgccactttaca

SEQ ID NO: 37624 - DNA, 22 bp, Artificial Sequence
  chemically synthesized
ttgccactttacagaaaggaaa

SEQ ID NO: 37625 - DNA, 22 bp, Artificial Sequence
  chemically synthesized
tgccactttacagaaaggaaaa

SEQ ID NO: 37626 - DNA, 22 bp, Artificial Sequence
  chemically synthesized
gccactttacagaaaggaaaaa

SEQ ID NO: 37627 - DNA, 22 bp, Artificial Sequence
  chemically synthesized
ccactttacagaaaggaaaaac

SEQ ID NO: 37628 - DNA, 22 bp, Artificial Sequence
  chemically synthesized
tacagaaaggaaaaacgtattt

SEQ ID NO: 37629 - DNA, 22 bp, Artificial Sequence
  chemically synthesized
acagaaaggaaaaacgtatttg

SEQ ID NO: 37630 - DNA, 22 bp, Artificial Sequence
  chemically synthesized
cagaaaggaaaaacgtatttgg

SEQ ID NO: 37631 - DNA, 22 bp, Artificial Sequence
  chemically synthesized
ggatcaaccatcgagctgtgtt

SEQ ID NO: 37632 - DNA, 22 bp, Artificial Sequence
  chemically synthesized
gatcaaccatcgagctgtgttc

SEQ ID NO: 37633 - DNA, 22 bp, Artificial Sequence
  chemically synthesized
tgttcagccaagtttaggttct

SEQ ID NO: 37634 - DNA, 22 bp, Artificial Sequence
  chemically synthesized
agccaagtttaggttctcaagt

SEQ ID NO: 37635 - DNA, 22 bp, Artificial Sequence
  chemically synthesized
aggttctcaagtacaatgaccc

SEQ ID NO: 37636 - DNA, 22 bp, Artificial Sequence
  chemically synthesized
ggttctcaagtacaatgacccg

SEQ ID NO: 37637 - DNA, 22 bp, Artificial Sequence
  chemically synthesized
tcaagtacaatgacccgtgtga

SEQ ID NO: 37638 - DNA, 22 bp, Artificial Sequence
  chemically synthesized
aagtacaatgacccgtgtgaac

SEQ ID NO: 37639 - DNA, 22 bp, Artificial Sequence
  chemically synthesized
gattggtctctttcccatttgg

SEQ ID NO: 37640 - DNA, 22 bp, Artificial Sequence
  chemically synthesized
gtctctttcccatttggaaggg

SEQ ID NO: 37641 - DNA, 22 bp, Artificial Sequence
  chemically synthesized
tttcccatttggaagggaggaa

SEQ ID NO: 37642 - DNA, 22 bp, Artificial Sequence
  chemically synthesized
tcccatttggaagggaggaatt

SEQ ID NO: 37643 - DNA, 22 bp, Artificial Sequence
  chemically synthesized
cccatttggaagggaggaatta

SEQ ID NO: 37644 - DNA, 22 bp, Artificial Sequence
  chemically synthesized
ccatttggaagggaggaattaa

SEQ ID NO: 37645 - DNA, 22 bp, Artificial Sequence
  chemically synthesized
ggaagggaggaattaatggtat

SEQ ID NO: 37646 - DNA, 22 bp, Artificial Sequence
  chemically synthesized
gaagggaggaattaatggtatc

SEQ ID NO: 37647 - DNA, 22 bp, Artificial Sequence
  chemically synthesized
atggtatcccatgaccgtagat

SEQ ID NO: 37648 - DNA, 22 bp, Artificial Sequence
  chemically synthesized
ggaaatagagagagagaaagag

SEQ ID NO: 37649 - DNA, 22 bp, Artificial Sequence
  chemically synthesized
ccctaaaggctgagtcactggc

SEQ ID NO: 37650 - DNA, 22 bp, Artificial Sequence
  chemically synthesized
aaggctgagtcactggcctcgt

SEQ ID NO: 37651 - DNA, 22 bp, Artificial Sequence
  chemically synthesized
agtcactggcctcgtgctgtat

SEQ ID NO: 37652 - DNA, 22 bp, Artificial Sequence
  chemically synthesized
gcctcgtgctgtatgtagtaaa

SEQ ID NO: 37653 - DNA, 22 bp, Artificial Sequence
  chemically synthesized
gtgctgtatgtagtaaattaaa

SEQ ID NO: 37654 - DNA, 22 bp, Artificial Sequence
  chemically synthesized
tatgtagtaaattaaacagcgg

SEQ ID NO: 37655 - DNA, 22 bp, Artificial Sequence
  chemically synthesized
aacagcgggctaatgggataac

SEQ ID NO: 37656 - DNA, 22 bp, Artificial Sequence
  chemically synthesized
atgggataacgagatgccagca

SEQ ID NO: 37657 - DNA, 22 bp, Artificial Sequence
  chemically synthesized
atagctatagcagccctagagt

SEQ ID NO: 37658 - DNA, 22 bp, Artificial Sequence
  chemically synthesized
tagcagccctagagtaaataca

SEQ ID NO: 37659 - DNA, 22 bp, Artificial Sequence
  chemically synthesized
gagtaaatacacatcataccaa

SEQ ID NO: 37660 - DNA, 22 bp, Artificial Sequence
  chemically synthesized
cctctatgtgttctgatgtcca

SEQ ID NO: 37661 - DNA, 22 bp, Artificial Sequence
  chemically synthesized
tatgtgttctgatgtccatttc

SEQ ID NO: 37662 - DNA, 22 bp, Artificial Sequence
  chemically synthesized
tgtgttctgatgtccatttctc

SEQ ID NO: 37663 - DNA, 22 bp, Artificial Sequence
  chemically synthesized
tgatgtccatttctctaacaat

SEQ ID NO: 37664 - DNA, 22 bp, Artificial Sequence
  chemically synthesized
atgtccatttctctaacaatgg

SEQ ID NO: 37665 - DNA, 22 bp, Artificial Sequence
  chemically synthesized
ctctaacaatgggttcgtttat

SEQ ID NO: 37666 - DNA, 22 bp, Artificial Sequence
  chemically synthesized
tctaacaatgggttcgtttatt

SEQ ID NO: 37667 - DNA, 22 bp, Artificial Sequence
  chemically synthesized
taacaatgggttcgtttatttt

SEQ ID NO: 37668 - DNA, 22 bp, Artificial Sequence
  chemically synthesized
acaatgggttcgtttattttct

SEQ ID NO: 37669 - DNA, 22 bp, Artificial Sequence
  chemically synthesized
gtttattttctattgggaaata

SEQ ID NO: 37670 - DNA, 22 bp, Artificial Sequence
  chemically synthesized
attttctattgggaaatatgca

SEQ ID NO: 37671 - DNA, 22 bp, Artificial Sequence
  chemically synthesized
ttttctattgggaaatatgcag

SEQ ID NO: 37672 - DNA, 22 bp, Artificial Sequence
  chemically synthesized
tctattgggaaatatgcagggc

SEQ ID NO: 37673 - DNA, 22 bp, Artificial Sequence
  chemically synthesized
ctattgggaaatatgcagggct

SEQ ID NO: 37674 - DNA, 22 bp, Artificial Sequence
  chemically synthesized
tattgggaaatatgcagggctt

SEQ ID NO: 37675 - DNA, 22 bp, Artificial Sequence
  chemically synthesized
ttgggaaatatgcagggcttta

SEQ ID NO: 37676 - DNA, 22 bp, Artificial Sequence
  chemically synthesized
ggaaatatgcagggctttagga

SEQ ID NO: 37677 - DNA, 22 bp, Artificial Sequence
  chemically synthesized
taggagacaactaggaaaatct

SEQ ID NO: 37678 - DNA, 22 bp, Artificial Sequence
  chemically synthesized
aggagacaactaggaaaatctg

SEQ ID NO: 37679 - DNA, 22 bp, Artificial Sequence
  chemically synthesized
ggagacaactaggaaaatctgc

SEQ ID NO: 37680 - DNA, 22 bp, Artificial Sequence
  chemically synthesized
ggaaaatctgctagatggctca

SEQ ID NO: 37681 - DNA, 22 bp, Artificial Sequence
  chemically synthesized
ctagatggctcatgccttttaa

SEQ ID NO: 37682 - DNA, 22 bp, Artificial Sequence
  chemically synthesized
gatggctcatgccttttaaaag

SEQ ID NO: 37683 - DNA, 22 bp, Artificial Sequence
  chemically synthesized
atgccttttaaaagttagcagt

SEQ ID NO: 37684 - DNA, 22 bp, Artificial Sequence
  chemically synthesized
ttaaaagttagcagtcttttaa

SEQ ID NO: 37685 - DNA, 22 bp, Artificial Sequence
  chemically synthesized
taaaagttagcagtcttttaag

SEQ ID NO: 37686 - DNA, 22 bp, Artificial Sequence
  chemically synthesized
aaaagttagcagtcttttaaga

SEQ ID NO: 37687 - DNA, 22 bp, Artificial Sequence
  chemically synthesized
aaagttagcagtcttttaagaa

SEQ ID NO: 37688 - DNA, 22 bp, Artificial Sequence
  chemically synthesized
gcagtcttttaagaaacatttt

SEQ ID NO: 37689 - DNA, 22 bp, Artificial Sequence
  chemically synthesized
ttaagaaacatttttccaagca

SEQ ID NO: 37690 - DNA, 22 bp, Artificial Sequence
  chemically synthesized
taagaaacatttttccaagcag

SEQ ID NO: 37691 - DNA, 22 bp, Artificial Sequence
  chemically synthesized
aagaaacatttttccaagcagg

SEQ ID NO: 37692 - DNA, 22 bp, Artificial Sequence
  chemically synthesized
agaaacatttttccaagcaggt

SEQ ID NO: 37693 - DNA, 22 bp, Artificial Sequence
  chemically synthesized
ttccaagcaggttgagagaact

SEQ ID NO: 37694 - DNA, 22 bp, Artificial Sequence
  chemically synthesized
tccaagcaggttgagagaactc

SEQ ID NO: 37695 - DNA, 22 bp, Artificial Sequence
  chemically synthesized
ccaagcaggttgagagaactct

SEQ ID NO: 37696 - DNA, 22 bp, Artificial Sequence
  chemically synthesized
caagcaggttgagagaactctg

SEQ ID NO: 37697 - DNA, 22 bp, Artificial Sequence
  chemically synthesized
agagaactctgccaatcccatc

SEQ ID NO: 37698 - DNA, 22 bp, Artificial Sequence
  chemically synthesized
tgccaatcccatcctcatatcg

SEQ ID NO: 37699 - DNA, 22 bp, Artificial Sequence
  chemically synthesized
ccaatcccatcctcatatcggc

SEQ ID NO: 37700 - DNA, 22 bp, Artificial Sequence
  chemically synthesized
atatcggcaaagttcccacaat

SEQ ID NO: 37701 - DNA, 22 bp, Artificial Sequence
  chemically synthesized
ccacaattttttttttatggga

SEQ ID NO: 37702 - DNA, 22 bp, Artificial Sequence
  chemically synthesized
tttttttatgggaagttgtctg

SEQ ID NO: 37703 - DNA, 22 bp, Artificial Sequence
  chemically synthesized
ttttttatgggaagttgtctga

SEQ ID NO: 37704 - DNA, 22 bp, Artificial Sequence
  chemically synthesized
tttttatgggaagttgtctgaa

SEQ ID NO: 37705 - DNA, 22 bp, Artificial Sequence
  chemically synthesized
ttttatgggaagttgtctgaaa

SEQ ID NO: 37706 - DNA, 22 bp, Artificial Sequence
  chemically synthesized
tttatgggaagttgtctgaaaa

SEQ ID NO: 37707 - DNA, 22 bp, Artificial Sequence
  chemically synthesized
ttatgggaagttgtctgaaaaa

SEQ ID NO: 37708 - DNA, 22 bp, Artificial Sequence
  chemically synthesized
tatgggaagttgtctgaaaaaa

SEQ ID NO: 37709 - DNA, 22 bp, Artificial Sequence
  chemically synthesized
atgggaagttgtctgaaaaaaa

SEQ ID NO: 37710 - DNA, 22 bp, Artificial Sequence
  chemically synthesized
tgggaagttgtctgaaaaaaag

SEQ ID NO: 37711 - DNA, 22 bp, Artificial Sequence
  chemically synthesized
tctgaaaaaaagagaatgggat

SEQ ID NO: 37712 - DNA, 22 bp, Artificial Sequence
  chemically synthesized
aaaaaaagagaatgggatgggt

SEQ ID NO: 37713 - DNA, 22 bp, Artificial Sequence
  chemically synthesized
ctgaacacaccaggcccaggga

SEQ ID NO: 37714 - DNA, 22 bp, Artificial Sequence
  chemically synthesized
aacacaccaggcccagggacaa

SEQ ID NO: 37715 - DNA, 22 bp, Artificial Sequence
  chemically synthesized
caacacagtcataagaagtcat

SEQ ID NO: 37716 - DNA, 22 bp, Artificial Sequence
  chemically synthesized
atgtgtgtacggagggggaaaa

SEQ ID NO: 37717 - DNA, 22 bp, Artificial Sequence
  chemically synthesized
aaaacaagaaaacactgtattt

SEQ ID NO: 37718 - DNA, 22 bp, Artificial Sequence
  chemically synthesized
aaacaagaaaacactgtatttc

SEQ ID NO: 37719 - DNA, 22 bp, Artificial Sequence
  chemically synthesized
tatttcctccctcagtctctgt

SEQ ID NO: 37720 - DNA, 22 bp, Artificial Sequence
  chemically synthesized
cctccctcagtctctgtgagca

SEQ ID NO: 37721 - DNA, 22 bp, Artificial Sequence
  chemically synthesized
ctccctcagtctctgtgagcaa

SEQ ID NO: 37722 - DNA, 22 bp, Artificial Sequence
  chemically synthesized
cctcagtctctgtgagcaaagt

SEQ ID NO: 37723 - DNA, 22 bp, Artificial Sequence
  chemically synthesized
agtctctgtgagcaaagtacta

SEQ ID NO: 37724 - DNA, 22 bp, Artificial Sequence
  chemically synthesized
tgtgagcaaagtactacaagca

SEQ ID NO: 37725 - DNA, 22 bp, Artificial Sequence
  chemically synthesized
tgagcaaagtactacaagcagg

SEQ ID NO: 37726 - DNA, 22 bp, Artificial Sequence
  chemically synthesized
caagcaggagaggatggggcct

SEQ ID NO: 37727 - DNA, 22 bp, Artificial Sequence
  chemically synthesized
aggcttctcaactccttttcag

SEQ ID NO: 37728 - DNA, 22 bp, Artificial Sequence
  chemically synthesized
ctcaactccttttcaggaaggc

SEQ ID NO: 37729 - DNA, 22 bp, Artificial Sequence
  chemically synthesized
tcaactccttttcaggaaggcc

SEQ ID NO: 37730 - DNA, 22 bp, Artificial Sequence
  chemically synthesized
aactccttttcaggaaggcccg

SEQ ID NO: 37731 - DNA, 22 bp, Artificial Sequence
  chemically synthesized
cttttcaggaaggcccgaaata

SEQ ID NO: 37732 - DNA, 22 bp, Artificial Sequence
  chemically synthesized
ttcaggaaggcccgaaataatc

SEQ ID NO: 37733 - DNA, 22 bp, Artificial Sequence
  chemically synthesized
tcaggaaggcccgaaataatcc

SEQ ID NO: 37734 - DNA, 22 bp, Artificial Sequence
  chemically synthesized
caggaaggcccgaaataatccc

SEQ ID NO: 37735 - DNA, 22 bp, Artificial Sequence
  chemically synthesized
aggaaggcccgaaataatccca

SEQ ID NO: 37736 - DNA, 22 bp, Artificial Sequence
  chemically synthesized
tcagcaaactgtgtctgtgaat

SEQ ID NO: 37737 - DNA, 22 bp, Artificial Sequence
  chemically synthesized
cagcaaactgtgtctgtgaata

SEQ ID NO: 37738 - DNA, 22 bp, Artificial Sequence
  chemically synthesized
agcaaactgtgtctgtgaataa

SEQ ID NO: 37739 - DNA, 22 bp, Artificial Sequence
  chemically synthesized
tgtctgtgaataaaccacctca

SEQ ID NO: 37740 - DNA, 22 bp, Artificial Sequence
  chemically synthesized
tgaataaaccacctcatttcct

SEQ ID NO: 37741 - DNA, 22 bp, Artificial Sequence
  chemically synthesized
atttccttatttctccaattgg

SEQ ID NO: 37742 - DNA, 22 bp, Artificial Sequence
  chemically synthesized
ccttatttctccaattggaatt

SEQ ID NO: 37743 - DNA, 22 bp, Artificial Sequence
  chemically synthesized
cttatttctccaattggaatta

SEQ ID NO: 37744 - DNA, 22 bp, Artificial Sequence
  chemically synthesized
atttctccaattggaattatac

SEQ ID NO: 37745 - DNA, 22 bp, Artificial Sequence
  chemically synthesized
tttctccaattggaattatacc

SEQ ID NO: 37746 - DNA, 22 bp, Artificial Sequence
  chemically synthesized
ctccaattggaattatacctaa

SEQ ID NO: 37747 - DNA, 22 bp, Artificial Sequence
  chemically synthesized
tccaattggaattatacctaag

SEQ ID NO: 37748 - DNA, 22 bp, Artificial Sequence
  chemically synthesized
caattggaattatacctaagcc

SEQ ID NO: 37749 - DNA, 22 bp, Artificial Sequence
  chemically synthesized
gaattatacctaagccatctcc

SEQ ID NO: 37750 - DNA, 22 bp, Artificial Sequence
  chemically synthesized
tacctaagccatctcccgccac

SEQ ID NO: 37751 - DNA, 22 bp, Artificial Sequence
  chemically synthesized
agccatctcccgccacttcctt

SEQ ID NO: 37752 - DNA, 22 bp, Artificial Sequence
  chemically synthesized
ccgccacttcctttcaagttct

SEQ ID NO: 37753 - DNA, 22 bp, Artificial Sequence
  chemically synthesized
cctttcaagttctcacttctag

SEQ ID NO: 37754 - DNA, 22 bp, Artificial Sequence
  chemically synthesized
ctttcaagttctcacttctagc

SEQ ID NO: 37755 - DNA, 22 bp, Artificial Sequence
  chemically synthesized
tcaagttctcacttctagcatt

SEQ ID NO: 37756 - DNA, 22 bp, Artificial Sequence
  chemically synthesized
caagttctcacttctagcatta

SEQ ID NO: 37757 - DNA, 22 bp, Artificial Sequence
  chemically synthesized
aagttctcacttctagcattat

SEQ ID NO: 37758 - DNA, 22 bp, Artificial Sequence
  chemically synthesized
tcacttctagcattatgattat

SEQ ID NO: 37759 - DNA, 22 bp, Artificial Sequence
  chemically synthesized
acttctagcattatgattatat

SEQ ID NO: 37760 - DNA, 22 bp, Artificial Sequence
  chemically synthesized
ctagcattatgattatatacaa

SEQ ID NO: 37761 - DNA, 22 bp, Artificial Sequence
  chemically synthesized
tagcattatgattatatacaat

SEQ ID NO: 37762 - DNA, 22 bp, Artificial Sequence
  chemically synthesized
gcattatgattatatacaatat

SEQ ID NO: 37763 - DNA, 22 bp, Artificial Sequence
  chemically synthesized
tgattatatacaatatgtactt

SEQ ID NO: 37764 - DNA, 22 bp, Artificial Sequence
  chemically synthesized
tatacaatatgtacttattgca

SEQ ID NO: 37765 - DNA, 22 bp, Artificial Sequence
  chemically synthesized
attgcatatacaaaaatggtat

SEQ ID NO: 37766 - DNA, 22 bp, Artificial Sequence
  chemically synthesized
ttgcatatacaaaaatggtatt

SEQ ID NO: 37767 - DNA, 22 bp, Artificial Sequence
  chemically synthesized
catatacaaaaatggtatttaa

SEQ ID NO: 37768 - DNA, 22 bp, Artificial Sequence
  chemically synthesized
aaataaacagttctatatctac

SEQ ID NO: 37769 - DNA, 22 bp, Artificial Sequence
  chemically synthesized
aataaacagttctatatctaca

SEQ ID NO: 37770 - DNA, 22 bp, Artificial Sequence
  chemically synthesized
tatatctacagaatgccctggg

SEQ ID NO: 37771 - DNA, 22 bp, Artificial Sequence
  chemically synthesized
tatctacagaatgccctgggaa

SEQ ID NO: 37772 - DNA, 22 bp, Artificial Sequence
  chemically synthesized
cagaatgccctgggaaaaactc

SEQ ID NO: 37773 - DNA, 22 bp, Artificial Sequence
  chemically synthesized
ggaaaaactcaactacttcaca

SEQ ID NO: 37774 - DNA, 22 bp, Artificial Sequence
  chemically synthesized
aactacttcacactttctgcca

SEQ ID NO: 37775 - DNA, 22 bp, Artificial Sequence
  chemically synthesized
cttcacactttctgccatggcc

SEQ ID NO: 37776 - DNA, 22 bp, Artificial Sequence
  chemically synthesized
cacactttctgccatggccagt

SEQ ID NO: 37777 - DNA, 22 bp, Artificial Sequence
  chemically synthesized
acactttctgccatggccagtg

SEQ ID NO: 37778 - DNA, 22 bp, Artificial Sequence
  chemically synthesized
tctgccatggccagtgcaaatg

SEQ ID NO: 37779 - DNA, 22 bp, Artificial Sequence
  chemically synthesized
ctgccatggccagtgcaaatga

SEQ ID NO: 37780 - DNA, 22 bp, Artificial Sequence
  chemically synthesized
tgccatggccagtgcaaatgaa

SEQ ID NO: 37781 - DNA, 22 bp, Artificial Sequence
  chemically synthesized
ccatggccagtgcaaatgaaga

SEQ ID NO: 37782 - DNA, 22 bp, Artificial Sequence
  chemically synthesized
tgttcacctcacttcttagcaa

SEQ ID NO: 37783 - DNA, 22 bp, Artificial Sequence
  chemically synthesized
acctcacttcttagcaaccttt

SEQ ID NO: 37784 - DNA, 22 bp, Artificial Sequence
  chemically synthesized
acttcttagcaacctttgtaat

SEQ ID NO: 37785 - DNA, 22 bp, Artificial Sequence
  chemically synthesized
cttagcaacctttgtaatgtgt

SEQ ID NO: 37786 - DNA, 22 bp, Artificial Sequence
  chemically synthesized
ttagcaacctttgtaatgtgtt

SEQ ID NO: 37787 - DNA, 22 bp, Artificial Sequence
  chemically synthesized
agcaacctttgtaatgtgttgg

SEQ ID NO: 37788 - DNA, 22 bp, Artificial Sequence
  chemically synthesized
gcaacctttgtaatgtgttggt

SEQ ID NO: 37789 - DNA, 22 bp, Artificial Sequence
  chemically synthesized
tgtaatgtgttggttccagcct

SEQ ID NO: 37790 - DNA, 22 bp, Artificial Sequence
  chemically synthesized
gtaatgtgttggttccagcctt

SEQ ID NO: 37791 - DNA, 22 bp, Artificial Sequence
  chemically synthesized
taatgtgttggttccagccttt

SEQ ID NO: 37792 - DNA, 22 bp, Artificial Sequence
  chemically synthesized
gttccagcctttttgtaggtcc

SEQ ID NO: 37793 - DNA, 22 bp, Artificial Sequence
  chemically synthesized
cagcctttttgtaggtcctaaa

SEQ ID NO: 37794 - DNA, 22 bp, Artificial Sequence
  chemically synthesized
tttgtaggtcctaaacaaagag

SEQ ID NO: 37795 - DNA, 22 bp, Artificial Sequence
  chemically synthesized
ttgtaggtcctaaacaaagaga

SEQ ID NO: 37796 - DNA, 22 bp, Artificial Sequence
  chemically synthesized
tgtaggtcctaaacaaagagag

SEQ ID NO: 37797 - DNA, 22 bp, Artificial Sequence
  chemically synthesized
gtaggtcctaaacaaagagagg

SEQ ID NO: 37798 - DNA, 22 bp, Artificial Sequence
  chemically synthesized
taggtcctaaacaaagagagga

SEQ ID NO: 37799 - DNA, 22 bp, Artificial Sequence
  chemically synthesized
aacaaagagaggatagcaaatg

SEQ ID NO: 37800 - DNA, 22 bp, Artificial Sequence
  chemically synthesized
aggaaggaggtaatataggcac

SEQ ID NO: 37801 - DNA, 22 bp, Artificial Sequence
  chemically synthesized
gaagagtttctggtttaaaatc

SEQ ID NO: 37802 - DNA, 22 bp, Artificial Sequence
  chemically synthesized
ctggtttaaaatctgtgagaaa

SEQ ID NO: 37803 - DNA, 22 bp, Artificial Sequence
  chemically synthesized
tggtttaaaatctgtgagaaat

SEQ ID NO: 37804 - DNA, 22 bp, Artificial Sequence
  chemically synthesized
gtttaaaatctgtgagaaatag

SEQ ID NO: 37805 - DNA, 22 bp, Artificial Sequence
  chemically synthesized
aaaatctgtgagaaatagaatt

SEQ ID NO: 37806 - DNA, 22 bp, Artificial Sequence
  chemically synthesized
aaatctgtgagaaatagaattt

SEQ ID NO: 37807 - DNA, 22 bp, Artificial Sequence
  chemically synthesized
tgagaaatagaatttgcggtat

SEQ ID NO: 37808 - DNA, 22 bp, Artificial Sequence
  chemically synthesized
gcggtattcctgtttattaagt

SEQ ID NO: 37809 - DNA, 22 bp, Artificial Sequence
  chemically synthesized
cggtattcctgtttattaagtt

SEQ ID NO: 37810 - DNA, 22 bp, Artificial Sequence
  chemically synthesized
ctgtttattaagttgttctcaa

SEQ ID NO: 37811 - DNA, 22 bp, Artificial Sequence
  chemically synthesized
tttattaagttgttctcaaatg

SEQ ID NO: 37812 - DNA, 22 bp, Artificial Sequence
  chemically synthesized
attaagttgttctcaaatgaag

SEQ ID NO: 37813 - DNA, 22 bp, Artificial Sequence
  chemically synthesized
ttaagttgttctcaaatgaaga

SEQ ID NO: 37814 - DNA, 22 bp, Artificial Sequence
  chemically synthesized
agttgttctcaaatgaagatta

SEQ ID NO: 37815 - DNA, 22 bp, Artificial Sequence
  chemically synthesized
ttctcaaatgaagattaaaaag

SEQ ID NO: 37816 - DNA, 22 bp, Artificial Sequence
  chemically synthesized
tcaaatgaagattaaaaagaac

SEQ ID NO: 37817 - DNA, 22 bp, Artificial Sequence
  chemically synthesized
aaatgaagattaaaaagaacat

SEQ ID NO: 37818 - DNA, 22 bp, Artificial Sequence
  chemically synthesized
aaaagaacattttaagcatcag

SEQ ID NO: 37819 - DNA, 22 bp, Artificial Sequence
  chemically synthesized
taagcatcagttcaggtatgta

SEQ ID NO: 37820 - DNA, 22 bp, Artificial Sequence
  chemically synthesized
aagcatcagttcaggtatgtag

SEQ ID NO: 37821 - DNA, 22 bp, Artificial Sequence
  chemically synthesized
agcatcagttcaggtatgtaga

SEQ ID NO: 37822 - DNA, 22 bp, Artificial Sequence
  chemically synthesized
aggtatgtagagaacattccat

SEQ ID NO: 37823 - DNA, 22 bp, Artificial Sequence
  chemically synthesized
catcagcacgtcaagcctgtta

SEQ ID NO: 37824 - DNA, 22 bp, Artificial Sequence
  chemically synthesized
ttacaaaaacttacttgaggat

SEQ ID NO: 37825 - DNA, 22 bp, Artificial Sequence
  chemically synthesized
caaaaacttacttgaggatttt

SEQ ID NO: 37826 - DNA, 22 bp, Artificial Sequence
  chemically synthesized
acttgaggattttaagagacat

SEQ ID NO: 37827 - DNA, 22 bp, Artificial Sequence
  chemically synthesized
cttgaggattttaagagacatt

SEQ ID NO: 37828 - DNA, 22 bp, Artificial Sequence
  chemically synthesized
gaggattttaagagacattaat

SEQ ID NO: 37829 - DNA, 22 bp, Artificial Sequence
  chemically synthesized
aggattttaagagacattaatg

SEQ ID NO: 37830 - DNA, 22 bp, Artificial Sequence
  chemically synthesized
taagagacattaatgttcttag

SEQ ID NO: 37831 - DNA, 22 bp, Artificial Sequence
  chemically synthesized
aagagacattaatgttcttagt

SEQ ID NO: 37832 - DNA, 22 bp, Artificial Sequence
  chemically synthesized
agagacattaatgttcttagta

SEQ ID NO: 37833 - DNA, 22 bp, Artificial Sequence
  chemically synthesized
atgttcttagtagttcctcatt

SEQ ID NO: 37834 - DNA, 22 bp, Artificial Sequence
  chemically synthesized
ttagtagttcctcatttaaaaa

SEQ ID NO: 37835 - DNA, 22 bp, Artificial Sequence
  chemically synthesized
agtagttcctcatttaaaaaaa

SEQ ID NO: 37836 - DNA, 22 bp, Artificial Sequence
  chemically synthesized
gtagttcctcatttaaaaaaaa

SEQ ID NO: 37837 - DNA, 22 bp, Artificial Sequence
  chemically synthesized
ctcatttaaaaaaaaaagatca

SEQ ID NO: 37838 - DNA, 22 bp, Artificial Sequence
  chemically synthesized
atttaaaaaaaaaagatcatga

SEQ ID NO: 37839 - DNA, 22 bp, Artificial Sequence
  chemically synthesized
aaaaaaaaaagatcatgaattc

SEQ ID NO: 37840 - DNA, 22 bp, Artificial Sequence
  chemically synthesized
aaaaaaaaagatcatgaattca

SEQ ID NO: 37841 - DNA, 22 bp, Artificial Sequence
  chemically synthesized
atcttactattggaaatgtgca

SEQ ID NO: 37842 - DNA, 22 bp, Artificial Sequence
  chemically synthesized
actattggaaatgtgcatgtta

SEQ ID NO: 37843 - DNA, 22 bp, Artificial Sequence
  chemically synthesized
ctattggaaatgtgcatgttat

SEQ ID NO: 37844 - DNA, 22 bp, Artificial Sequence
  chemically synthesized
ttggaaatgtgcatgttatttt

SEQ ID NO: 37845 - DNA, 22 bp, Artificial Sequence
  chemically synthesized
gaaatgtgcatgttattttata

SEQ ID NO: 37846 - DNA, 22 bp, Artificial Sequence
  chemically synthesized
ttttatattaagattttaaatt

SEQ ID NO: 37847 - DNA, 22 bp, Artificial Sequence
  chemically synthesized
tatattaagattttaaatttta

SEQ ID NO: 37848 - DNA, 22 bp, Artificial Sequence
  chemically synthesized
atattaagattttaaattttag

SEQ ID NO: 37849 - DNA, 22 bp, Artificial Sequence
  chemically synthesized
tattaagattttaaattttaga

SEQ ID NO: 37850 - DNA, 22 bp, Artificial Sequence
  chemically synthesized
agattttaaattttagagttct

SEQ ID NO: 37851 - DNA, 22 bp, Artificial Sequence
  chemically synthesized
taaattttagagttctggatac

SEQ ID NO: 37852 - DNA, 22 bp, Artificial Sequence
  chemically synthesized
aaattttagagttctggataca

SEQ ID NO: 37853 - DNA, 22 bp, Artificial Sequence
  chemically synthesized
aattttagagttctggatacaa

SEQ ID NO: 37854 - DNA, 22 bp, Artificial Sequence
  chemically synthesized
tagagttctggatacaaaatat

SEQ ID NO: 37855 - DNA, 22 bp, Artificial Sequence
  chemically synthesized
agagttctggatacaaaatatc

SEQ ID NO: 37856 - DNA, 22 bp, Artificial Sequence
  chemically synthesized
gagttctggatacaaaatatca

SEQ ID NO: 37857 - DNA, 22 bp, Artificial Sequence
  chemically synthesized
tggatacaaaatatcatttata

SEQ ID NO: 37858 - DNA, 22 bp, Artificial Sequence
  chemically synthesized
gatacaaaatatcatttataag

SEQ ID NO: 37859 - DNA, 22 bp, Artificial Sequence
  chemically synthesized
ataagtgatatcatgttggcta

SEQ ID NO: 37860 - DNA, 22 bp, Artificial Sequence
  chemically synthesized
taagtgatatcatgttggctag

SEQ ID NO: 37861 - DNA, 22 bp, Artificial Sequence
  chemically synthesized
gctaggttctcatgtttctatt

SEQ ID NO: 37862 - DNA, 22 bp, Artificial Sequence
  chemically synthesized
ggttctcatgtttctattgttc

SEQ ID NO: 37863 - DNA, 22 bp, Artificial Sequence
  chemically synthesized
tcatgtttctattgttcatcag

SEQ ID NO: 37864 - DNA, 22 bp, Artificial Sequence
  chemically synthesized
atgtttctattgttcatcagct

SEQ ID NO: 37865 - DNA, 22 bp, Artificial Sequence
  chemically synthesized
ctattgttcatcagcttcagaa

SEQ ID NO: 37866 - DNA, 22 bp, Artificial Sequence
  chemically synthesized
tattgttcatcagcttcagaaa

SEQ ID NO: 37867 - DNA, 22 bp, Artificial Sequence
  chemically synthesized
ttgttcatcagcttcagaaata

SEQ ID NO: 37868 - DNA, 22 bp, Artificial Sequence
  chemically synthesized
ttcatcagcttcagaaataata

SEQ ID NO: 37869 - DNA, 22 bp, Artificial Sequence
  chemically synthesized
atcagcttcagaaataatattt

SEQ ID NO: 37870 - DNA, 22 bp, Artificial Sequence
  chemically synthesized
cagaaataatattttatcagaa

SEQ ID NO: 37871 - DNA, 22 bp, Artificial Sequence
  chemically synthesized
agaaataatattttatcagaag

SEQ ID NO: 37872 - DNA, 22 bp, Artificial Sequence
  chemically synthesized
tatcagaaggcgtcaataagtc

SEQ ID NO: 37873 - DNA, 22 bp, Artificial Sequence
  chemically synthesized
atcagaaggcgtcaataagtca

SEQ ID NO: 37874 - DNA, 22 bp, Artificial Sequence
  chemically synthesized
tcagaaggcgtcaataagtcag

SEQ ID NO: 37875 - DNA, 22 bp, Artificial Sequence
  chemically synthesized
agtaacctgaagaacccatctc

SEQ ID NO: 37876 - DNA, 22 bp, Artificial Sequence
  chemically synthesized
aagaacccatctcccagtaaat

SEQ ID NO: 37877 - DNA, 22 bp, Artificial Sequence
  chemically synthesized
ccagtaaatttatttaactttg

SEQ ID NO: 37878 - DNA, 22 bp, Artificial Sequence
  chemically synthesized
atttaactttgggaccatgtaa

SEQ ID NO: 37879 - DNA, 22 bp, Artificial Sequence
  chemically synthesized
tttaactttgggaccatgtaaa

SEQ ID NO: 37880 - DNA, 22 bp, Artificial Sequence
  chemically synthesized
aactttgggaccatgtaaatca

SEQ ID NO: 37881 - DNA, 22 bp, Artificial Sequence
  chemically synthesized
actttgggaccatgtaaatcaa

SEQ ID NO: 37882 - DNA, 22 bp, Artificial Sequence
  chemically synthesized
tgggaccatgtaaatcaaacat

SEQ ID NO: 37883 - DNA, 22 bp, Artificial Sequence
  chemically synthesized
gggaccatgtaaatcaaacata

SEQ ID NO: 37884 - DNA, 22 bp, Artificial Sequence
  chemically synthesized
ggaccatgtaaatcaaacataa

SEQ ID NO: 37885 - DNA, 22 bp, Artificial Sequence
  chemically synthesized
tgatttatcaccagatgtttgc

SEQ ID NO: 37886 - DNA, 22 bp, Artificial Sequence
  chemically synthesized
atcaccagatgtttgcactcct

SEQ ID NO: 37887 - DNA, 22 bp, Artificial Sequence
  chemically synthesized
tcaccagatgtttgcactcctc

SEQ ID NO: 37888 - DNA, 22 bp, Artificial Sequence
  chemically synthesized
gcactcctccccattccccatt

SEQ ID NO: 37889 - DNA, 22 bp, Artificial Sequence
  chemically synthesized
cactcctccccattccccattt

SEQ ID NO: 37890 - DNA, 22 bp, Artificial Sequence
  chemically synthesized
ctccccattccccatttgattt

SEQ ID NO: 37891 - DNA, 22 bp, Artificial Sequence
  chemically synthesized
cccattccccatttgatttaag

SEQ ID NO: 37892 - DNA, 22 bp, Artificial Sequence
  chemically synthesized
cccatttgatttaagaaatttg

SEQ ID NO: 37893 - DNA, 22 bp, Artificial Sequence
  chemically synthesized
gatttaagaaatttgaacagac

SEQ ID NO: 37894 - DNA, 22 bp, Artificial Sequence
  chemically synthesized
atttaagaaatttgaacagaca

SEQ ID NO: 37895 - DNA, 22 bp, Artificial Sequence
  chemically synthesized
aagaaatttgaacagacaagtg

SEQ ID NO: 37896 - DNA, 22 bp, Artificial Sequence
  chemically synthesized
agaaatttgaacagacaagtgt

SEQ ID NO: 37897 - DNA, 22 bp, Artificial Sequence
  chemically synthesized
gaacagacaagtgtacagtatc

SEQ ID NO: 37898 - DNA, 22 bp, Artificial Sequence
  chemically synthesized
aacagacaagtgtacagtatcc

SEQ ID NO: 37899 - DNA, 22 bp, Artificial Sequence
  chemically synthesized
attctgtctgtcaggatgcaaa

SEQ ID NO: 37900 - DNA, 22 bp, Artificial Sequence
  chemically synthesized
tgtctgtcaggatgcaaaacct

SEQ ID NO: 37901 - DNA, 22 bp, Artificial Sequence
  chemically synthesized
tctgtcaggatgcaaaacctaa

SEQ ID NO: 37902 - DNA, 22 bp, Artificial Sequence
  chemically synthesized
tcaggatgcaaaacctaattac

SEQ ID NO: 37903 - DNA, 22 bp, Artificial Sequence
  chemically synthesized
attacgctaagagcagcatata

SEQ ID NO: 37904 - DNA, 22 bp, Artificial Sequence
  chemically synthesized
cgctaagagcagcatatactga

SEQ ID NO: 37905 - DNA, 22 bp, Artificial Sequence
  chemically synthesized
agagcagcatatactgagaaat

SEQ ID NO: 37906 - DNA, 22 bp, Artificial Sequence
  chemically synthesized
agaaattaaaatgaatactgta

SEQ ID NO: 37907 - DNA, 22 bp, Artificial Sequence
  chemically synthesized
aaatgaatactgtatataaaac

SEQ ID NO: 37908 - DNA, 22 bp, Artificial Sequence
  chemically synthesized
tatataaaacctacacagttgc

SEQ ID NO: 37909 - DNA, 22 bp, Artificial Sequence
  chemically synthesized
cacagttgcactcatagctcct

SEQ ID NO: 37910 - DNA, 22 bp, Artificial Sequence
  chemically synthesized
cactcatagctcctaataaaag

SEQ ID NO: 37911 - DNA, 22 bp, Artificial Sequence
  chemically synthesized
atagctcctaataaaagagtaa

SEQ ID NO: 37912 - DNA, 22 bp, Artificial Sequence
  chemically synthesized
ctaataaaagagtaatagggac

SEQ ID NO: 37913 - DNA, 22 bp, Artificial Sequence
  chemically synthesized
ataaaagagtaatagggacaca

SEQ ID NO: 37914 - DNA, 22 bp, Artificial Sequence
  chemically synthesized
tatggacatttaatagggtgga

SEQ ID NO: 37915 - DNA, 22 bp, Artificial Sequence
  chemically synthesized
atggacatttaatagggtggag

SEQ ID NO: 37916 - DNA, 22 bp, Artificial Sequence
  chemically synthesized
tggacatttaatagggtggagt

SEQ ID NO: 37917 - DNA, 22 bp, Artificial Sequence
  chemically synthesized
aatagggtggagtcgaagtcac

SEQ ID NO: 37918 - DNA, 22 bp, Artificial Sequence
  chemically synthesized
atagggtggagtcgaagtcacc

SEQ ID NO: 37919 - DNA, 22 bp, Artificial Sequence
  chemically synthesized
aagctggcatggcactggggaa

SEQ ID NO: 37920 - DNA, 22 bp, Artificial Sequence
  chemically synthesized
gcatggcactggggaattattt

SEQ ID NO: 37921 - DNA, 22 bp, Artificial Sequence
  chemically synthesized
gggaattatttctatctgtctt

SEQ ID NO: 37922 - DNA, 22 bp, Artificial Sequence
  chemically synthesized
tttctatctgtcttgagcagca

SEQ ID NO: 37923 - DNA, 22 bp, Artificial Sequence
  chemically synthesized
ctatctgtcttgagcagcattt

SEQ ID NO: 37924 - DNA, 22 bp, Artificial Sequence
  chemically synthesized
tatctgtcttgagcagcatttt

SEQ ID NO: 37925 - DNA, 22 bp, Artificial Sequence
  chemically synthesized
tctgtcttgagcagcattttgg

SEQ ID NO: 37926 - DNA, 22 bp, Artificial Sequence
  chemically synthesized
tcttgagcagcattttggattc

SEQ ID NO: 37927 - DNA, 22 bp, Artificial Sequence
  chemically synthesized
gagcagcattttggattcagtt

SEQ ID NO: 37928 - DNA, 22 bp, Artificial Sequence
  chemically synthesized
agcagcattttggattcagttt

SEQ ID NO: 37929 - DNA, 22 bp, Artificial Sequence
  chemically synthesized
tggattcagttttggagaaacc

SEQ ID NO: 37930 - DNA, 22 bp, Artificial Sequence
  chemically synthesized
ggattcagttttggagaaacct

SEQ ID NO: 37931 - DNA, 22 bp, Artificial Sequence
  chemically synthesized
gattcagttttggagaaaccta

SEQ ID NO: 37932 - DNA, 22 bp, Artificial Sequence
  chemically synthesized
agttttggagaaacctaatcca

SEQ ID NO: 37933 - DNA, 22 bp, Artificial Sequence
  chemically synthesized
tggagaaacctaatccaaaaca

SEQ ID NO: 37934 - DNA, 22 bp, Artificial Sequence
  chemically synthesized
ggagaaacctaatccaaaacac

SEQ ID NO: 37935 - DNA, 22 bp, Artificial Sequence
  chemically synthesized
gagaaacctaatccaaaacaca

SEQ ID NO: 37936 - DNA, 22 bp, Artificial Sequence
  chemically synthesized
atccaaaacacatacagtatat

SEQ ID NO: 37937 - DNA, 22 bp, Artificial Sequence
  chemically synthesized
ttctaagttcagtgacaaacat

SEQ ID NO: 37938 - DNA, 22 bp, Artificial Sequence
  chemically synthesized
tctaagttcagtgacaaacatc

SEQ ID NO: 37939 - DNA, 22 bp, Artificial Sequence
  chemically synthesized
ctaagttcagtgacaaacatca

SEQ ID NO: 37940 - DNA, 22 bp, Artificial Sequence
  chemically synthesized
taagttcagtgacaaacatcaa

SEQ ID NO: 37941 - DNA, 22 bp, Artificial Sequence
  chemically synthesized
agttcagtgacaaacatcaagt

SEQ ID NO: 37942 - DNA, 22 bp, Artificial Sequence
  chemically synthesized
agtgacaaacatcaagttctca

SEQ ID NO: 37943 - DNA, 22 bp, Artificial Sequence
  chemically synthesized
tcaaggtaccgcacgcccaccc

SEQ ID NO: 37944 - DNA, 22 bp, Artificial Sequence
  chemically synthesized
aaggtaccgcacgcccacccca

SEQ ID NO: 37945 - DNA, 22 bp, Artificial Sequence
  chemically synthesized
ctatgtaatattctccaacatc

SEQ ID NO: 37946 - DNA, 22 bp, Artificial Sequence
  chemically synthesized
tgtaatattctccaacatcctt

SEQ ID NO: 37947 - DNA, 22 bp, Artificial Sequence
  chemically synthesized
tccaacatcctttctcagtgga

SEQ ID NO: 37948 - DNA, 22 bp, Artificial Sequence
  chemically synthesized
caacatcctttctcagtggatt

SEQ ID NO: 37949 - DNA, 22 bp, Artificial Sequence
  chemically synthesized
tctcagtggattcctctagccc

SEQ ID NO: 37950 - DNA, 22 bp, Artificial Sequence
  chemically synthesized
ctcagtggattcctctagcccc

SEQ ID NO: 37951 - DNA, 22 bp, Artificial Sequence
  chemically synthesized
tcagtggattcctctagcccca

SEQ ID NO: 37952 - DNA, 22 bp, Artificial Sequence
  chemically synthesized
agtggattcctctagccccact

SEQ ID NO: 37953 - DNA, 22 bp, Artificial Sequence
  chemically synthesized
ctctagccccactctctccttc

SEQ ID NO: 37954 - DNA, 22 bp, Artificial Sequence
  chemically synthesized
tagccccactctctccttccca

SEQ ID NO: 37955 - DNA, 22 bp, Artificial Sequence
  chemically synthesized
gccccactctctccttcccacc

SEQ ID NO: 37956 - DNA, 22 bp, Artificial Sequence
  chemically synthesized
tctccttcccacccaaactggc

SEQ ID NO: 37957 - DNA, 22 bp, Artificial Sequence
  chemically synthesized
tccttcccacccaaactggctt

SEQ ID NO: 37958 - DNA, 22 bp, Artificial Sequence
  chemically synthesized
cttcccacccaaactggctttt

SEQ ID NO: 37959 - DNA, 22 bp, Artificial Sequence
  chemically synthesized
cccacccaaactggcttttcag

SEQ ID NO: 37960 - DNA, 22 bp, Artificial Sequence
  chemically synthesized
ccacccaaactggcttttcaga

SEQ ID NO: 37961 - DNA, 22 bp, Artificial Sequence
  chemically synthesized
gcttttcagaaaacattgactt

SEQ ID NO: 37962 - DNA, 22 bp, Artificial Sequence
  chemically synthesized
ttcagaaaacattgactttctt

SEQ ID NO: 37963 - DNA, 22 bp, Artificial Sequence
  chemically synthesized
tcagaaaacattgactttcttt

SEQ ID NO: 37964 - DNA, 22 bp, Artificial Sequence
  chemically synthesized
cagaaaacattgactttcttta

SEQ ID NO: 37965 - DNA, 22 bp, Artificial Sequence
  chemically synthesized
agaaaacattgactttctttat

SEQ ID NO: 37966 - DNA, 22 bp, Artificial Sequence
  chemically synthesized
actttctttatactttagaaag

SEQ ID NO: 37967 - DNA, 22 bp, Artificial Sequence
  chemically synthesized
tctttatactttagaaagataa

SEQ ID NO: 37968 - DNA, 22 bp, Artificial Sequence
  chemically synthesized
ctttatactttagaaagataaa

SEQ ID NO: 37969 - DNA, 22 bp, Artificial Sequence
  chemically synthesized
tttatactttagaaagataaaa

SEQ ID NO: 37970 - DNA, 22 bp, Artificial Sequence
  chemically synthesized
tatactttagaaagataaaact

SEQ ID NO: 37971 - DNA, 22 bp, Artificial Sequence
  chemically synthesized
atactttagaaagataaaacta

SEQ ID NO: 37972 - DNA, 22 bp, Artificial Sequence
  chemically synthesized
tactttagaaagataaaactat

SEQ ID NO: 37973 - DNA, 22 bp, Artificial Sequence
  chemically synthesized
tagaaagataaaactattcttg

SEQ ID NO: 37974 - DNA, 22 bp, Artificial Sequence
  chemically synthesized
agaaagataaaactattcttgc

SEQ ID NO: 37975 - DNA, 22 bp, Artificial Sequence
  chemically synthesized
gaaagataaaactattcttgcc

SEQ ID NO: 37976 - DNA, 22 bp, Artificial Sequence
  chemically synthesized
ttcttgcctcagataaaaggca

SEQ ID NO: 37977 - DNA, 22 bp, Artificial Sequence
  chemically synthesized
ttgcctcagataaaaggcatga

SEQ ID NO: 37978 - DNA, 22 bp, Artificial Sequence
  chemically synthesized
gcctcagataaaaggcatgaca

SEQ ID NO: 37979 - DNA, 22 bp, Artificial Sequence
  chemically synthesized
cctcagataaaaggcatgacat

SEQ ID NO: 37980 - DNA, 22 bp, Artificial Sequence
  chemically synthesized
agataaaaggcatgacatgaaa

SEQ ID NO: 37981 - DNA, 22 bp, Artificial Sequence
  chemically synthesized
acaggcactagggcataagaac

SEQ ID NO: 37982 - DNA, 22 bp, Artificial Sequence
  chemically synthesized
gggcataagaactgagcgacaa

SEQ ID NO: 37983 - DNA, 22 bp, Artificial Sequence
  chemically synthesized
agcgacaaaaaatgctaccaca

SEQ ID NO: 37984 - DNA, 22 bp, Artificial Sequence
  chemically synthesized
ccacaagaagacaacagaacgg

SEQ ID NO: 37985 - DNA, 22 bp, Artificial Sequence
  chemically synthesized
ttgttttggttttttacaaaaa

SEQ ID NO: 37986 - DNA, 22 bp, Artificial Sequence
  chemically synthesized
tgttttggttttttacaaaaat

SEQ ID NO: 37987 - DNA, 22 bp, Artificial Sequence
  chemically synthesized
gttttggttttttacaaaaata

SEQ ID NO: 37988 - DNA, 22 bp, Artificial Sequence
  chemically synthesized
ttttggttttttacaaaaataa

SEQ ID NO: 37989 - DNA, 22 bp, Artificial Sequence
  chemically synthesized
tggttttttacaaaaataagaa

SEQ ID NO: 37990 - DNA, 22 bp, Artificial Sequence
  chemically synthesized
ggttttttacaaaaataagaac

SEQ ID NO: 37991 - DNA, 22 bp, Artificial Sequence
  chemically synthesized
gttttttacaaaaataagaaca

SEQ ID NO: 37992 - DNA, 22 bp, Artificial Sequence
  chemically synthesized
tttacaaaaataagaacaatgt

SEQ ID NO: 37993 - DNA, 22 bp, Artificial Sequence
  chemically synthesized
ttacaaaaataagaacaatgtc

SEQ ID NO: 37994 - DNA, 22 bp, Artificial Sequence
  chemically synthesized
tacaaaaataagaacaatgtcg

SEQ ID NO: 37995 - DNA, 22 bp, Artificial Sequence
  chemically synthesized
acaaaaataagaacaatgtcgt

SEQ ID NO: 37996 - DNA, 22 bp, Artificial Sequence
  chemically synthesized
caaaaataagaacaatgtcgta

SEQ ID NO: 37997 - DNA, 22 bp, Artificial Sequence
  chemically synthesized
attcatctacactgggaacagg

SEQ ID NO: 37998 - DNA, 22 bp, Artificial Sequence
  chemically synthesized
atctacactgggaacagggaca

SEQ ID NO: 37999 - DNA, 22 bp, Artificial Sequence
  chemically synthesized
cactgggaacagggacacgata

SEQ ID NO: 38000 - DNA, 22 bp, Artificial Sequence
  chemically synthesized
ggaacagggacacgatatcaca

SEQ ID NO: 38001 - DNA, 22 bp, Artificial Sequence
  chemically synthesized
agtaaagcaaatagatgctgca

SEQ ID NO: 38002 - DNA, 22 bp, Artificial Sequence
  chemically synthesized
gtaaagcaaatagatgctgcaa

SEQ ID NO: 38003 - DNA, 22 bp, Artificial Sequence
  chemically synthesized
caacatgcagtatttgtaaaag

SEQ ID NO: 38004 - DNA, 22 bp, Artificial Sequence
  chemically synthesized
gtaaaagtgacaacacagattt

SEQ ID NO: 38005 - DNA, 22 bp, Artificial Sequence
  chemically synthesized
taaaagtgacaacacagatttc

SEQ ID NO: 38006 - DNA, 22 bp, Artificial Sequence
  chemically synthesized
ctaaggatttttaaaatagacc

SEQ ID NO: 38007 - DNA, 22 bp, Artificial Sequence
  chemically synthesized
taaggatttttaaaatagacct

SEQ ID NO: 38008 - DNA, 22 bp, Artificial Sequence
  chemically synthesized
aggatttttaaaatagacctaa

SEQ ID NO: 38009 - DNA, 22 bp, Artificial Sequence
  chemically synthesized
ttaaaatagacctaactggctg

SEQ ID NO: 38010 - DNA, 22 bp, Artificial Sequence
  chemically synthesized
taaaatagacctaactggctgg

SEQ ID NO: 38011 - DNA, 22 bp, Artificial Sequence
  chemically synthesized
aaaatagacctaactggctggt

SEQ ID NO: 38012 - DNA, 22 bp, Artificial Sequence
  chemically synthesized
aaatagacctaactggctggtc

SEQ ID NO: 38013 - DNA, 22 bp, Artificial Sequence
  chemically synthesized
actggctggtcagaagataatt

SEQ ID NO: 38014 - DNA, 22 bp, Artificial Sequence
  chemically synthesized
gctggtcagaagataattgaag

SEQ ID NO: 38015 - DNA, 22 bp, Artificial Sequence
  chemically synthesized
gtcagaagataattgaagggta

SEQ ID NO: 38016 - DNA, 22 bp, Artificial Sequence
  chemically synthesized
aagggtattcccgcccttattt

SEQ ID NO: 38017 - DNA, 22 bp, Artificial Sequence
  chemically synthesized
ccgcccttatttgctgtcatcc

SEQ ID NO: 38018 - DNA, 22 bp, Artificial Sequence
  chemically synthesized
atttgctgtcatccaggaagac

SEQ ID NO: 38019 - DNA, 22 bp, Artificial Sequence
  chemically synthesized
tttgctgtcatccaggaagacc

SEQ ID NO: 38020 - DNA, 22 bp, Artificial Sequence
  chemically synthesized
gctgtcatccaggaagacccta

SEQ ID NO: 38021 - DNA, 22 bp, Artificial Sequence
  chemically synthesized
ctgtcatccaggaagaccctat

SEQ ID NO: 38022 - DNA, 22 bp, Artificial Sequence
  chemically synthesized
tcatccaggaagaccctatcaa

SEQ ID NO: 38023 - DNA, 22 bp, Artificial Sequence
  chemically synthesized
tcaaaacacctaaagtaatctg

SEQ ID NO: 38024 - DNA, 22 bp, Artificial Sequence
  chemically synthesized
aagtaatctgtagcatctaggg

SEQ ID NO: 38025 - DNA, 22 bp, Artificial Sequence
  chemically synthesized
tagcatctagggttcctgggat

SEQ ID NO: 38026 - DNA, 22 bp, Artificial Sequence
  chemically synthesized
gggttcctgggatctcagaacc

SEQ ID NO: 38027 - DNA, 22 bp, Artificial Sequence
  chemically synthesized
ctgggatctcagaaccacaagg

SEQ ID NO: 38028 - DNA, 22 bp, Artificial Sequence
  chemically synthesized
ggatctcagaaccacaaggcaa

SEQ ID NO: 38029 - DNA, 22 bp, Artificial Sequence
  chemically synthesized
agaaccacaaggcaaaccacta

SEQ ID NO: 38030 - DNA, 22 bp, Artificial Sequence
  chemically synthesized
tgcatctcaggaaatcagtggc

SEQ ID NO: 38031 - DNA, 22 bp, Artificial Sequence
  chemically synthesized
aggaaatcagtggctgattcca

SEQ ID NO: 38032 - DNA, 22 bp, Artificial Sequence
  chemically synthesized
attccaaagatttcactatgtc

SEQ ID NO: 38033 - DNA, 22 bp, Artificial Sequence
  chemically synthesized
caaagatttcactatgtctggc

SEQ ID NO: 38034 - DNA, 22 bp, Artificial Sequence
  chemically synthesized
cactatgtctggctacacccct

SEQ ID NO: 38035 - DNA, 22 bp, Artificial Sequence
  chemically synthesized
actatgtctggctacaccccta

SEQ ID NO: 38036 - DNA, 22 bp, Artificial Sequence
  chemically synthesized
tgtctggctacacccctagtgg

SEQ ID NO: 38037 - DNA, 22 bp, Artificial Sequence
  chemically synthesized
gctacacccctagtggctgctt

SEQ ID NO: 38038 - DNA, 22 bp, Artificial Sequence
  chemically synthesized
cacccctagtggctgctttctt

SEQ ID NO: 38039 - DNA, 22 bp, Artificial Sequence
  chemically synthesized
gtggctgctttcttttctttcg

SEQ ID NO: 38040 - DNA, 22 bp, Artificial Sequence
  chemically synthesized
ctttcttttctttcgtctctct

SEQ ID NO: 38041 - DNA, 22 bp, Artificial Sequence
  chemically synthesized
tcttttctttcgtctctctctt

SEQ ID NO: 38042 - DNA, 22 bp, Artificial Sequence
  chemically synthesized
cttttctttcgtctctctcttt

SEQ ID NO: 38043 - DNA, 22 bp, Artificial Sequence
  chemically synthesized
ttttctttcgtctctctctttt

SEQ ID NO: 38044 - DNA, 22 bp, Artificial Sequence
  chemically synthesized
ttctttcgtctctctctttttt

SEQ ID NO: 38045 - DNA, 22 bp, Artificial Sequence
  chemically synthesized
tctttcgtctctctcttttttt

SEQ ID NO: 38046 - DNA, 22 bp, Artificial Sequence
  chemically synthesized
ctttcgtctctctctttttttc

SEQ ID NO: 38047 - DNA, 22 bp, Artificial Sequence
  chemically synthesized
tttcgtctctctctttttttct

SEQ ID NO: 38048 - DNA, 22 bp, Artificial Sequence
  chemically synthesized
tcgtctctctctttttttctcc

SEQ ID NO: 38049 - DNA, 22 bp, Artificial Sequence
  chemically synthesized
cgtctctctctttttttctccc

SEQ ID NO: 38050 - DNA, 22 bp, Artificial Sequence
  chemically synthesized
gtctctctctttttttctccct

SEQ ID NO: 38051 - DNA, 22 bp, Artificial Sequence
  chemically synthesized
tctctttttttctccctctttt

SEQ ID NO: 38052 - DNA, 22 bp, Artificial Sequence
  chemically synthesized
tctttttttctccctctttttt

SEQ ID NO: 38053 - DNA, 22 bp, Artificial Sequence
  chemically synthesized
tttttttctccctcttttttaa

SEQ ID NO: 38054 - DNA, 22 bp, Artificial Sequence
  chemically synthesized
tttttctccctcttttttaaac

SEQ ID NO: 38055 - DNA, 22 bp, Artificial Sequence
  chemically synthesized
ttttctccctcttttttaaaca

SEQ ID NO: 38056 - DNA, 22 bp, Artificial Sequence
  chemically synthesized
tttctccctcttttttaaacaa

SEQ ID NO: 38057 - DNA, 22 bp, Artificial Sequence
  chemically synthesized
ttctccctcttttttaaacaaa

SEQ ID NO: 38058 - DNA, 22 bp, Artificial Sequence
  chemically synthesized
tctccctcttttttaaacaaaa

SEQ ID NO: 38059 - DNA, 22 bp, Artificial Sequence
  chemically synthesized
ctccctcttttttaaacaaaac

SEQ ID NO: 38060 - DNA, 22 bp, Artificial Sequence
  chemically synthesized
tccctcttttttaaacaaaaca

SEQ ID NO: 38061 - DNA, 22 bp, Artificial Sequence
  chemically synthesized
cctcttttttaaacaaaacaaa

SEQ ID NO: 38062 - DNA, 22 bp, Artificial Sequence
  chemically synthesized
ttttttaaacaaaacaaaacaa

SEQ ID NO: 38063 - DNA, 22 bp, Artificial Sequence
  chemically synthesized
ttttaaacaaaacaaaacaaaa

SEQ ID NO: 38064 - DNA, 22 bp, Artificial Sequence
  chemically synthesized
tttaaacaaaacaaaacaaaac

SEQ ID NO: 38065 - DNA, 22 bp, Artificial Sequence
  chemically synthesized
ttaaacaaaacaaaacaaaaca

SEQ ID NO: 38066 - DNA, 22 bp, Artificial Sequence
  chemically synthesized
taaacaaaacaaaacaaaacaa

SEQ ID NO: 38067 - DNA, 22 bp, Artificial Sequence
  chemically synthesized
aaacaaaacaaaacaaaacaaa

SEQ ID NO: 38068 - DNA, 22 bp, Artificial Sequence
  chemically synthesized
aacaaaacaaaacaaaacaaaa

SEQ ID NO: 38069 - DNA, 22 bp, Artificial Sequence
  chemically synthesized
atgcctttgtttccagattttt

SEQ ID NO: 38070 - DNA, 22 bp, Artificial Sequence
  chemically synthesized
tgtttccagatttttagatttc

SEQ ID NO: 38071 - DNA, 22 bp, Artificial Sequence
  chemically synthesized
gtttccagatttttagatttca

SEQ ID NO: 38072 - DNA, 22 bp, Artificial Sequence
  chemically synthesized
tttccagatttttagatttcaa

SEQ ID NO: 38073 - DNA, 22 bp, Artificial Sequence
  chemically synthesized
ccagatttttagatttcaaaag

SEQ ID NO: 38074 - DNA, 22 bp, Artificial Sequence
  chemically synthesized
cagatttttagatttcaaaagt

SEQ ID NO: 38075 - DNA, 22 bp, Artificial Sequence
  chemically synthesized
ttagatttcaaaagtggggtta

SEQ ID NO: 38076 - DNA, 22 bp, Artificial Sequence
  chemically synthesized
tagatttcaaaagtggggttat

SEQ ID NO: 38077 - DNA, 22 bp, Artificial Sequence
  chemically synthesized
agatttcaaaagtggggttatt

SEQ ID NO: 38078 - DNA, 22 bp, Artificial Sequence
  chemically synthesized
gatttcaaaagtggggttattt

SEQ ID NO: 38079 - DNA, 22 bp, Artificial Sequence
  chemically synthesized
caaaagtggggttattttgtta

SEQ ID NO: 38080 - DNA, 22 bp, Artificial Sequence
  chemically synthesized
aaaagtggggttattttgttat

SEQ ID NO: 38081 - DNA, 22 bp, Artificial Sequence
  chemically synthesized
ttttgttatgagaaaagactct

SEQ ID NO: 38082 - DNA, 22 bp, Artificial Sequence
  chemically synthesized
tgttatgagaaaagactcttac

SEQ ID NO: 38083 - DNA, 22 bp, Artificial Sequence
  chemically synthesized
gttatgagaaaagactcttaca

SEQ ID NO: 38084 - DNA, 22 bp, Artificial Sequence
  chemically synthesized
ttatgagaaaagactcttacat

SEQ ID NO: 38085 - DNA, 22 bp, Artificial Sequence
  chemically synthesized
tgagaaaagactcttacatgga

SEQ ID NO: 38086 - DNA, 22 bp, Artificial Sequence
  chemically synthesized
ttacatggaaaccaaagagctg

SEQ ID NO: 38087 - DNA, 22 bp, Artificial Sequence
  chemically synthesized
acatggaaaccaaagagctgat

SEQ ID NO: 38088 - DNA, 22 bp, Artificial Sequence
  chemically synthesized
catggaaaccaaagagctgatt

SEQ ID NO: 38089 - DNA, 22 bp, Artificial Sequence
  chemically synthesized
attttttttaaaaaaatctttt

SEQ ID NO: 38090 - DNA, 22 bp, Artificial Sequence
  chemically synthesized
tttttaaaaaaatcttttttac

SEQ ID NO: 38091 - DNA, 22 bp, Artificial Sequence
  chemically synthesized
ttttaaaaaaatcttttttaca

SEQ ID NO: 38092 - DNA, 22 bp, Artificial Sequence
  chemically synthesized
tttaaaaaaatcttttttacat

SEQ ID NO: 38093 - DNA, 22 bp, Artificial Sequence
  chemically synthesized
ttaaaaaaatcttttttacatt

SEQ ID NO: 38094 - DNA, 22 bp, Artificial Sequence
  chemically synthesized
taaaaaaatcttttttacatta

SEQ ID NO: 38095 - DNA, 22 bp, Artificial Sequence
  chemically synthesized
aaaaaaatcttttttacattat

SEQ ID NO: 38096 - DNA, 22 bp, Artificial Sequence
  chemically synthesized
aaaaaatcttttttacattatg

SEQ ID NO: 38097 - DNA, 22 bp, Artificial Sequence
  chemically synthesized
ttttacattatgttctaagata

SEQ ID NO: 38098 - DNA, 22 bp, Artificial Sequence
  chemically synthesized
tttacattatgttctaagataa

SEQ ID NO: 38099 - DNA, 22 bp, Artificial Sequence
  chemically synthesized
ttacattatgttctaagataaa

SEQ ID NO: 38100 - DNA, 22 bp, Artificial Sequence
  chemically synthesized
tacattatgttctaagataaag

SEQ ID NO: 38101 - DNA, 22 bp, Artificial Sequence
  chemically synthesized
acattatgttctaagataaagc

SEQ ID NO: 38102 - DNA, 22 bp, Artificial Sequence
  chemically synthesized
cattatgttctaagataaagca

SEQ ID NO: 38103 - DNA, 22 bp, Artificial Sequence
  chemically synthesized
tgttctaagataaagcaaggat

SEQ ID NO: 38104 - DNA, 22 bp, Artificial Sequence
  chemically synthesized
taagataaagcaaggatgggag

SEQ ID NO: 38105 - DNA, 22 bp, Artificial Sequence
  chemically synthesized
agataaagcaaggatgggagaa

SEQ ID NO: 38106 - DNA, 22 bp, Artificial Sequence
  chemically synthesized
ttagacaacaagaacagcaaaa

SEQ ID NO: 38107 - DNA, 22 bp, Artificial Sequence
  chemically synthesized
tagacaacaagaacagcaaaaa

SEQ ID NO: 38108 - DNA, 22 bp, Artificial Sequence
  chemically synthesized
agacaacaagaacagcaaaaaa

SEQ ID NO: 38109 - DNA, 22 bp, Artificial Sequence
  chemically synthesized
gacaacaagaacagcaaaaaat

SEQ ID NO: 38110 - DNA, 22 bp, Artificial Sequence
  chemically synthesized
aaaggaaataaaagtttaagat

SEQ ID NO: 38111 - DNA, 22 bp, Artificial Sequence
  chemically synthesized
aaggaaataaaagtttaagatg

SEQ ID NO: 38112 - DNA, 22 bp, Artificial Sequence
  chemically synthesized
aagatgctattaccagcaagtt

SEQ ID NO: 38113 - DNA, 22 bp, Artificial Sequence
  chemically synthesized
agatgctattaccagcaagttt

SEQ ID NO: 38114 - DNA, 22 bp, Artificial Sequence
  chemically synthesized
ttaccagcaagttttttcactt

SEQ ID NO: 38115 - DNA, 22 bp, Artificial Sequence
  chemically synthesized
ccagcaagttttttcacttatg

SEQ ID NO: 38116 - DNA, 22 bp, Artificial Sequence
  chemically synthesized
tttcacttatgtttgaatggat

SEQ ID NO: 38117 - DNA, 22 bp, Artificial Sequence
  chemically synthesized
ttcacttatgtttgaatggatt

SEQ ID NO: 38118 - DNA, 22 bp, Artificial Sequence
  chemically synthesized
tcacttatgtttgaatggattt

SEQ ID NO: 38119 - DNA, 22 bp, Artificial Sequence
  chemically synthesized
cacttatgtttgaatggatttc

SEQ ID NO: 38120 - DNA, 22 bp, Artificial Sequence
  chemically synthesized
acttatgtttgaatggatttct

SEQ ID NO: 38121 - DNA, 22 bp, Artificial Sequence
  chemically synthesized
atgtttgaatggatttctgcta

SEQ ID NO: 38122 - DNA, 22 bp, Artificial Sequence
  chemically synthesized
tgtttgaatggatttctgctaa

SEQ ID NO: 38123 - DNA, 22 bp, Artificial Sequence
  chemically synthesized
gaatggatttctgctaagagat

SEQ ID NO: 38124 - DNA, 22 bp, Artificial Sequence
  chemically synthesized
aatggatttctgctaagagatg

SEQ ID NO: 38125 - DNA, 22 bp, Artificial Sequence
  chemically synthesized
ctgctaagagatggagtaagtt

SEQ ID NO: 38126 - DNA, 22 bp, Artificial Sequence
  chemically synthesized
tgctaagagatggagtaagttt

SEQ ID NO: 38127 - DNA, 22 bp, Artificial Sequence
  chemically synthesized
ctaagagatggagtaagttttt

SEQ ID NO: 38128 - DNA, 22 bp, Artificial Sequence
  chemically synthesized
agagatggagtaagtttttaac

SEQ ID NO: 38129 - DNA, 22 bp, Artificial Sequence
  chemically synthesized
ttaacatcagactgaaaacacc

SEQ ID NO: 38130 - DNA, 22 bp, Artificial Sequence
  chemically synthesized
taacatcagactgaaaacacct

SEQ ID NO: 38131 - DNA, 22 bp, Artificial Sequence
  chemically synthesized
aacatcagactgaaaacacctt

SEQ ID NO: 38132 - DNA, 22 bp, Artificial Sequence
  chemically synthesized
acatcagactgaaaacaccttc

SEQ ID NO: 38133 - DNA, 22 bp, Artificial Sequence
  chemically synthesized
aaaacaccttccatttcttgaa

SEQ ID NO: 38134 - DNA, 22 bp, Artificial Sequence
  chemically synthesized
ccatttcttgaaaactattcta

SEQ ID NO: 38135 - DNA, 22 bp, Artificial Sequence
  chemically synthesized
catttcttgaaaactattctaa

SEQ ID NO: 38136 - DNA, 22 bp, Artificial Sequence
  chemically synthesized
cttgaaaactattctaaactgg

SEQ ID NO: 38137 - DNA, 22 bp, Artificial Sequence
  chemically synthesized
ttgaaaactattctaaactgga

SEQ ID NO: 38138 - DNA, 22 bp, Artificial Sequence
  chemically synthesized
gaaaactattctaaactggaaa

SEQ ID NO: 38139 - DNA, 22 bp, Artificial Sequence
  chemically synthesized
aaaactattctaaactggaaag

SEQ ID NO: 38140 - DNA, 22 bp, Artificial Sequence
  chemically synthesized
ttctaaactggaaagccttaaa

SEQ ID NO: 38141 - DNA, 22 bp, Artificial Sequence
  chemically synthesized
taaactggaaagccttaaaact

SEQ ID NO: 38142 - DNA, 22 bp, Artificial Sequence
  chemically synthesized
aactggaaagccttaaaactat

SEQ ID NO: 38143 - DNA, 22 bp, Artificial Sequence
  chemically synthesized
gaaagccttaaaactatgtcca

SEQ ID NO: 38144 - DNA, 22 bp, Artificial Sequence
  chemically synthesized
aaaactatgtccagggtttgag

SEQ ID NO: 38145 - DNA, 22 bp, Artificial Sequence
  chemically synthesized
aaactatgtccagggtttgaga

SEQ ID NO: 38146 - DNA, 22 bp, Artificial Sequence
  chemically synthesized
tgtccagggtttgagatatgtc

SEQ ID NO: 38147 - DNA, 22 bp, Artificial Sequence
  chemically synthesized
gagatatgtctattttaatata

SEQ ID NO: 38148 - DNA, 22 bp, Artificial Sequence
  chemically synthesized
agatatgtctattttaatatag

SEQ ID NO: 38149 - DNA, 22 bp, Artificial Sequence
  chemically synthesized
ttttaatatagtaagtacttta

SEQ ID NO: 38150 - DNA, 22 bp, Artificial Sequence
  chemically synthesized
taatatagtaagtactttatgt

SEQ ID NO: 38151 - DNA, 22 bp, Artificial Sequence
  chemically synthesized
aatatagtaagtactttatgtt

SEQ ID NO: 38152 - DNA, 22 bp, Artificial Sequence
  chemically synthesized
atatagtaagtactttatgttc

SEQ ID NO: 38153 - DNA, 22 bp, Artificial Sequence
  chemically synthesized
tatgttcctttagggtataata

SEQ ID NO: 38154 - DNA, 22 bp, Artificial Sequence
  chemically synthesized
atgttcctttagggtataatac

SEQ ID NO: 38155 - DNA, 22 bp, Artificial Sequence
  chemically synthesized
tgttcctttagggtataataca

SEQ ID NO: 38156 - DNA, 22 bp, Artificial Sequence
  chemically synthesized
ctttagggtataatacacgcat

SEQ ID NO: 38157 - DNA, 22 bp, Artificial Sequence
  chemically synthesized
tagggtataatacacgcatcag

SEQ ID NO: 38158 - DNA, 22 bp, Artificial Sequence
  chemically synthesized
agggtataatacacgcatcaga

SEQ ID NO: 38159 - DNA, 22 bp, Artificial Sequence
  chemically synthesized
gggtataatacacgcatcagaa

SEQ ID NO: 38160 - DNA, 22 bp, Artificial Sequence
  chemically synthesized
aaaaagactgactggccttctc

SEQ ID NO: 38161 - DNA, 22 bp, Artificial Sequence
  chemically synthesized
actggccttctcttaaaacctg

SEQ ID NO: 38162 - DNA, 22 bp, Artificial Sequence
  chemically synthesized
gccttctcttaaaacctgttat

SEQ ID NO: 38163 - DNA, 22 bp, Artificial Sequence
  chemically synthesized
ctcttaaaacctgttattttct

SEQ ID NO: 38164 - DNA, 22 bp, Artificial Sequence
  chemically synthesized
tcttaaaacctgttattttctt

SEQ ID NO: 38165 - DNA, 22 bp, Artificial Sequence
  chemically synthesized
ttaaaacctgttattttcttgc

SEQ ID NO: 38166 - DNA, 22 bp, Artificial Sequence
  chemically synthesized
aaaacctgttattttcttgcaa

SEQ ID NO: 38167 - DNA, 22 bp, Artificial Sequence
  chemically synthesized
aaacctgttattttcttgcaag

SEQ ID NO: 38168 - DNA, 22 bp, Artificial Sequence
  chemically synthesized
ttattttcttgcaagtaattta

SEQ ID NO: 38169 - DNA, 22 bp, Artificial Sequence
  chemically synthesized
ttttcttgcaagtaatttacag

SEQ ID NO: 38170 - DNA, 22 bp, Artificial Sequence
  chemically synthesized
tcttgcaagtaatttacagagt

SEQ ID NO: 38171 - DNA, 22 bp, Artificial Sequence
  chemically synthesized
cttgcaagtaatttacagagtg

SEQ ID NO: 38172 - DNA, 22 bp, Artificial Sequence
  chemically synthesized
ttgcaagtaatttacagagtgt

SEQ ID NO: 38173 - DNA, 22 bp, Artificial Sequence
  chemically synthesized
gcaagtaatttacagagtgtgt

SEQ ID NO: 38174 - DNA, 22 bp, Artificial Sequence
  chemically synthesized
caagtaatttacagagtgtgtc

SEQ ID NO: 38175 - DNA, 22 bp, Artificial Sequence
  chemically synthesized
acagagtgtgtcaaatgaggac

SEQ ID NO: 38176 - DNA, 22 bp, Artificial Sequence
  chemically synthesized
cagagtgtgtcaaatgaggaca

SEQ ID NO: 38177 - DNA, 22 bp, Artificial Sequence
  chemically synthesized
acaatgtgtactttaatttttt

SEQ ID NO: 38178 - DNA, 22 bp, Artificial Sequence
  chemically synthesized
caatgtgtactttaattttttt

SEQ ID NO: 38179 - DNA, 22 bp, Artificial Sequence
  chemically synthesized
taattttttttattttttcaat

SEQ ID NO: 38180 - DNA, 22 bp, Artificial Sequence
  chemically synthesized
aattttttttattttttcaata

SEQ ID NO: 38181 - DNA, 22 bp, Artificial Sequence
  chemically synthesized
attttttttattttttcaataa

SEQ ID NO: 38182 - DNA, 22 bp, Artificial Sequence
  chemically synthesized
tttttattttttcaataaaggg

SEQ ID NO: 38183 - DNA, 22 bp, Artificial Sequence
  chemically synthesized
ttttattttttcaataaaggga

SEQ ID NO: 38184 - DNA, 22 bp, Artificial Sequence
  chemically synthesized
tttattttttcaataaagggac

SEQ ID NO: 38185 - DNA, 22 bp, Artificial Sequence
  chemically synthesized
ttattttttcaataaagggaca

SEQ ID NO: 38186 - DNA, 22 bp, Artificial Sequence
  chemically synthesized
tattttttcaataaagggacaa

SEQ ID NO: 38187 - DNA, 22 bp, Artificial Sequence
  chemically synthesized
attttttcaataaagggacaaa

SEQ ID NO: 38188 - DNA, 22 bp, Artificial Sequence
  chemically synthesized
ttttttcaataaagggacaaaa

SEQ ID NO: 38189 - DNA, 22 bp, Artificial Sequence
  chemically synthesized
tttcaataaagggacaaaatgg

SEQ ID NO: 38190 - DNA, 22 bp, Artificial Sequence
  chemically synthesized
ttcaataaagggacaaaatggg

SEQ ID NO: 38191 - DNA, 22 bp, Artificial Sequence
  chemically synthesized
tcaataaagggacaaaatgggt

SEQ ID NO: 38192 - DNA, 22 bp, Artificial Sequence
  chemically synthesized
caataaagggacaaaatgggtg

SEQ ID NO: 38193 - DNA, 22 bp, Artificial Sequence
  chemically synthesized
aataaagggacaaaatgggtgt

SEQ ID NO: 38194 - DNA, 22 bp, Artificial Sequence
  chemically synthesized
atgcagacaactgccaaaaaaa

SEQ ID NO: 38195 - DNA, 22 bp, Artificial Sequence
  chemically synthesized
ccaaaaaaacacagacagtggt

SEQ ID NO: 38196 - DNA, 22 bp, Artificial Sequence
  chemically synthesized
ttccaatagaacttaacaaaga

SEQ ID NO: 38197 - DNA, 22 bp, Artificial Sequence
  chemically synthesized
tccaatagaacttaacaaagac

SEQ ID NO: 38198 - DNA, 22 bp, Artificial Sequence
  chemically synthesized
ccaatagaacttaacaaagacc

SEQ ID NO: 38199 - DNA, 22 bp, Artificial Sequence
  chemically synthesized
caatagaacttaacaaagacca

SEQ ID NO: 38200 - DNA, 22 bp, Artificial Sequence
  chemically synthesized
aacaaagaccagaaacaaatac

SEQ ID NO: 38201 - DNA, 22 bp, Artificial Sequence
  chemically synthesized
acaaagaccagaaacaaataca

SEQ ID NO: 38202 - DNA, 22 bp, Artificial Sequence
  chemically synthesized
taatgacctttggtcatctaaa

SEQ ID NO: 38203 - DNA, 22 bp, Artificial Sequence
  chemically synthesized
tggtcatctaaataaaaaaaaa

SEQ ID NO: 38204 - DNA, 22 bp, Artificial Sequence
  chemically synthesized
ggtcatctaaataaaaaaaaaa

SEQ ID NO: 38205 - DNA, 22 bp, Artificial Sequence
  chemically synthesized
gtcatctaaataaaaaaaaaaa

SEQ ID NO: 38206 - DNA, 22 bp, Artificial Sequence
  chemically synthesized
aataaaaaaaaaaataaaaaca

SEQ ID NO: 38207 - DNA, 22 bp, Artificial Sequence
  chemically synthesized
agtgcctctgttttgaacaggg

SEQ ID NO: 38208 - DNA, 22 bp, Artificial Sequence
  chemically synthesized
tgttttgaacagggcacataag

SEQ ID NO: 38209 - DNA, 22 bp, Artificial Sequence
  chemically synthesized
ttttgaacagggcacataagca

SEQ ID NO: 38210 - DNA, 22 bp, Artificial Sequence
  chemically synthesized
tgaacagggcacataagcaata

SEQ ID NO: 38211 - DNA, 22 bp, Artificial Sequence
  chemically synthesized
gaacagggcacataagcaataa

SEQ ID NO: 38212 - DNA, 22 bp, Artificial Sequence
  chemically synthesized
aacagggcacataagcaataat

SEQ ID NO: 38213 - DNA, 22 bp, Artificial Sequence
  chemically synthesized
ccatagtaaaagataaaatttc

SEQ ID NO: 38214 - DNA, 22 bp, Artificial Sequence
  chemically synthesized
caagttacgacaaacagctttc

SEQ ID NO: 38215 - DNA, 22 bp, Artificial Sequence
  chemically synthesized
aagttacgacaaacagctttca

SEQ ID NO: 38216 - DNA, 22 bp, Artificial Sequence
  chemically synthesized
cgacaaacagctttcattacag

SEQ ID NO: 38217 - DNA, 22 bp, Artificial Sequence
  chemically synthesized
tcattacaggaatagaaaaggc

SEQ ID NO: 38218 - DNA, 22 bp, Artificial Sequence
  chemically synthesized
cattacaggaatagaaaaggcc

SEQ ID NO: 38219 - DNA, 22 bp, Artificial Sequence
  chemically synthesized
attacaggaatagaaaaggcca

SEQ ID NO: 38220 - DNA, 22 bp, Artificial Sequence
  chemically synthesized
caggaatagaaaaggccaataa

SEQ ID NO: 38221 - DNA, 22 bp, Artificial Sequence
  chemically synthesized
tgcattgccatttacaaaaaag

SEQ ID NO: 38222 - DNA, 22 bp, Artificial Sequence
  chemically synthesized
cattgccatttacaaaaaagta

SEQ ID NO: 38223 - DNA, 22 bp, Artificial Sequence
  chemically synthesized
ccatttacaaaaaagtattgac

SEQ ID NO: 38224 - DNA, 22 bp, Artificial Sequence
  chemically synthesized
acaaaaaagtattgactaaagc

SEQ ID NO: 38225 - DNA, 22 bp, Artificial Sequence
  chemically synthesized
caaaaaagtattgactaaagcg

SEQ ID NO: 38226 - DNA, 22 bp, Artificial Sequence
  chemically synthesized
actaaagcgggctttctcttta

SEQ ID NO: 38227 - DNA, 22 bp, Artificial Sequence
  chemically synthesized
aagcgggctttctctttaatat

SEQ ID NO: 38228 - DNA, 22 bp, Artificial Sequence
  chemically synthesized
tctctttaatatgctttgcata

SEQ ID NO: 38229 - DNA, 22 bp, Artificial Sequence
  chemically synthesized
ctctttaatatgctttgcatat

SEQ ID NO: 38230 - DNA, 22 bp, Artificial Sequence
  chemically synthesized
tctttaatatgctttgcatatg

SEQ ID NO: 38231 - DNA, 22 bp, Artificial Sequence
  chemically synthesized
tttaatatgctttgcatatgaa

SEQ ID NO: 38232 - DNA, 22 bp, Artificial Sequence
  chemically synthesized
taatatgctttgcatatgaaat

SEQ ID NO: 38233 - DNA, 22 bp, Artificial Sequence
  chemically synthesized
aatatgctttgcatatgaaatt

SEQ ID NO: 38234 - DNA, 22 bp, Artificial Sequence
  chemically synthesized
atatgctttgcatatgaaattc

SEQ ID NO: 38235 - DNA, 22 bp, Artificial Sequence
  chemically synthesized
tgcatatgaaattctttccaat

SEQ ID NO: 38236 - DNA, 22 bp, Artificial Sequence
  chemically synthesized
gcatatgaaattctttccaatc

SEQ ID NO: 38237 - DNA, 22 bp, Artificial Sequence
  chemically synthesized
catatgaaattctttccaatct

SEQ ID NO: 38238 - DNA, 22 bp, Artificial Sequence
  chemically synthesized
tttccaatctaaatataaagca

SEQ ID NO: 38239 - DNA, 22 bp, Artificial Sequence
  chemically synthesized
tccaatctaaatataaagcacc

SEQ ID NO: 38240 - DNA, 22 bp, Artificial Sequence
  chemically synthesized
ccaatctaaatataaagcacca

SEQ ID NO: 38241 - DNA, 22 bp, Artificial Sequence
  chemically synthesized
caatctaaatataaagcaccat

SEQ ID NO: 38242 - DNA, 22 bp, Artificial Sequence
  chemically synthesized
aatataaagcaccatttagttt

SEQ ID NO: 38243 - DNA, 22 bp, Artificial Sequence
  chemically synthesized
agtttttggcaatgaaaaaaac

SEQ ID NO: 38244 - DNA, 22 bp, Artificial Sequence
  chemically synthesized
gtttttggcaatgaaaaaaact

SEQ ID NO: 38245 - DNA, 22 bp, Artificial Sequence
  chemically synthesized
ttggcaatgaaaaaaactgcaa

SEQ ID NO: 38246 - DNA, 22 bp, Artificial Sequence
  chemically synthesized
tggcaatgaaaaaaactgcaaa

SEQ ID NO: 38247 - DNA, 22 bp, Artificial Sequence
  chemically synthesized
ggcaatgaaaaaaactgcaaaa

SEQ ID NO: 38248 - DNA, 22 bp, Artificial Sequence
  chemically synthesized
gcaatgaaaaaaactgcaaaac

SEQ ID NO: 38249 - DNA, 22 bp, Artificial Sequence
  chemically synthesized
caaaacattggttttttttttt

SEQ ID NO: 38250 - DNA, 22 bp, Artificial Sequence
  chemically synthesized
gtttttttttttttttcctttt

SEQ ID NO: 38251 - DNA, 22 bp, Artificial Sequence
  chemically synthesized
ttttttttttttcctttttttt

SEQ ID NO: 38252 - DNA, 22 bp, Artificial Sequence
  chemically synthesized
tttttttttttccttttttttt

SEQ ID NO: 38253 - DNA, 22 bp, Artificial Sequence
  chemically synthesized
ttttttttttcctttttttttc

SEQ ID NO: 38254 - DNA, 22 bp, Artificial Sequence
  chemically synthesized
tttttttttcctttttttttct

SEQ ID NO: 38255 - DNA, 22 bp, Artificial Sequence
  chemically synthesized
ttttttttcctttttttttctt

SEQ ID NO: 38256 - DNA, 22 bp, Artificial Sequence
  chemically synthesized
tttttttcctttttttttcttt

SEQ ID NO: 38257 - DNA, 22 bp, Artificial Sequence
  chemically synthesized
ttttttcctttttttttctttc

SEQ ID NO: 38258 - DNA, 22 bp, Artificial Sequence
  chemically synthesized
tttttcctttttttttctttct

SEQ ID NO: 38259 - DNA, 22 bp, Artificial Sequence
  chemically synthesized
ttttcctttttttttctttctt

SEQ ID NO: 38260 - DNA, 22 bp, Artificial Sequence
  chemically synthesized
tttcctttttttttctttcttt

SEQ ID NO: 38261 - DNA, 22 bp, Artificial Sequence
  chemically synthesized
ttcctttttttttctttctttc

SEQ ID NO: 38262 - DNA, 22 bp, Artificial Sequence
  chemically synthesized
tcctttttttttctttctttct

SEQ ID NO: 38263 - DNA, 22 bp, Artificial Sequence
  chemically synthesized
cctttttttttctttctttctt

SEQ ID NO: 38264 - DNA, 22 bp, Artificial Sequence
  chemically synthesized
ctttttttttctttctttcttt

SEQ ID NO: 38265 - DNA, 22 bp, Artificial Sequence
  chemically synthesized
tttttttctttctttcttttac

SEQ ID NO: 38266 - DNA, 22 bp, Artificial Sequence
  chemically synthesized
ttttttctttctttcttttact

SEQ ID NO: 38267 - DNA, 22 bp, Artificial Sequence
  chemically synthesized
tttttctttctttcttttactg

SEQ ID NO: 38268 - DNA, 22 bp, Artificial Sequence
  chemically synthesized
ttttctttctttcttttactgc

SEQ ID NO: 38269 - DNA, 22 bp, Artificial Sequence
  chemically synthesized
tttctttctttcttttactgca

SEQ ID NO: 38270 - DNA, 22 bp, Artificial Sequence
  chemically synthesized
ttctttctttcttttactgcat

SEQ ID NO: 38271 - DNA, 22 bp, Artificial Sequence
  chemically synthesized
tctttctttcttttactgcata

SEQ ID NO: 38272 - DNA, 22 bp, Artificial Sequence
  chemically synthesized
ctttctttcttttactgcatat

SEQ ID NO: 38273 - DNA, 22 bp, Artificial Sequence
  chemically synthesized
tttctttcttttactgcatatg

SEQ ID NO: 38274 - DNA, 22 bp, Artificial Sequence
  chemically synthesized
tctttcttttactgcatatgaa

SEQ ID NO: 38275 - DNA, 22 bp, Artificial Sequence
  chemically synthesized
ctttcttttactgcatatgaag

SEQ ID NO: 38276 - DNA, 22 bp, Artificial Sequence
  chemically synthesized
tttcttttactgcatatgaagg

SEQ ID NO: 38277 - DNA, 22 bp, Artificial Sequence
  chemically synthesized
tcttttactgcatatgaaggta

SEQ ID NO: 38278 - DNA, 22 bp, Artificial Sequence
  chemically synthesized
cttttactgcatatgaaggtaa

SEQ ID NO: 38279 - DNA, 22 bp, Artificial Sequence
  chemically synthesized
ttttactgcatatgaaggtaag

SEQ ID NO: 38280 - DNA, 22 bp, Artificial Sequence
  chemically synthesized
ttactgcatatgaaggtaagat

SEQ ID NO: 38281 - DNA, 22 bp, Artificial Sequence
  chemically synthesized
tactgcatatgaaggtaagatg

SEQ ID NO: 38282 - DNA, 22 bp, Artificial Sequence
  chemically synthesized
actgcatatgaaggtaagatgc

SEQ ID NO: 38283 - DNA, 22 bp, Artificial Sequence
  chemically synthesized
ctgcatatgaaggtaagatgct

SEQ ID NO: 38284 - DNA, 22 bp, Artificial Sequence
  chemically synthesized
catatgaaggtaagatgctgga

SEQ ID NO: 38285 - DNA, 22 bp, Artificial Sequence
  chemically synthesized
gaatgtagggtgatagaaggaa

SEQ ID NO: 38286 - DNA, 22 bp, Artificial Sequence
  chemically synthesized
cataacaaaccaacgttattag

SEQ ID NO: 38287 - DNA, 22 bp, Artificial Sequence
  chemically synthesized
ttagcttgcagtactgcataca

SEQ ID NO: 38288 - DNA, 22 bp, Artificial Sequence
  chemically synthesized
gcttgcagtactgcatacagta

SEQ ID NO: 38289 - DNA, 22 bp, Artificial Sequence
  chemically synthesized
gcagtactgcatacagtatggc

SEQ ID NO: 38290 - DNA, 22 bp, Artificial Sequence
  chemically synthesized
cagtactgcatacagtatggca

SEQ ID NO: 38291 - DNA, 22 bp, Artificial Sequence
  chemically synthesized
catacagtatggcagcaggaaa

SEQ ID NO: 38292 - DNA, 22 bp, Artificial Sequence
  chemically synthesized
tgacagccatccatgtgacatt

SEQ ID NO: 38293 - DNA, 22 bp, Artificial Sequence
  chemically synthesized
tagcaggctcccccaaaccgcc

SEQ ID NO: 38294 - DNA, 22 bp, Artificial Sequence
  chemically synthesized
gcaggctcccccaaaccgccat

SEQ ID NO: 38295 - DNA, 22 bp, Artificial Sequence
  chemically synthesized
ccccaaaccgccattatatggc

SEQ ID NO: 38296 - DNA, 22 bp, Artificial Sequence
  chemically synthesized
tatggcttctcatctgtaatgt

SEQ ID NO: 38297 - DNA, 22 bp, Artificial Sequence
  chemically synthesized
ctcatctgtaatgtcacacttt

SEQ ID NO: 38298 - DNA, 22 bp, Artificial Sequence
  chemically synthesized
tcatctgtaatgtcacactttt

SEQ ID NO: 38299 - DNA, 22 bp, Artificial Sequence
  chemically synthesized
atctgtaatgtcacactttttt

SEQ ID NO: 38300 - DNA, 22 bp, Artificial Sequence
  chemically synthesized
taatgtcacacttttttgtttc

SEQ ID NO: 38301 - DNA, 22 bp, Artificial Sequence
  chemically synthesized
ttttgtttctctcttttttttt

SEQ ID NO: 38302 - DNA, 22 bp, Artificial Sequence
  chemically synthesized
tttgtttctctctttttttttt

SEQ ID NO: 38303 - DNA, 22 bp, Artificial Sequence
  chemically synthesized
ttgtttctctcttttttttttt

SEQ ID NO: 38304 - DNA, 22 bp, Artificial Sequence
  chemically synthesized
tgtttctctctttttttttttt

SEQ ID NO: 38305 - DNA, 22 bp, Artificial Sequence
  chemically synthesized
gtttctctcttttttttttttt

SEQ ID NO: 38306 - DNA, 22 bp, Artificial Sequence
  chemically synthesized
tttctctctttttttttttttt

SEQ ID NO: 38307 - DNA, 22 bp, Artificial Sequence
  chemically synthesized
ctctcttttttttttttttgaa

SEQ ID NO: 38308 - DNA, 22 bp, Artificial Sequence
  chemically synthesized
tctcttttttttttttttgaag

SEQ ID NO: 38309 - DNA, 22 bp, Artificial Sequence
  chemically synthesized
tcttttttttttttttgaagca

SEQ ID NO: 38310 - DNA, 22 bp, Artificial Sequence
  chemically synthesized
ttttttttttttttgaagcata

SEQ ID NO: 38311 - DNA, 22 bp, Artificial Sequence
  chemically synthesized
ttttttttttttgaagcataca

SEQ ID NO: 38312 - DNA, 22 bp, Artificial Sequence
  chemically synthesized
tttttttttttgaagcatacaa

SEQ ID NO: 38313 - DNA, 22 bp, Artificial Sequence
  chemically synthesized
ttttttttttgaagcatacaaa

SEQ ID NO: 38314 - DNA, 22 bp, Artificial Sequence
  chemically synthesized
tttttttttgaagcatacaaat

SEQ ID NO: 38315 - DNA, 22 bp, Artificial Sequence
  chemically synthesized
ttttttttgaagcatacaaata

SEQ ID NO: 38316 - DNA, 22 bp, Artificial Sequence
  chemically synthesized
tttttttgaagcatacaaataa

SEQ ID NO: 38317 - DNA, 22 bp, Artificial Sequence
  chemically synthesized
ttttttgaagcatacaaataat

SEQ ID NO: 38318 - DNA, 22 bp, Artificial Sequence
  chemically synthesized
tttttgaagcatacaaataatt

SEQ ID NO: 38319 - DNA, 22 bp, Artificial Sequence
  chemically synthesized
ttttgaagcatacaaataattt

SEQ ID NO: 38320 - DNA, 22 bp, Artificial Sequence
  chemically synthesized
tttgaagcatacaaataatttg

SEQ ID NO: 38321 - DNA, 22 bp, Artificial Sequence
  chemically synthesized
ttgaagcatacaaataatttgc

SEQ ID NO: 38322 - DNA, 22 bp, Artificial Sequence
  chemically synthesized
tgaagcatacaaataatttgca

SEQ ID NO: 38323 - DNA, 22 bp, Artificial Sequence
  chemically synthesized
gaagcatacaaataatttgcac

SEQ ID NO: 38324 - DNA, 22 bp, Artificial Sequence
  chemically synthesized
aagcatacaaataatttgcact

SEQ ID NO: 38325 - DNA, 22 bp, Artificial Sequence
  chemically synthesized
gcactatattatcctgccaaat

SEQ ID NO: 38326 - DNA, 22 bp, Artificial Sequence
  chemically synthesized
cactatattatcctgccaaatt

SEQ ID NO: 38327 - DNA, 22 bp, Artificial Sequence
  chemically synthesized
tattatcctgccaaattaaaaa

SEQ ID NO: 38328 - DNA, 22 bp, Artificial Sequence
  chemically synthesized
tcctgccaaattaaaaaaatat

SEQ ID NO: 38329 - DNA, 22 bp, Artificial Sequence
  chemically synthesized
ccaaattaaaaaaatatactgt

SEQ ID NO: 38330 - DNA, 22 bp, Artificial Sequence
  chemically synthesized
aaaaaatatactgtggcagcct

SEQ ID NO: 38331 - DNA, 22 bp, Artificial Sequence
  chemically synthesized
tggcagcctgtctttttttttt

SEQ ID NO: 38332 - DNA, 22 bp, Artificial Sequence
  chemically synthesized
tcttttttttttccactaccaa

SEQ ID NO: 38333 - DNA, 22 bp, Artificial Sequence
  chemically synthesized
ttttttttccactaccaaaaaa

SEQ ID NO: 38334 - DNA, 22 bp, Artificial Sequence
  chemically synthesized
tttttttccactaccaaaaaag

SEQ ID NO: 38335 - DNA, 22 bp, Artificial Sequence
  chemically synthesized
ttttttccactaccaaaaaagg

SEQ ID NO: 38336 - DNA, 22 bp, Artificial Sequence
  chemically synthesized
tttttccactaccaaaaaaggt

SEQ ID NO: 38337 - DNA, 22 bp, Artificial Sequence
  chemically synthesized
ttttccactaccaaaaaaggta

SEQ ID NO: 38338 - DNA, 22 bp, Artificial Sequence
  chemically synthesized
tttccactaccaaaaaaggtac

SEQ ID NO: 38339 - DNA, 22 bp, Artificial Sequence
  chemically synthesized
ttccactaccaaaaaaggtaca

SEQ ID NO: 38340 - DNA, 22 bp, Artificial Sequence
  chemically synthesized
tccactaccaaaaaaggtacat

SEQ ID NO: 38341 - DNA, 22 bp, Artificial Sequence
  chemically synthesized
ccactaccaaaaaaggtacatt

SEQ ID NO: 38342 - DNA, 22 bp, Artificial Sequence
  chemically synthesized
cactaccaaaaaaggtacattg

SEQ ID NO: 38343 - DNA, 22 bp, Artificial Sequence
  chemically synthesized
ccaaaaaaggtacattgatacc

SEQ ID NO: 38344 - DNA, 22 bp, Artificial Sequence
  chemically synthesized
ataccttttaagagaacaagca

SEQ ID NO: 38345 - DNA, 22 bp, Artificial Sequence
  chemically synthesized
ttaagagaacaagcaacagtta

SEQ ID NO: 38346 - DNA, 22 bp, Artificial Sequence
  chemically synthesized
taagagaacaagcaacagttaa

SEQ ID NO: 38347 - DNA, 22 bp, Artificial Sequence
  chemically synthesized
aagagaacaagcaacagttaaa

SEQ ID NO: 38348 - DNA, 22 bp, Artificial Sequence
  chemically synthesized
agagaacaagcaacagttaaaa

SEQ ID NO: 38349 - DNA, 22 bp, Artificial Sequence
  chemically synthesized
aaaatacaagcttcaatataaa

SEQ ID NO: 38350 - DNA, 22 bp, Artificial Sequence
  chemically synthesized
caatataaatactatagtgcct

SEQ ID NO: 38351 - DNA, 22 bp, Artificial Sequence
  chemically synthesized
aatataaatactatagtgccta

SEQ ID NO: 38352 - DNA, 22 bp, Artificial Sequence
  chemically synthesized
tagtgcctaacactagatgaac

SEQ ID NO: 38353 - DNA, 22 bp, Artificial Sequence
  chemically synthesized
acactagatgaacatttaattc

SEQ ID NO: 38354 - DNA, 22 bp, Artificial Sequence
  chemically synthesized
gatgaacatttaattcaaatac

SEQ ID NO: 38355 - DNA, 22 bp, Artificial Sequence
  chemically synthesized
aattcaaataccattctagaaa

SEQ ID NO: 38356 - DNA, 22 bp, Artificial Sequence
  chemically synthesized
attcaaataccattctagaaat

SEQ ID NO: 38357 - DNA, 22 bp, Artificial Sequence
  chemically synthesized
aaataccattctagaaatacag

SEQ ID NO: 38358 - DNA, 22 bp, Artificial Sequence
  chemically synthesized
tagaaatacagaaaaaagacca

SEQ ID NO: 38359 - DNA, 22 bp, Artificial Sequence
  chemically synthesized
gaaatacagaaaaaagaccata

SEQ ID NO: 38360 - DNA, 22 bp, Artificial Sequence
  chemically synthesized
tagcataggaatcaacatgagt

SEQ ID NO: 38361 - DNA, 22 bp, Artificial Sequence
  chemically synthesized
agcataggaatcaacatgagtg

SEQ ID NO: 38362 - DNA, 22 bp, Artificial Sequence
  chemically synthesized
gcataggaatcaacatgagtgt

SEQ ID NO: 38363 - DNA, 22 bp, Artificial Sequence
  chemically synthesized
tcctatatttaagtactatata

SEQ ID NO: 38364 - DNA, 22 bp, Artificial Sequence
  chemically synthesized
cctatatttaagtactatataa

SEQ ID NO: 38365 - DNA, 22 bp, Artificial Sequence
  chemically synthesized
ctatatttaagtactatataat

SEQ ID NO: 38366 - DNA, 22 bp, Artificial Sequence
  chemically synthesized
tatttaagtactatataatctt

SEQ ID NO: 38367 - DNA, 22 bp, Artificial Sequence
  chemically synthesized
aagtactatataatcttaaacc

SEQ ID NO: 38368 - DNA, 22 bp, Artificial Sequence
  chemically synthesized
agtactatataatcttaaacct

SEQ ID NO: 38369 - DNA, 22 bp, Artificial Sequence
  chemically synthesized
tataatcttaaacctttcccca

SEQ ID NO: 38370 - DNA, 22 bp, Artificial Sequence
  chemically synthesized
aaacctttccccaatgtatgtt

SEQ ID NO: 38371 - DNA, 22 bp, Artificial Sequence
  chemically synthesized
aacctttccccaatgtatgttt

SEQ ID NO: 38372 - DNA, 22 bp, Artificial Sequence
  chemically synthesized
tccccaatgtatgttttttttt

SEQ ID NO: 38373 - DNA, 22 bp, Artificial Sequence
  chemically synthesized
ccccaatgtatgtttttttttt

SEQ ID NO: 38374 - DNA, 22 bp, Artificial Sequence
  chemically synthesized
cccaatgtatgttttttttttt

SEQ ID NO: 38375 - DNA, 22 bp, Artificial Sequence
  chemically synthesized
tttttttttacaacctgaagag

SEQ ID NO: 38376 - DNA, 22 bp, Artificial Sequence
  chemically synthesized
ttttttttacaacctgaagagc

SEQ ID NO: 38377 - DNA, 22 bp, Artificial Sequence
  chemically synthesized
tttttttacaacctgaagagcg

SEQ ID NO: 38378 - DNA, 22 bp, Artificial Sequence
  chemically synthesized
ttttttacaacctgaagagcgg

SEQ ID NO: 38379 - DNA, 22 bp, Artificial Sequence
  chemically synthesized
tttttacaacctgaagagcggt

SEQ ID NO: 38380 - DNA, 22 bp, Artificial Sequence
  chemically synthesized
ttttacaacctgaagagcggtg

SEQ ID NO: 38381 - DNA, 22 bp, Artificial Sequence
  chemically synthesized
tttacaacctgaagagcggtgt

SEQ ID NO: 38382 - DNA, 22 bp, Artificial Sequence
  chemically synthesized
ttacaacctgaagagcggtgtg

SEQ ID NO: 38383 - DNA, 22 bp, Artificial Sequence
  chemically synthesized
tacaacctgaagagcggtgtgt

SEQ ID NO: 38384 - DNA, 22 bp, Artificial Sequence
  chemically synthesized
acaacctgaagagcggtgtgta

SEQ ID NO: 38385 - DNA, 22 bp, Artificial Sequence
  chemically synthesized
caacctgaagagcggtgtgtat

SEQ ID NO: 38386 - DNA, 22 bp, Artificial Sequence
  chemically synthesized
aagagcggtgtgtatccaaggc

SEQ ID NO: 38387 - DNA, 22 bp, Artificial Sequence
  chemically synthesized
ccactaccatttttaaatggat

SEQ ID NO: 38388 - DNA, 22 bp, Artificial Sequence
  chemically synthesized
cactaccatttttaaatggata

SEQ ID NO: 38389 - DNA, 22 bp, Artificial Sequence
  chemically synthesized
ccatttttaaatggataacaag

SEQ ID NO: 38390 - DNA, 22 bp, Artificial Sequence
  chemically synthesized
ttaaatggataacaagtcttgt

SEQ ID NO: 38391 - DNA, 22 bp, Artificial Sequence
  chemically synthesized
taaatggataacaagtcttgta

SEQ ID NO: 38392 - DNA, 22 bp, Artificial Sequence
  chemically synthesized
aaatggataacaagtcttgtaa

SEQ ID NO: 38393 - DNA, 22 bp, Artificial Sequence
  chemically synthesized
aatggataacaagtcttgtaac

SEQ ID NO: 38394 - DNA, 22 bp, Artificial Sequence
  chemically synthesized
gtaacaccaccaagacaatgga

SEQ ID NO: 38395 - DNA, 22 bp, Artificial Sequence
  chemically synthesized
taacaccaccaagacaatggaa

SEQ ID NO: 38396 - DNA, 22 bp, Artificial Sequence
  chemically synthesized
aaatgcagttcccccctaaaca

SEQ ID NO: 38397 - DNA, 22 bp, Artificial Sequence
  chemically synthesized
ccccctaaacataatgaagtgt

SEQ ID NO: 38398 - DNA, 22 bp, Artificial Sequence
  chemically synthesized
aacataatgaagtgttttttaa

SEQ ID NO: 38399 - DNA, 22 bp, Artificial Sequence
  chemically synthesized
tttaaaaaaaatttttcttaac

SEQ ID NO: 38400 - DNA, 22 bp, Artificial Sequence
  chemically synthesized
ttaaaaaaaatttttcttaaca

SEQ ID NO: 38401 - DNA, 22 bp, Artificial Sequence
  chemically synthesized
taaaaaaaatttttcttaacat

SEQ ID NO: 38402 - DNA, 22 bp, Artificial Sequence
  chemically synthesized
aaaaaaaatttttcttaacatt

SEQ ID NO: 38403 - DNA, 22 bp, Artificial Sequence
  chemically synthesized
aaaaaaatttttcttaacattt

SEQ ID NO: 38404 - DNA, 22 bp, Artificial Sequence
  chemically synthesized
ttcttaacatttatatttaaaa

SEQ ID NO: 38405 - DNA, 22 bp, Artificial Sequence
  chemically synthesized
tcttaacatttatatttaaaaa

SEQ ID NO: 38406 - DNA, 22 bp, Artificial Sequence
  chemically synthesized
cttaacatttatatttaaaaaa

SEQ ID NO: 38407 - DNA, 22 bp, Artificial Sequence
  chemically synthesized
ttaacatttatatttaaaaaag

SEQ ID NO: 38408 - DNA, 22 bp, Artificial Sequence
  chemically synthesized
aacatttatatttaaaaaagtt

SEQ ID NO: 38409 - DNA, 22 bp, Artificial Sequence
  chemically synthesized
acatttatatttaaaaaagttt

SEQ ID NO: 38410 - DNA, 22 bp, Artificial Sequence
  chemically synthesized
atatttaaaaaagttttgtaca

SEQ ID NO: 38411 - DNA, 22 bp, Artificial Sequence
  chemically synthesized
tatttaaaaaagttttgtacaa

SEQ ID NO: 38412 - DNA, 22 bp, Artificial Sequence
  chemically synthesized
aaaaaagttttgtacaaaaaaa

SEQ ID NO: 38413 - DNA, 22 bp, Artificial Sequence
  chemically synthesized
aaaaagttttgtacaaaaaaat

SEQ ID NO: 38414 - DNA, 22 bp, Artificial Sequence
  chemically synthesized
tgtacaaaaaaatccttgcact

SEQ ID NO: 38415 - DNA, 22 bp, Artificial Sequence
  chemically synthesized
gtacaaaaaaatccttgcactg

SEQ ID NO: 38416 - DNA, 22 bp, Artificial Sequence
  chemically synthesized
tacaaaaaaatccttgcactgt

SEQ ID NO: 38417 - DNA, 22 bp, Artificial Sequence
  chemically synthesized
gcactgtagaagcgaaagcaat

SEQ ID NO: 38418 - DNA, 22 bp, Artificial Sequence
  chemically synthesized
cactgtagaagcgaaagcaatc

SEQ ID NO: 38419 - DNA, 22 bp, Artificial Sequence
  chemically synthesized
tagaagcgaaagcaatcattca

SEQ ID NO: 38420 - DNA, 22 bp, Artificial Sequence
  chemically synthesized
atttctatgttaagtgtattct

SEQ ID NO: 38421 - DNA, 22 bp, Artificial Sequence
  chemically synthesized
ctatgttaagtgtattctgttt

SEQ ID NO: 38422 - DNA, 22 bp, Artificial Sequence
  chemically synthesized
tatgttaagtgtattctgtttc

SEQ ID NO: 38423 - DNA, 22 bp, Artificial Sequence
  chemically synthesized
tgttaagtgtattctgtttcca

SEQ ID NO: 38424 - DNA, 22 bp, Artificial Sequence
  chemically synthesized
agtgtattctgtttccattcac

SEQ ID NO: 38425 - DNA, 22 bp, Artificial Sequence
  chemically synthesized
tgtttccattcacagcgcttgc

SEQ ID NO: 38426 - DNA, 22 bp, Artificial Sequence
  chemically synthesized
tttccattcacagcgcttgcaa

SEQ ID NO: 38427 - DNA, 22 bp, Artificial Sequence
  chemically synthesized
ccattcacagcgcttgcaatgt

SEQ ID NO: 38428 - DNA, 22 bp, Artificial Sequence
  chemically synthesized
cattcacagcgcttgcaatgtt

SEQ ID NO: 38429 - DNA, 22 bp, Artificial Sequence
  chemically synthesized
acagcgcttgcaatgttgcgtc

SEQ ID NO: 38430 - DNA, 22 bp, Artificial Sequence
  chemically synthesized
gcaatgttgcgtccaagtaagt

SEQ ID NO: 38431 - DNA, 22 bp, Artificial Sequence
  chemically synthesized
caatgttgcgtccaagtaagta

SEQ ID NO: 38432 - DNA, 22 bp, Artificial Sequence
  chemically synthesized
cgtccaagtaagtaagctcaat

SEQ ID NO: 38433 - DNA, 22 bp, Artificial Sequence
  chemically synthesized
aatagtcaagtaaatggctggc

SEQ ID NO: 38434 - DNA, 22 bp, Artificial Sequence
  chemically synthesized
gcaaagtttttttttttttagt

SEQ ID NO: 38435 - DNA, 22 bp, Artificial Sequence
  chemically synthesized
ttttttttttagtttttaaaaa

SEQ ID NO: 38436 - DNA, 22 bp, Artificial Sequence
  chemically synthesized
tttttttttagtttttaaaaaa

SEQ ID NO: 38437 - DNA, 22 bp, Artificial Sequence
  chemically synthesized
ttttttttagtttttaaaaaat

SEQ ID NO: 38438 - DNA, 22 bp, Artificial Sequence
  chemically synthesized
tttttttagtttttaaaaaatg

SEQ ID NO: 38439 - DNA, 22 bp, Artificial Sequence
  chemically synthesized
ttttttagtttttaaaaaatgc

SEQ ID NO: 38440 - DNA, 22 bp, Artificial Sequence
  chemically synthesized
tttttagtttttaaaaaatgct

SEQ ID NO: 38441 - DNA, 22 bp, Artificial Sequence
  chemically synthesized
ttttagtttttaaaaaatgctc

SEQ ID NO: 38442 - DNA, 22 bp, Artificial Sequence
  chemically synthesized
tttagtttttaaaaaatgctcc

SEQ ID NO: 38443 - DNA, 22 bp, Artificial Sequence
  chemically synthesized
ttagtttttaaaaaatgctcct

SEQ ID NO: 38444 - DNA, 22 bp, Artificial Sequence
  chemically synthesized
tagtttttaaaaaatgctcctc

SEQ ID NO: 38445 - DNA, 22 bp, Artificial Sequence
  chemically synthesized
agtttttaaaaaatgctcctca

SEQ ID NO: 38446 - DNA, 22 bp, Artificial Sequence
  chemically synthesized
gtttttaaaaaatgctcctcaa

SEQ ID NO: 38447 - DNA, 22 bp, Artificial Sequence
  chemically synthesized
ttaaaaaatgctcctcaatgag

SEQ ID NO: 38448 - DNA, 22 bp, Artificial Sequence
  chemically synthesized
taaaaaatgctcctcaatgaga

SEQ ID NO: 38449 - DNA, 22 bp, Artificial Sequence
  chemically synthesized
aaaaaatgctcctcaatgagat

SEQ ID NO: 38450 - DNA, 22 bp, Artificial Sequence
  chemically synthesized
aaaaatgctcctcaatgagatt

SEQ ID NO: 38451 - DNA, 22 bp, Artificial Sequence
  chemically synthesized
ctcaatgagattgtgttcaatt

SEQ ID NO: 38452 - DNA, 22 bp, Artificial Sequence
  chemically synthesized
aatgagattgtgttcaattttt

SEQ ID NO: 38453 - DNA, 22 bp, Artificial Sequence
  chemically synthesized
tgttcaattttttttcagcatt

SEQ ID NO: 38454 - DNA, 22 bp, Artificial Sequence
  chemically synthesized
aattttttttcagcattcttgc

SEQ ID NO: 38455 - DNA, 22 bp, Artificial Sequence
  chemically synthesized
tttttcagcattcttgcaactt

SEQ ID NO: 38456 - DNA, 22 bp, Artificial Sequence
  chemically synthesized
ttttcagcattcttgcaacttt

SEQ ID NO: 38457 - DNA, 22 bp, Artificial Sequence
  chemically synthesized
tttcagcattcttgcaactttt

SEQ ID NO: 38458 - DNA, 22 bp, Artificial Sequence
  chemically synthesized
ttcagcattcttgcaacttttc

SEQ ID NO: 38459 - DNA, 22 bp, Artificial Sequence
  chemically synthesized
tcagcattcttgcaacttttcc

SEQ ID NO: 38460 - DNA, 22 bp, Artificial Sequence
  chemically synthesized
cagcattcttgcaacttttccc

SEQ ID NO: 38461 - DNA, 22 bp, Artificial Sequence
  chemically synthesized
agcattcttgcaacttttccct

SEQ ID NO: 38462 - DNA, 22 bp, Artificial Sequence
  chemically synthesized
ttgcaacttttcccttaagtat

SEQ ID NO: 38463 - DNA, 22 bp, Artificial Sequence
  chemically synthesized
gcaacttttcccttaagtatag

SEQ ID NO: 38464 - DNA, 22 bp, Artificial Sequence
  chemically synthesized
caacttttcccttaagtataga

SEQ ID NO: 38465 - DNA, 22 bp, Artificial Sequence
  chemically synthesized
ttcccttaagtatagacctgta

SEQ ID NO: 38466 - DNA, 22 bp, Artificial Sequence
  chemically synthesized
tcccttaagtatagacctgtaa

SEQ ID NO: 38467 - DNA, 22 bp, Artificial Sequence
  chemically synthesized
cccttaagtatagacctgtaaa

SEQ ID NO: 38468 - DNA, 22 bp, Artificial Sequence
  chemically synthesized
ccttaagtatagacctgtaaac

SEQ ID NO: 38469 - DNA, 22 bp, Artificial Sequence
  chemically synthesized
aagtatagacctgtaaactggg

SEQ ID NO: 38470 - DNA, 22 bp, Artificial Sequence
  chemically synthesized
agtatagacctgtaaactggga

SEQ ID NO: 38471 - DNA, 22 bp, Artificial Sequence
  chemically synthesized
taaactgggaaaattgtacagt

SEQ ID NO: 38472 - DNA, 22 bp, Artificial Sequence
  chemically synthesized
ggaaaattgtacagtgcactta

SEQ ID NO: 38473 - DNA, 22 bp, Artificial Sequence
  chemically synthesized
tacagtgcacttaattgtccta

SEQ ID NO: 38474 - DNA, 22 bp, Artificial Sequence
  chemically synthesized
aattgtcctatctgagcaggtt

SEQ ID NO: 38475 - DNA, 22 bp, Artificial Sequence
  chemically synthesized
attgtcctatctgagcaggttt

SEQ ID NO: 38476 - DNA, 22 bp, Artificial Sequence
  chemically synthesized
tcctatctgagcaggtttattt

SEQ ID NO: 38477 - DNA, 22 bp, Artificial Sequence
  chemically synthesized
tctgagcaggtttattttatac

SEQ ID NO: 38478 - DNA, 22 bp, Artificial Sequence
  chemically synthesized
agcaggtttattttatactcaa

SEQ ID NO: 38479 - DNA, 22 bp, Artificial Sequence
  chemically synthesized
attttatactcaacctctgtat

SEQ ID NO: 38480 - DNA, 22 bp, Artificial Sequence
  chemically synthesized
ttttatactcaacctctgtatc

SEQ ID NO: 38481 - DNA, 22 bp, Artificial Sequence
  chemically synthesized
tatactcaacctctgtatctct

SEQ ID NO: 38482 - DNA, 22 bp, Artificial Sequence
  chemically synthesized
atactcaacctctgtatctctg

SEQ ID NO: 38483 - DNA, 22 bp, Artificial Sequence
  chemically synthesized
tactcaacctctgtatctctga

SEQ ID NO: 38484 - DNA, 22 bp, Artificial Sequence
  chemically synthesized
aacctctgtatctctgattaga

SEQ ID NO: 38485 - DNA, 22 bp, Artificial Sequence
  chemically synthesized
tgtatctctgattagagaaaag

SEQ ID NO: 38486 - DNA, 22 bp, Artificial Sequence
  chemically synthesized
tatctctgattagagaaaagat

SEQ ID NO: 38487 - DNA, 22 bp, Artificial Sequence
  chemically synthesized
tgattagagaaaagatacagat

SEQ ID NO: 38488 - DNA, 22 bp, Artificial Sequence
  chemically synthesized
attagagaaaagatacagatat

SEQ ID NO: 38489 - DNA, 22 bp, Artificial Sequence
  chemically synthesized
gagaaaagatacagatatcaca

SEQ ID NO: 38490 - DNA, 22 bp, Artificial Sequence
  chemically synthesized
tttgaacaccaactggggcaga

SEQ ID NO: 38491 - DNA, 22 bp, Artificial Sequence
  chemically synthesized
gaacaccaactggggcagatgc

SEQ ID NO: 38492 - DNA, 22 bp, Artificial Sequence
  chemically synthesized
aacaccaactggggcagatgct

SEQ ID NO: 38493 - DNA, 22 bp, Artificial Sequence
  chemically synthesized
gggcagatgctagcttaataaa

SEQ ID NO: 38494 - DNA, 22 bp, Artificial Sequence
  chemically synthesized
gcttaataaaaaagaaaaaatt

SEQ ID NO: 38495 - DNA, 22 bp, Artificial Sequence
  chemically synthesized
aataaaaaagaaaaaattaaaa

SEQ ID NO: 38496 - DNA, 22 bp, Artificial Sequence
  chemically synthesized
ataaaaaagaaaaaattaaaaa

SEQ ID NO: 38497 - DNA, 22 bp, Artificial Sequence
  chemically synthesized
aaaaaataaaaataaaaacaat

SEQ ID NO: 38498 - DNA, 22 bp, Artificial Sequence
  chemically synthesized
ttccatgttaacacaaatagca

SEQ ID NO: 38499 - DNA, 22 bp, Artificial Sequence
  chemically synthesized
ccatgttaacacaaatagcaca

SEQ ID NO: 38500 - DNA, 22 bp, Artificial Sequence
  chemically synthesized
catgttaacacaaatagcacac

SEQ ID NO: 38501 - DNA, 22 bp, Artificial Sequence
  chemically synthesized
acacaaatagcacacagtgtat

SEQ ID NO: 38502 - DNA, 22 bp, Artificial Sequence
  chemically synthesized
ttagggagcacagacatatata

SEQ ID NO: 38503 - DNA, 22 bp, Artificial Sequence
  chemically synthesized
tagggagcacagacatatatac

SEQ ID NO: 38504 - DNA, 22 bp, Artificial Sequence
  chemically synthesized
agggagcacagacatatatact

SEQ ID NO: 38505 - DNA, 22 bp, Artificial Sequence
  chemically synthesized
gggagcacagacatatatactg

SEQ ID NO: 38506 - DNA, 22 bp, Artificial Sequence
  chemically synthesized
ctactcttaaaattctttctct

SEQ ID NO: 38507 - DNA, 22 bp, Artificial Sequence
  chemically synthesized
ctcttaaaattctttctcttct

SEQ ID NO: 38508 - DNA, 22 bp, Artificial Sequence
  chemically synthesized
ttaaaattctttctcttctttt

SEQ ID NO: 38509 - DNA, 22 bp, Artificial Sequence
  chemically synthesized
aaaattctttctcttctttttt

SEQ ID NO: 38510 - DNA, 22 bp, Artificial Sequence
  chemically synthesized
aaattctttctcttcttttttt

SEQ ID NO: 38511 - DNA, 22 bp, Artificial Sequence
  chemically synthesized
tttctcttctttttttaagaat

SEQ ID NO: 38512 - DNA, 22 bp, Artificial Sequence
  chemically synthesized
tctcttctttttttaagaatgt

SEQ ID NO: 38513 - DNA, 22 bp, Artificial Sequence
  chemically synthesized
ctcttctttttttaagaatgtc

SEQ ID NO: 38514 - DNA, 22 bp, Artificial Sequence
  chemically synthesized
tcttctttttttaagaatgtca

SEQ ID NO: 38515 - DNA, 22 bp, Artificial Sequence
  chemically synthesized
ttctttttttaagaatgtcaca

SEQ ID NO: 38516 - DNA, 22 bp, Artificial Sequence
  chemically synthesized
ctttttttaagaatgtcacatt

SEQ ID NO: 38517 - DNA, 22 bp, Artificial Sequence
  chemically synthesized
tttttttaagaatgtcacattt

SEQ ID NO: 38518 - DNA, 22 bp, Artificial Sequence
  chemically synthesized
tttttaagaatgtcacatttaa

SEQ ID NO: 38519 - DNA, 22 bp, Artificial Sequence
  chemically synthesized
ttttaagaatgtcacatttaaa

SEQ ID NO: 38520 - DNA, 22 bp, Artificial Sequence
  chemically synthesized
tttaagaatgtcacatttaaat

SEQ ID NO: 38521 - DNA, 22 bp, Artificial Sequence
  chemically synthesized
ttaagaatgtcacatttaaatg

SEQ ID NO: 38522 - DNA, 22 bp, Artificial Sequence
  chemically synthesized
taagaatgtcacatttaaatgc

SEQ ID NO: 38523 - DNA, 22 bp, Artificial Sequence
  chemically synthesized
aagaatgtcacatttaaatgca

SEQ ID NO: 38524 - DNA, 22 bp, Artificial Sequence
  chemically synthesized
agaatgtcacatttaaatgcaa

SEQ ID NO: 38525 - DNA, 22 bp, Artificial Sequence
  chemically synthesized
aaatgcaagtcttaagaattca

SEQ ID NO: 38526 - DNA, 22 bp, Artificial Sequence
  chemically synthesized
aatgcaagtcttaagaattcat

SEQ ID NO: 38527 - DNA, 22 bp, Artificial Sequence
  chemically synthesized
aagaattcatagttaatcatca

SEQ ID NO: 38528 - DNA, 22 bp, Artificial Sequence
  chemically synthesized
agaattcatagttaatcatcat

SEQ ID NO: 38529 - DNA, 22 bp, Artificial Sequence
  chemically synthesized
atagttaatcatcattgtatca

SEQ ID NO: 38530 - DNA, 22 bp, Artificial Sequence
  chemically synthesized
atcatcattgtatcaatattag

SEQ ID NO: 38531 - DNA, 22 bp, Artificial Sequence
  chemically synthesized
tatcaatattagcttatatacc

SEQ ID NO: 38532 - DNA, 22 bp, Artificial Sequence
  chemically synthesized
gcttatatacctgttctagttt

SEQ ID NO: 38533 - DNA, 22 bp, Artificial Sequence
  chemically synthesized
atatacctgttctagttttaaa

SEQ ID NO: 38534 - DNA, 22 bp, Artificial Sequence
  chemically synthesized
tatacctgttctagttttaaat

SEQ ID NO: 38535 - DNA, 22 bp, Artificial Sequence
  chemically synthesized
ttctagttttaaatggcaaata

SEQ ID NO: 38536 - DNA, 22 bp, Artificial Sequence
  chemically synthesized
tagttttaaatggcaaatagta

SEQ ID NO: 38537 - DNA, 22 bp, Artificial Sequence
  chemically synthesized
gttttaaatggcaaatagtacc

SEQ ID NO: 38538 - DNA, 22 bp, Artificial Sequence
  chemically synthesized
taaatggcaaatagtaccacgt

SEQ ID NO: 38539 - DNA, 22 bp, Artificial Sequence
  chemically synthesized
aaatggcaaatagtaccacgtt

SEQ ID NO: 38540 - DNA, 22 bp, Artificial Sequence
  chemically synthesized
aatggcaaatagtaccacgttg

SEQ ID NO: 38541 - DNA, 22 bp, Artificial Sequence
  chemically synthesized
tgctaataaatcatattatttt

SEQ ID NO: 38542 - DNA, 22 bp, Artificial Sequence
  chemically synthesized
ataaatcatattattttcttct

SEQ ID NO: 38543 - DNA, 22 bp, Artificial Sequence
  chemically synthesized
ttttcttctgttcccctctgtc

SEQ ID NO: 38544 - DNA, 22 bp, Artificial Sequence
  chemically synthesized
tcttctgttcccctctgtcaaa

SEQ ID NO: 38545 - DNA, 22 bp, Artificial Sequence
  chemically synthesized
cttctgttcccctctgtcaaac

SEQ ID NO: 38546 - DNA, 22 bp, Artificial Sequence
  chemically synthesized
ttctgttcccctctgtcaaacc

SEQ ID NO: 38547 - DNA, 22 bp, Artificial Sequence
  chemically synthesized
ctgttcccctctgtcaaacctt

SEQ ID NO: 38548 - DNA, 22 bp, Artificial Sequence
  chemically synthesized
tgttcccctctgtcaaacctta

SEQ ID NO: 38549 - DNA, 22 bp, Artificial Sequence
  chemically synthesized
ttcccctctgtcaaaccttatt

SEQ ID NO: 38550 - DNA, 22 bp, Artificial Sequence
  chemically synthesized
ccctctgtcaaaccttattgtc

SEQ ID NO: 38551 - DNA, 22 bp, Artificial Sequence
  chemically synthesized
tgtcaaaccttattgtcagcct

SEQ ID NO: 38552 - DNA, 22 bp, Artificial Sequence
  chemically synthesized
tcaaaccttattgtcagcctct

SEQ ID NO: 38553 - DNA, 22 bp, Artificial Sequence
  chemically synthesized
attgtcagcctcttcctttcaa

SEQ ID NO: 38554 - DNA, 22 bp, Artificial Sequence
  chemically synthesized
ttgtcagcctcttcctttcaat

SEQ ID NO: 38555 - DNA, 22 bp, Artificial Sequence
  chemically synthesized
tcagcctcttcctttcaatatg

SEQ ID NO: 38556 - DNA, 22 bp, Artificial Sequence
  chemically synthesized
ttcctttcaatatggtatacaa

SEQ ID NO: 38557 - DNA, 22 bp, Artificial Sequence
  chemically synthesized
cctttcaatatggtatacaagg

SEQ ID NO: 38558 - DNA, 22 bp, Artificial Sequence
  chemically synthesized
ctttcaatatggtatacaaggt

SEQ ID NO: 38559 - DNA, 22 bp, Artificial Sequence
  chemically synthesized
tcaatatggtatacaaggtctt

SEQ ID NO: 38560 - DNA, 22 bp, Artificial Sequence
  chemically synthesized
caatatggtatacaaggtctta

SEQ ID NO: 38561 - DNA, 22 bp, Artificial Sequence
  chemically synthesized
aatatggtatacaaggtcttaa

SEQ ID NO: 38562 - DNA, 22 bp, Artificial Sequence
  chemically synthesized
aaagtttatcatttgattgtcc

SEQ ID NO: 38563 - DNA, 22 bp, Artificial Sequence
  chemically synthesized
aagtttatcatttgattgtcca

SEQ ID NO: 38564 - DNA, 22 bp, Artificial Sequence
  chemically synthesized
atcatttgattgtccacttgac

SEQ ID NO: 38565 - DNA, 22 bp, Artificial Sequence
  chemically synthesized
tcatttgattgtccacttgaca

SEQ ID NO: 38566 - DNA, 22 bp, Artificial Sequence
  chemically synthesized
gattgtccacttgacaaccaag

SEQ ID NO: 38567 - DNA, 22 bp, Artificial Sequence
  chemically synthesized
attgtccacttgacaaccaagt

SEQ ID NO: 38568 - DNA, 22 bp, Artificial Sequence
  chemically synthesized
tccacttgacaaccaagtagat

SEQ ID NO: 38569 - DNA, 22 bp, Artificial Sequence
  chemically synthesized
gacaaccaagtagatctggatc

SEQ ID NO: 38570 - DNA, 22 bp, Artificial Sequence
  chemically synthesized
acaaccaagtagatctggatct

SEQ ID NO: 38571 - DNA, 22 bp, Artificial Sequence
  chemically synthesized
gatctatttcttttggtgccag

SEQ ID NO: 38572 - DNA, 22 bp, Artificial Sequence
  chemically synthesized
tttcttttggtgccagtatttt

SEQ ID NO: 38573 - DNA, 22 bp, Artificial Sequence
  chemically synthesized
cttttggtgccagtatttttaa

SEQ ID NO: 38574 - DNA, 22 bp, Artificial Sequence
  chemically synthesized
ttttggtgccagtatttttaaa

SEQ ID NO: 38575 - DNA, 22 bp, Artificial Sequence
  chemically synthesized
ttggtgccagtatttttaaaaa

SEQ ID NO: 38576 - DNA, 22 bp, Artificial Sequence
  chemically synthesized
tggtgccagtatttttaaaaag

SEQ ID NO: 38577 - DNA, 22 bp, Artificial Sequence
  chemically synthesized
ggtgccagtatttttaaaaaga

SEQ ID NO: 38578 - DNA, 22 bp, Artificial Sequence
  chemically synthesized
gtgccagtatttttaaaaagac

SEQ ID NO: 38579 - DNA, 22 bp, Artificial Sequence
  chemically synthesized
ttaaaaagacattattaaagca

SEQ ID NO: 38580 - DNA, 22 bp, Artificial Sequence
  chemically synthesized
taaaaagacattattaaagcaa

SEQ ID NO: 38581 - DNA, 22 bp, Artificial Sequence
  chemically synthesized
aaaaagacattattaaagcaaa

SEQ ID NO: 38582 - DNA, 22 bp, Artificial Sequence
  chemically synthesized
aaaagacattattaaagcaaat

SEQ ID NO: 38583 - DNA, 22 bp, Artificial Sequence
  chemically synthesized
ttaaagcaaatatcttcataaa

SEQ ID NO: 38584 - DNA, 22 bp, Artificial Sequence
  chemically synthesized
aagcaaatatcttcataaaatg

SEQ ID NO: 38585 - DNA, 22 bp, Artificial Sequence
  chemically synthesized
cataaaatgaactccttactag

SEQ ID NO: 38586 - DNA, 22 bp, Artificial Sequence
  chemically synthesized
ataaaatgaactccttactagt

SEQ ID NO: 38587 - DNA, 22 bp, Artificial Sequence
  chemically synthesized
cttactagtgtatttaattgcg

SEQ ID NO: 38588 - DNA, 22 bp, Artificial Sequence
  chemically synthesized
actagtgtatttaattgcgttc

SEQ ID NO: 38589 - DNA, 22 bp, Artificial Sequence
  chemically synthesized
ctagtgtatttaattgcgttcc

SEQ ID NO: 38590 - DNA, 22 bp, Artificial Sequence
  chemically synthesized
gtgtatttaattgcgttccagg

SEQ ID NO: 38591 - DNA, 22 bp, Artificial Sequence
  chemically synthesized
aattgcgttccagggcttttgc

SEQ ID NO: 38592 - DNA, 22 bp, Artificial Sequence
  chemically synthesized
attgcgttccagggcttttgca

SEQ ID NO: 38593 - DNA, 22 bp, Artificial Sequence
  chemically synthesized
cgttccagggcttttgcacatt

SEQ ID NO: 38594 - DNA, 22 bp, Artificial Sequence
  chemically synthesized
cagggcttttgcacattacaca

SEQ ID NO: 38595 - DNA, 22 bp, Artificial Sequence
  chemically synthesized
ttgcacattacacattcaattt

SEQ ID NO: 38596 - DNA, 22 bp, Artificial Sequence
  chemically synthesized
tgcacattacacattcaattta

SEQ ID NO: 38597 - DNA, 22 bp, Artificial Sequence
  chemically synthesized
gcacattacacattcaatttaa

SEQ ID NO: 38598 - DNA, 22 bp, Artificial Sequence
  chemically synthesized
cacattacacattcaatttaat

SEQ ID NO: 38599 - DNA, 22 bp, Artificial Sequence
  chemically synthesized
cacattcaatttaatcattgtt

SEQ ID NO: 38600 - DNA, 22 bp, Artificial Sequence
  chemically synthesized
aatttaatcattgtttaaaaaa

SEQ ID NO: 38601 - DNA, 22 bp, Artificial Sequence
  chemically synthesized
aatcattgtttaaaaaaaataa

SEQ ID NO: 38602 - DNA, 22 bp, Artificial Sequence
  chemically synthesized
atcattgtttaaaaaaaataaa

SEQ ID NO: 38603 - DNA, 22 bp, Artificial Sequence
  chemically synthesized
tttaaaaaaaataaaactttgg

SEQ ID NO: 38604 - DNA, 22 bp, Artificial Sequence
  chemically synthesized
aaaaaaaataaaactttgggca

SEQ ID NO: 38605 - DNA, 22 bp, Artificial Sequence
  chemically synthesized
aaaaaaataaaactttgggcaa

SEQ ID NO: 38606 - DNA, 22 bp, Artificial Sequence
  chemically synthesized
tgggcaaaacagcccatttctt

SEQ ID NO: 38607 - DNA, 22 bp, Artificial Sequence
  chemically synthesized
gggcaaaacagcccatttcttt

SEQ ID NO: 38608 - DNA, 22 bp, Artificial Sequence
  chemically synthesized
ggcaaaacagcccatttctttt

SEQ ID NO: 38609 - DNA, 22 bp, Artificial Sequence
  chemically synthesized
cttttaagctctcaccaggagc

SEQ ID NO: 38610 - DNA, 22 bp, Artificial Sequence
  chemically synthesized
ttttaagctctcaccaggagca

SEQ ID NO: 38611 - DNA, 22 bp, Artificial Sequence
  chemically synthesized
ttaagctctcaccaggagcaaa

SEQ ID NO: 38612 - DNA, 22 bp, Artificial Sequence
  chemically synthesized
taagctctcaccaggagcaaag

SEQ ID NO: 38613 - DNA, 22 bp, Artificial Sequence
  chemically synthesized
aagctctcaccaggagcaaagt

SEQ ID NO: 38614 - DNA, 22 bp, Artificial Sequence
  chemically synthesized
agctctcaccaggagcaaagta

SEQ ID NO: 38615 - DNA, 22 bp, Artificial Sequence
  chemically synthesized
tcaccaggagcaaagtagcttt

SEQ ID NO: 38616 - DNA, 22 bp, Artificial Sequence
  chemically synthesized
accaggagcaaagtagctttta

SEQ ID NO: 38617 - DNA, 22 bp, Artificial Sequence
  chemically synthesized
ttatactggtataatcagtttt

SEQ ID NO: 38618 - DNA, 22 bp, Artificial Sequence
  chemically synthesized
tatactggtataatcagttttg

SEQ ID NO: 38619 - DNA, 22 bp, Artificial Sequence
  chemically synthesized
atactggtataatcagttttgt

SEQ ID NO: 38620 - DNA, 22 bp, Artificial Sequence
  chemically synthesized
tactggtataatcagttttgtt

SEQ ID NO: 38621 - DNA, 22 bp, Artificial Sequence
  chemically synthesized
gtataatcagttttgtttataa

SEQ ID NO: 38622 - DNA, 22 bp, Artificial Sequence
  chemically synthesized
tgtttataaaattaaactaaag

SEQ ID NO: 38623 - DNA, 22 bp, Artificial Sequence
  chemically synthesized
gtttataaaattaaactaaagg

SEQ ID NO: 38624 - DNA, 22 bp, Artificial Sequence
  chemically synthesized
tttataaaattaaactaaagga

SEQ ID NO: 38625 - DNA, 22 bp, Artificial Sequence
  chemically synthesized
ataaaattaaactaaaggaaaa

SEQ ID NO: 38626 - DNA, 22 bp, Artificial Sequence
  chemically synthesized
taaaattaaactaaaggaaaaa

SEQ ID NO: 38627 - DNA, 22 bp, Artificial Sequence
  chemically synthesized
aactaaaggaaaaatgatgatt

SEQ ID NO: 38628 - DNA, 22 bp, Artificial Sequence
  chemically synthesized
aaggaaaaatgatgattaacta

SEQ ID NO: 38629 - DNA, 22 bp, Artificial Sequence
  chemically synthesized
actaggacataatgggtcatct

SEQ ID NO: 38630 - DNA, 22 bp, Artificial Sequence
  chemically synthesized
ggacataatgggtcatcttttt

SEQ ID NO: 38631 - DNA, 22 bp, Artificial Sequence
  chemically synthesized
tttaggtagccattgttgtgag

SEQ ID NO: 38632 - DNA, 22 bp, Artificial Sequence
  chemically synthesized
ttaggtagccattgttgtgaga

SEQ ID NO: 38633 - DNA, 22 bp, Artificial Sequence
  chemically synthesized
taggtagccattgttgtgagaa

SEQ ID NO: 38634 - DNA, 22 bp, Artificial Sequence
  chemically synthesized
aggtagccattgttgtgagaaa

SEQ ID NO: 38635 - DNA, 22 bp, Artificial Sequence
  chemically synthesized
ggtagccattgttgtgagaaat

SEQ ID NO: 38636 - DNA, 22 bp, Artificial Sequence
  chemically synthesized
ttgtgagaaatacaatatagaa

SEQ ID NO: 38637 - DNA, 22 bp, Artificial Sequence
  chemically synthesized
tgagaaatacaatatagaatta

SEQ ID NO: 38638 - DNA, 22 bp, Artificial Sequence
  chemically synthesized
tatgctagttcctaaggtttat

SEQ ID NO: 38639 - DNA, 22 bp, Artificial Sequence
  chemically synthesized
gttcctaaggtttattacctca

SEQ ID NO: 38640 - DNA, 22 bp, Artificial Sequence
  chemically synthesized
ctaaggtttattacctcaccca

SEQ ID NO: 38641 - DNA, 22 bp, Artificial Sequence
  chemically synthesized
aggtttattacctcacccaatg

SEQ ID NO: 38642 - DNA, 22 bp, Artificial Sequence
  chemically synthesized
attacctcacccaatgctgaat

SEQ ID NO: 38643 - DNA, 22 bp, Artificial Sequence
  chemically synthesized
ttacctcacccaatgctgaatt

SEQ ID NO: 38644 - DNA, 22 bp, Artificial Sequence
  chemically synthesized
cctcacccaatgctgaattaag

SEQ ID NO: 38645 - DNA, 22 bp, Artificial Sequence
  chemically synthesized
acccaatgctgaattaagctac

SEQ ID NO: 38646 - DNA, 22 bp, Artificial Sequence
  chemically synthesized
aattaagctacaagtttataac

SEQ ID NO: 38647 - DNA, 22 bp, Artificial Sequence
  chemically synthesized
agctacaagtttataacaagta

SEQ ID NO: 38648 - DNA, 22 bp, Artificial Sequence
  chemically synthesized
caagtttataacaagtagaaag

SEQ ID NO: 38649 - DNA, 22 bp, Artificial Sequence
  chemically synthesized
ataacaagtagaaagaaccatc

SEQ ID NO: 38650 - DNA, 22 bp, Artificial Sequence
  chemically synthesized
taacaagtagaaagaaccatcg

SEQ ID NO: 38651 - DNA, 22 bp, Artificial Sequence
  chemically synthesized
taatagatccaaggcactcata

SEQ ID NO: 38652 - DNA, 22 bp, Artificial Sequence
  chemically synthesized
aatagatccaaggcactcatat

SEQ ID NO: 38653 - DNA, 22 bp, Artificial Sequence
  chemically synthesized
atagatccaaggcactcatatt

SEQ ID NO: 38654 - DNA, 22 bp, Artificial Sequence
  chemically synthesized
atattttaaaaccaaatgatag

SEQ ID NO: 38655 - DNA, 22 bp, Artificial Sequence
  chemically synthesized
taaaaccaaatgatagaataaa

SEQ ID NO: 38656 - DNA, 22 bp, Artificial Sequence
  chemically synthesized
aaaaccaaatgatagaataaac

SEQ ID NO: 38657 - DNA, 22 bp, Artificial Sequence
  chemically synthesized
aaaccaaatgatagaataaact

SEQ ID NO: 38658 - DNA, 22 bp, Artificial Sequence
  chemically synthesized
gttctgtttttctgttaatttg

SEQ ID NO: 38659 - DNA, 22 bp, Artificial Sequence
  chemically synthesized
ttctgtttttctgttaatttgt

SEQ ID NO: 38660 - DNA, 22 bp, Artificial Sequence
  chemically synthesized
tgtttttctgttaatttgtcaa

SEQ ID NO: 38661 - DNA, 22 bp, Artificial Sequence
  chemically synthesized
tttttctgttaatttgtcaatt

SEQ ID NO: 38662 - DNA, 22 bp, Artificial Sequence
  chemically synthesized
ttctgttaatttgtcaattcaa

SEQ ID NO: 38663 - DNA, 22 bp, Artificial Sequence
  chemically synthesized
tctgttaatttgtcaattcaag

SEQ ID NO: 38664 - DNA, 22 bp, Artificial Sequence
  chemically synthesized
ctgttaatttgtcaattcaagg

SEQ ID NO: 38665 - DNA, 22 bp, Artificial Sequence
  chemically synthesized
tgttaatttgtcaattcaaggc

SEQ ID NO: 38666 - DNA, 22 bp, Artificial Sequence
  chemically synthesized
ttaatttgtcaattcaaggcct

SEQ ID NO: 38667 - DNA, 22 bp, Artificial Sequence
  chemically synthesized
atttgtcaattcaaggcctttt

SEQ ID NO: 38668 - DNA, 22 bp, Artificial Sequence
  chemically synthesized
gtcaattcaaggccttttttct

SEQ ID NO: 38669 - DNA, 22 bp, Artificial Sequence
  chemically synthesized
tcaattcaaggccttttttctt

SEQ ID NO: 38670 - DNA, 22 bp, Artificial Sequence
  chemically synthesized
aaggccttttttcttcctttcc

SEQ ID NO: 38671 - DNA, 22 bp, Artificial Sequence
  chemically synthesized
ttttcttcctttccaattgata

SEQ ID NO: 38672 - DNA, 22 bp, Artificial Sequence
  chemically synthesized
tttcttcctttccaattgatac

SEQ ID NO: 38673 - DNA, 22 bp, Artificial Sequence
  chemically synthesized
ttcttcctttccaattgataca

SEQ ID NO: 38674 - DNA, 22 bp, Artificial Sequence
  chemically synthesized
tcttcctttccaattgatacat

SEQ ID NO: 38675 - DNA, 22 bp, Artificial Sequence
  chemically synthesized
cttcctttccaattgatacatt

SEQ ID NO: 38676 - DNA, 22 bp, Artificial Sequence
  chemically synthesized
ttcctttccaattgatacattt

SEQ ID NO: 38677 - DNA, 22 bp, Artificial Sequence
  chemically synthesized
cctttccaattgatacatttaa

SEQ ID NO: 38678 - DNA, 22 bp, Artificial Sequence
  chemically synthesized
ctttccaattgatacatttaac

SEQ ID NO: 38679 - DNA, 22 bp, Artificial Sequence
  chemically synthesized
tccaattgatacatttaaccct

SEQ ID NO: 38680 - DNA, 22 bp, Artificial Sequence
  chemically synthesized
ccaattgatacatttaaccctt

SEQ ID NO: 38681 - DNA, 22 bp, Artificial Sequence
  chemically synthesized
caattgatacatttaacccttt

SEQ ID NO: 38682 - DNA, 22 bp, Artificial Sequence
  chemically synthesized
atacatttaaccctttagagac

SEQ ID NO: 38683 - DNA, 22 bp, Artificial Sequence
  chemically synthesized
aaccctttagagacagacattt

SEQ ID NO: 38684 - DNA, 22 bp, Artificial Sequence
  chemically synthesized
accctttagagacagacattta

SEQ ID NO: 38685 - DNA, 22 bp, Artificial Sequence
  chemically synthesized
tagagacagacatttagctcat

SEQ ID NO: 38686 - DNA, 22 bp, Artificial Sequence
  chemically synthesized
agagacagacatttagctcata

SEQ ID NO: 38687 - DNA, 22 bp, Artificial Sequence
  chemically synthesized
gagacagacatttagctcatag

SEQ ID NO: 38688 - DNA, 22 bp, Artificial Sequence
  chemically synthesized
agctcatagagattttttttca

SEQ ID NO: 38689 - DNA, 22 bp, Artificial Sequence
  chemically synthesized
gctcatagagattttttttcag

SEQ ID NO: 38690 - DNA, 22 bp, Artificial Sequence
  chemically synthesized
atagagattttttttcagtgct

SEQ ID NO: 38691 - DNA, 22 bp, Artificial Sequence
  chemically synthesized
tttttcagtgctatctattctg

SEQ ID NO: 38692 - DNA, 22 bp, Artificial Sequence
  chemically synthesized
ttttcagtgctatctattctgt

SEQ ID NO: 38693 - DNA, 22 bp, Artificial Sequence
  chemically synthesized
tttcagtgctatctattctgtc

SEQ ID NO: 38694 - DNA, 22 bp, Artificial Sequence
  chemically synthesized
ttcagtgctatctattctgtct

SEQ ID NO: 38695 - DNA, 22 bp, Artificial Sequence
  chemically synthesized
tcagtgctatctattctgtcta

SEQ ID NO: 38696 - DNA, 22 bp, Artificial Sequence
  chemically synthesized
cagtgctatctattctgtctat

SEQ ID NO: 38697 - DNA, 22 bp, Artificial Sequence
  chemically synthesized
agtgctatctattctgtctata

SEQ ID NO: 38698 - DNA, 22 bp, Artificial Sequence
  chemically synthesized
tctattctgtctatagagggtt

SEQ ID NO: 38699 - DNA, 22 bp, Artificial Sequence
  chemically synthesized
ttctgtctatagagggttaatc

SEQ ID NO: 38700 - DNA, 22 bp, Artificial Sequence
  chemically synthesized
tgtctatagagggttaatccaa

SEQ ID NO: 38701 - DNA, 22 bp, Artificial Sequence
  chemically synthesized
tctatagagggttaatccaaag

SEQ ID NO: 38702 - DNA, 22 bp, Artificial Sequence
  chemically synthesized
tagagggttaatccaaagactg

SEQ ID NO: 38703 - DNA, 22 bp, Artificial Sequence
  chemically synthesized
atccaaagactgtttttcctcc

SEQ ID NO: 38704 - DNA, 22 bp, Artificial Sequence
  chemically synthesized
tttttcctcctcacgttataaa

SEQ ID NO: 38705 - DNA, 22 bp, Artificial Sequence
  chemically synthesized
ttcctcctcacgttataaaata

SEQ ID NO: 38706 - DNA, 22 bp, Artificial Sequence
  chemically synthesized
tcctcctcacgttataaaataa

SEQ ID NO: 38707 - DNA, 22 bp, Artificial Sequence
  chemically synthesized
cctcctcacgttataaaataaa

SEQ ID NO: 38708 - DNA, 22 bp, Artificial Sequence
  chemically synthesized
ctcctcacgttataaaataaaa

SEQ ID NO: 38709 - DNA, 22 bp, Artificial Sequence
  chemically synthesized
ctcacgttataaaataaaactg

SEQ ID NO: 38710 - DNA, 22 bp, Artificial Sequence
  chemically synthesized
acgttataaaataaaactgtac

SEQ ID NO: 38711 - DNA, 22 bp, Artificial Sequence
  chemically synthesized
taaaataaaactgtacatgata

SEQ ID NO: 38712 - DNA, 22 bp, Artificial Sequence
  chemically synthesized
tacatgatatgtattacagaat

SEQ ID NO: 38713 - DNA, 22 bp, Artificial Sequence
  chemically synthesized
cagaatgtatgcagcatggtct

SEQ ID NO: 38714 - DNA, 22 bp, Artificial Sequence
  chemically synthesized
tttctctctctctctctttttc

SEQ ID NO: 38715 - DNA, 22 bp, Artificial Sequence
  chemically synthesized
ttctctctctctctctttttct

SEQ ID NO: 38716 - DNA, 22 bp, Artificial Sequence
  chemically synthesized
tctctctctctctctttttctc

SEQ ID NO: 38717 - DNA, 22 bp, Artificial Sequence
  chemically synthesized
ctctctctctctctttttctct

SEQ ID NO: 38718 - DNA, 22 bp, Artificial Sequence
  chemically synthesized
tctctctctctctttttctctc

SEQ ID NO: 38719 - DNA, 22 bp, Artificial Sequence
  chemically synthesized
tctctctctctttttctctcag

SEQ ID NO: 38720 - DNA, 22 bp, Artificial Sequence
  chemically synthesized
tctctctctttttctctcagaa

SEQ ID NO: 38721 - DNA, 22 bp, Artificial Sequence
  chemically synthesized
tctctctttttctctcagaacg

SEQ ID NO: 38722 - DNA, 22 bp, Artificial Sequence
  chemically synthesized
tctctttttctctcagaacgga

SEQ ID NO: 38723 - DNA, 22 bp, Artificial Sequence
  chemically synthesized
tctttttctctcagaacggaac

SEQ ID NO: 38724 - DNA, 22 bp, Artificial Sequence
  chemically synthesized
tttttctctcagaacggaactg

SEQ ID NO: 38725 - DNA, 22 bp, Artificial Sequence
  chemically synthesized
tttctctcagaacggaactgga

SEQ ID NO: 38726 - DNA, 22 bp, Artificial Sequence
  chemically synthesized
ttctctcagaacggaactggaa

SEQ ID NO: 38727 - DNA, 22 bp, Artificial Sequence
  chemically synthesized
tctctcagaacggaactggaaa

SEQ ID NO: 38728 - DNA, 22 bp, Artificial Sequence
  chemically synthesized
ctctcagaacggaactggaaac

SEQ ID NO: 38729 - DNA, 22 bp, Artificial Sequence
  chemically synthesized
tctcagaacggaactggaaaca

SEQ ID NO: 38730 - DNA, 22 bp, Artificial Sequence
  chemically synthesized
tcagaacggaactggaaacagc

SEQ ID NO: 38731 - DNA, 22 bp, Artificial Sequence
  chemically synthesized
agaacggaactggaaacagcaa

SEQ ID NO: 38732 - DNA, 22 bp, Artificial Sequence
  chemically synthesized
gaaacagcaacatgtttgctca

SEQ ID NO: 38733 - DNA, 22 bp, Artificial Sequence
  chemically synthesized
gctcagcaacgaattagggaca

SEQ ID NO: 38734 - DNA, 22 bp, Artificial Sequence
  chemically synthesized
ctcagcaacgaattagggacaa

SEQ ID NO: 38735 - DNA, 22 bp, Artificial Sequence
  chemically synthesized
agcaacgaattagggacaattt

SEQ ID NO: 38736 - DNA, 22 bp, Artificial Sequence
  chemically synthesized
gggacaatttaaaatagccata

SEQ ID NO: 38737 - DNA, 22 bp, Artificial Sequence
  chemically synthesized
aaaatagccataacataccata

SEQ ID NO: 38738 - DNA, 22 bp, Artificial Sequence
  chemically synthesized
aaatagccataacataccatac

SEQ ID NO: 38739 - DNA, 22 bp, Artificial Sequence
  chemically synthesized
tctaagtttaaaaaaaaacata

SEQ ID NO: 38740 - DNA, 22 bp, Artificial Sequence
  chemically synthesized
agtttaaaaaaaaacatacaca

SEQ ID NO: 38741 - DNA, 22 bp, Artificial Sequence
  chemically synthesized
aaaaaaaaacatacacaacatg

SEQ ID NO: 38742 - DNA, 22 bp, Artificial Sequence
  chemically synthesized
aaaaaaaacatacacaacatgt

SEQ ID NO: 38743 - DNA, 22 bp, Artificial Sequence
  chemically synthesized
ttgcacaagagaaaggctcaaa

SEQ ID NO: 38744 - DNA, 22 bp, Artificial Sequence
  chemically synthesized
cacaagagaaaggctcaaagtt

SEQ ID NO: 38745 - DNA, 22 bp, Artificial Sequence
  chemically synthesized
aaagtttgcgtaaaatgcaata

SEQ ID NO: 38746 - DNA, 22 bp, Artificial Sequence
  chemically synthesized
gcgtaaaatgcaatagtattgc

SEQ ID NO: 38747 - DNA, 22 bp, Artificial Sequence
  chemically synthesized
cgtaaaatgcaatagtattgcc

SEQ ID NO: 38748 - DNA, 22 bp, Artificial Sequence
  chemically synthesized
ccccatacagatcatgcattca

SEQ ID NO: 38749 - DNA, 22 bp, Artificial Sequence
  chemically synthesized
aaacggtgagaacataaaggaa

SEQ ID NO: 38750 - DNA, 22 bp, Artificial Sequence
  chemically synthesized
gtgacaagcactctcatattct

SEQ ID NO: 38751 - DNA, 22 bp, Artificial Sequence
  chemically synthesized
tcatattcttagcttcgttact

SEQ ID NO: 38752 - DNA, 22 bp, Artificial Sequence
  chemically synthesized
atattcttagcttcgttacttc

SEQ ID NO: 38753 - DNA, 22 bp, Artificial Sequence
  chemically synthesized
ttagcttcgttacttctgtttg

SEQ ID NO: 38754 - DNA, 22 bp, Artificial Sequence
  chemically synthesized
agcttcgttacttctgtttgtt

SEQ ID NO: 38755 - DNA, 22 bp, Artificial Sequence
  chemically synthesized
gcttcgttacttctgtttgttt

SEQ ID NO: 38756 - DNA, 22 bp, Artificial Sequence
  chemically synthesized
cgttacttctgtttgtttgttt

SEQ ID NO: 38757 - DNA, 22 bp, Artificial Sequence
  chemically synthesized
gttacttctgtttgtttgtttg

SEQ ID NO: 38758 - DNA, 22 bp, Artificial Sequence
  chemically synthesized
cttctgtttgtttgtttgtttg

SEQ ID NO: 38759 - DNA, 22 bp, Artificial Sequence
  chemically synthesized
ctgtttgtttgtttgtttgttt

SEQ ID NO: 38760 - DNA, 22 bp, Artificial Sequence
  chemically synthesized
tgtttgtttgtttgtttgttta

SEQ ID NO: 38761 - DNA, 22 bp, Artificial Sequence
  chemically synthesized
tttgtttgtttgtttgtttaaa

SEQ ID NO: 38762 - DNA, 22 bp, Artificial Sequence
  chemically synthesized
gtttgtttgtttgtttaaatca

SEQ ID NO: 38763 - DNA, 22 bp, Artificial Sequence
  chemically synthesized
tttgtttgtttgtttaaatcac

SEQ ID NO: 38764 - DNA, 22 bp, Artificial Sequence
  chemically synthesized
gtttgtttgtttaaatcacatg

SEQ ID NO: 38765 - DNA, 22 bp, Artificial Sequence
  chemically synthesized
tttgtttgtttaaatcacatgg

SEQ ID NO: 38766 - DNA, 22 bp, Artificial Sequence
  chemically synthesized
gtttgtttaaatcacatgggac

SEQ ID NO: 38767 - DNA, 22 bp, Artificial Sequence
  chemically synthesized
tttgtttaaatcacatgggact

SEQ ID NO: 38768 - DNA, 22 bp, Artificial Sequence
  chemically synthesized
gtttaaatcacatgggactaga

SEQ ID NO: 38769 - DNA, 22 bp, Artificial Sequence
  chemically synthesized
tttaaatcacatgggactagaa

SEQ ID NO: 38770 - DNA, 22 bp, Artificial Sequence
  chemically synthesized
aaatcacatgggactagaaaaa

SEQ ID NO: 38771 - DNA, 22 bp, Artificial Sequence
  chemically synthesized
aatcacatgggactagaaaaaa

SEQ ID NO: 38772 - DNA, 22 bp, Artificial Sequence
  chemically synthesized
gaaaaaaatcctacagggagtg

SEQ ID NO: 38773 - DNA, 22 bp, Artificial Sequence
  chemically synthesized
cagggagtggggctggagggcg

SEQ ID NO: 38774 - DNA, 22 bp, Artificial Sequence
  chemically synthesized
gagggcgatggggaaggggagt

SEQ ID NO: 38775 - DNA, 22 bp, Artificial Sequence
  chemically synthesized
atatacctctattcagttttta

SEQ ID NO: 38776 - DNA, 22 bp, Artificial Sequence
  chemically synthesized
tattcagtttttatatcattat

SEQ ID NO: 38777 - DNA, 22 bp, Artificial Sequence
  chemically synthesized
ttcagtttttatatcattattc

SEQ ID NO: 38778 - DNA, 22 bp, Artificial Sequence
  chemically synthesized
agtttttatatcattattcaac

SEQ ID NO: 38779 - DNA, 22 bp, Artificial Sequence
  chemically synthesized
ttatatcattattcaacactcg

SEQ ID NO: 38780 - DNA, 22 bp, Artificial Sequence
  chemically synthesized
tatatcattattcaacactcga

SEQ ID NO: 38781 - DNA, 22 bp, Artificial Sequence
  chemically synthesized
atatcattattcaacactcgat

SEQ ID NO: 38782 - DNA, 22 bp, Artificial Sequence
  chemically synthesized
tatcattattcaacactcgatc

SEQ ID NO: 38783 - DNA, 22 bp, Artificial Sequence
  chemically synthesized
ttcaacactcgatcactgtgcc

SEQ ID NO: 38784 - DNA, 22 bp, Artificial Sequence
  chemically synthesized
aacactcgatcactgtgccatt

SEQ ID NO: 38785 - DNA, 22 bp, Artificial Sequence
  chemically synthesized
gatcactgtgccattttttcat

SEQ ID NO: 38786 - DNA, 22 bp, Artificial Sequence
  chemically synthesized
tgccattttttcatgtgtttct

SEQ ID NO: 38787 - DNA, 22 bp, Artificial Sequence
  chemically synthesized
tttcatgtgtttctccagggta

SEQ ID NO: 38788 - DNA, 22 bp, Artificial Sequence
  chemically synthesized
ttcatgtgtttctccagggtac

SEQ ID NO: 38789 - DNA, 22 bp, Artificial Sequence
  chemically synthesized
tcatgtgtttctccagggtact

SEQ ID NO: 38790 - DNA, 22 bp, Artificial Sequence
  chemically synthesized
catgtgtttctccagggtactg

SEQ ID NO: 38791 - DNA, 22 bp, Artificial Sequence
  chemically synthesized
atgtgtttctccagggtactgt

SEQ ID NO: 38792 - DNA, 22 bp, Artificial Sequence
  chemically synthesized
ctccagggtactgtacacgcta

SEQ ID NO: 38793 - DNA, 22 bp, Artificial Sequence
  chemically synthesized
tccagggtactgtacacgctaa

SEQ ID NO: 38794 - DNA, 22 bp, Artificial Sequence
  chemically synthesized
cagggtactgtacacgctaaaa

SEQ ID NO: 38795 - DNA, 22 bp, Artificial Sequence
  chemically synthesized
tacacgctaaaaggcatcttac

SEQ ID NO: 38796 - DNA, 22 bp, Artificial Sequence
  chemically synthesized
aaaggcatcttacaaatttcac

SEQ ID NO: 38797 - DNA, 22 bp, Artificial Sequence
  chemically synthesized
acaaatttcacatttgtaaacg

SEQ ID NO: 38798 - DNA, 22 bp, Artificial Sequence
  chemically synthesized
caaatttcacatttgtaaacgt

SEQ ID NO: 38799 - DNA, 22 bp, Artificial Sequence
  chemically synthesized
cacatttgtaaacgtccttccc

SEQ ID NO: 38800 - DNA, 22 bp, Artificial Sequence
  chemically synthesized
acatttgtaaacgtccttcccc

SEQ ID NO: 38801 - DNA, 22 bp, Artificial Sequence
  chemically synthesized
gtaaacgtccttccccacctgg

SEQ ID NO: 38802 - DNA, 22 bp, Artificial Sequence
  chemically synthesized
taaacgtccttccccacctggc

SEQ ID NO: 38803 - DNA, 22 bp, Artificial Sequence
  chemically synthesized
ccccacctggccatgcgttttc

SEQ ID NO: 38804 - DNA, 22 bp, Artificial Sequence
  chemically synthesized
cccacctggccatgcgttttca

SEQ ID NO: 38805 - DNA, 22 bp, Artificial Sequence
  chemically synthesized
gccatgcgttttcatgtgcctg

SEQ ID NO: 38806 - DNA, 22 bp, Artificial Sequence
  chemically synthesized
tcatgtgcctggtgagcttgct

SEQ ID NO: 38807 - DNA, 22 bp, Artificial Sequence
  chemically synthesized
catgtgcctggtgagcttgcta

SEQ ID NO: 38808 - DNA, 22 bp, Artificial Sequence
  chemically synthesized
atgtgcctggtgagcttgctac

SEQ ID NO: 38809 - DNA, 22 bp, Artificial Sequence
  chemically synthesized
gtgagcttgctactctgggcac

SEQ ID NO: 38810 - DNA, 22 bp, Artificial Sequence
  chemically synthesized
gctactctgggcacaggcatag

SEQ ID NO: 38811 - DNA, 22 bp, Artificial Sequence
  chemically synthesized
ctactctgggcacaggcatagt

SEQ ID NO: 38812 - DNA, 22 bp, Artificial Sequence
  chemically synthesized
ctctgggcacaggcatagttgc

SEQ ID NO: 38813 - DNA, 22 bp, Artificial Sequence
  chemically synthesized
tgggcacaggcatagttgcaca

SEQ ID NO: 38814 - DNA, 22 bp, Artificial Sequence
  chemically synthesized
ggcacaggcatagttgcacagc

SEQ ID NO: 38815 - DNA, 22 bp, Artificial Sequence
  chemically synthesized
cacagctcgcatttataaggcc

SEQ ID NO: 38816 - DNA, 22 bp, Artificial Sequence
  chemically synthesized
gcatttataaggcctttcgccc

SEQ ID NO: 38817 - DNA, 22 bp, Artificial Sequence
  chemically synthesized
ataaggcctttcgcccgtgtgg

SEQ ID NO: 38818 - DNA, 22 bp, Artificial Sequence
  chemically synthesized
taaggcctttcgcccgtgtggc

SEQ ID NO: 38819 - DNA, 22 bp, Artificial Sequence
  chemically synthesized
tcgcccgtgtggcttctcctgt

SEQ ID NO: 38820 - DNA, 22 bp, Artificial Sequence
  chemically synthesized
cgcccgtgtggcttctcctgtg

SEQ ID NO: 38821 - DNA, 22 bp, Artificial Sequence
  chemically synthesized
gcccgtgtggcttctcctgtgg

SEQ ID NO: 38822 - DNA, 22 bp, Artificial Sequence
  chemically synthesized
ctcctgtggacagtgagattgc

SEQ ID NO: 38823 - DNA, 22 bp, Artificial Sequence
  chemically synthesized
tcctgtggacagtgagattgct

SEQ ID NO: 38824 - DNA, 22 bp, Artificial Sequence
  chemically synthesized
ctgtggacagtgagattgctac

SEQ ID NO: 38825 - DNA, 22 bp, Artificial Sequence
  chemically synthesized
tggacagtgagattgctacagt

SEQ ID NO: 38826 - DNA, 22 bp, Artificial Sequence
  chemically synthesized
ctacagttcttgaagactttcc

SEQ ID NO: 38827 - DNA, 22 bp, Artificial Sequence
  chemically synthesized
cagttcttgaagactttcccac

SEQ ID NO: 38828 - DNA, 22 bp, Artificial Sequence
  chemically synthesized
ttgaagactttcccacagtact

SEQ ID NO: 38829 - DNA, 22 bp, Artificial Sequence
  chemically synthesized
gaagactttcccacagtactca

SEQ ID NO: 38830 - DNA, 22 bp, Artificial Sequence
  chemically synthesized
aagactttcccacagtactcac

SEQ ID NO: 38831 - DNA, 22 bp, Artificial Sequence
  chemically synthesized
tcccacagtactcacaagtgtc

SEQ ID NO: 38832 - DNA, 22 bp, Artificial Sequence
  chemically synthesized
cccacagtactcacaagtgtcg

SEQ ID NO: 38833 - DNA, 22 bp, Artificial Sequence
  chemically synthesized
ccacagtactcacaagtgtcgc

SEQ ID NO: 38834 - DNA, 22 bp, Artificial Sequence
  chemically synthesized
acaagtgtcgctgcgtctgccc

SEQ ID NO: 38835 - DNA, 22 bp, Artificial Sequence
  chemically synthesized
cgtctgccctcttttgagctgg

SEQ ID NO: 38836 - DNA, 22 bp, Artificial Sequence
  chemically synthesized
ccctcttttgagctgggcctgc

SEQ ID NO: 38837 - DNA, 22 bp, Artificial Sequence
  chemically synthesized
ttttgagctgggcctgcccggg

SEQ ID NO: 38838 - DNA, 22 bp, Artificial Sequence
  chemically synthesized
ttgagctgggcctgcccgggcc

SEQ ID NO: 38839 - DNA, 22 bp, Artificial Sequence
  chemically synthesized
tgagctgggcctgcccgggccc

SEQ ID NO: 38840 - DNA, 22 bp, Artificial Sequence
  chemically synthesized
gagctgggcctgcccgggcccg

SEQ ID NO: 38841 - DNA, 22 bp, Artificial Sequence
  chemically synthesized
agctgggcctgcccgggcccgg

SEQ ID NO: 38842 - DNA, 22 bp, Artificial Sequence
  chemically synthesized
ggcctgcccgggcccggaccac

SEQ ID NO: 38843 - DNA, 22 bp, Artificial Sequence
  chemically synthesized
cccgggcccggaccactaatat

SEQ ID NO: 38844 - DNA, 22 bp, Artificial Sequence
  chemically synthesized
atatggggcgtgctccctccac

SEQ ID NO: 38845 - DNA, 22 bp, Artificial Sequence
  chemically synthesized
cctccacttcccgtgccgctgc

SEQ ID NO: 38846 - DNA, 22 bp, Artificial Sequence
  chemically synthesized
cacttcccgtgccgctgcgccc

SEQ ID NO: 38847 - DNA, 22 bp, Artificial Sequence
  chemically synthesized
cccgtgccgctgcgccccgaga

SEQ ID NO: 38848 - DNA, 22 bp, Artificial Sequence
  chemically synthesized
ccgtgccgctgcgccccgagat

SEQ ID NO: 38849 - DNA, 22 bp, Artificial Sequence
  chemically synthesized
cgccccgagatccctccgtcca

SEQ ID NO: 38850 - DNA, 22 bp, Artificial Sequence
  chemically synthesized
cgtccagctccccgggcggtgt

SEQ ID NO: 38851 - DNA, 22 bp, Artificial Sequence
  chemically synthesized
cccgggcggtgtggagaagcgc

SEQ ID NO: 38852 - DNA, 22 bp, Artificial Sequence
  chemically synthesized
ccgttctccgaggagtgctccg

SEQ ID NO: 38853 - DNA, 22 bp, Artificial Sequence
  chemically synthesized
tccgaggagtgctccgacgagg

SEQ ID NO: 38854 - DNA, 22 bp, Artificial Sequence
  chemically synthesized
cgaggagtgctccgacgaggag

SEQ ID NO: 38855 - DNA, 22 bp, Artificial Sequence
  chemically synthesized
cgacgaggaggcaaaaggcgat

SEQ ID NO: 38856 - DNA, 22 bp, Artificial Sequence
  chemically synthesized
tctggagtctccgaagctaagg

SEQ ID NO: 38857 - DNA, 22 bp, Artificial Sequence
  chemically synthesized
gagtctccgaagctaaggaagg

SEQ ID NO: 38858 - DNA, 22 bp, Artificial Sequence
  chemically synthesized
cgaagctaaggaagggatcttt

SEQ ID NO: 38859 - DNA, 22 bp, Artificial Sequence
  chemically synthesized
aggaagggatctttgagctgcc

SEQ ID NO: 38860 - DNA, 22 bp, Artificial Sequence
  chemically synthesized
tgagctgcctggaggccgcgta

SEQ ID NO: 38861 - DNA, 22 bp, Artificial Sequence
  chemically synthesized
gagctgcctggaggccgcgtag

SEQ ID NO: 38862 - DNA, 22 bp, Artificial Sequence
  chemically synthesized
agctgcctggaggccgcgtagc

SEQ ID NO: 38863 - DNA, 22 bp, Artificial Sequence
  chemically synthesized
cctggaggccgcgtagccggcg

SEQ ID NO: 38864 - DNA, 22 bp, Artificial Sequence
  chemically synthesized
gaggccgcgtagccggcgagcc

SEQ ID NO: 38865 - DNA, 22 bp, Artificial Sequence
  chemically synthesized
cgagtacacgttctccgtgttg

SEQ ID NO: 38866 - DNA, 22 bp, Artificial Sequence
  chemically synthesized
tccgtgttgggcatcgcggccg

SEQ ID NO: 38867 - DNA, 22 bp, Artificial Sequence
  chemically synthesized
cgtgttgggcatcgcggccggg

SEQ ID NO: 38868 - DNA, 22 bp, Artificial Sequence
  chemically synthesized
ggcatcgcggccgggggcaggt

SEQ ID NO: 38869 - DNA, 22 bp, Artificial Sequence
  chemically synthesized
cttctcgagcttgatgcgctta

SEQ ID NO: 38870 - DNA, 22 bp, Artificial Sequence
  chemically synthesized
ctcgagcttgatgcgcttagag

SEQ ID NO: 38871 - DNA, 22 bp, Artificial Sequence
  chemically synthesized
tcgagcttgatgcgcttagaga

SEQ ID NO: 38872 - DNA, 22 bp, Artificial Sequence
  chemically synthesized
gagcttgatgcgcttagagaag

SEQ ID NO: 38873 - DNA, 22 bp, Artificial Sequence
  chemically synthesized
gatgcgcttagagaaggggctc

SEQ ID NO: 38874 - DNA, 22 bp, Artificial Sequence
  chemically synthesized
atgcgcttagagaaggggctca

SEQ ID NO: 38875 - DNA, 22 bp, Artificial Sequence
  chemically synthesized
agagaaggggctcagcgagctg

SEQ ID NO: 38876 - DNA, 22 bp, Artificial Sequence
  chemically synthesized
gagaaggggctcagcgagctgg

SEQ ID NO: 38877 - DNA, 22 bp, Artificial Sequence
  chemically synthesized
agcgagctggggctgcccagca

SEQ ID NO: 38878 - DNA, 22 bp, Artificial Sequence
  chemically synthesized
gggctgcccagcagcagctttt

SEQ ID NO: 38879 - DNA, 22 bp, Artificial Sequence
  chemically synthesized
cccagcagcagctttttggaca

SEQ ID NO: 38880 - DNA, 22 bp, Artificial Sequence
  chemically synthesized
tttggacaggccccccgaggcc

SEQ ID NO: 38881 - DNA, 22 bp, Artificial Sequence
  chemically synthesized
ttggacaggccccccgaggccg

SEQ ID NO: 38882 - DNA, 22 bp, Artificial Sequence
  chemically synthesized
tggacaggccccccgaggccga

SEQ ID NO: 38883 - DNA, 22 bp, Artificial Sequence
  chemically synthesized
ggacaggccccccgaggccgac

SEQ ID NO: 38884 - DNA, 22 bp, Artificial Sequence
  chemically synthesized
gacaggccccccgaggccgact

SEQ ID NO: 38885 - DNA, 22 bp, Artificial Sequence
  chemically synthesized
gcccggggagcagccgcggcca

SEQ ID NO: 38886 - DNA, 22 bp, Artificial Sequence
  chemically synthesized
acagtgccatcgtctatgcggt

SEQ ID NO: 38887 - DNA, 22 bp, Artificial Sequence
  chemically synthesized
tgcggtccgactcgccggccac

SEQ ID NO: 38888 - DNA, 22 bp, Artificial Sequence
  chemically synthesized
gccggccaccgagtcttcgtcg

SEQ ID NO: 38889 - DNA, 22 bp, Artificial Sequence
  chemically synthesized
cgtcgcaagtgtccctgtggcc

SEQ ID NO: 38890 - DNA, 22 bp, Artificial Sequence
  chemically synthesized
gtcgcaagtgtccctgtggccc

SEQ ID NO: 38891 - DNA, 22 bp, Artificial Sequence
  chemically synthesized
tggccctcggcctcggccaggt

SEQ ID NO: 38892 - DNA, 22 bp, Artificial Sequence
  chemically synthesized
ggcctcggccaggtggccgcgc

SEQ ID NO: 38893 - DNA, 22 bp, Artificial Sequence
  chemically synthesized
ggccaggtggccgcgcttatgc

SEQ ID NO: 38894 - DNA, 22 bp, Artificial Sequence
  chemically synthesized
atgcttctcgcccaggacctgg

SEQ ID NO: 38895 - DNA, 22 bp, Artificial Sequence
  chemically synthesized
tgcttctcgcccaggacctggt

SEQ ID NO: 38896 - DNA, 22 bp, Artificial Sequence
  chemically synthesized
ctcgcccaggacctggtggaag

SEQ ID NO: 38897 - DNA, 22 bp, Artificial Sequence
  chemically synthesized
tcgcccaggacctggtggaagg

SEQ ID NO: 38898 - DNA, 22 bp, Artificial Sequence
  chemically synthesized
gcccaggacctggtggaaggcc

SEQ ID NO: 38899 - DNA, 22 bp, Artificial Sequence
  chemically synthesized
gtggaaggcctcgctgaagtgc

SEQ ID NO: 38900 - DNA, 22 bp, Artificial Sequence
  chemically synthesized
gctgaagtgctgcatggagctg

SEQ ID NO: 38901 - DNA, 22 bp, Artificial Sequence
  chemically synthesized
aagtgctgcatggagctgagca

SEQ ID NO: 38902 - DNA, 22 bp, Artificial Sequence
  chemically synthesized
catggagctgagcaccatgccc

SEQ ID NO: 38903 - DNA, 22 bp, Artificial Sequence
  chemically synthesized
agcaccatgccctgcatgacgt

SEQ ID NO: 38904 - DNA, 22 bp, Artificial Sequence
  chemically synthesized
catgacgtcgggcagggcgcgg

SEQ ID NO: 38905 - DNA, 22 bp, Artificial Sequence
  chemically synthesized
tcgtcgcccacgcccacgaccg

SEQ ID NO: 38906 - DNA, 22 bp, Artificial Sequence
  chemically synthesized
gtcgcccacgcccacgaccgcg

SEQ ID NO: 38907 - DNA, 22 bp, Artificial Sequence
  chemically synthesized
ttctcgtggtggcgcgccgcct

SEQ ID NO: 38908 - DNA, 22 bp, Artificial Sequence
  chemically synthesized
tcgtggtggcgcgccgcctcca

SEQ ID NO: 38909 - DNA, 22 bp, Artificial Sequence
  chemically synthesized
gtggtggcgcgccgcctccagg

SEQ ID NO: 38910 - DNA, 22 bp, Artificial Sequence
  chemically synthesized
caggctcagcccgaagccgtag

SEQ ID NO: 38911 - DNA, 22 bp, Artificial Sequence
  chemically synthesized
agcccgaagccgtagtccaccc

SEQ ID NO: 38912 - DNA, 22 bp, Artificial Sequence
  chemically synthesized
tcgctctccgtcagctcctcct

SEQ ID NO: 38913 - DNA, 22 bp, Artificial Sequence
  chemically synthesized
gctctccgtcagctcctcctcc

SEQ ID NO: 38914 - DNA, 22 bp, Artificial Sequence
  chemically synthesized
tccgtcagctcctcctcctcct

SEQ ID NO: 38915 - DNA, 22 bp, Artificial Sequence
  chemically synthesized
cgtcagctcctcctcctcctct

SEQ ID NO: 38916 - DNA, 22 bp, Artificial Sequence
  chemically synthesized
ctcctcctcctcttcctcctct

SEQ ID NO: 38917 - DNA, 22 bp, Artificial Sequence
  chemically synthesized
ctcctcctcttcctcctcttct

SEQ ID NO: 38918 - DNA, 22 bp, Artificial Sequence
  chemically synthesized
ctcctcttcctcctcttcttcc

SEQ ID NO: 38919 - DNA, 22 bp, Artificial Sequence
  chemically synthesized
ctcttcctcctcttcttcctct

SEQ ID NO: 38920 - DNA, 22 bp, Artificial Sequence
  chemically synthesized
ttcctcctcttcttcctcttcc

SEQ ID NO: 38921 - DNA, 22 bp, Artificial Sequence
  chemically synthesized
cctcctcttcttcctcttcctc

SEQ ID NO: 38922 - DNA, 22 bp, Artificial Sequence
  chemically synthesized
ctcctcttcttcctcttcctcg

SEQ ID NO: 38923 - DNA, 22 bp, Artificial Sequence
  chemically synthesized
ctcttcttcctcttcctcgtcg

SEQ ID NO: 38924 - DNA, 22 bp, Artificial Sequence
  chemically synthesized
ttcttcctcttcctcgtcgtcc

SEQ ID NO: 38925 - DNA, 22 bp, Artificial Sequence
  chemically synthesized
cttcctcttcctcgtcgtcctc

SEQ ID NO: 38926 - DNA, 22 bp, Artificial Sequence
  chemically synthesized
ttcctcttcctcgtcgtcctcc

SEQ ID NO: 38927 - DNA, 22 bp, Artificial Sequence
  chemically synthesized
cctcttcctcgtcgtcctcctc

SEQ ID NO: 38928 - DNA, 22 bp, Artificial Sequence
  chemically synthesized
ctcttcctcgtcgtcctcctct

SEQ ID NO: 38929 - DNA, 22 bp, Artificial Sequence
  chemically synthesized
ttcctcgtcgtcctcctcttcc

SEQ ID NO: 38930 - DNA, 22 bp, Artificial Sequence
  chemically synthesized
cctcgtcgtcctcctcttcctc

SEQ ID NO: 38931 - DNA, 22 bp, Artificial Sequence
  chemically synthesized
ctcgtcgtcctcctcttcctcc

SEQ ID NO: 38932 - DNA, 22 bp, Artificial Sequence
  chemically synthesized
gtcgtcctcctcttcctcctcg

SEQ ID NO: 38933 - DNA, 22 bp, Artificial Sequence
  chemically synthesized
ctcttcctcctcgtccccgttc

SEQ ID NO: 38934 - DNA, 22 bp, Artificial Sequence
  chemically synthesized
ttcctcctcgtccccgttctcc

SEQ ID NO: 38935 - DNA, 22 bp, Artificial Sequence
  chemically synthesized
cctcctcgtccccgttctccgg

SEQ ID NO: 38936 - DNA, 22 bp, Artificial Sequence
  chemically synthesized
ctcctcgtccccgttctccggg

SEQ ID NO: 38937 - DNA, 22 bp, Artificial Sequence
  chemically synthesized
ctcgtccccgttctccgggatc

SEQ ID NO: 38938 - DNA, 22 bp, Artificial Sequence
  chemically synthesized
gtccccgttctccgggatcagg

SEQ ID NO: 38939 - DNA, 22 bp, Artificial Sequence
  chemically synthesized
tccgggatcaggttggggtcgt

SEQ ID NO: 38940 - DNA, 22 bp, Artificial Sequence
  chemically synthesized
cgggatcaggttggggtcgttc

SEQ ID NO: 38941 - DNA, 22 bp, Artificial Sequence
  chemically synthesized
gggtcgttctcgctcttgaact

SEQ ID NO: 38942 - DNA, 22 bp, Artificial Sequence
  chemically synthesized
tcgctcttgaacttggccacca

SEQ ID NO: 38943 - DNA, 22 bp, Artificial Sequence
  chemically synthesized
gctcttgaacttggccaccacg

SEQ ID NO: 38944 - DNA, 22 bp, Artificial Sequence
  chemically synthesized
ttgaacttggccaccacggact

SEQ ID NO: 38945 - DNA, 22 bp, Artificial Sequence
  chemically synthesized
gaacttggccaccacggacttg

SEQ ID NO: 38946 - DNA, 22 bp, Artificial Sequence
  chemically synthesized
aacttggccaccacggacttga

SEQ ID NO: 38947 - DNA, 22 bp, Artificial Sequence
  chemically synthesized
ggccaccacggacttgagcgcg

SEQ ID NO: 38948 - DNA, 22 bp, Artificial Sequence
  chemically synthesized
gccaccacggacttgagcgcgc

SEQ ID NO: 38949 - DNA, 22 bp, Artificial Sequence
  chemically synthesized
gagcgcgctgctggcgctgccc

SEQ ID NO: 38950 - DNA, 22 bp, Artificial Sequence
  chemically synthesized
agcgcgctgctggcgctgccca

SEQ ID NO: 38951 - DNA, 22 bp, Artificial Sequence
  chemically synthesized
ctggcgctgcccaccaagtcgc

SEQ ID NO: 38952 - DNA, 22 bp, Artificial Sequence
  chemically synthesized
gcgctgcccaccaagtcgctgg

SEQ ID NO: 38953 - DNA, 22 bp, Artificial Sequence
  chemically synthesized
cccaccaagtcgctggtgccgg

SEQ ID NO: 38954 - DNA, 22 bp, Artificial Sequence
  chemically synthesized
gtgccgggttccggggagctgg

SEQ ID NO: 38955 - DNA, 22 bp, Artificial Sequence
  chemically synthesized
cggggagctggcggtggagaga

SEQ ID NO: 38956 - DNA, 22 bp, Artificial Sequence
  chemically synthesized
gcggtggagagaccgtcgtcgg

SEQ ID NO: 38957 - DNA, 22 bp, Artificial Sequence
  chemically synthesized
gaccgtcatgggggacgatttg

SEQ ID NO: 38958 - DNA, 22 bp, Artificial Sequence
  chemically synthesized
accgtcatgggggacgatttgt

SEQ ID NO: 38959 - DNA, 22 bp, Artificial Sequence
  chemically synthesized
gtgcatgtgcgtcttcatgtgg

SEQ ID NO: 38960 - DNA, 22 bp, Artificial Sequence
  chemically synthesized
tgcatgtgcgtcttcatgtggc

SEQ ID NO: 38961 - DNA, 22 bp, Artificial Sequence
  chemically synthesized
catgtggcgcttcagcttgctg

SEQ ID NO: 38962 - DNA, 22 bp, Artificial Sequence
  chemically synthesized
atgtggcgcttcagcttgctgg

SEQ ID NO: 38963 - DNA, 22 bp, Artificial Sequence
  chemically synthesized
cagcttgctggcctgggtgcac

SEQ ID NO: 38964 - DNA, 22 bp, Artificial Sequence
  chemically synthesized
agcttgctggcctgggtgcacg

SEQ ID NO: 38965 - DNA, 22 bp, Artificial Sequence
  chemically synthesized
gctggcctgggtgcacgcgtgg

SEQ ID NO: 38966 - DNA, 22 bp, Artificial Sequence
  chemically synthesized
ctggcctgggtgcacgcgtggt

SEQ ID NO: 38967 - DNA, 22 bp, Artificial Sequence
  chemically synthesized
gcctgggtgcacgcgtggtcgc

SEQ ID NO: 38968 - DNA, 22 bp, Artificial Sequence
  chemically synthesized
ggtgcacgcgtggtcgcacagg

SEQ ID NO: 38969 - DNA, 22 bp, Artificial Sequence
  chemically synthesized
cacttgtagggcttctcgcccg

SEQ ID NO: 38970 - DNA, 22 bp, Artificial Sequence
  chemically synthesized
gtagggcttctcgcccgtgtgg

SEQ ID NO: 38971 - DNA, 22 bp, Artificial Sequence
  chemically synthesized
tagggcttctcgcccgtgtggc

SEQ ID NO: 38972 - DNA, 22 bp, Artificial Sequence
  chemically synthesized
ctcgcccgtgtggctgcgccgg

SEQ ID NO: 38973 - DNA, 22 bp, Artificial Sequence
  chemically synthesized
tcgcccgtgtggctgcgccggt

SEQ ID NO: 38974 - DNA, 22 bp, Artificial Sequence
  chemically synthesized
gcccgtgtggctgcgccggtgc

SEQ ID NO: 38975 - DNA, 22 bp, Artificial Sequence
  chemically synthesized
cgccggtgcaccaccaggttgc

SEQ ID NO: 38976 - DNA, 22 bp, Artificial Sequence
  chemically synthesized
ctctgaaatttgaacgtcttgc

SEQ ID NO: 38977 - DNA, 22 bp, Artificial Sequence
  chemically synthesized
tgaaatttgaacgtcttgccgc

SEQ ID NO: 38978 - DNA, 22 bp, Artificial Sequence
  chemically synthesized
aaatttgaacgtcttgccgcag

SEQ ID NO: 38979 - DNA, 22 bp, Artificial Sequence
  chemically synthesized
gaacgtcttgccgcagaactcg

SEQ ID NO: 38980 - DNA, 22 bp, Artificial Sequence
  chemically synthesized
aacgtcttgccgcagaactcgc

SEQ ID NO: 38981 - DNA, 22 bp, Artificial Sequence
  chemically synthesized
gccgcagaactcgcatgacttg

SEQ ID NO: 38982 - DNA, 22 bp, Artificial Sequence
  chemically synthesized
ccgcagaactcgcatgacttgg

SEQ ID NO: 38983 - DNA, 22 bp, Artificial Sequence
  chemically synthesized
gcatgacttggacttgaccggg

SEQ ID NO: 38984 - DNA, 22 bp, Artificial Sequence
  chemically synthesized
ggacttgaccgggggctgggag

SEQ ID NO: 38985 - DNA, 22 bp, Artificial Sequence
  chemically synthesized
gacttgaccgggggctgggagg

SEQ ID NO: 38986 - DNA, 22 bp, Artificial Sequence
  chemically synthesized
gaccgggggctgggagggagga

SEQ ID NO: 38987 - DNA, 22 bp, Artificial Sequence
  chemically synthesized
accgggggctgggagggaggag

SEQ ID NO: 38988 - DNA, 22 bp, Artificial Sequence
  chemically synthesized
ggagggaggaggggcggattgc

SEQ ID NO: 38989 - DNA, 22 bp, Artificial Sequence
  chemically synthesized
cagaggagggagggggggcgtc

SEQ ID NO: 38990 - DNA, 22 bp, Artificial Sequence
  chemically synthesized
gctacctggctggaatggttgc

SEQ ID NO: 38991 - DNA, 22 bp, Artificial Sequence
  chemically synthesized
ctacctggctggaatggttgca

SEQ ID NO: 38992 - DNA, 22 bp, Artificial Sequence
  chemically synthesized
cctggctggaatggttgcagta

SEQ ID NO: 38993 - DNA, 22 bp, Artificial Sequence
  chemically synthesized
gctggaatggttgcagtaacct

SEQ ID NO: 38994 - DNA, 22 bp, Artificial Sequence
  chemically synthesized
gaatggttgcagtaacctttgc

SEQ ID NO: 38995 - DNA, 22 bp, Artificial Sequence
  chemically synthesized
cagtaacctttgcatagggctg

SEQ ID NO: 38996 - DNA, 22 bp, Artificial Sequence
  chemically synthesized
tgcatagggctgggccggcctg

SEQ ID NO: 38997 - DNA, 22 bp, Artificial Sequence
  chemically synthesized
gcatagggctgggccggcctgg

SEQ ID NO: 38998 - DNA, 22 bp, Artificial Sequence
  chemically synthesized
catagggctgggccggcctggg

SEQ ID NO: 38999 - DNA, 22 bp, Artificial Sequence
  chemically synthesized
ggccggcctggggacagcggtg

SEQ ID NO: 39000 - DNA, 22 bp, Artificial Sequence
  chemically synthesized
gggacagcggtgggctagacgt

SEQ ID NO: 39001 - DNA, 22 bp, Artificial Sequence
  chemically synthesized
gacgtgttccctgccagctctc

SEQ ID NO: 39002 - DNA, 22 bp, Artificial Sequence
  chemically synthesized
cctgccagctctctaagtctcc

SEQ ID NO: 39003 - DNA, 22 bp, Artificial Sequence
  chemically synthesized
ccagctctctaagtctcctaga

SEQ ID NO: 39004 - DNA, 22 bp, Artificial Sequence
  chemically synthesized
tctaagtctcctagagaaatcc

SEQ ID NO: 39005 - DNA, 22 bp, Artificial Sequence
  chemically synthesized
taagtctcctagagaaatccat

SEQ ID NO: 39006 - DNA, 22 bp, Artificial Sequence
  chemically synthesized
agtctcctagagaaatccatgg

SEQ ID NO: 39007 - DNA, 22 bp, Artificial Sequence
  chemically synthesized
ctagagaaatccatggcgggag

SEQ ID NO: 39008 - DNA, 22 bp, Artificial Sequence
  chemically synthesized
gagaaatccatggcgggaggct

SEQ ID NO: 39009 - DNA, 22 bp, Artificial Sequence
  chemically synthesized
catagccattggattcaaccgc

SEQ ID NO: 39010 - DNA, 22 bp, Artificial Sequence
  chemically synthesized
gattcaaccgcagcaccctgtc

SEQ ID NO: 39011 - DNA, 22 bp, Artificial Sequence
  chemically synthesized
aaccgcagcaccctgtcaaagg

SEQ ID NO: 39012 - DNA, 22 bp, Artificial Sequence
  chemically synthesized
tcaaaggcactcgggtgatggg

SEQ ID NO: 39013 - DNA, 22 bp, Artificial Sequence
  chemically synthesized
gggtgatgggtggccagggcca

SEQ ID NO: 39014 - DNA, 22 bp, Artificial Sequence
  chemically synthesized
ttccgcccccaggcgctctatg

SEQ ID NO: 39015 - DNA, 22 bp, Artificial Sequence
  chemically synthesized
ccgcccccaggcgctctatgcg

SEQ ID NO: 39016 - DNA, 22 bp, Artificial Sequence
  chemically synthesized
cgcccccaggcgctctatgcgg

SEQ ID NO: 39017 - DNA, 22 bp, Artificial Sequence
  chemically synthesized
tatgcggtgggggtccaagtga

SEQ ID NO: 39018 - DNA, 22 bp, Artificial Sequence
  chemically synthesized
tgcggtgggggtccaagtgatg

SEQ ID NO: 39019 - DNA, 22 bp, Artificial Sequence
  chemically synthesized
ggtggtggactaaacagggggg

SEQ ID NO: 39020 - DNA, 22 bp, Artificial Sequence
  chemically synthesized
aacagggggggagtgggtggaa

SEQ ID NO: 39021 - DNA, 22 bp, Artificial Sequence
  chemically synthesized
ctgccaggccggaagcctctct

SEQ ID NO: 39022 - DNA, 22 bp, Artificial Sequence
  chemically synthesized
tgccaggccggaagcctctctc

SEQ ID NO: 39023 - DNA, 22 bp, Artificial Sequence
  chemically synthesized
ccaggccggaagcctctctcga

SEQ ID NO: 39024 - DNA, 22 bp, Artificial Sequence
  chemically synthesized
tctcgatactgatcctggtatt

SEQ ID NO: 39025 - DNA, 22 bp, Artificial Sequence
  chemically synthesized
tcgatactgatcctggtattct

SEQ ID NO: 39026 - DNA, 22 bp, Artificial Sequence
  chemically synthesized
gatactgatcctggtattctta

SEQ ID NO: 39027 - DNA, 22 bp, Artificial Sequence
  chemically synthesized
atcctggtattcttagcaggtt

SEQ ID NO: 39028 - DNA, 22 bp, Artificial Sequence
  chemically synthesized
gtattcttagcaggttaaaggg

SEQ ID NO: 39029 - DNA, 22 bp, Artificial Sequence
  chemically synthesized
ttagcaggttaaaggggttatt

SEQ ID NO: 39030 - DNA, 22 bp, Artificial Sequence
  chemically synthesized
agcaggttaaaggggttattgt

SEQ ID NO: 39031 - DNA, 22 bp, Artificial Sequence
  chemically synthesized
gcaggttaaaggggttattgtc

SEQ ID NO: 39032 - DNA, 22 bp, Artificial Sequence
  chemically synthesized
aaggggttattgtctgcaatat

SEQ ID NO: 39033 - DNA, 22 bp, Artificial Sequence
  chemically synthesized
ttgtctgcaatatgaatcccat

SEQ ID NO: 39034 - DNA, 22 bp, Artificial Sequence
  chemically synthesized
tctgcaatatgaatcccatgga

SEQ ID NO: 39035 - DNA, 22 bp, Artificial Sequence
  chemically synthesized
caatatgaatcccatggagagg

SEQ ID NO: 39036 - DNA, 22 bp, Artificial Sequence
  chemically synthesized
ggaaggacattctgcacctagt

SEQ ID NO: 39037 - DNA, 22 bp, Artificial Sequence
  chemically synthesized
tgcacctagtcctgaagggata

SEQ ID NO: 39038 - DNA, 22 bp, Artificial Sequence
  chemically synthesized
cacctagtcctgaagggatacc

SEQ ID NO: 39039 - DNA, 22 bp, Artificial Sequence
  chemically synthesized
gtcctgaagggataccaacccg

SEQ ID NO: 39040 - DNA, 22 bp, Artificial Sequence
  chemically synthesized
aagggataccaacccgcggggt

SEQ ID NO: 39041 - DNA, 22 bp, Artificial Sequence
  chemically synthesized
ccgtgttcgctttctaagtaga

SEQ ID NO: 39042 - DNA, 22 bp, Artificial Sequence
  chemically synthesized
cgtgttcgctttctaagtagat

SEQ ID NO: 39043 - DNA, 22 bp, Artificial Sequence
  chemically synthesized
gctttctaagtagattcttaat

SEQ ID NO: 39044 - DNA, 22 bp, Artificial Sequence
  chemically synthesized
tctaagtagattcttaatccat

SEQ ID NO: 39045 - DNA, 22 bp, Artificial Sequence
  chemically synthesized
ctaagtagattcttaatccatg

SEQ ID NO: 39046 - DNA, 22 bp, Artificial Sequence
  chemically synthesized
taagtagattcttaatccatga

SEQ ID NO: 39047 - DNA, 22 bp, Artificial Sequence
  chemically synthesized
agtagattcttaatccatgagt

SEQ ID NO: 39048 - DNA, 22 bp, Artificial Sequence
  chemically synthesized
ttaatccatgagtgttctgtgc

SEQ ID NO: 39049 - DNA, 22 bp, Artificial Sequence
  chemically synthesized
aatccatgagtgttctgtgcgt

SEQ ID NO: 39050 - DNA, 22 bp, Artificial Sequence
  chemically synthesized
atccatgagtgttctgtgcgtg

SEQ ID NO: 39051 - DNA, 22 bp, Artificial Sequence
  chemically synthesized
tgtgcgtgttgcaagagaaacc

SEQ ID NO: 39052 - DNA, 22 bp, Artificial Sequence
  chemically synthesized
tgcgtgttgcaagagaaaccat

SEQ ID NO: 39053 - DNA, 22 bp, Artificial Sequence
  chemically synthesized
caagagaaaccatgcactggtg

SEQ ID NO: 39054 - DNA, 22 bp, Artificial Sequence
  chemically synthesized
gtgaatggctgtttgcaagttg

SEQ ID NO: 39055 - DNA, 22 bp, Artificial Sequence
  chemically synthesized
tttgcaagttgtacatgtgtag

SEQ ID NO: 39056 - DNA, 22 bp, Artificial Sequence
  chemically synthesized
gcaagttgtacatgtgtagctg

SEQ ID NO: 39057 - DNA, 22 bp, Artificial Sequence
  chemically synthesized
caagttgtacatgtgtagctgc

SEQ ID NO: 39058 - DNA, 22 bp, Artificial Sequence
  chemically synthesized
tacatgtgtagctgctgggctc

SEQ ID NO: 39059 - DNA, 22 bp, Artificial Sequence
  chemically synthesized
ctgggctcatctttacctgcaa

SEQ ID NO: 39060 - DNA, 22 bp, Artificial Sequence
  chemically synthesized
ggctcatctttacctgcaaaat

SEQ ID NO: 39061 - DNA, 22 bp, Artificial Sequence
  chemically synthesized
atctttacctgcaaaataatac

SEQ ID NO: 39062 - DNA, 22 bp, Artificial Sequence
  chemically synthesized
tacctgcaaaataatacaacac

SEQ ID NO: 39063 - DNA, 22 bp, Artificial Sequence
  chemically synthesized
acctgcaaaataatacaacacc

SEQ ID NO: 39064 - DNA, 22 bp, Artificial Sequence
  chemically synthesized
cctgcaaaataatacaacacca

SEQ ID NO: 39065 - DNA, 22 bp, Artificial Sequence
  chemically synthesized
caaaataatacaacaccaacat

SEQ ID NO: 39066 - DNA, 22 bp, Artificial Sequence
  chemically synthesized
aatcactgaggcgggcatcagc

SEQ ID NO: 39067 - DNA, 22 bp, Artificial Sequence
  chemically synthesized
atcactgaggcgggcatcagca

SEQ ID NO: 39068 - DNA, 22 bp, Artificial Sequence
  chemically synthesized
aggcgggcatcagcaattgctt

SEQ ID NO: 39069 - DNA, 22 bp, Artificial Sequence
  chemically synthesized
cttatttatgttccacctccag

SEQ ID NO: 39070 - DNA, 22 bp, Artificial Sequence
  chemically synthesized
atttatgttccacctccagcct

SEQ ID NO: 39071 - DNA, 22 bp, Artificial Sequence
  chemically synthesized
tttatgttccacctccagcctt

SEQ ID NO: 39072 - DNA, 22 bp, Artificial Sequence
  chemically synthesized
atgttccacctccagccttccc

SEQ ID NO: 39073 - DNA, 22 bp, Artificial Sequence
  chemically synthesized
tgttccacctccagccttccct

SEQ ID NO: 39074 - DNA, 22 bp, Artificial Sequence
  chemically synthesized
cacctccagccttccctgcccc

SEQ ID NO: 39075 - DNA, 22 bp, Artificial Sequence
  chemically synthesized
cagccttccctgcccccacccc

SEQ ID NO: 39076 - DNA, 22 bp, Artificial Sequence
  chemically synthesized
ccctgcccccacccctcaaccc

SEQ ID NO: 39077 - DNA, 22 bp, Artificial Sequence
  chemically synthesized
cctgcccccacccctcaacccc

SEQ ID NO: 39078 - DNA, 22 bp, Artificial Sequence
  chemically synthesized
cccccacccctcaaccccaagg

SEQ ID NO: 39079 - DNA, 22 bp, Artificial Sequence
  chemically synthesized
aaccccaaggcctaagccctca

SEQ ID NO: 39080 - DNA, 22 bp, Artificial Sequence
  chemically synthesized
agccctcactgacctaccccct

SEQ ID NO: 39081 - DNA, 22 bp, Artificial Sequence
  chemically synthesized
actgacctaccccctgtgcctg

SEQ ID NO: 39082 - DNA, 22 bp, Artificial Sequence
  chemically synthesized
acctaccccctgtgcctggcac

SEQ ID NO: 39083 - DNA, 22 bp, Artificial Sequence
  chemically synthesized
ccccctgtgcctggcacgtctg

SEQ ID NO: 39084 - DNA, 22 bp, Artificial Sequence
  chemically synthesized
tgcctggcacgtctgagcatgg

SEQ ID NO: 39085 - DNA, 22 bp, Artificial Sequence
  chemically synthesized
gcacgtctgagcatgggtaccc

SEQ ID NO: 39086 - DNA, 22 bp, Artificial Sequence
  chemically synthesized
agcatgggtacccagtaaatat

SEQ ID NO: 39087 - DNA, 22 bp, Artificial Sequence
  chemically synthesized
gtccaattgatcttcctgccat

SEQ ID NO: 39088 - DNA, 22 bp, Artificial Sequence
  chemically synthesized
atcttcctgccattaaactcag

SEQ ID NO: 39089 - DNA, 22 bp, Artificial Sequence
  chemically synthesized
cctgccattaaactcagttcta

SEQ ID NO: 39090 - DNA, 22 bp, Artificial Sequence
  chemically synthesized
ctgccattaaactcagttctag

SEQ ID NO: 39091 - DNA, 22 bp, Artificial Sequence
  chemically synthesized
ccattaaactcagttctagaaa

SEQ ID NO: 39092 - DNA, 22 bp, Artificial Sequence
  chemically synthesized
aactcagttctagaaattttat

SEQ ID NO: 39093 - DNA, 22 bp, Artificial Sequence
  chemically synthesized
agttctagaaattttatatcca

SEQ ID NO: 39094 - DNA, 22 bp, Artificial Sequence
  chemically synthesized
tagaaattttatatccaatccc

SEQ ID NO: 39095 - DNA, 22 bp, Artificial Sequence
  chemically synthesized
gaaattttatatccaatcccca

SEQ ID NO: 39096 - DNA, 22 bp, Artificial Sequence
  chemically synthesized
tatatccaatccccaaagcaga

SEQ ID NO: 39097 - DNA, 22 bp, Artificial Sequence
  chemically synthesized
atatccaatccccaaagcagaa

SEQ ID NO: 39098 - DNA, 22 bp, Artificial Sequence
  chemically synthesized
tatccaatccccaaagcagaaa

SEQ ID NO: 39099 - DNA, 22 bp, Artificial Sequence
  chemically synthesized
accagttctggcttgaggatga

SEQ ID NO: 39100 - DNA, 22 bp, Artificial Sequence
  chemically synthesized
tggcttgaggatgaaggtccct

SEQ ID NO: 39101 - DNA, 22 bp, Artificial Sequence
  chemically synthesized
gcttgaggatgaaggtccctac

SEQ ID NO: 39102 - DNA, 22 bp, Artificial Sequence
  chemically synthesized
gaggatgaaggtccctacattc

SEQ ID NO: 39103 - DNA, 22 bp, Artificial Sequence
  chemically synthesized
aggatgaaggtccctacattct

SEQ ID NO: 39104 - DNA, 22 bp, Artificial Sequence
  chemically synthesized
cattctaggcacctcaacaaat

SEQ ID NO: 39105 - DNA, 22 bp, Artificial Sequence
  chemically synthesized
taggcacctcaacaaatgtctt

SEQ ID NO: 39106 - DNA, 22 bp, Artificial Sequence
  chemically synthesized
ggcacctcaacaaatgtcttct

SEQ ID NO: 39107 - DNA, 22 bp, Artificial Sequence
  chemically synthesized
aacaaatgtcttctaaactttc

SEQ ID NO: 39108 - DNA, 22 bp, Artificial Sequence
  chemically synthesized
ctaaactttccagttccatcag

SEQ ID NO: 39109 - DNA, 22 bp, Artificial Sequence
  chemically synthesized
taaactttccagttccatcagc

SEQ ID NO: 39110 - DNA, 22 bp, Artificial Sequence
  chemically synthesized
aactttccagttccatcagctg

SEQ ID NO: 39111 - DNA, 22 bp, Artificial Sequence
  chemically synthesized
tccagttccatcagctgtagtt

SEQ ID NO: 39112 - DNA, 22 bp, Artificial Sequence
  chemically synthesized
ccagttccatcagctgtagttt

SEQ ID NO: 39113 - DNA, 22 bp, Artificial Sequence
  chemically synthesized
cagttccatcagctgtagtttg

SEQ ID NO: 39114 - DNA, 22 bp, Artificial Sequence
  chemically synthesized
catcagctgtagtttggggcaa

SEQ ID NO: 39115 - DNA, 22 bp, Artificial Sequence
  chemically synthesized
tagtttggggcaagccatctca

SEQ ID NO: 39116 - DNA, 22 bp, Artificial Sequence
  chemically synthesized
ggggcaagccatctcatctcca

SEQ ID NO: 39117 - DNA, 22 bp, Artificial Sequence
  chemically synthesized
gggcaagccatctcatctccat

SEQ ID NO: 39118 - DNA, 22 bp, Artificial Sequence
  chemically synthesized
atctccatgtgcctctgtttcc

SEQ ID NO: 39119 - DNA, 22 bp, Artificial Sequence
  chemically synthesized
catgtgcctctgtttcctcctt

SEQ ID NO: 39120 - DNA, 22 bp, Artificial Sequence
  chemically synthesized
tgtttcctccttgttaagtgag

SEQ ID NO: 39121 - DNA, 22 bp, Artificial Sequence
  chemically synthesized
tttcctccttgttaagtgagaa

SEQ ID NO: 39122 - DNA, 22 bp, Artificial Sequence
  chemically synthesized
cctccttgttaagtgagaaact

SEQ ID NO: 39123 - DNA, 22 bp, Artificial Sequence
  chemically synthesized
ctccttgttaagtgagaaactt

SEQ ID NO: 39124 - DNA, 22 bp, Artificial Sequence
  chemically synthesized
cttgttaagtgagaaacttgga

SEQ ID NO: 39125 - DNA, 22 bp, Artificial Sequence
  chemically synthesized
gttaagtgagaaacttggacaa

SEQ ID NO: 39126 - DNA, 22 bp, Artificial Sequence
  chemically synthesized
ttaagtgagaaacttggacaag

SEQ ID NO: 39127 - DNA, 22 bp, Artificial Sequence
  chemically synthesized
agtgagaaacttggacaaggtg

SEQ ID NO: 39128 - DNA, 22 bp, Artificial Sequence
  chemically synthesized
ggacaaggtgacccaaggaaac

SEQ ID NO: 39129 - DNA, 22 bp, Artificial Sequence
  chemically synthesized
gacaaggtgacccaaggaaact

SEQ ID NO: 39130 - DNA, 22 bp, Artificial Sequence
  chemically synthesized
tttggcttcctaaatcccagct

SEQ ID NO: 39131 - DNA, 22 bp, Artificial Sequence
  chemically synthesized
ttggcttcctaaatcccagctt

SEQ ID NO: 39132 - DNA, 22 bp, Artificial Sequence
  chemically synthesized
tggcttcctaaatcccagcttt

SEQ ID NO: 39133 - DNA, 22 bp, Artificial Sequence
  chemically synthesized
ggcttcctaaatcccagctttc

SEQ ID NO: 39134 - DNA, 22 bp, Artificial Sequence
  chemically synthesized
gcttcctaaatcccagctttct

SEQ ID NO: 39135 - DNA, 22 bp, Artificial Sequence
  chemically synthesized
cctaaatcccagctttctattc

SEQ ID NO: 39136 - DNA, 22 bp, Artificial Sequence
  chemically synthesized
ctaaatcccagctttctattcc

SEQ ID NO: 39137 - DNA, 22 bp, Artificial Sequence
  chemically synthesized
aatcccagctttctattccccc

SEQ ID NO: 39138 - DNA, 22 bp, Artificial Sequence
  chemically synthesized
tctattcccccctgggtgacag

SEQ ID NO: 39139 - DNA, 22 bp, Artificial Sequence
  chemically synthesized
ctattcccccctgggtgacagg

SEQ ID NO: 39140 - DNA, 22 bp, Artificial Sequence
  chemically synthesized
tattcccccctgggtgacaggt

SEQ ID NO: 39141 - DNA, 22 bp, Artificial Sequence
  chemically synthesized
ttcccccctgggtgacaggtga

SEQ ID NO: 39142 - DNA, 22 bp, Artificial Sequence
  chemically synthesized
ccccctgggtgacaggtgaact

SEQ ID NO: 39143 - DNA, 22 bp, Artificial Sequence
  chemically synthesized
ggtgacaggtgaactttctaaa

SEQ ID NO: 39144 - DNA, 22 bp, Artificial Sequence
  chemically synthesized
tctaaataggcaaacatttcat

SEQ ID NO: 39145 - DNA, 22 bp, Artificial Sequence
  chemically synthesized
ctaaataggcaaacatttcata

SEQ ID NO: 39146 - DNA, 22 bp, Artificial Sequence
  chemically synthesized
taaataggcaaacatttcatag

SEQ ID NO: 39147 - DNA, 22 bp, Artificial Sequence
  chemically synthesized
aataggcaaacatttcatagag

SEQ ID NO: 39148 - DNA, 22 bp, Artificial Sequence
  chemically synthesized
catagaggtatcaaaaaagggg

SEQ ID NO: 39149 - DNA, 22 bp, Artificial Sequence
  chemically synthesized
atagaggtatcaaaaaagggga

SEQ ID NO: 39150 - DNA, 22 bp, Artificial Sequence
  chemically synthesized
actacaatgttctatggcccta

SEQ ID NO: 39151 - DNA, 22 bp, Artificial Sequence
  chemically synthesized
caatgttctatggccctaaaga

SEQ ID NO: 39152 - DNA, 22 bp, Artificial Sequence
  chemically synthesized
tatggccctaaagatgctttca

SEQ ID NO: 39153 - DNA, 22 bp, Artificial Sequence
  chemically synthesized
tggccctaaagatgctttcagc

SEQ ID NO: 39154 - DNA, 22 bp, Artificial Sequence
  chemically synthesized
aagatgctttcagcattagcct

SEQ ID NO: 39155 - DNA, 22 bp, Artificial Sequence
  chemically synthesized
tcagcattagcctgaaacacac

SEQ ID NO: 39156 - DNA, 22 bp, Artificial Sequence
  chemically synthesized
cagcattagcctgaaacacact

SEQ ID NO: 39157 - DNA, 22 bp, Artificial Sequence
  chemically synthesized
agcattagcctgaaacacacta

SEQ ID NO: 39158 - DNA, 22 bp, Artificial Sequence
  chemically synthesized
gcctgaaacacactaattgttg

SEQ ID NO: 39159 - DNA, 22 bp, Artificial Sequence
  chemically synthesized
aaacacactaattgttgatatt

SEQ ID NO: 39160 - DNA, 22 bp, Artificial Sequence
  chemically synthesized
attgttgatattgttaaaatga

SEQ ID NO: 39161 - DNA, 22 bp, Artificial Sequence
  chemically synthesized
ttgatattgttaaaatgagagg

SEQ ID NO: 39162 - DNA, 22 bp, Artificial Sequence
  chemically synthesized
atattgttaaaatgagagggta

SEQ ID NO: 39163 - DNA, 22 bp, Artificial Sequence
  chemically synthesized
ttaaaatgagagggtactcata

SEQ ID NO: 39164 - DNA, 22 bp, Artificial Sequence
  chemically synthesized
aaatgagagggtactcataaaa

SEQ ID NO: 39165 - DNA, 22 bp, Artificial Sequence
  chemically synthesized
ataaaatacttccgtggaaaaa

SEQ ID NO: 39166 - DNA, 22 bp, Artificial Sequence
  chemically synthesized
ccgtggaaaaaagactagcaac

SEQ ID NO: 39167 - DNA, 22 bp, Artificial Sequence
  chemically synthesized
cgtggaaaaaagactagcaaca

SEQ ID NO: 39168 - DNA, 22 bp, Artificial Sequence
  chemically synthesized
gcaacattctcacaccccagac

SEQ ID NO: 39169 - DNA, 22 bp, Artificial Sequence
  chemically synthesized
tcacaccccagactgtgggagg

SEQ ID NO: 39170 - DNA, 22 bp, Artificial Sequence
  chemically synthesized
acaccccagactgtgggaggat

SEQ ID NO: 39171 - DNA, 22 bp, Artificial Sequence
  chemically synthesized
tgggaggatcagtgagtcccaa

SEQ ID NO: 39172 - DNA, 22 bp, Artificial Sequence
  chemically synthesized
tggttccacaacaccccatggg

SEQ ID NO: 39173 - DNA, 22 bp, Artificial Sequence
  chemically synthesized
ggttccacaacaccccatgggg

SEQ ID NO: 39174 - DNA, 22 bp, Artificial Sequence
  chemically synthesized
gttccacaacaccccatgggga

SEQ ID NO: 39175 - DNA, 22 bp, Artificial Sequence
  chemically synthesized
cacaacaccccatggggacgtc

SEQ ID NO: 39176 - DNA, 22 bp, Artificial Sequence
  chemically synthesized
ttatctcaaagaatgtttaaaa

SEQ ID NO: 39177 - DNA, 22 bp, Artificial Sequence
  chemically synthesized
tatctcaaagaatgtttaaaaa

SEQ ID NO: 39178 - DNA, 22 bp, Artificial Sequence
  chemically synthesized
atctcaaagaatgtttaaaaaa

SEQ ID NO: 39179 - DNA, 22 bp, Artificial Sequence
  chemically synthesized
tctcaaagaatgtttaaaaaat

SEQ ID NO: 39180 - DNA, 22 bp, Artificial Sequence
  chemically synthesized
aaagaatgtttaaaaaatctga

SEQ ID NO: 39181 - DNA, 22 bp, Artificial Sequence
  chemically synthesized
aaaaaatctgaaagaaaaactt

SEQ ID NO: 39182 - DNA, 22 bp, Artificial Sequence
  chemically synthesized
aaaaatctgaaagaaaaacttc

SEQ ID NO: 39183 - DNA, 22 bp, Artificial Sequence
  chemically synthesized
aaagaaaaacttcattcagatt

SEQ ID NO: 39184 - DNA, 22 bp, Artificial Sequence
  chemically synthesized
cattcagatttaacggataggc

SEQ ID NO: 39185 - DNA, 22 bp, Artificial Sequence
  chemically synthesized
attcagatttaacggataggct

SEQ ID NO: 39186 - DNA, 22 bp, Artificial Sequence
  chemically synthesized
agatttaacggataggctgtat

SEQ ID NO: 39187 - DNA, 22 bp, Artificial Sequence
  chemically synthesized
aacggataggctgtatccaatc

SEQ ID NO: 39188 - DNA, 22 bp, Artificial Sequence
  chemically synthesized
acggataggctgtatccaatct

SEQ ID NO: 39189 - DNA, 22 bp, Artificial Sequence
  chemically synthesized
tatccaatctttaggagttgtc

SEQ ID NO: 39190 - DNA, 22 bp, Artificial Sequence
  chemically synthesized
taggagttgtcccccggtcaga

SEQ ID NO: 39191 - DNA, 22 bp, Artificial Sequence
  chemically synthesized
aggagttgtcccccggtcagac

SEQ ID NO: 39192 - DNA, 22 bp, Artificial Sequence
  chemically synthesized
ggagttgtcccccggtcagaca

SEQ ID NO: 39193 - DNA, 22 bp, Artificial Sequence
  chemically synthesized
tcccccggtcagacaaatgcaa

SEQ ID NO: 39194 - DNA, 22 bp, Artificial Sequence
  chemically synthesized
gaaaagttaggaggagtggctg

SEQ ID NO: 39195 - DNA, 22 bp, Artificial Sequence
  chemically synthesized
ggaggagtggctggtgccgact

SEQ ID NO: 39196 - DNA, 22 bp, Artificial Sequence
  chemically synthesized
gtgccgacttaagcagacacag

SEQ ID NO: 39197 - DNA, 22 bp, Artificial Sequence
  chemically synthesized
aagcagacacagcatcctagtt

SEQ ID NO: 39198 - DNA, 22 bp, Artificial Sequence
  chemically synthesized
agcagacacagcatcctagttt

SEQ ID NO: 39199 - DNA, 22 bp, Artificial Sequence
  chemically synthesized
gtttaaggaacagttaaaacag

SEQ ID NO: 39200 - DNA, 22 bp, Artificial Sequence
  chemically synthesized
aaggaacagttaaaacagccag

SEQ ID NO: 39201 - DNA, 22 bp, Artificial Sequence
  chemically synthesized
aggaacagttaaaacagccagc

SEQ ID NO: 39202 - DNA, 22 bp, Artificial Sequence
  chemically synthesized
aaacagccagcgccatgacagg

SEQ ID NO: 39203 - DNA, 22 bp, Artificial Sequence
  chemically synthesized
agaaatgctacactatcctcct

SEQ ID NO: 39204 - DNA, 22 bp, Artificial Sequence
  chemically synthesized
cactatcctcctcctcattgtt

SEQ ID NO: 39205 - DNA, 22 bp, Artificial Sequence
  chemically synthesized
tcctcctcctcattgttttgag

SEQ ID NO: 39206 - DNA, 22 bp, Artificial Sequence
  chemically synthesized
ctcctcattgttttgagaggct

SEQ ID NO: 39207 - DNA, 22 bp, Artificial Sequence
  chemically synthesized
ctcattgttttgagaggctaac

SEQ ID NO: 39208 - DNA, 22 bp, Artificial Sequence
  chemically synthesized
attgttttgagaggctaacaac

SEQ ID NO: 39209 - DNA, 22 bp, Artificial Sequence
  chemically synthesized
ttttgagaggctaacaacgtga

SEQ ID NO: 39210 - DNA, 22 bp, Artificial Sequence
  chemically synthesized
tgagaggctaacaacgtgaacc

SEQ ID NO: 39211 - DNA, 22 bp, Artificial Sequence
  chemically synthesized
gagaggctaacaacgtgaacca

SEQ ID NO: 39212 - DNA, 22 bp, Artificial Sequence
  chemically synthesized
agaggctaacaacgtgaaccaa

SEQ ID NO: 39213 - DNA, 22 bp, Artificial Sequence
  chemically synthesized
acaacgtgaaccaaattataca

SEQ ID NO: 39214 - DNA, 22 bp, Artificial Sequence
  chemically synthesized
tacaacatcctgcgccctcggc

SEQ ID NO: 39215 - DNA, 22 bp, Artificial Sequence
  chemically synthesized
cgccctcggctgggactcagct

SEQ ID NO: 39216 - DNA, 22 bp, Artificial Sequence
  chemically synthesized
ggctgggactcagctccagttg

SEQ ID NO: 39217 - DNA, 22 bp, Artificial Sequence
  chemically synthesized
ggactcagctccagttgagaaa

SEQ ID NO: 39218 - DNA, 22 bp, Artificial Sequence
  chemically synthesized
agctccagttgagaaagaaaca

SEQ ID NO: 39219 - DNA, 22 bp, Artificial Sequence
  chemically synthesized
cagttgagaaagaaacagaaag

SEQ ID NO: 39220 - DNA, 22 bp, Artificial Sequence
  chemically synthesized
agaaagaaacagaaagatacag

SEQ ID NO: 39221 - DNA, 22 bp, Artificial Sequence
  chemically synthesized
agctagtcaactctggccagta

SEQ ID NO: 39222 - DNA, 22 bp, Artificial Sequence
  chemically synthesized
gtcaactctggccagtagccaa

SEQ ID NO: 39223 - DNA, 22 bp, Artificial Sequence
  chemically synthesized
tggccagtagccaagccgtctg

SEQ ID NO: 39224 - DNA, 22 bp, Artificial Sequence
  chemically synthesized
gccagtagccaagccgtctgga

SEQ ID NO: 39225 - DNA, 22 bp, Artificial Sequence
  chemically synthesized
gagaggggccctgcttaagtca

SEQ ID NO: 39226 - DNA, 22 bp, Artificial Sequence
  chemically synthesized
cttaagtcacattatttccctt

SEQ ID NO: 39227 - DNA, 22 bp, Artificial Sequence
  chemically synthesized
aagtcacattatttcccttgct

SEQ ID NO: 39228 - DNA, 22 bp, Artificial Sequence
  chemically synthesized
agtcacattatttcccttgctg

SEQ ID NO: 39229 - DNA, 22 bp, Artificial Sequence
  chemically synthesized
tttcccttgctgaaaagaaccc

SEQ ID NO: 39230 - DNA, 22 bp, Artificial Sequence
  chemically synthesized
cccttgctgaaaagaacccaag

SEQ ID NO: 39231 - DNA, 22 bp, Artificial Sequence
  chemically synthesized
ccttgctgaaaagaacccaaga

SEQ ID NO: 39232 - DNA, 22 bp, Artificial Sequence
  chemically synthesized
gctgaaaagaacccaagagtgg

SEQ ID NO: 39233 - DNA, 22 bp, Artificial Sequence
  chemically synthesized
ctgaaaagaacccaagagtggt

SEQ ID NO: 39234 - DNA, 22 bp, Artificial Sequence
  chemically synthesized
aaaagaacccaagagtggtaaa

SEQ ID NO: 39235 - DNA, 22 bp, Artificial Sequence
  chemically synthesized
tggcaaagaagggccagcttga

SEQ ID NO: 39236 - DNA, 22 bp, Artificial Sequence
  chemically synthesized
ggcaaagaagggccagcttgac

SEQ ID NO: 39237 - DNA, 22 bp, Artificial Sequence
  chemically synthesized
gcaaagaagggccagcttgact

SEQ ID NO: 39238 - DNA, 22 bp, Artificial Sequence
  chemically synthesized
gacttcacaaaatatttcattt

SEQ ID NO: 39239 - DNA, 22 bp, Artificial Sequence
  chemically synthesized
acttcacaaaatatttcatttg

SEQ ID NO: 39240 - DNA, 22 bp, Artificial Sequence
  chemically synthesized
cacaaaatatttcatttgggga

SEQ ID NO: 39241 - DNA, 22 bp, Artificial Sequence
  chemically synthesized
acaaaatatttcatttggggag

SEQ ID NO: 39242 - DNA, 22 bp, Artificial Sequence
  chemically synthesized
catttggggagatggctaaatt

SEQ ID NO: 39243 - DNA, 22 bp, Artificial Sequence
  chemically synthesized
atttggggagatggctaaatta

SEQ ID NO: 39244 - DNA, 22 bp, Artificial Sequence
  chemically synthesized
ggggagatggctaaattaaata

SEQ ID NO: 39245 - DNA, 22 bp, Artificial Sequence
  chemically synthesized
gggagatggctaaattaaatat

SEQ ID NO: 39246 - DNA, 22 bp, Artificial Sequence
  chemically synthesized
aattaaatatatatggggagat

SEQ ID NO: 39247 - DNA, 22 bp, Artificial Sequence
  chemically synthesized
aatatatatggggagatagcta

SEQ ID NO: 39248 - DNA, 22 bp, Artificial Sequence
  chemically synthesized
cattaaatatatatatatatgg

SEQ ID NO: 39249 - DNA, 22 bp, Artificial Sequence
  chemically synthesized
aatatatatatatatggaataa

SEQ ID NO: 39250 - DNA, 22 bp, Artificial Sequence
  chemically synthesized
accaacagtttactagtcaact

SEQ ID NO: 39251 - DNA, 22 bp, Artificial Sequence
  chemically synthesized
actagtcaactgcaacattaaa

SEQ ID NO: 39252 - DNA, 22 bp, Artificial Sequence
  chemically synthesized
ctagtcaactgcaacattaaaa

SEQ ID NO: 39253 - DNA, 22 bp, Artificial Sequence
  chemically synthesized
gtcaactgcaacattaaaaagg

SEQ ID NO: 39254 - DNA, 22 bp, Artificial Sequence
  chemically synthesized
caacattaaaaagggcagaagt

SEQ ID NO: 39255 - DNA, 22 bp, Artificial Sequence
  chemically synthesized
aaaagggcagaagtaatggtag

SEQ ID NO: 39256 - DNA, 22 bp, Artificial Sequence
  chemically synthesized
cccagagattctgaaaaaaaaa

SEQ ID NO: 39257 - DNA, 22 bp, Artificial Sequence
  chemically synthesized
ccagagattctgaaaaaaaaag

SEQ ID NO: 39258 - DNA, 22 bp, Artificial Sequence
  chemically synthesized
tgaaaaaaaaagccttaaaata

SEQ ID NO: 39259 - DNA, 22 bp, Artificial Sequence
  chemically synthesized
aaaaaaaaagccttaaaatata

SEQ ID NO: 39260 - DNA, 22 bp, Artificial Sequence
  chemically synthesized
aaaatataactgagaaataaca

SEQ ID NO: 39261 - DNA, 22 bp, Artificial Sequence
  chemically synthesized
aaatataactgagaaataacaa

SEQ ID NO: 39262 - DNA, 22 bp, Artificial Sequence
  chemically synthesized
agaaataacaaacttttctcct

SEQ ID NO: 39263 - DNA, 22 bp, Artificial Sequence
  chemically synthesized
ttctccttcttttaaaagaagg

SEQ ID NO: 39264 - DNA, 22 bp, Artificial Sequence
  chemically synthesized
tctccttcttttaaaagaaggg

SEQ ID NO: 39265 - DNA, 22 bp, Artificial Sequence
  chemically synthesized
ctccttcttttaaaagaagggc

SEQ ID NO: 39266 - DNA, 22 bp, Artificial Sequence
  chemically synthesized
tccttcttttaaaagaagggct

SEQ ID NO: 39267 - DNA, 22 bp, Artificial Sequence
  chemically synthesized
cttcttttaaaagaagggctgc

SEQ ID NO: 39268 - DNA, 22 bp, Artificial Sequence
  chemically synthesized
cttttaaaagaagggctgcaag

SEQ ID NO: 39269 - DNA, 22 bp, Artificial Sequence
  chemically synthesized
ttttaaaagaagggctgcaaga

SEQ ID NO: 39270 - DNA, 22 bp, Artificial Sequence
  chemically synthesized
ttaaaagaagggctgcaagagt

SEQ ID NO: 39271 - DNA, 22 bp, Artificial Sequence
  chemically synthesized
taaaagaagggctgcaagagtt

SEQ ID NO: 39272 - DNA, 22 bp, Artificial Sequence
  chemically synthesized
aaaagaagggctgcaagagttc

SEQ ID NO: 39273 - DNA, 22 bp, Artificial Sequence
  chemically synthesized
aaagaagggctgcaagagttct

SEQ ID NO: 39274 - DNA, 22 bp, Artificial Sequence
  chemically synthesized
caagagttctttaaggccacag

SEQ ID NO: 39275 - DNA, 22 bp, Artificial Sequence
  chemically synthesized
tttaaggccacagctagtattt

SEQ ID NO: 39276 - DNA, 22 bp, Artificial Sequence
  chemically synthesized
taaggccacagctagtatttgt

SEQ ID NO: 39277 - DNA, 22 bp, Artificial Sequence
  chemically synthesized
aaggccacagctagtatttgtc

SEQ ID NO: 39278 - DNA, 22 bp, Artificial Sequence
  chemically synthesized
aggccacagctagtatttgtca

SEQ ID NO: 39279 - DNA, 22 bp, Artificial Sequence
  chemically synthesized
gtatttgtcagtaactttctaa

SEQ ID NO: 39280 - DNA, 22 bp, Artificial Sequence
  chemically synthesized
gtcagtaactttctaagaagga

SEQ ID NO: 39281 - DNA, 22 bp, Artificial Sequence
  chemically synthesized
tcagtaactttctaagaaggaa

SEQ ID NO: 39282 - DNA, 22 bp, Artificial Sequence
  chemically synthesized
tctaagaaggaaaaaaaaaaaa

SEQ ID NO: 39283 - DNA, 22 bp, Artificial Sequence
  chemically synthesized
ctaagaaggaaaaaaaaaaaaa

SEQ ID NO: 39284 - DNA, 22 bp, Artificial Sequence
  chemically synthesized
taagaaggaaaaaaaaaaaaaa

SEQ ID NO: 39285 - DNA, 22 bp, Artificial Sequence
  chemically synthesized
agaaggaaaaaaaaaaaaaatc

SEQ ID NO: 39286 - DNA, 22 bp, Artificial Sequence
  chemically synthesized
ccagggaggttaagagtgagaa

SEQ ID NO: 39287 - DNA, 22 bp, Artificial Sequence
  chemically synthesized
agagtgagaatgaggaattaat

SEQ ID NO: 39288 - DNA, 22 bp, Artificial Sequence
  chemically synthesized
atcaattatatgatgcctccat

SEQ ID NO: 39289 - DNA, 22 bp, Artificial Sequence
  chemically synthesized
tatgatgcctccatttagcaag

SEQ ID NO: 39290 - DNA, 22 bp, Artificial Sequence
  chemically synthesized
catttagcaagtcagaaagaaa

SEQ ID NO: 39291 - DNA, 22 bp, Artificial Sequence
  chemically synthesized
agcaagtcagaaagaaaagccg

SEQ ID NO: 39292 - DNA, 22 bp, Artificial Sequence
  chemically synthesized
gcaagtcagaaagaaaagccgg

SEQ ID NO: 39293 - DNA, 22 bp, Artificial Sequence
  chemically synthesized
ctcaggagcccccaaacactgg

SEQ ID NO: 39294 - DNA, 22 bp, Artificial Sequence
  chemically synthesized
tcaggagcccccaaacactggt

SEQ ID NO: 39295 - DNA, 22 bp, Artificial Sequence
  chemically synthesized
aggagcccccaaacactggtat

SEQ ID NO: 39296 - DNA, 22 bp, Artificial Sequence
  chemically synthesized
gtattccaaaataagccagcct

SEQ ID NO: 39297 - DNA, 22 bp, Artificial Sequence
  chemically synthesized
caaaataagccagcctcgctca

SEQ ID NO: 39298 - DNA, 22 bp, Artificial Sequence
  chemically synthesized
gctcaagcacttgtctaaataa

SEQ ID NO: 39299 - DNA, 22 bp, Artificial Sequence
  chemically synthesized
aagcacttgtctaaataatgga

SEQ ID NO: 39300 - DNA, 22 bp, Artificial Sequence
  chemically synthesized
gtctaaataatggactcctgcc

SEQ ID NO: 39301 - DNA, 22 bp, Artificial Sequence
  chemically synthesized
tctaaataatggactcctgccc

SEQ ID NO: 39302 - DNA, 22 bp, Artificial Sequence
  chemically synthesized
aataatggactcctgccctgac

SEQ ID NO: 39303 - DNA, 22 bp, Artificial Sequence
  chemically synthesized
ctgccctgaccttgtaatttac

SEQ ID NO: 39304 - DNA, 22 bp, Artificial Sequence
  chemically synthesized
ccctgaccttgtaatttacttt

SEQ ID NO: 39305 - DNA, 22 bp, Artificial Sequence
  chemically synthesized
accttgtaatttactttacaac

SEQ ID NO: 39306 - DNA, 22 bp, Artificial Sequence
  chemically synthesized
gtaatttactttacaacgcatt

SEQ ID NO: 39307 - DNA, 22 bp, Artificial Sequence
  chemically synthesized
taatttactttacaacgcattt

SEQ ID NO: 39308 - DNA, 22 bp, Artificial Sequence
  chemically synthesized
actttacaacgcatttataatc

SEQ ID NO: 39309 - DNA, 22 bp, Artificial Sequence
  chemically synthesized
ctttacaacgcatttataatcc

SEQ ID NO: 39310 - DNA, 22 bp, Artificial Sequence
  chemically synthesized
tacaacgcatttataatcccac

SEQ ID NO: 39311 - DNA, 22 bp, Artificial Sequence
  chemically synthesized
acaacgcatttataatcccact

SEQ ID NO: 39312 - DNA, 22 bp, Artificial Sequence
  chemically synthesized
caacgcatttataatcccactc

SEQ ID NO: 39313 - DNA, 22 bp, Artificial Sequence
  chemically synthesized
ataatcccactcaatatatctc

SEQ ID NO: 39314 - DNA, 22 bp, Artificial Sequence
  chemically synthesized
taatcccactcaatatatctca

SEQ ID NO: 39315 - DNA, 22 bp, Artificial Sequence
  chemically synthesized
aatatatctcactcctgggtaa

SEQ ID NO: 39316 - DNA, 22 bp, Artificial Sequence
  chemically synthesized
actcctgggtaaatctcttaaa

SEQ ID NO: 39317 - DNA, 22 bp, Artificial Sequence
  chemically synthesized
ctgggtaaatctcttaaacaag

SEQ ID NO: 39318 - DNA, 22 bp, Artificial Sequence
  chemically synthesized
ggtaaatctcttaaacaagatt

SEQ ID NO: 39319 - DNA, 22 bp, Artificial Sequence
  chemically synthesized
ttaaacaagattagatggtaag

SEQ ID NO: 39320 - DNA, 22 bp, Artificial Sequence
  chemically synthesized
aaacaagattagatggtaagat

SEQ ID NO: 39321 - DNA, 22 bp, Artificial Sequence
  chemically synthesized
aacaagattagatggtaagata

SEQ ID NO: 39322 - DNA, 22 bp, Artificial Sequence
  chemically synthesized
gatggtaagataccaaaattag

SEQ ID NO: 39323 - DNA, 22 bp, Artificial Sequence
  chemically synthesized
ggtttcaaacatttgtctaatg

SEQ ID NO: 39324 - DNA, 22 bp, Artificial Sequence
  chemically synthesized
caaacatttgtctaatgtggaa

SEQ ID NO: 39325 - DNA, 22 bp, Artificial Sequence
  chemically synthesized
aaacatttgtctaatgtggaag

SEQ ID NO: 39326 - DNA, 22 bp, Artificial Sequence
  chemically synthesized
gtctaatgtggaagggggaaaa

SEQ ID NO: 39327 - DNA, 22 bp, Artificial Sequence
  chemically synthesized
tctaatgtggaagggggaaaaa

SEQ ID NO: 39328 - DNA, 22 bp, Artificial Sequence
  chemically synthesized
atgtggaagggggaaaaaaggc

SEQ ID NO: 39329 - DNA, 22 bp, Artificial Sequence
  chemically synthesized
tgaaagaaaacgctgacattag

SEQ ID NO: 39330 - DNA, 22 bp, Artificial Sequence
  chemically synthesized
gaaagaaaacgctgacattagt

SEQ ID NO: 39331 - DNA, 22 bp, Artificial Sequence
  chemically synthesized
aaagaaaacgctgacattagta

SEQ ID NO: 39332 - DNA, 22 bp, Artificial Sequence
  chemically synthesized
acattagtatcacattatctgc

SEQ ID NO: 39333 - DNA, 22 bp, Artificial Sequence
  chemically synthesized
gtatcacattatctgcctattt

SEQ ID NO: 39334 - DNA, 22 bp, Artificial Sequence
  chemically synthesized
tctgcctatttttgtttgcctc

SEQ ID NO: 39335 - DNA, 22 bp, Artificial Sequence
  chemically synthesized
cctatttttgtttgcctcctct

SEQ ID NO: 39336 - DNA, 22 bp, Artificial Sequence
  chemically synthesized
tttttgtttgcctcctctcttc

SEQ ID NO: 39337 - DNA, 22 bp, Artificial Sequence
  chemically synthesized
ttgtttgcctcctctcttcaaa

SEQ ID NO: 39338 - DNA, 22 bp, Artificial Sequence
  chemically synthesized
tgtttgcctcctctcttcaaag

SEQ ID NO: 39339 - DNA, 22 bp, Artificial Sequence
  chemically synthesized
gtttgcctcctctcttcaaagg

SEQ ID NO: 39340 - DNA, 22 bp, Artificial Sequence
  chemically synthesized
tttgcctcctctcttcaaaggg

SEQ ID NO: 39341 - DNA, 22 bp, Artificial Sequence
  chemically synthesized
gcctcctctcttcaaagggaaa

SEQ ID NO: 39342 - DNA, 22 bp, Artificial Sequence
  chemically synthesized
cctcctctcttcaaagggaaat

SEQ ID NO: 39343 - DNA, 22 bp, Artificial Sequence
  chemically synthesized
ctctcttcaaagggaaataaaa

SEQ ID NO: 39344 - DNA, 22 bp, Artificial Sequence
  chemically synthesized
tcttcaaagggaaataaaaagc

SEQ ID NO: 39345 - DNA, 22 bp, Artificial Sequence
  chemically synthesized
ttcaaagggaaataaaaagctt

SEQ ID NO: 39346 - DNA, 22 bp, Artificial Sequence
  chemically synthesized
caaagggaaataaaaagcttca

SEQ ID NO: 39347 - DNA, 22 bp, Artificial Sequence
  chemically synthesized
aaagggaaataaaaagcttcat

SEQ ID NO: 39348 - DNA, 22 bp, Artificial Sequence
  chemically synthesized
cattgagaacatttttataaat

SEQ ID NO: 39349 - DNA, 22 bp, Artificial Sequence
  chemically synthesized
attgagaacatttttataaatt

SEQ ID NO: 39350 - DNA, 22 bp, Artificial Sequence
  chemically synthesized
agaacatttttataaatttttt

SEQ ID NO: 39351 - DNA, 22 bp, Artificial Sequence
  chemically synthesized
ttataaattttttgttgttgtt

SEQ ID NO: 39352 - DNA, 22 bp, Artificial Sequence
  chemically synthesized
tataaattttttgttgttgttg

SEQ ID NO: 39353 - DNA, 22 bp, Artificial Sequence
  chemically synthesized
ataaattttttgttgttgttga

SEQ ID NO: 39354 - DNA, 22 bp, Artificial Sequence
  chemically synthesized
taaattttttgttgttgttgaa

SEQ ID NO: 39355 - DNA, 22 bp, Artificial Sequence
  chemically synthesized
tttgttgttgttgaacaataac

SEQ ID NO: 39356 - DNA, 22 bp, Artificial Sequence
  chemically synthesized
ttgttgttgttgaacaataact

SEQ ID NO: 39357 - DNA, 22 bp, Artificial Sequence
  chemically synthesized
tgttgttgttgaacaataactt

SEQ ID NO: 39358 - DNA, 22 bp, Artificial Sequence
  chemically synthesized
gttgttgttgaacaataacttg

SEQ ID NO: 39359 - DNA, 22 bp, Artificial Sequence
  chemically synthesized
ttgttgttgaacaataacttgg

SEQ ID NO: 39360 - DNA, 22 bp, Artificial Sequence
  chemically synthesized
ttgttgaacaataacttgggtc

SEQ ID NO: 39361 - DNA, 22 bp, Artificial Sequence
  chemically synthesized
ttgaacaataacttgggtccca

SEQ ID NO: 39362 - DNA, 22 bp, Artificial Sequence
  chemically synthesized
aacaataacttgggtcccaaat

SEQ ID NO: 39363 - DNA, 22 bp, Artificial Sequence
  chemically synthesized
gggtcccaaataggctggaaaa

SEQ ID NO: 39364 - DNA, 22 bp, Artificial Sequence
  chemically synthesized
ggtcccaaataggctggaaaaa

SEQ ID NO: 39365 - DNA, 22 bp, Artificial Sequence
  chemically synthesized
gaaaaaaaactatctggttcca

SEQ ID NO: 39366 - DNA, 22 bp, Artificial Sequence
  chemically synthesized
tctggttccaactacatgatcc

SEQ ID NO: 39367 - DNA, 22 bp, Artificial Sequence
  chemically synthesized
gttccaactacatgatcctctg

SEQ ID NO: 39368 - DNA, 22 bp, Artificial Sequence
  chemically synthesized
caactacatgatcctctgtggc

SEQ ID NO: 39369 - DNA, 22 bp, Artificial Sequence
  chemically synthesized
catgatcctctgtggcttcctc

SEQ ID NO: 39370 - DNA, 22 bp, Artificial Sequence
  chemically synthesized
tgtggcttcctccttgtcctcc

SEQ ID NO: 39371 - DNA, 22 bp, Artificial Sequence
  chemically synthesized
tggcttcctccttgtcctccct

SEQ ID NO: 39372 - DNA, 22 bp, Artificial Sequence
  chemically synthesized
cctccttgtcctccctagatct

SEQ ID NO: 39373 - DNA, 22 bp, Artificial Sequence
  chemically synthesized
ctccttgtcctccctagatctc

SEQ ID NO: 39374 - DNA, 22 bp, Artificial Sequence
  chemically synthesized
cttgtcctccctagatctctgg

SEQ ID NO: 39375 - DNA, 22 bp, Artificial Sequence
  chemically synthesized
gtcctccctagatctctgggtg

SEQ ID NO: 39376 - DNA, 22 bp, Artificial Sequence
  chemically synthesized
tcctccctagatctctgggtga

SEQ ID NO: 39377 - DNA, 22 bp, Artificial Sequence
  chemically synthesized
cctagatctctgggtgactatc

SEQ ID NO: 39378 - DNA, 22 bp, Artificial Sequence
  chemically synthesized
gatctctgggtgactatcattc

SEQ ID NO: 39379 - DNA, 22 bp, Artificial Sequence
  chemically synthesized
tgggtgactatcattcctattt

SEQ ID NO: 39380 - DNA, 22 bp, Artificial Sequence
  chemically synthesized
ggtgactatcattcctatttag

SEQ ID NO: 39381 - DNA, 22 bp, Artificial Sequence
  chemically synthesized
tcattcctatttagcctgacga

SEQ ID NO: 39382 - DNA, 22 bp, Artificial Sequence
  chemically synthesized
ctatttagcctgacgatctgag

SEQ ID NO: 39383 - DNA, 22 bp, Artificial Sequence
  chemically synthesized
tttagcctgacgatctgagttg

SEQ ID NO: 39384 - DNA, 22 bp, Artificial Sequence
  chemically synthesized
agcctgacgatctgagttgggc

SEQ ID NO: 39385 - DNA, 22 bp, Artificial Sequence
  chemically synthesized
gcctgacgatctgagttgggca

SEQ ID NO: 39386 - DNA, 22 bp, Artificial Sequence
  chemically synthesized
acgatctgagttgggcaagtaa

SEQ ID NO: 39387 - DNA, 22 bp, Artificial Sequence
  chemically synthesized
agttgggcaagtaaaaagattt

SEQ ID NO: 39388 - DNA, 22 bp, Artificial Sequence
  chemically synthesized
ggcaagtaaaaagatttgtctg

SEQ ID NO: 39389 - DNA, 22 bp, Artificial Sequence
  chemically synthesized
gtctgataatccaagtccttaa

SEQ ID NO: 39390 - DNA, 22 bp, Artificial Sequence
  chemically synthesized
tctgataatccaagtccttaac

SEQ ID NO: 39391 - DNA, 22 bp, Artificial Sequence
  chemically synthesized
ataatccaagtccttaacacgt

SEQ ID NO: 39392 - DNA, 22 bp, Artificial Sequence
  chemically synthesized
aacacgttcatcactccaaatg

SEQ ID NO: 39393 - DNA, 22 bp, Artificial Sequence
  chemically synthesized
acacgttcatcactccaaatgc

SEQ ID NO: 39394 - DNA, 22 bp, Artificial Sequence
  chemically synthesized
atcactccaaatgccttaaaat

SEQ ID NO: 39395 - DNA, 22 bp, Artificial Sequence
  chemically synthesized
caaatgccttaaaattatattt

SEQ ID NO: 39396 - DNA, 22 bp, Artificial Sequence
  chemically synthesized
aaaattatattttaccttataa

SEQ ID NO: 39397 - DNA, 22 bp, Artificial Sequence
  chemically synthesized
aaattatattttaccttataaa

SEQ ID NO: 39398 - DNA, 22 bp, Artificial Sequence
  chemically synthesized
tattttaccttataaaacatcg

SEQ ID NO: 39399 - DNA, 22 bp, Artificial Sequence
  chemically synthesized
taccttataaaacatcgattga

SEQ ID NO: 39400 - DNA, 22 bp, Artificial Sequence
  chemically synthesized
accttataaaacatcgattgaa

SEQ ID NO: 39401 - DNA, 22 bp, Artificial Sequence
  chemically synthesized
ccttataaaacatcgattgaaa

SEQ ID NO: 39402 - DNA, 22 bp, Artificial Sequence
  chemically synthesized
ataaaacatcgattgaaatcca

SEQ ID NO: 39403 - DNA, 22 bp, Artificial Sequence
  chemically synthesized
taaaacatcgattgaaatccag

SEQ ID NO: 39404 - DNA, 22 bp, Artificial Sequence
  chemically synthesized
aaatccaggactagactcataa

SEQ ID NO: 39405 - DNA, 22 bp, Artificial Sequence
  chemically synthesized
gactcataattagtggtgctgg

SEQ ID NO: 39406 - DNA, 22 bp, Artificial Sequence
  chemically synthesized
ataattagtggtgctggtttca

SEQ ID NO: 39407 - DNA, 22 bp, Artificial Sequence
  chemically synthesized
gtggtgctggtttcacatgtgc

SEQ ID NO: 39408 - DNA, 22 bp, Artificial Sequence
  chemically synthesized
gtttcacatgtgccatgaattg

SEQ ID NO: 39409 - DNA, 22 bp, Artificial Sequence
  chemically synthesized
cacatgtgccatgaattgtagt

SEQ ID NO: 39410 - DNA, 22 bp, Artificial Sequence
  chemically synthesized
acatgtgccatgaattgtagtc

SEQ ID NO: 39411 - DNA, 22 bp, Artificial Sequence
  chemically synthesized
tagtcattgataaatgccaaaa

SEQ ID NO: 39412 - DNA, 22 bp, Artificial Sequence
  chemically synthesized
ataaatgccaaaatctgtggca

SEQ ID NO: 39413 - DNA, 22 bp, Artificial Sequence
  chemically synthesized
tggcatacagcactacatcaag

SEQ ID NO: 39414 - DNA, 22 bp, Artificial Sequence
  chemically synthesized
catcaaggatctcatttgtatc

SEQ ID NO: 39415 - DNA, 22 bp, Artificial Sequence
  chemically synthesized
atttgtatcctttcaaaaaggc

SEQ ID NO: 39416 - DNA, 22 bp, Artificial Sequence
  chemically synthesized
gtatcctttcaaaaaggcttaa

SEQ ID NO: 39417 - DNA, 22 bp, Artificial Sequence
  chemically synthesized
tatcctttcaaaaaggcttaaa

SEQ ID NO: 39418 - DNA, 22 bp, Artificial Sequence
  chemically synthesized
tcaaaaaggcttaaatgagaaa

SEQ ID NO: 39419 - DNA, 22 bp, Artificial Sequence
  chemically synthesized
caaaaaggcttaaatgagaaaa

SEQ ID NO: 39420 - DNA, 22 bp, Artificial Sequence
  chemically synthesized
aaaaaggcttaaatgagaaaag

SEQ ID NO: 39421 - DNA, 22 bp, Artificial Sequence
  chemically synthesized
aaatgagaaaagtccattttat

SEQ ID NO: 39422 - DNA, 22 bp, Artificial Sequence
  chemically synthesized
aatgagaaaagtccattttatt

SEQ ID NO: 39423 - DNA, 22 bp, Artificial Sequence
  chemically synthesized
tattttgctgccctgagcatcc

SEQ ID NO: 39424 - DNA, 22 bp, Artificial Sequence
  chemically synthesized
attttgctgccctgagcatcct

SEQ ID NO: 39425 - DNA, 22 bp, Artificial Sequence
  chemically synthesized
ttttgctgccctgagcatccta

SEQ ID NO: 39426 - DNA, 22 bp, Artificial Sequence
  chemically synthesized
tgctgccctgagcatcctaaac

SEQ ID NO: 39427 - DNA, 22 bp, Artificial Sequence
  chemically synthesized
gctgccctgagcatcctaaact

SEQ ID NO: 39428 - DNA, 22 bp, Artificial Sequence
  chemically synthesized
ctgccctgagcatcctaaactt

SEQ ID NO: 39429 - DNA, 22 bp, Artificial Sequence
  chemically synthesized
ccctgagcatcctaaacttttt

SEQ ID NO: 39430 - DNA, 22 bp, Artificial Sequence
  chemically synthesized
agcatcctaaactttttttcag

SEQ ID NO: 39431 - DNA, 22 bp, Artificial Sequence
  chemically synthesized
aactttttttcagagccagtta

SEQ ID NO: 39432 - DNA, 22 bp, Artificial Sequence
  chemically synthesized
tttttcagagccagttatgtga

SEQ ID NO: 39433 - DNA, 22 bp, Artificial Sequence
  chemically synthesized
ttttcagagccagttatgtgat

SEQ ID NO: 39434 - DNA, 22 bp, Artificial Sequence
  chemically synthesized
tttcagagccagttatgtgatc

SEQ ID NO: 39435 - DNA, 22 bp, Artificial Sequence
  chemically synthesized
ttcagagccagttatgtgatca

SEQ ID NO: 39436 - DNA, 22 bp, Artificial Sequence
  chemically synthesized
tcagagccagttatgtgatcat

SEQ ID NO: 39437 - DNA, 22 bp, Artificial Sequence
  chemically synthesized
cagagccagttatgtgatcatg

SEQ ID NO: 39438 - DNA, 22 bp, Artificial Sequence
  chemically synthesized
agagccagttatgtgatcatgc

SEQ ID NO: 39439 - DNA, 22 bp, Artificial Sequence
  chemically synthesized
tgtgatcatgctacagtatgtt

SEQ ID NO: 39440 - DNA, 22 bp, Artificial Sequence
  chemically synthesized
cagtatgttaacactgtgatgt

SEQ ID NO: 39441 - DNA, 22 bp, Artificial Sequence
  chemically synthesized
acactgtgatgttatcctcccc

SEQ ID NO: 39442 - DNA, 22 bp, Artificial Sequence
  chemically synthesized
tgatgttatcctcccctctctc

SEQ ID NO: 39443 - DNA, 22 bp, Artificial Sequence
  chemically synthesized
tcctcccctctctctcatacat

SEQ ID NO: 39444 - DNA, 22 bp, Artificial Sequence
  chemically synthesized
ccctctctctcatacatcaggt

SEQ ID NO: 39445 - DNA, 22 bp, Artificial Sequence
  chemically synthesized
tctctcatacatcaggtcagag

SEQ ID NO: 39446 - DNA, 22 bp, Artificial Sequence
  chemically synthesized
tctcatacatcaggtcagagaa

SEQ ID NO: 39447 - DNA, 22 bp, Artificial Sequence
  chemically synthesized
tcatacatcaggtcagagaaaa

SEQ ID NO: 39448 - DNA, 22 bp, Artificial Sequence
  chemically synthesized
atacatcaggtcagagaaaatg

SEQ ID NO: 39449 - DNA, 22 bp, Artificial Sequence
  chemically synthesized
tatcttataatgagcatacaac

SEQ ID NO: 39450 - DNA, 22 bp, Artificial Sequence
  chemically synthesized
atcttataatgagcatacaaca

SEQ ID NO: 39451 - DNA, 22 bp, Artificial Sequence
  chemically synthesized
tcttataatgagcatacaacat

SEQ ID NO: 39452 - DNA, 22 bp, Artificial Sequence
  chemically synthesized
ataatgagcatacaacatacag

SEQ ID NO: 39453 - DNA, 22 bp, Artificial Sequence
  chemically synthesized
taatgagcatacaacatacagt

SEQ ID NO: 39454 - DNA, 22 bp, Artificial Sequence
  chemically synthesized
tcactatcgcattttagtattc

SEQ ID NO: 39455 - DNA, 22 bp, Artificial Sequence
  chemically synthesized
cactatcgcattttagtattcc

SEQ ID NO: 39456 - DNA, 22 bp, Artificial Sequence
  chemically synthesized
actatcgcattttagtattccc

SEQ ID NO: 39457 - DNA, 22 bp, Artificial Sequence
  chemically synthesized
tcgcattttagtattcccatca

SEQ ID NO: 39458 - DNA, 22 bp, Artificial Sequence
  chemically synthesized
tagtattcccatcaactagata

SEQ ID NO: 39459 - DNA, 22 bp, Artificial Sequence
  chemically synthesized
agtattcccatcaactagatat

SEQ ID NO: 39460 - DNA, 22 bp, Artificial Sequence
  chemically synthesized
gtattcccatcaactagatatt

SEQ ID NO: 39461 - DNA, 22 bp, Artificial Sequence
  chemically synthesized
ccatcaactagatattctagat

SEQ ID NO: 39462 - DNA, 22 bp, Artificial Sequence
  chemically synthesized
gatattctagatcatgagggca

SEQ ID NO: 39463 - DNA, 22 bp, Artificial Sequence
  chemically synthesized
tagatcatgagggcagctagtg

SEQ ID NO: 39464 - DNA, 22 bp, Artificial Sequence
  chemically synthesized
gatcatgagggcagctagtgta

SEQ ID NO: 39465 - DNA, 22 bp, Artificial Sequence
  chemically synthesized
gtgtaatcataatgtcaatgag

SEQ ID NO: 39466 - DNA, 22 bp, Artificial Sequence
  chemically synthesized
ttacgattgagactaaagatta

SEQ ID NO: 39467 - DNA, 22 bp, Artificial Sequence
  chemically synthesized
cgattgagactaaagattacat

SEQ ID NO: 39468 - DNA, 22 bp, Artificial Sequence
  chemically synthesized
agactaaagattacatggagag

SEQ ID NO: 39469 - DNA, 22 bp, Artificial Sequence
  chemically synthesized
aagattacatggagagagctgc

SEQ ID NO: 39470 - DNA, 22 bp, Artificial Sequence
  chemically synthesized
catggagagagctgctttgaaa

SEQ ID NO: 39471 - DNA, 22 bp, Artificial Sequence
  chemically synthesized
ctttgaaactggtaattattac

SEQ ID NO: 39472 - DNA, 22 bp, Artificial Sequence
  chemically synthesized
tgaaactggtaattattaccag

SEQ ID NO: 39473 - DNA, 22 bp, Artificial Sequence
  chemically synthesized
gaaactggtaattattaccagt

SEQ ID NO: 39474 - DNA, 22 bp, Artificial Sequence
  chemically synthesized
aaactggtaattattaccagtc

SEQ ID NO: 39475 - DNA, 22 bp, Artificial Sequence
  chemically synthesized
gtaattattaccagtccactaa

SEQ ID NO: 39476 - DNA, 22 bp, Artificial Sequence
  chemically synthesized
ttaccagtccactaatagcaaa

SEQ ID NO: 39477 - DNA, 22 bp, Artificial Sequence
  chemically synthesized
ccagtccactaatagcaaatga

SEQ ID NO: 39478 - DNA, 22 bp, Artificial Sequence
  chemically synthesized
atagcaaatgatgcattacaat

SEQ ID NO: 39479 - DNA, 22 bp, Artificial Sequence
  chemically synthesized
caatttcaccatataatctgta

SEQ ID NO: 39480 - DNA, 22 bp, Artificial Sequence
  chemically synthesized
caccatataatctgtatttcac

SEQ ID NO: 39481 - DNA, 22 bp, Artificial Sequence
  chemically synthesized
accatataatctgtatttcact

SEQ ID NO: 39482 - DNA, 22 bp, Artificial Sequence
  chemically synthesized
tatttcactcagctcatgccgg

SEQ ID NO: 39483 - DNA, 22 bp, Artificial Sequence
  chemically synthesized
cactcagctcatgccggtgtac

SEQ ID NO: 39484 - DNA, 22 bp, Artificial Sequence
  chemically synthesized
actcagctcatgccggtgtacc

SEQ ID NO: 39485 - DNA, 22 bp, Artificial Sequence
  chemically synthesized
agctcatgccggtgtaccatat

SEQ ID NO: 39486 - DNA, 22 bp, Artificial Sequence
  chemically synthesized
atgccggtgtaccatattatat

SEQ ID NO: 39487 - DNA, 22 bp, Artificial Sequence
  chemically synthesized
tattacagtgctcacagattct

SEQ ID NO: 39488 - DNA, 22 bp, Artificial Sequence
  chemically synthesized
cagtgctcacagattctaaatt

SEQ ID NO: 39489 - DNA, 22 bp, Artificial Sequence
  chemically synthesized
acagattctaaattcctaaact

SEQ ID NO: 39490 - DNA, 22 bp, Artificial Sequence
  chemically synthesized
taaattcctaaactgcagtcat

SEQ ID NO: 39491 - DNA, 22 bp, Artificial Sequence
  chemically synthesized
aattcctaaactgcagtcatca

SEQ ID NO: 39492 - DNA, 22 bp, Artificial Sequence
  chemically synthesized
ctaaactgcagtcatcaataaa

SEQ ID NO: 39493 - DNA, 22 bp, Artificial Sequence
  chemically synthesized
aactgcagtcatcaataaatgt

SEQ ID NO: 39494 - DNA, 22 bp, Artificial Sequence
  chemically synthesized
cagtcatcaataaatgtgttac

SEQ ID NO: 39495 - DNA, 22 bp, Artificial Sequence
  chemically synthesized
cttgccataatttgtgaaatta

SEQ ID NO: 39496 - DNA, 22 bp, Artificial Sequence
  chemically synthesized
gccataatttgtgaaattactt

SEQ ID NO: 39497 - DNA, 22 bp, Artificial Sequence
  chemically synthesized
ccataatttgtgaaattacttt

SEQ ID NO: 39498 - DNA, 22 bp, Artificial Sequence
  chemically synthesized
gtgaaattactttgttcataac

SEQ ID NO: 39499 - DNA, 22 bp, Artificial Sequence
  chemically synthesized
tgaaattactttgttcataaca

SEQ ID NO: 39500 - DNA, 22 bp, Artificial Sequence
  chemically synthesized
ctttgttcataacatctttgat

SEQ ID NO: 39501 - DNA, 22 bp, Artificial Sequence
  chemically synthesized
tgttcataacatctttgatgat

SEQ ID NO: 39502 - DNA, 22 bp, Artificial Sequence
  chemically synthesized
gttcataacatctttgatgatt

SEQ ID NO: 39503 - DNA, 22 bp, Artificial Sequence
  chemically synthesized
ttcataacatctttgatgattt

SEQ ID NO: 39504 - DNA, 22 bp, Artificial Sequence
  chemically synthesized
ataacatctttgatgatttaga

SEQ ID NO: 39505 - DNA, 22 bp, Artificial Sequence
  chemically synthesized
tgatgatttagaaagactggaa

SEQ ID NO: 39506 - DNA, 22 bp, Artificial Sequence
  chemically synthesized
gatgatttagaaagactggaat

SEQ ID NO: 39507 - DNA, 22 bp, Artificial Sequence
  chemically synthesized
atgatttagaaagactggaatt

SEQ ID NO: 39508 - DNA, 22 bp, Artificial Sequence
  chemically synthesized
agaaagactggaattgatttcc

SEQ ID NO: 39509 - DNA, 22 bp, Artificial Sequence
  chemically synthesized
gaaagactggaattgatttcct

SEQ ID NO: 39510 - DNA, 22 bp, Artificial Sequence
  chemically synthesized
gaattgatttcctgtgtggcaa

SEQ ID NO: 39511 - DNA, 22 bp, Artificial Sequence
  chemically synthesized
atttcctgtgtggcaaaattag

SEQ ID NO: 39512 - DNA, 22 bp, Artificial Sequence
  chemically synthesized
cctgtgtggcaaaattagggct

SEQ ID NO: 39513 - DNA, 22 bp, Artificial Sequence
  chemically synthesized
ctgtgtggcaaaattagggcta

SEQ ID NO: 39514 - DNA, 22 bp, Artificial Sequence
  chemically synthesized
tgtggcaaaattagggctacat

SEQ ID NO: 39515 - DNA, 22 bp, Artificial Sequence
  chemically synthesized
gggctacattgatttattgatg

SEQ ID NO: 39516 - DNA, 22 bp, Artificial Sequence
  chemically synthesized
cattgatttattgatgtgtaaa

SEQ ID NO: 39517 - DNA, 22 bp, Artificial Sequence
  chemically synthesized
atttattgatgtgtaaaatata

SEQ ID NO: 39518 - DNA, 22 bp, Artificial Sequence
  chemically synthesized
attgatgtgtaaaatataataa

SEQ ID NO: 39519 - DNA, 22 bp, Artificial Sequence
  chemically synthesized
ttgatgtgtaaaatataataat

SEQ ID NO: 39520 - DNA, 22 bp, Artificial Sequence
  chemically synthesized
atgtgtaaaatataataatatt

SEQ ID NO: 39521 - DNA, 22 bp, Artificial Sequence
  chemically synthesized
ttcatttactctgatgaaaatc

SEQ ID NO: 39522 - DNA, 22 bp, Artificial Sequence
  chemically synthesized
catttactctgatgaaaatcaa

SEQ ID NO: 39523 - DNA, 22 bp, Artificial Sequence
  chemically synthesized
atttactctgatgaaaatcaac

SEQ ID NO: 39524 - DNA, 22 bp, Artificial Sequence
  chemically synthesized
actctgatgaaaatcaacttct

SEQ ID NO: 39525 - DNA, 22 bp, Artificial Sequence
  chemically synthesized
ctctgatgaaaatcaacttctc

SEQ ID NO: 39526 - DNA, 22 bp, Artificial Sequence
  chemically synthesized
tgatgaaaatcaacttctcaat

SEQ ID NO: 39527 - DNA, 22 bp, Artificial Sequence
  chemically synthesized
atgaaaatcaacttctcaattt

SEQ ID NO: 39528 - DNA, 22 bp, Artificial Sequence
  chemically synthesized
ctcaatttgagagcctcattgg

SEQ ID NO: 39529 - DNA, 22 bp, Artificial Sequence
  chemically synthesized
tcaatttgagagcctcattggg

SEQ ID NO: 39530 - DNA, 22 bp, Artificial Sequence
  chemically synthesized
aatttgagagcctcattgggca

SEQ ID NO: 39531 - DNA, 22 bp, Artificial Sequence
  chemically synthesized
gagagcctcattgggcatttac

SEQ ID NO: 39532 - DNA, 22 bp, Artificial Sequence
  chemically synthesized
agagcctcattgggcatttacg

SEQ ID NO: 39533 - DNA, 22 bp, Artificial Sequence
  chemically synthesized
attgggcatttacggggattgt

SEQ ID NO: 39534 - DNA, 22 bp, Artificial Sequence
  chemically synthesized
ggcatttacggggattgttttg

SEQ ID NO: 39535 - DNA, 22 bp, Artificial Sequence
  chemically synthesized
acggggattgttttgatttaga

SEQ ID NO: 39536 - DNA, 22 bp, Artificial Sequence
  chemically synthesized
cggggattgttttgatttagag

SEQ ID NO: 39537 - DNA, 22 bp, Artificial Sequence
  chemically synthesized
ttttgatttagagcaataaact

SEQ ID NO: 39538 - DNA, 22 bp, Artificial Sequence
  chemically synthesized
tgatttagagcaataaactgac

SEQ ID NO: 39539 - DNA, 22 bp, Artificial Sequence
  chemically synthesized
gatttagagcaataaactgaca

SEQ ID NO: 39540 - DNA, 22 bp, Artificial Sequence
  chemically synthesized
atttagagcaataaactgacac

SEQ ID NO: 39541 - DNA, 22 bp, Artificial Sequence
  chemically synthesized
agagcaataaactgacacctgg

SEQ ID NO: 39542 - DNA, 22 bp, Artificial Sequence
  chemically synthesized
gagcaataaactgacacctggc

SEQ ID NO: 39543 - DNA, 22 bp, Artificial Sequence
  chemically synthesized
acacctggcccctaagcatagg

SEQ ID NO: 39544 - DNA, 22 bp, Artificial Sequence
  chemically synthesized
gcccctaagcataggaacttga

SEQ ID NO: 39545 - DNA, 22 bp, Artificial Sequence
  chemically synthesized
agcataggaacttgagacatca

SEQ ID NO: 39546 - DNA, 22 bp, Artificial Sequence
  chemically synthesized
gagacatcaaaagggttaaaat

SEQ ID NO: 39547 - DNA, 22 bp, Artificial Sequence
  chemically synthesized
agacatcaaaagggttaaaatc

SEQ ID NO: 39548 - DNA, 22 bp, Artificial Sequence
  chemically synthesized
aaatcagctattagcccaccta

SEQ ID NO: 39549 - DNA, 22 bp, Artificial Sequence
  chemically synthesized
ttagcccacctactggctttta

SEQ ID NO: 39550 - DNA, 22 bp, Artificial Sequence
  chemically synthesized
gcccacctactggcttttattt

SEQ ID NO: 39551 - DNA, 22 bp, Artificial Sequence
  chemically synthesized
ctggcttttattttatttcatt

SEQ ID NO: 39552 - DNA, 22 bp, Artificial Sequence
  chemically synthesized
gcttttattttatttcatttta

SEQ ID NO: 39553 - DNA, 22 bp, Artificial Sequence
  chemically synthesized
ttattttatttcattttacttt

SEQ ID NO: 39554 - DNA, 22 bp, Artificial Sequence
  chemically synthesized
tattttatttcattttacttta

SEQ ID NO: 39555 - DNA, 22 bp, Artificial Sequence
  chemically synthesized
attttatttcattttactttat

SEQ ID NO: 39556 - DNA, 22 bp, Artificial Sequence
  chemically synthesized
ttttatttcattttactttatg

SEQ ID NO: 39557 - DNA, 22 bp, Artificial Sequence
  chemically synthesized
tatttcattttactttatggga

SEQ ID NO: 39558 - DNA, 22 bp, Artificial Sequence
  chemically synthesized
atttcattttactttatgggaa

SEQ ID NO: 39559 - DNA, 22 bp, Artificial Sequence
  chemically synthesized
tttcattttactttatgggaag

SEQ ID NO: 39560 - DNA, 22 bp, Artificial Sequence
  chemically synthesized
cattttactttatgggaaggaa

SEQ ID NO: 39561 - DNA, 22 bp, Artificial Sequence
  chemically synthesized
attttactttatgggaaggaat

SEQ ID NO: 39562 - DNA, 22 bp, Artificial Sequence
  chemically synthesized
tactttatgggaaggaatgacc

SEQ ID NO: 39563 - DNA, 22 bp, Artificial Sequence
  chemically synthesized
actttatgggaaggaatgaccc

SEQ ID NO: 39564 - DNA, 22 bp, Artificial Sequence
  chemically synthesized
ctttatgggaaggaatgacccc

SEQ ID NO: 39565 - DNA, 22 bp, Artificial Sequence
  chemically synthesized
tatgggaaggaatgacccccat

SEQ ID NO: 39566 - DNA, 22 bp, Artificial Sequence
  chemically synthesized
atgggaaggaatgacccccatt

SEQ ID NO: 39567 - DNA, 22 bp, Artificial Sequence
  chemically synthesized
tgggaaggaatgacccccattt

SEQ ID NO: 39568 - DNA, 22 bp, Artificial Sequence
  chemically synthesized
ctagtatgtcaccaatgtgaaa

SEQ ID NO: 39569 - DNA, 22 bp, Artificial Sequence
  chemically synthesized
tagtatgtcaccaatgtgaaaa

SEQ ID NO: 39570 - DNA, 22 bp, Artificial Sequence
  chemically synthesized
gtatgtcaccaatgtgaaaaag

SEQ ID NO: 39571 - DNA, 22 bp, Artificial Sequence
  chemically synthesized
agcctcaagattcagaagaaca

SEQ ID NO: 39572 - DNA, 22 bp, Artificial Sequence
  chemically synthesized
aagattcagaagaacaaggagg

SEQ ID NO: 39573 - DNA, 22 bp, Artificial Sequence
  chemically synthesized
agaagaacaaggaggtctgaga

SEQ ID NO: 39574 - DNA, 22 bp, Artificial Sequence
  chemically synthesized
agactggaggcctagctctatt

SEQ ID NO: 39575 - DNA, 22 bp, Artificial Sequence
  chemically synthesized
gaggcctagctctattatccac

SEQ ID NO: 39576 - DNA, 22 bp, Artificial Sequence
  chemically synthesized
gctctattatccactagattgt

SEQ ID NO: 39577 - DNA, 22 bp, Artificial Sequence
  chemically synthesized
tattatccactagattgtaact

SEQ ID NO: 39578 - DNA, 22 bp, Artificial Sequence
  chemically synthesized
ttatccactagattgtaactct

SEQ ID NO: 39579 - DNA, 22 bp, Artificial Sequence
  chemically synthesized
tccactagattgtaactctggg

SEQ ID NO: 39580 - DNA, 22 bp, Artificial Sequence
  chemically synthesized
gattgtaactctgggatagtca

SEQ ID NO: 39581 - DNA, 22 bp, Artificial Sequence
  chemically synthesized
taactctgggatagtcatttga

SEQ ID NO: 39582 - DNA, 22 bp, Artificial Sequence
  chemically synthesized
tgggatagtcatttgatttctc

SEQ ID NO: 39583 - DNA, 22 bp, Artificial Sequence
  chemically synthesized
ggatagtcatttgatttctctg

SEQ ID NO: 39584 - DNA, 22 bp, Artificial Sequence
  chemically synthesized
gatttctctgagtcttggaatt

SEQ ID NO: 39585 - DNA, 22 bp, Artificial Sequence
  chemically synthesized
atttctctgagtcttggaattc

SEQ ID NO: 39586 - DNA, 22 bp, Artificial Sequence
  chemically synthesized
ctctgagtcttggaattcctat

SEQ ID NO: 39587 - DNA, 22 bp, Artificial Sequence
  chemically synthesized
tctgagtcttggaattcctatc

SEQ ID NO: 39588 - DNA, 22 bp, Artificial Sequence
  chemically synthesized
tgagtcttggaattcctatctg

SEQ ID NO: 39589 - DNA, 22 bp, Artificial Sequence
  chemically synthesized
agtcttggaattcctatctgta

SEQ ID NO: 39590 - DNA, 22 bp, Artificial Sequence
  chemically synthesized
ggaattcctatctgtaaaatga

SEQ ID NO: 39591 - DNA, 22 bp, Artificial Sequence
  chemically synthesized
gaattcctatctgtaaaatgag

SEQ ID NO: 39592 - DNA, 22 bp, Artificial Sequence
  chemically synthesized
ctatctgtaaaatgagcataaa

SEQ ID NO: 39593 - DNA, 22 bp, Artificial Sequence
  chemically synthesized
tctgtaaaatgagcataaaaac

SEQ ID NO: 39594 - DNA, 22 bp, Artificial Sequence
  chemically synthesized
taaaatgagcataaaaacagta

SEQ ID NO: 39595 - DNA, 22 bp, Artificial Sequence
  chemically synthesized
taagaattgttgggaagttcaa

SEQ ID NO: 39596 - DNA, 22 bp, Artificial Sequence
  chemically synthesized
ttgggaagttcaaatgacagaa

SEQ ID NO: 39597 - DNA, 22 bp, Artificial Sequence
  chemically synthesized
ggaagttcaaatgacagaagta

SEQ ID NO: 39598 - DNA, 22 bp, Artificial Sequence
  chemically synthesized
aaatgacagaagtatataaaag

SEQ ID NO: 39599 - DNA, 22 bp, Artificial Sequence
  chemically synthesized
tgtaaactatcaggtcgaatgt

SEQ ID NO: 39600 - DNA, 22 bp, Artificial Sequence
  chemically synthesized
taaactatcaggtcgaatgtga

SEQ ID NO: 39601 - DNA, 22 bp, Artificial Sequence
  chemically synthesized
tcaggtcgaatgtgaatgtgag

SEQ ID NO: 39602 - DNA, 22 bp, Artificial Sequence
  chemically synthesized
tcattactaccaggggtgatta

SEQ ID NO: 39603 - DNA, 22 bp, Artificial Sequence
  chemically synthesized
cattactaccaggggtgattaa

SEQ ID NO: 39604 - DNA, 22 bp, Artificial Sequence
  chemically synthesized
attactaccaggggtgattaat

SEQ ID NO: 39605 - DNA, 22 bp, Artificial Sequence
  chemically synthesized
ctaccaggggtgattaattact

SEQ ID NO: 39606 - DNA, 22 bp, Artificial Sequence
  chemically synthesized
ccaggggtgattaattactgag

SEQ ID NO: 39607 - DNA, 22 bp, Artificial Sequence
  chemically synthesized
attactgagggtaatgactaac

SEQ ID NO: 39608 - DNA, 22 bp, Artificial Sequence
  chemically synthesized
ctgagggtaatgactaaccaca

SEQ ID NO: 39609 - DNA, 22 bp, Artificial Sequence
  chemically synthesized
agggtaatgactaaccacatta

SEQ ID NO: 39610 - DNA, 22 bp, Artificial Sequence
  chemically synthesized
accacattacacaccccgaacg

SEQ ID NO: 39611 - DNA, 22 bp, Artificial Sequence
  chemically synthesized
cacaccccgaacggcttccaga

SEQ ID NO: 39612 - DNA, 22 bp, Artificial Sequence
  chemically synthesized
ccagaggaaggtcccagtccag

SEQ ID NO: 39613 - DNA, 22 bp, Artificial Sequence
  chemically synthesized
cagaggaaggtcccagtccagg

SEQ ID NO: 39614 - DNA, 22 bp, Artificial Sequence
  chemically synthesized
aacccaggccaaaaggaggctc

SEQ ID NO: 39615 - DNA, 22 bp, Artificial Sequence
  chemically synthesized
acccaggccaaaaggaggctct

SEQ ID NO: 39616 - DNA, 22 bp, Artificial Sequence
  chemically synthesized
tagttaaagagcaggggtgact

SEQ ID NO: 39617 - DNA, 22 bp, Artificial Sequence
  chemically synthesized
gttaaagagcaggggtgactgg

SEQ ID NO: 39618 - DNA, 22 bp, Artificial Sequence
  chemically synthesized
aagagcaggggtgactggcaca

SEQ ID NO: 39619 - DNA, 22 bp, Artificial Sequence
  chemically synthesized
gcacacagcagagtggccacag

SEQ ID NO: 39620 - DNA, 22 bp, Artificial Sequence
  chemically synthesized
tgagctctggaagccaggggca

SEQ ID NO: 39621 - DNA, 22 bp, Artificial Sequence
  chemically synthesized
tggaagccaggggcagcaggtt

SEQ ID NO: 39622 - DNA, 22 bp, Artificial Sequence
  chemically synthesized
gaagccaggggcagcaggttaa

SEQ ID NO: 39623 - DNA, 22 bp, Artificial Sequence
  chemically synthesized
atgccgccaagtggaatgggca

SEQ ID NO: 39624 - DNA, 22 bp, Artificial Sequence
  chemically synthesized
gttctagagctttctggacccc

SEQ ID NO: 39625 - DNA, 22 bp, Artificial Sequence
  chemically synthesized
ttctagagctttctggaccccc

SEQ ID NO: 39626 - DNA, 22 bp, Artificial Sequence
  chemically synthesized
tagagctttctggacccccaca

SEQ ID NO: 39627 - DNA, 22 bp, Artificial Sequence
  chemically synthesized
gagctttctggacccccacaac

SEQ ID NO: 39628 - DNA, 22 bp, Artificial Sequence
  chemically synthesized
tctggacccccacaacccactt

SEQ ID NO: 39629 - DNA, 22 bp, Artificial Sequence
  chemically synthesized
ctggacccccacaacccacttc

SEQ ID NO: 39630 - DNA, 22 bp, Artificial Sequence
  chemically synthesized
tggacccccacaacccacttcc

SEQ ID NO: 39631 - DNA, 22 bp, Artificial Sequence
  chemically synthesized
gacccccacaacccacttccac

SEQ ID NO: 39632 - DNA, 22 bp, Artificial Sequence
  chemically synthesized
ccacataccttgttctggtcac

SEQ ID NO: 39633 - DNA, 22 bp, Artificial Sequence
  chemically synthesized
cacataccttgttctggtcact

SEQ ID NO: 39634 - DNA, 22 bp, Artificial Sequence
  chemically synthesized
gttctggtcactcctaaattgg

SEQ ID NO: 39635 - DNA, 22 bp, Artificial Sequence
  chemically synthesized
ttctggtcactcctaaattggt

SEQ ID NO: 39636 - DNA, 22 bp, Artificial Sequence
  chemically synthesized
tggtcactcctaaattggtcct

SEQ ID NO: 39637 - DNA, 22 bp, Artificial Sequence
  chemically synthesized
gtcactcctaaattggtcctgc

SEQ ID NO: 39638 - DNA, 22 bp, Artificial Sequence
  chemically synthesized
ctaaattggtcctgccagcagg

SEQ ID NO: 39639 - DNA, 22 bp, Artificial Sequence
  chemically synthesized
aattggtcctgccagcaggggc

SEQ ID NO: 39640 - DNA, 22 bp, Artificial Sequence
  chemically synthesized
gtcctgccagcaggggcaccag

SEQ ID NO: 39641 - DNA, 22 bp, Artificial Sequence
  chemically synthesized
ccagcaggggcaccagcaaact

SEQ ID NO: 39642 - DNA, 22 bp, Artificial Sequence
  chemically synthesized
tgtaccctccctttgtgggaag

SEQ ID NO: 39643 - DNA, 22 bp, Artificial Sequence
  chemically synthesized
cctttgtgggaaggtgggagag

SEQ ID NO: 39644 - DNA, 22 bp, Artificial Sequence
  chemically synthesized
tgtgggaaggtgggagaggaca

SEQ ID NO: 39645 - DNA, 22 bp, Artificial Sequence
  chemically synthesized
gtgggaaggtgggagaggacag

SEQ ID NO: 39646 - DNA, 22 bp, Artificial Sequence
  chemically synthesized
tgggaaggtgggagaggacagg

SEQ ID NO: 39647 - DNA, 22 bp, Artificial Sequence
  chemically synthesized
cctatcaagctcagactttcct

SEQ ID NO: 39648 - DNA, 22 bp, Artificial Sequence
  chemically synthesized
tcaagctcagactttcctacca

SEQ ID NO: 39649 - DNA, 22 bp, Artificial Sequence
  chemically synthesized
agactttcctaccagtcaaatc

SEQ ID NO: 39650 - DNA, 22 bp, Artificial Sequence
  chemically synthesized
tcctaccagtcaaatcaaactc

SEQ ID NO: 39651 - DNA, 22 bp, Artificial Sequence
  chemically synthesized
cctaccagtcaaatcaaactcc

SEQ ID NO: 39652 - DNA, 22 bp, Artificial Sequence
  chemically synthesized
ctaccagtcaaatcaaactccc

SEQ ID NO: 39653 - DNA, 22 bp, Artificial Sequence
  chemically synthesized
ccagtcaaatcaaactcccagc

SEQ ID NO: 39654 - DNA, 22 bp, Artificial Sequence
  chemically synthesized
ccagccctcaggaagaccaggc

SEQ ID NO: 39655 - DNA, 22 bp, Artificial Sequence
  chemically synthesized
aggaagaccaggctgaagaccg

SEQ ID NO: 39656 - DNA, 22 bp, Artificial Sequence
  chemically synthesized
aagaccgagaactatgtttccc

SEQ ID NO: 39657 - DNA, 22 bp, Artificial Sequence
  chemically synthesized
tgtttccctggcaacagccctt

SEQ ID NO: 39658 - DNA, 22 bp, Artificial Sequence
  chemically synthesized
ccctggcaacagcccttggcct

SEQ ID NO: 39659 - DNA, 22 bp, Artificial Sequence
  chemically synthesized
cctggcaacagcccttggcctc

SEQ ID NO: 39660 - DNA, 22 bp, Artificial Sequence
  chemically synthesized
gcaacagcccttggcctctcaa

SEQ ID NO: 39661 - DNA, 22 bp, Artificial Sequence
  chemically synthesized
ggcctctcaactccaccctcct

SEQ ID NO: 39662 - DNA, 22 bp, Artificial Sequence
  chemically synthesized
gcctctcaactccaccctcctc

SEQ ID NO: 39663 - DNA, 22 bp, Artificial Sequence
  chemically synthesized
tcaactccaccctcctctgaac

SEQ ID NO: 39664 - DNA, 22 bp, Artificial Sequence
  chemically synthesized
aactccaccctcctctgaactg

SEQ ID NO: 39665 - DNA, 22 bp, Artificial Sequence
  chemically synthesized
caccctcctctgaactgctcaa

SEQ ID NO: 39666 - DNA, 22 bp, Artificial Sequence
  chemically synthesized
ctctgaactgctcaactccctt

SEQ ID NO: 39667 - DNA, 22 bp, Artificial Sequence
  chemically synthesized
tgaactgctcaactcccttcta

SEQ ID NO: 39668 - DNA, 22 bp, Artificial Sequence
  chemically synthesized
aactgctcaactcccttctatc

SEQ ID NO: 39669 - DNA, 22 bp, Artificial Sequence
  chemically synthesized
ctcaactcccttctatcccttc

SEQ ID NO: 39670 - DNA, 22 bp, Artificial Sequence
  chemically synthesized
aactcccttctatcccttccct

SEQ ID NO: 39671 - DNA, 22 bp, Artificial Sequence
  chemically synthesized
ccttctatcccttccctccaaa

SEQ ID NO: 39672 - DNA, 22 bp, Artificial Sequence
  chemically synthesized
ctatcccttccctccaaaagtg

SEQ ID NO: 39673 - DNA, 22 bp, Artificial Sequence
  chemically synthesized
tatcccttccctccaaaagtgg

SEQ ID NO: 39674 - DNA, 22 bp, Artificial Sequence
  chemically synthesized
tcccttccctccaaaagtggct

SEQ ID NO: 39675 - DNA, 22 bp, Artificial Sequence
  chemically synthesized
ccctccaaaagtggctccgttt

SEQ ID NO: 39676 - DNA, 22 bp, Artificial Sequence
  chemically synthesized
cctccaaaagtggctccgtttc

SEQ ID NO: 39677 - DNA, 22 bp, Artificial Sequence
  chemically synthesized
caaaagtggctccgtttccaca

SEQ ID NO: 39678 - DNA, 22 bp, Artificial Sequence
  chemically synthesized
cgtttccacagccccatgcagg

SEQ ID NO: 39679 - DNA, 22 bp, Artificial Sequence
  chemically synthesized
ccacagccccatgcaggcccca

SEQ ID NO: 39680 - DNA, 22 bp, Artificial Sequence
  chemically synthesized
cacagccccatgcaggccccag

SEQ ID NO: 39681 - DNA, 22 bp, Artificial Sequence
  chemically synthesized
tccccacccagccagcatgcag

SEQ ID NO: 39682 - DNA, 22 bp, Artificial Sequence
  chemically synthesized
cccacccagccagcatgcaggg

SEQ ID NO: 39683 - DNA, 22 bp, Artificial Sequence
  chemically synthesized
gaaaccgtgagcccaacctcct

SEQ ID NO: 39684 - DNA, 22 bp, Artificial Sequence
  chemically synthesized
ctaaaccttctgcaatctgtga

SEQ ID NO: 39685 - DNA, 22 bp, Artificial Sequence
  chemically synthesized
aaccttctgcaatctgtgacct

SEQ ID NO: 39686 - DNA, 22 bp, Artificial Sequence
  chemically synthesized
ctgcaatctgtgacctaaccca

SEQ ID NO: 39687 - DNA, 22 bp, Artificial Sequence
  chemically synthesized
tgcaatctgtgacctaacccag

SEQ ID NO: 39688 - DNA, 22 bp, Artificial Sequence
  chemically synthesized
caatctgtgacctaacccaggc

SEQ ID NO: 39689 - DNA, 22 bp, Artificial Sequence
  chemically synthesized
tgacctaacccaggcttaggcc

SEQ ID NO: 39690 - DNA, 22 bp, Artificial Sequence
  chemically synthesized
acccaggcttaggcccagcttg

SEQ ID NO: 39691 - DNA, 22 bp, Artificial Sequence
  chemically synthesized
aggcccagcttgggggaaggga

SEQ ID NO: 39692 - DNA, 22 bp, Artificial Sequence
  chemically synthesized
ggcccagcttgggggaagggag

SEQ ID NO: 39693 - DNA, 22 bp, Artificial Sequence
  chemically synthesized
gggggaagggagcagatgaggt

SEQ ID NO: 39694 - DNA, 22 bp, Artificial Sequence
  chemically synthesized
ggggaagggagcagatgaggtg

SEQ ID NO: 39695 - DNA, 22 bp, Artificial Sequence
  chemically synthesized
ttaacccctgaaccacccagcc

SEQ ID NO: 39696 - DNA, 22 bp, Artificial Sequence
  chemically synthesized
taacccctgaaccacccagccc

SEQ ID NO: 39697 - DNA, 22 bp, Artificial Sequence
  chemically synthesized
aacccctgaaccacccagccct

SEQ ID NO: 39698 - DNA, 22 bp, Artificial Sequence
  chemically synthesized
acccctgaaccacccagccctc

SEQ ID NO: 39699 - DNA, 22 bp, Artificial Sequence
  chemically synthesized
aaccacccagccctcaggacct

SEQ ID NO: 39700 - DNA, 22 bp, Artificial Sequence
  chemically synthesized
aggacctgagggcttatgaaat

SEQ ID NO: 39701 - DNA, 22 bp, Artificial Sequence
  chemically synthesized
agggcttatgaaattcacacaa

SEQ ID NO: 39702 - DNA, 22 bp, Artificial Sequence
  chemically synthesized
atgaaattcacacaataactct

SEQ ID NO: 39703 - DNA, 22 bp, Artificial Sequence
  chemically synthesized
tgaaattcacacaataactctt

SEQ ID NO: 39704 - DNA, 22 bp, Artificial Sequence
  chemically synthesized
acacaataactctttgttacct

SEQ ID NO: 39705 - DNA, 22 bp, Artificial Sequence
  chemically synthesized
tttgttacctaggattacctag

SEQ ID NO: 39706 - DNA, 22 bp, Artificial Sequence
  chemically synthesized
tgttacctaggattacctagga

SEQ ID NO: 39707 - DNA, 22 bp, Artificial Sequence
  chemically synthesized
gttacctaggattacctaggag

SEQ ID NO: 39708 - DNA, 22 bp, Artificial Sequence
  chemically synthesized
ttacctaggattacctaggagt

SEQ ID NO: 39709 - DNA, 22 bp, Artificial Sequence
  chemically synthesized
cctaggattacctaggagttaa

SEQ ID NO: 39710 - DNA, 22 bp, Artificial Sequence
  chemically synthesized
ggattacctaggagttaacaaa

SEQ ID NO: 39711 - DNA, 22 bp, Artificial Sequence
  chemically synthesized
cctaggagttaacaaaaataaa

SEQ ID NO: 39712 - DNA, 22 bp, Artificial Sequence
  chemically synthesized
ggagttaacaaaaataaacaac

SEQ ID NO: 39713 - DNA, 22 bp, Artificial Sequence
  chemically synthesized
acaaaaataaacaactggcttt

SEQ ID NO: 39714 - DNA, 22 bp, Artificial Sequence
  chemically synthesized
gctttgaatctggtctcagggt

SEQ ID NO: 39715 - DNA, 22 bp, Artificial Sequence
  chemically synthesized
tgaatctggtctcagggtgcat

SEQ ID NO: 39716 - DNA, 22 bp, Artificial Sequence
  chemically synthesized
gaatctggtctcagggtgcatg

SEQ ID NO: 39717 - DNA, 22 bp, Artificial Sequence
  chemically synthesized
aatctggtctcagggtgcatgc

SEQ ID NO: 39718 - DNA, 22 bp, Artificial Sequence
  chemically synthesized
gtctcagggtgcatgccctgct

SEQ ID NO: 39719 - DNA, 22 bp, Artificial Sequence
  chemically synthesized
agggtgcatgccctgctcttca

SEQ ID NO: 39720 - DNA, 22 bp, Artificial Sequence
  chemically synthesized
ctcttcagataccatttacaag

SEQ ID NO: 39721 - DNA, 22 bp, Artificial Sequence
  chemically synthesized
ttcagataccatttacaagatg

SEQ ID NO: 39722 - DNA, 22 bp, Artificial Sequence
  chemically synthesized
cagataccatttacaagatggg

SEQ ID NO: 39723 - DNA, 22 bp, Artificial Sequence
  chemically synthesized
agataccatttacaagatgggt

SEQ ID NO: 39724 - DNA, 22 bp, Artificial Sequence
  chemically synthesized
acaagatgggtaagtgtcatct

SEQ ID NO: 39725 - DNA, 22 bp, Artificial Sequence
  chemically synthesized
caagatgggtaagtgtcatctc

SEQ ID NO: 39726 - DNA, 22 bp, Artificial Sequence
  chemically synthesized
cctcccatctaaaaacagtccc

SEQ ID NO: 39727 - DNA, 22 bp, Artificial Sequence
  chemically synthesized
ccatctaaaaacagtccccctt

SEQ ID NO: 39728 - DNA, 22 bp, Artificial Sequence
  chemically synthesized
aaaacagtcccccttagagcct

SEQ ID NO: 39729 - DNA, 22 bp, Artificial Sequence
  chemically synthesized
agagccttaactctggcatctt

SEQ ID NO: 39730 - DNA, 22 bp, Artificial Sequence
  chemically synthesized
gagccttaactctggcatcttg

SEQ ID NO: 39731 - DNA, 22 bp, Artificial Sequence
  chemically synthesized
aactctggcatcttgctctttg

SEQ ID NO: 39732 - DNA, 22 bp, Artificial Sequence
  chemically synthesized
actctggcatcttgctctttgt

SEQ ID NO: 39733 - DNA, 22 bp, Artificial Sequence
  chemically synthesized
tggcatcttgctctttgttatt

SEQ ID NO: 39734 - DNA, 22 bp, Artificial Sequence
  chemically synthesized
gcatcttgctctttgttattct

SEQ ID NO: 39735 - DNA, 22 bp, Artificial Sequence
  chemically synthesized
gctctttgttattctctctcca

SEQ ID NO: 39736 - DNA, 22 bp, Artificial Sequence
  chemically synthesized
ctctttgttattctctctccat

SEQ ID NO: 39737 - DNA, 22 bp, Artificial Sequence
  chemically synthesized
tttgttattctctctccatgac

SEQ ID NO: 39738 - DNA, 22 bp, Artificial Sequence
  chemically synthesized
tgttattctctctccatgacct

SEQ ID NO: 39739 - DNA, 22 bp, Artificial Sequence
  chemically synthesized
gttattctctctccatgacctt

SEQ ID NO: 39740 - DNA, 22 bp, Artificial Sequence
  chemically synthesized
ttattctctctccatgaccttt

SEQ ID NO: 39741 - DNA, 22 bp, Artificial Sequence
  chemically synthesized
ttctctctccatgacctttttc

SEQ ID NO: 39742 - DNA, 22 bp, Artificial Sequence
  chemically synthesized
tctctccatgacctttttcctt

SEQ ID NO: 39743 - DNA, 22 bp, Artificial Sequence
  chemically synthesized
tctccatgacctttttcctttt

SEQ ID NO: 39744 - DNA, 22 bp, Artificial Sequence
  chemically synthesized
tccatgacctttttccttttct

SEQ ID NO: 39745 - DNA, 22 bp, Artificial Sequence
  chemically synthesized
catgacctttttccttttcttt

SEQ ID NO: 39746 - DNA, 22 bp, Artificial Sequence
  chemically synthesized
tttccttttctttttttttctt

SEQ ID NO: 39747 - DNA, 22 bp, Artificial Sequence
  chemically synthesized
ttccttttctttttttttcttt

SEQ ID NO: 39748 - DNA, 22 bp, Artificial Sequence
  chemically synthesized
tccttttctttttttttctttc

SEQ ID NO: 39749 - DNA, 22 bp, Artificial Sequence
  chemically synthesized
ccttttctttttttttctttcc

SEQ ID NO: 39750 - DNA, 22 bp, Artificial Sequence
  chemically synthesized
cttttctttttttttctttcca

SEQ ID NO: 39751 - DNA, 22 bp, Artificial Sequence
  chemically synthesized
ttctttttttttctttccacag

SEQ ID NO: 39752 - DNA, 22 bp, Artificial Sequence
  chemically synthesized
tctttttttttctttccacagc

SEQ ID NO: 39753 - DNA, 22 bp, Artificial Sequence
  chemically synthesized
ctttttttttctttccacagca

SEQ ID NO: 39754 - DNA, 22 bp, Artificial Sequence
  chemically synthesized
tttttttttctttccacagcag

SEQ ID NO: 39755 - DNA, 22 bp, Artificial Sequence
  chemically synthesized
tttttttctttccacagcaggt

SEQ ID NO: 39756 - DNA, 22 bp, Artificial Sequence
  chemically synthesized
ttttttctttccacagcaggtt

SEQ ID NO: 39757 - DNA, 22 bp, Artificial Sequence
  chemically synthesized
tttttctttccacagcaggtta

SEQ ID NO: 39758 - DNA, 22 bp, Artificial Sequence
  chemically synthesized
ttttctttccacagcaggttat

SEQ ID NO: 39759 - DNA, 22 bp, Artificial Sequence
  chemically synthesized
tttctttccacagcaggttatt

SEQ ID NO: 39760 - DNA, 22 bp, Artificial Sequence
  chemically synthesized
ttctttccacagcaggttattt

SEQ ID NO: 39761 - DNA, 22 bp, Artificial Sequence
  chemically synthesized
tctttccacagcaggttatttt

SEQ ID NO: 39762 - DNA, 22 bp, Artificial Sequence
  chemically synthesized
ctttccacagcaggttattttt

SEQ ID NO: 39763 - DNA, 22 bp, Artificial Sequence
  chemically synthesized
tttccacagcaggttatttttc

SEQ ID NO: 39764 - DNA, 22 bp, Artificial Sequence
  chemically synthesized
tccacagcaggttatttttcat

SEQ ID NO: 39765 - DNA, 22 bp, Artificial Sequence
  chemically synthesized
ccacagcaggttatttttcatt

SEQ ID NO: 39766 - DNA, 22 bp, Artificial Sequence
  chemically synthesized
cacagcaggttatttttcattt

SEQ ID NO: 39767 - DNA, 22 bp, Artificial Sequence
  chemically synthesized
tttttcatttactttcaaataa

SEQ ID NO: 39768 - DNA, 22 bp, Artificial Sequence
  chemically synthesized
ttcatttactttcaaataaaaa

SEQ ID NO: 39769 - DNA, 22 bp, Artificial Sequence
  chemically synthesized
tcatttactttcaaataaaaat

SEQ ID NO: 39770 - DNA, 22 bp, Artificial Sequence
  chemically synthesized
catttactttcaaataaaaatt

SEQ ID NO: 39771 - DNA, 22 bp, Artificial Sequence
  chemically synthesized
atttactttcaaataaaaatta

SEQ ID NO: 39772 - DNA, 22 bp, Artificial Sequence
  chemically synthesized
actttcaaataaaaattagatg

SEQ ID NO: 39773 - DNA, 22 bp, Artificial Sequence
  chemically synthesized
ctttcaaataaaaattagatgt

SEQ ID NO: 39774 - DNA, 22 bp, Artificial Sequence
  chemically synthesized
tcaaataaaaattagatgtcac

SEQ ID NO: 39775 - DNA, 22 bp, Artificial Sequence
  chemically synthesized
caaataaaaattagatgtcaca

SEQ ID NO: 39776 - DNA, 22 bp, Artificial Sequence
  chemically synthesized
aaataaaaattagatgtcacac

SEQ ID NO: 39777 - DNA, 22 bp, Artificial Sequence
  chemically synthesized
gatgtcacacttcttttcttct

SEQ ID NO: 39778 - DNA, 22 bp, Artificial Sequence
  chemically synthesized
cttttcttcttgaacctgcttt

SEQ ID NO: 39779 - DNA, 22 bp, Artificial Sequence
  chemically synthesized
ttttcttcttgaacctgctttt

SEQ ID NO: 39780 - DNA, 22 bp, Artificial Sequence
  chemically synthesized
ttcttcttgaacctgctttttt

SEQ ID NO: 39781 - DNA, 22 bp, Artificial Sequence
  chemically synthesized
tcttcttgaacctgcttttttg

SEQ ID NO: 39782 - DNA, 22 bp, Artificial Sequence
  chemically synthesized
cttcttgaacctgcttttttgt

SEQ ID NO: 39783 - DNA, 22 bp, Artificial Sequence
  chemically synthesized
ttcttgaacctgcttttttgtg

SEQ ID NO: 39784 - DNA, 22 bp, Artificial Sequence
  chemically synthesized
cttgaacctgcttttttgtgtt

SEQ ID NO: 39785 - DNA, 22 bp, Artificial Sequence
  chemically synthesized
ttgaacctgcttttttgtgttt

SEQ ID NO: 39786 - DNA, 22 bp, Artificial Sequence
  chemically synthesized
gaacctgcttttttgtgtttag

SEQ ID NO: 39787 - DNA, 22 bp, Artificial Sequence
  chemically synthesized
aacctgcttttttgtgtttagg

SEQ ID NO: 39788 - DNA, 22 bp, Artificial Sequence
  chemically synthesized
cttttttgtgtttagggtggaa

SEQ ID NO: 39789 - DNA, 22 bp, Artificial Sequence
  chemically synthesized
ttttgtgtttagggtggaatca

SEQ ID NO: 39790 - DNA, 22 bp, Artificial Sequence
  chemically synthesized
tttgtgtttagggtggaatcac

SEQ ID NO: 39791 - DNA, 22 bp, Artificial Sequence
  chemically synthesized
ttgtgtttagggtggaatcact

SEQ ID NO: 39792 - DNA, 22 bp, Artificial Sequence
  chemically synthesized
tgtgtttagggtggaatcactg

SEQ ID NO: 39793 - DNA, 22 bp, Artificial Sequence
  chemically synthesized
gtgtttagggtggaatcactgc

SEQ ID NO: 39794 - DNA, 22 bp, Artificial Sequence
  chemically synthesized
tgtttagggtggaatcactgcc

SEQ ID NO: 39795 - DNA, 22 bp, Artificial Sequence
  chemically synthesized
agggtggaatcactgcccaccc

SEQ ID NO: 39796 - DNA, 22 bp, Artificial Sequence
  chemically synthesized
gggtggaatcactgcccacccc

SEQ ID NO: 39797 - DNA, 22 bp, Artificial Sequence
  chemically synthesized
cccaccccctaaccttttagcc

SEQ ID NO: 39798 - DNA, 22 bp, Artificial Sequence
  chemically synthesized
accttttagccatgcatgattc

SEQ ID NO: 39799 - DNA, 22 bp, Artificial Sequence
  chemically synthesized
ttagccatgcatgattcatacc

SEQ ID NO: 39800 - DNA, 22 bp, Artificial Sequence
  chemically synthesized
tagccatgcatgattcatacca

SEQ ID NO: 39801 - DNA, 22 bp, Artificial Sequence
  chemically synthesized
agccatgcatgattcataccat

SEQ ID NO: 39802 - DNA, 22 bp, Artificial Sequence
  chemically synthesized
gccatgcatgattcataccatg

SEQ ID NO: 39803 - DNA, 22 bp, Artificial Sequence
  chemically synthesized
ataccatgtgttcctacacaga

SEQ ID NO: 39804 - DNA, 22 bp, Artificial Sequence
  chemically synthesized
ctacacagagaagcaaactgta

SEQ ID NO: 39805 - DNA, 22 bp, Artificial Sequence
  chemically synthesized
cacagagaagcaaactgtatta

SEQ ID NO: 39806 - DNA, 22 bp, Artificial Sequence
  chemically synthesized
tattattttctaaaacagtatc

SEQ ID NO: 39807 - DNA, 22 bp, Artificial Sequence
  chemically synthesized
ttttctaaaacagtatctttca

SEQ ID NO: 39808 - DNA, 22 bp, Artificial Sequence
  chemically synthesized
tctaaaacagtatctttcagaa

SEQ ID NO: 39809 - DNA, 22 bp, Artificial Sequence
  chemically synthesized
ctaaaacagtatctttcagaaa

SEQ ID NO: 39810 - DNA, 22 bp, Artificial Sequence
  chemically synthesized
taaaacagtatctttcagaaaa

SEQ ID NO: 39811 - DNA, 22 bp, Artificial Sequence
  chemically synthesized
aaacagtatctttcagaaaaca

SEQ ID NO: 39812 - DNA, 22 bp, Artificial Sequence
  chemically synthesized
tcagaaaacatttgtataaatg

SEQ ID NO: 39813 - DNA, 22 bp, Artificial Sequence
  chemically synthesized
cagaaaacatttgtataaatgg

SEQ ID NO: 39814 - DNA, 22 bp, Artificial Sequence
  chemically synthesized
agaaaacatttgtataaatgga

SEQ ID NO: 39815 - DNA, 22 bp, Artificial Sequence
  chemically synthesized
gtataaatggacaaatttaagt

SEQ ID NO: 39816 - DNA, 22 bp, Artificial Sequence
  chemically synthesized
tataaatggacaaatttaagtt

SEQ ID NO: 39817 - DNA, 22 bp, Artificial Sequence
  chemically synthesized
aagtttcataaaatggtcccta

SEQ ID NO: 39818 - DNA, 22 bp, Artificial Sequence
  chemically synthesized
agtttcataaaatggtccctac

SEQ ID NO: 39819 - DNA, 22 bp, Artificial Sequence
  chemically synthesized
cataaaatggtccctactataa

SEQ ID NO: 39820 - DNA, 22 bp, Artificial Sequence
  chemically synthesized
ataaaatggtccctactataaa

SEQ ID NO: 39821 - DNA, 22 bp, Artificial Sequence
  chemically synthesized
ctataaaagctcacttgaacaa

SEQ ID NO: 39822 - DNA, 22 bp, Artificial Sequence
  chemically synthesized
taaaagctcacttgaacaagta

SEQ ID NO: 39823 - DNA, 22 bp, Artificial Sequence
  chemically synthesized
acttgaacaagtaaatggtggt

SEQ ID NO: 39824 - DNA, 22 bp, Artificial Sequence
  chemically synthesized
gaacaagtaaatggtggtggca

SEQ ID NO: 39825 - DNA, 22 bp, Artificial Sequence
  chemically synthesized
aacaagtaaatggtggtggcag

SEQ ID NO: 39826 - DNA, 22 bp, Artificial Sequence
  chemically synthesized
gtggtgatggtggtggtggtgg

SEQ ID NO: 39827 - DNA, 22 bp, Artificial Sequence
  chemically synthesized
gtgatggtggtggtggtagtga

SEQ ID NO: 39828 - DNA, 22 bp, Artificial Sequence
  chemically synthesized
gtggtgatggtgatggtgatgg

SEQ ID NO: 39829 - DNA, 22 bp, Artificial Sequence
  chemically synthesized
gtgatggtggtggtggtagtga

SEQ ID NO: 39830 - DNA, 22 bp, Artificial Sequence
  chemically synthesized
gtggtgatggtgatggtgatgg

SEQ ID NO: 39831 - DNA, 22 bp, Artificial Sequence
  chemically synthesized
gtgatggtggtggtggtagtga

SEQ ID NO: 39832 - DNA, 22 bp, Artificial Sequence
  chemically synthesized
gtggtgatggtgatggtggtgg

SEQ ID NO: 39833 - DNA, 22 bp, Artificial Sequence
  chemically synthesized
gtggtgatggtactggtggtga

SEQ ID NO: 39834 - DNA, 22 bp, Artificial Sequence
  chemically synthesized
gtggtgatggtggtggtggtag

SEQ ID NO: 39835 - DNA, 22 bp, Artificial Sequence
  chemically synthesized
atggtgatggtactggtggtga

SEQ ID NO: 39836 - DNA, 22 bp, Artificial Sequence
  chemically synthesized
gtggtgatggtactggtggtga

SEQ ID NO: 39837 - DNA, 22 bp, Artificial Sequence
  chemically synthesized
gtggtgatggtgatggtggtgg

SEQ ID NO: 39838 - DNA, 22 bp, Artificial Sequence
  chemically synthesized
ctggtggtgatggtactggtgg

SEQ ID NO: 39839 - DNA, 22 bp, Artificial Sequence
  chemically synthesized
gtggtgatggtactggtggtga

SEQ ID NO: 39840 - DNA, 22 bp, Artificial Sequence
  chemically synthesized
gtggtgatggtggtggtggtag

SEQ ID NO: 39841 - DNA, 22 bp, Artificial Sequence
  chemically synthesized
gtggtgatggtggtggtggtag

SEQ ID NO: 39842 - DNA, 22 bp, Artificial Sequence
  chemically synthesized
gtggtgatggtggtggtggtag

SEQ ID NO: 39843 - DNA, 22 bp, Artificial Sequence
  chemically synthesized
tggtggtggtggtgatggtggc

SEQ ID NO: 39844 - DNA, 22 bp, Artificial Sequence
  chemically synthesized
tggtggtggtggtgatggtggt

SEQ ID NO: 39845 - DNA, 22 bp, Artificial Sequence
  chemically synthesized
cacattttaactacaatgatgt

SEQ ID NO: 39846 - DNA, 22 bp, Artificial Sequence
  chemically synthesized
acattttaactacaatgatgtg

SEQ ID NO: 39847 - DNA, 22 bp, Artificial Sequence
  chemically synthesized
taactacaatgatgtgcatttt

SEQ ID NO: 39848 - DNA, 22 bp, Artificial Sequence
  chemically synthesized
aactacaatgatgtgcattttt

SEQ ID NO: 39849 - DNA, 22 bp, Artificial Sequence
  chemically synthesized
actacaatgatgtgcatttttc

SEQ ID NO: 39850 - DNA, 22 bp, Artificial Sequence
  chemically synthesized
caatgatgtgcatttttctcta

SEQ ID NO: 39851 - DNA, 22 bp, Artificial Sequence
  chemically synthesized
ttctctaaaaccaggagaaaaa

SEQ ID NO: 39852 - DNA, 22 bp, Artificial Sequence
  chemically synthesized
tctctaaaaccaggagaaaaat

SEQ ID NO: 39853 - DNA, 22 bp, Artificial Sequence
  chemically synthesized
ctctaaaaccaggagaaaaatt

SEQ ID NO: 39854 - DNA, 22 bp, Artificial Sequence
  chemically synthesized
tctaaaaccaggagaaaaatta

SEQ ID NO: 39855 - DNA, 22 bp, Artificial Sequence
  chemically synthesized
taaaaccaggagaaaaattagt

SEQ ID NO: 39856 - DNA, 22 bp, Artificial Sequence
  chemically synthesized
aaaccaggagaaaaattagtca

SEQ ID NO: 39857 - DNA, 22 bp, Artificial Sequence
  chemically synthesized
gtcaaaattatgtgtgggcatg

SEQ ID NO: 39858 - DNA, 22 bp, Artificial Sequence
  chemically synthesized
tgtgtgggcatgaatatacaac

SEQ ID NO: 39859 - DNA, 22 bp, Artificial Sequence
  chemically synthesized
tgttcaaatacacatgtaaata

SEQ ID NO: 39860 - DNA, 22 bp, Artificial Sequence
  chemically synthesized
aaatacacatgtaaatacataa

SEQ ID NO: 39861 - DNA, 22 bp, Artificial Sequence
  chemically synthesized
gaataactctggaataacccta

SEQ ID NO: 39862 - DNA, 22 bp, Artificial Sequence
  chemically synthesized
tggaataaccctaaactgactc

SEQ ID NO: 39863 - DNA, 22 bp, Artificial Sequence
  chemically synthesized
gaataaccctaaactgactcct

SEQ ID NO: 39864 - DNA, 22 bp, Artificial Sequence
  chemically synthesized
aactgactccttttgattctgg

SEQ ID NO: 39865 - DNA, 22 bp, Artificial Sequence
  chemically synthesized
actccttttgattctggccttg

SEQ ID NO: 39866 - DNA, 22 bp, Artificial Sequence
  chemically synthesized
cttttgattctggccttggcta

SEQ ID NO: 39867 - DNA, 22 bp, Artificial Sequence
  chemically synthesized
ttgattctggccttggctaaag

SEQ ID NO: 39868 - DNA, 22 bp, Artificial Sequence
  chemically synthesized
tgattctggccttggctaaaga

SEQ ID NO: 39869 - DNA, 22 bp, Artificial Sequence
  chemically synthesized
gattctggccttggctaaagat

SEQ ID NO: 39870 - DNA, 22 bp, Artificial Sequence
  chemically synthesized
attctggccttggctaaagatg

SEQ ID NO: 39871 - DNA, 22 bp, Artificial Sequence
  chemically synthesized
tggccttggctaaagatgtgtg

SEQ ID NO: 39872 - DNA, 22 bp, Artificial Sequence
  chemically synthesized
gccttggctaaagatgtgtgcc

SEQ ID NO: 39873 - DNA, 22 bp, Artificial Sequence
  chemically synthesized
ggctaaagatgtgtgccatgga

SEQ ID NO: 39874 - DNA, 22 bp, Artificial Sequence
  chemically synthesized
gctaaagatgtgtgccatggac

SEQ ID NO: 39875 - DNA, 22 bp, Artificial Sequence
  chemically synthesized
aagatgtgtgccatggactata

SEQ ID NO: 39876 - DNA, 22 bp, Artificial Sequence
  chemically synthesized
tacccaaagtcctaaatgaggc

SEQ ID NO: 39877 - DNA, 22 bp, Artificial Sequence
  chemically synthesized
aatgaggccacaggagtgaatg

SEQ ID NO: 39878 - DNA, 22 bp, Artificial Sequence
  chemically synthesized
cagaggcacaggcatcttcaat

SEQ ID NO: 39879 - DNA, 22 bp, Artificial Sequence
  chemically synthesized
caatcactagccacggagcaag

SEQ ID NO: 39880 - DNA, 22 bp, Artificial Sequence
  chemically synthesized
aatcactagccacggagcaaga

SEQ ID NO: 39881 - DNA, 22 bp, Artificial Sequence
  chemically synthesized
gccacggagcaagacaagaccc

SEQ ID NO: 39882 - DNA, 22 bp, Artificial Sequence
  chemically synthesized
gggagaagacccacagggatga

SEQ ID NO: 39883 - DNA, 22 bp, Artificial Sequence
  chemically synthesized
ctatcagctcccagcctccagt

SEQ ID NO: 39884 - DNA, 22 bp, Artificial Sequence
  chemically synthesized
tcagctcccagcctccagtgag

SEQ ID NO: 39885 - DNA, 22 bp, Artificial Sequence
  chemically synthesized
ccagcctccagtgaggaaagaa

SEQ ID NO: 39886 - DNA, 22 bp, Artificial Sequence
  chemically synthesized
cagtgaggaaagaaaaagggga

SEQ ID NO: 39887 - DNA, 22 bp, Artificial Sequence
  chemically synthesized
tggggctgagtggagtggggag

SEQ ID NO: 39888 - DNA, 22 bp, Artificial Sequence
  chemically synthesized
gggctgagtggagtggggagcg

SEQ ID NO: 39889 - DNA, 22 bp, Artificial Sequence
  chemically synthesized
agtggagtggggagcggctgcc

SEQ ID NO: 39890 - DNA, 22 bp, Artificial Sequence
  chemically synthesized
ccaagtgagtaatggaataata

SEQ ID NO: 39891 - DNA, 22 bp, Artificial Sequence
  chemically synthesized
ttttggaagtaactccttcagt

SEQ ID NO: 39892 - DNA, 22 bp, Artificial Sequence
  chemically synthesized
tggaagtaactccttcagtact

SEQ ID NO: 39893 - DNA, 22 bp, Artificial Sequence
  chemically synthesized
ggaagtaactccttcagtactt

SEQ ID NO: 39894 - DNA, 22 bp, Artificial Sequence
  chemically synthesized
gaagtaactccttcagtactta

SEQ ID NO: 39895 - DNA, 22 bp, Artificial Sequence
  chemically synthesized
cttcagtacttaaaaagtaagg

SEQ ID NO: 39896 - DNA, 22 bp, Artificial Sequence
  chemically synthesized
cagtacttaaaaagtaagggca

SEQ ID NO: 39897 - DNA, 22 bp, Artificial Sequence
  chemically synthesized
agtacttaaaaagtaagggcaa

SEQ ID NO: 39898 - DNA, 22 bp, Artificial Sequence
  chemically synthesized
aaaaagtaagggcaatttccag

SEQ ID NO: 39899 - DNA, 22 bp, Artificial Sequence
  chemically synthesized
aaaagtaagggcaatttccaga

SEQ ID NO: 39900 - DNA, 22 bp, Artificial Sequence
  chemically synthesized
ccagaaattctcatctctatac

SEQ ID NO: 39901 - DNA, 22 bp, Artificial Sequence
  chemically synthesized
cagaaattctcatctctataca

SEQ ID NO: 39902 - DNA, 22 bp, Artificial Sequence
  chemically synthesized
tcatctctatacacatggacat

SEQ ID NO: 39903 - DNA, 22 bp, Artificial Sequence
  chemically synthesized
atctctatacacatggacattt

SEQ ID NO: 39904 - DNA, 22 bp, Artificial Sequence
  chemically synthesized
tatacacatggacatttgtaga

SEQ ID NO: 39905 - DNA, 22 bp, Artificial Sequence
  chemically synthesized
tacacatggacatttgtagaag

SEQ ID NO: 39906 - DNA, 22 bp, Artificial Sequence
  chemically synthesized
gtagaagaaataaggctcaact

SEQ ID NO: 39907 - DNA, 22 bp, Artificial Sequence
  chemically synthesized
tagaagaaataaggctcaactt

SEQ ID NO: 39908 - DNA, 22 bp, Artificial Sequence
  chemically synthesized
aacttacaaataccctgcgggg

SEQ ID NO: 39909 - DNA, 22 bp, Artificial Sequence
  chemically synthesized
acaaataccctgcggggcatat

SEQ ID NO: 39910 - DNA, 22 bp, Artificial Sequence
  chemically synthesized
caaataccctgcggggcatatt

SEQ ID NO: 39911 - DNA, 22 bp, Artificial Sequence
  chemically synthesized
cggggcatattctgcactcatc

SEQ ID NO: 39912 - DNA, 22 bp, Artificial Sequence
  chemically synthesized
tgcactcatcccaggcgtgggg

SEQ ID NO: 39913 - DNA, 22 bp, Artificial Sequence
  chemically synthesized
cactcatcccaggcgtggggat

SEQ ID NO: 39914 - DNA, 22 bp, Artificial Sequence
  chemically synthesized
atcccaggcgtggggattagag

SEQ ID NO: 39915 - DNA, 22 bp, Artificial Sequence
  chemically synthesized
gagctccatgtgcagaacgagg

SEQ ID NO: 39916 - DNA, 22 bp, Artificial Sequence
  chemically synthesized
catgtgcagaacgaggggagga

SEQ ID NO: 39917 - DNA, 22 bp, Artificial Sequence
  chemically synthesized
cagtgcagaagtttatctgtga

SEQ ID NO: 39918 - DNA, 22 bp, Artificial Sequence
  chemically synthesized
atctgtgaaagaaacccaaaat

SEQ ID NO: 39919 - DNA, 22 bp, Artificial Sequence
  chemically synthesized
tctgtgaaagaaacccaaaatc

SEQ ID NO: 39920 - DNA, 22 bp, Artificial Sequence
  chemically synthesized
tgaaagaaacccaaaatcaagc

SEQ ID NO: 39921 - DNA, 22 bp, Artificial Sequence
  chemically synthesized
cagctacaaacaacgtgcatca

SEQ ID NO: 39922 - DNA, 22 bp, Artificial Sequence
  chemically synthesized
caaacaacgtgcatcataaacc

SEQ ID NO: 39923 - DNA, 22 bp, Artificial Sequence
  chemically synthesized
caattccattaaaatagattac

SEQ ID NO: 39924 - DNA, 22 bp, Artificial Sequence
  chemically synthesized
aattccattaaaatagattaca

SEQ ID NO: 39925 - DNA, 22 bp, Artificial Sequence
  chemically synthesized
cattaaaatagattacaacatc

SEQ ID NO: 39926 - DNA, 22 bp, Artificial Sequence
  chemically synthesized
aaatagattacaacatcattac

SEQ ID NO: 39927 - DNA, 22 bp, Artificial Sequence
  chemically synthesized
caacatcattacaacagccttg

SEQ ID NO: 39928 - DNA, 22 bp, Artificial Sequence
  chemically synthesized
caacagccttgcagatagttaa

SEQ ID NO: 39929 - DNA, 22 bp, Artificial Sequence
  chemically synthesized
gcagatagttaacaggcccaag

SEQ ID NO: 39930 - DNA, 22 bp, Artificial Sequence
  chemically synthesized
cagatagttaacaggcccaagg

SEQ ID NO: 39931 - DNA, 22 bp, Artificial Sequence
  chemically synthesized
acaggcccaaggcctgaaacaa

SEQ ID NO: 39932 - DNA, 22 bp, Artificial Sequence
  chemically synthesized
aaacaaaagaagagtggtgagt

SEQ ID NO: 39933 - DNA, 22 bp, Artificial Sequence
  chemically synthesized
tttcccagagtttctgttttgt

SEQ ID NO: 39934 - DNA, 22 bp, Artificial Sequence
  chemically synthesized
cccagagtttctgttttgtttt

SEQ ID NO: 39935 - DNA, 22 bp, Artificial Sequence
  chemically synthesized
ccagagtttctgttttgttttc

SEQ ID NO: 39936 - DNA, 22 bp, Artificial Sequence
  chemically synthesized
ctgttttgttttcaatttcggt

SEQ ID NO: 39937 - DNA, 22 bp, Artificial Sequence
  chemically synthesized
tgttttgttttcaatttcggtc

SEQ ID NO: 39938 - DNA, 22 bp, Artificial Sequence
  chemically synthesized
ttttgttttcaatttcggtctt

SEQ ID NO: 39939 - DNA, 22 bp, Artificial Sequence
  chemically synthesized
tgttttcaatttcggtcttttt

SEQ ID NO: 39940 - DNA, 22 bp, Artificial Sequence
  chemically synthesized
gttttcaatttcggtctttttg

SEQ ID NO: 39941 - DNA, 22 bp, Artificial Sequence
  chemically synthesized
ttttcaatttcggtctttttga

SEQ ID NO: 39942 - DNA, 22 bp, Artificial Sequence
  chemically synthesized
tcaatttcggtctttttgacaa

SEQ ID NO: 39943 - DNA, 22 bp, Artificial Sequence
  chemically synthesized
caatttcggtctttttgacaaa

SEQ ID NO: 39944 - DNA, 22 bp, Artificial Sequence
  chemically synthesized
aatttcggtctttttgacaaaa

SEQ ID NO: 39945 - DNA, 22 bp, Artificial Sequence
  chemically synthesized
cggtctttttgacaaaagtgaa

SEQ ID NO: 39946 - DNA, 22 bp, Artificial Sequence
  chemically synthesized
ggtctttttgacaaaagtgaaa

SEQ ID NO: 39947 - DNA, 22 bp, Artificial Sequence
  chemically synthesized
tttgacaaaagtgaaagggttt

SEQ ID NO: 39948 - DNA, 22 bp, Artificial Sequence
  chemically synthesized
ttgacaaaagtgaaagggtttg

SEQ ID NO: 39949 - DNA, 22 bp, Artificial Sequence
  chemically synthesized
tgacaaaagtgaaagggtttgt

SEQ ID NO: 39950 - DNA, 22 bp, Artificial Sequence
  chemically synthesized
gacaaaagtgaaagggtttgtt

SEQ ID NO: 39951 - DNA, 22 bp, Artificial Sequence
  chemically synthesized
acaaaagtgaaagggtttgttt

SEQ ID NO: 39952 - DNA, 22 bp, Artificial Sequence
  chemically synthesized
gttttaggaaaggggagaggtg

SEQ ID NO: 39953 - DNA, 22 bp, Artificial Sequence
  chemically synthesized
ttttaggaaaggggagaggtgg

SEQ ID NO: 39954 - DNA, 22 bp, Artificial Sequence
  chemically synthesized
taggaaaggggagaggtggtct

SEQ ID NO: 39955 - DNA, 22 bp, Artificial Sequence
  chemically synthesized
aggaaaggggagaggtggtctt

SEQ ID NO: 39956 - DNA, 22 bp, Artificial Sequence
  chemically synthesized
ggaaaggggagaggtggtcttt

SEQ ID NO: 39957 - DNA, 22 bp, Artificial Sequence
  chemically synthesized
tggttcatttgcttatttattt

SEQ ID NO: 39958 - DNA, 22 bp, Artificial Sequence
  chemically synthesized
ggttcatttgcttatttatttg

SEQ ID NO: 39959 - DNA, 22 bp, Artificial Sequence
  chemically synthesized
gttcatttgcttatttatttgt

SEQ ID NO: 39960 - DNA, 22 bp, Artificial Sequence
  chemically synthesized
atttgcttatttatttgttgtt

SEQ ID NO: 39961 - DNA, 22 bp, Artificial Sequence
  chemically synthesized
gcttatttatttgttgttgttt

SEQ ID NO: 39962 - DNA, 22 bp, Artificial Sequence
  chemically synthesized
cttatttatttgttgttgtttg

SEQ ID NO: 39963 - DNA, 22 bp, Artificial Sequence
  chemically synthesized
atttatttgttgttgtttgatt

SEQ ID NO: 39964 - DNA, 22 bp, Artificial Sequence
  chemically synthesized
tttatttgttgttgtttgatta

SEQ ID NO: 39965 - DNA, 22 bp, Artificial Sequence
  chemically synthesized
atttgttgttgtttgattattg

SEQ ID NO: 39966 - DNA, 22 bp, Artificial Sequence
  chemically synthesized
tttgttgttgtttgattattgt

SEQ ID NO: 39967 - DNA, 22 bp, Artificial Sequence
  chemically synthesized
gttgttgtttgattattgtctt

SEQ ID NO: 39968 - DNA, 22 bp, Artificial Sequence
  chemically synthesized
ttgttgtttgattattgtcttg

SEQ ID NO: 39969 - DNA, 22 bp, Artificial Sequence
  chemically synthesized
ttgtttgattattgtcttgtgg

SEQ ID NO: 39970 - DNA, 22 bp, Artificial Sequence
  chemically synthesized
tttgattattgtcttgtggaaa

SEQ ID NO: 39971 - DNA, 22 bp, Artificial Sequence
  chemically synthesized
gattattgtcttgtggaaagaa

SEQ ID NO: 39972 - DNA, 22 bp, Artificial Sequence
  chemically synthesized
attattgtcttgtggaaagaag

SEQ ID NO: 39973 - DNA, 22 bp, Artificial Sequence
  chemically synthesized
ttgtcttgtggaaagaagatgt

SEQ ID NO: 39974 - DNA, 22 bp, Artificial Sequence
  chemically synthesized
tcttgtggaaagaagatgtgta

SEQ ID NO: 39975 - DNA, 22 bp, Artificial Sequence
  chemically synthesized
gtggaaagaagatgtgtaagca

SEQ ID NO: 39976 - DNA, 22 bp, Artificial Sequence
  chemically synthesized
tggaaagaagatgtgtaagcag

SEQ ID NO: 39977 - DNA, 22 bp, Artificial Sequence
  chemically synthesized
gtaatattgtgggtagcctgga

SEQ ID NO: 39978 - DNA, 22 bp, Artificial Sequence
  chemically synthesized
tgggtagcctggaaacatgggg

SEQ ID NO: 39979 - DNA, 22 bp, Artificial Sequence
  chemically synthesized
gaaacatggggggattttatct

SEQ ID NO: 39980 - DNA, 22 bp, Artificial Sequence
  chemically synthesized
tatctgcaaggctggtttacat

SEQ ID NO: 39981 - DNA, 22 bp, Artificial Sequence
  chemically synthesized
atctgcaaggctggtttacatg

SEQ ID NO: 39982 - DNA, 22 bp, Artificial Sequence
  chemically synthesized
tctgcaaggctggtttacatgc

SEQ ID NO: 39983 - DNA, 22 bp, Artificial Sequence
  chemically synthesized
caaggctggtttacatgcatac

SEQ ID NO: 39984 - DNA, 22 bp, Artificial Sequence
  chemically synthesized
gtttacatgcatacattaactt

SEQ ID NO: 39985 - DNA, 22 bp, Artificial Sequence
  chemically synthesized
acatgcatacattaactttact

SEQ ID NO: 39986 - DNA, 22 bp, Artificial Sequence
  chemically synthesized
catgcatacattaactttactt

SEQ ID NO: 39987 - DNA, 22 bp, Artificial Sequence
  chemically synthesized
actttactttatagacaaaccc

SEQ ID NO: 39988 - DNA, 22 bp, Artificial Sequence
  chemically synthesized
tactttatagacaaacccaagc

SEQ ID NO: 39989 - DNA, 22 bp, Artificial Sequence
  chemically synthesized
actttatagacaaacccaagca

SEQ ID NO: 39990 - DNA, 22 bp, Artificial Sequence
  chemically synthesized
ctttatagacaaacccaagcaa

SEQ ID NO: 39991 - DNA, 22 bp, Artificial Sequence
  chemically synthesized
tatagacaaacccaagcaaaaa

SEQ ID NO: 39992 - DNA, 22 bp, Artificial Sequence
  chemically synthesized
atagacaaacccaagcaaaaag

SEQ ID NO: 39993 - DNA, 22 bp, Artificial Sequence
  chemically synthesized
tagacaaacccaagcaaaaagc

SEQ ID NO: 39994 - DNA, 22 bp, Artificial Sequence
  chemically synthesized
ataggaaatgagtagatttgtg

SEQ ID NO: 39995 - DNA, 22 bp, Artificial Sequence
  chemically synthesized
gtgaatcgttttttatgggaca

SEQ ID NO: 39996 - DNA, 22 bp, Artificial Sequence
  chemically synthesized
tgaatcgttttttatgggacag

SEQ ID NO: 39997 - DNA, 22 bp, Artificial Sequence
  chemically synthesized
tttatgggacagagtcccactt

SEQ ID NO: 39998 - DNA, 22 bp, Artificial Sequence
  chemically synthesized
ttatgggacagagtcccacttt

SEQ ID NO: 39999 - DNA, 22 bp, Artificial Sequence
  chemically synthesized
tatgggacagagtcccactttg

SEQ ID NO: 40000 - DNA, 22 bp, Artificial Sequence
  chemically synthesized
atgggacagagtcccactttgc

SEQ ID NO: 40001 - DNA, 22 bp, Artificial Sequence
  chemically synthesized
tgggacagagtcccactttgct

SEQ ID NO: 40002 - DNA, 22 bp, Artificial Sequence
  chemically synthesized
tgctttctctgtccctctgccc

SEQ ID NO: 40003 - DNA, 22 bp, Artificial Sequence
  chemically synthesized
gctttctctgtccctctgcccc

SEQ ID NO: 40004 - DNA, 22 bp, Artificial Sequence
  chemically synthesized
ctttctctgtccctctgccccc

SEQ ID NO: 40005 - DNA, 22 bp, Artificial Sequence
  chemically synthesized
tctctgtccctctgcccccctc

SEQ ID NO: 40006 - DNA, 22 bp, Artificial Sequence
  chemically synthesized
ctctgtccctctgcccccctct

SEQ ID NO: 40007 - DNA, 22 bp, Artificial Sequence
  chemically synthesized
tctgtccctctgcccccctctt

SEQ ID NO: 40008 - DNA, 22 bp, Artificial Sequence
  chemically synthesized
tgtccctctgcccccctcttcc

SEQ ID NO: 40009 - DNA, 22 bp, Artificial Sequence
  chemically synthesized
tccctctgcccccctcttccca

SEQ ID NO: 40010 - DNA, 22 bp, Artificial Sequence
  chemically synthesized
tgcccccctcttcccatgctat

SEQ ID NO: 40011 - DNA, 22 bp, Artificial Sequence
  chemically synthesized
cccccctcttcccatgctatat

SEQ ID NO: 40012 - DNA, 22 bp, Artificial Sequence
  chemically synthesized
ttcccatgctatatttatgata

SEQ ID NO: 40013 - DNA, 22 bp, Artificial Sequence
  chemically synthesized
cccatgctatatttatgatagc

SEQ ID NO: 40014 - DNA, 22 bp, Artificial Sequence
  chemically synthesized
ccatgctatatttatgatagcg

SEQ ID NO: 40015 - DNA, 22 bp, Artificial Sequence
  chemically synthesized
tatttatgatagcgccttcagt

SEQ ID NO: 40016 - DNA, 22 bp, Artificial Sequence
  chemically synthesized
atgatagcgccttcagtgatag

SEQ ID NO: 40017 - DNA, 22 bp, Artificial Sequence
  chemically synthesized
tgatagcgccttcagtgatagg

SEQ ID NO: 40018 - DNA, 22 bp, Artificial Sequence
  chemically synthesized
cagtgataggggaaacctgggc

SEQ ID NO: 40019 - DNA, 22 bp, Artificial Sequence
  chemically synthesized
agtgataggggaaacctgggca

SEQ ID NO: 40020 - DNA, 22 bp, Artificial Sequence
  chemically synthesized
ggcatttctggactgagctggg

SEQ ID NO: 40021 - DNA, 22 bp, Artificial Sequence
  chemically synthesized
ctggactgagctgggccatact

SEQ ID NO: 40022 - DNA, 22 bp, Artificial Sequence
  chemically synthesized
tggactgagctgggccatactc

SEQ ID NO: 40023 - DNA, 22 bp, Artificial Sequence
  chemically synthesized
gactgagctgggccatactcta

SEQ ID NO: 40024 - DNA, 22 bp, Artificial Sequence
  chemically synthesized
agctgggccatactctagaatc

SEQ ID NO: 40025 - DNA, 22 bp, Artificial Sequence
  chemically synthesized
ggccatactctagaatcctgtc

SEQ ID NO: 40026 - DNA, 22 bp, Artificial Sequence
  chemically synthesized
tagaatcctgtcaactggaaac

SEQ ID NO: 40027 - DNA, 22 bp, Artificial Sequence
  chemically synthesized
gaatcctgtcaactggaaacct

SEQ ID NO: 40028 - DNA, 22 bp, Artificial Sequence
  chemically synthesized
tcaactggaaaccttacacaga

SEQ ID NO: 40029 - DNA, 22 bp, Artificial Sequence
  chemically synthesized
gaaaccttacacagatgtggct

SEQ ID NO: 40030 - DNA, 22 bp, Artificial Sequence
  chemically synthesized
acacagatgtggcttctcacaa

SEQ ID NO: 40031 - DNA, 22 bp, Artificial Sequence
  chemically synthesized
cacagatgtggcttctcacaat

SEQ ID NO: 40032 - DNA, 22 bp, Artificial Sequence
  chemically synthesized
ctcacaatacaaagcaatggaa

SEQ ID NO: 40033 - DNA, 22 bp, Artificial Sequence
  chemically synthesized
tcacaatacaaagcaatggaag

SEQ ID NO: 40034 - DNA, 22 bp, Artificial Sequence
  chemically synthesized
acaatacaaagcaatggaagat

SEQ ID NO: 40035 - DNA, 22 bp, Artificial Sequence
  chemically synthesized
gacttctggggtccaaataact

SEQ ID NO: 40036 - DNA, 22 bp, Artificial Sequence
  chemically synthesized
ctggggtccaaataactttgac

SEQ ID NO: 40037 - DNA, 22 bp, Artificial Sequence
  chemically synthesized
tggggtccaaataactttgacc

SEQ ID NO: 40038 - DNA, 22 bp, Artificial Sequence
  chemically synthesized
gggtccaaataactttgaccat

SEQ ID NO: 40039 - DNA, 22 bp, Artificial Sequence
  chemically synthesized
tgaccattaaatgacaaggaaa

SEQ ID NO: 40040 - DNA, 22 bp, Artificial Sequence
  chemically synthesized
gaccattaaatgacaaggaaag

SEQ ID NO: 40041 - DNA, 22 bp, Artificial Sequence
  chemically synthesized
accattaaatgacaaggaaaga

SEQ ID NO: 40042 - DNA, 22 bp, Artificial Sequence
  chemically synthesized
aatgacaaggaaagaaccagca

SEQ ID NO: 40043 - DNA, 22 bp, Artificial Sequence
  chemically synthesized
caataatgccagcacccagaaa

SEQ ID NO: 40044 - DNA, 22 bp, Artificial Sequence
  chemically synthesized
acccatcttcaccattttactg

SEQ ID NO: 40045 - DNA, 22 bp, Artificial Sequence
  chemically synthesized
caccattttactgcactttgtt

SEQ ID NO: 40046 - DNA, 22 bp, Artificial Sequence
  chemically synthesized
accattttactgcactttgttg

SEQ ID NO: 40047 - DNA, 22 bp, Artificial Sequence
  chemically synthesized
tactgcactttgttgtactctg

SEQ ID NO: 40048 - DNA, 22 bp, Artificial Sequence
  chemically synthesized
actgcactttgttgtactctgg

SEQ ID NO: 40049 - DNA, 22 bp, Artificial Sequence
  chemically synthesized
ctgcactttgttgtactctggt

SEQ ID NO: 40050 - DNA, 22 bp, Artificial Sequence
  chemically synthesized
cactttgttgtactctggtgaa

SEQ ID NO: 40051 - DNA, 22 bp, Artificial Sequence
  chemically synthesized
tgttgtactctggtgaagacaa

SEQ ID NO: 40052 - DNA, 22 bp, Artificial Sequence
  chemically synthesized
gttgtactctggtgaagacaag

SEQ ID NO: 40053 - DNA, 22 bp, Artificial Sequence
  chemically synthesized
ttgtactctggtgaagacaagt

SEQ ID NO: 40054 - DNA, 22 bp, Artificial Sequence
  chemically synthesized
tactctggtgaagacaagtgac

SEQ ID NO: 40055 - DNA, 22 bp, Artificial Sequence
  chemically synthesized
tggtgaagacaagtgacttctc

SEQ ID NO: 40056 - DNA, 22 bp, Artificial Sequence
  chemically synthesized
gtgaagacaagtgacttctcac

SEQ ID NO: 40057 - DNA, 22 bp, Artificial Sequence
  chemically synthesized
ctcacactaataaaatgaatct

SEQ ID NO: 40058 - DNA, 22 bp, Artificial Sequence
  chemically synthesized
tcacactaataaaatgaatcta

SEQ ID NO: 40059 - DNA, 22 bp, Artificial Sequence
  chemically synthesized
acactaataaaatgaatctaat

SEQ ID NO: 40060 - DNA, 22 bp, Artificial Sequence
  chemically synthesized
ataaaatgaatctaatagtcaa

SEQ ID NO: 40061 - DNA, 22 bp, Artificial Sequence
  chemically synthesized
atagtcaatgaaacatttgtag

SEQ ID NO: 40062 - DNA, 22 bp, Artificial Sequence
  chemically synthesized
gtagcactgagatttttttgag

SEQ ID NO: 40063 - DNA, 22 bp, Artificial Sequence
  chemically synthesized
tagcactgagatttttttgaga

SEQ ID NO: 40064 - DNA, 22 bp, Artificial Sequence
  chemically synthesized
agatttttttgagaagaggaaa

SEQ ID NO: 40065 - DNA, 22 bp, Artificial Sequence
  chemically synthesized
ttttgagaagaggaaaatttgg

SEQ ID NO: 40066 - DNA, 22 bp, Artificial Sequence
  chemically synthesized
tttgagaagaggaaaatttggt

SEQ ID NO: 40067 - DNA, 22 bp, Artificial Sequence
  chemically synthesized
ttgagaagaggaaaatttggtt

SEQ ID NO: 40068 - DNA, 22 bp, Artificial Sequence
  chemically synthesized
tgagaagaggaaaatttggttt

SEQ ID NO: 40069 - DNA, 22 bp, Artificial Sequence
  chemically synthesized
gagaagaggaaaatttggtttg

SEQ ID NO: 40070 - DNA, 22 bp, Artificial Sequence
  chemically synthesized
agaagaggaaaatttggtttgt

SEQ ID NO: 40071 - DNA, 22 bp, Artificial Sequence
  chemically synthesized
ggtttgtgcaatctggggattt

SEQ ID NO: 40072 - DNA, 22 bp, Artificial Sequence
  chemically synthesized
gtttgtgcaatctggggatttt

SEQ ID NO: 40073 - DNA, 22 bp, Artificial Sequence
  chemically synthesized
gtgcaatctggggattttacgg

SEQ ID NO: 40074 - DNA, 22 bp, Artificial Sequence
  chemically synthesized
tgcaatctggggattttacggt

SEQ ID NO: 40075 - DNA, 22 bp, Artificial Sequence
  chemically synthesized
gggattttacggtttatgtggt

SEQ ID NO: 40076 - DNA, 22 bp, Artificial Sequence
  chemically synthesized
tacggtttatgtggtaagtgcc

SEQ ID NO: 40077 - DNA, 22 bp, Artificial Sequence
  chemically synthesized
acggtttatgtggtaagtgcct

SEQ ID NO: 40078 - DNA, 22 bp, Artificial Sequence
  chemically synthesized
cggtttatgtggtaagtgccta

SEQ ID NO: 40079 - DNA, 22 bp, Artificial Sequence
  chemically synthesized
atgtggtaagtgcctagctttt

SEQ ID NO: 40080 - DNA, 22 bp, Artificial Sequence
  chemically synthesized
tgtggtaagtgcctagcttttc

SEQ ID NO: 40081 - DNA, 22 bp, Artificial Sequence
  chemically synthesized
gcttttccaagtcctcctctag

SEQ ID NO: 40082 - DNA, 22 bp, Artificial Sequence
  chemically synthesized
ttccaagtcctcctctagctaa

SEQ ID NO: 40083 - DNA, 22 bp, Artificial Sequence
  chemically synthesized
tccaagtcctcctctagctaac

SEQ ID NO: 40084 - DNA, 22 bp, Artificial Sequence
  chemically synthesized
ccaagtcctcctctagctaact

SEQ ID NO: 40085 - DNA, 22 bp, Artificial Sequence
  chemically synthesized
caagtcctcctctagctaacta

SEQ ID NO: 40086 - DNA, 22 bp, Artificial Sequence
  chemically synthesized
ctctagctaactaaccatgtag

SEQ ID NO: 40087 - DNA, 22 bp, Artificial Sequence
  chemically synthesized
tagctaactaaccatgtagctg

SEQ ID NO: 40088 - DNA, 22 bp, Artificial Sequence
  chemically synthesized
gctaactaaccatgtagctgtc

SEQ ID NO: 40089 - DNA, 22 bp, Artificial Sequence
  chemically synthesized
actaaccatgtagctgtccatc

SEQ ID NO: 40090 - DNA, 22 bp, Artificial Sequence
  chemically synthesized
accatgtagctgtccatcttga

SEQ ID NO: 40091 - DNA, 22 bp, Artificial Sequence
  chemically synthesized
tccatcttgagacagactggag

SEQ ID NO: 40092 - DNA, 22 bp, Artificial Sequence
  chemically synthesized
gagacagactggaggatagatg

SEQ ID NO: 40093 - DNA, 22 bp, Artificial Sequence
  chemically synthesized
agacagactggaggatagatgg

SEQ ID NO: 40094 - DNA, 22 bp, Artificial Sequence
  chemically synthesized
gaggatagatggtgcaggagac

SEQ ID NO: 40095 - DNA, 22 bp, Artificial Sequence
  chemically synthesized
tgtgtgttctagaggtttggag

SEQ ID NO: 40096 - DNA, 22 bp, Artificial Sequence
  chemically synthesized
tgtgttctagaggtttggagtt

SEQ ID NO: 40097 - DNA, 22 bp, Artificial Sequence
  chemically synthesized
tagaggtttggagttcatgatg

SEQ ID NO: 40098 - DNA, 22 bp, Artificial Sequence
  chemically synthesized
gaggtttggagttcatgatgat

SEQ ID NO: 40099 - DNA, 22 bp, Artificial Sequence
  chemically synthesized
ggagttcatgatgattggggag

SEQ ID NO: 40100 - DNA, 22 bp, Artificial Sequence
  chemically synthesized
gagttcatgatgattggggagg

SEQ ID NO: 40101 - DNA, 22 bp, Artificial Sequence
  chemically synthesized
atgatgattggggagggcggga

SEQ ID NO: 40102 - DNA, 22 bp, Artificial Sequence
  chemically synthesized
gggagggcgggagacaagaaaa

SEQ ID NO: 40103 - DNA, 22 bp, Artificial Sequence
  chemically synthesized
tgatggtgaacaaacagtatgt

SEQ ID NO: 40104 - DNA, 22 bp, Artificial Sequence
  chemically synthesized
gatggtgaacaaacagtatgtt

SEQ ID NO: 40105 - DNA, 22 bp, Artificial Sequence
  chemically synthesized
atggtgaacaaacagtatgttt

SEQ ID NO: 40106 - DNA, 22 bp, Artificial Sequence
  chemically synthesized
tccattagcttaatattaagag

SEQ ID NO: 40107 - DNA, 22 bp, Artificial Sequence
  chemically synthesized
ccattagcttaatattaagagc

SEQ ID NO: 40108 - DNA, 22 bp, Artificial Sequence
  chemically synthesized
cattagcttaatattaagagca

SEQ ID NO: 40109 - DNA, 22 bp, Artificial Sequence
  chemically synthesized
gcttaatattaagagcacttag

SEQ ID NO: 40110 - DNA, 22 bp, Artificial Sequence
  chemically synthesized
aatattaagagcacttagaagt

SEQ ID NO: 40111 - DNA, 22 bp, Artificial Sequence
  chemically synthesized
atattaagagcacttagaagtg

SEQ ID NO: 40112 - DNA, 22 bp, Artificial Sequence
  chemically synthesized
agagcacttagaagtgttgttg

SEQ ID NO: 40113 - DNA, 22 bp, Artificial Sequence
  chemically synthesized
agaagtgttgttgttgtactct

SEQ ID NO: 40114 - DNA, 22 bp, Artificial Sequence
  chemically synthesized
gaagtgttgttgttgtactcta

SEQ ID NO: 40115 - DNA, 22 bp, Artificial Sequence
  chemically synthesized
ttgttgtactctaggatagcag

SEQ ID NO: 40116 - DNA, 22 bp, Artificial Sequence
  chemically synthesized
ttgtactctaggatagcaggtc

SEQ ID NO: 40117 - DNA, 22 bp, Artificial Sequence
  chemically synthesized
tactctaggatagcaggtctca

SEQ ID NO: 40118 - DNA, 22 bp, Artificial Sequence
  chemically synthesized
taggatagcaggtctcaagtgt

SEQ ID NO: 40119 - DNA, 22 bp, Artificial Sequence
  chemically synthesized
ggatagcaggtctcaagtgtaa

SEQ ID NO: 40120 - DNA, 22 bp, Artificial Sequence
  chemically synthesized
aagtgtaaaatacatcctgttc

SEQ ID NO: 40121 - DNA, 22 bp, Artificial Sequence
  chemically synthesized
ttctccttatatagagcacact

SEQ ID NO: 40122 - DNA, 22 bp, Artificial Sequence
  chemically synthesized
tccttatatagagcacactgcc

SEQ ID NO: 40123 - DNA, 22 bp, Artificial Sequence
  chemically synthesized
cttatatagagcacactgccaa

SEQ ID NO: 40124 - DNA, 22 bp, Artificial Sequence
  chemically synthesized
atatagagcacactgccaagca

SEQ ID NO: 40125 - DNA, 22 bp, Artificial Sequence
  chemically synthesized
tatagagcacactgccaagcac

SEQ ID NO: 40126 - DNA, 22 bp, Artificial Sequence
  chemically synthesized
ccaagcacagccaaggcagttg

SEQ ID NO: 40127 - DNA, 22 bp, Artificial Sequence
  chemically synthesized
ggacaagatttcctttcgcaag

SEQ ID NO: 40128 - DNA, 22 bp, Artificial Sequence
  chemically synthesized
cctttcgcaaggagcctggtgg

SEQ ID NO: 40129 - DNA, 22 bp, Artificial Sequence
  chemically synthesized
ctttcgcaaggagcctggtggg

SEQ ID NO: 40130 - DNA, 22 bp, Artificial Sequence
  chemically synthesized
tcgcaaggagcctggtgggtaa

SEQ ID NO: 40131 - DNA, 22 bp, Artificial Sequence
  chemically synthesized
cgcaaggagcctggtgggtaac

SEQ ID NO: 40132 - DNA, 22 bp, Artificial Sequence
  chemically synthesized
gcaaggagcctggtgggtaacg

SEQ ID NO: 40133 - DNA, 22 bp, Artificial Sequence
  chemically synthesized
gtgggtaacgatggtgtgctgc

SEQ ID NO: 40134 - DNA, 22 bp, Artificial Sequence
  chemically synthesized
ctgagaaggctcttacacagac

SEQ ID NO: 40135 - DNA, 22 bp, Artificial Sequence
  chemically synthesized
agaaggctcttacacagacagc

SEQ ID NO: 40136 - DNA, 22 bp, Artificial Sequence
  chemically synthesized
ttacacagacagcataggtctg

SEQ ID NO: 40137 - DNA, 22 bp, Artificial Sequence
  chemically synthesized
acacagacagcataggtctgct

SEQ ID NO: 40138 - DNA, 22 bp, Artificial Sequence
  chemically synthesized
cacagacagcataggtctgctg

SEQ ID NO: 40139 - DNA, 22 bp, Artificial Sequence
  chemically synthesized
ctgttaccaggcctgcagaggg

SEQ ID NO: 40140 - DNA, 22 bp, Artificial Sequence
  chemically synthesized
ttaccaggcctgcagagggaag

SEQ ID NO: 40141 - DNA, 22 bp, Artificial Sequence
  chemically synthesized
ccaggcctgcagagggaagccc

SEQ ID NO: 40142 - DNA, 22 bp, Artificial Sequence
  chemically synthesized
cagagggaagccctggtggaag

SEQ ID NO: 40143 - DNA, 22 bp, Artificial Sequence
  chemically synthesized
gtggaagcaccacctagcctga

SEQ ID NO: 40144 - DNA, 22 bp, Artificial Sequence
  chemically synthesized
gcctgagaacatctacagagac

SEQ ID NO: 40145 - DNA, 22 bp, Artificial Sequence
  chemically synthesized
agaacatctacagagacatttc

SEQ ID NO: 40146 - DNA, 22 bp, Artificial Sequence
  chemically synthesized
cagagacatttcatcctctctg

SEQ ID NO: 40147 - DNA, 22 bp, Artificial Sequence
  chemically synthesized
catcctctctgacccaaaacaa

SEQ ID NO: 40148 - DNA, 22 bp, Artificial Sequence
  chemically synthesized
atcctctctgacccaaaacaaa

SEQ ID NO: 40149 - DNA, 22 bp, Artificial Sequence
  chemically synthesized
tctgacccaaaacaaaataaac

SEQ ID NO: 40150 - DNA, 22 bp, Artificial Sequence
  chemically synthesized
tgacccaaaacaaaataaacac

SEQ ID NO: 40151 - DNA, 22 bp, Artificial Sequence
  chemically synthesized
acccaaaacaaaataaacacca

SEQ ID NO: 40152 - DNA, 22 bp, Artificial Sequence
  chemically synthesized
aacaaacaagtatgtctacatt

SEQ ID NO: 40153 - DNA, 22 bp, Artificial Sequence
  chemically synthesized
acaaacaagtatgtctacattt

SEQ ID NO: 40154 - DNA, 22 bp, Artificial Sequence
  chemically synthesized
catttgactgtttacgtcaagt

SEQ ID NO: 40155 - DNA, 22 bp, Artificial Sequence
  chemically synthesized
gactgtttacgtcaagtgaatt

SEQ ID NO: 40156 - DNA, 22 bp, Artificial Sequence
  chemically synthesized
actgtttacgtcaagtgaattg

SEQ ID NO: 40157 - DNA, 22 bp, Artificial Sequence
  chemically synthesized
tttacgtcaagtgaattgagag

SEQ ID NO: 40158 - DNA, 22 bp, Artificial Sequence
  chemically synthesized
acgtcaagtgaattgagagtgt

SEQ ID NO: 40159 - DNA, 22 bp, Artificial Sequence
  chemically synthesized
cgtcaagtgaattgagagtgtg

SEQ ID NO: 40160 - DNA, 22 bp, Artificial Sequence
  chemically synthesized
agagtgtggcgtaaaattacta

SEQ ID NO: 40161 - DNA, 22 bp, Artificial Sequence
  chemically synthesized
ctacagattttgtcatggtatt

SEQ ID NO: 40162 - DNA, 22 bp, Artificial Sequence
  chemically synthesized
cagattttgtcatggtattttt

SEQ ID NO: 40163 - DNA, 22 bp, Artificial Sequence
  chemically synthesized
tgtcatggtatttttcaatgag

SEQ ID NO: 40164 - DNA, 22 bp, Artificial Sequence
  chemically synthesized
gtcatggtatttttcaatgaga

SEQ ID NO: 40165 - DNA, 22 bp, Artificial Sequence
  chemically synthesized
tcatggtatttttcaatgagaa

SEQ ID NO: 40166 - DNA, 22 bp, Artificial Sequence
  chemically synthesized
ttcaatgagaaatctgagaatc

SEQ ID NO: 40167 - DNA, 22 bp, Artificial Sequence
  chemically synthesized
tcaatgagaaatctgagaatcc

SEQ ID NO: 40168 - DNA, 22 bp, Artificial Sequence
  chemically synthesized
caatgagaaatctgagaatcca

SEQ ID NO: 40169 - DNA, 22 bp, Artificial Sequence
  chemically synthesized
aatgagaaatctgagaatccat

SEQ ID NO: 40170 - DNA, 22 bp, Artificial Sequence
  chemically synthesized
agaatccatctttgcacttgtt

SEQ ID NO: 40171 - DNA, 22 bp, Artificial Sequence
  chemically synthesized
tgcacttgtttttgcctcagcc

SEQ ID NO: 40172 - DNA, 22 bp, Artificial Sequence
  chemically synthesized
gcacttgtttttgcctcagccg

SEQ ID NO: 40173 - DNA, 22 bp, Artificial Sequence
  chemically synthesized
cacttgtttttgcctcagccgt

SEQ ID NO: 40174 - DNA, 22 bp, Artificial Sequence
  chemically synthesized
gtttttgcctcagccgttcact

SEQ ID NO: 40175 - DNA, 22 bp, Artificial Sequence
  chemically synthesized
tttttgcctcagccgttcacta

SEQ ID NO: 40176 - DNA, 22 bp, Artificial Sequence
  chemically synthesized
ttgcctcagccgttcactaagt

SEQ ID NO: 40177 - DNA, 22 bp, Artificial Sequence
  chemically synthesized
tgcctcagccgttcactaagtt

SEQ ID NO: 40178 - DNA, 22 bp, Artificial Sequence
  chemically synthesized
gcctcagccgttcactaagttt

SEQ ID NO: 40179 - DNA, 22 bp, Artificial Sequence
  chemically synthesized
cctcagccgttcactaagtttg

SEQ ID NO: 40180 - DNA, 22 bp, Artificial Sequence
  chemically synthesized
agccgttcactaagtttgctgc

SEQ ID NO: 40181 - DNA, 22 bp, Artificial Sequence
  chemically synthesized
actaagtttgctgccaaaacag

SEQ ID NO: 40182 - DNA, 22 bp, Artificial Sequence
  chemically synthesized
agtttgctgccaaaacagacat

SEQ ID NO: 40183 - DNA, 22 bp, Artificial Sequence
  chemically synthesized
gctgccaaaacagacatccttt

SEQ ID NO: 40184 - DNA, 22 bp, Artificial Sequence
  chemically synthesized
ctgccaaaacagacatcctttt

SEQ ID NO: 40185 - DNA, 22 bp, Artificial Sequence
  chemically synthesized
ccaaaacagacatccttttctt

SEQ ID NO: 40186 - DNA, 22 bp, Artificial Sequence
  chemically synthesized
ttcttaggaaacacaggcaacc

SEQ ID NO: 40187 - DNA, 22 bp, Artificial Sequence
  chemically synthesized
tcttaggaaacacaggcaaccc

SEQ ID NO: 40188 - DNA, 22 bp, Artificial Sequence
  chemically synthesized
cttaggaaacacaggcaaccca

SEQ ID NO: 40189 - DNA, 22 bp, Artificial Sequence
  chemically synthesized
ttaggaaacacaggcaacccag

SEQ ID NO: 40190 - DNA, 22 bp, Artificial Sequence
  chemically synthesized
aggaaacacaggcaacccaggt

SEQ ID NO: 40191 - DNA, 22 bp, Artificial Sequence
  chemically synthesized
ggaaacacaggcaacccaggta

SEQ ID NO: 40192 - DNA, 22 bp, Artificial Sequence
  chemically synthesized
tgtgatcccagcataaacgcaa

SEQ ID NO: 40193 - DNA, 22 bp, Artificial Sequence
  chemically synthesized
tgatcccagcataaacgcaaca

SEQ ID NO: 40194 - DNA, 22 bp, Artificial Sequence
  chemically synthesized
ggatccttgtatggggagtatc

SEQ ID NO: 40195 - DNA, 22 bp, Artificial Sequence
  chemically synthesized
gatccttgtatggggagtatca

SEQ ID NO: 40196 - DNA, 22 bp, Artificial Sequence
  chemically synthesized
gtatggggagtatcaaatttca

SEQ ID NO: 40197 - DNA, 22 bp, Artificial Sequence
  chemically synthesized
tatggggagtatcaaatttcaa

SEQ ID NO: 40198 - DNA, 22 bp, Artificial Sequence
  chemically synthesized
caaattctctgccacttactct

SEQ ID NO: 40199 - DNA, 22 bp, Artificial Sequence
  chemically synthesized
aaattctctgccacttactctg

SEQ ID NO: 40200 - DNA, 22 bp, Artificial Sequence
  chemically synthesized
tctgccacttactctgggaaga

SEQ ID NO: 40201 - DNA, 22 bp, Artificial Sequence
  chemically synthesized
tgccacttactctgggaagaga

SEQ ID NO: 40202 - DNA, 22 bp, Artificial Sequence
  chemically synthesized
ccacttactctgggaagagacc

SEQ ID NO: 40203 - DNA, 22 bp, Artificial Sequence
  chemically synthesized
actctgggaagagaccctgaag

SEQ ID NO: 40204 - DNA, 22 bp, Artificial Sequence
  chemically synthesized
ctctgggaagagaccctgaagt

SEQ ID NO: 40205 - DNA, 22 bp, Artificial Sequence
  chemically synthesized
tgggaagagaccctgaagtgct

SEQ ID NO: 40206 - DNA, 22 bp, Artificial Sequence
  chemically synthesized
ggaagagaccctgaagtgcttc

SEQ ID NO: 40207 - DNA, 22 bp, Artificial Sequence
  chemically synthesized
aagtgcttcagcaggcctccag

SEQ ID NO: 40208 - DNA, 22 bp, Artificial Sequence
  chemically synthesized
cagcaggcctccagcaagaaat

SEQ ID NO: 40209 - DNA, 22 bp, Artificial Sequence
  chemically synthesized
agcaggcctccagcaagaaatg

SEQ ID NO: 40210 - DNA, 22 bp, Artificial Sequence
  chemically synthesized
cagcaagaaatgggagaactgc

SEQ ID NO: 40211 - DNA, 22 bp, Artificial Sequence
  chemically synthesized
ctaacctaatccatgcctagcc

SEQ ID NO: 40212 - DNA, 22 bp, Artificial Sequence
  chemically synthesized
acctaatccatgcctagcccct

SEQ ID NO: 40213 - DNA, 22 bp, Artificial Sequence
  chemically synthesized
atccatgcctagcccctcgcat

SEQ ID NO: 40214 - DNA, 22 bp, Artificial Sequence
  chemically synthesized
gcccctcgcatgaatctcttgt

SEQ ID NO: 40215 - DNA, 22 bp, Artificial Sequence
  chemically synthesized
gcatgaatctcttgttggcaaa

SEQ ID NO: 40216 - DNA, 22 bp, Artificial Sequence
  chemically synthesized
ttgttggcaaacttgtctacaa

SEQ ID NO: 40217 - DNA, 22 bp, Artificial Sequence
  chemically synthesized
gttggcaaacttgtctacaaac

SEQ ID NO: 40218 - DNA, 22 bp, Artificial Sequence
  chemically synthesized
ttggcaaacttgtctacaaacc

SEQ ID NO: 40219 - DNA, 22 bp, Artificial Sequence
  chemically synthesized
gcaaacttgtctacaaacccat

SEQ ID NO: 40220 - DNA, 22 bp, Artificial Sequence
  chemically synthesized
gtctacaaacccattagcccta

SEQ ID NO: 40221 - DNA, 22 bp, Artificial Sequence
  chemically synthesized
tctacaaacccattagccctaa

SEQ ID NO: 40222 - DNA, 22 bp, Artificial Sequence
  chemically synthesized
caaacccattagccctaaacaa

SEQ ID NO: 40223 - DNA, 22 bp, Artificial Sequence
  chemically synthesized
gccctaaacaagctgacggcag

SEQ ID NO: 40224 - DNA, 22 bp, Artificial Sequence
  chemically synthesized
aacaagctgacggcaggaccag

SEQ ID NO: 40225 - DNA, 22 bp, Artificial Sequence
  chemically synthesized
acggcaggaccagatctctaca

SEQ ID NO: 40226 - DNA, 22 bp, Artificial Sequence
  chemically synthesized
tacagtgtctggccgtgtggca

SEQ ID NO: 40227 - DNA, 22 bp, Artificial Sequence
  chemically synthesized
cagtgtctggccgtgtggcaaa

SEQ ID NO: 40228 - DNA, 22 bp, Artificial Sequence
  chemically synthesized
gccgtgtggcaaagtgaggtct

SEQ ID NO: 40229 - DNA, 22 bp, Artificial Sequence
  chemically synthesized
atctgactatctggcagcatag

SEQ ID NO: 40230 - DNA, 22 bp, Artificial Sequence
  chemically synthesized
actatctggcagcatagtttgt

SEQ ID NO: 40231 - DNA, 22 bp, Artificial Sequence
  chemically synthesized
tctggcagcatagtttgttttt

SEQ ID NO: 40232 - DNA, 22 bp, Artificial Sequence
  chemically synthesized
gcagcatagtttgtttttgttt

SEQ ID NO: 40233 - DNA, 22 bp, Artificial Sequence
  chemically synthesized
gtttttgtttttgtttttgttt

SEQ ID NO: 40234 - DNA, 22 bp, Artificial Sequence
  chemically synthesized
tttttgtttttgtttttgtttt

SEQ ID NO: 40235 - DNA, 22 bp, Artificial Sequence
  chemically synthesized
ttgtttttgtttttgtttttgt

SEQ ID NO: 40236 - DNA, 22 bp, Artificial Sequence
  chemically synthesized
tgtttttgtttttgtttttgtt

SEQ ID NO: 40237 - DNA, 22 bp, Artificial Sequence
  chemically synthesized
gtttttgtttttgtttttgttt

SEQ ID NO: 40238 - DNA, 22 bp, Artificial Sequence
  chemically synthesized
tttttgtttttgtttttgtttt

SEQ ID NO: 40239 - DNA, 22 bp, Artificial Sequence
  chemically synthesized
ttgtttttgtttttgttttcta

SEQ ID NO: 40240 - DNA, 22 bp, Artificial Sequence
  chemically synthesized
tgtttttgtttttgttttctaa

SEQ ID NO: 40241 - DNA, 22 bp, Artificial Sequence
  chemically synthesized
gtttttgtttttgttttctaag

SEQ ID NO: 40242 - DNA, 22 bp, Artificial Sequence
  chemically synthesized
tttttgtttttgttttctaagt

SEQ ID NO: 40243 - DNA, 22 bp, Artificial Sequence
  chemically synthesized
ttgtttttgttttctaagttgt

SEQ ID NO: 40244 - DNA, 22 bp, Artificial Sequence
  chemically synthesized
tgtttttgttttctaagttgta

SEQ ID NO: 40245 - DNA, 22 bp, Artificial Sequence
  chemically synthesized
gtttttgttttctaagttgtaa

SEQ ID NO: 40246 - DNA, 22 bp, Artificial Sequence
  chemically synthesized
tttttgttttctaagttgtaaa

SEQ ID NO: 40247 - DNA, 22 bp, Artificial Sequence
  chemically synthesized
ttgttttctaagttgtaaaaaa

SEQ ID NO: 40248 - DNA, 22 bp, Artificial Sequence
  chemically synthesized
tgttttctaagttgtaaaaaac

SEQ ID NO: 40249 - DNA, 22 bp, Artificial Sequence
  chemically synthesized
gttttctaagttgtaaaaaacc

SEQ ID NO: 40250 - DNA, 22 bp, Artificial Sequence
  chemically synthesized
ttttctaagttgtaaaaaaccc

SEQ ID NO: 40251 - DNA, 22 bp, Artificial Sequence
  chemically synthesized
tctaagttgtaaaaaaccctag

SEQ ID NO: 40252 - DNA, 22 bp, Artificial Sequence
  chemically synthesized
ctaagttgtaaaaaaccctagc

SEQ ID NO: 40253 - DNA, 22 bp, Artificial Sequence
  chemically synthesized
taagttgtaaaaaaccctagct

SEQ ID NO: 40254 - DNA, 22 bp, Artificial Sequence
  chemically synthesized
agttgtaaaaaaccctagctat

SEQ ID NO: 40255 - DNA, 22 bp, Artificial Sequence
  chemically synthesized
taaaaaaccctagctatcatca

SEQ ID NO: 40256 - DNA, 22 bp, Artificial Sequence
  chemically synthesized
gctatcatcaagtctgtccctt

SEQ ID NO: 40257 - DNA, 22 bp, Artificial Sequence
  chemically synthesized
tcatcaagtctgtcccttcatt

SEQ ID NO: 40258 - DNA, 22 bp, Artificial Sequence
  chemically synthesized
tcccttcattttacagatgggg

SEQ ID NO: 40259 - DNA, 22 bp, Artificial Sequence
  chemically synthesized
cattttacagatggggaaactg

SEQ ID NO: 40260 - DNA, 22 bp, Artificial Sequence
  chemically synthesized
attttacagatggggaaactga

SEQ ID NO: 40261 - DNA, 22 bp, Artificial Sequence
  chemically synthesized
tacagatggggaaactgaggcc

SEQ ID NO: 40262 - DNA, 22 bp, Artificial Sequence
  chemically synthesized
acagatggggaaactgaggcca

SEQ ID NO: 40263 - DNA, 22 bp, Artificial Sequence
  chemically synthesized
cagatggggaaactgaggccat

SEQ ID NO: 40264 - DNA, 22 bp, Artificial Sequence
  chemically synthesized
aggccatgagaaattaagtgac

SEQ ID NO: 40265 - DNA, 22 bp, Artificial Sequence
  chemically synthesized
agtgacttgcccatggctacac

SEQ ID NO: 40266 - DNA, 22 bp, Artificial Sequence
  chemically synthesized
gcccatggctacactgatgatt

SEQ ID NO: 40267 - DNA, 22 bp, Artificial Sequence
  chemically synthesized
cccatggctacactgatgatta

SEQ ID NO: 40268 - DNA, 22 bp, Artificial Sequence
  chemically synthesized
cactgatgattaaccacaatgt

SEQ ID NO: 40269 - DNA, 22 bp, Artificial Sequence
  chemically synthesized
atgattaaccacaatgtgaaga

SEQ ID NO: 40270 - DNA, 22 bp, Artificial Sequence
  chemically synthesized
accacaatgtgaagattagaat

SEQ ID NO: 40271 - DNA, 22 bp, Artificial Sequence
  chemically synthesized
gaattaatctcctgactcctga

SEQ ID NO: 40272 - DNA, 22 bp, Artificial Sequence
  chemically synthesized
atctcctgactcctgatccagt

SEQ ID NO: 40273 - DNA, 22 bp, Artificial Sequence
  chemically synthesized
ctgactcctgatccagtggtct

SEQ ID NO: 40274 - DNA, 22 bp, Artificial Sequence
  chemically synthesized
actcctgatccagtggtctttc

SEQ ID NO: 40275 - DNA, 22 bp, Artificial Sequence
  chemically synthesized
ctgatccagtggtctttcctgg

SEQ ID NO: 40276 - DNA, 22 bp, Artificial Sequence
  chemically synthesized
atccagtggtctttcctgggaa

SEQ ID NO: 40277 - DNA, 22 bp, Artificial Sequence
  chemically synthesized
tcctgggaatttgtctcttccc

SEQ ID NO: 40278 - DNA, 22 bp, Artificial Sequence
  chemically synthesized
cctgggaatttgtctcttcccc

SEQ ID NO: 40279 - DNA, 22 bp, Artificial Sequence
  chemically synthesized
ctgggaatttgtctcttccccc

SEQ ID NO: 40280 - DNA, 22 bp, Artificial Sequence
  chemically synthesized
ggaatttgtctcttcccccctg

SEQ ID NO: 40281 - DNA, 22 bp, Artificial Sequence
  chemically synthesized
gtctcttcccccctgctgctcc

SEQ ID NO: 40282 - DNA, 22 bp, Artificial Sequence
  chemically synthesized
tctcttcccccctgctgctcct

SEQ ID NO: 40283 - DNA, 22 bp, Artificial Sequence
  chemically synthesized
ttcccccctgctgctcctgccg

SEQ ID NO: 40284 - DNA, 22 bp, Artificial Sequence
  chemically synthesized
cccccctgctgctcctgccgtg

SEQ ID NO: 40285 - DNA, 22 bp, Artificial Sequence
  chemically synthesized
ccccctgctgctcctgccgtgg

SEQ ID NO: 40286 - DNA, 22 bp, Artificial Sequence
  chemically synthesized
ctgctcctgccgtggtcttcac

SEQ ID NO: 40287 - DNA, 22 bp, Artificial Sequence
  chemically synthesized
ctcctgccgtggtcttcactgc

SEQ ID NO: 40288 - DNA, 22 bp, Artificial Sequence
  chemically synthesized
ctgccgtggtcttcactgccca

SEQ ID NO: 40289 - DNA, 22 bp, Artificial Sequence
  chemically synthesized
ccgtggtcttcactgcccaaca

SEQ ID NO: 40290 - DNA, 22 bp, Artificial Sequence
  chemically synthesized
cactgcccaacaagaaggtcct

SEQ ID NO: 40291 - DNA, 22 bp, Artificial Sequence
  chemically synthesized
actgcccaacaagaaggtcctg

SEQ ID NO: 40292 - DNA, 22 bp, Artificial Sequence
  chemically synthesized
cccaacaagaaggtcctgtttc

SEQ ID NO: 40293 - DNA, 22 bp, Artificial Sequence
  chemically synthesized
tttctactgatccattaagcag

SEQ ID NO: 40294 - DNA, 22 bp, Artificial Sequence
  chemically synthesized
ctactgatccattaagcagtac

SEQ ID NO: 40295 - DNA, 22 bp, Artificial Sequence
  chemically synthesized
tactgatccattaagcagtact

SEQ ID NO: 40296 - DNA, 22 bp, Artificial Sequence
  chemically synthesized
ctgatccattaagcagtactta

SEQ ID NO: 40297 - DNA, 22 bp, Artificial Sequence
  chemically synthesized
atccattaagcagtacttaacc

SEQ ID NO: 40298 - DNA, 22 bp, Artificial Sequence
  chemically synthesized
agcagtacttaaccgtcttggg

SEQ ID NO: 40299 - DNA, 22 bp, Artificial Sequence
  chemically synthesized
aaccgtcttgggggagggtcca

SEQ ID NO: 40300 - DNA, 22 bp, Artificial Sequence
  chemically synthesized
accgtcttgggggagggtccag

SEQ ID NO: 40301 - DNA, 22 bp, Artificial Sequence
  chemically synthesized
gggggagggtccagcccagcag

SEQ ID NO: 40302 - DNA, 22 bp, Artificial Sequence
  chemically synthesized
ggggagggtccagcccagcagc

SEQ ID NO: 40303 - DNA, 22 bp, Artificial Sequence
  chemically synthesized
catggggctttcgaaaggtgcc

SEQ ID NO: 40304 - DNA, 22 bp, Artificial Sequence
  chemically synthesized
tcgaaaggtgccaatgaactga

SEQ ID NO: 40305 - DNA, 22 bp, Artificial Sequence
  chemically synthesized
cgaaaggtgccaatgaactgac

SEQ ID NO: 40306 - DNA, 22 bp, Artificial Sequence
  chemically synthesized
gaaaggtgccaatgaactgact

SEQ ID NO: 40307 - DNA, 22 bp, Artificial Sequence
  chemically synthesized
acttggtctcacaattggaaaa

SEQ ID NO: 40308 - DNA, 22 bp, Artificial Sequence
  chemically synthesized
ggtctcacaattggaaaacaag

SEQ ID NO: 40309 - DNA, 22 bp, Artificial Sequence
  chemically synthesized
gtctcacaattggaaaacaagg

SEQ ID NO: 40310 - DNA, 22 bp, Artificial Sequence
  chemically synthesized
acaattggaaaacaaggcctgc

SEQ ID NO: 40311 - DNA, 22 bp, Artificial Sequence
  chemically synthesized
gaaaacaaggcctgctctgctg

SEQ ID NO: 40312 - DNA, 22 bp, Artificial Sequence
  chemically synthesized
ctctgctgcctgggcctcctgg

SEQ ID NO: 40313 - DNA, 22 bp, Artificial Sequence
  chemically synthesized
tgctgcctgggcctcctggcct

SEQ ID NO: 40314 - DNA, 22 bp, Artificial Sequence
  chemically synthesized
ctgcctgggcctcctggcctca

SEQ ID NO: 40315 - DNA, 22 bp, Artificial Sequence
  chemically synthesized
cctgggcctcctggcctcacct

SEQ ID NO: 40316 - DNA, 22 bp, Artificial Sequence
  chemically synthesized
ggcctcctggcctcacctttgc

SEQ ID NO: 40317 - DNA, 22 bp, Artificial Sequence
  chemically synthesized
ctggcctcacctttgctgtgtt

SEQ ID NO: 40318 - DNA, 22 bp, Artificial Sequence
  chemically synthesized
gcctcacctttgctgtgttcac

SEQ ID NO: 40319 - DNA, 22 bp, Artificial Sequence
  chemically synthesized
acctttgctgtgttcaccctct

SEQ ID NO: 40320 - DNA, 22 bp, Artificial Sequence
  chemically synthesized
tgctgtgttcaccctctacctc

SEQ ID NO: 40321 - DNA, 22 bp, Artificial Sequence
  chemically synthesized
gctgtgttcaccctctacctct

SEQ ID NO: 40322 - DNA, 22 bp, Artificial Sequence
  chemically synthesized
ctgtgttcaccctctacctctg

SEQ ID NO: 40323 - DNA, 22 bp, Artificial Sequence
  chemically synthesized
tgttcaccctctacctctgctt

SEQ ID NO: 40324 - DNA, 22 bp, Artificial Sequence
  chemically synthesized
accctctacctctgcttcccct

SEQ ID NO: 40325 - DNA, 22 bp, Artificial Sequence
  chemically synthesized
tacctctgcttcccctgcagaa

SEQ ID NO: 40326 - DNA, 22 bp, Artificial Sequence
  chemically synthesized
cctctgcttcccctgcagaatt

SEQ ID NO: 40327 - DNA, 22 bp, Artificial Sequence
  chemically synthesized
tgcttcccctgcagaattagac

SEQ ID NO: 40328 - DNA, 22 bp, Artificial Sequence
  chemically synthesized
cttcccctgcagaattagacag

SEQ ID NO: 40329 - DNA, 22 bp, Artificial Sequence
  chemically synthesized
cccctgcagaattagacagcta

SEQ ID NO: 40330 - DNA, 22 bp, Artificial Sequence
  chemically synthesized
ccctgcagaattagacagctaa

SEQ ID NO: 40331 - DNA, 22 bp, Artificial Sequence
  chemically synthesized
cagaattagacagctaaaaaca

SEQ ID NO: 40332 - DNA, 22 bp, Artificial Sequence
  chemically synthesized
gacagctaaaaacatttctatc

SEQ ID NO: 40333 - DNA, 22 bp, Artificial Sequence
  chemically synthesized
aaaacatttctatcagcctaag

SEQ ID NO: 40334 - DNA, 22 bp, Artificial Sequence
  chemically synthesized
ctatcagcctaagaagctattt

SEQ ID NO: 40335 - DNA, 22 bp, Artificial Sequence
  chemically synthesized
tatcagcctaagaagctattta

SEQ ID NO: 40336 - DNA, 22 bp, Artificial Sequence
  chemically synthesized
tcagcctaagaagctatttact

SEQ ID NO: 40337 - DNA, 22 bp, Artificial Sequence
  chemically synthesized
agaagctatttactttagaaaa

SEQ ID NO: 40338 - DNA, 22 bp, Artificial Sequence
  chemically synthesized
tttactttagaaaaaaagcaca

SEQ ID NO: 40339 - DNA, 22 bp, Artificial Sequence
  chemically synthesized
actttagaaaaaaagcacactg

SEQ ID NO: 40340 - DNA, 22 bp, Artificial Sequence
  chemically synthesized
ctttagaaaaaaagcacactgt

SEQ ID NO: 40341 - DNA, 22 bp, Artificial Sequence
  chemically synthesized
tagaaaaaaagcacactgtctt

SEQ ID NO: 40342 - DNA, 22 bp, Artificial Sequence
  chemically synthesized
agaaaaaaagcacactgtcttt

SEQ ID NO: 40343 - DNA, 22 bp, Artificial Sequence
  chemically synthesized
gaaaaaaagcacactgtctttg

SEQ ID NO: 40344 - DNA, 22 bp, Artificial Sequence
  chemically synthesized
tctttgtgagactcacccttgc

SEQ ID NO: 40345 - DNA, 22 bp, Artificial Sequence
  chemically synthesized
tgtgagactcacccttgcattt

SEQ ID NO: 40346 - DNA, 22 bp, Artificial Sequence
  chemically synthesized
gtgagactcacccttgcattta

SEQ ID NO: 40347 - DNA, 22 bp, Artificial Sequence
  chemically synthesized
tgagactcacccttgcatttat

SEQ ID NO: 40348 - DNA, 22 bp, Artificial Sequence
  chemically synthesized
acccttgcatttatcttccttc

SEQ ID NO: 40349 - DNA, 22 bp, Artificial Sequence
  chemically synthesized
gcatttatcttccttcaggaag

SEQ ID NO: 40350 - DNA, 22 bp, Artificial Sequence
  chemically synthesized
catttatcttccttcaggaaga

SEQ ID NO: 40351 - DNA, 22 bp, Artificial Sequence
  chemically synthesized
atcttccttcaggaagagggtc

SEQ ID NO: 40352 - DNA, 22 bp, Artificial Sequence
  chemically synthesized
tcttccttcaggaagagggtca

SEQ ID NO: 40353 - DNA, 22 bp, Artificial Sequence
  chemically synthesized
ccttcaggaagagggtcaaagc

SEQ ID NO: 40354 - DNA, 22 bp, Artificial Sequence
  chemically synthesized
cttcaggaagagggtcaaagca

SEQ ID NO: 40355 - DNA, 22 bp, Artificial Sequence
  chemically synthesized
caggaagagggtcaaagcaaag

SEQ ID NO: 40356 - DNA, 22 bp, Artificial Sequence
  chemically synthesized
aggaagagggtcaaagcaaagc

SEQ ID NO: 40357 - DNA, 22 bp, Artificial Sequence
  chemically synthesized
gggaccccagctgattctgctg

SEQ ID NO: 40358 - DNA, 22 bp, Artificial Sequence
  chemically synthesized
attctgctgcttcttccactaa

SEQ ID NO: 40359 - DNA, 22 bp, Artificial Sequence
  chemically synthesized
tgctgcttcttccactaaacac

SEQ ID NO: 40360 - DNA, 22 bp, Artificial Sequence
  chemically synthesized
ctgcttcttccactaaacacat

SEQ ID NO: 40361 - DNA, 22 bp, Artificial Sequence
  chemically synthesized
cttcttccactaaacacatcca

SEQ ID NO: 40362 - DNA, 22 bp, Artificial Sequence
  chemically synthesized
cttccactaaacacatccataa

SEQ ID NO: 40363 - DNA, 22 bp, Artificial Sequence
  chemically synthesized
ttccactaaacacatccataat

SEQ ID NO: 40364 - DNA, 22 bp, Artificial Sequence
  chemically synthesized
ccactaaacacatccataatat

SEQ ID NO: 40365 - DNA, 22 bp, Artificial Sequence
  chemically synthesized
cactaaacacatccataatatt

SEQ ID NO: 40366 - DNA, 22 bp, Artificial Sequence
  chemically synthesized
aacacatccataatattctctt

SEQ ID NO: 40367 - DNA, 22 bp, Artificial Sequence
  chemically synthesized
tctttggtaagtaaaatcgaca

SEQ ID NO: 40368 - DNA, 22 bp, Artificial Sequence
  chemically synthesized
tttggtaagtaaaatcgacatt

SEQ ID NO: 40369 - DNA, 22 bp, Artificial Sequence
  chemically synthesized
tggtaagtaaaatcgacattcc

SEQ ID NO: 40370 - DNA, 22 bp, Artificial Sequence
  chemically synthesized
ggtaagtaaaatcgacattccc

SEQ ID NO: 40371 - DNA, 22 bp, Artificial Sequence
  chemically synthesized
gtaagtaaaatcgacattccca

SEQ ID NO: 40372 - DNA, 22 bp, Artificial Sequence
  chemically synthesized
ccacatgaactggaaatgctaa

SEQ ID NO: 40373 - DNA, 22 bp, Artificial Sequence
  chemically synthesized
gaaatgctaaattgttaatagc

SEQ ID NO: 40374 - DNA, 22 bp, Artificial Sequence
  chemically synthesized
aattgttaatagcctccctagg

SEQ ID NO: 40375 - DNA, 22 bp, Artificial Sequence
  chemically synthesized
ttaatagcctccctagggctta

SEQ ID NO: 40376 - DNA, 22 bp, Artificial Sequence
  chemically synthesized
atagcctccctagggcttaact

SEQ ID NO: 40377 - DNA, 22 bp, Artificial Sequence
  chemically synthesized
cctagggcttaacttcttgcta

SEQ ID NO: 40378 - DNA, 22 bp, Artificial Sequence
  chemically synthesized
gggcttaacttcttgctatgat

SEQ ID NO: 40379 - DNA, 22 bp, Artificial Sequence
  chemically synthesized
aacttcttgctatgatgccttc

SEQ ID NO: 40380 - DNA, 22 bp, Artificial Sequence
  chemically synthesized
acttcttgctatgatgccttca

SEQ ID NO: 40381 - DNA, 22 bp, Artificial Sequence
  chemically synthesized
cttgctatgatgccttcaatta

SEQ ID NO: 40382 - DNA, 22 bp, Artificial Sequence
  chemically synthesized
ttgctatgatgccttcaattat

SEQ ID NO: 40383 - DNA, 22 bp, Artificial Sequence
  chemically synthesized
gctatgatgccttcaattattt

SEQ ID NO: 40384 - DNA, 22 bp, Artificial Sequence
  chemically synthesized
ctatgatgccttcaattatttc

SEQ ID NO: 40385 - DNA, 22 bp, Artificial Sequence
  chemically synthesized
tgatgccttcaattatttcatc

SEQ ID NO: 40386 - DNA, 22 bp, Artificial Sequence
  chemically synthesized
caattatttcatcacggcttag

SEQ ID NO: 40387 - DNA, 22 bp, Artificial Sequence
  chemically synthesized
aattatttcatcacggcttagg

SEQ ID NO: 40388 - DNA, 22 bp, Artificial Sequence
  chemically synthesized
tttcatcacggcttaggcaaag

SEQ ID NO: 40389 - DNA, 22 bp, Artificial Sequence
  chemically synthesized
catcacggcttaggcaaagtaa

SEQ ID NO: 40390 - DNA, 22 bp, Artificial Sequence
  chemically synthesized
atcacggcttaggcaaagtaaa

SEQ ID NO: 40391 - DNA, 22 bp, Artificial Sequence
  chemically synthesized
aggcaaagtaaagtatcacaat

SEQ ID NO: 40392 - DNA, 22 bp, Artificial Sequence
  chemically synthesized
ggcaaagtaaagtatcacaatt

SEQ ID NO: 40393 - DNA, 22 bp, Artificial Sequence
  chemically synthesized
atgcttctgagcgtcaaactcg

SEQ ID NO: 40394 - DNA, 22 bp, Artificial Sequence
  chemically synthesized
ctgagcgtcaaactcgaggagc

SEQ ID NO: 40395 - DNA, 22 bp, Artificial Sequence
  chemically synthesized
tgagcgtcaaactcgaggagca

SEQ ID NO: 40396 - DNA, 22 bp, Artificial Sequence
  chemically synthesized
agcgtcaaactcgaggagcagc

SEQ ID NO: 40397 - DNA, 22 bp, Artificial Sequence
  chemically synthesized
gaggagcagctctgccttccca

SEQ ID NO: 40398 - DNA, 22 bp, Artificial Sequence
  chemically synthesized
tgccttcccaggccaaggtggg

SEQ ID NO: 40399 - DNA, 22 bp, Artificial Sequence
  chemically synthesized
ccttcccaggccaaggtgggga

SEQ ID NO: 40400 - DNA, 22 bp, Artificial Sequence
  chemically synthesized
cccaggccaaggtggggaaaag

SEQ ID NO: 40401 - DNA, 22 bp, Artificial Sequence
  chemically synthesized
ccaggccaaggtggggaaaagg

SEQ ID NO: 40402 - DNA, 22 bp, Artificial Sequence
  chemically synthesized
cccctggttgagggcctcttct

SEQ ID NO: 40403 - DNA, 22 bp, Artificial Sequence
  chemically synthesized
gttgagggcctcttcttttccc

SEQ ID NO: 40404 - DNA, 22 bp, Artificial Sequence
  chemically synthesized
agggcctcttcttttcccacct

SEQ ID NO: 40405 - DNA, 22 bp, Artificial Sequence
  chemically synthesized
ttcttttcccaccttcgctttc

SEQ ID NO: 40406 - DNA, 22 bp, Artificial Sequence
  chemically synthesized
cttttcccaccttcgctttcat

SEQ ID NO: 40407 - DNA, 22 bp, Artificial Sequence
  chemically synthesized
ttttcccaccttcgctttcatt

SEQ ID NO: 40408 - DNA, 22 bp, Artificial Sequence
  chemically synthesized
ttcccaccttcgctttcattct

SEQ ID NO: 40409 - DNA, 22 bp, Artificial Sequence
  chemically synthesized
tcccaccttcgctttcattctc

SEQ ID NO: 40410 - DNA, 22 bp, Artificial Sequence
  chemically synthesized
cccaccttcgctttcattctcc

SEQ ID NO: 40411 - DNA, 22 bp, Artificial Sequence
  chemically synthesized
ccaccttcgctttcattctccc

SEQ ID NO: 40412 - DNA, 22 bp, Artificial Sequence
  chemically synthesized
cgctttcattctccccagccag

SEQ ID NO: 40413 - DNA, 22 bp, Artificial Sequence
  chemically synthesized
gctttcattctccccagccaga

SEQ ID NO: 40414 - DNA, 22 bp, Artificial Sequence
  chemically synthesized
tcattctccccagccagagatg

SEQ ID NO: 40415 - DNA, 22 bp, Artificial Sequence
  chemically synthesized
cattctccccagccagagatgg

SEQ ID NO: 40416 - DNA, 22 bp, Artificial Sequence
  chemically synthesized
attctccccagccagagatggg

SEQ ID NO: 40417 - DNA, 22 bp, Artificial Sequence
  chemically synthesized
tccccagccagagatgggctct

SEQ ID NO: 40418 - DNA, 22 bp, Artificial Sequence
  chemically synthesized
cccagccagagatgggctctgg

SEQ ID NO: 40419 - DNA, 22 bp, Artificial Sequence
  chemically synthesized
tggttgctggctaggaagtggg

SEQ ID NO: 40420 - DNA, 22 bp, Artificial Sequence
  chemically synthesized
gttgctggctaggaagtgggtg

SEQ ID NO: 40421 - DNA, 22 bp, Artificial Sequence
  chemically synthesized
ctggctaggaagtgggtgatct

SEQ ID NO: 40422 - DNA, 22 bp, Artificial Sequence
  chemically synthesized
gctaggaagtgggtgatctagt

SEQ ID NO: 40423 - DNA, 22 bp, Artificial Sequence
  chemically synthesized
ggaagtgggtgatctagttatg

SEQ ID NO: 40424 - DNA, 22 bp, Artificial Sequence
  chemically synthesized
gttatgtcctctttttttcttt

SEQ ID NO: 40425 - DNA, 22 bp, Artificial Sequence
  chemically synthesized
tgtcctctttttttctttgtta

SEQ ID NO: 40426 - DNA, 22 bp, Artificial Sequence
  chemically synthesized
tttttttctttgttagtgctct

SEQ ID NO: 40427 - DNA, 22 bp, Artificial Sequence
  chemically synthesized
tttttctttgttagtgctctta

SEQ ID NO: 40428 - DNA, 22 bp, Artificial Sequence
  chemically synthesized
ttttctttgttagtgctcttag

SEQ ID NO: 40429 - DNA, 22 bp, Artificial Sequence
  chemically synthesized
tttctttgttagtgctcttagg

SEQ ID NO: 40430 - DNA, 22 bp, Artificial Sequence
  chemically synthesized
ttctttgttagtgctcttaggc

SEQ ID NO: 40431 - DNA, 22 bp, Artificial Sequence
  chemically synthesized
tctttgttagtgctcttaggca

SEQ ID NO: 40432 - DNA, 22 bp, Artificial Sequence
  chemically synthesized
ctttgttagtgctcttaggcaa

SEQ ID NO: 40433 - DNA, 22 bp, Artificial Sequence
  chemically synthesized
tttgttagtgctcttaggcaag

SEQ ID NO: 40434 - DNA, 22 bp, Artificial Sequence
  chemically synthesized
tgttagtgctcttaggcaagtg

SEQ ID NO: 40435 - DNA, 22 bp, Artificial Sequence
  chemically synthesized
gttagtgctcttaggcaagtga

SEQ ID NO: 40436 - DNA, 22 bp, Artificial Sequence
  chemically synthesized
ttagtgctcttaggcaagtgat

SEQ ID NO: 40437 - DNA, 22 bp, Artificial Sequence
  chemically synthesized
gtgctcttaggcaagtgattct

SEQ ID NO: 40438 - DNA, 22 bp, Artificial Sequence
  chemically synthesized
ttaggcaagtgattctcacagc

SEQ ID NO: 40439 - DNA, 22 bp, Artificial Sequence
  chemically synthesized
aggcaagtgattctcacagcgc

SEQ ID NO: 40440 - DNA, 22 bp, Artificial Sequence
  chemically synthesized
ggcaagtgattctcacagcgca

SEQ ID NO: 40441 - DNA, 22 bp, Artificial Sequence
  chemically synthesized
tcacagcgcagacccaggccca

SEQ ID NO: 40442 - DNA, 22 bp, Artificial Sequence
  chemically synthesized
acagcgcagacccaggcccacc

SEQ ID NO: 40443 - DNA, 22 bp, Artificial Sequence
  chemically synthesized
ggagtttgttcaaaatgcaaat

SEQ ID NO: 40444 - DNA, 22 bp, Artificial Sequence
  chemically synthesized
gttcaaaatgcaaattcttggg

SEQ ID NO: 40445 - DNA, 22 bp, Artificial Sequence
  chemically synthesized
ttcaaaatgcaaattcttgggc

SEQ ID NO: 40446 - DNA, 22 bp, Artificial Sequence
  chemically synthesized
aaaatgcaaattcttgggcacc

SEQ ID NO: 40447 - DNA, 22 bp, Artificial Sequence
  chemically synthesized
ttgggcaccacctcagacttac

SEQ ID NO: 40448 - DNA, 22 bp, Artificial Sequence
  chemically synthesized
gggcaccacctcagacttactg

SEQ ID NO: 40449 - DNA, 22 bp, Artificial Sequence
  chemically synthesized
ggcaccacctcagacttactga

SEQ ID NO: 40450 - DNA, 22 bp, Artificial Sequence
  chemically synthesized
agacttactgaatcagaaattg

SEQ ID NO: 40451 - DNA, 22 bp, Artificial Sequence
  chemically synthesized
actgaatcagaaattgagggtg

SEQ ID NO: 40452 - DNA, 22 bp, Artificial Sequence
  chemically synthesized
ctgaatcagaaattgagggtgg

SEQ ID NO: 40453 - DNA, 22 bp, Artificial Sequence
  chemically synthesized
aatcagaaattgagggtgggga

SEQ ID NO: 40454 - DNA, 22 bp, Artificial Sequence
  chemically synthesized
agggtggggaagcagccttcta

SEQ ID NO: 40455 - DNA, 22 bp, Artificial Sequence
  chemically synthesized
ctatgttgaataaattctccag

SEQ ID NO: 40456 - DNA, 22 bp, Artificial Sequence
  chemically synthesized
tatgttgaataaattctccagg

SEQ ID NO: 40457 - DNA, 22 bp, Artificial Sequence
  chemically synthesized
tgttgaataaattctccaggtg

SEQ ID NO: 40458 - DNA, 22 bp, Artificial Sequence
  chemically synthesized
aataaattctccaggtgattct

SEQ ID NO: 40459 - DNA, 22 bp, Artificial Sequence
  chemically synthesized
tccaggtgattctcatgcacac

SEQ ID NO: 40460 - DNA, 22 bp, Artificial Sequence
  chemically synthesized
caggtgattctcatgcacactc

SEQ ID NO: 40461 - DNA, 22 bp, Artificial Sequence
  chemically synthesized
tcatgcacactcaagctgaatc

SEQ ID NO: 40462 - DNA, 22 bp, Artificial Sequence
  chemically synthesized
atgcacactcaagctgaatcag

SEQ ID NO: 40463 - DNA, 22 bp, Artificial Sequence
  chemically synthesized
aagctgaatcagcactgctgtc

SEQ ID NO: 40464 - DNA, 22 bp, Artificial Sequence
  chemically synthesized
aatcagcactgctgtcttaggg

SEQ ID NO: 40465 - DNA, 22 bp, Artificial Sequence
  chemically synthesized
ctgtcttagggtaagggaagta

SEQ ID NO: 40466 - DNA, 22 bp, Artificial Sequence
  chemically synthesized
tcttagggtaagggaagtatga

SEQ ID NO: 40467 - DNA, 22 bp, Artificial Sequence
  chemically synthesized
agggtaagggaagtatgaacgc

SEQ ID NO: 40468 - DNA, 22 bp, Artificial Sequence
  chemically synthesized
gggtaagggaagtatgaacgct

SEQ ID NO: 40469 - DNA, 22 bp, Artificial Sequence
  chemically synthesized
gaagctttgaaattccctgggc

SEQ ID NO: 40470 - DNA, 22 bp, Artificial Sequence
  chemically synthesized
tgaaattccctgggcagagacc

SEQ ID NO: 40471 - DNA, 22 bp, Artificial Sequence
  chemically synthesized
gaaattccctgggcagagaccc

SEQ ID NO: 40472 - DNA, 22 bp, Artificial Sequence
  chemically synthesized
aaattccctgggcagagaccca

SEQ ID NO: 40473 - DNA, 22 bp, Artificial Sequence
  chemically synthesized
cctgggcagagacccatgggcc

SEQ ID NO: 40474 - DNA, 22 bp, Artificial Sequence
  chemically synthesized
ggcagagacccatgggccatga

SEQ ID NO: 40475 - DNA, 22 bp, Artificial Sequence
  chemically synthesized
ttttccctcctgtccaggaccc

SEQ ID NO: 40476 - DNA, 22 bp, Artificial Sequence
  chemically synthesized
tccctcctgtccaggacccacc

SEQ ID NO: 40477 - DNA, 22 bp, Artificial Sequence
  chemically synthesized
ccctcctgtccaggacccacct

SEQ ID NO: 40478 - DNA, 22 bp, Artificial Sequence
  chemically synthesized
cctcctgtccaggacccacctc

SEQ ID NO: 40479 - DNA, 22 bp, Artificial Sequence
  chemically synthesized
ctgtccaggacccacctccttt

SEQ ID NO: 40480 - DNA, 22 bp, Artificial Sequence
  chemically synthesized
tccaggacccacctcctttagg

SEQ ID NO: 40481 - DNA, 22 bp, Artificial Sequence
  chemically synthesized
ctttaggactggaacagtcaaa

SEQ ID NO: 40482 - DNA, 22 bp, Artificial Sequence
  chemically synthesized
taggactggaacagtcaaaaac

SEQ ID NO: 40483 - DNA, 22 bp, Artificial Sequence
  chemically synthesized
aggactggaacagtcaaaaaca

SEQ ID NO: 40484 - DNA, 22 bp, Artificial Sequence
  chemically synthesized
ggactggaacagtcaaaaacaa

SEQ ID NO: 40485 - DNA, 22 bp, Artificial Sequence
  chemically synthesized
gaacagtcaaaaacaaattaag

SEQ ID NO: 40486 - DNA, 22 bp, Artificial Sequence
  chemically synthesized
agcttagggaatccctaaggat

SEQ ID NO: 40487 - DNA, 22 bp, Artificial Sequence
  chemically synthesized
agggaatccctaaggatccctc

SEQ ID NO: 40488 - DNA, 22 bp, Artificial Sequence
  chemically synthesized
gggaatccctaaggatccctcc

SEQ ID NO: 40489 - DNA, 22 bp, Artificial Sequence
  chemically synthesized
aggatccctccattaggaaatt

SEQ ID NO: 40490 - DNA, 22 bp, Artificial Sequence
  chemically synthesized
cattaggaaattcaggttccac

SEQ ID NO: 40491 - DNA, 22 bp, Artificial Sequence
  chemically synthesized
ggaaattcaggttccaccctcc

SEQ ID NO: 40492 - DNA, 22 bp, Artificial Sequence
  chemically synthesized
aggttccaccctccgtctgtca

SEQ ID NO: 40493 - DNA, 22 bp, Artificial Sequence
  chemically synthesized
caccctccgtctgtcattgata

SEQ ID NO: 40494 - DNA, 22 bp, Artificial Sequence
  chemically synthesized
cgtctgtcattgataaggacag

SEQ ID NO: 40495 - DNA, 22 bp, Artificial Sequence
  chemically synthesized
tcattgataaggacagggaaca

SEQ ID NO: 40496 - DNA, 22 bp, Artificial Sequence
  chemically synthesized
ataaggacagggaacaggtcca

SEQ ID NO: 40497 - DNA, 22 bp, Artificial Sequence
  chemically synthesized
tccatcaggtccagggccttct

SEQ ID NO: 40498 - DNA, 22 bp, Artificial Sequence
  chemically synthesized
catcaggtccagggccttctta

SEQ ID NO: 40499 - DNA, 22 bp, Artificial Sequence
  chemically synthesized
cttagcatgagacaacacccaa

SEQ ID NO: 40500 - DNA, 22 bp, Artificial Sequence
  chemically synthesized
ttagcatgagacaacacccaaa

SEQ ID NO: 40501 - DNA, 22 bp, Artificial Sequence
  chemically synthesized
agcatgagacaacacccaaacc

SEQ ID NO: 40502 - DNA, 22 bp, Artificial Sequence
  chemically synthesized
gcatgagacaacacccaaacca

SEQ ID NO: 40503 - DNA, 22 bp, Artificial Sequence
  chemically synthesized
gtgccagacagattgtgtcctc

SEQ ID NO: 40504 - DNA, 22 bp, Artificial Sequence
  chemically synthesized
tgccagacagattgtgtcctca

SEQ ID NO: 40505 - DNA, 22 bp, Artificial Sequence
  chemically synthesized
tgtcctcactgcttccattaaa

SEQ ID NO: 40506 - DNA, 22 bp, Artificial Sequence
  chemically synthesized
actgcttccattaaagccgaca

SEQ ID NO: 40507 - DNA, 22 bp, Artificial Sequence
  chemically synthesized
cttccattaaagccgacatgtc

SEQ ID NO: 40508 - DNA, 22 bp, Artificial Sequence
  chemically synthesized
ccattaaagccgacatgtcagc

SEQ ID NO: 40509 - DNA, 22 bp, Artificial Sequence
  chemically synthesized
cattaaagccgacatgtcagcg

SEQ ID NO: 40510 - DNA, 22 bp, Artificial Sequence
  chemically synthesized
aagccgacatgtcagcgaacgc

SEQ ID NO: 40511 - DNA, 22 bp, Artificial Sequence
  chemically synthesized
tggcaactgcacggacacagca

SEQ ID NO: 40512 - DNA, 22 bp, Artificial Sequence
  chemically synthesized
cacggacacagcaggaactgga

SEQ ID NO: 40513 - DNA, 22 bp, Artificial Sequence
  chemically synthesized
gactcttgtttccctttctggt

SEQ ID NO: 40514 - DNA, 22 bp, Artificial Sequence
  chemically synthesized
ttgtttccctttctggtctctc

SEQ ID NO: 40515 - DNA, 22 bp, Artificial Sequence
  chemically synthesized
gtttccctttctggtctctcaa

SEQ ID NO: 40516 - DNA, 22 bp, Artificial Sequence
  chemically synthesized
tttccctttctggtctctcaaa

SEQ ID NO: 40517 - DNA, 22 bp, Artificial Sequence
  chemically synthesized
ccctttctggtctctcaaatgg

SEQ ID NO: 40518 - DNA, 22 bp, Artificial Sequence
  chemically synthesized
cctttctggtctctcaaatggg

SEQ ID NO: 40519 - DNA, 22 bp, Artificial Sequence
  chemically synthesized
tctggtctctcaaatgggacac

SEQ ID NO: 40520 - DNA, 22 bp, Artificial Sequence
  chemically synthesized
ctggtctctcaaatgggacaca

SEQ ID NO: 40521 - DNA, 22 bp, Artificial Sequence
  chemically synthesized
tggtctctcaaatgggacacat

SEQ ID NO: 40522 - DNA, 22 bp, Artificial Sequence
  chemically synthesized
gtctctcaaatgggacacattt

SEQ ID NO: 40523 - DNA, 22 bp, Artificial Sequence
  chemically synthesized
tcaaatgggacacatttccctt

SEQ ID NO: 40524 - DNA, 22 bp, Artificial Sequence
  chemically synthesized
aaatgggacacatttccctttt

SEQ ID NO: 40525 - DNA, 22 bp, Artificial Sequence
  chemically synthesized
cccttttctgactcaatctttt

SEQ ID NO: 40526 - DNA, 22 bp, Artificial Sequence
  chemically synthesized
ccttttctgactcaatcttttt

SEQ ID NO: 40527 - DNA, 22 bp, Artificial Sequence
  chemically synthesized
ttctgactcaatcttttttcaa

SEQ ID NO: 40528 - DNA, 22 bp, Artificial Sequence
  chemically synthesized
tctgactcaatcttttttcaaa

SEQ ID NO: 40529 - DNA, 22 bp, Artificial Sequence
  chemically synthesized
ctgactcaatcttttttcaaat

SEQ ID NO: 40530 - DNA, 22 bp, Artificial Sequence
  chemically synthesized
tgactcaatcttttttcaaatg

SEQ ID NO: 40531 - DNA, 22 bp, Artificial Sequence
  chemically synthesized
actcaatcttttttcaaatgtc

SEQ ID NO: 40532 - DNA, 22 bp, Artificial Sequence
  chemically synthesized
aatcttttttcaaatgtcttac

SEQ ID NO: 40533 - DNA, 22 bp, Artificial Sequence
  chemically synthesized
ttttcaaatgtcttacactttt

SEQ ID NO: 40534 - DNA, 22 bp, Artificial Sequence
  chemically synthesized
tttcaaatgtcttacacttttc

SEQ ID NO: 40535 - DNA, 22 bp, Artificial Sequence
  chemically synthesized
ttcaaatgtcttacacttttct

SEQ ID NO: 40536 - DNA, 22 bp, Artificial Sequence
  chemically synthesized
tcaaatgtcttacacttttctg

SEQ ID NO: 40537 - DNA, 22 bp, Artificial Sequence
  chemically synthesized
caaatgtcttacacttttctgg

SEQ ID NO: 40538 - DNA, 22 bp, Artificial Sequence
  chemically synthesized
aaatgtcttacacttttctggt

SEQ ID NO: 40539 - DNA, 22 bp, Artificial Sequence
  chemically synthesized
acacttttctggtggaaggtgt

SEQ ID NO: 40540 - DNA, 22 bp, Artificial Sequence
  chemically synthesized
cacttttctggtggaaggtgtt

SEQ ID NO: 40541 - DNA, 22 bp, Artificial Sequence
  chemically synthesized
ttctggtggaaggtgtttcaac

SEQ ID NO: 40542 - DNA, 22 bp, Artificial Sequence
  chemically synthesized
tctggtggaaggtgtttcaacc

SEQ ID NO: 40543 - DNA, 22 bp, Artificial Sequence
  chemically synthesized
ctggtggaaggtgtttcaacct

SEQ ID NO: 40544 - DNA, 22 bp, Artificial Sequence
  chemically synthesized
tggtggaaggtgtttcaacctg

SEQ ID NO: 40545 - DNA, 22 bp, Artificial Sequence
  chemically synthesized
gtggaaggtgtttcaacctgtt

SEQ ID NO: 40546 - DNA, 22 bp, Artificial Sequence
  chemically synthesized
caacctgttctatttcataaag

SEQ ID NO: 40547 - DNA, 22 bp, Artificial Sequence
  chemically synthesized
aacctgttctatttcataaagg

SEQ ID NO: 40548 - DNA, 22 bp, Artificial Sequence
  chemically synthesized
ttctatttcataaaggtctctc

SEQ ID NO: 40549 - DNA, 22 bp, Artificial Sequence
  chemically synthesized
tatttcataaaggtctctctag

SEQ ID NO: 40550 - DNA, 22 bp, Artificial Sequence
  chemically synthesized
tttcataaaggtctctctagac

SEQ ID NO: 40551 - DNA, 22 bp, Artificial Sequence
  chemically synthesized
cataaaggtctctctagaccca

SEQ ID NO: 40552 - DNA, 22 bp, Artificial Sequence
  chemically synthesized
ataaaggtctctctagacccag

SEQ ID NO: 40553 - DNA, 22 bp, Artificial Sequence
  chemically synthesized
tctagacccagtatttccactt

SEQ ID NO: 40554 - DNA, 22 bp, Artificial Sequence
  chemically synthesized
tagacccagtatttccacttgg

SEQ ID NO: 40555 - DNA, 22 bp, Artificial Sequence
  chemically synthesized
gacccagtatttccacttgggg

SEQ ID NO: 40556 - DNA, 22 bp, Artificial Sequence
  chemically synthesized
ccacttggggcctcagaaatgc

SEQ ID NO: 40557 - DNA, 22 bp, Artificial Sequence
  chemically synthesized
cacttggggcctcagaaatgcc

SEQ ID NO: 40558 - DNA, 22 bp, Artificial Sequence
  chemically synthesized
ggggcctcagaaatgccttaca

SEQ ID NO: 40559 - DNA, 22 bp, Artificial Sequence
  chemically synthesized
gggcctcagaaatgccttacac

SEQ ID NO: 40560 - DNA, 22 bp, Artificial Sequence
  chemically synthesized
agaaatgccttacacattatta

SEQ ID NO: 40561 - DNA, 22 bp, Artificial Sequence
  chemically synthesized
acacattattaggttgcaaagt

SEQ ID NO: 40562 - DNA, 22 bp, Artificial Sequence
  chemically synthesized
cacattattaggttgcaaagtt

SEQ ID NO: 40563 - DNA, 22 bp, Artificial Sequence
  chemically synthesized
ttaggttgcaaagtttccttat

SEQ ID NO: 40564 - DNA, 22 bp, Artificial Sequence
  chemically synthesized
ggttgcaaagtttccttatggc

SEQ ID NO: 40565 - DNA, 22 bp, Artificial Sequence
  chemically synthesized
caaagtttccttatggctgaat

SEQ ID NO: 40566 - DNA, 22 bp, Artificial Sequence
  chemically synthesized
ccttatggctgaatttaaaaat

SEQ ID NO: 40567 - DNA, 22 bp, Artificial Sequence
  chemically synthesized
cttatggctgaatttaaaaata

SEQ ID NO: 40568 - DNA, 22 bp, Artificial Sequence
  chemically synthesized
atggctgaatttaaaaatagtg

SEQ ID NO: 40569 - DNA, 22 bp, Artificial Sequence
  chemically synthesized
tggctgaatttaaaaatagtga

SEQ ID NO: 40570 - DNA, 22 bp, Artificial Sequence
  chemically synthesized
aatttaaaaatagtgactctta

SEQ ID NO: 40571 - DNA, 22 bp, Artificial Sequence
  chemically synthesized
aaaaatagtgactcttattttt

SEQ ID NO: 40572 - DNA, 22 bp, Artificial Sequence
  chemically synthesized
aaaatagtgactcttatttttc

SEQ ID NO: 40573 - DNA, 22 bp, Artificial Sequence
  chemically synthesized
ttatttttcaggtttcattaaa

SEQ ID NO: 40574 - DNA, 22 bp, Artificial Sequence
  chemically synthesized
atttttcaggtttcattaaaaa

SEQ ID NO: 40575 - DNA, 22 bp, Artificial Sequence
  chemically synthesized
tttttcaggtttcattaaaaaa

SEQ ID NO: 40576 - DNA, 22 bp, Artificial Sequence
  chemically synthesized
ttcaggtttcattaaaaaatat

SEQ ID NO: 40577 - DNA, 22 bp, Artificial Sequence
  chemically synthesized
tcaggtttcattaaaaaatatg

SEQ ID NO: 40578 - DNA, 22 bp, Artificial Sequence
  chemically synthesized
caggtttcattaaaaaatatgc

SEQ ID NO: 40579 - DNA, 22 bp, Artificial Sequence
  chemically synthesized
aggtttcattaaaaaatatgca

SEQ ID NO: 40580 - DNA, 22 bp, Artificial Sequence
  chemically synthesized
cattaaaaaatatgcagcaaac

SEQ ID NO: 40581 - DNA, 22 bp, Artificial Sequence
  chemically synthesized
attaaaaaatatgcagcaaact

SEQ ID NO: 40582 - DNA, 22 bp, Artificial Sequence
  chemically synthesized
aaaaatatgcagcaaactggga

SEQ ID NO: 40583 - DNA, 22 bp, Artificial Sequence
  chemically synthesized
ggaatggctttgatttaatgtt

SEQ ID NO: 40584 - DNA, 22 bp, Artificial Sequence
  chemically synthesized
tgatttaatgttatacatttgg

SEQ ID NO: 40585 - DNA, 22 bp, Artificial Sequence
  chemically synthesized
gatttaatgttatacatttggt

SEQ ID NO: 40586 - DNA, 22 bp, Artificial Sequence
  chemically synthesized
atttaatgttatacatttggtc

SEQ ID NO: 40587 - DNA, 22 bp, Artificial Sequence
  chemically synthesized
aatgttatacatttggtcactt

SEQ ID NO: 40588 - DNA, 22 bp, Artificial Sequence
  chemically synthesized
atgttatacatttggtcacttt

SEQ ID NO: 40589 - DNA, 22 bp, Artificial Sequence
  chemically synthesized
tacatttggtcactttacattt

SEQ ID NO: 40590 - DNA, 22 bp, Artificial Sequence
  chemically synthesized
ggtcactttacatttctacata

SEQ ID NO: 40591 - DNA, 22 bp, Artificial Sequence
  chemically synthesized
gtcactttacatttctacatat

SEQ ID NO: 40592 - DNA, 22 bp, Artificial Sequence
  chemically synthesized
tacatttctacatatattgggt

SEQ ID NO: 40593 - DNA, 22 bp, Artificial Sequence
  chemically synthesized
acatttctacatatattgggta

SEQ ID NO: 40594 - DNA, 22 bp, Artificial Sequence
  chemically synthesized
catttctacatatattgggtac

SEQ ID NO: 40595 - DNA, 22 bp, Artificial Sequence
  chemically synthesized
ctacatatattgggtaccaact

SEQ ID NO: 40596 - DNA, 22 bp, Artificial Sequence
  chemically synthesized
tacatatattgggtaccaactt

SEQ ID NO: 40597 - DNA, 22 bp, Artificial Sequence
  chemically synthesized
catatattgggtaccaactttt

SEQ ID NO: 40598 - DNA, 22 bp, Artificial Sequence
  chemically synthesized
ggtaccaacttttgacaaagag

SEQ ID NO: 40599 - DNA, 22 bp, Artificial Sequence
  chemically synthesized
ttgacaaagagctctaagccca

SEQ ID NO: 40600 - DNA, 22 bp, Artificial Sequence
  chemically synthesized
tgacaaagagctctaagcccag

SEQ ID NO: 40601 - DNA, 22 bp, Artificial Sequence
  chemically synthesized
gacaaagagctctaagcccagt

SEQ ID NO: 40602 - DNA, 22 bp, Artificial Sequence
  chemically synthesized
acaaagagctctaagcccagtg

SEQ ID NO: 40603 - DNA, 22 bp, Artificial Sequence
  chemically synthesized
taagcccagtgggatgttcctg

SEQ ID NO: 40604 - DNA, 22 bp, Artificial Sequence
  chemically synthesized
agcccagtgggatgttcctgga

SEQ ID NO: 40605 - DNA, 22 bp, Artificial Sequence
  chemically synthesized
ctggaatttaagtcattaaatc

SEQ ID NO: 40606 - DNA, 22 bp, Artificial Sequence
  chemically synthesized
gaatttaagtcattaaatcaag

SEQ ID NO: 40607 - DNA, 22 bp, Artificial Sequence
  chemically synthesized
aagtcattaaatcaagtttttt

SEQ ID NO: 40608 - DNA, 22 bp, Artificial Sequence
  chemically synthesized
agtcattaaatcaagttttttg

SEQ ID NO: 40609 - DNA, 22 bp, Artificial Sequence
  chemically synthesized
aatcaagttttttggtttcctc

SEQ ID NO: 40610 - DNA, 22 bp, Artificial Sequence
  chemically synthesized
tttggtttcctcaagaacatct

SEQ ID NO: 40611 - DNA, 22 bp, Artificial Sequence
  chemically synthesized
ttggtttcctcaagaacatctc

SEQ ID NO: 40612 - DNA, 22 bp, Artificial Sequence
  chemically synthesized
tggtttcctcaagaacatctca

SEQ ID NO: 40613 - DNA, 22 bp, Artificial Sequence
  chemically synthesized
ggtttcctcaagaacatctcaa

SEQ ID NO: 40614 - DNA, 22 bp, Artificial Sequence
  chemically synthesized
gtttcctcaagaacatctcaaa

SEQ ID NO: 40615 - DNA, 22 bp, Artificial Sequence
  chemically synthesized
cctcaagaacatctcaaagatt

SEQ ID NO: 40616 - DNA, 22 bp, Artificial Sequence
  chemically synthesized
ctcaagaacatctcaaagattc

SEQ ID NO: 40617 - DNA, 22 bp, Artificial Sequence
  chemically synthesized
aagaacatctcaaagattcctt

SEQ ID NO: 40618 - DNA, 22 bp, Artificial Sequence
  chemically synthesized
aaagattccttgactattaaca

SEQ ID NO: 40619 - DNA, 22 bp, Artificial Sequence
  chemically synthesized
cttgactattaacatgctattt

SEQ ID NO: 40620 - DNA, 22 bp, Artificial Sequence
  chemically synthesized
gactattaacatgctatttgtt

SEQ ID NO: 40621 - DNA, 22 bp, Artificial Sequence
  chemically synthesized
actattaacatgctatttgttt

SEQ ID NO: 40622 - DNA, 22 bp, Artificial Sequence
  chemically synthesized
ttaacatgctatttgtttctga

SEQ ID NO: 40623 - DNA, 22 bp, Artificial Sequence
  chemically synthesized
acatgctatttgtttctgaaac

SEQ ID NO: 40624 - DNA, 22 bp, Artificial Sequence
  chemically synthesized
tttgtttctgaaactaatcact

SEQ ID NO: 40625 - DNA, 22 bp, Artificial Sequence
  chemically synthesized
gtttctgaaactaatcactggg

SEQ ID NO: 40626 - DNA, 22 bp, Artificial Sequence
  chemically synthesized
tttctgaaactaatcactgggt

SEQ ID NO: 40627 - DNA, 22 bp, Artificial Sequence
  chemically synthesized
ctgaaactaatcactgggtgtg

SEQ ID NO: 40628 - DNA, 22 bp, Artificial Sequence
  chemically synthesized
tgaaactaatcactgggtgtgt

SEQ ID NO: 40629 - DNA, 22 bp, Artificial Sequence
  chemically synthesized
aaactaatcactgggtgtgtaa

SEQ ID NO: 40630 - DNA, 22 bp, Artificial Sequence
  chemically synthesized
atcactgggtgtgtaatacagc

SEQ ID NO: 40631 - DNA, 22 bp, Artificial Sequence
  chemically synthesized
ggtgtgtaatacagccacatta

SEQ ID NO: 40632 - DNA, 22 bp, Artificial Sequence
  chemically synthesized
ctgtctactaatcaacaggtaa

SEQ ID NO: 40633 - DNA, 22 bp, Artificial Sequence
  chemically synthesized
tctactaatcaacaggtaatac

SEQ ID NO: 40634 - DNA, 22 bp, Artificial Sequence
  chemically synthesized
ctaatcaacaggtaatactgca

SEQ ID NO: 40635 - DNA, 22 bp, Artificial Sequence
  chemically synthesized
atcaacaggtaatactgcagat

SEQ ID NO: 40636 - DNA, 22 bp, Artificial Sequence
  chemically synthesized
cagatttccaaatgtgccaaaa

SEQ ID NO: 40637 - DNA, 22 bp, Artificial Sequence
  chemically synthesized
ccaaatgtgccaaaacagctaa

SEQ ID NO: 40638 - DNA, 22 bp, Artificial Sequence
  chemically synthesized
caaatgtgccaaaacagctaag

SEQ ID NO: 40639 - DNA, 22 bp, Artificial Sequence
  chemically synthesized
agcaaaaagcatcattccaaca

SEQ ID NO: 40640 - DNA, 22 bp, Artificial Sequence
  chemically synthesized
caacacgtttaatgactgcttt

SEQ ID NO: 40641 - DNA, 22 bp, Artificial Sequence
  chemically synthesized
aatgactgctttgggagcccaa

SEQ ID NO: 40642 - DNA, 22 bp, Artificial Sequence
  chemically synthesized
atgactgctttgggagcccaac

SEQ ID NO: 40643 - DNA, 22 bp, Artificial Sequence
  chemically synthesized
ctttgggagcccaactttaaca

SEQ ID NO: 40644 - DNA, 22 bp, Artificial Sequence
  chemically synthesized
tgggagcccaactttaacaggt

SEQ ID NO: 40645 - DNA, 22 bp, Artificial Sequence
  chemically synthesized
gggagcccaactttaacaggta

SEQ ID NO: 40646 - DNA, 22 bp, Artificial Sequence
  chemically synthesized
ggagcccaactttaacaggtat

SEQ ID NO: 40647 - DNA, 22 bp, Artificial Sequence
  chemically synthesized
taacaggtattaaaaccacagg

SEQ ID NO: 40648 - DNA, 22 bp, Artificial Sequence
  chemically synthesized
aacaggtattaaaaccacagga

SEQ ID NO: 40649 - DNA, 22 bp, Artificial Sequence
  chemically synthesized
acaggtattaaaaccacaggac

SEQ ID NO: 40650 - DNA, 22 bp, Artificial Sequence
  chemically synthesized
aaaccacaggactctccacagg

SEQ ID NO: 40651 - DNA, 22 bp, Artificial Sequence
  chemically synthesized
tccacaggagtacatagatgtg

SEQ ID NO: 40652 - DNA, 22 bp, Artificial Sequence
  chemically synthesized
cacaggagtacatagatgtgtg

SEQ ID NO: 40653 - DNA, 22 bp, Artificial Sequence
  chemically synthesized
ttcactaaaatgtacgtgtgtg

SEQ ID NO: 40654 - DNA, 22 bp, Artificial Sequence
  chemically synthesized
actaaaatgtacgtgtgtgtgt

SEQ ID NO: 40655 - DNA, 22 bp, Artificial Sequence
  chemically synthesized
aaatgtacgtgtgtgtgtgttt

SEQ ID NO: 40656 - DNA, 22 bp, Artificial Sequence
  chemically synthesized
gcaagcatttatgtgtacatat

SEQ ID NO: 40657 - DNA, 22 bp, Artificial Sequence
  chemically synthesized
caagcatttatgtgtacatatg

SEQ ID NO: 40658 - DNA, 22 bp, Artificial Sequence
  chemically synthesized
atgtgtacatatgtgtgttagc

SEQ ID NO: 40659 - DNA, 22 bp, Artificial Sequence
  chemically synthesized
tgtgtacatatgtgtgttagcg

SEQ ID NO: 40660 - DNA, 22 bp, Artificial Sequence
  chemically synthesized
gcgtgtgcatgcatatgtgttt

SEQ ID NO: 40661 - DNA, 22 bp, Artificial Sequence
  chemically synthesized
gtgagcatgtgcatgtgtgtat

SEQ ID NO: 40662 - DNA, 22 bp, Artificial Sequence
  chemically synthesized
tgagcatgtgcatgtgtgtata

SEQ ID NO: 40663 - DNA, 22 bp, Artificial Sequence
  chemically synthesized
tgactgtgtgcatgtgtgtgta

SEQ ID NO: 40664 - DNA, 22 bp, Artificial Sequence
  chemically synthesized
tgtgcatgtgtgtgtatgcttg

SEQ ID NO: 40665 - DNA, 22 bp, Artificial Sequence
  chemically synthesized
gtgcatgtgttagcatgtgcat

SEQ ID NO: 40666 - DNA, 22 bp, Artificial Sequence
  chemically synthesized
tgcatgtgttagcatgtgcatg

SEQ ID NO: 40667 - DNA, 22 bp, Artificial Sequence
  chemically synthesized
gcatgtgcatgcacatgtgtgt

SEQ ID NO: 40668 - DNA, 22 bp, Artificial Sequence
  chemically synthesized
gcgtgttcatgtgtgtgtatat

SEQ ID NO: 40669 - DNA, 22 bp, Artificial Sequence
  chemically synthesized
atgtgtgtgtatatgtgagtgt

SEQ ID NO: 40670 - DNA, 22 bp, Artificial Sequence
  chemically synthesized
tgtacgtgtgtgaatgtgtgta

SEQ ID NO: 40671 - DNA, 22 bp, Artificial Sequence
  chemically synthesized
cctaaacatatgtttttagata

SEQ ID NO: 40672 - DNA, 22 bp, Artificial Sequence
  chemically synthesized
ctaaacatatgtttttagataa

SEQ ID NO: 40673 - DNA, 22 bp, Artificial Sequence
  chemically synthesized
aacatatgtttttagataattt

SEQ ID NO: 40674 - DNA, 22 bp, Artificial Sequence
  chemically synthesized
ttagataatttccctgtttttt

SEQ ID NO: 40675 - DNA, 22 bp, Artificial Sequence
  chemically synthesized
tagataatttccctgttttttt

SEQ ID NO: 40676 - DNA, 22 bp, Artificial Sequence
  chemically synthesized
agataatttccctgtttttttt

SEQ ID NO: 40677 - DNA, 22 bp, Artificial Sequence
  chemically synthesized
gataatttccctgttttttttt

SEQ ID NO: 40678 - DNA, 22 bp, Artificial Sequence
  chemically synthesized
ccctgtttttttttttttttca

SEQ ID NO: 40679 - DNA, 22 bp, Artificial Sequence
  chemically synthesized
cctgtttttttttttttttcag

SEQ ID NO: 40680 - DNA, 22 bp, Artificial Sequence
  chemically synthesized
tttttttttttttttcagtgag

SEQ ID NO: 40681 - DNA, 22 bp, Artificial Sequence
  chemically synthesized
ttttttttttttcagtgagaca

SEQ ID NO: 40682 - DNA, 22 bp, Artificial Sequence
  chemically synthesized
tttttttttttcagtgagacag

SEQ ID NO: 40683 - DNA, 22 bp, Artificial Sequence
  chemically synthesized
ttttttttttcagtgagacagg

SEQ ID NO: 40684 - DNA, 22 bp, Artificial Sequence
  chemically synthesized
tttttttttcagtgagacaggc

SEQ ID NO: 40685 - DNA, 22 bp, Artificial Sequence
  chemically synthesized
ttttttttcagtgagacaggca

SEQ ID NO: 40686 - DNA, 22 bp, Artificial Sequence
  chemically synthesized
tttttttcagtgagacaggcac

SEQ ID NO: 40687 - DNA, 22 bp, Artificial Sequence
  chemically synthesized
ttttttcagtgagacaggcaca

SEQ ID NO: 40688 - DNA, 22 bp, Artificial Sequence
  chemically synthesized
tttttcagtgagacaggcacaa

SEQ ID NO: 40689 - DNA, 22 bp, Artificial Sequence
  chemically synthesized
ttttcagtgagacaggcacaaa

SEQ ID NO: 40690 - DNA, 22 bp, Artificial Sequence
  chemically synthesized
tttcagtgagacaggcacaaaa

SEQ ID NO: 40691 - DNA, 22 bp, Artificial Sequence
  chemically synthesized
ttcagtgagacaggcacaaaag

SEQ ID NO: 40692 - DNA, 22 bp, Artificial Sequence
  chemically synthesized
tcagtgagacaggcacaaaagc

SEQ ID NO: 40693 - DNA, 22 bp, Artificial Sequence
  chemically synthesized
cagtgagacaggcacaaaagca

SEQ ID NO: 40694 - DNA, 22 bp, Artificial Sequence
  chemically synthesized
agtgagacaggcacaaaagcag

SEQ ID NO: 40695 - DNA, 22 bp, Artificial Sequence
  chemically synthesized
tcccacgtggaatgggctatct

SEQ ID NO: 40696 - DNA, 22 bp, Artificial Sequence
  chemically synthesized
tctcgtgacactgtgaccccct

SEQ ID NO: 40697 - DNA, 22 bp, Artificial Sequence
  chemically synthesized
gtgacactgtgaccccctttct

SEQ ID NO: 40698 - DNA, 22 bp, Artificial Sequence
  chemically synthesized
tgaccccctttctttcaccctg

SEQ ID NO: 40699 - DNA, 22 bp, Artificial Sequence
  chemically synthesized
tctttcaccctgggtcttcaaa

SEQ ID NO: 40700 - DNA, 22 bp, Artificial Sequence
  chemically synthesized
ctttcaccctgggtcttcaaaa

SEQ ID NO: 40701 - DNA, 22 bp, Artificial Sequence
  chemically synthesized
tttcaccctgggtcttcaaaaa

SEQ ID NO: 40702 - DNA, 22 bp, Artificial Sequence
  chemically synthesized
tcaccctgggtcttcaaaaaga

SEQ ID NO: 40703 - DNA, 22 bp, Artificial Sequence
  chemically synthesized
caccctgggtcttcaaaaagag

SEQ ID NO: 40704 - DNA, 22 bp, Artificial Sequence
  chemically synthesized
accctgggtcttcaaaaagaga

SEQ ID NO: 40705 - DNA, 22 bp, Artificial Sequence
  chemically synthesized
ggtcttcaaaaagagaatggat

SEQ ID NO: 40706 - DNA, 22 bp, Artificial Sequence
  chemically synthesized
caaaaagagaatggatgacact

SEQ ID NO: 40707 - DNA, 22 bp, Artificial Sequence
  chemically synthesized
aaaaagagaatggatgacacta

SEQ ID NO: 40708 - DNA, 22 bp, Artificial Sequence
  chemically synthesized
tgatgaggaggggtctctatat

SEQ ID NO: 40709 - DNA, 22 bp, Artificial Sequence
  chemically synthesized
tatattggtgacaggccaaaat

SEQ ID NO: 40710 - DNA, 22 bp, Artificial Sequence
  chemically synthesized
tattggtgacaggccaaaatac

SEQ ID NO: 40711 - DNA, 22 bp, Artificial Sequence
  chemically synthesized
gtgacaggccaaaatacaggac

SEQ ID NO: 40712 - DNA, 22 bp, Artificial Sequence
  chemically synthesized
cctacagtcctttcgcagtcca

SEQ ID NO: 40713 - DNA, 22 bp, Artificial Sequence
  chemically synthesized
cagtcctttcgcagtccataat

SEQ ID NO: 40714 - DNA, 22 bp, Artificial Sequence
  chemically synthesized
tcgcagtccataatcctcaagt

SEQ ID NO: 40715 - DNA, 22 bp, Artificial Sequence
  chemically synthesized
cgcagtccataatcctcaagtc

SEQ ID NO: 40716 - DNA, 22 bp, Artificial Sequence
  chemically synthesized
gcagtccataatcctcaagtcc

SEQ ID NO: 40717 - DNA, 22 bp, Artificial Sequence
  chemically synthesized
aagtccctcagctcttccatgt

SEQ ID NO: 40718 - DNA, 22 bp, Artificial Sequence
  chemically synthesized
agctcttccatgtaccaccttc

SEQ ID NO: 40719 - DNA, 22 bp, Artificial Sequence
  chemically synthesized
ttccatgtaccaccttctagac

SEQ ID NO: 40720 - DNA, 22 bp, Artificial Sequence
  chemically synthesized
ccatgtaccaccttctagacta

SEQ ID NO: 40721 - DNA, 22 bp, Artificial Sequence
  chemically synthesized
catgtaccaccttctagactac

SEQ ID NO: 40722 - DNA, 22 bp, Artificial Sequence
  chemically synthesized
ctagactacacttaaaatgcat

SEQ ID NO: 40723 - DNA, 22 bp, Artificial Sequence
  chemically synthesized
tagactacacttaaaatgcatc

SEQ ID NO: 40724 - DNA, 22 bp, Artificial Sequence
  chemically synthesized
gactacacttaaaatgcatcct

SEQ ID NO: 40725 - DNA, 22 bp, Artificial Sequence
  chemically synthesized
cacttaaaatgcatcctgaacg

SEQ ID NO: 40726 - DNA, 22 bp, Artificial Sequence
  chemically synthesized
aaaatgcatcctgaacgtttgt

SEQ ID NO: 40727 - DNA, 22 bp, Artificial Sequence
  chemically synthesized
aaatgcatcctgaacgtttgta

SEQ ID NO: 40728 - DNA, 22 bp, Artificial Sequence
  chemically synthesized
aacgtttgtaaagtaccctgaa

SEQ ID NO: 40729 - DNA, 22 bp, Artificial Sequence
  chemically synthesized
gtaaagtaccctgaaggaaccc

SEQ ID NO: 40730 - DNA, 22 bp, Artificial Sequence
  chemically synthesized
taaagtaccctgaaggaaccca

SEQ ID NO: 40731 - DNA, 22 bp, Artificial Sequence
  chemically synthesized
aaggaacccattccagttctga

SEQ ID NO: 40732 - DNA, 22 bp, Artificial Sequence
  chemically synthesized
cagttctgaatccgattactag

SEQ ID NO: 40733 - DNA, 22 bp, Artificial Sequence
  chemically synthesized
tgaatccgattactaggttcaa

SEQ ID NO: 40734 - DNA, 22 bp, Artificial Sequence
  chemically synthesized
aatccgattactaggttcaagc

SEQ ID NO: 40735 - DNA, 22 bp, Artificial Sequence
  chemically synthesized
ctaggttcaagccacacaaata

SEQ ID NO: 40736 - DNA, 22 bp, Artificial Sequence
  chemically synthesized
ggttcaagccacacaaataaca

SEQ ID NO: 40737 - DNA, 22 bp, Artificial Sequence
  chemically synthesized
aagccacacaaataacaacagt

SEQ ID NO: 40738 - DNA, 22 bp, Artificial Sequence
  chemically synthesized
gtctgagctagaggcttcttta

SEQ ID NO: 40739 - DNA, 22 bp, Artificial Sequence
  chemically synthesized
agctagaggcttctttacctaa

SEQ ID NO: 40740 - DNA, 22 bp, Artificial Sequence
  chemically synthesized
gaggcttctttacctaactgca

SEQ ID NO: 40741 - DNA, 22 bp, Artificial Sequence
  chemically synthesized
ctttacctaactgcaaagtaaa

SEQ ID NO: 40742 - DNA, 22 bp, Artificial Sequence
  chemically synthesized
tttacctaactgcaaagtaaat

SEQ ID NO: 40743 - DNA, 22 bp, Artificial Sequence
  chemically synthesized
tacctaactgcaaagtaaatgt

SEQ ID NO: 40744 - DNA, 22 bp, Artificial Sequence
  chemically synthesized
acctaactgcaaagtaaatgtc

SEQ ID NO: 40745 - DNA, 22 bp, Artificial Sequence
  chemically synthesized
cctaactgcaaagtaaatgtcc

SEQ ID NO: 40746 - DNA, 22 bp, Artificial Sequence
  chemically synthesized
actgcaaagtaaatgtcctttc

SEQ ID NO: 40747 - DNA, 22 bp, Artificial Sequence
  chemically synthesized
caaagtaaatgtcctttctatt

SEQ ID NO: 40748 - DNA, 22 bp, Artificial Sequence
  chemically synthesized
tctattcagccgcatctagctc

SEQ ID NO: 40749 - DNA, 22 bp, Artificial Sequence
  chemically synthesized
ctattcagccgcatctagctct

SEQ ID NO: 40750 - DNA, 22 bp, Artificial Sequence
  chemically synthesized
tattcagccgcatctagctctt

SEQ ID NO: 40751 - DNA, 22 bp, Artificial Sequence
  chemically synthesized
ttcagccgcatctagctcttga

SEQ ID NO: 40752 - DNA, 22 bp, Artificial Sequence
  chemically synthesized
agccgcatctagctcttgaccc

SEQ ID NO: 40753 - DNA, 22 bp, Artificial Sequence
  chemically synthesized
gctcttgaccctatgtttacca

SEQ ID NO: 40754 - DNA, 22 bp, Artificial Sequence
  chemically synthesized
ttgaccctatgtttaccataga

SEQ ID NO: 40755 - DNA, 22 bp, Artificial Sequence
  chemically synthesized
gaccctatgtttaccatagata

SEQ ID NO: 40756 - DNA, 22 bp, Artificial Sequence
  chemically synthesized
accctatgtttaccatagatac

SEQ ID NO: 40757 - DNA, 22 bp, Artificial Sequence
  chemically synthesized
tgtttaccatagataccagttc

SEQ ID NO: 40758 - DNA, 22 bp, Artificial Sequence
  chemically synthesized
accatagataccagttcttctc

SEQ ID NO: 40759 - DNA, 22 bp, Artificial Sequence
  chemically synthesized
ccatagataccagttcttctca

SEQ ID NO: 40760 - DNA, 22 bp, Artificial Sequence
  chemically synthesized
ttctcacttagattctctgact

SEQ ID NO: 40761 - DNA, 22 bp, Artificial Sequence
  chemically synthesized
ctcacttagattctctgactta

SEQ ID NO: 40762 - DNA, 22 bp, Artificial Sequence
  chemically synthesized
tcacttagattctctgacttat

SEQ ID NO: 40763 - DNA, 22 bp, Artificial Sequence
  chemically synthesized
acttagattctctgacttatca

SEQ ID NO: 40764 - DNA, 22 bp, Artificial Sequence
  chemically synthesized
agattctctgacttatcagagt

SEQ ID NO: 40765 - DNA, 22 bp, Artificial Sequence
  chemically synthesized
gattctctgacttatcagagta

SEQ ID NO: 40766 - DNA, 22 bp, Artificial Sequence
  chemically synthesized
tctgacttatcagagtattata

SEQ ID NO: 40767 - DNA, 22 bp, Artificial Sequence
  chemically synthesized
tgacttatcagagtattataga

SEQ ID NO: 40768 - DNA, 22 bp, Artificial Sequence
  chemically synthesized
acttatcagagtattatagagc

SEQ ID NO: 40769 - DNA, 22 bp, Artificial Sequence
  chemically synthesized
atcagagtattatagagcaaac

SEQ ID NO: 40770 - DNA, 22 bp, Artificial Sequence
  chemically synthesized
tcagagtattatagagcaaaca

SEQ ID NO: 40771 - DNA, 22 bp, Artificial Sequence
  chemically synthesized
tagagcaaacattagctatgcc

SEQ ID NO: 40772 - DNA, 22 bp, Artificial Sequence
  chemically synthesized
gctatgcctgtgacttgagttg

SEQ ID NO: 40773 - DNA, 22 bp, Artificial Sequence
  chemically synthesized
tgcctgtgacttgagttgtgtc

SEQ ID NO: 40774 - DNA, 22 bp, Artificial Sequence
  chemically synthesized
tgacttgagttgtgtcaatctg

SEQ ID NO: 40775 - DNA, 22 bp, Artificial Sequence
  chemically synthesized
gagttgtgtcaatctgtaatga

SEQ ID NO: 40776 - DNA, 22 bp, Artificial Sequence
  chemically synthesized
agttgtgtcaatctgtaatgaa

SEQ ID NO: 40777 - DNA, 22 bp, Artificial Sequence
  chemically synthesized
tgtcaatctgtaatgaaaatgt

SEQ ID NO: 40778 - DNA, 22 bp, Artificial Sequence
  chemically synthesized
taatgaaaatgtgccagcttta

SEQ ID NO: 40779 - DNA, 22 bp, Artificial Sequence
  chemically synthesized
tatcatcactcacagacttctt

SEQ ID NO: 40780 - DNA, 22 bp, Artificial Sequence
  chemically synthesized
atcatcactcacagacttctta

SEQ ID NO: 40781 - DNA, 22 bp, Artificial Sequence
  chemically synthesized
tcatcactcacagacttcttaa

SEQ ID NO: 40782 - DNA, 22 bp, Artificial Sequence
  chemically synthesized
acagacttcttaattaaccttc

SEQ ID NO: 40783 - DNA, 22 bp, Artificial Sequence
  chemically synthesized
cttaattaaccttctgatattg

SEQ ID NO: 40784 - DNA, 22 bp, Artificial Sequence
  chemically synthesized
ttaattaaccttctgatattgt

SEQ ID NO: 40785 - DNA, 22 bp, Artificial Sequence
  chemically synthesized
aattaaccttctgatattgtca

SEQ ID NO: 40786 - DNA, 22 bp, Artificial Sequence
  chemically synthesized
attaaccttctgatattgtcaa

SEQ ID NO: 40787 - DNA, 22 bp, Artificial Sequence
  chemically synthesized
accttctgatattgtcaaaatc

SEQ ID NO: 40788 - DNA, 22 bp, Artificial Sequence
  chemically synthesized
ctgatattgtcaaaatcgcact

SEQ ID NO: 40789 - DNA, 22 bp, Artificial Sequence
  chemically synthesized
tgatattgtcaaaatcgcactc

SEQ ID NO: 40790 - DNA, 22 bp, Artificial Sequence
  chemically synthesized
atattgtcaaaatcgcactctc

SEQ ID NO: 40791 - DNA, 22 bp, Artificial Sequence
  chemically synthesized
tcaaaatcgcactctcttttgt

SEQ ID NO: 40792 - DNA, 22 bp, Artificial Sequence
  chemically synthesized
tcttttgttctagaaatgagca

SEQ ID NO: 40793 - DNA, 22 bp, Artificial Sequence
  chemically synthesized
ttttgttctagaaatgagcatt

SEQ ID NO: 40794 - DNA, 22 bp, Artificial Sequence
  chemically synthesized
ttgttctagaaatgagcattta

SEQ ID NO: 40795 - DNA, 22 bp, Artificial Sequence
  chemically synthesized
tgttctagaaatgagcatttac

SEQ ID NO: 40796 - DNA, 22 bp, Artificial Sequence
  chemically synthesized
gttctagaaatgagcatttaca

SEQ ID NO: 40797 - DNA, 22 bp, Artificial Sequence
  chemically synthesized
ttctagaaatgagcatttacat

SEQ ID NO: 40798 - DNA, 22 bp, Artificial Sequence
  chemically synthesized
tagaaatgagcatttacatgtg

SEQ ID NO: 40799 - DNA, 22 bp, Artificial Sequence
  chemically synthesized
gaaatgagcatttacatgtgca

SEQ ID NO: 40800 - DNA, 22 bp, Artificial Sequence
  chemically synthesized
acatgtgcattttttttccttc

SEQ ID NO: 40801 - DNA, 22 bp, Artificial Sequence
  chemically synthesized
catgtgcattttttttccttca

SEQ ID NO: 40802 - DNA, 22 bp, Artificial Sequence
  chemically synthesized
tttttccttcattgctttttta

SEQ ID NO: 40803 - DNA, 22 bp, Artificial Sequence
  chemically synthesized
ttttccttcattgcttttttac

SEQ ID NO: 40804 - DNA, 22 bp, Artificial Sequence
  chemically synthesized
tttccttcattgcttttttact

SEQ ID NO: 40805 - DNA, 22 bp, Artificial Sequence
  chemically synthesized
ttccttcattgcttttttactg

SEQ ID NO: 40806 - DNA, 22 bp, Artificial Sequence
  chemically synthesized
tccttcattgcttttttactgg

SEQ ID NO: 40807 - DNA, 22 bp, Artificial Sequence
  chemically synthesized
ccttcattgcttttttactggc

SEQ ID NO: 40808 - DNA, 22 bp, Artificial Sequence
  chemically synthesized
cttcattgcttttttactggct

SEQ ID NO: 40809 - DNA, 22 bp, Artificial Sequence
  chemically synthesized
cattgcttttttactggctgtt

SEQ ID NO: 40810 - DNA, 22 bp, Artificial Sequence
  chemically synthesized
attgcttttttactggctgttt

SEQ ID NO: 40811 - DNA, 22 bp, Artificial Sequence
  chemically synthesized
cttttttactggctgttttacc

SEQ ID NO: 40812 - DNA, 22 bp, Artificial Sequence
  chemically synthesized
ttttactggctgttttaccaaa

SEQ ID NO: 40813 - DNA, 22 bp, Artificial Sequence
  chemically synthesized
tttactggctgttttaccaaat

SEQ ID NO: 40814 - DNA, 22 bp, Artificial Sequence
  chemically synthesized
ttactggctgttttaccaaatc

SEQ ID NO: 40815 - DNA, 22 bp, Artificial Sequence
  chemically synthesized
tactggctgttttaccaaatcc

SEQ ID NO: 40816 - DNA, 22 bp, Artificial Sequence
  chemically synthesized
actggctgttttaccaaatcct

SEQ ID NO: 40817 - DNA, 22 bp, Artificial Sequence
  chemically synthesized
ctggctgttttaccaaatcctg

SEQ ID NO: 40818 - DNA, 22 bp, Artificial Sequence
  chemically synthesized
gctgttttaccaaatcctgatg

SEQ ID NO: 40819 - DNA, 22 bp, Artificial Sequence
  chemically synthesized
ttttaccaaatcctgatgttct

SEQ ID NO: 40820 - DNA, 22 bp, Artificial Sequence
  chemically synthesized
taccaaatcctgatgttcttta

SEQ ID NO: 40821 - DNA, 22 bp, Artificial Sequence
  chemically synthesized
accaaatcctgatgttctttaa

SEQ ID NO: 40822 - DNA, 22 bp, Artificial Sequence
  chemically synthesized
ccaaatcctgatgttctttaaa

SEQ ID NO: 40823 - DNA, 22 bp, Artificial Sequence
  chemically synthesized
atgttctttaaaaagtgtattc

SEQ ID NO: 40824 - DNA, 22 bp, Artificial Sequence
  chemically synthesized
tttaaaaagtgtattctgcaaa

SEQ ID NO: 40825 - DNA, 22 bp, Artificial Sequence
  chemically synthesized
taaaaagtgtattctgcaaaaa

SEQ ID NO: 40826 - DNA, 22 bp, Artificial Sequence
  chemically synthesized
aaaaagtgtattctgcaaaaac

SEQ ID NO: 40827 - DNA, 22 bp, Artificial Sequence
  chemically synthesized
aaaagtgtattctgcaaaaaca

SEQ ID NO: 40828 - DNA, 22 bp, Artificial Sequence
  chemically synthesized
tgcaaaaacaaaagaaagcaat

SEQ ID NO: 40829 - DNA, 22 bp, Artificial Sequence
  chemically synthesized
caaaaacaaaagaaagcaataa

SEQ ID NO: 40830 - DNA, 22 bp, Artificial Sequence
  chemically synthesized
tagacactacaatatagaattt

SEQ ID NO: 40831 - DNA, 22 bp, Artificial Sequence
  chemically synthesized
caatatagaatttcttccctga

SEQ ID NO: 40832 - DNA, 22 bp, Artificial Sequence
  chemically synthesized
cttccctgaaactctctcatgg

SEQ ID NO: 40833 - DNA, 22 bp, Artificial Sequence
  chemically synthesized
ttccctgaaactctctcatggt

SEQ ID NO: 40834 - DNA, 22 bp, Artificial Sequence
  chemically synthesized
ccctgaaactctctcatggtcc

SEQ ID NO: 40835 - DNA, 22 bp, Artificial Sequence
  chemically synthesized
cctgaaactctctcatggtcct

SEQ ID NO: 40836 - DNA, 22 bp, Artificial Sequence
  chemically synthesized
aaactctctcatggtccttaga

SEQ ID NO: 40837 - DNA, 22 bp, Artificial Sequence
  chemically synthesized
tctcatggtccttagattcctt

SEQ ID NO: 40838 - DNA, 22 bp, Artificial Sequence
  chemically synthesized
tcatggtccttagattccttga

SEQ ID NO: 40839 - DNA, 22 bp, Artificial Sequence
  chemically synthesized
atggtccttagattccttgata

SEQ ID NO: 40840 - DNA, 22 bp, Artificial Sequence
  chemically synthesized
agattccttgatacttcaccag

SEQ ID NO: 40841 - DNA, 22 bp, Artificial Sequence
  chemically synthesized
gattccttgatacttcaccagt

SEQ ID NO: 40842 - DNA, 22 bp, Artificial Sequence
  chemically synthesized
cttgatacttcaccagtgactt

SEQ ID NO: 40843 - DNA, 22 bp, Artificial Sequence
  chemically synthesized
gatacttcaccagtgactttaa

SEQ ID NO: 40844 - DNA, 22 bp, Artificial Sequence
  chemically synthesized
atacttcaccagtgactttaat

SEQ ID NO: 40845 - DNA, 22 bp, Artificial Sequence
  chemically synthesized
caccagtgactttaataacatc

SEQ ID NO: 40846 - DNA, 22 bp, Artificial Sequence
  chemically synthesized
accagtgactttaataacatca

SEQ ID NO: 40847 - DNA, 22 bp, Artificial Sequence
  chemically synthesized
taataacatcaatcactcattt

SEQ ID NO: 40848 - DNA, 22 bp, Artificial Sequence
  chemically synthesized
aataacatcaatcactcatttt

SEQ ID NO: 40849 - DNA, 22 bp, Artificial Sequence
  chemically synthesized
ataacatcaatcactcatttta

SEQ ID NO: 40850 - DNA, 22 bp, Artificial Sequence
  chemically synthesized
attttaaaactcttttttgatc

SEQ ID NO: 40851 - DNA, 22 bp, Artificial Sequence
  chemically synthesized
taaaactcttttttgatcaatg

SEQ ID NO: 40852 - DNA, 22 bp, Artificial Sequence
  chemically synthesized
aaaactcttttttgatcaatgc

SEQ ID NO: 40853 - DNA, 22 bp, Artificial Sequence
  chemically synthesized
aaactcttttttgatcaatgct

SEQ ID NO: 40854 - DNA, 22 bp, Artificial Sequence
  chemically synthesized
ttttttgatcaatgctatcctc

SEQ ID NO: 40855 - DNA, 22 bp, Artificial Sequence
  chemically synthesized
ttttgatcaatgctatcctctt

SEQ ID NO: 40856 - DNA, 22 bp, Artificial Sequence
  chemically synthesized
tttgatcaatgctatcctctta

SEQ ID NO: 40857 - DNA, 22 bp, Artificial Sequence
  chemically synthesized
ttgatcaatgctatcctcttag

SEQ ID NO: 40858 - DNA, 22 bp, Artificial Sequence
  chemically synthesized
tgatcaatgctatcctcttaga

SEQ ID NO: 40859 - DNA, 22 bp, Artificial Sequence
  chemically synthesized
gatcaatgctatcctcttagag

SEQ ID NO: 40860 - DNA, 22 bp, Artificial Sequence
  chemically synthesized
atcaatgctatcctcttagagc

SEQ ID NO: 40861 - DNA, 22 bp, Artificial Sequence
  chemically synthesized
tcctcttagagccttgattact

SEQ ID NO: 40862 - DNA, 22 bp, Artificial Sequence
  chemically synthesized
ttagagccttgattactcaaac

SEQ ID NO: 40863 - DNA, 22 bp, Artificial Sequence
  chemically synthesized
agagccttgattactcaaacaa

SEQ ID NO: 40864 - DNA, 22 bp, Artificial Sequence
  chemically synthesized
gagccttgattactcaaacaac

SEQ ID NO: 40865 - DNA, 22 bp, Artificial Sequence
  chemically synthesized
gattactcaaacaacaggttac

SEQ ID NO: 40866 - DNA, 22 bp, Artificial Sequence
  chemically synthesized
attactcaaacaacaggttact

SEQ ID NO: 40867 - DNA, 22 bp, Artificial Sequence
  chemically synthesized
ctcaaacaacaggttactaact

SEQ ID NO: 40868 - DNA, 22 bp, Artificial Sequence
  chemically synthesized
aaacaacaggttactaacttca

SEQ ID NO: 40869 - DNA, 22 bp, Artificial Sequence
  chemically synthesized
ctaacttcaccttttaagagtt

SEQ ID NO: 40870 - DNA, 22 bp, Artificial Sequence
  chemically synthesized
acttcaccttttaagagttctc

SEQ ID NO: 40871 - DNA, 22 bp, Artificial Sequence
  chemically synthesized
caccttttaagagttctcctcc

SEQ ID NO: 40872 - DNA, 22 bp, Artificial Sequence
  chemically synthesized
accttttaagagttctcctcct

SEQ ID NO: 40873 - DNA, 22 bp, Artificial Sequence
  chemically synthesized
ttaagagttctcctcctaggct

SEQ ID NO: 40874 - DNA, 22 bp, Artificial Sequence
  chemically synthesized
taagagttctcctcctaggctt

SEQ ID NO: 40875 - DNA, 22 bp, Artificial Sequence
  chemically synthesized
aagagttctcctcctaggcttt

SEQ ID NO: 40876 - DNA, 22 bp, Artificial Sequence
  chemically synthesized
agagttctcctcctaggctttt

SEQ ID NO: 40877 - DNA, 22 bp, Artificial Sequence
  chemically synthesized
tcctcctaggctttttctcaat

SEQ ID NO: 40878 - DNA, 22 bp, Artificial Sequence
  chemically synthesized
ctcctaggctttttctcaataa

SEQ ID NO: 40879 - DNA, 22 bp, Artificial Sequence
  chemically synthesized
ctaggctttttctcaataaagg

SEQ ID NO: 40880 - DNA, 22 bp, Artificial Sequence
  chemically synthesized
ggctttttctcaataaagggag

SEQ ID NO: 40881 - DNA, 22 bp, Artificial Sequence
  chemically synthesized
tttctcaataaagggaggaagt

SEQ ID NO: 40882 - DNA, 22 bp, Artificial Sequence
  chemically synthesized
ttctcaataaagggaggaagta

SEQ ID NO: 40883 - DNA, 22 bp, Artificial Sequence
  chemically synthesized
tctcaataaagggaggaagtag

SEQ ID NO: 40884 - DNA, 22 bp, Artificial Sequence
  chemically synthesized
ctcaataaagggaggaagtaga

SEQ ID NO: 40885 - DNA, 22 bp, Artificial Sequence
  chemically synthesized
tcaataaagggaggaagtagag

SEQ ID NO: 40886 - DNA, 22 bp, Artificial Sequence
  chemically synthesized
aataaagggaggaagtagagat

SEQ ID NO: 40887 - DNA, 22 bp, Artificial Sequence
  chemically synthesized
tgcgtgcccctttatctataaa

SEQ ID NO: 40888 - DNA, 22 bp, Artificial Sequence
  chemically synthesized
gcgtgcccctttatctataaaa

SEQ ID NO: 40889 - DNA, 22 bp, Artificial Sequence
  chemically synthesized
cgtgcccctttatctataaaaa

SEQ ID NO: 40890 - DNA, 22 bp, Artificial Sequence
  chemically synthesized
tatctataaaaatgccagccac

SEQ ID NO: 40891 - DNA, 22 bp, Artificial Sequence
  chemically synthesized
atctataaaaatgccagccacc

SEQ ID NO: 40892 - DNA, 22 bp, Artificial Sequence
  chemically synthesized
tctataaaaatgccagccacca

SEQ ID NO: 40893 - DNA, 22 bp, Artificial Sequence
  chemically synthesized
taaaaatgccagccaccaatct

SEQ ID NO: 40894 - DNA, 22 bp, Artificial Sequence
  chemically synthesized
tcaggcctaaacaaaatttttc

SEQ ID NO: 40895 - DNA, 22 bp, Artificial Sequence
  chemically synthesized
aacaaaatttttctgcaagctg

SEQ ID NO: 40896 - DNA, 22 bp, Artificial Sequence
  chemically synthesized
ttctgcaagctgtgtctttaac

SEQ ID NO: 40897 - DNA, 22 bp, Artificial Sequence
  chemically synthesized
tctgcaagctgtgtctttaaca

SEQ ID NO: 40898 - DNA, 22 bp, Artificial Sequence
  chemically synthesized
ctgcaagctgtgtctttaacat

SEQ ID NO: 40899 - DNA, 22 bp, Artificial Sequence
  chemically synthesized
tgcaagctgtgtctttaacata

SEQ ID NO: 40900 - DNA, 22 bp, Artificial Sequence
  chemically synthesized
caagctgtgtctttaacataag

SEQ ID NO: 40901 - DNA, 22 bp, Artificial Sequence
  chemically synthesized
tgtctttaacataagcaaagca

SEQ ID NO: 40902 - DNA, 22 bp, Artificial Sequence
  chemically synthesized
taacataagcaaagcatataat

SEQ ID NO: 40903 - DNA, 22 bp, Artificial Sequence
  chemically synthesized
aacataagcaaagcatataatt

SEQ ID NO: 40904 - DNA, 22 bp, Artificial Sequence
  chemically synthesized
acataagcaaagcatataattc

SEQ ID NO: 40905 - DNA, 22 bp, Artificial Sequence
  chemically synthesized
caaaaaaaaaaaatcttgcttt

SEQ ID NO: 40906 - DNA, 22 bp, Artificial Sequence
  chemically synthesized
gcttttctgaaaagcaactaag

SEQ ID NO: 40907 - DNA, 22 bp, Artificial Sequence
  chemically synthesized
cttttctgaaaagcaactaagc

SEQ ID NO: 40908 - DNA, 22 bp, Artificial Sequence
  chemically synthesized
ttctgaaaagcaactaagccaa

SEQ ID NO: 40909 - DNA, 22 bp, Artificial Sequence
  chemically synthesized
tctgaaaagcaactaagccaaa

SEQ ID NO: 40910 - DNA, 22 bp, Artificial Sequence
  chemically synthesized
ctgaaaagcaactaagccaaag

SEQ ID NO: 40911 - DNA, 22 bp, Artificial Sequence
  chemically synthesized
tgaaaagcaactaagccaaaga

SEQ ID NO: 40912 - DNA, 22 bp, Artificial Sequence
  chemically synthesized
aaaagcaactaagccaaagaca

SEQ ID NO: 40913 - DNA, 22 bp, Artificial Sequence
  chemically synthesized
agccaaagacattgtgttccat

SEQ ID NO: 40914 - DNA, 22 bp, Artificial Sequence
  chemically synthesized
tgttccatctttgtgttgaaat

SEQ ID NO: 40915 - DNA, 22 bp, Artificial Sequence
  chemically synthesized
catctttgtgttgaaatgcaga

SEQ ID NO: 40916 - DNA, 22 bp, Artificial Sequence
  chemically synthesized
tgtgttgaaatgcagatttccc

SEQ ID NO: 40917 - DNA, 22 bp, Artificial Sequence
  chemically synthesized
gtgttgaaatgcagatttccca

SEQ ID NO: 40918 - DNA, 22 bp, Artificial Sequence
  chemically synthesized
tgttgaaatgcagatttcccac

SEQ ID NO: 40919 - DNA, 22 bp, Artificial Sequence
  chemically synthesized
aaatgcagatttcccactaaaa

SEQ ID NO: 40920 - DNA, 22 bp, Artificial Sequence
  chemically synthesized
cccactaaaaggcaaatccttc

SEQ ID NO: 40921 - DNA, 22 bp, Artificial Sequence
  chemically synthesized
ccactaaaaggcaaatccttca

SEQ ID NO: 40922 - DNA, 22 bp, Artificial Sequence
  chemically synthesized
aaaggcaaatccttcatttcaa

SEQ ID NO: 40923 - DNA, 22 bp, Artificial Sequence
  chemically synthesized
catttcaaaaggttgaatagga

SEQ ID NO: 40924 - DNA, 22 bp, Artificial Sequence
  chemically synthesized
atttcaaaaggttgaataggat

SEQ ID NO: 40925 - DNA, 22 bp, Artificial Sequence
  chemically synthesized
caaaaggttgaataggatggta

SEQ ID NO: 40926 - DNA, 22 bp, Artificial Sequence
  chemically synthesized
aaaaggttgaataggatggtac

SEQ ID NO: 40927 - DNA, 22 bp, Artificial Sequence
  chemically synthesized
aataggatggtacttaaaaaaa

SEQ ID NO: 40928 - DNA, 22 bp, Artificial Sequence
  chemically synthesized
aaaaaaagaattccagctggtt

SEQ ID NO: 40929 - DNA, 22 bp, Artificial Sequence
  chemically synthesized
aaaaaagaattccagctggtta

SEQ ID NO: 40930 - DNA, 22 bp, Artificial Sequence
  chemically synthesized
cagctggttaaatttagggtgt

SEQ ID NO: 40931 - DNA, 22 bp, Artificial Sequence
  chemically synthesized
gttaaatttagggtgttaaaaa

SEQ ID NO: 40932 - DNA, 22 bp, Artificial Sequence
  chemically synthesized
aatttagggtgttaaaaaaagt

SEQ ID NO: 40933 - DNA, 22 bp, Artificial Sequence
  chemically synthesized
agggtgttaaaaaaagttcact

SEQ ID NO: 40934 - DNA, 22 bp, Artificial Sequence
  chemically synthesized
gggtgttaaaaaaagttcactc

SEQ ID NO: 40935 - DNA, 22 bp, Artificial Sequence
  chemically synthesized
aaaaaagttcactccaataata

SEQ ID NO: 40936 - DNA, 22 bp, Artificial Sequence
  chemically synthesized
actccaataatattctttggct

SEQ ID NO: 40937 - DNA, 22 bp, Artificial Sequence
  chemically synthesized
caataatattctttggctctgg

SEQ ID NO: 40938 - DNA, 22 bp, Artificial Sequence
  chemically synthesized
tttggctctgggcccaaagtat

SEQ ID NO: 40939 - DNA, 22 bp, Artificial Sequence
  chemically synthesized
tggctctgggcccaaagtattt

SEQ ID NO: 40940 - DNA, 22 bp, Artificial Sequence
  chemically synthesized
ggctctgggcccaaagtatttt

SEQ ID NO: 40941 - DNA, 22 bp, Artificial Sequence
  chemically synthesized
gctctgggcccaaagtattttc

SEQ ID NO: 40942 - DNA, 22 bp, Artificial Sequence
  chemically synthesized
tgggcccaaagtattttcactt

SEQ ID NO: 40943 - DNA, 22 bp, Artificial Sequence
  chemically synthesized
ggcccaaagtattttcacttga

SEQ ID NO: 40944 - DNA, 22 bp, Artificial Sequence
  chemically synthesized
tcacttgatcgtgaattagata

SEQ ID NO: 40945 - DNA, 22 bp, Artificial Sequence
  chemically synthesized
cacttgatcgtgaattagataa

SEQ ID NO: 40946 - DNA, 22 bp, Artificial Sequence
  chemically synthesized
acttgatcgtgaattagataaa

SEQ ID NO: 40947 - DNA, 22 bp, Artificial Sequence
  chemically synthesized
gatcgtgaattagataaatttt

SEQ ID NO: 40948 - DNA, 22 bp, Artificial Sequence
  chemically synthesized
atcgtgaattagataaattttt

SEQ ID NO: 40949 - DNA, 22 bp, Artificial Sequence
  chemically synthesized
gataaatttttattacacttta

SEQ ID NO: 40950 - DNA, 22 bp, Artificial Sequence
  chemically synthesized
ttattacactttaagcttttgc

SEQ ID NO: 40951 - DNA, 22 bp, Artificial Sequence
  chemically synthesized
tattacactttaagcttttgcc

SEQ ID NO: 40952 - DNA, 22 bp, Artificial Sequence
  chemically synthesized
attacactttaagcttttgcct

SEQ ID NO: 40953 - DNA, 22 bp, Artificial Sequence
  chemically synthesized
ttacactttaagcttttgcctt

SEQ ID NO: 40954 - DNA, 22 bp, Artificial Sequence
  chemically synthesized
cactttaagcttttgccttaga

SEQ ID NO: 40955 - DNA, 22 bp, Artificial Sequence
  chemically synthesized
taagcttttgccttagaatggc

SEQ ID NO: 40956 - DNA, 22 bp, Artificial Sequence
  chemically synthesized
aagcttttgccttagaatggcg

SEQ ID NO: 40957 - DNA, 22 bp, Artificial Sequence
  chemically synthesized
agcttttgccttagaatggcgg

SEQ ID NO: 40958 - DNA, 22 bp, Artificial Sequence
  chemically synthesized
ttgccttagaatggcggaactt

SEQ ID NO: 40959 - DNA, 22 bp, Artificial Sequence
  chemically synthesized
tgccttagaatggcggaactta

SEQ ID NO: 40960 - DNA, 22 bp, Artificial Sequence
  chemically synthesized
gccttagaatggcggaacttat

SEQ ID NO: 40961 - DNA, 22 bp, Artificial Sequence
  chemically synthesized
ccttagaatggcggaacttatc

SEQ ID NO: 40962 - DNA, 22 bp, Artificial Sequence
  chemically synthesized
agaatggcggaacttatctagg

SEQ ID NO: 40963 - DNA, 22 bp, Artificial Sequence
  chemically synthesized
gaatggcggaacttatctagga

SEQ ID NO: 40964 - DNA, 22 bp, Artificial Sequence
  chemically synthesized
atctaggagactgagagggcag

SEQ ID NO: 40965 - DNA, 22 bp, Artificial Sequence
  chemically synthesized
tctaggagactgagagggcagc

SEQ ID NO: 40966 - DNA, 22 bp, Artificial Sequence
  chemically synthesized
ggagactgagagggcagctgca

SEQ ID NO: 40967 - DNA, 22 bp, Artificial Sequence
  chemically synthesized
agagggcagctgcataaaaaga

SEQ ID NO: 40968 - DNA, 22 bp, Artificial Sequence
  chemically synthesized
cataaaaagacaaattgtctta

SEQ ID NO: 40969 - DNA, 22 bp, Artificial Sequence
  chemically synthesized
tcttaggacaatttttttttgt

SEQ ID NO: 40970 - DNA, 22 bp, Artificial Sequence
  chemically synthesized
aggacaatttttttttgtttgt

SEQ ID NO: 40971 - DNA, 22 bp, Artificial Sequence
  chemically synthesized
ggacaatttttttttgtttgtt

SEQ ID NO: 40972 - DNA, 22 bp, Artificial Sequence
  chemically synthesized
ttttttgtttgtttaatcacat

SEQ ID NO: 40973 - DNA, 22 bp, Artificial Sequence
  chemically synthesized
tttttgtttgtttaatcacata

SEQ ID NO: 40974 - DNA, 22 bp, Artificial Sequence
  chemically synthesized
ttttgtttgtttaatcacatac

SEQ ID NO: 40975 - DNA, 22 bp, Artificial Sequence
  chemically synthesized
tttgtttgtttaatcacatacc

SEQ ID NO: 40976 - DNA, 22 bp, Artificial Sequence
  chemically synthesized
ttgtttgtttaatcacatacct

SEQ ID NO: 40977 - DNA, 22 bp, Artificial Sequence
  chemically synthesized
tgtttgtttaatcacatacctc

SEQ ID NO: 40978 - DNA, 22 bp, Artificial Sequence
  chemically synthesized
gtttgtttaatcacatacctca

SEQ ID NO: 40979 - DNA, 22 bp, Artificial Sequence
  chemically synthesized
tttgtttaatcacatacctcac

SEQ ID NO: 40980 - DNA, 22 bp, Artificial Sequence
  chemically synthesized
gtttaatcacatacctcactat

SEQ ID NO: 40981 - DNA, 22 bp, Artificial Sequence
  chemically synthesized
tttaatcacatacctcactatg

SEQ ID NO: 40982 - DNA, 22 bp, Artificial Sequence
  chemically synthesized
aatcacatacctcactatgcaa

SEQ ID NO: 40983 - DNA, 22 bp, Artificial Sequence
  chemically synthesized
atcacatacctcactatgcaaa

SEQ ID NO: 40984 - DNA, 22 bp, Artificial Sequence
  chemically synthesized
actatgcaaaatgtgtgttccc

SEQ ID NO: 40985 - DNA, 22 bp, Artificial Sequence
  chemically synthesized
tgcaaaatgtgtgttcccagga

SEQ ID NO: 40986 - DNA, 22 bp, Artificial Sequence
  chemically synthesized
ccaggataaattccattcattc

SEQ ID NO: 40987 - DNA, 22 bp, Artificial Sequence
  chemically synthesized
cattcattcattctctcatgca

SEQ ID NO: 40988 - DNA, 22 bp, Artificial Sequence
  chemically synthesized
attcattctctcatgcattcat

SEQ ID NO: 40989 - DNA, 22 bp, Artificial Sequence
  chemically synthesized
attctctcatgcattcattcaa

SEQ ID NO: 40990 - DNA, 22 bp, Artificial Sequence
  chemically synthesized
tctcatgcattcattcaacctc

SEQ ID NO: 40991 - DNA, 22 bp, Artificial Sequence
  chemically synthesized
tcatgcattcattcaacctctc

SEQ ID NO: 40992 - DNA, 22 bp, Artificial Sequence
  chemically synthesized
atgcattcattcaacctctcat

SEQ ID NO: 40993 - DNA, 22 bp, Artificial Sequence
  chemically synthesized
attcaacctctcatgcattcat

SEQ ID NO: 40994 - DNA, 22 bp, Artificial Sequence
  chemically synthesized
aacctctcatgcattcattcaa

SEQ ID NO: 40995 - DNA, 22 bp, Artificial Sequence
  chemically synthesized
tcatgcattcattcaacaaata

SEQ ID NO: 40996 - DNA, 22 bp, Artificial Sequence
  chemically synthesized
atgcattcattcaacaaatatt

SEQ ID NO: 40997 - DNA, 22 bp, Artificial Sequence
  chemically synthesized
attcaacaaatatttaccgagt

SEQ ID NO: 40998 - DNA, 22 bp, Artificial Sequence
  chemically synthesized
aacaaatatttaccgagtgcct

SEQ ID NO: 40999 - DNA, 22 bp, Artificial Sequence
  chemically synthesized
accgagtgcctacaatgcccaa

SEQ ID NO: 41000 - DNA, 22 bp, Artificial Sequence
  chemically synthesized
ccgagtgcctacaatgcccaaa

SEQ ID NO: 41001 - DNA, 22 bp, Artificial Sequence
  chemically synthesized
caatgcccaaagcaatgggcta

SEQ ID NO: 41002 - DNA, 22 bp, Artificial Sequence
  chemically synthesized
gccgctgtgggcagtacaaaga

SEQ ID NO: 41003 - DNA, 22 bp, Artificial Sequence
  chemically synthesized
tgggcagtacaaagaaaacacg

SEQ ID NO: 41004 - DNA, 22 bp, Artificial Sequence
  chemically synthesized
ctcccacagcaggcttcattta

SEQ ID NO: 41005 - DNA, 22 bp, Artificial Sequence
  chemically synthesized
tcccacagcaggcttcatttag

SEQ ID NO: 41006 - DNA, 22 bp, Artificial Sequence
  chemically synthesized
ccacagcaggcttcatttagta

SEQ ID NO: 41007 - DNA, 22 bp, Artificial Sequence
  chemically synthesized
catttagtagaaaaggtaaggc

SEQ ID NO: 41008 - DNA, 22 bp, Artificial Sequence
  chemically synthesized
atttagtagaaaaggtaaggcc

SEQ ID NO: 41009 - DNA, 22 bp, Artificial Sequence
  chemically synthesized
agtagaaaaggtaaggcctgca

SEQ ID NO: 41010 - DNA, 22 bp, Artificial Sequence
  chemically synthesized
gtagaaaaggtaaggcctgcac

SEQ ID NO: 41011 - DNA, 22 bp, Artificial Sequence
  chemically synthesized
cacagaaattgctctaccccca

SEQ ID NO: 41012 - DNA, 22 bp, Artificial Sequence
  chemically synthesized
ctctacccccatgtagaaagtg

SEQ ID NO: 41013 - DNA, 22 bp, Artificial Sequence
  chemically synthesized
tacccccatgtagaaagtgtgt

SEQ ID NO: 41014 - DNA, 22 bp, Artificial Sequence
  chemically synthesized
cccccatgtagaaagtgtgtca

SEQ ID NO: 41015 - DNA, 22 bp, Artificial Sequence
  chemically synthesized
ctatggaaattcaaaggaagag

SEQ ID NO: 41016 - DNA, 22 bp, Artificial Sequence
  chemically synthesized
tggaaattcaaaggaagagaaa

SEQ ID NO: 41017 - DNA, 22 bp, Artificial Sequence
  chemically synthesized
aaaggaagagaaattatttcca

SEQ ID NO: 41018 - DNA, 22 bp, Artificial Sequence
  chemically synthesized
tttccatttggaagggagggag

SEQ ID NO: 41019 - DNA, 22 bp, Artificial Sequence
  chemically synthesized
ccatttggaagggagggagaga

SEQ ID NO: 41020 - DNA, 22 bp, Artificial Sequence
  chemically synthesized
catttggaagggagggagagag

SEQ ID NO: 41021 - DNA, 22 bp, Artificial Sequence
  chemically synthesized
ggaagggagggagagaggcttt

SEQ ID NO: 41022 - DNA, 22 bp, Artificial Sequence
  chemically synthesized
gaagggagggagagaggctttg

SEQ ID NO: 41023 - DNA, 22 bp, Artificial Sequence
  chemically synthesized
tgggaaagaggaaaacttatga

SEQ ID NO: 41024 - DNA, 22 bp, Artificial Sequence
  chemically synthesized
gggaaagaggaaaacttatgag

SEQ ID NO: 41025 - DNA, 22 bp, Artificial Sequence
  chemically synthesized
ggaaagaggaaaacttatgagt

SEQ ID NO: 41026 - DNA, 22 bp, Artificial Sequence
  chemically synthesized
atgagttaaacctggagagcca

SEQ ID NO: 41027 - DNA, 22 bp, Artificial Sequence
  chemically synthesized
tgagttaaacctggagagccaa

SEQ ID NO: 41028 - DNA, 22 bp, Artificial Sequence
  chemically synthesized
aacctggagagccaagagaaag

SEQ ID NO: 41029 - DNA, 22 bp, Artificial Sequence
  chemically synthesized
gagagccaagagaaaggatatc

SEQ ID NO: 41030 - DNA, 22 bp, Artificial Sequence
  chemically synthesized
gataaaaagaaaaagcaggtaa

SEQ ID NO: 41031 - DNA, 22 bp, Artificial Sequence
  chemically synthesized
agagagaagcaaagcccaaggt

SEQ ID NO: 41032 - DNA, 22 bp, Artificial Sequence
  chemically synthesized
gagagaagcaaagcccaaggtg

SEQ ID NO: 41033 - DNA, 22 bp, Artificial Sequence
  chemically synthesized
cattcacatcaaaatattgcac

SEQ ID NO: 41034 - DNA, 22 bp, Artificial Sequence
  chemically synthesized
acatcaaaatattgcacactga

SEQ ID NO: 41035 - DNA, 22 bp, Artificial Sequence
  chemically synthesized
cacactgattcatccagttgac

SEQ ID NO: 41036 - DNA, 22 bp, Artificial Sequence
  chemically synthesized
attcatccagttgacagcggag

SEQ ID NO: 41037 - DNA, 22 bp, Artificial Sequence
  chemically synthesized
atccagttgacagcggaggata

SEQ ID NO: 41038 - DNA, 22 bp, Artificial Sequence
  chemically synthesized
acagcggaggatacgaccatct

SEQ ID NO: 41039 - DNA, 22 bp, Artificial Sequence
  chemically synthesized
aataaatcctctgaagatttct

SEQ ID NO: 41040 - DNA, 22 bp, Artificial Sequence
  chemically synthesized
tgaagatttctgtgacatcttc

SEQ ID NO: 41041 - DNA, 22 bp, Artificial Sequence
  chemically synthesized
aagatttctgtgacatcttcag

SEQ ID NO: 41042 - DNA, 22 bp, Artificial Sequence
  chemically synthesized
ctgtgacatcttcagctttcac

SEQ ID NO: 41043 - DNA, 22 bp, Artificial Sequence
  chemically synthesized
tgtgacatcttcagctttcaca

SEQ ID NO: 41044 - DNA, 22 bp, Artificial Sequence
  chemically synthesized
tgacatcttcagctttcacaag

SEQ ID NO: 41045 - DNA, 22 bp, Artificial Sequence
  chemically synthesized
cagctttcacaagtgcgtattt

SEQ ID NO: 41046 - DNA, 22 bp, Artificial Sequence
  chemically synthesized
agctttcacaagtgcgtatttt

SEQ ID NO: 41047 - DNA, 22 bp, Artificial Sequence
  chemically synthesized
tcacaagtgcgtattttccaat

SEQ ID NO: 41048 - DNA, 22 bp, Artificial Sequence
  chemically synthesized
cacaagtgcgtattttccaatt

SEQ ID NO: 41049 - DNA, 22 bp, Artificial Sequence
  chemically synthesized
acaagtgcgtattttccaattt

SEQ ID NO: 41050 - DNA, 22 bp, Artificial Sequence
  chemically synthesized
tccaatttcacattttctgaaa

SEQ ID NO: 41051 - DNA, 22 bp, Artificial Sequence
  chemically synthesized
ccaatttcacattttctgaaaa

SEQ ID NO: 41052 - DNA, 22 bp, Artificial Sequence
  chemically synthesized
caatttcacattttctgaaaat

SEQ ID NO: 41053 - DNA, 22 bp, Artificial Sequence
  chemically synthesized
cacattttctgaaaataaggga

SEQ ID NO: 41054 - DNA, 22 bp, Artificial Sequence
  chemically synthesized
acattttctgaaaataagggac

SEQ ID NO: 41055 - DNA, 22 bp, Artificial Sequence
  chemically synthesized
tctgaaaataagggacacaacc

SEQ ID NO: 41056 - DNA, 22 bp, Artificial Sequence
  chemically synthesized
ctgaaaataagggacacaacca

SEQ ID NO: 41057 - DNA, 22 bp, Artificial Sequence
  chemically synthesized
tgaaaataagggacacaaccat

SEQ ID NO: 41058 - DNA, 22 bp, Artificial Sequence
  chemically synthesized
aaaataagggacacaaccatgt

SEQ ID NO: 41059 - DNA, 22 bp, Artificial Sequence
  chemically synthesized
ttgtgaaactccatgaaggttc

SEQ ID NO: 41060 - DNA, 22 bp, Artificial Sequence
  chemically synthesized
gtgaaactccatgaaggttcat

SEQ ID NO: 41061 - DNA, 22 bp, Artificial Sequence
  chemically synthesized
tgaaactccatgaaggttcatc

SEQ ID NO: 41062 - DNA, 22 bp, Artificial Sequence
  chemically synthesized
catgaaggttcatctgttctgt

SEQ ID NO: 41063 - DNA, 22 bp, Artificial Sequence
  chemically synthesized
atctgttctgttttccccccac

SEQ ID NO: 41064 - DNA, 22 bp, Artificial Sequence
  chemically synthesized
ttctgttttccccccacctcaa

SEQ ID NO: 41065 - DNA, 22 bp, Artificial Sequence
  chemically synthesized
tgttttccccccacctcaattg

SEQ ID NO: 41066 - DNA, 22 bp, Artificial Sequence
  chemically synthesized
ttttccccccacctcaattgtt

SEQ ID NO: 41067 - DNA, 22 bp, Artificial Sequence
  chemically synthesized
tccccccacctcaattgtttct

SEQ ID NO: 41068 - DNA, 22 bp, Artificial Sequence
  chemically synthesized
ccccccacctcaattgtttctt

SEQ ID NO: 41069 - DNA, 22 bp, Artificial Sequence
  chemically synthesized
cccccacctcaattgtttcttc

SEQ ID NO: 41070 - DNA, 22 bp, Artificial Sequence
  chemically synthesized
aattgtttcttcccccaatgaa

SEQ ID NO: 41071 - DNA, 22 bp, Artificial Sequence
  chemically synthesized
tttcttcccccaatgaatgtgg

SEQ ID NO: 41072 - DNA, 22 bp, Artificial Sequence
  chemically synthesized
cttcccccaatgaatgtgggtg

SEQ ID NO: 41073 - DNA, 22 bp, Artificial Sequence
  chemically synthesized
ttcccccaatgaatgtgggtgg

SEQ ID NO: 41074 - DNA, 22 bp, Artificial Sequence
  chemically synthesized
cccccaatgaatgtgggtggcc

SEQ ID NO: 41075 - DNA, 22 bp, Artificial Sequence
  chemically synthesized
ccccaatgaatgtgggtggccc

SEQ ID NO: 41076 - DNA, 22 bp, Artificial Sequence
  chemically synthesized
aggcaaaatttactatgtttta

SEQ ID NO: 41077 - DNA, 22 bp, Artificial Sequence
  chemically synthesized
actatgttttattcctctgagt

SEQ ID NO: 41078 - DNA, 22 bp, Artificial Sequence
  chemically synthesized
ctatgttttattcctctgagtc

SEQ ID NO: 41079 - DNA, 22 bp, Artificial Sequence
  chemically synthesized
tgttttattcctctgagtcaga

SEQ ID NO: 41080 - DNA, 22 bp, Artificial Sequence
  chemically synthesized
tattcctctgagtcagacaaac

SEQ ID NO: 41081 - DNA, 22 bp, Artificial Sequence
  chemically synthesized
attcctctgagtcagacaaaca

SEQ ID NO: 41082 - DNA, 22 bp, Artificial Sequence
  chemically synthesized
ttcctctgagtcagacaaacaa

SEQ ID NO: 41083 - DNA, 22 bp, Artificial Sequence
  chemically synthesized
ctctgagtcagacaaacaagtg

SEQ ID NO: 41084 - DNA, 22 bp, Artificial Sequence
  chemically synthesized
tgagtcagacaaacaagtgttg

SEQ ID NO: 41085 - DNA, 22 bp, Artificial Sequence
  chemically synthesized
agtcagacaaacaagtgttgat

SEQ ID NO: 41086 - DNA, 22 bp, Artificial Sequence
  chemically synthesized
atagccatgttcttccttgcaa

SEQ ID NO: 41087 - DNA, 22 bp, Artificial Sequence
  chemically synthesized
ttccttgcaatactgcctccct

SEQ ID NO: 41088 - DNA, 22 bp, Artificial Sequence
  chemically synthesized
ccttgcaatactgcctccctgg

SEQ ID NO: 41089 - DNA, 22 bp, Artificial Sequence
  chemically synthesized
cttgcaatactgcctccctggc

SEQ ID NO: 41090 - DNA, 22 bp, Artificial Sequence
  chemically synthesized
gcaatactgcctccctggctta

SEQ ID NO: 41091 - DNA, 22 bp, Artificial Sequence
  chemically synthesized
caatactgcctccctggcttaa

SEQ ID NO: 41092 - DNA, 22 bp, Artificial Sequence
  chemically synthesized
cctccctggcttaaataatcta

SEQ ID NO: 41093 - DNA, 22 bp, Artificial Sequence
  chemically synthesized
cctggcttaaataatctatttc

SEQ ID NO: 41094 - DNA, 22 bp, Artificial Sequence
  chemically synthesized
gcttaaataatctatttcagat

SEQ ID NO: 41095 - DNA, 22 bp, Artificial Sequence
  chemically synthesized
aaataatctatttcagatgtct

SEQ ID NO: 41096 - DNA, 22 bp, Artificial Sequence
  chemically synthesized
aataatctatttcagatgtctc

SEQ ID NO: 41097 - DNA, 22 bp, Artificial Sequence
  chemically synthesized
tttcagatgtctcattgccagt

SEQ ID NO: 41098 - DNA, 22 bp, Artificial Sequence
  chemically synthesized
cagatgtctcattgccagttta

SEQ ID NO: 41099 - DNA, 22 bp, Artificial Sequence
  chemically synthesized
agatgtctcattgccagtttaa

SEQ ID NO: 41100 - DNA, 22 bp, Artificial Sequence
  chemically synthesized
attgccagtttaagatgggctt

SEQ ID NO: 41101 - DNA, 22 bp, Artificial Sequence
  chemically synthesized
ccagtttaagatgggcttgtac

SEQ ID NO: 41102 - DNA, 22 bp, Artificial Sequence
  chemically synthesized
aagatgggcttgtacttgctga

SEQ ID NO: 41103 - DNA, 22 bp, Artificial Sequence
  chemically synthesized
agatgggcttgtacttgctgac

SEQ ID NO: 41104 - DNA, 22 bp, Artificial Sequence
  chemically synthesized
gtacttgctgacacattttcaa

SEQ ID NO: 41105 - DNA, 22 bp, Artificial Sequence
  chemically synthesized
tacttgctgacacattttcaac

SEQ ID NO: 41106 - DNA, 22 bp, Artificial Sequence
  chemically synthesized
gctgacacattttcaacaaatg

SEQ ID NO: 41107 - DNA, 22 bp, Artificial Sequence
  chemically synthesized
ctgacacattttcaacaaatga

SEQ ID NO: 41108 - DNA, 22 bp, Artificial Sequence
  chemically synthesized
acacattttcaacaaatgactg

SEQ ID NO: 41109 - DNA, 22 bp, Artificial Sequence
  chemically synthesized
tcaacaaatgactgtgcaagaa

SEQ ID NO: 41110 - DNA, 22 bp, Artificial Sequence
  chemically synthesized
caacaaatgactgtgcaagaaa

SEQ ID NO: 41111 - DNA, 22 bp, Artificial Sequence
  chemically synthesized
aacaaatgactgtgcaagaaac

SEQ ID NO: 41112 - DNA, 22 bp, Artificial Sequence
  chemically synthesized
tgcaagaaacattgagattttc

SEQ ID NO: 41113 - DNA, 22 bp, Artificial Sequence
  chemically synthesized
agattttcctacactactttgt

SEQ ID NO: 41114 - DNA, 22 bp, Artificial Sequence
  chemically synthesized
tcctacactactttgtctcttc

SEQ ID NO: 41115 - DNA, 22 bp, Artificial Sequence
  chemically synthesized
cctacactactttgtctcttca

SEQ ID NO: 41116 - DNA, 22 bp, Artificial Sequence
  chemically synthesized
ctacactactttgtctcttcaa

SEQ ID NO: 41117 - DNA, 22 bp, Artificial Sequence
  chemically synthesized
cactactttgtctcttcaatca

SEQ ID NO: 41118 - DNA, 22 bp, Artificial Sequence
  chemically synthesized
ctttgtctcttcaatcatcaac

SEQ ID NO: 41119 - DNA, 22 bp, Artificial Sequence
  chemically synthesized
tgtctcttcaatcatcaacttg

SEQ ID NO: 41120 - DNA, 22 bp, Artificial Sequence
  chemically synthesized
gtctcttcaatcatcaacttga

SEQ ID NO: 41121 - DNA, 22 bp, Artificial Sequence
  chemically synthesized
tctcttcaatcatcaacttgac

SEQ ID NO: 41122 - DNA, 22 bp, Artificial Sequence
  chemically synthesized
ttcaatcatcaacttgaccatc

SEQ ID NO: 41123 - DNA, 22 bp, Artificial Sequence
  chemically synthesized
caatcatcaacttgaccatccc

SEQ ID NO: 41124 - DNA, 22 bp, Artificial Sequence
  chemically synthesized
aatcatcaacttgaccatccct

SEQ ID NO: 41125 - DNA, 22 bp, Artificial Sequence
  chemically synthesized
gaccatccctccaaatttcccc

SEQ ID NO: 41126 - DNA, 22 bp, Artificial Sequence
  chemically synthesized
accatccctccaaatttcccct

SEQ ID NO: 41127 - DNA, 22 bp, Artificial Sequence
  chemically synthesized
caaatttcccctctttcttctt

SEQ ID NO: 41128 - DNA, 22 bp, Artificial Sequence
  chemically synthesized
cccctctttcttcttttcaaag

SEQ ID NO: 41129 - DNA, 22 bp, Artificial Sequence
  chemically synthesized
ccctctttcttcttttcaaagc

SEQ ID NO: 41130 - DNA, 22 bp, Artificial Sequence
  chemically synthesized
tttcttcttttcaaagccatgg

SEQ ID NO: 41131 - DNA, 22 bp, Artificial Sequence
  chemically synthesized
tcttcttttcaaagccatgggg

SEQ ID NO: 41132 - DNA, 22 bp, Artificial Sequence
  chemically synthesized
cttcttttcaaagccatgggga

SEQ ID NO: 41133 - DNA, 22 bp, Artificial Sequence
  chemically synthesized
ttcttttcaaagccatggggag

SEQ ID NO: 41134 - DNA, 22 bp, Artificial Sequence
  chemically synthesized
cttttcaaagccatggggagga

SEQ ID NO: 41135 - DNA, 22 bp, Artificial Sequence
  chemically synthesized
ttttcaaagccatggggaggat

SEQ ID NO: 41136 - DNA, 22 bp, Artificial Sequence
  chemically synthesized
ttcaaagccatggggaggatag

SEQ ID NO: 41137 - DNA, 22 bp, Artificial Sequence
  chemically synthesized
tcaaagccatggggaggatagg

SEQ ID NO: 41138 - DNA, 22 bp, Artificial Sequence
  chemically synthesized
caaagccatggggaggataggg

SEQ ID NO: 41139 - DNA, 22 bp, Artificial Sequence
  chemically synthesized
aaagccatggggaggatagggg

SEQ ID NO: 41140 - DNA, 22 bp, Artificial Sequence
  chemically synthesized
actcctgctctgagtcctcagc

SEQ ID NO: 41141 - DNA, 22 bp, Artificial Sequence
  chemically synthesized
ctcctgctctgagtcctcagct

SEQ ID NO: 41142 - DNA, 22 bp, Artificial Sequence
  chemically synthesized
ctgctctgagtcctcagctgag

SEQ ID NO: 41143 - DNA, 22 bp, Artificial Sequence
  chemically synthesized
ctctgagtcctcagctgaggat

SEQ ID NO: 41144 - DNA, 22 bp, Artificial Sequence
  chemically synthesized
tgagtcctcagctgaggatctt

SEQ ID NO: 41145 - DNA, 22 bp, Artificial Sequence
  chemically synthesized
agtcctcagctgaggatcttgt

SEQ ID NO: 41146 - DNA, 22 bp, Artificial Sequence
  chemically synthesized
agctgaggatcttgtttgtgtg

SEQ ID NO: 41147 - DNA, 22 bp, Artificial Sequence
  chemically synthesized
aggatcttgtttgtgtgtagtg

SEQ ID NO: 41148 - DNA, 22 bp, Artificial Sequence
  chemically synthesized
gtttgtgtgtagtgggggcagg

SEQ ID NO: 41149 - DNA, 22 bp, Artificial Sequence
  chemically synthesized
tttgtgtgtagtgggggcaggg

SEQ ID NO: 41150 - DNA, 22 bp, Artificial Sequence
  chemically synthesized
gtgtgtagtgggggcaggggga

SEQ ID NO: 41151 - DNA, 22 bp, Artificial Sequence
  chemically synthesized
tgtgtagtgggggcagggggag

SEQ ID NO: 41152 - DNA, 22 bp, Artificial Sequence
  chemically synthesized
gcctctatccgaggtatttatc

SEQ ID NO: 41153 - DNA, 22 bp, Artificial Sequence
  chemically synthesized
cctctatccgaggtatttatca

SEQ ID NO: 41154 - DNA, 22 bp, Artificial Sequence
  chemically synthesized
tatccgaggtatttatcaggtt

SEQ ID NO: 41155 - DNA, 22 bp, Artificial Sequence
  chemically synthesized
tccgaggtatttatcaggttat

SEQ ID NO: 41156 - DNA, 22 bp, Artificial Sequence
  chemically synthesized
atcaggttatttgggagctact

SEQ ID NO: 41157 - DNA, 22 bp, Artificial Sequence
  chemically synthesized
tcaggttatttgggagctactt

SEQ ID NO: 41158 - DNA, 22 bp, Artificial Sequence
  chemically synthesized
tttgggagctactttcagagat

SEQ ID NO: 41159 - DNA, 22 bp, Artificial Sequence
  chemically synthesized
gggagctactttcagagatgcc

SEQ ID NO: 41160 - DNA, 22 bp, Artificial Sequence
  chemically synthesized
ggagctactttcagagatgccc

SEQ ID NO: 41161 - DNA, 22 bp, Artificial Sequence
  chemically synthesized
ctttcagagatgcccttgctct

SEQ ID NO: 41162 - DNA, 22 bp, Artificial Sequence
  chemically synthesized
tcagagatgcccttgctctatg

SEQ ID NO: 41163 - DNA, 22 bp, Artificial Sequence
  chemically synthesized
cagagatgcccttgctctatgt

SEQ ID NO: 41164 - DNA, 22 bp, Artificial Sequence
  chemically synthesized
agagatgcccttgctctatgta

SEQ ID NO: 41165 - DNA, 22 bp, Artificial Sequence
  chemically synthesized
gctctatgtattcccactgcca

SEQ ID NO: 41166 - DNA, 22 bp, Artificial Sequence
  chemically synthesized
ctctatgtattcccactgccac

SEQ ID NO: 41167 - DNA, 22 bp, Artificial Sequence
  chemically synthesized
tatgtattcccactgccaccac

SEQ ID NO: 41168 - DNA, 22 bp, Artificial Sequence
  chemically synthesized
tgtattcccactgccaccactc

SEQ ID NO: 41169 - DNA, 22 bp, Artificial Sequence
  chemically synthesized
ccactgccaccactccccggat

SEQ ID NO: 41170 - DNA, 22 bp, Artificial Sequence
  chemically synthesized
ccaccactccccggattctttt

SEQ ID NO: 41171 - DNA, 22 bp, Artificial Sequence
  chemically synthesized
cccggattcttttcttccttta

SEQ ID NO: 41172 - DNA, 22 bp, Artificial Sequence
  chemically synthesized
ttttcttcctttaggaagcagg

SEQ ID NO: 41173 - DNA, 22 bp, Artificial Sequence
  chemically synthesized
ttcttcctttaggaagcaggga

SEQ ID NO: 41174 - DNA, 22 bp, Artificial Sequence
  chemically synthesized
tcttcctttaggaagcagggac

SEQ ID NO: 41175 - DNA, 22 bp, Artificial Sequence
  chemically synthesized
cttcctttaggaagcagggact

SEQ ID NO: 41176 - DNA, 22 bp, Artificial Sequence
  chemically synthesized
ttcctttaggaagcagggactt

SEQ ID NO: 41177 - DNA, 22 bp, Artificial Sequence
  chemically synthesized
cctttaggaagcagggacttgt

SEQ ID NO: 41178 - DNA, 22 bp, Artificial Sequence
  chemically synthesized
ctttaggaagcagggacttgtt

SEQ ID NO: 41179 - DNA, 22 bp, Artificial Sequence
  chemically synthesized
taggaagcagggacttgttcct

SEQ ID NO: 41180 - DNA, 22 bp, Artificial Sequence
  chemically synthesized
aggaagcagggacttgttcctc

SEQ ID NO: 41181 - DNA, 22 bp, Artificial Sequence
  chemically synthesized
ggaagcagggacttgttcctct

SEQ ID NO: 41182 - DNA, 22 bp, Artificial Sequence
  chemically synthesized
gttcctctggagagactgctag

SEQ ID NO: 41183 - DNA, 22 bp, Artificial Sequence
  chemically synthesized
ttcctctggagagactgctaga

SEQ ID NO: 41184 - DNA, 22 bp, Artificial Sequence
  chemically synthesized
ctctggagagactgctagagga

SEQ ID NO: 41185 - DNA, 22 bp, Artificial Sequence
  chemically synthesized
tggagagactgctagaggaaag

SEQ ID NO: 41186 - DNA, 22 bp, Artificial Sequence
  chemically synthesized
gagagactgctagaggaaagtc

SEQ ID NO: 41187 - DNA, 22 bp, Artificial Sequence
  chemically synthesized
ctagaggaaagtcaggaaccta

SEQ ID NO: 41188 - DNA, 22 bp, Artificial Sequence
  chemically synthesized
gaggaaagtcaggaacctaagt

SEQ ID NO: 41189 - DNA, 22 bp, Artificial Sequence
  chemically synthesized
agttctgcaaccccaactctgc

SEQ ID NO: 41190 - DNA, 22 bp, Artificial Sequence
  chemically synthesized
tgcaaccccaactctgccactc

SEQ ID NO: 41191 - DNA, 22 bp, Artificial Sequence
  chemically synthesized
caaccccaactctgccactcac

SEQ ID NO: 41192 - DNA, 22 bp, Artificial Sequence
  chemically synthesized
tgccactcaccagctgtttcgt

SEQ ID NO: 41193 - DNA, 22 bp, Artificial Sequence
  chemically synthesized
ccactcaccagctgtttcgtga

SEQ ID NO: 41194 - DNA, 22 bp, Artificial Sequence
  chemically synthesized
accagctgtttcgtgactttga

SEQ ID NO: 41195 - DNA, 22 bp, Artificial Sequence
  chemically synthesized
tttcgtgactttgaataaatcc

SEQ ID NO: 41196 - DNA, 22 bp, Artificial Sequence
  chemically synthesized
cgtgactttgaataaatccttt

SEQ ID NO: 41197 - DNA, 22 bp, Artificial Sequence
  chemically synthesized
gtgactttgaataaatcctttc

SEQ ID NO: 41198 - DNA, 22 bp, Artificial Sequence
  chemically synthesized
tgaataaatcctttctttctgg

SEQ ID NO: 41199 - DNA, 22 bp, Artificial Sequence
  chemically synthesized
gaataaatcctttctttctggc

SEQ ID NO: 41200 - DNA, 22 bp, Artificial Sequence
  chemically synthesized
aataaatcctttctttctggcc

SEQ ID NO: 41201 - DNA, 22 bp, Artificial Sequence
  chemically synthesized
tctttctggccctaagtgtttc

SEQ ID NO: 41202 - DNA, 22 bp, Artificial Sequence
  chemically synthesized
ctttctggccctaagtgtttcc

SEQ ID NO: 41203 - DNA, 22 bp, Artificial Sequence
  chemically synthesized
tttctggccctaagtgtttcca

SEQ ID NO: 41204 - DNA, 22 bp, Artificial Sequence
  chemically synthesized
tctggccctaagtgtttccatc

SEQ ID NO: 41205 - DNA, 22 bp, Artificial Sequence
  chemically synthesized
ctggccctaagtgtttccatct

SEQ ID NO: 41206 - DNA, 22 bp, Artificial Sequence
  chemically synthesized
tggccctaagtgtttccatctt

SEQ ID NO: 41207 - DNA, 22 bp, Artificial Sequence
  chemically synthesized
gccctaagtgtttccatcttta

SEQ ID NO: 41208 - DNA, 22 bp, Artificial Sequence
  chemically synthesized
agtgtttccatctttaaaagga

SEQ ID NO: 41209 - DNA, 22 bp, Artificial Sequence
  chemically synthesized
ccatctttaaaaggagaagact

SEQ ID NO: 41210 - DNA, 22 bp, Artificial Sequence
  chemically synthesized
catctttaaaaggagaagactg

SEQ ID NO: 41211 - DNA, 22 bp, Artificial Sequence
  chemically synthesized
taaaaggagaagactggattag

SEQ ID NO: 41212 - DNA, 22 bp, Artificial Sequence
  chemically synthesized
aaaaggagaagactggattaga

SEQ ID NO: 41213 - DNA, 22 bp, Artificial Sequence
  chemically synthesized
aaaggagaagactggattagat

SEQ ID NO: 41214 - DNA, 22 bp, Artificial Sequence
  chemically synthesized
gattagatggggtggcttctct

SEQ ID NO: 41215 - DNA, 22 bp, Artificial Sequence
  chemically synthesized
gatggggtggcttctctctcct

SEQ ID NO: 41216 - DNA, 22 bp, Artificial Sequence
  chemically synthesized
ctctctcctgcctcccatgcaa

SEQ ID NO: 41217 - DNA, 22 bp, Artificial Sequence
  chemically synthesized
tctctcctgcctcccatgcaag

SEQ ID NO: 41218 - DNA, 22 bp, Artificial Sequence
  chemically synthesized
tctcctgcctcccatgcaagtc

SEQ ID NO: 41219 - DNA, 22 bp, Artificial Sequence
  chemically synthesized
tcctgcctcccatgcaagtcca

SEQ ID NO: 41220 - DNA, 22 bp, Artificial Sequence
  chemically synthesized
ctgcctcccatgcaagtccagg

SEQ ID NO: 41221 - DNA, 22 bp, Artificial Sequence
  chemically synthesized
cctcccatgcaagtccaggcct

SEQ ID NO: 41222 - DNA, 22 bp, Artificial Sequence
  chemically synthesized
ccatgcaagtccaggcctcctt

SEQ ID NO: 41223 - DNA, 22 bp, Artificial Sequence
  chemically synthesized
ctttggaccaaccaagagacct

SEQ ID NO: 41224 - DNA, 22 bp, Artificial Sequence
  chemically synthesized
tggaccaaccaagagacctact

SEQ ID NO: 41225 - DNA, 22 bp, Artificial Sequence
  chemically synthesized
ggaccaaccaagagacctacta

SEQ ID NO: 41226 - DNA, 22 bp, Artificial Sequence
  chemically synthesized
gaccaaccaagagacctactat

SEQ ID NO: 41227 - DNA, 22 bp, Artificial Sequence
  chemically synthesized
ctataggccgtgctagaagctg

SEQ ID NO: 41228 - DNA, 22 bp, Artificial Sequence
  chemically synthesized
taggccgtgctagaagctggcc

SEQ ID NO: 41229 - DNA, 22 bp, Artificial Sequence
  chemically synthesized
gaagctggccaggatacacctg

SEQ ID NO: 41230 - DNA, 22 bp, Artificial Sequence
  chemically synthesized
gccaggatacacctgttcccct

SEQ ID NO: 41231 - DNA, 22 bp, Artificial Sequence
  chemically synthesized
ttcccctcatgaccttgacctg

SEQ ID NO: 41232 - DNA, 22 bp, Artificial Sequence
  chemically synthesized
ccctcatgaccttgacctggat

SEQ ID NO: 41233 - DNA, 22 bp, Artificial Sequence
  chemically synthesized
atgaccttgacctggatgagga

SEQ ID NO: 41234 - DNA, 22 bp, Artificial Sequence
  chemically synthesized
gacctggatgaggagggcctta

SEQ ID NO: 41235 - DNA, 22 bp, Artificial Sequence
  chemically synthesized
acctggatgaggagggccttat

SEQ ID NO: 41236 - DNA, 22 bp, Artificial Sequence
  chemically synthesized
gatgaggagggccttataggag

SEQ ID NO: 41237 - DNA, 22 bp, Artificial Sequence
  chemically synthesized
ataggagagttcagggctgggc

SEQ ID NO: 41238 - DNA, 22 bp, Artificial Sequence
  chemically synthesized
taggagagttcagggctgggct

SEQ ID NO: 41239 - DNA, 22 bp, Artificial Sequence
  chemically synthesized
agggctgggcttggtccccagg

SEQ ID NO: 41240 - DNA, 22 bp, Artificial Sequence
  chemically synthesized
ggcttggtccccaggctaatcc

SEQ ID NO: 41241 - DNA, 22 bp, Artificial Sequence
  chemically synthesized
ggtccccaggctaatccttagg

SEQ ID NO: 41242 - DNA, 22 bp, Artificial Sequence
  chemically synthesized
gtccccaggctaatccttaggc

SEQ ID NO: 41243 - DNA, 22 bp, Artificial Sequence
  chemically synthesized
atccttaggcttagagagtgag

SEQ ID NO: 41244 - DNA, 22 bp, Artificial Sequence
  chemically synthesized
aggcttagagagtgagcctgat

SEQ ID NO: 41245 - DNA, 22 bp, Artificial Sequence
  chemically synthesized
ggcttagagagtgagcctgatg

SEQ ID NO: 41246 - DNA, 22 bp, Artificial Sequence
  chemically synthesized
agagagtgagcctgatgatgga

SEQ ID NO: 41247 - DNA, 22 bp, Artificial Sequence
  chemically synthesized
gagagtgagcctgatgatggat

SEQ ID NO: 41248 - DNA, 22 bp, Artificial Sequence
  chemically synthesized
atgatggatttcaacctcctgg

SEQ ID NO: 41249 - DNA, 22 bp, Artificial Sequence
  chemically synthesized
caacctcctgggacacagtctt

SEQ ID NO: 41250 - DNA, 22 bp, Artificial Sequence
  chemically synthesized
aacctcctgggacacagtcttg

SEQ ID NO: 41251 - DNA, 22 bp, Artificial Sequence
  chemically synthesized
ctgggacacagtcttgcaaagt

SEQ ID NO: 41252 - DNA, 22 bp, Artificial Sequence
  chemically synthesized
ggacacagtcttgcaaagttta

SEQ ID NO: 41253 - DNA, 22 bp, Artificial Sequence
  chemically synthesized
gcaaagtttacatgtctgagct

SEQ ID NO: 41254 - DNA, 22 bp, Artificial Sequence
  chemically synthesized
caaagtttacatgtctgagctt

SEQ ID NO: 41255 - DNA, 22 bp, Artificial Sequence
  chemically synthesized
acatgtctgagcttcaaggagg

SEQ ID NO: 41256 - DNA, 22 bp, Artificial Sequence
  chemically synthesized
catgtctgagcttcaaggagga

SEQ ID NO: 41257 - DNA, 22 bp, Artificial Sequence
  chemically synthesized
agcttcaaggaggaaacctagg

SEQ ID NO: 41258 - DNA, 22 bp, Artificial Sequence
  chemically synthesized
caaggaggaaacctaggtgtgt

SEQ ID NO: 41259 - DNA, 22 bp, Artificial Sequence
  chemically synthesized
aaggaggaaacctaggtgtgtc

SEQ ID NO: 41260 - DNA, 22 bp, Artificial Sequence
  chemically synthesized
ggtgtgtcctgagccaatgaga

SEQ ID NO: 41261 - DNA, 22 bp, Artificial Sequence
  chemically synthesized
agccaatgagactgaaggtcag

SEQ ID NO: 41262 - DNA, 22 bp, Artificial Sequence
  chemically synthesized
aaggtcagagaaccaggaagaa

SEQ ID NO: 41263 - DNA, 22 bp, Artificial Sequence
  chemically synthesized
ccccaaacccaggctaaatgtc

SEQ ID NO: 41264 - DNA, 22 bp, Artificial Sequence
  chemically synthesized
cccaaacccaggctaaatgtca

SEQ ID NO: 41265 - DNA, 22 bp, Artificial Sequence
  chemically synthesized
aatgtcaagggaaaaggtctca

SEQ ID NO: 41266 - DNA, 22 bp, Artificial Sequence
  chemically synthesized
agtggctcatgccagaagtcca

SEQ ID NO: 41267 - DNA, 22 bp, Artificial Sequence
  chemically synthesized
atgccagaagtccagtagcaaa

SEQ ID NO: 41268 - DNA, 22 bp, Artificial Sequence
  chemically synthesized
ggcctcatgccagagcctggca

SEQ ID NO: 41269 - DNA, 22 bp, Artificial Sequence
  chemically synthesized
atgccagagcctggcacccatt

SEQ ID NO: 41270 - DNA, 22 bp, Artificial Sequence
  chemically synthesized
gcacccattgctcacaaaggca

SEQ ID NO: 41271 - DNA, 22 bp, Artificial Sequence
  chemically synthesized
ctcacaaaggcacacacaggac

SEQ ID NO: 41272 - DNA, 22 bp, Artificial Sequence
  chemically synthesized
acaaaggcacacacaggactct

SEQ ID NO: 41273 - DNA, 22 bp, Artificial Sequence
  chemically synthesized
taagaaaagggagtcctctccc

SEQ ID NO: 41274 - DNA, 22 bp, Artificial Sequence
  chemically synthesized
agaaaagggagtcctctcccca

SEQ ID NO: 41275 - DNA, 22 bp, Artificial Sequence
  chemically synthesized
tccccagccaccacaaaccagg

SEQ ID NO: 41276 - DNA, 22 bp, Artificial Sequence
  chemically synthesized
cccagccaccacaaaccaggac

SEQ ID NO: 41277 - DNA, 22 bp, Artificial Sequence
  chemically synthesized
tggtccttgacctcccaccaca

SEQ ID NO: 41278 - DNA, 22 bp, Artificial Sequence
  chemically synthesized
gacctcccaccacaccccatca

SEQ ID NO: 41279 - DNA, 22 bp, Artificial Sequence
  chemically synthesized
acctcccaccacaccccatcag

SEQ ID NO: 41280 - DNA, 22 bp, Artificial Sequence
  chemically synthesized
ccaccacaccccatcagcatgg

SEQ ID NO: 41281 - DNA, 22 bp, Artificial Sequence
  chemically synthesized
ttggaaagccatgtgtaaaatg

SEQ ID NO: 41282 - DNA, 22 bp, Artificial Sequence
  chemically synthesized
ggaaagccatgtgtaaaatgaa

SEQ ID NO: 41283 - DNA, 22 bp, Artificial Sequence
  chemically synthesized
gaaagccatgtgtaaaatgaat

SEQ ID NO: 41284 - DNA, 22 bp, Artificial Sequence
  chemically synthesized
ctgtaaaataaatcatatttgc

SEQ ID NO: 41285 - DNA, 22 bp, Artificial Sequence
  chemically synthesized
tgtaaaataaatcatatttgct

SEQ ID NO: 41286 - DNA, 22 bp, Artificial Sequence
  chemically synthesized
taaaataaatcatatttgctaa

SEQ ID NO: 41287 - DNA, 22 bp, Artificial Sequence
  chemically synthesized
gctaaccaacataatttcagag

SEQ ID NO: 41288 - DNA, 22 bp, Artificial Sequence
  chemically synthesized
ctaaccaacataatttcagaga

SEQ ID NO: 41289 - DNA, 22 bp, Artificial Sequence
  chemically synthesized
accaacataatttcagagatgt

SEQ ID NO: 41290 - DNA, 22 bp, Artificial Sequence
  chemically synthesized
cagagatgtttcgtcacccttc

SEQ ID NO: 41291 - DNA, 22 bp, Artificial Sequence
  chemically synthesized
agagatgtttcgtcacccttcc

SEQ ID NO: 41292 - DNA, 22 bp, Artificial Sequence
  chemically synthesized
cgtcacccttccaggctcattg

SEQ ID NO: 41293 - DNA, 22 bp, Artificial Sequence
  chemically synthesized
gtcacccttccaggctcattga

SEQ ID NO: 41294 - DNA, 22 bp, Artificial Sequence
  chemically synthesized
ccaggctcattgaaaattggca

SEQ ID NO: 41295 - DNA, 22 bp, Artificial Sequence
  chemically synthesized
caggctcattgaaaattggcag

SEQ ID NO: 41296 - DNA, 22 bp, Artificial Sequence
  chemically synthesized
attgaaaattggcagggcttct

SEQ ID NO: 41297 - DNA, 22 bp, Artificial Sequence
  chemically synthesized
aaaattggcagggcttctaaca

SEQ ID NO: 41298 - DNA, 22 bp, Artificial Sequence
  chemically synthesized
gcagggcttctaacattttacc

SEQ ID NO: 41299 - DNA, 22 bp, Artificial Sequence
  chemically synthesized
ctaacattttaccttttaagtg

SEQ ID NO: 41300 - DNA, 22 bp, Artificial Sequence
  chemically synthesized
taacattttaccttttaagtgt

SEQ ID NO: 41301 - DNA, 22 bp, Artificial Sequence
  chemically synthesized
acattttaccttttaagtgtgt

SEQ ID NO: 41302 - DNA, 22 bp, Artificial Sequence
  chemically synthesized
taccttttaagtgtgtcttcct

SEQ ID NO: 41303 - DNA, 22 bp, Artificial Sequence
  chemically synthesized
accttttaagtgtgtcttcctt

SEQ ID NO: 41304 - DNA, 22 bp, Artificial Sequence
  chemically synthesized
ccttttaagtgtgtcttccttc

SEQ ID NO: 41305 - DNA, 22 bp, Artificial Sequence
  chemically synthesized
ttaagtgtgtcttccttccccc

SEQ ID NO: 41306 - DNA, 22 bp, Artificial Sequence
  chemically synthesized
taagtgtgtcttccttccccca

SEQ ID NO: 41307 - DNA, 22 bp, Artificial Sequence
  chemically synthesized
aagtgtgtcttccttcccccaa

SEQ ID NO: 41308 - DNA, 22 bp, Artificial Sequence
  chemically synthesized
agtgtgtcttccttcccccaac

SEQ ID NO: 41309 - DNA, 22 bp, Artificial Sequence
  chemically synthesized
ccttcccccaacccccaatatc

SEQ ID NO: 41310 - DNA, 22 bp, Artificial Sequence
  chemically synthesized
cttcccccaacccccaatatcc

SEQ ID NO: 41311 - DNA, 22 bp, Artificial Sequence
  chemically synthesized
cccccaacccccaatatcctct

SEQ ID NO: 41312 - DNA, 22 bp, Artificial Sequence
  chemically synthesized
ccccaacccccaatatcctctc

SEQ ID NO: 41313 - DNA, 22 bp, Artificial Sequence
  chemically synthesized
tctgtcaagtagttaatgatct

SEQ ID NO: 41314 - DNA, 22 bp, Artificial Sequence
  chemically synthesized
tgtcaagtagttaatgatctgt

SEQ ID NO: 41315 - DNA, 22 bp, Artificial Sequence
  chemically synthesized
tcaagtagttaatgatctgtaa

SEQ ID NO: 41316 - DNA, 22 bp, Artificial Sequence
  chemically synthesized
atgatctgtaaacaaacacttt

SEQ ID NO: 41317 - DNA, 22 bp, Artificial Sequence
  chemically synthesized
taaacaaacactttaaattcag

SEQ ID NO: 41318 - DNA, 22 bp, Artificial Sequence
  chemically synthesized
taaattcagtgggggagctcac

SEQ ID NO: 41319 - DNA, 22 bp, Artificial Sequence
  chemically synthesized
aaattcagtgggggagctcact

SEQ ID NO: 41320 - DNA, 22 bp, Artificial Sequence
  chemically synthesized
aattcagtgggggagctcacta

SEQ ID NO: 41321 - DNA, 22 bp, Artificial Sequence
  chemically synthesized
agtgggggagctcactatttaa

SEQ ID NO: 41322 - DNA, 22 bp, Artificial Sequence
  chemically synthesized
actatttaaagaaaccctgtgg

SEQ ID NO: 41323 - DNA, 22 bp, Artificial Sequence
  chemically synthesized
tttaaagaaaccctgtggtgaa

SEQ ID NO: 41324 - DNA, 22 bp, Artificial Sequence
  chemically synthesized
aaagaaaccctgtggtgaaacc

SEQ ID NO: 41325 - DNA, 22 bp, Artificial Sequence
  chemically synthesized
aagaaaccctgtggtgaaacct

SEQ ID NO: 41326 - DNA, 22 bp, Artificial Sequence
  chemically synthesized
tggtgaaaccttttgaaaagtt

SEQ ID NO: 41327 - DNA, 22 bp, Artificial Sequence
  chemically synthesized
ttgaaaagttaacaatctttct

SEQ ID NO: 41328 - DNA, 22 bp, Artificial Sequence
  chemically synthesized
tgaaaagttaacaatctttctg

SEQ ID NO: 41329 - DNA, 22 bp, Artificial Sequence
  chemically synthesized
gaaaagttaacaatctttctgt

SEQ ID NO: 41330 - DNA, 22 bp, Artificial Sequence
  chemically synthesized
aaaagttaacaatctttctgta

SEQ ID NO: 41331 - DNA, 22 bp, Artificial Sequence
  chemically synthesized
acaatctttctgtaatgtgaaa

SEQ ID NO: 41332 - DNA, 22 bp, Artificial Sequence
  chemically synthesized
tctgtaatgtgaaaaatcactc

SEQ ID NO: 41333 - DNA, 22 bp, Artificial Sequence
  chemically synthesized
ctgtaatgtgaaaaatcactct

SEQ ID NO: 41334 - DNA, 22 bp, Artificial Sequence
  chemically synthesized
tgtaatgtgaaaaatcactctc

SEQ ID NO: 41335 - DNA, 22 bp, Artificial Sequence
  chemically synthesized
taatgtgaaaaatcactctcta

SEQ ID NO: 41336 - DNA, 22 bp, Artificial Sequence
  chemically synthesized
tctaatttatcagtttccatta

SEQ ID NO: 41337 - DNA, 22 bp, Artificial Sequence
  chemically synthesized
taatttatcagtttccattaat

SEQ ID NO: 41338 - DNA, 22 bp, Artificial Sequence
  chemically synthesized
atttatcagtttccattaatga

SEQ ID NO: 41339 - DNA, 22 bp, Artificial Sequence
  chemically synthesized
atcagtttccattaatgagatt

SEQ ID NO: 41340 - DNA, 22 bp, Artificial Sequence
  chemically synthesized
tcagtttccattaatgagattt

SEQ ID NO: 41341 - DNA, 22 bp, Artificial Sequence
  chemically synthesized
ccattaatgagatttttgtgtg

SEQ ID NO: 41342 - DNA, 22 bp, Artificial Sequence
  chemically synthesized
cattaatgagatttttgtgtgt

SEQ ID NO: 41343 - DNA, 22 bp, Artificial Sequence
  chemically synthesized
atgagatttttgtgtgtattgg

SEQ ID NO: 41344 - DNA, 22 bp, Artificial Sequence
  chemically synthesized
ttgtgtgtattgggccttctga

SEQ ID NO: 41345 - DNA, 22 bp, Artificial Sequence
  chemically synthesized
tgtgtgtattgggccttctgaa

SEQ ID NO: 41346 - DNA, 22 bp, Artificial Sequence
  chemically synthesized
gtgtgtattgggccttctgaaa

SEQ ID NO: 41347 - DNA, 22 bp, Artificial Sequence
  chemically synthesized
tgtgtattgggccttctgaaag

SEQ ID NO: 41348 - DNA, 22 bp, Artificial Sequence
  chemically synthesized
ggccttctgaaagtggggctca

SEQ ID NO: 41349 - DNA, 22 bp, Artificial Sequence
  chemically synthesized
ctgaaagtggggctcaactgca

SEQ ID NO: 41350 - DNA, 22 bp, Artificial Sequence
  chemically synthesized
tgaaagtggggctcaactgcaa

SEQ ID NO: 41351 - DNA, 22 bp, Artificial Sequence
  chemically synthesized
aaagtggggctcaactgcaatc

SEQ ID NO: 41352 - DNA, 22 bp, Artificial Sequence
  chemically synthesized
aactgcaatccatgcctttgta

SEQ ID NO: 41353 - DNA, 22 bp, Artificial Sequence
  chemically synthesized
caatccatgcctttgtagttag

SEQ ID NO: 41354 - DNA, 22 bp, Artificial Sequence
  chemically synthesized
tgtagttagaagggacgataaa

SEQ ID NO: 41355 - DNA, 22 bp, Artificial Sequence
  chemically synthesized
gtagttagaagggacgataaaa

SEQ ID NO: 41356 - DNA, 22 bp, Artificial Sequence
  chemically synthesized
tagttagaagggacgataaaag

SEQ ID NO: 41357 - DNA, 22 bp, Artificial Sequence
  chemically synthesized
gaagggacgataaaagacactg

SEQ ID NO: 41358 - DNA, 22 bp, Artificial Sequence
  chemically synthesized
ccctgaacatatttctgtcacc

SEQ ID NO: 41359 - DNA, 22 bp, Artificial Sequence
  chemically synthesized
aacatatttctgtcacccgaat

SEQ ID NO: 41360 - DNA, 22 bp, Artificial Sequence
  chemically synthesized
ctgtcacccgaattgtccagct

SEQ ID NO: 41361 - DNA, 22 bp, Artificial Sequence
  chemically synthesized
tgtcacccgaattgtccagctt

SEQ ID NO: 41362 - DNA, 22 bp, Artificial Sequence
  chemically synthesized
tcacccgaattgtccagcttca

SEQ ID NO: 41363 - DNA, 22 bp, Artificial Sequence
  chemically synthesized
tccagcttcacacaaacgtatc

SEQ ID NO: 41364 - DNA, 22 bp, Artificial Sequence
  chemically synthesized
cacacaaacgtatcacaaacac

SEQ ID NO: 41365 - DNA, 22 bp, Artificial Sequence
  chemically synthesized
acacaaacgtatcacaaacacc

SEQ ID NO: 41366 - DNA, 22 bp, Artificial Sequence
  chemically synthesized
cctgccccactcgagaaatgaa

SEQ ID NO: 41367 - DNA, 22 bp, Artificial Sequence
  chemically synthesized
ccccactcgagaaatgaagaaa

SEQ ID NO: 41368 - DNA, 22 bp, Artificial Sequence
  chemically synthesized
gagaaatgaagaaaaggatggg

SEQ ID NO: 41369 - DNA, 22 bp, Artificial Sequence
  chemically synthesized
ggacacctggaaagccttgcaa

SEQ ID NO: 41370 - DNA, 22 bp, Artificial Sequence
  chemically synthesized
gacacctggaaagccttgcaaa

SEQ ID NO: 41371 - DNA, 22 bp, Artificial Sequence
  chemically synthesized
gaaagccttgcaaaccacactt

SEQ ID NO: 41372 - DNA, 22 bp, Artificial Sequence
  chemically synthesized
gcaaaccacacttgcgtttctc

SEQ ID NO: 41373 - DNA, 22 bp, Artificial Sequence
  chemically synthesized
caaaccacacttgcgtttctcc

SEQ ID NO: 41374 - DNA, 22 bp, Artificial Sequence
  chemically synthesized
gcgtttctcccaggttaagtat

SEQ ID NO: 41375 - DNA, 22 bp, Artificial Sequence
  chemically synthesized
cgtttctcccaggttaagtatt

SEQ ID NO: 41376 - DNA, 22 bp, Artificial Sequence
  chemically synthesized
ctcccaggttaagtattagata

SEQ ID NO: 41377 - DNA, 22 bp, Artificial Sequence
  chemically synthesized
tcccaggttaagtattagatac

SEQ ID NO: 41378 - DNA, 22 bp, Artificial Sequence
  chemically synthesized
ccaggttaagtattagatacct

SEQ ID NO: 41379 - DNA, 22 bp, Artificial Sequence
  chemically synthesized
agtattagatacctgaggaagg

SEQ ID NO: 41380 - DNA, 22 bp, Artificial Sequence
  chemically synthesized
gatacctgaggaaggtgaaata

SEQ ID NO: 41381 - DNA, 22 bp, Artificial Sequence
  chemically synthesized
aggaaggtgaaatacgcatttt

SEQ ID NO: 41382 - DNA, 22 bp, Artificial Sequence
  chemically synthesized
tcaactgagcattcaggaagag

SEQ ID NO: 41383 - DNA, 22 bp, Artificial Sequence
  chemically synthesized
caactgagcattcaggaagagg

SEQ ID NO: 41384 - DNA, 22 bp, Artificial Sequence
  chemically synthesized
aactgagcattcaggaagaggc

SEQ ID NO: 41385 - DNA, 22 bp, Artificial Sequence
  chemically synthesized
agcattcaggaagaggcatggg

SEQ ID NO: 41386 - DNA, 22 bp, Artificial Sequence
  chemically synthesized
aggaagaggcatggggctgtga

SEQ ID NO: 41387 - DNA, 22 bp, Artificial Sequence
  chemically synthesized
tgaagatggatgcgatgagaat

SEQ ID NO: 41388 - DNA, 22 bp, Artificial Sequence
  chemically synthesized
gcaaacgtttgattctgataac

SEQ ID NO: 41389 - DNA, 22 bp, Artificial Sequence
  chemically synthesized
caaacgtttgattctgataaca

SEQ ID NO: 41390 - DNA, 22 bp, Artificial Sequence
  chemically synthesized
gattctgataacacctgccaga

SEQ ID NO: 41391 - DNA, 22 bp, Artificial Sequence
  chemically synthesized
attctgataacacctgccagag

SEQ ID NO: 41392 - DNA, 22 bp, Artificial Sequence
  chemically synthesized
tgataacacctgccagagcaga

SEQ ID NO: 41393 - DNA, 22 bp, Artificial Sequence
  chemically synthesized
ataacacctgccagagcagaga

SEQ ID NO: 41394 - DNA, 22 bp, Artificial Sequence
  chemically synthesized
ccagagcagagaagggcttgtc

SEQ ID NO: 41395 - DNA, 22 bp, Artificial Sequence
  chemically synthesized
gtctatcaaagccagcagaaca

SEQ ID NO: 41396 - DNA, 22 bp, Artificial Sequence
  chemically synthesized
tctatcaaagccagcagaacac

SEQ ID NO: 41397 - DNA, 22 bp, Artificial Sequence
  chemically synthesized
tcaaagccagcagaacacacaa

SEQ ID NO: 41398 - DNA, 22 bp, Artificial Sequence
  chemically synthesized
ccaaattactctgaagaccacc

SEQ ID NO: 41399 - DNA, 22 bp, Artificial Sequence
  chemically synthesized
ctctgaagaccaccccaagcct

SEQ ID NO: 41400 - DNA, 22 bp, Artificial Sequence
  chemically synthesized
tgaagaccaccccaagcctttt

SEQ ID NO: 41401 - DNA, 22 bp, Artificial Sequence
  chemically synthesized
aagaccaccccaagccttttta

SEQ ID NO: 41402 - DNA, 22 bp, Artificial Sequence
  chemically synthesized
tttatctgcatcaactcacaac

SEQ ID NO: 41403 - DNA, 22 bp, Artificial Sequence
  chemically synthesized
ttatctgcatcaactcacaaca

SEQ ID NO: 41404 - DNA, 22 bp, Artificial Sequence
  chemically synthesized
tatctgcatcaactcacaacaa

SEQ ID NO: 41405 - DNA, 22 bp, Artificial Sequence
  chemically synthesized
atctgcatcaactcacaacaaa

SEQ ID NO: 41406 - DNA, 22 bp, Artificial Sequence
  chemically synthesized
tctgcatcaactcacaacaaat

SEQ ID NO: 41407 - DNA, 22 bp, Artificial Sequence
  chemically synthesized
catcaactcacaacaaatgtgc

SEQ ID NO: 41408 - DNA, 22 bp, Artificial Sequence
  chemically synthesized
acaacaaatgtgctttatgcct

SEQ ID NO: 41409 - DNA, 22 bp, Artificial Sequence
  chemically synthesized
tatgcctctatattatcatttc

SEQ ID NO: 41410 - DNA, 22 bp, Artificial Sequence
  chemically synthesized
atgcctctatattatcatttcg

SEQ ID NO: 41411 - DNA, 22 bp, Artificial Sequence
  chemically synthesized
tgcctctatattatcatttcga

SEQ ID NO: 41412 - DNA, 22 bp, Artificial Sequence
  chemically synthesized
tatattatcatttcgatcggtc

SEQ ID NO: 41413 - DNA, 22 bp, Artificial Sequence
  chemically synthesized
tattatcatttcgatcggtctt

SEQ ID NO: 41414 - DNA, 22 bp, Artificial Sequence
  chemically synthesized
tcatttcgatcggtcttgagaa

SEQ ID NO: 41415 - DNA, 22 bp, Artificial Sequence
  chemically synthesized
cgatcggtcttgagaaaatact

SEQ ID NO: 41416 - DNA, 22 bp, Artificial Sequence
  chemically synthesized
gatcggtcttgagaaaatacta

SEQ ID NO: 41417 - DNA, 22 bp, Artificial Sequence
  chemically synthesized
gagaaaatactagaataagcta

SEQ ID NO: 41418 - DNA, 22 bp, Artificial Sequence
  chemically synthesized
agaaaatactagaataagctaa

SEQ ID NO: 41419 - DNA, 22 bp, Artificial Sequence
  chemically synthesized
gaataagctaaagaaaaccaaa

SEQ ID NO: 41420 - DNA, 22 bp, Artificial Sequence
  chemically synthesized
aagaaaaccaaacatgggtgga

SEQ ID NO: 41421 - DNA, 22 bp, Artificial Sequence
  chemically synthesized
ggagaaatgcctaatgtagatg

SEQ ID NO: 41422 - DNA, 22 bp, Artificial Sequence
  chemically synthesized
atgtagatgatgggttgatagg

SEQ ID NO: 41423 - DNA, 22 bp, Artificial Sequence
  chemically synthesized
ataggtgcagcaaaccaccatg

SEQ ID NO: 41424 - DNA, 22 bp, Artificial Sequence
  chemically synthesized
atgtaacaaacctgcacattct

SEQ ID NO: 41425 - DNA, 22 bp, Artificial Sequence
  chemically synthesized
tgtaacaaacctgcacattctg

SEQ ID NO: 41426 - DNA, 22 bp, Artificial Sequence
  chemically synthesized
cacattctgcacatgtatccca

SEQ ID NO: 41427 - DNA, 22 bp, Artificial Sequence
  chemically synthesized
tgcacatgtatcccagaactta

SEQ ID NO: 41428 - DNA, 22 bp, Artificial Sequence
  chemically synthesized
cacatgtatcccagaacttaga

SEQ ID NO: 41429 - DNA, 22 bp, Artificial Sequence
  chemically synthesized
agagtaaaataaataaagaaag

SEQ ID NO: 41430 - DNA, 22 bp, Artificial Sequence
  chemically synthesized
gagtaaaataaataaagaaaga

SEQ ID NO: 41431 - DNA, 22 bp, Artificial Sequence
  chemically synthesized
ccaagagactcctgatgttttg

SEQ ID NO: 41432 - DNA, 22 bp, Artificial Sequence
  chemically synthesized
caagagactcctgatgttttgt

SEQ ID NO: 41433 - DNA, 22 bp, Artificial Sequence
  chemically synthesized
ctgatgttttgttcgtgggcac

SEQ ID NO: 41434 - DNA, 22 bp, Artificial Sequence
  chemically synthesized
atgttttgttcgtgggcactgt

SEQ ID NO: 41435 - DNA, 22 bp, Artificial Sequence
  chemically synthesized
tgttcgtgggcactgtggaaac

SEQ ID NO: 41436 - DNA, 22 bp, Artificial Sequence
  chemically synthesized
gttcgtgggcactgtggaaaca

SEQ ID NO: 41437 - DNA, 22 bp, Artificial Sequence
  chemically synthesized
ttcgtgggcactgtggaaacag

SEQ ID NO: 41438 - DNA, 22 bp, Artificial Sequence
  chemically synthesized
gtgggcactgtggaaacagggg

SEQ ID NO: 41439 - DNA, 22 bp, Artificial Sequence
  chemically synthesized
tggaaacaggggcagtggtgct

SEQ ID NO: 41440 - DNA, 22 bp, Artificial Sequence
  chemically synthesized
tgagagacaagggagtggggag

SEQ ID NO: 41441 - DNA, 22 bp, Artificial Sequence
  chemically synthesized
cagcccggccaggtggagggct

SEQ ID NO: 41442 - DNA, 22 bp, Artificial Sequence
  chemically synthesized
tcctgacttatcatccaagact

SEQ ID NO: 41443 - DNA, 22 bp, Artificial Sequence
  chemically synthesized
cctgacttatcatccaagactg

SEQ ID NO: 41444 - DNA, 22 bp, Artificial Sequence
  chemically synthesized
ctgacttatcatccaagactgg

SEQ ID NO: 41445 - DNA, 22 bp, Artificial Sequence
  chemically synthesized
acttatcatccaagactggtct

SEQ ID NO: 41446 - DNA, 22 bp, Artificial Sequence
  chemically synthesized
atcatccaagactggtctgtgc

SEQ ID NO: 41447 - DNA, 22 bp, Artificial Sequence
  chemically synthesized
tcatccaagactggtctgtgca

SEQ ID NO: 41448 - DNA, 22 bp, Artificial Sequence
  chemically synthesized
gtctgtgcacggagaaggggcc

SEQ ID NO: 41449 - DNA, 22 bp, Artificial Sequence
  chemically synthesized
tgcacggagaaggggccagaag

SEQ ID NO: 41450 - DNA, 22 bp, Artificial Sequence
  chemically synthesized
tgtcaggcctcccccaaggcca

SEQ ID NO: 41451 - DNA, 22 bp, Artificial Sequence
  chemically synthesized
tcaggcctcccccaaggccaac

SEQ ID NO: 41452 - DNA, 22 bp, Artificial Sequence
  chemically synthesized
ccccaaggccaacaagcccaga

SEQ ID NO: 41453 - DNA, 22 bp, Artificial Sequence
  chemically synthesized
caactctagcccttcttaagga

SEQ ID NO: 41454 - DNA, 22 bp, Artificial Sequence
  chemically synthesized
tagcccttcttaaggaagcaca

SEQ ID NO: 41455 - DNA, 22 bp, Artificial Sequence
  chemically synthesized
gcccttcttaaggaagcacatc

SEQ ID NO: 41456 - DNA, 22 bp, Artificial Sequence
  chemically synthesized
cttaaggaagcacatctgtcct

SEQ ID NO: 41457 - DNA, 22 bp, Artificial Sequence
  chemically synthesized
ttaaggaagcacatctgtcctg

SEQ ID NO: 41458 - DNA, 22 bp, Artificial Sequence
  chemically synthesized
aaggaagcacatctgtcctggc

SEQ ID NO: 41459 - DNA, 22 bp, Artificial Sequence
  chemically synthesized
aggaagcacatctgtcctggcc

SEQ ID NO: 41460 - DNA, 22 bp, Artificial Sequence
  chemically synthesized
tcctggcctttatggaaagctt

SEQ ID NO: 41461 - DNA, 22 bp, Artificial Sequence
  chemically synthesized
gcctttatggaaagcttttttt

SEQ ID NO: 41462 - DNA, 22 bp, Artificial Sequence
  chemically synthesized
tatggaaagctttttttttttt

SEQ ID NO: 41463 - DNA, 22 bp, Artificial Sequence
  chemically synthesized
atggaaagcttttttttttttt

SEQ ID NO: 41464 - DNA, 22 bp, Artificial Sequence
  chemically synthesized
tggaaagctttttttttttttt

SEQ ID NO: 41465 - DNA, 22 bp, Artificial Sequence
  chemically synthesized
ttttttttttttttttaattga

SEQ ID NO: 41466 - DNA, 22 bp, Artificial Sequence
  chemically synthesized
tttttttttttttttaattgag

SEQ ID NO: 41467 - DNA, 22 bp, Artificial Sequence
  chemically synthesized
ttttttttttttttaattgaga

SEQ ID NO: 41468 - DNA, 22 bp, Artificial Sequence
  chemically synthesized
tttttttttttttaattgagac

SEQ ID NO: 41469 - DNA, 22 bp, Artificial Sequence
  chemically synthesized
ttttttttttttaattgagaca

SEQ ID NO: 41470 - DNA, 22 bp, Artificial Sequence
  chemically synthesized
tttttttttttaattgagacat

SEQ ID NO: 41471 - DNA, 22 bp, Artificial Sequence
  chemically synthesized
ttttttttttaattgagacatg

SEQ ID NO: 41472 - DNA, 22 bp, Artificial Sequence
  chemically synthesized
tttttttttaattgagacatgg

SEQ ID NO: 41473 - DNA, 22 bp, Artificial Sequence
  chemically synthesized
ttttttttaattgagacatggt

SEQ ID NO: 41474 - DNA, 22 bp, Artificial Sequence
  chemically synthesized
tttttttaattgagacatggtc

SEQ ID NO: 41475 - DNA, 22 bp, Artificial Sequence
  chemically synthesized
ttttttaattgagacatggtct

SEQ ID NO: 41476 - DNA, 22 bp, Artificial Sequence
  chemically synthesized
tttttaattgagacatggtctc

SEQ ID NO: 41477 - DNA, 22 bp, Artificial Sequence
  chemically synthesized
ttttaattgagacatggtctca

SEQ ID NO: 41478 - DNA, 22 bp, Artificial Sequence
  chemically synthesized
tttaattgagacatggtctcac

SEQ ID NO: 41479 - DNA, 22 bp, Artificial Sequence
  chemically synthesized
ttaattgagacatggtctcact

SEQ ID NO: 41480 - DNA, 22 bp, Artificial Sequence
  chemically synthesized
taattgagacatggtctcactc

SEQ ID NO: 41481 - DNA, 22 bp, Artificial Sequence
  chemically synthesized
aattgagacatggtctcactct

SEQ ID NO: 41482 - DNA, 22 bp, Artificial Sequence
  chemically synthesized
attgagacatggtctcactctg

SEQ ID NO: 41483 - DNA, 22 bp, Artificial Sequence
  chemically synthesized
agacatggtctcactctgttgc

SEQ ID NO: 41484 - DNA, 22 bp, Artificial Sequence
  chemically synthesized
actctgttgcccaggctggagt

SEQ ID NO: 41485 - DNA, 22 bp, Artificial Sequence
  chemically synthesized
tgttgcccaggctggagtgcag

SEQ ID NO: 41486 - DNA, 22 bp, Artificial Sequence
  chemically synthesized
ttgcccaggctggagtgcagtg

SEQ ID NO: 41487 - DNA, 22 bp, Artificial Sequence
  chemically synthesized
cccaggctggagtgcagtggtg

SEQ ID NO: 41488 - DNA, 22 bp, Artificial Sequence
  chemically synthesized
gagtgcagtggtgcaatcttgg

SEQ ID NO: 41489 - DNA, 22 bp, Artificial Sequence
  chemically synthesized
ggctcactgcaacctccgcctc

SEQ ID NO: 41490 - DNA, 22 bp, Artificial Sequence
  chemically synthesized
gctcactgcaacctccgcctcc

SEQ ID NO: 41491 - DNA, 22 bp, Artificial Sequence
  chemically synthesized
actgcaacctccgcctcccgag

SEQ ID NO: 41492 - DNA, 22 bp, Artificial Sequence
  chemically synthesized
caacctccgcctcccgagttca

SEQ ID NO: 41493 - DNA, 22 bp, Artificial Sequence
  chemically synthesized
cgcctcccgagttcaagcagtc

SEQ ID NO: 41494 - DNA, 22 bp, Artificial Sequence
  chemically synthesized
ccgagttcaagcagtcctcctg

SEQ ID NO: 41495 - DNA, 22 bp, Artificial Sequence
  chemically synthesized
aagcagtcctcctgcctcagct

SEQ ID NO: 41496 - DNA, 22 bp, Artificial Sequence
  chemically synthesized
ctgcctcagctctcaagtagct

SEQ ID NO: 41497 - DNA, 22 bp, Artificial Sequence
  chemically synthesized
cctcagctctcaagtagctagg

SEQ ID NO: 41498 - DNA, 22 bp, Artificial Sequence
  chemically synthesized
agctctcaagtagctaggacta

SEQ ID NO: 41499 - DNA, 22 bp, Artificial Sequence
  chemically synthesized
tcaagtagctaggactacaggc

SEQ ID NO: 41500 - DNA, 22 bp, Artificial Sequence
  chemically synthesized
aagtagctaggactacaggcat

SEQ ID NO: 41501 - DNA, 22 bp, Artificial Sequence
  chemically synthesized
ggactacaggcatgcgccacca

SEQ ID NO: 41502 - DNA, 22 bp, Artificial Sequence
  chemically synthesized
caggcatgcgccaccaccacac

SEQ ID NO: 41503 - DNA, 22 bp, Artificial Sequence
  chemically synthesized
gctaatttttgtattttttgta

SEQ ID NO: 41504 - DNA, 22 bp, Artificial Sequence
  chemically synthesized
atttttgtattttttgtagaga

SEQ ID NO: 41505 - DNA, 22 bp, Artificial Sequence
  chemically synthesized
ttgtattttttgtagagatggg

SEQ ID NO: 41506 - DNA, 22 bp, Artificial Sequence
  chemically synthesized
tgtattttttgtagagatggga

SEQ ID NO: 41507 - DNA, 22 bp, Artificial Sequence
  chemically synthesized
gtattttttgtagagatgggat

SEQ ID NO: 41508 - DNA, 22 bp, Artificial Sequence
  chemically synthesized
tattttttgtagagatgggatc

SEQ ID NO: 41509 - DNA, 22 bp, Artificial Sequence
  chemically synthesized
tttgtagagatgggatctcacc

SEQ ID NO: 41510 - DNA, 22 bp, Artificial Sequence
  chemically synthesized
ttgtagagatgggatctcacca

SEQ ID NO: 41511 - DNA, 22 bp, Artificial Sequence
  chemically synthesized
tgtagagatgggatctcaccat

SEQ ID NO: 41512 - DNA, 22 bp, Artificial Sequence
  chemically synthesized
gtagagatgggatctcaccatg

SEQ ID NO: 41513 - DNA, 22 bp, Artificial Sequence
  chemically synthesized
tagagatgggatctcaccatgt

SEQ ID NO: 41514 - DNA, 22 bp, Artificial Sequence
  chemically synthesized
accatgttgcccaggctgggtg

SEQ ID NO: 41515 - DNA, 22 bp, Artificial Sequence
  chemically synthesized
cccaggctgggtggaaagtgtt

SEQ ID NO: 41516 - DNA, 22 bp, Artificial Sequence
  chemically synthesized
ggtggaaagtgttatgttcttc

SEQ ID NO: 41517 - DNA, 22 bp, Artificial Sequence
  chemically synthesized
tgttcttcccaaagtactctcc

SEQ ID NO: 41518 - DNA, 22 bp, Artificial Sequence
  chemically synthesized
ttcccaaagtactctcctcaca

SEQ ID NO: 41519 - DNA, 22 bp, Artificial Sequence
  chemically synthesized
cccaaagtactctcctcacatc

SEQ ID NO: 41520 - DNA, 22 bp, Artificial Sequence
  chemically synthesized
ccaaagtactctcctcacatcc

SEQ ID NO: 41521 - DNA, 22 bp, Artificial Sequence
  chemically synthesized
tcctcacatcctgccccaacag

SEQ ID NO: 41522 - DNA, 22 bp, Artificial Sequence
  chemically synthesized
ctcacatcctgccccaacagtc

SEQ ID NO: 41523 - DNA, 22 bp, Artificial Sequence
  chemically synthesized
acatcctgccccaacagtcgcc

SEQ ID NO: 41524 - DNA, 22 bp, Artificial Sequence
  chemically synthesized
ccccaacagtcgccctgtggaa

SEQ ID NO: 41525 - DNA, 22 bp, Artificial Sequence
  chemically synthesized
tggaatgagggaaggtattagc

SEQ ID NO: 41526 - DNA, 22 bp, Artificial Sequence
  chemically synthesized
gcctcacctcccagtgaggaac

SEQ ID NO: 41527 - DNA, 22 bp, Artificial Sequence
  chemically synthesized
acctcccagtgaggaactcgaa

SEQ ID NO: 41528 - DNA, 22 bp, Artificial Sequence
  chemically synthesized
ccagtgaggaactcgaagatct

SEQ ID NO: 41529 - DNA, 22 bp, Artificial Sequence
  chemically synthesized
gaagatctcagaagtgtcctgc

SEQ ID NO: 41530 - DNA, 22 bp, Artificial Sequence
  chemically synthesized
agaagtgtcctgctgtggacag

SEQ ID NO: 41531 - DNA, 22 bp, Artificial Sequence
  chemically synthesized
ctgtggacagggaggacagggc

SEQ ID NO: 41532 - DNA, 22 bp, Artificial Sequence
  chemically synthesized
tggacagggaggacagggctgg

SEQ ID NO: 41533 - DNA, 22 bp, Artificial Sequence
  chemically synthesized
ggcttcaggaccctgcccacct

SEQ ID NO: 41534 - DNA, 22 bp, Artificial Sequence
  chemically synthesized
caggaccctgcccaccttctga

SEQ ID NO: 41535 - DNA, 22 bp, Artificial Sequence
  chemically synthesized
aggaccctgcccaccttctgac

SEQ ID NO: 41536 - DNA, 22 bp, Artificial Sequence
  chemically synthesized
cccaccttctgacaaacccctc

SEQ ID NO: 41537 - DNA, 22 bp, Artificial Sequence
  chemically synthesized
ctgacaaacccctcccactgcc

SEQ ID NO: 41538 - DNA, 22 bp, Artificial Sequence
  chemically synthesized
tgacaaacccctcccactgcca

SEQ ID NO: 41539 - DNA, 22 bp, Artificial Sequence
  chemically synthesized
acaaacccctcccactgccacc

SEQ ID NO: 41540 - DNA, 22 bp, Artificial Sequence
  chemically synthesized
ccactgccacctcagggccgcg

SEQ ID NO: 41541 - DNA, 22 bp, Artificial Sequence
  chemically synthesized
ccacctcagggccgcggcagaa

SEQ ID NO: 41542 - DNA, 22 bp, Artificial Sequence
  chemically synthesized
agggccgcggcagaaacctgtc

SEQ ID NO: 41543 - DNA, 22 bp, Artificial Sequence
  chemically synthesized
tcgtctggacactggtcataca

SEQ ID NO: 41544 - DNA, 22 bp, Artificial Sequence
  chemically synthesized
gacactggtcatacagcccctt

SEQ ID NO: 41545 - DNA, 22 bp, Artificial Sequence
  chemically synthesized
gtcatacagcccctttcaggca

SEQ ID NO: 41546 - DNA, 22 bp, Artificial Sequence
  chemically synthesized
tcaggcaatctcctcacttgcc

SEQ ID NO: 41547 - DNA, 22 bp, Artificial Sequence
  chemically synthesized
caggcaatctcctcacttgcct

SEQ ID NO: 41548 - DNA, 22 bp, Artificial Sequence
  chemically synthesized
aggcaatctcctcacttgcctt

SEQ ID NO: 41549 - DNA, 22 bp, Artificial Sequence
  chemically synthesized
ctcacttgcctttctggcacta

SEQ ID NO: 41550 - DNA, 22 bp, Artificial Sequence
  chemically synthesized
acttgcctttctggcactattg

SEQ ID NO: 41551 - DNA, 22 bp, Artificial Sequence
  chemically synthesized
gcctttctggcactattgagtg

SEQ ID NO: 41552 - DNA, 22 bp, Artificial Sequence
  chemically synthesized
cctttctggcactattgagtga

SEQ ID NO: 41553 - DNA, 22 bp, Artificial Sequence
  chemically synthesized
tctggcactattgagtgactgg

SEQ ID NO: 41554 - DNA, 22 bp, Artificial Sequence
  chemically synthesized
ctggcactattgagtgactggt

SEQ ID NO: 41555 - DNA, 22 bp, Artificial Sequence
  chemically synthesized
tggcactattgagtgactggtg

SEQ ID NO: 41556 - DNA, 22 bp, Artificial Sequence
  chemically synthesized
gcactattgagtgactggtgtg

SEQ ID NO: 41557 - DNA, 22 bp, Artificial Sequence
  chemically synthesized
ttgagtgactggtgtgtggact

SEQ ID NO: 41558 - DNA, 22 bp, Artificial Sequence
  chemically synthesized
agtgactggtgtgtggacttca

SEQ ID NO: 41559 - DNA, 22 bp, Artificial Sequence
  chemically synthesized
gtgtgtggacttcaggggaagc

SEQ ID NO: 41560 - DNA, 22 bp, Artificial Sequence
  chemically synthesized
caggggaagcgtggaaggcact

SEQ ID NO: 41561 - DNA, 22 bp, Artificial Sequence
  chemically synthesized
aggggaagcgtggaaggcactt

SEQ ID NO: 41562 - DNA, 22 bp, Artificial Sequence
  chemically synthesized
cacaggcctaatactctgtgac

SEQ ID NO: 41563 - DNA, 22 bp, Artificial Sequence
  chemically synthesized
acaggcctaatactctgtgaca

SEQ ID NO: 41564 - DNA, 22 bp, Artificial Sequence
  chemically synthesized
atactctgtgacagtcttggcc

SEQ ID NO: 41565 - DNA, 22 bp, Artificial Sequence
  chemically synthesized
tgtgacagtcttggccaagaga

SEQ ID NO: 41566 - DNA, 22 bp, Artificial Sequence
  chemically synthesized
tgacagtcttggccaagagatt

SEQ ID NO: 41567 - DNA, 22 bp, Artificial Sequence
  chemically synthesized
ggccaagagattctgagaacca

SEQ ID NO: 41568 - DNA, 22 bp, Artificial Sequence
  chemically synthesized
gccaagagattctgagaaccag

SEQ ID NO: 41569 - DNA, 22 bp, Artificial Sequence
  chemically synthesized
tgagaaccagaactggccattc

SEQ ID NO: 41570 - DNA, 22 bp, Artificial Sequence
  chemically synthesized
agaaccagaactggccattctc

SEQ ID NO: 41571 - DNA, 22 bp, Artificial Sequence
  chemically synthesized
gccattctccagaattaaaacc

SEQ ID NO: 41572 - DNA, 22 bp, Artificial Sequence
  chemically synthesized
tccagaattaaaacctattatg

SEQ ID NO: 41573 - DNA, 22 bp, Artificial Sequence
  chemically synthesized
cagaattaaaacctattatgtc

SEQ ID NO: 41574 - DNA, 22 bp, Artificial Sequence
  chemically synthesized
aaacctattatgtcctatggtt

SEQ ID NO: 41575 - DNA, 22 bp, Artificial Sequence
  chemically synthesized
ttatgtcctatggttaacacag

SEQ ID NO: 41576 - DNA, 22 bp, Artificial Sequence
  chemically synthesized
tgtcctatggttaacacagagc

SEQ ID NO: 41577 - DNA, 22 bp, Artificial Sequence
  chemically synthesized
tggttaacacagagctgctcag

SEQ ID NO: 41578 - DNA, 22 bp, Artificial Sequence
  chemically synthesized
acacagagctgctcagaaatta

SEQ ID NO: 41579 - DNA, 22 bp, Artificial Sequence
  chemically synthesized
ctcagaaattatgagaactaat

SEQ ID NO: 41580 - DNA, 22 bp, Artificial Sequence
  chemically synthesized
agaaattatgagaactaattta

SEQ ID NO: 41581 - DNA, 22 bp, Artificial Sequence
  chemically synthesized
tgagaactaatttaaggcttca

SEQ ID NO: 41582 - DNA, 22 bp, Artificial Sequence
  chemically synthesized
atttaaggcttcaaagctctac

SEQ ID NO: 41583 - DNA, 22 bp, Artificial Sequence
  chemically synthesized
aaggcttcaaagctctaccaaa

SEQ ID NO: 41584 - DNA, 22 bp, Artificial Sequence
  chemically synthesized
aggcttcaaagctctaccaaaa

SEQ ID NO: 41585 - DNA, 22 bp, Artificial Sequence
  chemically synthesized
caaagctctaccaaaaaaaatg

SEQ ID NO: 41586 - DNA, 22 bp, Artificial Sequence
  chemically synthesized
aaagctctaccaaaaaaaatgg

SEQ ID NO: 41587 - DNA, 22 bp, Artificial Sequence
  chemically synthesized
taccaaaaaaaatggtctagca

SEQ ID NO: 41588 - DNA, 22 bp, Artificial Sequence
  chemically synthesized
ccaaaaaaaatggtctagcagg

SEQ ID NO: 41589 - DNA, 22 bp, Artificial Sequence
  chemically synthesized
gcaggtcaggctctaacatttc

SEQ ID NO: 41590 - DNA, 22 bp, Artificial Sequence
  chemically synthesized
taacatttcttcaggaataaaa

SEQ ID NO: 41591 - DNA, 22 bp, Artificial Sequence
  chemically synthesized
acatttcttcaggaataaaact

SEQ ID NO: 41592 - DNA, 22 bp, Artificial Sequence
  chemically synthesized
cttcaggaataaaactaggctg

SEQ ID NO: 41593 - DNA, 22 bp, Artificial Sequence
  chemically synthesized
ttcaggaataaaactaggctgc

SEQ ID NO: 41594 - DNA, 22 bp, Artificial Sequence
  chemically synthesized
caggaataaaactaggctgccc

SEQ ID NO: 41595 - DNA, 22 bp, Artificial Sequence
  chemically synthesized
aggaataaaactaggctgccct

SEQ ID NO: 41596 - DNA, 22 bp, Artificial Sequence
  chemically synthesized
ggctgccctctcgcctgaggtg

SEQ ID NO: 41597 - DNA, 22 bp, Artificial Sequence
  chemically synthesized
ccctctcgcctgaggtgaggct

SEQ ID NO: 41598 - DNA, 22 bp, Artificial Sequence
  chemically synthesized
tcgcctgaggtgaggctgaatg

SEQ ID NO: 41599 - DNA, 22 bp, Artificial Sequence
  chemically synthesized
gcctgaggtgaggctgaatgaa

SEQ ID NO: 41600 - DNA, 22 bp, Artificial Sequence
  chemically synthesized
aggtgaggctgaatgaaggagc

SEQ ID NO: 41601 - DNA, 22 bp, Artificial Sequence
  chemically synthesized
aatgaaggagcgctctggtgct

SEQ ID NO: 41602 - DNA, 22 bp, Artificial Sequence
  chemically synthesized
tggtgctgcgaggccaggcctc

SEQ ID NO: 41603 - DNA, 22 bp, Artificial Sequence
  chemically synthesized
gtgctgcgaggccaggcctcct

SEQ ID NO: 41604 - DNA, 22 bp, Artificial Sequence
  chemically synthesized
cgaggccaggcctcctcccatg

SEQ ID NO: 41605 - DNA, 22 bp, Artificial Sequence
  chemically synthesized
ctcccatgacggcaagtccttc

SEQ ID NO: 41606 - DNA, 22 bp, Artificial Sequence
  chemically synthesized
ccatgacggcaagtccttcttt

SEQ ID NO: 41607 - DNA, 22 bp, Artificial Sequence
  chemically synthesized
ctttcagaaaacaggcctctgc

SEQ ID NO: 41608 - DNA, 22 bp, Artificial Sequence
  chemically synthesized
tttcagaaaacaggcctctgcc

SEQ ID NO: 41609 - DNA, 22 bp, Artificial Sequence
  chemically synthesized
tcagaaaacaggcctctgcccg

SEQ ID NO: 41610 - DNA, 22 bp, Artificial Sequence
  chemically synthesized
cagaaaacaggcctctgcccgg

SEQ ID NO: 41611 - DNA, 22 bp, Artificial Sequence
  chemically synthesized
agaaaacaggcctctgcccggg

SEQ ID NO: 41612 - DNA, 22 bp, Artificial Sequence
  chemically synthesized
tgcccggggcatgctgcagctg

SEQ ID NO: 41613 - DNA, 22 bp, Artificial Sequence
  chemically synthesized
cccggggcatgctgcagctgct

SEQ ID NO: 41614 - DNA, 22 bp, Artificial Sequence
  chemically synthesized
cagctgcttctctgcagtgcct

SEQ ID NO: 41615 - DNA, 22 bp, Artificial Sequence
  chemically synthesized
cttctctgcagtgcctcagcac

SEQ ID NO: 41616 - DNA, 22 bp, Artificial Sequence
  chemically synthesized
ctctgcagtgcctcagcacctt

SEQ ID NO: 41617 - DNA, 22 bp, Artificial Sequence
  chemically synthesized
tctgcagtgcctcagcaccttc

SEQ ID NO: 41618 - DNA, 22 bp, Artificial Sequence
  chemically synthesized
tgcagtgcctcagcaccttccc

SEQ ID NO: 41619 - DNA, 22 bp, Artificial Sequence
  chemically synthesized
cagtgcctcagcaccttcccgc

SEQ ID NO: 41620 - DNA, 22 bp, Artificial Sequence
  chemically synthesized
agcaccttcccgcctcccaggc

SEQ ID NO: 41621 - DNA, 22 bp, Artificial Sequence
  chemically synthesized
cccgcctcccaggcacacagca

SEQ ID NO: 41622 - DNA, 22 bp, Artificial Sequence
  chemically synthesized
ccgcctcccaggcacacagcag

SEQ ID NO: 41623 - DNA, 22 bp, Artificial Sequence
  chemically synthesized
ccaggcacacagcagcccagcc

SEQ ID NO: 41624 - DNA, 22 bp, Artificial Sequence
  chemically synthesized
agtcctcatctctctggcaaag

SEQ ID NO: 41625 - DNA, 22 bp, Artificial Sequence
  chemically synthesized
atctctctggcaaagtcccaca

SEQ ID NO: 41626 - DNA, 22 bp, Artificial Sequence
  chemically synthesized
tctggcaaagtcccacagaaca

SEQ ID NO: 41627 - DNA, 22 bp, Artificial Sequence
  chemically synthesized
tggcaaagtcccacagaacaaa

SEQ ID NO: 41628 - DNA, 22 bp, Artificial Sequence
  chemically synthesized
gcaaagtcccacagaacaaaac

SEQ ID NO: 41629 - DNA, 22 bp, Artificial Sequence
  chemically synthesized
ggctttgacgtgctttgttttt

SEQ ID NO: 41630 - DNA, 22 bp, Artificial Sequence
  chemically synthesized
gctttgacgtgctttgtttttt

SEQ ID NO: 41631 - DNA, 22 bp, Artificial Sequence
  chemically synthesized
tgacgtgctttgttttttgttt

SEQ ID NO: 41632 - DNA, 22 bp, Artificial Sequence
  chemically synthesized
gacgtgctttgttttttgtttt

SEQ ID NO: 41633 - DNA, 22 bp, Artificial Sequence
  chemically synthesized
acgtgctttgttttttgttttt

SEQ ID NO: 41634 - DNA, 22 bp, Artificial Sequence
  chemically synthesized
tgttttttgttttttttttttc

SEQ ID NO: 41635 - DNA, 22 bp, Artificial Sequence
  chemically synthesized
gttttttgttttttttttttcc

SEQ ID NO: 41636 - DNA, 22 bp, Artificial Sequence
  chemically synthesized
ttttttgttttttttttttccc

SEQ ID NO: 41637 - DNA, 22 bp, Artificial Sequence
  chemically synthesized
tttgttttttttttttccctcc

SEQ ID NO: 41638 - DNA, 22 bp, Artificial Sequence
  chemically synthesized
ttgttttttttttttccctcct

SEQ ID NO: 41639 - DNA, 22 bp, Artificial Sequence
  chemically synthesized
tgttttttttttttccctcctc

SEQ ID NO: 41640 - DNA, 22 bp, Artificial Sequence
  chemically synthesized
gttttttttttttccctcctcc

SEQ ID NO: 41641 - DNA, 22 bp, Artificial Sequence
  chemically synthesized
ttttttttttttccctcctccc

SEQ ID NO: 41642 - DNA, 22 bp, Artificial Sequence
  chemically synthesized
tttttttttccctcctccctgg

SEQ ID NO: 41643 - DNA, 22 bp, Artificial Sequence
  chemically synthesized
ttttttttccctcctccctggc

SEQ ID NO: 41644 - DNA, 22 bp, Artificial Sequence
  chemically synthesized
tttttttccctcctccctggct

SEQ ID NO: 41645 - DNA, 22 bp, Artificial Sequence
  chemically synthesized
ttttttccctcctccctggctt

SEQ ID NO: 41646 - DNA, 22 bp, Artificial Sequence
  chemically synthesized
tttttccctcctccctggcttt

SEQ ID NO: 41647 - DNA, 22 bp, Artificial Sequence
  chemically synthesized
ttttccctcctccctggctttt

SEQ ID NO: 41648 - DNA, 22 bp, Artificial Sequence
  chemically synthesized
tttccctcctccctggcttttt

SEQ ID NO: 41649 - DNA, 22 bp, Artificial Sequence
  chemically synthesized
ttccctcctccctggcttttta

SEQ ID NO: 41650 - DNA, 22 bp, Artificial Sequence
  chemically synthesized
tccctcctccctggctttttac

SEQ ID NO: 41651 - DNA, 22 bp, Artificial Sequence
  chemically synthesized
ccctcctccctggctttttacc

SEQ ID NO: 41652 - DNA, 22 bp, Artificial Sequence
  chemically synthesized
cctcctccctggctttttaccc

SEQ ID NO: 41653 - DNA, 22 bp, Artificial Sequence
  chemically synthesized
ctccctggctttttacccaatt

SEQ ID NO: 41654 - DNA, 22 bp, Artificial Sequence
  chemically synthesized
cctggctttttacccaatttcc

SEQ ID NO: 41655 - DNA, 22 bp, Artificial Sequence
  chemically synthesized
gctttttacccaatttcctaat

SEQ ID NO: 41656 - DNA, 22 bp, Artificial Sequence
  chemically synthesized
tttacccaatttcctaatcctt

SEQ ID NO: 41657 - DNA, 22 bp, Artificial Sequence
  chemically synthesized
ttacccaatttcctaatccttc

SEQ ID NO: 41658 - DNA, 22 bp, Artificial Sequence
  chemically synthesized
tacccaatttcctaatccttca

SEQ ID NO: 41659 - DNA, 22 bp, Artificial Sequence
  chemically synthesized
acccaatttcctaatccttcat

SEQ ID NO: 41660 - DNA, 22 bp, Artificial Sequence
  chemically synthesized
cccaatttcctaatccttcatt

SEQ ID NO: 41661 - DNA, 22 bp, Artificial Sequence
  chemically synthesized
cctaatccttcatttataccac

SEQ ID NO: 41662 - DNA, 22 bp, Artificial Sequence
  chemically synthesized
ctaatccttcatttataccact

SEQ ID NO: 41663 - DNA, 22 bp, Artificial Sequence
  chemically synthesized
atccttcatttataccactgac

SEQ ID NO: 41664 - DNA, 22 bp, Artificial Sequence
  chemically synthesized
catttataccactgaccaatct

SEQ ID NO: 41665 - DNA, 22 bp, Artificial Sequence
  chemically synthesized
atttataccactgaccaatctg

SEQ ID NO: 41666 - DNA, 22 bp, Artificial Sequence
  chemically synthesized
ataccactgaccaatctggaaa

SEQ ID NO: 41667 - DNA, 22 bp, Artificial Sequence
  chemically synthesized
taccactgaccaatctggaaag

SEQ ID NO: 41668 - DNA, 22 bp, Artificial Sequence
  chemically synthesized
accaatctggaaagagttccct

SEQ ID NO: 41669 - DNA, 22 bp, Artificial Sequence
  chemically synthesized
gaaagagttccctgagcaaatt

SEQ ID NO: 41670 - DNA, 22 bp, Artificial Sequence
  chemically synthesized
cctgagcaaattggagatgccc

SEQ ID NO: 41671 - DNA, 22 bp, Artificial Sequence
  chemically synthesized
agcaaattggagatgcccgcag

SEQ ID NO: 41672 - DNA, 22 bp, Artificial Sequence
  chemically synthesized
gagatgcccgcagatacaacct

SEQ ID NO: 41673 - DNA, 22 bp, Artificial Sequence
  chemically synthesized
ccatcattggagcagcctcagt

SEQ ID NO: 41674 - DNA, 22 bp, Artificial Sequence
  chemically synthesized
gagcagcctcagtccagccatg

SEQ ID NO: 41675 - DNA, 22 bp, Artificial Sequence
  chemically synthesized
agtccagccatggggtgtggca

SEQ ID NO: 41676 - DNA, 22 bp, Artificial Sequence
  chemically synthesized
ccgtctgttcttggctctacta

SEQ ID NO: 41677 - DNA, 22 bp, Artificial Sequence
  chemically synthesized
ttcttggctctactaattctgc

SEQ ID NO: 41678 - DNA, 22 bp, Artificial Sequence
  chemically synthesized
ttggctctactaattctgctga

SEQ ID NO: 41679 - DNA, 22 bp, Artificial Sequence
  chemically synthesized
ggctctactaattctgctgatt

SEQ ID NO: 41680 - DNA, 22 bp, Artificial Sequence
  chemically synthesized
gctctactaattctgctgattc

SEQ ID NO: 41681 - DNA, 22 bp, Artificial Sequence
  chemically synthesized
tactaattctgctgattccata

SEQ ID NO: 41682 - DNA, 22 bp, Artificial Sequence
  chemically synthesized
ctaattctgctgattccatatg

SEQ ID NO: 41683 - DNA, 22 bp, Artificial Sequence
  chemically synthesized
attctgctgattccatatgagt

SEQ ID NO: 41684 - DNA, 22 bp, Artificial Sequence
  chemically synthesized
tgctgattccatatgagtaaca

SEQ ID NO: 41685 - DNA, 22 bp, Artificial Sequence
  chemically synthesized
ctgattccatatgagtaacatc

SEQ ID NO: 41686 - DNA, 22 bp, Artificial Sequence
  chemically synthesized
attccatatgagtaacatccaa

SEQ ID NO: 41687 - DNA, 22 bp, Artificial Sequence
  chemically synthesized
catatgagtaacatccaatgtt

SEQ ID NO: 41688 - DNA, 22 bp, Artificial Sequence
  chemically synthesized
ccagacacctccaagctcctcc

SEQ ID NO: 41689 - DNA, 22 bp, Artificial Sequence
  chemically synthesized
caagctcctccaaccaacagca

SEQ ID NO: 41690 - DNA, 22 bp, Artificial Sequence
  chemically synthesized
ctccaaccaacagcacaacatc

SEQ ID NO: 41691 - DNA, 22 bp, Artificial Sequence
  chemically synthesized
caaccaacagcacaacatcttc

SEQ ID NO: 41692 - DNA, 22 bp, Artificial Sequence
  chemically synthesized
caactcctttctacccacctag

SEQ ID NO: 41693 - DNA, 22 bp, Artificial Sequence
  chemically synthesized
aactcctttctacccacctagc

SEQ ID NO: 41694 - DNA, 22 bp, Artificial Sequence
  chemically synthesized
ctttctacccacctagcaggtc

SEQ ID NO: 41695 - DNA, 22 bp, Artificial Sequence
  chemically synthesized
tctacccacctagcaggtccac

SEQ ID NO: 41696 - DNA, 22 bp, Artificial Sequence
  chemically synthesized
ctacccacctagcaggtccacg

SEQ ID NO: 41697 - DNA, 22 bp, Artificial Sequence
  chemically synthesized
tacccacctagcaggtccacgt

SEQ ID NO: 41698 - DNA, 22 bp, Artificial Sequence
  chemically synthesized
cccacctagcaggtccacgtgg

SEQ ID NO: 41699 - DNA, 22 bp, Artificial Sequence
  chemically synthesized
gcaggtccacgtggggactcag

SEQ ID NO: 41700 - DNA, 22 bp, Artificial Sequence
  chemically synthesized
agcctatggacacctggcctct

SEQ ID NO: 41701 - DNA, 22 bp, Artificial Sequence
  chemically synthesized
tggacacctggcctctgcgggc

SEQ ID NO: 41702 - DNA, 22 bp, Artificial Sequence
  chemically synthesized
gcctctgcgggcacagcggcca

SEQ ID NO: 41703 - DNA, 22 bp, Artificial Sequence
  chemically synthesized
tgcgggcacagcggccacacac

SEQ ID NO: 41704 - DNA, 22 bp, Artificial Sequence
  chemically synthesized
cgggcacagcggccacacacca

SEQ ID NO: 41705 - DNA, 22 bp, Artificial Sequence
  chemically synthesized
tttgttttgagtctctctaaga

SEQ ID NO: 41706 - DNA, 22 bp, Artificial Sequence
  chemically synthesized
ttgttttgagtctctctaagac

SEQ ID NO: 41707 - DNA, 22 bp, Artificial Sequence
  chemically synthesized
tgttttgagtctctctaagact

SEQ ID NO: 41708 - DNA, 22 bp, Artificial Sequence
  chemically synthesized
gttttgagtctctctaagactg

SEQ ID NO: 41709 - DNA, 22 bp, Artificial Sequence
  chemically synthesized
ttttgagtctctctaagactgc

SEQ ID NO: 41710 - DNA, 22 bp, Artificial Sequence
  chemically synthesized
tgagtctctctaagactgcttg

SEQ ID NO: 41711 - DNA, 22 bp, Artificial Sequence
  chemically synthesized
gagtctctctaagactgcttgg

SEQ ID NO: 41712 - DNA, 22 bp, Artificial Sequence
  chemically synthesized
agtctctctaagactgcttggg

SEQ ID NO: 41713 - DNA, 22 bp, Artificial Sequence
  chemically synthesized
tctaagactgcttgggaaatga

SEQ ID NO: 41714 - DNA, 22 bp, Artificial Sequence
  chemically synthesized
taagactgcttgggaaatgagg

SEQ ID NO: 41715 - DNA, 22 bp, Artificial Sequence
  chemically synthesized
agactgcttgggaaatgaggtc

SEQ ID NO: 41716 - DNA, 22 bp, Artificial Sequence
  chemically synthesized
cttgggaaatgaggtctctcag

SEQ ID NO: 41717 - DNA, 22 bp, Artificial Sequence
  chemically synthesized
gggaaatgaggtctctcaggtc

SEQ ID NO: 41718 - DNA, 22 bp, Artificial Sequence
  chemically synthesized
ggaaatgaggtctctcaggtct

SEQ ID NO: 41719 - DNA, 22 bp, Artificial Sequence
  chemically synthesized
tcaggtctagcatttccacgca

SEQ ID NO: 41720 - DNA, 22 bp, Artificial Sequence
  chemically synthesized
aggtctagcatttccacgcagt

SEQ ID NO: 41721 - DNA, 22 bp, Artificial Sequence
  chemically synthesized
gcatttccacgcagtcccaacc

SEQ ID NO: 41722 - DNA, 22 bp, Artificial Sequence
  chemically synthesized
ccacgcagtcccaaccatgagg

SEQ ID NO: 41723 - DNA, 22 bp, Artificial Sequence
  chemically synthesized
cacgcagtcccaaccatgaggc

SEQ ID NO: 41724 - DNA, 22 bp, Artificial Sequence
  chemically synthesized
accagaggccaccaacgtcaag

SEQ ID NO: 41725 - DNA, 22 bp, Artificial Sequence
  chemically synthesized
tctcaggtctactaggaacagg

SEQ ID NO: 41726 - DNA, 22 bp, Artificial Sequence
  chemically synthesized
tcaggtctactaggaacaggaa

SEQ ID NO: 41727 - DNA, 22 bp, Artificial Sequence
  chemically synthesized
aggtctactaggaacaggaaag

SEQ ID NO: 41728 - DNA, 22 bp, Artificial Sequence
  chemically synthesized
ctaggaacaggaaagaataact

SEQ ID NO: 41729 - DNA, 22 bp, Artificial Sequence
  chemically synthesized
ggaacaggaaagaataactctc

SEQ ID NO: 41730 - DNA, 22 bp, Artificial Sequence
  chemically synthesized
tcccttaacaagcccctcaggc

SEQ ID NO: 41731 - DNA, 22 bp, Artificial Sequence
  chemically synthesized
ccttaacaagcccctcaggctg

SEQ ID NO: 41732 - DNA, 22 bp, Artificial Sequence
  chemically synthesized
aacaagcccctcaggctgaaat

SEQ ID NO: 41733 - DNA, 22 bp, Artificial Sequence
  chemically synthesized
acaagcccctcaggctgaaatc

SEQ ID NO: 41734 - DNA, 22 bp, Artificial Sequence
  chemically synthesized
aggctgaaatccttttgcttcc

SEQ ID NO: 41735 - DNA, 22 bp, Artificial Sequence
  chemically synthesized
aaatccttttgcttccagggcc

SEQ ID NO: 41736 - DNA, 22 bp, Artificial Sequence
  chemically synthesized
ttgcttccagggcctcaacctt

SEQ ID NO: 41737 - DNA, 22 bp, Artificial Sequence
  chemically synthesized
tgcttccagggcctcaaccttc

SEQ ID NO: 41738 - DNA, 22 bp, Artificial Sequence
  chemically synthesized
gcttccagggcctcaaccttct

SEQ ID NO: 41739 - DNA, 22 bp, Artificial Sequence
  chemically synthesized
cttccagggcctcaaccttcta

SEQ ID NO: 41740 - DNA, 22 bp, Artificial Sequence
  chemically synthesized
ccagggcctcaaccttctactg

SEQ ID NO: 41741 - DNA, 22 bp, Artificial Sequence
  chemically synthesized
cagggcctcaaccttctactgc

SEQ ID NO: 41742 - DNA, 22 bp, Artificial Sequence
  chemically synthesized
aaccttctactgctgggtagaa

SEQ ID NO: 41743 - DNA, 22 bp, Artificial Sequence
  chemically synthesized
ctactgctgggtagaaagcccc

SEQ ID NO: 41744 - DNA, 22 bp, Artificial Sequence
  chemically synthesized
tactgctgggtagaaagccccc

SEQ ID NO: 41745 - DNA, 22 bp, Artificial Sequence
  chemically synthesized
ctgctgggtagaaagccccctc

SEQ ID NO: 41746 - DNA, 22 bp, Artificial Sequence
  chemically synthesized
ctgggtagaaagccccctctgt

SEQ ID NO: 41747 - DNA, 22 bp, Artificial Sequence
  chemically synthesized
ggtagaaagccccctctgtcac

SEQ ID NO: 41748 - DNA, 22 bp, Artificial Sequence
  chemically synthesized
tgtcaccggcccacagatctca

SEQ ID NO: 41749 - DNA, 22 bp, Artificial Sequence
  chemically synthesized
tcaccggcccacagatctcagc

SEQ ID NO: 41750 - DNA, 22 bp, Artificial Sequence
  chemically synthesized
agctgccatcgcactcaaaccc

SEQ ID NO: 41751 - DNA, 22 bp, Artificial Sequence
  chemically synthesized
ccatcgcactcaaaccctgtca

SEQ ID NO: 41752 - DNA, 22 bp, Artificial Sequence
  chemically synthesized
aaaccctgtcaggcggtggaga

SEQ ID NO: 41753 - DNA, 22 bp, Artificial Sequence
  chemically synthesized
tcaggcggtggagagtgtggac

SEQ ID NO: 41754 - DNA, 22 bp, Artificial Sequence
  chemically synthesized
acgcggtttcaaagaggccgac

SEQ ID NO: 41755 - DNA, 22 bp, Artificial Sequence
  chemically synthesized
caaagaggccgaccaggcaaga

SEQ ID NO: 41756 - DNA, 22 bp, Artificial Sequence
  chemically synthesized
aaagaggccgaccaggcaagaa

SEQ ID NO: 41757 - DNA, 22 bp, Artificial Sequence
  chemically synthesized
tactcctgccccagctctaatg

SEQ ID NO: 41758 - DNA, 22 bp, Artificial Sequence
  chemically synthesized
ctgccccagctctaatgcaata

SEQ ID NO: 41759 - DNA, 22 bp, Artificial Sequence
  chemically synthesized
ccccagctctaatgcaataaaa

SEQ ID NO: 41760 - DNA, 22 bp, Artificial Sequence
  chemically synthesized
taatgcaataaaatgtctttta

SEQ ID NO: 41761 - DNA, 22 bp, Artificial Sequence
  chemically synthesized
atgcaataaaatgtcttttatc

SEQ ID NO: 41762 - DNA, 22 bp, Artificial Sequence
  chemically synthesized
ttatcaatgtaattcaaggcaa

SEQ ID NO: 41763 - DNA, 22 bp, Artificial Sequence
  chemically synthesized
tatcaatgtaattcaaggcaaa

SEQ ID NO: 41764 - DNA, 22 bp, Artificial Sequence
  chemically synthesized
atcaatgtaattcaaggcaaag

SEQ ID NO: 41765 - DNA, 22 bp, Artificial Sequence
  chemically synthesized
tcaatgtaattcaaggcaaaga

SEQ ID NO: 41766 - DNA, 22 bp, Artificial Sequence
  chemically synthesized
aaggcaaagagtcaagggtctg

SEQ ID NO: 41767 - DNA, 22 bp, Artificial Sequence
  chemically synthesized
tcaccattttaaagaggcttat

SEQ ID NO: 41768 - DNA, 22 bp, Artificial Sequence
  chemically synthesized
taaagaggcttattacatggcc

SEQ ID NO: 41769 - DNA, 22 bp, Artificial Sequence
  chemically synthesized
aaagaggcttattacatggcca

SEQ ID NO: 41770 - DNA, 22 bp, Artificial Sequence
  chemically synthesized
aagaggcttattacatggccac

SEQ ID NO: 41771 - DNA, 22 bp, Artificial Sequence
  chemically synthesized
attacatggccacaaaaatttg

SEQ ID NO: 41772 - DNA, 22 bp, Artificial Sequence
  chemically synthesized
ttacatggccacaaaaatttgc

SEQ ID NO: 41773 - DNA, 22 bp, Artificial Sequence
  chemically synthesized
catggccacaaaaatttgcctc

SEQ ID NO: 41774 - DNA, 22 bp, Artificial Sequence
  chemically synthesized
gcctcaggctcaaacctggcat

SEQ ID NO: 41775 - DNA, 22 bp, Artificial Sequence
  chemically synthesized
cctcaggctcaaacctggcatg

SEQ ID NO: 41776 - DNA, 22 bp, Artificial Sequence
  chemically synthesized
aggctcaaacctggcatgtaag

SEQ ID NO: 41777 - DNA, 22 bp, Artificial Sequence
  chemically synthesized
aaacctggcatgtaaggtatca

SEQ ID NO: 41778 - DNA, 22 bp, Artificial Sequence
  chemically synthesized
gcatgtaaggtatcagcgtggg

SEQ ID NO: 41779 - DNA, 22 bp, Artificial Sequence
  chemically synthesized
ttttgattttattttattttct

SEQ ID NO: 41780 - DNA, 22 bp, Artificial Sequence
  chemically synthesized
ttgattttattttattttctta

SEQ ID NO: 41781 - DNA, 22 bp, Artificial Sequence
  chemically synthesized
tgattttattttattttcttac

SEQ ID NO: 41782 - DNA, 22 bp, Artificial Sequence
  chemically synthesized
gattttattttattttcttaca

SEQ ID NO: 41783 - DNA, 22 bp, Artificial Sequence
  chemically synthesized
attttattttattttcttacaa

SEQ ID NO: 41784 - DNA, 22 bp, Artificial Sequence
  chemically synthesized
tattttattttcttacaaaatc

SEQ ID NO: 41785 - DNA, 22 bp, Artificial Sequence
  chemically synthesized
attttattttcttacaaaatct

SEQ ID NO: 41786 - DNA, 22 bp, Artificial Sequence
  chemically synthesized
ttttattttcttacaaaatctg

SEQ ID NO: 41787 - DNA, 22 bp, Artificial Sequence
  chemically synthesized
tattttcttacaaaatctgaaa

SEQ ID NO: 41788 - DNA, 22 bp, Artificial Sequence
  chemically synthesized
attttcttacaaaatctgaaaa

SEQ ID NO: 41789 - DNA, 22 bp, Artificial Sequence
  chemically synthesized
ttttcttacaaaatctgaaaat

SEQ ID NO: 41790 - DNA, 22 bp, Artificial Sequence
  chemically synthesized
tcttacaaaatctgaaaatgaa

SEQ ID NO: 41791 - DNA, 22 bp, Artificial Sequence
  chemically synthesized
cttacaaaatctgaaaatgaaa

SEQ ID NO: 41792 - DNA, 22 bp, Artificial Sequence
  chemically synthesized
ttacaaaatctgaaaatgaaac

SEQ ID NO: 41793 - DNA, 22 bp, Artificial Sequence
  chemically synthesized
acaaaatctgaaaatgaaacgc

SEQ ID NO: 41794 - DNA, 22 bp, Artificial Sequence
  chemically synthesized
caaaatctgaaaatgaaacgct

SEQ ID NO: 41795 - DNA, 22 bp, Artificial Sequence
  chemically synthesized
aaaatgaaacgcttctgtccct

SEQ ID NO: 41796 - DNA, 22 bp, Artificial Sequence
  chemically synthesized
ctgtccctcccttccaccaacc

SEQ ID NO: 41797 - DNA, 22 bp, Artificial Sequence
  chemically synthesized
tgtccctcccttccaccaaccg

SEQ ID NO: 41798 - DNA, 22 bp, Artificial Sequence
  chemically synthesized
tccctcccttccaccaaccgtt

SEQ ID NO: 41799 - DNA, 22 bp, Artificial Sequence
  chemically synthesized
ccttccaccaaccgttttttga

SEQ ID NO: 41800 - DNA, 22 bp, Artificial Sequence
  chemically synthesized
ccaccaaccgttttttgattta

SEQ ID NO: 41801 - DNA, 22 bp, Artificial Sequence
  chemically synthesized
caccaaccgttttttgatttat

SEQ ID NO: 41802 - DNA, 22 bp, Artificial Sequence
  chemically synthesized
tttgatttatggggaggaggaa

SEQ ID NO: 41803 - DNA, 22 bp, Artificial Sequence
  chemically synthesized
ttgatttatggggaggaggaaa

SEQ ID NO: 41804 - DNA, 22 bp, Artificial Sequence
  chemically synthesized
tgatttatggggaggaggaaag

SEQ ID NO: 41805 - DNA, 22 bp, Artificial Sequence
  chemically synthesized
gatttatggggaggaggaaaga

SEQ ID NO: 41806 - DNA, 22 bp, Artificial Sequence
  chemically synthesized
atttatggggaggaggaaagaa

SEQ ID NO: 41807 - DNA, 22 bp, Artificial Sequence
  chemically synthesized
atggggaggaggaaagaaatct

SEQ ID NO: 41808 - DNA, 22 bp, Artificial Sequence
  chemically synthesized
tggggaggaggaaagaaatctg

SEQ ID NO: 41809 - DNA, 22 bp, Artificial Sequence
  chemically synthesized
aagttgacaggttgggacaact

SEQ ID NO: 41810 - DNA, 22 bp, Artificial Sequence
  chemically synthesized
acaggttgggacaactccactc

SEQ ID NO: 41811 - DNA, 22 bp, Artificial Sequence
  chemically synthesized
ggacaactccactcagctttct

SEQ ID NO: 41812 - DNA, 22 bp, Artificial Sequence
  chemically synthesized
cactcagctttctcactcaaaa

SEQ ID NO: 41813 - DNA, 22 bp, Artificial Sequence
  chemically synthesized
agctttctcactcaaaagctgc

SEQ ID NO: 41814 - DNA, 22 bp, Artificial Sequence
  chemically synthesized
tctcactcaaaagctgcttttg

SEQ ID NO: 41815 - DNA, 22 bp, Artificial Sequence
  chemically synthesized
ctcactcaaaagctgcttttgt

SEQ ID NO: 41816 - DNA, 22 bp, Artificial Sequence
  chemically synthesized
tcactcaaaagctgcttttgtt

SEQ ID NO: 41817 - DNA, 22 bp, Artificial Sequence
  chemically synthesized
actcaaaagctgcttttgttaa

SEQ ID NO: 41818 - DNA, 22 bp, Artificial Sequence
  chemically synthesized
aaaagctgcttttgttaaatca

SEQ ID NO: 41819 - DNA, 22 bp, Artificial Sequence
  chemically synthesized
cttttgttaaatcatactttgc

SEQ ID NO: 41820 - DNA, 22 bp, Artificial Sequence
  chemically synthesized
ttgttaaatcatactttgcatt

SEQ ID NO: 41821 - DNA, 22 bp, Artificial Sequence
  chemically synthesized
tgttaaatcatactttgcattt

SEQ ID NO: 41822 - DNA, 22 bp, Artificial Sequence
  chemically synthesized
gttaaatcatactttgcattta

SEQ ID NO: 41823 - DNA, 22 bp, Artificial Sequence
  chemically synthesized
ttaaatcatactttgcatttat

SEQ ID NO: 41824 - DNA, 22 bp, Artificial Sequence
  chemically synthesized
aatcatactttgcatttatggc

SEQ ID NO: 41825 - DNA, 22 bp, Artificial Sequence
  chemically synthesized
tgcatttatggcctgcggctct

SEQ ID NO: 41826 - DNA, 22 bp, Artificial Sequence
  chemically synthesized
gcatttatggcctgcggctctt

SEQ ID NO: 41827 - DNA, 22 bp, Artificial Sequence
  chemically synthesized
catttatggcctgcggctcttg

SEQ ID NO: 41828 - DNA, 22 bp, Artificial Sequence
  chemically synthesized
atggcctgcggctcttggctga

SEQ ID NO: 41829 - DNA, 22 bp, Artificial Sequence
  chemically synthesized
tggcctgcggctcttggctgac

SEQ ID NO: 41830 - DNA, 22 bp, Artificial Sequence
  chemically synthesized
cggctcttggctgactttggcg

SEQ ID NO: 41831 - DNA, 22 bp, Artificial Sequence
  chemically synthesized
ttggctgactttggcggctcct

SEQ ID NO: 41832 - DNA, 22 bp, Artificial Sequence
  chemically synthesized
ggctgactttggcggctcctcc

SEQ ID NO: 41833 - DNA, 22 bp, Artificial Sequence
  chemically synthesized
gctgactttggcggctcctccg

SEQ ID NO: 41834 - DNA, 22 bp, Artificial Sequence
  chemically synthesized
actttggcggctcctccggtgt

SEQ ID NO: 41835 - DNA, 22 bp, Artificial Sequence
  chemically synthesized
tggcggctcctccggtgtggag

SEQ ID NO: 41836 - DNA, 22 bp, Artificial Sequence
  chemically synthesized
ggcggctcctccggtgtggagc

SEQ ID NO: 41837 - DNA, 22 bp, Artificial Sequence
  chemically synthesized
gcggctcctccggtgtggagca

SEQ ID NO: 41838 - DNA, 22 bp, Artificial Sequence
  chemically synthesized
ctccggtgtggagcaagctgtg

SEQ ID NO: 41839 - DNA, 22 bp, Artificial Sequence
  chemically synthesized
cggtgtggagcaagctgtggac

SEQ ID NO: 41840 - DNA, 22 bp, Artificial Sequence
  chemically synthesized
tggacttccccgggaggaggcc

SEQ ID NO: 41841 - DNA, 22 bp, Artificial Sequence
  chemically synthesized
ccccgggaggaggccccactga

SEQ ID NO: 41842 - DNA, 22 bp, Artificial Sequence
  chemically synthesized
cccgggaggaggccccactgag

SEQ ID NO: 41843 - DNA, 22 bp, Artificial Sequence
  chemically synthesized
agatgactgccccactctgcac

SEQ ID NO: 41844 - DNA, 22 bp, Artificial Sequence
  chemically synthesized
ccccactctgcaccaaggacag

SEQ ID NO: 41845 - DNA, 22 bp, Artificial Sequence
  chemically synthesized
tgcaccaaggacagcgaggagg

SEQ ID NO: 41846 - DNA, 22 bp, Artificial Sequence
  chemically synthesized
caccaaggacagcgaggagggg

SEQ ID NO: 41847 - DNA, 22 bp, Artificial Sequence
  chemically synthesized
gaggccagggggctggggacat

SEQ ID NO: 41848 - DNA, 22 bp, Artificial Sequence
  chemically synthesized
gggacatgaaggcactggctag

SEQ ID NO: 41849 - DNA, 22 bp, Artificial Sequence
  chemically synthesized
gctaggtaacacaaaggcctgt

SEQ ID NO: 41850 - DNA, 22 bp, Artificial Sequence
  chemically synthesized
ggtaacacaaaggcctgtaaag

SEQ ID NO: 41851 - DNA, 22 bp, Artificial Sequence
  chemically synthesized
taaaggatatgtctctcttctg

SEQ ID NO: 41852 - DNA, 22 bp, Artificial Sequence
  chemically synthesized
tcttctgaacctggctctccac

SEQ ID NO: 41853 - DNA, 22 bp, Artificial Sequence
  chemically synthesized
ttctgaacctggctctccactc

SEQ ID NO: 41854 - DNA, 22 bp, Artificial Sequence
  chemically synthesized
ctgaacctggctctccactcca

SEQ ID NO: 41855 - DNA, 22 bp, Artificial Sequence
  chemically synthesized
tgaacctggctctccactccat

SEQ ID NO: 41856 - DNA, 22 bp, Artificial Sequence
  chemically synthesized
aacctggctctccactccattt

SEQ ID NO: 41857 - DNA, 22 bp, Artificial Sequence
  chemically synthesized
gctctccactccatttctcctg

SEQ ID NO: 41858 - DNA, 22 bp, Artificial Sequence
  chemically synthesized
tccactccatttctcctggatc

SEQ ID NO: 41859 - DNA, 22 bp, Artificial Sequence
  chemically synthesized
cactccatttctcctggatcca

SEQ ID NO: 41860 - DNA, 22 bp, Artificial Sequence
  chemically synthesized
catttctcctggatccaagtct

SEQ ID NO: 41861 - DNA, 22 bp, Artificial Sequence
  chemically synthesized
ctcctggatccaagtctccctg

SEQ ID NO: 41862 - DNA, 22 bp, Artificial Sequence
  chemically synthesized
tcctggatccaagtctccctgt

SEQ ID NO: 41863 - DNA, 22 bp, Artificial Sequence
  chemically synthesized
ctggatccaagtctccctgtaa

SEQ ID NO: 41864 - DNA, 22 bp, Artificial Sequence
  chemically synthesized
gatccaagtctccctgtaatca

SEQ ID NO: 41865 - DNA, 22 bp, Artificial Sequence
  chemically synthesized
cctgtaatcagcatgtatctac

SEQ ID NO: 41866 - DNA, 22 bp, Artificial Sequence
  chemically synthesized
taatcagcatgtatctaccact

SEQ ID NO: 41867 - DNA, 22 bp, Artificial Sequence
  chemically synthesized
ccactggttctccaactaaaag

SEQ ID NO: 41868 - DNA, 22 bp, Artificial Sequence
  chemically synthesized
gttctccaactaaaagttcaag

SEQ ID NO: 41869 - DNA, 22 bp, Artificial Sequence
  chemically synthesized
tccaactaaaagttcaaggctt

SEQ ID NO: 41870 - DNA, 22 bp, Artificial Sequence
  chemically synthesized
caactaaaagttcaaggcttct

SEQ ID NO: 41871 - DNA, 22 bp, Artificial Sequence
  chemically synthesized
aaagttcaaggcttctaagaac

SEQ ID NO: 41872 - DNA, 22 bp, Artificial Sequence
  chemically synthesized
aaggcttctaagaaccaagact

SEQ ID NO: 41873 - DNA, 22 bp, Artificial Sequence
  chemically synthesized
ctaagaaccaagactcagtggt

SEQ ID NO: 41874 - DNA, 22 bp, Artificial Sequence
  chemically synthesized
taagaaccaagactcagtggtc

SEQ ID NO: 41875 - DNA, 22 bp, Artificial Sequence
  chemically synthesized
agaaccaagactcagtggtcta

SEQ ID NO: 41876 - DNA, 22 bp, Artificial Sequence
  chemically synthesized
agtggtctacctctgactgtcc

SEQ ID NO: 41877 - DNA, 22 bp, Artificial Sequence
  chemically synthesized
cctctgactgtccagcaccatg

SEQ ID NO: 41878 - DNA, 22 bp, Artificial Sequence
  chemically synthesized
tgactgtccagcaccatgctgg

SEQ ID NO: 41879 - DNA, 22 bp, Artificial Sequence
  chemically synthesized
actgtccagcaccatgctgggc

SEQ ID NO: 41880 - DNA, 22 bp, Artificial Sequence
  chemically synthesized
tccagcaccatgctgggcaaag

SEQ ID NO: 41881 - DNA, 22 bp, Artificial Sequence
  chemically synthesized
ggcaaagaagagcccctcaata

SEQ ID NO: 41882 - DNA, 22 bp, Artificial Sequence
  chemically synthesized
aataaataattaggattcaagc

SEQ ID NO: 41883 - DNA, 22 bp, Artificial Sequence
  chemically synthesized
ggattcaagcgctgtgcagtga

SEQ ID NO: 41884 - DNA, 22 bp, Artificial Sequence
  chemically synthesized
aagcgctgtgcagtgaactttt

SEQ ID NO: 41885 - DNA, 22 bp, Artificial Sequence
  chemically synthesized
tgcagtgaacttttcttcctgt

SEQ ID NO: 41886 - DNA, 22 bp, Artificial Sequence
  chemically synthesized
ttcttcctgttggagagccatt

SEQ ID NO: 41887 - DNA, 22 bp, Artificial Sequence
  chemically synthesized
tcttcctgttggagagccattc

SEQ ID NO: 41888 - DNA, 22 bp, Artificial Sequence
  chemically synthesized
cttcctgttggagagccattct

SEQ ID NO: 41889 - DNA, 22 bp, Artificial Sequence
  chemically synthesized
ttcctgttggagagccattcta

SEQ ID NO: 41890 - DNA, 22 bp, Artificial Sequence
  chemically synthesized
cctgttggagagccattctaaa

SEQ ID NO: 41891 - DNA, 22 bp, Artificial Sequence
  chemically synthesized
ctgttggagagccattctaaat

SEQ ID NO: 41892 - DNA, 22 bp, Artificial Sequence
  chemically synthesized
ttggagagccattctaaatgac

SEQ ID NO: 41893 - DNA, 22 bp, Artificial Sequence
  chemically synthesized
gagagccattctaaatgacctg

SEQ ID NO: 41894 - DNA, 22 bp, Artificial Sequence
  chemically synthesized
taaatgacctggctggaaggac

SEQ ID NO: 41895 - DNA, 22 bp, Artificial Sequence
  chemically synthesized
aatgacctggctggaaggacca

SEQ ID NO: 41896 - DNA, 22 bp, Artificial Sequence
  chemically synthesized
gctggaaggaccaggccatgga

SEQ ID NO: 41897 - DNA, 22 bp, Artificial Sequence
  chemically synthesized
gaaggaccaggccatggagcca

SEQ ID NO: 41898 - DNA, 22 bp, Artificial Sequence
  chemically synthesized
ccctagtaaatgattcactaac

SEQ ID NO: 41899 - DNA, 22 bp, Artificial Sequence
  chemically synthesized
cctagtaaatgattcactaacc

SEQ ID NO: 41900 - DNA, 22 bp, Artificial Sequence
  chemically synthesized
gtaaatgattcactaaccaagg

SEQ ID NO: 41901 - DNA, 22 bp, Artificial Sequence
  chemically synthesized
actaaccaaggagcctctgggt

SEQ ID NO: 41902 - DNA, 22 bp, Artificial Sequence
  chemically synthesized
accaaggagcctctgggtcagc

SEQ ID NO: 41903 - DNA, 22 bp, Artificial Sequence
  chemically synthesized
tgggtcagccttgacccaggag

SEQ ID NO: 41904 - DNA, 22 bp, Artificial Sequence
  chemically synthesized
ggtcagccttgacccaggagag

SEQ ID NO: 41905 - DNA, 22 bp, Artificial Sequence
  chemically synthesized
gacccaggagaggattacagcc

SEQ ID NO: 41906 - DNA, 22 bp, Artificial Sequence
  chemically synthesized
acccaggagaggattacagccc

SEQ ID NO: 41907 - DNA, 22 bp, Artificial Sequence
  chemically synthesized
cagccccttgaaagtggctgct

SEQ ID NO: 41908 - DNA, 22 bp, Artificial Sequence
  chemically synthesized
gaaagtggctgctggtccatcg

SEQ ID NO: 41909 - DNA, 22 bp, Artificial Sequence
  chemically synthesized
aaagtggctgctggtccatcgc

SEQ ID NO: 41910 - DNA, 22 bp, Artificial Sequence
  chemically synthesized
ctggtccatcgcttcactgtac

SEQ ID NO: 41911 - DNA, 22 bp, Artificial Sequence
  chemically synthesized
gtccatcgcttcactgtactat

SEQ ID NO: 41912 - DNA, 22 bp, Artificial Sequence
  chemically synthesized
cactgtactattttggcaatct

SEQ ID NO: 41913 - DNA, 22 bp, Artificial Sequence
  chemically synthesized
actgtactattttggcaatctg

SEQ ID NO: 41914 - DNA, 22 bp, Artificial Sequence
  chemically synthesized
tactattttggcaatctgtaat

SEQ ID NO: 41915 - DNA, 22 bp, Artificial Sequence
  chemically synthesized
ttttggcaatctgtaatagtgt

SEQ ID NO: 41916 - DNA, 22 bp, Artificial Sequence
  chemically synthesized
tggcaatctgtaatagtgtatt

SEQ ID NO: 41917 - DNA, 22 bp, Artificial Sequence
  chemically synthesized
ggcaatctgtaatagtgtattt

SEQ ID NO: 41918 - DNA, 22 bp, Artificial Sequence
  chemically synthesized
gcaatctgtaatagtgtattta

SEQ ID NO: 41919 - DNA, 22 bp, Artificial Sequence
  chemically synthesized
taatagtgtatttactcaatgg

SEQ ID NO: 41920 - DNA, 22 bp, Artificial Sequence
  chemically synthesized
actcaatggttgttatggacaa

SEQ ID NO: 41921 - DNA, 22 bp, Artificial Sequence
  chemically synthesized
ctcaatggttgttatggacaat

SEQ ID NO: 41922 - DNA, 22 bp, Artificial Sequence
  chemically synthesized
aatggttgttatggacaatcag

SEQ ID NO: 41923 - DNA, 22 bp, Artificial Sequence
  chemically synthesized
ttatggacaatcaggttaatca

SEQ ID NO: 41924 - DNA, 22 bp, Artificial Sequence
  chemically synthesized
tggacaatcaggttaatcattc

SEQ ID NO: 41925 - DNA, 22 bp, Artificial Sequence
  chemically synthesized
atcattcactttccaaatgctg

SEQ ID NO: 41926 - DNA, 22 bp, Artificial Sequence
  chemically synthesized
actttccaaatgctgtgtaatt

SEQ ID NO: 41927 - DNA, 22 bp, Artificial Sequence
  chemically synthesized
tccaaatgctgtgtaattacac

SEQ ID NO: 41928 - DNA, 22 bp, Artificial Sequence
  chemically synthesized
ccaaatgctgtgtaattacaca

SEQ ID NO: 41929 - DNA, 22 bp, Artificial Sequence
  chemically synthesized
caaatgctgtgtaattacacag

SEQ ID NO: 41930 - DNA, 22 bp, Artificial Sequence
  chemically synthesized
tgtaattacacagttaaaagag

SEQ ID NO: 41931 - DNA, 22 bp, Artificial Sequence
  chemically synthesized
cacagttaaaagagctacagcg

SEQ ID NO: 41932 - DNA, 22 bp, Artificial Sequence
  chemically synthesized
aaagagctacagcggatgtcaa

SEQ ID NO: 41933 - DNA, 22 bp, Artificial Sequence
  chemically synthesized
cagcggatgtcaaatttcctta

SEQ ID NO: 41934 - DNA, 22 bp, Artificial Sequence
  chemically synthesized
ccttaagtcttctggtgaattg

SEQ ID NO: 41935 - DNA, 22 bp, Artificial Sequence
  chemically synthesized
cttaagtcttctggtgaattgg

SEQ ID NO: 41936 - DNA, 22 bp, Artificial Sequence
  chemically synthesized
aagtcttctggtgaattggtct

SEQ ID NO: 41937 - DNA, 22 bp, Artificial Sequence
  chemically synthesized
agtcttctggtgaattggtctc

SEQ ID NO: 41938 - DNA, 22 bp, Artificial Sequence
  chemically synthesized
ctggtgaattggtctcaattac

SEQ ID NO: 41939 - DNA, 22 bp, Artificial Sequence
  chemically synthesized
tggtgaattggtctcaattact

SEQ ID NO: 41940 - DNA, 22 bp, Artificial Sequence
  chemically synthesized
gtgaattggtctcaattactag

SEQ ID NO: 41941 - DNA, 22 bp, Artificial Sequence
  chemically synthesized
gtctcaattactagtctgggtc

SEQ ID NO: 41942 - DNA, 22 bp, Artificial Sequence
  chemically synthesized
aattactagtctgggtcccttt

SEQ ID NO: 41943 - DNA, 22 bp, Artificial Sequence
  chemically synthesized
ctagtctgggtccctttcttcc

SEQ ID NO: 41944 - DNA, 22 bp, Artificial Sequence
  chemically synthesized
gtctgggtccctttcttccttc

SEQ ID NO: 41945 - DNA, 22 bp, Artificial Sequence
  chemically synthesized
ggtccctttcttccttcctctc

SEQ ID NO: 41946 - DNA, 22 bp, Artificial Sequence
  chemically synthesized
tcttccttcctctctcaatttg

SEQ ID NO: 41947 - DNA, 22 bp, Artificial Sequence
  chemically synthesized
cttccttcctctctcaatttgt

SEQ ID NO: 41948 - DNA, 22 bp, Artificial Sequence
  chemically synthesized
ttccttcctctctcaatttgtt

SEQ ID NO: 41949 - DNA, 22 bp, Artificial Sequence
  chemically synthesized
ccttcctctctcaatttgtttt

SEQ ID NO: 41950 - DNA, 22 bp, Artificial Sequence
  chemically synthesized
cttcctctctcaatttgtttta

SEQ ID NO: 41951 - DNA, 22 bp, Artificial Sequence
  chemically synthesized
cctctctcaatttgttttagca

SEQ ID NO: 41952 - DNA, 22 bp, Artificial Sequence
  chemically synthesized
ctctctcaatttgttttagcaa

SEQ ID NO: 41953 - DNA, 22 bp, Artificial Sequence
  chemically synthesized
tctcaatttgttttagcaatcc

SEQ ID NO: 41954 - DNA, 22 bp, Artificial Sequence
  chemically synthesized
tcaatttgttttagcaatcctc

SEQ ID NO: 41955 - DNA, 22 bp, Artificial Sequence
  chemically synthesized
aatttgttttagcaatcctcca

SEQ ID NO: 41956 - DNA, 22 bp, Artificial Sequence
  chemically synthesized
gttttagcaatcctccacattt

SEQ ID NO: 41957 - DNA, 22 bp, Artificial Sequence
  chemically synthesized
ttttagcaatcctccacatttt

SEQ ID NO: 41958 - DNA, 22 bp, Artificial Sequence
  chemically synthesized
tagcaatcctccacattttcct

SEQ ID NO: 41959 - DNA, 22 bp, Artificial Sequence
  chemically synthesized
agcaatcctccacattttcctc

SEQ ID NO: 41960 - DNA, 22 bp, Artificial Sequence
  chemically synthesized
gcaatcctccacattttcctct

SEQ ID NO: 41961 - DNA, 22 bp, Artificial Sequence
  chemically synthesized
cacattttcctctattctcatc

SEQ ID NO: 41962 - DNA, 22 bp, Artificial Sequence
  chemically synthesized
tcctctattctcatcccctacc

SEQ ID NO: 41963 - DNA, 22 bp, Artificial Sequence
  chemically synthesized
cctctattctcatcccctacct

SEQ ID NO: 41964 - DNA, 22 bp, Artificial Sequence
  chemically synthesized
ctctattctcatcccctacctg

SEQ ID NO: 41965 - DNA, 22 bp, Artificial Sequence
  chemically synthesized
tattctcatcccctacctgcac

SEQ ID NO: 41966 - DNA, 22 bp, Artificial Sequence
  chemically synthesized
ttctcatcccctacctgcaccc

SEQ ID NO: 41967 - DNA, 22 bp, Artificial Sequence
  chemically synthesized
tcatcccctacctgcaccccca

SEQ ID NO: 41968 - DNA, 22 bp, Artificial Sequence
  chemically synthesized
atcccctacctgcacccccatc

SEQ ID NO: 41969 - DNA, 22 bp, Artificial Sequence
  chemically synthesized
cctgcacccccatctctgtccc

SEQ ID NO: 41970 - DNA, 22 bp, Artificial Sequence
  chemically synthesized
cacccccatctctgtcccaaga

SEQ ID NO: 41971 - DNA, 22 bp, Artificial Sequence
  chemically synthesized
tgtcccaagagaaagaacagtg

SEQ ID NO: 41972 - DNA, 22 bp, Artificial Sequence
  chemically synthesized
tcccaagagaaagaacagtgtg

SEQ ID NO: 41973 - DNA, 22 bp, Artificial Sequence
  chemically synthesized
cgcttgaataatcctatttttg

SEQ ID NO: 41974 - DNA, 22 bp, Artificial Sequence
  chemically synthesized
gaataatcctatttttgaactc

SEQ ID NO: 41975 - DNA, 22 bp, Artificial Sequence
  chemically synthesized
aataatcctatttttgaactca

SEQ ID NO: 41976 - DNA, 22 bp, Artificial Sequence
  chemically synthesized
tttttgaactcatagttctaaa

SEQ ID NO: 41977 - DNA, 22 bp, Artificial Sequence
  chemically synthesized
ttgaactcatagttctaaatag

SEQ ID NO: 41978 - DNA, 22 bp, Artificial Sequence
  chemically synthesized
tgaactcatagttctaaatagt

SEQ ID NO: 41979 - DNA, 22 bp, Artificial Sequence
  chemically synthesized
gaactcatagttctaaatagtt

SEQ ID NO: 41980 - DNA, 22 bp, Artificial Sequence
  chemically synthesized
aactcatagttctaaatagttt

SEQ ID NO: 41981 - DNA, 22 bp, Artificial Sequence
  chemically synthesized
atagttctaaatagtttttgct

SEQ ID NO: 41982 - DNA, 22 bp, Artificial Sequence
  chemically synthesized
taaatagtttttgctccactaa

SEQ ID NO: 41983 - DNA, 22 bp, Artificial Sequence
  chemically synthesized
aatagtttttgctccactaaaa

SEQ ID NO: 41984 - DNA, 22 bp, Artificial Sequence
  chemically synthesized
ttgctccactaaaagggcttaa

SEQ ID NO: 41985 - DNA, 22 bp, Artificial Sequence
  chemically synthesized
tgctccactaaaagggcttaaa

SEQ ID NO: 41986 - DNA, 22 bp, Artificial Sequence
  chemically synthesized
gctccactaaaagggcttaaaa

SEQ ID NO: 41987 - DNA, 22 bp, Artificial Sequence
  chemically synthesized
ctccactaaaagggcttaaaaa

SEQ ID NO: 41988 - DNA, 22 bp, Artificial Sequence
  chemically synthesized
cactaaaagggcttaaaaataa

SEQ ID NO: 41989 - DNA, 22 bp, Artificial Sequence
  chemically synthesized
aaagggcttaaaaataaggcta

SEQ ID NO: 41990 - DNA, 22 bp, Artificial Sequence
  chemically synthesized
aaaaataaggctaggaagctag

SEQ ID NO: 41991 - DNA, 22 bp, Artificial Sequence
  chemically synthesized
aaaataaggctaggaagctaga

SEQ ID NO: 41992 - DNA, 22 bp, Artificial Sequence
  chemically synthesized
ggaagctagacctgggaggggc

SEQ ID NO: 41993 - DNA, 22 bp, Artificial Sequence
  chemically synthesized
gacctgggaggggcattacagg

SEQ ID NO: 41994 - DNA, 22 bp, Artificial Sequence
  chemically synthesized
ggaggggcattacaggctggct

SEQ ID NO: 41995 - DNA, 22 bp, Artificial Sequence
  chemically synthesized
caggctggctggaagcccccag

SEQ ID NO: 41996 - DNA, 22 bp, Artificial Sequence
  chemically synthesized
gctggaagcccccagctgcctc

SEQ ID NO: 41997 - DNA, 22 bp, Artificial Sequence
  chemically synthesized
gaagcccccagctgcctccctg

SEQ ID NO: 41998 - DNA, 22 bp, Artificial Sequence
  chemically synthesized
cctccctgcctcagatgcaggg

SEQ ID NO: 41999 - DNA, 22 bp, Artificial Sequence
  chemically synthesized
cctgcctcagatgcagggagaa

SEQ ID NO: 42000 - DNA, 22 bp, Artificial Sequence
  chemically synthesized
cctcagatgcagggagaacacc

SEQ ID NO: 42001 - DNA, 22 bp, Artificial Sequence
  chemically synthesized
agatgcagggagaacacctgca

SEQ ID NO: 42002 - DNA, 22 bp, Artificial Sequence
  chemically synthesized
cagccacccacaccttgtcacc

SEQ ID NO: 42003 - DNA, 22 bp, Artificial Sequence
  chemically synthesized
gtcacccaagttgcactagatc

SEQ ID NO: 42004 - DNA, 22 bp, Artificial Sequence
  chemically synthesized
tcacccaagttgcactagatcc

SEQ ID NO: 42005 - DNA, 22 bp, Artificial Sequence
  chemically synthesized
cactagatcctggtacagccca

SEQ ID NO: 42006 - DNA, 22 bp, Artificial Sequence
  chemically synthesized
gatcctggtacagcccagtggt

SEQ ID NO: 42007 - DNA, 22 bp, Artificial Sequence
  chemically synthesized
gtacagcccagtggtggccgca

SEQ ID NO: 42008 - DNA, 22 bp, Artificial Sequence
  chemically synthesized
agggaagaaagaaggcaaagcc

SEQ ID NO: 42009 - DNA, 22 bp, Artificial Sequence
  chemically synthesized
ctgtgctcaaggagattgaggc

SEQ ID NO: 42010 - DNA, 22 bp, Artificial Sequence
  chemically synthesized
tgctcaaggagattgaggcttc

SEQ ID NO: 42011 - DNA, 22 bp, Artificial Sequence
  chemically synthesized
aaggagattgaggcttcccagc

SEQ ID NO: 42012 - DNA, 22 bp, Artificial Sequence
  chemically synthesized
aggcttcccagccccaaaactg

SEQ ID NO: 42013 - DNA, 22 bp, Artificial Sequence
  chemically synthesized
cccagccccaaaactgggaagg

SEQ ID NO: 42014 - DNA, 22 bp, Artificial Sequence
  chemically synthesized
ccagccccaaaactgggaaggg

SEQ ID NO: 42015 - DNA, 22 bp, Artificial Sequence
  chemically synthesized
ggaagggccctggaatgggata

SEQ ID NO: 42016 - DNA, 22 bp, Artificial Sequence
  chemically synthesized
gaatgggatatcccctcccctc

SEQ ID NO: 42017 - DNA, 22 bp, Artificial Sequence
  chemically synthesized
ccctcccagcaccccattccca

SEQ ID NO: 42018 - DNA, 22 bp, Artificial Sequence
  chemically synthesized
ccagcaccccattcccaaacct

SEQ ID NO: 42019 - DNA, 22 bp, Artificial Sequence
  chemically synthesized
ccaaacctagccacccatctct

SEQ ID NO: 42020 - DNA, 22 bp, Artificial Sequence
  chemically synthesized
gccacccatctctgcttgggac

SEQ ID NO: 42021 - DNA, 22 bp, Artificial Sequence
  chemically synthesized
tgcttgggacatgctggaaggc

SEQ ID NO: 42022 - DNA, 22 bp, Artificial Sequence
  chemically synthesized
cttgggacatgctggaaggcaa

SEQ ID NO: 42023 - DNA, 22 bp, Artificial Sequence
  chemically synthesized
gggacatgctggaaggcaagaa

SEQ ID NO: 42024 - DNA, 22 bp, Artificial Sequence
  chemically synthesized
ggacatgctggaaggcaagaag

SEQ ID NO: 42025 - DNA, 22 bp, Artificial Sequence
  chemically synthesized
gaaggcaagaagagagaaacaa

SEQ ID NO: 42026 - DNA, 22 bp, Artificial Sequence
  chemically synthesized
cttgaaaacaaaaatgaagcag

SEQ ID NO: 42027 - DNA, 22 bp, Artificial Sequence
  chemically synthesized
gaaaacaaaaatgaagcaggga

SEQ ID NO: 42028 - DNA, 22 bp, Artificial Sequence
  chemically synthesized
aaaacaaaaatgaagcagggat

SEQ ID NO: 42029 - DNA, 22 bp, Artificial Sequence
  chemically synthesized
ggaaaagtaaaaacattcagaa

SEQ ID NO: 42030 - DNA, 22 bp, Artificial Sequence
  chemically synthesized
agaacccagggccttctctctg

SEQ ID NO: 42031 - DNA, 22 bp, Artificial Sequence
  chemically synthesized
ctctctgtctcccacgacctac

SEQ ID NO: 42032 - DNA, 22 bp, Artificial Sequence
  chemically synthesized
tctctgtctcccacgacctaca

SEQ ID NO: 42033 - DNA, 22 bp, Artificial Sequence
  chemically synthesized
tctgtctcccacgacctacacc

SEQ ID NO: 42034 - DNA, 22 bp, Artificial Sequence
  chemically synthesized
tgtctcccacgacctacaccag

SEQ ID NO: 42035 - DNA, 22 bp, Artificial Sequence
  chemically synthesized
tctcccacgacctacaccaggc

SEQ ID NO: 42036 - DNA, 22 bp, Artificial Sequence
  chemically synthesized
ccacgacctacaccaggccctt

SEQ ID NO: 42037 - DNA, 22 bp, Artificial Sequence
  chemically synthesized
caccaggcccttcgcacctctg

SEQ ID NO: 42038 - DNA, 22 bp, Artificial Sequence
  chemically synthesized
cgcacctctgctttgcggcttt

SEQ ID NO: 42039 - DNA, 22 bp, Artificial Sequence
  chemically synthesized
gcacctctgctttgcggcttta

SEQ ID NO: 42040 - DNA, 22 bp, Artificial Sequence
  chemically synthesized
tgctttgcggctttaacgcact

SEQ ID NO: 42041 - DNA, 22 bp, Artificial Sequence
  chemically synthesized
ctttgcggctttaacgcactac

SEQ ID NO: 42042 - DNA, 22 bp, Artificial Sequence
  chemically synthesized
tgcggctttaacgcactacacc

SEQ ID NO: 42043 - DNA, 22 bp, Artificial Sequence
  chemically synthesized
gcggctttaacgcactacaccc

SEQ ID NO: 42044 - DNA, 22 bp, Artificial Sequence
  chemically synthesized
cggctttaacgcactacacccc

SEQ ID NO: 42045 - DNA, 22 bp, Artificial Sequence
  chemically synthesized
taacgcactacaccccacccac

SEQ ID NO: 42046 - DNA, 22 bp, Artificial Sequence
  chemically synthesized
aacgcactacaccccacccacc

SEQ ID NO: 42047 - DNA, 22 bp, Artificial Sequence
  chemically synthesized
acgcactacaccccacccacca

SEQ ID NO: 42048 - DNA, 22 bp, Artificial Sequence
  chemically synthesized
caccccacccaccacaagcaca

SEQ ID NO: 42049 - DNA, 22 bp, Artificial Sequence
  chemically synthesized
tcaggagtcagagggtcaccca

SEQ ID NO: 42050 - DNA, 22 bp, Artificial Sequence
  chemically synthesized
aggagtcagagggtcacccagg

SEQ ID NO: 42051 - DNA, 22 bp, Artificial Sequence
  chemically synthesized
gaacttaagccacccagcccac

SEQ ID NO: 42052 - DNA, 22 bp, Artificial Sequence
  chemically synthesized
aagccacccagcccacaagctg

SEQ ID NO: 42053 - DNA, 22 bp, Artificial Sequence
  chemically synthesized
agccacccagcccacaagctgg

SEQ ID NO: 42054 - DNA, 22 bp, Artificial Sequence
  chemically synthesized
gcaggtgaaggaggacagggat

SEQ ID NO: 42055 - DNA, 22 bp, Artificial Sequence
  chemically synthesized
tccacgctggcccctggctaag

SEQ ID NO: 42056 - DNA, 22 bp, Artificial Sequence
  chemically synthesized
gcccctggctaagagcaactgc

SEQ ID NO: 42057 - DNA, 22 bp, Artificial Sequence
  chemically synthesized
gctaagagcaactgcagcagaa

SEQ ID NO: 42058 - DNA, 22 bp, Artificial Sequence
  chemically synthesized
agagcaactgcagcagaaacag

SEQ ID NO: 42059 - DNA, 22 bp, Artificial Sequence
  chemically synthesized
cagcagaaacagtgtttcttct

SEQ ID NO: 42060 - DNA, 22 bp, Artificial Sequence
  chemically synthesized
cttctccatttccatggctcgt

SEQ ID NO: 42061 - DNA, 22 bp, Artificial Sequence
  chemically synthesized
ttctccatttccatggctcgtg

SEQ ID NO: 42062 - DNA, 22 bp, Artificial Sequence
  chemically synthesized
ctccatttccatggctcgtgaa

SEQ ID NO: 42063 - DNA, 22 bp, Artificial Sequence
  chemically synthesized
tccatttccatggctcgtgaat

SEQ ID NO: 42064 - DNA, 22 bp, Artificial Sequence
  chemically synthesized
catttccatggctcgtgaattt

SEQ ID NO: 42065 - DNA, 22 bp, Artificial Sequence
  chemically synthesized
ccatggctcgtgaatttttttg

SEQ ID NO: 42066 - DNA, 22 bp, Artificial Sequence
  chemically synthesized
catggctcgtgaatttttttgt

SEQ ID NO: 42067 - DNA, 22 bp, Artificial Sequence
  chemically synthesized
gtgaatttttttgtcttgtttt

SEQ ID NO: 42068 - DNA, 22 bp, Artificial Sequence
  chemically synthesized
ttttgtcttgtttttcttgacg

SEQ ID NO: 42069 - DNA, 22 bp, Artificial Sequence
  chemically synthesized
tttgtcttgtttttcttgacgc

SEQ ID NO: 42070 - DNA, 22 bp, Artificial Sequence
  chemically synthesized
ttgtcttgtttttcttgacgct

SEQ ID NO: 42071 - DNA, 22 bp, Artificial Sequence
  chemically synthesized
tgtcttgtttttcttgacgctc

SEQ ID NO: 42072 - DNA, 22 bp, Artificial Sequence
  chemically synthesized
gtcttgtttttcttgacgctcc

SEQ ID NO: 42073 - DNA, 22 bp, Artificial Sequence
  chemically synthesized
tcttgtttttcttgacgctcca

SEQ ID NO: 42074 - DNA, 22 bp, Artificial Sequence
  chemically synthesized
gtttttcttgacgctccacccc

SEQ ID NO: 42075 - DNA, 22 bp, Artificial Sequence
  chemically synthesized
tttttcttgacgctccaccccc

SEQ ID NO: 42076 - DNA, 22 bp, Artificial Sequence
  chemically synthesized
ttcttgacgctccaccccctac

SEQ ID NO: 42077 - DNA, 22 bp, Artificial Sequence
  chemically synthesized
tcttgacgctccaccccctaca

SEQ ID NO: 42078 - DNA, 22 bp, Artificial Sequence
  chemically synthesized
cttgacgctccaccccctacat

SEQ ID NO: 42079 - DNA, 22 bp, Artificial Sequence
  chemically synthesized
ttgacgctccaccccctacatc

SEQ ID NO: 42080 - DNA, 22 bp, Artificial Sequence
  chemically synthesized
gacgctccaccccctacatctt

SEQ ID NO: 42081 - DNA, 22 bp, Artificial Sequence
  chemically synthesized
acgctccaccccctacatcttt

SEQ ID NO: 42082 - DNA, 22 bp, Artificial Sequence
  chemically synthesized
caccccctacatctttcttttc

SEQ ID NO: 42083 - DNA, 22 bp, Artificial Sequence
  chemically synthesized
catctttcttttccccacatgc

SEQ ID NO: 42084 - DNA, 22 bp, Artificial Sequence
  chemically synthesized
tcttttccccacatgctccagc

SEQ ID NO: 42085 - DNA, 22 bp, Artificial Sequence
  chemically synthesized
cttttccccacatgctccagca

SEQ ID NO: 42086 - DNA, 22 bp, Artificial Sequence
  chemically synthesized
ttttccccacatgctccagcac

SEQ ID NO: 42087 - DNA, 22 bp, Artificial Sequence
  chemically synthesized
ttccccacatgctccagcacat

SEQ ID NO: 42088 - DNA, 22 bp, Artificial Sequence
  chemically synthesized
tccccacatgctccagcacata

SEQ ID NO: 42089 - DNA, 22 bp, Artificial Sequence
  chemically synthesized
ccccacatgctccagcacatac

SEQ ID NO: 42090 - DNA, 22 bp, Artificial Sequence
  chemically synthesized
cccacatgctccagcacataca

SEQ ID NO: 42091 - DNA, 22 bp, Artificial Sequence
  chemically synthesized
cagcacatacaactcagggctc

SEQ ID NO: 42092 - DNA, 22 bp, Artificial Sequence
  chemically synthesized
agggctccagtgttttaagggc

SEQ ID NO: 42093 - DNA, 22 bp, Artificial Sequence
  chemically synthesized
cagtgttttaagggcatttttt

SEQ ID NO: 42094 - DNA, 22 bp, Artificial Sequence
  chemically synthesized
taagggcattttttttccacaa

SEQ ID NO: 42095 - DNA, 22 bp, Artificial Sequence
  chemically synthesized
aagggcattttttttccacaag

SEQ ID NO: 42096 - DNA, 22 bp, Artificial Sequence
  chemically synthesized
agggcattttttttccacaagt

SEQ ID NO: 42097 - DNA, 22 bp, Artificial Sequence
  chemically synthesized
tttttccacaagtgagattaat

SEQ ID NO: 42098 - DNA, 22 bp, Artificial Sequence
  chemically synthesized
ttttccacaagtgagattaatt

SEQ ID NO: 42099 - DNA, 22 bp, Artificial Sequence
  chemically synthesized
tttccacaagtgagattaattt

SEQ ID NO: 42100 - DNA, 22 bp, Artificial Sequence
  chemically synthesized
ttccacaagtgagattaatttt

SEQ ID NO: 42101 - DNA, 22 bp, Artificial Sequence
  chemically synthesized
tccacaagtgagattaattttc

SEQ ID NO: 42102 - DNA, 22 bp, Artificial Sequence
  chemically synthesized
ccacaagtgagattaattttct

SEQ ID NO: 42103 - DNA, 22 bp, Artificial Sequence
  chemically synthesized
cacaagtgagattaattttcta

SEQ ID NO: 42104 - DNA, 22 bp, Artificial Sequence
  chemically synthesized
attttctaacagaaccctagta

SEQ ID NO: 42105 - DNA, 22 bp, Artificial Sequence
  chemically synthesized
tctaacagaaccctagtacatt

SEQ ID NO: 42106 - DNA, 22 bp, Artificial Sequence
  chemically synthesized
ctaacagaaccctagtacattc

SEQ ID NO: 42107 - DNA, 22 bp, Artificial Sequence
  chemically synthesized
taacagaaccctagtacattct

SEQ ID NO: 42108 - DNA, 22 bp, Artificial Sequence
  chemically synthesized
acagaaccctagtacattctgt

SEQ ID NO: 42109 - DNA, 22 bp, Artificial Sequence
  chemically synthesized
gtacattctgtgtgatggtggg

SEQ ID NO: 42110 - DNA, 22 bp, Artificial Sequence
  chemically synthesized
tgtgtgatggtgggagagcctt

SEQ ID NO: 42111 - DNA, 22 bp, Artificial Sequence
  chemically synthesized
tgtgatggtgggagagcctttt

SEQ ID NO: 42112 - DNA, 22 bp, Artificial Sequence
  chemically synthesized
ttgaccatcacagtgtcctgga

SEQ ID NO: 42113 - DNA, 22 bp, Artificial Sequence
  chemically synthesized
tgaccatcacagtgtcctggaa

SEQ ID NO: 42114 - DNA, 22 bp, Artificial Sequence
  chemically synthesized
gaccatcacagtgtcctggaat

SEQ ID NO: 42115 - DNA, 22 bp, Artificial Sequence
  chemically synthesized
accatcacagtgtcctggaatg

SEQ ID NO: 42116 - DNA, 22 bp, Artificial Sequence
  chemically synthesized
gaatgagctcagcatgctctct

SEQ ID NO: 42117 - DNA, 22 bp, Artificial Sequence
  chemically synthesized
agcatgctctctgggaagtgaa

SEQ ID NO: 42118 - DNA, 22 bp, Artificial Sequence
  chemically synthesized
tctgggaagtgaattgggaaag

SEQ ID NO: 42119 - DNA, 22 bp, Artificial Sequence
  chemically synthesized
tgggaagtgaattgggaaagtg

SEQ ID NO: 42120 - DNA, 22 bp, Artificial Sequence
  chemically synthesized
ggaagtgaattgggaaagtgaa

SEQ ID NO: 42121 - DNA, 22 bp, Artificial Sequence
  chemically synthesized
ggaaagtgaatggggaaaagcc

SEQ ID NO: 42122 - DNA, 22 bp, Artificial Sequence
  chemically synthesized
aacacacagacagccccatgga

SEQ ID NO: 42123 - DNA, 22 bp, Artificial Sequence
  chemically synthesized
tccagctcaggaaacccaccta

SEQ ID NO: 42124 - DNA, 22 bp, Artificial Sequence
  chemically synthesized
cagctcaggaaacccacctagg

SEQ ID NO: 42125 - DNA, 22 bp, Artificial Sequence
  chemically synthesized
aggaaacccacctaggtataga

SEQ ID NO: 42126 - DNA, 22 bp, Artificial Sequence
  chemically synthesized
ggtatagagaccttctccggaa

SEQ ID NO: 42127 - DNA, 22 bp, Artificial Sequence
  chemically synthesized
ctccggaacctctggtctgttc

SEQ ID NO: 42128 - DNA, 22 bp, Artificial Sequence
  chemically synthesized
tccggaacctctggtctgttct

SEQ ID NO: 42129 - DNA, 22 bp, Artificial Sequence
  chemically synthesized
cggaacctctggtctgttctag

SEQ ID NO: 42130 - DNA, 22 bp, Artificial Sequence
  chemically synthesized
tggtctgttctagtcctgctgt

SEQ ID NO: 42131 - DNA, 22 bp, Artificial Sequence
  chemically synthesized
gtctgttctagtcctgctgtca

SEQ ID NO: 42132 - DNA, 22 bp, Artificial Sequence
  chemically synthesized
ttctagtcctgctgtcaaaaga

SEQ ID NO: 42133 - DNA, 22 bp, Artificial Sequence
  chemically synthesized
tagtcctgctgtcaaaagaaag

SEQ ID NO: 42134 - DNA, 22 bp, Artificial Sequence
  chemically synthesized
gtcctgctgtcaaaagaaaggg

SEQ ID NO: 42135 - DNA, 22 bp, Artificial Sequence
  chemically synthesized
ctgtcaaaagaaaggggttgga

SEQ ID NO: 42136 - DNA, 22 bp, Artificial Sequence
  chemically synthesized
tcaaaagaaaggggttggactg

SEQ ID NO: 42137 - DNA, 22 bp, Artificial Sequence
  chemically synthesized
gactgatgtttcccagtggagg

SEQ ID NO: 42138 - DNA, 22 bp, Artificial Sequence
  chemically synthesized
atgtttcccagtggagggcttg

SEQ ID NO: 42139 - DNA, 22 bp, Artificial Sequence
  chemically synthesized
cccagtggagggcttgtttgtc

SEQ ID NO: 42140 - DNA, 22 bp, Artificial Sequence
  chemically synthesized
ccagtggagggcttgtttgtca

SEQ ID NO: 42141 - DNA, 22 bp, Artificial Sequence
  chemically synthesized
gtttgtcatttttggacctaac

SEQ ID NO: 42142 - DNA, 22 bp, Artificial Sequence
  chemically synthesized
tttgtcatttttggacctaaca

SEQ ID NO: 42143 - DNA, 22 bp, Artificial Sequence
  chemically synthesized
gtcatttttggacctaacatcc

SEQ ID NO: 42144 - DNA, 22 bp, Artificial Sequence
  chemically synthesized
tcatttttggacctaacatcca

SEQ ID NO: 42145 - DNA, 22 bp, Artificial Sequence
  chemically synthesized
ttggacctaacatccagttcat

SEQ ID NO: 42146 - DNA, 22 bp, Artificial Sequence
  chemically synthesized
tggacctaacatccagttcatc

SEQ ID NO: 42147 - DNA, 22 bp, Artificial Sequence
  chemically synthesized
ggacctaacatccagttcatca

SEQ ID NO: 42148 - DNA, 22 bp, Artificial Sequence
  chemically synthesized
gacctaacatccagttcatcaa

SEQ ID NO: 42149 - DNA, 22 bp, Artificial Sequence
  chemically synthesized
acatccagttcatcaaggtcac

SEQ ID NO: 42150 - DNA, 22 bp, Artificial Sequence
  chemically synthesized
atcaaggtcacttctgactccc

SEQ ID NO: 42151 - DNA, 22 bp, Artificial Sequence
  chemically synthesized
ctgactcccaggaagagaggca

SEQ ID NO: 42152 - DNA, 22 bp, Artificial Sequence
  chemically synthesized
tgactcccaggaagagaggcag

SEQ ID NO: 42153 - DNA, 22 bp, Artificial Sequence
  chemically synthesized
actcccaggaagagaggcagac

SEQ ID NO: 42154 - DNA, 22 bp, Artificial Sequence
  chemically synthesized
ccaggaagagaggcagacctgt

SEQ ID NO: 42155 - DNA, 22 bp, Artificial Sequence
  chemically synthesized
ttaaggggcgggtggtttgagc

SEQ ID NO: 42156 - DNA, 22 bp, Artificial Sequence
  chemically synthesized
aggggcgggtggtttgagccac

SEQ ID NO: 42157 - DNA, 22 bp, Artificial Sequence
  chemically synthesized
gagccacttaggacattttgga

SEQ ID NO: 42158 - DNA, 22 bp, Artificial Sequence
  chemically synthesized
agccacttaggacattttggac

SEQ ID NO: 42159 - DNA, 22 bp, Artificial Sequence
  chemically synthesized
aggacattttggacattttgca

SEQ ID NO: 42160 - DNA, 22 bp, Artificial Sequence
  chemically synthesized
ggacattttggacattttgcat

SEQ ID NO: 42161 - DNA, 22 bp, Artificial Sequence
  chemically synthesized
tggacattttgcatctctcatg

SEQ ID NO: 42162 - DNA, 22 bp, Artificial Sequence
  chemically synthesized
ggacattttgcatctctcatga

SEQ ID NO: 42163 - DNA, 22 bp, Artificial Sequence
  chemically synthesized
gacattttgcatctctcatgat

SEQ ID NO: 42164 - DNA, 22 bp, Artificial Sequence
  chemically synthesized
tgcatctctcatgattctatct

SEQ ID NO: 42165 - DNA, 22 bp, Artificial Sequence
  chemically synthesized
gcatctctcatgattctatctt

SEQ ID NO: 42166 - DNA, 22 bp, Artificial Sequence
  chemically synthesized
catctctcatgattctatcttg

SEQ ID NO: 42167 - DNA, 22 bp, Artificial Sequence
  chemically synthesized
tcatgattctatcttgagagtt

SEQ ID NO: 42168 - DNA, 22 bp, Artificial Sequence
  chemically synthesized
atgattctatcttgagagttta

SEQ ID NO: 42169 - DNA, 22 bp, Artificial Sequence
  chemically synthesized
tatcttgagagtttagtttggt

SEQ ID NO: 42170 - DNA, 22 bp, Artificial Sequence
  chemically synthesized
tcttgagagtttagtttggttg

SEQ ID NO: 42171 - DNA, 22 bp, Artificial Sequence
  chemically synthesized
gagagtttagtttggttggagt

SEQ ID NO: 42172 - DNA, 22 bp, Artificial Sequence
  chemically synthesized
agagtttagtttggttggagtt

SEQ ID NO: 42173 - DNA, 22 bp, Artificial Sequence
  chemically synthesized
agtttggttggagtttagtttt

SEQ ID NO: 42174 - DNA, 22 bp, Artificial Sequence
  chemically synthesized
gtttggttggagtttagttttt

SEQ ID NO: 42175 - DNA, 22 bp, Artificial Sequence
  chemically synthesized
ggttggagtttagtttttgagt

SEQ ID NO: 42176 - DNA, 22 bp, Artificial Sequence
  chemically synthesized
gttggagtttagtttttgagtt

SEQ ID NO: 42177 - DNA, 22 bp, Artificial Sequence
  chemically synthesized
gagtttagtttttgagtttttt

SEQ ID NO: 42178 - DNA, 22 bp, Artificial Sequence
  chemically synthesized
agtttttgagttttttgttcgg

SEQ ID NO: 42179 - DNA, 22 bp, Artificial Sequence
  chemically synthesized
gtttttgagttttttgttcggg

SEQ ID NO: 42180 - DNA, 22 bp, Artificial Sequence
  chemically synthesized
ttgagttttttgttcgggttgt

SEQ ID NO: 42181 - DNA, 22 bp, Artificial Sequence
  chemically synthesized
tgagttttttgttcgggttgtg

SEQ ID NO: 42182 - DNA, 22 bp, Artificial Sequence
  chemically synthesized
gagttttttgttcgggttgtgg

SEQ ID NO: 42183 - DNA, 22 bp, Artificial Sequence
  chemically synthesized
agttttttgttcgggttgtggt

SEQ ID NO: 42184 - DNA, 22 bp, Artificial Sequence
  chemically synthesized
tttgttcgggttgtggtttctc

SEQ ID NO: 42185 - DNA, 22 bp, Artificial Sequence
  chemically synthesized
ttgttcgggttgtggtttctct

SEQ ID NO: 42186 - DNA, 22 bp, Artificial Sequence
  chemically synthesized
tgttcgggttgtggtttctctt

SEQ ID NO: 42187 - DNA, 22 bp, Artificial Sequence
  chemically synthesized
gttcgggttgtggtttctcttc

SEQ ID NO: 42188 - DNA, 22 bp, Artificial Sequence
  chemically synthesized
ttcgggttgtggtttctcttcc

SEQ ID NO: 42189 - DNA, 22 bp, Artificial Sequence
  chemically synthesized
gggttgtggtttctcttcctcc

SEQ ID NO: 42190 - DNA, 22 bp, Artificial Sequence
  chemically synthesized
tggtttctcttcctccattaaa

SEQ ID NO: 42191 - DNA, 22 bp, Artificial Sequence
  chemically synthesized
ctcttcctccattaaaaaaaaa

SEQ ID NO: 42192 - DNA, 22 bp, Artificial Sequence
  chemically synthesized
tcttcctccattaaaaaaaaaa

SEQ ID NO: 42193 - DNA, 22 bp, Artificial Sequence
  chemically synthesized
ttcctccattaaaaaaaaaaat

SEQ ID NO: 42194 - DNA, 22 bp, Artificial Sequence
  chemically synthesized
cctccattaaaaaaaaaaattg

SEQ ID NO: 42195 - DNA, 22 bp, Artificial Sequence
  chemically synthesized
ctccattaaaaaaaaaaattgg

SEQ ID NO: 42196 - DNA, 22 bp, Artificial Sequence
  chemically synthesized
cattaaaaaaaaaaattggagc

SEQ ID NO: 42197 - DNA, 22 bp, Artificial Sequence
  chemically synthesized
aaaaaaaaaattggagctgtat

SEQ ID NO: 42198 - DNA, 22 bp, Artificial Sequence
  chemically synthesized
gagctgtatttctgtttcctgt

SEQ ID NO: 42199 - DNA, 22 bp, Artificial Sequence
  chemically synthesized
tatttctgtttcctgttcacgg

SEQ ID NO: 42200 - DNA, 22 bp, Artificial Sequence
  chemically synthesized
ctgtttcctgttcacggagcgg

SEQ ID NO: 42201 - DNA, 22 bp, Artificial Sequence
  chemically synthesized
tgtttcctgttcacggagcgga

SEQ ID NO: 42202 - DNA, 22 bp, Artificial Sequence
  chemically synthesized
tttcctgttcacggagcggaca

SEQ ID NO: 42203 - DNA, 22 bp, Artificial Sequence
  chemically synthesized
cctgttcacggagcggacagaa

SEQ ID NO: 42204 - DNA, 22 bp, Artificial Sequence
  chemically synthesized
ctgttcacggagcggacagaag

SEQ ID NO: 42205 - DNA, 22 bp, Artificial Sequence
  chemically synthesized
ttcacggagcggacagaaggag

SEQ ID NO: 42206 - DNA, 22 bp, Artificial Sequence
  chemically synthesized
acggagcggacagaaggagggt

SEQ ID NO: 42207 - DNA, 22 bp, Artificial Sequence
  chemically synthesized
atacatggagcagagccgagaa

SEQ ID NO: 42208 - DNA, 22 bp, Artificial Sequence
  chemically synthesized
gagaaaagtgagaaatggagct

SEQ ID NO: 42209 - DNA, 22 bp, Artificial Sequence
  chemically synthesized
ttttcttggcttccaaacagtt

SEQ ID NO: 42210 - DNA, 22 bp, Artificial Sequence
  chemically synthesized
tttcttggcttccaaacagttg

SEQ ID NO: 42211 - DNA, 22 bp, Artificial Sequence
  chemically synthesized
ttcttggcttccaaacagttgt

SEQ ID NO: 42212 - DNA, 22 bp, Artificial Sequence
  chemically synthesized
tcttggcttccaaacagttgta

SEQ ID NO: 42213 - DNA, 22 bp, Artificial Sequence
  chemically synthesized
cttggcttccaaacagttgtaa

SEQ ID NO: 42214 - DNA, 22 bp, Artificial Sequence
  chemically synthesized
ttggcttccaaacagttgtaat

SEQ ID NO: 42215 - DNA, 22 bp, Artificial Sequence
  chemically synthesized
ggcttccaaacagttgtaattt

SEQ ID NO: 42216 - DNA, 22 bp, Artificial Sequence
  chemically synthesized
gcttccaaacagttgtaatttc

SEQ ID NO: 42217 - DNA, 22 bp, Artificial Sequence
  chemically synthesized
ccaaacagttgtaatttccact

SEQ ID NO: 42218 - DNA, 22 bp, Artificial Sequence
  chemically synthesized
caaacagttgtaatttccactg

SEQ ID NO: 42219 - DNA, 22 bp, Artificial Sequence
  chemically synthesized
taatttccactgccactgctta

SEQ ID NO: 42220 - DNA, 22 bp, Artificial Sequence
  chemically synthesized
ccactgccactgcttagttcct

SEQ ID NO: 42221 - DNA, 22 bp, Artificial Sequence
  chemically synthesized
cactgccactgcttagttcctg

SEQ ID NO: 42222 - DNA, 22 bp, Artificial Sequence
  chemically synthesized
ccactgcttagttcctgggcac

SEQ ID NO: 42223 - DNA, 22 bp, Artificial Sequence
  chemically synthesized
cttagttcctgggcaccaggca

SEQ ID NO: 42224 - DNA, 22 bp, Artificial Sequence
  chemically synthesized
agttcctgggcaccaggcatac

SEQ ID NO: 42225 - DNA, 22 bp, Artificial Sequence
  chemically synthesized
gttcctgggcaccaggcataca

SEQ ID NO: 42226 - DNA, 22 bp, Artificial Sequence
  chemically synthesized
ctgggcaccaggcatacagagt

SEQ ID NO: 42227 - DNA, 22 bp, Artificial Sequence
  chemically synthesized
ggcaccaggcatacagagtggg

SEQ ID NO: 42228 - DNA, 22 bp, Artificial Sequence
  chemically synthesized
tgccacaaatcaggatttggca

SEQ ID NO: 42229 - DNA, 22 bp, Artificial Sequence
  chemically synthesized
gccacaaatcaggatttggcat

SEQ ID NO: 42230 - DNA, 22 bp, Artificial Sequence
  chemically synthesized
ccacaaatcaggatttggcatt

SEQ ID NO: 42231 - DNA, 22 bp, Artificial Sequence
  chemically synthesized
ggcatttaaatccacaggaagc

SEQ ID NO: 42232 - DNA, 22 bp, Artificial Sequence
  chemically synthesized
gcatttaaatccacaggaagca

SEQ ID NO: 42233 - DNA, 22 bp, Artificial Sequence
  chemically synthesized
aaatccacaggaagcaagaaga

SEQ ID NO: 42234 - DNA, 22 bp, Artificial Sequence
  chemically synthesized
aatccacaggaagcaagaagaa

SEQ ID NO: 42235 - DNA, 22 bp, Artificial Sequence
  chemically synthesized
cttatttatagatttgcagatg

SEQ ID NO: 42236 - DNA, 22 bp, Artificial Sequence
  chemically synthesized
atttatagatttgcagatgaat

SEQ ID NO: 42237 - DNA, 22 bp, Artificial Sequence
  chemically synthesized
tttatagatttgcagatgaatg

SEQ ID NO: 42238 - DNA, 22 bp, Artificial Sequence
  chemically synthesized
atagatttgcagatgaatgaga

SEQ ID NO: 42239 - DNA, 22 bp, Artificial Sequence
  chemically synthesized
tagatttgcagatgaatgagat

SEQ ID NO: 42240 - DNA, 22 bp, Artificial Sequence
  chemically synthesized
gcagatgaatgagataaccaaa

SEQ ID NO: 42241 - DNA, 22 bp, Artificial Sequence
  chemically synthesized
cagatgaatgagataaccaaaa

SEQ ID NO: 42242 - DNA, 22 bp, Artificial Sequence
  chemically synthesized
ctcgcgtatgtgaaggagcaat

SEQ ID NO: 42243 - DNA, 22 bp, Artificial Sequence
  chemically synthesized
tcgcgtatgtgaaggagcaatt

SEQ ID NO: 42244 - DNA, 22 bp, Artificial Sequence
  chemically synthesized
gcgtatgtgaaggagcaattcc

SEQ ID NO: 42245 - DNA, 22 bp, Artificial Sequence
  chemically synthesized
cattttcagacttggaaagttc

SEQ ID NO: 42246 - DNA, 22 bp, Artificial Sequence
  chemically synthesized
tcagacttggaaagttctccat

SEQ ID NO: 42247 - DNA, 22 bp, Artificial Sequence
  chemically synthesized
cagacttggaaagttctccata

SEQ ID NO: 42248 - DNA, 22 bp, Artificial Sequence
  chemically synthesized
agacttggaaagttctccataa

SEQ ID NO: 42249 - DNA, 22 bp, Artificial Sequence
  chemically synthesized
ggaaagttctccataattaagt

SEQ ID NO: 42250 - DNA, 22 bp, Artificial Sequence
  chemically synthesized
gaaagttctccataattaagta

SEQ ID NO: 42251 - DNA, 22 bp, Artificial Sequence
  chemically synthesized
tccataattaagtatcacccaa

SEQ ID NO: 42252 - DNA, 22 bp, Artificial Sequence
  chemically synthesized
cataattaagtatcacccaacc

SEQ ID NO: 42253 - DNA, 22 bp, Artificial Sequence
  chemically synthesized
agtatcacccaaccctgaaagc

SEQ ID NO: 42254 - DNA, 22 bp, Artificial Sequence
  chemically synthesized
aaagcacactgcatcccaaggt

SEQ ID NO: 42255 - DNA, 22 bp, Artificial Sequence
  chemically synthesized
catcccaaggttaagatcagct

SEQ ID NO: 42256 - DNA, 22 bp, Artificial Sequence
  chemically synthesized
agatcagcttcctgaaaacagg

SEQ ID NO: 42257 - DNA, 22 bp, Artificial Sequence
  chemically synthesized
cctgaaaacagggcagaagact

SEQ ID NO: 42258 - DNA, 22 bp, Artificial Sequence
  chemically synthesized
ctgaaaacagggcagaagactg

SEQ ID NO: 42259 - DNA, 22 bp, Artificial Sequence
  chemically synthesized
aaaacagggcagaagactgctg

SEQ ID NO: 42260 - DNA, 22 bp, Artificial Sequence
  chemically synthesized
ctgcttcagtggtagctcaaaa

SEQ ID NO: 42261 - DNA, 22 bp, Artificial Sequence
  chemically synthesized
cttcagtggtagctcaaaaatt

SEQ ID NO: 42262 - DNA, 22 bp, Artificial Sequence
  chemically synthesized
cagtggtagctcaaaaattcta

SEQ ID NO: 42263 - DNA, 22 bp, Artificial Sequence
  chemically synthesized
agtggtagctcaaaaattctat

SEQ ID NO: 42264 - DNA, 22 bp, Artificial Sequence
  chemically synthesized
aaaaattctattttgaaggaca

SEQ ID NO: 42265 - DNA, 22 bp, Artificial Sequence
  chemically synthesized
tattttgaaggacaggttagta

SEQ ID NO: 42266 - DNA, 22 bp, Artificial Sequence
  chemically synthesized
ttttgaaggacaggttagtacc

SEQ ID NO: 42267 - DNA, 22 bp, Artificial Sequence
  chemically synthesized
tgaaggacaggttagtaccaca

SEQ ID NO: 42268 - DNA, 22 bp, Artificial Sequence
  chemically synthesized
gaaggacaggttagtaccacac

SEQ ID NO: 42269 - DNA, 22 bp, Artificial Sequence
  chemically synthesized
aaggacaggttagtaccacact

SEQ ID NO: 42270 - DNA, 22 bp, Artificial Sequence
  chemically synthesized
gtaccacactacatttaactgg

SEQ ID NO: 42271 - DNA, 22 bp, Artificial Sequence
  chemically synthesized
catttaactggattcagttcat

SEQ ID NO: 42272 - DNA, 22 bp, Artificial Sequence
  chemically synthesized
aactggattcagttcatgtgat

SEQ ID NO: 42273 - DNA, 22 bp, Artificial Sequence
  chemically synthesized
actggattcagttcatgtgatt

SEQ ID NO: 42274 - DNA, 22 bp, Artificial Sequence
  chemically synthesized
gattcagttcatgtgattatac

SEQ ID NO: 42275 - DNA, 22 bp, Artificial Sequence
  chemically synthesized
agttcatgtgattatacagtgc

SEQ ID NO: 42276 - DNA, 22 bp, Artificial Sequence
  chemically synthesized
atgtgattatacagtgccttgc

SEQ ID NO: 42277 - DNA, 22 bp, Artificial Sequence
  chemically synthesized
tacagtgccttgctttctagaa

SEQ ID NO: 42278 - DNA, 22 bp, Artificial Sequence
  chemically synthesized
gctttctagaatgtgtaatcat

SEQ ID NO: 42279 - DNA, 22 bp, Artificial Sequence
  chemically synthesized
ctttctagaatgtgtaatcatc

SEQ ID NO: 42280 - DNA, 22 bp, Artificial Sequence
  chemically synthesized
tctagaatgtgtaatcatctct

SEQ ID NO: 42281 - DNA, 22 bp, Artificial Sequence
  chemically synthesized
ctagaatgtgtaatcatctctt

SEQ ID NO: 42282 - DNA, 22 bp, Artificial Sequence
  chemically synthesized
tagaatgtgtaatcatctcttt

SEQ ID NO: 42283 - DNA, 22 bp, Artificial Sequence
  chemically synthesized
gaatgtgtaatcatctctttct

SEQ ID NO: 42284 - DNA, 22 bp, Artificial Sequence
  chemically synthesized
tttctgatgacattttaaatat

SEQ ID NO: 42285 - DNA, 22 bp, Artificial Sequence
  chemically synthesized
tctgatgacattttaaatatcc

SEQ ID NO: 42286 - DNA, 22 bp, Artificial Sequence
  chemically synthesized
ctgatgacattttaaatatcca

SEQ ID NO: 42287 - DNA, 22 bp, Artificial Sequence
  chemically synthesized
tgatgacattttaaatatccaa

SEQ ID NO: 42288 - DNA, 22 bp, Artificial Sequence
  chemically synthesized
atgacattttaaatatccaact

SEQ ID NO: 42289 - DNA, 22 bp, Artificial Sequence
  chemically synthesized
taaatatccaactagacaaata

SEQ ID NO: 42290 - DNA, 22 bp, Artificial Sequence
  chemically synthesized
aaatatccaactagacaaataa

SEQ ID NO: 42291 - DNA, 22 bp, Artificial Sequence
  chemically synthesized
aatatccaactagacaaataat

SEQ ID NO: 42292 - DNA, 22 bp, Artificial Sequence
  chemically synthesized
gacaaataattgcagcaataat

SEQ ID NO: 42293 - DNA, 22 bp, Artificial Sequence
  chemically synthesized
cagcaataattgatagcagagt

SEQ ID NO: 42294 - DNA, 22 bp, Artificial Sequence
  chemically synthesized
atagcagagtcaagctggaaga

SEQ ID NO: 42295 - DNA, 22 bp, Artificial Sequence
  chemically synthesized
gaagatcattgattggcagagt

SEQ ID NO: 42296 - DNA, 22 bp, Artificial Sequence
  chemically synthesized
attggcagagtccccactgaaa

SEQ ID NO: 42297 - DNA, 22 bp, Artificial Sequence
  chemically synthesized
gcagagtccccactgaaacaaa

SEQ ID NO: 42298 - DNA, 22 bp, Artificial Sequence
  chemically synthesized
aaacaaatctttctttcaaaca

SEQ ID NO: 42299 - DNA, 22 bp, Artificial Sequence
  chemically synthesized
tctttcaaacattacagaaatg

SEQ ID NO: 42300 - DNA, 22 bp, Artificial Sequence
  chemically synthesized
ctttcaaacattacagaaatga

SEQ ID NO: 42301 - DNA, 22 bp, Artificial Sequence
  chemically synthesized
tttcaaacattacagaaatgat

SEQ ID NO: 42302 - DNA, 22 bp, Artificial Sequence
  chemically synthesized
tcaaacattacagaaatgatga

SEQ ID NO: 42303 - DNA, 22 bp, Artificial Sequence
  chemically synthesized
caaacattacagaaatgatgat

SEQ ID NO: 42304 - DNA, 22 bp, Artificial Sequence
  chemically synthesized
aaacattacagaaatgatgatg

SEQ ID NO: 42305 - DNA, 22 bp, Artificial Sequence
  chemically synthesized
cagaaatgatgatgtttaagtc

SEQ ID NO: 42306 - DNA, 22 bp, Artificial Sequence
  chemically synthesized
aagtctaacttttgctgataaa

SEQ ID NO: 42307 - DNA, 22 bp, Artificial Sequence
  chemically synthesized
agtctaacttttgctgataaat

SEQ ID NO: 42308 - DNA, 22 bp, Artificial Sequence
  chemically synthesized
acttttgctgataaatgctcaa

SEQ ID NO: 42309 - DNA, 22 bp, Artificial Sequence
  chemically synthesized
ttgctgataaatgctcaaaatc

SEQ ID NO: 42310 - DNA, 22 bp, Artificial Sequence
  chemically synthesized
tgctgataaatgctcaaaatct

SEQ ID NO: 42311 - DNA, 22 bp, Artificial Sequence
  chemically synthesized
gctgataaatgctcaaaatctg

SEQ ID NO: 42312 - DNA, 22 bp, Artificial Sequence
  chemically synthesized
ctgataaatgctcaaaatctga

SEQ ID NO: 42313 - DNA, 22 bp, Artificial Sequence
  chemically synthesized
ataaatgctcaaaatctgattt

SEQ ID NO: 42314 - DNA, 22 bp, Artificial Sequence
  chemically synthesized
aaaatctgatttactgataaag

SEQ ID NO: 42315 - DNA, 22 bp, Artificial Sequence
  chemically synthesized
atttactgataaaggcactgca

SEQ ID NO: 42316 - DNA, 22 bp, Artificial Sequence
  chemically synthesized
actgataaaggcactgcaagaa

SEQ ID NO: 42317 - DNA, 22 bp, Artificial Sequence
  chemically synthesized
ctgataaaggcactgcaagaaa

SEQ ID NO: 42318 - DNA, 22 bp, Artificial Sequence
  chemically synthesized
ataaaggcactgcaagaaaacc

SEQ ID NO: 42319 - DNA, 22 bp, Artificial Sequence
  chemically synthesized
caagaaaacctgcacttcagcc

SEQ ID NO: 42320 - DNA, 22 bp, Artificial Sequence
  chemically synthesized
cacttcagcccatgattacttt

SEQ ID NO: 42321 - DNA, 22 bp, Artificial Sequence
  chemically synthesized
cagcccatgattactttgcgag

SEQ ID NO: 42322 - DNA, 22 bp, Artificial Sequence
  chemically synthesized
agcccatgattactttgcgaga

SEQ ID NO: 42323 - DNA, 22 bp, Artificial Sequence
  chemically synthesized
ctttgcgagatgtttgagaaga

SEQ ID NO: 42324 - DNA, 22 bp, Artificial Sequence
  chemically synthesized
tgcgagatgtttgagaagaatc

SEQ ID NO: 42325 - DNA, 22 bp, Artificial Sequence
  chemically synthesized
gcgagatgtttgagaagaatca

SEQ ID NO: 42326 - DNA, 22 bp, Artificial Sequence
  chemically synthesized
cgagatgtttgagaagaatcag

SEQ ID NO: 42327 - DNA, 22 bp, Artificial Sequence
  chemically synthesized
gagaagaatcaggcagtgtgat

SEQ ID NO: 42328 - DNA, 22 bp, Artificial Sequence
  chemically synthesized
agaagaatcaggcagtgtgatt

SEQ ID NO: 42329 - DNA, 22 bp, Artificial Sequence
  chemically synthesized
atattatttcccatgaataact

SEQ ID NO: 42330 - DNA, 22 bp, Artificial Sequence
  chemically synthesized
tattatttcccatgaataactg

SEQ ID NO: 42331 - DNA, 22 bp, Artificial Sequence
  chemically synthesized
tttcccatgaataactgcaagg

SEQ ID NO: 42332 - DNA, 22 bp, Artificial Sequence
  chemically synthesized
cccatgaataactgcaaggata

SEQ ID NO: 42333 - DNA, 22 bp, Artificial Sequence
  chemically synthesized
ccatgaataactgcaaggatag

SEQ ID NO: 42334 - DNA, 22 bp, Artificial Sequence
  chemically synthesized
caaggatagtgtgggtagttgg

SEQ ID NO: 42335 - DNA, 22 bp, Artificial Sequence
  chemically synthesized
gaggagaatcaacacaggcgag

SEQ ID NO: 42336 - DNA, 22 bp, Artificial Sequence
  chemically synthesized
ctccttaatgctacacttcctg

SEQ ID NO: 42337 - DNA, 22 bp, Artificial Sequence
  chemically synthesized
cttaatgctacacttcctgaac

SEQ ID NO: 42338 - DNA, 22 bp, Artificial Sequence
  chemically synthesized
aatgctacacttcctgaacaat

SEQ ID NO: 42339 - DNA, 22 bp, Artificial Sequence
  chemically synthesized
atgctacacttcctgaacaatg

SEQ ID NO: 42340 - DNA, 22 bp, Artificial Sequence
  chemically synthesized
cacttcctgaacaatgctagcc

SEQ ID NO: 42341 - DNA, 22 bp, Artificial Sequence
  chemically synthesized
cctgaacaatgctagccaacaa

SEQ ID NO: 42342 - DNA, 22 bp, Artificial Sequence
  chemically synthesized
ctgaacaatgctagccaacaat

SEQ ID NO: 42343 - DNA, 22 bp, Artificial Sequence
  chemically synthesized
aacaatgctagccaacaatcag

SEQ ID NO: 42344 - DNA, 22 bp, Artificial Sequence
  chemically synthesized
gccaacaatcagggtttacagc

SEQ ID NO: 42345 - DNA, 22 bp, Artificial Sequence
  chemically synthesized
acagccgttttcccctctaata

SEQ ID NO: 42346 - DNA, 22 bp, Artificial Sequence
  chemically synthesized
cagccgttttcccctctaatat

SEQ ID NO: 42347 - DNA, 22 bp, Artificial Sequence
  chemically synthesized
tcccctctaatatatatcccgt

SEQ ID NO: 42348 - DNA, 22 bp, Artificial Sequence
  chemically synthesized
cccctctaatatatatcccgtg

SEQ ID NO: 42349 - DNA, 22 bp, Artificial Sequence
  chemically synthesized
ccctctaatatatatcccgtgg

SEQ ID NO: 42350 - DNA, 22 bp, Artificial Sequence
  chemically synthesized
taatatatatcccgtggtagag

SEQ ID NO: 42351 - DNA, 22 bp, Artificial Sequence
  chemically synthesized
atatatatcccgtggtagagaa

SEQ ID NO: 42352 - DNA, 22 bp, Artificial Sequence
  chemically synthesized
gacaaggggaagaccaggaaaa

SEQ ID NO: 42353 - DNA, 22 bp, Artificial Sequence
  chemically synthesized
acaaggggaagaccaggaaaag

SEQ ID NO: 42354 - DNA, 22 bp, Artificial Sequence
  chemically synthesized
cattcaggcctttgaaaagtgg

SEQ ID NO: 42355 - DNA, 22 bp, Artificial Sequence
  chemically synthesized
aggcctttgaaaagtggtttaa

SEQ ID NO: 42356 - DNA, 22 bp, Artificial Sequence
  chemically synthesized
tgaaaagtggtttaaatcgatg

SEQ ID NO: 42357 - DNA, 22 bp, Artificial Sequence
  chemically synthesized
gaaaagtggtttaaatcgatgc

SEQ ID NO: 42358 - DNA, 22 bp, Artificial Sequence
  chemically synthesized
aaaagtggtttaaatcgatgcc

SEQ ID NO: 42359 - DNA, 22 bp, Artificial Sequence
  chemically synthesized
aaatcgatgcctcaaattggga

SEQ ID NO: 42360 - DNA, 22 bp, Artificial Sequence
  chemically synthesized
aatcgatgcctcaaattgggac

SEQ ID NO: 42361 - DNA, 22 bp, Artificial Sequence
  chemically synthesized
aaattgggactcaaattcccct

SEQ ID NO: 42362 - DNA, 22 bp, Artificial Sequence
  chemically synthesized
ggactcaaattcccctgcccag

SEQ ID NO: 42363 - DNA, 22 bp, Artificial Sequence
  chemically synthesized
aaattcccctgcccagtgcaaa

SEQ ID NO: 42364 - DNA, 22 bp, Artificial Sequence
  chemically synthesized
ccctgcccagtgcaaagatccc

SEQ ID NO: 42365 - DNA, 22 bp, Artificial Sequence
  chemically synthesized
cccagtgcaaagatccctggcc

SEQ ID NO: 42366 - DNA, 22 bp, Artificial Sequence
  chemically synthesized
gccaaggtcagaagacttgaga

SEQ ID NO: 42367 - DNA, 22 bp, Artificial Sequence
  chemically synthesized
gagaccaggcaagtcccagatg

SEQ ID NO: 42368 - DNA, 22 bp, Artificial Sequence
  chemically synthesized
agaccaggcaagtcccagatga

SEQ ID NO: 42369 - DNA, 22 bp, Artificial Sequence
  chemically synthesized
aggcaagtccccaggtatagct

SEQ ID NO: 42370 - DNA, 22 bp, Artificial Sequence
  chemically synthesized
cagtccctttagccccagtctg

SEQ ID NO: 42371 - DNA, 22 bp, Artificial Sequence
  chemically synthesized
tagccccagtctgtttctctgt

SEQ ID NO: 42372 - DNA, 22 bp, Artificial Sequence
  chemically synthesized
agccccagtctgtttctctgtc

SEQ ID NO: 42373 - DNA, 22 bp, Artificial Sequence
  chemically synthesized
gccccagtctgtttctctgtcc

SEQ ID NO: 42374 - DNA, 22 bp, Artificial Sequence
  chemically synthesized
tttctctgtccaaggcagaacc

SEQ ID NO: 42375 - DNA, 22 bp, Artificial Sequence
  chemically synthesized
ctctgtccaaggcagaacccaa

SEQ ID NO: 42376 - DNA, 22 bp, Artificial Sequence
  chemically synthesized
tctgtccaaggcagaacccaaa

SEQ ID NO: 42377 - DNA, 22 bp, Artificial Sequence
  chemically synthesized
tgtccaaggcagaacccaaatc

SEQ ID NO: 42378 - DNA, 22 bp, Artificial Sequence
  chemically synthesized
tccaaggcagaacccaaatcaa

SEQ ID NO: 42379 - DNA, 22 bp, Artificial Sequence
  chemically synthesized
ctgtctatgtcatgtgttttga

SEQ ID NO: 42380 - DNA, 22 bp, Artificial Sequence
  chemically synthesized
tctatgtcatgtgttttgattg

SEQ ID NO: 42381 - DNA, 22 bp, Artificial Sequence
  chemically synthesized
tgtcatgtgttttgattgtaat

SEQ ID NO: 42382 - DNA, 22 bp, Artificial Sequence
  chemically synthesized
tgattgtaatatttaagttagg

SEQ ID NO: 42383 - DNA, 22 bp, Artificial Sequence
  chemically synthesized
gattgtaatatttaagttaggg

SEQ ID NO: 42384 - DNA, 22 bp, Artificial Sequence
  chemically synthesized
attgtaatatttaagttagggc

SEQ ID NO: 42385 - DNA, 22 bp, Artificial Sequence
  chemically synthesized
taatatttaagttagggcactg

SEQ ID NO: 42386 - DNA, 22 bp, Artificial Sequence
  chemically synthesized
aagttagggcactgtgttcaac

SEQ ID NO: 42387 - DNA, 22 bp, Artificial Sequence
  chemically synthesized
agttagggcactgtgttcaaca

SEQ ID NO: 42388 - DNA, 22 bp, Artificial Sequence
  chemically synthesized
gggcactgtgttcaacaactca

SEQ ID NO: 42389 - DNA, 22 bp, Artificial Sequence
  chemically synthesized
tgttcaacaactcagaccctgt

SEQ ID NO: 42390 - DNA, 22 bp, Artificial Sequence
  chemically synthesized
aacaactcagaccctgtggaat

SEQ ID NO: 42391 - DNA, 22 bp, Artificial Sequence
  chemically synthesized
agaccctgtggaatgctgcagt

SEQ ID NO: 42392 - DNA, 22 bp, Artificial Sequence
  chemically synthesized
tggaatgctgcagttgtcagaa

SEQ ID NO: 42393 - DNA, 22 bp, Artificial Sequence
  chemically synthesized
cagttgtcagaaataactcaag

SEQ ID NO: 42394 - DNA, 22 bp, Artificial Sequence
  chemically synthesized
tcagaaataactcaagagagga

SEQ ID NO: 42395 - DNA, 22 bp, Artificial Sequence
  chemically synthesized
aagagaggatgctcgtccccag

SEQ ID NO: 42396 - DNA, 22 bp, Artificial Sequence
  chemically synthesized
gtccccaggaaacatcaaatga

SEQ ID NO: 42397 - DNA, 22 bp, Artificial Sequence
  chemically synthesized
gcatattagcagacgtggatta

SEQ ID NO: 42398 - DNA, 22 bp, Artificial Sequence
  chemically synthesized
gcagacgtggattacagtaagg

SEQ ID NO: 42399 - DNA, 22 bp, Artificial Sequence
  chemically synthesized
cagtaaggaaaatctaaaacag

SEQ ID NO: 42400 - DNA, 22 bp, Artificial Sequence
  chemically synthesized
aaacagaagatgtatctggatg

SEQ ID NO: 42401 - DNA, 22 bp, Artificial Sequence
  chemically synthesized
gatgcttcagcagacaacaaag

SEQ ID NO: 42402 - DNA, 22 bp, Artificial Sequence
  chemically synthesized
cagcagacaacaaaggaagaat

SEQ ID NO: 42403 - DNA, 22 bp, Artificial Sequence
  chemically synthesized
agcagacaacaaaggaagaatt

SEQ ID NO: 42404 - DNA, 22 bp, Artificial Sequence
  chemically synthesized
ggggactgggtctaagcactcg

SEQ ID NO: 42405 - DNA, 22 bp, Artificial Sequence
  chemically synthesized
gggactgggtctaagcactcgc

SEQ ID NO: 42406 - DNA, 22 bp, Artificial Sequence
  chemically synthesized
ggtctaagcactcgcccaaagc

SEQ ID NO: 42407 - DNA, 22 bp, Artificial Sequence
  chemically synthesized
agcactcgcccaaagcactaga

SEQ ID NO: 42408 - DNA, 22 bp, Artificial Sequence
  chemically synthesized
gcccaaagcactagaaggagga

SEQ ID NO: 42409 - DNA, 22 bp, Artificial Sequence
  chemically synthesized
gaaggaggatttctttttattt

SEQ ID NO: 42410 - DNA, 22 bp, Artificial Sequence
  chemically synthesized
ctttttatttttctttcctatt

SEQ ID NO: 42411 - DNA, 22 bp, Artificial Sequence
  chemically synthesized
tttttatttttctttcctattt

SEQ ID NO: 42412 - DNA, 22 bp, Artificial Sequence
  chemically synthesized
tttatttttctttcctattttt

SEQ ID NO: 42413 - DNA, 22 bp, Artificial Sequence
  chemically synthesized
ttatttttctttcctatttttg

SEQ ID NO: 42414 - DNA, 22 bp, Artificial Sequence
  chemically synthesized
tatttttctttcctatttttgt

SEQ ID NO: 42415 - DNA, 22 bp, Artificial Sequence
  chemically synthesized
atttttctttcctatttttgtt

SEQ ID NO: 42416 - DNA, 22 bp, Artificial Sequence
  chemically synthesized
tttttctttcctatttttgttc

SEQ ID NO: 42417 - DNA, 22 bp, Artificial Sequence
  chemically synthesized
ttctttcctatttttgttcttc

SEQ ID NO: 42418 - DNA, 22 bp, Artificial Sequence
  chemically synthesized
tctttcctatttttgttcttct

SEQ ID NO: 42419 - DNA, 22 bp, Artificial Sequence
  chemically synthesized
ctttcctatttttgttcttctg

SEQ ID NO: 42420 - DNA, 22 bp, Artificial Sequence
  chemically synthesized
tttcctatttttgttcttctgg

SEQ ID NO: 42421 - DNA, 22 bp, Artificial Sequence
  chemically synthesized
tcctatttttgttcttctggtt

SEQ ID NO: 42422 - DNA, 22 bp, Artificial Sequence
  chemically synthesized
cctatttttgttcttctggttg

SEQ ID NO: 42423 - DNA, 22 bp, Artificial Sequence
  chemically synthesized
ctatttttgttcttctggttgt

SEQ ID NO: 42424 - DNA, 22 bp, Artificial Sequence
  chemically synthesized
tttttgttcttctggttgttct

SEQ ID NO: 42425 - DNA, 22 bp, Artificial Sequence
  chemically synthesized
ttgttcttctggttgttctttc

SEQ ID NO: 42426 - DNA, 22 bp, Artificial Sequence
  chemically synthesized
tgttcttctggttgttctttct

SEQ ID NO: 42427 - DNA, 22 bp, Artificial Sequence
  chemically synthesized
gttcttctggttgttctttctt

SEQ ID NO: 42428 - DNA, 22 bp, Artificial Sequence
  chemically synthesized
ttcttctggttgttctttcttt

SEQ ID NO: 42429 - DNA, 22 bp, Artificial Sequence
  chemically synthesized
ttctggttgttctttctttctt

SEQ ID NO: 42430 - DNA, 22 bp, Artificial Sequence
  chemically synthesized
ctggttgttctttctttcttcc

SEQ ID NO: 42431 - DNA, 22 bp, Artificial Sequence
  chemically synthesized
tggttgttctttctttcttcct

SEQ ID NO: 42432 - DNA, 22 bp, Artificial Sequence
  chemically synthesized
gttgttctttctttcttccttt

SEQ ID NO: 42433 - DNA, 22 bp, Artificial Sequence
  chemically synthesized
ttctttctttcttccttttctc

SEQ ID NO: 42434 - DNA, 22 bp, Artificial Sequence
  chemically synthesized
tttctttcttccttttctccct

SEQ ID NO: 42435 - DNA, 22 bp, Artificial Sequence
  chemically synthesized
tctttcttccttttctcccttt

SEQ ID NO: 42436 - DNA, 22 bp, Artificial Sequence
  chemically synthesized
ctttcttccttttctccctttt

SEQ ID NO: 42437 - DNA, 22 bp, Artificial Sequence
  chemically synthesized
tttcttccttttctcccttttt

SEQ ID NO: 42438 - DNA, 22 bp, Artificial Sequence
  chemically synthesized
tcttccttttctcccttttttt

SEQ ID NO: 42439 - DNA, 22 bp, Artificial Sequence
  chemically synthesized
cttccttttctccctttttttc

SEQ ID NO: 42440 - DNA, 22 bp, Artificial Sequence
  chemically synthesized
ttccttttctccctttttttct

SEQ ID NO: 42441 - DNA, 22 bp, Artificial Sequence
  chemically synthesized
ccttttctccctttttttcttt

SEQ ID NO: 42442 - DNA, 22 bp, Artificial Sequence
  chemically synthesized
cttttctccctttttttctttc

SEQ ID NO: 42443 - DNA, 22 bp, Artificial Sequence
  chemically synthesized
ttctccctttttttctttcctt

SEQ ID NO: 42444 - DNA, 22 bp, Artificial Sequence
  chemically synthesized
tctccctttttttctttccttc

SEQ ID NO: 42445 - DNA, 22 bp, Artificial Sequence
  chemically synthesized
ctccctttttttctttccttct

SEQ ID NO: 42446 - DNA, 22 bp, Artificial Sequence
  chemically synthesized
tccctttttttctttccttctt

SEQ ID NO: 42447 - DNA, 22 bp, Artificial Sequence
  chemically synthesized
cctttttttctttccttctttt

SEQ ID NO: 42448 - DNA, 22 bp, Artificial Sequence
  chemically synthesized
tttttctttccttctttttctt

SEQ ID NO: 42449 - DNA, 22 bp, Artificial Sequence
  chemically synthesized
ttttctttccttctttttcttt

SEQ ID NO: 42450 - DNA, 22 bp, Artificial Sequence
  chemically synthesized
tttctttccttctttttctttc

SEQ ID NO: 42451 - DNA, 22 bp, Artificial Sequence
  chemically synthesized
ttctttccttctttttctttct

SEQ ID NO: 42452 - DNA, 22 bp, Artificial Sequence
  chemically synthesized
tctttccttctttttctttctt

SEQ ID NO: 42453 - DNA, 22 bp, Artificial Sequence
  chemically synthesized
ctttccttctttttctttcttg

SEQ ID NO: 42454 - DNA, 22 bp, Artificial Sequence
  chemically synthesized
tttccttctttttctttcttgg

SEQ ID NO: 42455 - DNA, 22 bp, Artificial Sequence
  chemically synthesized
tccttctttttctttcttggtt

SEQ ID NO: 42456 - DNA, 22 bp, Artificial Sequence
  chemically synthesized
ccttctttttctttcttggttg

SEQ ID NO: 42457 - DNA, 22 bp, Artificial Sequence
  chemically synthesized
cttctttttctttcttggttgc

SEQ ID NO: 42458 - DNA, 22 bp, Artificial Sequence
  chemically synthesized
ctttttctttcttggttgcttt

SEQ ID NO: 42459 - DNA, 22 bp, Artificial Sequence
  chemically synthesized
tttttctttcttggttgctttt

SEQ ID NO: 42460 - DNA, 22 bp, Artificial Sequence
  chemically synthesized
tttctttcttggttgctttttt

SEQ ID NO: 42461 - DNA, 22 bp, Artificial Sequence
  chemically synthesized
ttctttcttggttgcttttttt

SEQ ID NO: 42462 - DNA, 22 bp, Artificial Sequence
  chemically synthesized
tctttcttggttgctttttttt

SEQ ID NO: 42463 - DNA, 22 bp, Artificial Sequence
  chemically synthesized
ctttcttggttgcttttttttc

SEQ ID NO: 42464 - DNA, 22 bp, Artificial Sequence
  chemically synthesized
tttcttggttgcttttttttcc

SEQ ID NO: 42465 - DNA, 22 bp, Artificial Sequence
  chemically synthesized
tcttggttgcttttttttcccc

SEQ ID NO: 42466 - DNA, 22 bp, Artificial Sequence
  chemically synthesized
cttggttgcttttttttccccc

SEQ ID NO: 42467 - DNA, 22 bp, Artificial Sequence
  chemically synthesized
ttggttgcttttttttccccct

SEQ ID NO: 42468 - DNA, 22 bp, Artificial Sequence
  chemically synthesized
ggttgcttttttttcccccttt

SEQ ID NO: 42469 - DNA, 22 bp, Artificial Sequence
  chemically synthesized
gttgcttttttttccccctttg

SEQ ID NO: 42470 - DNA, 22 bp, Artificial Sequence
  chemically synthesized
cttttttttccccctttgaaac

SEQ ID NO: 42471 - DNA, 22 bp, Artificial Sequence
  chemically synthesized
ttttttccccctttgaaactga

SEQ ID NO: 42472 - DNA, 22 bp, Artificial Sequence
  chemically synthesized
tttttccccctttgaaactgaa

SEQ ID NO: 42473 - DNA, 22 bp, Artificial Sequence
  chemically synthesized
ttttccccctttgaaactgaac

SEQ ID NO: 42474 - DNA, 22 bp, Artificial Sequence
  chemically synthesized
tttccccctttgaaactgaacc

SEQ ID NO: 42475 - DNA, 22 bp, Artificial Sequence
  chemically synthesized
ttccccctttgaaactgaacca

SEQ ID NO: 42476 - DNA, 22 bp, Artificial Sequence
  chemically synthesized
tccccctttgaaactgaaccat

SEQ ID NO: 42477 - DNA, 22 bp, Artificial Sequence
  chemically synthesized
ccccctttgaaactgaaccatt

SEQ ID NO: 42478 - DNA, 22 bp, Artificial Sequence
  chemically synthesized
cccctttgaaactgaaccatta

SEQ ID NO: 42479 - DNA, 22 bp, Artificial Sequence
  chemically synthesized
tgaaactgaaccattataaatg

SEQ ID NO: 42480 - DNA, 22 bp, Artificial Sequence
  chemically synthesized
gaaactgaaccattataaatga

SEQ ID NO: 42481 - DNA, 22 bp, Artificial Sequence
  chemically synthesized
aaactgaaccattataaatgag

SEQ ID NO: 42482 - DNA, 22 bp, Artificial Sequence
  chemically synthesized
aaccattataaatgagttggtc

SEQ ID NO: 42483 - DNA, 22 bp, Artificial Sequence
  chemically synthesized
taaatgagttggtctcatagct

SEQ ID NO: 42484 - DNA, 22 bp, Artificial Sequence
  chemically synthesized
gtctcatagcttctgttaaaaa

SEQ ID NO: 42485 - DNA, 22 bp, Artificial Sequence
  chemically synthesized
atagcttctgttaaaaatcaga

SEQ ID NO: 42486 - DNA, 22 bp, Artificial Sequence
  chemically synthesized
ctgttaaaaatcagaagcttgt

SEQ ID NO: 42487 - DNA, 22 bp, Artificial Sequence
  chemically synthesized
tgttaaaaatcagaagcttgtt

SEQ ID NO: 42488 - DNA, 22 bp, Artificial Sequence
  chemically synthesized
ttaaaaatcagaagcttgttag

SEQ ID NO: 42489 - DNA, 22 bp, Artificial Sequence
  chemically synthesized
aaaatcagaagcttgttagatg

SEQ ID NO: 42490 - DNA, 22 bp, Artificial Sequence
  chemically synthesized
gttagatgtaatgattatctgc

SEQ ID NO: 42491 - DNA, 22 bp, Artificial Sequence
  chemically synthesized
ttagatgtaatgattatctgca

SEQ ID NO: 42492 - DNA, 22 bp, Artificial Sequence
  chemically synthesized
gatgtaatgattatctgcattg

SEQ ID NO: 42493 - DNA, 22 bp, Artificial Sequence
  chemically synthesized
tctgcattgtgacacttaccgc

SEQ ID NO: 42494 - DNA, 22 bp, Artificial Sequence
  chemically synthesized
cattgtgacacttaccgcgtat

SEQ ID NO: 42495 - DNA, 22 bp, Artificial Sequence
  chemically synthesized
tgacacttaccgcgtatgaggg

SEQ ID NO: 42496 - DNA, 22 bp, Artificial Sequence
  chemically synthesized
accgcgtatgaggggtcttgtc

SEQ ID NO: 42497 - DNA, 22 bp, Artificial Sequence
  chemically synthesized
ccgcgtatgaggggtcttgtcg

SEQ ID NO: 42498 - DNA, 22 bp, Artificial Sequence
  chemically synthesized
gtcgaacagctttactctaatt

SEQ ID NO: 42499 - DNA, 22 bp, Artificial Sequence
  chemically synthesized
tcgaacagctttactctaattt

SEQ ID NO: 42500 - DNA, 22 bp, Artificial Sequence
  chemically synthesized
tactctaatttagagctcctct

SEQ ID NO: 42501 - DNA, 22 bp, Artificial Sequence
  chemically synthesized
actctaatttagagctcctctg

SEQ ID NO: 42502 - DNA, 22 bp, Artificial Sequence
  chemically synthesized
ctctaatttagagctcctctgt

SEQ ID NO: 42503 - DNA, 22 bp, Artificial Sequence
  chemically synthesized
taatttagagctcctctgttaa

SEQ ID NO: 42504 - DNA, 22 bp, Artificial Sequence
  chemically synthesized
atttagagctcctctgttaatt

SEQ ID NO: 42505 - DNA, 22 bp, Artificial Sequence
  chemically synthesized
agagctcctctgttaattagaa

SEQ ID NO: 42506 - DNA, 22 bp, Artificial Sequence
  chemically synthesized
gagctcctctgttaattagaaa

SEQ ID NO: 42507 - DNA, 22 bp, Artificial Sequence
  chemically synthesized
ctctgttaattagaaagccctc

SEQ ID NO: 42508 - DNA, 22 bp, Artificial Sequence
  chemically synthesized
tgttaattagaaagccctcaga

SEQ ID NO: 42509 - DNA, 22 bp, Artificial Sequence
  chemically synthesized
ttaattagaaagccctcagatt

SEQ ID NO: 42510 - DNA, 22 bp, Artificial Sequence
  chemically synthesized
attagaaagccctcagattttc

SEQ ID NO: 42511 - DNA, 22 bp, Artificial Sequence
  chemically synthesized
gaaagccctcagattttctgca

SEQ ID NO: 42512 - DNA, 22 bp, Artificial Sequence
  chemically synthesized
agattttctgcaaatgcaggtc

SEQ ID NO: 42513 - DNA, 22 bp, Artificial Sequence
  chemically synthesized
tctgcaaatgcaggtcactatc

SEQ ID NO: 42514 - DNA, 22 bp, Artificial Sequence
  chemically synthesized
ctgcaaatgcaggtcactatcg

SEQ ID NO: 42515 - DNA, 22 bp, Artificial Sequence
  chemically synthesized
tgcaaatgcaggtcactatcga

SEQ ID NO: 42516 - DNA, 22 bp, Artificial Sequence
  chemically synthesized
caaatgcaggtcactatcgaca

SEQ ID NO: 42517 - DNA, 22 bp, Artificial Sequence
  chemically synthesized
tcgacagctcatgcttttgatg

SEQ ID NO: 42518 - DNA, 22 bp, Artificial Sequence
  chemically synthesized
atgcttttgatgcttcgtctgt

SEQ ID NO: 42519 - DNA, 22 bp, Artificial Sequence
  chemically synthesized
ttgatgcttcgtctgtgacagt

SEQ ID NO: 42520 - DNA, 22 bp, Artificial Sequence
  chemically synthesized
tgatgcttcgtctgtgacagtt

SEQ ID NO: 42521 - DNA, 22 bp, Artificial Sequence
  chemically synthesized
gatgcttcgtctgtgacagttg

SEQ ID NO: 42522 - DNA, 22 bp, Artificial Sequence
  chemically synthesized
atgcttcgtctgtgacagttgt

SEQ ID NO: 42523 - DNA, 22 bp, Artificial Sequence
  chemically synthesized
cgtctgtgacagttgttgggtt

SEQ ID NO: 42524 - DNA, 22 bp, Artificial Sequence
  chemically synthesized
gtctgtgacagttgttgggttg

SEQ ID NO: 42525 - DNA, 22 bp, Artificial Sequence
  chemically synthesized
tgacagttgttgggttgccctt

SEQ ID NO: 42526 - DNA, 22 bp, Artificial Sequence
  chemically synthesized
ttgggttgcccttctaggagct

SEQ ID NO: 42527 - DNA, 22 bp, Artificial Sequence
  chemically synthesized
ggttgcccttctaggagctggc

SEQ ID NO: 42528 - DNA, 22 bp, Artificial Sequence
  chemically synthesized
cccttctaggagctggcagggt

SEQ ID NO: 42529 - DNA, 22 bp, Artificial Sequence
  chemically synthesized
ctaggagctggcagggttgtcc

SEQ ID NO: 42530 - DNA, 22 bp, Artificial Sequence
  chemically synthesized
taggagctggcagggttgtcca

SEQ ID NO: 42531 - DNA, 22 bp, Artificial Sequence
  chemically synthesized
ggagctggcagggttgtccaga

SEQ ID NO: 42532 - DNA, 22 bp, Artificial Sequence
  chemically synthesized
gcagggttgtccagactctgac

SEQ ID NO: 42533 - DNA, 22 bp, Artificial Sequence
  chemically synthesized
tccagactctgacagtgtcaga

SEQ ID NO: 42534 - DNA, 22 bp, Artificial Sequence
  chemically synthesized
tgacagtgtcagaaaatgcagt

SEQ ID NO: 42535 - DNA, 22 bp, Artificial Sequence
  chemically synthesized
acagtgtcagaaaatgcagtca

SEQ ID NO: 42536 - DNA, 22 bp, Artificial Sequence
  chemically synthesized
cttcacaggaagttacacgcaa

SEQ ID NO: 42537 - DNA, 22 bp, Artificial Sequence
  chemically synthesized
cacaggaagttacacgcaaggt

SEQ ID NO: 42538 - DNA, 22 bp, Artificial Sequence
  chemically synthesized
acaggaagttacacgcaaggtc

SEQ ID NO: 42539 - DNA, 22 bp, Artificial Sequence
  chemically synthesized
cacgcaaggtccgcacacagtc

SEQ ID NO: 42540 - DNA, 22 bp, Artificial Sequence
  chemically synthesized
ccctgtagcccagaagcctgat

SEQ ID NO: 42541 - DNA, 22 bp, Artificial Sequence
  chemically synthesized
cctgtagcccagaagcctgatg

SEQ ID NO: 42542 - DNA, 22 bp, Artificial Sequence
  chemically synthesized
tagcccagaagcctgatgaaat

SEQ ID NO: 42543 - DNA, 22 bp, Artificial Sequence
  chemically synthesized
atgaaatctgcactcacattca

SEQ ID NO: 42544 - DNA, 22 bp, Artificial Sequence
  chemically synthesized
cactcacattcagctgaaaata

SEQ ID NO: 42545 - DNA, 22 bp, Artificial Sequence
  chemically synthesized
acattcagctgaaaatagctcg

SEQ ID NO: 42546 - DNA, 22 bp, Artificial Sequence
  chemically synthesized
agctgaaaatagctcgaattcc

SEQ ID NO: 42547 - DNA, 22 bp, Artificial Sequence
  chemically synthesized
aaaatagctcgaattccaaccc

SEQ ID NO: 42548 - DNA, 22 bp, Artificial Sequence
  chemically synthesized
gaattccaaccctctctccccc

SEQ ID NO: 42549 - DNA, 22 bp, Artificial Sequence
  chemically synthesized
caaccctctctccccctgcctc

SEQ ID NO: 42550 - DNA, 22 bp, Artificial Sequence
  chemically synthesized
tctccccctgcctcctctcttc

SEQ ID NO: 42551 - DNA, 22 bp, Artificial Sequence
  chemically synthesized
tccccctgcctcctctcttccc

SEQ ID NO: 42552 - DNA, 22 bp, Artificial Sequence
  chemically synthesized
cccctgcctcctctcttcccct

SEQ ID NO: 42553 - DNA, 22 bp, Artificial Sequence
  chemically synthesized
cctcctctcttccccttttcct

SEQ ID NO: 42554 - DNA, 22 bp, Artificial Sequence
  chemically synthesized
ctctcttccccttttcctcctt

SEQ ID NO: 42555 - DNA, 22 bp, Artificial Sequence
  chemically synthesized
tcttccccttttcctcctttct

SEQ ID NO: 42556 - DNA, 22 bp, Artificial Sequence
  chemically synthesized
ttccccttttcctcctttctac

SEQ ID NO: 42557 - DNA, 22 bp, Artificial Sequence
  chemically synthesized
ccccttttcctcctttctactt

SEQ ID NO: 42558 - DNA, 22 bp, Artificial Sequence
  chemically synthesized
cccttttcctcctttctacttc

SEQ ID NO: 42559 - DNA, 22 bp, Artificial Sequence
  chemically synthesized
ttcctcctttctacttccttgc

SEQ ID NO: 42560 - DNA, 22 bp, Artificial Sequence
  chemically synthesized
tcctcctttctacttccttgcc

SEQ ID NO: 42561 - DNA, 22 bp, Artificial Sequence
  chemically synthesized
cctcctttctacttccttgcct

SEQ ID NO: 42562 - DNA, 22 bp, Artificial Sequence
  chemically synthesized
ctcctttctacttccttgcctc

SEQ ID NO: 42563 - DNA, 22 bp, Artificial Sequence
  chemically synthesized
ctttctacttccttgcctctct

SEQ ID NO: 42564 - DNA, 22 bp, Artificial Sequence
  chemically synthesized
tctacttccttgcctctctttc

SEQ ID NO: 42565 - DNA, 22 bp, Artificial Sequence
  chemically synthesized
ctacttccttgcctctctttct

SEQ ID NO: 42566 - DNA, 22 bp, Artificial Sequence
  chemically synthesized
tacttccttgcctctctttctc

SEQ ID NO: 42567 - DNA, 22 bp, Artificial Sequence
  chemically synthesized
cttccttgcctctctttctcca

SEQ ID NO: 42568 - DNA, 22 bp, Artificial Sequence
  chemically synthesized
ccttgcctctctttctccaacc

SEQ ID NO: 42569 - DNA, 22 bp, Artificial Sequence
  chemically synthesized
cttgcctctctttctccaacct

SEQ ID NO: 42570 - DNA, 22 bp, Artificial Sequence
  chemically synthesized
gcctctctttctccaacctctg

SEQ ID NO: 42571 - DNA, 22 bp, Artificial Sequence
  chemically synthesized
cctctctttctccaacctctgt

SEQ ID NO: 42572 - DNA, 22 bp, Artificial Sequence
  chemically synthesized
tctttctccaacctctgtttcc

SEQ ID NO: 42573 - DNA, 22 bp, Artificial Sequence
  chemically synthesized
tttctccaacctctgtttccag

SEQ ID NO: 42574 - DNA, 22 bp, Artificial Sequence
  chemically synthesized
tctccaacctctgtttccagca

SEQ ID NO: 42575 - DNA, 22 bp, Artificial Sequence
  chemically synthesized
ctccaacctctgtttccagcat

SEQ ID NO: 42576 - DNA, 22 bp, Artificial Sequence
  chemically synthesized
tccaacctctgtttccagcatc

SEQ ID NO: 42577 - DNA, 22 bp, Artificial Sequence
  chemically synthesized
caacctctgtttccagcatctt

SEQ ID NO: 42578 - DNA, 22 bp, Artificial Sequence
  chemically synthesized
tgtttccagcatcttctttctc

SEQ ID NO: 42579 - DNA, 22 bp, Artificial Sequence
  chemically synthesized
tttccagcatcttctttctcat

SEQ ID NO: 42580 - DNA, 22 bp, Artificial Sequence
  chemically synthesized
ccagcatcttctttctcatctt

SEQ ID NO: 42581 - DNA, 22 bp, Artificial Sequence
  chemically synthesized
cagcatcttctttctcatcttc

SEQ ID NO: 42582 - DNA, 22 bp, Artificial Sequence
  chemically synthesized
ctttctcatcttctctctcttt

SEQ ID NO: 42583 - DNA, 22 bp, Artificial Sequence
  chemically synthesized
tttctcatcttctctctcttta

SEQ ID NO: 42584 - DNA, 22 bp, Artificial Sequence
  chemically synthesized
tctcatcttctctctctttagt

SEQ ID NO: 42585 - DNA, 22 bp, Artificial Sequence
  chemically synthesized
ctcatcttctctctctttagtc

SEQ ID NO: 42586 - DNA, 22 bp, Artificial Sequence
  chemically synthesized
tcatcttctctctctttagtcc

SEQ ID NO: 42587 - DNA, 22 bp, Artificial Sequence
  chemically synthesized
atcttctctctctttagtcctc

SEQ ID NO: 42588 - DNA, 22 bp, Artificial Sequence
  chemically synthesized
ctctctctttagtcctcaacaa

SEQ ID NO: 42589 - DNA, 22 bp, Artificial Sequence
  chemically synthesized
tctctctttagtcctcaacaac

SEQ ID NO: 42590 - DNA, 22 bp, Artificial Sequence
  chemically synthesized
tctctttagtcctcaacaactg

SEQ ID NO: 42591 - DNA, 22 bp, Artificial Sequence
  chemically synthesized
tctttagtcctcaacaactggg

SEQ ID NO: 42592 - DNA, 22 bp, Artificial Sequence
  chemically synthesized
tttagtcctcaacaactggggt

SEQ ID NO: 42593 - DNA, 22 bp, Artificial Sequence
  chemically synthesized
tagtcctcaacaactggggtcc

SEQ ID NO: 42594 - DNA, 22 bp, Artificial Sequence
  chemically synthesized
agtcctcaacaactggggtcct

SEQ ID NO: 42595 - DNA, 22 bp, Artificial Sequence
  chemically synthesized
gtcctcaacaactggggtcctc

SEQ ID NO: 42596 - DNA, 22 bp, Artificial Sequence
  chemically synthesized
aacaactggggtcctctgctgt

SEQ ID NO: 42597 - DNA, 22 bp, Artificial Sequence
  chemically synthesized
gggtcctctgctgtcaaaaaca

SEQ ID NO: 42598 - DNA, 22 bp, Artificial Sequence
  chemically synthesized
tgctgtcaaaaacagccacatt

SEQ ID NO: 42599 - DNA, 22 bp, Artificial Sequence
  chemically synthesized
ctgtcaaaaacagccacattca

SEQ ID NO: 42600 - DNA, 22 bp, Artificial Sequence
  chemically synthesized
tcaaaaacagccacattcacca

SEQ ID NO: 42601 - DNA, 22 bp, Artificial Sequence
  chemically synthesized
accagaaagggaagtaggtttt

SEQ ID NO: 42602 - DNA, 22 bp, Artificial Sequence
  chemically synthesized
tacagataaaccgggttgcttt

SEQ ID NO: 42603 - DNA, 22 bp, Artificial Sequence
  chemically synthesized
acagataaaccgggttgctttt

SEQ ID NO: 42604 - DNA, 22 bp, Artificial Sequence
  chemically synthesized
cagataaaccgggttgcttttc

SEQ ID NO: 42605 - DNA, 22 bp, Artificial Sequence
  chemically synthesized
cttttcactgaaacagcagtga

SEQ ID NO: 42606 - DNA, 22 bp, Artificial Sequence
  chemically synthesized
ttcactgaaacagcagtgattg

SEQ ID NO: 42607 - DNA, 22 bp, Artificial Sequence
  chemically synthesized
tcactgaaacagcagtgattgt

SEQ ID NO: 42608 - DNA, 22 bp, Artificial Sequence
  chemically synthesized
cactgaaacagcagtgattgtg

SEQ ID NO: 42609 - DNA, 22 bp, Artificial Sequence
  chemically synthesized
actgaaacagcagtgattgtgg

SEQ ID NO: 42610 - DNA, 22 bp, Artificial Sequence
  chemically synthesized
aaacagcagtgattgtggaaca

SEQ ID NO: 42611 - DNA, 22 bp, Artificial Sequence
  chemically synthesized
tggaacagaaactctcccctcc

SEQ ID NO: 42612 - DNA, 22 bp, Artificial Sequence
  chemically synthesized
tcccctccctgccttttaaata

SEQ ID NO: 42613 - DNA, 22 bp, Artificial Sequence
  chemically synthesized
ccctccctgccttttaaataat

SEQ ID NO: 42614 - DNA, 22 bp, Artificial Sequence
  chemically synthesized
cctgccttttaaataatatttc

SEQ ID NO: 42615 - DNA, 22 bp, Artificial Sequence
  chemically synthesized
ccttttaaataatatttcctat

SEQ ID NO: 42616 - DNA, 22 bp, Artificial Sequence
  chemically synthesized
ttaaataatatttcctattttt

SEQ ID NO: 42617 - DNA, 22 bp, Artificial Sequence
  chemically synthesized
taaataatatttcctatttttt

SEQ ID NO: 42618 - DNA, 22 bp, Artificial Sequence
  chemically synthesized
aaataatatttcctattttttt

SEQ ID NO: 42619 - DNA, 22 bp, Artificial Sequence
  chemically synthesized
aataatatttcctatttttttg

SEQ ID NO: 42620 - DNA, 22 bp, Artificial Sequence
  chemically synthesized
cctatttttttgcaccggtcag

SEQ ID NO: 42621 - DNA, 22 bp, Artificial Sequence
  chemically synthesized
ctatttttttgcaccggtcagc

SEQ ID NO: 42622 - DNA, 22 bp, Artificial Sequence
  chemically synthesized
tttttttgcaccggtcagcagc

SEQ ID NO: 42623 - DNA, 22 bp, Artificial Sequence
  chemically synthesized
ttttgcaccggtcagcagccgc

SEQ ID NO: 42624 - DNA, 22 bp, Artificial Sequence
  chemically synthesized
tttgcaccggtcagcagccgca

SEQ ID NO: 42625 - DNA, 22 bp, Artificial Sequence
  chemically synthesized
ttgcaccggtcagcagccgcac

SEQ ID NO: 42626 - DNA, 22 bp, Artificial Sequence
  chemically synthesized
tgcaccggtcagcagccgcacc

SEQ ID NO: 42627 - DNA, 22 bp, Artificial Sequence
  chemically synthesized
gcaccggtcagcagccgcacct

SEQ ID NO: 42628 - DNA, 22 bp, Artificial Sequence
  chemically synthesized
caccggtcagcagccgcacctg

SEQ ID NO: 42629 - DNA, 22 bp, Artificial Sequence
  chemically synthesized
gtgaggctgaggtcaaggctgt

SEQ ID NO: 42630 - DNA, 22 bp, Artificial Sequence
  chemically synthesized
aggtcaaggctgtacttccaac

SEQ ID NO: 42631 - DNA, 22 bp, Artificial Sequence
  chemically synthesized
tacttccaacatggctcacgtg

SEQ ID NO: 42632 - DNA, 22 bp, Artificial Sequence
  chemically synthesized
ccaacatggctcacgtgttttt

SEQ ID NO: 42633 - DNA, 22 bp, Artificial Sequence
  chemically synthesized
caacatggctcacgtgtttttt

SEQ ID NO: 42634 - DNA, 22 bp, Artificial Sequence
  chemically synthesized
acgtgttttttcttaagagaag

SEQ ID NO: 42635 - DNA, 22 bp, Artificial Sequence
  chemically synthesized
tttcttaagagaagggggaatt

SEQ ID NO: 42636 - DNA, 22 bp, Artificial Sequence
  chemically synthesized
ttcttaagagaagggggaattt

SEQ ID NO: 42637 - DNA, 22 bp, Artificial Sequence
  chemically synthesized
tcttaagagaagggggaatttg

SEQ ID NO: 42638 - DNA, 22 bp, Artificial Sequence
  chemically synthesized
cttaagagaagggggaatttgg

SEQ ID NO: 42639 - DNA, 22 bp, Artificial Sequence
  chemically synthesized
ttaagagaagggggaatttgga

SEQ ID NO: 42640 - DNA, 22 bp, Artificial Sequence
  chemically synthesized
aagagaagggggaatttggagg

SEQ ID NO: 42641 - DNA, 22 bp, Artificial Sequence
  chemically synthesized
agagaagggggaatttggaggg

SEQ ID NO: 42642 - DNA, 22 bp, Artificial Sequence
  chemically synthesized
ggaggggggcaaaaaaagaagg

SEQ ID NO: 42643 - DNA, 22 bp, Artificial Sequence
  chemically synthesized
gaggggggcaaaaaaagaagga

SEQ ID NO: 42644 - DNA, 22 bp, Artificial Sequence
  chemically synthesized
accactcgagaaaaaatgcaca

SEQ ID NO: 42645 - DNA, 22 bp, Artificial Sequence
  chemically synthesized
gagaaaaaatgcacatgggctg

SEQ ID NO: 42646 - DNA, 22 bp, Artificial Sequence
  chemically synthesized
aggtttcctgcccttatcacca

SEQ ID NO: 42647 - DNA, 22 bp, Artificial Sequence
  chemically synthesized
cctgcccttatcaccattccag

SEQ ID NO: 42648 - DNA, 22 bp, Artificial Sequence
  chemically synthesized
ctgcccttatcaccattccagt

SEQ ID NO: 42649 - DNA, 22 bp, Artificial Sequence
  chemically synthesized
cccttatcaccattccagtata

SEQ ID NO: 42650 - DNA, 22 bp, Artificial Sequence
  chemically synthesized
atcaccattccagtataaaacc

SEQ ID NO: 42651 - DNA, 22 bp, Artificial Sequence
  chemically synthesized
tcaccattccagtataaaacct

SEQ ID NO: 42652 - DNA, 22 bp, Artificial Sequence
  chemically synthesized
cagtataaaacctcaaattatg

SEQ ID NO: 42653 - DNA, 22 bp, Artificial Sequence
  chemically synthesized
aaattatgggaattctcactta

SEQ ID NO: 42654 - DNA, 22 bp, Artificial Sequence
  chemically synthesized
tgggaattctcacttaggaaca

SEQ ID NO: 42655 - DNA, 22 bp, Artificial Sequence
  chemically synthesized
tcacttaggaacacctcattat

SEQ ID NO: 42656 - DNA, 22 bp, Artificial Sequence
  chemically synthesized
acttaggaacacctcattatgg

SEQ ID NO: 42657 - DNA, 22 bp, Artificial Sequence
  chemically synthesized
aggaacacctcattatggaaca

SEQ ID NO: 42658 - DNA, 22 bp, Artificial Sequence
  chemically synthesized
ggaacacctcattatggaacat

SEQ ID NO: 42659 - DNA, 22 bp, Artificial Sequence
  chemically synthesized
attatggaacatatgtgctggg

SEQ ID NO: 42660 - DNA, 22 bp, Artificial Sequence
  chemically synthesized
tggaacatatgtgctgggggtc

SEQ ID NO: 42661 - DNA, 22 bp, Artificial Sequence
  chemically synthesized
ggggtctggggagatgggagaa

SEQ ID NO: 42662 - DNA, 22 bp, Artificial Sequence
  chemically synthesized
gggagatgggagaaggggtgtg

SEQ ID NO: 42663 - DNA, 22 bp, Artificial Sequence
  chemically synthesized
atgaccatgtgtgtaaacttgt

SEQ ID NO: 42664 - DNA, 22 bp, Artificial Sequence
  chemically synthesized
gtgtgctccaaattttatcaag

SEQ ID NO: 42665 - DNA, 22 bp, Artificial Sequence
  chemically synthesized
tgtgctccaaattttatcaagt

SEQ ID NO: 42666 - DNA, 22 bp, Artificial Sequence
  chemically synthesized
caaattttatcaagttcaagcc

SEQ ID NO: 42667 - DNA, 22 bp, Artificial Sequence
  chemically synthesized
tatcaagttcaagccaaaaaga

SEQ ID NO: 42668 - DNA, 22 bp, Artificial Sequence
  chemically synthesized
atcaagttcaagccaaaaagaa

SEQ ID NO: 42669 - DNA, 22 bp, Artificial Sequence
  chemically synthesized
tcaagttcaagccaaaaagaaa

SEQ ID NO: 42670 - DNA, 22 bp, Artificial Sequence
  chemically synthesized
aagccaaaaagaaatcctctgt

SEQ ID NO: 42671 - DNA, 22 bp, Artificial Sequence
  chemically synthesized
tgtggcacttgtttaggactta

SEQ ID NO: 42672 - DNA, 22 bp, Artificial Sequence
  chemically synthesized
tggcacttgtttaggacttaaa

SEQ ID NO: 42673 - DNA, 22 bp, Artificial Sequence
  chemically synthesized
gtttaggacttaaaaaaaaaaa

SEQ ID NO: 42674 - DNA, 22 bp, Artificial Sequence
  chemically synthesized
tttaggacttaaaaaaaaaaaa

SEQ ID NO: 42675 - DNA, 22 bp, Artificial Sequence
  chemically synthesized
aggacttaaaaaaaaaaaaaaa

SEQ ID NO: 42676 - DNA, 22 bp, Artificial Sequence
  chemically synthesized
ggacttaaaaaaaaaaaaaaaa

SEQ ID NO: 42677 - DNA, 22 bp, Artificial Sequence
  chemically synthesized
aaaaaaaaaaaaaaaaaaccaa

SEQ ID NO: 42678 - DNA, 22 bp, Artificial Sequence
  chemically synthesized
aaaaaaaaaaaaaaaaaccaac

SEQ ID NO: 42679 - DNA, 22 bp, Artificial Sequence
  chemically synthesized
aaatcaaaataggaaatacaaa

SEQ ID NO: 42680 - DNA, 22 bp, Artificial Sequence
  chemically synthesized
aatcaaaataggaaatacaaaa

SEQ ID NO: 42681 - DNA, 22 bp, Artificial Sequence
  chemically synthesized
gtacaccctcaccaccaccacc

SEQ ID NO: 42682 - DNA, 22 bp, Artificial Sequence
  chemically synthesized
tacaccctcaccaccaccacca

SEQ ID NO: 42683 - DNA, 22 bp, Artificial Sequence
  chemically synthesized
accaccaccaccaaggcatagc

SEQ ID NO: 42684 - DNA, 22 bp, Artificial Sequence
  chemically synthesized
ggaagaaaaaggcatcccttgc

SEQ ID NO: 42685 - DNA, 22 bp, Artificial Sequence
  chemically synthesized
gaagaaaaaggcatcccttgca

SEQ ID NO: 42686 - DNA, 22 bp, Artificial Sequence
  chemically synthesized
gcagccacaatttcgcaagttg

SEQ ID NO: 42687 - DNA, 22 bp, Artificial Sequence
  chemically synthesized
cagccacaatttcgcaagttga

SEQ ID NO: 42688 - DNA, 22 bp, Artificial Sequence
  chemically synthesized
cgcaagttgaccttttcaccag

SEQ ID NO: 42689 - DNA, 22 bp, Artificial Sequence
  chemically synthesized
gcaagttgaccttttcaccagg

SEQ ID NO: 42690 - DNA, 22 bp, Artificial Sequence
  chemically synthesized
accttttcaccaggccagtgcc

SEQ ID NO: 42691 - DNA, 22 bp, Artificial Sequence
  chemically synthesized
ttcaccaggccagtgcctaatt

SEQ ID NO: 42692 - DNA, 22 bp, Artificial Sequence
  chemically synthesized
tcaccaggccagtgcctaattt

SEQ ID NO: 42693 - DNA, 22 bp, Artificial Sequence
  chemically synthesized
caccaggccagtgcctaatttc

SEQ ID NO: 42694 - DNA, 22 bp, Artificial Sequence
  chemically synthesized
accaggccagtgcctaatttcc

SEQ ID NO: 42695 - DNA, 22 bp, Artificial Sequence
  chemically synthesized
atttcctaaacaggccccttct

SEQ ID NO: 42696 - DNA, 22 bp, Artificial Sequence
  chemically synthesized
cctaaacaggccccttcttcct

SEQ ID NO: 42697 - DNA, 22 bp, Artificial Sequence
  chemically synthesized
ctaaacaggccccttcttcctt

SEQ ID NO: 42698 - DNA, 22 bp, Artificial Sequence
  chemically synthesized
aacaggccccttcttccttgaa

SEQ ID NO: 42699 - DNA, 22 bp, Artificial Sequence
  chemically synthesized
cttccttgaagtcactgcaaat

SEQ ID NO: 42700 - DNA, 22 bp, Artificial Sequence
  chemically synthesized
ttccttgaagtcactgcaaata

SEQ ID NO: 42701 - DNA, 22 bp, Artificial Sequence
  chemically synthesized
ccttgaagtcactgcaaataaa

SEQ ID NO: 42702 - DNA, 22 bp, Artificial Sequence
  chemically synthesized
cttgaagtcactgcaaataaat

SEQ ID NO: 42703 - DNA, 22 bp, Artificial Sequence
  chemically synthesized
gaagtcactgcaaataaatgca

SEQ ID NO: 42704 - DNA, 22 bp, Artificial Sequence
  chemically synthesized
aagtcactgcaaataaatgcag

SEQ ID NO: 42705 - DNA, 22 bp, Artificial Sequence
  chemically synthesized
caaataaatgcagtcatccaga

SEQ ID NO: 42706 - DNA, 22 bp, Artificial Sequence
  chemically synthesized
gccttggagttactggcttatg

SEQ ID NO: 42707 - DNA, 22 bp, Artificial Sequence
  chemically synthesized
ggagttactggcttatgaaatg

SEQ ID NO: 42708 - DNA, 22 bp, Artificial Sequence
  chemically synthesized
gagttactggcttatgaaatgc

SEQ ID NO: 42709 - DNA, 22 bp, Artificial Sequence
  chemically synthesized
ctggcttatgaaatgcaatggg

SEQ ID NO: 42710 - DNA, 22 bp, Artificial Sequence
  chemically synthesized
gcttatgaaatgcaatgggatg

SEQ ID NO: 42711 - DNA, 22 bp, Artificial Sequence
  chemically synthesized
atgaaatgcaatgggatgaggt

SEQ ID NO: 42712 - DNA, 22 bp, Artificial Sequence
  chemically synthesized
tgaaatgcaatgggatgaggtg

SEQ ID NO: 42713 - DNA, 22 bp, Artificial Sequence
  chemically synthesized
aacggcacagtgaccaggtagg

SEQ ID NO: 42714 - DNA, 22 bp, Artificial Sequence
  chemically synthesized
cagcaagaatgccaaggatagc

SEQ ID NO: 42715 - DNA, 22 bp, Artificial Sequence
  chemically synthesized
cagtgggttattagccccagca

SEQ ID NO: 42716 - DNA, 22 bp, Artificial Sequence
  chemically synthesized
ttagccccagcagggcccatgc

SEQ ID NO: 42717 - DNA, 22 bp, Artificial Sequence
  chemically synthesized
gccccagcagggcccatgcctc

SEQ ID NO: 42718 - DNA, 22 bp, Artificial Sequence
  chemically synthesized
tacggccatgttgctgtcatct

SEQ ID NO: 42719 - DNA, 22 bp, Artificial Sequence
  chemically synthesized
cggccatgttgctgtcatcttc

SEQ ID NO: 42720 - DNA, 22 bp, Artificial Sequence
  chemically synthesized
ctgtcatcttcgttcttggcta

SEQ ID NO: 42721 - DNA, 22 bp, Artificial Sequence
  chemically synthesized
tcatcttcgttcttggctagca

SEQ ID NO: 42722 - DNA, 22 bp, Artificial Sequence
  chemically synthesized
cgttcttggctagcagatgcta

SEQ ID NO: 42723 - DNA, 22 bp, Artificial Sequence
  chemically synthesized
gttcttggctagcagatgctag

SEQ ID NO: 42724 - DNA, 22 bp, Artificial Sequence
  chemically synthesized
ttggctagcagatgctagtccc

SEQ ID NO: 42725 - DNA, 22 bp, Artificial Sequence
  chemically synthesized
ggctagcagatgctagtcccag

SEQ ID NO: 42726 - DNA, 22 bp, Artificial Sequence
  chemically synthesized
gctagcagatgctagtcccagg

SEQ ID NO: 42727 - DNA, 22 bp, Artificial Sequence
  chemically synthesized
gcagatgctagtcccaggaatg

SEQ ID NO: 42728 - DNA, 22 bp, Artificial Sequence
  chemically synthesized
gtcccaggaatgtcctccatgc

SEQ ID NO: 42729 - DNA, 22 bp, Artificial Sequence
  chemically synthesized
catgcctttaagctaactgcaa

SEQ ID NO: 42730 - DNA, 22 bp, Artificial Sequence
  chemically synthesized
taagctaactgcaaaaacagaa

SEQ ID NO: 42731 - DNA, 22 bp, Artificial Sequence
  chemically synthesized
aagctaactgcaaaaacagaac

SEQ ID NO: 42732 - DNA, 22 bp, Artificial Sequence
  chemically synthesized
agctaactgcaaaaacagaacg

SEQ ID NO: 42733 - DNA, 22 bp, Artificial Sequence
  chemically synthesized
actgcaaaaacagaacggtgtg

SEQ ID NO: 42734 - DNA, 22 bp, Artificial Sequence
  chemically synthesized
caaaaacagaacggtgtgagcc

SEQ ID NO: 42735 - DNA, 22 bp, Artificial Sequence
  chemically synthesized
ttttatattctacctataaggg

SEQ ID NO: 42736 - DNA, 22 bp, Artificial Sequence
  chemically synthesized
ttatattctacctataagggaa

SEQ ID NO: 42737 - DNA, 22 bp, Artificial Sequence
  chemically synthesized
tatattctacctataagggaaa

SEQ ID NO: 42738 - DNA, 22 bp, Artificial Sequence
  chemically synthesized
atattctacctataagggaaaa

SEQ ID NO: 42739 - DNA, 22 bp, Artificial Sequence
  chemically synthesized
tattctacctataagggaaaaa

SEQ ID NO: 42740 - DNA, 22 bp, Artificial Sequence
  chemically synthesized
tacctataagggaaaaataaac

SEQ ID NO: 42741 - DNA, 22 bp, Artificial Sequence
  chemically synthesized
cctataagggaaaaataaacct

SEQ ID NO: 42742 - DNA, 22 bp, Artificial Sequence
  chemically synthesized
taagggaaaaataaacctagac

SEQ ID NO: 42743 - DNA, 22 bp, Artificial Sequence
  chemically synthesized
gacctggaaaacaatgtgtaaa

SEQ ID NO: 42744 - DNA, 22 bp, Artificial Sequence
  chemically synthesized
gaaaacaatgtgtaaagtggca

SEQ ID NO: 42745 - DNA, 22 bp, Artificial Sequence
  chemically synthesized
atttaaaaagaaaaaccctcca

SEQ ID NO: 42746 - DNA, 22 bp, Artificial Sequence
  chemically synthesized
aaaaagaaaaaccctccatcca

SEQ ID NO: 42747 - DNA, 22 bp, Artificial Sequence
  chemically synthesized
aaaagaaaaaccctccatccaa

SEQ ID NO: 42748 - DNA, 22 bp, Artificial Sequence
  chemically synthesized
catccaacgtcacgaagctgct

SEQ ID NO: 42749 - DNA, 22 bp, Artificial Sequence
  chemically synthesized
ctgaatattaggttcctgggaa

SEQ ID NO: 42750 - DNA, 22 bp, Artificial Sequence
  chemically synthesized
aatattaggttcctgggaagct

SEQ ID NO: 42751 - DNA, 22 bp, Artificial Sequence
  chemically synthesized
ggttcctgggaagctgtcccag

SEQ ID NO: 42752 - DNA, 22 bp, Artificial Sequence
  chemically synthesized
ctgggaagctgtcccagcaacc

SEQ ID NO: 42753 - DNA, 22 bp, Artificial Sequence
  chemically synthesized
ggaagctgtcccagcaacctag

SEQ ID NO: 42754 - DNA, 22 bp, Artificial Sequence
  chemically synthesized
tcccagcaacctagatatgaga

SEQ ID NO: 42755 - DNA, 22 bp, Artificial Sequence
  chemically synthesized
gatatgagaaacaacgcttgct

SEQ ID NO: 42756 - DNA, 22 bp, Artificial Sequence
  chemically synthesized
gctattctggggtgagaagtga

SEQ ID NO: 42757 - DNA, 22 bp, Artificial Sequence
  chemically synthesized
ctattctggggtgagaagtgaa

SEQ ID NO: 42758 - DNA, 22 bp, Artificial Sequence
  chemically synthesized
ttctggggtgagaagtgaagtt

SEQ ID NO: 42759 - DNA, 22 bp, Artificial Sequence
  chemically synthesized
tggggtgagaagtgaagttgcc

SEQ ID NO: 42760 - DNA, 22 bp, Artificial Sequence
  chemically synthesized
gggtgagaagtgaagttgcctt

SEQ ID NO: 42761 - DNA, 22 bp, Artificial Sequence
  chemically synthesized
cctttcactcgggactgtcaaa

SEQ ID NO: 42762 - DNA, 22 bp, Artificial Sequence
  chemically synthesized
tcactcgggactgtcaaacaca

SEQ ID NO: 42763 - DNA, 22 bp, Artificial Sequence
  chemically synthesized
cactcgggactgtcaaacacag

SEQ ID NO: 42764 - DNA, 22 bp, Artificial Sequence
  chemically synthesized
actcgggactgtcaaacacagt

SEQ ID NO: 42765 - DNA, 22 bp, Artificial Sequence
  chemically synthesized
gggactgtcaaacacagtctat

SEQ ID NO: 42766 - DNA, 22 bp, Artificial Sequence
  chemically synthesized
tcaaacacagtctataaatacc

SEQ ID NO: 42767 - DNA, 22 bp, Artificial Sequence
  chemically synthesized
taaataccagcaatgccccttg

SEQ ID NO: 42768 - DNA, 22 bp, Artificial Sequence
  chemically synthesized
gtgaactacgggctgagctcaa

SEQ ID NO: 42769 - DNA, 22 bp, Artificial Sequence
  chemically synthesized
tgaactacgggctgagctcaac

SEQ ID NO: 42770 - DNA, 22 bp, Artificial Sequence
  chemically synthesized
cgggctgagctcaacccagaga

SEQ ID NO: 42771 - DNA, 22 bp, Artificial Sequence
  chemically synthesized
agctcaacccagagaaggcaag

SEQ ID NO: 42772 - DNA, 22 bp, Artificial Sequence
  chemically synthesized
aacccagagaaggcaagtgttt

SEQ ID NO: 42773 - DNA, 22 bp, Artificial Sequence
  chemically synthesized
cccaaaggtcacacagcaattc

SEQ ID NO: 42774 - DNA, 22 bp, Artificial Sequence
  chemically synthesized
ccaaaggtcacacagcaattcc

SEQ ID NO: 42775 - DNA, 22 bp, Artificial Sequence
  chemically synthesized
caggtcccccagaagtagccct

SEQ ID NO: 42776 - DNA, 22 bp, Artificial Sequence
  chemically synthesized
caccagatggatcccatcacca

SEQ ID NO: 42777 - DNA, 22 bp, Artificial Sequence
  chemically synthesized
accagatggatcccatcaccag

SEQ ID NO: 42778 - DNA, 22 bp, Artificial Sequence
  chemically synthesized
ttggaaataatacattgctgca

SEQ ID NO: 42779 - DNA, 22 bp, Artificial Sequence
  chemically synthesized
ggaaataatacattgctgcatc

SEQ ID NO: 42780 - DNA, 22 bp, Artificial Sequence
  chemically synthesized
gaaataatacattgctgcatct

SEQ ID NO: 42781 - DNA, 22 bp, Artificial Sequence
  chemically synthesized
ctgcatctgattctcattttca

SEQ ID NO: 42782 - DNA, 22 bp, Artificial Sequence
  chemically synthesized
catctgattctcattttcaaca

SEQ ID NO: 42783 - DNA, 22 bp, Artificial Sequence
  chemically synthesized
attctcattttcaacaagaagg

SEQ ID NO: 42784 - DNA, 22 bp, Artificial Sequence
  chemically synthesized
tcattttcaacaagaaggctga

SEQ ID NO: 42785 - DNA, 22 bp, Artificial Sequence
  chemically synthesized
attttcaacaagaaggctgagg

SEQ ID NO: 42786 - DNA, 22 bp, Artificial Sequence
  chemically synthesized
tcaacaagaaggctgaggaatg

SEQ ID NO: 42787 - DNA, 22 bp, Artificial Sequence
  chemically synthesized
caacaagaaggctgaggaatga

SEQ ID NO: 42788 - DNA, 22 bp, Artificial Sequence
  chemically synthesized
aacaagaaggctgaggaatgag

SEQ ID NO: 42789 - DNA, 22 bp, Artificial Sequence
  chemically synthesized
aggaatgagattgcacatttta

SEQ ID NO: 42790 - DNA, 22 bp, Artificial Sequence
  chemically synthesized
cacattttagtttccttcccca

SEQ ID NO: 42791 - DNA, 22 bp, Artificial Sequence
  chemically synthesized
tagtttccttccccaactttct

SEQ ID NO: 42792 - DNA, 22 bp, Artificial Sequence
  chemically synthesized
agtttccttccccaactttctt

SEQ ID NO: 42793 - DNA, 22 bp, Artificial Sequence
  chemically synthesized
gtttccttccccaactttcttt

SEQ ID NO: 42794 - DNA, 22 bp, Artificial Sequence
  chemically synthesized
ccttccccaactttctttctcc

SEQ ID NO: 42795 - DNA, 22 bp, Artificial Sequence
  chemically synthesized
cttccccaactttctttctcca

SEQ ID NO: 42796 - DNA, 22 bp, Artificial Sequence
  chemically synthesized
ccccaactttctttctccaacc

SEQ ID NO: 42797 - DNA, 22 bp, Artificial Sequence
  chemically synthesized
cccaactttctttctccaacct

SEQ ID NO: 42798 - DNA, 22 bp, Artificial Sequence
  chemically synthesized
tctttctccaaccttctgctct

SEQ ID NO: 42799 - DNA, 22 bp, Artificial Sequence
  chemically synthesized
ctttctccaaccttctgctctg

SEQ ID NO: 42800 - DNA, 22 bp, Artificial Sequence
  chemically synthesized
tttctccaaccttctgctctgg

SEQ ID NO: 42801 - DNA, 22 bp, Artificial Sequence
  chemically synthesized
tctccaaccttctgctctggtt

SEQ ID NO: 42802 - DNA, 22 bp, Artificial Sequence
  chemically synthesized
ctccaaccttctgctctggttc

SEQ ID NO: 42803 - DNA, 22 bp, Artificial Sequence
  chemically synthesized
tccaaccttctgctctggttct

SEQ ID NO: 42804 - DNA, 22 bp, Artificial Sequence
  chemically synthesized
caaccttctgctctggttctcc

SEQ ID NO: 42805 - DNA, 22 bp, Artificial Sequence
  chemically synthesized
ctgctctggttctcctctcccc

SEQ ID NO: 42806 - DNA, 22 bp, Artificial Sequence
  chemically synthesized
tgctctggttctcctctccccc

SEQ ID NO: 42807 - DNA, 22 bp, Artificial Sequence
  chemically synthesized
ctctggttctcctctcccccac

SEQ ID NO: 42808 - DNA, 22 bp, Artificial Sequence
  chemically synthesized
tggttctcctctcccccaccac

SEQ ID NO: 42809 - DNA, 22 bp, Artificial Sequence
  chemically synthesized
gttctcctctcccccaccacac

SEQ ID NO: 42810 - DNA, 22 bp, Artificial Sequence
  chemically synthesized
tcctctcccccaccacacgtac

SEQ ID NO: 42811 - DNA, 22 bp, Artificial Sequence
  chemically synthesized
ctctcccccaccacacgtacaa

SEQ ID NO: 42812 - DNA, 22 bp, Artificial Sequence
  chemically synthesized
tcccccaccacacgtacaaaaa

SEQ ID NO: 42813 - DNA, 22 bp, Artificial Sequence
  chemically synthesized
ccccaccacacgtacaaaaaaa

SEQ ID NO: 42814 - DNA, 22 bp, Artificial Sequence
  chemically synthesized
tttagtatgtttagggatctat

SEQ ID NO: 42815 - DNA, 22 bp, Artificial Sequence
  chemically synthesized
ttagtatgtttagggatctatt

SEQ ID NO: 42816 - DNA, 22 bp, Artificial Sequence
  chemically synthesized
tagtatgtttagggatctattt

SEQ ID NO: 42817 - DNA, 22 bp, Artificial Sequence
  chemically synthesized
agtatgtttagggatctatttc

SEQ ID NO: 42818 - DNA, 22 bp, Artificial Sequence
  chemically synthesized
gtatgtttagggatctatttcc

SEQ ID NO: 42819 - DNA, 22 bp, Artificial Sequence
  chemically synthesized
agggatctatttccatatctac

SEQ ID NO: 42820 - DNA, 22 bp, Artificial Sequence
  chemically synthesized
gggatctatttccatatctacc

SEQ ID NO: 42821 - DNA, 22 bp, Artificial Sequence
  chemically synthesized
tttccatatctacccaaaatct

SEQ ID NO: 42822 - DNA, 22 bp, Artificial Sequence
  chemically synthesized
ccatatctacccaaaatctcca

SEQ ID NO: 42823 - DNA, 22 bp, Artificial Sequence
  chemically synthesized
catatctacccaaaatctccaa

SEQ ID NO: 42824 - DNA, 22 bp, Artificial Sequence
  chemically synthesized
cccaaaatctccaagccccttg

SEQ ID NO: 42825 - DNA, 22 bp, Artificial Sequence
  chemically synthesized
caagccccttgttctatcagca

SEQ ID NO: 42826 - DNA, 22 bp, Artificial Sequence
  chemically synthesized
gttctatcagcaggtcaagagt

SEQ ID NO: 42827 - DNA, 22 bp, Artificial Sequence
  chemically synthesized
ttctatcagcaggtcaagagta

SEQ ID NO: 42828 - DNA, 22 bp, Artificial Sequence
  chemically synthesized
tatcagcaggtcaagagtagag

SEQ ID NO: 42829 - DNA, 22 bp, Artificial Sequence
  chemically synthesized
tcagcaggtcaagagtagagaa

SEQ ID NO: 42830 - DNA, 22 bp, Artificial Sequence
  chemically synthesized
tgacaagctgttctccattctg

SEQ ID NO: 42831 - DNA, 22 bp, Artificial Sequence
  chemically synthesized
ttctccattctgaaatggattt

SEQ ID NO: 42832 - DNA, 22 bp, Artificial Sequence
  chemically synthesized
tccattctgaaatggatttgac

SEQ ID NO: 42833 - DNA, 22 bp, Artificial Sequence
  chemically synthesized
cattctgaaatggatttgactg

SEQ ID NO: 42834 - DNA, 22 bp, Artificial Sequence
  chemically synthesized
tgaaatggatttgactgaacag

SEQ ID NO: 42835 - DNA, 22 bp, Artificial Sequence
  chemically synthesized
aaatggatttgactgaacagct

SEQ ID NO: 42836 - DNA, 22 bp, Artificial Sequence
  chemically synthesized
gactgaacagctgctgaaaggc

SEQ ID NO: 42837 - DNA, 22 bp, Artificial Sequence
  chemically synthesized
actgaacagctgctgaaaggca

SEQ ID NO: 42838 - DNA, 22 bp, Artificial Sequence
  chemically synthesized
aacagctgctgaaaggcaagac

SEQ ID NO: 42839 - DNA, 22 bp, Artificial Sequence
  chemically synthesized
ctgaaaggcaagacatcctagg

SEQ ID NO: 42840 - DNA, 22 bp, Artificial Sequence
  chemically synthesized
aaaggcaagacatcctagggag

SEQ ID NO: 42841 - DNA, 22 bp, Artificial Sequence
  chemically synthesized
gggagactggtactggggattt

SEQ ID NO: 42842 - DNA, 22 bp, Artificial Sequence
  chemically synthesized
gtactggggatttcagggtcct

SEQ ID NO: 42843 - DNA, 22 bp, Artificial Sequence
  chemically synthesized
gggatttcagggtccttgttct

SEQ ID NO: 42844 - DNA, 22 bp, Artificial Sequence
  chemically synthesized
cagggtccttgttctgtgggtg

SEQ ID NO: 42845 - DNA, 22 bp, Artificial Sequence
  chemically synthesized
agggtccttgttctgtgggtgg

SEQ ID NO: 42846 - DNA, 22 bp, Artificial Sequence
  chemically synthesized
gttctgtgggtggaccatggct

SEQ ID NO: 42847 - DNA, 22 bp, Artificial Sequence
  chemically synthesized
ttctgtgggtggaccatggctc

SEQ ID NO: 42848 - DNA, 22 bp, Artificial Sequence
  chemically synthesized
tgtgggtggaccatggctcctt

SEQ ID NO: 42849 - DNA, 22 bp, Artificial Sequence
  chemically synthesized
tgggtggaccatggctcctttc

SEQ ID NO: 42850 - DNA, 22 bp, Artificial Sequence
  chemically synthesized
ctttccagagaatgacttgtga

SEQ ID NO: 42851 - DNA, 22 bp, Artificial Sequence
  chemically synthesized
tccagagaatgacttgtgattt

SEQ ID NO: 42852 - DNA, 22 bp, Artificial Sequence
  chemically synthesized
ccagagaatgacttgtgatttg

SEQ ID NO: 42853 - DNA, 22 bp, Artificial Sequence
  chemically synthesized
cagagaatgacttgtgatttgt

SEQ ID NO: 42854 - DNA, 22 bp, Artificial Sequence
  chemically synthesized
gtgatttgttctctctcctaca

SEQ ID NO: 42855 - DNA, 22 bp, Artificial Sequence
  chemically synthesized
tgatttgttctctctcctacac

SEQ ID NO: 42856 - DNA, 22 bp, Artificial Sequence
  chemically synthesized
gttctctctcctacacatcaaa

SEQ ID NO: 42857 - DNA, 22 bp, Artificial Sequence
  chemically synthesized
ttctctctcctacacatcaaag

SEQ ID NO: 42858 - DNA, 22 bp, Artificial Sequence
  chemically synthesized
tctctcctacacatcaaagtga

SEQ ID NO: 42859 - DNA, 22 bp, Artificial Sequence
  chemically synthesized
tctcctacacatcaaagtgaga

SEQ ID NO: 42860 - DNA, 22 bp, Artificial Sequence
  chemically synthesized
tcctacacatcaaagtgagaca

SEQ ID NO: 42861 - DNA, 22 bp, Artificial Sequence
  chemically synthesized
ctacacatcaaagtgagacacc

SEQ ID NO: 42862 - DNA, 22 bp, Artificial Sequence
  chemically synthesized
cacatcaaagtgagacaccaat

SEQ ID NO: 42863 - DNA, 22 bp, Artificial Sequence
  chemically synthesized
tactggcccaccttgccccacc

SEQ ID NO: 42864 - DNA, 22 bp, Artificial Sequence
  chemically synthesized
ctggcccaccttgccccacctc

SEQ ID NO: 42865 - DNA, 22 bp, Artificial Sequence
  chemically synthesized
gcccaccttgccccacctccaa

SEQ ID NO: 42866 - DNA, 22 bp, Artificial Sequence
  chemically synthesized
gccccacctccaatttggcaac

SEQ ID NO: 42867 - DNA, 22 bp, Artificial Sequence
  chemically synthesized
ccccacctccaatttggcaact

SEQ ID NO: 42868 - DNA, 22 bp, Artificial Sequence
  chemically synthesized
caatttggcaactttgcctcct

SEQ ID NO: 42869 - DNA, 22 bp, Artificial Sequence
  chemically synthesized
ggcaactttgcctccttctcac

SEQ ID NO: 42870 - DNA, 22 bp, Artificial Sequence
  chemically synthesized
gcaactttgcctccttctcaca

SEQ ID NO: 42871 - DNA, 22 bp, Artificial Sequence
  chemically synthesized
tgcctccttctcacacaatgag

SEQ ID NO: 42872 - DNA, 22 bp, Artificial Sequence
  chemically synthesized
gcctccttctcacacaatgaga

SEQ ID NO: 42873 - DNA, 22 bp, Artificial Sequence
  chemically synthesized
cctccttctcacacaatgagaa

SEQ ID NO: 42874 - DNA, 22 bp, Artificial Sequence
  chemically synthesized
cttctcacacaatgagaaagaa

SEQ ID NO: 42875 - DNA, 22 bp, Artificial Sequence
  chemically synthesized
ctcacacaatgagaaagaacgg

SEQ ID NO: 42876 - DNA, 22 bp, Artificial Sequence
  chemically synthesized
tcacacaatgagaaagaacgga

SEQ ID NO: 42877 - DNA, 22 bp, Artificial Sequence
  chemically synthesized
acacaatgagaaagaacggata

SEQ ID NO: 42878 - DNA, 22 bp, Artificial Sequence
  chemically synthesized
taagagttcactttctgcacat

SEQ ID NO: 42879 - DNA, 22 bp, Artificial Sequence
  chemically synthesized
agagttcactttctgcacatat

SEQ ID NO: 42880 - DNA, 22 bp, Artificial Sequence
  chemically synthesized
actttctgcacatatgtgtagt

SEQ ID NO: 42881 - DNA, 22 bp, Artificial Sequence
  chemically synthesized
tctgcacatatgtgtagttaag

SEQ ID NO: 42882 - DNA, 22 bp, Artificial Sequence
  chemically synthesized
ctgcacatatgtgtagttaagt

SEQ ID NO: 42883 - DNA, 22 bp, Artificial Sequence
  chemically synthesized
tgcacatatgtgtagttaagta

SEQ ID NO: 42884 - DNA, 22 bp, Artificial Sequence
  chemically synthesized
cacatatgtgtagttaagtact

SEQ ID NO: 42885 - DNA, 22 bp, Artificial Sequence
  chemically synthesized
agtactgaagtgagaaattcaa

SEQ ID NO: 42886 - DNA, 22 bp, Artificial Sequence
  chemically synthesized
aagtgagaaattcaagaaaact

SEQ ID NO: 42887 - DNA, 22 bp, Artificial Sequence
  chemically synthesized
aagaaaactatacttaggcaca

SEQ ID NO: 42888 - DNA, 22 bp, Artificial Sequence
  chemically synthesized
tacttaggcacacacacacaca

SEQ ID NO: 42889 - DNA, 22 bp, Artificial Sequence
  chemically synthesized
aggcacacacacacacattttg

SEQ ID NO: 42890 - DNA, 22 bp, Artificial Sequence
  chemically synthesized
ggcacacacacacacattttga

SEQ ID NO: 42891 - DNA, 22 bp, Artificial Sequence
  chemically synthesized
tgagagataatttctaaagacc

SEQ ID NO: 42892 - DNA, 22 bp, Artificial Sequence
  chemically synthesized
gagagataatttctaaagacct

SEQ ID NO: 42893 - DNA, 22 bp, Artificial Sequence
  chemically synthesized
agagataatttctaaagaccta

SEQ ID NO: 42894 - DNA, 22 bp, Artificial Sequence
  chemically synthesized
ctaaagacctaccaatctaaga

SEQ ID NO: 42895 - DNA, 22 bp, Artificial Sequence
  chemically synthesized
taaagacctaccaatctaagat

SEQ ID NO: 42896 - DNA, 22 bp, Artificial Sequence
  chemically synthesized
aagacctaccaatctaagatac

SEQ ID NO: 42897 - DNA, 22 bp, Artificial Sequence
  chemically synthesized
ccaatctaagatactgaaagaa

SEQ ID NO: 42898 - DNA, 22 bp, Artificial Sequence
  chemically synthesized
agatactgaaagaaaatggcta

SEQ ID NO: 42899 - DNA, 22 bp, Artificial Sequence
  chemically synthesized
aaagaaaatggctacatcaggc

SEQ ID NO: 42900 - DNA, 22 bp, Artificial Sequence
  chemically synthesized
catcaggcccagaaaagccttg

SEQ ID NO: 42901 - DNA, 22 bp, Artificial Sequence
  chemically synthesized
gaaattttccctatccacagac

SEQ ID NO: 42902 - DNA, 22 bp, Artificial Sequence
  chemically synthesized
aaattttccctatccacagacc

SEQ ID NO: 42903 - DNA, 22 bp, Artificial Sequence
  chemically synthesized
tccctatccacagaccacagcc

SEQ ID NO: 42904 - DNA, 22 bp, Artificial Sequence
  chemically synthesized
ccctatccacagaccacagccc

SEQ ID NO: 42905 - DNA, 22 bp, Artificial Sequence
  chemically synthesized
cctatccacagaccacagccct

SEQ ID NO: 42906 - DNA, 22 bp, Artificial Sequence
  chemically synthesized
tccacagaccacagccctgtga

SEQ ID NO: 42907 - DNA, 22 bp, Artificial Sequence
  chemically synthesized
tgatggacatgagatcctctgg

SEQ ID NO: 42908 - DNA, 22 bp, Artificial Sequence
  chemically synthesized
tggctttgagatgaataatgca

SEQ ID NO: 42909 - DNA, 22 bp, Artificial Sequence
  chemically synthesized
gctttgagatgaataatgcaca

SEQ ID NO: 42910 - DNA, 22 bp, Artificial Sequence
  chemically synthesized
tgagatgaataatgcacagaaa

SEQ ID NO: 42911 - DNA, 22 bp, Artificial Sequence
  chemically synthesized
gagatgaataatgcacagaaat

SEQ ID NO: 42912 - DNA, 22 bp, Artificial Sequence
  chemically synthesized
agatgaataatgcacagaaatg

SEQ ID NO: 42913 - DNA, 22 bp, Artificial Sequence
  chemically synthesized
gctggcagattattaccagaca

SEQ ID NO: 42914 - DNA, 22 bp, Artificial Sequence
  chemically synthesized
gcagattattaccagacatgtg

SEQ ID NO: 42915 - DNA, 22 bp, Artificial Sequence
  chemically synthesized
ttaccagacatgtgaacatgcc

SEQ ID NO: 42916 - DNA, 22 bp, Artificial Sequence
  chemically synthesized
ccagacatgtgaacatgccaac

SEQ ID NO: 42917 - DNA, 22 bp, Artificial Sequence
  chemically synthesized
aacatcaggattgggcctgaaa

SEQ ID NO: 42918 - DNA, 22 bp, Artificial Sequence
  chemically synthesized
ggcctgaaacttctctcaggaa

SEQ ID NO: 42919 - DNA, 22 bp, Artificial Sequence
  chemically synthesized
aaacttctctcaggaaggcctt

SEQ ID NO: 42920 - DNA, 22 bp, Artificial Sequence
  chemically synthesized
ctctcaggaaggccttgatagc

SEQ ID NO: 42921 - DNA, 22 bp, Artificial Sequence
  chemically synthesized
tctcaggaaggccttgatagca

SEQ ID NO: 42922 - DNA, 22 bp, Artificial Sequence
  chemically synthesized
tcaggaaggccttgatagcatt

SEQ ID NO: 42923 - DNA, 22 bp, Artificial Sequence
  chemically synthesized
aggaaggccttgatagcattag

SEQ ID NO: 42924 - DNA, 22 bp, Artificial Sequence
  chemically synthesized
gatagcattagatggttgacag

SEQ ID NO: 42925 - DNA, 22 bp, Artificial Sequence
  chemically synthesized
atagcattagatggttgacaga

SEQ ID NO: 42926 - DNA, 22 bp, Artificial Sequence
  chemically synthesized
gatggttgacagaggtattaca

SEQ ID NO: 42927 - DNA, 22 bp, Artificial Sequence
  chemically synthesized
acagaggtattacagtgtgaca

SEQ ID NO: 42928 - DNA, 22 bp, Artificial Sequence
  chemically synthesized
cagtgtgacagagtctgagccc

SEQ ID NO: 42929 - DNA, 22 bp, Artificial Sequence
  chemically synthesized
agcccacagtctgagaatgacc

SEQ ID NO: 42930 - DNA, 22 bp, Artificial Sequence
  chemically synthesized
agaatgaccacatcccttccca

SEQ ID NO: 42931 - DNA, 22 bp, Artificial Sequence
  chemically synthesized
cccagggagacgttcccactca

SEQ ID NO: 42932 - DNA, 22 bp, Artificial Sequence
  chemically synthesized
ccagggagacgttcccactcaa

SEQ ID NO: 42933 - DNA, 22 bp, Artificial Sequence
  chemically synthesized
ccactcaacaccctgggaagac

SEQ ID NO: 42934 - DNA, 22 bp, Artificial Sequence
  chemically synthesized
aacaccctgggaagactactgc

SEQ ID NO: 42935 - DNA, 22 bp, Artificial Sequence
  chemically synthesized
ggaagactactgcgaatcactc

SEQ ID NO: 42936 - DNA, 22 bp, Artificial Sequence
  chemically synthesized
ctgcgaatcactctgtctctca

SEQ ID NO: 42937 - DNA, 22 bp, Artificial Sequence
  chemically synthesized
cgaatcactctgtctctcaaac

SEQ ID NO: 42938 - DNA, 22 bp, Artificial Sequence
  chemically synthesized
tgtctctcaaacctggccatgg

SEQ ID NO: 42939 - DNA, 22 bp, Artificial Sequence
  chemically synthesized
tctctcaaacctggccatggct

SEQ ID NO: 42940 - DNA, 22 bp, Artificial Sequence
  chemically synthesized
tcaaacctggccatggctcagc

SEQ ID NO: 42941 - DNA, 22 bp, Artificial Sequence
  chemically synthesized
aaacctggccatggctcagccc

SEQ ID NO: 42942 - DNA, 22 bp, Artificial Sequence
  chemically synthesized
gccatggctcagcccacgccct

SEQ ID NO: 42943 - DNA, 22 bp, Artificial Sequence
  chemically synthesized
agcccacgccctttcatgtatt

SEQ ID NO: 42944 - DNA, 22 bp, Artificial Sequence
  chemically synthesized
tcatgtatttgcccttttccct

SEQ ID NO: 42945 - DNA, 22 bp, Artificial Sequence
  chemically synthesized
catgtatttgcccttttccctg

SEQ ID NO: 42946 - DNA, 22 bp, Artificial Sequence
  chemically synthesized
atgtatttgcccttttccctgc

SEQ ID NO: 42947 - DNA, 22 bp, Artificial Sequence
  chemically synthesized
gcccttttccctgctaacagaa

SEQ ID NO: 42948 - DNA, 22 bp, Artificial Sequence
  chemically synthesized
cccttttccctgctaacagaaa

SEQ ID NO: 42949 - DNA, 22 bp, Artificial Sequence
  chemically synthesized
ttccctgctaacagaaatggaa

SEQ ID NO: 42950 - DNA, 22 bp, Artificial Sequence
  chemically synthesized
tccctgctaacagaaatggaat

SEQ ID NO: 42951 - DNA, 22 bp, Artificial Sequence
  chemically synthesized
ccctgctaacagaaatggaatc

SEQ ID NO: 42952 - DNA, 22 bp, Artificial Sequence
  chemically synthesized
cctgctaacagaaatggaatca

SEQ ID NO: 42953 - DNA, 22 bp, Artificial Sequence
  chemically synthesized
ctaacagaaatggaatcagaac

SEQ ID NO: 42954 - DNA, 22 bp, Artificial Sequence
  chemically synthesized
acagaaatggaatcagaacaaa

SEQ ID NO: 42955 - DNA, 22 bp, Artificial Sequence
  chemically synthesized
atatttaattttaagattacta

SEQ ID NO: 42956 - DNA, 22 bp, Artificial Sequence
  chemically synthesized
aattttaagattactattctat

SEQ ID NO: 42957 - DNA, 22 bp, Artificial Sequence
  chemically synthesized
attttaagattactattctatc

SEQ ID NO: 42958 - DNA, 22 bp, Artificial Sequence
  chemically synthesized
taagattactattctatcagaa

SEQ ID NO: 42959 - DNA, 22 bp, Artificial Sequence
  chemically synthesized
aagattactattctatcagaat

SEQ ID NO: 42960 - DNA, 22 bp, Artificial Sequence
  chemically synthesized
agattactattctatcagaata

SEQ ID NO: 42961 - DNA, 22 bp, Artificial Sequence
  chemically synthesized
ctattctatcagaataaaaaag

SEQ ID NO: 42962 - DNA, 22 bp, Artificial Sequence
  chemically synthesized
ttctatcagaataaaaaagact

SEQ ID NO: 42963 - DNA, 22 bp, Artificial Sequence
  chemically synthesized
tatcagaataaaaaagactcgg

SEQ ID NO: 42964 - DNA, 22 bp, Artificial Sequence
  chemically synthesized
tcagaataaaaaagactcggga

SEQ ID NO: 42965 - DNA, 22 bp, Artificial Sequence
  chemically synthesized
gggagattcaaagcgaaggcaa

SEQ ID NO: 42966 - DNA, 22 bp, Artificial Sequence
  chemically synthesized
aaagcgaaggcaaatgcccctc

SEQ ID NO: 42967 - DNA, 22 bp, Artificial Sequence
  chemically synthesized
ctttaagtctaacgttgctatt

SEQ ID NO: 42968 - DNA, 22 bp, Artificial Sequence
  chemically synthesized
taagtctaacgttgctattcag

SEQ ID NO: 42969 - DNA, 22 bp, Artificial Sequence
  chemically synthesized
aagtctaacgttgctattcagg

SEQ ID NO: 42970 - DNA, 22 bp, Artificial Sequence
  chemically synthesized
agtctaacgttgctattcaggc

SEQ ID NO: 42971 - DNA, 22 bp, Artificial Sequence
  chemically synthesized
acgttgctattcaggcatttag

SEQ ID NO: 42972 - DNA, 22 bp, Artificial Sequence
  chemically synthesized
ctattcaggcatttaggagcgc

SEQ ID NO: 42973 - DNA, 22 bp, Artificial Sequence
  chemically synthesized
ttcaggcatttaggagcgctag

SEQ ID NO: 42974 - DNA, 22 bp, Artificial Sequence
  chemically synthesized
aggcatttaggagcgctagaca

SEQ ID NO: 42975 - DNA, 22 bp, Artificial Sequence
  chemically synthesized
aggagcgctagacacagtgagt

SEQ ID NO: 42976 - DNA, 22 bp, Artificial Sequence
  chemically synthesized
ggagcgctagacacagtgagtt

SEQ ID NO: 42977 - DNA, 22 bp, Artificial Sequence
  chemically synthesized
gacacagtgagtttccctgcct

SEQ ID NO: 42978 - DNA, 22 bp, Artificial Sequence
  chemically synthesized
ccctgcctccaacctgtgattt

SEQ ID NO: 42979 - DNA, 22 bp, Artificial Sequence
  chemically synthesized
cctgcctccaacctgtgatttg

SEQ ID NO: 42980 - DNA, 22 bp, Artificial Sequence
  chemically synthesized
cctccaacctgtgatttgccac

SEQ ID NO: 42981 - DNA, 22 bp, Artificial Sequence
  chemically synthesized
caacctgtgatttgccacaagg

SEQ ID NO: 42982 - DNA, 22 bp, Artificial Sequence
  chemically synthesized
tgatttgccacaaggcaggaag

SEQ ID NO: 42983 - DNA, 22 bp, Artificial Sequence
  chemically synthesized
gccacaaggcaggaaggggaag

SEQ ID NO: 42984 - DNA, 22 bp, Artificial Sequence
  chemically synthesized
ccacaaggcaggaaggggaagg

SEQ ID NO: 42985 - DNA, 22 bp, Artificial Sequence
  chemically synthesized
agtgtgtgaagttctaaccttt

SEQ ID NO: 42986 - DNA, 22 bp, Artificial Sequence
  chemically synthesized
taaccttttacccatgtaatga

SEQ ID NO: 42987 - DNA, 22 bp, Artificial Sequence
  chemically synthesized
accttttacccatgtaatgatc

SEQ ID NO: 42988 - DNA, 22 bp, Artificial Sequence
  chemically synthesized
ttacccatgtaatgatctagtt

SEQ ID NO: 42989 - DNA, 22 bp, Artificial Sequence
  chemically synthesized
tacccatgtaatgatctagtta

SEQ ID NO: 42990 - DNA, 22 bp, Artificial Sequence
  chemically synthesized
acccatgtaatgatctagttaa

SEQ ID NO: 42991 - DNA, 22 bp, Artificial Sequence
  chemically synthesized
cccatgtaatgatctagttaat

SEQ ID NO: 42992 - DNA, 22 bp, Artificial Sequence
  chemically synthesized
gttaatgtaatattttgccttt

SEQ ID NO: 42993 - DNA, 22 bp, Artificial Sequence
  chemically synthesized
atgtaatattttgcctttaatc

SEQ ID NO: 42994 - DNA, 22 bp, Artificial Sequence
  chemically synthesized
tgcctttaatcaatgaaagagt

SEQ ID NO: 42995 - DNA, 22 bp, Artificial Sequence
  chemically synthesized
gcctttaatcaatgaaagagta

SEQ ID NO: 42996 - DNA, 22 bp, Artificial Sequence
  chemically synthesized
cctttaatcaatgaaagagtaa

SEQ ID NO: 42997 - DNA, 22 bp, Artificial Sequence
  chemically synthesized
taatcaatgaaagagtaagata

SEQ ID NO: 42998 - DNA, 22 bp, Artificial Sequence
  chemically synthesized
aatcaatgaaagagtaagataa

SEQ ID NO: 42999 - DNA, 22 bp, Artificial Sequence
  chemically synthesized
atcaatgaaagagtaagataat

SEQ ID NO: 43000 - DNA, 22 bp, Artificial Sequence
  chemically synthesized
gatatcctataaaactccctaa

SEQ ID NO: 43001 - DNA, 22 bp, Artificial Sequence
  chemically synthesized
atatcctataaaactccctaac

SEQ ID NO: 43002 - DNA, 22 bp, Artificial Sequence
  chemically synthesized
taaaactccctaacctatattt

SEQ ID NO: 43003 - DNA, 22 bp, Artificial Sequence
  chemically synthesized
cctaacctatattttgcaagtc

SEQ ID NO: 43004 - DNA, 22 bp, Artificial Sequence
  chemically synthesized
acctatattttgcaagtcgatt

SEQ ID NO: 43005 - DNA, 22 bp, Artificial Sequence
  chemically synthesized
tattttgcaagtcgattagcta

SEQ ID NO: 43006 - DNA, 22 bp, Artificial Sequence
  chemically synthesized
tgcaagtcgattagctaagctc

SEQ ID NO: 43007 - DNA, 22 bp, Artificial Sequence
  chemically synthesized
gcaagtcgattagctaagctct

SEQ ID NO: 43008 - DNA, 22 bp, Artificial Sequence
  chemically synthesized
caagtcgattagctaagctctt

SEQ ID NO: 43009 - DNA, 22 bp, Artificial Sequence
  chemically synthesized
gctaagctcttcatgctaatgt

SEQ ID NO: 43010 - DNA, 22 bp, Artificial Sequence
  chemically synthesized
agctcttcatgctaatgtcagc

SEQ ID NO: 43011 - DNA, 22 bp, Artificial Sequence
  chemically synthesized
ttcatgctaatgtcagcagagc

SEQ ID NO: 43012 - DNA, 22 bp, Artificial Sequence
  chemically synthesized
catgctaatgtcagcagagccc

SEQ ID NO: 43013 - DNA, 22 bp, Artificial Sequence
  chemically synthesized
atgctaatgtcagcagagccca

SEQ ID NO: 43014 - DNA, 22 bp, Artificial Sequence
  chemically synthesized
atgtcagcagagcccatgttac

SEQ ID NO: 43015 - DNA, 22 bp, Artificial Sequence
  chemically synthesized
catctccagtcaggctttcagg

SEQ ID NO: 43016 - DNA, 22 bp, Artificial Sequence
  chemically synthesized
cagtcaggctttcaggtgtctg

SEQ ID NO: 43017 - DNA, 22 bp, Artificial Sequence
  chemically synthesized
tcaggtgtctgcaccccacaat

SEQ ID NO: 43018 - DNA, 22 bp, Artificial Sequence
  chemically synthesized
caggtgtctgcaccccacaatg

SEQ ID NO: 43019 - DNA, 22 bp, Artificial Sequence
  chemically synthesized
aggtgtctgcaccccacaatgc

SEQ ID NO: 43020 - DNA, 22 bp, Artificial Sequence
  chemically synthesized
caccccacaatgccacacaccg

SEQ ID NO: 43021 - DNA, 22 bp, Artificial Sequence
  chemically synthesized
agcagggggagcagtgtagtgg

SEQ ID NO: 43022 - DNA, 22 bp, Artificial Sequence
  chemically synthesized
cgttttcgtcatctgtatggaa

SEQ ID NO: 43023 - DNA, 22 bp, Artificial Sequence
  chemically synthesized
tcgtcatctgtatggaaattgg

SEQ ID NO: 43024 - DNA, 22 bp, Artificial Sequence
  chemically synthesized
cgtcatctgtatggaaattggg

SEQ ID NO: 43025 - DNA, 22 bp, Artificial Sequence
  chemically synthesized
gtcatctgtatggaaattggga

SEQ ID NO: 43026 - DNA, 22 bp, Artificial Sequence
  chemically synthesized
tatggaaattgggaaatcgtct

SEQ ID NO: 43027 - DNA, 22 bp, Artificial Sequence
  chemically synthesized
ggaaatcgtcttctcaaatgta

SEQ ID NO: 43028 - DNA, 22 bp, Artificial Sequence
  chemically synthesized
ctcaaatgtagattatcttccc

SEQ ID NO: 43029 - DNA, 22 bp, Artificial Sequence
  chemically synthesized
tcaaatgtagattatcttccct

SEQ ID NO: 43030 - DNA, 22 bp, Artificial Sequence
  chemically synthesized
aaatgtagattatcttcccttg

SEQ ID NO: 43031 - DNA, 22 bp, Artificial Sequence
  chemically synthesized
tcttcccttgggatccttctgg

SEQ ID NO: 43032 - DNA, 22 bp, Artificial Sequence
  chemically synthesized
cccttgggatccttctggaggg

SEQ ID NO: 43033 - DNA, 22 bp, Artificial Sequence
  chemically synthesized
ccttgggatccttctggagggc

SEQ ID NO: 43034 - DNA, 22 bp, Artificial Sequence
  chemically synthesized
gggatccttctggagggctata

SEQ ID NO: 43035 - DNA, 22 bp, Artificial Sequence
  chemically synthesized
ggatccttctggagggctataa

SEQ ID NO: 43036 - DNA, 22 bp, Artificial Sequence
  chemically synthesized
ctggagggctataaataataga

SEQ ID NO: 43037 - DNA, 22 bp, Artificial Sequence
  chemically synthesized
tggagggctataaataatagaa

SEQ ID NO: 43038 - DNA, 22 bp, Artificial Sequence
  chemically synthesized
gagggctataaataatagaaca

SEQ ID NO: 43039 - DNA, 22 bp, Artificial Sequence
  chemically synthesized
taaataatagaacatactaatc

SEQ ID NO: 43040 - DNA, 22 bp, Artificial Sequence
  chemically synthesized
atcaacattagatatttaaaaa

SEQ ID NO: 43041 - DNA, 22 bp, Artificial Sequence
  chemically synthesized
gatatttaaaaatgaatacaga

SEQ ID NO: 43042 - DNA, 22 bp, Artificial Sequence
  chemically synthesized
aaaaatgaatacagattcagat

SEQ ID NO: 43043 - DNA, 22 bp, Artificial Sequence
  chemically synthesized
aaaatgaatacagattcagatt

SEQ ID NO: 43044 - DNA, 22 bp, Artificial Sequence
  chemically synthesized
agattaagggaaaactaaatga

SEQ ID NO: 43045 - DNA, 22 bp, Artificial Sequence
  chemically synthesized
agggaaaactaaatgatgcctt

SEQ ID NO: 43046 - DNA, 22 bp, Artificial Sequence
  chemically synthesized
aatgatgcctttataaaatcca

SEQ ID NO: 43047 - DNA, 22 bp, Artificial Sequence
  chemically synthesized
tataaaatccagaacaaaacaa

SEQ ID NO: 43048 - DNA, 22 bp, Artificial Sequence
  chemically synthesized
ataaaatccagaacaaaacaaa

SEQ ID NO: 43049 - DNA, 22 bp, Artificial Sequence
  chemically synthesized
taaaatccagaacaaaacaaaa

SEQ ID NO: 43050 - DNA, 22 bp, Artificial Sequence
  chemically synthesized
agcggatcccccttaagttagc

SEQ ID NO: 43051 - DNA, 22 bp, Artificial Sequence
  chemically synthesized
gcggatcccccttaagttagcc

SEQ ID NO: 43052 - DNA, 22 bp, Artificial Sequence
  chemically synthesized
aagttagccctattctctggca

SEQ ID NO: 43053 - DNA, 22 bp, Artificial Sequence
  chemically synthesized
agttagccctattctctggcaa

SEQ ID NO: 43054 - DNA, 22 bp, Artificial Sequence
  chemically synthesized
gccctattctctggcaaccaca

SEQ ID NO: 43055 - DNA, 22 bp, Artificial Sequence
  chemically synthesized
ttctctggcaaccacaccagcc

SEQ ID NO: 43056 - DNA, 22 bp, Artificial Sequence
  chemically synthesized
tctggcaaccacaccagccttt

SEQ ID NO: 43057 - DNA, 22 bp, Artificial Sequence
  chemically synthesized
tggcaaccacaccagcctttaa

SEQ ID NO: 43058 - DNA, 22 bp, Artificial Sequence
  chemically synthesized
gcaaccacaccagcctttaacg

SEQ ID NO: 43059 - DNA, 22 bp, Artificial Sequence
  chemically synthesized
taacgagggtgttcaaagtaac

SEQ ID NO: 43060 - DNA, 22 bp, Artificial Sequence
  chemically synthesized
aacgagggtgttcaaagtaacc

SEQ ID NO: 43061 - DNA, 22 bp, Artificial Sequence
  chemically synthesized
acgagggtgttcaaagtaacca

SEQ ID NO: 43062 - DNA, 22 bp, Artificial Sequence
  chemically synthesized
aaagtaaccatttcccactccc

SEQ ID NO: 43063 - DNA, 22 bp, Artificial Sequence
  chemically synthesized
cccactcccttatttatgagca

SEQ ID NO: 43064 - DNA, 22 bp, Artificial Sequence
  chemically synthesized
ccactcccttatttatgagcag

SEQ ID NO: 43065 - DNA, 22 bp, Artificial Sequence
  chemically synthesized
ccttatttatgagcagcagaat

SEQ ID NO: 43066 - DNA, 22 bp, Artificial Sequence
  chemically synthesized
atttatgagcagcagaatgtaa

SEQ ID NO: 43067 - DNA, 22 bp, Artificial Sequence
  chemically synthesized
tttatgagcagcagaatgtaaa

SEQ ID NO: 43068 - DNA, 22 bp, Artificial Sequence
  chemically synthesized
atgagcagcagaatgtaaaaag

SEQ ID NO: 43069 - DNA, 22 bp, Artificial Sequence
  chemically synthesized
tgagcagcagaatgtaaaaagc

SEQ ID NO: 43070 - DNA, 22 bp, Artificial Sequence
  chemically synthesized
aattttaatgcggtaattttct

SEQ ID NO: 43071 - DNA, 22 bp, Artificial Sequence
  chemically synthesized
attttaatgcggtaattttctc

SEQ ID NO: 43072 - DNA, 22 bp, Artificial Sequence
  chemically synthesized
taatgcggtaattttctcatca

SEQ ID NO: 43073 - DNA, 22 bp, Artificial Sequence
  chemically synthesized
aatgcggtaattttctcatcaa

SEQ ID NO: 43074 - DNA, 22 bp, Artificial Sequence
  chemically synthesized
atgcggtaattttctcatcaac

SEQ ID NO: 43075 - DNA, 22 bp, Artificial Sequence
  chemically synthesized
tctcatcaaccattctatctaa

SEQ ID NO: 43076 - DNA, 22 bp, Artificial Sequence
  chemically synthesized
ctcatcaaccattctatctaag

SEQ ID NO: 43077 - DNA, 22 bp, Artificial Sequence
  chemically synthesized
tcatcaaccattctatctaagg

SEQ ID NO: 43078 - DNA, 22 bp, Artificial Sequence
  chemically synthesized
atcaaccattctatctaaggaa

SEQ ID NO: 43079 - DNA, 22 bp, Artificial Sequence
  chemically synthesized
tatctaaggaagctgcagaaag

SEQ ID NO: 43080 - DNA, 22 bp, Artificial Sequence
  chemically synthesized
tctaaggaagctgcagaaaggt

SEQ ID NO: 43081 - DNA, 22 bp, Artificial Sequence
  chemically synthesized
aggaagctgcagaaaggtgaaa

SEQ ID NO: 43082 - DNA, 22 bp, Artificial Sequence
  chemically synthesized
cagaaaggtgaaaactggaaat

SEQ ID NO: 43083 - DNA, 22 bp, Artificial Sequence
  chemically synthesized
gaaatttatgaacctttaatgg

SEQ ID NO: 43084 - DNA, 22 bp, Artificial Sequence
  chemically synthesized
atgaacctttaatgggaaatct

SEQ ID NO: 43085 - DNA, 22 bp, Artificial Sequence
  chemically synthesized
tgaacctttaatgggaaatctg

SEQ ID NO: 43086 - DNA, 22 bp, Artificial Sequence
  chemically synthesized
taatgggaaatctggataagaa

SEQ ID NO: 43087 - DNA, 22 bp, Artificial Sequence
  chemically synthesized
aatgggaaatctggataagaat

SEQ ID NO: 43088 - DNA, 22 bp, Artificial Sequence
  chemically synthesized
atgggaaatctggataagaatt

SEQ ID NO: 43089 - DNA, 22 bp, Artificial Sequence
  chemically synthesized
gataagaatttggtctaaatat

SEQ ID NO: 43090 - DNA, 22 bp, Artificial Sequence
  chemically synthesized
ggtctaaatatatgaagaggaa

SEQ ID NO: 43091 - DNA, 22 bp, Artificial Sequence
  chemically synthesized
gtctaaatatatgaagaggaac

SEQ ID NO: 43092 - DNA, 22 bp, Artificial Sequence
  chemically synthesized
aatatatgaagaggaacatgga

SEQ ID NO: 43093 - DNA, 22 bp, Artificial Sequence
  chemically synthesized
gcacaaacacaaaatgcaagta

SEQ ID NO: 43094 - DNA, 22 bp, Artificial Sequence
  chemically synthesized
caactccagctccctgataaca

SEQ ID NO: 43095 - DNA, 22 bp, Artificial Sequence
  chemically synthesized
cagctccctgataacatctgcc

SEQ ID NO: 43096 - DNA, 22 bp, Artificial Sequence
  chemically synthesized
cctgataacatctgccactaaa

SEQ ID NO: 43097 - DNA, 22 bp, Artificial Sequence
  chemically synthesized
ataacatctgccactaaaggtt

SEQ ID NO: 43098 - DNA, 22 bp, Artificial Sequence
  chemically synthesized
ccactaaaggtttactgacttg

SEQ ID NO: 43099 - DNA, 22 bp, Artificial Sequence
  chemically synthesized
aaggtttactgacttggttttc

SEQ ID NO: 43100 - DNA, 22 bp, Artificial Sequence
  chemically synthesized
actgacttggttttcccaactc

SEQ ID NO: 43101 - DNA, 22 bp, Artificial Sequence
  chemically synthesized
ctgacttggttttcccaactct

SEQ ID NO: 43102 - DNA, 22 bp, Artificial Sequence
  chemically synthesized
acttggttttcccaactctaga

SEQ ID NO: 43103 - DNA, 22 bp, Artificial Sequence
  chemically synthesized
ggttttcccaactctagaatgg

SEQ ID NO: 43104 - DNA, 22 bp, Artificial Sequence
  chemically synthesized
gttttcccaactctagaatgga

SEQ ID NO: 43105 - DNA, 22 bp, Artificial Sequence
  chemically synthesized
tcccaactctagaatggagccc

SEQ ID NO: 43106 - DNA, 22 bp, Artificial Sequence
  chemically synthesized
cccaactctagaatggagccct

SEQ ID NO: 43107 - DNA, 22 bp, Artificial Sequence
  chemically synthesized
ccaactctagaatggagccctc

SEQ ID NO: 43108 - DNA, 22 bp, Artificial Sequence
  chemically synthesized
tagaatggagccctcatctaaa

SEQ ID NO: 43109 - DNA, 22 bp, Artificial Sequence
  chemically synthesized
gaatggagccctcatctaaacc

SEQ ID NO: 43110 - DNA, 22 bp, Artificial Sequence
  chemically synthesized
atctaaacctggggaagcaata

SEQ ID NO: 43111 - DNA, 22 bp, Artificial Sequence
  chemically synthesized
aacctggggaagcaatatatga

SEQ ID NO: 43112 - DNA, 22 bp, Artificial Sequence
  chemically synthesized
gggaagcaatatatgaacaatt

SEQ ID NO: 43113 - DNA, 22 bp, Artificial Sequence
  chemically synthesized
gatattaaatgcttatagatcc

SEQ ID NO: 43114 - DNA, 22 bp, Artificial Sequence
  chemically synthesized
aatgcttatagatccctctctg

SEQ ID NO: 43115 - DNA, 22 bp, Artificial Sequence
  chemically synthesized
atagatccctctctgtgctatt

SEQ ID NO: 43116 - DNA, 22 bp, Artificial Sequence
  chemically synthesized
tagatccctctctgtgctatta

SEQ ID NO: 43117 - DNA, 22 bp, Artificial Sequence
  chemically synthesized
tctgtgctattacttttgacct

SEQ ID NO: 43118 - DNA, 22 bp, Artificial Sequence
  chemically synthesized
tgtgctattacttttgacctgg

SEQ ID NO: 43119 - DNA, 22 bp, Artificial Sequence
  chemically synthesized
tgctattacttttgacctgggt

SEQ ID NO: 43120 - DNA, 22 bp, Artificial Sequence
  chemically synthesized
ttacttttgacctgggttttaa

SEQ ID NO: 43121 - DNA, 22 bp, Artificial Sequence
  chemically synthesized
cttttgacctgggttttaaaaa

SEQ ID NO: 43122 - DNA, 22 bp, Artificial Sequence
  chemically synthesized
ttgacctgggttttaaaaacac

SEQ ID NO: 43123 - DNA, 22 bp, Artificial Sequence
  chemically synthesized
tgacctgggttttaaaaacaca

SEQ ID NO: 43124 - DNA, 22 bp, Artificial Sequence
  chemically synthesized
gacctgggttttaaaaacacag

SEQ ID NO: 43125 - DNA, 22 bp, Artificial Sequence
  chemically synthesized
acctgggttttaaaaacacagt

SEQ ID NO: 43126 - DNA, 22 bp, Artificial Sequence
  chemically synthesized
ggttttaaaaacacagtaacac

SEQ ID NO: 43127 - DNA, 22 bp, Artificial Sequence
  chemically synthesized
taaaaacacagtaacacttaca

SEQ ID NO: 43128 - DNA, 22 bp, Artificial Sequence
  chemically synthesized
aaaaacacagtaacacttacaa

SEQ ID NO: 43129 - DNA, 22 bp, Artificial Sequence
  chemically synthesized
aaaacacagtaacacttacaat

SEQ ID NO: 43130 - DNA, 22 bp, Artificial Sequence
  chemically synthesized
acaatttattctcattatgtag

SEQ ID NO: 43131 - DNA, 22 bp, Artificial Sequence
  chemically synthesized
caatttattctcattatgtaga

SEQ ID NO: 43132 - DNA, 22 bp, Artificial Sequence
  chemically synthesized
attctcattatgtagaaacatt

SEQ ID NO: 43133 - DNA, 22 bp, Artificial Sequence
  chemically synthesized
ttctcattatgtagaaacattt

SEQ ID NO: 43134 - DNA, 22 bp, Artificial Sequence
  chemically synthesized
tcattatgtagaaacatttaaa

SEQ ID NO: 43135 - DNA, 22 bp, Artificial Sequence
  chemically synthesized
attatgtagaaacatttaaatt

SEQ ID NO: 43136 - DNA, 22 bp, Artificial Sequence
  chemically synthesized
tgtagaaacatttaaattatcc

SEQ ID NO: 43137 - DNA, 22 bp, Artificial Sequence
  chemically synthesized
aaattatcctggaagagtttgt

SEQ ID NO: 43138 - DNA, 22 bp, Artificial Sequence
  chemically synthesized
aattatcctggaagagtttgtc

SEQ ID NO: 43139 - DNA, 22 bp, Artificial Sequence
  chemically synthesized
tcctggaagagtttgtctcacg

SEQ ID NO: 43140 - DNA, 22 bp, Artificial Sequence
  chemically synthesized
gaagagtttgtctcacgggctg

SEQ ID NO: 43141 - DNA, 22 bp, Artificial Sequence
  chemically synthesized
gtctcacgggctgttcaaagag

SEQ ID NO: 43142 - DNA, 22 bp, Artificial Sequence
  chemically synthesized
tctcacgggctgttcaaagagt

SEQ ID NO: 43143 - DNA, 22 bp, Artificial Sequence
  chemically synthesized
acgggctgttcaaagagtgttt

SEQ ID NO: 43144 - DNA, 22 bp, Artificial Sequence
  chemically synthesized
ttcaaagagtgtttcttccttt

SEQ ID NO: 43145 - DNA, 22 bp, Artificial Sequence
  chemically synthesized
aaagagtgtttcttcctttcct

SEQ ID NO: 43146 - DNA, 22 bp, Artificial Sequence
  chemically synthesized
cttcctttccttctaggaacat

SEQ ID NO: 43147 - DNA, 22 bp, Artificial Sequence
  chemically synthesized
ttcctttccttctaggaacatg

SEQ ID NO: 43148 - DNA, 22 bp, Artificial Sequence
  chemically synthesized
cctttccttctaggaacatgag

SEQ ID NO: 43149 - DNA, 22 bp, Artificial Sequence
  chemically synthesized
ctttccttctaggaacatgagg

SEQ ID NO: 43150 - DNA, 22 bp, Artificial Sequence
  chemically synthesized
tccttctaggaacatgaggagt

SEQ ID NO: 43151 - DNA, 22 bp, Artificial Sequence
  chemically synthesized
ccttctaggaacatgaggagtg

SEQ ID NO: 43152 - DNA, 22 bp, Artificial Sequence
  chemically synthesized
cttctaggaacatgaggagtga

SEQ ID NO: 43153 - DNA, 22 bp, Artificial Sequence
  chemically synthesized
ctaggaacatgaggagtgaatc

SEQ ID NO: 43154 - DNA, 22 bp, Artificial Sequence
  chemically synthesized
taggaacatgaggagtgaatct

SEQ ID NO: 43155 - DNA, 22 bp, Artificial Sequence
  chemically synthesized
ggaacatgaggagtgaatctga

SEQ ID NO: 43156 - DNA, 22 bp, Artificial Sequence
  chemically synthesized
actatttcatcaaagcctgtaa

SEQ ID NO: 43157 - DNA, 22 bp, Artificial Sequence
  chemically synthesized
tttcatcaaagcctgtaaaaga

SEQ ID NO: 43158 - DNA, 22 bp, Artificial Sequence
  chemically synthesized
catcaaagcctgtaaaagatac

SEQ ID NO: 43159 - DNA, 22 bp, Artificial Sequence
  chemically synthesized
atcaaagcctgtaaaagatacc

SEQ ID NO: 43160 - DNA, 22 bp, Artificial Sequence
  chemically synthesized
taaaagatacctgagtcatgat

SEQ ID NO: 43161 - DNA, 22 bp, Artificial Sequence
  chemically synthesized
agtcatgattttaactgaacaa

SEQ ID NO: 43162 - DNA, 22 bp, Artificial Sequence
  chemically synthesized
taactgaacaatgtctccaaga

SEQ ID NO: 43163 - DNA, 22 bp, Artificial Sequence
  chemically synthesized
aactgaacaatgtctccaagaa

SEQ ID NO: 43164 - DNA, 22 bp, Artificial Sequence
  chemically synthesized
actgaacaatgtctccaagaat

SEQ ID NO: 43165 - DNA, 22 bp, Artificial Sequence
  chemically synthesized
aacaatgtctccaagaattcag

SEQ ID NO: 43166 - DNA, 22 bp, Artificial Sequence
  chemically synthesized
caagaattcagactgtgagagg

SEQ ID NO: 43167 - DNA, 22 bp, Artificial Sequence
  chemically synthesized
agactgtgagagggggaagaag

SEQ ID NO: 43168 - DNA, 22 bp, Artificial Sequence
  chemically synthesized
tgagagggggaagaagaccgtc

SEQ ID NO: 43169 - DNA, 22 bp, Artificial Sequence
  chemically synthesized
tttggtgcagtgggaattgcca

SEQ ID NO: 43170 - DNA, 22 bp, Artificial Sequence
  chemically synthesized
tggtgcagtgggaattgccatt

SEQ ID NO: 43171 - DNA, 22 bp, Artificial Sequence
  chemically synthesized
ggtgcagtgggaattgccattg

SEQ ID NO: 43172 - DNA, 22 bp, Artificial Sequence
  chemically synthesized
gtgcagtgggaattgccattgt

SEQ ID NO: 43173 - DNA, 22 bp, Artificial Sequence
  chemically synthesized
ccattgtgtcctccctggttcc

SEQ ID NO: 43174 - DNA, 22 bp, Artificial Sequence
  chemically synthesized
tgtcctccctggttcctctcct

SEQ ID NO: 43175 - DNA, 22 bp, Artificial Sequence
  chemically synthesized
cctggttcctctcctctgtcct

SEQ ID NO: 43176 - DNA, 22 bp, Artificial Sequence
  chemically synthesized
gttcctctcctctgtccttggc

SEQ ID NO: 43177 - DNA, 22 bp, Artificial Sequence
  chemically synthesized
ctctcctctgtccttggcaatc

SEQ ID NO: 43178 - DNA, 22 bp, Artificial Sequence
  chemically synthesized
tcctctgtccttggcaatccag

SEQ ID NO: 43179 - DNA, 22 bp, Artificial Sequence
  chemically synthesized
ctctgtccttggcaatccagtt

SEQ ID NO: 43180 - DNA, 22 bp, Artificial Sequence
  chemically synthesized
tgtccttggcaatccagttaca

SEQ ID NO: 43181 - DNA, 22 bp, Artificial Sequence
  chemically synthesized
tccttggcaatccagttacaat

SEQ ID NO: 43182 - DNA, 22 bp, Artificial Sequence
  chemically synthesized
ggcaatccagttacaatttgac

SEQ ID NO: 43183 - DNA, 22 bp, Artificial Sequence
  chemically synthesized
gcaatccagttacaatttgaca

SEQ ID NO: 43184 - DNA, 22 bp, Artificial Sequence
  chemically synthesized
caatttgacagcatttaaagat

SEQ ID NO: 43185 - DNA, 22 bp, Artificial Sequence
  chemically synthesized
gacagcatttaaagatgacagt

SEQ ID NO: 43186 - DNA, 22 bp, Artificial Sequence
  chemically synthesized
acagcatttaaagatgacagta

SEQ ID NO: 43187 - DNA, 22 bp, Artificial Sequence
  chemically synthesized
aaagatgacagtacttgagata

SEQ ID NO: 43188 - DNA, 22 bp, Artificial Sequence
  chemically synthesized
aagatgacagtacttgagataa

SEQ ID NO: 43189 - DNA, 22 bp, Artificial Sequence
  chemically synthesized
gagataataggacaatgccata

SEQ ID NO: 43190 - DNA, 22 bp, Artificial Sequence
  chemically synthesized
agataataggacaatgccataa

SEQ ID NO: 43191 - DNA, 22 bp, Artificial Sequence
  chemically synthesized
cagcaaatgtgaaagaaaggac

SEQ ID NO: 43192 - DNA, 22 bp, Artificial Sequence
  chemically synthesized
tcatttaggtaatgtcatctat

SEQ ID NO: 43193 - DNA, 22 bp, Artificial Sequence
  chemically synthesized
aggtaatgtcatctatgatcag

SEQ ID NO: 43194 - DNA, 22 bp, Artificial Sequence
  chemically synthesized
ggtaatgtcatctatgatcagt

SEQ ID NO: 43195 - DNA, 22 bp, Artificial Sequence
  chemically synthesized
tgatcagtttttgtttcatttt

SEQ ID NO: 43196 - DNA, 22 bp, Artificial Sequence
  chemically synthesized
ttgtttcattttttgctgacac

SEQ ID NO: 43197 - DNA, 22 bp, Artificial Sequence
  chemically synthesized
tgtttcattttttgctgacaca

SEQ ID NO: 43198 - DNA, 22 bp, Artificial Sequence
  chemically synthesized
gtttcattttttgctgacacag

SEQ ID NO: 43199 - DNA, 22 bp, Artificial Sequence
  chemically synthesized
tttcattttttgctgacacaga

SEQ ID NO: 43200 - DNA, 22 bp, Artificial Sequence
  chemically synthesized
cattttttgctgacacagaact

SEQ ID NO: 43201 - DNA, 22 bp, Artificial Sequence
  chemically synthesized
attttttgctgacacagaactc

SEQ ID NO: 43202 - DNA, 22 bp, Artificial Sequence
  chemically synthesized
tttgctgacacagaactcagtg

SEQ ID NO: 43203 - DNA, 22 bp, Artificial Sequence
  chemically synthesized
ttgctgacacagaactcagtgc

SEQ ID NO: 43204 - DNA, 22 bp, Artificial Sequence
  chemically synthesized
tgctgacacagaactcagtgct

SEQ ID NO: 43205 - DNA, 22 bp, Artificial Sequence
  chemically synthesized
gctgacacagaactcagtgcta

SEQ ID NO: 43206 - DNA, 22 bp, Artificial Sequence
  chemically synthesized
ctgacacagaactcagtgctac

SEQ ID NO: 43207 - DNA, 22 bp, Artificial Sequence
  chemically synthesized
acacagaactcagtgctactta

SEQ ID NO: 43208 - DNA, 22 bp, Artificial Sequence
  chemically synthesized
agtgctacttatacaattcact

SEQ ID NO: 43209 - DNA, 22 bp, Artificial Sequence
  chemically synthesized
cttatacaattcactggaaacc

SEQ ID NO: 43210 - DNA, 22 bp, Artificial Sequence
  chemically synthesized
atacaattcactggaaaccctg

SEQ ID NO: 43211 - DNA, 22 bp, Artificial Sequence
  chemically synthesized
tacaattcactggaaaccctgt

SEQ ID NO: 43212 - DNA, 22 bp, Artificial Sequence
  chemically synthesized
actggaaaccctgttatggctg

SEQ ID NO: 43213 - DNA, 22 bp, Artificial Sequence
  chemically synthesized
gaaaccctgttatggctgtaaa

SEQ ID NO: 43214 - DNA, 22 bp, Artificial Sequence
  chemically synthesized
ttatggctgtaaatagtttgct

SEQ ID NO: 43215 - DNA, 22 bp, Artificial Sequence
  chemically synthesized
tggctgtaaatagtttgcttcc

SEQ ID NO: 43216 - DNA, 22 bp, Artificial Sequence
  chemically synthesized
taaatagtttgcttcccccaat

SEQ ID NO: 43217 - DNA, 22 bp, Artificial Sequence
  chemically synthesized
gcttcccccaatgaaagaaaat

SEQ ID NO: 43218 - DNA, 22 bp, Artificial Sequence
  chemically synthesized
cttcccccaatgaaagaaaata

SEQ ID NO: 43219 - DNA, 22 bp, Artificial Sequence
  chemically synthesized
cccccaatgaaagaaaatactt

SEQ ID NO: 43220 - DNA, 22 bp, Artificial Sequence
  chemically synthesized
ccccaatgaaagaaaatactta

SEQ ID NO: 43221 - DNA, 22 bp, Artificial Sequence
  chemically synthesized
actgtactgcaggggaattcgg

SEQ ID NO: 43222 - DNA, 22 bp, Artificial Sequence
  chemically synthesized
ctgtactgcaggggaattcggt

SEQ ID NO: 43223 - DNA, 22 bp, Artificial Sequence
  chemically synthesized
tactgcaggggaattcggtaaa

SEQ ID NO: 43224 - DNA, 22 bp, Artificial Sequence
  chemically synthesized
caggggaattcggtaaaacttt

SEQ ID NO: 43225 - DNA, 22 bp, Artificial Sequence
  chemically synthesized
ggtaaaactttctagttttgct

SEQ ID NO: 43226 - DNA, 22 bp, Artificial Sequence
  chemically synthesized
tctagttttgcttaacatgaaa

SEQ ID NO: 43227 - DNA, 22 bp, Artificial Sequence
  chemically synthesized
ctagttttgcttaacatgaaaa

SEQ ID NO: 43228 - DNA, 22 bp, Artificial Sequence
  chemically synthesized
tagttttgcttaacatgaaaat

SEQ ID NO: 43229 - DNA, 22 bp, Artificial Sequence
  chemically synthesized
gttttgcttaacatgaaaataa

SEQ ID NO: 43230 - DNA, 22 bp, Artificial Sequence
  chemically synthesized
tgcttaacatgaaaataataac

SEQ ID NO: 43231 - DNA, 22 bp, Artificial Sequence
  chemically synthesized
gcttaacatgaaaataataaca

SEQ ID NO: 43232 - DNA, 22 bp, Artificial Sequence
  chemically synthesized
cttaacatgaaaataataacaa

SEQ ID NO: 43233 - DNA, 22 bp, Artificial Sequence
  chemically synthesized
aacatgaaaataataacaaaaa

SEQ ID NO: 43234 - DNA, 22 bp, Artificial Sequence
  chemically synthesized
acatgaaaataataacaaaaaa

SEQ ID NO: 43235 - DNA, 22 bp, Artificial Sequence
  chemically synthesized
caaatcagtatcaatagccaaa

SEQ ID NO: 43236 - DNA, 22 bp, Artificial Sequence
  chemically synthesized
aaatcagtatcaatagccaaag

SEQ ID NO: 43237 - DNA, 22 bp, Artificial Sequence
  chemically synthesized
aagccactgctacccaaaacga

SEQ ID NO: 43238 - DNA, 22 bp, Artificial Sequence
  chemically synthesized
ctacccaaaacgattttgtttg

SEQ ID NO: 43239 - DNA, 22 bp, Artificial Sequence
  chemically synthesized
cccaaaacgattttgtttgttt

SEQ ID NO: 43240 - DNA, 22 bp, Artificial Sequence
  chemically synthesized
tgtttgtttgtttgtttgtttg

SEQ ID NO: 43241 - DNA, 22 bp, Artificial Sequence
  chemically synthesized
gtttgtttgtttgtttgtttgt

SEQ ID NO: 43242 - DNA, 22 bp, Artificial Sequence
  chemically synthesized
tttgtttgtttgtttgtttgtt

SEQ ID NO: 43243 - DNA, 22 bp, Artificial Sequence
  chemically synthesized
gtttgtttgtttgtttgtttgt

SEQ ID NO: 43244 - DNA, 22 bp, Artificial Sequence
  chemically synthesized
tttgtttgtttgtttgtttgtt

SEQ ID NO: 43245 - DNA, 22 bp, Artificial Sequence
  chemically synthesized
gtttgtttgtttgtttgttttt

SEQ ID NO: 43246 - DNA, 22 bp, Artificial Sequence
  chemically synthesized
tttgtttgtttgtttgtttttt

SEQ ID NO: 43247 - DNA, 22 bp, Artificial Sequence
  chemically synthesized
gtttgtttgtttgttttttgtt

SEQ ID NO: 43248 - DNA, 22 bp, Artificial Sequence
  chemically synthesized
tttgtttgtttgttttttgttt

SEQ ID NO: 43249 - DNA, 22 bp, Artificial Sequence
  chemically synthesized
gtttgtttgttttttgtttctg

SEQ ID NO: 43250 - DNA, 22 bp, Artificial Sequence
  chemically synthesized
tttgtttgttttttgtttctga

SEQ ID NO: 43251 - DNA, 22 bp, Artificial Sequence
  chemically synthesized
gtttgttttttgtttctgaggt

SEQ ID NO: 43252 - DNA, 22 bp, Artificial Sequence
  chemically synthesized
tttgttttttgtttctgaggtg

SEQ ID NO: 43253 - DNA, 22 bp, Artificial Sequence
  chemically synthesized
gttttttgtttctgaggtggag

SEQ ID NO: 43254 - DNA, 22 bp, Artificial Sequence
  chemically synthesized
ttttttgtttctgaggtggagt

SEQ ID NO: 43255 - DNA, 22 bp, Artificial Sequence
  chemically synthesized
tttgtttctgaggtggagtttc

SEQ ID NO: 43256 - DNA, 22 bp, Artificial Sequence
  chemically synthesized
ttgtttctgaggtggagtttcg

SEQ ID NO: 43257 - DNA, 22 bp, Artificial Sequence
  chemically synthesized
tgtttctgaggtggagtttcgc

SEQ ID NO: 43258 - DNA, 22 bp, Artificial Sequence
  chemically synthesized
gtttctgaggtggagtttcgct

SEQ ID NO: 43259 - DNA, 22 bp, Artificial Sequence
  chemically synthesized
tttctgaggtggagtttcgctc

SEQ ID NO: 43260 - DNA, 22 bp, Artificial Sequence
  chemically synthesized
ctgaggtggagtttcgctcttg

SEQ ID NO: 43261 - DNA, 22 bp, Artificial Sequence
  chemically synthesized
tgaggtggagtttcgctcttgt

SEQ ID NO: 43262 - DNA, 22 bp, Artificial Sequence
  chemically synthesized
aggtggagtttcgctcttgttg

SEQ ID NO: 43263 - DNA, 22 bp, Artificial Sequence
  chemically synthesized
cgctcttgttgcccgggctgga

SEQ ID NO: 43264 - DNA, 22 bp, Artificial Sequence
  chemically synthesized
gctcttgttgcccgggctggag

SEQ ID NO: 43265 - DNA, 22 bp, Artificial Sequence
  chemically synthesized
ttgttgcccgggctggagtgca

SEQ ID NO: 43266 - DNA, 22 bp, Artificial Sequence
  chemically synthesized
gttgcccgggctggagtgcaat

SEQ ID NO: 43267 - DNA, 22 bp, Artificial Sequence
  chemically synthesized
ttgcccgggctggagtgcaatg

SEQ ID NO: 43268 - DNA, 22 bp, Artificial Sequence
  chemically synthesized
cccgggctggagtgcaatggcg

SEQ ID NO: 43269 - DNA, 22 bp, Artificial Sequence
  chemically synthesized
gagtgcaatggcgcaatctcgg

SEQ ID NO: 43270 - DNA, 22 bp, Artificial Sequence
  chemically synthesized
ggctcaccgcaatctccgcctc

SEQ ID NO: 43271 - DNA, 22 bp, Artificial Sequence
  chemically synthesized
accgcaatctccgcctcccggg

SEQ ID NO: 43272 - DNA, 22 bp, Artificial Sequence
  chemically synthesized
cgcctcccgggttcaagcgatt

SEQ ID NO: 43273 - DNA, 22 bp, Artificial Sequence
  chemically synthesized
ccgggttcaagcgattctcctg

SEQ ID NO: 43274 - DNA, 22 bp, Artificial Sequence
  chemically synthesized
aagcgattctcctgcctcagcc

SEQ ID NO: 43275 - DNA, 22 bp, Artificial Sequence
  chemically synthesized
tcctgcctcagcctcccaagta

SEQ ID NO: 43276 - DNA, 22 bp, Artificial Sequence
  chemically synthesized
ctgcctcagcctcccaagtagc

SEQ ID NO: 43277 - DNA, 22 bp, Artificial Sequence
  chemically synthesized
cctcagcctcccaagtagctgg

SEQ ID NO: 43278 - DNA, 22 bp, Artificial Sequence
  chemically synthesized
agcctcccaagtagctgggatt

SEQ ID NO: 43279 - DNA, 22 bp, Artificial Sequence
  chemically synthesized
ccaagtagctgggattataggc

SEQ ID NO: 43280 - DNA, 22 bp, Artificial Sequence
  chemically synthesized
ggattataggcatgcgccacca

SEQ ID NO: 43281 - DNA, 22 bp, Artificial Sequence
  chemically synthesized
taggcatgcgccaccacacgcg

SEQ ID NO: 43282 - DNA, 22 bp, Artificial Sequence
  chemically synthesized
atttctgtatttttggtagaga

SEQ ID NO: 43283 - DNA, 22 bp, Artificial Sequence
  chemically synthesized
ctgtatttttggtagagacggg

SEQ ID NO: 43284 - DNA, 22 bp, Artificial Sequence
  chemically synthesized
tgtatttttggtagagacgggg

SEQ ID NO: 43285 - DNA, 22 bp, Artificial Sequence
  chemically synthesized
tatttttggtagagacggggtt

SEQ ID NO: 43286 - DNA, 22 bp, Artificial Sequence
  chemically synthesized
ttggtagagacggggtttctcc

SEQ ID NO: 43287 - DNA, 22 bp, Artificial Sequence
  chemically synthesized
tggtagagacggggtttctcca

SEQ ID NO: 43288 - DNA, 22 bp, Artificial Sequence
  chemically synthesized
ggtagagacggggtttctccat

SEQ ID NO: 43289 - DNA, 22 bp, Artificial Sequence
  chemically synthesized
gtagagacggggtttctccatg

SEQ ID NO: 43290 - DNA, 22 bp, Artificial Sequence
  chemically synthesized
ctccatgttggtcaggctggtc

SEQ ID NO: 43291 - DNA, 22 bp, Artificial Sequence
  chemically synthesized
tccatgttggtcaggctggtct

SEQ ID NO: 43292 - DNA, 22 bp, Artificial Sequence
  chemically synthesized
catgttggtcaggctggtctca

SEQ ID NO: 43293 - DNA, 22 bp, Artificial Sequence
  chemically synthesized
gtcaggctggtctcaaactccc

SEQ ID NO: 43294 - DNA, 22 bp, Artificial Sequence
  chemically synthesized
gtctcaaactcccgaccttagg

SEQ ID NO: 43295 - DNA, 22 bp, Artificial Sequence
  chemically synthesized
aaactcccgaccttaggtgatc

SEQ ID NO: 43296 - DNA, 22 bp, Artificial Sequence
  chemically synthesized
ccgaccttaggtgatccaccca

SEQ ID NO: 43297 - DNA, 22 bp, Artificial Sequence
  chemically synthesized
aggtgatccacccacctcagcc

SEQ ID NO: 43298 - DNA, 22 bp, Artificial Sequence
  chemically synthesized
ggtgatccacccacctcagcct

SEQ ID NO: 43299 - DNA, 22 bp, Artificial Sequence
  chemically synthesized
agcctcccaaagtgctgggatt

SEQ ID NO: 43300 - DNA, 22 bp, Artificial Sequence
  chemically synthesized
ccaaagtgctgggattataggc

SEQ ID NO: 43301 - DNA, 22 bp, Artificial Sequence
  chemically synthesized
ggattataggcataagctacca

SEQ ID NO: 43302 - DNA, 22 bp, Artificial Sequence
  chemically synthesized
taggcataagctaccacaccca

SEQ ID NO: 43303 - DNA, 22 bp, Artificial Sequence
  chemically synthesized
ccacacccagccatacccaaaa

SEQ ID NO: 43304 - DNA, 22 bp, Artificial Sequence
  chemically synthesized
atcttcaaagaaaaaaaatgct

SEQ ID NO: 43305 - DNA, 22 bp, Artificial Sequence
  chemically synthesized
tcttcaaagaaaaaaaatgctg

SEQ ID NO: 43306 - DNA, 22 bp, Artificial Sequence
  chemically synthesized
caaagaaaaaaaatgctgtgtg

SEQ ID NO: 43307 - DNA, 22 bp, Artificial Sequence
  chemically synthesized
aaagaaaaaaaatgctgtgtgt

SEQ ID NO: 43308 - DNA, 22 bp, Artificial Sequence
  chemically synthesized
tgtgtcctaaataataggtggt

SEQ ID NO: 43309 - DNA, 22 bp, Artificial Sequence
  chemically synthesized
aataataggtggtcaaaatgtt

SEQ ID NO: 43310 - DNA, 22 bp, Artificial Sequence
  chemically synthesized
ctaaagggtaccttagacccca

SEQ ID NO: 43311 - DNA, 22 bp, Artificial Sequence
  chemically synthesized
taaagggtaccttagaccccaa

SEQ ID NO: 43312 - DNA, 22 bp, Artificial Sequence
  chemically synthesized
aagggtaccttagaccccaatt

SEQ ID NO: 43313 - DNA, 22 bp, Artificial Sequence
  chemically synthesized
agaccccaattaaactgttgct

SEQ ID NO: 43314 - DNA, 22 bp, Artificial Sequence
  chemically synthesized
gaccccaattaaactgttgctt

SEQ ID NO: 43315 - DNA, 22 bp, Artificial Sequence
  chemically synthesized
aactgttgctttagagtttggg

SEQ ID NO: 43316 - DNA, 22 bp, Artificial Sequence
  chemically synthesized
ttgctttagagtttggggaaaa

SEQ ID NO: 43317 - DNA, 22 bp, Artificial Sequence
  chemically synthesized
ctttagagtttggggaaaataa

SEQ ID NO: 43318 - DNA, 22 bp, Artificial Sequence
  chemically synthesized
tagagtttggggaaaataaagt

SEQ ID NO: 43319 - DNA, 22 bp, Artificial Sequence
  chemically synthesized
agagtttggggaaaataaagtg

SEQ ID NO: 43320 - DNA, 22 bp, Artificial Sequence
  chemically synthesized
gagtttggggaaaataaagtgg

SEQ ID NO: 43321 - DNA, 22 bp, Artificial Sequence
  chemically synthesized
ggggaaaataaagtggaaacac

SEQ ID NO: 43322 - DNA, 22 bp, Artificial Sequence
  chemically synthesized
gggaaaataaagtggaaacacc

SEQ ID NO: 43323 - DNA, 22 bp, Artificial Sequence
  chemically synthesized
actaaattcacactgtgagagc

SEQ ID NO: 43324 - DNA, 22 bp, Artificial Sequence
  chemically synthesized
aattcacactgtgagagccagt

SEQ ID NO: 43325 - DNA, 22 bp, Artificial Sequence
  chemically synthesized
acactgtgagagccagtcaaca

SEQ ID NO: 43326 - DNA, 22 bp, Artificial Sequence
  chemically synthesized
tgagagccagtcaacactagcc

SEQ ID NO: 43327 - DNA, 22 bp, Artificial Sequence
  chemically synthesized
gcccacatgccaatggggtcct

SEQ ID NO: 43328 - DNA, 22 bp, Artificial Sequence
  chemically synthesized
gtcagtcacttacactatttct

SEQ ID NO: 43329 - DNA, 22 bp, Artificial Sequence
  chemically synthesized
tcagtcacttacactatttctc

SEQ ID NO: 43330 - DNA, 22 bp, Artificial Sequence
  chemically synthesized
acactatttctcattccatttc

SEQ ID NO: 43331 - DNA, 22 bp, Artificial Sequence
  chemically synthesized
cactatttctcattccatttct

SEQ ID NO: 43332 - DNA, 22 bp, Artificial Sequence
  chemically synthesized
tttctcattccatttcttttat

SEQ ID NO: 43333 - DNA, 22 bp, Artificial Sequence
  chemically synthesized
ctcattccatttcttttatgtc

SEQ ID NO: 43334 - DNA, 22 bp, Artificial Sequence
  chemically synthesized
tcattccatttcttttatgtca

SEQ ID NO: 43335 - DNA, 22 bp, Artificial Sequence
  chemically synthesized
attccatttcttttatgtcatt

SEQ ID NO: 43336 - DNA, 22 bp, Artificial Sequence
  chemically synthesized
catttcttttatgtcattttgc

SEQ ID NO: 43337 - DNA, 22 bp, Artificial Sequence
  chemically synthesized
cttttatgtcattttgcccaca

SEQ ID NO: 43338 - DNA, 22 bp, Artificial Sequence
  chemically synthesized
ttttatgtcattttgcccacaa

SEQ ID NO: 43339 - DNA, 22 bp, Artificial Sequence
  chemically synthesized
ttatgtcattttgcccacaaca

SEQ ID NO: 43340 - DNA, 22 bp, Artificial Sequence
  chemically synthesized
tatgtcattttgcccacaacat

SEQ ID NO: 43341 - DNA, 22 bp, Artificial Sequence
  chemically synthesized
atgtcattttgcccacaacata

SEQ ID NO: 43342 - DNA, 22 bp, Artificial Sequence
  chemically synthesized
tgtcattttgcccacaacatat

SEQ ID NO: 43343 - DNA, 22 bp, Artificial Sequence
  chemically synthesized
tgcccacaacatatccaaattc

SEQ ID NO: 43344 - DNA, 22 bp, Artificial Sequence
  chemically synthesized
gcccacaacatatccaaattca

SEQ ID NO: 43345 - DNA, 22 bp, Artificial Sequence
  chemically synthesized
cccacaacatatccaaattcat

SEQ ID NO: 43346 - DNA, 22 bp, Artificial Sequence
  chemically synthesized
atacaatagaggcatttggaac

SEQ ID NO: 43347 - DNA, 22 bp, Artificial Sequence
  chemically synthesized
ggaacccagtgctactctgctt

SEQ ID NO: 43348 - DNA, 22 bp, Artificial Sequence
  chemically synthesized
gaacccagtgctactctgcttc

SEQ ID NO: 43349 - DNA, 22 bp, Artificial Sequence
  chemically synthesized
ctctgcttcctaactaatttct

SEQ ID NO: 43350 - DNA, 22 bp, Artificial Sequence
  chemically synthesized
tgcttcctaactaatttctgcc

SEQ ID NO: 43351 - DNA, 22 bp, Artificial Sequence
  chemically synthesized
cttcctaactaatttctgccgc

SEQ ID NO: 43352 - DNA, 22 bp, Artificial Sequence
  chemically synthesized
cctaactaatttctgccgctgg

SEQ ID NO: 43353 - DNA, 22 bp, Artificial Sequence
  chemically synthesized
ctaactaatttctgccgctgga

SEQ ID NO: 43354 - DNA, 22 bp, Artificial Sequence
  chemically synthesized
actaatttctgccgctggaagt

SEQ ID NO: 43355 - DNA, 22 bp, Artificial Sequence
  chemically synthesized
atttctgccgctggaagtttgt

SEQ ID NO: 43356 - DNA, 22 bp, Artificial Sequence
  chemically synthesized
ctgccgctggaagtttgttcct

SEQ ID NO: 43357 - DNA, 22 bp, Artificial Sequence
  chemically synthesized
tgccgctggaagtttgttccta

SEQ ID NO: 43358 - DNA, 22 bp, Artificial Sequence
  chemically synthesized
ccgctggaagtttgttcctaaa

SEQ ID NO: 43359 - DNA, 22 bp, Artificial Sequence
  chemically synthesized
gaagtttgttcctaaagccacc

SEQ ID NO: 43360 - DNA, 22 bp, Artificial Sequence
  chemically synthesized
gttcctaaagccaccaagtctc

SEQ ID NO: 43361 - DNA, 22 bp, Artificial Sequence
  chemically synthesized
ttcctaaagccaccaagtctcc

SEQ ID NO: 43362 - DNA, 22 bp, Artificial Sequence
  chemically synthesized
ctaaagccaccaagtctcctag

SEQ ID NO: 43363 - DNA, 22 bp, Artificial Sequence
  chemically synthesized
aagccaccaagtctcctagaag

SEQ ID NO: 43364 - DNA, 22 bp, Artificial Sequence
  chemically synthesized
ctagaagcccttatttcttggc

SEQ ID NO: 43365 - DNA, 22 bp, Artificial Sequence
  chemically synthesized
gaagcccttatttcttggcagt

SEQ ID NO: 43366 - DNA, 22 bp, Artificial Sequence
  chemically synthesized
atttcttggcagtaaacacacg

SEQ ID NO: 43367 - DNA, 22 bp, Artificial Sequence
  chemically synthesized
tttcttggcagtaaacacacgg

SEQ ID NO: 43368 - DNA, 22 bp, Artificial Sequence
  chemically synthesized
cttggcagtaaacacacggcgg

SEQ ID NO: 43369 - DNA, 22 bp, Artificial Sequence
  chemically synthesized
ttggcagtaaacacacggcggc

SEQ ID NO: 43370 - DNA, 22 bp, Artificial Sequence
  chemically synthesized
ggcagtaaacacacggcggccc

SEQ ID NO: 43371 - DNA, 22 bp, Artificial Sequence
  chemically synthesized
gcagtaaacacacggcggccct

SEQ ID NO: 43372 - DNA, 22 bp, Artificial Sequence
  chemically synthesized
cgtgccattaaaatagctgcct

SEQ ID NO: 43373 - DNA, 22 bp, Artificial Sequence
  chemically synthesized
aaatagctgcctcatcatccag

SEQ ID NO: 43374 - DNA, 22 bp, Artificial Sequence
  chemically synthesized
cctcatcatccaggatgacaaa

SEQ ID NO: 43375 - DNA, 22 bp, Artificial Sequence
  chemically synthesized
atcatccaggatgacaaacagc

SEQ ID NO: 43376 - DNA, 22 bp, Artificial Sequence
  chemically synthesized
tgtgccaagtgaccagccacaa

SEQ ID NO: 43377 - DNA, 22 bp, Artificial Sequence
  chemically synthesized
gtttgaccagcacctatctcaa

SEQ ID NO: 43378 - DNA, 22 bp, Artificial Sequence
  chemically synthesized
tttgaccagcacctatctcaaa

SEQ ID NO: 43379 - DNA, 22 bp, Artificial Sequence
  chemically synthesized
gaccagcacctatctcaaaaga

SEQ ID NO: 43380 - DNA, 22 bp, Artificial Sequence
  chemically synthesized
accagcacctatctcaaaagaa

SEQ ID NO: 43381 - DNA, 22 bp, Artificial Sequence
  chemically synthesized
tctcaaaagaaaattctgagta

SEQ ID NO: 43382 - DNA, 22 bp, Artificial Sequence
  chemically synthesized
aaaagaaaattctgagtagaag

SEQ ID NO: 43383 - DNA, 22 bp, Artificial Sequence
  chemically synthesized
tgagtagaagaggaagcacctg

SEQ ID NO: 43384 - DNA, 22 bp, Artificial Sequence
  chemically synthesized
agtagaagaggaagcacctgaa

SEQ ID NO: 43385 - DNA, 22 bp, Artificial Sequence
  chemically synthesized
aaggaagctgaaaagaaagtct

SEQ ID NO: 43386 - DNA, 22 bp, Artificial Sequence
  chemically synthesized
aaaagaaagtctgacatttgaa

SEQ ID NO: 43387 - DNA, 22 bp, Artificial Sequence
  chemically synthesized
acatttgaaattctaacagagg

SEQ ID NO: 43388 - DNA, 22 bp, Artificial Sequence
  chemically synthesized
gaaattctaacagaggttcttt

SEQ ID NO: 43389 - DNA, 22 bp, Artificial Sequence
  chemically synthesized
aaattctaacagaggttctttc

SEQ ID NO: 43390 - DNA, 22 bp, Artificial Sequence
  chemically synthesized
taacagaggttctttcccctct

SEQ ID NO: 43391 - DNA, 22 bp, Artificial Sequence
  chemically synthesized
acagaggttctttcccctctag

SEQ ID NO: 43392 - DNA, 22 bp, Artificial Sequence
  chemically synthesized
tttcccctctaggacactctgg

SEQ ID NO: 43393 - DNA, 22 bp, Artificial Sequence
  chemically synthesized
tcccctctaggacactctgggt

SEQ ID NO: 43394 - DNA, 22 bp, Artificial Sequence
  chemically synthesized
cccctctaggacactctgggtc

SEQ ID NO: 43395 - DNA, 22 bp, Artificial Sequence
  chemically synthesized
ccctctaggacactctgggtca

SEQ ID NO: 43396 - DNA, 22 bp, Artificial Sequence
  chemically synthesized
taggacactctgggtcactagc

SEQ ID NO: 43397 - DNA, 22 bp, Artificial Sequence
  chemically synthesized
ggacactctgggtcactagcat

SEQ ID NO: 43398 - DNA, 22 bp, Artificial Sequence
  chemically synthesized
tgggtcactagcatctctgctt

SEQ ID NO: 43399 - DNA, 22 bp, Artificial Sequence
  chemically synthesized
ggtcactagcatctctgctttc

SEQ ID NO: 43400 - DNA, 22 bp, Artificial Sequence
  chemically synthesized
gcatctctgctttccttgttcc

SEQ ID NO: 43401 - DNA, 22 bp, Artificial Sequence
  chemically synthesized
tgctttccttgttccctggctc

SEQ ID NO: 43402 - DNA, 22 bp, Artificial Sequence
  chemically synthesized
ctttccttgttccctggctcat

SEQ ID NO: 43403 - DNA, 22 bp, Artificial Sequence
  chemically synthesized
tccttgttccctggctcatctc

SEQ ID NO: 43404 - DNA, 22 bp, Artificial Sequence
  chemically synthesized
ccttgttccctggctcatctcc

SEQ ID NO: 43405 - DNA, 22 bp, Artificial Sequence
  chemically synthesized
cttgttccctggctcatctcct

SEQ ID NO: 43406 - DNA, 22 bp, Artificial Sequence
  chemically synthesized
gttccctggctcatctcctgag

SEQ ID NO: 43407 - DNA, 22 bp, Artificial Sequence
  chemically synthesized
ttccctggctcatctcctgagc

SEQ ID NO: 43408 - DNA, 22 bp, Artificial Sequence
  chemically synthesized
cctggctcatctcctgagcccc

SEQ ID NO: 43409 - DNA, 22 bp, Artificial Sequence
  chemically synthesized
gctcatctcctgagcccccggg

SEQ ID NO: 43410 - DNA, 22 bp, Artificial Sequence
  chemically synthesized
atctcctgagcccccgggccgt

SEQ ID NO: 43411 - DNA, 22 bp, Artificial Sequence
  chemically synthesized
ctgagcccccgggccgttctcc

SEQ ID NO: 43412 - DNA, 22 bp, Artificial Sequence
  chemically synthesized
agcccccgggccgttctccttt

SEQ ID NO: 43413 - DNA, 22 bp, Artificial Sequence
  chemically synthesized
tcctttccaactgtctatttac

SEQ ID NO: 43414 - DNA, 22 bp, Artificial Sequence
  chemically synthesized
ctttccaactgtctatttacta

SEQ ID NO: 43415 - DNA, 22 bp, Artificial Sequence
  chemically synthesized
tccaactgtctatttactaacc

SEQ ID NO: 43416 - DNA, 22 bp, Artificial Sequence
  chemically synthesized
ccaactgtctatttactaacca

SEQ ID NO: 43417 - DNA, 22 bp, Artificial Sequence
  chemically synthesized
caactgtctatttactaaccac

SEQ ID NO: 43418 - DNA, 22 bp, Artificial Sequence
  chemically synthesized
tctatttactaaccacttttat

SEQ ID NO: 43419 - DNA, 22 bp, Artificial Sequence
  chemically synthesized
tttactaaccacttttatcagc

SEQ ID NO: 43420 - DNA, 22 bp, Artificial Sequence
  chemically synthesized
actaaccacttttatcagcccc

SEQ ID NO: 43421 - DNA, 22 bp, Artificial Sequence
  chemically synthesized
ctaaccacttttatcagccccc

SEQ ID NO: 43422 - DNA, 22 bp, Artificial Sequence
  chemically synthesized
accacttttatcagcccccctc

SEQ ID NO: 43423 - DNA, 22 bp, Artificial Sequence
  chemically synthesized
ttatcagcccccctctcacccc

SEQ ID NO: 43424 - DNA, 22 bp, Artificial Sequence
  chemically synthesized
tatcagcccccctctcacccca

SEQ ID NO: 43425 - DNA, 22 bp, Artificial Sequence
  chemically synthesized
atcagcccccctctcaccccat

SEQ ID NO: 43426 - DNA, 22 bp, Artificial Sequence
  chemically synthesized
tcagcccccctctcaccccatc

SEQ ID NO: 43427 - DNA, 22 bp, Artificial Sequence
  chemically synthesized
tcaccccatccaaaaatgttta

SEQ ID NO: 43428 - DNA, 22 bp, Artificial Sequence
  chemically synthesized
accccatccaaaaatgtttact

SEQ ID NO: 43429 - DNA, 22 bp, Artificial Sequence
  chemically synthesized
actcaagttcaggctagcttaa

SEQ ID NO: 43430 - DNA, 22 bp, Artificial Sequence
  chemically synthesized
ctcaagttcaggctagcttaat

SEQ ID NO: 43431 - DNA, 22 bp, Artificial Sequence
  chemically synthesized
aagttcaggctagcttaataac

SEQ ID NO: 43432 - DNA, 22 bp, Artificial Sequence
  chemically synthesized
aggctagcttaataacccccaa

SEQ ID NO: 43433 - DNA, 22 bp, Artificial Sequence
  chemically synthesized
gcttaataacccccaaagcagg

SEQ ID NO: 43434 - DNA, 22 bp, Artificial Sequence
  chemically synthesized
aataacccccaaagcaggagga

SEQ ID NO: 43435 - DNA, 22 bp, Artificial Sequence
  chemically synthesized
ataacccccaaagcaggaggac

SEQ ID NO: 43436 - DNA, 22 bp, Artificial Sequence
  chemically synthesized
ttaaagagagatcacagggata

SEQ ID NO: 43437 - DNA, 22 bp, Artificial Sequence
  chemically synthesized
aagagagatcacagggatatga

SEQ ID NO: 43438 - DNA, 22 bp, Artificial Sequence
  chemically synthesized
tgatgcctgccttattttgtca

SEQ ID NO: 43439 - DNA, 22 bp, Artificial Sequence
  chemically synthesized
gatgcctgccttattttgtcac

SEQ ID NO: 43440 - DNA, 22 bp, Artificial Sequence
  chemically synthesized
atgcctgccttattttgtcaca

SEQ ID NO: 43441 - DNA, 22 bp, Artificial Sequence
  chemically synthesized
ccttattttgtcacatatcatc

SEQ ID NO: 43442 - DNA, 22 bp, Artificial Sequence
  chemically synthesized
attttgtcacatatcatcaaaa

SEQ ID NO: 43443 - DNA, 22 bp, Artificial Sequence
  chemically synthesized
ttttgtcacatatcatcaaaat

SEQ ID NO: 43444 - DNA, 22 bp, Artificial Sequence
  chemically synthesized
tgtcacatatcatcaaaatgat

SEQ ID NO: 43445 - DNA, 22 bp, Artificial Sequence
  chemically synthesized
gtcacatatcatcaaaatgata

SEQ ID NO: 43446 - DNA, 22 bp, Artificial Sequence
  chemically synthesized
tcacatatcatcaaaatgataa

SEQ ID NO: 43447 - DNA, 22 bp, Artificial Sequence
  chemically synthesized
tcatgaaacaccatccatgccc

SEQ ID NO: 43448 - DNA, 22 bp, Artificial Sequence
  chemically synthesized
agtatcccaacatggatggact

SEQ ID NO: 43449 - DNA, 22 bp, Artificial Sequence
  chemically synthesized
gaggagagggacaagggaccaa

SEQ ID NO: 43450 - DNA, 22 bp, Artificial Sequence
  chemically synthesized
atgggcccttgattctgaacgt

SEQ ID NO: 43451 - DNA, 22 bp, Artificial Sequence
  chemically synthesized
gattctgaacgtcattcctgcc

SEQ ID NO: 43452 - DNA, 22 bp, Artificial Sequence
  chemically synthesized
attctgaacgtcattcctgccc

SEQ ID NO: 43453 - DNA, 22 bp, Artificial Sequence
  chemically synthesized
tgaacgtcattcctgcccactc

SEQ ID NO: 43454 - DNA, 22 bp, Artificial Sequence
  chemically synthesized
aacgtcattcctgcccactccc

SEQ ID NO: 43455 - DNA, 22 bp, Artificial Sequence
  chemically synthesized
ctgcccactccccatctgcaat

SEQ ID NO: 43456 - DNA, 22 bp, Artificial Sequence
  chemically synthesized
cccactccccatctgcaatggg

SEQ ID NO: 43457 - DNA, 22 bp, Artificial Sequence
  chemically synthesized
cccatctgcaatgggggcaaag

SEQ ID NO: 43458 - DNA, 22 bp, Artificial Sequence
  chemically synthesized
caatgggggcaaaggcaaaagg

SEQ ID NO: 43459 - DNA, 22 bp, Artificial Sequence
  chemically synthesized
tccaagatttaaacagtcctct

SEQ ID NO: 43460 - DNA, 22 bp, Artificial Sequence
  chemically synthesized
ccaagatttaaacagtcctcta

SEQ ID NO: 43461 - DNA, 22 bp, Artificial Sequence
  chemically synthesized
caagatttaaacagtcctctat

SEQ ID NO: 43462 - DNA, 22 bp, Artificial Sequence
  chemically synthesized
aaacagtcctctatattagtaa

SEQ ID NO: 43463 - DNA, 22 bp, Artificial Sequence
  chemically synthesized
aacagtcctctatattagtaac

SEQ ID NO: 43464 - DNA, 22 bp, Artificial Sequence
  chemically synthesized
tatattagtaacagacccatgt

SEQ ID NO: 43465 - DNA, 22 bp, Artificial Sequence
  chemically synthesized
tattagtaacagacccatgtgc

SEQ ID NO: 43466 - DNA, 22 bp, Artificial Sequence
  chemically synthesized
gtaacagacccatgtgctaggc

SEQ ID NO: 43467 - DNA, 22 bp, Artificial Sequence
  chemically synthesized
ggctcctacaatatctggttcc

SEQ ID NO: 43468 - DNA, 22 bp, Artificial Sequence
  chemically synthesized
ctacaatatctggttccattct

SEQ ID NO: 43469 - DNA, 22 bp, Artificial Sequence
  chemically synthesized
caatatctggttccattctgct

SEQ ID NO: 43470 - DNA, 22 bp, Artificial Sequence
  chemically synthesized
gttccattctgctagtgaaagg

SEQ ID NO: 43471 - DNA, 22 bp, Artificial Sequence
  chemically synthesized
cattctgctagtgaaaggaaac

SEQ ID NO: 43472 - DNA, 22 bp, Artificial Sequence
  chemically synthesized
tgctagtgaaaggaaaccctac

SEQ ID NO: 43473 - DNA, 22 bp, Artificial Sequence
  chemically synthesized
ctagtgaaaggaaaccctacgg

SEQ ID NO: 43474 - DNA, 22 bp, Artificial Sequence
  chemically synthesized
gtgaaaggaaaccctacggtca

SEQ ID NO: 43475 - DNA, 22 bp, Artificial Sequence
  chemically synthesized
cggtcaaccaactccatcctct

SEQ ID NO: 43476 - DNA, 22 bp, Artificial Sequence
  chemically synthesized
catcctctagaacatataagtc

SEQ ID NO: 43477 - DNA, 22 bp, Artificial Sequence
  chemically synthesized
tagaacatataagtcaacaggg

SEQ ID NO: 43478 - DNA, 22 bp, Artificial Sequence
  chemically synthesized
gaacatataagtcaacagggga

SEQ ID NO: 43479 - DNA, 22 bp, Artificial Sequence
  chemically synthesized
ggcatgaagggtataacagaga

SEQ ID NO: 43480 - DNA, 22 bp, Artificial Sequence
  chemically synthesized
caacaactcatccacccccttt

SEQ ID NO: 43481 - DNA, 22 bp, Artificial Sequence
  chemically synthesized
aacaactcatccaccccctttg

SEQ ID NO: 43482 - DNA, 22 bp, Artificial Sequence
  chemically synthesized
atccaccccctttgcagagtcc

SEQ ID NO: 43483 - DNA, 22 bp, Artificial Sequence
  chemically synthesized
tgcagagtcctcacttaacatc

SEQ ID NO: 43484 - DNA, 22 bp, Artificial Sequence
  chemically synthesized
gcagagtcctcacttaacatcc

SEQ ID NO: 43485 - DNA, 22 bp, Artificial Sequence
  chemically synthesized
cagagtcctcacttaacatccc

SEQ ID NO: 43486 - DNA, 22 bp, Artificial Sequence
  chemically synthesized
acttaacatcccctagcatgct

SEQ ID NO: 43487 - DNA, 22 bp, Artificial Sequence
  chemically synthesized
aacatcccctagcatgctgcct

SEQ ID NO: 43488 - DNA, 22 bp, Artificial Sequence
  chemically synthesized
acatcccctagcatgctgcctt

SEQ ID NO: 43489 - DNA, 22 bp, Artificial Sequence
  chemically synthesized
gcatgctgcctttgtcttctga

SEQ ID NO: 43490 - DNA, 22 bp, Artificial Sequence
  chemically synthesized
cctttgtcttctgatcagagta

SEQ ID NO: 43491 - DNA, 22 bp, Artificial Sequence
  chemically synthesized
tgtcttctgatcagagtatttc

SEQ ID NO: 43492 - DNA, 22 bp, Artificial Sequence
  chemically synthesized
gtcttctgatcagagtatttca

SEQ ID NO: 43493 - DNA, 22 bp, Artificial Sequence
  chemically synthesized
tcttctgatcagagtatttcag

SEQ ID NO: 43494 - DNA, 22 bp, Artificial Sequence
  chemically synthesized
ctgatcagagtatttcagcagc

SEQ ID NO: 43495 - DNA, 22 bp, Artificial Sequence
  chemically synthesized
tgatcagagtatttcagcagcc

SEQ ID NO: 43496 - DNA, 22 bp, Artificial Sequence
  chemically synthesized
atcagagtatttcagcagccct

SEQ ID NO: 43497 - DNA, 22 bp, Artificial Sequence
  chemically synthesized
cagcagccctctgtgatctata

SEQ ID NO: 43498 - DNA, 22 bp, Artificial Sequence
  chemically synthesized
agcagccctctgtgatctatag

SEQ ID NO: 43499 - DNA, 22 bp, Artificial Sequence
  chemically synthesized
tgtgatctataggatatggtcc

SEQ ID NO: 43500 - DNA, 22 bp, Artificial Sequence
  chemically synthesized
tgatctataggatatggtccaa

SEQ ID NO: 43501 - DNA, 22 bp, Artificial Sequence
  chemically synthesized
taggatatggtccaactcctta

SEQ ID NO: 43502 - DNA, 22 bp, Artificial Sequence
  chemically synthesized
cttaagccatcattccagagct

SEQ ID NO: 43503 - DNA, 22 bp, Artificial Sequence
  chemically synthesized
aagccatcattccagagctcca

SEQ ID NO: 43504 - DNA, 22 bp, Artificial Sequence
  chemically synthesized
agccatcattccagagctccac

SEQ ID NO: 43505 - DNA, 22 bp, Artificial Sequence
  chemically synthesized
cagagctccacaatccaactcc

SEQ ID NO: 43506 - DNA, 22 bp, Artificial Sequence
  chemically synthesized
cacaatccaactccaattttct

SEQ ID NO: 43507 - DNA, 22 bp, Artificial Sequence
  chemically synthesized
caattttctattccagtcttag

SEQ ID NO: 43508 - DNA, 22 bp, Artificial Sequence
  chemically synthesized
tctattccagtcttagttcccc

SEQ ID NO: 43509 - DNA, 22 bp, Artificial Sequence
  chemically synthesized
ctattccagtcttagttccccg

SEQ ID NO: 43510 - DNA, 22 bp, Artificial Sequence
  chemically synthesized
tattccagtcttagttccccgt

SEQ ID NO: 43511 - DNA, 22 bp, Artificial Sequence
  chemically synthesized
ttccagtcttagttccccgtac

SEQ ID NO: 43512 - DNA, 22 bp, Artificial Sequence
  chemically synthesized
cagtcttagttccccgtaccca

SEQ ID NO: 43513 - DNA, 22 bp, Artificial Sequence
  chemically synthesized
agttccccgtacccatcaagga

SEQ ID NO: 43514 - DNA, 22 bp, Artificial Sequence
  chemically synthesized
gttccccgtacccatcaaggaa

SEQ ID NO: 43515 - DNA, 22 bp, Artificial Sequence
  chemically synthesized
cccgtacccatcaaggaaaata

SEQ ID NO: 43516 - DNA, 22 bp, Artificial Sequence
  chemically synthesized
tgcccaagtaaaaatcccttcc

SEQ ID NO: 43517 - DNA, 22 bp, Artificial Sequence
  chemically synthesized
cccaagtaaaaatcccttccgt

SEQ ID NO: 43518 - DNA, 22 bp, Artificial Sequence
  chemically synthesized
ccgttctcatttccttcctggc

SEQ ID NO: 43519 - DNA, 22 bp, Artificial Sequence
  chemically synthesized
cgttctcatttccttcctggct

SEQ ID NO: 43520 - DNA, 22 bp, Artificial Sequence
  chemically synthesized
tcatttccttcctggcttttct

SEQ ID NO: 43521 - DNA, 22 bp, Artificial Sequence
  chemically synthesized
atttccttcctggcttttcttc

SEQ ID NO: 43522 - DNA, 22 bp, Artificial Sequence
  chemically synthesized
ccttcctggcttttcttcttct

SEQ ID NO: 43523 - DNA, 22 bp, Artificial Sequence
  chemically synthesized
cttcctggcttttcttcttctt

SEQ ID NO: 43524 - DNA, 22 bp, Artificial Sequence
  chemically synthesized
cctggcttttcttcttcttctc

SEQ ID NO: 43525 - DNA, 22 bp, Artificial Sequence
  chemically synthesized
ctggcttttcttcttcttctct

SEQ ID NO: 43526 - DNA, 22 bp, Artificial Sequence
  chemically synthesized
gcttttcttcttcttctcttac

SEQ ID NO: 43527 - DNA, 22 bp, Artificial Sequence
  chemically synthesized
ttcttcttcttctcttacctcc

SEQ ID NO: 43528 - DNA, 22 bp, Artificial Sequence
  chemically synthesized
tcttcttcttctcttacctcct

SEQ ID NO: 43529 - DNA, 22 bp, Artificial Sequence
  chemically synthesized
cttcttcttctcttacctcctg

SEQ ID NO: 43530 - DNA, 22 bp, Artificial Sequence
  chemically synthesized
ttcttcttctcttacctcctgg

SEQ ID NO: 43531 - DNA, 22 bp, Artificial Sequence
  chemically synthesized
cttcttctcttacctcctggaa

SEQ ID NO: 43532 - DNA, 22 bp, Artificial Sequence
  chemically synthesized
ttcttctcttacctcctggaat

SEQ ID NO: 43533 - DNA, 22 bp, Artificial Sequence
  chemically synthesized
cttctcttacctcctggaatcc

SEQ ID NO: 43534 - DNA, 22 bp, Artificial Sequence
  chemically synthesized
ttctcttacctcctggaatcct

SEQ ID NO: 43535 - DNA, 22 bp, Artificial Sequence
  chemically synthesized
ctcttacctcctggaatcctgc

SEQ ID NO: 43536 - DNA, 22 bp, Artificial Sequence
  chemically synthesized
tcttacctcctggaatcctgct

SEQ ID NO: 43537 - DNA, 22 bp, Artificial Sequence
  chemically synthesized
ttacctcctggaatcctgctca

SEQ ID NO: 43538 - DNA, 22 bp, Artificial Sequence
  chemically synthesized
acctcctggaatcctgctcata

SEQ ID NO: 43539 - DNA, 22 bp, Artificial Sequence
  chemically synthesized
cctcctggaatcctgctcatac

SEQ ID NO: 43540 - DNA, 22 bp, Artificial Sequence
  chemically synthesized
ctggaatcctgctcatacttca

SEQ ID NO: 43541 - DNA, 22 bp, Artificial Sequence
  chemically synthesized
gaatcctgctcatacttcaagg

SEQ ID NO: 43542 - DNA, 22 bp, Artificial Sequence
  chemically synthesized
ctcatacttcaaggcctcaatg

SEQ ID NO: 43543 - DNA, 22 bp, Artificial Sequence
  chemically synthesized
atacttcaaggcctcaatgaag

SEQ ID NO: 43544 - DNA, 22 bp, Artificial Sequence
  chemically synthesized
caaggcctcaatgaaggtctac

SEQ ID NO: 43545 - DNA, 22 bp, Artificial Sequence
  chemically synthesized
aaggcctcaatgaaggtctacc

SEQ ID NO: 43546 - DNA, 22 bp, Artificial Sequence
  chemically synthesized
aatgaaggtctacctagtcacc

SEQ ID NO: 43547 - DNA, 22 bp, Artificial Sequence
  chemically synthesized
cctagtcaccttagcaagaaga

SEQ ID NO: 43548 - DNA, 22 bp, Artificial Sequence
  chemically synthesized
gtcaccttagcaagaagaatca

SEQ ID NO: 43549 - DNA, 22 bp, Artificial Sequence
  chemically synthesized
agcaagaagaatcaatctcatc

SEQ ID NO: 43550 - DNA, 22 bp, Artificial Sequence
  chemically synthesized
gcaagaagaatcaatctcatcc

SEQ ID NO: 43551 - DNA, 22 bp, Artificial Sequence
  chemically synthesized
atccttctccaacctcatagaa

SEQ ID NO: 43552 - DNA, 22 bp, Artificial Sequence
  chemically synthesized
ctccaacctcatagaacactca

SEQ ID NO: 43553 - DNA, 22 bp, Artificial Sequence
  chemically synthesized
tccaacctcatagaacactcat

SEQ ID NO: 43554 - DNA, 22 bp, Artificial Sequence
  chemically synthesized
caacctcatagaacactcatcc

SEQ ID NO: 43555 - DNA, 22 bp, Artificial Sequence
  chemically synthesized
atagaacactcatcccatgcac

SEQ ID NO: 43556 - DNA, 22 bp, Artificial Sequence
  chemically synthesized
atcccatgcaccactccctgac

SEQ ID NO: 43557 - DNA, 22 bp, Artificial Sequence
  chemically synthesized
cctgactcatatctaggcctta

SEQ ID NO: 43558 - DNA, 22 bp, Artificial Sequence
  chemically synthesized
actcatatctaggccttacatt

SEQ ID NO: 43559 - DNA, 22 bp, Artificial Sequence
  chemically synthesized
atatctaggccttacattgctg

SEQ ID NO: 43560 - DNA, 22 bp, Artificial Sequence
  chemically synthesized
ggccttacattgctggttaacc

SEQ ID NO: 43561 - DNA, 22 bp, Artificial Sequence
  chemically synthesized
acattgctggttaaccctctat

SEQ ID NO: 43562 - DNA, 22 bp, Artificial Sequence
  chemically synthesized
cattgctggttaaccctctatg

SEQ ID NO: 43563 - DNA, 22 bp, Artificial Sequence
  chemically synthesized
ctggttaaccctctatgcctct

SEQ ID NO: 43564 - DNA, 22 bp, Artificial Sequence
  chemically synthesized
gttaaccctctatgcctctaat

SEQ ID NO: 43565 - DNA, 22 bp, Artificial Sequence
  chemically synthesized
accctctatgcctctaattaat

SEQ ID NO: 43566 - DNA, 22 bp, Artificial Sequence
  chemically synthesized
tatgcctctaattaatttcatg

SEQ ID NO: 43567 - DNA, 22 bp, Artificial Sequence
  chemically synthesized
tgcctctaattaatttcatgtg

SEQ ID NO: 43568 - DNA, 22 bp, Artificial Sequence
  chemically synthesized
taattaatttcatgtgttccca

SEQ ID NO: 43569 - DNA, 22 bp, Artificial Sequence
  chemically synthesized
attaatttcatgtgttcccaat

SEQ ID NO: 43570 - DNA, 22 bp, Artificial Sequence
  chemically synthesized
atttcatgtgttcccaatgagt

SEQ ID NO: 43571 - DNA, 22 bp, Artificial Sequence
  chemically synthesized
catgtgttcccaatgagtttct

SEQ ID NO: 43572 - DNA, 22 bp, Artificial Sequence
  chemically synthesized
atgtgttcccaatgagtttctt

SEQ ID NO: 43573 - DNA, 22 bp, Artificial Sequence
  chemically synthesized
ccaatgagtttcttcaatacag

SEQ ID NO: 43574 - DNA, 22 bp, Artificial Sequence
  chemically synthesized
cttcaatacagggactctttct

SEQ ID NO: 43575 - DNA, 22 bp, Artificial Sequence
  chemically synthesized
ttcaatacagggactctttctc

SEQ ID NO: 43576 - DNA, 22 bp, Artificial Sequence
  chemically synthesized
caatacagggactctttctcct

SEQ ID NO: 43577 - DNA, 22 bp, Artificial Sequence
  chemically synthesized
aatacagggactctttctccta

SEQ ID NO: 43578 - DNA, 22 bp, Artificial Sequence
  chemically synthesized
tttctcctacttgcttctatta

SEQ ID NO: 43579 - DNA, 22 bp, Artificial Sequence
  chemically synthesized
tctcctacttgcttctattata

SEQ ID NO: 43580 - DNA, 22 bp, Artificial Sequence
  chemically synthesized
ctcctacttgcttctattatat

SEQ ID NO: 43581 - DNA, 22 bp, Artificial Sequence
  chemically synthesized
tcctacttgcttctattatatt

SEQ ID NO: 43582 - DNA, 22 bp, Artificial Sequence
  chemically synthesized
ctacttgcttctattatatttg

SEQ ID NO: 43583 - DNA, 22 bp, Artificial Sequence
  chemically synthesized
cttgcttctattatatttgaaa

SEQ ID NO: 43584 - DNA, 22 bp, Artificial Sequence
  chemically synthesized
gcttctattatatttgaaagta

SEQ ID NO: 43585 - DNA, 22 bp, Artificial Sequence
  chemically synthesized
cttctattatatttgaaagtac

SEQ ID NO: 43586 - DNA, 22 bp, Artificial Sequence
  chemically synthesized
ctattatatttgaaagtaccag

SEQ ID NO: 43587 - DNA, 22 bp, Artificial Sequence
  chemically synthesized
tattatatttgaaagtaccagc

SEQ ID NO: 43588 - DNA, 22 bp, Artificial Sequence
  chemically synthesized
ttatatttgaaagtaccagcac

SEQ ID NO: 43589 - DNA, 22 bp, Artificial Sequence
  chemically synthesized
tatttgaaagtaccagcacagc

SEQ ID NO: 43590 - DNA, 22 bp, Artificial Sequence
  chemically synthesized
gaaagtaccagcacagcatgtg

SEQ ID NO: 43591 - DNA, 22 bp, Artificial Sequence
  chemically synthesized
aaagtaccagcacagcatgtga

SEQ ID NO: 43592 - DNA, 22 bp, Artificial Sequence
  chemically synthesized
atatattctaggaattcaacaa

SEQ ID NO: 43593 - DNA, 22 bp, Artificial Sequence
  chemically synthesized
taggaattcaacaaatagcata

SEQ ID NO: 43594 - DNA, 22 bp, Artificial Sequence
  chemically synthesized
ggaattcaacaaatagcatata

SEQ ID NO: 43595 - DNA, 22 bp, Artificial Sequence
  chemically synthesized
aacaaatagcatataaatgact

SEQ ID NO: 43596 - DNA, 22 bp, Artificial Sequence
  chemically synthesized
atttaccttcctaaaagggaag

SEQ ID NO: 43597 - DNA, 22 bp, Artificial Sequence
  chemically synthesized
accttcctaaaagggaagttat

SEQ ID NO: 43598 - DNA, 22 bp, Artificial Sequence
  chemically synthesized
ccttcctaaaagggaagttatt

SEQ ID NO: 43599 - DNA, 22 bp, Artificial Sequence
  chemically synthesized
cctaaaagggaagttatttttc

SEQ ID NO: 43600 - DNA, 22 bp, Artificial Sequence
  chemically synthesized
ctaaaagggaagttatttttcc

SEQ ID NO: 43601 - DNA, 22 bp, Artificial Sequence
  chemically synthesized
aaagggaagttatttttccaaa

SEQ ID NO: 43602 - DNA, 22 bp, Artificial Sequence
  chemically synthesized
tttttccaaatatcatttctgt

SEQ ID NO: 43603 - DNA, 22 bp, Artificial Sequence
  chemically synthesized
ttccaaatatcatttctgttca

SEQ ID NO: 43604 - DNA, 22 bp, Artificial Sequence
  chemically synthesized
tccaaatatcatttctgttcaa

SEQ ID NO: 43605 - DNA, 22 bp, Artificial Sequence
  chemically synthesized
ccaaatatcatttctgttcaaa

SEQ ID NO: 43606 - DNA, 22 bp, Artificial Sequence
  chemically synthesized
caaatatcatttctgttcaaaa

SEQ ID NO: 43607 - DNA, 22 bp, Artificial Sequence
  chemically synthesized
ctgttcaaaatggtaattttaa

SEQ ID NO: 43608 - DNA, 22 bp, Artificial Sequence
  chemically synthesized
tgttcaaaatggtaattttaac

SEQ ID NO: 43609 - DNA, 22 bp, Artificial Sequence
  chemically synthesized
ttcaaaatggtaattttaacct

SEQ ID NO: 43610 - DNA, 22 bp, Artificial Sequence
  chemically synthesized
aaaatggtaattttaaccttct

SEQ ID NO: 43611 - DNA, 22 bp, Artificial Sequence
  chemically synthesized
taaccttcttagcacccacaaa

SEQ ID NO: 43612 - DNA, 22 bp, Artificial Sequence
  chemically synthesized
aaccttcttagcacccacaaac

SEQ ID NO: 43613 - DNA, 22 bp, Artificial Sequence
  chemically synthesized
accttcttagcacccacaaaca

SEQ ID NO: 43614 - DNA, 22 bp, Artificial Sequence
  chemically synthesized
cttagcacccacaaacatttcc

SEQ ID NO: 43615 - DNA, 22 bp, Artificial Sequence
  chemically synthesized
ttagcacccacaaacatttccc

SEQ ID NO: 43616 - DNA, 22 bp, Artificial Sequence
  chemically synthesized
agcacccacaaacatttccctt

SEQ ID NO: 43617 - DNA, 22 bp, Artificial Sequence
  chemically synthesized
gcacccacaaacatttcccttc

SEQ ID NO: 43618 - DNA, 22 bp, Artificial Sequence
  chemically synthesized
cccttctgatatctacttgaac

SEQ ID NO: 43619 - DNA, 22 bp, Artificial Sequence
  chemically synthesized
ccttctgatatctacttgaact

SEQ ID NO: 43620 - DNA, 22 bp, Artificial Sequence
  chemically synthesized
ctgatatctacttgaactttca

SEQ ID NO: 43621 - DNA, 22 bp, Artificial Sequence
  chemically synthesized
tgatatctacttgaactttcag

SEQ ID NO: 43622 - DNA, 22 bp, Artificial Sequence
  chemically synthesized
atatctacttgaactttcagat

SEQ ID NO: 43623 - DNA, 22 bp, Artificial Sequence
  chemically synthesized
cttgaactttcagataaaaaaa

SEQ ID NO: 43624 - DNA, 22 bp, Artificial Sequence
  chemically synthesized
gaactttcagataaaaaaaaaa

SEQ ID NO: 43625 - DNA, 22 bp, Artificial Sequence
  chemically synthesized
aactttcagataaaaaaaaaaa

SEQ ID NO: 43626 - DNA, 22 bp, Artificial Sequence
  chemically synthesized
tcagataaaaaaaaaaaagcaa

SEQ ID NO: 43627 - DNA, 22 bp, Artificial Sequence
  chemically synthesized
cagataaaaaaaaaaaagcaag

SEQ ID NO: 43628 - DNA, 22 bp, Artificial Sequence
  chemically synthesized
agataaaaaaaaaaaagcaagt

SEQ ID NO: 43629 - DNA, 22 bp, Artificial Sequence
  chemically synthesized
cagtaacatgttatgctacaca

SEQ ID NO: 43630 - DNA, 22 bp, Artificial Sequence
  chemically synthesized
tgctacacaaagattagcatga

SEQ ID NO: 43631 - DNA, 22 bp, Artificial Sequence
  chemically synthesized
cacaaagattagcatgaatatc

SEQ ID NO: 43632 - DNA, 22 bp, Artificial Sequence
  chemically synthesized
gcatgaatatccaccctcttta

SEQ ID NO: 43633 - DNA, 22 bp, Artificial Sequence
  chemically synthesized
tttaaacagccaccccacaccc

SEQ ID NO: 43634 - DNA, 22 bp, Artificial Sequence
  chemically synthesized
taaacagccaccccacaccctg

SEQ ID NO: 43635 - DNA, 22 bp, Artificial Sequence
  chemically synthesized
aaacagccaccccacaccctgg

SEQ ID NO: 43636 - DNA, 22 bp, Artificial Sequence
  chemically synthesized
aacagccaccccacaccctgga

SEQ ID NO: 43637 - DNA, 22 bp, Artificial Sequence
  chemically synthesized
gagaagagcaaatgtgaagttt

SEQ ID NO: 43638 - DNA, 22 bp, Artificial Sequence
  chemically synthesized
atgtgccaaccagactgtgcgc

SEQ ID NO: 43639 - DNA, 22 bp, Artificial Sequence
  chemically synthesized
tgtgccaaccagactgtgcgcc

SEQ ID NO: 43640 - DNA, 22 bp, Artificial Sequence
  chemically synthesized
tgcgccaggttggtaaagtctg

SEQ ID NO: 43641 - DNA, 22 bp, Artificial Sequence
  chemically synthesized
gtaaagtctgacagagttacca

SEQ ID NO: 43642 - DNA, 22 bp, Artificial Sequence
  chemically synthesized
acagagttaccaaaaaatgaca

SEQ ID NO: 43643 - DNA, 22 bp, Artificial Sequence
  chemically synthesized
ccaaaaaatgacaacatcttct

SEQ ID NO: 43644 - DNA, 22 bp, Artificial Sequence
  chemically synthesized
ctatatgtgaagcccaactacg

SEQ ID NO: 43645 - DNA, 22 bp, Artificial Sequence
  chemically synthesized
tatatgtgaagcccaactacgt

SEQ ID NO: 43646 - DNA, 22 bp, Artificial Sequence
  chemically synthesized
tatgtgaagcccaactacgtgg

SEQ ID NO: 43647 - DNA, 22 bp, Artificial Sequence
  chemically synthesized
cgtggttgtgcaactctatagc

SEQ ID NO: 43648 - DNA, 22 bp, Artificial Sequence
  chemically synthesized
tgcaactctatagctgactttc

SEQ ID NO: 43649 - DNA, 22 bp, Artificial Sequence
  chemically synthesized
tatagctgactttcaaccatgg

SEQ ID NO: 43650 - DNA, 22 bp, Artificial Sequence
  chemically synthesized
tagctgactttcaaccatggtc

SEQ ID NO: 43651 - DNA, 22 bp, Artificial Sequence
  chemically synthesized
actttcaaccatggtcatctgc

SEQ ID NO: 43652 - DNA, 22 bp, Artificial Sequence
  chemically synthesized
tcaaccatggtcatctgcaaag

SEQ ID NO: 43653 - DNA, 22 bp, Artificial Sequence
  chemically synthesized
caaccatggtcatctgcaaaga

SEQ ID NO: 43654 - DNA, 22 bp, Artificial Sequence
  chemically synthesized
aaccatggtcatctgcaaagaa

SEQ ID NO: 43655 - DNA, 22 bp, Artificial Sequence
  chemically synthesized
caaagaagttagtctcagccac

SEQ ID NO: 43656 - DNA, 22 bp, Artificial Sequence
  chemically synthesized
gtctcagccacctgcgcatcct

SEQ ID NO: 43657 - DNA, 22 bp, Artificial Sequence
  chemically synthesized
agccacctgcgcatcctcaatg

SEQ ID NO: 43658 - DNA, 22 bp, Artificial Sequence
  chemically synthesized
cgcatcctcaatgcaaaaagct

SEQ ID NO: 43659 - DNA, 22 bp, Artificial Sequence
  chemically synthesized
aatgcaaaaagctaagttctaa

SEQ ID NO: 43660 - DNA, 22 bp, Artificial Sequence
  chemically synthesized
agttctaaaaacgtattcttaa

SEQ ID NO: 43661 - DNA, 22 bp, Artificial Sequence
  chemically synthesized
taaaaacgtattcttaatgctg

SEQ ID NO: 43662 - DNA, 22 bp, Artificial Sequence
  chemically synthesized
aaaacgtattcttaatgctgtt

SEQ ID NO: 43663 - DNA, 22 bp, Artificial Sequence
  chemically synthesized
ttaatgctgttttaaatgcagc

SEQ ID NO: 43664 - DNA, 22 bp, Artificial Sequence
  chemically synthesized
aatgctgttttaaatgcagcac

SEQ ID NO: 43665 - DNA, 22 bp, Artificial Sequence
  chemically synthesized
atgctgttttaaatgcagcact

SEQ ID NO: 43666 - DNA, 22 bp, Artificial Sequence
  chemically synthesized
ttttaaatgcagcactactaaa

SEQ ID NO: 43667 - DNA, 22 bp, Artificial Sequence
  chemically synthesized
taaatgcagcactactaaaaag

SEQ ID NO: 43668 - DNA, 22 bp, Artificial Sequence
  chemically synthesized
aaatgcagcactactaaaaagg

SEQ ID NO: 43669 - DNA, 22 bp, Artificial Sequence
  chemically synthesized
aatgcagcactactaaaaagga

SEQ ID NO: 43670 - DNA, 22 bp, Artificial Sequence
  chemically synthesized
ctaaaaaggacctcattttgat

SEQ ID NO: 43671 - DNA, 22 bp, Artificial Sequence
  chemically synthesized
aaaaggacctcattttgatgcc

SEQ ID NO: 43672 - DNA, 22 bp, Artificial Sequence
  chemically synthesized
attttgatgccagagggcagca

SEQ ID NO: 43673 - DNA, 22 bp, Artificial Sequence
  chemically synthesized
tgatgccagagggcagcaaaca

SEQ ID NO: 43674 - DNA, 22 bp, Artificial Sequence
  chemically synthesized
gatgccagagggcagcaaacat

SEQ ID NO: 43675 - DNA, 22 bp, Artificial Sequence
  chemically synthesized
atgccagagggcagcaaacatg

SEQ ID NO: 43676 - DNA, 22 bp, Artificial Sequence
  chemically synthesized
ttggcccccttcagctattaag

SEQ ID NO: 43677 - DNA, 22 bp, Artificial Sequence
  chemically synthesized
tggcccccttcagctattaagt

SEQ ID NO: 43678 - DNA, 22 bp, Artificial Sequence
  chemically synthesized
ggcccccttcagctattaagta

SEQ ID NO: 43679 - DNA, 22 bp, Artificial Sequence
  chemically synthesized
gcccccttcagctattaagtac

SEQ ID NO: 43680 - DNA, 22 bp, Artificial Sequence
  chemically synthesized
cagctattaagtacagtaaaag

SEQ ID NO: 43681 - DNA, 22 bp, Artificial Sequence
  chemically synthesized
agctattaagtacagtaaaagg

SEQ ID NO: 43682 - DNA, 22 bp, Artificial Sequence
  chemically synthesized
ttaagtacagtaaaaggaagtc

SEQ ID NO: 43683 - DNA, 22 bp, Artificial Sequence
  chemically synthesized
agtacagtaaaaggaagtccta

SEQ ID NO: 43684 - DNA, 22 bp, Artificial Sequence
  chemically synthesized
actatcatttgaaatgctcccg

SEQ ID NO: 43685 - DNA, 22 bp, Artificial Sequence
  chemically synthesized
tcatttgaaatgctcccggcca

SEQ ID NO: 43686 - DNA, 22 bp, Artificial Sequence
  chemically synthesized
gaaatgctcccggccaggcgct

SEQ ID NO: 43687 - DNA, 22 bp, Artificial Sequence
  chemically synthesized
aaatgctcccggccaggcgctg

SEQ ID NO: 43688 - DNA, 22 bp, Artificial Sequence
  chemically synthesized
ccggccaggcgctgtggctcac

SEQ ID NO: 43689 - DNA, 22 bp, Artificial Sequence
  chemically synthesized
tggctcacacctgtaatcccag

SEQ ID NO: 43690 - DNA, 22 bp, Artificial Sequence
  chemically synthesized
acacctgtaatcccagcacttt

SEQ ID NO: 43691 - DNA, 22 bp, Artificial Sequence
  chemically synthesized
taatcccagcactttgggaggc

SEQ ID NO: 43692 - DNA, 22 bp, Artificial Sequence
  chemically synthesized
tgggaggccggggcaggaggat

SEQ ID NO: 43693 - DNA, 22 bp, Artificial Sequence
  chemically synthesized
gggaggccggggcaggaggatc

SEQ ID NO: 43694 - DNA, 22 bp, Artificial Sequence
  chemically synthesized
ggaggccggggcaggaggatca

SEQ ID NO: 43695 - DNA, 22 bp, Artificial Sequence
  chemically synthesized
aggtcaggagttcaagatcagt

SEQ ID NO: 43696 - DNA, 22 bp, Artificial Sequence
  chemically synthesized
aagatcagtttggacaacacag

SEQ ID NO: 43697 - DNA, 22 bp, Artificial Sequence
  chemically synthesized
ggacaacacagtgaaaccccgt

SEQ ID NO: 43698 - DNA, 22 bp, Artificial Sequence
  chemically synthesized
gacaacacagtgaaaccccgtc

SEQ ID NO: 43699 - DNA, 22 bp, Artificial Sequence
  chemically synthesized
tactaaaaatacaaaattagcc

SEQ ID NO: 43700 - DNA, 22 bp, Artificial Sequence
  chemically synthesized
ctaaaaatacaaaattagccgg

SEQ ID NO: 43701 - DNA, 22 bp, Artificial Sequence
  chemically synthesized
aaaatacaaaattagccgggca

SEQ ID NO: 43702 - DNA, 22 bp, Artificial Sequence
  chemically synthesized
gccgggcatggtaatacatgcc

SEQ ID NO: 43703 - DNA, 22 bp, Artificial Sequence
  chemically synthesized
taatctcagctactcgggaggc

SEQ ID NO: 43704 - DNA, 22 bp, Artificial Sequence
  chemically synthesized
agctactcgggaggctgaggca

SEQ ID NO: 43705 - DNA, 22 bp, Artificial Sequence
  chemically synthesized
ctcgggaggctgaggcaggaga

SEQ ID NO: 43706 - DNA, 22 bp, Artificial Sequence
  chemically synthesized
gggaggctgaggcaggagatcg

SEQ ID NO: 43707 - DNA, 22 bp, Artificial Sequence
  chemically synthesized
aggcaggagatcgcttgaacct

SEQ ID NO: 43708 - DNA, 22 bp, Artificial Sequence
  chemically synthesized
gaacctgggaggcagaagatgc

SEQ ID NO: 43709 - DNA, 22 bp, Artificial Sequence
  chemically synthesized
aacctgggaggcagaagatgca

SEQ ID NO: 43710 - DNA, 22 bp, Artificial Sequence
  chemically synthesized
ggaggcagaagatgcagtgagc

SEQ ID NO: 43711 - DNA, 22 bp, Artificial Sequence
  chemically synthesized
cattccagcccgggcaacaaga

SEQ ID NO: 43712 - DNA, 22 bp, Artificial Sequence
  chemically synthesized
cagcccgggcaacaagagtaaa

SEQ ID NO: 43713 - DNA, 22 bp, Artificial Sequence
  chemically synthesized
cgtctcaccaaaaaaagaaaaa

SEQ ID NO: 43714 - DNA, 22 bp, Artificial Sequence
  chemically synthesized
accaaaaaaagaaaaaagaaaa

SEQ ID NO: 43715 - DNA, 22 bp, Artificial Sequence
  chemically synthesized
ccctcagttctccaggctgggc

SEQ ID NO: 43716 - DNA, 22 bp, Artificial Sequence
  chemically synthesized
agttctccaggctgggctgact

SEQ ID NO: 43717 - DNA, 22 bp, Artificial Sequence
  chemically synthesized
tccaggctgggctgactgccca

SEQ ID NO: 43718 - DNA, 22 bp, Artificial Sequence
  chemically synthesized
caggctgggctgactgcccacg

SEQ ID NO: 43719 - DNA, 22 bp, Artificial Sequence
  chemically synthesized
ggctgactgcccacgtcaaaac

SEQ ID NO: 43720 - DNA, 22 bp, Artificial Sequence
  chemically synthesized
actgcccacgtcaaaacaccct

SEQ ID NO: 43721 - DNA, 22 bp, Artificial Sequence
  chemically synthesized
cccacgtcaaaacaccctaggc

SEQ ID NO: 43722 - DNA, 22 bp, Artificial Sequence
  chemically synthesized
ggcatcatcactccgtgttgag

SEQ ID NO: 43723 - DNA, 22 bp, Artificial Sequence
  chemically synthesized
cgtgttgagagccaagtggcca

SEQ ID NO: 43724 - DNA, 22 bp, Artificial Sequence
  chemically synthesized
agagccaagtggccaggtagga

SEQ ID NO: 43725 - DNA, 22 bp, Artificial Sequence
  chemically synthesized
cgcaggcacagacgttttccat

SEQ ID NO: 43726 - DNA, 22 bp, Artificial Sequence
  chemically synthesized
tccatgttaagaacccaaatcc

SEQ ID NO: 43727 - DNA, 22 bp, Artificial Sequence
  chemically synthesized
ccatgttaagaacccaaatcca

SEQ ID NO: 43728 - DNA, 22 bp, Artificial Sequence
  chemically synthesized
catgttaagaacccaaatccat

SEQ ID NO: 43729 - DNA, 22 bp, Artificial Sequence
  chemically synthesized
agaacccaaatccatacagtcc

SEQ ID NO: 43730 - DNA, 22 bp, Artificial Sequence
  chemically synthesized
agcacccaaataggttcagaaa

SEQ ID NO: 43731 - DNA, 22 bp, Artificial Sequence
  chemically synthesized
gcacccaaataggttcagaaaa

SEQ ID NO: 43732 - DNA, 22 bp, Artificial Sequence
  chemically synthesized
agaaaaggcagtccacacaaat

SEQ ID NO: 43733 - DNA, 22 bp, Artificial Sequence
  chemically synthesized
ccaaataaatgaagttcagata

SEQ ID NO: 43734 - DNA, 22 bp, Artificial Sequence
  chemically synthesized
agatattgcatttacgctaaat

SEQ ID NO: 43735 - DNA, 22 bp, Artificial Sequence
  chemically synthesized
catttacgctaaataccttgga

SEQ ID NO: 43736 - DNA, 22 bp, Artificial Sequence
  chemically synthesized
acgctaaataccttggaaattg

SEQ ID NO: 43737 - DNA, 22 bp, Artificial Sequence
  chemically synthesized
cgctaaataccttggaaattga

SEQ ID NO: 43738 - DNA, 22 bp, Artificial Sequence
  chemically synthesized
aataccttggaaattgagaggg

SEQ ID NO: 43739 - DNA, 22 bp, Artificial Sequence
  chemically synthesized
ggaaattgagagggaatctgga

SEQ ID NO: 43740 - DNA, 22 bp, Artificial Sequence
  chemically synthesized
gaaattgagagggaatctggag

SEQ ID NO: 43741 - DNA, 22 bp, Artificial Sequence
  chemically synthesized
agagggaatctggagaggaaga

SEQ ID NO: 43742 - DNA, 22 bp, Artificial Sequence
  chemically synthesized
gagaggaagatggatgtaggaa

SEQ ID NO: 43743 - DNA, 22 bp, Artificial Sequence
  chemically synthesized
actttacaggaattcagcacag

SEQ ID NO: 43744 - DNA, 22 bp, Artificial Sequence
  chemically synthesized
tacaggaattcagcacaggaga

SEQ ID NO: 43745 - DNA, 22 bp, Artificial Sequence
  chemically synthesized
acaggaattcagcacaggagat

SEQ ID NO: 43746 - DNA, 22 bp, Artificial Sequence
  chemically synthesized
caggaattcagcacaggagatg

SEQ ID NO: 43747 - DNA, 22 bp, Artificial Sequence
  chemically synthesized
agcacaggagatgctacattgt

SEQ ID NO: 43748 - DNA, 22 bp, Artificial Sequence
  chemically synthesized
cattgttagcatctccgcttaa

SEQ ID NO: 43749 - DNA, 22 bp, Artificial Sequence
  chemically synthesized
ttagcatctccgcttaaggaga

SEQ ID NO: 43750 - DNA, 22 bp, Artificial Sequence
  chemically synthesized
gcatctccgcttaaggagaaga

SEQ ID NO: 43751 - DNA, 22 bp, Artificial Sequence
  chemically synthesized
cgcttaaggagaagacatactg

SEQ ID NO: 43752 - DNA, 22 bp, Artificial Sequence
  chemically synthesized
aaggagaagacatactgatgaa

SEQ ID NO: 43753 - DNA, 22 bp, Artificial Sequence
  chemically synthesized
aggagaagacatactgatgaat

SEQ ID NO: 43754 - DNA, 22 bp, Artificial Sequence
  chemically synthesized
atgaataagactgagttggtga

SEQ ID NO: 43755 - DNA, 22 bp, Artificial Sequence
  chemically synthesized
agttggtgacaggcacagtggc

SEQ ID NO: 43756 - DNA, 22 bp, Artificial Sequence
  chemically synthesized
gtgacaggcacagtggctctcg

SEQ ID NO: 43757 - DNA, 22 bp, Artificial Sequence
  chemically synthesized
tcgcctgtaatcccagcacttt

SEQ ID NO: 43758 - DNA, 22 bp, Artificial Sequence
  chemically synthesized
gcctgtaatcccagcactttgg

SEQ ID NO: 43759 - DNA, 22 bp, Artificial Sequence
  chemically synthesized
taatcccagcactttgggaggt

SEQ ID NO: 43760 - DNA, 22 bp, Artificial Sequence
  chemically synthesized
tgggaggtcaaggcaggaggat

SEQ ID NO: 43761 - DNA, 22 bp, Artificial Sequence
  chemically synthesized
gggaggtcaaggcaggaggatc

SEQ ID NO: 43762 - DNA, 22 bp, Artificial Sequence
  chemically synthesized
ggaggtcaaggcaggaggatca

SEQ ID NO: 43763 - DNA, 22 bp, Artificial Sequence
  chemically synthesized
gagcccaggagttcaagaccag

SEQ ID NO: 43764 - DNA, 22 bp, Artificial Sequence
  chemically synthesized
aagaccagcctgggcaacaggg

SEQ ID NO: 43765 - DNA, 22 bp, Artificial Sequence
  chemically synthesized
ggcaacagggagaaactccatc

SEQ ID NO: 43766 - DNA, 22 bp, Artificial Sequence
  chemically synthesized
catctctacaaaattagccagg

SEQ ID NO: 43767 - DNA, 22 bp, Artificial Sequence
  chemically synthesized
tacaaaattagccaggcatggt

SEQ ID NO: 43768 - DNA, 22 bp, Artificial Sequence
  chemically synthesized
caaaattagccaggcatggtgg

SEQ ID NO: 43769 - DNA, 22 bp, Artificial Sequence
  chemically synthesized
gccaggcatggtggcatgcacc

SEQ ID NO: 43770 - DNA, 22 bp, Artificial Sequence
  chemically synthesized
tcgtcccagctactcaggaggc

SEQ ID NO: 43771 - DNA, 22 bp, Artificial Sequence
  chemically synthesized
ctcaggaggctgaggtgacagg

SEQ ID NO: 43772 - DNA, 22 bp, Artificial Sequence
  chemically synthesized
aggaggctgaggtgacaggatg

SEQ ID NO: 43773 - DNA, 22 bp, Artificial Sequence
  chemically synthesized
aggtgacaggatggcttgagcc

SEQ ID NO: 43774 - DNA, 22 bp, Artificial Sequence
  chemically synthesized
gagcctaggagatcaaggctgc

SEQ ID NO: 43775 - DNA, 22 bp, Artificial Sequence
  chemically synthesized
agcctaggagatcaaggctgca

SEQ ID NO: 43776 - DNA, 22 bp, Artificial Sequence
  chemically synthesized
ggagatcaaggctgcagtgagc

SEQ ID NO: 43777 - DNA, 22 bp, Artificial Sequence
  chemically synthesized
cagtgagctatgaacatgccac

SEQ ID NO: 43778 - DNA, 22 bp, Artificial Sequence
  chemically synthesized
tgaacatgccactacactctag

SEQ ID NO: 43779 - DNA, 22 bp, Artificial Sequence
  chemically synthesized
cactctagcctaggcaacacag

SEQ ID NO: 43780 - DNA, 22 bp, Artificial Sequence
  chemically synthesized
tagcctaggcaacacagcgaga

SEQ ID NO: 43781 - DNA, 22 bp, Artificial Sequence
  chemically synthesized
gcctaggcaacacagcgagacc

SEQ ID NO: 43782 - DNA, 22 bp, Artificial Sequence
  chemically synthesized
ggcaacacagcgagaccctgtc

SEQ ID NO: 43783 - DNA, 22 bp, Artificial Sequence
  chemically synthesized
tctcaaaaacaaacaaacaaac

SEQ ID NO: 43784 - DNA, 22 bp, Artificial Sequence
  chemically synthesized
aaaaacaaacaaacaaacaaac

SEQ ID NO: 43785 - DNA, 22 bp, Artificial Sequence
  chemically synthesized
attgggctaatgtttagaataa

SEQ ID NO: 43786 - DNA, 22 bp, Artificial Sequence
  chemically synthesized
ggctaatgtttagaataaatgt

SEQ ID NO: 43787 - DNA, 22 bp, Artificial Sequence
  chemically synthesized
atgtttagaataaatgtatttc

SEQ ID NO: 43788 - DNA, 22 bp, Artificial Sequence
  chemically synthesized
agaataaatgtatttctaggga

SEQ ID NO: 43789 - DNA, 22 bp, Artificial Sequence
  chemically synthesized
gaataaatgtatttctagggaa

SEQ ID NO: 43790 - DNA, 22 bp, Artificial Sequence
  chemically synthesized
ctagggaagaaaaaaacttagt

SEQ ID NO: 43791 - DNA, 22 bp, Artificial Sequence
  chemically synthesized
tagggaagaaaaaaacttagtt

SEQ ID NO: 43792 - DNA, 22 bp, Artificial Sequence
  chemically synthesized
gggaagaaaaaaacttagttgg

SEQ ID NO: 43793 - DNA, 22 bp, Artificial Sequence
  chemically synthesized
agttgggtactccctccccttt

SEQ ID NO: 43794 - DNA, 22 bp, Artificial Sequence
  chemically synthesized
gttgggtactccctcccctttt

SEQ ID NO: 43795 - DNA, 22 bp, Artificial Sequence
  chemically synthesized
ggtactccctcccctttttact

SEQ ID NO: 43796 - DNA, 22 bp, Artificial Sequence
  chemically synthesized
cctcccctttttactttttgaa

SEQ ID NO: 43797 - DNA, 22 bp, Artificial Sequence
  chemically synthesized
ccctttttactttttgaagcct

SEQ ID NO: 43798 - DNA, 22 bp, Artificial Sequence
  chemically synthesized
tttactttttgaagcctgctgg

SEQ ID NO: 43799 - DNA, 22 bp, Artificial Sequence
  chemically synthesized
ttactttttgaagcctgctgga

SEQ ID NO: 43800 - DNA, 22 bp, Artificial Sequence
  chemically synthesized
tactttttgaagcctgctggaa

SEQ ID NO: 43801 - DNA, 22 bp, Artificial Sequence
  chemically synthesized
actttttgaagcctgctggaat

SEQ ID NO: 43802 - DNA, 22 bp, Artificial Sequence
  chemically synthesized
ctttttgaagcctgctggaatt

SEQ ID NO: 43803 - DNA, 22 bp, Artificial Sequence
  chemically synthesized
tttgaagcctgctggaattcta

SEQ ID NO: 43804 - DNA, 22 bp, Artificial Sequence
  chemically synthesized
ttgaagcctgctggaattctag

SEQ ID NO: 43805 - DNA, 22 bp, Artificial Sequence
  chemically synthesized
tgaagcctgctggaattctagg

SEQ ID NO: 43806 - DNA, 22 bp, Artificial Sequence
  chemically synthesized
gaagcctgctggaattctagga

SEQ ID NO: 43807 - DNA, 22 bp, Artificial Sequence
  chemically synthesized
aagcctgctggaattctaggaa

SEQ ID NO: 43808 - DNA, 22 bp, Artificial Sequence
  chemically synthesized
ctggaattctaggaaaacagat

SEQ ID NO: 43809 - DNA, 22 bp, Artificial Sequence
  chemically synthesized
gaattctaggaaaacagatttc

SEQ ID NO: 43810 - DNA, 22 bp, Artificial Sequence
  chemically synthesized
taggaaaacagatttcctcccc

SEQ ID NO: 43811 - DNA, 22 bp, Artificial Sequence
  chemically synthesized
ggaaaacagatttcctcccctt

SEQ ID NO: 43812 - DNA, 22 bp, Artificial Sequence
  chemically synthesized
cctccccttgctctctccttcc

SEQ ID NO: 43813 - DNA, 22 bp, Artificial Sequence
  chemically synthesized
ctccccttgctctctccttcct

SEQ ID NO: 43814 - DNA, 22 bp, Artificial Sequence
  chemically synthesized
cccttgctctctccttcctcac

SEQ ID NO: 43815 - DNA, 22 bp, Artificial Sequence
  chemically synthesized
gctctctccttcctcacatact

SEQ ID NO: 43816 - DNA, 22 bp, Artificial Sequence
  chemically synthesized
ctctctccttcctcacatactc

SEQ ID NO: 43817 - DNA, 22 bp, Artificial Sequence
  chemically synthesized
tctccttcctcacatactcacc

SEQ ID NO: 43818 - DNA, 22 bp, Artificial Sequence
  chemically synthesized
tccttcctcacatactcaccag

SEQ ID NO: 43819 - DNA, 22 bp, Artificial Sequence
  chemically synthesized
cttcctcacatactcaccagta

SEQ ID NO: 43820 - DNA, 22 bp, Artificial Sequence
  chemically synthesized
cctcacatactcaccagtactc

SEQ ID NO: 43821 - DNA, 22 bp, Artificial Sequence
  chemically synthesized
ctcacatactcaccagtactca

SEQ ID NO: 43822 - DNA, 22 bp, Artificial Sequence
  chemically synthesized
acatactcaccagtactcatgc

SEQ ID NO: 43823 - DNA, 22 bp, Artificial Sequence
  chemically synthesized
accagtactcatgcgcttctca

SEQ ID NO: 43824 - DNA, 22 bp, Artificial Sequence
  chemically synthesized
atgcgcttctcagacccaaatg

SEQ ID NO: 43825 - DNA, 22 bp, Artificial Sequence
  chemically synthesized
ctcagacccaaatgctctgctt

SEQ ID NO: 43826 - DNA, 22 bp, Artificial Sequence
  chemically synthesized
tcagacccaaatgctctgctta

SEQ ID NO: 43827 - DNA, 22 bp, Artificial Sequence
  chemically synthesized
agacccaaatgctctgcttatg

SEQ ID NO: 43828 - DNA, 22 bp, Artificial Sequence
  chemically synthesized
tgcttatggtggataaccccat

SEQ ID NO: 43829 - DNA, 22 bp, Artificial Sequence
  chemically synthesized
cttatggtggataaccccatct

SEQ ID NO: 43830 - DNA, 22 bp, Artificial Sequence
  chemically synthesized
atggtggataaccccatctcag

SEQ ID NO: 43831 - DNA, 22 bp, Artificial Sequence
  chemically synthesized
tggtggataaccccatctcagt

SEQ ID NO: 43832 - DNA, 22 bp, Artificial Sequence
  chemically synthesized
agtgggcctccctctctctctc

SEQ ID NO: 43833 - DNA, 22 bp, Artificial Sequence
  chemically synthesized
cctctctctctctctctctctc

SEQ ID NO: 43834 - DNA, 22 bp, Artificial Sequence
  chemically synthesized
tctctctctctctctctctctc

SEQ ID NO: 43835 - DNA, 22 bp, Artificial Sequence
  chemically synthesized
tctctctctctctctctctctc

SEQ ID NO: 43836 - DNA, 22 bp, Artificial Sequence
  chemically synthesized
tctctctctctctctctctctg

SEQ ID NO: 43837 - DNA, 22 bp, Artificial Sequence
  chemically synthesized
tctctctctctctctctctgtc

SEQ ID NO: 43838 - DNA, 22 bp, Artificial Sequence
  chemically synthesized
tctctctctctctctctgtcat

SEQ ID NO: 43839 - DNA, 22 bp, Artificial Sequence
  chemically synthesized
tctctctctctctctgtcatta

SEQ ID NO: 43840 - DNA, 22 bp, Artificial Sequence
  chemically synthesized
tctctctctctctgtcattacc

SEQ ID NO: 43841 - DNA, 22 bp, Artificial Sequence
  chemically synthesized
tctctctctctgtcattaccaa

SEQ ID NO: 43842 - DNA, 22 bp, Artificial Sequence
  chemically synthesized
tctctctctgtcattaccaact

SEQ ID NO: 43843 - DNA, 22 bp, Artificial Sequence
  chemically synthesized
tctctctgtcattaccaacttc

SEQ ID NO: 43844 - DNA, 22 bp, Artificial Sequence
  chemically synthesized
tctctgtcattaccaacttcta

SEQ ID NO: 43845 - DNA, 22 bp, Artificial Sequence
  chemically synthesized
tctgtcattaccaacttctata

SEQ ID NO: 43846 - DNA, 22 bp, Artificial Sequence
  chemically synthesized
tgtcattaccaacttctataaa

SEQ ID NO: 43847 - DNA, 22 bp, Artificial Sequence
  chemically synthesized
tcattaccaacttctataaaat

SEQ ID NO: 43848 - DNA, 22 bp, Artificial Sequence
  chemically synthesized
ccaacttctataaaatctcaga

SEQ ID NO: 43849 - DNA, 22 bp, Artificial Sequence
  chemically synthesized
ctataaaatctcagaatacaaa

SEQ ID NO: 43850 - DNA, 22 bp, Artificial Sequence
  chemically synthesized
tataaaatctcagaatacaaag

SEQ ID NO: 43851 - DNA, 22 bp, Artificial Sequence
  chemically synthesized
taaaatctcagaatacaaaggg

SEQ ID NO: 43852 - DNA, 22 bp, Artificial Sequence
  chemically synthesized
agaatacaaagggcattctcat

SEQ ID NO: 43853 - DNA, 22 bp, Artificial Sequence
  chemically synthesized
tcatttccctgaaatgtacttt

SEQ ID NO: 43854 - DNA, 22 bp, Artificial Sequence
  chemically synthesized
atttccctgaaatgtactttgg

SEQ ID NO: 43855 - DNA, 22 bp, Artificial Sequence
  chemically synthesized
ccctgaaatgtactttggtgct

SEQ ID NO: 43856 - DNA, 22 bp, Artificial Sequence
  chemically synthesized
cctgaaatgtactttggtgcta

SEQ ID NO: 43857 - DNA, 22 bp, Artificial Sequence
  chemically synthesized
aaatgtactttggtgctaccct

SEQ ID NO: 43858 - DNA, 22 bp, Artificial Sequence
  chemically synthesized
tggtgctaccctgaaagacggc

SEQ ID NO: 43859 - DNA, 22 bp, Artificial Sequence
  chemically synthesized
ggtgctaccctgaaagacggct

SEQ ID NO: 43860 - DNA, 22 bp, Artificial Sequence
  chemically synthesized
gtgctaccctgaaagacggcta

SEQ ID NO: 43861 - DNA, 22 bp, Artificial Sequence
  chemically synthesized
ccctgaaagacggctagagtct

SEQ ID NO: 43862 - DNA, 22 bp, Artificial Sequence
  chemically synthesized
aaagacggctagagtcttgagg

SEQ ID NO: 43863 - DNA, 22 bp, Artificial Sequence
  chemically synthesized
gagtcttgaggagacccaaaca

SEQ ID NO: 43864 - DNA, 22 bp, Artificial Sequence
  chemically synthesized
gaggagacccaaacagttaaag

SEQ ID NO: 43865 - DNA, 22 bp, Artificial Sequence
  chemically synthesized
aggagacccaaacagttaaagg

SEQ ID NO: 43866 - DNA, 22 bp, Artificial Sequence
  chemically synthesized
aaggttacagacagacttggtt

SEQ ID NO: 43867 - DNA, 22 bp, Artificial Sequence
  chemically synthesized
cagacagacttggttccactcc

SEQ ID NO: 43868 - DNA, 22 bp, Artificial Sequence
  chemically synthesized
ggttccactccagtggtgggtg

SEQ ID NO: 43869 - DNA, 22 bp, Artificial Sequence
  chemically synthesized
gttccactccagtggtgggtgt

SEQ ID NO: 43870 - DNA, 22 bp, Artificial Sequence
  chemically synthesized
cactccagtggtgggtgttttg

SEQ ID NO: 43871 - DNA, 22 bp, Artificial Sequence
  chemically synthesized
cagtggtgggtgttttgttttg

SEQ ID NO: 43872 - DNA, 22 bp, Artificial Sequence
  chemically synthesized
tgttttgtttcgctttagcttt

SEQ ID NO: 43873 - DNA, 22 bp, Artificial Sequence
  chemically synthesized
gttttgtttcgctttagcttta

SEQ ID NO: 43874 - DNA, 22 bp, Artificial Sequence
  chemically synthesized
ttttgtttcgctttagctttat

SEQ ID NO: 43875 - DNA, 22 bp, Artificial Sequence
  chemically synthesized
tgtttcgctttagctttattaa

SEQ ID NO: 43876 - DNA, 22 bp, Artificial Sequence
  chemically synthesized
gtttcgctttagctttattaag

SEQ ID NO: 43877 - DNA, 22 bp, Artificial Sequence
  chemically synthesized
tttcgctttagctttattaagg

SEQ ID NO: 43878 - DNA, 22 bp, Artificial Sequence
  chemically synthesized
cgctttagctttattaaggtat

SEQ ID NO: 43879 - DNA, 22 bp, Artificial Sequence
  chemically synthesized
gctttagctttattaaggtata

SEQ ID NO: 43880 - DNA, 22 bp, Artificial Sequence
  chemically synthesized
tagctttattaaggtatacttt

SEQ ID NO: 43881 - DNA, 22 bp, Artificial Sequence
  chemically synthesized
agctttattaaggtatacttta

SEQ ID NO: 43882 - DNA, 22 bp, Artificial Sequence
  chemically synthesized
gctttattaaggtatactttac

SEQ ID NO: 43883 - DNA, 22 bp, Artificial Sequence
  chemically synthesized
tattaaggtatactttacatac

SEQ ID NO: 43884 - DNA, 22 bp, Artificial Sequence
  chemically synthesized
attaaggtatactttacataca

SEQ ID NO: 43885 - DNA, 22 bp, Artificial Sequence
  chemically synthesized
ttaaggtatactttacatacaa

SEQ ID NO: 43886 - DNA, 22 bp, Artificial Sequence
  chemically synthesized
aggtatactttacatacaacaa

SEQ ID NO: 43887 - DNA, 22 bp, Artificial Sequence
  chemically synthesized
tacatacaacaaaagtcattca

SEQ ID NO: 43888 - DNA, 22 bp, Artificial Sequence
  chemically synthesized
acatacaacaaaagtcattcat

SEQ ID NO: 43889 - DNA, 22 bp, Artificial Sequence
  chemically synthesized
catacaacaaaagtcattcatt

SEQ ID NO: 43890 - DNA, 22 bp, Artificial Sequence
  chemically synthesized
attttaagtgtacagttggatt

SEQ ID NO: 43891 - DNA, 22 bp, Artificial Sequence
  chemically synthesized
taagtgtacagttggattcaat

SEQ ID NO: 43892 - DNA, 22 bp, Artificial Sequence
  chemically synthesized
aagtgtacagttggattcaatt

SEQ ID NO: 43893 - DNA, 22 bp, Artificial Sequence
  chemically synthesized
agtgtacagttggattcaattt

SEQ ID NO: 43894 - DNA, 22 bp, Artificial Sequence
  chemically synthesized
gattcaatttgccagttgtata

SEQ ID NO: 43895 - DNA, 22 bp, Artificial Sequence
  chemically synthesized
aatttgccagttgtatacagct

SEQ ID NO: 43896 - DNA, 22 bp, Artificial Sequence
  chemically synthesized
gccagttgtatacagctgtgtg

SEQ ID NO: 43897 - DNA, 22 bp, Artificial Sequence
  chemically synthesized
ccagttgtatacagctgtgtgg

SEQ ID NO: 43898 - DNA, 22 bp, Artificial Sequence
  chemically synthesized
tatacagctgtgtggcctccac

SEQ ID NO: 43899 - DNA, 22 bp, Artificial Sequence
  chemically synthesized
tgtggcctccaccaaaatcaag

SEQ ID NO: 43900 - DNA, 22 bp, Artificial Sequence
  chemically synthesized
caccaaaatcaagatacagaac

SEQ ID NO: 43901 - DNA, 22 bp, Artificial Sequence
  chemically synthesized
gaaagccccctcatgccccttt

SEQ ID NO: 43902 - DNA, 22 bp, Artificial Sequence
  chemically synthesized
atgcccctttgctgtcaatccc

SEQ ID NO: 43903 - DNA, 22 bp, Artificial Sequence
  chemically synthesized
tgctgtcaatccccttccctaa

SEQ ID NO: 43904 - DNA, 22 bp, Artificial Sequence
  chemically synthesized
gctgtcaatccccttccctaac

SEQ ID NO: 43905 - DNA, 22 bp, Artificial Sequence
  chemically synthesized
ctgtcaatccccttccctaacc

SEQ ID NO: 43906 - DNA, 22 bp, Artificial Sequence
  chemically synthesized
tcaatccccttccctaaccctc

SEQ ID NO: 43907 - DNA, 22 bp, Artificial Sequence
  chemically synthesized
ccctaaccctctgaccccttcc

SEQ ID NO: 43908 - DNA, 22 bp, Artificial Sequence
  chemically synthesized
cctaaccctctgaccccttcct

SEQ ID NO: 43909 - DNA, 22 bp, Artificial Sequence
  chemically synthesized
accctctgaccccttccttcta

SEQ ID NO: 43910 - DNA, 22 bp, Artificial Sequence
  chemically synthesized
tgaccccttccttctaaccact

SEQ ID NO: 43911 - DNA, 22 bp, Artificial Sequence
  chemically synthesized
accccttccttctaaccactga

SEQ ID NO: 43912 - DNA, 22 bp, Artificial Sequence
  chemically synthesized
ccttctaaccactgaaccccca

SEQ ID NO: 43913 - DNA, 22 bp, Artificial Sequence
  chemically synthesized
cttctaaccactgaacccccac

SEQ ID NO: 43914 - DNA, 22 bp, Artificial Sequence
  chemically synthesized
ctaaccactgaacccccaccta

SEQ ID NO: 43915 - DNA, 22 bp, Artificial Sequence
  chemically synthesized
taaccactgaacccccacctac

SEQ ID NO: 43916 - DNA, 22 bp, Artificial Sequence
  chemically synthesized
accactgaacccccacctacca

SEQ ID NO: 43917 - DNA, 22 bp, Artificial Sequence
  chemically synthesized
aacccccacctaccaccacagt

SEQ ID NO: 43918 - DNA, 22 bp, Artificial Sequence
  chemically synthesized
ccaccacagtgttgagaattct

SEQ ID NO: 43919 - DNA, 22 bp, Artificial Sequence
  chemically synthesized
agaattctagaatttgttacaa

SEQ ID NO: 43920 - DNA, 22 bp, Artificial Sequence
  chemically synthesized
tagaatttgttacaaatggact

SEQ ID NO: 43921 - DNA, 22 bp, Artificial Sequence
  chemically synthesized
gaatttgttacaaatggactca

SEQ ID NO: 43922 - DNA, 22 bp, Artificial Sequence
  chemically synthesized
gttacaaatggactcatacagg

SEQ ID NO: 43923 - DNA, 22 bp, Artificial Sequence
  chemically synthesized
ttacaaatggactcatacagga

SEQ ID NO: 43924 - DNA, 22 bp, Artificial Sequence
  chemically synthesized
caaatggactcatacaggatat

SEQ ID NO: 43925 - DNA, 22 bp, Artificial Sequence
  chemically synthesized
atacaggatatcgtcttttgtg

SEQ ID NO: 43926 - DNA, 22 bp, Artificial Sequence
  chemically synthesized
ttgtgtttaatttcttccacag

SEQ ID NO: 43927 - DNA, 22 bp, Artificial Sequence
  chemically synthesized
tgtgtttaatttcttccacaga

SEQ ID NO: 43928 - DNA, 22 bp, Artificial Sequence
  chemically synthesized
gtgtttaatttcttccacagag

SEQ ID NO: 43929 - DNA, 22 bp, Artificial Sequence
  chemically synthesized
tgtttaatttcttccacagagc

SEQ ID NO: 43930 - DNA, 22 bp, Artificial Sequence
  chemically synthesized
aatttcttccacagagcagaat

SEQ ID NO: 43931 - DNA, 22 bp, Artificial Sequence
  chemically synthesized
atttcttccacagagcagaatg

SEQ ID NO: 43932 - DNA, 22 bp, Artificial Sequence
  chemically synthesized
cttccacagagcagaatgattc

SEQ ID NO: 43933 - DNA, 22 bp, Artificial Sequence
  chemically synthesized
ttccacagagcagaatgattct

SEQ ID NO: 43934 - DNA, 22 bp, Artificial Sequence
  chemically synthesized
ccacagagcagaatgattctgg

SEQ ID NO: 43935 - DNA, 22 bp, Artificial Sequence
  chemically synthesized
cacagagcagaatgattctggg

SEQ ID NO: 43936 - DNA, 22 bp, Artificial Sequence
  chemically synthesized
tgggattcatccatggtgtgga

SEQ ID NO: 43937 - DNA, 22 bp, Artificial Sequence
  chemically synthesized
ggattcatccatggtgtggagt

SEQ ID NO: 43938 - DNA, 22 bp, Artificial Sequence
  chemically synthesized
atccatggtgtggagtgtgtta

SEQ ID NO: 43939 - DNA, 22 bp, Artificial Sequence
  chemically synthesized
ctctttcattcttctactgttg

SEQ ID NO: 43940 - DNA, 22 bp, Artificial Sequence
  chemically synthesized
tttcattcttctactgttgagt

SEQ ID NO: 43941 - DNA, 22 bp, Artificial Sequence
  chemically synthesized
tcattcttctactgttgagttg

SEQ ID NO: 43942 - DNA, 22 bp, Artificial Sequence
  chemically synthesized
cattcttctactgttgagttgt

SEQ ID NO: 43943 - DNA, 22 bp, Artificial Sequence
  chemically synthesized
attcttctactgttgagttgta

SEQ ID NO: 43944 - DNA, 22 bp, Artificial Sequence
  chemically synthesized
ttctactgttgagttgtattcc

SEQ ID NO: 43945 - DNA, 22 bp, Artificial Sequence
  chemically synthesized
ctactgttgagttgtattccac

SEQ ID NO: 43946 - DNA, 22 bp, Artificial Sequence
  chemically synthesized
tactgttgagttgtattccacc

SEQ ID NO: 43947 - DNA, 22 bp, Artificial Sequence
  chemically synthesized
ctgttgagttgtattccaccat

SEQ ID NO: 43948 - DNA, 22 bp, Artificial Sequence
  chemically synthesized
ttgagttgtattccaccatagg

SEQ ID NO: 43949 - DNA, 22 bp, Artificial Sequence
  chemically synthesized
agttgtattccaccatagggcg

SEQ ID NO: 43950 - DNA, 22 bp, Artificial Sequence
  chemically synthesized
tattccaccatagggcgtttat

SEQ ID NO: 43951 - DNA, 22 bp, Artificial Sequence
  chemically synthesized
caccatagggcgtttatccatt

SEQ ID NO: 43952 - DNA, 22 bp, Artificial Sequence
  chemically synthesized
atccattcaacctattggttgc

SEQ ID NO: 43953 - DNA, 22 bp, Artificial Sequence
  chemically synthesized
tccattcaacctattggttgcc

SEQ ID NO: 43954 - DNA, 22 bp, Artificial Sequence
  chemically synthesized
aacctattggttgccatgtggg

SEQ ID NO: 43955 - DNA, 22 bp, Artificial Sequence
  chemically synthesized
ttggttgccatgtgggttgtga

SEQ ID NO: 43956 - DNA, 22 bp, Artificial Sequence
  chemically synthesized
gttgccatgtgggttgtgacca

SEQ ID NO: 43957 - DNA, 22 bp, Artificial Sequence
  chemically synthesized
ccatgtgggttgtgaccacttt

SEQ ID NO: 43958 - DNA, 22 bp, Artificial Sequence
  chemically synthesized
tgaccactttttgaccactatg

SEQ ID NO: 43959 - DNA, 22 bp, Artificial Sequence
  chemically synthesized
tttgaccactatgaacagtgct

SEQ ID NO: 43960 - DNA, 22 bp, Artificial Sequence
  chemically synthesized
ttgaccactatgaacagtgcta

SEQ ID NO: 43961 - DNA, 22 bp, Artificial Sequence
  chemically synthesized
tgaccactatgaacagtgctac

SEQ ID NO: 43962 - DNA, 22 bp, Artificial Sequence
  chemically synthesized
gaccactatgaacagtgctaca

SEQ ID NO: 43963 - DNA, 22 bp, Artificial Sequence
  chemically synthesized
accactatgaacagtgctacaa

SEQ ID NO: 43964 - DNA, 22 bp, Artificial Sequence
  chemically synthesized
tgaacagtgctacaatggacac

SEQ ID NO: 43965 - DNA, 22 bp, Artificial Sequence
  chemically synthesized
caatggacactgtgtagatgtg

SEQ ID NO: 43966 - DNA, 22 bp, Artificial Sequence
  chemically synthesized
tgtagatgtgtttataggaatg

SEQ ID NO: 43967 - DNA, 22 bp, Artificial Sequence
  chemically synthesized
ataggaatgtatgtctacattt

SEQ ID NO: 43968 - DNA, 22 bp, Artificial Sequence
  chemically synthesized
taggaatgtatgtctacatttc

SEQ ID NO: 43969 - DNA, 22 bp, Artificial Sequence
  chemically synthesized
catttctcttaggtaaacatct

SEQ ID NO: 43970 - DNA, 22 bp, Artificial Sequence
  chemically synthesized
ctcttaggtaaacatctaaggc

SEQ ID NO: 43971 - DNA, 22 bp, Artificial Sequence
  chemically synthesized
tcttaggtaaacatctaaggca

SEQ ID NO: 43972 - DNA, 22 bp, Artificial Sequence
  chemically synthesized
ttaggtaaacatctaaggcatt

SEQ ID NO: 43973 - DNA, 22 bp, Artificial Sequence
  chemically synthesized
aggtaaacatctaaggcatttc

SEQ ID NO: 43974 - DNA, 22 bp, Artificial Sequence
  chemically synthesized
ggtaaacatctaaggcatttcg

SEQ ID NO: 43975 - DNA, 22 bp, Artificial Sequence
  chemically synthesized
aggcatttcgagaacacagaaa

SEQ ID NO: 43976 - DNA, 22 bp, Artificial Sequence
  chemically synthesized
cgagaacacagaaaaggttttg

SEQ ID NO: 43977 - DNA, 22 bp, Artificial Sequence
  chemically synthesized
gagaacacagaaaaggttttga

SEQ ID NO: 43978 - DNA, 22 bp, Artificial Sequence
  chemically synthesized
tgagtttgagtccagggagccc

SEQ ID NO: 43979 - DNA, 22 bp, Artificial Sequence
  chemically synthesized
gagtttgagtccagggagccct

SEQ ID NO: 43980 - DNA, 22 bp, Artificial Sequence
  chemically synthesized
agtttgagtccagggagccctc

SEQ ID NO: 43981 - DNA, 22 bp, Artificial Sequence
  chemically synthesized
gagtccagggagccctcatttt

SEQ ID NO: 43982 - DNA, 22 bp, Artificial Sequence
  chemically synthesized
agtccagggagccctcattttg

SEQ ID NO: 43983 - DNA, 22 bp, Artificial Sequence
  chemically synthesized
attttgtcatcctccaggctgc

SEQ ID NO: 43984 - DNA, 22 bp, Artificial Sequence
  chemically synthesized
tgtcatcctccaggctgccccc

SEQ ID NO: 43985 - DNA, 22 bp, Artificial Sequence
  chemically synthesized
gtcatcctccaggctgcccccc

SEQ ID NO: 43986 - DNA, 22 bp, Artificial Sequence
  chemically synthesized
tcatcctccaggctgcccccct

SEQ ID NO: 43987 - DNA, 22 bp, Artificial Sequence
  chemically synthesized
caggctgcccccctcccacccc

SEQ ID NO: 43988 - DNA, 22 bp, Artificial Sequence
  chemically synthesized
cccccctcccaccccattccct

SEQ ID NO: 43989 - DNA, 22 bp, Artificial Sequence
  chemically synthesized
ccaccccattccctggagagtt

SEQ ID NO: 43990 - DNA, 22 bp, Artificial Sequence
  chemically synthesized
cctggagagttcaactccaaac

SEQ ID NO: 43991 - DNA, 22 bp, Artificial Sequence
  chemically synthesized
gagagttcaactccaaacccta

SEQ ID NO: 43992 - DNA, 22 bp, Artificial Sequence
  chemically synthesized
aactccaaaccctatatcccag

SEQ ID NO: 43993 - DNA, 22 bp, Artificial Sequence
  chemically synthesized
caaaccctatatcccagctatc

SEQ ID NO: 43994 - DNA, 22 bp, Artificial Sequence
  chemically synthesized
tatcccagctatctgtttggct

SEQ ID NO: 43995 - DNA, 22 bp, Artificial Sequence
  chemically synthesized
tctgtttggctcagctaccaaa

SEQ ID NO: 43996 - DNA, 22 bp, Artificial Sequence
  chemically synthesized
tttggctcagctaccaaatgtc

SEQ ID NO: 43997 - DNA, 22 bp, Artificial Sequence
  chemically synthesized
ggctcagctaccaaatgtcatc

SEQ ID NO: 43998 - DNA, 22 bp, Artificial Sequence
  chemically synthesized
gctcagctaccaaatgtcatcc

SEQ ID NO: 43999 - DNA, 22 bp, Artificial Sequence
  chemically synthesized
agctaccaaatgtcatcctatt

SEQ ID NO: 44000 - DNA, 22 bp, Artificial Sequence
  chemically synthesized
ccaaatgtcatcctattccgaa

SEQ ID NO: 44001 - DNA, 22 bp, Artificial Sequence
  chemically synthesized
ttccgaatagaaacctctccac

SEQ ID NO: 44002 - DNA, 22 bp, Artificial Sequence
  chemically synthesized
cgaatagaaacctctccactac

SEQ ID NO: 44003 - DNA, 22 bp, Artificial Sequence
  chemically synthesized
tccactacactaaggaaatgat

SEQ ID NO: 44004 - DNA, 22 bp, Artificial Sequence
  chemically synthesized
cactacactaaggaaatgatgg

SEQ ID NO: 44005 - DNA, 22 bp, Artificial Sequence
  chemically synthesized
cactaaggaaatgatgggaaga

SEQ ID NO: 44006 - DNA, 22 bp, Artificial Sequence
  chemically synthesized
aggaaatgatgggaagagaccc

SEQ ID NO: 44007 - DNA, 22 bp, Artificial Sequence
  chemically synthesized
ttaaaatgggcattcatttgaa

SEQ ID NO: 44008 - DNA, 22 bp, Artificial Sequence
  chemically synthesized
aaaatgggcattcatttgaatc

SEQ ID NO: 44009 - DNA, 22 bp, Artificial Sequence
  chemically synthesized
aaatgggcattcatttgaatca

SEQ ID NO: 44010 - DNA, 22 bp, Artificial Sequence
  chemically synthesized
atttgaatcaggccaaataaat

SEQ ID NO: 44011 - DNA, 22 bp, Artificial Sequence
  chemically synthesized
gaatcaggccaaataaattgga

SEQ ID NO: 44012 - DNA, 22 bp, Artificial Sequence
  chemically synthesized
aatcaggccaaataaattggac

SEQ ID NO: 44013 - DNA, 22 bp, Artificial Sequence
  chemically synthesized
gactctgggtcagagataactt

SEQ ID NO: 44014 - DNA, 22 bp, Artificial Sequence
  chemically synthesized
tgggtcagagataacttaagtg

SEQ ID NO: 44015 - DNA, 22 bp, Artificial Sequence
  chemically synthesized
ggtcagagataacttaagtgtg

SEQ ID NO: 44016 - DNA, 22 bp, Artificial Sequence
  chemically synthesized
aagtgtggtgttcggagtccta

SEQ ID NO: 44017 - DNA, 22 bp, Artificial Sequence
  chemically synthesized
agtgtggtgttcggagtcctaa

SEQ ID NO: 44018 - DNA, 22 bp, Artificial Sequence
  chemically synthesized
ggagtcctaagagcccccacta

SEQ ID NO: 44019 - DNA, 22 bp, Artificial Sequence
  chemically synthesized
agagcccccactagctcagaaa

SEQ ID NO: 44020 - DNA, 22 bp, Artificial Sequence
  chemically synthesized
gctcagaaatggacttagttga

SEQ ID NO: 44021 - DNA, 22 bp, Artificial Sequence
  chemically synthesized
agaaatggacttagttgacctc

SEQ ID NO: 44022 - DNA, 22 bp, Artificial Sequence
  chemically synthesized
agttgacctcccccattagcag

SEQ ID NO: 44023 - DNA, 22 bp, Artificial Sequence
  chemically synthesized
gttgacctcccccattagcagc

SEQ ID NO: 44024 - DNA, 22 bp, Artificial Sequence
  chemically synthesized
acctcccccattagcagcatgg

SEQ ID NO: 44025 - DNA, 22 bp, Artificial Sequence
  chemically synthesized
ccccattagcagcatggagagt

SEQ ID NO: 44026 - DNA, 22 bp, Artificial Sequence
  chemically synthesized
gcagcatggagagtcaaggaga

SEQ ID NO: 44027 - DNA, 22 bp, Artificial Sequence
  chemically synthesized
ctaccttgccaaaggccttggg

SEQ ID NO: 44028 - DNA, 22 bp, Artificial Sequence
  chemically synthesized
taccttgccaaaggccttggga

SEQ ID NO: 44029 - DNA, 22 bp, Artificial Sequence
  chemically synthesized
ccttgccaaaggccttgggaag

SEQ ID NO: 44030 - DNA, 22 bp, Artificial Sequence
  chemically synthesized
gccaaaggccttgggaagaaag

SEQ ID NO: 44031 - DNA, 22 bp, Artificial Sequence
  chemically synthesized
ccaaaggccttgggaagaaaga

SEQ ID NO: 44032 - DNA, 22 bp, Artificial Sequence
  chemically synthesized
gggaagaaagacagcatcaagg

SEQ ID NO: 44033 - DNA, 22 bp, Artificial Sequence
  chemically synthesized
ggaagaaagacagcatcaaggt

SEQ ID NO: 44034 - DNA, 22 bp, Artificial Sequence
  chemically synthesized
acacaacactccagggaggcag

SEQ ID NO: 44035 - DNA, 22 bp, Artificial Sequence
  chemically synthesized
cagggaggcagctgctgcccag

SEQ ID NO: 44036 - DNA, 22 bp, Artificial Sequence
  chemically synthesized
ctgcccagtgctgtggacagca

SEQ ID NO: 44037 - DNA, 22 bp, Artificial Sequence
  chemically synthesized
cccagtgctgtggacagcaaag

SEQ ID NO: 44038 - DNA, 22 bp, Artificial Sequence
  chemically synthesized
tggacagcaaagcttcagtgca

SEQ ID NO: 44039 - DNA, 22 bp, Artificial Sequence
  chemically synthesized
cagtgcaggaaattaagattcc

SEQ ID NO: 44040 - DNA, 22 bp, Artificial Sequence
  chemically synthesized
agtgcaggaaattaagattccc

SEQ ID NO: 44041 - DNA, 22 bp, Artificial Sequence
  chemically synthesized
agattccccctgcctccccctc

SEQ ID NO: 44042 - DNA, 22 bp, Artificial Sequence
  chemically synthesized
cccctgcctccccctcccccat

SEQ ID NO: 44043 - DNA, 22 bp, Artificial Sequence
  chemically synthesized
cctccccctcccccatcctcat

SEQ ID NO: 44044 - DNA, 22 bp, Artificial Sequence
  chemically synthesized
cccctcccccatcctcatcagc

SEQ ID NO: 44045 - DNA, 22 bp, Artificial Sequence
  chemically synthesized
ccccatcctcatcagcttggcc

SEQ ID NO: 44046 - DNA, 22 bp, Artificial Sequence
  chemically synthesized
atcagcttggccatggcagggc

SEQ ID NO: 44047 - DNA, 22 bp, Artificial Sequence
  chemically synthesized
ggccatggcagggctgggggat

SEQ ID NO: 44048 - DNA, 22 bp, Artificial Sequence
  chemically synthesized
gccatggcagggctgggggatc

SEQ ID NO: 44049 - DNA, 22 bp, Artificial Sequence
  chemically synthesized
ggggatcagaggtgaacaggaa

SEQ ID NO: 44050 - DNA, 22 bp, Artificial Sequence
  chemically synthesized
ggggagacagggcctccagtgg

SEQ ID NO: 44051 - DNA, 22 bp, Artificial Sequence
  chemically synthesized
cagtgggaccagagctgagtgg

SEQ ID NO: 44052 - DNA, 22 bp, Artificial Sequence
  chemically synthesized
agtggcctcaggcagtggcgga

SEQ ID NO: 44053 - DNA, 22 bp, Artificial Sequence
  chemically synthesized
aggcagtggcggaagctgatta

SEQ ID NO: 44054 - DNA, 22 bp, Artificial Sequence
  chemically synthesized
attaaaggaaggtacggggagt

SEQ ID NO: 44055 - DNA, 22 bp, Artificial Sequence
  chemically synthesized
aaggaaggtacggggagtggag

SEQ ID NO: 44056 - DNA, 22 bp, Artificial Sequence
  chemically synthesized
agacaacaatgcaagggggaga

SEQ ID NO: 44057 - DNA, 22 bp, Artificial Sequence
  chemically synthesized
gacaacaatgcaagggggagaa

SEQ ID NO: 44058 - DNA, 22 bp, Artificial Sequence
  chemically synthesized
aagaaaacagaacagagaccac

SEQ ID NO: 44059 - DNA, 22 bp, Artificial Sequence
  chemically synthesized
ctggcaataaacagagagaaag

SEQ ID NO: 44060 - DNA, 22 bp, Artificial Sequence
  chemically synthesized
gcaataaacagagagaaagtga

SEQ ID NO: 44061 - DNA, 22 bp, Artificial Sequence
  chemically synthesized
cattacttaagaaacctgagca

SEQ ID NO: 44062 - DNA, 22 bp, Artificial Sequence
  chemically synthesized
cttaagaaacctgagcacattc

SEQ ID NO: 44063 - DNA, 22 bp, Artificial Sequence
  chemically synthesized
aagaaacctgagcacattctta

SEQ ID NO: 44064 - DNA, 22 bp, Artificial Sequence
  chemically synthesized
agaaacctgagcacattcttac

SEQ ID NO: 44065 - DNA, 22 bp, Artificial Sequence
  chemically synthesized
agcacattcttacgcctagggc

SEQ ID NO: 44066 - DNA, 22 bp, Artificial Sequence
  chemically synthesized
ttacgcctagggcaataaatac

SEQ ID NO: 44067 - DNA, 22 bp, Artificial Sequence
  chemically synthesized
acgcctagggcaataaatacat

SEQ ID NO: 44068 - DNA, 22 bp, Artificial Sequence
  chemically synthesized
cgcctagggcaataaatacatc

SEQ ID NO: 44069 - DNA, 22 bp, Artificial Sequence
  chemically synthesized
gggcaataaatacatccttgag

SEQ ID NO: 44070 - DNA, 22 bp, Artificial Sequence
  chemically synthesized
gagctacacaggctaagcaaga

SEQ ID NO: 44071 - DNA, 22 bp, Artificial Sequence
  chemically synthesized
agctacacaggctaagcaagag

SEQ ID NO: 44072 - DNA, 22 bp, Artificial Sequence
  chemically synthesized
cacaggctaagcaagagtgaga

SEQ ID NO: 44073 - DNA, 22 bp, Artificial Sequence
  chemically synthesized
agcaagagtgagagagggtgat

SEQ ID NO: 44074 - DNA, 22 bp, Artificial Sequence
  chemically synthesized
acaggccacatgggagagtggg

SEQ ID NO: 44075 - DNA, 22 bp, Artificial Sequence
  chemically synthesized
ggagctgggagtttggcttctc

SEQ ID NO: 44076 - DNA, 22 bp, Artificial Sequence
  chemically synthesized
ggagtttggcttctcatctgtg

SEQ ID NO: 44077 - DNA, 22 bp, Artificial Sequence
  chemically synthesized
ggcttctcatctgtgcatggcc

SEQ ID NO: 44078 - DNA, 22 bp, Artificial Sequence
  chemically synthesized
gcttctcatctgtgcatggcct

SEQ ID NO: 44079 - DNA, 22 bp, Artificial Sequence
  chemically synthesized
ctcatctgtgcatggcctctaa

SEQ ID NO: 44080 - DNA, 22 bp, Artificial Sequence
  chemically synthesized
tcatctgtgcatggcctctaaa

SEQ ID NO: 44081 - DNA, 22 bp, Artificial Sequence
  chemically synthesized
atctgtgcatggcctctaaact

SEQ ID NO: 44082 - DNA, 22 bp, Artificial Sequence
  chemically synthesized
tgcatggcctctaaactgggca

SEQ ID NO: 44083 - DNA, 22 bp, Artificial Sequence
  chemically synthesized
taaactgggcagtgaccatggc

SEQ ID NO: 44084 - DNA, 22 bp, Artificial Sequence
  chemically synthesized
aactgggcagtgaccatggcct

SEQ ID NO: 44085 - DNA, 22 bp, Artificial Sequence
  chemically synthesized
ggcagtgaccatggcctggtca

SEQ ID NO: 44086 - DNA, 22 bp, Artificial Sequence
  chemically synthesized
gtcacctccccactctggacct

SEQ ID NO: 44087 - DNA, 22 bp, Artificial Sequence
  chemically synthesized
cccactctggacctgggttgcc

SEQ ID NO: 44088 - DNA, 22 bp, Artificial Sequence
  chemically synthesized
tggacctgggttgcccctctgt

SEQ ID NO: 44089 - DNA, 22 bp, Artificial Sequence
  chemically synthesized
gacctgggttgcccctctgtaa

SEQ ID NO: 44090 - DNA, 22 bp, Artificial Sequence
  chemically synthesized
ggttgcccctctgtaaacaagg

SEQ ID NO: 44091 - DNA, 22 bp, Artificial Sequence
  chemically synthesized
cccctctgtaaacaaggaggtt

SEQ ID NO: 44092 - DNA, 22 bp, Artificial Sequence
  chemically synthesized
tgtaaacaaggaggttgtaata

SEQ ID NO: 44093 - DNA, 22 bp, Artificial Sequence
  chemically synthesized
taaacaaggaggttgtaataaa

SEQ ID NO: 44094 - DNA, 22 bp, Artificial Sequence
  chemically synthesized
taataaattatctccaataccc

SEQ ID NO: 44095 - DNA, 22 bp, Artificial Sequence
  chemically synthesized
tctccaataccctaatgtctta

SEQ ID NO: 44096 - DNA, 22 bp, Artificial Sequence
  chemically synthesized
caataccctaatgtcttataaa

SEQ ID NO: 44097 - DNA, 22 bp, Artificial Sequence
  chemically synthesized
atgtcttataaatcttatgcaa

SEQ ID NO: 44098 - DNA, 22 bp, Artificial Sequence
  chemically synthesized
ataaatcttatgcaatttttgc

SEQ ID NO: 44099 - DNA, 22 bp, Artificial Sequence
  chemically synthesized
taaatcttatgcaatttttgcc

SEQ ID NO: 44100 - DNA, 22 bp, Artificial Sequence
  chemically synthesized
atgcaatttttgccaagatggg

SEQ ID NO: 44101 - DNA, 22 bp, Artificial Sequence
  chemically synthesized
tgcaatttttgccaagatggga

SEQ ID NO: 44102 - DNA, 22 bp, Artificial Sequence
  chemically synthesized
ttgccaagatgggagtatgggg

SEQ ID NO: 44103 - DNA, 22 bp, Artificial Sequence
  chemically synthesized
tgccaagatgggagtatgggga

SEQ ID NO: 44104 - DNA, 22 bp, Artificial Sequence
  chemically synthesized
gccaagatgggagtatggggag

SEQ ID NO: 44105 - DNA, 22 bp, Artificial Sequence
  chemically synthesized
ccaagatgggagtatggggaga

SEQ ID NO: 44106 - DNA, 22 bp, Artificial Sequence
  chemically synthesized
agtgagatgagatatcaaaggg

SEQ ID NO: 44107 - DNA, 22 bp, Artificial Sequence
  chemically synthesized
attccatctccctaatctccaa

SEQ ID NO: 44108 - DNA, 22 bp, Artificial Sequence
  chemically synthesized
catctccctaatctccaattgg

SEQ ID NO: 44109 - DNA, 22 bp, Artificial Sequence
  chemically synthesized
cctaatctccaattggcaaagc

SEQ ID NO: 44110 - DNA, 22 bp, Artificial Sequence
  chemically synthesized
atctccaattggcaaagccaga

SEQ ID NO: 44111 - DNA, 22 bp, Artificial Sequence
  chemically synthesized
caattggcaaagccagacttgg

SEQ ID NO: 44112 - DNA, 22 bp, Artificial Sequence
  chemically synthesized
gcaaagccagacttggggcaat

SEQ ID NO: 44113 - DNA, 22 bp, Artificial Sequence
  chemically synthesized
ggggcaatacagactggttctg

SEQ ID NO: 44114 - DNA, 22 bp, Artificial Sequence
  chemically synthesized
gggcaatacagactggttctgt

SEQ ID NO: 44115 - DNA, 22 bp, Artificial Sequence
  chemically synthesized
gttctgtgatgacaaataactc

SEQ ID NO: 44116 - DNA, 22 bp, Artificial Sequence
  chemically synthesized
tgtgatgacaaataactcctag

SEQ ID NO: 44117 - DNA, 22 bp, Artificial Sequence
  chemically synthesized
tgatgacaaataactcctagct

SEQ ID NO: 44118 - DNA, 22 bp, Artificial Sequence
  chemically synthesized
ctagctcattcctaatgattta

SEQ ID NO: 44119 - DNA, 22 bp, Artificial Sequence
  chemically synthesized
gctcattcctaatgatttatca

SEQ ID NO: 44120 - DNA, 22 bp, Artificial Sequence
  chemically synthesized
attcctaatgatttatcaccaa

SEQ ID NO: 44121 - DNA, 22 bp, Artificial Sequence
  chemically synthesized
ctaatgatttatcaccaaatgt

SEQ ID NO: 44122 - DNA, 22 bp, Artificial Sequence
  chemically synthesized
atgatttatcaccaaatgttct

SEQ ID NO: 44123 - DNA, 22 bp, Artificial Sequence
  chemically synthesized
atcaccaaatgttctttcttca

SEQ ID NO: 44124 - DNA, 22 bp, Artificial Sequence
  chemically synthesized
tcaccaaatgttctttcttcag

SEQ ID NO: 44125 - DNA, 22 bp, Artificial Sequence
  chemically synthesized
tttcttcagctggaatttaaaa

SEQ ID NO: 44126 - DNA, 22 bp, Artificial Sequence
  chemically synthesized
tcttcagctggaatttaaaata

SEQ ID NO: 44127 - DNA, 22 bp, Artificial Sequence
  chemically synthesized
cttcagctggaatttaaaatat

SEQ ID NO: 44128 - DNA, 22 bp, Artificial Sequence
  chemically synthesized
ttcagctggaatttaaaatatg

SEQ ID NO: 44129 - DNA, 22 bp, Artificial Sequence
  chemically synthesized
cagctggaatttaaaatatgga

SEQ ID NO: 44130 - DNA, 22 bp, Artificial Sequence
  chemically synthesized
agctggaatttaaaatatggac

SEQ ID NO: 44131 - DNA, 22 bp, Artificial Sequence
  chemically synthesized
gaatttaaaatatggactcatc

SEQ ID NO: 44132 - DNA, 22 bp, Artificial Sequence
  chemically synthesized
aaaatatggactcatccgtaaa

SEQ ID NO: 44133 - DNA, 22 bp, Artificial Sequence
  chemically synthesized
aaatatggactcatccgtaaaa

SEQ ID NO: 44134 - DNA, 22 bp, Artificial Sequence
  chemically synthesized
atccgtaaaataggaataataa

SEQ ID NO: 44135 - DNA, 22 bp, Artificial Sequence
  chemically synthesized
catagggtttgtatgaaaataa

SEQ ID NO: 44136 - DNA, 22 bp, Artificial Sequence
  chemically synthesized
atagggtttgtatgaaaataaa

SEQ ID NO: 44137 - DNA, 22 bp, Artificial Sequence
  chemically synthesized
gtatgaaaataaaatgagtgcg

SEQ ID NO: 44138 - DNA, 22 bp, Artificial Sequence
  chemically synthesized
tatgaaaataaaatgagtgcgt

SEQ ID NO: 44139 - DNA, 22 bp, Artificial Sequence
  chemically synthesized
gtaaagttcctagagcagagta

SEQ ID NO: 44140 - DNA, 22 bp, Artificial Sequence
  chemically synthesized
taaagttcctagagcagagtaa

SEQ ID NO: 44141 - DNA, 22 bp, Artificial Sequence
  chemically synthesized
ctagagcagagtaagtgctccg

SEQ ID NO: 44142 - DNA, 22 bp, Artificial Sequence
  chemically synthesized
gagcagagtaagtgctccgagc

SEQ ID NO: 44143 - DNA, 22 bp, Artificial Sequence
  chemically synthesized
cgagcttgtgaactaaaatgct

SEQ ID NO: 44144 - DNA, 22 bp, Artificial Sequence
  chemically synthesized
gtgaactaaaatgctgcctcct

SEQ ID NO: 44145 - DNA, 22 bp, Artificial Sequence
  chemically synthesized
tgaactaaaatgctgcctcctg

SEQ ID NO: 44146 - DNA, 22 bp, Artificial Sequence
  chemically synthesized
aaatgctgcctcctggtattta

SEQ ID NO: 44147 - DNA, 22 bp, Artificial Sequence
  chemically synthesized
cctcctggtatttattagttac

SEQ ID NO: 44148 - DNA, 22 bp, Artificial Sequence
  chemically synthesized
ctggtatttattagttacacct

SEQ ID NO: 44149 - DNA, 22 bp, Artificial Sequence
  chemically synthesized
gtatttattagttacacctcag

SEQ ID NO: 44150 - DNA, 22 bp, Artificial Sequence
  chemically synthesized
attagttacacctcagcagaaa

SEQ ID NO: 44151 - DNA, 22 bp, Artificial Sequence
  chemically synthesized
ttagttacacctcagcagaaac

SEQ ID NO: 44152 - DNA, 22 bp, Artificial Sequence
  chemically synthesized
gttacacctcagcagaaacaaa

SEQ ID NO: 44153 - DNA, 22 bp, Artificial Sequence
  chemically synthesized
cacctcagcagaaacaaagtta

SEQ ID NO: 44154 - DNA, 22 bp, Artificial Sequence
  chemically synthesized
agcagaaacaaagttatcaggc

SEQ ID NO: 44155 - DNA, 22 bp, Artificial Sequence
  chemically synthesized
tcaggccctttccccaattcct

SEQ ID NO: 44156 - DNA, 22 bp, Artificial Sequence
  chemically synthesized
tccccaattcctagtttgggtc

SEQ ID NO: 44157 - DNA, 22 bp, Artificial Sequence
  chemically synthesized
ccccaattcctagtttgggtca

SEQ ID NO: 44158 - DNA, 22 bp, Artificial Sequence
  chemically synthesized
cccaattcctagtttgggtcag

SEQ ID NO: 44159 - DNA, 22 bp, Artificial Sequence
  chemically synthesized
ctagtttgggtcagaagaaaag

SEQ ID NO: 44160 - DNA, 22 bp, Artificial Sequence
  chemically synthesized
gtttgggtcagaagaaaaggga

SEQ ID NO: 44161 - DNA, 22 bp, Artificial Sequence
  chemically synthesized
gggtcagaagaaaagggaaaag

SEQ ID NO: 44162 - DNA, 22 bp, Artificial Sequence
  chemically synthesized
ggtcagaagaaaagggaaaagg

SEQ ID NO: 44163 - DNA, 22 bp, Artificial Sequence
  chemically synthesized
ggaacacagatcctaacacagt

SEQ ID NO: 44164 - DNA, 22 bp, Artificial Sequence
  chemically synthesized
acacagtagctggtacctgata

SEQ ID NO: 44165 - DNA, 22 bp, Artificial Sequence
  chemically synthesized
gtacctgataggtgcctatatg

SEQ ID NO: 44166 - DNA, 22 bp, Artificial Sequence
  chemically synthesized
ataggtgcctatatgtgatgga

SEQ ID NO: 44167 - DNA, 22 bp, Artificial Sequence
  chemically synthesized
tatgtgatggatgggtggacag

SEQ ID NO: 44168 - DNA, 22 bp, Artificial Sequence
  chemically synthesized
tgaggaggggagagtgcagaca

SEQ ID NO: 44169 - DNA, 22 bp, Artificial Sequence
  chemically synthesized
cacctcctttacaattttggga

SEQ ID NO: 44170 - DNA, 22 bp, Artificial Sequence
  chemically synthesized
acctcctttacaattttgggag

SEQ ID NO: 44171 - DNA, 22 bp, Artificial Sequence
  chemically synthesized
ctttacaattttgggagtccac

SEQ ID NO: 44172 - DNA, 22 bp, Artificial Sequence
  chemically synthesized
tacaattttgggagtccacacg

SEQ ID NO: 44173 - DNA, 22 bp, Artificial Sequence
  chemically synthesized
acaattttgggagtccacacgg

SEQ ID NO: 44174 - DNA, 22 bp, Artificial Sequence
  chemically synthesized
caattttgggagtccacacggc

SEQ ID NO: 44175 - DNA, 22 bp, Artificial Sequence
  chemically synthesized
tgggagtccacacggcatggca

SEQ ID NO: 44176 - DNA, 22 bp, Artificial Sequence
  chemically synthesized
gggagtccacacggcatggcat

SEQ ID NO: 44177 - DNA, 22 bp, Artificial Sequence
  chemically synthesized
ggagtccacacggcatggcata

SEQ ID NO: 44178 - DNA, 22 bp, Artificial Sequence
  chemically synthesized
tttcattcccattgagaaataa

SEQ ID NO: 44179 - DNA, 22 bp, Artificial Sequence
  chemically synthesized
cattcccattgagaaataaaat

SEQ ID NO: 44180 - DNA, 22 bp, Artificial Sequence
  chemically synthesized
attcccattgagaaataaaatc

SEQ ID NO: 44181 - DNA, 22 bp, Artificial Sequence
  chemically synthesized
ccattgagaaataaaatccaat

SEQ ID NO: 44182 - DNA, 22 bp, Artificial Sequence
  chemically synthesized
agaaataaaatccaattctcca

SEQ ID NO: 44183 - DNA, 22 bp, Artificial Sequence
  chemically synthesized
tccatcaccaagagagccttcc

SEQ ID NO: 44184 - DNA, 22 bp, Artificial Sequence
  chemically synthesized
catcaccaagagagccttccga

SEQ ID NO: 44185 - DNA, 22 bp, Artificial Sequence
  chemically synthesized
ccgaaagaggcccccctgggca

SEQ ID NO: 44186 - DNA, 22 bp, Artificial Sequence
  chemically synthesized
cgaaagaggcccccctgggcaa

SEQ ID NO: 44187 - DNA, 22 bp, Artificial Sequence
  chemically synthesized
ggcaaacggccaccgatggaga

SEQ ID NO: 44188 - DNA, 22 bp, Artificial Sequence
  chemically synthesized
ccagtcctcttctaccccaccc

SEQ ID NO: 44189 - DNA, 22 bp, Artificial Sequence
  chemically synthesized
ttctaccccacccacgccccca

SEQ ID NO: 44190 - DNA, 22 bp, Artificial Sequence
  chemically synthesized
ctaccccacccacgcccccacc

SEQ ID NO: 44191 - DNA, 22 bp, Artificial Sequence
  chemically synthesized
taccccacccacgcccccaccc

SEQ ID NO: 44192 - DNA, 22 bp, Artificial Sequence
  chemically synthesized
ccccacccacgcccccacccta

SEQ ID NO: 44193 - DNA, 22 bp, Artificial Sequence
  chemically synthesized
atcagaggccaaacccttcctg

SEQ ID NO: 44194 - DNA, 22 bp, Artificial Sequence
  chemically synthesized
cctggagcctgtgataaaagca

SEQ ID NO: 44195 - DNA, 22 bp, Artificial Sequence
  chemically synthesized
ctggagcctgtgataaaagcaa

SEQ ID NO: 44196 - DNA, 22 bp, Artificial Sequence
  chemically synthesized
gagcctgtgataaaagcaactg

SEQ ID NO: 44197 - DNA, 22 bp, Artificial Sequence
  chemically synthesized
tgataaaagcaactgttagctt

SEQ ID NO: 44198 - DNA, 22 bp, Artificial Sequence
  chemically synthesized
ttagcttgcactagactagctt

SEQ ID NO: 44199 - DNA, 22 bp, Artificial Sequence
  chemically synthesized
gcttgcactagactagcttcaa

SEQ ID NO: 44200 - DNA, 22 bp, Artificial Sequence
  chemically synthesized
gcactagactagcttcaaagtt

SEQ ID NO: 44201 - DNA, 22 bp, Artificial Sequence
  chemically synthesized
cactagactagcttcaaagttg

SEQ ID NO: 44202 - DNA, 22 bp, Artificial Sequence
  chemically synthesized
gactagcttcaaagttgtattg

SEQ ID NO: 44203 - DNA, 22 bp, Artificial Sequence
  chemically synthesized
gcttcaaagttgtattgaccct

SEQ ID NO: 44204 - DNA, 22 bp, Artificial Sequence
  chemically synthesized
caaagttgtattgaccctggtg

SEQ ID NO: 44205 - DNA, 22 bp, Artificial Sequence
  chemically synthesized
aaagttgtattgaccctggtgt

SEQ ID NO: 44206 - DNA, 22 bp, Artificial Sequence
  chemically synthesized
tattgaccctggtgtgttatgt

SEQ ID NO: 44207 - DNA, 22 bp, Artificial Sequence
  chemically synthesized
accctggtgtgttatgtctaag

SEQ ID NO: 44208 - DNA, 22 bp, Artificial Sequence
  chemically synthesized
gtgtgttatgtctaagagtaga

SEQ ID NO: 44209 - DNA, 22 bp, Artificial Sequence
  chemically synthesized
tgtctaagagtagatgccatat

SEQ ID NO: 44210 - DNA, 22 bp, Artificial Sequence
  chemically synthesized
agagtagatgccatatctcttt

SEQ ID NO: 44211 - DNA, 22 bp, Artificial Sequence
  chemically synthesized
ttttctggcctatgttattacc

SEQ ID NO: 44212 - DNA, 22 bp, Artificial Sequence
  chemically synthesized
ttctggcctatgttattacctg

SEQ ID NO: 44213 - DNA, 22 bp, Artificial Sequence
  chemically synthesized
tctggcctatgttattacctgt

SEQ ID NO: 44214 - DNA, 22 bp, Artificial Sequence
  chemically synthesized
ctggcctatgttattacctgta

SEQ ID NO: 44215 - DNA, 22 bp, Artificial Sequence
  chemically synthesized
tggcctatgttattacctgtat

SEQ ID NO: 44216 - DNA, 22 bp, Artificial Sequence
  chemically synthesized
gcctatgttattacctgtatgg

SEQ ID NO: 44217 - DNA, 22 bp, Artificial Sequence
  chemically synthesized
tgttattacctgtatggacttt

SEQ ID NO: 44218 - DNA, 22 bp, Artificial Sequence
  chemically synthesized
ttacctgtatggactttgcact

SEQ ID NO: 44219 - DNA, 22 bp, Artificial Sequence
  chemically synthesized
cctgtatggactttgcactgga

SEQ ID NO: 44220 - DNA, 22 bp, Artificial Sequence
  chemically synthesized
tatggactttgcactggaatca

SEQ ID NO: 44221 - DNA, 22 bp, Artificial Sequence
  chemically synthesized
tgcactggaatcagctatctgc

SEQ ID NO: 44222 - DNA, 22 bp, Artificial Sequence
  chemically synthesized
gcactggaatcagctatctgct

SEQ ID NO: 44223 - DNA, 22 bp, Artificial Sequence
  chemically synthesized
cactggaatcagctatctgctc

SEQ ID NO: 44224 - DNA, 22 bp, Artificial Sequence
  chemically synthesized
gaatcagctatctgctcttact

SEQ ID NO: 44225 - DNA, 22 bp, Artificial Sequence
  chemically synthesized
tctgctcttacttatgcacacc

SEQ ID NO: 44226 - DNA, 22 bp, Artificial Sequence
  chemically synthesized
ctcttacttatgcacacctggg

SEQ ID NO: 44227 - DNA, 22 bp, Artificial Sequence
  chemically synthesized
ttacttatgcacacctggggca

SEQ ID NO: 44228 - DNA, 22 bp, Artificial Sequence
  chemically synthesized
acttatgcacacctggggcata

SEQ ID NO: 44229 - DNA, 22 bp, Artificial Sequence
  chemically synthesized
cttatgcacacctggggcatag

SEQ ID NO: 44230 - DNA, 22 bp, Artificial Sequence
  chemically synthesized
atgcacacctggggcatagagc

SEQ ID NO: 44231 - DNA, 22 bp, Artificial Sequence
  chemically synthesized
tgcacacctggggcatagagcc

SEQ ID NO: 44232 - DNA, 22 bp, Artificial Sequence
  chemically synthesized
gggcatagagccagccctgtat

SEQ ID NO: 44233 - DNA, 22 bp, Artificial Sequence
  chemically synthesized
tatcgcttttcagccatctcac

SEQ ID NO: 44234 - DNA, 22 bp, Artificial Sequence
  chemically synthesized
ttcagccatctcactacagata

SEQ ID NO: 44235 - DNA, 22 bp, Artificial Sequence
  chemically synthesized
tcagccatctcactacagataa

SEQ ID NO: 44236 - DNA, 22 bp, Artificial Sequence
  chemically synthesized
cagccatctcactacagataac

SEQ ID NO: 44237 - DNA, 22 bp, Artificial Sequence
  chemically synthesized
agccatctcactacagataact

SEQ ID NO: 44238 - DNA, 22 bp, Artificial Sequence
  chemically synthesized
actacagataactcccaagtcc

SEQ ID NO: 44239 - DNA, 22 bp, Artificial Sequence
  chemically synthesized
cagataactcccaagtcctgtc

SEQ ID NO: 44240 - DNA, 22 bp, Artificial Sequence
  chemically synthesized
ccaagtcctgtctagctgcctt

SEQ ID NO: 44241 - DNA, 22 bp, Artificial Sequence
  chemically synthesized
tctagctgccttccttatcaca

SEQ ID NO: 44242 - DNA, 22 bp, Artificial Sequence
  chemically synthesized
gctgccttccttatcacaggaa

SEQ ID NO: 44243 - DNA, 22 bp, Artificial Sequence
  chemically synthesized
ccttccttatcacaggaatagc

SEQ ID NO: 44244 - DNA, 22 bp, Artificial Sequence
  chemically synthesized
ccttatcacaggaatagcaccc

SEQ ID NO: 44245 - DNA, 22 bp, Artificial Sequence
  chemically synthesized
cttatcacaggaatagcaccca

SEQ ID NO: 44246 - DNA, 22 bp, Artificial Sequence
  chemically synthesized
atcacaggaatagcacccaagg

SEQ ID NO: 44247 - DNA, 22 bp, Artificial Sequence
  chemically synthesized
tcacaggaatagcacccaaggt

SEQ ID NO: 44248 - DNA, 22 bp, Artificial Sequence
  chemically synthesized
agagtagaaccccctataaact

SEQ ID NO: 44249 - DNA, 22 bp, Artificial Sequence
  chemically synthesized
taaactagtctggtttgcccat

SEQ ID NO: 44250 - DNA, 22 bp, Artificial Sequence
  chemically synthesized
gtctggtttgcccatggggcac

SEQ ID NO: 44251 - DNA, 22 bp, Artificial Sequence
  chemically synthesized
gtttgcccatggggcacagtca

SEQ ID NO: 44252 - DNA, 22 bp, Artificial Sequence
  chemically synthesized
gcccatggggcacagtcaggct

SEQ ID NO: 44253 - DNA, 22 bp, Artificial Sequence
  chemically synthesized
cccatggggcacagtcaggctg

SEQ ID NO: 44254 - DNA, 22 bp, Artificial Sequence
  chemically synthesized
ttttccagggtggggtgcagac

SEQ ID NO: 44255 - DNA, 22 bp, Artificial Sequence
  chemically synthesized
tccagggtggggtgcagacatt

SEQ ID NO: 44256 - DNA, 22 bp, Artificial Sequence
  chemically synthesized
ccagggtggggtgcagacattc

SEQ ID NO: 44257 - DNA, 22 bp, Artificial Sequence
  chemically synthesized
cagggtggggtgcagacattct

SEQ ID NO: 44258 - DNA, 22 bp, Artificial Sequence
  chemically synthesized
tctgcctgttgtgatgcttaca

SEQ ID NO: 44259 - DNA, 22 bp, Artificial Sequence
  chemically synthesized
tgcctgttgtgatgcttacata

SEQ ID NO: 44260 - DNA, 22 bp, Artificial Sequence
  chemically synthesized
cctgttgtgatgcttacatata

SEQ ID NO: 44261 - DNA, 22 bp, Artificial Sequence
  chemically synthesized
ttgtgatgcttacatataacgt

SEQ ID NO: 44262 - DNA, 22 bp, Artificial Sequence
  chemically synthesized
tgatgcttacatataacgtcat

SEQ ID NO: 44263 - DNA, 22 bp, Artificial Sequence
  chemically synthesized
acatataacgtcataacagaca

SEQ ID NO: 44264 - DNA, 22 bp, Artificial Sequence
  chemically synthesized
catataacgtcataacagacac

SEQ ID NO: 44265 - DNA, 22 bp, Artificial Sequence
  chemically synthesized
tgatccctgtggtttgagagtt

SEQ ID NO: 44266 - DNA, 22 bp, Artificial Sequence
  chemically synthesized
tggtttgagagtttggagcttc

SEQ ID NO: 44267 - DNA, 22 bp, Artificial Sequence
  chemically synthesized
gagagtttggagcttccctaaa

SEQ ID NO: 44268 - DNA, 22 bp, Artificial Sequence
  chemically synthesized
agagtttggagcttccctaaaa

SEQ ID NO: 44269 - DNA, 22 bp, Artificial Sequence
  chemically synthesized
ggagcttccctaaaagtcaaaa

SEQ ID NO: 44270 - DNA, 22 bp, Artificial Sequence
  chemically synthesized
gagcttccctaaaagtcaaaat

SEQ ID NO: 44271 - DNA, 22 bp, Artificial Sequence
  chemically synthesized
ccctaaaagtcaaaatattctc

SEQ ID NO: 44272 - DNA, 22 bp, Artificial Sequence
  chemically synthesized
cctaaaagtcaaaatattctca

SEQ ID NO: 44273 - DNA, 22 bp, Artificial Sequence
  chemically synthesized
aaagtcaaaatattctcaatgg

SEQ ID NO: 44274 - DNA, 22 bp, Artificial Sequence
  chemically synthesized
tcaatgggccctcaatcagcac

SEQ ID NO: 44275 - DNA, 22 bp, Artificial Sequence
  chemically synthesized
aatgggccctcaatcagcacat

SEQ ID NO: 44276 - DNA, 22 bp, Artificial Sequence
  chemically synthesized
aatcagcacatacacacaaaag

SEQ ID NO: 44277 - DNA, 22 bp, Artificial Sequence
  chemically synthesized
gaaaactgtaattcttttcctg

SEQ ID NO: 44278 - DNA, 22 bp, Artificial Sequence
  chemically synthesized
taattcttttcctgctcaaaga

SEQ ID NO: 44279 - DNA, 22 bp, Artificial Sequence
  chemically synthesized
ttttcctgctcaaagacaggca

SEQ ID NO: 44280 - DNA, 22 bp, Artificial Sequence
  chemically synthesized
ttcctgctcaaagacaggcaat

SEQ ID NO: 44281 - DNA, 22 bp, Artificial Sequence
  chemically synthesized
tcctgctcaaagacaggcaatt

SEQ ID NO: 44282 - DNA, 22 bp, Artificial Sequence
  chemically synthesized
cctgctcaaagacaggcaattc

SEQ ID NO: 44283 - DNA, 22 bp, Artificial Sequence
  chemically synthesized
ctgctcaaagacaggcaattca

SEQ ID NO: 44284 - DNA, 22 bp, Artificial Sequence
  chemically synthesized
ctcaaagacaggcaattcaata

SEQ ID NO: 44285 - DNA, 22 bp, Artificial Sequence
  chemically synthesized
aaagacaggcaattcaataccc

SEQ ID NO: 44286 - DNA, 22 bp, Artificial Sequence
  chemically synthesized
aataccccttcccccaaccaaa

SEQ ID NO: 44287 - DNA, 22 bp, Artificial Sequence
  chemically synthesized
cccccaaccaaaaacccttgcc

SEQ ID NO: 44288 - DNA, 22 bp, Artificial Sequence
  chemically synthesized
ccccaaccaaaaacccttgcca

SEQ ID NO: 44289 - DNA, 22 bp, Artificial Sequence
  chemically synthesized
gccaccatgggagcctggggca

SEQ ID NO: 44290 - DNA, 22 bp, Artificial Sequence
  chemically synthesized
ccaccatgggagcctggggcag

SEQ ID NO: 44291 - DNA, 22 bp, Artificial Sequence
  chemically synthesized
gggcagagaaggcacagtgaag

SEQ ID NO: 44292 - DNA, 22 bp, Artificial Sequence
  chemically synthesized
taattccaggctctaaatggtg

SEQ ID NO: 44293 - DNA, 22 bp, Artificial Sequence
  chemically synthesized
caggctctaaatggtgctgtca

SEQ ID NO: 44294 - DNA, 22 bp, Artificial Sequence
  chemically synthesized
taaatggtgctgtcatttttct

SEQ ID NO: 44295 - DNA, 22 bp, Artificial Sequence
  chemically synthesized
aatggtgctgtcatttttctga

SEQ ID NO: 44296 - DNA, 22 bp, Artificial Sequence
  chemically synthesized
tcatttttctgagagtctctaa

SEQ ID NO: 44297 - DNA, 22 bp, Artificial Sequence
  chemically synthesized
ttctgagagtctctaaattaca

SEQ ID NO: 44298 - DNA, 22 bp, Artificial Sequence
  chemically synthesized
tctgagagtctctaaattacaa

SEQ ID NO: 44299 - DNA, 22 bp, Artificial Sequence
  chemically synthesized
ctgagagtctctaaattacaag

SEQ ID NO: 44300 - DNA, 22 bp, Artificial Sequence
  chemically synthesized
tgagagtctctaaattacaagg

SEQ ID NO: 44301 - DNA, 22 bp, Artificial Sequence
  chemically synthesized
agagtctctaaattacaagggt

SEQ ID NO: 44302 - DNA, 22 bp, Artificial Sequence
  chemically synthesized
taaattacaagggtgttttcac

SEQ ID NO: 44303 - DNA, 22 bp, Artificial Sequence
  chemically synthesized
aattacaagggtgttttcacta

SEQ ID NO: 44304 - DNA, 22 bp, Artificial Sequence
  chemically synthesized
caagggtgttttcactattctt

SEQ ID NO: 44305 - DNA, 22 bp, Artificial Sequence
  chemically synthesized
tcactattcttagctatttttt

SEQ ID NO: 44306 - DNA, 22 bp, Artificial Sequence
  chemically synthesized
cactattcttagctatttttta

SEQ ID NO: 44307 - DNA, 22 bp, Artificial Sequence
  chemically synthesized
actattcttagctattttttaa

SEQ ID NO: 44308 - DNA, 22 bp, Artificial Sequence
  chemically synthesized
ttcttagctattttttaaaaca

SEQ ID NO: 44309 - DNA, 22 bp, Artificial Sequence
  chemically synthesized
ttagctattttttaaaacacct

SEQ ID NO: 44310 - DNA, 22 bp, Artificial Sequence
  chemically synthesized
agctattttttaaaacacctaa

SEQ ID NO: 44311 - DNA, 22 bp, Artificial Sequence
  chemically synthesized
gctattttttaaaacacctaag

SEQ ID NO: 44312 - DNA, 22 bp, Artificial Sequence
  chemically synthesized
ttttttaaaacacctaagaaac

SEQ ID NO: 44313 - DNA, 22 bp, Artificial Sequence
  chemically synthesized
tttaaaacacctaagaaacata

SEQ ID NO: 44314 - DNA, 22 bp, Artificial Sequence
  chemically synthesized
ttaaaacacctaagaaacatac

SEQ ID NO: 44315 - DNA, 22 bp, Artificial Sequence
  chemically synthesized
taaaacacctaagaaacatact

SEQ ID NO: 44316 - DNA, 22 bp, Artificial Sequence
  chemically synthesized
aaaacacctaagaaacatactg

SEQ ID NO: 44317 - DNA, 22 bp, Artificial Sequence
  chemically synthesized
aaacacctaagaaacatactgc

SEQ ID NO: 44318 - DNA, 22 bp, Artificial Sequence
  chemically synthesized
agaaacatactgcagctctgga

SEQ ID NO: 44319 - DNA, 22 bp, Artificial Sequence
  chemically synthesized
cagctctggaaaagagaacaaa

SEQ ID NO: 44320 - DNA, 22 bp, Artificial Sequence
  chemically synthesized
tggaaaagagaacaaacaaacc

SEQ ID NO: 44321 - DNA, 22 bp, Artificial Sequence
  chemically synthesized
gaaaagagaacaaacaaaccaa

SEQ ID NO: 44322 - DNA, 22 bp, Artificial Sequence
  chemically synthesized
atatgtgaaaagtcaattgata

SEQ ID NO: 44323 - DNA, 22 bp, Artificial Sequence
  chemically synthesized
ataatgaaggctttaggataac

SEQ ID NO: 44324 - DNA, 22 bp, Artificial Sequence
  chemically synthesized
taggataaccggaggggagatg

SEQ ID NO: 44325 - DNA, 22 bp, Artificial Sequence
  chemically synthesized
aggataaccggaggggagatga

SEQ ID NO: 44326 - DNA, 22 bp, Artificial Sequence
  chemically synthesized
ggataaccggaggggagatgat

SEQ ID NO: 44327 - DNA, 22 bp, Artificial Sequence
  chemically synthesized
aaagcaatgcacctgtgcagga

SEQ ID NO: 44328 - DNA, 22 bp, Artificial Sequence
  chemically synthesized
tgcaggaaatggattacggaaa

SEQ ID NO: 44329 - DNA, 22 bp, Artificial Sequence
  chemically synthesized
cggaaacagggaattgttcatg

SEQ ID NO: 44330 - DNA, 22 bp, Artificial Sequence
  chemically synthesized
ttcatgaaatcccagaaaacca

SEQ ID NO: 44331 - DNA, 22 bp, Artificial Sequence
  chemically synthesized
atgaaatcccagaaaaccagaa

SEQ ID NO: 44332 - DNA, 22 bp, Artificial Sequence
  chemically synthesized
tggaagtcggaaaaacaaatca

SEQ ID NO: 44333 - DNA, 22 bp, Artificial Sequence
  chemically synthesized
gaagtcggaaaaacaaatcatg

SEQ ID NO: 44334 - DNA, 22 bp, Artificial Sequence
  chemically synthesized
aagcaatggaagtccaatacac

SEQ ID NO: 44335 - DNA, 22 bp, Artificial Sequence
  chemically synthesized
agcaatggaagtccaatacacg

SEQ ID NO: 44336 - DNA, 22 bp, Artificial Sequence
  chemically synthesized
acagaatgccttgtcccacgag

SEQ ID NO: 44337 - DNA, 22 bp, Artificial Sequence
  chemically synthesized
cagaatgccttgtcccacgagg

SEQ ID NO: 44338 - DNA, 22 bp, Artificial Sequence
  chemically synthesized
gtcccacgaggcaacacaggct

SEQ ID NO: 44339 - DNA, 22 bp, Artificial Sequence
  chemically synthesized
tcccacgaggcaacacaggcta

SEQ ID NO: 44340 - DNA, 22 bp, Artificial Sequence
  chemically synthesized
ccacagatgggggacagggtgg

SEQ ID NO: 44341 - DNA, 22 bp, Artificial Sequence
  chemically synthesized
ctgaggggcaaagggatagccc

SEQ ID NO: 44342 - DNA, 22 bp, Artificial Sequence
  chemically synthesized
aggggcaaagggatagccctat

SEQ ID NO: 44343 - DNA, 22 bp, Artificial Sequence
  chemically synthesized
tgaggcaagtgtccagggcaga

SEQ ID NO: 44344 - DNA, 22 bp, Artificial Sequence
  chemically synthesized
gagctttgtgaaaccatttccc

SEQ ID NO: 44345 - DNA, 22 bp, Artificial Sequence
  chemically synthesized
tgtgaaaccatttcccaggcag

SEQ ID NO: 44346 - DNA, 22 bp, Artificial Sequence
  chemically synthesized
gtgaaaccatttcccaggcaga

SEQ ID NO: 44347 - DNA, 22 bp, Artificial Sequence
  chemically synthesized
tgaaaccatttcccaggcagag

SEQ ID NO: 44348 - DNA, 22 bp, Artificial Sequence
  chemically synthesized
cccaggcagagacagagcacta

SEQ ID NO: 44349 - DNA, 22 bp, Artificial Sequence
  chemically synthesized
ccaggcagagacagagcactag

SEQ ID NO: 44350 - DNA, 22 bp, Artificial Sequence
  chemically synthesized
ggctggtgctgccagtctgaca

SEQ ID NO: 44351 - DNA, 22 bp, Artificial Sequence
  chemically synthesized
gtgctgccagtctgacaataag

SEQ ID NO: 44352 - DNA, 22 bp, Artificial Sequence
  chemically synthesized
ccagtctgacaataagtctgcc

SEQ ID NO: 44353 - DNA, 22 bp, Artificial Sequence
  chemically synthesized
acaataagtctgccattgtcct

SEQ ID NO: 44354 - DNA, 22 bp, Artificial Sequence
  chemically synthesized
ccattgtcctctggtcagctct

SEQ ID NO: 44355 - DNA, 22 bp, Artificial Sequence
  chemically synthesized
tcctctggtcagctctggacac

SEQ ID NO: 44356 - DNA, 22 bp, Artificial Sequence
  chemically synthesized
tggtcagctctggacacacagc

SEQ ID NO: 44357 - DNA, 22 bp, Artificial Sequence
  chemically synthesized
gtcagctctggacacacagcaa

SEQ ID NO: 44358 - DNA, 22 bp, Artificial Sequence
  chemically synthesized
tggacacacagcaaaagtgagt

SEQ ID NO: 44359 - DNA, 22 bp, Artificial Sequence
  chemically synthesized
gacacacagcaaaagtgagttc

SEQ ID NO: 44360 - DNA, 22 bp, Artificial Sequence
  chemically synthesized
agagtagcctgaagcaggaaag

SEQ ID NO: 44361 - DNA, 22 bp, Artificial Sequence
  chemically synthesized
aagcaggaaagagggaagagag

SEQ ID NO: 44362 - DNA, 22 bp, Artificial Sequence
  chemically synthesized
tcttccactttgctgcaggttc

SEQ ID NO: 44363 - DNA, 22 bp, Artificial Sequence
  chemically synthesized
ccactttgctgcaggttcaagg

SEQ ID NO: 44364 - DNA, 22 bp, Artificial Sequence
  chemically synthesized
cactttgctgcaggttcaaggc

SEQ ID NO: 44365 - DNA, 22 bp, Artificial Sequence
  chemically synthesized
tgctgcaggttcaaggcaagga

SEQ ID NO: 44366 - DNA, 22 bp, Artificial Sequence
  chemically synthesized
gctgcaggttcaaggcaaggat

SEQ ID NO: 44367 - DNA, 22 bp, Artificial Sequence
  chemically synthesized
ctgcaggttcaaggcaaggatt

SEQ ID NO: 44368 - DNA, 22 bp, Artificial Sequence
  chemically synthesized
caggttcaaggcaaggatttga

SEQ ID NO: 44369 - DNA, 22 bp, Artificial Sequence
  chemically synthesized
aaggcaaggatttgagacagtt

SEQ ID NO: 44370 - DNA, 22 bp, Artificial Sequence
  chemically synthesized
gagacagttaccccttctggaa

SEQ ID NO: 44371 - DNA, 22 bp, Artificial Sequence
  chemically synthesized
agacagttaccccttctggaag

SEQ ID NO: 44372 - DNA, 22 bp, Artificial Sequence
  chemically synthesized
ccccttctggaagagcctggtg

SEQ ID NO: 44373 - DNA, 22 bp, Artificial Sequence
  chemically synthesized
ctggaagagcctggtgagtaca

SEQ ID NO: 44374 - DNA, 22 bp, Artificial Sequence
  chemically synthesized
tggaagagcctggtgagtacat

SEQ ID NO: 44375 - DNA, 22 bp, Artificial Sequence
  chemically synthesized
gaagagcctggtgagtacatct

SEQ ID NO: 44376 - DNA, 22 bp, Artificial Sequence
  chemically synthesized
gtgagtacatctctcctgcctt

SEQ ID NO: 44377 - DNA, 22 bp, Artificial Sequence
  chemically synthesized
tcctgccttgtacaaccctctc

SEQ ID NO: 44378 - DNA, 22 bp, Artificial Sequence
  chemically synthesized
ctgccttgtacaaccctctctc

SEQ ID NO: 44379 - DNA, 22 bp, Artificial Sequence
  chemically synthesized
ccttgtacaaccctctctcctc

SEQ ID NO: 44380 - DNA, 22 bp, Artificial Sequence
  chemically synthesized
gtacaaccctctctcctcaccg

SEQ ID NO: 44381 - DNA, 22 bp, Artificial Sequence
  chemically synthesized
tacaaccctctctcctcaccga

SEQ ID NO: 44382 - DNA, 22 bp, Artificial Sequence
  chemically synthesized
tctcctcaccgactttctctcc

SEQ ID NO: 44383 - DNA, 22 bp, Artificial Sequence
  chemically synthesized
tcctcaccgactttctctccca

SEQ ID NO: 44384 - DNA, 22 bp, Artificial Sequence
  chemically synthesized
ctcaccgactttctctcccagc

SEQ ID NO: 44385 - DNA, 22 bp, Artificial Sequence
  chemically synthesized
accgactttctctcccagcagc

SEQ ID NO: 44386 - DNA, 22 bp, Artificial Sequence
  chemically synthesized
tctctcccagcagccagcaggg

SEQ ID NO: 44387 - DNA, 22 bp, Artificial Sequence
  chemically synthesized
ctctcccagcagccagcagggg

SEQ ID NO: 44388 - DNA, 22 bp, Artificial Sequence
  chemically synthesized
tctcccagcagccagcaggggc

SEQ ID NO: 44389 - DNA, 22 bp, Artificial Sequence
  chemically synthesized
tcccagcagccagcaggggcct

SEQ ID NO: 44390 - DNA, 22 bp, Artificial Sequence
  chemically synthesized
ccagcagccagcaggggcctgg

SEQ ID NO: 44391 - DNA, 22 bp, Artificial Sequence
  chemically synthesized
ggccatttatggaatgcaagcc

SEQ ID NO: 44392 - DNA, 22 bp, Artificial Sequence
  chemically synthesized
atggaatgcaagccctgaccac

SEQ ID NO: 44393 - DNA, 22 bp, Artificial Sequence
  chemically synthesized
tggaatgcaagccctgaccaca

SEQ ID NO: 44394 - DNA, 22 bp, Artificial Sequence
  chemically synthesized
accacacagacttacttacatg

SEQ ID NO: 44395 - DNA, 22 bp, Artificial Sequence
  chemically synthesized
acttacatgccaggacagccac

SEQ ID NO: 44396 - DNA, 22 bp, Artificial Sequence
  chemically synthesized
cttacatgccaggacagccacc

SEQ ID NO: 44397 - DNA, 22 bp, Artificial Sequence
  chemically synthesized
acatgccaggacagccaccagg

SEQ ID NO: 44398 - DNA, 22 bp, Artificial Sequence
  chemically synthesized
catgccaggacagccaccaggt

SEQ ID NO: 44399 - DNA, 22 bp, Artificial Sequence
  chemically synthesized
tcccactctaggttccactgtg

SEQ ID NO: 44400 - DNA, 22 bp, Artificial Sequence
  chemically synthesized
cccactctaggttccactgtga

SEQ ID NO: 44401 - DNA, 22 bp, Artificial Sequence
  chemically synthesized
ccactctaggttccactgtgag

SEQ ID NO: 44402 - DNA, 22 bp, Artificial Sequence
  chemically synthesized
taggttccactgtgagtgctct

SEQ ID NO: 44403 - DNA, 22 bp, Artificial Sequence
  chemically synthesized
ggttccactgtgagtgctctct

SEQ ID NO: 44404 - DNA, 22 bp, Artificial Sequence
  chemically synthesized
cactgtgagtgctctctctctc

SEQ ID NO: 44405 - DNA, 22 bp, Artificial Sequence
  chemically synthesized
tgagtgctctctctctctctct

SEQ ID NO: 44406 - DNA, 22 bp, Artificial Sequence
  chemically synthesized
tctctctctctctctctcacta

SEQ ID NO: 44407 - DNA, 22 bp, Artificial Sequence
  chemically synthesized
tctctctctctctctcactatg

SEQ ID NO: 44408 - DNA, 22 bp, Artificial Sequence
  chemically synthesized
tctctctctctctcactatgct

SEQ ID NO: 44409 - DNA, 22 bp, Artificial Sequence
  chemically synthesized
tctctctctctcactatgctcc

SEQ ID NO: 44410 - DNA, 22 bp, Artificial Sequence
  chemically synthesized
tctctctctcactatgctccca

SEQ ID NO: 44411 - DNA, 22 bp, Artificial Sequence
  chemically synthesized
tctctctcactatgctcccaag

SEQ ID NO: 44412 - DNA, 22 bp, Artificial Sequence
  chemically synthesized
tctctcactatgctcccaagag

SEQ ID NO: 44413 - DNA, 22 bp, Artificial Sequence
  chemically synthesized
tctcactatgctcccaagagga

SEQ ID NO: 44414 - DNA, 22 bp, Artificial Sequence
  chemically synthesized
tcactatgctcccaagaggagt

SEQ ID NO: 44415 - DNA, 22 bp, Artificial Sequence
  chemically synthesized
actatgctcccaagaggagtct

SEQ ID NO: 44416 - DNA, 22 bp, Artificial Sequence
  chemically synthesized
tgctcccaagaggagtcttaca

SEQ ID NO: 44417 - DNA, 22 bp, Artificial Sequence
  chemically synthesized
ccaagaggagtcttacatcaac

SEQ ID NO: 44418 - DNA, 22 bp, Artificial Sequence
  chemically synthesized
acatcaaccccttcctcaaatc

SEQ ID NO: 44419 - DNA, 22 bp, Artificial Sequence
  chemically synthesized
catcaaccccttcctcaaatct

SEQ ID NO: 44420 - DNA, 22 bp, Artificial Sequence
  chemically synthesized
cctcaaatctccctcactggat

SEQ ID NO: 44421 - DNA, 22 bp, Artificial Sequence
  chemically synthesized
ctcaaatctccctcactggatg

SEQ ID NO: 44422 - DNA, 22 bp, Artificial Sequence
  chemically synthesized
aaatctccctcactggatgtca

SEQ ID NO: 44423 - DNA, 22 bp, Artificial Sequence
  chemically synthesized
cctcactggatgtcacagtcat

SEQ ID NO: 44424 - DNA, 22 bp, Artificial Sequence
  chemically synthesized
actggatgtcacagtcataggc

SEQ ID NO: 44425 - DNA, 22 bp, Artificial Sequence
  chemically synthesized
gatgtcacagtcataggcctga

SEQ ID NO: 44426 - DNA, 22 bp, Artificial Sequence
  chemically synthesized
aaaagcagcatgcaaactgaat

SEQ ID NO: 44427 - DNA, 22 bp, Artificial Sequence
  chemically synthesized
aatttttgtaaagcaggaccca

SEQ ID NO: 44428 - DNA, 22 bp, Artificial Sequence
  chemically synthesized
ttgtaaagcaggacccatttcc

SEQ ID NO: 44429 - DNA, 22 bp, Artificial Sequence
  chemically synthesized
tgtaaagcaggacccatttccc

SEQ ID NO: 44430 - DNA, 22 bp, Artificial Sequence
  chemically synthesized
gtaaagcaggacccatttcccc

SEQ ID NO: 44431 - DNA, 22 bp, Artificial Sequence
  chemically synthesized
taaagcaggacccatttcccca

SEQ ID NO: 44432 - DNA, 22 bp, Artificial Sequence
  chemically synthesized
ccccatggacagtcataagaga

SEQ ID NO: 44433 - DNA, 22 bp, Artificial Sequence
  chemically synthesized
cccatggacagtcataagagat

SEQ ID NO: 44434 - DNA, 22 bp, Artificial Sequence
  chemically synthesized
aatttctgtcttcacgattact

SEQ ID NO: 44435 - DNA, 22 bp, Artificial Sequence
  chemically synthesized
atttctgtcttcacgattactt

SEQ ID NO: 44436 - DNA, 22 bp, Artificial Sequence
  chemically synthesized
ctgtcttcacgattacttcacg

SEQ ID NO: 44437 - DNA, 22 bp, Artificial Sequence
  chemically synthesized
tgtcttcacgattacttcacga

SEQ ID NO: 44438 - DNA, 22 bp, Artificial Sequence
  chemically synthesized
tcttcacgattacttcacgata

SEQ ID NO: 44439 - DNA, 22 bp, Artificial Sequence
  chemically synthesized
cacgattacttcacgataaatc

SEQ ID NO: 44440 - DNA, 22 bp, Artificial Sequence
  chemically synthesized
acgattacttcacgataaatct

SEQ ID NO: 44441 - DNA, 22 bp, Artificial Sequence
  chemically synthesized
cttcacgataaatctggattcc

SEQ ID NO: 44442 - DNA, 22 bp, Artificial Sequence
  chemically synthesized
cacgataaatctggattccaaa

SEQ ID NO: 44443 - DNA, 22 bp, Artificial Sequence
  chemically synthesized
acgataaatctggattccaaag

SEQ ID NO: 44444 - DNA, 22 bp, Artificial Sequence
  chemically synthesized
gattccaaagggactataagct

SEQ ID NO: 44445 - DNA, 22 bp, Artificial Sequence
  chemically synthesized
caaagggactataagctctcac

SEQ ID NO: 44446 - DNA, 22 bp, Artificial Sequence
  chemically synthesized
taagctctcacatggaaggaag

SEQ ID NO: 44447 - DNA, 22 bp, Artificial Sequence
  chemically synthesized
tcacatggaaggaagcaagatc

SEQ ID NO: 44448 - DNA, 22 bp, Artificial Sequence
  chemically synthesized
acatggaaggaagcaagatctc

SEQ ID NO: 44449 - DNA, 22 bp, Artificial Sequence
  chemically synthesized
tactcctcccccagtgttgagt

SEQ ID NO: 44450 - DNA, 22 bp, Artificial Sequence
  chemically synthesized
ctcctcccccagtgttgagtgg

SEQ ID NO: 44451 - DNA, 22 bp, Artificial Sequence
  chemically synthesized
ctcccccagtgttgagtggaca

SEQ ID NO: 44452 - DNA, 22 bp, Artificial Sequence
  chemically synthesized
ccccagtgttgagtggacaggg

SEQ ID NO: 44453 - DNA, 22 bp, Artificial Sequence
  chemically synthesized
agtggacagggagtacaccgca

SEQ ID NO: 44454 - DNA, 22 bp, Artificial Sequence
  chemically synthesized
ttggccaaccaattctaattcc

SEQ ID NO: 44455 - DNA, 22 bp, Artificial Sequence
  chemically synthesized
gccaaccaattctaattccctt

SEQ ID NO: 44456 - DNA, 22 bp, Artificial Sequence
  chemically synthesized
taattccctttagctagcatcc

SEQ ID NO: 44457 - DNA, 22 bp, Artificial Sequence
  chemically synthesized
attccctttagctagcatcccc

SEQ ID NO: 44458 - DNA, 22 bp, Artificial Sequence
  chemically synthesized
cctttagctagcatcccctaag

SEQ ID NO: 44459 - DNA, 22 bp, Artificial Sequence
  chemically synthesized
tagctagcatcccctaagctag

SEQ ID NO: 44460 - DNA, 22 bp, Artificial Sequence
  chemically synthesized
agctagcatcccctaagctaga

SEQ ID NO: 44461 - DNA, 22 bp, Artificial Sequence
  chemically synthesized
gctagcatcccctaagctagag

SEQ ID NO: 44462 - DNA, 22 bp, Artificial Sequence
  chemically synthesized
gcatcccctaagctagagctag

SEQ ID NO: 44463 - DNA, 22 bp, Artificial Sequence
  chemically synthesized
agctagagctagagctagagct

SEQ ID NO: 44464 - DNA, 22 bp, Artificial Sequence
  chemically synthesized
gagctagagctagagctatttc

SEQ ID NO: 44465 - DNA, 22 bp, Artificial Sequence
  chemically synthesized
gagctagagctatttccttgca

SEQ ID NO: 44466 - DNA, 22 bp, Artificial Sequence
  chemically synthesized
gagctatttccttgcagccttc

SEQ ID NO: 44467 - DNA, 22 bp, Artificial Sequence
  chemically synthesized
tttccttgcagccttccttttc

SEQ ID NO: 44468 - DNA, 22 bp, Artificial Sequence
  chemically synthesized
ccttgcagccttccttttctct

SEQ ID NO: 44469 - DNA, 22 bp, Artificial Sequence
  chemically synthesized
cttgcagccttccttttctcta

SEQ ID NO: 44470 - DNA, 22 bp, Artificial Sequence
  chemically synthesized
gcagccttccttttctctagca

SEQ ID NO: 44471 - DNA, 22 bp, Artificial Sequence
  chemically synthesized
cagccttccttttctctagcaa

SEQ ID NO: 44472 - DNA, 22 bp, Artificial Sequence
  chemically synthesized
ccttttctctagcaaagtcctt

SEQ ID NO: 44473 - DNA, 22 bp, Artificial Sequence
  chemically synthesized
cttttctctagcaaagtccttc

SEQ ID NO: 44474 - DNA, 22 bp, Artificial Sequence
  chemically synthesized
ttctctagcaaagtccttccat

SEQ ID NO: 44475 - DNA, 22 bp, Artificial Sequence
  chemically synthesized
tctctagcaaagtccttccatg

SEQ ID NO: 44476 - DNA, 22 bp, Artificial Sequence
  chemically synthesized
ctctagcaaagtccttccatgc

SEQ ID NO: 44477 - DNA, 22 bp, Artificial Sequence
  chemically synthesized
tctagcaaagtccttccatgca

SEQ ID NO: 44478 - DNA, 22 bp, Artificial Sequence
  chemically synthesized
tagcaaagtccttccatgcagt

SEQ ID NO: 44479 - DNA, 22 bp, Artificial Sequence
  chemically synthesized
gcaaagtccttccatgcagtag

SEQ ID NO: 44480 - DNA, 22 bp, Artificial Sequence
  chemically synthesized
ccatgcagtagctaatgacctg

SEQ ID NO: 44481 - DNA, 22 bp, Artificial Sequence
  chemically synthesized
catgcagtagctaatgacctgt

SEQ ID NO: 44482 - DNA, 22 bp, Artificial Sequence
  chemically synthesized
atgacctgtaaacacttaatga

SEQ ID NO: 44483 - DNA, 22 bp, Artificial Sequence
  chemically synthesized
taaacacttaatgagctagaga

SEQ ID NO: 44484 - DNA, 22 bp, Artificial Sequence
  chemically synthesized
aatgagctagagaaacattcca

SEQ ID NO: 44485 - DNA, 22 bp, Artificial Sequence
  chemically synthesized
atgagctagagaaacattccat

SEQ ID NO: 44486 - DNA, 22 bp, Artificial Sequence
  chemically synthesized
gagaaacattccattgaaagga

SEQ ID NO: 44487 - DNA, 22 bp, Artificial Sequence
  chemically synthesized
cattgaaaggaataccactgtg

SEQ ID NO: 44488 - DNA, 22 bp, Artificial Sequence
  chemically synthesized
aaaggaataccactgtgcatcc

SEQ ID NO: 44489 - DNA, 22 bp, Artificial Sequence
  chemically synthesized
tgcatccttttgtaaagagggg

SEQ ID NO: 44490 - DNA, 22 bp, Artificial Sequence
  chemically synthesized
ttgtaaagaggggggaaaatct

SEQ ID NO: 44491 - DNA, 22 bp, Artificial Sequence
  chemically synthesized
tgtaaagaggggggaaaatctt

SEQ ID NO: 44492 - DNA, 22 bp, Artificial Sequence
  chemically synthesized
gtaaagaggggggaaaatcttt

SEQ ID NO: 44493 - DNA, 22 bp, Artificial Sequence
  chemically synthesized
taaagaggggggaaaatctttt

SEQ ID NO: 44494 - DNA, 22 bp, Artificial Sequence
  chemically synthesized
ttgtaaaacgaagcatcgcctt

SEQ ID NO: 44495 - DNA, 22 bp, Artificial Sequence
  chemically synthesized
tgtaaaacgaagcatcgccttt

SEQ ID NO: 44496 - DNA, 22 bp, Artificial Sequence
  chemically synthesized
gtaaaacgaagcatcgccttta

SEQ ID NO: 44497 - DNA, 22 bp, Artificial Sequence
  chemically synthesized
taaaacgaagcatcgcctttaa

SEQ ID NO: 44498 - DNA, 22 bp, Artificial Sequence
  chemically synthesized
taactgctctgtttgatcaagt

SEQ ID NO: 44499 - DNA, 22 bp, Artificial Sequence
  chemically synthesized
aactgctctgtttgatcaagtc

SEQ ID NO: 44500 - DNA, 22 bp, Artificial Sequence
  chemically synthesized
actgctctgtttgatcaagtca

SEQ ID NO: 44501 - DNA, 22 bp, Artificial Sequence
  chemically synthesized
ctctgtttgatcaagtcagatt

SEQ ID NO: 44502 - DNA, 22 bp, Artificial Sequence
  chemically synthesized
tgtttgatcaagtcagattttt

SEQ ID NO: 44503 - DNA, 22 bp, Artificial Sequence
  chemically synthesized
tttgatcaagtcagatttttca

SEQ ID NO: 44504 - DNA, 22 bp, Artificial Sequence
  chemically synthesized
gatcaagtcagatttttcagaa

SEQ ID NO: 44505 - DNA, 22 bp, Artificial Sequence
  chemically synthesized
atcaagtcagatttttcagaat

SEQ ID NO: 44506 - DNA, 22 bp, Artificial Sequence
  chemically synthesized
ttcagaatatgaatagctagta

SEQ ID NO: 44507 - DNA, 22 bp, Artificial Sequence
  chemically synthesized
tcagaatatgaatagctagtat

SEQ ID NO: 44508 - DNA, 22 bp, Artificial Sequence
  chemically synthesized
cagaatatgaatagctagtatt

SEQ ID NO: 44509 - DNA, 22 bp, Artificial Sequence
  chemically synthesized
agaatatgaatagctagtattc

SEQ ID NO: 44510 - DNA, 22 bp, Artificial Sequence
  chemically synthesized
gtattcaagcatatatgaactg

SEQ ID NO: 44511 - DNA, 22 bp, Artificial Sequence
  chemically synthesized
aagcatatatgaactgtcttta

SEQ ID NO: 44512 - DNA, 22 bp, Artificial Sequence
  chemically synthesized
tctttaagttaatcaatcccta

SEQ ID NO: 44513 - DNA, 22 bp, Artificial Sequence
  chemically synthesized
taagttaatcaatccctagaaa

SEQ ID NO: 44514 - DNA, 22 bp, Artificial Sequence
  chemically synthesized
aagttaatcaatccctagaaac

SEQ ID NO: 44515 - DNA, 22 bp, Artificial Sequence
  chemically synthesized
agttaatcaatccctagaaact

SEQ ID NO: 44516 - DNA, 22 bp, Artificial Sequence
  chemically synthesized
atcaatccctagaaactagccc

SEQ ID NO: 44517 - DNA, 22 bp, Artificial Sequence
  chemically synthesized
gaaactagccctcaggttagca

SEQ ID NO: 44518 - DNA, 22 bp, Artificial Sequence
  chemically synthesized
gccctcaggttagcaggccaag

SEQ ID NO: 44519 - DNA, 22 bp, Artificial Sequence
  chemically synthesized
aggttagcaggccaaggatata

SEQ ID NO: 44520 - DNA, 22 bp, Artificial Sequence
  chemically synthesized
gcaggccaaggatatatgagag

SEQ ID NO: 44521 - DNA, 22 bp, Artificial Sequence
  chemically synthesized
tgaagtctagacttaaactgcc

SEQ ID NO: 44522 - DNA, 22 bp, Artificial Sequence
  chemically synthesized
gaagtctagacttaaactgccg

SEQ ID NO: 44523 - DNA, 22 bp, Artificial Sequence
  chemically synthesized
aagtctagacttaaactgccgc

SEQ ID NO: 44524 - DNA, 22 bp, Artificial Sequence
  chemically synthesized
gacttaaactgccgctcctgaa

SEQ ID NO: 44525 - DNA, 22 bp, Artificial Sequence
  chemically synthesized
aaactgccgctcctgaattgaa

SEQ ID NO: 44526 - DNA, 22 bp, Artificial Sequence
  chemically synthesized
aactgccgctcctgaattgaat

SEQ ID NO: 44527 - DNA, 22 bp, Artificial Sequence
  chemically synthesized
ccgctcctgaattgaattagaa

SEQ ID NO: 44528 - DNA, 22 bp, Artificial Sequence
  chemically synthesized
ctgaattgaattagaacattcc

SEQ ID NO: 44529 - DNA, 22 bp, Artificial Sequence
  chemically synthesized
aattgaattagaacattccagg

SEQ ID NO: 44530 - DNA, 22 bp, Artificial Sequence
  chemically synthesized
aattagaacattccaggtagac

SEQ ID NO: 44531 - DNA, 22 bp, Artificial Sequence
  chemically synthesized
gaacattccaggtagacagatt

SEQ ID NO: 44532 - DNA, 22 bp, Artificial Sequence
  chemically synthesized
caggtagacagattcatggccc

SEQ ID NO: 44533 - DNA, 22 bp, Artificial Sequence
  chemically synthesized
atggcccctaacatcaggaatc

SEQ ID NO: 44534 - DNA, 22 bp, Artificial Sequence
  chemically synthesized
acatcaggaatcagctagaaac

SEQ ID NO: 44535 - DNA, 22 bp, Artificial Sequence
  chemically synthesized
gaaactcaatcggctcttacca

SEQ ID NO: 44536 - DNA, 22 bp, Artificial Sequence
  chemically synthesized
aatcggctcttaccagtcacta

SEQ ID NO: 44537 - DNA, 22 bp, Artificial Sequence
  chemically synthesized
ttaccagtcactacctacgtca

SEQ ID NO: 44538 - DNA, 22 bp, Artificial Sequence
  chemically synthesized
accagtcactacctacgtcagt

SEQ ID NO: 44539 - DNA, 22 bp, Artificial Sequence
  chemically synthesized
ccagtcactacctacgtcagtg

SEQ ID NO: 44540 - DNA, 22 bp, Artificial Sequence
  chemically synthesized
cctacgtcagtgccatatccta

SEQ ID NO: 44541 - DNA, 22 bp, Artificial Sequence
  chemically synthesized
cgtcagtgccatatcctataat

SEQ ID NO: 44542 - DNA, 22 bp, Artificial Sequence
  chemically synthesized
taatggtgatgataatgaccat

SEQ ID NO: 44543 - DNA, 22 bp, Artificial Sequence
  chemically synthesized
tgatgatgataataataataat

SEQ ID NO: 44544 - DNA, 22 bp, Artificial Sequence
  chemically synthesized
ccactggatggcactttgcacc

SEQ ID NO: 44545 - DNA, 22 bp, Artificial Sequence
  chemically synthesized
cactggatggcactttgcacct

SEQ ID NO: 44546 - DNA, 22 bp, Artificial Sequence
  chemically synthesized
gatggcactttgcaccttccag

SEQ ID NO: 44547 - DNA, 22 bp, Artificial Sequence
  chemically synthesized
tgcaccttccagagcaatttaa

SEQ ID NO: 44548 - DNA, 22 bp, Artificial Sequence
  chemically synthesized
gcaccttccagagcaatttaac

SEQ ID NO: 44549 - DNA, 22 bp, Artificial Sequence
  chemically synthesized
caccttccagagcaatttaaca

SEQ ID NO: 44550 - DNA, 22 bp, Artificial Sequence
  chemically synthesized
ccagagcaatttaacatccttt

SEQ ID NO: 44551 - DNA, 22 bp, Artificial Sequence
  chemically synthesized
cagagcaatttaacatccttta

SEQ ID NO: 44552 - DNA, 22 bp, Artificial Sequence
  chemically synthesized
aacatcctttactttttttgga

SEQ ID NO: 44553 - DNA, 22 bp, Artificial Sequence
  chemically synthesized
acatcctttactttttttggaa

SEQ ID NO: 44554 - DNA, 22 bp, Artificial Sequence
  chemically synthesized
tactttttttggaaggccttca

SEQ ID NO: 44555 - DNA, 22 bp, Artificial Sequence
  chemically synthesized
actttttttggaaggccttcag

SEQ ID NO: 44556 - DNA, 22 bp, Artificial Sequence
  chemically synthesized
ctttttttggaaggccttcagg

SEQ ID NO: 44557 - DNA, 22 bp, Artificial Sequence
  chemically synthesized
tttttggaaggccttcaggtcc

SEQ ID NO: 44558 - DNA, 22 bp, Artificial Sequence
  chemically synthesized
ttttggaaggccttcaggtcca

SEQ ID NO: 44559 - DNA, 22 bp, Artificial Sequence
  chemically synthesized
tttggaaggccttcaggtccag

SEQ ID NO: 44560 - DNA, 22 bp, Artificial Sequence
  chemically synthesized
ttggaaggccttcaggtccagc

SEQ ID NO: 44561 - DNA, 22 bp, Artificial Sequence
  chemically synthesized
tggaaggccttcaggtccagcc

SEQ ID NO: 44562 - DNA, 22 bp, Artificial Sequence
  chemically synthesized
ggaaggccttcaggtccagcct

SEQ ID NO: 44563 - DNA, 22 bp, Artificial Sequence
  chemically synthesized
gaaggccttcaggtccagcctc

SEQ ID NO: 44564 - DNA, 22 bp, Artificial Sequence
  chemically synthesized
caggtccagcctcctactcttc

SEQ ID NO: 44565 - DNA, 22 bp, Artificial Sequence
  chemically synthesized
aggtccagcctcctactcttct

SEQ ID NO: 44566 - DNA, 22 bp, Artificial Sequence
  chemically synthesized
ctactcttctctttctctgaac

SEQ ID NO: 44567 - DNA, 22 bp, Artificial Sequence
  chemically synthesized
ctcttctctttctctgaactat

SEQ ID NO: 44568 - DNA, 22 bp, Artificial Sequence
  chemically synthesized
ttctctttctctgaactatcac

SEQ ID NO: 44569 - DNA, 22 bp, Artificial Sequence
  chemically synthesized
ctctttctctgaactatcacct

SEQ ID NO: 44570 - DNA, 22 bp, Artificial Sequence
  chemically synthesized
tctttctctgaactatcacctt

SEQ ID NO: 44571 - DNA, 22 bp, Artificial Sequence
  chemically synthesized
tttctctgaactatcaccttac

SEQ ID NO: 44572 - DNA, 22 bp, Artificial Sequence
  chemically synthesized
tctctgaactatcaccttacta

SEQ ID NO: 44573 - DNA, 22 bp, Artificial Sequence
  chemically synthesized
ctctgaactatcaccttactat

SEQ ID NO: 44574 - DNA, 22 bp, Artificial Sequence
  chemically synthesized
tctgaactatcaccttactata

SEQ ID NO: 44575 - DNA, 22 bp, Artificial Sequence
  chemically synthesized
tgaactatcaccttactatagg

SEQ ID NO: 44576 - DNA, 22 bp, Artificial Sequence
  chemically synthesized
aactatcaccttactataggca

SEQ ID NO: 44577 - DNA, 22 bp, Artificial Sequence
  chemically synthesized
tcaccttactataggcacatat

SEQ ID NO: 44578 - DNA, 22 bp, Artificial Sequence
  chemically synthesized
actataggcacatatttccccc

SEQ ID NO: 44579 - DNA, 22 bp, Artificial Sequence
  chemically synthesized
ctataggcacatatttccccca

SEQ ID NO: 44580 - DNA, 22 bp, Artificial Sequence
  chemically synthesized
taggcacatatttcccccaaag

SEQ ID NO: 44581 - DNA, 22 bp, Artificial Sequence
  chemically synthesized
cccccaaaggactcagtggcct

SEQ ID NO: 44582 - DNA, 22 bp, Artificial Sequence
  chemically synthesized
ccccaaaggactcagtggcctc

SEQ ID NO: 44583 - DNA, 22 bp, Artificial Sequence
  chemically synthesized
agtggcctcttttgtctcattt

SEQ ID NO: 44584 - DNA, 22 bp, Artificial Sequence
  chemically synthesized
ttttgtctcatttctccctttg

SEQ ID NO: 44585 - DNA, 22 bp, Artificial Sequence
  chemically synthesized
ttgtctcatttctccctttgct

SEQ ID NO: 44586 - DNA, 22 bp, Artificial Sequence
  chemically synthesized
tgtctcatttctccctttgctg

SEQ ID NO: 44587 - DNA, 22 bp, Artificial Sequence
  chemically synthesized
gtctcatttctccctttgctga

SEQ ID NO: 44588 - DNA, 22 bp, Artificial Sequence
  chemically synthesized
tctcatttctccctttgctgat

SEQ ID NO: 44589 - DNA, 22 bp, Artificial Sequence
  chemically synthesized
atttctccctttgctgatgatc

SEQ ID NO: 44590 - DNA, 22 bp, Artificial Sequence
  chemically synthesized
ctccctttgctgatgatccagt

SEQ ID NO: 44591 - DNA, 22 bp, Artificial Sequence
  chemically synthesized
tccctttgctgatgatccagta

SEQ ID NO: 44592 - DNA, 22 bp, Artificial Sequence
  chemically synthesized
cctttgctgatgatccagtaga

SEQ ID NO: 44593 - DNA, 22 bp, Artificial Sequence
  chemically synthesized
tgctgatgatccagtagagaaa

SEQ ID NO: 44594 - DNA, 22 bp, Artificial Sequence
  chemically synthesized
gctgatgatccagtagagaaat

SEQ ID NO: 44595 - DNA, 22 bp, Artificial Sequence
  chemically synthesized
ctgatgatccagtagagaaatg

SEQ ID NO: 44596 - DNA, 22 bp, Artificial Sequence
  chemically synthesized
atgatccagtagagaaatgatc

SEQ ID NO: 44597 - DNA, 22 bp, Artificial Sequence
  chemically synthesized
cacattgtcctaaatgaaacca

SEQ ID NO: 44598 - DNA, 22 bp, Artificial Sequence
  chemically synthesized
tcctaaatgaaaccaagcttcc

SEQ ID NO: 44599 - DNA, 22 bp, Artificial Sequence
  chemically synthesized
aatgaaaccaagcttcctctgc

SEQ ID NO: 44600 - DNA, 22 bp, Artificial Sequence
  chemically synthesized
cctctgcaggatggaagtgagc

SEQ ID NO: 44601 - DNA, 22 bp, Artificial Sequence
  chemically synthesized
ctctgcaggatggaagtgagcc

SEQ ID NO: 44602 - DNA, 22 bp, Artificial Sequence
  chemically synthesized
tgcaggatggaagtgagccagg

SEQ ID NO: 44603 - DNA, 22 bp, Artificial Sequence
  chemically synthesized
caggatggaagtgagccaggtg

SEQ ID NO: 44604 - DNA, 22 bp, Artificial Sequence
  chemically synthesized
gacccaccgcttcattggccga

SEQ ID NO: 44605 - DNA, 22 bp, Artificial Sequence
  chemically synthesized
cattggccgaggatgaccccat

SEQ ID NO: 44606 - DNA, 22 bp, Artificial Sequence
  chemically synthesized
attggccgaggatgaccccata

SEQ ID NO: 44607 - DNA, 22 bp, Artificial Sequence
  chemically synthesized
gccgaggatgaccccataaagg

SEQ ID NO: 44608 - DNA, 22 bp, Artificial Sequence
  chemically synthesized
cagagattgctatgcacaaaat

SEQ ID NO: 44609 - DNA, 22 bp, Artificial Sequence
  chemically synthesized
ctatgcacaaaatccaagaggc

SEQ ID NO: 44610 - DNA, 22 bp, Artificial Sequence
  chemically synthesized
tgcacaaaatccaagaggccca

SEQ ID NO: 44611 - DNA, 22 bp, Artificial Sequence
  chemically synthesized
gcagaccctcaagagcaggggt

SEQ ID NO: 44612 - DNA, 22 bp, Artificial Sequence
  chemically synthesized
aagagcaggggtcttctctttg

SEQ ID NO: 44613 - DNA, 22 bp, Artificial Sequence
  chemically synthesized
ctctttgggggaggacatcact

SEQ ID NO: 44614 - DNA, 22 bp, Artificial Sequence
  chemically synthesized
tctttgggggaggacatcactc

SEQ ID NO: 44615 - DNA, 22 bp, Artificial Sequence
  chemically synthesized
tttgggggaggacatcactctt

SEQ ID NO: 44616 - DNA, 22 bp, Artificial Sequence
  chemically synthesized
tgggggaggacatcactcttag

SEQ ID NO: 44617 - DNA, 22 bp, Artificial Sequence
  chemically synthesized
gggggaggacatcactcttagc

SEQ ID NO: 44618 - DNA, 22 bp, Artificial Sequence
  chemically synthesized
ggggaggacatcactcttagca

SEQ ID NO: 44619 - DNA, 22 bp, Artificial Sequence
  chemically synthesized
ttagcagggctggggtgagtca

SEQ ID NO: 44620 - DNA, 22 bp, Artificial Sequence
  chemically synthesized
agcagggctggggtgagtcaaa

SEQ ID NO: 44621 - DNA, 22 bp, Artificial Sequence
  chemically synthesized
gcagggctggggtgagtcaaaa

SEQ ID NO: 44622 - DNA, 22 bp, Artificial Sequence
  chemically synthesized
gggtgagtcaaaagtctgggag

SEQ ID NO: 44623 - DNA, 22 bp, Artificial Sequence
  chemically synthesized
ggagaatggaggtgtggagggg

SEQ ID NO: 44624 - DNA, 22 bp, Artificial Sequence
  chemically synthesized
ggtcagaccccaagcaggaagg

SEQ ID NO: 44625 - DNA, 22 bp, Artificial Sequence
  chemically synthesized
tatgtagacgggtgtgtggctc

SEQ ID NO: 44626 - DNA, 22 bp, Artificial Sequence
  chemically synthesized
tgtagacgggtgtgtggctcct

SEQ ID NO: 44627 - DNA, 22 bp, Artificial Sequence
  chemically synthesized
cttaaggtgacccagcagccct

SEQ ID NO: 44628 - DNA, 22 bp, Artificial Sequence
  chemically synthesized
aaggtgacccagcagccctggg

SEQ ID NO: 44629 - DNA, 22 bp, Artificial Sequence
  chemically synthesized
aggtgacccagcagccctgggc

SEQ ID NO: 44630 - DNA, 22 bp, Artificial Sequence
  chemically synthesized
ggcacagaagtggtgcgtggag

SEQ ID NO: 44631 - DNA, 22 bp, Artificial Sequence
  chemically synthesized
tcagaagaggccctggacactg

SEQ ID NO: 44632 - DNA, 22 bp, Artificial Sequence
  chemically synthesized
gacactgaaggctgggcacagc

SEQ ID NO: 44633 - DNA, 22 bp, Artificial Sequence
  chemically synthesized
aaggctgggcacagccttgggg

SEQ ID NO: 44634 - DNA, 22 bp, Artificial Sequence
  chemically synthesized
ggcacagccttggggaccgctc

SEQ ID NO: 44635 - DNA, 22 bp, Artificial Sequence
  chemically synthesized
ggggaccgctcacaggacatgc

SEQ ID NO: 44636 - DNA, 22 bp, Artificial Sequence
  chemically synthesized
gggaccgctcacaggacatgca

SEQ ID NO: 44637 - DNA, 22 bp, Artificial Sequence
  chemically synthesized
acaggacatgcagcagtgtgtg

SEQ ID NO: 44638 - DNA, 22 bp, Artificial Sequence
  chemically synthesized
cctaccgcgacccctatcagtg

SEQ ID NO: 44639 - DNA, 22 bp, Artificial Sequence
  chemically synthesized
ccgcgacccctatcagtgccga

SEQ ID NO: 44640 - DNA, 22 bp, Artificial Sequence
  chemically synthesized
tcagtgccgaccaagcacacaa

SEQ ID NO: 44641 - DNA, 22 bp, Artificial Sequence
  chemically synthesized
ggctggacagaggggtcccaca

SEQ ID NO: 44642 - DNA, 22 bp, Artificial Sequence
  chemically synthesized
gacagaggggtcccacaagatc

SEQ ID NO: 44643 - DNA, 22 bp, Artificial Sequence
  chemically synthesized
agaaggtggggagctcacagcc

SEQ ID NO: 44644 - DNA, 22 bp, Artificial Sequence
  chemically synthesized
acagcctccaagcattgcatca

SEQ ID NO: 44645 - DNA, 22 bp, Artificial Sequence
  chemically synthesized
caagcattgcatcatcctggta

SEQ ID NO: 44646 - DNA, 22 bp, Artificial Sequence
  chemically synthesized
catcatcctggtaccaggaagg

SEQ ID NO: 44647 - DNA, 22 bp, Artificial Sequence
  chemically synthesized
gtaccaggaaggcaatgggctg

SEQ ID NO: 44648 - DNA, 22 bp, Artificial Sequence
  chemically synthesized
ccccatacccacttcccttcct

SEQ ID NO: 44649 - DNA, 22 bp, Artificial Sequence
  chemically synthesized
cccttcctagaattggcctggg

SEQ ID NO: 44650 - DNA, 22 bp, Artificial Sequence
  chemically synthesized
ccttcctagaattggcctggga

SEQ ID NO: 44651 - DNA, 22 bp, Artificial Sequence
  chemically synthesized
cctagaattggcctgggacatt

SEQ ID NO: 44652 - DNA, 22 bp, Artificial Sequence
  chemically synthesized
ctagaattggcctgggacattc

SEQ ID NO: 44653 - DNA, 22 bp, Artificial Sequence
  chemically synthesized
gaattggcctgggacattcatt

SEQ ID NO: 44654 - DNA, 22 bp, Artificial Sequence
  chemically synthesized
gcctgggacattcattatttag

SEQ ID NO: 44655 - DNA, 22 bp, Artificial Sequence
  chemically synthesized
ggacattcattatttagccacc

SEQ ID NO: 44656 - DNA, 22 bp, Artificial Sequence
  chemically synthesized
attatttagccacctctggcac

SEQ ID NO: 44657 - DNA, 22 bp, Artificial Sequence
  chemically synthesized
tttagccacctctggcacctgc

SEQ ID NO: 44658 - DNA, 22 bp, Artificial Sequence
  chemically synthesized
agccacctctggcacctgcatt

SEQ ID NO: 44659 - DNA, 22 bp, Artificial Sequence
  chemically synthesized
gccacctctggcacctgcattt

SEQ ID NO: 44660 - DNA, 22 bp, Artificial Sequence
  chemically synthesized
tggcacctgcatttgtttttca

SEQ ID NO: 44661 - DNA, 22 bp, Artificial Sequence
  chemically synthesized
gcacctgcatttgtttttcaaa

SEQ ID NO: 44662 - DNA, 22 bp, Artificial Sequence
  chemically synthesized
catttgtttttcaaattttaat

SEQ ID NO: 44663 - DNA, 22 bp, Artificial Sequence
  chemically synthesized
gtttttcaaattttaatagcaa

SEQ ID NO: 44664 - DNA, 22 bp, Artificial Sequence
  chemically synthesized
tttttcaaattttaatagcaaa

SEQ ID NO: 44665 - DNA, 22 bp, Artificial Sequence
  chemically synthesized
ttcaaattttaatagcaaatag

SEQ ID NO: 44666 - DNA, 22 bp, Artificial Sequence
  chemically synthesized
tcaaattttaatagcaaatagg

SEQ ID NO: 44667 - DNA, 22 bp, Artificial Sequence
  chemically synthesized
caaattttaatagcaaataggc

SEQ ID NO: 44668 - DNA, 22 bp, Artificial Sequence
  chemically synthesized
aaattttaatagcaaataggct

SEQ ID NO: 44669 - DNA, 22 bp, Artificial Sequence
  chemically synthesized
taatagcaaataggcttagtgt

SEQ ID NO: 44670 - DNA, 22 bp, Artificial Sequence
  chemically synthesized
aatagcaaataggcttagtgtg

SEQ ID NO: 44671 - DNA, 22 bp, Artificial Sequence
  chemically synthesized
atagcaaataggcttagtgtgc

SEQ ID NO: 44672 - DNA, 22 bp, Artificial Sequence
  chemically synthesized
agtgtgctgggcagagctgagc

SEQ ID NO: 44673 - DNA, 22 bp, Artificial Sequence
  chemically synthesized
gtgtgctgggcagagctgagca

SEQ ID NO: 44674 - DNA, 22 bp, Artificial Sequence
  chemically synthesized
ggcagagctgagcagaggtgat

SEQ ID NO: 44675 - DNA, 22 bp, Artificial Sequence
  chemically synthesized
agcagaggtgatctgacccctc

SEQ ID NO: 44676 - DNA, 22 bp, Artificial Sequence
  chemically synthesized
acccctctacctactcacataa

SEQ ID NO: 44677 - DNA, 22 bp, Artificial Sequence
  chemically synthesized
tacctactcacataagatcagt

SEQ ID NO: 44678 - DNA, 22 bp, Artificial Sequence
  chemically synthesized
cctactcacataagatcagtaa

SEQ ID NO: 44679 - DNA, 22 bp, Artificial Sequence
  chemically synthesized
ctcacataagatcagtaaagag

SEQ ID NO: 44680 - DNA, 22 bp, Artificial Sequence
  chemically synthesized
acataagatcagtaaagagaag

SEQ ID NO: 44681 - DNA, 22 bp, Artificial Sequence
  chemically synthesized
taggtccaagttcgtacagacc

SEQ ID NO: 44682 - DNA, 22 bp, Artificial Sequence
  chemically synthesized
gtacagacccagccagactgcc

SEQ ID NO: 44683 - DNA, 22 bp, Artificial Sequence
  chemically synthesized
ccagttctctgaggagctagag

SEQ ID NO: 44684 - DNA, 22 bp, Artificial Sequence
  chemically synthesized
tctgaggagctagagacttgtg

SEQ ID NO: 44685 - DNA, 22 bp, Artificial Sequence
  chemically synthesized
tgaggagctagagacttgtggc

SEQ ID NO: 44686 - DNA, 22 bp, Artificial Sequence
  chemically synthesized
aggagctagagacttgtggctt

SEQ ID NO: 44687 - DNA, 22 bp, Artificial Sequence
  chemically synthesized
gagacttgtggcttaaggaagc

SEQ ID NO: 44688 - DNA, 22 bp, Artificial Sequence
  chemically synthesized
gtggcttaaggaagcctctctg

SEQ ID NO: 44689 - DNA, 22 bp, Artificial Sequence
  chemically synthesized
tggcttaaggaagcctctctga

SEQ ID NO: 44690 - DNA, 22 bp, Artificial Sequence
  chemically synthesized
aaggaagcctctctgatggatg

SEQ ID NO: 44691 - DNA, 22 bp, Artificial Sequence
  chemically synthesized
aggaagcctctctgatggatgt

SEQ ID NO: 44692 - DNA, 22 bp, Artificial Sequence
  chemically synthesized
tctgatggatgtactaatatgt

SEQ ID NO: 44693 - DNA, 22 bp, Artificial Sequence
  chemically synthesized
tgatggatgtactaatatgtat

SEQ ID NO: 44694 - DNA, 22 bp, Artificial Sequence
  chemically synthesized
atggatgtactaatatgtatgt

SEQ ID NO: 44695 - DNA, 22 bp, Artificial Sequence
  chemically synthesized
atatgtatgtaccttatacata

SEQ ID NO: 44696 - DNA, 22 bp, Artificial Sequence
  chemically synthesized
atacatacatttgaattacctg

SEQ ID NO: 44697 - DNA, 22 bp, Artificial Sequence
  chemically synthesized
tacatacatttgaattacctgt

SEQ ID NO: 44698 - DNA, 22 bp, Artificial Sequence
  chemically synthesized
gaattacctgtaaatcttgatc

SEQ ID NO: 44699 - DNA, 22 bp, Artificial Sequence
  chemically synthesized
aattacctgtaaatcttgatca

SEQ ID NO: 44700 - DNA, 22 bp, Artificial Sequence
  chemically synthesized
cctgtaaatcttgatcaaactc

SEQ ID NO: 44701 - DNA, 22 bp, Artificial Sequence
  chemically synthesized
taaatcttgatcaaactcagat

SEQ ID NO: 44702 - DNA, 22 bp, Artificial Sequence
  chemically synthesized
gatcaaactcagatgactgtcc

SEQ ID NO: 44703 - DNA, 22 bp, Artificial Sequence
  chemically synthesized
atcaaactcagatgactgtcca

SEQ ID NO: 44704 - DNA, 22 bp, Artificial Sequence
  chemically synthesized
agatgactgtccaactcatcca

SEQ ID NO: 44705 - DNA, 22 bp, Artificial Sequence
  chemically synthesized
tccaactcatccagaaactacg

SEQ ID NO: 44706 - DNA, 22 bp, Artificial Sequence
  chemically synthesized
atccagaaactacgtttgtcta

SEQ ID NO: 44707 - DNA, 22 bp, Artificial Sequence
  chemically synthesized
cgtttgtctaatagaacaggaa

SEQ ID NO: 44708 - DNA, 22 bp, Artificial Sequence
  chemically synthesized
gtctaatagaacaggaagcagg

SEQ ID NO: 44709 - DNA, 22 bp, Artificial Sequence
  chemically synthesized
tctaatagaacaggaagcaggt

SEQ ID NO: 44710 - DNA, 22 bp, Artificial Sequence
  chemically synthesized
atagaacaggaagcaggtggtg

SEQ ID NO: 44711 - DNA, 22 bp, Artificial Sequence
  chemically synthesized
atgagaggcagggccagtgttt

SEQ ID NO: 44712 - DNA, 22 bp, Artificial Sequence
  chemically synthesized
cttcttcattttccattccact

SEQ ID NO: 44713 - DNA, 22 bp, Artificial Sequence
  chemically synthesized
ttcttcattttccattccactg

SEQ ID NO: 44714 - DNA, 22 bp, Artificial Sequence
  chemically synthesized
cttcattttccattccactgat

SEQ ID NO: 44715 - DNA, 22 bp, Artificial Sequence
  chemically synthesized
ttcattttccattccactgatt

SEQ ID NO: 44716 - DNA, 22 bp, Artificial Sequence
  chemically synthesized
cattttccattccactgattct

SEQ ID NO: 44717 - DNA, 22 bp, Artificial Sequence
  chemically synthesized
attttccattccactgattctg

SEQ ID NO: 44718 - DNA, 22 bp, Artificial Sequence
  chemically synthesized
tccattccactgattctgtccc

SEQ ID NO: 44719 - DNA, 22 bp, Artificial Sequence
  chemically synthesized
ccattccactgattctgtcccc

SEQ ID NO: 44720 - DNA, 22 bp, Artificial Sequence
  chemically synthesized
cattccactgattctgtcccca

SEQ ID NO: 44721 - DNA, 22 bp, Artificial Sequence
  chemically synthesized
cactgattctgtccccacacag

SEQ ID NO: 44722 - DNA, 22 bp, Artificial Sequence
  chemically synthesized
attctgtccccacacaggcatc

SEQ ID NO: 44723 - DNA, 22 bp, Artificial Sequence
  chemically synthesized
tgtccccacacaggcatccaaa

SEQ ID NO: 44724 - DNA, 22 bp, Artificial Sequence
  chemically synthesized
tccccacacaggcatccaaagg

SEQ ID NO: 44725 - DNA, 22 bp, Artificial Sequence
  chemically synthesized
cagctacagtccatttctcgct

SEQ ID NO: 44726 - DNA, 22 bp, Artificial Sequence
  chemically synthesized
cagtccatttctcgctggcttt

SEQ ID NO: 44727 - DNA, 22 bp, Artificial Sequence
  chemically synthesized
ctcgctggcttttctgggagat

SEQ ID NO: 44728 - DNA, 22 bp, Artificial Sequence
  chemically synthesized
tcgctggcttttctgggagatc

SEQ ID NO: 44729 - DNA, 22 bp, Artificial Sequence
  chemically synthesized
gctggcttttctgggagatcac

SEQ ID NO: 44730 - DNA, 22 bp, Artificial Sequence
  chemically synthesized
gcttttctgggagatcacccta

SEQ ID NO: 44731 - DNA, 22 bp, Artificial Sequence
  chemically synthesized
ttctgggagatcaccctacaat

SEQ ID NO: 44732 - DNA, 22 bp, Artificial Sequence
  chemically synthesized
tctgggagatcaccctacaatg

SEQ ID NO: 44733 - DNA, 22 bp, Artificial Sequence
  chemically synthesized
ctgggagatcaccctacaatgt

SEQ ID NO: 44734 - DNA, 22 bp, Artificial Sequence
  chemically synthesized
tgggagatcaccctacaatgtg

SEQ ID NO: 44735 - DNA, 22 bp, Artificial Sequence
  chemically synthesized
ggagatcaccctacaatgtgtt

SEQ ID NO: 44736 - DNA, 22 bp, Artificial Sequence
  chemically synthesized
caatgtgttccccagtattcag

SEQ ID NO: 44737 - DNA, 22 bp, Artificial Sequence
  chemically synthesized
cccagtattcaggtttctgggc

SEQ ID NO: 44738 - DNA, 22 bp, Artificial Sequence
  chemically synthesized
aggtttctgggctgccattatc

SEQ ID NO: 44739 - DNA, 22 bp, Artificial Sequence
  chemically synthesized
ctgggctgccattatcttctct

SEQ ID NO: 44740 - DNA, 22 bp, Artificial Sequence
  chemically synthesized
tgggctgccattatcttctctg

SEQ ID NO: 44741 - DNA, 22 bp, Artificial Sequence
  chemically synthesized
ggctgccattatcttctctggt

SEQ ID NO: 44742 - DNA, 22 bp, Artificial Sequence
  chemically synthesized
ccattatcttctctggtctcgg

SEQ ID NO: 44743 - DNA, 22 bp, Artificial Sequence
  chemically synthesized
tcttctctggtctcggggccca

SEQ ID NO: 44744 - DNA, 22 bp, Artificial Sequence
  chemically synthesized
ctctggtctcggggcccaagcc

SEQ ID NO: 44745 - DNA, 22 bp, Artificial Sequence
  chemically synthesized
tctggtctcggggcccaagcca

SEQ ID NO: 44746 - DNA, 22 bp, Artificial Sequence
  chemically synthesized
tggtctcggggcccaagccaaa

SEQ ID NO: 44747 - DNA, 22 bp, Artificial Sequence
  chemically synthesized
gtctcggggcccaagccaaaga

SEQ ID NO: 44748 - DNA, 22 bp, Artificial Sequence
  chemically synthesized
ggggcccaagccaaagagctgg

SEQ ID NO: 44749 - DNA, 22 bp, Artificial Sequence
  chemically synthesized
gagaacagtatctggccacaga

SEQ ID NO: 44750 - DNA, 22 bp, Artificial Sequence
  chemically synthesized
gccacagaacctaaggcctggt

SEQ ID NO: 44751 - DNA, 22 bp, Artificial Sequence
  chemically synthesized
aggcctggtagagcaagacagc

SEQ ID NO: 44752 - DNA, 22 bp, Artificial Sequence
  chemically synthesized
gtagagcaagacagccatgtgc

SEQ ID NO: 44753 - DNA, 22 bp, Artificial Sequence
  chemically synthesized
ccgtcactcccacagagctgca

SEQ ID NO: 44754 - DNA, 22 bp, Artificial Sequence
  chemically synthesized
cgtcactcccacagagctgcag

SEQ ID NO: 44755 - DNA, 22 bp, Artificial Sequence
  chemically synthesized
ccacagagctgcaggggtgtga

SEQ ID NO: 44756 - DNA, 22 bp, Artificial Sequence
  chemically synthesized
caggggtgtgacgcccctgccc

SEQ ID NO: 44757 - DNA, 22 bp, Artificial Sequence
  chemically synthesized
cccagccatacccttctgggcc

SEQ ID NO: 44758 - DNA, 22 bp, Artificial Sequence
  chemically synthesized
ctgggccacagtgctggaggct

SEQ ID NO: 44759 - DNA, 22 bp, Artificial Sequence
  chemically synthesized
tgggccacagtgctggaggctg

SEQ ID NO: 44760 - DNA, 22 bp, Artificial Sequence
  chemically synthesized
ggccacagtgctggaggctgaa

SEQ ID NO: 44761 - DNA, 22 bp, Artificial Sequence
  chemically synthesized
gaggctgaagtcaaagcccatc

SEQ ID NO: 44762 - DNA, 22 bp, Artificial Sequence
  chemically synthesized
aagtcaaagcccatcgtgcctt

SEQ ID NO: 44763 - DNA, 22 bp, Artificial Sequence
  chemically synthesized
attccttcaggagcaatactcc

SEQ ID NO: 44764 - DNA, 22 bp, Artificial Sequence
  chemically synthesized
ttccttcaggagcaatactcct

SEQ ID NO: 44765 - DNA, 22 bp, Artificial Sequence
  chemically synthesized
cttcaggagcaatactcctggg

SEQ ID NO: 44766 - DNA, 22 bp, Artificial Sequence
  chemically synthesized
caggagcaatactcctgggaaa

SEQ ID NO: 44767 - DNA, 22 bp, Artificial Sequence
  chemically synthesized
aggagcaatactcctgggaaag

SEQ ID NO: 44768 - DNA, 22 bp, Artificial Sequence
  chemically synthesized
ctgggaaaggttgcacattctg

SEQ ID NO: 44769 - DNA, 22 bp, Artificial Sequence
  chemically synthesized
ggaaaggttgcacattctgtaa

SEQ ID NO: 44770 - DNA, 22 bp, Artificial Sequence
  chemically synthesized
cacattctgtaactcctctaag

SEQ ID NO: 44771 - DNA, 22 bp, Artificial Sequence
  chemically synthesized
tgtaactcctctaagtgatatt

SEQ ID NO: 44772 - DNA, 22 bp, Artificial Sequence
  chemically synthesized
taactcctctaagtgatatttc

SEQ ID NO: 44773 - DNA, 22 bp, Artificial Sequence
  chemically synthesized
ctctaagtgatatttcttccca

SEQ ID NO: 44774 - DNA, 22 bp, Artificial Sequence
  chemically synthesized
taagtgatatttcttcccaggg

SEQ ID NO: 44775 - DNA, 22 bp, Artificial Sequence
  chemically synthesized
agtgatatttcttcccaggggc

SEQ ID NO: 44776 - DNA, 22 bp, Artificial Sequence
  chemically synthesized
cttcccaggggcaaaaaaggaa

SEQ ID NO: 44777 - DNA, 22 bp, Artificial Sequence
  chemically synthesized
ttcccaggggcaaaaaaggaaa

SEQ ID NO: 44778 - DNA, 22 bp, Artificial Sequence
  chemically synthesized
cccaggggcaaaaaaggaaatt

SEQ ID NO: 44779 - DNA, 22 bp, Artificial Sequence
  chemically synthesized
ccaggggcaaaaaaggaaatta

SEQ ID NO: 44780 - DNA, 22 bp, Artificial Sequence
  chemically synthesized
gccccattttatagataaagag

SEQ ID NO: 44781 - DNA, 22 bp, Artificial Sequence
  chemically synthesized
tatagataaagagcctgaggcc

SEQ ID NO: 44782 - DNA, 22 bp, Artificial Sequence
  chemically synthesized
atagataaagagcctgaggccc

SEQ ID NO: 44783 - DNA, 22 bp, Artificial Sequence
  chemically synthesized
tagataaagagcctgaggccca

SEQ ID NO: 44784 - DNA, 22 bp, Artificial Sequence
  chemically synthesized
aggcccaataggctgattgact

SEQ ID NO: 44785 - DNA, 22 bp, Artificial Sequence
  chemically synthesized
attgacttgtccggggccacct

SEQ ID NO: 44786 - DNA, 22 bp, Artificial Sequence
  chemically synthesized
acttgtccggggccacctagcc

SEQ ID NO: 44787 - DNA, 22 bp, Artificial Sequence
  chemically synthesized
gtccggggccacctagccagca

SEQ ID NO: 44788 - DNA, 22 bp, Artificial Sequence
  chemically synthesized
tccggggccacctagccagcag

SEQ ID NO: 44789 - DNA, 22 bp, Artificial Sequence
  chemically synthesized
gccagcaggtgaaaagactcat

SEQ ID NO: 44790 - DNA, 22 bp, Artificial Sequence
  chemically synthesized
atgtgtagctgactttagagtc

SEQ ID NO: 44791 - DNA, 22 bp, Artificial Sequence
  chemically synthesized
actttagagtccaagctccttc

SEQ ID NO: 44792 - DNA, 22 bp, Artificial Sequence
  chemically synthesized
tagagtccaagctccttcaacg

SEQ ID NO: 44793 - DNA, 22 bp, Artificial Sequence
  chemically synthesized
agagtccaagctccttcaacgt

SEQ ID NO: 44794 - DNA, 22 bp, Artificial Sequence
  chemically synthesized
gagtccaagctccttcaacgtc

SEQ ID NO: 44795 - DNA, 22 bp, Artificial Sequence
  chemically synthesized
cttcaacgtcccactttctcaa

SEQ ID NO: 44796 - DNA, 22 bp, Artificial Sequence
  chemically synthesized
caacgtcccactttctcaagac

SEQ ID NO: 44797 - DNA, 22 bp, Artificial Sequence
  chemically synthesized
aacgtcccactttctcaagaca

SEQ ID NO: 44798 - DNA, 22 bp, Artificial Sequence
  chemically synthesized
tctcaagacagtgtttgccacg

SEQ ID NO: 44799 - DNA, 22 bp, Artificial Sequence
  chemically synthesized
ctcaagacagtgtttgccacgg

SEQ ID NO: 44800 - DNA, 22 bp, Artificial Sequence
  chemically synthesized
tcaagacagtgtttgccacggg

SEQ ID NO: 44801 - DNA, 22 bp, Artificial Sequence
  chemically synthesized
aagacagtgtttgccacgggcc

SEQ ID NO: 44802 - DNA, 22 bp, Artificial Sequence
  chemically synthesized
gccacgggccagggctagcaaa

SEQ ID NO: 44803 - DNA, 22 bp, Artificial Sequence
  chemically synthesized
ccacgggccagggctagcaaaa

SEQ ID NO: 44804 - DNA, 22 bp, Artificial Sequence
  chemically synthesized
gcaaaaagacccctccaacccc

SEQ ID NO: 44805 - DNA, 22 bp, Artificial Sequence
  chemically synthesized
caacccctcatacctccccacc

SEQ ID NO: 44806 - DNA, 22 bp, Artificial Sequence
  chemically synthesized
atacctccccaccaaccccatg

SEQ ID NO: 44807 - DNA, 22 bp, Artificial Sequence
  chemically synthesized
cccaccaaccccatgcaggtgt

SEQ ID NO: 44808 - DNA, 22 bp, Artificial Sequence
  chemically synthesized
cccggaccaaaggggtggacag

SEQ ID NO: 44809 - DNA, 22 bp, Artificial Sequence
  chemically synthesized
aaggaaaccgctcaaccttgag

SEQ ID NO: 44810 - DNA, 22 bp, Artificial Sequence
  chemically synthesized
aaccttgagtggagaggctgct

SEQ ID NO: 44811 - DNA, 22 bp, Artificial Sequence
  chemically synthesized
gagtggagaggctgctgtgaaa

SEQ ID NO: 44812 - DNA, 22 bp, Artificial Sequence
  chemically synthesized
agtggagaggctgctgtgaaac

SEQ ID NO: 44813 - DNA, 22 bp, Artificial Sequence
  chemically synthesized
ctgtgaaacagctctgggcagc

SEQ ID NO: 44814 - DNA, 22 bp, Artificial Sequence
  chemically synthesized
tgaaacagctctgggcagcacc

SEQ ID NO: 44815 - DNA, 22 bp, Artificial Sequence
  chemically synthesized
tgggcagcacctgggccacagc

SEQ ID NO: 44816 - DNA, 22 bp, Artificial Sequence
  chemically synthesized
ggcagcacctgggccacagcat

SEQ ID NO: 44817 - DNA, 22 bp, Artificial Sequence
  chemically synthesized
ggccacagcatgtggaaggaga

SEQ ID NO: 44818 - DNA, 22 bp, Artificial Sequence
  chemically synthesized
ctaagctgcctggtactctgcc

SEQ ID NO: 44819 - DNA, 22 bp, Artificial Sequence
  chemically synthesized
agctgcctggtactctgccatc

SEQ ID NO: 44820 - DNA, 22 bp, Artificial Sequence
  chemically synthesized
cctggtactctgccatctgtct

SEQ ID NO: 44821 - DNA, 22 bp, Artificial Sequence
  chemically synthesized
gtactctgccatctgtcttctc

SEQ ID NO: 44822 - DNA, 22 bp, Artificial Sequence
  chemically synthesized
tgccatctgtcttctcttcctc

SEQ ID NO: 44823 - DNA, 22 bp, Artificial Sequence
  chemically synthesized
ccatctgtcttctcttcctcct

SEQ ID NO: 44824 - DNA, 22 bp, Artificial Sequence
  chemically synthesized
tcttctcttcctcctaatccat

SEQ ID NO: 44825 - DNA, 22 bp, Artificial Sequence
  chemically synthesized
ctcttcctcctaatccataagc

SEQ ID NO: 44826 - DNA, 22 bp, Artificial Sequence
  chemically synthesized
tcttcctcctaatccataagca

SEQ ID NO: 44827 - DNA, 22 bp, Artificial Sequence
  chemically synthesized
ttcctcctaatccataagcacc

SEQ ID NO: 44828 - DNA, 22 bp, Artificial Sequence
  chemically synthesized
cctcctaatccataagcaccag

SEQ ID NO: 44829 - DNA, 22 bp, Artificial Sequence
  chemically synthesized
ctcctaatccataagcaccaga

SEQ ID NO: 44830 - DNA, 22 bp, Artificial Sequence
  chemically synthesized
ctaatccataagcaccagacct

SEQ ID NO: 44831 - DNA, 22 bp, Artificial Sequence
  chemically synthesized
atccataagcaccagacctcaa

SEQ ID NO: 44832 - DNA, 22 bp, Artificial Sequence
  chemically synthesized
aagccccatgtgcagctccgga

SEQ ID NO: 44833 - DNA, 22 bp, Artificial Sequence
  chemically synthesized
cggaagctgctagacctcaagc

SEQ ID NO: 44834 - DNA, 22 bp, Artificial Sequence
  chemically synthesized
ctagacctcaagcaggactaag

SEQ ID NO: 44835 - DNA, 22 bp, Artificial Sequence
  chemically synthesized
gacctcaagcaggactaagatt

SEQ ID NO: 44836 - DNA, 22 bp, Artificial Sequence
  chemically synthesized
aagcaggactaagattcggaga

SEQ ID NO: 44837 - DNA, 22 bp, Artificial Sequence
  chemically synthesized
agattcggagagagcagccacc

SEQ ID NO: 44838 - DNA, 22 bp, Artificial Sequence
  chemically synthesized
ggagagagcagccaccgacctg

SEQ ID NO: 44839 - DNA, 22 bp, Artificial Sequence
  chemically synthesized
gctcctcccaggcaggccagcc

SEQ ID NO: 44840 - DNA, 22 bp, Artificial Sequence
  chemically synthesized
ctcccaggcaggccagcccagg

SEQ ID NO: 44841 - DNA, 22 bp, Artificial Sequence
  chemically synthesized
ccaggcaggccagcccaggtga

SEQ ID NO: 44842 - DNA, 22 bp, Artificial Sequence
  chemically synthesized
cagccaggcactcaccccactg

SEQ ID NO: 44843 - DNA, 22 bp, Artificial Sequence
  chemically synthesized
accccactgccaggctgtttac

SEQ ID NO: 44844 - DNA, 22 bp, Artificial Sequence
  chemically synthesized
ccaggctgtttactcttagctg

SEQ ID NO: 44845 - DNA, 22 bp, Artificial Sequence
  chemically synthesized
tttactcttagctggtgtttgt

SEQ ID NO: 44846 - DNA, 22 bp, Artificial Sequence
  chemically synthesized
actcttagctggtgtttgtctc

SEQ ID NO: 44847 - DNA, 22 bp, Artificial Sequence
  chemically synthesized
ctcttagctggtgtttgtctcc

SEQ ID NO: 44848 - DNA, 22 bp, Artificial Sequence
  chemically synthesized
ttagctggtgtttgtctcctgt

SEQ ID NO: 44849 - DNA, 22 bp, Artificial Sequence
  chemically synthesized
agctggtgtttgtctcctgtct

SEQ ID NO: 44850 - DNA, 22 bp, Artificial Sequence
  chemically synthesized
gctggtgtttgtctcctgtctg

SEQ ID NO: 44851 - DNA, 22 bp, Artificial Sequence
  chemically synthesized
gtgtttgtctcctgtctgctct

SEQ ID NO: 44852 - DNA, 22 bp, Artificial Sequence
  chemically synthesized
gtctcctgtctgctctactgta

SEQ ID NO: 44853 - DNA, 22 bp, Artificial Sequence
  chemically synthesized
tctcctgtctgctctactgtag

SEQ ID NO: 44854 - DNA, 22 bp, Artificial Sequence
  chemically synthesized
ctgtctgctctactgtagctcc

SEQ ID NO: 44855 - DNA, 22 bp, Artificial Sequence
  chemically synthesized
tctgctctactgtagctccctc

SEQ ID NO: 44856 - DNA, 22 bp, Artificial Sequence
  chemically synthesized
ctctactgtagctccctccctc

SEQ ID NO: 44857 - DNA, 22 bp, Artificial Sequence
  chemically synthesized
tactgtagctccctccctcctc

SEQ ID NO: 44858 - DNA, 22 bp, Artificial Sequence
  chemically synthesized
ctgtagctccctccctcctctc

SEQ ID NO: 44859 - DNA, 22 bp, Artificial Sequence
  chemically synthesized
tagctccctccctcctctcctc

SEQ ID NO: 44860 - DNA, 22 bp, Artificial Sequence
  chemically synthesized
cctccctcctctcctcctttcg

SEQ ID NO: 44861 - DNA, 22 bp, Artificial Sequence
  chemically synthesized
cctcctctcctcctttcggtcc

SEQ ID NO: 44862 - DNA, 22 bp, Artificial Sequence
  chemically synthesized
ctctcctcctttcggtcctctg

SEQ ID NO: 44863 - DNA, 22 bp, Artificial Sequence
  chemically synthesized
tcctcctttcggtcctctgccc

SEQ ID NO: 44864 - DNA, 22 bp, Artificial Sequence
  chemically synthesized
ctcctttcggtcctctgcccag

SEQ ID NO: 44865 - DNA, 22 bp, Artificial Sequence
  chemically synthesized
ctttcggtcctctgcccaggcc

SEQ ID NO: 44866 - DNA, 22 bp, Artificial Sequence
  chemically synthesized
tcggtcctctgcccaggcctgc

SEQ ID NO: 44867 - DNA, 22 bp, Artificial Sequence
  chemically synthesized
cggtcctctgcccaggcctgcc

SEQ ID NO: 44868 - DNA, 22 bp, Artificial Sequence
  chemically synthesized
ggtcctctgcccaggcctgcct

SEQ ID NO: 44869 - DNA, 22 bp, Artificial Sequence
  chemically synthesized
tgcccaggcctgcctgaggctg

SEQ ID NO: 44870 - DNA, 22 bp, Artificial Sequence
  chemically synthesized
cccaggcctgcctgaggctgcc

SEQ ID NO: 44871 - DNA, 22 bp, Artificial Sequence
  chemically synthesized
cctgaggctgcctgccagtgag

SEQ ID NO: 44872 - DNA, 22 bp, Artificial Sequence
  chemically synthesized
aggctgcctgccagtgagattg

SEQ ID NO: 44873 - DNA, 22 bp, Artificial Sequence
  chemically synthesized
cctgccagtgagattgcatgtc

SEQ ID NO: 44874 - DNA, 22 bp, Artificial Sequence
  chemically synthesized
ccagtgagattgcatgtcaggg

SEQ ID NO: 44875 - DNA, 22 bp, Artificial Sequence
  chemically synthesized
catgtcagggctttgccctggg

SEQ ID NO: 44876 - DNA, 22 bp, Artificial Sequence
  chemically synthesized
tgccctgggcactgagggctag

SEQ ID NO: 44877 - DNA, 22 bp, Artificial Sequence
  chemically synthesized
gccctgggcactgagggctagg

SEQ ID NO: 44878 - DNA, 22 bp, Artificial Sequence
  chemically synthesized
ccctgggcactgagggctaggg

SEQ ID NO: 44879 - DNA, 22 bp, Artificial Sequence
  chemically synthesized
ggcactgagggctagggtgccc

SEQ ID NO: 44880 - DNA, 22 bp, Artificial Sequence
  chemically synthesized
agggctagggtgcccagaggcc

SEQ ID NO: 44881 - DNA, 22 bp, Artificial Sequence
  chemically synthesized
gggtgcccagaggcctgcggct

SEQ ID NO: 44882 - DNA, 22 bp, Artificial Sequence
  chemically synthesized
cggctgtgccctggatggaaaa

SEQ ID NO: 44883 - DNA, 22 bp, Artificial Sequence
  chemically synthesized
tgccctggatggaaaaccagca

SEQ ID NO: 44884 - DNA, 22 bp, Artificial Sequence
  chemically synthesized
gatggaaaaccagcagcctgca

SEQ ID NO: 44885 - DNA, 22 bp, Artificial Sequence
  chemically synthesized
caaagctgtgggggcagcacag

SEQ ID NO: 44886 - DNA, 22 bp, Artificial Sequence
  chemically synthesized
tgggggcagcacaggacctgtg

SEQ ID NO: 44887 - DNA, 22 bp, Artificial Sequence
  chemically synthesized
tgtgtgagagcggtggtcttga

SEQ ID NO: 44888 - DNA, 22 bp, Artificial Sequence
  chemically synthesized
gagagtgaaagtggacaagtca

SEQ ID NO: 44889 - DNA, 22 bp, Artificial Sequence
  chemically synthesized
agagtgaaagtggacaagtcaa

SEQ ID NO: 44890 - DNA, 22 bp, Artificial Sequence
  chemically synthesized
ccggggccagttcccccattat

SEQ ID NO: 44891 - DNA, 22 bp, Artificial Sequence
  chemically synthesized
ccccattatgcactgcctctgc

SEQ ID NO: 44892 - DNA, 22 bp, Artificial Sequence
  chemically synthesized
tgcactgcctctgcttccccgc

SEQ ID NO: 44893 - DNA, 22 bp, Artificial Sequence
  chemically synthesized
cctctgcttccccgccaccatt

SEQ ID NO: 44894 - DNA, 22 bp, Artificial Sequence
  chemically synthesized
tgcttccccgccaccattaacc

SEQ ID NO: 44895 - DNA, 22 bp, Artificial Sequence
  chemically synthesized
cttccccgccaccattaaccgt

SEQ ID NO: 44896 - DNA, 22 bp, Artificial Sequence
  chemically synthesized
ccccgccaccattaaccgtgcc

SEQ ID NO: 44897 - DNA, 22 bp, Artificial Sequence
  chemically synthesized
cccgccaccattaaccgtgcct

SEQ ID NO: 44898 - DNA, 22 bp, Artificial Sequence
  chemically synthesized
accgtgcctctgtgggctgaca

SEQ ID NO: 44899 - DNA, 22 bp, Artificial Sequence
  chemically synthesized
tgtgggctgacagatgtgcctt

SEQ ID NO: 44900 - DNA, 22 bp, Artificial Sequence
  chemically synthesized
tgggctgacagatgtgccttca

SEQ ID NO: 44901 - DNA, 22 bp, Artificial Sequence
  chemically synthesized
acagatgtgccttcagagaagg

SEQ ID NO: 44902 - DNA, 22 bp, Artificial Sequence
  chemically synthesized
cagagaagggcagggagcagct

SEQ ID NO: 44903 - DNA, 22 bp, Artificial Sequence
  chemically synthesized
agagaagggcagggagcagctg

SEQ ID NO: 44904 - DNA, 22 bp, Artificial Sequence
  chemically synthesized
ggggcctggccagagcaatcat

SEQ ID NO: 44905 - DNA, 22 bp, Artificial Sequence
  chemically synthesized
gccagagcaatcatcccagcag

SEQ ID NO: 44906 - DNA, 22 bp, Artificial Sequence
  chemically synthesized
acatcagagcaggcagcctacc

SEQ ID NO: 44907 - DNA, 22 bp, Artificial Sequence
  chemically synthesized
catcagagcaggcagcctaccc

SEQ ID NO: 44908 - DNA, 22 bp, Artificial Sequence
  chemically synthesized
cccaagagccagggaaggaagg

SEQ ID NO: 44909 - DNA, 22 bp, Artificial Sequence
  chemically synthesized
agaaaaaatggcagaagaatgg

SEQ ID NO: 44910 - DNA, 22 bp, Artificial Sequence
  chemically synthesized
cgtgtattgatggaataaacca

SEQ ID NO: 44911 - DNA, 22 bp, Artificial Sequence
  chemically synthesized
atggaataaaccagacacccca

SEQ ID NO: 44912 - DNA, 22 bp, Artificial Sequence
  chemically synthesized
cccaactcctcaggacagggtt

SEQ ID NO: 44913 - DNA, 22 bp, Artificial Sequence
  chemically synthesized
ccaactcctcaggacagggttc

SEQ ID NO: 44914 - DNA, 22 bp, Artificial Sequence
  chemically synthesized
ctcaggacagggttcagagcta

SEQ ID NO: 44915 - DNA, 22 bp, Artificial Sequence
  chemically synthesized
aggacagggttcagagctaggc

SEQ ID NO: 44916 - DNA, 22 bp, Artificial Sequence
  chemically synthesized
agagctaggctggtggctgcta

SEQ ID NO: 44917 - DNA, 22 bp, Artificial Sequence
  chemically synthesized
ggctggtggctgctacacagag

SEQ ID NO: 44918 - DNA, 22 bp, Artificial Sequence
  chemically synthesized
gtggctgctacacagagacagc

SEQ ID NO: 44919 - DNA, 22 bp, Artificial Sequence
  chemically synthesized
ctacacagagacagcaccctcc

SEQ ID NO: 44920 - DNA, 22 bp, Artificial Sequence
  chemically synthesized
cacagagacagcaccctccacc

SEQ ID NO: 44921 - DNA, 22 bp, Artificial Sequence
  chemically synthesized
caccagttaaggtataagacaa

SEQ ID NO: 44922 - DNA, 22 bp, Artificial Sequence
  chemically synthesized
aggtataagacaaggtataagg

SEQ ID NO: 44923 - DNA, 22 bp, Artificial Sequence
  chemically synthesized
atgggctgtaggcatcaaacct

SEQ ID NO: 44924 - DNA, 22 bp, Artificial Sequence
  chemically synthesized
taggcatcaaacctggaactca

SEQ ID NO: 44925 - DNA, 22 bp, Artificial Sequence
  chemically synthesized
gaactcacagtcggggcacctc

SEQ ID NO: 44926 - DNA, 22 bp, Artificial Sequence
  chemically synthesized
acagtcggggcacctcacttca

SEQ ID NO: 44927 - DNA, 22 bp, Artificial Sequence
  chemically synthesized
acttcaagccttggtggatagg

SEQ ID NO: 44928 - DNA, 22 bp, Artificial Sequence
  chemically synthesized
caagccttggtggataggtaag

SEQ ID NO: 44929 - DNA, 22 bp, Artificial Sequence
  chemically synthesized
aagccttggtggataggtaaga

SEQ ID NO: 44930 - DNA, 22 bp, Artificial Sequence
  chemically synthesized
ggtggataggtaagatgaacac

SEQ ID NO: 44931 - DNA, 22 bp, Artificial Sequence
  chemically synthesized
gtggataggtaagatgaacact

SEQ ID NO: 44932 - DNA, 22 bp, Artificial Sequence
  chemically synthesized
aggctcccaagttagacagatg

SEQ ID NO: 44933 - DNA, 22 bp, Artificial Sequence
  chemically synthesized
ccaagttagacagatgagctgg

SEQ ID NO: 44934 - DNA, 22 bp, Artificial Sequence
  chemically synthesized
gacagatgagctggatccttca

SEQ ID NO: 44935 - DNA, 22 bp, Artificial Sequence
  chemically synthesized
gatccttcatctaccaccaatt

SEQ ID NO: 44936 - DNA, 22 bp, Artificial Sequence
  chemically synthesized
catctaccaccaatttcctggc

SEQ ID NO: 44937 - DNA, 22 bp, Artificial Sequence
  chemically synthesized
atctaccaccaatttcctggct

SEQ ID NO: 44938 - DNA, 22 bp, Artificial Sequence
  chemically synthesized
ccaccaatttcctggctgtgtg

SEQ ID NO: 44939 - DNA, 22 bp, Artificial Sequence
  chemically synthesized
cctggctgtgtgtctgggagca

SEQ ID NO: 44940 - DNA, 22 bp, Artificial Sequence
  chemically synthesized
ctggctgtgtgtctgggagcag

SEQ ID NO: 44941 - DNA, 22 bp, Artificial Sequence
  chemically synthesized
gctgtgtgtctgggagcagctc

SEQ ID NO: 44942 - DNA, 22 bp, Artificial Sequence
  chemically synthesized
tgtgtctgggagcagctcttta

SEQ ID NO: 44943 - DNA, 22 bp, Artificial Sequence
  chemically synthesized
ggagcagctctttaacctctcc

SEQ ID NO: 44944 - DNA, 22 bp, Artificial Sequence
  chemically synthesized
tttaacctctccaagcctcagt

SEQ ID NO: 44945 - DNA, 22 bp, Artificial Sequence
  chemically synthesized
taacctctccaagcctcagttt

SEQ ID NO: 44946 - DNA, 22 bp, Artificial Sequence
  chemically synthesized
aacctctccaagcctcagtttc

SEQ ID NO: 44947 - DNA, 22 bp, Artificial Sequence
  chemically synthesized
acctctccaagcctcagtttct

SEQ ID NO: 44948 - DNA, 22 bp, Artificial Sequence
  chemically synthesized
tccaagcctcagtttcttcact

SEQ ID NO: 44949 - DNA, 22 bp, Artificial Sequence
  chemically synthesized
caagcctcagtttcttcactgg

SEQ ID NO: 44950 - DNA, 22 bp, Artificial Sequence
  chemically synthesized
agtttcttcactggtaaaatgt

SEQ ID NO: 44951 - DNA, 22 bp, Artificial Sequence
  chemically synthesized
cttcactggtaaaatgtgtatg

SEQ ID NO: 44952 - DNA, 22 bp, Artificial Sequence
  chemically synthesized
ttcactggtaaaatgtgtatga

SEQ ID NO: 44953 - DNA, 22 bp, Artificial Sequence
  chemically synthesized
cactggtaaaatgtgtatgatg

SEQ ID NO: 44954 - DNA, 22 bp, Artificial Sequence
  chemically synthesized
actggtaaaatgtgtatgatga

SEQ ID NO: 44955 - DNA, 22 bp, Artificial Sequence
  chemically synthesized
gtaaaatgtgtatgatgacatt

SEQ ID NO: 44956 - DNA, 22 bp, Artificial Sequence
  chemically synthesized
tatggccaacctggggttgctg

SEQ ID NO: 44957 - DNA, 22 bp, Artificial Sequence
  chemically synthesized
gggttgctgatggaactagtta

SEQ ID NO: 44958 - DNA, 22 bp, Artificial Sequence
  chemically synthesized
ctgatggaactagttaaaagag

SEQ ID NO: 44959 - DNA, 22 bp, Artificial Sequence
  chemically synthesized
atggaactagttaaaagagtgt

SEQ ID NO: 44960 - DNA, 22 bp, Artificial Sequence
  chemically synthesized
gttaaaagagtgtctgtgaagc

SEQ ID NO: 44961 - DNA, 22 bp, Artificial Sequence
  chemically synthesized
aaagagtgtctgtgaagcaagc

SEQ ID NO: 44962 - DNA, 22 bp, Artificial Sequence
  chemically synthesized
tgaagcaagcctagctgggtgg

SEQ ID NO: 44963 - DNA, 22 bp, Artificial Sequence
  chemically synthesized
gctgggtgggcttgcaagcatt

SEQ ID NO: 44964 - DNA, 22 bp, Artificial Sequence
  chemically synthesized
ggtgggcttgcaagcatttctg

SEQ ID NO: 44965 - DNA, 22 bp, Artificial Sequence
  chemically synthesized
gcaagcatttctgggtcgctgc

SEQ ID NO: 44966 - DNA, 22 bp, Artificial Sequence
  chemically synthesized
caagcatttctgggtcgctgca

SEQ ID NO: 44967 - DNA, 22 bp, Artificial Sequence
  chemically synthesized
ctgggtcgctgcatcctcctct

SEQ ID NO: 44968 - DNA, 22 bp, Artificial Sequence
  chemically synthesized
tgggtcgctgcatcctcctctg

SEQ ID NO: 44969 - DNA, 22 bp, Artificial Sequence
  chemically synthesized
ggtcgctgcatcctcctctgta

SEQ ID NO: 44970 - DNA, 22 bp, Artificial Sequence
  chemically synthesized
catcctcctctgtaaaatggga

SEQ ID NO: 44971 - DNA, 22 bp, Artificial Sequence
  chemically synthesized
ctctgtaaaatgggagaaccct

SEQ ID NO: 44972 - DNA, 22 bp, Artificial Sequence
  chemically synthesized
tgtaaaatgggagaaccctgaa

SEQ ID NO: 44973 - DNA, 22 bp, Artificial Sequence
  chemically synthesized
taaaatgggagaaccctgaact

SEQ ID NO: 44974 - DNA, 22 bp, Artificial Sequence
  chemically synthesized
aactgctcagccgacctcatgg

SEQ ID NO: 44975 - DNA, 22 bp, Artificial Sequence
  chemically synthesized
ctcagccgacctcatggttgac

SEQ ID NO: 44976 - DNA, 22 bp, Artificial Sequence
  chemically synthesized
agccgacctcatggttgactca

SEQ ID NO: 44977 - DNA, 22 bp, Artificial Sequence
  chemically synthesized
atggttgactcactcagcaaca

SEQ ID NO: 44978 - DNA, 22 bp, Artificial Sequence
  chemically synthesized
actcactcagcaacagaggtct

SEQ ID NO: 44979 - DNA, 22 bp, Artificial Sequence
  chemically synthesized
actcagcaacagaggtctccac

SEQ ID NO: 44980 - DNA, 22 bp, Artificial Sequence
  chemically synthesized
agcaacagaggtctccacagga

SEQ ID NO: 44981 - DNA, 22 bp, Artificial Sequence
  chemically synthesized
cacaggagccctgcccacatga

SEQ ID NO: 44982 - DNA, 22 bp, Artificial Sequence
  chemically synthesized
cccacatgagacatctttggca

SEQ ID NO: 44983 - DNA, 22 bp, Artificial Sequence
  chemically synthesized
tggcacatcttctgaaacaaga

SEQ ID NO: 44984 - DNA, 22 bp, Artificial Sequence
  chemically synthesized
ggcacatcttctgaaacaagac

SEQ ID NO: 44985 - DNA, 22 bp, Artificial Sequence
  chemically synthesized
gcacatcttctgaaacaagacc

SEQ ID NO: 44986 - DNA, 22 bp, Artificial Sequence
  chemically synthesized
ctgaaacaagacctgtttctgg

SEQ ID NO: 44987 - DNA, 22 bp, Artificial Sequence
  chemically synthesized
tgaaacaagacctgtttctgga

SEQ ID NO: 44988 - DNA, 22 bp, Artificial Sequence
  chemically synthesized
aaacaagacctgtttctggaaa

SEQ ID NO: 44989 - DNA, 22 bp, Artificial Sequence
  chemically synthesized
tttctggaaagttgttggtaaa

SEQ ID NO: 44990 - DNA, 22 bp, Artificial Sequence
  chemically synthesized
ctggaaagttgttggtaaacat

SEQ ID NO: 44991 - DNA, 22 bp, Artificial Sequence
  chemically synthesized
tggaaagttgttggtaaacatc

SEQ ID NO: 44992 - DNA, 22 bp, Artificial Sequence
  chemically synthesized
gaaagttgttggtaaacatcca

SEQ ID NO: 44993 - DNA, 22 bp, Artificial Sequence
  chemically synthesized
ttggtaaacatccaattttgca

SEQ ID NO: 44994 - DNA, 22 bp, Artificial Sequence
  chemically synthesized
gtaaacatccaattttgcactt

SEQ ID NO: 44995 - DNA, 22 bp, Artificial Sequence
  chemically synthesized
tgcacttatttatattattgtt

SEQ ID NO: 44996 - DNA, 22 bp, Artificial Sequence
  chemically synthesized
gcacttatttatattattgttt

SEQ ID NO: 44997 - DNA, 22 bp, Artificial Sequence
  chemically synthesized
cacttatttatattattgtttc

SEQ ID NO: 44998 - DNA, 22 bp, Artificial Sequence
  chemically synthesized
atttatattattgtttcagaaa

SEQ ID NO: 44999 - DNA, 22 bp, Artificial Sequence
  chemically synthesized
tttatattattgtttcagaaac

SEQ ID NO: 45000 - DNA, 22 bp, Artificial Sequence
  chemically synthesized
atattattgtttcagaaacact

SEQ ID NO: 45001 - DNA, 22 bp, Artificial Sequence
  chemically synthesized
tattattgtttcagaaacacta

SEQ ID NO: 45002 - DNA, 22 bp, Artificial Sequence
  chemically synthesized
ttgtttcagaaacactaccttc

SEQ ID NO: 45003 - DNA, 22 bp, Artificial Sequence
  chemically synthesized
tttcagaaacactaccttcatt

SEQ ID NO: 45004 - DNA, 22 bp, Artificial Sequence
  chemically synthesized
cagaaacactaccttcattctg

SEQ ID NO: 45005 - DNA, 22 bp, Artificial Sequence
  chemically synthesized
agaaacactaccttcattctgc

SEQ ID NO: 45006 - DNA, 22 bp, Artificial Sequence
  chemically synthesized
ccttcattctgctttgattcaa

SEQ ID NO: 45007 - DNA, 22 bp, Artificial Sequence
  chemically synthesized
cattctgctttgattcaatggc

SEQ ID NO: 45008 - DNA, 22 bp, Artificial Sequence
  chemically synthesized
attctgctttgattcaatggca

SEQ ID NO: 45009 - DNA, 22 bp, Artificial Sequence
  chemically synthesized
tgctttgattcaatggcagcca

SEQ ID NO: 45010 - DNA, 22 bp, Artificial Sequence
  chemically synthesized
ctttgattcaatggcagccaat

SEQ ID NO: 45011 - DNA, 22 bp, Artificial Sequence
  chemically synthesized
tgattcaatggcagccaattta

SEQ ID NO: 45012 - DNA, 22 bp, Artificial Sequence
  chemically synthesized
gattcaatggcagccaatttaa

SEQ ID NO: 45013 - DNA, 22 bp, Artificial Sequence
  chemically synthesized
attcaatggcagccaatttaat

SEQ ID NO: 45014 - DNA, 22 bp, Artificial Sequence
  chemically synthesized
aatggcagccaatttaattcat

SEQ ID NO: 45015 - DNA, 22 bp, Artificial Sequence
  chemically synthesized
aattcatttggtccaaacctgt

SEQ ID NO: 45016 - DNA, 22 bp, Artificial Sequence
  chemically synthesized
attcatttggtccaaacctgta

SEQ ID NO: 45017 - DNA, 22 bp, Artificial Sequence
  chemically synthesized
atttggtccaaacctgtagtgc

SEQ ID NO: 45018 - DNA, 22 bp, Artificial Sequence
  chemically synthesized
ggtccaaacctgtagtgctact

SEQ ID NO: 45019 - DNA, 22 bp, Artificial Sequence
  chemically synthesized
gtccaaacctgtagtgctactt

SEQ ID NO: 45020 - DNA, 22 bp, Artificial Sequence
  chemically synthesized
tagtgctacttgccagaacaaa

SEQ ID NO: 45021 - DNA, 22 bp, Artificial Sequence
  chemically synthesized
cttgccagaacaaaatggaatg

SEQ ID NO: 45022 - DNA, 22 bp, Artificial Sequence
  chemically synthesized
gccagaacaaaatggaatgagc

SEQ ID NO: 45023 - DNA, 22 bp, Artificial Sequence
  chemically synthesized
ccagaacaaaatggaatgagcc

SEQ ID NO: 45024 - DNA, 22 bp, Artificial Sequence
  chemically synthesized
attccctgccctcaaggagctc

SEQ ID NO: 45025 - DNA, 22 bp, Artificial Sequence
  chemically synthesized
cctgccctcaaggagctcacag

SEQ ID NO: 45026 - DNA, 22 bp, Artificial Sequence
  chemically synthesized
ccctcaaggagctcacagtcca

SEQ ID NO: 45027 - DNA, 22 bp, Artificial Sequence
  chemically synthesized
aaggagctcacagtccagtggc

SEQ ID NO: 45028 - DNA, 22 bp, Artificial Sequence
  chemically synthesized
acagtccagtggctctgtcttt

SEQ ID NO: 45029 - DNA, 22 bp, Artificial Sequence
  chemically synthesized
tgtctttaatatctataagagc

SEQ ID NO: 45030 - DNA, 22 bp, Artificial Sequence
  chemically synthesized
tctttaatatctataagagcac

SEQ ID NO: 45031 - DNA, 22 bp, Artificial Sequence
  chemically synthesized
taatatctataagagcacaggt

SEQ ID NO: 45032 - DNA, 22 bp, Artificial Sequence
  chemically synthesized
aatatctataagagcacaggta

SEQ ID NO: 45033 - DNA, 22 bp, Artificial Sequence
  chemically synthesized
atatctataagagcacaggtaa

SEQ ID NO: 45034 - DNA, 22 bp, Artificial Sequence
  chemically synthesized
taagagcacaggtaagtgtcac

SEQ ID NO: 45035 - DNA, 22 bp, Artificial Sequence
  chemically synthesized
tgggggaaatgaagaacactct

SEQ ID NO: 45036 - DNA, 22 bp, Artificial Sequence
  chemically synthesized
gggggaaatgaagaacactctt

SEQ ID NO: 45037 - DNA, 22 bp, Artificial Sequence
  chemically synthesized
ggggaaatgaagaacactcttg

SEQ ID NO: 45038 - DNA, 22 bp, Artificial Sequence
  chemically synthesized
ttgtaatatgattaatcacttc

SEQ ID NO: 45039 - DNA, 22 bp, Artificial Sequence
  chemically synthesized
gtaatatgattaatcacttcca

SEQ ID NO: 45040 - DNA, 22 bp, Artificial Sequence
  chemically synthesized
taatatgattaatcacttccaa

SEQ ID NO: 45041 - DNA, 22 bp, Artificial Sequence
  chemically synthesized
atcacttccaaatactttacct

SEQ ID NO: 45042 - DNA, 22 bp, Artificial Sequence
  chemically synthesized
ccaaatactttacctggtttgt

SEQ ID NO: 45043 - DNA, 22 bp, Artificial Sequence
  chemically synthesized
caaatactttacctggtttgta

SEQ ID NO: 45044 - DNA, 22 bp, Artificial Sequence
  chemically synthesized
tacctggtttgtaagttctctt

SEQ ID NO: 45045 - DNA, 22 bp, Artificial Sequence
  chemically synthesized
acctggtttgtaagttctcttt

SEQ ID NO: 45046 - DNA, 22 bp, Artificial Sequence
  chemically synthesized
cctggtttgtaagttctctttc

SEQ ID NO: 45047 - DNA, 22 bp, Artificial Sequence
  chemically synthesized
gtttgtaagttctctttcgggt

SEQ ID NO: 45048 - DNA, 22 bp, Artificial Sequence
  chemically synthesized
gtaagttctctttcgggtgctt

SEQ ID NO: 45049 - DNA, 22 bp, Artificial Sequence
  chemically synthesized
taagttctctttcgggtgcttc

SEQ ID NO: 45050 - DNA, 22 bp, Artificial Sequence
  chemically synthesized
tctttcgggtgcttccctgagt

SEQ ID NO: 45051 - DNA, 22 bp, Artificial Sequence
  chemically synthesized
tttcgggtgcttccctgagtgg

SEQ ID NO: 45052 - DNA, 22 bp, Artificial Sequence
  chemically synthesized
tcgggtgcttccctgagtggca

SEQ ID NO: 45053 - DNA, 22 bp, Artificial Sequence
  chemically synthesized
cgggtgcttccctgagtggcaa

SEQ ID NO: 45054 - DNA, 22 bp, Artificial Sequence
  chemically synthesized
gggtgcttccctgagtggcaag

SEQ ID NO: 45055 - DNA, 22 bp, Artificial Sequence
  chemically synthesized
ccctgagtggcaagagggaaag

SEQ ID NO: 45056 - DNA, 22 bp, Artificial Sequence
  chemically synthesized
cctgagtggcaagagggaaagg

SEQ ID NO: 45057 - DNA, 22 bp, Artificial Sequence
  chemically synthesized
agtggcaagagggaaaggcctt

SEQ ID NO: 45058 - DNA, 22 bp, Artificial Sequence
  chemically synthesized
ttgcaagtactgacaccgcttt

SEQ ID NO: 45059 - DNA, 22 bp, Artificial Sequence
  chemically synthesized
tgcaagtactgacaccgctttc

SEQ ID NO: 45060 - DNA, 22 bp, Artificial Sequence
  chemically synthesized
gcaagtactgacaccgctttct

SEQ ID NO: 45061 - DNA, 22 bp, Artificial Sequence
  chemically synthesized
caagtactgacaccgctttctt

SEQ ID NO: 45062 - DNA, 22 bp, Artificial Sequence
  chemically synthesized
acaccgctttcttttttttttt

SEQ ID NO: 45063 - DNA, 22 bp, Artificial Sequence
  chemically synthesized
tctttttttttttttttttttt

SEQ ID NO: 45064 - DNA, 22 bp, Artificial Sequence
  chemically synthesized
cttttttttttttttttttttt

SEQ ID NO: 45065 - DNA, 22 bp, Artificial Sequence
  chemically synthesized
tttttttttttttttttttttg

SEQ ID NO: 45066 - DNA, 22 bp, Artificial Sequence
  chemically synthesized
tttttttttttttttttttgag

SEQ ID NO: 45067 - DNA, 22 bp, Artificial Sequence
  chemically synthesized
ttttttttttttttttttgaga

SEQ ID NO: 45068 - DNA, 22 bp, Artificial Sequence
  chemically synthesized
tttttttttttttttttgagac

SEQ ID NO: 45069 - DNA, 22 bp, Artificial Sequence
  chemically synthesized
ttttttttttttttttgagaca

SEQ ID NO: 45070 - DNA, 22 bp, Artificial Sequence
  chemically synthesized
tttttttttttttttgagacag

SEQ ID NO: 45071 - DNA, 22 bp, Artificial Sequence
  chemically synthesized
ttttttttttttttgagacaga

SEQ ID NO: 45072 - DNA, 22 bp, Artificial Sequence
  chemically synthesized
tttttttttttttgagacagag

SEQ ID NO: 45073 - DNA, 22 bp, Artificial Sequence
  chemically synthesized
ttttttttttttgagacagagt

SEQ ID NO: 45074 - DNA, 22 bp, Artificial Sequence
  chemically synthesized
tttttttttttgagacagagtt

SEQ ID NO: 45075 - DNA, 22 bp, Artificial Sequence
  chemically synthesized
ttttttttttgagacagagttt

SEQ ID NO: 45076 - DNA, 22 bp, Artificial Sequence
  chemically synthesized
tttttttttgagacagagtttc

SEQ ID NO: 45077 - DNA, 22 bp, Artificial Sequence
  chemically synthesized
ttttttttgagacagagtttcg

SEQ ID NO: 45078 - DNA, 22 bp, Artificial Sequence
  chemically synthesized
tttttttgagacagagtttcgc

SEQ ID NO: 45079 - DNA, 22 bp, Artificial Sequence
  chemically synthesized
ttttttgagacagagtttcgct

SEQ ID NO: 45080 - DNA, 22 bp, Artificial Sequence
  chemically synthesized
tttttgagacagagtttcgctc

SEQ ID NO: 45081 - DNA, 22 bp, Artificial Sequence
  chemically synthesized
ttttgagacagagtttcgctct

SEQ ID NO: 45082 - DNA, 22 bp, Artificial Sequence
  chemically synthesized
tttgagacagagtttcgctctt

SEQ ID NO: 45083 - DNA, 22 bp, Artificial Sequence
  chemically synthesized
ttgagacagagtttcgctcttg

SEQ ID NO: 45084 - DNA, 22 bp, Artificial Sequence
  chemically synthesized
tgagacagagtttcgctcttgt

SEQ ID NO: 45085 - DNA, 22 bp, Artificial Sequence
  chemically synthesized
gagacagagtttcgctcttgtt

SEQ ID NO: 45086 - DNA, 22 bp, Artificial Sequence
  chemically synthesized
agacagagtttcgctcttgttg

SEQ ID NO: 45087 - DNA, 22 bp, Artificial Sequence
  chemically synthesized
cgctcttgttgcccaggctggg

SEQ ID NO: 45088 - DNA, 22 bp, Artificial Sequence
  chemically synthesized
gctcttgttgcccaggctgggg

SEQ ID NO: 45089 - DNA, 22 bp, Artificial Sequence
  chemically synthesized
ttgttgcccaggctggggtgca

SEQ ID NO: 45090 - DNA, 22 bp, Artificial Sequence
  chemically synthesized
gttgcccaggctggggtgcaat

SEQ ID NO: 45091 - DNA, 22 bp, Artificial Sequence
  chemically synthesized
ttgcccaggctggggtgcaatg

SEQ ID NO: 45092 - DNA, 22 bp, Artificial Sequence
  chemically synthesized
cccaggctggggtgcaatggtg

SEQ ID NO: 45093 - DNA, 22 bp, Artificial Sequence
  chemically synthesized
gggtgcaatggtgtgatctcgg

SEQ ID NO: 45094 - DNA, 22 bp, Artificial Sequence
  chemically synthesized
ggctcaccacctctgcctcctg

SEQ ID NO: 45095 - DNA, 22 bp, Artificial Sequence
  chemically synthesized
accacctctgcctcctgggttc

SEQ ID NO: 45096 - DNA, 22 bp, Artificial Sequence
  chemically synthesized
tgcctcctgggttcaagcaatt

SEQ ID NO: 45097 - DNA, 22 bp, Artificial Sequence
  chemically synthesized
cctcctgggttcaagcaattct

SEQ ID NO: 45098 - DNA, 22 bp, Artificial Sequence
  chemically synthesized
ctgggttcaagcaattctcctc

SEQ ID NO: 45099 - DNA, 22 bp, Artificial Sequence
  chemically synthesized
ggttcaagcaattctcctccct

SEQ ID NO: 45100 - DNA, 22 bp, Artificial Sequence
  chemically synthesized
aagcaattctcctccctcagcc

SEQ ID NO: 45101 - DNA, 22 bp, Artificial Sequence
  chemically synthesized
tcctccctcagcctcctgagta

SEQ ID NO: 45102 - DNA, 22 bp, Artificial Sequence
  chemically synthesized
ctccctcagcctcctgagtagc

SEQ ID NO: 45103 - DNA, 22 bp, Artificial Sequence
  chemically synthesized
cctcagcctcctgagtagctgg

SEQ ID NO: 45104 - DNA, 22 bp, Artificial Sequence
  chemically synthesized
agcctcctgagtagctgggatt

SEQ ID NO: 45105 - DNA, 22 bp, Artificial Sequence
  chemically synthesized
ctgagtagctgggattacaggc

SEQ ID NO: 45106 - DNA, 22 bp, Artificial Sequence
  chemically synthesized
agtagctgggattacaggcatg

SEQ ID NO: 45107 - DNA, 22 bp, Artificial Sequence
  chemically synthesized
ggattacaggcatgtgcgacca

SEQ ID NO: 45108 - DNA, 22 bp, Artificial Sequence
  chemically synthesized
caggcatgtgcgaccatgcctg

SEQ ID NO: 45109 - DNA, 22 bp, Artificial Sequence
  chemically synthesized
gctaagtttatatttttaatag

SEQ ID NO: 45110 - DNA, 22 bp, Artificial Sequence
  chemically synthesized
agtttatatttttaatagagat

SEQ ID NO: 45111 - DNA, 22 bp, Artificial Sequence
  chemically synthesized
atatttttaatagagatgaggt

SEQ ID NO: 45112 - DNA, 22 bp, Artificial Sequence
  chemically synthesized
tatttttaatagagatgaggtt

SEQ ID NO: 45113 - DNA, 22 bp, Artificial Sequence
  chemically synthesized
ttaatagagatgaggtttctcc

SEQ ID NO: 45114 - DNA, 22 bp, Artificial Sequence
  chemically synthesized
taatagagatgaggtttctcca

SEQ ID NO: 45115 - DNA, 22 bp, Artificial Sequence
  chemically synthesized
aatagagatgaggtttctccat

SEQ ID NO: 45116 - DNA, 22 bp, Artificial Sequence
  chemically synthesized
atagagatgaggtttctccatg

SEQ ID NO: 45117 - DNA, 22 bp, Artificial Sequence
  chemically synthesized
ctccatgttggtcaggctggtc

SEQ ID NO: 45118 - DNA, 22 bp, Artificial Sequence
  chemically synthesized
tccatgttggtcaggctggtct

SEQ ID NO: 45119 - DNA, 22 bp, Artificial Sequence
  chemically synthesized
catgttggtcaggctggtctca

SEQ ID NO: 45120 - DNA, 22 bp, Artificial Sequence
  chemically synthesized
gtcaggctggtctcaaactctt

SEQ ID NO: 45121 - DNA, 22 bp, Artificial Sequence
  chemically synthesized
gtctcaaactcttgacctcagg

SEQ ID NO: 45122 - DNA, 22 bp, Artificial Sequence
  chemically synthesized
aaactcttgacctcaggtgatc

SEQ ID NO: 45123 - DNA, 22 bp, Artificial Sequence
  chemically synthesized
ttgacctcaggtgatctaccca

SEQ ID NO: 45124 - DNA, 22 bp, Artificial Sequence
  chemically synthesized
gacctcaggtgatctacccacc

SEQ ID NO: 45125 - DNA, 22 bp, Artificial Sequence
  chemically synthesized
acctcaggtgatctacccacct

SEQ ID NO: 45126 - DNA, 22 bp, Artificial Sequence
  chemically synthesized
aggtgatctacccacctcggcc

SEQ ID NO: 45127 - DNA, 22 bp, Artificial Sequence
  chemically synthesized
cccacctcggcctcccaaagtg

SEQ ID NO: 45128 - DNA, 22 bp, Artificial Sequence
  chemically synthesized
ggcctcccaaagtgctggaatt

SEQ ID NO: 45129 - DNA, 22 bp, Artificial Sequence
  chemically synthesized
ccaaagtgctggaattacagac

SEQ ID NO: 45130 - DNA, 22 bp, Artificial Sequence
  chemically synthesized
gaattacagacgtgagccactg

SEQ ID NO: 45131 - DNA, 22 bp, Artificial Sequence
  chemically synthesized
cagacgtgagccactgcgccca

SEQ ID NO: 45132 - DNA, 22 bp, Artificial Sequence
  chemically synthesized
cgcccagccttacactgctttc

SEQ ID NO: 45133 - DNA, 22 bp, Artificial Sequence
  chemically synthesized
acactgctttcttaattacagc

SEQ ID NO: 45134 - DNA, 22 bp, Artificial Sequence
  chemically synthesized
cactgctttcttaattacagca

SEQ ID NO: 45135 - DNA, 22 bp, Artificial Sequence
  chemically synthesized
ctttcttaattacagcagtgtg

SEQ ID NO: 45136 - DNA, 22 bp, Artificial Sequence
  chemically synthesized
tcttaattacagcagtgtgctc

SEQ ID NO: 45137 - DNA, 22 bp, Artificial Sequence
  chemically synthesized
cttaattacagcagtgtgctca

SEQ ID NO: 45138 - DNA, 22 bp, Artificial Sequence
  chemically synthesized
ttaattacagcagtgtgctcat

SEQ ID NO: 45139 - DNA, 22 bp, Artificial Sequence
  chemically synthesized
aattacagcagtgtgctcatct

SEQ ID NO: 45140 - DNA, 22 bp, Artificial Sequence
  chemically synthesized
attacagcagtgtgctcatctc

SEQ ID NO: 45141 - DNA, 22 bp, Artificial Sequence
  chemically synthesized
cagcagtgtgctcatctcacat

SEQ ID NO: 45142 - DNA, 22 bp, Artificial Sequence
  chemically synthesized
atctcacataaaaatttaagac

SEQ ID NO: 45143 - DNA, 22 bp, Artificial Sequence
  chemically synthesized
acataaaaatttaagacgggaa

SEQ ID NO: 45144 - DNA, 22 bp, Artificial Sequence
  chemically synthesized
aagacgggaaaacaggaagatg

SEQ ID NO: 45145 - DNA, 22 bp, Artificial Sequence
  chemically synthesized
agacgggaaaacaggaagatgc

SEQ ID NO: 45146 - DNA, 22 bp, Artificial Sequence
  chemically synthesized
tgagaagttatatcagcccctc

SEQ ID NO: 45147 - DNA, 22 bp, Artificial Sequence
  chemically synthesized
agaagttatatcagcccctctg

SEQ ID NO: 45148 - DNA, 22 bp, Artificial Sequence
  chemically synthesized
tatcagcccctctgcctctcta

SEQ ID NO: 45149 - DNA, 22 bp, Artificial Sequence
  chemically synthesized
tgcctctctacattccaaaaca

SEQ ID NO: 45150 - DNA, 22 bp, Artificial Sequence
  chemically synthesized
cctctctacattccaaaacagc

SEQ ID NO: 45151 - DNA, 22 bp, Artificial Sequence
  chemically synthesized
tctacattccaaaacagccttt

SEQ ID NO: 45152 - DNA, 22 bp, Artificial Sequence
  chemically synthesized
tacattccaaaacagcctttta

SEQ ID NO: 45153 - DNA, 22 bp, Artificial Sequence
  chemically synthesized
cattccaaaacagccttttatt

SEQ ID NO: 45154 - DNA, 22 bp, Artificial Sequence
  chemically synthesized
caaaacagccttttattctaat

SEQ ID NO: 45155 - DNA, 22 bp, Artificial Sequence
  chemically synthesized
ttattctaattattttactagt

SEQ ID NO: 45156 - DNA, 22 bp, Artificial Sequence
  chemically synthesized
tattctaattattttactagtg

SEQ ID NO: 45157 - DNA, 22 bp, Artificial Sequence
  chemically synthesized
attctaattattttactagtga

SEQ ID NO: 45158 - DNA, 22 bp, Artificial Sequence
  chemically synthesized
ttctaattattttactagtgaa

SEQ ID NO: 45159 - DNA, 22 bp, Artificial Sequence
  chemically synthesized
taattattttactagtgaatta

SEQ ID NO: 45160 - DNA, 22 bp, Artificial Sequence
  chemically synthesized
attattttactagtgaattatg

SEQ ID NO: 45161 - DNA, 22 bp, Artificial Sequence
  chemically synthesized
ttttactagtgaattatggaat

SEQ ID NO: 45162 - DNA, 22 bp, Artificial Sequence
  chemically synthesized
tactagtgaattatggaataaa

SEQ ID NO: 45163 - DNA, 22 bp, Artificial Sequence
  chemically synthesized
actagtgaattatggaataaag

SEQ ID NO: 45164 - DNA, 22 bp, Artificial Sequence
  chemically synthesized
ctagtgaattatggaataaagt

SEQ ID NO: 45165 - DNA, 22 bp, Artificial Sequence
  chemically synthesized
gtgaattatggaataaagtagt

SEQ ID NO: 45166 - DNA, 22 bp, Artificial Sequence
  chemically synthesized
tggaataaagtagtattatgtt

SEQ ID NO: 45167 - DNA, 22 bp, Artificial Sequence
  chemically synthesized
tgtttctttctacacaacttgt

SEQ ID NO: 45168 - DNA, 22 bp, Artificial Sequence
  chemically synthesized
ctttctacacaacttgtgttgc

SEQ ID NO: 45169 - DNA, 22 bp, Artificial Sequence
  chemically synthesized
tttctacacaacttgtgttgca

SEQ ID NO: 45170 - DNA, 22 bp, Artificial Sequence
  chemically synthesized
tctacacaacttgtgttgcact

SEQ ID NO: 45171 - DNA, 22 bp, Artificial Sequence
  chemically synthesized
ctacacaacttgtgttgcacta

SEQ ID NO: 45172 - DNA, 22 bp, Artificial Sequence
  chemically synthesized
tacacaacttgtgttgcactag

SEQ ID NO: 45173 - DNA, 22 bp, Artificial Sequence
  chemically synthesized
cacaacttgtgttgcactaggt

SEQ ID NO: 45174 - DNA, 22 bp, Artificial Sequence
  chemically synthesized
gtgttgcactaggtgaaatctc

SEQ ID NO: 45175 - DNA, 22 bp, Artificial Sequence
  chemically synthesized
tgttgcactaggtgaaatctca

SEQ ID NO: 45176 - DNA, 22 bp, Artificial Sequence
  chemically synthesized
cactaggtgaaatctcaggcta

SEQ ID NO: 45177 - DNA, 22 bp, Artificial Sequence
  chemically synthesized
ggtgaaatctcaggctaacaga

SEQ ID NO: 45178 - DNA, 22 bp, Artificial Sequence
  chemically synthesized
aggctaacagagcttcagggag

SEQ ID NO: 45179 - DNA, 22 bp, Artificial Sequence
  chemically synthesized
acagagcttcagggaggaaagg

SEQ ID NO: 45180 - DNA, 22 bp, Artificial Sequence
  chemically synthesized
cagggaggaaaggccagaccaa

SEQ ID NO: 45181 - DNA, 22 bp, Artificial Sequence
  chemically synthesized
agggaggaaaggccagaccaaa

SEQ ID NO: 45182 - DNA, 22 bp, Artificial Sequence
  chemically synthesized
actccacagagaagctgtacca

SEQ ID NO: 45183 - DNA, 22 bp, Artificial Sequence
  chemically synthesized
cacagagaagctgtaccaccag

SEQ ID NO: 45184 - DNA, 22 bp, Artificial Sequence
  chemically synthesized
taccaccagaagtcctggaaaa

SEQ ID NO: 45185 - DNA, 22 bp, Artificial Sequence
  chemically synthesized
gaaaactgagaggtttgcatgt

SEQ ID NO: 45186 - DNA, 22 bp, Artificial Sequence
  chemically synthesized
agaggtttgcatgttgtaacaa

SEQ ID NO: 45187 - DNA, 22 bp, Artificial Sequence
  chemically synthesized
gcatgttgtaacaatgcaactc

SEQ ID NO: 45188 - DNA, 22 bp, Artificial Sequence
  chemically synthesized
catgttgtaacaatgcaactca

SEQ ID NO: 45189 - DNA, 22 bp, Artificial Sequence
  chemically synthesized
taacaatgcaactcaagactat

SEQ ID NO: 45190 - DNA, 22 bp, Artificial Sequence
  chemically synthesized
aagactatcagaatgatatgaa

SEQ ID NO: 45191 - DNA, 22 bp, Artificial Sequence
  chemically synthesized
tcagaatgatatgaatatttgt

SEQ ID NO: 45192 - DNA, 22 bp, Artificial Sequence
  chemically synthesized
gtatagatacttatcaaagcaa

SEQ ID NO: 45193 - DNA, 22 bp, Artificial Sequence
  chemically synthesized
tatagatacttatcaaagcaac

SEQ ID NO: 45194 - DNA, 22 bp, Artificial Sequence
  chemically synthesized
atcaaagcaacaatcagagatc

SEQ ID NO: 45195 - DNA, 22 bp, Artificial Sequence
  chemically synthesized
tcaaagcaacaatcagagatca

SEQ ID NO: 45196 - DNA, 22 bp, Artificial Sequence
  chemically synthesized
caaatgagcttacagtttatga

SEQ ID NO: 45197 - DNA, 22 bp, Artificial Sequence
  chemically synthesized
acagtttatgatcctgctttgt

SEQ ID NO: 45198 - DNA, 22 bp, Artificial Sequence
  chemically synthesized
cagtttatgatcctgctttgta

SEQ ID NO: 45199 - DNA, 22 bp, Artificial Sequence
  chemically synthesized
atgatcctgctttgtaaaagct

SEQ ID NO: 45200 - DNA, 22 bp, Artificial Sequence
  chemically synthesized
tgatcctgctttgtaaaagctg

SEQ ID NO: 45201 - DNA, 22 bp, Artificial Sequence
  chemically synthesized
ctttgtaaaagctggtgaaaca

SEQ ID NO: 45202 - DNA, 22 bp, Artificial Sequence
  chemically synthesized
tgtaaaagctggtgaaacaaaa

SEQ ID NO: 45203 - DNA, 22 bp, Artificial Sequence
  chemically synthesized
gtaaaagctggtgaaacaaaat

SEQ ID NO: 45204 - DNA, 22 bp, Artificial Sequence
  chemically synthesized
taaaagctggtgaaacaaaatg

SEQ ID NO: 45205 - DNA, 22 bp, Artificial Sequence
  chemically synthesized
gtgaaacaaaatgatggatagc

SEQ ID NO: 45206 - DNA, 22 bp, Artificial Sequence
  chemically synthesized
gctgagctccaaagtcagggag

SEQ ID NO: 45207 - DNA, 22 bp, Artificial Sequence
  chemically synthesized
ctgagctccaaagtcagggagt

SEQ ID NO: 45208 - DNA, 22 bp, Artificial Sequence
  chemically synthesized
agctccaaagtcagggagtagg

SEQ ID NO: 45209 - DNA, 22 bp, Artificial Sequence
  chemically synthesized
caaagtcagggagtaggtaaac

SEQ ID NO: 45210 - DNA, 22 bp, Artificial Sequence
  chemically synthesized
cctcctggctctcctctacatt

SEQ ID NO: 45211 - DNA, 22 bp, Artificial Sequence
  chemically synthesized
ctggctctcctctacattctgt

SEQ ID NO: 45212 - DNA, 22 bp, Artificial Sequence
  chemically synthesized
gctctcctctacattctgtgag

SEQ ID NO: 45213 - DNA, 22 bp, Artificial Sequence
  chemically synthesized
tcctctacattctgtgagcaaa

SEQ ID NO: 45214 - DNA, 22 bp, Artificial Sequence
  chemically synthesized
ctctacattctgtgagcaaacg

SEQ ID NO: 45215 - DNA, 22 bp, Artificial Sequence
  chemically synthesized
tacattctgtgagcaaacggaa

SEQ ID NO: 45216 - DNA, 22 bp, Artificial Sequence
  chemically synthesized
cattctgtgagcaaacggaaaa

SEQ ID NO: 45217 - DNA, 22 bp, Artificial Sequence
  chemically synthesized
tgtgagcaaacggaaaaataaa

SEQ ID NO: 45218 - DNA, 22 bp, Artificial Sequence
  chemically synthesized
tgagcaaacggaaaaataaacc

SEQ ID NO: 45219 - DNA, 22 bp, Artificial Sequence
  chemically synthesized
agcctaataaaactgcacagac

SEQ ID NO: 45220 - DNA, 22 bp, Artificial Sequence
  chemically synthesized
ataaaactgcacagacagaata

SEQ ID NO: 45221 - DNA, 22 bp, Artificial Sequence
  chemically synthesized
cacagacagaataacttcttca

SEQ ID NO: 45222 - DNA, 22 bp, Artificial Sequence
  chemically synthesized
cttcatcagattcagaagagta

SEQ ID NO: 45223 - DNA, 22 bp, Artificial Sequence
  chemically synthesized
ttcatcagattcagaagagtag

SEQ ID NO: 45224 - DNA, 22 bp, Artificial Sequence
  chemically synthesized
catcagattcagaagagtagca

SEQ ID NO: 45225 - DNA, 22 bp, Artificial Sequence
  chemically synthesized
atcagattcagaagagtagcag

SEQ ID NO: 45226 - DNA, 22 bp, Artificial Sequence
  chemically synthesized
agaagagtagcagggggtttct

SEQ ID NO: 45227 - DNA, 22 bp, Artificial Sequence
  chemically synthesized
ctcgctagcacagatttgagct

SEQ ID NO: 45228 - DNA, 22 bp, Artificial Sequence
  chemically synthesized
tcgctagcacagatttgagctc

SEQ ID NO: 45229 - DNA, 22 bp, Artificial Sequence
  chemically synthesized
gctagcacagatttgagctctg

SEQ ID NO: 45230 - DNA, 22 bp, Artificial Sequence
  chemically synthesized
gcacagatttgagctctgccat

SEQ ID NO: 45231 - DNA, 22 bp, Artificial Sequence
  chemically synthesized
gagctctgccatcacacacttt

SEQ ID NO: 45232 - DNA, 22 bp, Artificial Sequence
  chemically synthesized
agctctgccatcacacactttg

SEQ ID NO: 45233 - DNA, 22 bp, Artificial Sequence
  chemically synthesized
tgccatcacacactttgtacat

SEQ ID NO: 45234 - DNA, 22 bp, Artificial Sequence
  chemically synthesized
ccatcacacactttgtacatac

SEQ ID NO: 45235 - DNA, 22 bp, Artificial Sequence
  chemically synthesized
tgtacatacaattctgggatct

SEQ ID NO: 45236 - DNA, 22 bp, Artificial Sequence
  chemically synthesized
gtacatacaattctgggatctc

SEQ ID NO: 45237 - DNA, 22 bp, Artificial Sequence
  chemically synthesized
tacatacaattctgggatctca

SEQ ID NO: 45238 - DNA, 22 bp, Artificial Sequence
  chemically synthesized
tgggatctcaggtattgctcct

SEQ ID NO: 45239 - DNA, 22 bp, Artificial Sequence
  chemically synthesized
ggatctcaggtattgctcctaa

SEQ ID NO: 45240 - DNA, 22 bp, Artificial Sequence
  chemically synthesized
aggtattgctcctaaagaaaga

SEQ ID NO: 45241 - DNA, 22 bp, Artificial Sequence
  chemically synthesized
ctcctaaagaaagagccagctt

SEQ ID NO: 45242 - DNA, 22 bp, Artificial Sequence
  chemically synthesized
ctaaagaaagagccagcttcct

SEQ ID NO: 45243 - DNA, 22 bp, Artificial Sequence
  chemically synthesized
aagaaagagccagcttccttct

SEQ ID NO: 45244 - DNA, 22 bp, Artificial Sequence
  chemically synthesized
ccttctcttatcttcctccaac

SEQ ID NO: 45245 - DNA, 22 bp, Artificial Sequence
  chemically synthesized
cttctcttatcttcctccaaca

SEQ ID NO: 45246 - DNA, 22 bp, Artificial Sequence
  chemically synthesized
ctcttatcttcctccaacatcc

SEQ ID NO: 45247 - DNA, 22 bp, Artificial Sequence
  chemically synthesized
tcttatcttcctccaacatcca

SEQ ID NO: 45248 - DNA, 22 bp, Artificial Sequence
  chemically synthesized
ttatcttcctccaacatccaaa

SEQ ID NO: 45249 - DNA, 22 bp, Artificial Sequence
  chemically synthesized
atcttcctccaacatccaaaag

SEQ ID NO: 45250 - DNA, 22 bp, Artificial Sequence
  chemically synthesized
tcttcctccaacatccaaaagc

SEQ ID NO: 45251 - DNA, 22 bp, Artificial Sequence
  chemically synthesized
cctccaacatccaaaagcagtg

SEQ ID NO: 45252 - DNA, 22 bp, Artificial Sequence
  chemically synthesized
ctccaacatccaaaagcagtgt

SEQ ID NO: 45253 - DNA, 22 bp, Artificial Sequence
  chemically synthesized
caacatccaaaagcagtgttca

SEQ ID NO: 45254 - DNA, 22 bp, Artificial Sequence
  chemically synthesized
acacccaatcccatgctttcta

SEQ ID NO: 45255 - DNA, 22 bp, Artificial Sequence
  chemically synthesized
tctaatattaaaatatgaattt

SEQ ID NO: 45256 - DNA, 22 bp, Artificial Sequence
  chemically synthesized
ctaatattaaaatatgaattta

SEQ ID NO: 45257 - DNA, 22 bp, Artificial Sequence
  chemically synthesized
taatattaaaatatgaatttaa

SEQ ID NO: 45258 - DNA, 22 bp, Artificial Sequence
  chemically synthesized
atattaaaatatgaatttaaga

SEQ ID NO: 45259 - DNA, 22 bp, Artificial Sequence
  chemically synthesized
aaatatgaatttaagaaatacc

SEQ ID NO: 45260 - DNA, 22 bp, Artificial Sequence
  chemically synthesized
aagaaataccagtgaaaagaga

SEQ ID NO: 45261 - DNA, 22 bp, Artificial Sequence
  chemically synthesized
agaaataccagtgaaaagagat

SEQ ID NO: 45262 - DNA, 22 bp, Artificial Sequence
  chemically synthesized
tttaaaccagaaactctttgtg

SEQ ID NO: 45263 - DNA, 22 bp, Artificial Sequence
  chemically synthesized
ttaaaccagaaactctttgtgt

SEQ ID NO: 45264 - DNA, 22 bp, Artificial Sequence
  chemically synthesized
taaaccagaaactctttgtgtt

SEQ ID NO: 45265 - DNA, 22 bp, Artificial Sequence
  chemically synthesized
aaaccagaaactctttgtgttg

SEQ ID NO: 45266 - DNA, 22 bp, Artificial Sequence
  chemically synthesized
aaccagaaactctttgtgttgt

SEQ ID NO: 45267 - DNA, 22 bp, Artificial Sequence
  chemically synthesized
tttgtgttgtaatgttcttgat

SEQ ID NO: 45268 - DNA, 22 bp, Artificial Sequence
  chemically synthesized
tgtgttgtaatgttcttgatat

SEQ ID NO: 45269 - DNA, 22 bp, Artificial Sequence
  chemically synthesized
gtgttgtaatgttcttgatatg

SEQ ID NO: 45270 - DNA, 22 bp, Artificial Sequence
  chemically synthesized
tgttgtaatgttcttgatatgt

SEQ ID NO: 45271 - DNA, 22 bp, Artificial Sequence
  chemically synthesized
taatgttcttgatatgttaata

SEQ ID NO: 45272 - DNA, 22 bp, Artificial Sequence
  chemically synthesized
ttgatatgttaataaaactgtt

SEQ ID NO: 45273 - DNA, 22 bp, Artificial Sequence
  chemically synthesized
gatatgttaataaaactgtttt

SEQ ID NO: 45274 - DNA, 22 bp, Artificial Sequence
  chemically synthesized
atatgttaataaaactgttttc

SEQ ID NO: 45275 - DNA, 22 bp, Artificial Sequence
  chemically synthesized
ataaaactgttttcaatcatca

SEQ ID NO: 45276 - DNA, 22 bp, Artificial Sequence
  chemically synthesized
ttttcaatcatcatcagagaaa

SEQ ID NO: 45277 - DNA, 22 bp, Artificial Sequence
  chemically synthesized
tcaatcatcatcagagaaaaac

SEQ ID NO: 45278 - DNA, 22 bp, Artificial Sequence
  chemically synthesized
caatcatcatcagagaaaaaca

SEQ ID NO: 45279 - DNA, 22 bp, Artificial Sequence
  chemically synthesized
aatcatcatcagagaaaaacaa

SEQ ID NO: 45280 - DNA, 22 bp, Artificial Sequence
  chemically synthesized
acctctgatcatggtagcacag

SEQ ID NO: 45281 - DNA, 22 bp, Artificial Sequence
  chemically synthesized
cctctgatcatggtagcacagt

SEQ ID NO: 45282 - DNA, 22 bp, Artificial Sequence
  chemically synthesized
tgatcatggtagcacagtagag

SEQ ID NO: 45283 - DNA, 22 bp, Artificial Sequence
  chemically synthesized
atcatggtagcacagtagagca

SEQ ID NO: 45284 - DNA, 22 bp, Artificial Sequence
  chemically synthesized
aattggtgatcaaaagaaataa

SEQ ID NO: 45285 - DNA, 22 bp, Artificial Sequence
  chemically synthesized
gtgatcaaaagaaataaattct

SEQ ID NO: 45286 - DNA, 22 bp, Artificial Sequence
  chemically synthesized
tagtcctgtcacccagaaacta

SEQ ID NO: 45287 - DNA, 22 bp, Artificial Sequence
  chemically synthesized
gtcctgtcacccagaaactatg

SEQ ID NO: 45288 - DNA, 22 bp, Artificial Sequence
  chemically synthesized
tcacccagaaactatgtgacca

SEQ ID NO: 45289 - DNA, 22 bp, Artificial Sequence
  chemically synthesized
tgtgaccaggggaggtacttaa

SEQ ID NO: 45290 - DNA, 22 bp, Artificial Sequence
  chemically synthesized
aatctctaagagaatcaagtct

SEQ ID NO: 45291 - DNA, 22 bp, Artificial Sequence
  chemically synthesized
atctctaagagaatcaagtctc

SEQ ID NO: 45292 - DNA, 22 bp, Artificial Sequence
  chemically synthesized
taagagaatcaagtctcgagtg

SEQ ID NO: 45293 - DNA, 22 bp, Artificial Sequence
  chemically synthesized
agagaatcaagtctcgagtggg

SEQ ID NO: 45294 - DNA, 22 bp, Artificial Sequence
  chemically synthesized
gagtgggtaaaatgagctgggg

SEQ ID NO: 45295 - DNA, 22 bp, Artificial Sequence
  chemically synthesized
gggaaggagtgaaccagtgaga

SEQ ID NO: 45296 - DNA, 22 bp, Artificial Sequence
  chemically synthesized
gtctgtctggggctcccagaag

SEQ ID NO: 45297 - DNA, 22 bp, Artificial Sequence
  chemically synthesized
tctggggctcccagaagacaca

SEQ ID NO: 45298 - DNA, 22 bp, Artificial Sequence
  chemically synthesized
gggctcccagaagacacagcca

SEQ ID NO: 45299 - DNA, 22 bp, Artificial Sequence
  chemically synthesized
ccagaagacacagccagacttc

SEQ ID NO: 45300 - DNA, 22 bp, Artificial Sequence
  chemically synthesized
ctttcttgctcttgtccaaaca

SEQ ID NO: 45301 - DNA, 22 bp, Artificial Sequence
  chemically synthesized
tttcttgctcttgtccaaacac

SEQ ID NO: 45302 - DNA, 22 bp, Artificial Sequence
  chemically synthesized
tcttgctcttgtccaaacacct

SEQ ID NO: 45303 - DNA, 22 bp, Artificial Sequence
  chemically synthesized
cttgctcttgtccaaacacctc

SEQ ID NO: 45304 - DNA, 22 bp, Artificial Sequence
  chemically synthesized
ttgctcttgtccaaacacctcc

SEQ ID NO: 45305 - DNA, 22 bp, Artificial Sequence
  chemically synthesized
gctcttgtccaaacacctcctt

SEQ ID NO: 45306 - DNA, 22 bp, Artificial Sequence
  chemically synthesized
ctcttgtccaaacacctccttg

SEQ ID NO: 45307 - DNA, 22 bp, Artificial Sequence
  chemically synthesized
ttgtccaaacacctccttgtct

SEQ ID NO: 45308 - DNA, 22 bp, Artificial Sequence
  chemically synthesized
gtccaaacacctccttgtcttt

SEQ ID NO: 45309 - DNA, 22 bp, Artificial Sequence
  chemically synthesized
tccaaacacctccttgtctttt

SEQ ID NO: 45310 - DNA, 22 bp, Artificial Sequence
  chemically synthesized
cttgtcttttaaggcctgggct

SEQ ID NO: 45311 - DNA, 22 bp, Artificial Sequence
  chemically synthesized
gtcttttaaggcctgggctgtc

SEQ ID NO: 45312 - DNA, 22 bp, Artificial Sequence
  chemically synthesized
tcttttaaggcctgggctgtct

SEQ ID NO: 45313 - DNA, 22 bp, Artificial Sequence
  chemically synthesized
ttaaggcctgggctgtctaggg

SEQ ID NO: 45314 - DNA, 22 bp, Artificial Sequence
  chemically synthesized
taaggcctgggctgtctagggg

SEQ ID NO: 45315 - DNA, 22 bp, Artificial Sequence
  chemically synthesized
aaggcctgggctgtctaggggg

SEQ ID NO: 45316 - DNA, 22 bp, Artificial Sequence
  chemically synthesized
aggcctgggctgtctaggggga

SEQ ID NO: 45317 - DNA, 22 bp, Artificial Sequence
  chemically synthesized
ggctgtctagggggatggctac

SEQ ID NO: 45318 - DNA, 22 bp, Artificial Sequence
  chemically synthesized
tctagggggatggctactggct

SEQ ID NO: 45319 - DNA, 22 bp, Artificial Sequence
  chemically synthesized
gggggatggctactggcttgga

SEQ ID NO: 45320 - DNA, 22 bp, Artificial Sequence
  chemically synthesized
ctggcttggagcaaaaccaacg

SEQ ID NO: 45321 - DNA, 22 bp, Artificial Sequence
  chemically synthesized
gcttggagcaaaaccaacgtgt

SEQ ID NO: 45322 - DNA, 22 bp, Artificial Sequence
  chemically synthesized
ggagcaaaaccaacgtgtctgt

SEQ ID NO: 45323 - DNA, 22 bp, Artificial Sequence
  chemically synthesized
gagcaaaaccaacgtgtctgtc

SEQ ID NO: 45324 - DNA, 22 bp, Artificial Sequence
  chemically synthesized
tcatcttaatacacacggaatg

SEQ ID NO: 45325 - DNA, 22 bp, Artificial Sequence
  chemically synthesized
aatacacacggaatgtgttgaa

SEQ ID NO: 45326 - DNA, 22 bp, Artificial Sequence
  chemically synthesized
atacacacggaatgtgttgaaa

SEQ ID NO: 45327 - DNA, 22 bp, Artificial Sequence
  chemically synthesized
aaatgaaggtgtctgtgtggaa

SEQ ID NO: 45328 - DNA, 22 bp, Artificial Sequence
  chemically synthesized
tgtggaagggacagacccagat

SEQ ID NO: 45329 - DNA, 22 bp, Artificial Sequence
  chemically synthesized
tgcatttgtcctggcaatggga

SEQ ID NO: 45330 - DNA, 22 bp, Artificial Sequence
  chemically synthesized
catttgtcctggcaatgggagc

SEQ ID NO: 45331 - DNA, 22 bp, Artificial Sequence
  chemically synthesized
gtcctggcaatgggagcaggaa

SEQ ID NO: 45332 - DNA, 22 bp, Artificial Sequence
  chemically synthesized
tcctggcaatgggagcaggaat

SEQ ID NO: 45333 - DNA, 22 bp, Artificial Sequence
  chemically synthesized
gcaatgggagcaggaatgagtc

SEQ ID NO: 45334 - DNA, 22 bp, Artificial Sequence
  chemically synthesized
ctctaaacctggtcactcctag

SEQ ID NO: 45335 - DNA, 22 bp, Artificial Sequence
  chemically synthesized
tctaaacctggtcactcctagt

SEQ ID NO: 45336 - DNA, 22 bp, Artificial Sequence
  chemically synthesized
taaacctggtcactcctagtcc

SEQ ID NO: 45337 - DNA, 22 bp, Artificial Sequence
  chemically synthesized
aacctggtcactcctagtccca

SEQ ID NO: 45338 - DNA, 22 bp, Artificial Sequence
  chemically synthesized
gtcactcctagtcccaagatgg

SEQ ID NO: 45339 - DNA, 22 bp, Artificial Sequence
  chemically synthesized
ctagtcccaagatggagaagcc

SEQ ID NO: 45340 - DNA, 22 bp, Artificial Sequence
  chemically synthesized
gtcccaagatggagaagccaca

SEQ ID NO: 45341 - DNA, 22 bp, Artificial Sequence
  chemically synthesized
gatcatgttagccccattctgc

SEQ ID NO: 45342 - DNA, 22 bp, Artificial Sequence
  chemically synthesized
atcatgttagccccattctgca

SEQ ID NO: 45343 - DNA, 22 bp, Artificial Sequence
  chemically synthesized
gccccattctgcagcctcagga

SEQ ID NO: 45344 - DNA, 22 bp, Artificial Sequence
  chemically synthesized
tgcagcctcaggaggctctgac

SEQ ID NO: 45345 - DNA, 22 bp, Artificial Sequence
  chemically synthesized
cagcctcaggaggctctgacca

SEQ ID NO: 45346 - DNA, 22 bp, Artificial Sequence
  chemically synthesized
aggaggctctgaccaggtggaa

SEQ ID NO: 45347 - DNA, 22 bp, Artificial Sequence
  chemically synthesized
tgaccaggtggaaagccagaat

SEQ ID NO: 45348 - DNA, 22 bp, Artificial Sequence
  chemically synthesized
accaggtggaaagccagaatgg

SEQ ID NO: 45349 - DNA, 22 bp, Artificial Sequence
  chemically synthesized
caaggagcctcacttctccagg

SEQ ID NO: 45350 - DNA, 22 bp, Artificial Sequence
  chemically synthesized
acttctccaggcattgtgactt

SEQ ID NO: 45351 - DNA, 22 bp, Artificial Sequence
  chemically synthesized
ctccaggcattgtgacttttta

SEQ ID NO: 45352 - DNA, 22 bp, Artificial Sequence
  chemically synthesized
tccaggcattgtgactttttat

SEQ ID NO: 45353 - DNA, 22 bp, Artificial Sequence
  chemically synthesized
caggcattgtgactttttatta

SEQ ID NO: 45354 - DNA, 22 bp, Artificial Sequence
  chemically synthesized
tgactttttattaaaaaccctt

SEQ ID NO: 45355 - DNA, 22 bp, Artificial Sequence
  chemically synthesized
tttattaaaaacccttacccat

SEQ ID NO: 45356 - DNA, 22 bp, Artificial Sequence
  chemically synthesized
ttattaaaaacccttacccatg

SEQ ID NO: 45357 - DNA, 22 bp, Artificial Sequence
  chemically synthesized
tattaaaaacccttacccatgc

SEQ ID NO: 45358 - DNA, 22 bp, Artificial Sequence
  chemically synthesized
attaaaaacccttacccatgcc

SEQ ID NO: 45359 - DNA, 22 bp, Artificial Sequence
  chemically synthesized
ttaaaaacccttacccatgcca

SEQ ID NO: 45360 - DNA, 22 bp, Artificial Sequence
  chemically synthesized
aaaacccttacccatgccaccc

SEQ ID NO: 45361 - DNA, 22 bp, Artificial Sequence
  chemically synthesized
acccatgccacccaccgcagcc

SEQ ID NO: 45362 - DNA, 22 bp, Artificial Sequence
  chemically synthesized
cccatgccacccaccgcagcct

SEQ ID NO: 45363 - DNA, 22 bp, Artificial Sequence
  chemically synthesized
gacaggcattccaggagccaga

SEQ ID NO: 45364 - DNA, 22 bp, Artificial Sequence
  chemically synthesized
caggagccagacatgtccctgg

SEQ ID NO: 45365 - DNA, 22 bp, Artificial Sequence
  chemically synthesized
gaagacagtaggctattgcttc

SEQ ID NO: 45366 - DNA, 22 bp, Artificial Sequence
  chemically synthesized
ttgcttcctctgagcactgcaa

SEQ ID NO: 45367 - DNA, 22 bp, Artificial Sequence
  chemically synthesized
cttcctctgagcactgcaacaa

SEQ ID NO: 45368 - DNA, 22 bp, Artificial Sequence
  chemically synthesized
cctctgagcactgcaacaattt

SEQ ID NO: 45369 - DNA, 22 bp, Artificial Sequence
  chemically synthesized
ctctgagcactgcaacaatttt

SEQ ID NO: 45370 - DNA, 22 bp, Artificial Sequence
  chemically synthesized
tgagcactgcaacaattttctc

SEQ ID NO: 45371 - DNA, 22 bp, Artificial Sequence
  chemically synthesized
agcactgcaacaattttctctg

SEQ ID NO: 45372 - DNA, 22 bp, Artificial Sequence
  chemically synthesized
caacaattttctctggaccctc

SEQ ID NO: 45373 - DNA, 22 bp, Artificial Sequence
  chemically synthesized
tctctggaccctctcctccacc

SEQ ID NO: 45374 - DNA, 22 bp, Artificial Sequence
  chemically synthesized
ctctggaccctctcctccacct

SEQ ID NO: 45375 - DNA, 22 bp, Artificial Sequence
  chemically synthesized
tctggaccctctcctccaccta

SEQ ID NO: 45376 - DNA, 22 bp, Artificial Sequence
  chemically synthesized
tggaccctctcctccacctatt

SEQ ID NO: 45377 - DNA, 22 bp, Artificial Sequence
  chemically synthesized
gaccctctcctccacctattca

SEQ ID NO: 45378 - DNA, 22 bp, Artificial Sequence
  chemically synthesized
tcctccacctattcacagatgg

SEQ ID NO: 45379 - DNA, 22 bp, Artificial Sequence
  chemically synthesized
ctccacctattcacagatgggg

SEQ ID NO: 45380 - DNA, 22 bp, Artificial Sequence
  chemically synthesized
cacctattcacagatggggcat

SEQ ID NO: 45381 - DNA, 22 bp, Artificial Sequence
  chemically synthesized
ttcacagatggggcataaccct

SEQ ID NO: 45382 - DNA, 22 bp, Artificial Sequence
  chemically synthesized
acagatggggcataaccctccc

SEQ ID NO: 45383 - DNA, 22 bp, Artificial Sequence
  chemically synthesized
cctcctatccattagattgccc

SEQ ID NO: 45384 - DNA, 22 bp, Artificial Sequence
  chemically synthesized
ctatccattagattgcccaaat

SEQ ID NO: 45385 - DNA, 22 bp, Artificial Sequence
  chemically synthesized
tccattagattgcccaaatctg

SEQ ID NO: 45386 - DNA, 22 bp, Artificial Sequence
  chemically synthesized
gattgcccaaatctgggaaaat

SEQ ID NO: 45387 - DNA, 22 bp, Artificial Sequence
  chemically synthesized
cccaaatctgggaaaataatgt

SEQ ID NO: 45388 - DNA, 22 bp, Artificial Sequence
  chemically synthesized
ggaaaataatgtgtggcgctca

SEQ ID NO: 45389 - DNA, 22 bp, Artificial Sequence
  chemically synthesized
aggtctgagtgcagaccaagct

SEQ ID NO: 45390 - DNA, 22 bp, Artificial Sequence
  chemically synthesized
agtgcagaccaagctcccaata

SEQ ID NO: 45391 - DNA, 22 bp, Artificial Sequence
  chemically synthesized
ccaataccagtggctctttcag

SEQ ID NO: 45392 - DNA, 22 bp, Artificial Sequence
  chemically synthesized
tttcaggcttacaaagccttgg

SEQ ID NO: 45393 - DNA, 22 bp, Artificial Sequence
  chemically synthesized
tcaggcttacaaagccttggtg

SEQ ID NO: 45394 - DNA, 22 bp, Artificial Sequence
  chemically synthesized
caggcttacaaagccttggtgg

SEQ ID NO: 45395 - DNA, 22 bp, Artificial Sequence
  chemically synthesized
aggcttacaaagccttggtggt

SEQ ID NO: 45396 - DNA, 22 bp, Artificial Sequence
  chemically synthesized
acaaagccttggtggtttccac

SEQ ID NO: 45397 - DNA, 22 bp, Artificial Sequence
  chemically synthesized
caaagccttggtggtttccaca

SEQ ID NO: 45398 - DNA, 22 bp, Artificial Sequence
  chemically synthesized
ggtggtttccacacccagcagt

SEQ ID NO: 45399 - DNA, 22 bp, Artificial Sequence
  chemically synthesized
gtggtttccacacccagcagtt

SEQ ID NO: 45400 - DNA, 22 bp, Artificial Sequence
  chemically synthesized
ccacacccagcagttcctaccc

SEQ ID NO: 45401 - DNA, 22 bp, Artificial Sequence
  chemically synthesized
cacacccagcagttcctaccca

SEQ ID NO: 45402 - DNA, 22 bp, Artificial Sequence
  chemically synthesized
ctacccaggactgagaagccct

SEQ ID NO: 45403 - DNA, 22 bp, Artificial Sequence
  chemically synthesized
cccaggactgagaagccctcag

SEQ ID NO: 45404 - DNA, 22 bp, Artificial Sequence
  chemically synthesized
agaagccctcagcaaacaccca

SEQ ID NO: 45405 - DNA, 22 bp, Artificial Sequence
  chemically synthesized
agcaaacacccagatggccctt

SEQ ID NO: 45406 - DNA, 22 bp, Artificial Sequence
  chemically synthesized
gttcaccctcctggaaacctat

SEQ ID NO: 45407 - DNA, 22 bp, Artificial Sequence
  chemically synthesized
ttcaccctcctggaaacctata

SEQ ID NO: 45408 - DNA, 22 bp, Artificial Sequence
  chemically synthesized
accctcctggaaacctatagct

SEQ ID NO: 45409 - DNA, 22 bp, Artificial Sequence
  chemically synthesized
ctggaaacctatagctgccagg

SEQ ID NO: 45410 - DNA, 22 bp, Artificial Sequence
  chemically synthesized
gaaacctatagctgccagggaa

SEQ ID NO: 45411 - DNA, 22 bp, Artificial Sequence
  chemically synthesized
tagctgccagggaaatgtgaca

SEQ ID NO: 45412 - DNA, 22 bp, Artificial Sequence
  chemically synthesized
ccagggaaatgtgacattttgt

SEQ ID NO: 45413 - DNA, 22 bp, Artificial Sequence
  chemically synthesized
tgtgaggactaatttaacccgc

SEQ ID NO: 45414 - DNA, 22 bp, Artificial Sequence
  chemically synthesized
gtgaggactaatttaacccgcc

SEQ ID NO: 45415 - DNA, 22 bp, Artificial Sequence
  chemically synthesized
tgaggactaatttaacccgcct

SEQ ID NO: 45416 - DNA, 22 bp, Artificial Sequence
  chemically synthesized
atttaacccgcctagaagattt

SEQ ID NO: 45417 - DNA, 22 bp, Artificial Sequence
  chemically synthesized
aacccgcctagaagatttagga

SEQ ID NO: 45418 - DNA, 22 bp, Artificial Sequence
  chemically synthesized
acccgcctagaagatttaggag

SEQ ID NO: 45419 - DNA, 22 bp, Artificial Sequence
  chemically synthesized
gaagatttaggagccaagatgc

SEQ ID NO: 45420 - DNA, 22 bp, Artificial Sequence
  chemically synthesized
aggagccaagatgcaaccctaa

SEQ ID NO: 45421 - DNA, 22 bp, Artificial Sequence
  chemically synthesized
ggagccaagatgcaaccctaaa

SEQ ID NO: 45422 - DNA, 22 bp, Artificial Sequence
  chemically synthesized
aagcccactgcaagggacaata

SEQ ID NO: 45423 - DNA, 22 bp, Artificial Sequence
  chemically synthesized
caagggacaatattctggatct

SEQ ID NO: 45424 - DNA, 22 bp, Artificial Sequence
  chemically synthesized
tggatcttttgtcagagcttta

SEQ ID NO: 45425 - DNA, 22 bp, Artificial Sequence
  chemically synthesized
gatcttttgtcagagctttatt

SEQ ID NO: 45426 - DNA, 22 bp, Artificial Sequence
  chemically synthesized
ttgtcagagctttattatttta

SEQ ID NO: 45427 - DNA, 22 bp, Artificial Sequence
  chemically synthesized
tgtcagagctttattattttaa

SEQ ID NO: 45428 - DNA, 22 bp, Artificial Sequence
  chemically synthesized
gtcagagctttattattttaat

SEQ ID NO: 45429 - DNA, 22 bp, Artificial Sequence
  chemically synthesized
tcagagctttattattttaata

SEQ ID NO: 45430 - DNA, 22 bp, Artificial Sequence
  chemically synthesized
tattattttaataaaattttta

SEQ ID NO: 45431 - DNA, 22 bp, Artificial Sequence
  chemically synthesized
attattttaataaaatttttat

SEQ ID NO: 45432 - DNA, 22 bp, Artificial Sequence
  chemically synthesized
ttattttaataaaatttttata

SEQ ID NO: 45433 - DNA, 22 bp, Artificial Sequence
  chemically synthesized
ttttaataaaatttttatatta

SEQ ID NO: 45434 - DNA, 22 bp, Artificial Sequence
  chemically synthesized
taataaaatttttatattaaac

SEQ ID NO: 45435 - DNA, 22 bp, Artificial Sequence
  chemically synthesized
aataaaatttttatattaaaca

SEQ ID NO: 45436 - DNA, 22 bp, Artificial Sequence
  chemically synthesized
ataaaatttttatattaaacag

SEQ ID NO: 45437 - DNA, 22 bp, Artificial Sequence
  chemically synthesized
ttatattaaacagcaattcaca

SEQ ID NO: 45438 - DNA, 22 bp, Artificial Sequence
  chemically synthesized
tatattaaacagcaattcacat

SEQ ID NO: 45439 - DNA, 22 bp, Artificial Sequence
  chemically synthesized
atattaaacagcaattcacatt

SEQ ID NO: 45440 - DNA, 22 bp, Artificial Sequence
  chemically synthesized
tattaaacagcaattcacattc

SEQ ID NO: 45441 - DNA, 22 bp, Artificial Sequence
  chemically synthesized
aacagcaattcacattcatcta

SEQ ID NO: 45442 - DNA, 22 bp, Artificial Sequence
  chemically synthesized
acattcatctaaacctcctgaa

SEQ ID NO: 45443 - DNA, 22 bp, Artificial Sequence
  chemically synthesized
atctaaacctcctgaaaattgg

SEQ ID NO: 45444 - DNA, 22 bp, Artificial Sequence
  chemically synthesized
aacctcctgaaaattggttatt

SEQ ID NO: 45445 - DNA, 22 bp, Artificial Sequence
  chemically synthesized
ctgaaaattggttattggctgc

SEQ ID NO: 45446 - DNA, 22 bp, Artificial Sequence
  chemically synthesized
aaaattggttattggctgcttc

SEQ ID NO: 45447 - DNA, 22 bp, Artificial Sequence
  chemically synthesized
gttattggctgcttcgttgatt

SEQ ID NO: 45448 - DNA, 22 bp, Artificial Sequence
  chemically synthesized
ttggctgcttcgttgattctag

SEQ ID NO: 45449 - DNA, 22 bp, Artificial Sequence
  chemically synthesized
gctgcttcgttgattctagaaa

SEQ ID NO: 45450 - DNA, 22 bp, Artificial Sequence
  chemically synthesized
cttcgttgattctagaaaaaaa

SEQ ID NO: 45451 - DNA, 22 bp, Artificial Sequence
  chemically synthesized
cgttgattctagaaaaaaaaga

SEQ ID NO: 45452 - DNA, 22 bp, Artificial Sequence
  chemically synthesized
gttgattctagaaaaaaaagaa

SEQ ID NO: 45453 - DNA, 22 bp, Artificial Sequence
  chemically synthesized
attctagaaaaaaaagaaagca

SEQ ID NO: 45454 - DNA, 22 bp, Artificial Sequence
  chemically synthesized
tagaaaaaaaagaaagcaagaa

SEQ ID NO: 45455 - DNA, 22 bp, Artificial Sequence
  chemically synthesized
gaaaaaaaagaaagcaagaaat

SEQ ID NO: 45456 - DNA, 22 bp, Artificial Sequence
  chemically synthesized
agtattaaggcccaacccagcc

SEQ ID NO: 45457 - DNA, 22 bp, Artificial Sequence
  chemically synthesized
aggcccaacccagccaaaaccc

SEQ ID NO: 45458 - DNA, 22 bp, Artificial Sequence
  chemically synthesized
ctagaagcctgctggaagccta

SEQ ID NO: 45459 - DNA, 22 bp, Artificial Sequence
  chemically synthesized
gaagcctgctggaagcctacat

SEQ ID NO: 45460 - DNA, 22 bp, Artificial Sequence
  chemically synthesized
ctggaagcctacatggcttcga

SEQ ID NO: 45461 - DNA, 22 bp, Artificial Sequence
  chemically synthesized
gaagcctacatggcttcgagcg

SEQ ID NO: 45462 - DNA, 22 bp, Artificial Sequence
  chemically synthesized
catggcttcgagcggcacattc

SEQ ID NO: 45463 - DNA, 22 bp, Artificial Sequence
  chemically synthesized
cgagcggcacattctgagaact

SEQ ID NO: 45464 - DNA, 22 bp, Artificial Sequence
  chemically synthesized
gagcggcacattctgagaactc

SEQ ID NO: 45465 - DNA, 22 bp, Artificial Sequence
  chemically synthesized
tgagaactctgaagagtaccac

SEQ ID NO: 45466 - DNA, 22 bp, Artificial Sequence
  chemically synthesized
agaactctgaagagtaccactc

SEQ ID NO: 45467 - DNA, 22 bp, Artificial Sequence
  chemically synthesized
tgaagagtaccactcagccgac

SEQ ID NO: 45468 - DNA, 22 bp, Artificial Sequence
  chemically synthesized
aagagtaccactcagccgacac

SEQ ID NO: 45469 - DNA, 22 bp, Artificial Sequence
  chemically synthesized
agccgacactgcccccatgaca

SEQ ID NO: 45470 - DNA, 22 bp, Artificial Sequence
  chemically synthesized
cccccatgacatagggccctgg

SEQ ID NO: 45471 - DNA, 22 bp, Artificial Sequence
  chemically synthesized
gtctcctctttgactcacactt

SEQ ID NO: 45472 - DNA, 22 bp, Artificial Sequence
  chemically synthesized
ctctttgactcacacttgcctg

SEQ ID NO: 45473 - DNA, 22 bp, Artificial Sequence
  chemically synthesized
tttgactcacacttgcctggca

SEQ ID NO: 45474 - DNA, 22 bp, Artificial Sequence
  chemically synthesized
tgactcacacttgcctggcagg

SEQ ID NO: 45475 - DNA, 22 bp, Artificial Sequence
  chemically synthesized
gactcacacttgcctggcagga

SEQ ID NO: 45476 - DNA, 22 bp, Artificial Sequence
  chemically synthesized
actcacacttgcctggcaggac

SEQ ID NO: 45477 - DNA, 22 bp, Artificial Sequence
  chemically synthesized
acacttgcctggcaggactccc

SEQ ID NO: 45478 - DNA, 22 bp, Artificial Sequence
  chemically synthesized
gcctggcaggactccccaaaca

SEQ ID NO: 45479 - DNA, 22 bp, Artificial Sequence
  chemically synthesized
cctggcaggactccccaaacag

SEQ ID NO: 45480 - DNA, 22 bp, Artificial Sequence
  chemically synthesized
gcaggactccccaaacagaaca

SEQ ID NO: 45481 - DNA, 22 bp, Artificial Sequence
  chemically synthesized
cccaaacagaacagagatgctc

SEQ ID NO: 45482 - DNA, 22 bp, Artificial Sequence
  chemically synthesized
agccgggcacaagagagcaggc

SEQ ID NO: 45483 - DNA, 22 bp, Artificial Sequence
  chemically synthesized
atgctgcactgtggtttcccca

SEQ ID NO: 45484 - DNA, 22 bp, Artificial Sequence
  chemically synthesized
cactgtggtttccccagcaatt

SEQ ID NO: 45485 - DNA, 22 bp, Artificial Sequence
  chemically synthesized
tggtttccccagcaattccaga

SEQ ID NO: 45486 - DNA, 22 bp, Artificial Sequence
  chemically synthesized
ccccagcaattccagaactgct

SEQ ID NO: 45487 - DNA, 22 bp, Artificial Sequence
  chemically synthesized
cccagcaattccagaactgctg

SEQ ID NO: 45488 - DNA, 22 bp, Artificial Sequence
  chemically synthesized
cagaactgctgcctaccggcac

SEQ ID NO: 45489 - DNA, 22 bp, Artificial Sequence
  chemically synthesized
ctgcctaccggcacgcatgcag

SEQ ID NO: 45490 - DNA, 22 bp, Artificial Sequence
  chemically synthesized
cctaccggcacgcatgcaggat

SEQ ID NO: 45491 - DNA, 22 bp, Artificial Sequence
  chemically synthesized
ccggcacgcatgcaggatcaat

SEQ ID NO: 45492 - DNA, 22 bp, Artificial Sequence
  chemically synthesized
ctgggtctgcctgggtccaccc

SEQ ID NO: 45493 - DNA, 22 bp, Artificial Sequence
  chemically synthesized
tgggtctgcctgggtccaccct

SEQ ID NO: 45494 - DNA, 22 bp, Artificial Sequence
  chemically synthesized
ggtctgcctgggtccacccttc

SEQ ID NO: 45495 - DNA, 22 bp, Artificial Sequence
  chemically synthesized
cctgggtccacccttcctttct

SEQ ID NO: 45496 - DNA, 22 bp, Artificial Sequence
  chemically synthesized
ggtccacccttcctttcttagt

SEQ ID NO: 45497 - DNA, 22 bp, Artificial Sequence
  chemically synthesized
cctttcttagtcactgcaagat

SEQ ID NO: 45498 - DNA, 22 bp, Artificial Sequence
  chemically synthesized
ctttcttagtcactgcaagatt

SEQ ID NO: 45499 - DNA, 22 bp, Artificial Sequence
  chemically synthesized
tcttagtcactgcaagatttca

SEQ ID NO: 45500 - DNA, 22 bp, Artificial Sequence
  chemically synthesized
cttagtcactgcaagatttcac

SEQ ID NO: 45501 - DNA, 22 bp, Artificial Sequence
  chemically synthesized
ttagtcactgcaagatttcacc

SEQ ID NO: 45502 - DNA, 22 bp, Artificial Sequence
  chemically synthesized
agtcactgcaagatttcaccca

SEQ ID NO: 45503 - DNA, 22 bp, Artificial Sequence
  chemically synthesized
gtcactgcaagatttcacccag

SEQ ID NO: 45504 - DNA, 22 bp, Artificial Sequence
  chemically synthesized
caagatttcacccagcccagcc

SEQ ID NO: 45505 - DNA, 22 bp, Artificial Sequence
  chemically synthesized
cacccagcccagccacccactg

SEQ ID NO: 45506 - DNA, 22 bp, Artificial Sequence
  chemically synthesized
acccagcccagccacccactga

SEQ ID NO: 45507 - DNA, 22 bp, Artificial Sequence
  chemically synthesized
aaaaggcagaggaggccaccta

SEQ ID NO: 45508 - DNA, 22 bp, Artificial Sequence
  chemically synthesized
tctgaatgctaggatatgacac

SEQ ID NO: 45509 - DNA, 22 bp, Artificial Sequence
  chemically synthesized
aatgctaggatatgacacactt

SEQ ID NO: 45510 - DNA, 22 bp, Artificial Sequence
  chemically synthesized
ggatatgacacacttgaacctt

SEQ ID NO: 45511 - DNA, 22 bp, Artificial Sequence
  chemically synthesized
gaaccttcctcctggccagcct

SEQ ID NO: 45512 - DNA, 22 bp, Artificial Sequence
  chemically synthesized
aaccttcctcctggccagcctg

SEQ ID NO: 45513 - DNA, 22 bp, Artificial Sequence
  chemically synthesized
cctcctggccagcctgctctcc

SEQ ID NO: 45514 - DNA, 22 bp, Artificial Sequence
  chemically synthesized
ctcctggccagcctgctctccc

SEQ ID NO: 45515 - DNA, 22 bp, Artificial Sequence
  chemically synthesized
ctggccagcctgctctcccaaa

SEQ ID NO: 45516 - DNA, 22 bp, Artificial Sequence
  chemically synthesized
gccagcctgctctcccaaagaa

SEQ ID NO: 45517 - DNA, 22 bp, Artificial Sequence
  chemically synthesized
ctctcccaaagaaggaataaca

SEQ ID NO: 45518 - DNA, 22 bp, Artificial Sequence
  chemically synthesized
tcccaaagaaggaataacagaa

SEQ ID NO: 45519 - DNA, 22 bp, Artificial Sequence
  chemically synthesized
ccaaagaaggaataacagaaca

SEQ ID NO: 45520 - DNA, 22 bp, Artificial Sequence
  chemically synthesized
tgactacttctggtttgtaaat

SEQ ID NO: 45521 - DNA, 22 bp, Artificial Sequence
  chemically synthesized
actacttctggtttgtaaattt

SEQ ID NO: 45522 - DNA, 22 bp, Artificial Sequence
  chemically synthesized
cttctggtttgtaaatttatac

SEQ ID NO: 45523 - DNA, 22 bp, Artificial Sequence
  chemically synthesized
ctggtttgtaaatttataccaa

SEQ ID NO: 45524 - DNA, 22 bp, Artificial Sequence
  chemically synthesized
tggtttgtaaatttataccaat

SEQ ID NO: 45525 - DNA, 22 bp, Artificial Sequence
  chemically synthesized
gtttgtaaatttataccaatgt

SEQ ID NO: 45526 - DNA, 22 bp, Artificial Sequence
  chemically synthesized
gtaaatttataccaatgttctt

SEQ ID NO: 45527 - DNA, 22 bp, Artificial Sequence
  chemically synthesized
taaatttataccaatgttcttc

SEQ ID NO: 45528 - DNA, 22 bp, Artificial Sequence
  chemically synthesized
ataccaatgttcttcttgaagt

SEQ ID NO: 45529 - DNA, 22 bp, Artificial Sequence
  chemically synthesized
taccaatgttcttcttgaagtg

SEQ ID NO: 45530 - DNA, 22 bp, Artificial Sequence
  chemically synthesized
ttcttgaagtgggagctcagca

SEQ ID NO: 45531 - DNA, 22 bp, Artificial Sequence
  chemically synthesized
cttgaagtgggagctcagcatc

SEQ ID NO: 45532 - DNA, 22 bp, Artificial Sequence
  chemically synthesized
ttgaagtgggagctcagcatcg

SEQ ID NO: 45533 - DNA, 22 bp, Artificial Sequence
  chemically synthesized
gaagtgggagctcagcatcggg

SEQ ID NO: 45534 - DNA, 22 bp, Artificial Sequence
  chemically synthesized
aagtgggagctcagcatcggga

SEQ ID NO: 45535 - DNA, 22 bp, Artificial Sequence
  chemically synthesized
agcatcgggacacccagaaaaa

SEQ ID NO: 45536 - DNA, 22 bp, Artificial Sequence
  chemically synthesized
caaggcaaaaagcaaatagcag

SEQ ID NO: 45537 - DNA, 22 bp, Artificial Sequence
  chemically synthesized
ctgaaacagccaactctgtctc

SEQ ID NO: 45538 - DNA, 22 bp, Artificial Sequence
  chemically synthesized
aaacagccaactctgtctctgt

SEQ ID NO: 45539 - DNA, 22 bp, Artificial Sequence
  chemically synthesized
tgtctctgtctcccccaagccc

SEQ ID NO: 45540 - DNA, 22 bp, Artificial Sequence
  chemically synthesized
tctctgtctcccccaagccctc

SEQ ID NO: 45541 - DNA, 22 bp, Artificial Sequence
  chemically synthesized
tgtctcccccaagccctcctag

SEQ ID NO: 45542 - DNA, 22 bp, Artificial Sequence
  chemically synthesized
tctcccccaagccctcctagtc

SEQ ID NO: 45543 - DNA, 22 bp, Artificial Sequence
  chemically synthesized
ccccaagccctcctagtcagaa

SEQ ID NO: 45544 - DNA, 22 bp, Artificial Sequence
  chemically synthesized
ctagtcagaacgttctctcagc

SEQ ID NO: 45545 - DNA, 22 bp, Artificial Sequence
  chemically synthesized
gtcagaacgttctctcagcatt

SEQ ID NO: 45546 - DNA, 22 bp, Artificial Sequence
  chemically synthesized
tctcagcatttcagcaggtact

SEQ ID NO: 45547 - DNA, 22 bp, Artificial Sequence
  chemically synthesized
tcagcatttcagcaggtactgc

SEQ ID NO: 45548 - DNA, 22 bp, Artificial Sequence
  chemically synthesized
agcatttcagcaggtactgctc

SEQ ID NO: 45549 - DNA, 22 bp, Artificial Sequence
  chemically synthesized
cagcaggtactgctcacctgga

SEQ ID NO: 45550 - DNA, 22 bp, Artificial Sequence
  chemically synthesized
agcaggtactgctcacctggaa

SEQ ID NO: 45551 - DNA, 22 bp, Artificial Sequence
  chemically synthesized
ctcacctggaaatacagctgat

SEQ ID NO: 45552 - DNA, 22 bp, Artificial Sequence
  chemically synthesized
acctggaaatacagctgatgta

SEQ ID NO: 45553 - DNA, 22 bp, Artificial Sequence
  chemically synthesized
gaaatacagctgatgtatttac

SEQ ID NO: 45554 - DNA, 22 bp, Artificial Sequence
  chemically synthesized
atgtatttactgagaagcttct

SEQ ID NO: 45555 - DNA, 22 bp, Artificial Sequence
  chemically synthesized
actgagaagcttcttcaagctt

SEQ ID NO: 45556 - DNA, 22 bp, Artificial Sequence
  chemically synthesized
ctgagaagcttcttcaagcttt

SEQ ID NO: 45557 - DNA, 22 bp, Artificial Sequence
  chemically synthesized
agaagcttcttcaagctttcta

SEQ ID NO: 45558 - DNA, 22 bp, Artificial Sequence
  chemically synthesized
cttcaagctttctactggtgct

SEQ ID NO: 45559 - DNA, 22 bp, Artificial Sequence
  chemically synthesized
ttcaagctttctactggtgctt

SEQ ID NO: 45560 - DNA, 22 bp, Artificial Sequence
  chemically synthesized
caagctttctactggtgcttag

SEQ ID NO: 45561 - DNA, 22 bp, Artificial Sequence
  chemically synthesized
aagctttctactggtgcttagg

SEQ ID NO: 45562 - DNA, 22 bp, Artificial Sequence
  chemically synthesized
tctactggtgcttagggacaat

SEQ ID NO: 45563 - DNA, 22 bp, Artificial Sequence
  chemically synthesized
ctactggtgcttagggacaatg

SEQ ID NO: 45564 - DNA, 22 bp, Artificial Sequence
  chemically synthesized
tactggtgcttagggacaatgc

SEQ ID NO: 45565 - DNA, 22 bp, Artificial Sequence
  chemically synthesized
ctggtgcttagggacaatgcca

SEQ ID NO: 45566 - DNA, 22 bp, Artificial Sequence
  chemically synthesized
gtgcttagggacaatgccaatc

SEQ ID NO: 45567 - DNA, 22 bp, Artificial Sequence
  chemically synthesized
agggacaatgccaatcaagtct

SEQ ID NO: 45568 - DNA, 22 bp, Artificial Sequence
  chemically synthesized
gggacaatgccaatcaagtctt

SEQ ID NO: 45569 - DNA, 22 bp, Artificial Sequence
  chemically synthesized
gaaattatatagagaggtggaa

SEQ ID NO: 45570 - DNA, 22 bp, Artificial Sequence
  chemically synthesized
aaattatatagagaggtggaat

SEQ ID NO: 45571 - DNA, 22 bp, Artificial Sequence
  chemically synthesized
tatagagaggtggaatatcagg

SEQ ID NO: 45572 - DNA, 22 bp, Artificial Sequence
  chemically synthesized
tccctgaaaatgcttaaaagat

SEQ ID NO: 45573 - DNA, 22 bp, Artificial Sequence
  chemically synthesized
aaaatgcttaaaagatcaaact

SEQ ID NO: 45574 - DNA, 22 bp, Artificial Sequence
  chemically synthesized
aaaagatcaaactgattcctat

SEQ ID NO: 45575 - DNA, 22 bp, Artificial Sequence
  chemically synthesized
aaagatcaaactgattcctatc

SEQ ID NO: 45576 - DNA, 22 bp, Artificial Sequence
  chemically synthesized
attcctatcacatgcctcccct

SEQ ID NO: 45577 - DNA, 22 bp, Artificial Sequence
  chemically synthesized
ctatcacatgcctcccctacca

SEQ ID NO: 45578 - DNA, 22 bp, Artificial Sequence
  chemically synthesized
tcacatgcctcccctaccagtg

SEQ ID NO: 45579 - DNA, 22 bp, Artificial Sequence
  chemically synthesized
ccctaccagtgagcgcccacca

SEQ ID NO: 45580 - DNA, 22 bp, Artificial Sequence
  chemically synthesized
ccagtgagcgcccaccactagc

SEQ ID NO: 45581 - DNA, 22 bp, Artificial Sequence
  chemically synthesized
gcttccttgctccaaactatta

SEQ ID NO: 45582 - DNA, 22 bp, Artificial Sequence
  chemically synthesized
ccttgctccaaactattaaaac

SEQ ID NO: 45583 - DNA, 22 bp, Artificial Sequence
  chemically synthesized
cttgctccaaactattaaaaca

SEQ ID NO: 45584 - DNA, 22 bp, Artificial Sequence
  chemically synthesized
gctccaaactattaaaacagag

SEQ ID NO: 45585 - DNA, 22 bp, Artificial Sequence
  chemically synthesized
ctccaaactattaaaacagagc

SEQ ID NO: 45586 - DNA, 22 bp, Artificial Sequence
  chemically synthesized
caaactattaaaacagagcgtc

SEQ ID NO: 45587 - DNA, 22 bp, Artificial Sequence
  chemically synthesized
ttaaaacagagcgtccccccaa

SEQ ID NO: 45588 - DNA, 22 bp, Artificial Sequence
  chemically synthesized
aaacagagcgtccccccaaaaa

SEQ ID NO: 45589 - DNA, 22 bp, Artificial Sequence
  chemically synthesized
ctgcaagccacaacttccctac

SEQ ID NO: 45590 - DNA, 22 bp, Artificial Sequence
  chemically synthesized
tgcaagccacaacttccctacc

SEQ ID NO: 45591 - DNA, 22 bp, Artificial Sequence
  chemically synthesized
caagccacaacttccctaccct

SEQ ID NO: 45592 - DNA, 22 bp, Artificial Sequence
  chemically synthesized
ccctaccctgtgtgcaggctgt

SEQ ID NO: 45593 - DNA, 22 bp, Artificial Sequence
  chemically synthesized
cctaccctgtgtgcaggctgtg

SEQ ID NO: 45594 - DNA, 22 bp, Artificial Sequence
  chemically synthesized
ccctgtgtgcaggctgtggaag

SEQ ID NO: 45595 - DNA, 22 bp, Artificial Sequence
  chemically synthesized
tgtgcaggctgtggaagcgtgg

SEQ ID NO: 45596 - DNA, 22 bp, Artificial Sequence
  chemically synthesized
tggaagcgtggggtggacccag

SEQ ID NO: 45597 - DNA, 22 bp, Artificial Sequence
  chemically synthesized
tggatcagaatccctagtctac

SEQ ID NO: 45598 - DNA, 22 bp, Artificial Sequence
  chemically synthesized
gatcagaatccctagtctaccc

SEQ ID NO: 45599 - DNA, 22 bp, Artificial Sequence
  chemically synthesized
gtctacccctgcggctgcatga

SEQ ID NO: 45600 - DNA, 22 bp, Artificial Sequence
  chemically synthesized
cccctgcggctgcatgagacca

SEQ ID NO: 45601 - DNA, 22 bp, Artificial Sequence
  chemically synthesized
cggctgcatgagaccagacctg

SEQ ID NO: 45602 - DNA, 22 bp, Artificial Sequence
  chemically synthesized
catgagaccagacctgccattt

SEQ ID NO: 45603 - DNA, 22 bp, Artificial Sequence
  chemically synthesized
ccatttaacctctctaagcttc

SEQ ID NO: 45604 - DNA, 22 bp, Artificial Sequence
  chemically synthesized
aacctctctaagcttcaactac

SEQ ID NO: 45605 - DNA, 22 bp, Artificial Sequence
  chemically synthesized
acctctctaagcttcaactacc

SEQ ID NO: 45606 - DNA, 22 bp, Artificial Sequence
  chemically synthesized
tctaagcttcaactaccctttc

SEQ ID NO: 45607 - DNA, 22 bp, Artificial Sequence
  chemically synthesized
taagcttcaactaccctttctc

SEQ ID NO: 45608 - DNA, 22 bp, Artificial Sequence
  chemically synthesized
agcttcaactaccctttctcct

SEQ ID NO: 45609 - DNA, 22 bp, Artificial Sequence
  chemically synthesized
caactaccctttctcctgcctc

SEQ ID NO: 45610 - DNA, 22 bp, Artificial Sequence
  chemically synthesized
aactaccctttctcctgcctct

SEQ ID NO: 45611 - DNA, 22 bp, Artificial Sequence
  chemically synthesized
ccctttctcctgcctcttcaca

SEQ ID NO: 45612 - DNA, 22 bp, Artificial Sequence
  chemically synthesized
tctcctgcctcttcacagggtt

SEQ ID NO: 45613 - DNA, 22 bp, Artificial Sequence
  chemically synthesized
ctcctgcctcttcacagggtta

SEQ ID NO: 45614 - DNA, 22 bp, Artificial Sequence
  chemically synthesized
tcctgcctcttcacagggttac

SEQ ID NO: 45615 - DNA, 22 bp, Artificial Sequence
  chemically synthesized
ctgcctcttcacagggttactc

SEQ ID NO: 45616 - DNA, 22 bp, Artificial Sequence
  chemically synthesized
cctcttcacagggttactcatg

SEQ ID NO: 45617 - DNA, 22 bp, Artificial Sequence
  chemically synthesized
ttcacagggttactcatgaggt

SEQ ID NO: 45618 - DNA, 22 bp, Artificial Sequence
  chemically synthesized
cacagggttactcatgaggtga

SEQ ID NO: 45619 - DNA, 22 bp, Artificial Sequence
  chemically synthesized
acagggttactcatgaggtgag

SEQ ID NO: 45620 - DNA, 22 bp, Artificial Sequence
  chemically synthesized
ctcatgaggtgagtctcaattt

SEQ ID NO: 45621 - DNA, 22 bp, Artificial Sequence
  chemically synthesized
atgaggtgagtctcaatttgac

SEQ ID NO: 45622 - DNA, 22 bp, Artificial Sequence
  chemically synthesized
aatttgacaatactcctcaaag

SEQ ID NO: 45623 - DNA, 22 bp, Artificial Sequence
  chemically synthesized
gacaatactcctcaaagggctt

SEQ ID NO: 45624 - DNA, 22 bp, Artificial Sequence
  chemically synthesized
acaatactcctcaaagggctta

SEQ ID NO: 45625 - DNA, 22 bp, Artificial Sequence
  chemically synthesized
ctcaaagggcttactcaaaaaa

SEQ ID NO: 45626 - DNA, 22 bp, Artificial Sequence
  chemically synthesized
aaagggcttactcaaaaaaaaa

SEQ ID NO: 45627 - DNA, 22 bp, Artificial Sequence
  chemically synthesized
actcaaaaaaaaaatgtgattt

SEQ ID NO: 45628 - DNA, 22 bp, Artificial Sequence
  chemically synthesized
ctcaaaaaaaaaatgtgatttt

SEQ ID NO: 45629 - DNA, 22 bp, Artificial Sequence
  chemically synthesized
aaaaaaaaaatgtgattttatc

SEQ ID NO: 45630 - DNA, 22 bp, Artificial Sequence
  chemically synthesized
tatccgtatcctcattactaac

SEQ ID NO: 45631 - DNA, 22 bp, Artificial Sequence
  chemically synthesized
atccgtatcctcattactaaca

SEQ ID NO: 45632 - DNA, 22 bp, Artificial Sequence
  chemically synthesized
tccgtatcctcattactaacag

SEQ ID NO: 45633 - DNA, 22 bp, Artificial Sequence
  chemically synthesized
attactaacagcacaatggaca

SEQ ID NO: 45634 - DNA, 22 bp, Artificial Sequence
  chemically synthesized
ctaacagcacaatggacattcg

SEQ ID NO: 45635 - DNA, 22 bp, Artificial Sequence
  chemically synthesized
acagcacaatggacattcgaaa

SEQ ID NO: 45636 - DNA, 22 bp, Artificial Sequence
  chemically synthesized
gaaagggatgggcccaattttt

SEQ ID NO: 45637 - DNA, 22 bp, Artificial Sequence
  chemically synthesized
ttcataagccaaaaaagctaga

SEQ ID NO: 45638 - DNA, 22 bp, Artificial Sequence
  chemically synthesized
tcataagccaaaaaagctagag

SEQ ID NO: 45639 - DNA, 22 bp, Artificial Sequence
  chemically synthesized
cataagccaaaaaagctagagg

SEQ ID NO: 45640 - DNA, 22 bp, Artificial Sequence
  chemically synthesized
ataagccaaaaaagctagagga

SEQ ID NO: 45641 - DNA, 22 bp, Artificial Sequence
  chemically synthesized
gaggatcggagagaaaagaagg

SEQ ID NO: 45642 - DNA, 22 bp, Artificial Sequence
  chemically synthesized
agaaacggcttcaagggtgtcc

SEQ ID NO: 45643 - DNA, 22 bp, Artificial Sequence
  chemically synthesized
caagggtgtcctttggcacccc

SEQ ID NO: 45644 - DNA, 22 bp, Artificial Sequence
  chemically synthesized
aagggtgtcctttggcacccca

SEQ ID NO: 45645 - DNA, 22 bp, Artificial Sequence
  chemically synthesized
tggcaccccattcttccagatt

SEQ ID NO: 45646 - DNA, 22 bp, Artificial Sequence
  chemically synthesized
ggcaccccattcttccagattg

SEQ ID NO: 45647 - DNA, 22 bp, Artificial Sequence
  chemically synthesized
gcaccccattcttccagattgt

SEQ ID NO: 45648 - DNA, 22 bp, Artificial Sequence
  chemically synthesized
ttccagattgttccaaatgcct

SEQ ID NO: 45649 - DNA, 22 bp, Artificial Sequence
  chemically synthesized
ccagattgttccaaatgcctgc

SEQ ID NO: 45650 - DNA, 22 bp, Artificial Sequence
  chemically synthesized
cagattgttccaaatgcctgct

SEQ ID NO: 45651 - DNA, 22 bp, Artificial Sequence
  chemically synthesized
ttccaaatgcctgctgcagtaa

SEQ ID NO: 45652 - DNA, 22 bp, Artificial Sequence
  chemically synthesized
caaatgcctgctgcagtaataa

SEQ ID NO: 45653 - DNA, 22 bp, Artificial Sequence
  chemically synthesized
ctgcagtaataacagccccaaa

SEQ ID NO: 45654 - DNA, 22 bp, Artificial Sequence
  chemically synthesized
cagtaataacagccccaaaaga

SEQ ID NO: 45655 - DNA, 22 bp, Artificial Sequence
  chemically synthesized
tgtcaggacttgtaggtgaaat

SEQ ID NO: 45656 - DNA, 22 bp, Artificial Sequence
  chemically synthesized
gtcaggacttgtaggtgaaatg

SEQ ID NO: 45657 - DNA, 22 bp, Artificial Sequence
  chemically synthesized
tcaggacttgtaggtgaaatgt

SEQ ID NO: 45658 - DNA, 22 bp, Artificial Sequence
  chemically synthesized
gtaggtgaaatgtgttggagca

SEQ ID NO: 45659 - DNA, 22 bp, Artificial Sequence
  chemically synthesized
taggtgaaatgtgttggagcag

SEQ ID NO: 45660 - DNA, 22 bp, Artificial Sequence
  chemically synthesized
gagcagctgtcagcttggggaa

SEQ ID NO: 45661 - DNA, 22 bp, Artificial Sequence
  chemically synthesized
tcagcttggggaaaatcactca

SEQ ID NO: 45662 - DNA, 22 bp, Artificial Sequence
  chemically synthesized
ggggaaaatcactcatcaggta

SEQ ID NO: 45663 - DNA, 22 bp, Artificial Sequence
  chemically synthesized
gggaaaatcactcatcaggtag

SEQ ID NO: 45664 - DNA, 22 bp, Artificial Sequence
  chemically synthesized
atcaggtagtcagccgagtgag

SEQ ID NO: 45665 - DNA, 22 bp, Artificial Sequence
  chemically synthesized
ccttcagctggacaaacactgc

SEQ ID NO: 45666 - DNA, 22 bp, Artificial Sequence
  chemically synthesized
cagctggacaaacactgcatcc

SEQ ID NO: 45667 - DNA, 22 bp, Artificial Sequence
  chemically synthesized
agctggacaaacactgcatcca

SEQ ID NO: 45668 - DNA, 22 bp, Artificial Sequence
  chemically synthesized
gacaaacactgcatccacacag

SEQ ID NO: 45669 - DNA, 22 bp, Artificial Sequence
  chemically synthesized
catccacacagggaacaagcgg

SEQ ID NO: 45670 - DNA, 22 bp, Artificial Sequence
  chemically synthesized
tcctgtccttcccttaggggcc

SEQ ID NO: 45671 - DNA, 22 bp, Artificial Sequence
  chemically synthesized
cctgtccttcccttaggggcca

SEQ ID NO: 45672 - DNA, 22 bp, Artificial Sequence
  chemically synthesized
ctgtccttcccttaggggccaa

SEQ ID NO: 45673 - DNA, 22 bp, Artificial Sequence
  chemically synthesized
tccttcccttaggggccaaacc

SEQ ID NO: 45674 - DNA, 22 bp, Artificial Sequence
  chemically synthesized
cccttaggggccaaaccagccc

SEQ ID NO: 45675 - DNA, 22 bp, Artificial Sequence
  chemically synthesized
ccttaggggccaaaccagccct

SEQ ID NO: 45676 - DNA, 22 bp, Artificial Sequence
  chemically synthesized
aggggccaaaccagccctcttt

SEQ ID NO: 45677 - DNA, 22 bp, Artificial Sequence
  chemically synthesized
ggggccaaaccagccctctttt

SEQ ID NO: 45678 - DNA, 22 bp, Artificial Sequence
  chemically synthesized
ttttaccttcttgtccaaccca

SEQ ID NO: 45679 - DNA, 22 bp, Artificial Sequence
  chemically synthesized
ttaccttcttgtccaacccagt

SEQ ID NO: 45680 - DNA, 22 bp, Artificial Sequence
  chemically synthesized
taccttcttgtccaacccagtg

SEQ ID NO: 45681 - DNA, 22 bp, Artificial Sequence
  chemically synthesized
accttcttgtccaacccagtgg

SEQ ID NO: 45682 - DNA, 22 bp, Artificial Sequence
  chemically synthesized
ccttcttgtccaacccagtggg

SEQ ID NO: 45683 - DNA, 22 bp, Artificial Sequence
  chemically synthesized
cttgtccaacccagtgggcctc

SEQ ID NO: 45684 - DNA, 22 bp, Artificial Sequence
  chemically synthesized
ttgtccaacccagtgggcctct

SEQ ID NO: 45685 - DNA, 22 bp, Artificial Sequence
  chemically synthesized
gtccaacccagtgggcctctct

SEQ ID NO: 45686 - DNA, 22 bp, Artificial Sequence
  chemically synthesized
tccaacccagtgggcctctctc

SEQ ID NO: 45687 - DNA, 22 bp, Artificial Sequence
  chemically synthesized
tctccctcaaatgcatacctcc

SEQ ID NO: 45688 - DNA, 22 bp, Artificial Sequence
  chemically synthesized
tccctcaaatgcatacctcctt

SEQ ID NO: 45689 - DNA, 22 bp, Artificial Sequence
  chemically synthesized
cctcaaatgcatacctccttct

SEQ ID NO: 45690 - DNA, 22 bp, Artificial Sequence
  chemically synthesized
aaatgcatacctccttctcttt

SEQ ID NO: 45691 - DNA, 22 bp, Artificial Sequence
  chemically synthesized
cttctctttcctccagctccct

SEQ ID NO: 45692 - DNA, 22 bp, Artificial Sequence
  chemically synthesized
ctctttcctccagctccctaag

SEQ ID NO: 45693 - DNA, 22 bp, Artificial Sequence
  chemically synthesized
tctttcctccagctccctaagc

SEQ ID NO: 45694 - DNA, 22 bp, Artificial Sequence
  chemically synthesized
tttcctccagctccctaagctg

SEQ ID NO: 45695 - DNA, 22 bp, Artificial Sequence
  chemically synthesized
tcctccagctccctaagctgtt

SEQ ID NO: 45696 - DNA, 22 bp, Artificial Sequence
  chemically synthesized
cctccagctccctaagctgttg

SEQ ID NO: 45697 - DNA, 22 bp, Artificial Sequence
  chemically synthesized
ctccagctccctaagctgttgt

SEQ ID NO: 45698 - DNA, 22 bp, Artificial Sequence
  chemically synthesized
cagctccctaagctgttgttca

SEQ ID NO: 45699 - DNA, 22 bp, Artificial Sequence
  chemically synthesized
cctaagctgttgttcagggcac

SEQ ID NO: 45700 - DNA, 22 bp, Artificial Sequence
  chemically synthesized
agctgttgttcagggcacagac

SEQ ID NO: 45701 - DNA, 22 bp, Artificial Sequence
  chemically synthesized
ttgttcagggcacagacagctc

SEQ ID NO: 45702 - DNA, 22 bp, Artificial Sequence
  chemically synthesized
ttcagggcacagacagctcttc

SEQ ID NO: 45703 - DNA, 22 bp, Artificial Sequence
  chemically synthesized
agggcacagacagctcttcagg

SEQ ID NO: 45704 - DNA, 22 bp, Artificial Sequence
  chemically synthesized
ttcaggctgccagagcaagaga

SEQ ID NO: 45705 - DNA, 22 bp, Artificial Sequence
  chemically synthesized
caggctgccagagcaagagagt

SEQ ID NO: 45706 - DNA, 22 bp, Artificial Sequence
  chemically synthesized
aggctgccagagcaagagagtt

SEQ ID NO: 45707 - DNA, 22 bp, Artificial Sequence
  chemically synthesized
ccagagcaagagagttaggaaa

SEQ ID NO: 45708 - DNA, 22 bp, Artificial Sequence
  chemically synthesized
ggaaataacgacccctccacat

SEQ ID NO: 45709 - DNA, 22 bp, Artificial Sequence
  chemically synthesized
cacatgcattcccacctcccgg

SEQ ID NO: 45710 - DNA, 22 bp, Artificial Sequence
  chemically synthesized
ccacctcccggaagcaggggac

SEQ ID NO: 45711 - DNA, 22 bp, Artificial Sequence
  chemically synthesized
ccggaagcaggggacacagctg

SEQ ID NO: 45712 - DNA, 22 bp, Artificial Sequence
  chemically synthesized
gccactctgtgacggagggtgg

SEQ ID NO: 45713 - DNA, 22 bp, Artificial Sequence
  chemically synthesized
tgtgacggagggtgggtaacct

SEQ ID NO: 45714 - DNA, 22 bp, Artificial Sequence
  chemically synthesized
tgacggagggtgggtaacctct

SEQ ID NO: 45715 - DNA, 22 bp, Artificial Sequence
  chemically synthesized
tctacctgggtctatcatttta

SEQ ID NO: 45716 - DNA, 22 bp, Artificial Sequence
  chemically synthesized
tacctgggtctatcattttaga

SEQ ID NO: 45717 - DNA, 22 bp, Artificial Sequence
  chemically synthesized
cctgggtctatcattttagaat

SEQ ID NO: 45718 - DNA, 22 bp, Artificial Sequence
  chemically synthesized
ggtctatcattttagaataaat

SEQ ID NO: 45719 - DNA, 22 bp, Artificial Sequence
  chemically synthesized
tcattttagaataaatcattcg

SEQ ID NO: 45720 - DNA, 22 bp, Artificial Sequence
  chemically synthesized
tagaataaatcattcgtggctg

SEQ ID NO: 45721 - DNA, 22 bp, Artificial Sequence
  chemically synthesized
agaataaatcattcgtggctga

SEQ ID NO: 45722 - DNA, 22 bp, Artificial Sequence
  chemically synthesized
gaataaatcattcgtggctgac

SEQ ID NO: 45723 - DNA, 22 bp, Artificial Sequence
  chemically synthesized
gtggctgactcttaaatgggaa

SEQ ID NO: 45724 - DNA, 22 bp, Artificial Sequence
  chemically synthesized
actcttaaatgggaagggccaa

SEQ ID NO: 45725 - DNA, 22 bp, Artificial Sequence
  chemically synthesized
ttaaatgggaagggccaattac

SEQ ID NO: 45726 - DNA, 22 bp, Artificial Sequence
  chemically synthesized
aaatgggaagggccaattacag

SEQ ID NO: 45727 - DNA, 22 bp, Artificial Sequence
  chemically synthesized
aatgggaagggccaattacaga

SEQ ID NO: 45728 - DNA, 22 bp, Artificial Sequence
  chemically synthesized
cagatatctctgagaacaactc

SEQ ID NO: 45729 - DNA, 22 bp, Artificial Sequence
  chemically synthesized
tgagaacaactctacctgaggg

SEQ ID NO: 45730 - DNA, 22 bp, Artificial Sequence
  chemically synthesized
agaacaactctacctgagggag

SEQ ID NO: 45731 - DNA, 22 bp, Artificial Sequence
  chemically synthesized
tacctgagggagggggaaatcc

SEQ ID NO: 45732 - DNA, 22 bp, Artificial Sequence
  chemically synthesized
cctgagggagggggaaatccct

SEQ ID NO: 45733 - DNA, 22 bp, Artificial Sequence
  chemically synthesized
agggagggggaaatccctccca

SEQ ID NO: 45734 - DNA, 22 bp, Artificial Sequence
  chemically synthesized
ccaaaacaacggtgggcagaaa

SEQ ID NO: 45735 - DNA, 22 bp, Artificial Sequence
  chemically synthesized
catcccgtaaatacccagaagc

SEQ ID NO: 45736 - DNA, 22 bp, Artificial Sequence
  chemically synthesized
gttcgtctgccagatgctgtgg

SEQ ID NO: 45737 - DNA, 22 bp, Artificial Sequence
  chemically synthesized
gtctgccagatgctgtggagat

SEQ ID NO: 45738 - DNA, 22 bp, Artificial Sequence
  chemically synthesized
ccagatgctgtggagatggcat

SEQ ID NO: 45739 - DNA, 22 bp, Artificial Sequence
  chemically synthesized
tggagatggcatggtggcattt

SEQ ID NO: 45740 - DNA, 22 bp, Artificial Sequence
  chemically synthesized
ggtaaataacccaaatagggct

SEQ ID NO: 45741 - DNA, 22 bp, Artificial Sequence
  chemically synthesized
gtaaataacccaaatagggctt

SEQ ID NO: 45742 - DNA, 22 bp, Artificial Sequence
  chemically synthesized
tgcagggtatgggacaccacac

SEQ ID NO: 45743 - DNA, 22 bp, Artificial Sequence
  chemically synthesized
gcagggtatgggacaccacact

SEQ ID NO: 45744 - DNA, 22 bp, Artificial Sequence
  chemically synthesized
cagggtatgggacaccacacta

SEQ ID NO: 45745 - DNA, 22 bp, Artificial Sequence
  chemically synthesized
ggctttgcagcccgggtgaaac

SEQ ID NO: 45746 - DNA, 22 bp, Artificial Sequence
  chemically synthesized
tgcagcccgggtgaaaccagat

SEQ ID NO: 45747 - DNA, 22 bp, Artificial Sequence
  chemically synthesized
gcagcccgggtgaaaccagatg

SEQ ID NO: 45748 - DNA, 22 bp, Artificial Sequence
  chemically synthesized
cagcccgggtgaaaccagatgg

SEQ ID NO: 45749 - DNA, 22 bp, Artificial Sequence
  chemically synthesized
ataggcaagggatgttagcaca

SEQ ID NO: 45750 - DNA, 22 bp, Artificial Sequence
  chemically synthesized
gcacacctaaaaatcccctttc

SEQ ID NO: 45751 - DNA, 22 bp, Artificial Sequence
  chemically synthesized
aaaatcccctttcccagccatc

SEQ ID NO: 45752 - DNA, 22 bp, Artificial Sequence
  chemically synthesized
tcccagccatcctttgacaccc

SEQ ID NO: 45753 - DNA, 22 bp, Artificial Sequence
  chemically synthesized
cccagccatcctttgacaccca

SEQ ID NO: 45754 - DNA, 22 bp, Artificial Sequence
  chemically synthesized
ccagccatcctttgacacccac

SEQ ID NO: 45755 - DNA, 22 bp, Artificial Sequence
  chemically synthesized
tgacacccaccatagaaatcac

SEQ ID NO: 45756 - DNA, 22 bp, Artificial Sequence
  chemically synthesized
gacacccaccatagaaatcaca

SEQ ID NO: 45757 - DNA, 22 bp, Artificial Sequence
  chemically synthesized
acacccaccatagaaatcacag

SEQ ID NO: 45758 - DNA, 22 bp, Artificial Sequence
  chemically synthesized
ggcccaaaatagcctgtcctgt

SEQ ID NO: 45759 - DNA, 22 bp, Artificial Sequence
  chemically synthesized
tcctgttagccaaatgccagca

SEQ ID NO: 45760 - DNA, 22 bp, Artificial Sequence
  chemically synthesized
ttagccaaatgccagcactccc

SEQ ID NO: 45761 - DNA, 22 bp, Artificial Sequence
  chemically synthesized
gccaaatgccagcactcccact

SEQ ID NO: 45762 - DNA, 22 bp, Artificial Sequence
  chemically synthesized
ccactttctctgagggcatgga

SEQ ID NO: 45763 - DNA, 22 bp, Artificial Sequence
  chemically synthesized
tctctgagggcatggaggggag

SEQ ID NO: 45764 - DNA, 22 bp, Artificial Sequence
  chemically synthesized
ctctgagggcatggaggggagg

SEQ ID NO: 45765 - DNA, 22 bp, Artificial Sequence
  chemically synthesized
tctgagggcatggaggggaggc

SEQ ID NO: 45766 - DNA, 22 bp, Artificial Sequence
  chemically synthesized
tgagggcatggaggggaggcag

SEQ ID NO: 45767 - DNA, 22 bp, Artificial Sequence
  chemically synthesized
agggcatggaggggaggcagca

SEQ ID NO: 45768 - DNA, 22 bp, Artificial Sequence
  chemically synthesized
gggctctggcctcctcatttaa

SEQ ID NO: 45769 - DNA, 22 bp, Artificial Sequence
  chemically synthesized
tggcctcctcatttaattctct

SEQ ID NO: 45770 - DNA, 22 bp, Artificial Sequence
  chemically synthesized
gcctcctcatttaattctctct

SEQ ID NO: 45771 - DNA, 22 bp, Artificial Sequence
  chemically synthesized
ctcatttaattctctctgcatc

SEQ ID NO: 45772 - DNA, 22 bp, Artificial Sequence
  chemically synthesized
atttaattctctctgcatcaga

SEQ ID NO: 45773 - DNA, 22 bp, Artificial Sequence
  chemically synthesized
aattctctctgcatcagaggaa

SEQ ID NO: 45774 - DNA, 22 bp, Artificial Sequence
  chemically synthesized
attctctctgcatcagaggaag

SEQ ID NO: 45775 - DNA, 22 bp, Artificial Sequence
  chemically synthesized
tctctgcatcagaggaagagtc

SEQ ID NO: 45776 - DNA, 22 bp, Artificial Sequence
  chemically synthesized
tctgcatcagaggaagagtcac

SEQ ID NO: 45777 - DNA, 22 bp, Artificial Sequence
  chemically synthesized
tgcatcagaggaagagtcacct

SEQ ID NO: 45778 - DNA, 22 bp, Artificial Sequence
  chemically synthesized
catcagaggaagagtcaccttc

SEQ ID NO: 45779 - DNA, 22 bp, Artificial Sequence
  chemically synthesized
cacaggccagctgtggtctgac

SEQ ID NO: 45780 - DNA, 22 bp, Artificial Sequence
  chemically synthesized
acaggccagctgtggtctgact

SEQ ID NO: 45781 - DNA, 22 bp, Artificial Sequence
  chemically synthesized
tggtctgacttgccacatctaa

SEQ ID NO: 45782 - DNA, 22 bp, Artificial Sequence
  chemically synthesized
acttgccacatctaatgccacc

SEQ ID NO: 45783 - DNA, 22 bp, Artificial Sequence
  chemically synthesized
gccacatctaatgccaccaggc

SEQ ID NO: 45784 - DNA, 22 bp, Artificial Sequence
  chemically synthesized
ccacatctaatgccaccaggcc

SEQ ID NO: 45785 - DNA, 22 bp, Artificial Sequence
  chemically synthesized
atgccaccaggccctgccagcg

SEQ ID NO: 45786 - DNA, 22 bp, Artificial Sequence
  chemically synthesized
ccagcggcccccattctggtct

SEQ ID NO: 45787 - DNA, 22 bp, Artificial Sequence
  chemically synthesized
tggtctgtcaaacccctggaaa

SEQ ID NO: 45788 - DNA, 22 bp, Artificial Sequence
  chemically synthesized
gtctgtcaaacccctggaaaac

SEQ ID NO: 45789 - DNA, 22 bp, Artificial Sequence
  chemically synthesized
tcaaacccctggaaaacttcag

SEQ ID NO: 45790 - DNA, 22 bp, Artificial Sequence
  chemically synthesized
gaaaacttcagacagtgttcct

SEQ ID NO: 45791 - DNA, 22 bp, Artificial Sequence
  chemically synthesized
cagacagtgttcctcagatcca

SEQ ID NO: 45792 - DNA, 22 bp, Artificial Sequence
  chemically synthesized
agacagtgttcctcagatccag

SEQ ID NO: 45793 - DNA, 22 bp, Artificial Sequence
  chemically synthesized
ctcagatccaggacagagctgg

SEQ ID NO: 45794 - DNA, 22 bp, Artificial Sequence
  chemically synthesized
agatccaggacagagctggctc

SEQ ID NO: 45795 - DNA, 22 bp, Artificial Sequence
  chemically synthesized
gctcaggacgccacatgggtca

SEQ ID NO: 45796 - DNA, 22 bp, Artificial Sequence
  chemically synthesized
aggacgccacatgggtcaaccc

SEQ ID NO: 45797 - DNA, 22 bp, Artificial Sequence
  chemically synthesized
agaccctccaaggtgacaaaga

SEQ ID NO: 45798 - DNA, 22 bp, Artificial Sequence
  chemically synthesized
caaggtgacaaagacctcacta

SEQ ID NO: 45799 - DNA, 22 bp, Artificial Sequence
  chemically synthesized
actagactgtatctcatttttc

SEQ ID NO: 45800 - DNA, 22 bp, Artificial Sequence
  chemically synthesized
gactgtatctcatttttccagc

SEQ ID NO: 45801 - DNA, 22 bp, Artificial Sequence
  chemically synthesized
tatctcatttttccagcctcag

SEQ ID NO: 45802 - DNA, 22 bp, Artificial Sequence
  chemically synthesized
atttttccagcctcagtgagcc

SEQ ID NO: 45803 - DNA, 22 bp, Artificial Sequence
  chemically synthesized
ttccagcctcagtgagccggcc

SEQ ID NO: 45804 - DNA, 22 bp, Artificial Sequence
  chemically synthesized
tccagcctcagtgagccggccc

SEQ ID NO: 45805 - DNA, 22 bp, Artificial Sequence
  chemically synthesized
ccagcctcagtgagccggcccc

SEQ ID NO: 45806 - DNA, 22 bp, Artificial Sequence
  chemically synthesized
cagcctcagtgagccggcccca

SEQ ID NO: 45807 - DNA, 22 bp, Artificial Sequence
  chemically synthesized
agtgagccggccccagctggca

SEQ ID NO: 45808 - DNA, 22 bp, Artificial Sequence
  chemically synthesized
gcatgctgagtccaggaaagcc

SEQ ID NO: 45809 - DNA, 22 bp, Artificial Sequence
  chemically synthesized
agtccaggaaagccctggctat

SEQ ID NO: 45810 - DNA, 22 bp, Artificial Sequence
  chemically synthesized
gctatacaaaacacagcaccca

SEQ ID NO: 45811 - DNA, 22 bp, Artificial Sequence
  chemically synthesized
tacaaaacacagcacccacgtg

SEQ ID NO: 45812 - DNA, 22 bp, Artificial Sequence
  chemically synthesized
tgtgcatggctgcttagagggc

SEQ ID NO: 45813 - DNA, 22 bp, Artificial Sequence
  chemically synthesized
gtgcatggctgcttagagggct

SEQ ID NO: 45814 - DNA, 22 bp, Artificial Sequence
  chemically synthesized
tgcatggctgcttagagggcta

SEQ ID NO: 45815 - DNA, 22 bp, Artificial Sequence
  chemically synthesized
cttagagggctaatgataaagg

SEQ ID NO: 45816 - DNA, 22 bp, Artificial Sequence
  chemically synthesized
agagggctaatgataaaggcag

SEQ ID NO: 45817 - DNA, 22 bp, Artificial Sequence
  chemically synthesized
gagggctaatgataaaggcagc

SEQ ID NO: 45818 - DNA, 22 bp, Artificial Sequence
  chemically synthesized
atgataaaggcagctcactaag

SEQ ID NO: 45819 - DNA, 22 bp, Artificial Sequence
  chemically synthesized
actaagaaaacgaccgtgccca

SEQ ID NO: 45820 - DNA, 22 bp, Artificial Sequence
  chemically synthesized
agaaaacgaccgtgcccagcag

SEQ ID NO: 45821 - DNA, 22 bp, Artificial Sequence
  chemically synthesized
ctaaatggcgaaggcagcattt

SEQ ID NO: 45822 - DNA, 22 bp, Artificial Sequence
  chemically synthesized
aatggcgaaggcagcatttacc

SEQ ID NO: 45823 - DNA, 22 bp, Artificial Sequence
  chemically synthesized
accactgatgacagccccccgc

SEQ ID NO: 45824 - DNA, 22 bp, Artificial Sequence
  chemically synthesized
ccactgatgacagccccccgca

SEQ ID NO: 45825 - DNA, 22 bp, Artificial Sequence
  chemically synthesized
atgacagccccccgcatgtttc

SEQ ID NO: 45826 - DNA, 22 bp, Artificial Sequence
  chemically synthesized
cctcctaaacgcctgatatata

SEQ ID NO: 45827 - DNA, 22 bp, Artificial Sequence
  chemically synthesized
ctcctaaacgcctgatatatat

SEQ ID NO: 45828 - DNA, 22 bp, Artificial Sequence
  chemically synthesized
ctaaacgcctgatatatatcca

SEQ ID NO: 45829 - DNA, 22 bp, Artificial Sequence
  chemically synthesized
aacgcctgatatatatccattt

SEQ ID NO: 45830 - DNA, 22 bp, Artificial Sequence
  chemically synthesized
atatatatccatttttctgtca

SEQ ID NO: 45831 - DNA, 22 bp, Artificial Sequence
  chemically synthesized
ttctgtcagcaacctcaaataa

SEQ ID NO: 45832 - DNA, 22 bp, Artificial Sequence
  chemically synthesized
tctgtcagcaacctcaaataat

SEQ ID NO: 45833 - DNA, 22 bp, Artificial Sequence
  chemically synthesized
ctgtcagcaacctcaaataatg

SEQ ID NO: 45834 - DNA, 22 bp, Artificial Sequence
  chemically synthesized
tgtcagcaacctcaaataatgt

SEQ ID NO: 45835 - DNA, 22 bp, Artificial Sequence
  chemically synthesized
tcagcaacctcaaataatgtct

SEQ ID NO: 45836 - DNA, 22 bp, Artificial Sequence
  chemically synthesized
aaataatgtctataatgctgag

SEQ ID NO: 45837 - DNA, 22 bp, Artificial Sequence
  chemically synthesized
taatgctgagatttatacatgg

SEQ ID NO: 45838 - DNA, 22 bp, Artificial Sequence
  chemically synthesized
agatttatacatgggtacttat

SEQ ID NO: 45839 - DNA, 22 bp, Artificial Sequence
  chemically synthesized
atacatgggtacttataaatgt

SEQ ID NO: 45840 - DNA, 22 bp, Artificial Sequence
  chemically synthesized
tacatgggtacttataaatgtg

SEQ ID NO: 45841 - DNA, 22 bp, Artificial Sequence
  chemically synthesized
ataaatgtgatttcattatagc

SEQ ID NO: 45842 - DNA, 22 bp, Artificial Sequence
  chemically synthesized
taaatgtgatttcattatagcc

SEQ ID NO: 45843 - DNA, 22 bp, Artificial Sequence
  chemically synthesized
cattatagcctctgcaaaacta

SEQ ID NO: 45844 - DNA, 22 bp, Artificial Sequence
  chemically synthesized
attatagcctctgcaaaactac

SEQ ID NO: 45845 - DNA, 22 bp, Artificial Sequence
  chemically synthesized
tagcctctgcaaaactaccttt

SEQ ID NO: 45846 - DNA, 22 bp, Artificial Sequence
  chemically synthesized
tgcaaaactacctttccgccta

SEQ ID NO: 45847 - DNA, 22 bp, Artificial Sequence
  chemically synthesized
caaaactacctttccgcctaaa

SEQ ID NO: 45848 - DNA, 22 bp, Artificial Sequence
  chemically synthesized
cctttccgcctaaacattcaat

SEQ ID NO: 45849 - DNA, 22 bp, Artificial Sequence
  chemically synthesized
tccgcctaaacattcaattaat

SEQ ID NO: 45850 - DNA, 22 bp, Artificial Sequence
  chemically synthesized
ccgcctaaacattcaattaatg

SEQ ID NO: 45851 - DNA, 22 bp, Artificial Sequence
  chemically synthesized
cgcctaaacattcaattaatgt

SEQ ID NO: 45852 - DNA, 22 bp, Artificial Sequence
  chemically synthesized
aacattcaattaatgtaattaa

SEQ ID NO: 45853 - DNA, 22 bp, Artificial Sequence
  chemically synthesized
aattaatgtaattaaattgcta

SEQ ID NO: 45854 - DNA, 22 bp, Artificial Sequence
  chemically synthesized
atgtaattaaattgctacctga

SEQ ID NO: 45855 - DNA, 22 bp, Artificial Sequence
  chemically synthesized
aattgctacctgatggcattat

SEQ ID NO: 45856 - DNA, 22 bp, Artificial Sequence
  chemically synthesized
ctacctgatggcattatctaat

SEQ ID NO: 45857 - DNA, 22 bp, Artificial Sequence
  chemically synthesized
cctgatggcattatctaattta

SEQ ID NO: 45858 - DNA, 22 bp, Artificial Sequence
  chemically synthesized
atggcattatctaatttaactt

SEQ ID NO: 45859 - DNA, 22 bp, Artificial Sequence
  chemically synthesized
tctaatttaacttgggatccaa

SEQ ID NO: 45860 - DNA, 22 bp, Artificial Sequence
  chemically synthesized
atttaacttgggatccaaacta

SEQ ID NO: 45861 - DNA, 22 bp, Artificial Sequence
  chemically synthesized
aacttgggatccaaactattga

SEQ ID NO: 45862 - DNA, 22 bp, Artificial Sequence
  chemically synthesized
acttgggatccaaactattgaa

SEQ ID NO: 45863 - DNA, 22 bp, Artificial Sequence
  chemically synthesized
gggatccaaactattgaaaagc

SEQ ID NO: 45864 - DNA, 22 bp, Artificial Sequence
  chemically synthesized
ggatccaaactattgaaaagca

SEQ ID NO: 45865 - DNA, 22 bp, Artificial Sequence
  chemically synthesized
ttgaaaagcatgtgccttttaa

SEQ ID NO: 45866 - DNA, 22 bp, Artificial Sequence
  chemically synthesized
aaaagcatgtgccttttaacac

SEQ ID NO: 45867 - DNA, 22 bp, Artificial Sequence
  chemically synthesized
ttaacaccctgactggtaaggc

SEQ ID NO: 45868 - DNA, 22 bp, Artificial Sequence
  chemically synthesized
taacaccctgactggtaaggca

SEQ ID NO: 45869 - DNA, 22 bp, Artificial Sequence
  chemically synthesized
aacaccctgactggtaaggcat

SEQ ID NO: 45870 - DNA, 22 bp, Artificial Sequence
  chemically synthesized
acaccctgactggtaaggcatg

SEQ ID NO: 45871 - DNA, 22 bp, Artificial Sequence
  chemically synthesized
actggtaaggcatgtgatgaac

SEQ ID NO: 45872 - DNA, 22 bp, Artificial Sequence
  chemically synthesized
gtaaggcatgtgatgaacagag

SEQ ID NO: 45873 - DNA, 22 bp, Artificial Sequence
  chemically synthesized
taaacatgttggcgtaactgag

SEQ ID NO: 45874 - DNA, 22 bp, Artificial Sequence
  chemically synthesized
gcgtaactgagctgtttaaaaa

SEQ ID NO: 45875 - DNA, 22 bp, Artificial Sequence
  chemically synthesized
agctgtttaaaaataaattagc

SEQ ID NO: 45876 - DNA, 22 bp, Artificial Sequence
  chemically synthesized
tttaaaaataaattagcaaact

SEQ ID NO: 45877 - DNA, 22 bp, Artificial Sequence
  chemically synthesized
aaaaataaattagcaaactata

SEQ ID NO: 45878 - DNA, 22 bp, Artificial Sequence
  chemically synthesized
aaaataaattagcaaactataa

SEQ ID NO: 45879 - DNA, 22 bp, Artificial Sequence
  chemically synthesized
gcaaactataaaaataaacagt

SEQ ID NO: 45880 - DNA, 22 bp, Artificial Sequence
  chemically synthesized
taaaaataaacagtaacgtaca

SEQ ID NO: 45881 - DNA, 22 bp, Artificial Sequence
  chemically synthesized
aattatgaactaactctaattt

SEQ ID NO: 45882 - DNA, 22 bp, Artificial Sequence
  chemically synthesized
tgaactaactctaatttttgtt

SEQ ID NO: 45883 - DNA, 22 bp, Artificial Sequence
  chemically synthesized
actctaatttttgttctgaaat

SEQ ID NO: 45884 - DNA, 22 bp, Artificial Sequence
  chemically synthesized
taatttttgttctgaaatactg

SEQ ID NO: 45885 - DNA, 22 bp, Artificial Sequence
  chemically synthesized
atttttgttctgaaatactgtc

SEQ ID NO: 45886 - DNA, 22 bp, Artificial Sequence
  chemically synthesized
ttgttctgaaatactgtctttg

SEQ ID NO: 45887 - DNA, 22 bp, Artificial Sequence
  chemically synthesized
tgttctgaaatactgtctttga

SEQ ID NO: 45888 - DNA, 22 bp, Artificial Sequence
  chemically synthesized
gttctgaaatactgtctttgac

SEQ ID NO: 45889 - DNA, 22 bp, Artificial Sequence
  chemically synthesized
ttctgaaatactgtctttgacc

SEQ ID NO: 45890 - DNA, 22 bp, Artificial Sequence
  chemically synthesized
tgaaatactgtctttgacctta

SEQ ID NO: 45891 - DNA, 22 bp, Artificial Sequence
  chemically synthesized
aaatactgtctttgaccttagt

SEQ ID NO: 45892 - DNA, 22 bp, Artificial Sequence
  chemically synthesized
tctttgaccttagtcataaaca

SEQ ID NO: 45893 - DNA, 22 bp, Artificial Sequence
  chemically synthesized
tgaccttagtcataaacaagca

SEQ ID NO: 45894 - DNA, 22 bp, Artificial Sequence
  chemically synthesized
gaccttagtcataaacaagcac

SEQ ID NO: 45895 - DNA, 22 bp, Artificial Sequence
  chemically synthesized
accttagtcataaacaagcact

SEQ ID NO: 45896 - DNA, 22 bp, Artificial Sequence
  chemically synthesized
agtcataaacaagcactattaa

SEQ ID NO: 45897 - DNA, 22 bp, Artificial Sequence
  chemically synthesized
gtcataaacaagcactattaaa

SEQ ID NO: 45898 - DNA, 22 bp, Artificial Sequence
  chemically synthesized
ttaaaaaaacataatatcccaa

SEQ ID NO: 45899 - DNA, 22 bp, Artificial Sequence
  chemically synthesized
aaaaaacataatatcccaacag

SEQ ID NO: 45900 - DNA, 22 bp, Artificial Sequence
  chemically synthesized
aatgctcttctagctctgcaga

SEQ ID NO: 45901 - DNA, 22 bp, Artificial Sequence
  chemically synthesized
ttctagctctgcagaatgcaaa

SEQ ID NO: 45902 - DNA, 22 bp, Artificial Sequence
  chemically synthesized
ctagctctgcagaatgcaaagc

SEQ ID NO: 45903 - DNA, 22 bp, Artificial Sequence
  chemically synthesized
tagctctgcagaatgcaaagca

SEQ ID NO: 45904 - DNA, 22 bp, Artificial Sequence
  chemically synthesized
gctctgcagaatgcaaagcaag

SEQ ID NO: 45905 - DNA, 22 bp, Artificial Sequence
  chemically synthesized
tgcagaatgcaaagcaagacaa

SEQ ID NO: 45906 - DNA, 22 bp, Artificial Sequence
  chemically synthesized
cagaatgcaaagcaagacaagg

SEQ ID NO: 45907 - DNA, 22 bp, Artificial Sequence
  chemically synthesized
gcctttcttgaaaagctagaaa

SEQ ID NO: 45908 - DNA, 22 bp, Artificial Sequence
  chemically synthesized
cctttcttgaaaagctagaaaa

SEQ ID NO: 45909 - DNA, 22 bp, Artificial Sequence
  chemically synthesized
tcttgaaaagctagaaaactgt

SEQ ID NO: 45910 - DNA, 22 bp, Artificial Sequence
  chemically synthesized
cttgaaaagctagaaaactgtg

SEQ ID NO: 45911 - DNA, 22 bp, Artificial Sequence
  chemically synthesized
ttgaaaagctagaaaactgtgt

SEQ ID NO: 45912 - DNA, 22 bp, Artificial Sequence
  chemically synthesized
gaaaagctagaaaactgtgtcc

SEQ ID NO: 45913 - DNA, 22 bp, Artificial Sequence
  chemically synthesized
aaaagctagaaaactgtgtcca

SEQ ID NO: 45914 - DNA, 22 bp, Artificial Sequence
  chemically synthesized
gaaaactgtgtccaaaacctac

SEQ ID NO: 45915 - DNA, 22 bp, Artificial Sequence
  chemically synthesized
tgtccaaaacctacaaagacta

SEQ ID NO: 45916 - DNA, 22 bp, Artificial Sequence
  chemically synthesized
caaagactattgtgctcttgtt

SEQ ID NO: 45917 - DNA, 22 bp, Artificial Sequence
  chemically synthesized
ttgtgctcttgttgacttgaag

SEQ ID NO: 45918 - DNA, 22 bp, Artificial Sequence
  chemically synthesized
tgctcttgttgacttgaagctg

SEQ ID NO: 45919 - DNA, 22 bp, Artificial Sequence
  chemically synthesized
ttgttgacttgaagctgcttcc

SEQ ID NO: 45920 - DNA, 22 bp, Artificial Sequence
  chemically synthesized
gttgacttgaagctgcttccgt

SEQ ID NO: 45921 - DNA, 22 bp, Artificial Sequence
  chemically synthesized
ttgacttgaagctgcttccgtt

SEQ ID NO: 45922 - DNA, 22 bp, Artificial Sequence
  chemically synthesized
acttgaagctgcttccgttcaa

SEQ ID NO: 45923 - DNA, 22 bp, Artificial Sequence
  chemically synthesized
gaagctgcttccgttcaagcca

SEQ ID NO: 45924 - DNA, 22 bp, Artificial Sequence
  chemically synthesized
aagctgcttccgttcaagccag

SEQ ID NO: 45925 - DNA, 22 bp, Artificial Sequence
  chemically synthesized
cttccgttcaagccagaaaagt

SEQ ID NO: 45926 - DNA, 22 bp, Artificial Sequence
  chemically synthesized
ccgttcaagccagaaaagttaa

SEQ ID NO: 45927 - DNA, 22 bp, Artificial Sequence
  chemically synthesized
cgttcaagccagaaaagttaaa

SEQ ID NO: 45928 - DNA, 22 bp, Artificial Sequence
  chemically synthesized
aagccagaaaagttaaaacctt

SEQ ID NO: 45929 - DNA, 22 bp, Artificial Sequence
  chemically synthesized
aaaccttgtgaagtgcttttac

SEQ ID NO: 45930 - DNA, 22 bp, Artificial Sequence
  chemically synthesized
gtgaagtgcttttacattttca

SEQ ID NO: 45931 - DNA, 22 bp, Artificial Sequence
  chemically synthesized
tgaagtgcttttacattttcag

SEQ ID NO: 45932 - DNA, 22 bp, Artificial Sequence
  chemically synthesized
ttacattttcagatgttttgga

SEQ ID NO: 45933 - DNA, 22 bp, Artificial Sequence
  chemically synthesized
tacattttcagatgttttggag

SEQ ID NO: 45934 - DNA, 22 bp, Artificial Sequence
  chemically synthesized
acattttcagatgttttggagt

SEQ ID NO: 45935 - DNA, 22 bp, Artificial Sequence
  chemically synthesized
cattttcagatgttttggagtc

SEQ ID NO: 45936 - DNA, 22 bp, Artificial Sequence
  chemically synthesized
tcagatgttttggagtctctca

SEQ ID NO: 45937 - DNA, 22 bp, Artificial Sequence
  chemically synthesized
cagatgttttggagtctctcaa

SEQ ID NO: 45938 - DNA, 22 bp, Artificial Sequence
  chemically synthesized
agatgttttggagtctctcaag

SEQ ID NO: 45939 - DNA, 22 bp, Artificial Sequence
  chemically synthesized
tggagtctctcaagaaatgagg

SEQ ID NO: 45940 - DNA, 22 bp, Artificial Sequence
  chemically synthesized
ggagtctctcaagaaatgagga

SEQ ID NO: 45941 - DNA, 22 bp, Artificial Sequence
  chemically synthesized
gagtctctcaagaaatgaggac

SEQ ID NO: 45942 - DNA, 22 bp, Artificial Sequence
  chemically synthesized
tcaagaaatgaggacaggcaag

SEQ ID NO: 45943 - DNA, 22 bp, Artificial Sequence
  chemically synthesized
aagaaatgaggacaggcaaggg

SEQ ID NO: 45944 - DNA, 22 bp, Artificial Sequence
  chemically synthesized
tttccacatgcagctgtttcaa

SEQ ID NO: 45945 - DNA, 22 bp, Artificial Sequence
  chemically synthesized
ccacatgcagctgtttcaacag

SEQ ID NO: 45946 - DNA, 22 bp, Artificial Sequence
  chemically synthesized
cacatgcagctgtttcaacagc

SEQ ID NO: 45947 - DNA, 22 bp, Artificial Sequence
  chemically synthesized
tttcaacagctcactgcataac

SEQ ID NO: 45948 - DNA, 22 bp, Artificial Sequence
  chemically synthesized
caacagctcactgcataacaga

SEQ ID NO: 45949 - DNA, 22 bp, Artificial Sequence
  chemically synthesized
aacagctcactgcataacagag

SEQ ID NO: 45950 - DNA, 22 bp, Artificial Sequence
  chemically synthesized
actgcataacagagtctcttac

SEQ ID NO: 45951 - DNA, 22 bp, Artificial Sequence
  chemically synthesized
cataacagagtctcttacacag

SEQ ID NO: 45952 - DNA, 22 bp, Artificial Sequence
  chemically synthesized
ttacacagggctgcctccgcac

SEQ ID NO: 45953 - DNA, 22 bp, Artificial Sequence
  chemically synthesized
acacagggctgcctccgcacct

SEQ ID NO: 45954 - DNA, 22 bp, Artificial Sequence
  chemically synthesized
cacagggctgcctccgcacctg

SEQ ID NO: 45955 - DNA, 22 bp, Artificial Sequence
  chemically synthesized
cctccgcacctgagctgagctt

SEQ ID NO: 45956 - DNA, 22 bp, Artificial Sequence
  chemically synthesized
cgcacctgagctgagcttgctg

SEQ ID NO: 45957 - DNA, 22 bp, Artificial Sequence
  chemically synthesized
agctgagcttgctgtcctaagt

SEQ ID NO: 45958 - DNA, 22 bp, Artificial Sequence
  chemically synthesized
agcttgctgtcctaagtcggct

SEQ ID NO: 45959 - DNA, 22 bp, Artificial Sequence
  chemically synthesized
gctgtcctaagtcggctactgc

SEQ ID NO: 45960 - DNA, 22 bp, Artificial Sequence
  chemically synthesized
ctgtcctaagtcggctactgct

SEQ ID NO: 45961 - DNA, 22 bp, Artificial Sequence
  chemically synthesized
tcctaagtcggctactgcttct

SEQ ID NO: 45962 - DNA, 22 bp, Artificial Sequence
  chemically synthesized
agtcggctactgcttctaagtc

SEQ ID NO: 45963 - DNA, 22 bp, Artificial Sequence
  chemically synthesized
ctgcttctaagtccccagcttt

SEQ ID NO: 45964 - DNA, 22 bp, Artificial Sequence
  chemically synthesized
cttctaagtccccagcttttct

SEQ ID NO: 45965 - DNA, 22 bp, Artificial Sequence
  chemically synthesized
ctaagtccccagcttttctaag

SEQ ID NO: 45966 - DNA, 22 bp, Artificial Sequence
  chemically synthesized
taagtccccagcttttctaaga

SEQ ID NO: 45967 - DNA, 22 bp, Artificial Sequence
  chemically synthesized
agtccccagcttttctaagaca

SEQ ID NO: 45968 - DNA, 22 bp, Artificial Sequence
  chemically synthesized
ttctaagacatatggcagaaat

SEQ ID NO: 45969 - DNA, 22 bp, Artificial Sequence
  chemically synthesized
tctaagacatatggcagaaatg

SEQ ID NO: 45970 - DNA, 22 bp, Artificial Sequence
  chemically synthesized
ctaagacatatggcagaaatgt

SEQ ID NO: 45971 - DNA, 22 bp, Artificial Sequence
  chemically synthesized
taagacatatggcagaaatgtg

SEQ ID NO: 45972 - DNA, 22 bp, Artificial Sequence
  chemically synthesized
agacatatggcagaaatgtgga

SEQ ID NO: 45973 - DNA, 22 bp, Artificial Sequence
  chemically synthesized
tcttccaaacagcacaagacag

SEQ ID NO: 45974 - DNA, 22 bp, Artificial Sequence
  chemically synthesized
ccaaacagcacaagacagaaag

SEQ ID NO: 45975 - DNA, 22 bp, Artificial Sequence
  chemically synthesized
caaacagcacaagacagaaagc

SEQ ID NO: 45976 - DNA, 22 bp, Artificial Sequence
  chemically synthesized
ttgaaactgtatacaggacacg

SEQ ID NO: 45977 - DNA, 22 bp, Artificial Sequence
  chemically synthesized
aaactgtatacaggacacgtct

SEQ ID NO: 45978 - DNA, 22 bp, Artificial Sequence
  chemically synthesized
tatacaggacacgtcttcacag

SEQ ID NO: 45979 - DNA, 22 bp, Artificial Sequence
  chemically synthesized
cacagtaatccaatgctcctgt

SEQ ID NO: 45980 - DNA, 22 bp, Artificial Sequence
  chemically synthesized
acagtaatccaatgctcctgta

SEQ ID NO: 45981 - DNA, 22 bp, Artificial Sequence
  chemically synthesized
ctgtaacaaaggacagcatact

SEQ ID NO: 45982 - DNA, 22 bp, Artificial Sequence
  chemically synthesized
taacaaaggacagcatactatg

SEQ ID NO: 45983 - DNA, 22 bp, Artificial Sequence
  chemically synthesized
tgggataattactatggattat

SEQ ID NO: 45984 - DNA, 22 bp, Artificial Sequence
  chemically synthesized
ctatggattattattacagttt

SEQ ID NO: 45985 - DNA, 22 bp, Artificial Sequence
  chemically synthesized
tggattattattacagtttcta

SEQ ID NO: 45986 - DNA, 22 bp, Artificial Sequence
  chemically synthesized
ttattacagtttctaaagcaaa

SEQ ID NO: 45987 - DNA, 22 bp, Artificial Sequence
  chemically synthesized
ttacagtttctaaagcaaaaga

SEQ ID NO: 45988 - DNA, 22 bp, Artificial Sequence
  chemically synthesized
cagtttctaaagcaaaagaaca

SEQ ID NO: 45989 - DNA, 22 bp, Artificial Sequence
  chemically synthesized
ctaaagcaaaagaacaaaaaaa

SEQ ID NO: 45990 - DNA, 22 bp, Artificial Sequence
  chemically synthesized
taaagcaaaagaacaaaaaaaa

SEQ ID NO: 45991 - DNA, 22 bp, Artificial Sequence
  chemically synthesized
aagcaaaagaacaaaaaaaaat

SEQ ID NO: 45992 - DNA, 22 bp, Artificial Sequence
  chemically synthesized
acaaaagacatattacacacgc

SEQ ID NO: 45993 - DNA, 22 bp, Artificial Sequence
  chemically synthesized
cacacgcagatttctaaagctt

SEQ ID NO: 45994 - DNA, 22 bp, Artificial Sequence
  chemically synthesized
ctaaagctttaaaatcatatgg

SEQ ID NO: 45995 - DNA, 22 bp, Artificial Sequence
  chemically synthesized
taaagctttaaaatcatatggt

SEQ ID NO: 45996 - DNA, 22 bp, Artificial Sequence
  chemically synthesized
aagctttaaaatcatatggtct

SEQ ID NO: 45997 - DNA, 22 bp, Artificial Sequence
  chemically synthesized
taaaatcatatggtcttcggtg

SEQ ID NO: 45998 - DNA, 22 bp, Artificial Sequence
  chemically synthesized
aaaatcatatggtcttcggtgt

SEQ ID NO: 45999 - DNA, 22 bp, Artificial Sequence
  chemically synthesized
aaatcatatggtcttcggtgtt

SEQ ID NO: 46000 - DNA, 22 bp, Artificial Sequence
  chemically synthesized
cggtgttggttcctatggggtt

SEQ ID NO: 46001 - DNA, 22 bp, Artificial Sequence
  chemically synthesized
ggtgttggttcctatggggtta

SEQ ID NO: 46002 - DNA, 22 bp, Artificial Sequence
  chemically synthesized
gttcctatggggttacggataa

SEQ ID NO: 46003 - DNA, 22 bp, Artificial Sequence
  chemically synthesized
ctatggggttacggataatgcc

SEQ ID NO: 46004 - DNA, 22 bp, Artificial Sequence
  chemically synthesized
tggggttacggataatgcccta

SEQ ID NO: 46005 - DNA, 22 bp, Artificial Sequence
  chemically synthesized
cggataatgccctaactgagca

SEQ ID NO: 46006 - DNA, 22 bp, Artificial Sequence
  chemically synthesized
actgagcacgacagatgcaaac

SEQ ID NO: 46007 - DNA, 22 bp, Artificial Sequence
  chemically synthesized
agcacgacagatgcaaacacaa

SEQ ID NO: 46008 - DNA, 22 bp, Artificial Sequence
  chemically synthesized
aaattctctcatgtcatggtgc

SEQ ID NO: 46009 - DNA, 22 bp, Artificial Sequence
  chemically synthesized
tctcatgtcatggtgcttactg

SEQ ID NO: 46010 - DNA, 22 bp, Artificial Sequence
  chemically synthesized
tcatgtcatggtgcttactgcc

SEQ ID NO: 46011 - DNA, 22 bp, Artificial Sequence
  chemically synthesized
atgtcatggtgcttactgccct

SEQ ID NO: 46012 - DNA, 22 bp, Artificial Sequence
  chemically synthesized
actgccctttctttcacaaaca

SEQ ID NO: 46013 - DNA, 22 bp, Artificial Sequence
  chemically synthesized
ctgccctttctttcacaaacaa

SEQ ID NO: 46014 - DNA, 22 bp, Artificial Sequence
  chemically synthesized
ccctttctttcacaaacaaaag

SEQ ID NO: 46015 - DNA, 22 bp, Artificial Sequence
  chemically synthesized
tctttcacaaacaaaagtagtt

SEQ ID NO: 46016 - DNA, 22 bp, Artificial Sequence
  chemically synthesized
ctttcacaaacaaaagtagttg

SEQ ID NO: 46017 - DNA, 22 bp, Artificial Sequence
  chemically synthesized
tttcacaaacaaaagtagttga

SEQ ID NO: 46018 - DNA, 22 bp, Artificial Sequence
  chemically synthesized
tcacaaacaaaagtagttgagc

SEQ ID NO: 46019 - DNA, 22 bp, Artificial Sequence
  chemically synthesized
cacaaacaaaagtagttgagca

SEQ ID NO: 46020 - DNA, 22 bp, Artificial Sequence
  chemically synthesized
acaaacaaaagtagttgagcaa

SEQ ID NO: 46021 - DNA, 22 bp, Artificial Sequence
  chemically synthesized
agcaacagctaagtagttattc

SEQ ID NO: 46022 - DNA, 22 bp, Artificial Sequence
  chemically synthesized
agtagttattcatctcaaagaa

SEQ ID NO: 46023 - DNA, 22 bp, Artificial Sequence
  chemically synthesized
ttcatctcaaagaaccaaccta

SEQ ID NO: 46024 - DNA, 22 bp, Artificial Sequence
  chemically synthesized
atctcaaagaaccaacctaaaa

SEQ ID NO: 46025 - DNA, 22 bp, Artificial Sequence
  chemically synthesized
aaagaaccaacctaaaattctg

SEQ ID NO: 46026 - DNA, 22 bp, Artificial Sequence
  chemically synthesized
aaattctgacaggcccagcact

SEQ ID NO: 46027 - DNA, 22 bp, Artificial Sequence
  chemically synthesized
tgacaggcccagcactgtctac

SEQ ID NO: 46028 - DNA, 22 bp, Artificial Sequence
  chemically synthesized
acaggcccagcactgtctaccc

SEQ ID NO: 46029 - DNA, 22 bp, Artificial Sequence
  chemically synthesized
tctacccccacccccaaacaac

SEQ ID NO: 46030 - DNA, 22 bp, Artificial Sequence
  chemically synthesized
cccccacccccaaacaacaaca

SEQ ID NO: 46031 - DNA, 22 bp, Artificial Sequence
  chemically synthesized
cacaaataaaaactaggaggaa

SEQ ID NO: 46032 - DNA, 22 bp, Artificial Sequence
  chemically synthesized
ggaggaagctcaaactcatcca

SEQ ID NO: 46033 - DNA, 22 bp, Artificial Sequence
  chemically synthesized
aaactcatccacacttggttca

SEQ ID NO: 46034 - DNA, 22 bp, Artificial Sequence
  chemically synthesized
atccacacttggttcaggacac

SEQ ID NO: 46035 - DNA, 22 bp, Artificial Sequence
  chemically synthesized
ggttcaggacacagggaaggcc

SEQ ID NO: 46036 - DNA, 22 bp, Artificial Sequence
  chemically synthesized
gttcaggacacagggaaggcct

SEQ ID NO: 46037 - DNA, 22 bp, Artificial Sequence
  chemically synthesized
aggacacagggaaggcctgatg

SEQ ID NO: 46038 - DNA, 22 bp, Artificial Sequence
  chemically synthesized
atgtgaaagaggagacagagaa

SEQ ID NO: 46039 - DNA, 22 bp, Artificial Sequence
  chemically synthesized
cctgggtgtgcagaattacacc

SEQ ID NO: 46040 - DNA, 22 bp, Artificial Sequence
  chemically synthesized
ctgggtgtgcagaattacaccc

SEQ ID NO: 46041 - DNA, 22 bp, Artificial Sequence
  chemically synthesized
ggtgtgcagaattacaccccag

SEQ ID NO: 46042 - DNA, 22 bp, Artificial Sequence
  chemically synthesized
caccccaggccacactccctgc

SEQ ID NO: 46043 - DNA, 22 bp, Artificial Sequence
  chemically synthesized
cctgcaggggccacaggagcaa

SEQ ID NO: 46044 - DNA, 22 bp, Artificial Sequence
  chemically synthesized
caggggccacaggagcaagcac

SEQ ID NO: 46045 - DNA, 22 bp, Artificial Sequence
  chemically synthesized
cagccgggtccctgagtctgac

SEQ ID NO: 46046 - DNA, 22 bp, Artificial Sequence
  chemically synthesized
agtctgacttttacccaaacag

SEQ ID NO: 46047 - DNA, 22 bp, Artificial Sequence
  chemically synthesized
acttttacccaaacagggggtt

SEQ ID NO: 46048 - DNA, 22 bp, Artificial Sequence
  chemically synthesized
ttacccaaacagggggttgcca

SEQ ID NO: 46049 - DNA, 22 bp, Artificial Sequence
  chemically synthesized
tacccaaacagggggttgccag

SEQ ID NO: 46050 - DNA, 22 bp, Artificial Sequence
  chemically synthesized
acccaaacagggggttgccagt

SEQ ID NO: 46051 - DNA, 22 bp, Artificial Sequence
  chemically synthesized
cccaaacagggggttgccagtt

SEQ ID NO: 46052 - DNA, 22 bp, Artificial Sequence
  chemically synthesized
ccagttgctgcgagacaaatat

SEQ ID NO: 46053 - DNA, 22 bp, Artificial Sequence
  chemically synthesized
ctgcgagacaaatatccctagc

SEQ ID NO: 46054 - DNA, 22 bp, Artificial Sequence
  chemically synthesized
cgagacaaatatccctagcaca

SEQ ID NO: 46055 - DNA, 22 bp, Artificial Sequence
  chemically synthesized
gcacattacctagttggcaaag

SEQ ID NO: 46056 - DNA, 22 bp, Artificial Sequence
  chemically synthesized
cctagttggcaaaggaatgcaa

SEQ ID NO: 46057 - DNA, 22 bp, Artificial Sequence
  chemically synthesized
gttggcaaaggaatgcaactgg

SEQ ID NO: 46058 - DNA, 22 bp, Artificial Sequence
  chemically synthesized
gcaaaggaatgcaactgggagg

SEQ ID NO: 46059 - DNA, 22 bp, Artificial Sequence
  chemically synthesized
ggaggttctggaatagcacagt

SEQ ID NO: 46060 - DNA, 22 bp, Artificial Sequence
  chemically synthesized
tggaatagcacagtgtggaact

SEQ ID NO: 46061 - DNA, 22 bp, Artificial Sequence
  chemically synthesized
gaatagcacagtgtggaactgc

SEQ ID NO: 46062 - DNA, 22 bp, Artificial Sequence
  chemically synthesized
cactggacttttcctgttctga

SEQ ID NO: 46063 - DNA, 22 bp, Artificial Sequence
  chemically synthesized
gacttttcctgttctgaagagg

SEQ ID NO: 46064 - DNA, 22 bp, Artificial Sequence
  chemically synthesized
ttcctgttctgaagaggacttt

SEQ ID NO: 46065 - DNA, 22 bp, Artificial Sequence
  chemically synthesized
tcctgttctgaagaggactttg

SEQ ID NO: 46066 - DNA, 22 bp, Artificial Sequence
  chemically synthesized
cctgttctgaagaggactttgc

SEQ ID NO: 46067 - DNA, 22 bp, Artificial Sequence
  chemically synthesized
ctgttctgaagaggactttgct

SEQ ID NO: 46068 - DNA, 22 bp, Artificial Sequence
  chemically synthesized
ttctgaagaggactttgctttc

SEQ ID NO: 46069 - DNA, 22 bp, Artificial Sequence
  chemically synthesized
tgaagaggactttgctttcctc

SEQ ID NO: 46070 - DNA, 22 bp, Artificial Sequence
  chemically synthesized
aagaggactttgctttcctccg

SEQ ID NO: 46071 - DNA, 22 bp, Artificial Sequence
  chemically synthesized
tgctttcctccgggatgtaaag

SEQ ID NO: 46072 - DNA, 22 bp, Artificial Sequence
  chemically synthesized
gctttcctccgggatgtaaagc

SEQ ID NO: 46073 - DNA, 22 bp, Artificial Sequence
  chemically synthesized
ctttcctccgggatgtaaagca

SEQ ID NO: 46074 - DNA, 22 bp, Artificial Sequence
  chemically synthesized
tcctccgggatgtaaagcattt

SEQ ID NO: 46075 - DNA, 22 bp, Artificial Sequence
  chemically synthesized
cctccgggatgtaaagcatttg

SEQ ID NO: 46076 - DNA, 22 bp, Artificial Sequence
  chemically synthesized
ctccgggatgtaaagcatttgg

SEQ ID NO: 46077 - DNA, 22 bp, Artificial Sequence
  chemically synthesized
cgggatgtaaagcatttggcag

SEQ ID NO: 46078 - DNA, 22 bp, Artificial Sequence
  chemically synthesized
ggcaggcaaaggacaaaactta

SEQ ID NO: 46079 - DNA, 22 bp, Artificial Sequence
  chemically synthesized
gcaggcaaaggacaaaacttac

SEQ ID NO: 46080 - DNA, 22 bp, Artificial Sequence
  chemically synthesized
acctcaggtactatggcaaact

SEQ ID NO: 46081 - DNA, 22 bp, Artificial Sequence
  chemically synthesized
cctcaggtactatggcaaactg

SEQ ID NO: 46082 - DNA, 22 bp, Artificial Sequence
  chemically synthesized
aggtactatggcaaactggcca

SEQ ID NO: 46083 - DNA, 22 bp, Artificial Sequence
  chemically synthesized
tggcaaactggccaaagagaag

SEQ ID NO: 46084 - DNA, 22 bp, Artificial Sequence
  chemically synthesized
gccaaagagaagcgttgctagg

SEQ ID NO: 46085 - DNA, 22 bp, Artificial Sequence
  chemically synthesized
ctaggagaatggacacggcagg

SEQ ID NO: 46086 - DNA, 22 bp, Artificial Sequence
  chemically synthesized
ggagaatggacacggcaggaaa

SEQ ID NO: 46087 - DNA, 22 bp, Artificial Sequence
  chemically synthesized
agcttggcccaggaagaagctg

SEQ ID NO: 46088 - DNA, 22 bp, Artificial Sequence
  chemically synthesized
ggcccaggaagaagctggcgct

SEQ ID NO: 46089 - DNA, 22 bp, Artificial Sequence
  chemically synthesized
gcccaggaagaagctggcgctc

SEQ ID NO: 46090 - DNA, 22 bp, Artificial Sequence
  chemically synthesized
gcgctcagctacaggggccgtg

SEQ ID NO: 46091 - DNA, 22 bp, Artificial Sequence
  chemically synthesized
agctacaggggccgtgggaata

SEQ ID NO: 46092 - DNA, 22 bp, Artificial Sequence
  chemically synthesized
caggggccgtgggaatagctgg

SEQ ID NO: 46093 - DNA, 22 bp, Artificial Sequence
  chemically synthesized
gaggcctgtgcatttccctgag

SEQ ID NO: 46094 - DNA, 22 bp, Artificial Sequence
  chemically synthesized
tgcatttccctgagggtctcct

SEQ ID NO: 46095 - DNA, 22 bp, Artificial Sequence
  chemically synthesized
ccctgagggtctccttggcgac

SEQ ID NO: 46096 - DNA, 22 bp, Artificial Sequence
  chemically synthesized
cctgagggtctccttggcgaca

SEQ ID NO: 46097 - DNA, 22 bp, Artificial Sequence
  chemically synthesized
agggtctccttggcgacagggc

SEQ ID NO: 46098 - DNA, 22 bp, Artificial Sequence
  chemically synthesized
cttggcgacagggctggacctt

SEQ ID NO: 46099 - DNA, 22 bp, Artificial Sequence
  chemically synthesized
ggcgacagggctggacctttgc

SEQ ID NO: 46100 - DNA, 22 bp, Artificial Sequence
  chemically synthesized
gcgacagggctggacctttgca

SEQ ID NO: 46101 - DNA, 22 bp, Artificial Sequence
  chemically synthesized
gacctttgcactggcagcctgg

SEQ ID NO: 46102 - DNA, 22 bp, Artificial Sequence
  chemically synthesized
tgcactggcagcctggactctt

SEQ ID NO: 46103 - DNA, 22 bp, Artificial Sequence
  chemically synthesized
gcactggcagcctggactcttc

SEQ ID NO: 46104 - DNA, 22 bp, Artificial Sequence
  chemically synthesized
cactggcagcctggactcttct

SEQ ID NO: 46105 - DNA, 22 bp, Artificial Sequence
  chemically synthesized
gcagcctggactcttctctgag

SEQ ID NO: 46106 - DNA, 22 bp, Artificial Sequence
  chemically synthesized
gactcttctctgagctccccct

SEQ ID NO: 46107 - DNA, 22 bp, Artificial Sequence
  chemically synthesized
ttctctgagctcccccttgggt

SEQ ID NO: 46108 - DNA, 22 bp, Artificial Sequence
  chemically synthesized
ctctgagctcccccttgggtta

SEQ ID NO: 46109 - DNA, 22 bp, Artificial Sequence
  chemically synthesized
tctgagctcccccttgggttac

SEQ ID NO: 46110 - DNA, 22 bp, Artificial Sequence
  chemically synthesized
tgagctcccccttgggttacct

SEQ ID NO: 46111 - DNA, 22 bp, Artificial Sequence
  chemically synthesized
agctcccccttgggttacctat

SEQ ID NO: 46112 - DNA, 22 bp, Artificial Sequence
  chemically synthesized
ccccttgggttacctatgattc

SEQ ID NO: 46113 - DNA, 22 bp, Artificial Sequence
  chemically synthesized
gggttacctatgattccagaag

SEQ ID NO: 46114 - DNA, 22 bp, Artificial Sequence
  chemically synthesized
ggttacctatgattccagaaga

SEQ ID NO: 46115 - DNA, 22 bp, Artificial Sequence
  chemically synthesized
cctatgattccagaagagtttg

SEQ ID NO: 46116 - DNA, 22 bp, Artificial Sequence
  chemically synthesized
tgattccagaagagtttgttct

SEQ ID NO: 46117 - DNA, 22 bp, Artificial Sequence
  chemically synthesized
cagaagagtttgttctacatgt

SEQ ID NO: 46118 - DNA, 22 bp, Artificial Sequence
  chemically synthesized
gttctacatgtggcaaagccag

SEQ ID NO: 46119 - DNA, 22 bp, Artificial Sequence
  chemically synthesized
ttctacatgtggcaaagccagc

SEQ ID NO: 46120 - DNA, 22 bp, Artificial Sequence
  chemically synthesized
tacatgtggcaaagccagcacc

SEQ ID NO: 46121 - DNA, 22 bp, Artificial Sequence
  chemically synthesized
catgtggcaaagccagcaccat

SEQ ID NO: 46122 - DNA, 22 bp, Artificial Sequence
  chemically synthesized
aggcctaccttgagggatgtta

SEQ ID NO: 46123 - DNA, 22 bp, Artificial Sequence
  chemically synthesized
ccttgagggatgttaaacttac

SEQ ID NO: 46124 - DNA, 22 bp, Artificial Sequence
  chemically synthesized
gagggatgttaaacttacgccc

SEQ ID NO: 46125 - DNA, 22 bp, Artificial Sequence
  chemically synthesized
agggatgttaaacttacgccct

SEQ ID NO: 46126 - DNA, 22 bp, Artificial Sequence
  chemically synthesized
aacttacgccctacccactgct

SEQ ID NO: 46127 - DNA, 22 bp, Artificial Sequence
  chemically synthesized
acgccctacccactgctactta

SEQ ID NO: 46128 - DNA, 22 bp, Artificial Sequence
  chemically synthesized
cgccctacccactgctacttaa

SEQ ID NO: 46129 - DNA, 22 bp, Artificial Sequence
  chemically synthesized
cccactgctacttaaggtgtct

SEQ ID NO: 46130 - DNA, 22 bp, Artificial Sequence
  chemically synthesized
ctacttaaggtgtcttttgaat

SEQ ID NO: 46131 - DNA, 22 bp, Artificial Sequence
  chemically synthesized
cttaaggtgtcttttgaatcct

SEQ ID NO: 46132 - DNA, 22 bp, Artificial Sequence
  chemically synthesized
aaggtgtcttttgaatcctgag

SEQ ID NO: 46133 - DNA, 22 bp, Artificial Sequence
  chemically synthesized
aggtgtcttttgaatcctgagg

SEQ ID NO: 46134 - DNA, 22 bp, Artificial Sequence
  chemically synthesized
ttgaatcctgaggaccaaggag

SEQ ID NO: 46135 - DNA, 22 bp, Artificial Sequence
  chemically synthesized
tgaatcctgaggaccaaggagc

SEQ ID NO: 46136 - DNA, 22 bp, Artificial Sequence
  chemically synthesized
gaatcctgaggaccaaggagct

SEQ ID NO: 46137 - DNA, 22 bp, Artificial Sequence
  chemically synthesized
aatcctgaggaccaaggagctc

SEQ ID NO: 46138 - DNA, 22 bp, Artificial Sequence
  chemically synthesized
aggaccaaggagctctcctatg

SEQ ID NO: 46139 - DNA, 22 bp, Artificial Sequence
  chemically synthesized
tcctatgacaaggaacctgtca

SEQ ID NO: 46140 - DNA, 22 bp, Artificial Sequence
  chemically synthesized
ctatgacaaggaacctgtcact

SEQ ID NO: 46141 - DNA, 22 bp, Artificial Sequence
  chemically synthesized
tgacaaggaacctgtcactggt

SEQ ID NO: 46142 - DNA, 22 bp, Artificial Sequence
  chemically synthesized
tcactggttcttctgtgattgc

SEQ ID NO: 46143 - DNA, 22 bp, Artificial Sequence
  chemically synthesized
gttcttctgtgattgctaaagc

SEQ ID NO: 46144 - DNA, 22 bp, Artificial Sequence
  chemically synthesized
ttctgtgattgctaaagcctag

SEQ ID NO: 46145 - DNA, 22 bp, Artificial Sequence
  chemically synthesized
ctgtgattgctaaagcctagag

SEQ ID NO: 46146 - DNA, 22 bp, Artificial Sequence
  chemically synthesized
tgtgattgctaaagcctagagg

SEQ ID NO: 46147 - DNA, 22 bp, Artificial Sequence
  chemically synthesized
tgattgctaaagcctagaggac

SEQ ID NO: 46148 - DNA, 22 bp, Artificial Sequence
  chemically synthesized
ctaaagcctagaggacctcctc

SEQ ID NO: 46149 - DNA, 22 bp, Artificial Sequence
  chemically synthesized
aagcctagaggacctcctccaa

SEQ ID NO: 46150 - DNA, 22 bp, Artificial Sequence
  chemically synthesized
gaggacctcctccaaagaaaag

SEQ ID NO: 46151 - DNA, 22 bp, Artificial Sequence
  chemically synthesized
ctccaaagaaaagtggctcaga

SEQ ID NO: 46152 - DNA, 22 bp, Artificial Sequence
  chemically synthesized
caaagaaaagtggctcagacag

SEQ ID NO: 46153 - DNA, 22 bp, Artificial Sequence
  chemically synthesized
agacagaaacactgactcttat

SEQ ID NO: 46154 - DNA, 22 bp, Artificial Sequence
  chemically synthesized
actcttatttctcatcagactc

SEQ ID NO: 46155 - DNA, 22 bp, Artificial Sequence
  chemically synthesized
ttatttctcatcagactccgaa

SEQ ID NO: 46156 - DNA, 22 bp, Artificial Sequence
  chemically synthesized
atttctcatcagactccgaaat

SEQ ID NO: 46157 - DNA, 22 bp, Artificial Sequence
  chemically synthesized
tttctcatcagactccgaaatc

SEQ ID NO: 46158 - DNA, 22 bp, Artificial Sequence
  chemically synthesized
ctcatcagactccgaaatcaca

SEQ ID NO: 46159 - DNA, 22 bp, Artificial Sequence
  chemically synthesized
tcatcagactccgaaatcacag

SEQ ID NO: 46160 - DNA, 22 bp, Artificial Sequence
  chemically synthesized
atcagactccgaaatcacaggc

SEQ ID NO: 46161 - DNA, 22 bp, Artificial Sequence
  chemically synthesized
cgaaatcacaggcttctggtct

SEQ ID NO: 46162 - DNA, 22 bp, Artificial Sequence
  chemically synthesized
ctggtctaaagattcaagctga

SEQ ID NO: 46163 - DNA, 22 bp, Artificial Sequence
  chemically synthesized
tggtctaaagattcaagctgag

SEQ ID NO: 46164 - DNA, 22 bp, Artificial Sequence
  chemically synthesized
gtctaaagattcaagctgagaa

SEQ ID NO: 46165 - DNA, 22 bp, Artificial Sequence
  chemically synthesized
aagattcaagctgagaaacaag

SEQ ID NO: 46166 - DNA, 22 bp, Artificial Sequence
  chemically synthesized
aagctgagaaacaagaaagcaa

SEQ ID NO: 46167 - DNA, 22 bp, Artificial Sequence
  chemically synthesized
agaaacaagaaagcaatttgtt

SEQ ID NO: 46168 - DNA, 22 bp, Artificial Sequence
  chemically synthesized
gtttgattcaggcccttgcaaa

SEQ ID NO: 46169 - DNA, 22 bp, Artificial Sequence
  chemically synthesized
tttgattcaggcccttgcaaat

SEQ ID NO: 46170 - DNA, 22 bp, Artificial Sequence
  chemically synthesized
gattcaggcccttgcaaattac

SEQ ID NO: 46171 - DNA, 22 bp, Artificial Sequence
  chemically synthesized
attcaggcccttgcaaattacc

SEQ ID NO: 46172 - DNA, 22 bp, Artificial Sequence
  chemically synthesized
aggcccttgcaaattacccccc

SEQ ID NO: 46173 - DNA, 22 bp, Artificial Sequence
  chemically synthesized
gcaaattaccccccaataattt

SEQ ID NO: 46174 - DNA, 22 bp, Artificial Sequence
  chemically synthesized
caaattaccccccaataattta

SEQ ID NO: 46175 - DNA, 22 bp, Artificial Sequence
  chemically synthesized
ccccccaataatttacttggtc

SEQ ID NO: 46176 - DNA, 22 bp, Artificial Sequence
  chemically synthesized
acttggtctcagctttggctgg

SEQ ID NO: 46177 - DNA, 22 bp, Artificial Sequence
  chemically synthesized
cttggtctcagctttggctggc

SEQ ID NO: 46178 - DNA, 22 bp, Artificial Sequence
  chemically synthesized
ggtctcagctttggctggcttg

SEQ ID NO: 46179 - DNA, 22 bp, Artificial Sequence
  chemically synthesized
gtctcagctttggctggcttgg

SEQ ID NO: 46180 - DNA, 22 bp, Artificial Sequence
  chemically synthesized
agctttggctggcttggatgtt

SEQ ID NO: 46181 - DNA, 22 bp, Artificial Sequence
  chemically synthesized
tggctggcttggatgttatgag

SEQ ID NO: 46182 - DNA, 22 bp, Artificial Sequence
  chemically synthesized
ggctggcttggatgttatgagg

SEQ ID NO: 46183 - DNA, 22 bp, Artificial Sequence
  chemically synthesized
gctggcttggatgttatgagga

SEQ ID NO: 46184 - DNA, 22 bp, Artificial Sequence
  chemically synthesized
gcttggatgttatgaggattcc

SEQ ID NO: 46185 - DNA, 22 bp, Artificial Sequence
  chemically synthesized
ggatgttatgaggattccaaga

SEQ ID NO: 46186 - DNA, 22 bp, Artificial Sequence
  chemically synthesized
gatgttatgaggattccaagaa

SEQ ID NO: 46187 - DNA, 22 bp, Artificial Sequence
  chemically synthesized
tgaggattccaagaattttttt

SEQ ID NO: 46188 - DNA, 22 bp, Artificial Sequence
  chemically synthesized
caagaatttttttacttttcca

SEQ ID NO: 46189 - DNA, 22 bp, Artificial Sequence
  chemically synthesized
ttttacttttccattagagggc

SEQ ID NO: 46190 - DNA, 22 bp, Artificial Sequence
  chemically synthesized
tttacttttccattagagggct

SEQ ID NO: 46191 - DNA, 22 bp, Artificial Sequence
  chemically synthesized
ttacttttccattagagggctc

SEQ ID NO: 46192 - DNA, 22 bp, Artificial Sequence
  chemically synthesized
tacttttccattagagggctct

SEQ ID NO: 46193 - DNA, 22 bp, Artificial Sequence
  chemically synthesized
acttttccattagagggctctg

SEQ ID NO: 46194 - DNA, 22 bp, Artificial Sequence
  chemically synthesized
cttttccattagagggctctgc

SEQ ID NO: 46195 - DNA, 22 bp, Artificial Sequence
  chemically synthesized
ttccattagagggctctgcact

SEQ ID NO: 46196 - DNA, 22 bp, Artificial Sequence
  chemically synthesized
tccattagagggctctgcactc

SEQ ID NO: 46197 - DNA, 22 bp, Artificial Sequence
  chemically synthesized
ccattagagggctctgcactct

SEQ ID NO: 46198 - DNA, 22 bp, Artificial Sequence
  chemically synthesized
cattagagggctctgcactctc

SEQ ID NO: 46199 - DNA, 22 bp, Artificial Sequence
  chemically synthesized
gagggctctgcactctcctttc

SEQ ID NO: 46200 - DNA, 22 bp, Artificial Sequence
  chemically synthesized
tgcactctcctttcaaggaaaa

SEQ ID NO: 46201 - DNA, 22 bp, Artificial Sequence
  chemically synthesized
cactctcctttcaaggaaaaag

SEQ ID NO: 46202 - DNA, 22 bp, Artificial Sequence
  chemically synthesized
tcctttcaaggaaaaaggctct

SEQ ID NO: 46203 - DNA, 22 bp, Artificial Sequence
  chemically synthesized
ctttcaaggaaaaaggctctat

SEQ ID NO: 46204 - DNA, 22 bp, Artificial Sequence
  chemically synthesized
tcaaggaaaaaggctctatgtg

SEQ ID NO: 46205 - DNA, 22 bp, Artificial Sequence
  chemically synthesized
caaggaaaaaggctctatgtgc

SEQ ID NO: 46206 - DNA, 22 bp, Artificial Sequence
  chemically synthesized
aaggaaaaaggctctatgtgcc

SEQ ID NO: 46207 - DNA, 22 bp, Artificial Sequence
  chemically synthesized
tatgtgccagcccacttctttc

SEQ ID NO: 46208 - DNA, 22 bp, Artificial Sequence
  chemically synthesized
tgtgccagcccacttctttcca

SEQ ID NO: 46209 - DNA, 22 bp, Artificial Sequence
  chemically synthesized
ctttccagaaatggggaaaggg

SEQ ID NO: 46210 - DNA, 22 bp, Artificial Sequence
  chemically synthesized
tttccagaaatggggaaaggga

SEQ ID NO: 46211 - DNA, 22 bp, Artificial Sequence
  chemically synthesized
tccagaaatggggaaagggagg

SEQ ID NO: 46212 - DNA, 22 bp, Artificial Sequence
  chemically synthesized
ccagaaatggggaaagggagga

SEQ ID NO: 46213 - DNA, 22 bp, Artificial Sequence
  chemically synthesized
cagaaatggggaaagggaggag

SEQ ID NO: 46214 - DNA, 22 bp, Artificial Sequence
  chemically synthesized
tggaaaagaggacaacggattt

SEQ ID NO: 46215 - DNA, 22 bp, Artificial Sequence
  chemically synthesized
ccggaagaaattccaagccagg

SEQ ID NO: 46216 - DNA, 22 bp, Artificial Sequence
  chemically synthesized
cggaagaaattccaagccaggg

SEQ ID NO: 46217 - DNA, 22 bp, Artificial Sequence
  chemically synthesized
caagccaggggctaaccgtgga

SEQ ID NO: 46218 - DNA, 22 bp, Artificial Sequence
  chemically synthesized
accgtggacctgagcacagcag

SEQ ID NO: 46219 - DNA, 22 bp, Artificial Sequence
  chemically synthesized
agcacagcagagccacacggac

SEQ ID NO: 46220 - DNA, 22 bp, Artificial Sequence
  chemically synthesized
agaaaacggttctgtggaagca

SEQ ID NO: 46221 - DNA, 22 bp, Artificial Sequence
  chemically synthesized
tgtggaagcacaagacacgtgg

SEQ ID NO: 46222 - DNA, 22 bp, Artificial Sequence
  chemically synthesized
tggaagcacaagacacgtggca

SEQ ID NO: 46223 - DNA, 22 bp, Artificial Sequence
  chemically synthesized
agaagtccaggaaaagatgcag

SEQ ID NO: 46224 - DNA, 22 bp, Artificial Sequence
  chemically synthesized
ccaacccattcctaaatatcac

SEQ ID NO: 46225 - DNA, 22 bp, Artificial Sequence
  chemically synthesized
caacccattcctaaatatcacc

SEQ ID NO: 46226 - DNA, 22 bp, Artificial Sequence
  chemically synthesized
ctaaatatcaccaattaacagc

SEQ ID NO: 46227 - DNA, 22 bp, Artificial Sequence
  chemically synthesized
aatatcaccaattaacagcagc

SEQ ID NO: 46228 - DNA, 22 bp, Artificial Sequence
  chemically synthesized
acagcagctcgatggtctacct

SEQ ID NO: 46229 - DNA, 22 bp, Artificial Sequence
  chemically synthesized
gatggtctacctgagacctgag

SEQ ID NO: 46230 - DNA, 22 bp, Artificial Sequence
  chemically synthesized
cctgagacctgagaaaacaaac

SEQ ID NO: 46231 - DNA, 22 bp, Artificial Sequence
  chemically synthesized
agacctgagaaaacaaacgaag

SEQ ID NO: 46232 - DNA, 22 bp, Artificial Sequence
  chemically synthesized
agaaaacaaacgaagggaaaga

SEQ ID NO: 46233 - DNA, 22 bp, Artificial Sequence
  chemically synthesized
tctggatcaaaagatcaagttg

SEQ ID NO: 46234 - DNA, 22 bp, Artificial Sequence
  chemically synthesized
ctggatcaaaagatcaagttgt

SEQ ID NO: 46235 - DNA, 22 bp, Artificial Sequence
  chemically synthesized
tggatcaaaagatcaagttgtc

SEQ ID NO: 46236 - DNA, 22 bp, Artificial Sequence
  chemically synthesized
gatcaaaagatcaagttgtctt

SEQ ID NO: 46237 - DNA, 22 bp, Artificial Sequence
  chemically synthesized
tctttggtagctaaagaacaac

SEQ ID NO: 46238 - DNA, 22 bp, Artificial Sequence
  chemically synthesized
tggtagctaaagaacaacagag

SEQ ID NO: 46239 - DNA, 22 bp, Artificial Sequence
  chemically synthesized
ggtagctaaagaacaacagaga

SEQ ID NO: 46240 - DNA, 22 bp, Artificial Sequence
  chemically synthesized
gtagctaaagaacaacagagaa

SEQ ID NO: 46241 - DNA, 22 bp, Artificial Sequence
  chemically synthesized
aagaacaacagagaaggaaaaa

SEQ ID NO: 46242 - DNA, 22 bp, Artificial Sequence
  chemically synthesized
ggaggaggagaaaaacacctgg

SEQ ID NO: 46243 - DNA, 22 bp, Artificial Sequence
  chemically synthesized
gccctccccaaagaactcgact

SEQ ID NO: 46244 - DNA, 22 bp, Artificial Sequence
  chemically synthesized
cccaaagaactcgacttaaatc

SEQ ID NO: 46245 - DNA, 22 bp, Artificial Sequence
  chemically synthesized
gacttaaatcatctcagctata

SEQ ID NO: 46246 - DNA, 22 bp, Artificial Sequence
  chemically synthesized
aaatcatctcagctataggcag

SEQ ID NO: 46247 - DNA, 22 bp, Artificial Sequence
  chemically synthesized
aatcatctcagctataggcagt

SEQ ID NO: 46248 - DNA, 22 bp, Artificial Sequence
  chemically synthesized
agctataggcagtcaactgggg

SEQ ID NO: 46249 - DNA, 22 bp, Artificial Sequence
  chemically synthesized
taggcagtcaactggggctctc

SEQ ID NO: 46250 - DNA, 22 bp, Artificial Sequence
  chemically synthesized
gggctctccgaacagccacaat

SEQ ID NO: 46251 - DNA, 22 bp, Artificial Sequence
  chemically synthesized
tccgaacagccacaatcggggg

SEQ ID NO: 46252 - DNA, 22 bp, Artificial Sequence
  chemically synthesized
cgaacagccacaatcggggggc

SEQ ID NO: 46253 - DNA, 22 bp, Artificial Sequence
  chemically synthesized
ctctctttcccctcacgatctt

SEQ ID NO: 46254 - DNA, 22 bp, Artificial Sequence
  chemically synthesized
tctttcccctcacgatcttcct

SEQ ID NO: 46255 - DNA, 22 bp, Artificial Sequence
  chemically synthesized
tttcccctcacgatcttcctga

SEQ ID NO: 46256 - DNA, 22 bp, Artificial Sequence
  chemically synthesized
tcccctcacgatcttcctgaac

SEQ ID NO: 46257 - DNA, 22 bp, Artificial Sequence
  chemically synthesized
cccctcacgatcttcctgaaca

SEQ ID NO: 46258 - DNA, 22 bp, Artificial Sequence
  chemically synthesized
ccctcacgatcttcctgaacag

SEQ ID NO: 46259 - DNA, 22 bp, Artificial Sequence
  chemically synthesized
acgatcttcctgaacagggcag

SEQ ID NO: 46260 - DNA, 22 bp, Artificial Sequence
  chemically synthesized
cctgaacagggcagtagtctag

SEQ ID NO: 46261 - DNA, 22 bp, Artificial Sequence
  chemically synthesized
ctgaacagggcagtagtctagc

SEQ ID NO: 46262 - DNA, 22 bp, Artificial Sequence
  chemically synthesized
aacagggcagtagtctagcatc

SEQ ID NO: 46263 - DNA, 22 bp, Artificial Sequence
  chemically synthesized
gcatccactgaagtcctgaagt

SEQ ID NO: 46264 - DNA, 22 bp, Artificial Sequence
  chemically synthesized
aagtcctgaagtggtgaaggag

SEQ ID NO: 46265 - DNA, 22 bp, Artificial Sequence
  chemically synthesized
aagtggtgaaggagccccagac

SEQ ID NO: 46266 - DNA, 22 bp, Artificial Sequence
  chemically synthesized
tgagcacctccacagcctttct

SEQ ID NO: 46267 - DNA, 22 bp, Artificial Sequence
  chemically synthesized
agcacctccacagcctttctgg

SEQ ID NO: 46268 - DNA, 22 bp, Artificial Sequence
  chemically synthesized
cacagcctttctggcccatccc

SEQ ID NO: 46269 - DNA, 22 bp, Artificial Sequence
  chemically synthesized
tctggcccatcccaataaacag

SEQ ID NO: 46270 - DNA, 22 bp, Artificial Sequence
  chemically synthesized
ctggcccatcccaataaacagc

SEQ ID NO: 46271 - DNA, 22 bp, Artificial Sequence
  chemically synthesized
tggcccatcccaataaacagca

SEQ ID NO: 46272 - DNA, 22 bp, Artificial Sequence
  chemically synthesized
gcccatcccaataaacagcaat

SEQ ID NO: 46273 - DNA, 22 bp, Artificial Sequence
  chemically synthesized
tattctcccagtcaccgagcca

SEQ ID NO: 46274 - DNA, 22 bp, Artificial Sequence
  chemically synthesized
ttctcccagtcaccgagccaca

SEQ ID NO: 46275 - DNA, 22 bp, Artificial Sequence
  chemically synthesized
tcccagtcaccgagccacacat

SEQ ID NO: 46276 - DNA, 22 bp, Artificial Sequence
  chemically synthesized
ccagtcaccgagccacacattt

SEQ ID NO: 46277 - DNA, 22 bp, Artificial Sequence
  chemically synthesized
tggggtccatcttgactcctcc

SEQ ID NO: 46278 - DNA, 22 bp, Artificial Sequence
  chemically synthesized
ggggtccatcttgactcctccc

SEQ ID NO: 46279 - DNA, 22 bp, Artificial Sequence
  chemically synthesized
gggtccatcttgactcctccct

SEQ ID NO: 46280 - DNA, 22 bp, Artificial Sequence
  chemically synthesized
gactcctcccttcctttcatac

SEQ ID NO: 46281 - DNA, 22 bp, Artificial Sequence
  chemically synthesized
actcctcccttcctttcataca

SEQ ID NO: 46282 - DNA, 22 bp, Artificial Sequence
  chemically synthesized
ctcccttcctttcatacaaccc

SEQ ID NO: 46283 - DNA, 22 bp, Artificial Sequence
  chemically synthesized
ccttcctttcatacaacccatc

SEQ ID NO: 46284 - DNA, 22 bp, Artificial Sequence
  chemically synthesized
cctttcatacaacccatcccac

SEQ ID NO: 46285 - DNA, 22 bp, Artificial Sequence
  chemically synthesized
ctttcatacaacccatcccacc

SEQ ID NO: 46286 - DNA, 22 bp, Artificial Sequence
  chemically synthesized
tcatacaacccatcccaccagt

SEQ ID NO: 46287 - DNA, 22 bp, Artificial Sequence
  chemically synthesized
catacaacccatcccaccagtc

SEQ ID NO: 46288 - DNA, 22 bp, Artificial Sequence
  chemically synthesized
atacaacccatcccaccagtca

SEQ ID NO: 46289 - DNA, 22 bp, Artificial Sequence
  chemically synthesized
ccggttttcccttcgaagtatg

SEQ ID NO: 46290 - DNA, 22 bp, Artificial Sequence
  chemically synthesized
tcccttcgaagtatgtccagaa

SEQ ID NO: 46291 - DNA, 22 bp, Artificial Sequence
  chemically synthesized
cccttcgaagtatgtccagaat

SEQ ID NO: 46292 - DNA, 22 bp, Artificial Sequence
  chemically synthesized
ccttcgaagtatgtccagaatc

SEQ ID NO: 46293 - DNA, 22 bp, Artificial Sequence
  chemically synthesized
cgaagtatgtccagaatccagc

SEQ ID NO: 46294 - DNA, 22 bp, Artificial Sequence
  chemically synthesized
gaagtatgtccagaatccagcc

SEQ ID NO: 46295 - DNA, 22 bp, Artificial Sequence
  chemically synthesized
ctcacgtccccaccaccctggt

SEQ ID NO: 46296 - DNA, 22 bp, Artificial Sequence
  chemically synthesized
tcacgtccccaccaccctggtc

SEQ ID NO: 46297 - DNA, 22 bp, Artificial Sequence
  chemically synthesized
acgtccccaccaccctggtcca

SEQ ID NO: 46298 - DNA, 22 bp, Artificial Sequence
  chemically synthesized
gtccacgccaccatcacttgcc

SEQ ID NO: 46299 - DNA, 22 bp, Artificial Sequence
  chemically synthesized
gcctaaaatttgccttctgact

SEQ ID NO: 46300 - DNA, 22 bp, Artificial Sequence
  chemically synthesized
cctaaaatttgccttctgactg

SEQ ID NO: 46301 - DNA, 22 bp, Artificial Sequence
  chemically synthesized
aaatttgccttctgactgcttc

SEQ ID NO: 46302 - DNA, 22 bp, Artificial Sequence
  chemically synthesized
gccttctgactgcttctgcctc

SEQ ID NO: 46303 - DNA, 22 bp, Artificial Sequence
  chemically synthesized
ccttctgactgcttctgcctca

SEQ ID NO: 46304 - DNA, 22 bp, Artificial Sequence
  chemically synthesized
ctgactgcttctgcctcacttt

SEQ ID NO: 46305 - DNA, 22 bp, Artificial Sequence
  chemically synthesized
tgactgcttctgcctcactttc

SEQ ID NO: 46306 - DNA, 22 bp, Artificial Sequence
  chemically synthesized
actgcttctgcctcactttccc

SEQ ID NO: 46307 - DNA, 22 bp, Artificial Sequence
  chemically synthesized
cttctgcctcactttcccatgc

SEQ ID NO: 46308 - DNA, 22 bp, Artificial Sequence
  chemically synthesized
ctgcctcactttcccatgcttg

SEQ ID NO: 46309 - DNA, 22 bp, Artificial Sequence
  chemically synthesized
tgcctcactttcccatgcttga

SEQ ID NO: 46310 - DNA, 22 bp, Artificial Sequence
  chemically synthesized
cctcactttcccatgcttgagt

SEQ ID NO: 46311 - DNA, 22 bp, Artificial Sequence
  chemically synthesized
actttcccatgcttgagtctca

SEQ ID NO: 46312 - DNA, 22 bp, Artificial Sequence
  chemically synthesized
tcccatgcttgagtctcaaaat

SEQ ID NO: 46313 - DNA, 22 bp, Artificial Sequence
  chemically synthesized
cccatgcttgagtctcaaaatg

SEQ ID NO: 46314 - DNA, 22 bp, Artificial Sequence
  chemically synthesized
ccatgcttgagtctcaaaatgc

SEQ ID NO: 46315 - DNA, 22 bp, Artificial Sequence
  chemically synthesized
gagtctcaaaatgcggcccaag

SEQ ID NO: 46316 - DNA, 22 bp, Artificial Sequence
  chemically synthesized
agtctcaaaatgcggcccaaga

SEQ ID NO: 46317 - DNA, 22 bp, Artificial Sequence
  chemically synthesized
aaaatgcggcccaagagactct

SEQ ID NO: 46318 - DNA, 22 bp, Artificial Sequence
  chemically synthesized
tctggaagcgcaagtcatatga

SEQ ID NO: 46319 - DNA, 22 bp, Artificial Sequence
  chemically synthesized
tggaagcgcaagtcatatgaca

SEQ ID NO: 46320 - DNA, 22 bp, Artificial Sequence
  chemically synthesized
gaagcgcaagtcatatgacatc

SEQ ID NO: 46321 - DNA, 22 bp, Artificial Sequence
  chemically synthesized
ctccagtggcttccatctccct

SEQ ID NO: 46322 - DNA, 22 bp, Artificial Sequence
  chemically synthesized
cagtggcttccatctcccttgg

SEQ ID NO: 46323 - DNA, 22 bp, Artificial Sequence
  chemically synthesized
ccatctcccttggagtcagagc

SEQ ID NO: 46324 - DNA, 22 bp, Artificial Sequence
  chemically synthesized
catctcccttggagtcagagcc

SEQ ID NO: 46325 - DNA, 22 bp, Artificial Sequence
  chemically synthesized
ccttggagtcagagccaaaaat

SEQ ID NO: 46326 - DNA, 22 bp, Artificial Sequence
  chemically synthesized
ggagtcagagccaaaaatccct

SEQ ID NO: 46327 - DNA, 22 bp, Artificial Sequence
  chemically synthesized
gagtcagagccaaaaatccctg

SEQ ID NO: 46328 - DNA, 22 bp, Artificial Sequence
  chemically synthesized
ctctacgtccttcaaggagcca

SEQ ID NO: 46329 - DNA, 22 bp, Artificial Sequence
  chemically synthesized
tacgtccttcaaggagccagct

SEQ ID NO: 46330 - DNA, 22 bp, Artificial Sequence
  chemically synthesized
cgtccttcaaggagccagctgg

SEQ ID NO: 46331 - DNA, 22 bp, Artificial Sequence
  chemically synthesized
caaggagccagctggtctcctc

SEQ ID NO: 46332 - DNA, 22 bp, Artificial Sequence
  chemically synthesized
aaggagccagctggtctcctct

SEQ ID NO: 46333 - DNA, 22 bp, Artificial Sequence
  chemically synthesized
gtctcctctcctcctcctcctg

SEQ ID NO: 46334 - DNA, 22 bp, Artificial Sequence
  chemically synthesized
ctctcctcctcctcctgcactc

SEQ ID NO: 46335 - DNA, 22 bp, Artificial Sequence
  chemically synthesized
tcctcctcctcctgcactcttt

SEQ ID NO: 46336 - DNA, 22 bp, Artificial Sequence
  chemically synthesized
ctcctcctcctgcactctttcc

SEQ ID NO: 46337 - DNA, 22 bp, Artificial Sequence
  chemically synthesized
ctcctcctgcactctttccact

SEQ ID NO: 46338 - DNA, 22 bp, Artificial Sequence
  chemically synthesized
ctcctgcactctttccactctg

SEQ ID NO: 46339 - DNA, 22 bp, Artificial Sequence
  chemically synthesized
ctgcactctttccactctgacc

SEQ ID NO: 46340 - DNA, 22 bp, Artificial Sequence
  chemically synthesized
cactctttccactctgacctca

SEQ ID NO: 46341 - DNA, 22 bp, Artificial Sequence
  chemically synthesized
tttccactctgacctcagggcc

SEQ ID NO: 46342 - DNA, 22 bp, Artificial Sequence
  chemically synthesized
tccactctgacctcagggcccc

SEQ ID NO: 46343 - DNA, 22 bp, Artificial Sequence
  chemically synthesized
ccactctgacctcagggcccct

SEQ ID NO: 46344 - DNA, 22 bp, Artificial Sequence
  chemically synthesized
cactctgacctcagggcccctt

SEQ ID NO: 46345 - DNA, 22 bp, Artificial Sequence
  chemically synthesized
tgacctcagggccccttgctcc

SEQ ID NO: 46346 - DNA, 22 bp, Artificial Sequence
  chemically synthesized
acctcagggccccttgctcctc

SEQ ID NO: 46347 - DNA, 22 bp, Artificial Sequence
  chemically synthesized
agggccccttgctcctcctcca

SEQ ID NO: 46348 - DNA, 22 bp, Artificial Sequence
  chemically synthesized
gctcctcctccagtagccaggc

SEQ ID NO: 46349 - DNA, 22 bp, Artificial Sequence
  chemically synthesized
ctcctcctccagtagccaggcg

SEQ ID NO: 46350 - DNA, 22 bp, Artificial Sequence
  chemically synthesized
ctcctccagtagccaggcgtat

SEQ ID NO: 46351 - DNA, 22 bp, Artificial Sequence
  chemically synthesized
ctccagtagccaggcgtattac

SEQ ID NO: 46352 - DNA, 22 bp, Artificial Sequence
  chemically synthesized
cagtagccaggcgtattacaca

SEQ ID NO: 46353 - DNA, 22 bp, Artificial Sequence
  chemically synthesized
cacacaaggtctctgctctcta

SEQ ID NO: 46354 - DNA, 22 bp, Artificial Sequence
  chemically synthesized
tgctctctacacactcttcctg

SEQ ID NO: 46355 - DNA, 22 bp, Artificial Sequence
  chemically synthesized
ctctctacacactcttcctgga

SEQ ID NO: 46356 - DNA, 22 bp, Artificial Sequence
  chemically synthesized
tctacacactcttcctggaacc

SEQ ID NO: 46357 - DNA, 22 bp, Artificial Sequence
  chemically synthesized
tacacactcttcctggaaccat

SEQ ID NO: 46358 - DNA, 22 bp, Artificial Sequence
  chemically synthesized
cacactcttcctggaaccatct

SEQ ID NO: 46359 - DNA, 22 bp, Artificial Sequence
  chemically synthesized
ttcctggaaccatcttctcaaa

SEQ ID NO: 46360 - DNA, 22 bp, Artificial Sequence
  chemically synthesized
cctggaaccatcttctcaaaat

SEQ ID NO: 46361 - DNA, 22 bp, Artificial Sequence
  chemically synthesized
ctggaaccatcttctcaaaatt

SEQ ID NO: 46362 - DNA, 22 bp, Artificial Sequence
  chemically synthesized
gaaccatcttctcaaaattctc

SEQ ID NO: 46363 - DNA, 22 bp, Artificial Sequence
  chemically synthesized
ctcaaaattctcatggccaact

SEQ ID NO: 46364 - DNA, 22 bp, Artificial Sequence
  chemically synthesized
tcaaaattctcatggccaactt

SEQ ID NO: 46365 - DNA, 22 bp, Artificial Sequence
  chemically synthesized
aaaattctcatggccaacttcc

SEQ ID NO: 46366 - DNA, 22 bp, Artificial Sequence
  chemically synthesized
tcatggccaacttcctcacctc

SEQ ID NO: 46367 - DNA, 22 bp, Artificial Sequence
  chemically synthesized
atggccaacttcctcacctctt

SEQ ID NO: 46368 - DNA, 22 bp, Artificial Sequence
  chemically synthesized
cctcacctctttggagcctttg

SEQ ID NO: 46369 - DNA, 22 bp, Artificial Sequence
  chemically synthesized
ctcacctctttggagcctttgc

SEQ ID NO: 46370 - DNA, 22 bp, Artificial Sequence
  chemically synthesized
acctctttggagcctttgcttc

SEQ ID NO: 46371 - DNA, 22 bp, Artificial Sequence
  chemically synthesized
tttggagcctttgcttctcatt

SEQ ID NO: 46372 - DNA, 22 bp, Artificial Sequence
  chemically synthesized
tggagcctttgcttctcattgg

SEQ ID NO: 46373 - DNA, 22 bp, Artificial Sequence
  chemically synthesized
ggagcctttgcttctcattggg

SEQ ID NO: 46374 - DNA, 22 bp, Artificial Sequence
  chemically synthesized
gagcctttgcttctcattgggc

SEQ ID NO: 46375 - DNA, 22 bp, Artificial Sequence
  chemically synthesized
tgcttctcattgggccttccct

SEQ ID NO: 46376 - DNA, 22 bp, Artificial Sequence
  chemically synthesized
gcttctcattgggccttcccta

SEQ ID NO: 46377 - DNA, 22 bp, Artificial Sequence
  chemically synthesized
cttctcattgggccttccctaa

SEQ ID NO: 46378 - DNA, 22 bp, Artificial Sequence
  chemically synthesized
ctcattgggccttccctaatta

SEQ ID NO: 46379 - DNA, 22 bp, Artificial Sequence
  chemically synthesized
tcattgggccttccctaattat

SEQ ID NO: 46380 - DNA, 22 bp, Artificial Sequence
  chemically synthesized
attgggccttccctaattatcc

SEQ ID NO: 46381 - DNA, 22 bp, Artificial Sequence
  chemically synthesized
ggccttccctaattatcctatt

SEQ ID NO: 46382 - DNA, 22 bp, Artificial Sequence
  chemically synthesized
ccctaattatcctatttaaaag

SEQ ID NO: 46383 - DNA, 22 bp, Artificial Sequence
  chemically synthesized
cctaattatcctatttaaaagc

SEQ ID NO: 46384 - DNA, 22 bp, Artificial Sequence
  chemically synthesized
attatcctatttaaaagcctgg

SEQ ID NO: 46385 - DNA, 22 bp, Artificial Sequence
  chemically synthesized
tcctatttaaaagcctggtcac

SEQ ID NO: 46386 - DNA, 22 bp, Artificial Sequence
  chemically synthesized
tttaaaagcctggtcaccatgc

SEQ ID NO: 46387 - DNA, 22 bp, Artificial Sequence
  chemically synthesized
aaaagcctggtcaccatgcacc

SEQ ID NO: 46388 - DNA, 22 bp, Artificial Sequence
  chemically synthesized
aaagcctggtcaccatgcaccc

SEQ ID NO: 46389 - DNA, 22 bp, Artificial Sequence
  chemically synthesized
gtcaccatgcaccccttacccc

SEQ ID NO: 46390 - DNA, 22 bp, Artificial Sequence
  chemically synthesized
acccctcttccccaccttattt

SEQ ID NO: 46391 - DNA, 22 bp, Artificial Sequence
  chemically synthesized
cccctcttccccaccttatttt

SEQ ID NO: 46392 - DNA, 22 bp, Artificial Sequence
  chemically synthesized
ttccccaccttattttcgtgca

SEQ ID NO: 46393 - DNA, 22 bp, Artificial Sequence
  chemically synthesized
ccccaccttattttcgtgcagg

SEQ ID NO: 46394 - DNA, 22 bp, Artificial Sequence
  chemically synthesized
cccaccttattttcgtgcaggc

SEQ ID NO: 46395 - DNA, 22 bp, Artificial Sequence
  chemically synthesized
attttcgtgcaggcagtttgat

SEQ ID NO: 46396 - DNA, 22 bp, Artificial Sequence
  chemically synthesized
ttttcgtgcaggcagtttgatc

SEQ ID NO: 46397 - DNA, 22 bp, Artificial Sequence
  chemically synthesized
tcgtgcaggcagtttgatcttc

SEQ ID NO: 46398 - DNA, 22 bp, Artificial Sequence
  chemically synthesized
cgtgcaggcagtttgatcttct

SEQ ID NO: 46399 - DNA, 22 bp, Artificial Sequence
  chemically synthesized
gtgcaggcagtttgatcttctc

SEQ ID NO: 46400 - DNA, 22 bp, Artificial Sequence
  chemically synthesized
gatcttctcttgccatactata

SEQ ID NO: 46401 - DNA, 22 bp, Artificial Sequence
  chemically synthesized
atcttctcttgccatactatat

SEQ ID NO: 46402 - DNA, 22 bp, Artificial Sequence
  chemically synthesized
ctcttgccatactatataattc

SEQ ID NO: 46403 - DNA, 22 bp, Artificial Sequence
  chemically synthesized
tcttgccatactatataattca

SEQ ID NO: 46404 - DNA, 22 bp, Artificial Sequence
  chemically synthesized
ttgccatactatataattcaca

SEQ ID NO: 46405 - DNA, 22 bp, Artificial Sequence
  chemically synthesized
gccatactatataattcacata

SEQ ID NO: 46406 - DNA, 22 bp, Artificial Sequence
  chemically synthesized
ccatactatataattcacatat

SEQ ID NO: 46407 - DNA, 22 bp, Artificial Sequence
  chemically synthesized
tataattcacatatttattggt

SEQ ID NO: 46408 - DNA, 22 bp, Artificial Sequence
  chemically synthesized
acatatttattggtgcatcttc

SEQ ID NO: 46409 - DNA, 22 bp, Artificial Sequence
  chemically synthesized
attggtgcatcttctgtctctc

SEQ ID NO: 46410 - DNA, 22 bp, Artificial Sequence
  chemically synthesized
ttggtgcatcttctgtctctcc

SEQ ID NO: 46411 - DNA, 22 bp, Artificial Sequence
  chemically synthesized
gtgcatcttctgtctctcccca

SEQ ID NO: 46412 - DNA, 22 bp, Artificial Sequence
  chemically synthesized
ctgtctctccccagctagaaag

SEQ ID NO: 46413 - DNA, 22 bp, Artificial Sequence
  chemically synthesized
tgtctctccccagctagaaagg

SEQ ID NO: 46414 - DNA, 22 bp, Artificial Sequence
  chemically synthesized
tctctccccagctagaaagggg

SEQ ID NO: 46415 - DNA, 22 bp, Artificial Sequence
  chemically synthesized
tccccagctagaaagggggtgc

SEQ ID NO: 46416 - DNA, 22 bp, Artificial Sequence
  chemically synthesized
cccagctagaaagggggtgcca

SEQ ID NO: 46417 - DNA, 22 bp, Artificial Sequence
  chemically synthesized
gaaagggggtgccacaagagca

SEQ ID NO: 46418 - DNA, 22 bp, Artificial Sequence
  chemically synthesized
ttaaggctttctatgcccaaca

SEQ ID NO: 46419 - DNA, 22 bp, Artificial Sequence
  chemically synthesized
taaggctttctatgcccaacac

SEQ ID NO: 46420 - DNA, 22 bp, Artificial Sequence
  chemically synthesized
aaggctttctatgcccaacacc

SEQ ID NO: 46421 - DNA, 22 bp, Artificial Sequence
  chemically synthesized
aggctttctatgcccaacacca

SEQ ID NO: 46422 - DNA, 22 bp, Artificial Sequence
  chemically synthesized
tctatgcccaacaccaagaacc

SEQ ID NO: 46423 - DNA, 22 bp, Artificial Sequence
  chemically synthesized
ctatgcccaacaccaagaaccg

SEQ ID NO: 46424 - DNA, 22 bp, Artificial Sequence
  chemically synthesized
tatgcccaacaccaagaaccgt

SEQ ID NO: 46425 - DNA, 22 bp, Artificial Sequence
  chemically synthesized
tgcccaacaccaagaaccgttc

SEQ ID NO: 46426 - DNA, 22 bp, Artificial Sequence
  chemically synthesized
ccagcatgtggcaggtgttcaa

SEQ ID NO: 46427 - DNA, 22 bp, Artificial Sequence
  chemically synthesized
aaaatatttgttgaaaaatgaa

SEQ ID NO: 46428 - DNA, 22 bp, Artificial Sequence
  chemically synthesized
gttgaaaaatgaatgagtgaac

SEQ ID NO: 46429 - DNA, 22 bp, Artificial Sequence
  chemically synthesized
ttgaaaaatgaatgagtgaacc

SEQ ID NO: 46430 - DNA, 22 bp, Artificial Sequence
  chemically synthesized
aaaaatgaatgagtgaaccttc

SEQ ID NO: 46431 - DNA, 22 bp, Artificial Sequence
  chemically synthesized
cacaattccaaactgccaggag

SEQ ID NO: 46432 - DNA, 22 bp, Artificial Sequence
  chemically synthesized
acaattccaaactgccaggagg

SEQ ID NO: 46433 - DNA, 22 bp, Artificial Sequence
  chemically synthesized
caaactgccaggaggccactca

SEQ ID NO: 46434 - DNA, 22 bp, Artificial Sequence
  chemically synthesized
ccaggaggccactcaatgccat

SEQ ID NO: 46435 - DNA, 22 bp, Artificial Sequence
  chemically synthesized
aatgccatatctataaaactgt

SEQ ID NO: 46436 - DNA, 22 bp, Artificial Sequence
  chemically synthesized
taaaactgtcaggcagcccaac

SEQ ID NO: 46437 - DNA, 22 bp, Artificial Sequence
  chemically synthesized
tcaggcagcccaacctgggggc

SEQ ID NO: 46438 - DNA, 22 bp, Artificial Sequence
  chemically synthesized
ggggcactttagctttggatct

SEQ ID NO: 46439 - DNA, 22 bp, Artificial Sequence
  chemically synthesized
tagctttggatcttgggtttga

SEQ ID NO: 46440 - DNA, 22 bp, Artificial Sequence
  chemically synthesized
agctttggatcttgggtttgag

SEQ ID NO: 46441 - DNA, 22 bp, Artificial Sequence
  chemically synthesized
gctttggatcttgggtttgagc

SEQ ID NO: 46442 - DNA, 22 bp, Artificial Sequence
  chemically synthesized
tggatcttgggtttgagccaga

SEQ ID NO: 46443 - DNA, 22 bp, Artificial Sequence
  chemically synthesized
ggatcttgggtttgagccagat

SEQ ID NO: 46444 - DNA, 22 bp, Artificial Sequence
  chemically synthesized
gatcttgggtttgagccagatt

SEQ ID NO: 46445 - DNA, 22 bp, Artificial Sequence
  chemically synthesized
gggtttgagccagattccattt

SEQ ID NO: 46446 - DNA, 22 bp, Artificial Sequence
  chemically synthesized
ggtttgagccagattccatttt

SEQ ID NO: 46447 - DNA, 22 bp, Artificial Sequence
  chemically synthesized
gagccagattccattttcccca

SEQ ID NO: 46448 - DNA, 22 bp, Artificial Sequence
  chemically synthesized
agccagattccattttccccac

SEQ ID NO: 46449 - DNA, 22 bp, Artificial Sequence
  chemically synthesized
cattttccccacaggccctgag

SEQ ID NO: 46450 - DNA, 22 bp, Artificial Sequence
  chemically synthesized
tccccacaggccctgagaccca

SEQ ID NO: 46451 - DNA, 22 bp, Artificial Sequence
  chemically synthesized
ccccacaggccctgagacccac

SEQ ID NO: 46452 - DNA, 22 bp, Artificial Sequence
  chemically synthesized
cccacaggccctgagacccaca

SEQ ID NO: 46453 - DNA, 22 bp, Artificial Sequence
  chemically synthesized
agacccacagggaagagctttt

SEQ ID NO: 46454 - DNA, 22 bp, Artificial Sequence
  chemically synthesized
ttgcattataatgtaaatggag

SEQ ID NO: 46455 - DNA, 22 bp, Artificial Sequence
  chemically synthesized
tgcattataatgtaaatggagg

SEQ ID NO: 46456 - DNA, 22 bp, Artificial Sequence
  chemically synthesized
gcattataatgtaaatggaggg

SEQ ID NO: 46457 - DNA, 22 bp, Artificial Sequence
  chemically synthesized
cattataatgtaaatggagggg

SEQ ID NO: 46458 - DNA, 22 bp, Artificial Sequence
  chemically synthesized
taatgtaaatggaggggttgag

SEQ ID NO: 46459 - DNA, 22 bp, Artificial Sequence
  chemically synthesized
agctggtttgggggaacccttg

SEQ ID NO: 46460 - DNA, 22 bp, Artificial Sequence
  chemically synthesized
gtttgggggaacccttgacagg

SEQ ID NO: 46461 - DNA, 22 bp, Artificial Sequence
  chemically synthesized
gggggaacccttgacaggagcc

SEQ ID NO: 46462 - DNA, 22 bp, Artificial Sequence
  chemically synthesized
ggggaacccttgacaggagcca

SEQ ID NO: 46463 - DNA, 22 bp, Artificial Sequence
  chemically synthesized
gacaggagccagttaaaaccaa

SEQ ID NO: 46464 - DNA, 22 bp, Artificial Sequence
  chemically synthesized
acaggagccagttaaaaccaaa

SEQ ID NO: 46465 - DNA, 22 bp, Artificial Sequence
  chemically synthesized
aaaccaaacgaaagtctttcct

SEQ ID NO: 46466 - DNA, 22 bp, Artificial Sequence
  chemically synthesized
tcctaaggcttaggtggagcct

SEQ ID NO: 46467 - DNA, 22 bp, Artificial Sequence
  chemically synthesized
cctaaggcttaggtggagcctc

SEQ ID NO: 46468 - DNA, 22 bp, Artificial Sequence
  chemically synthesized
ctaaggcttaggtggagcctct

SEQ ID NO: 46469 - DNA, 22 bp, Artificial Sequence
  chemically synthesized
aggcttaggtggagcctctaga

SEQ ID NO: 46470 - DNA, 22 bp, Artificial Sequence
  chemically synthesized
aggtggagcctctagaaagagg

SEQ ID NO: 46471 - DNA, 22 bp, Artificial Sequence
  chemically synthesized
ggtggagcctctagaaagaggg

SEQ ID NO: 46472 - DNA, 22 bp, Artificial Sequence
  chemically synthesized
tagaaagaggggctgagagcct

SEQ ID NO: 46473 - DNA, 22 bp, Artificial Sequence
  chemically synthesized
gaaagaggggctgagagcctgg

SEQ ID NO: 46474 - DNA, 22 bp, Artificial Sequence
  chemically synthesized
agagcctggggaagagccaacc

SEQ ID NO: 46475 - DNA, 22 bp, Artificial Sequence
  chemically synthesized
gggaagagccaaccaccagcag

SEQ ID NO: 46476 - DNA, 22 bp, Artificial Sequence
  chemically synthesized
ctcagagttcttcccactgggg

SEQ ID NO: 46477 - DNA, 22 bp, Artificial Sequence
  chemically synthesized
agagttcttcccactggggctg

SEQ ID NO: 46478 - DNA, 22 bp, Artificial Sequence
  chemically synthesized
ttcccactggggctgtgcagcc

SEQ ID NO: 46479 - DNA, 22 bp, Artificial Sequence
  chemically synthesized
cccactggggctgtgcagccaa

SEQ ID NO: 46480 - DNA, 22 bp, Artificial Sequence
  chemically synthesized
ccactggggctgtgcagccaac

SEQ ID NO: 46481 - DNA, 22 bp, Artificial Sequence
  chemically synthesized
gggctgtgcagccaactgcgtt

SEQ ID NO: 46482 - DNA, 22 bp, Artificial Sequence
  chemically synthesized
tgcagccaactgcgtttccagg

SEQ ID NO: 46483 - DNA, 22 bp, Artificial Sequence
  chemically synthesized
cgtttccaggcacactgagatg

SEQ ID NO: 46484 - DNA, 22 bp, Artificial Sequence
  chemically synthesized
ccaggcacactgagatgcccat

SEQ ID NO: 46485 - DNA, 22 bp, Artificial Sequence
  chemically synthesized
caggcacactgagatgcccata

SEQ ID NO: 46486 - DNA, 22 bp, Artificial Sequence
  chemically synthesized
agatgcccatactcatatccaa

SEQ ID NO: 46487 - DNA, 22 bp, Artificial Sequence
  chemically synthesized
atatccaatactgtgcaggggc

SEQ ID NO: 46488 - DNA, 22 bp, Artificial Sequence
  chemically synthesized
tgcaggggcactggccaggcac

SEQ ID NO: 46489 - DNA, 22 bp, Artificial Sequence
  chemically synthesized
gccaggcacaaatcccagctgc

SEQ ID NO: 46490 - DNA, 22 bp, Artificial Sequence
  chemically synthesized
cctccacggcattactctccct

SEQ ID NO: 46491 - DNA, 22 bp, Artificial Sequence
  chemically synthesized
cacggcattactctccctccat

SEQ ID NO: 46492 - DNA, 22 bp, Artificial Sequence
  chemically synthesized
ctctccctccattcttgctttc

SEQ ID NO: 46493 - DNA, 22 bp, Artificial Sequence
  chemically synthesized
tccctccattcttgctttcaga

SEQ ID NO: 46494 - DNA, 22 bp, Artificial Sequence
  chemically synthesized
cctccattcttgctttcagatt

SEQ ID NO: 46495 - DNA, 22 bp, Artificial Sequence
  chemically synthesized
cattcttgctttcagattctcc

SEQ ID NO: 46496 - DNA, 22 bp, Artificial Sequence
  chemically synthesized
ttgctttcagattctccctcct

SEQ ID NO: 46497 - DNA, 22 bp, Artificial Sequence
  chemically synthesized
gctttcagattctccctcctcc

SEQ ID NO: 46498 - DNA, 22 bp, Artificial Sequence
  chemically synthesized
ctttcagattctccctcctcct

SEQ ID NO: 46499 - DNA, 22 bp, Artificial Sequence
  chemically synthesized
tcagattctccctcctcctggc

SEQ ID NO: 46500 - DNA, 22 bp, Artificial Sequence
  chemically synthesized
cagattctccctcctcctggca

SEQ ID NO: 46501 - DNA, 22 bp, Artificial Sequence
  chemically synthesized
agattctccctcctcctggcag

SEQ ID NO: 46502 - DNA, 22 bp, Artificial Sequence
  chemically synthesized
tccctcctcctggcaggggcac

SEQ ID NO: 46503 - DNA, 22 bp, Artificial Sequence
  chemically synthesized
cctcctcctggcaggggcactg

SEQ ID NO: 46504 - DNA, 22 bp, Artificial Sequence
  chemically synthesized
ctcctggcaggggcactgggga

SEQ ID NO: 46505 - DNA, 22 bp, Artificial Sequence
  chemically synthesized
ctggcaggggcactggggaggg

SEQ ID NO: 46506 - DNA, 22 bp, Artificial Sequence
  chemically synthesized
gcaggggcactggggagggcag

SEQ ID NO: 46507 - DNA, 22 bp, Artificial Sequence
  chemically synthesized
gggagggcaggagagaaggagg

SEQ ID NO: 46508 - DNA, 22 bp, Artificial Sequence
  chemically synthesized
ctacctgagagcccgggatgca

SEQ ID NO: 46509 - DNA, 22 bp, Artificial Sequence
  chemically synthesized
tacctgagagcccgggatgcag

SEQ ID NO: 46510 - DNA, 22 bp, Artificial Sequence
  chemically synthesized
cctgagagcccgggatgcagcc

SEQ ID NO: 46511 - DNA, 22 bp, Artificial Sequence
  chemically synthesized
agagcccgggatgcagccagaa

SEQ ID NO: 46512 - DNA, 22 bp, Artificial Sequence
  chemically synthesized
aaataccctttcccaccctagc

SEQ ID NO: 46513 - DNA, 22 bp, Artificial Sequence
  chemically synthesized
tcccaccctagcatacaatttg

SEQ ID NO: 46514 - DNA, 22 bp, Artificial Sequence
  chemically synthesized
cccaccctagcatacaatttga

SEQ ID NO: 46515 - DNA, 22 bp, Artificial Sequence
  chemically synthesized
ccaccctagcatacaatttgac

SEQ ID NO: 46516 - DNA, 22 bp, Artificial Sequence
  chemically synthesized
gcatacaatttgacaggtgaat

SEQ ID NO: 46517 - DNA, 22 bp, Artificial Sequence
  chemically synthesized
gacaggtgaataagtgctcccc

SEQ ID NO: 46518 - DNA, 22 bp, Artificial Sequence
  chemically synthesized
acaggtgaataagtgctcccca

SEQ ID NO: 46519 - DNA, 22 bp, Artificial Sequence
  chemically synthesized
cccagtaggcaataacaaggag

SEQ ID NO: 46520 - DNA, 22 bp, Artificial Sequence
  chemically synthesized
aattaaaagaactcgccaattt

SEQ ID NO: 46521 - DNA, 22 bp, Artificial Sequence
  chemically synthesized
aaagaactcgccaatttgggaa

SEQ ID NO: 46522 - DNA, 22 bp, Artificial Sequence
  chemically synthesized
gccaatttgggaagtaatgtca

SEQ ID NO: 46523 - DNA, 22 bp, Artificial Sequence
  chemically synthesized
gggaagtaatgtcattctatgt

SEQ ID NO: 46524 - DNA, 22 bp, Artificial Sequence
  chemically synthesized
ggaagtaatgtcattctatgtg

SEQ ID NO: 46525 - DNA, 22 bp, Artificial Sequence
  chemically synthesized
tatgtgactccactcttttccg

SEQ ID NO: 46526 - DNA, 22 bp, Artificial Sequence
  chemically synthesized
tgtgactccactcttttccgtt

SEQ ID NO: 46527 - DNA, 22 bp, Artificial Sequence
  chemically synthesized
cactcttttccgttaccaataa

SEQ ID NO: 46528 - DNA, 22 bp, Artificial Sequence
  chemically synthesized
ttttccgttaccaataaaacac

SEQ ID NO: 46529 - DNA, 22 bp, Artificial Sequence
  chemically synthesized
ttccgttaccaataaaacactt

SEQ ID NO: 46530 - DNA, 22 bp, Artificial Sequence
  chemically synthesized
tccgttaccaataaaacactta

SEQ ID NO: 46531 - DNA, 22 bp, Artificial Sequence
  chemically synthesized
ccgttaccaataaaacacttaa

SEQ ID NO: 46532 - DNA, 22 bp, Artificial Sequence
  chemically synthesized
cgttaccaataaaacacttaaa

SEQ ID NO: 46533 - DNA, 22 bp, Artificial Sequence
  chemically synthesized
ccaataaaacacttaaagatgc

SEQ ID NO: 46534 - DNA, 22 bp, Artificial Sequence
  chemically synthesized
aaagatgctattcatgcagaca

SEQ ID NO: 46535 - DNA, 22 bp, Artificial Sequence
  chemically synthesized
aagatgctattcatgcagacat

SEQ ID NO: 46536 - DNA, 22 bp, Artificial Sequence
  chemically synthesized
ttcatgcagacataaagtgcta

SEQ ID NO: 46537 - DNA, 22 bp, Artificial Sequence
  chemically synthesized
atgcagacataaagtgctaatg

SEQ ID NO: 46538 - DNA, 22 bp, Artificial Sequence
  chemically synthesized
atggccacttgttaccatgttt

SEQ ID NO: 46539 - DNA, 22 bp, Artificial Sequence
  chemically synthesized
gttaccatgtttcataatgcta

SEQ ID NO: 46540 - DNA, 22 bp, Artificial Sequence
  chemically synthesized
ttaccatgtttcataatgctaa

SEQ ID NO: 46541 - DNA, 22 bp, Artificial Sequence
  chemically synthesized
ccatgtttcataatgctaatat

SEQ ID NO: 46542 - DNA, 22 bp, Artificial Sequence
  chemically synthesized
cataatgctaatatttccctct

SEQ ID NO: 46543 - DNA, 22 bp, Artificial Sequence
  chemically synthesized
ataatgctaatatttccctctg

SEQ ID NO: 46544 - DNA, 22 bp, Artificial Sequence
  chemically synthesized
atatttccctctgatttctgac

SEQ ID NO: 46545 - DNA, 22 bp, Artificial Sequence
  chemically synthesized
ccctctgatttctgacagttct

SEQ ID NO: 46546 - DNA, 22 bp, Artificial Sequence
  chemically synthesized
cctctgatttctgacagttctt

SEQ ID NO: 46547 - DNA, 22 bp, Artificial Sequence
  chemically synthesized
tgatttctgacagttctttttt

SEQ ID NO: 46548 - DNA, 22 bp, Artificial Sequence
  chemically synthesized
atttctgacagttctttttttt

SEQ ID NO: 46549 - DNA, 22 bp, Artificial Sequence
  chemically synthesized
ctgacagttctttttttttcct

SEQ ID NO: 46550 - DNA, 22 bp, Artificial Sequence
  chemically synthesized
tgacagttctttttttttcctt

SEQ ID NO: 46551 - DNA, 22 bp, Artificial Sequence
  chemically synthesized
acagttctttttttttccttct

SEQ ID NO: 46552 - DNA, 22 bp, Artificial Sequence
  chemically synthesized
tttttttttccttcttcttttt

SEQ ID NO: 46553 - DNA, 22 bp, Artificial Sequence
  chemically synthesized
tttttttccttcttcttttttg

SEQ ID NO: 46554 - DNA, 22 bp, Artificial Sequence
  chemically synthesized
ttttttccttcttcttttttgg

SEQ ID NO: 46555 - DNA, 22 bp, Artificial Sequence
  chemically synthesized
tttttccttcttcttttttggg

SEQ ID NO: 46556 - DNA, 22 bp, Artificial Sequence
  chemically synthesized
ttttccttcttcttttttgggg

SEQ ID NO: 46557 - DNA, 22 bp, Artificial Sequence
  chemically synthesized
tttccttcttcttttttggggc

SEQ ID NO: 46558 - DNA, 22 bp, Artificial Sequence
  chemically synthesized
ttccttcttcttttttggggct

SEQ ID NO: 46559 - DNA, 22 bp, Artificial Sequence
  chemically synthesized
tccttcttcttttttggggcta

SEQ ID NO: 46560 - DNA, 22 bp, Artificial Sequence
  chemically synthesized
ccttcttcttttttggggctat

SEQ ID NO: 46561 - DNA, 22 bp, Artificial Sequence
  chemically synthesized
cttcttcttttttggggctatt

SEQ ID NO: 46562 - DNA, 22 bp, Artificial Sequence
  chemically synthesized
cttcttttttggggctatttta

SEQ ID NO: 46563 - DNA, 22 bp, Artificial Sequence
  chemically synthesized
ttcttttttggggctattttaa

SEQ ID NO: 46564 - DNA, 22 bp, Artificial Sequence
  chemically synthesized
cttttttggggctattttaagt

SEQ ID NO: 46565 - DNA, 22 bp, Artificial Sequence
  chemically synthesized
ttttttggggctattttaagtt

SEQ ID NO: 46566 - DNA, 22 bp, Artificial Sequence
  chemically synthesized
ttttggggctattttaagttaa

SEQ ID NO: 46567 - DNA, 22 bp, Artificial Sequence
  chemically synthesized
tttggggctattttaagttaac

SEQ ID NO: 46568 - DNA, 22 bp, Artificial Sequence
  chemically synthesized
ttggggctattttaagttaaca

SEQ ID NO: 46569 - DNA, 22 bp, Artificial Sequence
  chemically synthesized
tggggctattttaagttaacag

SEQ ID NO: 46570 - DNA, 22 bp, Artificial Sequence
  chemically synthesized
ggggctattttaagttaacaga

SEQ ID NO: 46571 - DNA, 22 bp, Artificial Sequence
  chemically synthesized
gggctattttaagttaacagag

SEQ ID NO: 46572 - DNA, 22 bp, Artificial Sequence
  chemically synthesized
ttttaagttaacagagcgctaa

SEQ ID NO: 46573 - DNA, 22 bp, Artificial Sequence
  chemically synthesized
taagttaacagagcgctaatct

SEQ ID NO: 46574 - DNA, 22 bp, Artificial Sequence
  chemically synthesized
aagttaacagagcgctaatctg

SEQ ID NO: 46575 - DNA, 22 bp, Artificial Sequence
  chemically synthesized
agttaacagagcgctaatctga

SEQ ID NO: 46576 - DNA, 22 bp, Artificial Sequence
  chemically synthesized
acagagcgctaatctgattcaa

SEQ ID NO: 46577 - DNA, 22 bp, Artificial Sequence
  chemically synthesized
atctgattcaaaactgaagact

SEQ ID NO: 46578 - DNA, 22 bp, Artificial Sequence
  chemically synthesized
attcaaaactgaagactcaaag

SEQ ID NO: 46579 - DNA, 22 bp, Artificial Sequence
  chemically synthesized
aaaactgaagactcaaagagct

SEQ ID NO: 46580 - DNA, 22 bp, Artificial Sequence
  chemically synthesized
aagactcaaagagctacactct

SEQ ID NO: 46581 - DNA, 22 bp, Artificial Sequence
  chemically synthesized
aaagagctacactctacataac

SEQ ID NO: 46582 - DNA, 22 bp, Artificial Sequence
  chemically synthesized
cactctacataactgcactatt

SEQ ID NO: 46583 - DNA, 22 bp, Artificial Sequence
  chemically synthesized
tacataactgcactattaatga

SEQ ID NO: 46584 - DNA, 22 bp, Artificial Sequence
  chemically synthesized
cataactgcactattaatgaca

SEQ ID NO: 46585 - DNA, 22 bp, Artificial Sequence
  chemically synthesized
cactattaatgacaaccattgc

SEQ ID NO: 46586 - DNA, 22 bp, Artificial Sequence
  chemically synthesized
ttaatgacaaccattgctttac

SEQ ID NO: 46587 - DNA, 22 bp, Artificial Sequence
  chemically synthesized
atgacaaccattgctttacatg

SEQ ID NO: 46588 - DNA, 22 bp, Artificial Sequence
  chemically synthesized
ctttacatgttgcaccatttca

SEQ ID NO: 46589 - DNA, 22 bp, Artificial Sequence
  chemically synthesized
tacatgttgcaccatttcatga

SEQ ID NO: 46590 - DNA, 22 bp, Artificial Sequence
  chemically synthesized
acatgttgcaccatttcatgaa

SEQ ID NO: 46591 - DNA, 22 bp, Artificial Sequence
  chemically synthesized
catgttgcaccatttcatgaaa

SEQ ID NO: 46592 - DNA, 22 bp, Artificial Sequence
  chemically synthesized
caccatttcatgaaaacaatca

SEQ ID NO: 46593 - DNA, 22 bp, Artificial Sequence
  chemically synthesized
catgaaaacaatcatcactcag

SEQ ID NO: 46594 - DNA, 22 bp, Artificial Sequence
  chemically synthesized
atgaaaacaatcatcactcagt

SEQ ID NO: 46595 - DNA, 22 bp, Artificial Sequence
  chemically synthesized
agtcaacgtattttccaagcca

SEQ ID NO: 46596 - DNA, 22 bp, Artificial Sequence
  chemically synthesized
tccaagccacagaaaataagtt

SEQ ID NO: 46597 - DNA, 22 bp, Artificial Sequence
  chemically synthesized
ccaagccacagaaaataagttg

SEQ ID NO: 46598 - DNA, 22 bp, Artificial Sequence
  chemically synthesized
caagccacagaaaataagttga

SEQ ID NO: 46599 - DNA, 22 bp, Artificial Sequence
  chemically synthesized
aaataagttgaaaatgcagtag

SEQ ID NO: 46600 - DNA, 22 bp, Artificial Sequence
  chemically synthesized
aaaatgcagtaggcaaagaagc

SEQ ID NO: 46601 - DNA, 22 bp, Artificial Sequence
  chemically synthesized
gtcatgtaagacactaaggggc

SEQ ID NO: 46602 - DNA, 22 bp, Artificial Sequence
  chemically synthesized
aggggcaggggagtcattaatt

SEQ ID NO: 46603 - DNA, 22 bp, Artificial Sequence
  chemically synthesized
attcttctccaagctttcaaca

SEQ ID NO: 46604 - DNA, 22 bp, Artificial Sequence
  chemically synthesized
ttctccaagctttcaacactct

SEQ ID NO: 46605 - DNA, 22 bp, Artificial Sequence
  chemically synthesized
ctccaagctttcaacactctgt

SEQ ID NO: 46606 - DNA, 22 bp, Artificial Sequence
  chemically synthesized
tccaagctttcaacactctgtt

SEQ ID NO: 46607 - DNA, 22 bp, Artificial Sequence
  chemically synthesized
caagctttcaacactctgtttc

SEQ ID NO: 46608 - DNA, 22 bp, Artificial Sequence
  chemically synthesized
tcaacactctgtttctatgaag

SEQ ID NO: 46609 - DNA, 22 bp, Artificial Sequence
  chemically synthesized
caacactctgtttctatgaagg

SEQ ID NO: 46610 - DNA, 22 bp, Artificial Sequence
  chemically synthesized
aacactctgtttctatgaaggc

SEQ ID NO: 46611 - DNA, 22 bp, Artificial Sequence
  chemically synthesized
tgtttctatgaaggcaagggtt

SEQ ID NO: 46612 - DNA, 22 bp, Artificial Sequence
  chemically synthesized
tttctatgaaggcaagggttgg

SEQ ID NO: 46613 - DNA, 22 bp, Artificial Sequence
  chemically synthesized
ctatgaaggcaagggttggagg

SEQ ID NO: 46614 - DNA, 22 bp, Artificial Sequence
  chemically synthesized
tatgaaggcaagggttggaggg

SEQ ID NO: 46615 - DNA, 22 bp, Artificial Sequence
  chemically synthesized
tgaaggcaagggttggagggag

SEQ ID NO: 46616 - DNA, 22 bp, Artificial Sequence
  chemically synthesized
gagggagcttttttctttcaaa

SEQ ID NO: 46617 - DNA, 22 bp, Artificial Sequence
  chemically synthesized
ttttctttcaaataaatcagta

SEQ ID NO: 46618 - DNA, 22 bp, Artificial Sequence
  chemically synthesized
tttctttcaaataaatcagtaa

SEQ ID NO: 46619 - DNA, 22 bp, Artificial Sequence
  chemically synthesized
ttctttcaaataaatcagtaaa

SEQ ID NO: 46620 - DNA, 22 bp, Artificial Sequence
  chemically synthesized
tctttcaaataaatcagtaaaa

SEQ ID NO: 46621 - DNA, 22 bp, Artificial Sequence
  chemically synthesized
ctttcaaataaatcagtaaaat

SEQ ID NO: 46622 - DNA, 22 bp, Artificial Sequence
  chemically synthesized
tttcaaataaatcagtaaaatg

SEQ ID NO: 46623 - DNA, 22 bp, Artificial Sequence
  chemically synthesized
tcaaataaatcagtaaaatgat

SEQ ID NO: 46624 - DNA, 22 bp, Artificial Sequence
  chemically synthesized
caaataaatcagtaaaatgatg

SEQ ID NO: 46625 - DNA, 22 bp, Artificial Sequence
  chemically synthesized
aaataaatcagtaaaatgatga

SEQ ID NO: 46626 - DNA, 22 bp, Artificial Sequence
  chemically synthesized
cctctgctacgcccagtggccc

SEQ ID NO: 46627 - DNA, 22 bp, Artificial Sequence
  chemically synthesized
ctctgctacgcccagtggccca

SEQ ID NO: 46628 - DNA, 22 bp, Artificial Sequence
  chemically synthesized
tgctacgcccagtggcccaggc

SEQ ID NO: 46629 - DNA, 22 bp, Artificial Sequence
  chemically synthesized
ctacgcccagtggcccaggcac

SEQ ID NO: 46630 - DNA, 22 bp, Artificial Sequence
  chemically synthesized
cgcccagtggcccaggcactct

SEQ ID NO: 46631 - DNA, 22 bp, Artificial Sequence
  chemically synthesized
tcactaaggtatcctcccagca

SEQ ID NO: 46632 - DNA, 22 bp, Artificial Sequence
  chemically synthesized
actaaggtatcctcccagcaat

SEQ ID NO: 46633 - DNA, 22 bp, Artificial Sequence
  chemically synthesized
aggtatcctcccagcaatgtag

SEQ ID NO: 46634 - DNA, 22 bp, Artificial Sequence
  chemically synthesized
ccagcaatgtaggtgttcaaag

SEQ ID NO: 46635 - DNA, 22 bp, Artificial Sequence
  chemically synthesized
aaaggcaaaagaaagggaacca

SEQ ID NO: 46636 - DNA, 22 bp, Artificial Sequence
  chemically synthesized
atggcgtaatacttgctcggcc

SEQ ID NO: 46637 - DNA, 22 bp, Artificial Sequence
  chemically synthesized
gctcggccaaagacatagtaac

SEQ ID NO: 46638 - DNA, 22 bp, Artificial Sequence
  chemically synthesized
ctcggccaaagacatagtaacg

SEQ ID NO: 46639 - DNA, 22 bp, Artificial Sequence
  chemically synthesized
ggccaaagacatagtaacgctt

SEQ ID NO: 46640 - DNA, 22 bp, Artificial Sequence
  chemically synthesized
cccaggaaatacaagtgtcaca

SEQ ID NO: 46641 - DNA, 22 bp, Artificial Sequence
  chemically synthesized
ccaggaaatacaagtgtcacag

SEQ ID NO: 46642 - DNA, 22 bp, Artificial Sequence
  chemically synthesized
caaaatgaatatgtgtgcagcc

SEQ ID NO: 46643 - DNA, 22 bp, Artificial Sequence
  chemically synthesized
ggcttgcaacttaattcaaaca

SEQ ID NO: 46644 - DNA, 22 bp, Artificial Sequence
  chemically synthesized
gcaacttaattcaaacaacttg

SEQ ID NO: 46645 - DNA, 22 bp, Artificial Sequence
  chemically synthesized
caacttaattcaaacaacttgg

SEQ ID NO: 46646 - DNA, 22 bp, Artificial Sequence
  chemically synthesized
aattcaaacaacttggaaggct

SEQ ID NO: 46647 - DNA, 22 bp, Artificial Sequence
  chemically synthesized
attcaaacaacttggaaggcta

SEQ ID NO: 46648 - DNA, 22 bp, Artificial Sequence
  chemically synthesized
aaacaacttggaaggctaagga

SEQ ID NO: 46649 - DNA, 22 bp, Artificial Sequence
  chemically synthesized
ggaaggctaaggagcactggag

SEQ ID NO: 46650 - DNA, 22 bp, Artificial Sequence
  chemically synthesized
gaaggctaaggagcactggagc

SEQ ID NO: 46651 - DNA, 22 bp, Artificial Sequence
  chemically synthesized
aggagcactggagctggggagc

SEQ ID NO: 46652 - DNA, 22 bp, Artificial Sequence
  chemically synthesized
gagctggggagctgcagatgaa

SEQ ID NO: 46653 - DNA, 22 bp, Artificial Sequence
  chemically synthesized
gggagctgcagatgaacccctg

SEQ ID NO: 46654 - DNA, 22 bp, Artificial Sequence
  chemically synthesized
cagatgaacccctgtgctcacc

SEQ ID NO: 46655 - DNA, 22 bp, Artificial Sequence
  chemically synthesized
tgctcaccacccctggagagca

SEQ ID NO: 46656 - DNA, 22 bp, Artificial Sequence
  chemically synthesized
accacccctggagagcagtcag

SEQ ID NO: 46657 - DNA, 22 bp, Artificial Sequence
  chemically synthesized
gagagcagtcagagaggaagcc

SEQ ID NO: 46658 - DNA, 22 bp, Artificial Sequence
  chemically synthesized
ctttcctcagatgttttaaagg

SEQ ID NO: 46659 - DNA, 22 bp, Artificial Sequence
  chemically synthesized
tcctcagatgttttaaaggaag

SEQ ID NO: 46660 - DNA, 22 bp, Artificial Sequence
  chemically synthesized
cctcagatgttttaaaggaagc

SEQ ID NO: 46661 - DNA, 22 bp, Artificial Sequence
  chemically synthesized
ctcagatgttttaaaggaagcc

SEQ ID NO: 46662 - DNA, 22 bp, Artificial Sequence
  chemically synthesized
agatgttttaaaggaagccacc

SEQ ID NO: 46663 - DNA, 22 bp, Artificial Sequence
  chemically synthesized
taaaggaagccacctagagccc

SEQ ID NO: 46664 - DNA, 22 bp, Artificial Sequence
  chemically synthesized
aaaggaagccacctagagcccc

SEQ ID NO: 46665 - DNA, 22 bp, Artificial Sequence
  chemically synthesized
aaggaagccacctagagcccca

SEQ ID NO: 46666 - DNA, 22 bp, Artificial Sequence
  chemically synthesized
gagccccacctgtcactgtgga

SEQ ID NO: 46667 - DNA, 22 bp, Artificial Sequence
  chemically synthesized
tcactgtggaactgctcatggt

SEQ ID NO: 46668 - DNA, 22 bp, Artificial Sequence
  chemically synthesized
tggaactgctcatggtggctgc

SEQ ID NO: 46669 - DNA, 22 bp, Artificial Sequence
  chemically synthesized
ctcatggtggctgcccgatgcg

SEQ ID NO: 46670 - DNA, 22 bp, Artificial Sequence
  chemically synthesized
atggtggctgcccgatgcgctg

SEQ ID NO: 46671 - DNA, 22 bp, Artificial Sequence
  chemically synthesized
cccgatgcgctgatgtggaact

SEQ ID NO: 46672 - DNA, 22 bp, Artificial Sequence
  chemically synthesized
atgtggaactcagaatcattca

SEQ ID NO: 46673 - DNA, 22 bp, Artificial Sequence
  chemically synthesized
agaatcattcatttgggcttgt

SEQ ID NO: 46674 - DNA, 22 bp, Artificial Sequence
  chemically synthesized
atttgggcttgtggctgagctg

SEQ ID NO: 46675 - DNA, 22 bp, Artificial Sequence
  chemically synthesized
gggcttgtggctgagctgtgct

SEQ ID NO: 46676 - DNA, 22 bp, Artificial Sequence
  chemically synthesized
ggcttgtggctgagctgtgcta

SEQ ID NO: 46677 - DNA, 22 bp, Artificial Sequence
  chemically synthesized
gtggctgagctgtgctaggtaa

SEQ ID NO: 46678 - DNA, 22 bp, Artificial Sequence
  chemically synthesized
tggctgagctgtgctaggtaac

SEQ ID NO: 46679 - DNA, 22 bp, Artificial Sequence
  chemically synthesized
agctgtgctaggtaactgggtg

SEQ ID NO: 46680 - DNA, 22 bp, Artificial Sequence
  chemically synthesized
tgctaggtaactgggtggcctg

SEQ ID NO: 46681 - DNA, 22 bp, Artificial Sequence
  chemically synthesized
ggtaactgggtggcctgggcaa

SEQ ID NO: 46682 - DNA, 22 bp, Artificial Sequence
  chemically synthesized
ggtggcctgggcaagtcacttc

SEQ ID NO: 46683 - DNA, 22 bp, Artificial Sequence
  chemically synthesized
ggcaagtcacttcacctccctt

SEQ ID NO: 46684 - DNA, 22 bp, Artificial Sequence
  chemically synthesized
cacctcccttggcctgtgtcct

SEQ ID NO: 46685 - DNA, 22 bp, Artificial Sequence
  chemically synthesized
acctcccttggcctgtgtcctt

SEQ ID NO: 46686 - DNA, 22 bp, Artificial Sequence
  chemically synthesized
ccttggcctgtgtccttgagct

SEQ ID NO: 46687 - DNA, 22 bp, Artificial Sequence
  chemically synthesized
ggcctgtgtccttgagctttcc

SEQ ID NO: 46688 - DNA, 22 bp, Artificial Sequence
  chemically synthesized
gcctgtgtccttgagctttcct

SEQ ID NO: 46689 - DNA, 22 bp, Artificial Sequence
  chemically synthesized
tgtccttgagctttcctggctg

SEQ ID NO: 46690 - DNA, 22 bp, Artificial Sequence
  chemically synthesized
gagctttcctggctgcacatct

SEQ ID NO: 46691 - DNA, 22 bp, Artificial Sequence
  chemically synthesized
agctttcctggctgcacatctt

SEQ ID NO: 46692 - DNA, 22 bp, Artificial Sequence
  chemically synthesized
tcctggctgcacatcttgctct

SEQ ID NO: 46693 - DNA, 22 bp, Artificial Sequence
  chemically synthesized
cctggctgcacatcttgctctc

SEQ ID NO: 46694 - DNA, 22 bp, Artificial Sequence
  chemically synthesized
ctggctgcacatcttgctctca

SEQ ID NO: 46695 - DNA, 22 bp, Artificial Sequence
  chemically synthesized
gctgcacatcttgctctcaggt

SEQ ID NO: 46696 - DNA, 22 bp, Artificial Sequence
  chemically synthesized
cacatcttgctctcaggtataa

SEQ ID NO: 46697 - DNA, 22 bp, Artificial Sequence
  chemically synthesized
gctctcaggtataaaggatctg

SEQ ID NO: 46698 - DNA, 22 bp, Artificial Sequence
  chemically synthesized
ctctcaggtataaaggatctgt

SEQ ID NO: 46699 - DNA, 22 bp, Artificial Sequence
  chemically synthesized
tcaggtataaaggatctgtctc

SEQ ID NO: 46700 - DNA, 22 bp, Artificial Sequence
  chemically synthesized
aggtataaaggatctgtctcct

SEQ ID NO: 46701 - DNA, 22 bp, Artificial Sequence
  chemically synthesized
tctccttctacctgcccctgtg

SEQ ID NO: 46702 - DNA, 22 bp, Artificial Sequence
  chemically synthesized
cttctacctgcccctgtgccac

SEQ ID NO: 46703 - DNA, 22 bp, Artificial Sequence
  chemically synthesized
ctacctgcccctgtgccacaca

SEQ ID NO: 46704 - DNA, 22 bp, Artificial Sequence
  chemically synthesized
tacctgcccctgtgccacacac

SEQ ID NO: 46705 - DNA, 22 bp, Artificial Sequence
  chemically synthesized
cctgcccctgtgccacacacac

SEQ ID NO: 46706 - DNA, 22 bp, Artificial Sequence
  chemically synthesized
cccctgtgccacacacactcgc

SEQ ID NO: 46707 - DNA, 22 bp, Artificial Sequence
  chemically synthesized
tgccacacacactcgcctctca

SEQ ID NO: 46708 - DNA, 22 bp, Artificial Sequence
  chemically synthesized
gcctctcaaatgagaaaggcag

SEQ ID NO: 46709 - DNA, 22 bp, Artificial Sequence
  chemically synthesized
tcaaatgagaaaggcagctttg

SEQ ID NO: 46710 - DNA, 22 bp, Artificial Sequence
  chemically synthesized
aaatgagaaaggcagctttgag

SEQ ID NO: 46711 - DNA, 22 bp, Artificial Sequence
  chemically synthesized
tgagagaggatgcttgccttcc

SEQ ID NO: 46712 - DNA, 22 bp, Artificial Sequence
  chemically synthesized
gagagaggatgcttgccttccc

SEQ ID NO: 46713 - DNA, 22 bp, Artificial Sequence
  chemically synthesized
agagaggatgcttgccttcccg

SEQ ID NO: 46714 - DNA, 22 bp, Artificial Sequence
  chemically synthesized
gccttcccggctcccctcccaa

SEQ ID NO: 46715 - DNA, 22 bp, Artificial Sequence
  chemically synthesized
ccttcccggctcccctcccaac

SEQ ID NO: 46716 - DNA, 22 bp, Artificial Sequence
  chemically synthesized
cccggctcccctcccaacccag

SEQ ID NO: 46717 - DNA, 22 bp, Artificial Sequence
  chemically synthesized
ccggctcccctcccaacccaga

SEQ ID NO: 46718 - DNA, 22 bp, Artificial Sequence
  chemically synthesized
ccctcccaacccagaacctatc

SEQ ID NO: 46719 - DNA, 22 bp, Artificial Sequence
  chemically synthesized
ccaacccagaacctatcacaat

SEQ ID NO: 46720 - DNA, 22 bp, Artificial Sequence
  chemically synthesized
tcacaatgctctgcagagagta

SEQ ID NO: 46721 - DNA, 22 bp, Artificial Sequence
  chemically synthesized
tgcagagagtacatgctcaaca

SEQ ID NO: 46722 - DNA, 22 bp, Artificial Sequence
  chemically synthesized
cagagagtacatgctcaacaaa

SEQ ID NO: 46723 - DNA, 22 bp, Artificial Sequence
  chemically synthesized
aacaaatccaatgctaaattgt

SEQ ID NO: 46724 - DNA, 22 bp, Artificial Sequence
  chemically synthesized
aattgtaaaaagtgagactaga

SEQ ID NO: 46725 - DNA, 22 bp, Artificial Sequence
  chemically synthesized
taaaaagtgagactagatggta

SEQ ID NO: 46726 - DNA, 22 bp, Artificial Sequence
  chemically synthesized
gatggtatctgcctctcctctc

SEQ ID NO: 46727 - DNA, 22 bp, Artificial Sequence
  chemically synthesized
cctctcctctcagctctaaatt

SEQ ID NO: 46728 - DNA, 22 bp, Artificial Sequence
  chemically synthesized
tcctctcagctctaaattattt

SEQ ID NO: 46729 - DNA, 22 bp, Artificial Sequence
  chemically synthesized
ctctcagctctaaattatttgg

SEQ ID NO: 46730 - DNA, 22 bp, Artificial Sequence
  chemically synthesized
tcagctctaaattatttggtct

SEQ ID NO: 46731 - DNA, 22 bp, Artificial Sequence
  chemically synthesized
agctctaaattatttggtctaa

SEQ ID NO: 46732 - DNA, 22 bp, Artificial Sequence
  chemically synthesized
taaattatttggtctaaagaaa

SEQ ID NO: 46733 - DNA, 22 bp, Artificial Sequence
  chemically synthesized
aattatttggtctaaagaaaac

SEQ ID NO: 46734 - DNA, 22 bp, Artificial Sequence
  chemically synthesized
tttggtctaaagaaaactgaag

SEQ ID NO: 46735 - DNA, 22 bp, Artificial Sequence
  chemically synthesized
ggtctaaagaaaactgaagccc

SEQ ID NO: 46736 - DNA, 22 bp, Artificial Sequence
  chemically synthesized
gtctaaagaaaactgaagcccc

SEQ ID NO: 46737 - DNA, 22 bp, Artificial Sequence
  chemically synthesized
aagaaaactgaagcccccagca

SEQ ID NO: 46738 - DNA, 22 bp, Artificial Sequence
  chemically synthesized
aagcccccagcaactccatttt

SEQ ID NO: 46739 - DNA, 22 bp, Artificial Sequence
  chemically synthesized
cattttgcatatctaattggag

SEQ ID NO: 46740 - DNA, 22 bp, Artificial Sequence
  chemically synthesized
tgcatatctaattggagatggt

SEQ ID NO: 46741 - DNA, 22 bp, Artificial Sequence
  chemically synthesized
gcatatctaattggagatggtt

SEQ ID NO: 46742 - DNA, 22 bp, Artificial Sequence
  chemically synthesized
catatctaattggagatggttt

SEQ ID NO: 46743 - DNA, 22 bp, Artificial Sequence
  chemically synthesized
attggagatggtttcaataata

SEQ ID NO: 46744 - DNA, 22 bp, Artificial Sequence
  chemically synthesized
gagatggtttcaataatataat

SEQ ID NO: 46745 - DNA, 22 bp, Artificial Sequence
  chemically synthesized
caataatataattatcaaggca

SEQ ID NO: 46746 - DNA, 22 bp, Artificial Sequence
  chemically synthesized
aataatataattatcaaggcat

SEQ ID NO: 46747 - DNA, 22 bp, Artificial Sequence
  chemically synthesized
tcaaggcatccctacgttactt

SEQ ID NO: 46748 - DNA, 22 bp, Artificial Sequence
  chemically synthesized
cgttacttgaagttggttcata

SEQ ID NO: 46749 - DNA, 22 bp, Artificial Sequence
  chemically synthesized
cttgaagttggttcataatctg

SEQ ID NO: 46750 - DNA, 22 bp, Artificial Sequence
  chemically synthesized
gaagttggttcataatctggcg

SEQ ID NO: 46751 - DNA, 22 bp, Artificial Sequence
  chemically synthesized
aagttggttcataatctggcga

SEQ ID NO: 46752 - DNA, 22 bp, Artificial Sequence
  chemically synthesized
gttcataatctggcgacgttca

SEQ ID NO: 46753 - DNA, 22 bp, Artificial Sequence
  chemically synthesized
ataatctggcgacgttcacagc

SEQ ID NO: 46754 - DNA, 22 bp, Artificial Sequence
  chemically synthesized
gcgacgttcacagccttatgaa

SEQ ID NO: 46755 - DNA, 22 bp, Artificial Sequence
  chemically synthesized
acagccttatgaagacagttta

SEQ ID NO: 46756 - DNA, 22 bp, Artificial Sequence
  chemically synthesized
atgaagacagtttattctcttt

SEQ ID NO: 46757 - DNA, 22 bp, Artificial Sequence
  chemically synthesized
tgaagacagtttattctctttt

SEQ ID NO: 46758 - DNA, 22 bp, Artificial Sequence
  chemically synthesized
attctcttttagtgtctcaagt

SEQ ID NO: 46759 - DNA, 22 bp, Artificial Sequence
  chemically synthesized
ttctcttttagtgtctcaagta

SEQ ID NO: 46760 - DNA, 22 bp, Artificial Sequence
  chemically synthesized
tcttttagtgtctcaagtatga

SEQ ID NO: 46761 - DNA, 22 bp, Artificial Sequence
  chemically synthesized
ttttagtgtctcaagtatgagt

SEQ ID NO: 46762 - DNA, 22 bp, Artificial Sequence
  chemically synthesized
ttagtgtctcaagtatgagtca

SEQ ID NO: 46763 - DNA, 22 bp, Artificial Sequence
  chemically synthesized
tagtgtctcaagtatgagtcac

SEQ ID NO: 46764 - DNA, 22 bp, Artificial Sequence
  chemically synthesized
agtgtctcaagtatgagtcacc

SEQ ID NO: 46765 - DNA, 22 bp, Artificial Sequence
  chemically synthesized
gtgtctcaagtatgagtcacct

SEQ ID NO: 46766 - DNA, 22 bp, Artificial Sequence
  chemically synthesized
aagtatgagtcacctctgatga

SEQ ID NO: 46767 - DNA, 22 bp, Artificial Sequence
  chemically synthesized
tgatgacggataggagaacaag

SEQ ID NO: 46768 - DNA, 22 bp, Artificial Sequence
  chemically synthesized
atgacggataggagaacaagca

SEQ ID NO: 46769 - DNA, 22 bp, Artificial Sequence
  chemically synthesized
tactacaatacacacctaaagt

SEQ ID NO: 46770 - DNA, 22 bp, Artificial Sequence
  chemically synthesized
actacaatacacacctaaagta

SEQ ID NO: 46771 - DNA, 22 bp, Artificial Sequence
  chemically synthesized
ctacaatacacacctaaagtaa

SEQ ID NO: 46772 - DNA, 22 bp, Artificial Sequence
  chemically synthesized
caatacacacctaaagtaaatg

SEQ ID NO: 46773 - DNA, 22 bp, Artificial Sequence
  chemically synthesized
aagtaaatgaataaacccaacc

SEQ ID NO: 46774 - DNA, 22 bp, Artificial Sequence
  chemically synthesized
tgcccacccacatggcatccat

SEQ ID NO: 46775 - DNA, 22 bp, Artificial Sequence
  chemically synthesized
gcccacccacatggcatccatt

SEQ ID NO: 46776 - DNA, 22 bp, Artificial Sequence
  chemically synthesized
cccacccacatggcatccattt

SEQ ID NO: 46777 - DNA, 22 bp, Artificial Sequence
  chemically synthesized
ggaggagacacagagaaaggag

SEQ ID NO: 46778 - DNA, 22 bp, Artificial Sequence
  chemically synthesized
gaggagacacagagaaaggagt

SEQ ID NO: 46779 - DNA, 22 bp, Artificial Sequence
  chemically synthesized
cacctcttagacgtctcagaga

SEQ ID NO: 46780 - DNA, 22 bp, Artificial Sequence
  chemically synthesized
acctcttagacgtctcagagat

SEQ ID NO: 46781 - DNA, 22 bp, Artificial Sequence
  chemically synthesized
ttagacgtctcagagattaaca

SEQ ID NO: 46782 - DNA, 22 bp, Artificial Sequence
  chemically synthesized
agacgtctcagagattaacatt

SEQ ID NO: 46783 - DNA, 22 bp, Artificial Sequence
  chemically synthesized
gacgtctcagagattaacattt

SEQ ID NO: 46784 - DNA, 22 bp, Artificial Sequence
  chemically synthesized
agagattaacattttctcaaaa

SEQ ID NO: 46785 - DNA, 22 bp, Artificial Sequence
  chemically synthesized
acattttctcaaaaatgaacac

SEQ ID NO: 46786 - DNA, 22 bp, Artificial Sequence
  chemically synthesized
tctcaaaaatgaacacacagag

SEQ ID NO: 46787 - DNA, 22 bp, Artificial Sequence
  chemically synthesized
ctcaaaaatgaacacacagagc

SEQ ID NO: 46788 - DNA, 22 bp, Artificial Sequence
  chemically synthesized
tcaaaaatgaacacacagagca

SEQ ID NO: 46789 - DNA, 22 bp, Artificial Sequence
  chemically synthesized
aaaaatgaacacacagagcaac

SEQ ID NO: 46790 - DNA, 22 bp, Artificial Sequence
  chemically synthesized
acgagtcacagtggaccacacc

SEQ ID NO: 46791 - DNA, 22 bp, Artificial Sequence
  chemically synthesized
tggttaccccctgagaaaggca

SEQ ID NO: 46792 - DNA, 22 bp, Artificial Sequence
  chemically synthesized
gttaccccctgagaaaggcaga

SEQ ID NO: 46793 - DNA, 22 bp, Artificial Sequence
  chemically synthesized
ccccctgagaaaggcagagaaa

SEQ ID NO: 46794 - DNA, 22 bp, Artificial Sequence
  chemically synthesized
agaaaggcagagaaaggacccc

SEQ ID NO: 46795 - DNA, 22 bp, Artificial Sequence
  chemically synthesized
gaggagaggttcagggatcatg

SEQ ID NO: 46796 - DNA, 22 bp, Artificial Sequence
  chemically synthesized
aggagaggttcagggatcatga

SEQ ID NO: 46797 - DNA, 22 bp, Artificial Sequence
  chemically synthesized
agggatcatgaggactcaccac

SEQ ID NO: 46798 - DNA, 22 bp, Artificial Sequence
  chemically synthesized
accaccccactgaaatccatgg

SEQ ID NO: 46799 - DNA, 22 bp, Artificial Sequence
  chemically synthesized
aaatccatggatagtctagcct

SEQ ID NO: 46800 - DNA, 22 bp, Artificial Sequence
  chemically synthesized
gcctgtgaggggttgggggtgg

SEQ ID NO: 46801 - DNA, 22 bp, Artificial Sequence
  chemically synthesized
tgaggggttgggggtggcaaat

SEQ ID NO: 46802 - DNA, 22 bp, Artificial Sequence
  chemically synthesized
ggggtggcaaattactttatct

SEQ ID NO: 46803 - DNA, 22 bp, Artificial Sequence
  chemically synthesized
ctttatctttctcatctttgag

SEQ ID NO: 46804 - DNA, 22 bp, Artificial Sequence
  chemically synthesized
tatctttctcatctttgagcgg

SEQ ID NO: 46805 - DNA, 22 bp, Artificial Sequence
  chemically synthesized
atctttctcatctttgagcggc

SEQ ID NO: 46806 - DNA, 22 bp, Artificial Sequence
  chemically synthesized
tctttctcatctttgagcggct

SEQ ID NO: 46807 - DNA, 22 bp, Artificial Sequence
  chemically synthesized
tctcatctttgagcggctcttc

SEQ ID NO: 46808 - DNA, 22 bp, Artificial Sequence
  chemically synthesized
ctcatctttgagcggctcttcc

SEQ ID NO: 46809 - DNA, 22 bp, Artificial Sequence
  chemically synthesized
tcatctttgagcggctcttccc

SEQ ID NO: 46810 - DNA, 22 bp, Artificial Sequence
  chemically synthesized
atctttgagcggctcttcccca

SEQ ID NO: 46811 - DNA, 22 bp, Artificial Sequence
  chemically synthesized
tgagcggctcttccccagagtc

SEQ ID NO: 46812 - DNA, 22 bp, Artificial Sequence
  chemically synthesized
gagcggctcttccccagagtca

SEQ ID NO: 46813 - DNA, 22 bp, Artificial Sequence
  chemically synthesized
agcggctcttccccagagtcag

SEQ ID NO: 46814 - DNA, 22 bp, Artificial Sequence
  chemically synthesized
ttccccagagtcaggatgactc

SEQ ID NO: 46815 - DNA, 22 bp, Artificial Sequence
  chemically synthesized
ccccagagtcaggatgactctc

SEQ ID NO: 46816 - DNA, 22 bp, Artificial Sequence
  chemically synthesized
cccagagtcaggatgactctca

SEQ ID NO: 46817 - DNA, 22 bp, Artificial Sequence
  chemically synthesized
tcactaggtttcaggtacatcc

SEQ ID NO: 46818 - DNA, 22 bp, Artificial Sequence
  chemically synthesized
actaggtttcaggtacatcccc

SEQ ID NO: 46819 - DNA, 22 bp, Artificial Sequence
  chemically synthesized
ggtttcaggtacatccccatca

SEQ ID NO: 46820 - DNA, 22 bp, Artificial Sequence
  chemically synthesized
caggtacatccccatcatgccc

SEQ ID NO: 46821 - DNA, 22 bp, Artificial Sequence
  chemically synthesized
aggtacatccccatcatgcccc

SEQ ID NO: 46822 - DNA, 22 bp, Artificial Sequence
  chemically synthesized
cagtctctgcagctgacacggc

SEQ ID NO: 46823 - DNA, 22 bp, Artificial Sequence
  chemically synthesized
tgcagctgacacggctccaaga

SEQ ID NO: 46824 - DNA, 22 bp, Artificial Sequence
  chemically synthesized
cagctgacacggctccaagatg

SEQ ID NO: 46825 - DNA, 22 bp, Artificial Sequence
  chemically synthesized
acacggctccaagatgctaaat

SEQ ID NO: 46826 - DNA, 22 bp, Artificial Sequence
  chemically synthesized
caagatgctaaatatgagacaa

SEQ ID NO: 46827 - DNA, 22 bp, Artificial Sequence
  chemically synthesized
aatatgagacaaggaggggaca

SEQ ID NO: 46828 - DNA, 22 bp, Artificial Sequence
  chemically synthesized
agtcccaggagtggcactagaa

SEQ ID NO: 46829 - DNA, 22 bp, Artificial Sequence
  chemically synthesized
gtcccaggagtggcactagaag

SEQ ID NO: 46830 - DNA, 22 bp, Artificial Sequence
  chemically synthesized
gaaggagtccctgctccctcag

SEQ ID NO: 46831 - DNA, 22 bp, Artificial Sequence
  chemically synthesized
ctccctcaggagccatctgccg

SEQ ID NO: 46832 - DNA, 22 bp, Artificial Sequence
  chemically synthesized
cctcaggagccatctgccgggt

SEQ ID NO: 46833 - DNA, 22 bp, Artificial Sequence
  chemically synthesized
aggagccatctgccgggtgctt

SEQ ID NO: 46834 - DNA, 22 bp, Artificial Sequence
  chemically synthesized
ccgggtgcttctggagatgctg

SEQ ID NO: 46835 - DNA, 22 bp, Artificial Sequence
  chemically synthesized
ctggagatgctgcctccacgcc

SEQ ID NO: 46836 - DNA, 22 bp, Artificial Sequence
  chemically synthesized
tggagatgctgcctccacgccc

SEQ ID NO: 46837 - DNA, 22 bp, Artificial Sequence
  chemically synthesized
gagatgctgcctccacgcccca

SEQ ID NO: 46838 - DNA, 22 bp, Artificial Sequence
  chemically synthesized
cctccacgccccacttgaggct

SEQ ID NO: 46839 - DNA, 22 bp, Artificial Sequence
  chemically synthesized
cacgccccacttgaggctgtcc

SEQ ID NO: 46840 - DNA, 22 bp, Artificial Sequence
  chemically synthesized
gaggctgtccacagcagaaacc

SEQ ID NO: 46841 - DNA, 22 bp, Artificial Sequence
  chemically synthesized
aggctgtccacagcagaaacca

SEQ ID NO: 46842 - DNA, 22 bp, Artificial Sequence
  chemically synthesized
tccacagcagaaaccagcgccc

SEQ ID NO: 46843 - DNA, 22 bp, Artificial Sequence
  chemically synthesized
aagccagccaccccatgggaac

SEQ ID NO: 46844 - DNA, 22 bp, Artificial Sequence
  chemically synthesized
tggcaggtgtgggtgttgggtt

SEQ ID NO: 46845 - DNA, 22 bp, Artificial Sequence
  chemically synthesized
ggcaggtgtgggtgttgggtta

SEQ ID NO: 46846 - DNA, 22 bp, Artificial Sequence
  chemically synthesized
gcaggtgtgggtgttgggttag

SEQ ID NO: 46847 - DNA, 22 bp, Artificial Sequence
  chemically synthesized
ggttagcctctagccagaactc

SEQ ID NO: 46848 - DNA, 22 bp, Artificial Sequence
  chemically synthesized
gcctctagccagaactcctgct

SEQ ID NO: 46849 - DNA, 22 bp, Artificial Sequence
  chemically synthesized
tagccagaactcctgctgcttc

SEQ ID NO: 46850 - DNA, 22 bp, Artificial Sequence
  chemically synthesized
gccagaactcctgctgcttctc

SEQ ID NO: 46851 - DNA, 22 bp, Artificial Sequence
  chemically synthesized
ctgctgcttctctctttgtgga

SEQ ID NO: 46852 - DNA, 22 bp, Artificial Sequence
  chemically synthesized
ctgcttctctctttgtggagca

SEQ ID NO: 46853 - DNA, 22 bp, Artificial Sequence
  chemically synthesized
cttctctctttgtggagcaaat

SEQ ID NO: 46854 - DNA, 22 bp, Artificial Sequence
  chemically synthesized
ctctctttgtggagcaaatctt

SEQ ID NO: 46855 - DNA, 22 bp, Artificial Sequence
  chemically synthesized
tctctttgtggagcaaatcttc

SEQ ID NO: 46856 - DNA, 22 bp, Artificial Sequence
  chemically synthesized
tctttgtggagcaaatcttcat

SEQ ID NO: 46857 - DNA, 22 bp, Artificial Sequence
  chemically synthesized
tttgtggagcaaatcttcatgt

SEQ ID NO: 46858 - DNA, 22 bp, Artificial Sequence
  chemically synthesized
tgtggagcaaatcttcatgtcc

SEQ ID NO: 46859 - DNA, 22 bp, Artificial Sequence
  chemically synthesized
gtggagcaaatcttcatgtcct

SEQ ID NO: 46860 - DNA, 22 bp, Artificial Sequence
  chemically synthesized
tggagcaaatcttcatgtcctg

SEQ ID NO: 46861 - DNA, 22 bp, Artificial Sequence
  chemically synthesized
catgtcctgtctggatcttccc

SEQ ID NO: 46862 - DNA, 22 bp, Artificial Sequence
  chemically synthesized
atgtcctgtctggatcttccca

SEQ ID NO: 46863 - DNA, 22 bp, Artificial Sequence
  chemically synthesized
tctggatcttcccagtcctgcc

SEQ ID NO: 46864 - DNA, 22 bp, Artificial Sequence
  chemically synthesized
gatcttcccagtcctgccctct

SEQ ID NO: 46865 - DNA, 22 bp, Artificial Sequence
  chemically synthesized
cccagtcctgccctctctcttc

SEQ ID NO: 46866 - DNA, 22 bp, Artificial Sequence
  chemically synthesized
ccagtcctgccctctctcttct

SEQ ID NO: 46867 - DNA, 22 bp, Artificial Sequence
  chemically synthesized
ccctctctcttctgaatcttcc

SEQ ID NO: 46868 - DNA, 22 bp, Artificial Sequence
  chemically synthesized
tctcttctgaatcttcccaccc

SEQ ID NO: 46869 - DNA, 22 bp, Artificial Sequence
  chemically synthesized
tcttctgaatcttcccaccctt

SEQ ID NO: 46870 - DNA, 22 bp, Artificial Sequence
  chemically synthesized
ttctgaatcttcccacccttcc

SEQ ID NO: 46871 - DNA, 22 bp, Artificial Sequence
  chemically synthesized
ctgaatcttcccacccttccaa

SEQ ID NO: 46872 - DNA, 22 bp, Artificial Sequence
  chemically synthesized
tgaatcttcccacccttccaag

SEQ ID NO: 46873 - DNA, 22 bp, Artificial Sequence
  chemically synthesized
aatcttcccacccttccaaggg

SEQ ID NO: 46874 - DNA, 22 bp, Artificial Sequence
  chemically synthesized
cccacccttccaagggcctgct

SEQ ID NO: 46875 - DNA, 22 bp, Artificial Sequence
  chemically synthesized
ccacccttccaagggcctgctg

SEQ ID NO: 46876 - DNA, 22 bp, Artificial Sequence
  chemically synthesized
ccaagggcctgctgcctaatcc

SEQ ID NO: 46877 - DNA, 22 bp, Artificial Sequence
  chemically synthesized
caagggcctgctgcctaatcca

SEQ ID NO: 46878 - DNA, 22 bp, Artificial Sequence
  chemically synthesized
ctgcctaatccatctccccact

SEQ ID NO: 46879 - DNA, 22 bp, Artificial Sequence
  chemically synthesized
cctaatccatctccccactcac

SEQ ID NO: 46880 - DNA, 22 bp, Artificial Sequence
  chemically synthesized
atccatctccccactcacacgc

SEQ ID NO: 46881 - DNA, 22 bp, Artificial Sequence
  chemically synthesized
cccactcacacgctaaagtaaa

SEQ ID NO: 46882 - DNA, 22 bp, Artificial Sequence
  chemically synthesized
acacgctaaagtaaatgaataa

SEQ ID NO: 46883 - DNA, 22 bp, Artificial Sequence
  chemically synthesized
aagtaaatgaataaacccaaca

SEQ ID NO: 46884 - DNA, 22 bp, Artificial Sequence
  chemically synthesized
atccctgatcaggactgaaaaa

SEQ ID NO: 46885 - DNA, 22 bp, Artificial Sequence
  chemically synthesized
atcaggactgaaaaaagaaaaa

SEQ ID NO: 46886 - DNA, 22 bp, Artificial Sequence
  chemically synthesized
aaaaaagaaaaagaaatagcct

SEQ ID NO: 46887 - DNA, 22 bp, Artificial Sequence
  chemically synthesized
ccatcacaccactctctgggaa

SEQ ID NO: 46888 - DNA, 22 bp, Artificial Sequence
  chemically synthesized
tctgggaaaatagaactgagtc

SEQ ID NO: 46889 - DNA, 22 bp, Artificial Sequence
  chemically synthesized
tgggaaaatagaactgagtcct

SEQ ID NO: 46890 - DNA, 22 bp, Artificial Sequence
  chemically synthesized
ggaaaatagaactgagtcctag

SEQ ID NO: 46891 - DNA, 22 bp, Artificial Sequence
  chemically synthesized
agtcctagctctagcactgggc

SEQ ID NO: 46892 - DNA, 22 bp, Artificial Sequence
  chemically synthesized
gctctagcactgggcacagctg

SEQ ID NO: 46893 - DNA, 22 bp, Artificial Sequence
  chemically synthesized
tagcactgggcacagctgggtc

SEQ ID NO: 46894 - DNA, 22 bp, Artificial Sequence
  chemically synthesized
gcactgggcacagctgggtcag

SEQ ID NO: 46895 - DNA, 22 bp, Artificial Sequence
  chemically synthesized
ggcacagctgggtcagcaccta

SEQ ID NO: 46896 - DNA, 22 bp, Artificial Sequence
  chemically synthesized
ggtcagcacctacgaagggtcc

SEQ ID NO: 46897 - DNA, 22 bp, Artificial Sequence
  chemically synthesized
cgaagggtcctatgcagtgaac

SEQ ID NO: 46898 - DNA, 22 bp, Artificial Sequence
  chemically synthesized
tgcagtgaacaccttgcagtct

SEQ ID NO: 46899 - DNA, 22 bp, Artificial Sequence
  chemically synthesized
gcagtctgaagggcagactctc

SEQ ID NO: 46900 - DNA, 22 bp, Artificial Sequence
  chemically synthesized
cagtctgaagggcagactctct

SEQ ID NO: 46901 - DNA, 22 bp, Artificial Sequence
  chemically synthesized
aagggcagactctctcttctca

SEQ ID NO: 46902 - DNA, 22 bp, Artificial Sequence
  chemically synthesized
tctcttctcaacaagccagaga

SEQ ID NO: 46903 - DNA, 22 bp, Artificial Sequence
  chemically synthesized
tcttctcaacaagccagagatt

SEQ ID NO: 46904 - DNA, 22 bp, Artificial Sequence
  chemically synthesized
ttctcaacaagccagagattct

SEQ ID NO: 46905 - DNA, 22 bp, Artificial Sequence
  chemically synthesized
ctcaacaagccagagattctct

SEQ ID NO: 46906 - DNA, 22 bp, Artificial Sequence
  chemically synthesized
tcaacaagccagagattctctg

SEQ ID NO: 46907 - DNA, 22 bp, Artificial Sequence
  chemically synthesized
aacaagccagagattctctgcc

SEQ ID NO: 46908 - DNA, 22 bp, Artificial Sequence
  chemically synthesized
tctgccttccagacaggcacct

SEQ ID NO: 46909 - DNA, 22 bp, Artificial Sequence
  chemically synthesized
tgccttccagacaggcacctcc

SEQ ID NO: 46910 - DNA, 22 bp, Artificial Sequence
  chemically synthesized
ccttccagacaggcacctccat

SEQ ID NO: 46911 - DNA, 22 bp, Artificial Sequence
  chemically synthesized
ccagacaggcacctccatgaag

SEQ ID NO: 46912 - DNA, 22 bp, Artificial Sequence
  chemically synthesized
cagacaggcacctccatgaaga

SEQ ID NO: 46913 - DNA, 22 bp, Artificial Sequence
  chemically synthesized
catgaagagaagctgttcctgg

SEQ ID NO: 46914 - DNA, 22 bp, Artificial Sequence
  chemically synthesized
ttcctggcttgtggtgagcaaa

SEQ ID NO: 46915 - DNA, 22 bp, Artificial Sequence
  chemically synthesized
ctggcttgtggtgagcaaaact

SEQ ID NO: 46916 - DNA, 22 bp, Artificial Sequence
  chemically synthesized
gcttgtggtgagcaaaactccc

SEQ ID NO: 46917 - DNA, 22 bp, Artificial Sequence
  chemically synthesized
gtggtgagcaaaactccctgga

SEQ ID NO: 46918 - DNA, 22 bp, Artificial Sequence
  chemically synthesized
tggtgagcaaaactccctggat

SEQ ID NO: 46919 - DNA, 22 bp, Artificial Sequence
  chemically synthesized
cctggattgagtcgagacctgg

SEQ ID NO: 46920 - DNA, 22 bp, Artificial Sequence
  chemically synthesized
gattgagtcgagacctggattc

SEQ ID NO: 46921 - DNA, 22 bp, Artificial Sequence
  chemically synthesized
agtcgagacctggattctagtt

SEQ ID NO: 46922 - DNA, 22 bp, Artificial Sequence
  chemically synthesized
gattctagttccactactttga

SEQ ID NO: 46923 - DNA, 22 bp, Artificial Sequence
  chemically synthesized
tagttccactactttgaattct

SEQ ID NO: 46924 - DNA, 22 bp, Artificial Sequence
  chemically synthesized
gttccactactttgaattctct

SEQ ID NO: 46925 - DNA, 22 bp, Artificial Sequence
  chemically synthesized
cactactttgaattctctaggt

SEQ ID NO: 46926 - DNA, 22 bp, Artificial Sequence
  chemically synthesized
ctttgaattctctaggttcaca

SEQ ID NO: 46927 - DNA, 22 bp, Artificial Sequence
  chemically synthesized
tgaattctctaggttcacagtc

SEQ ID NO: 46928 - DNA, 22 bp, Artificial Sequence
  chemically synthesized
gaattctctaggttcacagtcc

SEQ ID NO: 46929 - DNA, 22 bp, Artificial Sequence
  chemically synthesized
aattctctaggttcacagtcct

SEQ ID NO: 46930 - DNA, 22 bp, Artificial Sequence
  chemically synthesized
tctaggttcacagtcctaaatc

SEQ ID NO: 46931 - DNA, 22 bp, Artificial Sequence
  chemically synthesized
taggttcacagtcctaaatcct

SEQ ID NO: 46932 - DNA, 22 bp, Artificial Sequence
  chemically synthesized
ggttcacagtcctaaatcctca

SEQ ID NO: 46933 - DNA, 22 bp, Artificial Sequence
  chemically synthesized
acagtcctaaatcctcagagaa

SEQ ID NO: 46934 - DNA, 22 bp, Artificial Sequence
  chemically synthesized
aatcctcagagaaggacagact

SEQ ID NO: 46935 - DNA, 22 bp, Artificial Sequence
  chemically synthesized
agagaaggacagacttgagggc

SEQ ID NO: 46936 - DNA, 22 bp, Artificial Sequence
  chemically synthesized
gagggcagacagccacaggtgg

SEQ ID NO: 46937 - DNA, 22 bp, Artificial Sequence
  chemically synthesized
agggcagacagccacaggtggc

SEQ ID NO: 46938 - DNA, 22 bp, Artificial Sequence
  chemically synthesized
gcatgggctgaggcagcacaca

SEQ ID NO: 46939 - DNA, 22 bp, Artificial Sequence
  chemically synthesized
aggcagcacacaaggactctga

SEQ ID NO: 46940 - DNA, 22 bp, Artificial Sequence
  chemically synthesized
tgagccacaccagccatctcct

SEQ ID NO: 46941 - DNA, 22 bp, Artificial Sequence
  chemically synthesized
agccacaccagccatctccttg

SEQ ID NO: 46942 - DNA, 22 bp, Artificial Sequence
  chemically synthesized
cttgtggactttcctgagagca

SEQ ID NO: 46943 - DNA, 22 bp, Artificial Sequence
  chemically synthesized
gtggactttcctgagagcacgt

SEQ ID NO: 46944 - DNA, 22 bp, Artificial Sequence
  chemically synthesized
tggactttcctgagagcacgtg

SEQ ID NO: 46945 - DNA, 22 bp, Artificial Sequence
  chemically synthesized
tcctgagagcacgtgcagctag

SEQ ID NO: 46946 - DNA, 22 bp, Artificial Sequence
  chemically synthesized
cctgagagcacgtgcagctagc

SEQ ID NO: 46947 - DNA, 22 bp, Artificial Sequence
  chemically synthesized
ctgagagcacgtgcagctagca

SEQ ID NO: 46948 - DNA, 22 bp, Artificial Sequence
  chemically synthesized
agagcacgtgcagctagcagtg

SEQ ID NO: 46949 - DNA, 22 bp, Artificial Sequence
  chemically synthesized
gcagtgctccaagcactctctg

SEQ ID NO: 46950 - DNA, 22 bp, Artificial Sequence
  chemically synthesized
caagcactctctgagaggcttc

SEQ ID NO: 46951 - DNA, 22 bp, Artificial Sequence
  chemically synthesized
tctgagaggcttccaggctgga

SEQ ID NO: 46952 - DNA, 22 bp, Artificial Sequence
  chemically synthesized
tgagaggcttccaggctggagc

SEQ ID NO: 46953 - DNA, 22 bp, Artificial Sequence
  chemically synthesized
agaggcttccaggctggagctc

SEQ ID NO: 46954 - DNA, 22 bp, Artificial Sequence
  chemically synthesized
ccaggctggagctctgagaggc

SEQ ID NO: 46955 - DNA, 22 bp, Artificial Sequence
  chemically synthesized
caggctggagctctgagaggct

SEQ ID NO: 46956 - DNA, 22 bp, Artificial Sequence
  chemically synthesized
gagctctgagaggcttccaggc

SEQ ID NO: 46957 - DNA, 22 bp, Artificial Sequence
  chemically synthesized
tgagaggcttccaggctgggct

SEQ ID NO: 46958 - DNA, 22 bp, Artificial Sequence
  chemically synthesized
agaggcttccaggctgggctac

SEQ ID NO: 46959 - DNA, 22 bp, Artificial Sequence
  chemically synthesized
ccaggctgggctacctccagcc

SEQ ID NO: 46960 - DNA, 22 bp, Artificial Sequence
  chemically synthesized
caggctgggctacctccagcca

SEQ ID NO: 46961 - DNA, 22 bp, Artificial Sequence
  chemically synthesized
ggctacctccagccatgtggtg

SEQ ID NO: 46962 - DNA, 22 bp, Artificial Sequence
  chemically synthesized
cctccagccatgtggtggaaac

SEQ ID NO: 46963 - DNA, 22 bp, Artificial Sequence
  chemically synthesized
cagccatgtggtggaaactggt

SEQ ID NO: 46964 - DNA, 22 bp, Artificial Sequence
  chemically synthesized
gtagcaaaggaagcccagaagg

SEQ ID NO: 46965 - DNA, 22 bp, Artificial Sequence
  chemically synthesized
aactagaaggctaaggaacacc

SEQ ID NO: 46966 - DNA, 22 bp, Artificial Sequence
  chemically synthesized
gaaggctaaggaacaccccggc

SEQ ID NO: 46967 - DNA, 22 bp, Artificial Sequence
  chemically synthesized
aggaacaccccggccactggtg

SEQ ID NO: 46968 - DNA, 22 bp, Artificial Sequence
  chemically synthesized
gtgggatcgcagtgctgagcca

SEQ ID NO: 46969 - DNA, 22 bp, Artificial Sequence
  chemically synthesized
agccatgagccctaccaggcaa

SEQ ID NO: 46970 - DNA, 22 bp, Artificial Sequence
  chemically synthesized
ccaggcaacccatttctgggca

SEQ ID NO: 46971 - DNA, 22 bp, Artificial Sequence
  chemically synthesized
ctgggcagtcccaagacttgga

SEQ ID NO: 46972 - DNA, 22 bp, Artificial Sequence
  chemically synthesized
tgggcagtcccaagacttggag

SEQ ID NO: 46973 - DNA, 22 bp, Artificial Sequence
  chemically synthesized
ggcagtcccaagacttggagaa

SEQ ID NO: 46974 - DNA, 22 bp, Artificial Sequence
  chemically synthesized
ggagaacaagccatctgaaaat

SEQ ID NO: 46975 - DNA, 22 bp, Artificial Sequence
  chemically synthesized
gagaacaagccatctgaaaata

SEQ ID NO: 46976 - DNA, 22 bp, Artificial Sequence
  chemically synthesized
aaaatagaattaaatagccagg

SEQ ID NO: 46977 - DNA, 22 bp, Artificial Sequence
  chemically synthesized
aatagccaggtgcggtggctca

SEQ ID NO: 46978 - DNA, 22 bp, Artificial Sequence
  chemically synthesized
acacctgtaatctcagcatttt

SEQ ID NO: 46979 - DNA, 22 bp, Artificial Sequence
  chemically synthesized
taatctcagcattttgggaggc

SEQ ID NO: 46980 - DNA, 22 bp, Artificial Sequence
  chemically synthesized
agcattttgggaggccgaggcg

SEQ ID NO: 46981 - DNA, 22 bp, Artificial Sequence
  chemically synthesized
tgggaggccgaggcgtgtgggt

SEQ ID NO: 46982 - DNA, 22 bp, Artificial Sequence
  chemically synthesized
gggaggccgaggcgtgtgggtc

SEQ ID NO: 46983 - DNA, 22 bp, Artificial Sequence
  chemically synthesized
ggaggccgaggcgtgtgggtca

SEQ ID NO: 46984 - DNA, 22 bp, Artificial Sequence
  chemically synthesized
aggtcaggagttcaagaccagc

SEQ ID NO: 46985 - DNA, 22 bp, Artificial Sequence
  chemically synthesized
aagaccagcctagccaacatgg

SEQ ID NO: 46986 - DNA, 22 bp, Artificial Sequence
  chemically synthesized
gccaacatggtgaaaccccatc

SEQ ID NO: 46987 - DNA, 22 bp, Artificial Sequence
  chemically synthesized
tacttaaaaaaaaaaaaaaaaa

SEQ ID NO: 46988 - DNA, 22 bp, Artificial Sequence
  chemically synthesized
cttaaaaaaaaaaaaaaaaaaa

SEQ ID NO: 46989 - DNA, 22 bp, Artificial Sequence
  chemically synthesized
aaaaaaaaaaaaaaaaaaaaaa

SEQ ID NO: 46990 - DNA, 22 bp, Artificial Sequence
  chemically synthesized
aaaaaaaaaaaaaaaaaaaaaa

SEQ ID NO: 46991 - DNA, 22 bp, Artificial Sequence
  chemically synthesized
taatcccagctacttgggaggc

SEQ ID NO: 46992 - DNA, 22 bp, Artificial Sequence
  chemically synthesized
cttgggaggctgaggcaggaga

SEQ ID NO: 46993 - DNA, 22 bp, Artificial Sequence
  chemically synthesized
gggaggctgaggcaggagaatc

SEQ ID NO: 46994 - DNA, 22 bp, Artificial Sequence
  chemically synthesized
ggaggctgaggcaggagaatca

SEQ ID NO: 46995 - DNA, 22 bp, Artificial Sequence
  chemically synthesized
aggcaggagaatcacttgaacc

SEQ ID NO: 46996 - DNA, 22 bp, Artificial Sequence
  chemically synthesized
gaacctgggaggcggaggctgc

SEQ ID NO: 46997 - DNA, 22 bp, Artificial Sequence
  chemically synthesized
aacctgggaggcggaggctgca

SEQ ID NO: 46998 - DNA, 22 bp, Artificial Sequence
  chemically synthesized
ggaggcggaggctgcaatgagc

SEQ ID NO: 46999 - DNA, 22 bp, Artificial Sequence
  chemically synthesized
caatgagccgagatcgtagcac

SEQ ID NO: 47000 - DNA, 22 bp, Artificial Sequence
  chemically synthesized
cactccagcctgggcgacagag

SEQ ID NO: 47001 - DNA, 22 bp, Artificial Sequence
  chemically synthesized
cagcctgggcgacagagcgaga

SEQ ID NO: 47002 - DNA, 22 bp, Artificial Sequence
  chemically synthesized
ggcgacagagcgagactccatc

SEQ ID NO: 47003 - DNA, 22 bp, Artificial Sequence
  chemically synthesized
catctcaaaaaaaaaaaaaaat

SEQ ID NO: 47004 - DNA, 22 bp, Artificial Sequence
  chemically synthesized
aaaaaaaaaaaaaaattaaatt

SEQ ID NO: 47005 - DNA, 22 bp, Artificial Sequence
  chemically synthesized
aattgggtgggggagtttctta

SEQ ID NO: 47006 - DNA, 22 bp, Artificial Sequence
  chemically synthesized
ggtgggggagtttcttaggaaa

SEQ ID NO: 47007 - DNA, 22 bp, Artificial Sequence
  chemically synthesized
cttaggaaaaaaatcagagttg

SEQ ID NO: 47008 - DNA, 22 bp, Artificial Sequence
  chemically synthesized
ttaggaaaaaaatcagagttgt

SEQ ID NO: 47009 - DNA, 22 bp, Artificial Sequence
  chemically synthesized
aggaaaaaaatcagagttgtgc

SEQ ID NO: 47010 - DNA, 22 bp, Artificial Sequence
  chemically synthesized
ggaaaaaaatcagagttgtgca

SEQ ID NO: 47011 - DNA, 22 bp, Artificial Sequence
  chemically synthesized
tgcaaataaatctagttggtct

SEQ ID NO: 47012 - DNA, 22 bp, Artificial Sequence
  chemically synthesized
gttggtctgactgtctttacaa

SEQ ID NO: 47013 - DNA, 22 bp, Artificial Sequence
  chemically synthesized
gtctgactgtctttacaacaca

SEQ ID NO: 47014 - DNA, 22 bp, Artificial Sequence
  chemically synthesized
actgtctttacaacacaatgaa

SEQ ID NO: 47015 - DNA, 22 bp, Artificial Sequence
  chemically synthesized
tctttacaacacaatgaaaggg

SEQ ID NO: 47016 - DNA, 22 bp, Artificial Sequence
  chemically synthesized
tacaacacaatgaaagggtaag

SEQ ID NO: 47017 - DNA, 22 bp, Artificial Sequence
  chemically synthesized
acaacacaatgaaagggtaagg

SEQ ID NO: 47018 - DNA, 22 bp, Artificial Sequence
  chemically synthesized
caacacaatgaaagggtaaggc

SEQ ID NO: 47019 - DNA, 22 bp, Artificial Sequence
  chemically synthesized
tgaattccattgataagagagg

SEQ ID NO: 47020 - DNA, 22 bp, Artificial Sequence
  chemically synthesized
cattgataagagaggatttccc

SEQ ID NO: 47021 - DNA, 22 bp, Artificial Sequence
  chemically synthesized
ataagagaggatttccctactc

SEQ ID NO: 47022 - DNA, 22 bp, Artificial Sequence
  chemically synthesized
ccctactcaaatatcaaaggtc

SEQ ID NO: 47023 - DNA, 22 bp, Artificial Sequence
  chemically synthesized
cctactcaaatatcaaaggtct

SEQ ID NO: 47024 - DNA, 22 bp, Artificial Sequence
  chemically synthesized
ctcaaatatcaaaggtcttgca

SEQ ID NO: 47025 - DNA, 22 bp, Artificial Sequence
  chemically synthesized
aaatatcaaaggtcttgcatac

SEQ ID NO: 47026 - DNA, 22 bp, Artificial Sequence
  chemically synthesized
gcatacacatacactaaaacag

SEQ ID NO: 47027 - DNA, 22 bp, Artificial Sequence
  chemically synthesized
catacacatacactaaaacaga

SEQ ID NO: 47028 - DNA, 22 bp, Artificial Sequence
  chemically synthesized
aaacagaaaaaagaaaaaaaaa

SEQ ID NO: 47029 - DNA, 22 bp, Artificial Sequence
  chemically synthesized
ttaaactcatccaagagccagt

SEQ ID NO: 47030 - DNA, 22 bp, Artificial Sequence
  chemically synthesized
taaactcatccaagagccagtc

SEQ ID NO: 47031 - DNA, 22 bp, Artificial Sequence
  chemically synthesized
aaactcatccaagagccagtca

SEQ ID NO: 47032 - DNA, 22 bp, Artificial Sequence
  chemically synthesized
aactcatccaagagccagtcaa

SEQ ID NO: 47033 - DNA, 22 bp, Artificial Sequence
  chemically synthesized
atccaagagccagtcaaagcca

SEQ ID NO: 47034 - DNA, 22 bp, Artificial Sequence
  chemically synthesized
ccgaactcagccgttctccctc

SEQ ID NO: 47035 - DNA, 22 bp, Artificial Sequence
  chemically synthesized
cgaactcagccgttctccctct

SEQ ID NO: 47036 - DNA, 22 bp, Artificial Sequence
  chemically synthesized
agccgttctccctctggtgaga

SEQ ID NO: 47037 - DNA, 22 bp, Artificial Sequence
  chemically synthesized
tccctctggtgagacaggctct

SEQ ID NO: 47038 - DNA, 22 bp, Artificial Sequence
  chemically synthesized
cctctggtgagacaggctctag

SEQ ID NO: 47039 - DNA, 22 bp, Artificial Sequence
  chemically synthesized
tggtgagacaggctctagcttg

SEQ ID NO: 47040 - DNA, 22 bp, Artificial Sequence
  chemically synthesized
gtgagacaggctctagcttgtt

SEQ ID NO: 47041 - DNA, 22 bp, Artificial Sequence
  chemically synthesized
tagcttgtttccagaatgccac

SEQ ID NO: 47042 - DNA, 22 bp, Artificial Sequence
  chemically synthesized
gcttgtttccagaatgccacta

SEQ ID NO: 47043 - DNA, 22 bp, Artificial Sequence
  chemically synthesized
gtttccagaatgccactaccag

SEQ ID NO: 47044 - DNA, 22 bp, Artificial Sequence
  chemically synthesized
tttccagaatgccactaccagc

SEQ ID NO: 47045 - DNA, 22 bp, Artificial Sequence
  chemically synthesized
ccagaatgccactaccagcttc

SEQ ID NO: 47046 - DNA, 22 bp, Artificial Sequence
  chemically synthesized
cagaatgccactaccagcttcc

SEQ ID NO: 47047 - DNA, 22 bp, Artificial Sequence
  chemically synthesized
ccagcttcccacacctccaggg

SEQ ID NO: 47048 - DNA, 22 bp, Artificial Sequence
  chemically synthesized
cccacacctccaggggaccccc

SEQ ID NO: 47049 - DNA, 22 bp, Artificial Sequence
  chemically synthesized
ccacacctccaggggaccccct

SEQ ID NO: 47050 - DNA, 22 bp, Artificial Sequence
  chemically synthesized
caggggaccccctaactccaaa

SEQ ID NO: 47051 - DNA, 22 bp, Artificial Sequence
  chemically synthesized
actccaaagtgttgcccagacc

SEQ ID NO: 47052 - DNA, 22 bp, Artificial Sequence
  chemically synthesized
caaagtgttgcccagacctaag

SEQ ID NO: 47053 - DNA, 22 bp, Artificial Sequence
  chemically synthesized
cccagacctaaggatcctcccc

SEQ ID NO: 47054 - DNA, 22 bp, Artificial Sequence
  chemically synthesized
aggatcctcccccacgtgctcc

SEQ ID NO: 47055 - DNA, 22 bp, Artificial Sequence
  chemically synthesized
ccccacgtgctccttccccaac

SEQ ID NO: 47056 - DNA, 22 bp, Artificial Sequence
  chemically synthesized
cttccccaacactggcttccag

SEQ ID NO: 47057 - DNA, 22 bp, Artificial Sequence
  chemically synthesized
ccccaacactggcttccaggtg

SEQ ID NO: 47058 - DNA, 22 bp, Artificial Sequence
  chemically synthesized
cccaacactggcttccaggtga

SEQ ID NO: 47059 - DNA, 22 bp, Artificial Sequence
  chemically synthesized
gcttccaggtgagcgagacaga

SEQ ID NO: 47060 - DNA, 22 bp, Artificial Sequence
  chemically synthesized
ccaggtgagcgagacagaatct

SEQ ID NO: 47061 - DNA, 22 bp, Artificial Sequence
  chemically synthesized
caggtgagcgagacagaatctg

SEQ ID NO: 47062 - DNA, 22 bp, Artificial Sequence
  chemically synthesized
caagcagagttcactgcttgac

SEQ ID NO: 47063 - DNA, 22 bp, Artificial Sequence
  chemically synthesized
actgcttgaccatggggtgaaa

SEQ ID NO: 47064 - DNA, 22 bp, Artificial Sequence
  chemically synthesized
cttgaccatggggtgaaagcca

SEQ ID NO: 47065 - DNA, 22 bp, Artificial Sequence
  chemically synthesized
gaccatggggtgaaagccacaa

SEQ ID NO: 47066 - DNA, 22 bp, Artificial Sequence
  chemically synthesized
accatggggtgaaagccacaaa

SEQ ID NO: 47067 - DNA, 22 bp, Artificial Sequence
  chemically synthesized
tcccaaccccagcactttcact

SEQ ID NO: 47068 - DNA, 22 bp, Artificial Sequence
  chemically synthesized
tcactttttcactttctcccca

SEQ ID NO: 47069 - DNA, 22 bp, Artificial Sequence
  chemically synthesized
cactttttcactttctccccag

SEQ ID NO: 47070 - DNA, 22 bp, Artificial Sequence
  chemically synthesized
actttttcactttctccccagg

SEQ ID NO: 47071 - DNA, 22 bp, Artificial Sequence
  chemically synthesized
tttcactttctccccagggagg

SEQ ID NO: 47072 - DNA, 22 bp, Artificial Sequence
  chemically synthesized
ttcactttctccccagggagga

SEQ ID NO: 47073 - DNA, 22 bp, Artificial Sequence
  chemically synthesized
tcactttctccccagggaggaa

SEQ ID NO: 47074 - DNA, 22 bp, Artificial Sequence
  chemically synthesized
cactttctccccagggaggaag

SEQ ID NO: 47075 - DNA, 22 bp, Artificial Sequence
  chemically synthesized
actttctccccagggaggaagg

SEQ ID NO: 47076 - DNA, 22 bp, Artificial Sequence
  chemically synthesized
tctccccagggaggaaggggga

SEQ ID NO: 47077 - DNA, 22 bp, Artificial Sequence
  chemically synthesized
ctccccagggaggaagggggaa

SEQ ID NO: 47078 - DNA, 22 bp, Artificial Sequence
  chemically synthesized
tccccagggaggaagggggaaa

SEQ ID NO: 47079 - DNA, 22 bp, Artificial Sequence
  chemically synthesized
cccagggaggaagggggaaata

SEQ ID NO: 47080 - DNA, 22 bp, Artificial Sequence
  chemically synthesized
gcccagcctcacaccttccctg

SEQ ID NO: 47081 - DNA, 22 bp, Artificial Sequence
  chemically synthesized
cccagcctcacaccttccctgg

SEQ ID NO: 47082 - DNA, 22 bp, Artificial Sequence
  chemically synthesized
acaccttccctggacagggagc

SEQ ID NO: 47083 - DNA, 22 bp, Artificial Sequence
  chemically synthesized
ccctggacagggagctggggat

SEQ ID NO: 47084 - DNA, 22 bp, Artificial Sequence
  chemically synthesized
cctggacagggagctggggatc

SEQ ID NO: 47085 - DNA, 22 bp, Artificial Sequence
  chemically synthesized
gacagggagctggggatccatt

SEQ ID NO: 47086 - DNA, 22 bp, Artificial Sequence
  chemically synthesized
gggatccattcaaagcccggtc

SEQ ID NO: 47087 - DNA, 22 bp, Artificial Sequence
  chemically synthesized
aaagcccggtctttctctgttc

SEQ ID NO: 47088 - DNA, 22 bp, Artificial Sequence
  chemically synthesized
tctctgttcaatcaagcagcgt

SEQ ID NO: 47089 - DNA, 22 bp, Artificial Sequence
  chemically synthesized
ctctgttcaatcaagcagcgtg

SEQ ID NO: 47090 - DNA, 22 bp, Artificial Sequence
  chemically synthesized
tctgttcaatcaagcagcgtga

SEQ ID NO: 47091 - DNA, 22 bp, Artificial Sequence
  chemically synthesized
tgttcaatcaagcagcgtgagc

SEQ ID NO: 47092 - DNA, 22 bp, Artificial Sequence
  chemically synthesized
ttcaatcaagcagcgtgagcaa

SEQ ID NO: 47093 - DNA, 22 bp, Artificial Sequence
  chemically synthesized
aatcaagcagcgtgagcaaagt

SEQ ID NO: 47094 - DNA, 22 bp, Artificial Sequence
  chemically synthesized
aatactacatatgaaccagcat

SEQ ID NO: 47095 - DNA, 22 bp, Artificial Sequence
  chemically synthesized
catatgaaccagcattatgtta

SEQ ID NO: 47096 - DNA, 22 bp, Artificial Sequence
  chemically synthesized
tgttaggcaccaagaaggcaca

SEQ ID NO: 47097 - DNA, 22 bp, Artificial Sequence
  chemically synthesized
ggcaccaagaaggcacaaaaaa

SEQ ID NO: 47098 - DNA, 22 bp, Artificial Sequence
  chemically synthesized
ctgccctccaaaaggttataat

SEQ ID NO: 47099 - DNA, 22 bp, Artificial Sequence
  chemically synthesized
ccctccaaaaggttataatttg

SEQ ID NO: 47100 - DNA, 22 bp, Artificial Sequence
  chemically synthesized
caaaaggttataatttgaggag

SEQ ID NO: 47101 - DNA, 22 bp, Artificial Sequence
  chemically synthesized
taatttgaggaggagaaaatac

SEQ ID NO: 47102 - DNA, 22 bp, Artificial Sequence
  chemically synthesized
gaggaggagaaaatacacccac

SEQ ID NO: 47103 - DNA, 22 bp, Artificial Sequence
  chemically synthesized
aggaggagaaaatacacccacg

SEQ ID NO: 47104 - DNA, 22 bp, Artificial Sequence
  chemically synthesized
atccccttttaactaatcccag

SEQ ID NO: 47105 - DNA, 22 bp, Artificial Sequence
  chemically synthesized
ttaactaatcccagagtgacac

SEQ ID NO: 47106 - DNA, 22 bp, Artificial Sequence
  chemically synthesized
taactaatcccagagtgacacc

SEQ ID NO: 47107 - DNA, 22 bp, Artificial Sequence
  chemically synthesized
aactaatcccagagtgacacct

SEQ ID NO: 47108 - DNA, 22 bp, Artificial Sequence
  chemically synthesized
actaatcccagagtgacacctc

SEQ ID NO: 47109 - DNA, 22 bp, Artificial Sequence
  chemically synthesized
atcccagagtgacacctcctcc

SEQ ID NO: 47110 - DNA, 22 bp, Artificial Sequence
  chemically synthesized
ctccaaagaaagccaagttgct

SEQ ID NO: 47111 - DNA, 22 bp, Artificial Sequence
  chemically synthesized
caaagaaagccaagttgctgac

SEQ ID NO: 47112 - DNA, 22 bp, Artificial Sequence
  chemically synthesized
ctgacagagtcaggccttccta

SEQ ID NO: 47113 - DNA, 22 bp, Artificial Sequence
  chemically synthesized
acagagtcaggccttcctagtt

SEQ ID NO: 47114 - DNA, 22 bp, Artificial Sequence
  chemically synthesized
cctagttacctagaaaaatggc

SEQ ID NO: 47115 - DNA, 22 bp, Artificial Sequence
  chemically synthesized
ctagttacctagaaaaatggcc

SEQ ID NO: 47116 - DNA, 22 bp, Artificial Sequence
  chemically synthesized
gttacctagaaaaatggcctgg

SEQ ID NO: 47117 - DNA, 22 bp, Artificial Sequence
  chemically synthesized
cctagaaaaatggcctggggag

SEQ ID NO: 47118 - DNA, 22 bp, Artificial Sequence
  chemically synthesized
gaaaaatggcctggggaggtcc

SEQ ID NO: 47119 - DNA, 22 bp, Artificial Sequence
  chemically synthesized
gggaggtccagcccactagaag

SEQ ID NO: 47120 - DNA, 22 bp, Artificial Sequence
  chemically synthesized
gaaggagatacagaaacaagcc

SEQ ID NO: 47121 - DNA, 22 bp, Artificial Sequence
  chemically synthesized
cataaatatctgtgggacccag

SEQ ID NO: 47122 - DNA, 22 bp, Artificial Sequence
  chemically synthesized
tgggacccagctacctctctga

SEQ ID NO: 47123 - DNA, 22 bp, Artificial Sequence
  chemically synthesized
cctctctgaaacacagcccagt

SEQ ID NO: 47124 - DNA, 22 bp, Artificial Sequence
  chemically synthesized
tctgaaacacagcccagtgctt

SEQ ID NO: 47125 - DNA, 22 bp, Artificial Sequence
  chemically synthesized
tgaaacacagcccagtgctttc

SEQ ID NO: 47126 - DNA, 22 bp, Artificial Sequence
  chemically synthesized
aaacacagcccagtgctttcag

SEQ ID NO: 47127 - DNA, 22 bp, Artificial Sequence
  chemically synthesized
tcaggcagggagaaagtggtgg

SEQ ID NO: 47128 - DNA, 22 bp, Artificial Sequence
  chemically synthesized
caggcagggagaaagtggtggt

SEQ ID NO: 47129 - DNA, 22 bp, Artificial Sequence
  chemically synthesized
aggcagggagaaagtggtggtg

SEQ ID NO: 47130 - DNA, 22 bp, Artificial Sequence
  chemically synthesized
acacagacatgggggcttccaa

SEQ ID NO: 47131 - DNA, 22 bp, Artificial Sequence
  chemically synthesized
ccaaatgactcttgatcaccca

SEQ ID NO: 47132 - DNA, 22 bp, Artificial Sequence
  chemically synthesized
caaatgactcttgatcacccaa

SEQ ID NO: 47133 - DNA, 22 bp, Artificial Sequence
  chemically synthesized
ttgatcacccaactttccagct

SEQ ID NO: 47134 - DNA, 22 bp, Artificial Sequence
  chemically synthesized
gatcacccaactttccagcttc

SEQ ID NO: 47135 - DNA, 22 bp, Artificial Sequence
  chemically synthesized
atcacccaactttccagcttcc

SEQ ID NO: 47136 - DNA, 22 bp, Artificial Sequence
  chemically synthesized
tccagcttccccatttctgccc

SEQ ID NO: 47137 - DNA, 22 bp, Artificial Sequence
  chemically synthesized
ccagcttccccatttctgcccc

SEQ ID NO: 47138 - DNA, 22 bp, Artificial Sequence
  chemically synthesized
cagcttccccatttctgcccct

SEQ ID NO: 47139 - DNA, 22 bp, Artificial Sequence
  chemically synthesized
ccccatttctgcccctgacttg

SEQ ID NO: 47140 - DNA, 22 bp, Artificial Sequence
  chemically synthesized
cccatttctgcccctgacttga

SEQ ID NO: 47141 - DNA, 22 bp, Artificial Sequence
  chemically synthesized
ctgcccctgacttgagctccca

SEQ ID NO: 47142 - DNA, 22 bp, Artificial Sequence
  chemically synthesized
tgcccctgacttgagctcccag

SEQ ID NO: 47143 - DNA, 22 bp, Artificial Sequence
  chemically synthesized
cccctgacttgagctcccaggc

SEQ ID NO: 47144 - DNA, 22 bp, Artificial Sequence
  chemically synthesized
acttgagctcccaggccactca

SEQ ID NO: 47145 - DNA, 22 bp, Artificial Sequence
  chemically synthesized
gagctcccaggccactcaaccc

SEQ ID NO: 47146 - DNA, 22 bp, Artificial Sequence
  chemically synthesized
agctcccaggccactcaaccca

SEQ ID NO: 47147 - DNA, 22 bp, Artificial Sequence
  chemically synthesized
ccaggccactcaacccactgtg

SEQ ID NO: 47148 - DNA, 22 bp, Artificial Sequence
  chemically synthesized
aacccactgtgaggtcttactg

SEQ ID NO: 47149 - DNA, 22 bp, Artificial Sequence
  chemically synthesized
tgaggtcttactgtggggatta

SEQ ID NO: 47150 - DNA, 22 bp, Artificial Sequence
  chemically synthesized
actgtggggattaccgagtcac

SEQ ID NO: 47151 - DNA, 22 bp, Artificial Sequence
  chemically synthesized
ctgtggggattaccgagtcacc

SEQ ID NO: 47152 - DNA, 22 bp, Artificial Sequence
  chemically synthesized
tggggattaccgagtcaccacc

SEQ ID NO: 47153 - DNA, 22 bp, Artificial Sequence
  chemically synthesized
ccgagtcaccaccaggctgcgc

SEQ ID NO: 47154 - DNA, 22 bp, Artificial Sequence
  chemically synthesized
cgctgaacaggaagtgaacaag

SEQ ID NO: 47155 - DNA, 22 bp, Artificial Sequence
  chemically synthesized
aacaggaagtgaacaagtcaat

SEQ ID NO: 47156 - DNA, 22 bp, Artificial Sequence
  chemically synthesized
gagaaagatccaataagggaat

SEQ ID NO: 47157 - DNA, 22 bp, Artificial Sequence
  chemically synthesized
tctgggcaccgctgggccaaca

SEQ ID NO: 47158 - DNA, 22 bp, Artificial Sequence
  chemically synthesized
tgggcaccgctgggccaacacc

SEQ ID NO: 47159 - DNA, 22 bp, Artificial Sequence
  chemically synthesized
ggcaccgctgggccaacaccca

SEQ ID NO: 47160 - DNA, 22 bp, Artificial Sequence
  chemically synthesized
ggccaacacccacggaggggtc

SEQ ID NO: 47161 - DNA, 22 bp, Artificial Sequence
  chemically synthesized
gaatacaaataccctggagtct

SEQ ID NO: 47162 - DNA, 22 bp, Artificial Sequence
  chemically synthesized
gagtctgaagggcggtggcccc

SEQ ID NO: 47163 - DNA, 22 bp, Artificial Sequence
  chemically synthesized
aagggcggtggcccctcttctc

SEQ ID NO: 47164 - DNA, 22 bp, Artificial Sequence
  chemically synthesized
ttctcaccacttcaattatgtc

SEQ ID NO: 47165 - DNA, 22 bp, Artificial Sequence
  chemically synthesized
ctcaccacttcaattatgtctt

SEQ ID NO: 47166 - DNA, 22 bp, Artificial Sequence
  chemically synthesized
tcaccacttcaattatgtcttc

SEQ ID NO: 47167 - DNA, 22 bp, Artificial Sequence
  chemically synthesized
accacttcaattatgtcttcat

SEQ ID NO: 47168 - DNA, 22 bp, Artificial Sequence
  chemically synthesized
caattatgtcttcattgaactg

SEQ ID NO: 47169 - DNA, 22 bp, Artificial Sequence
  chemically synthesized
aattatgtcttcattgaactgg

SEQ ID NO: 47170 - DNA, 22 bp, Artificial Sequence
  chemically synthesized
tgtcttcattgaactgggttat

SEQ ID NO: 47171 - DNA, 22 bp, Artificial Sequence
  chemically synthesized
cattgaactgggttatgaaaaa

SEQ ID NO: 47172 - DNA, 22 bp, Artificial Sequence
  chemically synthesized
attgaactgggttatgaaaaag

SEQ ID NO: 47173 - DNA, 22 bp, Artificial Sequence
  chemically synthesized
aactgggttatgaaaaagggaa

SEQ ID NO: 47174 - DNA, 22 bp, Artificial Sequence
  chemically synthesized
ggttatgaaaaagggaagcagg

SEQ ID NO: 47175 - DNA, 22 bp, Artificial Sequence
  chemically synthesized
tgaaaaagggaagcagggattg

SEQ ID NO: 47176 - DNA, 22 bp, Artificial Sequence
  chemically synthesized
aaaatctagccttgtggccata

SEQ ID NO: 47177 - DNA, 22 bp, Artificial Sequence
  chemically synthesized
gccttgtggccataagcctgtg

SEQ ID NO: 47178 - DNA, 22 bp, Artificial Sequence
  chemically synthesized
gtggccataagcctgtgatgac

SEQ ID NO: 47179 - DNA, 22 bp, Artificial Sequence
  chemically synthesized
tggccataagcctgtgatgact

SEQ ID NO: 47180 - DNA, 22 bp, Artificial Sequence
  chemically synthesized
tgatgactcatgccagctttgg

SEQ ID NO: 47181 - DNA, 22 bp, Artificial Sequence
  chemically synthesized
atgccagctttgggtgctctaa

SEQ ID NO: 47182 - DNA, 22 bp, Artificial Sequence
  chemically synthesized
tgggtgctctaagatgctttcc

SEQ ID NO: 47183 - DNA, 22 bp, Artificial Sequence
  chemically synthesized
gggtgctctaagatgctttccc

SEQ ID NO: 47184 - DNA, 22 bp, Artificial Sequence
  chemically synthesized
ggtgctctaagatgctttccca

SEQ ID NO: 47185 - DNA, 22 bp, Artificial Sequence
  chemically synthesized
taagatgctttcccatgtctgt

SEQ ID NO: 47186 - DNA, 22 bp, Artificial Sequence
  chemically synthesized
agatgctttcccatgtctgtaa

SEQ ID NO: 47187 - DNA, 22 bp, Artificial Sequence
  chemically synthesized
tcccatgtctgtaatgcttttc

SEQ ID NO: 47188 - DNA, 22 bp, Artificial Sequence
  chemically synthesized
cccatgtctgtaatgcttttca

SEQ ID NO: 47189 - DNA, 22 bp, Artificial Sequence
  chemically synthesized
ccatgtctgtaatgcttttcat

SEQ ID NO: 47190 - DNA, 22 bp, Artificial Sequence
  chemically synthesized
taatgcttttcatatcatccta

SEQ ID NO: 47191 - DNA, 22 bp, Artificial Sequence
  chemically synthesized
ttcatatcatcctacacactca

SEQ ID NO: 47192 - DNA, 22 bp, Artificial Sequence
  chemically synthesized
tcatatcatcctacacactcac

SEQ ID NO: 47193 - DNA, 22 bp, Artificial Sequence
  chemically synthesized
catatcatcctacacactcact

SEQ ID NO: 47194 - DNA, 22 bp, Artificial Sequence
  chemically synthesized
atatcatcctacacactcactg

SEQ ID NO: 47195 - DNA, 22 bp, Artificial Sequence
  chemically synthesized
cacactcactgtcacctctcct

SEQ ID NO: 47196 - DNA, 22 bp, Artificial Sequence
  chemically synthesized
actgtcacctctcctcacccca

SEQ ID NO: 47197 - DNA, 22 bp, Artificial Sequence
  chemically synthesized
tcacctctcctcaccccagcac

SEQ ID NO: 47198 - DNA, 22 bp, Artificial Sequence
  chemically synthesized
tcctcaccccagcacacagaaa

SEQ ID NO: 47199 - DNA, 22 bp, Artificial Sequence
  chemically synthesized
ctcaccccagcacacagaaaag

SEQ ID NO: 47200 - DNA, 22 bp, Artificial Sequence
  chemically synthesized
accccagcacacagaaaagatg

SEQ ID NO: 47201 - DNA, 22 bp, Artificial Sequence
  chemically synthesized
attatgtgcacttaggttttgt

SEQ ID NO: 47202 - DNA, 22 bp, Artificial Sequence
  chemically synthesized
ttatgtgcacttaggttttgtt

SEQ ID NO: 47203 - DNA, 22 bp, Artificial Sequence
  chemically synthesized
tgtgcacttaggttttgttgta

SEQ ID NO: 47204 - DNA, 22 bp, Artificial Sequence
  chemically synthesized
aggttttgttgtactattaaac

SEQ ID NO: 47205 - DNA, 22 bp, Artificial Sequence
  chemically synthesized
ggttttgttgtactattaaaca

SEQ ID NO: 47206 - DNA, 22 bp, Artificial Sequence
  chemically synthesized
tgttgtactattaaacacaatg

SEQ ID NO: 47207 - DNA, 22 bp, Artificial Sequence
  chemically synthesized
gttgtactattaaacacaatga

SEQ ID NO: 47208 - DNA, 22 bp, Artificial Sequence
  chemically synthesized
ttgtactattaaacacaatgac

SEQ ID NO: 47209 - DNA, 22 bp, Artificial Sequence
  chemically synthesized
tactattaaacacaatgaccca

SEQ ID NO: 47210 - DNA, 22 bp, Artificial Sequence
  chemically synthesized
ttaaacacaatgacccactcct

SEQ ID NO: 47211 - DNA, 22 bp, Artificial Sequence
  chemically synthesized
aacacaatgacccactcctatt

SEQ ID NO: 47212 - DNA, 22 bp, Artificial Sequence
  chemically synthesized
ctattattaaaacacaggtttt

SEQ ID NO: 47213 - DNA, 22 bp, Artificial Sequence
  chemically synthesized
ttattaaaacacaggttttgct

SEQ ID NO: 47214 - DNA, 22 bp, Artificial Sequence
  chemically synthesized
ttaaaacacaggttttgctgga

SEQ ID NO: 47215 - DNA, 22 bp, Artificial Sequence
  chemically synthesized
aaacacaggttttgctggaaac

SEQ ID NO: 47216 - DNA, 22 bp, Artificial Sequence
  chemically synthesized
tgctggaaactcaaaaaagact

SEQ ID NO: 47217 - DNA, 22 bp, Artificial Sequence
  chemically synthesized
gctggaaactcaaaaaagactt

SEQ ID NO: 47218 - DNA, 22 bp, Artificial Sequence
  chemically synthesized
ctggaaactcaaaaaagacttg

SEQ ID NO: 47219 - DNA, 22 bp, Artificial Sequence
  chemically synthesized
gaaactcaaaaaagacttggct

SEQ ID NO: 47220 - DNA, 22 bp, Artificial Sequence
  chemically synthesized
aaaaaagacttggctctgctgg

SEQ ID NO: 47221 - DNA, 22 bp, Artificial Sequence
  chemically synthesized
ggctctgctggctcacagggaa

SEQ ID NO: 47222 - DNA, 22 bp, Artificial Sequence
  chemically synthesized
gctctgctggctcacagggaat

SEQ ID NO: 47223 - DNA, 22 bp, Artificial Sequence
  chemically synthesized
tgctggctcacagggaatctgg

SEQ ID NO: 47224 - DNA, 22 bp, Artificial Sequence
  chemically synthesized
ctggctcacagggaatctgggc

SEQ ID NO: 47225 - DNA, 22 bp, Artificial Sequence
  chemically synthesized
gctcacagggaatctgggctcc

SEQ ID NO: 47226 - DNA, 22 bp, Artificial Sequence
  chemically synthesized
acagggaatctgggctccgctc

SEQ ID NO: 47227 - DNA, 22 bp, Artificial Sequence
  chemically synthesized
ggctccgctcttccaaaacctt

SEQ ID NO: 47228 - DNA, 22 bp, Artificial Sequence
  chemically synthesized
cgctcttccaaaacctttgttc

SEQ ID NO: 47229 - DNA, 22 bp, Artificial Sequence
  chemically synthesized
ttccaaaacctttgttctccag

SEQ ID NO: 47230 - DNA, 22 bp, Artificial Sequence
  chemically synthesized
ccaaaacctttgttctccagat

SEQ ID NO: 47231 - DNA, 22 bp, Artificial Sequence
  chemically synthesized
caaaacctttgttctccagatg

SEQ ID NO: 47232 - DNA, 22 bp, Artificial Sequence
  chemically synthesized
tgttctccagatgtcagtgcaa

SEQ ID NO: 47233 - DNA, 22 bp, Artificial Sequence
  chemically synthesized
gttctccagatgtcagtgcaaa

SEQ ID NO: 47234 - DNA, 22 bp, Artificial Sequence
  chemically synthesized
ttctccagatgtcagtgcaaag

SEQ ID NO: 47235 - DNA, 22 bp, Artificial Sequence
  chemically synthesized
tccagatgtcagtgcaaagtta

SEQ ID NO: 47236 - DNA, 22 bp, Artificial Sequence
  chemically synthesized
cagatgtcagtgcaaagttatg

SEQ ID NO: 47237 - DNA, 22 bp, Artificial Sequence
  chemically synthesized
tgaacagctctccccctgagct

SEQ ID NO: 47238 - DNA, 22 bp, Artificial Sequence
  chemically synthesized
tccccctgagctaacttaccga

SEQ ID NO: 47239 - DNA, 22 bp, Artificial Sequence
  chemically synthesized
cccctgagctaacttaccgagc

SEQ ID NO: 47240 - DNA, 22 bp, Artificial Sequence
  chemically synthesized
agctaacttaccgagcagtaag

SEQ ID NO: 47241 - DNA, 22 bp, Artificial Sequence
  chemically synthesized
acttaccgagcagtaagtgagg

SEQ ID NO: 47242 - DNA, 22 bp, Artificial Sequence
  chemically synthesized
accgagcagtaagtgaggcaag

SEQ ID NO: 47243 - DNA, 22 bp, Artificial Sequence
  chemically synthesized
ccgagcagtaagtgaggcaaga

SEQ ID NO: 47244 - DNA, 22 bp, Artificial Sequence
  chemically synthesized
actatatttctcagcctccatg

SEQ ID NO: 47245 - DNA, 22 bp, Artificial Sequence
  chemically synthesized
tatttctcagcctccatgaagt

SEQ ID NO: 47246 - DNA, 22 bp, Artificial Sequence
  chemically synthesized
ctcagcctccatgaagtcgtca

SEQ ID NO: 47247 - DNA, 22 bp, Artificial Sequence
  chemically synthesized
tcagcctccatgaagtcgtcac

SEQ ID NO: 47248 - DNA, 22 bp, Artificial Sequence
  chemically synthesized
agcctccatgaagtcgtcactg

SEQ ID NO: 47249 - DNA, 22 bp, Artificial Sequence
  chemically synthesized
catgaagtcgtcactgggagag

SEQ ID NO: 47250 - DNA, 22 bp, Artificial Sequence
  chemically synthesized
ggagaggagccaagagggaggg

SEQ ID NO: 47251 - DNA, 22 bp, Artificial Sequence
  chemically synthesized
aggagacaagatcgtaactcac

SEQ ID NO: 47252 - DNA, 22 bp, Artificial Sequence
  chemically synthesized
ggagacaagatcgtaactcacc

SEQ ID NO: 47253 - DNA, 22 bp, Artificial Sequence
  chemically synthesized
accgtcatccggggaagtggag

SEQ ID NO: 47254 - DNA, 22 bp, Artificial Sequence
  chemically synthesized
gtgtcaggagtggagagctaag

SEQ ID NO: 47255 - DNA, 22 bp, Artificial Sequence
  chemically synthesized
agctcaatatggacaaggacag

SEQ ID NO: 47256 - DNA, 22 bp, Artificial Sequence
  chemically synthesized
aatatggacaaggacagagagg

SEQ ID NO: 47257 - DNA, 22 bp, Artificial Sequence
  chemically synthesized
ggatgggagaaatgtggcatca

SEQ ID NO: 47258 - DNA, 22 bp, Artificial Sequence
  chemically synthesized
ggagtgaaagtttaactgccct

SEQ ID NO: 47259 - DNA, 22 bp, Artificial Sequence
  chemically synthesized
aactgccctcaaagatggctga

SEQ ID NO: 47260 - DNA, 22 bp, Artificial Sequence
  chemically synthesized
actgccctcaaagatggctgac

SEQ ID NO: 47261 - DNA, 22 bp, Artificial Sequence
  chemically synthesized
ccctcaaagatggctgacaaag

SEQ ID NO: 47262 - DNA, 22 bp, Artificial Sequence
  chemically synthesized
aaagatggctgacaaagatcta

SEQ ID NO: 47263 - DNA, 22 bp, Artificial Sequence
  chemically synthesized
acaaagatctagcattcctagt

SEQ ID NO: 47264 - DNA, 22 bp, Artificial Sequence
  chemically synthesized
gcattcctagtggacaccaagc

SEQ ID NO: 47265 - DNA, 22 bp, Artificial Sequence
  chemically synthesized
ctagtggacaccaagctgagca

SEQ ID NO: 47266 - DNA, 22 bp, Artificial Sequence
  chemically synthesized
gtggacaccaagctgagcatga

SEQ ID NO: 47267 - DNA, 22 bp, Artificial Sequence
  chemically synthesized
agcatgagtcatcaatgaagca

SEQ ID NO: 47268 - DNA, 22 bp, Artificial Sequence
  chemically synthesized
gtttttaaaaaagcaagcagga

SEQ ID NO: 47269 - DNA, 22 bp, Artificial Sequence
  chemically synthesized
ttaaaaaagcaagcaggacata

SEQ ID NO: 47270 - DNA, 22 bp, Artificial Sequence
  chemically synthesized
taaaaaagcaagcaggacataa

SEQ ID NO: 47271 - DNA, 22 bp, Artificial Sequence
  chemically synthesized
aaaaaagcaagcaggacataag

SEQ ID NO: 47272 - DNA, 22 bp, Artificial Sequence
  chemically synthesized
aaaaagcaagcaggacataaga

SEQ ID NO: 47273 - DNA, 22 bp, Artificial Sequence
  chemically synthesized
aagaatgtggaaaacactaaga

SEQ ID NO: 47274 - DNA, 22 bp, Artificial Sequence
  chemically synthesized
agatatcttgccattggactct

SEQ ID NO: 47275 - DNA, 22 bp, Artificial Sequence
  chemically synthesized
gccattggactctgtagttatc

SEQ ID NO: 47276 - DNA, 22 bp, Artificial Sequence
  chemically synthesized
ccattggactctgtagttatca

SEQ ID NO: 47277 - DNA, 22 bp, Artificial Sequence
  chemically synthesized
gactctgtagttatcagactaa

SEQ ID NO: 47278 - DNA, 22 bp, Artificial Sequence
  chemically synthesized
tgtagttatcagactaatgttt

SEQ ID NO: 47279 - DNA, 22 bp, Artificial Sequence
  chemically synthesized
tagttatcagactaatgtttga

SEQ ID NO: 47280 - DNA, 22 bp, Artificial Sequence
  chemically synthesized
tcagactaatgtttgagtaaaa

SEQ ID NO: 47281 - DNA, 22 bp, Artificial Sequence
  chemically synthesized
atgtttgagtaaaagagctgga

SEQ ID NO: 47282 - DNA, 22 bp, Artificial Sequence
  chemically synthesized
gagtaaaagagctggaaaacca

SEQ ID NO: 47283 - DNA, 22 bp, Artificial Sequence
  chemically synthesized
agtaaaagagctggaaaaccag

SEQ ID NO: 47284 - DNA, 22 bp, Artificial Sequence
  chemically synthesized
gaaaaccagcagattctaaaga

SEQ ID NO: 47285 - DNA, 22 bp, Artificial Sequence
  chemically synthesized
taaagagaggcatagaaacaat

SEQ ID NO: 47286 - DNA, 22 bp, Artificial Sequence
  chemically synthesized
aagagaggcatagaaacaataa

SEQ ID NO: 47287 - DNA, 22 bp, Artificial Sequence
  chemically synthesized
caagataatagatccatgagtt

SEQ ID NO: 47288 - DNA, 22 bp, Artificial Sequence
  chemically synthesized
aggttcaggaaagagattattt

SEQ ID NO: 47289 - DNA, 22 bp, Artificial Sequence
  chemically synthesized
aggaaagagattatttaggaag

SEQ ID NO: 47290 - DNA, 22 bp, Artificial Sequence
  chemically synthesized
tttaggaagaagaagtggcgga

SEQ ID NO: 47291 - DNA, 22 bp, Artificial Sequence
  chemically synthesized
aggaagaagaagtggcggagaa

SEQ ID NO: 47292 - DNA, 22 bp, Artificial Sequence
  chemically synthesized
ggaagaagaagtggcggagaat

SEQ ID NO: 47293 - DNA, 22 bp, Artificial Sequence
  chemically synthesized
cagcccaaagctggtgatgaga

SEQ ID NO: 47294 - DNA, 22 bp, Artificial Sequence
  chemically synthesized
agcccaaagctggtgatgagat

SEQ ID NO: 47295 - DNA, 22 bp, Artificial Sequence
  chemically synthesized
gtgatgagatactttgtcgtct

SEQ ID NO: 47296 - DNA, 22 bp, Artificial Sequence
  chemically synthesized
tgtcgtctctggaatgaagagg

SEQ ID NO: 47297 - DNA, 22 bp, Artificial Sequence
  chemically synthesized
gtcgtctctggaatgaagagga

SEQ ID NO: 47298 - DNA, 22 bp, Artificial Sequence
  chemically synthesized
tcgtctctggaatgaagaggaa

SEQ ID NO: 47299 - DNA, 22 bp, Artificial Sequence
  chemically synthesized
tggaatgaagaggaaatgggtt

SEQ ID NO: 47300 - DNA, 22 bp, Artificial Sequence
  chemically synthesized
gaatgaagaggaaatgggttta

SEQ ID NO: 47301 - DNA, 22 bp, Artificial Sequence
  chemically synthesized
aaaatgaagcataagggatcga

SEQ ID NO: 47302 - DNA, 22 bp, Artificial Sequence
  chemically synthesized
aaatgaagcataagggatcgaa

SEQ ID NO: 47303 - DNA, 22 bp, Artificial Sequence
  chemically synthesized
cctgcgattgagaggtgtcttt

SEQ ID NO: 47304 - DNA, 22 bp, Artificial Sequence
  chemically synthesized
ctgcgattgagaggtgtcttta

SEQ ID NO: 47305 - DNA, 22 bp, Artificial Sequence
  chemically synthesized
cgattgagaggtgtctttaaaa

SEQ ID NO: 47306 - DNA, 22 bp, Artificial Sequence
  chemically synthesized
agaggtgtctttaaaaatagaa

SEQ ID NO: 47307 - DNA, 22 bp, Artificial Sequence
  chemically synthesized
taaaaatagaactagggtggtg

SEQ ID NO: 47308 - DNA, 22 bp, Artificial Sequence
  chemically synthesized
aaaaatagaactagggtggtga

SEQ ID NO: 47309 - DNA, 22 bp, Artificial Sequence
  chemically synthesized
aaaatagaactagggtggtgag

SEQ ID NO: 47310 - DNA, 22 bp, Artificial Sequence
  chemically synthesized
gggtggtgaggaagaggttggg

SEQ ID NO: 47311 - DNA, 22 bp, Artificial Sequence
  chemically synthesized
ggctggccaattctggagggcc

SEQ ID NO: 47312 - DNA, 22 bp, Artificial Sequence
  chemically synthesized
gccaattctggagggccatctg

SEQ ID NO: 47313 - DNA, 22 bp, Artificial Sequence
  chemically synthesized
tggagggccatctgcccctgag

SEQ ID NO: 47314 - DNA, 22 bp, Artificial Sequence
  chemically synthesized
gagggccatctgcccctgagag

SEQ ID NO: 47315 - DNA, 22 bp, Artificial Sequence
  chemically synthesized
cccctgagagggtacacgttcc

SEQ ID NO: 47316 - DNA, 22 bp, Artificial Sequence
  chemically synthesized
agagggtacacgttccttcacc

SEQ ID NO: 47317 - DNA, 22 bp, Artificial Sequence
  chemically synthesized
cttcaccaccccaactccatct

SEQ ID NO: 47318 - DNA, 22 bp, Artificial Sequence
  chemically synthesized
caccaccccaactccatctact

SEQ ID NO: 47319 - DNA, 22 bp, Artificial Sequence
  chemically synthesized
accaccccaactccatctactc

SEQ ID NO: 47320 - DNA, 22 bp, Artificial Sequence
  chemically synthesized
catctactccattatctccagt

SEQ ID NO: 47321 - DNA, 22 bp, Artificial Sequence
  chemically synthesized
ctccattatctccagttatctg

SEQ ID NO: 47322 - DNA, 22 bp, Artificial Sequence
  chemically synthesized
cattatctccagttatctgaat

SEQ ID NO: 47323 - DNA, 22 bp, Artificial Sequence
  chemically synthesized
tctccagttatctgaataaaaa

SEQ ID NO: 47324 - DNA, 22 bp, Artificial Sequence
  chemically synthesized
cagttatctgaataaaaaagcc

SEQ ID NO: 47325 - DNA, 22 bp, Artificial Sequence
  chemically synthesized
tctgaataaaaaagccaagcta

SEQ ID NO: 47326 - DNA, 22 bp, Artificial Sequence
  chemically synthesized
aataaaaaagccaagctattcc

SEQ ID NO: 47327 - DNA, 22 bp, Artificial Sequence
  chemically synthesized
ttccctgggcacaccatgtaaa

SEQ ID NO: 47328 - DNA, 22 bp, Artificial Sequence
  chemically synthesized
cctgggcacaccatgtaaaccc

SEQ ID NO: 47329 - DNA, 22 bp, Artificial Sequence
  chemically synthesized
ggcacaccatgtaaaccccaga

SEQ ID NO: 47330 - DNA, 22 bp, Artificial Sequence
  chemically synthesized
tgggagccctagcaggaaaggt

SEQ ID NO: 47331 - DNA, 22 bp, Artificial Sequence
  chemically synthesized
gggagccctagcaggaaaggtg

SEQ ID NO: 47332 - DNA, 22 bp, Artificial Sequence
  chemically synthesized
ggagccctagcaggaaaggtgg

SEQ ID NO: 47333 - DNA, 22 bp, Artificial Sequence
  chemically synthesized
gcaggaaaggtggtaggaagac

SEQ ID NO: 47334 - DNA, 22 bp, Artificial Sequence
  chemically synthesized
tctgcaacagcacaggtgattg

SEQ ID NO: 47335 - DNA, 22 bp, Artificial Sequence
  chemically synthesized
tgcaacagcacaggtgattggg

SEQ ID NO: 47336 - DNA, 22 bp, Artificial Sequence
  chemically synthesized
caacagcacaggtgattgggtg

SEQ ID NO: 47337 - DNA, 22 bp, Artificial Sequence
  chemically synthesized
ggtggtggttttgttgcttggg

SEQ ID NO: 47338 - DNA, 22 bp, Artificial Sequence
  chemically synthesized
tgttgcttgggttttaccatgg

SEQ ID NO: 47339 - DNA, 22 bp, Artificial Sequence
  chemically synthesized
gttgcttgggttttaccatggg

SEQ ID NO: 47340 - DNA, 22 bp, Artificial Sequence
  chemically synthesized
ttgcttgggttttaccatgggc

SEQ ID NO: 47341 - DNA, 22 bp, Artificial Sequence
  chemically synthesized
cttgggttttaccatgggctcc

SEQ ID NO: 47342 - DNA, 22 bp, Artificial Sequence
  chemically synthesized
gggttttaccatgggctcccca

SEQ ID NO: 47343 - DNA, 22 bp, Artificial Sequence
  chemically synthesized
ggttttaccatgggctccccag

SEQ ID NO: 47344 - DNA, 22 bp, Artificial Sequence
  chemically synthesized
taccatgggctccccaggttag

SEQ ID NO: 47345 - DNA, 22 bp, Artificial Sequence
  chemically synthesized
accatgggctccccaggttagc

SEQ ID NO: 47346 - DNA, 22 bp, Artificial Sequence
  chemically synthesized
ccatgggctccccaggttagca

SEQ ID NO: 47347 - DNA, 22 bp, Artificial Sequence
  chemically synthesized
cccaggttagcactgccacaaa

SEQ ID NO: 47348 - DNA, 22 bp, Artificial Sequence
  chemically synthesized
gcactgccacaaaagcaccagg

SEQ ID NO: 47349 - DNA, 22 bp, Artificial Sequence
  chemically synthesized
ccacaaaagcaccaggctcttc

SEQ ID NO: 47350 - DNA, 22 bp, Artificial Sequence
  chemically synthesized
ttcaacaaagctccagttaaga

SEQ ID NO: 47351 - DNA, 22 bp, Artificial Sequence
  chemically synthesized
caacaaagctccagttaagaaa

SEQ ID NO: 47352 - DNA, 22 bp, Artificial Sequence
  chemically synthesized
aacaaagctccagttaagaaaa

SEQ ID NO: 47353 - DNA, 22 bp, Artificial Sequence
  chemically synthesized
cagttaagaaaagcattccagc

SEQ ID NO: 47354 - DNA, 22 bp, Artificial Sequence
  chemically synthesized
agaaaagcattccagccatcac

SEQ ID NO: 47355 - DNA, 22 bp, Artificial Sequence
  chemically synthesized
cagccatcaccgataaaagcgt

SEQ ID NO: 47356 - DNA, 22 bp, Artificial Sequence
  chemically synthesized
ctctgcaaagcacatgcgggcc

SEQ ID NO: 47357 - DNA, 22 bp, Artificial Sequence
  chemically synthesized
tgcaaagcacatgcgggccacc

SEQ ID NO: 47358 - DNA, 22 bp, Artificial Sequence
  chemically synthesized
caaagcacatgcgggccacctc

SEQ ID NO: 47359 - DNA, 22 bp, Artificial Sequence
  chemically synthesized
tggctcctgctggccatggaga

SEQ ID NO: 47360 - DNA, 22 bp, Artificial Sequence
  chemically synthesized
gctcctgctggccatggagagg

SEQ ID NO: 47361 - DNA, 22 bp, Artificial Sequence
  chemically synthesized
ctgctggccatggagaggccat

SEQ ID NO: 47362 - DNA, 22 bp, Artificial Sequence
  chemically synthesized
ctggccatggagaggccatgtg

SEQ ID NO: 47363 - DNA, 22 bp, Artificial Sequence
  chemically synthesized
gccatggagaggccatgtgcga

SEQ ID NO: 47364 - DNA, 22 bp, Artificial Sequence
  chemically synthesized
gtacagtcagccaggaatgaaa

SEQ ID NO: 47365 - DNA, 22 bp, Artificial Sequence
  chemically synthesized
tgggccaagtctaccactgcct

SEQ ID NO: 47366 - DNA, 22 bp, Artificial Sequence
  chemically synthesized
ggccaagtctaccactgcctag

SEQ ID NO: 47367 - DNA, 22 bp, Artificial Sequence
  chemically synthesized
ccactgcctagcaagtagactc

SEQ ID NO: 47368 - DNA, 22 bp, Artificial Sequence
  chemically synthesized
cctagcaagtagactctggcac

SEQ ID NO: 47369 - DNA, 22 bp, Artificial Sequence
  chemically synthesized
gcaagtagactctggcactcac

SEQ ID NO: 47370 - DNA, 22 bp, Artificial Sequence
  chemically synthesized
tggcactcactcccctcttagc

SEQ ID NO: 47371 - DNA, 22 bp, Artificial Sequence
  chemically synthesized
gcactcactcccctcttagcct

SEQ ID NO: 47372 - DNA, 22 bp, Artificial Sequence
  chemically synthesized
actcccctcttagcctcaacct

SEQ ID NO: 47373 - DNA, 22 bp, Artificial Sequence
  chemically synthesized
ccctcttagcctcaacctttct

SEQ ID NO: 47374 - DNA, 22 bp, Artificial Sequence
  chemically synthesized
ttagcctcaacctttctcatct

SEQ ID NO: 47375 - DNA, 22 bp, Artificial Sequence
  chemically synthesized
agcctcaacctttctcatctgt

SEQ ID NO: 47376 - DNA, 22 bp, Artificial Sequence
  chemically synthesized
gcctcaacctttctcatctgta

SEQ ID NO: 47377 - DNA, 22 bp, Artificial Sequence
  chemically synthesized
aacctttctcatctgtaaaatg

SEQ ID NO: 47378 - DNA, 22 bp, Artificial Sequence
  chemically synthesized
tctcatctgtaaaatgacaggg

SEQ ID NO: 47379 - DNA, 22 bp, Artificial Sequence
  chemically synthesized
ctcatctgtaaaatgacagggt

SEQ ID NO: 47380 - DNA, 22 bp, Artificial Sequence
  chemically synthesized
tcatctgtaaaatgacagggtt

SEQ ID NO: 47381 - DNA, 22 bp, Artificial Sequence
  chemically synthesized
atctgtaaaatgacagggttaa

SEQ ID NO: 47382 - DNA, 22 bp, Artificial Sequence
  chemically synthesized
taaaatgacagggttaatgata

SEQ ID NO: 47383 - DNA, 22 bp, Artificial Sequence
  chemically synthesized
atgatatgacttcacaagtcta

SEQ ID NO: 47384 - DNA, 22 bp, Artificial Sequence
  chemically synthesized
cacaagtctatgtctacataga

SEQ ID NO: 47385 - DNA, 22 bp, Artificial Sequence
  chemically synthesized
acaagtctatgtctacatagaa

SEQ ID NO: 47386 - DNA, 22 bp, Artificial Sequence
  chemically synthesized
tgtctacatagaagatgctcaa

SEQ ID NO: 47387 - DNA, 22 bp, Artificial Sequence
  chemically synthesized
catagaagatgctcaataagta

SEQ ID NO: 47388 - DNA, 22 bp, Artificial Sequence
  chemically synthesized
aataagtattcactttggcttt

SEQ ID NO: 47389 - DNA, 22 bp, Artificial Sequence
  chemically synthesized
actttggctttccacgaaggaa

SEQ ID NO: 47390 - DNA, 22 bp, Artificial Sequence
  chemically synthesized
tggctttccacgaaggaaacta

SEQ ID NO: 47391 - DNA, 22 bp, Artificial Sequence
  chemically synthesized
ggctttccacgaaggaaactat

SEQ ID NO: 47392 - DNA, 22 bp, Artificial Sequence
  chemically synthesized
gctttccacgaaggaaactatc

SEQ ID NO: 47393 - DNA, 22 bp, Artificial Sequence
  chemically synthesized
tccacgaaggaaactatctatg

SEQ ID NO: 47394 - DNA, 22 bp, Artificial Sequence
  chemically synthesized
ccacgaaggaaactatctatgc

SEQ ID NO: 47395 - DNA, 22 bp, Artificial Sequence
  chemically synthesized
cacgaaggaaactatctatgct

SEQ ID NO: 47396 - DNA, 22 bp, Artificial Sequence
  chemically synthesized
tctatgctcaaagagctgtgct

SEQ ID NO: 47397 - DNA, 22 bp, Artificial Sequence
  chemically synthesized
tgctcaaagagctgtgctttct

SEQ ID NO: 47398 - DNA, 22 bp, Artificial Sequence
  chemically synthesized
aaagagctgtgctttcttctat

SEQ ID NO: 47399 - DNA, 22 bp, Artificial Sequence
  chemically synthesized
tgctttcttctatgattcctca

SEQ ID NO: 47400 - DNA, 22 bp, Artificial Sequence
  chemically synthesized
tcttctatgattcctcagaaac

SEQ ID NO: 47401 - DNA, 22 bp, Artificial Sequence
  chemically synthesized
cttctatgattcctcagaaact

SEQ ID NO: 47402 - DNA, 22 bp, Artificial Sequence
  chemically synthesized
ttctatgattcctcagaaactc

SEQ ID NO: 47403 - DNA, 22 bp, Artificial Sequence
  chemically synthesized
ctatgattcctcagaaactctt

SEQ ID NO: 47404 - DNA, 22 bp, Artificial Sequence
  chemically synthesized
tatgattcctcagaaactcttg

SEQ ID NO: 47405 - DNA, 22 bp, Artificial Sequence
  chemically synthesized
tgattcctcagaaactcttgtc

SEQ ID NO: 47406 - DNA, 22 bp, Artificial Sequence
  chemically synthesized
ctcagaaactcttgtcgactag

SEQ ID NO: 47407 - DNA, 22 bp, Artificial Sequence
  chemically synthesized
agaaactcttgtcgactagagg

SEQ ID NO: 47408 - DNA, 22 bp, Artificial Sequence
  chemically synthesized
ttgtcgactagaggaacaagaa

SEQ ID NO: 47409 - DNA, 22 bp, Artificial Sequence
  chemically synthesized
gtcgactagaggaacaagaacc

SEQ ID NO: 47410 - DNA, 22 bp, Artificial Sequence
  chemically synthesized
tcgactagaggaacaagaacct

SEQ ID NO: 47411 - DNA, 22 bp, Artificial Sequence
  chemically synthesized
gaggaacaagaaccttactcta

SEQ ID NO: 47412 - DNA, 22 bp, Artificial Sequence
  chemically synthesized
actctaaaacccaattttaggg

SEQ ID NO: 47413 - DNA, 22 bp, Artificial Sequence
  chemically synthesized
ctctaaaacccaattttagggg

SEQ ID NO: 47414 - DNA, 22 bp, Artificial Sequence
  chemically synthesized
taaaacccaattttaggggagg

SEQ ID NO: 47415 - DNA, 22 bp, Artificial Sequence
  chemically synthesized
aaacccaattttaggggaggag

SEQ ID NO: 47416 - DNA, 22 bp, Artificial Sequence
  chemically synthesized
taggggaggagagaaaattttt

SEQ ID NO: 47417 - DNA, 22 bp, Artificial Sequence
  chemically synthesized
aggggaggagagaaaattttta

SEQ ID NO: 47418 - DNA, 22 bp, Artificial Sequence
  chemically synthesized
ggggaggagagaaaatttttaa

SEQ ID NO: 47419 - DNA, 22 bp, Artificial Sequence
  chemically synthesized
ttaaaagactttaaattaatta

SEQ ID NO: 47420 - DNA, 22 bp, Artificial Sequence
  chemically synthesized
taaaagactttaaattaattac

SEQ ID NO: 47421 - DNA, 22 bp, Artificial Sequence
  chemically synthesized
aaaagactttaaattaattact

SEQ ID NO: 47422 - DNA, 22 bp, Artificial Sequence
  chemically synthesized
aaagactttaaattaattactt

SEQ ID NO: 47423 - DNA, 22 bp, Artificial Sequence
  chemically synthesized
taaattaattacttgaaggcca

SEQ ID NO: 47424 - DNA, 22 bp, Artificial Sequence
  chemically synthesized
aaattaattacttgaaggccag

SEQ ID NO: 47425 - DNA, 22 bp, Artificial Sequence
  chemically synthesized
aattaattacttgaaggccaga

SEQ ID NO: 47426 - DNA, 22 bp, Artificial Sequence
  chemically synthesized
attacttgaaggccagaggcat

SEQ ID NO: 47427 - DNA, 22 bp, Artificial Sequence
  chemically synthesized
cttgaaggccagaggcatttgc

SEQ ID NO: 47428 - DNA, 22 bp, Artificial Sequence
  chemically synthesized
gaaggccagaggcatttgctta

SEQ ID NO: 47429 - DNA, 22 bp, Artificial Sequence
  chemically synthesized
aaggccagaggcatttgcttat

SEQ ID NO: 47430 - DNA, 22 bp, Artificial Sequence
  chemically synthesized
gcttatgcctataatctcagaa

SEQ ID NO: 47431 - DNA, 22 bp, Artificial Sequence
  chemically synthesized
cttatgcctataatctcagaaa

SEQ ID NO: 47432 - DNA, 22 bp, Artificial Sequence
  chemically synthesized
atgcctataatctcagaaattt

SEQ ID NO: 47433 - DNA, 22 bp, Artificial Sequence
  chemically synthesized
tgcctataatctcagaaatttg

SEQ ID NO: 47434 - DNA, 22 bp, Artificial Sequence
  chemically synthesized
taatctcagaaatttggaaggc

SEQ ID NO: 47435 - DNA, 22 bp, Artificial Sequence
  chemically synthesized
agaaatttggaaggccacagag

SEQ ID NO: 47436 - DNA, 22 bp, Artificial Sequence
  chemically synthesized
ggaaggccacagagggaagatt

SEQ ID NO: 47437 - DNA, 22 bp, Artificial Sequence
  chemically synthesized
gaaggccacagagggaagattg

SEQ ID NO: 47438 - DNA, 22 bp, Artificial Sequence
  chemically synthesized
cttgaagctaggagttcaagac

SEQ ID NO: 47439 - DNA, 22 bp, Artificial Sequence
  chemically synthesized
gaagctaggagttcaagaccag

SEQ ID NO: 47440 - DNA, 22 bp, Artificial Sequence
  chemically synthesized
aagctaggagttcaagaccagc

SEQ ID NO: 47441 - DNA, 22 bp, Artificial Sequence
  chemically synthesized
ggagttcaagaccagcctgggc

SEQ ID NO: 47442 - DNA, 22 bp, Artificial Sequence
  chemically synthesized
aagaccagcctgggcaacatag

SEQ ID NO: 47443 - DNA, 22 bp, Artificial Sequence
  chemically synthesized
ggcaacatagcaaaaccctgtc

SEQ ID NO: 47444 - DNA, 22 bp, Artificial Sequence
  chemically synthesized
tctctacaaaaagcttaataaa

SEQ ID NO: 47445 - DNA, 22 bp, Artificial Sequence
  chemically synthesized
tacaaaaagcttaataaataaa

SEQ ID NO: 47446 - DNA, 22 bp, Artificial Sequence
  chemically synthesized
caaaaagcttaataaataaaat

SEQ ID NO: 47447 - DNA, 22 bp, Artificial Sequence
  chemically synthesized
aataaataaaataaaataattg

SEQ ID NO: 47448 - DNA, 22 bp, Artificial Sequence
  chemically synthesized
ataaataaaataaaataattgc

SEQ ID NO: 47449 - DNA, 22 bp, Artificial Sequence
  chemically synthesized
ctgagatttagctatcttttca

SEQ ID NO: 47450 - DNA, 22 bp, Artificial Sequence
  chemically synthesized
agatttagctatcttttcaaag

SEQ ID NO: 47451 - DNA, 22 bp, Artificial Sequence
  chemically synthesized
agctatcttttcaaagaaaata

SEQ ID NO: 47452 - DNA, 22 bp, Artificial Sequence
  chemically synthesized
gctatcttttcaaagaaaatat

SEQ ID NO: 47453 - DNA, 22 bp, Artificial Sequence
  chemically synthesized
tcttttcaaagaaaatataaaa

SEQ ID NO: 47454 - DNA, 22 bp, Artificial Sequence
  chemically synthesized
ttcaaagaaaatataaaatttg

SEQ ID NO: 47455 - DNA, 22 bp, Artificial Sequence
  chemically synthesized
tcaaagaaaatataaaatttgg

SEQ ID NO: 47456 - DNA, 22 bp, Artificial Sequence
  chemically synthesized
caaagaaaatataaaatttggc

SEQ ID NO: 47457 - DNA, 22 bp, Artificial Sequence
  chemically synthesized
aaagaaaatataaaatttggcc

SEQ ID NO: 47458 - DNA, 22 bp, Artificial Sequence
  chemically synthesized
ggcccagttttttatctatcaa

SEQ ID NO: 47459 - DNA, 22 bp, Artificial Sequence
  chemically synthesized
gcccagttttttatctatcaaa

SEQ ID NO: 47460 - DNA, 22 bp, Artificial Sequence
  chemically synthesized
tttatctatcaaacctagacct

SEQ ID NO: 47461 - DNA, 22 bp, Artificial Sequence
  chemically synthesized
ttatctatcaaacctagaccta

SEQ ID NO: 47462 - DNA, 22 bp, Artificial Sequence
  chemically synthesized
tatctatcaaacctagacctaa

SEQ ID NO: 47463 - DNA, 22 bp, Artificial Sequence
  chemically synthesized
atctatcaaacctagacctaaa

SEQ ID NO: 47464 - DNA, 22 bp, Artificial Sequence
  chemically synthesized
tctatcaaacctagacctaaaa

SEQ ID NO: 47465 - DNA, 22 bp, Artificial Sequence
  chemically synthesized
tcaaacctagacctaaaatcat

SEQ ID NO: 47466 - DNA, 22 bp, Artificial Sequence
  chemically synthesized
gacctaaaatcatcttgtctca

SEQ ID NO: 47467 - DNA, 22 bp, Artificial Sequence
  chemically synthesized
aaatcatcttgtctcattccct

SEQ ID NO: 47468 - DNA, 22 bp, Artificial Sequence
  chemically synthesized
gtctcattccctctgtcaacat

SEQ ID NO: 47469 - DNA, 22 bp, Artificial Sequence
  chemically synthesized
tctcattccctctgtcaacatc

SEQ ID NO: 47470 - DNA, 22 bp, Artificial Sequence
  chemically synthesized
attccctctgtcaacatctgct

SEQ ID NO: 47471 - DNA, 22 bp, Artificial Sequence
  chemically synthesized
cctctgtcaacatctgctgagc

SEQ ID NO: 47472 - DNA, 22 bp, Artificial Sequence
  chemically synthesized
tgtcaacatctgctgagctctc

SEQ ID NO: 47473 - DNA, 22 bp, Artificial Sequence
  chemically synthesized
tcaacatctgctgagctctcat

SEQ ID NO: 47474 - DNA, 22 bp, Artificial Sequence
  chemically synthesized
ctgagctctcataatacataaa

SEQ ID NO: 47475 - DNA, 22 bp, Artificial Sequence
  chemically synthesized
agctctcataatacataaaaca

SEQ ID NO: 47476 - DNA, 22 bp, Artificial Sequence
  chemically synthesized
tcataatacataaaacatcata

SEQ ID NO: 47477 - DNA, 22 bp, Artificial Sequence
  chemically synthesized
ataatacataaaacatcataga

SEQ ID NO: 47478 - DNA, 22 bp, Artificial Sequence
  chemically synthesized
gacctaccgttccataccagtg

SEQ ID NO: 47479 - DNA, 22 bp, Artificial Sequence
  chemically synthesized
ccgttccataccagtgtgttac

SEQ ID NO: 47480 - DNA, 22 bp, Artificial Sequence
  chemically synthesized
cataccagtgtgttacagcctg

SEQ ID NO: 47481 - DNA, 22 bp, Artificial Sequence
  chemically synthesized
cagcctgtcatgaagcagactc

SEQ ID NO: 47482 - DNA, 22 bp, Artificial Sequence
  chemically synthesized
tcatgaagcagactcagagaat

SEQ ID NO: 47483 - DNA, 22 bp, Artificial Sequence
  chemically synthesized
agagaatttggctactacttag

SEQ ID NO: 47484 - DNA, 22 bp, Artificial Sequence
  chemically synthesized
ggctactacttagtactaacat

SEQ ID NO: 47485 - DNA, 22 bp, Artificial Sequence
  chemically synthesized
gctactacttagtactaacatt

SEQ ID NO: 47486 - DNA, 22 bp, Artificial Sequence
  chemically synthesized
ctacttagtactaacatttaat

SEQ ID NO: 47487 - DNA, 22 bp, Artificial Sequence
  chemically synthesized
cttagtactaacatttaattta

SEQ ID NO: 47488 - DNA, 22 bp, Artificial Sequence
  chemically synthesized
agtactaacatttaatttagtt

SEQ ID NO: 47489 - DNA, 22 bp, Artificial Sequence
  chemically synthesized
gtactaacatttaatttagttt

SEQ ID NO: 47490 - DNA, 22 bp, Artificial Sequence
  chemically synthesized
acatttaatttagttttaaaat

SEQ ID NO: 47491 - DNA, 22 bp, Artificial Sequence
  chemically synthesized
aatttagttttaaaatgtctgc

SEQ ID NO: 47492 - DNA, 22 bp, Artificial Sequence
  chemically synthesized
atttagttttaaaatgtctgcg

SEQ ID NO: 47493 - DNA, 22 bp, Artificial Sequence
  chemically synthesized
agttttaaaatgtctgcgatag

SEQ ID NO: 47494 - DNA, 22 bp, Artificial Sequence
  chemically synthesized
gttttaaaatgtctgcgataga

SEQ ID NO: 47495 - DNA, 22 bp, Artificial Sequence
  chemically synthesized
taaaatgtctgcgatagagcag

SEQ ID NO: 47496 - DNA, 22 bp, Artificial Sequence
  chemically synthesized
aaaatgtctgcgatagagcaga

SEQ ID NO: 47497 - DNA, 22 bp, Artificial Sequence
  chemically synthesized
aaatgtctgcgatagagcagat

SEQ ID NO: 47498 - DNA, 22 bp, Artificial Sequence
  chemically synthesized
cgatagagcagattcaggatta

SEQ ID NO: 47499 - DNA, 22 bp, Artificial Sequence
  chemically synthesized
aggattatgcctgtaagatgac

SEQ ID NO: 47500 - DNA, 22 bp, Artificial Sequence
  chemically synthesized
tgcctgtaagatgacattccaa

SEQ ID NO: 47501 - DNA, 22 bp, Artificial Sequence
  chemically synthesized
taagatgacattccaactcacc

SEQ ID NO: 47502 - DNA, 22 bp, Artificial Sequence
  chemically synthesized
caactcacctgcatttaaatat

SEQ ID NO: 47503 - DNA, 22 bp, Artificial Sequence
  chemically synthesized
acctgcatttaaatatgaataa

SEQ ID NO: 47504 - DNA, 22 bp, Artificial Sequence
  chemically synthesized
catttaaatatgaataaagagt

SEQ ID NO: 47505 - DNA, 22 bp, Artificial Sequence
  chemically synthesized
aaatatgaataaagagtgagca

SEQ ID NO: 47506 - DNA, 22 bp, Artificial Sequence
  chemically synthesized
aatatgaataaagagtgagcag

SEQ ID NO: 47507 - DNA, 22 bp, Artificial Sequence
  chemically synthesized
tagcttcccacacgcaaaggca

SEQ ID NO: 47508 - DNA, 22 bp, Artificial Sequence
  chemically synthesized
agcttcccacacgcaaaggcat

SEQ ID NO: 47509 - DNA, 22 bp, Artificial Sequence
  chemically synthesized
gcttcccacacgcaaaggcatg

SEQ ID NO: 47510 - DNA, 22 bp, Artificial Sequence
  chemically synthesized
cccacacgcaaaggcatggggg

SEQ ID NO: 47511 - DNA, 22 bp, Artificial Sequence
  chemically synthesized
ccacacgcaaaggcatgggggg

SEQ ID NO: 47512 - DNA, 22 bp, Artificial Sequence
  chemically synthesized
ctctagatctgagaatcaccac

SEQ ID NO: 47513 - DNA, 22 bp, Artificial Sequence
  chemically synthesized
tagatctgagaatcaccacaca

SEQ ID NO: 47514 - DNA, 22 bp, Artificial Sequence
  chemically synthesized
gatctgagaatcaccacacacc

SEQ ID NO: 47515 - DNA, 22 bp, Artificial Sequence
  chemically synthesized
agaatcaccacacaccagagag

SEQ ID NO: 47516 - DNA, 22 bp, Artificial Sequence
  chemically synthesized
agaaagagttttaagagcctac

SEQ ID NO: 47517 - DNA, 22 bp, Artificial Sequence
  chemically synthesized
taagagcctactcatcatcaga

SEQ ID NO: 47518 - DNA, 22 bp, Artificial Sequence
  chemically synthesized
aagagcctactcatcatcagag

SEQ ID NO: 47519 - DNA, 22 bp, Artificial Sequence
  chemically synthesized
agagcctactcatcatcagagt

SEQ ID NO: 47520 - DNA, 22 bp, Artificial Sequence
  chemically synthesized
ctcatcatcagagttcacttaa

SEQ ID NO: 47521 - DNA, 22 bp, Artificial Sequence
  chemically synthesized
atcatcagagttcacttaaaag

SEQ ID NO: 47522 - DNA, 22 bp, Artificial Sequence
  chemically synthesized
acttaaaagtccatccagaatc

SEQ ID NO: 47523 - DNA, 22 bp, Artificial Sequence
  chemically synthesized
aaaagtccatccagaatcagaa

SEQ ID NO: 47524 - DNA, 22 bp, Artificial Sequence
  chemically synthesized
aaagtccatccagaatcagaac

SEQ ID NO: 47525 - DNA, 22 bp, Artificial Sequence
  chemically synthesized
ctgggggccgggcgtggatttt

SEQ ID NO: 47526 - DNA, 22 bp, Artificial Sequence
  chemically synthesized
ggggccgggcgtggattttaag

SEQ ID NO: 47527 - DNA, 22 bp, Artificial Sequence
  chemically synthesized
taaggactcatcaattactgtt

SEQ ID NO: 47528 - DNA, 22 bp, Artificial Sequence
  chemically synthesized
aaggactcatcaattactgttc

SEQ ID NO: 47529 - DNA, 22 bp, Artificial Sequence
  chemically synthesized
aggactcatcaattactgttca

SEQ ID NO: 47530 - DNA, 22 bp, Artificial Sequence
  chemically synthesized
atcaattactgttcaagttcag

SEQ ID NO: 47531 - DNA, 22 bp, Artificial Sequence
  chemically synthesized
ctgttcaagttcaggtcaagct

SEQ ID NO: 47532 - DNA, 22 bp, Artificial Sequence
  chemically synthesized
ttcaagttcaggtcaagctgga

SEQ ID NO: 47533 - DNA, 22 bp, Artificial Sequence
  chemically synthesized
aagttcaggtcaagctggatgg

SEQ ID NO: 47534 - DNA, 22 bp, Artificial Sequence
  chemically synthesized
aggtcaagctggatggacacca

SEQ ID NO: 47535 - DNA, 22 bp, Artificial Sequence
  chemically synthesized
gatggacaccatccacatggtg

SEQ ID NO: 47536 - DNA, 22 bp, Artificial Sequence
  chemically synthesized
ctcgatgggcaaagatcaagag

SEQ ID NO: 47537 - DNA, 22 bp, Artificial Sequence
  chemically synthesized
gatgggcaaagatcaagaggca

SEQ ID NO: 47538 - DNA, 22 bp, Artificial Sequence
  chemically synthesized
accaccagccgtatttcctggg

SEQ ID NO: 47539 - DNA, 22 bp, Artificial Sequence
  chemically synthesized
cctggggctgcttgttactgac

SEQ ID NO: 47540 - DNA, 22 bp, Artificial Sequence
  chemically synthesized
ctggggctgcttgttactgaca

SEQ ID NO: 47541 - DNA, 22 bp, Artificial Sequence
  chemically synthesized
gggctgcttgttactgacattc

SEQ ID NO: 47542 - DNA, 22 bp, Artificial Sequence
  chemically synthesized
cttgttactgacattctgtcat

SEQ ID NO: 47543 - DNA, 22 bp, Artificial Sequence
  chemically synthesized
gttactgacattctgtcattca

SEQ ID NO: 47544 - DNA, 22 bp, Artificial Sequence
  chemically synthesized
ttactgacattctgtcattcaa

SEQ ID NO: 47545 - DNA, 22 bp, Artificial Sequence
  chemically synthesized
ctgacattctgtcattcaaggt

SEQ ID NO: 47546 - DNA, 22 bp, Artificial Sequence
  chemically synthesized
acattctgtcattcaaggtggg

SEQ ID NO: 47547 - DNA, 22 bp, Artificial Sequence
  chemically synthesized
tgtcattcaaggtgggtcctga

SEQ ID NO: 47548 - DNA, 22 bp, Artificial Sequence
  chemically synthesized
tcattcaaggtgggtcctgaag

SEQ ID NO: 47549 - DNA, 22 bp, Artificial Sequence
  chemically synthesized
aaggtgggtcctgaagccacag

SEQ ID NO: 47550 - DNA, 22 bp, Artificial Sequence
  chemically synthesized
aagccacagtaagcaccaaatc

SEQ ID NO: 47551 - DNA, 22 bp, Artificial Sequence
  chemically synthesized
ctccctacaatccacagcaaaa

SEQ ID NO: 47552 - DNA, 22 bp, Artificial Sequence
  chemically synthesized
cctacaatccacagcaaaagga

SEQ ID NO: 47553 - DNA, 22 bp, Artificial Sequence
  chemically synthesized
caatccacagcaaaaggagagt

SEQ ID NO: 47554 - DNA, 22 bp, Artificial Sequence
  chemically synthesized
cttcttttaaagagcgatggca

SEQ ID NO: 47555 - DNA, 22 bp, Artificial Sequence
  chemically synthesized
cttttaaagagcgatggcacac

SEQ ID NO: 47556 - DNA, 22 bp, Artificial Sequence
  chemically synthesized
ttttaaagagcgatggcacaca

SEQ ID NO: 47557 - DNA, 22 bp, Artificial Sequence
  chemically synthesized
ttaaagagcgatggcacacatc

SEQ ID NO: 47558 - DNA, 22 bp, Artificial Sequence
  chemically synthesized
taaagagcgatggcacacatct

SEQ ID NO: 47559 - DNA, 22 bp, Artificial Sequence
  chemically synthesized
aaagagcgatggcacacatctc

SEQ ID NO: 47560 - DNA, 22 bp, Artificial Sequence
  chemically synthesized
aagagcgatggcacacatctct

SEQ ID NO: 47561 - DNA, 22 bp, Artificial Sequence
  chemically synthesized
tcaactcttgagagaaaatgga

SEQ ID NO: 47562 - DNA, 22 bp, Artificial Sequence
  chemically synthesized
aactcttgagagaaaatggaca

SEQ ID NO: 47563 - DNA, 22 bp, Artificial Sequence
  chemically synthesized
ttgagagaaaatggacagaagt

SEQ ID NO: 47564 - DNA, 22 bp, Artificial Sequence
  chemically synthesized
gagagaaaatggacagaagtgg

SEQ ID NO: 47565 - DNA, 22 bp, Artificial Sequence
  chemically synthesized
agagaaaatggacagaagtggg

SEQ ID NO: 47566 - DNA, 22 bp, Artificial Sequence
  chemically synthesized
ttcaatcctgataccagcagga

SEQ ID NO: 47567 - DNA, 22 bp, Artificial Sequence
  chemically synthesized
tcaatcctgataccagcaggaa

SEQ ID NO: 47568 - DNA, 22 bp, Artificial Sequence
  chemically synthesized
caatcctgataccagcaggaaa

SEQ ID NO: 47569 - DNA, 22 bp, Artificial Sequence
  chemically synthesized
aatcctgataccagcaggaaac

SEQ ID NO: 47570 - DNA, 22 bp, Artificial Sequence
  chemically synthesized
ataccagcaggaaacagggagt

SEQ ID NO: 47571 - DNA, 22 bp, Artificial Sequence
  chemically synthesized
tggtaggtactaccaaaccaag

SEQ ID NO: 47572 - DNA, 22 bp, Artificial Sequence
  chemically synthesized
gtaggtactaccaaaccaagaa

SEQ ID NO: 47573 - DNA, 22 bp, Artificial Sequence
  chemically synthesized
ccaaaccaagaagcttcttttc

SEQ ID NO: 47574 - DNA, 22 bp, Artificial Sequence
  chemically synthesized
cttttctcccaagtacaccagg

SEQ ID NO: 47575 - DNA, 22 bp, Artificial Sequence
  chemically synthesized
ttttctcccaagtacaccagga

SEQ ID NO: 47576 - DNA, 22 bp, Artificial Sequence
  chemically synthesized
ttctcccaagtacaccaggaac

SEQ ID NO: 47577 - DNA, 22 bp, Artificial Sequence
  chemically synthesized
tctcccaagtacaccaggaacc

SEQ ID NO: 47578 - DNA, 22 bp, Artificial Sequence
  chemically synthesized
ctcccaagtacaccaggaaccc

SEQ ID NO: 47579 - DNA, 22 bp, Artificial Sequence
  chemically synthesized
tcccaagtacaccaggaacccc

SEQ ID NO: 47580 - DNA, 22 bp, Artificial Sequence
  chemically synthesized
ccaagtacaccaggaacccctt

SEQ ID NO: 47581 - DNA, 22 bp, Artificial Sequence
  chemically synthesized
tcaaatacaggcgctacaaaaa

SEQ ID NO: 47582 - DNA, 22 bp, Artificial Sequence
  chemically synthesized
caaatacaggcgctacaaaaaa

SEQ ID NO: 47583 - DNA, 22 bp, Artificial Sequence
  chemically synthesized
aaatacaggcgctacaaaaaaa

SEQ ID NO: 47584 - DNA, 22 bp, Artificial Sequence
  chemically synthesized
caaaaaaagaaataggtgtgaa

SEQ ID NO: 47585 - DNA, 22 bp, Artificial Sequence
  chemically synthesized
aggactatgcatgctctgtcta

SEQ ID NO: 47586 - DNA, 22 bp, Artificial Sequence
  chemically synthesized
tgcatgctctgtctatgggtat

SEQ ID NO: 47587 - DNA, 22 bp, Artificial Sequence
  chemically synthesized
tgtctatgggtatcaacacctt

SEQ ID NO: 47588 - DNA, 22 bp, Artificial Sequence
  chemically synthesized
tctatgggtatcaacaccttta

SEQ ID NO: 47589 - DNA, 22 bp, Artificial Sequence
  chemically synthesized
tgggtatcaacacctttaaggc

SEQ ID NO: 47590 - DNA, 22 bp, Artificial Sequence
  chemically synthesized
taaggcattttgcggtcttttt

SEQ ID NO: 47591 - DNA, 22 bp, Artificial Sequence
  chemically synthesized
aaggcattttgcggtctttttg

SEQ ID NO: 47592 - DNA, 22 bp, Artificial Sequence
  chemically synthesized
aggcattttgcggtctttttga

SEQ ID NO: 47593 - DNA, 22 bp, Artificial Sequence
  chemically synthesized
tgcggtctttttgattctataa

SEQ ID NO: 47594 - DNA, 22 bp, Artificial Sequence
  chemically synthesized
gcggtctttttgattctataac

SEQ ID NO: 47595 - DNA, 22 bp, Artificial Sequence
  chemically synthesized
cggtctttttgattctataacc

SEQ ID NO: 47596 - DNA, 22 bp, Artificial Sequence
  chemically synthesized
tttgattctataacctccatat

SEQ ID NO: 47597 - DNA, 22 bp, Artificial Sequence
  chemically synthesized
ttgattctataacctccatatt

SEQ ID NO: 47598 - DNA, 22 bp, Artificial Sequence
  chemically synthesized
tgattctataacctccatattg

SEQ ID NO: 47599 - DNA, 22 bp, Artificial Sequence
  chemically synthesized
gattctataacctccatattga

SEQ ID NO: 47600 - DNA, 22 bp, Artificial Sequence
  chemically synthesized
attctataacctccatattgag

SEQ ID NO: 47601 - DNA, 22 bp, Artificial Sequence
  chemically synthesized
tataacctccatattgagagac

SEQ ID NO: 47602 - DNA, 22 bp, Artificial Sequence
  chemically synthesized
taacctccatattgagagacat

SEQ ID NO: 47603 - DNA, 22 bp, Artificial Sequence
  chemically synthesized
catattgagagacataaaacac

SEQ ID NO: 47604 - DNA, 22 bp, Artificial Sequence
  chemically synthesized
agagacataaaacacagaacat

SEQ ID NO: 47605 - DNA, 22 bp, Artificial Sequence
  chemically synthesized
cacctgtcaggtgctgggccct

SEQ ID NO: 47606 - DNA, 22 bp, Artificial Sequence
  chemically synthesized
tcaggtgctgggccctgaacta

SEQ ID NO: 47607 - DNA, 22 bp, Artificial Sequence
  chemically synthesized
ggccctgaactatctccaggca

SEQ ID NO: 47608 - DNA, 22 bp, Artificial Sequence
  chemically synthesized
aactatctccaggcagctgaaa

SEQ ID NO: 47609 - DNA, 22 bp, Artificial Sequence
  chemically synthesized
tctccaggcagctgaaagtcag

SEQ ID NO: 47610 - DNA, 22 bp, Artificial Sequence
  chemically synthesized
caggcagctgaaagtcagtaca

SEQ ID NO: 47611 - DNA, 22 bp, Artificial Sequence
  chemically synthesized
aaagtcagtacatcagcttttt

SEQ ID NO: 47612 - DNA, 22 bp, Artificial Sequence
  chemically synthesized
tttaatgatgtgaaagttaaag

SEQ ID NO: 47613 - DNA, 22 bp, Artificial Sequence
  chemically synthesized
ttaatgatgtgaaagttaaaga

SEQ ID NO: 47614 - DNA, 22 bp, Artificial Sequence
  chemically synthesized
taatgatgtgaaagttaaagat

SEQ ID NO: 47615 - DNA, 22 bp, Artificial Sequence
  chemically synthesized
aatgatgtgaaagttaaagatt

SEQ ID NO: 47616 - DNA, 22 bp, Artificial Sequence
  chemically synthesized
atgatgtgaaagttaaagatta

SEQ ID NO: 47617 - DNA, 22 bp, Artificial Sequence
  chemically synthesized
aagattaaaaacatgttggaac

SEQ ID NO: 47618 - DNA, 22 bp, Artificial Sequence
  chemically synthesized
aaaacatgttggaacgcttact

SEQ ID NO: 47619 - DNA, 22 bp, Artificial Sequence
  chemically synthesized
gaacgcttactttatgcagtgc

SEQ ID NO: 47620 - DNA, 22 bp, Artificial Sequence
  chemically synthesized
actttatgcagtgccaaaaatg

SEQ ID NO: 47621 - DNA, 22 bp, Artificial Sequence
  chemically synthesized
ctttatgcagtgccaaaaatgt

SEQ ID NO: 47622 - DNA, 22 bp, Artificial Sequence
  chemically synthesized
tatgcagtgccaaaaatgtgtc

SEQ ID NO: 47623 - DNA, 22 bp, Artificial Sequence
  chemically synthesized
atgcagtgccaaaaatgtgtct

SEQ ID NO: 47624 - DNA, 22 bp, Artificial Sequence
  chemically synthesized
tgcagtgccaaaaatgtgtcta

SEQ ID NO: 47625 - DNA, 22 bp, Artificial Sequence
  chemically synthesized
taacctgtaaggagagatgggt

SEQ ID NO: 47626 - DNA, 22 bp, Artificial Sequence
  chemically synthesized
taaggagagatgggtgtggaac

SEQ ID NO: 47627 - DNA, 22 bp, Artificial Sequence
  chemically synthesized
cactcatgctgcagagaaaaaa

SEQ ID NO: 47628 - DNA, 22 bp, Artificial Sequence
  chemically synthesized
atgctgcagagaaaaaataagg

SEQ ID NO: 47629 - DNA, 22 bp, Artificial Sequence
  chemically synthesized
cagagaaaaaataaggtcctca

SEQ ID NO: 47630 - DNA, 22 bp, Artificial Sequence
  chemically synthesized
acttgcctgcctgcctgcctgc

SEQ ID NO: 47631 - DNA, 22 bp, Artificial Sequence
  chemically synthesized
gcctgcctgcctgcctgcctgc

SEQ ID NO: 47632 - DNA, 22 bp, Artificial Sequence
  chemically synthesized
cctgcctgcctgcctgcctgcc

SEQ ID NO: 47633 - DNA, 22 bp, Artificial Sequence
  chemically synthesized
cctgcctgcctgcctgcctgcc

SEQ ID NO: 47634 - DNA, 22 bp, Artificial Sequence
  chemically synthesized
cctgcctgcctgcctgcctgcc

SEQ ID NO: 47635 - DNA, 22 bp, Artificial Sequence
  chemically synthesized
cctgcctgcctgcctgcctgcc

SEQ ID NO: 47636 - DNA, 22 bp, Artificial Sequence
  chemically synthesized
cctgcctgcctgcctgcctgcc

SEQ ID NO: 47637 - DNA, 22 bp, Artificial Sequence
  chemically synthesized
cctgcctgcctgcctgcctgcc

SEQ ID NO: 47638 - DNA, 22 bp, Artificial Sequence
  chemically synthesized
cctgcctgcctgcctgccttct

SEQ ID NO: 47639 - DNA, 22 bp, Artificial Sequence
  chemically synthesized
cctgcctgcctgccttctttcc

SEQ ID NO: 47640 - DNA, 22 bp, Artificial Sequence
  chemically synthesized
cctgcctgccttctttccttac

SEQ ID NO: 47641 - DNA, 22 bp, Artificial Sequence
  chemically synthesized
cctgccttctttccttacaaga

SEQ ID NO: 47642 - DNA, 22 bp, Artificial Sequence
  chemically synthesized
ccttctttccttacaagagaaa

SEQ ID NO: 47643 - DNA, 22 bp, Artificial Sequence
  chemically synthesized
ctttccttacaagagaaatcgc

SEQ ID NO: 47644 - DNA, 22 bp, Artificial Sequence
  chemically synthesized
tttccttacaagagaaatcgct

SEQ ID NO: 47645 - DNA, 22 bp, Artificial Sequence
  chemically synthesized
tccttacaagagaaatcgctcc

SEQ ID NO: 47646 - DNA, 22 bp, Artificial Sequence
  chemically synthesized
ccttacaagagaaatcgctcct

SEQ ID NO: 47647 - DNA, 22 bp, Artificial Sequence
  chemically synthesized
cttacaagagaaatcgctcctg

SEQ ID NO: 47648 - DNA, 22 bp, Artificial Sequence
  chemically synthesized
acaagagaaatcgctcctgaaa

SEQ ID NO: 47649 - DNA, 22 bp, Artificial Sequence
  chemically synthesized
caagagaaatcgctcctgaaat

SEQ ID NO: 47650 - DNA, 22 bp, Artificial Sequence
  chemically synthesized
ctgaaatctgacgtgctttgca

SEQ ID NO: 47651 - DNA, 22 bp, Artificial Sequence
  chemically synthesized
aaatctgacgtgctttgcaaca

SEQ ID NO: 47652 - DNA, 22 bp, Artificial Sequence
  chemically synthesized
acgtgctttgcaacagcagtaa

SEQ ID NO: 47653 - DNA, 22 bp, Artificial Sequence
  chemically synthesized
tgcaacagcagtaagttgacca

SEQ ID NO: 47654 - DNA, 22 bp, Artificial Sequence
  chemically synthesized
gcaacagcagtaagttgaccac

SEQ ID NO: 47655 - DNA, 22 bp, Artificial Sequence
  chemically synthesized
caacagcagtaagttgaccact

SEQ ID NO: 47656 - DNA, 22 bp, Artificial Sequence
  chemically synthesized
accactggagaaagtgaggctg

SEQ ID NO: 47657 - DNA, 22 bp, Artificial Sequence
  chemically synthesized
gagaaagtgaggctggaaccac

SEQ ID NO: 47658 - DNA, 22 bp, Artificial Sequence
  chemically synthesized
gaaccactggaatcttgtagat

SEQ ID NO: 47659 - DNA, 22 bp, Artificial Sequence
  chemically synthesized
gaatcttgtagatttctgaggc

SEQ ID NO: 47660 - DNA, 22 bp, Artificial Sequence
  chemically synthesized
gtagatttctgaggccagttct

SEQ ID NO: 47661 - DNA, 22 bp, Artificial Sequence
  chemically synthesized
tagatttctgaggccagttctg

SEQ ID NO: 47662 - DNA, 22 bp, Artificial Sequence
  chemically synthesized
ctgaggccagttctgttctgac

SEQ ID NO: 47663 - DNA, 22 bp, Artificial Sequence
  chemically synthesized
tgaggccagttctgttctgaca

SEQ ID NO: 47664 - DNA, 22 bp, Artificial Sequence
  chemically synthesized
aggccagttctgttctgacaca

SEQ ID NO: 47665 - DNA, 22 bp, Artificial Sequence
  chemically synthesized
tgttctgacacatgcagctggg

SEQ ID NO: 47666 - DNA, 22 bp, Artificial Sequence
  chemically synthesized
ttctgacacatgcagctgggag

SEQ ID NO: 47667 - DNA, 22 bp, Artificial Sequence
  chemically synthesized
tgacacatgcagctgggagcca

SEQ ID NO: 47668 - DNA, 22 bp, Artificial Sequence
  chemically synthesized
acacatgcagctgggagccact

SEQ ID NO: 47669 - DNA, 22 bp, Artificial Sequence
  chemically synthesized
ggagccactggtttaggaattc

SEQ ID NO: 47670 - DNA, 22 bp, Artificial Sequence
  chemically synthesized
gtttaggaattcacgtgggcat

SEQ ID NO: 47671 - DNA, 22 bp, Artificial Sequence
  chemically synthesized
aggaattcacgtgggcatggga

SEQ ID NO: 47672 - DNA, 22 bp, Artificial Sequence
  chemically synthesized
ggaattcacgtgggcatgggac

SEQ ID NO: 47673 - DNA, 22 bp, Artificial Sequence
  chemically synthesized
acgtgggcatgggactgtgctt

SEQ ID NO: 47674 - DNA, 22 bp, Artificial Sequence
  chemically synthesized
tgcttattcagaaagggctccc

SEQ ID NO: 47675 - DNA, 22 bp, Artificial Sequence
  chemically synthesized
attcagaaagggctcccagtca

SEQ ID NO: 47676 - DNA, 22 bp, Artificial Sequence
  chemically synthesized
ttcagaaagggctcccagtcac

SEQ ID NO: 47677 - DNA, 22 bp, Artificial Sequence
  chemically synthesized
agaaagggctcccagtcacatc

SEQ ID NO: 47678 - DNA, 22 bp, Artificial Sequence
  chemically synthesized
ccagtcacatcctgtattctcc

SEQ ID NO: 47679 - DNA, 22 bp, Artificial Sequence
  chemically synthesized
tattctcctaaattactccaat

SEQ ID NO: 47680 - DNA, 22 bp, Artificial Sequence
  chemically synthesized
tcctaaattactccaatgacaa

SEQ ID NO: 47681 - DNA, 22 bp, Artificial Sequence
  chemically synthesized
ctaaattactccaatgacaaag

SEQ ID NO: 47682 - DNA, 22 bp, Artificial Sequence
  chemically synthesized
aattactccaatgacaaagaaa

SEQ ID NO: 47683 - DNA, 22 bp, Artificial Sequence
  chemically synthesized
ctccaatgacaaagaaaactca

SEQ ID NO: 47684 - DNA, 22 bp, Artificial Sequence
  chemically synthesized
caatgacaaagaaaactcagtg

SEQ ID NO: 47685 - DNA, 22 bp, Artificial Sequence
  chemically synthesized
agtgaagacaaagagatcgttt

SEQ ID NO: 47686 - DNA, 22 bp, Artificial Sequence
  chemically synthesized
tcataggcattgtcatttgcca

SEQ ID NO: 47687 - DNA, 22 bp, Artificial Sequence
  chemically synthesized
cataggcattgtcatttgccaa

SEQ ID NO: 47688 - DNA, 22 bp, Artificial Sequence
  chemically synthesized
ataggcattgtcatttgccaat

SEQ ID NO: 47689 - DNA, 22 bp, Artificial Sequence
  chemically synthesized
tcatttgccaatccataactca

SEQ ID NO: 47690 - DNA, 22 bp, Artificial Sequence
  chemically synthesized
gccaatccataactcaggaatt

SEQ ID NO: 47691 - DNA, 22 bp, Artificial Sequence
  chemically synthesized
ccaatccataactcaggaattc

SEQ ID NO: 47692 - DNA, 22 bp, Artificial Sequence
  chemically synthesized
aggaattcatggctatgcttgg

SEQ ID NO: 47693 - DNA, 22 bp, Artificial Sequence
  chemically synthesized
atggctatgcttggataattct

SEQ ID NO: 47694 - DNA, 22 bp, Artificial Sequence
  chemically synthesized
tgcttggataattctctctaga

SEQ ID NO: 47695 - DNA, 22 bp, Artificial Sequence
  chemically synthesized
ggataattctctctagacttgg

SEQ ID NO: 47696 - DNA, 22 bp, Artificial Sequence
  chemically synthesized
gataattctctctagacttgga

SEQ ID NO: 47697 - DNA, 22 bp, Artificial Sequence
  chemically synthesized
tctctagacttggagtgttaaa

SEQ ID NO: 47698 - DNA, 22 bp, Artificial Sequence
  chemically synthesized
tctagacttggagtgttaaaag

SEQ ID NO: 47699 - DNA, 22 bp, Artificial Sequence
  chemically synthesized
tagacttggagtgttaaaagtt

SEQ ID NO: 47700 - DNA, 22 bp, Artificial Sequence
  chemically synthesized
gacttggagtgttaaaagtttg

SEQ ID NO: 47701 - DNA, 22 bp, Artificial Sequence
  chemically synthesized
ggagtgttaaaagtttgcacct

SEQ ID NO: 47702 - DNA, 22 bp, Artificial Sequence
  chemically synthesized
gagtgttaaaagtttgcaccta

SEQ ID NO: 47703 - DNA, 22 bp, Artificial Sequence
  chemically synthesized
aaagtttgcacctagttattct

SEQ ID NO: 47704 - DNA, 22 bp, Artificial Sequence
  chemically synthesized
gcacctagttattctcccctct

SEQ ID NO: 47705 - DNA, 22 bp, Artificial Sequence
  chemically synthesized
cacctagttattctcccctctc

SEQ ID NO: 47706 - DNA, 22 bp, Artificial Sequence
  chemically synthesized
gttattctcccctctctctggc

SEQ ID NO: 47707 - DNA, 22 bp, Artificial Sequence
  chemically synthesized
ttctcccctctctctggcagga

SEQ ID NO: 47708 - DNA, 22 bp, Artificial Sequence
  chemically synthesized
tcccctctctctggcaggagaa

SEQ ID NO: 47709 - DNA, 22 bp, Artificial Sequence
  chemically synthesized
ccctctctctggcaggagaatc

SEQ ID NO: 47710 - DNA, 22 bp, Artificial Sequence
  chemically synthesized
tctctggcaggagaatcatgtc

SEQ ID NO: 47711 - DNA, 22 bp, Artificial Sequence
  chemically synthesized
tctggcaggagaatcatgtcac

SEQ ID NO: 47712 - DNA, 22 bp, Artificial Sequence
  chemically synthesized
tggcaggagaatcatgtcactg

SEQ ID NO: 47713 - DNA, 22 bp, Artificial Sequence
  chemically synthesized
gcaggagaatcatgtcactggc

SEQ ID NO: 47714 - DNA, 22 bp, Artificial Sequence
  chemically synthesized
gcaagcaattattgtatcctct

SEQ ID NO: 47715 - DNA, 22 bp, Artificial Sequence
  chemically synthesized
ttgtatcctcttcaaataattc

SEQ ID NO: 47716 - DNA, 22 bp, Artificial Sequence
  chemically synthesized
tatcctcttcaaataattcggc

SEQ ID NO: 47717 - DNA, 22 bp, Artificial Sequence
  chemically synthesized
ttcaaataattcggcctaaatt

SEQ ID NO: 47718 - DNA, 22 bp, Artificial Sequence
  chemically synthesized
caaataattcggcctaaatttt

SEQ ID NO: 47719 - DNA, 22 bp, Artificial Sequence
  chemically synthesized
aaataattcggcctaaattttc

SEQ ID NO: 47720 - DNA, 22 bp, Artificial Sequence
  chemically synthesized
ggcctaaattttcatttatgcc

SEQ ID NO: 47721 - DNA, 22 bp, Artificial Sequence
  chemically synthesized
aattttcatttatgcctgtgta

SEQ ID NO: 47722 - DNA, 22 bp, Artificial Sequence
  chemically synthesized
tcatttatgcctgtgtatttat

SEQ ID NO: 47723 - DNA, 22 bp, Artificial Sequence
  chemically synthesized
catttatgcctgtgtatttatg

SEQ ID NO: 47724 - DNA, 22 bp, Artificial Sequence
  chemically synthesized
atttatgcctgtgtatttatgc

SEQ ID NO: 47725 - DNA, 22 bp, Artificial Sequence
  chemically synthesized
atgcctgtgtatttatgcacaa

SEQ ID NO: 47726 - DNA, 22 bp, Artificial Sequence
  chemically synthesized
tgcctgtgtatttatgcacaaa

SEQ ID NO: 47727 - DNA, 22 bp, Artificial Sequence
  chemically synthesized
tgtatttatgcacaaatgtgtg

SEQ ID NO: 47728 - DNA, 22 bp, Artificial Sequence
  chemically synthesized
atgcacaaatgtgtgtatgata

SEQ ID NO: 47729 - DNA, 22 bp, Artificial Sequence
  chemically synthesized
tgcacaaatgtgtgtatgatat

SEQ ID NO: 47730 - DNA, 22 bp, Artificial Sequence
  chemically synthesized
tggcttctttttctgaaaattg

SEQ ID NO: 47731 - DNA, 22 bp, Artificial Sequence
  chemically synthesized
ctttttctgaaaattgaaaaat

SEQ ID NO: 47732 - DNA, 22 bp, Artificial Sequence
  chemically synthesized
tttttctgaaaattgaaaaatt

SEQ ID NO: 47733 - DNA, 22 bp, Artificial Sequence
  chemically synthesized
tttctgaaaattgaaaaattca

SEQ ID NO: 47734 - DNA, 22 bp, Artificial Sequence
  chemically synthesized
ttctgaaaattgaaaaattcag

SEQ ID NO: 47735 - DNA, 22 bp, Artificial Sequence
  chemically synthesized
tctgaaaattgaaaaattcaga

SEQ ID NO: 47736 - DNA, 22 bp, Artificial Sequence
  chemically synthesized
ctgaaaattgaaaaattcagaa

SEQ ID NO: 47737 - DNA, 22 bp, Artificial Sequence
  chemically synthesized
tgaaaattgaaaaattcagaaa

SEQ ID NO: 47738 - DNA, 22 bp, Artificial Sequence
  chemically synthesized
aaaattgaaaaattcagaaagc

SEQ ID NO: 47739 - DNA, 22 bp, Artificial Sequence
  chemically synthesized
aaaaattcagaaagccaaagat

SEQ ID NO: 47740 - DNA, 22 bp, Artificial Sequence
  chemically synthesized
agaaagccaaagataatagaat

SEQ ID NO: 47741 - DNA, 22 bp, Artificial Sequence
  chemically synthesized
gcgtggcaaggtatattgatta

SEQ ID NO: 47742 - DNA, 22 bp, Artificial Sequence
  chemically synthesized
cgtggcaaggtatattgattag

SEQ ID NO: 47743 - DNA, 22 bp, Artificial Sequence
  chemically synthesized
attaggtaggaatcaaaaataa

SEQ ID NO: 47744 - DNA, 22 bp, Artificial Sequence
  chemically synthesized
ggtaggaatcaaaaataattgc

SEQ ID NO: 47745 - DNA, 22 bp, Artificial Sequence
  chemically synthesized
caaaattatttatgcaggagta

SEQ ID NO: 47746 - DNA, 22 bp, Artificial Sequence
  chemically synthesized
tttatgcaggagtattaaaatt

SEQ ID NO: 47747 - DNA, 22 bp, Artificial Sequence
  chemically synthesized
atgcaggagtattaaaattttc

SEQ ID NO: 47748 - DNA, 22 bp, Artificial Sequence
  chemically synthesized
tgcaggagtattaaaattttcc

SEQ ID NO: 47749 - DNA, 22 bp, Artificial Sequence
  chemically synthesized
aaattttcctcaaaagttccca

SEQ ID NO: 47750 - DNA, 22 bp, Artificial Sequence
  chemically synthesized
tcctcaaaagttcccaggcaaa

SEQ ID NO: 47751 - DNA, 22 bp, Artificial Sequence
  chemically synthesized
cctcaaaagttcccaggcaaat

SEQ ID NO: 47752 - DNA, 22 bp, Artificial Sequence
  chemically synthesized
ctcaaaagttcccaggcaaatg

SEQ ID NO: 47753 - DNA, 22 bp, Artificial Sequence
  chemically synthesized
aaaagttcccaggcaaatgggt

SEQ ID NO: 47754 - DNA, 22 bp, Artificial Sequence
  chemically synthesized
ccaggcaaatgggttcctcttt

SEQ ID NO: 47755 - DNA, 22 bp, Artificial Sequence
  chemically synthesized
ctctttaattttcacccttaca

SEQ ID NO: 47756 - DNA, 22 bp, Artificial Sequence
  chemically synthesized
tttaattttcacccttacaata

SEQ ID NO: 47757 - DNA, 22 bp, Artificial Sequence
  chemically synthesized
taattttcacccttacaataaa

SEQ ID NO: 47758 - DNA, 22 bp, Artificial Sequence
  chemically synthesized
aattttcacccttacaataaac

SEQ ID NO: 47759 - DNA, 22 bp, Artificial Sequence
  chemically synthesized
attttcacccttacaataaact

SEQ ID NO: 47760 - DNA, 22 bp, Artificial Sequence
  chemically synthesized
tcacccttacaataaactcttc

SEQ ID NO: 47761 - DNA, 22 bp, Artificial Sequence
  chemically synthesized
cacccttacaataaactcttct

SEQ ID NO: 47762 - DNA, 22 bp, Artificial Sequence
  chemically synthesized
acccttacaataaactcttctg

SEQ ID NO: 47763 - DNA, 22 bp, Artificial Sequence
  chemically synthesized
acaataaactcttctgcaggtt

SEQ ID NO: 47764 - DNA, 22 bp, Artificial Sequence
  chemically synthesized
caataaactcttctgcaggttt

SEQ ID NO: 47765 - DNA, 22 bp, Artificial Sequence
  chemically synthesized
ttctgcaggttttgtttatttt

SEQ ID NO: 47766 - DNA, 22 bp, Artificial Sequence
  chemically synthesized
ctgcaggttttgtttattttga

SEQ ID NO: 47767 - DNA, 22 bp, Artificial Sequence
  chemically synthesized
tgcaggttttgtttattttgag

SEQ ID NO: 47768 - DNA, 22 bp, Artificial Sequence
  chemically synthesized
caggttttgtttattttgagga

SEQ ID NO: 47769 - DNA, 22 bp, Artificial Sequence
  chemically synthesized
tgtttattttgaggaaacattt

SEQ ID NO: 47770 - DNA, 22 bp, Artificial Sequence
  chemically synthesized
gtttattttgaggaaacatttc

SEQ ID NO: 47771 - DNA, 22 bp, Artificial Sequence
  chemically synthesized
tttattttgaggaaacatttca

SEQ ID NO: 47772 - DNA, 22 bp, Artificial Sequence
  chemically synthesized
attttgaggaaacatttcactt

SEQ ID NO: 47773 - DNA, 22 bp, Artificial Sequence
  chemically synthesized
ttttgaggaaacatttcacttt

SEQ ID NO: 47774 - DNA, 22 bp, Artificial Sequence
  chemically synthesized
tgaggaaacatttcactttttt

SEQ ID NO: 47775 - DNA, 22 bp, Artificial Sequence
  chemically synthesized
gaggaaacatttcacttttttt

SEQ ID NO: 47776 - DNA, 22 bp, Artificial Sequence
  chemically synthesized
aggaaacatttcactttttttt

SEQ ID NO: 47777 - DNA, 22 bp, Artificial Sequence
  chemically synthesized
cactttttttttcaagacatga

SEQ ID NO: 47778 - DNA, 22 bp, Artificial Sequence
  chemically synthesized
actttttttttcaagacatgag

SEQ ID NO: 47779 - DNA, 22 bp, Artificial Sequence
  chemically synthesized
tttttttcaagacatgaggtgt

SEQ ID NO: 47780 - DNA, 22 bp, Artificial Sequence
  chemically synthesized
ttttttcaagacatgaggtgtg

SEQ ID NO: 47781 - DNA, 22 bp, Artificial Sequence
  chemically synthesized
tttttcaagacatgaggtgtga

SEQ ID NO: 47782 - DNA, 22 bp, Artificial Sequence
  chemically synthesized
ttttcaagacatgaggtgtgaa

SEQ ID NO: 47783 - DNA, 22 bp, Artificial Sequence
  chemically synthesized
tttcaagacatgaggtgtgaat

SEQ ID NO: 47784 - DNA, 22 bp, Artificial Sequence
  chemically synthesized
ttcaagacatgaggtgtgaatg

SEQ ID NO: 47785 - DNA, 22 bp, Artificial Sequence
  chemically synthesized
tcaagacatgaggtgtgaatga

SEQ ID NO: 47786 - DNA, 22 bp, Artificial Sequence
  chemically synthesized
caagacatgaggtgtgaatgat

SEQ ID NO: 47787 - DNA, 22 bp, Artificial Sequence
  chemically synthesized
aagacatgaggtgtgaatgatg

SEQ ID NO: 47788 - DNA, 22 bp, Artificial Sequence
  chemically synthesized
ggatatgtaaactgaattattt

SEQ ID NO: 47789 - DNA, 22 bp, Artificial Sequence
  chemically synthesized
gatatgtaaactgaattatttg

SEQ ID NO: 47790 - DNA, 22 bp, Artificial Sequence
  chemically synthesized
aattatttgcataatgcattac

SEQ ID NO: 47791 - DNA, 22 bp, Artificial Sequence
  chemically synthesized
tttgcataatgcattactaatc

SEQ ID NO: 47792 - DNA, 22 bp, Artificial Sequence
  chemically synthesized
gcataatgcattactaatcagt

SEQ ID NO: 47793 - DNA, 22 bp, Artificial Sequence
  chemically synthesized
cataatgcattactaatcagtg

SEQ ID NO: 47794 - DNA, 22 bp, Artificial Sequence
  chemically synthesized
ctaatcagtgagtataaattct

SEQ ID NO: 47795 - DNA, 22 bp, Artificial Sequence
  chemically synthesized
atcagtgagtataaattctgga

SEQ ID NO: 47796 - DNA, 22 bp, Artificial Sequence
  chemically synthesized
tggagtctgaggacctgaaatc

SEQ ID NO: 47797 - DNA, 22 bp, Artificial Sequence
  chemically synthesized
gagtctgaggacctgaaatcaa

SEQ ID NO: 47798 - DNA, 22 bp, Artificial Sequence
  chemically synthesized
aggacctgaaatcaagtgccac

SEQ ID NO: 47799 - DNA, 22 bp, Artificial Sequence
  chemically synthesized
aaatcaagtgccaccaaatttt

SEQ ID NO: 47800 - DNA, 22 bp, Artificial Sequence
  chemically synthesized
tttaaaatctagattataaaag

SEQ ID NO: 47801 - DNA, 22 bp, Artificial Sequence
  chemically synthesized
ttaaaatctagattataaaagt

SEQ ID NO: 47802 - DNA, 22 bp, Artificial Sequence
  chemically synthesized
taaaatctagattataaaagta

SEQ ID NO: 47803 - DNA, 22 bp, Artificial Sequence
  chemically synthesized
aaaatctagattataaaagtaa

SEQ ID NO: 47804 - DNA, 22 bp, Artificial Sequence
  chemically synthesized
aaatctagattataaaagtaaa

SEQ ID NO: 47805 - DNA, 22 bp, Artificial Sequence
  chemically synthesized
gattataaaagtaaagagcatc

SEQ ID NO: 47806 - DNA, 22 bp, Artificial Sequence
  chemically synthesized
taaaagtaaagagcatcaccct

SEQ ID NO: 47807 - DNA, 22 bp, Artificial Sequence
  chemically synthesized
cggtgggataatgtacacattt

SEQ ID NO: 47808 - DNA, 22 bp, Artificial Sequence
  chemically synthesized
ggtgggataatgtacacatttg

SEQ ID NO: 47809 - DNA, 22 bp, Artificial Sequence
  chemically synthesized
gtgtacacattcgcattccgtt

SEQ ID NO: 47810 - DNA, 22 bp, Artificial Sequence
  chemically synthesized
tgtacacattcgcattccgttt

SEQ ID NO: 47811 - DNA, 22 bp, Artificial Sequence
  chemically synthesized
gcattccgtttataagaaggag

SEQ ID NO: 47812 - DNA, 22 bp, Artificial Sequence
  chemically synthesized
cgtttataagaaggagaaatta

SEQ ID NO: 47813 - DNA, 22 bp, Artificial Sequence
  chemically synthesized
ataagaaggagaaattatcctc

SEQ ID NO: 47814 - DNA, 22 bp, Artificial Sequence
  chemically synthesized
taagaaggagaaattatcctca

SEQ ID NO: 47815 - DNA, 22 bp, Artificial Sequence
  chemically synthesized
tcctcacagagttttctgagga

SEQ ID NO: 47816 - DNA, 22 bp, Artificial Sequence
  chemically synthesized
acagagttttctgaggaaaatt

SEQ ID NO: 47817 - DNA, 22 bp, Artificial Sequence
  chemically synthesized
tctgaggaaaattaaataagtg

SEQ ID NO: 47818 - DNA, 22 bp, Artificial Sequence
  chemically synthesized
ctgaggaaaattaaataagtgg

SEQ ID NO: 47819 - DNA, 22 bp, Artificial Sequence
  chemically synthesized
tgaggaaaattaaataagtggc

SEQ ID NO: 47820 - DNA, 22 bp, Artificial Sequence
  chemically synthesized
aggaaaattaaataagtggcct

SEQ ID NO: 47821 - DNA, 22 bp, Artificial Sequence
  chemically synthesized
aataagtggcctttgatgtaaa

SEQ ID NO: 47822 - DNA, 22 bp, Artificial Sequence
  chemically synthesized
tgatgtaaactgttttgctctg

SEQ ID NO: 47823 - DNA, 22 bp, Artificial Sequence
  chemically synthesized
gatgtaaactgttttgctctga

SEQ ID NO: 47824 - DNA, 22 bp, Artificial Sequence
  chemically synthesized
atgtaaactgttttgctctgac

SEQ ID NO: 47825 - DNA, 22 bp, Artificial Sequence
  chemically synthesized
ttttgctctgactcaacactat

SEQ ID NO: 47826 - DNA, 22 bp, Artificial Sequence
  chemically synthesized
tgctctgactcaacactatgag

SEQ ID NO: 47827 - DNA, 22 bp, Artificial Sequence
  chemically synthesized
gctctgactcaacactatgagg

SEQ ID NO: 47828 - DNA, 22 bp, Artificial Sequence
  chemically synthesized
ctctgactcaacactatgaggc

SEQ ID NO: 47829 - DNA, 22 bp, Artificial Sequence
  chemically synthesized
tgactcaacactatgaggcata

SEQ ID NO: 47830 - DNA, 22 bp, Artificial Sequence
  chemically synthesized
actcaacactatgaggcataag

SEQ ID NO: 47831 - DNA, 22 bp, Artificial Sequence
  chemically synthesized
aacactatgaggcataaggtcc

SEQ ID NO: 47832 - DNA, 22 bp, Artificial Sequence
  chemically synthesized
tgaggcataaggtcctaaattc

SEQ ID NO: 47833 - DNA, 22 bp, Artificial Sequence
  chemically synthesized
aattcataggcacaaccacaga

SEQ ID NO: 47834 - DNA, 22 bp, Artificial Sequence
  chemically synthesized
ataggcacaaccacagaagcac

SEQ ID NO: 47835 - DNA, 22 bp, Artificial Sequence
  chemically synthesized
gcatcaaaaagagcagacagtc

SEQ ID NO: 47836 - DNA, 22 bp, Artificial Sequence
  chemically synthesized
catcaaaaagagcagacagtcc

SEQ ID NO: 47837 - DNA, 22 bp, Artificial Sequence
  chemically synthesized
gtcgcctacggaatctacagga

SEQ ID NO: 47838 - DNA, 22 bp, Artificial Sequence
  chemically synthesized
cggaatctacaggaatctgaag

SEQ ID NO: 47839 - DNA, 22 bp, Artificial Sequence
  chemically synthesized
caggaatctgaaggggcagcca

SEQ ID NO: 47840 - DNA, 22 bp, Artificial Sequence
  chemically synthesized
aaggggcagccagacattctgc

SEQ ID NO: 47841 - DNA, 22 bp, Artificial Sequence
  chemically synthesized
tgcctataccacccatcagatc

SEQ ID NO: 47842 - DNA, 22 bp, Artificial Sequence
  chemically synthesized
cctataccacccatcagatcag

SEQ ID NO: 47843 - DNA, 22 bp, Artificial Sequence
  chemically synthesized
taccacccatcagatcagccac

SEQ ID NO: 47844 - DNA, 22 bp, Artificial Sequence
  chemically synthesized
ctccagtgggttcccaccggtg

SEQ ID NO: 47845 - DNA, 22 bp, Artificial Sequence
  chemically synthesized
tccagtgggttcccaccggtgt

SEQ ID NO: 47846 - DNA, 22 bp, Artificial Sequence
  chemically synthesized
cagtgggttcccaccggtgttt

SEQ ID NO: 47847 - DNA, 22 bp, Artificial Sequence
  chemically synthesized
ccaccggtgttttcgtgcaagc

SEQ ID NO: 47848 - DNA, 22 bp, Artificial Sequence
  chemically synthesized
tcgtgcaagcttagccccttct

SEQ ID NO: 47849 - DNA, 22 bp, Artificial Sequence
  chemically synthesized
cgtgcaagcttagccccttctt

SEQ ID NO: 47850 - DNA, 22 bp, Artificial Sequence
  chemically synthesized
gtgcaagcttagccccttcttt

SEQ ID NO: 47851 - DNA, 22 bp, Artificial Sequence
  chemically synthesized
agccccttctttgcagaaaaaa

SEQ ID NO: 47852 - DNA, 22 bp, Artificial Sequence
  chemically synthesized
gccccttctttgcagaaaaaaa

SEQ ID NO: 47853 - DNA, 22 bp, Artificial Sequence
  chemically synthesized
ctttgcagaaaaaaagatattg

SEQ ID NO: 47854 - DNA, 22 bp, Artificial Sequence
  chemically synthesized
tttgcagaaaaaaagatattga

SEQ ID NO: 47855 - DNA, 22 bp, Artificial Sequence
  chemically synthesized
tgcagaaaaaaagatattgatg

SEQ ID NO: 47856 - DNA, 22 bp, Artificial Sequence
  chemically synthesized
gcagaaaaaaagatattgatgt

SEQ ID NO: 47857 - DNA, 22 bp, Artificial Sequence
  chemically synthesized
cagaaaaaaagatattgatgtg

SEQ ID NO: 47858 - DNA, 22 bp, Artificial Sequence
  chemically synthesized
atgtgccaacagtagaaagaag

SEQ ID NO: 47859 - DNA, 22 bp, Artificial Sequence
  chemically synthesized
ttccagctctgtacacaacctt

SEQ ID NO: 47860 - DNA, 22 bp, Artificial Sequence
  chemically synthesized
cagctctgtacacaacctttgt

SEQ ID NO: 47861 - DNA, 22 bp, Artificial Sequence
  chemically synthesized
tgtacacaacctttgtcaaccc

SEQ ID NO: 47862 - DNA, 22 bp, Artificial Sequence
  chemically synthesized
tacacaacctttgtcaacccag

SEQ ID NO: 47863 - DNA, 22 bp, Artificial Sequence
  chemically synthesized
tgtcaacccagcatgataaaac

SEQ ID NO: 47864 - DNA, 22 bp, Artificial Sequence
  chemically synthesized
gtcaacccagcatgataaaacc

SEQ ID NO: 47865 - DNA, 22 bp, Artificial Sequence
  chemically synthesized
tcaacccagcatgataaaacca

SEQ ID NO: 47866 - DNA, 22 bp, Artificial Sequence
  chemically synthesized
ggaaactatttgtctaaacact

SEQ ID NO: 47867 - DNA, 22 bp, Artificial Sequence
  chemically synthesized
tttgtctaaacactttttggaa

SEQ ID NO: 47868 - DNA, 22 bp, Artificial Sequence
  chemically synthesized
gtctaaacactttttggaaagg

SEQ ID NO: 47869 - DNA, 22 bp, Artificial Sequence
  chemically synthesized
tctaaacactttttggaaaggg

SEQ ID NO: 47870 - DNA, 22 bp, Artificial Sequence
  chemically synthesized
aacactttttggaaagggatga

SEQ ID NO: 47871 - DNA, 22 bp, Artificial Sequence
  chemically synthesized
tttggaaagggatgaaatggag

SEQ ID NO: 47872 - DNA, 22 bp, Artificial Sequence
  chemically synthesized
ttggaaagggatgaaatggaga

SEQ ID NO: 47873 - DNA, 22 bp, Artificial Sequence
  chemically synthesized
tggaaagggatgaaatggagag

SEQ ID NO: 47874 - DNA, 22 bp, Artificial Sequence
  chemically synthesized
ggaaagggatgaaatggagagg

SEQ ID NO: 47875 - DNA, 22 bp, Artificial Sequence
  chemically synthesized
gaaagggatgaaatggagagga

SEQ ID NO: 47876 - DNA, 22 bp, Artificial Sequence
  chemically synthesized
gtggtcagcacacacacacaca

SEQ ID NO: 47877 - DNA, 22 bp, Artificial Sequence
  chemically synthesized
acacacacacacacacacacac

SEQ ID NO: 47878 - DNA, 22 bp, Artificial Sequence
  chemically synthesized
acacaaatccttgagggtgcca

SEQ ID NO: 47879 - DNA, 22 bp, Artificial Sequence
  chemically synthesized
gagggtgccaggttacatttct

SEQ ID NO: 47880 - DNA, 22 bp, Artificial Sequence
  chemically synthesized
agggtgccaggttacatttcta

SEQ ID NO: 47881 - DNA, 22 bp, Artificial Sequence
  chemically synthesized
catttctacaacagctgccttc

SEQ ID NO: 47882 - DNA, 22 bp, Artificial Sequence
  chemically synthesized
ctacaacagctgccttccattg

SEQ ID NO: 47883 - DNA, 22 bp, Artificial Sequence
  chemically synthesized
tacaacagctgccttccattgt

SEQ ID NO: 47884 - DNA, 22 bp, Artificial Sequence
  chemically synthesized
caacagctgccttccattgtct

SEQ ID NO: 47885 - DNA, 22 bp, Artificial Sequence
  chemically synthesized
ccttccattgtctactgccagt

SEQ ID NO: 47886 - DNA, 22 bp, Artificial Sequence
  chemically synthesized
ccattgtctactgccagtgaag

SEQ ID NO: 47887 - DNA, 22 bp, Artificial Sequence
  chemically synthesized
cattgtctactgccagtgaagc

SEQ ID NO: 47888 - DNA, 22 bp, Artificial Sequence
  chemically synthesized
tctactgccagtgaagccaaac

SEQ ID NO: 47889 - DNA, 22 bp, Artificial Sequence
  chemically synthesized
ctgccagtgaagccaaaccagc

SEQ ID NO: 47890 - DNA, 22 bp, Artificial Sequence
  chemically synthesized
ccagtgaagccaaaccagccta

SEQ ID NO: 47891 - DNA, 22 bp, Artificial Sequence
  chemically synthesized
aaatttaatttaatctgctgta

SEQ ID NO: 47892 - DNA, 22 bp, Artificial Sequence
  chemically synthesized
aatttaatctgctgtaaaccca

SEQ ID NO: 47893 - DNA, 22 bp, Artificial Sequence
  chemically synthesized
atttaatctgctgtaaacccaa

SEQ ID NO: 47894 - DNA, 22 bp, Artificial Sequence
  chemically synthesized
aatctgctgtaaacccaagtat

SEQ ID NO: 47895 - DNA, 22 bp, Artificial Sequence
  chemically synthesized
atctgctgtaaacccaagtatc

SEQ ID NO: 47896 - DNA, 22 bp, Artificial Sequence
  chemically synthesized
ctgtaaacccaagtatcaggca

SEQ ID NO: 47897 - DNA, 22 bp, Artificial Sequence
  chemically synthesized
taaacccaagtatcaggcactt

SEQ ID NO: 47898 - DNA, 22 bp, Artificial Sequence
  chemically synthesized
agatggcagctaaaagcgccac

SEQ ID NO: 47899 - DNA, 22 bp, Artificial Sequence
  chemically synthesized
gatggcagctaaaagcgccact

SEQ ID NO: 47900 - DNA, 22 bp, Artificial Sequence
  chemically synthesized
aaagcgccactctcagataact

SEQ ID NO: 47901 - DNA, 22 bp, Artificial Sequence
  chemically synthesized
tcagataactgagtgacacttg

SEQ ID NO: 47902 - DNA, 22 bp, Artificial Sequence
  chemically synthesized
agataactgagtgacacttgct

SEQ ID NO: 47903 - DNA, 22 bp, Artificial Sequence
  chemically synthesized
agtgacacttgctaataatagc

SEQ ID NO: 47904 - DNA, 22 bp, Artificial Sequence
  chemically synthesized
gctaataatagcctctgtgtga

SEQ ID NO: 47905 - DNA, 22 bp, Artificial Sequence
  chemically synthesized
ctaataatagcctctgtgtgaa

SEQ ID NO: 47906 - DNA, 22 bp, Artificial Sequence
  chemically synthesized
ataatagcctctgtgtgaagcg

SEQ ID NO: 47907 - DNA, 22 bp, Artificial Sequence
  chemically synthesized
tgtgtgaagcgagagagagcgg

SEQ ID NO: 47908 - DNA, 22 bp, Artificial Sequence
  chemically synthesized
tgtgaagcgagagagagcggac

SEQ ID NO: 47909 - DNA, 22 bp, Artificial Sequence
  chemically synthesized
tgtaaaaccagagggacccggg

SEQ ID NO: 47910 - DNA, 22 bp, Artificial Sequence
  chemically synthesized
gtaaaaccagagggacccgggc

SEQ ID NO: 47911 - DNA, 22 bp, Artificial Sequence
  chemically synthesized
taaaaccagagggacccgggcc

SEQ ID NO: 47912 - DNA, 22 bp, Artificial Sequence
  chemically synthesized
ggcctgggcctgggtctgggaa

SEQ ID NO: 47913 - DNA, 22 bp, Artificial Sequence
  chemically synthesized
ggcctgggtctgggaatggtgt

SEQ ID NO: 47914 - DNA, 22 bp, Artificial Sequence
  chemically synthesized
ggtctgggaatggtgtgatgtg

SEQ ID NO: 47915 - DNA, 22 bp, Artificial Sequence
  chemically synthesized
ggaatggtgtgatgtggttagg

SEQ ID NO: 47916 - DNA, 22 bp, Artificial Sequence
  chemically synthesized
ggccagtctcagcttccaggca

SEQ ID NO: 47917 - DNA, 22 bp, Artificial Sequence
  chemically synthesized
agcttccaggcagcagatacgg

SEQ ID NO: 47918 - DNA, 22 bp, Artificial Sequence
  chemically synthesized
ccaggcagcagatacggcagag

SEQ ID NO: 47919 - DNA, 22 bp, Artificial Sequence
  chemically synthesized
caggcagcagatacggcagaga

SEQ ID NO: 47920 - DNA, 22 bp, Artificial Sequence
  chemically synthesized
ccctgtgacgggctgcacgaag

SEQ ID NO: 47921 - DNA, 22 bp, Artificial Sequence
  chemically synthesized
tgacgggctgcacgaagcccac

SEQ ID NO: 47922 - DNA, 22 bp, Artificial Sequence
  chemically synthesized
cacgaagcccaccagtgaccta

SEQ ID NO: 47923 - DNA, 22 bp, Artificial Sequence
  chemically synthesized
gctttcaagtcacacagcgaca

SEQ ID NO: 47924 - DNA, 22 bp, Artificial Sequence
  chemically synthesized
tcaagtcacacagcgacagtcc

SEQ ID NO: 47925 - DNA, 22 bp, Artificial Sequence
  chemically synthesized
caagtcacacagcgacagtcct

SEQ ID NO: 47926 - DNA, 22 bp, Artificial Sequence
  chemically synthesized
aagtcacacagcgacagtcctg

SEQ ID NO: 47927 - DNA, 22 bp, Artificial Sequence
  chemically synthesized
gcttttgctatctagaagaaca

SEQ ID NO: 47928 - DNA, 22 bp, Artificial Sequence
  chemically synthesized
ttgctatctagaagaacaaaat

SEQ ID NO: 47929 - DNA, 22 bp, Artificial Sequence
  chemically synthesized
tgctatctagaagaacaaaatt

SEQ ID NO: 47930 - DNA, 22 bp, Artificial Sequence
  chemically synthesized
gctatctagaagaacaaaattc

SEQ ID NO: 47931 - DNA, 22 bp, Artificial Sequence
  chemically synthesized
ctatctagaagaacaaaattcc

SEQ ID NO: 47932 - DNA, 22 bp, Artificial Sequence
  chemically synthesized
tctagaagaacaaaattcccct

SEQ ID NO: 47933 - DNA, 22 bp, Artificial Sequence
  chemically synthesized
gaagaacaaaattcccctttcc

SEQ ID NO: 47934 - DNA, 22 bp, Artificial Sequence
  chemically synthesized
ccctttccagctctgcaattgc

SEQ ID NO: 47935 - DNA, 22 bp, Artificial Sequence
  chemically synthesized
tccagctctgcaattgccactc

SEQ ID NO: 47936 - DNA, 22 bp, Artificial Sequence
  chemically synthesized
ccagctctgcaattgccactct

SEQ ID NO: 47937 - DNA, 22 bp, Artificial Sequence
  chemically synthesized
cagctctgcaattgccactctg

SEQ ID NO: 47938 - DNA, 22 bp, Artificial Sequence
  chemically synthesized
tgcaattgccactctgctccct

SEQ ID NO: 47939 - DNA, 22 bp, Artificial Sequence
  chemically synthesized
caattgccactctgctcccttt

SEQ ID NO: 47940 - DNA, 22 bp, Artificial Sequence
  chemically synthesized
ccactctgctccctttcatctt

SEQ ID NO: 47941 - DNA, 22 bp, Artificial Sequence
  chemically synthesized
tgctccctttcatcttccatct

SEQ ID NO: 47942 - DNA, 22 bp, Artificial Sequence
  chemically synthesized
ctccctttcatcttccatcttg

SEQ ID NO: 47943 - DNA, 22 bp, Artificial Sequence
  chemically synthesized
cctttcatcttccatcttgtgc

SEQ ID NO: 47944 - DNA, 22 bp, Artificial Sequence
  chemically synthesized
tcatcttccatcttgtgcccca

SEQ ID NO: 47945 - DNA, 22 bp, Artificial Sequence
  chemically synthesized
catcttccatcttgtgccccag

SEQ ID NO: 47946 - DNA, 22 bp, Artificial Sequence
  chemically synthesized
atcttccatcttgtgccccagt

SEQ ID NO: 47947 - DNA, 22 bp, Artificial Sequence
  chemically synthesized
ccatcttgtgccccagtcctcc

SEQ ID NO: 47948 - DNA, 22 bp, Artificial Sequence
  chemically synthesized
catcttgtgccccagtcctccc

SEQ ID NO: 47949 - DNA, 22 bp, Artificial Sequence
  chemically synthesized
gtgccccagtcctcccttaaag

SEQ ID NO: 47950 - DNA, 22 bp, Artificial Sequence
  chemically synthesized
tgccccagtcctcccttaaagg

SEQ ID NO: 47951 - DNA, 22 bp, Artificial Sequence
  chemically synthesized
ccttaaagggaaggctgcttaa

SEQ ID NO: 47952 - DNA, 22 bp, Artificial Sequence
  chemically synthesized
aaagggaaggctgcttaaccct

SEQ ID NO: 47953 - DNA, 22 bp, Artificial Sequence
  chemically synthesized
aagggaaggctgcttaaccctt

SEQ ID NO: 47954 - DNA, 22 bp, Artificial Sequence
  chemically synthesized
cttaacccttgacgtgttcttt

SEQ ID NO: 47955 - DNA, 22 bp, Artificial Sequence
  chemically synthesized
aacccttgacgtgttctttgtc

SEQ ID NO: 47956 - DNA, 22 bp, Artificial Sequence
  chemically synthesized
acccttgacgtgttctttgtcc

SEQ ID NO: 47957 - DNA, 22 bp, Artificial Sequence
  chemically synthesized
gacgtgttctttgtccccttct

SEQ ID NO: 47958 - DNA, 22 bp, Artificial Sequence
  chemically synthesized
acgtgttctttgtccccttctt

SEQ ID NO: 47959 - DNA, 22 bp, Artificial Sequence
  chemically synthesized
tttgtccccttctttctgagag

SEQ ID NO: 47960 - DNA, 22 bp, Artificial Sequence
  chemically synthesized
tgtccccttctttctgagagtg

SEQ ID NO: 47961 - DNA, 22 bp, Artificial Sequence
  chemically synthesized
gtccccttctttctgagagtgt

SEQ ID NO: 47962 - DNA, 22 bp, Artificial Sequence
  chemically synthesized
tccccttctttctgagagtgtg

SEQ ID NO: 47963 - DNA, 22 bp, Artificial Sequence
  chemically synthesized
ctttctgagagtgtggtcaatc

SEQ ID NO: 47964 - DNA, 22 bp, Artificial Sequence
  chemically synthesized
tttctgagagtgtggtcaatct

SEQ ID NO: 47965 - DNA, 22 bp, Artificial Sequence
  chemically synthesized
tctgagagtgtggtcaatctcc

SEQ ID NO: 47966 - DNA, 22 bp, Artificial Sequence
  chemically synthesized
ctgagagtgtggtcaatctcct

SEQ ID NO: 47967 - DNA, 22 bp, Artificial Sequence
  chemically synthesized
tgagagtgtggtcaatctcctc

SEQ ID NO: 47968 - DNA, 22 bp, Artificial Sequence
  chemically synthesized
agagtgtggtcaatctcctctc

SEQ ID NO: 47969 - DNA, 22 bp, Artificial Sequence
  chemically synthesized
ctctcaggcaaatcatctttct

SEQ ID NO: 47970 - DNA, 22 bp, Artificial Sequence
  chemically synthesized
tcaggcaaatcatctttctcta

SEQ ID NO: 47971 - DNA, 22 bp, Artificial Sequence
  chemically synthesized
aggcaaatcatctttctctaat

SEQ ID NO: 47972 - DNA, 22 bp, Artificial Sequence
  chemically synthesized
tctctaatagccagggctcaaa

SEQ ID NO: 47973 - DNA, 22 bp, Artificial Sequence
  chemically synthesized
ctctaatagccagggctcaaat

SEQ ID NO: 47974 - DNA, 22 bp, Artificial Sequence
  chemically synthesized
tctaatagccagggctcaaatg

SEQ ID NO: 47975 - DNA, 22 bp, Artificial Sequence
  chemically synthesized
taatagccagggctcaaatggc

SEQ ID NO: 47976 - DNA, 22 bp, Artificial Sequence
  chemically synthesized
atagccagggctcaaatggcca

SEQ ID NO: 47977 - DNA, 22 bp, Artificial Sequence
  chemically synthesized
aaatggccaaagaaaggtccca

SEQ ID NO: 47978 - DNA, 22 bp, Artificial Sequence
  chemically synthesized
gtcttcataacactaccagcca

SEQ ID NO: 47979 - DNA, 22 bp, Artificial Sequence
  chemically synthesized
tcttcataacactaccagccac

SEQ ID NO: 47980 - DNA, 22 bp, Artificial Sequence
  chemically synthesized
cataacactaccagccacgtga

SEQ ID NO: 47981 - DNA, 22 bp, Artificial Sequence
  chemically synthesized
ataacactaccagccacgtgag

SEQ ID NO: 47982 - DNA, 22 bp, Artificial Sequence
  chemically synthesized
ccagccacgtgagcacgtccca

SEQ ID NO: 47983 - DNA, 22 bp, Artificial Sequence
  chemically synthesized
cttcttcctgaccctcaccacg

SEQ ID NO: 47984 - DNA, 22 bp, Artificial Sequence
  chemically synthesized
cttcctgaccctcaccacgagg

SEQ ID NO: 47985 - DNA, 22 bp, Artificial Sequence
  chemically synthesized
ttcctgaccctcaccacgaggc

SEQ ID NO: 47986 - DNA, 22 bp, Artificial Sequence
  chemically synthesized
cctgaccctcaccacgaggcac

SEQ ID NO: 47987 - DNA, 22 bp, Artificial Sequence
  chemically synthesized
ctgaccctcaccacgaggcaca

SEQ ID NO: 47988 - DNA, 22 bp, Artificial Sequence
  chemically synthesized
accctcaccacgaggcacagag

SEQ ID NO: 47989 - DNA, 22 bp, Artificial Sequence
  chemically synthesized
accacgaggcacagaggcacct

SEQ ID NO: 47990 - DNA, 22 bp, Artificial Sequence
  chemically synthesized
tgctgaaactcaagcaaacgcc

SEQ ID NO: 47991 - DNA, 22 bp, Artificial Sequence
  chemically synthesized
aaactcaagcaaacgccacatc

SEQ ID NO: 47992 - DNA, 22 bp, Artificial Sequence
  chemically synthesized
aagcaaacgccacatctgactc

SEQ ID NO: 47993 - DNA, 22 bp, Artificial Sequence
  chemically synthesized
actctgcctcatgcactgaaaa

SEQ ID NO: 47994 - DNA, 22 bp, Artificial Sequence
  chemically synthesized
tgcctcatgcactgaaaaagac

SEQ ID NO: 47995 - DNA, 22 bp, Artificial Sequence
  chemically synthesized
cctcatgcactgaaaaagacaa

SEQ ID NO: 47996 - DNA, 22 bp, Artificial Sequence
  chemically synthesized
atgcactgaaaaagacaaggga

SEQ ID NO: 47997 - DNA, 22 bp, Artificial Sequence
  chemically synthesized
aaaaagacaagggatctctgtt

SEQ ID NO: 47998 - DNA, 22 bp, Artificial Sequence
  chemically synthesized
tgttcttccaggagaatggggg

SEQ ID NO: 47999 - DNA, 22 bp, Artificial Sequence
  chemically synthesized
ttcttccaggagaatgggggac

SEQ ID NO: 48000 - DNA, 22 bp, Artificial Sequence
  chemically synthesized
ttccaggagaatgggggacagt

SEQ ID NO: 48001 - DNA, 22 bp, Artificial Sequence
  chemically synthesized
ccaggagaatgggggacagtgc

SEQ ID NO: 48002 - DNA, 22 bp, Artificial Sequence
  chemically synthesized
caggagaatgggggacagtgca

SEQ ID NO: 48003 - DNA, 22 bp, Artificial Sequence
  chemically synthesized
aaatgaccccttcacaatgaac

SEQ ID NO: 48004 - DNA, 22 bp, Artificial Sequence
  chemically synthesized
aatgaccccttcacaatgaact

SEQ ID NO: 48005 - DNA, 22 bp, Artificial Sequence
  chemically synthesized
cacaatgaacttcccagataca

SEQ ID NO: 48006 - DNA, 22 bp, Artificial Sequence
  chemically synthesized
acaatgaacttcccagatacaa

SEQ ID NO: 48007 - DNA, 22 bp, Artificial Sequence
  chemically synthesized
cccagatacaagacttgagctc

SEQ ID NO: 48008 - DNA, 22 bp, Artificial Sequence
  chemically synthesized
ccagatacaagacttgagctca

SEQ ID NO: 48009 - DNA, 22 bp, Artificial Sequence
  chemically synthesized
gagctcacaggtactttcttgc

SEQ ID NO: 48010 - DNA, 22 bp, Artificial Sequence
  chemically synthesized
agctcacaggtactttcttgcc

SEQ ID NO: 48011 - DNA, 22 bp, Artificial Sequence
  chemically synthesized
acaggtactttcttgcccatag

SEQ ID NO: 48012 - DNA, 22 bp, Artificial Sequence
  chemically synthesized
tcttgcccataggacacttgtc

SEQ ID NO: 48013 - DNA, 22 bp, Artificial Sequence
  chemically synthesized
cttgcccataggacacttgtcc

SEQ ID NO: 48014 - DNA, 22 bp, Artificial Sequence
  chemically synthesized
ttgcccataggacacttgtccc

SEQ ID NO: 48015 - DNA, 22 bp, Artificial Sequence
  chemically synthesized
gcccataggacacttgtcccct

SEQ ID NO: 48016 - DNA, 22 bp, Artificial Sequence
  chemically synthesized
cccataggacacttgtcccctt

SEQ ID NO: 48017 - DNA, 22 bp, Artificial Sequence
  chemically synthesized
gtccccttgctacctctgagcc

SEQ ID NO: 48018 - DNA, 22 bp, Artificial Sequence
  chemically synthesized
tccccttgctacctctgagcca

SEQ ID NO: 48019 - DNA, 22 bp, Artificial Sequence
  chemically synthesized
gctacctctgagccaaaccctt

SEQ ID NO: 48020 - DNA, 22 bp, Artificial Sequence
  chemically synthesized
ctacctctgagccaaacccttg

SEQ ID NO: 48021 - DNA, 22 bp, Artificial Sequence
  chemically synthesized
cctctgagccaaacccttggtg

SEQ ID NO: 48022 - DNA, 22 bp, Artificial Sequence
  chemically synthesized
tgagccaaacccttggtgaaga

SEQ ID NO: 48023 - DNA, 22 bp, Artificial Sequence
  chemically synthesized
agccaaacccttggtgaagaaa

SEQ ID NO: 48024 - DNA, 22 bp, Artificial Sequence
  chemically synthesized
ggtgaagaaacaacaccgacta

SEQ ID NO: 48025 - DNA, 22 bp, Artificial Sequence
  chemically synthesized
gtgaagaaacaacaccgactaa

SEQ ID NO: 48026 - DNA, 22 bp, Artificial Sequence
  chemically synthesized
aacaaggccatactgctctcca

SEQ ID NO: 48027 - DNA, 22 bp, Artificial Sequence
  chemically synthesized
ctctccaccagtcaggcaatac

SEQ ID NO: 48028 - DNA, 22 bp, Artificial Sequence
  chemically synthesized
tccaccagtcaggcaatacctt

SEQ ID NO: 48029 - DNA, 22 bp, Artificial Sequence
  chemically synthesized
caccagtcaggcaataccttta

SEQ ID NO: 48030 - DNA, 22 bp, Artificial Sequence
  chemically synthesized
tattttctggaaaaatctcaaa

SEQ ID NO: 48031 - DNA, 22 bp, Artificial Sequence
  chemically synthesized
attttctggaaaaatctcaaat

SEQ ID NO: 48032 - DNA, 22 bp, Artificial Sequence
  chemically synthesized
ttttctggaaaaatctcaaata

SEQ ID NO: 48033 - DNA, 22 bp, Artificial Sequence
  chemically synthesized
tctggaaaaatctcaaatacta

SEQ ID NO: 48034 - DNA, 22 bp, Artificial Sequence
  chemically synthesized
ctggaaaaatctcaaatactac

SEQ ID NO: 48035 - DNA, 22 bp, Artificial Sequence
  chemically synthesized
tggaaaaatctcaaatactaca

SEQ ID NO: 48036 - DNA, 22 bp, Artificial Sequence
  chemically synthesized
gaaaaatctcaaatactacaaa

SEQ ID NO: 48037 - DNA, 22 bp, Artificial Sequence
  chemically synthesized
aaatactacaaaagtagagaga

SEQ ID NO: 48038 - DNA, 22 bp, Artificial Sequence
  chemically synthesized
caaaagtagagagaatgttata

SEQ ID NO: 48039 - DNA, 22 bp, Artificial Sequence
  chemically synthesized
taaatcagtccccaagtccaca

SEQ ID NO: 48040 - DNA, 22 bp, Artificial Sequence
  chemically synthesized
ccagctccaaccaccacagctc

SEQ ID NO: 48041 - DNA, 22 bp, Artificial Sequence
  chemically synthesized
cagctccaaccaccacagctca

SEQ ID NO: 48042 - DNA, 22 bp, Artificial Sequence
  chemically synthesized
caaccaccacagctcacagtca

SEQ ID NO: 48043 - DNA, 22 bp, Artificial Sequence
  chemically synthesized
acagtcattcttgtcttctgta

SEQ ID NO: 48044 - DNA, 22 bp, Artificial Sequence
  chemically synthesized
ttgtcttctgtaaccctatcgc

SEQ ID NO: 48045 - DNA, 22 bp, Artificial Sequence
  chemically synthesized
gtcttctgtaaccctatcgcct

SEQ ID NO: 48046 - DNA, 22 bp, Artificial Sequence
  chemically synthesized
tcttctgtaaccctatcgcctc

SEQ ID NO: 48047 - DNA, 22 bp, Artificial Sequence
  chemically synthesized
ctgtaaccctatcgcctcccta

SEQ ID NO: 48048 - DNA, 22 bp, Artificial Sequence
  chemically synthesized
tgtaaccctatcgcctccctag

SEQ ID NO: 48049 - DNA, 22 bp, Artificial Sequence
  chemically synthesized
taaccctatcgcctccctagcc

SEQ ID NO: 48050 - DNA, 22 bp, Artificial Sequence
  chemically synthesized
tcgcctccctagcccattttat

SEQ ID NO: 48051 - DNA, 22 bp, Artificial Sequence
  chemically synthesized
cctagcccattttattatttaa

SEQ ID NO: 48052 - DNA, 22 bp, Artificial Sequence
  chemically synthesized
gcccattttattatttaagttg

SEQ ID NO: 48053 - DNA, 22 bp, Artificial Sequence
  chemically synthesized
tattatttaagttgatcccaga

SEQ ID NO: 48054 - DNA, 22 bp, Artificial Sequence
  chemically synthesized
attatttaagttgatcccagac

SEQ ID NO: 48055 - DNA, 22 bp, Artificial Sequence
  chemically synthesized
ttatttaagttgatcccagacg

SEQ ID NO: 48056 - DNA, 22 bp, Artificial Sequence
  chemically synthesized
tttaagttgatcccagacgtca

SEQ ID NO: 48057 - DNA, 22 bp, Artificial Sequence
  chemically synthesized
aagttgatcccagacgtcatat

SEQ ID NO: 48058 - DNA, 22 bp, Artificial Sequence
  chemically synthesized
agttgatcccagacgtcatatc

SEQ ID NO: 48059 - DNA, 22 bp, Artificial Sequence
  chemically synthesized
atcccagacgtcatatcatttc

SEQ ID NO: 48060 - DNA, 22 bp, Artificial Sequence
  chemically synthesized
catcagtaaacacctctgtatg

SEQ ID NO: 48061 - DNA, 22 bp, Artificial Sequence
  chemically synthesized
atcagtaaacacctctgtatgt

SEQ ID NO: 48062 - DNA, 22 bp, Artificial Sequence
  chemically synthesized
tgtatgtattttttaaacatag

SEQ ID NO: 48063 - DNA, 22 bp, Artificial Sequence
  chemically synthesized
tatgtattttttaaacatagga

SEQ ID NO: 48064 - DNA, 22 bp, Artificial Sequence
  chemically synthesized
tttaaacataggaactcgtttt

SEQ ID NO: 48065 - DNA, 22 bp, Artificial Sequence
  chemically synthesized
ttaaacataggaactcgttttt

SEQ ID NO: 48066 - DNA, 22 bp, Artificial Sequence
  chemically synthesized
taaacataggaactcgtttttt

SEQ ID NO: 48067 - DNA, 22 bp, Artificial Sequence
  chemically synthesized
aaacataggaactcgttttttt

SEQ ID NO: 48068 - DNA, 22 bp, Artificial Sequence
  chemically synthesized
aacataggaactcgtttttttt

SEQ ID NO: 48069 - DNA, 22 bp, Artificial Sequence
  chemically synthesized
gttttttttcttttaaatacaa

SEQ ID NO: 48070 - DNA, 22 bp, Artificial Sequence
  chemically synthesized
tttttcttttaaatacaactgc

SEQ ID NO: 48071 - DNA, 22 bp, Artificial Sequence
  chemically synthesized
ttttcttttaaatacaactgca

SEQ ID NO: 48072 - DNA, 22 bp, Artificial Sequence
  chemically synthesized
tttcttttaaatacaactgcaa

SEQ ID NO: 48073 - DNA, 22 bp, Artificial Sequence
  chemically synthesized
ttcttttaaatacaactgcaaa

SEQ ID NO: 48074 - DNA, 22 bp, Artificial Sequence
  chemically synthesized
tcttttaaatacaactgcaaaa

SEQ ID NO: 48075 - DNA, 22 bp, Artificial Sequence
  chemically synthesized
cttttaaatacaactgcaaaac

SEQ ID NO: 48076 - DNA, 22 bp, Artificial Sequence
  chemically synthesized
ttttaaatacaactgcaaaacc

SEQ ID NO: 48077 - DNA, 22 bp, Artificial Sequence
  chemically synthesized
ttaaatacaactgcaaaaccat

SEQ ID NO: 48078 - DNA, 22 bp, Artificial Sequence
  chemically synthesized
taaatacaactgcaaaaccatt

SEQ ID NO: 48079 - DNA, 22 bp, Artificial Sequence
  chemically synthesized
aaatacaactgcaaaaccatta

SEQ ID NO: 48080 - DNA, 22 bp, Artificial Sequence
  chemically synthesized
aatacaactgcaaaaccattat

SEQ ID NO: 48081 - DNA, 22 bp, Artificial Sequence
  chemically synthesized
caaaaccattatcacacctaaa

SEQ ID NO: 48082 - DNA, 22 bp, Artificial Sequence
  chemically synthesized
tcacacctaaaaataataaagt

SEQ ID NO: 48083 - DNA, 22 bp, Artificial Sequence
  chemically synthesized
aaaataataaagtcacaaataa

SEQ ID NO: 48084 - DNA, 22 bp, Artificial Sequence
  chemically synthesized
ccaaataggggagttattttaa

SEQ ID NO: 48085 - DNA, 22 bp, Artificial Sequence
  chemically synthesized
ttttaaactcagaaatacttct

SEQ ID NO: 48086 - DNA, 22 bp, Artificial Sequence
  chemically synthesized
taaactcagaaatacttctttc

SEQ ID NO: 48087 - DNA, 22 bp, Artificial Sequence
  chemically synthesized
aaactcagaaatacttctttcc

SEQ ID NO: 48088 - DNA, 22 bp, Artificial Sequence
  chemically synthesized
aactcagaaatacttctttcca

SEQ ID NO: 48089 - DNA, 22 bp, Artificial Sequence
  chemically synthesized
agaaatacttctttccatctgg

SEQ ID NO: 48090 - DNA, 22 bp, Artificial Sequence
  chemically synthesized
ctttccatctgggtcatgtttt

SEQ ID NO: 48091 - DNA, 22 bp, Artificial Sequence
  chemically synthesized
tttccatctgggtcatgttttg

SEQ ID NO: 48092 - DNA, 22 bp, Artificial Sequence
  chemically synthesized
tccatctgggtcatgttttgga

SEQ ID NO: 48093 - DNA, 22 bp, Artificial Sequence
  chemically synthesized
ccatctgggtcatgttttggag

SEQ ID NO: 48094 - DNA, 22 bp, Artificial Sequence
  chemically synthesized
catctgggtcatgttttggagg

SEQ ID NO: 48095 - DNA, 22 bp, Artificial Sequence
  chemically synthesized
ggtcatgttttggaggatccct

SEQ ID NO: 48096 - DNA, 22 bp, Artificial Sequence
  chemically synthesized
tggaggatcccttccagtgagg

SEQ ID NO: 48097 - DNA, 22 bp, Artificial Sequence
  chemically synthesized
ggaggatcccttccagtgaggt

SEQ ID NO: 48098 - DNA, 22 bp, Artificial Sequence
  chemically synthesized
gaggatcccttccagtgaggtt

SEQ ID NO: 48099 - DNA, 22 bp, Artificial Sequence
  chemically synthesized
ccagtgaggttcaagactgaag

SEQ ID NO: 48100 - DNA, 22 bp, Artificial Sequence
  chemically synthesized
cagtgaggttcaagactgaagc

SEQ ID NO: 48101 - DNA, 22 bp, Artificial Sequence
  chemically synthesized
aagactgaagctgccaagaaaa

SEQ ID NO: 48102 - DNA, 22 bp, Artificial Sequence
  chemically synthesized
aagctgccaagaaaagcttcag

SEQ ID NO: 48103 - DNA, 22 bp, Artificial Sequence
  chemically synthesized
ccaagaaaagcttcagagaatc

SEQ ID NO: 48104 - DNA, 22 bp, Artificial Sequence
  chemically synthesized
cagagaatcacactctctaaaa

SEQ ID NO: 48105 - DNA, 22 bp, Artificial Sequence
  chemically synthesized
agagaatcacactctctaaaaa

SEQ ID NO: 48106 - DNA, 22 bp, Artificial Sequence
  chemically synthesized
tctaaaaagggccttgtgtaaa

SEQ ID NO: 48107 - DNA, 22 bp, Artificial Sequence
  chemically synthesized
taaaaagggccttgtgtaaagc

SEQ ID NO: 48108 - DNA, 22 bp, Artificial Sequence
  chemically synthesized
aaaagggccttgtgtaaagcca

SEQ ID NO: 48109 - DNA, 22 bp, Artificial Sequence
  chemically synthesized
gtgtaaagccaccttgcatgtc

SEQ ID NO: 48110 - DNA, 22 bp, Artificial Sequence
  chemically synthesized
tgtaaagccaccttgcatgtca

SEQ ID NO: 48111 - DNA, 22 bp, Artificial Sequence
  chemically synthesized
gcatgtcagcccaagctcctgc

SEQ ID NO: 48112 - DNA, 22 bp, Artificial Sequence
  chemically synthesized
catgtcagcccaagctcctgcc

SEQ ID NO: 48113 - DNA, 22 bp, Artificial Sequence
  chemically synthesized
ctgccccttgcagtcctttgcc

SEQ ID NO: 48114 - DNA, 22 bp, Artificial Sequence
  chemically synthesized
ccccttgcagtcctttgccctg

SEQ ID NO: 48115 - DNA, 22 bp, Artificial Sequence
  chemically synthesized
gcagtcctttgccctgttcagg

SEQ ID NO: 48116 - DNA, 22 bp, Artificial Sequence
  chemically synthesized
cagtcctttgccctgttcaggg

SEQ ID NO: 48117 - DNA, 22 bp, Artificial Sequence
  chemically synthesized
tgccctgttcagggctgaatgc

SEQ ID NO: 48118 - DNA, 22 bp, Artificial Sequence
  chemically synthesized
gccctgttcagggctgaatgca

SEQ ID NO: 48119 - DNA, 22 bp, Artificial Sequence
  chemically synthesized
ccctgttcagggctgaatgcac

SEQ ID NO: 48120 - DNA, 22 bp, Artificial Sequence
  chemically synthesized
ttcagggctgaatgcaccctct

SEQ ID NO: 48121 - DNA, 22 bp, Artificial Sequence
  chemically synthesized
agggctgaatgcaccctctgag

SEQ ID NO: 48122 - DNA, 22 bp, Artificial Sequence
  chemically synthesized
aatgcaccctctgagagtctct

SEQ ID NO: 48123 - DNA, 22 bp, Artificial Sequence
  chemically synthesized
tgagagtctctgtgacagtcct

SEQ ID NO: 48124 - DNA, 22 bp, Artificial Sequence
  chemically synthesized
agagtctctgtgacagtcctcc

SEQ ID NO: 48125 - DNA, 22 bp, Artificial Sequence
  chemically synthesized
tgtgacagtcctcccacatcga

SEQ ID NO: 48126 - DNA, 22 bp, Artificial Sequence
  chemically synthesized
tgacagtcctcccacatcgact

SEQ ID NO: 48127 - DNA, 22 bp, Artificial Sequence
  chemically synthesized
ccacatcgactgccccacaggc

SEQ ID NO: 48128 - DNA, 22 bp, Artificial Sequence
  chemically synthesized
ccccacaggccctgagtctccc

SEQ ID NO: 48129 - DNA, 22 bp, Artificial Sequence
  chemically synthesized
agtctccctcactccccaccat

SEQ ID NO: 48130 - DNA, 22 bp, Artificial Sequence
  chemically synthesized
cctcactccccaccatgtggcc

SEQ ID NO: 48131 - DNA, 22 bp, Artificial Sequence
  chemically synthesized
actccccaccatgtggcccatc

SEQ ID NO: 48132 - DNA, 22 bp, Artificial Sequence
  chemically synthesized
cccaccatgtggcccatcacca

SEQ ID NO: 48133 - DNA, 22 bp, Artificial Sequence
  chemically synthesized
ccagtgttcagaactggaattc

SEQ ID NO: 48134 - DNA, 22 bp, Artificial Sequence
  chemically synthesized
agaactggaattcatttgtctt

SEQ ID NO: 48135 - DNA, 22 bp, Artificial Sequence
  chemically synthesized
gaattcatttgtcttggaagaa

SEQ ID NO: 48136 - DNA, 22 bp, Artificial Sequence
  chemically synthesized
atttgtcttggaagaaagtgtt

SEQ ID NO: 48137 - DNA, 22 bp, Artificial Sequence
  chemically synthesized
gtcttggaagaaagtgttctcc

SEQ ID NO: 48138 - DNA, 22 bp, Artificial Sequence
  chemically synthesized
tcttggaagaaagtgttctcct

SEQ ID NO: 48139 - DNA, 22 bp, Artificial Sequence
  chemically synthesized
ggaagaaagtgttctcctggac

SEQ ID NO: 48140 - DNA, 22 bp, Artificial Sequence
  chemically synthesized
gaagaaagtgttctcctggacg

SEQ ID NO: 48141 - DNA, 22 bp, Artificial Sequence
  chemically synthesized
tcctggacggttctgcacagaa

SEQ ID NO: 48142 - DNA, 22 bp, Artificial Sequence
  chemically synthesized
ctggacggttctgcacagaatt

SEQ ID NO: 48143 - DNA, 22 bp, Artificial Sequence
  chemically synthesized
gacggttctgcacagaattcat

SEQ ID NO: 48144 - DNA, 22 bp, Artificial Sequence
  chemically synthesized
tgcacagaattcattcacagag

SEQ ID NO: 48145 - DNA, 22 bp, Artificial Sequence
  chemically synthesized
cacagaattcattcacagagca

SEQ ID NO: 48146 - DNA, 22 bp, Artificial Sequence
  chemically synthesized
attcacagagcatgtcttggat

SEQ ID NO: 48147 - DNA, 22 bp, Artificial Sequence
  chemically synthesized
acagagcatgtcttggatatac

SEQ ID NO: 48148 - DNA, 22 bp, Artificial Sequence
  chemically synthesized
ggatatacagctgactagatat

SEQ ID NO: 48149 - DNA, 22 bp, Artificial Sequence
  chemically synthesized
gatatacagctgactagatatg

SEQ ID NO: 48150 - DNA, 22 bp, Artificial Sequence
  chemically synthesized
actagatatgtcagttatgttc

SEQ ID NO: 48151 - DNA, 22 bp, Artificial Sequence
  chemically synthesized
gatatgtcagttatgttccaaa

SEQ ID NO: 48152 - DNA, 22 bp, Artificial Sequence
  chemically synthesized
tgttccaaatgggttttcacag

SEQ ID NO: 48153 - DNA, 22 bp, Artificial Sequence
  chemically synthesized
caaatgggttttcacaggtcaa

SEQ ID NO: 48154 - DNA, 22 bp, Artificial Sequence
  chemically synthesized
tcacaggtcaaggttctgcagg

SEQ ID NO: 48155 - DNA, 22 bp, Artificial Sequence
  chemically synthesized
cacaggtcaaggttctgcaggc

SEQ ID NO: 48156 - DNA, 22 bp, Artificial Sequence
  chemically synthesized
acaggtcaaggttctgcaggca

SEQ ID NO: 48157 - DNA, 22 bp, Artificial Sequence
  chemically synthesized
tgcaggcaagagcaaatactat

SEQ ID NO: 48158 - DNA, 22 bp, Artificial Sequence
  chemically synthesized
caggcaagagcaaatactattt

SEQ ID NO: 48159 - DNA, 22 bp, Artificial Sequence
  chemically synthesized
tttttagacaggataaggtcaa

SEQ ID NO: 48160 - DNA, 22 bp, Artificial Sequence
  chemically synthesized
ttagacaggataaggtcaaaat

SEQ ID NO: 48161 - DNA, 22 bp, Artificial Sequence
  chemically synthesized
tagacaggataaggtcaaaatg

SEQ ID NO: 48162 - DNA, 22 bp, Artificial Sequence
  chemically synthesized
agacaggataaggtcaaaatgc

SEQ ID NO: 48163 - DNA, 22 bp, Artificial Sequence
  chemically synthesized
gacaggataaggtcaaaatgct

SEQ ID NO: 48164 - DNA, 22 bp, Artificial Sequence
  chemically synthesized
ttagagacagtgaggtctacaa

SEQ ID NO: 48165 - DNA, 22 bp, Artificial Sequence
  chemically synthesized
tagagacagtgaggtctacaat

SEQ ID NO: 48166 - DNA, 22 bp, Artificial Sequence
  chemically synthesized
agagacagtgaggtctacaata

SEQ ID NO: 48167 - DNA, 22 bp, Artificial Sequence
  chemically synthesized
gagacagtgaggtctacaataa

SEQ ID NO: 48168 - DNA, 22 bp, Artificial Sequence
  chemically synthesized
caataaaacctattgatcagcc

SEQ ID NO: 48169 - DNA, 22 bp, Artificial Sequence
  chemically synthesized
ttgatcagcctctggaactagt

SEQ ID NO: 48170 - DNA, 22 bp, Artificial Sequence
  chemically synthesized
atcagcctctggaactagtgct

SEQ ID NO: 48171 - DNA, 22 bp, Artificial Sequence
  chemically synthesized
tggaactagtgctccagagaga

SEQ ID NO: 48172 - DNA, 22 bp, Artificial Sequence
  chemically synthesized
gaactagtgctccagagagaca

SEQ ID NO: 48173 - DNA, 22 bp, Artificial Sequence
  chemically synthesized
gtgctccagagagacacagaga

SEQ ID NO: 48174 - DNA, 22 bp, Artificial Sequence
  chemically synthesized
cagagagacacagagattgaaa

SEQ ID NO: 48175 - DNA, 22 bp, Artificial Sequence
  chemically synthesized
aaacaaaaattgcctggccgtt

SEQ ID NO: 48176 - DNA, 22 bp, Artificial Sequence
  chemically synthesized
cctggccgttttctctgtagac

SEQ ID NO: 48177 - DNA, 22 bp, Artificial Sequence
  chemically synthesized
gccgttttctctgtagactctg

SEQ ID NO: 48178 - DNA, 22 bp, Artificial Sequence
  chemically synthesized
tctctgtagactctgtgggtaa

SEQ ID NO: 48179 - DNA, 22 bp, Artificial Sequence
  chemically synthesized
ctctgtagactctgtgggtaaa

SEQ ID NO: 48180 - DNA, 22 bp, Artificial Sequence
  chemically synthesized
tctgtagactctgtgggtaaaa

SEQ ID NO: 48181 - DNA, 22 bp, Artificial Sequence
  chemically synthesized
tgtagactctgtgggtaaaagc

SEQ ID NO: 48182 - DNA, 22 bp, Artificial Sequence
  chemically synthesized
tagactctgtgggtaaaagctt

SEQ ID NO: 48183 - DNA, 22 bp, Artificial Sequence
  chemically synthesized
tgtgggtaaaagcttgttggac

SEQ ID NO: 48184 - DNA, 22 bp, Artificial Sequence
  chemically synthesized
tgggtaaaagcttgttggactt

SEQ ID NO: 48185 - DNA, 22 bp, Artificial Sequence
  chemically synthesized
gttggacttaatatctttcagg

SEQ ID NO: 48186 - DNA, 22 bp, Artificial Sequence
  chemically synthesized
ttggacttaatatctttcagga

SEQ ID NO: 48187 - DNA, 22 bp, Artificial Sequence
  chemically synthesized
gacttaatatctttcaggatat

SEQ ID NO: 48188 - DNA, 22 bp, Artificial Sequence
  chemically synthesized
aatatctttcaggatataaaat

SEQ ID NO: 48189 - DNA, 22 bp, Artificial Sequence
  chemically synthesized
atatctttcaggatataaaata

SEQ ID NO: 48190 - DNA, 22 bp, Artificial Sequence
  chemically synthesized
tcaggatataaaataagtaaga

SEQ ID NO: 48191 - DNA, 22 bp, Artificial Sequence
  chemically synthesized
caggatataaaataagtaagaa

SEQ ID NO: 48192 - DNA, 22 bp, Artificial Sequence
  chemically synthesized
aggatataaaataagtaagaag

SEQ ID NO: 48193 - DNA, 22 bp, Artificial Sequence
  chemically synthesized
tgtacagattactgaagtccat

SEQ ID NO: 48194 - DNA, 22 bp, Artificial Sequence
  chemically synthesized
ctgaagtccatttaaccagatg

SEQ ID NO: 48195 - DNA, 22 bp, Artificial Sequence
  chemically synthesized
aagtccatttaaccagatgcag

SEQ ID NO: 48196 - DNA, 22 bp, Artificial Sequence
  chemically synthesized
aaccagatgcagaggcaggtca

SEQ ID NO: 48197 - DNA, 22 bp, Artificial Sequence
  chemically synthesized
accagatgcagaggcaggtcac

SEQ ID NO: 48198 - DNA, 22 bp, Artificial Sequence
  chemically synthesized
atggcagaaccgtaaagaaggg

SEQ ID NO: 48199 - DNA, 22 bp, Artificial Sequence
  chemically synthesized
caaggcaacacgtgttgcaacc

SEQ ID NO: 48200 - DNA, 22 bp, Artificial Sequence
  chemically synthesized
aaggcaacacgtgttgcaacct

SEQ ID NO: 48201 - DNA, 22 bp, Artificial Sequence
  chemically synthesized
caacctagagaaagaataaaca

SEQ ID NO: 48202 - DNA, 22 bp, Artificial Sequence
  chemically synthesized
gagaaagaataaacaccagtct

SEQ ID NO: 48203 - DNA, 22 bp, Artificial Sequence
  chemically synthesized
ctcaactcaggggaggcacaaa

SEQ ID NO: 48204 - DNA, 22 bp, Artificial Sequence
  chemically synthesized
tcaactcaggggaggcacaaag

SEQ ID NO: 48205 - DNA, 22 bp, Artificial Sequence
  chemically synthesized
aactcaggggaggcacaaagga

SEQ ID NO: 48206 - DNA, 22 bp, Artificial Sequence
  chemically synthesized
aggggaggcacaaaggacagcc

SEQ ID NO: 48207 - DNA, 22 bp, Artificial Sequence
  chemically synthesized
ccatccaggattcctgcttggg

SEQ ID NO: 48208 - DNA, 22 bp, Artificial Sequence
  chemically synthesized
ctgcttgggactgttgctccta

SEQ ID NO: 48209 - DNA, 22 bp, Artificial Sequence
  chemically synthesized
cttgggactgttgctcctaaat

SEQ ID NO: 48210 - DNA, 22 bp, Artificial Sequence
  chemically synthesized
gggactgttgctcctaaatttg

SEQ ID NO: 48211 - DNA, 22 bp, Artificial Sequence
  chemically synthesized
ggactgttgctcctaaatttgc

SEQ ID NO: 48212 - DNA, 22 bp, Artificial Sequence
  chemically synthesized
ttgctcctaaatttgccactat

SEQ ID NO: 48213 - DNA, 22 bp, Artificial Sequence
  chemically synthesized
ctcctaaatttgccactatgat

SEQ ID NO: 48214 - DNA, 22 bp, Artificial Sequence
  chemically synthesized
ctaaatttgccactatgatcct

SEQ ID NO: 48215 - DNA, 22 bp, Artificial Sequence
  chemically synthesized
aatttgccactatgatcctcaa

SEQ ID NO: 48216 - DNA, 22 bp, Artificial Sequence
  chemically synthesized
gccactatgatcctcaatccag

SEQ ID NO: 48217 - DNA, 22 bp, Artificial Sequence
  chemically synthesized
ccactatgatcctcaatccagc

SEQ ID NO: 48218 - DNA, 22 bp, Artificial Sequence
  chemically synthesized
tgatcctcaatccagcgctatg

SEQ ID NO: 48219 - DNA, 22 bp, Artificial Sequence
  chemically synthesized
aatccagcgctatgtgaacaac

SEQ ID NO: 48220 - DNA, 22 bp, Artificial Sequence
  chemically synthesized
tgtgaacaacagactttcagat

SEQ ID NO: 48221 - DNA, 22 bp, Artificial Sequence
  chemically synthesized
tcagataaatagtatggagata

SEQ ID NO: 48222 - DNA, 22 bp, Artificial Sequence
  chemically synthesized
cagataaatagtatggagataa

SEQ ID NO: 48223 - DNA, 22 bp, Artificial Sequence
  chemically synthesized
agataaatagtatggagataat

SEQ ID NO: 48224 - DNA, 22 bp, Artificial Sequence
  chemically synthesized
gcttaagtcagattttgatgaa

SEQ ID NO: 48225 - DNA, 22 bp, Artificial Sequence
  chemically synthesized
cttaagtcagattttgatgaaa

SEQ ID NO: 48226 - DNA, 22 bp, Artificial Sequence
  chemically synthesized
aagtcagattttgatgaaaagt

SEQ ID NO: 48227 - DNA, 22 bp, Artificial Sequence
  chemically synthesized
agtcagattttgatgaaaagtg

SEQ ID NO: 48228 - DNA, 22 bp, Artificial Sequence
  chemically synthesized
tgatgaaaagtggtttctacat

SEQ ID NO: 48229 - DNA, 22 bp, Artificial Sequence
  chemically synthesized
gatgaaaagtggtttctacatg

SEQ ID NO: 48230 - DNA, 22 bp, Artificial Sequence
  chemically synthesized
atgaaaagtggtttctacatgg

SEQ ID NO: 48231 - DNA, 22 bp, Artificial Sequence
  chemically synthesized
ctacatggatagctttcaaaaa

SEQ ID NO: 48232 - DNA, 22 bp, Artificial Sequence
  chemically synthesized
tacatggatagctttcaaaaac

SEQ ID NO: 48233 - DNA, 22 bp, Artificial Sequence
  chemically synthesized
catggatagctttcaaaaactt

SEQ ID NO: 48234 - DNA, 22 bp, Artificial Sequence
  chemically synthesized
tcaaaaacttctatattgattt

SEQ ID NO: 48235 - DNA, 22 bp, Artificial Sequence
  chemically synthesized
caaaaacttctatattgatttg

SEQ ID NO: 48236 - DNA, 22 bp, Artificial Sequence
  chemically synthesized
aaaaacttctatattgatttga

SEQ ID NO: 48237 - DNA, 22 bp, Artificial Sequence
  chemically synthesized
ctatattgatttgatggaatca

SEQ ID NO: 48238 - DNA, 22 bp, Artificial Sequence
  chemically synthesized
tatattgatttgatggaatcat

SEQ ID NO: 48239 - DNA, 22 bp, Artificial Sequence
  chemically synthesized
tattgatttgatggaatcatgg

SEQ ID NO: 48240 - DNA, 22 bp, Artificial Sequence
  chemically synthesized
atttgatggaatcatggtgaat

SEQ ID NO: 48241 - DNA, 22 bp, Artificial Sequence
  chemically synthesized
gatggaatcatggtgaattcta

SEQ ID NO: 48242 - DNA, 22 bp, Artificial Sequence
  chemically synthesized
atggaatcatggtgaattctaa

SEQ ID NO: 48243 - DNA, 22 bp, Artificial Sequence
  chemically synthesized
taaagactttcctattctctct

SEQ ID NO: 48244 - DNA, 22 bp, Artificial Sequence
  chemically synthesized
aagactttcctattctctctct

SEQ ID NO: 48245 - DNA, 22 bp, Artificial Sequence
  chemically synthesized
tcctattctctctctctccctt

SEQ ID NO: 48246 - DNA, 22 bp, Artificial Sequence
  chemically synthesized
cctattctctctctctcccttt

SEQ ID NO: 48247 - DNA, 22 bp, Artificial Sequence
  chemically synthesized
ctattctctctctctccctttc

SEQ ID NO: 48248 - DNA, 22 bp, Artificial Sequence
  chemically synthesized
ttctctctctctccctttctac

SEQ ID NO: 48249 - DNA, 22 bp, Artificial Sequence
  chemically synthesized
tctctctctccctttctacaca

SEQ ID NO: 48250 - DNA, 22 bp, Artificial Sequence
  chemically synthesized
tctctctccctttctacacaca

SEQ ID NO: 48251 - DNA, 22 bp, Artificial Sequence
  chemically synthesized
tctctccctttctacacacaca

SEQ ID NO: 48252 - DNA, 22 bp, Artificial Sequence
  chemically synthesized
tctccctttctacacacacaca

SEQ ID NO: 48253 - DNA, 22 bp, Artificial Sequence
  chemically synthesized
tccctttctacacacacacagg

SEQ ID NO: 48254 - DNA, 22 bp, Artificial Sequence
  chemically synthesized
cctttctacacacacacaggca

SEQ ID NO: 48255 - DNA, 22 bp, Artificial Sequence
  chemically synthesized
tctacacacacacaggcacaca

SEQ ID NO: 48256 - DNA, 22 bp, Artificial Sequence
  chemically synthesized
ctacacacacacaggcacacaa

SEQ ID NO: 48257 - DNA, 22 bp, Artificial Sequence
  chemically synthesized
tacacacacacaggcacacaac

SEQ ID NO: 48258 - DNA, 22 bp, Artificial Sequence
  chemically synthesized
cacacacacaggcacacaacta

SEQ ID NO: 48259 - DNA, 22 bp, Artificial Sequence
  chemically synthesized
tatatatattcatacatgcata

SEQ ID NO: 48260 - DNA, 22 bp, Artificial Sequence
  chemically synthesized
atacatgcatatacgtatgtat

SEQ ID NO: 48261 - DNA, 22 bp, Artificial Sequence
  chemically synthesized
tatcttatgatgacagtgttga

SEQ ID NO: 48262 - DNA, 22 bp, Artificial Sequence
  chemically synthesized
atcttatgatgacagtgttgat

SEQ ID NO: 48263 - DNA, 22 bp, Artificial Sequence
  chemically synthesized
tcttatgatgacagtgttgatg

SEQ ID NO: 48264 - DNA, 22 bp, Artificial Sequence
  chemically synthesized
atgatgacagtgttgatgtgtt

SEQ ID NO: 48265 - DNA, 22 bp, Artificial Sequence
  chemically synthesized
tgatgacagtgttgatgtgttt

SEQ ID NO: 48266 - DNA, 22 bp, Artificial Sequence
  chemically synthesized
atgtgtttggggattttttttt

SEQ ID NO: 48267 - DNA, 22 bp, Artificial Sequence
  chemically synthesized
ggggatttttttttttttcaaa

SEQ ID NO: 48268 - DNA, 22 bp, Artificial Sequence
  chemically synthesized
gggatttttttttttttcaaaa

SEQ ID NO: 48269 - DNA, 22 bp, Artificial Sequence
  chemically synthesized
ttttttttttcaaaaagagtta

SEQ ID NO: 48270 - DNA, 22 bp, Artificial Sequence
  chemically synthesized
tttttttttcaaaaagagttaa

SEQ ID NO: 48271 - DNA, 22 bp, Artificial Sequence
  chemically synthesized
ttttttttcaaaaagagttaat

SEQ ID NO: 48272 - DNA, 22 bp, Artificial Sequence
  chemically synthesized
tttttttcaaaaagagttaata

SEQ ID NO: 48273 - DNA, 22 bp, Artificial Sequence
  chemically synthesized
ttttttcaaaaagagttaataa

SEQ ID NO: 48274 - DNA, 22 bp, Artificial Sequence
  chemically synthesized
tttttcaaaaagagttaataag

SEQ ID NO: 48275 - DNA, 22 bp, Artificial Sequence
  chemically synthesized
ttttcaaaaagagttaataagc

SEQ ID NO: 48276 - DNA, 22 bp, Artificial Sequence
  chemically synthesized
tttcaaaaagagttaataagcc

SEQ ID NO: 48277 - DNA, 22 bp, Artificial Sequence
  chemically synthesized
ttcaaaaagagttaataagcct

SEQ ID NO: 48278 - DNA, 22 bp, Artificial Sequence
  chemically synthesized
tcaaaaagagttaataagcctt

SEQ ID NO: 48279 - DNA, 22 bp, Artificial Sequence
  chemically synthesized
caaaaagagttaataagccttt

SEQ ID NO: 48280 - DNA, 22 bp, Artificial Sequence
  chemically synthesized
aaaaagagttaataagcctttt

SEQ ID NO: 48281 - DNA, 22 bp, Artificial Sequence
  chemically synthesized
ataagccttttataggtgtacc

SEQ ID NO: 48282 - DNA, 22 bp, Artificial Sequence
  chemically synthesized
ttataggtgtaccacacaagac

SEQ ID NO: 48283 - DNA, 22 bp, Artificial Sequence
  chemically synthesized
tataggtgtaccacacaagact

SEQ ID NO: 48284 - DNA, 22 bp, Artificial Sequence
  chemically synthesized
ataggtgtaccacacaagactc

SEQ ID NO: 48285 - DNA, 22 bp, Artificial Sequence
  chemically synthesized
taggtgtaccacacaagactcc

SEQ ID NO: 48286 - DNA, 22 bp, Artificial Sequence
  chemically synthesized
cagtaagcaaaatcattcattg

SEQ ID NO: 48287 - DNA, 22 bp, Artificial Sequence
  chemically synthesized
attgccaggcaaaacttgagaa

SEQ ID NO: 48288 - DNA, 22 bp, Artificial Sequence
  chemically synthesized
ccaggcaaaacttgagaaatac

SEQ ID NO: 48289 - DNA, 22 bp, Artificial Sequence
  chemically synthesized
gagaaatacatttagaaatcat

SEQ ID NO: 48290 - DNA, 22 bp, Artificial Sequence
  chemically synthesized
agaaatacatttagaaatcata

SEQ ID NO: 48291 - DNA, 22 bp, Artificial Sequence
  chemically synthesized
agaaatcatacgagcacacagg

SEQ ID NO: 48292 - DNA, 22 bp, Artificial Sequence
  chemically synthesized
gaaatcatacgagcacacagga

SEQ ID NO: 48293 - DNA, 22 bp, Artificial Sequence
  chemically synthesized
aatcaagtaaatgaatcaccaa

SEQ ID NO: 48294 - DNA, 22 bp, Artificial Sequence
  chemically synthesized
gaaaattacttaactagcccaa

SEQ ID NO: 48295 - DNA, 22 bp, Artificial Sequence
  chemically synthesized
cttaactagcccaaacgttcaa

SEQ ID NO: 48296 - DNA, 22 bp, Artificial Sequence
  chemically synthesized
aactagcccaaacgttcaagaa

SEQ ID NO: 48297 - DNA, 22 bp, Artificial Sequence
  chemically synthesized
actagcccaaacgttcaagaat

SEQ ID NO: 48298 - DNA, 22 bp, Artificial Sequence
  chemically synthesized
gcccaaacgttcaagaattgac

SEQ ID NO: 48299 - DNA, 22 bp, Artificial Sequence
  chemically synthesized
aagaattgaccaaggtttaagc

SEQ ID NO: 48300 - DNA, 22 bp, Artificial Sequence
  chemically synthesized
accaaggtttaagcagtaaacc

SEQ ID NO: 48301 - DNA, 22 bp, Artificial Sequence
  chemically synthesized
aagcagtaaaccctaaataatt

SEQ ID NO: 48302 - DNA, 22 bp, Artificial Sequence
  chemically synthesized
agcagtaaaccctaaataattt

SEQ ID NO: 48303 - DNA, 22 bp, Artificial Sequence
  chemically synthesized
aataatttatttaagccaaata

SEQ ID NO: 48304 - DNA, 22 bp, Artificial Sequence
  chemically synthesized
atttaagccaaataggagcttt

SEQ ID NO: 48305 - DNA, 22 bp, Artificial Sequence
  chemically synthesized
tttaagccaaataggagcttta

SEQ ID NO: 48306 - DNA, 22 bp, Artificial Sequence
  chemically synthesized
aagccaaataggagctttaagc

SEQ ID NO: 48307 - DNA, 22 bp, Artificial Sequence
  chemically synthesized
agccaaataggagctttaagca

SEQ ID NO: 48308 - DNA, 22 bp, Artificial Sequence
  chemically synthesized
taagcacagacattaatgtaat

SEQ ID NO: 48309 - DNA, 22 bp, Artificial Sequence
  chemically synthesized
aagcacagacattaatgtaatg

SEQ ID NO: 48310 - DNA, 22 bp, Artificial Sequence
  chemically synthesized
agcacagacattaatgtaatgg

SEQ ID NO: 48311 - DNA, 22 bp, Artificial Sequence
  chemically synthesized
atgtaatggactatcccatctt

SEQ ID NO: 48312 - DNA, 22 bp, Artificial Sequence
  chemically synthesized
tcccatcttaaacttcagccag

SEQ ID NO: 48313 - DNA, 22 bp, Artificial Sequence
  chemically synthesized
aaacttcagccagagatctaaa

SEQ ID NO: 48314 - DNA, 22 bp, Artificial Sequence
  chemically synthesized
aacttcagccagagatctaaaa

SEQ ID NO: 48315 - DNA, 22 bp, Artificial Sequence
  chemically synthesized
cagccagagatctaaaactttg

SEQ ID NO: 48316 - DNA, 22 bp, Artificial Sequence
  chemically synthesized
agccagagatctaaaactttga

SEQ ID NO: 48317 - DNA, 22 bp, Artificial Sequence
  chemically synthesized
aaactttgaagtcaattatgtt

SEQ ID NO: 48318 - DNA, 22 bp, Artificial Sequence
  chemically synthesized
tgaagtcaattatgttcccata

SEQ ID NO: 48319 - DNA, 22 bp, Artificial Sequence
  chemically synthesized
gaagtcaattatgttcccataa

SEQ ID NO: 48320 - DNA, 22 bp, Artificial Sequence
  chemically synthesized
aagtcaattatgttcccataaa

SEQ ID NO: 48321 - DNA, 22 bp, Artificial Sequence
  chemically synthesized
tgttcccataaatacctctcca

SEQ ID NO: 48322 - DNA, 22 bp, Artificial Sequence
  chemically synthesized
ccataaatacctctccattatc

SEQ ID NO: 48323 - DNA, 22 bp, Artificial Sequence
  chemically synthesized
tccattatcaggggtgctttat

SEQ ID NO: 48324 - DNA, 22 bp, Artificial Sequence
  chemically synthesized
cattatcaggggtgctttattg

SEQ ID NO: 48325 - DNA, 22 bp, Artificial Sequence
  chemically synthesized
tcaggggtgctttattgtttga

SEQ ID NO: 48326 - DNA, 22 bp, Artificial Sequence
  chemically synthesized
tattgtttgagagactccggac

SEQ ID NO: 48327 - DNA, 22 bp, Artificial Sequence
  chemically synthesized
attgtttgagagactccggacc

SEQ ID NO: 48328 - DNA, 22 bp, Artificial Sequence
  chemically synthesized
ttgtttgagagactccggacca

SEQ ID NO: 48329 - DNA, 22 bp, Artificial Sequence
  chemically synthesized
tttgagagactccggaccacag

SEQ ID NO: 48330 - DNA, 22 bp, Artificial Sequence
  chemically synthesized
gagagactccggaccacaggaa

SEQ ID NO: 48331 - DNA, 22 bp, Artificial Sequence
  chemically synthesized
agagactccggaccacaggaac

SEQ ID NO: 48332 - DNA, 22 bp, Artificial Sequence
  chemically synthesized
cggaccacaggaactagtgtga

SEQ ID NO: 48333 - DNA, 22 bp, Artificial Sequence
  chemically synthesized
gtgtgaaaactggagggtatct

SEQ ID NO: 48334 - DNA, 22 bp, Artificial Sequence
  chemically synthesized
gagggtatcttcatttatcatc

SEQ ID NO: 48335 - DNA, 22 bp, Artificial Sequence
  chemically synthesized
catttatcatccgctcccattt

SEQ ID NO: 48336 - DNA, 22 bp, Artificial Sequence
  chemically synthesized
atttatcatccgctcccatttc

SEQ ID NO: 48337 - DNA, 22 bp, Artificial Sequence
  chemically synthesized
atcatccgctcccatttcgcaa

SEQ ID NO: 48338 - DNA, 22 bp, Artificial Sequence
  chemically synthesized
tcatccgctcccatttcgcaaa

SEQ ID NO: 48339 - DNA, 22 bp, Artificial Sequence
  chemically synthesized
ccatttcgcaaacaaaatatgc

SEQ ID NO: 48340 - DNA, 22 bp, Artificial Sequence
  chemically synthesized
cgcaaacaaaatatgccatggt

SEQ ID NO: 48341 - DNA, 22 bp, Artificial Sequence
  chemically synthesized
gcaaacaaaatatgccatggta

SEQ ID NO: 48342 - DNA, 22 bp, Artificial Sequence
  chemically synthesized
tatatcacattgtgacacagct

SEQ ID NO: 48343 - DNA, 22 bp, Artificial Sequence
  chemically synthesized
tgacacagctgaccgcattagt

SEQ ID NO: 48344 - DNA, 22 bp, Artificial Sequence
  chemically synthesized
accgcattagtgagccaagact

SEQ ID NO: 48345 - DNA, 22 bp, Artificial Sequence
  chemically synthesized
gtgagccaagactgtcctagcg

SEQ ID NO: 48346 - DNA, 22 bp, Artificial Sequence
  chemically synthesized
tcctagcggcagcttcctatca

SEQ ID NO: 48347 - DNA, 22 bp, Artificial Sequence
  chemically synthesized
gcggcagcttcctatcatgcat

SEQ ID NO: 48348 - DNA, 22 bp, Artificial Sequence
  chemically synthesized
cctatcatgcattaacaataca

SEQ ID NO: 48349 - DNA, 22 bp, Artificial Sequence
  chemically synthesized
ctatcatgcattaacaatacaa

SEQ ID NO: 48350 - DNA, 22 bp, Artificial Sequence
  chemically synthesized
tcatgcattaacaatacaacgg

SEQ ID NO: 48351 - DNA, 22 bp, Artificial Sequence
  chemically synthesized
acaatacaacggctgatacatt

SEQ ID NO: 48352 - DNA, 22 bp, Artificial Sequence
  chemically synthesized
atacatttgcacaacacaataa

SEQ ID NO: 48353 - DNA, 22 bp, Artificial Sequence
  chemically synthesized
gcacaacacaataagaggtggg

SEQ ID NO: 48354 - DNA, 22 bp, Artificial Sequence
  chemically synthesized
cacaacacaataagaggtgggg

SEQ ID NO: 48355 - DNA, 22 bp, Artificial Sequence
  chemically synthesized
ggctatgaaatcctaaacttca

SEQ ID NO: 48356 - DNA, 22 bp, Artificial Sequence
  chemically synthesized
tgaaatcctaaacttcatgtct

SEQ ID NO: 48357 - DNA, 22 bp, Artificial Sequence
  chemically synthesized
aacttcatgtctgaatacataa

SEQ ID NO: 48358 - DNA, 22 bp, Artificial Sequence
  chemically synthesized
catgtctgaatacataattttg

SEQ ID NO: 48359 - DNA, 22 bp, Artificial Sequence
  chemically synthesized
atgtctgaatacataattttgt

SEQ ID NO: 48360 - DNA, 22 bp, Artificial Sequence
  chemically synthesized
aatacataattttgtcacctat

SEQ ID NO: 48361 - DNA, 22 bp, Artificial Sequence
  chemically synthesized
tgtcacctatctctggcatgaa

SEQ ID NO: 48362 - DNA, 22 bp, Artificial Sequence
  chemically synthesized
gtcacctatctctggcatgaat

SEQ ID NO: 48363 - DNA, 22 bp, Artificial Sequence
  chemically synthesized
tcacctatctctggcatgaatg

SEQ ID NO: 48364 - DNA, 22 bp, Artificial Sequence
  chemically synthesized
tctctggcatgaatgttatcat

SEQ ID NO: 48365 - DNA, 22 bp, Artificial Sequence
  chemically synthesized
tggcatgaatgttatcatgctt

SEQ ID NO: 48366 - DNA, 22 bp, Artificial Sequence
  chemically synthesized
gcatgaatgttatcatgctttt

SEQ ID NO: 48367 - DNA, 22 bp, Artificial Sequence
  chemically synthesized
tcatgcttttatttcaggtaat

SEQ ID NO: 48368 - DNA, 22 bp, Artificial Sequence
  chemically synthesized
ttatttcaggtaataatggaag

SEQ ID NO: 48369 - DNA, 22 bp, Artificial Sequence
  chemically synthesized
tatttcaggtaataatggaagg

SEQ ID NO: 48370 - DNA, 22 bp, Artificial Sequence
  chemically synthesized
atttcaggtaataatggaaggg

SEQ ID NO: 48371 - DNA, 22 bp, Artificial Sequence
  chemically synthesized
tttcaggtaataatggaagggg

SEQ ID NO: 48372 - DNA, 22 bp, Artificial Sequence
  chemically synthesized
caggtaataatggaaggggaaa

SEQ ID NO: 48373 - DNA, 22 bp, Artificial Sequence
  chemically synthesized
aggtaataatggaaggggaaag

SEQ ID NO: 48374 - DNA, 22 bp, Artificial Sequence
  chemically synthesized
tggggggctgccattcattcgg

SEQ ID NO: 48375 - DNA, 22 bp, Artificial Sequence
  chemically synthesized
gggggctgccattcattcggcc

SEQ ID NO: 48376 - DNA, 22 bp, Artificial Sequence
  chemically synthesized
ccattcattcggcctgttattt

SEQ ID NO: 48377 - DNA, 22 bp, Artificial Sequence
  chemically synthesized
attcggcctgttatttgctttt

SEQ ID NO: 48378 - DNA, 22 bp, Artificial Sequence
  chemically synthesized
ggcctgttatttgcttttgggt

SEQ ID NO: 48379 - DNA, 22 bp, Artificial Sequence
  chemically synthesized
ttatttgcttttgggttgggtt

SEQ ID NO: 48380 - DNA, 22 bp, Artificial Sequence
  chemically synthesized
tttgcttttgggttgggttagg

SEQ ID NO: 48381 - DNA, 22 bp, Artificial Sequence
  chemically synthesized
gcttttgggttgggttagggct

SEQ ID NO: 48382 - DNA, 22 bp, Artificial Sequence
  chemically synthesized
cttttgggttgggttagggcta

SEQ ID NO: 48383 - DNA, 22 bp, Artificial Sequence
  chemically synthesized
ttgggttgggttagggctaaac

SEQ ID NO: 48384 - DNA, 22 bp, Artificial Sequence
  chemically synthesized
tgggttgggttagggctaaact

SEQ ID NO: 48385 - DNA, 22 bp, Artificial Sequence
  chemically synthesized
gggttgggttagggctaaactt

SEQ ID NO: 48386 - DNA, 22 bp, Artificial Sequence
  chemically synthesized
ggttgggttagggctaaacttt

SEQ ID NO: 48387 - DNA, 22 bp, Artificial Sequence
  chemically synthesized
ggttagggctaaactttatgtt

SEQ ID NO: 48388 - DNA, 22 bp, Artificial Sequence
  chemically synthesized
gggctaaactttatgttccttg

SEQ ID NO: 48389 - DNA, 22 bp, Artificial Sequence
  chemically synthesized
aactttatgttccttgtttttg

SEQ ID NO: 48390 - DNA, 22 bp, Artificial Sequence
  chemically synthesized
tatgttccttgtttttgttttt

SEQ ID NO: 48391 - DNA, 22 bp, Artificial Sequence
  chemically synthesized
atgttccttgtttttgtttttg

SEQ ID NO: 48392 - DNA, 22 bp, Artificial Sequence
  chemically synthesized
tgttccttgtttttgtttttgt

SEQ ID NO: 48393 - DNA, 22 bp, Artificial Sequence
  chemically synthesized
cttgtttttgtttttgtttttt

SEQ ID NO: 48394 - DNA, 22 bp, Artificial Sequence
  chemically synthesized
gtttttgtttttgttttttttt

SEQ ID NO: 48395 - DNA, 22 bp, Artificial Sequence
  chemically synthesized
tttttgtttttgtttttttttc

SEQ ID NO: 48396 - DNA, 22 bp, Artificial Sequence
  chemically synthesized
ttgtttttgtttttttttcttt

SEQ ID NO: 48397 - DNA, 22 bp, Artificial Sequence
  chemically synthesized
tgtttttgtttttttttctttt

SEQ ID NO: 48398 - DNA, 22 bp, Artificial Sequence
  chemically synthesized
gtttttgtttttttttcttttt

SEQ ID NO: 48399 - DNA, 22 bp, Artificial Sequence
  chemically synthesized
tttttgtttttttttctttttt

SEQ ID NO: 48400 - DNA, 22 bp, Artificial Sequence
  chemically synthesized
ttgtttttttttcttttttctt

SEQ ID NO: 48401 - DNA, 22 bp, Artificial Sequence
  chemically synthesized
tgtttttttttcttttttcttg

SEQ ID NO: 48402 - DNA, 22 bp, Artificial Sequence
  chemically synthesized
gtttttttttcttttttcttgt

SEQ ID NO: 48403 - DNA, 22 bp, Artificial Sequence
  chemically synthesized
tttttttttcttttttcttgtt

SEQ ID NO: 48404 - DNA, 22 bp, Artificial Sequence
  chemically synthesized
ttttttcttttttcttgttttt

SEQ ID NO: 48405 - DNA, 22 bp, Artificial Sequence
  chemically synthesized
tttttcttttttcttgtttttt

SEQ ID NO: 48406 - DNA, 22 bp, Artificial Sequence
  chemically synthesized
ttttcttttttcttgtttttta

SEQ ID NO: 48407 - DNA, 22 bp, Artificial Sequence
  chemically synthesized
tttcttttttcttgttttttaa

SEQ ID NO: 48408 - DNA, 22 bp, Artificial Sequence
  chemically synthesized
ttcttttttcttgttttttaag

SEQ ID NO: 48409 - DNA, 22 bp, Artificial Sequence
  chemically synthesized
tcttttttcttgttttttaaga

SEQ ID NO: 48410 - DNA, 22 bp, Artificial Sequence
  chemically synthesized
cttttttcttgttttttaagat

SEQ ID NO: 48411 - DNA, 22 bp, Artificial Sequence
  chemically synthesized
ttttttcttgttttttaagatt

SEQ ID NO: 48412 - DNA, 22 bp, Artificial Sequence
  chemically synthesized
ttttcttgttttttaagatttt

SEQ ID NO: 48413 - DNA, 22 bp, Artificial Sequence
  chemically synthesized
tttcttgttttttaagatttta

SEQ ID NO: 48414 - DNA, 22 bp, Artificial Sequence
  chemically synthesized
ttcttgttttttaagattttat

SEQ ID NO: 48415 - DNA, 22 bp, Artificial Sequence
  chemically synthesized
tcttgttttttaagattttatt

SEQ ID NO: 48416 - DNA, 22 bp, Artificial Sequence
  chemically synthesized
cttgttttttaagattttattt

SEQ ID NO: 48417 - DNA, 22 bp, Artificial Sequence
  chemically synthesized
ttgttttttaagattttatttt

SEQ ID NO: 48418 - DNA, 22 bp, Artificial Sequence
  chemically synthesized
gttttttaagattttattttgt

SEQ ID NO: 48419 - DNA, 22 bp, Artificial Sequence
  chemically synthesized
ttttttaagattttattttgtt

SEQ ID NO: 48420 - DNA, 22 bp, Artificial Sequence
  chemically synthesized
tttaagattttattttgttacc

SEQ ID NO: 48421 - DNA, 22 bp, Artificial Sequence
  chemically synthesized
ttaagattttattttgttacca

SEQ ID NO: 48422 - DNA, 22 bp, Artificial Sequence
  chemically synthesized
taagattttattttgttaccag

SEQ ID NO: 48423 - DNA, 22 bp, Artificial Sequence
  chemically synthesized
aagattttattttgttaccaga

SEQ ID NO: 48424 - DNA, 22 bp, Artificial Sequence
  chemically synthesized
agattttattttgttaccagag

SEQ ID NO: 48425 - DNA, 22 bp, Artificial Sequence
  chemically synthesized
tattttgttaccagagatagaa

SEQ ID NO: 48426 - DNA, 22 bp, Artificial Sequence
  chemically synthesized
attttgttaccagagatagaag

SEQ ID NO: 48427 - DNA, 22 bp, Artificial Sequence
  chemically synthesized
ttttgttaccagagatagaaga

SEQ ID NO: 48428 - DNA, 22 bp, Artificial Sequence
  chemically synthesized
tgttaccagagatagaagagca

SEQ ID NO: 48429 - DNA, 22 bp, Artificial Sequence
  chemically synthesized
gttaccagagatagaagagcat

SEQ ID NO: 48430 - DNA, 22 bp, Artificial Sequence
  chemically synthesized
ttaccagagatagaagagcatg

SEQ ID NO: 48431 - DNA, 22 bp, Artificial Sequence
  chemically synthesized
ccagagatagaagagcatgcaa

SEQ ID NO: 48432 - DNA, 22 bp, Artificial Sequence
  chemically synthesized
attaccagtgcccttacagagc

SEQ ID NO: 48433 - DNA, 22 bp, Artificial Sequence
  chemically synthesized
ccagtgcccttacagagcatgc

SEQ ID NO: 48434 - DNA, 22 bp, Artificial Sequence
  chemically synthesized
acagagcatgcctattaaaaat

SEQ ID NO: 48435 - DNA, 22 bp, Artificial Sequence
  chemically synthesized
cagagcatgcctattaaaaatc

SEQ ID NO: 48436 - DNA, 22 bp, Artificial Sequence
  chemically synthesized
ttaaaaatccccaaaacattat

SEQ ID NO: 48437 - DNA, 22 bp, Artificial Sequence
  chemically synthesized
aaaatccccaaaacattataaa

SEQ ID NO: 48438 - DNA, 22 bp, Artificial Sequence
  chemically synthesized
taaattaaagaggcagtaattt

SEQ ID NO: 48439 - DNA, 22 bp, Artificial Sequence
  chemically synthesized
aagaggcagtaatttaaataaa

SEQ ID NO: 48440 - DNA, 22 bp, Artificial Sequence
  chemically synthesized
aaataaattacctttttattga

SEQ ID NO: 48441 - DNA, 22 bp, Artificial Sequence
  chemically synthesized
aataaattacctttttattgaa

SEQ ID NO: 48442 - DNA, 22 bp, Artificial Sequence
  chemically synthesized
cctttttattgaagctatagat

SEQ ID NO: 48443 - DNA, 22 bp, Artificial Sequence
  chemically synthesized
tttattgaagctatagatctca

SEQ ID NO: 48444 - DNA, 22 bp, Artificial Sequence
  chemically synthesized
ttattgaagctatagatctcaa

SEQ ID NO: 48445 - DNA, 22 bp, Artificial Sequence
  chemically synthesized
tattgaagctatagatctcaag

SEQ ID NO: 48446 - DNA, 22 bp, Artificial Sequence
  chemically synthesized
attgaagctatagatctcaaga

SEQ ID NO: 48447 - DNA, 22 bp, Artificial Sequence
  chemically synthesized
ttgaagctatagatctcaagag

SEQ ID NO: 48448 - DNA, 22 bp, Artificial Sequence
  chemically synthesized
aagctatagatctcaagagtgc

SEQ ID NO: 48449 - DNA, 22 bp, Artificial Sequence
  chemically synthesized
tagatctcaagagtgcctgtgt

SEQ ID NO: 48450 - DNA, 22 bp, Artificial Sequence
  chemically synthesized
aagagtgcctgtgtcctacaag

SEQ ID NO: 48451 - DNA, 22 bp, Artificial Sequence
  chemically synthesized
tgtcctacaaggaacacatatt

SEQ ID NO: 48452 - DNA, 22 bp, Artificial Sequence
  chemically synthesized
caaggaacacatatttcacaac

SEQ ID NO: 48453 - DNA, 22 bp, Artificial Sequence
  chemically synthesized
cacaactgattcatttgcccct

SEQ ID NO: 48454 - DNA, 22 bp, Artificial Sequence
  chemically synthesized
acaactgattcatttgcccctt

SEQ ID NO: 48455 - DNA, 22 bp, Artificial Sequence
  chemically synthesized
attcatttgccccttactctga

SEQ ID NO: 48456 - DNA, 22 bp, Artificial Sequence
  chemically synthesized
atttgccccttactctgagcac

SEQ ID NO: 48457 - DNA, 22 bp, Artificial Sequence
  chemically synthesized
gccccttactctgagcacatgg

SEQ ID NO: 48458 - DNA, 22 bp, Artificial Sequence
  chemically synthesized
ccccttactctgagcacatggg

SEQ ID NO: 48459 - DNA, 22 bp, Artificial Sequence
  chemically synthesized
actctgagcacatgggataata

SEQ ID NO: 48460 - DNA, 22 bp, Artificial Sequence
  chemically synthesized
ctctgagcacatgggataataa

SEQ ID NO: 48461 - DNA, 22 bp, Artificial Sequence
  chemically synthesized
tgagcacatgggataataaaag

SEQ ID NO: 48462 - DNA, 22 bp, Artificial Sequence
  chemically synthesized
agcacatgggataataaaagaa

SEQ ID NO: 48463 - DNA, 22 bp, Artificial Sequence
  chemically synthesized
tagatcatcattatccaaagga

SEQ ID NO: 48464 - DNA, 22 bp, Artificial Sequence
  chemically synthesized
agatcatcattatccaaaggat

SEQ ID NO: 48465 - DNA, 22 bp, Artificial Sequence
  chemically synthesized
gatcatcattatccaaaggata

SEQ ID NO: 48466 - DNA, 22 bp, Artificial Sequence
  chemically synthesized
tccaaaggataactttgaatgc

SEQ ID NO: 48467 - DNA, 22 bp, Artificial Sequence
  chemically synthesized
tgaatgccctttttcagcatgc

SEQ ID NO: 48468 - DNA, 22 bp, Artificial Sequence
  chemically synthesized
gaatgccctttttcagcatgct

SEQ ID NO: 48469 - DNA, 22 bp, Artificial Sequence
  chemically synthesized
aatgccctttttcagcatgctt

SEQ ID NO: 48470 - DNA, 22 bp, Artificial Sequence
  chemically synthesized
tttcagcatgcttctgaaaaca

SEQ ID NO: 48471 - DNA, 22 bp, Artificial Sequence
  chemically synthesized
ttcagcatgcttctgaaaacat

SEQ ID NO: 48472 - DNA, 22 bp, Artificial Sequence
  chemically synthesized
tcagcatgcttctgaaaacatt

SEQ ID NO: 48473 - DNA, 22 bp, Artificial Sequence
  chemically synthesized
cagcatgcttctgaaaacattt

SEQ ID NO: 48474 - DNA, 22 bp, Artificial Sequence
  chemically synthesized
agcatgcttctgaaaacatttc

SEQ ID NO: 48475 - DNA, 22 bp, Artificial Sequence
  chemically synthesized
ctgaaaacatttcatatctcat

SEQ ID NO: 48476 - DNA, 22 bp, Artificial Sequence
  chemically synthesized
tgaaaacatttcatatctcatt

SEQ ID NO: 48477 - DNA, 22 bp, Artificial Sequence
  chemically synthesized
aaaacatttcatatctcattca

SEQ ID NO: 48478 - DNA, 22 bp, Artificial Sequence
  chemically synthesized
catatctcattcaatgccacat

SEQ ID NO: 48479 - DNA, 22 bp, Artificial Sequence
  chemically synthesized
atatctcattcaatgccacata

SEQ ID NO: 48480 - DNA, 22 bp, Artificial Sequence
  chemically synthesized
attcaatgccacatataaatgg

SEQ ID NO: 48481 - DNA, 22 bp, Artificial Sequence
  chemically synthesized
aatgccacatataaatggtatt

SEQ ID NO: 48482 - DNA, 22 bp, Artificial Sequence
  chemically synthesized
gctggacagtgtggaaaacaga

SEQ ID NO: 48483 - DNA, 22 bp, Artificial Sequence
  chemically synthesized
ctggacagtgtggaaaacagaa

SEQ ID NO: 48484 - DNA, 22 bp, Artificial Sequence
  chemically synthesized
gacagtgtggaaaacagaaaca

SEQ ID NO: 48485 - DNA, 22 bp, Artificial Sequence
  chemically synthesized
aaagccaatggtaaacaccaag

SEQ ID NO: 48486 - DNA, 22 bp, Artificial Sequence
  chemically synthesized
aaaaaatggattgcaaagatcg

SEQ ID NO: 48487 - DNA, 22 bp, Artificial Sequence
  chemically synthesized
aaaaatggattgcaaagatcgc

SEQ ID NO: 48488 - DNA, 22 bp, Artificial Sequence
  chemically synthesized
caaagatcgcatgtcccagaac

SEQ ID NO: 48489 - DNA, 22 bp, Artificial Sequence
  chemically synthesized
ttacctacatgatgaataaaaa

SEQ ID NO: 48490 - DNA, 22 bp, Artificial Sequence
  chemically synthesized
tacctacatgatgaataaaaaa

SEQ ID NO: 48491 - DNA, 22 bp, Artificial Sequence
  chemically synthesized
acctacatgatgaataaaaaaa

SEQ ID NO: 48492 - DNA, 22 bp, Artificial Sequence
  chemically synthesized
cctacatgatgaataaaaaaag

SEQ ID NO: 48493 - DNA, 22 bp, Artificial Sequence
  chemically synthesized
catgatgaataaaaaaagaaca

SEQ ID NO: 48494 - DNA, 22 bp, Artificial Sequence
  chemically synthesized
tccctcaatttatgctgtcttc

SEQ ID NO: 48495 - DNA, 22 bp, Artificial Sequence
  chemically synthesized
ccctcaatttatgctgtcttca

SEQ ID NO: 48496 - DNA, 22 bp, Artificial Sequence
  chemically synthesized
cctcaatttatgctgtcttcaa

SEQ ID NO: 48497 - DNA, 22 bp, Artificial Sequence
  chemically synthesized
aatttatgctgtcttcaacact

SEQ ID NO: 48498 - DNA, 22 bp, Artificial Sequence
  chemically synthesized
atgctgtcttcaacactaacag

SEQ ID NO: 48499 - DNA, 22 bp, Artificial Sequence
  chemically synthesized
tgctgtcttcaacactaacaga

SEQ ID NO: 48500 - DNA, 22 bp, Artificial Sequence
  chemically synthesized
tcttcaacactaacagagggag

SEQ ID NO: 48501 - DNA, 22 bp, Artificial Sequence
  chemically synthesized
caacactaacagagggagagtt

SEQ ID NO: 48502 - DNA, 22 bp, Artificial Sequence
  chemically synthesized
aacactaacagagggagagttc

SEQ ID NO: 48503 - DNA, 22 bp, Artificial Sequence
  chemically synthesized
acagagggagagttcttctaaa

SEQ ID NO: 48504 - DNA, 22 bp, Artificial Sequence
  chemically synthesized
ttctaaacatgttgcatcggat

SEQ ID NO: 48505 - DNA, 22 bp, Artificial Sequence
  chemically synthesized
ctaaacatgttgcatcggatgc

SEQ ID NO: 48506 - DNA, 22 bp, Artificial Sequence
  chemically synthesized
taaacatgttgcatcggatgcc

SEQ ID NO: 48507 - DNA, 22 bp, Artificial Sequence
  chemically synthesized
aacatgttgcatcggatgcctt

SEQ ID NO: 48508 - DNA, 22 bp, Artificial Sequence
  chemically synthesized
catcggatgcctttaacaagca

SEQ ID NO: 48509 - DNA, 22 bp, Artificial Sequence
  chemically synthesized
taacaagcaaaaattcctaact

SEQ ID NO: 48510 - DNA, 22 bp, Artificial Sequence
  chemically synthesized
aacaagcaaaaattcctaactc

SEQ ID NO: 48511 - DNA, 22 bp, Artificial Sequence
  chemically synthesized
acaagcaaaaattcctaactcc

SEQ ID NO: 48512 - DNA, 22 bp, Artificial Sequence
  chemically synthesized
ctaactccagggactcagcata

SEQ ID NO: 48513 - DNA, 22 bp, Artificial Sequence
  chemically synthesized
actccagggactcagcatatgt

SEQ ID NO: 48514 - DNA, 22 bp, Artificial Sequence
  chemically synthesized
cagggactcagcatatgtaggc

SEQ ID NO: 48515 - DNA, 22 bp, Artificial Sequence
  chemically synthesized
agcatatgtaggctatgtccat

SEQ ID NO: 48516 - DNA, 22 bp, Artificial Sequence
  chemically synthesized
tgtccatacagagaaaccagct

SEQ ID NO: 48517 - DNA, 22 bp, Artificial Sequence
  chemically synthesized
ttgggaggaggaaggaggaaaa

SEQ ID NO: 48518 - DNA, 22 bp, Artificial Sequence
  chemically synthesized
tgggaggaggaaggaggaaaat

SEQ ID NO: 48519 - DNA, 22 bp, Artificial Sequence
  chemically synthesized
gggaggaggaaggaggaaaata

SEQ ID NO: 48520 - DNA, 22 bp, Artificial Sequence
  chemically synthesized
ggaggaggaaggaggaaaatat

SEQ ID NO: 48521 - DNA, 22 bp, Artificial Sequence
  chemically synthesized
aattcagtcagttaattgaatt

SEQ ID NO: 48522 - DNA, 22 bp, Artificial Sequence
  chemically synthesized
agtcagttaattgaatttaaaa

SEQ ID NO: 48523 - DNA, 22 bp, Artificial Sequence
  chemically synthesized
attgaatttaaaatacctggtt

SEQ ID NO: 48524 - DNA, 22 bp, Artificial Sequence
  chemically synthesized
aatttaaaatacctggttgttt

SEQ ID NO: 48525 - DNA, 22 bp, Artificial Sequence
  chemically synthesized
aaaatacctggttgtttgaatt

SEQ ID NO: 48526 - DNA, 22 bp, Artificial Sequence
  chemically synthesized
aaatacctggttgtttgaattc

SEQ ID NO: 48527 - DNA, 22 bp, Artificial Sequence
  chemically synthesized
gttgtttgaattcaactatttc

SEQ ID NO: 48528 - DNA, 22 bp, Artificial Sequence
  chemically synthesized
tttgaattcaactatttctttt

SEQ ID NO: 48529 - DNA, 22 bp, Artificial Sequence
  chemically synthesized
gaattcaactatttctttttca

SEQ ID NO: 48530 - DNA, 22 bp, Artificial Sequence
  chemically synthesized
aattcaactatttctttttcaa

SEQ ID NO: 48531 - DNA, 22 bp, Artificial Sequence
  chemically synthesized
aactatttctttttcaaaaacg

SEQ ID NO: 48532 - DNA, 22 bp, Artificial Sequence
  chemically synthesized
tttctttttcaaaaacgtactt

SEQ ID NO: 48533 - DNA, 22 bp, Artificial Sequence
  chemically synthesized
ctttttcaaaaacgtacttcta

SEQ ID NO: 48534 - DNA, 22 bp, Artificial Sequence
  chemically synthesized
tttttcaaaaacgtacttctat

SEQ ID NO: 48535 - DNA, 22 bp, Artificial Sequence
  chemically synthesized
tttcaaaaacgtacttctattt

SEQ ID NO: 48536 - DNA, 22 bp, Artificial Sequence
  chemically synthesized
ttcaaaaacgtacttctatttt

SEQ ID NO: 48537 - DNA, 22 bp, Artificial Sequence
  chemically synthesized
tcaaaaacgtacttctattttg

SEQ ID NO: 48538 - DNA, 22 bp, Artificial Sequence
  chemically synthesized
caaaaacgtacttctattttga

SEQ ID NO: 48539 - DNA, 22 bp, Artificial Sequence
  chemically synthesized
aaaaacgtacttctattttgat

SEQ ID NO: 48540 - DNA, 22 bp, Artificial Sequence
  chemically synthesized
ctattttgatgtagttacattt

SEQ ID NO: 48541 - DNA, 22 bp, Artificial Sequence
  chemically synthesized
tattttgatgtagttacatttg

SEQ ID NO: 48542 - DNA, 22 bp, Artificial Sequence
  chemically synthesized
ttttgatgtagttacatttgcc

SEQ ID NO: 48543 - DNA, 22 bp, Artificial Sequence
  chemically synthesized
tgatgtagttacatttgcccaa

SEQ ID NO: 48544 - DNA, 22 bp, Artificial Sequence
  chemically synthesized
gatgtagttacatttgcccaaa

SEQ ID NO: 48545 - DNA, 22 bp, Artificial Sequence
  chemically synthesized
atgtagttacatttgcccaaaa

SEQ ID NO: 48546 - DNA, 22 bp, Artificial Sequence
  chemically synthesized
catttgcccaaaaaagcaaact

SEQ ID NO: 48547 - DNA, 22 bp, Artificial Sequence
  chemically synthesized
gcccaaaaaagcaaacttggag

SEQ ID NO: 48548 - DNA, 22 bp, Artificial Sequence
  chemically synthesized
cccaaaaaagcaaacttggaga

SEQ ID NO: 48549 - DNA, 22 bp, Artificial Sequence
  chemically synthesized
ggagaaaatacacattacattc

SEQ ID NO: 48550 - DNA, 22 bp, Artificial Sequence
  chemically synthesized
gagaaaatacacattacattct

SEQ ID NO: 48551 - DNA, 22 bp, Artificial Sequence
  chemically synthesized
cattctttggagtttttcaaaa

SEQ ID NO: 48552 - DNA, 22 bp, Artificial Sequence
  chemically synthesized
tttggagtttttcaaaaaaaac

SEQ ID NO: 48553 - DNA, 22 bp, Artificial Sequence
  chemically synthesized
tggagtttttcaaaaaaaacag

SEQ ID NO: 48554 - DNA, 22 bp, Artificial Sequence
  chemically synthesized
ggagtttttcaaaaaaaacagc

SEQ ID NO: 48555 - DNA, 22 bp, Artificial Sequence
  chemically synthesized
gagtttttcaaaaaaaacagct

SEQ ID NO: 48556 - DNA, 22 bp, Artificial Sequence
  chemically synthesized
ttcaaaaaaaacagcttgcaac

SEQ ID NO: 48557 - DNA, 22 bp, Artificial Sequence
  chemically synthesized
tcaaaaaaaacagcttgcaaca

SEQ ID NO: 48558 - DNA, 22 bp, Artificial Sequence
  chemically synthesized
caaaaaaaacagcttgcaacaa

SEQ ID NO: 48559 - DNA, 22 bp, Artificial Sequence
  chemically synthesized
aaaaaaaacagcttgcaacaat

SEQ ID NO: 48560 - DNA, 22 bp, Artificial Sequence
  chemically synthesized
gcaacaattaaaagatggagaa

SEQ ID NO: 48561 - DNA, 22 bp, Artificial Sequence
  chemically synthesized
caacaattaaaagatggagaaa

SEQ ID NO: 48562 - DNA, 22 bp, Artificial Sequence
  chemically synthesized
aaagatggagaaatcttataag

SEQ ID NO: 48563 - DNA, 22 bp, Artificial Sequence
  chemically synthesized
ataaggctggaaacttctgtga

SEQ ID NO: 48564 - DNA, 22 bp, Artificial Sequence
  chemically synthesized
taaggctggaaacttctgtgaa

SEQ ID NO: 48565 - DNA, 22 bp, Artificial Sequence
  chemically synthesized
gaaacttctgtgaattatcacc

SEQ ID NO: 48566 - DNA, 22 bp, Artificial Sequence
  chemically synthesized
ctgtgaattatcaccattccat

SEQ ID NO: 48567 - DNA, 22 bp, Artificial Sequence
  chemically synthesized
tgtgaattatcaccattccatt

SEQ ID NO: 48568 - DNA, 22 bp, Artificial Sequence
  chemically synthesized
tgaattatcaccattccattat

SEQ ID NO: 48569 - DNA, 22 bp, Artificial Sequence
  chemically synthesized
tcaccattccattatactgcac

SEQ ID NO: 48570 - DNA, 22 bp, Artificial Sequence
  chemically synthesized
cattatactgcacttcaatttt

SEQ ID NO: 48571 - DNA, 22 bp, Artificial Sequence
  chemically synthesized
tactgcacttcaattttgcttc

SEQ ID NO: 48572 - DNA, 22 bp, Artificial Sequence
  chemically synthesized
cacttcaattttgcttccagca

SEQ ID NO: 48573 - DNA, 22 bp, Artificial Sequence
  chemically synthesized
caattttgcttccagcaatttg

SEQ ID NO: 48574 - DNA, 22 bp, Artificial Sequence
  chemically synthesized
aattttgcttccagcaatttga

SEQ ID NO: 48575 - DNA, 22 bp, Artificial Sequence
  chemically synthesized
tgcttccagcaatttgaaagat

SEQ ID NO: 48576 - DNA, 22 bp, Artificial Sequence
  chemically synthesized
gcttccagcaatttgaaagatg

SEQ ID NO: 48577 - DNA, 22 bp, Artificial Sequence
  chemically synthesized
cttccagcaatttgaaagatgc

SEQ ID NO: 48578 - DNA, 22 bp, Artificial Sequence
  chemically synthesized
ccagcaatttgaaagatgcctt

SEQ ID NO: 48579 - DNA, 22 bp, Artificial Sequence
  chemically synthesized
cagcaatttgaaagatgccttt

SEQ ID NO: 48580 - DNA, 22 bp, Artificial Sequence
  chemically synthesized
gaaagatgcctttaagctttct

SEQ ID NO: 48581 - DNA, 22 bp, Artificial Sequence
  chemically synthesized
aaagatgcctttaagctttctg

SEQ ID NO: 48582 - DNA, 22 bp, Artificial Sequence
  chemically synthesized
taagctttctgttggggaatca

SEQ ID NO: 48583 - DNA, 22 bp, Artificial Sequence
  chemically synthesized
aagctttctgttggggaatcac

SEQ ID NO: 48584 - DNA, 22 bp, Artificial Sequence
  chemically synthesized
agctttctgttggggaatcacg

SEQ ID NO: 48585 - DNA, 22 bp, Artificial Sequence
  chemically synthesized
tctgttggggaatcacgaatcc

SEQ ID NO: 48586 - DNA, 22 bp, Artificial Sequence
  chemically synthesized
ctgttggggaatcacgaatcca

SEQ ID NO: 48587 - DNA, 22 bp, Artificial Sequence
  chemically synthesized
tgttggggaatcacgaatccaa

SEQ ID NO: 48588 - DNA, 22 bp, Artificial Sequence
  chemically synthesized
ttggggaatcacgaatccaagc

SEQ ID NO: 48589 - DNA, 22 bp, Artificial Sequence
  chemically synthesized
gggaatcacgaatccaagcctt

SEQ ID NO: 48590 - DNA, 22 bp, Artificial Sequence
  chemically synthesized
aatctccaccatagcttccatc

SEQ ID NO: 48591 - DNA, 22 bp, Artificial Sequence
  chemically synthesized
atctccaccatagcttccatct

SEQ ID NO: 48592 - DNA, 22 bp, Artificial Sequence
  chemically synthesized
caccatagcttccatctttgag

SEQ ID NO: 48593 - DNA, 22 bp, Artificial Sequence
  chemically synthesized
ccatctttgaggcaaatcaaga

SEQ ID NO: 48594 - DNA, 22 bp, Artificial Sequence
  chemically synthesized
catctttgaggcaaatcaagaa

SEQ ID NO: 48595 - DNA, 22 bp, Artificial Sequence
  chemically synthesized
tgaggcaaatcaagaaaataat

SEQ ID NO: 48596 - DNA, 22 bp, Artificial Sequence
  chemically synthesized
gaggcaaatcaagaaaataata

SEQ ID NO: 48597 - DNA, 22 bp, Artificial Sequence
  chemically synthesized
aggcaaatcaagaaaataatat

SEQ ID NO: 48598 - DNA, 22 bp, Artificial Sequence
  chemically synthesized
tgctgtctttgcaggtgagccc

SEQ ID NO: 48599 - DNA, 22 bp, Artificial Sequence
  chemically synthesized
ctgtctttgcaggtgagcccca

SEQ ID NO: 48600 - DNA, 22 bp, Artificial Sequence
  chemically synthesized
tctttgcaggtgagccccattc

SEQ ID NO: 48601 - DNA, 22 bp, Artificial Sequence
  chemically synthesized
tgcaggtgagccccattcagca

SEQ ID NO: 48602 - DNA, 22 bp, Artificial Sequence
  chemically synthesized
gcaggtgagccccattcagcaa

SEQ ID NO: 48603 - DNA, 22 bp, Artificial Sequence
  chemically synthesized
caggtgagccccattcagcaac

SEQ ID NO: 48604 - DNA, 22 bp, Artificial Sequence
  chemically synthesized
agcaactagattccaaaaaata

SEQ ID NO: 48605 - DNA, 22 bp, Artificial Sequence
  chemically synthesized
gattccaaaaaatagcagggag

SEQ ID NO: 48606 - DNA, 22 bp, Artificial Sequence
  chemically synthesized
caaaaaatagcagggagaaaac

SEQ ID NO: 48607 - DNA, 22 bp, Artificial Sequence
  chemically synthesized
gtcagtggtgttcatactatgc

SEQ ID NO: 48608 - DNA, 22 bp, Artificial Sequence
  chemically synthesized
atactatgctagaacatcatgg

SEQ ID NO: 48609 - DNA, 22 bp, Artificial Sequence
  chemically synthesized
tgctagaacatcatggggactt

SEQ ID NO: 48610 - DNA, 22 bp, Artificial Sequence
  chemically synthesized
gaacatcatggggacttagaga

SEQ ID NO: 48611 - DNA, 22 bp, Artificial Sequence
  chemically synthesized
agagacccacccagtccaaact

SEQ ID NO: 48612 - DNA, 22 bp, Artificial Sequence
  chemically synthesized
gagacccacccagtccaaacta

SEQ ID NO: 48613 - DNA, 22 bp, Artificial Sequence
  chemically synthesized
tctattttacctactttacaag

SEQ ID NO: 48614 - DNA, 22 bp, Artificial Sequence
  chemically synthesized
ttttacctactttacaagacaa

SEQ ID NO: 48615 - DNA, 22 bp, Artificial Sequence
  chemically synthesized
tacctactttacaagacaagga

SEQ ID NO: 48616 - DNA, 22 bp, Artificial Sequence
  chemically synthesized
acctactttacaagacaaggaa

SEQ ID NO: 48617 - DNA, 22 bp, Artificial Sequence
  chemically synthesized
cctactttacaagacaaggaaa

SEQ ID NO: 48618 - DNA, 22 bp, Artificial Sequence
  chemically synthesized
ctttacaagacaaggaaacaaa

SEQ ID NO: 48619 - DNA, 22 bp, Artificial Sequence
  chemically synthesized
tacaagacaaggaaacaaatgc

SEQ ID NO: 48620 - DNA, 22 bp, Artificial Sequence
  chemically synthesized
acaagacaaggaaacaaatgct

SEQ ID NO: 48621 - DNA, 22 bp, Artificial Sequence
  chemically synthesized
caagacaaggaaacaaatgcta

SEQ ID NO: 48622 - DNA, 22 bp, Artificial Sequence
  chemically synthesized
acaggtgaagggagcccaaaat

SEQ ID NO: 48623 - DNA, 22 bp, Artificial Sequence
  chemically synthesized
acagcatgatacaataagggtc

SEQ ID NO: 48624 - DNA, 22 bp, Artificial Sequence
  chemically synthesized
gttttcagatcagtgtctctct

SEQ ID NO: 48625 - DNA, 22 bp, Artificial Sequence
  chemically synthesized
tcagatcagtgtctctctgtta

SEQ ID NO: 48626 - DNA, 22 bp, Artificial Sequence
  chemically synthesized
cagatcagtgtctctctgttaa

SEQ ID NO: 48627 - DNA, 22 bp, Artificial Sequence
  chemically synthesized
agatcagtgtctctctgttaac

SEQ ID NO: 48628 - DNA, 22 bp, Artificial Sequence
  chemically synthesized
tctgttaacactaaaagtcaaa

SEQ ID NO: 48629 - DNA, 22 bp, Artificial Sequence
  chemically synthesized
tgttaacactaaaagtcaaagt

SEQ ID NO: 48630 - DNA, 22 bp, Artificial Sequence
  chemically synthesized
ttaacactaaaagtcaaagttt

SEQ ID NO: 48631 - DNA, 22 bp, Artificial Sequence
  chemically synthesized
acactaaaagtcaaagtttggt

SEQ ID NO: 48632 - DNA, 22 bp, Artificial Sequence
  chemically synthesized
aaagtcaaagtttggttctgga

SEQ ID NO: 48633 - DNA, 22 bp, Artificial Sequence
  chemically synthesized
ggttctggaaaatctgtaatgc

SEQ ID NO: 48634 - DNA, 22 bp, Artificial Sequence
  chemically synthesized
gttctggaaaatctgtaatgcc

SEQ ID NO: 48635 - DNA, 22 bp, Artificial Sequence
  chemically synthesized
tggaaaatctgtaatgcccaaa

SEQ ID NO: 48636 - DNA, 22 bp, Artificial Sequence
  chemically synthesized
gaaaatctgtaatgcccaaaag

SEQ ID NO: 48637 - DNA, 22 bp, Artificial Sequence
  chemically synthesized
taatgcccaaaagaccttaaat

SEQ ID NO: 48638 - DNA, 22 bp, Artificial Sequence
  chemically synthesized
aaatgccctccccccaaaccag

SEQ ID NO: 48639 - DNA, 22 bp, Artificial Sequence
  chemically synthesized
aatgccctccccccaaaccagt

SEQ ID NO: 48640 - DNA, 22 bp, Artificial Sequence
  chemically synthesized
cccccaaaccagtcttggtaat

SEQ ID NO: 48641 - DNA, 22 bp, Artificial Sequence
  chemically synthesized
ggtaatttctccatggctttca

SEQ ID NO: 48642 - DNA, 22 bp, Artificial Sequence
  chemically synthesized
gtaatttctccatggctttcac

SEQ ID NO: 48643 - DNA, 22 bp, Artificial Sequence
  chemically synthesized
ctccatggctttcacagaaggg

SEQ ID NO: 48644 - DNA, 22 bp, Artificial Sequence
  chemically synthesized
tccatggctttcacagaagggt

SEQ ID NO: 48645 - DNA, 22 bp, Artificial Sequence
  chemically synthesized
catggctttcacagaagggtaa

SEQ ID NO: 48646 - DNA, 22 bp, Artificial Sequence
  chemically synthesized
tcacagaagggtaaatgtctac

SEQ ID NO: 48647 - DNA, 22 bp, Artificial Sequence
  chemically synthesized
cacagaagggtaaatgtctact

SEQ ID NO: 48648 - DNA, 22 bp, Artificial Sequence
  chemically synthesized
acagaagggtaaatgtctactt

SEQ ID NO: 48649 - DNA, 22 bp, Artificial Sequence
  chemically synthesized
cttggaaggcctttactaattt

SEQ ID NO: 48650 - DNA, 22 bp, Artificial Sequence
  chemically synthesized
ggaaggcctttactaattttta

SEQ ID NO: 48651 - DNA, 22 bp, Artificial Sequence
  chemically synthesized
gaaggcctttactaatttttat

SEQ ID NO: 48652 - DNA, 22 bp, Artificial Sequence
  chemically synthesized
tactaatttttatgttatcttc

SEQ ID NO: 48653 - DNA, 22 bp, Artificial Sequence
  chemically synthesized
actaatttttatgttatcttct

SEQ ID NO: 48654 - DNA, 22 bp, Artificial Sequence
  chemically synthesized
ctaatttttatgttatcttctt

SEQ ID NO: 48655 - DNA, 22 bp, Artificial Sequence
  chemically synthesized
atttttatgttatcttcttcct

SEQ ID NO: 48656 - DNA, 22 bp, Artificial Sequence
  chemically synthesized
ttatgttatcttcttccttcat

SEQ ID NO: 48657 - DNA, 22 bp, Artificial Sequence
  chemically synthesized
tatgttatcttcttccttcatt

SEQ ID NO: 48658 - DNA, 22 bp, Artificial Sequence
  chemically synthesized
atgttatcttcttccttcattc

SEQ ID NO: 48659 - DNA, 22 bp, Artificial Sequence
  chemically synthesized
tgttatcttcttccttcattcg

SEQ ID NO: 48660 - DNA, 22 bp, Artificial Sequence
  chemically synthesized
tcttcttccttcattcgtgttt

SEQ ID NO: 48661 - DNA, 22 bp, Artificial Sequence
  chemically synthesized
cttccttcattcgtgtttggta

SEQ ID NO: 48662 - DNA, 22 bp, Artificial Sequence
  chemically synthesized
ttccttcattcgtgtttggtaa

SEQ ID NO: 48663 - DNA, 22 bp, Artificial Sequence
  chemically synthesized
ccttcattcgtgtttggtaatc

SEQ ID NO: 48664 - DNA, 22 bp, Artificial Sequence
  chemically synthesized
cttcattcgtgtttggtaatca

SEQ ID NO: 48665 - DNA, 22 bp, Artificial Sequence
  chemically synthesized
cattcgtgtttggtaatcaaaa

SEQ ID NO: 48666 - DNA, 22 bp, Artificial Sequence
  chemically synthesized
attcgtgtttggtaatcaaaaa

SEQ ID NO: 48667 - DNA, 22 bp, Artificial Sequence
  chemically synthesized
gtgtttggtaatcaaaaatagt

SEQ ID NO: 48668 - DNA, 22 bp, Artificial Sequence
  chemically synthesized
ggtaatcaaaaatagtttatca

SEQ ID NO: 48669 - DNA, 22 bp, Artificial Sequence
  chemically synthesized
gtaatcaaaaatagtttatcat

SEQ ID NO: 48670 - DNA, 22 bp, Artificial Sequence
  chemically synthesized
atcataatgctctcaattggaa

SEQ ID NO: 48671 - DNA, 22 bp, Artificial Sequence
  chemically synthesized
tcataatgctctcaattggaag

SEQ ID NO: 48672 - DNA, 22 bp, Artificial Sequence
  chemically synthesized
tcaattggaaggtcttcatact

SEQ ID NO: 48673 - DNA, 22 bp, Artificial Sequence
  chemically synthesized
aattggaaggtcttcatactac

SEQ ID NO: 48674 - DNA, 22 bp, Artificial Sequence
  chemically synthesized
gaaggtcttcatactacaggca

SEQ ID NO: 48675 - DNA, 22 bp, Artificial Sequence
  chemically synthesized
catactacaggcagatactgtt

SEQ ID NO: 48676 - DNA, 22 bp, Artificial Sequence
  chemically synthesized
atactacaggcagatactgtta

SEQ ID NO: 48677 - DNA, 22 bp, Artificial Sequence
  chemically synthesized
caggcagatactgttattttct

SEQ ID NO: 48678 - DNA, 22 bp, Artificial Sequence
  chemically synthesized
ttattttctggtagaggatggc

SEQ ID NO: 48679 - DNA, 22 bp, Artificial Sequence
  chemically synthesized
ttttctggtagaggatggcagc

SEQ ID NO: 48680 - DNA, 22 bp, Artificial Sequence
  chemically synthesized
tctggtagaggatggcagcagg

SEQ ID NO: 48681 - DNA, 22 bp, Artificial Sequence
  chemically synthesized
ctggtagaggatggcagcaggg

SEQ ID NO: 48682 - DNA, 22 bp, Artificial Sequence
  chemically synthesized
tggtagaggatggcagcagggc

SEQ ID NO: 48683 - DNA, 22 bp, Artificial Sequence
  chemically synthesized
gtagaggatggcagcagggctg

SEQ ID NO: 48684 - DNA, 22 bp, Artificial Sequence
  chemically synthesized
ggaaaaaagaatgtggtttttt

SEQ ID NO: 48685 - DNA, 22 bp, Artificial Sequence
  chemically synthesized
ttttctaaccacagtaggtttt

SEQ ID NO: 48686 - DNA, 22 bp, Artificial Sequence
  chemically synthesized
tttctaaccacagtaggttttt

SEQ ID NO: 48687 - DNA, 22 bp, Artificial Sequence
  chemically synthesized
ttctaaccacagtaggtttttt

SEQ ID NO: 48688 - DNA, 22 bp, Artificial Sequence
  chemically synthesized
tctaaccacagtaggttttttc

SEQ ID NO: 48689 - DNA, 22 bp, Artificial Sequence
  chemically synthesized
ctaaccacagtaggttttttct

SEQ ID NO: 48690 - DNA, 22 bp, Artificial Sequence
  chemically synthesized
taaccacagtaggttttttcta

SEQ ID NO: 48691 - DNA, 22 bp, Artificial Sequence
  chemically synthesized
accacagtaggttttttctata

SEQ ID NO: 48692 - DNA, 22 bp, Artificial Sequence
  chemically synthesized
tttctataacaatgatttcact

SEQ ID NO: 48693 - DNA, 22 bp, Artificial Sequence
  chemically synthesized
ttctataacaatgatttcactt

SEQ ID NO: 48694 - DNA, 22 bp, Artificial Sequence
  chemically synthesized
tctataacaatgatttcacttt

SEQ ID NO: 48695 - DNA, 22 bp, Artificial Sequence
  chemically synthesized
ctataacaatgatttcactttc

SEQ ID NO: 48696 - DNA, 22 bp, Artificial Sequence
  chemically synthesized
tataacaatgatttcactttct

SEQ ID NO: 48697 - DNA, 22 bp, Artificial Sequence
  chemically synthesized
taacaatgatttcactttctag

SEQ ID NO: 48698 - DNA, 22 bp, Artificial Sequence
  chemically synthesized
cactttctagatataaaacagg

SEQ ID NO: 48699 - DNA, 22 bp, Artificial Sequence
  chemically synthesized
actttctagatataaaacaggc

SEQ ID NO: 48700 - DNA, 22 bp, Artificial Sequence
  chemically synthesized
tctagatataaaacaggcatgg

SEQ ID NO: 48701 - DNA, 22 bp, Artificial Sequence
  chemically synthesized
ctagatataaaacaggcatggt

SEQ ID NO: 48702 - DNA, 22 bp, Artificial Sequence
  chemically synthesized
tagatataaaacaggcatggtt

SEQ ID NO: 48703 - DNA, 22 bp, Artificial Sequence
  chemically synthesized
gatataaaacaggcatggtttc

SEQ ID NO: 48704 - DNA, 22 bp, Artificial Sequence
  chemically synthesized
ctctcaccctgaacttctgcaa

SEQ ID NO: 48705 - DNA, 22 bp, Artificial Sequence
  chemically synthesized
tctcaccctgaacttctgcaaa

SEQ ID NO: 48706 - DNA, 22 bp, Artificial Sequence
  chemically synthesized
tcaccctgaacttctgcaaaat

SEQ ID NO: 48707 - DNA, 22 bp, Artificial Sequence
  chemically synthesized
accctgaacttctgcaaaatct

SEQ ID NO: 48708 - DNA, 22 bp, Artificial Sequence
  chemically synthesized
aacttctgcaaaatctagattt

SEQ ID NO: 48709 - DNA, 22 bp, Artificial Sequence
  chemically synthesized
ctgcaaaatctagatttgatca

SEQ ID NO: 48710 - DNA, 22 bp, Artificial Sequence
  chemically synthesized
tgcaaaatctagatttgatcaa

SEQ ID NO: 48711 - DNA, 22 bp, Artificial Sequence
  chemically synthesized
caaaatctagatttgatcaaat

SEQ ID NO: 48712 - DNA, 22 bp, Artificial Sequence
  chemically synthesized
gatttgatcaaattcagaaact

SEQ ID NO: 48713 - DNA, 22 bp, Artificial Sequence
  chemically synthesized
gatcaaattcagaaactggtga

SEQ ID NO: 48714 - DNA, 22 bp, Artificial Sequence
  chemically synthesized
atcaaattcagaaactggtgat

SEQ ID NO: 48715 - DNA, 22 bp, Artificial Sequence
  chemically synthesized
agaaactggtgatttgatcaaa

SEQ ID NO: 48716 - DNA, 22 bp, Artificial Sequence
  chemically synthesized
gtgatttgatcaaattcagaat

SEQ ID NO: 48717 - DNA, 22 bp, Artificial Sequence
  chemically synthesized
gatcaaattcagaatcccatat

SEQ ID NO: 48718 - DNA, 22 bp, Artificial Sequence
  chemically synthesized
atcaaattcagaatcccatatt

SEQ ID NO: 48719 - DNA, 22 bp, Artificial Sequence
  chemically synthesized
agaatcccatattttgggatga

SEQ ID NO: 48720 - DNA, 22 bp, Artificial Sequence
  chemically synthesized
tgggatgatgtgttctagcaga

SEQ ID NO: 48721 - DNA, 22 bp, Artificial Sequence
  chemically synthesized
gggatgatgtgttctagcagaa

SEQ ID NO: 48722 - DNA, 22 bp, Artificial Sequence
  chemically synthesized
ggatgatgtgttctagcagaaa

SEQ ID NO: 48723 - DNA, 22 bp, Artificial Sequence
  chemically synthesized
tagcagaaagctattggttggc

SEQ ID NO: 48724 - DNA, 22 bp, Artificial Sequence
  chemically synthesized
gcagaaagctattggttggcta

SEQ ID NO: 48725 - DNA, 22 bp, Artificial Sequence
  chemically synthesized
ttggttggctatattttgctct

SEQ ID NO: 48726 - DNA, 22 bp, Artificial Sequence
  chemically synthesized
gttggctatattttgctctttc

SEQ ID NO: 48727 - DNA, 22 bp, Artificial Sequence
  chemically synthesized
gctatattttgctctttcttcc

SEQ ID NO: 48728 - DNA, 22 bp, Artificial Sequence
  chemically synthesized
tattttgctctttcttccccaa

SEQ ID NO: 48729 - DNA, 22 bp, Artificial Sequence
  chemically synthesized
tgctctttcttccccaaaagat

SEQ ID NO: 48730 - DNA, 22 bp, Artificial Sequence
  chemically synthesized
gctctttcttccccaaaagatt

SEQ ID NO: 48731 - DNA, 22 bp, Artificial Sequence
  chemically synthesized
ctctttcttccccaaaagattt

SEQ ID NO: 48732 - DNA, 22 bp, Artificial Sequence
  chemically synthesized
tttcttccccaaaagattttta

SEQ ID NO: 48733 - DNA, 22 bp, Artificial Sequence
  chemically synthesized
tcttccccaaaagatttttaaa

SEQ ID NO: 48734 - DNA, 22 bp, Artificial Sequence
  chemically synthesized
cttccccaaaagatttttaaat

SEQ ID NO: 48735 - DNA, 22 bp, Artificial Sequence
  chemically synthesized
ttccccaaaagatttttaaata

SEQ ID NO: 48736 - DNA, 22 bp, Artificial Sequence
  chemically synthesized
ccccaaaagatttttaaatagt

SEQ ID NO: 48737 - DNA, 22 bp, Artificial Sequence
  chemically synthesized
cccaaaagatttttaaatagtt

SEQ ID NO: 48738 - DNA, 22 bp, Artificial Sequence
  chemically synthesized
ttaaatagttttcatctttaaa

SEQ ID NO: 48739 - DNA, 22 bp, Artificial Sequence
  chemically synthesized
taaatagttttcatctttaaaa

SEQ ID NO: 48740 - DNA, 22 bp, Artificial Sequence
  chemically synthesized
aaatagttttcatctttaaaag

SEQ ID NO: 48741 - DNA, 22 bp, Artificial Sequence
  chemically synthesized
aatagttttcatctttaaaagg

SEQ ID NO: 48742 - DNA, 22 bp, Artificial Sequence
  chemically synthesized
tcatctttaaaaggatttcaac

SEQ ID NO: 48743 - DNA, 22 bp, Artificial Sequence
  chemically synthesized
catctttaaaaggatttcaact

SEQ ID NO: 48744 - DNA, 22 bp, Artificial Sequence
  chemically synthesized
atctttaaaaggatttcaactt

SEQ ID NO: 48745 - DNA, 22 bp, Artificial Sequence
  chemically synthesized
taaaaggatttcaacttcagat

SEQ ID NO: 48746 - DNA, 22 bp, Artificial Sequence
  chemically synthesized
aaaaggatttcaacttcagatt

SEQ ID NO: 48747 - DNA, 22 bp, Artificial Sequence
  chemically synthesized
aaaggatttcaacttcagattg

SEQ ID NO: 48748 - DNA, 22 bp, Artificial Sequence
  chemically synthesized
caacttcagattgtgcccacgc

SEQ ID NO: 48749 - DNA, 22 bp, Artificial Sequence
  chemically synthesized
aacttcagattgtgcccacgcc

SEQ ID NO: 48750 - DNA, 22 bp, Artificial Sequence
  chemically synthesized
cagattgtgcccacgccaaagt

SEQ ID NO: 48751 - DNA, 22 bp, Artificial Sequence
  chemically synthesized
agattgtgcccacgccaaagtc

SEQ ID NO: 48752 - DNA, 22 bp, Artificial Sequence
  chemically synthesized
tgcccacgccaaagtctctata

SEQ ID NO: 48753 - DNA, 22 bp, Artificial Sequence
  chemically synthesized
tatacatctaatcaataaataa

SEQ ID NO: 48754 - DNA, 22 bp, Artificial Sequence
  chemically synthesized
tacatctaatcaataaataaat

SEQ ID NO: 48755 - DNA, 22 bp, Artificial Sequence
  chemically synthesized
atcaataaataaataagacaaa

SEQ ID NO: 48756 - DNA, 22 bp, Artificial Sequence
  chemically synthesized
atcctttaccatttgggaagtg

SEQ ID NO: 48757 - DNA, 22 bp, Artificial Sequence
  chemically synthesized
tcctttaccatttgggaagtgt

SEQ ID NO: 48758 - DNA, 22 bp, Artificial Sequence
  chemically synthesized
taccatttgggaagtgtacatt

SEQ ID NO: 48759 - DNA, 22 bp, Artificial Sequence
  chemically synthesized
accatttgggaagtgtacatta

SEQ ID NO: 48760 - DNA, 22 bp, Artificial Sequence
  chemically synthesized
ccatttgggaagtgtacattaa

SEQ ID NO: 48761 - DNA, 22 bp, Artificial Sequence
  chemically synthesized
gggaagtgtacattaattactg

SEQ ID NO: 48762 - DNA, 22 bp, Artificial Sequence
  chemically synthesized
ggaagtgtacattaattactgc

SEQ ID NO: 48763 - DNA, 22 bp, Artificial Sequence
  chemically synthesized
attactgcagattgtctcctat

SEQ ID NO: 48764 - DNA, 22 bp, Artificial Sequence
  chemically synthesized
ctgcagattgtctcctatgcat

SEQ ID NO: 48765 - DNA, 22 bp, Artificial Sequence
  chemically synthesized
cagattgtctcctatgcatctc

SEQ ID NO: 48766 - DNA, 22 bp, Artificial Sequence
  chemically synthesized
tctcctatgcatctccccccac

SEQ ID NO: 48767 - DNA, 22 bp, Artificial Sequence
  chemically synthesized
ctatgcatctccccccaccccc

SEQ ID NO: 48768 - DNA, 22 bp, Artificial Sequence
  chemically synthesized
tgcatctccccccaccccctct

SEQ ID NO: 48769 - DNA, 22 bp, Artificial Sequence
  chemically synthesized
cccccaccccctctgcatcgca

SEQ ID NO: 48770 - DNA, 22 bp, Artificial Sequence
  chemically synthesized
tgcatcgcagacagcagtgctc

SEQ ID NO: 48771 - DNA, 22 bp, Artificial Sequence
  chemically synthesized
catcgcagacagcagtgctcaa

SEQ ID NO: 48772 - DNA, 22 bp, Artificial Sequence
  chemically synthesized
aaaagggtccgcaaaataaaaa

SEQ ID NO: 48773 - DNA, 22 bp, Artificial Sequence
  chemically synthesized
aatgggtatttataattagaac

SEQ ID NO: 48774 - DNA, 22 bp, Artificial Sequence
  chemically synthesized
ataattagaacttaataatttg

SEQ ID NO: 48775 - DNA, 22 bp, Artificial Sequence
  chemically synthesized
taattagaacttaataatttgc

SEQ ID NO: 48776 - DNA, 22 bp, Artificial Sequence
  chemically synthesized
gaacttaataatttgcatcagg

SEQ ID NO: 48777 - DNA, 22 bp, Artificial Sequence
  chemically synthesized
aataatttgcatcagggacaaa

SEQ ID NO: 48778 - DNA, 22 bp, Artificial Sequence
  chemically synthesized
ataatttgcatcagggacaaat

SEQ ID NO: 48779 - DNA, 22 bp, Artificial Sequence
  chemically synthesized
gcatcagggacaaatgagctct

SEQ ID NO: 48780 - DNA, 22 bp, Artificial Sequence
  chemically synthesized
catcagggacaaatgagctctg

SEQ ID NO: 48781 - DNA, 22 bp, Artificial Sequence
  chemically synthesized
tgattttaatctgcagcgcatt

SEQ ID NO: 48782 - DNA, 22 bp, Artificial Sequence
  chemically synthesized
attttaatctgcagcgcattta

SEQ ID NO: 48783 - DNA, 22 bp, Artificial Sequence
  chemically synthesized
taatctgcagcgcatttagatt

SEQ ID NO: 48784 - DNA, 22 bp, Artificial Sequence
  chemically synthesized
aatctgcagcgcatttagatta

SEQ ID NO: 48785 - DNA, 22 bp, Artificial Sequence
  chemically synthesized
atctgcagcgcatttagattag

SEQ ID NO: 48786 - DNA, 22 bp, Artificial Sequence
  chemically synthesized
cagcgcatttagattagcccaa

SEQ ID NO: 48787 - DNA, 22 bp, Artificial Sequence
  chemically synthesized
agattagcccaaagatagtgta

SEQ ID NO: 48788 - DNA, 22 bp, Artificial Sequence
  chemically synthesized
gattagcccaaagatagtgtaa

SEQ ID NO: 48789 - DNA, 22 bp, Artificial Sequence
  chemically synthesized
gcccaaagatagtgtaatttga

SEQ ID NO: 48790 - DNA, 22 bp, Artificial Sequence
  chemically synthesized
gatggtttataggcctcctctc

SEQ ID NO: 48791 - DNA, 22 bp, Artificial Sequence
  chemically synthesized
atggtttataggcctcctctcg

SEQ ID NO: 48792 - DNA, 22 bp, Artificial Sequence
  chemically synthesized
ataggcctcctctcggattatg

SEQ ID NO: 48793 - DNA, 22 bp, Artificial Sequence
  chemically synthesized
taggcctcctctcggattatga

SEQ ID NO: 48794 - DNA, 22 bp, Artificial Sequence
  chemically synthesized
ctctcggattatgaaacaatac

SEQ ID NO: 48795 - DNA, 22 bp, Artificial Sequence
  chemically synthesized
tcggattatgaaacaataccaa

SEQ ID NO: 48796 - DNA, 22 bp, Artificial Sequence
  chemically synthesized
ggattatgaaacaataccaagc

SEQ ID NO: 48797 - DNA, 22 bp, Artificial Sequence
  chemically synthesized
tgaaacaataccaagccttcaa

SEQ ID NO: 48798 - DNA, 22 bp, Artificial Sequence
  chemically synthesized
caagtgcagtgtgtctatgtca

SEQ ID NO: 48799 - DNA, 22 bp, Artificial Sequence
  chemically synthesized
aagtgcagtgtgtctatgtcag

SEQ ID NO: 48800 - DNA, 22 bp, Artificial Sequence
  chemically synthesized
tgtcaggagggtgttaaagaag

SEQ ID NO: 48801 - DNA, 22 bp, Artificial Sequence
  chemically synthesized
aagaagaagatgcaatgaaaat

SEQ ID NO: 48802 - DNA, 22 bp, Artificial Sequence
  chemically synthesized
gacaacgtgaaagcagccataa

SEQ ID NO: 48803 - DNA, 22 bp, Artificial Sequence
  chemically synthesized
acaacgtgaaagcagccataaa

SEQ ID NO: 48804 - DNA, 22 bp, Artificial Sequence
  chemically synthesized
catgacaactgtgtaaaagtca

SEQ ID NO: 48805 - DNA, 22 bp, Artificial Sequence
  chemically synthesized
tgtaaaagtcatgatgaaacaa

SEQ ID NO: 48806 - DNA, 22 bp, Artificial Sequence
  chemically synthesized
acctataatgcgtctgattcat

SEQ ID NO: 48807 - DNA, 22 bp, Artificial Sequence
  chemically synthesized
taatgcgtctgattcattgtga

SEQ ID NO: 48808 - DNA, 22 bp, Artificial Sequence
  chemically synthesized
attcattgtgacacacacaact

SEQ ID NO: 48809 - DNA, 22 bp, Artificial Sequence
  chemically synthesized
attgtgacacacacaactccct

SEQ ID NO: 48810 - DNA, 22 bp, Artificial Sequence
  chemically synthesized
tgacacacacaactccctgcgc

SEQ ID NO: 48811 - DNA, 22 bp, Artificial Sequence
  chemically synthesized
cctgcgctaatctctgcccagc

SEQ ID NO: 48812 - DNA, 22 bp, Artificial Sequence
  chemically synthesized
cgctaatctctgcccagccaac

SEQ ID NO: 48813 - DNA, 22 bp, Artificial Sequence
  chemically synthesized
atctctgcccagccaacgcatt

SEQ ID NO: 48814 - DNA, 22 bp, Artificial Sequence
  chemically synthesized
tgcccagccaacgcattcttaa

SEQ ID NO: 48815 - DNA, 22 bp, Artificial Sequence
  chemically synthesized
cccagccaacgcattcttaagc

SEQ ID NO: 48816 - DNA, 22 bp, Artificial Sequence
  chemically synthesized
ttaagcggggaactacttagca

SEQ ID NO: 48817 - DNA, 22 bp, Artificial Sequence
  chemically synthesized
aagcggggaactacttagcacc

SEQ ID NO: 48818 - DNA, 22 bp, Artificial Sequence
  chemically synthesized
agcggggaactacttagcacca

SEQ ID NO: 48819 - DNA, 22 bp, Artificial Sequence
  chemically synthesized
cttagcaccaggaacgttgtaa

SEQ ID NO: 48820 - DNA, 22 bp, Artificial Sequence
  chemically synthesized
agcaccaggaacgttgtaaatt

SEQ ID NO: 48821 - DNA, 22 bp, Artificial Sequence
  chemically synthesized
gcaccaggaacgttgtaaatta

SEQ ID NO: 48822 - DNA, 22 bp, Artificial Sequence
  chemically synthesized
taaattatcactagtcaacagc

SEQ ID NO: 48823 - DNA, 22 bp, Artificial Sequence
  chemically synthesized
tcactagtcaacagcattgatt

SEQ ID NO: 48824 - DNA, 22 bp, Artificial Sequence
  chemically synthesized
gtcaacagcattgatttttagt

SEQ ID NO: 48825 - DNA, 22 bp, Artificial Sequence
  chemically synthesized
atttttagtcgacatttcaatc

SEQ ID NO: 48826 - DNA, 22 bp, Artificial Sequence
  chemically synthesized
ttagtcgacatttcaatcaggt

SEQ ID NO: 48827 - DNA, 22 bp, Artificial Sequence
  chemically synthesized
tagtcgacatttcaatcaggtt

SEQ ID NO: 48828 - DNA, 22 bp, Artificial Sequence
  chemically synthesized
agtcgacatttcaatcaggttg

SEQ ID NO: 48829 - DNA, 22 bp, Artificial Sequence
  chemically synthesized
gtcgacatttcaatcaggttga

SEQ ID NO: 48830 - DNA, 22 bp, Artificial Sequence
  chemically synthesized
caatcaggttgaagtagaaata

SEQ ID NO: 48831 - DNA, 22 bp, Artificial Sequence
  chemically synthesized
aatcaggttgaagtagaaatac

SEQ ID NO: 48832 - DNA, 22 bp, Artificial Sequence
  chemically synthesized
aagtagaaatactacccggctc

SEQ ID NO: 48833 - DNA, 22 bp, Artificial Sequence
  chemically synthesized
cccggctcatccaacagcctct

SEQ ID NO: 48834 - DNA, 22 bp, Artificial Sequence
  chemically synthesized
atccaacagcctcttaaccagt

SEQ ID NO: 48835 - DNA, 22 bp, Artificial Sequence
  chemically synthesized
ttaaccagtccactgcccctct

SEQ ID NO: 48836 - DNA, 22 bp, Artificial Sequence
  chemically synthesized
aaccagtccactgcccctctga

SEQ ID NO: 48837 - DNA, 22 bp, Artificial Sequence
  chemically synthesized
accagtccactgcccctctgag

SEQ ID NO: 48838 - DNA, 22 bp, Artificial Sequence
  chemically synthesized
cccctctgaggtctccccggtt

SEQ ID NO: 48839 - DNA, 22 bp, Artificial Sequence
  chemically synthesized
tgaggtctccccggttatggct

SEQ ID NO: 48840 - DNA, 22 bp, Artificial Sequence
  chemically synthesized
aggtctccccggttatggcttt

SEQ ID NO: 48841 - DNA, 22 bp, Artificial Sequence
  chemically synthesized
cccggttatggctttgctaaat

SEQ ID NO: 48842 - DNA, 22 bp, Artificial Sequence
  chemically synthesized
tggctttgctaaatttccattg

SEQ ID NO: 48843 - DNA, 22 bp, Artificial Sequence
  chemically synthesized
tgctaaatttccattgctctca

SEQ ID NO: 48844 - DNA, 22 bp, Artificial Sequence
  chemically synthesized
gctaaatttccattgctctcac

SEQ ID NO: 48845 - DNA, 22 bp, Artificial Sequence
  chemically synthesized
ctaaatttccattgctctcacc

SEQ ID NO: 48846 - DNA, 22 bp, Artificial Sequence
  chemically synthesized
aatttccattgctctcaccatt

SEQ ID NO: 48847 - DNA, 22 bp, Artificial Sequence
  chemically synthesized
ccattgctctcaccattcgata

SEQ ID NO: 48848 - DNA, 22 bp, Artificial Sequence
  chemically synthesized
cattgctctcaccattcgatat

SEQ ID NO: 48849 - DNA, 22 bp, Artificial Sequence
  chemically synthesized
ctctcaccattcgatatttatt

SEQ ID NO: 48850 - DNA, 22 bp, Artificial Sequence
  chemically synthesized
tcaccattcgatatttattgta

SEQ ID NO: 48851 - DNA, 22 bp, Artificial Sequence
  chemically synthesized
accattcgatatttattgtagc

SEQ ID NO: 48852 - DNA, 22 bp, Artificial Sequence
  chemically synthesized
gatatttattgtagctttgcca

SEQ ID NO: 48853 - DNA, 22 bp, Artificial Sequence
  chemically synthesized
attgtagctttgccacatccag

SEQ ID NO: 48854 - DNA, 22 bp, Artificial Sequence
  chemically synthesized
ttgtagctttgccacatccagg

SEQ ID NO: 48855 - DNA, 22 bp, Artificial Sequence
  chemically synthesized
tagctttgccacatccaggcac

SEQ ID NO: 48856 - DNA, 22 bp, Artificial Sequence
  chemically synthesized
tgccacatccaggcacttggcc

SEQ ID NO: 48857 - DNA, 22 bp, Artificial Sequence
  chemically synthesized
gccacatccaggcacttggcct

SEQ ID NO: 48858 - DNA, 22 bp, Artificial Sequence
  chemically synthesized
ccacatccaggcacttggcctg

SEQ ID NO: 48859 - DNA, 22 bp, Artificial Sequence
  chemically synthesized
ggcctgaagggtcaccggcctg

SEQ ID NO: 48860 - DNA, 22 bp, Artificial Sequence
  chemically synthesized
gcctgaagggtcaccggcctgc

SEQ ID NO: 48861 - DNA, 22 bp, Artificial Sequence
  chemically synthesized
aagggtcaccggcctgcctctt

SEQ ID NO: 48862 - DNA, 22 bp, Artificial Sequence
  chemically synthesized
cctcttgggacatcaaatttgt

SEQ ID NO: 48863 - DNA, 22 bp, Artificial Sequence
  chemically synthesized
ttgggacatcaaatttgtgctt

SEQ ID NO: 48864 - DNA, 22 bp, Artificial Sequence
  chemically synthesized
gggacatcaaatttgtgcttac

SEQ ID NO: 48865 - DNA, 22 bp, Artificial Sequence
  chemically synthesized
ggacatcaaatttgtgcttacc

SEQ ID NO: 48866 - DNA, 22 bp, Artificial Sequence
  chemically synthesized
gtgcttacctaacgaaggcaga

SEQ ID NO: 48867 - DNA, 22 bp, Artificial Sequence
  chemically synthesized
tgcttacctaacgaaggcagaa

SEQ ID NO: 48868 - DNA, 22 bp, Artificial Sequence
  chemically synthesized
acctaacgaaggcagaaacaga

SEQ ID NO: 48869 - DNA, 22 bp, Artificial Sequence
  chemically synthesized
cctaacgaaggcagaaacagaa

SEQ ID NO: 48870 - DNA, 22 bp, Artificial Sequence
  chemically synthesized
acgaaggcagaaacagaaaaag

SEQ ID NO: 48871 - DNA, 22 bp, Artificial Sequence
  chemically synthesized
attttcactgattttcaaggga

SEQ ID NO: 48872 - DNA, 22 bp, Artificial Sequence
  chemically synthesized
tcactgattttcaagggaagag

SEQ ID NO: 48873 - DNA, 22 bp, Artificial Sequence
  chemically synthesized
cactgattttcaagggaagaga

SEQ ID NO: 48874 - DNA, 22 bp, Artificial Sequence
  chemically synthesized
actgattttcaagggaagagaa

SEQ ID NO: 48875 - DNA, 22 bp, Artificial Sequence
  chemically synthesized
attttcaagggaagagaaggaa

SEQ ID NO: 48876 - DNA, 22 bp, Artificial Sequence
  chemically synthesized
tcaagggaagagaaggaaaact

SEQ ID NO: 48877 - DNA, 22 bp, Artificial Sequence
  chemically synthesized
caagggaagagaaggaaaacta

SEQ ID NO: 48878 - DNA, 22 bp, Artificial Sequence
  chemically synthesized
aagggaagagaaggaaaactag

SEQ ID NO: 48879 - DNA, 22 bp, Artificial Sequence
  chemically synthesized
gggggtgcgagcgagggaaata

SEQ ID NO: 48880 - DNA, 22 bp, Artificial Sequence
  chemically synthesized
taaagccatgatacgcctttta

SEQ ID NO: 48881 - DNA, 22 bp, Artificial Sequence
  chemically synthesized
aagccatgatacgccttttatc

SEQ ID NO: 48882 - DNA, 22 bp, Artificial Sequence
  chemically synthesized
ttatcatttcagctttatcatt

SEQ ID NO: 48883 - DNA, 22 bp, Artificial Sequence
  chemically synthesized
tatcatttcagctttatcattt

SEQ ID NO: 48884 - DNA, 22 bp, Artificial Sequence
  chemically synthesized
atcatttcagctttatcatttc

SEQ ID NO: 48885 - DNA, 22 bp, Artificial Sequence
  chemically synthesized
tcatttcagctttatcatttca

SEQ ID NO: 48886 - DNA, 22 bp, Artificial Sequence
  chemically synthesized
cagctttatcatttcagtctag

SEQ ID NO: 48887 - DNA, 22 bp, Artificial Sequence
  chemically synthesized
agctttatcatttcagtctagg

SEQ ID NO: 48888 - DNA, 22 bp, Artificial Sequence
  chemically synthesized
tatcatttcagtctaggagacc

SEQ ID NO: 48889 - DNA, 22 bp, Artificial Sequence
  chemically synthesized
atcatttcagtctaggagaccc

SEQ ID NO: 48890 - DNA, 22 bp, Artificial Sequence
  chemically synthesized
tcatttcagtctaggagaccca

SEQ ID NO: 48891 - DNA, 22 bp, Artificial Sequence
  chemically synthesized
cagtctaggagacccagcaaat

SEQ ID NO: 48892 - DNA, 22 bp, Artificial Sequence
  chemically synthesized
agtctaggagacccagcaaata

SEQ ID NO: 48893 - DNA, 22 bp, Artificial Sequence
  chemically synthesized
ggagacccagcaaataaaacta

SEQ ID NO: 48894 - DNA, 22 bp, Artificial Sequence
  chemically synthesized
agagcttctcttccagggtgac

SEQ ID NO: 48895 - DNA, 22 bp, Artificial Sequence
  chemically synthesized
ctcttccagggtgacaagggag

SEQ ID NO: 48896 - DNA, 22 bp, Artificial Sequence
  chemically synthesized
tcttccagggtgacaagggaga

SEQ ID NO: 48897 - DNA, 22 bp, Artificial Sequence
  chemically synthesized
ttccagggtgacaagggagaac

SEQ ID NO: 48898 - DNA, 22 bp, Artificial Sequence
  chemically synthesized
ccagggtgacaagggagaacca

SEQ ID NO: 48899 - DNA, 22 bp, Artificial Sequence
  chemically synthesized
cagggtgacaagggagaaccac

SEQ ID NO: 48900 - DNA, 22 bp, Artificial Sequence
  chemically synthesized
cactcttgacccaagggtatgt

SEQ ID NO: 48901 - DNA, 22 bp, Artificial Sequence
  chemically synthesized
ttgacccaagggtatgtagaga

SEQ ID NO: 48902 - DNA, 22 bp, Artificial Sequence
  chemically synthesized
gacccaagggtatgtagagaca

SEQ ID NO: 48903 - DNA, 22 bp, Artificial Sequence
  chemically synthesized
acccaagggtatgtagagacaa

SEQ ID NO: 48904 - DNA, 22 bp, Artificial Sequence
  chemically synthesized
gcatgacctccattgaggacgt

SEQ ID NO: 48905 - DNA, 22 bp, Artificial Sequence
  chemically synthesized
catgacctccattgaggacgtc

SEQ ID NO: 48906 - DNA, 22 bp, Artificial Sequence
  chemically synthesized
cattgaggacgtccatgccccg

SEQ ID NO: 48907 - DNA, 22 bp, Artificial Sequence
  chemically synthesized
aggacgtccatgccccgggaca

SEQ ID NO: 48908 - DNA, 22 bp, Artificial Sequence
  chemically synthesized
tggagctcttgacccacatgga

SEQ ID NO: 48909 - DNA, 22 bp, Artificial Sequence
  chemically synthesized
ggagctcttgacccacatggat

SEQ ID NO: 48910 - DNA, 22 bp, Artificial Sequence
  chemically synthesized
gagctcttgacccacatggatt

SEQ ID NO: 48911 - DNA, 22 bp, Artificial Sequence
  chemically synthesized
ttgacccacatggattctcagc

SEQ ID NO: 48912 - DNA, 22 bp, Artificial Sequence
  chemically synthesized
gacccacatggattctcagcag

SEQ ID NO: 48913 - DNA, 22 bp, Artificial Sequence
  chemically synthesized
acccacatggattctcagcagc

SEQ ID NO: 48914 - DNA, 22 bp, Artificial Sequence
  chemically synthesized
tcagcagccacctccatcccac

SEQ ID NO: 48915 - DNA, 22 bp, Artificial Sequence
  chemically synthesized
agcagccacctccatcccacct

SEQ ID NO: 48916 - DNA, 22 bp, Artificial Sequence
  chemically synthesized
catcccacctcaaactcagaag

SEQ ID NO: 48917 - DNA, 22 bp, Artificial Sequence
  chemically synthesized
aaactcagaagacaacctggat

SEQ ID NO: 48918 - DNA, 22 bp, Artificial Sequence
  chemically synthesized
agaagacaacctggatgtgacc

SEQ ID NO: 48919 - DNA, 22 bp, Artificial Sequence
  chemically synthesized
gatgtgaccgacaacttctttg

SEQ ID NO: 48920 - DNA, 22 bp, Artificial Sequence
  chemically synthesized
ctttgtgatggatctgaacagc

SEQ ID NO: 48921 - DNA, 22 bp, Artificial Sequence
  chemically synthesized
tttgtgatggatctgaacagcc

SEQ ID NO: 48922 - DNA, 22 bp, Artificial Sequence
  chemically synthesized
tgtgatggatctgaacagcctc

SEQ ID NO: 48923 - DNA, 22 bp, Artificial Sequence
  chemically synthesized
gtgatggatctgaacagcctcc

SEQ ID NO: 48924 - DNA, 22 bp, Artificial Sequence
  chemically synthesized
tgatggatctgaacagcctccc

SEQ ID NO: 48925 - DNA, 22 bp, Artificial Sequence
  chemically synthesized
aacagcctcccttggttctagc

SEQ ID NO: 48926 - DNA, 22 bp, Artificial Sequence
  chemically synthesized
ccttggttctagcagaaggact

SEQ ID NO: 48927 - DNA, 22 bp, Artificial Sequence
  chemically synthesized
ggttctagcagaaggacttacc

SEQ ID NO: 48928 - DNA, 22 bp, Artificial Sequence
  chemically synthesized
gttctagcagaaggacttacca

SEQ ID NO: 48929 - DNA, 22 bp, Artificial Sequence
  chemically synthesized
tagcagaaggacttaccaagtg

SEQ ID NO: 48930 - DNA, 22 bp, Artificial Sequence
  chemically synthesized
gcagaaggacttaccaagtgag

SEQ ID NO: 48931 - DNA, 22 bp, Artificial Sequence
  chemically synthesized
accaagtgagcagagctcccat

SEQ ID NO: 48932 - DNA, 22 bp, Artificial Sequence
  chemically synthesized
ccaagtgagcagagctcccatc

SEQ ID NO: 48933 - DNA, 22 bp, Artificial Sequence
  chemically synthesized
ccatccgatactcgccagtgct

SEQ ID NO: 48934 - DNA, 22 bp, Artificial Sequence
  chemically synthesized
gccagtgctgaggccaactctt

SEQ ID NO: 48935 - DNA, 22 bp, Artificial Sequence
  chemically synthesized
aggccaactcttccactcctcc

SEQ ID NO: 48936 - DNA, 22 bp, Artificial Sequence
  chemically synthesized
ttccactcctcccacggggcct

SEQ ID NO: 48937 - DNA, 22 bp, Artificial Sequence
  chemically synthesized
ccactcctcccacggggcctcc

SEQ ID NO: 48938 - DNA, 22 bp, Artificial Sequence
  chemically synthesized
cactcctcccacggggcctccg

SEQ ID NO: 48939 - DNA, 22 bp, Artificial Sequence
  chemically synthesized
ctcccacggggcctccgcatga

SEQ ID NO: 48940 - DNA, 22 bp, Artificial Sequence
  chemically synthesized
ccacggggcctccgcatgaagt

SEQ ID NO: 48941 - DNA, 22 bp, Artificial Sequence
  chemically synthesized
cgcatgaagtaggcgcttctca

SEQ ID NO: 48942 - DNA, 22 bp, Artificial Sequence
  chemically synthesized
ctcaactaccaaatgattctga

SEQ ID NO: 48943 - DNA, 22 bp, Artificial Sequence
  chemically synthesized
tcaactaccaaatgattctgaa

SEQ ID NO: 48944 - DNA, 22 bp, Artificial Sequence
  chemically synthesized
aactaccaaatgattctgaaat

SEQ ID NO: 48945 - DNA, 22 bp, Artificial Sequence
  chemically synthesized
ccaaatgattctgaaattctct

SEQ ID NO: 48946 - DNA, 22 bp, Artificial Sequence
  chemically synthesized
tgaaattctctcagtggaggtc

SEQ ID NO: 48947 - DNA, 22 bp, Artificial Sequence
  chemically synthesized
aaattctctcagtggaggtcta

SEQ ID NO: 48948 - DNA, 22 bp, Artificial Sequence
  chemically synthesized
tctcagtggaggtctatgttag

SEQ ID NO: 48949 - DNA, 22 bp, Artificial Sequence
  chemically synthesized
tcagtggaggtctatgttagcc

SEQ ID NO: 48950 - DNA, 22 bp, Artificial Sequence
  chemically synthesized
agtggaggtctatgttagcctg

SEQ ID NO: 48951 - DNA, 22 bp, Artificial Sequence
  chemically synthesized
tgttagcctggccaatttgaaa

SEQ ID NO: 48952 - DNA, 22 bp, Artificial Sequence
  chemically synthesized
gcctggccaatttgaaaggatg

SEQ ID NO: 48953 - DNA, 22 bp, Artificial Sequence
  chemically synthesized
gccaatttgaaaggatggagaa

SEQ ID NO: 48954 - DNA, 22 bp, Artificial Sequence
  chemically synthesized
gaaaggatggagaatacaggaa

SEQ ID NO: 48955 - DNA, 22 bp, Artificial Sequence
  chemically synthesized
aaaggatggagaatacaggaaa

SEQ ID NO: 48956 - DNA, 22 bp, Artificial Sequence
  chemically synthesized
ggttttggaatacattgtgtaa

SEQ ID NO: 48957 - DNA, 22 bp, Artificial Sequence
  chemically synthesized
gttttggaatacattgtgtaat

SEQ ID NO: 48958 - DNA, 22 bp, Artificial Sequence
  chemically synthesized
tggaatacattgtgtaatccat

SEQ ID NO: 48959 - DNA, 22 bp, Artificial Sequence
  chemically synthesized
ggaatacattgtgtaatccatc

SEQ ID NO: 48960 - DNA, 22 bp, Artificial Sequence
  chemically synthesized
gaatacattgtgtaatccatct

SEQ ID NO: 48961 - DNA, 22 bp, Artificial Sequence
  chemically synthesized
tgtaatccatctgcaacgaacc

SEQ ID NO: 48962 - DNA, 22 bp, Artificial Sequence
  chemically synthesized
caacgaacctcaggtcttgctt

SEQ ID NO: 48963 - DNA, 22 bp, Artificial Sequence
  chemically synthesized
aggtcttgcttcagcaaatatt

SEQ ID NO: 48964 - DNA, 22 bp, Artificial Sequence
  chemically synthesized
gcttcagcaaatattaatagcg

SEQ ID NO: 48965 - DNA, 22 bp, Artificial Sequence
  chemically synthesized
cttcagcaaatattaatagcgt

SEQ ID NO: 48966 - DNA, 22 bp, Artificial Sequence
  chemically synthesized
cagcaaatattaatagcgtcag

SEQ ID NO: 48967 - DNA, 22 bp, Artificial Sequence
  chemically synthesized
agcaaatattaatagcgtcagg

SEQ ID NO: 48968 - DNA, 22 bp, Artificial Sequence
  chemically synthesized
atagcgtcagggcagcctgtgg

SEQ ID NO: 48969 - DNA, 22 bp, Artificial Sequence
  chemically synthesized
tggagtgactgggagaggccac

SEQ ID NO: 48970 - DNA, 22 bp, Artificial Sequence
  chemically synthesized
ggagaggccaccacgcagctga

SEQ ID NO: 48971 - DNA, 22 bp, Artificial Sequence
  chemically synthesized
aaaacttgcctctggggaagcc

SEQ ID NO: 48972 - DNA, 22 bp, Artificial Sequence
  chemically synthesized
gcctctggggaagccacatgcg

SEQ ID NO: 48973 - DNA, 22 bp, Artificial Sequence
  chemically synthesized
cctctggggaagccacatgcgg

SEQ ID NO: 48974 - DNA, 22 bp, Artificial Sequence
  chemically synthesized
tggggaagccacatgcggatca

SEQ ID NO: 48975 - DNA, 22 bp, Artificial Sequence
  chemically synthesized
gggaagccacatgcggatcata

SEQ ID NO: 48976 - DNA, 22 bp, Artificial Sequence
  chemically synthesized
ttgactgcagtttccattcaaa

SEQ ID NO: 48977 - DNA, 22 bp, Artificial Sequence
  chemically synthesized
actgcagtttccattcaaaact

SEQ ID NO: 48978 - DNA, 22 bp, Artificial Sequence
  chemically synthesized
cagtttccattcaaaacttccc

SEQ ID NO: 48979 - DNA, 22 bp, Artificial Sequence
  chemically synthesized
ccattcaaaacttccctcaagt

SEQ ID NO: 48980 - DNA, 22 bp, Artificial Sequence
  chemically synthesized
cattcaaaacttccctcaagtt

SEQ ID NO: 48981 - DNA, 22 bp, Artificial Sequence
  chemically synthesized
aaaacttccctcaagtttccag

SEQ ID NO: 48982 - DNA, 22 bp, Artificial Sequence
  chemically synthesized
ccctcaagtttccagcatgcct

SEQ ID NO: 48983 - DNA, 22 bp, Artificial Sequence
  chemically synthesized
cctcaagtttccagcatgcctt

SEQ ID NO: 48984 - DNA, 22 bp, Artificial Sequence
  chemically synthesized
aagtttccagcatgccttccgg

SEQ ID NO: 48985 - DNA, 22 bp, Artificial Sequence
  chemically synthesized
ccagcatgccttccggacttgc

SEQ ID NO: 48986 - DNA, 22 bp, Artificial Sequence
  chemically synthesized
cagcatgccttccggacttgcc

SEQ ID NO: 48987 - DNA, 22 bp, Artificial Sequence
  chemically synthesized
ccggacttgccttaccacagcc

SEQ ID NO: 48988 - DNA, 22 bp, Artificial Sequence
  chemically synthesized
cggacttgccttaccacagcct

SEQ ID NO: 48989 - DNA, 22 bp, Artificial Sequence
  chemically synthesized
gccttaccacagccttgttcag

SEQ ID NO: 48990 - DNA, 22 bp, Artificial Sequence
  chemically synthesized
ccttaccacagccttgttcagc

SEQ ID NO: 48991 - DNA, 22 bp, Artificial Sequence
  chemically synthesized
accacagccttgttcagccaga

SEQ ID NO: 48992 - DNA, 22 bp, Artificial Sequence
  chemically synthesized
ccacagccttgttcagccagaa

SEQ ID NO: 48993 - DNA, 22 bp, Artificial Sequence
  chemically synthesized
gttcagccagaaatgaaaacct

SEQ ID NO: 48994 - DNA, 22 bp, Artificial Sequence
  chemically synthesized
ttcagccagaaatgaaaacctc

SEQ ID NO: 48995 - DNA, 22 bp, Artificial Sequence
  chemically synthesized
agccagaaatgaaaacctcctc

SEQ ID NO: 48996 - DNA, 22 bp, Artificial Sequence
  chemically synthesized
ctcgaagcagattatgaccccc

SEQ ID NO: 48997 - DNA, 22 bp, Artificial Sequence
  chemically synthesized
gaagcagattatgaccccccag

SEQ ID NO: 48998 - DNA, 22 bp, Artificial Sequence
  chemically synthesized
tgaccccccagaacccatcgtc

SEQ ID NO: 48999 - DNA, 22 bp, Artificial Sequence
  chemically synthesized
agaaacaccactgccacgcaca

SEQ ID NO: 49000 - DNA, 22 bp, Artificial Sequence
  chemically synthesized
ccacgcacactcactcacactc

SEQ ID NO: 49001 - DNA, 22 bp, Artificial Sequence
  chemically synthesized
actcacactcagtctctccctc

SEQ ID NO: 49002 - DNA, 22 bp, Artificial Sequence
  chemically synthesized
acactcagtctctccctccctg

SEQ ID NO: 49003 - DNA, 22 bp, Artificial Sequence
  chemically synthesized
agtctctccctccctgtataat

SEQ ID NO: 49004 - DNA, 22 bp, Artificial Sequence
  chemically synthesized
tccctccctgtataattctgat

SEQ ID NO: 49005 - DNA, 22 bp, Artificial Sequence
  chemically synthesized
cctccctgtataattctgattc

SEQ ID NO: 49006 - DNA, 22 bp, Artificial Sequence
  chemically synthesized
cctgtataattctgattctccc

SEQ ID NO: 49007 - DNA, 22 bp, Artificial Sequence
  chemically synthesized
tataattctgattctccccagc

SEQ ID NO: 49008 - DNA, 22 bp, Artificial Sequence
  chemically synthesized
tgattctccccagcctttgaag

SEQ ID NO: 49009 - DNA, 22 bp, Artificial Sequence
  chemically synthesized
attctccccagcctttgaaggt

SEQ ID NO: 49010 - DNA, 22 bp, Artificial Sequence
  chemically synthesized
tccccagcctttgaaggtacga

SEQ ID NO: 49011 - DNA, 22 bp, Artificial Sequence
  chemically synthesized
cccagcctttgaaggtacgatc

SEQ ID NO: 49012 - DNA, 22 bp, Artificial Sequence
  chemically synthesized
tgaaggtacgatccgagaagta

SEQ ID NO: 49013 - DNA, 22 bp, Artificial Sequence
  chemically synthesized
gaaggtacgatccgagaagtaa

SEQ ID NO: 49014 - DNA, 22 bp, Artificial Sequence
  chemically synthesized
aaggtacgatccgagaagtaaa

SEQ ID NO: 49015 - DNA, 22 bp, Artificial Sequence
  chemically synthesized
ctgcaggccaagcctcaccact

SEQ ID NO: 49016 - DNA, 22 bp, Artificial Sequence
  chemically synthesized
caggccaagcctcaccacttct

SEQ ID NO: 49017 - DNA, 22 bp, Artificial Sequence
  chemically synthesized
accacttcttaaaagtccgagc

SEQ ID NO: 49018 - DNA, 22 bp, Artificial Sequence
  chemically synthesized
cttaaaagtccgagcttagttt

SEQ ID NO: 49019 - DNA, 22 bp, Artificial Sequence
  chemically synthesized
ttaaaagtccgagcttagtttc

SEQ ID NO: 49020 - DNA, 22 bp, Artificial Sequence
  chemically synthesized
aaaagtccgagcttagtttctc

SEQ ID NO: 49021 - DNA, 22 bp, Artificial Sequence
  chemically synthesized
aaagtccgagcttagtttctca

SEQ ID NO: 49022 - DNA, 22 bp, Artificial Sequence
  chemically synthesized
agtttctcattcagcccactgc

SEQ ID NO: 49023 - DNA, 22 bp, Artificial Sequence
  chemically synthesized
gtttctcattcagcccactgca

SEQ ID NO: 49024 - DNA, 22 bp, Artificial Sequence
  chemically synthesized
ctcattcagcccactgcagtct

SEQ ID NO: 49025 - DNA, 22 bp, Artificial Sequence
  chemically synthesized
tcattcagcccactgcagtctc

SEQ ID NO: 49026 - DNA, 22 bp, Artificial Sequence
  chemically synthesized
attcagcccactgcagtctcct

SEQ ID NO: 49027 - DNA, 22 bp, Artificial Sequence
  chemically synthesized
agcccactgcagtctcctgacc

SEQ ID NO: 49028 - DNA, 22 bp, Artificial Sequence
  chemically synthesized
cagtctcctgaccaagccacac

SEQ ID NO: 49029 - DNA, 22 bp, Artificial Sequence
  chemically synthesized
ctgaccaagccacacacaaaca

SEQ ID NO: 49030 - DNA, 22 bp, Artificial Sequence
  chemically synthesized
accaagccacacacaaacagta

SEQ ID NO: 49031 - DNA, 22 bp, Artificial Sequence
  chemically synthesized
ctccctctgtttctcaggaccc

SEQ ID NO: 49032 - DNA, 22 bp, Artificial Sequence
  chemically synthesized
cctctgtttctcaggaccctca

SEQ ID NO: 49033 - DNA, 22 bp, Artificial Sequence
  chemically synthesized
tgtttctcaggaccctcacttg

SEQ ID NO: 49034 - DNA, 22 bp, Artificial Sequence
  chemically synthesized
tttctcaggaccctcacttgat

SEQ ID NO: 49035 - DNA, 22 bp, Artificial Sequence
  chemically synthesized
ctcaggaccctcacttgatttc

SEQ ID NO: 49036 - DNA, 22 bp, Artificial Sequence
  chemically synthesized
tcaggaccctcacttgatttca

SEQ ID NO: 49037 - DNA, 22 bp, Artificial Sequence
  chemically synthesized
aggaccctcacttgatttcagg

SEQ ID NO: 49038 - DNA, 22 bp, Artificial Sequence
  chemically synthesized
acttgatttcaggctcattctg

SEQ ID NO: 49039 - DNA, 22 bp, Artificial Sequence
  chemically synthesized
gatttcaggctcattctggaca

SEQ ID NO: 49040 - DNA, 22 bp, Artificial Sequence
  chemically synthesized
atttcaggctcattctggacag

SEQ ID NO: 49041 - DNA, 22 bp, Artificial Sequence
  chemically synthesized
caggctcattctggacagatgg

SEQ ID NO: 49042 - DNA, 22 bp, Artificial Sequence
  chemically synthesized
aggctcattctggacagatggg

SEQ ID NO: 49043 - DNA, 22 bp, Artificial Sequence
  chemically synthesized
attctggacagatggggaaatg

SEQ ID NO: 49044 - DNA, 22 bp, Artificial Sequence
  chemically synthesized
tggacagatggggaaatgacta

SEQ ID NO: 49045 - DNA, 22 bp, Artificial Sequence
  chemically synthesized
gacagatggggaaatgactact

SEQ ID NO: 49046 - DNA, 22 bp, Artificial Sequence
  chemically synthesized
cttgcaaagcaggattccttac

SEQ ID NO: 49047 - DNA, 22 bp, Artificial Sequence
  chemically synthesized
gcaaagcaggattccttacatt

SEQ ID NO: 49048 - DNA, 22 bp, Artificial Sequence
  chemically synthesized
caaagcaggattccttacattg

SEQ ID NO: 49049 - DNA, 22 bp, Artificial Sequence
  chemically synthesized
cttacattgcaacttttcccaa

SEQ ID NO: 49050 - DNA, 22 bp, Artificial Sequence
  chemically synthesized
acattgcaacttttcccaacag

SEQ ID NO: 49051 - DNA, 22 bp, Artificial Sequence
  chemically synthesized
cattgcaacttttcccaacagc

SEQ ID NO: 49052 - DNA, 22 bp, Artificial Sequence
  chemically synthesized
caacttttcccaacagctccgt

SEQ ID NO: 49053 - DNA, 22 bp, Artificial Sequence
  chemically synthesized
ttcccaacagctccgtgctcct

SEQ ID NO: 49054 - DNA, 22 bp, Artificial Sequence
  chemically synthesized
tcccaacagctccgtgctcctt

SEQ ID NO: 49055 - DNA, 22 bp, Artificial Sequence
  chemically synthesized
cccaacagctccgtgctccttc

SEQ ID NO: 49056 - DNA, 22 bp, Artificial Sequence
  chemically synthesized
ccaacagctccgtgctccttca

SEQ ID NO: 49057 - DNA, 22 bp, Artificial Sequence
  chemically synthesized
cgtgctccttcaatatgcccag

SEQ ID NO: 49058 - DNA, 22 bp, Artificial Sequence
  chemically synthesized
cttcaatatgcccagaactgga

SEQ ID NO: 49059 - DNA, 22 bp, Artificial Sequence
  chemically synthesized
caatatgcccagaactggaggg

SEQ ID NO: 49060 - DNA, 22 bp, Artificial Sequence
  chemically synthesized
aatatgcccagaactggagggg

SEQ ID NO: 49061 - DNA, 22 bp, Artificial Sequence
  chemically synthesized
gaggggaacattcttctctttc

SEQ ID NO: 49062 - DNA, 22 bp, Artificial Sequence
  chemically synthesized
ttctctttcccagaagattgaa

SEQ ID NO: 49063 - DNA, 22 bp, Artificial Sequence
  chemically synthesized
ctctttcccagaagattgaaaa

SEQ ID NO: 49064 - DNA, 22 bp, Artificial Sequence
  chemically synthesized
tctttcccagaagattgaaaaa

SEQ ID NO: 49065 - DNA, 22 bp, Artificial Sequence
  chemically synthesized
tttcccagaagattgaaaaact

SEQ ID NO: 49066 - DNA, 22 bp, Artificial Sequence
  chemically synthesized
tcccagaagattgaaaaacttg

SEQ ID NO: 49067 - DNA, 22 bp, Artificial Sequence
  chemically synthesized
cccagaagattgaaaaacttga

SEQ ID NO: 49068 - DNA, 22 bp, Artificial Sequence
  chemically synthesized
ccagaagattgaaaaacttgac

SEQ ID NO: 49069 - DNA, 22 bp, Artificial Sequence
  chemically synthesized
aaaaacttgaccacagaaccca

SEQ ID NO: 49070 - DNA, 22 bp, Artificial Sequence
  chemically synthesized
gaccacagaacccatgggaggg

SEQ ID NO: 49071 - DNA, 22 bp, Artificial Sequence
  chemically synthesized
accacagaacccatgggaggga

SEQ ID NO: 49072 - DNA, 22 bp, Artificial Sequence
  chemically synthesized
tccagcaccagagcttcctgcc

SEQ ID NO: 49073 - DNA, 22 bp, Artificial Sequence
  chemically synthesized
cctgcccagttgttgcctggca

SEQ ID NO: 49074 - DNA, 22 bp, Artificial Sequence
  chemically synthesized
ctgcccagttgttgcctggcac

SEQ ID NO: 49075 - DNA, 22 bp, Artificial Sequence
  chemically synthesized
cccagttgttgcctggcaccgc

SEQ ID NO: 49076 - DNA, 22 bp, Artificial Sequence
  chemically synthesized
ttgcctggcaccgctgaagaaa

SEQ ID NO: 49077 - DNA, 22 bp, Artificial Sequence
  chemically synthesized
cctggcaccgctgaagaaagct

SEQ ID NO: 49078 - DNA, 22 bp, Artificial Sequence
  chemically synthesized
gcaccgctgaagaaagctgcaa

SEQ ID NO: 49079 - DNA, 22 bp, Artificial Sequence
  chemically synthesized
aagaaagctgcaaacgtactga

SEQ ID NO: 49080 - DNA, 22 bp, Artificial Sequence
  chemically synthesized
caaacgtactgaagaggtagca

SEQ ID NO: 49081 - DNA, 22 bp, Artificial Sequence
  chemically synthesized
aagaggtagcagagggtggcgg

SEQ ID NO: 49082 - DNA, 22 bp, Artificial Sequence
  chemically synthesized
aacaactgtggaccctcaggga

SEQ ID NO: 49083 - DNA, 22 bp, Artificial Sequence
  chemically synthesized
tggaccctcagggaagtcattt

SEQ ID NO: 49084 - DNA, 22 bp, Artificial Sequence
  chemically synthesized
agggaagtcatttaacccttga

SEQ ID NO: 49085 - DNA, 22 bp, Artificial Sequence
  chemically synthesized
aacccttgatgaaccccaattt

SEQ ID NO: 49086 - DNA, 22 bp, Artificial Sequence
  chemically synthesized
acccttgatgaaccccaatttc

SEQ ID NO: 49087 - DNA, 22 bp, Artificial Sequence
  chemically synthesized
gatgaaccccaatttcctcctc

SEQ ID NO: 49088 - DNA, 22 bp, Artificial Sequence
  chemically synthesized
atgaaccccaatttcctcctct

SEQ ID NO: 49089 - DNA, 22 bp, Artificial Sequence
  chemically synthesized
cctcctctaccaaatgaggcta

SEQ ID NO: 49090 - DNA, 22 bp, Artificial Sequence
  chemically synthesized
ctcctctaccaaatgaggctaa

SEQ ID NO: 49091 - DNA, 22 bp, Artificial Sequence
  chemically synthesized
ctctaccaaatgaggctaatgg

SEQ ID NO: 49092 - DNA, 22 bp, Artificial Sequence
  chemically synthesized
taccaaatgaggctaatgggag

SEQ ID NO: 49093 - DNA, 22 bp, Artificial Sequence
  chemically synthesized
ccaaatgaggctaatgggagtg

SEQ ID NO: 49094 - DNA, 22 bp, Artificial Sequence
  chemically synthesized
atgggagtgtttcctttccgag

SEQ ID NO: 49095 - DNA, 22 bp, Artificial Sequence
  chemically synthesized
cctttccgaggttgttgtggga

SEQ ID NO: 49096 - DNA, 22 bp, Artificial Sequence
  chemically synthesized
ctttccgaggttgttgtgggat

SEQ ID NO: 49097 - DNA, 22 bp, Artificial Sequence
  chemically synthesized
tccgaggttgttgtgggatgga

SEQ ID NO: 49098 - DNA, 22 bp, Artificial Sequence
  chemically synthesized
ccgaggttgttgtgggatggaa

SEQ ID NO: 49099 - DNA, 22 bp, Artificial Sequence
  chemically synthesized
cgaggttgttgtgggatggaat

SEQ ID NO: 49100 - DNA, 22 bp, Artificial Sequence
  chemically synthesized
ttgtgggatggaatatcaatgt

SEQ ID NO: 49101 - DNA, 22 bp, Artificial Sequence
  chemically synthesized
tgggatggaatatcaatgtgtc

SEQ ID NO: 49102 - DNA, 22 bp, Artificial Sequence
  chemically synthesized
tggaggtgcagcccccggagcg

SEQ ID NO: 49103 - DNA, 22 bp, Artificial Sequence
  chemically synthesized
gaggtgcagcccccggagcgag

SEQ ID NO: 49104 - DNA, 22 bp, Artificial Sequence
  chemically synthesized
tgctttccctcatttacttctc

SEQ ID NO: 49105 - DNA, 22 bp, Artificial Sequence
  chemically synthesized
tccctcatttacttctcacatg

SEQ ID NO: 49106 - DNA, 22 bp, Artificial Sequence
  chemically synthesized
ccctcatttacttctcacatgg

SEQ ID NO: 49107 - DNA, 22 bp, Artificial Sequence
  chemically synthesized
cctcatttacttctcacatgga

SEQ ID NO: 49108 - DNA, 22 bp, Artificial Sequence
  chemically synthesized
atttacttctcacatggactct

SEQ ID NO: 49109 - DNA, 22 bp, Artificial Sequence
  chemically synthesized
acttctcacatggactctatga

SEQ ID NO: 49110 - DNA, 22 bp, Artificial Sequence
  chemically synthesized
cttctcacatggactctatgag

SEQ ID NO: 49111 - DNA, 22 bp, Artificial Sequence
  chemically synthesized
ctcacatggactctatgaggta

SEQ ID NO: 49112 - DNA, 22 bp, Artificial Sequence
  chemically synthesized
tcacatggactctatgaggtaa

SEQ ID NO: 49113 - DNA, 22 bp, Artificial Sequence
  chemically synthesized
acatggactctatgaggtaagg

SEQ ID NO: 49114 - DNA, 22 bp, Artificial Sequence
  chemically synthesized
tatgaggtaagggaccttgagt

SEQ ID NO: 49115 - DNA, 22 bp, Artificial Sequence
  chemically synthesized
tgaggtaagggaccttgagtta

SEQ ID NO: 49116 - DNA, 22 bp, Artificial Sequence
  chemically synthesized
gagttatctccatttcacagag

SEQ ID NO: 49117 - DNA, 22 bp, Artificial Sequence
  chemically synthesized
agttatctccatttcacagaga

SEQ ID NO: 49118 - DNA, 22 bp, Artificial Sequence
  chemically synthesized
tctccatttcacagagaggtga

SEQ ID NO: 49119 - DNA, 22 bp, Artificial Sequence
  chemically synthesized
catttcacagagaggtgaaatg

SEQ ID NO: 49120 - DNA, 22 bp, Artificial Sequence
  chemically synthesized
cacagagaggtgaaatgattcc

SEQ ID NO: 49121 - DNA, 22 bp, Artificial Sequence
  chemically synthesized
acagagaggtgaaatgattccc

SEQ ID NO: 49122 - DNA, 22 bp, Artificial Sequence
  chemically synthesized
cctcagactctcccaaccagct

SEQ ID NO: 49123 - DNA, 22 bp, Artificial Sequence
  chemically synthesized
agactctcccaaccagctagca

SEQ ID NO: 49124 - DNA, 22 bp, Artificial Sequence
  chemically synthesized
tcccaaccagctagcagtaaca

SEQ ID NO: 49125 - DNA, 22 bp, Artificial Sequence
  chemically synthesized
ccaaccagctagcagtaacata

SEQ ID NO: 49126 - DNA, 22 bp, Artificial Sequence
  chemically synthesized
gcagtaacatagaaatctgaac

SEQ ID NO: 49127 - DNA, 22 bp, Artificial Sequence
  chemically synthesized
aacccagagtaactgtgtcaca

SEQ ID NO: 49128 - DNA, 22 bp, Artificial Sequence
  chemically synthesized
tgtcacacacccaggcaggcac

SEQ ID NO: 49129 - DNA, 22 bp, Artificial Sequence
  chemically synthesized
tcgtaaggcaacacacgtctat

SEQ ID NO: 49130 - DNA, 22 bp, Artificial Sequence
  chemically synthesized
gtaaggcaacacacgtctatgg

SEQ ID NO: 49131 - DNA, 22 bp, Artificial Sequence
  chemically synthesized
tggggagaggggactcccaccc

SEQ ID NO: 49132 - DNA, 22 bp, Artificial Sequence
  chemically synthesized
ccacccacgagggagctgccac

SEQ ID NO: 49133 - DNA, 22 bp, Artificial Sequence
  chemically synthesized
ccaccagaaacataatgagacc

SEQ ID NO: 49134 - DNA, 22 bp, Artificial Sequence
  chemically synthesized
agctctttagacccccacctgc

SEQ ID NO: 49135 - DNA, 22 bp, Artificial Sequence
  chemically synthesized
tttagacccccacctgccctgc

SEQ ID NO: 49136 - DNA, 22 bp, Artificial Sequence
  chemically synthesized
tagacccccacctgccctgctc

SEQ ID NO: 49137 - DNA, 22 bp, Artificial Sequence
  chemically synthesized
agacccccacctgccctgctct

SEQ ID NO: 49138 - DNA, 22 bp, Artificial Sequence
  chemically synthesized
gacccccacctgccctgctctt

SEQ ID NO: 49139 - DNA, 22 bp, Artificial Sequence
  chemically synthesized
ccctgctcttctctcatcccaa

SEQ ID NO: 49140 - DNA, 22 bp, Artificial Sequence
  chemically synthesized
ctcttctctcatcccaacctgc

SEQ ID NO: 49141 - DNA, 22 bp, Artificial Sequence
  chemically synthesized
ttctctcatcccaacctgctca

SEQ ID NO: 49142 - DNA, 22 bp, Artificial Sequence
  chemically synthesized
ctctcatcccaacctgctcacc

SEQ ID NO: 49143 - DNA, 22 bp, Artificial Sequence
  chemically synthesized
tctcatcccaacctgctcaccc

SEQ ID NO: 49144 - DNA, 22 bp, Artificial Sequence
  chemically synthesized
tcatcccaacctgctcacccca

SEQ ID NO: 49145 - DNA, 22 bp, Artificial Sequence
  chemically synthesized
atcccaacctgctcaccccata

SEQ ID NO: 49146 - DNA, 22 bp, Artificial Sequence
  chemically synthesized
ctcaccccataatgggggaact

SEQ ID NO: 49147 - DNA, 22 bp, Artificial Sequence
  chemically synthesized
accccataatgggggaactact

SEQ ID NO: 49148 - DNA, 22 bp, Artificial Sequence
  chemically synthesized
ctttgagaccccaggagcacac

SEQ ID NO: 49149 - DNA, 22 bp, Artificial Sequence
  chemically synthesized
tgagaccccaggagcacacagt

SEQ ID NO: 49150 - DNA, 22 bp, Artificial Sequence
  chemically synthesized
gagaccccaggagcacacagtt

SEQ ID NO: 49151 - DNA, 22 bp, Artificial Sequence
  chemically synthesized
agaccccaggagcacacagttc

SEQ ID NO: 49152 - DNA, 22 bp, Artificial Sequence
  chemically synthesized
caagccatgagtcataaccgta

SEQ ID NO: 49153 - DNA, 22 bp, Artificial Sequence
  chemically synthesized
ttgtgacatgttttaccatgtg

SEQ ID NO: 49154 - DNA, 22 bp, Artificial Sequence
  chemically synthesized
tgtgacatgttttaccatgtgc

SEQ ID NO: 49155 - DNA, 22 bp, Artificial Sequence
  chemically synthesized
gtgacatgttttaccatgtgcc

SEQ ID NO: 49156 - DNA, 22 bp, Artificial Sequence
  chemically synthesized
tgacatgttttaccatgtgccc

SEQ ID NO: 49157 - DNA, 22 bp, Artificial Sequence
  chemically synthesized
taccatgtgcccagcactgagc

SEQ ID NO: 49158 - DNA, 22 bp, Artificial Sequence
  chemically synthesized
accatgtgcccagcactgagcc

SEQ ID NO: 49159 - DNA, 22 bp, Artificial Sequence
  chemically synthesized
ccatgtgcccagcactgagccc

SEQ ID NO: 49160 - DNA, 22 bp, Artificial Sequence
  chemically synthesized
agcccagcgcccccacatgctc

SEQ ID NO: 49161 - DNA, 22 bp, Artificial Sequence
  chemically synthesized
tcataggatgctcaaaggccct

SEQ ID NO: 49162 - DNA, 22 bp, Artificial Sequence
  chemically synthesized
ataggatgctcaaaggccctat

SEQ ID NO: 49163 - DNA, 22 bp, Artificial Sequence
  chemically synthesized
aaaggccctatgaggcaagccc

SEQ ID NO: 49164 - DNA, 22 bp, Artificial Sequence
  chemically synthesized
tgaggcaagccccgtgattctc

SEQ ID NO: 49165 - DNA, 22 bp, Artificial Sequence
  chemically synthesized
tccccactttacagattgagga

SEQ ID NO: 49166 - DNA, 22 bp, Artificial Sequence
  chemically synthesized
cccactttacagattgaggaag

SEQ ID NO: 49167 - DNA, 22 bp, Artificial Sequence
  chemically synthesized
tacagattgaggaagcggaggc

SEQ ID NO: 49168 - DNA, 22 bp, Artificial Sequence
  chemically synthesized
acagattgaggaagcggaggct

SEQ ID NO: 49169 - DNA, 22 bp, Artificial Sequence
  chemically synthesized
cagattgaggaagcggaggctt

SEQ ID NO: 49170 - DNA, 22 bp, Artificial Sequence
  chemically synthesized
aggaagcggaggcttagggaat

SEQ ID NO: 49171 - DNA, 22 bp, Artificial Sequence
  chemically synthesized
agggaatgaaatctgcccaagg

SEQ ID NO: 49172 - DNA, 22 bp, Artificial Sequence
  chemically synthesized
gggaatgaaatctgcccaaggt

SEQ ID NO: 49173 - DNA, 22 bp, Artificial Sequence
  chemically synthesized
cccaaggttgcacaactagaaa

SEQ ID NO: 49174 - DNA, 22 bp, Artificial Sequence
  chemically synthesized
cacaactagaaatggtattact

SEQ ID NO: 49175 - DNA, 22 bp, Artificial Sequence
  chemically synthesized
gaaatggtattacttctttacc

SEQ ID NO: 49176 - DNA, 22 bp, Artificial Sequence
  chemically synthesized
cttctttaccctcagcctaaac

SEQ ID NO: 49177 - DNA, 22 bp, Artificial Sequence
  chemically synthesized
ctttaccctcagcctaaaccat

SEQ ID NO: 49178 - DNA, 22 bp, Artificial Sequence
  chemically synthesized
tttaccctcagcctaaaccatt

SEQ ID NO: 49179 - DNA, 22 bp, Artificial Sequence
  chemically synthesized
taccctcagcctaaaccatttt

SEQ ID NO: 49180 - DNA, 22 bp, Artificial Sequence
  chemically synthesized
accctcagcctaaaccatttta

SEQ ID NO: 49181 - DNA, 22 bp, Artificial Sequence
  chemically synthesized
ccctcagcctaaaccattttat

SEQ ID NO: 49182 - DNA, 22 bp, Artificial Sequence
  chemically synthesized
agcctaaaccattttatttcgt

SEQ ID NO: 49183 - DNA, 22 bp, Artificial Sequence
  chemically synthesized
aaccattttatttcgtgtaatc

SEQ ID NO: 49184 - DNA, 22 bp, Artificial Sequence
  chemically synthesized
tatttcgtgtaatcaaagagaa

SEQ ID NO: 49185 - DNA, 22 bp, Artificial Sequence
  chemically synthesized
atttcgtgtaatcaaagagaag

SEQ ID NO: 49186 - DNA, 22 bp, Artificial Sequence
  chemically synthesized
tttcgtgtaatcaaagagaaga

SEQ ID NO: 49187 - DNA, 22 bp, Artificial Sequence
  chemically synthesized
cgtgtaatcaaagagaagaaga

SEQ ID NO: 49188 - DNA, 22 bp, Artificial Sequence
  chemically synthesized
gtgtaatcaaagagaagaagaa

SEQ ID NO: 49189 - DNA, 22 bp, Artificial Sequence
  chemically synthesized
cccctctttctgtccctcctcc

SEQ ID NO: 49190 - DNA, 22 bp, Artificial Sequence
  chemically synthesized
ccctctttctgtccctcctccc

SEQ ID NO: 49191 - DNA, 22 bp, Artificial Sequence
  chemically synthesized
tttctgtccctcctccctttct

SEQ ID NO: 49192 - DNA, 22 bp, Artificial Sequence
  chemically synthesized
tctgtccctcctccctttctta

SEQ ID NO: 49193 - DNA, 22 bp, Artificial Sequence
  chemically synthesized
ctgtccctcctccctttcttac

SEQ ID NO: 49194 - DNA, 22 bp, Artificial Sequence
  chemically synthesized
tgtccctcctccctttcttacc

SEQ ID NO: 49195 - DNA, 22 bp, Artificial Sequence
  chemically synthesized
tccctcctccctttcttaccag

SEQ ID NO: 49196 - DNA, 22 bp, Artificial Sequence
  chemically synthesized
ctccctttcttaccagctcagg

SEQ ID NO: 49197 - DNA, 22 bp, Artificial Sequence
  chemically synthesized
cctttcttaccagctcaggtta

SEQ ID NO: 49198 - DNA, 22 bp, Artificial Sequence
  chemically synthesized
tcttaccagctcaggttacaaa

SEQ ID NO: 49199 - DNA, 22 bp, Artificial Sequence
  chemically synthesized
cttaccagctcaggttacaaag

SEQ ID NO: 49200 - DNA, 22 bp, Artificial Sequence
  chemically synthesized
ttaccagctcaggttacaaaga

SEQ ID NO: 49201 - DNA, 22 bp, Artificial Sequence
  chemically synthesized
accagctcaggttacaaagaca

SEQ ID NO: 49202 - DNA, 22 bp, Artificial Sequence
  chemically synthesized
ccagctcaggttacaaagacat

SEQ ID NO: 49203 - DNA, 22 bp, Artificial Sequence
  chemically synthesized
aggttacaaagacatctaggtg

SEQ ID NO: 49204 - DNA, 22 bp, Artificial Sequence
  chemically synthesized
caaagacatctaggtgggagag

SEQ ID NO: 49205 - DNA, 22 bp, Artificial Sequence
  chemically synthesized
ggtgggagagaagactgcctct

SEQ ID NO: 49206 - DNA, 22 bp, Artificial Sequence
  chemically synthesized
cctctaagggcttggctgagtt

SEQ ID NO: 49207 - DNA, 22 bp, Artificial Sequence
  chemically synthesized
taagggcttggctgagttggcg

SEQ ID NO: 49208 - DNA, 22 bp, Artificial Sequence
  chemically synthesized
agggcttggctgagttggcggg

SEQ ID NO: 49209 - DNA, 22 bp, Artificial Sequence
  chemically synthesized
ggctgagttggcgggcgggagc

SEQ ID NO: 49210 - DNA, 22 bp, Artificial Sequence
  chemically synthesized
gctgagttggcgggcgggagcg

SEQ ID NO: 49211 - DNA, 22 bp, Artificial Sequence
  chemically synthesized
agttggcgggcgggagcggggg

SEQ ID NO: 49212 - DNA, 22 bp, Artificial Sequence
  chemically synthesized
gcgggcgggagcgggggcaggt

SEQ ID NO: 49213 - DNA, 22 bp, Artificial Sequence
  chemically synthesized
tcccagtttttatttgctacta

SEQ ID NO: 49214 - DNA, 22 bp, Artificial Sequence
  chemically synthesized
cccagtttttatttgctactag

SEQ ID NO: 49215 - DNA, 22 bp, Artificial Sequence
  chemically synthesized
ccagtttttatttgctactaga

SEQ ID NO: 49216 - DNA, 22 bp, Artificial Sequence
  chemically synthesized
ttatttgctactagaaaaggag

SEQ ID NO: 49217 - DNA, 22 bp, Artificial Sequence
  chemically synthesized
tatttgctactagaaaaggaga

SEQ ID NO: 49218 - DNA, 22 bp, Artificial Sequence
  chemically synthesized
atttgctactagaaaaggagaa

SEQ ID NO: 49219 - DNA, 22 bp, Artificial Sequence
  chemically synthesized
tttgctactagaaaaggagaag

SEQ ID NO: 49220 - DNA, 22 bp, Artificial Sequence
  chemically synthesized
gctactagaaaaggagaaggaa

SEQ ID NO: 49221 - DNA, 22 bp, Artificial Sequence
  chemically synthesized
ctactagaaaaggagaaggaaa

SEQ ID NO: 49222 - DNA, 22 bp, Artificial Sequence
  chemically synthesized
ctagaaaaggagaaggaaatcc

SEQ ID NO: 49223 - DNA, 22 bp, Artificial Sequence
  chemically synthesized
gaaaaggagaaggaaatcctgc

SEQ ID NO: 49224 - DNA, 22 bp, Artificial Sequence
  chemically synthesized
cctcccttatgaggcctagcca

SEQ ID NO: 49225 - DNA, 22 bp, Artificial Sequence
  chemically synthesized
ccttatgaggcctagccagggg

SEQ ID NO: 49226 - DNA, 22 bp, Artificial Sequence
  chemically synthesized
atgaggcctagccaggggaagt

SEQ ID NO: 49227 - DNA, 22 bp, Artificial Sequence
  chemically synthesized
tgaggcctagccaggggaagta

SEQ ID NO: 49228 - DNA, 22 bp, Artificial Sequence
  chemically synthesized
gccaggggaagtaaatgtgatt

SEQ ID NO: 49229 - DNA, 22 bp, Artificial Sequence
  chemically synthesized
tatcacattttatatagatgtg

SEQ ID NO: 49230 - DNA, 22 bp, Artificial Sequence
  chemically synthesized
atcacattttatatagatgtgc

SEQ ID NO: 49231 - DNA, 22 bp, Artificial Sequence
  chemically synthesized
tcacattttatatagatgtgca

SEQ ID NO: 49232 - DNA, 22 bp, Artificial Sequence
  chemically synthesized
tatatagatgtgcacaatggtg

SEQ ID NO: 49233 - DNA, 22 bp, Artificial Sequence
  chemically synthesized
atatagatgtgcacaatggtgc

SEQ ID NO: 49234 - DNA, 22 bp, Artificial Sequence
  chemically synthesized
tatagatgtgcacaatggtgcc

SEQ ID NO: 49235 - DNA, 22 bp, Artificial Sequence
  chemically synthesized
ttcaagtctatgatgggaaaaa

SEQ ID NO: 49236 - DNA, 22 bp, Artificial Sequence
  chemically synthesized
tcaagtctatgatgggaaaaat

SEQ ID NO: 49237 - DNA, 22 bp, Artificial Sequence
  chemically synthesized
caagtctatgatgggaaaaata

SEQ ID NO: 49238 - DNA, 22 bp, Artificial Sequence
  chemically synthesized
aagtctatgatgggaaaaatat

SEQ ID NO: 49239 - DNA, 22 bp, Artificial Sequence
  chemically synthesized
tgatgggaaaaatattttttat

SEQ ID NO: 49240 - DNA, 22 bp, Artificial Sequence
  chemically synthesized
tttattgtgtgaatatcatttc

SEQ ID NO: 49241 - DNA, 22 bp, Artificial Sequence
  chemically synthesized
ttattgtgtgaatatcatttca

SEQ ID NO: 49242 - DNA, 22 bp, Artificial Sequence
  chemically synthesized
tattgtgtgaatatcatttcag

SEQ ID NO: 49243 - DNA, 22 bp, Artificial Sequence
  chemically synthesized
attgtgtgaatatcatttcaga

SEQ ID NO: 49244 - DNA, 22 bp, Artificial Sequence
  chemically synthesized
ttgtgtgaatatcatttcagac

SEQ ID NO: 49245 - DNA, 22 bp, Artificial Sequence
  chemically synthesized
tgtgaatatcatttcagacagg

SEQ ID NO: 49246 - DNA, 22 bp, Artificial Sequence
  chemically synthesized
cagacaggtccccaaaccactt

SEQ ID NO: 49247 - DNA, 22 bp, Artificial Sequence
  chemically synthesized
agacaggtccccaaaccacttg

SEQ ID NO: 49248 - DNA, 22 bp, Artificial Sequence
  chemically synthesized
gaaagccctggtgtcccctagg

SEQ ID NO: 49249 - DNA, 22 bp, Artificial Sequence
  chemically synthesized
aaagccctggtgtcccctaggt

SEQ ID NO: 49250 - DNA, 22 bp, Artificial Sequence
  chemically synthesized
gtgtcccctaggtgggattcta

SEQ ID NO: 49251 - DNA, 22 bp, Artificial Sequence
  chemically synthesized
ggtgggattctatgaacccagc

SEQ ID NO: 49252 - DNA, 22 bp, Artificial Sequence
  chemically synthesized
tatgaacccagctttagcccca

SEQ ID NO: 49253 - DNA, 22 bp, Artificial Sequence
  chemically synthesized
tgaacccagctttagccccagc

SEQ ID NO: 49254 - DNA, 22 bp, Artificial Sequence
  chemically synthesized
tagccccagcagctcctctggt

SEQ ID NO: 49255 - DNA, 22 bp, Artificial Sequence
  chemically synthesized
agccccagcagctcctctggtg

SEQ ID NO: 49256 - DNA, 22 bp, Artificial Sequence
  chemically synthesized
gccccagcagctcctctggtgg

SEQ ID NO: 49257 - DNA, 22 bp, Artificial Sequence
  chemically synthesized
ctctggtgggaactagaacatg

SEQ ID NO: 49258 - DNA, 22 bp, Artificial Sequence
  chemically synthesized
tggtgggaactagaacatgcct

SEQ ID NO: 49259 - DNA, 22 bp, Artificial Sequence
  chemically synthesized
gtgggaactagaacatgcctcc

SEQ ID NO: 49260 - DNA, 22 bp, Artificial Sequence
  chemically synthesized
gaacatgcctcctgccagttag

SEQ ID NO: 49261 - DNA, 22 bp, Artificial Sequence
  chemically synthesized
ctgccagttagtaacagggaaa

SEQ ID NO: 49262 - DNA, 22 bp, Artificial Sequence
  chemically synthesized
ccagttagtaacagggaaattc

SEQ ID NO: 49263 - DNA, 22 bp, Artificial Sequence
  chemically synthesized
gtaacagggaaattcaattact

SEQ ID NO: 49264 - DNA, 22 bp, Artificial Sequence
  chemically synthesized
aattacttcgccacttgtggca

SEQ ID NO: 49265 - DNA, 22 bp, Artificial Sequence
  chemically synthesized
cttcgccacttgtggcaggagg

SEQ ID NO: 49266 - DNA, 22 bp, Artificial Sequence
  chemically synthesized
cgccacttgtggcaggagggca

SEQ ID NO: 49267 - DNA, 22 bp, Artificial Sequence
  chemically synthesized
gccacttgtggcaggagggcaa

SEQ ID NO: 49268 - DNA, 22 bp, Artificial Sequence
  chemically synthesized
gtggcaggagggcaaagactgc

SEQ ID NO: 49269 - DNA, 22 bp, Artificial Sequence
  chemically synthesized
tggcaggagggcaaagactgca

SEQ ID NO: 49270 - DNA, 22 bp, Artificial Sequence
  chemically synthesized
cacattaaaagagctaaaaatg

SEQ ID NO: 49271 - DNA, 22 bp, Artificial Sequence
  chemically synthesized
aaagagctaaaaatgtcaggaa

SEQ ID NO: 49272 - DNA, 22 bp, Artificial Sequence
  chemically synthesized
aaaatgtcaggaagttattggg

SEQ ID NO: 49273 - DNA, 22 bp, Artificial Sequence
  chemically synthesized
ttgggatgatgactcctgcttg

SEQ ID NO: 49274 - DNA, 22 bp, Artificial Sequence
  chemically synthesized
ggatgatgactcctgcttgcca

SEQ ID NO: 49275 - DNA, 22 bp, Artificial Sequence
  chemically synthesized
ctgcttgccaacattcatatat

SEQ ID NO: 49276 - DNA, 22 bp, Artificial Sequence
  chemically synthesized
cttgccaacattcatatatgaa

SEQ ID NO: 49277 - DNA, 22 bp, Artificial Sequence
  chemically synthesized
gccaacattcatatatgaatgc

SEQ ID NO: 49278 - DNA, 22 bp, Artificial Sequence
  chemically synthesized
ccaacattcatatatgaatgca

SEQ ID NO: 49279 - DNA, 22 bp, Artificial Sequence
  chemically synthesized
atatatgaatgcataatgtcac

SEQ ID NO: 49280 - DNA, 22 bp, Artificial Sequence
  chemically synthesized
aaaaacacaggaagaggccaag

SEQ ID NO: 49281 - DNA, 22 bp, Artificial Sequence
  chemically synthesized
gccatcggtcctgggtcctgcc

SEQ ID NO: 49282 - DNA, 22 bp, Artificial Sequence
  chemically synthesized
ccatcggtcctgggtcctgccc

SEQ ID NO: 49283 - DNA, 22 bp, Artificial Sequence
  chemically synthesized
ggtcctgcccaggaaaggctgc

SEQ ID NO: 49284 - DNA, 22 bp, Artificial Sequence
  chemically synthesized
cccaggaaaggctgcgcctcta

SEQ ID NO: 49285 - DNA, 22 bp, Artificial Sequence
  chemically synthesized
cgcctctaacaagagcaccttt

SEQ ID NO: 49286 - DNA, 22 bp, Artificial Sequence
  chemically synthesized
taacaagagcaccttttcccca

SEQ ID NO: 49287 - DNA, 22 bp, Artificial Sequence
  chemically synthesized
acaagagcaccttttccccacc

SEQ ID NO: 49288 - DNA, 22 bp, Artificial Sequence
  chemically synthesized
ttccccacccctggcctttctt

SEQ ID NO: 49289 - DNA, 22 bp, Artificial Sequence
  chemically synthesized
tccccacccctggcctttcttg

SEQ ID NO: 49290 - DNA, 22 bp, Artificial Sequence
  chemically synthesized
ccccacccctggcctttcttga

SEQ ID NO: 49291 - DNA, 22 bp, Artificial Sequence
  chemically synthesized
cccacccctggcctttcttgag

SEQ ID NO: 49292 - DNA, 22 bp, Artificial Sequence
  chemically synthesized
gcctttcttgagccttccttga

SEQ ID NO: 49293 - DNA, 22 bp, Artificial Sequence
  chemically synthesized
tcttgagccttccttgagcctt

SEQ ID NO: 49294 - DNA, 22 bp, Artificial Sequence
  chemically synthesized
cttgagccttccttgagccttc

SEQ ID NO: 49295 - DNA, 22 bp, Artificial Sequence
  chemically synthesized
ttgagccttccttgagccttcc

SEQ ID NO: 49296 - DNA, 22 bp, Artificial Sequence
  chemically synthesized
gagccttccttgagccttcctt

SEQ ID NO: 49297 - DNA, 22 bp, Artificial Sequence
  chemically synthesized
agccttccttgagccttccttg

SEQ ID NO: 49298 - DNA, 22 bp, Artificial Sequence
  chemically synthesized
ccttgagccttccttgcatatt

SEQ ID NO: 49299 - DNA, 22 bp, Artificial Sequence
  chemically synthesized
cttgagccttccttgcatatta

SEQ ID NO: 49300 - DNA, 22 bp, Artificial Sequence
  chemically synthesized
gagccttccttgcatattatcg

SEQ ID NO: 49301 - DNA, 22 bp, Artificial Sequence
  chemically synthesized
agccttccttgcatattatcgt

SEQ ID NO: 49302 - DNA, 22 bp, Artificial Sequence
  chemically synthesized
ccttgcatattatcgttctcag

SEQ ID NO: 49303 - DNA, 22 bp, Artificial Sequence
  chemically synthesized
cttgcatattatcgttctcagc

SEQ ID NO: 49304 - DNA, 22 bp, Artificial Sequence
  chemically synthesized
gcatattatcgttctcagccac

SEQ ID NO: 49305 - DNA, 22 bp, Artificial Sequence
  chemically synthesized
catattatcgttctcagccacc

SEQ ID NO: 49306 - DNA, 22 bp, Artificial Sequence
  chemically synthesized
tcgttctcagccaccgacagct

SEQ ID NO: 49307 - DNA, 22 bp, Artificial Sequence
  chemically synthesized
tcagccaccgacagcttaattc

SEQ ID NO: 49308 - DNA, 22 bp, Artificial Sequence
  chemically synthesized
agccaccgacagcttaattcac

SEQ ID NO: 49309 - DNA, 22 bp, Artificial Sequence
  chemically synthesized
aattcacaggcccttccaacaa

SEQ ID NO: 49310 - DNA, 22 bp, Artificial Sequence
  chemically synthesized
attcacaggcccttccaacaag

SEQ ID NO: 49311 - DNA, 22 bp, Artificial Sequence
  chemically synthesized
acaggcccttccaacaagttaa

SEQ ID NO: 49312 - DNA, 22 bp, Artificial Sequence
  chemically synthesized
ccaacaagttaaacttcagcca

SEQ ID NO: 49313 - DNA, 22 bp, Artificial Sequence
  chemically synthesized
caacaagttaaacttcagccat

SEQ ID NO: 49314 - DNA, 22 bp, Artificial Sequence
  chemically synthesized
aacttcagccatttaaaaaaaa

SEQ ID NO: 49315 - DNA, 22 bp, Artificial Sequence
  chemically synthesized
cagccatttaaaaaaaaaaaaa

SEQ ID NO: 49316 - DNA, 22 bp, Artificial Sequence
  chemically synthesized
agccatttaaaaaaaaaaaaaa

SEQ ID NO: 49317 - DNA, 22 bp, Artificial Sequence
  chemically synthesized
aaaaaaaaaaaaaaaaaagagt

SEQ ID NO: 49318 - DNA, 22 bp, Artificial Sequence
  chemically synthesized
aaaaaaaaaaaaaaaaagagtt

SEQ ID NO: 49319 - DNA, 22 bp, Artificial Sequence
  chemically synthesized
ccactgatttcttacctgcaca

SEQ ID NO: 49320 - DNA, 22 bp, Artificial Sequence
  chemically synthesized
cactgatttcttacctgcacac

SEQ ID NO: 49321 - DNA, 22 bp, Artificial Sequence
  chemically synthesized
atttcttacctgcacacgcagg

SEQ ID NO: 49322 - DNA, 22 bp, Artificial Sequence
  chemically synthesized
cttacctgcacacgcaggcacg

SEQ ID NO: 49323 - DNA, 22 bp, Artificial Sequence
  chemically synthesized
ttacctgcacacgcaggcacgc

SEQ ID NO: 49324 - DNA, 22 bp, Artificial Sequence
  chemically synthesized
acctgcacacgcaggcacgccg

SEQ ID NO: 49325 - DNA, 22 bp, Artificial Sequence
  chemically synthesized
cctgcacacgcaggcacgccgg

SEQ ID NO: 49326 - DNA, 22 bp, Artificial Sequence
  chemically synthesized
cacacgcaggcacgccggccac

SEQ ID NO: 49327 - DNA, 22 bp, Artificial Sequence
  chemically synthesized
caccacgagctctcacacctgg

SEQ ID NO: 49328 - DNA, 22 bp, Artificial Sequence
  chemically synthesized
tcacacctggtcgcctgaacac

SEQ ID NO: 49329 - DNA, 22 bp, Artificial Sequence
  chemically synthesized
acacctggtcgcctgaacacaa

SEQ ID NO: 49330 - DNA, 22 bp, Artificial Sequence
  chemically synthesized
gtcgcctgaacacaaccaaacc

SEQ ID NO: 49331 - DNA, 22 bp, Artificial Sequence
  chemically synthesized
aacacaaccaaacccttcccat

SEQ ID NO: 49332 - DNA, 22 bp, Artificial Sequence
  chemically synthesized
cccatctggccctcgggttact

SEQ ID NO: 49333 - DNA, 22 bp, Artificial Sequence
  chemically synthesized
ccatctggccctcgggttactg

SEQ ID NO: 49334 - DNA, 22 bp, Artificial Sequence
  chemically synthesized
gccctcgggttactggcgttat

SEQ ID NO: 49335 - DNA, 22 bp, Artificial Sequence
  chemically synthesized
gggttactggcgttatcacaac

SEQ ID NO: 49336 - DNA, 22 bp, Artificial Sequence
  chemically synthesized
ctggcgttatcacaactttttt

SEQ ID NO: 49337 - DNA, 22 bp, Artificial Sequence
  chemically synthesized
gcgttatcacaactttttttcc

SEQ ID NO: 49338 - DNA, 22 bp, Artificial Sequence
  chemically synthesized
tcacaactttttttcccaacgg

SEQ ID NO: 49339 - DNA, 22 bp, Artificial Sequence
  chemically synthesized
tttttcccaacggcaagccagg

SEQ ID NO: 49340 - DNA, 22 bp, Artificial Sequence
  chemically synthesized
ttttcccaacggcaagccagga

SEQ ID NO: 49341 - DNA, 22 bp, Artificial Sequence
  chemically synthesized
tttcccaacggcaagccaggaa

SEQ ID NO: 49342 - DNA, 22 bp, Artificial Sequence
  chemically synthesized
ttcccaacggcaagccaggaaa

SEQ ID NO: 49343 - DNA, 22 bp, Artificial Sequence
  chemically synthesized
tcccaacggcaagccaggaaag

SEQ ID NO: 49344 - DNA, 22 bp, Artificial Sequence
  chemically synthesized
cccaacggcaagccaggaaaga

SEQ ID NO: 49345 - DNA, 22 bp, Artificial Sequence
  chemically synthesized
ccaacggcaagccaggaaagat

SEQ ID NO: 49346 - DNA, 22 bp, Artificial Sequence
  chemically synthesized
gcctcaactggttcagaggagg

SEQ ID NO: 49347 - DNA, 22 bp, Artificial Sequence
  chemically synthesized
aactggttcagaggagggaaaa

SEQ ID NO: 49348 - DNA, 22 bp, Artificial Sequence
  chemically synthesized
gttcagaggagggaaaaaattg

SEQ ID NO: 49349 - DNA, 22 bp, Artificial Sequence
  chemically synthesized
agaggagggaaaaaattgagct

SEQ ID NO: 49350 - DNA, 22 bp, Artificial Sequence
  chemically synthesized
agctgtgcgtctcttttttttt

SEQ ID NO: 49351 - DNA, 22 bp, Artificial Sequence
  chemically synthesized
tgcgtctctttttttttttatt

SEQ ID NO: 49352 - DNA, 22 bp, Artificial Sequence
  chemically synthesized
tttttttttttattttttattt

SEQ ID NO: 49353 - DNA, 22 bp, Artificial Sequence
  chemically synthesized
tttttttttattttttattttt

SEQ ID NO: 49354 - DNA, 22 bp, Artificial Sequence
  chemically synthesized
ttttttttattttttatttttt

SEQ ID NO: 49355 - DNA, 22 bp, Artificial Sequence
  chemically synthesized
tttttttattttttattttttt

SEQ ID NO: 49356 - DNA, 22 bp, Artificial Sequence
  chemically synthesized
ttttttattttttatttttttg

SEQ ID NO: 49357 - DNA, 22 bp, Artificial Sequence
  chemically synthesized
tttttattttttatttttttgc

SEQ ID NO: 49358 - DNA, 22 bp, Artificial Sequence
  chemically synthesized
ttttattttttatttttttgcc

SEQ ID NO: 49359 - DNA, 22 bp, Artificial Sequence
  chemically synthesized
tttattttttatttttttgcct

SEQ ID NO: 49360 - DNA, 22 bp, Artificial Sequence
  chemically synthesized
ttattttttatttttttgcctt

SEQ ID NO: 49361 - DNA, 22 bp, Artificial Sequence
  chemically synthesized
tattttttatttttttgccttt

SEQ ID NO: 49362 - DNA, 22 bp, Artificial Sequence
  chemically synthesized
attttttatttttttgccttta

SEQ ID NO: 49363 - DNA, 22 bp, Artificial Sequence
  chemically synthesized
ttttttatttttttgcctttag

SEQ ID NO: 49364 - DNA, 22 bp, Artificial Sequence
  chemically synthesized
tttatttttttgcctttagcca

SEQ ID NO: 49365 - DNA, 22 bp, Artificial Sequence
  chemically synthesized
ttatttttttgcctttagccaa

SEQ ID NO: 49366 - DNA, 22 bp, Artificial Sequence
  chemically synthesized
tatttttttgcctttagccaaa

SEQ ID NO: 49367 - DNA, 22 bp, Artificial Sequence
  chemically synthesized
atttttttgcctttagccaaaa

SEQ ID NO: 49368 - DNA, 22 bp, Artificial Sequence
  chemically synthesized
tttttttgcctttagccaaaag

SEQ ID NO: 49369 - DNA, 22 bp, Artificial Sequence
  chemically synthesized
ttttgcctttagccaaaagacc

SEQ ID NO: 49370 - DNA, 22 bp, Artificial Sequence
  chemically synthesized
tttgcctttagccaaaagacca

SEQ ID NO: 49371 - DNA, 22 bp, Artificial Sequence
  chemically synthesized
ttgcctttagccaaaagaccag

SEQ ID NO: 49372 - DNA, 22 bp, Artificial Sequence
  chemically synthesized
tgcctttagccaaaagaccagg

SEQ ID NO: 49373 - DNA, 22 bp, Artificial Sequence
  chemically synthesized
gcctttagccaaaagaccaggg

SEQ ID NO: 49374 - DNA, 22 bp, Artificial Sequence
  chemically synthesized
cctttagccaaaagaccaggga

SEQ ID NO: 49375 - DNA, 22 bp, Artificial Sequence
  chemically synthesized
tagccaaaagaccagggagcat

SEQ ID NO: 49376 - DNA, 22 bp, Artificial Sequence
  chemically synthesized
agccaaaagaccagggagcatt

SEQ ID NO: 49377 - DNA, 22 bp, Artificial Sequence
  chemically synthesized
gccaaaagaccagggagcattt

SEQ ID NO: 49378 - DNA, 22 bp, Artificial Sequence
  chemically synthesized
gatgtacagtcagcaggtattt

SEQ ID NO: 49379 - DNA, 22 bp, Artificial Sequence
  chemically synthesized
atgtacagtcagcaggtattta

SEQ ID NO: 49380 - DNA, 22 bp, Artificial Sequence
  chemically synthesized
aaaaaagaaagaaagaaaaagg

SEQ ID NO: 49381 - DNA, 22 bp, Artificial Sequence
  chemically synthesized
aaaaagaaagaaagaaaaagga

SEQ ID NO: 49382 - DNA, 22 bp, Artificial Sequence
  chemically synthesized
aaaaggcttggctgcactgggg

SEQ ID NO: 49383 - DNA, 22 bp, Artificial Sequence
  chemically synthesized
ggctgcactggggccctgacac

SEQ ID NO: 49384 - DNA, 22 bp, Artificial Sequence
  chemically synthesized
gctgcactggggccctgacacg

SEQ ID NO: 49385 - DNA, 22 bp, Artificial Sequence
  chemically synthesized
cactggggccctgacacgctct

SEQ ID NO: 49386 - DNA, 22 bp, Artificial Sequence
  chemically synthesized
gggccctgacacgctctcatct

SEQ ID NO: 49387 - DNA, 22 bp, Artificial Sequence
  chemically synthesized
acacgctctcatctaaagcctg

SEQ ID NO: 49388 - DNA, 22 bp, Artificial Sequence
  chemically synthesized
tcatctaaagcctggccctcgg

SEQ ID NO: 49389 - DNA, 22 bp, Artificial Sequence
  chemically synthesized
atctaaagcctggccctcggcc

SEQ ID NO: 49390 - DNA, 22 bp, Artificial Sequence
  chemically synthesized
aagcctggccctcggccaagtt

SEQ ID NO: 49391 - DNA, 22 bp, Artificial Sequence
  chemically synthesized
gccctcggccaagttcatctgt

SEQ ID NO: 49392 - DNA, 22 bp, Artificial Sequence
  chemically synthesized
ggccaagttcatctgttaatgg

SEQ ID NO: 49393 - DNA, 22 bp, Artificial Sequence
  chemically synthesized
atctgttaatggacaaccacaa

SEQ ID NO: 49394 - DNA, 22 bp, Artificial Sequence
  chemically synthesized
ttaatggacaaccacaaccagg

SEQ ID NO: 49395 - DNA, 22 bp, Artificial Sequence
  chemically synthesized
atggacaaccacaaccagggcc

SEQ ID NO: 49396 - DNA, 22 bp, Artificial Sequence
  chemically synthesized
cacctcccccacctcccactac

SEQ ID NO: 49397 - DNA, 22 bp, Artificial Sequence
  chemically synthesized
ccccacctcccactacccctcc

SEQ ID NO: 49398 - DNA, 22 bp, Artificial Sequence
  chemically synthesized
ccactacccctcctgagtcttc

SEQ ID NO: 49399 - DNA, 22 bp, Artificial Sequence
  chemically synthesized
cccctcctgagtcttctctgtt

SEQ ID NO: 49400 - DNA, 22 bp, Artificial Sequence
  chemically synthesized
ctgagtcttctctgttctccta

SEQ ID NO: 49401 - DNA, 22 bp, Artificial Sequence
  chemically synthesized
agtcttctctgttctcctacct

SEQ ID NO: 49402 - DNA, 22 bp, Artificial Sequence
  chemically synthesized
ctctgttctcctacctctttcg

SEQ ID NO: 49403 - DNA, 22 bp, Artificial Sequence
  chemically synthesized
tctgttctcctacctctttcga

SEQ ID NO: 49404 - DNA, 22 bp, Artificial Sequence
  chemically synthesized
tgttctcctacctctttcgagc

SEQ ID NO: 49405 - DNA, 22 bp, Artificial Sequence
  chemically synthesized
ttctcctacctctttcgagctc

SEQ ID NO: 49406 - DNA, 22 bp, Artificial Sequence
  chemically synthesized
tcctacctctttcgagctccta

SEQ ID NO: 49407 - DNA, 22 bp, Artificial Sequence
  chemically synthesized
ctacctctttcgagctcctaaa

SEQ ID NO: 49408 - DNA, 22 bp, Artificial Sequence
  chemically synthesized
cctctttcgagctcctaaaaac

SEQ ID NO: 49409 - DNA, 22 bp, Artificial Sequence
  chemically synthesized
tttcgagctcctaaaaactaga

SEQ ID NO: 49410 - DNA, 22 bp, Artificial Sequence
  chemically synthesized
tcgagctcctaaaaactagaca

SEQ ID NO: 49411 - DNA, 22 bp, Artificial Sequence
  chemically synthesized
cgagctcctaaaaactagacat

SEQ ID NO: 49412 - DNA, 22 bp, Artificial Sequence
  chemically synthesized
gagctcctaaaaactagacatc

SEQ ID NO: 49413 - DNA, 22 bp, Artificial Sequence
  chemically synthesized
ctaaaaactagacatcgattat

SEQ ID NO: 49414 - DNA, 22 bp, Artificial Sequence
  chemically synthesized
aaaactagacatcgattatgtc

SEQ ID NO: 49415 - DNA, 22 bp, Artificial Sequence
  chemically synthesized
gacatcgattatgtctgcgctt

SEQ ID NO: 49416 - DNA, 22 bp, Artificial Sequence
  chemically synthesized
tgtctgcgcttttccctttcta

SEQ ID NO: 49417 - DNA, 22 bp, Artificial Sequence
  chemically synthesized
cgcttttccctttctattcaag

SEQ ID NO: 49418 - DNA, 22 bp, Artificial Sequence
  chemically synthesized
ttccctttctattcaagataaa

SEQ ID NO: 49419 - DNA, 22 bp, Artificial Sequence
  chemically synthesized
tccctttctattcaagataaac

SEQ ID NO: 49420 - DNA, 22 bp, Artificial Sequence
  chemically synthesized
ccctttctattcaagataaaca

SEQ ID NO: 49421 - DNA, 22 bp, Artificial Sequence
  chemically synthesized
cctttctattcaagataaacaa

SEQ ID NO: 49422 - DNA, 22 bp, Artificial Sequence
  chemically synthesized
tctattcaagataaacaaagtg

SEQ ID NO: 49423 - DNA, 22 bp, Artificial Sequence
  chemically synthesized
ctattcaagataaacaaagtgc

SEQ ID NO: 49424 - DNA, 22 bp, Artificial Sequence
  chemically synthesized
tattcaagataaacaaagtgct

SEQ ID NO: 49425 - DNA, 22 bp, Artificial Sequence
  chemically synthesized
ttcaagataaacaaagtgcttc

SEQ ID NO: 49426 - DNA, 22 bp, Artificial Sequence
  chemically synthesized
aagataaacaaagtgcttcaag

SEQ ID NO: 49427 - DNA, 22 bp, Artificial Sequence
  chemically synthesized
caagttcagggcgcaccctggg

SEQ ID NO: 49428 - DNA, 22 bp, Artificial Sequence
  chemically synthesized
aagttcagggcgcaccctggga

SEQ ID NO: 49429 - DNA, 22 bp, Artificial Sequence
  chemically synthesized
agggcgcaccctgggacccctg

SEQ ID NO: 49430 - DNA, 22 bp, Artificial Sequence
  chemically synthesized
ggacccctgacaaaacaatcta

SEQ ID NO: 49431 - DNA, 22 bp, Artificial Sequence
  chemically synthesized
acaaaacaatctatcattctgt

SEQ ID NO: 49432 - DNA, 22 bp, Artificial Sequence
  chemically synthesized
tcattctgtctgctaaaccagt

SEQ ID NO: 49433 - DNA, 22 bp, Artificial Sequence
  chemically synthesized
tgtctgctaaaccagtctggct

SEQ ID NO: 49434 - DNA, 22 bp, Artificial Sequence
  chemically synthesized
tctgctaaaccagtctggctac

SEQ ID NO: 49435 - DNA, 22 bp, Artificial Sequence
  chemically synthesized
ctaaaccagtctggctacacca

SEQ ID NO: 49436 - DNA, 22 bp, Artificial Sequence
  chemically synthesized
aaccagtctggctacaccatgg

SEQ ID NO: 49437 - DNA, 22 bp, Artificial Sequence
  chemically synthesized
gctacaccatggccagggagag

SEQ ID NO: 49438 - DNA, 22 bp, Artificial Sequence
  chemically synthesized
caccatggccagggagagtaac

SEQ ID NO: 49439 - DNA, 22 bp, Artificial Sequence
  chemically synthesized
ccaatgtacaattttccctttg

SEQ ID NO: 49440 - DNA, 22 bp, Artificial Sequence
  chemically synthesized
tccctttgtgctccttccctct

SEQ ID NO: 49441 - DNA, 22 bp, Artificial Sequence
  chemically synthesized
ccctttgtgctccttccctctt

SEQ ID NO: 49442 - DNA, 22 bp, Artificial Sequence
  chemically synthesized
cctttgtgctccttccctcttg

SEQ ID NO: 49443 - DNA, 22 bp, Artificial Sequence
  chemically synthesized
tgtgctccttccctcttgccac

SEQ ID NO: 49444 - DNA, 22 bp, Artificial Sequence
  chemically synthesized
gtgctccttccctcttgccact

SEQ ID NO: 49445 - DNA, 22 bp, Artificial Sequence
  chemically synthesized
tgctccttccctcttgccacta

SEQ ID NO: 49446 - DNA, 22 bp, Artificial Sequence
  chemically synthesized
cttccctcttgccactaacctc

SEQ ID NO: 49447 - DNA, 22 bp, Artificial Sequence
  chemically synthesized
ccctcttgccactaacctcttt

SEQ ID NO: 49448 - DNA, 22 bp, Artificial Sequence
  chemically synthesized
cctcttgccactaacctctttt

SEQ ID NO: 49449 - DNA, 22 bp, Artificial Sequence
  chemically synthesized
ttgccactaacctcttttcttt

SEQ ID NO: 49450 - DNA, 22 bp, Artificial Sequence
  chemically synthesized
gccactaacctcttttctttac

SEQ ID NO: 49451 - DNA, 22 bp, Artificial Sequence
  chemically synthesized
ccactaacctcttttctttacc

SEQ ID NO: 49452 - DNA, 22 bp, Artificial Sequence
  chemically synthesized
acctcttttctttaccaccttc

SEQ ID NO: 49453 - DNA, 22 bp, Artificial Sequence
  chemically synthesized
ttttctttaccaccttctccgg

SEQ ID NO: 49454 - DNA, 22 bp, Artificial Sequence
  chemically synthesized
ttctttaccaccttctccggag

SEQ ID NO: 49455 - DNA, 22 bp, Artificial Sequence
  chemically synthesized
tctttaccaccttctccggagc

SEQ ID NO: 49456 - DNA, 22 bp, Artificial Sequence
  chemically synthesized
ctttaccaccttctccggagca

SEQ ID NO: 49457 - DNA, 22 bp, Artificial Sequence
  chemically synthesized
tttaccaccttctccggagcag

SEQ ID NO: 49458 - DNA, 22 bp, Artificial Sequence
  chemically synthesized
taccaccttctccggagcagat

SEQ ID NO: 49459 - DNA, 22 bp, Artificial Sequence
  chemically synthesized
accaccttctccggagcagatg

SEQ ID NO: 49460 - DNA, 22 bp, Artificial Sequence
  chemically synthesized
ccaccttctccggagcagatgg

SEQ ID NO: 49461 - DNA, 22 bp, Artificial Sequence
  chemically synthesized
ctccggagcagatggacttgac

SEQ ID NO: 49462 - DNA, 22 bp, Artificial Sequence
  chemically synthesized
tccggagcagatggacttgacc

SEQ ID NO: 49463 - DNA, 22 bp, Artificial Sequence
  chemically synthesized
cggagcagatggacttgaccac

SEQ ID NO: 49464 - DNA, 22 bp, Artificial Sequence
  chemically synthesized
gaccactttgcttaagcccctc

SEQ ID NO: 49465 - DNA, 22 bp, Artificial Sequence
  chemically synthesized
accactttgcttaagcccctcc

SEQ ID NO: 49466 - DNA, 22 bp, Artificial Sequence
  chemically synthesized
tgcttaagcccctcctggcaac

SEQ ID NO: 49467 - DNA, 22 bp, Artificial Sequence
  chemically synthesized
gcttaagcccctcctggcaacc

SEQ ID NO: 49468 - DNA, 22 bp, Artificial Sequence
  chemically synthesized
cttaagcccctcctggcaacct

SEQ ID NO: 49469 - DNA, 22 bp, Artificial Sequence
  chemically synthesized
aagcccctcctggcaacctcag

SEQ ID NO: 49470 - DNA, 22 bp, Artificial Sequence
  chemically synthesized
agcccctcctggcaacctcaga

SEQ ID NO: 49471 - DNA, 22 bp, Artificial Sequence
  chemically synthesized
ctggcaacctcagaaattagag

SEQ ID NO: 49472 - DNA, 22 bp, Artificial Sequence
  chemically synthesized
gcaacctcagaaattagagaaa

SEQ ID NO: 49473 - DNA, 22 bp, Artificial Sequence
  chemically synthesized
agaaattagagaaaaaaaaaaa

SEQ ID NO: 49474 - DNA, 22 bp, Artificial Sequence
  chemically synthesized
gagaaaaaaaaaaaaagagctc

SEQ ID NO: 49475 - DNA, 22 bp, Artificial Sequence
  chemically synthesized
ctggctaccctactccggtcca

SEQ ID NO: 49476 - DNA, 22 bp, Artificial Sequence
  chemically synthesized
gctaccctactccggtccaggt

SEQ ID NO: 49477 - DNA, 22 bp, Artificial Sequence
  chemically synthesized
ccctactccggtccaggttttt

SEQ ID NO: 49478 - DNA, 22 bp, Artificial Sequence
  chemically synthesized
ctccggtccaggtttttctcct

SEQ ID NO: 49479 - DNA, 22 bp, Artificial Sequence
  chemically synthesized
cggtccaggtttttctcctccc

SEQ ID NO: 49480 - DNA, 22 bp, Artificial Sequence
  chemically synthesized
ttctcctccctctgtgttgccc

SEQ ID NO: 49481 - DNA, 22 bp, Artificial Sequence
  chemically synthesized
tctcctccctctgtgttgcccg

SEQ ID NO: 49482 - DNA, 22 bp, Artificial Sequence
  chemically synthesized
ctcctccctctgtgttgcccga

SEQ ID NO: 49483 - DNA, 22 bp, Artificial Sequence
  chemically synthesized
tcctccctctgtgttgcccgac

SEQ ID NO: 49484 - DNA, 22 bp, Artificial Sequence
  chemically synthesized
ctccctctgtgttgcccgacgg

SEQ ID NO: 49485 - DNA, 22 bp, Artificial Sequence
  chemically synthesized
cctctgtgttgcccgacggtcc

SEQ ID NO: 49486 - DNA, 22 bp, Artificial Sequence
  chemically synthesized
tgtgttgcccgacggtcctgca

SEQ ID NO: 49487 - DNA, 22 bp, Artificial Sequence
  chemically synthesized
tgttgcccgacggtcctgcaca

SEQ ID NO: 49488 - DNA, 22 bp, Artificial Sequence
  chemically synthesized
cccgacggtcctgcacacacag

SEQ ID NO: 49489 - DNA, 22 bp, Artificial Sequence
  chemically synthesized
cacacacagacacaaatcccgt

SEQ ID NO: 49490 - DNA, 22 bp, Artificial Sequence
  chemically synthesized
gacccacagaatcttttcgacc

SEQ ID NO: 49491 - DNA, 22 bp, Artificial Sequence
  chemically synthesized
ttcgaccctctcacactaacac

SEQ ID NO: 49492 - DNA, 22 bp, Artificial Sequence
  chemically synthesized
tcgaccctctcacactaacact

SEQ ID NO: 49493 - DNA, 22 bp, Artificial Sequence
  chemically synthesized
cgaccctctcacactaacacta

SEQ ID NO: 49494 - DNA, 22 bp, Artificial Sequence
  chemically synthesized
gaccctctcacactaacactaa

SEQ ID NO: 49495 - DNA, 22 bp, Artificial Sequence
  chemically synthesized
tcacactaacactaaaccagaa

SEQ ID NO: 49496 - DNA, 22 bp, Artificial Sequence
  chemically synthesized
acactaacactaaaccagaaaa

SEQ ID NO: 49497 - DNA, 22 bp, Artificial Sequence
  chemically synthesized
acactaaaccagaaaataaatt

SEQ ID NO: 49498 - DNA, 22 bp, Artificial Sequence
  chemically synthesized
aaccagaaaataaattaaatac

SEQ ID NO: 49499 - DNA, 22 bp, Artificial Sequence
  chemically synthesized
aatactgggactgccccctcct

SEQ ID NO: 49500 - DNA, 22 bp, Artificial Sequence
  chemically synthesized
ggactgccccctcctttgcgtt

SEQ ID NO: 49501 - DNA, 22 bp, Artificial Sequence
  chemically synthesized
ccccctcctttgcgttctgcaa

SEQ ID NO: 49502 - DNA, 22 bp, Artificial Sequence
  chemically synthesized
ctttgcgttctgcaagaatatt

SEQ ID NO: 49503 - DNA, 22 bp, Artificial Sequence
  chemically synthesized
tgcgttctgcaagaatatttta

SEQ ID NO: 49504 - DNA, 22 bp, Artificial Sequence
  chemically synthesized
gcgttctgcaagaatattttaa

SEQ ID NO: 49505 - DNA, 22 bp, Artificial Sequence
  chemically synthesized
cgttctgcaagaatattttaag

SEQ ID NO: 49506 - DNA, 22 bp, Artificial Sequence
  chemically synthesized
tgcaagaatattttaagtgagt

SEQ ID NO: 49507 - DNA, 22 bp, Artificial Sequence
  chemically synthesized
caagaatattttaagtgagttt

SEQ ID NO: 49508 - DNA, 22 bp, Artificial Sequence
  chemically synthesized
taagtgagttttgttttaaatc

SEQ ID NO: 49509 - DNA, 22 bp, Artificial Sequence
  chemically synthesized
aagtgagttttgttttaaatca

SEQ ID NO: 49510 - DNA, 22 bp, Artificial Sequence
  chemically synthesized
agtgagttttgttttaaatcat

SEQ ID NO: 49511 - DNA, 22 bp, Artificial Sequence
  chemically synthesized
tgttttaaatcatatccattaa

SEQ ID NO: 49512 - DNA, 22 bp, Artificial Sequence
  chemically synthesized
gttttaaatcatatccattaat

SEQ ID NO: 49513 - DNA, 22 bp, Artificial Sequence
  chemically synthesized
ttttaaatcatatccattaatt

SEQ ID NO: 49514 - DNA, 22 bp, Artificial Sequence
  chemically synthesized
taaatcatatccattaatttac

SEQ ID NO: 49515 - DNA, 22 bp, Artificial Sequence
  chemically synthesized
aaatcatatccattaatttacc

SEQ ID NO: 49516 - DNA, 22 bp, Artificial Sequence
  chemically synthesized
aatcatatccattaatttaccc

SEQ ID NO: 49517 - DNA, 22 bp, Artificial Sequence
  chemically synthesized
atttaccctgacttgcaattaa

SEQ ID NO: 49518 - DNA, 22 bp, Artificial Sequence
  chemically synthesized
accctgacttgcaattaaatgc

SEQ ID NO: 49519 - DNA, 22 bp, Artificial Sequence
  chemically synthesized
ccctgacttgcaattaaatgca

SEQ ID NO: 49520 - DNA, 22 bp, Artificial Sequence
  chemically synthesized
acttgcaattaaatgcaagcac

SEQ ID NO: 49521 - DNA, 22 bp, Artificial Sequence
  chemically synthesized
gcaattaaatgcaagcacactt

SEQ ID NO: 49522 - DNA, 22 bp, Artificial Sequence
  chemically synthesized
caattaaatgcaagcacacttt

SEQ ID NO: 49523 - DNA, 22 bp, Artificial Sequence
  chemically synthesized
aatgcaagcacactttttacaa

SEQ ID NO: 49524 - DNA, 22 bp, Artificial Sequence
  chemically synthesized
tttacaaccagtacggaatgca

SEQ ID NO: 49525 - DNA, 22 bp, Artificial Sequence
  chemically synthesized
ttacaaccagtacggaatgcat

SEQ ID NO: 49526 - DNA, 22 bp, Artificial Sequence
  chemically synthesized
tacaaccagtacggaatgcatt

SEQ ID NO: 49527 - DNA, 22 bp, Artificial Sequence
  chemically synthesized
acaaccagtacggaatgcatta

SEQ ID NO: 49528 - DNA, 22 bp, Artificial Sequence
  chemically synthesized
caaccagtacggaatgcattaa

SEQ ID NO: 49529 - DNA, 22 bp, Artificial Sequence
  chemically synthesized
attataactacaaatggtcaaa

SEQ ID NO: 49530 - DNA, 22 bp, Artificial Sequence
  chemically synthesized
taactacaaatggtcaaatgag

SEQ ID NO: 49531 - DNA, 22 bp, Artificial Sequence
  chemically synthesized
caaatggtcaaatgagagcaag

SEQ ID NO: 49532 - DNA, 22 bp, Artificial Sequence
  chemically synthesized
caaaaaatattaataaaataca

SEQ ID NO: 49533 - DNA, 22 bp, Artificial Sequence
  chemically synthesized
ataaaatacataataaataata

SEQ ID NO: 49534 - DNA, 22 bp, Artificial Sequence
  chemically synthesized
atgaaacaaaaatagattcata

SEQ ID NO: 49535 - DNA, 22 bp, Artificial Sequence
  chemically synthesized
ataagccttggccagggctttt

SEQ ID NO: 49536 - DNA, 22 bp, Artificial Sequence
  chemically synthesized
ggccagggcttttattatttca

SEQ ID NO: 49537 - DNA, 22 bp, Artificial Sequence
  chemically synthesized
gccagggcttttattatttcat

SEQ ID NO: 49538 - DNA, 22 bp, Artificial Sequence
  chemically synthesized
ttattatttcatgcaaggggaa

SEQ ID NO: 49539 - DNA, 22 bp, Artificial Sequence
  chemically synthesized
tattatttcatgcaaggggaaa

SEQ ID NO: 49540 - DNA, 22 bp, Artificial Sequence
  chemically synthesized
attatttcatgcaaggggaaag

SEQ ID NO: 49541 - DNA, 22 bp, Artificial Sequence
  chemically synthesized
ttatttcatgcaaggggaaagt

SEQ ID NO: 49542 - DNA, 22 bp, Artificial Sequence
  chemically synthesized
tttcatgcaaggggaaagtcca

SEQ ID NO: 49543 - DNA, 22 bp, Artificial Sequence
  chemically synthesized
catgcaaggggaaagtccagcc

SEQ ID NO: 49544 - DNA, 22 bp, Artificial Sequence
  chemically synthesized
atgcaaggggaaagtccagcca

SEQ ID NO: 49545 - DNA, 22 bp, Artificial Sequence
  chemically synthesized
gctccatacactttggcaggac

SEQ ID NO: 49546 - DNA, 22 bp, Artificial Sequence
  chemically synthesized
ctccatacactttggcaggact

SEQ ID NO: 49547 - DNA, 22 bp, Artificial Sequence
  chemically synthesized
catacactttggcaggactcag

SEQ ID NO: 49548 - DNA, 22 bp, Artificial Sequence
  chemically synthesized
tggcaggactcagaccaaccac

SEQ ID NO: 49549 - DNA, 22 bp, Artificial Sequence
  chemically synthesized
ggcaggactcagaccaaccact

SEQ ID NO: 49550 - DNA, 22 bp, Artificial Sequence
  chemically synthesized
gcaggactcagaccaaccacta

SEQ ID NO: 49551 - DNA, 22 bp, Artificial Sequence
  chemically synthesized
agaccaaccactaccattaaac

SEQ ID NO: 49552 - DNA, 22 bp, Artificial Sequence
  chemically synthesized
ccattaaactcaagagcgtgtt

SEQ ID NO: 49553 - DNA, 22 bp, Artificial Sequence
  chemically synthesized
aactcaagagcgtgttttggca

SEQ ID NO: 49554 - DNA, 22 bp, Artificial Sequence
  chemically synthesized
aagagcgtgttttggcagtgcc

SEQ ID NO: 49555 - DNA, 22 bp, Artificial Sequence
  chemically synthesized
tggcagtgccctggcattgggg

SEQ ID NO: 49556 - DNA, 22 bp, Artificial Sequence
  chemically synthesized
ggcagtgccctggcattggggg

SEQ ID NO: 49557 - DNA, 22 bp, Artificial Sequence
  chemically synthesized
gcagtgccctggcattgggggg

SEQ ID NO: 49558 - DNA, 22 bp, Artificial Sequence
  chemically synthesized
gcattggggggccctgtgcaga

SEQ ID NO: 49559 - DNA, 22 bp, Artificial Sequence
  chemically synthesized
gggggccctgtgcagacaccac

SEQ ID NO: 49560 - DNA, 22 bp, Artificial Sequence
  chemically synthesized
tgcagacaccaccaggagacgc

SEQ ID NO: 49561 - DNA, 22 bp, Artificial Sequence
  chemically synthesized
accccagtacccaaggcagggt

SEQ ID NO: 49562 - DNA, 22 bp, Artificial Sequence
  chemically synthesized
attcagcctttccatgtggtcg

SEQ ID NO: 49563 - DNA, 22 bp, Artificial Sequence
  chemically synthesized
ttcagcctttccatgtggtcgg

SEQ ID NO: 49564 - DNA, 22 bp, Artificial Sequence
  chemically synthesized
agcctttccatgtggtcgggaa

SEQ ID NO: 49565 - DNA, 22 bp, Artificial Sequence
  chemically synthesized
tccatgtggtcgggaagttacc

SEQ ID NO: 49566 - DNA, 22 bp, Artificial Sequence
  chemically synthesized
ccatgtggtcgggaagttaccc

SEQ ID NO: 49567 - DNA, 22 bp, Artificial Sequence
  chemically synthesized
catgtggtcgggaagttaccca

SEQ ID NO: 49568 - DNA, 22 bp, Artificial Sequence
  chemically synthesized
cccacaggctgcttccctcttc

SEQ ID NO: 49569 - DNA, 22 bp, Artificial Sequence
  chemically synthesized
cttccctcttcctaaccaccct

SEQ ID NO: 49570 - DNA, 22 bp, Artificial Sequence
  chemically synthesized
ccctcttcctaaccaccctctc

SEQ ID NO: 49571 - DNA, 22 bp, Artificial Sequence
  chemically synthesized
cctcttcctaaccaccctctct

SEQ ID NO: 49572 - DNA, 22 bp, Artificial Sequence
  chemically synthesized
ttcctaaccaccctctctgccg

SEQ ID NO: 49573 - DNA, 22 bp, Artificial Sequence
  chemically synthesized
cctaaccaccctctctgccggc

SEQ ID NO: 49574 - DNA, 22 bp, Artificial Sequence
  chemically synthesized
ctaaccaccctctctgccggcc

SEQ ID NO: 49575 - DNA, 22 bp, Artificial Sequence
  chemically synthesized
accaccctctctgccggccgca

SEQ ID NO: 49576 - DNA, 22 bp, Artificial Sequence
  chemically synthesized
tctgccggccgcagctgttctg

SEQ ID NO: 49577 - DNA, 22 bp, Artificial Sequence
  chemically synthesized
tgccggccgcagctgttctgtc

SEQ ID NO: 49578 - DNA, 22 bp, Artificial Sequence
  chemically synthesized
ccggccgcagctgttctgtcag

SEQ ID NO: 49579 - DNA, 22 bp, Artificial Sequence
  chemically synthesized
ttctgtcagtgtccaccctgcc

SEQ ID NO: 49580 - DNA, 22 bp, Artificial Sequence
  chemically synthesized
tgtcagtgtccaccctgcccct

SEQ ID NO: 49581 - DNA, 22 bp, Artificial Sequence
  chemically synthesized
tcagtgtccaccctgcccctca

SEQ ID NO: 49582 - DNA, 22 bp, Artificial Sequence
  chemically synthesized
cccctcaaaggacaaatgaaat

SEQ ID NO: 49583 - DNA, 22 bp, Artificial Sequence
  chemically synthesized
aaaggacaaatgaaatccccca

SEQ ID NO: 49584 - DNA, 22 bp, Artificial Sequence
  chemically synthesized
aatgaagaactcaagactaggg

SEQ ID NO: 49585 - DNA, 22 bp, Artificial Sequence
  chemically synthesized
aagactagggcaccatgagcat

SEQ ID NO: 49586 - DNA, 22 bp, Artificial Sequence
  chemically synthesized
gggcaccatgagcatctgggtt

SEQ ID NO: 49587 - DNA, 22 bp, Artificial Sequence
  chemically synthesized
ggttaaggctcggaatcctgca

SEQ ID NO: 49588 - DNA, 22 bp, Artificial Sequence
  chemically synthesized
aggctcggaatcctgcaccagc

SEQ ID NO: 49589 - DNA, 22 bp, Artificial Sequence
  chemically synthesized
ggaatcctgcaccagcgttgga

SEQ ID NO: 49590 - DNA, 22 bp, Artificial Sequence
  chemically synthesized
caccagcgttggaagctgcctt

SEQ ID NO: 49591 - DNA, 22 bp, Artificial Sequence
  chemically synthesized
gaagctgcctttgttcctgcca

SEQ ID NO: 49592 - DNA, 22 bp, Artificial Sequence
  chemically synthesized
cctttgttcctgccacaccgcc

SEQ ID NO: 49593 - DNA, 22 bp, Artificial Sequence
  chemically synthesized
tgttcctgccacaccgccgggc

SEQ ID NO: 49594 - DNA, 22 bp, Artificial Sequence
  chemically synthesized
gttcctgccacaccgccgggcc

SEQ ID NO: 49595 - DNA, 22 bp, Artificial Sequence
  chemically synthesized
ttcctgccacaccgccgggccc

SEQ ID NO: 49596 - DNA, 22 bp, Artificial Sequence
  chemically synthesized
ctgccacaccgccgggcccctg

SEQ ID NO: 49597 - DNA, 22 bp, Artificial Sequence
  chemically synthesized
ccacaccgccgggcccctgcta

SEQ ID NO: 49598 - DNA, 22 bp, Artificial Sequence
  chemically synthesized
ctaacctgtctccacaacactc

SEQ ID NO: 49599 - DNA, 22 bp, Artificial Sequence
  chemically synthesized
acctgtctccacaacactcagc

SEQ ID NO: 49600 - DNA, 22 bp, Artificial Sequence
  chemically synthesized
tctccacaacactcagcctcac

SEQ ID NO: 49601 - DNA, 22 bp, Artificial Sequence
  chemically synthesized
cacaacactcagcctcacgcct

SEQ ID NO: 49602 - DNA, 22 bp, Artificial Sequence
  chemically synthesized
agcctcacgcctcaccccagca

SEQ ID NO: 49603 - DNA, 22 bp, Artificial Sequence
  chemically synthesized
acgcctcaccccagcactccct

SEQ ID NO: 49604 - DNA, 22 bp, Artificial Sequence
  chemically synthesized
accccagcactccctgcctctg

SEQ ID NO: 49605 - DNA, 22 bp, Artificial Sequence
  chemically synthesized
cctgcctctgcccctcccccca

SEQ ID NO: 49606 - DNA, 22 bp, Artificial Sequence
  chemically synthesized
cctctgcccctccccccaaatc

SEQ ID NO: 49607 - DNA, 22 bp, Artificial Sequence
  chemically synthesized
tgcccctccccccaaatccaac

SEQ ID NO: 49608 - DNA, 22 bp, Artificial Sequence
  chemically synthesized
cccctccccccaaatccaacac

SEQ ID NO: 49609 - DNA, 22 bp, Artificial Sequence
  chemically synthesized
cccccaaatccaacacacccac

SEQ ID NO: 49610 - DNA, 22 bp, Artificial Sequence
  chemically synthesized
attaagatcaggaagaaatttg

SEQ ID NO: 49611 - DNA, 22 bp, Artificial Sequence
  chemically synthesized
agatcaggaagaaatttgcatt

SEQ ID NO: 49612 - DNA, 22 bp, Artificial Sequence
  chemically synthesized
gcattttcttttcactgtaccc

SEQ ID NO: 49613 - DNA, 22 bp, Artificial Sequence
  chemically synthesized
cattttcttttcactgtacccc

SEQ ID NO: 49614 - DNA, 22 bp, Artificial Sequence
  chemically synthesized
tcttttcactgtacccccagta

SEQ ID NO: 49615 - DNA, 22 bp, Artificial Sequence
  chemically synthesized
cttttcactgtacccccagtaa

SEQ ID NO: 49616 - DNA, 22 bp, Artificial Sequence
  chemically synthesized
ttttcactgtacccccagtaat

SEQ ID NO: 49617 - DNA, 22 bp, Artificial Sequence
  chemically synthesized
ttcactgtacccccagtaatca

SEQ ID NO: 49618 - DNA, 22 bp, Artificial Sequence
  chemically synthesized
tcactgtacccccagtaatcac

SEQ ID NO: 49619 - DNA, 22 bp, Artificial Sequence
  chemically synthesized
cactgtacccccagtaatcaca

SEQ ID NO: 49620 - DNA, 22 bp, Artificial Sequence
  chemically synthesized
actgtacccccagtaatcacag

SEQ ID NO: 49621 - DNA, 22 bp, Artificial Sequence
  chemically synthesized
tacccccagtaatcacagaagt

SEQ ID NO: 49622 - DNA, 22 bp, Artificial Sequence
  chemically synthesized
ttcaaattttgagaattttgtt

SEQ ID NO: 49623 - DNA, 22 bp, Artificial Sequence
  chemically synthesized
caaattttgagaattttgttcc

SEQ ID NO: 49624 - DNA, 22 bp, Artificial Sequence
  chemically synthesized
aaattttgagaattttgttcct

SEQ ID NO: 49625 - DNA, 22 bp, Artificial Sequence
  chemically synthesized
tgagaattttgttcctctgcta

SEQ ID NO: 49626 - DNA, 22 bp, Artificial Sequence
  chemically synthesized
gagaattttgttcctctgctaa

SEQ ID NO: 49627 - DNA, 22 bp, Artificial Sequence
  chemically synthesized
agaattttgttcctctgctaat

SEQ ID NO: 49628 - DNA, 22 bp, Artificial Sequence
  chemically synthesized
tgttcctctgctaattatttcc

SEQ ID NO: 49629 - DNA, 22 bp, Artificial Sequence
  chemically synthesized
gttcctctgctaattatttccc

SEQ ID NO: 49630 - DNA, 22 bp, Artificial Sequence
  chemically synthesized
ttcctctgctaattatttccct

SEQ ID NO: 49631 - DNA, 22 bp, Artificial Sequence
  chemically synthesized
ctctgctaattatttccctcat

SEQ ID NO: 49632 - DNA, 22 bp, Artificial Sequence
  chemically synthesized
tgctaattatttccctcatttt

SEQ ID NO: 49633 - DNA, 22 bp, Artificial Sequence
  chemically synthesized
ctaattatttccctcattttgc

SEQ ID NO: 49634 - DNA, 22 bp, Artificial Sequence
  chemically synthesized
attatttccctcattttgcatt

SEQ ID NO: 49635 - DNA, 22 bp, Artificial Sequence
  chemically synthesized
tttccctcattttgcatttcaa

SEQ ID NO: 49636 - DNA, 22 bp, Artificial Sequence
  chemically synthesized
ccctcattttgcatttcaaggc

SEQ ID NO: 49637 - DNA, 22 bp, Artificial Sequence
  chemically synthesized
cctcattttgcatttcaaggca

SEQ ID NO: 49638 - DNA, 22 bp, Artificial Sequence
  chemically synthesized
attttgcatttcaaggcacaaa

SEQ ID NO: 49639 - DNA, 22 bp, Artificial Sequence
  chemically synthesized
tgcatttcaaggcacaaagaca

SEQ ID NO: 49640 - DNA, 22 bp, Artificial Sequence
  chemically synthesized
gcatttcaaggcacaaagacag

SEQ ID NO: 49641 - DNA, 22 bp, Artificial Sequence
  chemically synthesized
catttcaaggcacaaagacagt

SEQ ID NO: 49642 - DNA, 22 bp, Artificial Sequence
  chemically synthesized
caaggcacaaagacagtctatc

SEQ ID NO: 49643 - DNA, 22 bp, Artificial Sequence
  chemically synthesized
aaggcacaaagacagtctatct

SEQ ID NO: 49644 - DNA, 22 bp, Artificial Sequence
  chemically synthesized
tctcactggtggtctattaata

SEQ ID NO: 49645 - DNA, 22 bp, Artificial Sequence
  chemically synthesized
actggtggtctattaatagttt

SEQ ID NO: 49646 - DNA, 22 bp, Artificial Sequence
  chemically synthesized
gtggtctattaatagtttgaag

SEQ ID NO: 49647 - DNA, 22 bp, Artificial Sequence
  chemically synthesized
ttaatagtttgaagttttgagc

SEQ ID NO: 49648 - DNA, 22 bp, Artificial Sequence
  chemically synthesized
atagtttgaagttttgagcgtc

SEQ ID NO: 49649 - DNA, 22 bp, Artificial Sequence
  chemically synthesized
gaagttttgagcgtcagaaggt

SEQ ID NO: 49650 - DNA, 22 bp, Artificial Sequence
  chemically synthesized
aagttttgagcgtcagaaggtg

SEQ ID NO: 49651 - DNA, 22 bp, Artificial Sequence
  chemically synthesized
tgagcgtcagaaggtggttgtt

SEQ ID NO: 49652 - DNA, 22 bp, Artificial Sequence
  chemically synthesized
gagcgtcagaaggtggttgttg

SEQ ID NO: 49653 - DNA, 22 bp, Artificial Sequence
  chemically synthesized
agcgtcagaaggtggttgttgc

SEQ ID NO: 49654 - DNA, 22 bp, Artificial Sequence
  chemically synthesized
ttgctttttggtttttgggttt

SEQ ID NO: 49655 - DNA, 22 bp, Artificial Sequence
  chemically synthesized
ctttttggtttttgggtttttt

SEQ ID NO: 49656 - DNA, 22 bp, Artificial Sequence
  chemically synthesized
tttggtttttgggttttttttt

SEQ ID NO: 49657 - DNA, 22 bp, Artificial Sequence
  chemically synthesized
ttggtttttgggtttttttttt

SEQ ID NO: 49658 - DNA, 22 bp, Artificial Sequence
  chemically synthesized
tggtttttgggttttttttttt

SEQ ID NO: 49659 - DNA, 22 bp, Artificial Sequence
  chemically synthesized
ggtttttgggtttttttttttt

SEQ ID NO: 49660 - DNA, 22 bp, Artificial Sequence
  chemically synthesized
gtttttgggttttttttttttt

SEQ ID NO: 49661 - DNA, 22 bp, Artificial Sequence
  chemically synthesized
ttgggtttttttttttttcctt

SEQ ID NO: 49662 - DNA, 22 bp, Artificial Sequence
  chemically synthesized
tgggtttttttttttttccttt

SEQ ID NO: 49663 - DNA, 22 bp, Artificial Sequence
  chemically synthesized
gggtttttttttttttcctttt

SEQ ID NO: 49664 - DNA, 22 bp, Artificial Sequence
  chemically synthesized
ggtttttttttttttcctttta

SEQ ID NO: 49665 - DNA, 22 bp, Artificial Sequence
  chemically synthesized
ttttttttttccttttaaaact

SEQ ID NO: 49666 - DNA, 22 bp, Artificial Sequence
  chemically synthesized
tttttttttccttttaaaacta

SEQ ID NO: 49667 - DNA, 22 bp, Artificial Sequence
  chemically synthesized
ttttttttccttttaaaactat

SEQ ID NO: 49668 - DNA, 22 bp, Artificial Sequence
  chemically synthesized
tttttttccttttaaaactatt

SEQ ID NO: 49669 - DNA, 22 bp, Artificial Sequence
  chemically synthesized
ttttttccttttaaaactattc

SEQ ID NO: 49670 - DNA, 22 bp, Artificial Sequence
  chemically synthesized
tttttccttttaaaactattct

SEQ ID NO: 49671 - DNA, 22 bp, Artificial Sequence
  chemically synthesized
ttttccttttaaaactattctg

SEQ ID NO: 49672 - DNA, 22 bp, Artificial Sequence
  chemically synthesized
tttccttttaaaactattctgt

SEQ ID NO: 49673 - DNA, 22 bp, Artificial Sequence
  chemically synthesized
ttccttttaaaactattctgtc

SEQ ID NO: 49674 - DNA, 22 bp, Artificial Sequence
  chemically synthesized
tccttttaaaactattctgtca

SEQ ID NO: 49675 - DNA, 22 bp, Artificial Sequence
  chemically synthesized
ccttttaaaactattctgtcat

SEQ ID NO: 49676 - DNA, 22 bp, Artificial Sequence
  chemically synthesized
cttttaaaactattctgtcatt

SEQ ID NO: 49677 - DNA, 22 bp, Artificial Sequence
  chemically synthesized
ttaaaactattctgtcatttcc

SEQ ID NO: 49678 - DNA, 22 bp, Artificial Sequence
  chemically synthesized
taaaactattctgtcatttcca

SEQ ID NO: 49679 - DNA, 22 bp, Artificial Sequence
  chemically synthesized
aaaactattctgtcatttccag

SEQ ID NO: 49680 - DNA, 22 bp, Artificial Sequence
  chemically synthesized
aaactattctgtcatttccagt

SEQ ID NO: 49681 - DNA, 22 bp, Artificial Sequence
  chemically synthesized
ttctgtcatttccagtttttta

SEQ ID NO: 49682 - DNA, 22 bp, Artificial Sequence
  chemically synthesized
tgtcatttccagttttttaaaa

SEQ ID NO: 49683 - DNA, 22 bp, Artificial Sequence
  chemically synthesized
tcatttccagttttttaaaaag

SEQ ID NO: 49684 - DNA, 22 bp, Artificial Sequence
  chemically synthesized
ccagttttttaaaaaggttttg

SEQ ID NO: 49685 - DNA, 22 bp, Artificial Sequence
  chemically synthesized
cagttttttaaaaaggttttgt

SEQ ID NO: 49686 - DNA, 22 bp, Artificial Sequence
  chemically synthesized
tttaaaaaggttttgttttgtt

SEQ ID NO: 49687 - DNA, 22 bp, Artificial Sequence
  chemically synthesized
ttaaaaaggttttgttttgttt

SEQ ID NO: 49688 - DNA, 22 bp, Artificial Sequence
  chemically synthesized
taaaaaggttttgttttgtttt

SEQ ID NO: 49689 - DNA, 22 bp, Artificial Sequence
  chemically synthesized
aaaaaggttttgttttgttttg

SEQ ID NO: 49690 - DNA, 22 bp, Artificial Sequence
  chemically synthesized
aaaaggttttgttttgttttgc

SEQ ID NO: 49691 - DNA, 22 bp, Artificial Sequence
  chemically synthesized
tgttttgttttgctttgttttt

SEQ ID NO: 49692 - DNA, 22 bp, Artificial Sequence
  chemically synthesized
gttttgttttgctttgtttttt

SEQ ID NO: 49693 - DNA, 22 bp, Artificial Sequence
  chemically synthesized
ttttgttttgctttgttttttg

SEQ ID NO: 49694 - DNA, 22 bp, Artificial Sequence
  chemically synthesized
tgttttgctttgttttttgttt

SEQ ID NO: 49695 - DNA, 22 bp, Artificial Sequence
  chemically synthesized
gttttgctttgttttttgtttt

SEQ ID NO: 49696 - DNA, 22 bp, Artificial Sequence
  chemically synthesized
ttttgctttgttttttgttttt

SEQ ID NO: 49697 - DNA, 22 bp, Artificial Sequence
  chemically synthesized
tgctttgttttttgtttttttg

SEQ ID NO: 49698 - DNA, 22 bp, Artificial Sequence
  chemically synthesized
gctttgttttttgtttttttgt

SEQ ID NO: 49699 - DNA, 22 bp, Artificial Sequence
  chemically synthesized
ctttgttttttgtttttttgtt

SEQ ID NO: 49700 - DNA, 22 bp, Artificial Sequence
  chemically synthesized
tgttttttgtttttttgttttt

SEQ ID NO: 49701 - DNA, 22 bp, Artificial Sequence
  chemically synthesized
gttttttgtttttttgtttttc

SEQ ID NO: 49702 - DNA, 22 bp, Artificial Sequence
  chemically synthesized
ttttttgtttttttgtttttct

SEQ ID NO: 49703 - DNA, 22 bp, Artificial Sequence
  chemically synthesized
tttgtttttttgtttttctttt

SEQ ID NO: 49704 - DNA, 22 bp, Artificial Sequence
  chemically synthesized
ttgtttttttgtttttcttttt

SEQ ID NO: 49705 - DNA, 22 bp, Artificial Sequence
  chemically synthesized
tgtttttttgtttttctttttt

SEQ ID NO: 49706 - DNA, 22 bp, Artificial Sequence
  chemically synthesized
gtttttttgtttttcttttttt

SEQ ID NO: 49707 - DNA, 22 bp, Artificial Sequence
  chemically synthesized
tttttttgtttttctttttttg

SEQ ID NO: 49708 - DNA, 22 bp, Artificial Sequence
  chemically synthesized
ttttgtttttctttttttggtg

SEQ ID NO: 49709 - DNA, 22 bp, Artificial Sequence
  chemically synthesized
tttgtttttctttttttggtgg

SEQ ID NO: 49710 - DNA, 22 bp, Artificial Sequence
  chemically synthesized
ttgtttttctttttttggtggt

SEQ ID NO: 49711 - DNA, 22 bp, Artificial Sequence
  chemically synthesized
tgtttttctttttttggtggtg

SEQ ID NO: 49712 - DNA, 22 bp, Artificial Sequence
  chemically synthesized
gtttttctttttttggtggtgg

SEQ ID NO: 49713 - DNA, 22 bp, Artificial Sequence
  chemically synthesized
tttttctttttttggtggtggt

SEQ ID NO: 49714 - DNA, 22 bp, Artificial Sequence
  chemically synthesized
ttctttttttggtggtggtggc

SEQ ID NO: 49715 - DNA, 22 bp, Artificial Sequence
  chemically synthesized
tctttttttggtggtggtggcg

SEQ ID NO: 49716 - DNA, 22 bp, Artificial Sequence
  chemically synthesized
ctttttttggtggtggtggcgt

SEQ ID NO: 49717 - DNA, 22 bp, Artificial Sequence
  chemically synthesized
tttttttggtggtggtggcgtt

SEQ ID NO: 49718 - DNA, 22 bp, Artificial Sequence
  chemically synthesized
tttttggtggtggtggcgttaa

SEQ ID NO: 49719 - DNA, 22 bp, Artificial Sequence
  chemically synthesized
ttttggtggtggtggcgttaat

SEQ ID NO: 49720 - DNA, 22 bp, Artificial Sequence
  chemically synthesized
tttggtggtggtggcgttaatg

SEQ ID NO: 49721 - DNA, 22 bp, Artificial Sequence
  chemically synthesized
ttggtggtggtggcgttaatgt

SEQ ID NO: 49722 - DNA, 22 bp, Artificial Sequence
  chemically synthesized
tggtggtggtggcgttaatgtt

SEQ ID NO: 49723 - DNA, 22 bp, Artificial Sequence
  chemically synthesized
ggtggtggtggcgttaatgttt

SEQ ID NO: 49724 - DNA, 22 bp, Artificial Sequence
  chemically synthesized
gtggtggtggcgttaatgtttc

SEQ ID NO: 49725 - DNA, 22 bp, Artificial Sequence
  chemically synthesized
atgtttcttcagaaagacagct

SEQ ID NO: 49726 - DNA, 22 bp, Artificial Sequence
  chemically synthesized
cttcagaaagacagcttctggg

SEQ ID NO: 49727 - DNA, 22 bp, Artificial Sequence
  chemically synthesized
ttcagaaagacagcttctgggc

SEQ ID NO: 49728 - DNA, 22 bp, Artificial Sequence
  chemically synthesized
cagaaagacagcttctgggcca

SEQ ID NO: 49729 - DNA, 22 bp, Artificial Sequence
  chemically synthesized
agaaagacagcttctgggccac

SEQ ID NO: 49730 - DNA, 22 bp, Artificial Sequence
  chemically synthesized
ctgggccactctgggtattatg

SEQ ID NO: 49731 - DNA, 22 bp, Artificial Sequence
  chemically synthesized
tgggccactctgggtattatga

SEQ ID NO: 49732 - DNA, 22 bp, Artificial Sequence
  chemically synthesized
ggccactctgggtattatgatt

SEQ ID NO: 49733 - DNA, 22 bp, Artificial Sequence
  chemically synthesized
tgggtattatgatttggtttcc

SEQ ID NO: 49734 - DNA, 22 bp, Artificial Sequence
  chemically synthesized
ggtattatgatttggtttcccc

SEQ ID NO: 49735 - DNA, 22 bp, Artificial Sequence
  chemically synthesized
tgatttggtttcccccttacaa

SEQ ID NO: 49736 - DNA, 22 bp, Artificial Sequence
  chemically synthesized
ggtttcccccttacaatagtta

SEQ ID NO: 49737 - DNA, 22 bp, Artificial Sequence
  chemically synthesized
gtttcccccttacaatagttac

SEQ ID NO: 49738 - DNA, 22 bp, Artificial Sequence
  chemically synthesized
cccccttacaatagttactctc

SEQ ID NO: 49739 - DNA, 22 bp, Artificial Sequence
  chemically synthesized
ccccttacaatagttactctct

SEQ ID NO: 49740 - DNA, 22 bp, Artificial Sequence
  chemically synthesized
acaatagttactctctgcctgg

SEQ ID NO: 49741 - DNA, 22 bp, Artificial Sequence
  chemically synthesized
caatagttactctctgcctggt

SEQ ID NO: 49742 - DNA, 22 bp, Artificial Sequence
  chemically synthesized
ctctctgcctggtttactgatt

SEQ ID NO: 49743 - DNA, 22 bp, Artificial Sequence
  chemically synthesized
tctgcctggtttactgatttac

SEQ ID NO: 49744 - DNA, 22 bp, Artificial Sequence
  chemically synthesized
tgcctggtttactgatttacag

SEQ ID NO: 49745 - DNA, 22 bp, Artificial Sequence
  chemically synthesized
cctggtttactgatttacagaa

SEQ ID NO: 49746 - DNA, 22 bp, Artificial Sequence
  chemically synthesized
gtttactgatttacagaacctt

SEQ ID NO: 49747 - DNA, 22 bp, Artificial Sequence
  chemically synthesized
actgatttacagaaccttggta

SEQ ID NO: 49748 - DNA, 22 bp, Artificial Sequence
  chemically synthesized
ctgatttacagaaccttggtat

SEQ ID NO: 49749 - DNA, 22 bp, Artificial Sequence
  chemically synthesized
atttacagaaccttggtatgtg

SEQ ID NO: 49750 - DNA, 22 bp, Artificial Sequence
  chemically synthesized
acagaaccttggtatgtgaatg

SEQ ID NO: 49751 - DNA, 22 bp, Artificial Sequence
  chemically synthesized
cagaaccttggtatgtgaatgg

SEQ ID NO: 49752 - DNA, 22 bp, Artificial Sequence
  chemically synthesized
ggtatgtgaatggcgaaaaaga

SEQ ID NO: 49753 - DNA, 22 bp, Artificial Sequence
  chemically synthesized
gtatgtgaatggcgaaaaagaa

SEQ ID NO: 49754 - DNA, 22 bp, Artificial Sequence
  chemically synthesized
cttggcataaggatatgtttgc

SEQ ID NO: 49755 - DNA, 22 bp, Artificial Sequence
  chemically synthesized
ggcataaggatatgtttgctga

SEQ ID NO: 49756 - DNA, 22 bp, Artificial Sequence
  chemically synthesized
gcataaggatatgtttgctgat

SEQ ID NO: 49757 - DNA, 22 bp, Artificial Sequence
  chemically synthesized
gctgatcaaatttcagatcatg

SEQ ID NO: 49758 - DNA, 22 bp, Artificial Sequence
  chemically synthesized
ctgatcaaatttcagatcatgt

SEQ ID NO: 49759 - DNA, 22 bp, Artificial Sequence
  chemically synthesized
atcaaatttcagatcatgtgtt

SEQ ID NO: 49760 - DNA, 22 bp, Artificial Sequence
  chemically synthesized
cagatcatgtgttgttcattat

SEQ ID NO: 49761 - DNA, 22 bp, Artificial Sequence
  chemically synthesized
agatcatgtgttgttcattatt

SEQ ID NO: 49762 - DNA, 22 bp, Artificial Sequence
  chemically synthesized
ttcattattatgactttacttg

SEQ ID NO: 49763 - DNA, 22 bp, Artificial Sequence
  chemically synthesized
attattatgactttacttgaaa

SEQ ID NO: 49764 - DNA, 22 bp, Artificial Sequence
  chemically synthesized
ttatgactttacttgaaaaaca

SEQ ID NO: 49765 - DNA, 22 bp, Artificial Sequence
  chemically synthesized
tgactttacttgaaaaacagtt

SEQ ID NO: 49766 - DNA, 22 bp, Artificial Sequence
  chemically synthesized
tacttgaaaaacagtttgccac

SEQ ID NO: 49767 - DNA, 22 bp, Artificial Sequence
  chemically synthesized
acttgaaaaacagtttgccaca

SEQ ID NO: 49768 - DNA, 22 bp, Artificial Sequence
  chemically synthesized
cttgaaaaacagtttgccacag

SEQ ID NO: 49769 - DNA, 22 bp, Artificial Sequence
  chemically synthesized
gaaaaacagtttgccacagtga

SEQ ID NO: 49770 - DNA, 22 bp, Artificial Sequence
  chemically synthesized
aaaaacagtttgccacagtgag

SEQ ID NO: 49771 - DNA, 22 bp, Artificial Sequence
  chemically synthesized
gccacagtgagatggattcact

SEQ ID NO: 49772 - DNA, 22 bp, Artificial Sequence
  chemically synthesized
ccacagtgagatggattcactt

SEQ ID NO: 49773 - DNA, 22 bp, Artificial Sequence
  chemically synthesized
acttatatgctttctacccctc

SEQ ID NO: 49774 - DNA, 22 bp, Artificial Sequence
  chemically synthesized
atatgctttctacccctccact

SEQ ID NO: 49775 - DNA, 22 bp, Artificial Sequence
  chemically synthesized
tatgctttctacccctccactc

SEQ ID NO: 49776 - DNA, 22 bp, Artificial Sequence
  chemically synthesized
tctacccctccactccctttaa

SEQ ID NO: 49777 - DNA, 22 bp, Artificial Sequence
  chemically synthesized
ctacccctccactccctttaag

SEQ ID NO: 49778 - DNA, 22 bp, Artificial Sequence
  chemically synthesized
tacccctccactccctttaagt

SEQ ID NO: 49779 - DNA, 22 bp, Artificial Sequence
  chemically synthesized
cccctccactccctttaagtac

SEQ ID NO: 49780 - DNA, 22 bp, Artificial Sequence
  chemically synthesized
cactccctttaagtacttcgaa

SEQ ID NO: 49781 - DNA, 22 bp, Artificial Sequence
  chemically synthesized
cctttaagtacttcgaaaaaca

SEQ ID NO: 49782 - DNA, 22 bp, Artificial Sequence
  chemically synthesized
taagtacttcgaaaaacagtac

SEQ ID NO: 49783 - DNA, 22 bp, Artificial Sequence
  chemically synthesized
aagtacttcgaaaaacagtaca

SEQ ID NO: 49784 - DNA, 22 bp, Artificial Sequence
  chemically synthesized
agtacttcgaaaaacagtacaa

SEQ ID NO: 49785 - DNA, 22 bp, Artificial Sequence
  chemically synthesized
cgaaaaacagtacaattttttt

SEQ ID NO: 49786 - DNA, 22 bp, Artificial Sequence
  chemically synthesized
gaaaaacagtacaattttttta

SEQ ID NO: 49787 - DNA, 22 bp, Artificial Sequence
  chemically synthesized
ttttaaaggtagatttaaagca

SEQ ID NO: 49788 - DNA, 22 bp, Artificial Sequence
  chemically synthesized
tttaaaggtagatttaaagcat

SEQ ID NO: 49789 - DNA, 22 bp, Artificial Sequence
  chemically synthesized
ttaaaggtagatttaaagcatt

SEQ ID NO: 49790 - DNA, 22 bp, Artificial Sequence
  chemically synthesized
taaaggtagatttaaagcatta

SEQ ID NO: 49791 - DNA, 22 bp, Artificial Sequence
  chemically synthesized
aaaggtagatttaaagcattaa

SEQ ID NO: 49792 - DNA, 22 bp, Artificial Sequence
  chemically synthesized
aaggtagatttaaagcattaac

SEQ ID NO: 49793 - DNA, 22 bp, Artificial Sequence
  chemically synthesized
aaagcattaactggtttggatt

SEQ ID NO: 49794 - DNA, 22 bp, Artificial Sequence
  chemically synthesized
aagcattaactggtttggatta

SEQ ID NO: 49795 - DNA, 22 bp, Artificial Sequence
  chemically synthesized
actggtttggattaaaacaatg

SEQ ID NO: 49796 - DNA, 22 bp, Artificial Sequence
  chemically synthesized
gtttggattaaaacaatgtttc

SEQ ID NO: 49797 - DNA, 22 bp, Artificial Sequence
  chemically synthesized
ggattaaaacaatgtttcacca

SEQ ID NO: 49798 - DNA, 22 bp, Artificial Sequence
  chemically synthesized
gattaaaacaatgtttcaccat

SEQ ID NO: 49799 - DNA, 22 bp, Artificial Sequence
  chemically synthesized
aaacaatgtttcaccatctgta

SEQ ID NO: 49800 - DNA, 22 bp, Artificial Sequence
  chemically synthesized
caccatctgtaaattccctgaa

SEQ ID NO: 49801 - DNA, 22 bp, Artificial Sequence
  chemically synthesized
accatctgtaaattccctgaaa

SEQ ID NO: 49802 - DNA, 22 bp, Artificial Sequence
  chemically synthesized
taaattccctgaaaatacattt

SEQ ID NO: 49803 - DNA, 22 bp, Artificial Sequence
  chemically synthesized
cctgaaaatacattttcaaaag

SEQ ID NO: 49804 - DNA, 22 bp, Artificial Sequence
  chemically synthesized
aaaatacattttcaaaagactt

SEQ ID NO: 49805 - DNA, 22 bp, Artificial Sequence
  chemically synthesized
tcaaaagacttatgcaaagcca

SEQ ID NO: 49806 - DNA, 22 bp, Artificial Sequence
  chemically synthesized
caaaagacttatgcaaagccac

SEQ ID NO: 49807 - DNA, 22 bp, Artificial Sequence
  chemically synthesized
aaaagacttatgcaaagccaca

SEQ ID NO: 49808 - DNA, 22 bp, Artificial Sequence
  chemically synthesized
atgcaaagccacatgattttga

SEQ ID NO: 49809 - DNA, 22 bp, Artificial Sequence
  chemically synthesized
tgcaaagccacatgattttgaa

SEQ ID NO: 49810 - DNA, 22 bp, Artificial Sequence
  chemically synthesized
tgaaggagctaatgagattgtc

SEQ ID NO: 49811 - DNA, 22 bp, Artificial Sequence
  chemically synthesized
gaaggagctaatgagattgtcc

SEQ ID NO: 49812 - DNA, 22 bp, Artificial Sequence
  chemically synthesized
aaggagctaatgagattgtccc

SEQ ID NO: 49813 - DNA, 22 bp, Artificial Sequence
  chemically synthesized
atgagattgtcccaccaccaaa

SEQ ID NO: 49814 - DNA, 22 bp, Artificial Sequence
  chemically synthesized
tcccaccaccaaaatttaatgg

SEQ ID NO: 49815 - DNA, 22 bp, Artificial Sequence
  chemically synthesized
aatggtgacttaagaaattcta

SEQ ID NO: 49816 - DNA, 22 bp, Artificial Sequence
  chemically synthesized
atggtgacttaagaaattctaa

SEQ ID NO: 49817 - DNA, 22 bp, Artificial Sequence
  chemically synthesized
aagaaattctaatactttttat

SEQ ID NO: 49818 - DNA, 22 bp, Artificial Sequence
  chemically synthesized
agaaattctaatactttttatt

SEQ ID NO: 49819 - DNA, 22 bp, Artificial Sequence
  chemically synthesized
taatactttttatttacttcct

SEQ ID NO: 49820 - DNA, 22 bp, Artificial Sequence
  chemically synthesized
atactttttatttacttcctgt

SEQ ID NO: 49821 - DNA, 22 bp, Artificial Sequence
  chemically synthesized
tttatttacttcctgtagaatt

SEQ ID NO: 49822 - DNA, 22 bp, Artificial Sequence
  chemically synthesized
ttatttacttcctgtagaatta

SEQ ID NO: 49823 - DNA, 22 bp, Artificial Sequence
  chemically synthesized
tatttacttcctgtagaattat

SEQ ID NO: 49824 - DNA, 22 bp, Artificial Sequence
  chemically synthesized
atttacttcctgtagaattatt

SEQ ID NO: 49825 - DNA, 22 bp, Artificial Sequence
  chemically synthesized
tttacttcctgtagaattattt

SEQ ID NO: 49826 - DNA, 22 bp, Artificial Sequence
  chemically synthesized
acttcctgtagaattatttgtg

SEQ ID NO: 49827 - DNA, 22 bp, Artificial Sequence
  chemically synthesized
cttcctgtagaattatttgtgt

SEQ ID NO: 49828 - DNA, 22 bp, Artificial Sequence
  chemically synthesized
cctgtagaattatttgtgtact

SEQ ID NO: 49829 - DNA, 22 bp, Artificial Sequence
  chemically synthesized
ctgtagaattatttgtgtactt

SEQ ID NO: 49830 - DNA, 22 bp, Artificial Sequence
  chemically synthesized
tagaattatttgtgtacttgac

SEQ ID NO: 49831 - DNA, 22 bp, Artificial Sequence
  chemically synthesized
tttgtgtacttgacatttatac

SEQ ID NO: 49832 - DNA, 22 bp, Artificial Sequence
  chemically synthesized
gtgtacttgacatttatacagt

SEQ ID NO: 49833 - DNA, 22 bp, Artificial Sequence
  chemically synthesized
tgtacttgacatttatacagtt

SEQ ID NO: 49834 - DNA, 22 bp, Artificial Sequence
  chemically synthesized
gacatttatacagtttctccat

SEQ ID NO: 49835 - DNA, 22 bp, Artificial Sequence
  chemically synthesized
acatttatacagtttctccatt

SEQ ID NO: 49836 - DNA, 22 bp, Artificial Sequence
  chemically synthesized
atacagtttctccattatataa

SEQ ID NO: 49837 - DNA, 22 bp, Artificial Sequence
  chemically synthesized
tacagtttctccattatataac

SEQ ID NO: 49838 - DNA, 22 bp, Artificial Sequence
  chemically synthesized
ctccattatataacaatctacc

SEQ ID NO: 49839 - DNA, 22 bp, Artificial Sequence
  chemically synthesized
tccattatataacaatctaccc

SEQ ID NO: 49840 - DNA, 22 bp, Artificial Sequence
  chemically synthesized
cattatataacaatctaccctg

SEQ ID NO: 49841 - DNA, 22 bp, Artificial Sequence
  chemically synthesized
tataacaatctaccctgggtac

SEQ ID NO: 49842 - DNA, 22 bp, Artificial Sequence
  chemically synthesized
ccctgggtacactagattatgc

SEQ ID NO: 49843 - DNA, 22 bp, Artificial Sequence
  chemically synthesized
ggtacactagattatgccaatc

SEQ ID NO: 49844 - DNA, 22 bp, Artificial Sequence
  chemically synthesized
gattatgccaatctattagaat

SEQ ID NO: 49845 - DNA, 22 bp, Artificial Sequence
  chemically synthesized
tgccaatctattagaatgaaat

SEQ ID NO: 49846 - DNA, 22 bp, Artificial Sequence
  chemically synthesized
ttagaatgaaatttgtactcca

SEQ ID NO: 49847 - DNA, 22 bp, Artificial Sequence
  chemically synthesized
gaatgaaatttgtactccatat

SEQ ID NO: 49848 - DNA, 22 bp, Artificial Sequence
  chemically synthesized
gtactccatataagcagaagtt

SEQ ID NO: 49849 - DNA, 22 bp, Artificial Sequence
  chemically synthesized
tactccatataagcagaagttt

SEQ ID NO: 49850 - DNA, 22 bp, Artificial Sequence
  chemically synthesized
catataagcagaagtttccagt

SEQ ID NO: 49851 - DNA, 22 bp, Artificial Sequence
  chemically synthesized
ccagtcacttttgacttaccat

SEQ ID NO: 49852 - DNA, 22 bp, Artificial Sequence
  chemically synthesized
cagtcacttttgacttaccatt

SEQ ID NO: 49853 - DNA, 22 bp, Artificial Sequence
  chemically synthesized
ttgacttaccattatgtttcaa

SEQ ID NO: 49854 - DNA, 22 bp, Artificial Sequence
  chemically synthesized
tgacttaccattatgtttcaat

SEQ ID NO: 49855 - DNA, 22 bp, Artificial Sequence
  chemically synthesized
gacttaccattatgtttcaatg

SEQ ID NO: 49856 - DNA, 22 bp, Artificial Sequence
  chemically synthesized
acttaccattatgtttcaatgt

SEQ ID NO: 49857 - DNA, 22 bp, Artificial Sequence
  chemically synthesized
accattatgtttcaatgtaaag

SEQ ID NO: 49858 - DNA, 22 bp, Artificial Sequence
  chemically synthesized
ccattatgtttcaatgtaaagt

SEQ ID NO: 49859 - DNA, 22 bp, Artificial Sequence
  chemically synthesized
tgtttcaatgtaaagtgttatt

SEQ ID NO: 49860 - DNA, 22 bp, Artificial Sequence
  chemically synthesized
caatgtaaagtgttattatagc

SEQ ID NO: 49861 - DNA, 22 bp, Artificial Sequence
  chemically synthesized
aatgtaaagtgttattatagca

SEQ ID NO: 49862 - DNA, 22 bp, Artificial Sequence
  chemically synthesized
ttatagcagagtataaagcaca

SEQ ID NO: 49863 - DNA, 22 bp, Artificial Sequence
  chemically synthesized
tagcagagtataaagcacagct

SEQ ID NO: 49864 - DNA, 22 bp, Artificial Sequence
  chemically synthesized
ctccatgctcacgtttttaact

SEQ ID NO: 49865 - DNA, 22 bp, Artificial Sequence
  chemically synthesized
catgctcacgtttttaactcta

SEQ ID NO: 49866 - DNA, 22 bp, Artificial Sequence
  chemically synthesized
acgtttttaactctaatactgt

SEQ ID NO: 49867 - DNA, 22 bp, Artificial Sequence
  chemically synthesized
ttaactctaatactgtaatctt

SEQ ID NO: 49868 - DNA, 22 bp, Artificial Sequence
  chemically synthesized
taactctaatactgtaatcttt

SEQ ID NO: 49869 - DNA, 22 bp, Artificial Sequence
  chemically synthesized
aactctaatactgtaatctttc

SEQ ID NO: 49870 - DNA, 22 bp, Artificial Sequence
  chemically synthesized
actctaatactgtaatctttct

SEQ ID NO: 49871 - DNA, 22 bp, Artificial Sequence
  chemically synthesized
taatactgtaatctttcttgct

SEQ ID NO: 49872 - DNA, 22 bp, Artificial Sequence
  chemically synthesized
atactgtaatctttcttgctgc

SEQ ID NO: 49873 - DNA, 22 bp, Artificial Sequence
  chemically synthesized
taatctttcttgctgcttctag

SEQ ID NO: 49874 - DNA, 22 bp, Artificial Sequence
  chemically synthesized
tcttgctgcttctagggctgtg

SEQ ID NO: 49875 - DNA, 22 bp, Artificial Sequence
  chemically synthesized
cttgctgcttctagggctgtgt

SEQ ID NO: 49876 - DNA, 22 bp, Artificial Sequence
  chemically synthesized
ttgctgcttctagggctgtgtc

SEQ ID NO: 49877 - DNA, 22 bp, Artificial Sequence
  chemically synthesized
gctgcttctagggctgtgtcag

SEQ ID NO: 49878 - DNA, 22 bp, Artificial Sequence
  chemically synthesized
ctgcttctagggctgtgtcagt

SEQ ID NO: 49879 - DNA, 22 bp, Artificial Sequence
  chemically synthesized
cttctagggctgtgtcagtgtt

SEQ ID NO: 49880 - DNA, 22 bp, Artificial Sequence
  chemically synthesized
ctagggctgtgtcagtgtttac

SEQ ID NO: 49881 - DNA, 22 bp, Artificial Sequence
  chemically synthesized
tagggctgtgtcagtgtttaca

SEQ ID NO: 49882 - DNA, 22 bp, Artificial Sequence
  chemically synthesized
gggctgtgtcagtgtttacatt

SEQ ID NO: 49883 - DNA, 22 bp, Artificial Sequence
  chemically synthesized
tgtcagtgtttacattcctgga

SEQ ID NO: 49884 - DNA, 22 bp, Artificial Sequence
  chemically synthesized
acattcctggaagttaaataaa

SEQ ID NO: 49885 - DNA, 22 bp, Artificial Sequence
  chemically synthesized
cattcctggaagttaaataaac

SEQ ID NO: 49886 - DNA, 22 bp, Artificial Sequence
  chemically synthesized
ctggaagttaaataaaccgaca

SEQ ID NO: 49887 - DNA, 22 bp, Artificial Sequence
  chemically synthesized
gaagttaaataaaccgacatgg

SEQ ID NO: 49888 - DNA, 22 bp, Artificial Sequence
  chemically synthesized
aataaaccgacatggcaaaact

SEQ ID NO: 49889 - DNA, 22 bp, Artificial Sequence
  chemically synthesized
ctggatagactgaataataagg

SEQ ID NO: 49890 - DNA, 22 bp, Artificial Sequence
  chemically synthesized
gatagactgaataataaggctt

SEQ ID NO: 49891 - DNA, 22 bp, Artificial Sequence
  chemically synthesized
aataataaggcttgtgatgact

SEQ ID NO: 49892 - DNA, 22 bp, Artificial Sequence
  chemically synthesized
gtgatgactaaattgtttactt

SEQ ID NO: 49893 - DNA, 22 bp, Artificial Sequence
  chemically synthesized
tgatgactaaattgtttacttt

SEQ ID NO: 49894 - DNA, 22 bp, Artificial Sequence
  chemically synthesized
aattgtttactttttaccttgt

SEQ ID NO: 49895 - DNA, 22 bp, Artificial Sequence
  chemically synthesized
tttactttttaccttgttagga

SEQ ID NO: 49896 - DNA, 22 bp, Artificial Sequence
  chemically synthesized
actttttaccttgttaggatcc

SEQ ID NO: 49897 - DNA, 22 bp, Artificial Sequence
  chemically synthesized
ctttttaccttgttaggatccc

SEQ ID NO: 49898 - DNA, 22 bp, Artificial Sequence
  chemically synthesized
tttaccttgttaggatcccttt

SEQ ID NO: 49899 - DNA, 22 bp, Artificial Sequence
  chemically synthesized
ttaccttgttaggatccctttc

SEQ ID NO: 49900 - DNA, 22 bp, Artificial Sequence
  chemically synthesized
taccttgttaggatccctttct

SEQ ID NO: 49901 - DNA, 22 bp, Artificial Sequence
  chemically synthesized
accttgttaggatccctttctt

SEQ ID NO: 49902 - DNA, 22 bp, Artificial Sequence
  chemically synthesized
ccttgttaggatccctttcttg

SEQ ID NO: 49903 - DNA, 22 bp, Artificial Sequence
  chemically synthesized
gttaggatccctttcttgtaaa

SEQ ID NO: 49904 - DNA, 22 bp, Artificial Sequence
  chemically synthesized
ttaggatccctttcttgtaaag

SEQ ID NO: 49905 - DNA, 22 bp, Artificial Sequence
  chemically synthesized
ggatccctttcttgtaaagttt

SEQ ID NO: 49906 - DNA, 22 bp, Artificial Sequence
  chemically synthesized
tcttgtaaagtttgggggagag

SEQ ID NO: 49907 - DNA, 22 bp, Artificial Sequence
  chemically synthesized
cttgtaaagtttgggggagaga

SEQ ID NO: 49908 - DNA, 22 bp, Artificial Sequence
  chemically synthesized
ttgtaaagtttgggggagagag

SEQ ID NO: 49909 - DNA, 22 bp, Artificial Sequence
  chemically synthesized
gtaaagtttgggggagagagag

SEQ ID NO: 49910 - DNA, 22 bp, Artificial Sequence
  chemically synthesized
taaagtttgggggagagagaga

SEQ ID NO: 49911 - DNA, 22 bp, Artificial Sequence
  chemically synthesized
gggggagagagagaggagagaa

SEQ ID NO: 49912 - DNA, 22 bp, Artificial Sequence
  chemically synthesized
ggggagagagagaggagagaaa

SEQ ID NO: 49913 - DNA, 22 bp, Artificial Sequence
  chemically synthesized
atacactggcttccatatgtca

SEQ ID NO: 49914 - DNA, 22 bp, Artificial Sequence
  chemically synthesized
tacactggcttccatatgtcac

SEQ ID NO: 49915 - DNA, 22 bp, Artificial Sequence
  chemically synthesized
gcttccatatgtcacaaagacc

SEQ ID NO: 49916 - DNA, 22 bp, Artificial Sequence
  chemically synthesized
ccatatgtcacaaagaccttcc

SEQ ID NO: 49917 - DNA, 22 bp, Artificial Sequence
  chemically synthesized
catatgtcacaaagaccttcct

SEQ ID NO: 49918 - DNA, 22 bp, Artificial Sequence
  chemically synthesized
cctatccacagccaacgcgact

SEQ ID NO: 49919 - DNA, 22 bp, Artificial Sequence
  chemically synthesized
ctatccacagccaacgcgactg

SEQ ID NO: 49920 - DNA, 22 bp, Artificial Sequence
  chemically synthesized
tccacagccaacgcgactgaag

SEQ ID NO: 49921 - DNA, 22 bp, Artificial Sequence
  chemically synthesized
aagcagcatgcataagttagtg

SEQ ID NO: 49922 - DNA, 22 bp, Artificial Sequence
  chemically synthesized
gtgttgcttgttttgttttctt

SEQ ID NO: 49923 - DNA, 22 bp, Artificial Sequence
  chemically synthesized
cttgttttgttttcttaaatac

SEQ ID NO: 49924 - DNA, 22 bp, Artificial Sequence
  chemically synthesized
gttttgttttcttaaataccgg

SEQ ID NO: 49925 - DNA, 22 bp, Artificial Sequence
  chemically synthesized
ttttgttttcttaaataccggg

SEQ ID NO: 49926 - DNA, 22 bp, Artificial Sequence
  chemically synthesized
tgttttcttaaataccgggtca

SEQ ID NO: 49927 - DNA, 22 bp, Artificial Sequence
  chemically synthesized
gttttcttaaataccgggtcag

SEQ ID NO: 49928 - DNA, 22 bp, Artificial Sequence
  chemically synthesized
ttttcttaaataccgggtcagc

SEQ ID NO: 49929 - DNA, 22 bp, Artificial Sequence
  chemically synthesized
tcttaaataccgggtcagctga

SEQ ID NO: 49930 - DNA, 22 bp, Artificial Sequence
  chemically synthesized
cttaaataccgggtcagctgaa

SEQ ID NO: 49931 - DNA, 22 bp, Artificial Sequence
  chemically synthesized
ttaaataccgggtcagctgaat

SEQ ID NO: 49932 - DNA, 22 bp, Artificial Sequence
  chemically synthesized
aaataccgggtcagctgaatac

SEQ ID NO: 49933 - DNA, 22 bp, Artificial Sequence
  chemically synthesized
aataccgggtcagctgaatacc

SEQ ID NO: 49934 - DNA, 22 bp, Artificial Sequence
  chemically synthesized
aatacccctttctccactgccc

SEQ ID NO: 49935 - DNA, 22 bp, Artificial Sequence
  chemically synthesized
tctccactgcccactcagcccc

SEQ ID NO: 49936 - DNA, 22 bp, Artificial Sequence
  chemically synthesized
ctccactgcccactcagcccca

SEQ ID NO: 49937 - DNA, 22 bp, Artificial Sequence
  chemically synthesized
tccactgcccactcagccccac

SEQ ID NO: 49938 - DNA, 22 bp, Artificial Sequence
  chemically synthesized
cactgcccactcagccccacat

SEQ ID NO: 49939 - DNA, 22 bp, Artificial Sequence
  chemically synthesized
cccactcagccccacataaagt

SEQ ID NO: 49940 - DNA, 22 bp, Artificial Sequence
  chemically synthesized
agccccacataaagtatgaaga

SEQ ID NO: 49941 - DNA, 22 bp, Artificial Sequence
  chemically synthesized
tttttgaccattttcaaatagc

SEQ ID NO: 49942 - DNA, 22 bp, Artificial Sequence
  chemically synthesized
ttttgaccattttcaaatagca

SEQ ID NO: 49943 - DNA, 22 bp, Artificial Sequence
  chemically synthesized
tttgaccattttcaaatagcaa

SEQ ID NO: 49944 - DNA, 22 bp, Artificial Sequence
  chemically synthesized
ttgaccattttcaaatagcaaa

SEQ ID NO: 49945 - DNA, 22 bp, Artificial Sequence
  chemically synthesized
tgaccattttcaaatagcaaat

SEQ ID NO: 49946 - DNA, 22 bp, Artificial Sequence
  chemically synthesized
gaccattttcaaatagcaaatt

SEQ ID NO: 49947 - DNA, 22 bp, Artificial Sequence
  chemically synthesized
accattttcaaatagcaaatta

SEQ ID NO: 49948 - DNA, 22 bp, Artificial Sequence
  chemically synthesized
tcaaatagcaaattatccatta

SEQ ID NO: 49949 - DNA, 22 bp, Artificial Sequence
  chemically synthesized
caaatagcaaattatccattag

SEQ ID NO: 49950 - DNA, 22 bp, Artificial Sequence
  chemically synthesized
aaatagcaaattatccattaga

SEQ ID NO: 49951 - DNA, 22 bp, Artificial Sequence
  chemically synthesized
tccattagatttcatcatatct

SEQ ID NO: 49952 - DNA, 22 bp, Artificial Sequence
  chemically synthesized
gatttcatcatatcttagtaaa

SEQ ID NO: 49953 - DNA, 22 bp, Artificial Sequence
  chemically synthesized
catcatatcttagtaaagcaat

SEQ ID NO: 49954 - DNA, 22 bp, Artificial Sequence
  chemically synthesized
atcatatcttagtaaagcaatt

SEQ ID NO: 49955 - DNA, 22 bp, Artificial Sequence
  chemically synthesized
agtaaagcaattacatcaagaa

SEQ ID NO: 49956 - DNA, 22 bp, Artificial Sequence
  chemically synthesized
gtaaagcaattacatcaagaaa

SEQ ID NO: 49957 - DNA, 22 bp, Artificial Sequence
  chemically synthesized
catcaagaaaatgatagtgcgt

SEQ ID NO: 49958 - DNA, 22 bp, Artificial Sequence
  chemically synthesized
tgcatgcagttggccggagacc

SEQ ID NO: 49959 - DNA, 22 bp, Artificial Sequence
  chemically synthesized
gccggagaccaaaggctgtgaa

SEQ ID NO: 49960 - DNA, 22 bp, Artificial Sequence
  chemically synthesized
tgaagtcggagagggcagaatc

SEQ ID NO: 49961 - DNA, 22 bp, Artificial Sequence
  chemically synthesized
gacacacacaaataaaaagccc

SEQ ID NO: 49962 - DNA, 22 bp, Artificial Sequence
  chemically synthesized
gatctcacagatggaccccatc

SEQ ID NO: 49963 - DNA, 22 bp, Artificial Sequence
  chemically synthesized
acagatggaccccatcagttca

SEQ ID NO: 49964 - DNA, 22 bp, Artificial Sequence
  chemically synthesized
atcttactgcctaaaaagttca

SEQ ID NO: 49965 - DNA, 22 bp, Artificial Sequence
  chemically synthesized
actgcctaaaaagttcatgcac

SEQ ID NO: 49966 - DNA, 22 bp, Artificial Sequence
  chemically synthesized
ctgcctaaaaagttcatgcact

SEQ ID NO: 49967 - DNA, 22 bp, Artificial Sequence
  chemically synthesized
cctaaaaagttcatgcacttaa

SEQ ID NO: 49968 - DNA, 22 bp, Artificial Sequence
  chemically synthesized
aaaagttcatgcacttaataat

SEQ ID NO: 49969 - DNA, 22 bp, Artificial Sequence
  chemically synthesized
atgcacttaataatttatttgt

SEQ ID NO: 49970 - DNA, 22 bp, Artificial Sequence
  chemically synthesized
aataatttatttgtgttctgga

SEQ ID NO: 49971 - DNA, 22 bp, Artificial Sequence
  chemically synthesized
ataatttatttgtgttctggat

SEQ ID NO: 49972 - DNA, 22 bp, Artificial Sequence
  chemically synthesized
atttgtgttctggatactgttt

SEQ ID NO: 49973 - DNA, 22 bp, Artificial Sequence
  chemically synthesized
tttgtgttctggatactgtttc

SEQ ID NO: 49974 - DNA, 22 bp, Artificial Sequence
  chemically synthesized
gtgttctggatactgtttccca

SEQ ID NO: 49975 - DNA, 22 bp, Artificial Sequence
  chemically synthesized
tgttctggatactgtttcccag

SEQ ID NO: 49976 - DNA, 22 bp, Artificial Sequence
  chemically synthesized
tggatactgtttcccagctgaa

SEQ ID NO: 49977 - DNA, 22 bp, Artificial Sequence
  chemically synthesized
gatactgtttcccagctgaata

SEQ ID NO: 49978 - DNA, 22 bp, Artificial Sequence
  chemically synthesized
tttcccagctgaatattaacaa

SEQ ID NO: 49979 - DNA, 22 bp, Artificial Sequence
  chemically synthesized
cccagctgaatattaacaactt

SEQ ID NO: 49980 - DNA, 22 bp, Artificial Sequence
  chemically synthesized
ccagctgaatattaacaacttt

SEQ ID NO: 49981 - DNA, 22 bp, Artificial Sequence
  chemically synthesized
aatattaacaactttaaactga

SEQ ID NO: 49982 - DNA, 22 bp, Artificial Sequence
  chemically synthesized
acaactttaaactgaagcatgc

SEQ ID NO: 49983 - DNA, 22 bp, Artificial Sequence
  chemically synthesized
taaactgaagcatgcttttagc

SEQ ID NO: 49984 - DNA, 22 bp, Artificial Sequence
  chemically synthesized
aaactgaagcatgcttttagca

SEQ ID NO: 49985 - DNA, 22 bp, Artificial Sequence
  chemically synthesized
aactgaagcatgcttttagcat

SEQ ID NO: 49986 - DNA, 22 bp, Artificial Sequence
  chemically synthesized
aagcatgcttttagcatggtat

SEQ ID NO: 49987 - DNA, 22 bp, Artificial Sequence
  chemically synthesized
ttagcatggtatggatggaagt

SEQ ID NO: 49988 - DNA, 22 bp, Artificial Sequence
  chemically synthesized
tagcatggtatggatggaagtc

SEQ ID NO: 49989 - DNA, 22 bp, Artificial Sequence
  chemically synthesized
agcatggtatggatggaagtca

SEQ ID NO: 49990 - DNA, 22 bp, Artificial Sequence
  chemically synthesized
gcatggtatggatggaagtcac

SEQ ID NO: 49991 - DNA, 22 bp, Artificial Sequence
  chemically synthesized
ggtccctcggaggttaaaatta

SEQ ID NO: 49992 - DNA, 22 bp, Artificial Sequence
  chemically synthesized
ggaggttaaaattatagttatg

SEQ ID NO: 49993 - DNA, 22 bp, Artificial Sequence
  chemically synthesized
aaattatagttatgtttcttac

SEQ ID NO: 49994 - DNA, 22 bp, Artificial Sequence
  chemically synthesized
tagttatgtttcttacacactg

SEQ ID NO: 49995 - DNA, 22 bp, Artificial Sequence
  chemically synthesized
tgtttcttacacactgttcatt

SEQ ID NO: 49996 - DNA, 22 bp, Artificial Sequence
  chemically synthesized
cttacacactgttcattttcca

SEQ ID NO: 49997 - DNA, 22 bp, Artificial Sequence
  chemically synthesized
ttacacactgttcattttccat

SEQ ID NO: 49998 - DNA, 22 bp, Artificial Sequence
  chemically synthesized
acacactgttcattttccatca

SEQ ID NO: 49999 - DNA, 22 bp, Artificial Sequence
  chemically synthesized
cacactgttcattttccatcac

SEQ ID NO: 50000 - DNA, 22 bp, Artificial Sequence
  chemically synthesized
ttcattttccatcacaatttat

SEQ ID NO: 50001 - DNA, 22 bp, Artificial Sequence
  chemically synthesized
attttccatcacaatttatttt

SEQ ID NO: 50002 - DNA, 22 bp, Artificial Sequence
  chemically synthesized
tccatcacaatttattttcttt

SEQ ID NO: 50003 - DNA, 22 bp, Artificial Sequence
  chemically synthesized
ccatcacaatttattttctttc

SEQ ID NO: 50004 - DNA, 22 bp, Artificial Sequence
  chemically synthesized
catcacaatttattttctttca

SEQ ID NO: 50005 - DNA, 22 bp, Artificial Sequence
  chemically synthesized
attttctttcattaaacattcg

SEQ ID NO: 50006 - DNA, 22 bp, Artificial Sequence
  chemically synthesized
ttttctttcattaaacattcgt

SEQ ID NO: 50007 - DNA, 22 bp, Artificial Sequence
  chemically synthesized
tctttcattaaacattcgtttt

SEQ ID NO: 50008 - DNA, 22 bp, Artificial Sequence
  chemically synthesized
ctttcattaaacattcgtttta

SEQ ID NO: 50009 - DNA, 22 bp, Artificial Sequence
  chemically synthesized
tttcattaaacattcgttttaa

SEQ ID NO: 50010 - DNA, 22 bp, Artificial Sequence
  chemically synthesized
tcattaaacattcgttttaatc

SEQ ID NO: 50011 - DNA, 22 bp, Artificial Sequence
  chemically synthesized
cattaaacattcgttttaatca

SEQ ID NO: 50012 - DNA, 22 bp, Artificial Sequence
  chemically synthesized
attaaacattcgttttaatcag

SEQ ID NO: 50013 - DNA, 22 bp, Artificial Sequence
  chemically synthesized
aacattcgttttaatcagaata

SEQ ID NO: 50014 - DNA, 22 bp, Artificial Sequence
  chemically synthesized
gttttaatcagaatatcagtta

SEQ ID NO: 50015 - DNA, 22 bp, Artificial Sequence
  chemically synthesized
taatcagaatatcagttacact

SEQ ID NO: 50016 - DNA, 22 bp, Artificial Sequence
  chemically synthesized
aatcagaatatcagttacactg

SEQ ID NO: 50017 - DNA, 22 bp, Artificial Sequence
  chemically synthesized
atcagaatatcagttacactgt

SEQ ID NO: 50018 - DNA, 22 bp, Artificial Sequence
  chemically synthesized
cactgttctgattctgcttgtt

SEQ ID NO: 50019 - DNA, 22 bp, Artificial Sequence
  chemically synthesized
ttctgattctgcttgttaacca

SEQ ID NO: 50020 - DNA, 22 bp, Artificial Sequence
  chemically synthesized
tgattctgcttgttaaccagtg

SEQ ID NO: 50021 - DNA, 22 bp, Artificial Sequence
  chemically synthesized
attctgcttgttaaccagtgat

SEQ ID NO: 50022 - DNA, 22 bp, Artificial Sequence
  chemically synthesized
tgcttgttaaccagtgataaac

SEQ ID NO: 50023 - DNA, 22 bp, Artificial Sequence
  chemically synthesized
cttgttaaccagtgataaactc

SEQ ID NO: 50024 - DNA, 22 bp, Artificial Sequence
  chemically synthesized
gttaaccagtgataaactcata

SEQ ID NO: 50025 - DNA, 22 bp, Artificial Sequence
  chemically synthesized
ttaaccagtgataaactcataa

SEQ ID NO: 50026 - DNA, 22 bp, Artificial Sequence
  chemically synthesized
accagtgataaactcataaacc

SEQ ID NO: 50027 - DNA, 22 bp, Artificial Sequence
  chemically synthesized
ataaaccaaagatgaacatcaa

SEQ ID NO: 50028 - DNA, 22 bp, Artificial Sequence
  chemically synthesized
ttcaacagcaaaggcaaacacc

SEQ ID NO: 50029 - DNA, 22 bp, Artificial Sequence
  chemically synthesized
aacagcaaaggcaaacaccaaa

SEQ ID NO: 50030 - DNA, 22 bp, Artificial Sequence
  chemically synthesized
tcaaaaatcggaaaccgttagt

SEQ ID NO: 50031 - DNA, 22 bp, Artificial Sequence
  chemically synthesized
aaaaatcggaaaccgttagtta

SEQ ID NO: 50032 - DNA, 22 bp, Artificial Sequence
  chemically synthesized
gttagcaccttgttttcaccac

SEQ ID NO: 50033 - DNA, 22 bp, Artificial Sequence
  chemically synthesized
gcaccttgttttcaccaccagg

SEQ ID NO: 50034 - DNA, 22 bp, Artificial Sequence
  chemically synthesized
gttttcaccaccagggcactcg

SEQ ID NO: 50035 - DNA, 22 bp, Artificial Sequence
  chemically synthesized
ttttcaccaccagggcactcgt

SEQ ID NO: 50036 - DNA, 22 bp, Artificial Sequence
  chemically synthesized
tcaccaccagggcactcgtgta

SEQ ID NO: 50037 - DNA, 22 bp, Artificial Sequence
  chemically synthesized
caccaccagggcactcgtgtac

SEQ ID NO: 50038 - DNA, 22 bp, Artificial Sequence
  chemically synthesized
accaccagggcactcgtgtacc

SEQ ID NO: 50039 - DNA, 22 bp, Artificial Sequence
  chemically synthesized
gtgtaccttgagggagacactg

SEQ ID NO: 50040 - DNA, 22 bp, Artificial Sequence
  chemically synthesized
gagggagacactgggagcccag

SEQ ID NO: 50041 - DNA, 22 bp, Artificial Sequence
  chemically synthesized
agggagacactgggagcccagg

SEQ ID NO: 50042 - DNA, 22 bp, Artificial Sequence
  chemically synthesized
ggagcccagggagcctggagac

SEQ ID NO: 50043 - DNA, 22 bp, Artificial Sequence
  chemically synthesized
gagaccaggatatactttggtg

SEQ ID NO: 50044 - DNA, 22 bp, Artificial Sequence
  chemically synthesized
tggtgatgaggggaggacacat

SEQ ID NO: 50045 - DNA, 22 bp, Artificial Sequence
  chemically synthesized
ggtgatgaggggaggacacatt

SEQ ID NO: 50046 - DNA, 22 bp, Artificial Sequence
  chemically synthesized
gtgatgaggggaggacacattg

SEQ ID NO: 50047 - DNA, 22 bp, Artificial Sequence
  chemically synthesized
tagctcagagcagcagctgaat

SEQ ID NO: 50048 - DNA, 22 bp, Artificial Sequence
  chemically synthesized
agagcagcagctgaatgagaaa

SEQ ID NO: 50049 - DNA, 22 bp, Artificial Sequence
  chemically synthesized
aatgagaaaacttacttgatct

SEQ ID NO: 50050 - DNA, 22 bp, Artificial Sequence
  chemically synthesized
acttgatctaaaagataaaaga

SEQ ID NO: 50051 - DNA, 22 bp, Artificial Sequence
  chemically synthesized
cttgatctaaaagataaaagag

SEQ ID NO: 50052 - DNA, 22 bp, Artificial Sequence
  chemically synthesized
gatctaaaagataaaagagtca

SEQ ID NO: 50053 - DNA, 22 bp, Artificial Sequence
  chemically synthesized
atctaaaagataaaagagtcag

SEQ ID NO: 50054 - DNA, 22 bp, Artificial Sequence
  chemically synthesized
aaagataaaagagtcagccaaa

SEQ ID NO: 50055 - DNA, 22 bp, Artificial Sequence
  chemically synthesized
taggtgccagccatctatctaa

SEQ ID NO: 50056 - DNA, 22 bp, Artificial Sequence
  chemically synthesized
aggtgccagccatctatctaaa

SEQ ID NO: 50057 - DNA, 22 bp, Artificial Sequence
  chemically synthesized
ggtgccagccatctatctaaag

SEQ ID NO: 50058 - DNA, 22 bp, Artificial Sequence
  chemically synthesized
tctaaagaagaaacctaaagca

SEQ ID NO: 50059 - DNA, 22 bp, Artificial Sequence
  chemically synthesized
aagaagaaacctaaagcattgt

SEQ ID NO: 50060 - DNA, 22 bp, Artificial Sequence
  chemically synthesized
aagcattgttagaaaggtttgt

SEQ ID NO: 50061 - DNA, 22 bp, Artificial Sequence
  chemically synthesized
ttagaaaggtttgtagttctgt

SEQ ID NO: 50062 - DNA, 22 bp, Artificial Sequence
  chemically synthesized
gaaaggtttgtagttctgtagc

SEQ ID NO: 50063 - DNA, 22 bp, Artificial Sequence
  chemically synthesized
gtagttctgtagccttccctcc

SEQ ID NO: 50064 - DNA, 22 bp, Artificial Sequence
  chemically synthesized
tagttctgtagccttccctcct

SEQ ID NO: 50065 - DNA, 22 bp, Artificial Sequence
  chemically synthesized
tgtagccttccctcctccaaag

SEQ ID NO: 50066 - DNA, 22 bp, Artificial Sequence
  chemically synthesized
tagccttccctcctccaaagga

SEQ ID NO: 50067 - DNA, 22 bp, Artificial Sequence
  chemically synthesized
ccctcctccaaaggaggaacct

SEQ ID NO: 50068 - DNA, 22 bp, Artificial Sequence
  chemically synthesized
cctcctccaaaggaggaacctg

SEQ ID NO: 50069 - DNA, 22 bp, Artificial Sequence
  chemically synthesized
ctccaaaggaggaacctgatgt

SEQ ID NO: 50070 - DNA, 22 bp, Artificial Sequence
  chemically synthesized
caaaggaggaacctgatgtctt

SEQ ID NO: 50071 - DNA, 22 bp, Artificial Sequence
  chemically synthesized
atgtcttaatacactataatag

SEQ ID NO: 50072 - DNA, 22 bp, Artificial Sequence
  chemically synthesized
aatacactataatagccaaggc

SEQ ID NO: 50073 - DNA, 22 bp, Artificial Sequence
  chemically synthesized
atacactataatagccaaggct

SEQ ID NO: 50074 - DNA, 22 bp, Artificial Sequence
  chemically synthesized
taatagccaaggcttcctgcca

SEQ ID NO: 50075 - DNA, 22 bp, Artificial Sequence
  chemically synthesized
cctgccatcaaactgctaacaa

SEQ ID NO: 50076 - DNA, 22 bp, Artificial Sequence
  chemically synthesized
ctgccatcaaactgctaacaat

SEQ ID NO: 50077 - DNA, 22 bp, Artificial Sequence
  chemically synthesized
ccatcaaactgctaacaataaa

SEQ ID NO: 50078 - DNA, 22 bp, Artificial Sequence
  chemically synthesized
ctaacaataaaactgccctgca

SEQ ID NO: 50079 - DNA, 22 bp, Artificial Sequence
  chemically synthesized
acaataaaactgccctgcaatg

SEQ ID NO: 50080 - DNA, 22 bp, Artificial Sequence
  chemically synthesized
ccctgcaatgttcgtggggaac

SEQ ID NO: 50081 - DNA, 22 bp, Artificial Sequence
  chemically synthesized
caatgttcgtggggaacagaaa

SEQ ID NO: 50082 - DNA, 22 bp, Artificial Sequence
  chemically synthesized
gtggggaacagaaacaggcaat

SEQ ID NO: 50083 - DNA, 22 bp, Artificial Sequence
  chemically synthesized
ctctatgtatctggaagtgcct

SEQ ID NO: 50084 - DNA, 22 bp, Artificial Sequence
  chemically synthesized
tctatgtatctggaagtgcctc

SEQ ID NO: 50085 - DNA, 22 bp, Artificial Sequence
  chemically synthesized
tatgtatctggaagtgcctcaa

SEQ ID NO: 50086 - DNA, 22 bp, Artificial Sequence
  chemically synthesized
tgtatctggaagtgcctcaatc

SEQ ID NO: 50087 - DNA, 22 bp, Artificial Sequence
  chemically synthesized
gaagtgcctcaatcatatactt

SEQ ID NO: 50088 - DNA, 22 bp, Artificial Sequence
  chemically synthesized
aatcatatacttaaattttaca

SEQ ID NO: 50089 - DNA, 22 bp, Artificial Sequence
  chemically synthesized
aaattttacagtcttctcccca

SEQ ID NO: 50090 - DNA, 22 bp, Artificial Sequence
  chemically synthesized
aattttacagtcttctccccaa

SEQ ID NO: 50091 - DNA, 22 bp, Artificial Sequence
  chemically synthesized
tacagtcttctccccaaatgag

SEQ ID NO: 50092 - DNA, 22 bp, Artificial Sequence
  chemically synthesized
acagtcttctccccaaatgaga

SEQ ID NO: 50093 - DNA, 22 bp, Artificial Sequence
  chemically synthesized
cagtcttctccccaaatgagaa

SEQ ID NO: 50094 - DNA, 22 bp, Artificial Sequence
  chemically synthesized
ctccccaaatgagaacgatttc

SEQ ID NO: 50095 - DNA, 22 bp, Artificial Sequence
  chemically synthesized
tccccaaatgagaacgatttcc

SEQ ID NO: 50096 - DNA, 22 bp, Artificial Sequence
  chemically synthesized
cccaaatgagaacgatttccag

SEQ ID NO: 50097 - DNA, 22 bp, Artificial Sequence
  chemically synthesized
ccagccaacacgttcacaaact

SEQ ID NO: 50098 - DNA, 22 bp, Artificial Sequence
  chemically synthesized
cagccaacacgttcacaaactg

SEQ ID NO: 50099 - DNA, 22 bp, Artificial Sequence
  chemically synthesized
acaaactgtacttaacgttaaa

SEQ ID NO: 50100 - DNA, 22 bp, Artificial Sequence
  chemically synthesized
tacttaacgttaaaagaaaacg

SEQ ID NO: 50101 - DNA, 22 bp, Artificial Sequence
  chemically synthesized
aacgttaaaagaaaacggataa

SEQ ID NO: 50102 - DNA, 22 bp, Artificial Sequence
  chemically synthesized
acgttaaaagaaaacggataaa

SEQ ID NO: 50103 - DNA, 22 bp, Artificial Sequence
  chemically synthesized
aaagaaaacggataaaacatat

SEQ ID NO: 50104 - DNA, 22 bp, Artificial Sequence
  chemically synthesized
ctcaaggttagacttctaattc

SEQ ID NO: 50105 - DNA, 22 bp, Artificial Sequence
  chemically synthesized
aaggttagacttctaattcctc

SEQ ID NO: 50106 - DNA, 22 bp, Artificial Sequence
  chemically synthesized
gacttctaattcctcaattcac

SEQ ID NO: 50107 - DNA, 22 bp, Artificial Sequence
  chemically synthesized
ctaattcctcaattcactaaag

SEQ ID NO: 50108 - DNA, 22 bp, Artificial Sequence
  chemically synthesized
taattcctcaattcactaaagg

SEQ ID NO: 50109 - DNA, 22 bp, Artificial Sequence
  chemically synthesized
attcctcaattcactaaaggaa

SEQ ID NO: 50110 - DNA, 22 bp, Artificial Sequence
  chemically synthesized
ctcaattcactaaaggaaactt

SEQ ID NO: 50111 - DNA, 22 bp, Artificial Sequence
  chemically synthesized
aattcactaaaggaaacttggc

SEQ ID NO: 50112 - DNA, 22 bp, Artificial Sequence
  chemically synthesized
actaaaggaaacttggcaagaa

SEQ ID NO: 50113 - DNA, 22 bp, Artificial Sequence
  chemically synthesized
aaggaaacttggcaagaagatg

SEQ ID NO: 50114 - DNA, 22 bp, Artificial Sequence
  chemically synthesized
ggcaagaagatgcatcattttg

SEQ ID NO: 50115 - DNA, 22 bp, Artificial Sequence
  chemically synthesized
gcaagaagatgcatcattttgc

SEQ ID NO: 50116 - DNA, 22 bp, Artificial Sequence
  chemically synthesized
tgctcctttctactggggcatc

SEQ ID NO: 50117 - DNA, 22 bp, Artificial Sequence
  chemically synthesized
gctcctttctactggggcatct

SEQ ID NO: 50118 - DNA, 22 bp, Artificial Sequence
  chemically synthesized
ctcctttctactggggcatctg

SEQ ID NO: 50119 - DNA, 22 bp, Artificial Sequence
  chemically synthesized
ctttctactggggcatctgagg

SEQ ID NO: 50120 - DNA, 22 bp, Artificial Sequence
  chemically synthesized
tctactggggcatctgaggagg

SEQ ID NO: 50121 - DNA, 22 bp, Artificial Sequence
  chemically synthesized
ctactggggcatctgaggagga

SEQ ID NO: 50122 - DNA, 22 bp, Artificial Sequence
  chemically synthesized
tactggggcatctgaggaggag

SEQ ID NO: 50123 - DNA, 22 bp, Artificial Sequence
  chemically synthesized
ctggggcatctgaggaggagag

SEQ ID NO: 50124 - DNA, 22 bp, Artificial Sequence
  chemically synthesized
gggcatctgaggaggagagcca

SEQ ID NO: 50125 - DNA, 22 bp, Artificial Sequence
  chemically synthesized
aggaggagagccactgaggcag

SEQ ID NO: 50126 - DNA, 22 bp, Artificial Sequence
  chemically synthesized
aggcagctaatacacaaaacat

SEQ ID NO: 50127 - DNA, 22 bp, Artificial Sequence
  chemically synthesized
atacacaaaacatgatcaaaag

SEQ ID NO: 50128 - DNA, 22 bp, Artificial Sequence
  chemically synthesized
acaacagcttcatatgcaaatt

SEQ ID NO: 50129 - DNA, 22 bp, Artificial Sequence
  chemically synthesized
catatgcaaattacattaatga

SEQ ID NO: 50130 - DNA, 22 bp, Artificial Sequence
  chemically synthesized
atatgcaaattacattaatgaa

SEQ ID NO: 50131 - DNA, 22 bp, Artificial Sequence
  chemically synthesized
cattaatgaaggagtgcaaagt

SEQ ID NO: 50132 - DNA, 22 bp, Artificial Sequence
  chemically synthesized
atgaaggagtgcaaagtcatca

SEQ ID NO: 50133 - DNA, 22 bp, Artificial Sequence
  chemically synthesized
aatatgtcaaatctcttggtga

SEQ ID NO: 50134 - DNA, 22 bp, Artificial Sequence
  chemically synthesized
ttggtgaacttttaatcttgag

SEQ ID NO: 50135 - DNA, 22 bp, Artificial Sequence
  chemically synthesized
ggtgaacttttaatcttgagaa

SEQ ID NO: 50136 - DNA, 22 bp, Artificial Sequence
  chemically synthesized
gtgaacttttaatcttgagaag

SEQ ID NO: 50137 - DNA, 22 bp, Artificial Sequence
  chemically synthesized
ttaatcttgagaagaaaaaaca

SEQ ID NO: 50138 - DNA, 22 bp, Artificial Sequence
  chemically synthesized
taatcttgagaagaaaaaacac

SEQ ID NO: 50139 - DNA, 22 bp, Artificial Sequence
  chemically synthesized
aatcttgagaagaaaaaacact

SEQ ID NO: 50140 - DNA, 22 bp, Artificial Sequence
  chemically synthesized
atcttgagaagaaaaaacactg

SEQ ID NO: 50141 - DNA, 22 bp, Artificial Sequence
  chemically synthesized
gagaagaaaaaacactgcttta

SEQ ID NO: 50142 - DNA, 22 bp, Artificial Sequence
  chemically synthesized
agaagaaaaaacactgctttaa

SEQ ID NO: 50143 - DNA, 22 bp, Artificial Sequence
  chemically synthesized
ctttaatttttttacatcatca

SEQ ID NO: 50144 - DNA, 22 bp, Artificial Sequence
  chemically synthesized
taatttttttacatcatcaatt

SEQ ID NO: 50145 - DNA, 22 bp, Artificial Sequence
  chemically synthesized
aatttttttacatcatcaattt

SEQ ID NO: 50146 - DNA, 22 bp, Artificial Sequence
  chemically synthesized
atttttttacatcatcaatttt

SEQ ID NO: 50147 - DNA, 22 bp, Artificial Sequence
  chemically synthesized
ttttacatcatcaattttgcaa

SEQ ID NO: 50148 - DNA, 22 bp, Artificial Sequence
  chemically synthesized
tttacatcatcaattttgcaag

SEQ ID NO: 50149 - DNA, 22 bp, Artificial Sequence
  chemically synthesized
ttacatcatcaattttgcaaga

SEQ ID NO: 50150 - DNA, 22 bp, Artificial Sequence
  chemically synthesized
tacatcatcaattttgcaagat

SEQ ID NO: 50151 - DNA, 22 bp, Artificial Sequence
  chemically synthesized
acatcatcaattttgcaagatt

SEQ ID NO: 50152 - DNA, 22 bp, Artificial Sequence
  chemically synthesized
catcatcaattttgcaagattg

SEQ ID NO: 50153 - DNA, 22 bp, Artificial Sequence
  chemically synthesized
tgcaagattgaaaatctaagaa

SEQ ID NO: 50154 - DNA, 22 bp, Artificial Sequence
  chemically synthesized
gcaagattgaaaatctaagaat

SEQ ID NO: 50155 - DNA, 22 bp, Artificial Sequence
  chemically synthesized
caagattgaaaatctaagaatc

SEQ ID NO: 50156 - DNA, 22 bp, Artificial Sequence
  chemically synthesized
aaaatctaagaatcttggtgct

SEQ ID NO: 50157 - DNA, 22 bp, Artificial Sequence
  chemically synthesized
agaatcttggtgctataaacaa

SEQ ID NO: 50158 - DNA, 22 bp, Artificial Sequence
  chemically synthesized
ggtgctataaacaattttcacc

SEQ ID NO: 50159 - DNA, 22 bp, Artificial Sequence
  chemically synthesized
gtgctataaacaattttcacct

SEQ ID NO: 50160 - DNA, 22 bp, Artificial Sequence
  chemically synthesized
taaacaattttcaccttttttt

SEQ ID NO: 50161 - DNA, 22 bp, Artificial Sequence
  chemically synthesized
tcaccttttttttctccttcag

SEQ ID NO: 50162 - DNA, 22 bp, Artificial Sequence
  chemically synthesized
caccttttttttctccttcagc

SEQ ID NO: 50163 - DNA, 22 bp, Artificial Sequence
  chemically synthesized
accttttttttctccttcagca

SEQ ID NO: 50164 - DNA, 22 bp, Artificial Sequence
  chemically synthesized
ttttttctccttcagcaggctg

SEQ ID NO: 50165 - DNA, 22 bp, Artificial Sequence
  chemically synthesized
tttttctccttcagcaggctga

SEQ ID NO: 50166 - DNA, 22 bp, Artificial Sequence
  chemically synthesized
ttttctccttcagcaggctgac

SEQ ID NO: 50167 - DNA, 22 bp, Artificial Sequence
  chemically synthesized
tttctccttcagcaggctgaca

SEQ ID NO: 50168 - DNA, 22 bp, Artificial Sequence
  chemically synthesized
ttctccttcagcaggctgacag

SEQ ID NO: 50169 - DNA, 22 bp, Artificial Sequence
  chemically synthesized
tctccttcagcaggctgacagg

SEQ ID NO: 50170 - DNA, 22 bp, Artificial Sequence
  chemically synthesized
ctccttcagcaggctgacaggc

SEQ ID NO: 50171 - DNA, 22 bp, Artificial Sequence
  chemically synthesized
tccttcagcaggctgacaggcc

SEQ ID NO: 50172 - DNA, 22 bp, Artificial Sequence
  chemically synthesized
cttcagcaggctgacaggccag

SEQ ID NO: 50173 - DNA, 22 bp, Artificial Sequence
  chemically synthesized
cagcaggctgacaggccagcct

SEQ ID NO: 50174 - DNA, 22 bp, Artificial Sequence
  chemically synthesized
agcaggctgacaggccagcctg

SEQ ID NO: 50175 - DNA, 22 bp, Artificial Sequence
  chemically synthesized
acaggccagcctgatgtgcacc

SEQ ID NO: 50176 - DNA, 22 bp, Artificial Sequence
  chemically synthesized
atgtgcaccgaatgtacatgtt

SEQ ID NO: 50177 - DNA, 22 bp, Artificial Sequence
  chemically synthesized
ataggccaatcaaaaatgcaaa

SEQ ID NO: 50178 - DNA, 22 bp, Artificial Sequence
  chemically synthesized
gcaattactggaaggacctaat

SEQ ID NO: 50179 - DNA, 22 bp, Artificial Sequence
  chemically synthesized
ctggaaggacctaatggtcatt

SEQ ID NO: 50180 - DNA, 22 bp, Artificial Sequence
  chemically synthesized
gaaggacctaatggtcattaga

SEQ ID NO: 50181 - DNA, 22 bp, Artificial Sequence
  chemically synthesized
atggtcattagaatttacaact

SEQ ID NO: 50182 - DNA, 22 bp, Artificial Sequence
  chemically synthesized
gaatttacaactaggtaatgaa

SEQ ID NO: 50183 - DNA, 22 bp, Artificial Sequence
  chemically synthesized
acaactaggtaatgaactgaag

SEQ ID NO: 50184 - DNA, 22 bp, Artificial Sequence
  chemically synthesized
caactaggtaatgaactgaagt

SEQ ID NO: 50185 - DNA, 22 bp, Artificial Sequence
  chemically synthesized
ggtaatgaactgaagtctgccc

SEQ ID NO: 50186 - DNA, 22 bp, Artificial Sequence
  chemically synthesized
aagtctgcccacaccatgcata

SEQ ID NO: 50187 - DNA, 22 bp, Artificial Sequence
  chemically synthesized
cccacaccatgcatattcataa

SEQ ID NO: 50188 - DNA, 22 bp, Artificial Sequence
  chemically synthesized
ataaagcaatttagcctttgaa

SEQ ID NO: 50189 - DNA, 22 bp, Artificial Sequence
  chemically synthesized
agcctttgaagattaaagaagt

SEQ ID NO: 50190 - DNA, 22 bp, Artificial Sequence
  chemically synthesized
gcctttgaagattaaagaagtg

SEQ ID NO: 50191 - DNA, 22 bp, Artificial Sequence
  chemically synthesized
tgaagattaaagaagtgcttaa

SEQ ID NO: 50192 - DNA, 22 bp, Artificial Sequence
  chemically synthesized
gaagattaaagaagtgcttaaa

SEQ ID NO: 50193 - DNA, 22 bp, Artificial Sequence
  chemically synthesized
aagattaaagaagtgcttaaaa

SEQ ID NO: 50194 - DNA, 22 bp, Artificial Sequence
  chemically synthesized
aagaagtgcttaaaattcaaat

SEQ ID NO: 50195 - DNA, 22 bp, Artificial Sequence
  chemically synthesized
aaaattcaaatgagctttagca

SEQ ID NO: 50196 - DNA, 22 bp, Artificial Sequence
  chemically synthesized
aaattcaaatgagctttagcaa

SEQ ID NO: 50197 - DNA, 22 bp, Artificial Sequence
  chemically synthesized
aaatgagctttagcaaattatc

SEQ ID NO: 50198 - DNA, 22 bp, Artificial Sequence
  chemically synthesized
tagcaaattatcagtaagattc

SEQ ID NO: 50199 - DNA, 22 bp, Artificial Sequence
  chemically synthesized
agcaaattatcagtaagattca

SEQ ID NO: 50200 - DNA, 22 bp, Artificial Sequence
  chemically synthesized
gcaaattatcagtaagattcat

SEQ ID NO: 50201 - DNA, 22 bp, Artificial Sequence
  chemically synthesized
tcagtaagattcatccaaaaag

SEQ ID NO: 50202 - DNA, 22 bp, Artificial Sequence
  chemically synthesized
atccaaaaagcaaagggttttt

SEQ ID NO: 50203 - DNA, 22 bp, Artificial Sequence
  chemically synthesized
ttcttcctatgatttcctcatt

SEQ ID NO: 50204 - DNA, 22 bp, Artificial Sequence
  chemically synthesized
tcttcctatgatttcctcattt

SEQ ID NO: 50205 - DNA, 22 bp, Artificial Sequence
  chemically synthesized
cttcctatgatttcctcatttt

SEQ ID NO: 50206 - DNA, 22 bp, Artificial Sequence
  chemically synthesized
ttcctatgatttcctcattttt

SEQ ID NO: 50207 - DNA, 22 bp, Artificial Sequence
  chemically synthesized
cctatgatttcctcattttttt

SEQ ID NO: 50208 - DNA, 22 bp, Artificial Sequence
  chemically synthesized
ctatgatttcctcattttttta

SEQ ID NO: 50209 - DNA, 22 bp, Artificial Sequence
  chemically synthesized
tgatttcctcatttttttaatg

SEQ ID NO: 50210 - DNA, 22 bp, Artificial Sequence
  chemically synthesized
cctcatttttttaatgcaaaat

SEQ ID NO: 50211 - DNA, 22 bp, Artificial Sequence
  chemically synthesized
ctcatttttttaatgcaaaatt

SEQ ID NO: 50212 - DNA, 22 bp, Artificial Sequence
  chemically synthesized
atttttttaatgcaaaattgta

SEQ ID NO: 50213 - DNA, 22 bp, Artificial Sequence
  chemically synthesized
ttttaatgcaaaattgtaatat

SEQ ID NO: 50214 - DNA, 22 bp, Artificial Sequence
  chemically synthesized
tttaatgcaaaattgtaatatc

SEQ ID NO: 50215 - DNA, 22 bp, Artificial Sequence
  chemically synthesized
ttaatgcaaaattgtaatatct

SEQ ID NO: 50216 - DNA, 22 bp, Artificial Sequence
  chemically synthesized
taatgcaaaattgtaatatctt

SEQ ID NO: 50217 - DNA, 22 bp, Artificial Sequence
  chemically synthesized
aatgcaaaattgtaatatcttc

SEQ ID NO: 50218 - DNA, 22 bp, Artificial Sequence
  chemically synthesized
atgcaaaattgtaatatcttcc

SEQ ID NO: 50219 - DNA, 22 bp, Artificial Sequence
  chemically synthesized
taatatcttccagactgagctt

SEQ ID NO: 50220 - DNA, 22 bp, Artificial Sequence
  chemically synthesized
ccagactgagcttaaactaaac

SEQ ID NO: 50221 - DNA, 22 bp, Artificial Sequence
  chemically synthesized
cagactgagcttaaactaaaca

SEQ ID NO: 50222 - DNA, 22 bp, Artificial Sequence
  chemically synthesized
agcttaaactaaacatagagct

SEQ ID NO: 50223 - DNA, 22 bp, Artificial Sequence
  chemically synthesized
aaactaaacatagagcttctag

SEQ ID NO: 50224 - DNA, 22 bp, Artificial Sequence
  chemically synthesized
aactaaacatagagcttctagt

SEQ ID NO: 50225 - DNA, 22 bp, Artificial Sequence
  chemically synthesized
aacatagagcttctagtcaagc

SEQ ID NO: 50226 - DNA, 22 bp, Artificial Sequence
  chemically synthesized
ctagtcaagccaaaggggctaa

SEQ ID NO: 50227 - DNA, 22 bp, Artificial Sequence
  chemically synthesized
tagtcaagccaaaggggctaag

SEQ ID NO: 50228 - DNA, 22 bp, Artificial Sequence
  chemically synthesized
gtcaagccaaaggggctaagat

SEQ ID NO: 50229 - DNA, 22 bp, Artificial Sequence
  chemically synthesized
agatacaaacagaggctgcaaa

SEQ ID NO: 50230 - DNA, 22 bp, Artificial Sequence
  chemically synthesized
caaacatcgtcacggactttgt

SEQ ID NO: 50231 - DNA, 22 bp, Artificial Sequence
  chemically synthesized
tgttcataaaactaagccctta

SEQ ID NO: 50232 - DNA, 22 bp, Artificial Sequence
  chemically synthesized
gttcataaaactaagcccttaa

SEQ ID NO: 50233 - DNA, 22 bp, Artificial Sequence
  chemically synthesized
ttcataaaactaagcccttaag

SEQ ID NO: 50234 - DNA, 22 bp, Artificial Sequence
  chemically synthesized
ataaaactaagcccttaagagc

SEQ ID NO: 50235 - DNA, 22 bp, Artificial Sequence
  chemically synthesized
agcccttaagagccaaacctat

SEQ ID NO: 50236 - DNA, 22 bp, Artificial Sequence
  chemically synthesized
aagagccaaacctatctctaaa

SEQ ID NO: 50237 - DNA, 22 bp, Artificial Sequence
  chemically synthesized
agagccaaacctatctctaaac

SEQ ID NO: 50238 - DNA, 22 bp, Artificial Sequence
  chemically synthesized
tctctaaacatggtaatttatc

SEQ ID NO: 50239 - DNA, 22 bp, Artificial Sequence
  chemically synthesized
taaacatggtaatttatcaaaa

SEQ ID NO: 50240 - DNA, 22 bp, Artificial Sequence
  chemically synthesized
aacatggtaatttatcaaaaac

SEQ ID NO: 50241 - DNA, 22 bp, Artificial Sequence
  chemically synthesized
atcaaaaacagcccagagtcgc

SEQ ID NO: 50242 - DNA, 22 bp, Artificial Sequence
  chemically synthesized
tcaaaaacagcccagagtcgct

SEQ ID NO: 50243 - DNA, 22 bp, Artificial Sequence
  chemically synthesized
ataggcaatactgcatagtcct

SEQ ID NO: 50244 - DNA, 22 bp, Artificial Sequence
  chemically synthesized
catagtcctccaacagaacaga

SEQ ID NO: 50245 - DNA, 22 bp, Artificial Sequence
  chemically synthesized
caacagaacagattaacacgag

SEQ ID NO: 50246 - DNA, 22 bp, Artificial Sequence
  chemically synthesized
acacgagtccctccacccttcc

SEQ ID NO: 50247 - DNA, 22 bp, Artificial Sequence
  chemically synthesized
cacccttccaaaaagccttttc

SEQ ID NO: 50248 - DNA, 22 bp, Artificial Sequence
  chemically synthesized
ccaaaaagccttttccccctca

SEQ ID NO: 50249 - DNA, 22 bp, Artificial Sequence
  chemically synthesized
caaaaagccttttccccctcaa

SEQ ID NO: 50250 - DNA, 22 bp, Artificial Sequence
  chemically synthesized
ttccccctcaagttgtctctcc

SEQ ID NO: 50251 - DNA, 22 bp, Artificial Sequence
  chemically synthesized
tccccctcaagttgtctctcct

SEQ ID NO: 50252 - DNA, 22 bp, Artificial Sequence
  chemically synthesized
ccccctcaagttgtctctcctg

SEQ ID NO: 50253 - DNA, 22 bp, Artificial Sequence
  chemically synthesized
cccctcaagttgtctctcctgt

SEQ ID NO: 50254 - DNA, 22 bp, Artificial Sequence
  chemically synthesized
aagttgtctctcctgtgtaaac

SEQ ID NO: 50255 - DNA, 22 bp, Artificial Sequence
  chemically synthesized
tctctcctgtgtaaacatccac

SEQ ID NO: 50256 - DNA, 22 bp, Artificial Sequence
  chemically synthesized
tcctgtgtaaacatccactgtg

SEQ ID NO: 50257 - DNA, 22 bp, Artificial Sequence
  chemically synthesized
ctgtgtaaacatccactgtggt

SEQ ID NO: 50258 - DNA, 22 bp, Artificial Sequence
  chemically synthesized
tgtaaacatccactgtggtata

SEQ ID NO: 50259 - DNA, 22 bp, Artificial Sequence
  chemically synthesized
tggtataaaaacagctttttca

SEQ ID NO: 50260 - DNA, 22 bp, Artificial Sequence
  chemically synthesized
tttcattggcttggagtggcat

SEQ ID NO: 50261 - DNA, 22 bp, Artificial Sequence
  chemically synthesized
ttcattggcttggagtggcatt

SEQ ID NO: 50262 - DNA, 22 bp, Artificial Sequence
  chemically synthesized
tcattggcttggagtggcatta

SEQ ID NO: 50263 - DNA, 22 bp, Artificial Sequence
  chemically synthesized
cattggcttggagtggcattaa

SEQ ID NO: 50264 - DNA, 22 bp, Artificial Sequence
  chemically synthesized
attggcttggagtggcattaat

SEQ ID NO: 50265 - DNA, 22 bp, Artificial Sequence
  chemically synthesized
gcttggagtggcattaatttta

SEQ ID NO: 50266 - DNA, 22 bp, Artificial Sequence
  chemically synthesized
ggagtggcattaattttagaag

SEQ ID NO: 50267 - DNA, 22 bp, Artificial Sequence
  chemically synthesized
gagtggcattaattttagaagt

SEQ ID NO: 50268 - DNA, 22 bp, Artificial Sequence
  chemically synthesized
attttagaagtttctgcttcca

SEQ ID NO: 50269 - DNA, 22 bp, Artificial Sequence
  chemically synthesized
tagaagtttctgcttccaaagg

SEQ ID NO: 50270 - DNA, 22 bp, Artificial Sequence
  chemically synthesized
agaagtttctgcttccaaaggg

SEQ ID NO: 50271 - DNA, 22 bp, Artificial Sequence
  chemically synthesized
gaagtttctgcttccaaaggga

SEQ ID NO: 50272 - DNA, 22 bp, Artificial Sequence
  chemically synthesized
ctgcttccaaagggaaaccagc

SEQ ID NO: 50273 - DNA, 22 bp, Artificial Sequence
  chemically synthesized
tgcttccaaagggaaaccagca

SEQ ID NO: 50274 - DNA, 22 bp, Artificial Sequence
  chemically synthesized
cttccaaagggaaaccagcaag

SEQ ID NO: 50275 - DNA, 22 bp, Artificial Sequence
  chemically synthesized
ccaaagggaaaccagcaagaaa

SEQ ID NO: 50276 - DNA, 22 bp, Artificial Sequence
  chemically synthesized
caaagggaaaccagcaagaaag

SEQ ID NO: 50277 - DNA, 22 bp, Artificial Sequence
  chemically synthesized
gtttacttctgaggagtgcaaa

SEQ ID NO: 50278 - DNA, 22 bp, Artificial Sequence
  chemically synthesized
acttctgaggagtgcaaatcct

SEQ ID NO: 50279 - DNA, 22 bp, Artificial Sequence
  chemically synthesized
cttctgaggagtgcaaatcctg

SEQ ID NO: 50280 - DNA, 22 bp, Artificial Sequence
  chemically synthesized
ctgaggagtgcaaatcctgttg

SEQ ID NO: 50281 - DNA, 22 bp, Artificial Sequence
  chemically synthesized
tgaggagtgcaaatcctgttgc

SEQ ID NO: 50282 - DNA, 22 bp, Artificial Sequence
  chemically synthesized
aggagtgcaaatcctgttgctt

SEQ ID NO: 50283 - DNA, 22 bp, Artificial Sequence
  chemically synthesized
ttgcttgagatttgcctttctg

SEQ ID NO: 50284 - DNA, 22 bp, Artificial Sequence
  chemically synthesized
cttgagatttgcctttctgatt

SEQ ID NO: 50285 - DNA, 22 bp, Artificial Sequence
  chemically synthesized
gagatttgcctttctgatttcc

SEQ ID NO: 50286 - DNA, 22 bp, Artificial Sequence
  chemically synthesized
agatttgcctttctgatttcct

SEQ ID NO: 50287 - DNA, 22 bp, Artificial Sequence
  chemically synthesized
gcctttctgatttcctccattc

SEQ ID NO: 50288 - DNA, 22 bp, Artificial Sequence
  chemically synthesized
cctttctgatttcctccattcg

SEQ ID NO: 50289 - DNA, 22 bp, Artificial Sequence
  chemically synthesized
tctgatttcctccattcggcac

SEQ ID NO: 50290 - DNA, 22 bp, Artificial Sequence
  chemically synthesized
ctgatttcctccattcggcacc

SEQ ID NO: 50291 - DNA, 22 bp, Artificial Sequence
  chemically synthesized
tgatttcctccattcggcacca

SEQ ID NO: 50292 - DNA, 22 bp, Artificial Sequence
  chemically synthesized
atttcctccattcggcaccagc

SEQ ID NO: 50293 - DNA, 22 bp, Artificial Sequence
  chemically synthesized
cctccattcggcaccagccgca

SEQ ID NO: 50294 - DNA, 22 bp, Artificial Sequence
  chemically synthesized
ctccattcggcaccagccgcat

SEQ ID NO: 50295 - DNA, 22 bp, Artificial Sequence
  chemically synthesized
cattcggcaccagccgcattta

SEQ ID NO: 50296 - DNA, 22 bp, Artificial Sequence
  chemically synthesized
ggcaccagccgcatttaatcca

SEQ ID NO: 50297 - DNA, 22 bp, Artificial Sequence
  chemically synthesized
aatccatggtgaacgggtcatg

SEQ ID NO: 50298 - DNA, 22 bp, Artificial Sequence
  chemically synthesized
atccatggtgaacgggtcatgc

SEQ ID NO: 50299 - DNA, 22 bp, Artificial Sequence
  chemically synthesized
acattcagaaagttgtggtgtc

SEQ ID NO: 50300 - DNA, 22 bp, Artificial Sequence
  chemically synthesized
agaaagttgtggtgtccaccca

SEQ ID NO: 50301 - DNA, 22 bp, Artificial Sequence
  chemically synthesized
tggtgtccacccaccaccacca

SEQ ID NO: 50302 - DNA, 22 bp, Artificial Sequence
  chemically synthesized
ttagagagtatcgtgggaacct

SEQ ID NO: 50303 - DNA, 22 bp, Artificial Sequence
  chemically synthesized
gagagtatcgtgggaacctgga

SEQ ID NO: 50304 - DNA, 22 bp, Artificial Sequence
  chemically synthesized
gatttgcaggctttccaattac

SEQ ID NO: 50305 - DNA, 22 bp, Artificial Sequence
  chemically synthesized
gcaggctttccaattactagtc

SEQ ID NO: 50306 - DNA, 22 bp, Artificial Sequence
  chemically synthesized
caggctttccaattactagtct

SEQ ID NO: 50307 - DNA, 22 bp, Artificial Sequence
  chemically synthesized
tccaattactagtctggagaag

SEQ ID NO: 50308 - DNA, 22 bp, Artificial Sequence
  chemically synthesized
ccaattactagtctggagaaga

SEQ ID NO: 50309 - DNA, 22 bp, Artificial Sequence
  chemically synthesized
caattactagtctggagaagaa

SEQ ID NO: 50310 - DNA, 22 bp, Artificial Sequence
  chemically synthesized
ctagtctggagaagaatccttt

SEQ ID NO: 50311 - DNA, 22 bp, Artificial Sequence
  chemically synthesized
gtctggagaagaatcctttgct

SEQ ID NO: 50312 - DNA, 22 bp, Artificial Sequence
  chemically synthesized
gagaagaatcctttgcttgaat

SEQ ID NO: 50313 - DNA, 22 bp, Artificial Sequence
  chemically synthesized
tgcttgaatgctaactcacacc

SEQ ID NO: 50314 - DNA, 22 bp, Artificial Sequence
  chemically synthesized
gcttgaatgctaactcacacct

SEQ ID NO: 50315 - DNA, 22 bp, Artificial Sequence
  chemically synthesized
cttgaatgctaactcacacctt

SEQ ID NO: 50316 - DNA, 22 bp, Artificial Sequence
  chemically synthesized
gaatgctaactcacaccttgct

SEQ ID NO: 50317 - DNA, 22 bp, Artificial Sequence
  chemically synthesized
aatgctaactcacaccttgcta

SEQ ID NO: 50318 - DNA, 22 bp, Artificial Sequence
  chemically synthesized
actcacaccttgctaacctcct

SEQ ID NO: 50319 - DNA, 22 bp, Artificial Sequence
  chemically synthesized
acaccttgctaacctcctgaca

SEQ ID NO: 50320 - DNA, 22 bp, Artificial Sequence
  chemically synthesized
gctaacctcctgacatttaaaa

SEQ ID NO: 50321 - DNA, 22 bp, Artificial Sequence
  chemically synthesized
ctaacctcctgacatttaaaaa

SEQ ID NO: 50322 - DNA, 22 bp, Artificial Sequence
  chemically synthesized
acctcctgacatttaaaaaatt

SEQ ID NO: 50323 - DNA, 22 bp, Artificial Sequence
  chemically synthesized
ctgacatttaaaaaattctagt

SEQ ID NO: 50324 - DNA, 22 bp, Artificial Sequence
  chemically synthesized
acatttaaaaaattctagtgac

SEQ ID NO: 50325 - DNA, 22 bp, Artificial Sequence
  chemically synthesized
aaaaaattctagtgacagaatt

SEQ ID NO: 50326 - DNA, 22 bp, Artificial Sequence
  chemically synthesized
aaaaattctagtgacagaattc

SEQ ID NO: 50327 - DNA, 22 bp, Artificial Sequence
  chemically synthesized
tagtgacagaattcccaatgaa

SEQ ID NO: 50328 - DNA, 22 bp, Artificial Sequence
  chemically synthesized
gtgacagaattcccaatgaact

SEQ ID NO: 50329 - DNA, 22 bp, Artificial Sequence
  chemically synthesized
ccaatgaactcctcctcttcct

SEQ ID NO: 50330 - DNA, 22 bp, Artificial Sequence
  chemically synthesized
ctcctcttcctcccaaccccaa

SEQ ID NO: 50331 - DNA, 22 bp, Artificial Sequence
  chemically synthesized
ctcttcctcccaaccccaacct

SEQ ID NO: 50332 - DNA, 22 bp, Artificial Sequence
  chemically synthesized
ttcctcccaaccccaacctctc

SEQ ID NO: 50333 - DNA, 22 bp, Artificial Sequence
  chemically synthesized
cctcccaaccccaacctctcca

SEQ ID NO: 50334 - DNA, 22 bp, Artificial Sequence
  chemically synthesized
ctcccaaccccaacctctccaa

SEQ ID NO: 50335 - DNA, 22 bp, Artificial Sequence
  chemically synthesized
ccaaccccaacctctccaaccc

SEQ ID NO: 50336 - DNA, 22 bp, Artificial Sequence
  chemically synthesized
tccaacccaggtgaaagcaaga

SEQ ID NO: 50337 - DNA, 22 bp, Artificial Sequence
  chemically synthesized
caacccaggtgaaagcaagaaa

SEQ ID NO: 50338 - DNA, 22 bp, Artificial Sequence
  chemically synthesized
agtcctatctcagctggtgtgc

SEQ ID NO: 50339 - DNA, 22 bp, Artificial Sequence
  chemically synthesized
tctcagctggtgtgcaagtcag

SEQ ID NO: 50340 - DNA, 22 bp, Artificial Sequence
  chemically synthesized
agctggtgtgcaagtcagactg

SEQ ID NO: 50341 - DNA, 22 bp, Artificial Sequence
  chemically synthesized
gtgtgcaagtcagactgagaat

SEQ ID NO: 50342 - DNA, 22 bp, Artificial Sequence
  chemically synthesized
agaataacagcttcgaaaggcc

SEQ ID NO: 50343 - DNA, 22 bp, Artificial Sequence
  chemically synthesized
cgaaaggccacgtgtcccagct

SEQ ID NO: 50344 - DNA, 22 bp, Artificial Sequence
  chemically synthesized
gaaaggccacgtgtcccagctt

SEQ ID NO: 50345 - DNA, 22 bp, Artificial Sequence
  chemically synthesized
accgctccactgctagacccaa

SEQ ID NO: 50346 - DNA, 22 bp, Artificial Sequence
  chemically synthesized
ccgctccactgctagacccaaa

SEQ ID NO: 50347 - DNA, 22 bp, Artificial Sequence
  chemically synthesized
cactgctagacccaaaagctct

SEQ ID NO: 50348 - DNA, 22 bp, Artificial Sequence
  chemically synthesized
ctagacccaaaagctctctgct

SEQ ID NO: 50349 - DNA, 22 bp, Artificial Sequence
  chemically synthesized
gacccaaaagctctctgctgtg

SEQ ID NO: 50350 - DNA, 22 bp, Artificial Sequence
  chemically synthesized
tctgctgtggggatttcatttg

SEQ ID NO: 50351 - DNA, 22 bp, Artificial Sequence
  chemically synthesized
tgctgtggggatttcatttgaa

SEQ ID NO: 50352 - DNA, 22 bp, Artificial Sequence
  chemically synthesized
ctgtggggatttcatttgaact

SEQ ID NO: 50353 - DNA, 22 bp, Artificial Sequence
  chemically synthesized
tggggatttcatttgaactgct

SEQ ID NO: 50354 - DNA, 22 bp, Artificial Sequence
  chemically synthesized
catttgaactgctatcgaagaa

SEQ ID NO: 50355 - DNA, 22 bp, Artificial Sequence
  chemically synthesized
atttgaactgctatcgaagaat

SEQ ID NO: 50356 - DNA, 22 bp, Artificial Sequence
  chemically synthesized
gaactgctatcgaagaatattc

SEQ ID NO: 50357 - DNA, 22 bp, Artificial Sequence
  chemically synthesized
aactgctatcgaagaatattcc

SEQ ID NO: 50358 - DNA, 22 bp, Artificial Sequence
  chemically synthesized
ctatcgaagaatattccaagaa

SEQ ID NO: 50359 - DNA, 22 bp, Artificial Sequence
  chemically synthesized
tcgaagaatattccaagaacct

SEQ ID NO: 50360 - DNA, 22 bp, Artificial Sequence
  chemically synthesized
caagaacctctctccgcaccct

SEQ ID NO: 50361 - DNA, 22 bp, Artificial Sequence
  chemically synthesized
tctccgcacccttctccccctc

SEQ ID NO: 50362 - DNA, 22 bp, Artificial Sequence
  chemically synthesized
tccgcacccttctccccctctc

SEQ ID NO: 50363 - DNA, 22 bp, Artificial Sequence
  chemically synthesized
cgcacccttctccccctctctc

SEQ ID NO: 50364 - DNA, 22 bp, Artificial Sequence
  chemically synthesized
ctccccctctctcccccagcct

SEQ ID NO: 50365 - DNA, 22 bp, Artificial Sequence
  chemically synthesized
tccccctctctcccccagcctc

SEQ ID NO: 50366 - DNA, 22 bp, Artificial Sequence
  chemically synthesized
cccctctctcccccagcctcag

SEQ ID NO: 50367 - DNA, 22 bp, Artificial Sequence
  chemically synthesized
tctcccccagcctcagactttc

SEQ ID NO: 50368 - DNA, 22 bp, Artificial Sequence
  chemically synthesized
tcccccagcctcagactttctc

SEQ ID NO: 50369 - DNA, 22 bp, Artificial Sequence
  chemically synthesized
ccccagcctcagactttctcct

SEQ ID NO: 50370 - DNA, 22 bp, Artificial Sequence
  chemically synthesized
agactttctcctagagttgatc

SEQ ID NO: 50371 - DNA, 22 bp, Artificial Sequence
  chemically synthesized
tctcctagagttgatcttaccg

SEQ ID NO: 50372 - DNA, 22 bp, Artificial Sequence
  chemically synthesized
ctcctagagttgatcttaccgg

SEQ ID NO: 50373 - DNA, 22 bp, Artificial Sequence
  chemically synthesized
tcctagagttgatcttaccgga

SEQ ID NO: 50374 - DNA, 22 bp, Artificial Sequence
  chemically synthesized
ctagagttgatcttaccggaaa

SEQ ID NO: 50375 - DNA, 22 bp, Artificial Sequence
  chemically synthesized
gagttgatcttaccggaaatgt

SEQ ID NO: 50376 - DNA, 22 bp, Artificial Sequence
  chemically synthesized
atcttaccggaaatgtggatgt

SEQ ID NO: 50377 - DNA, 22 bp, Artificial Sequence
  chemically synthesized
accggaaatgtggatgttatca

SEQ ID NO: 50378 - DNA, 22 bp, Artificial Sequence
  chemically synthesized
ccggaaatgtggatgttatcaa

SEQ ID NO: 50379 - DNA, 22 bp, Artificial Sequence
  chemically synthesized
tcaaggaaatcggaaagagaag

SEQ ID NO: 50380 - DNA, 22 bp, Artificial Sequence
  chemically synthesized
aggtactaccccctgatttctt

SEQ ID NO: 50381 - DNA, 22 bp, Artificial Sequence
  chemically synthesized
ccccctgatttcttaactctct

SEQ ID NO: 50382 - DNA, 22 bp, Artificial Sequence
  chemically synthesized
atttcttaactctcttatcctt

SEQ ID NO: 50383 - DNA, 22 bp, Artificial Sequence
  chemically synthesized
cttaactctcttatccttgggc

SEQ ID NO: 50384 - DNA, 22 bp, Artificial Sequence
  chemically synthesized
ttaactctcttatccttgggcc

SEQ ID NO: 50385 - DNA, 22 bp, Artificial Sequence
  chemically synthesized
aactctcttatccttgggccct

SEQ ID NO: 50386 - DNA, 22 bp, Artificial Sequence
  chemically synthesized
actctcttatccttgggccctg

SEQ ID NO: 50387 - DNA, 22 bp, Artificial Sequence
  chemically synthesized
tcttatccttgggccctgctca

SEQ ID NO: 50388 - DNA, 22 bp, Artificial Sequence
  chemically synthesized
ttatccttgggccctgctcaga

SEQ ID NO: 50389 - DNA, 22 bp, Artificial Sequence
  chemically synthesized
atccttgggccctgctcagaaa

SEQ ID NO: 50390 - DNA, 22 bp, Artificial Sequence
  chemically synthesized
tccttgggccctgctcagaaat

SEQ ID NO: 50391 - DNA, 22 bp, Artificial Sequence
  chemically synthesized
gggccctgctcagaaatgtgcc

SEQ ID NO: 50392 - DNA, 22 bp, Artificial Sequence
  chemically synthesized
ggccctgctcagaaatgtgcca

SEQ ID NO: 50393 - DNA, 22 bp, Artificial Sequence
  chemically synthesized
ctcagaaatgtgccacatttta

SEQ ID NO: 50394 - DNA, 22 bp, Artificial Sequence
  chemically synthesized
agaaatgtgccacattttaaca

SEQ ID NO: 50395 - DNA, 22 bp, Artificial Sequence
  chemically synthesized
taacatttattagaaaggatag

SEQ ID NO: 50396 - DNA, 22 bp, Artificial Sequence
  chemically synthesized
aacatttattagaaaggatagg

SEQ ID NO: 50397 - DNA, 22 bp, Artificial Sequence
  chemically synthesized
acatttattagaaaggatagga

SEQ ID NO: 50398 - DNA, 22 bp, Artificial Sequence
  chemically synthesized
attagaaaggataggatgcaga

SEQ ID NO: 50399 - DNA, 22 bp, Artificial Sequence
  chemically synthesized
ttagaaaggataggatgcagag

SEQ ID NO: 50400 - DNA, 22 bp, Artificial Sequence
  chemically synthesized
gaaaggataggatgcagagctg

SEQ ID NO: 50401 - DNA, 22 bp, Artificial Sequence
  chemically synthesized
catggaacccacatccacaacc

SEQ ID NO: 50402 - DNA, 22 bp, Artificial Sequence
  chemically synthesized
tatgagccacaggtccacagtc

SEQ ID NO: 50403 - DNA, 22 bp, Artificial Sequence
  chemically synthesized
accaattccgtttgacactaat

SEQ ID NO: 50404 - DNA, 22 bp, Artificial Sequence
  chemically synthesized
cgtttgacactaatgttactct

SEQ ID NO: 50405 - DNA, 22 bp, Artificial Sequence
  chemically synthesized
gacactaatgttactctacatg

SEQ ID NO: 50406 - DNA, 22 bp, Artificial Sequence
  chemically synthesized
acactaatgttactctacatga

SEQ ID NO: 50407 - DNA, 22 bp, Artificial Sequence
  chemically synthesized
atgttactctacatgagtagag

SEQ ID NO: 50408 - DNA, 22 bp, Artificial Sequence
  chemically synthesized
ctctacatgagtagagttcaat

SEQ ID NO: 50409 - DNA, 22 bp, Artificial Sequence
  chemically synthesized
tacatgagtagagttcaatgag

SEQ ID NO: 50410 - DNA, 22 bp, Artificial Sequence
  chemically synthesized
catgagtagagttcaatgaggg

SEQ ID NO: 50411 - DNA, 22 bp, Artificial Sequence
  chemically synthesized
aatgagggttgatatgggatgt

SEQ ID NO: 50412 - DNA, 22 bp, Artificial Sequence
  chemically synthesized
atatgggatgtgacagggcaaa

SEQ ID NO: 50413 - DNA, 22 bp, Artificial Sequence
  chemically synthesized
gattaaaaacaaaagtttagaa

SEQ ID NO: 50414 - DNA, 22 bp, Artificial Sequence
  chemically synthesized
aaaacaaaagtttagaaaccaa

SEQ ID NO: 50415 - DNA, 22 bp, Artificial Sequence
  chemically synthesized
agaaaccaatgctacactacag

SEQ ID NO: 50416 - DNA, 22 bp, Artificial Sequence
  chemically synthesized
gaaaccaatgctacactacaga

SEQ ID NO: 50417 - DNA, 22 bp, Artificial Sequence
  chemically synthesized
cactacagagcaaatgggactt

SEQ ID NO: 50418 - DNA, 22 bp, Artificial Sequence
  chemically synthesized
cagagcaaatgggacttgaagg

SEQ ID NO: 50419 - DNA, 22 bp, Artificial Sequence
  chemically synthesized
gaaggccaaatttcccctaact

SEQ ID NO: 50420 - DNA, 22 bp, Artificial Sequence
  chemically synthesized
aaggccaaatttcccctaactg

SEQ ID NO: 50421 - DNA, 22 bp, Artificial Sequence
  chemically synthesized
cccctaactgccttcaagtgat

SEQ ID NO: 50422 - DNA, 22 bp, Artificial Sequence
  chemically synthesized
ccctaactgccttcaagtgatt

SEQ ID NO: 50423 - DNA, 22 bp, Artificial Sequence
  chemically synthesized
actgccttcaagtgattttccc

SEQ ID NO: 50424 - DNA, 22 bp, Artificial Sequence
  chemically synthesized
ccttcaagtgattttccctatt

SEQ ID NO: 50425 - DNA, 22 bp, Artificial Sequence
  chemically synthesized
caagtgattttccctattagag

SEQ ID NO: 50426 - DNA, 22 bp, Artificial Sequence
  chemically synthesized
aagtgattttccctattagagc

SEQ ID NO: 50427 - DNA, 22 bp, Artificial Sequence
  chemically synthesized
tccctattagagcgtttgcctg

SEQ ID NO: 50428 - DNA, 22 bp, Artificial Sequence
  chemically synthesized
ccctattagagcgtttgcctgc

SEQ ID NO: 50429 - DNA, 22 bp, Artificial Sequence
  chemically synthesized
cctattagagcgtttgcctgcc

SEQ ID NO: 50430 - DNA, 22 bp, Artificial Sequence
  chemically synthesized
ttagagcgtttgcctgccaccc

SEQ ID NO: 50431 - DNA, 22 bp, Artificial Sequence
  chemically synthesized
gagcgtttgcctgccacccccc

SEQ ID NO: 50432 - DNA, 22 bp, Artificial Sequence
  chemically synthesized
gcctgccacccccctgctggca

SEQ ID NO: 50433 - DNA, 22 bp, Artificial Sequence
  chemically synthesized
cctgccacccccctgctggcaa

SEQ ID NO: 50434 - DNA, 22 bp, Artificial Sequence
  chemically synthesized
ccacccccctgctggcaacacc

SEQ ID NO: 50435 - DNA, 22 bp, Artificial Sequence
  chemically synthesized
ctggcaacaccgcaatcacatc

SEQ ID NO: 50436 - DNA, 22 bp, Artificial Sequence
  chemically synthesized
gcaacaccgcaatcacatcaga

SEQ ID NO: 50437 - DNA, 22 bp, Artificial Sequence
  chemically synthesized
gagatattcctctttaaataca

SEQ ID NO: 50438 - DNA, 22 bp, Artificial Sequence
  chemically synthesized
agatattcctctttaaatacaa

SEQ ID NO: 50439 - DNA, 22 bp, Artificial Sequence
  chemically synthesized
ctctttaaatacaatacctata

SEQ ID NO: 50440 - DNA, 22 bp, Artificial Sequence
  chemically synthesized
tttaaatacaatacctatatac

SEQ ID NO: 50441 - DNA, 22 bp, Artificial Sequence
  chemically synthesized
taaatacaatacctatatactt

SEQ ID NO: 50442 - DNA, 22 bp, Artificial Sequence
  chemically synthesized
aaatacaatacctatatactta

SEQ ID NO: 50443 - DNA, 22 bp, Artificial Sequence
  chemically synthesized
aatacaatacctatatacttaa

SEQ ID NO: 50444 - DNA, 22 bp, Artificial Sequence
  chemically synthesized
tatacttaatatatagcaatta

SEQ ID NO: 50445 - DNA, 22 bp, Artificial Sequence
  chemically synthesized
aatatatagcaattaacttctg

SEQ ID NO: 50446 - DNA, 22 bp, Artificial Sequence
  chemically synthesized
atatatagcaattaacttctgg

SEQ ID NO: 50447 - DNA, 22 bp, Artificial Sequence
  chemically synthesized
acttctggtcagcagtgtgcag

SEQ ID NO: 50448 - DNA, 22 bp, Artificial Sequence
  chemically synthesized
ctggtcagcagtgtgcaggcag

SEQ ID NO: 50449 - DNA, 22 bp, Artificial Sequence
  chemically synthesized
tggtcagcagtgtgcaggcagc

SEQ ID NO: 50450 - DNA, 22 bp, Artificial Sequence
  chemically synthesized
gtcagcagtgtgcaggcagcag

SEQ ID NO: 50451 - DNA, 22 bp, Artificial Sequence
  chemically synthesized
ccccaagcagataggaggggag

SEQ ID NO: 50452 - DNA, 22 bp, Artificial Sequence
  chemically synthesized
ggacaagcacaaaagacaggtc

SEQ ID NO: 50453 - DNA, 22 bp, Artificial Sequence
  chemically synthesized
ctgtcagcagctgaattatttt

SEQ ID NO: 50454 - DNA, 22 bp, Artificial Sequence
  chemically synthesized
tcagcagctgaattatttttat

SEQ ID NO: 50455 - DNA, 22 bp, Artificial Sequence
  chemically synthesized
aattatttttatacaggaattt

SEQ ID NO: 50456 - DNA, 22 bp, Artificial Sequence
  chemically synthesized
tttttatacaggaatttttatc

SEQ ID NO: 50457 - DNA, 22 bp, Artificial Sequence
  chemically synthesized
ttatacaggaatttttatctct

SEQ ID NO: 50458 - DNA, 22 bp, Artificial Sequence
  chemically synthesized
tatacaggaatttttatctcta

SEQ ID NO: 50459 - DNA, 22 bp, Artificial Sequence
  chemically synthesized
atacaggaatttttatctctat

SEQ ID NO: 50460 - DNA, 22 bp, Artificial Sequence
  chemically synthesized
tacaggaatttttatctctatt

SEQ ID NO: 50461 - DNA, 22 bp, Artificial Sequence
  chemically synthesized
ttatctctattgtacaaacaag

SEQ ID NO: 50462 - DNA, 22 bp, Artificial Sequence
  chemically synthesized
tatctctattgtacaaacaagt

SEQ ID NO: 50463 - DNA, 22 bp, Artificial Sequence
  chemically synthesized
atctctattgtacaaacaagta

SEQ ID NO: 50464 - DNA, 22 bp, Artificial Sequence
  chemically synthesized
tctctattgtacaaacaagtac

SEQ ID NO: 50465 - DNA, 22 bp, Artificial Sequence
  chemically synthesized
tattgtacaaacaagtacgtgt

SEQ ID NO: 50466 - DNA, 22 bp, Artificial Sequence
  chemically synthesized
ttgtacaaacaagtacgtgtct

SEQ ID NO: 50467 - DNA, 22 bp, Artificial Sequence
  chemically synthesized
tacaaacaagtacgtgtctgtg

SEQ ID NO: 50468 - DNA, 22 bp, Artificial Sequence
  chemically synthesized
tgctgacttgttaagcaatcca

SEQ ID NO: 50469 - DNA, 22 bp, Artificial Sequence
  chemically synthesized
acttgttaagcaatccacttgt

SEQ ID NO: 50470 - DNA, 22 bp, Artificial Sequence
  chemically synthesized
gttaagcaatccacttgtatgt

SEQ ID NO: 50471 - DNA, 22 bp, Artificial Sequence
  chemically synthesized
ttaagcaatccacttgtatgta

SEQ ID NO: 50472 - DNA, 22 bp, Artificial Sequence
  chemically synthesized
agcaatccacttgtatgtagaa

SEQ ID NO: 50473 - DNA, 22 bp, Artificial Sequence
  chemically synthesized
gtatgtagaataagattttttt

SEQ ID NO: 50474 - DNA, 22 bp, Artificial Sequence
  chemically synthesized
tatgtagaataagatttttttt

SEQ ID NO: 50475 - DNA, 22 bp, Artificial Sequence
  chemically synthesized
tttttctttcttgctaccagtc

SEQ ID NO: 50476 - DNA, 22 bp, Artificial Sequence
  chemically synthesized
ttttctttcttgctaccagtca

SEQ ID NO: 50477 - DNA, 22 bp, Artificial Sequence
  chemically synthesized
tttctttcttgctaccagtcac

SEQ ID NO: 50478 - DNA, 22 bp, Artificial Sequence
  chemically synthesized
ttctttcttgctaccagtcaca

SEQ ID NO: 50479 - DNA, 22 bp, Artificial Sequence
  chemically synthesized
tctttcttgctaccagtcacac

SEQ ID NO: 50480 - DNA, 22 bp, Artificial Sequence
  chemically synthesized
ctttcttgctaccagtcacaca

SEQ ID NO: 50481 - DNA, 22 bp, Artificial Sequence
  chemically synthesized
tttcttgctaccagtcacacag

SEQ ID NO: 50482 - DNA, 22 bp, Artificial Sequence
  chemically synthesized
tcttgctaccagtcacacagct

SEQ ID NO: 50483 - DNA, 22 bp, Artificial Sequence
  chemically synthesized
cttgctaccagtcacacagctc

SEQ ID NO: 50484 - DNA, 22 bp, Artificial Sequence
  chemically synthesized
ttgctaccagtcacacagctcc

SEQ ID NO: 50485 - DNA, 22 bp, Artificial Sequence
  chemically synthesized
gctaccagtcacacagctccaa

SEQ ID NO: 50486 - DNA, 22 bp, Artificial Sequence
  chemically synthesized
ctaccagtcacacagctccaag

SEQ ID NO: 50487 - DNA, 22 bp, Artificial Sequence
  chemically synthesized
ccagtcacacagctccaagatc

SEQ ID NO: 50488 - DNA, 22 bp, Artificial Sequence
  chemically synthesized
caagatcagaagaaatacatag

SEQ ID NO: 50489 - DNA, 22 bp, Artificial Sequence
  chemically synthesized
tgaagctgctcaaatgttttag

SEQ ID NO: 50490 - DNA, 22 bp, Artificial Sequence
  chemically synthesized
gaagctgctcaaatgttttagt

SEQ ID NO: 50491 - DNA, 22 bp, Artificial Sequence
  chemically synthesized
aagctgctcaaatgttttagtt

SEQ ID NO: 50492 - DNA, 22 bp, Artificial Sequence
  chemically synthesized
ctcaaatgttttagttaaaagg

SEQ ID NO: 50493 - DNA, 22 bp, Artificial Sequence
  chemically synthesized
aaatgttttagttaaaaggaca

SEQ ID NO: 50494 - DNA, 22 bp, Artificial Sequence
  chemically synthesized
tagttaaaaggacagcagttgt

SEQ ID NO: 50495 - DNA, 22 bp, Artificial Sequence
  chemically synthesized
agttaaaaggacagcagttgtt

SEQ ID NO: 50496 - DNA, 22 bp, Artificial Sequence
  chemically synthesized
gttaaaaggacagcagttgttt

SEQ ID NO: 50497 - DNA, 22 bp, Artificial Sequence
  chemically synthesized
aaaggacagcagttgttttcaa

SEQ ID NO: 50498 - DNA, 22 bp, Artificial Sequence
  chemically synthesized
ttttcaaagatccaagagtatc

SEQ ID NO: 50499 - DNA, 22 bp, Artificial Sequence
  chemically synthesized
tcaaagatccaagagtatcttt

SEQ ID NO: 50500 - DNA, 22 bp, Artificial Sequence
  chemically synthesized
caaagatccaagagtatcttta

SEQ ID NO: 50501 - DNA, 22 bp, Artificial Sequence
  chemically synthesized
aaagatccaagagtatctttat

SEQ ID NO: 50502 - DNA, 22 bp, Artificial Sequence
  chemically synthesized
tatcagaattaaatttttcctt

SEQ ID NO: 50503 - DNA, 22 bp, Artificial Sequence
  chemically synthesized
atcagaattaaatttttcctta

SEQ ID NO: 50504 - DNA, 22 bp, Artificial Sequence
  chemically synthesized
tcagaattaaatttttccttat

SEQ ID NO: 50505 - DNA, 22 bp, Artificial Sequence
  chemically synthesized
aatttttccttattgatttttt

SEQ ID NO: 50506 - DNA, 22 bp, Artificial Sequence
  chemically synthesized
ttccttattgatttttttctcc

SEQ ID NO: 50507 - DNA, 22 bp, Artificial Sequence
  chemically synthesized
tccttattgatttttttctcct

SEQ ID NO: 50508 - DNA, 22 bp, Artificial Sequence
  chemically synthesized
ccttattgatttttttctcctt

SEQ ID NO: 50509 - DNA, 22 bp, Artificial Sequence
  chemically synthesized
cttattgatttttttctcctta

SEQ ID NO: 50510 - DNA, 22 bp, Artificial Sequence
  chemically synthesized
attgatttttttctccttaaca

SEQ ID NO: 50511 - DNA, 22 bp, Artificial Sequence
  chemically synthesized
ttgatttttttctccttaacat

SEQ ID NO: 50512 - DNA, 22 bp, Artificial Sequence
  chemically synthesized
atttttttctccttaacataac

SEQ ID NO: 50513 - DNA, 22 bp, Artificial Sequence
  chemically synthesized
ttttctccttaacataacaaaa

SEQ ID NO: 50514 - DNA, 22 bp, Artificial Sequence
  chemically synthesized
tttctccttaacataacaaaaa

SEQ ID NO: 50515 - DNA, 22 bp, Artificial Sequence
  chemically synthesized
ttctccttaacataacaaaaac

SEQ ID NO: 50516 - DNA, 22 bp, Artificial Sequence
  chemically synthesized
tctccttaacataacaaaaaca

SEQ ID NO: 50517 - DNA, 22 bp, Artificial Sequence
  chemically synthesized
ctccttaacataacaaaaacat

SEQ ID NO: 50518 - DNA, 22 bp, Artificial Sequence
  chemically synthesized
tccttaacataacaaaaacata

SEQ ID NO: 50519 - DNA, 22 bp, Artificial Sequence
  chemically synthesized
cttaacataacaaaaacataac

SEQ ID NO: 50520 - DNA, 22 bp, Artificial Sequence
  chemically synthesized
aacataacaaaaacataacatg

SEQ ID NO: 50521 - DNA, 22 bp, Artificial Sequence
  chemically synthesized
acataacaaaaacataacatga

SEQ ID NO: 50522 - DNA, 22 bp, Artificial Sequence
  chemically synthesized
cgatttattattaaaatttttt

SEQ ID NO: 50523 - DNA, 22 bp, Artificial Sequence
  chemically synthesized
attattaaaatttttttcagcc

SEQ ID NO: 50524 - DNA, 22 bp, Artificial Sequence
  chemically synthesized
ttattaaaatttttttcagcct

SEQ ID NO: 50525 - DNA, 22 bp, Artificial Sequence
  chemically synthesized
ttaaaatttttttcagccttta

SEQ ID NO: 50526 - DNA, 22 bp, Artificial Sequence
  chemically synthesized
aaatttttttcagcctttaaat

SEQ ID NO: 50527 - DNA, 22 bp, Artificial Sequence
  chemically synthesized
ttttcagcctttaaatcattct

SEQ ID NO: 50528 - DNA, 22 bp, Artificial Sequence
  chemically synthesized
tttcagcctttaaatcattctt

SEQ ID NO: 50529 - DNA, 22 bp, Artificial Sequence
  chemically synthesized
ttcagcctttaaatcattcttc

SEQ ID NO: 50530 - DNA, 22 bp, Artificial Sequence
  chemically synthesized
tcagcctttaaatcattcttca

SEQ ID NO: 50531 - DNA, 22 bp, Artificial Sequence
  chemically synthesized
cagcctttaaatcattcttcag

SEQ ID NO: 50532 - DNA, 22 bp, Artificial Sequence
  chemically synthesized
agcctttaaatcattcttcagt

SEQ ID NO: 50533 - DNA, 22 bp, Artificial Sequence
  chemically synthesized
taaatcattcttcagtagccaa

SEQ ID NO: 50534 - DNA, 22 bp, Artificial Sequence
  chemically synthesized
aaatcattcttcagtagccaat

SEQ ID NO: 50535 - DNA, 22 bp, Artificial Sequence
  chemically synthesized
aatcattcttcagtagccaatg

SEQ ID NO: 50536 - DNA, 22 bp, Artificial Sequence
  chemically synthesized
ttcagtagccaatgttcagttt

SEQ ID NO: 50537 - DNA, 22 bp, Artificial Sequence
  chemically synthesized
cagtagccaatgttcagtttta

SEQ ID NO: 50538 - DNA, 22 bp, Artificial Sequence
  chemically synthesized
agtagccaatgttcagttttaa

SEQ ID NO: 50539 - DNA, 22 bp, Artificial Sequence
  chemically synthesized
agttttaaatgtaaaggaataa

SEQ ID NO: 50540 - DNA, 22 bp, Artificial Sequence
  chemically synthesized
taaatgtaaaggaataattttt

SEQ ID NO: 50541 - DNA, 22 bp, Artificial Sequence
  chemically synthesized
aaatgtaaaggaataatttttt

SEQ ID NO: 50542 - DNA, 22 bp, Artificial Sequence
  chemically synthesized
aatgtaaaggaataattttttt

SEQ ID NO: 50543 - DNA, 22 bp, Artificial Sequence
  chemically synthesized
ttttaaaatattagggtgtgat

SEQ ID NO: 50544 - DNA, 22 bp, Artificial Sequence
  chemically synthesized
tttaaaatattagggtgtgatg

SEQ ID NO: 50545 - DNA, 22 bp, Artificial Sequence
  chemically synthesized
ttaaaatattagggtgtgatgg

SEQ ID NO: 50546 - DNA, 22 bp, Artificial Sequence
  chemically synthesized
taaaatattagggtgtgatgga

SEQ ID NO: 50547 - DNA, 22 bp, Artificial Sequence
  chemically synthesized
aaaatattagggtgtgatggag

SEQ ID NO: 50548 - DNA, 22 bp, Artificial Sequence
  chemically synthesized
aaatattagggtgtgatggaga

SEQ ID NO: 50549 - DNA, 22 bp, Artificial Sequence
  chemically synthesized
gggtgtgatggagagaaactca

SEQ ID NO: 50550 - DNA, 22 bp, Artificial Sequence
  chemically synthesized
acgagatttaagatttaacatt

SEQ ID NO: 50551 - DNA, 22 bp, Artificial Sequence
  chemically synthesized
aagatttaacattggttaatgc

SEQ ID NO: 50552 - DNA, 22 bp, Artificial Sequence
  chemically synthesized
agatttaacattggttaatgca

SEQ ID NO: 50553 - DNA, 22 bp, Artificial Sequence
  chemically synthesized
aacattggttaatgcattgttt

SEQ ID NO: 50554 - DNA, 22 bp, Artificial Sequence
  chemically synthesized
acattggttaatgcattgtttt

SEQ ID NO: 50555 - DNA, 22 bp, Artificial Sequence
  chemically synthesized
gttaatgcattgttttaactgg

SEQ ID NO: 50556 - DNA, 22 bp, Artificial Sequence
  chemically synthesized
atgcattgttttaactggaaac

SEQ ID NO: 50557 - DNA, 22 bp, Artificial Sequence
  chemically synthesized
ttttaactggaaactgaaagga

SEQ ID NO: 50558 - DNA, 22 bp, Artificial Sequence
  chemically synthesized
taactggaaactgaaaggatcg

SEQ ID NO: 50559 - DNA, 22 bp, Artificial Sequence
  chemically synthesized
aactggaaactgaaaggatcgg

SEQ ID NO: 50560 - DNA, 22 bp, Artificial Sequence
  chemically synthesized
actggaaactgaaaggatcggg

SEQ ID NO: 50561 - DNA, 22 bp, Artificial Sequence
  chemically synthesized
gaaactgaaaggatcggggcag

SEQ ID NO: 50562 - DNA, 22 bp, Artificial Sequence
  chemically synthesized
aaaggatcggggcaggggagtt

SEQ ID NO: 50563 - DNA, 22 bp, Artificial Sequence
  chemically synthesized
aaatggggagtaaatggttcac

SEQ ID NO: 50564 - DNA, 22 bp, Artificial Sequence
  chemically synthesized
actgaggggttcccccctaaat

SEQ ID NO: 50565 - DNA, 22 bp, Artificial Sequence
  chemically synthesized
aggggttcccccctaaatgtaa

SEQ ID NO: 50566 - DNA, 22 bp, Artificial Sequence
  chemically synthesized
ccccctaaatgtaaataaatca

SEQ ID NO: 50567 - DNA, 22 bp, Artificial Sequence
  chemically synthesized
aatgtaaataaatcataaaatc

SEQ ID NO: 50568 - DNA, 22 bp, Artificial Sequence
  chemically synthesized
gagttggtgaaggagaatactt

SEQ ID NO: 50569 - DNA, 22 bp, Artificial Sequence
  chemically synthesized
agttggtgaaggagaatacttc

SEQ ID NO: 50570 - DNA, 22 bp, Artificial Sequence
  chemically synthesized
gtgaaggagaatacttcaggtt

SEQ ID NO: 50571 - DNA, 22 bp, Artificial Sequence
  chemically synthesized
caggtttggttctcttagtttt

SEQ ID NO: 50572 - DNA, 22 bp, Artificial Sequence
  chemically synthesized
aggtttggttctcttagttttt

SEQ ID NO: 50573 - DNA, 22 bp, Artificial Sequence
  chemically synthesized
ggttctcttagttttttgaggt

SEQ ID NO: 50574 - DNA, 22 bp, Artificial Sequence
  chemically synthesized
gttctcttagttttttgaggtt

SEQ ID NO: 50575 - DNA, 22 bp, Artificial Sequence
  chemically synthesized
tcttagttttttgaggtttgtt

SEQ ID NO: 50576 - DNA, 22 bp, Artificial Sequence
  chemically synthesized
ttagttttttgaggtttgtttt

SEQ ID NO: 50577 - DNA, 22 bp, Artificial Sequence
  chemically synthesized
agttttttgaggtttgtttttg

SEQ ID NO: 50578 - DNA, 22 bp, Artificial Sequence
  chemically synthesized
gttttttgaggtttgtttttgt

SEQ ID NO: 50579 - DNA, 22 bp, Artificial Sequence
  chemically synthesized
tttgaggtttgtttttgtttga

SEQ ID NO: 50580 - DNA, 22 bp, Artificial Sequence
  chemically synthesized
ttgaggtttgtttttgtttgag

SEQ ID NO: 50581 - DNA, 22 bp, Artificial Sequence
  chemically synthesized
tgaggtttgtttttgtttgagg

SEQ ID NO: 50582 - DNA, 22 bp, Artificial Sequence
  chemically synthesized
gaggtttgtttttgtttgagga

SEQ ID NO: 50583 - DNA, 22 bp, Artificial Sequence
  chemically synthesized
aggtttgtttttgtttgaggag

SEQ ID NO: 50584 - DNA, 22 bp, Artificial Sequence
  chemically synthesized
gtttttgtttgaggaggtgcag

SEQ ID NO: 50585 - DNA, 22 bp, Artificial Sequence
  chemically synthesized
tttttgtttgaggaggtgcagg

SEQ ID NO: 50586 - DNA, 22 bp, Artificial Sequence
  chemically synthesized
ttgtttgaggaggtgcagggat

SEQ ID NO: 50587 - DNA, 22 bp, Artificial Sequence
  chemically synthesized
tgtttgaggaggtgcagggatt

SEQ ID NO: 50588 - DNA, 22 bp, Artificial Sequence
  chemically synthesized
gtttgaggaggtgcagggattg

SEQ ID NO: 50589 - DNA, 22 bp, Artificial Sequence
  chemically synthesized
tttgaggaggtgcagggattgg

SEQ ID NO: 50590 - DNA, 22 bp, Artificial Sequence
  chemically synthesized
gaggaggtgcagggattggcca

SEQ ID NO: 50591 - DNA, 22 bp, Artificial Sequence
  chemically synthesized
aggaggtgcagggattggccaa

SEQ ID NO: 50592 - DNA, 22 bp, Artificial Sequence
  chemically synthesized
gccaaatattaaaactctatat

SEQ ID NO: 50593 - DNA, 22 bp, Artificial Sequence
  chemically synthesized
aaactctatatttaaaatgtac

SEQ ID NO: 50594 - DNA, 22 bp, Artificial Sequence
  chemically synthesized
tatatttaaaatgtacaggaac

SEQ ID NO: 50595 - DNA, 22 bp, Artificial Sequence
  chemically synthesized
tatttaaaatgtacaggaacag

SEQ ID NO: 50596 - DNA, 22 bp, Artificial Sequence
  chemically synthesized
aaaatgtacaggaacagacttg

SEQ ID NO: 50597 - DNA, 22 bp, Artificial Sequence
  chemically synthesized
aaatgtacaggaacagacttgg

SEQ ID NO: 50598 - DNA, 22 bp, Artificial Sequence
  chemically synthesized
ggcacatagtgctttgtgctcc

SEQ ID NO: 50599 - DNA, 22 bp, Artificial Sequence
  chemically synthesized
gcacatagtgctttgtgctcca

SEQ ID NO: 50600 - DNA, 22 bp, Artificial Sequence
  chemically synthesized
tgtgctccaacataagaatcca

SEQ ID NO: 50601 - DNA, 22 bp, Artificial Sequence
  chemically synthesized
gtgctccaacataagaatccaa

SEQ ID NO: 50602 - DNA, 22 bp, Artificial Sequence
  chemically synthesized
tgctccaacataagaatccaag

SEQ ID NO: 50603 - DNA, 22 bp, Artificial Sequence
  chemically synthesized
caacataagaatccaagctaca

SEQ ID NO: 50604 - DNA, 22 bp, Artificial Sequence
  chemically synthesized
cactttatttccctaaaaatta

SEQ ID NO: 50605 - DNA, 22 bp, Artificial Sequence
  chemically synthesized
tatttccctaaaaattaacaga

SEQ ID NO: 50606 - DNA, 22 bp, Artificial Sequence
  chemically synthesized
atttccctaaaaattaacagat

SEQ ID NO: 50607 - DNA, 22 bp, Artificial Sequence
  chemically synthesized
tttccctaaaaattaacagatg

SEQ ID NO: 50608 - DNA, 22 bp, Artificial Sequence
  chemically synthesized
ccctaaaaattaacagatgtga

SEQ ID NO: 50609 - DNA, 22 bp, Artificial Sequence
  chemically synthesized
cctaaaaattaacagatgtgat

SEQ ID NO: 50610 - DNA, 22 bp, Artificial Sequence
  chemically synthesized
aaaattaacagatgtgatttcc

SEQ ID NO: 50611 - DNA, 22 bp, Artificial Sequence
  chemically synthesized
acagatgtgatttccttgcagc

SEQ ID NO: 50612 - DNA, 22 bp, Artificial Sequence
  chemically synthesized
ccttgcagcctttttatgcatc

SEQ ID NO: 50613 - DNA, 22 bp, Artificial Sequence
  chemically synthesized
cttgcagcctttttatgcatca

SEQ ID NO: 50614 - DNA, 22 bp, Artificial Sequence
  chemically synthesized
gcagcctttttatgcatcatta

SEQ ID NO: 50615 - DNA, 22 bp, Artificial Sequence
  chemically synthesized
cagcctttttatgcatcattac

SEQ ID NO: 50616 - DNA, 22 bp, Artificial Sequence
  chemically synthesized
tttatgcatcattacatattaa

SEQ ID NO: 50617 - DNA, 22 bp, Artificial Sequence
  chemically synthesized
ttatgcatcattacatattaag

SEQ ID NO: 50618 - DNA, 22 bp, Artificial Sequence
  chemically synthesized
tatgcatcattacatattaaga

SEQ ID NO: 50619 - DNA, 22 bp, Artificial Sequence
  chemically synthesized
atgcatcattacatattaagaa

SEQ ID NO: 50620 - DNA, 22 bp, Artificial Sequence
  chemically synthesized
tgcatcattacatattaagaaa

SEQ ID NO: 50621 - DNA, 22 bp, Artificial Sequence
  chemically synthesized
catattaagaaaatgaacaact

SEQ ID NO: 50622 - DNA, 22 bp, Artificial Sequence
  chemically synthesized
agaaaatgaacaactgatgaat

SEQ ID NO: 50623 - DNA, 22 bp, Artificial Sequence
  chemically synthesized
atgaatataaatttaaatgccc

SEQ ID NO: 50624 - DNA, 22 bp, Artificial Sequence
  chemically synthesized
aaatgccctgatgcttagcaaa

SEQ ID NO: 50625 - DNA, 22 bp, Artificial Sequence
  chemically synthesized
aatgccctgatgcttagcaaaa

SEQ ID NO: 50626 - DNA, 22 bp, Artificial Sequence
  chemically synthesized
atgcttagcaaaaagcttcctt

SEQ ID NO: 50627 - DNA, 22 bp, Artificial Sequence
  chemically synthesized
agcaaaaagcttccttgtgttt

SEQ ID NO: 50628 - DNA, 22 bp, Artificial Sequence
  chemically synthesized
gcaaaaagcttccttgtgtttt

SEQ ID NO: 50629 - DNA, 22 bp, Artificial Sequence
  chemically synthesized
ccttgtgttttttagaaagttc

SEQ ID NO: 50630 - DNA, 22 bp, Artificial Sequence
  chemically synthesized
cttgtgttttttagaaagttca

SEQ ID NO: 50631 - DNA, 22 bp, Artificial Sequence
  chemically synthesized
gtgttttttagaaagttcaaaa

SEQ ID NO: 50632 - DNA, 22 bp, Artificial Sequence
  chemically synthesized
tgttttttagaaagttcaaaaa

SEQ ID NO: 50633 - DNA, 22 bp, Artificial Sequence
  chemically synthesized
tttagaaagttcaaaaagcaaa

SEQ ID NO: 50634 - DNA, 22 bp, Artificial Sequence
  chemically synthesized
ttagaaagttcaaaaagcaaat

SEQ ID NO: 50635 - DNA, 22 bp, Artificial Sequence
  chemically synthesized
tagaaagttcaaaaagcaaata

SEQ ID NO: 50636 - DNA, 22 bp, Artificial Sequence
  chemically synthesized
agaaagttcaaaaagcaaatag

SEQ ID NO: 50637 - DNA, 22 bp, Artificial Sequence
  chemically synthesized
gaaagttcaaaaagcaaataga

SEQ ID NO: 50638 - DNA, 22 bp, Artificial Sequence
  chemically synthesized
aaaaagcaaatagaaaggcgag

SEQ ID NO: 50639 - DNA, 22 bp, Artificial Sequence
  chemically synthesized
gttttctttttgaaggcaccct

SEQ ID NO: 50640 - DNA, 22 bp, Artificial Sequence
  chemically synthesized
tctttttgaaggcacccttgca

SEQ ID NO: 50641 - DNA, 22 bp, Artificial Sequence
  chemically synthesized
ctttttgaaggcacccttgcag

SEQ ID NO: 50642 - DNA, 22 bp, Artificial Sequence
  chemically synthesized
tttttgaaggcacccttgcagg

SEQ ID NO: 50643 - DNA, 22 bp, Artificial Sequence
  chemically synthesized
tttgaaggcacccttgcaggtt

SEQ ID NO: 50644 - DNA, 22 bp, Artificial Sequence
  chemically synthesized
ttgaaggcacccttgcaggttt

SEQ ID NO: 50645 - DNA, 22 bp, Artificial Sequence
  chemically synthesized
tgaaggcacccttgcaggtttc

SEQ ID NO: 50646 - DNA, 22 bp, Artificial Sequence
  chemically synthesized
gaaggcacccttgcaggtttca

SEQ ID NO: 50647 - DNA, 22 bp, Artificial Sequence
  chemically synthesized
aaggcacccttgcaggtttcac

SEQ ID NO: 50648 - DNA, 22 bp, Artificial Sequence
  chemically synthesized
gcaggtttcacaataattccat

SEQ ID NO: 50649 - DNA, 22 bp, Artificial Sequence
  chemically synthesized
caggtttcacaataattccatt

SEQ ID NO: 50650 - DNA, 22 bp, Artificial Sequence
  chemically synthesized
cacaataattccattctttatt

SEQ ID NO: 50651 - DNA, 22 bp, Artificial Sequence
  chemically synthesized
acaataattccattctttattt

SEQ ID NO: 50652 - DNA, 22 bp, Artificial Sequence
  chemically synthesized
cattctttattttaatgggagt

SEQ ID NO: 50653 - DNA, 22 bp, Artificial Sequence
  chemically synthesized
tttattttaatgggagttttta

SEQ ID NO: 50654 - DNA, 22 bp, Artificial Sequence
  chemically synthesized
tattttaatgggagtttttaat

SEQ ID NO: 50655 - DNA, 22 bp, Artificial Sequence
  chemically synthesized
attttaatgggagtttttaatc

SEQ ID NO: 50656 - DNA, 22 bp, Artificial Sequence
  chemically synthesized
ttttaatgggagtttttaatca

SEQ ID NO: 50657 - DNA, 22 bp, Artificial Sequence
  chemically synthesized
taatgggagtttttaatcagtg

SEQ ID NO: 50658 - DNA, 22 bp, Artificial Sequence
  chemically synthesized
aatgggagtttttaatcagtgg

SEQ ID NO: 50659 - DNA, 22 bp, Artificial Sequence
  chemically synthesized
atgggagtttttaatcagtgga

SEQ ID NO: 50660 - DNA, 22 bp, Artificial Sequence
  chemically synthesized
ttaatcagtggattcgcctcta

SEQ ID NO: 50661 - DNA, 22 bp, Artificial Sequence
  chemically synthesized
taatcagtggattcgcctctat

SEQ ID NO: 50662 - DNA, 22 bp, Artificial Sequence
  chemically synthesized
aatcagtggattcgcctctatc

SEQ ID NO: 50663 - DNA, 22 bp, Artificial Sequence
  chemically synthesized
atcagtggattcgcctctatct

SEQ ID NO: 50664 - DNA, 22 bp, Artificial Sequence
  chemically synthesized
gcctctatctaaaactaaaatc

SEQ ID NO: 50665 - DNA, 22 bp, Artificial Sequence
  chemically synthesized
tatctaaaactaaaatcaaatt

SEQ ID NO: 50666 - DNA, 22 bp, Artificial Sequence
  chemically synthesized
tctaaaactaaaatcaaattgt

SEQ ID NO: 50667 - DNA, 22 bp, Artificial Sequence
  chemically synthesized
aaactaaaatcaaattgtaggt

SEQ ID NO: 50668 - DNA, 22 bp, Artificial Sequence
  chemically synthesized
aaatcaaattgtaggtgcaatt

SEQ ID NO: 50669 - DNA, 22 bp, Artificial Sequence
  chemically synthesized
taggtgcaattgttcattggca

SEQ ID NO: 50670 - DNA, 22 bp, Artificial Sequence
  chemically synthesized
ttcattggcaatgctaacaaca

SEQ ID NO: 50671 - DNA, 22 bp, Artificial Sequence
  chemically synthesized
attggcaatgctaacaacagtg

SEQ ID NO: 50672 - DNA, 22 bp, Artificial Sequence
  chemically synthesized
gcaatgctaacaacagtgagaa

SEQ ID NO: 50673 - DNA, 22 bp, Artificial Sequence
  chemically synthesized
acaacagtgagaatacaaacaa

SEQ ID NO: 50674 - DNA, 22 bp, Artificial Sequence
  chemically synthesized
attgtgagtgaccaaaggtccc

SEQ ID NO: 50675 - DNA, 22 bp, Artificial Sequence
  chemically synthesized
tgagtgaccaaaggtccccagg

SEQ ID NO: 50676 - DNA, 22 bp, Artificial Sequence
  chemically synthesized
catcaacatacctgctccaggt

SEQ ID NO: 50677 - DNA, 22 bp, Artificial Sequence
  chemically synthesized
atcaacatacctgctccaggtt

SEQ ID NO: 50678 - DNA, 22 bp, Artificial Sequence
  chemically synthesized
ctccaggttcccactgggaatt

SEQ ID NO: 50679 - DNA, 22 bp, Artificial Sequence
  chemically synthesized
caggttcccactgggaattctc

SEQ ID NO: 50680 - DNA, 22 bp, Artificial Sequence
  chemically synthesized
ccactgggaattctctggcaga

SEQ ID NO: 50681 - DNA, 22 bp, Artificial Sequence
  chemically synthesized
ggaattctctggcagagactga

SEQ ID NO: 50682 - DNA, 22 bp, Artificial Sequence
  chemically synthesized
tctggcagagactgattcagtt

SEQ ID NO: 50683 - DNA, 22 bp, Artificial Sequence
  chemically synthesized
tggcagagactgattcagttct

SEQ ID NO: 50684 - DNA, 22 bp, Artificial Sequence
  chemically synthesized
gcagagactgattcagttctga

SEQ ID NO: 50685 - DNA, 22 bp, Artificial Sequence
  chemically synthesized
attcagttctgaataacatgct

SEQ ID NO: 50686 - DNA, 22 bp, Artificial Sequence
  chemically synthesized
agttctgaataacatgctgcca

SEQ ID NO: 50687 - DNA, 22 bp, Artificial Sequence
  chemically synthesized
tgaataacatgctgccagccct

SEQ ID NO: 50688 - DNA, 22 bp, Artificial Sequence
  chemically synthesized
aataacatgctgccagccctat

SEQ ID NO: 50689 - DNA, 22 bp, Artificial Sequence
  chemically synthesized
ccagccctatctggaaaagggt

SEQ ID NO: 50690 - DNA, 22 bp, Artificial Sequence
  chemically synthesized
tctggaaaagggtgtgcaaggc

SEQ ID NO: 50691 - DNA, 22 bp, Artificial Sequence
  chemically synthesized
gaaaagggtgtgcaaggcgcct

SEQ ID NO: 50692 - DNA, 22 bp, Artificial Sequence
  chemically synthesized
ctcgcctcttttacaggaagtt

SEQ ID NO: 50693 - DNA, 22 bp, Artificial Sequence
  chemically synthesized
tcgcctcttttacaggaagttt

SEQ ID NO: 50694 - DNA, 22 bp, Artificial Sequence
  chemically synthesized
gcctcttttacaggaagtttaa

SEQ ID NO: 50695 - DNA, 22 bp, Artificial Sequence
  chemically synthesized
ttttacaggaagtttaaacctg

SEQ ID NO: 50696 - DNA, 22 bp, Artificial Sequence
  chemically synthesized
ttacaggaagtttaaacctgat

SEQ ID NO: 50697 - DNA, 22 bp, Artificial Sequence
  chemically synthesized
tacaggaagtttaaacctgatc

SEQ ID NO: 50698 - DNA, 22 bp, Artificial Sequence
  chemically synthesized
acaggaagtttaaacctgatca

SEQ ID NO: 50699 - DNA, 22 bp, Artificial Sequence
  chemically synthesized
caggaagtttaaacctgatcat

SEQ ID NO: 50700 - DNA, 22 bp, Artificial Sequence
  chemically synthesized
aaacctgatcatctcaccttta

SEQ ID NO: 50701 - DNA, 22 bp, Artificial Sequence
  chemically synthesized
aacctgatcatctcacctttag

SEQ ID NO: 50702 - DNA, 22 bp, Artificial Sequence
  chemically synthesized
atcatctcacctttaggtatat

SEQ ID NO: 50703 - DNA, 22 bp, Artificial Sequence
  chemically synthesized
acctttaggtatatataatttg

SEQ ID NO: 50704 - DNA, 22 bp, Artificial Sequence
  chemically synthesized
taggtatatataatttgttgtt

SEQ ID NO: 50705 - DNA, 22 bp, Artificial Sequence
  chemically synthesized
aggtatatataatttgttgttt

SEQ ID NO: 50706 - DNA, 22 bp, Artificial Sequence
  chemically synthesized
ggtatatataatttgttgttta

SEQ ID NO: 50707 - DNA, 22 bp, Artificial Sequence
  chemically synthesized
gttgtttagcactctgagaact

SEQ ID NO: 50708 - DNA, 22 bp, Artificial Sequence
  chemically synthesized
ttgtttagcactctgagaactt

SEQ ID NO: 50709 - DNA, 22 bp, Artificial Sequence
  chemically synthesized
tttagcactctgagaacttggt

SEQ ID NO: 50710 - DNA, 22 bp, Artificial Sequence
  chemically synthesized
agcactctgagaacttggtatt

SEQ ID NO: 50711 - DNA, 22 bp, Artificial Sequence
  chemically synthesized
gcactctgagaacttggtattt

SEQ ID NO: 50712 - DNA, 22 bp, Artificial Sequence
  chemically synthesized
tgagaacttggtattttatcta

SEQ ID NO: 50713 - DNA, 22 bp, Artificial Sequence
  chemically synthesized
agaacttggtattttatctatc

SEQ ID NO: 50714 - DNA, 22 bp, Artificial Sequence
  chemically synthesized
ggtattttatctatctaaagag

SEQ ID NO: 50715 - DNA, 22 bp, Artificial Sequence
  chemically synthesized
gtattttatctatctaaagaga

SEQ ID NO: 50716 - DNA, 22 bp, Artificial Sequence
  chemically synthesized
tatctatctaaagagatcaaaa

SEQ ID NO: 50717 - DNA, 22 bp, Artificial Sequence
  chemically synthesized
atctatctaaagagatcaaaaa

SEQ ID NO: 50718 - DNA, 22 bp, Artificial Sequence
  chemically synthesized
tctatctaaagagatcaaaaag

SEQ ID NO: 50719 - DNA, 22 bp, Artificial Sequence
  chemically synthesized
tctaaagagatcaaaaagggca

SEQ ID NO: 50720 - DNA, 22 bp, Artificial Sequence
  chemically synthesized
aagagatcaaaaagggcaaaag

SEQ ID NO: 50721 - DNA, 22 bp, Artificial Sequence
  chemically synthesized
aggcccagcctagctctggtgc

SEQ ID NO: 50722 - DNA, 22 bp, Artificial Sequence
  chemically synthesized
gctctggtgcatacgtcaatcg

SEQ ID NO: 50723 - DNA, 22 bp, Artificial Sequence
  chemically synthesized
tggtgcatacgtcaatcgtgca

SEQ ID NO: 50724 - DNA, 22 bp, Artificial Sequence
  chemically synthesized
gtgcatacgtcaatcgtgcact

SEQ ID NO: 50725 - DNA, 22 bp, Artificial Sequence
  chemically synthesized
cgcgttgccttagaggagcaac

SEQ ID NO: 50726 - DNA, 22 bp, Artificial Sequence
  chemically synthesized
ccttagaggagcaacctgtgca

SEQ ID NO: 50727 - DNA, 22 bp, Artificial Sequence
  chemically synthesized
agaggagcaacctgtgcaggta

SEQ ID NO: 50728 - DNA, 22 bp, Artificial Sequence
  chemically synthesized
gaggagcaacctgtgcaggtaa

SEQ ID NO: 50729 - DNA, 22 bp, Artificial Sequence
  chemically synthesized
tgcaggtaaatcttccagcagc

SEQ ID NO: 50730 - DNA, 22 bp, Artificial Sequence
  chemically synthesized
ccagcagcattgcatcagatcc

SEQ ID NO: 50731 - DNA, 22 bp, Artificial Sequence
  chemically synthesized
cagcagcattgcatcagatcca

SEQ ID NO: 50732 - DNA, 22 bp, Artificial Sequence
  chemically synthesized
catcagatccactcacatcagt

SEQ ID NO: 50733 - DNA, 22 bp, Artificial Sequence
  chemically synthesized
acatcagtctccagggtgaacc

SEQ ID NO: 50734 - DNA, 22 bp, Artificial Sequence
  chemically synthesized
cagggtgaaccaagagatgaca

SEQ ID NO: 50735 - DNA, 22 bp, Artificial Sequence
  chemically synthesized
cagttccctgtctgcaaacttc

SEQ ID NO: 50736 - DNA, 22 bp, Artificial Sequence
  chemically synthesized
agttccctgtctgcaaacttct

SEQ ID NO: 50737 - DNA, 22 bp, Artificial Sequence
  chemically synthesized
cctgtctgcaaacttctaattc

SEQ ID NO: 50738 - DNA, 22 bp, Artificial Sequence
  chemically synthesized
tctgcaaacttctaattcgcca

SEQ ID NO: 50739 - DNA, 22 bp, Artificial Sequence
  chemically synthesized
caaacttctaattcgccagttc

SEQ ID NO: 50740 - DNA, 22 bp, Artificial Sequence
  chemically synthesized
ctaattcgccagttcttagcag

SEQ ID NO: 50741 - DNA, 22 bp, Artificial Sequence
  chemically synthesized
taattcgccagttcttagcagc

SEQ ID NO: 50742 - DNA, 22 bp, Artificial Sequence
  chemically synthesized
attcgccagttcttagcagctt

SEQ ID NO: 50743 - DNA, 22 bp, Artificial Sequence
  chemically synthesized
gccagttcttagcagcttattt

SEQ ID NO: 50744 - DNA, 22 bp, Artificial Sequence
  chemically synthesized
ttagcagcttatttttccaagt

SEQ ID NO: 50745 - DNA, 22 bp, Artificial Sequence
  chemically synthesized
agcagcttatttttccaagtgt

SEQ ID NO: 50746 - DNA, 22 bp, Artificial Sequence
  chemically synthesized
gcagcttatttttccaagtgtt

SEQ ID NO: 50747 - DNA, 22 bp, Artificial Sequence
  chemically synthesized
atttttccaagtgttttgtttc

SEQ ID NO: 50748 - DNA, 22 bp, Artificial Sequence
  chemically synthesized
tttttccaagtgttttgtttca

SEQ ID NO: 50749 - DNA, 22 bp, Artificial Sequence
  chemically synthesized
ttccaagtgttttgtttcagga

SEQ ID NO: 50750 - DNA, 22 bp, Artificial Sequence
  chemically synthesized
tccaagtgttttgtttcaggaa

SEQ ID NO: 50751 - DNA, 22 bp, Artificial Sequence
  chemically synthesized
ccaagtgttttgtttcaggaaa

SEQ ID NO: 50752 - DNA, 22 bp, Artificial Sequence
  chemically synthesized
caagtgttttgtttcaggaaac

SEQ ID NO: 50753 - DNA, 22 bp, Artificial Sequence
  chemically synthesized
tgtttcaggaaacgtgtatttt

SEQ ID NO: 50754 - DNA, 22 bp, Artificial Sequence
  chemically synthesized
gtttcaggaaacgtgtattttt

SEQ ID NO: 50755 - DNA, 22 bp, Artificial Sequence
  chemically synthesized
tttcaggaaacgtgtatttttc

SEQ ID NO: 50756 - DNA, 22 bp, Artificial Sequence
  chemically synthesized
caggaaacgtgtatttttcttt

SEQ ID NO: 50757 - DNA, 22 bp, Artificial Sequence
  chemically synthesized
aggaaacgtgtatttttcttta

SEQ ID NO: 50758 - DNA, 22 bp, Artificial Sequence
  chemically synthesized
ttctttatacgttttgtggatc

SEQ ID NO: 50759 - DNA, 22 bp, Artificial Sequence
  chemically synthesized
tctttatacgttttgtggatct

SEQ ID NO: 50760 - DNA, 22 bp, Artificial Sequence
  chemically synthesized
ctttatacgttttgtggatcta

SEQ ID NO: 50761 - DNA, 22 bp, Artificial Sequence
  chemically synthesized
tttatacgttttgtggatctac

SEQ ID NO: 50762 - DNA, 22 bp, Artificial Sequence
  chemically synthesized
tatacgttttgtggatctacca

SEQ ID NO: 50763 - DNA, 22 bp, Artificial Sequence
  chemically synthesized
atacgttttgtggatctaccac

SEQ ID NO: 50764 - DNA, 22 bp, Artificial Sequence
  chemically synthesized
tacgttttgtggatctaccaca

SEQ ID NO: 50765 - DNA, 22 bp, Artificial Sequence
  chemically synthesized
tgtggatctaccacaactgctt

SEQ ID NO: 50766 - DNA, 22 bp, Artificial Sequence
  chemically synthesized
gtggatctaccacaactgcttc

SEQ ID NO: 50767 - DNA, 22 bp, Artificial Sequence
  chemically synthesized
tggatctaccacaactgcttct

SEQ ID NO: 50768 - DNA, 22 bp, Artificial Sequence
  chemically synthesized
ccacaactgcttctgacagctg

SEQ ID NO: 50769 - DNA, 22 bp, Artificial Sequence
  chemically synthesized
cttctgacagctgttgattctg

SEQ ID NO: 50770 - DNA, 22 bp, Artificial Sequence
  chemically synthesized
ctgacagctgttgattctgtta

SEQ ID NO: 50771 - DNA, 22 bp, Artificial Sequence
  chemically synthesized
tgacagctgttgattctgttaa

SEQ ID NO: 50772 - DNA, 22 bp, Artificial Sequence
  chemically synthesized
acagctgttgattctgttaaag

SEQ ID NO: 50773 - DNA, 22 bp, Artificial Sequence
  chemically synthesized
ttgattctgttaaaggaacaca

SEQ ID NO: 50774 - DNA, 22 bp, Artificial Sequence
  chemically synthesized
attctgttaaaggaacacatta

SEQ ID NO: 50775 - DNA, 22 bp, Artificial Sequence
  chemically synthesized
tgttaaaggaacacattataaa

SEQ ID NO: 50776 - DNA, 22 bp, Artificial Sequence
  chemically synthesized
ttaaaggaacacattataaaaa

SEQ ID NO: 50777 - DNA, 22 bp, Artificial Sequence
  chemically synthesized
aaggaacacattataaaaatct

SEQ ID NO: 50778 - DNA, 22 bp, Artificial Sequence
  chemically synthesized
taaaaatcttctttaaaacctc

SEQ ID NO: 50779 - DNA, 22 bp, Artificial Sequence
  chemically synthesized
ctttaaaacctcaagcaatgtg

SEQ ID NO: 50780 - DNA, 22 bp, Artificial Sequence
  chemically synthesized
tttaaaacctcaagcaatgtgg

SEQ ID NO: 50781 - DNA, 22 bp, Artificial Sequence
  chemically synthesized
taaaacctcaagcaatgtggac

SEQ ID NO: 50782 - DNA, 22 bp, Artificial Sequence
  chemically synthesized
aaaacctcaagcaatgtggact

SEQ ID NO: 50783 - DNA, 22 bp, Artificial Sequence
  chemically synthesized
aaacctcaagcaatgtggactc

SEQ ID NO: 50784 - DNA, 22 bp, Artificial Sequence
  chemically synthesized
aagcaatgtggactcaaaaata

SEQ ID NO: 50785 - DNA, 22 bp, Artificial Sequence
  chemically synthesized
aaaaatataatggtgaaatatt

SEQ ID NO: 50786 - DNA, 22 bp, Artificial Sequence
  chemically synthesized
taatggaattccagttgaaagt

SEQ ID NO: 50787 - DNA, 22 bp, Artificial Sequence
  chemically synthesized
aatggaattccagttgaaagtt

SEQ ID NO: 50788 - DNA, 22 bp, Artificial Sequence
  chemically synthesized
atggaattccagttgaaagttg

SEQ ID NO: 50789 - DNA, 22 bp, Artificial Sequence
  chemically synthesized
cagttgaaagttgttttttaaa

SEQ ID NO: 50790 - DNA, 22 bp, Artificial Sequence
  chemically synthesized
aaagttgttttttaaaaaaagt

SEQ ID NO: 50791 - DNA, 22 bp, Artificial Sequence
  chemically synthesized
ttttttaaaaaaagtacaaatg

SEQ ID NO: 50792 - DNA, 22 bp, Artificial Sequence
  chemically synthesized
tttaaaaaaagtacaaatgaag

SEQ ID NO: 50793 - DNA, 22 bp, Artificial Sequence
  chemically synthesized
ttaaaaaaagtacaaatgaagg

SEQ ID NO: 50794 - DNA, 22 bp, Artificial Sequence
  chemically synthesized
taaaaaaagtacaaatgaaggt

SEQ ID NO: 50795 - DNA, 22 bp, Artificial Sequence
  chemically synthesized
aaaaaaagtacaaatgaaggta

SEQ ID NO: 50796 - DNA, 22 bp, Artificial Sequence
  chemically synthesized
aaaaaagtacaaatgaaggtac

SEQ ID NO: 50797 - DNA, 22 bp, Artificial Sequence
  chemically synthesized
tagatcagtactagatttaaac

SEQ ID NO: 50798 - DNA, 22 bp, Artificial Sequence
  chemically synthesized
agatcagtactagatttaaact

SEQ ID NO: 50799 - DNA, 22 bp, Artificial Sequence
  chemically synthesized
gatcagtactagatttaaactg

SEQ ID NO: 50800 - DNA, 22 bp, Artificial Sequence
  chemically synthesized
gatttaaactgaatgtctctct

SEQ ID NO: 50801 - DNA, 22 bp, Artificial Sequence
  chemically synthesized
aaactgaatgtctctctctctc

SEQ ID NO: 50802 - DNA, 22 bp, Artificial Sequence
  chemically synthesized
aactgaatgtctctctctctct

SEQ ID NO: 50803 - DNA, 22 bp, Artificial Sequence
  chemically synthesized
aatgtctctctctctctctctc

SEQ ID NO: 50804 - DNA, 22 bp, Artificial Sequence
  chemically synthesized
tctctctctctctctctgtgtg

SEQ ID NO: 50805 - DNA, 22 bp, Artificial Sequence
  chemically synthesized
tctctctctctctctgtgtgtg

SEQ ID NO: 50806 - DNA, 22 bp, Artificial Sequence
  chemically synthesized
tctctctctctctgtgtgtgtg

SEQ ID NO: 50807 - DNA, 22 bp, Artificial Sequence
  chemically synthesized
tctctctctctgtgtgtgtgtg

SEQ ID NO: 50808 - DNA, 22 bp, Artificial Sequence
  chemically synthesized
tctctctctgtgtgtgtgtgtg

SEQ ID NO: 50809 - DNA, 22 bp, Artificial Sequence
  chemically synthesized
tctctctgtgtgtgtgtgtgtg

SEQ ID NO: 50810 - DNA, 22 bp, Artificial Sequence
  chemically synthesized
tctctgtgtgtgtgtgtgtgtg

SEQ ID NO: 50811 - DNA, 22 bp, Artificial Sequence
  chemically synthesized
tctgtgtgtgtgtgtgtgtgtg

SEQ ID NO: 50812 - DNA, 22 bp, Artificial Sequence
  chemically synthesized
tgtgtgtgtgtgtgtgtgtgtg

SEQ ID NO: 50813 - DNA, 22 bp, Artificial Sequence
  chemically synthesized
tgtgtgtgtgtgtgtgtgtgtg

SEQ ID NO: 50814 - DNA, 22 bp, Artificial Sequence
  chemically synthesized
caaatcaccacaaatatttaca

SEQ ID NO: 50815 - DNA, 22 bp, Artificial Sequence
  chemically synthesized
acactgtactccctttgttcaa

SEQ ID NO: 50816 - DNA, 22 bp, Artificial Sequence
  chemically synthesized
cactgtactccctttgttcaaa

SEQ ID NO: 50817 - DNA, 22 bp, Artificial Sequence
  chemically synthesized
tactccctttgttcaaatcaca

SEQ ID NO: 50818 - DNA, 22 bp, Artificial Sequence
  chemically synthesized
cctttgttcaaatcacatactt

SEQ ID NO: 50819 - DNA, 22 bp, Artificial Sequence
  chemically synthesized
tgttcaaatcacatacttttaa

SEQ ID NO: 50820 - DNA, 22 bp, Artificial Sequence
  chemically synthesized
gttcaaatcacatacttttaac

SEQ ID NO: 50821 - DNA, 22 bp, Artificial Sequence
  chemically synthesized
ttcaaatcacatacttttaacg

SEQ ID NO: 50822 - DNA, 22 bp, Artificial Sequence
  chemically synthesized
aaatcacatacttttaacggga

SEQ ID NO: 50823 - DNA, 22 bp, Artificial Sequence
  chemically synthesized
ttaacgggaaaagctggaactg

SEQ ID NO: 50824 - DNA, 22 bp, Artificial Sequence
  chemically synthesized
taacgggaaaagctggaactgt

SEQ ID NO: 50825 - DNA, 22 bp, Artificial Sequence
  chemically synthesized
aacgggaaaagctggaactgtg

SEQ ID NO: 50826 - DNA, 22 bp, Artificial Sequence
  chemically synthesized
acgggaaaagctggaactgtgg

SEQ ID NO: 50827 - DNA, 22 bp, Artificial Sequence
  chemically synthesized
gaactgtggctatttaaaattt

SEQ ID NO: 50828 - DNA, 22 bp, Artificial Sequence
  chemically synthesized
tggctatttaaaattttaaata

SEQ ID NO: 50829 - DNA, 22 bp, Artificial Sequence
  chemically synthesized
tttaaaattttaaatattcaaa

SEQ ID NO: 50830 - DNA, 22 bp, Artificial Sequence
  chemically synthesized
aaaattttaaatattcaaacgc

SEQ ID NO: 50831 - DNA, 22 bp, Artificial Sequence
  chemically synthesized
aaattttaaatattcaaacgcc

SEQ ID NO: 50832 - DNA, 22 bp, Artificial Sequence
  chemically synthesized
taaatattcaaacgcctgtaat

SEQ ID NO: 50833 - DNA, 22 bp, Artificial Sequence
  chemically synthesized
aaatattcaaacgcctgtaatt

SEQ ID NO: 50834 - DNA, 22 bp, Artificial Sequence
  chemically synthesized
aatattcaaacgcctgtaatta

SEQ ID NO: 50835 - DNA, 22 bp, Artificial Sequence
  chemically synthesized
aaacgcctgtaattaaccatat

SEQ ID NO: 50836 - DNA, 22 bp, Artificial Sequence
  chemically synthesized
taattaaccatatgaaacaaat

SEQ ID NO: 50837 - DNA, 22 bp, Artificial Sequence
  chemically synthesized
accatatgaaacaaattatgtt

SEQ ID NO: 50838 - DNA, 22 bp, Artificial Sequence
  chemically synthesized
tgttgcatttctccataccagc

SEQ ID NO: 50839 - DNA, 22 bp, Artificial Sequence
  chemically synthesized
catttctccataccagcacatg

SEQ ID NO: 50840 - DNA, 22 bp, Artificial Sequence
  chemically synthesized
ctccataccagcacatgcaaaa

SEQ ID NO: 50841 - DNA, 22 bp, Artificial Sequence
  chemically synthesized
tccataccagcacatgcaaaaa

SEQ ID NO: 50842 - DNA, 22 bp, Artificial Sequence
  chemically synthesized
cataccagcacatgcaaaaaaa

SEQ ID NO: 50843 - DNA, 22 bp, Artificial Sequence
  chemically synthesized
tggtggtgaattgggaggtggc

SEQ ID NO: 50844 - DNA, 22 bp, Artificial Sequence
  chemically synthesized
gtggtgaattgggaggtggcag

SEQ ID NO: 50845 - DNA, 22 bp, Artificial Sequence
  chemically synthesized
ggaggtggcagagttggggaga

SEQ ID NO: 50846 - DNA, 22 bp, Artificial Sequence
  chemically synthesized
gggagacaactccaagagaaga

SEQ ID NO: 50847 - DNA, 22 bp, Artificial Sequence
  chemically synthesized
caagagaagaaaaggatgatgt

SEQ ID NO: 50848 - DNA, 22 bp, Artificial Sequence
  chemically synthesized
tcatttcgctatagatcaaagg

SEQ ID NO: 50849 - DNA, 22 bp, Artificial Sequence
  chemically synthesized
catttcgctatagatcaaagga

SEQ ID NO: 50850 - DNA, 22 bp, Artificial Sequence
  chemically synthesized
atttcgctatagatcaaaggag

SEQ ID NO: 50851 - DNA, 22 bp, Artificial Sequence
  chemically synthesized
cgctatagatcaaaggagaaca

SEQ ID NO: 50852 - DNA, 22 bp, Artificial Sequence
  chemically synthesized
gctatagatcaaaggagaacaa

SEQ ID NO: 50853 - DNA, 22 bp, Artificial Sequence
  chemically synthesized
tagatcaaaggagaacaagaat

SEQ ID NO: 50854 - DNA, 22 bp, Artificial Sequence
  chemically synthesized
tggcatatcgagcatttttcca

SEQ ID NO: 50855 - DNA, 22 bp, Artificial Sequence
  chemically synthesized
ttccattgctgtctttcacact

SEQ ID NO: 50856 - DNA, 22 bp, Artificial Sequence
  chemically synthesized
tccattgctgtctttcacactg

SEQ ID NO: 50857 - DNA, 22 bp, Artificial Sequence
  chemically synthesized
ccattgctgtctttcacactgg

SEQ ID NO: 50858 - DNA, 22 bp, Artificial Sequence
  chemically synthesized
cattgctgtctttcacactggg

SEQ ID NO: 50859 - DNA, 22 bp, Artificial Sequence
  chemically synthesized
ctgtctttcacactgggctatc

SEQ ID NO: 50860 - DNA, 22 bp, Artificial Sequence
  chemically synthesized
tctttcacactgggctatctaa

SEQ ID NO: 50861 - DNA, 22 bp, Artificial Sequence
  chemically synthesized
tcacactgggctatctaagttt

SEQ ID NO: 50862 - DNA, 22 bp, Artificial Sequence
  chemically synthesized
cacactgggctatctaagttta

SEQ ID NO: 50863 - DNA, 22 bp, Artificial Sequence
  chemically synthesized
acactgggctatctaagtttat

SEQ ID NO: 50864 - DNA, 22 bp, Artificial Sequence
  chemically synthesized
ggctatctaagtttatacaatt

SEQ ID NO: 50865 - DNA, 22 bp, Artificial Sequence
  chemically synthesized
tctaagtttatacaattcccca

SEQ ID NO: 50866 - DNA, 22 bp, Artificial Sequence
  chemically synthesized
agtttatacaattccccagact

SEQ ID NO: 50867 - DNA, 22 bp, Artificial Sequence
  chemically synthesized
atacaattccccagactagctg

SEQ ID NO: 50868 - DNA, 22 bp, Artificial Sequence
  chemically synthesized
tacaattccccagactagctgc

SEQ ID NO: 50869 - DNA, 22 bp, Artificial Sequence
  chemically synthesized
cccagactagctgcatattaag

SEQ ID NO: 50870 - DNA, 22 bp, Artificial Sequence
  chemically synthesized
gctgcatattaagcttgctgtg

SEQ ID NO: 50871 - DNA, 22 bp, Artificial Sequence
  chemically synthesized
catattaagcttgctgtgtaca

SEQ ID NO: 50872 - DNA, 22 bp, Artificial Sequence
  chemically synthesized
agcttgctgtgtacagctttat

SEQ ID NO: 50873 - DNA, 22 bp, Artificial Sequence
  chemically synthesized
gctgtgtacagctttattatgg

SEQ ID NO: 50874 - DNA, 22 bp, Artificial Sequence
  chemically synthesized
ctgtgtacagctttattatggt

SEQ ID NO: 50875 - DNA, 22 bp, Artificial Sequence
  chemically synthesized
tgtacagctttattatggtgtg

SEQ ID NO: 50876 - DNA, 22 bp, Artificial Sequence
  chemically synthesized
tattatggtgtggtggtggaag

SEQ ID NO: 50877 - DNA, 22 bp, Artificial Sequence
  chemically synthesized
attatggtgtggtggtggaaga

SEQ ID NO: 50878 - DNA, 22 bp, Artificial Sequence
  chemically synthesized
ttatggtgtggtggtggaagaa

SEQ ID NO: 50879 - DNA, 22 bp, Artificial Sequence
  chemically synthesized
tggtgtggtggtggaagaagca

SEQ ID NO: 50880 - DNA, 22 bp, Artificial Sequence
  chemically synthesized
atattccagctccgcatctgac

SEQ ID NO: 50881 - DNA, 22 bp, Artificial Sequence
  chemically synthesized
cagctccgcatctgacagggca

SEQ ID NO: 50882 - DNA, 22 bp, Artificial Sequence
  chemically synthesized
cgcatctgacagggcatttaca

SEQ ID NO: 50883 - DNA, 22 bp, Artificial Sequence
  chemically synthesized
acagggcatttacatgcgccca

SEQ ID NO: 50884 - DNA, 22 bp, Artificial Sequence
  chemically synthesized
acatgcgcccatctgagcggca

SEQ ID NO: 50885 - DNA, 22 bp, Artificial Sequence
  chemically synthesized
catgcgcccatctgagcggcac

SEQ ID NO: 50886 - DNA, 22 bp, Artificial Sequence
  chemically synthesized
agcggcacctgagagctcctcc

SEQ ID NO: 50887 - DNA, 22 bp, Artificial Sequence
  chemically synthesized
agagctcctccaaggtgcagta

SEQ ID NO: 50888 - DNA, 22 bp, Artificial Sequence
  chemically synthesized
ctccaaggtgcagtaactgtgc

SEQ ID NO: 50889 - DNA, 22 bp, Artificial Sequence
  chemically synthesized
caaggtgcagtaactgtgcgcc

SEQ ID NO: 50890 - DNA, 22 bp, Artificial Sequence
  chemically synthesized
tgcgcctattgtaaaggcaaat

SEQ ID NO: 50891 - DNA, 22 bp, Artificial Sequence
  chemically synthesized
ttgtaaaggcaaatgaagctca

SEQ ID NO: 50892 - DNA, 22 bp, Artificial Sequence
  chemically synthesized
taaaggcaaatgaagctcacct

SEQ ID NO: 50893 - DNA, 22 bp, Artificial Sequence
  chemically synthesized
acctattccctgctgggatcag

SEQ ID NO: 50894 - DNA, 22 bp, Artificial Sequence
  chemically synthesized
ttccctgctgggatcagaagtg

SEQ ID NO: 50895 - DNA, 22 bp, Artificial Sequence
  chemically synthesized
cctgctgggatcagaagtgacc

SEQ ID NO: 50896 - DNA, 22 bp, Artificial Sequence
  chemically synthesized
ctgggatcagaagtgacctcac

SEQ ID NO: 50897 - DNA, 22 bp, Artificial Sequence
  chemically synthesized
ggatcagaagtgacctcaccac

SEQ ID NO: 50898 - DNA, 22 bp, Artificial Sequence
  chemically synthesized
accaccccccatgcctcaaatc

SEQ ID NO: 50899 - DNA, 22 bp, Artificial Sequence
  chemically synthesized
aaatccttcccttgccaaccta

SEQ ID NO: 50900 - DNA, 22 bp, Artificial Sequence
  chemically synthesized
cccttgccaacctaactcaatg

SEQ ID NO: 50901 - DNA, 22 bp, Artificial Sequence
  chemically synthesized
ccttgccaacctaactcaatgc

SEQ ID NO: 50902 - DNA, 22 bp, Artificial Sequence
  chemically synthesized
gccaacctaactcaatgccatt

SEQ ID NO: 50903 - DNA, 22 bp, Artificial Sequence
  chemically synthesized
ccaacctaactcaatgccattg

SEQ ID NO: 50904 - DNA, 22 bp, Artificial Sequence
  chemically synthesized
actcaatgccattgcagaatga

SEQ ID NO: 50905 - DNA, 22 bp, Artificial Sequence
  chemically synthesized
aatgccattgcagaatgacgaa

SEQ ID NO: 50906 - DNA, 22 bp, Artificial Sequence
  chemically synthesized
cagaatgacgaatgagctcaga

SEQ ID NO: 50907 - DNA, 22 bp, Artificial Sequence
  chemically synthesized
agaaatagaccccaagttacta

SEQ ID NO: 50908 - DNA, 22 bp, Artificial Sequence
  chemically synthesized
ctaaccctgctaagaacagcaa

SEQ ID NO: 50909 - DNA, 22 bp, Artificial Sequence
  chemically synthesized
accctgctaagaacagcaaaag

SEQ ID NO: 50910 - DNA, 22 bp, Artificial Sequence
  chemically synthesized
ctaagaacagcaaaagcctttg

SEQ ID NO: 50911 - DNA, 22 bp, Artificial Sequence
  chemically synthesized
agaacagcaaaagcctttgctg

SEQ ID NO: 50912 - DNA, 22 bp, Artificial Sequence
  chemically synthesized
tgctgaaatgttttaaaaatgc

SEQ ID NO: 50913 - DNA, 22 bp, Artificial Sequence
  chemically synthesized
gctgaaatgttttaaaaatgca

SEQ ID NO: 50914 - DNA, 22 bp, Artificial Sequence
  chemically synthesized
ctgaaatgttttaaaaatgcat

SEQ ID NO: 50915 - DNA, 22 bp, Artificial Sequence
  chemically synthesized
aaatgttttaaaaatgcatagg

SEQ ID NO: 50916 - DNA, 22 bp, Artificial Sequence
  chemically synthesized
taaaaatgcatagggagtgcag

SEQ ID NO: 50917 - DNA, 22 bp, Artificial Sequence
  chemically synthesized
aaaaatgcatagggagtgcagc

SEQ ID NO: 50918 - DNA, 22 bp, Artificial Sequence
  chemically synthesized
aaaatgcatagggagtgcagct

SEQ ID NO: 50919 - DNA, 22 bp, Artificial Sequence
  chemically synthesized
gccagtaaaaagcagggagaca

SEQ ID NO: 50920 - DNA, 22 bp, Artificial Sequence
  chemically synthesized
caatgaacccaatatggaataa

SEQ ID NO: 50921 - DNA, 22 bp, Artificial Sequence
  chemically synthesized
cattttaaaactgattagaaat

SEQ ID NO: 50922 - DNA, 22 bp, Artificial Sequence
  chemically synthesized
taaaactgattagaaatacagt

SEQ ID NO: 50923 - DNA, 22 bp, Artificial Sequence
  chemically synthesized
aaaactgattagaaatacagtc

SEQ ID NO: 50924 - DNA, 22 bp, Artificial Sequence
  chemically synthesized
aaactgattagaaatacagtct

SEQ ID NO: 50925 - DNA, 22 bp, Artificial Sequence
  chemically synthesized
attagaaatacagtctgatgtt

SEQ ID NO: 50926 - DNA, 22 bp, Artificial Sequence
  chemically synthesized
gaaatacagtctgatgtttact

SEQ ID NO: 50927 - DNA, 22 bp, Artificial Sequence
  chemically synthesized
atgtttactggcttcaaattga

SEQ ID NO: 50928 - DNA, 22 bp, Artificial Sequence
  chemically synthesized
actggcttcaaattgagtttgg

SEQ ID NO: 50929 - DNA, 22 bp, Artificial Sequence
  chemically synthesized
ctggcttcaaattgagtttggc

SEQ ID NO: 50930 - DNA, 22 bp, Artificial Sequence
  chemically synthesized
gcttcaaattgagtttggcatc

SEQ ID NO: 50931 - DNA, 22 bp, Artificial Sequence
  chemically synthesized
caaattgagtttggcatcaagt

SEQ ID NO: 50932 - DNA, 22 bp, Artificial Sequence
  chemically synthesized
aaattgagtttggcatcaagta

SEQ ID NO: 50933 - DNA, 22 bp, Artificial Sequence
  chemically synthesized
agtttggcatcaagtatactgg

SEQ ID NO: 50934 - DNA, 22 bp, Artificial Sequence
  chemically synthesized
ggcatcaagtatactggcttta

SEQ ID NO: 50935 - DNA, 22 bp, Artificial Sequence
  chemically synthesized
gcatcaagtatactggctttaa

SEQ ID NO: 50936 - DNA, 22 bp, Artificial Sequence
  chemically synthesized
gctttaataatgctggcacttt

SEQ ID NO: 50937 - DNA, 22 bp, Artificial Sequence
  chemically synthesized
taataatgctggcacttttaaa

SEQ ID NO: 50938 - DNA, 22 bp, Artificial Sequence
  chemically synthesized
aataatgctggcacttttaaaa

SEQ ID NO: 50939 - DNA, 22 bp, Artificial Sequence
  chemically synthesized
ataatgctggcacttttaaaat

SEQ ID NO: 50940 - DNA, 22 bp, Artificial Sequence
  chemically synthesized
gcacttttaaaattattattat

SEQ ID NO: 50941 - DNA, 22 bp, Artificial Sequence
  chemically synthesized
ttaaaattattattattttaaa

SEQ ID NO: 50942 - DNA, 22 bp, Artificial Sequence
  chemically synthesized
taaaattattattattttaaat

SEQ ID NO: 50943 - DNA, 22 bp, Artificial Sequence
  chemically synthesized
aaaattattattattttaaatc

SEQ ID NO: 50944 - DNA, 22 bp, Artificial Sequence
  chemically synthesized
aaattattattattttaaatct

SEQ ID NO: 50945 - DNA, 22 bp, Artificial Sequence
  chemically synthesized
ttattattttaaatctgccttt

SEQ ID NO: 50946 - DNA, 22 bp, Artificial Sequence
  chemically synthesized
ttattttaaatctgcctttggt

SEQ ID NO: 50947 - DNA, 22 bp, Artificial Sequence
  chemically synthesized
ttttaaatctgcctttggtctc

SEQ ID NO: 50948 - DNA, 22 bp, Artificial Sequence
  chemically synthesized
taaatctgcctttggtctctag

SEQ ID NO: 50949 - DNA, 22 bp, Artificial Sequence
  chemically synthesized
aaatctgcctttggtctctagg

SEQ ID NO: 50950 - DNA, 22 bp, Artificial Sequence
  chemically synthesized
aatctgcctttggtctctagga

SEQ ID NO: 50951 - DNA, 22 bp, Artificial Sequence
  chemically synthesized
cctttggtctctaggagcacat

SEQ ID NO: 50952 - DNA, 22 bp, Artificial Sequence
  chemically synthesized
tggtctctaggagcacatgtag

SEQ ID NO: 50953 - DNA, 22 bp, Artificial Sequence
  chemically synthesized
ggtctctaggagcacatgtaga

SEQ ID NO: 50954 - DNA, 22 bp, Artificial Sequence
  chemically synthesized
gtctctaggagcacatgtagag

SEQ ID NO: 50955 - DNA, 22 bp, Artificial Sequence
  chemically synthesized
taggagcacatgtagagagcta

SEQ ID NO: 50956 - DNA, 22 bp, Artificial Sequence
  chemically synthesized
ggagcacatgtagagagctaaa

SEQ ID NO: 50957 - DNA, 22 bp, Artificial Sequence
  chemically synthesized
aagaattcttatttgtcaggtt

SEQ ID NO: 50958 - DNA, 22 bp, Artificial Sequence
  chemically synthesized
ttatttgtcaggttacatttcc

SEQ ID NO: 50959 - DNA, 22 bp, Artificial Sequence
  chemically synthesized
atttgtcaggttacatttcctg

SEQ ID NO: 50960 - DNA, 22 bp, Artificial Sequence
  chemically synthesized
tttgtcaggttacatttcctgg

SEQ ID NO: 50961 - DNA, 22 bp, Artificial Sequence
  chemically synthesized
gtcaggttacatttcctggaaa

SEQ ID NO: 50962 - DNA, 22 bp, Artificial Sequence
  chemically synthesized
tcaggttacatttcctggaaat

SEQ ID NO: 50963 - DNA, 22 bp, Artificial Sequence
  chemically synthesized
catttcctggaaattaagtttg

SEQ ID NO: 50964 - DNA, 22 bp, Artificial Sequence
  chemically synthesized
cctggaaattaagtttgtgaca

SEQ ID NO: 50965 - DNA, 22 bp, Artificial Sequence
  chemically synthesized
ctggaaattaagtttgtgacag

SEQ ID NO: 50966 - DNA, 22 bp, Artificial Sequence
  chemically synthesized
gaaattaagtttgtgacagaaa

SEQ ID NO: 50967 - DNA, 22 bp, Artificial Sequence
  chemically synthesized
agtttgtgacagaaaatgactc

SEQ ID NO: 50968 - DNA, 22 bp, Artificial Sequence
  chemically synthesized
gtgacagaaaatgactccagta

SEQ ID NO: 50969 - DNA, 22 bp, Artificial Sequence
  chemically synthesized
tgacagaaaatgactccagtag

SEQ ID NO: 50970 - DNA, 22 bp, Artificial Sequence
  chemically synthesized
cagtagcaataatatggttcgt

SEQ ID NO: 50971 - DNA, 22 bp, Artificial Sequence
  chemically synthesized
gtgctcaaattaattaggtcat

SEQ ID NO: 50972 - DNA, 22 bp, Artificial Sequence
  chemically synthesized
aaattaattaggtcatgttgta

SEQ ID NO: 50973 - DNA, 22 bp, Artificial Sequence
  chemically synthesized
attaggtcatgttgtaaaaact

SEQ ID NO: 50974 - DNA, 22 bp, Artificial Sequence
  chemically synthesized
ggtcatgttgtaaaaactacgt

SEQ ID NO: 50975 - DNA, 22 bp, Artificial Sequence
  chemically synthesized
taaaaactacgtggcaaattac

SEQ ID NO: 50976 - DNA, 22 bp, Artificial Sequence
  chemically synthesized
cgtggcaaattacaaaggtaaa

SEQ ID NO: 50977 - DNA, 22 bp, Artificial Sequence
  chemically synthesized
caaaggtaaatttactgatatt

SEQ ID NO: 50978 - DNA, 22 bp, Artificial Sequence
  chemically synthesized
actgatattggccagtgctcta

SEQ ID NO: 50979 - DNA, 22 bp, Artificial Sequence
  chemically synthesized
ctgatattggccagtgctctat

SEQ ID NO: 50980 - DNA, 22 bp, Artificial Sequence
  chemically synthesized
atattggccagtgctctatacc

SEQ ID NO: 50981 - DNA, 22 bp, Artificial Sequence
  chemically synthesized
gccagtgctctataccctggtc

SEQ ID NO: 50982 - DNA, 22 bp, Artificial Sequence
  chemically synthesized
tataccctggtcgtaaagggga

SEQ ID NO: 50983 - DNA, 22 bp, Artificial Sequence
  chemically synthesized
taccctggtcgtaaaggggaga

SEQ ID NO: 50984 - DNA, 22 bp, Artificial Sequence
  chemically synthesized
gtcgtaaaggggagaagctgtt

SEQ ID NO: 50985 - DNA, 22 bp, Artificial Sequence
  chemically synthesized
tttaaggatgcccatttaccta

SEQ ID NO: 50986 - DNA, 22 bp, Artificial Sequence
  chemically synthesized
aaggatgcccatttacctaggt

SEQ ID NO: 50987 - DNA, 22 bp, Artificial Sequence
  chemically synthesized
aggatgcccatttacctaggta

SEQ ID NO: 50988 - DNA, 22 bp, Artificial Sequence
  chemically synthesized
acctaggtaggagaaaagaacc

SEQ ID NO: 50989 - DNA, 22 bp, Artificial Sequence
  chemically synthesized
cctaggtaggagaaaagaacca

SEQ ID NO: 50990 - DNA, 22 bp, Artificial Sequence
  chemically synthesized
ggtaggagaaaagaaccaagga

SEQ ID NO: 50991 - DNA, 22 bp, Artificial Sequence
  chemically synthesized
cctatttgtattacaaataaaa

SEQ ID NO: 50992 - DNA, 22 bp, Artificial Sequence
  chemically synthesized
ctatttgtattacaaataaaaa

SEQ ID NO: 50993 - DNA, 22 bp, Artificial Sequence
  chemically synthesized
tttgtattacaaataaaaatag

SEQ ID NO: 50994 - DNA, 22 bp, Artificial Sequence
  chemically synthesized
gtattacaaataaaaatagtag

SEQ ID NO: 50995 - DNA, 22 bp, Artificial Sequence
  chemically synthesized
tattacaaataaaaatagtagt

SEQ ID NO: 50996 - DNA, 22 bp, Artificial Sequence
  chemically synthesized
caaataaaaatagtagtcatta

SEQ ID NO: 50997 - DNA, 22 bp, Artificial Sequence
  chemically synthesized
tccattaaattatatagtctga

SEQ ID NO: 50998 - DNA, 22 bp, Artificial Sequence
  chemically synthesized
aattatatagtctgaacatatt

SEQ ID NO: 50999 - DNA, 22 bp, Artificial Sequence
  chemically synthesized
tatagtctgaacatattttatg

SEQ ID NO: 51000 - DNA, 22 bp, Artificial Sequence
  chemically synthesized
aacatattttatgaacttcatt

SEQ ID NO: 51001 - DNA, 22 bp, Artificial Sequence
  chemically synthesized
tatgaacttcattaatgtcatc

SEQ ID NO: 51002 - DNA, 22 bp, Artificial Sequence
  chemically synthesized
atgaacttcattaatgtcatcc

SEQ ID NO: 51003 - DNA, 22 bp, Artificial Sequence
  chemically synthesized
tgaacttcattaatgtcatcca

SEQ ID NO: 51004 - DNA, 22 bp, Artificial Sequence
  chemically synthesized
cattaatgtcatccaaattgat

SEQ ID NO: 51005 - DNA, 22 bp, Artificial Sequence
  chemically synthesized
attaatgtcatccaaattgata

SEQ ID NO: 51006 - DNA, 22 bp, Artificial Sequence
  chemically synthesized
atgtcatccaaattgatacata

SEQ ID NO: 51007 - DNA, 22 bp, Artificial Sequence
  chemically synthesized
atacataacataaaaacctgct

SEQ ID NO: 51008 - DNA, 22 bp, Artificial Sequence
  chemically synthesized
cttgatttgaaataatgttaaa

SEQ ID NO: 51009 - DNA, 22 bp, Artificial Sequence
  chemically synthesized
gatttgaaataatgttaaaagt

SEQ ID NO: 51010 - DNA, 22 bp, Artificial Sequence
  chemically synthesized
atttgaaataatgttaaaagtg

SEQ ID NO: 51011 - DNA, 22 bp, Artificial Sequence
  chemically synthesized
gaaataatgttaaaagtgggct

SEQ ID NO: 51012 - DNA, 22 bp, Artificial Sequence
  chemically synthesized
aaataatgttaaaagtgggctc

SEQ ID NO: 51013 - DNA, 22 bp, Artificial Sequence
  chemically synthesized
aaagtgggctctaagttagaat

SEQ ID NO: 51014 - DNA, 22 bp, Artificial Sequence
  chemically synthesized
taagttagaatcttttttttta

SEQ ID NO: 51015 - DNA, 22 bp, Artificial Sequence
  chemically synthesized
agttagaatctttttttttaat

SEQ ID NO: 51016 - DNA, 22 bp, Artificial Sequence
  chemically synthesized
gaatctttttttttaatccttg

SEQ ID NO: 51017 - DNA, 22 bp, Artificial Sequence
  chemically synthesized
tttttttaatccttgaaataac

SEQ ID NO: 51018 - DNA, 22 bp, Artificial Sequence
  chemically synthesized
ttttttaatccttgaaataaca

SEQ ID NO: 51019 - DNA, 22 bp, Artificial Sequence
  chemically synthesized
tttttaatccttgaaataacaa

SEQ ID NO: 51020 - DNA, 22 bp, Artificial Sequence
  chemically synthesized
ttttaatccttgaaataacaac

SEQ ID NO: 51021 - DNA, 22 bp, Artificial Sequence
  chemically synthesized
tttaatccttgaaataacaaca

SEQ ID NO: 51022 - DNA, 22 bp, Artificial Sequence
  chemically synthesized
ttaatccttgaaataacaacac

SEQ ID NO: 51023 - DNA, 22 bp, Artificial Sequence
  chemically synthesized
taatccttgaaataacaacact

SEQ ID NO: 51024 - DNA, 22 bp, Artificial Sequence
  chemically synthesized
aatccttgaaataacaacactg

SEQ ID NO: 51025 - DNA, 22 bp, Artificial Sequence
  chemically synthesized
atccttgaaataacaacactgc

SEQ ID NO: 51026 - DNA, 22 bp, Artificial Sequence
  chemically synthesized
gaaataacaacactgctgacat

SEQ ID NO: 51027 - DNA, 22 bp, Artificial Sequence
  chemically synthesized
aaataacaacactgctgacata

SEQ ID NO: 51028 - DNA, 22 bp, Artificial Sequence
  chemically synthesized
ctgacatagccatgacccaaat

SEQ ID NO: 51029 - DNA, 22 bp, Artificial Sequence
  chemically synthesized
acatagccatgacccaaatgaa

SEQ ID NO: 51030 - DNA, 22 bp, Artificial Sequence
  chemically synthesized
aacaagcagaaaggtactaaag

SEQ ID NO: 51031 - DNA, 22 bp, Artificial Sequence
  chemically synthesized
aagatgcttggtgattaaatct

SEQ ID NO: 51032 - DNA, 22 bp, Artificial Sequence
  chemically synthesized
ggtgattaaatctcatgctaaa

SEQ ID NO: 51033 - DNA, 22 bp, Artificial Sequence
  chemically synthesized
gtgattaaatctcatgctaaaa

SEQ ID NO: 51034 - DNA, 22 bp, Artificial Sequence
  chemically synthesized
aatctcatgctaaaaaagtggc

SEQ ID NO: 51035 - DNA, 22 bp, Artificial Sequence
  chemically synthesized
atgctaaaaaagtggcaaggtg

SEQ ID NO: 51036 - DNA, 22 bp, Artificial Sequence
  chemically synthesized
aaaaagtggcaaggtgccaggc

SEQ ID NO: 51037 - DNA, 22 bp, Artificial Sequence
  chemically synthesized
ggtccagcttgatgctaagtgc

SEQ ID NO: 51038 - DNA, 22 bp, Artificial Sequence
  chemically synthesized
gatgctaagtgctttttattgc

SEQ ID NO: 51039 - DNA, 22 bp, Artificial Sequence
  chemically synthesized
atgctaagtgctttttattgca

SEQ ID NO: 51040 - DNA, 22 bp, Artificial Sequence
  chemically synthesized
agtgctttttattgcacaaagc

SEQ ID NO: 51041 - DNA, 22 bp, Artificial Sequence
  chemically synthesized
tttattgcacaaagctggtact

SEQ ID NO: 51042 - DNA, 22 bp, Artificial Sequence
  chemically synthesized
ttattgcacaaagctggtacta

SEQ ID NO: 51043 - DNA, 22 bp, Artificial Sequence
  chemically synthesized
tattgcacaaagctggtactac

SEQ ID NO: 51044 - DNA, 22 bp, Artificial Sequence
  chemically synthesized
attgcacaaagctggtactact

SEQ ID NO: 51045 - DNA, 22 bp, Artificial Sequence
  chemically synthesized
ttgcacaaagctggtactactg

SEQ ID NO: 51046 - DNA, 22 bp, Artificial Sequence
  chemically synthesized
cacaaagctggtactactgtat

SEQ ID NO: 51047 - DNA, 22 bp, Artificial Sequence
  chemically synthesized
gtactactgtatgtaaaaacag

SEQ ID NO: 51048 - DNA, 22 bp, Artificial Sequence
  chemically synthesized
ctgtatgtaaaaacagacttgg

SEQ ID NO: 51049 - DNA, 22 bp, Artificial Sequence
  chemically synthesized
tatgtaaaaacagacttgggct

SEQ ID NO: 51050 - DNA, 22 bp, Artificial Sequence
  chemically synthesized
gggcttggggtaaattttgtca

SEQ ID NO: 51051 - DNA, 22 bp, Artificial Sequence
  chemically synthesized
ggcttggggtaaattttgtcaa

SEQ ID NO: 51052 - DNA, 22 bp, Artificial Sequence
  chemically synthesized
ggggtaaattttgtcaaatgac

SEQ ID NO: 51053 - DNA, 22 bp, Artificial Sequence
  chemically synthesized
gggtaaattttgtcaaatgact

SEQ ID NO: 51054 - DNA, 22 bp, Artificial Sequence
  chemically synthesized
tgtcaaatgacttctttgtgca

SEQ ID NO: 51055 - DNA, 22 bp, Artificial Sequence
  chemically synthesized
gtcaaatgacttctttgtgcaa

SEQ ID NO: 51056 - DNA, 22 bp, Artificial Sequence
  chemically synthesized
tcaaatgacttctttgtgcaat

SEQ ID NO: 51057 - DNA, 22 bp, Artificial Sequence
  chemically synthesized
ctttgtgcaataaagggtgtga

SEQ ID NO: 51058 - DNA, 22 bp, Artificial Sequence
  chemically synthesized
tttgtgcaataaagggtgtgaa

SEQ ID NO: 51059 - DNA, 22 bp, Artificial Sequence
  chemically synthesized
tgtgcaataaagggtgtgaaca

SEQ ID NO: 51060 - DNA, 22 bp, Artificial Sequence
  chemically synthesized
gtgcaataaagggtgtgaacag

SEQ ID NO: 51061 - DNA, 22 bp, Artificial Sequence
  chemically synthesized
tgcaataaagggtgtgaacaga

SEQ ID NO: 51062 - DNA, 22 bp, Artificial Sequence
  chemically synthesized
aattaacatccagtgacgcaat

SEQ ID NO: 51063 - DNA, 22 bp, Artificial Sequence
  chemically synthesized
acatccagtgacgcaatcttgg

SEQ ID NO: 51064 - DNA, 22 bp, Artificial Sequence
  chemically synthesized
ggtgcatctccctagctgtgct

SEQ ID NO: 51065 - DNA, 22 bp, Artificial Sequence
  chemically synthesized
gtgcatctccctagctgtgctt

SEQ ID NO: 51066 - DNA, 22 bp, Artificial Sequence
  chemically synthesized
cctagctgtgctttctacttcg

SEQ ID NO: 51067 - DNA, 22 bp, Artificial Sequence
  chemically synthesized
gctgtgctttctacttcggtta

SEQ ID NO: 51068 - DNA, 22 bp, Artificial Sequence
  chemically synthesized
tgctttctacttcggttaaatt

SEQ ID NO: 51069 - DNA, 22 bp, Artificial Sequence
  chemically synthesized
tctacttcggttaaatttaata

SEQ ID NO: 51070 - DNA, 22 bp, Artificial Sequence
  chemically synthesized
ctacttcggttaaatttaatat

SEQ ID NO: 51071 - DNA, 22 bp, Artificial Sequence
  chemically synthesized
tacttcggttaaatttaatatt

SEQ ID NO: 51072 - DNA, 22 bp, Artificial Sequence
  chemically synthesized
cttcggttaaatttaatatttc

SEQ ID NO: 51073 - DNA, 22 bp, Artificial Sequence
  chemically synthesized
cggttaaatttaatatttcccc

SEQ ID NO: 51074 - DNA, 22 bp, Artificial Sequence
  chemically synthesized
ggttaaatttaatatttccccc

SEQ ID NO: 51075 - DNA, 22 bp, Artificial Sequence
  chemically synthesized
aatttaatatttccccccaaag

SEQ ID NO: 51076 - DNA, 22 bp, Artificial Sequence
  chemically synthesized
aatatttccccccaaaggaaag

SEQ ID NO: 51077 - DNA, 22 bp, Artificial Sequence
  chemically synthesized
atatttccccccaaaggaaagc

SEQ ID NO: 51078 - DNA, 22 bp, Artificial Sequence
  chemically synthesized
ccccccaaaggaaagccaaaat

SEQ ID NO: 51079 - DNA, 22 bp, Artificial Sequence
  chemically synthesized
cccccaaaggaaagccaaaatt

SEQ ID NO: 51080 - DNA, 22 bp, Artificial Sequence
  chemically synthesized
gtttcctttcttactgaccagc

SEQ ID NO: 51081 - DNA, 22 bp, Artificial Sequence
  chemically synthesized
tttcctttcttactgaccagca

SEQ ID NO: 51082 - DNA, 22 bp, Artificial Sequence
  chemically synthesized
cctttcttactgaccagcacgc

SEQ ID NO: 51083 - DNA, 22 bp, Artificial Sequence
  chemically synthesized
ctttcttactgaccagcacgca

SEQ ID NO: 51084 - DNA, 22 bp, Artificial Sequence
  chemically synthesized
tcttactgaccagcacgcaaag

SEQ ID NO: 51085 - DNA, 22 bp, Artificial Sequence
  chemically synthesized
cttactgaccagcacgcaaagc

SEQ ID NO: 51086 - DNA, 22 bp, Artificial Sequence
  chemically synthesized
ttactgaccagcacgcaaagcc

SEQ ID NO: 51087 - DNA, 22 bp, Artificial Sequence
  chemically synthesized
actgaccagcacgcaaagccac

SEQ ID NO: 51088 - DNA, 22 bp, Artificial Sequence
  chemically synthesized
ctgaccagcacgcaaagccacc

SEQ ID NO: 51089 - DNA, 22 bp, Artificial Sequence
  chemically synthesized
accagcacgcaaagccaccatt

SEQ ID NO: 51090 - DNA, 22 bp, Artificial Sequence
  chemically synthesized
acctattctcctttattaaaca

SEQ ID NO: 51091 - DNA, 22 bp, Artificial Sequence
  chemically synthesized
ttctcctttattaaacattttc

SEQ ID NO: 51092 - DNA, 22 bp, Artificial Sequence
  chemically synthesized
tcctttattaaacattttcatt

SEQ ID NO: 51093 - DNA, 22 bp, Artificial Sequence
  chemically synthesized
ctttattaaacattttcattga

SEQ ID NO: 51094 - DNA, 22 bp, Artificial Sequence
  chemically synthesized
tattaaacattttcattgagaa

SEQ ID NO: 51095 - DNA, 22 bp, Artificial Sequence
  chemically synthesized
attaaacattttcattgagaaa

SEQ ID NO: 51096 - DNA, 22 bp, Artificial Sequence
  chemically synthesized
ttaaacattttcattgagaaat

SEQ ID NO: 51097 - DNA, 22 bp, Artificial Sequence
  chemically synthesized
aacattttcattgagaaatcac

SEQ ID NO: 51098 - DNA, 22 bp, Artificial Sequence
  chemically synthesized
tcattgagaaatcacaaaaatc

SEQ ID NO: 51099 - DNA, 22 bp, Artificial Sequence
  chemically synthesized
cattgagaaatcacaaaaatct

SEQ ID NO: 51100 - DNA, 22 bp, Artificial Sequence
  chemically synthesized
attgagaaatcacaaaaatcta

SEQ ID NO: 51101 - DNA, 22 bp, Artificial Sequence
  chemically synthesized
agaaatcacaaaaatctaaaaa

SEQ ID NO: 51102 - DNA, 22 bp, Artificial Sequence
  chemically synthesized
aaaaatgtttccctaggatttg

SEQ ID NO: 51103 - DNA, 22 bp, Artificial Sequence
  chemically synthesized
ccctaggatttgcatgtttttt

SEQ ID NO: 51104 - DNA, 22 bp, Artificial Sequence
  chemically synthesized
cctaggatttgcatgtttttta

SEQ ID NO: 51105 - DNA, 22 bp, Artificial Sequence
  chemically synthesized
ggatttgcatgttttttatgta

SEQ ID NO: 51106 - DNA, 22 bp, Artificial Sequence
  chemically synthesized
gcatgttttttatgtaccccaa

SEQ ID NO: 51107 - DNA, 22 bp, Artificial Sequence
  chemically synthesized
catgttttttatgtaccccaat

SEQ ID NO: 51108 - DNA, 22 bp, Artificial Sequence
  chemically synthesized
tttatgtaccccaatttagtac

SEQ ID NO: 51109 - DNA, 22 bp, Artificial Sequence
  chemically synthesized
ttatgtaccccaatttagtact

SEQ ID NO: 51110 - DNA, 22 bp, Artificial Sequence
  chemically synthesized
tatgtaccccaatttagtactc

SEQ ID NO: 51111 - DNA, 22 bp, Artificial Sequence
  chemically synthesized
atgtaccccaatttagtactcc

SEQ ID NO: 51112 - DNA, 22 bp, Artificial Sequence
  chemically synthesized
tgtaccccaatttagtactccc

SEQ ID NO: 51113 - DNA, 22 bp, Artificial Sequence
  chemically synthesized
agtactcccacattagccaaac

SEQ ID NO: 51114 - DNA, 22 bp, Artificial Sequence
  chemically synthesized
gtactcccacattagccaaact

SEQ ID NO: 51115 - DNA, 22 bp, Artificial Sequence
  chemically synthesized
ccacattagccaaactacatgg

SEQ ID NO: 51116 - DNA, 22 bp, Artificial Sequence
  chemically synthesized
gccaaactacatggaagctgca

SEQ ID NO: 51117 - DNA, 22 bp, Artificial Sequence
  chemically synthesized
catggaagctgcagtgtgaaat

SEQ ID NO: 51118 - DNA, 22 bp, Artificial Sequence
  chemically synthesized
cagtgtgaaattaatgattttc

SEQ ID NO: 51119 - DNA, 22 bp, Artificial Sequence
  chemically synthesized
atgattttccaggactctaaaa

SEQ ID NO: 51120 - DNA, 22 bp, Artificial Sequence
  chemically synthesized
tccaggactctaaaagatgcca

SEQ ID NO: 51121 - DNA, 22 bp, Artificial Sequence
  chemically synthesized
ccaggactctaaaagatgccat

SEQ ID NO: 51122 - DNA, 22 bp, Artificial Sequence
  chemically synthesized
caggactctaaaagatgccatt

SEQ ID NO: 51123 - DNA, 22 bp, Artificial Sequence
  chemically synthesized
taaaagatgccattaataagca

SEQ ID NO: 51124 - DNA, 22 bp, Artificial Sequence
  chemically synthesized
aaagatgccattaataagcatc

SEQ ID NO: 51125 - DNA, 22 bp, Artificial Sequence
  chemically synthesized
ataagcatccaactcgcctcct

SEQ ID NO: 51126 - DNA, 22 bp, Artificial Sequence
  chemically synthesized
gcctcctccctgagctgaaggt

SEQ ID NO: 51127 - DNA, 22 bp, Artificial Sequence
  chemically synthesized
ctccctgagctgaaggttgcct

SEQ ID NO: 51128 - DNA, 22 bp, Artificial Sequence
  chemically synthesized
cctgagctgaaggttgcctgtc

SEQ ID NO: 51129 - DNA, 22 bp, Artificial Sequence
  chemically synthesized
agctgaaggttgcctgtcctga

SEQ ID NO: 51130 - DNA, 22 bp, Artificial Sequence
  chemically synthesized
aaggttgcctgtcctgaccctg

SEQ ID NO: 51131 - DNA, 22 bp, Artificial Sequence
  chemically synthesized
cctgtcctgaccctgcctgcac

SEQ ID NO: 51132 - DNA, 22 bp, Artificial Sequence
  chemically synthesized
tcctgaccctgcctgcacgttt

SEQ ID NO: 51133 - DNA, 22 bp, Artificial Sequence
  chemically synthesized
accctgcctgcacgtttctaca

SEQ ID NO: 51134 - DNA, 22 bp, Artificial Sequence
  chemically synthesized
cctgcacgtttctacacccagt

SEQ ID NO: 51135 - DNA, 22 bp, Artificial Sequence
  chemically synthesized
cacgtttctacacccagttgca

SEQ ID NO: 51136 - DNA, 22 bp, Artificial Sequence
  chemically synthesized
ctacacccagttgcattttcca

SEQ ID NO: 51137 - DNA, 22 bp, Artificial Sequence
  chemically synthesized
tacacccagttgcattttccag

SEQ ID NO: 51138 - DNA, 22 bp, Artificial Sequence
  chemically synthesized
cacccagttgcattttccagcc

SEQ ID NO: 51139 - DNA, 22 bp, Artificial Sequence
  chemically synthesized
cattttccagcccatgtgcagc

SEQ ID NO: 51140 - DNA, 22 bp, Artificial Sequence
  chemically synthesized
tccagcccatgtgcagctccac

SEQ ID NO: 51141 - DNA, 22 bp, Artificial Sequence
  chemically synthesized
ccagcccatgtgcagctccaca

SEQ ID NO: 51142 - DNA, 22 bp, Artificial Sequence
  chemically synthesized
cagcccatgtgcagctccacaa

SEQ ID NO: 51143 - DNA, 22 bp, Artificial Sequence
  chemically synthesized
cacaattatatgccacattcac

SEQ ID NO: 51144 - DNA, 22 bp, Artificial Sequence
  chemically synthesized
tatgccacattcactaagagaa

SEQ ID NO: 51145 - DNA, 22 bp, Artificial Sequence
  chemically synthesized
actaagagaaaggtgtgcaaaa

SEQ ID NO: 51146 - DNA, 22 bp, Artificial Sequence
  chemically synthesized
agagaaaggtgtgcaaaacata

SEQ ID NO: 51147 - DNA, 22 bp, Artificial Sequence
  chemically synthesized
cagatcctttatagtaaaggca

SEQ ID NO: 51148 - DNA, 22 bp, Artificial Sequence
  chemically synthesized
agatcctttatagtaaaggcac

SEQ ID NO: 51149 - DNA, 22 bp, Artificial Sequence
  chemically synthesized
tatagtaaaggcacaacttgca

SEQ ID NO: 51150 - DNA, 22 bp, Artificial Sequence
  chemically synthesized
atagtaaaggcacaacttgcaa

SEQ ID NO: 51151 - DNA, 22 bp, Artificial Sequence
  chemically synthesized
tagtaaaggcacaacttgcaac

SEQ ID NO: 51152 - DNA, 22 bp, Artificial Sequence
  chemically synthesized
gcaacacaacaaggaatggggt

SEQ ID NO: 51153 - DNA, 22 bp, Artificial Sequence
  chemically synthesized
caacacaacaaggaatggggtg

SEQ ID NO: 51154 - DNA, 22 bp, Artificial Sequence
  chemically synthesized
aagaaattacagcactggtttt

SEQ ID NO: 51155 - DNA, 22 bp, Artificial Sequence
  chemically synthesized
agaaattacagcactggttttg

SEQ ID NO: 51156 - DNA, 22 bp, Artificial Sequence
  chemically synthesized
cagcactggttttgtgtgtgtg

SEQ ID NO: 51157 - DNA, 22 bp, Artificial Sequence
  chemically synthesized
gttttgtgtgtgtgtgtgtgtg

SEQ ID NO: 51158 - DNA, 22 bp, Artificial Sequence
  chemically synthesized
tgtgtgtgtgtgtgtgtgtgtg

SEQ ID NO: 51159 - DNA, 22 bp, Artificial Sequence
  chemically synthesized
gtgtgtgtgtgtgtgtgtgtgt

SEQ ID NO: 51160 - DNA, 22 bp, Artificial Sequence
  chemically synthesized
tgtgtgtgtgtgtgtgtgtgtg

SEQ ID NO: 51161 - DNA, 22 bp, Artificial Sequence
  chemically synthesized
ttttgtttttttgtttttttaa

SEQ ID NO: 51162 - DNA, 22 bp, Artificial Sequence
  chemically synthesized
tgtttttttgtttttttaagct

SEQ ID NO: 51163 - DNA, 22 bp, Artificial Sequence
  chemically synthesized
gtttttttgtttttttaagctt

SEQ ID NO: 51164 - DNA, 22 bp, Artificial Sequence
  chemically synthesized
tttttttgtttttttaagcttt

SEQ ID NO: 51165 - DNA, 22 bp, Artificial Sequence
  chemically synthesized
ttttgtttttttaagctttcac

SEQ ID NO: 51166 - DNA, 22 bp, Artificial Sequence
  chemically synthesized
tttgtttttttaagctttcaca

SEQ ID NO: 51167 - DNA, 22 bp, Artificial Sequence
  chemically synthesized
ttgtttttttaagctttcacag

SEQ ID NO: 51168 - DNA, 22 bp, Artificial Sequence
  chemically synthesized
tgtttttttaagctttcacaga

SEQ ID NO: 51169 - DNA, 22 bp, Artificial Sequence
  chemically synthesized
gtttttttaagctttcacagaa

SEQ ID NO: 51170 - DNA, 22 bp, Artificial Sequence
  chemically synthesized
tttttttaagctttcacagaat

SEQ ID NO: 51171 - DNA, 22 bp, Artificial Sequence
  chemically synthesized
ttttaagctttcacagaataaa

SEQ ID NO: 51172 - DNA, 22 bp, Artificial Sequence
  chemically synthesized
tttaagctttcacagaataaac

SEQ ID NO: 51173 - DNA, 22 bp, Artificial Sequence
  chemically synthesized
ttaagctttcacagaataaaca

SEQ ID NO: 51174 - DNA, 22 bp, Artificial Sequence
  chemically synthesized
taagctttcacagaataaacac

SEQ ID NO: 51175 - DNA, 22 bp, Artificial Sequence
  chemically synthesized
aagctttcacagaataaacaca

SEQ ID NO: 51176 - DNA, 22 bp, Artificial Sequence
  chemically synthesized
agctttcacagaataaacacag

SEQ ID NO: 51177 - DNA, 22 bp, Artificial Sequence
  chemically synthesized
tcacagaataaacacagagaac

SEQ ID NO: 51178 - DNA, 22 bp, Artificial Sequence
  chemically synthesized
cacagaataaacacagagaacg

SEQ ID NO: 51179 - DNA, 22 bp, Artificial Sequence
  chemically synthesized
acagaataaacacagagaacgg

SEQ ID NO: 51180 - DNA, 22 bp, Artificial Sequence
  chemically synthesized
tgtccccctctgctcctgttct

SEQ ID NO: 51181 - DNA, 22 bp, Artificial Sequence
  chemically synthesized
gtccccctctgctcctgttctt

SEQ ID NO: 51182 - DNA, 22 bp, Artificial Sequence
  chemically synthesized
tccccctctgctcctgttcttg

SEQ ID NO: 51183 - DNA, 22 bp, Artificial Sequence
  chemically synthesized
tgctcctgttcttgaagtgaat

SEQ ID NO: 51184 - DNA, 22 bp, Artificial Sequence
  chemically synthesized
ctcctgttcttgaagtgaatac

SEQ ID NO: 51185 - DNA, 22 bp, Artificial Sequence
  chemically synthesized
ctgttcttgaagtgaatacata

SEQ ID NO: 51186 - DNA, 22 bp, Artificial Sequence
  chemically synthesized
ttcttgaagtgaatacatattt

SEQ ID NO: 51187 - DNA, 22 bp, Artificial Sequence
  chemically synthesized
ttgaagtgaatacatatttgtg

SEQ ID NO: 51188 - DNA, 22 bp, Artificial Sequence
  chemically synthesized
gaagtgaatacatatttgtgtt

SEQ ID NO: 51189 - DNA, 22 bp, Artificial Sequence
  chemically synthesized
aagtgaatacatatttgtgttt

SEQ ID NO: 51190 - DNA, 22 bp, Artificial Sequence
  chemically synthesized
gtgtttccaataaaaggccatt

SEQ ID NO: 51191 - DNA, 22 bp, Artificial Sequence
  chemically synthesized
tgtttccaataaaaggccattt

SEQ ID NO: 51192 - DNA, 22 bp, Artificial Sequence
  chemically synthesized
ccaataaaaggccatttttaca

SEQ ID NO: 51193 - DNA, 22 bp, Artificial Sequence
  chemically synthesized
caataaaaggccatttttacat

SEQ ID NO: 51194 - DNA, 22 bp, Artificial Sequence
  chemically synthesized
ttacattaactgtctgtaacag

SEQ ID NO: 51195 - DNA, 22 bp, Artificial Sequence
  chemically synthesized
tacattaactgtctgtaacagc

SEQ ID NO: 51196 - DNA, 22 bp, Artificial Sequence
  chemically synthesized
acattaactgtctgtaacagca

SEQ ID NO: 51197 - DNA, 22 bp, Artificial Sequence
  chemically synthesized
cattaactgtctgtaacagcag

SEQ ID NO: 51198 - DNA, 22 bp, Artificial Sequence
  chemically synthesized
actgtctgtaacagcaggagac

SEQ ID NO: 51199 - DNA, 22 bp, Artificial Sequence
  chemically synthesized
tctgtaacagcaggagacagaa

SEQ ID NO: 51200 - DNA, 22 bp, Artificial Sequence
  chemically synthesized
taacagcaggagacagaaaaac

SEQ ID NO: 51201 - DNA, 22 bp, Artificial Sequence
  chemically synthesized
acacaatctccacatcacacac

SEQ ID NO: 51202 - DNA, 22 bp, Artificial Sequence
  chemically synthesized
cacatcacacacaggatgatct

SEQ ID NO: 51203 - DNA, 22 bp, Artificial Sequence
  chemically synthesized
catatcacgtggacctattctc

SEQ ID NO: 51204 - DNA, 22 bp, Artificial Sequence
  chemically synthesized
atatcacgtggacctattctca

SEQ ID NO: 51205 - DNA, 22 bp, Artificial Sequence
  chemically synthesized
ttctcaaaacattatttataaa

SEQ ID NO: 51206 - DNA, 22 bp, Artificial Sequence
  chemically synthesized
tcaaaacattatttataaaaga

SEQ ID NO: 51207 - DNA, 22 bp, Artificial Sequence
  chemically synthesized
aaaacattatttataaaagatg

SEQ ID NO: 51208 - DNA, 22 bp, Artificial Sequence
  chemically synthesized
tttataaaagatgactaggaaa

SEQ ID NO: 51209 - DNA, 22 bp, Artificial Sequence
  chemically synthesized
ataaaagatgactaggaaaatg

SEQ ID NO: 51210 - DNA, 22 bp, Artificial Sequence
  chemically synthesized
taaaagatgactaggaaaatgc

SEQ ID NO: 51211 - DNA, 22 bp, Artificial Sequence
  chemically synthesized
ggaaaatgcacaatgcatcttt

SEQ ID NO: 51212 - DNA, 22 bp, Artificial Sequence
  chemically synthesized
ttctgtgtcaccacaagggtaa

SEQ ID NO: 51213 - DNA, 22 bp, Artificial Sequence
  chemically synthesized
tctgtgtcaccacaagggtaat

SEQ ID NO: 51214 - DNA, 22 bp, Artificial Sequence
  chemically synthesized
ctgtgtcaccacaagggtaatg

SEQ ID NO: 51215 - DNA, 22 bp, Artificial Sequence
  chemically synthesized
tgtgtcaccacaagggtaatgt

SEQ ID NO: 51216 - DNA, 22 bp, Artificial Sequence
  chemically synthesized
tgtcaccacaagggtaatgtct

SEQ ID NO: 51217 - DNA, 22 bp, Artificial Sequence
  chemically synthesized
aagaagtttgggatctttagga

SEQ ID NO: 51218 - DNA, 22 bp, Artificial Sequence
  chemically synthesized
gggatctttaggatcttctaca

SEQ ID NO: 51219 - DNA, 22 bp, Artificial Sequence
  chemically synthesized
ggatctttaggatcttctacat

SEQ ID NO: 51220 - DNA, 22 bp, Artificial Sequence
  chemically synthesized
taggatcttctacattttagat

SEQ ID NO: 51221 - DNA, 22 bp, Artificial Sequence
  chemically synthesized
aggatcttctacattttagata

SEQ ID NO: 51222 - DNA, 22 bp, Artificial Sequence
  chemically synthesized
ggatcttctacattttagatat

SEQ ID NO: 51223 - DNA, 22 bp, Artificial Sequence
  chemically synthesized
ctacattttagatatatttttt

SEQ ID NO: 51224 - DNA, 22 bp, Artificial Sequence
  chemically synthesized
tacattttagatatattttttt

SEQ ID NO: 51225 - DNA, 22 bp, Artificial Sequence
  chemically synthesized
cattttagatatattttttttt

SEQ ID NO: 51226 - DNA, 22 bp, Artificial Sequence
  chemically synthesized
tagatatattttttttttcctt

SEQ ID NO: 51227 - DNA, 22 bp, Artificial Sequence
  chemically synthesized
agatatattttttttttccttt

SEQ ID NO: 51228 - DNA, 22 bp, Artificial Sequence
  chemically synthesized
gatatattttttttttcctttt

SEQ ID NO: 51229 - DNA, 22 bp, Artificial Sequence
  chemically synthesized
tttttttccttttggctttcct

SEQ ID NO: 51230 - DNA, 22 bp, Artificial Sequence
  chemically synthesized
ttttttccttttggctttcctt

SEQ ID NO: 51231 - DNA, 22 bp, Artificial Sequence
  chemically synthesized
tttttccttttggctttcctta

SEQ ID NO: 51232 - DNA, 22 bp, Artificial Sequence
  chemically synthesized
ttttccttttggctttccttag

SEQ ID NO: 51233 - DNA, 22 bp, Artificial Sequence
  chemically synthesized
tttccttttggctttccttagt

SEQ ID NO: 51234 - DNA, 22 bp, Artificial Sequence
  chemically synthesized
ttccttttggctttccttagta

SEQ ID NO: 51235 - DNA, 22 bp, Artificial Sequence
  chemically synthesized
tccttttggctttccttagtaa

SEQ ID NO: 51236 - DNA, 22 bp, Artificial Sequence
  chemically synthesized
ccttttggctttccttagtaag

SEQ ID NO: 51237 - DNA, 22 bp, Artificial Sequence
  chemically synthesized
cttttggctttccttagtaagt

SEQ ID NO: 51238 - DNA, 22 bp, Artificial Sequence
  chemically synthesized
ttggctttccttagtaagttta

SEQ ID NO: 51239 - DNA, 22 bp, Artificial Sequence
  chemically synthesized
tggctttccttagtaagtttag

SEQ ID NO: 51240 - DNA, 22 bp, Artificial Sequence
  chemically synthesized
ggctttccttagtaagtttagc

SEQ ID NO: 51241 - DNA, 22 bp, Artificial Sequence
  chemically synthesized
gctttccttagtaagtttagca

SEQ ID NO: 51242 - DNA, 22 bp, Artificial Sequence
  chemically synthesized
tccttagtaagtttagcagcca

SEQ ID NO: 51243 - DNA, 22 bp, Artificial Sequence
  chemically synthesized
ccttagtaagtttagcagccat

SEQ ID NO: 51244 - DNA, 22 bp, Artificial Sequence
  chemically synthesized
cttagtaagtttagcagccatg

SEQ ID NO: 51245 - DNA, 22 bp, Artificial Sequence
  chemically synthesized
agtaagtttagcagccatgcgg

SEQ ID NO: 51246 - DNA, 22 bp, Artificial Sequence
  chemically synthesized
gtaagtttagcagccatgcggg

SEQ ID NO: 51247 - DNA, 22 bp, Artificial Sequence
  chemically synthesized
agcagccatgcgggccactgtg

SEQ ID NO: 51248 - DNA, 22 bp, Artificial Sequence
  chemically synthesized
gcagccatgcgggccactgtgt

SEQ ID NO: 51249 - DNA, 22 bp, Artificial Sequence
  chemically synthesized
tgtttaattaagctttcaaaag

SEQ ID NO: 51250 - DNA, 22 bp, Artificial Sequence
  chemically synthesized
aattaagctttcaaaagtcctg

SEQ ID NO: 51251 - DNA, 22 bp, Artificial Sequence
  chemically synthesized
attaagctttcaaaagtcctga

SEQ ID NO: 51252 - DNA, 22 bp, Artificial Sequence
  chemically synthesized
agctttcaaaagtcctgacaat

SEQ ID NO: 51253 - DNA, 22 bp, Artificial Sequence
  chemically synthesized
tcaaaagtcctgacaatgccaa

SEQ ID NO: 51254 - DNA, 22 bp, Artificial Sequence
  chemically synthesized
caaaagtcctgacaatgccaac

SEQ ID NO: 51255 - DNA, 22 bp, Artificial Sequence
  chemically synthesized
aaaagtcctgacaatgccaaca

SEQ ID NO: 51256 - DNA, 22 bp, Artificial Sequence
  chemically synthesized
acaatgccaacaattgtaggac

SEQ ID NO: 51257 - DNA, 22 bp, Artificial Sequence
  chemically synthesized
taggacacttctgcggctcaat

SEQ ID NO: 51258 - DNA, 22 bp, Artificial Sequence
  chemically synthesized
ctgcggctcaatcatgcaatca

SEQ ID NO: 51259 - DNA, 22 bp, Artificial Sequence
  chemically synthesized
tgcggctcaatcatgcaatcac

SEQ ID NO: 51260 - DNA, 22 bp, Artificial Sequence
  chemically synthesized
cggctcaatcatgcaatcactg

SEQ ID NO: 51261 - DNA, 22 bp, Artificial Sequence
  chemically synthesized
aatcatgcaatcactgtgacag

SEQ ID NO: 51262 - DNA, 22 bp, Artificial Sequence
  chemically synthesized
tgacagttctatttacaatttg

SEQ ID NO: 51263 - DNA, 22 bp, Artificial Sequence
  chemically synthesized
tatttacaatttgtcttagaaa

SEQ ID NO: 51264 - DNA, 22 bp, Artificial Sequence
  chemically synthesized
tttacaatttgtcttagaaaga

SEQ ID NO: 51265 - DNA, 22 bp, Artificial Sequence
  chemically synthesized
acaatttgtcttagaaagagtt

SEQ ID NO: 51266 - DNA, 22 bp, Artificial Sequence
  chemically synthesized
caatttgtcttagaaagagttt

SEQ ID NO: 51267 - DNA, 22 bp, Artificial Sequence
  chemically synthesized
gtcttagaaagagtttctctga

SEQ ID NO: 51268 - DNA, 22 bp, Artificial Sequence
  chemically synthesized
tcttagaaagagtttctctgac

SEQ ID NO: 51269 - DNA, 22 bp, Artificial Sequence
  chemically synthesized
agaaagagtttctctgacattg

SEQ ID NO: 51270 - DNA, 22 bp, Artificial Sequence
  chemically synthesized
gaaagagtttctctgacattgt

SEQ ID NO: 51271 - DNA, 22 bp, Artificial Sequence
  chemically synthesized
ctctgacattgtactttgacaa

SEQ ID NO: 51272 - DNA, 22 bp, Artificial Sequence
  chemically synthesized
tctgacattgtactttgacaaa

SEQ ID NO: 51273 - DNA, 22 bp, Artificial Sequence
  chemically synthesized
tgacattgtactttgacaaaac

SEQ ID NO: 51274 - DNA, 22 bp, Artificial Sequence
  chemically synthesized
acattgtactttgacaaaacat

SEQ ID NO: 51275 - DNA, 22 bp, Artificial Sequence
  chemically synthesized
tactttgacaaaacatccaagc

SEQ ID NO: 51276 - DNA, 22 bp, Artificial Sequence
  chemically synthesized
tgacaaaacatccaagctgcca

SEQ ID NO: 51277 - DNA, 22 bp, Artificial Sequence
  chemically synthesized
gacaaaacatccaagctgccag

SEQ ID NO: 51278 - DNA, 22 bp, Artificial Sequence
  chemically synthesized
acaaaacatccaagctgccagt

SEQ ID NO: 51279 - DNA, 22 bp, Artificial Sequence
  chemically synthesized
ccagttcacaacctttctctgt

SEQ ID NO: 51280 - DNA, 22 bp, Artificial Sequence
  chemically synthesized
acaacctttctctgtcttattt

SEQ ID NO: 51281 - DNA, 22 bp, Artificial Sequence
  chemically synthesized
tctctgtcttatttacaaatac

SEQ ID NO: 51282 - DNA, 22 bp, Artificial Sequence
  chemically synthesized
ctctgtcttatttacaaataca

SEQ ID NO: 51283 - DNA, 22 bp, Artificial Sequence
  chemically synthesized
tctgtcttatttacaaatacag

SEQ ID NO: 51284 - DNA, 22 bp, Artificial Sequence
  chemically synthesized
tgtcttatttacaaatacagct

SEQ ID NO: 51285 - DNA, 22 bp, Artificial Sequence
  chemically synthesized
tcttatttacaaatacagcttg

SEQ ID NO: 51286 - DNA, 22 bp, Artificial Sequence
  chemically synthesized
atttacaaatacagcttgtata

SEQ ID NO: 51287 - DNA, 22 bp, Artificial Sequence
  chemically synthesized
tttacaaatacagcttgtatat

SEQ ID NO: 51288 - DNA, 22 bp, Artificial Sequence
  chemically synthesized
acaaatacagcttgtatatagg

SEQ ID NO: 51289 - DNA, 22 bp, Artificial Sequence
  chemically synthesized
caaatacagcttgtatatagga

SEQ ID NO: 51290 - DNA, 22 bp, Artificial Sequence
  chemically synthesized
gtatataggactcccagtttca

SEQ ID NO: 51291 - DNA, 22 bp, Artificial Sequence
  chemically synthesized
tatataggactcccagtttcat

SEQ ID NO: 51292 - DNA, 22 bp, Artificial Sequence
  chemically synthesized
ccagtttcatgaacattagtct

SEQ ID NO: 51293 - DNA, 22 bp, Artificial Sequence
  chemically synthesized
catgaacattagtctttggata

SEQ ID NO: 51294 - DNA, 22 bp, Artificial Sequence
  chemically synthesized
atgaacattagtctttggatag

SEQ ID NO: 51295 - DNA, 22 bp, Artificial Sequence
  chemically synthesized
gtctttggatagtggcctcaca

SEQ ID NO: 51296 - DNA, 22 bp, Artificial Sequence
  chemically synthesized
tggatagtggcctcacaaacat

SEQ ID NO: 51297 - DNA, 22 bp, Artificial Sequence
  chemically synthesized
ggatagtggcctcacaaacata

SEQ ID NO: 51298 - DNA, 22 bp, Artificial Sequence
  chemically synthesized
gatagtggcctcacaaacatag

SEQ ID NO: 51299 - DNA, 22 bp, Artificial Sequence
  chemically synthesized
acaaacataggctccctatgaa

SEQ ID NO: 51300 - DNA, 22 bp, Artificial Sequence
  chemically synthesized
cctatgaaaatcctaggtactt

SEQ ID NO: 51301 - DNA, 22 bp, Artificial Sequence
  chemically synthesized
tgaaaatcctaggtacttatta

SEQ ID NO: 51302 - DNA, 22 bp, Artificial Sequence
  chemically synthesized
ggtacttattagaaaacaatat

SEQ ID NO: 51303 - DNA, 22 bp, Artificial Sequence
  chemically synthesized
attagaaaacaatattctctac

SEQ ID NO: 51304 - DNA, 22 bp, Artificial Sequence
  chemically synthesized
ttagaaaacaatattctctact

SEQ ID NO: 51305 - DNA, 22 bp, Artificial Sequence
  chemically synthesized
gaaaacaatattctctactctc

SEQ ID NO: 51306 - DNA, 22 bp, Artificial Sequence
  chemically synthesized
tctactctctggattttgaagg

SEQ ID NO: 51307 - DNA, 22 bp, Artificial Sequence
  chemically synthesized
tactctctggattttgaaggta

SEQ ID NO: 51308 - DNA, 22 bp, Artificial Sequence
  chemically synthesized
ctctctggattttgaaggtaag

SEQ ID NO: 51309 - DNA, 22 bp, Artificial Sequence
  chemically synthesized
tctggattttgaaggtaagtaa

SEQ ID NO: 51310 - DNA, 22 bp, Artificial Sequence
  chemically synthesized
tggattttgaaggtaagtaaaa

SEQ ID NO: 51311 - DNA, 22 bp, Artificial Sequence
  chemically synthesized
gattttgaaggtaagtaaaatg

SEQ ID NO: 51312 - DNA, 22 bp, Artificial Sequence
  chemically synthesized
tgaaggtaagtaaaatgttcac

SEQ ID NO: 51313 - DNA, 22 bp, Artificial Sequence
  chemically synthesized
gaaggtaagtaaaatgttcacc

SEQ ID NO: 51314 - DNA, 22 bp, Artificial Sequence
  chemically synthesized
aaggtaagtaaaatgttcacca

SEQ ID NO: 51315 - DNA, 22 bp, Artificial Sequence
  chemically synthesized
accagtatattgttttttgtgg

SEQ ID NO: 51316 - DNA, 22 bp, Artificial Sequence
  chemically synthesized
ttttttgtggtagtggtgtttt

SEQ ID NO: 51317 - DNA, 22 bp, Artificial Sequence
  chemically synthesized
tttgtggtagtggtgttttttt

SEQ ID NO: 51318 - DNA, 22 bp, Artificial Sequence
  chemically synthesized
ttgtggtagtggtgtttttttg

SEQ ID NO: 51319 - DNA, 22 bp, Artificial Sequence
  chemically synthesized
tgtggtagtggtgtttttttgt

SEQ ID NO: 51320 - DNA, 22 bp, Artificial Sequence
  chemically synthesized
gtggtagtggtgtttttttgtt

SEQ ID NO: 51321 - DNA, 22 bp, Artificial Sequence
  chemically synthesized
tggtagtggtgtttttttgttt

SEQ ID NO: 51322 - DNA, 22 bp, Artificial Sequence
  chemically synthesized
ttttgttttaactgccatgctg

SEQ ID NO: 51323 - DNA, 22 bp, Artificial Sequence
  chemically synthesized
tttgttttaactgccatgctga

SEQ ID NO: 51324 - DNA, 22 bp, Artificial Sequence
  chemically synthesized
ttgttttaactgccatgctgaa

SEQ ID NO: 51325 - DNA, 22 bp, Artificial Sequence
  chemically synthesized
tgttttaactgccatgctgaaa

SEQ ID NO: 51326 - DNA, 22 bp, Artificial Sequence
  chemically synthesized
gttttaactgccatgctgaaaa

SEQ ID NO: 51327 - DNA, 22 bp, Artificial Sequence
  chemically synthesized
ttttaactgccatgctgaaaat

SEQ ID NO: 51328 - DNA, 22 bp, Artificial Sequence
  chemically synthesized
taactgccatgctgaaaattca

SEQ ID NO: 51329 - DNA, 22 bp, Artificial Sequence
  chemically synthesized
aactgccatgctgaaaattcac

SEQ ID NO: 51330 - DNA, 22 bp, Artificial Sequence
  chemically synthesized
actgccatgctgaaaattcact

SEQ ID NO: 51331 - DNA, 22 bp, Artificial Sequence
  chemically synthesized
ccatgctgaaaattcacttcag

SEQ ID NO: 51332 - DNA, 22 bp, Artificial Sequence
  chemically synthesized
aaaattcacttcagaagtcagt

SEQ ID NO: 51333 - DNA, 22 bp, Artificial Sequence
  chemically synthesized
acttcagaagtcagtcgttttt

SEQ ID NO: 51334 - DNA, 22 bp, Artificial Sequence
  chemically synthesized
cagaagtcagtcgtttttattc

SEQ ID NO: 51335 - DNA, 22 bp, Artificial Sequence
  chemically synthesized
agaagtcagtcgtttttattca

SEQ ID NO: 51336 - DNA, 22 bp, Artificial Sequence
  chemically synthesized
ttattcagaatcacataaataa

SEQ ID NO: 51337 - DNA, 22 bp, Artificial Sequence
  chemically synthesized
tattcagaatcacataaataaa

SEQ ID NO: 51338 - DNA, 22 bp, Artificial Sequence
  chemically synthesized
attcagaatcacataaataaag

SEQ ID NO: 51339 - DNA, 22 bp, Artificial Sequence
  chemically synthesized
ttcagaatcacataaataaaga

SEQ ID NO: 51340 - DNA, 22 bp, Artificial Sequence
  chemically synthesized
agaatcacataaataaagagaa

SEQ ID NO: 51341 - DNA, 22 bp, Artificial Sequence
  chemically synthesized
taatttatagtctcatttacaa

SEQ ID NO: 51342 - DNA, 22 bp, Artificial Sequence
  chemically synthesized
atagtctcatttacaattacac

SEQ ID NO: 51343 - DNA, 22 bp, Artificial Sequence
  chemically synthesized
tagtctcatttacaattacacc

SEQ ID NO: 51344 - DNA, 22 bp, Artificial Sequence
  chemically synthesized
atttacaattacaccataaggt

SEQ ID NO: 51345 - DNA, 22 bp, Artificial Sequence
  chemically synthesized
acaattacaccataaggtacac

SEQ ID NO: 51346 - DNA, 22 bp, Artificial Sequence
  chemically synthesized
caattacaccataaggtacaca

SEQ ID NO: 51347 - DNA, 22 bp, Artificial Sequence
  chemically synthesized
caccataaggtacacaaataca

SEQ ID NO: 51348 - DNA, 22 bp, Artificial Sequence
  chemically synthesized
cagttcagtctgagctaggaga

SEQ ID NO: 51349 - DNA, 22 bp, Artificial Sequence
  chemically synthesized
agtctgagctaggagagaatca

SEQ ID NO: 51350 - DNA, 22 bp, Artificial Sequence
  chemically synthesized
agctaggagagaatcagaatgg

SEQ ID NO: 51351 - DNA, 22 bp, Artificial Sequence
  chemically synthesized
ggagagaatcagaatggataca

SEQ ID NO: 51352 - DNA, 22 bp, Artificial Sequence
  chemically synthesized
attttctaaattctgaaaagca

SEQ ID NO: 51353 - DNA, 22 bp, Artificial Sequence
  chemically synthesized
tctaaattctgaaaagcatatt

SEQ ID NO: 51354 - DNA, 22 bp, Artificial Sequence
  chemically synthesized
ctaaattctgaaaagcatattg

SEQ ID NO: 51355 - DNA, 22 bp, Artificial Sequence
  chemically synthesized
taaattctgaaaagcatattgt

SEQ ID NO: 51356 - DNA, 22 bp, Artificial Sequence
  chemically synthesized
aattctgaaaagcatattgtat

SEQ ID NO: 51357 - DNA, 22 bp, Artificial Sequence
  chemically synthesized
tgaaaagcatattgtatttgat

SEQ ID NO: 51358 - DNA, 22 bp, Artificial Sequence
  chemically synthesized
aaaagcatattgtatttgattt

SEQ ID NO: 51359 - DNA, 22 bp, Artificial Sequence
  chemically synthesized
tatttgatttacttttaagagc

SEQ ID NO: 51360 - DNA, 22 bp, Artificial Sequence
  chemically synthesized
gatttacttttaagagcatgct

SEQ ID NO: 51361 - DNA, 22 bp, Artificial Sequence
  chemically synthesized
atttacttttaagagcatgcta

SEQ ID NO: 51362 - DNA, 22 bp, Artificial Sequence
  chemically synthesized
acttttaagagcatgctaatgt

SEQ ID NO: 51363 - DNA, 22 bp, Artificial Sequence
  chemically synthesized
cttttaagagcatgctaatgta

SEQ ID NO: 51364 - DNA, 22 bp, Artificial Sequence
  chemically synthesized
ttaagagcatgctaatgtattt

SEQ ID NO: 51365 - DNA, 22 bp, Artificial Sequence
  chemically synthesized
taagagcatgctaatgtatttc

SEQ ID NO: 51366 - DNA, 22 bp, Artificial Sequence
  chemically synthesized
aagagcatgctaatgtatttcc

SEQ ID NO: 51367 - DNA, 22 bp, Artificial Sequence
  chemically synthesized
agagcatgctaatgtatttcca

SEQ ID NO: 51368 - DNA, 22 bp, Artificial Sequence
  chemically synthesized
atgtatttccattttgaattac

SEQ ID NO: 51369 - DNA, 22 bp, Artificial Sequence
  chemically synthesized
ccattttgaattactatatctc

SEQ ID NO: 51370 - DNA, 22 bp, Artificial Sequence
  chemically synthesized
cattttgaattactatatctcc

SEQ ID NO: 51371 - DNA, 22 bp, Artificial Sequence
  chemically synthesized
tgaattactatatctcccttct

SEQ ID NO: 51372 - DNA, 22 bp, Artificial Sequence
  chemically synthesized
gaattactatatctcccttctt

SEQ ID NO: 51373 - DNA, 22 bp, Artificial Sequence
  chemically synthesized
aattactatatctcccttcttt

SEQ ID NO: 51374 - DNA, 22 bp, Artificial Sequence
  chemically synthesized
ctatatctcccttctttagagt

SEQ ID NO: 51375 - DNA, 22 bp, Artificial Sequence
  chemically synthesized
tatctcccttctttagagtatc

SEQ ID NO: 51376 - DNA, 22 bp, Artificial Sequence
  chemically synthesized
ccttctttagagtatctgtctg

SEQ ID NO: 51377 - DNA, 22 bp, Artificial Sequence
  chemically synthesized
ctttagagtatctgtctgatat

SEQ ID NO: 51378 - DNA, 22 bp, Artificial Sequence
  chemically synthesized
tttagagtatctgtctgatata

SEQ ID NO: 51379 - DNA, 22 bp, Artificial Sequence
  chemically synthesized
tagagtatctgtctgatatatc

SEQ ID NO: 51380 - DNA, 22 bp, Artificial Sequence
  chemically synthesized
agagtatctgtctgatatatca

SEQ ID NO: 51381 - DNA, 22 bp, Artificial Sequence
  chemically synthesized
gagtatctgtctgatatatcat

SEQ ID NO: 51382 - DNA, 22 bp, Artificial Sequence
  chemically synthesized
tctgatatatcattatctaaat

SEQ ID NO: 51383 - DNA, 22 bp, Artificial Sequence
  chemically synthesized
atatatcattatctaaatacca

SEQ ID NO: 51384 - DNA, 22 bp, Artificial Sequence
  chemically synthesized
tctaaataccagctatactgtc

SEQ ID NO: 51385 - DNA, 22 bp, Artificial Sequence
  chemically synthesized
aataccagctatactgtctagg

SEQ ID NO: 51386 - DNA, 22 bp, Artificial Sequence
  chemically synthesized
tactgtctaggcaaataatttt

SEQ ID NO: 51387 - DNA, 22 bp, Artificial Sequence
  chemically synthesized
tctaggcaaataattttaaata

SEQ ID NO: 51388 - DNA, 22 bp, Artificial Sequence
  chemically synthesized
ggcaaataattttaaataccct

SEQ ID NO: 51389 - DNA, 22 bp, Artificial Sequence
  chemically synthesized
taaataccctgatataaatgtc

SEQ ID NO: 51390 - DNA, 22 bp, Artificial Sequence
  chemically synthesized
aaataccctgatataaatgtct

SEQ ID NO: 51391 - DNA, 22 bp, Artificial Sequence
  chemically synthesized
aataccctgatataaatgtcta

SEQ ID NO: 51392 - DNA, 22 bp, Artificial Sequence
  chemically synthesized
atataaatgtctatgttcatga

SEQ ID NO: 51393 - DNA, 22 bp, Artificial Sequence
  chemically synthesized
tgttcatgattttaaagagaaa

SEQ ID NO: 51394 - DNA, 22 bp, Artificial Sequence
  chemically synthesized
atgattttaaagagaaaaaatg

SEQ ID NO: 51395 - DNA, 22 bp, Artificial Sequence
  chemically synthesized
taaagagaaaaaatgttatata

SEQ ID NO: 51396 - DNA, 22 bp, Artificial Sequence
  chemically synthesized
aaagagaaaaaatgttatatat

SEQ ID NO: 51397 - DNA, 22 bp, Artificial Sequence
  chemically synthesized
aagagaaaaaatgttatatatc

SEQ ID NO: 51398 - DNA, 22 bp, Artificial Sequence
  chemically synthesized
tatatcaacaggagcagacttt

SEQ ID NO: 51399 - DNA, 22 bp, Artificial Sequence
  chemically synthesized
tactacattttataggacttgt

SEQ ID NO: 51400 - DNA, 22 bp, Artificial Sequence
  chemically synthesized
actacattttataggacttgtc

SEQ ID NO: 51401 - DNA, 22 bp, Artificial Sequence
  chemically synthesized
ctacattttataggacttgtca

SEQ ID NO: 51402 - DNA, 22 bp, Artificial Sequence
  chemically synthesized
cattttataggacttgtcatat

SEQ ID NO: 51403 - DNA, 22 bp, Artificial Sequence
  chemically synthesized
tataggacttgtcatatttttt

SEQ ID NO: 51404 - DNA, 22 bp, Artificial Sequence
  chemically synthesized
ataggacttgtcatattttttc

SEQ ID NO: 51405 - DNA, 22 bp, Artificial Sequence
  chemically synthesized
taggacttgtcatattttttct

SEQ ID NO: 51406 - DNA, 22 bp, Artificial Sequence
  chemically synthesized
gtcatattttttctctagtctc

SEQ ID NO: 51407 - DNA, 22 bp, Artificial Sequence
  chemically synthesized
tcatattttttctctagtctct

SEQ ID NO: 51408 - DNA, 22 bp, Artificial Sequence
  chemically synthesized
tttctctagtctctcaaaaagc

SEQ ID NO: 51409 - DNA, 22 bp, Artificial Sequence
  chemically synthesized
ttctctagtctctcaaaaagct

SEQ ID NO: 51410 - DNA, 22 bp, Artificial Sequence
  chemically synthesized
tctctagtctctcaaaaagcta

SEQ ID NO: 51411 - DNA, 22 bp, Artificial Sequence
  chemically synthesized
ctctagtctctcaaaaagctaa

SEQ ID NO: 51412 - DNA, 22 bp, Artificial Sequence
  chemically synthesized
tctagtctctcaaaaagctaac

SEQ ID NO: 51413 - DNA, 22 bp, Artificial Sequence
  chemically synthesized
tagtctctcaaaaagctaactt

SEQ ID NO: 51414 - DNA, 22 bp, Artificial Sequence
  chemically synthesized
gtctctcaaaaagctaacttta

SEQ ID NO: 51415 - DNA, 22 bp, Artificial Sequence
  chemically synthesized
tcaaaaagctaactttatgaca

SEQ ID NO: 51416 - DNA, 22 bp, Artificial Sequence
  chemically synthesized
aaaaagctaactttatgacagc

SEQ ID NO: 51417 - DNA, 22 bp, Artificial Sequence
  chemically synthesized
actttatgacagcccaaaccta

SEQ ID NO: 51418 - DNA, 22 bp, Artificial Sequence
  chemically synthesized
tatgacagcccaaacctaattt

SEQ ID NO: 51419 - DNA, 22 bp, Artificial Sequence
  chemically synthesized
atgacagcccaaacctaattta

SEQ ID NO: 51420 - DNA, 22 bp, Artificial Sequence
  chemically synthesized
tgacagcccaaacctaatttaa

SEQ ID NO: 51421 - DNA, 22 bp, Artificial Sequence
  chemically synthesized
atttaaagattcctatgtgcaa

SEQ ID NO: 51422 - DNA, 22 bp, Artificial Sequence
  chemically synthesized
aaagattcctatgtgcaataag

SEQ ID NO: 51423 - DNA, 22 bp, Artificial Sequence
  chemically synthesized
aagattcctatgtgcaataagc

SEQ ID NO: 51424 - DNA, 22 bp, Artificial Sequence
  chemically synthesized
ctatgtgcaataagccaaaacc

SEQ ID NO: 51425 - DNA, 22 bp, Artificial Sequence
  chemically synthesized
tgtgcaataagccaaaacctca

SEQ ID NO: 51426 - DNA, 22 bp, Artificial Sequence
  chemically synthesized
aaatctgacatgatgggataat

SEQ ID NO: 51427 - DNA, 22 bp, Artificial Sequence
  chemically synthesized
acatgatgggataatgtttggg

SEQ ID NO: 51428 - DNA, 22 bp, Artificial Sequence
  chemically synthesized
gggtcttttctataagggaaca

SEQ ID NO: 51429 - DNA, 22 bp, Artificial Sequence
  chemically synthesized
ggtcttttctataagggaacag

SEQ ID NO: 51430 - DNA, 22 bp, Artificial Sequence
  chemically synthesized
ttctataagggaacagcagttt

SEQ ID NO: 51431 - DNA, 22 bp, Artificial Sequence
  chemically synthesized
tctataagggaacagcagtttc

SEQ ID NO: 51432 - DNA, 22 bp, Artificial Sequence
  chemically synthesized
ctataagggaacagcagtttca

SEQ ID NO: 51433 - DNA, 22 bp, Artificial Sequence
  chemically synthesized
tataagggaacagcagtttcac

SEQ ID NO: 51434 - DNA, 22 bp, Artificial Sequence
  chemically synthesized
taagggaacagcagtttcacat

SEQ ID NO: 51435 - DNA, 22 bp, Artificial Sequence
  chemically synthesized
cacattcagtaatcttccatga

SEQ ID NO: 51436 - DNA, 22 bp, Artificial Sequence
  chemically synthesized
acattcagtaatcttccatgaa

SEQ ID NO: 51437 - DNA, 22 bp, Artificial Sequence
  chemically synthesized
agtaatcttccatgaatatttc

SEQ ID NO: 51438 - DNA, 22 bp, Artificial Sequence
  chemically synthesized
ccatgaatatttccccccatca

SEQ ID NO: 51439 - DNA, 22 bp, Artificial Sequence
  chemically synthesized
catgaatatttccccccatcat

SEQ ID NO: 51440 - DNA, 22 bp, Artificial Sequence
  chemically synthesized
ccccccatcataaaatatgaga

SEQ ID NO: 51441 - DNA, 22 bp, Artificial Sequence
  chemically synthesized
cccccatcataaaatatgagac

SEQ ID NO: 51442 - DNA, 22 bp, Artificial Sequence
  chemically synthesized
aaaaaaaagaaaacaaaacaaa

SEQ ID NO: 51443 - DNA, 22 bp, Artificial Sequence
  chemically synthesized
ttgaaagctctgactgcaagtc

SEQ ID NO: 51444 - DNA, 22 bp, Artificial Sequence
  chemically synthesized
aaagctctgactgcaagtcaaa

SEQ ID NO: 51445 - DNA, 22 bp, Artificial Sequence
  chemically synthesized
tgactgcaagtcaaaggctgct

SEQ ID NO: 51446 - DNA, 22 bp, Artificial Sequence
  chemically synthesized
actgcaagtcaaaggctgctga

SEQ ID NO: 51447 - DNA, 22 bp, Artificial Sequence
  chemically synthesized
caagtcaaaggctgctgatatc

SEQ ID NO: 51448 - DNA, 22 bp, Artificial Sequence
  chemically synthesized
ctgatatctgagggtggatatt

SEQ ID NO: 51449 - DNA, 22 bp, Artificial Sequence
  chemically synthesized
atatctgagggtggatatttga

SEQ ID NO: 51450 - DNA, 22 bp, Artificial Sequence
  chemically synthesized
agggtggatatttgacacacat

SEQ ID NO: 51451 - DNA, 22 bp, Artificial Sequence
  chemically synthesized
gacacacatattgatgaactgg

SEQ ID NO: 51452 - DNA, 22 bp, Artificial Sequence
  chemically synthesized
acacacatattgatgaactggg

SEQ ID NO: 51453 - DNA, 22 bp, Artificial Sequence
  chemically synthesized
atgaactgggcccacacaacat

SEQ ID NO: 51454 - DNA, 22 bp, Artificial Sequence
  chemically synthesized
ggcccacacaacataagctgct

SEQ ID NO: 51455 - DNA, 22 bp, Artificial Sequence
  chemically synthesized
ctaattcccagctaaattaata

SEQ ID NO: 51456 - DNA, 22 bp, Artificial Sequence
  chemically synthesized
attcccagctaaattaatacta

SEQ ID NO: 51457 - DNA, 22 bp, Artificial Sequence
  chemically synthesized
ccagctaaattaatactacttc

SEQ ID NO: 51458 - DNA, 22 bp, Artificial Sequence
  chemically synthesized
aattaatactacttcaatgatc

SEQ ID NO: 51459 - DNA, 22 bp, Artificial Sequence
  chemically synthesized
atactacttcaatgatctcaat

SEQ ID NO: 51460 - DNA, 22 bp, Artificial Sequence
  chemically synthesized
cttcaatgatctcaatggatca

SEQ ID NO: 51461 - DNA, 22 bp, Artificial Sequence
  chemically synthesized
caatgatctcaatggatcacaa

SEQ ID NO: 51462 - DNA, 22 bp, Artificial Sequence
  chemically synthesized
aatgatctcaatggatcacaat

SEQ ID NO: 51463 - DNA, 22 bp, Artificial Sequence
  chemically synthesized
aatggatcacaatcacacaata

SEQ ID NO: 51464 - DNA, 22 bp, Artificial Sequence
  chemically synthesized
tgaatatttaaataaaatgaaa

SEQ ID NO: 51465 - DNA, 22 bp, Artificial Sequence
  chemically synthesized
gaatatttaaataaaatgaaaa

SEQ ID NO: 51466 - DNA, 22 bp, Artificial Sequence
  chemically synthesized
aatatttaaataaaatgaaaaa

SEQ ID NO: 51467 - DNA, 22 bp, Artificial Sequence
  chemically synthesized
aaataaaatgaaaaaagcaacc

SEQ ID NO: 51468 - DNA, 22 bp, Artificial Sequence
  chemically synthesized
aataaaatgaaaaaagcaacct

SEQ ID NO: 51469 - DNA, 22 bp, Artificial Sequence
  chemically synthesized
attaacatctatgtgtacagct

SEQ ID NO: 51470 - DNA, 22 bp, Artificial Sequence
  chemically synthesized
acatctatgtgtacagctcata

SEQ ID NO: 51471 - DNA, 22 bp, Artificial Sequence
  chemically synthesized
tgtgtacagctcatatgtgtac

SEQ ID NO: 51472 - DNA, 22 bp, Artificial Sequence
  chemically synthesized
atatgtgtacgtggatgaagtg

SEQ ID NO: 51473 - DNA, 22 bp, Artificial Sequence
  chemically synthesized
ttcaccaggtaaaaagaatcct

SEQ ID NO: 51474 - DNA, 22 bp, Artificial Sequence
  chemically synthesized
accaggtaaaaagaatcctcta

SEQ ID NO: 51475 - DNA, 22 bp, Artificial Sequence
  chemically synthesized
taaaaaatactcagtttgggcc

SEQ ID NO: 51476 - DNA, 22 bp, Artificial Sequence
  chemically synthesized
aaaaatactcagtttgggccag

SEQ ID NO: 51477 - DNA, 22 bp, Artificial Sequence
  chemically synthesized
agtttgggccaggtgcggtcgc

SEQ ID NO: 51478 - DNA, 22 bp, Artificial Sequence
  chemically synthesized
gggccaggtgcggtcgctcaag

SEQ ID NO: 51479 - DNA, 22 bp, Artificial Sequence
  chemically synthesized
ggccaggtgcggtcgctcaagc

SEQ ID NO: 51480 - DNA, 22 bp, Artificial Sequence
  chemically synthesized
aagcctgtaatcccagcacttt

SEQ ID NO: 51481 - DNA, 22 bp, Artificial Sequence
  chemically synthesized
taatcccagcactttgggaggc

SEQ ID NO: 51482 - DNA, 22 bp, Artificial Sequence
  chemically synthesized
tgggaggccaagccaggtggat

SEQ ID NO: 51483 - DNA, 22 bp, Artificial Sequence
  chemically synthesized
gggaggccaagccaggtggatc

SEQ ID NO: 51484 - DNA, 22 bp, Artificial Sequence
  chemically synthesized
ggaggccaagccaggtggatca

SEQ ID NO: 51485 - DNA, 22 bp, Artificial Sequence
  chemically synthesized
aggtcaggagttcaagaccagc

SEQ ID NO: 51486 - DNA, 22 bp, Artificial Sequence
  chemically synthesized
aagaccagcctggccaacatgg

SEQ ID NO: 51487 - DNA, 22 bp, Artificial Sequence
  chemically synthesized
gccaacatggtgaaaccctgcc

SEQ ID NO: 51488 - DNA, 22 bp, Artificial Sequence
  chemically synthesized
cctctactgaaaatacaaaaaa

SEQ ID NO: 51489 - DNA, 22 bp, Artificial Sequence
  chemically synthesized
tactgaaaatacaaaaaactag

SEQ ID NO: 51490 - DNA, 22 bp, Artificial Sequence
  chemically synthesized
ctgaaaatacaaaaaactagct

SEQ ID NO: 51491 - DNA, 22 bp, Artificial Sequence
  chemically synthesized
aaaatacaaaaaactagctggg

SEQ ID NO: 51492 - DNA, 22 bp, Artificial Sequence
  chemically synthesized
gctgggcgtagtggcacacgcc

SEQ ID NO: 51493 - DNA, 22 bp, Artificial Sequence
  chemically synthesized
ggcgtagtggcacacgcctgta

SEQ ID NO: 51494 - DNA, 22 bp, Artificial Sequence
  chemically synthesized
taatcccagctacttgggaggc

SEQ ID NO: 51495 - DNA, 22 bp, Artificial Sequence
  chemically synthesized
cttgggaggctgaggcaggaga

SEQ ID NO: 51496 - DNA, 22 bp, Artificial Sequence
  chemically synthesized
gggaggctgaggcaggagaatc

SEQ ID NO: 51497 - DNA, 22 bp, Artificial Sequence
  chemically synthesized
ggaggctgaggcaggagaatcg

SEQ ID NO: 51498 - DNA, 22 bp, Artificial Sequence
  chemically synthesized
aggcaggagaatcgcttgaacc

SEQ ID NO: 51499 - DNA, 22 bp, Artificial Sequence
  chemically synthesized
gaacctaggaggcagaggttgc

SEQ ID NO: 51500 - DNA, 22 bp, Artificial Sequence
  chemically synthesized
aacctaggaggcagaggttgca

SEQ ID NO: 51501 - DNA, 22 bp, Artificial Sequence
  chemically synthesized
ggaggcagaggttgcagtgagc

SEQ ID NO: 51502 - DNA, 22 bp, Artificial Sequence
  chemically synthesized
cagtgagccaaaatcatgccac

SEQ ID NO: 51503 - DNA, 22 bp, Artificial Sequence
  chemically synthesized
cactccagcctgggcaacaaga

SEQ ID NO: 51504 - DNA, 22 bp, Artificial Sequence
  chemically synthesized
cagcctgggcaacaagagcaaa

SEQ ID NO: 51505 - DNA, 22 bp, Artificial Sequence
  chemically synthesized
ggcaacaagagcaaaactctgt

SEQ ID NO: 51506 - DNA, 22 bp, Artificial Sequence
  chemically synthesized
tgtctaaaaaaaaaaaaaaaaa

SEQ ID NO: 51507 - DNA, 22 bp, Artificial Sequence
  chemically synthesized
tctaaaaaaaaaaaaaaaaaaa

SEQ ID NO: 51508 - DNA, 22 bp, Artificial Sequence
  chemically synthesized
aaaaaaaaaaaaaaaaaaaaaa

SEQ ID NO: 51509 - DNA, 22 bp, Artificial Sequence
  chemically synthesized
agcttggagaggcctgagtaca

SEQ ID NO: 51510 - DNA, 22 bp, Artificial Sequence
  chemically synthesized
ggagaggcctgagtacagtgaa

SEQ ID NO: 51511 - DNA, 22 bp, Artificial Sequence
  chemically synthesized
gagaggcctgagtacagtgaaa

SEQ ID NO: 51512 - DNA, 22 bp, Artificial Sequence
  chemically synthesized
agtacagtgaaaatgcatacca

SEQ ID NO: 51513 - DNA, 22 bp, Artificial Sequence
  chemically synthesized
tactcaagatttaaagaactct

SEQ ID NO: 51514 - DNA, 22 bp, Artificial Sequence
  chemically synthesized
actcaagatttaaagaactctg

SEQ ID NO: 51515 - DNA, 22 bp, Artificial Sequence
  chemically synthesized
ctcaagatttaaagaactctgc

SEQ ID NO: 51516 - DNA, 22 bp, Artificial Sequence
  chemically synthesized
aagatttaaagaactctgcctt

SEQ ID NO: 51517 - DNA, 22 bp, Artificial Sequence
  chemically synthesized
aaagaactctgccttattctcc

SEQ ID NO: 51518 - DNA, 22 bp, Artificial Sequence
  chemically synthesized
aagaactctgccttattctcct

SEQ ID NO: 51519 - DNA, 22 bp, Artificial Sequence
  chemically synthesized
tgccttattctcctatctgaaa

SEQ ID NO: 51520 - DNA, 22 bp, Artificial Sequence
  chemically synthesized
ccttattctcctatctgaaagt

SEQ ID NO: 51521 - DNA, 22 bp, Artificial Sequence
  chemically synthesized
attctcctatctgaaagtcccg

SEQ ID NO: 51522 - DNA, 22 bp, Artificial Sequence
  chemically synthesized
ttctcctatctgaaagtcccga

SEQ ID NO: 51523 - DNA, 22 bp, Artificial Sequence
  chemically synthesized
tcctatctgaaagtcccgaatt

SEQ ID NO: 51524 - DNA, 22 bp, Artificial Sequence
  chemically synthesized
ctatctgaaagtcccgaattct

SEQ ID NO: 51525 - DNA, 22 bp, Artificial Sequence
  chemically synthesized
tctgaaagtcccgaattctaag

SEQ ID NO: 51526 - DNA, 22 bp, Artificial Sequence
  chemically synthesized
aaagtcccgaattctaagcttt

SEQ ID NO: 51527 - DNA, 22 bp, Artificial Sequence
  chemically synthesized
taagctttatttatcttaggaa

SEQ ID NO: 51528 - DNA, 22 bp, Artificial Sequence
  chemically synthesized
agctttatttatcttaggaaga

SEQ ID NO: 51529 - DNA, 22 bp, Artificial Sequence
  chemically synthesized
tatttatcttaggaagaagatc

SEQ ID NO: 51530 - DNA, 22 bp, Artificial Sequence
  chemically synthesized
atttatcttaggaagaagatct

SEQ ID NO: 51531 - DNA, 22 bp, Artificial Sequence
  chemically synthesized
tttatcttaggaagaagatctg

SEQ ID NO: 51532 - DNA, 22 bp, Artificial Sequence
  chemically synthesized
atcttaggaagaagatctgtca

SEQ ID NO: 51533 - DNA, 22 bp, Artificial Sequence
  chemically synthesized
tcttaggaagaagatctgtcac

SEQ ID NO: 51534 - DNA, 22 bp, Artificial Sequence
  chemically synthesized
aggaagaagatctgtcactgtt

SEQ ID NO: 51535 - DNA, 22 bp, Artificial Sequence
  chemically synthesized
ggaagaagatctgtcactgttt

SEQ ID NO: 51536 - DNA, 22 bp, Artificial Sequence
  chemically synthesized
tcactgttttattcttgcttcc

SEQ ID NO: 51537 - DNA, 22 bp, Artificial Sequence
  chemically synthesized
ttttattcttgcttcctgccta

SEQ ID NO: 51538 - DNA, 22 bp, Artificial Sequence
  chemically synthesized
tattcttgcttcctgcctataa

SEQ ID NO: 51539 - DNA, 22 bp, Artificial Sequence
  chemically synthesized
attcttgcttcctgcctataaa

SEQ ID NO: 51540 - DNA, 22 bp, Artificial Sequence
  chemically synthesized
ttcttgcttcctgcctataaaa

SEQ ID NO: 51541 - DNA, 22 bp, Artificial Sequence
  chemically synthesized
ttgcttcctgcctataaaatag

SEQ ID NO: 51542 - DNA, 22 bp, Artificial Sequence
  chemically synthesized
gcttcctgcctataaaatagta

SEQ ID NO: 51543 - DNA, 22 bp, Artificial Sequence
  chemically synthesized
cttcctgcctataaaatagtac

SEQ ID NO: 51544 - DNA, 22 bp, Artificial Sequence
  chemically synthesized
cctgcctataaaatagtacagg

SEQ ID NO: 51545 - DNA, 22 bp, Artificial Sequence
  chemically synthesized
ctgcctataaaatagtacaggc

SEQ ID NO: 51546 - DNA, 22 bp, Artificial Sequence
  chemically synthesized
cctataaaatagtacaggctca

SEQ ID NO: 51547 - DNA, 22 bp, Artificial Sequence
  chemically synthesized
taaaatagtacaggctcacagt

SEQ ID NO: 51548 - DNA, 22 bp, Artificial Sequence
  chemically synthesized
acagtgaactcaaatccaactt

SEQ ID NO: 51549 - DNA, 22 bp, Artificial Sequence
  chemically synthesized
aaatccaacttacatcacttta

SEQ ID NO: 51550 - DNA, 22 bp, Artificial Sequence
  chemically synthesized
acatcactttaataaagccttt

SEQ ID NO: 51551 - DNA, 22 bp, Artificial Sequence
  chemically synthesized
catcactttaataaagcctttc

SEQ ID NO: 51552 - DNA, 22 bp, Artificial Sequence
  chemically synthesized
taataaagcctttcctacccag

SEQ ID NO: 51553 - DNA, 22 bp, Artificial Sequence
  chemically synthesized
aataaagcctttcctacccagc

SEQ ID NO: 51554 - DNA, 22 bp, Artificial Sequence
  chemically synthesized
ataaagcctttcctacccagca

SEQ ID NO: 51555 - DNA, 22 bp, Artificial Sequence
  chemically synthesized
tcctacccagcacgcttaaatg

SEQ ID NO: 51556 - DNA, 22 bp, Artificial Sequence
  chemically synthesized
cctacccagcacgcttaaatga

SEQ ID NO: 51557 - DNA, 22 bp, Artificial Sequence
  chemically synthesized
ctacccagcacgcttaaatgac

SEQ ID NO: 51558 - DNA, 22 bp, Artificial Sequence
  chemically synthesized
cccagcacgcttaaatgactac

SEQ ID NO: 51559 - DNA, 22 bp, Artificial Sequence
  chemically synthesized
aaatgactaccttttatgtggt

SEQ ID NO: 51560 - DNA, 22 bp, Artificial Sequence
  chemically synthesized
aatgactaccttttatgtggtt

SEQ ID NO: 51561 - DNA, 22 bp, Artificial Sequence
  chemically synthesized
ccttttatgtggttgccaaaca

SEQ ID NO: 51562 - DNA, 22 bp, Artificial Sequence
  chemically synthesized
ttatgtggttgccaaacacatt

SEQ ID NO: 51563 - DNA, 22 bp, Artificial Sequence
  chemically synthesized
tatgtggttgccaaacacattc

SEQ ID NO: 51564 - DNA, 22 bp, Artificial Sequence
  chemically synthesized
atgtggttgccaaacacattct

SEQ ID NO: 51565 - DNA, 22 bp, Artificial Sequence
  chemically synthesized
tgtggttgccaaacacattctt

SEQ ID NO: 51566 - DNA, 22 bp, Artificial Sequence
  chemically synthesized
ccaaacacattcttctagagat

SEQ ID NO: 51567 - DNA, 22 bp, Artificial Sequence
  chemically synthesized
ttctagagattcatcaatatat

SEQ ID NO: 51568 - DNA, 22 bp, Artificial Sequence
  chemically synthesized
ctagagattcatcaatatatct

SEQ ID NO: 51569 - DNA, 22 bp, Artificial Sequence
  chemically synthesized
tagagattcatcaatatatctc

SEQ ID NO: 51570 - DNA, 22 bp, Artificial Sequence
  chemically synthesized
gagattcatcaatatatctctt

SEQ ID NO: 51571 - DNA, 22 bp, Artificial Sequence
  chemically synthesized
atcaatatatctctttccttaa

SEQ ID NO: 51572 - DNA, 22 bp, Artificial Sequence
  chemically synthesized
tttccttaatacaaggcattgc

SEQ ID NO: 51573 - DNA, 22 bp, Artificial Sequence
  chemically synthesized
tccttaatacaaggcattgctt

SEQ ID NO: 51574 - DNA, 22 bp, Artificial Sequence
  chemically synthesized
ccttaatacaaggcattgcttc

SEQ ID NO: 51575 - DNA, 22 bp, Artificial Sequence
  chemically synthesized
cttaatacaaggcattgcttct

SEQ ID NO: 51576 - DNA, 22 bp, Artificial Sequence
  chemically synthesized
aatacaaggcattgcttctcct

SEQ ID NO: 51577 - DNA, 22 bp, Artificial Sequence
  chemically synthesized
atacaaggcattgcttctcctt

SEQ ID NO: 51578 - DNA, 22 bp, Artificial Sequence
  chemically synthesized
cttctcctttctttttgtgaca

SEQ ID NO: 51579 - DNA, 22 bp, Artificial Sequence
  chemically synthesized
ctcctttctttttgtgacacaa

SEQ ID NO: 51580 - DNA, 22 bp, Artificial Sequence
  chemically synthesized
tcctttctttttgtgacacaat

SEQ ID NO: 51581 - DNA, 22 bp, Artificial Sequence
  chemically synthesized
ctttctttttgtgacacaattc

SEQ ID NO: 51582 - DNA, 22 bp, Artificial Sequence
  chemically synthesized
tctttttgtgacacaattcaaa

SEQ ID NO: 51583 - DNA, 22 bp, Artificial Sequence
  chemically synthesized
ctttttgtgacacaattcaaat

SEQ ID NO: 51584 - DNA, 22 bp, Artificial Sequence
  chemically synthesized
tttttgtgacacaattcaaata

SEQ ID NO: 51585 - DNA, 22 bp, Artificial Sequence
  chemically synthesized
tttgtgacacaattcaaatatc

SEQ ID NO: 51586 - DNA, 22 bp, Artificial Sequence
  chemically synthesized
ttgtgacacaattcaaatatct

SEQ ID NO: 51587 - DNA, 22 bp, Artificial Sequence
  chemically synthesized
tgtgacacaattcaaatatcta

SEQ ID NO: 51588 - DNA, 22 bp, Artificial Sequence
  chemically synthesized
gtgacacaattcaaatatctac

SEQ ID NO: 51589 - DNA, 22 bp, Artificial Sequence
  chemically synthesized
tgacacaattcaaatatctact

SEQ ID NO: 51590 - DNA, 22 bp, Artificial Sequence
  chemically synthesized
aaatatctactgaatgattact

SEQ ID NO: 51591 - DNA, 22 bp, Artificial Sequence
  chemically synthesized
ctgaatgattactgttattgtt

SEQ ID NO: 51592 - DNA, 22 bp, Artificial Sequence
  chemically synthesized
aatgattactgttattgtttcc

SEQ ID NO: 51593 - DNA, 22 bp, Artificial Sequence
  chemically synthesized
ctgttattgtttccttcctcat

SEQ ID NO: 51594 - DNA, 22 bp, Artificial Sequence
  chemically synthesized
ttattgtttccttcctcatcat

SEQ ID NO: 51595 - DNA, 22 bp, Artificial Sequence
  chemically synthesized
ttgtttccttcctcatcataaa

SEQ ID NO: 51596 - DNA, 22 bp, Artificial Sequence
  chemically synthesized
tttccttcctcatcataaaaag

SEQ ID NO: 51597 - DNA, 22 bp, Artificial Sequence
  chemically synthesized
ccttcctcatcataaaaagaaa

SEQ ID NO: 51598 - DNA, 22 bp, Artificial Sequence
  chemically synthesized
cttcctcatcataaaaagaaaa

SEQ ID NO: 51599 - DNA, 22 bp, Artificial Sequence
  chemically synthesized
cctcatcataaaaagaaaagca

SEQ ID NO: 51600 - DNA, 22 bp, Artificial Sequence
  chemically synthesized
ctcatcataaaaagaaaagcag

SEQ ID NO: 51601 - DNA, 22 bp, Artificial Sequence
  chemically synthesized
atcataaaaagaaaagcagact

SEQ ID NO: 51602 - DNA, 22 bp, Artificial Sequence
  chemically synthesized
ggaattgtgcagacgtgcttta

SEQ ID NO: 51603 - DNA, 22 bp, Artificial Sequence
  chemically synthesized
gaattgtgcagacgtgctttag

SEQ ID NO: 51604 - DNA, 22 bp, Artificial Sequence
  chemically synthesized
tgcagacgtgctttagagaaat

SEQ ID NO: 51605 - DNA, 22 bp, Artificial Sequence
  chemically synthesized
tagagaaatgggctgggggtac

SEQ ID NO: 51606 - DNA, 22 bp, Artificial Sequence
  chemically synthesized
agagaaatgggctgggggtaca

SEQ ID NO: 51607 - DNA, 22 bp, Artificial Sequence
  chemically synthesized
gagaaatgggctgggggtacac

SEQ ID NO: 51608 - DNA, 22 bp, Artificial Sequence
  chemically synthesized
ggggtacacacacagccgtctt

SEQ ID NO: 51609 - DNA, 22 bp, Artificial Sequence
  chemically synthesized
ccagaacttcgcttcaggggca

SEQ ID NO: 51610 - DNA, 22 bp, Artificial Sequence
  chemically synthesized
cagaacttcgcttcaggggcac

SEQ ID NO: 51611 - DNA, 22 bp, Artificial Sequence
  chemically synthesized
cgcttcaggggcacctgagggc

SEQ ID NO: 51612 - DNA, 22 bp, Artificial Sequence
  chemically synthesized
gcttcaggggcacctgagggcc

SEQ ID NO: 51613 - DNA, 22 bp, Artificial Sequence
  chemically synthesized
caggggcacctgagggccagag

SEQ ID NO: 51614 - DNA, 22 bp, Artificial Sequence
  chemically synthesized
aggggcacctgagggccagagc

SEQ ID NO: 51615 - DNA, 22 bp, Artificial Sequence
  chemically synthesized
agggccagagcgtcggaattta

SEQ ID NO: 51616 - DNA, 22 bp, Artificial Sequence
  chemically synthesized
atgtgcaatggtagaatgttaa

SEQ ID NO: 51617 - DNA, 22 bp, Artificial Sequence
  chemically synthesized
tgtgcaatggtagaatgttaac

SEQ ID NO: 51618 - DNA, 22 bp, Artificial Sequence
  chemically synthesized
acttcaccataggaaactctta

SEQ ID NO: 51619 - DNA, 22 bp, Artificial Sequence
  chemically synthesized
caccataggaaactcttaattc

SEQ ID NO: 51620 - DNA, 22 bp, Artificial Sequence
  chemically synthesized
accataggaaactcttaattca

SEQ ID NO: 51621 - DNA, 22 bp, Artificial Sequence
  chemically synthesized
ttaattcattactgtgaattat

SEQ ID NO: 51622 - DNA, 22 bp, Artificial Sequence
  chemically synthesized
aattcattactgtgaattatga

SEQ ID NO: 51623 - DNA, 22 bp, Artificial Sequence
  chemically synthesized
attcattactgtgaattatgag

SEQ ID NO: 51624 - DNA, 22 bp, Artificial Sequence
  chemically synthesized
attactgtgaattatgagaagt

SEQ ID NO: 51625 - DNA, 22 bp, Artificial Sequence
  chemically synthesized
ctgtgaattatgagaagtcgtg

SEQ ID NO: 51626 - DNA, 22 bp, Artificial Sequence
  chemically synthesized
tgaattatgagaagtcgtgatt

SEQ ID NO: 51627 - DNA, 22 bp, Artificial Sequence
  chemically synthesized
tgagaagtcgtgattctagtta

SEQ ID NO: 51628 - DNA, 22 bp, Artificial Sequence
  chemically synthesized
tagttactgacatctcactttg

SEQ ID NO: 51629 - DNA, 22 bp, Artificial Sequence
  chemically synthesized
gttactgacatctcactttgag

SEQ ID NO: 51630 - DNA, 22 bp, Artificial Sequence
  chemically synthesized
ctgacatctcactttgagatgt

SEQ ID NO: 51631 - DNA, 22 bp, Artificial Sequence
  chemically synthesized
acatctcactttgagatgtgac

SEQ ID NO: 51632 - DNA, 22 bp, Artificial Sequence
  chemically synthesized
actttgagatgtgaccacacta

SEQ ID NO: 51633 - DNA, 22 bp, Artificial Sequence
  chemically synthesized
tgagatgtgaccacactattta

SEQ ID NO: 51634 - DNA, 22 bp, Artificial Sequence
  chemically synthesized
gagatgtgaccacactatttat

SEQ ID NO: 51635 - DNA, 22 bp, Artificial Sequence
  chemically synthesized
agatgtgaccacactatttatg

SEQ ID NO: 51636 - DNA, 22 bp, Artificial Sequence
  chemically synthesized
tttatgttcagccagttccagg

SEQ ID NO: 51637 - DNA, 22 bp, Artificial Sequence
  chemically synthesized
atgttcagccagttccagggtg

SEQ ID NO: 51638 - DNA, 22 bp, Artificial Sequence
  chemically synthesized
tgttcagccagttccagggtgg

SEQ ID NO: 51639 - DNA, 22 bp, Artificial Sequence
  chemically synthesized
agccagttccagggtgggaaca

SEQ ID NO: 51640 - DNA, 22 bp, Artificial Sequence
  chemically synthesized
cagggtgggaacaggtgattaa

SEQ ID NO: 51641 - DNA, 22 bp, Artificial Sequence
  chemically synthesized
aacacaatgaaagaaatcaaga

SEQ ID NO: 51642 - DNA, 22 bp, Artificial Sequence
  chemically synthesized
tgtaattattcatgcacgaaag

SEQ ID NO: 51643 - DNA, 22 bp, Artificial Sequence
  chemically synthesized
gtaattattcatgcacgaaagg

SEQ ID NO: 51644 - DNA, 22 bp, Artificial Sequence
  chemically synthesized
taattattcatgcacgaaaggt

SEQ ID NO: 51645 - DNA, 22 bp, Artificial Sequence
  chemically synthesized
ttcatgcacgaaaggtttacct

SEQ ID NO: 51646 - DNA, 22 bp, Artificial Sequence
  chemically synthesized
atgcacgaaaggtttacctcac

SEQ ID NO: 51647 - DNA, 22 bp, Artificial Sequence
  chemically synthesized
acctcacctgggtcacagcact

SEQ ID NO: 51648 - DNA, 22 bp, Artificial Sequence
  chemically synthesized
cctcacctgggtcacagcactt

SEQ ID NO: 51649 - DNA, 22 bp, Artificial Sequence
  chemically synthesized
acctgggtcacagcacttgttg

SEQ ID NO: 51650 - DNA, 22 bp, Artificial Sequence
  chemically synthesized
ggtcacagcacttgttgtgcgc

SEQ ID NO: 51651 - DNA, 22 bp, Artificial Sequence
  chemically synthesized
gttgtgcgcccattgaatatct

SEQ ID NO: 51652 - DNA, 22 bp, Artificial Sequence
  chemically synthesized
ttgtgcgcccattgaatatctt

SEQ ID NO: 51653 - DNA, 22 bp, Artificial Sequence
  chemically synthesized
tgcgcccattgaatatcttaga

SEQ ID NO: 51654 - DNA, 22 bp, Artificial Sequence
  chemically synthesized
aatatcttagacatcttagaga

SEQ ID NO: 51655 - DNA, 22 bp, Artificial Sequence
  chemically synthesized
agacatcttagagagcttttcg

SEQ ID NO: 51656 - DNA, 22 bp, Artificial Sequence
  chemically synthesized
gacatcttagagagcttttcgt

SEQ ID NO: 51657 - DNA, 22 bp, Artificial Sequence
  chemically synthesized
agagagcttttcgtctcagtta

SEQ ID NO: 51658 - DNA, 22 bp, Artificial Sequence
  chemically synthesized
gagagcttttcgtctcagttaa

SEQ ID NO: 51659 - DNA, 22 bp, Artificial Sequence
  chemically synthesized
ttcgtctcagttaaatgattga

SEQ ID NO: 51660 - DNA, 22 bp, Artificial Sequence
  chemically synthesized
tcgtctcagttaaatgattgat

SEQ ID NO: 51661 - DNA, 22 bp, Artificial Sequence
  chemically synthesized
cgtctcagttaaatgattgatt

SEQ ID NO: 51662 - DNA, 22 bp, Artificial Sequence
  chemically synthesized
gtctcagttaaatgattgatta

SEQ ID NO: 51663 - DNA, 22 bp, Artificial Sequence
  chemically synthesized
agttaaatgattgattattagc

SEQ ID NO: 51664 - DNA, 22 bp, Artificial Sequence
  chemically synthesized
aatgattgattattagcgctat

SEQ ID NO: 51665 - DNA, 22 bp, Artificial Sequence
  chemically synthesized
attattagcgctataaaatata

SEQ ID NO: 51666 - DNA, 22 bp, Artificial Sequence
  chemically synthesized
ttagcgctataaaatatatttt

SEQ ID NO: 51667 - DNA, 22 bp, Artificial Sequence
  chemically synthesized
gcgctataaaatatattttaaa

SEQ ID NO: 51668 - DNA, 22 bp, Artificial Sequence
  chemically synthesized
taaaatatattttaaatttgct

SEQ ID NO: 51669 - DNA, 22 bp, Artificial Sequence
  chemically synthesized
taaatttgcttttggttttggc

SEQ ID NO: 51670 - DNA, 22 bp, Artificial Sequence
  chemically synthesized
aaatttgcttttggttttggct

SEQ ID NO: 51671 - DNA, 22 bp, Artificial Sequence
  chemically synthesized
aatttgcttttggttttggctt

SEQ ID NO: 51672 - DNA, 22 bp, Artificial Sequence
  chemically synthesized
gcttttggttttggcttctcta

SEQ ID NO: 51673 - DNA, 22 bp, Artificial Sequence
  chemically synthesized
cttttggttttggcttctctag

SEQ ID NO: 51674 - DNA, 22 bp, Artificial Sequence
  chemically synthesized
ttggttttggcttctctaggct

SEQ ID NO: 51675 - DNA, 22 bp, Artificial Sequence
  chemically synthesized
tggttttggcttctctaggctc

SEQ ID NO: 51676 - DNA, 22 bp, Artificial Sequence
  chemically synthesized
ggttttggcttctctaggctct

SEQ ID NO: 51677 - DNA, 22 bp, Artificial Sequence
  chemically synthesized
gttttggcttctctaggctctg

SEQ ID NO: 51678 - DNA, 22 bp, Artificial Sequence
  chemically synthesized
tggcttctctaggctctgctat

SEQ ID NO: 51679 - DNA, 22 bp, Artificial Sequence
  chemically synthesized
ggcttctctaggctctgctatt

SEQ ID NO: 51680 - DNA, 22 bp, Artificial Sequence
  chemically synthesized
gcttctctaggctctgctatta

SEQ ID NO: 51681 - DNA, 22 bp, Artificial Sequence
  chemically synthesized
ctctaggctctgctattatact

SEQ ID NO: 51682 - DNA, 22 bp, Artificial Sequence
  chemically synthesized
tctaggctctgctattatactt

SEQ ID NO: 51683 - DNA, 22 bp, Artificial Sequence
  chemically synthesized
taggctctgctattatacttgt

SEQ ID NO: 51684 - DNA, 22 bp, Artificial Sequence
  chemically synthesized
ggctctgctattatacttgttc

SEQ ID NO: 51685 - DNA, 22 bp, Artificial Sequence
  chemically synthesized
tgctattatacttgttctttaa

SEQ ID NO: 51686 - DNA, 22 bp, Artificial Sequence
  chemically synthesized
ctattatacttgttctttaaaa

SEQ ID NO: 51687 - DNA, 22 bp, Artificial Sequence
  chemically synthesized
ttatacttgttctttaaaaaaa

SEQ ID NO: 51688 - DNA, 22 bp, Artificial Sequence
  chemically synthesized
tacttgttctttaaaaaaataa

SEQ ID NO: 51689 - DNA, 22 bp, Artificial Sequence
  chemically synthesized
gttctttaaaaaaataataaca

SEQ ID NO: 51690 - DNA, 22 bp, Artificial Sequence
  chemically synthesized
ttctttaaaaaaataataacag

SEQ ID NO: 51691 - DNA, 22 bp, Artificial Sequence
  chemically synthesized
tttaaaaaaataataacagaac

SEQ ID NO: 51692 - DNA, 22 bp, Artificial Sequence
  chemically synthesized
taaaaaaataataacagaacct

SEQ ID NO: 51693 - DNA, 22 bp, Artificial Sequence
  chemically synthesized
aaaaaaataataacagaacctt

SEQ ID NO: 51694 - DNA, 22 bp, Artificial Sequence
  chemically synthesized
aaaaaataataacagaaccttt

SEQ ID NO: 51695 - DNA, 22 bp, Artificial Sequence
  chemically synthesized
tagacaaccagggagttcaagc

SEQ ID NO: 51696 - DNA, 22 bp, Artificial Sequence
  chemically synthesized
agacaaccagggagttcaagca

SEQ ID NO: 51697 - DNA, 22 bp, Artificial Sequence
  chemically synthesized
gacaaccagggagttcaagcaa

SEQ ID NO: 51698 - DNA, 22 bp, Artificial Sequence
  chemically synthesized
aagcaaatatctcttatttccc

SEQ ID NO: 51699 - DNA, 22 bp, Artificial Sequence
  chemically synthesized
ttatttccctacatagattcac

SEQ ID NO: 51700 - DNA, 22 bp, Artificial Sequence
  chemically synthesized
atttccctacatagattcacaa

SEQ ID NO: 51701 - DNA, 22 bp, Artificial Sequence
  chemically synthesized
tttccctacatagattcacaac

SEQ ID NO: 51702 - DNA, 22 bp, Artificial Sequence
  chemically synthesized
ccctacatagattcacaactat

SEQ ID NO: 51703 - DNA, 22 bp, Artificial Sequence
  chemically synthesized
cctacatagattcacaactata

SEQ ID NO: 51704 - DNA, 22 bp, Artificial Sequence
  chemically synthesized
catagattcacaactatagcag

SEQ ID NO: 51705 - DNA, 22 bp, Artificial Sequence
  chemically synthesized
acaactatagcagtaaaagtct

SEQ ID NO: 51706 - DNA, 22 bp, Artificial Sequence
  chemically synthesized
tagcagtaaaagtcttaactat

SEQ ID NO: 51707 - DNA, 22 bp, Artificial Sequence
  chemically synthesized
aactatatgtaaggccttcccc

SEQ ID NO: 51708 - DNA, 22 bp, Artificial Sequence
  chemically synthesized
actatatgtaaggccttccccc

SEQ ID NO: 51709 - DNA, 22 bp, Artificial Sequence
  chemically synthesized
tatgtaaggccttccccccagc

SEQ ID NO: 51710 - DNA, 22 bp, Artificial Sequence
  chemically synthesized
ccccccagcatttagattcctc

SEQ ID NO: 51711 - DNA, 22 bp, Artificial Sequence
  chemically synthesized
cccccagcatttagattcctcc

SEQ ID NO: 51712 - DNA, 22 bp, Artificial Sequence
  chemically synthesized
agattcctcctctaaatacaga

SEQ ID NO: 51713 - DNA, 22 bp, Artificial Sequence
  chemically synthesized
gattcctcctctaaatacagag

SEQ ID NO: 51714 - DNA, 22 bp, Artificial Sequence
  chemically synthesized
ctcctctaaatacagaggcaca

SEQ ID NO: 51715 - DNA, 22 bp, Artificial Sequence
  chemically synthesized
ctctaaatacagaggcacagaa

SEQ ID NO: 51716 - DNA, 22 bp, Artificial Sequence
  chemically synthesized
taaatacagaggcacagaattt

SEQ ID NO: 51717 - DNA, 22 bp, Artificial Sequence
  chemically synthesized
aatacagaggcacagaattttt

SEQ ID NO: 51718 - DNA, 22 bp, Artificial Sequence
  chemically synthesized
ttgagctggttaatctaagact

SEQ ID NO: 51719 - DNA, 22 bp, Artificial Sequence
  chemically synthesized
tgagctggttaatctaagactg

SEQ ID NO: 51720 - DNA, 22 bp, Artificial Sequence
  chemically synthesized
gagctggttaatctaagactga

SEQ ID NO: 51721 - DNA, 22 bp, Artificial Sequence
  chemically synthesized
agctggttaatctaagactgaa

SEQ ID NO: 51722 - DNA, 22 bp, Artificial Sequence
  chemically synthesized
gttaatctaagactgaataacc

SEQ ID NO: 51723 - DNA, 22 bp, Artificial Sequence
  chemically synthesized
atctaagactgaataacctatt

SEQ ID NO: 51724 - DNA, 22 bp, Artificial Sequence
  chemically synthesized
agactgaataacctatttggga

SEQ ID NO: 51725 - DNA, 22 bp, Artificial Sequence
  chemically synthesized
aataacctatttgggacctcag

SEQ ID NO: 51726 - DNA, 22 bp, Artificial Sequence
  chemically synthesized
tttgggacctcagtaagaagtg

SEQ ID NO: 51727 - DNA, 22 bp, Artificial Sequence
  chemically synthesized
gggacctcagtaagaagtgtgg

SEQ ID NO: 51728 - DNA, 22 bp, Artificial Sequence
  chemically synthesized
ggacctcagtaagaagtgtggt

SEQ ID NO: 51729 - DNA, 22 bp, Artificial Sequence
  chemically synthesized
agtaagaagtgtggttttaatt

SEQ ID NO: 51730 - DNA, 22 bp, Artificial Sequence
  chemically synthesized
taattcttgcttgacagacact

SEQ ID NO: 51731 - DNA, 22 bp, Artificial Sequence
  chemically synthesized
aattcttgcttgacagacactg

SEQ ID NO: 51732 - DNA, 22 bp, Artificial Sequence
  chemically synthesized
attcttgcttgacagacactgt

SEQ ID NO: 51733 - DNA, 22 bp, Artificial Sequence
  chemically synthesized
ttgcttgacagacactgtgttt

SEQ ID NO: 51734 - DNA, 22 bp, Artificial Sequence
  chemically synthesized
gcttgacagacactgtgttttg

SEQ ID NO: 51735 - DNA, 22 bp, Artificial Sequence
  chemically synthesized
cttgacagacactgtgttttgt

SEQ ID NO: 51736 - DNA, 22 bp, Artificial Sequence
  chemically synthesized
gacagacactgtgttttgtctt

SEQ ID NO: 51737 - DNA, 22 bp, Artificial Sequence
  chemically synthesized
acagacactgtgttttgtcttt

SEQ ID NO: 51738 - DNA, 22 bp, Artificial Sequence
  chemically synthesized
tgttttgtcttttaaacgagca

SEQ ID NO: 51739 - DNA, 22 bp, Artificial Sequence
  chemically synthesized
tgtcttttaaacgagcagctcg

SEQ ID NO: 51740 - DNA, 22 bp, Artificial Sequence
  chemically synthesized
gtcttttaaacgagcagctcga

SEQ ID NO: 51741 - DNA, 22 bp, Artificial Sequence
  chemically synthesized
tcttttaaacgagcagctcgat

SEQ ID NO: 51742 - DNA, 22 bp, Artificial Sequence
  chemically synthesized
ttaaacgagcagctcgatatgt

SEQ ID NO: 51743 - DNA, 22 bp, Artificial Sequence
  chemically synthesized
taaacgagcagctcgatatgta

SEQ ID NO: 51744 - DNA, 22 bp, Artificial Sequence
  chemically synthesized
aaacgagcagctcgatatgtaa

SEQ ID NO: 51745 - DNA, 22 bp, Artificial Sequence
  chemically synthesized
aacgagcagctcgatatgtaaa

SEQ ID NO: 51746 - DNA, 22 bp, Artificial Sequence
  chemically synthesized
gatatgtaaatacgatgttaca

SEQ ID NO: 51747 - DNA, 22 bp, Artificial Sequence
  chemically synthesized
catcacgcaagtgttactccat

SEQ ID NO: 51748 - DNA, 22 bp, Artificial Sequence
  chemically synthesized
ctccatatttggtgatttagca

SEQ ID NO: 51749 - DNA, 22 bp, Artificial Sequence
  chemically synthesized
catatttggtgatttagcaagg

SEQ ID NO: 51750 - DNA, 22 bp, Artificial Sequence
  chemically synthesized
ggtgatttagcaaggctttgga

SEQ ID NO: 51751 - DNA, 22 bp, Artificial Sequence
  chemically synthesized
gtgatttagcaaggctttggat

SEQ ID NO: 51752 - DNA, 22 bp, Artificial Sequence
  chemically synthesized
agcaaggctttggatctccgaa

SEQ ID NO: 51753 - DNA, 22 bp, Artificial Sequence
  chemically synthesized
gcaaggctttggatctccgaag

SEQ ID NO: 51754 - DNA, 22 bp, Artificial Sequence
  chemically synthesized
tggatctccgaagacgacaaat

SEQ ID NO: 51755 - DNA, 22 bp, Artificial Sequence
  chemically synthesized
ggatctccgaagacgacaaatc

SEQ ID NO: 51756 - DNA, 22 bp, Artificial Sequence
  chemically synthesized
gatctccgaagacgacaaatcc

SEQ ID NO: 51757 - DNA, 22 bp, Artificial Sequence
  chemically synthesized
cgaagacgacaaatccccttcc

SEQ ID NO: 51758 - DNA, 22 bp, Artificial Sequence
  chemically synthesized
ccgcctgctcttgcttcattaa

SEQ ID NO: 51759 - DNA, 22 bp, Artificial Sequence
  chemically synthesized
cgcctgctcttgcttcattaat

SEQ ID NO: 51760 - DNA, 22 bp, Artificial Sequence
  chemically synthesized
ctcttgcttcattaatcatgcc

SEQ ID NO: 51761 - DNA, 22 bp, Artificial Sequence
  chemically synthesized
ttgcttcattaatcatgcctta

SEQ ID NO: 51762 - DNA, 22 bp, Artificial Sequence
  chemically synthesized
gcttcattaatcatgccttaca

SEQ ID NO: 51763 - DNA, 22 bp, Artificial Sequence
  chemically synthesized
cttcattaatcatgccttacac

SEQ ID NO: 51764 - DNA, 22 bp, Artificial Sequence
  chemically synthesized
cattaatcatgccttacacttc

SEQ ID NO: 51765 - DNA, 22 bp, Artificial Sequence
  chemically synthesized
attaatcatgccttacacttct

SEQ ID NO: 51766 - DNA, 22 bp, Artificial Sequence
  chemically synthesized
atcatgccttacacttctgttc

SEQ ID NO: 51767 - DNA, 22 bp, Artificial Sequence
  chemically synthesized
acacttctgttcattttccttc

SEQ ID NO: 51768 - DNA, 22 bp, Artificial Sequence
  chemically synthesized
cacttctgttcattttccttcc

SEQ ID NO: 51769 - DNA, 22 bp, Artificial Sequence
  chemically synthesized
ctgttcattttccttccagtca

SEQ ID NO: 51770 - DNA, 22 bp, Artificial Sequence
  chemically synthesized
tgttcattttccttccagtcac

SEQ ID NO: 51771 - DNA, 22 bp, Artificial Sequence
  chemically synthesized
ttcattttccttccagtcacaa

SEQ ID NO: 51772 - DNA, 22 bp, Artificial Sequence
  chemically synthesized
attttccttccagtcacaagac

SEQ ID NO: 51773 - DNA, 22 bp, Artificial Sequence
  chemically synthesized
tccttccagtcacaagacaaca

SEQ ID NO: 51774 - DNA, 22 bp, Artificial Sequence
  chemically synthesized
ccttccagtcacaagacaacac

SEQ ID NO: 51775 - DNA, 22 bp, Artificial Sequence
  chemically synthesized
cttccagtcacaagacaacaca

SEQ ID NO: 51776 - DNA, 22 bp, Artificial Sequence
  chemically synthesized
ccagtcacaagacaacacatgg

SEQ ID NO: 51777 - DNA, 22 bp, Artificial Sequence
  chemically synthesized
cagtcacaagacaacacatgga

SEQ ID NO: 51778 - DNA, 22 bp, Artificial Sequence
  chemically synthesized
ccacatcctgctggggggtagg

SEQ ID NO: 51779 - DNA, 22 bp, Artificial Sequence
  chemically synthesized
ctggggggtaggggagataaaa

SEQ ID NO: 51780 - DNA, 22 bp, Artificial Sequence
  chemically synthesized
gggggtaggggagataaaatct

SEQ ID NO: 51781 - DNA, 22 bp, Artificial Sequence
  chemically synthesized
cacctacatgtcacataaggta

SEQ ID NO: 51782 - DNA, 22 bp, Artificial Sequence
  chemically synthesized
acctacatgtcacataaggtaa

SEQ ID NO: 51783 - DNA, 22 bp, Artificial Sequence
  chemically synthesized
catgtcacataaggtaaatgtg

SEQ ID NO: 51784 - DNA, 22 bp, Artificial Sequence
  chemically synthesized
aagaaatacactccacaaatgc

SEQ ID NO: 51785 - DNA, 22 bp, Artificial Sequence
  chemically synthesized
cacaaatgcagcttccctagca

SEQ ID NO: 51786 - DNA, 22 bp, Artificial Sequence
  chemically synthesized
ccctagcagcagatttcccatt

SEQ ID NO: 51787 - DNA, 22 bp, Artificial Sequence
  chemically synthesized
cctagcagcagatttcccattt

SEQ ID NO: 51788 - DNA, 22 bp, Artificial Sequence
  chemically synthesized
gcagcagatttcccatttcact

SEQ ID NO: 51789 - DNA, 22 bp, Artificial Sequence
  chemically synthesized
cccatttcactaaagggaaagt

SEQ ID NO: 51790 - DNA, 22 bp, Artificial Sequence
  chemically synthesized
ccatttcactaaagggaaagta

SEQ ID NO: 51791 - DNA, 22 bp, Artificial Sequence
  chemically synthesized
cactaaagggaaagtatctgag

SEQ ID NO: 51792 - DNA, 22 bp, Artificial Sequence
  chemically synthesized
actaaagggaaagtatctgagt

SEQ ID NO: 51793 - DNA, 22 bp, Artificial Sequence
  chemically synthesized
aagggaaagtatctgagtgcta

SEQ ID NO: 51794 - DNA, 22 bp, Artificial Sequence
  chemically synthesized
agtgctatcacagaaagcacta

SEQ ID NO: 51795 - DNA, 22 bp, Artificial Sequence
  chemically synthesized
tcacagaaagcactaaaaaaag

SEQ ID NO: 51796 - DNA, 22 bp, Artificial Sequence
  chemically synthesized
aaaaaagaaagaaaatgccatg

SEQ ID NO: 51797 - DNA, 22 bp, Artificial Sequence
  chemically synthesized
ggttttaatgatcaaattctag

SEQ ID NO: 51798 - DNA, 22 bp, Artificial Sequence
  chemically synthesized
gttttaatgatcaaattctaga

SEQ ID NO: 51799 - DNA, 22 bp, Artificial Sequence
  chemically synthesized
taatgatcaaattctagagggg

SEQ ID NO: 51800 - DNA, 22 bp, Artificial Sequence
  chemically synthesized
aatgatcaaattctagaggggg

SEQ ID NO: 51801 - DNA, 22 bp, Artificial Sequence
  chemically synthesized
atgatcaaattctagaggggga

SEQ ID NO: 51802 - DNA, 22 bp, Artificial Sequence
  chemically synthesized
tagagggggagaggagaaataa

SEQ ID NO: 51803 - DNA, 22 bp, Artificial Sequence
  chemically synthesized
gagggggagaggagaaataata

SEQ ID NO: 51804 - DNA, 22 bp, Artificial Sequence
  chemically synthesized
aatcccctctagaccactgacc

SEQ ID NO: 51805 - DNA, 22 bp, Artificial Sequence
  chemically synthesized
atcccctctagaccactgacct

SEQ ID NO: 51806 - DNA, 22 bp, Artificial Sequence
  chemically synthesized
tagaccactgacctattatggt

SEQ ID NO: 51807 - DNA, 22 bp, Artificial Sequence
  chemically synthesized
gaccactgacctattatggttc

SEQ ID NO: 51808 - DNA, 22 bp, Artificial Sequence
  chemically synthesized
acctattatggttcaactttgt

SEQ ID NO: 51809 - DNA, 22 bp, Artificial Sequence
  chemically synthesized
ttatggttcaactttgtggtca

SEQ ID NO: 51810 - DNA, 22 bp, Artificial Sequence
  chemically synthesized
tggttcaactttgtggtcaaac

SEQ ID NO: 51811 - DNA, 22 bp, Artificial Sequence
  chemically synthesized
aactttgtggtcaaactaggtc

SEQ ID NO: 51812 - DNA, 22 bp, Artificial Sequence
  chemically synthesized
tgtggtcaaactaggtcggaga

SEQ ID NO: 51813 - DNA, 22 bp, Artificial Sequence
  chemically synthesized
gtggtcaaactaggtcggagag

SEQ ID NO: 51814 - DNA, 22 bp, Artificial Sequence
  chemically synthesized
tggtcaaactaggtcggagaga

SEQ ID NO: 51815 - DNA, 22 bp, Artificial Sequence
  chemically synthesized
ggtcggagagacaagttccagt

SEQ ID NO: 51816 - DNA, 22 bp, Artificial Sequence
  chemically synthesized
cagtgaatcaattcatgatatg

SEQ ID NO: 51817 - DNA, 22 bp, Artificial Sequence
  chemically synthesized
atgatatgcactacctttccta

SEQ ID NO: 51818 - DNA, 22 bp, Artificial Sequence
  chemically synthesized
cctttcctaaaactgaacaaac

SEQ ID NO: 51819 - DNA, 22 bp, Artificial Sequence
  chemically synthesized
tcctaaaactgaacaaacctct

SEQ ID NO: 51820 - DNA, 22 bp, Artificial Sequence
  chemically synthesized
cctaaaactgaacaaacctctt

SEQ ID NO: 51821 - DNA, 22 bp, Artificial Sequence
  chemically synthesized
ctaaaactgaacaaacctcttg

SEQ ID NO: 51822 - DNA, 22 bp, Artificial Sequence
  chemically synthesized
aaactgaacaaacctcttgcct

SEQ ID NO: 51823 - DNA, 22 bp, Artificial Sequence
  chemically synthesized
aacaaacctcttgcctttcggg

SEQ ID NO: 51824 - DNA, 22 bp, Artificial Sequence
  chemically synthesized
ttgcctttcgggagctgggtgg

SEQ ID NO: 51825 - DNA, 22 bp, Artificial Sequence
  chemically synthesized
gcctttcgggagctgggtggta

SEQ ID NO: 51826 - DNA, 22 bp, Artificial Sequence
  chemically synthesized
cctttcgggagctgggtggtag

SEQ ID NO: 51827 - DNA, 22 bp, Artificial Sequence
  chemically synthesized
tcgggagctgggtggtaggtag

SEQ ID NO: 51828 - DNA, 22 bp, Artificial Sequence
  chemically synthesized
cgggagctgggtggtaggtaga

SEQ ID NO: 51829 - DNA, 22 bp, Artificial Sequence
  chemically synthesized
gggagctgggtggtaggtagat

SEQ ID NO: 51830 - DNA, 22 bp, Artificial Sequence
  chemically synthesized
ggtggtaggtagatggaagaaa

SEQ ID NO: 51831 - DNA, 22 bp, Artificial Sequence
  chemically synthesized
tcatcacagaatctgcattgac

SEQ ID NO: 51832 - DNA, 22 bp, Artificial Sequence
  chemically synthesized
cattgacttttgtctaacatgc

SEQ ID NO: 51833 - DNA, 22 bp, Artificial Sequence
  chemically synthesized
acttttgtctaacatgctcaag

SEQ ID NO: 51834 - DNA, 22 bp, Artificial Sequence
  chemically synthesized
ttgtctaacatgctcaagcaaa

SEQ ID NO: 51835 - DNA, 22 bp, Artificial Sequence
  chemically synthesized
tgtctaacatgctcaagcaaaa

SEQ ID NO: 51836 - DNA, 22 bp, Artificial Sequence
  chemically synthesized
gtctaacatgctcaagcaaaaa

SEQ ID NO: 51837 - DNA, 22 bp, Artificial Sequence
  chemically synthesized
tctaacatgctcaagcaaaaaa

SEQ ID NO: 51838 - DNA, 22 bp, Artificial Sequence
  chemically synthesized
acatgctcaagcaaaaaatgtt

SEQ ID NO: 51839 - DNA, 22 bp, Artificial Sequence
  chemically synthesized
aagcaaaaaatgttttgagggt

SEQ ID NO: 51840 - DNA, 22 bp, Artificial Sequence
  chemically synthesized
tgagggtcactatatagtgtta

SEQ ID NO: 51841 - DNA, 22 bp, Artificial Sequence
  chemically synthesized
gagggtcactatatagtgttac

SEQ ID NO: 51842 - DNA, 22 bp, Artificial Sequence
  chemically synthesized
agggtcactatatagtgttact

SEQ ID NO: 51843 - DNA, 22 bp, Artificial Sequence
  chemically synthesized
tatagtgttactgtttatcact

SEQ ID NO: 51844 - DNA, 22 bp, Artificial Sequence
  chemically synthesized
ctgtttatcacttagagaaggg

SEQ ID NO: 51845 - DNA, 22 bp, Artificial Sequence
  chemically synthesized
tttatcacttagagaagggaat

SEQ ID NO: 51846 - DNA, 22 bp, Artificial Sequence
  chemically synthesized
atcacttagagaagggaattta

SEQ ID NO: 51847 - DNA, 22 bp, Artificial Sequence
  chemically synthesized
tcacttagagaagggaatttaa

SEQ ID NO: 51848 - DNA, 22 bp, Artificial Sequence
  chemically synthesized
agagaagggaatttaagtccca

SEQ ID NO: 51849 - DNA, 22 bp, Artificial Sequence
  chemically synthesized
gagaagggaatttaagtcccac

SEQ ID NO: 51850 - DNA, 22 bp, Artificial Sequence
  chemically synthesized
aagtcccactgctagcctttaa

SEQ ID NO: 51851 - DNA, 22 bp, Artificial Sequence
  chemically synthesized
agtcccactgctagcctttaat

SEQ ID NO: 51852 - DNA, 22 bp, Artificial Sequence
  chemically synthesized
ctagcctttaattccttttccc

SEQ ID NO: 51853 - DNA, 22 bp, Artificial Sequence
  chemically synthesized
gcctttaattccttttcccttg

SEQ ID NO: 51854 - DNA, 22 bp, Artificial Sequence
  chemically synthesized
taattccttttcccttgagctg

SEQ ID NO: 51855 - DNA, 22 bp, Artificial Sequence
  chemically synthesized
aattccttttcccttgagctgc

SEQ ID NO: 51856 - DNA, 22 bp, Artificial Sequence
  chemically synthesized
attccttttcccttgagctgcc

SEQ ID NO: 51857 - DNA, 22 bp, Artificial Sequence
  chemically synthesized
cttttcccttgagctgccgaga

SEQ ID NO: 51858 - DNA, 22 bp, Artificial Sequence
  chemically synthesized
ttcccttgagctgccgagaaac

SEQ ID NO: 51859 - DNA, 22 bp, Artificial Sequence
  chemically synthesized
tcccttgagctgccgagaaacc

SEQ ID NO: 51860 - DNA, 22 bp, Artificial Sequence
  chemically synthesized
cccttgagctgccgagaaaccc

SEQ ID NO: 51861 - DNA, 22 bp, Artificial Sequence
  chemically synthesized
ccttgagctgccgagaaaccca

SEQ ID NO: 51862 - DNA, 22 bp, Artificial Sequence
  chemically synthesized
gagctgccgagaaacccacaca

SEQ ID NO: 51863 - DNA, 22 bp, Artificial Sequence
  chemically synthesized
agctgccgagaaacccacacac

SEQ ID NO: 51864 - DNA, 22 bp, Artificial Sequence
  chemically synthesized
ccgagaaacccacacacctagc

SEQ ID NO: 51865 - DNA, 22 bp, Artificial Sequence
  chemically synthesized
gctgcctccctgctaaaattaa

SEQ ID NO: 51866 - DNA, 22 bp, Artificial Sequence
  chemically synthesized
cctccctgctaaaattaaccaa

SEQ ID NO: 51867 - DNA, 22 bp, Artificial Sequence
  chemically synthesized
cctgctaaaattaaccaaagga

SEQ ID NO: 51868 - DNA, 22 bp, Artificial Sequence
  chemically synthesized
ctaaaattaaccaaaggaggga

SEQ ID NO: 51869 - DNA, 22 bp, Artificial Sequence
  chemically synthesized
aaattaaccaaaggagggaggg

SEQ ID NO: 51870 - DNA, 22 bp, Artificial Sequence
  chemically synthesized
accaaaggagggagggctgttg

SEQ ID NO: 51871 - DNA, 22 bp, Artificial Sequence
  chemically synthesized
ttgaatacgtgtgtgtattttt

SEQ ID NO: 51872 - DNA, 22 bp, Artificial Sequence
  chemically synthesized
aatacgtgtgtgtatttttcca

SEQ ID NO: 51873 - DNA, 22 bp, Artificial Sequence
  chemically synthesized
ttccaagaaaatttttacattg

SEQ ID NO: 51874 - DNA, 22 bp, Artificial Sequence
  chemically synthesized
tccaagaaaatttttacattgt

SEQ ID NO: 51875 - DNA, 22 bp, Artificial Sequence
  chemically synthesized
ccaagaaaatttttacattgtg

SEQ ID NO: 51876 - DNA, 22 bp, Artificial Sequence
  chemically synthesized
caagaaaatttttacattgtgt

SEQ ID NO: 51877 - DNA, 22 bp, Artificial Sequence
  chemically synthesized
ttacattgtgttatagcagaaa

SEQ ID NO: 51878 - DNA, 22 bp, Artificial Sequence
  chemically synthesized
tacattgtgttatagcagaaac

SEQ ID NO: 51879 - DNA, 22 bp, Artificial Sequence
  chemically synthesized
acattgtgttatagcagaaaca

SEQ ID NO: 51880 - DNA, 22 bp, Artificial Sequence
  chemically synthesized
cattgtgttatagcagaaacag

SEQ ID NO: 51881 - DNA, 22 bp, Artificial Sequence
  chemically synthesized
tgttatagcagaaacagtggag

SEQ ID NO: 51882 - DNA, 22 bp, Artificial Sequence
  chemically synthesized
tagcagaaacagtggagtctgg

SEQ ID NO: 51883 - DNA, 22 bp, Artificial Sequence
  chemically synthesized
gactggacatttgtaagggtga

SEQ ID NO: 51884 - DNA, 22 bp, Artificial Sequence
  chemically synthesized
gacatttgtaagggtgacatgt

SEQ ID NO: 51885 - DNA, 22 bp, Artificial Sequence
  chemically synthesized
gtaagggtgacatgtggctgtg

SEQ ID NO: 51886 - DNA, 22 bp, Artificial Sequence
  chemically synthesized
taagggtgacatgtggctgtgt

SEQ ID NO: 51887 - DNA, 22 bp, Artificial Sequence
  chemically synthesized
tgtaaaccacaaacaaaatcaa

SEQ ID NO: 51888 - DNA, 22 bp, Artificial Sequence
  chemically synthesized
tcaaaaccacatcagagacaag

SEQ ID NO: 51889 - DNA, 22 bp, Artificial Sequence
  chemically synthesized
atcatttagctgaggaggcagg

SEQ ID NO: 51890 - DNA, 22 bp, Artificial Sequence
  chemically synthesized
tcatttagctgaggaggcaggc

SEQ ID NO: 51891 - DNA, 22 bp, Artificial Sequence
  chemically synthesized
agctgaggaggcaggctgcagg

SEQ ID NO: 51892 - DNA, 22 bp, Artificial Sequence
  chemically synthesized
gctgaggaggcaggctgcaggg

SEQ ID NO: 51893 - DNA, 22 bp, Artificial Sequence
  chemically synthesized
aggaggcaggctgcagggagca

SEQ ID NO: 51894 - DNA, 22 bp, Artificial Sequence
  chemically synthesized
cagggagcagccgttcctgtca

SEQ ID NO: 51895 - DNA, 22 bp, Artificial Sequence
  chemically synthesized
ctgtcaaaccaaccttttgaaa

SEQ ID NO: 51896 - DNA, 22 bp, Artificial Sequence
  chemically synthesized
tcaaaccaaccttttgaaattt

SEQ ID NO: 51897 - DNA, 22 bp, Artificial Sequence
  chemically synthesized
ttgaaatttccaacatgccctt

SEQ ID NO: 51898 - DNA, 22 bp, Artificial Sequence
  chemically synthesized
tgaaatttccaacatgccctta

SEQ ID NO: 51899 - DNA, 22 bp, Artificial Sequence
  chemically synthesized
gaaatttccaacatgcccttaa

SEQ ID NO: 51900 - DNA, 22 bp, Artificial Sequence
  chemically synthesized
aaatttccaacatgcccttaaa

SEQ ID NO: 51901 - DNA, 22 bp, Artificial Sequence
  chemically synthesized
ccaacatgcccttaaacttttc

SEQ ID NO: 51902 - DNA, 22 bp, Artificial Sequence
  chemically synthesized
caacatgcccttaaacttttcg

SEQ ID NO: 51903 - DNA, 22 bp, Artificial Sequence
  chemically synthesized
aaacttttcgagtaagcatgtc

SEQ ID NO: 51904 - DNA, 22 bp, Artificial Sequence
  chemically synthesized
aacttttcgagtaagcatgtct

SEQ ID NO: 51905 - DNA, 22 bp, Artificial Sequence
  chemically synthesized
ttcgagtaagcatgtctgtgcg

SEQ ID NO: 51906 - DNA, 22 bp, Artificial Sequence
  chemically synthesized
tcgagtaagcatgtctgtgcgc

SEQ ID NO: 51907 - DNA, 22 bp, Artificial Sequence
  chemically synthesized
cgagtaagcatgtctgtgcgct

SEQ ID NO: 51908 - DNA, 22 bp, Artificial Sequence
  chemically synthesized
gagtaagcatgtctgtgcgctt

SEQ ID NO: 51909 - DNA, 22 bp, Artificial Sequence
  chemically synthesized
tgcgcttcagcaactgccctct

SEQ ID NO: 51910 - DNA, 22 bp, Artificial Sequence
  chemically synthesized
cagcaactgccctctctactct

SEQ ID NO: 51911 - DNA, 22 bp, Artificial Sequence
  chemically synthesized
agcaactgccctctctactctg

SEQ ID NO: 51912 - DNA, 22 bp, Artificial Sequence
  chemically synthesized
ccctctctactctggcctggcc

SEQ ID NO: 51913 - DNA, 22 bp, Artificial Sequence
  chemically synthesized
tctactctggcctggccagtcg

SEQ ID NO: 51914 - DNA, 22 bp, Artificial Sequence
  chemically synthesized
tactctggcctggccagtcgaa

SEQ ID NO: 51915 - DNA, 22 bp, Artificial Sequence
  chemically synthesized
ctctggcctggccagtcgaaaa

SEQ ID NO: 51916 - DNA, 22 bp, Artificial Sequence
  chemically synthesized
tggcctggccagtcgaaaatgg

SEQ ID NO: 51917 - DNA, 22 bp, Artificial Sequence
  chemically synthesized
gcctggccagtcgaaaatggca

SEQ ID NO: 51918 - DNA, 22 bp, Artificial Sequence
  chemically synthesized
gccagtcgaaaatggcatctta

SEQ ID NO: 51919 - DNA, 22 bp, Artificial Sequence
  chemically synthesized
aaagtcaaggtcatggtgtcat

SEQ ID NO: 51920 - DNA, 22 bp, Artificial Sequence
  chemically synthesized
aagtcaaggtcatggtgtcatc

SEQ ID NO: 51921 - DNA, 22 bp, Artificial Sequence
  chemically synthesized
tgtttaattacagccccatccg

SEQ ID NO: 51922 - DNA, 22 bp, Artificial Sequence
  chemically synthesized
aattacagccccatccgggctg

SEQ ID NO: 51923 - DNA, 22 bp, Artificial Sequence
  chemically synthesized
attacagccccatccgggctga

SEQ ID NO: 51924 - DNA, 22 bp, Artificial Sequence
  chemically synthesized
cagccccatccgggctgacagc

SEQ ID NO: 51925 - DNA, 22 bp, Artificial Sequence
  chemically synthesized
acagccaatatggatccaaggc

SEQ ID NO: 51926 - DNA, 22 bp, Artificial Sequence
  chemically synthesized
gccctgaagctcagttaactct

SEQ ID NO: 51927 - DNA, 22 bp, Artificial Sequence
  chemically synthesized
aagctcagttaactctttccac

SEQ ID NO: 51928 - DNA, 22 bp, Artificial Sequence
  chemically synthesized
agttaactctttccaccacctc

SEQ ID NO: 51929 - DNA, 22 bp, Artificial Sequence
  chemically synthesized
actctttccaccacctccaact

SEQ ID NO: 51930 - DNA, 22 bp, Artificial Sequence
  chemically synthesized
tttccaccacctccaactaccc

SEQ ID NO: 51931 - DNA, 22 bp, Artificial Sequence
  chemically synthesized
tccaccacctccaactaccctg

SEQ ID NO: 51932 - DNA, 22 bp, Artificial Sequence
  chemically synthesized
ccaccacctccaactaccctgc

SEQ ID NO: 51933 - DNA, 22 bp, Artificial Sequence
  chemically synthesized
caccacctccaactaccctgcc

SEQ ID NO: 51934 - DNA, 22 bp, Artificial Sequence
  chemically synthesized
caactaccctgccagcccactc

SEQ ID NO: 51935 - DNA, 22 bp, Artificial Sequence
  chemically synthesized
ccctgccagcccactctacttc

SEQ ID NO: 51936 - DNA, 22 bp, Artificial Sequence
  chemically synthesized
ccagcccactctacttcaggga

SEQ ID NO: 51937 - DNA, 22 bp, Artificial Sequence
  chemically synthesized
tacttcagggaagccttgagaa

SEQ ID NO: 51938 - DNA, 22 bp, Artificial Sequence
  chemically synthesized
cttcagggaagccttgagaacg

SEQ ID NO: 51939 - DNA, 22 bp, Artificial Sequence
  chemically synthesized
cagggaagccttgagaacgagc

SEQ ID NO: 51940 - DNA, 22 bp, Artificial Sequence
  chemically synthesized
agggaagccttgagaacgagct

SEQ ID NO: 51941 - DNA, 22 bp, Artificial Sequence
  chemically synthesized
gagaacgagctgaacccctaag

SEQ ID NO: 51942 - DNA, 22 bp, Artificial Sequence
  chemically synthesized
agaacgagctgaacccctaagg

SEQ ID NO: 51943 - DNA, 22 bp, Artificial Sequence
  chemically synthesized
aacccctaaggaggcctggcca

SEQ ID NO: 51944 - DNA, 22 bp, Artificial Sequence
  chemically synthesized
aggaggcctggccagatgttct

SEQ ID NO: 51945 - DNA, 22 bp, Artificial Sequence
  chemically synthesized
gccagatgttctgagtcaaaca

SEQ ID NO: 51946 - DNA, 22 bp, Artificial Sequence
  chemically synthesized
tgagtcaaacaagtcattggct

SEQ ID NO: 51947 - DNA, 22 bp, Artificial Sequence
  chemically synthesized
agtcaaacaagtcattggctga

SEQ ID NO: 51948 - DNA, 22 bp, Artificial Sequence
  chemically synthesized
gctgaactgcaaatgcctatat

SEQ ID NO: 51949 - DNA, 22 bp, Artificial Sequence
  chemically synthesized
aactgcaaatgcctatatggcc

SEQ ID NO: 51950 - DNA, 22 bp, Artificial Sequence
  chemically synthesized
caaatgcctatatggccacttt

SEQ ID NO: 51951 - DNA, 22 bp, Artificial Sequence
  chemically synthesized
tatggccactttgcctctgaca

SEQ ID NO: 51952 - DNA, 22 bp, Artificial Sequence
  chemically synthesized
tgcctctgacacgtcaccaagg

SEQ ID NO: 51953 - DNA, 22 bp, Artificial Sequence
  chemically synthesized
gcctctgacacgtcaccaaggc

SEQ ID NO: 51954 - DNA, 22 bp, Artificial Sequence
  chemically synthesized
cctctgacacgtcaccaaggct

SEQ ID NO: 51955 - DNA, 22 bp, Artificial Sequence
  chemically synthesized
tgacacgtcaccaaggctggaa

SEQ ID NO: 51956 - DNA, 22 bp, Artificial Sequence
  chemically synthesized
acacgtcaccaaggctggaaat

SEQ ID NO: 51957 - DNA, 22 bp, Artificial Sequence
  chemically synthesized
gaaatggacaatggaagctgga

SEQ ID NO: 51958 - DNA, 22 bp, Artificial Sequence
  chemically synthesized
gactaggtgtagtaaagctcaa

SEQ ID NO: 51959 - DNA, 22 bp, Artificial Sequence
  chemically synthesized
ggtgtagtaaagctcaatactt

SEQ ID NO: 51960 - DNA, 22 bp, Artificial Sequence
  chemically synthesized
aatacttcaaaatgagaaggtg

SEQ ID NO: 51961 - DNA, 22 bp, Artificial Sequence
  chemically synthesized
caaaatgagaaggtggggatgg

SEQ ID NO: 51962 - DNA, 22 bp, Artificial Sequence
  chemically synthesized
aaaatgagaaggtggggatggg

SEQ ID NO: 51963 - DNA, 22 bp, Artificial Sequence
  chemically synthesized
atgtgtgtacctatcctgccta

SEQ ID NO: 51964 - DNA, 22 bp, Artificial Sequence
  chemically synthesized
tcctgcctacatctgattcagt

SEQ ID NO: 51965 - DNA, 22 bp, Artificial Sequence
  chemically synthesized
cctacatctgattcagtgaggt

SEQ ID NO: 51966 - DNA, 22 bp, Artificial Sequence
  chemically synthesized
catctgattcagtgaggtggaa

SEQ ID NO: 51967 - DNA, 22 bp, Artificial Sequence
  chemically synthesized
attcagtgaggtggaaaatatt

SEQ ID NO: 51968 - DNA, 22 bp, Artificial Sequence
  chemically synthesized
agtgaggtggaaaatatttatt

SEQ ID NO: 51969 - DNA, 22 bp, Artificial Sequence
  chemically synthesized
atttttctgtgttctggacgta

SEQ ID NO: 51970 - DNA, 22 bp, Artificial Sequence
  chemically synthesized
tttttctgtgttctggacgtaa

SEQ ID NO: 51971 - DNA, 22 bp, Artificial Sequence
  chemically synthesized
ttctgtgttctggacgtaagca

SEQ ID NO: 51972 - DNA, 22 bp, Artificial Sequence
  chemically synthesized
tctgtgttctggacgtaagcaa

SEQ ID NO: 51973 - DNA, 22 bp, Artificial Sequence
  chemically synthesized
ctgtgttctggacgtaagcaac

SEQ ID NO: 51974 - DNA, 22 bp, Artificial Sequence
  chemically synthesized
tgtgttctggacgtaagcaaca

SEQ ID NO: 51975 - DNA, 22 bp, Artificial Sequence
  chemically synthesized
tgttctggacgtaagcaacaga

SEQ ID NO: 51976 - DNA, 22 bp, Artificial Sequence
  chemically synthesized
tggacgtaagcaacagaaatga

SEQ ID NO: 51977 - DNA, 22 bp, Artificial Sequence
  chemically synthesized
gacgtaagcaacagaaatgatt

SEQ ID NO: 51978 - DNA, 22 bp, Artificial Sequence
  chemically synthesized
ttttaacattacagggctgtca

SEQ ID NO: 51979 - DNA, 22 bp, Artificial Sequence
  chemically synthesized
taacattacagggctgtcatgg

SEQ ID NO: 51980 - DNA, 22 bp, Artificial Sequence
  chemically synthesized
aacattacagggctgtcatgga

SEQ ID NO: 51981 - DNA, 22 bp, Artificial Sequence
  chemically synthesized
acattacagggctgtcatggac

SEQ ID NO: 51982 - DNA, 22 bp, Artificial Sequence
  chemically synthesized
cagggctgtcatggacagtcac

SEQ ID NO: 51983 - DNA, 22 bp, Artificial Sequence
  chemically synthesized
tcatggacagtcacatagagta

SEQ ID NO: 51984 - DNA, 22 bp, Artificial Sequence
  chemically synthesized
cacaactccttactgcttggct

SEQ ID NO: 51985 - DNA, 22 bp, Artificial Sequence
  chemically synthesized
acaactccttactgcttggcta

SEQ ID NO: 51986 - DNA, 22 bp, Artificial Sequence
  chemically synthesized
cttactgcttggctacagcacc

SEQ ID NO: 51987 - DNA, 22 bp, Artificial Sequence
  chemically synthesized
actgcttggctacagcacctct

SEQ ID NO: 51988 - DNA, 22 bp, Artificial Sequence
  chemically synthesized
ctgcttggctacagcacctctg

SEQ ID NO: 51989 - DNA, 22 bp, Artificial Sequence
  chemically synthesized
cttggctacagcacctctgaaa

SEQ ID NO: 51990 - DNA, 22 bp, Artificial Sequence
  chemically synthesized
ggctacagcacctctgaaaatg

SEQ ID NO: 51991 - DNA, 22 bp, Artificial Sequence
  chemically synthesized
gctacagcacctctgaaaatga

SEQ ID NO: 51992 - DNA, 22 bp, Artificial Sequence
  chemically synthesized
cagcacctctgaaaatgaaaag

SEQ ID NO: 51993 - DNA, 22 bp, Artificial Sequence
  chemically synthesized
tgaaaatgaaaagaaaacatgc

SEQ ID NO: 51994 - DNA, 22 bp, Artificial Sequence
  chemically synthesized
aaaatgaaaagaaaacatgcaa

SEQ ID NO: 51995 - DNA, 22 bp, Artificial Sequence
  chemically synthesized
ttctccttgcttctcatttacc

SEQ ID NO: 51996 - DNA, 22 bp, Artificial Sequence
  chemically synthesized
tctccttgcttctcatttacct

SEQ ID NO: 51997 - DNA, 22 bp, Artificial Sequence
  chemically synthesized
ctccttgcttctcatttacctg

SEQ ID NO: 51998 - DNA, 22 bp, Artificial Sequence
  chemically synthesized
tccttgcttctcatttacctgc

SEQ ID NO: 51999 - DNA, 22 bp, Artificial Sequence
  chemically synthesized
cttgcttctcatttacctgcta

SEQ ID NO: 52000 - DNA, 22 bp, Artificial Sequence
  chemically synthesized
gcttctcatttacctgctatgt

SEQ ID NO: 52001 - DNA, 22 bp, Artificial Sequence
  chemically synthesized
cttctcatttacctgctatgtg

SEQ ID NO: 52002 - DNA, 22 bp, Artificial Sequence
  chemically synthesized
ctcatttacctgctatgtgttc

SEQ ID NO: 52003 - DNA, 22 bp, Artificial Sequence
  chemically synthesized
tcatttacctgctatgtgttcc

SEQ ID NO: 52004 - DNA, 22 bp, Artificial Sequence
  chemically synthesized
atttacctgctatgtgttcctg

SEQ ID NO: 52005 - DNA, 22 bp, Artificial Sequence
  chemically synthesized
acctgctatgtgttcctgtttg

SEQ ID NO: 52006 - DNA, 22 bp, Artificial Sequence
  chemically synthesized
cctgctatgtgttcctgtttgg

SEQ ID NO: 52007 - DNA, 22 bp, Artificial Sequence
  chemically synthesized
ctatgtgttcctgtttggggca

SEQ ID NO: 52008 - DNA, 22 bp, Artificial Sequence
  chemically synthesized
tgtgttcctgtttggggcaaat

SEQ ID NO: 52009 - DNA, 22 bp, Artificial Sequence
  chemically synthesized
ctgtttggggcaaattcctcta

SEQ ID NO: 52010 - DNA, 22 bp, Artificial Sequence
  chemically synthesized
tttggggcaaattcctctagat

SEQ ID NO: 52011 - DNA, 22 bp, Artificial Sequence
  chemically synthesized
ggggcaaattcctctagatgac

SEQ ID NO: 52012 - DNA, 22 bp, Artificial Sequence
  chemically synthesized
gggcaaattcctctagatgacg

SEQ ID NO: 52013 - DNA, 22 bp, Artificial Sequence
  chemically synthesized
ctctagatgacgttgataaaca

SEQ ID NO: 52014 - DNA, 22 bp, Artificial Sequence
  chemically synthesized
tagatgacgttgataaacaatc

SEQ ID NO: 52015 - DNA, 22 bp, Artificial Sequence
  chemically synthesized
gatgacgttgataaacaatcgt

SEQ ID NO: 52016 - DNA, 22 bp, Artificial Sequence
  chemically synthesized
ataaacaatcgtcatcctctgg

SEQ ID NO: 52017 - DNA, 22 bp, Artificial Sequence
  chemically synthesized
tggcgtgacctggatgccaacc

SEQ ID NO: 52018 - DNA, 22 bp, Artificial Sequence
  chemically synthesized
gcgtgacctggatgccaacctc

SEQ ID NO: 52019 - DNA, 22 bp, Artificial Sequence
  chemically synthesized
gatgccaacctccacgggattg

SEQ ID NO: 52020 - DNA, 22 bp, Artificial Sequence
  chemically synthesized
cacgggattggatgcttttttc

SEQ ID NO: 52021 - DNA, 22 bp, Artificial Sequence
  chemically synthesized
gatgcttttttcatctcgattg

SEQ ID NO: 52022 - DNA, 22 bp, Artificial Sequence
  chemically synthesized
ttttcatctcgattggtgaagg

SEQ ID NO: 52023 - DNA, 22 bp, Artificial Sequence
  chemically synthesized
tttcatctcgattggtgaaggg

SEQ ID NO: 52024 - DNA, 22 bp, Artificial Sequence
  chemically synthesized
ttcatctcgattggtgaagggg

SEQ ID NO: 52025 - DNA, 22 bp, Artificial Sequence
  chemically synthesized
tcatctcgattggtgaagggga

SEQ ID NO: 52026 - DNA, 22 bp, Artificial Sequence
  chemically synthesized
catctcgattggtgaaggggaa

SEQ ID NO: 52027 - DNA, 22 bp, Artificial Sequence
  chemically synthesized
atctcgattggtgaaggggaag

SEQ ID NO: 52028 - DNA, 22 bp, Artificial Sequence
  chemically synthesized
gattggtgaaggggaaggtggc

SEQ ID NO: 52029 - DNA, 22 bp, Artificial Sequence
  chemically synthesized
gtgaaggggaaggtggcttatc

SEQ ID NO: 52030 - DNA, 22 bp, Artificial Sequence
  chemically synthesized
atccacagctttttctaagcag

SEQ ID NO: 52031 - DNA, 22 bp, Artificial Sequence
  chemically synthesized
tccacagctttttctaagcaga

SEQ ID NO: 52032 - DNA, 22 bp, Artificial Sequence
  chemically synthesized
tttctaagcagaggctgccatt

SEQ ID NO: 52033 - DNA, 22 bp, Artificial Sequence
  chemically synthesized
ttctaagcagaggctgccattg

SEQ ID NO: 52034 - DNA, 22 bp, Artificial Sequence
  chemically synthesized
tctaagcagaggctgccattgc

SEQ ID NO: 52035 - DNA, 22 bp, Artificial Sequence
  chemically synthesized
ctaagcagaggctgccattgca

SEQ ID NO: 52036 - DNA, 22 bp, Artificial Sequence
  chemically synthesized
taagcagaggctgccattgcat

SEQ ID NO: 52037 - DNA, 22 bp, Artificial Sequence
  chemically synthesized
agcagaggctgccattgcattg

SEQ ID NO: 52038 - DNA, 22 bp, Artificial Sequence
  chemically synthesized
ccattgcattgtttccgtttgt

SEQ ID NO: 52039 - DNA, 22 bp, Artificial Sequence
  chemically synthesized
cattgtttccgtttgtgctcga

SEQ ID NO: 52040 - DNA, 22 bp, Artificial Sequence
  chemically synthesized
tttccgtttgtgctcgataaaa

SEQ ID NO: 52041 - DNA, 22 bp, Artificial Sequence
  chemically synthesized
ccgtttgtgctcgataaaaata

SEQ ID NO: 52042 - DNA, 22 bp, Artificial Sequence
  chemically synthesized
cgtttgtgctcgataaaaataa

SEQ ID NO: 52043 - DNA, 22 bp, Artificial Sequence
  chemically synthesized
gtgctcgataaaaataagaatg

SEQ ID NO: 52044 - DNA, 22 bp, Artificial Sequence
  chemically synthesized
tgctcgataaaaataagaatgt

SEQ ID NO: 52045 - DNA, 22 bp, Artificial Sequence
  chemically synthesized
gataaaaataagaatgtccccc

SEQ ID NO: 52046 - DNA, 22 bp, Artificial Sequence
  chemically synthesized
atctggcactgcccacaggtga

SEQ ID NO: 52047 - DNA, 22 bp, Artificial Sequence
  chemically synthesized
gcactgcccacaggtgaggagg

SEQ ID NO: 52048 - DNA, 22 bp, Artificial Sequence
  chemically synthesized
cccacaggtgaggaggtcatga

SEQ ID NO: 52049 - DNA, 22 bp, Artificial Sequence
  chemically synthesized
ctggagctcccaacgggccgtg

SEQ ID NO: 52050 - DNA, 22 bp, Artificial Sequence
  chemically synthesized
tggagctcccaacgggccgtgg

SEQ ID NO: 52051 - DNA, 22 bp, Artificial Sequence
  chemically synthesized
gagctcccaacgggccgtggtc

SEQ ID NO: 52052 - DNA, 22 bp, Artificial Sequence
  chemically synthesized
ccaacgggccgtggtctggttc

SEQ ID NO: 52053 - DNA, 22 bp, Artificial Sequence
  chemically synthesized
gttcatcatctgtaagaatggc

SEQ ID NO: 52054 - DNA, 22 bp, Artificial Sequence
  chemically synthesized
atcatctgtaagaatggcttca

SEQ ID NO: 52055 - DNA, 22 bp, Artificial Sequence
  chemically synthesized
taagaatggcttcaagaggctc

SEQ ID NO: 52056 - DNA, 22 bp, Artificial Sequence
  chemically synthesized
caagaggctcggctgtggttgg

SEQ ID NO: 52057 - DNA, 22 bp, Artificial Sequence
  chemically synthesized
aagaggctcggctgtggttgga

SEQ ID NO: 52058 - DNA, 22 bp, Artificial Sequence
  chemically synthesized
ggctgtggttggagaaacaaaa

SEQ ID NO: 52059 - DNA, 22 bp, Artificial Sequence
  chemically synthesized
tggttggagaaacaaaagcaca

SEQ ID NO: 52060 - DNA, 22 bp, Artificial Sequence
  chemically synthesized
gagaaacaaaagcacaattatt

SEQ ID NO: 52061 - DNA, 22 bp, Artificial Sequence
  chemically synthesized
ttagagtgccagagaggacaga

SEQ ID NO: 52062 - DNA, 22 bp, Artificial Sequence
  chemically synthesized
gagtgccagagaggacagaaag

SEQ ID NO: 52063 - DNA, 22 bp, Artificial Sequence
  chemically synthesized
aaccccatgccatcccaccaca

SEQ ID NO: 52064 - DNA, 22 bp, Artificial Sequence
  chemically synthesized
ctaggcttctctatataatacc

SEQ ID NO: 52065 - DNA, 22 bp, Artificial Sequence
  chemically synthesized
taggcttctctatataataccc

SEQ ID NO: 52066 - DNA, 22 bp, Artificial Sequence
  chemically synthesized
ggcttctctatataatacccag

SEQ ID NO: 52067 - DNA, 22 bp, Artificial Sequence
  chemically synthesized
ctctatataatacccagaaaat

SEQ ID NO: 52068 - DNA, 22 bp, Artificial Sequence
  chemically synthesized
tctatataatacccagaaaatg

SEQ ID NO: 52069 - DNA, 22 bp, Artificial Sequence
  chemically synthesized
tatataatacccagaaaatgtg

SEQ ID NO: 52070 - DNA, 22 bp, Artificial Sequence
  chemically synthesized
tataatacccagaaaatgtgag

SEQ ID NO: 52071 - DNA, 22 bp, Artificial Sequence
  chemically synthesized
tcaaccagagagcaaatttgtc

SEQ ID NO: 52072 - DNA, 22 bp, Artificial Sequence
  chemically synthesized
gtcaatgaggcaaatcatcaca

SEQ ID NO: 52073 - DNA, 22 bp, Artificial Sequence
  chemically synthesized
tcaatgaggcaaatcatcacat

SEQ ID NO: 52074 - DNA, 22 bp, Artificial Sequence
  chemically synthesized
ccttgcataactccagagaaca

SEQ ID NO: 52075 - DNA, 22 bp, Artificial Sequence
  chemically synthesized
cttgcataactccagagaacac

SEQ ID NO: 52076 - DNA, 22 bp, Artificial Sequence
  chemically synthesized
gcataactccagagaacacaca

SEQ ID NO: 52077 - DNA, 22 bp, Artificial Sequence
  chemically synthesized
cataactccagagaacacacac

SEQ ID NO: 52078 - DNA, 22 bp, Artificial Sequence
  chemically synthesized
cagagaacacacacacacacat

SEQ ID NO: 52079 - DNA, 22 bp, Artificial Sequence
  chemically synthesized
gtttgtaagtttagaaagaatg

SEQ ID NO: 52080 - DNA, 22 bp, Artificial Sequence
  chemically synthesized
gtaagtttagaaagaatgctac

SEQ ID NO: 52081 - DNA, 22 bp, Artificial Sequence
  chemically synthesized
taagtttagaaagaatgctact

SEQ ID NO: 52082 - DNA, 22 bp, Artificial Sequence
  chemically synthesized
agaaagaatgctacttaaatag

SEQ ID NO: 52083 - DNA, 22 bp, Artificial Sequence
  chemically synthesized
gaaagaatgctacttaaatagt

SEQ ID NO: 52084 - DNA, 22 bp, Artificial Sequence
  chemically synthesized
cttaaatagttaacacagggaa

SEQ ID NO: 52085 - DNA, 22 bp, Artificial Sequence
  chemically synthesized
aaatagttaacacagggaacat

SEQ ID NO: 52086 - DNA, 22 bp, Artificial Sequence
  chemically synthesized
aatagttaacacagggaacata

SEQ ID NO: 52087 - DNA, 22 bp, Artificial Sequence
  chemically synthesized
acacagggaacataaagaaagc

SEQ ID NO: 52088 - DNA, 22 bp, Artificial Sequence
  chemically synthesized
aaataataactacaagaaaaac

SEQ ID NO: 52089 - DNA, 22 bp, Artificial Sequence
  chemically synthesized
aataataactacaagaaaaact

SEQ ID NO: 52090 - DNA, 22 bp, Artificial Sequence
  chemically synthesized
caagaaaaactggttaaaaaaa

SEQ ID NO: 52091 - DNA, 22 bp, Artificial Sequence
  chemically synthesized
gttaaaaaaaaaagtggataga

SEQ ID NO: 52092 - DNA, 22 bp, Artificial Sequence
  chemically synthesized
aaaaaaaaagtggatagaaacc

SEQ ID NO: 52093 - DNA, 22 bp, Artificial Sequence
  chemically synthesized
gtttcttttttcctatacacca

SEQ ID NO: 52094 - DNA, 22 bp, Artificial Sequence
  chemically synthesized
tttcttttttcctatacaccaa

SEQ ID NO: 52095 - DNA, 22 bp, Artificial Sequence
  chemically synthesized
cttttttcctatacaccaagtt

SEQ ID NO: 52096 - DNA, 22 bp, Artificial Sequence
  chemically synthesized
ttttttcctatacaccaagttg

SEQ ID NO: 52097 - DNA, 22 bp, Artificial Sequence
  chemically synthesized
ttttcctatacaccaagttgtc

SEQ ID NO: 52098 - DNA, 22 bp, Artificial Sequence
  chemically synthesized
tttcctatacaccaagttgtcc

SEQ ID NO: 52099 - DNA, 22 bp, Artificial Sequence
  chemically synthesized
ttcctatacaccaagttgtcca

SEQ ID NO: 52100 - DNA, 22 bp, Artificial Sequence
  chemically synthesized
tcctatacaccaagttgtccat

SEQ ID NO: 52101 - DNA, 22 bp, Artificial Sequence
  chemically synthesized
cctatacaccaagttgtccatt

SEQ ID NO: 52102 - DNA, 22 bp, Artificial Sequence
  chemically synthesized
ctatacaccaagttgtccattg

SEQ ID NO: 52103 - DNA, 22 bp, Artificial Sequence
  chemically synthesized
tacaccaagttgtccattgtgc

SEQ ID NO: 52104 - DNA, 22 bp, Artificial Sequence
  chemically synthesized
tccattgtgccaaagaatgaaa

SEQ ID NO: 52105 - DNA, 22 bp, Artificial Sequence
  chemically synthesized
tgccaaagaatgaaaggagagg

SEQ ID NO: 52106 - DNA, 22 bp, Artificial Sequence
  chemically synthesized
tgtgtgtgaatgtatatactcc

SEQ ID NO: 52107 - DNA, 22 bp, Artificial Sequence
  chemically synthesized
gtgtgtgaatgtatatactcct

SEQ ID NO: 52108 - DNA, 22 bp, Artificial Sequence
  chemically synthesized
tgtgtgaatgtatatactccta

SEQ ID NO: 52109 - DNA, 22 bp, Artificial Sequence
  chemically synthesized
ctaagtaaacagacatggcttc

SEQ ID NO: 52110 - DNA, 22 bp, Artificial Sequence
  chemically synthesized
agtaaacagacatggcttcata

SEQ ID NO: 52111 - DNA, 22 bp, Artificial Sequence
  chemically synthesized
cataaattagaaagctactatg

SEQ ID NO: 52112 - DNA, 22 bp, Artificial Sequence
  chemically synthesized
ataaattagaaagctactatgt

SEQ ID NO: 52113 - DNA, 22 bp, Artificial Sequence
  chemically synthesized
gaaagctactatgtcacatgaa

SEQ ID NO: 52114 - DNA, 22 bp, Artificial Sequence
  chemically synthesized
ctatgtcacatgaaaaatgtgc

SEQ ID NO: 52115 - DNA, 22 bp, Artificial Sequence
  chemically synthesized
tgtcacatgaaaaatgtgccac

SEQ ID NO: 52116 - DNA, 22 bp, Artificial Sequence
  chemically synthesized
acactgctgtaataagaaaacg

SEQ ID NO: 52117 - DNA, 22 bp, Artificial Sequence
  chemically synthesized
cactgctgtaataagaaaacga

SEQ ID NO: 52118 - DNA, 22 bp, Artificial Sequence
  chemically synthesized
ctgtaataagaaaacgactgca

SEQ ID NO: 52119 - DNA, 22 bp, Artificial Sequence
  chemically synthesized
taataagaaaacgactgcatgc

SEQ ID NO: 52120 - DNA, 22 bp, Artificial Sequence
  chemically synthesized
catgcacctatgaaacggatct

SEQ ID NO: 52121 - DNA, 22 bp, Artificial Sequence
  chemically synthesized
tgaaacggatctaaataataat

SEQ ID NO: 52122 - DNA, 22 bp, Artificial Sequence
  chemically synthesized
aataataatcatgtcgcagcat

SEQ ID NO: 52123 - DNA, 22 bp, Artificial Sequence
  chemically synthesized
acactgccaaaaacctttctgc

SEQ ID NO: 52124 - DNA, 22 bp, Artificial Sequence
  chemically synthesized
ccaaaaacctttctgctctcac

SEQ ID NO: 52125 - DNA, 22 bp, Artificial Sequence
  chemically synthesized
tctgctctcactctcagcagtg

SEQ ID NO: 52126 - DNA, 22 bp, Artificial Sequence
  chemically synthesized
ctgctctcactctcagcagtgc

SEQ ID NO: 52127 - DNA, 22 bp, Artificial Sequence
  chemically synthesized
tgctctcactctcagcagtgcc

SEQ ID NO: 52128 - DNA, 22 bp, Artificial Sequence
  chemically synthesized
ctctcactctcagcagtgccac

SEQ ID NO: 52129 - DNA, 22 bp, Artificial Sequence
  chemically synthesized
tcactctcagcagtgccacaaa

SEQ ID NO: 52130 - DNA, 22 bp, Artificial Sequence
  chemically synthesized
actctcagcagtgccacaaaat

SEQ ID NO: 52131 - DNA, 22 bp, Artificial Sequence
  chemically synthesized
tcagcagtgccacaaaatcaaa

SEQ ID NO: 52132 - DNA, 22 bp, Artificial Sequence
  chemically synthesized
agcagtgccacaaaatcaaaga

SEQ ID NO: 52133 - DNA, 22 bp, Artificial Sequence
  chemically synthesized
ctcagacacattagctaaatgg

SEQ ID NO: 52134 - DNA, 22 bp, Artificial Sequence
  chemically synthesized
tcagacacattagctaaatggg

SEQ ID NO: 52135 - DNA, 22 bp, Artificial Sequence
  chemically synthesized
agacacattagctaaatgggat

SEQ ID NO: 52136 - DNA, 22 bp, Artificial Sequence
  chemically synthesized
gctaaatgggatacttttgagt

SEQ ID NO: 52137 - DNA, 22 bp, Artificial Sequence
  chemically synthesized
aatgggatacttttgagtactt

SEQ ID NO: 52138 - DNA, 22 bp, Artificial Sequence
  chemically synthesized
ttgagtacttaagaaaataagc

SEQ ID NO: 52139 - DNA, 22 bp, Artificial Sequence
  chemically synthesized
tgagtacttaagaaaataagcc

SEQ ID NO: 52140 - DNA, 22 bp, Artificial Sequence
  chemically synthesized
gagtacttaagaaaataagcca

SEQ ID NO: 52141 - DNA, 22 bp, Artificial Sequence
  chemically synthesized
agtacttaagaaaataagccaa

SEQ ID NO: 52142 - DNA, 22 bp, Artificial Sequence
  chemically synthesized
aagaaaataagccaattagtca

SEQ ID NO: 52143 - DNA, 22 bp, Artificial Sequence
  chemically synthesized
agaaaataagccaattagtcat

SEQ ID NO: 52144 - DNA, 22 bp, Artificial Sequence
  chemically synthesized
gtcattttttttttattctgag

SEQ ID NO: 52145 - DNA, 22 bp, Artificial Sequence
  chemically synthesized
tttttttattctgagaaatgga

SEQ ID NO: 52146 - DNA, 22 bp, Artificial Sequence
  chemically synthesized
ttttttattctgagaaatggaa

SEQ ID NO: 52147 - DNA, 22 bp, Artificial Sequence
  chemically synthesized
tttttattctgagaaatggaat

SEQ ID NO: 52148 - DNA, 22 bp, Artificial Sequence
  chemically synthesized
ttttattctgagaaatggaatg

SEQ ID NO: 52149 - DNA, 22 bp, Artificial Sequence
  chemically synthesized
tttattctgagaaatggaatgc

SEQ ID NO: 52150 - DNA, 22 bp, Artificial Sequence
  chemically synthesized
ttattctgagaaatggaatgcc

SEQ ID NO: 52151 - DNA, 22 bp, Artificial Sequence
  chemically synthesized
tattctgagaaatggaatgcct

SEQ ID NO: 52152 - DNA, 22 bp, Artificial Sequence
  chemically synthesized
attctgagaaatggaatgccta

SEQ ID NO: 52153 - DNA, 22 bp, Artificial Sequence
  chemically synthesized
ttctgagaaatggaatgcctat

SEQ ID NO: 52154 - DNA, 22 bp, Artificial Sequence
  chemically synthesized
tgagaaatggaatgcctataat

SEQ ID NO: 52155 - DNA, 22 bp, Artificial Sequence
  chemically synthesized
agaaatggaatgcctataatat

SEQ ID NO: 52156 - DNA, 22 bp, Artificial Sequence
  chemically synthesized
taatattctaaacatgtttgca

SEQ ID NO: 52157 - DNA, 22 bp, Artificial Sequence
  chemically synthesized
taaacatgtttgcacttggtgg

SEQ ID NO: 52158 - DNA, 22 bp, Artificial Sequence
  chemically synthesized
aacatgtttgcacttggtggca

SEQ ID NO: 52159 - DNA, 22 bp, Artificial Sequence
  chemically synthesized
gcacttggtggcatctatgata

SEQ ID NO: 52160 - DNA, 22 bp, Artificial Sequence
  chemically synthesized
cacttggtggcatctatgatat

SEQ ID NO: 52161 - DNA, 22 bp, Artificial Sequence
  chemically synthesized
ggtggcatctatgatataaaaa

SEQ ID NO: 52162 - DNA, 22 bp, Artificial Sequence
  chemically synthesized
gtggcatctatgatataaaaat

SEQ ID NO: 52163 - DNA, 22 bp, Artificial Sequence
  chemically synthesized
tgatataaaaatcagaatggtc

SEQ ID NO: 52164 - DNA, 22 bp, Artificial Sequence
  chemically synthesized
cagagcaaggctgagaagtcct

SEQ ID NO: 52165 - DNA, 22 bp, Artificial Sequence
  chemically synthesized
agagcaaggctgagaagtcctt

SEQ ID NO: 52166 - DNA, 22 bp, Artificial Sequence
  chemically synthesized
agaagtcctttctttagacttg

SEQ ID NO: 52167 - DNA, 22 bp, Artificial Sequence
  chemically synthesized
tctttagacttgaaatacttcg

SEQ ID NO: 52168 - DNA, 22 bp, Artificial Sequence
  chemically synthesized
ctttagacttgaaatacttcgc

SEQ ID NO: 52169 - DNA, 22 bp, Artificial Sequence
  chemically synthesized
tttagacttgaaatacttcgcc

SEQ ID NO: 52170 - DNA, 22 bp, Artificial Sequence
  chemically synthesized
tagacttgaaatacttcgccta

SEQ ID NO: 52171 - DNA, 22 bp, Artificial Sequence
  chemically synthesized
agacttgaaatacttcgcctaa

SEQ ID NO: 52172 - DNA, 22 bp, Artificial Sequence
  chemically synthesized
gacttgaaatacttcgcctaat

SEQ ID NO: 52173 - DNA, 22 bp, Artificial Sequence
  chemically synthesized
gaaatacttcgcctaatgttgt

SEQ ID NO: 52174 - DNA, 22 bp, Artificial Sequence
  chemically synthesized
aaatacttcgcctaatgttgtc

SEQ ID NO: 52175 - DNA, 22 bp, Artificial Sequence
  chemically synthesized
cgcctaatgttgtcaaagtgga

SEQ ID NO: 52176 - DNA, 22 bp, Artificial Sequence
  chemically synthesized
gcctaatgttgtcaaagtggac

SEQ ID NO: 52177 - DNA, 22 bp, Artificial Sequence
  chemically synthesized
atgttgtcaaagtggactaatt

SEQ ID NO: 52178 - DNA, 22 bp, Artificial Sequence
  chemically synthesized
tcaaagtggactaattttctga

SEQ ID NO: 52179 - DNA, 22 bp, Artificial Sequence
  chemically synthesized
attttctgaatgagctccaaaa

SEQ ID NO: 52180 - DNA, 22 bp, Artificial Sequence
  chemically synthesized
tctgaatgagctccaaaatgct

SEQ ID NO: 52181 - DNA, 22 bp, Artificial Sequence
  chemically synthesized
ctgaatgagctccaaaatgctt

SEQ ID NO: 52182 - DNA, 22 bp, Artificial Sequence
  chemically synthesized
tgaatgagctccaaaatgcttc

SEQ ID NO: 52183 - DNA, 22 bp, Artificial Sequence
  chemically synthesized
aatgagctccaaaatgcttcat

SEQ ID NO: 52184 - DNA, 22 bp, Artificial Sequence
  chemically synthesized
caaaatgcttcattatgagact

SEQ ID NO: 52185 - DNA, 22 bp, Artificial Sequence
  chemically synthesized
cattatgagactatttctgcac

SEQ ID NO: 52186 - DNA, 22 bp, Artificial Sequence
  chemically synthesized
attatgagactatttctgcaca

SEQ ID NO: 52187 - DNA, 22 bp, Artificial Sequence
  chemically synthesized
tgagactatttctgcacacata

SEQ ID NO: 52188 - DNA, 22 bp, Artificial Sequence
  chemically synthesized
tttctgcacacataatcaccag

SEQ ID NO: 52189 - DNA, 22 bp, Artificial Sequence
  chemically synthesized
ctgcacacataatcaccagcgg

SEQ ID NO: 52190 - DNA, 22 bp, Artificial Sequence
  chemically synthesized
tgcacacataatcaccagcgga

SEQ ID NO: 52191 - DNA, 22 bp, Artificial Sequence
  chemically synthesized
cacacataatcaccagcggatg

SEQ ID NO: 52192 - DNA, 22 bp, Artificial Sequence
  chemically synthesized
tctttcctgtttgctttttttt

SEQ ID NO: 52193 - DNA, 22 bp, Artificial Sequence
  chemically synthesized
ctttcctgtttgcttttttttt

SEQ ID NO: 52194 - DNA, 22 bp, Artificial Sequence
  chemically synthesized
tttcctgtttgctttttttttt

SEQ ID NO: 52195 - DNA, 22 bp, Artificial Sequence
  chemically synthesized
tcctgtttgcttttttttttaa

SEQ ID NO: 52196 - DNA, 22 bp, Artificial Sequence
  chemically synthesized
cctgtttgcttttttttttaac

SEQ ID NO: 52197 - DNA, 22 bp, Artificial Sequence
  chemically synthesized
ctgtttgcttttttttttaact

SEQ ID NO: 52198 - DNA, 22 bp, Artificial Sequence
  chemically synthesized
tttgcttttttttttaactttg

SEQ ID NO: 52199 - DNA, 22 bp, Artificial Sequence
  chemically synthesized
gcttttttttttaactttgtac

SEQ ID NO: 52200 - DNA, 22 bp, Artificial Sequence
  chemically synthesized
cttttttttttaactttgtact

SEQ ID NO: 52201 - DNA, 22 bp, Artificial Sequence
  chemically synthesized
ttttttttaactttgtactaaa

SEQ ID NO: 52202 - DNA, 22 bp, Artificial Sequence
  chemically synthesized
tttttttaactttgtactaaaa

SEQ ID NO: 52203 - DNA, 22 bp, Artificial Sequence
  chemically synthesized
ttttttaactttgtactaaaat

SEQ ID NO: 52204 - DNA, 22 bp, Artificial Sequence
  chemically synthesized
tttttaactttgtactaaaata

SEQ ID NO: 52205 - DNA, 22 bp, Artificial Sequence
  chemically synthesized
ttttaactttgtactaaaatac

SEQ ID NO: 52206 - DNA, 22 bp, Artificial Sequence
  chemically synthesized
tttaactttgtactaaaatact

SEQ ID NO: 52207 - DNA, 22 bp, Artificial Sequence
  chemically synthesized
ttaactttgtactaaaatactc

SEQ ID NO: 52208 - DNA, 22 bp, Artificial Sequence
  chemically synthesized
taactttgtactaaaatactcc

SEQ ID NO: 52209 - DNA, 22 bp, Artificial Sequence
  chemically synthesized
aactttgtactaaaatactcca

SEQ ID NO: 52210 - DNA, 22 bp, Artificial Sequence
  chemically synthesized
actttgtactaaaatactccag

SEQ ID NO: 52211 - DNA, 22 bp, Artificial Sequence
  chemically synthesized
tgtactaaaatactccagcatc

SEQ ID NO: 52212 - DNA, 22 bp, Artificial Sequence
  chemically synthesized
gtactaaaatactccagcatct

SEQ ID NO: 52213 - DNA, 22 bp, Artificial Sequence
  chemically synthesized
tactaaaatactccagcatcta

SEQ ID NO: 52214 - DNA, 22 bp, Artificial Sequence
  chemically synthesized
aaatactccagcatctacttta

SEQ ID NO: 52215 - DNA, 22 bp, Artificial Sequence
  chemically synthesized
cagcatctactttaccagcttc

SEQ ID NO: 52216 - DNA, 22 bp, Artificial Sequence
  chemically synthesized
ctttaccagcttctatcatttt

SEQ ID NO: 52217 - DNA, 22 bp, Artificial Sequence
  chemically synthesized
taccagcttctatcatttttta

SEQ ID NO: 52218 - DNA, 22 bp, Artificial Sequence
  chemically synthesized
accagcttctatcattttttaa

SEQ ID NO: 52219 - DNA, 22 bp, Artificial Sequence
  chemically synthesized
ccagcttctatcattttttaag

SEQ ID NO: 52220 - DNA, 22 bp, Artificial Sequence
  chemically synthesized
ctatcattttttaagcttccaa

SEQ ID NO: 52221 - DNA, 22 bp, Artificial Sequence
  chemically synthesized
tatcattttttaagcttccaaa

SEQ ID NO: 52222 - DNA, 22 bp, Artificial Sequence
  chemically synthesized
tcattttttaagcttccaaagg

SEQ ID NO: 52223 - DNA, 22 bp, Artificial Sequence
  chemically synthesized
tttaagcttccaaaggggaaaa

SEQ ID NO: 52224 - DNA, 22 bp, Artificial Sequence
  chemically synthesized
ttaagcttccaaaggggaaaag

SEQ ID NO: 52225 - DNA, 22 bp, Artificial Sequence
  chemically synthesized
taagcttccaaaggggaaaaga

SEQ ID NO: 52226 - DNA, 22 bp, Artificial Sequence
  chemically synthesized
aagcttccaaaggggaaaagag

SEQ ID NO: 52227 - DNA, 22 bp, Artificial Sequence
  chemically synthesized
agcttccaaaggggaaaagaga

SEQ ID NO: 52228 - DNA, 22 bp, Artificial Sequence
  chemically synthesized
ccaaaggggaaaagagagttgg

SEQ ID NO: 52229 - DNA, 22 bp, Artificial Sequence
  chemically synthesized
caaaggggaaaagagagttggt

SEQ ID NO: 52230 - DNA, 22 bp, Artificial Sequence
  chemically synthesized
gtaagtctctgcttgtgaaatc

SEQ ID NO: 52231 - DNA, 22 bp, Artificial Sequence
  chemically synthesized
tgcttgtgaaatcttatgcttg

SEQ ID NO: 52232 - DNA, 22 bp, Artificial Sequence
  chemically synthesized
cttgtgaaatcttatgcttgct

SEQ ID NO: 52233 - DNA, 22 bp, Artificial Sequence
  chemically synthesized
gtgaaatcttatgcttgctcta

SEQ ID NO: 52234 - DNA, 22 bp, Artificial Sequence
  chemically synthesized
tgaaatcttatgcttgctctat

SEQ ID NO: 52235 - DNA, 22 bp, Artificial Sequence
  chemically synthesized
atgcttgctctatcaaaaaaaa

SEQ ID NO: 52236 - DNA, 22 bp, Artificial Sequence
  chemically synthesized
tgcttgctctatcaaaaaaaaa

SEQ ID NO: 52237 - DNA, 22 bp, Artificial Sequence
  chemically synthesized
gctctatcaaaaaaaaaaaaaa

SEQ ID NO: 52238 - DNA, 22 bp, Artificial Sequence
  chemically synthesized
ctctatcaaaaaaaaaaaaaaa

SEQ ID NO: 52239 - DNA, 22 bp, Artificial Sequence
  chemically synthesized
tatcaaaaaaaaaaaaaaaatc

SEQ ID NO: 52240 - DNA, 22 bp, Artificial Sequence
  chemically synthesized
tcaaaaaaaaaaaaaaaatcac

SEQ ID NO: 52241 - DNA, 22 bp, Artificial Sequence
  chemically synthesized
ccagttaataaaactgaagcag

SEQ ID NO: 52242 - DNA, 22 bp, Artificial Sequence
  chemically synthesized
ataaaactgaagcagaaaatgt

SEQ ID NO: 52243 - DNA, 22 bp, Artificial Sequence
  chemically synthesized
aagcagaaaatgtacaagtctt

SEQ ID NO: 52244 - DNA, 22 bp, Artificial Sequence
  chemically synthesized
aaacagttaatcagtctgacct

SEQ ID NO: 52245 - DNA, 22 bp, Artificial Sequence
  chemically synthesized
aacagttaatcagtctgacctt

SEQ ID NO: 52246 - DNA, 22 bp, Artificial Sequence
  chemically synthesized
atcagtctgaccttctttagca

SEQ ID NO: 52247 - DNA, 22 bp, Artificial Sequence
  chemically synthesized
accttctttagcaagctgccaa

SEQ ID NO: 52248 - DNA, 22 bp, Artificial Sequence
  chemically synthesized
ctttagcaagctgccaatttta

SEQ ID NO: 52249 - DNA, 22 bp, Artificial Sequence
  chemically synthesized
tttagcaagctgccaattttac

SEQ ID NO: 52250 - DNA, 22 bp, Artificial Sequence
  chemically synthesized
tagcaagctgccaattttacat

SEQ ID NO: 52251 - DNA, 22 bp, Artificial Sequence
  chemically synthesized
agcaagctgccaattttacatt

SEQ ID NO: 52252 - DNA, 22 bp, Artificial Sequence
  chemically synthesized
gcaagctgccaattttacattt

SEQ ID NO: 52253 - DNA, 22 bp, Artificial Sequence
  chemically synthesized
ccaattttacatttaatgaact

SEQ ID NO: 52254 - DNA, 22 bp, Artificial Sequence
  chemically synthesized
tacatttaatgaacttaaagcc

SEQ ID NO: 52255 - DNA, 22 bp, Artificial Sequence
  chemically synthesized
acatttaatgaacttaaagcca

SEQ ID NO: 52256 - DNA, 22 bp, Artificial Sequence
  chemically synthesized
catttaatgaacttaaagccac

SEQ ID NO: 52257 - DNA, 22 bp, Artificial Sequence
  chemically synthesized
aatgaacttaaagccacagaga

SEQ ID NO: 52258 - DNA, 22 bp, Artificial Sequence
  chemically synthesized
atgaacttaaagccacagagaa

SEQ ID NO: 52259 - DNA, 22 bp, Artificial Sequence
  chemically synthesized
aaagccacagagaatcaaaaaa

SEQ ID NO: 52260 - DNA, 22 bp, Artificial Sequence
  chemically synthesized
aagccacagagaatcaaaaaat

SEQ ID NO: 52261 - DNA, 22 bp, Artificial Sequence
  chemically synthesized
taatttgagtgtagaatattgg

SEQ ID NO: 52262 - DNA, 22 bp, Artificial Sequence
  chemically synthesized
aatttgagtgtagaatattgga

SEQ ID NO: 52263 - DNA, 22 bp, Artificial Sequence
  chemically synthesized
atttgagtgtagaatattggaa

SEQ ID NO: 52264 - DNA, 22 bp, Artificial Sequence
  chemically synthesized
gagtgtagaatattggaacaga

SEQ ID NO: 52265 - DNA, 22 bp, Artificial Sequence
  chemically synthesized
agtgtagaatattggaacagat

SEQ ID NO: 52266 - DNA, 22 bp, Artificial Sequence
  chemically synthesized
gaacagattttgataaagtgca

SEQ ID NO: 52267 - DNA, 22 bp, Artificial Sequence
  chemically synthesized
tgataaagtgcaaaaatccagt

SEQ ID NO: 52268 - DNA, 22 bp, Artificial Sequence
  chemically synthesized
gataaagtgcaaaaatccagtg

SEQ ID NO: 52269 - DNA, 22 bp, Artificial Sequence
  chemically synthesized
ataaagtgcaaaaatccagtga

SEQ ID NO: 52270 - DNA, 22 bp, Artificial Sequence
  chemically synthesized
aggttaaatttatttcaaccct

SEQ ID NO: 52271 - DNA, 22 bp, Artificial Sequence
  chemically synthesized
aatttatttcaaccctacccag

SEQ ID NO: 52272 - DNA, 22 bp, Artificial Sequence
  chemically synthesized
atttcaaccctacccaggctga

SEQ ID NO: 52273 - DNA, 22 bp, Artificial Sequence
  chemically synthesized
tttcaaccctacccaggctgaa

SEQ ID NO: 52274 - DNA, 22 bp, Artificial Sequence
  chemically synthesized
caaccctacccaggctgaatat

SEQ ID NO: 52275 - DNA, 22 bp, Artificial Sequence
  chemically synthesized
aaccctacccaggctgaatatt

SEQ ID NO: 52276 - DNA, 22 bp, Artificial Sequence
  chemically synthesized
cccaggctgaatattgaggggg

SEQ ID NO: 52277 - DNA, 22 bp, Artificial Sequence
  chemically synthesized
aatattgagggggaagatctgg

SEQ ID NO: 52278 - DNA, 22 bp, Artificial Sequence
  chemically synthesized
agggggaagatctggagtaact

SEQ ID NO: 52279 - DNA, 22 bp, Artificial Sequence
  chemically synthesized
gagtaactcccagatgtgctag

SEQ ID NO: 52280 - DNA, 22 bp, Artificial Sequence
  chemically synthesized
ccagatgtgctaggtgaaataa

SEQ ID NO: 52281 - DNA, 22 bp, Artificial Sequence
  chemically synthesized
ggtgaaataatattgagagagc

SEQ ID NO: 52282 - DNA, 22 bp, Artificial Sequence
  chemically synthesized
agagagccctgcctagctgcac

SEQ ID NO: 52283 - DNA, 22 bp, Artificial Sequence
  chemically synthesized
cctagctgcacctgtgctcaag

SEQ ID NO: 52284 - DNA, 22 bp, Artificial Sequence
  chemically synthesized
gctgcacctgtgctcaagtagg

SEQ ID NO: 52285 - DNA, 22 bp, Artificial Sequence
  chemically synthesized
cacctgtgctcaagtaggacat

SEQ ID NO: 52286 - DNA, 22 bp, Artificial Sequence
  chemically synthesized
tgctcaagtaggacatctcata

SEQ ID NO: 52287 - DNA, 22 bp, Artificial Sequence
  chemically synthesized
aagtaggacatctcataatttc

SEQ ID NO: 52288 - DNA, 22 bp, Artificial Sequence
  chemically synthesized
ataatttctagcctctggtact

SEQ ID NO: 52289 - DNA, 22 bp, Artificial Sequence
  chemically synthesized
ctagcctctggtactcctccta

SEQ ID NO: 52290 - DNA, 22 bp, Artificial Sequence
  chemically synthesized
tagcctctggtactcctcctaa

SEQ ID NO: 52291 - DNA, 22 bp, Artificial Sequence
  chemically synthesized
gcctctggtactcctcctaatt

SEQ ID NO: 52292 - DNA, 22 bp, Artificial Sequence
  chemically synthesized
tggtactcctcctaatttaaca

SEQ ID NO: 52293 - DNA, 22 bp, Artificial Sequence
  chemically synthesized
gtactcctcctaatttaacata

SEQ ID NO: 52294 - DNA, 22 bp, Artificial Sequence
  chemically synthesized
ctcctaatttaacataaggtca

SEQ ID NO: 52295 - DNA, 22 bp, Artificial Sequence
  chemically synthesized
ctaatttaacataaggtcacca

SEQ ID NO: 52296 - DNA, 22 bp, Artificial Sequence
  chemically synthesized
atttaacataaggtcaccacag

SEQ ID NO: 52297 - DNA, 22 bp, Artificial Sequence
  chemically synthesized
aacataaggtcaccacaggaat

SEQ ID NO: 52298 - DNA, 22 bp, Artificial Sequence
  chemically synthesized
acataaggtcaccacaggaata

SEQ ID NO: 52299 - DNA, 22 bp, Artificial Sequence
  chemically synthesized
tattcctactaataaagacagt

SEQ ID NO: 52300 - DNA, 22 bp, Artificial Sequence
  chemically synthesized
ctactaataaagacagtaaagt

SEQ ID NO: 52301 - DNA, 22 bp, Artificial Sequence
  chemically synthesized
ctaataaagacagtaaagtaag

SEQ ID NO: 52302 - DNA, 22 bp, Artificial Sequence
  chemically synthesized
ataaagacagtaaagtaagcac

SEQ ID NO: 52303 - DNA, 22 bp, Artificial Sequence
  chemically synthesized
atgtttctttgcccaacatact

SEQ ID NO: 52304 - DNA, 22 bp, Artificial Sequence
  chemically synthesized
tgtttctttgcccaacatactg

SEQ ID NO: 52305 - DNA, 22 bp, Artificial Sequence
  chemically synthesized
ctttgcccaacatactggccaa

SEQ ID NO: 52306 - DNA, 22 bp, Artificial Sequence
  chemically synthesized
tttgcccaacatactggccaaa

SEQ ID NO: 52307 - DNA, 22 bp, Artificial Sequence
  chemically synthesized
tgcccaacatactggccaaaag

SEQ ID NO: 52308 - DNA, 22 bp, Artificial Sequence
  chemically synthesized
gcccaacatactggccaaaaga

SEQ ID NO: 52309 - DNA, 22 bp, Artificial Sequence
  chemically synthesized
cccaacatactggccaaaagat

SEQ ID NO: 52310 - DNA, 22 bp, Artificial Sequence
  chemically synthesized
gccaaaagataaatacagaata

SEQ ID NO: 52311 - DNA, 22 bp, Artificial Sequence
  chemically synthesized
ttcaaataaaagaagacaaaca

SEQ ID NO: 52312 - DNA, 22 bp, Artificial Sequence
  chemically synthesized
tcaaataaaagaagacaaacag

SEQ ID NO: 52313 - DNA, 22 bp, Artificial Sequence
  chemically synthesized
caaataaaagaagacaaacaga

SEQ ID NO: 52314 - DNA, 22 bp, Artificial Sequence
  chemically synthesized
aaataaaagaagacaaacagaa

SEQ ID NO: 52315 - DNA, 22 bp, Artificial Sequence
  chemically synthesized
tgcattgtgccttaatgtcatt

SEQ ID NO: 52316 - DNA, 22 bp, Artificial Sequence
  chemically synthesized
cattgtgccttaatgtcattct

SEQ ID NO: 52317 - DNA, 22 bp, Artificial Sequence
  chemically synthesized
tgccttaatgtcattcttctct

SEQ ID NO: 52318 - DNA, 22 bp, Artificial Sequence
  chemically synthesized
aatgtcattcttctcttacatt

SEQ ID NO: 52319 - DNA, 22 bp, Artificial Sequence
  chemically synthesized
atgtcattcttctcttacattt

SEQ ID NO: 52320 - DNA, 22 bp, Artificial Sequence
  chemically synthesized
ttctcttacatttgcttccatt

SEQ ID NO: 52321 - DNA, 22 bp, Artificial Sequence
  chemically synthesized
ctcttacatttgcttccatttt

SEQ ID NO: 52322 - DNA, 22 bp, Artificial Sequence
  chemically synthesized
tcttacatttgcttccattttg

SEQ ID NO: 52323 - DNA, 22 bp, Artificial Sequence
  chemically synthesized
ttacatttgcttccattttgac

SEQ ID NO: 52324 - DNA, 22 bp, Artificial Sequence
  chemically synthesized
acatttgcttccattttgacca

SEQ ID NO: 52325 - DNA, 22 bp, Artificial Sequence
  chemically synthesized
catttgcttccattttgaccaa

SEQ ID NO: 52326 - DNA, 22 bp, Artificial Sequence
  chemically synthesized
gcttccattttgaccaagtgag

SEQ ID NO: 52327 - DNA, 22 bp, Artificial Sequence
  chemically synthesized
cttccattttgaccaagtgagg

SEQ ID NO: 52328 - DNA, 22 bp, Artificial Sequence
  chemically synthesized
ccattttgaccaagtgaggaat

SEQ ID NO: 52329 - DNA, 22 bp, Artificial Sequence
  chemically synthesized
cattttgaccaagtgaggaata

SEQ ID NO: 52330 - DNA, 22 bp, Artificial Sequence
  chemically synthesized
tgaccaagtgaggaatagggaa

SEQ ID NO: 52331 - DNA, 22 bp, Artificial Sequence
  chemically synthesized
gaccaagtgaggaatagggaac

SEQ ID NO: 52332 - DNA, 22 bp, Artificial Sequence
  chemically synthesized
accaagtgaggaatagggaact

SEQ ID NO: 52333 - DNA, 22 bp, Artificial Sequence
  chemically synthesized
attctcaaaatattcctgttgt

SEQ ID NO: 52334 - DNA, 22 bp, Artificial Sequence
  chemically synthesized
tcaaaatattcctgttgtctga

SEQ ID NO: 52335 - DNA, 22 bp, Artificial Sequence
  chemically synthesized
aaaatattcctgttgtctgaat

SEQ ID NO: 52336 - DNA, 22 bp, Artificial Sequence
  chemically synthesized
ctgttgtctgaattaaggattt

SEQ ID NO: 52337 - DNA, 22 bp, Artificial Sequence
  chemically synthesized
ttgtctgaattaaggattttaa

SEQ ID NO: 52338 - DNA, 22 bp, Artificial Sequence
  chemically synthesized
tctgaattaaggattttaagta

SEQ ID NO: 52339 - DNA, 22 bp, Artificial Sequence
  chemically synthesized
aattaaggattttaagtacaca

SEQ ID NO: 52340 - DNA, 22 bp, Artificial Sequence
  chemically synthesized
aggattttaagtacacattgat

SEQ ID NO: 52341 - DNA, 22 bp, Artificial Sequence
  chemically synthesized
taagtacacattgataaatgtg

SEQ ID NO: 52342 - DNA, 22 bp, Artificial Sequence
  chemically synthesized
aagtacacattgataaatgtgg

SEQ ID NO: 52343 - DNA, 22 bp, Artificial Sequence
  chemically synthesized
agtacacattgataaatgtggc

SEQ ID NO: 52344 - DNA, 22 bp, Artificial Sequence
  chemically synthesized
ataaatgtggcttttttgttta

SEQ ID NO: 52345 - DNA, 22 bp, Artificial Sequence
  chemically synthesized
ttttgtttagcattagctacaa

SEQ ID NO: 52346 - DNA, 22 bp, Artificial Sequence
  chemically synthesized
tttgtttagcattagctacaag

SEQ ID NO: 52347 - DNA, 22 bp, Artificial Sequence
  chemically synthesized
ttgtttagcattagctacaagt

SEQ ID NO: 52348 - DNA, 22 bp, Artificial Sequence
  chemically synthesized
tgtttagcattagctacaagtt

SEQ ID NO: 52349 - DNA, 22 bp, Artificial Sequence
  chemically synthesized
gtttagcattagctacaagttc

SEQ ID NO: 52350 - DNA, 22 bp, Artificial Sequence
  chemically synthesized
tttagcattagctacaagttct

SEQ ID NO: 52351 - DNA, 22 bp, Artificial Sequence
  chemically synthesized
agcattagctacaagttctgag

SEQ ID NO: 52352 - DNA, 22 bp, Artificial Sequence
  chemically synthesized
gcattagctacaagttctgagg

SEQ ID NO: 52353 - DNA, 22 bp, Artificial Sequence
  chemically synthesized
gctacaagttctgaggtttaca

SEQ ID NO: 52354 - DNA, 22 bp, Artificial Sequence
  chemically synthesized
caagttctgaggtttacagact

SEQ ID NO: 52355 - DNA, 22 bp, Artificial Sequence
  chemically synthesized
tgaggtttacagactgaaggaa

SEQ ID NO: 52356 - DNA, 22 bp, Artificial Sequence
  chemically synthesized
aggtttacagactgaaggaaga

SEQ ID NO: 52357 - DNA, 22 bp, Artificial Sequence
  chemically synthesized
acagactgaaggaagacttagg

SEQ ID NO: 52358 - DNA, 22 bp, Artificial Sequence
  chemically synthesized
cagactgaaggaagacttagga

SEQ ID NO: 52359 - DNA, 22 bp, Artificial Sequence
  chemically synthesized
aaggaagacttaggaaaatatt

SEQ ID NO: 52360 - DNA, 22 bp, Artificial Sequence
  chemically synthesized
aggaaaatattttatcaaactt

SEQ ID NO: 52361 - DNA, 22 bp, Artificial Sequence
  chemically synthesized
ggaaaatattttatcaaactta

SEQ ID NO: 52362 - DNA, 22 bp, Artificial Sequence
  chemically synthesized
tatcaaacttactagtacatag

SEQ ID NO: 52363 - DNA, 22 bp, Artificial Sequence
  chemically synthesized
atcaaacttactagtacataga

SEQ ID NO: 52364 - DNA, 22 bp, Artificial Sequence
  chemically synthesized
tcaaacttactagtacatagaa

SEQ ID NO: 52365 - DNA, 22 bp, Artificial Sequence
  chemically synthesized
actagtacatagaacctttgca

SEQ ID NO: 52366 - DNA, 22 bp, Artificial Sequence
  chemically synthesized
ctagtacatagaacctttgcaa

SEQ ID NO: 52367 - DNA, 22 bp, Artificial Sequence
  chemically synthesized
gtacatagaacctttgcaaaaa

SEQ ID NO: 52368 - DNA, 22 bp, Artificial Sequence
  chemically synthesized
tgcaaaaaaaaaaattttttat

SEQ ID NO: 52369 - DNA, 22 bp, Artificial Sequence
  chemically synthesized
gcaaaaaaaaaaattttttatt

SEQ ID NO: 52370 - DNA, 22 bp, Artificial Sequence
  chemically synthesized
caaaaaaaaaaattttttattt

SEQ ID NO: 52371 - DNA, 22 bp, Artificial Sequence
  chemically synthesized
tttatttccaccgttaagattc

SEQ ID NO: 52372 - DNA, 22 bp, Artificial Sequence
  chemically synthesized
ttatttccaccgttaagattct

SEQ ID NO: 52373 - DNA, 22 bp, Artificial Sequence
  chemically synthesized
tatttccaccgttaagattctt

SEQ ID NO: 52374 - DNA, 22 bp, Artificial Sequence
  chemically synthesized
atttccaccgttaagattcttt

SEQ ID NO: 52375 - DNA, 22 bp, Artificial Sequence
  chemically synthesized
tttccaccgttaagattctttt

SEQ ID NO: 52376 - DNA, 22 bp, Artificial Sequence
  chemically synthesized
ccaccgttaagattcttttttt

SEQ ID NO: 52377 - DNA, 22 bp, Artificial Sequence
  chemically synthesized
caccgttaagattctttttttt

SEQ ID NO: 52378 - DNA, 22 bp, Artificial Sequence
  chemically synthesized
agattctttttttttttttttt

SEQ ID NO: 52379 - DNA, 22 bp, Artificial Sequence
  chemically synthesized
ttttttttttttttttgttccc

SEQ ID NO: 52380 - DNA, 22 bp, Artificial Sequence
  chemically synthesized
ttttttttttttttgttcccaa

SEQ ID NO: 52381 - DNA, 22 bp, Artificial Sequence
  chemically synthesized
tttttttttttttgttcccaag

SEQ ID NO: 52382 - DNA, 22 bp, Artificial Sequence
  chemically synthesized
ttttttttttttgttcccaagg

SEQ ID NO: 52383 - DNA, 22 bp, Artificial Sequence
  chemically synthesized
tttttttttttgttcccaaggt

SEQ ID NO: 52384 - DNA, 22 bp, Artificial Sequence
  chemically synthesized
ttttttttttgttcccaaggtc

SEQ ID NO: 52385 - DNA, 22 bp, Artificial Sequence
  chemically synthesized
tttttttttgttcccaaggtct

SEQ ID NO: 52386 - DNA, 22 bp, Artificial Sequence
  chemically synthesized
ttttttttgttcccaaggtctg

SEQ ID NO: 52387 - DNA, 22 bp, Artificial Sequence
  chemically synthesized
tttttttgttcccaaggtctga

SEQ ID NO: 52388 - DNA, 22 bp, Artificial Sequence
  chemically synthesized
ttttttgttcccaaggtctgac

SEQ ID NO: 52389 - DNA, 22 bp, Artificial Sequence
  chemically synthesized
tttttgttcccaaggtctgaca

SEQ ID NO: 52390 - DNA, 22 bp, Artificial Sequence
  chemically synthesized
ttttgttcccaaggtctgacac

SEQ ID NO: 52391 - DNA, 22 bp, Artificial Sequence
  chemically synthesized
tttgttcccaaggtctgacaca

SEQ ID NO: 52392 - DNA, 22 bp, Artificial Sequence
  chemically synthesized
ttgttcccaaggtctgacacat

SEQ ID NO: 52393 - DNA, 22 bp, Artificial Sequence
  chemically synthesized
tgttcccaaggtctgacacatt

SEQ ID NO: 52394 - DNA, 22 bp, Artificial Sequence
  chemically synthesized
gttcccaaggtctgacacattt

SEQ ID NO: 52395 - DNA, 22 bp, Artificial Sequence
  chemically synthesized
ttcccaaggtctgacacatttc

SEQ ID NO: 52396 - DNA, 22 bp, Artificial Sequence
  chemically synthesized
ccaaggtctgacacatttctaa

SEQ ID NO: 52397 - DNA, 22 bp, Artificial Sequence
  chemically synthesized
acacatttctaaaagtgggaat

SEQ ID NO: 52398 - DNA, 22 bp, Artificial Sequence
  chemically synthesized
ctaaaagtgggaatattattta

SEQ ID NO: 52399 - DNA, 22 bp, Artificial Sequence
  chemically synthesized
taaaagtgggaatattatttag

SEQ ID NO: 52400 - DNA, 22 bp, Artificial Sequence
  chemically synthesized
aaagtgggaatattatttaggt

SEQ ID NO: 52401 - DNA, 22 bp, Artificial Sequence
  chemically synthesized
tttaggtgcaaaaggaaatatt

SEQ ID NO: 52402 - DNA, 22 bp, Artificial Sequence
  chemically synthesized
aggtgcaaaaggaaatattctc

SEQ ID NO: 52403 - DNA, 22 bp, Artificial Sequence
  chemically synthesized
ggtgcaaaaggaaatattctcc

SEQ ID NO: 52404 - DNA, 22 bp, Artificial Sequence
  chemically synthesized
tcctaggtatcaaatagttaaa

SEQ ID NO: 52405 - DNA, 22 bp, Artificial Sequence
  chemically synthesized
ctaggtatcaaatagttaaagg

SEQ ID NO: 52406 - DNA, 22 bp, Artificial Sequence
  chemically synthesized
ggtatcaaatagttaaaggtaa

SEQ ID NO: 52407 - DNA, 22 bp, Artificial Sequence
  chemically synthesized
aaggtaatgtggttcaaaacag

SEQ ID NO: 52408 - DNA, 22 bp, Artificial Sequence
  chemically synthesized
aaaacagacttggttaaagtct

SEQ ID NO: 52409 - DNA, 22 bp, Artificial Sequence
  chemically synthesized
ggttaaagtcttctaaatgtag

SEQ ID NO: 52410 - DNA, 22 bp, Artificial Sequence
  chemically synthesized
gttaaagtcttctaaatgtagt

SEQ ID NO: 52411 - DNA, 22 bp, Artificial Sequence
  chemically synthesized
aagtcttctaaatgtagtgact

SEQ ID NO: 52412 - DNA, 22 bp, Artificial Sequence
  chemically synthesized
ctaaatgtagtgactgaactga

SEQ ID NO: 52413 - DNA, 22 bp, Artificial Sequence
  chemically synthesized
taaatgtagtgactgaactgat

SEQ ID NO: 52414 - DNA, 22 bp, Artificial Sequence
  chemically synthesized
aatgtagtgactgaactgattt

SEQ ID NO: 52415 - DNA, 22 bp, Artificial Sequence
  chemically synthesized
aactgatttacaatcaaaaccg

SEQ ID NO: 52416 - DNA, 22 bp, Artificial Sequence
  chemically synthesized
atttacaatcaaaaccgggaaa

SEQ ID NO: 52417 - DNA, 22 bp, Artificial Sequence
  chemically synthesized
acaatcaaaaccgggaaatgaa

SEQ ID NO: 52418 - DNA, 22 bp, Artificial Sequence
  chemically synthesized
caatcaaaaccgggaaatgaag

SEQ ID NO: 52419 - DNA, 22 bp, Artificial Sequence
  chemically synthesized
agaggttgctgattacacctcc

SEQ ID NO: 52420 - DNA, 22 bp, Artificial Sequence
  chemically synthesized
ctgattacacctccacatttca

SEQ ID NO: 52421 - DNA, 22 bp, Artificial Sequence
  chemically synthesized
attacacctccacatttcacct

SEQ ID NO: 52422 - DNA, 22 bp, Artificial Sequence
  chemically synthesized
cacctccacatttcacctaatt

SEQ ID NO: 52423 - DNA, 22 bp, Artificial Sequence
  chemically synthesized
cacatttcacctaattaatttt

SEQ ID NO: 52424 - DNA, 22 bp, Artificial Sequence
  chemically synthesized
cacctaattaattttataggag

SEQ ID NO: 52425 - DNA, 22 bp, Artificial Sequence
  chemically synthesized
acctaattaattttataggagg

SEQ ID NO: 52426 - DNA, 22 bp, Artificial Sequence
  chemically synthesized
attaattttataggaggcaaag

SEQ ID NO: 52427 - DNA, 22 bp, Artificial Sequence
  chemically synthesized
attttataggaggcaaagttct

SEQ ID NO: 52428 - DNA, 22 bp, Artificial Sequence
  chemically synthesized
tataggaggcaaagttcttgaa

SEQ ID NO: 52429 - DNA, 22 bp, Artificial Sequence
  chemically synthesized
ataggaggcaaagttcttgaaa

SEQ ID NO: 52430 - DNA, 22 bp, Artificial Sequence
  chemically synthesized
taggaggcaaagttcttgaaaa

SEQ ID NO: 52431 - DNA, 22 bp, Artificial Sequence
  chemically synthesized
ttgaaaataacaagatgatcaa

SEQ ID NO: 52432 - DNA, 22 bp, Artificial Sequence
  chemically synthesized
gaaaataacaagatgatcaaat

SEQ ID NO: 52433 - DNA, 22 bp, Artificial Sequence
  chemically synthesized
aaaataacaagatgatcaaatg

SEQ ID NO: 52434 - DNA, 22 bp, Artificial Sequence
  chemically synthesized
taacctcaacattttctatgct

SEQ ID NO: 52435 - DNA, 22 bp, Artificial Sequence
  chemically synthesized
aacattttctatgctcttaacg

SEQ ID NO: 52436 - DNA, 22 bp, Artificial Sequence
  chemically synthesized
tctatgctcttaacgtaaatta

SEQ ID NO: 52437 - DNA, 22 bp, Artificial Sequence
  chemically synthesized
ctatgctcttaacgtaaattat

SEQ ID NO: 52438 - DNA, 22 bp, Artificial Sequence
  chemically synthesized
tatgctcttaacgtaaattatt

SEQ ID NO: 52439 - DNA, 22 bp, Artificial Sequence
  chemically synthesized
tgctcttaacgtaaattattgc

SEQ ID NO: 52440 - DNA, 22 bp, Artificial Sequence
  chemically synthesized
ttaacgtaaattattgctaatt

SEQ ID NO: 52441 - DNA, 22 bp, Artificial Sequence
  chemically synthesized
aacgtaaattattgctaattaa

SEQ ID NO: 52442 - DNA, 22 bp, Artificial Sequence
  chemically synthesized
acgtaaattattgctaattaac

SEQ ID NO: 52443 - DNA, 22 bp, Artificial Sequence
  chemically synthesized
ttgctaattaacaagaattata

SEQ ID NO: 52444 - DNA, 22 bp, Artificial Sequence
  chemically synthesized
ctaattaacaagaattatattc

SEQ ID NO: 52445 - DNA, 22 bp, Artificial Sequence
  chemically synthesized
attaacaagaattatattctaa

SEQ ID NO: 52446 - DNA, 22 bp, Artificial Sequence
  chemically synthesized
acaagaattatattctaatgta

SEQ ID NO: 52447 - DNA, 22 bp, Artificial Sequence
  chemically synthesized
tattctaatgtatgaaatacgt

SEQ ID NO: 52448 - DNA, 22 bp, Artificial Sequence
  chemically synthesized
taatgtatgaaatacgtttaac

SEQ ID NO: 52449 - DNA, 22 bp, Artificial Sequence
  chemically synthesized
atgtatgaaatacgtttaacat

SEQ ID NO: 52450 - DNA, 22 bp, Artificial Sequence
  chemically synthesized
aacatcggtctccttgcaaaac

SEQ ID NO: 52451 - DNA, 22 bp, Artificial Sequence
  chemically synthesized
acatcggtctccttgcaaaaca

SEQ ID NO: 52452 - DNA, 22 bp, Artificial Sequence
  chemically synthesized
cttgcaaaacatttggctagtg

SEQ ID NO: 52453 - DNA, 22 bp, Artificial Sequence
  chemically synthesized
gcaaaacatttggctagtggtg

SEQ ID NO: 52454 - DNA, 22 bp, Artificial Sequence
  chemically synthesized
caaaacatttggctagtggtgt

SEQ ID NO: 52455 - DNA, 22 bp, Artificial Sequence
  chemically synthesized
ggctagtggtgttcagagaaat

SEQ ID NO: 52456 - DNA, 22 bp, Artificial Sequence
  chemically synthesized
gctagtggtgttcagagaaata

SEQ ID NO: 52457 - DNA, 22 bp, Artificial Sequence
  chemically synthesized
gtggtgttcagagaaataccaa

SEQ ID NO: 52458 - DNA, 22 bp, Artificial Sequence
  chemically synthesized
agagaaataccaaaacgtgttt

SEQ ID NO: 52459 - DNA, 22 bp, Artificial Sequence
  chemically synthesized
ttatcattgctggtatattatt

SEQ ID NO: 52460 - DNA, 22 bp, Artificial Sequence
  chemically synthesized
tatcattgctggtatattatta

SEQ ID NO: 52461 - DNA, 22 bp, Artificial Sequence
  chemically synthesized
atcattgctggtatattattaa

SEQ ID NO: 52462 - DNA, 22 bp, Artificial Sequence
  chemically synthesized
tcattgctggtatattattaaa

SEQ ID NO: 52463 - DNA, 22 bp, Artificial Sequence
  chemically synthesized
ctggtatattattaaaaatcag

SEQ ID NO: 52464 - DNA, 22 bp, Artificial Sequence
  chemically synthesized
gtatattattaaaaatcagaca

SEQ ID NO: 52465 - DNA, 22 bp, Artificial Sequence
  chemically synthesized
ttaaaaatcagacaaagtggga

SEQ ID NO: 52466 - DNA, 22 bp, Artificial Sequence
  chemically synthesized
aaaatcagacaaagtgggacac

SEQ ID NO: 52467 - DNA, 22 bp, Artificial Sequence
  chemically synthesized
tcatggtgtagtctactgattt

SEQ ID NO: 52468 - DNA, 22 bp, Artificial Sequence
  chemically synthesized
atggtgtagtctactgatttgc

SEQ ID NO: 52469 - DNA, 22 bp, Artificial Sequence
  chemically synthesized
ctgatttgcattgacatctttt

SEQ ID NO: 52470 - DNA, 22 bp, Artificial Sequence
  chemically synthesized
atttgcattgacatcttttctc

SEQ ID NO: 52471 - DNA, 22 bp, Artificial Sequence
  chemically synthesized
gcattgacatcttttctcagtg

SEQ ID NO: 52472 - DNA, 22 bp, Artificial Sequence
  chemically synthesized
cattgacatcttttctcagtgg

SEQ ID NO: 52473 - DNA, 22 bp, Artificial Sequence
  chemically synthesized
acatcttttctcagtggcaatc

SEQ ID NO: 52474 - DNA, 22 bp, Artificial Sequence
  chemically synthesized
ttctcagtggcaatcaacattt

SEQ ID NO: 52475 - DNA, 22 bp, Artificial Sequence
  chemically synthesized
tctcagtggcaatcaacatttc

SEQ ID NO: 52476 - DNA, 22 bp, Artificial Sequence
  chemically synthesized
ctcagtggcaatcaacatttcc

SEQ ID NO: 52477 - DNA, 22 bp, Artificial Sequence
  chemically synthesized
tcagtggcaatcaacatttcct

SEQ ID NO: 52478 - DNA, 22 bp, Artificial Sequence
  chemically synthesized
agtggcaatcaacatttccttt

SEQ ID NO: 52479 - DNA, 22 bp, Artificial Sequence
  chemically synthesized
cctttctgggcatctgataatt

SEQ ID NO: 52480 - DNA, 22 bp, Artificial Sequence
  chemically synthesized
ctttctgggcatctgataattt

SEQ ID NO: 52481 - DNA, 22 bp, Artificial Sequence
  chemically synthesized
tctgggcatctgataatttctc

SEQ ID NO: 52482 - DNA, 22 bp, Artificial Sequence
  chemically synthesized
ctgggcatctgataatttctct

SEQ ID NO: 52483 - DNA, 22 bp, Artificial Sequence
  chemically synthesized
tgggcatctgataatttctctg

SEQ ID NO: 52484 - DNA, 22 bp, Artificial Sequence
  chemically synthesized
ggcatctgataatttctctgca

SEQ ID NO: 52485 - DNA, 22 bp, Artificial Sequence
  chemically synthesized
ataatttctctgcattttaatg

SEQ ID NO: 52486 - DNA, 22 bp, Artificial Sequence
  chemically synthesized
ctctgcattttaatgcaaattc

SEQ ID NO: 52487 - DNA, 22 bp, Artificial Sequence
  chemically synthesized
tctgcattttaatgcaaattcc

SEQ ID NO: 52488 - DNA, 22 bp, Artificial Sequence
  chemically synthesized
tgcattttaatgcaaattcccc

SEQ ID NO: 52489 - DNA, 22 bp, Artificial Sequence
  chemically synthesized
cattttaatgcaaattcccctt

SEQ ID NO: 52490 - DNA, 22 bp, Artificial Sequence
  chemically synthesized
taatgcaaattcccctttccct

SEQ ID NO: 52491 - DNA, 22 bp, Artificial Sequence
  chemically synthesized
aatgcaaattcccctttcccta

SEQ ID NO: 52492 - DNA, 22 bp, Artificial Sequence
  chemically synthesized
atgcaaattcccctttccctaa

SEQ ID NO: 52493 - DNA, 22 bp, Artificial Sequence
  chemically synthesized
ccctttccctaaaaaccttcct

SEQ ID NO: 52494 - DNA, 22 bp, Artificial Sequence
  chemically synthesized
tccctaaaaaccttcctaaccc

SEQ ID NO: 52495 - DNA, 22 bp, Artificial Sequence
  chemically synthesized
ccctaaaaaccttcctaaccct

SEQ ID NO: 52496 - DNA, 22 bp, Artificial Sequence
  chemically synthesized
cctaaaaaccttcctaaccctc

SEQ ID NO: 52497 - DNA, 22 bp, Artificial Sequence
  chemically synthesized
aaaaccttcctaaccctcagcc

SEQ ID NO: 52498 - DNA, 22 bp, Artificial Sequence
  chemically synthesized
cctaaccctcagccatttaccc

SEQ ID NO: 52499 - DNA, 22 bp, Artificial Sequence
  chemically synthesized
ctaaccctcagccatttacccc

SEQ ID NO: 52500 - DNA, 22 bp, Artificial Sequence
  chemically synthesized
accctcagccatttaccccctc

SEQ ID NO: 52501 - DNA, 22 bp, Artificial Sequence
  chemically synthesized
agccatttaccccctccctcaa

SEQ ID NO: 52502 - DNA, 22 bp, Artificial Sequence
  chemically synthesized
accccctccctcaattcaactc

SEQ ID NO: 52503 - DNA, 22 bp, Artificial Sequence
  chemically synthesized
ccccctccctcaattcaactcc

SEQ ID NO: 52504 - DNA, 22 bp, Artificial Sequence
  chemically synthesized
cctcaattcaactccatcctcc

SEQ ID NO: 52505 - DNA, 22 bp, Artificial Sequence
  chemically synthesized
aattcaactccatcctccttcg

SEQ ID NO: 52506 - DNA, 22 bp, Artificial Sequence
  chemically synthesized
aactccatcctccttcgcccca

SEQ ID NO: 52507 - DNA, 22 bp, Artificial Sequence
  chemically synthesized
catcctccttcgccccaacaat

SEQ ID NO: 52508 - DNA, 22 bp, Artificial Sequence
  chemically synthesized
cttcgccccaacaataccaaca

SEQ ID NO: 52509 - DNA, 22 bp, Artificial Sequence
  chemically synthesized
cgccccaacaataccaacattt

SEQ ID NO: 52510 - DNA, 22 bp, Artificial Sequence
  chemically synthesized
gccccaacaataccaacatttc

SEQ ID NO: 52511 - DNA, 22 bp, Artificial Sequence
  chemically synthesized
ctaagctccggcctaaactccg

SEQ ID NO: 52512 - DNA, 22 bp, Artificial Sequence
  chemically synthesized
taagctccggcctaaactccgg

SEQ ID NO: 52513 - DNA, 22 bp, Artificial Sequence
  chemically synthesized
agctccggcctaaactccggct

SEQ ID NO: 52514 - DNA, 22 bp, Artificial Sequence
  chemically synthesized
cggcctaaactccggctacaaa

SEQ ID NO: 52515 - DNA, 22 bp, Artificial Sequence
  chemically synthesized
aactccggctacaaagcaggga

SEQ ID NO: 52516 - DNA, 22 bp, Artificial Sequence
  chemically synthesized
cggctacaaagcagggagtcct

SEQ ID NO: 52517 - DNA, 22 bp, Artificial Sequence
  chemically synthesized
caaagcagggagtcctcgattg

SEQ ID NO: 52518 - DNA, 22 bp, Artificial Sequence
  chemically synthesized
gattgaagtggaagggagtggg

SEQ ID NO: 52519 - DNA, 22 bp, Artificial Sequence
  chemically synthesized
aagtggaagggagtgggcaaat

SEQ ID NO: 52520 - DNA, 22 bp, Artificial Sequence
  chemically synthesized
gccgcgaattctctctacgagg

SEQ ID NO: 52521 - DNA, 22 bp, Artificial Sequence
  chemically synthesized
tctctacgaggggaggaagaaa

SEQ ID NO: 52522 - DNA, 22 bp, Artificial Sequence
  chemically synthesized
tctacgaggggaggaagaaata

SEQ ID NO: 52523 - DNA, 22 bp, Artificial Sequence
  chemically synthesized
tacgaggggaggaagaaataga

SEQ ID NO: 52524 - DNA, 22 bp, Artificial Sequence
  chemically synthesized
cgaggggaggaagaaatagaaa

SEQ ID NO: 52525 - DNA, 22 bp, Artificial Sequence
  chemically synthesized
ctacgttcaaacagcaagacag

SEQ ID NO: 52526 - DNA, 22 bp, Artificial Sequence
  chemically synthesized
tacgttcaaacagcaagacagc

SEQ ID NO: 52527 - DNA, 22 bp, Artificial Sequence
  chemically synthesized
cgttcaaacagcaagacagcct

SEQ ID NO: 52528 - DNA, 22 bp, Artificial Sequence
  chemically synthesized
aaacagcaagacagcctggaac

SEQ ID NO: 52529 - DNA, 22 bp, Artificial Sequence
  chemically synthesized
gaacgtctcaatgtctcagtga

SEQ ID NO: 52530 - DNA, 22 bp, Artificial Sequence
  chemically synthesized
aatgtctcagtgacagactgag

SEQ ID NO: 52531 - DNA, 22 bp, Artificial Sequence
  chemically synthesized
agtgacagactgagatctcttt

SEQ ID NO: 52532 - DNA, 22 bp, Artificial Sequence
  chemically synthesized
agatctctttcctctctgtgta

SEQ ID NO: 52533 - DNA, 22 bp, Artificial Sequence
  chemically synthesized
tttcctctctgtgtagttgcaa

SEQ ID NO: 52534 - DNA, 22 bp, Artificial Sequence
  chemically synthesized
tcctctctgtgtagttgcaaaa

SEQ ID NO: 52535 - DNA, 22 bp, Artificial Sequence
  chemically synthesized
cctctctgtgtagttgcaaaag

SEQ ID NO: 52536 - DNA, 22 bp, Artificial Sequence
  chemically synthesized
ctctctgtgtagttgcaaaaga

SEQ ID NO: 52537 - DNA, 22 bp, Artificial Sequence
  chemically synthesized
tctgtgtagttgcaaaagaata

SEQ ID NO: 52538 - DNA, 22 bp, Artificial Sequence
  chemically synthesized
tgtgtagttgcaaaagaataaa

SEQ ID NO: 52539 - DNA, 22 bp, Artificial Sequence
  chemically synthesized
tgtagttgcaaaagaataaatt

SEQ ID NO: 52540 - DNA, 22 bp, Artificial Sequence
  chemically synthesized
caaaagaataaatttaagggaa

SEQ ID NO: 52541 - DNA, 22 bp, Artificial Sequence
  chemically synthesized
aagggaaaaaaataatccttat

SEQ ID NO: 52542 - DNA, 22 bp, Artificial Sequence
  chemically synthesized
agggaaaaaaataatccttata

SEQ ID NO: 52543 - DNA, 22 bp, Artificial Sequence
  chemically synthesized
ataggaaatgttggtaaggagc

SEQ ID NO: 52544 - DNA, 22 bp, Artificial Sequence
  chemically synthesized
taggaaatgttggtaaggagcg

SEQ ID NO: 52545 - DNA, 22 bp, Artificial Sequence
  chemically synthesized
gtaaggagcgagcaaaacgaga

SEQ ID NO: 52546 - DNA, 22 bp, Artificial Sequence
  chemically synthesized
ccggggagcggagggggagggg

SEQ ID NO: 52547 - DNA, 22 bp, Artificial Sequence
  chemically synthesized
caagtttgctttccaagtcctt

SEQ ID NO: 52548 - DNA, 22 bp, Artificial Sequence
  chemically synthesized
aagtttgctttccaagtccttc

SEQ ID NO: 52549 - DNA, 22 bp, Artificial Sequence
  chemically synthesized
gctttccaagtccttctccttg

SEQ ID NO: 52550 - DNA, 22 bp, Artificial Sequence
  chemically synthesized
ctttccaagtccttctccttga

SEQ ID NO: 52551 - DNA, 22 bp, Artificial Sequence
  chemically synthesized
tccaagtccttctccttgattg

SEQ ID NO: 52552 - DNA, 22 bp, Artificial Sequence
  chemically synthesized
ccaagtccttctccttgattgt

SEQ ID NO: 52553 - DNA, 22 bp, Artificial Sequence
  chemically synthesized
caagtccttctccttgattgtc

SEQ ID NO: 52554 - DNA, 22 bp, Artificial Sequence
  chemically synthesized
ctccttgattgtcttaacaggg

SEQ ID NO: 52555 - DNA, 22 bp, Artificial Sequence
  chemically synthesized
tccttgattgtcttaacagggt

SEQ ID NO: 52556 - DNA, 22 bp, Artificial Sequence
  chemically synthesized
cttgattgtcttaacagggtaa

SEQ ID NO: 52557 - DNA, 22 bp, Artificial Sequence
  chemically synthesized
gattgtcttaacagggtaaaga

SEQ ID NO: 52558 - DNA, 22 bp, Artificial Sequence
  chemically synthesized
attgtcttaacagggtaaagaa

SEQ ID NO: 52559 - DNA, 22 bp, Artificial Sequence
  chemically synthesized
tcttaacagggtaaagaagcaa

SEQ ID NO: 52560 - DNA, 22 bp, Artificial Sequence
  chemically synthesized
aacagggtaaagaagcaaacgg

SEQ ID NO: 52561 - DNA, 22 bp, Artificial Sequence
  chemically synthesized
acagggtaaagaagcaaacgga

SEQ ID NO: 52562 - DNA, 22 bp, Artificial Sequence
  chemically synthesized
aaattcagagaggaaaagcaaa

SEQ ID NO: 52563 - DNA, 22 bp, Artificial Sequence
  chemically synthesized
agagaggaaaagcaaagaaaca

SEQ ID NO: 52564 - DNA, 22 bp, Artificial Sequence
  chemically synthesized
caggcccggggcaggggccccg

SEQ ID NO: 52565 - DNA, 22 bp, Artificial Sequence
  chemically synthesized
ggcgcggggactctgaggcaca

SEQ ID NO: 52566 - DNA, 22 bp, Artificial Sequence
  chemically synthesized
tgaggcacaaagcgagcagcgt

SEQ ID NO: 52567 - DNA, 22 bp, Artificial Sequence
  chemically synthesized
aggcacaaagcgagcagcgtgc

SEQ ID NO: 52568 - DNA, 22 bp, Artificial Sequence
  chemically synthesized
gctgcaggctcccgccgcgctt

SEQ ID NO: 52569 - DNA, 22 bp, Artificial Sequence
  chemically synthesized
caggctcccgccgcgcttgctg

SEQ ID NO: 52570 - DNA, 22 bp, Artificial Sequence
  chemically synthesized
ccgccgcgcttgctgcgaacac

SEQ ID NO: 52571 - DNA, 22 bp, Artificial Sequence
  chemically synthesized
gctgcgaacacgtgcagcagcg

SEQ ID NO: 52572 - DNA, 22 bp, Artificial Sequence
  chemically synthesized
ctgcgaacacgtgcagcagcgg

SEQ ID NO: 52573 - DNA, 22 bp, Artificial Sequence
  chemically synthesized
cgaacacgtgcagcagcggccg

SEQ ID NO: 52574 - DNA, 22 bp, Artificial Sequence
  chemically synthesized
ggggcccgggggcccggagacg

SEQ ID NO: 52575 - DNA, 22 bp, Artificial Sequence
  chemically synthesized
gggcccgggggcccggagacgg

SEQ ID NO: 52576 - DNA, 22 bp, Artificial Sequence
  chemically synthesized
actgctgcctccatgcccgtcc

SEQ ID NO: 52577 - DNA, 22 bp, Artificial Sequence
  chemically synthesized
ctgcctccatgcccgtccagct

SEQ ID NO: 52578 - DNA, 22 bp, Artificial Sequence
  chemically synthesized
cctccatgcccgtccagctcgg

SEQ ID NO: 52579 - DNA, 22 bp, Artificial Sequence
  chemically synthesized
catgcccgtccagctcggccag

SEQ ID NO: 52580 - DNA, 22 bp, Artificial Sequence
  chemically synthesized
ggccagctcggccgcggggtga

SEQ ID NO: 52581 - DNA, 22 bp, Artificial Sequence
  chemically synthesized
ggccgcggggtgacggttccct

SEQ ID NO: 52582 - DNA, 22 bp, Artificial Sequence
  chemically synthesized
cctgggcctgccagttggtgaa

SEQ ID NO: 52583 - DNA, 22 bp, Artificial Sequence
  chemically synthesized
ggcctgccagttggtgaaaaag

SEQ ID NO: 52584 - DNA, 22 bp, Artificial Sequence
  chemically synthesized
ccagttggtgaaaaaggaagtg

SEQ ID NO: 52585 - DNA, 22 bp, Artificial Sequence
  chemically synthesized
gtgaaaaaggaagtgaggtttg

SEQ ID NO: 52586 - DNA, 22 bp, Artificial Sequence
  chemically synthesized
ggaaaacccggctggttaacct

SEQ ID NO: 52587 - DNA, 22 bp, Artificial Sequence
  chemically synthesized
gaaaacccggctggttaacctg

SEQ ID NO: 52588 - DNA, 22 bp, Artificial Sequence
  chemically synthesized
gttaacctggtgcagtctcagt

SEQ ID NO: 52589 - DNA, 22 bp, Artificial Sequence
  chemically synthesized
acctggtgcagtctcagtatct

SEQ ID NO: 52590 - DNA, 22 bp, Artificial Sequence
  chemically synthesized
gtgcagtctcagtatctccgca

SEQ ID NO: 52591 - DNA, 22 bp, Artificial Sequence
  chemically synthesized
agtatctccgcacacacctcaa

SEQ ID NO: 52592 - DNA, 22 bp, Artificial Sequence
  chemically synthesized
cgcacacacctcaagcgcgggt

SEQ ID NO: 52593 - DNA, 22 bp, Artificial Sequence
  chemically synthesized
aagcgcgggtcctgagattcat

SEQ ID NO: 52594 - DNA, 22 bp, Artificial Sequence
  chemically synthesized
agattcattctgtgtccacaag

SEQ ID NO: 52595 - DNA, 22 bp, Artificial Sequence
  chemically synthesized
attctgtgtccacaagcttaca

SEQ ID NO: 52596 - DNA, 22 bp, Artificial Sequence
  chemically synthesized
tgtgtccacaagcttacacttt

SEQ ID NO: 52597 - DNA, 22 bp, Artificial Sequence
  chemically synthesized
tgtccacaagcttacacttttt

SEQ ID NO: 52598 - DNA, 22 bp, Artificial Sequence
  chemically synthesized
acactttttactttgggggatc

SEQ ID NO: 52599 - DNA, 22 bp, Artificial Sequence
  chemically synthesized
cactttttactttgggggatct

SEQ ID NO: 52600 - DNA, 22 bp, Artificial Sequence
  chemically synthesized
tttactttgggggatctctgca

SEQ ID NO: 52601 - DNA, 22 bp, Artificial Sequence
  chemically synthesized
ttactttgggggatctctgcaa

SEQ ID NO: 52602 - DNA, 22 bp, Artificial Sequence
  chemically synthesized
tactttgggggatctctgcaaa

SEQ ID NO: 52603 - DNA, 22 bp, Artificial Sequence
  chemically synthesized
actttgggggatctctgcaaat

SEQ ID NO: 52604 - DNA, 22 bp, Artificial Sequence
  chemically synthesized
ctttgggggatctctgcaaatg

SEQ ID NO: 52605 - DNA, 22 bp, Artificial Sequence
  chemically synthesized
tgggggatctctgcaaatgcat

SEQ ID NO: 52606 - DNA, 22 bp, Artificial Sequence
  chemically synthesized
gggggatctctgcaaatgcatt

SEQ ID NO: 52607 - DNA, 22 bp, Artificial Sequence
  chemically synthesized
ggggatctctgcaaatgcattt

SEQ ID NO: 52608 - DNA, 22 bp, Artificial Sequence
  chemically synthesized
tgcaaatgcatttcccccgcaa

SEQ ID NO: 52609 - DNA, 22 bp, Artificial Sequence
  chemically synthesized
caaatgcatttcccccgcaatt

SEQ ID NO: 52610 - DNA, 22 bp, Artificial Sequence
  chemically synthesized
cccccgcaattctgggcactgg

SEQ ID NO: 52611 - DNA, 22 bp, Artificial Sequence
  chemically synthesized
ccccgcaattctgggcactggg

SEQ ID NO: 52612 - DNA, 22 bp, Artificial Sequence
  chemically synthesized
tgggcactgggtgtgcgcggcg

SEQ ID NO: 52613 - DNA, 22 bp, Artificial Sequence
  chemically synthesized
ggcactgggtgtgcgcggcggc

SEQ ID NO: 52614 - DNA, 22 bp, Artificial Sequence
  chemically synthesized
ggtgtgcgcggcggcggctgcg

SEQ ID NO: 52615 - DNA, 22 bp, Artificial Sequence
  chemically synthesized
cggttattcattattaatgacg

SEQ ID NO: 52616 - DNA, 22 bp, Artificial Sequence
  chemically synthesized
ttcattattaatgacgctgcct

SEQ ID NO: 52617 - DNA, 22 bp, Artificial Sequence
  chemically synthesized
attattaatgacgctgcctgcc

SEQ ID NO: 52618 - DNA, 22 bp, Artificial Sequence
  chemically synthesized
ttaatgacgctgcctgcccgca

SEQ ID NO: 52619 - DNA, 22 bp, Artificial Sequence
  chemically synthesized
atgacgctgcctgcccgcatca

SEQ ID NO: 52620 - DNA, 22 bp, Artificial Sequence
  chemically synthesized
cctgcccgcatcattatgatga

SEQ ID NO: 52621 - DNA, 22 bp, Artificial Sequence
  chemically synthesized
cccgcatcattatgatgataac

SEQ ID NO: 52622 - DNA, 22 bp, Artificial Sequence
  chemically synthesized
tgatgataactattactattgt

SEQ ID NO: 52623 - DNA, 22 bp, Artificial Sequence
  chemically synthesized
ttactattgttgtgattccgag

SEQ ID NO: 52624 - DNA, 22 bp, Artificial Sequence
  chemically synthesized
ctattgttgtgattccgagctc

SEQ ID NO: 52625 - DNA, 22 bp, Artificial Sequence
  chemically synthesized
ttgttgtgattccgagctccga

SEQ ID NO: 52626 - DNA, 22 bp, Artificial Sequence
  chemically synthesized
ttgtgattccgagctccgaggc

SEQ ID NO: 52627 - DNA, 22 bp, Artificial Sequence
  chemically synthesized
tgattccgagctccgaggcgag

SEQ ID NO: 52628 - DNA, 22 bp, Artificial Sequence
  chemically synthesized
cgagctccgaggcgagaggggg

SEQ ID NO: 52629 - DNA, 22 bp, Artificial Sequence
  chemically synthesized
cgaggcgagagggggggtgtcg

SEQ ID NO: 52630 - DNA, 22 bp, Artificial Sequence
  chemically synthesized
cagagccgcccagcaagccagc

SEQ ID NO: 52631 - DNA, 22 bp, Artificial Sequence
  chemically synthesized
tgctttgcatgggggtgagggg

SEQ ID NO: 52632 - DNA, 22 bp, Artificial Sequence
  chemically synthesized
tgcatgggggtgagggggtgga

SEQ ID NO: 52633 - DNA, 22 bp, Artificial Sequence
  chemically synthesized
gcatgggggtgagggggtggaa

SEQ ID NO: 52634 - DNA, 22 bp, Artificial Sequence
  chemically synthesized
catgggggtgagggggtggaag

SEQ ID NO: 52635 - DNA, 22 bp, Artificial Sequence
  chemically synthesized
gagaccaagtgcaaacttgcca

SEQ ID NO: 52636 - DNA, 22 bp, Artificial Sequence
  chemically synthesized
gccatatccccctcttcggcca

SEQ ID NO: 52637 - DNA, 22 bp, Artificial Sequence
  chemically synthesized
ccatatccccctcttcggccat

SEQ ID NO: 52638 - DNA, 22 bp, Artificial Sequence
  chemically synthesized
ttcggccatgccccgaagccct

SEQ ID NO: 52639 - DNA, 22 bp, Artificial Sequence
  chemically synthesized
cggccatgccccgaagccctag

SEQ ID NO: 52640 - DNA, 22 bp, Artificial Sequence
  chemically synthesized
ggccatgccccgaagccctaga

SEQ ID NO: 52641 - DNA, 22 bp, Artificial Sequence
  chemically synthesized
gagcgcgcactcccggttcctc

SEQ ID NO: 52642 - DNA, 22 bp, Artificial Sequence
  chemically synthesized
ccggttcctccctaccaaaaat

SEQ ID NO: 52643 - DNA, 22 bp, Artificial Sequence
  chemically synthesized
ctccctaccaaaaatgccggcc

SEQ ID NO: 52644 - DNA, 22 bp, Artificial Sequence
  chemically synthesized
cctaccaaaaatgccggccccg

SEQ ID NO: 52645 - DNA, 22 bp, Artificial Sequence
  chemically synthesized
ccaaaaatgccggccccgaaag

SEQ ID NO: 52646 - DNA, 22 bp, Artificial Sequence
  chemically synthesized
caccgtgctccgagcccggcgc

SEQ ID NO: 52647 - DNA, 22 bp, Artificial Sequence
  chemically synthesized
cgagcccggcgcgcgctggtct

SEQ ID NO: 52648 - DNA, 22 bp, Artificial Sequence
  chemically synthesized
gtctcagctcgcgcacgggggt

SEQ ID NO: 52649 - DNA, 22 bp, Artificial Sequence
  chemically synthesized
agctcgcgcacgggggtgtcgg

SEQ ID NO: 52650 - DNA, 22 bp, Artificial Sequence
  chemically synthesized
gcgcacgggggtgtcggccgcg

SEQ ID NO: 52651 - DNA, 22 bp, Artificial Sequence
  chemically synthesized
ctccgcggccccggccagaagc

SEQ ID NO: 52652 - DNA, 22 bp, Artificial Sequence
  chemically synthesized
tccgcggccccggccagaagca

SEQ ID NO: 52653 - DNA, 22 bp, Artificial Sequence
  chemically synthesized
cgcggccccggccagaagcatt

SEQ ID NO: 52654 - DNA, 22 bp, Artificial Sequence
  chemically synthesized
ttaaagtcaaaatgaagaacaa

SEQ ID NO: 52655 - DNA, 22 bp, Artificial Sequence
  chemically synthesized
taaagtcaaaatgaagaacaaa

SEQ ID NO: 52656 - DNA, 22 bp, Artificial Sequence
  chemically synthesized
aaagtcaaaatgaagaacaaag

SEQ ID NO: 52657 - DNA, 22 bp, Artificial Sequence
  chemically synthesized
aagtcaaaatgaagaacaaaga

SEQ ID NO: 52658 - DNA, 22 bp, Artificial Sequence
  chemically synthesized
tgcctaaccgttctttcccccc

SEQ ID NO: 52659 - DNA, 22 bp, Artificial Sequence
  chemically synthesized
cctaaccgttctttccccccac

SEQ ID NO: 52660 - DNA, 22 bp, Artificial Sequence
  chemically synthesized
accgttctttccccccaccccc

SEQ ID NO: 52661 - DNA, 22 bp, Artificial Sequence
  chemically synthesized
tttccccccacccccaccctcg

SEQ ID NO: 52662 - DNA, 22 bp, Artificial Sequence
  chemically synthesized
tccccccacccccaccctcgca

SEQ ID NO: 52663 - DNA, 22 bp, Artificial Sequence
  chemically synthesized
ccccccacccccaccctcgcaa

SEQ ID NO: 52664 - DNA, 22 bp, Artificial Sequence
  chemically synthesized
cccccacccccaccctcgcaaa

SEQ ID NO: 52665 - DNA, 22 bp, Artificial Sequence
  chemically synthesized
gcaaagctcgttcctccccgga

SEQ ID NO: 52666 - DNA, 22 bp, Artificial Sequence
  chemically synthesized
gttcctccccggacgagaatcg

SEQ ID NO: 52667 - DNA, 22 bp, Artificial Sequence
  chemically synthesized
ctccccggacgagaatcgccgg

SEQ ID NO: 52668 - DNA, 22 bp, Artificial Sequence
  chemically synthesized
cccggacgagaatcgccgggca

SEQ ID NO: 52669 - DNA, 22 bp, Artificial Sequence
  chemically synthesized
tggtacaggttcaagttcgctg

SEQ ID NO: 52670 - DNA, 22 bp, Artificial Sequence
  chemically synthesized
gtacaggttcaagttcgctgag

SEQ ID NO: 52671 - DNA, 22 bp, Artificial Sequence
  chemically synthesized
aagttcgctgagctttcttgat

SEQ ID NO: 52672 - DNA, 22 bp, Artificial Sequence
  chemically synthesized
gctgagctttcttgatcttgtt

SEQ ID NO: 52673 - DNA, 22 bp, Artificial Sequence
  chemically synthesized
agctttcttgatcttgttctgc

SEQ ID NO: 52674 - DNA, 22 bp, Artificial Sequence
  chemically synthesized
tcttgatcttgttctgcctcct

SEQ ID NO: 52675 - DNA, 22 bp, Artificial Sequence
  chemically synthesized
cttgatcttgttctgcctccta

SEQ ID NO: 52676 - DNA, 22 bp, Artificial Sequence
  chemically synthesized
ttgatcttgttctgcctcctag

SEQ ID NO: 52677 - DNA, 22 bp, Artificial Sequence
  chemically synthesized
gatcttgttctgcctcctagcg

SEQ ID NO: 52678 - DNA, 22 bp, Artificial Sequence
  chemically synthesized
atcttgttctgcctcctagcga

SEQ ID NO: 52679 - DNA, 22 bp, Artificial Sequence
  chemically synthesized
gttctgcctcctagcgaccgaa

SEQ ID NO: 52680 - DNA, 22 bp, Artificial Sequence
  chemically synthesized
ttctgcctcctagcgaccgaat

SEQ ID NO: 52681 - DNA, 22 bp, Artificial Sequence
  chemically synthesized
tgcctcctagcgaccgaatggc

SEQ ID NO: 52682 - DNA, 22 bp, Artificial Sequence
  chemically synthesized
cctcctagcgaccgaatggctc

SEQ ID NO: 52683 - DNA, 22 bp, Artificial Sequence
  chemically synthesized
ctagcgaccgaatggctcattc

SEQ ID NO: 52684 - DNA, 22 bp, Artificial Sequence
  chemically synthesized
gcgaccgaatggctcattcagc

SEQ ID NO: 52685 - DNA, 22 bp, Artificial Sequence
  chemically synthesized
attcagcccacatagcagaggc

SEQ ID NO: 52686 - DNA, 22 bp, Artificial Sequence
  chemically synthesized
agcccacatagcagaggcgggg

SEQ ID NO: 52687 - DNA, 22 bp, Artificial Sequence
  chemically synthesized
aggaccgggatggctcctgccc

SEQ ID NO: 52688 - DNA, 22 bp, Artificial Sequence
  chemically synthesized
ctgccccctctgagcacccaga

SEQ ID NO: 52689 - DNA, 22 bp, Artificial Sequence
  chemically synthesized
ccccctctgagcacccagaaaa

SEQ ID NO: 52690 - DNA, 22 bp, Artificial Sequence
  chemically synthesized
tgagcacccagaaaatgaggac

SEQ ID NO: 52691 - DNA, 22 bp, Artificial Sequence
  chemically synthesized
agcacccagaaaatgaggacag

SEQ ID NO: 52692 - DNA, 22 bp, Artificial Sequence
  chemically synthesized
accccctcccaaactggccctt

SEQ ID NO: 52693 - DNA, 22 bp, Artificial Sequence
  chemically synthesized
ccaaactggccctttaaccccg

SEQ ID NO: 52694 - DNA, 22 bp, Artificial Sequence
  chemically synthesized
gccctttaaccccgggacagga

SEQ ID NO: 52695 - DNA, 22 bp, Artificial Sequence
  chemically synthesized
taaccccgggacaggaggaggg

SEQ ID NO: 52696 - DNA, 22 bp, Artificial Sequence
  chemically synthesized
aaccccgggacaggaggagggg

SEQ ID NO: 52697 - DNA, 22 bp, Artificial Sequence
  chemically synthesized
accccgggacaggaggaggggg

SEQ ID NO: 52698 - DNA, 22 bp, Artificial Sequence
  chemically synthesized
accctcccagcctagagtgtcc

SEQ ID NO: 52699 - DNA, 22 bp, Artificial Sequence
  chemically synthesized
ccagcctagagtgtcccaagat

SEQ ID NO: 52700 - DNA, 22 bp, Artificial Sequence
  chemically synthesized
gagtgtcccaagatggacccag

SEQ ID NO: 52701 - DNA, 22 bp, Artificial Sequence
  chemically synthesized
gactgcgcgccccggtctgtcc

SEQ ID NO: 52702 - DNA, 22 bp, Artificial Sequence
  chemically synthesized
cgcgccccggtctgtcctttga

SEQ ID NO: 52703 - DNA, 22 bp, Artificial Sequence
  chemically synthesized
tcctttgagcccccactgcatc

SEQ ID NO: 52704 - DNA, 22 bp, Artificial Sequence
  chemically synthesized
tgagcccccactgcatccttcc

SEQ ID NO: 52705 - DNA, 22 bp, Artificial Sequence
  chemically synthesized
gagcccccactgcatccttccg

SEQ ID NO: 52706 - DNA, 22 bp, Artificial Sequence
  chemically synthesized
agcccccactgcatccttccga

SEQ ID NO: 52707 - DNA, 22 bp, Artificial Sequence
  chemically synthesized
catccttccgaagaagggcctg

SEQ ID NO: 52708 - DNA, 22 bp, Artificial Sequence
  chemically synthesized
ccgaagaagggcctgactttcc

SEQ ID NO: 52709 - DNA, 22 bp, Artificial Sequence
  chemically synthesized
cgaagaagggcctgactttccc

SEQ ID NO: 52710 - DNA, 22 bp, Artificial Sequence
  chemically synthesized
actttcccgagtcctgcgaaca

SEQ ID NO: 52711 - DNA, 22 bp, Artificial Sequence
  chemically synthesized
tcccgagtcctgcgaacactgc

SEQ ID NO: 52712 - DNA, 22 bp, Artificial Sequence
  chemically synthesized
cccgagtcctgcgaacactgcc

SEQ ID NO: 52713 - DNA, 22 bp, Artificial Sequence
  chemically synthesized
ccgagtcctgcgaacactgccc

SEQ ID NO: 52714 - DNA, 22 bp, Artificial Sequence
  chemically synthesized
cgaacactgcccttccttcccg

SEQ ID NO: 52715 - DNA, 22 bp, Artificial Sequence
  chemically synthesized
cccttccttcccgccggtacct

SEQ ID NO: 52716 - DNA, 22 bp, Artificial Sequence
  chemically synthesized
ccttcccgccggtacctggccg

SEQ ID NO: 52717 - DNA, 22 bp, Artificial Sequence
  chemically synthesized
cttcccgccggtacctggccgg

SEQ ID NO: 52718 - DNA, 22 bp, Artificial Sequence
  chemically synthesized
cccgccggtacctggccgggct

SEQ ID NO: 52719 - DNA, 22 bp, Artificial Sequence
  chemically synthesized
ccgccggtacctggccgggctg

SEQ ID NO: 52720 - DNA, 22 bp, Artificial Sequence
  chemically synthesized
gccgggctgtaacttcacaccg

SEQ ID NO: 52721 - DNA, 22 bp, Artificial Sequence
  chemically synthesized
taacttcacaccgccgcgcgcc

SEQ ID NO: 52722 - DNA, 22 bp, Artificial Sequence
  chemically synthesized
cacaccgccgcgcgccgcgtct

SEQ ID NO: 52723 - DNA, 22 bp, Artificial Sequence
  chemically synthesized
acaccgccgcgcgccgcgtctg

SEQ ID NO: 52724 - DNA, 22 bp, Artificial Sequence
  chemically synthesized
atccgcatccggcgcggccggg

SEQ ID NO: 52725 - DNA, 22 bp, Artificial Sequence
  chemically synthesized
ggggcgggggagagcggcgagg

SEQ ID NO: 52726 - DNA, 22 bp, Artificial Sequence
  chemically synthesized
ccgaagtgtgtgacaagttcca

SEQ ID NO: 52727 - DNA, 22 bp, Artificial Sequence
  chemically synthesized
cgaagtgtgtgacaagttccag

SEQ ID NO: 52728 - DNA, 22 bp, Artificial Sequence
  chemically synthesized
cagggcccagtgaaaaattaaa

SEQ ID NO: 52729 - DNA, 22 bp, Artificial Sequence
  chemically synthesized
aattccctgtgcgcacccccca

SEQ ID NO: 52730 - DNA, 22 bp, Artificial Sequence
  chemically synthesized
cctgtgcgcaccccccaccacc

SEQ ID NO: 52731 - DNA, 22 bp, Artificial Sequence
  chemically synthesized
tgcgcaccccccaccaccaccc

SEQ ID NO: 52732 - DNA, 22 bp, Artificial Sequence
  chemically synthesized
taaaaaaacacagaaccaagta

SEQ ID NO: 52733 - DNA, 22 bp, Artificial Sequence
  chemically synthesized
aaaaaaacacagaaccaagtat

SEQ ID NO: 52734 - DNA, 22 bp, Artificial Sequence
  chemically synthesized
aaaaaacacagaaccaagtata

SEQ ID NO: 52735 - DNA, 22 bp, Artificial Sequence
  chemically synthesized
taaaactgcatcaaaaatttaa

SEQ ID NO: 52736 - DNA, 22 bp, Artificial Sequence
  chemically synthesized
aaaactgcatcaaaaatttaaa

SEQ ID NO: 52737 - DNA, 22 bp, Artificial Sequence
  chemically synthesized
aaactgcatcaaaaatttaaag

SEQ ID NO: 52738 - DNA, 22 bp, Artificial Sequence
  chemically synthesized
catcaaaaatttaaagtaagaa

SEQ ID NO: 52739 - DNA, 22 bp, Artificial Sequence
  chemically synthesized
aaagtaagaatcataaattgag

SEQ ID NO: 52740 - DNA, 22 bp, Artificial Sequence
  chemically synthesized
aagtaagaatcataaattgagt

SEQ ID NO: 52741 - DNA, 22 bp, Artificial Sequence
  chemically synthesized
agtagggggggaatgtgggccc

SEQ ID NO: 52742 - DNA, 22 bp, Artificial Sequence
  chemically synthesized
acgcctttctttcccttgctgc

SEQ ID NO: 52743 - DNA, 22 bp, Artificial Sequence
  chemically synthesized
tctttcccttgctgccaaactt

SEQ ID NO: 52744 - DNA, 22 bp, Artificial Sequence
  chemically synthesized
ctttcccttgctgccaaacttt

SEQ ID NO: 52745 - DNA, 22 bp, Artificial Sequence
  chemically synthesized
tttcccttgctgccaaactttc

SEQ ID NO: 52746 - DNA, 22 bp, Artificial Sequence
  chemically synthesized
tcccttgctgccaaactttcct

SEQ ID NO: 52747 - DNA, 22 bp, Artificial Sequence
  chemically synthesized
cccttgctgccaaactttccta

SEQ ID NO: 52748 - DNA, 22 bp, Artificial Sequence
  chemically synthesized
ccttgctgccaaactttcctaa

SEQ ID NO: 52749 - DNA, 22 bp, Artificial Sequence
  chemically synthesized
gctgccaaactttcctaagtgc

SEQ ID NO: 52750 - DNA, 22 bp, Artificial Sequence
  chemically synthesized
ctgccaaactttcctaagtgcc

SEQ ID NO: 52751 - DNA, 22 bp, Artificial Sequence
  chemically synthesized
ccaaactttcctaagtgcccac

SEQ ID NO: 52752 - DNA, 22 bp, Artificial Sequence
  chemically synthesized
tcctaagtgcccaccgcccgcc

SEQ ID NO: 52753 - DNA, 22 bp, Artificial Sequence
  chemically synthesized
cctaagtgcccaccgcccgcct

SEQ ID NO: 52754 - DNA, 22 bp, Artificial Sequence
  chemically synthesized
ctaagtgcccaccgcccgcctt

SEQ ID NO: 52755 - DNA, 22 bp, Artificial Sequence
  chemically synthesized
agtgcccaccgcccgcctttcc

SEQ ID NO: 52756 - DNA, 22 bp, Artificial Sequence
  chemically synthesized
tccaggcgcagtcagcgggaga

SEQ ID NO: 52757 - DNA, 22 bp, Artificial Sequence
  chemically synthesized
ccaggcgcagtcagcgggagac

SEQ ID NO: 52758 - DNA, 22 bp, Artificial Sequence
  chemically synthesized
caggcgcagtcagcgggagaca

SEQ ID NO: 52759 - DNA, 22 bp, Artificial Sequence
  chemically synthesized
ttatacagactcacaagaacct

SEQ ID NO: 52760 - DNA, 22 bp, Artificial Sequence
  chemically synthesized
atacagactcacaagaacctca

SEQ ID NO: 52761 - DNA, 22 bp, Artificial Sequence
  chemically synthesized
tacagactcacaagaacctcag

SEQ ID NO: 52762 - DNA, 22 bp, Artificial Sequence
  chemically synthesized
acaagaacctcagaccaagcca

SEQ ID NO: 52763 - DNA, 22 bp, Artificial Sequence
  chemically synthesized
agaccaagccaggcctggggaa

SEQ ID NO: 52764 - DNA, 22 bp, Artificial Sequence
  chemically synthesized
gggaagagggcaagacccaaag

SEQ ID NO: 52765 - DNA, 22 bp, Artificial Sequence
  chemically synthesized
ggggtcccaggatccagcgccc

SEQ ID NO: 52766 - DNA, 22 bp, Artificial Sequence
  chemically synthesized
aaaatgcacactcaaacacact

SEQ ID NO: 52767 - DNA, 22 bp, Artificial Sequence
  chemically synthesized
aaatgcacactcaaacacactt

SEQ ID NO: 52768 - DNA, 22 bp, Artificial Sequence
  chemically synthesized
aaacacacttctcccctgccct

SEQ ID NO: 52769 - DNA, 22 bp, Artificial Sequence
  chemically synthesized
ctcccctgcccttccccggcaa

SEQ ID NO: 52770 - DNA, 22 bp, Artificial Sequence
  chemically synthesized
tcccctgcccttccccggcaac

SEQ ID NO: 52771 - DNA, 22 bp, Artificial Sequence
  chemically synthesized
ccctgcccttccccggcaaccc

SEQ ID NO: 52772 - DNA, 22 bp, Artificial Sequence
  chemically synthesized
cccttccccggcaaccccgcca

SEQ ID NO: 52773 - DNA, 22 bp, Artificial Sequence
  chemically synthesized
ccccggcaaccccgccacctgg

SEQ ID NO: 52774 - DNA, 22 bp, Artificial Sequence
  chemically synthesized
cccggcaaccccgccacctggc

SEQ ID NO: 52775 - DNA, 22 bp, Artificial Sequence
  chemically synthesized
gcctagtcgtgctcggggcgca

SEQ ID NO: 52776 - DNA, 22 bp, Artificial Sequence
  chemically synthesized
gtcgtgctcggggcgcaggggg

SEQ ID NO: 52777 - DNA, 22 bp, Artificial Sequence
  chemically synthesized
ggggcgcagggggactggtgac

SEQ ID NO: 52778 - DNA, 22 bp, Artificial Sequence
  chemically synthesized
gtgaccagaccgggcggggtgg

SEQ ID NO: 52779 - DNA, 22 bp, Artificial Sequence
  chemically synthesized
ctcgcggtcccgagctgtggac

SEQ ID NO: 52780 - DNA, 22 bp, Artificial Sequence
  chemically synthesized
gcggtcccgagctgtggacaag

SEQ ID NO: 52781 - DNA, 22 bp, Artificial Sequence
  chemically synthesized
tggacaagagacgtctgagaaa

SEQ ID NO: 52782 - DNA, 22 bp, Artificial Sequence
  chemically synthesized
agaaagtacccagggcggaggg

SEQ ID NO: 52783 - DNA, 22 bp, Artificial Sequence
  chemically synthesized
ttacagttgccctgcaaaataa

SEQ ID NO: 52784 - DNA, 22 bp, Artificial Sequence
  chemically synthesized
tacagttgccctgcaaaataaa

SEQ ID NO: 52785 - DNA, 22 bp, Artificial Sequence
  chemically synthesized
acagttgccctgcaaaataaaa

SEQ ID NO: 52786 - DNA, 22 bp, Artificial Sequence
  chemically synthesized
cagttgccctgcaaaataaaaa

SEQ ID NO: 52787 - DNA, 22 bp, Artificial Sequence
  chemically synthesized
ccctgcaaaataaaaatgcttt

SEQ ID NO: 52788 - DNA, 22 bp, Artificial Sequence
  chemically synthesized
caaaataaaaatgctttgcaaa

SEQ ID NO: 52789 - DNA, 22 bp, Artificial Sequence
  chemically synthesized
tgcaaagccgagtttcacccag

SEQ ID NO: 52790 - DNA, 22 bp, Artificial Sequence
  chemically synthesized
gcaaagccgagtttcacccagc

SEQ ID NO: 52791 - DNA, 22 bp, Artificial Sequence
  chemically synthesized
caaagccgagtttcacccagcc

SEQ ID NO: 52792 - DNA, 22 bp, Artificial Sequence
  chemically synthesized
cacccagccgatttcgcagtct

SEQ ID NO: 52793 - DNA, 22 bp, Artificial Sequence
  chemically synthesized
acccagccgatttcgcagtctg

SEQ ID NO: 52794 - DNA, 22 bp, Artificial Sequence
  chemically synthesized
cgcagtctgggaggtcgagaag

SEQ ID NO: 52795 - DNA, 22 bp, Artificial Sequence
  chemically synthesized
gcagtctgggaggtcgagaaga

SEQ ID NO: 52796 - DNA, 22 bp, Artificial Sequence
  chemically synthesized
ggaggtcgagaagaggtctcgg

SEQ ID NO: 52797 - DNA, 22 bp, Artificial Sequence
  chemically synthesized
ggcattgtgctgggggcggacc

SEQ ID NO: 52798 - DNA, 22 bp, Artificial Sequence
  chemically synthesized
tgctgggggcggaccaggacca

SEQ ID NO: 52799 - DNA, 22 bp, Artificial Sequence
  chemically synthesized
ggggcggaccaggaccacgggc

SEQ ID NO: 52800 - DNA, 22 bp, Artificial Sequence
  chemically synthesized
gcgcggagacactgcgtggcct

SEQ ID NO: 52801 - DNA, 22 bp, Artificial Sequence
  chemically synthesized
cgtggcctgccgccgtgcctgg

SEQ ID NO: 52802 - DNA, 22 bp, Artificial Sequence
  chemically synthesized
ccgccgtgcctggcgggtgggc

SEQ ID NO: 52803 - DNA, 22 bp, Artificial Sequence
  chemically synthesized
gcgggtgggcgccgggcgccgg

SEQ ID NO: 52804 - DNA, 22 bp, Artificial Sequence
  chemically synthesized
ggctggggcgcggcgaggtcgg

SEQ ID NO: 52805 - DNA, 22 bp, Artificial Sequence
  chemically synthesized
gggcgcggcgaggtcgggcaag

SEQ ID NO: 52806 - DNA, 22 bp, Artificial Sequence
  chemically synthesized
ctccggggctgccgcgccgcgc

SEQ ID NO: 52807 - DNA, 22 bp, Artificial Sequence
  chemically synthesized
cggggctgccgcgccgcgctcg

SEQ ID NO: 52808 - DNA, 22 bp, Artificial Sequence
  chemically synthesized
ccgcgccgcgctcggtcctctg

SEQ ID NO: 52809 - DNA, 22 bp, Artificial Sequence
  chemically synthesized
ggtcctctgtctgtttgttggc

SEQ ID NO: 52810 - DNA, 22 bp, Artificial Sequence
  chemically synthesized
tgtctgtttgttggcaggaggc

SEQ ID NO: 52811 - DNA, 22 bp, Artificial Sequence
  chemically synthesized
tctgtttgttggcaggaggctc

SEQ ID NO: 52812 - DNA, 22 bp, Artificial Sequence
  chemically synthesized
tttgttggcaggaggctcccgc

SEQ ID NO: 52813 - DNA, 22 bp, Artificial Sequence
  chemically synthesized
gttggcaggaggctcccgcaca

SEQ ID NO: 52814 - DNA, 22 bp, Artificial Sequence
  chemically synthesized
ttggcaggaggctcccgcacac

SEQ ID NO: 52815 - DNA, 22 bp, Artificial Sequence
  chemically synthesized
gcaggaggctcccgcacacgcg

SEQ ID NO: 52816 - DNA, 22 bp, Artificial Sequence
  chemically synthesized
ccgcacacgcggtgcttgtaaa

SEQ ID NO: 52817 - DNA, 22 bp, Artificial Sequence
  chemically synthesized
gtaaacattcagacacgagatt

SEQ ID NO: 52818 - DNA, 22 bp, Artificial Sequence
  chemically synthesized
taaacattcagacacgagattt

SEQ ID NO: 52819 - DNA, 22 bp, Artificial Sequence
  chemically synthesized
agacacgagatttttcccaatc

SEQ ID NO: 52820 - DNA, 22 bp, Artificial Sequence
  chemically synthesized
ttcccaatcaaaatccacttcc

SEQ ID NO: 52821 - DNA, 22 bp, Artificial Sequence
  chemically synthesized
tcccaatcaaaatccacttcca

SEQ ID NO: 52822 - DNA, 22 bp, Artificial Sequence
  chemically synthesized
cccaatcaaaatccacttccac

SEQ ID NO: 52823 - DNA, 22 bp, Artificial Sequence
  chemically synthesized
ccaatcaaaatccacttccact

SEQ ID NO: 52824 - DNA, 22 bp, Artificial Sequence
  chemically synthesized
ccactttttttgaaaatcttcc

SEQ ID NO: 52825 - DNA, 22 bp, Artificial Sequence
  chemically synthesized
cactttttttgaaaatcttcca

SEQ ID NO: 52826 - DNA, 22 bp, Artificial Sequence
  chemically synthesized
tttttgaaaatcttccaaaaaa

SEQ ID NO: 52827 - DNA, 22 bp, Artificial Sequence
  chemically synthesized
ttttgaaaatcttccaaaaaat

SEQ ID NO: 52828 - DNA, 22 bp, Artificial Sequence
  chemically synthesized
tttgaaaatcttccaaaaaata

SEQ ID NO: 52829 - DNA, 22 bp, Artificial Sequence
  chemically synthesized
ttgaaaatcttccaaaaaatag

SEQ ID NO: 52830 - DNA, 22 bp, Artificial Sequence
  chemically synthesized
tgaaaatcttccaaaaaatagt

SEQ ID NO: 52831 - DNA, 22 bp, Artificial Sequence
  chemically synthesized
gaaaatcttccaaaaaatagta

SEQ ID NO: 52832 - DNA, 22 bp, Artificial Sequence
  chemically synthesized
aaaatcttccaaaaaatagtaa

SEQ ID NO: 52833 - DNA, 22 bp, Artificial Sequence
  chemically synthesized
ccaaaaaatagtaagaggaggg

SEQ ID NO: 52834 - DNA, 22 bp, Artificial Sequence
  chemically synthesized
caaaaaatagtaagaggaggga

SEQ ID NO: 52835 - DNA, 22 bp, Artificial Sequence
  chemically synthesized
ctctctccctctccgtgccgtc

SEQ ID NO: 52836 - DNA, 22 bp, Artificial Sequence
  chemically synthesized
tctccctctccgtgccgtcggc

SEQ ID NO: 52837 - DNA, 22 bp, Artificial Sequence
  chemically synthesized
tccctctccgtgccgtcggcgc

SEQ ID NO: 52838 - DNA, 22 bp, Artificial Sequence
  chemically synthesized
cctctccgtgccgtcggcgccc

SEQ ID NO: 52839 - DNA, 22 bp, Artificial Sequence
  chemically synthesized
tccgtgccgtcggcgccctaag

SEQ ID NO: 52840 - DNA, 22 bp, Artificial Sequence
  chemically synthesized
cgtgccgtcggcgccctaagtt

SEQ ID NO: 52841 - DNA, 22 bp, Artificial Sequence
  chemically synthesized
agtttgcaactgaaggggtttg

SEQ ID NO: 52842 - DNA, 22 bp, Artificial Sequence
  chemically synthesized
gcaactgaaggggtttggggga

SEQ ID NO: 52843 - DNA, 22 bp, Artificial Sequence
  chemically synthesized
caactgaaggggtttgggggaa

SEQ ID NO: 52844 - DNA, 22 bp, Artificial Sequence
  chemically synthesized
aaggggtttgggggaagagggt

SEQ ID NO: 52845 - DNA, 22 bp, Artificial Sequence
  chemically synthesized
gggggaagagggtgattgtaaa

SEQ ID NO: 52846 - DNA, 22 bp, Artificial Sequence
  chemically synthesized
ggggaagagggtgattgtaaat

SEQ ID NO: 52847 - DNA, 22 bp, Artificial Sequence
  chemically synthesized
taaatttttttctagatgagag

SEQ ID NO: 52848 - DNA, 22 bp, Artificial Sequence
  chemically synthesized
ttttctagatgagagattgtga

SEQ ID NO: 52849 - DNA, 22 bp, Artificial Sequence
  chemically synthesized
tttctagatgagagattgtgag

SEQ ID NO: 52850 - DNA, 22 bp, Artificial Sequence
  chemically synthesized
ttctagatgagagattgtgaga

SEQ ID NO: 52851 - DNA, 22 bp, Artificial Sequence
  chemically synthesized
tctagatgagagattgtgagat

SEQ ID NO: 52852 - DNA, 22 bp, Artificial Sequence
  chemically synthesized
ctagatgagagattgtgagatt

SEQ ID NO: 52853 - DNA, 22 bp, Artificial Sequence
  chemically synthesized
tagatgagagattgtgagattt

SEQ ID NO: 52854 - DNA, 22 bp, Artificial Sequence
  chemically synthesized
gatgagagattgtgagattttt

SEQ ID NO: 52855 - DNA, 22 bp, Artificial Sequence
  chemically synthesized
tgagatttttgcaggggggctg

SEQ ID NO: 52856 - DNA, 22 bp, Artificial Sequence
  chemically synthesized
ttgcaggggggctggtggggga

SEQ ID NO: 52857 - DNA, 22 bp, Artificial Sequence
  chemically synthesized
tgcaggggggctggtgggggag

SEQ ID NO: 52858 - DNA, 22 bp, Artificial Sequence
  chemically synthesized
gcaggggggctggtgggggagt

SEQ ID NO: 52859 - DNA, 22 bp, Artificial Sequence
  chemically synthesized
caggggggctggtgggggagtc

SEQ ID NO: 52860 - DNA, 22 bp, Artificial Sequence
  chemically synthesized
gtgggggagtcaaagagaaggc

SEQ ID NO: 52861 - DNA, 22 bp, Artificial Sequence
  chemically synthesized
gcagagcgtttggcttcggttt

SEQ ID NO: 52862 - DNA, 22 bp, Artificial Sequence
  chemically synthesized
ggcttcggtttgggggcaagaa

SEQ ID NO: 52863 - DNA, 22 bp, Artificial Sequence
  chemically synthesized
gcttcggtttgggggcaagaaa

SEQ ID NO: 52864 - DNA, 22 bp, Artificial Sequence
  chemically synthesized
cggtttgggggcaagaaattgt

SEQ ID NO: 52865 - DNA, 22 bp, Artificial Sequence
  chemically synthesized
ggtttgggggcaagaaattgta

SEQ ID NO: 52866 - DNA, 22 bp, Artificial Sequence
  chemically synthesized
gggggcaagaaattgtacattc

SEQ ID NO: 52867 - DNA, 22 bp, Artificial Sequence
  chemically synthesized
ggggcaagaaattgtacattct

SEQ ID NO: 52868 - DNA, 22 bp, Artificial Sequence
  chemically synthesized
tacattctcttgccttgtttta

SEQ ID NO: 52869 - DNA, 22 bp, Artificial Sequence
  chemically synthesized
tcttgccttgttttatttattt

SEQ ID NO: 52870 - DNA, 22 bp, Artificial Sequence
  chemically synthesized
ttgccttgttttatttatttta

SEQ ID NO: 52871 - DNA, 22 bp, Artificial Sequence
  chemically synthesized
gccttgttttatttattttatt

SEQ ID NO: 52872 - DNA, 22 bp, Artificial Sequence
  chemically synthesized
ccttgttttatttattttattt

SEQ ID NO: 52873 - DNA, 22 bp, Artificial Sequence
  chemically synthesized
gttttatttattttatttttat

SEQ ID NO: 52874 - DNA, 22 bp, Artificial Sequence
  chemically synthesized
ttttatttattttatttttatg

SEQ ID NO: 52875 - DNA, 22 bp, Artificial Sequence
  chemically synthesized
tatttattttatttttatgtat

SEQ ID NO: 52876 - DNA, 22 bp, Artificial Sequence
  chemically synthesized
atttattttatttttatgtatt

SEQ ID NO: 52877 - DNA, 22 bp, Artificial Sequence
  chemically synthesized
tttattttatttttatgtattt

SEQ ID NO: 52878 - DNA, 22 bp, Artificial Sequence
  chemically synthesized
attttatttttatgtatttatt

SEQ ID NO: 52879 - DNA, 22 bp, Artificial Sequence
  chemically synthesized
ttttatttttatgtatttattt

SEQ ID NO: 52880 - DNA, 22 bp, Artificial Sequence
  chemically synthesized
tatttttatgtatttatttatt

SEQ ID NO: 52881 - DNA, 22 bp, Artificial Sequence
  chemically synthesized
atttttatgtatttatttattt

SEQ ID NO: 52882 - DNA, 22 bp, Artificial Sequence
  chemically synthesized
tttttatgtatttatttattta

SEQ ID NO: 52883 - DNA, 22 bp, Artificial Sequence
  chemically synthesized
ttatgtatttatttatttatgt

SEQ ID NO: 52884 - DNA, 22 bp, Artificial Sequence
  chemically synthesized
tatgtatttatttatttatgtg

SEQ ID NO: 52885 - DNA, 22 bp, Artificial Sequence
  chemically synthesized
atgtatttatttatttatgtgc

SEQ ID NO: 52886 - DNA, 22 bp, Artificial Sequence
  chemically synthesized
tgtatttatttatttatgtgcc

SEQ ID NO: 52887 - DNA, 22 bp, Artificial Sequence
  chemically synthesized
atttatttatgtgccagtcttc

SEQ ID NO: 52888 - DNA, 22 bp, Artificial Sequence
  chemically synthesized
tttatttatgtgccagtcttct

SEQ ID NO: 52889 - DNA, 22 bp, Artificial Sequence
  chemically synthesized
atttatgtgccagtcttctcct

SEQ ID NO: 52890 - DNA, 22 bp, Artificial Sequence
  chemically synthesized
tttatgtgccagtcttctcctt

SEQ ID NO: 52891 - DNA, 22 bp, Artificial Sequence
  chemically synthesized
atgtgccagtcttctccttgct

SEQ ID NO: 52892 - DNA, 22 bp, Artificial Sequence
  chemically synthesized
tgtgccagtcttctccttgctg

SEQ ID NO: 52893 - DNA, 22 bp, Artificial Sequence
  chemically synthesized
ctccttgctgcctctgaggttc

SEQ ID NO: 52894 - DNA, 22 bp, Artificial Sequence
  chemically synthesized
tccttgctgcctctgaggttcg

SEQ ID NO: 52895 - DNA, 22 bp, Artificial Sequence
  chemically synthesized
cttgctgcctctgaggttcggt

SEQ ID NO: 52896 - DNA, 22 bp, Artificial Sequence
  chemically synthesized
gctgcctctgaggttcggtcgg

SEQ ID NO: 52897 - DNA, 22 bp, Artificial Sequence
  chemically synthesized
ctgcctctgaggttcggtcggg

SEQ ID NO: 52898 - DNA, 22 bp, Artificial Sequence
  chemically synthesized
cctctgaggttcggtcgggagg

SEQ ID NO: 52899 - DNA, 22 bp, Artificial Sequence
  chemically synthesized
tgaggttcggtcgggaggggag

SEQ ID NO: 52900 - DNA, 22 bp, Artificial Sequence
  chemically synthesized
aggttcggtcgggaggggaggg

SEQ ID NO: 52901 - DNA, 22 bp, Artificial Sequence
  chemically synthesized
ggtcgggaggggagggcagcgg

SEQ ID NO: 52902 - DNA, 22 bp, Artificial Sequence
  chemically synthesized
cctccctccctctcccgcgtgc

SEQ ID NO: 52903 - DNA, 22 bp, Artificial Sequence
  chemically synthesized
cctccctctcccgcgtgccccc

SEQ ID NO: 52904 - DNA, 22 bp, Artificial Sequence
  chemically synthesized
cctctcccgcgtgcccccggcc

SEQ ID NO: 52905 - DNA, 22 bp, Artificial Sequence
  chemically synthesized
tcccgcgtgcccccggccgcct

SEQ ID NO: 52906 - DNA, 22 bp, Artificial Sequence
  chemically synthesized
ccgcgtgcccccggccgcctcc

SEQ ID NO: 52907 - DNA, 22 bp, Artificial Sequence
  chemically synthesized
ctcccccggccctagctcctgc

SEQ ID NO: 52908 - DNA, 22 bp, Artificial Sequence
  chemically synthesized
ccccggccctagctcctgccct

SEQ ID NO: 52909 - DNA, 22 bp, Artificial Sequence
  chemically synthesized
gctcctgcccttcggcggcggc

SEQ ID NO: 52910 - DNA, 22 bp, Artificial Sequence
  chemically synthesized
ctgcccttcggcggcggcggcg

SEQ ID NO: 52911 - DNA, 22 bp, Artificial Sequence
  chemically synthesized
cccttcggcggcggcggcggcg

SEQ ID NO: 52912 - DNA, 22 bp, Artificial Sequence
  chemically synthesized
cggcggcggcggcggcggcggc

SEQ ID NO: 52913 - DNA, 22 bp, Artificial Sequence
  chemically synthesized
ggcggcggcggcggcggcggcg

SEQ ID NO: 52914 - DNA, 22 bp, Artificial Sequence
  chemically synthesized
tggccggaacaaaaggcggcag

SEQ ID NO: 52915 - DNA, 22 bp, Artificial Sequence
  chemically synthesized
gccggaacaaaaggcggcagtg

SEQ ID NO: 52916 - DNA, 22 bp, Artificial Sequence
  chemically synthesized
ccgtccttcccggtcccacggc

SEQ ID NO: 52917 - DNA, 22 bp, Artificial Sequence
  chemically synthesized
cccggtcccacggctctccccg

SEQ ID NO: 52918 - DNA, 22 bp, Artificial Sequence
  chemically synthesized
ccggtcccacggctctccccgt

SEQ ID NO: 52919 - DNA, 22 bp, Artificial Sequence
  chemically synthesized
tccccgtcgccgcggcccctct

SEQ ID NO: 52920 - DNA, 22 bp, Artificial Sequence
  chemically synthesized
cccgtcgccgcggcccctctcc

SEQ ID NO: 52921 - DNA, 22 bp, Artificial Sequence
  chemically synthesized
tcccgactccgcggactcagga

SEQ ID NO: 52922 - DNA, 22 bp, Artificial Sequence
  chemically synthesized
ccgactccgcggactcaggagc

SEQ ID NO: 52923 - DNA, 22 bp, Artificial Sequence
  chemically synthesized
cgcggactcaggagcgccgggg

SEQ ID NO: 52924 - DNA, 22 bp, Artificial Sequence
  chemically synthesized
aggagcgccgggggcccctttc

SEQ ID NO: 52925 - DNA, 22 bp, Artificial Sequence
  chemically synthesized
tccacagtgccactttctcact

SEQ ID NO: 52926 - DNA, 22 bp, Artificial Sequence
  chemically synthesized
ccacagtgccactttctcacta

SEQ ID NO: 52927 - DNA, 22 bp, Artificial Sequence
  chemically synthesized
cacagtgccactttctcactat

SEQ ID NO: 52928 - DNA, 22 bp, Artificial Sequence
  chemically synthesized
tctcactattgtggggatgact

SEQ ID NO: 52929 - DNA, 22 bp, Artificial Sequence
  chemically synthesized
ctcactattgtggggatgacta

SEQ ID NO: 52930 - DNA, 22 bp, Artificial Sequence
  chemically synthesized
tcactattgtggggatgactac

SEQ ID NO: 52931 - DNA, 22 bp, Artificial Sequence
  chemically synthesized
actattgtggggatgactactt

SEQ ID NO: 52932 - DNA, 22 bp, Artificial Sequence
  chemically synthesized
ttgtggggatgactactttcct

SEQ ID NO: 52933 - DNA, 22 bp, Artificial Sequence
  chemically synthesized
tggggatgactactttcctccc

SEQ ID NO: 52934 - DNA, 22 bp, Artificial Sequence
  chemically synthesized
ctttcctcccgctgcacacttg

SEQ ID NO: 52935 - DNA, 22 bp, Artificial Sequence
  chemically synthesized
tcctcccgctgcacacttgacc

SEQ ID NO: 52936 - DNA, 22 bp, Artificial Sequence
  chemically synthesized
cctcccgctgcacacttgaccg

SEQ ID NO: 52937 - DNA, 22 bp, Artificial Sequence
  chemically synthesized
ctcccgctgcacacttgaccgt

SEQ ID NO: 52938 - DNA, 22 bp, Artificial Sequence
  chemically synthesized
ccgctgcacacttgaccgtgag

SEQ ID NO: 52939 - DNA, 22 bp, Artificial Sequence
  chemically synthesized
cacacttgaccgtgagcgcgct

SEQ ID NO: 52940 - DNA, 22 bp, Artificial Sequence
  chemically synthesized
gaccgtgagcgcgctggtgtcc

SEQ ID NO: 52941 - DNA, 22 bp, Artificial Sequence
  chemically synthesized
accgtgagcgcgctggtgtcca

SEQ ID NO: 52942 - DNA, 22 bp, Artificial Sequence
  chemically synthesized
gtgtccaaaagccagtctcacc

SEQ ID NO: 52943 - DNA, 22 bp, Artificial Sequence
  chemically synthesized
acctcttttctccccgggaatc

SEQ ID NO: 52944 - DNA, 22 bp, Artificial Sequence
  chemically synthesized
ttttctccccgggaatcgtttt

SEQ ID NO: 52945 - DNA, 22 bp, Artificial Sequence
  chemically synthesized
ttctccccgggaatcgtttttt

SEQ ID NO: 52946 - DNA, 22 bp, Artificial Sequence
  chemically synthesized
tctccccgggaatcgtttttta

SEQ ID NO: 52947 - DNA, 22 bp, Artificial Sequence
  chemically synthesized
ctccccgggaatcgttttttag

SEQ ID NO: 52948 - DNA, 22 bp, Artificial Sequence
  chemically synthesized
tccccgggaatcgttttttaga

SEQ ID NO: 52949 - DNA, 22 bp, Artificial Sequence
  chemically synthesized
cccgggaatcgttttttagact

SEQ ID NO: 52950 - DNA, 22 bp, Artificial Sequence
  chemically synthesized
tttagacttgtactcactccct

SEQ ID NO: 52951 - DNA, 22 bp, Artificial Sequence
  chemically synthesized
ttagacttgtactcactccctc

SEQ ID NO: 52952 - DNA, 22 bp, Artificial Sequence
  chemically synthesized
tagacttgtactcactccctcc

SEQ ID NO: 52953 - DNA, 22 bp, Artificial Sequence
  chemically synthesized
agacttgtactcactccctccc

SEQ ID NO: 52954 - DNA, 22 bp, Artificial Sequence
  chemically synthesized
gacttgtactcactccctccct

SEQ ID NO: 52955 - DNA, 22 bp, Artificial Sequence
  chemically synthesized
gtactcactccctccctacccc

SEQ ID NO: 52956 - DNA, 22 bp, Artificial Sequence
  chemically synthesized
tactcactccctccctaccccc

SEQ ID NO: 52957 - DNA, 22 bp, Artificial Sequence
  chemically synthesized
actccctccctacccccccatt

SEQ ID NO: 52958 - DNA, 22 bp, Artificial Sequence
  chemically synthesized
cctccctacccccccattttct

SEQ ID NO: 52959 - DNA, 22 bp, Artificial Sequence
  chemically synthesized
cctacccccccattttcttacg

SEQ ID NO: 52960 - DNA, 22 bp, Artificial Sequence
  chemically synthesized
cccccccattttcttacggtga

SEQ ID NO: 52961 - DNA, 22 bp, Artificial Sequence
  chemically synthesized
tcttacggtgagtgggaagcaa

SEQ ID NO: 52962 - DNA, 22 bp, Artificial Sequence
  chemically synthesized
cttacggtgagtgggaagcaac

SEQ ID NO: 52963 - DNA, 22 bp, Artificial Sequence
  chemically synthesized
ttacggtgagtgggaagcaacc

SEQ ID NO: 52964 - DNA, 22 bp, Artificial Sequence
  chemically synthesized
acggtgagtgggaagcaacctc

SEQ ID NO: 52965 - DNA, 22 bp, Artificial Sequence
  chemically synthesized
cggtgagtgggaagcaacctcc

SEQ ID NO: 52966 - DNA, 22 bp, Artificial Sequence
  chemically synthesized
cctttccccaccagctcccacc

SEQ ID NO: 52967 - DNA, 22 bp, Artificial Sequence
  chemically synthesized
tccccaccagctcccaccccca

SEQ ID NO: 52968 - DNA, 22 bp, Artificial Sequence
  chemically synthesized
ccccaccagctcccacccccag

SEQ ID NO: 52969 - DNA, 22 bp, Artificial Sequence
  chemically synthesized
cccaccagctcccacccccagg

SEQ ID NO: 52970 - DNA, 22 bp, Artificial Sequence
  chemically synthesized
ccacccccaggtttgcatgtga

SEQ ID NO: 52971 - DNA, 22 bp, Artificial Sequence
  chemically synthesized
gcatgtgagttgttcgcaacct

SEQ ID NO: 52972 - DNA, 22 bp, Artificial Sequence
  chemically synthesized
catgtgagttgttcgcaacctt

SEQ ID NO: 52973 - DNA, 22 bp, Artificial Sequence
  chemically synthesized
ttcgcaaccttagcattgttca

SEQ ID NO: 52974 - DNA, 22 bp, Artificial Sequence
  chemically synthesized
gcaaccttagcattgttcatta

SEQ ID NO: 52975 - DNA, 22 bp, Artificial Sequence
  chemically synthesized
agcattgttcattattttgcaa

SEQ ID NO: 52976 - DNA, 22 bp, Artificial Sequence
  chemically synthesized
gcattgttcattattttgcaaa

SEQ ID NO: 52977 - DNA, 22 bp, Artificial Sequence
  chemically synthesized
ttcattattttgcaaaactggc

SEQ ID NO: 52978 - DNA, 22 bp, Artificial Sequence
  chemically synthesized
attattttgcaaaactggcggg

SEQ ID NO: 52979 - DNA, 22 bp, Artificial Sequence
  chemically synthesized
ttttgcaaaactggcggggcgg

SEQ ID NO: 52980 - DNA, 22 bp, Artificial Sequence
  chemically synthesized
tgcaaaactggcggggcggggg

SEQ ID NO: 52981 - DNA, 22 bp, Artificial Sequence
  chemically synthesized
gcaaaactggcggggcgggggg

SEQ ID NO: 52982 - DNA, 22 bp, Artificial Sequence
  chemically synthesized
caaaactggcggggcggggggg

SEQ ID NO: 52983 - DNA, 22 bp, Artificial Sequence
  chemically synthesized
gcggggcggggggggagtggaa

SEQ ID NO: 52984 - DNA, 22 bp, Artificial Sequence
  chemically synthesized
cattccttttcgaaaagagaaa

SEQ ID NO: 52985 - DNA, 22 bp, Artificial Sequence
  chemically synthesized
cttttcgaaaagagaaataaag

SEQ ID NO: 52986 - DNA, 22 bp, Artificial Sequence
  chemically synthesized
ttcgaaaagagaaataaagcgg

SEQ ID NO: 52987 - DNA, 22 bp, Artificial Sequence
  chemically synthesized
tcgaaaagagaaataaagcggc

SEQ ID NO: 52988 - DNA, 22 bp, Artificial Sequence
  chemically synthesized
cgaaaagagaaataaagcggcg

SEQ ID NO: 52989 - DNA, 22 bp, Artificial Sequence
  chemically synthesized
gaaaagagaaataaagcggcgg

SEQ ID NO: 52990 - DNA, 22 bp, Artificial Sequence
  chemically synthesized
ttgtaaaattaaataaaattaa

SEQ ID NO: 52991 - DNA, 22 bp, Artificial Sequence
  chemically synthesized
tgtaaaattaaataaaattaaa

SEQ ID NO: 52992 - DNA, 22 bp, Artificial Sequence
  chemically synthesized
gtaaaattaaataaaattaaaa

SEQ ID NO: 52993 - DNA, 22 bp, Artificial Sequence
  chemically synthesized
taaaattaaataaaattaaaag

SEQ ID NO: 52994 - DNA, 22 bp, Artificial Sequence
  chemically synthesized
aataaaattaaaaggtgcgtgc

SEQ ID NO: 52995 - DNA, 22 bp, Artificial Sequence
  chemically synthesized
aaaggtgcgtgctgtctcaaaa

SEQ ID NO: 52996 - DNA, 22 bp, Artificial Sequence
  chemically synthesized
tctcaaaagtgcatacacggca

SEQ ID NO: 52997 - DNA, 22 bp, Artificial Sequence
  chemically synthesized
aaaagtgcatacacggcaatgg

SEQ ID NO: 52998 - DNA, 22 bp, Artificial Sequence
  chemically synthesized
cagatgggatgagggttttttc

SEQ ID NO: 52999 - DNA, 22 bp, Artificial Sequence
  chemically synthesized
tttccccctttatctcttttac

SEQ ID NO: 53000 - DNA, 22 bp, Artificial Sequence
  chemically synthesized
ttccccctttatctcttttacc

SEQ ID NO: 53001 - DNA, 22 bp, Artificial Sequence
  chemically synthesized
tccccctttatctcttttacct

SEQ ID NO: 53002 - DNA, 22 bp, Artificial Sequence
  chemically synthesized
ccccctttatctcttttacctc

SEQ ID NO: 53003 - DNA, 22 bp, Artificial Sequence
  chemically synthesized
cccctttatctcttttacctcg

SEQ ID NO: 53004 - DNA, 22 bp, Artificial Sequence
  chemically synthesized
tatctcttttacctcgactctc

SEQ ID NO: 53005 - DNA, 22 bp, Artificial Sequence
  chemically synthesized
atctcttttacctcgactctcg

SEQ ID NO: 53006 - DNA, 22 bp, Artificial Sequence
  chemically synthesized
tctcttttacctcgactctcgg

SEQ ID NO: 53007 - DNA, 22 bp, Artificial Sequence
  chemically synthesized
ttttacctcgactctcggaggt

SEQ ID NO: 53008 - DNA, 22 bp, Artificial Sequence
  chemically synthesized
ttacctcgactctcggaggttt

SEQ ID NO: 53009 - DNA, 22 bp, Artificial Sequence
  chemically synthesized
tacctcgactctcggaggtttt

SEQ ID NO: 53010 - DNA, 22 bp, Artificial Sequence
  chemically synthesized
acctcgactctcggaggttttt

SEQ ID NO: 53011 - DNA, 22 bp, Artificial Sequence
  chemically synthesized
cctcgactctcggaggtttttc

SEQ ID NO: 53012 - DNA, 22 bp, Artificial Sequence
  chemically synthesized
gactctcggaggtttttctcgt

SEQ ID NO: 53013 - DNA, 22 bp, Artificial Sequence
  chemically synthesized
tcggaggtttttctcgtgaaaa

SEQ ID NO: 53014 - DNA, 22 bp, Artificial Sequence
  chemically synthesized
ggaggtttttctcgtgaaaaat

SEQ ID NO: 53015 - DNA, 22 bp, Artificial Sequence
  chemically synthesized
ttctcgtgaaaaatttaaaaat

SEQ ID NO: 53016 - DNA, 22 bp, Artificial Sequence
  chemically synthesized
tctcgtgaaaaatttaaaaatg

SEQ ID NO: 53017 - DNA, 22 bp, Artificial Sequence
  chemically synthesized
ctcgtgaaaaatttaaaaatgc

SEQ ID NO: 53018 - DNA, 22 bp, Artificial Sequence
  chemically synthesized
tcgtgaaaaatttaaaaatgca

SEQ ID NO: 53019 - DNA, 22 bp, Artificial Sequence
  chemically synthesized
gtgaaaaatttaaaaatgcatg

SEQ ID NO: 53020 - DNA, 22 bp, Artificial Sequence
  chemically synthesized
aaaaatgcatgcacacacccct

SEQ ID NO: 53021 - DNA, 22 bp, Artificial Sequence
  chemically synthesized
aaaatgcatgcacacacccctc

SEQ ID NO: 53022 - DNA, 22 bp, Artificial Sequence
  chemically synthesized
tctccccctcgcttttgcttct

SEQ ID NO: 53023 - DNA, 22 bp, Artificial Sequence
  chemically synthesized
tccccctcgcttttgcttctag

SEQ ID NO: 53024 - DNA, 22 bp, Artificial Sequence
  chemically synthesized
cccctcgcttttgcttctagtc

SEQ ID NO: 53025 - DNA, 22 bp, Artificial Sequence
  chemically synthesized
gcttttgcttctagtcctgcgc

SEQ ID NO: 53026 - DNA, 22 bp, Artificial Sequence
  chemically synthesized
ttgcttctagtcctgcgcgctc

SEQ ID NO: 53027 - DNA, 22 bp, Artificial Sequence
  chemically synthesized
tgcttctagtcctgcgcgctct

SEQ ID NO: 53028 - DNA, 22 bp, Artificial Sequence
  chemically synthesized
gcttctagtcctgcgcgctctc

SEQ ID NO: 53029 - DNA, 22 bp, Artificial Sequence
  chemically synthesized
cttctagtcctgcgcgctctcg

SEQ ID NO: 53030 - DNA, 22 bp, Artificial Sequence
  chemically synthesized
ctagtcctgcgcgctctcgtga

SEQ ID NO: 53031 - DNA, 22 bp, Artificial Sequence
  chemically synthesized
tagtcctgcgcgctctcgtgat

SEQ ID NO: 53032 - DNA, 22 bp, Artificial Sequence
  chemically synthesized
gtcctgcgcgctctcgtgatta

SEQ ID NO: 53033 - DNA, 22 bp, Artificial Sequence
  chemically synthesized
cgcgctctcgtgattattaata

SEQ ID NO: 53034 - DNA, 22 bp, Artificial Sequence
  chemically synthesized
tcgtgattattaataattatta

SEQ ID NO: 53035 - DNA, 22 bp, Artificial Sequence
  chemically synthesized
gtgattattaataattattatt

SEQ ID NO: 53036 - DNA, 22 bp, Artificial Sequence
  chemically synthesized
ttaataattattattactatta

SEQ ID NO: 53037 - DNA, 22 bp, Artificial Sequence
  chemically synthesized
ataattattattactattattg

SEQ ID NO: 53038 - DNA, 22 bp, Artificial Sequence
  chemically synthesized
ttattactattattgggttact

SEQ ID NO: 53039 - DNA, 22 bp, Artificial Sequence
  chemically synthesized
ttactattattgggttacttac

SEQ ID NO: 53040 - DNA, 22 bp, Artificial Sequence
  chemically synthesized
ctattattgggttacttacgcg

SEQ ID NO: 53041 - DNA, 22 bp, Artificial Sequence
  chemically synthesized
ttattgggttacttacgcgaga

SEQ ID NO: 53042 - DNA, 22 bp, Artificial Sequence
  chemically synthesized
ttgggttacttacgcgagaatt

SEQ ID NO: 53043 - DNA, 22 bp, Artificial Sequence
  chemically synthesized
ggttacttacgcgagaattccc

SEQ ID NO: 53044 - DNA, 22 bp, Artificial Sequence
  chemically synthesized
cttacgcgagaattcccgtttg

SEQ ID NO: 53045 - DNA, 22 bp, Artificial Sequence
  chemically synthesized
acgcgagaattcccgtttgctt

SEQ ID NO: 53046 - DNA, 22 bp, Artificial Sequence
  chemically synthesized
cgcgagaattcccgtttgctta

SEQ ID NO: 53047 - DNA, 22 bp, Artificial Sequence
  chemically synthesized
ccgtttgcttaagtgctggggt

SEQ ID NO: 53048 - DNA, 22 bp, Artificial Sequence
  chemically synthesized
gcttaagtgctggggtttgcct

SEQ ID NO: 53049 - DNA, 22 bp, Artificial Sequence
  chemically synthesized
cttaagtgctggggtttgcctt

SEQ ID NO: 53050 - DNA, 22 bp, Artificial Sequence
  chemically synthesized
aagtgctggggtttgccttgct

SEQ ID NO: 53051 - DNA, 22 bp, Artificial Sequence
  chemically synthesized
agtgctggggtttgccttgctt

SEQ ID NO: 53052 - DNA, 22 bp, Artificial Sequence
  chemically synthesized
gggtttgccttgcttgcggcga

SEQ ID NO: 53053 - DNA, 22 bp, Artificial Sequence
  chemically synthesized
gccttgcttgcggcgagacatg

SEQ ID NO: 53054 - DNA, 22 bp, Artificial Sequence
  chemically synthesized
ccttgcttgcggcgagacatgg

SEQ ID NO: 53055 - DNA, 22 bp, Artificial Sequence
  chemically synthesized
gcttgcggcgagacatggtggg

SEQ ID NO: 53056 - DNA, 22 bp, Artificial Sequence
  chemically synthesized
cttgcggcgagacatggtgggc

SEQ ID NO: 53057 - DNA, 22 bp, Artificial Sequence
  chemically synthesized
gcggcgagacatggtgggctgc

SEQ ID NO: 53058 - DNA, 22 bp, Artificial Sequence
  chemically synthesized
cggcgagacatggtgggctgcg

SEQ ID NO: 53059 - DNA, 22 bp, Artificial Sequence
  chemically synthesized
cggggcgggcggcggcggcggc

SEQ ID NO: 53060 - DNA, 22 bp, Artificial Sequence
  chemically synthesized
ggttcacatcgggagagccggg

SEQ ID NO: 53061 - DNA, 22 bp, Artificial Sequence
  chemically synthesized
acatcgggagagccgggttaga

SEQ ID NO: 53062 - DNA, 22 bp, Artificial Sequence
  chemically synthesized
gaaagaaggagactccagagaa

SEQ ID NO: 53063 - DNA, 22 bp, Artificial Sequence
  chemically synthesized
cagagaaaatatcttcatcagt

SEQ ID NO: 53064 - DNA, 22 bp, Artificial Sequence
  chemically synthesized
catcagtgccttttgacatcca

SEQ ID NO: 53065 - DNA, 22 bp, Artificial Sequence
  chemically synthesized
atcagtgccttttgacatccaa

SEQ ID NO: 53066 - DNA, 22 bp, Artificial Sequence
  chemically synthesized
ttgacatccaaaataaattaga

SEQ ID NO: 53067 - DNA, 22 bp, Artificial Sequence
  chemically synthesized
tgacatccaaaataaattagaa

SEQ ID NO: 53068 - DNA, 22 bp, Artificial Sequence
  chemically synthesized
gacatccaaaataaattagaaa

SEQ ID NO: 53069 - DNA, 22 bp, Artificial Sequence
  chemically synthesized
acatccaaaataaattagaaat

SEQ ID NO: 53070 - DNA, 22 bp, Artificial Sequence
  chemically synthesized
gaaataatacaaagatggcgca

SEQ ID NO: 53071 - DNA, 22 bp, Artificial Sequence
  chemically synthesized
tgggagagccgtcatggctttt

SEQ ID NO: 53072 - DNA, 22 bp, Artificial Sequence
  chemically synthesized
ttttttaagcaaaaaaaaaaaa

SEQ ID NO: 53073 - DNA, 22 bp, Artificial Sequence
  chemically synthesized
tttttaagcaaaaaaaaaaaaa

SEQ ID NO: 53074 - DNA, 22 bp, Artificial Sequence
  chemically synthesized
ttttaagcaaaaaaaaaaaaaa

SEQ ID NO: 53075 - DNA, 22 bp, Artificial Sequence
  chemically synthesized
tttaagcaaaaaaaaaaaaaaa

SEQ ID NO: 53076 - DNA, 22 bp, Artificial Sequence
  chemically synthesized
ttaagcaaaaaaaaaaaaaaaa

SEQ ID NO: 53077 - DNA, 22 bp, Artificial Sequence
  chemically synthesized
taagcaaaaaaaaaaaaaaaaa

SEQ ID NO: 53078 - DNA, 22 bp, Artificial Sequence
  chemically synthesized
aagcaaaaaaaaaaaaaaaaaa

SEQ ID NO: 53079 - DNA, 22 bp, Artificial Sequence
  chemically synthesized
agcaaaaaaaaaaaaaaaaaaa

SEQ ID NO: 53080 - DNA, 22 bp, Artificial Sequence
  chemically synthesized
agctgcaagttcaagtgcggac

SEQ ID NO: 53081 - DNA, 22 bp, Artificial Sequence
  chemically synthesized
caagttcaagtgcggacgtgac

SEQ ID NO: 53082 - DNA, 22 bp, Artificial Sequence
  chemically synthesized
aagtgcggacgtgacgtccctg

SEQ ID NO: 53083 - DNA, 22 bp, Artificial Sequence
  chemically synthesized
cgaacttgaacgtcaggagtct

SEQ ID NO: 53084 - DNA, 22 bp, Artificial Sequence
  chemically synthesized
gaacgtcaggagtctggatgga

SEQ ID NO: 53085 - DNA, 22 bp, Artificial Sequence
  chemically synthesized
aacgtcaggagtctggatggac

SEQ ID NO: 53086 - DNA, 22 bp, Artificial Sequence
  chemically synthesized
gatggacagagacacacaaaac

SEQ ID NO: 53087 - DNA, 22 bp, Artificial Sequence
  chemically synthesized
acaccaatggacacacatcagg

SEQ ID NO: 53088 - DNA, 22 bp, Artificial Sequence
  chemically synthesized
gacatgaaaaagagaccaggac

SEQ ID NO: 53089 - DNA, 22 bp, Artificial Sequence
  chemically synthesized
cgcggacgccagacgcggcccc

SEQ ID NO: 53090 - DNA, 22 bp, Artificial Sequence
  chemically synthesized
gggccgcgggctcaccagtggc

SEQ ID NO: 53091 - DNA, 22 bp, Artificial Sequence
  chemically synthesized
accagtggccgcagcgagcgcc

SEQ ID NO: 53092 - DNA, 22 bp, Artificial Sequence
  chemically synthesized
ctcccccccacacacgcggact

SEQ ID NO: 53093 - DNA, 22 bp, Artificial Sequence
  chemically synthesized
ccccccacacacgcggactcta

SEQ ID NO: 53094 - DNA, 22 bp, Artificial Sequence
  chemically synthesized
taaaatgaaagattattcaaaa

SEQ ID NO: 53095 - DNA, 22 bp, Artificial Sequence
  chemically synthesized
aaatgaaagattattcaaaaaa

SEQ ID NO: 53096 - DNA, 22 bp, Artificial Sequence
  chemically synthesized
ttcaaaaaagaaaaaaatagag

SEQ ID NO: 53097 - DNA, 22 bp, Artificial Sequence
  chemically synthesized
aaaaaagaaaaaaatagagcga

SEQ ID NO: 53098 - DNA, 22 bp, Artificial Sequence
  chemically synthesized
cagccccgggctggggaagcgc

SEQ ID NO: 53099 - DNA, 22 bp, Artificial Sequence
  chemically synthesized
gggaagcgcgggcggagggaag

SEQ ID NO: 53100 - DNA, 22 bp, Artificial Sequence
  chemically synthesized
ctcccggacaccctcctccgta

SEQ ID NO: 53101 - DNA, 22 bp, Artificial Sequence
  chemically synthesized
ccggacaccctcctccgtacgc

SEQ ID NO: 53102 - DNA, 22 bp, Artificial Sequence
  chemically synthesized
ctccgtacgcacacccacttcc

SEQ ID NO: 53103 - DNA, 22 bp, Artificial Sequence
  chemically synthesized
cgtacgcacacccacttcccct

SEQ ID NO: 53104 - DNA, 22 bp, Artificial Sequence
  chemically synthesized
cccctccccgccgccgccgcgc

SEQ ID NO: 53105 - DNA, 22 bp, Artificial Sequence
  chemically synthesized
ccctccccgccgccgccgcgct

SEQ ID NO: 53106 - DNA, 22 bp, Artificial Sequence
  chemically synthesized
cccgccgccgccgcgctcgctc

SEQ ID NO: 53107 - DNA, 22 bp, Artificial Sequence
  chemically synthesized
gctccccgcgtgtggacgccag

SEQ ID NO: 53108 - DNA, 22 bp, Artificial Sequence
  chemically synthesized
cccgcgtgtggacgccaggggc

SEQ ID NO: 53109 - DNA, 22 bp, Artificial Sequence
  chemically synthesized
cgctcgggaaactttgcccgag

SEQ ID NO: 53110 - DNA, 22 bp, Artificial Sequence
  chemically synthesized
gggaaactttgcccgaggagag

SEQ ID NO: 53111 - DNA, 22 bp, Artificial Sequence
  chemically synthesized
tgcccgaggagaggacagcaaa

SEQ ID NO: 53112 - DNA, 22 bp, Artificial Sequence
  chemically synthesized
gcccgaggagaggacagcaaag

SEQ ID NO: 53113 - DNA, 22 bp, Artificial Sequence
  chemically synthesized
cccgaggagaggacagcaaaga

SEQ ID NO: 53114 - DNA, 22 bp, Artificial Sequence
  chemically synthesized
agagctgagcctccaagttaca

SEQ ID NO: 53115 - DNA, 22 bp, Artificial Sequence
  chemically synthesized
agcctccaagttacagctccgc

SEQ ID NO: 53116 - DNA, 22 bp, Artificial Sequence
  chemically synthesized
caagttacagctccgcagcggg

SEQ ID NO: 53117 - DNA, 22 bp, Artificial Sequence
  chemically synthesized
cagctccgcagcgggcgagggg

SEQ ID NO: 53118 - DNA, 22 bp, Artificial Sequence
  chemically synthesized
cgcagcgggcgaggggaggtgg

SEQ ID NO: 53119 - DNA, 22 bp, Artificial Sequence
  chemically synthesized
agtttggagggctgcgggtccg

SEQ ID NO: 53120 - DNA, 22 bp, Artificial Sequence
  chemically synthesized
ggagggctgcgggtccggaagg

SEQ ID NO: 53121 - DNA, 22 bp, Artificial Sequence
  chemically synthesized
gagggctgcgggtccggaaggg

SEQ ID NO: 53122 - DNA, 22 bp, Artificial Sequence
  chemically synthesized
cgggtccggaagggcagcgccc

SEQ ID NO: 53123 - DNA, 22 bp, Artificial Sequence
  chemically synthesized
caggagcccgcgcggcctggaa

SEQ ID NO: 53124 - DNA, 22 bp, Artificial Sequence
  chemically synthesized
gaaagaggggaccggggagagg

SEQ ID NO: 53125 - DNA, 22 bp, Artificial Sequence
  chemically synthesized
agcgccccgccaagcgactggg

SEQ ID NO: 53126 - DNA, 22 bp, Artificial Sequence
  chemically synthesized
ggtctgaatgcaactgaaagcg

SEQ ID NO: 53127 - DNA, 22 bp, Artificial Sequence
  chemically synthesized
aatgcaactgaaagcgccgagt

SEQ ID NO: 53128 - DNA, 22 bp, Artificial Sequence
  chemically synthesized
aaagcgccgagtccccggctcc

SEQ ID NO: 53129 - DNA, 22 bp, Artificial Sequence
  chemically synthesized
ctaagggtcgcagaaagagagc

SEQ ID NO: 53130 - DNA, 22 bp, Artificial Sequence
  chemically synthesized
agggtcgcagaaagagagcccg

SEQ ID NO: 53131 - DNA, 22 bp, Artificial Sequence
  chemically synthesized
gcccccggaggggagcgccggg

SEQ ID NO: 53132 - DNA, 22 bp, Artificial Sequence
  chemically synthesized
ggcaagagaggcaccgaggcgt

SEQ ID NO: 53133 - DNA, 22 bp, Artificial Sequence
  chemically synthesized
tctgagaggccgaggacaaagc

SEQ ID NO: 53134 - DNA, 22 bp, Artificial Sequence
  chemically synthesized
tgagaggccgaggacaaagcgc

SEQ ID NO: 53135 - DNA, 22 bp, Artificial Sequence
  chemically synthesized
agaggccgaggacaaagcgcgg

SEQ ID NO: 53136 - DNA, 22 bp, Artificial Sequence
  chemically synthesized
ggaatgtgctcacggcgccgcg

SEQ ID NO: 53137 - DNA, 22 bp, Artificial Sequence
  chemically synthesized
acggcgccgcgggaggtccccg

SEQ ID NO: 53138 - DNA, 22 bp, Artificial Sequence
  chemically synthesized
ggagggacacaccccctcccac

SEQ ID NO: 53139 - DNA, 22 bp, Artificial Sequence
  chemically synthesized
ccactccagagcaactgcaaaa

SEQ ID NO: 53140 - DNA, 22 bp, Artificial Sequence
  chemically synthesized
cagagcaactgcaaaagcacag

SEQ ID NO: 53141 - DNA, 22 bp, Artificial Sequence
  chemically synthesized
caaaagcacagagggatgggaa

SEQ ID NO: 53142 - DNA, 22 bp, Artificial Sequence
  chemically synthesized
cttacgggcagagcacaactgt

SEQ ID NO: 53143 - DNA, 22 bp, Artificial Sequence
  chemically synthesized
ttacgggcagagcacaactgtt

SEQ ID NO: 53144 - DNA, 22 bp, Artificial Sequence
  chemically synthesized
acgggcagagcacaactgttcc

SEQ ID NO: 53145 - DNA, 22 bp, Artificial Sequence
  chemically synthesized
cgggcagagcacaactgttcct

SEQ ID NO: 53146 - DNA, 22 bp, Artificial Sequence
  chemically synthesized
ttcctgtgctgttacccaggga

SEQ ID NO: 53147 - DNA, 22 bp, Artificial Sequence
  chemically synthesized
ctgtgctgttacccagggaaag

SEQ ID NO: 53148 - DNA, 22 bp, Artificial Sequence
  chemically synthesized
tgctgttacccagggaaagaga

SEQ ID NO: 53149 - DNA, 22 bp, Artificial Sequence
  chemically synthesized
ttacccagggaaagagaaaatg

SEQ ID NO: 53150 - DNA, 22 bp, Artificial Sequence
  chemically synthesized
cccagggaaagagaaaatggga

SEQ ID NO: 53151 - DNA, 22 bp, Artificial Sequence
  chemically synthesized
gcaggagcagcggggagaccac

SEQ ID NO: 53152 - DNA, 22 bp, Artificial Sequence
  chemically synthesized
gggtcaccgccgcgctccccag

SEQ ID NO: 53153 - DNA, 22 bp, Artificial Sequence
  chemically synthesized
cccaggcgccgccggccaaggc

SEQ ID NO: 53154 - DNA, 22 bp, Artificial Sequence
  chemically synthesized
tcgcctttctgcagacgttccc

SEQ ID NO: 53155 - DNA, 22 bp, Artificial Sequence
  chemically synthesized
gcctttctgcagacgttccctg

SEQ ID NO: 53156 - DNA, 22 bp, Artificial Sequence
  chemically synthesized
tctgcagacgttccctggaaat

SEQ ID NO: 53157 - DNA, 22 bp, Artificial Sequence
  chemically synthesized
ctgcagacgttccctggaaatt

SEQ ID NO: 53158 - DNA, 22 bp, Artificial Sequence
  chemically synthesized
tgcagacgttccctggaaatta

SEQ ID NO: 53159 - DNA, 22 bp, Artificial Sequence
  chemically synthesized
cagacgttccctggaaattagg

SEQ ID NO: 53160 - DNA, 22 bp, Artificial Sequence
  chemically synthesized
cctggaaattagggaagacctg

SEQ ID NO: 53161 - DNA, 22 bp, Artificial Sequence
  chemically synthesized
gaaattagggaagacctgttgg

SEQ ID NO: 53162 - DNA, 22 bp, Artificial Sequence
  chemically synthesized
gggaagacctgttggaaataaa

SEQ ID NO: 53163 - DNA, 22 bp, Artificial Sequence
  chemically synthesized
ttggaaataaaaccctgtctct

SEQ ID NO: 53164 - DNA, 22 bp, Artificial Sequence
  chemically synthesized
gaaataaaaccctgtctcttta

SEQ ID NO: 53165 - DNA, 22 bp, Artificial Sequence
  chemically synthesized
tctctttaatgcacacacgcac

SEQ ID NO: 53166 - DNA, 22 bp, Artificial Sequence
  chemically synthesized
tttaatgcacacacgcacacac

SEQ ID NO: 53167 - DNA, 22 bp, Artificial Sequence
  chemically synthesized
taatgcacacacgcacacacac

SEQ ID NO: 53168 - DNA, 22 bp, Artificial Sequence
  chemically synthesized
aatgcacacacgcacacacacg

SEQ ID NO: 53169 - DNA, 22 bp, Artificial Sequence
  chemically synthesized
atgcacacacgcacacacacgc

SEQ ID NO: 53170 - DNA, 22 bp, Artificial Sequence
  chemically synthesized
ccgctgtcaaaaagcgggcttc

SEQ ID NO: 53171 - DNA, 22 bp, Artificial Sequence
  chemically synthesized
tcaaaaagcgggcttcactctg

SEQ ID NO: 53172 - DNA, 22 bp, Artificial Sequence
  chemically synthesized
cactctggcgtgggatactttc

SEQ ID NO: 53173 - DNA, 22 bp, Artificial Sequence
  chemically synthesized
actctggcgtgggatactttca

SEQ ID NO: 53174 - DNA, 22 bp, Artificial Sequence
  chemically synthesized
tggcgtgggatactttcagttt

SEQ ID NO: 53175 - DNA, 22 bp, Artificial Sequence
  chemically synthesized
gcgtgggatactttcagtttta

SEQ ID NO: 53176 - DNA, 22 bp, Artificial Sequence
  chemically synthesized
tcagttttacgtaaaatgtaca

SEQ ID NO: 53177 - DNA, 22 bp, Artificial Sequence
  chemically synthesized
cagttttacgtaaaatgtacag

SEQ ID NO: 53178 - DNA, 22 bp, Artificial Sequence
  chemically synthesized
agttttacgtaaaatgtacagc

SEQ ID NO: 53179 - DNA, 22 bp, Artificial Sequence
  chemically synthesized
tacgtaaaatgtacagcaacag

SEQ ID NO: 53180 - DNA, 22 bp, Artificial Sequence
  chemically synthesized
acgtaaaatgtacagcaacagc

SEQ ID NO: 53181 - DNA, 22 bp, Artificial Sequence
  chemically synthesized
cgtaaaatgtacagcaacagca

SEQ ID NO: 53182 - DNA, 22 bp, Artificial Sequence
  chemically synthesized
cgattggaaagtttattcagaa

SEQ ID NO: 53183 - DNA, 22 bp, Artificial Sequence
  chemically synthesized
gaaagtttattcagaaacgtgc

SEQ ID NO: 53184 - DNA, 22 bp, Artificial Sequence
  chemically synthesized
attcagaaacgtgcctgtaaag

SEQ ID NO: 53185 - DNA, 22 bp, Artificial Sequence
  chemically synthesized
ttcagaaacgtgcctgtaaagt

SEQ ID NO: 53186 - DNA, 22 bp, Artificial Sequence
  chemically synthesized
agaaacgtgcctgtaaagtccc

SEQ ID NO: 53187 - DNA, 22 bp, Artificial Sequence
  chemically synthesized
taaagtcccctggcgcctcccg

SEQ ID NO: 53188 - DNA, 22 bp, Artificial Sequence
  chemically synthesized
gcgcctcccgcctcccagcctc

SEQ ID NO: 53189 - DNA, 22 bp, Artificial Sequence
  chemically synthesized
ccgcctcccagcctccctgcct

SEQ ID NO: 53190 - DNA, 22 bp, Artificial Sequence
  chemically synthesized
ccagcctccctgcctgccagca

SEQ ID NO: 53191 - DNA, 22 bp, Artificial Sequence
  chemically synthesized
cctgcctgccagcaccactctg

SEQ ID NO: 53192 - DNA, 22 bp, Artificial Sequence
  chemically synthesized
cctgccagcaccactctgcagc

SEQ ID NO: 53193 - DNA, 22 bp, Artificial Sequence
  chemically synthesized
ccagcaccactctgcagccgcc

SEQ ID NO: 53194 - DNA, 22 bp, Artificial Sequence
  chemically synthesized
tgcagccgccgccgccgccgcc

SEQ ID NO: 53195 - DNA, 22 bp, Artificial Sequence
  chemically synthesized
cagccgccgccgccgccgccgg

SEQ ID NO: 53196 - DNA, 22 bp, Artificial Sequence
  chemically synthesized
caaatctggaaggagttggggg

SEQ ID NO: 53197 - DNA, 22 bp, Artificial Sequence
  chemically synthesized
gaaggagttggggggagaggag

SEQ ID NO: 53198 - DNA, 22 bp, Artificial Sequence
  chemically synthesized
gggggagaggagaatggactca

SEQ ID NO: 53199 - DNA, 22 bp, Artificial Sequence
  chemically synthesized
aggtccaagggaggtgcggagg

SEQ ID NO: 53200 - DNA, 22 bp, Artificial Sequence
  chemically synthesized
agctgcaggtggatatgtgtga

SEQ ID NO: 53201 - DNA, 22 bp, Artificial Sequence
  chemically synthesized
caggtggatatgtgtgagtgtg

SEQ ID NO: 53202 - DNA, 22 bp, Artificial Sequence
  chemically synthesized
cagagcgaggagccctccttcc

SEQ ID NO: 53203 - DNA, 22 bp, Artificial Sequence
  chemically synthesized
cttccctctcctcggagcggtt

SEQ ID NO: 53204 - DNA, 22 bp, Artificial Sequence
  chemically synthesized
ccctctcctcggagcggttcca

SEQ ID NO: 53205 - DNA, 22 bp, Artificial Sequence
  chemically synthesized
cctctcctcggagcggttccac

SEQ ID NO: 53206 - DNA, 22 bp, Artificial Sequence
  chemically synthesized
tcctcggagcggttccacaacc

SEQ ID NO: 53207 - DNA, 22 bp, Artificial Sequence
  chemically synthesized
ctcggagcggttccacaacccc

SEQ ID NO: 53208 - DNA, 22 bp, Artificial Sequence
  chemically synthesized
ggagcggttccacaacccccgt

SEQ ID NO: 53209 - DNA, 22 bp, Artificial Sequence
  chemically synthesized
cacaacccccgtcttctcatcc

SEQ ID NO: 53210 - DNA, 22 bp, Artificial Sequence
  chemically synthesized
ctcatccccctcttcagtctaa

SEQ ID NO: 53211 - DNA, 22 bp, Artificial Sequence
  chemically synthesized
tcatccccctcttcagtctaaa

SEQ ID NO: 53212 - DNA, 22 bp, Artificial Sequence
  chemically synthesized
atccccctcttcagtctaaagg

SEQ ID NO: 53213 - DNA, 22 bp, Artificial Sequence
  chemically synthesized
ttcagtctaaagggtgtcgctt

SEQ ID NO: 53214 - DNA, 22 bp, Artificial Sequence
  chemically synthesized
cagtctaaagggtgtcgcttcc

SEQ ID NO: 53215 - DNA, 22 bp, Artificial Sequence
  chemically synthesized
agtctaaagggtgtcgcttccg

SEQ ID NO: 53216 - DNA, 22 bp, Artificial Sequence
  chemically synthesized
aagggtgtcgcttccgtaaact

SEQ ID NO: 53217 - DNA, 22 bp, Artificial Sequence
  chemically synthesized
ccgtaaactcacccacccggtg

SEQ ID NO: 53218 - DNA, 22 bp, Artificial Sequence
  chemically synthesized
cgtaaactcacccacccggtgg

SEQ ID NO: 53219 - DNA, 22 bp, Artificial Sequence
  chemically synthesized
acccacccggtgggggggcttt

SEQ ID NO: 53220 - DNA, 22 bp, Artificial Sequence
  chemically synthesized
tattgttttaagcgagggcccc

SEQ ID NO: 53221 - DNA, 22 bp, Artificial Sequence
  chemically synthesized
attgttttaagcgagggccccg

SEQ ID NO: 53222 - DNA, 22 bp, Artificial Sequence
  chemically synthesized
ttgttttaagcgagggccccgg

SEQ ID NO: 53223 - DNA, 22 bp, Artificial Sequence
  chemically synthesized
ttttaagcgagggccccgggct

SEQ ID NO: 53224 - DNA, 22 bp, Artificial Sequence
  chemically synthesized
taagcgagggccccgggcttgc

SEQ ID NO: 53225 - DNA, 22 bp, Artificial Sequence
  chemically synthesized
aagcgagggccccgggcttgca

SEQ ID NO: 53226 - DNA, 22 bp, Artificial Sequence
  chemically synthesized
agcgagggccccgggcttgcac

SEQ ID NO: 53227 - DNA, 22 bp, Artificial Sequence
  chemically synthesized
gcacgcgctcacccatcccgca

SEQ ID NO: 53228 - DNA, 22 bp, Artificial Sequence
  chemically synthesized
cacgcgctcacccatcccgcag

SEQ ID NO: 53229 - DNA, 22 bp, Artificial Sequence
  chemically synthesized
acccatcccgcagccctgccgg

SEQ ID NO: 53230 - DNA, 22 bp, Artificial Sequence
  chemically synthesized
ccggcaagcggctgtttattcc

SEQ ID NO: 53231 - DNA, 22 bp, Artificial Sequence
  chemically synthesized
tttattcctgtttcgtcttagt

SEQ ID NO: 53232 - DNA, 22 bp, Artificial Sequence
  chemically synthesized
attcctgtttcgtcttagtaaa

SEQ ID NO: 53233 - DNA, 22 bp, Artificial Sequence
  chemically synthesized
ttcctgtttcgtcttagtaaag

SEQ ID NO: 53234 - DNA, 22 bp, Artificial Sequence
  chemically synthesized
ctgtttcgtcttagtaaagttt

SEQ ID NO: 53235 - DNA, 22 bp, Artificial Sequence
  chemically synthesized
tttcgtcttagtaaagtttcaa

SEQ ID NO: 53236 - DNA, 22 bp, Artificial Sequence
  chemically synthesized
cgtcttagtaaagtttcaagtc

SEQ ID NO: 53237 - DNA, 22 bp, Artificial Sequence
  chemically synthesized
gtcttagtaaagtttcaagtct

SEQ ID NO: 53238 - DNA, 22 bp, Artificial Sequence
  chemically synthesized
agtaaagtttcaagtctactgt

SEQ ID NO: 53239 - DNA, 22 bp, Artificial Sequence
  chemically synthesized
gtaaagtttcaagtctactgtg

SEQ ID NO: 53240 - DNA, 22 bp, Artificial Sequence
  chemically synthesized
caagtctactgtgttagaaaat

SEQ ID NO: 53241 - DNA, 22 bp, Artificial Sequence
  chemically synthesized
aagtctactgtgttagaaaatg

SEQ ID NO: 53242 - DNA, 22 bp, Artificial Sequence
  chemically synthesized
ctgtgttagaaaatgactggct

SEQ ID NO: 53243 - DNA, 22 bp, Artificial Sequence
  chemically synthesized
tgttagaaaatgactggcttgc

SEQ ID NO: 53244 - DNA, 22 bp, Artificial Sequence
  chemically synthesized
gaaaatgactggcttgcctagc

SEQ ID NO: 53245 - DNA, 22 bp, Artificial Sequence
  chemically synthesized
gcttgcctagctcggcggagct

SEQ ID NO: 53246 - DNA, 22 bp, Artificial Sequence
  chemically synthesized
gcctagctcggcggagcttcgg

SEQ ID NO: 53247 - DNA, 22 bp, Artificial Sequence
  chemically synthesized
cctagctcggcggagcttcgga

SEQ ID NO: 53248 - DNA, 22 bp, Artificial Sequence
  chemically synthesized
gctcggcggagcttcggacccc

SEQ ID NO: 53249 - DNA, 22 bp, Artificial Sequence
  chemically synthesized
ggcggagcttcggacccctcta

SEQ ID NO: 53250 - DNA, 22 bp, Artificial Sequence
  chemically synthesized
cggacccctctaaggaagaaaa

SEQ ID NO: 53251 - DNA, 22 bp, Artificial Sequence
  chemically synthesized
ggacccctctaaggaagaaaag

SEQ ID NO: 53252 - DNA, 22 bp, Artificial Sequence
  chemically synthesized
taaggaagaaaaggaggttttg

SEQ ID NO: 53253 - DNA, 22 bp, Artificial Sequence
  chemically synthesized
aggaagaaaaggaggttttgat

SEQ ID NO: 53254 - DNA, 22 bp, Artificial Sequence
  chemically synthesized
tgatgctcaacattgagagaga

SEQ ID NO: 53255 - DNA, 22 bp, Artificial Sequence
  chemically synthesized
gatgctcaacattgagagagat

SEQ ID NO: 53256 - DNA, 22 bp, Artificial Sequence
  chemically synthesized
atgctcaacattgagagagatg

SEQ ID NO: 53257 - DNA, 22 bp, Artificial Sequence
  chemically synthesized
aacattgagagagatgtgggct

SEQ ID NO: 53258 - DNA, 22 bp, Artificial Sequence
  chemically synthesized
agagagatgtgggctgtactgg

SEQ ID NO: 53259 - DNA, 22 bp, Artificial Sequence
  chemically synthesized
tactgggattgtgtcaatgtgg

SEQ ID NO: 53260 - DNA, 22 bp, Artificial Sequence
  chemically synthesized
ggattgtgtcaatgtggtttgt

SEQ ID NO: 53261 - DNA, 22 bp, Artificial Sequence
  chemically synthesized
tgtcaatgtggtttgttgtttg

SEQ ID NO: 53262 - DNA, 22 bp, Artificial Sequence
  chemically synthesized
gttgtttgttgttgtttccctc

SEQ ID NO: 53263 - DNA, 22 bp, Artificial Sequence
  chemically synthesized
ttgtttgttgttgtttccctcc

SEQ ID NO: 53264 - DNA, 22 bp, Artificial Sequence
  chemically synthesized
tttgttgttgtttccctccagt

SEQ ID NO: 53265 - DNA, 22 bp, Artificial Sequence
  chemically synthesized
gttgttgtttccctccagtttg

SEQ ID NO: 53266 - DNA, 22 bp, Artificial Sequence
  chemically synthesized
ttgttgtttccctccagtttgt

SEQ ID NO: 53267 - DNA, 22 bp, Artificial Sequence
  chemically synthesized
ttgtttccctccagtttgtggg

SEQ ID NO: 53268 - DNA, 22 bp, Artificial Sequence
  chemically synthesized
tttccctccagtttgtgggagg

SEQ ID NO: 53269 - DNA, 22 bp, Artificial Sequence
  chemically synthesized
ccctccagtttgtgggagggag

SEQ ID NO: 53270 - DNA, 22 bp, Artificial Sequence
  chemically synthesized
cctccagtttgtgggagggaga

SEQ ID NO: 53271 - DNA, 22 bp, Artificial Sequence
  chemically synthesized
cagtttgtgggagggagacctc

SEQ ID NO: 53272 - DNA, 22 bp, Artificial Sequence
  chemically synthesized
gtgggagggagacctcaaattc

SEQ ID NO: 53273 - DNA, 22 bp, Artificial Sequence
  chemically synthesized
tgggagggagacctcaaattct

SEQ ID NO: 53274 - DNA, 22 bp, Artificial Sequence
  chemically synthesized
aaattctgtttaagaagcggga

SEQ ID NO: 53275 - DNA, 22 bp, Artificial Sequence
  chemically synthesized
tgtttaagaagcgggaggattc

SEQ ID NO: 53276 - DNA, 22 bp, Artificial Sequence
  chemically synthesized
tttaagaagcgggaggattcac

SEQ ID NO: 53277 - DNA, 22 bp, Artificial Sequence
  chemically synthesized
aagaagcgggaggattcactag

SEQ ID NO: 53278 - DNA, 22 bp, Artificial Sequence
  chemically synthesized
agaagcgggaggattcactaga

SEQ ID NO: 53279 - DNA, 22 bp, Artificial Sequence
  chemically synthesized
actagaagttaagctctgtagc

SEQ ID NO: 53280 - DNA, 22 bp, Artificial Sequence
  chemically synthesized
gaagttaagctctgtagcttgt

SEQ ID NO: 53281 - DNA, 22 bp, Artificial Sequence
  chemically synthesized
agctctgtagcttgtgtgtgac

SEQ ID NO: 53282 - DNA, 22 bp, Artificial Sequence
  chemically synthesized
tgtagcttgtgtgtgacaccat

SEQ ID NO: 53283 - DNA, 22 bp, Artificial Sequence
  chemically synthesized
tagcttgtgtgtgacaccattt

SEQ ID NO: 53284 - DNA, 22 bp, Artificial Sequence
  chemically synthesized
gtgtgtgacaccatttcccctt

SEQ ID NO: 53285 - DNA, 22 bp, Artificial Sequence
  chemically synthesized
tgtgtgacaccatttccccttt

SEQ ID NO: 53286 - DNA, 22 bp, Artificial Sequence
  chemically synthesized
ccccttttcactgagttcttca

SEQ ID NO: 53287 - DNA, 22 bp, Artificial Sequence
  chemically synthesized
cccttttcactgagttcttcag

SEQ ID NO: 53288 - DNA, 22 bp, Artificial Sequence
  chemically synthesized
ttcactgagttcttcagagcag

SEQ ID NO: 53289 - DNA, 22 bp, Artificial Sequence
  chemically synthesized
tcactgagttcttcagagcagg

SEQ ID NO: 53290 - DNA, 22 bp, Artificial Sequence
  chemically synthesized
cactgagttcttcagagcaggt

SEQ ID NO: 53291 - DNA, 22 bp, Artificial Sequence
  chemically synthesized
actgagttcttcagagcaggtc

SEQ ID NO: 53292 - DNA, 22 bp, Artificial Sequence
  chemically synthesized
agttcttcagagcaggtcagca

SEQ ID NO: 53293 - DNA, 22 bp, Artificial Sequence
  chemically synthesized
ttcagagcaggtcagcatctct

SEQ ID NO: 53294 - DNA, 22 bp, Artificial Sequence
  chemically synthesized
cagagcaggtcagcatctctat

SEQ ID NO: 53295 - DNA, 22 bp, Artificial Sequence
  chemically synthesized
agagcaggtcagcatctctatt

SEQ ID NO: 53296 - DNA, 22 bp, Artificial Sequence
  chemically synthesized
tattccaccacagtctgctttt

SEQ ID NO: 53297 - DNA, 22 bp, Artificial Sequence
  chemically synthesized
ttccaccacagtctgctttttg

SEQ ID NO: 53298 - DNA, 22 bp, Artificial Sequence
  chemically synthesized
caccacagtctgctttttgtct

SEQ ID NO: 53299 - DNA, 22 bp, Artificial Sequence
  chemically synthesized
ctttttgtcttgttaaaccagc

SEQ ID NO: 53300 - DNA, 22 bp, Artificial Sequence
  chemically synthesized
tttgtcttgttaaaccagcctt

SEQ ID NO: 53301 - DNA, 22 bp, Artificial Sequence
  chemically synthesized
ttgtcttgttaaaccagccttg

SEQ ID NO: 53302 - DNA, 22 bp, Artificial Sequence
  chemically synthesized
tgtcttgttaaaccagccttgg

SEQ ID NO: 53303 - DNA, 22 bp, Artificial Sequence
  chemically synthesized
gtcttgttaaaccagccttgga

SEQ ID NO: 53304 - DNA, 22 bp, Artificial Sequence
  chemically synthesized
tcttgttaaaccagccttggag

SEQ ID NO: 53305 - DNA, 22 bp, Artificial Sequence
  chemically synthesized
gttaaaccagccttggagtcac

SEQ ID NO: 53306 - DNA, 22 bp, Artificial Sequence
  chemically synthesized
ttaaaccagccttggagtcacc

SEQ ID NO: 53307 - DNA, 22 bp, Artificial Sequence
  chemically synthesized
aaccagccttggagtcaccaaa

SEQ ID NO: 53308 - DNA, 22 bp, Artificial Sequence
  chemically synthesized
ggagtcaccaaaagaatgtctt

SEQ ID NO: 53309 - DNA, 22 bp, Artificial Sequence
  chemically synthesized
gagtcaccaaaagaatgtcttc

SEQ ID NO: 53310 - DNA, 22 bp, Artificial Sequence
  chemically synthesized
cttggggggtggcgggggagga

SEQ ID NO: 53311 - DNA, 22 bp, Artificial Sequence
  chemically synthesized
ttggggggtggcgggggaggac

SEQ ID NO: 53312 - DNA, 22 bp, Artificial Sequence
  chemically synthesized
ggggggtggcgggggaggacga

SEQ ID NO: 53313 - DNA, 22 bp, Artificial Sequence
  chemically synthesized
gggggtggcgggggaggacgac

SEQ ID NO: 53314 - DNA, 22 bp, Artificial Sequence
  chemically synthesized
gagggaaggtgaagagagggaa

SEQ ID NO: 53315 - DNA, 22 bp, Artificial Sequence
  chemically synthesized
ggaggcctttgaaaaataaata

SEQ ID NO: 53316 - DNA, 22 bp, Artificial Sequence
  chemically synthesized
tgaaaaataaataaataaaaga

SEQ ID NO: 53317 - DNA, 22 bp, Artificial Sequence
  chemically synthesized
gaaaaataaataaataaaagaa

SEQ ID NO: 53318 - DNA, 22 bp, Artificial Sequence
  chemically synthesized
aaaaataaataaataaaagaaa

SEQ ID NO: 53319 - DNA, 22 bp, Artificial Sequence
  chemically synthesized
caggtaacaatagtgagccaga

SEQ ID NO: 53320 - DNA, 22 bp, Artificial Sequence
  chemically synthesized
aggtaacaatagtgagccagat

SEQ ID NO: 53321 - DNA, 22 bp, Artificial Sequence
  chemically synthesized
tttcagaaccaagcttttcaga

SEQ ID NO: 53322 - DNA, 22 bp, Artificial Sequence
  chemically synthesized
tcagaaccaagcttttcagatt

SEQ ID NO: 53323 - DNA, 22 bp, Artificial Sequence
  chemically synthesized
cagaaccaagcttttcagattt

SEQ ID NO: 53324 - DNA, 22 bp, Artificial Sequence
  chemically synthesized
agaaccaagcttttcagatttg

SEQ ID NO: 53325 - DNA, 22 bp, Artificial Sequence
  chemically synthesized
ttcagatttgaatattgttccc

SEQ ID NO: 53326 - DNA, 22 bp, Artificial Sequence
  chemically synthesized
tcagatttgaatattgttccca

SEQ ID NO: 53327 - DNA, 22 bp, Artificial Sequence
  chemically synthesized
cagatttgaatattgttcccac

SEQ ID NO: 53328 - DNA, 22 bp, Artificial Sequence
  chemically synthesized
agatttgaatattgttcccacc

SEQ ID NO: 53329 - DNA, 22 bp, Artificial Sequence
  chemically synthesized
gaatattgttcccacccgtcca

SEQ ID NO: 53330 - DNA, 22 bp, Artificial Sequence
  chemically synthesized
aatattgttcccacccgtccat

SEQ ID NO: 53331 - DNA, 22 bp, Artificial Sequence
  chemically synthesized
ttcccacccgtccataaaagtc

SEQ ID NO: 53332 - DNA, 22 bp, Artificial Sequence
  chemically synthesized
ccacccgtccataaaagtccat

SEQ ID NO: 53333 - DNA, 22 bp, Artificial Sequence
  chemically synthesized
tagagaagatatataaatgagc

SEQ ID NO: 53334 - DNA, 22 bp, Artificial Sequence
  chemically synthesized
tggaaatatatatatatgtatg

SEQ ID NO: 53335 - DNA, 22 bp, Artificial Sequence
  chemically synthesized
atatataatggtgtgtataaag

SEQ ID NO: 53336 - DNA, 22 bp, Artificial Sequence
  chemically synthesized
tatataatggtgtgtataaagc

SEQ ID NO: 53337 - DNA, 22 bp, Artificial Sequence
  chemically synthesized
ttcggggttggctgtagtgtaa

SEQ ID NO: 53338 - DNA, 22 bp, Artificial Sequence
  chemically synthesized
tcggggttggctgtagtgtaaa

SEQ ID NO: 53339 - DNA, 22 bp, Artificial Sequence
  chemically synthesized
cggggttggctgtagtgtaaaa

SEQ ID NO: 53340 - DNA, 22 bp, Artificial Sequence
  chemically synthesized
ggggttggctgtagtgtaaaaa

SEQ ID NO: 53341 - DNA, 22 bp, Artificial Sequence
  chemically synthesized
gctgtagtgtaaaaagtaatga

SEQ ID NO: 53342 - DNA, 22 bp, Artificial Sequence
  chemically synthesized
tagtgtaaaaagtaatgacttt

SEQ ID NO: 53343 - DNA, 22 bp, Artificial Sequence
  chemically synthesized
tattacctctgaaaggttctgt

SEQ ID NO: 53344 - DNA, 22 bp, Artificial Sequence
  chemically synthesized
attacctctgaaaggttctgtg

SEQ ID NO: 53345 - DNA, 22 bp, Artificial Sequence
  chemically synthesized
ttacctctgaaaggttctgtgg

SEQ ID NO: 53346 - DNA, 22 bp, Artificial Sequence
  chemically synthesized
cctctgaaaggttctgtggttc

SEQ ID NO: 53347 - DNA, 22 bp, Artificial Sequence
  chemically synthesized
tgaaaggttctgtggttcacat

SEQ ID NO: 53348 - DNA, 22 bp, Artificial Sequence
  chemically synthesized
aaaggttctgtggttcacattt

SEQ ID NO: 53349 - DNA, 22 bp, Artificial Sequence
  chemically synthesized
tgtggttcacatttaacagtct

SEQ ID NO: 53350 - DNA, 22 bp, Artificial Sequence
  chemically synthesized
tggttcacatttaacagtcttc

SEQ ID NO: 53351 - DNA, 22 bp, Artificial Sequence
  chemically synthesized
acatttaacagtcttctgaatt

SEQ ID NO: 53352 - DNA, 22 bp, Artificial Sequence
  chemically synthesized
aacagtcttctgaattacaatt

SEQ ID NO: 53353 - DNA, 22 bp, Artificial Sequence
  chemically synthesized
acagtcttctgaattacaattc

SEQ ID NO: 53354 - DNA, 22 bp, Artificial Sequence
  chemically synthesized
ctgaattacaattcattacaca

SEQ ID NO: 53355 - DNA, 22 bp, Artificial Sequence
  chemically synthesized
tgaattacaattcattacacaa

SEQ ID NO: 53356 - DNA, 22 bp, Artificial Sequence
  chemically synthesized
aattacaattcattacacaatt

SEQ ID NO: 53357 - DNA, 22 bp, Artificial Sequence
  chemically synthesized
caattcattacacaattgtgtg

SEQ ID NO: 53358 - DNA, 22 bp, Artificial Sequence
  chemically synthesized
attacacaattgtgtgcgctct

SEQ ID NO: 53359 - DNA, 22 bp, Artificial Sequence
  chemically synthesized
cacaattgtgtgcgctctgacg

SEQ ID NO: 53360 - DNA, 22 bp, Artificial Sequence
  chemically synthesized
tgtgcgctctgacgatggcacc

SEQ ID NO: 53361 - DNA, 22 bp, Artificial Sequence
  chemically synthesized
tgacgatggcaccctatcaggg

SEQ ID NO: 53362 - DNA, 22 bp, Artificial Sequence
  chemically synthesized
acgatggcaccctatcagggct

SEQ ID NO: 53363 - DNA, 22 bp, Artificial Sequence
  chemically synthesized
tcagggctgctatctgtggcta

SEQ ID NO: 53364 - DNA, 22 bp, Artificial Sequence
  chemically synthesized
ctatctgtggctatttccaata

SEQ ID NO: 53365 - DNA, 22 bp, Artificial Sequence
  chemically synthesized
tctgtggctatttccaataaat

SEQ ID NO: 53366 - DNA, 22 bp, Artificial Sequence
  chemically synthesized
tggctatttccaataaataact

SEQ ID NO: 53367 - DNA, 22 bp, Artificial Sequence
  chemically synthesized
tttccaataaataactggcaac

SEQ ID NO: 53368 - DNA, 22 bp, Artificial Sequence
  chemically synthesized
ccaataaataactggcaacatt

SEQ ID NO: 53369 - DNA, 22 bp, Artificial Sequence
  chemically synthesized
caataaataactggcaacattt

SEQ ID NO: 53370 - DNA, 22 bp, Artificial Sequence
  chemically synthesized
gcaacattttattgattttcct

SEQ ID NO: 53371 - DNA, 22 bp, Artificial Sequence
  chemically synthesized
tattgattttcctttttaaaaa

SEQ ID NO: 53372 - DNA, 22 bp, Artificial Sequence
  chemically synthesized
attgattttcctttttaaaaaa

SEQ ID NO: 53373 - DNA, 22 bp, Artificial Sequence
  chemically synthesized
ttgattttcctttttaaaaaaa

SEQ ID NO: 53374 - DNA, 22 bp, Artificial Sequence
  chemically synthesized
attttcctttttaaaaaaaaac

SEQ ID NO: 53375 - DNA, 22 bp, Artificial Sequence
  chemically synthesized
tcctttttaaaaaaaaacatag

SEQ ID NO: 53376 - DNA, 22 bp, Artificial Sequence
  chemically synthesized
cctttttaaaaaaaaacatagg

SEQ ID NO: 53377 - DNA, 22 bp, Artificial Sequence
  chemically synthesized
ctttttaaaaaaaaacatagga

SEQ ID NO: 53378 - DNA, 22 bp, Artificial Sequence
  chemically synthesized
tttaaaaaaaaacataggaaat

SEQ ID NO: 53379 - DNA, 22 bp, Artificial Sequence
  chemically synthesized
ttaaaaaaaaacataggaaatt

SEQ ID NO: 53380 - DNA, 22 bp, Artificial Sequence
  chemically synthesized
taaaaaaaaacataggaaatta

SEQ ID NO: 53381 - DNA, 22 bp, Artificial Sequence
  chemically synthesized
aaaaaaaaacataggaaattaa

SEQ ID NO: 53382 - DNA, 22 bp, Artificial Sequence
  chemically synthesized
aaaaaaaacataggaaattaag

SEQ ID NO: 53383 - DNA, 22 bp, Artificial Sequence
  chemically synthesized
agcacttagttacaagtaggtc

SEQ ID NO: 53384 - DNA, 22 bp, Artificial Sequence
  chemically synthesized
agttacaagtaggtctgctatg

SEQ ID NO: 53385 - DNA, 22 bp, Artificial Sequence
  chemically synthesized
gttacaagtaggtctgctatgt

SEQ ID NO: 53386 - DNA, 22 bp, Artificial Sequence
  chemically synthesized
caagtaggtctgctatgttatt

SEQ ID NO: 53387 - DNA, 22 bp, Artificial Sequence
  chemically synthesized
cttgtaactaagtgcttaattt

SEQ ID NO: 53388 - DNA, 22 bp, Artificial Sequence
  chemically synthesized
gtaactaagtgcttaatttcct

SEQ ID NO: 53389 - DNA, 22 bp, Artificial Sequence
  chemically synthesized
taactaagtgcttaatttccta

SEQ ID NO: 53390 - DNA, 22 bp, Artificial Sequence
  chemically synthesized
agtgcttaatttcctatgtttt

SEQ ID NO: 53391 - DNA, 22 bp, Artificial Sequence
  chemically synthesized
aatttcctatgtttttttttaa

SEQ ID NO: 53392 - DNA, 22 bp, Artificial Sequence
  chemically synthesized
atttcctatgtttttttttaaa

SEQ ID NO: 53393 - DNA, 22 bp, Artificial Sequence
  chemically synthesized
cctatgtttttttttaaaaagg

SEQ ID NO: 53394 - DNA, 22 bp, Artificial Sequence
  chemically synthesized
ctatgtttttttttaaaaagga

SEQ ID NO: 53395 - DNA, 22 bp, Artificial Sequence
  chemically synthesized
tgtttttttttaaaaaggaaaa

SEQ ID NO: 53396 - DNA, 22 bp, Artificial Sequence
  chemically synthesized
ttttttaaaaaggaaaatcaat

SEQ ID NO: 53397 - DNA, 22 bp, Artificial Sequence
  chemically synthesized
tttttaaaaaggaaaatcaata

SEQ ID NO: 53398 - DNA, 22 bp, Artificial Sequence
  chemically synthesized
ttttaaaaaggaaaatcaataa

SEQ ID NO: 53399 - DNA, 22 bp, Artificial Sequence
  chemically synthesized
tttaaaaaggaaaatcaataaa

SEQ ID NO: 53400 - DNA, 22 bp, Artificial Sequence
  chemically synthesized
ttaaaaaggaaaatcaataaaa

SEQ ID NO: 53401 - DNA, 22 bp, Artificial Sequence
  chemically synthesized
taaaaaggaaaatcaataaaat

SEQ ID NO: 53402 - DNA, 22 bp, Artificial Sequence
  chemically synthesized
aaaaaggaaaatcaataaaatg

SEQ ID NO: 53403 - DNA, 22 bp, Artificial Sequence
  chemically synthesized
aaaaggaaaatcaataaaatgt

SEQ ID NO: 53404 - DNA, 22 bp, Artificial Sequence
  chemically synthesized
ccagttatttattggaaatagc

SEQ ID NO: 53405 - DNA, 22 bp, Artificial Sequence
  chemically synthesized
tttattggaaatagccacagat

SEQ ID NO: 53406 - DNA, 22 bp, Artificial Sequence
  chemically synthesized
attggaaatagccacagatagc

SEQ ID NO: 53407 - DNA, 22 bp, Artificial Sequence
  chemically synthesized
ttggaaatagccacagatagca

SEQ ID NO: 53408 - DNA, 22 bp, Artificial Sequence
  chemically synthesized
gaaatagccacagatagcagcc

SEQ ID NO: 53409 - DNA, 22 bp, Artificial Sequence
  chemically synthesized
atagggtgccatcgtcagagcg

SEQ ID NO: 53410 - DNA, 22 bp, Artificial Sequence
  chemically synthesized
tgtaatgaattgtaattcagaa

SEQ ID NO: 53411 - DNA, 22 bp, Artificial Sequence
  chemically synthesized
taattcagaagactgttaaatg

SEQ ID NO: 53412 - DNA, 22 bp, Artificial Sequence
  chemically synthesized
agaagactgttaaatgtgaacc

SEQ ID NO: 53413 - DNA, 22 bp, Artificial Sequence
  chemically synthesized
ttaaatgtgaaccacagaacct

SEQ ID NO: 53414 - DNA, 22 bp, Artificial Sequence
  chemically synthesized
aatgtgaaccacagaacctttc

SEQ ID NO: 53415 - DNA, 22 bp, Artificial Sequence
  chemically synthesized
tcagaggtaataaagtcattac

SEQ ID NO: 53416 - DNA, 22 bp, Artificial Sequence
  chemically synthesized
cagaggtaataaagtcattact

SEQ ID NO: 53417 - DNA, 22 bp, Artificial Sequence
  chemically synthesized
agaggtaataaagtcattactt

SEQ ID NO: 53418 - DNA, 22 bp, Artificial Sequence
  chemically synthesized
ctttttacactacagccaaccc

SEQ ID NO: 53419 - DNA, 22 bp, Artificial Sequence
  chemically synthesized
tttacactacagccaaccccga

SEQ ID NO: 53420 - DNA, 22 bp, Artificial Sequence
  chemically synthesized
ttacactacagccaaccccgaa

SEQ ID NO: 53421 - DNA, 22 bp, Artificial Sequence
  chemically synthesized
tacactacagccaaccccgaaa

SEQ ID NO: 53422 - DNA, 22 bp, Artificial Sequence
  chemically synthesized
acactacagccaaccccgaaaa

SEQ ID NO: 53423 - DNA, 22 bp, Artificial Sequence
  chemically synthesized
cactacagccaaccccgaaaag

SEQ ID NO: 53424 - DNA, 22 bp, Artificial Sequence
  chemically synthesized
cagccaaccccgaaaagcttta

SEQ ID NO: 53425 - DNA, 22 bp, Artificial Sequence
  chemically synthesized
tatacacaccattatatataaa

SEQ ID NO: 53426 - DNA, 22 bp, Artificial Sequence
  chemically synthesized
atacacaccattatatataaat

SEQ ID NO: 53427 - DNA, 22 bp, Artificial Sequence
  chemically synthesized
tacacaccattatatataaatc

SEQ ID NO: 53428 - DNA, 22 bp, Artificial Sequence
  chemically synthesized
tatataaatcatacatatatat

SEQ ID NO: 53429 - DNA, 22 bp, Artificial Sequence
  chemically synthesized
ccacaacactcactcgctcatt

SEQ ID NO: 53430 - DNA, 22 bp, Artificial Sequence
  chemically synthesized
cacaacactcactcgctcattt

SEQ ID NO: 53431 - DNA, 22 bp, Artificial Sequence
  chemically synthesized
actcgctcatttatatatcttc

SEQ ID NO: 53432 - DNA, 22 bp, Artificial Sequence
  chemically synthesized
gctcatttatatatcttctcta

SEQ ID NO: 53433 - DNA, 22 bp, Artificial Sequence
  chemically synthesized
atttatatatcttctctataga

SEQ ID NO: 53434 - DNA, 22 bp, Artificial Sequence
  chemically synthesized
atatatcttctctatagatgga

SEQ ID NO: 53435 - DNA, 22 bp, Artificial Sequence
  chemically synthesized
tatatcttctctatagatggac

SEQ ID NO: 53436 - DNA, 22 bp, Artificial Sequence
  chemically synthesized
ctctatagatggacttttatgg

SEQ ID NO: 53437 - DNA, 22 bp, Artificial Sequence
  chemically synthesized
tctatagatggacttttatgga

SEQ ID NO: 53438 - DNA, 22 bp, Artificial Sequence
  chemically synthesized
tatagatggacttttatggacg

SEQ ID NO: 53439 - DNA, 22 bp, Artificial Sequence
  chemically synthesized
tagatggacttttatggacggg

SEQ ID NO: 53440 - DNA, 22 bp, Artificial Sequence
  chemically synthesized
ttatggacgggtgggaacaata

SEQ ID NO: 53441 - DNA, 22 bp, Artificial Sequence
  chemically synthesized
tatggacgggtgggaacaatat

SEQ ID NO: 53442 - DNA, 22 bp, Artificial Sequence
  chemically synthesized
atggacgggtgggaacaatatt

SEQ ID NO: 53443 - DNA, 22 bp, Artificial Sequence
  chemically synthesized
tggacgggtgggaacaatattc

SEQ ID NO: 53444 - DNA, 22 bp, Artificial Sequence
  chemically synthesized
aaatctgaaaagcttggttctg

SEQ ID NO: 53445 - DNA, 22 bp, Artificial Sequence
  chemically synthesized
aaaagcttggttctgaaagaat

SEQ ID NO: 53446 - DNA, 22 bp, Artificial Sequence
  chemically synthesized
ggttctgaaagaatctggctca

SEQ ID NO: 53447 - DNA, 22 bp, Artificial Sequence
  chemically synthesized
gttctgaaagaatctggctcac

SEQ ID NO: 53448 - DNA, 22 bp, Artificial Sequence
  chemically synthesized
tgaaagaatctggctcactatt

SEQ ID NO: 53449 - DNA, 22 bp, Artificial Sequence
  chemically synthesized
aaagaatctggctcactattgt

SEQ ID NO: 53450 - DNA, 22 bp, Artificial Sequence
  chemically synthesized
gctcactattgttacctgaagg

SEQ ID NO: 53451 - DNA, 22 bp, Artificial Sequence
  chemically synthesized
actattgttacctgaaggggct

SEQ ID NO: 53452 - DNA, 22 bp, Artificial Sequence
  chemically synthesized
ttgttacctgaaggggcttttc

SEQ ID NO: 53453 - DNA, 22 bp, Artificial Sequence
  chemically synthesized
ttacctgaaggggcttttcttt

SEQ ID NO: 53454 - DNA, 22 bp, Artificial Sequence
  chemically synthesized
cctgaaggggcttttcttttat

SEQ ID NO: 53455 - DNA, 22 bp, Artificial Sequence
  chemically synthesized
aaggggcttttcttttatttat

SEQ ID NO: 53456 - DNA, 22 bp, Artificial Sequence
  chemically synthesized
ttcttttatttatttatttttc

SEQ ID NO: 53457 - DNA, 22 bp, Artificial Sequence
  chemically synthesized
tcttttatttatttatttttca

SEQ ID NO: 53458 - DNA, 22 bp, Artificial Sequence
  chemically synthesized
cttttatttatttatttttcaa

SEQ ID NO: 53459 - DNA, 22 bp, Artificial Sequence
  chemically synthesized
ttttatttatttatttttcaaa

SEQ ID NO: 53460 - DNA, 22 bp, Artificial Sequence
  chemically synthesized
ttatttatttatttttcaaagg

SEQ ID NO: 53461 - DNA, 22 bp, Artificial Sequence
  chemically synthesized
tatttatttatttttcaaaggc

SEQ ID NO: 53462 - DNA, 22 bp, Artificial Sequence
  chemically synthesized
atttatttatttttcaaaggcc

SEQ ID NO: 53463 - DNA, 22 bp, Artificial Sequence
  chemically synthesized
tttatttatttttcaaaggcct

SEQ ID NO: 53464 - DNA, 22 bp, Artificial Sequence
  chemically synthesized
atttatttttcaaaggcctccc

SEQ ID NO: 53465 - DNA, 22 bp, Artificial Sequence
  chemically synthesized
tttatttttcaaaggcctccca

SEQ ID NO: 53466 - DNA, 22 bp, Artificial Sequence
  chemically synthesized
atttttcaaaggcctcccagtt

SEQ ID NO: 53467 - DNA, 22 bp, Artificial Sequence
  chemically synthesized
tttttcaaaggcctcccagttg

SEQ ID NO: 53468 - DNA, 22 bp, Artificial Sequence
  chemically synthesized
ttcaaaggcctcccagttgcac

SEQ ID NO: 53469 - DNA, 22 bp, Artificial Sequence
  chemically synthesized
tcaaaggcctcccagttgcact

SEQ ID NO: 53470 - DNA, 22 bp, Artificial Sequence
  chemically synthesized
caaaggcctcccagttgcactt

SEQ ID NO: 53471 - DNA, 22 bp, Artificial Sequence
  chemically synthesized
aaaggcctcccagttgcacttt

SEQ ID NO: 53472 - DNA, 22 bp, Artificial Sequence
  chemically synthesized
ccagttgcactttcttcttccc

SEQ ID NO: 53473 - DNA, 22 bp, Artificial Sequence
  chemically synthesized
cactttcttcttccctctcttc

SEQ ID NO: 53474 - DNA, 22 bp, Artificial Sequence
  chemically synthesized
tcttcttccctctcttcacctt

SEQ ID NO: 53475 - DNA, 22 bp, Artificial Sequence
  chemically synthesized
cttcttccctctcttcaccttc

SEQ ID NO: 53476 - DNA, 22 bp, Artificial Sequence
  chemically synthesized
ttcttccctctcttcaccttcc

SEQ ID NO: 53477 - DNA, 22 bp, Artificial Sequence
  chemically synthesized
cttccctctcttcaccttccct

SEQ ID NO: 53478 - DNA, 22 bp, Artificial Sequence
  chemically synthesized
ttccctctcttcaccttccctc

SEQ ID NO: 53479 - DNA, 22 bp, Artificial Sequence
  chemically synthesized
ccctctcttcaccttccctcca

SEQ ID NO: 53480 - DNA, 22 bp, Artificial Sequence
  chemically synthesized
cctctcttcaccttccctccaa

SEQ ID NO: 53481 - DNA, 22 bp, Artificial Sequence
  chemically synthesized
tcttcaccttccctccaaccgt

SEQ ID NO: 53482 - DNA, 22 bp, Artificial Sequence
  chemically synthesized
ttcaccttccctccaaccgtcc

SEQ ID NO: 53483 - DNA, 22 bp, Artificial Sequence
  chemically synthesized
caccttccctccaaccgtcccc

SEQ ID NO: 53484 - DNA, 22 bp, Artificial Sequence
  chemically synthesized
accttccctccaaccgtccccc

SEQ ID NO: 53485 - DNA, 22 bp, Artificial Sequence
  chemically synthesized
ccctccaaccgtcccccacgtc

SEQ ID NO: 53486 - DNA, 22 bp, Artificial Sequence
  chemically synthesized
cctccaaccgtcccccacgtcg

SEQ ID NO: 53487 - DNA, 22 bp, Artificial Sequence
  chemically synthesized
caaccgtcccccacgtcgtcct

SEQ ID NO: 53488 - DNA, 22 bp, Artificial Sequence
  chemically synthesized
ccccgccaccccccaagaagac

SEQ ID NO: 53489 - DNA, 22 bp, Artificial Sequence
  chemically synthesized
ttttggtgactccaaggctggt

SEQ ID NO: 53490 - DNA, 22 bp, Artificial Sequence
  chemically synthesized
ttggtgactccaaggctggttt

SEQ ID NO: 53491 - DNA, 22 bp, Artificial Sequence
  chemically synthesized
tggtgactccaaggctggttta

SEQ ID NO: 53492 - DNA, 22 bp, Artificial Sequence
  chemically synthesized
ggtgactccaaggctggtttaa

SEQ ID NO: 53493 - DNA, 22 bp, Artificial Sequence
  chemically synthesized
gtgactccaaggctggtttaac

SEQ ID NO: 53494 - DNA, 22 bp, Artificial Sequence
  chemically synthesized
caaggctggtttaacaagacaa

SEQ ID NO: 53495 - DNA, 22 bp, Artificial Sequence
  chemically synthesized
gtttaacaagacaaaaagcaga

SEQ ID NO: 53496 - DNA, 22 bp, Artificial Sequence
  chemically synthesized
aacaagacaaaaagcagactgt

SEQ ID NO: 53497 - DNA, 22 bp, Artificial Sequence
  chemically synthesized
acaagacaaaaagcagactgtg

SEQ ID NO: 53498 - DNA, 22 bp, Artificial Sequence
  chemically synthesized
tggtggaatagagatgctgacc

SEQ ID NO: 53499 - DNA, 22 bp, Artificial Sequence
  chemically synthesized
acctgctctgaagaactcagtg

SEQ ID NO: 53500 - DNA, 22 bp, Artificial Sequence
  chemically synthesized
ctctgaagaactcagtgaaaag

SEQ ID NO: 53501 - DNA, 22 bp, Artificial Sequence
  chemically synthesized
tgaagaactcagtgaaaagggg

SEQ ID NO: 53502 - DNA, 22 bp, Artificial Sequence
  chemically synthesized
aagaactcagtgaaaaggggaa

SEQ ID NO: 53503 - DNA, 22 bp, Artificial Sequence
  chemically synthesized
agtgaaaaggggaaatggtgtc

SEQ ID NO: 53504 - DNA, 22 bp, Artificial Sequence
  chemically synthesized
cagagcttaacttctagtgaat

SEQ ID NO: 53505 - DNA, 22 bp, Artificial Sequence
  chemically synthesized
aacttctagtgaatcctcccgc

SEQ ID NO: 53506 - DNA, 22 bp, Artificial Sequence
  chemically synthesized
acttctagtgaatcctcccgct

SEQ ID NO: 53507 - DNA, 22 bp, Artificial Sequence
  chemically synthesized
ctagtgaatcctcccgcttctt

SEQ ID NO: 53508 - DNA, 22 bp, Artificial Sequence
  chemically synthesized
tagtgaatcctcccgcttctta

SEQ ID NO: 53509 - DNA, 22 bp, Artificial Sequence
  chemically synthesized
gtgaatcctcccgcttcttaaa

SEQ ID NO: 53510 - DNA, 22 bp, Artificial Sequence
  chemically synthesized
ccgcttcttaaacagaatttga

SEQ ID NO: 53511 - DNA, 22 bp, Artificial Sequence
  chemically synthesized
cttaaacagaatttgaggtctc

SEQ ID NO: 53512 - DNA, 22 bp, Artificial Sequence
  chemically synthesized
ttaaacagaatttgaggtctcc

SEQ ID NO: 53513 - DNA, 22 bp, Artificial Sequence
  chemically synthesized
aaacagaatttgaggtctccct

SEQ ID NO: 53514 - DNA, 22 bp, Artificial Sequence
  chemically synthesized
aacagaatttgaggtctccctc

SEQ ID NO: 53515 - DNA, 22 bp, Artificial Sequence
  chemically synthesized
gaggtctccctcccacaaactg

SEQ ID NO: 53516 - DNA, 22 bp, Artificial Sequence
  chemically synthesized
aggtctccctcccacaaactgg

SEQ ID NO: 53517 - DNA, 22 bp, Artificial Sequence
  chemically synthesized
cctcccacaaactggagggaaa

SEQ ID NO: 53518 - DNA, 22 bp, Artificial Sequence
  chemically synthesized
ccacaaactggagggaaacaac

SEQ ID NO: 53519 - DNA, 22 bp, Artificial Sequence
  chemically synthesized
gagggaaacaacaacaaacaac

SEQ ID NO: 53520 - DNA, 22 bp, Artificial Sequence
  chemically synthesized
acacaatcccagtacagcccac

SEQ ID NO: 53521 - DNA, 22 bp, Artificial Sequence
  chemically synthesized
tctcaatgttgagcatcaaaac

SEQ ID NO: 53522 - DNA, 22 bp, Artificial Sequence
  chemically synthesized
tcaatgttgagcatcaaaacct

SEQ ID NO: 53523 - DNA, 22 bp, Artificial Sequence
  chemically synthesized
aatgttgagcatcaaaacctcc

SEQ ID NO: 53524 - DNA, 22 bp, Artificial Sequence
  chemically synthesized
agcatcaaaacctccttttctt

SEQ ID NO: 53525 - DNA, 22 bp, Artificial Sequence
  chemically synthesized
cttttcttccttagaggggtcc

SEQ ID NO: 53526 - DNA, 22 bp, Artificial Sequence
  chemically synthesized
ttcttccttagaggggtccgaa

SEQ ID NO: 53527 - DNA, 22 bp, Artificial Sequence
  chemically synthesized
tcttccttagaggggtccgaag

SEQ ID NO: 53528 - DNA, 22 bp, Artificial Sequence
  chemically synthesized
cttccttagaggggtccgaagc

SEQ ID NO: 53529 - DNA, 22 bp, Artificial Sequence
  chemically synthesized
ttccttagaggggtccgaagct

SEQ ID NO: 53530 - DNA, 22 bp, Artificial Sequence
  chemically synthesized
ccttagaggggtccgaagctcc

SEQ ID NO: 53531 - DNA, 22 bp, Artificial Sequence
  chemically synthesized
cttagaggggtccgaagctccg

SEQ ID NO: 53532 - DNA, 22 bp, Artificial Sequence
  chemically synthesized
agaggggtccgaagctccgccg

SEQ ID NO: 53533 - DNA, 22 bp, Artificial Sequence
  chemically synthesized
gaggggtccgaagctccgccga

SEQ ID NO: 53534 - DNA, 22 bp, Artificial Sequence
  chemically synthesized
cgccgagctaggcaagccagtc

SEQ ID NO: 53535 - DNA, 22 bp, Artificial Sequence
  chemically synthesized
ggcaagccagtcattttctaac

SEQ ID NO: 53536 - DNA, 22 bp, Artificial Sequence
  chemically synthesized
tctaacacagtagacttgaaac

SEQ ID NO: 53537 - DNA, 22 bp, Artificial Sequence
  chemically synthesized
ctaacacagtagacttgaaact

SEQ ID NO: 53538 - DNA, 22 bp, Artificial Sequence
  chemically synthesized
taacacagtagacttgaaactt

SEQ ID NO: 53539 - DNA, 22 bp, Artificial Sequence
  chemically synthesized
acacagtagacttgaaacttta

SEQ ID NO: 53540 - DNA, 22 bp, Artificial Sequence
  chemically synthesized
gaaactttactaagacgaaaca

SEQ ID NO: 53541 - DNA, 22 bp, Artificial Sequence
  chemically synthesized
aaactttactaagacgaaacag

SEQ ID NO: 53542 - DNA, 22 bp, Artificial Sequence
  chemically synthesized
tactaagacgaaacaggaataa

SEQ ID NO: 53543 - DNA, 22 bp, Artificial Sequence
  chemically synthesized
actaagacgaaacaggaataaa

SEQ ID NO: 53544 - DNA, 22 bp, Artificial Sequence
  chemically synthesized
ctaagacgaaacaggaataaac

SEQ ID NO: 53545 - DNA, 22 bp, Artificial Sequence
  chemically synthesized
agacgaaacaggaataaacagc

SEQ ID NO: 53546 - DNA, 22 bp, Artificial Sequence
  chemically synthesized
gccggcagggctgcgggatggg

SEQ ID NO: 53547 - DNA, 22 bp, Artificial Sequence
  chemically synthesized
ccggcagggctgcgggatgggt

SEQ ID NO: 53548 - DNA, 22 bp, Artificial Sequence
  chemically synthesized
cgggatgggtgagcgcgtgcaa

SEQ ID NO: 53549 - DNA, 22 bp, Artificial Sequence
  chemically synthesized
gcttaaaacaataaagcccccc

SEQ ID NO: 53550 - DNA, 22 bp, Artificial Sequence
  chemically synthesized
aaaacaataaagcccccccacc

SEQ ID NO: 53551 - DNA, 22 bp, Artificial Sequence
  chemically synthesized
aaacaataaagcccccccaccg

SEQ ID NO: 53552 - DNA, 22 bp, Artificial Sequence
  chemically synthesized
acggaagcgacaccctttagac

SEQ ID NO: 53553 - DNA, 22 bp, Artificial Sequence
  chemically synthesized
cggaagcgacaccctttagact

SEQ ID NO: 53554 - DNA, 22 bp, Artificial Sequence
  chemically synthesized
tagactgaagagggggatgaga

SEQ ID NO: 53555 - DNA, 22 bp, Artificial Sequence
  chemically synthesized
agactgaagagggggatgagaa

SEQ ID NO: 53556 - DNA, 22 bp, Artificial Sequence
  chemically synthesized
gactgaagagggggatgagaag

SEQ ID NO: 53557 - DNA, 22 bp, Artificial Sequence
  chemically synthesized
aagagggggatgagaagacggg

SEQ ID NO: 53558 - DNA, 22 bp, Artificial Sequence
  chemically synthesized
tggaaccgctccgaggagaggg

SEQ ID NO: 53559 - DNA, 22 bp, Artificial Sequence
  chemically synthesized
cgaggagagggaaggagggctc

SEQ ID NO: 53560 - DNA, 22 bp, Artificial Sequence
  chemically synthesized
ctcgctctgcagacacactcac

SEQ ID NO: 53561 - DNA, 22 bp, Artificial Sequence
  chemically synthesized
gctctgcagacacactcacaca

SEQ ID NO: 53562 - DNA, 22 bp, Artificial Sequence
  chemically synthesized
tgcagacacactcacacatatc

SEQ ID NO: 53563 - DNA, 22 bp, Artificial Sequence
  chemically synthesized
cagacacactcacacatatcca

SEQ ID NO: 53564 - DNA, 22 bp, Artificial Sequence
  chemically synthesized
acacatatccacctgcagctca

SEQ ID NO: 53565 - DNA, 22 bp, Artificial Sequence
  chemically synthesized
cagctcagggtctcgcgggcca

SEQ ID NO: 53566 - DNA, 22 bp, Artificial Sequence
  chemically synthesized
agggtctcgcgggccatggcga

SEQ ID NO: 53567 - DNA, 22 bp, Artificial Sequence
  chemically synthesized
gcgggccatggcgacccgtctc

SEQ ID NO: 53568 - DNA, 22 bp, Artificial Sequence
  chemically synthesized
caccctgcaccctccgcacctc

SEQ ID NO: 53569 - DNA, 22 bp, Artificial Sequence
  chemically synthesized
caccctccgcacctcccttgga

SEQ ID NO: 53570 - DNA, 22 bp, Artificial Sequence
  chemically synthesized
cgcacctcccttggacctgagt

SEQ ID NO: 53571 - DNA, 22 bp, Artificial Sequence
  chemically synthesized
ccttggacctgagtccattctc

SEQ ID NO: 53572 - DNA, 22 bp, Artificial Sequence
  chemically synthesized
ggacctgagtccattctcctct

SEQ ID NO: 53573 - DNA, 22 bp, Artificial Sequence
  chemically synthesized
gacctgagtccattctcctctc

SEQ ID NO: 53574 - DNA, 22 bp, Artificial Sequence
  chemically synthesized
agtccattctcctctcccccca

SEQ ID NO: 53575 - DNA, 22 bp, Artificial Sequence
  chemically synthesized
tcctctccccccaactccttcc

SEQ ID NO: 53576 - DNA, 22 bp, Artificial Sequence
  chemically synthesized
ctctccccccaactccttccag

SEQ ID NO: 53577 - DNA, 22 bp, Artificial Sequence
  chemically synthesized
tccccccaactccttccagatt

SEQ ID NO: 53578 - DNA, 22 bp, Artificial Sequence
  chemically synthesized
cccccaactccttccagatttg

SEQ ID NO: 53579 - DNA, 22 bp, Artificial Sequence
  chemically synthesized
cttccagatttggaatcggact

SEQ ID NO: 53580 - DNA, 22 bp, Artificial Sequence
  chemically synthesized
ccagatttggaatcggactgcg

SEQ ID NO: 53581 - DNA, 22 bp, Artificial Sequence
  chemically synthesized
cagatttggaatcggactgcga

SEQ ID NO: 53582 - DNA, 22 bp, Artificial Sequence
  chemically synthesized
ggaatcggactgcgatctcccc

SEQ ID NO: 53583 - DNA, 22 bp, Artificial Sequence
  chemically synthesized
gaatcggactgcgatctccccg

SEQ ID NO: 53584 - DNA, 22 bp, Artificial Sequence
  chemically synthesized
cgatctccccggcggcggcggc

SEQ ID NO: 53585 - DNA, 22 bp, Artificial Sequence
  chemically synthesized
cccggcggcggcggcggcggct

SEQ ID NO: 53586 - DNA, 22 bp, Artificial Sequence
  chemically synthesized
cagagtggtgctggcaggcagg

SEQ ID NO: 53587 - DNA, 22 bp, Artificial Sequence
  chemically synthesized
gcaggcagggaggctgggaggc

SEQ ID NO: 53588 - DNA, 22 bp, Artificial Sequence
  chemically synthesized
ggaggcgggaggcgccagggga

SEQ ID NO: 53589 - DNA, 22 bp, Artificial Sequence
  chemically synthesized
tacaggcacgtttctgaataaa

SEQ ID NO: 53590 - DNA, 22 bp, Artificial Sequence
  chemically synthesized
acaggcacgtttctgaataaac

SEQ ID NO: 53591 - DNA, 22 bp, Artificial Sequence
  chemically synthesized
caggcacgtttctgaataaact

SEQ ID NO: 53592 - DNA, 22 bp, Artificial Sequence
  chemically synthesized
ctgaataaactttccaatcgca

SEQ ID NO: 53593 - DNA, 22 bp, Artificial Sequence
  chemically synthesized
tgaataaactttccaatcgcag

SEQ ID NO: 53594 - DNA, 22 bp, Artificial Sequence
  chemically synthesized
aataaactttccaatcgcaggg

SEQ ID NO: 53595 - DNA, 22 bp, Artificial Sequence
  chemically synthesized
tccaatcgcagggggtgctgtt

SEQ ID NO: 53596 - DNA, 22 bp, Artificial Sequence
  chemically synthesized
ccaatcgcagggggtgctgttg

SEQ ID NO: 53597 - DNA, 22 bp, Artificial Sequence
  chemically synthesized
caatcgcagggggtgctgttgc

SEQ ID NO: 53598 - DNA, 22 bp, Artificial Sequence
  chemically synthesized
ttgctgtacattttacgtaaaa

SEQ ID NO: 53599 - DNA, 22 bp, Artificial Sequence
  chemically synthesized
ctgtacattttacgtaaaactg

SEQ ID NO: 53600 - DNA, 22 bp, Artificial Sequence
  chemically synthesized
tacattttacgtaaaactgaaa

SEQ ID NO: 53601 - DNA, 22 bp, Artificial Sequence
  chemically synthesized
tacgtaaaactgaaagtatccc

SEQ ID NO: 53602 - DNA, 22 bp, Artificial Sequence
  chemically synthesized
acgtaaaactgaaagtatccca

SEQ ID NO: 53603 - DNA, 22 bp, Artificial Sequence
  chemically synthesized
cgtaaaactgaaagtatcccac

SEQ ID NO: 53604 - DNA, 22 bp, Artificial Sequence
  chemically synthesized
aaagtatcccacgccagagtga

SEQ ID NO: 53605 - DNA, 22 bp, Artificial Sequence
  chemically synthesized
tttgacagcggcagcacgcgcg

SEQ ID NO: 53606 - DNA, 22 bp, Artificial Sequence
  chemically synthesized
ttgacagcggcagcacgcgcgt

SEQ ID NO: 53607 - DNA, 22 bp, Artificial Sequence
  chemically synthesized
tgacagcggcagcacgcgcgtg

SEQ ID NO: 53608 - DNA, 22 bp, Artificial Sequence
  chemically synthesized
gacagcggcagcacgcgcgtgt

SEQ ID NO: 53609 - DNA, 22 bp, Artificial Sequence
  chemically synthesized
acagcggcagcacgcgcgtgtg

SEQ ID NO: 53610 - DNA, 22 bp, Artificial Sequence
  chemically synthesized
aagagacagggttttatttcca

SEQ ID NO: 53611 - DNA, 22 bp, Artificial Sequence
  chemically synthesized
tatttccaacaggtcttcccta

SEQ ID NO: 53612 - DNA, 22 bp, Artificial Sequence
  chemically synthesized
atttccaacaggtcttccctaa

SEQ ID NO: 53613 - DNA, 22 bp, Artificial Sequence
  chemically synthesized
tttccaacaggtcttccctaat

SEQ ID NO: 53614 - DNA, 22 bp, Artificial Sequence
  chemically synthesized
ccaacaggtcttccctaatttc

SEQ ID NO: 53615 - DNA, 22 bp, Artificial Sequence
  chemically synthesized
caacaggtcttccctaatttcc

SEQ ID NO: 53616 - DNA, 22 bp, Artificial Sequence
  chemically synthesized
ccctaatttccagggaacgtct

SEQ ID NO: 53617 - DNA, 22 bp, Artificial Sequence
  chemically synthesized
cctaatttccagggaacgtctg

SEQ ID NO: 53618 - DNA, 22 bp, Artificial Sequence
  chemically synthesized
atttccagggaacgtctgcaga

SEQ ID NO: 53619 - DNA, 22 bp, Artificial Sequence
  chemically synthesized
ccagggaacgtctgcagaaagg

SEQ ID NO: 53620 - DNA, 22 bp, Artificial Sequence
  chemically synthesized
cagggaacgtctgcagaaaggc

SEQ ID NO: 53621 - DNA, 22 bp, Artificial Sequence
  chemically synthesized
cagaaaggcgagagggggctgc

SEQ ID NO: 53622 - DNA, 22 bp, Artificial Sequence
  chemically synthesized
ctggctcctgggtgtgcgcctt

SEQ ID NO: 53623 - DNA, 22 bp, Artificial Sequence
  chemically synthesized
gctcctgggtgtgcgccttggc

SEQ ID NO: 53624 - DNA, 22 bp, Artificial Sequence
  chemically synthesized
ctgggtgtgcgccttggccggc

SEQ ID NO: 53625 - DNA, 22 bp, Artificial Sequence
  chemically synthesized
ggtgtgcgccttggccggcggc

SEQ ID NO: 53626 - DNA, 22 bp, Artificial Sequence
  chemically synthesized
ggccggcggcgcctggggagcg

SEQ ID NO: 53627 - DNA, 22 bp, Artificial Sequence
  chemically synthesized
gccggcggcgcctggggagcgc

SEQ ID NO: 53628 - DNA, 22 bp, Artificial Sequence
  chemically synthesized
gggagcgcggcggtgacccgag

SEQ ID NO: 53629 - DNA, 22 bp, Artificial Sequence
  chemically synthesized
accaccgtggtctccccgctgc

SEQ ID NO: 53630 - DNA, 22 bp, Artificial Sequence
  chemically synthesized
cccgctgctcctgcgagcctgt

SEQ ID NO: 53631 - DNA, 22 bp, Artificial Sequence
  chemically synthesized
ctcctgcgagcctgtcgctctc

SEQ ID NO: 53632 - DNA, 22 bp, Artificial Sequence
  chemically synthesized
ctgcgagcctgtcgctctctct

SEQ ID NO: 53633 - DNA, 22 bp, Artificial Sequence
  chemically synthesized
cgagcctgtcgctctctctcca

SEQ ID NO: 53634 - DNA, 22 bp, Artificial Sequence
  chemically synthesized
tcgctctctctccattcccatt

SEQ ID NO: 53635 - DNA, 22 bp, Artificial Sequence
  chemically synthesized
tctctccattcccattttctct

SEQ ID NO: 53636 - DNA, 22 bp, Artificial Sequence
  chemically synthesized
tctccattcccattttctcttt

SEQ ID NO: 53637 - DNA, 22 bp, Artificial Sequence
  chemically synthesized
tccattcccattttctctttcc

SEQ ID NO: 53638 - DNA, 22 bp, Artificial Sequence
  chemically synthesized
cattcccattttctctttccct

SEQ ID NO: 53639 - DNA, 22 bp, Artificial Sequence
  chemically synthesized
ccattttctctttccctgggta

SEQ ID NO: 53640 - DNA, 22 bp, Artificial Sequence
  chemically synthesized
tctctttccctgggtaacagca

SEQ ID NO: 53641 - DNA, 22 bp, Artificial Sequence
  chemically synthesized
ctctttccctgggtaacagcac

SEQ ID NO: 53642 - DNA, 22 bp, Artificial Sequence
  chemically synthesized
tctttccctgggtaacagcaca

SEQ ID NO: 53643 - DNA, 22 bp, Artificial Sequence
  chemically synthesized
tttccctgggtaacagcacagg

SEQ ID NO: 53644 - DNA, 22 bp, Artificial Sequence
  chemically synthesized
tccctgggtaacagcacaggaa

SEQ ID NO: 53645 - DNA, 22 bp, Artificial Sequence
  chemically synthesized
ccctgggtaacagcacaggaac

SEQ ID NO: 53646 - DNA, 22 bp, Artificial Sequence
  chemically synthesized
cctgggtaacagcacaggaaca

SEQ ID NO: 53647 - DNA, 22 bp, Artificial Sequence
  chemically synthesized
ggtaacagcacaggaacagttg

SEQ ID NO: 53648 - DNA, 22 bp, Artificial Sequence
  chemically synthesized
tgctctgcccgtaagaaacatt

SEQ ID NO: 53649 - DNA, 22 bp, Artificial Sequence
  chemically synthesized
tgcccgtaagaaacattttctt

SEQ ID NO: 53650 - DNA, 22 bp, Artificial Sequence
  chemically synthesized
cccgtaagaaacattttcttcc

SEQ ID NO: 53651 - DNA, 22 bp, Artificial Sequence
  chemically synthesized
tcttcccatccctctgtgcttt

SEQ ID NO: 53652 - DNA, 22 bp, Artificial Sequence
  chemically synthesized
cttcccatccctctgtgctttt

SEQ ID NO: 53653 - DNA, 22 bp, Artificial Sequence
  chemically synthesized
ttcccatccctctgtgcttttg

SEQ ID NO: 53654 - DNA, 22 bp, Artificial Sequence
  chemically synthesized
cccatccctctgtgcttttgca

SEQ ID NO: 53655 - DNA, 22 bp, Artificial Sequence
  chemically synthesized
ccatccctctgtgcttttgcag

SEQ ID NO: 53656 - DNA, 22 bp, Artificial Sequence
  chemically synthesized
tgtgcttttgcagttgctctgg

SEQ ID NO: 53657 - DNA, 22 bp, Artificial Sequence
  chemically synthesized
tgcttttgcagttgctctggag

SEQ ID NO: 53658 - DNA, 22 bp, Artificial Sequence
  chemically synthesized
ttgcagttgctctggagtggga

SEQ ID NO: 53659 - DNA, 22 bp, Artificial Sequence
  chemically synthesized
tgcagttgctctggagtgggag

SEQ ID NO: 53660 - DNA, 22 bp, Artificial Sequence
  chemically synthesized
gcagttgctctggagtgggagg

SEQ ID NO: 53661 - DNA, 22 bp, Artificial Sequence
  chemically synthesized
cagttgctctggagtgggaggg

SEQ ID NO: 53662 - DNA, 22 bp, Artificial Sequence
  chemically synthesized
ctctggagtgggagggggtgtg

SEQ ID NO: 53663 - DNA, 22 bp, Artificial Sequence
  chemically synthesized
tggagtgggagggggtgtgtcc

SEQ ID NO: 53664 - DNA, 22 bp, Artificial Sequence
  chemically synthesized
gagtgggagggggtgtgtccct

SEQ ID NO: 53665 - DNA, 22 bp, Artificial Sequence
  chemically synthesized
ccagggacccggctcggggacc

SEQ ID NO: 53666 - DNA, 22 bp, Artificial Sequence
  chemically synthesized
ggggacctcccgcggcgccgtg

SEQ ID NO: 53667 - DNA, 22 bp, Artificial Sequence
  chemically synthesized
ccgcggcgccgtgagcacattc

SEQ ID NO: 53668 - DNA, 22 bp, Artificial Sequence
  chemically synthesized
ccagggactgggactcccggga

SEQ ID NO: 53669 - DNA, 22 bp, Artificial Sequence
  chemically synthesized
ggactcccgggactgcccgcgc

SEQ ID NO: 53670 - DNA, 22 bp, Artificial Sequence
  chemically synthesized
ccgggactgcccgcgctttgtc

SEQ ID NO: 53671 - DNA, 22 bp, Artificial Sequence
  chemically synthesized
cccgcgctttgtcctcggcctc

SEQ ID NO: 53672 - DNA, 22 bp, Artificial Sequence
  chemically synthesized
tgtcctcggcctctcagagagg

SEQ ID NO: 53673 - DNA, 22 bp, Artificial Sequence
  chemically synthesized
gtcctcggcctctcagagaggt

SEQ ID NO: 53674 - DNA, 22 bp, Artificial Sequence
  chemically synthesized
tcctcggcctctcagagaggtg

SEQ ID NO: 53675 - DNA, 22 bp, Artificial Sequence
  chemically synthesized
ggcctctcagagaggtggacgc

SEQ ID NO: 53676 - DNA, 22 bp, Artificial Sequence
  chemically synthesized
tcagagaggtggacgcctcggt

SEQ ID NO: 53677 - DNA, 22 bp, Artificial Sequence
  chemically synthesized
agagaggtggacgcctcggtgc

SEQ ID NO: 53678 - DNA, 22 bp, Artificial Sequence
  chemically synthesized
ggtgcctctcttgcccaggccc

SEQ ID NO: 53679 - DNA, 22 bp, Artificial Sequence
  chemically synthesized
tcttgcccaggcccccggcgct

SEQ ID NO: 53680 - DNA, 22 bp, Artificial Sequence
  chemically synthesized
ttgcccaggcccccggcgctcc

SEQ ID NO: 53681 - DNA, 22 bp, Artificial Sequence
  chemically synthesized
gcccaggcccccggcgctcccc

SEQ ID NO: 53682 - DNA, 22 bp, Artificial Sequence
  chemically synthesized
cccaggcccccggcgctcccct

SEQ ID NO: 53683 - DNA, 22 bp, Artificial Sequence
  chemically synthesized
ccctccgggggccagactctgg

SEQ ID NO: 53684 - DNA, 22 bp, Artificial Sequence
  chemically synthesized
cgggggccagactctggctcct

SEQ ID NO: 53685 - DNA, 22 bp, Artificial Sequence
  chemically synthesized
tggctcctcgttctttattcct

SEQ ID NO: 53686 - DNA, 22 bp, Artificial Sequence
  chemically synthesized
gctcctcgttctttattcctcg

SEQ ID NO: 53687 - DNA, 22 bp, Artificial Sequence
  chemically synthesized
ctcgttctttattcctcgggct

SEQ ID NO: 53688 - DNA, 22 bp, Artificial Sequence
  chemically synthesized
gttctttattcctcgggctctc

SEQ ID NO: 53689 - DNA, 22 bp, Artificial Sequence
  chemically synthesized
tttattcctcgggctctctttc

SEQ ID NO: 53690 - DNA, 22 bp, Artificial Sequence
  chemically synthesized
tattcctcgggctctctttctg

SEQ ID NO: 53691 - DNA, 22 bp, Artificial Sequence
  chemically synthesized
attcctcgggctctctttctgc

SEQ ID NO: 53692 - DNA, 22 bp, Artificial Sequence
  chemically synthesized
ttcctcgggctctctttctgcg

SEQ ID NO: 53693 - DNA, 22 bp, Artificial Sequence
  chemically synthesized
ctcgggctctctttctgcgacc

SEQ ID NO: 53694 - DNA, 22 bp, Artificial Sequence
  chemically synthesized
gggctctctttctgcgaccctt

SEQ ID NO: 53695 - DNA, 22 bp, Artificial Sequence
  chemically synthesized
tctttctgcgacccttaggagc

SEQ ID NO: 53696 - DNA, 22 bp, Artificial Sequence
  chemically synthesized
tttctgcgacccttaggagccg

SEQ ID NO: 53697 - DNA, 22 bp, Artificial Sequence
  chemically synthesized
tctgcgacccttaggagccggg

SEQ ID NO: 53698 - DNA, 22 bp, Artificial Sequence
  chemically synthesized
ctgcgacccttaggagccgggg

SEQ ID NO: 53699 - DNA, 22 bp, Artificial Sequence
  chemically synthesized
tgcgacccttaggagccgggga

SEQ ID NO: 53700 - DNA, 22 bp, Artificial Sequence
  chemically synthesized
cgacccttaggagccggggact

SEQ ID NO: 53701 - DNA, 22 bp, Artificial Sequence
  chemically synthesized
aggagccggggactcggcgctt

SEQ ID NO: 53702 - DNA, 22 bp, Artificial Sequence
  chemically synthesized
ggagccggggactcggcgcttt

SEQ ID NO: 53703 - DNA, 22 bp, Artificial Sequence
  chemically synthesized
ggcgctttcagttgcattcaga

SEQ ID NO: 53704 - DNA, 22 bp, Artificial Sequence
  chemically synthesized
tcagttgcattcagacccagtc

SEQ ID NO: 53705 - DNA, 22 bp, Artificial Sequence
  chemically synthesized
cagttgcattcagacccagtcg

SEQ ID NO: 53706 - DNA, 22 bp, Artificial Sequence
  chemically synthesized
agttgcattcagacccagtcgc

SEQ ID NO: 53707 - DNA, 22 bp, Artificial Sequence
  chemically synthesized
cattcagacccagtcgcttggc

SEQ ID NO: 53708 - DNA, 22 bp, Artificial Sequence
  chemically synthesized
agacccagtcgcttggcggggc

SEQ ID NO: 53709 - DNA, 22 bp, Artificial Sequence
  chemically synthesized
ggcggggcgctcagattcccgg

SEQ ID NO: 53710 - DNA, 22 bp, Artificial Sequence
  chemically synthesized
gcggggcgctcagattcccggt

SEQ ID NO: 53711 - DNA, 22 bp, Artificial Sequence
  chemically synthesized
agattcccggtccctggctcgg

SEQ ID NO: 53712 - DNA, 22 bp, Artificial Sequence
  chemically synthesized
ccggtccctggctcggccttgg

SEQ ID NO: 53713 - DNA, 22 bp, Artificial Sequence
  chemically synthesized
gctcggccttgggggcgccctc

SEQ ID NO: 53714 - DNA, 22 bp, Artificial Sequence
  chemically synthesized
ggccttgggggcgccctcgggc

SEQ ID NO: 53715 - DNA, 22 bp, Artificial Sequence
  chemically synthesized
gggggcgccctcgggccccggc

SEQ ID NO: 53716 - DNA, 22 bp, Artificial Sequence
  chemically synthesized
ggggcgccctcgggccccggcc

SEQ ID NO: 53717 - DNA, 22 bp, Artificial Sequence
  chemically synthesized
gggccccggcctgcgccgcctg

SEQ ID NO: 53718 - DNA, 22 bp, Artificial Sequence
  chemically synthesized
cgccgcctgcctctccccggtc

SEQ ID NO: 53719 - DNA, 22 bp, Artificial Sequence
  chemically synthesized
cctctccccggtcccctctttc

SEQ ID NO: 53720 - DNA, 22 bp, Artificial Sequence
  chemically synthesized
tccccggtcccctctttccagg

SEQ ID NO: 53721 - DNA, 22 bp, Artificial Sequence
  chemically synthesized
cccggtcccctctttccaggcc

SEQ ID NO: 53722 - DNA, 22 bp, Artificial Sequence
  chemically synthesized
tttccaggccgcgcgggctcct

SEQ ID NO: 53723 - DNA, 22 bp, Artificial Sequence
  chemically synthesized
tccaggccgcgcgggctcctgg

SEQ ID NO: 53724 - DNA, 22 bp, Artificial Sequence
  chemically synthesized
ccaggccgcgcgggctcctgga

SEQ ID NO: 53725 - DNA, 22 bp, Artificial Sequence
  chemically synthesized
caggccgcgcgggctcctggag

SEQ ID NO: 53726 - DNA, 22 bp, Artificial Sequence
  chemically synthesized
ctggagacttgggcgctgccct

SEQ ID NO: 53727 - DNA, 22 bp, Artificial Sequence
  chemically synthesized
gagacttgggcgctgcccttcc

SEQ ID NO: 53728 - DNA, 22 bp, Artificial Sequence
  chemically synthesized
gggcgctgcccttccggacccg

SEQ ID NO: 53729 - DNA, 22 bp, Artificial Sequence
  chemically synthesized
ggcgctgcccttccggacccgc

SEQ ID NO: 53730 - DNA, 22 bp, Artificial Sequence
  chemically synthesized
cccttccggacccgcagccctc

SEQ ID NO: 53731 - DNA, 22 bp, Artificial Sequence
  chemically synthesized
ccggacccgcagccctccaaac

SEQ ID NO: 53732 - DNA, 22 bp, Artificial Sequence
  chemically synthesized
cggacccgcagccctccaaact

SEQ ID NO: 53733 - DNA, 22 bp, Artificial Sequence
  chemically synthesized
caaacttaggctggattccgcg

SEQ ID NO: 53734 - DNA, 22 bp, Artificial Sequence
  chemically synthesized
aggctggattccgcgttgccgt

SEQ ID NO: 53735 - DNA, 22 bp, Artificial Sequence
  chemically synthesized
ggctggattccgcgttgccgtg

SEQ ID NO: 53736 - DNA, 22 bp, Artificial Sequence
  chemically synthesized
gattccgcgttgccgtgcgctc

SEQ ID NO: 53737 - DNA, 22 bp, Artificial Sequence
  chemically synthesized
cgcgttgccgtgcgctccctcc

SEQ ID NO: 53738 - DNA, 22 bp, Artificial Sequence
  chemically synthesized
ccgtgcgctccctcccacctcc

SEQ ID NO: 53739 - DNA, 22 bp, Artificial Sequence
  chemically synthesized
cctcccacctcccctcgcccgc

SEQ ID NO: 53740 - DNA, 22 bp, Artificial Sequence
  chemically synthesized
ccacctcccctcgcccgctgcg

SEQ ID NO: 53741 - DNA, 22 bp, Artificial Sequence
  chemically synthesized
ccctcgcccgctgcggagctgt

SEQ ID NO: 53742 - DNA, 22 bp, Artificial Sequence
  chemically synthesized
gcccgctgcggagctgtaactt

SEQ ID NO: 53743 - DNA, 22 bp, Artificial Sequence
  chemically synthesized
cggagctgtaacttggaggctc

SEQ ID NO: 53744 - DNA, 22 bp, Artificial Sequence
  chemically synthesized
taacttggaggctcagctctca

SEQ ID NO: 53745 - DNA, 22 bp, Artificial Sequence
  chemically synthesized
ggaggctcagctctcaacttcg

SEQ ID NO: 53746 - DNA, 22 bp, Artificial Sequence
  chemically synthesized
gaggctcagctctcaacttcgg

SEQ ID NO: 53747 - DNA, 22 bp, Artificial Sequence
  chemically synthesized
agctctcaacttcgggtgattt

SEQ ID NO: 53748 - DNA, 22 bp, Artificial Sequence
  chemically synthesized
tcaacttcgggtgatttttctt

SEQ ID NO: 53749 - DNA, 22 bp, Artificial Sequence
  chemically synthesized
aacttcgggtgatttttctttg

SEQ ID NO: 53750 - DNA, 22 bp, Artificial Sequence
  chemically synthesized
cgggtgatttttctttgctgtc

SEQ ID NO: 53751 - DNA, 22 bp, Artificial Sequence
  chemically synthesized
gggtgatttttctttgctgtcc

SEQ ID NO: 53752 - DNA, 22 bp, Artificial Sequence
  chemically synthesized
ttctttgctgtcctctcctcgg

SEQ ID NO: 53753 - DNA, 22 bp, Artificial Sequence
  chemically synthesized
tctttgctgtcctctcctcggg

SEQ ID NO: 53754 - DNA, 22 bp, Artificial Sequence
  chemically synthesized
ctttgctgtcctctcctcgggc

SEQ ID NO: 53755 - DNA, 22 bp, Artificial Sequence
  chemically synthesized
tttgctgtcctctcctcgggca

SEQ ID NO: 53756 - DNA, 22 bp, Artificial Sequence
  chemically synthesized
tgctgtcctctcctcgggcaaa

SEQ ID NO: 53757 - DNA, 22 bp, Artificial Sequence
  chemically synthesized
gctgtcctctcctcgggcaaag

SEQ ID NO: 53758 - DNA, 22 bp, Artificial Sequence
  chemically synthesized
ctgtcctctcctcgggcaaagt

SEQ ID NO: 53759 - DNA, 22 bp, Artificial Sequence
  chemically synthesized
tcctctcctcgggcaaagtttc

SEQ ID NO: 53760 - DNA, 22 bp, Artificial Sequence
  chemically synthesized
tcctcgggcaaagtttcccgag

SEQ ID NO: 53761 - DNA, 22 bp, Artificial Sequence
  chemically synthesized
ctcgggcaaagtttcccgagcg

SEQ ID NO: 53762 - DNA, 22 bp, Artificial Sequence
  chemically synthesized
gggcaaagtttcccgagcgcag

SEQ ID NO: 53763 - DNA, 22 bp, Artificial Sequence
  chemically synthesized
cccgagcgcagccgcgggctcg

SEQ ID NO: 53764 - DNA, 22 bp, Artificial Sequence
  chemically synthesized
ccgagcgcagccgcgggctcgg

SEQ ID NO: 53765 - DNA, 22 bp, Artificial Sequence
  chemically synthesized
ggggcttttacttcggcccctg

SEQ ID NO: 53766 - DNA, 22 bp, Artificial Sequence
  chemically synthesized
ttacttcggcccctggcgtcca

SEQ ID NO: 53767 - DNA, 22 bp, Artificial Sequence
  chemically synthesized
tacttcggcccctggcgtccac

SEQ ID NO: 53768 - DNA, 22 bp, Artificial Sequence
  chemically synthesized
acttcggcccctggcgtccaca

SEQ ID NO: 53769 - DNA, 22 bp, Artificial Sequence
  chemically synthesized
cttcggcccctggcgtccacac

SEQ ID NO: 53770 - DNA, 22 bp, Artificial Sequence
  chemically synthesized
cggcccctggcgtccacacgcg

SEQ ID NO: 53771 - DNA, 22 bp, Artificial Sequence
  chemically synthesized
ggcccctggcgtccacacgcgg

SEQ ID NO: 53772 - DNA, 22 bp, Artificial Sequence
  chemically synthesized
gcgtccacacgcggggagcgag

SEQ ID NO: 53773 - DNA, 22 bp, Artificial Sequence
  chemically synthesized
tacctggcttccctccgcccgc

SEQ ID NO: 53774 - DNA, 22 bp, Artificial Sequence
  chemically synthesized
cctggcttccctccgcccgcgc

SEQ ID NO: 53775 - DNA, 22 bp, Artificial Sequence
  chemically synthesized
gcttccctccgcccgcgcttcc

SEQ ID NO: 53776 - DNA, 22 bp, Artificial Sequence
  chemically synthesized
ccctccgcccgcgcttccccag

SEQ ID NO: 53777 - DNA, 22 bp, Artificial Sequence
  chemically synthesized
cctccgcccgcgcttccccagc

SEQ ID NO: 53778 - DNA, 22 bp, Artificial Sequence
  chemically synthesized
cgcccgcgcttccccagcccgg

SEQ ID NO: 53779 - DNA, 22 bp, Artificial Sequence
  chemically synthesized
ccccagcccggggctgcagcct

SEQ ID NO: 53780 - DNA, 22 bp, Artificial Sequence
  chemically synthesized
cccagcccggggctgcagcctc

SEQ ID NO: 53781 - DNA, 22 bp, Artificial Sequence
  chemically synthesized
cagcctcccggtgcactctcgc

SEQ ID NO: 53782 - DNA, 22 bp, Artificial Sequence
  chemically synthesized
ccggtgcactctcgctctattt

SEQ ID NO: 53783 - DNA, 22 bp, Artificial Sequence
  chemically synthesized
tcgctctatttttttctttttt

SEQ ID NO: 53784 - DNA, 22 bp, Artificial Sequence
  chemically synthesized
gctctatttttttcttttttga

SEQ ID NO: 53785 - DNA, 22 bp, Artificial Sequence
  chemically synthesized
tatttttttcttttttgaataa

SEQ ID NO: 53786 - DNA, 22 bp, Artificial Sequence
  chemically synthesized
tttttttcttttttgaataatc

SEQ ID NO: 53787 - DNA, 22 bp, Artificial Sequence
  chemically synthesized
ttttcttttttgaataatcttt

SEQ ID NO: 53788 - DNA, 22 bp, Artificial Sequence
  chemically synthesized
tttcttttttgaataatctttc

SEQ ID NO: 53789 - DNA, 22 bp, Artificial Sequence
  chemically synthesized
ttcttttttgaataatctttca

SEQ ID NO: 53790 - DNA, 22 bp, Artificial Sequence
  chemically synthesized
tcttttttgaataatctttcat

SEQ ID NO: 53791 - DNA, 22 bp, Artificial Sequence
  chemically synthesized
cttttttgaataatctttcatt

SEQ ID NO: 53792 - DNA, 22 bp, Artificial Sequence
  chemically synthesized
ttttttgaataatctttcattt

SEQ ID NO: 53793 - DNA, 22 bp, Artificial Sequence
  chemically synthesized
ttttgaataatctttcatttta

SEQ ID NO: 53794 - DNA, 22 bp, Artificial Sequence
  chemically synthesized
tttgaataatctttcattttag

SEQ ID NO: 53795 - DNA, 22 bp, Artificial Sequence
  chemically synthesized
ttgaataatctttcattttaga

SEQ ID NO: 53796 - DNA, 22 bp, Artificial Sequence
  chemically synthesized
tgaataatctttcattttagag

SEQ ID NO: 53797 - DNA, 22 bp, Artificial Sequence
  chemically synthesized
gaataatctttcattttagagt

SEQ ID NO: 53798 - DNA, 22 bp, Artificial Sequence
  chemically synthesized
aataatctttcattttagagtc

SEQ ID NO: 53799 - DNA, 22 bp, Artificial Sequence
  chemically synthesized
tcattttagagtccgcgtgtgt

SEQ ID NO: 53800 - DNA, 22 bp, Artificial Sequence
  chemically synthesized
cattttagagtccgcgtgtgtg

SEQ ID NO: 53801 - DNA, 22 bp, Artificial Sequence
  chemically synthesized
attttagagtccgcgtgtgtgg

SEQ ID NO: 53802 - DNA, 22 bp, Artificial Sequence
  chemically synthesized
tagagtccgcgtgtgtgggggg

SEQ ID NO: 53803 - DNA, 22 bp, Artificial Sequence
  chemically synthesized
agagtccgcgtgtgtggggggg

SEQ ID NO: 53804 - DNA, 22 bp, Artificial Sequence
  chemically synthesized
gagtccgcgtgtgtggggggga

SEQ ID NO: 53805 - DNA, 22 bp, Artificial Sequence
  chemically synthesized
gctcccccccaccctttcctcc

SEQ ID NO: 53806 - DNA, 22 bp, Artificial Sequence
  chemically synthesized
ctcccccccaccctttcctccc

SEQ ID NO: 53807 - DNA, 22 bp, Artificial Sequence
  chemically synthesized
ccccccaccctttcctcccacc

SEQ ID NO: 53808 - DNA, 22 bp, Artificial Sequence
  chemically synthesized
tcctcccacccctgccacccct

SEQ ID NO: 53809 - DNA, 22 bp, Artificial Sequence
  chemically synthesized
cctcccacccctgccacccctt

SEQ ID NO: 53810 - DNA, 22 bp, Artificial Sequence
  chemically synthesized
ctcccacccctgccaccccttt

SEQ ID NO: 53811 - DNA, 22 bp, Artificial Sequence
  chemically synthesized
ccacccctgccacccctttctt

SEQ ID NO: 53812 - DNA, 22 bp, Artificial Sequence
  chemically synthesized
ccacccctttcttctctcccgg

SEQ ID NO: 53813 - DNA, 22 bp, Artificial Sequence
  chemically synthesized
tcttctctcccggccacgccac

SEQ ID NO: 53814 - DNA, 22 bp, Artificial Sequence
  chemically synthesized
cttctctcccggccacgccacc

SEQ ID NO: 53815 - DNA, 22 bp, Artificial Sequence
  chemically synthesized
ttctctcccggccacgccaccg

SEQ ID NO: 53816 - DNA, 22 bp, Artificial Sequence
  chemically synthesized
ctctcccggccacgccaccgcc

SEQ ID NO: 53817 - DNA, 22 bp, Artificial Sequence
  chemically synthesized
tctcccggccacgccaccgccg

SEQ ID NO: 53818 - DNA, 22 bp, Artificial Sequence
  chemically synthesized
tcccggccacgccaccgccgcg

SEQ ID NO: 53819 - DNA, 22 bp, Artificial Sequence
  chemically synthesized
ccggccacgccaccgccgcggc

SEQ ID NO: 53820 - DNA, 22 bp, Artificial Sequence
  chemically synthesized
gctgcggccactggtgagcccg

SEQ ID NO: 53821 - DNA, 22 bp, Artificial Sequence
  chemically synthesized
cggccactggtgagcccgcggc

SEQ ID NO: 53822 - DNA, 22 bp, Artificial Sequence
  chemically synthesized
gtgagcccgcggccccagcgcc

SEQ ID NO: 53823 - DNA, 22 bp, Artificial Sequence
  chemically synthesized
ccctcggcccgcccctcccccg

SEQ ID NO: 53824 - DNA, 22 bp, Artificial Sequence
  chemically synthesized
ggcccgcccctcccccgggggc

SEQ ID NO: 53825 - DNA, 22 bp, Artificial Sequence
  chemically synthesized
ccccgggggccgcgtctggcgt

SEQ ID NO: 53826 - DNA, 22 bp, Artificial Sequence
  chemically synthesized
gcgtccgcggagccccccgccc

SEQ ID NO: 53827 - DNA, 22 bp, Artificial Sequence
  chemically synthesized
cccctccccgcactggccattg

SEQ ID NO: 53828 - DNA, 22 bp, Artificial Sequence
  chemically synthesized
cccgcactggccattggcttgt

SEQ ID NO: 53829 - DNA, 22 bp, Artificial Sequence
  chemically synthesized
gccattggcttgtcctggtctc

SEQ ID NO: 53830 - DNA, 22 bp, Artificial Sequence
  chemically synthesized
gcttgtcctggtctctttttca

SEQ ID NO: 53831 - DNA, 22 bp, Artificial Sequence
  chemically synthesized
gtcctggtctctttttcatgtc

SEQ ID NO: 53832 - DNA, 22 bp, Artificial Sequence
  chemically synthesized
tcctggtctctttttcatgtcc

SEQ ID NO: 53833 - DNA, 22 bp, Artificial Sequence
  chemically synthesized
gtctctttttcatgtccagccc

SEQ ID NO: 53834 - DNA, 22 bp, Artificial Sequence
  chemically synthesized
tttttcatgtccagcccctgat

SEQ ID NO: 53835 - DNA, 22 bp, Artificial Sequence
  chemically synthesized
tttcatgtccagcccctgatgt

SEQ ID NO: 53836 - DNA, 22 bp, Artificial Sequence
  chemically synthesized
ttcatgtccagcccctgatgtg

SEQ ID NO: 53837 - DNA, 22 bp, Artificial Sequence
  chemically synthesized
tcatgtccagcccctgatgtgt

SEQ ID NO: 53838 - DNA, 22 bp, Artificial Sequence
  chemically synthesized
catgtccagcccctgatgtgtg

SEQ ID NO: 53839 - DNA, 22 bp, Artificial Sequence
  chemically synthesized
atgtccagcccctgatgtgtgt

SEQ ID NO: 53840 - DNA, 22 bp, Artificial Sequence
  chemically synthesized
atgtgtgtccattggtgtgagc

SEQ ID NO: 53841 - DNA, 22 bp, Artificial Sequence
  chemically synthesized
gtgtgagcttccccttccctcc

SEQ ID NO: 53842 - DNA, 22 bp, Artificial Sequence
  chemically synthesized
ccccttccctcctccccttctc

SEQ ID NO: 53843 - DNA, 22 bp, Artificial Sequence
  chemically synthesized
cccttccctcctccccttctct

SEQ ID NO: 53844 - DNA, 22 bp, Artificial Sequence
  chemically synthesized
ccctcctccccttctctcctgc

SEQ ID NO: 53845 - DNA, 22 bp, Artificial Sequence
  chemically synthesized
cctcctccccttctctcctgct

SEQ ID NO: 53846 - DNA, 22 bp, Artificial Sequence
  chemically synthesized
ctccccttctctcctgctcgcc

SEQ ID NO: 53847 - DNA, 22 bp, Artificial Sequence
  chemically synthesized
cccttctctcctgctcgccctg

SEQ ID NO: 53848 - DNA, 22 bp, Artificial Sequence
  chemically synthesized
ctctcctgctcgccctgcccat

SEQ ID NO: 53849 - DNA, 22 bp, Artificial Sequence
  chemically synthesized
tctcctgctcgccctgcccatg

SEQ ID NO: 53850 - DNA, 22 bp, Artificial Sequence
  chemically synthesized
tcctgctcgccctgcccatgtt

SEQ ID NO: 53851 - DNA, 22 bp, Artificial Sequence
  chemically synthesized
ctgctcgccctgcccatgtttt

SEQ ID NO: 53852 - DNA, 22 bp, Artificial Sequence
  chemically synthesized
ctcgccctgcccatgttttgtg

SEQ ID NO: 53853 - DNA, 22 bp, Artificial Sequence
  chemically synthesized
gccctgcccatgttttgtgtgt

SEQ ID NO: 53854 - DNA, 22 bp, Artificial Sequence
  chemically synthesized
cccatgttttgtgtgtctctgt

SEQ ID NO: 53855 - DNA, 22 bp, Artificial Sequence
  chemically synthesized
tgtgtgtctctgtccatccaga

SEQ ID NO: 53856 - DNA, 22 bp, Artificial Sequence
  chemically synthesized
gtgtgtctctgtccatccagac

SEQ ID NO: 53857 - DNA, 22 bp, Artificial Sequence
  chemically synthesized
tgtgtctctgtccatccagact

SEQ ID NO: 53858 - DNA, 22 bp, Artificial Sequence
  chemically synthesized
tgtccatccagactcctgacgt

SEQ ID NO: 53859 - DNA, 22 bp, Artificial Sequence
  chemically synthesized
tccatccagactcctgacgttc

SEQ ID NO: 53860 - DNA, 22 bp, Artificial Sequence
  chemically synthesized
ctgacgttcaagttcgcaggga

SEQ ID NO: 53861 - DNA, 22 bp, Artificial Sequence
  chemically synthesized
acgttcaagttcgcagggacgt

SEQ ID NO: 53862 - DNA, 22 bp, Artificial Sequence
  chemically synthesized
aagttcgcagggacgtcacgtc

SEQ ID NO: 53863 - DNA, 22 bp, Artificial Sequence
  chemically synthesized
gcagggacgtcacgtccgcact

SEQ ID NO: 53864 - DNA, 22 bp, Artificial Sequence
  chemically synthesized
gaacttgcagctcaggggggct

SEQ ID NO: 53865 - DNA, 22 bp, Artificial Sequence
  chemically synthesized
aacttgcagctcaggggggctt

SEQ ID NO: 53866 - DNA, 22 bp, Artificial Sequence
  chemically synthesized
gcagctcaggggggcttttgcc

SEQ ID NO: 53867 - DNA, 22 bp, Artificial Sequence
  chemically synthesized
cagctcaggggggcttttgcca

SEQ ID NO: 53868 - DNA, 22 bp, Artificial Sequence
  chemically synthesized
aggggggcttttgccatttttt

SEQ ID NO: 53869 - DNA, 22 bp, Artificial Sequence
  chemically synthesized
ttgccatttttttcatctctct

SEQ ID NO: 53870 - DNA, 22 bp, Artificial Sequence
  chemically synthesized
tgccatttttttcatctctctc

SEQ ID NO: 53871 - DNA, 22 bp, Artificial Sequence
  chemically synthesized
gccatttttttcatctctctct

SEQ ID NO: 53872 - DNA, 22 bp, Artificial Sequence
  chemically synthesized
ccatttttttcatctctctctc

SEQ ID NO: 53873 - DNA, 22 bp, Artificial Sequence
  chemically synthesized
ttttcatctctctctctctctc

SEQ ID NO: 53874 - DNA, 22 bp, Artificial Sequence
  chemically synthesized
tttcatctctctctctctctct

SEQ ID NO: 53875 - DNA, 22 bp, Artificial Sequence
  chemically synthesized
ttcatctctctctctctctctc

SEQ ID NO: 53876 - DNA, 22 bp, Artificial Sequence
  chemically synthesized
tcatctctctctctctctctcc

SEQ ID NO: 53877 - DNA, 22 bp, Artificial Sequence
  chemically synthesized
catctctctctctctctctccc

SEQ ID NO: 53878 - DNA, 22 bp, Artificial Sequence
  chemically synthesized
atctctctctctctctctccct

SEQ ID NO: 53879 - DNA, 22 bp, Artificial Sequence
  chemically synthesized
tctctctctctctccctctatc

SEQ ID NO: 53880 - DNA, 22 bp, Artificial Sequence
  chemically synthesized
tctctctctctccctctatctc

SEQ ID NO: 53881 - DNA, 22 bp, Artificial Sequence
  chemically synthesized
tctctctctccctctatctctc

SEQ ID NO: 53882 - DNA, 22 bp, Artificial Sequence
  chemically synthesized
tctctctccctctatctctctt

SEQ ID NO: 53883 - DNA, 22 bp, Artificial Sequence
  chemically synthesized
tctctccctctatctctcttct

SEQ ID NO: 53884 - DNA, 22 bp, Artificial Sequence
  chemically synthesized
tctccctctatctctcttctct

SEQ ID NO: 53885 - DNA, 22 bp, Artificial Sequence
  chemically synthesized
tccctctatctctcttctctct

SEQ ID NO: 53886 - DNA, 22 bp, Artificial Sequence
  chemically synthesized
cctctatctctcttctctctct

SEQ ID NO: 53887 - DNA, 22 bp, Artificial Sequence
  chemically synthesized
tatctctcttctctctctctcc

SEQ ID NO: 53888 - DNA, 22 bp, Artificial Sequence
  chemically synthesized
tctctcttctctctctctccct

SEQ ID NO: 53889 - DNA, 22 bp, Artificial Sequence
  chemically synthesized
tcttctctctctctccctcttt

SEQ ID NO: 53890 - DNA, 22 bp, Artificial Sequence
  chemically synthesized
ttctctctctctccctcttttt

SEQ ID NO: 53891 - DNA, 22 bp, Artificial Sequence
  chemically synthesized
ctctctctctccctcttttttt

SEQ ID NO: 53892 - DNA, 22 bp, Artificial Sequence
  chemically synthesized
tctctctctccctctttttttt

SEQ ID NO: 53893 - DNA, 22 bp, Artificial Sequence
  chemically synthesized
tctctctccctctttttttttt

SEQ ID NO: 53894 - DNA, 22 bp, Artificial Sequence
  chemically synthesized
tctctccctctttttttttttt

SEQ ID NO: 53895 - DNA, 22 bp, Artificial Sequence
  chemically synthesized
tctccctctttttttttttttt

SEQ ID NO: 53896 - DNA, 22 bp, Artificial Sequence
  chemically synthesized
tccctctttttttttttttttt

SEQ ID NO: 53897 - DNA, 22 bp, Artificial Sequence
  chemically synthesized
cctctttttttttttttttttt

SEQ ID NO: 53898 - DNA, 22 bp, Artificial Sequence
  chemically synthesized
tttttttttttttttttttttt

SEQ ID NO: 53899 - DNA, 22 bp, Artificial Sequence
  chemically synthesized
tttttttttttttttttttttt

SEQ ID NO: 53900 - DNA, 22 bp, Artificial Sequence
  chemically synthesized
tttttttttttttttttttttt

SEQ ID NO: 53901 - DNA, 22 bp, Artificial Sequence
  chemically synthesized
tttttttttttttttttttttt

SEQ ID NO: 53902 - DNA, 22 bp, Artificial Sequence
  chemically synthesized
tttttttttttttttttttttt

SEQ ID NO: 53903 - DNA, 22 bp, Artificial Sequence
  chemically synthesized
tttttttttttttttttttttt

SEQ ID NO: 53904 - DNA, 22 bp, Artificial Sequence
  chemically synthesized
tttttttttttttttttttttt

SEQ ID NO: 53905 - DNA, 22 bp, Artificial Sequence
  chemically synthesized
tttttttttttttttttttttg

SEQ ID NO: 53906 - DNA, 22 bp, Artificial Sequence
  chemically synthesized
ttttttttttttttttttttgc

SEQ ID NO: 53907 - DNA, 22 bp, Artificial Sequence
  chemically synthesized
tttttttttttttttttttgct

SEQ ID NO: 53908 - DNA, 22 bp, Artificial Sequence
  chemically synthesized
ttttttttttttttttttgctt

SEQ ID NO: 53909 - DNA, 22 bp, Artificial Sequence
  chemically synthesized
tttttttttttttttttgctta

SEQ ID NO: 53910 - DNA, 22 bp, Artificial Sequence
  chemically synthesized
ttttttttttttttttgcttaa

SEQ ID NO: 53911 - DNA, 22 bp, Artificial Sequence
  chemically synthesized
tttttttttttttttgcttaaa

SEQ ID NO: 53912 - DNA, 22 bp, Artificial Sequence
  chemically synthesized
ttttttttttttttgcttaaaa

SEQ ID NO: 53913 - DNA, 22 bp, Artificial Sequence
  chemically synthesized
tttttttttttttgcttaaaaa

SEQ ID NO: 53914 - DNA, 22 bp, Artificial Sequence
  chemically synthesized
ttttttttttttgcttaaaaaa

SEQ ID NO: 53915 - DNA, 22 bp, Artificial Sequence
  chemically synthesized
tttttttttttgcttaaaaaaa

SEQ ID NO: 53916 - DNA, 22 bp, Artificial Sequence
  chemically synthesized
ttttttttttgcttaaaaaaaa

SEQ ID NO: 53917 - DNA, 22 bp, Artificial Sequence
  chemically synthesized
tttttttttgcttaaaaaaaag

SEQ ID NO: 53918 - DNA, 22 bp, Artificial Sequence
  chemically synthesized
ttttttttgcttaaaaaaaagc

SEQ ID NO: 53919 - DNA, 22 bp, Artificial Sequence
  chemically synthesized
tttttttgcttaaaaaaaagcc

SEQ ID NO: 53920 - DNA, 22 bp, Artificial Sequence
  chemically synthesized
ttttttgcttaaaaaaaagcca

SEQ ID NO: 53921 - DNA, 22 bp, Artificial Sequence
  chemically synthesized
tttttgcttaaaaaaaagccat

SEQ ID NO: 53922 - DNA, 22 bp, Artificial Sequence
  chemically synthesized
ttttgcttaaaaaaaagccatg

SEQ ID NO: 53923 - DNA, 22 bp, Artificial Sequence
  chemically synthesized
tttgcttaaaaaaaagccatga

SEQ ID NO: 53924 - DNA, 22 bp, Artificial Sequence
  chemically synthesized
ttgcttaaaaaaaagccatgac

SEQ ID NO: 53925 - DNA, 22 bp, Artificial Sequence
  chemically synthesized
tgcttaaaaaaaagccatgacg

SEQ ID NO: 53926 - DNA, 22 bp, Artificial Sequence
  chemically synthesized
gcttaaaaaaaagccatgacgg

SEQ ID NO: 53927 - DNA, 22 bp, Artificial Sequence
  chemically synthesized
cttaaaaaaaagccatgacggc

SEQ ID NO: 53928 - DNA, 22 bp, Artificial Sequence
  chemically synthesized
aaaaaaaagccatgacggctct

SEQ ID NO: 53929 - DNA, 22 bp, Artificial Sequence
  chemically synthesized
aaaaaaagccatgacggctctc

SEQ ID NO: 53930 - DNA, 22 bp, Artificial Sequence
  chemically synthesized
tcccacaattcatcttccctgc

SEQ ID NO: 53931 - DNA, 22 bp, Artificial Sequence
  chemically synthesized
ccacaattcatcttccctgcgc

SEQ ID NO: 53932 - DNA, 22 bp, Artificial Sequence
  chemically synthesized
atcttccctgcgccatctttgt

SEQ ID NO: 53933 - DNA, 22 bp, Artificial Sequence
  chemically synthesized
ccctgcgccatctttgtattat

SEQ ID NO: 53934 - DNA, 22 bp, Artificial Sequence
  chemically synthesized
cctgcgccatctttgtattatt

SEQ ID NO: 53935 - DNA, 22 bp, Artificial Sequence
  chemically synthesized
cgccatctttgtattatttcta

SEQ ID NO: 53936 - DNA, 22 bp, Artificial Sequence
  chemically synthesized
tgtattatttctaatttatttt

SEQ ID NO: 53937 - DNA, 22 bp, Artificial Sequence
  chemically synthesized
gtattatttctaatttattttg

SEQ ID NO: 53938 - DNA, 22 bp, Artificial Sequence
  chemically synthesized
tattatttctaatttattttgg

SEQ ID NO: 53939 - DNA, 22 bp, Artificial Sequence
  chemically synthesized
tttctaatttattttggatgtc

SEQ ID NO: 53940 - DNA, 22 bp, Artificial Sequence
  chemically synthesized
ctaatttattttggatgtcaaa

SEQ ID NO: 53941 - DNA, 22 bp, Artificial Sequence
  chemically synthesized
taatttattttggatgtcaaaa

SEQ ID NO: 53942 - DNA, 22 bp, Artificial Sequence
  chemically synthesized
atttattttggatgtcaaaagg

SEQ ID NO: 53943 - DNA, 22 bp, Artificial Sequence
  chemically synthesized
attttggatgtcaaaaggcact

SEQ ID NO: 53944 - DNA, 22 bp, Artificial Sequence
  chemically synthesized
ttttggatgtcaaaaggcactg

SEQ ID NO: 53945 - DNA, 22 bp, Artificial Sequence
  chemically synthesized
tggatgtcaaaaggcactgatg

SEQ ID NO: 53946 - DNA, 22 bp, Artificial Sequence
  chemically synthesized
ggatgtcaaaaggcactgatga

SEQ ID NO: 53947 - DNA, 22 bp, Artificial Sequence
  chemically synthesized
gatgtcaaaaggcactgatgaa

SEQ ID NO: 53948 - DNA, 22 bp, Artificial Sequence
  chemically synthesized
atgaagatattttctctggagt

SEQ ID NO: 53949 - DNA, 22 bp, Artificial Sequence
  chemically synthesized
tctctggagtctccttctttct

SEQ ID NO: 53950 - DNA, 22 bp, Artificial Sequence
  chemically synthesized
ctctggagtctccttctttcta

SEQ ID NO: 53951 - DNA, 22 bp, Artificial Sequence
  chemically synthesized
tctggagtctccttctttctaa

SEQ ID NO: 53952 - DNA, 22 bp, Artificial Sequence
  chemically synthesized
tggagtctccttctttctaacc

SEQ ID NO: 53953 - DNA, 22 bp, Artificial Sequence
  chemically synthesized
gagtctccttctttctaacccg

SEQ ID NO: 53954 - DNA, 22 bp, Artificial Sequence
  chemically synthesized
cttctttctaacccggctctcc

SEQ ID NO: 53955 - DNA, 22 bp, Artificial Sequence
  chemically synthesized
ctttctaacccggctctcccga

SEQ ID NO: 53956 - DNA, 22 bp, Artificial Sequence
  chemically synthesized
tttctaacccggctctcccgat

SEQ ID NO: 53957 - DNA, 22 bp, Artificial Sequence
  chemically synthesized
tctaacccggctctcccgatgt

SEQ ID NO: 53958 - DNA, 22 bp, Artificial Sequence
  chemically synthesized
ctaacccggctctcccgatgtg

SEQ ID NO: 53959 - DNA, 22 bp, Artificial Sequence
  chemically synthesized
taacccggctctcccgatgtga

SEQ ID NO: 53960 - DNA, 22 bp, Artificial Sequence
  chemically synthesized
acccggctctcccgatgtgaac

SEQ ID NO: 53961 - DNA, 22 bp, Artificial Sequence
  chemically synthesized
tcccgatgtgaaccgagccgtc

SEQ ID NO: 53962 - DNA, 22 bp, Artificial Sequence
  chemically synthesized
ccgatgtgaaccgagccgtcgt

SEQ ID NO: 53963 - DNA, 22 bp, Artificial Sequence
  chemically synthesized
gccgcaagcaaggcaaacccca

SEQ ID NO: 53964 - DNA, 22 bp, Artificial Sequence
  chemically synthesized
aagcaaacgggaattctcgcgt

SEQ ID NO: 53965 - DNA, 22 bp, Artificial Sequence
  chemically synthesized
agcaaacgggaattctcgcgta

SEQ ID NO: 53966 - DNA, 22 bp, Artificial Sequence
  chemically synthesized
tcgcgtaagtaacccaataata

SEQ ID NO: 53967 - DNA, 22 bp, Artificial Sequence
  chemically synthesized
gcgtaagtaacccaataatagt

SEQ ID NO: 53968 - DNA, 22 bp, Artificial Sequence
  chemically synthesized
ttaataatcacgagagcgcgca

SEQ ID NO: 53969 - DNA, 22 bp, Artificial Sequence
  chemically synthesized
ataatcacgagagcgcgcagga

SEQ ID NO: 53970 - DNA, 22 bp, Artificial Sequence
  chemically synthesized
gaagcaaaagcgagggggagag

SEQ ID NO: 53971 - DNA, 22 bp, Artificial Sequence
  chemically synthesized
ttaaatttttcacgagaaaaac

SEQ ID NO: 53972 - DNA, 22 bp, Artificial Sequence
  chemically synthesized
taaatttttcacgagaaaaacc

SEQ ID NO: 53973 - DNA, 22 bp, Artificial Sequence
  chemically synthesized
aaatttttcacgagaaaaacct

SEQ ID NO: 53974 - DNA, 22 bp, Artificial Sequence
  chemically synthesized
aatttttcacgagaaaaacctc

SEQ ID NO: 53975 - DNA, 22 bp, Artificial Sequence
  chemically synthesized
ttcacgagaaaaacctccgaga

SEQ ID NO: 53976 - DNA, 22 bp, Artificial Sequence
  chemically synthesized
tcacgagaaaaacctccgagag

SEQ ID NO: 53977 - DNA, 22 bp, Artificial Sequence
  chemically synthesized
cacgagaaaaacctccgagagt

SEQ ID NO: 53978 - DNA, 22 bp, Artificial Sequence
  chemically synthesized
acgagaaaaacctccgagagtc

SEQ ID NO: 53979 - DNA, 22 bp, Artificial Sequence
  chemically synthesized
cgagagtcgaggtaaaagagat

SEQ ID NO: 53980 - DNA, 22 bp, Artificial Sequence
  chemically synthesized
atcccatctggaaccattgccg

SEQ ID NO: 53981 - DNA, 22 bp, Artificial Sequence
  chemically synthesized
gaaccattgccgtgtatgcact

SEQ ID NO: 53982 - DNA, 22 bp, Artificial Sequence
  chemically synthesized
ccgtgtatgcacttttgagaca

SEQ ID NO: 53983 - DNA, 22 bp, Artificial Sequence
  chemically synthesized
ttgagacagcacgcacctttta

SEQ ID NO: 53984 - DNA, 22 bp, Artificial Sequence
  chemically synthesized
tgagacagcacgcaccttttaa

SEQ ID NO: 53985 - DNA, 22 bp, Artificial Sequence
  chemically synthesized
gagacagcacgcaccttttaat

SEQ ID NO: 53986 - DNA, 22 bp, Artificial Sequence
  chemically synthesized
agacagcacgcaccttttaatt

SEQ ID NO: 53987 - DNA, 22 bp, Artificial Sequence
  chemically synthesized
ttaattttatttaattttacaa

SEQ ID NO: 53988 - DNA, 22 bp, Artificial Sequence
  chemically synthesized
taattttatttaattttacaaa

SEQ ID NO: 53989 - DNA, 22 bp, Artificial Sequence
  chemically synthesized
aattttatttaattttacaaaa

SEQ ID NO: 53990 - DNA, 22 bp, Artificial Sequence
  chemically synthesized
attttatttaattttacaaaaa

SEQ ID NO: 53991 - DNA, 22 bp, Artificial Sequence
  chemically synthesized
tatttaattttacaaaaatttg

SEQ ID NO: 53992 - DNA, 22 bp, Artificial Sequence
  chemically synthesized
atttaattttacaaaaatttga

SEQ ID NO: 53993 - DNA, 22 bp, Artificial Sequence
  chemically synthesized
tttaattttacaaaaatttgac

SEQ ID NO: 53994 - DNA, 22 bp, Artificial Sequence
  chemically synthesized
aattttacaaaaatttgactcc

SEQ ID NO: 53995 - DNA, 22 bp, Artificial Sequence
  chemically synthesized
attttacaaaaatttgactcct

SEQ ID NO: 53996 - DNA, 22 bp, Artificial Sequence
  chemically synthesized
tacaaaaatttgactcctcctc

SEQ ID NO: 53997 - DNA, 22 bp, Artificial Sequence
  chemically synthesized
acaaaaatttgactcctcctct

SEQ ID NO: 53998 - DNA, 22 bp, Artificial Sequence
  chemically synthesized
caaaaatttgactcctcctctt

SEQ ID NO: 53999 - DNA, 22 bp, Artificial Sequence
  chemically synthesized
gactcctcctctttcctccttt

SEQ ID NO: 54000 - DNA, 22 bp, Artificial Sequence
  chemically synthesized
actcctcctctttcctcctttc

SEQ ID NO: 54001 - DNA, 22 bp, Artificial Sequence
  chemically synthesized
ctcctctttcctcctttccgcc

SEQ ID NO: 54002 - DNA, 22 bp, Artificial Sequence
  chemically synthesized
ctctttcctcctttccgccgct

SEQ ID NO: 54003 - DNA, 22 bp, Artificial Sequence
  chemically synthesized
tttcctcctttccgccgcttta

SEQ ID NO: 54004 - DNA, 22 bp, Artificial Sequence
  chemically synthesized
tcctcctttccgccgctttatt

SEQ ID NO: 54005 - DNA, 22 bp, Artificial Sequence
  chemically synthesized
cctcctttccgccgctttattt

SEQ ID NO: 54006 - DNA, 22 bp, Artificial Sequence
  chemically synthesized
ctcctttccgccgctttatttc

SEQ ID NO: 54007 - DNA, 22 bp, Artificial Sequence
  chemically synthesized
ctttccgccgctttatttctct

SEQ ID NO: 54008 - DNA, 22 bp, Artificial Sequence
  chemically synthesized
tccgccgctttatttctctttt

SEQ ID NO: 54009 - DNA, 22 bp, Artificial Sequence
  chemically synthesized
ccgccgctttatttctcttttc

SEQ ID NO: 54010 - DNA, 22 bp, Artificial Sequence
  chemically synthesized
cgccgctttatttctcttttcg

SEQ ID NO: 54011 - DNA, 22 bp, Artificial Sequence
  chemically synthesized
tatttctcttttcgaaaaggaa

SEQ ID NO: 54012 - DNA, 22 bp, Artificial Sequence
  chemically synthesized
atttctcttttcgaaaaggaat

SEQ ID NO: 54013 - DNA, 22 bp, Artificial Sequence
  chemically synthesized
tttctcttttcgaaaaggaatg

SEQ ID NO: 54014 - DNA, 22 bp, Artificial Sequence
  chemically synthesized
ctcttttcgaaaaggaatgcaa

SEQ ID NO: 54015 - DNA, 22 bp, Artificial Sequence
  chemically synthesized
tcttttcgaaaaggaatgcaat

SEQ ID NO: 54016 - DNA, 22 bp, Artificial Sequence
  chemically synthesized
ttttcgaaaaggaatgcaatga

SEQ ID NO: 54017 - DNA, 22 bp, Artificial Sequence
  chemically synthesized
ttcgaaaaggaatgcaatgatt

SEQ ID NO: 54018 - DNA, 22 bp, Artificial Sequence
  chemically synthesized
tcgaaaaggaatgcaatgattc

SEQ ID NO: 54019 - DNA, 22 bp, Artificial Sequence
  chemically synthesized
cgaaaaggaatgcaatgattcc

SEQ ID NO: 54020 - DNA, 22 bp, Artificial Sequence
  chemically synthesized
gaaaaggaatgcaatgattcca

SEQ ID NO: 54021 - DNA, 22 bp, Artificial Sequence
  chemically synthesized
cactccccccccgccccgccag

SEQ ID NO: 54022 - DNA, 22 bp, Artificial Sequence
  chemically synthesized
cccccccgccccgccagttttg

SEQ ID NO: 54023 - DNA, 22 bp, Artificial Sequence
  chemically synthesized
tgcaaaataatgaacaatgcta

SEQ ID NO: 54024 - DNA, 22 bp, Artificial Sequence
  chemically synthesized
gcaaaataatgaacaatgctaa

SEQ ID NO: 54025 - DNA, 22 bp, Artificial Sequence
  chemically synthesized
caaaataatgaacaatgctaag

SEQ ID NO: 54026 - DNA, 22 bp, Artificial Sequence
  chemically synthesized
aggttgcgaacaactcacatgc

SEQ ID NO: 54027 - DNA, 22 bp, Artificial Sequence
  chemically synthesized
cgaacaactcacatgcaaacct

SEQ ID NO: 54028 - DNA, 22 bp, Artificial Sequence
  chemically synthesized
acatgcaaacctgggggtggga

SEQ ID NO: 54029 - DNA, 22 bp, Artificial Sequence
  chemically synthesized
ggggtgggagctggtggggaaa

SEQ ID NO: 54030 - DNA, 22 bp, Artificial Sequence
  chemically synthesized
gtggggaaagggaggttgcttc

SEQ ID NO: 54031 - DNA, 22 bp, Artificial Sequence
  chemically synthesized
cttcccactcaccgtaagaaaa

SEQ ID NO: 54032 - DNA, 22 bp, Artificial Sequence
  chemically synthesized
cccactcaccgtaagaaaatgg

SEQ ID NO: 54033 - DNA, 22 bp, Artificial Sequence
  chemically synthesized
ccactcaccgtaagaaaatggg

SEQ ID NO: 54034 - DNA, 22 bp, Artificial Sequence
  chemically synthesized
accgtaagaaaatgggggggta

SEQ ID NO: 54035 - DNA, 22 bp, Artificial Sequence
  chemically synthesized
aaaaacgattcccggggagaaa

SEQ ID NO: 54036 - DNA, 22 bp, Artificial Sequence
  chemically synthesized
ccggggagaaaagaggtgagac

SEQ ID NO: 54037 - DNA, 22 bp, Artificial Sequence
  chemically synthesized
gcttttggacaccagcgcgctc

SEQ ID NO: 54038 - DNA, 22 bp, Artificial Sequence
  chemically synthesized
ttggacaccagcgcgctcacgg

SEQ ID NO: 54039 - DNA, 22 bp, Artificial Sequence
  chemically synthesized
tggacaccagcgcgctcacggt

SEQ ID NO: 54040 - DNA, 22 bp, Artificial Sequence
  chemically synthesized
ggacaccagcgcgctcacggtc

SEQ ID NO: 54041 - DNA, 22 bp, Artificial Sequence
  chemically synthesized
gacaccagcgcgctcacggtca

SEQ ID NO: 54042 - DNA, 22 bp, Artificial Sequence
  chemically synthesized
acggtcaagtgtgcagcgggag

SEQ ID NO: 54043 - DNA, 22 bp, Artificial Sequence
  chemically synthesized
tggaaaggggcccccggcgctc

SEQ ID NO: 54044 - DNA, 22 bp, Artificial Sequence
  chemically synthesized
ctgagtccgcggagtcgggaga

SEQ ID NO: 54045 - DNA, 22 bp, Artificial Sequence
  chemically synthesized
agtccgcggagtcgggagaggg

SEQ ID NO: 54046 - DNA, 22 bp, Artificial Sequence
  chemically synthesized
ccgccttttgttccggccagag

SEQ ID NO: 54047 - DNA, 22 bp, Artificial Sequence
  chemically synthesized
ttgttccggccagaggtgggtg

SEQ ID NO: 54048 - DNA, 22 bp, Artificial Sequence
  chemically synthesized
tgttccggccagaggtgggtgt

SEQ ID NO: 54049 - DNA, 22 bp, Artificial Sequence
  chemically synthesized
gttccggccagaggtgggtgtt

SEQ ID NO: 54050 - DNA, 22 bp, Artificial Sequence
  chemically synthesized
ttccggccagaggtgggtgttt

SEQ ID NO: 54051 - DNA, 22 bp, Artificial Sequence
  chemically synthesized
cggccagaggtgggtgtttgtc

SEQ ID NO: 54052 - DNA, 22 bp, Artificial Sequence
  chemically synthesized
gtcccgctgccttttgtgccgg

SEQ ID NO: 54053 - DNA, 22 bp, Artificial Sequence
  chemically synthesized
tcccgctgccttttgtgccggc

SEQ ID NO: 54054 - DNA, 22 bp, Artificial Sequence
  chemically synthesized
ccttttgtgccggctcctcgcg

SEQ ID NO: 54055 - DNA, 22 bp, Artificial Sequence
  chemically synthesized
ttgtgccggctcctcgcgcttg

SEQ ID NO: 54056 - DNA, 22 bp, Artificial Sequence
  chemically synthesized
tgtgccggctcctcgcgcttgc

SEQ ID NO: 54057 - DNA, 22 bp, Artificial Sequence
  chemically synthesized
gtgccggctcctcgcgcttgcc

SEQ ID NO: 54058 - DNA, 22 bp, Artificial Sequence
  chemically synthesized
tgccggctcctcgcgcttgccc

SEQ ID NO: 54059 - DNA, 22 bp, Artificial Sequence
  chemically synthesized
ctcgcgcttgccctcccgcgcc

SEQ ID NO: 54060 - DNA, 22 bp, Artificial Sequence
  chemically synthesized
gcgcttgccctcccgcgccgcc

SEQ ID NO: 54061 - DNA, 22 bp, Artificial Sequence
  chemically synthesized
gccctcccgcgccgccgccgcc

SEQ ID NO: 54062 - DNA, 22 bp, Artificial Sequence
  chemically synthesized
ccctcccgcgccgccgccgccg

SEQ ID NO: 54063 - DNA, 22 bp, Artificial Sequence
  chemically synthesized
ccgcgccgccgccgccgccgcc

SEQ ID NO: 54064 - DNA, 22 bp, Artificial Sequence
  chemically synthesized
gggccgggggaggaggcggccg

SEQ ID NO: 54065 - DNA, 22 bp, Artificial Sequence
  chemically synthesized
ctgcctcctgggttgccgctgc

SEQ ID NO: 54066 - DNA, 22 bp, Artificial Sequence
  chemically synthesized
cctcctgggttgccgctgccct

SEQ ID NO: 54067 - DNA, 22 bp, Artificial Sequence
  chemically synthesized
ctgggttgccgctgccctcccc

SEQ ID NO: 54068 - DNA, 22 bp, Artificial Sequence
  chemically synthesized
ggttgccgctgccctcccctcc

SEQ ID NO: 54069 - DNA, 22 bp, Artificial Sequence
  chemically synthesized
ccgctgccctcccctcccgacc

SEQ ID NO: 54070 - DNA, 22 bp, Artificial Sequence
  chemically synthesized
ccctcccctcccgaccgaacct

SEQ ID NO: 54071 - DNA, 22 bp, Artificial Sequence
  chemically synthesized
ccctcccgaccgaacctcagag

SEQ ID NO: 54072 - DNA, 22 bp, Artificial Sequence
  chemically synthesized
ccgaccgaacctcagaggcagc

SEQ ID NO: 54073 - DNA, 22 bp, Artificial Sequence
  chemically synthesized
agaggcagcaaggagaagactg

SEQ ID NO: 54074 - DNA, 22 bp, Artificial Sequence
  chemically synthesized
gcacataaataaataaatacat

SEQ ID NO: 54075 - DNA, 22 bp, Artificial Sequence
  chemically synthesized
cttgcccccaaaccgaagccaa

SEQ ID NO: 54076 - DNA, 22 bp, Artificial Sequence
  chemically synthesized
ttgcccccaaaccgaagccaaa

SEQ ID NO: 54077 - DNA, 22 bp, Artificial Sequence
  chemically synthesized
gcccccaaaccgaagccaaacg

SEQ ID NO: 54078 - DNA, 22 bp, Artificial Sequence
  chemically synthesized
cccccaaaccgaagccaaacgc

SEQ ID NO: 54079 - DNA, 22 bp, Artificial Sequence
  chemically synthesized
tgccaacccttttctgtgacgg

SEQ ID NO: 54080 - DNA, 22 bp, Artificial Sequence
  chemically synthesized
ccaacccttttctgtgacggcc

SEQ ID NO: 54081 - DNA, 22 bp, Artificial Sequence
  chemically synthesized
ttctgtgacggccttctctttg

SEQ ID NO: 54082 - DNA, 22 bp, Artificial Sequence
  chemically synthesized
tctgtgacggccttctctttga

SEQ ID NO: 54083 - DNA, 22 bp, Artificial Sequence
  chemically synthesized
ctgtgacggccttctctttgac

SEQ ID NO: 54084 - DNA, 22 bp, Artificial Sequence
  chemically synthesized
tgtgacggccttctctttgact

SEQ ID NO: 54085 - DNA, 22 bp, Artificial Sequence
  chemically synthesized
tgacggccttctctttgactcc

SEQ ID NO: 54086 - DNA, 22 bp, Artificial Sequence
  chemically synthesized
ctctttgactcccccaccagcc

SEQ ID NO: 54087 - DNA, 22 bp, Artificial Sequence
  chemically synthesized
tctttgactcccccaccagccc

SEQ ID NO: 54088 - DNA, 22 bp, Artificial Sequence
  chemically synthesized
tttgactcccccaccagccccc

SEQ ID NO: 54089 - DNA, 22 bp, Artificial Sequence
  chemically synthesized
tgactcccccaccagcccccct

SEQ ID NO: 54090 - DNA, 22 bp, Artificial Sequence
  chemically synthesized
gactcccccaccagcccccctg

SEQ ID NO: 54091 - DNA, 22 bp, Artificial Sequence
  chemically synthesized
actcccccaccagcccccctgc

SEQ ID NO: 54092 - DNA, 22 bp, Artificial Sequence
  chemically synthesized
ccccaccagcccccctgcaaaa

SEQ ID NO: 54093 - DNA, 22 bp, Artificial Sequence
  chemically synthesized
caaaaatctcacaatctctcat

SEQ ID NO: 54094 - DNA, 22 bp, Artificial Sequence
  chemically synthesized
acaatctctcatctagaaaaaa

SEQ ID NO: 54095 - DNA, 22 bp, Artificial Sequence
  chemically synthesized
tcatctagaaaaaaatttacaa

SEQ ID NO: 54096 - DNA, 22 bp, Artificial Sequence
  chemically synthesized
atctagaaaaaaatttacaatc

SEQ ID NO: 54097 - DNA, 22 bp, Artificial Sequence
  chemically synthesized
gaaaaaaatttacaatcaccct

SEQ ID NO: 54098 - DNA, 22 bp, Artificial Sequence
  chemically synthesized
acaatcaccctcttcccccaaa

SEQ ID NO: 54099 - DNA, 22 bp, Artificial Sequence
  chemically synthesized
caatcaccctcttcccccaaac

SEQ ID NO: 54100 - DNA, 22 bp, Artificial Sequence
  chemically synthesized
ttcccccaaaccccttcagttg

SEQ ID NO: 54101 - DNA, 22 bp, Artificial Sequence
  chemically synthesized
cccccaaaccccttcagttgca

SEQ ID NO: 54102 - DNA, 22 bp, Artificial Sequence
  chemically synthesized
ccccaaaccccttcagttgcaa

SEQ ID NO: 54103 - DNA, 22 bp, Artificial Sequence
  chemically synthesized
cagttgcaaacttagggcgccg

SEQ ID NO: 54104 - DNA, 22 bp, Artificial Sequence
  chemically synthesized
agttgcaaacttagggcgccga

SEQ ID NO: 54105 - DNA, 22 bp, Artificial Sequence
  chemically synthesized
caaacttagggcgccgacggca

SEQ ID NO: 54106 - DNA, 22 bp, Artificial Sequence
  chemically synthesized
agggcgccgacggcacggagag

SEQ ID NO: 54107 - DNA, 22 bp, Artificial Sequence
  chemically synthesized
gggcgccgacggcacggagagg

SEQ ID NO: 54108 - DNA, 22 bp, Artificial Sequence
  chemically synthesized
cctcctcttactattttttgga

SEQ ID NO: 54109 - DNA, 22 bp, Artificial Sequence
  chemically synthesized
ctcttactattttttggaagat

SEQ ID NO: 54110 - DNA, 22 bp, Artificial Sequence
  chemically synthesized
ttactattttttggaagatttt

SEQ ID NO: 54111 - DNA, 22 bp, Artificial Sequence
  chemically synthesized
actattttttggaagattttca

SEQ ID NO: 54112 - DNA, 22 bp, Artificial Sequence
  chemically synthesized
ctattttttggaagattttcaa

SEQ ID NO: 54113 - DNA, 22 bp, Artificial Sequence
  chemically synthesized
ttttttggaagattttcaaaaa

SEQ ID NO: 54114 - DNA, 22 bp, Artificial Sequence
  chemically synthesized
tttggaagattttcaaaaaaag

SEQ ID NO: 54115 - DNA, 22 bp, Artificial Sequence
  chemically synthesized
ttggaagattttcaaaaaaagt

SEQ ID NO: 54116 - DNA, 22 bp, Artificial Sequence
  chemically synthesized
tggaagattttcaaaaaaagtg

SEQ ID NO: 54117 - DNA, 22 bp, Artificial Sequence
  chemically synthesized
ggaagattttcaaaaaaagtgg

SEQ ID NO: 54118 - DNA, 22 bp, Artificial Sequence
  chemically synthesized
gaagattttcaaaaaaagtgga

SEQ ID NO: 54119 - DNA, 22 bp, Artificial Sequence
  chemically synthesized
tcaaaaaaagtggaagtggatt

SEQ ID NO: 54120 - DNA, 22 bp, Artificial Sequence
  chemically synthesized
caaaaaaagtggaagtggattt

SEQ ID NO: 54121 - DNA, 22 bp, Artificial Sequence
  chemically synthesized
aaaaaaagtggaagtggatttt

SEQ ID NO: 54122 - DNA, 22 bp, Artificial Sequence
  chemically synthesized
tgattgggaaaaatctcgtgtc

SEQ ID NO: 54123 - DNA, 22 bp, Artificial Sequence
  chemically synthesized
gattgggaaaaatctcgtgtct

SEQ ID NO: 54124 - DNA, 22 bp, Artificial Sequence
  chemically synthesized
attgggaaaaatctcgtgtctg

SEQ ID NO: 54125 - DNA, 22 bp, Artificial Sequence
  chemically synthesized
ggaaaaatctcgtgtctgaatg

SEQ ID NO: 54126 - DNA, 22 bp, Artificial Sequence
  chemically synthesized
gtgtctgaatgtttacaagcac

SEQ ID NO: 54127 - DNA, 22 bp, Artificial Sequence
  chemically synthesized
aatgtttacaagcaccgcgtgt

SEQ ID NO: 54128 - DNA, 22 bp, Artificial Sequence
  chemically synthesized
acaagcaccgcgtgtgcgggag

SEQ ID NO: 54129 - DNA, 22 bp, Artificial Sequence
  chemically synthesized
caagcaccgcgtgtgcgggagc

SEQ ID NO: 54130 - DNA, 22 bp, Artificial Sequence
  chemically synthesized
ctgccaacaaacagacagagga

SEQ ID NO: 54131 - DNA, 22 bp, Artificial Sequence
  chemically synthesized
ccaacaaacagacagaggaccg

SEQ ID NO: 54132 - DNA, 22 bp, Artificial Sequence
  chemically synthesized
gcctcgcccgggccttgcccga

SEQ ID NO: 54133 - DNA, 22 bp, Artificial Sequence
  chemically synthesized
gcccgggccttgcccgacctcg

SEQ ID NO: 54134 - DNA, 22 bp, Artificial Sequence
  chemically synthesized
gcccgacctcgccgcgccccag

SEQ ID NO: 54135 - DNA, 22 bp, Artificial Sequence
  chemically synthesized
cccgacctcgccgcgccccagc

SEQ ID NO: 54136 - DNA, 22 bp, Artificial Sequence
  chemically synthesized
gccgcgccccagcccagccccg

SEQ ID NO: 54137 - DNA, 22 bp, Artificial Sequence
  chemically synthesized
cgcgccagcctggcccgtggtc

SEQ ID NO: 54138 - DNA, 22 bp, Artificial Sequence
  chemically synthesized
gcccgtggtcctggtccgcccc

SEQ ID NO: 54139 - DNA, 22 bp, Artificial Sequence
  chemically synthesized
gtccgcccccagcacaatgccg

SEQ ID NO: 54140 - DNA, 22 bp, Artificial Sequence
  chemically synthesized
ttctcgacctcccagactgcga

SEQ ID NO: 54141 - DNA, 22 bp, Artificial Sequence
  chemically synthesized
ctcgacctcccagactgcgaaa

SEQ ID NO: 54142 - DNA, 22 bp, Artificial Sequence
  chemically synthesized
tcgacctcccagactgcgaaat

SEQ ID NO: 54143 - DNA, 22 bp, Artificial Sequence
  chemically synthesized
gacctcccagactgcgaaatcg

SEQ ID NO: 54144 - DNA, 22 bp, Artificial Sequence
  chemically synthesized
ccagactgcgaaatcggctggg

SEQ ID NO: 54145 - DNA, 22 bp, Artificial Sequence
  chemically synthesized
cgaaatcggctgggtgaaactc

SEQ ID NO: 54146 - DNA, 22 bp, Artificial Sequence
  chemically synthesized
ggtgaaactcggctttgcaaag

SEQ ID NO: 54147 - DNA, 22 bp, Artificial Sequence
  chemically synthesized
ggctttgcaaagcatttttatt

SEQ ID NO: 54148 - DNA, 22 bp, Artificial Sequence
  chemically synthesized
tgcaaagcatttttattttgca

SEQ ID NO: 54149 - DNA, 22 bp, Artificial Sequence
  chemically synthesized
gcaaagcatttttattttgcag

SEQ ID NO: 54150 - DNA, 22 bp, Artificial Sequence
  chemically synthesized
caaagcatttttattttgcagg

SEQ ID NO: 54151 - DNA, 22 bp, Artificial Sequence
  chemically synthesized
ttattttgcagggcaactgtaa

SEQ ID NO: 54152 - DNA, 22 bp, Artificial Sequence
  chemically synthesized
tattttgcagggcaactgtaaa

SEQ ID NO: 54153 - DNA, 22 bp, Artificial Sequence
  chemically synthesized
attttgcagggcaactgtaaaa

SEQ ID NO: 54154 - DNA, 22 bp, Artificial Sequence
  chemically synthesized
ttttgcagggcaactgtaaaag

SEQ ID NO: 54155 - DNA, 22 bp, Artificial Sequence
  chemically synthesized
tgcagggcaactgtaaaagcgc

SEQ ID NO: 54156 - DNA, 22 bp, Artificial Sequence
  chemically synthesized
gcagggcaactgtaaaagcgcg

SEQ ID NO: 54157 - DNA, 22 bp, Artificial Sequence
  chemically synthesized
cagggcaactgtaaaagcgcgt

SEQ ID NO: 54158 - DNA, 22 bp, Artificial Sequence
  chemically synthesized
taaaagcgcgttctgcgcctcc

SEQ ID NO: 54159 - DNA, 22 bp, Artificial Sequence
  chemically synthesized
tgcgcctcccctcccctccgcc

SEQ ID NO: 54160 - DNA, 22 bp, Artificial Sequence
  chemically synthesized
cgcctcccctcccctccgccct

SEQ ID NO: 54161 - DNA, 22 bp, Artificial Sequence
  chemically synthesized
ccctcccctccgccctgggtac

SEQ ID NO: 54162 - DNA, 22 bp, Artificial Sequence
  chemically synthesized
ccctccgccctgggtactttct

SEQ ID NO: 54163 - DNA, 22 bp, Artificial Sequence
  chemically synthesized
cgccctgggtactttctcagac

SEQ ID NO: 54164 - DNA, 22 bp, Artificial Sequence
  chemically synthesized
ggtactttctcagacgtctctt

SEQ ID NO: 54165 - DNA, 22 bp, Artificial Sequence
  chemically synthesized
tctcagacgtctcttgtccaca

SEQ ID NO: 54166 - DNA, 22 bp, Artificial Sequence
  chemically synthesized
ctcagacgtctcttgtccacag

SEQ ID NO: 54167 - DNA, 22 bp, Artificial Sequence
  chemically synthesized
tcagacgtctcttgtccacagc

SEQ ID NO: 54168 - DNA, 22 bp, Artificial Sequence
  chemically synthesized
agacgtctcttgtccacagctc

SEQ ID NO: 54169 - DNA, 22 bp, Artificial Sequence
  chemically synthesized
ttgtccacagctcgggaccgcg

SEQ ID NO: 54170 - DNA, 22 bp, Artificial Sequence
  chemically synthesized
gtccacagctcgggaccgcgag

SEQ ID NO: 54171 - DNA, 22 bp, Artificial Sequence
  chemically synthesized
tccacagctcgggaccgcgagg

SEQ ID NO: 54172 - DNA, 22 bp, Artificial Sequence
  chemically synthesized
gggaccgcgaggaggtcaccac

SEQ ID NO: 54173 - DNA, 22 bp, Artificial Sequence
  chemically synthesized
tccctgcccaccccccaccccg

SEQ ID NO: 54174 - DNA, 22 bp, Artificial Sequence
  chemically synthesized
ccctgcccaccccccaccccgc

SEQ ID NO: 54175 - DNA, 22 bp, Artificial Sequence
  chemically synthesized
cctgcccaccccccaccccgcc

SEQ ID NO: 54176 - DNA, 22 bp, Artificial Sequence
  chemically synthesized
cccaccccccaccccgcccggt

SEQ ID NO: 54177 - DNA, 22 bp, Artificial Sequence
  chemically synthesized
gtcaccagtccccctgcgcccc

SEQ ID NO: 54178 - DNA, 22 bp, Artificial Sequence
  chemically synthesized
cgccccgagcacgactaggcca

SEQ ID NO: 54179 - DNA, 22 bp, Artificial Sequence
  chemically synthesized
ggccaggtggcggggttgccgg

SEQ ID NO: 54180 - DNA, 22 bp, Artificial Sequence
  chemically synthesized
ccggggaagggcaggggagaag

SEQ ID NO: 54181 - DNA, 22 bp, Artificial Sequence
  chemically synthesized
gagtgtgcattttaagggcgct

SEQ ID NO: 54182 - DNA, 22 bp, Artificial Sequence
  chemically synthesized
agtgtgcattttaagggcgctg

SEQ ID NO: 54183 - DNA, 22 bp, Artificial Sequence
  chemically synthesized
taagggcgctggatcctgggac

SEQ ID NO: 54184 - DNA, 22 bp, Artificial Sequence
  chemically synthesized
aagggcgctggatcctgggacc

SEQ ID NO: 54185 - DNA, 22 bp, Artificial Sequence
  chemically synthesized
agggcgctggatcctgggaccc

SEQ ID NO: 54186 - DNA, 22 bp, Artificial Sequence
  chemically synthesized
gatcctgggaccccgagcactt

SEQ ID NO: 54187 - DNA, 22 bp, Artificial Sequence
  chemically synthesized
ggaccccgagcacttcaccctt

SEQ ID NO: 54188 - DNA, 22 bp, Artificial Sequence
  chemically synthesized
caccctttgggtcttgccctct

SEQ ID NO: 54189 - DNA, 22 bp, Artificial Sequence
  chemically synthesized
accctttgggtcttgccctctt

SEQ ID NO: 54190 - DNA, 22 bp, Artificial Sequence
  chemically synthesized
tgggtcttgccctcttccccag

SEQ ID NO: 54191 - DNA, 22 bp, Artificial Sequence
  chemically synthesized
gggtcttgccctcttccccagg

SEQ ID NO: 54192 - DNA, 22 bp, Artificial Sequence
  chemically synthesized
ggtcttgccctcttccccaggc

SEQ ID NO: 54193 - DNA, 22 bp, Artificial Sequence
  chemically synthesized
gccctcttccccaggcctggct

SEQ ID NO: 54194 - DNA, 22 bp, Artificial Sequence
  chemically synthesized
ccctcttccccaggcctggctt

SEQ ID NO: 54195 - DNA, 22 bp, Artificial Sequence
  chemically synthesized
ttccccaggcctggcttggtct

SEQ ID NO: 54196 - DNA, 22 bp, Artificial Sequence
  chemically synthesized
ccccaggcctggcttggtctga

SEQ ID NO: 54197 - DNA, 22 bp, Artificial Sequence
  chemically synthesized
cccaggcctggcttggtctgag

SEQ ID NO: 54198 - DNA, 22 bp, Artificial Sequence
  chemically synthesized
gcttggtctgaggttcttgtga

SEQ ID NO: 54199 - DNA, 22 bp, Artificial Sequence
  chemically synthesized
ggtctgaggttcttgtgagtct

SEQ ID NO: 54200 - DNA, 22 bp, Artificial Sequence
  chemically synthesized
gtctgaggttcttgtgagtctg

SEQ ID NO: 54201 - DNA, 22 bp, Artificial Sequence
  chemically synthesized
aggttcttgtgagtctgtataa

SEQ ID NO: 54202 - DNA, 22 bp, Artificial Sequence
  chemically synthesized
ttgtgagtctgtataagagctg

SEQ ID NO: 54203 - DNA, 22 bp, Artificial Sequence
  chemically synthesized
gtgagtctgtataagagctggt

SEQ ID NO: 54204 - DNA, 22 bp, Artificial Sequence
  chemically synthesized
tgagtctgtataagagctggtg

SEQ ID NO: 54205 - DNA, 22 bp, Artificial Sequence
  chemically synthesized
tataagagctggtggtggtggc

SEQ ID NO: 54206 - DNA, 22 bp, Artificial Sequence
  chemically synthesized
gtggtggtggctgtctcccgct

SEQ ID NO: 54207 - DNA, 22 bp, Artificial Sequence
  chemically synthesized
tctcccgctgactgcgcctgga

SEQ ID NO: 54208 - DNA, 22 bp, Artificial Sequence
  chemically synthesized
ccgctgactgcgcctggaaagg

SEQ ID NO: 54209 - DNA, 22 bp, Artificial Sequence
  chemically synthesized
actgcgcctggaaaggcgggcg

SEQ ID NO: 54210 - DNA, 22 bp, Artificial Sequence
  chemically synthesized
cgcctggaaaggcgggcggtgg

SEQ ID NO: 54211 - DNA, 22 bp, Artificial Sequence
  chemically synthesized
gaaaggcgggcggtgggcactt

SEQ ID NO: 54212 - DNA, 22 bp, Artificial Sequence
  chemically synthesized
aggaaagtttggcagcaaggga

SEQ ID NO: 54213 - DNA, 22 bp, Artificial Sequence
  chemically synthesized
ggaaagtttggcagcaagggaa

SEQ ID NO: 54214 - DNA, 22 bp, Artificial Sequence
  chemically synthesized
ggcagcaagggaaagaaaggcg

SEQ ID NO: 54215 - DNA, 22 bp, Artificial Sequence
  chemically synthesized
gcagcaagggaaagaaaggcgt

SEQ ID NO: 54216 - DNA, 22 bp, Artificial Sequence
  chemically synthesized
cccccctactcaatttatgatt

SEQ ID NO: 54217 - DNA, 22 bp, Artificial Sequence
  chemically synthesized
ctcaatttatgattcttacttt

SEQ ID NO: 54218 - DNA, 22 bp, Artificial Sequence
  chemically synthesized
aatttatgattcttactttaaa

SEQ ID NO: 54219 - DNA, 22 bp, Artificial Sequence
  chemically synthesized
atgattcttactttaaattttt

SEQ ID NO: 54220 - DNA, 22 bp, Artificial Sequence
  chemically synthesized
tgattcttactttaaatttttg

SEQ ID NO: 54221 - DNA, 22 bp, Artificial Sequence
  chemically synthesized
ttactttaaatttttgatgcag

SEQ ID NO: 54222 - DNA, 22 bp, Artificial Sequence
  chemically synthesized
actttaaatttttgatgcagtt

SEQ ID NO: 54223 - DNA, 22 bp, Artificial Sequence
  chemically synthesized
ctttaaatttttgatgcagttt

SEQ ID NO: 54224 - DNA, 22 bp, Artificial Sequence
  chemically synthesized
taaatttttgatgcagttttaa

SEQ ID NO: 54225 - DNA, 22 bp, Artificial Sequence
  chemically synthesized
aaatttttgatgcagttttaaa

SEQ ID NO: 54226 - DNA, 22 bp, Artificial Sequence
  chemically synthesized
aatttttgatgcagttttaaag

SEQ ID NO: 54227 - DNA, 22 bp, Artificial Sequence
  chemically synthesized
ttgatgcagttttaaaggacca

SEQ ID NO: 54228 - DNA, 22 bp, Artificial Sequence
  chemically synthesized
tgatgcagttttaaaggaccac

SEQ ID NO: 54229 - DNA, 22 bp, Artificial Sequence
  chemically synthesized
gatgcagttttaaaggaccacc

SEQ ID NO: 54230 - DNA, 22 bp, Artificial Sequence
  chemically synthesized
atgcagttttaaaggaccacct

SEQ ID NO: 54231 - DNA, 22 bp, Artificial Sequence
  chemically synthesized
taaaggaccacctatacttggt

SEQ ID NO: 54232 - DNA, 22 bp, Artificial Sequence
  chemically synthesized
aaaggaccacctatacttggtt

SEQ ID NO: 54233 - DNA, 22 bp, Artificial Sequence
  chemically synthesized
aaggaccacctatacttggttc

SEQ ID NO: 54234 - DNA, 22 bp, Artificial Sequence
  chemically synthesized
tacttggttctgtgttttttta

SEQ ID NO: 54235 - DNA, 22 bp, Artificial Sequence
  chemically synthesized
ggttctgtgtttttttaaaggg

SEQ ID NO: 54236 - DNA, 22 bp, Artificial Sequence
  chemically synthesized
gttctgtgtttttttaaagggg

SEQ ID NO: 54237 - DNA, 22 bp, Artificial Sequence
  chemically synthesized
tgtgtttttttaaaggggtggt

SEQ ID NO: 54238 - DNA, 22 bp, Artificial Sequence
  chemically synthesized
tgtttttttaaaggggtggtgg

SEQ ID NO: 54239 - DNA, 22 bp, Artificial Sequence
  chemically synthesized
ttttaaaggggtggtggtgggg

SEQ ID NO: 54240 - DNA, 22 bp, Artificial Sequence
  chemically synthesized
tttaaaggggtggtggtggggg

SEQ ID NO: 54241 - DNA, 22 bp, Artificial Sequence
  chemically synthesized
ttaaaggggtggtggtgggggg

SEQ ID NO: 54242 - DNA, 22 bp, Artificial Sequence
  chemically synthesized
taaaggggtggtggtggggggt

SEQ ID NO: 54243 - DNA, 22 bp, Artificial Sequence
  chemically synthesized
aaaggggtggtggtggggggtg

SEQ ID NO: 54244 - DNA, 22 bp, Artificial Sequence
  chemically synthesized
aaggggtggtggtggggggtgc

SEQ ID NO: 54245 - DNA, 22 bp, Artificial Sequence
  chemically synthesized
aatttttcactgggccctggaa

SEQ ID NO: 54246 - DNA, 22 bp, Artificial Sequence
  chemically synthesized
atttttcactgggccctggaac

SEQ ID NO: 54247 - DNA, 22 bp, Artificial Sequence
  chemically synthesized
ttcactgggccctggaacttgt

SEQ ID NO: 54248 - DNA, 22 bp, Artificial Sequence
  chemically synthesized
tcactgggccctggaacttgtc

SEQ ID NO: 54249 - DNA, 22 bp, Artificial Sequence
  chemically synthesized
cactgggccctggaacttgtca

SEQ ID NO: 54250 - DNA, 22 bp, Artificial Sequence
  chemically synthesized
actgggccctggaacttgtcac

SEQ ID NO: 54251 - DNA, 22 bp, Artificial Sequence
  chemically synthesized
ggccctggaacttgtcacacac

SEQ ID NO: 54252 - DNA, 22 bp, Artificial Sequence
  chemically synthesized
gaacttgtcacacacttcggaa

SEQ ID NO: 54253 - DNA, 22 bp, Artificial Sequence
  chemically synthesized
gtcacacacttcggaagctccc

SEQ ID NO: 54254 - DNA, 22 bp, Artificial Sequence
  chemically synthesized
tcacacacttcggaagctcccc

SEQ ID NO: 54255 - DNA, 22 bp, Artificial Sequence
  chemically synthesized
cggaagctcccccaccccggca

SEQ ID NO: 54256 - DNA, 22 bp, Artificial Sequence
  chemically synthesized
ggaagctcccccaccccggcac

SEQ ID NO: 54257 - DNA, 22 bp, Artificial Sequence
  chemically synthesized
ccccaccccggcacgttgcgcg

SEQ ID NO: 54258 - DNA, 22 bp, Artificial Sequence
  chemically synthesized
cgcggccctccctctccccacc

SEQ ID NO: 54259 - DNA, 22 bp, Artificial Sequence
  chemically synthesized
cctctccccaccccctcgcatc

SEQ ID NO: 54260 - DNA, 22 bp, Artificial Sequence
  chemically synthesized
tccccaccccctcgcatccctc

SEQ ID NO: 54261 - DNA, 22 bp, Artificial Sequence
  chemically synthesized
cccaccccctcgcatccctccc

SEQ ID NO: 54262 - DNA, 22 bp, Artificial Sequence
  chemically synthesized
gcatccctccctcgccgctctc

SEQ ID NO: 54263 - DNA, 22 bp, Artificial Sequence
  chemically synthesized
cctcgccgctctcccccgcccc

SEQ ID NO: 54264 - DNA, 22 bp, Artificial Sequence
  chemically synthesized
gccgctctcccccgcccccaac

SEQ ID NO: 54265 - DNA, 22 bp, Artificial Sequence
  chemically synthesized
tcccccgcccccaactcccccg

SEQ ID NO: 54266 - DNA, 22 bp, Artificial Sequence
  chemically synthesized
ccccgcccccaactcccccggc

SEQ ID NO: 54267 - DNA, 22 bp, Artificial Sequence
  chemically synthesized
ccccggccgcgccggatgcgga

SEQ ID NO: 54268 - DNA, 22 bp, Artificial Sequence
  chemically synthesized
cagcccggccaggtaccggcgg

SEQ ID NO: 54269 - DNA, 22 bp, Artificial Sequence
  chemically synthesized
gcaggactcgggaaagtcaggc

SEQ ID NO: 54270 - DNA, 22 bp, Artificial Sequence
  chemically synthesized
gggaaagtcaggcccttcttcg

SEQ ID NO: 54271 - DNA, 22 bp, Artificial Sequence
  chemically synthesized
cttcggaaggatgcagtggggg

SEQ ID NO: 54272 - DNA, 22 bp, Artificial Sequence
  chemically synthesized
ttcggaaggatgcagtgggggc

SEQ ID NO: 54273 - DNA, 22 bp, Artificial Sequence
  chemically synthesized
cggaaggatgcagtgggggctc

SEQ ID NO: 54274 - DNA, 22 bp, Artificial Sequence
  chemically synthesized
ggaaggatgcagtgggggctca

SEQ ID NO: 54275 - DNA, 22 bp, Artificial Sequence
  chemically synthesized
aaaggacagaccggggcgcgca

SEQ ID NO: 54276 - DNA, 22 bp, Artificial Sequence
  chemically synthesized
ctccctcgtacccctctccctc

SEQ ID NO: 54277 - DNA, 22 bp, Artificial Sequence
  chemically synthesized
cctcgtacccctctccctcctg

SEQ ID NO: 54278 - DNA, 22 bp, Artificial Sequence
  chemically synthesized
gtacccctctccctcctgggtc

SEQ ID NO: 54279 - DNA, 22 bp, Artificial Sequence
  chemically synthesized
tccctcctgggtccatcttggg

SEQ ID NO: 54280 - DNA, 22 bp, Artificial Sequence
  chemically synthesized
cctcctgggtccatcttgggac

SEQ ID NO: 54281 - DNA, 22 bp, Artificial Sequence
  chemically synthesized
ctgggtccatcttgggacactc

SEQ ID NO: 54282 - DNA, 22 bp, Artificial Sequence
  chemically synthesized
ggtccatcttgggacactctag

SEQ ID NO: 54283 - DNA, 22 bp, Artificial Sequence
  chemically synthesized
gggacactctaggctgggaggg

SEQ ID NO: 54284 - DNA, 22 bp, Artificial Sequence
  chemically synthesized
ggacactctaggctgggagggt

SEQ ID NO: 54285 - DNA, 22 bp, Artificial Sequence
  chemically synthesized
taggctgggagggttagtaccc

SEQ ID NO: 54286 - DNA, 22 bp, Artificial Sequence
  chemically synthesized
ggctgggagggttagtaccccc

SEQ ID NO: 54287 - DNA, 22 bp, Artificial Sequence
  chemically synthesized
ggagggttagtaccccctcctc

SEQ ID NO: 54288 - DNA, 22 bp, Artificial Sequence
  chemically synthesized
gtaccccctcctcctgtcccgg

SEQ ID NO: 54289 - DNA, 22 bp, Artificial Sequence
  chemically synthesized
ctcctgtcccggggttaaaggg

SEQ ID NO: 54290 - DNA, 22 bp, Artificial Sequence
  chemically synthesized
ctgtcccggggttaaagggcca

SEQ ID NO: 54291 - DNA, 22 bp, Artificial Sequence
  chemically synthesized
tcccggggttaaagggccagtt

SEQ ID NO: 54292 - DNA, 22 bp, Artificial Sequence
  chemically synthesized
aagggccagtttgggagggggt

SEQ ID NO: 54293 - DNA, 22 bp, Artificial Sequence
  chemically synthesized
gggagggggtgagggggccact

SEQ ID NO: 54294 - DNA, 22 bp, Artificial Sequence
  chemically synthesized
ggagggggtgagggggccactt

SEQ ID NO: 54295 - DNA, 22 bp, Artificial Sequence
  chemically synthesized
ctttctgtcctcattttctggg

SEQ ID NO: 54296 - DNA, 22 bp, Artificial Sequence
  chemically synthesized
tttctgtcctcattttctgggt

SEQ ID NO: 54297 - DNA, 22 bp, Artificial Sequence
  chemically synthesized
tctgtcctcattttctgggtgc

SEQ ID NO: 54298 - DNA, 22 bp, Artificial Sequence
  chemically synthesized
ctgtcctcattttctgggtgct

SEQ ID NO: 54299 - DNA, 22 bp, Artificial Sequence
  chemically synthesized
tgtcctcattttctgggtgctc

SEQ ID NO: 54300 - DNA, 22 bp, Artificial Sequence
  chemically synthesized
tcctcattttctgggtgctcag

SEQ ID NO: 54301 - DNA, 22 bp, Artificial Sequence
  chemically synthesized
attttctgggtgctcagagggg

SEQ ID NO: 54302 - DNA, 22 bp, Artificial Sequence
  chemically synthesized
tctgggtgctcagagggggcag

SEQ ID NO: 54303 - DNA, 22 bp, Artificial Sequence
  chemically synthesized
ctgggtgctcagagggggcagg

SEQ ID NO: 54304 - DNA, 22 bp, Artificial Sequence
  chemically synthesized
tgggtgctcagagggggcagga

SEQ ID NO: 54305 - DNA, 22 bp, Artificial Sequence
  chemically synthesized
ggtgctcagagggggcaggagc

SEQ ID NO: 54306 - DNA, 22 bp, Artificial Sequence
  chemically synthesized
agagggggcaggagccatcccg

SEQ ID NO: 54307 - DNA, 22 bp, Artificial Sequence
  chemically synthesized
agtaccacccccccgccccccg

SEQ ID NO: 54308 - DNA, 22 bp, Artificial Sequence
  chemically synthesized
tgctatgtgggctgaatgagcc

SEQ ID NO: 54309 - DNA, 22 bp, Artificial Sequence
  chemically synthesized
ctatgtgggctgaatgagccat

SEQ ID NO: 54310 - DNA, 22 bp, Artificial Sequence
  chemically synthesized
tgtgggctgaatgagccattcg

SEQ ID NO: 54311 - DNA, 22 bp, Artificial Sequence
  chemically synthesized
aatgagccattcggtcgctagg

SEQ ID NO: 54312 - DNA, 22 bp, Artificial Sequence
  chemically synthesized
ggtcgctaggaggcagaacaag

SEQ ID NO: 54313 - DNA, 22 bp, Artificial Sequence
  chemically synthesized
ggaggcagaacaagatcaagaa

SEQ ID NO: 54314 - DNA, 22 bp, Artificial Sequence
  chemically synthesized
agcgaacttgaacctgtaccag

SEQ ID NO: 54315 - DNA, 22 bp, Artificial Sequence
  chemically synthesized
gaacctgtaccagagcctcccc

SEQ ID NO: 54316 - DNA, 22 bp, Artificial Sequence
  chemically synthesized
aacctgtaccagagcctccccc

SEQ ID NO: 54317 - DNA, 22 bp, Artificial Sequence
  chemically synthesized
taccagagcctcccccacctcc

SEQ ID NO: 54318 - DNA, 22 bp, Artificial Sequence
  chemically synthesized
ccccacctcctgcccggcgatt

SEQ ID NO: 54319 - DNA, 22 bp, Artificial Sequence
  chemically synthesized
ctgcccggcgattctcgtccgg

SEQ ID NO: 54320 - DNA, 22 bp, Artificial Sequence
  chemically synthesized
cccggcgattctcgtccgggga

SEQ ID NO: 54321 - DNA, 22 bp, Artificial Sequence
  chemically synthesized
tcgtccggggaggaacgagctt

SEQ ID NO: 54322 - DNA, 22 bp, Artificial Sequence
  chemically synthesized
gtccggggaggaacgagctttg

SEQ ID NO: 54323 - DNA, 22 bp, Artificial Sequence
  chemically synthesized
tgcgagggtgggggtgggggga

SEQ ID NO: 54324 - DNA, 22 bp, Artificial Sequence
  chemically synthesized
gcgagggtgggggtggggggaa

SEQ ID NO: 54325 - DNA, 22 bp, Artificial Sequence
  chemically synthesized
cgagggtgggggtggggggaaa

SEQ ID NO: 54326 - DNA, 22 bp, Artificial Sequence
  chemically synthesized
ggcagaattccctttctctccc

SEQ ID NO: 54327 - DNA, 22 bp, Artificial Sequence
  chemically synthesized
cctttctctcccccatcacccc

SEQ ID NO: 54328 - DNA, 22 bp, Artificial Sequence
  chemically synthesized
tctctcccccatcaccccgtat

SEQ ID NO: 54329 - DNA, 22 bp, Artificial Sequence
  chemically synthesized
ctctcccccatcaccccgtatg

SEQ ID NO: 54330 - DNA, 22 bp, Artificial Sequence
  chemically synthesized
tctcccccatcaccccgtatgt

SEQ ID NO: 54331 - DNA, 22 bp, Artificial Sequence
  chemically synthesized
tcccccatcaccccgtatgtct

SEQ ID NO: 54332 - DNA, 22 bp, Artificial Sequence
  chemically synthesized
ccccatcaccccgtatgtcttt

SEQ ID NO: 54333 - DNA, 22 bp, Artificial Sequence
  chemically synthesized
tgttcttcattttgactttaaa

SEQ ID NO: 54334 - DNA, 22 bp, Artificial Sequence
  chemically synthesized
gttcttcattttgactttaaaa

SEQ ID NO: 54335 - DNA, 22 bp, Artificial Sequence
  chemically synthesized
ttcttcattttgactttaaaaa

SEQ ID NO: 54336 - DNA, 22 bp, Artificial Sequence
  chemically synthesized
ttcattttgactttaaaaatgc

SEQ ID NO: 54337 - DNA, 22 bp, Artificial Sequence
  chemically synthesized
cattttgactttaaaaatgctt

SEQ ID NO: 54338 - DNA, 22 bp, Artificial Sequence
  chemically synthesized
attttgactttaaaaatgcttc

SEQ ID NO: 54339 - DNA, 22 bp, Artificial Sequence
  chemically synthesized
tgactttaaaaatgcttctggc

SEQ ID NO: 54340 - DNA, 22 bp, Artificial Sequence
  chemically synthesized
gactttaaaaatgcttctggcc

SEQ ID NO: 54341 - DNA, 22 bp, Artificial Sequence
  chemically synthesized
actttaaaaatgcttctggccg

SEQ ID NO: 54342 - DNA, 22 bp, Artificial Sequence
  chemically synthesized
taaaaatgcttctggccggggc

SEQ ID NO: 54343 - DNA, 22 bp, Artificial Sequence
  chemically synthesized
aaaaatgcttctggccggggcc

SEQ ID NO: 54344 - DNA, 22 bp, Artificial Sequence
  chemically synthesized
aaaatgcttctggccggggccg

SEQ ID NO: 54345 - DNA, 22 bp, Artificial Sequence
  chemically synthesized
ctggccggggccgcggagaagc

SEQ ID NO: 54346 - DNA, 22 bp, Artificial Sequence
  chemically synthesized
tggccggggccgcggagaagcg

SEQ ID NO: 54347 - DNA, 22 bp, Artificial Sequence
  chemically synthesized
gccggggccgcggagaagcgac

SEQ ID NO: 54348 - DNA, 22 bp, Artificial Sequence
  chemically synthesized
agaccagcgcgcgccgggctcg

SEQ ID NO: 54349 - DNA, 22 bp, Artificial Sequence
  chemically synthesized
ggagcacggtgcagttttcgct

SEQ ID NO: 54350 - DNA, 22 bp, Artificial Sequence
  chemically synthesized
tcgctttctttcggggccggca

SEQ ID NO: 54351 - DNA, 22 bp, Artificial Sequence
  chemically synthesized
cgctttctttcggggccggcat

SEQ ID NO: 54352 - DNA, 22 bp, Artificial Sequence
  chemically synthesized
gctttctttcggggccggcatt

SEQ ID NO: 54353 - DNA, 22 bp, Artificial Sequence
  chemically synthesized
tctttcggggccggcatttttg

SEQ ID NO: 54354 - DNA, 22 bp, Artificial Sequence
  chemically synthesized
ctttcggggccggcatttttgg

SEQ ID NO: 54355 - DNA, 22 bp, Artificial Sequence
  chemically synthesized
tttcggggccggcatttttggt

SEQ ID NO: 54356 - DNA, 22 bp, Artificial Sequence
  chemically synthesized
tcggggccggcatttttggtag

SEQ ID NO: 54357 - DNA, 22 bp, Artificial Sequence
  chemically synthesized
cggggccggcatttttggtagg

SEQ ID NO: 54358 - DNA, 22 bp, Artificial Sequence
  chemically synthesized
ggggccggcatttttggtaggg

SEQ ID NO: 54359 - DNA, 22 bp, Artificial Sequence
  chemically synthesized
ttggtagggaggaaccgggagt

SEQ ID NO: 54360 - DNA, 22 bp, Artificial Sequence
  chemically synthesized
tggtagggaggaaccgggagtg

SEQ ID NO: 54361 - DNA, 22 bp, Artificial Sequence
  chemically synthesized
ggtagggaggaaccgggagtgc

SEQ ID NO: 54362 - DNA, 22 bp, Artificial Sequence
  chemically synthesized
gtagggaggaaccgggagtgcg

SEQ ID NO: 54363 - DNA, 22 bp, Artificial Sequence
  chemically synthesized
tagggcttcggggcatggccga

SEQ ID NO: 54364 - DNA, 22 bp, Artificial Sequence
  chemically synthesized
gggcttcggggcatggccgaag

SEQ ID NO: 54365 - DNA, 22 bp, Artificial Sequence
  chemically synthesized
cggggcatggccgaagaggggg

SEQ ID NO: 54366 - DNA, 22 bp, Artificial Sequence
  chemically synthesized
ggggcatggccgaagaggggga

SEQ ID NO: 54367 - DNA, 22 bp, Artificial Sequence
  chemically synthesized
gcacttggtctccagcctcact

SEQ ID NO: 54368 - DNA, 22 bp, Artificial Sequence
  chemically synthesized
cacttggtctccagcctcactt

SEQ ID NO: 54369 - DNA, 22 bp, Artificial Sequence
  chemically synthesized
ggtctccagcctcacttcttcc

SEQ ID NO: 54370 - DNA, 22 bp, Artificial Sequence
  chemically synthesized
gtctccagcctcacttcttcca

SEQ ID NO: 54371 - DNA, 22 bp, Artificial Sequence
  chemically synthesized
cagcctcacttcttccaccccc

SEQ ID NO: 54372 - DNA, 22 bp, Artificial Sequence
  chemically synthesized
acttcttccaccccctcacccc

SEQ ID NO: 54373 - DNA, 22 bp, Artificial Sequence
  chemically synthesized
cttccaccccctcacccccatg

SEQ ID NO: 54374 - DNA, 22 bp, Artificial Sequence
  chemically synthesized
ttccaccccctcacccccatgc

SEQ ID NO: 54375 - DNA, 22 bp, Artificial Sequence
  chemically synthesized
ccaccccctcacccccatgcaa

SEQ ID NO: 54376 - DNA, 22 bp, Artificial Sequence
  chemically synthesized
caccccctcacccccatgcaaa

SEQ ID NO: 54377 - DNA, 22 bp, Artificial Sequence
  chemically synthesized
acccccatgcaaagcacagacc

SEQ ID NO: 54378 - DNA, 22 bp, Artificial Sequence
  chemically synthesized
ggtggcctcggctggcttgctg

SEQ ID NO: 54379 - DNA, 22 bp, Artificial Sequence
  chemically synthesized
ggctggcttgctgggcggctct

SEQ ID NO: 54380 - DNA, 22 bp, Artificial Sequence
  chemically synthesized
gcttgctgggcggctctgcagc

SEQ ID NO: 54381 - DNA, 22 bp, Artificial Sequence
  chemically synthesized
gctgggcggctctgcagcccga

SEQ ID NO: 54382 - DNA, 22 bp, Artificial Sequence
  chemically synthesized
ctgggcggctctgcagcccgac

SEQ ID NO: 54383 - DNA, 22 bp, Artificial Sequence
  chemically synthesized
ggcggctctgcagcccgacacc

SEQ ID NO: 54384 - DNA, 22 bp, Artificial Sequence
  chemically synthesized
tgcagcccgacaccccccctct

SEQ ID NO: 54385 - DNA, 22 bp, Artificial Sequence
  chemically synthesized
cagcccgacaccccccctctcg

SEQ ID NO: 54386 - DNA, 22 bp, Artificial Sequence
  chemically synthesized
tcgcctcggagctcggaatcac

SEQ ID NO: 54387 - DNA, 22 bp, Artificial Sequence
  chemically synthesized
gcctcggagctcggaatcacaa

SEQ ID NO: 54388 - DNA, 22 bp, Artificial Sequence
  chemically synthesized
ggagctcggaatcacaacaata

SEQ ID NO: 54389 - DNA, 22 bp, Artificial Sequence
  chemically synthesized
ggaatcacaacaatagtaatag

SEQ ID NO: 54390 - DNA, 22 bp, Artificial Sequence
  chemically synthesized
tcatcataatgatgcgggcagg

SEQ ID NO: 54391 - DNA, 22 bp, Artificial Sequence
  chemically synthesized
ataatgaataaccgcagccgcc

SEQ ID NO: 54392 - DNA, 22 bp, Artificial Sequence
  chemically synthesized
cgggggaaatgcatttgcagag

SEQ ID NO: 54393 - DNA, 22 bp, Artificial Sequence
  chemically synthesized
gcagagatcccccaaagtaaaa

SEQ ID NO: 54394 - DNA, 22 bp, Artificial Sequence
  chemically synthesized
cagagatcccccaaagtaaaaa

SEQ ID NO: 54395 - DNA, 22 bp, Artificial Sequence
  chemically synthesized
gtggacacagaatgaatctcag

SEQ ID NO: 54396 - DNA, 22 bp, Artificial Sequence
  chemically synthesized
tggacacagaatgaatctcagg

SEQ ID NO: 54397 - DNA, 22 bp, Artificial Sequence
  chemically synthesized
aggacccgcgcttgaggtgtgt

SEQ ID NO: 54398 - DNA, 22 bp, Artificial Sequence
  chemically synthesized
gaggtgtgtgcggagatactga

SEQ ID NO: 54399 - DNA, 22 bp, Artificial Sequence
  chemically synthesized
aggtgtgtgcggagatactgag

SEQ ID NO: 54400 - DNA, 22 bp, Artificial Sequence
  chemically synthesized
agactgcaccaggttaaccagc

SEQ ID NO: 54401 - DNA, 22 bp, Artificial Sequence
  chemically synthesized
caccaggttaaccagccgggtt

SEQ ID NO: 54402 - DNA, 22 bp, Artificial Sequence
  chemically synthesized
accagccgggttttccaaacct

SEQ ID NO: 54403 - DNA, 22 bp, Artificial Sequence
  chemically synthesized
tccaaacctcacttcctttttc

SEQ ID NO: 54404 - DNA, 22 bp, Artificial Sequence
  chemically synthesized
ccaaacctcacttcctttttca

SEQ ID NO: 54405 - DNA, 22 bp, Artificial Sequence
  chemically synthesized
caaacctcacttcctttttcac

SEQ ID NO: 54406 - DNA, 22 bp, Artificial Sequence
  chemically synthesized
acttcctttttcaccaactggc

SEQ ID NO: 54407 - DNA, 22 bp, Artificial Sequence
  chemically synthesized
cctttttcaccaactggcaggc

SEQ ID NO: 54408 - DNA, 22 bp, Artificial Sequence
  chemically synthesized
ctttttcaccaactggcaggcc

SEQ ID NO: 54409 - DNA, 22 bp, Artificial Sequence
  chemically synthesized
tttcaccaactggcaggcccag

SEQ ID NO: 54410 - DNA, 22 bp, Artificial Sequence
  chemically synthesized
ttcaccaactggcaggcccagg

SEQ ID NO: 54411 - DNA, 22 bp, Artificial Sequence
  chemically synthesized
tcaccaactggcaggcccaggg

SEQ ID NO: 54412 - DNA, 22 bp, Artificial Sequence
  chemically synthesized
caccaactggcaggcccaggga

SEQ ID NO: 54413 - DNA, 22 bp, Artificial Sequence
  chemically synthesized
accaactggcaggcccagggaa

SEQ ID NO: 54414 - DNA, 22 bp, Artificial Sequence
  chemically synthesized
gcaggcccagggaaccgtcacc

SEQ ID NO: 54415 - DNA, 22 bp, Artificial Sequence
  chemically synthesized
gccgagctggacgggcatggag

SEQ ID NO: 54416 - DNA, 22 bp, Artificial Sequence
  chemically synthesized
gacgggcatggaggcagcagtc

SEQ ID NO: 54417 - DNA, 22 bp, Artificial Sequence
  chemically synthesized
gctgccctccgtctccgggccc

SEQ ID NO: 54418 - DNA, 22 bp, Artificial Sequence
  chemically synthesized
ccctccgtctccgggcccccgg

SEQ ID NO: 54419 - DNA, 22 bp, Artificial Sequence
  chemically synthesized
cgtctccgggcccccgggcccc

SEQ ID NO: 54420 - DNA, 22 bp, Artificial Sequence
  chemically synthesized
cgggcccccgggccccaaggcc

SEQ ID NO: 54421 - DNA, 22 bp, Artificial Sequence
  chemically synthesized
ctgcacgtgttcgcagcaagcg

SEQ ID NO: 54422 - DNA, 22 bp, Artificial Sequence
  chemically synthesized
cacgtgttcgcagcaagcgcgg

SEQ ID NO: 54423 - DNA, 22 bp, Artificial Sequence
  chemically synthesized
gcagcaagcgcggcgggagcct

SEQ ID NO: 54424 - DNA, 22 bp, Artificial Sequence
  chemically synthesized
cagccagcacgctgctcgcttt

SEQ ID NO: 54425 - DNA, 22 bp, Artificial Sequence
  chemically synthesized
ctcgctttgtgcctcagagtcc

SEQ ID NO: 54426 - DNA, 22 bp, Artificial Sequence
  chemically synthesized
gctttgtgcctcagagtccccg

SEQ ID NO: 54427 - DNA, 22 bp, Artificial Sequence
  chemically synthesized
tgtgcctcagagtccccgcgcc

SEQ ID NO: 54428 - DNA, 22 bp, Artificial Sequence
  chemically synthesized
gtgcctcagagtccccgcgccc

SEQ ID NO: 54429 - DNA, 22 bp, Artificial Sequence
  chemically synthesized
tgcctcagagtccccgcgccca

SEQ ID NO: 54430 - DNA, 22 bp, Artificial Sequence
  chemically synthesized
agagtccccgcgcccaacttca

SEQ ID NO: 54431 - DNA, 22 bp, Artificial Sequence
  chemically synthesized
cactttctgcacggtccaccct

SEQ ID NO: 54432 - DNA, 22 bp, Artificial Sequence
  chemically synthesized
actttctgcacggtccaccctt

SEQ ID NO: 54433 - DNA, 22 bp, Artificial Sequence
  chemically synthesized
tctgcacggtccacccttgccg

SEQ ID NO: 54434 - DNA, 22 bp, Artificial Sequence
  chemically synthesized
ctgcacggtccacccttgccgg

SEQ ID NO: 54435 - DNA, 22 bp, Artificial Sequence
  chemically synthesized
tgcacggtccacccttgccggg

SEQ ID NO: 54436 - DNA, 22 bp, Artificial Sequence
  chemically synthesized
cacggtccacccttgccggggc

SEQ ID NO: 54437 - DNA, 22 bp, Artificial Sequence
  chemically synthesized
gccggggcccctgccccgggcc

SEQ ID NO: 54438 - DNA, 22 bp, Artificial Sequence
  chemically synthesized
ccggggcccctgccccgggcct

SEQ ID NO: 54439 - DNA, 22 bp, Artificial Sequence
  chemically synthesized
ccccgggcctgtagcccccggc

SEQ ID NO: 54440 - DNA, 22 bp, Artificial Sequence
  chemically synthesized
tagcccccggctttgcttttgt

SEQ ID NO: 54441 - DNA, 22 bp, Artificial Sequence
  chemically synthesized
tgcttttgtttctttgcttttc

SEQ ID NO: 54442 - DNA, 22 bp, Artificial Sequence
  chemically synthesized
gcttttgtttctttgcttttcc

SEQ ID NO: 54443 - DNA, 22 bp, Artificial Sequence
  chemically synthesized
cttttgtttctttgcttttcct

SEQ ID NO: 54444 - DNA, 22 bp, Artificial Sequence
  chemically synthesized
ttgtttctttgcttttcctctc

SEQ ID NO: 54445 - DNA, 22 bp, Artificial Sequence
  chemically synthesized
tgtttctttgcttttcctctct

SEQ ID NO: 54446 - DNA, 22 bp, Artificial Sequence
  chemically synthesized
gtttctttgcttttcctctctg

SEQ ID NO: 54447 - DNA, 22 bp, Artificial Sequence
  chemically synthesized
tttctttgcttttcctctctga

SEQ ID NO: 54448 - DNA, 22 bp, Artificial Sequence
  chemically synthesized
ctttgcttttcctctctgaatt

SEQ ID NO: 54449 - DNA, 22 bp, Artificial Sequence
  chemically synthesized
tttgcttttcctctctgaattt

SEQ ID NO: 54450 - DNA, 22 bp, Artificial Sequence
  chemically synthesized
tgcttttcctctctgaatttca

SEQ ID NO: 54451 - DNA, 22 bp, Artificial Sequence
  chemically synthesized
gcttttcctctctgaatttcag

SEQ ID NO: 54452 - DNA, 22 bp, Artificial Sequence
  chemically synthesized
cttttcctctctgaatttcagc

SEQ ID NO: 54453 - DNA, 22 bp, Artificial Sequence
  chemically synthesized
ttcctctctgaatttcagcctc

SEQ ID NO: 54454 - DNA, 22 bp, Artificial Sequence
  chemically synthesized
tcctctctgaatttcagcctcc

SEQ ID NO: 54455 - DNA, 22 bp, Artificial Sequence
  chemically synthesized
cctctctgaatttcagcctccg

SEQ ID NO: 54456 - DNA, 22 bp, Artificial Sequence
  chemically synthesized
ctctctgaatttcagcctccgt

SEQ ID NO: 54457 - DNA, 22 bp, Artificial Sequence
  chemically synthesized
tctgaatttcagcctccgtttg

SEQ ID NO: 54458 - DNA, 22 bp, Artificial Sequence
  chemically synthesized
tgaatttcagcctccgtttgct

SEQ ID NO: 54459 - DNA, 22 bp, Artificial Sequence
  chemically synthesized
aatttcagcctccgtttgcttc

SEQ ID NO: 54460 - DNA, 22 bp, Artificial Sequence
  chemically synthesized
cagcctccgtttgcttctttac

SEQ ID NO: 54461 - DNA, 22 bp, Artificial Sequence
  chemically synthesized
agcctccgtttgcttctttacc

SEQ ID NO: 54462 - DNA, 22 bp, Artificial Sequence
  chemically synthesized
cgtttgcttctttaccctgtta

SEQ ID NO: 54463 - DNA, 22 bp, Artificial Sequence
  chemically synthesized
gcttctttaccctgttaagaca

SEQ ID NO: 54464 - DNA, 22 bp, Artificial Sequence
  chemically synthesized
cttctttaccctgttaagacaa

SEQ ID NO: 54465 - DNA, 22 bp, Artificial Sequence
  chemically synthesized
ctttaccctgttaagacaatca

SEQ ID NO: 54466 - DNA, 22 bp, Artificial Sequence
  chemically synthesized
tttaccctgttaagacaatcaa

SEQ ID NO: 54467 - DNA, 22 bp, Artificial Sequence
  chemically synthesized
taccctgttaagacaatcaagg

SEQ ID NO: 54468 - DNA, 22 bp, Artificial Sequence
  chemically synthesized
accctgttaagacaatcaagga

SEQ ID NO: 54469 - DNA, 22 bp, Artificial Sequence
  chemically synthesized
ccctgttaagacaatcaaggag

SEQ ID NO: 54470 - DNA, 22 bp, Artificial Sequence
  chemically synthesized
ttaagacaatcaaggagaagga

SEQ ID NO: 54471 - DNA, 22 bp, Artificial Sequence
  chemically synthesized
agacaatcaaggagaaggactt

SEQ ID NO: 54472 - DNA, 22 bp, Artificial Sequence
  chemically synthesized
ggaaagcaaacttgaagacaca

SEQ ID NO: 54473 - DNA, 22 bp, Artificial Sequence
  chemically synthesized
gaaagcaaacttgaagacacat

SEQ ID NO: 54474 - DNA, 22 bp, Artificial Sequence
  chemically synthesized
gaagacacatctccctttcccc

SEQ ID NO: 54475 - DNA, 22 bp, Artificial Sequence
  chemically synthesized
aagacacatctccctttccccc

SEQ ID NO: 54476 - DNA, 22 bp, Artificial Sequence
  chemically synthesized
cctttccccctccccctccgct

SEQ ID NO: 54477 - DNA, 22 bp, Artificial Sequence
  chemically synthesized
tccccctccccctccgctcccc

SEQ ID NO: 54478 - DNA, 22 bp, Artificial Sequence
  chemically synthesized
ccccctccccctccgctccccg

SEQ ID NO: 54479 - DNA, 22 bp, Artificial Sequence
  chemically synthesized
cccctccccctccgctccccgg

SEQ ID NO: 54480 - DNA, 22 bp, Artificial Sequence
  chemically synthesized
cccctccgctccccggcagctc

SEQ ID NO: 54481 - DNA, 22 bp, Artificial Sequence
  chemically synthesized
cgctccccggcagctctcgttt

SEQ ID NO: 54482 - DNA, 22 bp, Artificial Sequence
  chemically synthesized
cccggcagctctcgttttgctc

SEQ ID NO: 54483 - DNA, 22 bp, Artificial Sequence
  chemically synthesized
tcgttttgctcgctccttacca

SEQ ID NO: 54484 - DNA, 22 bp, Artificial Sequence
  chemically synthesized
gttttgctcgctccttaccaac

SEQ ID NO: 54485 - DNA, 22 bp, Artificial Sequence
  chemically synthesized
tgctcgctccttaccaacattt

SEQ ID NO: 54486 - DNA, 22 bp, Artificial Sequence
  chemically synthesized
gctcgctccttaccaacatttc

SEQ ID NO: 54487 - DNA, 22 bp, Artificial Sequence
  chemically synthesized
ctcgctccttaccaacatttcc

SEQ ID NO: 54488 - DNA, 22 bp, Artificial Sequence
  chemically synthesized
gctccttaccaacatttcctat

SEQ ID NO: 54489 - DNA, 22 bp, Artificial Sequence
  chemically synthesized
cttaccaacatttcctataagg

SEQ ID NO: 54490 - DNA, 22 bp, Artificial Sequence
  chemically synthesized
accaacatttcctataaggatt

SEQ ID NO: 54491 - DNA, 22 bp, Artificial Sequence
  chemically synthesized
ccaacatttcctataaggatta

SEQ ID NO: 54492 - DNA, 22 bp, Artificial Sequence
  chemically synthesized
cctataaggattatttttttcc

SEQ ID NO: 54493 - DNA, 22 bp, Artificial Sequence
  chemically synthesized
ctataaggattatttttttccc

SEQ ID NO: 54494 - DNA, 22 bp, Artificial Sequence
  chemically synthesized
taaggattatttttttccctta

SEQ ID NO: 54495 - DNA, 22 bp, Artificial Sequence
  chemically synthesized
tttttttcccttaaatttattc

SEQ ID NO: 54496 - DNA, 22 bp, Artificial Sequence
  chemically synthesized
ttttcccttaaatttattcttt

SEQ ID NO: 54497 - DNA, 22 bp, Artificial Sequence
  chemically synthesized
tttcccttaaatttattctttt

SEQ ID NO: 54498 - DNA, 22 bp, Artificial Sequence
  chemically synthesized
ttcccttaaatttattcttttg

SEQ ID NO: 54499 - DNA, 22 bp, Artificial Sequence
  chemically synthesized
tcccttaaatttattcttttgc

SEQ ID NO: 54500 - DNA, 22 bp, Artificial Sequence
  chemically synthesized
cccttaaatttattcttttgca

SEQ ID NO: 54501 - DNA, 22 bp, Artificial Sequence
  chemically synthesized
ccttaaatttattcttttgcaa

SEQ ID NO: 54502 - DNA, 22 bp, Artificial Sequence
  chemically synthesized
aaatttattcttttgcaactac

SEQ ID NO: 54503 - DNA, 22 bp, Artificial Sequence
  chemically synthesized
aatttattcttttgcaactaca

SEQ ID NO: 54504 - DNA, 22 bp, Artificial Sequence
  chemically synthesized
attcttttgcaactacacagag

SEQ ID NO: 54505 - DNA, 22 bp, Artificial Sequence
  chemically synthesized
ttcttttgcaactacacagaga

SEQ ID NO: 54506 - DNA, 22 bp, Artificial Sequence
  chemically synthesized
ttttgcaactacacagagagga

SEQ ID NO: 54507 - DNA, 22 bp, Artificial Sequence
  chemically synthesized
ttgcaactacacagagaggaaa

SEQ ID NO: 54508 - DNA, 22 bp, Artificial Sequence
  chemically synthesized
tgcaactacacagagaggaaag

SEQ ID NO: 54509 - DNA, 22 bp, Artificial Sequence
  chemically synthesized
gcaactacacagagaggaaaga

SEQ ID NO: 54510 - DNA, 22 bp, Artificial Sequence
  chemically synthesized
caactacacagagaggaaagag

SEQ ID NO: 54511 - DNA, 22 bp, Artificial Sequence
  chemically synthesized
cacagagaggaaagagatctca

SEQ ID NO: 54512 - DNA, 22 bp, Artificial Sequence
  chemically synthesized
agtctgtcactgagacattgag

SEQ ID NO: 54513 - DNA, 22 bp, Artificial Sequence
  chemically synthesized
tcactgagacattgagacgttc

SEQ ID NO: 54514 - DNA, 22 bp, Artificial Sequence
  chemically synthesized
agacattgagacgttccaggct

SEQ ID NO: 54515 - DNA, 22 bp, Artificial Sequence
  chemically synthesized
agacgttccaggctgtcttgct

SEQ ID NO: 54516 - DNA, 22 bp, Artificial Sequence
  chemically synthesized
caggctgtcttgctgtttgaac

SEQ ID NO: 54517 - DNA, 22 bp, Artificial Sequence
  chemically synthesized
tcttgctgtttgaacgtagaag

SEQ ID NO: 54518 - DNA, 22 bp, Artificial Sequence
  chemically synthesized
gctgtttgaacgtagaagcatt

SEQ ID NO: 54519 - DNA, 22 bp, Artificial Sequence
  chemically synthesized
ctgtttgaacgtagaagcattt

SEQ ID NO: 54520 - DNA, 22 bp, Artificial Sequence
  chemically synthesized
tttgaacgtagaagcattttat

SEQ ID NO: 54521 - DNA, 22 bp, Artificial Sequence
  chemically synthesized
gaacgtagaagcattttatttt

SEQ ID NO: 54522 - DNA, 22 bp, Artificial Sequence
  chemically synthesized
aacgtagaagcattttattttc

SEQ ID NO: 54523 - DNA, 22 bp, Artificial Sequence
  chemically synthesized
tattttctatttcttcctcccc

SEQ ID NO: 54524 - DNA, 22 bp, Artificial Sequence
  chemically synthesized
attttctatttcttcctcccct

SEQ ID NO: 54525 - DNA, 22 bp, Artificial Sequence
  chemically synthesized
ttttctatttcttcctcccctc

SEQ ID NO: 54526 - DNA, 22 bp, Artificial Sequence
  chemically synthesized
tctatttcttcctcccctcgta

SEQ ID NO: 54527 - DNA, 22 bp, Artificial Sequence
  chemically synthesized
ctatttcttcctcccctcgtag

SEQ ID NO: 54528 - DNA, 22 bp, Artificial Sequence
  chemically synthesized
tatttcttcctcccctcgtaga

SEQ ID NO: 54529 - DNA, 22 bp, Artificial Sequence
  chemically synthesized
tttcttcctcccctcgtagaga

SEQ ID NO: 54530 - DNA, 22 bp, Artificial Sequence
  chemically synthesized
cttcctcccctcgtagagagaa

SEQ ID NO: 54531 - DNA, 22 bp, Artificial Sequence
  chemically synthesized
ttcctcccctcgtagagagaat

SEQ ID NO: 54532 - DNA, 22 bp, Artificial Sequence
  chemically synthesized
cctcccctcgtagagagaattc

SEQ ID NO: 54533 - DNA, 22 bp, Artificial Sequence
  chemically synthesized
ctcccctcgtagagagaattcg

SEQ ID NO: 54534 - DNA, 22 bp, Artificial Sequence
  chemically synthesized
ccctcgtagagagaattcgcgg

SEQ ID NO: 54535 - DNA, 22 bp, Artificial Sequence
  chemically synthesized
gtagagagaattcgcggctaat

SEQ ID NO: 54536 - DNA, 22 bp, Artificial Sequence
  chemically synthesized
gcggctaattattatgattatt

SEQ ID NO: 54537 - DNA, 22 bp, Artificial Sequence
  chemically synthesized
attattatgattatttgcccac

SEQ ID NO: 54538 - DNA, 22 bp, Artificial Sequence
  chemically synthesized
ttatgattatttgcccactccc

SEQ ID NO: 54539 - DNA, 22 bp, Artificial Sequence
  chemically synthesized
tgattatttgcccactcccttc

SEQ ID NO: 54540 - DNA, 22 bp, Artificial Sequence
  chemically synthesized
tttgcccactcccttccacttc

SEQ ID NO: 54541 - DNA, 22 bp, Artificial Sequence
  chemically synthesized
gcccactcccttccacttcaat

SEQ ID NO: 54542 - DNA, 22 bp, Artificial Sequence
  chemically synthesized
cccactcccttccacttcaatc

SEQ ID NO: 54543 - DNA, 22 bp, Artificial Sequence
  chemically synthesized
ccttccacttcaatcgaggact

SEQ ID NO: 54544 - DNA, 22 bp, Artificial Sequence
  chemically synthesized
ccacttcaatcgaggactccct

SEQ ID NO: 54545 - DNA, 22 bp, Artificial Sequence
  chemically synthesized
cacttcaatcgaggactccctg

SEQ ID NO: 54546 - DNA, 22 bp, Artificial Sequence
  chemically synthesized
caatcgaggactccctgctttg

SEQ ID NO: 54547 - DNA, 22 bp, Artificial Sequence
  chemically synthesized
aatcgaggactccctgctttgt

SEQ ID NO: 54548 - DNA, 22 bp, Artificial Sequence
  chemically synthesized
cctgctttgtagccggagttta

SEQ ID NO: 54549 - DNA, 22 bp, Artificial Sequence
  chemically synthesized
ctttgtagccggagtttaggcc

SEQ ID NO: 54550 - DNA, 22 bp, Artificial Sequence
  chemically synthesized
tgtagccggagtttaggccgga

SEQ ID NO: 54551 - DNA, 22 bp, Artificial Sequence
  chemically synthesized
gtagccggagtttaggccggag

SEQ ID NO: 54552 - DNA, 22 bp, Artificial Sequence
  chemically synthesized
tagccggagtttaggccggagc

SEQ ID NO: 54553 - DNA, 22 bp, Artificial Sequence
  chemically synthesized
aggccggagcttagaaatgttg

SEQ ID NO: 54554 - DNA, 22 bp, Artificial Sequence
  chemically synthesized
ggccggagcttagaaatgttgg

SEQ ID NO: 54555 - DNA, 22 bp, Artificial Sequence
  chemically synthesized
agaaatgttggtattgttgggg

SEQ ID NO: 54556 - DNA, 22 bp, Artificial Sequence
  chemically synthesized
gaaatgttggtattgttggggc

SEQ ID NO: 54557 - DNA, 22 bp, Artificial Sequence
  chemically synthesized
gtattgttggggcgaaggagga

SEQ ID NO: 54558 - DNA, 22 bp, Artificial Sequence
  chemically synthesized
ttggggcgaaggaggatggagt

SEQ ID NO: 54559 - DNA, 22 bp, Artificial Sequence
  chemically synthesized
gggcgaaggaggatggagttga

SEQ ID NO: 54560 - DNA, 22 bp, Artificial Sequence
  chemically synthesized
aattgagggagggggtaaatgg

SEQ ID NO: 54561 - DNA, 22 bp, Artificial Sequence
  chemically synthesized
agggagggggtaaatggctgag

SEQ ID NO: 54562 - DNA, 22 bp, Artificial Sequence
  chemically synthesized
agggttaggaaggtttttaggg

SEQ ID NO: 54563 - DNA, 22 bp, Artificial Sequence
  chemically synthesized
ggaaggtttttagggaaagggg

SEQ ID NO: 54564 - DNA, 22 bp, Artificial Sequence
  chemically synthesized
ttagggaaaggggaatttgcat

SEQ ID NO: 54565 - DNA, 22 bp, Artificial Sequence
  chemically synthesized
tagggaaaggggaatttgcatt

SEQ ID NO: 54566 - DNA, 22 bp, Artificial Sequence
  chemically synthesized
agggaaaggggaatttgcatta

SEQ ID NO: 54567 - DNA, 22 bp, Artificial Sequence
  chemically synthesized
gggaaaggggaatttgcattaa

SEQ ID NO: 54568 - DNA, 22 bp, Artificial Sequence
  chemically synthesized
gcattaaaatgcagagaaatta

SEQ ID NO: 54569 - DNA, 22 bp, Artificial Sequence
  chemically synthesized
cattaaaatgcagagaaattat

SEQ ID NO: 54570 - DNA, 22 bp, Artificial Sequence
  chemically synthesized
aaatgcagagaaattatcagat

SEQ ID NO: 54571 - DNA, 22 bp, Artificial Sequence
  chemically synthesized
tcagatgcccagaaaggaaatg

SEQ ID NO: 54572 - DNA, 22 bp, Artificial Sequence
  chemically synthesized
attgccactgagaaaagatgtc

SEQ ID NO: 54573 - DNA, 22 bp, Artificial Sequence
  chemically synthesized
ccactgagaaaagatgtcaatg

SEQ ID NO: 54574 - DNA, 22 bp, Artificial Sequence
  chemically synthesized
agaaaagatgtcaatgcaaatc

SEQ ID NO: 54575 - DNA, 22 bp, Artificial Sequence
  chemically synthesized
caccatgagaattgtattttca

SEQ ID NO: 54576 - DNA, 22 bp, Artificial Sequence
  chemically synthesized
tattttcatattttctttgtgt

SEQ ID NO: 54577 - DNA, 22 bp, Artificial Sequence
  chemically synthesized
tcatattttctttgtgtcccac

SEQ ID NO: 54578 - DNA, 22 bp, Artificial Sequence
  chemically synthesized
catattttctttgtgtcccact

SEQ ID NO: 54579 - DNA, 22 bp, Artificial Sequence
  chemically synthesized
atattttctttgtgtcccactt

SEQ ID NO: 54580 - DNA, 22 bp, Artificial Sequence
  chemically synthesized
tctttgtgtcccactttgtctg

SEQ ID NO: 54581 - DNA, 22 bp, Artificial Sequence
  chemically synthesized
ctttgtgtcccactttgtctga

SEQ ID NO: 54582 - DNA, 22 bp, Artificial Sequence
  chemically synthesized
tttgtgtcccactttgtctgat

SEQ ID NO: 54583 - DNA, 22 bp, Artificial Sequence
  chemically synthesized
tgtgtcccactttgtctgattt

SEQ ID NO: 54584 - DNA, 22 bp, Artificial Sequence
  chemically synthesized
gtgtcccactttgtctgatttt

SEQ ID NO: 54585 - DNA, 22 bp, Artificial Sequence
  chemically synthesized
tgtcccactttgtctgattttt

SEQ ID NO: 54586 - DNA, 22 bp, Artificial Sequence
  chemically synthesized
tgtctgatttttaataatatac

SEQ ID NO: 54587 - DNA, 22 bp, Artificial Sequence
  chemically synthesized
gtctgatttttaataatatacc

SEQ ID NO: 54588 - DNA, 22 bp, Artificial Sequence
  chemically synthesized
tctgatttttaataatatacca

SEQ ID NO: 54589 - DNA, 22 bp, Artificial Sequence
  chemically synthesized
atttttaataatataccagcaa

SEQ ID NO: 54590 - DNA, 22 bp, Artificial Sequence
  chemically synthesized
ttaataatataccagcaatgat

SEQ ID NO: 54591 - DNA, 22 bp, Artificial Sequence
  chemically synthesized
taataatataccagcaatgata

SEQ ID NO: 54592 - DNA, 22 bp, Artificial Sequence
  chemically synthesized
aataatataccagcaatgataa

SEQ ID NO: 54593 - DNA, 22 bp, Artificial Sequence
  chemically synthesized
ataatataccagcaatgataaa

SEQ ID NO: 54594 - DNA, 22 bp, Artificial Sequence
  chemically synthesized
tggtatttctctgaacaccact

SEQ ID NO: 54595 - DNA, 22 bp, Artificial Sequence
  chemically synthesized
ggtatttctctgaacaccacta

SEQ ID NO: 54596 - DNA, 22 bp, Artificial Sequence
  chemically synthesized
gtatttctctgaacaccactag

SEQ ID NO: 54597 - DNA, 22 bp, Artificial Sequence
  chemically synthesized
ctctgaacaccactagccaaat

SEQ ID NO: 54598 - DNA, 22 bp, Artificial Sequence
  chemically synthesized
tctgaacaccactagccaaatg

SEQ ID NO: 54599 - DNA, 22 bp, Artificial Sequence
  chemically synthesized
tgaacaccactagccaaatgtt

SEQ ID NO: 54600 - DNA, 22 bp, Artificial Sequence
  chemically synthesized
aacaccactagccaaatgtttt

SEQ ID NO: 54601 - DNA, 22 bp, Artificial Sequence
  chemically synthesized
gccaaatgttttgcaaggagac

SEQ ID NO: 54602 - DNA, 22 bp, Artificial Sequence
  chemically synthesized
tgcaaggagaccgatgttaaac

SEQ ID NO: 54603 - DNA, 22 bp, Artificial Sequence
  chemically synthesized
gcaaggagaccgatgttaaacg

SEQ ID NO: 54604 - DNA, 22 bp, Artificial Sequence
  chemically synthesized
caaggagaccgatgttaaacgt

SEQ ID NO: 54605 - DNA, 22 bp, Artificial Sequence
  chemically synthesized
aacgtatttcatacattagaat

SEQ ID NO: 54606 - DNA, 22 bp, Artificial Sequence
  chemically synthesized
catacattagaatataattctt

SEQ ID NO: 54607 - DNA, 22 bp, Artificial Sequence
  chemically synthesized
atacattagaatataattcttg

SEQ ID NO: 54608 - DNA, 22 bp, Artificial Sequence
  chemically synthesized
gaatataattcttgttaattag

SEQ ID NO: 54609 - DNA, 22 bp, Artificial Sequence
  chemically synthesized
ttgttaattagcaataatttac

SEQ ID NO: 54610 - DNA, 22 bp, Artificial Sequence
  chemically synthesized
gttaattagcaataatttacgt

SEQ ID NO: 54611 - DNA, 22 bp, Artificial Sequence
  chemically synthesized
ttaattagcaataatttacgtt

SEQ ID NO: 54612 - DNA, 22 bp, Artificial Sequence
  chemically synthesized
attagcaataatttacgttaag

SEQ ID NO: 54613 - DNA, 22 bp, Artificial Sequence
  chemically synthesized
gcaataatttacgttaagagca

SEQ ID NO: 54614 - DNA, 22 bp, Artificial Sequence
  chemically synthesized
acgttaagagcatagaaaatgt

SEQ ID NO: 54615 - DNA, 22 bp, Artificial Sequence
  chemically synthesized
cgttaagagcatagaaaatgtt

SEQ ID NO: 54616 - DNA, 22 bp, Artificial Sequence
  chemically synthesized
agagcatagaaaatgttgaggt

SEQ ID NO: 54617 - DNA, 22 bp, Artificial Sequence
  chemically synthesized
aggttacaggttttatatctgt

SEQ ID NO: 54618 - DNA, 22 bp, Artificial Sequence
  chemically synthesized
caggttttatatctgtacattt

SEQ ID NO: 54619 - DNA, 22 bp, Artificial Sequence
  chemically synthesized
tatatctgtacatttgatcatc

SEQ ID NO: 54620 - DNA, 22 bp, Artificial Sequence
  chemically synthesized
atatctgtacatttgatcatct

SEQ ID NO: 54621 - DNA, 22 bp, Artificial Sequence
  chemically synthesized
tatctgtacatttgatcatctt

SEQ ID NO: 54622 - DNA, 22 bp, Artificial Sequence
  chemically synthesized
tacatttgatcatcttgttatt

SEQ ID NO: 54623 - DNA, 22 bp, Artificial Sequence
  chemically synthesized
gatcatcttgttattttcaaga

SEQ ID NO: 54624 - DNA, 22 bp, Artificial Sequence
  chemically synthesized
atcatcttgttattttcaagaa

SEQ ID NO: 54625 - DNA, 22 bp, Artificial Sequence
  chemically synthesized
gttattttcaagaactttgcct

SEQ ID NO: 54626 - DNA, 22 bp, Artificial Sequence
  chemically synthesized
ttattttcaagaactttgcctc

SEQ ID NO: 54627 - DNA, 22 bp, Artificial Sequence
  chemically synthesized
ttttcaagaactttgcctccta

SEQ ID NO: 54628 - DNA, 22 bp, Artificial Sequence
  chemically synthesized
tcaagaactttgcctcctataa

SEQ ID NO: 54629 - DNA, 22 bp, Artificial Sequence
  chemically synthesized
caagaactttgcctcctataaa

SEQ ID NO: 54630 - DNA, 22 bp, Artificial Sequence
  chemically synthesized
aagaactttgcctcctataaaa

SEQ ID NO: 54631 - DNA, 22 bp, Artificial Sequence
  chemically synthesized
tgcctcctataaaattaattag

SEQ ID NO: 54632 - DNA, 22 bp, Artificial Sequence
  chemically synthesized
gcctcctataaaattaattagg

SEQ ID NO: 54633 - DNA, 22 bp, Artificial Sequence
  chemically synthesized
cctcctataaaattaattaggt

SEQ ID NO: 54634 - DNA, 22 bp, Artificial Sequence
  chemically synthesized
ctataaaattaattaggtgaaa

SEQ ID NO: 54635 - DNA, 22 bp, Artificial Sequence
  chemically synthesized
taaaattaattaggtgaaatgt

SEQ ID NO: 54636 - DNA, 22 bp, Artificial Sequence
  chemically synthesized
attaggtgaaatgtggaggtgt

SEQ ID NO: 54637 - DNA, 22 bp, Artificial Sequence
  chemically synthesized
ggtgaaatgtggaggtgtaatc

SEQ ID NO: 54638 - DNA, 22 bp, Artificial Sequence
  chemically synthesized
tgaattaccacttcatttcccg

SEQ ID NO: 54639 - DNA, 22 bp, Artificial Sequence
  chemically synthesized
aattaccacttcatttcccggt

SEQ ID NO: 54640 - DNA, 22 bp, Artificial Sequence
  chemically synthesized
ccacttcatttcccggttttga

SEQ ID NO: 54641 - DNA, 22 bp, Artificial Sequence
  chemically synthesized
catttcccggttttgattgtaa

SEQ ID NO: 54642 - DNA, 22 bp, Artificial Sequence
  chemically synthesized
atttcccggttttgattgtaaa

SEQ ID NO: 54643 - DNA, 22 bp, Artificial Sequence
  chemically synthesized
cccggttttgattgtaaatcag

SEQ ID NO: 54644 - DNA, 22 bp, Artificial Sequence
  chemically synthesized
ccggttttgattgtaaatcagt

SEQ ID NO: 54645 - DNA, 22 bp, Artificial Sequence
  chemically synthesized
tgattgtaaatcagttcagtca

SEQ ID NO: 54646 - DNA, 22 bp, Artificial Sequence
  chemically synthesized
gattgtaaatcagttcagtcac

SEQ ID NO: 54647 - DNA, 22 bp, Artificial Sequence
  chemically synthesized
attgtaaatcagttcagtcact

SEQ ID NO: 54648 - DNA, 22 bp, Artificial Sequence
  chemically synthesized
taaatcagttcagtcactacat

SEQ ID NO: 54649 - DNA, 22 bp, Artificial Sequence
  chemically synthesized
agtcactacatttagaagactt

SEQ ID NO: 54650 - DNA, 22 bp, Artificial Sequence
  chemically synthesized
catttagaagactttaaccaag

SEQ ID NO: 54651 - DNA, 22 bp, Artificial Sequence
  chemically synthesized
agaagactttaaccaagtctgt

SEQ ID NO: 54652 - DNA, 22 bp, Artificial Sequence
  chemically synthesized
gaagactttaaccaagtctgtt

SEQ ID NO: 54653 - DNA, 22 bp, Artificial Sequence
  chemically synthesized
taaccaagtctgttttgaacca

SEQ ID NO: 54654 - DNA, 22 bp, Artificial Sequence
  chemically synthesized
aaccaagtctgttttgaaccac

SEQ ID NO: 54655 - DNA, 22 bp, Artificial Sequence
  chemically synthesized
accaagtctgttttgaaccaca

SEQ ID NO: 54656 - DNA, 22 bp, Artificial Sequence
  chemically synthesized
ttttgaaccacattacctttaa

SEQ ID NO: 54657 - DNA, 22 bp, Artificial Sequence
  chemically synthesized
tgaaccacattacctttaacta

SEQ ID NO: 54658 - DNA, 22 bp, Artificial Sequence
  chemically synthesized
gaaccacattacctttaactat

SEQ ID NO: 54659 - DNA, 22 bp, Artificial Sequence
  chemically synthesized
aaccacattacctttaactatt

SEQ ID NO: 54660 - DNA, 22 bp, Artificial Sequence
  chemically synthesized
cctttaactatttgatacctag

SEQ ID NO: 54661 - DNA, 22 bp, Artificial Sequence
  chemically synthesized
taactatttgatacctaggaga

SEQ ID NO: 54662 - DNA, 22 bp, Artificial Sequence
  chemically synthesized
aactatttgatacctaggagaa

SEQ ID NO: 54663 - DNA, 22 bp, Artificial Sequence
  chemically synthesized
actatttgatacctaggagaat

SEQ ID NO: 54664 - DNA, 22 bp, Artificial Sequence
  chemically synthesized
tttgatacctaggagaatattt

SEQ ID NO: 54665 - DNA, 22 bp, Artificial Sequence
  chemically synthesized
gatacctaggagaatatttcct

SEQ ID NO: 54666 - DNA, 22 bp, Artificial Sequence
  chemically synthesized
atacctaggagaatatttcctt

SEQ ID NO: 54667 - DNA, 22 bp, Artificial Sequence
  chemically synthesized
ggagaatatttccttttgcacc

SEQ ID NO: 54668 - DNA, 22 bp, Artificial Sequence
  chemically synthesized
ccttttgcacctaaataatatt

SEQ ID NO: 54669 - DNA, 22 bp, Artificial Sequence
  chemically synthesized
cttttgcacctaaataatattc

SEQ ID NO: 54670 - DNA, 22 bp, Artificial Sequence
  chemically synthesized
ttgcacctaaataatattccca

SEQ ID NO: 54671 - DNA, 22 bp, Artificial Sequence
  chemically synthesized
tgcacctaaataatattcccac

SEQ ID NO: 54672 - DNA, 22 bp, Artificial Sequence
  chemically synthesized
gcacctaaataatattcccact

SEQ ID NO: 54673 - DNA, 22 bp, Artificial Sequence
  chemically synthesized
cacctaaataatattcccactt

SEQ ID NO: 54674 - DNA, 22 bp, Artificial Sequence
  chemically synthesized
aataatattcccacttttagaa

SEQ ID NO: 54675 - DNA, 22 bp, Artificial Sequence
  chemically synthesized
ccacttttagaaatgtgtcaga

SEQ ID NO: 54676 - DNA, 22 bp, Artificial Sequence
  chemically synthesized
ttagaaatgtgtcagaccttgg

SEQ ID NO: 54677 - DNA, 22 bp, Artificial Sequence
  chemically synthesized
tagaaatgtgtcagaccttggg

SEQ ID NO: 54678 - DNA, 22 bp, Artificial Sequence
  chemically synthesized
agaaatgtgtcagaccttggga

SEQ ID NO: 54679 - DNA, 22 bp, Artificial Sequence
  chemically synthesized
gaaatgtgtcagaccttgggaa

SEQ ID NO: 54680 - DNA, 22 bp, Artificial Sequence
  chemically synthesized
gggaacaaaaaaaaaaaaaaaa

SEQ ID NO: 54681 - DNA, 22 bp, Artificial Sequence
  chemically synthesized
ggaacaaaaaaaaaaaaaaaag

SEQ ID NO: 54682 - DNA, 22 bp, Artificial Sequence
  chemically synthesized
aacggtggaaataaaaaatttt

SEQ ID NO: 54683 - DNA, 22 bp, Artificial Sequence
  chemically synthesized
acggtggaaataaaaaattttt

SEQ ID NO: 54684 - DNA, 22 bp, Artificial Sequence
  chemically synthesized
ttttttttgcaaaggttctatg

SEQ ID NO: 54685 - DNA, 22 bp, Artificial Sequence
  chemically synthesized
tttttttgcaaaggttctatgt

SEQ ID NO: 54686 - DNA, 22 bp, Artificial Sequence
  chemically synthesized
ttttttgcaaaggttctatgta

SEQ ID NO: 54687 - DNA, 22 bp, Artificial Sequence
  chemically synthesized
tttttgcaaaggttctatgtac

SEQ ID NO: 54688 - DNA, 22 bp, Artificial Sequence
  chemically synthesized
ttttgcaaaggttctatgtact

SEQ ID NO: 54689 - DNA, 22 bp, Artificial Sequence
  chemically synthesized
tttgcaaaggttctatgtacta

SEQ ID NO: 54690 - DNA, 22 bp, Artificial Sequence
  chemically synthesized
ttgcaaaggttctatgtactag

SEQ ID NO: 54691 - DNA, 22 bp, Artificial Sequence
  chemically synthesized
tgcaaaggttctatgtactagt

SEQ ID NO: 54692 - DNA, 22 bp, Artificial Sequence
  chemically synthesized
gcaaaggttctatgtactagta

SEQ ID NO: 54693 - DNA, 22 bp, Artificial Sequence
  chemically synthesized
caaaggttctatgtactagtaa

SEQ ID NO: 54694 - DNA, 22 bp, Artificial Sequence
  chemically synthesized
tatgtactagtaagtttgataa

SEQ ID NO: 54695 - DNA, 22 bp, Artificial Sequence
  chemically synthesized
tgtactagtaagtttgataaaa

SEQ ID NO: 54696 - DNA, 22 bp, Artificial Sequence
  chemically synthesized
gtaagtttgataaaatattttc

SEQ ID NO: 54697 - DNA, 22 bp, Artificial Sequence
  chemically synthesized
gataaaatattttcctaagtct

SEQ ID NO: 54698 - DNA, 22 bp, Artificial Sequence
  chemically synthesized
ataaaatattttcctaagtctt

SEQ ID NO: 54699 - DNA, 22 bp, Artificial Sequence
  chemically synthesized
tcctaagtcttccttcagtctg

SEQ ID NO: 54700 - DNA, 22 bp, Artificial Sequence
  chemically synthesized
cctaagtcttccttcagtctgt

SEQ ID NO: 54701 - DNA, 22 bp, Artificial Sequence
  chemically synthesized
ctaagtcttccttcagtctgta

SEQ ID NO: 54702 - DNA, 22 bp, Artificial Sequence
  chemically synthesized
agtcttccttcagtctgtaaac

SEQ ID NO: 54703 - DNA, 22 bp, Artificial Sequence
  chemically synthesized
ccttcagtctgtaaacctcaga

SEQ ID NO: 54704 - DNA, 22 bp, Artificial Sequence
  chemically synthesized
cttcagtctgtaaacctcagaa

SEQ ID NO: 54705 - DNA, 22 bp, Artificial Sequence
  chemically synthesized
cagtctgtaaacctcagaactt

SEQ ID NO: 54706 - DNA, 22 bp, Artificial Sequence
  chemically synthesized
agtctgtaaacctcagaacttg

SEQ ID NO: 54707 - DNA, 22 bp, Artificial Sequence
  chemically synthesized
taaacctcagaacttgtagcta

SEQ ID NO: 54708 - DNA, 22 bp, Artificial Sequence
  chemically synthesized
agaacttgtagctaatgctaaa

SEQ ID NO: 54709 - DNA, 22 bp, Artificial Sequence
  chemically synthesized
gtagctaatgctaaacaaaaaa

SEQ ID NO: 54710 - DNA, 22 bp, Artificial Sequence
  chemically synthesized
tagctaatgctaaacaaaaaag

SEQ ID NO: 54711 - DNA, 22 bp, Artificial Sequence
  chemically synthesized
atgctaaacaaaaaagccacat

SEQ ID NO: 54712 - DNA, 22 bp, Artificial Sequence
  chemically synthesized
aacaaaaaagccacatttatca

SEQ ID NO: 54713 - DNA, 22 bp, Artificial Sequence
  chemically synthesized
atcaatgtgtacttaaaatcct

SEQ ID NO: 54714 - DNA, 22 bp, Artificial Sequence
  chemically synthesized
tcaatgtgtacttaaaatcctt

SEQ ID NO: 54715 - DNA, 22 bp, Artificial Sequence
  chemically synthesized
aaaatccttaattcagacaaca

SEQ ID NO: 54716 - DNA, 22 bp, Artificial Sequence
  chemically synthesized
aaatccttaattcagacaacag

SEQ ID NO: 54717 - DNA, 22 bp, Artificial Sequence
  chemically synthesized
aattcagacaacaggaatattt

SEQ ID NO: 54718 - DNA, 22 bp, Artificial Sequence
  chemically synthesized
attcagacaacaggaatatttt

SEQ ID NO: 54719 - DNA, 22 bp, Artificial Sequence
  chemically synthesized
agacaacaggaatattttgaga

SEQ ID NO: 54720 - DNA, 22 bp, Artificial Sequence
  chemically synthesized
tgagaatgagttccctattcct

SEQ ID NO: 54721 - DNA, 22 bp, Artificial Sequence
  chemically synthesized
gagaatgagttccctattcctc

SEQ ID NO: 54722 - DNA, 22 bp, Artificial Sequence
  chemically synthesized
agaatgagttccctattcctca

SEQ ID NO: 54723 - DNA, 22 bp, Artificial Sequence
  chemically synthesized
cctattcctcacttggtcaaaa

SEQ ID NO: 54724 - DNA, 22 bp, Artificial Sequence
  chemically synthesized
ttcctcacttggtcaaaatgga

SEQ ID NO: 54725 - DNA, 22 bp, Artificial Sequence
  chemically synthesized
ctcacttggtcaaaatggaagc

SEQ ID NO: 54726 - DNA, 22 bp, Artificial Sequence
  chemically synthesized
acttggtcaaaatggaagcaaa

SEQ ID NO: 54727 - DNA, 22 bp, Artificial Sequence
  chemically synthesized
ggtcaaaatggaagcaaatgta

SEQ ID NO: 54728 - DNA, 22 bp, Artificial Sequence
  chemically synthesized
gtcaaaatggaagcaaatgtaa

SEQ ID NO: 54729 - DNA, 22 bp, Artificial Sequence
  chemically synthesized
aggcacaatgcagaggcacttc

SEQ ID NO: 54730 - DNA, 22 bp, Artificial Sequence
  chemically synthesized
ctgtttgtcttcttttatttga

SEQ ID NO: 54731 - DNA, 22 bp, Artificial Sequence
  chemically synthesized
tgtttgtcttcttttatttgaa

SEQ ID NO: 54732 - DNA, 22 bp, Artificial Sequence
  chemically synthesized
tttgtcttcttttatttgaaaa

SEQ ID NO: 54733 - DNA, 22 bp, Artificial Sequence
  chemically synthesized
gtcttcttttatttgaaaagta

SEQ ID NO: 54734 - DNA, 22 bp, Artificial Sequence
  chemically synthesized
tcttcttttatttgaaaagtat

SEQ ID NO: 54735 - DNA, 22 bp, Artificial Sequence
  chemically synthesized
cttttatttgaaaagtatgcat

SEQ ID NO: 54736 - DNA, 22 bp, Artificial Sequence
  chemically synthesized
ttttatttgaaaagtatgcata

SEQ ID NO: 54737 - DNA, 22 bp, Artificial Sequence
  chemically synthesized
ttatttgaaaagtatgcatatg

SEQ ID NO: 54738 - DNA, 22 bp, Artificial Sequence
  chemically synthesized
tatttgaaaagtatgcatatgt

SEQ ID NO: 54739 - DNA, 22 bp, Artificial Sequence
  chemically synthesized
atttgaaaagtatgcatatgta

SEQ ID NO: 54740 - DNA, 22 bp, Artificial Sequence
  chemically synthesized
tttgaaaagtatgcatatgtat

SEQ ID NO: 54741 - DNA, 22 bp, Artificial Sequence
  chemically synthesized
gaaaagtatgcatatgtattct

SEQ ID NO: 54742 - DNA, 22 bp, Artificial Sequence
  chemically synthesized
aaaagtatgcatatgtattctg

SEQ ID NO: 54743 - DNA, 22 bp, Artificial Sequence
  chemically synthesized
tgtatttatcttttggccagta

SEQ ID NO: 54744 - DNA, 22 bp, Artificial Sequence
  chemically synthesized
tatttatcttttggccagtatg

SEQ ID NO: 54745 - DNA, 22 bp, Artificial Sequence
  chemically synthesized
atcttttggccagtatgttggg

SEQ ID NO: 54746 - DNA, 22 bp, Artificial Sequence
  chemically synthesized
tcttttggccagtatgttgggc

SEQ ID NO: 54747 - DNA, 22 bp, Artificial Sequence
  chemically synthesized
ttggccagtatgttgggcaaag

SEQ ID NO: 54748 - DNA, 22 bp, Artificial Sequence
  chemically synthesized
tggccagtatgttgggcaaaga

SEQ ID NO: 54749 - DNA, 22 bp, Artificial Sequence
  chemically synthesized
ggccagtatgttgggcaaagaa

SEQ ID NO: 54750 - DNA, 22 bp, Artificial Sequence
  chemically synthesized
gccagtatgttgggcaaagaaa

SEQ ID NO: 54751 - DNA, 22 bp, Artificial Sequence
  chemically synthesized
ggcaaagaaacataagtgctta

SEQ ID NO: 54752 - DNA, 22 bp, Artificial Sequence
  chemically synthesized
actttactgtctttattagtag

SEQ ID NO: 54753 - DNA, 22 bp, Artificial Sequence
  chemically synthesized
ctttactgtctttattagtagg

SEQ ID NO: 54754 - DNA, 22 bp, Artificial Sequence
  chemically synthesized
tactgtctttattagtaggaat

SEQ ID NO: 54755 - DNA, 22 bp, Artificial Sequence
  chemically synthesized
actgtctttattagtaggaata

SEQ ID NO: 54756 - DNA, 22 bp, Artificial Sequence
  chemically synthesized
ctgtctttattagtaggaatat

SEQ ID NO: 54757 - DNA, 22 bp, Artificial Sequence
  chemically synthesized
tctttattagtaggaatataac

SEQ ID NO: 54758 - DNA, 22 bp, Artificial Sequence
  chemically synthesized
tattagtaggaatataaccttc

SEQ ID NO: 54759 - DNA, 22 bp, Artificial Sequence
  chemically synthesized
attagtaggaatataaccttca

SEQ ID NO: 54760 - DNA, 22 bp, Artificial Sequence
  chemically synthesized
ttagtaggaatataaccttcat

SEQ ID NO: 54761 - DNA, 22 bp, Artificial Sequence
  chemically synthesized
gtaggaatataaccttcatatt

SEQ ID NO: 54762 - DNA, 22 bp, Artificial Sequence
  chemically synthesized
catattcctgtggtgaccttat

SEQ ID NO: 54763 - DNA, 22 bp, Artificial Sequence
  chemically synthesized
atattcctgtggtgaccttatg

SEQ ID NO: 54764 - DNA, 22 bp, Artificial Sequence
  chemically synthesized
ctgtggtgaccttatgttaaat

SEQ ID NO: 54765 - DNA, 22 bp, Artificial Sequence
  chemically synthesized
tggtgaccttatgttaaattag

SEQ ID NO: 54766 - DNA, 22 bp, Artificial Sequence
  chemically synthesized
atgttaaattaggaggagtacc

SEQ ID NO: 54767 - DNA, 22 bp, Artificial Sequence
  chemically synthesized
tgttaaattaggaggagtacca

SEQ ID NO: 54768 - DNA, 22 bp, Artificial Sequence
  chemically synthesized
aattaggaggagtaccagaggc

SEQ ID NO: 54769 - DNA, 22 bp, Artificial Sequence
  chemically synthesized
ggaggagtaccagaggctagaa

SEQ ID NO: 54770 - DNA, 22 bp, Artificial Sequence
  chemically synthesized
gaaattatgagatgtcctactt

SEQ ID NO: 54771 - DNA, 22 bp, Artificial Sequence
  chemically synthesized
tgagatgtcctacttgagcaca

SEQ ID NO: 54772 - DNA, 22 bp, Artificial Sequence
  chemically synthesized
cttgagcacaggtgcagctagg

SEQ ID NO: 54773 - DNA, 22 bp, Artificial Sequence
  chemically synthesized
gagcacaggtgcagctaggcag

SEQ ID NO: 54774 - DNA, 22 bp, Artificial Sequence
  chemically synthesized
agcacaggtgcagctaggcagg

SEQ ID NO: 54775 - DNA, 22 bp, Artificial Sequence
  chemically synthesized
ggcagggctctctcaatattat

SEQ ID NO: 54776 - DNA, 22 bp, Artificial Sequence
  chemically synthesized
tctcaatattatttcacctagc

SEQ ID NO: 54777 - DNA, 22 bp, Artificial Sequence
  chemically synthesized
tcaatattatttcacctagcac

SEQ ID NO: 54778 - DNA, 22 bp, Artificial Sequence
  chemically synthesized
aatattatttcacctagcacat

SEQ ID NO: 54779 - DNA, 22 bp, Artificial Sequence
  chemically synthesized
tttcacctagcacatctgggag

SEQ ID NO: 54780 - DNA, 22 bp, Artificial Sequence
  chemically synthesized
cacctagcacatctgggagtta

SEQ ID NO: 54781 - DNA, 22 bp, Artificial Sequence
  chemically synthesized
acctagcacatctgggagttac

SEQ ID NO: 54782 - DNA, 22 bp, Artificial Sequence
  chemically synthesized
gcacatctgggagttactccag

SEQ ID NO: 54783 - DNA, 22 bp, Artificial Sequence
  chemically synthesized
ggagttactccagatcttcccc

SEQ ID NO: 54784 - DNA, 22 bp, Artificial Sequence
  chemically synthesized
ctccagatcttccccctcaata

SEQ ID NO: 54785 - DNA, 22 bp, Artificial Sequence
  chemically synthesized
cagatcttccccctcaatattc

SEQ ID NO: 54786 - DNA, 22 bp, Artificial Sequence
  chemically synthesized
ccccctcaatattcagcctggg

SEQ ID NO: 54787 - DNA, 22 bp, Artificial Sequence
  chemically synthesized
cccctcaatattcagcctgggt

SEQ ID NO: 54788 - DNA, 22 bp, Artificial Sequence
  chemically synthesized
aatattcagcctgggtagggtt

SEQ ID NO: 54789 - DNA, 22 bp, Artificial Sequence
  chemically synthesized
agcctgggtagggttgaaataa

SEQ ID NO: 54790 - DNA, 22 bp, Artificial Sequence
  chemically synthesized
ggtagggttgaaataaatttaa

SEQ ID NO: 54791 - DNA, 22 bp, Artificial Sequence
  chemically synthesized
aaataaatttaacctgagttca

SEQ ID NO: 54792 - DNA, 22 bp, Artificial Sequence
  chemically synthesized
aacctgagttcactggattttt

SEQ ID NO: 54793 - DNA, 22 bp, Artificial Sequence
  chemically synthesized
acctgagttcactggatttttg

SEQ ID NO: 54794 - DNA, 22 bp, Artificial Sequence
  chemically synthesized
agttcactggatttttgcactt

SEQ ID NO: 54795 - DNA, 22 bp, Artificial Sequence
  chemically synthesized
actggatttttgcactttatca

SEQ ID NO: 54796 - DNA, 22 bp, Artificial Sequence
  chemically synthesized
gatttttgcactttatcaaaat

SEQ ID NO: 54797 - DNA, 22 bp, Artificial Sequence
  chemically synthesized
ttgcactttatcaaaatctgtt

SEQ ID NO: 54798 - DNA, 22 bp, Artificial Sequence
  chemically synthesized
tgcactttatcaaaatctgttc

SEQ ID NO: 54799 - DNA, 22 bp, Artificial Sequence
  chemically synthesized
gcactttatcaaaatctgttcc

SEQ ID NO: 54800 - DNA, 22 bp, Artificial Sequence
  chemically synthesized
cactttatcaaaatctgttcca

SEQ ID NO: 54801 - DNA, 22 bp, Artificial Sequence
  chemically synthesized
tatcaaaatctgttccaatatt

SEQ ID NO: 54802 - DNA, 22 bp, Artificial Sequence
  chemically synthesized
atcaaaatctgttccaatattc

SEQ ID NO: 54803 - DNA, 22 bp, Artificial Sequence
  chemically synthesized
tcaaaatctgttccaatattct

SEQ ID NO: 54804 - DNA, 22 bp, Artificial Sequence
  chemically synthesized
ttccaatattctacactcaaat

SEQ ID NO: 54805 - DNA, 22 bp, Artificial Sequence
  chemically synthesized
caatattctacactcaaattaa

SEQ ID NO: 54806 - DNA, 22 bp, Artificial Sequence
  chemically synthesized
tacactcaaattaaaatctatt

SEQ ID NO: 54807 - DNA, 22 bp, Artificial Sequence
  chemically synthesized
cactcaaattaaaatctatttt

SEQ ID NO: 54808 - DNA, 22 bp, Artificial Sequence
  chemically synthesized
aaattaaaatctattttttgat

SEQ ID NO: 54809 - DNA, 22 bp, Artificial Sequence
  chemically synthesized
aaatctattttttgattctctg

SEQ ID NO: 54810 - DNA, 22 bp, Artificial Sequence
  chemically synthesized
ttttttgattctctgtggcttt

SEQ ID NO: 54811 - DNA, 22 bp, Artificial Sequence
  chemically synthesized
tttgattctctgtggctttaag

SEQ ID NO: 54812 - DNA, 22 bp, Artificial Sequence
  chemically synthesized
ttgattctctgtggctttaagt

SEQ ID NO: 54813 - DNA, 22 bp, Artificial Sequence
  chemically synthesized
tgattctctgtggctttaagtt

SEQ ID NO: 54814 - DNA, 22 bp, Artificial Sequence
  chemically synthesized
gattctctgtggctttaagttc

SEQ ID NO: 54815 - DNA, 22 bp, Artificial Sequence
  chemically synthesized
attctctgtggctttaagttca

SEQ ID NO: 54816 - DNA, 22 bp, Artificial Sequence
  chemically synthesized
tctgtggctttaagttcattaa

SEQ ID NO: 54817 - DNA, 22 bp, Artificial Sequence
  chemically synthesized
tgtggctttaagttcattaaat

SEQ ID NO: 54818 - DNA, 22 bp, Artificial Sequence
  chemically synthesized
tggctttaagttcattaaatgt

SEQ ID NO: 54819 - DNA, 22 bp, Artificial Sequence
  chemically synthesized
taagttcattaaatgtaaaatt

SEQ ID NO: 54820 - DNA, 22 bp, Artificial Sequence
  chemically synthesized
aagttcattaaatgtaaaattg

SEQ ID NO: 54821 - DNA, 22 bp, Artificial Sequence
  chemically synthesized
agttcattaaatgtaaaattgg

SEQ ID NO: 54822 - DNA, 22 bp, Artificial Sequence
  chemically synthesized
attaaatgtaaaattggcagct

SEQ ID NO: 54823 - DNA, 22 bp, Artificial Sequence
  chemically synthesized
aatgtaaaattggcagcttgct

SEQ ID NO: 54824 - DNA, 22 bp, Artificial Sequence
  chemically synthesized
gcagcttgctaaagaaggtcag

SEQ ID NO: 54825 - DNA, 22 bp, Artificial Sequence
  chemically synthesized
gctaaagaaggtcagactgatt

SEQ ID NO: 54826 - DNA, 22 bp, Artificial Sequence
  chemically synthesized
ctaaagaaggtcagactgatta

SEQ ID NO: 54827 - DNA, 22 bp, Artificial Sequence
  chemically synthesized
aagaaggtcagactgattaact

SEQ ID NO: 54828 - DNA, 22 bp, Artificial Sequence
  chemically synthesized
attaactgtttaagacttgtac

SEQ ID NO: 54829 - DNA, 22 bp, Artificial Sequence
  chemically synthesized
actgtttaagacttgtacattt

SEQ ID NO: 54830 - DNA, 22 bp, Artificial Sequence
  chemically synthesized
tttaagacttgtacattttctg

SEQ ID NO: 54831 - DNA, 22 bp, Artificial Sequence
  chemically synthesized
aagacttgtacattttctgctt

SEQ ID NO: 54832 - DNA, 22 bp, Artificial Sequence
  chemically synthesized
agacttgtacattttctgcttc

SEQ ID NO: 54833 - DNA, 22 bp, Artificial Sequence
  chemically synthesized
gtacattttctgcttcagtttt

SEQ ID NO: 54834 - DNA, 22 bp, Artificial Sequence
  chemically synthesized
tacattttctgcttcagtttta

SEQ ID NO: 54835 - DNA, 22 bp, Artificial Sequence
  chemically synthesized
tctgcttcagttttattaactg

SEQ ID NO: 54836 - DNA, 22 bp, Artificial Sequence
  chemically synthesized
ctgcttcagttttattaactgg

SEQ ID NO: 54837 - DNA, 22 bp, Artificial Sequence
  chemically synthesized
tgcttcagttttattaactggc

SEQ ID NO: 54838 - DNA, 22 bp, Artificial Sequence
  chemically synthesized
cttcagttttattaactggcag

SEQ ID NO: 54839 - DNA, 22 bp, Artificial Sequence
  chemically synthesized
cagttttattaactggcagcat

SEQ ID NO: 54840 - DNA, 22 bp, Artificial Sequence
  chemically synthesized
agttttattaactggcagcatc

SEQ ID NO: 54841 - DNA, 22 bp, Artificial Sequence
  chemically synthesized
tattaactggcagcatcctgga

SEQ ID NO: 54842 - DNA, 22 bp, Artificial Sequence
  chemically synthesized
attaactggcagcatcctggat

SEQ ID NO: 54843 - DNA, 22 bp, Artificial Sequence
  chemically synthesized
ttaactggcagcatcctggatg

SEQ ID NO: 54844 - DNA, 22 bp, Artificial Sequence
  chemically synthesized
actggcagcatcctggatgttt

SEQ ID NO: 54845 - DNA, 22 bp, Artificial Sequence
  chemically synthesized
gcagcatcctggatgttttgta

SEQ ID NO: 54846 - DNA, 22 bp, Artificial Sequence
  chemically synthesized
gatgttttgtattttgtgattt

SEQ ID NO: 54847 - DNA, 22 bp, Artificial Sequence
  chemically synthesized
tgtattttgtgatttttttttt

SEQ ID NO: 54848 - DNA, 22 bp, Artificial Sequence
  chemically synthesized
gtattttgtgattttttttttt

SEQ ID NO: 54849 - DNA, 22 bp, Artificial Sequence
  chemically synthesized
tattttgtgatttttttttttt

SEQ ID NO: 54850 - DNA, 22 bp, Artificial Sequence
  chemically synthesized
tgtgattttttttttttttttg

SEQ ID NO: 54851 - DNA, 22 bp, Artificial Sequence
  chemically synthesized
gtgattttttttttttttttga

SEQ ID NO: 54852 - DNA, 22 bp, Artificial Sequence
  chemically synthesized
tgattttttttttttttttgat

SEQ ID NO: 54853 - DNA, 22 bp, Artificial Sequence
  chemically synthesized
tttttttttttttgatagagca

SEQ ID NO: 54854 - DNA, 22 bp, Artificial Sequence
  chemically synthesized
ttttttttttttgatagagcaa

SEQ ID NO: 54855 - DNA, 22 bp, Artificial Sequence
  chemically synthesized
tttttttttttgatagagcaag

SEQ ID NO: 54856 - DNA, 22 bp, Artificial Sequence
  chemically synthesized
ttttttttttgatagagcaagc

SEQ ID NO: 54857 - DNA, 22 bp, Artificial Sequence
  chemically synthesized
tttttttttgatagagcaagca

SEQ ID NO: 54858 - DNA, 22 bp, Artificial Sequence
  chemically synthesized
ttttttttgatagagcaagcat

SEQ ID NO: 54859 - DNA, 22 bp, Artificial Sequence
  chemically synthesized
tttttttgatagagcaagcata

SEQ ID NO: 54860 - DNA, 22 bp, Artificial Sequence
  chemically synthesized
ttttttgatagagcaagcataa

SEQ ID NO: 54861 - DNA, 22 bp, Artificial Sequence
  chemically synthesized
tttttgatagagcaagcataag

SEQ ID NO: 54862 - DNA, 22 bp, Artificial Sequence
  chemically synthesized
ttttgatagagcaagcataaga

SEQ ID NO: 54863 - DNA, 22 bp, Artificial Sequence
  chemically synthesized
tttgatagagcaagcataagat

SEQ ID NO: 54864 - DNA, 22 bp, Artificial Sequence
  chemically synthesized
ttgatagagcaagcataagatt

SEQ ID NO: 54865 - DNA, 22 bp, Artificial Sequence
  chemically synthesized
tgatagagcaagcataagattt

SEQ ID NO: 54866 - DNA, 22 bp, Artificial Sequence
  chemically synthesized
gatagagcaagcataagatttc

SEQ ID NO: 54867 - DNA, 22 bp, Artificial Sequence
  chemically synthesized
atagagcaagcataagatttca

SEQ ID NO: 54868 - DNA, 22 bp, Artificial Sequence
  chemically synthesized
cacaagcagagacttaccaact

SEQ ID NO: 54869 - DNA, 22 bp, Artificial Sequence
  chemically synthesized
acaagcagagacttaccaactc

SEQ ID NO: 54870 - DNA, 22 bp, Artificial Sequence
  chemically synthesized
accaactctcttttcccctttg

SEQ ID NO: 54871 - DNA, 22 bp, Artificial Sequence
  chemically synthesized
ccaactctcttttcccctttgg

SEQ ID NO: 54872 - DNA, 22 bp, Artificial Sequence
  chemically synthesized
tcttttcccctttggaagctta

SEQ ID NO: 54873 - DNA, 22 bp, Artificial Sequence
  chemically synthesized
ttttcccctttggaagcttaaa

SEQ ID NO: 54874 - DNA, 22 bp, Artificial Sequence
  chemically synthesized
ttcccctttggaagcttaaaaa

SEQ ID NO: 54875 - DNA, 22 bp, Artificial Sequence
  chemically synthesized
tcccctttggaagcttaaaaaa

SEQ ID NO: 54876 - DNA, 22 bp, Artificial Sequence
  chemically synthesized
cccctttggaagcttaaaaaat

SEQ ID NO: 54877 - DNA, 22 bp, Artificial Sequence
  chemically synthesized
ccctttggaagcttaaaaaatg

SEQ ID NO: 54878 - DNA, 22 bp, Artificial Sequence
  chemically synthesized
tggaagcttaaaaaatgataga

SEQ ID NO: 54879 - DNA, 22 bp, Artificial Sequence
  chemically synthesized
ggaagcttaaaaaatgatagaa

SEQ ID NO: 54880 - DNA, 22 bp, Artificial Sequence
  chemically synthesized
gaagcttaaaaaatgatagaag

SEQ ID NO: 54881 - DNA, 22 bp, Artificial Sequence
  chemically synthesized
aaaaaatgatagaagctggtaa

SEQ ID NO: 54882 - DNA, 22 bp, Artificial Sequence
  chemically synthesized
aaaaatgatagaagctggtaaa

SEQ ID NO: 54883 - DNA, 22 bp, Artificial Sequence
  chemically synthesized
gtaaagtagatgctggagtatt

SEQ ID NO: 54884 - DNA, 22 bp, Artificial Sequence
  chemically synthesized
gagtattttagtacaaagttaa

SEQ ID NO: 54885 - DNA, 22 bp, Artificial Sequence
  chemically synthesized
tagtacaaagttaaaaaaaaaa

SEQ ID NO: 54886 - DNA, 22 bp, Artificial Sequence
  chemically synthesized
agtacaaagttaaaaaaaaaag

SEQ ID NO: 54887 - DNA, 22 bp, Artificial Sequence
  chemically synthesized
gtacaaagttaaaaaaaaaagc

SEQ ID NO: 54888 - DNA, 22 bp, Artificial Sequence
  chemically synthesized
aaaaaaaaagcaaacaggaaag

SEQ ID NO: 54889 - DNA, 22 bp, Artificial Sequence
  chemically synthesized
ccttgttataccatccgctggt

SEQ ID NO: 54890 - DNA, 22 bp, Artificial Sequence
  chemically synthesized
gttataccatccgctggtgatt

SEQ ID NO: 54891 - DNA, 22 bp, Artificial Sequence
  chemically synthesized
ttataccatccgctggtgatta

SEQ ID NO: 54892 - DNA, 22 bp, Artificial Sequence
  chemically synthesized
taccatccgctggtgattatgt

SEQ ID NO: 54893 - DNA, 22 bp, Artificial Sequence
  chemically synthesized
gtgattatgtgtgcagaaatag

SEQ ID NO: 54894 - DNA, 22 bp, Artificial Sequence
  chemically synthesized
tgtgtgcagaaatagtctcata

SEQ ID NO: 54895 - DNA, 22 bp, Artificial Sequence
  chemically synthesized
ataatgaagcattttggagctc

SEQ ID NO: 54896 - DNA, 22 bp, Artificial Sequence
  chemically synthesized
tggagctcattcagaaaattag

SEQ ID NO: 54897 - DNA, 22 bp, Artificial Sequence
  chemically synthesized
ggagctcattcagaaaattagt

SEQ ID NO: 54898 - DNA, 22 bp, Artificial Sequence
  chemically synthesized
gagctcattcagaaaattagtc

SEQ ID NO: 54899 - DNA, 22 bp, Artificial Sequence
  chemically synthesized
attcagaaaattagtccacttt

SEQ ID NO: 54900 - DNA, 22 bp, Artificial Sequence
  chemically synthesized
agaaaattagtccactttgaca

SEQ ID NO: 54901 - DNA, 22 bp, Artificial Sequence
  chemically synthesized
gtccactttgacaacattaggc

SEQ ID NO: 54902 - DNA, 22 bp, Artificial Sequence
  chemically synthesized
tgacaacattaggcgaagtatt

SEQ ID NO: 54903 - DNA, 22 bp, Artificial Sequence
  chemically synthesized
gacaacattaggcgaagtattt

SEQ ID NO: 54904 - DNA, 22 bp, Artificial Sequence
  chemically synthesized
acaacattaggcgaagtatttc

SEQ ID NO: 54905 - DNA, 22 bp, Artificial Sequence
  chemically synthesized
ggcgaagtatttcaagtctaaa

SEQ ID NO: 54906 - DNA, 22 bp, Artificial Sequence
  chemically synthesized
caagtctaaagaaaggacttct

SEQ ID NO: 54907 - DNA, 22 bp, Artificial Sequence
  chemically synthesized
aagtctaaagaaaggacttctc

SEQ ID NO: 54908 - DNA, 22 bp, Artificial Sequence
  chemically synthesized
aagaaaggacttctcagccttg

SEQ ID NO: 54909 - DNA, 22 bp, Artificial Sequence
  chemically synthesized
ctcagccttgctctgaaatgtg

SEQ ID NO: 54910 - DNA, 22 bp, Artificial Sequence
  chemically synthesized
tcagccttgctctgaaatgtgg

SEQ ID NO: 54911 - DNA, 22 bp, Artificial Sequence
  chemically synthesized
agccttgctctgaaatgtggtg

SEQ ID NO: 54912 - DNA, 22 bp, Artificial Sequence
  chemically synthesized
gctctgaaatgtggtgtttgct

SEQ ID NO: 54913 - DNA, 22 bp, Artificial Sequence
  chemically synthesized
ctctgaaatgtggtgtttgctt

SEQ ID NO: 54914 - DNA, 22 bp, Artificial Sequence
  chemically synthesized
tgaaatgtggtgtttgcttgac

SEQ ID NO: 54915 - DNA, 22 bp, Artificial Sequence
  chemically synthesized
aaatgtggtgtttgcttgacca

SEQ ID NO: 54916 - DNA, 22 bp, Artificial Sequence
  chemically synthesized
gcttgaccattctgatttttat

SEQ ID NO: 54917 - DNA, 22 bp, Artificial Sequence
  chemically synthesized
cttgaccattctgatttttata

SEQ ID NO: 54918 - DNA, 22 bp, Artificial Sequence
  chemically synthesized
gaccattctgatttttatatca

SEQ ID NO: 54919 - DNA, 22 bp, Artificial Sequence
  chemically synthesized
accattctgatttttatatcat

SEQ ID NO: 54920 - DNA, 22 bp, Artificial Sequence
  chemically synthesized
tgatttttatatcatagatgcc

SEQ ID NO: 54921 - DNA, 22 bp, Artificial Sequence
  chemically synthesized
atttttatatcatagatgccac

SEQ ID NO: 54922 - DNA, 22 bp, Artificial Sequence
  chemically synthesized
ttatatcatagatgccaccaag

SEQ ID NO: 54923 - DNA, 22 bp, Artificial Sequence
  chemically synthesized
tatatcatagatgccaccaagt

SEQ ID NO: 54924 - DNA, 22 bp, Artificial Sequence
  chemically synthesized
atatcatagatgccaccaagtg

SEQ ID NO: 54925 - DNA, 22 bp, Artificial Sequence
  chemically synthesized
tatcatagatgccaccaagtgc

SEQ ID NO: 54926 - DNA, 22 bp, Artificial Sequence
  chemically synthesized
agaatattataggcattccatt

SEQ ID NO: 54927 - DNA, 22 bp, Artificial Sequence
  chemically synthesized
gaatattataggcattccattt

SEQ ID NO: 54928 - DNA, 22 bp, Artificial Sequence
  chemically synthesized
taggcattccatttctcagaat

SEQ ID NO: 54929 - DNA, 22 bp, Artificial Sequence
  chemically synthesized
catttctcagaataaaaaaaaa

SEQ ID NO: 54930 - DNA, 22 bp, Artificial Sequence
  chemically synthesized
ctcagaataaaaaaaaaatgac

SEQ ID NO: 54931 - DNA, 22 bp, Artificial Sequence
  chemically synthesized
tcagaataaaaaaaaaatgact

SEQ ID NO: 54932 - DNA, 22 bp, Artificial Sequence
  chemically synthesized
agaataaaaaaaaaatgactaa

SEQ ID NO: 54933 - DNA, 22 bp, Artificial Sequence
  chemically synthesized
attggcttattttcttaagtac

SEQ ID NO: 54934 - DNA, 22 bp, Artificial Sequence
  chemically synthesized
gcttattttcttaagtactcaa

SEQ ID NO: 54935 - DNA, 22 bp, Artificial Sequence
  chemically synthesized
attttcttaagtactcaaaagt

SEQ ID NO: 54936 - DNA, 22 bp, Artificial Sequence
  chemically synthesized
ttttcttaagtactcaaaagta

SEQ ID NO: 54937 - DNA, 22 bp, Artificial Sequence
  chemically synthesized
tcttaagtactcaaaagtatcc

SEQ ID NO: 54938 - DNA, 22 bp, Artificial Sequence
  chemically synthesized
cttaagtactcaaaagtatccc

SEQ ID NO: 54939 - DNA, 22 bp, Artificial Sequence
  chemically synthesized
ttaagtactcaaaagtatccca

SEQ ID NO: 54940 - DNA, 22 bp, Artificial Sequence
  chemically synthesized
aagtactcaaaagtatcccatt

SEQ ID NO: 54941 - DNA, 22 bp, Artificial Sequence
  chemically synthesized
agtactcaaaagtatcccattt

SEQ ID NO: 54942 - DNA, 22 bp, Artificial Sequence
  chemically synthesized
aaaagtatcccatttagctaat

SEQ ID NO: 54943 - DNA, 22 bp, Artificial Sequence
  chemically synthesized
agctaatgtgtctgagaaatac

SEQ ID NO: 54944 - DNA, 22 bp, Artificial Sequence
  chemically synthesized
gctaatgtgtctgagaaatact

SEQ ID NO: 54945 - DNA, 22 bp, Artificial Sequence
  chemically synthesized
atgtgtctgagaaatactgccc

SEQ ID NO: 54946 - DNA, 22 bp, Artificial Sequence
  chemically synthesized
agaaatactgcccgtgcatttg

SEQ ID NO: 54947 - DNA, 22 bp, Artificial Sequence
  chemically synthesized
cccgtgcatttggtatttcttt

SEQ ID NO: 54948 - DNA, 22 bp, Artificial Sequence
  chemically synthesized
ggtatttctttgattttgtggc

SEQ ID NO: 54949 - DNA, 22 bp, Artificial Sequence
  chemically synthesized
gtatttctttgattttgtggca

SEQ ID NO: 54950 - DNA, 22 bp, Artificial Sequence
  chemically synthesized
ctttgattttgtggcactgctg

SEQ ID NO: 54951 - DNA, 22 bp, Artificial Sequence
  chemically synthesized
tttgattttgtggcactgctga

SEQ ID NO: 54952 - DNA, 22 bp, Artificial Sequence
  chemically synthesized
tgattttgtggcactgctgaga

SEQ ID NO: 54953 - DNA, 22 bp, Artificial Sequence
  chemically synthesized
gattttgtggcactgctgagag

SEQ ID NO: 54954 - DNA, 22 bp, Artificial Sequence
  chemically synthesized
attttgtggcactgctgagagt

SEQ ID NO: 54955 - DNA, 22 bp, Artificial Sequence
  chemically synthesized
tgtggcactgctgagagtgaga

SEQ ID NO: 54956 - DNA, 22 bp, Artificial Sequence
  chemically synthesized
gtggcactgctgagagtgagag

SEQ ID NO: 54957 - DNA, 22 bp, Artificial Sequence
  chemically synthesized
tggcactgctgagagtgagagc

SEQ ID NO: 54958 - DNA, 22 bp, Artificial Sequence
  chemically synthesized
ctgagagtgagagcagaaaggt

SEQ ID NO: 54959 - DNA, 22 bp, Artificial Sequence
  chemically synthesized
agagtgagagcagaaaggtttt

SEQ ID NO: 54960 - DNA, 22 bp, Artificial Sequence
  chemically synthesized
ttggcagtgtgaattatgctgc

SEQ ID NO: 54961 - DNA, 22 bp, Artificial Sequence
  chemically synthesized
tggcagtgtgaattatgctgcg

SEQ ID NO: 54962 - DNA, 22 bp, Artificial Sequence
  chemically synthesized
ggcagtgtgaattatgctgcga

SEQ ID NO: 54963 - DNA, 22 bp, Artificial Sequence
  chemically synthesized
gcagtgtgaattatgctgcgac

SEQ ID NO: 54964 - DNA, 22 bp, Artificial Sequence
  chemically synthesized
tgctgcgacatgattattattt

SEQ ID NO: 54965 - DNA, 22 bp, Artificial Sequence
  chemically synthesized
cgacatgattattatttagatc

SEQ ID NO: 54966 - DNA, 22 bp, Artificial Sequence
  chemically synthesized
ttatttagatccgtttcatagg

SEQ ID NO: 54967 - DNA, 22 bp, Artificial Sequence
  chemically synthesized
tttagatccgtttcataggtgc

SEQ ID NO: 54968 - DNA, 22 bp, Artificial Sequence
  chemically synthesized
agatccgtttcataggtgcatg

SEQ ID NO: 54969 - DNA, 22 bp, Artificial Sequence
  chemically synthesized
gatccgtttcataggtgcatgc

SEQ ID NO: 54970 - DNA, 22 bp, Artificial Sequence
  chemically synthesized
cataggtgcatgcagtcgtttt

SEQ ID NO: 54971 - DNA, 22 bp, Artificial Sequence
  chemically synthesized
ataggtgcatgcagtcgttttc

SEQ ID NO: 54972 - DNA, 22 bp, Artificial Sequence
  chemically synthesized
tcttattacagcagtgtaaatg

SEQ ID NO: 54973 - DNA, 22 bp, Artificial Sequence
  chemically synthesized
cttattacagcagtgtaaatgt

SEQ ID NO: 54974 - DNA, 22 bp, Artificial Sequence
  chemically synthesized
ttattacagcagtgtaaatgtg

SEQ ID NO: 54975 - DNA, 22 bp, Artificial Sequence
  chemically synthesized
attacagcagtgtaaatgtggc

SEQ ID NO: 54976 - DNA, 22 bp, Artificial Sequence
  chemically synthesized
ttacagcagtgtaaatgtggca

SEQ ID NO: 54977 - DNA, 22 bp, Artificial Sequence
  chemically synthesized
cagcagtgtaaatgtggcacat

SEQ ID NO: 54978 - DNA, 22 bp, Artificial Sequence
  chemically synthesized
ttcatgtgacatagtagctttc

SEQ ID NO: 54979 - DNA, 22 bp, Artificial Sequence
  chemically synthesized
tcatgtgacatagtagctttct

SEQ ID NO: 54980 - DNA, 22 bp, Artificial Sequence
  chemically synthesized
catgtgacatagtagctttcta

SEQ ID NO: 54981 - DNA, 22 bp, Artificial Sequence
  chemically synthesized
atgtgacatagtagctttctaa

SEQ ID NO: 54982 - DNA, 22 bp, Artificial Sequence
  chemically synthesized
tctaatttatgaagccatgtct

SEQ ID NO: 54983 - DNA, 22 bp, Artificial Sequence
  chemically synthesized
ctaatttatgaagccatgtctg

SEQ ID NO: 54984 - DNA, 22 bp, Artificial Sequence
  chemically synthesized
taatttatgaagccatgtctgt

SEQ ID NO: 54985 - DNA, 22 bp, Artificial Sequence
  chemically synthesized
atttatgaagccatgtctgttt

SEQ ID NO: 54986 - DNA, 22 bp, Artificial Sequence
  chemically synthesized
atgaagccatgtctgtttactt

SEQ ID NO: 54987 - DNA, 22 bp, Artificial Sequence
  chemically synthesized
tgaagccatgtctgtttactta

SEQ ID NO: 54988 - DNA, 22 bp, Artificial Sequence
  chemically synthesized
tttacttaggagtatatacatt

SEQ ID NO: 54989 - DNA, 22 bp, Artificial Sequence
  chemically synthesized
acttaggagtatatacattcac

SEQ ID NO: 54990 - DNA, 22 bp, Artificial Sequence
  chemically synthesized
cttaggagtatatacattcaca

SEQ ID NO: 54991 - DNA, 22 bp, Artificial Sequence
  chemically synthesized
aggagtatatacattcacacac

SEQ ID NO: 54992 - DNA, 22 bp, Artificial Sequence
  chemically synthesized
ggagtatatacattcacacaca

SEQ ID NO: 54993 - DNA, 22 bp, Artificial Sequence
  chemically synthesized
acacacaaagggtgtgtgtgtt

SEQ ID NO: 54994 - DNA, 22 bp, Artificial Sequence
  chemically synthesized
attcacctctcctttcattctt

SEQ ID NO: 54995 - DNA, 22 bp, Artificial Sequence
  chemically synthesized
ttcacctctcctttcattcttt

SEQ ID NO: 54996 - DNA, 22 bp, Artificial Sequence
  chemically synthesized
acctctcctttcattctttggc

SEQ ID NO: 54997 - DNA, 22 bp, Artificial Sequence
  chemically synthesized
tcctttcattctttggcacaat

SEQ ID NO: 54998 - DNA, 22 bp, Artificial Sequence
  chemically synthesized
ctttcattctttggcacaatgg

SEQ ID NO: 54999 - DNA, 22 bp, Artificial Sequence
  chemically synthesized
tcattctttggcacaatggaca

SEQ ID NO: 55000 - DNA, 22 bp, Artificial Sequence
  chemically synthesized
cattctttggcacaatggacaa

SEQ ID NO: 55001 - DNA, 22 bp, Artificial Sequence
  chemically synthesized
attctttggcacaatggacaac

SEQ ID NO: 55002 - DNA, 22 bp, Artificial Sequence
  chemically synthesized
tttggcacaatggacaacttgg

SEQ ID NO: 55003 - DNA, 22 bp, Artificial Sequence
  chemically synthesized
tggcacaatggacaacttggtg

SEQ ID NO: 55004 - DNA, 22 bp, Artificial Sequence
  chemically synthesized
ggcacaatggacaacttggtgt

SEQ ID NO: 55005 - DNA, 22 bp, Artificial Sequence
  chemically synthesized
gcacaatggacaacttggtgta

SEQ ID NO: 55006 - DNA, 22 bp, Artificial Sequence
  chemically synthesized
ggtgtataggaaaaaagaaaca

SEQ ID NO: 55007 - DNA, 22 bp, Artificial Sequence
  chemically synthesized
gtgtataggaaaaaagaaacaa

SEQ ID NO: 55008 - DNA, 22 bp, Artificial Sequence
  chemically synthesized
ggtttctatccacttttttttt

SEQ ID NO: 55009 - DNA, 22 bp, Artificial Sequence
  chemically synthesized
gtttctatccactttttttttt

SEQ ID NO: 55010 - DNA, 22 bp, Artificial Sequence
  chemically synthesized
ctatccacttttttttttaacc

SEQ ID NO: 55011 - DNA, 22 bp, Artificial Sequence
  chemically synthesized
tatccacttttttttttaacca

SEQ ID NO: 55012 - DNA, 22 bp, Artificial Sequence
  chemically synthesized
tccacttttttttttaaccagt

SEQ ID NO: 55013 - DNA, 22 bp, Artificial Sequence
  chemically synthesized
ttttttttaaccagtttttctt

SEQ ID NO: 55014 - DNA, 22 bp, Artificial Sequence
  chemically synthesized
tttttttaaccagtttttcttg

SEQ ID NO: 55015 - DNA, 22 bp, Artificial Sequence
  chemically synthesized
ttttttaaccagtttttcttgt

SEQ ID NO: 55016 - DNA, 22 bp, Artificial Sequence
  chemically synthesized
tttttaaccagtttttcttgta

SEQ ID NO: 55017 - DNA, 22 bp, Artificial Sequence
  chemically synthesized
ttttaaccagtttttcttgtag

SEQ ID NO: 55018 - DNA, 22 bp, Artificial Sequence
  chemically synthesized
tttaaccagtttttcttgtagt

SEQ ID NO: 55019 - DNA, 22 bp, Artificial Sequence
  chemically synthesized
ttaaccagtttttcttgtagtt

SEQ ID NO: 55020 - DNA, 22 bp, Artificial Sequence
  chemically synthesized
taaccagtttttcttgtagtta

SEQ ID NO: 55021 - DNA, 22 bp, Artificial Sequence
  chemically synthesized
aaccagtttttcttgtagttat

SEQ ID NO: 55022 - DNA, 22 bp, Artificial Sequence
  chemically synthesized
accagtttttcttgtagttatt

SEQ ID NO: 55023 - DNA, 22 bp, Artificial Sequence
  chemically synthesized
ttcttgtagttattatttaagc

SEQ ID NO: 55024 - DNA, 22 bp, Artificial Sequence
  chemically synthesized
tcttgtagttattatttaagct

SEQ ID NO: 55025 - DNA, 22 bp, Artificial Sequence
  chemically synthesized
cttgtagttattatttaagctt

SEQ ID NO: 55026 - DNA, 22 bp, Artificial Sequence
  chemically synthesized
ttgtagttattatttaagcttt

SEQ ID NO: 55027 - DNA, 22 bp, Artificial Sequence
  chemically synthesized
gtagttattatttaagctttct

SEQ ID NO: 55028 - DNA, 22 bp, Artificial Sequence
  chemically synthesized
tagttattatttaagctttctt

SEQ ID NO: 55029 - DNA, 22 bp, Artificial Sequence
  chemically synthesized
ttatttaagctttctttatgtt

SEQ ID NO: 55030 - DNA, 22 bp, Artificial Sequence
  chemically synthesized
tttaagctttctttatgttccc

SEQ ID NO: 55031 - DNA, 22 bp, Artificial Sequence
  chemically synthesized
aagctttctttatgttccctgt

SEQ ID NO: 55032 - DNA, 22 bp, Artificial Sequence
  chemically synthesized
agctttctttatgttccctgtg

SEQ ID NO: 55033 - DNA, 22 bp, Artificial Sequence
  chemically synthesized
tctttatgttccctgtgttaac

SEQ ID NO: 55034 - DNA, 22 bp, Artificial Sequence
  chemically synthesized
ctttatgttccctgtgttaact

SEQ ID NO: 55035 - DNA, 22 bp, Artificial Sequence
  chemically synthesized
tttatgttccctgtgttaacta

SEQ ID NO: 55036 - DNA, 22 bp, Artificial Sequence
  chemically synthesized
tatgttccctgtgttaactatt

SEQ ID NO: 55037 - DNA, 22 bp, Artificial Sequence
  chemically synthesized
atgttccctgtgttaactattt

SEQ ID NO: 55038 - DNA, 22 bp, Artificial Sequence
  chemically synthesized
tgttccctgtgttaactattta

SEQ ID NO: 55039 - DNA, 22 bp, Artificial Sequence
  chemically synthesized
cctgtgttaactatttaagtag

SEQ ID NO: 55040 - DNA, 22 bp, Artificial Sequence
  chemically synthesized
tgttaactatttaagtagcatt

SEQ ID NO: 55041 - DNA, 22 bp, Artificial Sequence
  chemically synthesized
actatttaagtagcattctttc

SEQ ID NO: 55042 - DNA, 22 bp, Artificial Sequence
  chemically synthesized
tttaagtagcattctttctaaa

SEQ ID NO: 55043 - DNA, 22 bp, Artificial Sequence
  chemically synthesized
aagtagcattctttctaaactt

SEQ ID NO: 55044 - DNA, 22 bp, Artificial Sequence
  chemically synthesized
agtagcattctttctaaactta

SEQ ID NO: 55045 - DNA, 22 bp, Artificial Sequence
  chemically synthesized
tttctaaacttacaaaccagac

SEQ ID NO: 55046 - DNA, 22 bp, Artificial Sequence
  chemically synthesized
tctaaacttacaaaccagacac

SEQ ID NO: 55047 - DNA, 22 bp, Artificial Sequence
  chemically synthesized
ctaaacttacaaaccagacaca

SEQ ID NO: 55048 - DNA, 22 bp, Artificial Sequence
  chemically synthesized
taaacttacaaaccagacacat

SEQ ID NO: 55049 - DNA, 22 bp, Artificial Sequence
  chemically synthesized
aacttacaaaccagacacattt

SEQ ID NO: 55050 - DNA, 22 bp, Artificial Sequence
  chemically synthesized
acaaaccagacacatttgttgc

SEQ ID NO: 55051 - DNA, 22 bp, Artificial Sequence
  chemically synthesized
caaaccagacacatttgttgct

SEQ ID NO: 55052 - DNA, 22 bp, Artificial Sequence
  chemically synthesized
gttgctgtgggtgtgtgcatgg

SEQ ID NO: 55053 - DNA, 22 bp, Artificial Sequence
  chemically synthesized
ttgctgtgggtgtgtgcatggg

SEQ ID NO: 55054 - DNA, 22 bp, Artificial Sequence
  chemically synthesized
ctgtgggtgtgtgcatgggtat

SEQ ID NO: 55055 - DNA, 22 bp, Artificial Sequence
  chemically synthesized
tgggtgtgtgcatgggtatatg

SEQ ID NO: 55056 - DNA, 22 bp, Artificial Sequence
  chemically synthesized
tctggagttatgcaaggaagac

SEQ ID NO: 55057 - DNA, 22 bp, Artificial Sequence
  chemically synthesized
tggagttatgcaaggaagactg

SEQ ID NO: 55058 - DNA, 22 bp, Artificial Sequence
  chemically synthesized
gagttatgcaaggaagactgtt

SEQ ID NO: 55059 - DNA, 22 bp, Artificial Sequence
  chemically synthesized
tgcaaggaagactgttttcttt

SEQ ID NO: 55060 - DNA, 22 bp, Artificial Sequence
  chemically synthesized
ttttctttacatatgtgatgat

SEQ ID NO: 55061 - DNA, 22 bp, Artificial Sequence
  chemically synthesized
tctttacatatgtgatgatttg

SEQ ID NO: 55062 - DNA, 22 bp, Artificial Sequence
  chemically synthesized
ctttacatatgtgatgatttgc

SEQ ID NO: 55063 - DNA, 22 bp, Artificial Sequence
  chemically synthesized
tttacatatgtgatgatttgcc

SEQ ID NO: 55064 - DNA, 22 bp, Artificial Sequence
  chemically synthesized
tacatatgtgatgatttgcctc

SEQ ID NO: 55065 - DNA, 22 bp, Artificial Sequence
  chemically synthesized
acatatgtgatgatttgcctca

SEQ ID NO: 55066 - DNA, 22 bp, Artificial Sequence
  chemically synthesized
catatgtgatgatttgcctcat

SEQ ID NO: 55067 - DNA, 22 bp, Artificial Sequence
  chemically synthesized
gcctcattgacaaatttgctct

SEQ ID NO: 55068 - DNA, 22 bp, Artificial Sequence
  chemically synthesized
cctcattgacaaatttgctctc

SEQ ID NO: 55069 - DNA, 22 bp, Artificial Sequence
  chemically synthesized
attgacaaatttgctctctggt

SEQ ID NO: 55070 - DNA, 22 bp, Artificial Sequence
  chemically synthesized
acaaatttgctctctggttgat

SEQ ID NO: 55071 - DNA, 22 bp, Artificial Sequence
  chemically synthesized
gctctctggttgataaccttca

SEQ ID NO: 55072 - DNA, 22 bp, Artificial Sequence
  chemically synthesized
ctctctggttgataaccttcac

SEQ ID NO: 55073 - DNA, 22 bp, Artificial Sequence
  chemically synthesized
tctggttgataaccttcacatc

SEQ ID NO: 55074 - DNA, 22 bp, Artificial Sequence
  chemically synthesized
tggttgataaccttcacatcct

SEQ ID NO: 55075 - DNA, 22 bp, Artificial Sequence
  chemically synthesized
gttgataaccttcacatccttg

SEQ ID NO: 55076 - DNA, 22 bp, Artificial Sequence
  chemically synthesized
ataaccttcacatccttgtact

SEQ ID NO: 55077 - DNA, 22 bp, Artificial Sequence
  chemically synthesized
cacatccttgtactttttgtat

SEQ ID NO: 55078 - DNA, 22 bp, Artificial Sequence
  chemically synthesized
acatccttgtactttttgtatg

SEQ ID NO: 55079 - DNA, 22 bp, Artificial Sequence
  chemically synthesized
gtactttttgtatgctcacatt

SEQ ID NO: 55080 - DNA, 22 bp, Artificial Sequence
  chemically synthesized
tactttttgtatgctcacattt

SEQ ID NO: 55081 - DNA, 22 bp, Artificial Sequence
  chemically synthesized
tttgtatgctcacattttctgg

SEQ ID NO: 55082 - DNA, 22 bp, Artificial Sequence
  chemically synthesized
ttgtatgctcacattttctggg

SEQ ID NO: 55083 - DNA, 22 bp, Artificial Sequence
  chemically synthesized
tgtatgctcacattttctgggt

SEQ ID NO: 55084 - DNA, 22 bp, Artificial Sequence
  chemically synthesized
gtatgctcacattttctgggta

SEQ ID NO: 55085 - DNA, 22 bp, Artificial Sequence
  chemically synthesized
tatgctcacattttctgggtat

SEQ ID NO: 55086 - DNA, 22 bp, Artificial Sequence
  chemically synthesized
acattttctgggtattatatag

SEQ ID NO: 55087 - DNA, 22 bp, Artificial Sequence
  chemically synthesized
tctgggtattatatagagaagc

SEQ ID NO: 55088 - DNA, 22 bp, Artificial Sequence
  chemically synthesized
ctgggtattatatagagaagcc

SEQ ID NO: 55089 - DNA, 22 bp, Artificial Sequence
  chemically synthesized
tgggtattatatagagaagcct

SEQ ID NO: 55090 - DNA, 22 bp, Artificial Sequence
  chemically synthesized
ggtattatatagagaagcctag

SEQ ID NO: 55091 - DNA, 22 bp, Artificial Sequence
  chemically synthesized
tatagagaagcctagaaacact

SEQ ID NO: 55092 - DNA, 22 bp, Artificial Sequence
  chemically synthesized
gaaacactttacatgatgtggt

SEQ ID NO: 55093 - DNA, 22 bp, Artificial Sequence
  chemically synthesized
tacatgatgtggtgggatggca

SEQ ID NO: 55094 - DNA, 22 bp, Artificial Sequence
  chemically synthesized
acatgatgtggtgggatggcat

SEQ ID NO: 55095 - DNA, 22 bp, Artificial Sequence
  chemically synthesized
catgatgtggtgggatggcatg

SEQ ID NO: 55096 - DNA, 22 bp, Artificial Sequence
  chemically synthesized
agatgtgcttctcccctttctg

SEQ ID NO: 55097 - DNA, 22 bp, Artificial Sequence
  chemically synthesized
ctcccctttctgtcctctctgg

SEQ ID NO: 55098 - DNA, 22 bp, Artificial Sequence
  chemically synthesized
tcccctttctgtcctctctggc

SEQ ID NO: 55099 - DNA, 22 bp, Artificial Sequence
  chemically synthesized
ccctttctgtcctctctggcac

SEQ ID NO: 55100 - DNA, 22 bp, Artificial Sequence
  chemically synthesized
tctgtcctctctggcactctaa

SEQ ID NO: 55101 - DNA, 22 bp, Artificial Sequence
  chemically synthesized
ctgtcctctctggcactctaat

SEQ ID NO: 55102 - DNA, 22 bp, Artificial Sequence
  chemically synthesized
tgtcctctctggcactctaata

SEQ ID NO: 55103 - DNA, 22 bp, Artificial Sequence
  chemically synthesized
tcctctctggcactctaataat

SEQ ID NO: 55104 - DNA, 22 bp, Artificial Sequence
  chemically synthesized
tctggcactctaataattgtgc

SEQ ID NO: 55105 - DNA, 22 bp, Artificial Sequence
  chemically synthesized
tggcactctaataattgtgctt

SEQ ID NO: 55106 - DNA, 22 bp, Artificial Sequence
  chemically synthesized
gcactctaataattgtgctttt

SEQ ID NO: 55107 - DNA, 22 bp, Artificial Sequence
  chemically synthesized
taataattgtgcttttgtttct

SEQ ID NO: 55108 - DNA, 22 bp, Artificial Sequence
  chemically synthesized
ataattgtgcttttgtttctcc

SEQ ID NO: 55109 - DNA, 22 bp, Artificial Sequence
  chemically synthesized
tgcttttgtttctccaaccaca

SEQ ID NO: 55110 - DNA, 22 bp, Artificial Sequence
  chemically synthesized
ttgtttctccaaccacagccga

SEQ ID NO: 55111 - DNA, 22 bp, Artificial Sequence
  chemically synthesized
tgtttctccaaccacagccgag

SEQ ID NO: 55112 - DNA, 22 bp, Artificial Sequence
  chemically synthesized
gtttctccaaccacagccgagc

SEQ ID NO: 55113 - DNA, 22 bp, Artificial Sequence
  chemically synthesized
tttctccaaccacagccgagcc

SEQ ID NO: 55114 - DNA, 22 bp, Artificial Sequence
  chemically synthesized
ctccaaccacagccgagcctct

SEQ ID NO: 55115 - DNA, 22 bp, Artificial Sequence
  chemically synthesized
tccaaccacagccgagcctctt

SEQ ID NO: 55116 - DNA, 22 bp, Artificial Sequence
  chemically synthesized
caaccacagccgagcctcttga

SEQ ID NO: 55117 - DNA, 22 bp, Artificial Sequence
  chemically synthesized
ttgaagccattcttacagatga

SEQ ID NO: 55118 - DNA, 22 bp, Artificial Sequence
  chemically synthesized
gaagccattcttacagatgatg

SEQ ID NO: 55119 - DNA, 22 bp, Artificial Sequence
  chemically synthesized
aagccattcttacagatgatga

SEQ ID NO: 55120 - DNA, 22 bp, Artificial Sequence
  chemically synthesized
ttacagatgatgaaccagacca

SEQ ID NO: 55121 - DNA, 22 bp, Artificial Sequence
  chemically synthesized
acagatgatgaaccagaccacg

SEQ ID NO: 55122 - DNA, 22 bp, Artificial Sequence
  chemically synthesized
cagatgatgaaccagaccacgg

SEQ ID NO: 55123 - DNA, 22 bp, Artificial Sequence
  chemically synthesized
ggagctccagaaggggatcatg

SEQ ID NO: 55124 - DNA, 22 bp, Artificial Sequence
  chemically synthesized
cagaaggggatcatgacctcct

SEQ ID NO: 55125 - DNA, 22 bp, Artificial Sequence
  chemically synthesized
ctcacctgtgggcagtgccaga

SEQ ID NO: 55126 - DNA, 22 bp, Artificial Sequence
  chemically synthesized
acctgtgggcagtgccagatga

SEQ ID NO: 55127 - DNA, 22 bp, Artificial Sequence
  chemically synthesized
tgggcagtgccagatgaacttc

SEQ ID NO: 55128 - DNA, 22 bp, Artificial Sequence
  chemically synthesized
cccattgggggacattcttatt

SEQ ID NO: 55129 - DNA, 22 bp, Artificial Sequence
  chemically synthesized
ccattgggggacattcttattt

SEQ ID NO: 55130 - DNA, 22 bp, Artificial Sequence
  chemically synthesized
ggggacattcttatttttatcg

SEQ ID NO: 55131 - DNA, 22 bp, Artificial Sequence
  chemically synthesized
ttatttttatcgagcacaaacg

SEQ ID NO: 55132 - DNA, 22 bp, Artificial Sequence
  chemically synthesized
atttttatcgagcacaaacgga

SEQ ID NO: 55133 - DNA, 22 bp, Artificial Sequence
  chemically synthesized
tttttatcgagcacaaacggaa

SEQ ID NO: 55134 - DNA, 22 bp, Artificial Sequence
  chemically synthesized
ttatcgagcacaaacggaaaca

SEQ ID NO: 55135 - DNA, 22 bp, Artificial Sequence
  chemically synthesized
tatcgagcacaaacggaaacaa

SEQ ID NO: 55136 - DNA, 22 bp, Artificial Sequence
  chemically synthesized
atcgagcacaaacggaaacaat

SEQ ID NO: 55137 - DNA, 22 bp, Artificial Sequence
  chemically synthesized
tcgagcacaaacggaaacaatg

SEQ ID NO: 55138 - DNA, 22 bp, Artificial Sequence
  chemically synthesized
tgcttagaaaaagctgtggata

SEQ ID NO: 55139 - DNA, 22 bp, Artificial Sequence
  chemically synthesized
cttagaaaaagctgtggataag

SEQ ID NO: 55140 - DNA, 22 bp, Artificial Sequence
  chemically synthesized
agaaaaagctgtggataagcca

SEQ ID NO: 55141 - DNA, 22 bp, Artificial Sequence
  chemically synthesized
gaaaaagctgtggataagccac

SEQ ID NO: 55142 - DNA, 22 bp, Artificial Sequence
  chemically synthesized
tggataagccaccttccccttc

SEQ ID NO: 55143 - DNA, 22 bp, Artificial Sequence
  chemically synthesized
ccccttcaccaatcgagatgaa

SEQ ID NO: 55144 - DNA, 22 bp, Artificial Sequence
  chemically synthesized
cccttcaccaatcgagatgaaa

SEQ ID NO: 55145 - DNA, 22 bp, Artificial Sequence
  chemically synthesized
caccaatcgagatgaaaaaagc

SEQ ID NO: 55146 - DNA, 22 bp, Artificial Sequence
  chemically synthesized
accaatcgagatgaaaaaagca

SEQ ID NO: 55147 - DNA, 22 bp, Artificial Sequence
  chemically synthesized
gcatccaggtcacgccagagga

SEQ ID NO: 55148 - DNA, 22 bp, Artificial Sequence
  chemically synthesized
tttatcaacgtcatctagagga

SEQ ID NO: 55149 - DNA, 22 bp, Artificial Sequence
  chemically synthesized
atcaacgtcatctagaggaatt

SEQ ID NO: 55150 - DNA, 22 bp, Artificial Sequence
  chemically synthesized
tcaacgtcatctagaggaattt

SEQ ID NO: 55151 - DNA, 22 bp, Artificial Sequence
  chemically synthesized
gaggaatttgccccaaacagga

SEQ ID NO: 55152 - DNA, 22 bp, Artificial Sequence
  chemically synthesized
gccccaaacaggaacacatagc

SEQ ID NO: 55153 - DNA, 22 bp, Artificial Sequence
  chemically synthesized
ccccaaacaggaacacatagca

SEQ ID NO: 55154 - DNA, 22 bp, Artificial Sequence
  chemically synthesized
tttgcatgttttcttttcattt

SEQ ID NO: 55155 - DNA, 22 bp, Artificial Sequence
  chemically synthesized
gcatgttttcttttcattttca

SEQ ID NO: 55156 - DNA, 22 bp, Artificial Sequence
  chemically synthesized
catgttttcttttcattttcag

SEQ ID NO: 55157 - DNA, 22 bp, Artificial Sequence
  chemically synthesized
tcttttcattttcagaggtgct

SEQ ID NO: 55158 - DNA, 22 bp, Artificial Sequence
  chemically synthesized
cttttcattttcagaggtgctg

SEQ ID NO: 55159 - DNA, 22 bp, Artificial Sequence
  chemically synthesized
ttttcattttcagaggtgctgt

SEQ ID NO: 55160 - DNA, 22 bp, Artificial Sequence
  chemically synthesized
ttcattttcagaggtgctgtag

SEQ ID NO: 55161 - DNA, 22 bp, Artificial Sequence
  chemically synthesized
tcattttcagaggtgctgtagc

SEQ ID NO: 55162 - DNA, 22 bp, Artificial Sequence
  chemically synthesized
cattttcagaggtgctgtagcc

SEQ ID NO: 55163 - DNA, 22 bp, Artificial Sequence
  chemically synthesized
attttcagaggtgctgtagcca

SEQ ID NO: 55164 - DNA, 22 bp, Artificial Sequence
  chemically synthesized
tcagaggtgctgtagccaagca

SEQ ID NO: 55165 - DNA, 22 bp, Artificial Sequence
  chemically synthesized
cagaggtgctgtagccaagcag

SEQ ID NO: 55166 - DNA, 22 bp, Artificial Sequence
  chemically synthesized
agaggtgctgtagccaagcagt

SEQ ID NO: 55167 - DNA, 22 bp, Artificial Sequence
  chemically synthesized
tagccaagcagtaaggagttgt

SEQ ID NO: 55168 - DNA, 22 bp, Artificial Sequence
  chemically synthesized
tgaagtgctttctctattactc

SEQ ID NO: 55169 - DNA, 22 bp, Artificial Sequence
  chemically synthesized
tctctattactctatgtgactg

SEQ ID NO: 55170 - DNA, 22 bp, Artificial Sequence
  chemically synthesized
ctctattactctatgtgactgt

SEQ ID NO: 55171 - DNA, 22 bp, Artificial Sequence
  chemically synthesized
tctattactctatgtgactgtc

SEQ ID NO: 55172 - DNA, 22 bp, Artificial Sequence
  chemically synthesized
tattactctatgtgactgtcca

SEQ ID NO: 55173 - DNA, 22 bp, Artificial Sequence
  chemically synthesized
ttactctatgtgactgtccatg

SEQ ID NO: 55174 - DNA, 22 bp, Artificial Sequence
  chemically synthesized
ctctatgtgactgtccatgaca

SEQ ID NO: 55175 - DNA, 22 bp, Artificial Sequence
  chemically synthesized
tatgtgactgtccatgacagcc

SEQ ID NO: 55176 - DNA, 22 bp, Artificial Sequence
  chemically synthesized
tgtgactgtccatgacagccct

SEQ ID NO: 55177 - DNA, 22 bp, Artificial Sequence
  chemically synthesized
tccatgacagccctgtaatgtt

SEQ ID NO: 55178 - DNA, 22 bp, Artificial Sequence
  chemically synthesized
taatgttaaaataatcatttct

SEQ ID NO: 55179 - DNA, 22 bp, Artificial Sequence
  chemically synthesized
aaataatcatttctgttgctta

SEQ ID NO: 55180 - DNA, 22 bp, Artificial Sequence
  chemically synthesized
ctgttgcttacgtccagaacac

SEQ ID NO: 55181 - DNA, 22 bp, Artificial Sequence
  chemically synthesized
tgttgcttacgtccagaacaca

SEQ ID NO: 55182 - DNA, 22 bp, Artificial Sequence
  chemically synthesized
ttgcttacgtccagaacacaga

SEQ ID NO: 55183 - DNA, 22 bp, Artificial Sequence
  chemically synthesized
cttacgtccagaacacagaaaa

SEQ ID NO: 55184 - DNA, 22 bp, Artificial Sequence
  chemically synthesized
acgtccagaacacagaaaaata

SEQ ID NO: 55185 - DNA, 22 bp, Artificial Sequence
  chemically synthesized
cgtccagaacacagaaaaataa

SEQ ID NO: 55186 - DNA, 22 bp, Artificial Sequence
  chemically synthesized
tccacctcactgaatcagatgt

SEQ ID NO: 55187 - DNA, 22 bp, Artificial Sequence
  chemically synthesized
ccacctcactgaatcagatgta

SEQ ID NO: 55188 - DNA, 22 bp, Artificial Sequence
  chemically synthesized
cacctcactgaatcagatgtag

SEQ ID NO: 55189 - DNA, 22 bp, Artificial Sequence
  chemically synthesized
actgaatcagatgtaggcagga

SEQ ID NO: 55190 - DNA, 22 bp, Artificial Sequence
  chemically synthesized
aatcagatgtaggcaggatagg

SEQ ID NO: 55191 - DNA, 22 bp, Artificial Sequence
  chemically synthesized
ctctctggatctgtcgattttg

SEQ ID NO: 55192 - DNA, 22 bp, Artificial Sequence
  chemically synthesized
tctctggatctgtcgattttgg

SEQ ID NO: 55193 - DNA, 22 bp, Artificial Sequence
  chemically synthesized
tctggatctgtcgattttggat

SEQ ID NO: 55194 - DNA, 22 bp, Artificial Sequence
  chemically synthesized
tggatctgtcgattttggattt

SEQ ID NO: 55195 - DNA, 22 bp, Artificial Sequence
  chemically synthesized
gatctgtcgattttggatttct

SEQ ID NO: 55196 - DNA, 22 bp, Artificial Sequence
  chemically synthesized
tcgattttggatttcttttctt

SEQ ID NO: 55197 - DNA, 22 bp, Artificial Sequence
  chemically synthesized
tggatttcttttcttccccatc

SEQ ID NO: 55198 - DNA, 22 bp, Artificial Sequence
  chemically synthesized
ggatttcttttcttccccatcc

SEQ ID NO: 55199 - DNA, 22 bp, Artificial Sequence
  chemically synthesized
gatttcttttcttccccatccc

SEQ ID NO: 55200 - DNA, 22 bp, Artificial Sequence
  chemically synthesized
cttttcttccccatccccacct

SEQ ID NO: 55201 - DNA, 22 bp, Artificial Sequence
  chemically synthesized
ttttcttccccatccccacctt

SEQ ID NO: 55202 - DNA, 22 bp, Artificial Sequence
  chemically synthesized
ttcttccccatccccaccttct

SEQ ID NO: 55203 - DNA, 22 bp, Artificial Sequence
  chemically synthesized
tcttccccatccccaccttctc

SEQ ID NO: 55204 - DNA, 22 bp, Artificial Sequence
  chemically synthesized
cttccccatccccaccttctca

SEQ ID NO: 55205 - DNA, 22 bp, Artificial Sequence
  chemically synthesized
ttccccatccccaccttctcat

SEQ ID NO: 55206 - DNA, 22 bp, Artificial Sequence
  chemically synthesized
ccccatccccaccttctcattt

SEQ ID NO: 55207 - DNA, 22 bp, Artificial Sequence
  chemically synthesized
cccatccccaccttctcatttt

SEQ ID NO: 55208 - DNA, 22 bp, Artificial Sequence
  chemically synthesized
ctcattttgaagtattgagctt

SEQ ID NO: 55209 - DNA, 22 bp, Artificial Sequence
  chemically synthesized
tcattttgaagtattgagcttt

SEQ ID NO: 55210 - DNA, 22 bp, Artificial Sequence
  chemically synthesized
attttgaagtattgagctttac

SEQ ID NO: 55211 - DNA, 22 bp, Artificial Sequence
  chemically synthesized
tgaagtattgagctttactaca

SEQ ID NO: 55212 - DNA, 22 bp, Artificial Sequence
  chemically synthesized
gaagtattgagctttactacac

SEQ ID NO: 55213 - DNA, 22 bp, Artificial Sequence
  chemically synthesized
aagtattgagctttactacacc

SEQ ID NO: 55214 - DNA, 22 bp, Artificial Sequence
  chemically synthesized
agctttactacacctagtccag

SEQ ID NO: 55215 - DNA, 22 bp, Artificial Sequence
  chemically synthesized
tactacacctagtccagcttcc

SEQ ID NO: 55216 - DNA, 22 bp, Artificial Sequence
  chemically synthesized
actacacctagtccagcttcca

SEQ ID NO: 55217 - DNA, 22 bp, Artificial Sequence
  chemically synthesized
ctacacctagtccagcttccat

SEQ ID NO: 55218 - DNA, 22 bp, Artificial Sequence
  chemically synthesized
cacctagtccagcttccattgt

SEQ ID NO: 55219 - DNA, 22 bp, Artificial Sequence
  chemically synthesized
gtccagcttccattgtccattt

SEQ ID NO: 55220 - DNA, 22 bp, Artificial Sequence
  chemically synthesized
ccattgtccatttccagccttg

SEQ ID NO: 55221 - DNA, 22 bp, Artificial Sequence
  chemically synthesized
cattgtccatttccagccttgg

SEQ ID NO: 55222 - DNA, 22 bp, Artificial Sequence
  chemically synthesized
tccatttccagccttggtgacg

SEQ ID NO: 55223 - DNA, 22 bp, Artificial Sequence
  chemically synthesized
ccagccttggtgacgtgtcaga

SEQ ID NO: 55224 - DNA, 22 bp, Artificial Sequence
  chemically synthesized
cagccttggtgacgtgtcagag

SEQ ID NO: 55225 - DNA, 22 bp, Artificial Sequence
  chemically synthesized
ggtgacgtgtcagaggcaaagt

SEQ ID NO: 55226 - DNA, 22 bp, Artificial Sequence
  chemically synthesized
gtgacgtgtcagaggcaaagtg

SEQ ID NO: 55227 - DNA, 22 bp, Artificial Sequence
  chemically synthesized
gcagttcagccaatgacttgtt

SEQ ID NO: 55228 - DNA, 22 bp, Artificial Sequence
  chemically synthesized
cagttcagccaatgacttgttt

SEQ ID NO: 55229 - DNA, 22 bp, Artificial Sequence
  chemically synthesized
agccaatgacttgtttgactca

SEQ ID NO: 55230 - DNA, 22 bp, Artificial Sequence
  chemically synthesized
gtttgactcagaacatctggcc

SEQ ID NO: 55231 - DNA, 22 bp, Artificial Sequence
  chemically synthesized
tttgactcagaacatctggcca

SEQ ID NO: 55232 - DNA, 22 bp, Artificial Sequence
  chemically synthesized
gactcagaacatctggccaggc

SEQ ID NO: 55233 - DNA, 22 bp, Artificial Sequence
  chemically synthesized
actcagaacatctggccaggcc

SEQ ID NO: 55234 - DNA, 22 bp, Artificial Sequence
  chemically synthesized
agaacatctggccaggcctcct

SEQ ID NO: 55235 - DNA, 22 bp, Artificial Sequence
  chemically synthesized
gccaggcctccttaggggttca

SEQ ID NO: 55236 - DNA, 22 bp, Artificial Sequence
  chemically synthesized
cttaggggttcagctcgttctc

SEQ ID NO: 55237 - DNA, 22 bp, Artificial Sequence
  chemically synthesized
aggggttcagctcgttctcaag

SEQ ID NO: 55238 - DNA, 22 bp, Artificial Sequence
  chemically synthesized
ggggttcagctcgttctcaagg

SEQ ID NO: 55239 - DNA, 22 bp, Artificial Sequence
  chemically synthesized
agctcgttctcaaggcttccct

SEQ ID NO: 55240 - DNA, 22 bp, Artificial Sequence
  chemically synthesized
gttctcaaggcttccctgaagt

SEQ ID NO: 55241 - DNA, 22 bp, Artificial Sequence
  chemically synthesized
tcaaggcttccctgaagtagag

SEQ ID NO: 55242 - DNA, 22 bp, Artificial Sequence
  chemically synthesized
aaggcttccctgaagtagagtg

SEQ ID NO: 55243 - DNA, 22 bp, Artificial Sequence
  chemically synthesized
ccctgaagtagagtgggctggc

SEQ ID NO: 55244 - DNA, 22 bp, Artificial Sequence
  chemically synthesized
cctgaagtagagtgggctggca

SEQ ID NO: 55245 - DNA, 22 bp, Artificial Sequence
  chemically synthesized
aagtagagtgggctggcagggt

SEQ ID NO: 55246 - DNA, 22 bp, Artificial Sequence
  chemically synthesized
gcagggtagttggaggtggtgg

SEQ ID NO: 55247 - DNA, 22 bp, Artificial Sequence
  chemically synthesized
gaggtggtggaaagagttaact

SEQ ID NO: 55248 - DNA, 22 bp, Artificial Sequence
  chemically synthesized
actgagcttcagggctagcctt

SEQ ID NO: 55249 - DNA, 22 bp, Artificial Sequence
  chemically synthesized
agcttcagggctagccttggat

SEQ ID NO: 55250 - DNA, 22 bp, Artificial Sequence
  chemically synthesized
cagggctagccttggatccata

SEQ ID NO: 55251 - DNA, 22 bp, Artificial Sequence
  chemically synthesized
agggctagccttggatccatat

SEQ ID NO: 55252 - DNA, 22 bp, Artificial Sequence
  chemically synthesized
gccttggatccatattggctgt

SEQ ID NO: 55253 - DNA, 22 bp, Artificial Sequence
  chemically synthesized
ggatccatattggctgtcagcc

SEQ ID NO: 55254 - DNA, 22 bp, Artificial Sequence
  chemically synthesized
gatccatattggctgtcagccc

SEQ ID NO: 55255 - DNA, 22 bp, Artificial Sequence
  chemically synthesized
gctgtcagcccggatggggctg

SEQ ID NO: 55256 - DNA, 22 bp, Artificial Sequence
  chemically synthesized
tcagcccggatggggctgtaat

SEQ ID NO: 55257 - DNA, 22 bp, Artificial Sequence
  chemically synthesized
taattaaacacagccccgtggt

SEQ ID NO: 55258 - DNA, 22 bp, Artificial Sequence
  chemically synthesized
aacacagccccgtggtgggatg

SEQ ID NO: 55259 - DNA, 22 bp, Artificial Sequence
  chemically synthesized
gactttaagatgccattttcga

SEQ ID NO: 55260 - DNA, 22 bp, Artificial Sequence
  chemically synthesized
actttaagatgccattttcgac

SEQ ID NO: 55261 - DNA, 22 bp, Artificial Sequence
  chemically synthesized
taagatgccattttcgactggc

SEQ ID NO: 55262 - DNA, 22 bp, Artificial Sequence
  chemically synthesized
aagatgccattttcgactggcc

SEQ ID NO: 55263 - DNA, 22 bp, Artificial Sequence
  chemically synthesized
agatgccattttcgactggcca

SEQ ID NO: 55264 - DNA, 22 bp, Artificial Sequence
  chemically synthesized
tcgactggccaggccagagtag

SEQ ID NO: 55265 - DNA, 22 bp, Artificial Sequence
  chemically synthesized
cgactggccaggccagagtaga

SEQ ID NO: 55266 - DNA, 22 bp, Artificial Sequence
  chemically synthesized
gactggccaggccagagtagag

SEQ ID NO: 55267 - DNA, 22 bp, Artificial Sequence
  chemically synthesized
gccaggccagagtagagagggc

SEQ ID NO: 55268 - DNA, 22 bp, Artificial Sequence
  chemically synthesized
ctgaagcgcacagacatgctta

SEQ ID NO: 55269 - DNA, 22 bp, Artificial Sequence
  chemically synthesized
aagcgcacagacatgcttactc

SEQ ID NO: 55270 - DNA, 22 bp, Artificial Sequence
  chemically synthesized
actcgaaaagtttaagggcatg

SEQ ID NO: 55271 - DNA, 22 bp, Artificial Sequence
  chemically synthesized
ctcgaaaagtttaagggcatgt

SEQ ID NO: 55272 - DNA, 22 bp, Artificial Sequence
  chemically synthesized
gaaaagtttaagggcatgttgg

SEQ ID NO: 55273 - DNA, 22 bp, Artificial Sequence
  chemically synthesized
aagggcatgttggaaatttcaa

SEQ ID NO: 55274 - DNA, 22 bp, Artificial Sequence
  chemically synthesized
agggcatgttggaaatttcaaa

SEQ ID NO: 55275 - DNA, 22 bp, Artificial Sequence
  chemically synthesized
gaaatttcaaaaggttggtttg

SEQ ID NO: 55276 - DNA, 22 bp, Artificial Sequence
  chemically synthesized
caaaaggttggtttgacaggaa

SEQ ID NO: 55277 - DNA, 22 bp, Artificial Sequence
  chemically synthesized
aaaaggttggtttgacaggaac

SEQ ID NO: 55278 - DNA, 22 bp, Artificial Sequence
  chemically synthesized
gtttgacaggaacggctgctcc

SEQ ID NO: 55279 - DNA, 22 bp, Artificial Sequence
  chemically synthesized
gacaggaacggctgctccctgc

SEQ ID NO: 55280 - DNA, 22 bp, Artificial Sequence
  chemically synthesized
acaggaacggctgctccctgca

SEQ ID NO: 55281 - DNA, 22 bp, Artificial Sequence
  chemically synthesized
ctccctgcagcctgcctcctca

SEQ ID NO: 55282 - DNA, 22 bp, Artificial Sequence
  chemically synthesized
cctgcagcctgcctcctcagct

SEQ ID NO: 55283 - DNA, 22 bp, Artificial Sequence
  chemically synthesized
cagcctgcctcctcagctaaat

SEQ ID NO: 55284 - DNA, 22 bp, Artificial Sequence
  chemically synthesized
cctcctcagctaaatgataaat

SEQ ID NO: 55285 - DNA, 22 bp, Artificial Sequence
  chemically synthesized
ctcagctaaatgataaatgctt

SEQ ID NO: 55286 - DNA, 22 bp, Artificial Sequence
  chemically synthesized
agctaaatgataaatgcttctc

SEQ ID NO: 55287 - DNA, 22 bp, Artificial Sequence
  chemically synthesized
aatgataaatgcttctctgtgc

SEQ ID NO: 55288 - DNA, 22 bp, Artificial Sequence
  chemically synthesized
ctctgtgctctctcttgtctct

SEQ ID NO: 55289 - DNA, 22 bp, Artificial Sequence
  chemically synthesized
tctgtgctctctcttgtctctg

SEQ ID NO: 55290 - DNA, 22 bp, Artificial Sequence
  chemically synthesized
tgtgctctctcttgtctctgat

SEQ ID NO: 55291 - DNA, 22 bp, Artificial Sequence
  chemically synthesized
tgctctctcttgtctctgatgt

SEQ ID NO: 55292 - DNA, 22 bp, Artificial Sequence
  chemically synthesized
tctcttgtctctgatgtggttt

SEQ ID NO: 55293 - DNA, 22 bp, Artificial Sequence
  chemically synthesized
tcttgtctctgatgtggttttg

SEQ ID NO: 55294 - DNA, 22 bp, Artificial Sequence
  chemically synthesized
ttgtctctgatgtggttttgac

SEQ ID NO: 55295 - DNA, 22 bp, Artificial Sequence
  chemically synthesized
gtctctgatgtggttttgacag

SEQ ID NO: 55296 - DNA, 22 bp, Artificial Sequence
  chemically synthesized
tctctgatgtggttttgacaga

SEQ ID NO: 55297 - DNA, 22 bp, Artificial Sequence
  chemically synthesized
tgatgtggttttgacagatgta

SEQ ID NO: 55298 - DNA, 22 bp, Artificial Sequence
  chemically synthesized
atgtggttttgacagatgtatc

SEQ ID NO: 55299 - DNA, 22 bp, Artificial Sequence
  chemically synthesized
tgacagatgtatcttgattttg

SEQ ID NO: 55300 - DNA, 22 bp, Artificial Sequence
  chemically synthesized
gacagatgtatcttgattttgt

SEQ ID NO: 55301 - DNA, 22 bp, Artificial Sequence
  chemically synthesized
acagatgtatcttgattttgtt

SEQ ID NO: 55302 - DNA, 22 bp, Artificial Sequence
  chemically synthesized
gattttgtttgtggtttacaca

SEQ ID NO: 55303 - DNA, 22 bp, Artificial Sequence
  chemically synthesized
attttgtttgtggtttacacag

SEQ ID NO: 55304 - DNA, 22 bp, Artificial Sequence
  chemically synthesized
tgtttgtggtttacacagccac

SEQ ID NO: 55305 - DNA, 22 bp, Artificial Sequence
  chemically synthesized
gtttgtggtttacacagccaca

SEQ ID NO: 55306 - DNA, 22 bp, Artificial Sequence
  chemically synthesized
tttgtggtttacacagccacat

SEQ ID NO: 55307 - DNA, 22 bp, Artificial Sequence
  chemically synthesized
gtggtttacacagccacatgtc

SEQ ID NO: 55308 - DNA, 22 bp, Artificial Sequence
  chemically synthesized
tggtttacacagccacatgtca

SEQ ID NO: 55309 - DNA, 22 bp, Artificial Sequence
  chemically synthesized
acacagccacatgtcaccctta

SEQ ID NO: 55310 - DNA, 22 bp, Artificial Sequence
  chemically synthesized
cacagccacatgtcacccttac

SEQ ID NO: 55311 - DNA, 22 bp, Artificial Sequence
  chemically synthesized
acaaatgtccagtccagactcc

SEQ ID NO: 55312 - DNA, 22 bp, Artificial Sequence
  chemically synthesized
caaatgtccagtccagactcca

SEQ ID NO: 55313 - DNA, 22 bp, Artificial Sequence
  chemically synthesized
cactgtttctgctataacacaa

SEQ ID NO: 55314 - DNA, 22 bp, Artificial Sequence
  chemically synthesized
tttctgctataacacaatgtaa

SEQ ID NO: 55315 - DNA, 22 bp, Artificial Sequence
  chemically synthesized
ctgctataacacaatgtaaaaa

SEQ ID NO: 55316 - DNA, 22 bp, Artificial Sequence
  chemically synthesized
tgctataacacaatgtaaaaat

SEQ ID NO: 55317 - DNA, 22 bp, Artificial Sequence
  chemically synthesized
ctataacacaatgtaaaaattt

SEQ ID NO: 55318 - DNA, 22 bp, Artificial Sequence
  chemically synthesized
taacacaatgtaaaaattttct

SEQ ID NO: 55319 - DNA, 22 bp, Artificial Sequence
  chemically synthesized
tcttggaaaaatacacacacgt

SEQ ID NO: 55320 - DNA, 22 bp, Artificial Sequence
  chemically synthesized
cttggaaaaatacacacacgta

SEQ ID NO: 55321 - DNA, 22 bp, Artificial Sequence
  chemically synthesized
ttggaaaaatacacacacgtat

SEQ ID NO: 55322 - DNA, 22 bp, Artificial Sequence
  chemically synthesized
ggaaaaatacacacacgtattc

SEQ ID NO: 55323 - DNA, 22 bp, Artificial Sequence
  chemically synthesized
gaaaaatacacacacgtattca

SEQ ID NO: 55324 - DNA, 22 bp, Artificial Sequence
  chemically synthesized
aacagccctccctcctttggtt

SEQ ID NO: 55325 - DNA, 22 bp, Artificial Sequence
  chemically synthesized
cctcctttggttaattttagca

SEQ ID NO: 55326 - DNA, 22 bp, Artificial Sequence
  chemically synthesized
ctttggttaattttagcaggga

SEQ ID NO: 55327 - DNA, 22 bp, Artificial Sequence
  chemically synthesized
tggttaattttagcagggaggc

SEQ ID NO: 55328 - DNA, 22 bp, Artificial Sequence
  chemically synthesized
ggttaattttagcagggaggca

SEQ ID NO: 55329 - DNA, 22 bp, Artificial Sequence
  chemically synthesized
gttaattttagcagggaggcag

SEQ ID NO: 55330 - DNA, 22 bp, Artificial Sequence
  chemically synthesized
attttagcagggaggcagctag

SEQ ID NO: 55331 - DNA, 22 bp, Artificial Sequence
  chemically synthesized
tagcagggaggcagctaggtgt

SEQ ID NO: 55332 - DNA, 22 bp, Artificial Sequence
  chemically synthesized
agcagggaggcagctaggtgtg

SEQ ID NO: 55333 - DNA, 22 bp, Artificial Sequence
  chemically synthesized
gcagggaggcagctaggtgtgt

SEQ ID NO: 55334 - DNA, 22 bp, Artificial Sequence
  chemically synthesized
ggtgtgtgggtttctcggcagc

SEQ ID NO: 55335 - DNA, 22 bp, Artificial Sequence
  chemically synthesized
ctcggcagctcaagggaaaagg

SEQ ID NO: 55336 - DNA, 22 bp, Artificial Sequence
  chemically synthesized
tcggcagctcaagggaaaagga

SEQ ID NO: 55337 - DNA, 22 bp, Artificial Sequence
  chemically synthesized
ggcagctcaagggaaaaggaat

SEQ ID NO: 55338 - DNA, 22 bp, Artificial Sequence
  chemically synthesized
aagggaaaaggaattaaaggct

SEQ ID NO: 55339 - DNA, 22 bp, Artificial Sequence
  chemically synthesized
aaggctagcagtgggacttaaa

SEQ ID NO: 55340 - DNA, 22 bp, Artificial Sequence
  chemically synthesized
gcagtgggacttaaattccctt

SEQ ID NO: 55341 - DNA, 22 bp, Artificial Sequence
  chemically synthesized
aaattcccttctctaagtgata

SEQ ID NO: 55342 - DNA, 22 bp, Artificial Sequence
  chemically synthesized
aattcccttctctaagtgataa

SEQ ID NO: 55343 - DNA, 22 bp, Artificial Sequence
  chemically synthesized
ccttctctaagtgataaacagt

SEQ ID NO: 55344 - DNA, 22 bp, Artificial Sequence
  chemically synthesized
ctctaagtgataaacagtaaca

SEQ ID NO: 55345 - DNA, 22 bp, Artificial Sequence
  chemically synthesized
tctaagtgataaacagtaacac

SEQ ID NO: 55346 - DNA, 22 bp, Artificial Sequence
  chemically synthesized
taagtgataaacagtaacacta

SEQ ID NO: 55347 - DNA, 22 bp, Artificial Sequence
  chemically synthesized
agtgataaacagtaacactata

SEQ ID NO: 55348 - DNA, 22 bp, Artificial Sequence
  chemically synthesized
tatagtgaccctcaaaacattt

SEQ ID NO: 55349 - DNA, 22 bp, Artificial Sequence
  chemically synthesized
aaaacattttttgcttgagcat

SEQ ID NO: 55350 - DNA, 22 bp, Artificial Sequence
  chemically synthesized
tttgcttgagcatgttagacaa

SEQ ID NO: 55351 - DNA, 22 bp, Artificial Sequence
  chemically synthesized
ttgcttgagcatgttagacaaa

SEQ ID NO: 55352 - DNA, 22 bp, Artificial Sequence
  chemically synthesized
tgcttgagcatgttagacaaaa

SEQ ID NO: 55353 - DNA, 22 bp, Artificial Sequence
  chemically synthesized
gcttgagcatgttagacaaaag

SEQ ID NO: 55354 - DNA, 22 bp, Artificial Sequence
  chemically synthesized
cttgagcatgttagacaaaagt

SEQ ID NO: 55355 - DNA, 22 bp, Artificial Sequence
  chemically synthesized
gagcatgttagacaaaagtcaa

SEQ ID NO: 55356 - DNA, 22 bp, Artificial Sequence
  chemically synthesized
agcatgttagacaaaagtcaat

SEQ ID NO: 55357 - DNA, 22 bp, Artificial Sequence
  chemically synthesized
gacaaaagtcaatgcagattct

SEQ ID NO: 55358 - DNA, 22 bp, Artificial Sequence
  chemically synthesized
tgtgatgacagacatgccatgc

SEQ ID NO: 55359 - DNA, 22 bp, Artificial Sequence
  chemically synthesized
tgatgacagacatgccatgcct

SEQ ID NO: 55360 - DNA, 22 bp, Artificial Sequence
  chemically synthesized
ttggtggatcgctttcttccat

SEQ ID NO: 55361 - DNA, 22 bp, Artificial Sequence
  chemically synthesized
gtggatcgctttcttccatcta

SEQ ID NO: 55362 - DNA, 22 bp, Artificial Sequence
  chemically synthesized
tcttccatctacctaccaccca

SEQ ID NO: 55363 - DNA, 22 bp, Artificial Sequence
  chemically synthesized
cttccatctacctaccacccag

SEQ ID NO: 55364 - DNA, 22 bp, Artificial Sequence
  chemically synthesized
ttccatctacctaccacccagc

SEQ ID NO: 55365 - DNA, 22 bp, Artificial Sequence
  chemically synthesized
ccatctacctaccacccagctc

SEQ ID NO: 55366 - DNA, 22 bp, Artificial Sequence
  chemically synthesized
catctacctaccacccagctcc

SEQ ID NO: 55367 - DNA, 22 bp, Artificial Sequence
  chemically synthesized
cctaccacccagctcccgaaag

SEQ ID NO: 55368 - DNA, 22 bp, Artificial Sequence
  chemically synthesized
ccacccagctcccgaaaggcaa

SEQ ID NO: 55369 - DNA, 22 bp, Artificial Sequence
  chemically synthesized
ccgaaaggcaagaggtttgttc

SEQ ID NO: 55370 - DNA, 22 bp, Artificial Sequence
  chemically synthesized
gttcagttttaggaaaggtagt

SEQ ID NO: 55371 - DNA, 22 bp, Artificial Sequence
  chemically synthesized
ttcagttttaggaaaggtagtg

SEQ ID NO: 55372 - DNA, 22 bp, Artificial Sequence
  chemically synthesized
agttttaggaaaggtagtgcat

SEQ ID NO: 55373 - DNA, 22 bp, Artificial Sequence
  chemically synthesized
taggaaaggtagtgcatatcat

SEQ ID NO: 55374 - DNA, 22 bp, Artificial Sequence
  chemically synthesized
aggaaaggtagtgcatatcatg

SEQ ID NO: 55375 - DNA, 22 bp, Artificial Sequence
  chemically synthesized
ggaaaggtagtgcatatcatga

SEQ ID NO: 55376 - DNA, 22 bp, Artificial Sequence
  chemically synthesized
attcactggaacttgtctctcc

SEQ ID NO: 55377 - DNA, 22 bp, Artificial Sequence
  chemically synthesized
actggaacttgtctctccgacc

SEQ ID NO: 55378 - DNA, 22 bp, Artificial Sequence
  chemically synthesized
gaacttgtctctccgacctagt

SEQ ID NO: 55379 - DNA, 22 bp, Artificial Sequence
  chemically synthesized
gtctctccgacctagtttgacc

SEQ ID NO: 55380 - DNA, 22 bp, Artificial Sequence
  chemically synthesized
tctctccgacctagtttgacca

SEQ ID NO: 55381 - DNA, 22 bp, Artificial Sequence
  chemically synthesized
tccgacctagtttgaccacaaa

SEQ ID NO: 55382 - DNA, 22 bp, Artificial Sequence
  chemically synthesized
cgacctagtttgaccacaaagt

SEQ ID NO: 55383 - DNA, 22 bp, Artificial Sequence
  chemically synthesized
gtttgaccacaaagttgaacca

SEQ ID NO: 55384 - DNA, 22 bp, Artificial Sequence
  chemically synthesized
gaccacaaagttgaaccataat

SEQ ID NO: 55385 - DNA, 22 bp, Artificial Sequence
  chemically synthesized
accacaaagttgaaccataata

SEQ ID NO: 55386 - DNA, 22 bp, Artificial Sequence
  chemically synthesized
aaccataataggtcagtggtct

SEQ ID NO: 55387 - DNA, 22 bp, Artificial Sequence
  chemically synthesized
gaggggattaaatgtcatatta

SEQ ID NO: 55388 - DNA, 22 bp, Artificial Sequence
  chemically synthesized
aatgtcatattatttctcctct

SEQ ID NO: 55389 - DNA, 22 bp, Artificial Sequence
  chemically synthesized
tttctcctctccccctctagaa

SEQ ID NO: 55390 - DNA, 22 bp, Artificial Sequence
  chemically synthesized
ctcctctccccctctagaattt

SEQ ID NO: 55391 - DNA, 22 bp, Artificial Sequence
  chemically synthesized
tcctctccccctctagaatttg

SEQ ID NO: 55392 - DNA, 22 bp, Artificial Sequence
  chemically synthesized
ctctccccctctagaatttgat

SEQ ID NO: 55393 - DNA, 22 bp, Artificial Sequence
  chemically synthesized
tccccctctagaatttgatcat

SEQ ID NO: 55394 - DNA, 22 bp, Artificial Sequence
  chemically synthesized
cccctctagaatttgatcatta

SEQ ID NO: 55395 - DNA, 22 bp, Artificial Sequence
  chemically synthesized
tagaatttgatcattaaaacca

SEQ ID NO: 55396 - DNA, 22 bp, Artificial Sequence
  chemically synthesized
gaatttgatcattaaaaccaaa

SEQ ID NO: 55397 - DNA, 22 bp, Artificial Sequence
  chemically synthesized
gatcattaaaaccaaacatggc

SEQ ID NO: 55398 - DNA, 22 bp, Artificial Sequence
  chemically synthesized
atcattaaaaccaaacatggca

SEQ ID NO: 55399 - DNA, 22 bp, Artificial Sequence
  chemically synthesized
aaaccaaacatggcattttctt

SEQ ID NO: 55400 - DNA, 22 bp, Artificial Sequence
  chemically synthesized
tctttctttttttagtgctttc

SEQ ID NO: 55401 - DNA, 22 bp, Artificial Sequence
  chemically synthesized
ctttctttttttagtgctttct

SEQ ID NO: 55402 - DNA, 22 bp, Artificial Sequence
  chemically synthesized
tttctttttttagtgctttctg

SEQ ID NO: 55403 - DNA, 22 bp, Artificial Sequence
  chemically synthesized
tctttttttagtgctttctgtg

SEQ ID NO: 55404 - DNA, 22 bp, Artificial Sequence
  chemically synthesized
ctttttttagtgctttctgtga

SEQ ID NO: 55405 - DNA, 22 bp, Artificial Sequence
  chemically synthesized
tttttttagtgctttctgtgat

SEQ ID NO: 55406 - DNA, 22 bp, Artificial Sequence
  chemically synthesized
tttttagtgctttctgtgatag

SEQ ID NO: 55407 - DNA, 22 bp, Artificial Sequence
  chemically synthesized
ttttagtgctttctgtgatagc

SEQ ID NO: 55408 - DNA, 22 bp, Artificial Sequence
  chemically synthesized
tttagtgctttctgtgatagca

SEQ ID NO: 55409 - DNA, 22 bp, Artificial Sequence
  chemically synthesized
ttagtgctttctgtgatagcac

SEQ ID NO: 55410 - DNA, 22 bp, Artificial Sequence
  chemically synthesized
tagtgctttctgtgatagcact

SEQ ID NO: 55411 - DNA, 22 bp, Artificial Sequence
  chemically synthesized
agtgctttctgtgatagcactc

SEQ ID NO: 55412 - DNA, 22 bp, Artificial Sequence
  chemically synthesized
gtgctttctgtgatagcactca

SEQ ID NO: 55413 - DNA, 22 bp, Artificial Sequence
  chemically synthesized
tctgtgatagcactcagatact

SEQ ID NO: 55414 - DNA, 22 bp, Artificial Sequence
  chemically synthesized
ctgtgatagcactcagatactt

SEQ ID NO: 55415 - DNA, 22 bp, Artificial Sequence
  chemically synthesized
tgtgatagcactcagatacttt

SEQ ID NO: 55416 - DNA, 22 bp, Artificial Sequence
  chemically synthesized
tgatagcactcagatactttcc

SEQ ID NO: 55417 - DNA, 22 bp, Artificial Sequence
  chemically synthesized
agatactttccctttagtgaaa

SEQ ID NO: 55418 - DNA, 22 bp, Artificial Sequence
  chemically synthesized
tccctttagtgaaatgggaaat

SEQ ID NO: 55419 - DNA, 22 bp, Artificial Sequence
  chemically synthesized
ccctttagtgaaatgggaaatc

SEQ ID NO: 55420 - DNA, 22 bp, Artificial Sequence
  chemically synthesized
cctttagtgaaatgggaaatct

SEQ ID NO: 55421 - DNA, 22 bp, Artificial Sequence
  chemically synthesized
tagtgaaatgggaaatctgctg

SEQ ID NO: 55422 - DNA, 22 bp, Artificial Sequence
  chemically synthesized
agtgaaatgggaaatctgctgc

SEQ ID NO: 55423 - DNA, 22 bp, Artificial Sequence
  chemically synthesized
gtgaaatgggaaatctgctgct

SEQ ID NO: 55424 - DNA, 22 bp, Artificial Sequence
  chemically synthesized
ctgctagggaagctgcatttgt

SEQ ID NO: 55425 - DNA, 22 bp, Artificial Sequence
  chemically synthesized
ctagggaagctgcatttgtgga

SEQ ID NO: 55426 - DNA, 22 bp, Artificial Sequence
  chemically synthesized
gggaagctgcatttgtggagtg

SEQ ID NO: 55427 - DNA, 22 bp, Artificial Sequence
  chemically synthesized
catttgtggagtgtatttcttg

SEQ ID NO: 55428 - DNA, 22 bp, Artificial Sequence
  chemically synthesized
gtggagtgtatttcttgaatcc

SEQ ID NO: 55429 - DNA, 22 bp, Artificial Sequence
  chemically synthesized
tggagtgtatttcttgaatcca

SEQ ID NO: 55430 - DNA, 22 bp, Artificial Sequence
  chemically synthesized
cttgaatccaccacatttacct

SEQ ID NO: 55431 - DNA, 22 bp, Artificial Sequence
  chemically synthesized
ttgaatccaccacatttacctt

SEQ ID NO: 55432 - DNA, 22 bp, Artificial Sequence
  chemically synthesized
gaatccaccacatttaccttat

SEQ ID NO: 55433 - DNA, 22 bp, Artificial Sequence
  chemically synthesized
aatccaccacatttaccttatg

SEQ ID NO: 55434 - DNA, 22 bp, Artificial Sequence
  chemically synthesized
accttatgtgacatgtaggtga

SEQ ID NO: 55435 - DNA, 22 bp, Artificial Sequence
  chemically synthesized
ccttatgtgacatgtaggtgaa

SEQ ID NO: 55436 - DNA, 22 bp, Artificial Sequence
  chemically synthesized
atgtgacatgtaggtgaagatt

SEQ ID NO: 55437 - DNA, 22 bp, Artificial Sequence
  chemically synthesized
tgtgacatgtaggtgaagattt

SEQ ID NO: 55438 - DNA, 22 bp, Artificial Sequence
  chemically synthesized
tatctcccctaccccccagcag

SEQ ID NO: 55439 - DNA, 22 bp, Artificial Sequence
  chemically synthesized
atctcccctaccccccagcagg

SEQ ID NO: 55440 - DNA, 22 bp, Artificial Sequence
  chemically synthesized
tctcccctaccccccagcagga

SEQ ID NO: 55441 - DNA, 22 bp, Artificial Sequence
  chemically synthesized
ccctaccccccagcaggatgtg

SEQ ID NO: 55442 - DNA, 22 bp, Artificial Sequence
  chemically synthesized
ccccccagcaggatgtgggaat

SEQ ID NO: 55443 - DNA, 22 bp, Artificial Sequence
  chemically synthesized
ccatgtgttgtcttgtgactgg

SEQ ID NO: 55444 - DNA, 22 bp, Artificial Sequence
  chemically synthesized
catgtgttgtcttgtgactgga

SEQ ID NO: 55445 - DNA, 22 bp, Artificial Sequence
  chemically synthesized
tcttgtgactggaaggaaaatg

SEQ ID NO: 55446 - DNA, 22 bp, Artificial Sequence
  chemically synthesized
gtgactggaaggaaaatgaaca

SEQ ID NO: 55447 - DNA, 22 bp, Artificial Sequence
  chemically synthesized
tgactggaaggaaaatgaacag

SEQ ID NO: 55448 - DNA, 22 bp, Artificial Sequence
  chemically synthesized
gaaggaaaatgaacagaagtgt

SEQ ID NO: 55449 - DNA, 22 bp, Artificial Sequence
  chemically synthesized
atgaagcaagagcaggcggaag

SEQ ID NO: 55450 - DNA, 22 bp, Artificial Sequence
  chemically synthesized
gtcgtcttcggagatccaaagc

SEQ ID NO: 55451 - DNA, 22 bp, Artificial Sequence
  chemically synthesized
tcgtcttcggagatccaaagcc

SEQ ID NO: 55452 - DNA, 22 bp, Artificial Sequence
  chemically synthesized
cggagatccaaagccttgctaa

SEQ ID NO: 55453 - DNA, 22 bp, Artificial Sequence
  chemically synthesized
ggagatccaaagccttgctaaa

SEQ ID NO: 55454 - DNA, 22 bp, Artificial Sequence
  chemically synthesized
gctaaatcaccaaatatggagt

SEQ ID NO: 55455 - DNA, 22 bp, Artificial Sequence
  chemically synthesized
ctaaatcaccaaatatggagta

SEQ ID NO: 55456 - DNA, 22 bp, Artificial Sequence
  chemically synthesized
aatcaccaaatatggagtaaca

SEQ ID NO: 55457 - DNA, 22 bp, Artificial Sequence
  chemically synthesized
gcgtgatgtaacatcgtattta

SEQ ID NO: 55458 - DNA, 22 bp, Artificial Sequence
  chemically synthesized
cgtgatgtaacatcgtatttac

SEQ ID NO: 55459 - DNA, 22 bp, Artificial Sequence
  chemically synthesized
acatatcgagctgctcgtttaa

SEQ ID NO: 55460 - DNA, 22 bp, Artificial Sequence
  chemically synthesized
catatcgagctgctcgtttaaa

SEQ ID NO: 55461 - DNA, 22 bp, Artificial Sequence
  chemically synthesized
ctcgtttaaaagacaaaacaca

SEQ ID NO: 55462 - DNA, 22 bp, Artificial Sequence
  chemically synthesized
gtttaaaagacaaaacacagtg

SEQ ID NO: 55463 - DNA, 22 bp, Artificial Sequence
  chemically synthesized
aaaagacaaaacacagtgtctg

SEQ ID NO: 55464 - DNA, 22 bp, Artificial Sequence
  chemically synthesized
aaagacaaaacacagtgtctgt

SEQ ID NO: 55465 - DNA, 22 bp, Artificial Sequence
  chemically synthesized
tcaagcaagaattaaaaccaca

SEQ ID NO: 55466 - DNA, 22 bp, Artificial Sequence
  chemically synthesized
aaaccacacttcttactgaggt

SEQ ID NO: 55467 - DNA, 22 bp, Artificial Sequence
  chemically synthesized
cttactgaggtcccaaataggt

SEQ ID NO: 55468 - DNA, 22 bp, Artificial Sequence
  chemically synthesized
ttactgaggtcccaaataggtt

SEQ ID NO: 55469 - DNA, 22 bp, Artificial Sequence
  chemically synthesized
actgaggtcccaaataggttat

SEQ ID NO: 55470 - DNA, 22 bp, Artificial Sequence
  chemically synthesized
ctgaggtcccaaataggttatt

SEQ ID NO: 55471 - DNA, 22 bp, Artificial Sequence
  chemically synthesized
aggtcccaaataggttattcag

SEQ ID NO: 55472 - DNA, 22 bp, Artificial Sequence
  chemically synthesized
ttcagtcttagattaaccagct

SEQ ID NO: 55473 - DNA, 22 bp, Artificial Sequence
  chemically synthesized
agtcttagattaaccagctcaa

SEQ ID NO: 55474 - DNA, 22 bp, Artificial Sequence
  chemically synthesized
agattaaccagctcaaaaattc

SEQ ID NO: 55475 - DNA, 22 bp, Artificial Sequence
  chemically synthesized
gattaaccagctcaaaaattct

SEQ ID NO: 55476 - DNA, 22 bp, Artificial Sequence
  chemically synthesized
accagctcaaaaattctgtgcc

SEQ ID NO: 55477 - DNA, 22 bp, Artificial Sequence
  chemically synthesized
aaaaattctgtgcctctgtatt

SEQ ID NO: 55478 - DNA, 22 bp, Artificial Sequence
  chemically synthesized
tgtgcctctgtatttagaggag

SEQ ID NO: 55479 - DNA, 22 bp, Artificial Sequence
  chemically synthesized
tgcctctgtatttagaggagga

SEQ ID NO: 55480 - DNA, 22 bp, Artificial Sequence
  chemically synthesized
tgtatttagaggaggaatctaa

SEQ ID NO: 55481 - DNA, 22 bp, Artificial Sequence
  chemically synthesized
tatttagaggaggaatctaaat

SEQ ID NO: 55482 - DNA, 22 bp, Artificial Sequence
  chemically synthesized
agaggaggaatctaaatgctgg

SEQ ID NO: 55483 - DNA, 22 bp, Artificial Sequence
  chemically synthesized
gaggaggaatctaaatgctggg

SEQ ID NO: 55484 - DNA, 22 bp, Artificial Sequence
  chemically synthesized
aatgctggggggaaggccttac

SEQ ID NO: 55485 - DNA, 22 bp, Artificial Sequence
  chemically synthesized
gggggaaggccttacatatagt

SEQ ID NO: 55486 - DNA, 22 bp, Artificial Sequence
  chemically synthesized
acatatagttaagacttttact

SEQ ID NO: 55487 - DNA, 22 bp, Artificial Sequence
  chemically synthesized
catatagttaagacttttactg

SEQ ID NO: 55488 - DNA, 22 bp, Artificial Sequence
  chemically synthesized
agacttttactgctatagttgt

SEQ ID NO: 55489 - DNA, 22 bp, Artificial Sequence
  chemically synthesized
ttactgctatagttgtgaatct

SEQ ID NO: 55490 - DNA, 22 bp, Artificial Sequence
  chemically synthesized
tactgctatagttgtgaatcta

SEQ ID NO: 55491 - DNA, 22 bp, Artificial Sequence
  chemically synthesized
actgctatagttgtgaatctat

SEQ ID NO: 55492 - DNA, 22 bp, Artificial Sequence
  chemically synthesized
ctgctatagttgtgaatctatg

SEQ ID NO: 55493 - DNA, 22 bp, Artificial Sequence
  chemically synthesized
ctatagttgtgaatctatgtag

SEQ ID NO: 55494 - DNA, 22 bp, Artificial Sequence
  chemically synthesized
tagttgtgaatctatgtaggga

SEQ ID NO: 55495 - DNA, 22 bp, Artificial Sequence
  chemically synthesized
tgaatctatgtagggaaataag

SEQ ID NO: 55496 - DNA, 22 bp, Artificial Sequence
  chemically synthesized
tgtagggaaataagagatattt

SEQ ID NO: 55497 - DNA, 22 bp, Artificial Sequence
  chemically synthesized
gcttgaactccctggttgtcta

SEQ ID NO: 55498 - DNA, 22 bp, Artificial Sequence
  chemically synthesized
cttgaactccctggttgtctaa

SEQ ID NO: 55499 - DNA, 22 bp, Artificial Sequence
  chemically synthesized
gaactccctggttgtctaaagg

SEQ ID NO: 55500 - DNA, 22 bp, Artificial Sequence
  chemically synthesized
aactccctggttgtctaaaggt

SEQ ID NO: 55501 - DNA, 22 bp, Artificial Sequence
  chemically synthesized
cctggttgtctaaaggttctgt

SEQ ID NO: 55502 - DNA, 22 bp, Artificial Sequence
  chemically synthesized
gttgtctaaaggttctgttatt

SEQ ID NO: 55503 - DNA, 22 bp, Artificial Sequence
  chemically synthesized
tctaaaggttctgttattattt

SEQ ID NO: 55504 - DNA, 22 bp, Artificial Sequence
  chemically synthesized
aaggttctgttattattttttt

SEQ ID NO: 55505 - DNA, 22 bp, Artificial Sequence
  chemically synthesized
tgttattatttttttaaagaac

SEQ ID NO: 55506 - DNA, 22 bp, Artificial Sequence
  chemically synthesized
ttattatttttttaaagaacaa

SEQ ID NO: 55507 - DNA, 22 bp, Artificial Sequence
  chemically synthesized
ttatttttttaaagaacaagta

SEQ ID NO: 55508 - DNA, 22 bp, Artificial Sequence
  chemically synthesized
tttttttaaagaacaagtataa

SEQ ID NO: 55509 - DNA, 22 bp, Artificial Sequence
  chemically synthesized
ttttaaagaacaagtataatag

SEQ ID NO: 55510 - DNA, 22 bp, Artificial Sequence
  chemically synthesized
tttaaagaacaagtataatagc

SEQ ID NO: 55511 - DNA, 22 bp, Artificial Sequence
  chemically synthesized
ttaaagaacaagtataatagca

SEQ ID NO: 55512 - DNA, 22 bp, Artificial Sequence
  chemically synthesized
taaagaacaagtataatagcag

SEQ ID NO: 55513 - DNA, 22 bp, Artificial Sequence
  chemically synthesized
aaagaacaagtataatagcaga

SEQ ID NO: 55514 - DNA, 22 bp, Artificial Sequence
  chemically synthesized
aagaacaagtataatagcagag

SEQ ID NO: 55515 - DNA, 22 bp, Artificial Sequence
  chemically synthesized
gagaagccaaaaccaaaagcaa

SEQ ID NO: 55516 - DNA, 22 bp, Artificial Sequence
  chemically synthesized
aaaatatattttatagcgctaa

SEQ ID NO: 55517 - DNA, 22 bp, Artificial Sequence
  chemically synthesized
aaatatattttatagcgctaat

SEQ ID NO: 55518 - DNA, 22 bp, Artificial Sequence
  chemically synthesized
tatagcgctaataatcaatcat

SEQ ID NO: 55519 - DNA, 22 bp, Artificial Sequence
  chemically synthesized
atagcgctaataatcaatcatt

SEQ ID NO: 55520 - DNA, 22 bp, Artificial Sequence
  chemically synthesized
tagcgctaataatcaatcattt

SEQ ID NO: 55521 - DNA, 22 bp, Artificial Sequence
  chemically synthesized
ataatcaatcatttaactgaga

SEQ ID NO: 55522 - DNA, 22 bp, Artificial Sequence
  chemically synthesized
aactgagacgaaaagctctcta

SEQ ID NO: 55523 - DNA, 22 bp, Artificial Sequence
  chemically synthesized
actgagacgaaaagctctctaa

SEQ ID NO: 55524 - DNA, 22 bp, Artificial Sequence
  chemically synthesized
agacgaaaagctctctaagatg

SEQ ID NO: 55525 - DNA, 22 bp, Artificial Sequence
  chemically synthesized
tctaagatgtctaagatattca

SEQ ID NO: 55526 - DNA, 22 bp, Artificial Sequence
  chemically synthesized
taagatgtctaagatattcaat

SEQ ID NO: 55527 - DNA, 22 bp, Artificial Sequence
  chemically synthesized
agatgtctaagatattcaatgg

SEQ ID NO: 55528 - DNA, 22 bp, Artificial Sequence
  chemically synthesized
agatattcaatgggcgcacaac

SEQ ID NO: 55529 - DNA, 22 bp, Artificial Sequence
  chemically synthesized
aatgggcgcacaacaagtgctg

SEQ ID NO: 55530 - DNA, 22 bp, Artificial Sequence
  chemically synthesized
tgacccaggtgaggtaaacctt

SEQ ID NO: 55531 - DNA, 22 bp, Artificial Sequence
  chemically synthesized
tcgtgcatgaataattacaaag

SEQ ID NO: 55532 - DNA, 22 bp, Artificial Sequence
  chemically synthesized
cgtgcatgaataattacaaagt

SEQ ID NO: 55533 - DNA, 22 bp, Artificial Sequence
  chemically synthesized
gtgcatgaataattacaaagtc

SEQ ID NO: 55534 - DNA, 22 bp, Artificial Sequence
  chemically synthesized
caaagtcttgatttctttcatt

SEQ ID NO: 55535 - DNA, 22 bp, Artificial Sequence
  chemically synthesized
gatttctttcattgtgtttaat

SEQ ID NO: 55536 - DNA, 22 bp, Artificial Sequence
  chemically synthesized
atttctttcattgtgtttaatc

SEQ ID NO: 55537 - DNA, 22 bp, Artificial Sequence
  chemically synthesized
ctttcattgtgtttaatcacct

SEQ ID NO: 55538 - DNA, 22 bp, Artificial Sequence
  chemically synthesized
tttcattgtgtttaatcacctg

SEQ ID NO: 55539 - DNA, 22 bp, Artificial Sequence
  chemically synthesized
tcattgtgtttaatcacctgtt

SEQ ID NO: 55540 - DNA, 22 bp, Artificial Sequence
  chemically synthesized
cattgtgtttaatcacctgttc

SEQ ID NO: 55541 - DNA, 22 bp, Artificial Sequence
  chemically synthesized
attgtgtttaatcacctgttcc

SEQ ID NO: 55542 - DNA, 22 bp, Artificial Sequence
  chemically synthesized
tgtttaatcacctgttcccacc

SEQ ID NO: 55543 - DNA, 22 bp, Artificial Sequence
  chemically synthesized
aatcacctgttcccaccctgga

SEQ ID NO: 55544 - DNA, 22 bp, Artificial Sequence
  chemically synthesized
atcacctgttcccaccctggaa

SEQ ID NO: 55545 - DNA, 22 bp, Artificial Sequence
  chemically synthesized
ttcccaccctggaactggctga

SEQ ID NO: 55546 - DNA, 22 bp, Artificial Sequence
  chemically synthesized
ccaccctggaactggctgaaca

SEQ ID NO: 55547 - DNA, 22 bp, Artificial Sequence
  chemically synthesized
gaactggctgaacataaatagt

SEQ ID NO: 55548 - DNA, 22 bp, Artificial Sequence
  chemically synthesized
gctgaacataaatagtgtggtc

SEQ ID NO: 55549 - DNA, 22 bp, Artificial Sequence
  chemically synthesized
aacataaatagtgtggtcacat

SEQ ID NO: 55550 - DNA, 22 bp, Artificial Sequence
  chemically synthesized
aaagtgagatgtcagtaactag

SEQ ID NO: 55551 - DNA, 22 bp, Artificial Sequence
  chemically synthesized
gaatcacgacttctcataattc

SEQ ID NO: 55552 - DNA, 22 bp, Artificial Sequence
  chemically synthesized
ctcataattcacagtaatgaat

SEQ ID NO: 55553 - DNA, 22 bp, Artificial Sequence
  chemically synthesized
tcataattcacagtaatgaatt

SEQ ID NO: 55554 - DNA, 22 bp, Artificial Sequence
  chemically synthesized
ataattcacagtaatgaattaa

SEQ ID NO: 55555 - DNA, 22 bp, Artificial Sequence
  chemically synthesized
acagtaatgaattaagagtttc

SEQ ID NO: 55556 - DNA, 22 bp, Artificial Sequence
  chemically synthesized
agagtttcctatggtgaagtta

SEQ ID NO: 55557 - DNA, 22 bp, Artificial Sequence
  chemically synthesized
cctatggtgaagttaacattct

SEQ ID NO: 55558 - DNA, 22 bp, Artificial Sequence
  chemically synthesized
ctatggtgaagttaacattcta

SEQ ID NO: 55559 - DNA, 22 bp, Artificial Sequence
  chemically synthesized
tggtgaagttaacattctacca

SEQ ID NO: 55560 - DNA, 22 bp, Artificial Sequence
  chemically synthesized
acattctaccattgcacataaa

SEQ ID NO: 55561 - DNA, 22 bp, Artificial Sequence
  chemically synthesized
taccattgcacataaattccga

SEQ ID NO: 55562 - DNA, 22 bp, Artificial Sequence
  chemically synthesized
ccattgcacataaattccgacg

SEQ ID NO: 55563 - DNA, 22 bp, Artificial Sequence
  chemically synthesized
cacataaattccgacgctctgg

SEQ ID NO: 55564 - DNA, 22 bp, Artificial Sequence
  chemically synthesized
cgacgctctggccctcaggtgc

SEQ ID NO: 55565 - DNA, 22 bp, Artificial Sequence
  chemically synthesized
tggccctcaggtgcccctgaag

SEQ ID NO: 55566 - DNA, 22 bp, Artificial Sequence
  chemically synthesized
gccctcaggtgcccctgaagcg

SEQ ID NO: 55567 - DNA, 22 bp, Artificial Sequence
  chemically synthesized
aggtgcccctgaagcgaagttc

SEQ ID NO: 55568 - DNA, 22 bp, Artificial Sequence
  chemically synthesized
aagcgaagttctggaagacggc

SEQ ID NO: 55569 - DNA, 22 bp, Artificial Sequence
  chemically synthesized
tggaagacggctgtgtgtgtac

SEQ ID NO: 55570 - DNA, 22 bp, Artificial Sequence
  chemically synthesized
gaagacggctgtgtgtgtaccc

SEQ ID NO: 55571 - DNA, 22 bp, Artificial Sequence
  chemically synthesized
tgtgtgtacccccagcccattt

SEQ ID NO: 55572 - DNA, 22 bp, Artificial Sequence
  chemically synthesized
ctctaaagcacgtctgcacaat

SEQ ID NO: 55573 - DNA, 22 bp, Artificial Sequence
  chemically synthesized
tctaaagcacgtctgcacaatt

SEQ ID NO: 55574 - DNA, 22 bp, Artificial Sequence
  chemically synthesized
taaagcacgtctgcacaattcc

SEQ ID NO: 55575 - DNA, 22 bp, Artificial Sequence
  chemically synthesized
aagcacgtctgcacaattccaa

SEQ ID NO: 55576 - DNA, 22 bp, Artificial Sequence
  chemically synthesized
cacaattccaagtctgcttttc

SEQ ID NO: 55577 - DNA, 22 bp, Artificial Sequence
  chemically synthesized
caagtctgcttttctttttatg

SEQ ID NO: 55578 - DNA, 22 bp, Artificial Sequence
  chemically synthesized
cttttctttttatgatgaggaa

SEQ ID NO: 55579 - DNA, 22 bp, Artificial Sequence
  chemically synthesized
ttctttttatgatgaggaagga

SEQ ID NO: 55580 - DNA, 22 bp, Artificial Sequence
  chemically synthesized
tctttttatgatgaggaaggaa

SEQ ID NO: 55581 - DNA, 22 bp, Artificial Sequence
  chemically synthesized
ctttttatgatgaggaaggaaa

SEQ ID NO: 55582 - DNA, 22 bp, Artificial Sequence
  chemically synthesized
tttttatgatgaggaaggaaac

SEQ ID NO: 55583 - DNA, 22 bp, Artificial Sequence
  chemically synthesized
tttatgatgaggaaggaaacaa

SEQ ID NO: 55584 - DNA, 22 bp, Artificial Sequence
  chemically synthesized
ttatgatgaggaaggaaacaat

SEQ ID NO: 55585 - DNA, 22 bp, Artificial Sequence
  chemically synthesized
tatgatgaggaaggaaacaata

SEQ ID NO: 55586 - DNA, 22 bp, Artificial Sequence
  chemically synthesized
atgatgaggaaggaaacaataa

SEQ ID NO: 55587 - DNA, 22 bp, Artificial Sequence
  chemically synthesized
tgatgaggaaggaaacaataac

SEQ ID NO: 55588 - DNA, 22 bp, Artificial Sequence
  chemically synthesized
agtagatatttgaattgtgtca

SEQ ID NO: 55589 - DNA, 22 bp, Artificial Sequence
  chemically synthesized
gaattgtgtcacaaaaagaaag

SEQ ID NO: 55590 - DNA, 22 bp, Artificial Sequence
  chemically synthesized
aattgtgtcacaaaaagaaagg

SEQ ID NO: 55591 - DNA, 22 bp, Artificial Sequence
  chemically synthesized
tgtcacaaaaagaaaggagaag

SEQ ID NO: 55592 - DNA, 22 bp, Artificial Sequence
  chemically synthesized
gtattaaggaaagagatatatt

SEQ ID NO: 55593 - DNA, 22 bp, Artificial Sequence
  chemically synthesized
tattaaggaaagagatatattg

SEQ ID NO: 55594 - DNA, 22 bp, Artificial Sequence
  chemically synthesized
aggaaagagatatattgatgaa

SEQ ID NO: 55595 - DNA, 22 bp, Artificial Sequence
  chemically synthesized
atgaatctctagaagaatgtgt

SEQ ID NO: 55596 - DNA, 22 bp, Artificial Sequence
  chemically synthesized
tagaagaatgtgtttggcaacc

SEQ ID NO: 55597 - DNA, 22 bp, Artificial Sequence
  chemically synthesized
gaagaatgtgtttggcaaccac

SEQ ID NO: 55598 - DNA, 22 bp, Artificial Sequence
  chemically synthesized
ggcaaccacataaaaggtagtc

SEQ ID NO: 55599 - DNA, 22 bp, Artificial Sequence
  chemically synthesized
gcaaccacataaaaggtagtca

SEQ ID NO: 55600 - DNA, 22 bp, Artificial Sequence
  chemically synthesized
aagcgtgctgggtaggaaaggc

SEQ ID NO: 55601 - DNA, 22 bp, Artificial Sequence
  chemically synthesized
agcgtgctgggtaggaaaggct

SEQ ID NO: 55602 - DNA, 22 bp, Artificial Sequence
  chemically synthesized
ggtaggaaaggctttattaaag

SEQ ID NO: 55603 - DNA, 22 bp, Artificial Sequence
  chemically synthesized
tattaaagtgatgtaagttgga

SEQ ID NO: 55604 - DNA, 22 bp, Artificial Sequence
  chemically synthesized
attaaagtgatgtaagttggat

SEQ ID NO: 55605 - DNA, 22 bp, Artificial Sequence
  chemically synthesized
ttaaagtgatgtaagttggatt

SEQ ID NO: 55606 - DNA, 22 bp, Artificial Sequence
  chemically synthesized
aagtgatgtaagttggatttga

SEQ ID NO: 55607 - DNA, 22 bp, Artificial Sequence
  chemically synthesized
gatttgagttcactgtgagcct

SEQ ID NO: 55608 - DNA, 22 bp, Artificial Sequence
  chemically synthesized
gagttcactgtgagcctgtact

SEQ ID NO: 55609 - DNA, 22 bp, Artificial Sequence
  chemically synthesized
agttcactgtgagcctgtacta

SEQ ID NO: 55610 - DNA, 22 bp, Artificial Sequence
  chemically synthesized
actgtgagcctgtactatttta

SEQ ID NO: 55611 - DNA, 22 bp, Artificial Sequence
  chemically synthesized
tgagcctgtactattttatagg

SEQ ID NO: 55612 - DNA, 22 bp, Artificial Sequence
  chemically synthesized
tactattttataggcaggaagc

SEQ ID NO: 55613 - DNA, 22 bp, Artificial Sequence
  chemically synthesized
ttttataggcaggaagcaagaa

SEQ ID NO: 55614 - DNA, 22 bp, Artificial Sequence
  chemically synthesized
tataggcaggaagcaagaataa

SEQ ID NO: 55615 - DNA, 22 bp, Artificial Sequence
  chemically synthesized
ataggcaggaagcaagaataaa

SEQ ID NO: 55616 - DNA, 22 bp, Artificial Sequence
  chemically synthesized
taggcaggaagcaagaataaaa

SEQ ID NO: 55617 - DNA, 22 bp, Artificial Sequence
  chemically synthesized
cttcctaagataaataaagctt

SEQ ID NO: 55618 - DNA, 22 bp, Artificial Sequence
  chemically synthesized
ttcctaagataaataaagctta

SEQ ID NO: 55619 - DNA, 22 bp, Artificial Sequence
  chemically synthesized
cctaagataaataaagcttaga

SEQ ID NO: 55620 - DNA, 22 bp, Artificial Sequence
  chemically synthesized
ctaagataaataaagcttagaa

SEQ ID NO: 55621 - DNA, 22 bp, Artificial Sequence
  chemically synthesized
agataaataaagcttagaattc

SEQ ID NO: 55622 - DNA, 22 bp, Artificial Sequence
  chemically synthesized
agaattcgggactttcagatag

SEQ ID NO: 55623 - DNA, 22 bp, Artificial Sequence
  chemically synthesized
gaattcgggactttcagatagg

SEQ ID NO: 55624 - DNA, 22 bp, Artificial Sequence
  chemically synthesized
gggactttcagataggagaata

SEQ ID NO: 55625 - DNA, 22 bp, Artificial Sequence
  chemically synthesized
tcagataggagaataaggcaga

SEQ ID NO: 55626 - DNA, 22 bp, Artificial Sequence
  chemically synthesized
cagataggagaataaggcagag

SEQ ID NO: 55627 - DNA, 22 bp, Artificial Sequence
  chemically synthesized
agataggagaataaggcagagt

SEQ ID NO: 55628 - DNA, 22 bp, Artificial Sequence
  chemically synthesized
tttaaatcttgagtaaaatggt

SEQ ID NO: 55629 - DNA, 22 bp, Artificial Sequence
  chemically synthesized
taaatcttgagtaaaatggtat

SEQ ID NO: 55630 - DNA, 22 bp, Artificial Sequence
  chemically synthesized
aaatcttgagtaaaatggtatg

SEQ ID NO: 55631 - DNA, 22 bp, Artificial Sequence
  chemically synthesized
aatcttgagtaaaatggtatgc

SEQ ID NO: 55632 - DNA, 22 bp, Artificial Sequence
  chemically synthesized
gagtaaaatggtatgcattttc

SEQ ID NO: 55633 - DNA, 22 bp, Artificial Sequence
  chemically synthesized
agtaaaatggtatgcattttca

SEQ ID NO: 55634 - DNA, 22 bp, Artificial Sequence
  chemically synthesized
tcactgtactcaggcctctcca

SEQ ID NO: 55635 - DNA, 22 bp, Artificial Sequence
  chemically synthesized
cactgtactcaggcctctccaa

SEQ ID NO: 55636 - DNA, 22 bp, Artificial Sequence
  chemically synthesized
actgtactcaggcctctccaag

SEQ ID NO: 55637 - DNA, 22 bp, Artificial Sequence
  chemically synthesized
tactcaggcctctccaagctga

SEQ ID NO: 55638 - DNA, 22 bp, Artificial Sequence
  chemically synthesized
aggcctctccaagctgagtttt

SEQ ID NO: 55639 - DNA, 22 bp, Artificial Sequence
  chemically synthesized
tccaagctgagttttttttttt

SEQ ID NO: 55640 - DNA, 22 bp, Artificial Sequence
  chemically synthesized
caagctgagttttttttttttt

SEQ ID NO: 55641 - DNA, 22 bp, Artificial Sequence
  chemically synthesized
agtttttttttttttttttttt

SEQ ID NO: 55642 - DNA, 22 bp, Artificial Sequence
  chemically synthesized
ttttttttttttttttttttta

SEQ ID NO: 55643 - DNA, 22 bp, Artificial Sequence
  chemically synthesized
ttttttttttttttttttttag

SEQ ID NO: 55644 - DNA, 22 bp, Artificial Sequence
  chemically synthesized
tttttttttttttttttttaga

SEQ ID NO: 55645 - DNA, 22 bp, Artificial Sequence
  chemically synthesized
ttttttttttttttttttagac

SEQ ID NO: 55646 - DNA, 22 bp, Artificial Sequence
  chemically synthesized
tttttttttttttttttagaca

SEQ ID NO: 55647 - DNA, 22 bp, Artificial Sequence
  chemically synthesized
ttttttttttttttttagacag

SEQ ID NO: 55648 - DNA, 22 bp, Artificial Sequence
  chemically synthesized
tttttttttttttttagacaga

SEQ ID NO: 55649 - DNA, 22 bp, Artificial Sequence
  chemically synthesized
ttttttttttttttagacagag

SEQ ID NO: 55650 - DNA, 22 bp, Artificial Sequence
  chemically synthesized
tttttttttttttagacagagt

SEQ ID NO: 55651 - DNA, 22 bp, Artificial Sequence
  chemically synthesized
ttttttttttttagacagagtt

SEQ ID NO: 55652 - DNA, 22 bp, Artificial Sequence
  chemically synthesized
tttttttttttagacagagttt

SEQ ID NO: 55653 - DNA, 22 bp, Artificial Sequence
  chemically synthesized
ttttttttttagacagagtttt

SEQ ID NO: 55654 - DNA, 22 bp, Artificial Sequence
  chemically synthesized
tttttttttagacagagttttg

SEQ ID NO: 55655 - DNA, 22 bp, Artificial Sequence
  chemically synthesized
ttttttttagacagagttttgc

SEQ ID NO: 55656 - DNA, 22 bp, Artificial Sequence
  chemically synthesized
tttttttagacagagttttgct

SEQ ID NO: 55657 - DNA, 22 bp, Artificial Sequence
  chemically synthesized
ttttttagacagagttttgctc

SEQ ID NO: 55658 - DNA, 22 bp, Artificial Sequence
  chemically synthesized
tttttagacagagttttgctct

SEQ ID NO: 55659 - DNA, 22 bp, Artificial Sequence
  chemically synthesized
ttttagacagagttttgctctt

SEQ ID NO: 55660 - DNA, 22 bp, Artificial Sequence
  chemically synthesized
tttagacagagttttgctcttg

SEQ ID NO: 55661 - DNA, 22 bp, Artificial Sequence
  chemically synthesized
ttagacagagttttgctcttgt

SEQ ID NO: 55662 - DNA, 22 bp, Artificial Sequence
  chemically synthesized
tagacagagttttgctcttgtt

SEQ ID NO: 55663 - DNA, 22 bp, Artificial Sequence
  chemically synthesized
agacagagttttgctcttgttg

SEQ ID NO: 55664 - DNA, 22 bp, Artificial Sequence
  chemically synthesized
gacagagttttgctcttgttgc

SEQ ID NO: 55665 - DNA, 22 bp, Artificial Sequence
  chemically synthesized
tgctcttgttgcccaggctgga

SEQ ID NO: 55666 - DNA, 22 bp, Artificial Sequence
  chemically synthesized
gctcttgttgcccaggctggag

SEQ ID NO: 55667 - DNA, 22 bp, Artificial Sequence
  chemically synthesized
ctcttgttgcccaggctggagt

SEQ ID NO: 55668 - DNA, 22 bp, Artificial Sequence
  chemically synthesized
ttgttgcccaggctggagtgca

SEQ ID NO: 55669 - DNA, 22 bp, Artificial Sequence
  chemically synthesized
gttgcccaggctggagtgcagt

SEQ ID NO: 55670 - DNA, 22 bp, Artificial Sequence
  chemically synthesized
ttgcccaggctggagtgcagtg

SEQ ID NO: 55671 - DNA, 22 bp, Artificial Sequence
  chemically synthesized
cccaggctggagtgcagtggca

SEQ ID NO: 55672 - DNA, 22 bp, Artificial Sequence
  chemically synthesized
gagtgcagtggcatgattttgg

SEQ ID NO: 55673 - DNA, 22 bp, Artificial Sequence
  chemically synthesized
tggctcactgcaacctctgcct

SEQ ID NO: 55674 - DNA, 22 bp, Artificial Sequence
  chemically synthesized
ggctcactgcaacctctgcctc

SEQ ID NO: 55675 - DNA, 22 bp, Artificial Sequence
  chemically synthesized
gctcactgcaacctctgcctcc

SEQ ID NO: 55676 - DNA, 22 bp, Artificial Sequence
  chemically synthesized
actgcaacctctgcctcctagg

SEQ ID NO: 55677 - DNA, 22 bp, Artificial Sequence
  chemically synthesized
caacctctgcctcctaggttca

SEQ ID NO: 55678 - DNA, 22 bp, Artificial Sequence
  chemically synthesized
tgcctcctaggttcaagcgatt

SEQ ID NO: 55679 - DNA, 22 bp, Artificial Sequence
  chemically synthesized
cctcctaggttcaagcgattct

SEQ ID NO: 55680 - DNA, 22 bp, Artificial Sequence
  chemically synthesized
ctaggttcaagcgattctcctg

SEQ ID NO: 55681 - DNA, 22 bp, Artificial Sequence
  chemically synthesized
ggttcaagcgattctcctgcct

SEQ ID NO: 55682 - DNA, 22 bp, Artificial Sequence
  chemically synthesized
aagcgattctcctgcctcagcc

SEQ ID NO: 55683 - DNA, 22 bp, Artificial Sequence
  chemically synthesized
tcctgcctcagcctcccaagta

SEQ ID NO: 55684 - DNA, 22 bp, Artificial Sequence
  chemically synthesized
ctgcctcagcctcccaagtagc

SEQ ID NO: 55685 - DNA, 22 bp, Artificial Sequence
  chemically synthesized
cctcagcctcccaagtagctgg

SEQ ID NO: 55686 - DNA, 22 bp, Artificial Sequence
  chemically synthesized
agcctcccaagtagctgggatt

SEQ ID NO: 55687 - DNA, 22 bp, Artificial Sequence
  chemically synthesized
ccaagtagctgggattacaggc

SEQ ID NO: 55688 - DNA, 22 bp, Artificial Sequence
  chemically synthesized
ggattacaggcgtgtgccacta

SEQ ID NO: 55689 - DNA, 22 bp, Artificial Sequence
  chemically synthesized
caggcgtgtgccactacgccca

SEQ ID NO: 55690 - DNA, 22 bp, Artificial Sequence
  chemically synthesized
cgcccagctagttttttgtatt

SEQ ID NO: 55691 - DNA, 22 bp, Artificial Sequence
  chemically synthesized
gttttttgtattttcagtagag

SEQ ID NO: 55692 - DNA, 22 bp, Artificial Sequence
  chemically synthesized
tttgtattttcagtagaggcag

SEQ ID NO: 55693 - DNA, 22 bp, Artificial Sequence
  chemically synthesized
ttgtattttcagtagaggcagg

SEQ ID NO: 55694 - DNA, 22 bp, Artificial Sequence
  chemically synthesized
tgtattttcagtagaggcaggg

SEQ ID NO: 55695 - DNA, 22 bp, Artificial Sequence
  chemically synthesized
gtattttcagtagaggcagggt

SEQ ID NO: 55696 - DNA, 22 bp, Artificial Sequence
  chemically synthesized
tattttcagtagaggcagggtt

SEQ ID NO: 55697 - DNA, 22 bp, Artificial Sequence
  chemically synthesized
tcagtagaggcagggtttcacc

SEQ ID NO: 55698 - DNA, 22 bp, Artificial Sequence
  chemically synthesized
cagtagaggcagggtttcacca

SEQ ID NO: 55699 - DNA, 22 bp, Artificial Sequence
  chemically synthesized
agtagaggcagggtttcaccat

SEQ ID NO: 55700 - DNA, 22 bp, Artificial Sequence
  chemically synthesized
caccatgttggccaggctggtc

SEQ ID NO: 55701 - DNA, 22 bp, Artificial Sequence
  chemically synthesized
accatgttggccaggctggtct

SEQ ID NO: 55702 - DNA, 22 bp, Artificial Sequence
  chemically synthesized
gccaggctggtcttgaactcct

SEQ ID NO: 55703 - DNA, 22 bp, Artificial Sequence
  chemically synthesized
gtcttgaactcctgacctcagg

SEQ ID NO: 55704 - DNA, 22 bp, Artificial Sequence
  chemically synthesized
gaactcctgacctcaggtgatc

SEQ ID NO: 55705 - DNA, 22 bp, Artificial Sequence
  chemically synthesized
aactcctgacctcaggtgatcc

SEQ ID NO: 55706 - DNA, 22 bp, Artificial Sequence
  chemically synthesized
ctgacctcaggtgatccacctg

SEQ ID NO: 55707 - DNA, 22 bp, Artificial Sequence
  chemically synthesized
acctcaggtgatccacctggct

SEQ ID NO: 55708 - DNA, 22 bp, Artificial Sequence
  chemically synthesized
aggtgatccacctggcttggcc

SEQ ID NO: 55709 - DNA, 22 bp, Artificial Sequence
  chemically synthesized
gcttggcctcccaaagtgctgg

SEQ ID NO: 55710 - DNA, 22 bp, Artificial Sequence
  chemically synthesized
ggcctcccaaagtgctgggatt

SEQ ID NO: 55711 - DNA, 22 bp, Artificial Sequence
  chemically synthesized
gcctcccaaagtgctgggatta

SEQ ID NO: 55712 - DNA, 22 bp, Artificial Sequence
  chemically synthesized
ccaaagtgctgggattacaggc

SEQ ID NO: 55713 - DNA, 22 bp, Artificial Sequence
  chemically synthesized
ggattacaggcttgagcgaccg

SEQ ID NO: 55714 - DNA, 22 bp, Artificial Sequence
  chemically synthesized
caggcttgagcgaccgcacctg

SEQ ID NO: 55715 - DNA, 22 bp, Artificial Sequence
  chemically synthesized
gagcgaccgcacctggcccaaa

SEQ ID NO: 55716 - DNA, 22 bp, Artificial Sequence
  chemically synthesized
agcgaccgcacctggcccaaac

SEQ ID NO: 55717 - DNA, 22 bp, Artificial Sequence
  chemically synthesized
gcccaaactgagtattttttag

SEQ ID NO: 55718 - DNA, 22 bp, Artificial Sequence
  chemically synthesized
agtattttttagaggattcttt

SEQ ID NO: 55719 - DNA, 22 bp, Artificial Sequence
  chemically synthesized
tttagaggattctttttacctg

SEQ ID NO: 55720 - DNA, 22 bp, Artificial Sequence
  chemically synthesized
ttagaggattctttttacctgg

SEQ ID NO: 55721 - DNA, 22 bp, Artificial Sequence
  chemically synthesized
tagaggattctttttacctggt

SEQ ID NO: 55722 - DNA, 22 bp, Artificial Sequence
  chemically synthesized
agaggattctttttacctggtg

SEQ ID NO: 55723 - DNA, 22 bp, Artificial Sequence
  chemically synthesized
gaggattctttttacctggtga

SEQ ID NO: 55724 - DNA, 22 bp, Artificial Sequence
  chemically synthesized
tttttacctggtgaatagatgg

SEQ ID NO: 55725 - DNA, 22 bp, Artificial Sequence
  chemically synthesized
tttacctggtgaatagatgggt

SEQ ID NO: 55726 - DNA, 22 bp, Artificial Sequence
  chemically synthesized
ttacctggtgaatagatgggta

SEQ ID NO: 55727 - DNA, 22 bp, Artificial Sequence
  chemically synthesized
tacctggtgaatagatgggtat

SEQ ID NO: 55728 - DNA, 22 bp, Artificial Sequence
  chemically synthesized
acctggtgaatagatgggtatg

SEQ ID NO: 55729 - DNA, 22 bp, Artificial Sequence
  chemically synthesized
cctggtgaatagatgggtatgt

SEQ ID NO: 55730 - DNA, 22 bp, Artificial Sequence
  chemically synthesized
gtgaatagatgggtatgtgctc

SEQ ID NO: 55731 - DNA, 22 bp, Artificial Sequence
  chemically synthesized
ccccacttcatccacgtacaca

SEQ ID NO: 55732 - DNA, 22 bp, Artificial Sequence
  chemically synthesized
catccacgtacacatatgagct

SEQ ID NO: 55733 - DNA, 22 bp, Artificial Sequence
  chemically synthesized
atccacgtacacatatgagctg

SEQ ID NO: 55734 - DNA, 22 bp, Artificial Sequence
  chemically synthesized
tacacatagatgttaatcaggt

SEQ ID NO: 55735 - DNA, 22 bp, Artificial Sequence
  chemically synthesized
atcaggttgcttttttcatttt

SEQ ID NO: 55736 - DNA, 22 bp, Artificial Sequence
  chemically synthesized
cttttttcattttatttaaata

SEQ ID NO: 55737 - DNA, 22 bp, Artificial Sequence
  chemically synthesized
ttttcattttatttaaatattc

SEQ ID NO: 55738 - DNA, 22 bp, Artificial Sequence
  chemically synthesized
tttcattttatttaaatattca

SEQ ID NO: 55739 - DNA, 22 bp, Artificial Sequence
  chemically synthesized
ttcattttatttaaatattcaa

SEQ ID NO: 55740 - DNA, 22 bp, Artificial Sequence
  chemically synthesized
tcattttatttaaatattcaaa

SEQ ID NO: 55741 - DNA, 22 bp, Artificial Sequence
  chemically synthesized
cattttatttaaatattcaaaa

SEQ ID NO: 55742 - DNA, 22 bp, Artificial Sequence
  chemically synthesized
attttatttaaatattcaaaat

SEQ ID NO: 55743 - DNA, 22 bp, Artificial Sequence
  chemically synthesized
tatttaaatattcaaaatattg

SEQ ID NO: 55744 - DNA, 22 bp, Artificial Sequence
  chemically synthesized
atttaaatattcaaaatattgt

SEQ ID NO: 55745 - DNA, 22 bp, Artificial Sequence
  chemically synthesized
tttaaatattcaaaatattgtg

SEQ ID NO: 55746 - DNA, 22 bp, Artificial Sequence
  chemically synthesized
aaatattcaaaatattgtgtga

SEQ ID NO: 55747 - DNA, 22 bp, Artificial Sequence
  chemically synthesized
aatattcaaaatattgtgtgat

SEQ ID NO: 55748 - DNA, 22 bp, Artificial Sequence
  chemically synthesized
aaaatattgtgtgattgtgatc

SEQ ID NO: 55749 - DNA, 22 bp, Artificial Sequence
  chemically synthesized
tgtgattgtgatccattgagat

SEQ ID NO: 55750 - DNA, 22 bp, Artificial Sequence
  chemically synthesized
tgatccattgagatcattgaag

SEQ ID NO: 55751 - DNA, 22 bp, Artificial Sequence
  chemically synthesized
agatcattgaagtagtattaat

SEQ ID NO: 55752 - DNA, 22 bp, Artificial Sequence
  chemically synthesized
aagtagtattaatttagctggg

SEQ ID NO: 55753 - DNA, 22 bp, Artificial Sequence
  chemically synthesized
atttagctgggaattagcagct

SEQ ID NO: 55754 - DNA, 22 bp, Artificial Sequence
  chemically synthesized
agctgggaattagcagcttatg

SEQ ID NO: 55755 - DNA, 22 bp, Artificial Sequence
  chemically synthesized
gctgggaattagcagcttatgt

SEQ ID NO: 55756 - DNA, 22 bp, Artificial Sequence
  chemically synthesized
ggaattagcagcttatgttgtg

SEQ ID NO: 55757 - DNA, 22 bp, Artificial Sequence
  chemically synthesized
gcagcttatgttgtgtgggccc

SEQ ID NO: 55758 - DNA, 22 bp, Artificial Sequence
  chemically synthesized
atgttgtgtgggcccagttcat

SEQ ID NO: 55759 - DNA, 22 bp, Artificial Sequence
  chemically synthesized
tgttgtgtgggcccagttcatc

SEQ ID NO: 55760 - DNA, 22 bp, Artificial Sequence
  chemically synthesized
tgtgggcccagttcatcaatat

SEQ ID NO: 55761 - DNA, 22 bp, Artificial Sequence
  chemically synthesized
atcaatatgtgtgtcaaatatc

SEQ ID NO: 55762 - DNA, 22 bp, Artificial Sequence
  chemically synthesized
agatatcagcagcctttgactt

SEQ ID NO: 55763 - DNA, 22 bp, Artificial Sequence
  chemically synthesized
tgacttgcagtcagagctttca

SEQ ID NO: 55764 - DNA, 22 bp, Artificial Sequence
  chemically synthesized
gacttgcagtcagagctttcaa

SEQ ID NO: 55765 - DNA, 22 bp, Artificial Sequence
  chemically synthesized
acttgcagtcagagctttcaat

SEQ ID NO: 55766 - DNA, 22 bp, Artificial Sequence
  chemically synthesized
gcagtcagagctttcaataggg

SEQ ID NO: 55767 - DNA, 22 bp, Artificial Sequence
  chemically synthesized
cagtcagagctttcaatagggg

SEQ ID NO: 55768 - DNA, 22 bp, Artificial Sequence
  chemically synthesized
tcaataggggttttgttttgtt

SEQ ID NO: 55769 - DNA, 22 bp, Artificial Sequence
  chemically synthesized
caataggggttttgttttgttt

SEQ ID NO: 55770 - DNA, 22 bp, Artificial Sequence
  chemically synthesized
aataggggttttgttttgtttt

SEQ ID NO: 55771 - DNA, 22 bp, Artificial Sequence
  chemically synthesized
tgttttgttttgttttcttttt

SEQ ID NO: 55772 - DNA, 22 bp, Artificial Sequence
  chemically synthesized
gttttgttttgttttctttttt

SEQ ID NO: 55773 - DNA, 22 bp, Artificial Sequence
  chemically synthesized
ttttgttttgttttcttttttt

SEQ ID NO: 55774 - DNA, 22 bp, Artificial Sequence
  chemically synthesized
tgttttgttttcttttttttta

SEQ ID NO: 55775 - DNA, 22 bp, Artificial Sequence
  chemically synthesized
gttttgttttctttttttttag

SEQ ID NO: 55776 - DNA, 22 bp, Artificial Sequence
  chemically synthesized
ttttgttttctttttttttagt

SEQ ID NO: 55777 - DNA, 22 bp, Artificial Sequence
  chemically synthesized
tgttttctttttttttagtctc

SEQ ID NO: 55778 - DNA, 22 bp, Artificial Sequence
  chemically synthesized
gttttctttttttttagtctca

SEQ ID NO: 55779 - DNA, 22 bp, Artificial Sequence
  chemically synthesized
ttttctttttttttagtctcat

SEQ ID NO: 55780 - DNA, 22 bp, Artificial Sequence
  chemically synthesized
tctttttttttagtctcatatt

SEQ ID NO: 55781 - DNA, 22 bp, Artificial Sequence
  chemically synthesized
ctttttttttagtctcatattt

SEQ ID NO: 55782 - DNA, 22 bp, Artificial Sequence
  chemically synthesized
tttttttttagtctcatatttt

SEQ ID NO: 55783 - DNA, 22 bp, Artificial Sequence
  chemically synthesized
tttttttagtctcatattttat

SEQ ID NO: 55784 - DNA, 22 bp, Artificial Sequence
  chemically synthesized
ttttttagtctcatattttatg

SEQ ID NO: 55785 - DNA, 22 bp, Artificial Sequence
  chemically synthesized
tttttagtctcatattttatga

SEQ ID NO: 55786 - DNA, 22 bp, Artificial Sequence
  chemically synthesized
ttttagtctcatattttatgat

SEQ ID NO: 55787 - DNA, 22 bp, Artificial Sequence
  chemically synthesized
tttagtctcatattttatgatg

SEQ ID NO: 55788 - DNA, 22 bp, Artificial Sequence
  chemically synthesized
ttagtctcatattttatgatgg

SEQ ID NO: 55789 - DNA, 22 bp, Artificial Sequence
  chemically synthesized
tagtctcatattttatgatggg

SEQ ID NO: 55790 - DNA, 22 bp, Artificial Sequence
  chemically synthesized
agtctcatattttatgatgggg

SEQ ID NO: 55791 - DNA, 22 bp, Artificial Sequence
  chemically synthesized
gtctcatattttatgatggggg

SEQ ID NO: 55792 - DNA, 22 bp, Artificial Sequence
  chemically synthesized
atattttatgatggggggaaat

SEQ ID NO: 55793 - DNA, 22 bp, Artificial Sequence
  chemically synthesized
tatgatggggggaaatattcat

SEQ ID NO: 55794 - DNA, 22 bp, Artificial Sequence
  chemically synthesized
atgatggggggaaatattcatg

SEQ ID NO: 55795 - DNA, 22 bp, Artificial Sequence
  chemically synthesized
tgatggggggaaatattcatgg

SEQ ID NO: 55796 - DNA, 22 bp, Artificial Sequence
  chemically synthesized
atggaagattactgaatgtgaa

SEQ ID NO: 55797 - DNA, 22 bp, Artificial Sequence
  chemically synthesized
ctgaatgtgaaactgctgttcc

SEQ ID NO: 55798 - DNA, 22 bp, Artificial Sequence
  chemically synthesized
aatgtgaaactgctgttccctt

SEQ ID NO: 55799 - DNA, 22 bp, Artificial Sequence
  chemically synthesized
ctgttcccttatagaaaagacc

SEQ ID NO: 55800 - DNA, 22 bp, Artificial Sequence
  chemically synthesized
ttcccttatagaaaagacccaa

SEQ ID NO: 55801 - DNA, 22 bp, Artificial Sequence
  chemically synthesized
ccttatagaaaagacccaaaca

SEQ ID NO: 55802 - DNA, 22 bp, Artificial Sequence
  chemically synthesized
atagaaaagacccaaacattat

SEQ ID NO: 55803 - DNA, 22 bp, Artificial Sequence
  chemically synthesized
tagaaaagacccaaacattatc

SEQ ID NO: 55804 - DNA, 22 bp, Artificial Sequence
  chemically synthesized
tcccatcatgtcagatttgagg

SEQ ID NO: 55805 - DNA, 22 bp, Artificial Sequence
  chemically synthesized
gaggttttggcttattgcacat

SEQ ID NO: 55806 - DNA, 22 bp, Artificial Sequence
  chemically synthesized
aggttttggcttattgcacata

SEQ ID NO: 55807 - DNA, 22 bp, Artificial Sequence
  chemically synthesized
tggcttattgcacataggaatc

SEQ ID NO: 55808 - DNA, 22 bp, Artificial Sequence
  chemically synthesized
ggcttattgcacataggaatct

SEQ ID NO: 55809 - DNA, 22 bp, Artificial Sequence
  chemically synthesized
gcttattgcacataggaatctt

SEQ ID NO: 55810 - DNA, 22 bp, Artificial Sequence
  chemically synthesized
attgcacataggaatctttaaa

SEQ ID NO: 55811 - DNA, 22 bp, Artificial Sequence
  chemically synthesized
ttgcacataggaatctttaaat

SEQ ID NO: 55812 - DNA, 22 bp, Artificial Sequence
  chemically synthesized
cacataggaatctttaaattag

SEQ ID NO: 55813 - DNA, 22 bp, Artificial Sequence
  chemically synthesized
taaattaggtttgggctgtcat

SEQ ID NO: 55814 - DNA, 22 bp, Artificial Sequence
  chemically synthesized
aaattaggtttgggctgtcata

SEQ ID NO: 55815 - DNA, 22 bp, Artificial Sequence
  chemically synthesized
aattaggtttgggctgtcataa

SEQ ID NO: 55816 - DNA, 22 bp, Artificial Sequence
  chemically synthesized
ggtttgggctgtcataaagtta

SEQ ID NO: 55817 - DNA, 22 bp, Artificial Sequence
  chemically synthesized
gggctgtcataaagttagcttt

SEQ ID NO: 55818 - DNA, 22 bp, Artificial Sequence
  chemically synthesized
ggctgtcataaagttagctttt

SEQ ID NO: 55819 - DNA, 22 bp, Artificial Sequence
  chemically synthesized
tcataaagttagctttttgaga

SEQ ID NO: 55820 - DNA, 22 bp, Artificial Sequence
  chemically synthesized
gctttttgagagactagagaaa

SEQ ID NO: 55821 - DNA, 22 bp, Artificial Sequence
  chemically synthesized
tttgagagactagagaaaaaat

SEQ ID NO: 55822 - DNA, 22 bp, Artificial Sequence
  chemically synthesized
ttgagagactagagaaaaaata

SEQ ID NO: 55823 - DNA, 22 bp, Artificial Sequence
  chemically synthesized
tgagagactagagaaaaaatat

SEQ ID NO: 55824 - DNA, 22 bp, Artificial Sequence
  chemically synthesized
gagagactagagaaaaaatatg

SEQ ID NO: 55825 - DNA, 22 bp, Artificial Sequence
  chemically synthesized
agagactagagaaaaaatatga

SEQ ID NO: 55826 - DNA, 22 bp, Artificial Sequence
  chemically synthesized
gagaaaaaatatgacaagtcct

SEQ ID NO: 55827 - DNA, 22 bp, Artificial Sequence
  chemically synthesized
taaaatgtagtaaagtctgctc

SEQ ID NO: 55828 - DNA, 22 bp, Artificial Sequence
  chemically synthesized
ctcctgttgatatataacattt

SEQ ID NO: 55829 - DNA, 22 bp, Artificial Sequence
  chemically synthesized
ctgttgatatataacatttttt

SEQ ID NO: 55830 - DNA, 22 bp, Artificial Sequence
  chemically synthesized
ttgatatataacattttttctc

SEQ ID NO: 55831 - DNA, 22 bp, Artificial Sequence
  chemically synthesized
atatataacattttttctcttt

SEQ ID NO: 55832 - DNA, 22 bp, Artificial Sequence
  chemically synthesized
tttctctttaaaatcatgaaca

SEQ ID NO: 55833 - DNA, 22 bp, Artificial Sequence
  chemically synthesized
ttctctttaaaatcatgaacat

SEQ ID NO: 55834 - DNA, 22 bp, Artificial Sequence
  chemically synthesized
tctctttaaaatcatgaacata

SEQ ID NO: 55835 - DNA, 22 bp, Artificial Sequence
  chemically synthesized
ctctttaaaatcatgaacatag

SEQ ID NO: 55836 - DNA, 22 bp, Artificial Sequence
  chemically synthesized
tctttaaaatcatgaacataga

SEQ ID NO: 55837 - DNA, 22 bp, Artificial Sequence
  chemically synthesized
tttaaaatcatgaacatagaca

SEQ ID NO: 55838 - DNA, 22 bp, Artificial Sequence
  chemically synthesized
taaaatcatgaacatagacatt

SEQ ID NO: 55839 - DNA, 22 bp, Artificial Sequence
  chemically synthesized
aaaatcatgaacatagacattt

SEQ ID NO: 55840 - DNA, 22 bp, Artificial Sequence
  chemically synthesized
aaatcatgaacatagacattta

SEQ ID NO: 55841 - DNA, 22 bp, Artificial Sequence
  chemically synthesized
atatcagggtatttaaaattat

SEQ ID NO: 55842 - DNA, 22 bp, Artificial Sequence
  chemically synthesized
tatcagggtatttaaaattatt

SEQ ID NO: 55843 - DNA, 22 bp, Artificial Sequence
  chemically synthesized
aaaattatttgcctagacagta

SEQ ID NO: 55844 - DNA, 22 bp, Artificial Sequence
  chemically synthesized
aaattatttgcctagacagtat

SEQ ID NO: 55845 - DNA, 22 bp, Artificial Sequence
  chemically synthesized
tttgcctagacagtatagctgg

SEQ ID NO: 55846 - DNA, 22 bp, Artificial Sequence
  chemically synthesized
gcctagacagtatagctggtat

SEQ ID NO: 55847 - DNA, 22 bp, Artificial Sequence
  chemically synthesized
cctagacagtatagctggtatt

SEQ ID NO: 55848 - DNA, 22 bp, Artificial Sequence
  chemically synthesized
gacagtatagctggtatttaga

SEQ ID NO: 55849 - DNA, 22 bp, Artificial Sequence
  chemically synthesized
gtatttagataatgatatatca

SEQ ID NO: 55850 - DNA, 22 bp, Artificial Sequence
  chemically synthesized
agataatgatatatcagacaga

SEQ ID NO: 55851 - DNA, 22 bp, Artificial Sequence
  chemically synthesized
gataatgatatatcagacagat

SEQ ID NO: 55852 - DNA, 22 bp, Artificial Sequence
  chemically synthesized
taaagaagggagatatagtaat

SEQ ID NO: 55853 - DNA, 22 bp, Artificial Sequence
  chemically synthesized
aagaagggagatatagtaattc

SEQ ID NO: 55854 - DNA, 22 bp, Artificial Sequence
  chemically synthesized
aaaatggaaatacattagcatg

SEQ ID NO: 55855 - DNA, 22 bp, Artificial Sequence
  chemically synthesized
gcatgctcttaaaagtaaatca

SEQ ID NO: 55856 - DNA, 22 bp, Artificial Sequence
  chemically synthesized
ttaaaagtaaatcaaatacaat

SEQ ID NO: 55857 - DNA, 22 bp, Artificial Sequence
  chemically synthesized
aaaagtaaatcaaatacaatat

SEQ ID NO: 55858 - DNA, 22 bp, Artificial Sequence
  chemically synthesized
aaagtaaatcaaatacaatatg

SEQ ID NO: 55859 - DNA, 22 bp, Artificial Sequence
  chemically synthesized
ttcagaatttagaaaatgaact

SEQ ID NO: 55860 - DNA, 22 bp, Artificial Sequence
  chemically synthesized
tcagaatttagaaaatgaactt

SEQ ID NO: 55861 - DNA, 22 bp, Artificial Sequence
  chemically synthesized
cagaatttagaaaatgaactta

SEQ ID NO: 55862 - DNA, 22 bp, Artificial Sequence
  chemically synthesized
agaatttagaaaatgaacttac

SEQ ID NO: 55863 - DNA, 22 bp, Artificial Sequence
  chemically synthesized
agaaaatgaacttaccttttct

SEQ ID NO: 55864 - DNA, 22 bp, Artificial Sequence
  chemically synthesized
gaaaatgaacttaccttttctt

SEQ ID NO: 55865 - DNA, 22 bp, Artificial Sequence
  chemically synthesized
accttttctttttgtatccatt

SEQ ID NO: 55866 - DNA, 22 bp, Artificial Sequence
  chemically synthesized
ccttttctttttgtatccattc

SEQ ID NO: 55867 - DNA, 22 bp, Artificial Sequence
  chemically synthesized
ttctttttgtatccattctgat

SEQ ID NO: 55868 - DNA, 22 bp, Artificial Sequence
  chemically synthesized
tctttttgtatccattctgatt

SEQ ID NO: 55869 - DNA, 22 bp, Artificial Sequence
  chemically synthesized
ctttttgtatccattctgattc

SEQ ID NO: 55870 - DNA, 22 bp, Artificial Sequence
  chemically synthesized
tttttgtatccattctgattct

SEQ ID NO: 55871 - DNA, 22 bp, Artificial Sequence
  chemically synthesized
tttgtatccattctgattctct

SEQ ID NO: 55872 - DNA, 22 bp, Artificial Sequence
  chemically synthesized
ttgtatccattctgattctctc

SEQ ID NO: 55873 - DNA, 22 bp, Artificial Sequence
  chemically synthesized
tgtatccattctgattctctcc

SEQ ID NO: 55874 - DNA, 22 bp, Artificial Sequence
  chemically synthesized
gtatccattctgattctctcct

SEQ ID NO: 55875 - DNA, 22 bp, Artificial Sequence
  chemically synthesized
tatccattctgattctctccta

SEQ ID NO: 55876 - DNA, 22 bp, Artificial Sequence
  chemically synthesized
tgattctctcctagctcagact

SEQ ID NO: 55877 - DNA, 22 bp, Artificial Sequence
  chemically synthesized
attctctcctagctcagactga

SEQ ID NO: 55878 - DNA, 22 bp, Artificial Sequence
  chemically synthesized
tctcctagctcagactgaactg

SEQ ID NO: 55879 - DNA, 22 bp, Artificial Sequence
  chemically synthesized
tcctagctcagactgaactgga

SEQ ID NO: 55880 - DNA, 22 bp, Artificial Sequence
  chemically synthesized
ctagctcagactgaactggagg

SEQ ID NO: 55881 - DNA, 22 bp, Artificial Sequence
  chemically synthesized
gctcagactgaactggaggatg

SEQ ID NO: 55882 - DNA, 22 bp, Artificial Sequence
  chemically synthesized
agactgaactggaggatgtatt

SEQ ID NO: 55883 - DNA, 22 bp, Artificial Sequence
  chemically synthesized
aactggaggatgtatttgtgta

SEQ ID NO: 55884 - DNA, 22 bp, Artificial Sequence
  chemically synthesized
gaggatgtatttgtgtacctta

SEQ ID NO: 55885 - DNA, 22 bp, Artificial Sequence
  chemically synthesized
gtgtaccttatggtgtaattgt

SEQ ID NO: 55886 - DNA, 22 bp, Artificial Sequence
  chemically synthesized
tgtaccttatggtgtaattgta

SEQ ID NO: 55887 - DNA, 22 bp, Artificial Sequence
  chemically synthesized
atggtgtaattgtaaatgagac

SEQ ID NO: 55888 - DNA, 22 bp, Artificial Sequence
  chemically synthesized
tggtgtaattgtaaatgagact

SEQ ID NO: 55889 - DNA, 22 bp, Artificial Sequence
  chemically synthesized
taaatgagactataaattatag

SEQ ID NO: 55890 - DNA, 22 bp, Artificial Sequence
  chemically synthesized
taaattatagtatgctattatg

SEQ ID NO: 55891 - DNA, 22 bp, Artificial Sequence
  chemically synthesized
tagtatgctattatgactactt

SEQ ID NO: 55892 - DNA, 22 bp, Artificial Sequence
  chemically synthesized
ttatgactacttatttttcttt

SEQ ID NO: 55893 - DNA, 22 bp, Artificial Sequence
  chemically synthesized
tgactacttatttttcttttct

SEQ ID NO: 55894 - DNA, 22 bp, Artificial Sequence
  chemically synthesized
cttatttttcttttctctttat

SEQ ID NO: 55895 - DNA, 22 bp, Artificial Sequence
  chemically synthesized
atttttcttttctctttattta

SEQ ID NO: 55896 - DNA, 22 bp, Artificial Sequence
  chemically synthesized
tttttcttttctctttatttat

SEQ ID NO: 55897 - DNA, 22 bp, Artificial Sequence
  chemically synthesized
ttcttttctctttatttatgtg

SEQ ID NO: 55898 - DNA, 22 bp, Artificial Sequence
  chemically synthesized
tcttttctctttatttatgtga

SEQ ID NO: 55899 - DNA, 22 bp, Artificial Sequence
  chemically synthesized
cttttctctttatttatgtgat

SEQ ID NO: 55900 - DNA, 22 bp, Artificial Sequence
  chemically synthesized
ttttctctttatttatgtgatt

SEQ ID NO: 55901 - DNA, 22 bp, Artificial Sequence
  chemically synthesized
ttctctttatttatgtgattct

SEQ ID NO: 55902 - DNA, 22 bp, Artificial Sequence
  chemically synthesized
tctctttatttatgtgattctg

SEQ ID NO: 55903 - DNA, 22 bp, Artificial Sequence
  chemically synthesized
ctctttatttatgtgattctga

SEQ ID NO: 55904 - DNA, 22 bp, Artificial Sequence
  chemically synthesized
tctttatttatgtgattctgaa

SEQ ID NO: 55905 - DNA, 22 bp, Artificial Sequence
  chemically synthesized
tttatttatgtgattctgaata

SEQ ID NO: 55906 - DNA, 22 bp, Artificial Sequence
  chemically synthesized
tatttatgtgattctgaataaa

SEQ ID NO: 55907 - DNA, 22 bp, Artificial Sequence
  chemically synthesized
atttatgtgattctgaataaaa

SEQ ID NO: 55908 - DNA, 22 bp, Artificial Sequence
  chemically synthesized
tttatgtgattctgaataaaaa

SEQ ID NO: 55909 - DNA, 22 bp, Artificial Sequence
  chemically synthesized
atgtgattctgaataaaaacga

SEQ ID NO: 55910 - DNA, 22 bp, Artificial Sequence
  chemically synthesized
tgtgattctgaataaaaacgac

SEQ ID NO: 55911 - DNA, 22 bp, Artificial Sequence
  chemically synthesized
tgaataaaaacgactgacttct

SEQ ID NO: 55912 - DNA, 22 bp, Artificial Sequence
  chemically synthesized
aataaaaacgactgacttctga

SEQ ID NO: 55913 - DNA, 22 bp, Artificial Sequence
  chemically synthesized
acttctgaagtgaattttcagc

SEQ ID NO: 55914 - DNA, 22 bp, Artificial Sequence
  chemically synthesized
ctgaagtgaattttcagcatgg

SEQ ID NO: 55915 - DNA, 22 bp, Artificial Sequence
  chemically synthesized
tgaagtgaattttcagcatggc

SEQ ID NO: 55916 - DNA, 22 bp, Artificial Sequence
  chemically synthesized
aagtgaattttcagcatggcag

SEQ ID NO: 55917 - DNA, 22 bp, Artificial Sequence
  chemically synthesized
tcagcatggcagttaaaacaaa

SEQ ID NO: 55918 - DNA, 22 bp, Artificial Sequence
  chemically synthesized
cagcatggcagttaaaacaaaa

SEQ ID NO: 55919 - DNA, 22 bp, Artificial Sequence
  chemically synthesized
agcatggcagttaaaacaaaaa

SEQ ID NO: 55920 - DNA, 22 bp, Artificial Sequence
  chemically synthesized
aaacaaaaaaacaccactacca

SEQ ID NO: 55921 - DNA, 22 bp, Artificial Sequence
  chemically synthesized
ccacaaaaaacaatatactggt

SEQ ID NO: 55922 - DNA, 22 bp, Artificial Sequence
  chemically synthesized
gtgaacattttacttaccttca

SEQ ID NO: 55923 - DNA, 22 bp, Artificial Sequence
  chemically synthesized
tacttaccttcaaaatccagag

SEQ ID NO: 55924 - DNA, 22 bp, Artificial Sequence
  chemically synthesized
acttaccttcaaaatccagaga

SEQ ID NO: 55925 - DNA, 22 bp, Artificial Sequence
  chemically synthesized
cttaccttcaaaatccagagag

SEQ ID NO: 55926 - DNA, 22 bp, Artificial Sequence
  chemically synthesized
accttcaaaatccagagagtag

SEQ ID NO: 55927 - DNA, 22 bp, Artificial Sequence
  chemically synthesized
ccttcaaaatccagagagtaga

SEQ ID NO: 55928 - DNA, 22 bp, Artificial Sequence
  chemically synthesized
caaaatccagagagtagagaat

SEQ ID NO: 55929 - DNA, 22 bp, Artificial Sequence
  chemically synthesized
aaaatccagagagtagagaata

SEQ ID NO: 55930 - DNA, 22 bp, Artificial Sequence
  chemically synthesized
ttttctaataagtacctaggat

SEQ ID NO: 55931 - DNA, 22 bp, Artificial Sequence
  chemically synthesized
tctaataagtacctaggatttt

SEQ ID NO: 55932 - DNA, 22 bp, Artificial Sequence
  chemically synthesized
ctaataagtacctaggattttc

SEQ ID NO: 55933 - DNA, 22 bp, Artificial Sequence
  chemically synthesized
taataagtacctaggattttca

SEQ ID NO: 55934 - DNA, 22 bp, Artificial Sequence
  chemically synthesized
ataagtacctaggattttcata

SEQ ID NO: 55935 - DNA, 22 bp, Artificial Sequence
  chemically synthesized
ggattttcatagggagcctatg

SEQ ID NO: 55936 - DNA, 22 bp, Artificial Sequence
  chemically synthesized
tcatagggagcctatgtttgtg

SEQ ID NO: 55937 - DNA, 22 bp, Artificial Sequence
  chemically synthesized
catagggagcctatgtttgtga

SEQ ID NO: 55938 - DNA, 22 bp, Artificial Sequence
  chemically synthesized
atagggagcctatgtttgtgag

SEQ ID NO: 55939 - DNA, 22 bp, Artificial Sequence
  chemically synthesized
tgtttgtgaggccactatccaa

SEQ ID NO: 55940 - DNA, 22 bp, Artificial Sequence
  chemically synthesized
gtgaggccactatccaaagact

SEQ ID NO: 55941 - DNA, 22 bp, Artificial Sequence
  chemically synthesized
tgaggccactatccaaagacta

SEQ ID NO: 55942 - DNA, 22 bp, Artificial Sequence
  chemically synthesized
tccaaagactaatgttcatgaa

SEQ ID NO: 55943 - DNA, 22 bp, Artificial Sequence
  chemically synthesized
atgttcatgaaactgggagtcc

SEQ ID NO: 55944 - DNA, 22 bp, Artificial Sequence
  chemically synthesized
atgaaactgggagtcctatata

SEQ ID NO: 55945 - DNA, 22 bp, Artificial Sequence
  chemically synthesized
ggagtcctatatacaagctgta

SEQ ID NO: 55946 - DNA, 22 bp, Artificial Sequence
  chemically synthesized
tatacaagctgtatttgtaaat

SEQ ID NO: 55947 - DNA, 22 bp, Artificial Sequence
  chemically synthesized
tatttgtaaataagacagagaa

SEQ ID NO: 55948 - DNA, 22 bp, Artificial Sequence
  chemically synthesized
gtaaataagacagagaaaggtt

SEQ ID NO: 55949 - DNA, 22 bp, Artificial Sequence
  chemically synthesized
taaataagacagagaaaggttg

SEQ ID NO: 55950 - DNA, 22 bp, Artificial Sequence
  chemically synthesized
tgaactggcagcttggatgttt

SEQ ID NO: 55951 - DNA, 22 bp, Artificial Sequence
  chemically synthesized
gcagcttggatgttttgtcaaa

SEQ ID NO: 55952 - DNA, 22 bp, Artificial Sequence
  chemically synthesized
ggatgttttgtcaaagtacaat

SEQ ID NO: 55953 - DNA, 22 bp, Artificial Sequence
  chemically synthesized
gatgttttgtcaaagtacaatg

SEQ ID NO: 55954 - DNA, 22 bp, Artificial Sequence
  chemically synthesized
tgtcaaagtacaatgtcagaga

SEQ ID NO: 55955 - DNA, 22 bp, Artificial Sequence
  chemically synthesized
gtcaaagtacaatgtcagagaa

SEQ ID NO: 55956 - DNA, 22 bp, Artificial Sequence
  chemically synthesized
tcaaagtacaatgtcagagaaa

SEQ ID NO: 55957 - DNA, 22 bp, Artificial Sequence
  chemically synthesized
tttctaagacaaattgtaaata

SEQ ID NO: 55958 - DNA, 22 bp, Artificial Sequence
  chemically synthesized
tctaagacaaattgtaaataga

SEQ ID NO: 55959 - DNA, 22 bp, Artificial Sequence
  chemically synthesized
ctaagacaaattgtaaatagaa

SEQ ID NO: 55960 - DNA, 22 bp, Artificial Sequence
  chemically synthesized
taagacaaattgtaaatagaac

SEQ ID NO: 55961 - DNA, 22 bp, Artificial Sequence
  chemically synthesized
agacaaattgtaaatagaactg

SEQ ID NO: 55962 - DNA, 22 bp, Artificial Sequence
  chemically synthesized
taaatagaactgtcacagtgat

SEQ ID NO: 55963 - DNA, 22 bp, Artificial Sequence
  chemically synthesized
tcacagtgattgcatgattgag

SEQ ID NO: 55964 - DNA, 22 bp, Artificial Sequence
  chemically synthesized
catgattgagccgcagaagtgt

SEQ ID NO: 55965 - DNA, 22 bp, Artificial Sequence
  chemically synthesized
agccgcagaagtgtcctacaat

SEQ ID NO: 55966 - DNA, 22 bp, Artificial Sequence
  chemically synthesized
caattgttggcattgtcaggac

SEQ ID NO: 55967 - DNA, 22 bp, Artificial Sequence
  chemically synthesized
ttggcattgtcaggacttttga

SEQ ID NO: 55968 - DNA, 22 bp, Artificial Sequence
  chemically synthesized
gcattgtcaggacttttgaaag

SEQ ID NO: 55969 - DNA, 22 bp, Artificial Sequence
  chemically synthesized
tcaggacttttgaaagcttaat

SEQ ID NO: 55970 - DNA, 22 bp, Artificial Sequence
  chemically synthesized
ttgaaagcttaattaaacacag

SEQ ID NO: 55971 - DNA, 22 bp, Artificial Sequence
  chemically synthesized
tgaaagcttaattaaacacagt

SEQ ID NO: 55972 - DNA, 22 bp, Artificial Sequence
  chemically synthesized
gaaagcttaattaaacacagtg

SEQ ID NO: 55973 - DNA, 22 bp, Artificial Sequence
  chemically synthesized
aaagcttaattaaacacagtgg

SEQ ID NO: 55974 - DNA, 22 bp, Artificial Sequence
  chemically synthesized
aattaaacacagtggcccgcat

SEQ ID NO: 55975 - DNA, 22 bp, Artificial Sequence
  chemically synthesized
attaaacacagtggcccgcatg

SEQ ID NO: 55976 - DNA, 22 bp, Artificial Sequence
  chemically synthesized
aacacagtggcccgcatggctg

SEQ ID NO: 55977 - DNA, 22 bp, Artificial Sequence
  chemically synthesized
ctaaacttactaaggaaagcca

SEQ ID NO: 55978 - DNA, 22 bp, Artificial Sequence
  chemically synthesized
aacttactaaggaaagccaaaa

SEQ ID NO: 55979 - DNA, 22 bp, Artificial Sequence
  chemically synthesized
actaaggaaagccaaaaggaaa

SEQ ID NO: 55980 - DNA, 22 bp, Artificial Sequence
  chemically synthesized
ctaaggaaagccaaaaggaaaa

SEQ ID NO: 55981 - DNA, 22 bp, Artificial Sequence
  chemically synthesized
aggaaagccaaaaggaaaaaaa

SEQ ID NO: 55982 - DNA, 22 bp, Artificial Sequence
  chemically synthesized
aaatgtagaagatcctaaagat

SEQ ID NO: 55983 - DNA, 22 bp, Artificial Sequence
  chemically synthesized
aagatcccaaacttcttcagac

SEQ ID NO: 55984 - DNA, 22 bp, Artificial Sequence
  chemically synthesized
cttcagacattacccttgtggt

SEQ ID NO: 55985 - DNA, 22 bp, Artificial Sequence
  chemically synthesized
ttcagacattacccttgtggtg

SEQ ID NO: 55986 - DNA, 22 bp, Artificial Sequence
  chemically synthesized
cagacattacccttgtggtgac

SEQ ID NO: 55987 - DNA, 22 bp, Artificial Sequence
  chemically synthesized
agacattacccttgtggtgaca

SEQ ID NO: 55988 - DNA, 22 bp, Artificial Sequence
  chemically synthesized
cccttgtggtgacacagaaaag

SEQ ID NO: 55989 - DNA, 22 bp, Artificial Sequence
  chemically synthesized
gtggtgacacagaaaagatgca

SEQ ID NO: 55990 - DNA, 22 bp, Artificial Sequence
  chemically synthesized
tggtgacacagaaaagatgcat

SEQ ID NO: 55991 - DNA, 22 bp, Artificial Sequence
  chemically synthesized
tgcattttcctagtcatctttt

SEQ ID NO: 55992 - DNA, 22 bp, Artificial Sequence
  chemically synthesized
tcctagtcatcttttataaata

SEQ ID NO: 55993 - DNA, 22 bp, Artificial Sequence
  chemically synthesized
cctagtcatcttttataaataa

SEQ ID NO: 55994 - DNA, 22 bp, Artificial Sequence
  chemically synthesized
ctagtcatcttttataaataat

SEQ ID NO: 55995 - DNA, 22 bp, Artificial Sequence
  chemically synthesized
gtcatcttttataaataatgtt

SEQ ID NO: 55996 - DNA, 22 bp, Artificial Sequence
  chemically synthesized
ttataaataatgttttgagaat

SEQ ID NO: 55997 - DNA, 22 bp, Artificial Sequence
  chemically synthesized
tataaataatgttttgagaata

SEQ ID NO: 55998 - DNA, 22 bp, Artificial Sequence
  chemically synthesized
ataaataatgttttgagaatag

SEQ ID NO: 55999 - DNA, 22 bp, Artificial Sequence
  chemically synthesized
taaataatgttttgagaatagg

SEQ ID NO: 56000 - DNA, 22 bp, Artificial Sequence
  chemically synthesized
tgagaataggtccacgtgatat

SEQ ID NO: 56001 - DNA, 22 bp, Artificial Sequence
  chemically synthesized
gagaataggtccacgtgatatg

SEQ ID NO: 56002 - DNA, 22 bp, Artificial Sequence
  chemically synthesized
agaataggtccacgtgatatga

SEQ ID NO: 56003 - DNA, 22 bp, Artificial Sequence
  chemically synthesized
tgtgtgatgtggagattgtgtt

SEQ ID NO: 56004 - DNA, 22 bp, Artificial Sequence
  chemically synthesized
tgttagtttttctgtctcctgc

SEQ ID NO: 56005 - DNA, 22 bp, Artificial Sequence
  chemically synthesized
gtttttctgtctcctgctgtta

SEQ ID NO: 56006 - DNA, 22 bp, Artificial Sequence
  chemically synthesized
ttctgtctcctgctgttacaga

SEQ ID NO: 56007 - DNA, 22 bp, Artificial Sequence
  chemically synthesized
tctgtctcctgctgttacagac

SEQ ID NO: 56008 - DNA, 22 bp, Artificial Sequence
  chemically synthesized
ctgtctcctgctgttacagaca

SEQ ID NO: 56009 - DNA, 22 bp, Artificial Sequence
  chemically synthesized
tgtctcctgctgttacagacag

SEQ ID NO: 56010 - DNA, 22 bp, Artificial Sequence
  chemically synthesized
tctcctgctgttacagacagtt

SEQ ID NO: 56011 - DNA, 22 bp, Artificial Sequence
  chemically synthesized
ctgctgttacagacagttaatg

SEQ ID NO: 56012 - DNA, 22 bp, Artificial Sequence
  chemically synthesized
ctgttacagacagttaatgtaa

SEQ ID NO: 56013 - DNA, 22 bp, Artificial Sequence
  chemically synthesized
ttacagacagttaatgtaaaaa

SEQ ID NO: 56014 - DNA, 22 bp, Artificial Sequence
  chemically synthesized
cagacagttaatgtaaaaatgg

SEQ ID NO: 56015 - DNA, 22 bp, Artificial Sequence
  chemically synthesized
atgtaaaaatggccttttattg

SEQ ID NO: 56016 - DNA, 22 bp, Artificial Sequence
  chemically synthesized
ttattggaaacacaaatatgta

SEQ ID NO: 56017 - DNA, 22 bp, Artificial Sequence
  chemically synthesized
tattggaaacacaaatatgtat

SEQ ID NO: 56018 - DNA, 22 bp, Artificial Sequence
  chemically synthesized
attggaaacacaaatatgtatt

SEQ ID NO: 56019 - DNA, 22 bp, Artificial Sequence
  chemically synthesized
ttggaaacacaaatatgtattc

SEQ ID NO: 56020 - DNA, 22 bp, Artificial Sequence
  chemically synthesized
gaaacacaaatatgtattcact

SEQ ID NO: 56021 - DNA, 22 bp, Artificial Sequence
  chemically synthesized
acttcaagaacaggagcagagg

SEQ ID NO: 56022 - DNA, 22 bp, Artificial Sequence
  chemically synthesized
caagaacaggagcagaggggga

SEQ ID NO: 56023 - DNA, 22 bp, Artificial Sequence
  chemically synthesized
aagaacaggagcagagggggac

SEQ ID NO: 56024 - DNA, 22 bp, Artificial Sequence
  chemically synthesized
ccctcccgttctctgtgtttat

SEQ ID NO: 56025 - DNA, 22 bp, Artificial Sequence
  chemically synthesized
cctcccgttctctgtgtttatt

SEQ ID NO: 56026 - DNA, 22 bp, Artificial Sequence
  chemically synthesized
ccgttctctgtgtttattctgt

SEQ ID NO: 56027 - DNA, 22 bp, Artificial Sequence
  chemically synthesized
tctgtgtttattctgtgaaagc

SEQ ID NO: 56028 - DNA, 22 bp, Artificial Sequence
  chemically synthesized
tgtgtttattctgtgaaagctt

SEQ ID NO: 56029 - DNA, 22 bp, Artificial Sequence
  chemically synthesized
tgtttattctgtgaaagcttaa

SEQ ID NO: 56030 - DNA, 22 bp, Artificial Sequence
  chemically synthesized
attctgtgaaagcttaaaaaaa

SEQ ID NO: 56031 - DNA, 22 bp, Artificial Sequence
  chemically synthesized
ttctgtgaaagcttaaaaaaac

SEQ ID NO: 56032 - DNA, 22 bp, Artificial Sequence
  chemically synthesized
tgtgaaagcttaaaaaaacaaa

SEQ ID NO: 56033 - DNA, 22 bp, Artificial Sequence
  chemically synthesized
tgaaagcttaaaaaaacaaaaa

SEQ ID NO: 56034 - DNA, 22 bp, Artificial Sequence
  chemically synthesized
aaaaaaacaaaaaaacaaaata

SEQ ID NO: 56035 - DNA, 22 bp, Artificial Sequence
  chemically synthesized
aaaaaacaaaaaaacaaaataa

SEQ ID NO: 56036 - DNA, 22 bp, Artificial Sequence
  chemically synthesized
taatttcttaaatcaccccatt

SEQ ID NO: 56037 - DNA, 22 bp, Artificial Sequence
  chemically synthesized
cttaaatcaccccattccttgt

SEQ ID NO: 56038 - DNA, 22 bp, Artificial Sequence
  chemically synthesized
ttaaatcaccccattccttgtt

SEQ ID NO: 56039 - DNA, 22 bp, Artificial Sequence
  chemically synthesized
aaatcaccccattccttgttgt

SEQ ID NO: 56040 - DNA, 22 bp, Artificial Sequence
  chemically synthesized
aatcaccccattccttgttgtg

SEQ ID NO: 56041 - DNA, 22 bp, Artificial Sequence
  chemically synthesized
cttgttgtgttgcaagttgtgc

SEQ ID NO: 56042 - DNA, 22 bp, Artificial Sequence
  chemically synthesized
gttgtgttgcaagttgtgcctt

SEQ ID NO: 56043 - DNA, 22 bp, Artificial Sequence
  chemically synthesized
ttgtgttgcaagttgtgccttt

SEQ ID NO: 56044 - DNA, 22 bp, Artificial Sequence
  chemically synthesized
tgttgcaagttgtgcctttact

SEQ ID NO: 56045 - DNA, 22 bp, Artificial Sequence
  chemically synthesized
caagttgtgcctttactataaa

SEQ ID NO: 56046 - DNA, 22 bp, Artificial Sequence
  chemically synthesized
tgcctttactataaaggatctg

SEQ ID NO: 56047 - DNA, 22 bp, Artificial Sequence
  chemically synthesized
tactataaaggatctgaaatat

SEQ ID NO: 56048 - DNA, 22 bp, Artificial Sequence
  chemically synthesized
actataaaggatctgaaatatg

SEQ ID NO: 56049 - DNA, 22 bp, Artificial Sequence
  chemically synthesized
ctataaaggatctgaaatatgt

SEQ ID NO: 56050 - DNA, 22 bp, Artificial Sequence
  chemically synthesized
taaaggatctgaaatatgtttt

SEQ ID NO: 56051 - DNA, 22 bp, Artificial Sequence
  chemically synthesized
aaatatgttttgcacacctttc

SEQ ID NO: 56052 - DNA, 22 bp, Artificial Sequence
  chemically synthesized
tgcacacctttctcttagtgaa

SEQ ID NO: 56053 - DNA, 22 bp, Artificial Sequence
  chemically synthesized
gcacacctttctcttagtgaat

SEQ ID NO: 56054 - DNA, 22 bp, Artificial Sequence
  chemically synthesized
cacacctttctcttagtgaatg

SEQ ID NO: 56055 - DNA, 22 bp, Artificial Sequence
  chemically synthesized
tctcttagtgaatgtggcatat

SEQ ID NO: 56056 - DNA, 22 bp, Artificial Sequence
  chemically synthesized
ctcttagtgaatgtggcatata

SEQ ID NO: 56057 - DNA, 22 bp, Artificial Sequence
  chemically synthesized
tcttagtgaatgtggcatataa

SEQ ID NO: 56058 - DNA, 22 bp, Artificial Sequence
  chemically synthesized
ttagtgaatgtggcatataatt

SEQ ID NO: 56059 - DNA, 22 bp, Artificial Sequence
  chemically synthesized
agtgaatgtggcatataattgt

SEQ ID NO: 56060 - DNA, 22 bp, Artificial Sequence
  chemically synthesized
gtgaatgtggcatataattgtg

SEQ ID NO: 56061 - DNA, 22 bp, Artificial Sequence
  chemically synthesized
tggagctgcacatgggctggaa

SEQ ID NO: 56062 - DNA, 22 bp, Artificial Sequence
  chemically synthesized
cacatgggctggaaaatgcaac

SEQ ID NO: 56063 - DNA, 22 bp, Artificial Sequence
  chemically synthesized
gaaaatgcaactgggtgtagaa

SEQ ID NO: 56064 - DNA, 22 bp, Artificial Sequence
  chemically synthesized
ggtgtagaaacgtgcaggcagg

SEQ ID NO: 56065 - DNA, 22 bp, Artificial Sequence
  chemically synthesized
cagctcagggaggaggcgagtt

SEQ ID NO: 56066 - DNA, 22 bp, Artificial Sequence
  chemically synthesized
agctcagggaggaggcgagttg

SEQ ID NO: 56067 - DNA, 22 bp, Artificial Sequence
  chemically synthesized
agggaggaggcgagttggatgc

SEQ ID NO: 56068 - DNA, 22 bp, Artificial Sequence
  chemically synthesized
gatgcttattaatggcatcttt

SEQ ID NO: 56069 - DNA, 22 bp, Artificial Sequence
  chemically synthesized
attaatggcatcttttagagtc

SEQ ID NO: 56070 - DNA, 22 bp, Artificial Sequence
  chemically synthesized
ttaatggcatcttttagagtcc

SEQ ID NO: 56071 - DNA, 22 bp, Artificial Sequence
  chemically synthesized
atggcatcttttagagtcctgg

SEQ ID NO: 56072 - DNA, 22 bp, Artificial Sequence
  chemically synthesized
ttagagtcctggaaaatcatta

SEQ ID NO: 56073 - DNA, 22 bp, Artificial Sequence
  chemically synthesized
tagagtcctggaaaatcattaa

SEQ ID NO: 56074 - DNA, 22 bp, Artificial Sequence
  chemically synthesized
agagtcctggaaaatcattaat

SEQ ID NO: 56075 - DNA, 22 bp, Artificial Sequence
  chemically synthesized
gagtcctggaaaatcattaatt

SEQ ID NO: 56076 - DNA, 22 bp, Artificial Sequence
  chemically synthesized
gaaaatcattaatttcacactg

SEQ ID NO: 56077 - DNA, 22 bp, Artificial Sequence
  chemically synthesized
atttcacactgcagcttccatg

SEQ ID NO: 56078 - DNA, 22 bp, Artificial Sequence
  chemically synthesized
cacactgcagcttccatgtagt

SEQ ID NO: 56079 - DNA, 22 bp, Artificial Sequence
  chemically synthesized
acactgcagcttccatgtagtt

SEQ ID NO: 56080 - DNA, 22 bp, Artificial Sequence
  chemically synthesized
cagcttccatgtagtttggcta

SEQ ID NO: 56081 - DNA, 22 bp, Artificial Sequence
  chemically synthesized
ccatgtagtttggctaatgtgg

SEQ ID NO: 56082 - DNA, 22 bp, Artificial Sequence
  chemically synthesized
catgtagtttggctaatgtggg

SEQ ID NO: 56083 - DNA, 22 bp, Artificial Sequence
  chemically synthesized
ggctaatgtgggagtactaaat

SEQ ID NO: 56084 - DNA, 22 bp, Artificial Sequence
  chemically synthesized
gctaatgtgggagtactaaatt

SEQ ID NO: 56085 - DNA, 22 bp, Artificial Sequence
  chemically synthesized
atgtgggagtactaaattgggg

SEQ ID NO: 56086 - DNA, 22 bp, Artificial Sequence
  chemically synthesized
aattggggtacataaaaaacat

SEQ ID NO: 56087 - DNA, 22 bp, Artificial Sequence
  chemically synthesized
gggtacataaaaaacatgcaaa

SEQ ID NO: 56088 - DNA, 22 bp, Artificial Sequence
  chemically synthesized
gggaaacattttttagattttt

SEQ ID NO: 56089 - DNA, 22 bp, Artificial Sequence
  chemically synthesized
tttagatttttgtgatttctca

SEQ ID NO: 56090 - DNA, 22 bp, Artificial Sequence
  chemically synthesized
ttagatttttgtgatttctcaa

SEQ ID NO: 56091 - DNA, 22 bp, Artificial Sequence
  chemically synthesized
tagatttttgtgatttctcaat

SEQ ID NO: 56092 - DNA, 22 bp, Artificial Sequence
  chemically synthesized
agatttttgtgatttctcaatg

SEQ ID NO: 56093 - DNA, 22 bp, Artificial Sequence
  chemically synthesized
gatttttgtgatttctcaatga

SEQ ID NO: 56094 - DNA, 22 bp, Artificial Sequence
  chemically synthesized
ttgtgatttctcaatgaaaatg

SEQ ID NO: 56095 - DNA, 22 bp, Artificial Sequence
  chemically synthesized
tgtgatttctcaatgaaaatgt

SEQ ID NO: 56096 - DNA, 22 bp, Artificial Sequence
  chemically synthesized
gtgatttctcaatgaaaatgtt

SEQ ID NO: 56097 - DNA, 22 bp, Artificial Sequence
  chemically synthesized
tgatttctcaatgaaaatgttt

SEQ ID NO: 56098 - DNA, 22 bp, Artificial Sequence
  chemically synthesized
ctcaatgaaaatgtttaataaa

SEQ ID NO: 56099 - DNA, 22 bp, Artificial Sequence
  chemically synthesized
tcaatgaaaatgtttaataaag

SEQ ID NO: 56100 - DNA, 22 bp, Artificial Sequence
  chemically synthesized
aatgaaaatgtttaataaagga

SEQ ID NO: 56101 - DNA, 22 bp, Artificial Sequence
  chemically synthesized
aataaaggagaataggtgaatg

SEQ ID NO: 56102 - DNA, 22 bp, Artificial Sequence
  chemically synthesized
ataaaggagaataggtgaatgg

SEQ ID NO: 56103 - DNA, 22 bp, Artificial Sequence
  chemically synthesized
tgcgtgctggtcagtaagaaag

SEQ ID NO: 56104 - DNA, 22 bp, Artificial Sequence
  chemically synthesized
gcgtgctggtcagtaagaaagg

SEQ ID NO: 56105 - DNA, 22 bp, Artificial Sequence
  chemically synthesized
cgtgctggtcagtaagaaagga

SEQ ID NO: 56106 - DNA, 22 bp, Artificial Sequence
  chemically synthesized
gtcagtaagaaaggaaacaaat

SEQ ID NO: 56107 - DNA, 22 bp, Artificial Sequence
  chemically synthesized
tggctttcctttggggggaaat

SEQ ID NO: 56108 - DNA, 22 bp, Artificial Sequence
  chemically synthesized
ggctttcctttggggggaaata

SEQ ID NO: 56109 - DNA, 22 bp, Artificial Sequence
  chemically synthesized
gctttcctttggggggaaatat

SEQ ID NO: 56110 - DNA, 22 bp, Artificial Sequence
  chemically synthesized
tcctttggggggaaatattaaa

SEQ ID NO: 56111 - DNA, 22 bp, Artificial Sequence
  chemically synthesized
cctttggggggaaatattaaat

SEQ ID NO: 56112 - DNA, 22 bp, Artificial Sequence
  chemically synthesized
ctttggggggaaatattaaatt

SEQ ID NO: 56113 - DNA, 22 bp, Artificial Sequence
  chemically synthesized
tggggggaaatattaaatttaa

SEQ ID NO: 56114 - DNA, 22 bp, Artificial Sequence
  chemically synthesized
ggggggaaatattaaatttaac

SEQ ID NO: 56115 - DNA, 22 bp, Artificial Sequence
  chemically synthesized
gggggaaatattaaatttaacc

SEQ ID NO: 56116 - DNA, 22 bp, Artificial Sequence
  chemically synthesized
aatttaaccgaagtagaaagca

SEQ ID NO: 56117 - DNA, 22 bp, Artificial Sequence
  chemically synthesized
aaccgaagtagaaagcacagct

SEQ ID NO: 56118 - DNA, 22 bp, Artificial Sequence
  chemically synthesized
accgaagtagaaagcacagcta

SEQ ID NO: 56119 - DNA, 22 bp, Artificial Sequence
  chemically synthesized
gggagatgcaccaagattgcgt

SEQ ID NO: 56120 - DNA, 22 bp, Artificial Sequence
  chemically synthesized
cgtcactggatgttaatttaat

SEQ ID NO: 56121 - DNA, 22 bp, Artificial Sequence
  chemically synthesized
gatgttaatttaatctactttg

SEQ ID NO: 56122 - DNA, 22 bp, Artificial Sequence
  chemically synthesized
atttaatctactttggttggtc

SEQ ID NO: 56123 - DNA, 22 bp, Artificial Sequence
  chemically synthesized
aatctactttggttggtctgtt

SEQ ID NO: 56124 - DNA, 22 bp, Artificial Sequence
  chemically synthesized
atctactttggttggtctgttc

SEQ ID NO: 56125 - DNA, 22 bp, Artificial Sequence
  chemically synthesized
ctttggttggtctgttcacacc

SEQ ID NO: 56126 - DNA, 22 bp, Artificial Sequence
  chemically synthesized
tggttggtctgttcacaccctt

SEQ ID NO: 56127 - DNA, 22 bp, Artificial Sequence
  chemically synthesized
ggttggtctgttcacacccttt

SEQ ID NO: 56128 - DNA, 22 bp, Artificial Sequence
  chemically synthesized
gttggtctgttcacacccttta

SEQ ID NO: 56129 - DNA, 22 bp, Artificial Sequence
  chemically synthesized
gtctgttcacaccctttattgc

SEQ ID NO: 56130 - DNA, 22 bp, Artificial Sequence
  chemically synthesized
ttcacaccctttattgcacaaa

SEQ ID NO: 56131 - DNA, 22 bp, Artificial Sequence
  chemically synthesized
acaccctttattgcacaaagaa

SEQ ID NO: 56132 - DNA, 22 bp, Artificial Sequence
  chemically synthesized
tattgcacaaagaagtcatttg

SEQ ID NO: 56133 - DNA, 22 bp, Artificial Sequence
  chemically synthesized
attgcacaaagaagtcatttga

SEQ ID NO: 56134 - DNA, 22 bp, Artificial Sequence
  chemically synthesized
ttgcacaaagaagtcatttgac

SEQ ID NO: 56135 - DNA, 22 bp, Artificial Sequence
  chemically synthesized
cacaaagaagtcatttgacaaa

SEQ ID NO: 56136 - DNA, 22 bp, Artificial Sequence
  chemically synthesized
gacaaaatttaccccaagccca

SEQ ID NO: 56137 - DNA, 22 bp, Artificial Sequence
  chemically synthesized
acaaaatttaccccaagcccaa

SEQ ID NO: 56138 - DNA, 22 bp, Artificial Sequence
  chemically synthesized
accccaagcccaagtctgtttt

SEQ ID NO: 56139 - DNA, 22 bp, Artificial Sequence
  chemically synthesized
ccccaagcccaagtctgttttt

SEQ ID NO: 56140 - DNA, 22 bp, Artificial Sequence
  chemically synthesized
tttttacatacagtagtaccag

SEQ ID NO: 56141 - DNA, 22 bp, Artificial Sequence
  chemically synthesized
ttacatacagtagtaccagctt

SEQ ID NO: 56142 - DNA, 22 bp, Artificial Sequence
  chemically synthesized
tacatacagtagtaccagcttt

SEQ ID NO: 56143 - DNA, 22 bp, Artificial Sequence
  chemically synthesized
acatacagtagtaccagctttg

SEQ ID NO: 56144 - DNA, 22 bp, Artificial Sequence
  chemically synthesized
catacagtagtaccagctttgt

SEQ ID NO: 56145 - DNA, 22 bp, Artificial Sequence
  chemically synthesized
tgtgcaataaaaagcacttagc

SEQ ID NO: 56146 - DNA, 22 bp, Artificial Sequence
  chemically synthesized
gtgcaataaaaagcacttagca

SEQ ID NO: 56147 - DNA, 22 bp, Artificial Sequence
  chemically synthesized
tgcaataaaaagcacttagcat

SEQ ID NO: 56148 - DNA, 22 bp, Artificial Sequence
  chemically synthesized
agcatcaagctggacccagcct

SEQ ID NO: 56149 - DNA, 22 bp, Artificial Sequence
  chemically synthesized
gcatcaagctggacccagcctg

SEQ ID NO: 56150 - DNA, 22 bp, Artificial Sequence
  chemically synthesized
gacccagcctggcaccttgcca

SEQ ID NO: 56151 - DNA, 22 bp, Artificial Sequence
  chemically synthesized
gcaccttgccacttttttagca

SEQ ID NO: 56152 - DNA, 22 bp, Artificial Sequence
  chemically synthesized
gccacttttttagcatgagatt

SEQ ID NO: 56153 - DNA, 22 bp, Artificial Sequence
  chemically synthesized
ccacttttttagcatgagattt

SEQ ID NO: 56154 - DNA, 22 bp, Artificial Sequence
  chemically synthesized
ttttagcatgagatttaatcac

SEQ ID NO: 56155 - DNA, 22 bp, Artificial Sequence
  chemically synthesized
tttagcatgagatttaatcacc

SEQ ID NO: 56156 - DNA, 22 bp, Artificial Sequence
  chemically synthesized
ttagcatgagatttaatcacca

SEQ ID NO: 56157 - DNA, 22 bp, Artificial Sequence
  chemically synthesized
tagcatgagatttaatcaccaa

SEQ ID NO: 56158 - DNA, 22 bp, Artificial Sequence
  chemically synthesized
agcatgagatttaatcaccaag

SEQ ID NO: 56159 - DNA, 22 bp, Artificial Sequence
  chemically synthesized
gcatgagatttaatcaccaagc

SEQ ID NO: 56160 - DNA, 22 bp, Artificial Sequence
  chemically synthesized
aatcaccaagcatctttagtac

SEQ ID NO: 56161 - DNA, 22 bp, Artificial Sequence
  chemically synthesized
atcaccaagcatctttagtacc

SEQ ID NO: 56162 - DNA, 22 bp, Artificial Sequence
  chemically synthesized
tagtacctttctgcttgttcag

SEQ ID NO: 56163 - DNA, 22 bp, Artificial Sequence
  chemically synthesized
agtacctttctgcttgttcaga

SEQ ID NO: 56164 - DNA, 22 bp, Artificial Sequence
  chemically synthesized
gtacctttctgcttgttcagat

SEQ ID NO: 56165 - DNA, 22 bp, Artificial Sequence
  chemically synthesized
tctgcttgttcagatttcattt

SEQ ID NO: 56166 - DNA, 22 bp, Artificial Sequence
  chemically synthesized
ctgcttgttcagatttcatttg

SEQ ID NO: 56167 - DNA, 22 bp, Artificial Sequence
  chemically synthesized
tgcttgttcagatttcatttgg

SEQ ID NO: 56168 - DNA, 22 bp, Artificial Sequence
  chemically synthesized
cttgttcagatttcatttgggt

SEQ ID NO: 56169 - DNA, 22 bp, Artificial Sequence
  chemically synthesized
gttcagatttcatttgggtcat

SEQ ID NO: 56170 - DNA, 22 bp, Artificial Sequence
  chemically synthesized
ttcagatttcatttgggtcatg

SEQ ID NO: 56171 - DNA, 22 bp, Artificial Sequence
  chemically synthesized
agatttcatttgggtcatggct

SEQ ID NO: 56172 - DNA, 22 bp, Artificial Sequence
  chemically synthesized
catttgggtcatggctatgtca

SEQ ID NO: 56173 - DNA, 22 bp, Artificial Sequence
  chemically synthesized
atttgggtcatggctatgtcag

SEQ ID NO: 56174 - DNA, 22 bp, Artificial Sequence
  chemically synthesized
gggtcatggctatgtcagcagt

SEQ ID NO: 56175 - DNA, 22 bp, Artificial Sequence
  chemically synthesized
ggtcatggctatgtcagcagtg

SEQ ID NO: 56176 - DNA, 22 bp, Artificial Sequence
  chemically synthesized
tgtcagcagtgttgttatttca

SEQ ID NO: 56177 - DNA, 22 bp, Artificial Sequence
  chemically synthesized
ttatttcaaggattaaaaaaaa

SEQ ID NO: 56178 - DNA, 22 bp, Artificial Sequence
  chemically synthesized
tttcaaggattaaaaaaaaaga

SEQ ID NO: 56179 - DNA, 22 bp, Artificial Sequence
  chemically synthesized
caaggattaaaaaaaaagattc

SEQ ID NO: 56180 - DNA, 22 bp, Artificial Sequence
  chemically synthesized
aaggattaaaaaaaaagattct

SEQ ID NO: 56181 - DNA, 22 bp, Artificial Sequence
  chemically synthesized
aaaaaaaagattctaacttaga

SEQ ID NO: 56182 - DNA, 22 bp, Artificial Sequence
  chemically synthesized
taacttagagcccacttttaac

SEQ ID NO: 56183 - DNA, 22 bp, Artificial Sequence
  chemically synthesized
acttagagcccacttttaacat

SEQ ID NO: 56184 - DNA, 22 bp, Artificial Sequence
  chemically synthesized
agagcccacttttaacattatt

SEQ ID NO: 56185 - DNA, 22 bp, Artificial Sequence
  chemically synthesized
gagcccacttttaacattattt

SEQ ID NO: 56186 - DNA, 22 bp, Artificial Sequence
  chemically synthesized
ttaacattatttcaaatcaagc

SEQ ID NO: 56187 - DNA, 22 bp, Artificial Sequence
  chemically synthesized
taacattatttcaaatcaagca

SEQ ID NO: 56188 - DNA, 22 bp, Artificial Sequence
  chemically synthesized
aacattatttcaaatcaagcag

SEQ ID NO: 56189 - DNA, 22 bp, Artificial Sequence
  chemically synthesized
acattatttcaaatcaagcagg

SEQ ID NO: 56190 - DNA, 22 bp, Artificial Sequence
  chemically synthesized
tttcaaatcaagcaggttttta

SEQ ID NO: 56191 - DNA, 22 bp, Artificial Sequence
  chemically synthesized
caaatcaagcaggtttttatgt

SEQ ID NO: 56192 - DNA, 22 bp, Artificial Sequence
  chemically synthesized
aaatcaagcaggtttttatgtt

SEQ ID NO: 56193 - DNA, 22 bp, Artificial Sequence
  chemically synthesized
ttatgttatgtatcaatttgga

SEQ ID NO: 56194 - DNA, 22 bp, Artificial Sequence
  chemically synthesized
tatgttatgtatcaatttggat

SEQ ID NO: 56195 - DNA, 22 bp, Artificial Sequence
  chemically synthesized
atgttatgtatcaatttggatg

SEQ ID NO: 56196 - DNA, 22 bp, Artificial Sequence
  chemically synthesized
tgttatgtatcaatttggatga

SEQ ID NO: 56197 - DNA, 22 bp, Artificial Sequence
  chemically synthesized
tgtatcaatttggatgacatta

SEQ ID NO: 56198 - DNA, 22 bp, Artificial Sequence
  chemically synthesized
ggatgacattaatgaagttcat

SEQ ID NO: 56199 - DNA, 22 bp, Artificial Sequence
  chemically synthesized
gatgacattaatgaagttcata

SEQ ID NO: 56200 - DNA, 22 bp, Artificial Sequence
  chemically synthesized
atgaagttcataaaatatgttc

SEQ ID NO: 56201 - DNA, 22 bp, Artificial Sequence
  chemically synthesized
ataaaatatgttcagactatat

SEQ ID NO: 56202 - DNA, 22 bp, Artificial Sequence
  chemically synthesized
agactatataatttaatggata

SEQ ID NO: 56203 - DNA, 22 bp, Artificial Sequence
  chemically synthesized
tataatttaatggataatgact

SEQ ID NO: 56204 - DNA, 22 bp, Artificial Sequence
  chemically synthesized
aatggataatgactactatttt

SEQ ID NO: 56205 - DNA, 22 bp, Artificial Sequence
  chemically synthesized
atggataatgactactattttt

SEQ ID NO: 56206 - DNA, 22 bp, Artificial Sequence
  chemically synthesized
ctatttttatttgtaatacaaa

SEQ ID NO: 56207 - DNA, 22 bp, Artificial Sequence
  chemically synthesized
tttttatttgtaatacaaatag

SEQ ID NO: 56208 - DNA, 22 bp, Artificial Sequence
  chemically synthesized
ttatttgtaatacaaataggaa

SEQ ID NO: 56209 - DNA, 22 bp, Artificial Sequence
  chemically synthesized
tatttgtaatacaaataggaaa

SEQ ID NO: 56210 - DNA, 22 bp, Artificial Sequence
  chemically synthesized
atttgtaatacaaataggaaat

SEQ ID NO: 56211 - DNA, 22 bp, Artificial Sequence
  chemically synthesized
tttgtaatacaaataggaaatt

SEQ ID NO: 56212 - DNA, 22 bp, Artificial Sequence
  chemically synthesized
gtaatacaaataggaaattgac

SEQ ID NO: 56213 - DNA, 22 bp, Artificial Sequence
  chemically synthesized
taatacaaataggaaattgact

SEQ ID NO: 56214 - DNA, 22 bp, Artificial Sequence
  chemically synthesized
actgttgtctccctccctcctt

SEQ ID NO: 56215 - DNA, 22 bp, Artificial Sequence
  chemically synthesized
ttgtctccctccctccttggtt

SEQ ID NO: 56216 - DNA, 22 bp, Artificial Sequence
  chemically synthesized
tctccctccctccttggttctt

SEQ ID NO: 56217 - DNA, 22 bp, Artificial Sequence
  chemically synthesized
cctccctccttggttcttttct

SEQ ID NO: 56218 - DNA, 22 bp, Artificial Sequence
  chemically synthesized
cctccttggttcttttctccta

SEQ ID NO: 56219 - DNA, 22 bp, Artificial Sequence
  chemically synthesized
cttggttcttttctcctaccta

SEQ ID NO: 56220 - DNA, 22 bp, Artificial Sequence
  chemically synthesized
ggttcttttctcctacctaggt

SEQ ID NO: 56221 - DNA, 22 bp, Artificial Sequence
  chemically synthesized
gttcttttctcctacctaggta

SEQ ID NO: 56222 - DNA, 22 bp, Artificial Sequence
  chemically synthesized
ttttctcctacctaggtaaatg

SEQ ID NO: 56223 - DNA, 22 bp, Artificial Sequence
  chemically synthesized
ttctcctacctaggtaaatggg

SEQ ID NO: 56224 - DNA, 22 bp, Artificial Sequence
  chemically synthesized
tctcctacctaggtaaatgggc

SEQ ID NO: 56225 - DNA, 22 bp, Artificial Sequence
  chemically synthesized
ctcctacctaggtaaatgggca

SEQ ID NO: 56226 - DNA, 22 bp, Artificial Sequence
  chemically synthesized
tcctacctaggtaaatgggcat

SEQ ID NO: 56227 - DNA, 22 bp, Artificial Sequence
  chemically synthesized
ctacctaggtaaatgggcatcc

SEQ ID NO: 56228 - DNA, 22 bp, Artificial Sequence
  chemically synthesized
cctaggtaaatgggcatcctta

SEQ ID NO: 56229 - DNA, 22 bp, Artificial Sequence
  chemically synthesized
ggtaaatgggcatccttaaaca

SEQ ID NO: 56230 - DNA, 22 bp, Artificial Sequence
  chemically synthesized
aaacagcttctcccctttacga

SEQ ID NO: 56231 - DNA, 22 bp, Artificial Sequence
  chemically synthesized
aacagcttctcccctttacgac

SEQ ID NO: 56232 - DNA, 22 bp, Artificial Sequence
  chemically synthesized
ctcccctttacgaccagggtat

SEQ ID NO: 56233 - DNA, 22 bp, Artificial Sequence
  chemically synthesized
tcccctttacgaccagggtata

SEQ ID NO: 56234 - DNA, 22 bp, Artificial Sequence
  chemically synthesized
ccctttacgaccagggtataga

SEQ ID NO: 56235 - DNA, 22 bp, Artificial Sequence
  chemically synthesized
tacgaccagggtatagagcact

SEQ ID NO: 56236 - DNA, 22 bp, Artificial Sequence
  chemically synthesized
acgaccagggtatagagcactg

SEQ ID NO: 56237 - DNA, 22 bp, Artificial Sequence
  chemically synthesized
cgaccagggtatagagcactgg

SEQ ID NO: 56238 - DNA, 22 bp, Artificial Sequence
  chemically synthesized
gccaatatcagtaaatttacct

SEQ ID NO: 56239 - DNA, 22 bp, Artificial Sequence
  chemically synthesized
acctttgtaatttgccacgtag

SEQ ID NO: 56240 - DNA, 22 bp, Artificial Sequence
  chemically synthesized
cctttgtaatttgccacgtagt

SEQ ID NO: 56241 - DNA, 22 bp, Artificial Sequence
  chemically synthesized
tgtaatttgccacgtagttttt

SEQ ID NO: 56242 - DNA, 22 bp, Artificial Sequence
  chemically synthesized
gtaatttgccacgtagttttta

SEQ ID NO: 56243 - DNA, 22 bp, Artificial Sequence
  chemically synthesized
taatttgccacgtagtttttac

SEQ ID NO: 56244 - DNA, 22 bp, Artificial Sequence
  chemically synthesized
gccacgtagtttttacaacatg

SEQ ID NO: 56245 - DNA, 22 bp, Artificial Sequence
  chemically synthesized
ccacgtagtttttacaacatga

SEQ ID NO: 56246 - DNA, 22 bp, Artificial Sequence
  chemically synthesized
ttacaacatgacctaattaatt

SEQ ID NO: 56247 - DNA, 22 bp, Artificial Sequence
  chemically synthesized
tacaacatgacctaattaattt

SEQ ID NO: 56248 - DNA, 22 bp, Artificial Sequence
  chemically synthesized
acaacatgacctaattaatttg

SEQ ID NO: 56249 - DNA, 22 bp, Artificial Sequence
  chemically synthesized
caacatgacctaattaatttga

SEQ ID NO: 56250 - DNA, 22 bp, Artificial Sequence
  chemically synthesized
attaatttgagcacgaaccata

SEQ ID NO: 56251 - DNA, 22 bp, Artificial Sequence
  chemically synthesized
atttgagcacgaaccatattat

SEQ ID NO: 56252 - DNA, 22 bp, Artificial Sequence
  chemically synthesized
gagcacgaaccatattattgct

SEQ ID NO: 56253 - DNA, 22 bp, Artificial Sequence
  chemically synthesized
agcacgaaccatattattgcta

SEQ ID NO: 56254 - DNA, 22 bp, Artificial Sequence
  chemically synthesized
ttgctactggagtcattttctg

SEQ ID NO: 56255 - DNA, 22 bp, Artificial Sequence
  chemically synthesized
ctactggagtcattttctgtca

SEQ ID NO: 56256 - DNA, 22 bp, Artificial Sequence
  chemically synthesized
ctggagtcattttctgtcacaa

SEQ ID NO: 56257 - DNA, 22 bp, Artificial Sequence
  chemically synthesized
gagtcattttctgtcacaaact

SEQ ID NO: 56258 - DNA, 22 bp, Artificial Sequence
  chemically synthesized
tctgtcacaaacttaatttcca

SEQ ID NO: 56259 - DNA, 22 bp, Artificial Sequence
  chemically synthesized
ctgtcacaaacttaatttccag

SEQ ID NO: 56260 - DNA, 22 bp, Artificial Sequence
  chemically synthesized
tgtcacaaacttaatttccagg

SEQ ID NO: 56261 - DNA, 22 bp, Artificial Sequence
  chemically synthesized
tcacaaacttaatttccaggaa

SEQ ID NO: 56262 - DNA, 22 bp, Artificial Sequence
  chemically synthesized
aatttccaggaaatgtaacctg

SEQ ID NO: 56263 - DNA, 22 bp, Artificial Sequence
  chemically synthesized
atttccaggaaatgtaacctga

SEQ ID NO: 56264 - DNA, 22 bp, Artificial Sequence
  chemically synthesized
ccaggaaatgtaacctgacaaa

SEQ ID NO: 56265 - DNA, 22 bp, Artificial Sequence
  chemically synthesized
caggaaatgtaacctgacaaat

SEQ ID NO: 56266 - DNA, 22 bp, Artificial Sequence
  chemically synthesized
acaaataagaattctttagctc

SEQ ID NO: 56267 - DNA, 22 bp, Artificial Sequence
  chemically synthesized
tttagctctctacatgtgctcc

SEQ ID NO: 56268 - DNA, 22 bp, Artificial Sequence
  chemically synthesized
tagctctctacatgtgctccta

SEQ ID NO: 56269 - DNA, 22 bp, Artificial Sequence
  chemically synthesized
agctctctacatgtgctcctag

SEQ ID NO: 56270 - DNA, 22 bp, Artificial Sequence
  chemically synthesized
gctctctacatgtgctcctaga

SEQ ID NO: 56271 - DNA, 22 bp, Artificial Sequence
  chemically synthesized
tctacatgtgctcctagagacc

SEQ ID NO: 56272 - DNA, 22 bp, Artificial Sequence
  chemically synthesized
tacatgtgctcctagagaccaa

SEQ ID NO: 56273 - DNA, 22 bp, Artificial Sequence
  chemically synthesized
catgtgctcctagagaccaaag

SEQ ID NO: 56274 - DNA, 22 bp, Artificial Sequence
  chemically synthesized
ctagagaccaaaggcagattta

SEQ ID NO: 56275 - DNA, 22 bp, Artificial Sequence
  chemically synthesized
gagaccaaaggcagatttaaaa

SEQ ID NO: 56276 - DNA, 22 bp, Artificial Sequence
  chemically synthesized
aaaataataataattttaaaag

SEQ ID NO: 56277 - DNA, 22 bp, Artificial Sequence
  chemically synthesized
aaataataataattttaaaagt

SEQ ID NO: 56278 - DNA, 22 bp, Artificial Sequence
  chemically synthesized
taaaagtgccagcattattaaa

SEQ ID NO: 56279 - DNA, 22 bp, Artificial Sequence
  chemically synthesized
aaaagtgccagcattattaaag

SEQ ID NO: 56280 - DNA, 22 bp, Artificial Sequence
  chemically synthesized
aaagtgccagcattattaaagc

SEQ ID NO: 56281 - DNA, 22 bp, Artificial Sequence
  chemically synthesized
ttaaagccagtatacttgatgc

SEQ ID NO: 56282 - DNA, 22 bp, Artificial Sequence
  chemically synthesized
aagccagtatacttgatgccaa

SEQ ID NO: 56283 - DNA, 22 bp, Artificial Sequence
  chemically synthesized
gatgccaaactcaatttgaagc

SEQ ID NO: 56284 - DNA, 22 bp, Artificial Sequence
  chemically synthesized
atgccaaactcaatttgaagcc

SEQ ID NO: 56285 - DNA, 22 bp, Artificial Sequence
  chemically synthesized
aatttgaagccagtaaacatca

SEQ ID NO: 56286 - DNA, 22 bp, Artificial Sequence
  chemically synthesized
gaagccagtaaacatcagactg

SEQ ID NO: 56287 - DNA, 22 bp, Artificial Sequence
  chemically synthesized
aagccagtaaacatcagactgt

SEQ ID NO: 56288 - DNA, 22 bp, Artificial Sequence
  chemically synthesized
tatttctaatcagttttaaaat

SEQ ID NO: 56289 - DNA, 22 bp, Artificial Sequence
  chemically synthesized
ctaatcagttttaaaatgtaac

SEQ ID NO: 56290 - DNA, 22 bp, Artificial Sequence
  chemically synthesized
taatcagttttaaaatgtaact

SEQ ID NO: 56291 - DNA, 22 bp, Artificial Sequence
  chemically synthesized
atcagttttaaaatgtaactta

SEQ ID NO: 56292 - DNA, 22 bp, Artificial Sequence
  chemically synthesized
taaaatgtaacttattccatat

SEQ ID NO: 56293 - DNA, 22 bp, Artificial Sequence
  chemically synthesized
aaaatgtaacttattccatatt

SEQ ID NO: 56294 - DNA, 22 bp, Artificial Sequence
  chemically synthesized
aaatgtaacttattccatattg

SEQ ID NO: 56295 - DNA, 22 bp, Artificial Sequence
  chemically synthesized
attccatattgggttcattgga

SEQ ID NO: 56296 - DNA, 22 bp, Artificial Sequence
  chemically synthesized
ttccatattgggttcattggaa

SEQ ID NO: 56297 - DNA, 22 bp, Artificial Sequence
  chemically synthesized
catattgggttcattggaattt

SEQ ID NO: 56298 - DNA, 22 bp, Artificial Sequence
  chemically synthesized
ggttcattggaatttgtctccc

SEQ ID NO: 56299 - DNA, 22 bp, Artificial Sequence
  chemically synthesized
attggaatttgtctccctgctt

SEQ ID NO: 56300 - DNA, 22 bp, Artificial Sequence
  chemically synthesized
gaatttgtctccctgcttttta

SEQ ID NO: 56301 - DNA, 22 bp, Artificial Sequence
  chemically synthesized
gtctccctgctttttactggcc

SEQ ID NO: 56302 - DNA, 22 bp, Artificial Sequence
  chemically synthesized
tctccctgctttttactggcca

SEQ ID NO: 56303 - DNA, 22 bp, Artificial Sequence
  chemically synthesized
cctgctttttactggccagctg

SEQ ID NO: 56304 - DNA, 22 bp, Artificial Sequence
  chemically synthesized
ctttttactggccagctgcact

SEQ ID NO: 56305 - DNA, 22 bp, Artificial Sequence
  chemically synthesized
tttactggccagctgcactccc

SEQ ID NO: 56306 - DNA, 22 bp, Artificial Sequence
  chemically synthesized
ttactggccagctgcactccct

SEQ ID NO: 56307 - DNA, 22 bp, Artificial Sequence
  chemically synthesized
tactggccagctgcactcccta

SEQ ID NO: 56308 - DNA, 22 bp, Artificial Sequence
  chemically synthesized
actggccagctgcactccctat

SEQ ID NO: 56309 - DNA, 22 bp, Artificial Sequence
  chemically synthesized
ctggccagctgcactccctatg

SEQ ID NO: 56310 - DNA, 22 bp, Artificial Sequence
  chemically synthesized
gccagctgcactccctatgcat

SEQ ID NO: 56311 - DNA, 22 bp, Artificial Sequence
  chemically synthesized
cactccctatgcatttttaaaa

SEQ ID NO: 56312 - DNA, 22 bp, Artificial Sequence
  chemically synthesized
cctatgcatttttaaaacattt

SEQ ID NO: 56313 - DNA, 22 bp, Artificial Sequence
  chemically synthesized
tgcatttttaaaacatttcagc

SEQ ID NO: 56314 - DNA, 22 bp, Artificial Sequence
  chemically synthesized
ttaaaacatttcagcaaaggct

SEQ ID NO: 56315 - DNA, 22 bp, Artificial Sequence
  chemically synthesized
taaaacatttcagcaaaggctt

SEQ ID NO: 56316 - DNA, 22 bp, Artificial Sequence
  chemically synthesized
aaaacatttcagcaaaggcttt

SEQ ID NO: 56317 - DNA, 22 bp, Artificial Sequence
  chemically synthesized
aaacatttcagcaaaggctttt

SEQ ID NO: 56318 - DNA, 22 bp, Artificial Sequence
  chemically synthesized
cagcaaaggcttttgctgttct

SEQ ID NO: 56319 - DNA, 22 bp, Artificial Sequence
  chemically synthesized
agcaaaggcttttgctgttctt

SEQ ID NO: 56320 - DNA, 22 bp, Artificial Sequence
  chemically synthesized
ttgctgttcttagcagggttag

SEQ ID NO: 56321 - DNA, 22 bp, Artificial Sequence
  chemically synthesized
tgctgttcttagcagggttagt

SEQ ID NO: 56322 - DNA, 22 bp, Artificial Sequence
  chemically synthesized
gctgttcttagcagggttagta

SEQ ID NO: 56323 - DNA, 22 bp, Artificial Sequence
  chemically synthesized
ctgttcttagcagggttagtaa

SEQ ID NO: 56324 - DNA, 22 bp, Artificial Sequence
  chemically synthesized
ttcttagcagggttagtaactt

SEQ ID NO: 56325 - DNA, 22 bp, Artificial Sequence
  chemically synthesized
ttagcagggttagtaacttggg

SEQ ID NO: 56326 - DNA, 22 bp, Artificial Sequence
  chemically synthesized
agcagggttagtaacttggggt

SEQ ID NO: 56327 - DNA, 22 bp, Artificial Sequence
  chemically synthesized
gcagggttagtaacttggggtc

SEQ ID NO: 56328 - DNA, 22 bp, Artificial Sequence
  chemically synthesized
gtaacttggggtctatttctga

SEQ ID NO: 56329 - DNA, 22 bp, Artificial Sequence
  chemically synthesized
ggggtctatttctgagctcatt

SEQ ID NO: 56330 - DNA, 22 bp, Artificial Sequence
  chemically synthesized
gggtctatttctgagctcattc

SEQ ID NO: 56331 - DNA, 22 bp, Artificial Sequence
  chemically synthesized
tttctgagctcattcgtcattc

SEQ ID NO: 56332 - DNA, 22 bp, Artificial Sequence
  chemically synthesized
ctgagctcattcgtcattctgc

SEQ ID NO: 56333 - DNA, 22 bp, Artificial Sequence
  chemically synthesized
tgagctcattcgtcattctgca

SEQ ID NO: 56334 - DNA, 22 bp, Artificial Sequence
  chemically synthesized
agctcattcgtcattctgcaat

SEQ ID NO: 56335 - DNA, 22 bp, Artificial Sequence
  chemically synthesized
attcgtcattctgcaatggcat

SEQ ID NO: 56336 - DNA, 22 bp, Artificial Sequence
  chemically synthesized
gtcattctgcaatggcattgag

SEQ ID NO: 56337 - DNA, 22 bp, Artificial Sequence
  chemically synthesized
tgcaatggcattgagttaggtt

SEQ ID NO: 56338 - DNA, 22 bp, Artificial Sequence
  chemically synthesized
caatggcattgagttaggttgg

SEQ ID NO: 56339 - DNA, 22 bp, Artificial Sequence
  chemically synthesized
agttaggttggcaagggaagga

SEQ ID NO: 56340 - DNA, 22 bp, Artificial Sequence
  chemically synthesized
ggttggcaagggaaggatttga

SEQ ID NO: 56341 - DNA, 22 bp, Artificial Sequence
  chemically synthesized
gcaagggaaggatttgaggcat

SEQ ID NO: 56342 - DNA, 22 bp, Artificial Sequence
  chemically synthesized
gaggcatggggggtggtgaggt

SEQ ID NO: 56343 - DNA, 22 bp, Artificial Sequence
  chemically synthesized
aggcatggggggtggtgaggtc

SEQ ID NO: 56344 - DNA, 22 bp, Artificial Sequence
  chemically synthesized
ctgatcccagcagggaataggt

SEQ ID NO: 56345 - DNA, 22 bp, Artificial Sequence
  chemically synthesized
tgatcccagcagggaataggtg

SEQ ID NO: 56346 - DNA, 22 bp, Artificial Sequence
  chemically synthesized
atcccagcagggaataggtgag

SEQ ID NO: 56347 - DNA, 22 bp, Artificial Sequence
  chemically synthesized
catttgcctttacaataggcgc

SEQ ID NO: 56348 - DNA, 22 bp, Artificial Sequence
  chemically synthesized
atttgcctttacaataggcgca

SEQ ID NO: 56349 - DNA, 22 bp, Artificial Sequence
  chemically synthesized
gcctttacaataggcgcacagt

SEQ ID NO: 56350 - DNA, 22 bp, Artificial Sequence
  chemically synthesized
cctttacaataggcgcacagtt

SEQ ID NO: 56351 - DNA, 22 bp, Artificial Sequence
  chemically synthesized
tacaataggcgcacagttactg

SEQ ID NO: 56352 - DNA, 22 bp, Artificial Sequence
  chemically synthesized
acaataggcgcacagttactgc

SEQ ID NO: 56353 - DNA, 22 bp, Artificial Sequence
  chemically synthesized
caataggcgcacagttactgca

SEQ ID NO: 56354 - DNA, 22 bp, Artificial Sequence
  chemically synthesized
ctgcaccttggaggagctctca

SEQ ID NO: 56355 - DNA, 22 bp, Artificial Sequence
  chemically synthesized
caccttggaggagctctcaggt

SEQ ID NO: 56356 - DNA, 22 bp, Artificial Sequence
  chemically synthesized
ggaggagctctcaggtgccgct

SEQ ID NO: 56357 - DNA, 22 bp, Artificial Sequence
  chemically synthesized
gaggagctctcaggtgccgctc

SEQ ID NO: 56358 - DNA, 22 bp, Artificial Sequence
  chemically synthesized
tcaggtgccgctcagatgggcg

SEQ ID NO: 56359 - DNA, 22 bp, Artificial Sequence
  chemically synthesized
aggtgccgctcagatgggcgca

SEQ ID NO: 56360 - DNA, 22 bp, Artificial Sequence
  chemically synthesized
agatgggcgcatgtaaatgccc

SEQ ID NO: 56361 - DNA, 22 bp, Artificial Sequence
  chemically synthesized
tcagatgcggagctggaatatt

SEQ ID NO: 56362 - DNA, 22 bp, Artificial Sequence
  chemically synthesized
gaatattaatgcttcttccacc

SEQ ID NO: 56363 - DNA, 22 bp, Artificial Sequence
  chemically synthesized
atgcttcttccaccaccacacc

SEQ ID NO: 56364 - DNA, 22 bp, Artificial Sequence
  chemically synthesized
cttccaccaccacaccataata

SEQ ID NO: 56365 - DNA, 22 bp, Artificial Sequence
  chemically synthesized
ttccaccaccacaccataataa

SEQ ID NO: 56366 - DNA, 22 bp, Artificial Sequence
  chemically synthesized
ccaccaccacaccataataaag

SEQ ID NO: 56367 - DNA, 22 bp, Artificial Sequence
  chemically synthesized
caccaccacaccataataaagc

SEQ ID NO: 56368 - DNA, 22 bp, Artificial Sequence
  chemically synthesized
tacacagcaagcttaatatgca

SEQ ID NO: 56369 - DNA, 22 bp, Artificial Sequence
  chemically synthesized
aatatgcagctagtctggggaa

SEQ ID NO: 56370 - DNA, 22 bp, Artificial Sequence
  chemically synthesized
atatgcagctagtctggggaat

SEQ ID NO: 56371 - DNA, 22 bp, Artificial Sequence
  chemically synthesized
gtctggggaattgtataaactt

SEQ ID NO: 56372 - DNA, 22 bp, Artificial Sequence
  chemically synthesized
gggaattgtataaacttagata

SEQ ID NO: 56373 - DNA, 22 bp, Artificial Sequence
  chemically synthesized
tataaacttagatagcccagtg

SEQ ID NO: 56374 - DNA, 22 bp, Artificial Sequence
  chemically synthesized
agatagcccagtgtgaaagaca

SEQ ID NO: 56375 - DNA, 22 bp, Artificial Sequence
  chemically synthesized
gatagcccagtgtgaaagacag

SEQ ID NO: 56376 - DNA, 22 bp, Artificial Sequence
  chemically synthesized
gatatgccacagtttccattct

SEQ ID NO: 56377 - DNA, 22 bp, Artificial Sequence
  chemically synthesized
ccattcttgttctcctttgatc

SEQ ID NO: 56378 - DNA, 22 bp, Artificial Sequence
  chemically synthesized
cattcttgttctcctttgatct

SEQ ID NO: 56379 - DNA, 22 bp, Artificial Sequence
  chemically synthesized
ttgttctcctttgatctatagc

SEQ ID NO: 56380 - DNA, 22 bp, Artificial Sequence
  chemically synthesized
gttctcctttgatctatagcga

SEQ ID NO: 56381 - DNA, 22 bp, Artificial Sequence
  chemically synthesized
ttctcctttgatctatagcgaa

SEQ ID NO: 56382 - DNA, 22 bp, Artificial Sequence
  chemically synthesized
tcctttgatctatagcgaaatg

SEQ ID NO: 56383 - DNA, 22 bp, Artificial Sequence
  chemically synthesized
ctttgatctatagcgaaatgaa

SEQ ID NO: 56384 - DNA, 22 bp, Artificial Sequence
  chemically synthesized
tgatctatagcgaaatgaaaac

SEQ ID NO: 56385 - DNA, 22 bp, Artificial Sequence
  chemically synthesized
gatctatagcgaaatgaaaaca

SEQ ID NO: 56386 - DNA, 22 bp, Artificial Sequence
  chemically synthesized
atctatagcgaaatgaaaacat

SEQ ID NO: 56387 - DNA, 22 bp, Artificial Sequence
  chemically synthesized
tagcgaaatgaaaacatcatcc

SEQ ID NO: 56388 - DNA, 22 bp, Artificial Sequence
  chemically synthesized
ttcttctcttggagttgtctcc

SEQ ID NO: 56389 - DNA, 22 bp, Artificial Sequence
  chemically synthesized
tcttctcttggagttgtctccc

SEQ ID NO: 56390 - DNA, 22 bp, Artificial Sequence
  chemically synthesized
cttctcttggagttgtctcccc

SEQ ID NO: 56391 - DNA, 22 bp, Artificial Sequence
  chemically synthesized
ttctcttggagttgtctcccca

SEQ ID NO: 56392 - DNA, 22 bp, Artificial Sequence
  chemically synthesized
ctcttggagttgtctccccaac

SEQ ID NO: 56393 - DNA, 22 bp, Artificial Sequence
  chemically synthesized
tcttggagttgtctccccaact

SEQ ID NO: 56394 - DNA, 22 bp, Artificial Sequence
  chemically synthesized
ttggagttgtctccccaactct

SEQ ID NO: 56395 - DNA, 22 bp, Artificial Sequence
  chemically synthesized
ggagttgtctccccaactctgc

SEQ ID NO: 56396 - DNA, 22 bp, Artificial Sequence
  chemically synthesized
gagttgtctccccaactctgcc

SEQ ID NO: 56397 - DNA, 22 bp, Artificial Sequence
  chemically synthesized
tctccccaactctgccacctcc

SEQ ID NO: 56398 - DNA, 22 bp, Artificial Sequence
  chemically synthesized
cccaactctgccacctcccaat

SEQ ID NO: 56399 - DNA, 22 bp, Artificial Sequence
  chemically synthesized
tgccacctcccaattcaccacc

SEQ ID NO: 56400 - DNA, 22 bp, Artificial Sequence
  chemically synthesized
ccacctcccaattcaccaccag

SEQ ID NO: 56401 - DNA, 22 bp, Artificial Sequence
  chemically synthesized
ccaattcaccaccagaattttt

SEQ ID NO: 56402 - DNA, 22 bp, Artificial Sequence
  chemically synthesized
accaccagaatttttttgcatg

SEQ ID NO: 56403 - DNA, 22 bp, Artificial Sequence
  chemically synthesized
ttttgcatgtgctggtatggag

SEQ ID NO: 56404 - DNA, 22 bp, Artificial Sequence
  chemically synthesized
tttgcatgtgctggtatggaga

SEQ ID NO: 56405 - DNA, 22 bp, Artificial Sequence
  chemically synthesized
ttgcatgtgctggtatggagaa

SEQ ID NO: 56406 - DNA, 22 bp, Artificial Sequence
  chemically synthesized
tgcatgtgctggtatggagaaa

SEQ ID NO: 56407 - DNA, 22 bp, Artificial Sequence
  chemically synthesized
gcatgtgctggtatggagaaat

SEQ ID NO: 56408 - DNA, 22 bp, Artificial Sequence
  chemically synthesized
catgtgctggtatggagaaatg

SEQ ID NO: 56409 - DNA, 22 bp, Artificial Sequence
  chemically synthesized
gtatggagaaatgcaacataat

SEQ ID NO: 56410 - DNA, 22 bp, Artificial Sequence
  chemically synthesized
gtttcatatggttaattacagg

SEQ ID NO: 56411 - DNA, 22 bp, Artificial Sequence
  chemically synthesized
tttcatatggttaattacaggc

SEQ ID NO: 56412 - DNA, 22 bp, Artificial Sequence
  chemically synthesized
catatggttaattacaggcgtt

SEQ ID NO: 56413 - DNA, 22 bp, Artificial Sequence
  chemically synthesized
atatggttaattacaggcgttt

SEQ ID NO: 56414 - DNA, 22 bp, Artificial Sequence
  chemically synthesized
attacaggcgtttgaatattta

SEQ ID NO: 56415 - DNA, 22 bp, Artificial Sequence
  chemically synthesized
caggcgtttgaatatttaaaat

SEQ ID NO: 56416 - DNA, 22 bp, Artificial Sequence
  chemically synthesized
gaatatttaaaattttaaatag

SEQ ID NO: 56417 - DNA, 22 bp, Artificial Sequence
  chemically synthesized
aatatttaaaattttaaatagc

SEQ ID NO: 56418 - DNA, 22 bp, Artificial Sequence
  chemically synthesized
aaaattttaaatagccacagtt

SEQ ID NO: 56419 - DNA, 22 bp, Artificial Sequence
  chemically synthesized
aaattttaaatagccacagttc

SEQ ID NO: 56420 - DNA, 22 bp, Artificial Sequence
  chemically synthesized
taaatagccacagttccagctt

SEQ ID NO: 56421 - DNA, 22 bp, Artificial Sequence
  chemically synthesized
aaatagccacagttccagcttt

SEQ ID NO: 56422 - DNA, 22 bp, Artificial Sequence
  chemically synthesized
aatagccacagttccagctttt

SEQ ID NO: 56423 - DNA, 22 bp, Artificial Sequence
  chemically synthesized
cagcttttcccgttaaaagtat

SEQ ID NO: 56424 - DNA, 22 bp, Artificial Sequence
  chemically synthesized
ttcccgttaaaagtatgtgatt

SEQ ID NO: 56425 - DNA, 22 bp, Artificial Sequence
  chemically synthesized
tcccgttaaaagtatgtgattt

SEQ ID NO: 56426 - DNA, 22 bp, Artificial Sequence
  chemically synthesized
cccgttaaaagtatgtgatttg

SEQ ID NO: 56427 - DNA, 22 bp, Artificial Sequence
  chemically synthesized
ccgttaaaagtatgtgatttga

SEQ ID NO: 56428 - DNA, 22 bp, Artificial Sequence
  chemically synthesized
aaagtatgtgatttgaacaaag

SEQ ID NO: 56429 - DNA, 22 bp, Artificial Sequence
  chemically synthesized
gaacaaagggagtacagtgtaa

SEQ ID NO: 56430 - DNA, 22 bp, Artificial Sequence
  chemically synthesized
aacaaagggagtacagtgtaaa

SEQ ID NO: 56431 - DNA, 22 bp, Artificial Sequence
  chemically synthesized
gtggtgatttgcaacacccctc

SEQ ID NO: 56432 - DNA, 22 bp, Artificial Sequence
  chemically synthesized
tggtgatttgcaacacccctct

SEQ ID NO: 56433 - DNA, 22 bp, Artificial Sequence
  chemically synthesized
gcaacacccctctttccccatt

SEQ ID NO: 56434 - DNA, 22 bp, Artificial Sequence
  chemically synthesized
caacacccctctttccccatta

SEQ ID NO: 56435 - DNA, 22 bp, Artificial Sequence
  chemically synthesized
tttccccattacacacacacac

SEQ ID NO: 56436 - DNA, 22 bp, Artificial Sequence
  chemically synthesized
tccccattacacacacacacac

SEQ ID NO: 56437 - DNA, 22 bp, Artificial Sequence
  chemically synthesized
ccccattacacacacacacaca

SEQ ID NO: 56438 - DNA, 22 bp, Artificial Sequence
  chemically synthesized
cccattacacacacacacacac

SEQ ID NO: 56439 - DNA, 22 bp, Artificial Sequence
  chemically synthesized
cacacacacacacacacacaca

SEQ ID NO: 56440 - DNA, 22 bp, Artificial Sequence
  chemically synthesized
agtttaaatctagtactgatct

SEQ ID NO: 56441 - DNA, 22 bp, Artificial Sequence
  chemically synthesized
aaatctagtactgatctaaagg

SEQ ID NO: 56442 - DNA, 22 bp, Artificial Sequence
  chemically synthesized
aatctagtactgatctaaagga

SEQ ID NO: 56443 - DNA, 22 bp, Artificial Sequence
  chemically synthesized
gtactgatctaaaggacttctg

SEQ ID NO: 56444 - DNA, 22 bp, Artificial Sequence
  chemically synthesized
atctaaaggacttctgtacctt

SEQ ID NO: 56445 - DNA, 22 bp, Artificial Sequence
  chemically synthesized
aaggacttctgtaccttcattt

SEQ ID NO: 56446 - DNA, 22 bp, Artificial Sequence
  chemically synthesized
ctgtaccttcatttgtactttt

SEQ ID NO: 56447 - DNA, 22 bp, Artificial Sequence
  chemically synthesized
tgtaccttcatttgtacttttt

SEQ ID NO: 56448 - DNA, 22 bp, Artificial Sequence
  chemically synthesized
taccttcatttgtacttttttt

SEQ ID NO: 56449 - DNA, 22 bp, Artificial Sequence
  chemically synthesized
catttgtactttttttaaaaaa

SEQ ID NO: 56450 - DNA, 22 bp, Artificial Sequence
  chemically synthesized
atttgtactttttttaaaaaac

SEQ ID NO: 56451 - DNA, 22 bp, Artificial Sequence
  chemically synthesized
gtactttttttaaaaaacaact

SEQ ID NO: 56452 - DNA, 22 bp, Artificial Sequence
  chemically synthesized
tactttttttaaaaaacaactt

SEQ ID NO: 56453 - DNA, 22 bp, Artificial Sequence
  chemically synthesized
tttttaaaaaacaactttcaac

SEQ ID NO: 56454 - DNA, 22 bp, Artificial Sequence
  chemically synthesized
ttttaaaaaacaactttcaact

SEQ ID NO: 56455 - DNA, 22 bp, Artificial Sequence
  chemically synthesized
tttaaaaaacaactttcaactg

SEQ ID NO: 56456 - DNA, 22 bp, Artificial Sequence
  chemically synthesized
ttaaaaaacaactttcaactgg

SEQ ID NO: 56457 - DNA, 22 bp, Artificial Sequence
  chemically synthesized
taaaaaacaactttcaactgga

SEQ ID NO: 56458 - DNA, 22 bp, Artificial Sequence
  chemically synthesized
aaaaaacaactttcaactggaa

SEQ ID NO: 56459 - DNA, 22 bp, Artificial Sequence
  chemically synthesized
aaaaacaactttcaactggaat

SEQ ID NO: 56460 - DNA, 22 bp, Artificial Sequence
  chemically synthesized
tcaactggaattccattaaaat

SEQ ID NO: 56461 - DNA, 22 bp, Artificial Sequence
  chemically synthesized
caactggaattccattaaaata

SEQ ID NO: 56462 - DNA, 22 bp, Artificial Sequence
  chemically synthesized
aactggaattccattaaaatat

SEQ ID NO: 56463 - DNA, 22 bp, Artificial Sequence
  chemically synthesized
gaattccattaaaatatttcac

SEQ ID NO: 56464 - DNA, 22 bp, Artificial Sequence
  chemically synthesized
cattaaaatatttcaccattat

SEQ ID NO: 56465 - DNA, 22 bp, Artificial Sequence
  chemically synthesized
aaatatttcaccattatatttt

SEQ ID NO: 56466 - DNA, 22 bp, Artificial Sequence
  chemically synthesized
caccattatatttttgagtcca

SEQ ID NO: 56467 - DNA, 22 bp, Artificial Sequence
  chemically synthesized
accattatatttttgagtccac

SEQ ID NO: 56468 - DNA, 22 bp, Artificial Sequence
  chemically synthesized
tatttttgagtccacattgctt

SEQ ID NO: 56469 - DNA, 22 bp, Artificial Sequence
  chemically synthesized
ttgagtccacattgcttgaggt

SEQ ID NO: 56470 - DNA, 22 bp, Artificial Sequence
  chemically synthesized
tgagtccacattgcttgaggtt

SEQ ID NO: 56471 - DNA, 22 bp, Artificial Sequence
  chemically synthesized
gagtccacattgcttgaggttt

SEQ ID NO: 56472 - DNA, 22 bp, Artificial Sequence
  chemically synthesized
agtccacattgcttgaggtttt

SEQ ID NO: 56473 - DNA, 22 bp, Artificial Sequence
  chemically synthesized
cttgaggttttaaagaagattt

SEQ ID NO: 56474 - DNA, 22 bp, Artificial Sequence
  chemically synthesized
gaggttttaaagaagattttta

SEQ ID NO: 56475 - DNA, 22 bp, Artificial Sequence
  chemically synthesized
aggttttaaagaagatttttat

SEQ ID NO: 56476 - DNA, 22 bp, Artificial Sequence
  chemically synthesized
taaagaagatttttataatgtg

SEQ ID NO: 56477 - DNA, 22 bp, Artificial Sequence
  chemically synthesized
aaagaagatttttataatgtgt

SEQ ID NO: 56478 - DNA, 22 bp, Artificial Sequence
  chemically synthesized
aagaagatttttataatgtgtt

SEQ ID NO: 56479 - DNA, 22 bp, Artificial Sequence
  chemically synthesized
ttataatgtgttcctttaacag

SEQ ID NO: 56480 - DNA, 22 bp, Artificial Sequence
  chemically synthesized
tataatgtgttcctttaacaga

SEQ ID NO: 56481 - DNA, 22 bp, Artificial Sequence
  chemically synthesized
ataatgtgttcctttaacagaa

SEQ ID NO: 56482 - DNA, 22 bp, Artificial Sequence
  chemically synthesized
taatgtgttcctttaacagaat

SEQ ID NO: 56483 - DNA, 22 bp, Artificial Sequence
  chemically synthesized
ctttaacagaatcaacagctgt

SEQ ID NO: 56484 - DNA, 22 bp, Artificial Sequence
  chemically synthesized
taacagaatcaacagctgtcag

SEQ ID NO: 56485 - DNA, 22 bp, Artificial Sequence
  chemically synthesized
aacagaatcaacagctgtcaga

SEQ ID NO: 56486 - DNA, 22 bp, Artificial Sequence
  chemically synthesized
acagaatcaacagctgtcagaa

SEQ ID NO: 56487 - DNA, 22 bp, Artificial Sequence
  chemically synthesized
tcagaagcagttgtggtagatc

SEQ ID NO: 56488 - DNA, 22 bp, Artificial Sequence
  chemically synthesized
tggtagatccacaaaacgtata

SEQ ID NO: 56489 - DNA, 22 bp, Artificial Sequence
  chemically synthesized
cctgaaacaaaacacttggaaa

SEQ ID NO: 56490 - DNA, 22 bp, Artificial Sequence
  chemically synthesized
ctgaaacaaaacacttggaaaa

SEQ ID NO: 56491 - DNA, 22 bp, Artificial Sequence
  chemically synthesized
aaacaaaacacttggaaaaata

SEQ ID NO: 56492 - DNA, 22 bp, Artificial Sequence
  chemically synthesized
ggaaaaataagctgctaagaac

SEQ ID NO: 56493 - DNA, 22 bp, Artificial Sequence
  chemically synthesized
gaaaaataagctgctaagaact

SEQ ID NO: 56494 - DNA, 22 bp, Artificial Sequence
  chemically synthesized
ctaagaactggcgaattagaag

SEQ ID NO: 56495 - DNA, 22 bp, Artificial Sequence
  chemically synthesized
agaactggcgaattagaagttt

SEQ ID NO: 56496 - DNA, 22 bp, Artificial Sequence
  chemically synthesized
gcgaattagaagtttgcagaca

SEQ ID NO: 56497 - DNA, 22 bp, Artificial Sequence
  chemically synthesized
gaagtttgcagacagggaactg

SEQ ID NO: 56498 - DNA, 22 bp, Artificial Sequence
  chemically synthesized
gcagacagggaactgaagtgtc

SEQ ID NO: 56499 - DNA, 22 bp, Artificial Sequence
  chemically synthesized
cagacagggaactgaagtgtca

SEQ ID NO: 56500 - DNA, 22 bp, Artificial Sequence
  chemically synthesized
aagtgtcatctcttggttcacc

SEQ ID NO: 56501 - DNA, 22 bp, Artificial Sequence
  chemically synthesized
ttggttcaccctggagactgat

SEQ ID NO: 56502 - DNA, 22 bp, Artificial Sequence
  chemically synthesized
ggttcaccctggagactgatgt

SEQ ID NO: 56503 - DNA, 22 bp, Artificial Sequence
  chemically synthesized
gttcaccctggagactgatgtg

SEQ ID NO: 56504 - DNA, 22 bp, Artificial Sequence
  chemically synthesized
accctggagactgatgtgagtg

SEQ ID NO: 56505 - DNA, 22 bp, Artificial Sequence
  chemically synthesized
gagactgatgtgagtggatctg

SEQ ID NO: 56506 - DNA, 22 bp, Artificial Sequence
  chemically synthesized
atgtgagtggatctgatgcaat

SEQ ID NO: 56507 - DNA, 22 bp, Artificial Sequence
  chemically synthesized
atgcaatgctgctggaagattt

SEQ ID NO: 56508 - DNA, 22 bp, Artificial Sequence
  chemically synthesized
ctggaagatttacctgcacagg

SEQ ID NO: 56509 - DNA, 22 bp, Artificial Sequence
  chemically synthesized
gaagatttacctgcacaggttg

SEQ ID NO: 56510 - DNA, 22 bp, Artificial Sequence
  chemically synthesized
acctgcacaggttgctcctcta

SEQ ID NO: 56511 - DNA, 22 bp, Artificial Sequence
  chemically synthesized
cctgcacaggttgctcctctaa

SEQ ID NO: 56512 - DNA, 22 bp, Artificial Sequence
  chemically synthesized
cacaggttgctcctctaaggca

SEQ ID NO: 56513 - DNA, 22 bp, Artificial Sequence
  chemically synthesized
ctcctctaaggcaacgcgcagt

SEQ ID NO: 56514 - DNA, 22 bp, Artificial Sequence
  chemically synthesized
ctctaaggcaacgcgcagtgca

SEQ ID NO: 56515 - DNA, 22 bp, Artificial Sequence
  chemically synthesized
taaggcaacgcgcagtgcacga

SEQ ID NO: 56516 - DNA, 22 bp, Artificial Sequence
  chemically synthesized
aggcaacgcgcagtgcacgatt

SEQ ID NO: 56517 - DNA, 22 bp, Artificial Sequence
  chemically synthesized
acgtatgcaccagagctaggct

SEQ ID NO: 56518 - DNA, 22 bp, Artificial Sequence
  chemically synthesized
ggctgggcctcagctcgctcca

SEQ ID NO: 56519 - DNA, 22 bp, Artificial Sequence
  chemically synthesized
ggcctcagctcgctccatcttt

SEQ ID NO: 56520 - DNA, 22 bp, Artificial Sequence
  chemically synthesized
agctcgctccatcttttgccct

SEQ ID NO: 56521 - DNA, 22 bp, Artificial Sequence
  chemically synthesized
gctccatcttttgccctttttg

SEQ ID NO: 56522 - DNA, 22 bp, Artificial Sequence
  chemically synthesized
catcttttgccctttttgatct

SEQ ID NO: 56523 - DNA, 22 bp, Artificial Sequence
  chemically synthesized
ttgccctttttgatctctttag

SEQ ID NO: 56524 - DNA, 22 bp, Artificial Sequence
  chemically synthesized
tgccctttttgatctctttaga

SEQ ID NO: 56525 - DNA, 22 bp, Artificial Sequence
  chemically synthesized
gccctttttgatctctttagat

SEQ ID NO: 56526 - DNA, 22 bp, Artificial Sequence
  chemically synthesized
ccctttttgatctctttagata

SEQ ID NO: 56527 - DNA, 22 bp, Artificial Sequence
  chemically synthesized
tttgatctctttagatagataa

SEQ ID NO: 56528 - DNA, 22 bp, Artificial Sequence
  chemically synthesized
ttgatctctttagatagataaa

SEQ ID NO: 56529 - DNA, 22 bp, Artificial Sequence
  chemically synthesized
tgatctctttagatagataaaa

SEQ ID NO: 56530 - DNA, 22 bp, Artificial Sequence
  chemically synthesized
gatctctttagatagataaaat

SEQ ID NO: 56531 - DNA, 22 bp, Artificial Sequence
  chemically synthesized
atctctttagatagataaaata

SEQ ID NO: 56532 - DNA, 22 bp, Artificial Sequence
  chemically synthesized
tttagatagataaaataccaag

SEQ ID NO: 56533 - DNA, 22 bp, Artificial Sequence
  chemically synthesized
tagatagataaaataccaagtt

SEQ ID NO: 56534 - DNA, 22 bp, Artificial Sequence
  chemically synthesized
agatagataaaataccaagttc

SEQ ID NO: 56535 - DNA, 22 bp, Artificial Sequence
  chemically synthesized
gatagataaaataccaagttct

SEQ ID NO: 56536 - DNA, 22 bp, Artificial Sequence
  chemically synthesized
tcagagtgctaaacaacaaatt

SEQ ID NO: 56537 - DNA, 22 bp, Artificial Sequence
  chemically synthesized
agagtgctaaacaacaaattat

SEQ ID NO: 56538 - DNA, 22 bp, Artificial Sequence
  chemically synthesized
aacaacaaattatatataccta

SEQ ID NO: 56539 - DNA, 22 bp, Artificial Sequence
  chemically synthesized
tatatacctaaaggtgagatga

SEQ ID NO: 56540 - DNA, 22 bp, Artificial Sequence
  chemically synthesized
aaggtgagatgatcaggtttaa

SEQ ID NO: 56541 - DNA, 22 bp, Artificial Sequence
  chemically synthesized
aaacttcctgtaaaagaggcga

SEQ ID NO: 56542 - DNA, 22 bp, Artificial Sequence
  chemically synthesized
aacttcctgtaaaagaggcgag

SEQ ID NO: 56543 - DNA, 22 bp, Artificial Sequence
  chemically synthesized
cctgtaaaagaggcgagaaggc

SEQ ID NO: 56544 - DNA, 22 bp, Artificial Sequence
  chemically synthesized
ctgtaaaagaggcgagaaggcg

SEQ ID NO: 56545 - DNA, 22 bp, Artificial Sequence
  chemically synthesized
taaaagaggcgagaaggcgcct

SEQ ID NO: 56546 - DNA, 22 bp, Artificial Sequence
  chemically synthesized
gcacacccttttccagataggg

SEQ ID NO: 56547 - DNA, 22 bp, Artificial Sequence
  chemically synthesized
cacacccttttccagatagggc

SEQ ID NO: 56548 - DNA, 22 bp, Artificial Sequence
  chemically synthesized
ttccagatagggctggcagcat

SEQ ID NO: 56549 - DNA, 22 bp, Artificial Sequence
  chemically synthesized
tccagatagggctggcagcatg

SEQ ID NO: 56550 - DNA, 22 bp, Artificial Sequence
  chemically synthesized
ccagatagggctggcagcatgt

SEQ ID NO: 56551 - DNA, 22 bp, Artificial Sequence
  chemically synthesized
cagatagggctggcagcatgtt

SEQ ID NO: 56552 - DNA, 22 bp, Artificial Sequence
  chemically synthesized
gcagcatgttattcagaactga

SEQ ID NO: 56553 - DNA, 22 bp, Artificial Sequence
  chemically synthesized
ttcagaactgaatcagtctctg

SEQ ID NO: 56554 - DNA, 22 bp, Artificial Sequence
  chemically synthesized
agaactgaatcagtctctgcca

SEQ ID NO: 56555 - DNA, 22 bp, Artificial Sequence
  chemically synthesized
aatcagtctctgccagagaatt

SEQ ID NO: 56556 - DNA, 22 bp, Artificial Sequence
  chemically synthesized
tgccagagaattcccagtggga

SEQ ID NO: 56557 - DNA, 22 bp, Artificial Sequence
  chemically synthesized
ccagagaattcccagtgggaac

SEQ ID NO: 56558 - DNA, 22 bp, Artificial Sequence
  chemically synthesized
ccagtgggaacctggagcaggt

SEQ ID NO: 56559 - DNA, 22 bp, Artificial Sequence
  chemically synthesized
gagcaggtatgttgatgaaggg

SEQ ID NO: 56560 - DNA, 22 bp, Artificial Sequence
  chemically synthesized
atgaaggggatacctggggacc

SEQ ID NO: 56561 - DNA, 22 bp, Artificial Sequence
  chemically synthesized
gggacctttggtcactcacaat

SEQ ID NO: 56562 - DNA, 22 bp, Artificial Sequence
  chemically synthesized
tggtcactcacaatgagttttt

SEQ ID NO: 56563 - DNA, 22 bp, Artificial Sequence
  chemically synthesized
ggtcactcacaatgagtttttg

SEQ ID NO: 56564 - DNA, 22 bp, Artificial Sequence
  chemically synthesized
gtcactcacaatgagtttttgt

SEQ ID NO: 56565 - DNA, 22 bp, Artificial Sequence
  chemically synthesized
acaatgagtttttgtttgtatt

SEQ ID NO: 56566 - DNA, 22 bp, Artificial Sequence
  chemically synthesized
ttgtttgtattctcactgttgt

SEQ ID NO: 56567 - DNA, 22 bp, Artificial Sequence
  chemically synthesized
tgtttgtattctcactgttgtt

SEQ ID NO: 56568 - DNA, 22 bp, Artificial Sequence
  chemically synthesized
gtttgtattctcactgttgtta

SEQ ID NO: 56569 - DNA, 22 bp, Artificial Sequence
  chemically synthesized
tttgtattctcactgttgttag

SEQ ID NO: 56570 - DNA, 22 bp, Artificial Sequence
  chemically synthesized
gtattctcactgttgttagcat

SEQ ID NO: 56571 - DNA, 22 bp, Artificial Sequence
  chemically synthesized
tattctcactgttgttagcatt

SEQ ID NO: 56572 - DNA, 22 bp, Artificial Sequence
  chemically synthesized
tcactgttgttagcattgccaa

SEQ ID NO: 56573 - DNA, 22 bp, Artificial Sequence
  chemically synthesized
actgttgttagcattgccaatg

SEQ ID NO: 56574 - DNA, 22 bp, Artificial Sequence
  chemically synthesized
ttgttagcattgccaatgaaca

SEQ ID NO: 56575 - DNA, 22 bp, Artificial Sequence
  chemically synthesized
ttagcattgccaatgaacaatt

SEQ ID NO: 56576 - DNA, 22 bp, Artificial Sequence
  chemically synthesized
gcattgccaatgaacaattgca

SEQ ID NO: 56577 - DNA, 22 bp, Artificial Sequence
  chemically synthesized
ccaatgaacaattgcacctaca

SEQ ID NO: 56578 - DNA, 22 bp, Artificial Sequence
  chemically synthesized
cacctacaatttgattttagtt

SEQ ID NO: 56579 - DNA, 22 bp, Artificial Sequence
  chemically synthesized
caatttgattttagttttagat

SEQ ID NO: 56580 - DNA, 22 bp, Artificial Sequence
  chemically synthesized
gattttagttttagatagaggc

SEQ ID NO: 56581 - DNA, 22 bp, Artificial Sequence
  chemically synthesized
attttagttttagatagaggcg

SEQ ID NO: 56582 - DNA, 22 bp, Artificial Sequence
  chemically synthesized
tagttttagatagaggcgaatc

SEQ ID NO: 56583 - DNA, 22 bp, Artificial Sequence
  chemically synthesized
agttttagatagaggcgaatcc

SEQ ID NO: 56584 - DNA, 22 bp, Artificial Sequence
  chemically synthesized
gttttagatagaggcgaatcca

SEQ ID NO: 56585 - DNA, 22 bp, Artificial Sequence
  chemically synthesized
tagatagaggcgaatccactga

SEQ ID NO: 56586 - DNA, 22 bp, Artificial Sequence
  chemically synthesized
agatagaggcgaatccactgat

SEQ ID NO: 56587 - DNA, 22 bp, Artificial Sequence
  chemically synthesized
gatagaggcgaatccactgatt

SEQ ID NO: 56588 - DNA, 22 bp, Artificial Sequence
  chemically synthesized
attaaaaactcccattaaaata

SEQ ID NO: 56589 - DNA, 22 bp, Artificial Sequence
  chemically synthesized
aaaactcccattaaaataaaga

SEQ ID NO: 56590 - DNA, 22 bp, Artificial Sequence
  chemically synthesized
ccattaaaataaagaatggaat

SEQ ID NO: 56591 - DNA, 22 bp, Artificial Sequence
  chemically synthesized
aaataaagaatggaattattgt

SEQ ID NO: 56592 - DNA, 22 bp, Artificial Sequence
  chemically synthesized
ttgtgaaacctgcaagggtgcc

SEQ ID NO: 56593 - DNA, 22 bp, Artificial Sequence
  chemically synthesized
tgaaacctgcaagggtgccttc

SEQ ID NO: 56594 - DNA, 22 bp, Artificial Sequence
  chemically synthesized
caagggtgccttcaaaaagaaa

SEQ ID NO: 56595 - DNA, 22 bp, Artificial Sequence
  chemically synthesized
caaaaagaaaaccagtgctgtt

SEQ ID NO: 56596 - DNA, 22 bp, Artificial Sequence
  chemically synthesized
aaaaagaaaaccagtgctgttg

SEQ ID NO: 56597 - DNA, 22 bp, Artificial Sequence
  chemically synthesized
ttgtatacctacctcgcctttc

SEQ ID NO: 56598 - DNA, 22 bp, Artificial Sequence
  chemically synthesized
tatacctacctcgcctttctat

SEQ ID NO: 56599 - DNA, 22 bp, Artificial Sequence
  chemically synthesized
cctcgcctttctatttgctttt

SEQ ID NO: 56600 - DNA, 22 bp, Artificial Sequence
  chemically synthesized
gcctttctatttgctttttgaa

SEQ ID NO: 56601 - DNA, 22 bp, Artificial Sequence
  chemically synthesized
tctatttgctttttgaactttc

SEQ ID NO: 56602 - DNA, 22 bp, Artificial Sequence
  chemically synthesized
ctatttgctttttgaactttct

SEQ ID NO: 56603 - DNA, 22 bp, Artificial Sequence
  chemically synthesized
tatttgctttttgaactttcta

SEQ ID NO: 56604 - DNA, 22 bp, Artificial Sequence
  chemically synthesized
tttgctttttgaactttctaaa

SEQ ID NO: 56605 - DNA, 22 bp, Artificial Sequence
  chemically synthesized
gctttttgaactttctaaaaaa

SEQ ID NO: 56606 - DNA, 22 bp, Artificial Sequence
  chemically synthesized
ctttttgaactttctaaaaaac

SEQ ID NO: 56607 - DNA, 22 bp, Artificial Sequence
  chemically synthesized
tttgaactttctaaaaaacaca

SEQ ID NO: 56608 - DNA, 22 bp, Artificial Sequence
  chemically synthesized
ttgaactttctaaaaaacacaa

SEQ ID NO: 56609 - DNA, 22 bp, Artificial Sequence
  chemically synthesized
tgaactttctaaaaaacacaag

SEQ ID NO: 56610 - DNA, 22 bp, Artificial Sequence
  chemically synthesized
gaactttctaaaaaacacaagg

SEQ ID NO: 56611 - DNA, 22 bp, Artificial Sequence
  chemically synthesized
aactttctaaaaaacacaagga

SEQ ID NO: 56612 - DNA, 22 bp, Artificial Sequence
  chemically synthesized
tctaaaaaacacaaggaagctt

SEQ ID NO: 56613 - DNA, 22 bp, Artificial Sequence
  chemically synthesized
ctaaaaaacacaaggaagcttt

SEQ ID NO: 56614 - DNA, 22 bp, Artificial Sequence
  chemically synthesized
taaaaaacacaaggaagctttt

SEQ ID NO: 56615 - DNA, 22 bp, Artificial Sequence
  chemically synthesized
aaaaacacaaggaagctttttg

SEQ ID NO: 56616 - DNA, 22 bp, Artificial Sequence
  chemically synthesized
tttgctaagcatcagggcattt

SEQ ID NO: 56617 - DNA, 22 bp, Artificial Sequence
  chemically synthesized
ttgctaagcatcagggcattta

SEQ ID NO: 56618 - DNA, 22 bp, Artificial Sequence
  chemically synthesized
tgctaagcatcagggcatttaa

SEQ ID NO: 56619 - DNA, 22 bp, Artificial Sequence
  chemically synthesized
gctaagcatcagggcatttaaa

SEQ ID NO: 56620 - DNA, 22 bp, Artificial Sequence
  chemically synthesized
ctaagcatcagggcatttaaat

SEQ ID NO: 56621 - DNA, 22 bp, Artificial Sequence
  chemically synthesized
agcatcagggcatttaaattta

SEQ ID NO: 56622 - DNA, 22 bp, Artificial Sequence
  chemically synthesized
aaatttatattcatcagttgtt

SEQ ID NO: 56623 - DNA, 22 bp, Artificial Sequence
  chemically synthesized
aatttatattcatcagttgttc

SEQ ID NO: 56624 - DNA, 22 bp, Artificial Sequence
  chemically synthesized
atattcatcagttgttcatttt

SEQ ID NO: 56625 - DNA, 22 bp, Artificial Sequence
  chemically synthesized
tattcatcagttgttcattttc

SEQ ID NO: 56626 - DNA, 22 bp, Artificial Sequence
  chemically synthesized
atcagttgttcattttcttaat

SEQ ID NO: 56627 - DNA, 22 bp, Artificial Sequence
  chemically synthesized
ttcattttcttaatatgtaatg

SEQ ID NO: 56628 - DNA, 22 bp, Artificial Sequence
  chemically synthesized
attttcttaatatgtaatgatg

SEQ ID NO: 56629 - DNA, 22 bp, Artificial Sequence
  chemically synthesized
tcttaatatgtaatgatgcata

SEQ ID NO: 56630 - DNA, 22 bp, Artificial Sequence
  chemically synthesized
cttaatatgtaatgatgcataa

SEQ ID NO: 56631 - DNA, 22 bp, Artificial Sequence
  chemically synthesized
ttaatatgtaatgatgcataaa

SEQ ID NO: 56632 - DNA, 22 bp, Artificial Sequence
  chemically synthesized
aatatgtaatgatgcataaaaa

SEQ ID NO: 56633 - DNA, 22 bp, Artificial Sequence
  chemically synthesized
atatgtaatgatgcataaaaag

SEQ ID NO: 56634 - DNA, 22 bp, Artificial Sequence
  chemically synthesized
caaggaaatcacatctgttaat

SEQ ID NO: 56635 - DNA, 22 bp, Artificial Sequence
  chemically synthesized
ttaatttttagggaaataaagt

SEQ ID NO: 56636 - DNA, 22 bp, Artificial Sequence
  chemically synthesized
atttttagggaaataaagtgta

SEQ ID NO: 56637 - DNA, 22 bp, Artificial Sequence
  chemically synthesized
ttagggaaataaagtgtagctt

SEQ ID NO: 56638 - DNA, 22 bp, Artificial Sequence
  chemically synthesized
tagggaaataaagtgtagcttg

SEQ ID NO: 56639 - DNA, 22 bp, Artificial Sequence
  chemically synthesized
agggaaataaagtgtagcttgg

SEQ ID NO: 56640 - DNA, 22 bp, Artificial Sequence
  chemically synthesized
gggaaataaagtgtagcttgga

SEQ ID NO: 56641 - DNA, 22 bp, Artificial Sequence
  chemically synthesized
ggattcttatgttggagcacaa

SEQ ID NO: 56642 - DNA, 22 bp, Artificial Sequence
  chemically synthesized
gattcttatgttggagcacaaa

SEQ ID NO: 56643 - DNA, 22 bp, Artificial Sequence
  chemically synthesized
ttatgttggagcacaaagcact

SEQ ID NO: 56644 - DNA, 22 bp, Artificial Sequence
  chemically synthesized
atgttggagcacaaagcactat

SEQ ID NO: 56645 - DNA, 22 bp, Artificial Sequence
  chemically synthesized
tgttggagcacaaagcactatg

SEQ ID NO: 56646 - DNA, 22 bp, Artificial Sequence
  chemically synthesized
gagcacaaagcactatgtgcca

SEQ ID NO: 56647 - DNA, 22 bp, Artificial Sequence
  chemically synthesized
tgtgccaagtctgttcctgtac

SEQ ID NO: 56648 - DNA, 22 bp, Artificial Sequence
  chemically synthesized
ttcctgtacattttaaatatag

SEQ ID NO: 56649 - DNA, 22 bp, Artificial Sequence
  chemically synthesized
ctgtacattttaaatatagagt

SEQ ID NO: 56650 - DNA, 22 bp, Artificial Sequence
  chemically synthesized
tacattttaaatatagagtttt

SEQ ID NO: 56651 - DNA, 22 bp, Artificial Sequence
  chemically synthesized
taaatatagagttttaatattt

SEQ ID NO: 56652 - DNA, 22 bp, Artificial Sequence
  chemically synthesized
aaatatagagttttaatatttg

SEQ ID NO: 56653 - DNA, 22 bp, Artificial Sequence
  chemically synthesized
aatatagagttttaatatttgg

SEQ ID NO: 56654 - DNA, 22 bp, Artificial Sequence
  chemically synthesized
taatatttggccaatccctgca

SEQ ID NO: 56655 - DNA, 22 bp, Artificial Sequence
  chemically synthesized
aatatttggccaatccctgcac

SEQ ID NO: 56656 - DNA, 22 bp, Artificial Sequence
  chemically synthesized
atatttggccaatccctgcacc

SEQ ID NO: 56657 - DNA, 22 bp, Artificial Sequence
  chemically synthesized
ggccaatccctgcacctcctca

SEQ ID NO: 56658 - DNA, 22 bp, Artificial Sequence
  chemically synthesized
gccaatccctgcacctcctcaa

SEQ ID NO: 56659 - DNA, 22 bp, Artificial Sequence
  chemically synthesized
cacctcctcaaacaaaaacaaa

SEQ ID NO: 56660 - DNA, 22 bp, Artificial Sequence
  chemically synthesized
ctcaaacaaaaacaaacctcaa

SEQ ID NO: 56661 - DNA, 22 bp, Artificial Sequence
  chemically synthesized
aaacaaaaacaaacctcaaaaa

SEQ ID NO: 56662 - DNA, 22 bp, Artificial Sequence
  chemically synthesized
aaaaaactaagagaaccaaacc

SEQ ID NO: 56663 - DNA, 22 bp, Artificial Sequence
  chemically synthesized
agagaaccaaacctgaagtatt

SEQ ID NO: 56664 - DNA, 22 bp, Artificial Sequence
  chemically synthesized
aagtattctccttcaccaactc

SEQ ID NO: 56665 - DNA, 22 bp, Artificial Sequence
  chemically synthesized
tccttcaccaactcaaggtata

SEQ ID NO: 56666 - DNA, 22 bp, Artificial Sequence
  chemically synthesized
cttcaccaactcaaggtatacc

SEQ ID NO: 56667 - DNA, 22 bp, Artificial Sequence
  chemically synthesized
caccaactcaaggtataccatg

SEQ ID NO: 56668 - DNA, 22 bp, Artificial Sequence
  chemically synthesized
accaactcaaggtataccatga

SEQ ID NO: 56669 - DNA, 22 bp, Artificial Sequence
  chemically synthesized
aaggtataccatgattttatga

SEQ ID NO: 56670 - DNA, 22 bp, Artificial Sequence
  chemically synthesized
tatgatttatttacatttaggg

SEQ ID NO: 56671 - DNA, 22 bp, Artificial Sequence
  chemically synthesized
atgatttatttacatttagggg

SEQ ID NO: 56672 - DNA, 22 bp, Artificial Sequence
  chemically synthesized
tgatttatttacatttaggggg

SEQ ID NO: 56673 - DNA, 22 bp, Artificial Sequence
  chemically synthesized
atttacatttaggggggaaccc

SEQ ID NO: 56674 - DNA, 22 bp, Artificial Sequence
  chemically synthesized
tttacatttaggggggaacccc

SEQ ID NO: 56675 - DNA, 22 bp, Artificial Sequence
  chemically synthesized
acatttaggggggaacccctca

SEQ ID NO: 56676 - DNA, 22 bp, Artificial Sequence
  chemically synthesized
catttaggggggaacccctcag

SEQ ID NO: 56677 - DNA, 22 bp, Artificial Sequence
  chemically synthesized
aggggggaacccctcagtgaac

SEQ ID NO: 56678 - DNA, 22 bp, Artificial Sequence
  chemically synthesized
ggggggaacccctcagtgaacc

SEQ ID NO: 56679 - DNA, 22 bp, Artificial Sequence
  chemically synthesized
agtgaaccatttactccccatt

SEQ ID NO: 56680 - DNA, 22 bp, Artificial Sequence
  chemically synthesized
actccccattttaactcccctg

SEQ ID NO: 56681 - DNA, 22 bp, Artificial Sequence
  chemically synthesized
ctccccattttaactcccctgc

SEQ ID NO: 56682 - DNA, 22 bp, Artificial Sequence
  chemically synthesized
cccattttaactcccctgcccc

SEQ ID NO: 56683 - DNA, 22 bp, Artificial Sequence
  chemically synthesized
taactcccctgccccgatcctt

SEQ ID NO: 56684 - DNA, 22 bp, Artificial Sequence
  chemically synthesized
aactcccctgccccgatccttt

SEQ ID NO: 56685 - DNA, 22 bp, Artificial Sequence
  chemically synthesized
actcccctgccccgatcctttc

SEQ ID NO: 56686 - DNA, 22 bp, Artificial Sequence
  chemically synthesized
ccctgccccgatcctttcagtt

SEQ ID NO: 56687 - DNA, 22 bp, Artificial Sequence
  chemically synthesized
ccccgatcctttcagtttccag

SEQ ID NO: 56688 - DNA, 22 bp, Artificial Sequence
  chemically synthesized
tcagtttccagttaaaacaatg

SEQ ID NO: 56689 - DNA, 22 bp, Artificial Sequence
  chemically synthesized
cagtttccagttaaaacaatgc

SEQ ID NO: 56690 - DNA, 22 bp, Artificial Sequence
  chemically synthesized
agtttccagttaaaacaatgca

SEQ ID NO: 56691 - DNA, 22 bp, Artificial Sequence
  chemically synthesized
ccagttaaaacaatgcattaac

SEQ ID NO: 56692 - DNA, 22 bp, Artificial Sequence
  chemically synthesized
cagttaaaacaatgcattaacc

SEQ ID NO: 56693 - DNA, 22 bp, Artificial Sequence
  chemically synthesized
aaacaatgcattaaccaatgtt

SEQ ID NO: 56694 - DNA, 22 bp, Artificial Sequence
  chemically synthesized
accaatgttaaatcttaaatct

SEQ ID NO: 56695 - DNA, 22 bp, Artificial Sequence
  chemically synthesized
aatcttaaatctcgtgagtttc

SEQ ID NO: 56696 - DNA, 22 bp, Artificial Sequence
  chemically synthesized
aaatctcgtgagtttctctcca

SEQ ID NO: 56697 - DNA, 22 bp, Artificial Sequence
  chemically synthesized
aatctcgtgagtttctctccat

SEQ ID NO: 56698 - DNA, 22 bp, Artificial Sequence
  chemically synthesized
gtgagtttctctccatcacacc

SEQ ID NO: 56699 - DNA, 22 bp, Artificial Sequence
  chemically synthesized
ctctccatcacaccctaatatt

SEQ ID NO: 56700 - DNA, 22 bp, Artificial Sequence
  chemically synthesized
tctccatcacaccctaatattt

SEQ ID NO: 56701 - DNA, 22 bp, Artificial Sequence
  chemically synthesized
tccatcacaccctaatatttta

SEQ ID NO: 56702 - DNA, 22 bp, Artificial Sequence
  chemically synthesized
catcacaccctaatattttaaa

SEQ ID NO: 56703 - DNA, 22 bp, Artificial Sequence
  chemically synthesized
atattttaaaaaaattattcct

SEQ ID NO: 56704 - DNA, 22 bp, Artificial Sequence
  chemically synthesized
taaaaaaattattcctttacat

SEQ ID NO: 56705 - DNA, 22 bp, Artificial Sequence
  chemically synthesized
aaaaaaattattcctttacatt

SEQ ID NO: 56706 - DNA, 22 bp, Artificial Sequence
  chemically synthesized
aaaaaattattcctttacattt

SEQ ID NO: 56707 - DNA, 22 bp, Artificial Sequence
  chemically synthesized
ttcctttacatttaaaactgaa

SEQ ID NO: 56708 - DNA, 22 bp, Artificial Sequence
  chemically synthesized
ctttacatttaaaactgaacat

SEQ ID NO: 56709 - DNA, 22 bp, Artificial Sequence
  chemically synthesized
tacatttaaaactgaacattgg

SEQ ID NO: 56710 - DNA, 22 bp, Artificial Sequence
  chemically synthesized
acatttaaaactgaacattggc

SEQ ID NO: 56711 - DNA, 22 bp, Artificial Sequence
  chemically synthesized
catttaaaactgaacattggct

SEQ ID NO: 56712 - DNA, 22 bp, Artificial Sequence
  chemically synthesized
aaaactgaacattggctactga

SEQ ID NO: 56713 - DNA, 22 bp, Artificial Sequence
  chemically synthesized
aaactgaacattggctactgaa

SEQ ID NO: 56714 - DNA, 22 bp, Artificial Sequence
  chemically synthesized
aacattggctactgaagaatga

SEQ ID NO: 56715 - DNA, 22 bp, Artificial Sequence
  chemically synthesized
gctactgaagaatgatttaaag

SEQ ID NO: 56716 - DNA, 22 bp, Artificial Sequence
  chemically synthesized
ctgaagaatgatttaaaggctg

SEQ ID NO: 56717 - DNA, 22 bp, Artificial Sequence
  chemically synthesized
aagaatgatttaaaggctgaaa

SEQ ID NO: 56718 - DNA, 22 bp, Artificial Sequence
  chemically synthesized
aaaggctgaaaaaaattttaat

SEQ ID NO: 56719 - DNA, 22 bp, Artificial Sequence
  chemically synthesized
aaggctgaaaaaaattttaata

SEQ ID NO: 56720 - DNA, 22 bp, Artificial Sequence
  chemically synthesized
aaaaaaattttaataataaatc

SEQ ID NO: 56721 - DNA, 22 bp, Artificial Sequence
  chemically synthesized
taataataaatcgtaaccttct

SEQ ID NO: 56722 - DNA, 22 bp, Artificial Sequence
  chemically synthesized
aataataaatcgtaaccttctc

SEQ ID NO: 56723 - DNA, 22 bp, Artificial Sequence
  chemically synthesized
ataataaatcgtaaccttctca

SEQ ID NO: 56724 - DNA, 22 bp, Artificial Sequence
  chemically synthesized
ctcatgttatgtttttgttatg

SEQ ID NO: 56725 - DNA, 22 bp, Artificial Sequence
  chemically synthesized
tcatgttatgtttttgttatgt

SEQ ID NO: 56726 - DNA, 22 bp, Artificial Sequence
  chemically synthesized
atgttatgtttttgttatgtta

SEQ ID NO: 56727 - DNA, 22 bp, Artificial Sequence
  chemically synthesized
tgtttttgttatgttaaggaga

SEQ ID NO: 56728 - DNA, 22 bp, Artificial Sequence
  chemically synthesized
ttgttatgttaaggagaaaaaa

SEQ ID NO: 56729 - DNA, 22 bp, Artificial Sequence
  chemically synthesized
tgttatgttaaggagaaaaaaa

SEQ ID NO: 56730 - DNA, 22 bp, Artificial Sequence
  chemically synthesized
gttatgttaaggagaaaaaaat

SEQ ID NO: 56731 - DNA, 22 bp, Artificial Sequence
  chemically synthesized
ttatgttaaggagaaaaaaatc

SEQ ID NO: 56732 - DNA, 22 bp, Artificial Sequence
  chemically synthesized
tgttaaggagaaaaaaatcaat

SEQ ID NO: 56733 - DNA, 22 bp, Artificial Sequence
  chemically synthesized
aggagaaaaaaatcaataagga

SEQ ID NO: 56734 - DNA, 22 bp, Artificial Sequence
  chemically synthesized
aattctgataaagatactcttg

SEQ ID NO: 56735 - DNA, 22 bp, Artificial Sequence
  chemically synthesized
attctgataaagatactcttgg

SEQ ID NO: 56736 - DNA, 22 bp, Artificial Sequence
  chemically synthesized
tgataaagatactcttggatct

SEQ ID NO: 56737 - DNA, 22 bp, Artificial Sequence
  chemically synthesized
ataaagatactcttggatcttt

SEQ ID NO: 56738 - DNA, 22 bp, Artificial Sequence
  chemically synthesized
ttggatctttgaaaacaactgc

SEQ ID NO: 56739 - DNA, 22 bp, Artificial Sequence
  chemically synthesized
ggatctttgaaaacaactgctg

SEQ ID NO: 56740 - DNA, 22 bp, Artificial Sequence
  chemically synthesized
gatctttgaaaacaactgctgt

SEQ ID NO: 56741 - DNA, 22 bp, Artificial Sequence
  chemically synthesized
tgaaaacaactgctgtcctttt

SEQ ID NO: 56742 - DNA, 22 bp, Artificial Sequence
  chemically synthesized
gaaaacaactgctgtcctttta

SEQ ID NO: 56743 - DNA, 22 bp, Artificial Sequence
  chemically synthesized
aaaacaactgctgtccttttaa

SEQ ID NO: 56744 - DNA, 22 bp, Artificial Sequence
  chemically synthesized
ctgtccttttaactaaaacatt

SEQ ID NO: 56745 - DNA, 22 bp, Artificial Sequence
  chemically synthesized
tccttttaactaaaacatttga

SEQ ID NO: 56746 - DNA, 22 bp, Artificial Sequence
  chemically synthesized
ttaactaaaacatttgagcagc

SEQ ID NO: 56747 - DNA, 22 bp, Artificial Sequence
  chemically synthesized
taactaaaacatttgagcagct

SEQ ID NO: 56748 - DNA, 22 bp, Artificial Sequence
  chemically synthesized
aactaaaacatttgagcagctt

SEQ ID NO: 56749 - DNA, 22 bp, Artificial Sequence
  chemically synthesized
actaaaacatttgagcagcttc

SEQ ID NO: 56750 - DNA, 22 bp, Artificial Sequence
  chemically synthesized
aaacatttgagcagcttcaaag

SEQ ID NO: 56751 - DNA, 22 bp, Artificial Sequence
  chemically synthesized
gagcagcttcaaagactatgta

SEQ ID NO: 56752 - DNA, 22 bp, Artificial Sequence
  chemically synthesized
agcagcttcaaagactatgtat

SEQ ID NO: 56753 - DNA, 22 bp, Artificial Sequence
  chemically synthesized
caaagactatgtatttcttctg

SEQ ID NO: 56754 - DNA, 22 bp, Artificial Sequence
  chemically synthesized
aaagactatgtatttcttctga

SEQ ID NO: 56755 - DNA, 22 bp, Artificial Sequence
  chemically synthesized
tgtatttcttctgatcttggag

SEQ ID NO: 56756 - DNA, 22 bp, Artificial Sequence
  chemically synthesized
cttctgatcttggagctgtgtg

SEQ ID NO: 56757 - DNA, 22 bp, Artificial Sequence
  chemically synthesized
ttctgatcttggagctgtgtga

SEQ ID NO: 56758 - DNA, 22 bp, Artificial Sequence
  chemically synthesized
ctgatcttggagctgtgtgact

SEQ ID NO: 56759 - DNA, 22 bp, Artificial Sequence
  chemically synthesized
tgatcttggagctgtgtgactg

SEQ ID NO: 56760 - DNA, 22 bp, Artificial Sequence
  chemically synthesized
atcttggagctgtgtgactggt

SEQ ID NO: 56761 - DNA, 22 bp, Artificial Sequence
  chemically synthesized
ggagctgtgtgactggtagcaa

SEQ ID NO: 56762 - DNA, 22 bp, Artificial Sequence
  chemically synthesized
gagctgtgtgactggtagcaag

SEQ ID NO: 56763 - DNA, 22 bp, Artificial Sequence
  chemically synthesized
tgtgactggtagcaagaaagaa

SEQ ID NO: 56764 - DNA, 22 bp, Artificial Sequence
  chemically synthesized
gtagcaagaaagaaaaaaaatc

SEQ ID NO: 56765 - DNA, 22 bp, Artificial Sequence
  chemically synthesized
attctacatacaagtggattgc

SEQ ID NO: 56766 - DNA, 22 bp, Artificial Sequence
  chemically synthesized
ttctacatacaagtggattgct

SEQ ID NO: 56767 - DNA, 22 bp, Artificial Sequence
  chemically synthesized
tacatacaagtggattgcttaa

SEQ ID NO: 56768 - DNA, 22 bp, Artificial Sequence
  chemically synthesized
catacaagtggattgcttaaca

SEQ ID NO: 56769 - DNA, 22 bp, Artificial Sequence
  chemically synthesized
cttaacaagtcagcacagacac

SEQ ID NO: 56770 - DNA, 22 bp, Artificial Sequence
  chemically synthesized
aacaagtcagcacagacacgta

SEQ ID NO: 56771 - DNA, 22 bp, Artificial Sequence
  chemically synthesized
acaagtcagcacagacacgtac

SEQ ID NO: 56772 - DNA, 22 bp, Artificial Sequence
  chemically synthesized
gtttgtacaatagagataaaaa

SEQ ID NO: 56773 - DNA, 22 bp, Artificial Sequence
  chemically synthesized
tttgtacaatagagataaaaat

SEQ ID NO: 56774 - DNA, 22 bp, Artificial Sequence
  chemically synthesized
gtacaatagagataaaaattcc

SEQ ID NO: 56775 - DNA, 22 bp, Artificial Sequence
  chemically synthesized
tacaatagagataaaaattcct

SEQ ID NO: 56776 - DNA, 22 bp, Artificial Sequence
  chemically synthesized
ctgtataaaaataattcagctg

SEQ ID NO: 56777 - DNA, 22 bp, Artificial Sequence
  chemically synthesized
tataaaaataattcagctgctg

SEQ ID NO: 56778 - DNA, 22 bp, Artificial Sequence
  chemically synthesized
agctgctgacagcaggcattgt

SEQ ID NO: 56779 - DNA, 22 bp, Artificial Sequence
  chemically synthesized
ctgacagcaggcattgttgttg

SEQ ID NO: 56780 - DNA, 22 bp, Artificial Sequence
  chemically synthesized
acagcaggcattgttgttggac

SEQ ID NO: 56781 - DNA, 22 bp, Artificial Sequence
  chemically synthesized
ttgttggacctgtcttttgtgc

SEQ ID NO: 56782 - DNA, 22 bp, Artificial Sequence
  chemically synthesized
ttggacctgtcttttgtgcttg

SEQ ID NO: 56783 - DNA, 22 bp, Artificial Sequence
  chemically synthesized
gacctgtcttttgtgcttgtcc

SEQ ID NO: 56784 - DNA, 22 bp, Artificial Sequence
  chemically synthesized
tcttttgtgcttgtcccagctc

SEQ ID NO: 56785 - DNA, 22 bp, Artificial Sequence
  chemically synthesized
ttgtgcttgtcccagctctggg

SEQ ID NO: 56786 - DNA, 22 bp, Artificial Sequence
  chemically synthesized
tgtgcttgtcccagctctgggt

SEQ ID NO: 56787 - DNA, 22 bp, Artificial Sequence
  chemically synthesized
gtgcttgtcccagctctgggtc

SEQ ID NO: 56788 - DNA, 22 bp, Artificial Sequence
  chemically synthesized
tgcttgtcccagctctgggtcc

SEQ ID NO: 56789 - DNA, 22 bp, Artificial Sequence
  chemically synthesized
gtcccagctctgggtccccctc

SEQ ID NO: 56790 - DNA, 22 bp, Artificial Sequence
  chemically synthesized
tcccagctctgggtccccctcc

SEQ ID NO: 56791 - DNA, 22 bp, Artificial Sequence
  chemically synthesized
tgggtccccctcccctcctatc

SEQ ID NO: 56792 - DNA, 22 bp, Artificial Sequence
  chemically synthesized
ggtccccctcccctcctatctg

SEQ ID NO: 56793 - DNA, 22 bp, Artificial Sequence
  chemically synthesized
ccctcctatctgcttggggcag

SEQ ID NO: 56794 - DNA, 22 bp, Artificial Sequence
  chemically synthesized
ctatctgcttggggcagcctgc

SEQ ID NO: 56795 - DNA, 22 bp, Artificial Sequence
  chemically synthesized
tctgcttggggcagcctgctgc

SEQ ID NO: 56796 - DNA, 22 bp, Artificial Sequence
  chemically synthesized
cttggggcagcctgctgcctgc

SEQ ID NO: 56797 - DNA, 22 bp, Artificial Sequence
  chemically synthesized
ggggcagcctgctgcctgcaca

SEQ ID NO: 56798 - DNA, 22 bp, Artificial Sequence
  chemically synthesized
gggcagcctgctgcctgcacac

SEQ ID NO: 56799 - DNA, 22 bp, Artificial Sequence
  chemically synthesized
ctgcctgcacactgctgaccag

SEQ ID NO: 56800 - DNA, 22 bp, Artificial Sequence
  chemically synthesized
cctgcacactgctgaccagaag

SEQ ID NO: 56801 - DNA, 22 bp, Artificial Sequence
  chemically synthesized
cacactgctgaccagaagttaa

SEQ ID NO: 56802 - DNA, 22 bp, Artificial Sequence
  chemically synthesized
ctgaccagaagttaattgctat

SEQ ID NO: 56803 - DNA, 22 bp, Artificial Sequence
  chemically synthesized
accagaagttaattgctatata

SEQ ID NO: 56804 - DNA, 22 bp, Artificial Sequence
  chemically synthesized
attgctatatattaagtatata

SEQ ID NO: 56805 - DNA, 22 bp, Artificial Sequence
  chemically synthesized
ctatatattaagtatataggta

SEQ ID NO: 56806 - DNA, 22 bp, Artificial Sequence
  chemically synthesized
tatattaagtatataggtattg

SEQ ID NO: 56807 - DNA, 22 bp, Artificial Sequence
  chemically synthesized
agtatataggtattgtatttaa

SEQ ID NO: 56808 - DNA, 22 bp, Artificial Sequence
  chemically synthesized
tatttaaagaggaatatctcaa

SEQ ID NO: 56809 - DNA, 22 bp, Artificial Sequence
  chemically synthesized
aaagaggaatatctcaaggctt

SEQ ID NO: 56810 - DNA, 22 bp, Artificial Sequence
  chemically synthesized
aagaggaatatctcaaggcttc

SEQ ID NO: 56811 - DNA, 22 bp, Artificial Sequence
  chemically synthesized
aaggcttcctatatgcattcca

SEQ ID NO: 56812 - DNA, 22 bp, Artificial Sequence
  chemically synthesized
cctatatgcattccactttact

SEQ ID NO: 56813 - DNA, 22 bp, Artificial Sequence
  chemically synthesized
ctatatgcattccactttactt

SEQ ID NO: 56814 - DNA, 22 bp, Artificial Sequence
  chemically synthesized
tatgcattccactttactttct

SEQ ID NO: 56815 - DNA, 22 bp, Artificial Sequence
  chemically synthesized
cactttactttctgatgtgatt

SEQ ID NO: 56816 - DNA, 22 bp, Artificial Sequence
  chemically synthesized
tactttctgatgtgattgcggt

SEQ ID NO: 56817 - DNA, 22 bp, Artificial Sequence
  chemically synthesized
actttctgatgtgattgcggtg

SEQ ID NO: 56818 - DNA, 22 bp, Artificial Sequence
  chemically synthesized
ctttctgatgtgattgcggtgt

SEQ ID NO: 56819 - DNA, 22 bp, Artificial Sequence
  chemically synthesized
tctgatgtgattgcggtgttgc

SEQ ID NO: 56820 - DNA, 22 bp, Artificial Sequence
  chemically synthesized
ctgatgtgattgcggtgttgcc

SEQ ID NO: 56821 - DNA, 22 bp, Artificial Sequence
  chemically synthesized
tgatgtgattgcggtgttgcca

SEQ ID NO: 56822 - DNA, 22 bp, Artificial Sequence
  chemically synthesized
atgtgattgcggtgttgccagc

SEQ ID NO: 56823 - DNA, 22 bp, Artificial Sequence
  chemically synthesized
cggtgttgccagcaggggggtg

SEQ ID NO: 56824 - DNA, 22 bp, Artificial Sequence
  chemically synthesized
ccagcaggggggtggcaggcaa

SEQ ID NO: 56825 - DNA, 22 bp, Artificial Sequence
  chemically synthesized
taatagggaaaatcacttgaag

SEQ ID NO: 56826 - DNA, 22 bp, Artificial Sequence
  chemically synthesized
atagggaaaatcacttgaaggc

SEQ ID NO: 56827 - DNA, 22 bp, Artificial Sequence
  chemically synthesized
gaaggcagttaggggaaatttg

SEQ ID NO: 56828 - DNA, 22 bp, Artificial Sequence
  chemically synthesized
aaggcagttaggggaaatttgg

SEQ ID NO: 56829 - DNA, 22 bp, Artificial Sequence
  chemically synthesized
ggggaaatttggccttcaagtc

SEQ ID NO: 56830 - DNA, 22 bp, Artificial Sequence
  chemically synthesized
ggccttcaagtcccatttgctc

SEQ ID NO: 56831 - DNA, 22 bp, Artificial Sequence
  chemically synthesized
gccttcaagtcccatttgctct

SEQ ID NO: 56832 - DNA, 22 bp, Artificial Sequence
  chemically synthesized
caagtcccatttgctctgtagt

SEQ ID NO: 56833 - DNA, 22 bp, Artificial Sequence
  chemically synthesized
aagtcccatttgctctgtagtg

SEQ ID NO: 56834 - DNA, 22 bp, Artificial Sequence
  chemically synthesized
gctctgtagtgtagcattggtt

SEQ ID NO: 56835 - DNA, 22 bp, Artificial Sequence
  chemically synthesized
ctctgtagtgtagcattggttt

SEQ ID NO: 56836 - DNA, 22 bp, Artificial Sequence
  chemically synthesized
tgtagtgtagcattggtttcta

SEQ ID NO: 56837 - DNA, 22 bp, Artificial Sequence
  chemically synthesized
tagtgtagcattggtttctaaa

SEQ ID NO: 56838 - DNA, 22 bp, Artificial Sequence
  chemically synthesized
gtttctaaacttttgtttttaa

SEQ ID NO: 56839 - DNA, 22 bp, Artificial Sequence
  chemically synthesized
ctaaacttttgtttttaatcta

SEQ ID NO: 56840 - DNA, 22 bp, Artificial Sequence
  chemically synthesized
taaacttttgtttttaatctaa

SEQ ID NO: 56841 - DNA, 22 bp, Artificial Sequence
  chemically synthesized
aacttttgtttttaatctaatt

SEQ ID NO: 56842 - DNA, 22 bp, Artificial Sequence
  chemically synthesized
ttgtttttaatctaattctgat

SEQ ID NO: 56843 - DNA, 22 bp, Artificial Sequence
  chemically synthesized
tgtttttaatctaattctgatt

SEQ ID NO: 56844 - DNA, 22 bp, Artificial Sequence
  chemically synthesized
gtttttaatctaattctgattt

SEQ ID NO: 56845 - DNA, 22 bp, Artificial Sequence
  chemically synthesized
tttttaatctaattctgatttg

SEQ ID NO: 56846 - DNA, 22 bp, Artificial Sequence
  chemically synthesized
ttaatctaattctgatttgccc

SEQ ID NO: 56847 - DNA, 22 bp, Artificial Sequence
  chemically synthesized
taatctaattctgatttgccct

SEQ ID NO: 56848 - DNA, 22 bp, Artificial Sequence
  chemically synthesized
aatctaattctgatttgccctg

SEQ ID NO: 56849 - DNA, 22 bp, Artificial Sequence
  chemically synthesized
atctaattctgatttgccctgt

SEQ ID NO: 56850 - DNA, 22 bp, Artificial Sequence
  chemically synthesized
attctgatttgccctgtcacat

SEQ ID NO: 56851 - DNA, 22 bp, Artificial Sequence
  chemically synthesized
tgatttgccctgtcacatccca

SEQ ID NO: 56852 - DNA, 22 bp, Artificial Sequence
  chemically synthesized
atttgccctgtcacatcccata

SEQ ID NO: 56853 - DNA, 22 bp, Artificial Sequence
  chemically synthesized
gccctgtcacatcccatatcaa

SEQ ID NO: 56854 - DNA, 22 bp, Artificial Sequence
  chemically synthesized
ccctgtcacatcccatatcaac

SEQ ID NO: 56855 - DNA, 22 bp, Artificial Sequence
  chemically synthesized
tcacatcccatatcaaccctca

SEQ ID NO: 56856 - DNA, 22 bp, Artificial Sequence
  chemically synthesized
attgaactctactcatgtagag

SEQ ID NO: 56857 - DNA, 22 bp, Artificial Sequence
  chemically synthesized
aactctactcatgtagagtaac

SEQ ID NO: 56858 - DNA, 22 bp, Artificial Sequence
  chemically synthesized
tactcatgtagagtaacattag

SEQ ID NO: 56859 - DNA, 22 bp, Artificial Sequence
  chemically synthesized
ctcatgtagagtaacattagtg

SEQ ID NO: 56860 - DNA, 22 bp, Artificial Sequence
  chemically synthesized
atgtagagtaacattagtgtca

SEQ ID NO: 56861 - DNA, 22 bp, Artificial Sequence
  chemically synthesized
gtgtcaaacggaattggtcagg

SEQ ID NO: 56862 - DNA, 22 bp, Artificial Sequence
  chemically synthesized
gtcaggactgtggacctgtggc

SEQ ID NO: 56863 - DNA, 22 bp, Artificial Sequence
  chemically synthesized
tggacctgtggctcatacagat

SEQ ID NO: 56864 - DNA, 22 bp, Artificial Sequence
  chemically synthesized
tggctcatacagatggttgtgg

SEQ ID NO: 56865 - DNA, 22 bp, Artificial Sequence
  chemically synthesized
atacagatggttgtggatgtgg

SEQ ID NO: 56866 - DNA, 22 bp, Artificial Sequence
  chemically synthesized
tggatgtgggttccatgcagct

SEQ ID NO: 56867 - DNA, 22 bp, Artificial Sequence
  chemically synthesized
catgcagctctgcatcctatcc

SEQ ID NO: 56868 - DNA, 22 bp, Artificial Sequence
  chemically synthesized
tgcatcctatcctttctaataa

SEQ ID NO: 56869 - DNA, 22 bp, Artificial Sequence
  chemically synthesized
catcctatcctttctaataaat

SEQ ID NO: 56870 - DNA, 22 bp, Artificial Sequence
  chemically synthesized
tcctttctaataaatgttaaaa

SEQ ID NO: 56871 - DNA, 22 bp, Artificial Sequence
  chemically synthesized
tctaataaatgttaaaatgtgg

SEQ ID NO: 56872 - DNA, 22 bp, Artificial Sequence
  chemically synthesized
ctaataaatgttaaaatgtggc

SEQ ID NO: 56873 - DNA, 22 bp, Artificial Sequence
  chemically synthesized
taataaatgttaaaatgtggca

SEQ ID NO: 56874 - DNA, 22 bp, Artificial Sequence
  chemically synthesized
ataaatgttaaaatgtggcaca

SEQ ID NO: 56875 - DNA, 22 bp, Artificial Sequence
  chemically synthesized
aaatgtggcacatttctgagca

SEQ ID NO: 56876 - DNA, 22 bp, Artificial Sequence
  chemically synthesized
ctgagcagggcccaaggataag

SEQ ID NO: 56877 - DNA, 22 bp, Artificial Sequence
  chemically synthesized
tgagcagggcccaaggataaga

SEQ ID NO: 56878 - DNA, 22 bp, Artificial Sequence
  chemically synthesized
agcagggcccaaggataagaga

SEQ ID NO: 56879 - DNA, 22 bp, Artificial Sequence
  chemically synthesized
agaaatcagggggtagtacctg

SEQ ID NO: 56880 - DNA, 22 bp, Artificial Sequence
  chemically synthesized
agatttttctcccttctctttc

SEQ ID NO: 56881 - DNA, 22 bp, Artificial Sequence
  chemically synthesized
ttctcccttctctttccgattt

SEQ ID NO: 56882 - DNA, 22 bp, Artificial Sequence
  chemically synthesized
tctcccttctctttccgatttc

SEQ ID NO: 56883 - DNA, 22 bp, Artificial Sequence
  chemically synthesized
ctcccttctctttccgatttcc

SEQ ID NO: 56884 - DNA, 22 bp, Artificial Sequence
  chemically synthesized
tcccttctctttccgatttcct

SEQ ID NO: 56885 - DNA, 22 bp, Artificial Sequence
  chemically synthesized
ccttctctttccgatttccttg

SEQ ID NO: 56886 - DNA, 22 bp, Artificial Sequence
  chemically synthesized
ctctttccgatttccttgataa

SEQ ID NO: 56887 - DNA, 22 bp, Artificial Sequence
  chemically synthesized
tctttccgatttccttgataac

SEQ ID NO: 56888 - DNA, 22 bp, Artificial Sequence
  chemically synthesized
tttccgatttccttgataacat

SEQ ID NO: 56889 - DNA, 22 bp, Artificial Sequence
  chemically synthesized
tccgatttccttgataacatcc

SEQ ID NO: 56890 - DNA, 22 bp, Artificial Sequence
  chemically synthesized
ccgatttccttgataacatcca

SEQ ID NO: 56891 - DNA, 22 bp, Artificial Sequence
  chemically synthesized
cgatttccttgataacatccac

SEQ ID NO: 56892 - DNA, 22 bp, Artificial Sequence
  chemically synthesized
ccttgataacatccacatttcc

SEQ ID NO: 56893 - DNA, 22 bp, Artificial Sequence
  chemically synthesized
cttgataacatccacatttccg

SEQ ID NO: 56894 - DNA, 22 bp, Artificial Sequence
  chemically synthesized
gataacatccacatttccggta

SEQ ID NO: 56895 - DNA, 22 bp, Artificial Sequence
  chemically synthesized
ataacatccacatttccggtaa

SEQ ID NO: 56896 - DNA, 22 bp, Artificial Sequence
  chemically synthesized
ccggtaagatcaactctaggag

SEQ ID NO: 56897 - DNA, 22 bp, Artificial Sequence
  chemically synthesized
cggtaagatcaactctaggaga

SEQ ID NO: 56898 - DNA, 22 bp, Artificial Sequence
  chemically synthesized
taggagaaagtctgaggctggg

SEQ ID NO: 56899 - DNA, 22 bp, Artificial Sequence
  chemically synthesized
ggagaaagtctgaggctggggg

SEQ ID NO: 56900 - DNA, 22 bp, Artificial Sequence
  chemically synthesized
aggctgggggagagagggggag

SEQ ID NO: 56901 - DNA, 22 bp, Artificial Sequence
  chemically synthesized
ggggagagagggggagaagggt

SEQ ID NO: 56902 - DNA, 22 bp, Artificial Sequence
  chemically synthesized
ttggaatattcttcgatagcag

SEQ ID NO: 56903 - DNA, 22 bp, Artificial Sequence
  chemically synthesized
ggaatattcttcgatagcagtt

SEQ ID NO: 56904 - DNA, 22 bp, Artificial Sequence
  chemically synthesized
gaatattcttcgatagcagttc

SEQ ID NO: 56905 - DNA, 22 bp, Artificial Sequence
  chemically synthesized
ttcgatagcagttcaaatgaaa

SEQ ID NO: 56906 - DNA, 22 bp, Artificial Sequence
  chemically synthesized
cgatagcagttcaaatgaaatc

SEQ ID NO: 56907 - DNA, 22 bp, Artificial Sequence
  chemically synthesized
gatagcagttcaaatgaaatcc

SEQ ID NO: 56908 - DNA, 22 bp, Artificial Sequence
  chemically synthesized
aaatgaaatccccacagcagag

SEQ ID NO: 56909 - DNA, 22 bp, Artificial Sequence
  chemically synthesized
ttgggtctagcagtggagcggt

SEQ ID NO: 56910 - DNA, 22 bp, Artificial Sequence
  chemically synthesized
tgggtctagcagtggagcggta

SEQ ID NO: 56911 - DNA, 22 bp, Artificial Sequence
  chemically synthesized
gggtctagcagtggagcggtaa

SEQ ID NO: 56912 - DNA, 22 bp, Artificial Sequence
  chemically synthesized
ggtctagcagtggagcggtaag

SEQ ID NO: 56913 - DNA, 22 bp, Artificial Sequence
  chemically synthesized
gcagtggagcggtaagctggga

SEQ ID NO: 56914 - DNA, 22 bp, Artificial Sequence
  chemically synthesized
ggacacgtggcctttcgaagct

SEQ ID NO: 56915 - DNA, 22 bp, Artificial Sequence
  chemically synthesized
tcgaagctgttattctcagtct

SEQ ID NO: 56916 - DNA, 22 bp, Artificial Sequence
  chemically synthesized
cgaagctgttattctcagtctg

SEQ ID NO: 56917 - DNA, 22 bp, Artificial Sequence
  chemically synthesized
gaagctgttattctcagtctga

SEQ ID NO: 56918 - DNA, 22 bp, Artificial Sequence
  chemically synthesized
ttattctcagtctgacttgcac

SEQ ID NO: 56919 - DNA, 22 bp, Artificial Sequence
  chemically synthesized
ttctcagtctgacttgcacacc

SEQ ID NO: 56920 - DNA, 22 bp, Artificial Sequence
  chemically synthesized
tcagtctgacttgcacaccagc

SEQ ID NO: 56921 - DNA, 22 bp, Artificial Sequence
  chemically synthesized
agtctgacttgcacaccagctg

SEQ ID NO: 56922 - DNA, 22 bp, Artificial Sequence
  chemically synthesized
acttgcacaccagctgagatag

SEQ ID NO: 56923 - DNA, 22 bp, Artificial Sequence
  chemically synthesized
gcacaccagctgagataggact

SEQ ID NO: 56924 - DNA, 22 bp, Artificial Sequence
  chemically synthesized
cacaccagctgagataggactt

SEQ ID NO: 56925 - DNA, 22 bp, Artificial Sequence
  chemically synthesized
agataggacttaacatatactt

SEQ ID NO: 56926 - DNA, 22 bp, Artificial Sequence
  chemically synthesized
aacatatactttcttgctttca

SEQ ID NO: 56927 - DNA, 22 bp, Artificial Sequence
  chemically synthesized
acatatactttcttgctttcac

SEQ ID NO: 56928 - DNA, 22 bp, Artificial Sequence
  chemically synthesized
tcttgctttcacctgggttgga

SEQ ID NO: 56929 - DNA, 22 bp, Artificial Sequence
  chemically synthesized
cttgctttcacctgggttggag

SEQ ID NO: 56930 - DNA, 22 bp, Artificial Sequence
  chemically synthesized
ttgctttcacctgggttggaga

SEQ ID NO: 56931 - DNA, 22 bp, Artificial Sequence
  chemically synthesized
gctttcacctgggttggagagg

SEQ ID NO: 56932 - DNA, 22 bp, Artificial Sequence
  chemically synthesized
ctttcacctgggttggagaggt

SEQ ID NO: 56933 - DNA, 22 bp, Artificial Sequence
  chemically synthesized
tcacctgggttggagaggttgg

SEQ ID NO: 56934 - DNA, 22 bp, Artificial Sequence
  chemically synthesized
cacctgggttggagaggttggg

SEQ ID NO: 56935 - DNA, 22 bp, Artificial Sequence
  chemically synthesized
acctgggttggagaggttgggg

SEQ ID NO: 56936 - DNA, 22 bp, Artificial Sequence
  chemically synthesized
ggttggagaggttggggttggg

SEQ ID NO: 56937 - DNA, 22 bp, Artificial Sequence
  chemically synthesized
gagaggttggggttgggaggaa

SEQ ID NO: 56938 - DNA, 22 bp, Artificial Sequence
  chemically synthesized
gggttgggaggaagaggaggag

SEQ ID NO: 56939 - DNA, 22 bp, Artificial Sequence
  chemically synthesized
ggaggaagaggaggagttcatt

SEQ ID NO: 56940 - DNA, 22 bp, Artificial Sequence
  chemically synthesized
attgggaattctgtcactagaa

SEQ ID NO: 56941 - DNA, 22 bp, Artificial Sequence
  chemically synthesized
ggaattctgtcactagaatttt

SEQ ID NO: 56942 - DNA, 22 bp, Artificial Sequence
  chemically synthesized
tgtcactagaattttttaaatg

SEQ ID NO: 56943 - DNA, 22 bp, Artificial Sequence
  chemically synthesized
tcactagaattttttaaatgtc

SEQ ID NO: 56944 - DNA, 22 bp, Artificial Sequence
  chemically synthesized
gaattttttaaatgtcaggagg

SEQ ID NO: 56945 - DNA, 22 bp, Artificial Sequence
  chemically synthesized
tttaaatgtcaggaggttagca

SEQ ID NO: 56946 - DNA, 22 bp, Artificial Sequence
  chemically synthesized
ttaaatgtcaggaggttagcaa

SEQ ID NO: 56947 - DNA, 22 bp, Artificial Sequence
  chemically synthesized
taaatgtcaggaggttagcaag

SEQ ID NO: 56948 - DNA, 22 bp, Artificial Sequence
  chemically synthesized
aaatgtcaggaggttagcaagg

SEQ ID NO: 56949 - DNA, 22 bp, Artificial Sequence
  chemically synthesized
aatgtcaggaggttagcaaggt

SEQ ID NO: 56950 - DNA, 22 bp, Artificial Sequence
  chemically synthesized
gcaaggtgtgagttagcattca

SEQ ID NO: 56951 - DNA, 22 bp, Artificial Sequence
  chemically synthesized
gcattcaagcaaaggattcttc

SEQ ID NO: 56952 - DNA, 22 bp, Artificial Sequence
  chemically synthesized
aagcaaaggattcttctccaga

SEQ ID NO: 56953 - DNA, 22 bp, Artificial Sequence
  chemically synthesized
ttctccagactagtaattggaa

SEQ ID NO: 56954 - DNA, 22 bp, Artificial Sequence
  chemically synthesized
ctccagactagtaattggaaag

SEQ ID NO: 56955 - DNA, 22 bp, Artificial Sequence
  chemically synthesized
tccagactagtaattggaaagc

SEQ ID NO: 56956 - DNA, 22 bp, Artificial Sequence
  chemically synthesized
cagactagtaattggaaagcct

SEQ ID NO: 56957 - DNA, 22 bp, Artificial Sequence
  chemically synthesized
gtaattggaaagcctgcaaatc

SEQ ID NO: 56958 - DNA, 22 bp, Artificial Sequence
  chemically synthesized
gaaagcctgcaaatccaggttc

SEQ ID NO: 56959 - DNA, 22 bp, Artificial Sequence
  chemically synthesized
caaatccaggttcccacgatac

SEQ ID NO: 56960 - DNA, 22 bp, Artificial Sequence
  chemically synthesized
ccacgatactctctaataactg

SEQ ID NO: 56961 - DNA, 22 bp, Artificial Sequence
  chemically synthesized
tctaataactggggtgggatgg

SEQ ID NO: 56962 - DNA, 22 bp, Artificial Sequence
  chemically synthesized
taataactggggtgggatggtg

SEQ ID NO: 56963 - DNA, 22 bp, Artificial Sequence
  chemically synthesized
ataactggggtgggatggtggt

SEQ ID NO: 56964 - DNA, 22 bp, Artificial Sequence
  chemically synthesized
gggtgggatggtggtggtgggt

SEQ ID NO: 56965 - DNA, 22 bp, Artificial Sequence
  chemically synthesized
tctgaatgtcagctgatgtctg

SEQ ID NO: 56966 - DNA, 22 bp, Artificial Sequence
  chemically synthesized
ctgaatgtcagctgatgtctgc

SEQ ID NO: 56967 - DNA, 22 bp, Artificial Sequence
  chemically synthesized
tgaatgtcagctgatgtctgca

SEQ ID NO: 56968 - DNA, 22 bp, Artificial Sequence
  chemically synthesized
aatgtcagctgatgtctgcatg

SEQ ID NO: 56969 - DNA, 22 bp, Artificial Sequence
  chemically synthesized
atgtctgcatgacccgttcacc

SEQ ID NO: 56970 - DNA, 22 bp, Artificial Sequence
  chemically synthesized
catgacccgttcaccatggatt

SEQ ID NO: 56971 - DNA, 22 bp, Artificial Sequence
  chemically synthesized
accatggattaaatgcggctgg

SEQ ID NO: 56972 - DNA, 22 bp, Artificial Sequence
  chemically synthesized
aatgcggctggtgccgaatgga

SEQ ID NO: 56973 - DNA, 22 bp, Artificial Sequence
  chemically synthesized
gtgccgaatggaggaaatcaga

SEQ ID NO: 56974 - DNA, 22 bp, Artificial Sequence
  chemically synthesized
aagcaacaggatttgcactcct

SEQ ID NO: 56975 - DNA, 22 bp, Artificial Sequence
  chemically synthesized
gcactcctcagaagtaaaccag

SEQ ID NO: 56976 - DNA, 22 bp, Artificial Sequence
  chemically synthesized
cactcctcagaagtaaaccaga

SEQ ID NO: 56977 - DNA, 22 bp, Artificial Sequence
  chemically synthesized
ctcagaagtaaaccagaccttg

SEQ ID NO: 56978 - DNA, 22 bp, Artificial Sequence
  chemically synthesized
agaagtaaaccagaccttgctc

SEQ ID NO: 56979 - DNA, 22 bp, Artificial Sequence
  chemically synthesized
gctcctctccctcctgtgcttc

SEQ ID NO: 56980 - DNA, 22 bp, Artificial Sequence
  chemically synthesized
ctcctctccctcctgtgcttct

SEQ ID NO: 56981 - DNA, 22 bp, Artificial Sequence
  chemically synthesized
ctctccctcctgtgcttctcct

SEQ ID NO: 56982 - DNA, 22 bp, Artificial Sequence
  chemically synthesized
tccctcctgtgcttctcctttc

SEQ ID NO: 56983 - DNA, 22 bp, Artificial Sequence
  chemically synthesized
cctcctgtgcttctcctttctt

SEQ ID NO: 56984 - DNA, 22 bp, Artificial Sequence
  chemically synthesized
ctgtgcttctcctttcttgctg

SEQ ID NO: 56985 - DNA, 22 bp, Artificial Sequence
  chemically synthesized
tgcttctcctttcttgctggtt

SEQ ID NO: 56986 - DNA, 22 bp, Artificial Sequence
  chemically synthesized
ctcctttcttgctggtttccct

SEQ ID NO: 56987 - DNA, 22 bp, Artificial Sequence
  chemically synthesized
tcctttcttgctggtttccctt

SEQ ID NO: 56988 - DNA, 22 bp, Artificial Sequence
  chemically synthesized
ctttcttgctggtttccctttg

SEQ ID NO: 56989 - DNA, 22 bp, Artificial Sequence
  chemically synthesized
tcttgctggtttccctttggaa

SEQ ID NO: 56990 - DNA, 22 bp, Artificial Sequence
  chemically synthesized
cttgctggtttccctttggaag

SEQ ID NO: 56991 - DNA, 22 bp, Artificial Sequence
  chemically synthesized
ttgctggtttccctttggaagc

SEQ ID NO: 56992 - DNA, 22 bp, Artificial Sequence
  chemically synthesized
gctggtttccctttggaagcag

SEQ ID NO: 56993 - DNA, 22 bp, Artificial Sequence
  chemically synthesized
ctggtttccctttggaagcaga

SEQ ID NO: 56994 - DNA, 22 bp, Artificial Sequence
  chemically synthesized
gtttccctttggaagcagaaac

SEQ ID NO: 56995 - DNA, 22 bp, Artificial Sequence
  chemically synthesized
ccctttggaagcagaaacttct

SEQ ID NO: 56996 - DNA, 22 bp, Artificial Sequence
  chemically synthesized
cctttggaagcagaaacttcta

SEQ ID NO: 56997 - DNA, 22 bp, Artificial Sequence
  chemically synthesized
tggaagcagaaacttctaaaat

SEQ ID NO: 56998 - DNA, 22 bp, Artificial Sequence
  chemically synthesized
ggaagcagaaacttctaaaatt

SEQ ID NO: 56999 - DNA, 22 bp, Artificial Sequence
  chemically synthesized
gaagcagaaacttctaaaatta

SEQ ID NO: 57000 - DNA, 22 bp, Artificial Sequence
  chemically synthesized
ctaaaattaatgccactccaag

SEQ ID NO: 57001 - DNA, 22 bp, Artificial Sequence
  chemically synthesized
taaaattaatgccactccaagc

SEQ ID NO: 57002 - DNA, 22 bp, Artificial Sequence
  chemically synthesized
aaattaatgccactccaagcca

SEQ ID NO: 57003 - DNA, 22 bp, Artificial Sequence
  chemically synthesized
atgccactccaagccaatgaaa

SEQ ID NO: 57004 - DNA, 22 bp, Artificial Sequence
  chemically synthesized
caagccaatgaaaaagctgttt

SEQ ID NO: 57005 - DNA, 22 bp, Artificial Sequence
  chemically synthesized
tttttataccacagtggatgtt

SEQ ID NO: 57006 - DNA, 22 bp, Artificial Sequence
  chemically synthesized
ttataccacagtggatgtttac

SEQ ID NO: 57007 - DNA, 22 bp, Artificial Sequence
  chemically synthesized
tataccacagtggatgtttaca

SEQ ID NO: 57008 - DNA, 22 bp, Artificial Sequence
  chemically synthesized
ataccacagtggatgtttacac

SEQ ID NO: 57009 - DNA, 22 bp, Artificial Sequence
  chemically synthesized
taccacagtggatgtttacaca

SEQ ID NO: 57010 - DNA, 22 bp, Artificial Sequence
  chemically synthesized
acacaggagagacaacttgagg

SEQ ID NO: 57011 - DNA, 22 bp, Artificial Sequence
  chemically synthesized
cacaggagagacaacttgaggg

SEQ ID NO: 57012 - DNA, 22 bp, Artificial Sequence
  chemically synthesized
gagggggaaaaggctttttgga

SEQ ID NO: 57013 - DNA, 22 bp, Artificial Sequence
  chemically synthesized
agggggaaaaggctttttggaa

SEQ ID NO: 57014 - DNA, 22 bp, Artificial Sequence
  chemically synthesized
tttggaagggtggagggactcg

SEQ ID NO: 57015 - DNA, 22 bp, Artificial Sequence
  chemically synthesized
ttggaagggtggagggactcgt

SEQ ID NO: 57016 - DNA, 22 bp, Artificial Sequence
  chemically synthesized
tggaagggtggagggactcgtg

SEQ ID NO: 57017 - DNA, 22 bp, Artificial Sequence
  chemically synthesized
ggaagggtggagggactcgtgt

SEQ ID NO: 57018 - DNA, 22 bp, Artificial Sequence
  chemically synthesized
gaagggtggagggactcgtgtt

SEQ ID NO: 57019 - DNA, 22 bp, Artificial Sequence
  chemically synthesized
gtgttaatctgttctgttggag

SEQ ID NO: 57020 - DNA, 22 bp, Artificial Sequence
  chemically synthesized
atctgttctgttggaggactat

SEQ ID NO: 57021 - DNA, 22 bp, Artificial Sequence
  chemically synthesized
ttctgttggaggactatgcagt

SEQ ID NO: 57022 - DNA, 22 bp, Artificial Sequence
  chemically synthesized
tgttggaggactatgcagtatt

SEQ ID NO: 57023 - DNA, 22 bp, Artificial Sequence
  chemically synthesized
ttggaggactatgcagtattgc

SEQ ID NO: 57024 - DNA, 22 bp, Artificial Sequence
  chemically synthesized
gaggactatgcagtattgccta

SEQ ID NO: 57025 - DNA, 22 bp, Artificial Sequence
  chemically synthesized
tgcagtattgcctatgagcgac

SEQ ID NO: 57026 - DNA, 22 bp, Artificial Sequence
  chemically synthesized
cctatgagcgactctgggctgt

SEQ ID NO: 57027 - DNA, 22 bp, Artificial Sequence
  chemically synthesized
tgagcgactctgggctgttttt

SEQ ID NO: 57028 - DNA, 22 bp, Artificial Sequence
  chemically synthesized
tgggctgtttttgataaattac

SEQ ID NO: 57029 - DNA, 22 bp, Artificial Sequence
  chemically synthesized
ggctgtttttgataaattacca

SEQ ID NO: 57030 - DNA, 22 bp, Artificial Sequence
  chemically synthesized
tttttgataaattaccatgttt

SEQ ID NO: 57031 - DNA, 22 bp, Artificial Sequence
  chemically synthesized
ttgataaattaccatgtttaga

SEQ ID NO: 57032 - DNA, 22 bp, Artificial Sequence
  chemically synthesized
tgataaattaccatgtttagag

SEQ ID NO: 57033 - DNA, 22 bp, Artificial Sequence
  chemically synthesized
gataaattaccatgtttagaga

SEQ ID NO: 57034 - DNA, 22 bp, Artificial Sequence
  chemically synthesized
ataaattaccatgtttagagat

SEQ ID NO: 57035 - DNA, 22 bp, Artificial Sequence
  chemically synthesized
ccatgtttagagataggtttgg

SEQ ID NO: 57036 - DNA, 22 bp, Artificial Sequence
  chemically synthesized
agagataggtttggctcttaag

SEQ ID NO: 57037 - DNA, 22 bp, Artificial Sequence
  chemically synthesized
gagataggtttggctcttaagg

SEQ ID NO: 57038 - DNA, 22 bp, Artificial Sequence
  chemically synthesized
ggctcttaagggcttagtttta

SEQ ID NO: 57039 - DNA, 22 bp, Artificial Sequence
  chemically synthesized
gctcttaagggcttagttttat

SEQ ID NO: 57040 - DNA, 22 bp, Artificial Sequence
  chemically synthesized
ttaagggcttagttttatgaac

SEQ ID NO: 57041 - DNA, 22 bp, Artificial Sequence
  chemically synthesized
aagggcttagttttatgaacaa

SEQ ID NO: 57042 - DNA, 22 bp, Artificial Sequence
  chemically synthesized
agggcttagttttatgaacaaa

SEQ ID NO: 57043 - DNA, 22 bp, Artificial Sequence
  chemically synthesized
agttttatgaacaaagtccgtg

SEQ ID NO: 57044 - DNA, 22 bp, Artificial Sequence
  chemically synthesized
gttttatgaacaaagtccgtga

SEQ ID NO: 57045 - DNA, 22 bp, Artificial Sequence
  chemically synthesized
tatgaacaaagtccgtgacgat

SEQ ID NO: 57046 - DNA, 22 bp, Artificial Sequence
  chemically synthesized
atgaacaaagtccgtgacgatg

SEQ ID NO: 57047 - DNA, 22 bp, Artificial Sequence
  chemically synthesized
tgaacaaagtccgtgacgatgt

SEQ ID NO: 57048 - DNA, 22 bp, Artificial Sequence
  chemically synthesized
gcagcctctgtttgtatcttag

SEQ ID NO: 57049 - DNA, 22 bp, Artificial Sequence
  chemically synthesized
cagcctctgtttgtatcttagc

SEQ ID NO: 57050 - DNA, 22 bp, Artificial Sequence
  chemically synthesized
tgtttgtatcttagcccctttg

SEQ ID NO: 57051 - DNA, 22 bp, Artificial Sequence
  chemically synthesized
tttgtatcttagcccctttggc

SEQ ID NO: 57052 - DNA, 22 bp, Artificial Sequence
  chemically synthesized
gtatcttagcccctttggcttg

SEQ ID NO: 57053 - DNA, 22 bp, Artificial Sequence
  chemically synthesized
tatcttagcccctttggcttga

SEQ ID NO: 57054 - DNA, 22 bp, Artificial Sequence
  chemically synthesized
agcccctttggcttgactagaa

SEQ ID NO: 57055 - DNA, 22 bp, Artificial Sequence
  chemically synthesized
gcccctttggcttgactagaag

SEQ ID NO: 57056 - DNA, 22 bp, Artificial Sequence
  chemically synthesized
tggcttgactagaagctctatg

SEQ ID NO: 57057 - DNA, 22 bp, Artificial Sequence
  chemically synthesized
ggcttgactagaagctctatgt

SEQ ID NO: 57058 - DNA, 22 bp, Artificial Sequence
  chemically synthesized
gcttgactagaagctctatgtt

SEQ ID NO: 57059 - DNA, 22 bp, Artificial Sequence
  chemically synthesized
gactagaagctctatgtttagt

SEQ ID NO: 57060 - DNA, 22 bp, Artificial Sequence
  chemically synthesized
actagaagctctatgtttagtt

SEQ ID NO: 57061 - DNA, 22 bp, Artificial Sequence
  chemically synthesized
gaagctctatgtttagtttaag

SEQ ID NO: 57062 - DNA, 22 bp, Artificial Sequence
  chemically synthesized
tatgtttagtttaagctcagtc

SEQ ID NO: 57063 - DNA, 22 bp, Artificial Sequence
  chemically synthesized
tgtttagtttaagctcagtctg

SEQ ID NO: 57064 - DNA, 22 bp, Artificial Sequence
  chemically synthesized
agtttaagctcagtctggaaga

SEQ ID NO: 57065 - DNA, 22 bp, Artificial Sequence
  chemically synthesized
gtttaagctcagtctggaagat

SEQ ID NO: 57066 - DNA, 22 bp, Artificial Sequence
  chemically synthesized
aagctcagtctggaagatatta

SEQ ID NO: 57067 - DNA, 22 bp, Artificial Sequence
  chemically synthesized
agctcagtctggaagatattac

SEQ ID NO: 57068 - DNA, 22 bp, Artificial Sequence
  chemically synthesized
agtctggaagatattacaattt

SEQ ID NO: 57069 - DNA, 22 bp, Artificial Sequence
  chemically synthesized
gaagatattacaattttgcatt

SEQ ID NO: 57070 - DNA, 22 bp, Artificial Sequence
  chemically synthesized
caattttgcattaaaaaaatga

SEQ ID NO: 57071 - DNA, 22 bp, Artificial Sequence
  chemically synthesized
tgcattaaaaaaatgaggaaat

SEQ ID NO: 57072 - DNA, 22 bp, Artificial Sequence
  chemically synthesized
gcattaaaaaaatgaggaaatc

SEQ ID NO: 57073 - DNA, 22 bp, Artificial Sequence
  chemically synthesized
cattaaaaaaatgaggaaatca

SEQ ID NO: 57074 - DNA, 22 bp, Artificial Sequence
  chemically synthesized
aaaaaatgaggaaatcatagga

SEQ ID NO: 57075 - DNA, 22 bp, Artificial Sequence
  chemically synthesized
tgctttttggatgaatcttact

SEQ ID NO: 57076 - DNA, 22 bp, Artificial Sequence
  chemically synthesized
gctttttggatgaatcttactg

SEQ ID NO: 57077 - DNA, 22 bp, Artificial Sequence
  chemically synthesized
ctttttggatgaatcttactga

SEQ ID NO: 57078 - DNA, 22 bp, Artificial Sequence
  chemically synthesized
tttggatgaatcttactgataa

SEQ ID NO: 57079 - DNA, 22 bp, Artificial Sequence
  chemically synthesized
ttggatgaatcttactgataat

SEQ ID NO: 57080 - DNA, 22 bp, Artificial Sequence
  chemically synthesized
tggatgaatcttactgataatt

SEQ ID NO: 57081 - DNA, 22 bp, Artificial Sequence
  chemically synthesized
ggatgaatcttactgataattt

SEQ ID NO: 57082 - DNA, 22 bp, Artificial Sequence
  chemically synthesized
gatgaatcttactgataatttg

SEQ ID NO: 57083 - DNA, 22 bp, Artificial Sequence
  chemically synthesized
actgataatttgctaaagctca

SEQ ID NO: 57084 - DNA, 22 bp, Artificial Sequence
  chemically synthesized
ctgataatttgctaaagctcat

SEQ ID NO: 57085 - DNA, 22 bp, Artificial Sequence
  chemically synthesized
ataatttgctaaagctcatttg

SEQ ID NO: 57086 - DNA, 22 bp, Artificial Sequence
  chemically synthesized
gctaaagctcatttgaatttta

SEQ ID NO: 57087 - DNA, 22 bp, Artificial Sequence
  chemically synthesized
ctaaagctcatttgaattttaa

SEQ ID NO: 57088 - DNA, 22 bp, Artificial Sequence
  chemically synthesized
aagctcatttgaattttaagca

SEQ ID NO: 57089 - DNA, 22 bp, Artificial Sequence
  chemically synthesized
atttgaattttaagcacttctt

SEQ ID NO: 57090 - DNA, 22 bp, Artificial Sequence
  chemically synthesized
gaattttaagcacttctttaat

SEQ ID NO: 57091 - DNA, 22 bp, Artificial Sequence
  chemically synthesized
aattttaagcacttctttaatc

SEQ ID NO: 57092 - DNA, 22 bp, Artificial Sequence
  chemically synthesized
taagcacttctttaatcttcaa

SEQ ID NO: 57093 - DNA, 22 bp, Artificial Sequence
  chemically synthesized
aagcacttctttaatcttcaaa

SEQ ID NO: 57094 - DNA, 22 bp, Artificial Sequence
  chemically synthesized
agcacttctttaatcttcaaag

SEQ ID NO: 57095 - DNA, 22 bp, Artificial Sequence
  chemically synthesized
ctttaatcttcaaaggctaaat

SEQ ID NO: 57096 - DNA, 22 bp, Artificial Sequence
  chemically synthesized
tttaatcttcaaaggctaaatt

SEQ ID NO: 57097 - DNA, 22 bp, Artificial Sequence
  chemically synthesized
taatcttcaaaggctaaattgc

SEQ ID NO: 57098 - DNA, 22 bp, Artificial Sequence
  chemically synthesized
aatcttcaaaggctaaattgct

SEQ ID NO: 57099 - DNA, 22 bp, Artificial Sequence
  chemically synthesized
atcttcaaaggctaaattgctt

SEQ ID NO: 57100 - DNA, 22 bp, Artificial Sequence
  chemically synthesized
caaaggctaaattgctttatga

SEQ ID NO: 57101 - DNA, 22 bp, Artificial Sequence
  chemically synthesized
aaaggctaaattgctttatgaa

SEQ ID NO: 57102 - DNA, 22 bp, Artificial Sequence
  chemically synthesized
aattgctttatgaatatgcatg

SEQ ID NO: 57103 - DNA, 22 bp, Artificial Sequence
  chemically synthesized
ctttatgaatatgcatggtgtg

SEQ ID NO: 57104 - DNA, 22 bp, Artificial Sequence
  chemically synthesized
tatgaatatgcatggtgtgggc

SEQ ID NO: 57105 - DNA, 22 bp, Artificial Sequence
  chemically synthesized
atgaatatgcatggtgtgggca

SEQ ID NO: 57106 - DNA, 22 bp, Artificial Sequence
  chemically synthesized
tgaatatgcatggtgtgggcag

SEQ ID NO: 57107 - DNA, 22 bp, Artificial Sequence
  chemically synthesized
cagttcattacctagttgtaaa

SEQ ID NO: 57108 - DNA, 22 bp, Artificial Sequence
  chemically synthesized
agttcattacctagttgtaaat

SEQ ID NO: 57109 - DNA, 22 bp, Artificial Sequence
  chemically synthesized
attacctagttgtaaattctaa

SEQ ID NO: 57110 - DNA, 22 bp, Artificial Sequence
  chemically synthesized
cctagttgtaaattctaatgac

SEQ ID NO: 57111 - DNA, 22 bp, Artificial Sequence
  chemically synthesized
gttgtaaattctaatgaccatt

SEQ ID NO: 57112 - DNA, 22 bp, Artificial Sequence
  chemically synthesized
taaattctaatgaccattaggt

SEQ ID NO: 57113 - DNA, 22 bp, Artificial Sequence
  chemically synthesized
taatgaccattaggtccttcca

SEQ ID NO: 57114 - DNA, 22 bp, Artificial Sequence
  chemically synthesized
atgaccattaggtccttccagt

SEQ ID NO: 57115 - DNA, 22 bp, Artificial Sequence
  chemically synthesized
ggtccttccagtaattgcgaat

SEQ ID NO: 57116 - DNA, 22 bp, Artificial Sequence
  chemically synthesized
ccagtaattgcgaattgttttg

SEQ ID NO: 57117 - DNA, 22 bp, Artificial Sequence
  chemically synthesized
cagtaattgcgaattgttttgc

SEQ ID NO: 57118 - DNA, 22 bp, Artificial Sequence
  chemically synthesized
cgaattgttttgcatttttgat

SEQ ID NO: 57119 - DNA, 22 bp, Artificial Sequence
  chemically synthesized
ttttgcatttttgattggccta

SEQ ID NO: 57120 - DNA, 22 bp, Artificial Sequence
  chemically synthesized
tgcatttttgattggcctatta

SEQ ID NO: 57121 - DNA, 22 bp, Artificial Sequence
  chemically synthesized
gcatttttgattggcctattaa

SEQ ID NO: 57122 - DNA, 22 bp, Artificial Sequence
  chemically synthesized
catttttgattggcctattaac

SEQ ID NO: 57123 - DNA, 22 bp, Artificial Sequence
  chemically synthesized
ttgattggcctattaacatgta

SEQ ID NO: 57124 - DNA, 22 bp, Artificial Sequence
  chemically synthesized
tgattggcctattaacatgtac

SEQ ID NO: 57125 - DNA, 22 bp, Artificial Sequence
  chemically synthesized
gattggcctattaacatgtaca

SEQ ID NO: 57126 - DNA, 22 bp, Artificial Sequence
  chemically synthesized
attggcctattaacatgtacat

SEQ ID NO: 57127 - DNA, 22 bp, Artificial Sequence
  chemically synthesized
gcctattaacatgtacattcgg

SEQ ID NO: 57128 - DNA, 22 bp, Artificial Sequence
  chemically synthesized
ttaacatgtacattcggtgcac

SEQ ID NO: 57129 - DNA, 22 bp, Artificial Sequence
  chemically synthesized
acatgtacattcggtgcacatc

SEQ ID NO: 57130 - DNA, 22 bp, Artificial Sequence
  chemically synthesized
ggtgcacatcaggctggcctgt

SEQ ID NO: 57131 - DNA, 22 bp, Artificial Sequence
  chemically synthesized
gcctgtcagcctgctgaaggag

SEQ ID NO: 57132 - DNA, 22 bp, Artificial Sequence
  chemically synthesized
tcagcctgctgaaggagaaaaa

SEQ ID NO: 57133 - DNA, 22 bp, Artificial Sequence
  chemically synthesized
ctgaaggagaaaaaaaaggtga

SEQ ID NO: 57134 - DNA, 22 bp, Artificial Sequence
  chemically synthesized
aaggagaaaaaaaaggtgaaaa

SEQ ID NO: 57135 - DNA, 22 bp, Artificial Sequence
  chemically synthesized
tttatagcaccaagattcttag

SEQ ID NO: 57136 - DNA, 22 bp, Artificial Sequence
  chemically synthesized
atagcaccaagattcttagatt

SEQ ID NO: 57137 - DNA, 22 bp, Artificial Sequence
  chemically synthesized
tagcaccaagattcttagattt

SEQ ID NO: 57138 - DNA, 22 bp, Artificial Sequence
  chemically synthesized
ttagattttcaatcttgcaaaa

SEQ ID NO: 57139 - DNA, 22 bp, Artificial Sequence
  chemically synthesized
agattttcaatcttgcaaaatt

SEQ ID NO: 57140 - DNA, 22 bp, Artificial Sequence
  chemically synthesized
gattttcaatcttgcaaaattg

SEQ ID NO: 57141 - DNA, 22 bp, Artificial Sequence
  chemically synthesized
tcaatcttgcaaaattgatgat

SEQ ID NO: 57142 - DNA, 22 bp, Artificial Sequence
  chemically synthesized
caatcttgcaaaattgatgatg

SEQ ID NO: 57143 - DNA, 22 bp, Artificial Sequence
  chemically synthesized
aatcttgcaaaattgatgatgt

SEQ ID NO: 57144 - DNA, 22 bp, Artificial Sequence
  chemically synthesized
gcaaaattgatgatgtaaaaaa

SEQ ID NO: 57145 - DNA, 22 bp, Artificial Sequence
  chemically synthesized
caaaattgatgatgtaaaaaaa

SEQ ID NO: 57146 - DNA, 22 bp, Artificial Sequence
  chemically synthesized
atgatgtaaaaaaattaaagca

SEQ ID NO: 57147 - DNA, 22 bp, Artificial Sequence
  chemically synthesized
aagcagtgttttttcttctcaa

SEQ ID NO: 57148 - DNA, 22 bp, Artificial Sequence
  chemically synthesized
tttcttctcaagattaaaagtt

SEQ ID NO: 57149 - DNA, 22 bp, Artificial Sequence
  chemically synthesized
ttcttctcaagattaaaagttc

SEQ ID NO: 57150 - DNA, 22 bp, Artificial Sequence
  chemically synthesized
tcttctcaagattaaaagttca

SEQ ID NO: 57151 - DNA, 22 bp, Artificial Sequence
  chemically synthesized
cttctcaagattaaaagttcac

SEQ ID NO: 57152 - DNA, 22 bp, Artificial Sequence
  chemically synthesized
ttctcaagattaaaagttcacc

SEQ ID NO: 57153 - DNA, 22 bp, Artificial Sequence
  chemically synthesized
ctcaagattaaaagttcaccaa

SEQ ID NO: 57154 - DNA, 22 bp, Artificial Sequence
  chemically synthesized
tcaagattaaaagttcaccaag

SEQ ID NO: 57155 - DNA, 22 bp, Artificial Sequence
  chemically synthesized
aagattaaaagttcaccaagag

SEQ ID NO: 57156 - DNA, 22 bp, Artificial Sequence
  chemically synthesized
aaagttcaccaagagatttgac

SEQ ID NO: 57157 - DNA, 22 bp, Artificial Sequence
  chemically synthesized
accaagagatttgacatattta

SEQ ID NO: 57158 - DNA, 22 bp, Artificial Sequence
  chemically synthesized
gacatatttaatttacatgatg

SEQ ID NO: 57159 - DNA, 22 bp, Artificial Sequence
  chemically synthesized
acatatttaatttacatgatga

SEQ ID NO: 57160 - DNA, 22 bp, Artificial Sequence
  chemically synthesized
aatttacatgatgactttgcac

SEQ ID NO: 57161 - DNA, 22 bp, Artificial Sequence
  chemically synthesized
atttacatgatgactttgcact

SEQ ID NO: 57162 - DNA, 22 bp, Artificial Sequence
  chemically synthesized
acatgatgactttgcactcctt

SEQ ID NO: 57163 - DNA, 22 bp, Artificial Sequence
  chemically synthesized
catgatgactttgcactccttc

SEQ ID NO: 57164 - DNA, 22 bp, Artificial Sequence
  chemically synthesized
tgcactccttcattaatgtaat

SEQ ID NO: 57165 - DNA, 22 bp, Artificial Sequence
  chemically synthesized
gcactccttcattaatgtaatt

SEQ ID NO: 57166 - DNA, 22 bp, Artificial Sequence
  chemically synthesized
cactccttcattaatgtaattt

SEQ ID NO: 57167 - DNA, 22 bp, Artificial Sequence
  chemically synthesized
cttcattaatgtaatttgcata

SEQ ID NO: 57168 - DNA, 22 bp, Artificial Sequence
  chemically synthesized
cattaatgtaatttgcatatga

SEQ ID NO: 57169 - DNA, 22 bp, Artificial Sequence
  chemically synthesized
attaatgtaatttgcatatgaa

SEQ ID NO: 57170 - DNA, 22 bp, Artificial Sequence
  chemically synthesized
atgtaatttgcatatgaagctg

SEQ ID NO: 57171 - DNA, 22 bp, Artificial Sequence
  chemically synthesized
gcatatgaagctgttgttaatc

SEQ ID NO: 57172 - DNA, 22 bp, Artificial Sequence
  chemically synthesized
catatgaagctgttgttaatca

SEQ ID NO: 57173 - DNA, 22 bp, Artificial Sequence
  chemically synthesized
ttgttaatcacttttgatcatg

SEQ ID NO: 57174 - DNA, 22 bp, Artificial Sequence
  chemically synthesized
ttaatcacttttgatcatgttt

SEQ ID NO: 57175 - DNA, 22 bp, Artificial Sequence
  chemically synthesized
atcacttttgatcatgttttgt

SEQ ID NO: 57176 - DNA, 22 bp, Artificial Sequence
  chemically synthesized
ttgatcatgttttgtgtattag

SEQ ID NO: 57177 - DNA, 22 bp, Artificial Sequence
  chemically synthesized
tgatcatgttttgtgtattagc

SEQ ID NO: 57178 - DNA, 22 bp, Artificial Sequence
  chemically synthesized
gatcatgttttgtgtattagct

SEQ ID NO: 57179 - DNA, 22 bp, Artificial Sequence
  chemically synthesized
atcatgttttgtgtattagctg

SEQ ID NO: 57180 - DNA, 22 bp, Artificial Sequence
  chemically synthesized
tgtgtattagctgcctcagtgg

SEQ ID NO: 57181 - DNA, 22 bp, Artificial Sequence
  chemically synthesized
gtgtattagctgcctcagtggc

SEQ ID NO: 57182 - DNA, 22 bp, Artificial Sequence
  chemically synthesized
tgtattagctgcctcagtggct

SEQ ID NO: 57183 - DNA, 22 bp, Artificial Sequence
  chemically synthesized
gctgcctcagtggctctcctcc

SEQ ID NO: 57184 - DNA, 22 bp, Artificial Sequence
  chemically synthesized
cctcagtggctctcctcctcag

SEQ ID NO: 57185 - DNA, 22 bp, Artificial Sequence
  chemically synthesized
agtggctctcctcctcagatgc

SEQ ID NO: 57186 - DNA, 22 bp, Artificial Sequence
  chemically synthesized
tcctcctcagatgccccagtag

SEQ ID NO: 57187 - DNA, 22 bp, Artificial Sequence
  chemically synthesized
ctcctcagatgccccagtagaa

SEQ ID NO: 57188 - DNA, 22 bp, Artificial Sequence
  chemically synthesized
ctcagatgccccagtagaaagg

SEQ ID NO: 57189 - DNA, 22 bp, Artificial Sequence
  chemically synthesized
agatgccccagtagaaaggagc

SEQ ID NO: 57190 - DNA, 22 bp, Artificial Sequence
  chemically synthesized
cttgccaagtttcctttagtga

SEQ ID NO: 57191 - DNA, 22 bp, Artificial Sequence
  chemically synthesized
ttgccaagtttcctttagtgaa

SEQ ID NO: 57192 - DNA, 22 bp, Artificial Sequence
  chemically synthesized
gccaagtttcctttagtgaatt

SEQ ID NO: 57193 - DNA, 22 bp, Artificial Sequence
  chemically synthesized
ccaagtttcctttagtgaattg

SEQ ID NO: 57194 - DNA, 22 bp, Artificial Sequence
  chemically synthesized
cctttagtgaattgaggaatta

SEQ ID NO: 57195 - DNA, 22 bp, Artificial Sequence
  chemically synthesized
ctttagtgaattgaggaattag

SEQ ID NO: 57196 - DNA, 22 bp, Artificial Sequence
  chemically synthesized
tagtgaattgaggaattagaag

SEQ ID NO: 57197 - DNA, 22 bp, Artificial Sequence
  chemically synthesized
agtgaattgaggaattagaagt

SEQ ID NO: 57198 - DNA, 22 bp, Artificial Sequence
  chemically synthesized
gtgaattgaggaattagaagtc

SEQ ID NO: 57199 - DNA, 22 bp, Artificial Sequence
  chemically synthesized
aggaattagaagtctaaccttg

SEQ ID NO: 57200 - DNA, 22 bp, Artificial Sequence
  chemically synthesized
gaagtctaaccttgagtaatta

SEQ ID NO: 57201 - DNA, 22 bp, Artificial Sequence
  chemically synthesized
accttgagtaattacatatgtt

SEQ ID NO: 57202 - DNA, 22 bp, Artificial Sequence
  chemically synthesized
gagtaattacatatgttttatc

SEQ ID NO: 57203 - DNA, 22 bp, Artificial Sequence
  chemically synthesized
agtaattacatatgttttatcc

SEQ ID NO: 57204 - DNA, 22 bp, Artificial Sequence
  chemically synthesized
catatgttttatccgttttctt

SEQ ID NO: 57205 - DNA, 22 bp, Artificial Sequence
  chemically synthesized
tatccgttttcttttaacgtta

SEQ ID NO: 57206 - DNA, 22 bp, Artificial Sequence
  chemically synthesized
atccgttttcttttaacgttaa

SEQ ID NO: 57207 - DNA, 22 bp, Artificial Sequence
  chemically synthesized
tccgttttcttttaacgttaag

SEQ ID NO: 57208 - DNA, 22 bp, Artificial Sequence
  chemically synthesized
tcttttaacgttaagtacagtt

SEQ ID NO: 57209 - DNA, 22 bp, Artificial Sequence
  chemically synthesized
cttttaacgttaagtacagttt

SEQ ID NO: 57210 - DNA, 22 bp, Artificial Sequence
  chemically synthesized
ttttaacgttaagtacagtttg

SEQ ID NO: 57211 - DNA, 22 bp, Artificial Sequence
  chemically synthesized
ttaacgttaagtacagtttgtg

SEQ ID NO: 57212 - DNA, 22 bp, Artificial Sequence
  chemically synthesized
taacgttaagtacagtttgtga

SEQ ID NO: 57213 - DNA, 22 bp, Artificial Sequence
  chemically synthesized
aacgttaagtacagtttgtgaa

SEQ ID NO: 57214 - DNA, 22 bp, Artificial Sequence
  chemically synthesized
acgttaagtacagtttgtgaac

SEQ ID NO: 57215 - DNA, 22 bp, Artificial Sequence
  chemically synthesized
agtacagtttgtgaacgtgttg

SEQ ID NO: 57216 - DNA, 22 bp, Artificial Sequence
  chemically synthesized
gtgaacgtgttggctggaaatc

SEQ ID NO: 57217 - DNA, 22 bp, Artificial Sequence
  chemically synthesized
tgaacgtgttggctggaaatcg

SEQ ID NO: 57218 - DNA, 22 bp, Artificial Sequence
  chemically synthesized
gctggaaatcgttctcatttgg

SEQ ID NO: 57219 - DNA, 22 bp, Artificial Sequence
  chemically synthesized
gaaatcgttctcatttggggag

SEQ ID NO: 57220 - DNA, 22 bp, Artificial Sequence
  chemically synthesized
tcatttggggagaagactgtaa

SEQ ID NO: 57221 - DNA, 22 bp, Artificial Sequence
  chemically synthesized
atttggggagaagactgtaaaa

SEQ ID NO: 57222 - DNA, 22 bp, Artificial Sequence
  chemically synthesized
ggggagaagactgtaaaattta

SEQ ID NO: 57223 - DNA, 22 bp, Artificial Sequence
  chemically synthesized
gggagaagactgtaaaatttaa

SEQ ID NO: 57224 - DNA, 22 bp, Artificial Sequence
  chemically synthesized
taaaatttaagtatatgattga

SEQ ID NO: 57225 - DNA, 22 bp, Artificial Sequence
  chemically synthesized
aagtatatgattgaggcacttc

SEQ ID NO: 57226 - DNA, 22 bp, Artificial Sequence
  chemically synthesized
agtatatgattgaggcacttcc

SEQ ID NO: 57227 - DNA, 22 bp, Artificial Sequence
  chemically synthesized
aggcacttccagatacatagag

SEQ ID NO: 57228 - DNA, 22 bp, Artificial Sequence
  chemically synthesized
ccagatacatagagaaatatgt

SEQ ID NO: 57229 - DNA, 22 bp, Artificial Sequence
  chemically synthesized
cagatacatagagaaatatgta

SEQ ID NO: 57230 - DNA, 22 bp, Artificial Sequence
  chemically synthesized
cctgtttctgttccccacgaac

SEQ ID NO: 57231 - DNA, 22 bp, Artificial Sequence
  chemically synthesized
tttctgttccccacgaacattg

SEQ ID NO: 57232 - DNA, 22 bp, Artificial Sequence
  chemically synthesized
ctgttccccacgaacattgcag

SEQ ID NO: 57233 - DNA, 22 bp, Artificial Sequence
  chemically synthesized
tgttccccacgaacattgcagg

SEQ ID NO: 57234 - DNA, 22 bp, Artificial Sequence
  chemically synthesized
ttccccacgaacattgcagggc

SEQ ID NO: 57235 - DNA, 22 bp, Artificial Sequence
  chemically synthesized
cccacgaacattgcagggcagt

SEQ ID NO: 57236 - DNA, 22 bp, Artificial Sequence
  chemically synthesized
cagggcagttttattgttagca

SEQ ID NO: 57237 - DNA, 22 bp, Artificial Sequence
  chemically synthesized
tattgttagcagtttgatggca

SEQ ID NO: 57238 - DNA, 22 bp, Artificial Sequence
  chemically synthesized
attgttagcagtttgatggcag

SEQ ID NO: 57239 - DNA, 22 bp, Artificial Sequence
  chemically synthesized
ttgttagcagtttgatggcagg

SEQ ID NO: 57240 - DNA, 22 bp, Artificial Sequence
  chemically synthesized
ttagcagtttgatggcaggaag

SEQ ID NO: 57241 - DNA, 22 bp, Artificial Sequence
  chemically synthesized
gcagtttgatggcaggaagcct

SEQ ID NO: 57242 - DNA, 22 bp, Artificial Sequence
  chemically synthesized
gatggcaggaagccttggctat

SEQ ID NO: 57243 - DNA, 22 bp, Artificial Sequence
  chemically synthesized
atggcaggaagccttggctatt

SEQ ID NO: 57244 - DNA, 22 bp, Artificial Sequence
  chemically synthesized
ggctattatagtgtattaagac

SEQ ID NO: 57245 - DNA, 22 bp, Artificial Sequence
  chemically synthesized
gctattatagtgtattaagaca

SEQ ID NO: 57246 - DNA, 22 bp, Artificial Sequence
  chemically synthesized
ttatagtgtattaagacatcag

SEQ ID NO: 57247 - DNA, 22 bp, Artificial Sequence
  chemically synthesized
tagtgtattaagacatcaggtt

SEQ ID NO: 57248 - DNA, 22 bp, Artificial Sequence
  chemically synthesized
agacatcaggttcctcctttgg

SEQ ID NO: 57249 - DNA, 22 bp, Artificial Sequence
  chemically synthesized
ctcctttggaggagggaaggct

SEQ ID NO: 57250 - DNA, 22 bp, Artificial Sequence
  chemically synthesized
ctttggaggagggaaggctaca

SEQ ID NO: 57251 - DNA, 22 bp, Artificial Sequence
  chemically synthesized
tggaggagggaaggctacagaa

SEQ ID NO: 57252 - DNA, 22 bp, Artificial Sequence
  chemically synthesized
ggaggagggaaggctacagaac

SEQ ID NO: 57253 - DNA, 22 bp, Artificial Sequence
  chemically synthesized
gaggagggaaggctacagaact

SEQ ID NO: 57254 - DNA, 22 bp, Artificial Sequence
  chemically synthesized
cagaactacaaacctttctaac

SEQ ID NO: 57255 - DNA, 22 bp, Artificial Sequence
  chemically synthesized
caaacctttctaacaatgcttt

SEQ ID NO: 57256 - DNA, 22 bp, Artificial Sequence
  chemically synthesized
tctaacaatgctttaggtttct

SEQ ID NO: 57257 - DNA, 22 bp, Artificial Sequence
  chemically synthesized
ctaacaatgctttaggtttctt

SEQ ID NO: 57258 - DNA, 22 bp, Artificial Sequence
  chemically synthesized
taacaatgctttaggtttcttc

SEQ ID NO: 57259 - DNA, 22 bp, Artificial Sequence
  chemically synthesized
acaatgctttaggtttcttctt

SEQ ID NO: 57260 - DNA, 22 bp, Artificial Sequence
  chemically synthesized
taggtttcttctttagatagat

SEQ ID NO: 57261 - DNA, 22 bp, Artificial Sequence
  chemically synthesized
aggtttcttctttagatagatg

SEQ ID NO: 57262 - DNA, 22 bp, Artificial Sequence
  chemically synthesized
ggtttcttctttagatagatgg

SEQ ID NO: 57263 - DNA, 22 bp, Artificial Sequence
  chemically synthesized
cttctttagatagatggctggc

SEQ ID NO: 57264 - DNA, 22 bp, Artificial Sequence
  chemically synthesized
ttctttagatagatggctggca

SEQ ID NO: 57265 - DNA, 22 bp, Artificial Sequence
  chemically synthesized
ctttagatagatggctggcacc

SEQ ID NO: 57266 - DNA, 22 bp, Artificial Sequence
  chemically synthesized
tttagatagatggctggcacct

SEQ ID NO: 57267 - DNA, 22 bp, Artificial Sequence
  chemically synthesized
tagatagatggctggcacctaa

SEQ ID NO: 57268 - DNA, 22 bp, Artificial Sequence
  chemically synthesized
agatagatggctggcacctaaa

SEQ ID NO: 57269 - DNA, 22 bp, Artificial Sequence
  chemically synthesized
gatagatggctggcacctaaag

SEQ ID NO: 57270 - DNA, 22 bp, Artificial Sequence
  chemically synthesized
gcacctaaaggacttgggcctg

SEQ ID NO: 57271 - DNA, 22 bp, Artificial Sequence
  chemically synthesized
aaggacttgggcctgggtttgg

SEQ ID NO: 57272 - DNA, 22 bp, Artificial Sequence
  chemically synthesized
gggcctgggtttggctgactct

SEQ ID NO: 57273 - DNA, 22 bp, Artificial Sequence
  chemically synthesized
ggcctgggtttggctgactctt

SEQ ID NO: 57274 - DNA, 22 bp, Artificial Sequence
  chemically synthesized
ggtttggctgactcttttatct

SEQ ID NO: 57275 - DNA, 22 bp, Artificial Sequence
  chemically synthesized
ggctgactcttttatcttttag

SEQ ID NO: 57276 - DNA, 22 bp, Artificial Sequence
  chemically synthesized
gctgactcttttatcttttaga

SEQ ID NO: 57277 - DNA, 22 bp, Artificial Sequence
  chemically synthesized
actcttttatcttttagatcaa

SEQ ID NO: 57278 - DNA, 22 bp, Artificial Sequence
  chemically synthesized
ttttatcttttagatcaagtaa

SEQ ID NO: 57279 - DNA, 22 bp, Artificial Sequence
  chemically synthesized
ttatcttttagatcaagtaagt

SEQ ID NO: 57280 - DNA, 22 bp, Artificial Sequence
  chemically synthesized
tatcttttagatcaagtaagtt

SEQ ID NO: 57281 - DNA, 22 bp, Artificial Sequence
  chemically synthesized
atcttttagatcaagtaagttt

SEQ ID NO: 57282 - DNA, 22 bp, Artificial Sequence
  chemically synthesized
tcttttagatcaagtaagtttt

SEQ ID NO: 57283 - DNA, 22 bp, Artificial Sequence
  chemically synthesized
ttagatcaagtaagttttctca

SEQ ID NO: 57284 - DNA, 22 bp, Artificial Sequence
  chemically synthesized
tagatcaagtaagttttctcat

SEQ ID NO: 57285 - DNA, 22 bp, Artificial Sequence
  chemically synthesized
agatcaagtaagttttctcatt

SEQ ID NO: 57286 - DNA, 22 bp, Artificial Sequence
  chemically synthesized
gatcaagtaagttttctcattc

SEQ ID NO: 57287 - DNA, 22 bp, Artificial Sequence
  chemically synthesized
tctcattcagctgctgctctga

SEQ ID NO: 57288 - DNA, 22 bp, Artificial Sequence
  chemically synthesized
ctcattcagctgctgctctgag

SEQ ID NO: 57289 - DNA, 22 bp, Artificial Sequence
  chemically synthesized
tcattcagctgctgctctgagc

SEQ ID NO: 57290 - DNA, 22 bp, Artificial Sequence
  chemically synthesized
attcagctgctgctctgagcta

SEQ ID NO: 57291 - DNA, 22 bp, Artificial Sequence
  chemically synthesized
agctgctgctctgagctacaat

SEQ ID NO: 57292 - DNA, 22 bp, Artificial Sequence
  chemically synthesized
ctgctctgagctacaatgtgtc

SEQ ID NO: 57293 - DNA, 22 bp, Artificial Sequence
  chemically synthesized
ctctgagctacaatgtgtcctc

SEQ ID NO: 57294 - DNA, 22 bp, Artificial Sequence
  chemically synthesized
tgagctacaatgtgtcctcccc

SEQ ID NO: 57295 - DNA, 22 bp, Artificial Sequence
  chemically synthesized
agctacaatgtgtcctcccctc

SEQ ID NO: 57296 - DNA, 22 bp, Artificial Sequence
  chemically synthesized
caatgtgtcctcccctcatcac

SEQ ID NO: 57297 - DNA, 22 bp, Artificial Sequence
  chemically synthesized
ccctcatcaccaaagtatatcc

SEQ ID NO: 57298 - DNA, 22 bp, Artificial Sequence
  chemically synthesized
atcaccaaagtatatcctggtc

SEQ ID NO: 57299 - DNA, 22 bp, Artificial Sequence
  chemically synthesized
gtctccaggctccctgggctcc

SEQ ID NO: 57300 - DNA, 22 bp, Artificial Sequence
  chemically synthesized
caggctccctgggctcccagtg

SEQ ID NO: 57301 - DNA, 22 bp, Artificial Sequence
  chemically synthesized
cctgggctcccagtgtctccct

SEQ ID NO: 57302 - DNA, 22 bp, Artificial Sequence
  chemically synthesized
ggctcccagtgtctccctcaag

SEQ ID NO: 57303 - DNA, 22 bp, Artificial Sequence
  chemically synthesized
ccagtgtctccctcaaggtaca

SEQ ID NO: 57304 - DNA, 22 bp, Artificial Sequence
  chemically synthesized
cctcaaggtacacgagtgccct

SEQ ID NO: 57305 - DNA, 22 bp, Artificial Sequence
  chemically synthesized
aaggtacacgagtgccctggtg

SEQ ID NO: 57306 - DNA, 22 bp, Artificial Sequence
  chemically synthesized
gtggtgaaaacaaggtgctaac

SEQ ID NO: 57307 - DNA, 22 bp, Artificial Sequence
  chemically synthesized
actaacggtttccgatttttga

SEQ ID NO: 57308 - DNA, 22 bp, Artificial Sequence
  chemically synthesized
acggtttccgatttttgagagc

SEQ ID NO: 57309 - DNA, 22 bp, Artificial Sequence
  chemically synthesized
ccgatttttgagagcctgtgat

SEQ ID NO: 57310 - DNA, 22 bp, Artificial Sequence
  chemically synthesized
cgatttttgagagcctgtgatt

SEQ ID NO: 57311 - DNA, 22 bp, Artificial Sequence
  chemically synthesized
ttgagagcctgtgattttggtg

SEQ ID NO: 57312 - DNA, 22 bp, Artificial Sequence
  chemically synthesized
tgagagcctgtgattttggtgt

SEQ ID NO: 57313 - DNA, 22 bp, Artificial Sequence
  chemically synthesized
gagagcctgtgattttggtgtt

SEQ ID NO: 57314 - DNA, 22 bp, Artificial Sequence
  chemically synthesized
agagcctgtgattttggtgttt

SEQ ID NO: 57315 - DNA, 22 bp, Artificial Sequence
  chemically synthesized
tgattttggtgtttgcctttgc

SEQ ID NO: 57316 - DNA, 22 bp, Artificial Sequence
  chemically synthesized
tggtgtttgcctttgctgttga

SEQ ID NO: 57317 - DNA, 22 bp, Artificial Sequence
  chemically synthesized
ggtgtttgcctttgctgttgaa

SEQ ID NO: 57318 - DNA, 22 bp, Artificial Sequence
  chemically synthesized
gtgtttgcctttgctgttgaat

SEQ ID NO: 57319 - DNA, 22 bp, Artificial Sequence
  chemically synthesized
gcctttgctgttgaataacctg

SEQ ID NO: 57320 - DNA, 22 bp, Artificial Sequence
  chemically synthesized
cctttgctgttgaataacctgt

SEQ ID NO: 57321 - DNA, 22 bp, Artificial Sequence
  chemically synthesized
tgctgttgaataacctgtgctg

SEQ ID NO: 57322 - DNA, 22 bp, Artificial Sequence
  chemically synthesized
gctgttgaataacctgtgctgt

SEQ ID NO: 57323 - DNA, 22 bp, Artificial Sequence
  chemically synthesized
ctgttgaataacctgtgctgta

SEQ ID NO: 57324 - DNA, 22 bp, Artificial Sequence
  chemically synthesized
ttgaataacctgtgctgtatta

SEQ ID NO: 57325 - DNA, 22 bp, Artificial Sequence
  chemically synthesized
aataacctgtgctgtattattg

SEQ ID NO: 57326 - DNA, 22 bp, Artificial Sequence
  chemically synthesized
tgctgtattattgatgttcatc

SEQ ID NO: 57327 - DNA, 22 bp, Artificial Sequence
  chemically synthesized
tattattgatgttcatctttgg

SEQ ID NO: 57328 - DNA, 22 bp, Artificial Sequence
  chemically synthesized
ttgatgttcatctttggtttat

SEQ ID NO: 57329 - DNA, 22 bp, Artificial Sequence
  chemically synthesized
atgttcatctttggtttatgag

SEQ ID NO: 57330 - DNA, 22 bp, Artificial Sequence
  chemically synthesized
atctttggtttatgagtttatc

SEQ ID NO: 57331 - DNA, 22 bp, Artificial Sequence
  chemically synthesized
tggtttatgagtttatcactgg

SEQ ID NO: 57332 - DNA, 22 bp, Artificial Sequence
  chemically synthesized
ggtttatgagtttatcactggt

SEQ ID NO: 57333 - DNA, 22 bp, Artificial Sequence
  chemically synthesized
gtttatgagtttatcactggtt

SEQ ID NO: 57334 - DNA, 22 bp, Artificial Sequence
  chemically synthesized
atgagtttatcactggttaaca

SEQ ID NO: 57335 - DNA, 22 bp, Artificial Sequence
  chemically synthesized
tgagtttatcactggttaacaa

SEQ ID NO: 57336 - DNA, 22 bp, Artificial Sequence
  chemically synthesized
atcactggttaacaagcagaat

SEQ ID NO: 57337 - DNA, 22 bp, Artificial Sequence
  chemically synthesized
tcactggttaacaagcagaatc

SEQ ID NO: 57338 - DNA, 22 bp, Artificial Sequence
  chemically synthesized
gttaacaagcagaatcagaaca

SEQ ID NO: 57339 - DNA, 22 bp, Artificial Sequence
  chemically synthesized
acaagcagaatcagaacagtgt

SEQ ID NO: 57340 - DNA, 22 bp, Artificial Sequence
  chemically synthesized
atattctgattaaaacgaatgt

SEQ ID NO: 57341 - DNA, 22 bp, Artificial Sequence
  chemically synthesized
tgattaaaacgaatgtttaatg

SEQ ID NO: 57342 - DNA, 22 bp, Artificial Sequence
  chemically synthesized
attaaaacgaatgtttaatgaa

SEQ ID NO: 57343 - DNA, 22 bp, Artificial Sequence
  chemically synthesized
aaacgaatgtttaatgaaagaa

SEQ ID NO: 57344 - DNA, 22 bp, Artificial Sequence
  chemically synthesized
aatgaaagaaaataaattgtga

SEQ ID NO: 57345 - DNA, 22 bp, Artificial Sequence
  chemically synthesized
atgaaagaaaataaattgtgat

SEQ ID NO: 57346 - DNA, 22 bp, Artificial Sequence
  chemically synthesized
tgatggaaaatgaacagtgtgt

SEQ ID NO: 57347 - DNA, 22 bp, Artificial Sequence
  chemically synthesized
taattttaacctccgagggacc

SEQ ID NO: 57348 - DNA, 22 bp, Artificial Sequence
  chemically synthesized
taacctccgagggacctagcac

SEQ ID NO: 57349 - DNA, 22 bp, Artificial Sequence
  chemically synthesized
aacctccgagggacctagcact

SEQ ID NO: 57350 - DNA, 22 bp, Artificial Sequence
  chemically synthesized
acctccgagggacctagcactg

SEQ ID NO: 57351 - DNA, 22 bp, Artificial Sequence
  chemically synthesized
cgagggacctagcactgcccta

SEQ ID NO: 57352 - DNA, 22 bp, Artificial Sequence
  chemically synthesized
gcactgccctaccgtgacttcc

SEQ ID NO: 57353 - DNA, 22 bp, Artificial Sequence
  chemically synthesized
ccctaccgtgacttccatccat

SEQ ID NO: 57354 - DNA, 22 bp, Artificial Sequence
  chemically synthesized
ccgtgacttccatccataccat

SEQ ID NO: 57355 - DNA, 22 bp, Artificial Sequence
  chemically synthesized
ccatccataccatgctaaaagc

SEQ ID NO: 57356 - DNA, 22 bp, Artificial Sequence
  chemically synthesized
catccataccatgctaaaagca

SEQ ID NO: 57357 - DNA, 22 bp, Artificial Sequence
  chemically synthesized
aaagcatgcttcagtttaaagt

SEQ ID NO: 57358 - DNA, 22 bp, Artificial Sequence
  chemically synthesized
cagtttaaagttgttaatattc

SEQ ID NO: 57359 - DNA, 22 bp, Artificial Sequence
  chemically synthesized
agtttaaagttgttaatattca

SEQ ID NO: 57360 - DNA, 22 bp, Artificial Sequence
  chemically synthesized
aaagttgttaatattcagctgg

SEQ ID NO: 57361 - DNA, 22 bp, Artificial Sequence
  chemically synthesized
aagttgttaatattcagctggg

SEQ ID NO: 57362 - DNA, 22 bp, Artificial Sequence
  chemically synthesized
ttaatattcagctgggaaacag

SEQ ID NO: 57363 - DNA, 22 bp, Artificial Sequence
  chemically synthesized
atattcagctgggaaacagtat

SEQ ID NO: 57364 - DNA, 22 bp, Artificial Sequence
  chemically synthesized
agctgggaaacagtatccagaa

SEQ ID NO: 57365 - DNA, 22 bp, Artificial Sequence
  chemically synthesized
ggaaacagtatccagaacacaa

SEQ ID NO: 57366 - DNA, 22 bp, Artificial Sequence
  chemically synthesized
ttaagtgcatgaactttttagg

SEQ ID NO: 57367 - DNA, 22 bp, Artificial Sequence
  chemically synthesized
agtgcatgaactttttaggcag

SEQ ID NO: 57368 - DNA, 22 bp, Artificial Sequence
  chemically synthesized
tttaggcagtaagatgaactga

SEQ ID NO: 57369 - DNA, 22 bp, Artificial Sequence
  chemically synthesized
ttaggcagtaagatgaactgat

SEQ ID NO: 57370 - DNA, 22 bp, Artificial Sequence
  chemically synthesized
taggcagtaagatgaactgatg

SEQ ID NO: 57371 - DNA, 22 bp, Artificial Sequence
  chemically synthesized
aggcagtaagatgaactgatgg

SEQ ID NO: 57372 - DNA, 22 bp, Artificial Sequence
  chemically synthesized
ggcagtaagatgaactgatggg

SEQ ID NO: 57373 - DNA, 22 bp, Artificial Sequence
  chemically synthesized
atggggtccatctgtgagatcc

SEQ ID NO: 57374 - DNA, 22 bp, Artificial Sequence
  chemically synthesized
tgagatccaggggctttttatt

SEQ ID NO: 57375 - DNA, 22 bp, Artificial Sequence
  chemically synthesized
tttatttgtgtgtgtcgagcga

SEQ ID NO: 57376 - DNA, 22 bp, Artificial Sequence
  chemically synthesized
ttatttgtgtgtgtcgagcgat

SEQ ID NO: 57377 - DNA, 22 bp, Artificial Sequence
  chemically synthesized
tatttgtgtgtgtcgagcgatt

SEQ ID NO: 57378 - DNA, 22 bp, Artificial Sequence
  chemically synthesized
atttgtgtgtgtcgagcgattc

SEQ ID NO: 57379 - DNA, 22 bp, Artificial Sequence
  chemically synthesized
tttgtgtgtgtcgagcgattct

SEQ ID NO: 57380 - DNA, 22 bp, Artificial Sequence
  chemically synthesized
gtgtgtgtcgagcgattctgcc

SEQ ID NO: 57381 - DNA, 22 bp, Artificial Sequence
  chemically synthesized
tgtgtgtcgagcgattctgccc

SEQ ID NO: 57382 - DNA, 22 bp, Artificial Sequence
  chemically synthesized
tgccctctccgacttcacagcc

SEQ ID NO: 57383 - DNA, 22 bp, Artificial Sequence
  chemically synthesized
ccctctccgacttcacagcctt

SEQ ID NO: 57384 - DNA, 22 bp, Artificial Sequence
  chemically synthesized
tccgacttcacagcctttggtc

SEQ ID NO: 57385 - DNA, 22 bp, Artificial Sequence
  chemically synthesized
cgacttcacagcctttggtctc

SEQ ID NO: 57386 - DNA, 22 bp, Artificial Sequence
  chemically synthesized
cacagcctttggtctccggcca

SEQ ID NO: 57387 - DNA, 22 bp, Artificial Sequence
  chemically synthesized
acagcctttggtctccggccaa

SEQ ID NO: 57388 - DNA, 22 bp, Artificial Sequence
  chemically synthesized
tggtctccggccaactgcatgc

SEQ ID NO: 57389 - DNA, 22 bp, Artificial Sequence
  chemically synthesized
ggtctccggccaactgcatgca

SEQ ID NO: 57390 - DNA, 22 bp, Artificial Sequence
  chemically synthesized
gtctccggccaactgcatgcat

SEQ ID NO: 57391 - DNA, 22 bp, Artificial Sequence
  chemically synthesized
cggccaactgcatgcataattg

SEQ ID NO: 57392 - DNA, 22 bp, Artificial Sequence
  chemically synthesized
catgcataattgattccacacg

SEQ ID NO: 57393 - DNA, 22 bp, Artificial Sequence
  chemically synthesized
attccacacgcactatcatttt

SEQ ID NO: 57394 - DNA, 22 bp, Artificial Sequence
  chemically synthesized
cacacgcactatcattttcttg

SEQ ID NO: 57395 - DNA, 22 bp, Artificial Sequence
  chemically synthesized
tcattttcttgatgtaattgct

SEQ ID NO: 57396 - DNA, 22 bp, Artificial Sequence
  chemically synthesized
tcttgatgtaattgctttacta

SEQ ID NO: 57397 - DNA, 22 bp, Artificial Sequence
  chemically synthesized
cttgatgtaattgctttactaa

SEQ ID NO: 57398 - DNA, 22 bp, Artificial Sequence
  chemically synthesized
ttgatgtaattgctttactaag

SEQ ID NO: 57399 - DNA, 22 bp, Artificial Sequence
  chemically synthesized
gatgtaattgctttactaagat

SEQ ID NO: 57400 - DNA, 22 bp, Artificial Sequence
  chemically synthesized
atgtaattgctttactaagata

SEQ ID NO: 57401 - DNA, 22 bp, Artificial Sequence
  chemically synthesized
ctttactaagatatgatgaaat

SEQ ID NO: 57402 - DNA, 22 bp, Artificial Sequence
  chemically synthesized
tactaagatatgatgaaatcta

SEQ ID NO: 57403 - DNA, 22 bp, Artificial Sequence
  chemically synthesized
actaagatatgatgaaatctaa

SEQ ID NO: 57404 - DNA, 22 bp, Artificial Sequence
  chemically synthesized
ctaagatatgatgaaatctaat

SEQ ID NO: 57405 - DNA, 22 bp, Artificial Sequence
  chemically synthesized
agatatgatgaaatctaatgga

SEQ ID NO: 57406 - DNA, 22 bp, Artificial Sequence
  chemically synthesized
atggataatttgctatttgaaa

SEQ ID NO: 57407 - DNA, 22 bp, Artificial Sequence
  chemically synthesized
gctatttgaaaatggtcaaaaa

SEQ ID NO: 57408 - DNA, 22 bp, Artificial Sequence
  chemically synthesized
ctatttgaaaatggtcaaaaaa

SEQ ID NO: 57409 - DNA, 22 bp, Artificial Sequence
  chemically synthesized
tttgaaaatggtcaaaaaaaat

SEQ ID NO: 57410 - DNA, 22 bp, Artificial Sequence
  chemically synthesized
gaaaatggtcaaaaaaaatctt

SEQ ID NO: 57411 - DNA, 22 bp, Artificial Sequence
  chemically synthesized
aaaatggtcaaaaaaaatcttc

SEQ ID NO: 57412 - DNA, 22 bp, Artificial Sequence
  chemically synthesized
catactttatgtggggctgagt

SEQ ID NO: 57413 - DNA, 22 bp, Artificial Sequence
  chemically synthesized
atactttatgtggggctgagtg

SEQ ID NO: 57414 - DNA, 22 bp, Artificial Sequence
  chemically synthesized
tatgtggggctgagtgggcagt

SEQ ID NO: 57415 - DNA, 22 bp, Artificial Sequence
  chemically synthesized
atgtggggctgagtgggcagtg

SEQ ID NO: 57416 - DNA, 22 bp, Artificial Sequence
  chemically synthesized
tgtggggctgagtgggcagtgg

SEQ ID NO: 57417 - DNA, 22 bp, Artificial Sequence
  chemically synthesized
agtgggcagtggagaaaggggt

SEQ ID NO: 57418 - DNA, 22 bp, Artificial Sequence
  chemically synthesized
agctgacccggtatttaagaaa

SEQ ID NO: 57419 - DNA, 22 bp, Artificial Sequence
  chemically synthesized
acccggtatttaagaaaacaaa

SEQ ID NO: 57420 - DNA, 22 bp, Artificial Sequence
  chemically synthesized
aagaaaacaaaacaagcaacac

SEQ ID NO: 57421 - DNA, 22 bp, Artificial Sequence
  chemically synthesized
agaaaacaaaacaagcaacact

SEQ ID NO: 57422 - DNA, 22 bp, Artificial Sequence
  chemically synthesized
acttatgcatgctgcttcagtc

SEQ ID NO: 57423 - DNA, 22 bp, Artificial Sequence
  chemically synthesized
atgcatgctgcttcagtcgcgt

SEQ ID NO: 57424 - DNA, 22 bp, Artificial Sequence
  chemically synthesized
tgcatgctgcttcagtcgcgtt

SEQ ID NO: 57425 - DNA, 22 bp, Artificial Sequence
  chemically synthesized
cttcagtcgcgttggctgtgga

SEQ ID NO: 57426 - DNA, 22 bp, Artificial Sequence
  chemically synthesized
cagtcgcgttggctgtggatag

SEQ ID NO: 57427 - DNA, 22 bp, Artificial Sequence
  chemically synthesized
agtcgcgttggctgtggatagg

SEQ ID NO: 57428 - DNA, 22 bp, Artificial Sequence
  chemically synthesized
gctgtggataggaaggtctttg

SEQ ID NO: 57429 - DNA, 22 bp, Artificial Sequence
  chemically synthesized
tggataggaaggtctttgtgac

SEQ ID NO: 57430 - DNA, 22 bp, Artificial Sequence
  chemically synthesized
tgtgacatatggaagccagtgt

SEQ ID NO: 57431 - DNA, 22 bp, Artificial Sequence
  chemically synthesized
gtgacatatggaagccagtgta

SEQ ID NO: 57432 - DNA, 22 bp, Artificial Sequence
  chemically synthesized
tgacatatggaagccagtgtat

SEQ ID NO: 57433 - DNA, 22 bp, Artificial Sequence
  chemically synthesized
tctccttctatcttgcatcacc

SEQ ID NO: 57434 - DNA, 22 bp, Artificial Sequence
  chemically synthesized
tccttctatcttgcatcacccc

SEQ ID NO: 57435 - DNA, 22 bp, Artificial Sequence
  chemically synthesized
cttctatcttgcatcaccccct

SEQ ID NO: 57436 - DNA, 22 bp, Artificial Sequence
  chemically synthesized
ctatcttgcatcacccccttca

SEQ ID NO: 57437 - DNA, 22 bp, Artificial Sequence
  chemically synthesized
tatcttgcatcacccccttcat

SEQ ID NO: 57438 - DNA, 22 bp, Artificial Sequence
  chemically synthesized
tcttgcatcacccccttcattc

SEQ ID NO: 57439 - DNA, 22 bp, Artificial Sequence
  chemically synthesized
gcatcacccccttcattccttc

SEQ ID NO: 57440 - DNA, 22 bp, Artificial Sequence
  chemically synthesized
catcacccccttcattccttct

SEQ ID NO: 57441 - DNA, 22 bp, Artificial Sequence
  chemically synthesized
cattccttctctctttctctcc

SEQ ID NO: 57442 - DNA, 22 bp, Artificial Sequence
  chemically synthesized
attccttctctctttctctcct

SEQ ID NO: 57443 - DNA, 22 bp, Artificial Sequence
  chemically synthesized
cttctctctttctctcctctct

SEQ ID NO: 57444 - DNA, 22 bp, Artificial Sequence
  chemically synthesized
ctctctttctctcctctctctc

SEQ ID NO: 57445 - DNA, 22 bp, Artificial Sequence
  chemically synthesized
tctctttctctcctctctctct

SEQ ID NO: 57446 - DNA, 22 bp, Artificial Sequence
  chemically synthesized
tctttctctcctctctctctcc

SEQ ID NO: 57447 - DNA, 22 bp, Artificial Sequence
  chemically synthesized
tttctctcctctctctctcccc

SEQ ID NO: 57448 - DNA, 22 bp, Artificial Sequence
  chemically synthesized
tctctcctctctctctccccca

SEQ ID NO: 57449 - DNA, 22 bp, Artificial Sequence
  chemically synthesized
ctctcctctctctctcccccaa

SEQ ID NO: 57450 - DNA, 22 bp, Artificial Sequence
  chemically synthesized
tctcctctctctctcccccaaa

SEQ ID NO: 57451 - DNA, 22 bp, Artificial Sequence
  chemically synthesized
tcctctctctctcccccaaact

SEQ ID NO: 57452 - DNA, 22 bp, Artificial Sequence
  chemically synthesized
ctctctctctcccccaaacttt

SEQ ID NO: 57453 - DNA, 22 bp, Artificial Sequence
  chemically synthesized
tctctctcccccaaactttaca

SEQ ID NO: 57454 - DNA, 22 bp, Artificial Sequence
  chemically synthesized
tctctcccccaaactttacaag

SEQ ID NO: 57455 - DNA, 22 bp, Artificial Sequence
  chemically synthesized
tctcccccaaactttacaagaa

SEQ ID NO: 57456 - DNA, 22 bp, Artificial Sequence
  chemically synthesized
tcccccaaactttacaagaaag

SEQ ID NO: 57457 - DNA, 22 bp, Artificial Sequence
  chemically synthesized
ccccaaactttacaagaaaggg

SEQ ID NO: 57458 - DNA, 22 bp, Artificial Sequence
  chemically synthesized
tacaagaaagggatcctaacaa

SEQ ID NO: 57459 - DNA, 22 bp, Artificial Sequence
  chemically synthesized
acaagaaagggatcctaacaag

SEQ ID NO: 57460 - DNA, 22 bp, Artificial Sequence
  chemically synthesized
caagaaagggatcctaacaagg

SEQ ID NO: 57461 - DNA, 22 bp, Artificial Sequence
  chemically synthesized
acaaggtaaaaagtaaacaatt

SEQ ID NO: 57462 - DNA, 22 bp, Artificial Sequence
  chemically synthesized
agtcatcacaagccttattatt

SEQ ID NO: 57463 - DNA, 22 bp, Artificial Sequence
  chemically synthesized
gtcatcacaagccttattattc

SEQ ID NO: 57464 - DNA, 22 bp, Artificial Sequence
  chemically synthesized
attattcagtctatccaggagt

SEQ ID NO: 57465 - DNA, 22 bp, Artificial Sequence
  chemically synthesized
ttattcagtctatccaggagtt

SEQ ID NO: 57466 - DNA, 22 bp, Artificial Sequence
  chemically synthesized
ttcagtctatccaggagttttg

SEQ ID NO: 57467 - DNA, 22 bp, Artificial Sequence
  chemically synthesized
agtctatccaggagttttgcca

SEQ ID NO: 57468 - DNA, 22 bp, Artificial Sequence
  chemically synthesized
tccaggagttttgccatgtcgg

SEQ ID NO: 57469 - DNA, 22 bp, Artificial Sequence
  chemically synthesized
tgccatgtcggtttatttaact

SEQ ID NO: 57470 - DNA, 22 bp, Artificial Sequence
  chemically synthesized
gccatgtcggtttatttaactt

SEQ ID NO: 57471 - DNA, 22 bp, Artificial Sequence
  chemically synthesized
ccatgtcggtttatttaacttc

SEQ ID NO: 57472 - DNA, 22 bp, Artificial Sequence
  chemically synthesized
atttaacttccaggaatgtaaa

SEQ ID NO: 57473 - DNA, 22 bp, Artificial Sequence
  chemically synthesized
tttaacttccaggaatgtaaac

SEQ ID NO: 57474 - DNA, 22 bp, Artificial Sequence
  chemically synthesized
aacttccaggaatgtaaacact

SEQ ID NO: 57475 - DNA, 22 bp, Artificial Sequence
  chemically synthesized
acttccaggaatgtaaacactg

SEQ ID NO: 57476 - DNA, 22 bp, Artificial Sequence
  chemically synthesized
ccaggaatgtaaacactgacac

SEQ ID NO: 57477 - DNA, 22 bp, Artificial Sequence
  chemically synthesized
caggaatgtaaacactgacaca

SEQ ID NO: 57478 - DNA, 22 bp, Artificial Sequence
  chemically synthesized
acacagccctagaagcagcaag

SEQ ID NO: 57479 - DNA, 22 bp, Artificial Sequence
  chemically synthesized
gaagcagcaagaaagattacag

SEQ ID NO: 57480 - DNA, 22 bp, Artificial Sequence
  chemically synthesized
cagtattagagttaaaaacgtg

SEQ ID NO: 57481 - DNA, 22 bp, Artificial Sequence
  chemically synthesized
gagttaaaaacgtgagcatgga

SEQ ID NO: 57482 - DNA, 22 bp, Artificial Sequence
  chemically synthesized
aaaacgtgagcatggaggagct

SEQ ID NO: 57483 - DNA, 22 bp, Artificial Sequence
  chemically synthesized
tgctttatactctgctataata

SEQ ID NO: 57484 - DNA, 22 bp, Artificial Sequence
  chemically synthesized
tatactctgctataataacact

SEQ ID NO: 57485 - DNA, 22 bp, Artificial Sequence
  chemically synthesized
atactctgctataataacactt

SEQ ID NO: 57486 - DNA, 22 bp, Artificial Sequence
  chemically synthesized
tactctgctataataacacttt

SEQ ID NO: 57487 - DNA, 22 bp, Artificial Sequence
  chemically synthesized
tgctataataacactttacatt

SEQ ID NO: 57488 - DNA, 22 bp, Artificial Sequence
  chemically synthesized
ctataataacactttacattga

SEQ ID NO: 57489 - DNA, 22 bp, Artificial Sequence
  chemically synthesized
taataacactttacattgaaac

SEQ ID NO: 57490 - DNA, 22 bp, Artificial Sequence
  chemically synthesized
tacattgaaacataatggtaag

SEQ ID NO: 57491 - DNA, 22 bp, Artificial Sequence
  chemically synthesized
acattgaaacataatggtaagt

SEQ ID NO: 57492 - DNA, 22 bp, Artificial Sequence
  chemically synthesized
cattgaaacataatggtaagtc

SEQ ID NO: 57493 - DNA, 22 bp, Artificial Sequence
  chemically synthesized
aaacataatggtaagtcaaaag

SEQ ID NO: 57494 - DNA, 22 bp, Artificial Sequence
  chemically synthesized
gaaacttctgcttatatggagt

SEQ ID NO: 57495 - DNA, 22 bp, Artificial Sequence
  chemically synthesized
ctgcttatatggagtacaaatt

SEQ ID NO: 57496 - DNA, 22 bp, Artificial Sequence
  chemically synthesized
tgcttatatggagtacaaattt

SEQ ID NO: 57497 - DNA, 22 bp, Artificial Sequence
  chemically synthesized
cttatatggagtacaaatttca

SEQ ID NO: 57498 - DNA, 22 bp, Artificial Sequence
  chemically synthesized
atatggagtacaaatttcattc

SEQ ID NO: 57499 - DNA, 22 bp, Artificial Sequence
  chemically synthesized
tatggagtacaaatttcattct

SEQ ID NO: 57500 - DNA, 22 bp, Artificial Sequence
  chemically synthesized
cattctaatagattggcataat

SEQ ID NO: 57501 - DNA, 22 bp, Artificial Sequence
  chemically synthesized
attctaatagattggcataatc

SEQ ID NO: 57502 - DNA, 22 bp, Artificial Sequence
  chemically synthesized
taatagattggcataatctagt

SEQ ID NO: 57503 - DNA, 22 bp, Artificial Sequence
  chemically synthesized
atagattggcataatctagtgt

SEQ ID NO: 57504 - DNA, 22 bp, Artificial Sequence
  chemically synthesized
gcataatctagtgtacccaggg

SEQ ID NO: 57505 - DNA, 22 bp, Artificial Sequence
  chemically synthesized
gtgtacccagggtagattgtta

SEQ ID NO: 57506 - DNA, 22 bp, Artificial Sequence
  chemically synthesized
ttatataatggagaaactgtat

SEQ ID NO: 57507 - DNA, 22 bp, Artificial Sequence
  chemically synthesized
tataatggagaaactgtataaa

SEQ ID NO: 57508 - DNA, 22 bp, Artificial Sequence
  chemically synthesized
tataaatgtcaagtacacaaat

SEQ ID NO: 57509 - DNA, 22 bp, Artificial Sequence
  chemically synthesized
tacaggaagtaaataaaaagta

SEQ ID NO: 57510 - DNA, 22 bp, Artificial Sequence
  chemically synthesized
caggaagtaaataaaaagtatt

SEQ ID NO: 57511 - DNA, 22 bp, Artificial Sequence
  chemically synthesized
gaatttcttaagtcaccattaa

SEQ ID NO: 57512 - DNA, 22 bp, Artificial Sequence
  chemically synthesized
cttaagtcaccattaaattttg

SEQ ID NO: 57513 - DNA, 22 bp, Artificial Sequence
  chemically synthesized
ttaagtcaccattaaattttgg

SEQ ID NO: 57514 - DNA, 22 bp, Artificial Sequence
  chemically synthesized
aagtcaccattaaattttggtg

SEQ ID NO: 57515 - DNA, 22 bp, Artificial Sequence
  chemically synthesized
agtcaccattaaattttggtgg

SEQ ID NO: 57516 - DNA, 22 bp, Artificial Sequence
  chemically synthesized
aattttggtggtgggacaatct

SEQ ID NO: 57517 - DNA, 22 bp, Artificial Sequence
  chemically synthesized
tggtggtgggacaatctcatta

SEQ ID NO: 57518 - DNA, 22 bp, Artificial Sequence
  chemically synthesized
ggtggtgggacaatctcattag

SEQ ID NO: 57519 - DNA, 22 bp, Artificial Sequence
  chemically synthesized
gtggtgggacaatctcattagc

SEQ ID NO: 57520 - DNA, 22 bp, Artificial Sequence
  chemically synthesized
attagctccttcaaaatcatgt

SEQ ID NO: 57521 - DNA, 22 bp, Artificial Sequence
  chemically synthesized
gctccttcaaaatcatgtggct

SEQ ID NO: 57522 - DNA, 22 bp, Artificial Sequence
  chemically synthesized
cttcaaaatcatgtggctttgc

SEQ ID NO: 57523 - DNA, 22 bp, Artificial Sequence
  chemically synthesized
caaaatcatgtggctttgcata

SEQ ID NO: 57524 - DNA, 22 bp, Artificial Sequence
  chemically synthesized
aaaatcatgtggctttgcataa

SEQ ID NO: 57525 - DNA, 22 bp, Artificial Sequence
  chemically synthesized
tgcataagtcttttgaaaatgt

SEQ ID NO: 57526 - DNA, 22 bp, Artificial Sequence
  chemically synthesized
gcataagtcttttgaaaatgta

SEQ ID NO: 57527 - DNA, 22 bp, Artificial Sequence
  chemically synthesized
cataagtcttttgaaaatgtat

SEQ ID NO: 57528 - DNA, 22 bp, Artificial Sequence
  chemically synthesized
ttgaaaatgtattttcagggaa

SEQ ID NO: 57529 - DNA, 22 bp, Artificial Sequence
  chemically synthesized
tgaaaatgtattttcagggaat

SEQ ID NO: 57530 - DNA, 22 bp, Artificial Sequence
  chemically synthesized
gaaaatgtattttcagggaatt

SEQ ID NO: 57531 - DNA, 22 bp, Artificial Sequence
  chemically synthesized
aaaatgtattttcagggaattt

SEQ ID NO: 57532 - DNA, 22 bp, Artificial Sequence
  chemically synthesized
tcagggaatttacagatggtga

SEQ ID NO: 57533 - DNA, 22 bp, Artificial Sequence
  chemically synthesized
cagggaatttacagatggtgaa

SEQ ID NO: 57534 - DNA, 22 bp, Artificial Sequence
  chemically synthesized
agggaatttacagatggtgaaa

SEQ ID NO: 57535 - DNA, 22 bp, Artificial Sequence
  chemically synthesized
acagatggtgaaacattgtttt

SEQ ID NO: 57536 - DNA, 22 bp, Artificial Sequence
  chemically synthesized
cagatggtgaaacattgtttta

SEQ ID NO: 57537 - DNA, 22 bp, Artificial Sequence
  chemically synthesized
ttttaatccaaaccagttaatg

SEQ ID NO: 57538 - DNA, 22 bp, Artificial Sequence
  chemically synthesized
taatccaaaccagttaatgctt

SEQ ID NO: 57539 - DNA, 22 bp, Artificial Sequence
  chemically synthesized
aatccaaaccagttaatgcttt

SEQ ID NO: 57540 - DNA, 22 bp, Artificial Sequence
  chemically synthesized
atccaaaccagttaatgcttta

SEQ ID NO: 57541 - DNA, 22 bp, Artificial Sequence
  chemically synthesized
atgctttaaatctacctttaaa

SEQ ID NO: 57542 - DNA, 22 bp, Artificial Sequence
  chemically synthesized
taaatctacctttaaaaaaatt

SEQ ID NO: 57543 - DNA, 22 bp, Artificial Sequence
  chemically synthesized
aaatctacctttaaaaaaattg

SEQ ID NO: 57544 - DNA, 22 bp, Artificial Sequence
  chemically synthesized
aatctacctttaaaaaaattgt

SEQ ID NO: 57545 - DNA, 22 bp, Artificial Sequence
  chemically synthesized
cctttaaaaaaattgtactgtt

SEQ ID NO: 57546 - DNA, 22 bp, Artificial Sequence
  chemically synthesized
taaaaaaattgtactgtttttc

SEQ ID NO: 57547 - DNA, 22 bp, Artificial Sequence
  chemically synthesized
aaaaaaattgtactgtttttcg

SEQ ID NO: 57548 - DNA, 22 bp, Artificial Sequence
  chemically synthesized
aaaaaattgtactgtttttcga

SEQ ID NO: 57549 - DNA, 22 bp, Artificial Sequence
  chemically synthesized
tactgtttttcgaagtacttaa

SEQ ID NO: 57550 - DNA, 22 bp, Artificial Sequence
  chemically synthesized
tttttcgaagtacttaaaggga

SEQ ID NO: 57551 - DNA, 22 bp, Artificial Sequence
  chemically synthesized
ttcgaagtacttaaagggagtg

SEQ ID NO: 57552 - DNA, 22 bp, Artificial Sequence
  chemically synthesized
tcgaagtacttaaagggagtgg

SEQ ID NO: 57553 - DNA, 22 bp, Artificial Sequence
  chemically synthesized
cgaagtacttaaagggagtgga

SEQ ID NO: 57554 - DNA, 22 bp, Artificial Sequence
  chemically synthesized
gaagtacttaaagggagtggag

SEQ ID NO: 57555 - DNA, 22 bp, Artificial Sequence
  chemically synthesized
aaagggagtggaggggtagaaa

SEQ ID NO: 57556 - DNA, 22 bp, Artificial Sequence
  chemically synthesized
aagggagtggaggggtagaaag

SEQ ID NO: 57557 - DNA, 22 bp, Artificial Sequence
  chemically synthesized
actgtggcaaactgtttttcaa

SEQ ID NO: 57558 - DNA, 22 bp, Artificial Sequence
  chemically synthesized
tggcaaactgtttttcaagtaa

SEQ ID NO: 57559 - DNA, 22 bp, Artificial Sequence
  chemically synthesized
tttttcaagtaaagtcataata

SEQ ID NO: 57560 - DNA, 22 bp, Artificial Sequence
  chemically synthesized
ttcaagtaaagtcataataatg

SEQ ID NO: 57561 - DNA, 22 bp, Artificial Sequence
  chemically synthesized
tcaagtaaagtcataataatga

SEQ ID NO: 57562 - DNA, 22 bp, Artificial Sequence
  chemically synthesized
caagtaaagtcataataatgaa

SEQ ID NO: 57563 - DNA, 22 bp, Artificial Sequence
  chemically synthesized
aagtaaagtcataataatgaac

SEQ ID NO: 57564 - DNA, 22 bp, Artificial Sequence
  chemically synthesized
aaatttgatcagcaaacatatc

SEQ ID NO: 57565 - DNA, 22 bp, Artificial Sequence
  chemically synthesized
gatcagcaaacatatccttatg

SEQ ID NO: 57566 - DNA, 22 bp, Artificial Sequence
  chemically synthesized
atcagcaaacatatccttatgc

SEQ ID NO: 57567 - DNA, 22 bp, Artificial Sequence
  chemically synthesized
atgccaaggaattttctttttt

SEQ ID NO: 57568 - DNA, 22 bp, Artificial Sequence
  chemically synthesized
tgccaaggaattttcttttttt

SEQ ID NO: 57569 - DNA, 22 bp, Artificial Sequence
  chemically synthesized
tctttttttctttccttttttt

SEQ ID NO: 57570 - DNA, 22 bp, Artificial Sequence
  chemically synthesized
ctttttttctttcctttttttt

SEQ ID NO: 57571 - DNA, 22 bp, Artificial Sequence
  chemically synthesized
tttttttctttccttttttttc

SEQ ID NO: 57572 - DNA, 22 bp, Artificial Sequence
  chemically synthesized
tttttctttccttttttttctt

SEQ ID NO: 57573 - DNA, 22 bp, Artificial Sequence
  chemically synthesized
ttttctttccttttttttcttt

SEQ ID NO: 57574 - DNA, 22 bp, Artificial Sequence
  chemically synthesized
tttctttccttttttttctttt

SEQ ID NO: 57575 - DNA, 22 bp, Artificial Sequence
  chemically synthesized
ttctttccttttttttcttttt

SEQ ID NO: 57576 - DNA, 22 bp, Artificial Sequence
  chemically synthesized
tctttccttttttttctttttc

SEQ ID NO: 57577 - DNA, 22 bp, Artificial Sequence
  chemically synthesized
ctttccttttttttctttttcg

SEQ ID NO: 57578 - DNA, 22 bp, Artificial Sequence
  chemically synthesized
tttccttttttttctttttcgc

SEQ ID NO: 57579 - DNA, 22 bp, Artificial Sequence
  chemically synthesized
tccttttttttctttttcgcca

SEQ ID NO: 57580 - DNA, 22 bp, Artificial Sequence
  chemically synthesized
ccttttttttctttttcgccat

SEQ ID NO: 57581 - DNA, 22 bp, Artificial Sequence
  chemically synthesized
cttttttttctttttcgccatt

SEQ ID NO: 57582 - DNA, 22 bp, Artificial Sequence
  chemically synthesized
ttttttctttttcgccattcac

SEQ ID NO: 57583 - DNA, 22 bp, Artificial Sequence
  chemically synthesized
tttttctttttcgccattcaca

SEQ ID NO: 57584 - DNA, 22 bp, Artificial Sequence
  chemically synthesized
ttttctttttcgccattcacat

SEQ ID NO: 57585 - DNA, 22 bp, Artificial Sequence
  chemically synthesized
tttctttttcgccattcacata

SEQ ID NO: 57586 - DNA, 22 bp, Artificial Sequence
  chemically synthesized
ttctttttcgccattcacatac

SEQ ID NO: 57587 - DNA, 22 bp, Artificial Sequence
  chemically synthesized
tctttttcgccattcacatacc

SEQ ID NO: 57588 - DNA, 22 bp, Artificial Sequence
  chemically synthesized
ctttttcgccattcacatacca

SEQ ID NO: 57589 - DNA, 22 bp, Artificial Sequence
  chemically synthesized
tttttcgccattcacataccaa

SEQ ID NO: 57590 - DNA, 22 bp, Artificial Sequence
  chemically synthesized
tttcgccattcacataccaagg

SEQ ID NO: 57591 - DNA, 22 bp, Artificial Sequence
  chemically synthesized
ttcgccattcacataccaaggt

SEQ ID NO: 57592 - DNA, 22 bp, Artificial Sequence
  chemically synthesized
tcgccattcacataccaaggtt

SEQ ID NO: 57593 - DNA, 22 bp, Artificial Sequence
  chemically synthesized
cgccattcacataccaaggttc

SEQ ID NO: 57594 - DNA, 22 bp, Artificial Sequence
  chemically synthesized
gccattcacataccaaggttct

SEQ ID NO: 57595 - DNA, 22 bp, Artificial Sequence
  chemically synthesized
acataccaaggttctgtaaatc

SEQ ID NO: 57596 - DNA, 22 bp, Artificial Sequence
  chemically synthesized
tgtaaatcagtaaaccaggcag

SEQ ID NO: 57597 - DNA, 22 bp, Artificial Sequence
  chemically synthesized
taaatcagtaaaccaggcagag

SEQ ID NO: 57598 - DNA, 22 bp, Artificial Sequence
  chemically synthesized
ttgtaagggggaaaccaaatca

SEQ ID NO: 57599 - DNA, 22 bp, Artificial Sequence
  chemically synthesized
taagggggaaaccaaatcataa

SEQ ID NO: 57600 - DNA, 22 bp, Artificial Sequence
  chemically synthesized
tctttctgaagaaacattaacg

SEQ ID NO: 57601 - DNA, 22 bp, Artificial Sequence
  chemically synthesized
tctgaagaaacattaacgccac

SEQ ID NO: 57602 - DNA, 22 bp, Artificial Sequence
  chemically synthesized
ctgaagaaacattaacgccacc

SEQ ID NO: 57603 - DNA, 22 bp, Artificial Sequence
  chemically synthesized
tgaagaaacattaacgccacca

SEQ ID NO: 57604 - DNA, 22 bp, Artificial Sequence
  chemically synthesized
aagaaacattaacgccaccacc

SEQ ID NO: 57605 - DNA, 22 bp, Artificial Sequence
  chemically synthesized
acgccaccaccaccaaaaaaag

SEQ ID NO: 57606 - DNA, 22 bp, Artificial Sequence
  chemically synthesized
tttaaaaaactggaaatgacag

SEQ ID NO: 57607 - DNA, 22 bp, Artificial Sequence
  chemically synthesized
ttaaaaaactggaaatgacaga

SEQ ID NO: 57608 - DNA, 22 bp, Artificial Sequence
  chemically synthesized
taaaaaactggaaatgacagaa

SEQ ID NO: 57609 - DNA, 22 bp, Artificial Sequence
  chemically synthesized
aaaaaactggaaatgacagaat

SEQ ID NO: 57610 - DNA, 22 bp, Artificial Sequence
  chemically synthesized
aaaaactggaaatgacagaata

SEQ ID NO: 57611 - DNA, 22 bp, Artificial Sequence
  chemically synthesized
gaaatgacagaatagttttaaa

SEQ ID NO: 57612 - DNA, 22 bp, Artificial Sequence
  chemically synthesized
taaaaggaaaaaaaaaaaaacc

SEQ ID NO: 57613 - DNA, 22 bp, Artificial Sequence
  chemically synthesized
aaaaggaaaaaaaaaaaaaccc

SEQ ID NO: 57614 - DNA, 22 bp, Artificial Sequence
  chemically synthesized
aaaggaaaaaaaaaaaaaccca

SEQ ID NO: 57615 - DNA, 22 bp, Artificial Sequence
  chemically synthesized
ctgacgctcaaaacttcaaact

SEQ ID NO: 57616 - DNA, 22 bp, Artificial Sequence
  chemically synthesized
tgacgctcaaaacttcaaacta

SEQ ID NO: 57617 - DNA, 22 bp, Artificial Sequence
  chemically synthesized
acgctcaaaacttcaaactatt

SEQ ID NO: 57618 - DNA, 22 bp, Artificial Sequence
  chemically synthesized
aaaacttcaaactattaataga

SEQ ID NO: 57619 - DNA, 22 bp, Artificial Sequence
  chemically synthesized
caaactattaatagaccaccag

SEQ ID NO: 57620 - DNA, 22 bp, Artificial Sequence
  chemically synthesized
aaactattaatagaccaccagt

SEQ ID NO: 57621 - DNA, 22 bp, Artificial Sequence
  chemically synthesized
ttaatagaccaccagtgagata

SEQ ID NO: 57622 - DNA, 22 bp, Artificial Sequence
  chemically synthesized
atagaccaccagtgagatagac

SEQ ID NO: 57623 - DNA, 22 bp, Artificial Sequence
  chemically synthesized
tctttgtgccttgaaatgcaaa

SEQ ID NO: 57624 - DNA, 22 bp, Artificial Sequence
  chemically synthesized
tgtgccttgaaatgcaaaatga

SEQ ID NO: 57625 - DNA, 22 bp, Artificial Sequence
  chemically synthesized
gtgccttgaaatgcaaaatgag

SEQ ID NO: 57626 - DNA, 22 bp, Artificial Sequence
  chemically synthesized
tgccttgaaatgcaaaatgagg

SEQ ID NO: 57627 - DNA, 22 bp, Artificial Sequence
  chemically synthesized
gaaatgcaaaatgagggaaata

SEQ ID NO: 57628 - DNA, 22 bp, Artificial Sequence
  chemically synthesized
aaatgcaaaatgagggaaataa

SEQ ID NO: 57629 - DNA, 22 bp, Artificial Sequence
  chemically synthesized
gcagaggaacaaaattctcaaa

SEQ ID NO: 57630 - DNA, 22 bp, Artificial Sequence
  chemically synthesized
tcaaaatttgaagaacttctgt

SEQ ID NO: 57631 - DNA, 22 bp, Artificial Sequence
  chemically synthesized
aaaatttgaagaacttctgtga

SEQ ID NO: 57632 - DNA, 22 bp, Artificial Sequence
  chemically synthesized
gaagaacttctgtgattactgg

SEQ ID NO: 57633 - DNA, 22 bp, Artificial Sequence
  chemically synthesized
aagaacttctgtgattactggg

SEQ ID NO: 57634 - DNA, 22 bp, Artificial Sequence
  chemically synthesized
ctgtgattactgggggtacagt

SEQ ID NO: 57635 - DNA, 22 bp, Artificial Sequence
  chemically synthesized
tgtgattactgggggtacagtg

SEQ ID NO: 57636 - DNA, 22 bp, Artificial Sequence
  chemically synthesized
tgattactgggggtacagtgaa

SEQ ID NO: 57637 - DNA, 22 bp, Artificial Sequence
  chemically synthesized
ctgggggtacagtgaaaagaaa

SEQ ID NO: 57638 - DNA, 22 bp, Artificial Sequence
  chemically synthesized
ggggtacagtgaaaagaaaatg

SEQ ID NO: 57639 - DNA, 22 bp, Artificial Sequence
  chemically synthesized
cttcctgatcttaattagattc

SEQ ID NO: 57640 - DNA, 22 bp, Artificial Sequence
  chemically synthesized
ttcctgatcttaattagattcg

SEQ ID NO: 57641 - DNA, 22 bp, Artificial Sequence
  chemically synthesized
cctgatcttaattagattcgat

SEQ ID NO: 57642 - DNA, 22 bp, Artificial Sequence
  chemically synthesized
ctgatcttaattagattcgatt

SEQ ID NO: 57643 - DNA, 22 bp, Artificial Sequence
  chemically synthesized
atcttaattagattcgattgtg

SEQ ID NO: 57644 - DNA, 22 bp, Artificial Sequence
  chemically synthesized
aattagattcgattgtgcggtg

SEQ ID NO: 57645 - DNA, 22 bp, Artificial Sequence
  chemically synthesized
attagattcgattgtgcggtgg

SEQ ID NO: 57646 - DNA, 22 bp, Artificial Sequence
  chemically synthesized
gattcgattgtgcggtgggtgt

SEQ ID NO: 57647 - DNA, 22 bp, Artificial Sequence
  chemically synthesized
gattgtgcggtgggtgtgttgg

SEQ ID NO: 57648 - DNA, 22 bp, Artificial Sequence
  chemically synthesized
tgcggtgggtgtgttggatttg

SEQ ID NO: 57649 - DNA, 22 bp, Artificial Sequence
  chemically synthesized
gatttggggggaggggcagagg

SEQ ID NO: 57650 - DNA, 22 bp, Artificial Sequence
  chemically synthesized
ggggggaggggcagaggcaggg

SEQ ID NO: 57651 - DNA, 22 bp, Artificial Sequence
  chemically synthesized
gggggaggggcagaggcaggga

SEQ ID NO: 57652 - DNA, 22 bp, Artificial Sequence
  chemically synthesized
gggtgaggcgtgaggctgagtg

SEQ ID NO: 57653 - DNA, 22 bp, Artificial Sequence
  chemically synthesized
agtgttgtggagacaggttagc

SEQ ID NO: 57654 - DNA, 22 bp, Artificial Sequence
  chemically synthesized
tggagacaggttagcaggggcc

SEQ ID NO: 57655 - DNA, 22 bp, Artificial Sequence
  chemically synthesized
gcaggggcccggcggtgtggca

SEQ ID NO: 57656 - DNA, 22 bp, Artificial Sequence
  chemically synthesized
ccaacgctggtgcaggattccg

SEQ ID NO: 57657 - DNA, 22 bp, Artificial Sequence
  chemically synthesized
caacgctggtgcaggattccga

SEQ ID NO: 57658 - DNA, 22 bp, Artificial Sequence
  chemically synthesized
gtgcaggattccgagccttaac

SEQ ID NO: 57659 - DNA, 22 bp, Artificial Sequence
  chemically synthesized
cgagccttaacccagatgctca

SEQ ID NO: 57660 - DNA, 22 bp, Artificial Sequence
  chemically synthesized
aacccagatgctcatggtgccc

SEQ ID NO: 57661 - DNA, 22 bp, Artificial Sequence
  chemically synthesized
acccagatgctcatggtgccct

SEQ ID NO: 57662 - DNA, 22 bp, Artificial Sequence
  chemically synthesized
atggtgccctagtcttgagttc

SEQ ID NO: 57663 - DNA, 22 bp, Artificial Sequence
  chemically synthesized
gtcttgagttcttcatttaggt

SEQ ID NO: 57664 - DNA, 22 bp, Artificial Sequence
  chemically synthesized
gagttcttcatttaggtgggct

SEQ ID NO: 57665 - DNA, 22 bp, Artificial Sequence
  chemically synthesized
agttcttcatttaggtgggctt

SEQ ID NO: 57666 - DNA, 22 bp, Artificial Sequence
  chemically synthesized
ttcatttaggtgggcttatttc

SEQ ID NO: 57667 - DNA, 22 bp, Artificial Sequence
  chemically synthesized
catttaggtgggcttatttccc

SEQ ID NO: 57668 - DNA, 22 bp, Artificial Sequence
  chemically synthesized
atttaggtgggcttatttccca

SEQ ID NO: 57669 - DNA, 22 bp, Artificial Sequence
  chemically synthesized
aggtgggcttatttcccactgg

SEQ ID NO: 57670 - DNA, 22 bp, Artificial Sequence
  chemically synthesized
ggtgggcttatttcccactggg

SEQ ID NO: 57671 - DNA, 22 bp, Artificial Sequence
  chemically synthesized
atttcccactgggtctggggga

SEQ ID NO: 57672 - DNA, 22 bp, Artificial Sequence
  chemically synthesized
tttcccactgggtctgggggat

SEQ ID NO: 57673 - DNA, 22 bp, Artificial Sequence
  chemically synthesized
cccactgggtctgggggatttc

SEQ ID NO: 57674 - DNA, 22 bp, Artificial Sequence
  chemically synthesized
ccactgggtctgggggatttca

SEQ ID NO: 57675 - DNA, 22 bp, Artificial Sequence
  chemically synthesized
ggtctgggggatttcatttgtc

SEQ ID NO: 57676 - DNA, 22 bp, Artificial Sequence
  chemically synthesized
ggggatttcatttgtcctttga

SEQ ID NO: 57677 - DNA, 22 bp, Artificial Sequence
  chemically synthesized
catttgtcctttgaggggcagg

SEQ ID NO: 57678 - DNA, 22 bp, Artificial Sequence
  chemically synthesized
atttgtcctttgaggggcaggg

SEQ ID NO: 57679 - DNA, 22 bp, Artificial Sequence
  chemically synthesized
gtcctttgaggggcagggtgga

SEQ ID NO: 57680 - DNA, 22 bp, Artificial Sequence
  chemically synthesized
tcctttgaggggcagggtggac

SEQ ID NO: 57681 - DNA, 22 bp, Artificial Sequence
  chemically synthesized
tgaggggcagggtggacactga

SEQ ID NO: 57682 - DNA, 22 bp, Artificial Sequence
  chemically synthesized
gaggggcagggtggacactgac

SEQ ID NO: 57683 - DNA, 22 bp, Artificial Sequence
  chemically synthesized
aggggcagggtggacactgaca

SEQ ID NO: 57684 - DNA, 22 bp, Artificial Sequence
  chemically synthesized
acagaacagctgcggccggcag

SEQ ID NO: 57685 - DNA, 22 bp, Artificial Sequence
  chemically synthesized
cggccggcagagagggtggtta

SEQ ID NO: 57686 - DNA, 22 bp, Artificial Sequence
  chemically synthesized
ggaagagggaagcagcctgtgg

SEQ ID NO: 57687 - DNA, 22 bp, Artificial Sequence
  chemically synthesized
tgggtaacttcccgaccacatg

SEQ ID NO: 57688 - DNA, 22 bp, Artificial Sequence
  chemically synthesized
cccgaccacatggaaaggctga

SEQ ID NO: 57689 - DNA, 22 bp, Artificial Sequence
  chemically synthesized
ccgaccacatggaaaggctgaa

SEQ ID NO: 57690 - DNA, 22 bp, Artificial Sequence
  chemically synthesized
aataagacgttatggaccctgc

SEQ ID NO: 57691 - DNA, 22 bp, Artificial Sequence
  chemically synthesized
tggaccctgccttgggtactgg

SEQ ID NO: 57692 - DNA, 22 bp, Artificial Sequence
  chemically synthesized
ccttgggtactggggtcagcgt

SEQ ID NO: 57693 - DNA, 22 bp, Artificial Sequence
  chemically synthesized
gggtactggggtcagcgtctcc

SEQ ID NO: 57694 - DNA, 22 bp, Artificial Sequence
  chemically synthesized
ggtactggggtcagcgtctcct

SEQ ID NO: 57695 - DNA, 22 bp, Artificial Sequence
  chemically synthesized
gggtcagcgtctcctggtggtg

SEQ ID NO: 57696 - DNA, 22 bp, Artificial Sequence
  chemically synthesized
ctggtggtgtctgcacagggcc

SEQ ID NO: 57697 - DNA, 22 bp, Artificial Sequence
  chemically synthesized
gtggtgtctgcacagggccccc

SEQ ID NO: 57698 - DNA, 22 bp, Artificial Sequence
  chemically synthesized
cacagggccccccaatgccagg

SEQ ID NO: 57699 - DNA, 22 bp, Artificial Sequence
  chemically synthesized
ccaaaacacgctcttgagttta

SEQ ID NO: 57700 - DNA, 22 bp, Artificial Sequence
  chemically synthesized
ttgagtttaatggtagtggttg

SEQ ID NO: 57701 - DNA, 22 bp, Artificial Sequence
  chemically synthesized
gagtttaatggtagtggttggt

SEQ ID NO: 57702 - DNA, 22 bp, Artificial Sequence
  chemically synthesized
agtttaatggtagtggttggtc

SEQ ID NO: 57703 - DNA, 22 bp, Artificial Sequence
  chemically synthesized
aatggtagtggttggtctgagt

SEQ ID NO: 57704 - DNA, 22 bp, Artificial Sequence
  chemically synthesized
atggtagtggttggtctgagtc

SEQ ID NO: 57705 - DNA, 22 bp, Artificial Sequence
  chemically synthesized
gtctgagtcctgccaaagtgta

SEQ ID NO: 57706 - DNA, 22 bp, Artificial Sequence
  chemically synthesized
agtcctgccaaagtgtatggag

SEQ ID NO: 57707 - DNA, 22 bp, Artificial Sequence
  chemically synthesized
ccaaagtgtatggagcaagttt

SEQ ID NO: 57708 - DNA, 22 bp, Artificial Sequence
  chemically synthesized
cattggctggactttccccttg

SEQ ID NO: 57709 - DNA, 22 bp, Artificial Sequence
  chemically synthesized
attggctggactttccccttgc

SEQ ID NO: 57710 - DNA, 22 bp, Artificial Sequence
  chemically synthesized
gctggactttccccttgcatga

SEQ ID NO: 57711 - DNA, 22 bp, Artificial Sequence
  chemically synthesized
gactttccccttgcatgaaata

SEQ ID NO: 57712 - DNA, 22 bp, Artificial Sequence
  chemically synthesized
tccccttgcatgaaataataaa

SEQ ID NO: 57713 - DNA, 22 bp, Artificial Sequence
  chemically synthesized
ccccttgcatgaaataataaaa

SEQ ID NO: 57714 - DNA, 22 bp, Artificial Sequence
  chemically synthesized
cccttgcatgaaataataaaag

SEQ ID NO: 57715 - DNA, 22 bp, Artificial Sequence
  chemically synthesized
gcatgaaataataaaagccctg

SEQ ID NO: 57716 - DNA, 22 bp, Artificial Sequence
  chemically synthesized
catgaaataataaaagccctgg

SEQ ID NO: 57717 - DNA, 22 bp, Artificial Sequence
  chemically synthesized
gccaaggcttatgaatctattt

SEQ ID NO: 57718 - DNA, 22 bp, Artificial Sequence
  chemically synthesized
atgaatctatttttgtttcatt

SEQ ID NO: 57719 - DNA, 22 bp, Artificial Sequence
  chemically synthesized
tgaatctatttttgtttcatta

SEQ ID NO: 57720 - DNA, 22 bp, Artificial Sequence
  chemically synthesized
tttttgtttcattaatattatt

SEQ ID NO: 57721 - DNA, 22 bp, Artificial Sequence
  chemically synthesized
ttgtttcattaatattatttat

SEQ ID NO: 57722 - DNA, 22 bp, Artificial Sequence
  chemically synthesized
tgtttcattaatattatttatt

SEQ ID NO: 57723 - DNA, 22 bp, Artificial Sequence
  chemically synthesized
gtttcattaatattatttatta

SEQ ID NO: 57724 - DNA, 22 bp, Artificial Sequence
  chemically synthesized
tttcattaatattatttattat

SEQ ID NO: 57725 - DNA, 22 bp, Artificial Sequence
  chemically synthesized
cattaatattatttattatgta

SEQ ID NO: 57726 - DNA, 22 bp, Artificial Sequence
  chemically synthesized
attaatattatttattatgtat

SEQ ID NO: 57727 - DNA, 22 bp, Artificial Sequence
  chemically synthesized
atattatttattatgtatttta

SEQ ID NO: 57728 - DNA, 22 bp, Artificial Sequence
  chemically synthesized
tttattatgtattttattaata

SEQ ID NO: 57729 - DNA, 22 bp, Artificial Sequence
  chemically synthesized
attatgtattttattaatattt

SEQ ID NO: 57730 - DNA, 22 bp, Artificial Sequence
  chemically synthesized
ttatgtattttattaatatttt

SEQ ID NO: 57731 - DNA, 22 bp, Artificial Sequence
  chemically synthesized
tgtattttattaatattttttg

SEQ ID NO: 57732 - DNA, 22 bp, Artificial Sequence
  chemically synthesized
tattaatattttttggagggac

SEQ ID NO: 57733 - DNA, 22 bp, Artificial Sequence
  chemically synthesized
attaatattttttggagggacc

SEQ ID NO: 57734 - DNA, 22 bp, Artificial Sequence
  chemically synthesized
ttaatattttttggagggacct

SEQ ID NO: 57735 - DNA, 22 bp, Artificial Sequence
  chemically synthesized
atattttttggagggaccttgc

SEQ ID NO: 57736 - DNA, 22 bp, Artificial Sequence
  chemically synthesized
tttggagggaccttgctctcat

SEQ ID NO: 57737 - DNA, 22 bp, Artificial Sequence
  chemically synthesized
ttggagggaccttgctctcatt

SEQ ID NO: 57738 - DNA, 22 bp, Artificial Sequence
  chemically synthesized
tggagggaccttgctctcattt

SEQ ID NO: 57739 - DNA, 22 bp, Artificial Sequence
  chemically synthesized
ggagggaccttgctctcatttg

SEQ ID NO: 57740 - DNA, 22 bp, Artificial Sequence
  chemically synthesized
gagggaccttgctctcatttga

SEQ ID NO: 57741 - DNA, 22 bp, Artificial Sequence
  chemically synthesized
gctctcatttgaccatttgtag

SEQ ID NO: 57742 - DNA, 22 bp, Artificial Sequence
  chemically synthesized
ctctcatttgaccatttgtagt

SEQ ID NO: 57743 - DNA, 22 bp, Artificial Sequence
  chemically synthesized
tcatttgaccatttgtagttat

SEQ ID NO: 57744 - DNA, 22 bp, Artificial Sequence
  chemically synthesized
atttgaccatttgtagttataa

SEQ ID NO: 57745 - DNA, 22 bp, Artificial Sequence
  chemically synthesized
gaccatttgtagttataattaa

SEQ ID NO: 57746 - DNA, 22 bp, Artificial Sequence
  chemically synthesized
accatttgtagttataattaat

SEQ ID NO: 57747 - DNA, 22 bp, Artificial Sequence
  chemically synthesized
gtagttataattaatgcattcc

SEQ ID NO: 57748 - DNA, 22 bp, Artificial Sequence
  chemically synthesized
tagttataattaatgcattccg

SEQ ID NO: 57749 - DNA, 22 bp, Artificial Sequence
  chemically synthesized
taattaatgcattccgtactgg

SEQ ID NO: 57750 - DNA, 22 bp, Artificial Sequence
  chemically synthesized
atgcattccgtactggttgtaa

SEQ ID NO: 57751 - DNA, 22 bp, Artificial Sequence
  chemically synthesized
cgtactggttgtaaaaagtgtg

SEQ ID NO: 57752 - DNA, 22 bp, Artificial Sequence
  chemically synthesized
gttgtaaaaagtgtgcttgcat

SEQ ID NO: 57753 - DNA, 22 bp, Artificial Sequence
  chemically synthesized
taaaaagtgtgcttgcatttaa

SEQ ID NO: 57754 - DNA, 22 bp, Artificial Sequence
  chemically synthesized
gcatttaattgcaagtcagggt

SEQ ID NO: 57755 - DNA, 22 bp, Artificial Sequence
  chemically synthesized
catttaattgcaagtcagggta

SEQ ID NO: 57756 - DNA, 22 bp, Artificial Sequence
  chemically synthesized
aattgcaagtcagggtaaatta

SEQ ID NO: 57757 - DNA, 22 bp, Artificial Sequence
  chemically synthesized
attgcaagtcagggtaaattaa

SEQ ID NO: 57758 - DNA, 22 bp, Artificial Sequence
  chemically synthesized
caagtcagggtaaattaatgga

SEQ ID NO: 57759 - DNA, 22 bp, Artificial Sequence
  chemically synthesized
atggatatgatttaaaacaaaa

SEQ ID NO: 57760 - DNA, 22 bp, Artificial Sequence
  chemically synthesized
aaaacaaaactcacttaaaata

SEQ ID NO: 57761 - DNA, 22 bp, Artificial Sequence
  chemically synthesized
aaacaaaactcacttaaaatat

SEQ ID NO: 57762 - DNA, 22 bp, Artificial Sequence
  chemically synthesized
acttaaaatattcttgcagaac

SEQ ID NO: 57763 - DNA, 22 bp, Artificial Sequence
  chemically synthesized
aaaatattcttgcagaacgcaa

SEQ ID NO: 57764 - DNA, 22 bp, Artificial Sequence
  chemically synthesized
aaatattcttgcagaacgcaaa

SEQ ID NO: 57765 - DNA, 22 bp, Artificial Sequence
  chemically synthesized
ttgcagaacgcaaaggaggggg

SEQ ID NO: 57766 - DNA, 22 bp, Artificial Sequence
  chemically synthesized
gcagaacgcaaaggagggggca

SEQ ID NO: 57767 - DNA, 22 bp, Artificial Sequence
  chemically synthesized
cagaacgcaaaggagggggcag

SEQ ID NO: 57768 - DNA, 22 bp, Artificial Sequence
  chemically synthesized
aatttattttctggtttagtgt

SEQ ID NO: 57769 - DNA, 22 bp, Artificial Sequence
  chemically synthesized
atttattttctggtttagtgtt

SEQ ID NO: 57770 - DNA, 22 bp, Artificial Sequence
  chemically synthesized
attttctggtttagtgttagtg

SEQ ID NO: 57771 - DNA, 22 bp, Artificial Sequence
  chemically synthesized
ttttctggtttagtgttagtgt

SEQ ID NO: 57772 - DNA, 22 bp, Artificial Sequence
  chemically synthesized
tctggtttagtgttagtgtgag

SEQ ID NO: 57773 - DNA, 22 bp, Artificial Sequence
  chemically synthesized
ctggtttagtgttagtgtgaga

SEQ ID NO: 57774 - DNA, 22 bp, Artificial Sequence
  chemically synthesized
tggtttagtgttagtgtgagag

SEQ ID NO: 57775 - DNA, 22 bp, Artificial Sequence
  chemically synthesized
gtttagtgttagtgtgagaggg

SEQ ID NO: 57776 - DNA, 22 bp, Artificial Sequence
  chemically synthesized
agtgttagtgtgagagggtcga

SEQ ID NO: 57777 - DNA, 22 bp, Artificial Sequence
  chemically synthesized
gtgttagtgtgagagggtcgaa

SEQ ID NO: 57778 - DNA, 22 bp, Artificial Sequence
  chemically synthesized
gtgtgagagggtcgaaaagatt

SEQ ID NO: 57779 - DNA, 22 bp, Artificial Sequence
  chemically synthesized
tgtgggtccaacgggatttgtg

SEQ ID NO: 57780 - DNA, 22 bp, Artificial Sequence
  chemically synthesized
tgggtccaacgggatttgtgtc

SEQ ID NO: 57781 - DNA, 22 bp, Artificial Sequence
  chemically synthesized
gtgtctgtgtgtgcaggaccgt

SEQ ID NO: 57782 - DNA, 22 bp, Artificial Sequence
  chemically synthesized
tgtctgtgtgtgcaggaccgtc

SEQ ID NO: 57783 - DNA, 22 bp, Artificial Sequence
  chemically synthesized
tgtgtgcaggaccgtcgggcaa

SEQ ID NO: 57784 - DNA, 22 bp, Artificial Sequence
  chemically synthesized
gaccggagtagggtagccagga

SEQ ID NO: 57785 - DNA, 22 bp, Artificial Sequence
  chemically synthesized
tttttttttttttctctaattt

SEQ ID NO: 57786 - DNA, 22 bp, Artificial Sequence
  chemically synthesized
tttttttttttctctaatttct

SEQ ID NO: 57787 - DNA, 22 bp, Artificial Sequence
  chemically synthesized
ttttttttttctctaatttctg

SEQ ID NO: 57788 - DNA, 22 bp, Artificial Sequence
  chemically synthesized
tttttttttctctaatttctga

SEQ ID NO: 57789 - DNA, 22 bp, Artificial Sequence
  chemically synthesized
ttttttttctctaatttctgag

SEQ ID NO: 57790 - DNA, 22 bp, Artificial Sequence
  chemically synthesized
tttttttctctaatttctgagg

SEQ ID NO: 57791 - DNA, 22 bp, Artificial Sequence
  chemically synthesized
ttttttctctaatttctgaggt

SEQ ID NO: 57792 - DNA, 22 bp, Artificial Sequence
  chemically synthesized
tttttctctaatttctgaggtt

SEQ ID NO: 57793 - DNA, 22 bp, Artificial Sequence
  chemically synthesized
ttttctctaatttctgaggttg

SEQ ID NO: 57794 - DNA, 22 bp, Artificial Sequence
  chemically synthesized
tttctctaatttctgaggttgc

SEQ ID NO: 57795 - DNA, 22 bp, Artificial Sequence
  chemically synthesized
ttctctaatttctgaggttgcc

SEQ ID NO: 57796 - DNA, 22 bp, Artificial Sequence
  chemically synthesized
tctctaatttctgaggttgcca

SEQ ID NO: 57797 - DNA, 22 bp, Artificial Sequence
  chemically synthesized
ctctaatttctgaggttgccag

SEQ ID NO: 57798 - DNA, 22 bp, Artificial Sequence
  chemically synthesized
tctaatttctgaggttgccagg

SEQ ID NO: 57799 - DNA, 22 bp, Artificial Sequence
  chemically synthesized
taatttctgaggttgccaggag

SEQ ID NO: 57800 - DNA, 22 bp, Artificial Sequence
  chemically synthesized
atttctgaggttgccaggaggg

SEQ ID NO: 57801 - DNA, 22 bp, Artificial Sequence
  chemically synthesized
ctgaggttgccaggaggggctt

SEQ ID NO: 57802 - DNA, 22 bp, Artificial Sequence
  chemically synthesized
tgaggttgccaggaggggctta

SEQ ID NO: 57803 - DNA, 22 bp, Artificial Sequence
  chemically synthesized
aggttgccaggaggggcttaag

SEQ ID NO: 57804 - DNA, 22 bp, Artificial Sequence
  chemically synthesized
ccaggaggggcttaagcaaagt

SEQ ID NO: 57805 - DNA, 22 bp, Artificial Sequence
  chemically synthesized
aagcaaagtggtcaagtccatc

SEQ ID NO: 57806 - DNA, 22 bp, Artificial Sequence
  chemically synthesized
agcaaagtggtcaagtccatct

SEQ ID NO: 57807 - DNA, 22 bp, Artificial Sequence
  chemically synthesized
ctccggagaaggtggtaaagaa

SEQ ID NO: 57808 - DNA, 22 bp, Artificial Sequence
  chemically synthesized
cggagaaggtggtaaagaaaag

SEQ ID NO: 57809 - DNA, 22 bp, Artificial Sequence
  chemically synthesized
gtggcaagagggaaggagcaca

SEQ ID NO: 57810 - DNA, 22 bp, Artificial Sequence
  chemically synthesized
tacattgggagcgttactctcc

SEQ ID NO: 57811 - DNA, 22 bp, Artificial Sequence
  chemically synthesized
ggagcgttactctccctggcca

SEQ ID NO: 57812 - DNA, 22 bp, Artificial Sequence
  chemically synthesized
ctctccctggccatggtgtagc

SEQ ID NO: 57813 - DNA, 22 bp, Artificial Sequence
  chemically synthesized
tccctggccatggtgtagccag

SEQ ID NO: 57814 - DNA, 22 bp, Artificial Sequence
  chemically synthesized
cctggccatggtgtagccagac

SEQ ID NO: 57815 - DNA, 22 bp, Artificial Sequence
  chemically synthesized
gccatggtgtagccagactggt

SEQ ID NO: 57816 - DNA, 22 bp, Artificial Sequence
  chemically synthesized
gtttagcagacagaatgataga

SEQ ID NO: 57817 - DNA, 22 bp, Artificial Sequence
  chemically synthesized
agcagacagaatgatagattgt

SEQ ID NO: 57818 - DNA, 22 bp, Artificial Sequence
  chemically synthesized
gcagacagaatgatagattgtt

SEQ ID NO: 57819 - DNA, 22 bp, Artificial Sequence
  chemically synthesized
ttttgtcaggggtcccagggtg

SEQ ID NO: 57820 - DNA, 22 bp, Artificial Sequence
  chemically synthesized
tgtcaggggtcccagggtgcgc

SEQ ID NO: 57821 - DNA, 22 bp, Artificial Sequence
  chemically synthesized
gtcaggggtcccagggtgcgcc

SEQ ID NO: 57822 - DNA, 22 bp, Artificial Sequence
  chemically synthesized
tcaggggtcccagggtgcgccc

SEQ ID NO: 57823 - DNA, 22 bp, Artificial Sequence
  chemically synthesized
aacttgaagcactttgtttatc

SEQ ID NO: 57824 - DNA, 22 bp, Artificial Sequence
  chemically synthesized
gaagcactttgtttatcttgaa

SEQ ID NO: 57825 - DNA, 22 bp, Artificial Sequence
  chemically synthesized
aagcactttgtttatcttgaat

SEQ ID NO: 57826 - DNA, 22 bp, Artificial Sequence
  chemically synthesized
tgtttatcttgaatagaaaggg

SEQ ID NO: 57827 - DNA, 22 bp, Artificial Sequence
  chemically synthesized
gtttatcttgaatagaaaggga

SEQ ID NO: 57828 - DNA, 22 bp, Artificial Sequence
  chemically synthesized
tttatcttgaatagaaagggaa

SEQ ID NO: 57829 - DNA, 22 bp, Artificial Sequence
  chemically synthesized
atcttgaatagaaagggaaaag

SEQ ID NO: 57830 - DNA, 22 bp, Artificial Sequence
  chemically synthesized
tcttgaatagaaagggaaaagc

SEQ ID NO: 57831 - DNA, 22 bp, Artificial Sequence
  chemically synthesized
gaatagaaagggaaaagcgcag

SEQ ID NO: 57832 - DNA, 22 bp, Artificial Sequence
  chemically synthesized
aatagaaagggaaaagcgcaga

SEQ ID NO: 57833 - DNA, 22 bp, Artificial Sequence
  chemically synthesized
gtttttaggagctcgaaagagg

SEQ ID NO: 57834 - DNA, 22 bp, Artificial Sequence
  chemically synthesized
ttaggagctcgaaagaggtagg

SEQ ID NO: 57835 - DNA, 22 bp, Artificial Sequence
  chemically synthesized
taggagctcgaaagaggtagga

SEQ ID NO: 57836 - DNA, 22 bp, Artificial Sequence
  chemically synthesized
aggagctcgaaagaggtaggag

SEQ ID NO: 57837 - DNA, 22 bp, Artificial Sequence
  chemically synthesized
ggagctcgaaagaggtaggaga

SEQ ID NO: 57838 - DNA, 22 bp, Artificial Sequence
  chemically synthesized
gaaagaggtaggagaacagaga

SEQ ID NO: 57839 - DNA, 22 bp, Artificial Sequence
  chemically synthesized
aggaggggtagtgggaggtggg

SEQ ID NO: 57840 - DNA, 22 bp, Artificial Sequence
  chemically synthesized
gttgtggttgtccattaacaga

SEQ ID NO: 57841 - DNA, 22 bp, Artificial Sequence
  chemically synthesized
tggttgtccattaacagatgaa

SEQ ID NO: 57842 - DNA, 22 bp, Artificial Sequence
  chemically synthesized
tccattaacagatgaacttggc

SEQ ID NO: 57843 - DNA, 22 bp, Artificial Sequence
  chemically synthesized
acagatgaacttggccgagggc

SEQ ID NO: 57844 - DNA, 22 bp, Artificial Sequence
  chemically synthesized
ggccgagggccaggctttagat

SEQ ID NO: 57845 - DNA, 22 bp, Artificial Sequence
  chemically synthesized
gccgagggccaggctttagatg

SEQ ID NO: 57846 - DNA, 22 bp, Artificial Sequence
  chemically synthesized
tagatgagagcgtgtcagggcc

SEQ ID NO: 57847 - DNA, 22 bp, Artificial Sequence
  chemically synthesized
agatgagagcgtgtcagggccc

SEQ ID NO: 57848 - DNA, 22 bp, Artificial Sequence
  chemically synthesized
gatgagagcgtgtcagggcccc

SEQ ID NO: 57849 - DNA, 22 bp, Artificial Sequence
  chemically synthesized
ttcagtgttttttttttccttt

SEQ ID NO: 57850 - DNA, 22 bp, Artificial Sequence
  chemically synthesized
tcagtgttttttttttcctttt

SEQ ID NO: 57851 - DNA, 22 bp, Artificial Sequence
  chemically synthesized
cagtgttttttttttccttttt

SEQ ID NO: 57852 - DNA, 22 bp, Artificial Sequence
  chemically synthesized
agtgttttttttttcctttttc

SEQ ID NO: 57853 - DNA, 22 bp, Artificial Sequence
  chemically synthesized
tttttttcctttttctttcttt

SEQ ID NO: 57854 - DNA, 22 bp, Artificial Sequence
  chemically synthesized
ttttttcctttttctttctttc

SEQ ID NO: 57855 - DNA, 22 bp, Artificial Sequence
  chemically synthesized
tttttcctttttctttctttct

SEQ ID NO: 57856 - DNA, 22 bp, Artificial Sequence
  chemically synthesized
ttttcctttttctttctttctt

SEQ ID NO: 57857 - DNA, 22 bp, Artificial Sequence
  chemically synthesized
tttcctttttctttctttcttt

SEQ ID NO: 57858 - DNA, 22 bp, Artificial Sequence
  chemically synthesized
ttcctttttctttctttctttt

SEQ ID NO: 57859 - DNA, 22 bp, Artificial Sequence
  chemically synthesized
tcctttttctttctttcttttt

SEQ ID NO: 57860 - DNA, 22 bp, Artificial Sequence
  chemically synthesized
cctttttctttctttctttttt

SEQ ID NO: 57861 - DNA, 22 bp, Artificial Sequence
  chemically synthesized
ctttttctttctttctttttta

SEQ ID NO: 57862 - DNA, 22 bp, Artificial Sequence
  chemically synthesized
tttctttctttcttttttaaat

SEQ ID NO: 57863 - DNA, 22 bp, Artificial Sequence
  chemically synthesized
ttctttctttcttttttaaata

SEQ ID NO: 57864 - DNA, 22 bp, Artificial Sequence
  chemically synthesized
tctttctttcttttttaaatac

SEQ ID NO: 57865 - DNA, 22 bp, Artificial Sequence
  chemically synthesized
ctttctttcttttttaaatacc

SEQ ID NO: 57866 - DNA, 22 bp, Artificial Sequence
  chemically synthesized
tttctttcttttttaaatacct

SEQ ID NO: 57867 - DNA, 22 bp, Artificial Sequence
  chemically synthesized
tctttcttttttaaatacctgc

SEQ ID NO: 57868 - DNA, 22 bp, Artificial Sequence
  chemically synthesized
ctttcttttttaaatacctgct

SEQ ID NO: 57869 - DNA, 22 bp, Artificial Sequence
  chemically synthesized
tttcttttttaaatacctgctg

SEQ ID NO: 57870 - DNA, 22 bp, Artificial Sequence
  chemically synthesized
tcttttttaaatacctgctgac

SEQ ID NO: 57871 - DNA, 22 bp, Artificial Sequence
  chemically synthesized
cttttttaaatacctgctgact

SEQ ID NO: 57872 - DNA, 22 bp, Artificial Sequence
  chemically synthesized
ttttttaaatacctgctgactg

SEQ ID NO: 57873 - DNA, 22 bp, Artificial Sequence
  chemically synthesized
ttttaaatacctgctgactgta

SEQ ID NO: 57874 - DNA, 22 bp, Artificial Sequence
  chemically synthesized
tttaaatacctgctgactgtac

SEQ ID NO: 57875 - DNA, 22 bp, Artificial Sequence
  chemically synthesized
ttaaatacctgctgactgtaca

SEQ ID NO: 57876 - DNA, 22 bp, Artificial Sequence
  chemically synthesized
taaatacctgctgactgtacat

SEQ ID NO: 57877 - DNA, 22 bp, Artificial Sequence
  chemically synthesized
aaatacctgctgactgtacatc

SEQ ID NO: 57878 - DNA, 22 bp, Artificial Sequence
  chemically synthesized
aatacctgctgactgtacatca

SEQ ID NO: 57879 - DNA, 22 bp, Artificial Sequence
  chemically synthesized
ctgactgtacatcaaatgctcc

SEQ ID NO: 57880 - DNA, 22 bp, Artificial Sequence
  chemically synthesized
actgtacatcaaatgctccctg

SEQ ID NO: 57881 - DNA, 22 bp, Artificial Sequence
  chemically synthesized
tacatcaaatgctccctggtct

SEQ ID NO: 57882 - DNA, 22 bp, Artificial Sequence
  chemically synthesized
cctggtcttttggctaaaggca

SEQ ID NO: 57883 - DNA, 22 bp, Artificial Sequence
  chemically synthesized
gtcttttggctaaaggcaaaaa

SEQ ID NO: 57884 - DNA, 22 bp, Artificial Sequence
  chemically synthesized
ttggctaaaggcaaaaaaataa

SEQ ID NO: 57885 - DNA, 22 bp, Artificial Sequence
  chemically synthesized
tggctaaaggcaaaaaaataaa

SEQ ID NO: 57886 - DNA, 22 bp, Artificial Sequence
  chemically synthesized
ggctaaaggcaaaaaaataaaa

SEQ ID NO: 57887 - DNA, 22 bp, Artificial Sequence
  chemically synthesized
gctaaaggcaaaaaaataaaaa

SEQ ID NO: 57888 - DNA, 22 bp, Artificial Sequence
  chemically synthesized
aaggcaaaaaaataaaaaataa

SEQ ID NO: 57889 - DNA, 22 bp, Artificial Sequence
  chemically synthesized
aattttttccctcctctgaacc

SEQ ID NO: 57890 - DNA, 22 bp, Artificial Sequence
  chemically synthesized
tttccctcctctgaaccagttg

SEQ ID NO: 57891 - DNA, 22 bp, Artificial Sequence
  chemically synthesized
ttccctcctctgaaccagttga

SEQ ID NO: 57892 - DNA, 22 bp, Artificial Sequence
  chemically synthesized
tccctcctctgaaccagttgag

SEQ ID NO: 57893 - DNA, 22 bp, Artificial Sequence
  chemically synthesized
ccctcctctgaaccagttgagg

SEQ ID NO: 57894 - DNA, 22 bp, Artificial Sequence
  chemically synthesized
cctcctctgaaccagttgaggc

SEQ ID NO: 57895 - DNA, 22 bp, Artificial Sequence
  chemically synthesized
ctctgaaccagttgaggccagt

SEQ ID NO: 57896 - DNA, 22 bp, Artificial Sequence
  chemically synthesized
tgaaccagttgaggccagtctt

SEQ ID NO: 57897 - DNA, 22 bp, Artificial Sequence
  chemically synthesized
aaccagttgaggccagtctttt

SEQ ID NO: 57898 - DNA, 22 bp, Artificial Sequence
  chemically synthesized
aggccagtcttttggctacata

SEQ ID NO: 57899 - DNA, 22 bp, Artificial Sequence
  chemically synthesized
ttggctacatatgcgggttcta

SEQ ID NO: 57900 - DNA, 22 bp, Artificial Sequence
  chemically synthesized
tggctacatatgcgggttctat

SEQ ID NO: 57901 - DNA, 22 bp, Artificial Sequence
  chemically synthesized
ggctacatatgcgggttctatc

SEQ ID NO: 57902 - DNA, 22 bp, Artificial Sequence
  chemically synthesized
gctacatatgcgggttctatca

SEQ ID NO: 57903 - DNA, 22 bp, Artificial Sequence
  chemically synthesized
catatgcgggttctatcatctt

SEQ ID NO: 57904 - DNA, 22 bp, Artificial Sequence
  chemically synthesized
tatcatctttcctggcttgccg

SEQ ID NO: 57905 - DNA, 22 bp, Artificial Sequence
  chemically synthesized
tcatctttcctggcttgccgtt

SEQ ID NO: 57906 - DNA, 22 bp, Artificial Sequence
  chemically synthesized
tcctggcttgccgttgggaaaa

SEQ ID NO: 57907 - DNA, 22 bp, Artificial Sequence
  chemically synthesized
cctggcttgccgttgggaaaaa

SEQ ID NO: 57908 - DNA, 22 bp, Artificial Sequence
  chemically synthesized
ctggcttgccgttgggaaaaaa

SEQ ID NO: 57909 - DNA, 22 bp, Artificial Sequence
  chemically synthesized
gcttgccgttgggaaaaaaagt

SEQ ID NO: 57910 - DNA, 22 bp, Artificial Sequence
  chemically synthesized
gccgttgggaaaaaaagttgtg

SEQ ID NO: 57911 - DNA, 22 bp, Artificial Sequence
  chemically synthesized
ccgttgggaaaaaaagttgtga

SEQ ID NO: 57912 - DNA, 22 bp, Artificial Sequence
  chemically synthesized
ggaaaaaaagttgtgataacgc

SEQ ID NO: 57913 - DNA, 22 bp, Artificial Sequence
  chemically synthesized
tgataacgccagtaacccgagg

SEQ ID NO: 57914 - DNA, 22 bp, Artificial Sequence
  chemically synthesized
ggttgtgttcaggcgaccaggt

SEQ ID NO: 57915 - DNA, 22 bp, Artificial Sequence
  chemically synthesized
gttgtgttcaggcgaccaggtg

SEQ ID NO: 57916 - DNA, 22 bp, Artificial Sequence
  chemically synthesized
tgttcaggcgaccaggtgtgag

SEQ ID NO: 57917 - DNA, 22 bp, Artificial Sequence
  chemically synthesized
aggcgaccaggtgtgagagctc

SEQ ID NO: 57918 - DNA, 22 bp, Artificial Sequence
  chemically synthesized
gtggtgcagtggggtggggcgt

SEQ ID NO: 57919 - DNA, 22 bp, Artificial Sequence
  chemically synthesized
cgtgtgcaggtaagaaatcagt

SEQ ID NO: 57920 - DNA, 22 bp, Artificial Sequence
  chemically synthesized
ttttttttttttttttttaaat

SEQ ID NO: 57921 - DNA, 22 bp, Artificial Sequence
  chemically synthesized
ttttttttttttttttaaatgg

SEQ ID NO: 57922 - DNA, 22 bp, Artificial Sequence
  chemically synthesized
tttttttttttttttaaatggc

SEQ ID NO: 57923 - DNA, 22 bp, Artificial Sequence
  chemically synthesized
ttttttttttttttaaatggct

SEQ ID NO: 57924 - DNA, 22 bp, Artificial Sequence
  chemically synthesized
tttttttttttttaaatggctg

SEQ ID NO: 57925 - DNA, 22 bp, Artificial Sequence
  chemically synthesized
ttttttttttttaaatggctga

SEQ ID NO: 57926 - DNA, 22 bp, Artificial Sequence
  chemically synthesized
tttttttttttaaatggctgaa

SEQ ID NO: 57927 - DNA, 22 bp, Artificial Sequence
  chemically synthesized
ttttttttttaaatggctgaag

SEQ ID NO: 57928 - DNA, 22 bp, Artificial Sequence
  chemically synthesized
tttttttttaaatggctgaagt

SEQ ID NO: 57929 - DNA, 22 bp, Artificial Sequence
  chemically synthesized
ttttttttaaatggctgaagtt

SEQ ID NO: 57930 - DNA, 22 bp, Artificial Sequence
  chemically synthesized
tttttttaaatggctgaagttt

SEQ ID NO: 57931 - DNA, 22 bp, Artificial Sequence
  chemically synthesized
ttttttaaatggctgaagttta

SEQ ID NO: 57932 - DNA, 22 bp, Artificial Sequence
  chemically synthesized
tttttaaatggctgaagtttaa

SEQ ID NO: 57933 - DNA, 22 bp, Artificial Sequence
  chemically synthesized
ttttaaatggctgaagtttaac

SEQ ID NO: 57934 - DNA, 22 bp, Artificial Sequence
  chemically synthesized
tttaaatggctgaagtttaact

SEQ ID NO: 57935 - DNA, 22 bp, Artificial Sequence
  chemically synthesized
ttaaatggctgaagtttaactt

SEQ ID NO: 57936 - DNA, 22 bp, Artificial Sequence
  chemically synthesized
taaatggctgaagtttaacttg

SEQ ID NO: 57937 - DNA, 22 bp, Artificial Sequence
  chemically synthesized
aaatggctgaagtttaacttgt

SEQ ID NO: 57938 - DNA, 22 bp, Artificial Sequence
  chemically synthesized
aatggctgaagtttaacttgtt

SEQ ID NO: 57939 - DNA, 22 bp, Artificial Sequence
  chemically synthesized
aagtttaacttgttggaagggc

SEQ ID NO: 57940 - DNA, 22 bp, Artificial Sequence
  chemically synthesized
aacttgttggaagggcctgtga

SEQ ID NO: 57941 - DNA, 22 bp, Artificial Sequence
  chemically synthesized
acttgttggaagggcctgtgaa

SEQ ID NO: 57942 - DNA, 22 bp, Artificial Sequence
  chemically synthesized
gttggaagggcctgtgaattaa

SEQ ID NO: 57943 - DNA, 22 bp, Artificial Sequence
  chemically synthesized
ttggaagggcctgtgaattaag

SEQ ID NO: 57944 - DNA, 22 bp, Artificial Sequence
  chemically synthesized
gaagggcctgtgaattaagctg

SEQ ID NO: 57945 - DNA, 22 bp, Artificial Sequence
  chemically synthesized
tgaattaagctgtcggtggctg

SEQ ID NO: 57946 - DNA, 22 bp, Artificial Sequence
  chemically synthesized
agctgtcggtggctgagaacga

SEQ ID NO: 57947 - DNA, 22 bp, Artificial Sequence
  chemically synthesized
tcggtggctgagaacgataata

SEQ ID NO: 57948 - DNA, 22 bp, Artificial Sequence
  chemically synthesized
agaacgataatatgcaaggaag

SEQ ID NO: 57949 - DNA, 22 bp, Artificial Sequence
  chemically synthesized
aaggaaggctcaagaaaggcca

SEQ ID NO: 57950 - DNA, 22 bp, Artificial Sequence
  chemically synthesized
aagaaaggccaggggtggggaa

SEQ ID NO: 57951 - DNA, 22 bp, Artificial Sequence
  chemically synthesized
ttgttagaggcgcagcctttcc

SEQ ID NO: 57952 - DNA, 22 bp, Artificial Sequence
  chemically synthesized
gttagaggcgcagcctttcctg

SEQ ID NO: 57953 - DNA, 22 bp, Artificial Sequence
  chemically synthesized
ttagaggcgcagcctttcctgg

SEQ ID NO: 57954 - DNA, 22 bp, Artificial Sequence
  chemically synthesized
gaggcgcagcctttcctgggca

SEQ ID NO: 57955 - DNA, 22 bp, Artificial Sequence
  chemically synthesized
tcctgggcaggacccaggaccg

SEQ ID NO: 57956 - DNA, 22 bp, Artificial Sequence
  chemically synthesized
cctgggcaggacccaggaccga

SEQ ID NO: 57957 - DNA, 22 bp, Artificial Sequence
  chemically synthesized
ctgggcaggacccaggaccgat

SEQ ID NO: 57958 - DNA, 22 bp, Artificial Sequence
  chemically synthesized
ggcaggacccaggaccgatggc

SEQ ID NO: 57959 - DNA, 22 bp, Artificial Sequence
  chemically synthesized
gggcttgttttgttctcgattt

SEQ ID NO: 57960 - DNA, 22 bp, Artificial Sequence
  chemically synthesized
ggcttgttttgttctcgatttt

SEQ ID NO: 57961 - DNA, 22 bp, Artificial Sequence
  chemically synthesized
gttttgttctcgattttcttat

SEQ ID NO: 57962 - DNA, 22 bp, Artificial Sequence
  chemically synthesized
ttttgttctcgattttcttatc

SEQ ID NO: 57963 - DNA, 22 bp, Artificial Sequence
  chemically synthesized
tgttctcgattttcttatcttc

SEQ ID NO: 57964 - DNA, 22 bp, Artificial Sequence
  chemically synthesized
gttctcgattttcttatcttct

SEQ ID NO: 57965 - DNA, 22 bp, Artificial Sequence
  chemically synthesized
ttctcgattttcttatcttctt

SEQ ID NO: 57966 - DNA, 22 bp, Artificial Sequence
  chemically synthesized
tcgattttcttatcttcttggc

SEQ ID NO: 57967 - DNA, 22 bp, Artificial Sequence
  chemically synthesized
gattttcttatcttcttggcct

SEQ ID NO: 57968 - DNA, 22 bp, Artificial Sequence
  chemically synthesized
tcttatcttcttggcctcttcc

SEQ ID NO: 57969 - DNA, 22 bp, Artificial Sequence
  chemically synthesized
cttatcttcttggcctcttcct

SEQ ID NO: 57970 - DNA, 22 bp, Artificial Sequence
  chemically synthesized
ttatcttcttggcctcttcctg

SEQ ID NO: 57971 - DNA, 22 bp, Artificial Sequence
  chemically synthesized
atcttcttggcctcttcctgtg

SEQ ID NO: 57972 - DNA, 22 bp, Artificial Sequence
  chemically synthesized
tcttcttggcctcttcctgtgt

SEQ ID NO: 57973 - DNA, 22 bp, Artificial Sequence
  chemically synthesized
cttggcctcttcctgtgttttt

SEQ ID NO: 57974 - DNA, 22 bp, Artificial Sequence
  chemically synthesized
ttggcctcttcctgtgtttttt

SEQ ID NO: 57975 - DNA, 22 bp, Artificial Sequence
  chemically synthesized
ggcctcttcctgtgttttttag

SEQ ID NO: 57976 - DNA, 22 bp, Artificial Sequence
  chemically synthesized
gcctcttcctgtgttttttagt

SEQ ID NO: 57977 - DNA, 22 bp, Artificial Sequence
  chemically synthesized
ttcctgtgttttttagtttatt

SEQ ID NO: 57978 - DNA, 22 bp, Artificial Sequence
  chemically synthesized
cctgtgttttttagtttattgt

SEQ ID NO: 57979 - DNA, 22 bp, Artificial Sequence
  chemically synthesized
ctgtgttttttagtttattgtg

SEQ ID NO: 57980 - DNA, 22 bp, Artificial Sequence
  chemically synthesized
tgttttttagtttattgtgaca

SEQ ID NO: 57981 - DNA, 22 bp, Artificial Sequence
  chemically synthesized
tttagtttattgtgacattatg

SEQ ID NO: 57982 - DNA, 22 bp, Artificial Sequence
  chemically synthesized
ttagtttattgtgacattatgc

SEQ ID NO: 57983 - DNA, 22 bp, Artificial Sequence
  chemically synthesized
tagtttattgtgacattatgca

SEQ ID NO: 57984 - DNA, 22 bp, Artificial Sequence
  chemically synthesized
agtttattgtgacattatgcat

SEQ ID NO: 57985 - DNA, 22 bp, Artificial Sequence
  chemically synthesized
gtttattgtgacattatgcatt

SEQ ID NO: 57986 - DNA, 22 bp, Artificial Sequence
  chemically synthesized
attgtgacattatgcattcata

SEQ ID NO: 57987 - DNA, 22 bp, Artificial Sequence
  chemically synthesized
ttgtgacattatgcattcatat

SEQ ID NO: 57988 - DNA, 22 bp, Artificial Sequence
  chemically synthesized
tgacattatgcattcatatatg

SEQ ID NO: 57989 - DNA, 22 bp, Artificial Sequence
  chemically synthesized
tgcattcatatatgaatgttgg

SEQ ID NO: 57990 - DNA, 22 bp, Artificial Sequence
  chemically synthesized
atatatgaatgttggcaagcag

SEQ ID NO: 57991 - DNA, 22 bp, Artificial Sequence
  chemically synthesized
gcaagcaggagtcatcatccca

SEQ ID NO: 57992 - DNA, 22 bp, Artificial Sequence
  chemically synthesized
cctgacatttttagctctttta

SEQ ID NO: 57993 - DNA, 22 bp, Artificial Sequence
  chemically synthesized
ctgacatttttagctcttttaa

SEQ ID NO: 57994 - DNA, 22 bp, Artificial Sequence
  chemically synthesized
acatttttagctcttttaatgt

SEQ ID NO: 57995 - DNA, 22 bp, Artificial Sequence
  chemically synthesized
ttagctcttttaatgtgcagtc

SEQ ID NO: 57996 - DNA, 22 bp, Artificial Sequence
  chemically synthesized
tagctcttttaatgtgcagtct

SEQ ID NO: 57997 - DNA, 22 bp, Artificial Sequence
  chemically synthesized
agctcttttaatgtgcagtctt

SEQ ID NO: 57998 - DNA, 22 bp, Artificial Sequence
  chemically synthesized
gctcttttaatgtgcagtcttt

SEQ ID NO: 57999 - DNA, 22 bp, Artificial Sequence
  chemically synthesized
ttttaatgtgcagtctttgccc

SEQ ID NO: 58000 - DNA, 22 bp, Artificial Sequence
  chemically synthesized
ttaatgtgcagtctttgccctc

SEQ ID NO: 58001 - DNA, 22 bp, Artificial Sequence
  chemically synthesized
taatgtgcagtctttgccctcc

SEQ ID NO: 58002 - DNA, 22 bp, Artificial Sequence
  chemically synthesized
aatgtgcagtctttgccctcct

SEQ ID NO: 58003 - DNA, 22 bp, Artificial Sequence
  chemically synthesized
atgtgcagtctttgccctcctg

SEQ ID NO: 58004 - DNA, 22 bp, Artificial Sequence
  chemically synthesized
tgccctcctgccacaagtggcg

SEQ ID NO: 58005 - DNA, 22 bp, Artificial Sequence
  chemically synthesized
gccctcctgccacaagtggcga

SEQ ID NO: 58006 - DNA, 22 bp, Artificial Sequence
  chemically synthesized
ccctcctgccacaagtggcgaa

SEQ ID NO: 58007 - DNA, 22 bp, Artificial Sequence
  chemically synthesized
ctgccacaagtggcgaagtaat

SEQ ID NO: 58008 - DNA, 22 bp, Artificial Sequence
  chemically synthesized
ccacaagtggcgaagtaattga

SEQ ID NO: 58009 - DNA, 22 bp, Artificial Sequence
  chemically synthesized
aatttccctgttactaactggc

SEQ ID NO: 58010 - DNA, 22 bp, Artificial Sequence
  chemically synthesized
ccctgttactaactggcaggag

SEQ ID NO: 58011 - DNA, 22 bp, Artificial Sequence
  chemically synthesized
cctgttactaactggcaggagg

SEQ ID NO: 58012 - DNA, 22 bp, Artificial Sequence
  chemically synthesized
ttactaactggcaggaggcatg

SEQ ID NO: 58013 - DNA, 22 bp, Artificial Sequence
  chemically synthesized
ctaactggcaggaggcatgttc

SEQ ID NO: 58014 - DNA, 22 bp, Artificial Sequence
  chemically synthesized
actggcaggaggcatgttctag

SEQ ID NO: 58015 - DNA, 22 bp, Artificial Sequence
  chemically synthesized
gcaggaggcatgttctagttcc

SEQ ID NO: 58016 - DNA, 22 bp, Artificial Sequence
  chemically synthesized
tagttcccaccagaggagctgc

SEQ ID NO: 58017 - DNA, 22 bp, Artificial Sequence
  chemically synthesized
gttcccaccagaggagctgctg

SEQ ID NO: 58018 - DNA, 22 bp, Artificial Sequence
  chemically synthesized
ccaccagaggagctgctggggc

SEQ ID NO: 58019 - DNA, 22 bp, Artificial Sequence
  chemically synthesized
ctggggctaaagctgggttcat

SEQ ID NO: 58020 - DNA, 22 bp, Artificial Sequence
  chemically synthesized
gggctaaagctgggttcataga

SEQ ID NO: 58021 - DNA, 22 bp, Artificial Sequence
  chemically synthesized
aagctgggttcatagaatccca

SEQ ID NO: 58022 - DNA, 22 bp, Artificial Sequence
  chemically synthesized
ggttcatagaatcccacctagg

SEQ ID NO: 58023 - DNA, 22 bp, Artificial Sequence
  chemically synthesized
atagaatcccacctaggggaca

SEQ ID NO: 58024 - DNA, 22 bp, Artificial Sequence
  chemically synthesized
ggggacaccagggctttcaagt

SEQ ID NO: 58025 - DNA, 22 bp, Artificial Sequence
  chemically synthesized
tcaagtggtttggggacctgtc

SEQ ID NO: 58026 - DNA, 22 bp, Artificial Sequence
  chemically synthesized
caagtggtttggggacctgtct

SEQ ID NO: 58027 - DNA, 22 bp, Artificial Sequence
  chemically synthesized
aagtggtttggggacctgtctg

SEQ ID NO: 58028 - DNA, 22 bp, Artificial Sequence
  chemically synthesized
ggggacctgtctgaaatgatat

SEQ ID NO: 58029 - DNA, 22 bp, Artificial Sequence
  chemically synthesized
gggacctgtctgaaatgatatt

SEQ ID NO: 58030 - DNA, 22 bp, Artificial Sequence
  chemically synthesized
tctgaaatgatattcacacaat

SEQ ID NO: 58031 - DNA, 22 bp, Artificial Sequence
  chemically synthesized
aaatgatattcacacaataaaa

SEQ ID NO: 58032 - DNA, 22 bp, Artificial Sequence
  chemically synthesized
acacaataaaaaatatttttcc

SEQ ID NO: 58033 - DNA, 22 bp, Artificial Sequence
  chemically synthesized
ttcccatcatagacttgaaaag

SEQ ID NO: 58034 - DNA, 22 bp, Artificial Sequence
  chemically synthesized
tcccatcatagacttgaaaagg

SEQ ID NO: 58035 - DNA, 22 bp, Artificial Sequence
  chemically synthesized
cccatcatagacttgaaaaggc

SEQ ID NO: 58036 - DNA, 22 bp, Artificial Sequence
  chemically synthesized
ccatcatagacttgaaaaggca

SEQ ID NO: 58037 - DNA, 22 bp, Artificial Sequence
  chemically synthesized
gaaaaggcaccattgtgcacat

SEQ ID NO: 58038 - DNA, 22 bp, Artificial Sequence
  chemically synthesized
aaaaggcaccattgtgcacatc

SEQ ID NO: 58039 - DNA, 22 bp, Artificial Sequence
  chemically synthesized
tgcacatctatataaaatgtga

SEQ ID NO: 58040 - DNA, 22 bp, Artificial Sequence
  chemically synthesized
tataaaatgtgataaaatcaca

SEQ ID NO: 58041 - DNA, 22 bp, Artificial Sequence
  chemically synthesized
acttcccctggctaggcctcat

SEQ ID NO: 58042 - DNA, 22 bp, Artificial Sequence
  chemically synthesized
cttcccctggctaggcctcata

SEQ ID NO: 58043 - DNA, 22 bp, Artificial Sequence
  chemically synthesized
cccctggctaggcctcataagg

SEQ ID NO: 58044 - DNA, 22 bp, Artificial Sequence
  chemically synthesized
ccctggctaggcctcataaggg

SEQ ID NO: 58045 - DNA, 22 bp, Artificial Sequence
  chemically synthesized
gctaggcctcataagggaggca

SEQ ID NO: 58046 - DNA, 22 bp, Artificial Sequence
  chemically synthesized
ggcctcataagggaggcaggat

SEQ ID NO: 58047 - DNA, 22 bp, Artificial Sequence
  chemically synthesized
ataagggaggcaggatttcctt

SEQ ID NO: 58048 - DNA, 22 bp, Artificial Sequence
  chemically synthesized
ccttctccttttctagtagcaa

SEQ ID NO: 58049 - DNA, 22 bp, Artificial Sequence
  chemically synthesized
cttctccttttctagtagcaaa

SEQ ID NO: 58050 - DNA, 22 bp, Artificial Sequence
  chemically synthesized
ctccttttctagtagcaaataa

SEQ ID NO: 58051 - DNA, 22 bp, Artificial Sequence
  chemically synthesized
tccttttctagtagcaaataaa

SEQ ID NO: 58052 - DNA, 22 bp, Artificial Sequence
  chemically synthesized
cttttctagtagcaaataaaaa

SEQ ID NO: 58053 - DNA, 22 bp, Artificial Sequence
  chemically synthesized
ttctagtagcaaataaaaactg

SEQ ID NO: 58054 - DNA, 22 bp, Artificial Sequence
  chemically synthesized
tctagtagcaaataaaaactgg

SEQ ID NO: 58055 - DNA, 22 bp, Artificial Sequence
  chemically synthesized
ctagtagcaaataaaaactggg

SEQ ID NO: 58056 - DNA, 22 bp, Artificial Sequence
  chemically synthesized
tagtagcaaataaaaactggga

SEQ ID NO: 58057 - DNA, 22 bp, Artificial Sequence
  chemically synthesized
gtagcaaataaaaactgggaaa

SEQ ID NO: 58058 - DNA, 22 bp, Artificial Sequence
  chemically synthesized
ggaaaatttgggggcctctggg

SEQ ID NO: 58059 - DNA, 22 bp, Artificial Sequence
  chemically synthesized
gggggcctctgggtttatccca

SEQ ID NO: 58060 - DNA, 22 bp, Artificial Sequence
  chemically synthesized
ggggcctctgggtttatcccat

SEQ ID NO: 58061 - DNA, 22 bp, Artificial Sequence
  chemically synthesized
tgggtttatcccatggatacct

SEQ ID NO: 58062 - DNA, 22 bp, Artificial Sequence
  chemically synthesized
ggtttatcccatggatacctgc

SEQ ID NO: 58063 - DNA, 22 bp, Artificial Sequence
  chemically synthesized
atcccatggatacctgcccccg

SEQ ID NO: 58064 - DNA, 22 bp, Artificial Sequence
  chemically synthesized
tcccatggatacctgcccccgc

SEQ ID NO: 58065 - DNA, 22 bp, Artificial Sequence
  chemically synthesized
cccccgctcccgcccgccaact

SEQ ID NO: 58066 - DNA, 22 bp, Artificial Sequence
  chemically synthesized
ccgcccgccaactcagccaagc

SEQ ID NO: 58067 - DNA, 22 bp, Artificial Sequence
  chemically synthesized
agccaagcccttagaggcagtc

SEQ ID NO: 58068 - DNA, 22 bp, Artificial Sequence
  chemically synthesized
agaggcagtcttctctcccacc

SEQ ID NO: 58069 - DNA, 22 bp, Artificial Sequence
  chemically synthesized
gaggcagtcttctctcccacct

SEQ ID NO: 58070 - DNA, 22 bp, Artificial Sequence
  chemically synthesized
ctctcccacctagatgtctttg

SEQ ID NO: 58071 - DNA, 22 bp, Artificial Sequence
  chemically synthesized
tctcccacctagatgtctttgt

SEQ ID NO: 58072 - DNA, 22 bp, Artificial Sequence
  chemically synthesized
tcccacctagatgtctttgtaa

SEQ ID NO: 58073 - DNA, 22 bp, Artificial Sequence
  chemically synthesized
ccacctagatgtctttgtaacc

SEQ ID NO: 58074 - DNA, 22 bp, Artificial Sequence
  chemically synthesized
gatgtctttgtaacctgagctg

SEQ ID NO: 58075 - DNA, 22 bp, Artificial Sequence
  chemically synthesized
tgtaacctgagctggtaagaaa

SEQ ID NO: 58076 - DNA, 22 bp, Artificial Sequence
  chemically synthesized
gtaacctgagctggtaagaaag

SEQ ID NO: 58077 - DNA, 22 bp, Artificial Sequence
  chemically synthesized
taacctgagctggtaagaaagg

SEQ ID NO: 58078 - DNA, 22 bp, Artificial Sequence
  chemically synthesized
agctggtaagaaagggaggagg

SEQ ID NO: 58079 - DNA, 22 bp, Artificial Sequence
  chemically synthesized
gtaagaaagggaggagggacag

SEQ ID NO: 58080 - DNA, 22 bp, Artificial Sequence
  chemically synthesized
gacatatgatgtatcttctttc

SEQ ID NO: 58081 - DNA, 22 bp, Artificial Sequence
  chemically synthesized
acatatgatgtatcttctttct

SEQ ID NO: 58082 - DNA, 22 bp, Artificial Sequence
  chemically synthesized
ctttcttttcttcttctctttg

SEQ ID NO: 58083 - DNA, 22 bp, Artificial Sequence
  chemically synthesized
tttcttttcttcttctctttga

SEQ ID NO: 58084 - DNA, 22 bp, Artificial Sequence
  chemically synthesized
tcttttcttcttctctttgatt

SEQ ID NO: 58085 - DNA, 22 bp, Artificial Sequence
  chemically synthesized
cttttcttcttctctttgatta

SEQ ID NO: 58086 - DNA, 22 bp, Artificial Sequence
  chemically synthesized
ttttcttcttctctttgattac

SEQ ID NO: 58087 - DNA, 22 bp, Artificial Sequence
  chemically synthesized
ttcttcttctctttgattacac

SEQ ID NO: 58088 - DNA, 22 bp, Artificial Sequence
  chemically synthesized
tcttcttctctttgattacacg

SEQ ID NO: 58089 - DNA, 22 bp, Artificial Sequence
  chemically synthesized
cttcttctctttgattacacga

SEQ ID NO: 58090 - DNA, 22 bp, Artificial Sequence
  chemically synthesized
ttcttctctttgattacacgaa

SEQ ID NO: 58091 - DNA, 22 bp, Artificial Sequence
  chemically synthesized
cttctctttgattacacgaaat

SEQ ID NO: 58092 - DNA, 22 bp, Artificial Sequence
  chemically synthesized
ttctctttgattacacgaaata

SEQ ID NO: 58093 - DNA, 22 bp, Artificial Sequence
  chemically synthesized
ctctttgattacacgaaataaa

SEQ ID NO: 58094 - DNA, 22 bp, Artificial Sequence
  chemically synthesized
tctttgattacacgaaataaaa

SEQ ID NO: 58095 - DNA, 22 bp, Artificial Sequence
  chemically synthesized
tttgattacacgaaataaaatg

SEQ ID NO: 58096 - DNA, 22 bp, Artificial Sequence
  chemically synthesized
tgattacacgaaataaaatggt

SEQ ID NO: 58097 - DNA, 22 bp, Artificial Sequence
  chemically synthesized
gattacacgaaataaaatggtt

SEQ ID NO: 58098 - DNA, 22 bp, Artificial Sequence
  chemically synthesized
attacacgaaataaaatggttt

SEQ ID NO: 58099 - DNA, 22 bp, Artificial Sequence
  chemically synthesized
cacgaaataaaatggtttaggc

SEQ ID NO: 58100 - DNA, 22 bp, Artificial Sequence
  chemically synthesized
aggctgagggtaaagaagtaat

SEQ ID NO: 58101 - DNA, 22 bp, Artificial Sequence
  chemically synthesized
ggctgagggtaaagaagtaata

SEQ ID NO: 58102 - DNA, 22 bp, Artificial Sequence
  chemically synthesized
agggtaaagaagtaataccatt

SEQ ID NO: 58103 - DNA, 22 bp, Artificial Sequence
  chemically synthesized
ctagttgtgcaaccttgggcag

SEQ ID NO: 58104 - DNA, 22 bp, Artificial Sequence
  chemically synthesized
tagttgtgcaaccttgggcaga

SEQ ID NO: 58105 - DNA, 22 bp, Artificial Sequence
  chemically synthesized
gttgtgcaaccttgggcagatt

SEQ ID NO: 58106 - DNA, 22 bp, Artificial Sequence
  chemically synthesized
tgcaaccttgggcagatttcat

SEQ ID NO: 58107 - DNA, 22 bp, Artificial Sequence
  chemically synthesized
gggcagatttcattccctaagc

SEQ ID NO: 58108 - DNA, 22 bp, Artificial Sequence
  chemically synthesized
ggcagatttcattccctaagcc

SEQ ID NO: 58109 - DNA, 22 bp, Artificial Sequence
  chemically synthesized
cattccctaagcctccgcttcc

SEQ ID NO: 58110 - DNA, 22 bp, Artificial Sequence
  chemically synthesized
attccctaagcctccgcttcct

SEQ ID NO: 58111 - DNA, 22 bp, Artificial Sequence
  chemically synthesized
cctaagcctccgcttcctcaat

SEQ ID NO: 58112 - DNA, 22 bp, Artificial Sequence
  chemically synthesized
agcctccgcttcctcaatctgt

SEQ ID NO: 58113 - DNA, 22 bp, Artificial Sequence
  chemically synthesized
cgcttcctcaatctgtaaagtg

SEQ ID NO: 58114 - DNA, 22 bp, Artificial Sequence
  chemically synthesized
cctcaatctgtaaagtggggag

SEQ ID NO: 58115 - DNA, 22 bp, Artificial Sequence
  chemically synthesized
ctcaatctgtaaagtggggaga

SEQ ID NO: 58116 - DNA, 22 bp, Artificial Sequence
  chemically synthesized
aatctgtaaagtggggagaatc

SEQ ID NO: 58117 - DNA, 22 bp, Artificial Sequence
  chemically synthesized
taaagtggggagaatcacgggg

SEQ ID NO: 58118 - DNA, 22 bp, Artificial Sequence
  chemically synthesized
gcctcatagggcctttgagcat

SEQ ID NO: 58119 - DNA, 22 bp, Artificial Sequence
  chemically synthesized
cctcatagggcctttgagcatc

SEQ ID NO: 58120 - DNA, 22 bp, Artificial Sequence
  chemically synthesized
atagggcctttgagcatcctat

SEQ ID NO: 58121 - DNA, 22 bp, Artificial Sequence
  chemically synthesized
tgagcatcctatgagagcatgt

SEQ ID NO: 58122 - DNA, 22 bp, Artificial Sequence
  chemically synthesized
gagcatcctatgagagcatgtg

SEQ ID NO: 58123 - DNA, 22 bp, Artificial Sequence
  chemically synthesized
agcatcctatgagagcatgtgg

SEQ ID NO: 58124 - DNA, 22 bp, Artificial Sequence
  chemically synthesized
tgagagcatgtgggggcgctgg

SEQ ID NO: 58125 - DNA, 22 bp, Artificial Sequence
  chemically synthesized
ggctcagtgctgggcacatggt

SEQ ID NO: 58126 - DNA, 22 bp, Artificial Sequence
  chemically synthesized
agtgctgggcacatggtaaaac

SEQ ID NO: 58127 - DNA, 22 bp, Artificial Sequence
  chemically synthesized
ggcacatggtaaaacatgtcac

SEQ ID NO: 58128 - DNA, 22 bp, Artificial Sequence
  chemically synthesized
attactattacggttatgactc

SEQ ID NO: 58129 - DNA, 22 bp, Artificial Sequence
  chemically synthesized
ctattacggttatgactcatgg

SEQ ID NO: 58130 - DNA, 22 bp, Artificial Sequence
  chemically synthesized
ttacggttatgactcatggctt

SEQ ID NO: 58131 - DNA, 22 bp, Artificial Sequence
  chemically synthesized
cggttatgactcatggcttgga

SEQ ID NO: 58132 - DNA, 22 bp, Artificial Sequence
  chemically synthesized
tgactcatggcttggaactgtg

SEQ ID NO: 58133 - DNA, 22 bp, Artificial Sequence
  chemically synthesized
atggcttggaactgtgtgctcc

SEQ ID NO: 58134 - DNA, 22 bp, Artificial Sequence
  chemically synthesized
ggaactgtgtgctcctggggtc

SEQ ID NO: 58135 - DNA, 22 bp, Artificial Sequence
  chemically synthesized
gaactgtgtgctcctggggtct

SEQ ID NO: 58136 - DNA, 22 bp, Artificial Sequence
  chemically synthesized
tgtgctcctggggtctcaaagt

SEQ ID NO: 58137 - DNA, 22 bp, Artificial Sequence
  chemically synthesized
ctggggtctcaaagtagttccc

SEQ ID NO: 58138 - DNA, 22 bp, Artificial Sequence
  chemically synthesized
gggtctcaaagtagttccccca

SEQ ID NO: 58139 - DNA, 22 bp, Artificial Sequence
  chemically synthesized
aaagtagttcccccattatggg

SEQ ID NO: 58140 - DNA, 22 bp, Artificial Sequence
  chemically synthesized
ccccattatggggtgagcaggt

SEQ ID NO: 58141 - DNA, 22 bp, Artificial Sequence
  chemically synthesized
tggggtgagcaggttgggatga

SEQ ID NO: 58142 - DNA, 22 bp, Artificial Sequence
  chemically synthesized
ggatgagagaagagcagggcag

SEQ ID NO: 58143 - DNA, 22 bp, Artificial Sequence
  chemically synthesized
aagagctcagggtctcattatg

SEQ ID NO: 58144 - DNA, 22 bp, Artificial Sequence
  chemically synthesized
agggtctcattatgtttctggt

SEQ ID NO: 58145 - DNA, 22 bp, Artificial Sequence
  chemically synthesized
attatgtttctggtggcagctc

SEQ ID NO: 58146 - DNA, 22 bp, Artificial Sequence
  chemically synthesized
tgtttctggtggcagctccctc

SEQ ID NO: 58147 - DNA, 22 bp, Artificial Sequence
  chemically synthesized
ctggtggcagctccctcgtggg

SEQ ID NO: 58148 - DNA, 22 bp, Artificial Sequence
  chemically synthesized
tggtggcagctccctcgtgggt

SEQ ID NO: 58149 - DNA, 22 bp, Artificial Sequence
  chemically synthesized
gtggcagctccctcgtgggtgg

SEQ ID NO: 58150 - DNA, 22 bp, Artificial Sequence
  chemically synthesized
cctcgtgggtgggagtcccctc

SEQ ID NO: 58151 - DNA, 22 bp, Artificial Sequence
  chemically synthesized
gtgggtgggagtcccctctccc

SEQ ID NO: 58152 - DNA, 22 bp, Artificial Sequence
  chemically synthesized
tccccatagacgtgtgttgcct

SEQ ID NO: 58153 - DNA, 22 bp, Artificial Sequence
  chemically synthesized
cccatagacgtgtgttgcctta

SEQ ID NO: 58154 - DNA, 22 bp, Artificial Sequence
  chemically synthesized
ccttacgagaggcttgtgcctg

SEQ ID NO: 58155 - DNA, 22 bp, Artificial Sequence
  chemically synthesized
acgagaggcttgtgcctgcctg

SEQ ID NO: 58156 - DNA, 22 bp, Artificial Sequence
  chemically synthesized
cgagaggcttgtgcctgcctgg

SEQ ID NO: 58157 - DNA, 22 bp, Artificial Sequence
  chemically synthesized
gtgcctgcctgggtgtgtgaca

SEQ ID NO: 58158 - DNA, 22 bp, Artificial Sequence
  chemically synthesized
tgcctgcctgggtgtgtgacac

SEQ ID NO: 58159 - DNA, 22 bp, Artificial Sequence
  chemically synthesized
cctgggtgtgtgacacagttac

SEQ ID NO: 58160 - DNA, 22 bp, Artificial Sequence
  chemically synthesized
ggtgtgtgacacagttactctg

SEQ ID NO: 58161 - DNA, 22 bp, Artificial Sequence
  chemically synthesized
ctctgggttcagatttctatgt

SEQ ID NO: 58162 - DNA, 22 bp, Artificial Sequence
  chemically synthesized
tgggttcagatttctatgttac

SEQ ID NO: 58163 - DNA, 22 bp, Artificial Sequence
  chemically synthesized
ggttcagatttctatgttactg

SEQ ID NO: 58164 - DNA, 22 bp, Artificial Sequence
  chemically synthesized
agatttctatgttactgctagc

SEQ ID NO: 58165 - DNA, 22 bp, Artificial Sequence
  chemically synthesized
ctatgttactgctagctggttg

SEQ ID NO: 58166 - DNA, 22 bp, Artificial Sequence
  chemically synthesized
tatgttactgctagctggttgg

SEQ ID NO: 58167 - DNA, 22 bp, Artificial Sequence
  chemically synthesized
tgttactgctagctggttggga

SEQ ID NO: 58168 - DNA, 22 bp, Artificial Sequence
  chemically synthesized
ctgctagctggttgggagagtc

SEQ ID NO: 58169 - DNA, 22 bp, Artificial Sequence
  chemically synthesized
ctagctggttgggagagtctga

SEQ ID NO: 58170 - DNA, 22 bp, Artificial Sequence
  chemically synthesized
gctggttgggagagtctgaggg

SEQ ID NO: 58171 - DNA, 22 bp, Artificial Sequence
  chemically synthesized
gttgggagagtctgagggaatc

SEQ ID NO: 58172 - DNA, 22 bp, Artificial Sequence
  chemically synthesized
ggagagtctgagggaatcattt

SEQ ID NO: 58173 - DNA, 22 bp, Artificial Sequence
  chemically synthesized
agggaatcatttcacctctctg

SEQ ID NO: 58174 - DNA, 22 bp, Artificial Sequence
  chemically synthesized
cacctctctgtgaaatggagat

SEQ ID NO: 58175 - DNA, 22 bp, Artificial Sequence
  chemically synthesized
acctctctgtgaaatggagata

SEQ ID NO: 58176 - DNA, 22 bp, Artificial Sequence
  chemically synthesized
tctgtgaaatggagataactca

SEQ ID NO: 58177 - DNA, 22 bp, Artificial Sequence
  chemically synthesized
tgtgaaatggagataactcaag

SEQ ID NO: 58178 - DNA, 22 bp, Artificial Sequence
  chemically synthesized
tgaaatggagataactcaaggt

SEQ ID NO: 58179 - DNA, 22 bp, Artificial Sequence
  chemically synthesized
aaggtcccttacctcatagagt

SEQ ID NO: 58180 - DNA, 22 bp, Artificial Sequence
  chemically synthesized
acctcatagagtccatgtgaga

SEQ ID NO: 58181 - DNA, 22 bp, Artificial Sequence
  chemically synthesized
cctcatagagtccatgtgagaa

SEQ ID NO: 58182 - DNA, 22 bp, Artificial Sequence
  chemically synthesized
atagagtccatgtgagaagtaa

SEQ ID NO: 58183 - DNA, 22 bp, Artificial Sequence
  chemically synthesized
ctcgctccgggggctgcacctc

SEQ ID NO: 58184 - DNA, 22 bp, Artificial Sequence
  chemically synthesized
gctccgggggctgcacctccag

SEQ ID NO: 58185 - DNA, 22 bp, Artificial Sequence
  chemically synthesized
cgggggctgcacctccagaatt

SEQ ID NO: 58186 - DNA, 22 bp, Artificial Sequence
  chemically synthesized
cacctccagaattgctgttgtc

SEQ ID NO: 58187 - DNA, 22 bp, Artificial Sequence
  chemically synthesized
cagaattgctgttgtcattatt

SEQ ID NO: 58188 - DNA, 22 bp, Artificial Sequence
  chemically synthesized
ctgttgtcattattaccatgtg

SEQ ID NO: 58189 - DNA, 22 bp, Artificial Sequence
  chemically synthesized
ttgtcattattaccatgtgtct

SEQ ID NO: 58190 - DNA, 22 bp, Artificial Sequence
  chemically synthesized
tcattattaccatgtgtctgac

SEQ ID NO: 58191 - DNA, 22 bp, Artificial Sequence
  chemically synthesized
ttaccatgtgtctgacacattg

SEQ ID NO: 58192 - DNA, 22 bp, Artificial Sequence
  chemically synthesized
ccatgtgtctgacacattgata

SEQ ID NO: 58193 - DNA, 22 bp, Artificial Sequence
  chemically synthesized
acacattgatattccatcccac

SEQ ID NO: 58194 - DNA, 22 bp, Artificial Sequence
  chemically synthesized
atattccatcccacaacaacct

SEQ ID NO: 58195 - DNA, 22 bp, Artificial Sequence
  chemically synthesized
catcccacaacaacctcggaaa

SEQ ID NO: 58196 - DNA, 22 bp, Artificial Sequence
  chemically synthesized
ggaaaggaaacactcccattag

SEQ ID NO: 58197 - DNA, 22 bp, Artificial Sequence
  chemically synthesized
ccattagcctcatttggtagag

SEQ ID NO: 58198 - DNA, 22 bp, Artificial Sequence
  chemically synthesized
gcctcatttggtagaggaggaa

SEQ ID NO: 58199 - DNA, 22 bp, Artificial Sequence
  chemically synthesized
atttggtagaggaggaaattgg

SEQ ID NO: 58200 - DNA, 22 bp, Artificial Sequence
  chemically synthesized
ggtagaggaggaaattggggtt

SEQ ID NO: 58201 - DNA, 22 bp, Artificial Sequence
  chemically synthesized
gtagaggaggaaattggggttc

SEQ ID NO: 58202 - DNA, 22 bp, Artificial Sequence
  chemically synthesized
gggttcatcaagggttaaatga

SEQ ID NO: 58203 - DNA, 22 bp, Artificial Sequence
  chemically synthesized
atcaagggttaaatgacttccc

SEQ ID NO: 58204 - DNA, 22 bp, Artificial Sequence
  chemically synthesized
aatgacttccctgagggtccac

SEQ ID NO: 58205 - DNA, 22 bp, Artificial Sequence
  chemically synthesized
ccctgagggtccacagttgttc

SEQ ID NO: 58206 - DNA, 22 bp, Artificial Sequence
  chemically synthesized
cctgagggtccacagttgttca

SEQ ID NO: 58207 - DNA, 22 bp, Artificial Sequence
  chemically synthesized
agggtccacagttgttcaatcc

SEQ ID NO: 58208 - DNA, 22 bp, Artificial Sequence
  chemically synthesized
ttcaatcctttggcctgcggcc

SEQ ID NO: 58209 - DNA, 22 bp, Artificial Sequence
  chemically synthesized
aatcctttggcctgcggccgcc

SEQ ID NO: 58210 - DNA, 22 bp, Artificial Sequence
  chemically synthesized
tggcctgcggccgccaccctct

SEQ ID NO: 58211 - DNA, 22 bp, Artificial Sequence
  chemically synthesized
ggcctgcggccgccaccctctg

SEQ ID NO: 58212 - DNA, 22 bp, Artificial Sequence
  chemically synthesized
gcctgcggccgccaccctctgc

SEQ ID NO: 58213 - DNA, 22 bp, Artificial Sequence
  chemically synthesized
cggccgccaccctctgctacct

SEQ ID NO: 58214 - DNA, 22 bp, Artificial Sequence
  chemically synthesized
tgctacctcttcagtacgtttg

SEQ ID NO: 58215 - DNA, 22 bp, Artificial Sequence
  chemically synthesized
ctacctcttcagtacgtttgca

SEQ ID NO: 58216 - DNA, 22 bp, Artificial Sequence
  chemically synthesized
cctcttcagtacgtttgcagct

SEQ ID NO: 58217 - DNA, 22 bp, Artificial Sequence
  chemically synthesized
ttcagtacgtttgcagctttct

SEQ ID NO: 58218 - DNA, 22 bp, Artificial Sequence
  chemically synthesized
cagtacgtttgcagctttcttc

SEQ ID NO: 58219 - DNA, 22 bp, Artificial Sequence
  chemically synthesized
agtacgtttgcagctttcttca

SEQ ID NO: 58220 - DNA, 22 bp, Artificial Sequence
  chemically synthesized
gcagctttcttcagcggtgcca

SEQ ID NO: 58221 - DNA, 22 bp, Artificial Sequence
  chemically synthesized
cagctttcttcagcggtgccag

SEQ ID NO: 58222 - DNA, 22 bp, Artificial Sequence
  chemically synthesized
tcttcagcggtgccaggcaaca

SEQ ID NO: 58223 - DNA, 22 bp, Artificial Sequence
  chemically synthesized
cttcagcggtgccaggcaacaa

SEQ ID NO: 58224 - DNA, 22 bp, Artificial Sequence
  chemically synthesized
ttcagcggtgccaggcaacaac

SEQ ID NO: 58225 - DNA, 22 bp, Artificial Sequence
  chemically synthesized
cagcggtgccaggcaacaactg

SEQ ID NO: 58226 - DNA, 22 bp, Artificial Sequence
  chemically synthesized
agcggtgccaggcaacaactgg

SEQ ID NO: 58227 - DNA, 22 bp, Artificial Sequence
  chemically synthesized
ggcaggaagctctggtgctgga

SEQ ID NO: 58228 - DNA, 22 bp, Artificial Sequence
  chemically synthesized
tggtgctggacagttgtccctc

SEQ ID NO: 58229 - DNA, 22 bp, Artificial Sequence
  chemically synthesized
gtgctggacagttgtccctccc

SEQ ID NO: 58230 - DNA, 22 bp, Artificial Sequence
  chemically synthesized
gacagttgtccctcccatgggt

SEQ ID NO: 58231 - DNA, 22 bp, Artificial Sequence
  chemically synthesized
tccctcccatgggttctgtggt

SEQ ID NO: 58232 - DNA, 22 bp, Artificial Sequence
  chemically synthesized
ccatgggttctgtggtcaagtt

SEQ ID NO: 58233 - DNA, 22 bp, Artificial Sequence
  chemically synthesized
tgtggtcaagtttttcaatctt

SEQ ID NO: 58234 - DNA, 22 bp, Artificial Sequence
  chemically synthesized
tggtcaagtttttcaatcttct

SEQ ID NO: 58235 - DNA, 22 bp, Artificial Sequence
  chemically synthesized
ttcaatcttctgggaaagagaa

SEQ ID NO: 58236 - DNA, 22 bp, Artificial Sequence
  chemically synthesized
tcaatcttctgggaaagagaag

SEQ ID NO: 58237 - DNA, 22 bp, Artificial Sequence
  chemically synthesized
caatcttctgggaaagagaaga

SEQ ID NO: 58238 - DNA, 22 bp, Artificial Sequence
  chemically synthesized
aatcttctgggaaagagaagaa

SEQ ID NO: 58239 - DNA, 22 bp, Artificial Sequence
  chemically synthesized
ctgggaaagagaagaatgttcc

SEQ ID NO: 58240 - DNA, 22 bp, Artificial Sequence
  chemically synthesized
tgggaaagagaagaatgttccc

SEQ ID NO: 58241 - DNA, 22 bp, Artificial Sequence
  chemically synthesized
ggaaagagaagaatgttcccct

SEQ ID NO: 58242 - DNA, 22 bp, Artificial Sequence
  chemically synthesized
ccctccagttctgggcatattg

SEQ ID NO: 58243 - DNA, 22 bp, Artificial Sequence
  chemically synthesized
cagttctgggcatattgaagga

SEQ ID NO: 58244 - DNA, 22 bp, Artificial Sequence
  chemically synthesized
tgggcatattgaaggagcacgg

SEQ ID NO: 58245 - DNA, 22 bp, Artificial Sequence
  chemically synthesized
ggcatattgaaggagcacggag

SEQ ID NO: 58246 - DNA, 22 bp, Artificial Sequence
  chemically synthesized
aaggagcacggagctgttggga

SEQ ID NO: 58247 - DNA, 22 bp, Artificial Sequence
  chemically synthesized
ttgggaaaagttgcaatgtaag

SEQ ID NO: 58248 - DNA, 22 bp, Artificial Sequence
  chemically synthesized
ggaaaagttgcaatgtaaggaa

SEQ ID NO: 58249 - DNA, 22 bp, Artificial Sequence
  chemically synthesized
caatgtaaggaatcctgctttg

SEQ ID NO: 58250 - DNA, 22 bp, Artificial Sequence
  chemically synthesized
ctttgcaagtagtcatttcccc

SEQ ID NO: 58251 - DNA, 22 bp, Artificial Sequence
  chemically synthesized
tgcaagtagtcatttccccatc

SEQ ID NO: 58252 - DNA, 22 bp, Artificial Sequence
  chemically synthesized
gcaagtagtcatttccccatct

SEQ ID NO: 58253 - DNA, 22 bp, Artificial Sequence
  chemically synthesized
caagtagtcatttccccatctg

SEQ ID NO: 58254 - DNA, 22 bp, Artificial Sequence
  chemically synthesized
ccccatctgtccagaatgagcc

SEQ ID NO: 58255 - DNA, 22 bp, Artificial Sequence
  chemically synthesized
cccatctgtccagaatgagcct

SEQ ID NO: 58256 - DNA, 22 bp, Artificial Sequence
  chemically synthesized
tccagaatgagcctgaaatcaa

SEQ ID NO: 58257 - DNA, 22 bp, Artificial Sequence
  chemically synthesized
aaatcaagtgagggtcctgaga

SEQ ID NO: 58258 - DNA, 22 bp, Artificial Sequence
  chemically synthesized
agaaacagagggaggaggtttt

SEQ ID NO: 58259 - DNA, 22 bp, Artificial Sequence
  chemically synthesized
tactgtttgtgtgtggcttggt

SEQ ID NO: 58260 - DNA, 22 bp, Artificial Sequence
  chemically synthesized
actgtttgtgtgtggcttggtc

SEQ ID NO: 58261 - DNA, 22 bp, Artificial Sequence
  chemically synthesized
ctgtttgtgtgtggcttggtca

SEQ ID NO: 58262 - DNA, 22 bp, Artificial Sequence
  chemically synthesized
tttgtgtgtggcttggtcagga

SEQ ID NO: 58263 - DNA, 22 bp, Artificial Sequence
  chemically synthesized
gtgtgtggcttggtcaggagac

SEQ ID NO: 58264 - DNA, 22 bp, Artificial Sequence
  chemically synthesized
tgtgtggcttggtcaggagact

SEQ ID NO: 58265 - DNA, 22 bp, Artificial Sequence
  chemically synthesized
ggtcaggagactgcagtgggct

SEQ ID NO: 58266 - DNA, 22 bp, Artificial Sequence
  chemically synthesized
gtcaggagactgcagtgggctg

SEQ ID NO: 58267 - DNA, 22 bp, Artificial Sequence
  chemically synthesized
cagtgggctgaatgagaaacta

SEQ ID NO: 58268 - DNA, 22 bp, Artificial Sequence
  chemically synthesized
aatgagaaactaagctcggact

SEQ ID NO: 58269 - DNA, 22 bp, Artificial Sequence
  chemically synthesized
agctcggacttttaagaagtgg

SEQ ID NO: 58270 - DNA, 22 bp, Artificial Sequence
  chemically synthesized
ggacttttaagaagtggtgagg

SEQ ID NO: 58271 - DNA, 22 bp, Artificial Sequence
  chemically synthesized
ttaagaagtggtgaggcttggc

SEQ ID NO: 58272 - DNA, 22 bp, Artificial Sequence
  chemically synthesized
taagaagtggtgaggcttggcc

SEQ ID NO: 58273 - DNA, 22 bp, Artificial Sequence
  chemically synthesized
aagaagtggtgaggcttggcct

SEQ ID NO: 58274 - DNA, 22 bp, Artificial Sequence
  chemically synthesized
agaagtggtgaggcttggcctg

SEQ ID NO: 58275 - DNA, 22 bp, Artificial Sequence
  chemically synthesized
ggcctgcagcagttctgtgtgt

SEQ ID NO: 58276 - DNA, 22 bp, Artificial Sequence
  chemically synthesized
gcctgcagcagttctgtgtgtt

SEQ ID NO: 58277 - DNA, 22 bp, Artificial Sequence
  chemically synthesized
cagcagttctgtgtgttgtctc

SEQ ID NO: 58278 - DNA, 22 bp, Artificial Sequence
  chemically synthesized
tgtgtgttgtctctgtggcatt

SEQ ID NO: 58279 - DNA, 22 bp, Artificial Sequence
  chemically synthesized
tgtgttgtctctgtggcattta

SEQ ID NO: 58280 - DNA, 22 bp, Artificial Sequence
  chemically synthesized
tctctgtggcatttacttctcg

SEQ ID NO: 58281 - DNA, 22 bp, Artificial Sequence
  chemically synthesized
tgtggcatttacttctcggatc

SEQ ID NO: 58282 - DNA, 22 bp, Artificial Sequence
  chemically synthesized
tggcatttacttctcggatcgt

SEQ ID NO: 58283 - DNA, 22 bp, Artificial Sequence
  chemically synthesized
acttctcggatcgtaccttcaa

SEQ ID NO: 58284 - DNA, 22 bp, Artificial Sequence
  chemically synthesized
cttctcggatcgtaccttcaaa

SEQ ID NO: 58285 - DNA, 22 bp, Artificial Sequence
  chemically synthesized
ctcggatcgtaccttcaaaggc

SEQ ID NO: 58286 - DNA, 22 bp, Artificial Sequence
  chemically synthesized
tcggatcgtaccttcaaaggct

SEQ ID NO: 58287 - DNA, 22 bp, Artificial Sequence
  chemically synthesized
ggatcgtaccttcaaaggctgg

SEQ ID NO: 58288 - DNA, 22 bp, Artificial Sequence
  chemically synthesized
caaaggctggggagaatcagaa

SEQ ID NO: 58289 - DNA, 22 bp, Artificial Sequence
  chemically synthesized
aaaggctggggagaatcagaat

SEQ ID NO: 58290 - DNA, 22 bp, Artificial Sequence
  chemically synthesized
gggagaatcagaattatacagg

SEQ ID NO: 58291 - DNA, 22 bp, Artificial Sequence
  chemically synthesized
tacagggagggagagactgagt

SEQ ID NO: 58292 - DNA, 22 bp, Artificial Sequence
  chemically synthesized
agtgtgagtgagtgtgcgtggc

SEQ ID NO: 58293 - DNA, 22 bp, Artificial Sequence
  chemically synthesized
cttaggacgatgggttctgggg

SEQ ID NO: 58294 - DNA, 22 bp, Artificial Sequence
  chemically synthesized
ttaggacgatgggttctggggg

SEQ ID NO: 58295 - DNA, 22 bp, Artificial Sequence
  chemically synthesized
aggacgatgggttctggggggt

SEQ ID NO: 58296 - DNA, 22 bp, Artificial Sequence
  chemically synthesized
ggacgatgggttctggggggtc

SEQ ID NO: 58297 - DNA, 22 bp, Artificial Sequence
  chemically synthesized
tggggggtcataatctgcttcg

SEQ ID NO: 58298 - DNA, 22 bp, Artificial Sequence
  chemically synthesized
gggggtcataatctgcttcgag

SEQ ID NO: 58299 - DNA, 22 bp, Artificial Sequence
  chemically synthesized
cttcgaggaggttttcatttct

SEQ ID NO: 58300 - DNA, 22 bp, Artificial Sequence
  chemically synthesized
cgaggaggttttcatttctggc

SEQ ID NO: 58301 - DNA, 22 bp, Artificial Sequence
  chemically synthesized
gaggaggttttcatttctggct

SEQ ID NO: 58302 - DNA, 22 bp, Artificial Sequence
  chemically synthesized
tcatttctggctgaacaaggct

SEQ ID NO: 58303 - DNA, 22 bp, Artificial Sequence
  chemically synthesized
catttctggctgaacaaggctg

SEQ ID NO: 58304 - DNA, 22 bp, Artificial Sequence
  chemically synthesized
atttctggctgaacaaggctgt

SEQ ID NO: 58305 - DNA, 22 bp, Artificial Sequence
  chemically synthesized
ctggctgaacaaggctgtggta

SEQ ID NO: 58306 - DNA, 22 bp, Artificial Sequence
  chemically synthesized
tggctgaacaaggctgtggtaa

SEQ ID NO: 58307 - DNA, 22 bp, Artificial Sequence
  chemically synthesized
gctgaacaaggctgtggtaagg

SEQ ID NO: 58308 - DNA, 22 bp, Artificial Sequence
  chemically synthesized
aacaaggctgtggtaaggcaag

SEQ ID NO: 58309 - DNA, 22 bp, Artificial Sequence
  chemically synthesized
tggtaaggcaagtccggaaggc

SEQ ID NO: 58310 - DNA, 22 bp, Artificial Sequence
  chemically synthesized
gaaacttgagggaagttttgaa

SEQ ID NO: 58311 - DNA, 22 bp, Artificial Sequence
  chemically synthesized
gagggaagttttgaatggaaac

SEQ ID NO: 58312 - DNA, 22 bp, Artificial Sequence
  chemically synthesized
agggaagttttgaatggaaact

SEQ ID NO: 58313 - DNA, 22 bp, Artificial Sequence
  chemically synthesized
tgaatggaaactgcagtcaaca

SEQ ID NO: 58314 - DNA, 22 bp, Artificial Sequence
  chemically synthesized
gaatggaaactgcagtcaacag

SEQ ID NO: 58315 - DNA, 22 bp, Artificial Sequence
  chemically synthesized
aatggaaactgcagtcaacagc

SEQ ID NO: 58316 - DNA, 22 bp, Artificial Sequence
  chemically synthesized
cagtcaacagctccatatgatc

SEQ ID NO: 58317 - DNA, 22 bp, Artificial Sequence
  chemically synthesized
catatgatccgcatgtggcttc

SEQ ID NO: 58318 - DNA, 22 bp, Artificial Sequence
  chemically synthesized
ccccagaggcaagttttcagct

SEQ ID NO: 58319 - DNA, 22 bp, Artificial Sequence
  chemically synthesized
cccagaggcaagttttcagctg

SEQ ID NO: 58320 - DNA, 22 bp, Artificial Sequence
  chemically synthesized
tcagctgcgtggtggcctctcc

SEQ ID NO: 58321 - DNA, 22 bp, Artificial Sequence
  chemically synthesized
cagctgcgtggtggcctctccc

SEQ ID NO: 58322 - DNA, 22 bp, Artificial Sequence
  chemically synthesized
agctgcgtggtggcctctccca

SEQ ID NO: 58323 - DNA, 22 bp, Artificial Sequence
  chemically synthesized
cgtggtggcctctcccagtcac

SEQ ID NO: 58324 - DNA, 22 bp, Artificial Sequence
  chemically synthesized
tcccagtcactccacaggctgc

SEQ ID NO: 58325 - DNA, 22 bp, Artificial Sequence
  chemically synthesized
ccagtcactccacaggctgccc

SEQ ID NO: 58326 - DNA, 22 bp, Artificial Sequence
  chemically synthesized
cacaggctgccctgacgctatt

SEQ ID NO: 58327 - DNA, 22 bp, Artificial Sequence
  chemically synthesized
ccctgacgctattaatatttgc

SEQ ID NO: 58328 - DNA, 22 bp, Artificial Sequence
  chemically synthesized
acgctattaatatttgctgaag

SEQ ID NO: 58329 - DNA, 22 bp, Artificial Sequence
  chemically synthesized
ttaatatttgctgaagcaagac

SEQ ID NO: 58330 - DNA, 22 bp, Artificial Sequence
  chemically synthesized
atatttgctgaagcaagacctg

SEQ ID NO: 58331 - DNA, 22 bp, Artificial Sequence
  chemically synthesized
gctgaagcaagacctgaggttc

SEQ ID NO: 58332 - DNA, 22 bp, Artificial Sequence
  chemically synthesized
ctgaagcaagacctgaggttcg

SEQ ID NO: 58333 - DNA, 22 bp, Artificial Sequence
  chemically synthesized
aagcaagacctgaggttcgttg

SEQ ID NO: 58334 - DNA, 22 bp, Artificial Sequence
  chemically synthesized
aggttcgttgcagatggattac

SEQ ID NO: 58335 - DNA, 22 bp, Artificial Sequence
  chemically synthesized
gttgcagatggattacacaatg

SEQ ID NO: 58336 - DNA, 22 bp, Artificial Sequence
  chemically synthesized
cagatggattacacaatgtatt

SEQ ID NO: 58337 - DNA, 22 bp, Artificial Sequence
  chemically synthesized
cacaatgtattccaaaaccaaa

SEQ ID NO: 58338 - DNA, 22 bp, Artificial Sequence
  chemically synthesized
caaaaccaaatgttactgtttt

SEQ ID NO: 58339 - DNA, 22 bp, Artificial Sequence
  chemically synthesized
ctgttttcctgtattctccatc

SEQ ID NO: 58340 - DNA, 22 bp, Artificial Sequence
  chemically synthesized
ttttcctgtattctccatcctt

SEQ ID NO: 58341 - DNA, 22 bp, Artificial Sequence
  chemically synthesized
tcctgtattctccatcctttca

SEQ ID NO: 58342 - DNA, 22 bp, Artificial Sequence
  chemically synthesized
cctgtattctccatcctttcaa

SEQ ID NO: 58343 - DNA, 22 bp, Artificial Sequence
  chemically synthesized
ctgtattctccatcctttcaaa

SEQ ID NO: 58344 - DNA, 22 bp, Artificial Sequence
  chemically synthesized
tattctccatcctttcaaattg

SEQ ID NO: 58345 - DNA, 22 bp, Artificial Sequence
  chemically synthesized
tccatcctttcaaattggccag

SEQ ID NO: 58346 - DNA, 22 bp, Artificial Sequence
  chemically synthesized
catcctttcaaattggccaggc

SEQ ID NO: 58347 - DNA, 22 bp, Artificial Sequence
  chemically synthesized
tcaaattggccaggctaacata

SEQ ID NO: 58348 - DNA, 22 bp, Artificial Sequence
  chemically synthesized
caaattggccaggctaacatag

SEQ ID NO: 58349 - DNA, 22 bp, Artificial Sequence
  chemically synthesized
aaattggccaggctaacataga

SEQ ID NO: 58350 - DNA, 22 bp, Artificial Sequence
  chemically synthesized
gccaggctaacatagacctcca

SEQ ID NO: 58351 - DNA, 22 bp, Artificial Sequence
  chemically synthesized
acatagacctccactgagagaa

SEQ ID NO: 58352 - DNA, 22 bp, Artificial Sequence
  chemically synthesized
cactgagagaatttcagaatca

SEQ ID NO: 58353 - DNA, 22 bp, Artificial Sequence
  chemically synthesized
agagaatttcagaatcatttgg

SEQ ID NO: 58354 - DNA, 22 bp, Artificial Sequence
  chemically synthesized
cagaatcatttggtagttgaga

SEQ ID NO: 58355 - DNA, 22 bp, Artificial Sequence
  chemically synthesized
agaatcatttggtagttgagaa

SEQ ID NO: 58356 - DNA, 22 bp, Artificial Sequence
  chemically synthesized
ggtagttgagaagcgcctactt

SEQ ID NO: 58357 - DNA, 22 bp, Artificial Sequence
  chemically synthesized
gtagttgagaagcgcctacttc

SEQ ID NO: 58358 - DNA, 22 bp, Artificial Sequence
  chemically synthesized
agaagcgcctacttcatgcgga

SEQ ID NO: 58359 - DNA, 22 bp, Artificial Sequence
  chemically synthesized
cttcatgcggaggccccgtggg

SEQ ID NO: 58360 - DNA, 22 bp, Artificial Sequence
  chemically synthesized
catgcggaggccccgtgggagg

SEQ ID NO: 58361 - DNA, 22 bp, Artificial Sequence
  chemically synthesized
atgcggaggccccgtgggagga

SEQ ID NO: 58362 - DNA, 22 bp, Artificial Sequence
  chemically synthesized
gcctcagcactggcgagtatcg

SEQ ID NO: 58363 - DNA, 22 bp, Artificial Sequence
  chemically synthesized
agcactggcgagtatcggatgg

SEQ ID NO: 58364 - DNA, 22 bp, Artificial Sequence
  chemically synthesized
gcgagtatcggatgggagctct

SEQ ID NO: 58365 - DNA, 22 bp, Artificial Sequence
  chemically synthesized
tgctcacttggtaagtccttct

SEQ ID NO: 58366 - DNA, 22 bp, Artificial Sequence
  chemically synthesized
ctcacttggtaagtccttctgc

SEQ ID NO: 58367 - DNA, 22 bp, Artificial Sequence
  chemically synthesized
acttggtaagtccttctgctag

SEQ ID NO: 58368 - DNA, 22 bp, Artificial Sequence
  chemically synthesized
ggtaagtccttctgctagaacc

SEQ ID NO: 58369 - DNA, 22 bp, Artificial Sequence
  chemically synthesized
gtaagtccttctgctagaacca

SEQ ID NO: 58370 - DNA, 22 bp, Artificial Sequence
  chemically synthesized
ctgctagaaccaagggaggctg

SEQ ID NO: 58371 - DNA, 22 bp, Artificial Sequence
  chemically synthesized
tgctagaaccaagggaggctgt

SEQ ID NO: 58372 - DNA, 22 bp, Artificial Sequence
  chemically synthesized
ctagaaccaagggaggctgttc

SEQ ID NO: 58373 - DNA, 22 bp, Artificial Sequence
  chemically synthesized
gaaccaagggaggctgttcaga

SEQ ID NO: 58374 - DNA, 22 bp, Artificial Sequence
  chemically synthesized
ttcagatccatcacaaagaagt

SEQ ID NO: 58375 - DNA, 22 bp, Artificial Sequence
  chemically synthesized
agatccatcacaaagaagttgt

SEQ ID NO: 58376 - DNA, 22 bp, Artificial Sequence
  chemically synthesized
tcggtcacatccaggttgtctt

SEQ ID NO: 58377 - DNA, 22 bp, Artificial Sequence
  chemically synthesized
tcttctgagtttgaggtgggat

SEQ ID NO: 58378 - DNA, 22 bp, Artificial Sequence
  chemically synthesized
ctgagtttgaggtgggatggag

SEQ ID NO: 58379 - DNA, 22 bp, Artificial Sequence
  chemically synthesized
tgagtttgaggtgggatggagg

SEQ ID NO: 58380 - DNA, 22 bp, Artificial Sequence
  chemically synthesized
agtttgaggtgggatggaggtg

SEQ ID NO: 58381 - DNA, 22 bp, Artificial Sequence
  chemically synthesized
gaggtgggatggaggtggctgc

SEQ ID NO: 58382 - DNA, 22 bp, Artificial Sequence
  chemically synthesized
aggtgggatggaggtggctgct

SEQ ID NO: 58383 - DNA, 22 bp, Artificial Sequence
  chemically synthesized
ctgagaatccatgtgggtcaag

SEQ ID NO: 58384 - DNA, 22 bp, Artificial Sequence
  chemically synthesized
agaatccatgtgggtcaagagc

SEQ ID NO: 58385 - DNA, 22 bp, Artificial Sequence
  chemically synthesized
caaagcttcacttttacttcgc

SEQ ID NO: 58386 - DNA, 22 bp, Artificial Sequence
  chemically synthesized
cacttttacttcgcactctgtc

SEQ ID NO: 58387 - DNA, 22 bp, Artificial Sequence
  chemically synthesized
acttttacttcgcactctgtcc

SEQ ID NO: 58388 - DNA, 22 bp, Artificial Sequence
  chemically synthesized
ttacttcgcactctgtcccggg

SEQ ID NO: 58389 - DNA, 22 bp, Artificial Sequence
  chemically synthesized
tacttcgcactctgtcccgggg

SEQ ID NO: 58390 - DNA, 22 bp, Artificial Sequence
  chemically synthesized
acttcgcactctgtcccggggc

SEQ ID NO: 58391 - DNA, 22 bp, Artificial Sequence
  chemically synthesized
cttcgcactctgtcccggggca

SEQ ID NO: 58392 - DNA, 22 bp, Artificial Sequence
  chemically synthesized
cgcactctgtcccggggcatgg

SEQ ID NO: 58393 - DNA, 22 bp, Artificial Sequence
  chemically synthesized
gcactctgtcccggggcatgga

SEQ ID NO: 58394 - DNA, 22 bp, Artificial Sequence
  chemically synthesized
tgtcccggggcatggacgtcct

SEQ ID NO: 58395 - DNA, 22 bp, Artificial Sequence
  chemically synthesized
tcccggggcatggacgtcctca

SEQ ID NO: 58396 - DNA, 22 bp, Artificial Sequence
  chemically synthesized
aatggaggtcatgcaagccctt

SEQ ID NO: 58397 - DNA, 22 bp, Artificial Sequence
  chemically synthesized
ccccctcaccccttctcttggc

SEQ ID NO: 58398 - DNA, 22 bp, Artificial Sequence
  chemically synthesized
cccctcaccccttctcttggcc

SEQ ID NO: 58399 - DNA, 22 bp, Artificial Sequence
  chemically synthesized
accccttctcttggccctcttc

SEQ ID NO: 58400 - DNA, 22 bp, Artificial Sequence
  chemically synthesized
ctcttggccctcttcattgtct

SEQ ID NO: 58401 - DNA, 22 bp, Artificial Sequence
  chemically synthesized
tcttggccctcttcattgtctc

SEQ ID NO: 58402 - DNA, 22 bp, Artificial Sequence
  chemically synthesized
ttggccctcttcattgtctcta

SEQ ID NO: 58403 - DNA, 22 bp, Artificial Sequence
  chemically synthesized
ggccctcttcattgtctctaca

SEQ ID NO: 58404 - DNA, 22 bp, Artificial Sequence
  chemically synthesized
gccctcttcattgtctctacat

SEQ ID NO: 58405 - DNA, 22 bp, Artificial Sequence
  chemically synthesized
ttcattgtctctacataccctt

SEQ ID NO: 58406 - DNA, 22 bp, Artificial Sequence
  chemically synthesized
cattgtctctacatacccttgg

SEQ ID NO: 58407 - DNA, 22 bp, Artificial Sequence
  chemically synthesized
attgtctctacatacccttggg

SEQ ID NO: 58408 - DNA, 22 bp, Artificial Sequence
  chemically synthesized
tctctacatacccttgggtcaa

SEQ ID NO: 58409 - DNA, 22 bp, Artificial Sequence
  chemically synthesized
tacatacccttgggtcaagagt

SEQ ID NO: 58410 - DNA, 22 bp, Artificial Sequence
  chemically synthesized
catacccttgggtcaagagtgt

SEQ ID NO: 58411 - DNA, 22 bp, Artificial Sequence
  chemically synthesized
gggtcaagagtgtagtggttct

SEQ ID NO: 58412 - DNA, 22 bp, Artificial Sequence
  chemically synthesized
ggtcaagagtgtagtggttctc

SEQ ID NO: 58413 - DNA, 22 bp, Artificial Sequence
  chemically synthesized
tcccttgtcaccctggaagaga

SEQ ID NO: 58414 - DNA, 22 bp, Artificial Sequence
  chemically synthesized
ccttgtcaccctggaagagaag

SEQ ID NO: 58415 - DNA, 22 bp, Artificial Sequence
  chemically synthesized
gtcaccctggaagagaagctct

SEQ ID NO: 58416 - DNA, 22 bp, Artificial Sequence
  chemically synthesized
tcaccctggaagagaagctctt

SEQ ID NO: 58417 - DNA, 22 bp, Artificial Sequence
  chemically synthesized
gaagagaagctcttagttttat

SEQ ID NO: 58418 - DNA, 22 bp, Artificial Sequence
  chemically synthesized
ttagttttatttgctgggtctc

SEQ ID NO: 58419 - DNA, 22 bp, Artificial Sequence
  chemically synthesized
agttttatttgctgggtctcct

SEQ ID NO: 58420 - DNA, 22 bp, Artificial Sequence
  chemically synthesized
gttttatttgctgggtctccta

SEQ ID NO: 58421 - DNA, 22 bp, Artificial Sequence
  chemically synthesized
tatttgctgggtctcctagact

SEQ ID NO: 58422 - DNA, 22 bp, Artificial Sequence
  chemically synthesized
atttgctgggtctcctagactg

SEQ ID NO: 58423 - DNA, 22 bp, Artificial Sequence
  chemically synthesized
tttgctgggtctcctagactga

SEQ ID NO: 58424 - DNA, 22 bp, Artificial Sequence
  chemically synthesized
gctgggtctcctagactgaaat

SEQ ID NO: 58425 - DNA, 22 bp, Artificial Sequence
  chemically synthesized
ctgggtctcctagactgaaatg

SEQ ID NO: 58426 - DNA, 22 bp, Artificial Sequence
  chemically synthesized
ggtctcctagactgaaatgata

SEQ ID NO: 58427 - DNA, 22 bp, Artificial Sequence
  chemically synthesized
ctagactgaaatgataaagctg

SEQ ID NO: 58428 - DNA, 22 bp, Artificial Sequence
  chemically synthesized
gactgaaatgataaagctgaaa

SEQ ID NO: 58429 - DNA, 22 bp, Artificial Sequence
  chemically synthesized
aaatgataaagctgaaatgata

SEQ ID NO: 58430 - DNA, 22 bp, Artificial Sequence
  chemically synthesized
aaatgataaaaggcgtatcatg

SEQ ID NO: 58431 - DNA, 22 bp, Artificial Sequence
  chemically synthesized
tagaacccttcttatttccctc

SEQ ID NO: 58432 - DNA, 22 bp, Artificial Sequence
  chemically synthesized
agaacccttcttatttccctcg

SEQ ID NO: 58433 - DNA, 22 bp, Artificial Sequence
  chemically synthesized
gaacccttcttatttccctcgc

SEQ ID NO: 58434 - DNA, 22 bp, Artificial Sequence
  chemically synthesized
cttatttccctcgctcgcaccc

SEQ ID NO: 58435 - DNA, 22 bp, Artificial Sequence
  chemically synthesized
ttatttccctcgctcgcacccc

SEQ ID NO: 58436 - DNA, 22 bp, Artificial Sequence
  chemically synthesized
atttccctcgctcgcaccccct

SEQ ID NO: 58437 - DNA, 22 bp, Artificial Sequence
  chemically synthesized
tttccctcgctcgcacccccta

SEQ ID NO: 58438 - DNA, 22 bp, Artificial Sequence
  chemically synthesized
ccctcgctcgcaccccctagtt

SEQ ID NO: 58439 - DNA, 22 bp, Artificial Sequence
  chemically synthesized
cctcgctcgcaccccctagttt

SEQ ID NO: 58440 - DNA, 22 bp, Artificial Sequence
  chemically synthesized
gctcgcaccccctagttttcct

SEQ ID NO: 58441 - DNA, 22 bp, Artificial Sequence
  chemically synthesized
gcaccccctagttttccttctc

SEQ ID NO: 58442 - DNA, 22 bp, Artificial Sequence
  chemically synthesized
gttttccttctcttcccttgaa

SEQ ID NO: 58443 - DNA, 22 bp, Artificial Sequence
  chemically synthesized
tccttctcttcccttgaaaatc

SEQ ID NO: 58444 - DNA, 22 bp, Artificial Sequence
  chemically synthesized
ccttctcttcccttgaaaatca

SEQ ID NO: 58445 - DNA, 22 bp, Artificial Sequence
  chemically synthesized
cttctcttcccttgaaaatcag

SEQ ID NO: 58446 - DNA, 22 bp, Artificial Sequence
  chemically synthesized
ctcttcccttgaaaatcagtga

SEQ ID NO: 58447 - DNA, 22 bp, Artificial Sequence
  chemically synthesized
tcttcccttgaaaatcagtgaa

SEQ ID NO: 58448 - DNA, 22 bp, Artificial Sequence
  chemically synthesized
ttcccttgaaaatcagtgaaaa

SEQ ID NO: 58449 - DNA, 22 bp, Artificial Sequence
  chemically synthesized
cccttgaaaatcagtgaaaatc

SEQ ID NO: 58450 - DNA, 22 bp, Artificial Sequence
  chemically synthesized
ccttgaaaatcagtgaaaatca

SEQ ID NO: 58451 - DNA, 22 bp, Artificial Sequence
  chemically synthesized
gaaaatcagtgaaaatcaggcc

SEQ ID NO: 58452 - DNA, 22 bp, Artificial Sequence
  chemically synthesized
aaaatcagtgaaaatcaggcca

SEQ ID NO: 58453 - DNA, 22 bp, Artificial Sequence
  chemically synthesized
tgatgatggccttttgtttctt

SEQ ID NO: 58454 - DNA, 22 bp, Artificial Sequence
  chemically synthesized
atgatggccttttgtttctttt

SEQ ID NO: 58455 - DNA, 22 bp, Artificial Sequence
  chemically synthesized
ttgtttctttttctttttctgt

SEQ ID NO: 58456 - DNA, 22 bp, Artificial Sequence
  chemically synthesized
tgtttctttttctttttctgtt

SEQ ID NO: 58457 - DNA, 22 bp, Artificial Sequence
  chemically synthesized
gtttctttttctttttctgttt

SEQ ID NO: 58458 - DNA, 22 bp, Artificial Sequence
  chemically synthesized
tttctttttctttttctgtttc

SEQ ID NO: 58459 - DNA, 22 bp, Artificial Sequence
  chemically synthesized
ctttttctttttctgtttctgc

SEQ ID NO: 58460 - DNA, 22 bp, Artificial Sequence
  chemically synthesized
tttttctttttctgtttctgcc

SEQ ID NO: 58461 - DNA, 22 bp, Artificial Sequence
  chemically synthesized
tttctttttctgtttctgcctt

SEQ ID NO: 58462 - DNA, 22 bp, Artificial Sequence
  chemically synthesized
ttctttttctgtttctgccttc

SEQ ID NO: 58463 - DNA, 22 bp, Artificial Sequence
  chemically synthesized
tctttttctgtttctgccttcg

SEQ ID NO: 58464 - DNA, 22 bp, Artificial Sequence
  chemically synthesized
ctttttctgtttctgccttcgt

SEQ ID NO: 58465 - DNA, 22 bp, Artificial Sequence
  chemically synthesized
tttttctgtttctgccttcgtt

SEQ ID NO: 58466 - DNA, 22 bp, Artificial Sequence
  chemically synthesized
tttctgtttctgccttcgttag

SEQ ID NO: 58467 - DNA, 22 bp, Artificial Sequence
  chemically synthesized
ttctgtttctgccttcgttagg

SEQ ID NO: 58468 - DNA, 22 bp, Artificial Sequence
  chemically synthesized
tctgtttctgccttcgttaggt

SEQ ID NO: 58469 - DNA, 22 bp, Artificial Sequence
  chemically synthesized
ctgtttctgccttcgttaggta

SEQ ID NO: 58470 - DNA, 22 bp, Artificial Sequence
  chemically synthesized
tgtttctgccttcgttaggtaa

SEQ ID NO: 58471 - DNA, 22 bp, Artificial Sequence
  chemically synthesized
tttctgccttcgttaggtaagc

SEQ ID NO: 58472 - DNA, 22 bp, Artificial Sequence
  chemically synthesized
ctgccttcgttaggtaagcaca

SEQ ID NO: 58473 - DNA, 22 bp, Artificial Sequence
  chemically synthesized
tgccttcgttaggtaagcacaa

SEQ ID NO: 58474 - DNA, 22 bp, Artificial Sequence
  chemically synthesized
ccttcgttaggtaagcacaaat

SEQ ID NO: 58475 - DNA, 22 bp, Artificial Sequence
  chemically synthesized
cgttaggtaagcacaaatttga

SEQ ID NO: 58476 - DNA, 22 bp, Artificial Sequence
  chemically synthesized
gttaggtaagcacaaatttgat

SEQ ID NO: 58477 - DNA, 22 bp, Artificial Sequence
  chemically synthesized
ggtaagcacaaatttgatgtcc

SEQ ID NO: 58478 - DNA, 22 bp, Artificial Sequence
  chemically synthesized
gatgtcccaagaggcaggccgg

SEQ ID NO: 58479 - DNA, 22 bp, Artificial Sequence
  chemically synthesized
atgtcccaagaggcaggccggt

SEQ ID NO: 58480 - DNA, 22 bp, Artificial Sequence
  chemically synthesized
caggccaagtgcctggatgtgg

SEQ ID NO: 58481 - DNA, 22 bp, Artificial Sequence
  chemically synthesized
aggccaagtgcctggatgtggc

SEQ ID NO: 58482 - DNA, 22 bp, Artificial Sequence
  chemically synthesized
gatgtggcaaagctacaataaa

SEQ ID NO: 58483 - DNA, 22 bp, Artificial Sequence
  chemically synthesized
caataaatatcgaatggtgaga

SEQ ID NO: 58484 - DNA, 22 bp, Artificial Sequence
  chemically synthesized
agcaaagccataaccggggaga

SEQ ID NO: 58485 - DNA, 22 bp, Artificial Sequence
  chemically synthesized
gcaaagccataaccggggagac

SEQ ID NO: 58486 - DNA, 22 bp, Artificial Sequence
  chemically synthesized
agaggggcagtggactggttaa

SEQ ID NO: 58487 - DNA, 22 bp, Artificial Sequence
  chemically synthesized
gttaagaggctgttggatgagc

SEQ ID NO: 58488 - DNA, 22 bp, Artificial Sequence
  chemically synthesized
agaggctgttggatgagccggg

SEQ ID NO: 58489 - DNA, 22 bp, Artificial Sequence
  chemically synthesized
ttggatgagccgggtagtattt

SEQ ID NO: 58490 - DNA, 22 bp, Artificial Sequence
  chemically synthesized
gatgagccgggtagtatttcta

SEQ ID NO: 58491 - DNA, 22 bp, Artificial Sequence
  chemically synthesized
ctacttcaacctgattgaaatg

SEQ ID NO: 58492 - DNA, 22 bp, Artificial Sequence
  chemically synthesized
tacttcaacctgattgaaatgt

SEQ ID NO: 58493 - DNA, 22 bp, Artificial Sequence
  chemically synthesized
cttcaacctgattgaaatgtcg

SEQ ID NO: 58494 - DNA, 22 bp, Artificial Sequence
  chemically synthesized
caacctgattgaaatgtcgact

SEQ ID NO: 58495 - DNA, 22 bp, Artificial Sequence
  chemically synthesized
aacctgattgaaatgtcgacta

SEQ ID NO: 58496 - DNA, 22 bp, Artificial Sequence
  chemically synthesized
attgaaatgtcgactaaaaatc

SEQ ID NO: 58497 - DNA, 22 bp, Artificial Sequence
  chemically synthesized
aaatgtcgactaaaaatcaatg

SEQ ID NO: 58498 - DNA, 22 bp, Artificial Sequence
  chemically synthesized
aaaatcaatgctgttgactagt

SEQ ID NO: 58499 - DNA, 22 bp, Artificial Sequence
  chemically synthesized
ttgactagtgataatttacaac

SEQ ID NO: 58500 - DNA, 22 bp, Artificial Sequence
  chemically synthesized
actagtgataatttacaacgtt

SEQ ID NO: 58501 - DNA, 22 bp, Artificial Sequence
  chemically synthesized
gtgataatttacaacgttcctg

SEQ ID NO: 58502 - DNA, 22 bp, Artificial Sequence
  chemically synthesized
acaacgttcctggtgctaagta

SEQ ID NO: 58503 - DNA, 22 bp, Artificial Sequence
  chemically synthesized
caacgttcctggtgctaagtag

SEQ ID NO: 58504 - DNA, 22 bp, Artificial Sequence
  chemically synthesized
ctggtgctaagtagttccccgc

SEQ ID NO: 58505 - DNA, 22 bp, Artificial Sequence
  chemically synthesized
gtgctaagtagttccccgctta

SEQ ID NO: 58506 - DNA, 22 bp, Artificial Sequence
  chemically synthesized
agtagttccccgcttaagaatg

SEQ ID NO: 58507 - DNA, 22 bp, Artificial Sequence
  chemically synthesized
cccgcttaagaatgcgttggct

SEQ ID NO: 58508 - DNA, 22 bp, Artificial Sequence
  chemically synthesized
aagaatgcgttggctgggcaga

SEQ ID NO: 58509 - DNA, 22 bp, Artificial Sequence
  chemically synthesized
agaatgcgttggctgggcagag

SEQ ID NO: 58510 - DNA, 22 bp, Artificial Sequence
  chemically synthesized
gctgggcagagattagcgcagg

SEQ ID NO: 58511 - DNA, 22 bp, Artificial Sequence
  chemically synthesized
ggcagagattagcgcagggagt

SEQ ID NO: 58512 - DNA, 22 bp, Artificial Sequence
  chemically synthesized
gcgcagggagttgtgtgtgtca

SEQ ID NO: 58513 - DNA, 22 bp, Artificial Sequence
  chemically synthesized
tgtgtgtcacaatgaatcagac

SEQ ID NO: 58514 - DNA, 22 bp, Artificial Sequence
  chemically synthesized
taggtcagccctttatttgttt

SEQ ID NO: 58515 - DNA, 22 bp, Artificial Sequence
  chemically synthesized
tatttgtttcatcatgactttt

SEQ ID NO: 58516 - DNA, 22 bp, Artificial Sequence
  chemically synthesized
atttgtttcatcatgactttta

SEQ ID NO: 58517 - DNA, 22 bp, Artificial Sequence
  chemically synthesized
tttgtttcatcatgacttttac

SEQ ID NO: 58518 - DNA, 22 bp, Artificial Sequence
  chemically synthesized
gtttcatcatgacttttacaca

SEQ ID NO: 58519 - DNA, 22 bp, Artificial Sequence
  chemically synthesized
tttcatcatgacttttacacag

SEQ ID NO: 58520 - DNA, 22 bp, Artificial Sequence
  chemically synthesized
catcatgacttttacacagttg

SEQ ID NO: 58521 - DNA, 22 bp, Artificial Sequence
  chemically synthesized
atcatgacttttacacagttgt

SEQ ID NO: 58522 - DNA, 22 bp, Artificial Sequence
  chemically synthesized
ttacacagttgtcatgtaattt

SEQ ID NO: 58523 - DNA, 22 bp, Artificial Sequence
  chemically synthesized
tacacagttgtcatgtaattta

SEQ ID NO: 58524 - DNA, 22 bp, Artificial Sequence
  chemically synthesized
acacagttgtcatgtaatttat

SEQ ID NO: 58525 - DNA, 22 bp, Artificial Sequence
  chemically synthesized
cacagttgtcatgtaatttatg

SEQ ID NO: 58526 - DNA, 22 bp, Artificial Sequence
  chemically synthesized
tcatgtaatttatggctgcttt

SEQ ID NO: 58527 - DNA, 22 bp, Artificial Sequence
  chemically synthesized
atggctgctttcacgttgtcaa

SEQ ID NO: 58528 - DNA, 22 bp, Artificial Sequence
  chemically synthesized
tggctgctttcacgttgtcaaa

SEQ ID NO: 58529 - DNA, 22 bp, Artificial Sequence
  chemically synthesized
ctttcacgttgtcaaacatttt

SEQ ID NO: 58530 - DNA, 22 bp, Artificial Sequence
  chemically synthesized
tcacgttgtcaaacattttcat

SEQ ID NO: 58531 - DNA, 22 bp, Artificial Sequence
  chemically synthesized
cacgttgtcaaacattttcatt

SEQ ID NO: 58532 - DNA, 22 bp, Artificial Sequence
  chemically synthesized
acgttgtcaaacattttcattg

SEQ ID NO: 58533 - DNA, 22 bp, Artificial Sequence
  chemically synthesized
tcaaacattttcattgcatctt

SEQ ID NO: 58534 - DNA, 22 bp, Artificial Sequence
  chemically synthesized
tcattgcatcttcttctttaac

SEQ ID NO: 58535 - DNA, 22 bp, Artificial Sequence
  chemically synthesized
cattgcatcttcttctttaaca

SEQ ID NO: 58536 - DNA, 22 bp, Artificial Sequence
  chemically synthesized
attgcatcttcttctttaacac

SEQ ID NO: 58537 - DNA, 22 bp, Artificial Sequence
  chemically synthesized
catcttcttctttaacaccctc

SEQ ID NO: 58538 - DNA, 22 bp, Artificial Sequence
  chemically synthesized
cttctttaacaccctcctgaca

SEQ ID NO: 58539 - DNA, 22 bp, Artificial Sequence
  chemically synthesized
ttctttaacaccctcctgacat

SEQ ID NO: 58540 - DNA, 22 bp, Artificial Sequence
  chemically synthesized
ctttaacaccctcctgacatag

SEQ ID NO: 58541 - DNA, 22 bp, Artificial Sequence
  chemically synthesized
tttaacaccctcctgacataga

SEQ ID NO: 58542 - DNA, 22 bp, Artificial Sequence
  chemically synthesized
taacaccctcctgacatagaca

SEQ ID NO: 58543 - DNA, 22 bp, Artificial Sequence
  chemically synthesized
aacaccctcctgacatagacac

SEQ ID NO: 58544 - DNA, 22 bp, Artificial Sequence
  chemically synthesized
acaccctcctgacatagacaca

SEQ ID NO: 58545 - DNA, 22 bp, Artificial Sequence
  chemically synthesized
ctgacatagacacactgcactt

SEQ ID NO: 58546 - DNA, 22 bp, Artificial Sequence
  chemically synthesized
acatagacacactgcacttgaa

SEQ ID NO: 58547 - DNA, 22 bp, Artificial Sequence
  chemically synthesized
cacttgaaggcttggtattgtt

SEQ ID NO: 58548 - DNA, 22 bp, Artificial Sequence
  chemically synthesized
gaaggcttggtattgtttcata

SEQ ID NO: 58549 - DNA, 22 bp, Artificial Sequence
  chemically synthesized
aaggcttggtattgtttcataa

SEQ ID NO: 58550 - DNA, 22 bp, Artificial Sequence
  chemically synthesized
ggtattgtttcataatccgaga

SEQ ID NO: 58551 - DNA, 22 bp, Artificial Sequence
  chemically synthesized
gtattgtttcataatccgagag

SEQ ID NO: 58552 - DNA, 22 bp, Artificial Sequence
  chemically synthesized
tttcataatccgagaggaggcc

SEQ ID NO: 58553 - DNA, 22 bp, Artificial Sequence
  chemically synthesized
cataatccgagaggaggcctat

SEQ ID NO: 58554 - DNA, 22 bp, Artificial Sequence
  chemically synthesized
ataatccgagaggaggcctata

SEQ ID NO: 58555 - DNA, 22 bp, Artificial Sequence
  chemically synthesized
taaaccatcaaattacactatc

SEQ ID NO: 58556 - DNA, 22 bp, Artificial Sequence
  chemically synthesized
cactatctttgggctaatctaa

SEQ ID NO: 58557 - DNA, 22 bp, Artificial Sequence
  chemically synthesized
tctttgggctaatctaaatgcg

SEQ ID NO: 58558 - DNA, 22 bp, Artificial Sequence
  chemically synthesized
tgggctaatctaaatgcgctgc

SEQ ID NO: 58559 - DNA, 22 bp, Artificial Sequence
  chemically synthesized
gggctaatctaaatgcgctgca

SEQ ID NO: 58560 - DNA, 22 bp, Artificial Sequence
  chemically synthesized
ggctaatctaaatgcgctgcag

SEQ ID NO: 58561 - DNA, 22 bp, Artificial Sequence
  chemically synthesized
atctaaatgcgctgcagattaa

SEQ ID NO: 58562 - DNA, 22 bp, Artificial Sequence
  chemically synthesized
aatgcgctgcagattaaaatca

SEQ ID NO: 58563 - DNA, 22 bp, Artificial Sequence
  chemically synthesized
cagattaaaatcagagctcatt

SEQ ID NO: 58564 - DNA, 22 bp, Artificial Sequence
  chemically synthesized
aaatcagagctcatttgtccct

SEQ ID NO: 58565 - DNA, 22 bp, Artificial Sequence
  chemically synthesized
atttgtccctgatgcaaattat

SEQ ID NO: 58566 - DNA, 22 bp, Artificial Sequence
  chemically synthesized
gtccctgatgcaaattattaag

SEQ ID NO: 58567 - DNA, 22 bp, Artificial Sequence
  chemically synthesized
tccctgatgcaaattattaagt

SEQ ID NO: 58568 - DNA, 22 bp, Artificial Sequence
  chemically synthesized
atgcaaattattaagttctaat

SEQ ID NO: 58569 - DNA, 22 bp, Artificial Sequence
  chemically synthesized
ttaagttctaattataaatacc

SEQ ID NO: 58570 - DNA, 22 bp, Artificial Sequence
  chemically synthesized
agttctaattataaatacccat

SEQ ID NO: 58571 - DNA, 22 bp, Artificial Sequence
  chemically synthesized
taattataaatacccatttaat

SEQ ID NO: 58572 - DNA, 22 bp, Artificial Sequence
  chemically synthesized
attataaatacccatttaatta

SEQ ID NO: 58573 - DNA, 22 bp, Artificial Sequence
  chemically synthesized
taaatacccatttaattacccg

SEQ ID NO: 58574 - DNA, 22 bp, Artificial Sequence
  chemically synthesized
aattacccgacacatttttatt

SEQ ID NO: 58575 - DNA, 22 bp, Artificial Sequence
  chemically synthesized
attacccgacacatttttattt

SEQ ID NO: 58576 - DNA, 22 bp, Artificial Sequence
  chemically synthesized
cccgacacatttttattttgcg

SEQ ID NO: 58577 - DNA, 22 bp, Artificial Sequence
  chemically synthesized
ttattttgcggacccttttgag

SEQ ID NO: 58578 - DNA, 22 bp, Artificial Sequence
  chemically synthesized
tattttgcggacccttttgagc

SEQ ID NO: 58579 - DNA, 22 bp, Artificial Sequence
  chemically synthesized
attttgcggacccttttgagca

SEQ ID NO: 58580 - DNA, 22 bp, Artificial Sequence
  chemically synthesized
ttttgcggacccttttgagcac

SEQ ID NO: 58581 - DNA, 22 bp, Artificial Sequence
  chemically synthesized
tgcggacccttttgagcactgc

SEQ ID NO: 58582 - DNA, 22 bp, Artificial Sequence
  chemically synthesized
gcggacccttttgagcactgct

SEQ ID NO: 58583 - DNA, 22 bp, Artificial Sequence
  chemically synthesized
cggacccttttgagcactgctg

SEQ ID NO: 58584 - DNA, 22 bp, Artificial Sequence
  chemically synthesized
ttgagcactgctgtctgcgatg

SEQ ID NO: 58585 - DNA, 22 bp, Artificial Sequence
  chemically synthesized
tgagcactgctgtctgcgatgc

SEQ ID NO: 58586 - DNA, 22 bp, Artificial Sequence
  chemically synthesized
gagcactgctgtctgcgatgca

SEQ ID NO: 58587 - DNA, 22 bp, Artificial Sequence
  chemically synthesized
agcactgctgtctgcgatgcag

SEQ ID NO: 58588 - DNA, 22 bp, Artificial Sequence
  chemically synthesized
ctgtctgcgatgcagagggggt

SEQ ID NO: 58589 - DNA, 22 bp, Artificial Sequence
  chemically synthesized
tctgcgatgcagagggggtggg

SEQ ID NO: 58590 - DNA, 22 bp, Artificial Sequence
  chemically synthesized
cgatgcagagggggtgggggga

SEQ ID NO: 58591 - DNA, 22 bp, Artificial Sequence
  chemically synthesized
cagtaattaatgtacacttccc

SEQ ID NO: 58592 - DNA, 22 bp, Artificial Sequence
  chemically synthesized
atgtacacttcccaaatggtaa

SEQ ID NO: 58593 - DNA, 22 bp, Artificial Sequence
  chemically synthesized
cccaaatggtaaaggataaaca

SEQ ID NO: 58594 - DNA, 22 bp, Artificial Sequence
  chemically synthesized
ccaaatggtaaaggataaacat

SEQ ID NO: 58595 - DNA, 22 bp, Artificial Sequence
  chemically synthesized
ctttgtttgtcttatttattta

SEQ ID NO: 58596 - DNA, 22 bp, Artificial Sequence
  chemically synthesized
tgtttgtcttatttatttattg

SEQ ID NO: 58597 - DNA, 22 bp, Artificial Sequence
  chemically synthesized
gtttgtcttatttatttattga

SEQ ID NO: 58598 - DNA, 22 bp, Artificial Sequence
  chemically synthesized
tttgtcttatttatttattgat

SEQ ID NO: 58599 - DNA, 22 bp, Artificial Sequence
  chemically synthesized
gtcttatttatttattgattag

SEQ ID NO: 58600 - DNA, 22 bp, Artificial Sequence
  chemically synthesized
tcttatttatttattgattaga

SEQ ID NO: 58601 - DNA, 22 bp, Artificial Sequence
  chemically synthesized
atttatttattgattagatgta

SEQ ID NO: 58602 - DNA, 22 bp, Artificial Sequence
  chemically synthesized
tttatttattgattagatgtat

SEQ ID NO: 58603 - DNA, 22 bp, Artificial Sequence
  chemically synthesized
atttattgattagatgtataga

SEQ ID NO: 58604 - DNA, 22 bp, Artificial Sequence
  chemically synthesized
tttattgattagatgtatagag

SEQ ID NO: 58605 - DNA, 22 bp, Artificial Sequence
  chemically synthesized
attgattagatgtatagagact

SEQ ID NO: 58606 - DNA, 22 bp, Artificial Sequence
  chemically synthesized
ttgattagatgtatagagactt

SEQ ID NO: 58607 - DNA, 22 bp, Artificial Sequence
  chemically synthesized
attagatgtatagagactttgg

SEQ ID NO: 58608 - DNA, 22 bp, Artificial Sequence
  chemically synthesized
gatgtatagagactttggcgtg

SEQ ID NO: 58609 - DNA, 22 bp, Artificial Sequence
  chemically synthesized
tggcgtgggcacaatctgaagt

SEQ ID NO: 58610 - DNA, 22 bp, Artificial Sequence
  chemically synthesized
ggcgtgggcacaatctgaagtt

SEQ ID NO: 58611 - DNA, 22 bp, Artificial Sequence
  chemically synthesized
gcgtgggcacaatctgaagttg

SEQ ID NO: 58612 - DNA, 22 bp, Artificial Sequence
  chemically synthesized
aagttgaaatccttttaaagat

SEQ ID NO: 58613 - DNA, 22 bp, Artificial Sequence
  chemically synthesized
aaatccttttaaagatgaaaac

SEQ ID NO: 58614 - DNA, 22 bp, Artificial Sequence
  chemically synthesized
ttaaagatgaaaactatttaaa

SEQ ID NO: 58615 - DNA, 22 bp, Artificial Sequence
  chemically synthesized
taaagatgaaaactatttaaaa

SEQ ID NO: 58616 - DNA, 22 bp, Artificial Sequence
  chemically synthesized
aaagatgaaaactatttaaaaa

SEQ ID NO: 58617 - DNA, 22 bp, Artificial Sequence
  chemically synthesized
aagatgaaaactatttaaaaat

SEQ ID NO: 58618 - DNA, 22 bp, Artificial Sequence
  chemically synthesized
tttaaaaatcttttggggaaga

SEQ ID NO: 58619 - DNA, 22 bp, Artificial Sequence
  chemically synthesized
aaaaatcttttggggaagaaag

SEQ ID NO: 58620 - DNA, 22 bp, Artificial Sequence
  chemically synthesized
aaaatcttttggggaagaaaga

SEQ ID NO: 58621 - DNA, 22 bp, Artificial Sequence
  chemically synthesized
ttggggaagaaagagcaaaata

SEQ ID NO: 58622 - DNA, 22 bp, Artificial Sequence
  chemically synthesized
tggggaagaaagagcaaaatat

SEQ ID NO: 58623 - DNA, 22 bp, Artificial Sequence
  chemically synthesized
ggggaagaaagagcaaaatata

SEQ ID NO: 58624 - DNA, 22 bp, Artificial Sequence
  chemically synthesized
gggaagaaagagcaaaatatag

SEQ ID NO: 58625 - DNA, 22 bp, Artificial Sequence
  chemically synthesized
tctgctagaacacatcatccca

SEQ ID NO: 58626 - DNA, 22 bp, Artificial Sequence
  chemically synthesized
ctgctagaacacatcatcccaa

SEQ ID NO: 58627 - DNA, 22 bp, Artificial Sequence
  chemically synthesized
tgctagaacacatcatcccaaa

SEQ ID NO: 58628 - DNA, 22 bp, Artificial Sequence
  chemically synthesized
ctagaacacatcatcccaaaat

SEQ ID NO: 58629 - DNA, 22 bp, Artificial Sequence
  chemically synthesized
gaacacatcatcccaaaatatg

SEQ ID NO: 58630 - DNA, 22 bp, Artificial Sequence
  chemically synthesized
tgaatttgatcaaatcaccagt

SEQ ID NO: 58631 - DNA, 22 bp, Artificial Sequence
  chemically synthesized
aatttgatcaaatcaccagttt

SEQ ID NO: 58632 - DNA, 22 bp, Artificial Sequence
  chemically synthesized
gatcaaatcaccagtttctgaa

SEQ ID NO: 58633 - DNA, 22 bp, Artificial Sequence
  chemically synthesized
atcaaatcaccagtttctgaat

SEQ ID NO: 58634 - DNA, 22 bp, Artificial Sequence
  chemically synthesized
ctgaatttgatcaaatctagat

SEQ ID NO: 58635 - DNA, 22 bp, Artificial Sequence
  chemically synthesized
tgaatttgatcaaatctagatt

SEQ ID NO: 58636 - DNA, 22 bp, Artificial Sequence
  chemically synthesized
aatttgatcaaatctagatttt

SEQ ID NO: 58637 - DNA, 22 bp, Artificial Sequence
  chemically synthesized
gatcaaatctagattttgcaga

SEQ ID NO: 58638 - DNA, 22 bp, Artificial Sequence
  chemically synthesized
atcaaatctagattttgcagaa

SEQ ID NO: 58639 - DNA, 22 bp, Artificial Sequence
  chemically synthesized
gattttgcagaagttcagggtg

SEQ ID NO: 58640 - DNA, 22 bp, Artificial Sequence
  chemically synthesized
tgcagaagttcagggtgagaga

SEQ ID NO: 58641 - DNA, 22 bp, Artificial Sequence
  chemically synthesized
gcagaagttcagggtgagagaa

SEQ ID NO: 58642 - DNA, 22 bp, Artificial Sequence
  chemically synthesized
cagaagttcagggtgagagaaa

SEQ ID NO: 58643 - DNA, 22 bp, Artificial Sequence
  chemically synthesized
agggtgagagaaaccatgcctg

SEQ ID NO: 58644 - DNA, 22 bp, Artificial Sequence
  chemically synthesized
ttttatatctagaaagtgaaat

SEQ ID NO: 58645 - DNA, 22 bp, Artificial Sequence
  chemically synthesized
tatatctagaaagtgaaatcat

SEQ ID NO: 58646 - DNA, 22 bp, Artificial Sequence
  chemically synthesized
atatctagaaagtgaaatcatt

SEQ ID NO: 58647 - DNA, 22 bp, Artificial Sequence
  chemically synthesized
tatctagaaagtgaaatcattg

SEQ ID NO: 58648 - DNA, 22 bp, Artificial Sequence
  chemically synthesized
gaaagtgaaatcattgttatag

SEQ ID NO: 58649 - DNA, 22 bp, Artificial Sequence
  chemically synthesized
ttatagaaaaaacctactgtgg

SEQ ID NO: 58650 - DNA, 22 bp, Artificial Sequence
  chemically synthesized
tagaaaaaacctactgtggtta

SEQ ID NO: 58651 - DNA, 22 bp, Artificial Sequence
  chemically synthesized
ctgtggttagaaaaaaaccaca

SEQ ID NO: 58652 - DNA, 22 bp, Artificial Sequence
  chemically synthesized
tggttagaaaaaaaccacattc

SEQ ID NO: 58653 - DNA, 22 bp, Artificial Sequence
  chemically synthesized
gaaaaaaaccacattctttttt

SEQ ID NO: 58654 - DNA, 22 bp, Artificial Sequence
  chemically synthesized
ttttttcccagccctgctgcca

SEQ ID NO: 58655 - DNA, 22 bp, Artificial Sequence
  chemically synthesized
ttttcccagccctgctgccatc

SEQ ID NO: 58656 - DNA, 22 bp, Artificial Sequence
  chemically synthesized
tttcccagccctgctgccatcc

SEQ ID NO: 58657 - DNA, 22 bp, Artificial Sequence
  chemically synthesized
ttcccagccctgctgccatcct

SEQ ID NO: 58658 - DNA, 22 bp, Artificial Sequence
  chemically synthesized
tcccagccctgctgccatcctc

SEQ ID NO: 58659 - DNA, 22 bp, Artificial Sequence
  chemically synthesized
cccagccctgctgccatcctct

SEQ ID NO: 58660 - DNA, 22 bp, Artificial Sequence
  chemically synthesized
ccagccctgctgccatcctcta

SEQ ID NO: 58661 - DNA, 22 bp, Artificial Sequence
  chemically synthesized
ctgccatcctctaccagaaaat

SEQ ID NO: 58662 - DNA, 22 bp, Artificial Sequence
  chemically synthesized
ccatcctctaccagaaaataac

SEQ ID NO: 58663 - DNA, 22 bp, Artificial Sequence
  chemically synthesized
taccagaaaataacagtatctg

SEQ ID NO: 58664 - DNA, 22 bp, Artificial Sequence
  chemically synthesized
ccagaaaataacagtatctgcc

SEQ ID NO: 58665 - DNA, 22 bp, Artificial Sequence
  chemically synthesized
cctgtagtatgaagaccttcca

SEQ ID NO: 58666 - DNA, 22 bp, Artificial Sequence
  chemically synthesized
tagtatgaagaccttccaattg

SEQ ID NO: 58667 - DNA, 22 bp, Artificial Sequence
  chemically synthesized
ccaattgagagcattatgataa

SEQ ID NO: 58668 - DNA, 22 bp, Artificial Sequence
  chemically synthesized
caattgagagcattatgataaa

SEQ ID NO: 58669 - DNA, 22 bp, Artificial Sequence
  chemically synthesized
agagcattatgataaactattt

SEQ ID NO: 58670 - DNA, 22 bp, Artificial Sequence
  chemically synthesized
tgataaactatttttgattacc

SEQ ID NO: 58671 - DNA, 22 bp, Artificial Sequence
  chemically synthesized
tttttgattaccaaacacgaat

SEQ ID NO: 58672 - DNA, 22 bp, Artificial Sequence
  chemically synthesized
ttgattaccaaacacgaatgaa

SEQ ID NO: 58673 - DNA, 22 bp, Artificial Sequence
  chemically synthesized
tgattaccaaacacgaatgaag

SEQ ID NO: 58674 - DNA, 22 bp, Artificial Sequence
  chemically synthesized
gattaccaaacacgaatgaagg

SEQ ID NO: 58675 - DNA, 22 bp, Artificial Sequence
  chemically synthesized
attaccaaacacgaatgaagga

SEQ ID NO: 58676 - DNA, 22 bp, Artificial Sequence
  chemically synthesized
ccaaacacgaatgaaggaagaa

SEQ ID NO: 58677 - DNA, 22 bp, Artificial Sequence
  chemically synthesized
gtaaaggccttccaagtagaca

SEQ ID NO: 58678 - DNA, 22 bp, Artificial Sequence
  chemically synthesized
ccaagtagacatttacccttct

SEQ ID NO: 58679 - DNA, 22 bp, Artificial Sequence
  chemically synthesized
caagtagacatttacccttctg

SEQ ID NO: 58680 - DNA, 22 bp, Artificial Sequence
  chemically synthesized
acccttctgtgaaagccatgga

SEQ ID NO: 58681 - DNA, 22 bp, Artificial Sequence
  chemically synthesized
cccttctgtgaaagccatggag

SEQ ID NO: 58682 - DNA, 22 bp, Artificial Sequence
  chemically synthesized
ctgtgaaagccatggagaaatt

SEQ ID NO: 58683 - DNA, 22 bp, Artificial Sequence
  chemically synthesized
tgtgaaagccatggagaaatta

SEQ ID NO: 58684 - DNA, 22 bp, Artificial Sequence
  chemically synthesized
tgaaagccatggagaaattacc

SEQ ID NO: 58685 - DNA, 22 bp, Artificial Sequence
  chemically synthesized
ccaagactggtttggggggagg

SEQ ID NO: 58686 - DNA, 22 bp, Artificial Sequence
  chemically synthesized
gtttggggggagggcatttaag

SEQ ID NO: 58687 - DNA, 22 bp, Artificial Sequence
  chemically synthesized
ggggggagggcatttaaggtct

SEQ ID NO: 58688 - DNA, 22 bp, Artificial Sequence
  chemically synthesized
gggggagggcatttaaggtctt

SEQ ID NO: 58689 - DNA, 22 bp, Artificial Sequence
  chemically synthesized
aaggtcttttgggcattacaga

SEQ ID NO: 58690 - DNA, 22 bp, Artificial Sequence
  chemically synthesized
aggtcttttgggcattacagat

SEQ ID NO: 58691 - DNA, 22 bp, Artificial Sequence
  chemically synthesized
ttgggcattacagattttccag

SEQ ID NO: 58692 - DNA, 22 bp, Artificial Sequence
  chemically synthesized
tgggcattacagattttccaga

SEQ ID NO: 58693 - DNA, 22 bp, Artificial Sequence
  chemically synthesized
gggcattacagattttccagaa

SEQ ID NO: 58694 - DNA, 22 bp, Artificial Sequence
  chemically synthesized
ggcattacagattttccagaac

SEQ ID NO: 58695 - DNA, 22 bp, Artificial Sequence
  chemically synthesized
cagattttccagaaccaaactt

SEQ ID NO: 58696 - DNA, 22 bp, Artificial Sequence
  chemically synthesized
tccagaaccaaactttgacttt

SEQ ID NO: 58697 - DNA, 22 bp, Artificial Sequence
  chemically synthesized
ccagaaccaaactttgactttt

SEQ ID NO: 58698 - DNA, 22 bp, Artificial Sequence
  chemically synthesized
cagaaccaaactttgactttta

SEQ ID NO: 58699 - DNA, 22 bp, Artificial Sequence
  chemically synthesized
tgacttttagtgttaacagaga

SEQ ID NO: 58700 - DNA, 22 bp, Artificial Sequence
  chemically synthesized
gacttttagtgttaacagagag

SEQ ID NO: 58701 - DNA, 22 bp, Artificial Sequence
  chemically synthesized
acttttagtgttaacagagaga

SEQ ID NO: 58702 - DNA, 22 bp, Artificial Sequence
  chemically synthesized
ttagtgttaacagagagacact

SEQ ID NO: 58703 - DNA, 22 bp, Artificial Sequence
  chemically synthesized
tagtgttaacagagagacactg

SEQ ID NO: 58704 - DNA, 22 bp, Artificial Sequence
  chemically synthesized
agtgttaacagagagacactga

SEQ ID NO: 58705 - DNA, 22 bp, Artificial Sequence
  chemically synthesized
gtgttaacagagagacactgat

SEQ ID NO: 58706 - DNA, 22 bp, Artificial Sequence
  chemically synthesized
acagagagacactgatctgaaa

SEQ ID NO: 58707 - DNA, 22 bp, Artificial Sequence
  chemically synthesized
atctgaaaaccaggacacctgg

SEQ ID NO: 58708 - DNA, 22 bp, Artificial Sequence
  chemically synthesized
aaaaccaggacacctgggttct

SEQ ID NO: 58709 - DNA, 22 bp, Artificial Sequence
  chemically synthesized
ggttctgacccttattgtatca

SEQ ID NO: 58710 - DNA, 22 bp, Artificial Sequence
  chemically synthesized
tgacccttattgtatcatgctg

SEQ ID NO: 58711 - DNA, 22 bp, Artificial Sequence
  chemically synthesized
acccttattgtatcatgctgtg

SEQ ID NO: 58712 - DNA, 22 bp, Artificial Sequence
  chemically synthesized
attgtatcatgctgtgagattt

SEQ ID NO: 58713 - DNA, 22 bp, Artificial Sequence
  chemically synthesized
ttgtatcatgctgtgagatttt

SEQ ID NO: 58714 - DNA, 22 bp, Artificial Sequence
  chemically synthesized
tatcatgctgtgagattttggg

SEQ ID NO: 58715 - DNA, 22 bp, Artificial Sequence
  chemically synthesized
tgagattttgggctcccttcac

SEQ ID NO: 58716 - DNA, 22 bp, Artificial Sequence
  chemically synthesized
tgggctcccttcacctgttagc

SEQ ID NO: 58717 - DNA, 22 bp, Artificial Sequence
  chemically synthesized
gggctcccttcacctgttagca

SEQ ID NO: 58718 - DNA, 22 bp, Artificial Sequence
  chemically synthesized
ggctcccttcacctgttagcat

SEQ ID NO: 58719 - DNA, 22 bp, Artificial Sequence
  chemically synthesized
ccttcacctgttagcatttgtt

SEQ ID NO: 58720 - DNA, 22 bp, Artificial Sequence
  chemically synthesized
cacctgttagcatttgtttcct

SEQ ID NO: 58721 - DNA, 22 bp, Artificial Sequence
  chemically synthesized
acctgttagcatttgtttcctt

SEQ ID NO: 58722 - DNA, 22 bp, Artificial Sequence
  chemically synthesized
ttagcatttgtttccttgtctt

SEQ ID NO: 58723 - DNA, 22 bp, Artificial Sequence
  chemically synthesized
gcatttgtttccttgtcttgta

SEQ ID NO: 58724 - DNA, 22 bp, Artificial Sequence
  chemically synthesized
gtttccttgtcttgtaaagtag

SEQ ID NO: 58725 - DNA, 22 bp, Artificial Sequence
  chemically synthesized
tttccttgtcttgtaaagtagg

SEQ ID NO: 58726 - DNA, 22 bp, Artificial Sequence
  chemically synthesized
ccttgtcttgtaaagtaggtaa

SEQ ID NO: 58727 - DNA, 22 bp, Artificial Sequence
  chemically synthesized
cttgtcttgtaaagtaggtaaa

SEQ ID NO: 58728 - DNA, 22 bp, Artificial Sequence
  chemically synthesized
gtcttgtaaagtaggtaaaata

SEQ ID NO: 58729 - DNA, 22 bp, Artificial Sequence
  chemically synthesized
tcttgtaaagtaggtaaaatag

SEQ ID NO: 58730 - DNA, 22 bp, Artificial Sequence
  chemically synthesized
gtaaagtaggtaaaatagatag

SEQ ID NO: 58731 - DNA, 22 bp, Artificial Sequence
  chemically synthesized
taaagtaggtaaaatagatagt

SEQ ID NO: 58732 - DNA, 22 bp, Artificial Sequence
  chemically synthesized
ggactgggtgggtctctaagtc

SEQ ID NO: 58733 - DNA, 22 bp, Artificial Sequence
  chemically synthesized
gactgggtgggtctctaagtcc

SEQ ID NO: 58734 - DNA, 22 bp, Artificial Sequence
  chemically synthesized
ggtgggtctctaagtccccatg

SEQ ID NO: 58735 - DNA, 22 bp, Artificial Sequence
  chemically synthesized
taagtccccatgatgttctagc

SEQ ID NO: 58736 - DNA, 22 bp, Artificial Sequence
  chemically synthesized
agtccccatgatgttctagcat

SEQ ID NO: 58737 - DNA, 22 bp, Artificial Sequence
  chemically synthesized
tagcatagtatgaacaccactg

SEQ ID NO: 58738 - DNA, 22 bp, Artificial Sequence
  chemically synthesized
gcatagtatgaacaccactgac

SEQ ID NO: 58739 - DNA, 22 bp, Artificial Sequence
  chemically synthesized
accagttttctccctgctattt

SEQ ID NO: 58740 - DNA, 22 bp, Artificial Sequence
  chemically synthesized
tctccctgctattttttggaat

SEQ ID NO: 58741 - DNA, 22 bp, Artificial Sequence
  chemically synthesized
ctccctgctattttttggaatc

SEQ ID NO: 58742 - DNA, 22 bp, Artificial Sequence
  chemically synthesized
tccctgctattttttggaatct

SEQ ID NO: 58743 - DNA, 22 bp, Artificial Sequence
  chemically synthesized
cctgctattttttggaatctag

SEQ ID NO: 58744 - DNA, 22 bp, Artificial Sequence
  chemically synthesized
ctattttttggaatctagttgc

SEQ ID NO: 58745 - DNA, 22 bp, Artificial Sequence
  chemically synthesized
ttttttggaatctagttgctga

SEQ ID NO: 58746 - DNA, 22 bp, Artificial Sequence
  chemically synthesized
tttggaatctagttgctgaatg

SEQ ID NO: 58747 - DNA, 22 bp, Artificial Sequence
  chemically synthesized
ttggaatctagttgctgaatgg

SEQ ID NO: 58748 - DNA, 22 bp, Artificial Sequence
  chemically synthesized
tggaatctagttgctgaatggg

SEQ ID NO: 58749 - DNA, 22 bp, Artificial Sequence
  chemically synthesized
ggaatctagttgctgaatgggg

SEQ ID NO: 58750 - DNA, 22 bp, Artificial Sequence
  chemically synthesized
gaatctagttgctgaatggggc

SEQ ID NO: 58751 - DNA, 22 bp, Artificial Sequence
  chemically synthesized
gttgctgaatggggctcacctg

SEQ ID NO: 58752 - DNA, 22 bp, Artificial Sequence
  chemically synthesized
ctgaatggggctcacctgcaaa

SEQ ID NO: 58753 - DNA, 22 bp, Artificial Sequence
  chemically synthesized
aatggggctcacctgcaaagac

SEQ ID NO: 58754 - DNA, 22 bp, Artificial Sequence
  chemically synthesized
acctgcaaagacagcagaatat

SEQ ID NO: 58755 - DNA, 22 bp, Artificial Sequence
  chemically synthesized
caaagacagcagaatattattt

SEQ ID NO: 58756 - DNA, 22 bp, Artificial Sequence
  chemically synthesized
ttttcttgatttgcctcaaaga

SEQ ID NO: 58757 - DNA, 22 bp, Artificial Sequence
  chemically synthesized
tcttgatttgcctcaaagatgg

SEQ ID NO: 58758 - DNA, 22 bp, Artificial Sequence
  chemically synthesized
cttgatttgcctcaaagatgga

SEQ ID NO: 58759 - DNA, 22 bp, Artificial Sequence
  chemically synthesized
ttgatttgcctcaaagatggaa

SEQ ID NO: 58760 - DNA, 22 bp, Artificial Sequence
  chemically synthesized
gatttgcctcaaagatggaagc

SEQ ID NO: 58761 - DNA, 22 bp, Artificial Sequence
  chemically synthesized
atttgcctcaaagatggaagct

SEQ ID NO: 58762 - DNA, 22 bp, Artificial Sequence
  chemically synthesized
gcctcaaagatggaagctatgg

SEQ ID NO: 58763 - DNA, 22 bp, Artificial Sequence
  chemically synthesized
cctcaaagatggaagctatggt

SEQ ID NO: 58764 - DNA, 22 bp, Artificial Sequence
  chemically synthesized
aaagatggaagctatggtggag

SEQ ID NO: 58765 - DNA, 22 bp, Artificial Sequence
  chemically synthesized
tggtggagattaaggcttggat

SEQ ID NO: 58766 - DNA, 22 bp, Artificial Sequence
  chemically synthesized
aggcttggattcgtgattcccc

SEQ ID NO: 58767 - DNA, 22 bp, Artificial Sequence
  chemically synthesized
ggattcgtgattccccaacaga

SEQ ID NO: 58768 - DNA, 22 bp, Artificial Sequence
  chemically synthesized
gattcgtgattccccaacagaa

SEQ ID NO: 58769 - DNA, 22 bp, Artificial Sequence
  chemically synthesized
gtgattccccaacagaaagctt

SEQ ID NO: 58770 - DNA, 22 bp, Artificial Sequence
  chemically synthesized
cccaacagaaagcttaaaggca

SEQ ID NO: 58771 - DNA, 22 bp, Artificial Sequence
  chemically synthesized
aaaggcatctttcaaattgctg

SEQ ID NO: 58772 - DNA, 22 bp, Artificial Sequence
  chemically synthesized
aaggcatctttcaaattgctgg

SEQ ID NO: 58773 - DNA, 22 bp, Artificial Sequence
  chemically synthesized
tcaaattgctggaagcaaaatt

SEQ ID NO: 58774 - DNA, 22 bp, Artificial Sequence
  chemically synthesized
caaattgctggaagcaaaattg

SEQ ID NO: 58775 - DNA, 22 bp, Artificial Sequence
  chemically synthesized
aaattgctggaagcaaaattga

SEQ ID NO: 58776 - DNA, 22 bp, Artificial Sequence
  chemically synthesized
ctggaagcaaaattgaagtgca

SEQ ID NO: 58777 - DNA, 22 bp, Artificial Sequence
  chemically synthesized
gaagcaaaattgaagtgcagta

SEQ ID NO: 58778 - DNA, 22 bp, Artificial Sequence
  chemically synthesized
aagtgcagtataatggaatggt

SEQ ID NO: 58779 - DNA, 22 bp, Artificial Sequence
  chemically synthesized
acagaagtttccagccttataa

SEQ ID NO: 58780 - DNA, 22 bp, Artificial Sequence
  chemically synthesized
ccagccttataagatttctcca

SEQ ID NO: 58781 - DNA, 22 bp, Artificial Sequence
  chemically synthesized
cagccttataagatttctccat

SEQ ID NO: 58782 - DNA, 22 bp, Artificial Sequence
  chemically synthesized
ataagatttctccatcttttaa

SEQ ID NO: 58783 - DNA, 22 bp, Artificial Sequence
  chemically synthesized
taagatttctccatcttttaat

SEQ ID NO: 58784 - DNA, 22 bp, Artificial Sequence
  chemically synthesized
ctccatcttttaattgttgcaa

SEQ ID NO: 58785 - DNA, 22 bp, Artificial Sequence
  chemically synthesized
tccatcttttaattgttgcaag

SEQ ID NO: 58786 - DNA, 22 bp, Artificial Sequence
  chemically synthesized
catcttttaattgttgcaagct

SEQ ID NO: 58787 - DNA, 22 bp, Artificial Sequence
  chemically synthesized
ttaattgttgcaagctgttttt

SEQ ID NO: 58788 - DNA, 22 bp, Artificial Sequence
  chemically synthesized
taattgttgcaagctgtttttt

SEQ ID NO: 58789 - DNA, 22 bp, Artificial Sequence
  chemically synthesized
aattgttgcaagctgttttttt

SEQ ID NO: 58790 - DNA, 22 bp, Artificial Sequence
  chemically synthesized
attgttgcaagctgtttttttt

SEQ ID NO: 58791 - DNA, 22 bp, Artificial Sequence
  chemically synthesized
ttgcaagctgttttttttgaaa

SEQ ID NO: 58792 - DNA, 22 bp, Artificial Sequence
  chemically synthesized
caagctgttttttttgaaaaac

SEQ ID NO: 58793 - DNA, 22 bp, Artificial Sequence
  chemically synthesized
ttttttttgaaaaactccaaag

SEQ ID NO: 58794 - DNA, 22 bp, Artificial Sequence
  chemically synthesized
tttttgaaaaactccaaagaat

SEQ ID NO: 58795 - DNA, 22 bp, Artificial Sequence
  chemically synthesized
ttttgaaaaactccaaagaatg

SEQ ID NO: 58796 - DNA, 22 bp, Artificial Sequence
  chemically synthesized
tttgaaaaactccaaagaatgt

SEQ ID NO: 58797 - DNA, 22 bp, Artificial Sequence
  chemically synthesized
ttgaaaaactccaaagaatgta

SEQ ID NO: 58798 - DNA, 22 bp, Artificial Sequence
  chemically synthesized
tgaaaaactccaaagaatgtaa

SEQ ID NO: 58799 - DNA, 22 bp, Artificial Sequence
  chemically synthesized
gaaaaactccaaagaatgtaat

SEQ ID NO: 58800 - DNA, 22 bp, Artificial Sequence
  chemically synthesized
aaaaactccaaagaatgtaatg

SEQ ID NO: 58801 - DNA, 22 bp, Artificial Sequence
  chemically synthesized
caaagaatgtaatgtgtatttt

SEQ ID NO: 58802 - DNA, 22 bp, Artificial Sequence
  chemically synthesized
tctccaagtttgcttttttggg

SEQ ID NO: 58803 - DNA, 22 bp, Artificial Sequence
  chemically synthesized
ctccaagtttgcttttttgggc

SEQ ID NO: 58804 - DNA, 22 bp, Artificial Sequence
  chemically synthesized
tccaagtttgcttttttgggca

SEQ ID NO: 58805 - DNA, 22 bp, Artificial Sequence
  chemically synthesized
caagtttgcttttttgggcaaa

SEQ ID NO: 58806 - DNA, 22 bp, Artificial Sequence
  chemically synthesized
gcttttttgggcaaatgtaact

SEQ ID NO: 58807 - DNA, 22 bp, Artificial Sequence
  chemically synthesized
cttttttgggcaaatgtaacta

SEQ ID NO: 58808 - DNA, 22 bp, Artificial Sequence
  chemically synthesized
ttttgggcaaatgtaactacat

SEQ ID NO: 58809 - DNA, 22 bp, Artificial Sequence
  chemically synthesized
tttgggcaaatgtaactacatc

SEQ ID NO: 58810 - DNA, 22 bp, Artificial Sequence
  chemically synthesized
ttgggcaaatgtaactacatca

SEQ ID NO: 58811 - DNA, 22 bp, Artificial Sequence
  chemically synthesized
tgggcaaatgtaactacatcaa

SEQ ID NO: 58812 - DNA, 22 bp, Artificial Sequence
  chemically synthesized
gggcaaatgtaactacatcaaa

SEQ ID NO: 58813 - DNA, 22 bp, Artificial Sequence
  chemically synthesized
ggcaaatgtaactacatcaaaa

SEQ ID NO: 58814 - DNA, 22 bp, Artificial Sequence
  chemically synthesized
catcaaaatagaagtacgtttt

SEQ ID NO: 58815 - DNA, 22 bp, Artificial Sequence
  chemically synthesized
ttgaaaaagaaatagttgaatt

SEQ ID NO: 58816 - DNA, 22 bp, Artificial Sequence
  chemically synthesized
tgaaaaagaaatagttgaattc

SEQ ID NO: 58817 - DNA, 22 bp, Artificial Sequence
  chemically synthesized
gaaaaagaaatagttgaattca

SEQ ID NO: 58818 - DNA, 22 bp, Artificial Sequence
  chemically synthesized
aaaaagaaatagttgaattcaa

SEQ ID NO: 58819 - DNA, 22 bp, Artificial Sequence
  chemically synthesized
aattcaaacaaccaggtatttt

SEQ ID NO: 58820 - DNA, 22 bp, Artificial Sequence
  chemically synthesized
aaacaaccaggtattttaaatt

SEQ ID NO: 58821 - DNA, 22 bp, Artificial Sequence
  chemically synthesized
taaattcaattaactgactgaa

SEQ ID NO: 58822 - DNA, 22 bp, Artificial Sequence
  chemically synthesized
aaattcaattaactgactgaat

SEQ ID NO: 58823 - DNA, 22 bp, Artificial Sequence
  chemically synthesized
aattcaattaactgactgaatt

SEQ ID NO: 58824 - DNA, 22 bp, Artificial Sequence
  chemically synthesized
aattaactgactgaattcagtg

SEQ ID NO: 58825 - DNA, 22 bp, Artificial Sequence
  chemically synthesized
actgactgaattcagtgatatt

SEQ ID NO: 58826 - DNA, 22 bp, Artificial Sequence
  chemically synthesized
actgaattcagtgatattttcc

SEQ ID NO: 58827 - DNA, 22 bp, Artificial Sequence
  chemically synthesized
aattcagtgatattttcctcct

SEQ ID NO: 58828 - DNA, 22 bp, Artificial Sequence
  chemically synthesized
agtgatattttcctccttcctc

SEQ ID NO: 58829 - DNA, 22 bp, Artificial Sequence
  chemically synthesized
tcctccttcctcctcccaaaag

SEQ ID NO: 58830 - DNA, 22 bp, Artificial Sequence
  chemically synthesized
cctccttcctcctcccaaaagc

SEQ ID NO: 58831 - DNA, 22 bp, Artificial Sequence
  chemically synthesized
ctccttcctcctcccaaaagct

SEQ ID NO: 58832 - DNA, 22 bp, Artificial Sequence
  chemically synthesized
cttcctcctcccaaaagctggt

SEQ ID NO: 58833 - DNA, 22 bp, Artificial Sequence
  chemically synthesized
cctcctcccaaaagctggtttc

SEQ ID NO: 58834 - DNA, 22 bp, Artificial Sequence
  chemically synthesized
ctcctcccaaaagctggtttct

SEQ ID NO: 58835 - DNA, 22 bp, Artificial Sequence
  chemically synthesized
ctcccaaaagctggtttctctg

SEQ ID NO: 58836 - DNA, 22 bp, Artificial Sequence
  chemically synthesized
ccaaaagctggtttctctgtat

SEQ ID NO: 58837 - DNA, 22 bp, Artificial Sequence
  chemically synthesized
gtttctctgtatggacatagcc

SEQ ID NO: 58838 - DNA, 22 bp, Artificial Sequence
  chemically synthesized
ctctgtatggacatagcctaca

SEQ ID NO: 58839 - DNA, 22 bp, Artificial Sequence
  chemically synthesized
tctgtatggacatagcctacat

SEQ ID NO: 58840 - DNA, 22 bp, Artificial Sequence
  chemically synthesized
tgtatggacatagcctacatat

SEQ ID NO: 58841 - DNA, 22 bp, Artificial Sequence
  chemically synthesized
tatggacatagcctacatatgc

SEQ ID NO: 58842 - DNA, 22 bp, Artificial Sequence
  chemically synthesized
catatgctgagtccctggagtt

SEQ ID NO: 58843 - DNA, 22 bp, Artificial Sequence
  chemically synthesized
agtccctggagttaggaatttt

SEQ ID NO: 58844 - DNA, 22 bp, Artificial Sequence
  chemically synthesized
gagttaggaatttttgcttgtt

SEQ ID NO: 58845 - DNA, 22 bp, Artificial Sequence
  chemically synthesized
ggaatttttgcttgttaaaggc

SEQ ID NO: 58846 - DNA, 22 bp, Artificial Sequence
  chemically synthesized
ttgcttgttaaaggcatccgat

SEQ ID NO: 58847 - DNA, 22 bp, Artificial Sequence
  chemically synthesized
tgcttgttaaaggcatccgatg

SEQ ID NO: 58848 - DNA, 22 bp, Artificial Sequence
  chemically synthesized
gcttgttaaaggcatccgatgc

SEQ ID NO: 58849 - DNA, 22 bp, Artificial Sequence
  chemically synthesized
cttgttaaaggcatccgatgca

SEQ ID NO: 58850 - DNA, 22 bp, Artificial Sequence
  chemically synthesized
gttaaaggcatccgatgcaaca

SEQ ID NO: 58851 - DNA, 22 bp, Artificial Sequence
  chemically synthesized
ttaaaggcatccgatgcaacat

SEQ ID NO: 58852 - DNA, 22 bp, Artificial Sequence
  chemically synthesized
aaggcatccgatgcaacatgtt

SEQ ID NO: 58853 - DNA, 22 bp, Artificial Sequence
  chemically synthesized
agaagaactctccctctgttag

SEQ ID NO: 58854 - DNA, 22 bp, Artificial Sequence
  chemically synthesized
gaagaactctccctctgttagt

SEQ ID NO: 58855 - DNA, 22 bp, Artificial Sequence
  chemically synthesized
tccctctgttagtgttgaagac

SEQ ID NO: 58856 - DNA, 22 bp, Artificial Sequence
  chemically synthesized
cctctgttagtgttgaagacag

SEQ ID NO: 58857 - DNA, 22 bp, Artificial Sequence
  chemically synthesized
tgttagtgttgaagacagcata

SEQ ID NO: 58858 - DNA, 22 bp, Artificial Sequence
  chemically synthesized
ttagtgttgaagacagcataaa

SEQ ID NO: 58859 - DNA, 22 bp, Artificial Sequence
  chemically synthesized
gtgttgaagacagcataaattg

SEQ ID NO: 58860 - DNA, 22 bp, Artificial Sequence
  chemically synthesized
aagacagcataaattgagggaa

SEQ ID NO: 58861 - DNA, 22 bp, Artificial Sequence
  chemically synthesized
agggaaaatgttctttttttat

SEQ ID NO: 58862 - DNA, 22 bp, Artificial Sequence
  chemically synthesized
tttttttattcatcatgtaggt

SEQ ID NO: 58863 - DNA, 22 bp, Artificial Sequence
  chemically synthesized
tttttattcatcatgtaggtaa

SEQ ID NO: 58864 - DNA, 22 bp, Artificial Sequence
  chemically synthesized
ttttattcatcatgtaggtaaa

SEQ ID NO: 58865 - DNA, 22 bp, Artificial Sequence
  chemically synthesized
tttattcatcatgtaggtaaaa

SEQ ID NO: 58866 - DNA, 22 bp, Artificial Sequence
  chemically synthesized
ttattcatcatgtaggtaaaag

SEQ ID NO: 58867 - DNA, 22 bp, Artificial Sequence
  chemically synthesized
tattcatcatgtaggtaaaagc

SEQ ID NO: 58868 - DNA, 22 bp, Artificial Sequence
  chemically synthesized
attcatcatgtaggtaaaagca

SEQ ID NO: 58869 - DNA, 22 bp, Artificial Sequence
  chemically synthesized
ttcatcatgtaggtaaaagcat

SEQ ID NO: 58870 - DNA, 22 bp, Artificial Sequence
  chemically synthesized
atcatgtaggtaaaagcatatg

SEQ ID NO: 58871 - DNA, 22 bp, Artificial Sequence
  chemically synthesized
ttctgggacatgcgatctttgc

SEQ ID NO: 58872 - DNA, 22 bp, Artificial Sequence
  chemically synthesized
tgggacatgcgatctttgcaat

SEQ ID NO: 58873 - DNA, 22 bp, Artificial Sequence
  chemically synthesized
ggacatgcgatctttgcaatcc

SEQ ID NO: 58874 - DNA, 22 bp, Artificial Sequence
  chemically synthesized
tgcaatccattttttaaacttg

SEQ ID NO: 58875 - DNA, 22 bp, Artificial Sequence
  chemically synthesized
gcaatccattttttaaacttgg

SEQ ID NO: 58876 - DNA, 22 bp, Artificial Sequence
  chemically synthesized
caatccattttttaaacttggt

SEQ ID NO: 58877 - DNA, 22 bp, Artificial Sequence
  chemically synthesized
tttaaacttggtgtttaccatt

SEQ ID NO: 58878 - DNA, 22 bp, Artificial Sequence
  chemically synthesized
ttaaacttggtgtttaccattg

SEQ ID NO: 58879 - DNA, 22 bp, Artificial Sequence
  chemically synthesized
taaacttggtgtttaccattgg

SEQ ID NO: 58880 - DNA, 22 bp, Artificial Sequence
  chemically synthesized
aaacttggtgtttaccattggc

SEQ ID NO: 58881 - DNA, 22 bp, Artificial Sequence
  chemically synthesized
aacttggtgtttaccattggct

SEQ ID NO: 58882 - DNA, 22 bp, Artificial Sequence
  chemically synthesized
ggtgtttaccattggcttttag

SEQ ID NO: 58883 - DNA, 22 bp, Artificial Sequence
  chemically synthesized
gtgtttaccattggcttttagc

SEQ ID NO: 58884 - DNA, 22 bp, Artificial Sequence
  chemically synthesized
accattggcttttagcacggat

SEQ ID NO: 58885 - DNA, 22 bp, Artificial Sequence
  chemically synthesized
ccattggcttttagcacggatg

SEQ ID NO: 58886 - DNA, 22 bp, Artificial Sequence
  chemically synthesized
gcttttagcacggatgtttctg

SEQ ID NO: 58887 - DNA, 22 bp, Artificial Sequence
  chemically synthesized
ttagcacggatgtttctgtttt

SEQ ID NO: 58888 - DNA, 22 bp, Artificial Sequence
  chemically synthesized
tagcacggatgtttctgttttc

SEQ ID NO: 58889 - DNA, 22 bp, Artificial Sequence
  chemically synthesized
agcacggatgtttctgttttcc

SEQ ID NO: 58890 - DNA, 22 bp, Artificial Sequence
  chemically synthesized
gcacggatgtttctgttttcca

SEQ ID NO: 58891 - DNA, 22 bp, Artificial Sequence
  chemically synthesized
ctgttttccacactgtccagca

SEQ ID NO: 58892 - DNA, 22 bp, Artificial Sequence
  chemically synthesized
tgttttccacactgtccagcaa

SEQ ID NO: 58893 - DNA, 22 bp, Artificial Sequence
  chemically synthesized
ttttccacactgtccagcaaat

SEQ ID NO: 58894 - DNA, 22 bp, Artificial Sequence
  chemically synthesized
tccacactgtccagcaaatacc

SEQ ID NO: 58895 - DNA, 22 bp, Artificial Sequence
  chemically synthesized
ccacactgtccagcaaatacca

SEQ ID NO: 58896 - DNA, 22 bp, Artificial Sequence
  chemically synthesized
cacactgtccagcaaataccat

SEQ ID NO: 58897 - DNA, 22 bp, Artificial Sequence
  chemically synthesized
tccagcaaataccatttatatg

SEQ ID NO: 58898 - DNA, 22 bp, Artificial Sequence
  chemically synthesized
atatgtggcattgaatgagata

SEQ ID NO: 58899 - DNA, 22 bp, Artificial Sequence
  chemically synthesized
tatgtggcattgaatgagatat

SEQ ID NO: 58900 - DNA, 22 bp, Artificial Sequence
  chemically synthesized
aatgagatatgaaatgttttca

SEQ ID NO: 58901 - DNA, 22 bp, Artificial Sequence
  chemically synthesized
tcagaagcatgctgaaaaaggg

SEQ ID NO: 58902 - DNA, 22 bp, Artificial Sequence
  chemically synthesized
cagaagcatgctgaaaaagggc

SEQ ID NO: 58903 - DNA, 22 bp, Artificial Sequence
  chemically synthesized
agaagcatgctgaaaaagggca

SEQ ID NO: 58904 - DNA, 22 bp, Artificial Sequence
  chemically synthesized
aaaaagggcattcaaagttatc

SEQ ID NO: 58905 - DNA, 22 bp, Artificial Sequence
  chemically synthesized
aaagttatcctttggataatga

SEQ ID NO: 58906 - DNA, 22 bp, Artificial Sequence
  chemically synthesized
tcctttggataatgatgatcta

SEQ ID NO: 58907 - DNA, 22 bp, Artificial Sequence
  chemically synthesized
tggataatgatgatctaaaact

SEQ ID NO: 58908 - DNA, 22 bp, Artificial Sequence
  chemically synthesized
ggataatgatgatctaaaactt

SEQ ID NO: 58909 - DNA, 22 bp, Artificial Sequence
  chemically synthesized
gataatgatgatctaaaacttt

SEQ ID NO: 58910 - DNA, 22 bp, Artificial Sequence
  chemically synthesized
aaactttcttttattatcccat

SEQ ID NO: 58911 - DNA, 22 bp, Artificial Sequence
  chemically synthesized
tcttttattatcccatgtgctc

SEQ ID NO: 58912 - DNA, 22 bp, Artificial Sequence
  chemically synthesized
cttttattatcccatgtgctca

SEQ ID NO: 58913 - DNA, 22 bp, Artificial Sequence
  chemically synthesized
ttttattatcccatgtgctcag

SEQ ID NO: 58914 - DNA, 22 bp, Artificial Sequence
  chemically synthesized
ttattatcccatgtgctcagag

SEQ ID NO: 58915 - DNA, 22 bp, Artificial Sequence
  chemically synthesized
tattatcccatgtgctcagagt

SEQ ID NO: 58916 - DNA, 22 bp, Artificial Sequence
  chemically synthesized
attatcccatgtgctcagagta

SEQ ID NO: 58917 - DNA, 22 bp, Artificial Sequence
  chemically synthesized
ttatcccatgtgctcagagtaa

SEQ ID NO: 58918 - DNA, 22 bp, Artificial Sequence
  chemically synthesized
tcccatgtgctcagagtaaggg

SEQ ID NO: 58919 - DNA, 22 bp, Artificial Sequence
  chemically synthesized
agagtaaggggcaaatgaatca

SEQ ID NO: 58920 - DNA, 22 bp, Artificial Sequence
  chemically synthesized
tgaaatatgtgttccttgtagg

SEQ ID NO: 58921 - DNA, 22 bp, Artificial Sequence
  chemically synthesized
cttgtaggacacaggcactctt

SEQ ID NO: 58922 - DNA, 22 bp, Artificial Sequence
  chemically synthesized
gtaggacacaggcactcttgag

SEQ ID NO: 58923 - DNA, 22 bp, Artificial Sequence
  chemically synthesized
taggacacaggcactcttgaga

SEQ ID NO: 58924 - DNA, 22 bp, Artificial Sequence
  chemically synthesized
ttgagatctatagcttcaataa

SEQ ID NO: 58925 - DNA, 22 bp, Artificial Sequence
  chemically synthesized
gagatctatagcttcaataaaa

SEQ ID NO: 58926 - DNA, 22 bp, Artificial Sequence
  chemically synthesized
agatctatagcttcaataaaaa

SEQ ID NO: 58927 - DNA, 22 bp, Artificial Sequence
  chemically synthesized
tagcttcaataaaaaggtaatt

SEQ ID NO: 58928 - DNA, 22 bp, Artificial Sequence
  chemically synthesized
caataaaaaggtaatttattta

SEQ ID NO: 58929 - DNA, 22 bp, Artificial Sequence
  chemically synthesized
aataaaaaggtaatttatttaa

SEQ ID NO: 58930 - DNA, 22 bp, Artificial Sequence
  chemically synthesized
atttaaattactgcctctttaa

SEQ ID NO: 58931 - DNA, 22 bp, Artificial Sequence
  chemically synthesized
tttaaattactgcctctttaat

SEQ ID NO: 58932 - DNA, 22 bp, Artificial Sequence
  chemically synthesized
aaattactgcctctttaattta

SEQ ID NO: 58933 - DNA, 22 bp, Artificial Sequence
  chemically synthesized
aattactgcctctttaatttat

SEQ ID NO: 58934 - DNA, 22 bp, Artificial Sequence
  chemically synthesized
ctgcctctttaatttataatgt

SEQ ID NO: 58935 - DNA, 22 bp, Artificial Sequence
  chemically synthesized
cctctttaatttataatgtttt

SEQ ID NO: 58936 - DNA, 22 bp, Artificial Sequence
  chemically synthesized
tttaatttataatgttttgggg

SEQ ID NO: 58937 - DNA, 22 bp, Artificial Sequence
  chemically synthesized
taatttataatgttttggggat

SEQ ID NO: 58938 - DNA, 22 bp, Artificial Sequence
  chemically synthesized
aatttataatgttttggggatt

SEQ ID NO: 58939 - DNA, 22 bp, Artificial Sequence
  chemically synthesized
atttataatgttttggggattt

SEQ ID NO: 58940 - DNA, 22 bp, Artificial Sequence
  chemically synthesized
ataatgttttggggatttttaa

SEQ ID NO: 58941 - DNA, 22 bp, Artificial Sequence
  chemically synthesized
taatgttttggggatttttaat

SEQ ID NO: 58942 - DNA, 22 bp, Artificial Sequence
  chemically synthesized
tggggatttttaataggcatgc

SEQ ID NO: 58943 - DNA, 22 bp, Artificial Sequence
  chemically synthesized
ggggatttttaataggcatgct

SEQ ID NO: 58944 - DNA, 22 bp, Artificial Sequence
  chemically synthesized
gggatttttaataggcatgctc

SEQ ID NO: 58945 - DNA, 22 bp, Artificial Sequence
  chemically synthesized
ttaataggcatgctctgtaagg

SEQ ID NO: 58946 - DNA, 22 bp, Artificial Sequence
  chemically synthesized
taataggcatgctctgtaaggg

SEQ ID NO: 58947 - DNA, 22 bp, Artificial Sequence
  chemically synthesized
aataggcatgctctgtaagggc

SEQ ID NO: 58948 - DNA, 22 bp, Artificial Sequence
  chemically synthesized
ataggcatgctctgtaagggca

SEQ ID NO: 58949 - DNA, 22 bp, Artificial Sequence
  chemically synthesized
tgtaagggcactggtaatcagc

SEQ ID NO: 58950 - DNA, 22 bp, Artificial Sequence
  chemically synthesized
taagggcactggtaatcagctg

SEQ ID NO: 58951 - DNA, 22 bp, Artificial Sequence
  chemically synthesized
gtaatcagctgtttctgatttt

SEQ ID NO: 58952 - DNA, 22 bp, Artificial Sequence
  chemically synthesized
tttctgattttgcatgctcttc

SEQ ID NO: 58953 - DNA, 22 bp, Artificial Sequence
  chemically synthesized
ctgattttgcatgctcttctat

SEQ ID NO: 58954 - DNA, 22 bp, Artificial Sequence
  chemically synthesized
tgattttgcatgctcttctatc

SEQ ID NO: 58955 - DNA, 22 bp, Artificial Sequence
  chemically synthesized
attttgcatgctcttctatctc

SEQ ID NO: 58956 - DNA, 22 bp, Artificial Sequence
  chemically synthesized
tgcatgctcttctatctctggt

SEQ ID NO: 58957 - DNA, 22 bp, Artificial Sequence
  chemically synthesized
gcatgctcttctatctctggta

SEQ ID NO: 58958 - DNA, 22 bp, Artificial Sequence
  chemically synthesized
catgctcttctatctctggtaa

SEQ ID NO: 58959 - DNA, 22 bp, Artificial Sequence
  chemically synthesized
ttctatctctggtaacaaaata

SEQ ID NO: 58960 - DNA, 22 bp, Artificial Sequence
  chemically synthesized
ctatctctggtaacaaaataaa

SEQ ID NO: 58961 - DNA, 22 bp, Artificial Sequence
  chemically synthesized
tatctctggtaacaaaataaaa

SEQ ID NO: 58962 - DNA, 22 bp, Artificial Sequence
  chemically synthesized
tctctggtaacaaaataaaatc

SEQ ID NO: 58963 - DNA, 22 bp, Artificial Sequence
  chemically synthesized
tggtaacaaaataaaatcttaa

SEQ ID NO: 58964 - DNA, 22 bp, Artificial Sequence
  chemically synthesized
gtaacaaaataaaatcttaaaa

SEQ ID NO: 58965 - DNA, 22 bp, Artificial Sequence
  chemically synthesized
aaaaaacaagaaaaaagaaaaa

SEQ ID NO: 58966 - DNA, 22 bp, Artificial Sequence
  chemically synthesized
aaaaacaagaaaaaagaaaaaa

SEQ ID NO: 58967 - DNA, 22 bp, Artificial Sequence
  chemically synthesized
agccctaacccaacccaaaagc

SEQ ID NO: 58968 - DNA, 22 bp, Artificial Sequence
  chemically synthesized
gccctaacccaacccaaaagca

SEQ ID NO: 58969 - DNA, 22 bp, Artificial Sequence
  chemically synthesized
acccaacccaaaagcaaataac

SEQ ID NO: 58970 - DNA, 22 bp, Artificial Sequence
  chemically synthesized
tactttccccttccattattac

SEQ ID NO: 58971 - DNA, 22 bp, Artificial Sequence
  chemically synthesized
ctttccccttccattattacct

SEQ ID NO: 58972 - DNA, 22 bp, Artificial Sequence
  chemically synthesized
tccccttccattattacctgaa

SEQ ID NO: 58973 - DNA, 22 bp, Artificial Sequence
  chemically synthesized
ccccttccattattacctgaaa

SEQ ID NO: 58974 - DNA, 22 bp, Artificial Sequence
  chemically synthesized
cccttccattattacctgaaat

SEQ ID NO: 58975 - DNA, 22 bp, Artificial Sequence
  chemically synthesized
ccattattacctgaaataaaag

SEQ ID NO: 58976 - DNA, 22 bp, Artificial Sequence
  chemically synthesized
cattattacctgaaataaaagc

SEQ ID NO: 58977 - DNA, 22 bp, Artificial Sequence
  chemically synthesized
ttacctgaaataaaagcatgat

SEQ ID NO: 58978 - DNA, 22 bp, Artificial Sequence
  chemically synthesized
cctgaaataaaagcatgataac

SEQ ID NO: 58979 - DNA, 22 bp, Artificial Sequence
  chemically synthesized
aaataaaagcatgataacattc

SEQ ID NO: 58980 - DNA, 22 bp, Artificial Sequence
  chemically synthesized
atgccagagataggtgacaaaa

SEQ ID NO: 58981 - DNA, 22 bp, Artificial Sequence
  chemically synthesized
tgtattcagacatgaagtttag

SEQ ID NO: 58982 - DNA, 22 bp, Artificial Sequence
  chemically synthesized
agacatgaagtttaggatttca

SEQ ID NO: 58983 - DNA, 22 bp, Artificial Sequence
  chemically synthesized
aggatttcatagcccaatgttc

SEQ ID NO: 58984 - DNA, 22 bp, Artificial Sequence
  chemically synthesized
ggatttcatagcccaatgttct

SEQ ID NO: 58985 - DNA, 22 bp, Artificial Sequence
  chemically synthesized
catagcccaatgttctctcttc

SEQ ID NO: 58986 - DNA, 22 bp, Artificial Sequence
  chemically synthesized
atagcccaatgttctctcttct

SEQ ID NO: 58987 - DNA, 22 bp, Artificial Sequence
  chemically synthesized
tctcttctcccccacctcttat

SEQ ID NO: 58988 - DNA, 22 bp, Artificial Sequence
  chemically synthesized
tcttctcccccacctcttattg

SEQ ID NO: 58989 - DNA, 22 bp, Artificial Sequence
  chemically synthesized
ttctcccccacctcttattgtg

SEQ ID NO: 58990 - DNA, 22 bp, Artificial Sequence
  chemically synthesized
ctcccccacctcttattgtgtt

SEQ ID NO: 58991 - DNA, 22 bp, Artificial Sequence
  chemically synthesized
tcccccacctcttattgtgttg

SEQ ID NO: 58992 - DNA, 22 bp, Artificial Sequence
  chemically synthesized
ccccacctcttattgtgttgtg

SEQ ID NO: 58993 - DNA, 22 bp, Artificial Sequence
  chemically synthesized
ttattgtgttgtgcaaatgtat

SEQ ID NO: 58994 - DNA, 22 bp, Artificial Sequence
  chemically synthesized
attgtgttgtgcaaatgtatca

SEQ ID NO: 58995 - DNA, 22 bp, Artificial Sequence
  chemically synthesized
ttgtgttgtgcaaatgtatcag

SEQ ID NO: 58996 - DNA, 22 bp, Artificial Sequence
  chemically synthesized
tgttgtgcaaatgtatcagccg

SEQ ID NO: 58997 - DNA, 22 bp, Artificial Sequence
  chemically synthesized
tgcaaatgtatcagccgttgta

SEQ ID NO: 58998 - DNA, 22 bp, Artificial Sequence
  chemically synthesized
tattgttaatgcatgataggaa

SEQ ID NO: 58999 - DNA, 22 bp, Artificial Sequence
  chemically synthesized
ttaatgcatgataggaagctgc

SEQ ID NO: 59000 - DNA, 22 bp, Artificial Sequence
  chemically synthesized
atgcatgataggaagctgccgc

SEQ ID NO: 59001 - DNA, 22 bp, Artificial Sequence
  chemically synthesized
ccgctaggacagtcttggctca

SEQ ID NO: 59002 - DNA, 22 bp, Artificial Sequence
  chemically synthesized
ggacagtcttggctcactaatg

SEQ ID NO: 59003 - DNA, 22 bp, Artificial Sequence
  chemically synthesized
ggctcactaatgcggtcagctg

SEQ ID NO: 59004 - DNA, 22 bp, Artificial Sequence
  chemically synthesized
gctcactaatgcggtcagctgt

SEQ ID NO: 59005 - DNA, 22 bp, Artificial Sequence
  chemically synthesized
actaatgcggtcagctgtgtca

SEQ ID NO: 59006 - DNA, 22 bp, Artificial Sequence
  chemically synthesized
atgcggtcagctgtgtcacaat

SEQ ID NO: 59007 - DNA, 22 bp, Artificial Sequence
  chemically synthesized
tgtcacaatgtgatatatagat

SEQ ID NO: 59008 - DNA, 22 bp, Artificial Sequence
  chemically synthesized
tatttaccatggcatattttgt

SEQ ID NO: 59009 - DNA, 22 bp, Artificial Sequence
  chemically synthesized
accatggcatattttgtttgcg

SEQ ID NO: 59010 - DNA, 22 bp, Artificial Sequence
  chemically synthesized
ccatggcatattttgtttgcga

SEQ ID NO: 59011 - DNA, 22 bp, Artificial Sequence
  chemically synthesized
tgtttgcgaaatgggagcggat

SEQ ID NO: 59012 - DNA, 22 bp, Artificial Sequence
  chemically synthesized
gtttgcgaaatgggagcggatg

SEQ ID NO: 59013 - DNA, 22 bp, Artificial Sequence
  chemically synthesized
tttgcgaaatgggagcggatga

SEQ ID NO: 59014 - DNA, 22 bp, Artificial Sequence
  chemically synthesized
gcgaaatgggagcggatgataa

SEQ ID NO: 59015 - DNA, 22 bp, Artificial Sequence
  chemically synthesized
cgaaatgggagcggatgataaa

SEQ ID NO: 59016 - DNA, 22 bp, Artificial Sequence
  chemically synthesized
cagttttcacactagttcctgt

SEQ ID NO: 59017 - DNA, 22 bp, Artificial Sequence
  chemically synthesized
tcacactagttcctgtggtccg

SEQ ID NO: 59018 - DNA, 22 bp, Artificial Sequence
  chemically synthesized
cacactagttcctgtggtccgg

SEQ ID NO: 59019 - DNA, 22 bp, Artificial Sequence
  chemically synthesized
acactagttcctgtggtccgga

SEQ ID NO: 59020 - DNA, 22 bp, Artificial Sequence
  chemically synthesized
gttcctgtggtccggagtctct

SEQ ID NO: 59021 - DNA, 22 bp, Artificial Sequence
  chemically synthesized
ctgtggtccggagtctctcaaa

SEQ ID NO: 59022 - DNA, 22 bp, Artificial Sequence
  chemically synthesized
tggtccggagtctctcaaacaa

SEQ ID NO: 59023 - DNA, 22 bp, Artificial Sequence
  chemically synthesized
tcaaacaataaagcacccctga

SEQ ID NO: 59024 - DNA, 22 bp, Artificial Sequence
  chemically synthesized
aaacaataaagcacccctgata

SEQ ID NO: 59025 - DNA, 22 bp, Artificial Sequence
  chemically synthesized
ataatggagaggtatttatggg

SEQ ID NO: 59026 - DNA, 22 bp, Artificial Sequence
  chemically synthesized
atgggaacataattgacttcaa

SEQ ID NO: 59027 - DNA, 22 bp, Artificial Sequence
  chemically synthesized
tgggaacataattgacttcaaa

SEQ ID NO: 59028 - DNA, 22 bp, Artificial Sequence
  chemically synthesized
acttcaaagttttagatctctg

SEQ ID NO: 59029 - DNA, 22 bp, Artificial Sequence
  chemically synthesized
caaagttttagatctctggctg

SEQ ID NO: 59030 - DNA, 22 bp, Artificial Sequence
  chemically synthesized
aaagttttagatctctggctga

SEQ ID NO: 59031 - DNA, 22 bp, Artificial Sequence
  chemically synthesized
tagatctctggctgaagtttaa

SEQ ID NO: 59032 - DNA, 22 bp, Artificial Sequence
  chemically synthesized
agatctctggctgaagtttaag

SEQ ID NO: 59033 - DNA, 22 bp, Artificial Sequence
  chemically synthesized
gatctctggctgaagtttaaga

SEQ ID NO: 59034 - DNA, 22 bp, Artificial Sequence
  chemically synthesized
tggctgaagtttaagatgggat

SEQ ID NO: 59035 - DNA, 22 bp, Artificial Sequence
  chemically synthesized
gctgaagtttaagatgggatag

SEQ ID NO: 59036 - DNA, 22 bp, Artificial Sequence
  chemically synthesized
aagtttaagatgggatagtcca

SEQ ID NO: 59037 - DNA, 22 bp, Artificial Sequence
  chemically synthesized
aagatgggatagtccattacat

SEQ ID NO: 59038 - DNA, 22 bp, Artificial Sequence
  chemically synthesized
agatgggatagtccattacatt

SEQ ID NO: 59039 - DNA, 22 bp, Artificial Sequence
  chemically synthesized
cattaatgtctgtgcttaaagc

SEQ ID NO: 59040 - DNA, 22 bp, Artificial Sequence
  chemically synthesized
atgtctgtgcttaaagctccta

SEQ ID NO: 59041 - DNA, 22 bp, Artificial Sequence
  chemically synthesized
tgcttaaagctcctatttggct

SEQ ID NO: 59042 - DNA, 22 bp, Artificial Sequence
  chemically synthesized
aaagctcctatttggcttaaat

SEQ ID NO: 59043 - DNA, 22 bp, Artificial Sequence
  chemically synthesized
aagctcctatttggcttaaata

SEQ ID NO: 59044 - DNA, 22 bp, Artificial Sequence
  chemically synthesized
ctatttggcttaaataaattat

SEQ ID NO: 59045 - DNA, 22 bp, Artificial Sequence
  chemically synthesized
tttggcttaaataaattattta

SEQ ID NO: 59046 - DNA, 22 bp, Artificial Sequence
  chemically synthesized
ggcttaaataaattatttaggg

SEQ ID NO: 59047 - DNA, 22 bp, Artificial Sequence
  chemically synthesized
gcttaaataaattatttagggt

SEQ ID NO: 59048 - DNA, 22 bp, Artificial Sequence
  chemically synthesized
aaataaattatttagggtttac

SEQ ID NO: 59049 - DNA, 22 bp, Artificial Sequence
  chemically synthesized
aataaattatttagggtttact

SEQ ID NO: 59050 - DNA, 22 bp, Artificial Sequence
  chemically synthesized
tttagggtttactgcttaaacc

SEQ ID NO: 59051 - DNA, 22 bp, Artificial Sequence
  chemically synthesized
agggtttactgcttaaaccttg

SEQ ID NO: 59052 - DNA, 22 bp, Artificial Sequence
  chemically synthesized
gggtttactgcttaaaccttgg

SEQ ID NO: 59053 - DNA, 22 bp, Artificial Sequence
  chemically synthesized
actgcttaaaccttggtcaatt

SEQ ID NO: 59054 - DNA, 22 bp, Artificial Sequence
  chemically synthesized
ctgcttaaaccttggtcaattc

SEQ ID NO: 59055 - DNA, 22 bp, Artificial Sequence
  chemically synthesized
cttaaaccttggtcaattcttg

SEQ ID NO: 59056 - DNA, 22 bp, Artificial Sequence
  chemically synthesized
aaaccttggtcaattcttgaac

SEQ ID NO: 59057 - DNA, 22 bp, Artificial Sequence
  chemically synthesized
aaccttggtcaattcttgaacg

SEQ ID NO: 59058 - DNA, 22 bp, Artificial Sequence
  chemically synthesized
ggtcaattcttgaacgtttggg

SEQ ID NO: 59059 - DNA, 22 bp, Artificial Sequence
  chemically synthesized
gtcaattcttgaacgtttgggc

SEQ ID NO: 59060 - DNA, 22 bp, Artificial Sequence
  chemically synthesized
ttgaacgtttgggctagttaag

SEQ ID NO: 59061 - DNA, 22 bp, Artificial Sequence
  chemically synthesized
gaacgtttgggctagttaagta

SEQ ID NO: 59062 - DNA, 22 bp, Artificial Sequence
  chemically synthesized
aacgtttgggctagttaagtaa

SEQ ID NO: 59063 - DNA, 22 bp, Artificial Sequence
  chemically synthesized
gggctagttaagtaattttcca

SEQ ID NO: 59064 - DNA, 22 bp, Artificial Sequence
  chemically synthesized
ggctagttaagtaattttccag

SEQ ID NO: 59065 - DNA, 22 bp, Artificial Sequence
  chemically synthesized
gttaagtaattttccagtgact

SEQ ID NO: 59066 - DNA, 22 bp, Artificial Sequence
  chemically synthesized
agtaattttccagtgactttct

SEQ ID NO: 59067 - DNA, 22 bp, Artificial Sequence
  chemically synthesized
tccagtgactttctgtgccttg

SEQ ID NO: 59068 - DNA, 22 bp, Artificial Sequence
  chemically synthesized
ccagtgactttctgtgccttgg

SEQ ID NO: 59069 - DNA, 22 bp, Artificial Sequence
  chemically synthesized
cagtgactttctgtgccttggt

SEQ ID NO: 59070 - DNA, 22 bp, Artificial Sequence
  chemically synthesized
tctgtgccttggtgattcattt

SEQ ID NO: 59071 - DNA, 22 bp, Artificial Sequence
  chemically synthesized
ctgtgccttggtgattcattta

SEQ ID NO: 59072 - DNA, 22 bp, Artificial Sequence
  chemically synthesized
tgtgccttggtgattcatttac

SEQ ID NO: 59073 - DNA, 22 bp, Artificial Sequence
  chemically synthesized
tgccttggtgattcatttactt

SEQ ID NO: 59074 - DNA, 22 bp, Artificial Sequence
  chemically synthesized
ggtgattcatttacttgattga

SEQ ID NO: 59075 - DNA, 22 bp, Artificial Sequence
  chemically synthesized
gtgattcatttacttgattgag

SEQ ID NO: 59076 - DNA, 22 bp, Artificial Sequence
  chemically synthesized
atttacttgattgagctcctgt

SEQ ID NO: 59077 - DNA, 22 bp, Artificial Sequence
  chemically synthesized
acttgattgagctcctgtgtgc

SEQ ID NO: 59078 - DNA, 22 bp, Artificial Sequence
  chemically synthesized
cttgattgagctcctgtgtgct

SEQ ID NO: 59079 - DNA, 22 bp, Artificial Sequence
  chemically synthesized
gattgagctcctgtgtgctcgt

SEQ ID NO: 59080 - DNA, 22 bp, Artificial Sequence
  chemically synthesized
attgagctcctgtgtgctcgta

SEQ ID NO: 59081 - DNA, 22 bp, Artificial Sequence
  chemically synthesized
agctcctgtgtgctcgtatgat

SEQ ID NO: 59082 - DNA, 22 bp, Artificial Sequence
  chemically synthesized
ctgtgtgctcgtatgatttcta

SEQ ID NO: 59083 - DNA, 22 bp, Artificial Sequence
  chemically synthesized
tgtgctcgtatgatttctaaat

SEQ ID NO: 59084 - DNA, 22 bp, Artificial Sequence
  chemically synthesized
gtatgatttctaaatgtatttc

SEQ ID NO: 59085 - DNA, 22 bp, Artificial Sequence
  chemically synthesized
ctaaatgtatttctcaagtttt

SEQ ID NO: 59086 - DNA, 22 bp, Artificial Sequence
  chemically synthesized
taaatgtatttctcaagttttg

SEQ ID NO: 59087 - DNA, 22 bp, Artificial Sequence
  chemically synthesized
aatgtatttctcaagttttgcc

SEQ ID NO: 59088 - DNA, 22 bp, Artificial Sequence
  chemically synthesized
ctcaagttttgcctggcaatga

SEQ ID NO: 59089 - DNA, 22 bp, Artificial Sequence
  chemically synthesized
tcaagttttgcctggcaatgaa

SEQ ID NO: 59090 - DNA, 22 bp, Artificial Sequence
  chemically synthesized
aagttttgcctggcaatgaatg

SEQ ID NO: 59091 - DNA, 22 bp, Artificial Sequence
  chemically synthesized
tgcctggcaatgaatgattttg

SEQ ID NO: 59092 - DNA, 22 bp, Artificial Sequence
  chemically synthesized
gcctggcaatgaatgattttgc

SEQ ID NO: 59093 - DNA, 22 bp, Artificial Sequence
  chemically synthesized
cctggcaatgaatgattttgct

SEQ ID NO: 59094 - DNA, 22 bp, Artificial Sequence
  chemically synthesized
gcaatgaatgattttgcttact

SEQ ID NO: 59095 - DNA, 22 bp, Artificial Sequence
  chemically synthesized
tgcttactggagtcttgtgtgg

SEQ ID NO: 59096 - DNA, 22 bp, Artificial Sequence
  chemically synthesized
gcttactggagtcttgtgtggt

SEQ ID NO: 59097 - DNA, 22 bp, Artificial Sequence
  chemically synthesized
cttactggagtcttgtgtggta

SEQ ID NO: 59098 - DNA, 22 bp, Artificial Sequence
  chemically synthesized
actggagtcttgtgtggtacac

SEQ ID NO: 59099 - DNA, 22 bp, Artificial Sequence
  chemically synthesized
ctggagtcttgtgtggtacacc

SEQ ID NO: 59100 - DNA, 22 bp, Artificial Sequence
  chemically synthesized
gagtcttgtgtggtacacctat

SEQ ID NO: 59101 - DNA, 22 bp, Artificial Sequence
  chemically synthesized
gtgtggtacacctataaaaggc

SEQ ID NO: 59102 - DNA, 22 bp, Artificial Sequence
  chemically synthesized
tgtggtacacctataaaaggct

SEQ ID NO: 59103 - DNA, 22 bp, Artificial Sequence
  chemically synthesized
taaaaggcttattaactctttt

SEQ ID NO: 59104 - DNA, 22 bp, Artificial Sequence
  chemically synthesized
attaactctttttgaaaaaaaa

SEQ ID NO: 59105 - DNA, 22 bp, Artificial Sequence
  chemically synthesized
ttaactctttttgaaaaaaaaa

SEQ ID NO: 59106 - DNA, 22 bp, Artificial Sequence
  chemically synthesized
actctttttgaaaaaaaaaaaa

SEQ ID NO: 59107 - DNA, 22 bp, Artificial Sequence
  chemically synthesized
tttttgaaaaaaaaaaaaatcc

SEQ ID NO: 59108 - DNA, 22 bp, Artificial Sequence
  chemically synthesized
tttgaaaaaaaaaaaaatcccc

SEQ ID NO: 59109 - DNA, 22 bp, Artificial Sequence
  chemically synthesized
ttgaaaaaaaaaaaaatcccca

SEQ ID NO: 59110 - DNA, 22 bp, Artificial Sequence
  chemically synthesized
tgaaaaaaaaaaaaatccccaa

SEQ ID NO: 59111 - DNA, 22 bp, Artificial Sequence
  chemically synthesized
gaaaaaaaaaaaaatccccaaa

SEQ ID NO: 59112 - DNA, 22 bp, Artificial Sequence
  chemically synthesized
aaaaaaaaaaaaatccccaaac

SEQ ID NO: 59113 - DNA, 22 bp, Artificial Sequence
  chemically synthesized
tcatcataagataaagcatata

SEQ ID NO: 59114 - DNA, 22 bp, Artificial Sequence
  chemically synthesized
tatacacacatacatatgtaca

SEQ ID NO: 59115 - DNA, 22 bp, Artificial Sequence
  chemically synthesized
catatatacatacgtatatgca

SEQ ID NO: 59116 - DNA, 22 bp, Artificial Sequence
  chemically synthesized
tgtgcctgtgtgtgtgtagaaa

SEQ ID NO: 59117 - DNA, 22 bp, Artificial Sequence
  chemically synthesized
tgtgtgtgtagaaagggagaga

SEQ ID NO: 59118 - DNA, 22 bp, Artificial Sequence
  chemically synthesized
tagaattcaccatgattccatc

SEQ ID NO: 59119 - DNA, 22 bp, Artificial Sequence
  chemically synthesized
agaattcaccatgattccatca

SEQ ID NO: 59120 - DNA, 22 bp, Artificial Sequence
  chemically synthesized
gaattcaccatgattccatcaa

SEQ ID NO: 59121 - DNA, 22 bp, Artificial Sequence
  chemically synthesized
accatgattccatcaaatcaat

SEQ ID NO: 59122 - DNA, 22 bp, Artificial Sequence
  chemically synthesized
catcaaatcaatatagaagttt

SEQ ID NO: 59123 - DNA, 22 bp, Artificial Sequence
  chemically synthesized
ttgaaagctatccatgtagaaa

SEQ ID NO: 59124 - DNA, 22 bp, Artificial Sequence
  chemically synthesized
tgaaagctatccatgtagaaac

SEQ ID NO: 59125 - DNA, 22 bp, Artificial Sequence
  chemically synthesized
gaaagctatccatgtagaaacc

SEQ ID NO: 59126 - DNA, 22 bp, Artificial Sequence
  chemically synthesized
aaagctatccatgtagaaacca

SEQ ID NO: 59127 - DNA, 22 bp, Artificial Sequence
  chemically synthesized
tccatgtagaaaccacttttca

SEQ ID NO: 59128 - DNA, 22 bp, Artificial Sequence
  chemically synthesized
ttcatcaaaatctgacttaagc

SEQ ID NO: 59129 - DNA, 22 bp, Artificial Sequence
  chemically synthesized
tcatcaaaatctgacttaagca

SEQ ID NO: 59130 - DNA, 22 bp, Artificial Sequence
  chemically synthesized
catcaaaatctgacttaagcaa

SEQ ID NO: 59131 - DNA, 22 bp, Artificial Sequence
  chemically synthesized
atcaaaatctgacttaagcaaa

SEQ ID NO: 59132 - DNA, 22 bp, Artificial Sequence
  chemically synthesized
acttaagcaaattatctccata

SEQ ID NO: 59133 - DNA, 22 bp, Artificial Sequence
  chemically synthesized
aagcaaattatctccatactat

SEQ ID NO: 59134 - DNA, 22 bp, Artificial Sequence
  chemically synthesized
agcaaattatctccatactatt

SEQ ID NO: 59135 - DNA, 22 bp, Artificial Sequence
  chemically synthesized
tctccatactatttatctgaaa

SEQ ID NO: 59136 - DNA, 22 bp, Artificial Sequence
  chemically synthesized
catactatttatctgaaagtct

SEQ ID NO: 59137 - DNA, 22 bp, Artificial Sequence
  chemically synthesized
tttatctgaaagtctgttgttc

SEQ ID NO: 59138 - DNA, 22 bp, Artificial Sequence
  chemically synthesized
atctgaaagtctgttgttcaca

SEQ ID NO: 59139 - DNA, 22 bp, Artificial Sequence
  chemically synthesized
tctgaaagtctgttgttcacat

SEQ ID NO: 59140 - DNA, 22 bp, Artificial Sequence
  chemically synthesized
aaagtctgttgttcacatagcg

SEQ ID NO: 59141 - DNA, 22 bp, Artificial Sequence
  chemically synthesized
ttgttcacatagcgctggattg

SEQ ID NO: 59142 - DNA, 22 bp, Artificial Sequence
  chemically synthesized
ttcacatagcgctggattgagg

SEQ ID NO: 59143 - DNA, 22 bp, Artificial Sequence
  chemically synthesized
acatagcgctggattgaggatc

SEQ ID NO: 59144 - DNA, 22 bp, Artificial Sequence
  chemically synthesized
gattgaggatcatagtggcaaa

SEQ ID NO: 59145 - DNA, 22 bp, Artificial Sequence
  chemically synthesized
aggatcatagtggcaaatttag

SEQ ID NO: 59146 - DNA, 22 bp, Artificial Sequence
  chemically synthesized
aggagcaacagtcccaagcagg

SEQ ID NO: 59147 - DNA, 22 bp, Artificial Sequence
  chemically synthesized
ggagcaacagtcccaagcagga

SEQ ID NO: 59148 - DNA, 22 bp, Artificial Sequence
  chemically synthesized
gatggcaggctgtcctttgtgc

SEQ ID NO: 59149 - DNA, 22 bp, Artificial Sequence
  chemically synthesized
tcctttgtgcctcccctgagtt

SEQ ID NO: 59150 - DNA, 22 bp, Artificial Sequence
  chemically synthesized
tgtgcctcccctgagttgagaa

SEQ ID NO: 59151 - DNA, 22 bp, Artificial Sequence
  chemically synthesized
gtgcctcccctgagttgagaag

SEQ ID NO: 59152 - DNA, 22 bp, Artificial Sequence
  chemically synthesized
tgcctcccctgagttgagaaga

SEQ ID NO: 59153 - DNA, 22 bp, Artificial Sequence
  chemically synthesized
ccctgagttgagaagactggtg

SEQ ID NO: 59154 - DNA, 22 bp, Artificial Sequence
  chemically synthesized
agttgagaagactggtgtttat

SEQ ID NO: 59155 - DNA, 22 bp, Artificial Sequence
  chemically synthesized
agaagactggtgtttattcttt

SEQ ID NO: 59156 - DNA, 22 bp, Artificial Sequence
  chemically synthesized
gtgtttattctttctctaggtt

SEQ ID NO: 59157 - DNA, 22 bp, Artificial Sequence
  chemically synthesized
attctttctctaggttgcaaca

SEQ ID NO: 59158 - DNA, 22 bp, Artificial Sequence
  chemically synthesized
ttctttctctaggttgcaacac

SEQ ID NO: 59159 - DNA, 22 bp, Artificial Sequence
  chemically synthesized
tttctctaggttgcaacacgtg

SEQ ID NO: 59160 - DNA, 22 bp, Artificial Sequence
  chemically synthesized
tctctaggttgcaacacgtgtt

SEQ ID NO: 59161 - DNA, 22 bp, Artificial Sequence
  chemically synthesized
ctctaggttgcaacacgtgttg

SEQ ID NO: 59162 - DNA, 22 bp, Artificial Sequence
  chemically synthesized
tctaggttgcaacacgtgttgc

SEQ ID NO: 59163 - DNA, 22 bp, Artificial Sequence
  chemically synthesized
taggttgcaacacgtgttgcct

SEQ ID NO: 59164 - DNA, 22 bp, Artificial Sequence
  chemically synthesized
ggttgcaacacgtgttgccttg

SEQ ID NO: 59165 - DNA, 22 bp, Artificial Sequence
  chemically synthesized
caacacgtgttgccttgaaatc

SEQ ID NO: 59166 - DNA, 22 bp, Artificial Sequence
  chemically synthesized
ccttgaaatctcccttctttac

SEQ ID NO: 59167 - DNA, 22 bp, Artificial Sequence
  chemically synthesized
gaaatctcccttctttacggtt

SEQ ID NO: 59168 - DNA, 22 bp, Artificial Sequence
  chemically synthesized
aaatctcccttctttacggttc

SEQ ID NO: 59169 - DNA, 22 bp, Artificial Sequence
  chemically synthesized
ccttctttacggttctgccatg

SEQ ID NO: 59170 - DNA, 22 bp, Artificial Sequence
  chemically synthesized
ctttacggttctgccatgagtg

SEQ ID NO: 59171 - DNA, 22 bp, Artificial Sequence
  chemically synthesized
tttacggttctgccatgagtgt

SEQ ID NO: 59172 - DNA, 22 bp, Artificial Sequence
  chemically synthesized
tacggttctgccatgagtgtat

SEQ ID NO: 59173 - DNA, 22 bp, Artificial Sequence
  chemically synthesized
acggttctgccatgagtgtatt

SEQ ID NO: 59174 - DNA, 22 bp, Artificial Sequence
  chemically synthesized
cggttctgccatgagtgtattt

SEQ ID NO: 59175 - DNA, 22 bp, Artificial Sequence
  chemically synthesized
tgccatgagtgtattttctgtg

SEQ ID NO: 59176 - DNA, 22 bp, Artificial Sequence
  chemically synthesized
ccatgagtgtattttctgtgac

SEQ ID NO: 59177 - DNA, 22 bp, Artificial Sequence
  chemically synthesized
tctgtgacctgcctctgcatct

SEQ ID NO: 59178 - DNA, 22 bp, Artificial Sequence
  chemically synthesized
ctgtgacctgcctctgcatctg

SEQ ID NO: 59179 - DNA, 22 bp, Artificial Sequence
  chemically synthesized
tgtgacctgcctctgcatctgg

SEQ ID NO: 59180 - DNA, 22 bp, Artificial Sequence
  chemically synthesized
tgacctgcctctgcatctggtt

SEQ ID NO: 59181 - DNA, 22 bp, Artificial Sequence
  chemically synthesized
cctctgcatctggttaaatgga

SEQ ID NO: 59182 - DNA, 22 bp, Artificial Sequence
  chemically synthesized
tgcatctggttaaatggacttc

SEQ ID NO: 59183 - DNA, 22 bp, Artificial Sequence
  chemically synthesized
catctggttaaatggacttcag

SEQ ID NO: 59184 - DNA, 22 bp, Artificial Sequence
  chemically synthesized
gttaaatggacttcagtaatct

SEQ ID NO: 59185 - DNA, 22 bp, Artificial Sequence
  chemically synthesized
aatggacttcagtaatctgtac

SEQ ID NO: 59186 - DNA, 22 bp, Artificial Sequence
  chemically synthesized
cagtaatctgtacacagttact

SEQ ID NO: 59187 - DNA, 22 bp, Artificial Sequence
  chemically synthesized
agtaatctgtacacagttactt

SEQ ID NO: 59188 - DNA, 22 bp, Artificial Sequence
  chemically synthesized
tacacagttacttcttacttat

SEQ ID NO: 59189 - DNA, 22 bp, Artificial Sequence
  chemically synthesized
cttcttacttattttatatcct

SEQ ID NO: 59190 - DNA, 22 bp, Artificial Sequence
  chemically synthesized
cttacttattttatatcctgaa

SEQ ID NO: 59191 - DNA, 22 bp, Artificial Sequence
  chemically synthesized
ttacttattttatatcctgaaa

SEQ ID NO: 59192 - DNA, 22 bp, Artificial Sequence
  chemically synthesized
acttattttatatcctgaaaga

SEQ ID NO: 59193 - DNA, 22 bp, Artificial Sequence
  chemically synthesized
cttattttatatcctgaaagat

SEQ ID NO: 59194 - DNA, 22 bp, Artificial Sequence
  chemically synthesized
attttatatcctgaaagatatt

SEQ ID NO: 59195 - DNA, 22 bp, Artificial Sequence
  chemically synthesized
ttttatatcctgaaagatatta

SEQ ID NO: 59196 - DNA, 22 bp, Artificial Sequence
  chemically synthesized
tatatcctgaaagatattaagt

SEQ ID NO: 59197 - DNA, 22 bp, Artificial Sequence
  chemically synthesized
atatcctgaaagatattaagtc

SEQ ID NO: 59198 - DNA, 22 bp, Artificial Sequence
  chemically synthesized
tatcctgaaagatattaagtcc

SEQ ID NO: 59199 - DNA, 22 bp, Artificial Sequence
  chemically synthesized
aaagatattaagtccaacaagc

SEQ ID NO: 59200 - DNA, 22 bp, Artificial Sequence
  chemically synthesized
agtccaacaagcttttacccac

SEQ ID NO: 59201 - DNA, 22 bp, Artificial Sequence
  chemically synthesized
ttacccacagagtctacagaga

SEQ ID NO: 59202 - DNA, 22 bp, Artificial Sequence
  chemically synthesized
tacccacagagtctacagagaa

SEQ ID NO: 59203 - DNA, 22 bp, Artificial Sequence
  chemically synthesized
acccacagagtctacagagaaa

SEQ ID NO: 59204 - DNA, 22 bp, Artificial Sequence
  chemically synthesized
cccacagagtctacagagaaaa

SEQ ID NO: 59205 - DNA, 22 bp, Artificial Sequence
  chemically synthesized
cagagaaaacggccaggcaatt

SEQ ID NO: 59206 - DNA, 22 bp, Artificial Sequence
  chemically synthesized
ttgtttcaatctctgtgtctct

SEQ ID NO: 59207 - DNA, 22 bp, Artificial Sequence
  chemically synthesized
tgtttcaatctctgtgtctctc

SEQ ID NO: 59208 - DNA, 22 bp, Artificial Sequence
  chemically synthesized
gtttcaatctctgtgtctctct

SEQ ID NO: 59209 - DNA, 22 bp, Artificial Sequence
  chemically synthesized
tttcaatctctgtgtctctctg

SEQ ID NO: 59210 - DNA, 22 bp, Artificial Sequence
  chemically synthesized
caatctctgtgtctctctggag

SEQ ID NO: 59211 - DNA, 22 bp, Artificial Sequence
  chemically synthesized
aatctctgtgtctctctggagc

SEQ ID NO: 59212 - DNA, 22 bp, Artificial Sequence
  chemically synthesized
tgtgtctctctggagcactagt

SEQ ID NO: 59213 - DNA, 22 bp, Artificial Sequence
  chemically synthesized
tgtctctctggagcactagttc

SEQ ID NO: 59214 - DNA, 22 bp, Artificial Sequence
  chemically synthesized
tctggagcactagttccagagg

SEQ ID NO: 59215 - DNA, 22 bp, Artificial Sequence
  chemically synthesized
tggagcactagttccagaggct

SEQ ID NO: 59216 - DNA, 22 bp, Artificial Sequence
  chemically synthesized
gagcactagttccagaggctga

SEQ ID NO: 59217 - DNA, 22 bp, Artificial Sequence
  chemically synthesized
gttccagaggctgatcaatagg

SEQ ID NO: 59218 - DNA, 22 bp, Artificial Sequence
  chemically synthesized
cagaggctgatcaataggtttt

SEQ ID NO: 59219 - DNA, 22 bp, Artificial Sequence
  chemically synthesized
atcaataggttttattgtagac

SEQ ID NO: 59220 - DNA, 22 bp, Artificial Sequence
  chemically synthesized
tattgtagacctcactgtctct

SEQ ID NO: 59221 - DNA, 22 bp, Artificial Sequence
  chemically synthesized
attgtagacctcactgtctcta

SEQ ID NO: 59222 - DNA, 22 bp, Artificial Sequence
  chemically synthesized
ttgtagacctcactgtctctaa

SEQ ID NO: 59223 - DNA, 22 bp, Artificial Sequence
  chemically synthesized
tagacctcactgtctctaaaag

SEQ ID NO: 59224 - DNA, 22 bp, Artificial Sequence
  chemically synthesized
actgtctctaaaagcattttga

SEQ ID NO: 59225 - DNA, 22 bp, Artificial Sequence
  chemically synthesized
tctctaaaagcattttgacctt

SEQ ID NO: 59226 - DNA, 22 bp, Artificial Sequence
  chemically synthesized
taaaagcattttgaccttatcc

SEQ ID NO: 59227 - DNA, 22 bp, Artificial Sequence
  chemically synthesized
aaagcattttgaccttatcctg

SEQ ID NO: 59228 - DNA, 22 bp, Artificial Sequence
  chemically synthesized
tgaccttatcctgtctaaaaat

SEQ ID NO: 59229 - DNA, 22 bp, Artificial Sequence
  chemically synthesized
gaccttatcctgtctaaaaata

SEQ ID NO: 59230 - DNA, 22 bp, Artificial Sequence
  chemically synthesized
accttatcctgtctaaaaatag

SEQ ID NO: 59231 - DNA, 22 bp, Artificial Sequence
  chemically synthesized
atcctgtctaaaaatagtattt

SEQ ID NO: 59232 - DNA, 22 bp, Artificial Sequence
  chemically synthesized
tcctgtctaaaaatagtatttg

SEQ ID NO: 59233 - DNA, 22 bp, Artificial Sequence
  chemically synthesized
tctaaaaatagtatttgctctt

SEQ ID NO: 59234 - DNA, 22 bp, Artificial Sequence
  chemically synthesized
aaaatagtatttgctcttgcct

SEQ ID NO: 59235 - DNA, 22 bp, Artificial Sequence
  chemically synthesized
gctcttgcctgcagaaccttga

SEQ ID NO: 59236 - DNA, 22 bp, Artificial Sequence
  chemically synthesized
ctcttgcctgcagaaccttgac

SEQ ID NO: 59237 - DNA, 22 bp, Artificial Sequence
  chemically synthesized
ttgcctgcagaaccttgacctg

SEQ ID NO: 59238 - DNA, 22 bp, Artificial Sequence
  chemically synthesized
gcctgcagaaccttgacctgtg

SEQ ID NO: 59239 - DNA, 22 bp, Artificial Sequence
  chemically synthesized
cctgcagaaccttgacctgtga

SEQ ID NO: 59240 - DNA, 22 bp, Artificial Sequence
  chemically synthesized
cagaaccttgacctgtgaaaac

SEQ ID NO: 59241 - DNA, 22 bp, Artificial Sequence
  chemically synthesized
gacctgtgaaaacccatttgga

SEQ ID NO: 59242 - DNA, 22 bp, Artificial Sequence
  chemically synthesized
acctgtgaaaacccatttggaa

SEQ ID NO: 59243 - DNA, 22 bp, Artificial Sequence
  chemically synthesized
tgaaaacccatttggaacataa

SEQ ID NO: 59244 - DNA, 22 bp, Artificial Sequence
  chemically synthesized
ggaacataactgacatatctag

SEQ ID NO: 59245 - DNA, 22 bp, Artificial Sequence
  chemically synthesized
gaacataactgacatatctagt

SEQ ID NO: 59246 - DNA, 22 bp, Artificial Sequence
  chemically synthesized
acatatctagtcagctgtatat

SEQ ID NO: 59247 - DNA, 22 bp, Artificial Sequence
  chemically synthesized
gtcagctgtatatccaagacat

SEQ ID NO: 59248 - DNA, 22 bp, Artificial Sequence
  chemically synthesized
tatatccaagacatgctctgtg

SEQ ID NO: 59249 - DNA, 22 bp, Artificial Sequence
  chemically synthesized
tgtgaatgaattctgtgcagaa

SEQ ID NO: 59250 - DNA, 22 bp, Artificial Sequence
  chemically synthesized
tgaatgaattctgtgcagaacc

SEQ ID NO: 59251 - DNA, 22 bp, Artificial Sequence
  chemically synthesized
tgtgcagaaccgtccaggagaa

SEQ ID NO: 59252 - DNA, 22 bp, Artificial Sequence
  chemically synthesized
tgcagaaccgtccaggagaaca

SEQ ID NO: 59253 - DNA, 22 bp, Artificial Sequence
  chemically synthesized
tcttccaagacaaatgaattcc

SEQ ID NO: 59254 - DNA, 22 bp, Artificial Sequence
  chemically synthesized
cttccaagacaaatgaattcca

SEQ ID NO: 59255 - DNA, 22 bp, Artificial Sequence
  chemically synthesized
ttccaagacaaatgaattccag

SEQ ID NO: 59256 - DNA, 22 bp, Artificial Sequence
  chemically synthesized
ccaagacaaatgaattccagtt

SEQ ID NO: 59257 - DNA, 22 bp, Artificial Sequence
  chemically synthesized
caagacaaatgaattccagttc

SEQ ID NO: 59258 - DNA, 22 bp, Artificial Sequence
  chemically synthesized
cagttctgaacactgggagtgc

SEQ ID NO: 59259 - DNA, 22 bp, Artificial Sequence
  chemically synthesized
tgaacactgggagtgcacctgc

SEQ ID NO: 59260 - DNA, 22 bp, Artificial Sequence
  chemically synthesized
aacactgggagtgcacctgctt

SEQ ID NO: 59261 - DNA, 22 bp, Artificial Sequence
  chemically synthesized
ggagtgcacctgcttgtcggat

SEQ ID NO: 59262 - DNA, 22 bp, Artificial Sequence
  chemically synthesized
cttgtcggatgtggtgatgggc

SEQ ID NO: 59263 - DNA, 22 bp, Artificial Sequence
  chemically synthesized
gtcggatgtggtgatgggccac

SEQ ID NO: 59264 - DNA, 22 bp, Artificial Sequence
  chemically synthesized
tcggatgtggtgatgggccaca

SEQ ID NO: 59265 - DNA, 22 bp, Artificial Sequence
  chemically synthesized
agggcctgtggggcagtcgatg

SEQ ID NO: 59266 - DNA, 22 bp, Artificial Sequence
  chemically synthesized
tggggcagtcgatgtgggagga

SEQ ID NO: 59267 - DNA, 22 bp, Artificial Sequence
  chemically synthesized
tcacagagactctcagagggtg

SEQ ID NO: 59268 - DNA, 22 bp, Artificial Sequence
  chemically synthesized
tcagagggtgcattcagccctg

SEQ ID NO: 59269 - DNA, 22 bp, Artificial Sequence
  chemically synthesized
agagggtgcattcagccctgaa

SEQ ID NO: 59270 - DNA, 22 bp, Artificial Sequence
  chemically synthesized
agccctgaacagggcaaaggac

SEQ ID NO: 59271 - DNA, 22 bp, Artificial Sequence
  chemically synthesized
aacagggcaaaggactgcaagg

SEQ ID NO: 59272 - DNA, 22 bp, Artificial Sequence
  chemically synthesized
caaggggcaggagcttgggctg

SEQ ID NO: 59273 - DNA, 22 bp, Artificial Sequence
  chemically synthesized
gggctgacatgcaaggtggctt

SEQ ID NO: 59274 - DNA, 22 bp, Artificial Sequence
  chemically synthesized
ggctgacatgcaaggtggcttt

SEQ ID NO: 59275 - DNA, 22 bp, Artificial Sequence
  chemically synthesized
acatgcaaggtggctttacaca

SEQ ID NO: 59276 - DNA, 22 bp, Artificial Sequence
  chemically synthesized
tacacaaggccctttttagaga

SEQ ID NO: 59277 - DNA, 22 bp, Artificial Sequence
  chemically synthesized
acacaaggccctttttagagag

SEQ ID NO: 59278 - DNA, 22 bp, Artificial Sequence
  chemically synthesized
cacaaggccctttttagagagt

SEQ ID NO: 59279 - DNA, 22 bp, Artificial Sequence
  chemically synthesized
tttagagagtgtgattctctga

SEQ ID NO: 59280 - DNA, 22 bp, Artificial Sequence
  chemically synthesized
ttagagagtgtgattctctgaa

SEQ ID NO: 59281 - DNA, 22 bp, Artificial Sequence
  chemically synthesized
tagagagtgtgattctctgaag

SEQ ID NO: 59282 - DNA, 22 bp, Artificial Sequence
  chemically synthesized
agagagtgtgattctctgaagc

SEQ ID NO: 59283 - DNA, 22 bp, Artificial Sequence
  chemically synthesized
gagagtgtgattctctgaagct

SEQ ID NO: 59284 - DNA, 22 bp, Artificial Sequence
  chemically synthesized
tctgaagcttttcttggcagct

SEQ ID NO: 59285 - DNA, 22 bp, Artificial Sequence
  chemically synthesized
tgaagcttttcttggcagcttc

SEQ ID NO: 59286 - DNA, 22 bp, Artificial Sequence
  chemically synthesized
aagcttttcttggcagcttcag

SEQ ID NO: 59287 - DNA, 22 bp, Artificial Sequence
  chemically synthesized
ttcttggcagcttcagtcttga

SEQ ID NO: 59288 - DNA, 22 bp, Artificial Sequence
  chemically synthesized
tcttggcagcttcagtcttgaa

SEQ ID NO: 59289 - DNA, 22 bp, Artificial Sequence
  chemically synthesized
cttggcagcttcagtcttgaac

SEQ ID NO: 59290 - DNA, 22 bp, Artificial Sequence
  chemically synthesized
ttggcagcttcagtcttgaacc

SEQ ID NO: 59291 - DNA, 22 bp, Artificial Sequence
  chemically synthesized
ggcagcttcagtcttgaacctc

SEQ ID NO: 59292 - DNA, 22 bp, Artificial Sequence
  chemically synthesized
gcagcttcagtcttgaacctca

SEQ ID NO: 59293 - DNA, 22 bp, Artificial Sequence
  chemically synthesized
cagtcttgaacctcactggaag

SEQ ID NO: 59294 - DNA, 22 bp, Artificial Sequence
  chemically synthesized
agtcttgaacctcactggaagg

SEQ ID NO: 59295 - DNA, 22 bp, Artificial Sequence
  chemically synthesized
gaacctcactggaagggatcct

SEQ ID NO: 59296 - DNA, 22 bp, Artificial Sequence
  chemically synthesized
aacctcactggaagggatcctc

SEQ ID NO: 59297 - DNA, 22 bp, Artificial Sequence
  chemically synthesized
actggaagggatcctccaaaac

SEQ ID NO: 59298 - DNA, 22 bp, Artificial Sequence
  chemically synthesized
gaagggatcctccaaaacatga

SEQ ID NO: 59299 - DNA, 22 bp, Artificial Sequence
  chemically synthesized
caaaacatgacccagatggaaa

SEQ ID NO: 59300 - DNA, 22 bp, Artificial Sequence
  chemically synthesized
ctgagtttaaaataactcccct

SEQ ID NO: 59301 - DNA, 22 bp, Artificial Sequence
  chemically synthesized
tgagtttaaaataactccccta

SEQ ID NO: 59302 - DNA, 22 bp, Artificial Sequence
  chemically synthesized
agtttaaaataactcccctatt

SEQ ID NO: 59303 - DNA, 22 bp, Artificial Sequence
  chemically synthesized
aaaataactcccctatttggta

SEQ ID NO: 59304 - DNA, 22 bp, Artificial Sequence
  chemically synthesized
aaataactcccctatttggtaa

SEQ ID NO: 59305 - DNA, 22 bp, Artificial Sequence
  chemically synthesized
ccctatttggtaatacgggact

SEQ ID NO: 59306 - DNA, 22 bp, Artificial Sequence
  chemically synthesized
tttggtaatacgggactttatt

SEQ ID NO: 59307 - DNA, 22 bp, Artificial Sequence
  chemically synthesized
ggtaatacgggactttatttgt

SEQ ID NO: 59308 - DNA, 22 bp, Artificial Sequence
  chemically synthesized
gtaatacgggactttatttgtg

SEQ ID NO: 59309 - DNA, 22 bp, Artificial Sequence
  chemically synthesized
tatttgtgactttattattttt

SEQ ID NO: 59310 - DNA, 22 bp, Artificial Sequence
  chemically synthesized
atttgtgactttattattttta

SEQ ID NO: 59311 - DNA, 22 bp, Artificial Sequence
  chemically synthesized
tttgtgactttattatttttag

SEQ ID NO: 59312 - DNA, 22 bp, Artificial Sequence
  chemically synthesized
gtgactttattatttttaggtg

SEQ ID NO: 59313 - DNA, 22 bp, Artificial Sequence
  chemically synthesized
tgactttattatttttaggtgt

SEQ ID NO: 59314 - DNA, 22 bp, Artificial Sequence
  chemically synthesized
tattatttttaggtgtgataat

SEQ ID NO: 59315 - DNA, 22 bp, Artificial Sequence
  chemically synthesized
attatttttaggtgtgataatg

SEQ ID NO: 59316 - DNA, 22 bp, Artificial Sequence
  chemically synthesized
ttatttttaggtgtgataatgg

SEQ ID NO: 59317 - DNA, 22 bp, Artificial Sequence
  chemically synthesized
tttttaggtgtgataatggttt

SEQ ID NO: 59318 - DNA, 22 bp, Artificial Sequence
  chemically synthesized
ttaggtgtgataatggttttgc

SEQ ID NO: 59319 - DNA, 22 bp, Artificial Sequence
  chemically synthesized
taggtgtgataatggttttgca

SEQ ID NO: 59320 - DNA, 22 bp, Artificial Sequence
  chemically synthesized
aggtgtgataatggttttgcag

SEQ ID NO: 59321 - DNA, 22 bp, Artificial Sequence
  chemically synthesized
ggtgtgataatggttttgcagt

SEQ ID NO: 59322 - DNA, 22 bp, Artificial Sequence
  chemically synthesized
tgcagttgtatttaaaagaaaa

SEQ ID NO: 59323 - DNA, 22 bp, Artificial Sequence
  chemically synthesized
gcagttgtatttaaaagaaaaa

SEQ ID NO: 59324 - DNA, 22 bp, Artificial Sequence
  chemically synthesized
cagttgtatttaaaagaaaaaa

SEQ ID NO: 59325 - DNA, 22 bp, Artificial Sequence
  chemically synthesized
tatttaaaagaaaaaaaacgag

SEQ ID NO: 59326 - DNA, 22 bp, Artificial Sequence
  chemically synthesized
aaaagaaaaaaaacgagttcct

SEQ ID NO: 59327 - DNA, 22 bp, Artificial Sequence
  chemically synthesized
aaagaaaaaaaacgagttccta

SEQ ID NO: 59328 - DNA, 22 bp, Artificial Sequence
  chemically synthesized
ctatgtttaaaaaatacataca

SEQ ID NO: 59329 - DNA, 22 bp, Artificial Sequence
  chemically synthesized
tgtttaaaaaatacatacagag

SEQ ID NO: 59330 - DNA, 22 bp, Artificial Sequence
  chemically synthesized
aaaaaatacatacagaggtgtt

SEQ ID NO: 59331 - DNA, 22 bp, Artificial Sequence
  chemically synthesized
aaaaatacatacagaggtgttt

SEQ ID NO: 59332 - DNA, 22 bp, Artificial Sequence
  chemically synthesized
actgatgaaatgatatgacgtc

SEQ ID NO: 59333 - DNA, 22 bp, Artificial Sequence
  chemically synthesized
ctgatgaaatgatatgacgtct

SEQ ID NO: 59334 - DNA, 22 bp, Artificial Sequence
  chemically synthesized
atgaaatgatatgacgtctggg

SEQ ID NO: 59335 - DNA, 22 bp, Artificial Sequence
  chemically synthesized
ggatcaacttaaataataaaat

SEQ ID NO: 59336 - DNA, 22 bp, Artificial Sequence
  chemically synthesized
aaataataaaatgggctaggga

SEQ ID NO: 59337 - DNA, 22 bp, Artificial Sequence
  chemically synthesized
aataataaaatgggctagggag

SEQ ID NO: 59338 - DNA, 22 bp, Artificial Sequence
  chemically synthesized
gggaggcgatagggttacagaa

SEQ ID NO: 59339 - DNA, 22 bp, Artificial Sequence
  chemically synthesized
cagaagacaagaatgactgtga

SEQ ID NO: 59340 - DNA, 22 bp, Artificial Sequence
  chemically synthesized
tgagctgtggtggttggagctg

SEQ ID NO: 59341 - DNA, 22 bp, Artificial Sequence
  chemically synthesized
tggtggttggagctggaagatg

SEQ ID NO: 59342 - DNA, 22 bp, Artificial Sequence
  chemically synthesized
gagctggaagatgtggacttgg

SEQ ID NO: 59343 - DNA, 22 bp, Artificial Sequence
  chemically synthesized
gaagatgtggacttggggactg

SEQ ID NO: 59344 - DNA, 22 bp, Artificial Sequence
  chemically synthesized
ggggactgatttataacattct

SEQ ID NO: 59345 - DNA, 22 bp, Artificial Sequence
  chemically synthesized
gggactgatttataacattctc

SEQ ID NO: 59346 - DNA, 22 bp, Artificial Sequence
  chemically synthesized
atttataacattctctctactt

SEQ ID NO: 59347 - DNA, 22 bp, Artificial Sequence
  chemically synthesized
ataacattctctctacttttgt

SEQ ID NO: 59348 - DNA, 22 bp, Artificial Sequence
  chemically synthesized
taacattctctctacttttgta

SEQ ID NO: 59349 - DNA, 22 bp, Artificial Sequence
  chemically synthesized
tctctacttttgtagtatttga

SEQ ID NO: 59350 - DNA, 22 bp, Artificial Sequence
  chemically synthesized
tctacttttgtagtatttgaga

SEQ ID NO: 59351 - DNA, 22 bp, Artificial Sequence
  chemically synthesized
tacttttgtagtatttgagatt

SEQ ID NO: 59352 - DNA, 22 bp, Artificial Sequence
  chemically synthesized
cttttgtagtatttgagatttt

SEQ ID NO: 59353 - DNA, 22 bp, Artificial Sequence
  chemically synthesized
ttgtagtatttgagatttttcc

SEQ ID NO: 59354 - DNA, 22 bp, Artificial Sequence
  chemically synthesized
tgtagtatttgagatttttcca

SEQ ID NO: 59355 - DNA, 22 bp, Artificial Sequence
  chemically synthesized
gtagtatttgagatttttccag

SEQ ID NO: 59356 - DNA, 22 bp, Artificial Sequence
  chemically synthesized
tagtatttgagatttttccaga

SEQ ID NO: 59357 - DNA, 22 bp, Artificial Sequence
  chemically synthesized
gagatttttccagaaaataaag

SEQ ID NO: 59358 - DNA, 22 bp, Artificial Sequence
  chemically synthesized
agatttttccagaaaataaagg

SEQ ID NO: 59359 - DNA, 22 bp, Artificial Sequence
  chemically synthesized
ttccagaaaataaaggtattgc

SEQ ID NO: 59360 - DNA, 22 bp, Artificial Sequence
  chemically synthesized
tccagaaaataaaggtattgcc

SEQ ID NO: 59361 - DNA, 22 bp, Artificial Sequence
  chemically synthesized
ccagaaaataaaggtattgcct

SEQ ID NO: 59362 - DNA, 22 bp, Artificial Sequence
  chemically synthesized
cagaaaataaaggtattgcctg

SEQ ID NO: 59363 - DNA, 22 bp, Artificial Sequence
  chemically synthesized
cctgactggtggagagcagtat

SEQ ID NO: 59364 - DNA, 22 bp, Artificial Sequence
  chemically synthesized
actggtggagagcagtatggcc

SEQ ID NO: 59365 - DNA, 22 bp, Artificial Sequence
  chemically synthesized
gtggagagcagtatggccttgt

SEQ ID NO: 59366 - DNA, 22 bp, Artificial Sequence
  chemically synthesized
gtttagtcggtgttgtttcttc

SEQ ID NO: 59367 - DNA, 22 bp, Artificial Sequence
  chemically synthesized
tttagtcggtgttgtttcttca

SEQ ID NO: 59368 - DNA, 22 bp, Artificial Sequence
  chemically synthesized
agtcggtgttgtttcttcacca

SEQ ID NO: 59369 - DNA, 22 bp, Artificial Sequence
  chemically synthesized
gtcggtgttgtttcttcaccaa

SEQ ID NO: 59370 - DNA, 22 bp, Artificial Sequence
  chemically synthesized
tttcttcaccaagggtttggct

SEQ ID NO: 59371 - DNA, 22 bp, Artificial Sequence
  chemically synthesized
cttcaccaagggtttggctcag

SEQ ID NO: 59372 - DNA, 22 bp, Artificial Sequence
  chemically synthesized
ttcaccaagggtttggctcaga

SEQ ID NO: 59373 - DNA, 22 bp, Artificial Sequence
  chemically synthesized
caccaagggtttggctcagagg

SEQ ID NO: 59374 - DNA, 22 bp, Artificial Sequence
  chemically synthesized
accaagggtttggctcagaggt

SEQ ID NO: 59375 - DNA, 22 bp, Artificial Sequence
  chemically synthesized
ggctcagaggtagcaaggggac

SEQ ID NO: 59376 - DNA, 22 bp, Artificial Sequence
  chemically synthesized
gctcagaggtagcaaggggaca

SEQ ID NO: 59377 - DNA, 22 bp, Artificial Sequence
  chemically synthesized
agaggtagcaaggggacaagtg

SEQ ID NO: 59378 - DNA, 22 bp, Artificial Sequence
  chemically synthesized
tgggcaagaaagtacctgtgag

SEQ ID NO: 59379 - DNA, 22 bp, Artificial Sequence
  chemically synthesized
tgagctcaagtcttgtatctgg

SEQ ID NO: 59380 - DNA, 22 bp, Artificial Sequence
  chemically synthesized
aagtcttgtatctgggaagttc

SEQ ID NO: 59381 - DNA, 22 bp, Artificial Sequence
  chemically synthesized
gtatctgggaagttcattgtga

SEQ ID NO: 59382 - DNA, 22 bp, Artificial Sequence
  chemically synthesized
tatctgggaagttcattgtgaa

SEQ ID NO: 59383 - DNA, 22 bp, Artificial Sequence
  chemically synthesized
ggaagttcattgtgaaggggtc

SEQ ID NO: 59384 - DNA, 22 bp, Artificial Sequence
  chemically synthesized
attgtgaaggggtcatttaagg

SEQ ID NO: 59385 - DNA, 22 bp, Artificial Sequence
  chemically synthesized
tgaaggggtcatttaagggtct

SEQ ID NO: 59386 - DNA, 22 bp, Artificial Sequence
  chemically synthesized
aagggtctgtactgtgcactgt

SEQ ID NO: 59387 - DNA, 22 bp, Artificial Sequence
  chemically synthesized
agggtctgtactgtgcactgtc

SEQ ID NO: 59388 - DNA, 22 bp, Artificial Sequence
  chemically synthesized
tactgtgcactgtcccccattc

SEQ ID NO: 59389 - DNA, 22 bp, Artificial Sequence
  chemically synthesized
tgcactgtcccccattctcctg

SEQ ID NO: 59390 - DNA, 22 bp, Artificial Sequence
  chemically synthesized
tcccccattctcctggaagaac

SEQ ID NO: 59391 - DNA, 22 bp, Artificial Sequence
  chemically synthesized
tcctggaagaacagagatccct

SEQ ID NO: 59392 - DNA, 22 bp, Artificial Sequence
  chemically synthesized
ctggaagaacagagatcccttg

SEQ ID NO: 59393 - DNA, 22 bp, Artificial Sequence
  chemically synthesized
gaagaacagagatcccttgtct

SEQ ID NO: 59394 - DNA, 22 bp, Artificial Sequence
  chemically synthesized
gtctttttcagtgcatgaggca

SEQ ID NO: 59395 - DNA, 22 bp, Artificial Sequence
  chemically synthesized
tctttttcagtgcatgaggcag

SEQ ID NO: 59396 - DNA, 22 bp, Artificial Sequence
  chemically synthesized
tttcagtgcatgaggcagagtc

SEQ ID NO: 59397 - DNA, 22 bp, Artificial Sequence
  chemically synthesized
ttcagtgcatgaggcagagtca

SEQ ID NO: 59398 - DNA, 22 bp, Artificial Sequence
  chemically synthesized
tcagtgcatgaggcagagtcag

SEQ ID NO: 59399 - DNA, 22 bp, Artificial Sequence
  chemically synthesized
cagtgcatgaggcagagtcaga

SEQ ID NO: 59400 - DNA, 22 bp, Artificial Sequence
  chemically synthesized
agtgcatgaggcagagtcagat

SEQ ID NO: 59401 - DNA, 22 bp, Artificial Sequence
  chemically synthesized
gcttgagtttcagcacaggtgc

SEQ ID NO: 59402 - DNA, 22 bp, Artificial Sequence
  chemically synthesized
cttgagtttcagcacaggtgcc

SEQ ID NO: 59403 - DNA, 22 bp, Artificial Sequence
  chemically synthesized
gagtttcagcacaggtgcctct

SEQ ID NO: 59404 - DNA, 22 bp, Artificial Sequence
  chemically synthesized
agtttcagcacaggtgcctctg

SEQ ID NO: 59405 - DNA, 22 bp, Artificial Sequence
  chemically synthesized
cagcacaggtgcctctgtgcct

SEQ ID NO: 59406 - DNA, 22 bp, Artificial Sequence
  chemically synthesized
agcacaggtgcctctgtgcctc

SEQ ID NO: 59407 - DNA, 22 bp, Artificial Sequence
  chemically synthesized
tgtgcctcgtggtgagggtcag

SEQ ID NO: 59408 - DNA, 22 bp, Artificial Sequence
  chemically synthesized
tgcctcgtggtgagggtcagga

SEQ ID NO: 59409 - DNA, 22 bp, Artificial Sequence
  chemically synthesized
gtggtgagggtcaggaagaagc

SEQ ID NO: 59410 - DNA, 22 bp, Artificial Sequence
  chemically synthesized
ggacgtgctcacgtggctggta

SEQ ID NO: 59411 - DNA, 22 bp, Artificial Sequence
  chemically synthesized
acgtggctggtagtgttatgaa

SEQ ID NO: 59412 - DNA, 22 bp, Artificial Sequence
  chemically synthesized
gtagtgttatgaagacaaggct

SEQ ID NO: 59413 - DNA, 22 bp, Artificial Sequence
  chemically synthesized
tgaagacaaggctttgggacct

SEQ ID NO: 59414 - DNA, 22 bp, Artificial Sequence
  chemically synthesized
tgggacctttctttggccattt

SEQ ID NO: 59415 - DNA, 22 bp, Artificial Sequence
  chemically synthesized
gggacctttctttggccatttg

SEQ ID NO: 59416 - DNA, 22 bp, Artificial Sequence
  chemically synthesized
ggacctttctttggccatttga

SEQ ID NO: 59417 - DNA, 22 bp, Artificial Sequence
  chemically synthesized
tctttggccatttgagccctgg

SEQ ID NO: 59418 - DNA, 22 bp, Artificial Sequence
  chemically synthesized
ctttggccatttgagccctggc

SEQ ID NO: 59419 - DNA, 22 bp, Artificial Sequence
  chemically synthesized
tttggccatttgagccctggct

SEQ ID NO: 59420 - DNA, 22 bp, Artificial Sequence
  chemically synthesized
tggccatttgagccctggctat

SEQ ID NO: 59421 - DNA, 22 bp, Artificial Sequence
  chemically synthesized
ggccatttgagccctggctatt

SEQ ID NO: 59422 - DNA, 22 bp, Artificial Sequence
  chemically synthesized
gccatttgagccctggctatta

SEQ ID NO: 59423 - DNA, 22 bp, Artificial Sequence
  chemically synthesized
gagccctggctattagagaaag

SEQ ID NO: 59424 - DNA, 22 bp, Artificial Sequence
  chemically synthesized
agccctggctattagagaaaga

SEQ ID NO: 59425 - DNA, 22 bp, Artificial Sequence
  chemically synthesized
gctattagagaaagatgatttg

SEQ ID NO: 59426 - DNA, 22 bp, Artificial Sequence
  chemically synthesized
ttagagaaagatgatttgcctg

SEQ ID NO: 59427 - DNA, 22 bp, Artificial Sequence
  chemically synthesized
gagaaagatgatttgcctgaga

SEQ ID NO: 59428 - DNA, 22 bp, Artificial Sequence
  chemically synthesized
gcctgagaggagattgaccaca

SEQ ID NO: 59429 - DNA, 22 bp, Artificial Sequence
  chemically synthesized
cctgagaggagattgaccacac

SEQ ID NO: 59430 - DNA, 22 bp, Artificial Sequence
  chemically synthesized
agaggagattgaccacactctc

SEQ ID NO: 59431 - DNA, 22 bp, Artificial Sequence
  chemically synthesized
accacactctcagaaagaaggg

SEQ ID NO: 59432 - DNA, 22 bp, Artificial Sequence
  chemically synthesized
tcagaaagaaggggacaaagaa

SEQ ID NO: 59433 - DNA, 22 bp, Artificial Sequence
  chemically synthesized
agaaagaaggggacaaagaaca

SEQ ID NO: 59434 - DNA, 22 bp, Artificial Sequence
  chemically synthesized
agcagccttccctttaagggag

SEQ ID NO: 59435 - DNA, 22 bp, Artificial Sequence
  chemically synthesized
ccctttaagggaggactggggc

SEQ ID NO: 59436 - DNA, 22 bp, Artificial Sequence
  chemically synthesized
cctttaagggaggactggggca

SEQ ID NO: 59437 - DNA, 22 bp, Artificial Sequence
  chemically synthesized
taagggaggactggggcacaag

SEQ ID NO: 59438 - DNA, 22 bp, Artificial Sequence
  chemically synthesized
aagggaggactggggcacaaga

SEQ ID NO: 59439 - DNA, 22 bp, Artificial Sequence
  chemically synthesized
agggaggactggggcacaagat

SEQ ID NO: 59440 - DNA, 22 bp, Artificial Sequence
  chemically synthesized
gggcacaagatggaagatgaaa

SEQ ID NO: 59441 - DNA, 22 bp, Artificial Sequence
  chemically synthesized
cagagctggaaaggggaatttt

SEQ ID NO: 59442 - DNA, 22 bp, Artificial Sequence
  chemically synthesized
gaaaggggaattttgttcttct

SEQ ID NO: 59443 - DNA, 22 bp, Artificial Sequence
  chemically synthesized
tgttcttctagatagcaaaagc

SEQ ID NO: 59444 - DNA, 22 bp, Artificial Sequence
  chemically synthesized
gttcttctagatagcaaaagcc

SEQ ID NO: 59445 - DNA, 22 bp, Artificial Sequence
  chemically synthesized
ttcttctagatagcaaaagcca

SEQ ID NO: 59446 - DNA, 22 bp, Artificial Sequence
  chemically synthesized
ttctagatagcaaaagccagga

SEQ ID NO: 59447 - DNA, 22 bp, Artificial Sequence
  chemically synthesized
ctagatagcaaaagccaggact

SEQ ID NO: 59448 - DNA, 22 bp, Artificial Sequence
  chemically synthesized
tagatagcaaaagccaggactg

SEQ ID NO: 59449 - DNA, 22 bp, Artificial Sequence
  chemically synthesized
gatagcaaaagccaggactgtc

SEQ ID NO: 59450 - DNA, 22 bp, Artificial Sequence
  chemically synthesized
tcgctgtgtgacttgaaagcta

SEQ ID NO: 59451 - DNA, 22 bp, Artificial Sequence
  chemically synthesized
tgtgacttgaaagctaggtcac

SEQ ID NO: 59452 - DNA, 22 bp, Artificial Sequence
  chemically synthesized
gaaagctaggtcactggtgggc

SEQ ID NO: 59453 - DNA, 22 bp, Artificial Sequence
  chemically synthesized
aaagctaggtcactggtgggct

SEQ ID NO: 59454 - DNA, 22 bp, Artificial Sequence
  chemically synthesized
ggtcactggtgggcttcgtgca

SEQ ID NO: 59455 - DNA, 22 bp, Artificial Sequence
  chemically synthesized
gtgggcttcgtgcagcccgtca

SEQ ID NO: 59456 - DNA, 22 bp, Artificial Sequence
  chemically synthesized
cgtgcagcccgtcacaggggag

SEQ ID NO: 59457 - DNA, 22 bp, Artificial Sequence
  chemically synthesized
gtgcagcccgtcacaggggagc

SEQ ID NO: 59458 - DNA, 22 bp, Artificial Sequence
  chemically synthesized
gtctctgccgtatctgctgcct

SEQ ID NO: 59459 - DNA, 22 bp, Artificial Sequence
  chemically synthesized
tgccgtatctgctgcctggaag

SEQ ID NO: 59460 - DNA, 22 bp, Artificial Sequence
  chemically synthesized
ccgtatctgctgcctggaagct

SEQ ID NO: 59461 - DNA, 22 bp, Artificial Sequence
  chemically synthesized
ctgcctggaagctgagactggc

SEQ ID NO: 59462 - DNA, 22 bp, Artificial Sequence
  chemically synthesized
cctggaagctgagactggccta

SEQ ID NO: 59463 - DNA, 22 bp, Artificial Sequence
  chemically synthesized
gaagctgagactggcctaacca

SEQ ID NO: 59464 - DNA, 22 bp, Artificial Sequence
  chemically synthesized
agactggcctaaccacatcaca

SEQ ID NO: 59465 - DNA, 22 bp, Artificial Sequence
  chemically synthesized
gcctaaccacatcacaccattc

SEQ ID NO: 59466 - DNA, 22 bp, Artificial Sequence
  chemically synthesized
accacatcacaccattcccaga

SEQ ID NO: 59467 - DNA, 22 bp, Artificial Sequence
  chemically synthesized
ccagacccaggcccaggcccag

SEQ ID NO: 59468 - DNA, 22 bp, Artificial Sequence
  chemically synthesized
tggttttacaaaatgtccgctc

SEQ ID NO: 59469 - DNA, 22 bp, Artificial Sequence
  chemically synthesized
gttttacaaaatgtccgctctc

SEQ ID NO: 59470 - DNA, 22 bp, Artificial Sequence
  chemically synthesized
tacaaaatgtccgctctctctc

SEQ ID NO: 59471 - DNA, 22 bp, Artificial Sequence
  chemically synthesized
acaaaatgtccgctctctctcg

SEQ ID NO: 59472 - DNA, 22 bp, Artificial Sequence
  chemically synthesized
caaaatgtccgctctctctcgc

SEQ ID NO: 59473 - DNA, 22 bp, Artificial Sequence
  chemically synthesized
tctctcgcttcacacagaggct

SEQ ID NO: 59474 - DNA, 22 bp, Artificial Sequence
  chemically synthesized
tctcgcttcacacagaggctat

SEQ ID NO: 59475 - DNA, 22 bp, Artificial Sequence
  chemically synthesized
tcgcttcacacagaggctatta

SEQ ID NO: 59476 - DNA, 22 bp, Artificial Sequence
  chemically synthesized
gcttcacacagaggctattatt

SEQ ID NO: 59477 - DNA, 22 bp, Artificial Sequence
  chemically synthesized
cacacagaggctattattagca

SEQ ID NO: 59478 - DNA, 22 bp, Artificial Sequence
  chemically synthesized
acacagaggctattattagcaa

SEQ ID NO: 59479 - DNA, 22 bp, Artificial Sequence
  chemically synthesized
ttattagcaagtgtcactcagt

SEQ ID NO: 59480 - DNA, 22 bp, Artificial Sequence
  chemically synthesized
ttagcaagtgtcactcagttat

SEQ ID NO: 59481 - DNA, 22 bp, Artificial Sequence
  chemically synthesized
gcaagtgtcactcagttatctg

SEQ ID NO: 59482 - DNA, 22 bp, Artificial Sequence
  chemically synthesized
agttatctgagagtggcgcttt

SEQ ID NO: 59483 - DNA, 22 bp, Artificial Sequence
  chemically synthesized
tctgagagtggcgcttttagct

SEQ ID NO: 59484 - DNA, 22 bp, Artificial Sequence
  chemically synthesized
agagtggcgcttttagctgcca

SEQ ID NO: 59485 - DNA, 22 bp, Artificial Sequence
  chemically synthesized
ttagctgccatctaagtgcctg

SEQ ID NO: 59486 - DNA, 22 bp, Artificial Sequence
  chemically synthesized
tagctgccatctaagtgcctga

SEQ ID NO: 59487 - DNA, 22 bp, Artificial Sequence
  chemically synthesized
agctgccatctaagtgcctgat

SEQ ID NO: 59488 - DNA, 22 bp, Artificial Sequence
  chemically synthesized
gctgccatctaagtgcctgata

SEQ ID NO: 59489 - DNA, 22 bp, Artificial Sequence
  chemically synthesized
ccatctaagtgcctgatacttg

SEQ ID NO: 59490 - DNA, 22 bp, Artificial Sequence
  chemically synthesized
agtgcctgatacttgggtttac

SEQ ID NO: 59491 - DNA, 22 bp, Artificial Sequence
  chemically synthesized
atacttgggtttacagcagatt

SEQ ID NO: 59492 - DNA, 22 bp, Artificial Sequence
  chemically synthesized
gggtttacagcagattaaatta

SEQ ID NO: 59493 - DNA, 22 bp, Artificial Sequence
  chemically synthesized
ggtttacagcagattaaattaa

SEQ ID NO: 59494 - DNA, 22 bp, Artificial Sequence
  chemically synthesized
acagcagattaaattaaatttt

SEQ ID NO: 59495 - DNA, 22 bp, Artificial Sequence
  chemically synthesized
cagcagattaaattaaatttta

SEQ ID NO: 59496 - DNA, 22 bp, Artificial Sequence
  chemically synthesized
aattaaattttaggctggtttg

SEQ ID NO: 59497 - DNA, 22 bp, Artificial Sequence
  chemically synthesized
aattttaggctggtttggcttc

SEQ ID NO: 59498 - DNA, 22 bp, Artificial Sequence
  chemically synthesized
taggctggtttggcttcactgg

SEQ ID NO: 59499 - DNA, 22 bp, Artificial Sequence
  chemically synthesized
aggctggtttggcttcactggc

SEQ ID NO: 59500 - DNA, 22 bp, Artificial Sequence
  chemically synthesized
ggctggtttggcttcactggca

SEQ ID NO: 59501 - DNA, 22 bp, Artificial Sequence
  chemically synthesized
gtttggcttcactggcagtaga

SEQ ID NO: 59502 - DNA, 22 bp, Artificial Sequence
  chemically synthesized
ggcttcactggcagtagacaat

SEQ ID NO: 59503 - DNA, 22 bp, Artificial Sequence
  chemically synthesized
gcttcactggcagtagacaatg

SEQ ID NO: 59504 - DNA, 22 bp, Artificial Sequence
  chemically synthesized
cactggcagtagacaatggaag

SEQ ID NO: 59505 - DNA, 22 bp, Artificial Sequence
  chemically synthesized
actggcagtagacaatggaagg

SEQ ID NO: 59506 - DNA, 22 bp, Artificial Sequence
  chemically synthesized
gcagtagacaatggaaggcagc

SEQ ID NO: 59507 - DNA, 22 bp, Artificial Sequence
  chemically synthesized
ttgtagaaatgtaacctggcac

SEQ ID NO: 59508 - DNA, 22 bp, Artificial Sequence
  chemically synthesized
tagaaatgtaacctggcaccct

SEQ ID NO: 59509 - DNA, 22 bp, Artificial Sequence
  chemically synthesized
gcaccctcaaggatttgtgtga

SEQ ID NO: 59510 - DNA, 22 bp, Artificial Sequence
  chemically synthesized
aaggatttgtgtgagtgtgtgt

SEQ ID NO: 59511 - DNA, 22 bp, Artificial Sequence
  chemically synthesized
gtgtgagtgtgtgtgtgtgtgt

SEQ ID NO: 59512 - DNA, 22 bp, Artificial Sequence
  chemically synthesized
tgtgagtgtgtgtgtgtgtgtg

SEQ ID NO: 59513 - DNA, 22 bp, Artificial Sequence
  chemically synthesized
accactaggctacacttccttt

SEQ ID NO: 59514 - DNA, 22 bp, Artificial Sequence
  chemically synthesized
ggctacacttccttttcctttc

SEQ ID NO: 59515 - DNA, 22 bp, Artificial Sequence
  chemically synthesized
cacttccttttcctttcctctc

SEQ ID NO: 59516 - DNA, 22 bp, Artificial Sequence
  chemically synthesized
ccttttcctttcctctccattt

SEQ ID NO: 59517 - DNA, 22 bp, Artificial Sequence
  chemically synthesized
cttttcctttcctctccatttc

SEQ ID NO: 59518 - DNA, 22 bp, Artificial Sequence
  chemically synthesized
ttcctttcctctccatttcatc

SEQ ID NO: 59519 - DNA, 22 bp, Artificial Sequence
  chemically synthesized
tcctttcctctccatttcatcc

SEQ ID NO: 59520 - DNA, 22 bp, Artificial Sequence
  chemically synthesized
cctttcctctccatttcatccc

SEQ ID NO: 59521 - DNA, 22 bp, Artificial Sequence
  chemically synthesized
ctttcctctccatttcatccct

SEQ ID NO: 59522 - DNA, 22 bp, Artificial Sequence
  chemically synthesized
tcctctccatttcatccctttc

SEQ ID NO: 59523 - DNA, 22 bp, Artificial Sequence
  chemically synthesized
cctctccatttcatccctttcc

SEQ ID NO: 59524 - DNA, 22 bp, Artificial Sequence
  chemically synthesized
ctctccatttcatccctttcca

SEQ ID NO: 59525 - DNA, 22 bp, Artificial Sequence
  chemically synthesized
tccatttcatccctttccaaaa

SEQ ID NO: 59526 - DNA, 22 bp, Artificial Sequence
  chemically synthesized
catttcatccctttccaaaaag

SEQ ID NO: 59527 - DNA, 22 bp, Artificial Sequence
  chemically synthesized
catccctttccaaaaagtgttt

SEQ ID NO: 59528 - DNA, 22 bp, Artificial Sequence
  chemically synthesized
atccctttccaaaaagtgttta

SEQ ID NO: 59529 - DNA, 22 bp, Artificial Sequence
  chemically synthesized
tccaaaaagtgtttagacaaat

SEQ ID NO: 59530 - DNA, 22 bp, Artificial Sequence
  chemically synthesized
ccaaaaagtgtttagacaaata

SEQ ID NO: 59531 - DNA, 22 bp, Artificial Sequence
  chemically synthesized
caaaaagtgtttagacaaatag

SEQ ID NO: 59532 - DNA, 22 bp, Artificial Sequence
  chemically synthesized
agacaaatagtttcccagactt

SEQ ID NO: 59533 - DNA, 22 bp, Artificial Sequence
  chemically synthesized
gacaaatagtttcccagacttg

SEQ ID NO: 59534 - DNA, 22 bp, Artificial Sequence
  chemically synthesized
cccagacttggttttatcatgc

SEQ ID NO: 59535 - DNA, 22 bp, Artificial Sequence
  chemically synthesized
ccagacttggttttatcatgct

SEQ ID NO: 59536 - DNA, 22 bp, Artificial Sequence
  chemically synthesized
ggttttatcatgctgggttgac

SEQ ID NO: 59537 - DNA, 22 bp, Artificial Sequence
  chemically synthesized
gttttatcatgctgggttgaca

SEQ ID NO: 59538 - DNA, 22 bp, Artificial Sequence
  chemically synthesized
tatcatgctgggttgacaaagg

SEQ ID NO: 59539 - DNA, 22 bp, Artificial Sequence
  chemically synthesized
atcatgctgggttgacaaaggt

SEQ ID NO: 59540 - DNA, 22 bp, Artificial Sequence
  chemically synthesized
tcatgctgggttgacaaaggtt

SEQ ID NO: 59541 - DNA, 22 bp, Artificial Sequence
  chemically synthesized
ggttgacaaaggttgtgtacag

SEQ ID NO: 59542 - DNA, 22 bp, Artificial Sequence
  chemically synthesized
acaaaggttgtgtacagagctg

SEQ ID NO: 59543 - DNA, 22 bp, Artificial Sequence
  chemically synthesized
tgtacagagctggaataatttt

SEQ ID NO: 59544 - DNA, 22 bp, Artificial Sequence
  chemically synthesized
gaataattttttcttctttcta

SEQ ID NO: 59545 - DNA, 22 bp, Artificial Sequence
  chemically synthesized
tttcttctttctactgttggca

SEQ ID NO: 59546 - DNA, 22 bp, Artificial Sequence
  chemically synthesized
ttcttctttctactgttggcac

SEQ ID NO: 59547 - DNA, 22 bp, Artificial Sequence
  chemically synthesized
tcttctttctactgttggcaca

SEQ ID NO: 59548 - DNA, 22 bp, Artificial Sequence
  chemically synthesized
cttctttctactgttggcacat

SEQ ID NO: 59549 - DNA, 22 bp, Artificial Sequence
  chemically synthesized
ttctttctactgttggcacatc

SEQ ID NO: 59550 - DNA, 22 bp, Artificial Sequence
  chemically synthesized
ctttctactgttggcacatcaa

SEQ ID NO: 59551 - DNA, 22 bp, Artificial Sequence
  chemically synthesized
tttctactgttggcacatcaat

SEQ ID NO: 59552 - DNA, 22 bp, Artificial Sequence
  chemically synthesized
tctactgttggcacatcaatat

SEQ ID NO: 59553 - DNA, 22 bp, Artificial Sequence
  chemically synthesized
ctactgttggcacatcaatatc

SEQ ID NO: 59554 - DNA, 22 bp, Artificial Sequence
  chemically synthesized
tactgttggcacatcaatatct

SEQ ID NO: 59555 - DNA, 22 bp, Artificial Sequence
  chemically synthesized
ctgttggcacatcaatatcttt

SEQ ID NO: 59556 - DNA, 22 bp, Artificial Sequence
  chemically synthesized
ttggcacatcaatatctttttt

SEQ ID NO: 59557 - DNA, 22 bp, Artificial Sequence
  chemically synthesized
gcacatcaatatctttttttct

SEQ ID NO: 59558 - DNA, 22 bp, Artificial Sequence
  chemically synthesized
tttttctgcaaagaaggggcta

SEQ ID NO: 59559 - DNA, 22 bp, Artificial Sequence
  chemically synthesized
ttttctgcaaagaaggggctaa

SEQ ID NO: 59560 - DNA, 22 bp, Artificial Sequence
  chemically synthesized
tttctgcaaagaaggggctaag

SEQ ID NO: 59561 - DNA, 22 bp, Artificial Sequence
  chemically synthesized
ttctgcaaagaaggggctaagc

SEQ ID NO: 59562 - DNA, 22 bp, Artificial Sequence
  chemically synthesized
tctgcaaagaaggggctaagct

SEQ ID NO: 59563 - DNA, 22 bp, Artificial Sequence
  chemically synthesized
ctgcaaagaaggggctaagctt

SEQ ID NO: 59564 - DNA, 22 bp, Artificial Sequence
  chemically synthesized
tgcaaagaaggggctaagcttg

SEQ ID NO: 59565 - DNA, 22 bp, Artificial Sequence
  chemically synthesized
caaagaaggggctaagcttgca

SEQ ID NO: 59566 - DNA, 22 bp, Artificial Sequence
  chemically synthesized
agcttgcacgaaaacaccggtg

SEQ ID NO: 59567 - DNA, 22 bp, Artificial Sequence
  chemically synthesized
gcacgaaaacaccggtgggaac

SEQ ID NO: 59568 - DNA, 22 bp, Artificial Sequence
  chemically synthesized
cacgaaaacaccggtgggaacc

SEQ ID NO: 59569 - DNA, 22 bp, Artificial Sequence
  chemically synthesized
gagaagggcatgggtggttttt

SEQ ID NO: 59570 - DNA, 22 bp, Artificial Sequence
  chemically synthesized
ttggttcggttggtggctgatc

SEQ ID NO: 59571 - DNA, 22 bp, Artificial Sequence
  chemically synthesized
tggttcggttggtggctgatct

SEQ ID NO: 59572 - DNA, 22 bp, Artificial Sequence
  chemically synthesized
ggttcggttggtggctgatctg

SEQ ID NO: 59573 - DNA, 22 bp, Artificial Sequence
  chemically synthesized
gttcggttggtggctgatctga

SEQ ID NO: 59574 - DNA, 22 bp, Artificial Sequence
  chemically synthesized
ggttggtggctgatctgatggg

SEQ ID NO: 59575 - DNA, 22 bp, Artificial Sequence
  chemically synthesized
gtggctgatctgatgggtggta

SEQ ID NO: 59576 - DNA, 22 bp, Artificial Sequence
  chemically synthesized
atctgatgggtggtataggcag

SEQ ID NO: 59577 - DNA, 22 bp, Artificial Sequence
  chemically synthesized
atgggtggtataggcagaatgt

SEQ ID NO: 59578 - DNA, 22 bp, Artificial Sequence
  chemically synthesized
gctgccccttcagattcctgta

SEQ ID NO: 59579 - DNA, 22 bp, Artificial Sequence
  chemically synthesized
ccccttcagattcctgtagatt

SEQ ID NO: 59580 - DNA, 22 bp, Artificial Sequence
  chemically synthesized
cagattcctgtagattccgtag

SEQ ID NO: 59581 - DNA, 22 bp, Artificial Sequence
  chemically synthesized
agattcctgtagattccgtagg

SEQ ID NO: 59582 - DNA, 22 bp, Artificial Sequence
  chemically synthesized
ctgtagattccgtaggcgacca

SEQ ID NO: 59583 - DNA, 22 bp, Artificial Sequence
  chemically synthesized
tagattccgtaggcgaccaaca

SEQ ID NO: 59584 - DNA, 22 bp, Artificial Sequence
  chemically synthesized
cgtaggcgaccaacatggggtg

SEQ ID NO: 59585 - DNA, 22 bp, Artificial Sequence
  chemically synthesized
tctgctctttttgatgcaaata

SEQ ID NO: 59586 - DNA, 22 bp, Artificial Sequence
  chemically synthesized
ctctttttgatgcaaatatctt

SEQ ID NO: 59587 - DNA, 22 bp, Artificial Sequence
  chemically synthesized
tttttgatgcaaatatcttcac

SEQ ID NO: 59588 - DNA, 22 bp, Artificial Sequence
  chemically synthesized
tttgatgcaaatatcttcactc

SEQ ID NO: 59589 - DNA, 22 bp, Artificial Sequence
  chemically synthesized
ttgatgcaaatatcttcactct

SEQ ID NO: 59590 - DNA, 22 bp, Artificial Sequence
  chemically synthesized
tgatgcaaatatcttcactctc

SEQ ID NO: 59591 - DNA, 22 bp, Artificial Sequence
  chemically synthesized
gatgcaaatatcttcactctcc

SEQ ID NO: 59592 - DNA, 22 bp, Artificial Sequence
  chemically synthesized
atgcaaatatcttcactctcct

SEQ ID NO: 59593 - DNA, 22 bp, Artificial Sequence
  chemically synthesized
cactctccttggtgcttctgtg

SEQ ID NO: 59594 - DNA, 22 bp, Artificial Sequence
  chemically synthesized
actctccttggtgcttctgtgg

SEQ ID NO: 59595 - DNA, 22 bp, Artificial Sequence
  chemically synthesized
tccttggtgcttctgtggttgt

SEQ ID NO: 59596 - DNA, 22 bp, Artificial Sequence
  chemically synthesized
cttggtgcttctgtggttgtgc

SEQ ID NO: 59597 - DNA, 22 bp, Artificial Sequence
  chemically synthesized
ggtgcttctgtggttgtgccta

SEQ ID NO: 59598 - DNA, 22 bp, Artificial Sequence
  chemically synthesized
gtgcttctgtggttgtgcctat

SEQ ID NO: 59599 - DNA, 22 bp, Artificial Sequence
  chemically synthesized
ctgtggttgtgcctatgaattt

SEQ ID NO: 59600 - DNA, 22 bp, Artificial Sequence
  chemically synthesized
tgtggttgtgcctatgaattta

SEQ ID NO: 59601 - DNA, 22 bp, Artificial Sequence
  chemically synthesized
tggttgtgcctatgaatttagg

SEQ ID NO: 59602 - DNA, 22 bp, Artificial Sequence
  chemically synthesized
tgcctatgaatttaggacctta

SEQ ID NO: 59603 - DNA, 22 bp, Artificial Sequence
  chemically synthesized
tgaatttaggaccttatgcctc

SEQ ID NO: 59604 - DNA, 22 bp, Artificial Sequence
  chemically synthesized
aggaccttatgcctcatagtgt

SEQ ID NO: 59605 - DNA, 22 bp, Artificial Sequence
  chemically synthesized
ggaccttatgcctcatagtgtt

SEQ ID NO: 59606 - DNA, 22 bp, Artificial Sequence
  chemically synthesized
atgcctcatagtgttgagtcag

SEQ ID NO: 59607 - DNA, 22 bp, Artificial Sequence
  chemically synthesized
tgcctcatagtgttgagtcaga

SEQ ID NO: 59608 - DNA, 22 bp, Artificial Sequence
  chemically synthesized
atagtgttgagtcagagcaaaa

SEQ ID NO: 59609 - DNA, 22 bp, Artificial Sequence
  chemically synthesized
agtcagagcaaaacagtttaca

SEQ ID NO: 59610 - DNA, 22 bp, Artificial Sequence
  chemically synthesized
acatcaaaggccacttatttaa

SEQ ID NO: 59611 - DNA, 22 bp, Artificial Sequence
  chemically synthesized
catcaaaggccacttatttaat

SEQ ID NO: 59612 - DNA, 22 bp, Artificial Sequence
  chemically synthesized
atttaattttcctcagaaaact

SEQ ID NO: 59613 - DNA, 22 bp, Artificial Sequence
  chemically synthesized
tttaattttcctcagaaaactc

SEQ ID NO: 59614 - DNA, 22 bp, Artificial Sequence
  chemically synthesized
aattttcctcagaaaactctgt

SEQ ID NO: 59615 - DNA, 22 bp, Artificial Sequence
  chemically synthesized
attttcctcagaaaactctgtg

SEQ ID NO: 59616 - DNA, 22 bp, Artificial Sequence
  chemically synthesized
tcctcagaaaactctgtgagga

SEQ ID NO: 59617 - DNA, 22 bp, Artificial Sequence
  chemically synthesized
cctcagaaaactctgtgaggat

SEQ ID NO: 59618 - DNA, 22 bp, Artificial Sequence
  chemically synthesized
ctcagaaaactctgtgaggata

SEQ ID NO: 59619 - DNA, 22 bp, Artificial Sequence
  chemically synthesized
agaaaactctgtgaggataatt

SEQ ID NO: 59620 - DNA, 22 bp, Artificial Sequence
  chemically synthesized
tgtgaggataatttctccttct

SEQ ID NO: 59621 - DNA, 22 bp, Artificial Sequence
  chemically synthesized
tgaggataatttctccttctta

SEQ ID NO: 59622 - DNA, 22 bp, Artificial Sequence
  chemically synthesized
ctccttcttataaacggaatgc

SEQ ID NO: 59623 - DNA, 22 bp, Artificial Sequence
  chemically synthesized
tccttcttataaacggaatgcg

SEQ ID NO: 59624 - DNA, 22 bp, Artificial Sequence
  chemically synthesized
cttcttataaacggaatgcgaa

SEQ ID NO: 59625 - DNA, 22 bp, Artificial Sequence
  chemically synthesized
cttataaacggaatgcgaatgt

SEQ ID NO: 59626 - DNA, 22 bp, Artificial Sequence
  chemically synthesized
ttataaacggaatgcgaatgtg

SEQ ID NO: 59627 - DNA, 22 bp, Artificial Sequence
  chemically synthesized
ataaacggaatgcgaatgtgta

SEQ ID NO: 59628 - DNA, 22 bp, Artificial Sequence
  chemically synthesized
taaacggaatgcgaatgtgtac

SEQ ID NO: 59629 - DNA, 22 bp, Artificial Sequence
  chemically synthesized
tcccaccgaagggtgatgctct

SEQ ID NO: 59630 - DNA, 22 bp, Artificial Sequence
  chemically synthesized
tttacttttataatctagattt

SEQ ID NO: 59631 - DNA, 22 bp, Artificial Sequence
  chemically synthesized
tacttttataatctagatttta

SEQ ID NO: 59632 - DNA, 22 bp, Artificial Sequence
  chemically synthesized
acttttataatctagattttaa

SEQ ID NO: 59633 - DNA, 22 bp, Artificial Sequence
  chemically synthesized
cttttataatctagattttaaa

SEQ ID NO: 59634 - DNA, 22 bp, Artificial Sequence
  chemically synthesized
ttataatctagattttaaaaaa

SEQ ID NO: 59635 - DNA, 22 bp, Artificial Sequence
  chemically synthesized
tataatctagattttaaaaaat

SEQ ID NO: 59636 - DNA, 22 bp, Artificial Sequence
  chemically synthesized
ataatctagattttaaaaaatt

SEQ ID NO: 59637 - DNA, 22 bp, Artificial Sequence
  chemically synthesized
taatctagattttaaaaaattt

SEQ ID NO: 59638 - DNA, 22 bp, Artificial Sequence
  chemically synthesized
gattttaaaaaatttggtggca

SEQ ID NO: 59639 - DNA, 22 bp, Artificial Sequence
  chemically synthesized
taaaaaatttggtggcacttga

SEQ ID NO: 59640 - DNA, 22 bp, Artificial Sequence
  chemically synthesized
aaaaaatttggtggcacttgat

SEQ ID NO: 59641 - DNA, 22 bp, Artificial Sequence
  chemically synthesized
aaaaatttggtggcacttgatt

SEQ ID NO: 59642 - DNA, 22 bp, Artificial Sequence
  chemically synthesized
ggtggcacttgatttcaggtcc

SEQ ID NO: 59643 - DNA, 22 bp, Artificial Sequence
  chemically synthesized
gtggcacttgatttcaggtcct

SEQ ID NO: 59644 - DNA, 22 bp, Artificial Sequence
  chemically synthesized
gatttcaggtcctcagactcca

SEQ ID NO: 59645 - DNA, 22 bp, Artificial Sequence
  chemically synthesized
atttcaggtcctcagactccag

SEQ ID NO: 59646 - DNA, 22 bp, Artificial Sequence
  chemically synthesized
caggtcctcagactccagaatt

SEQ ID NO: 59647 - DNA, 22 bp, Artificial Sequence
  chemically synthesized
aggtcctcagactccagaattt

SEQ ID NO: 59648 - DNA, 22 bp, Artificial Sequence
  chemically synthesized
agactccagaatttatactcac

SEQ ID NO: 59649 - DNA, 22 bp, Artificial Sequence
  chemically synthesized
cagaatttatactcactgatta

SEQ ID NO: 59650 - DNA, 22 bp, Artificial Sequence
  chemically synthesized
atactcactgattagtaatgca

SEQ ID NO: 59651 - DNA, 22 bp, Artificial Sequence
  chemically synthesized
tactcactgattagtaatgcat

SEQ ID NO: 59652 - DNA, 22 bp, Artificial Sequence
  chemically synthesized
actgattagtaatgcattatgc

SEQ ID NO: 59653 - DNA, 22 bp, Artificial Sequence
  chemically synthesized
attagtaatgcattatgcaaat

SEQ ID NO: 59654 - DNA, 22 bp, Artificial Sequence
  chemically synthesized
gtaatgcattatgcaaataatt

SEQ ID NO: 59655 - DNA, 22 bp, Artificial Sequence
  chemically synthesized
tgcaaataattcagtttacata

SEQ ID NO: 59656 - DNA, 22 bp, Artificial Sequence
  chemically synthesized
agtttacatatccaaatactgt

SEQ ID NO: 59657 - DNA, 22 bp, Artificial Sequence
  chemically synthesized
acatatccaaatactgttttgc

SEQ ID NO: 59658 - DNA, 22 bp, Artificial Sequence
  chemically synthesized
catatccaaatactgttttgca

SEQ ID NO: 59659 - DNA, 22 bp, Artificial Sequence
  chemically synthesized
ttttgcatcattcacacctcat

SEQ ID NO: 59660 - DNA, 22 bp, Artificial Sequence
  chemically synthesized
tgcatcattcacacctcatgtc

SEQ ID NO: 59661 - DNA, 22 bp, Artificial Sequence
  chemically synthesized
gcatcattcacacctcatgtct

SEQ ID NO: 59662 - DNA, 22 bp, Artificial Sequence
  chemically synthesized
catcattcacacctcatgtctt

SEQ ID NO: 59663 - DNA, 22 bp, Artificial Sequence
  chemically synthesized
acacctcatgtcttgaaaaaaa

SEQ ID NO: 59664 - DNA, 22 bp, Artificial Sequence
  chemically synthesized
atgtcttgaaaaaaaaagtgaa

SEQ ID NO: 59665 - DNA, 22 bp, Artificial Sequence
  chemically synthesized
gaaaaaaaaagtgaaatgtttc

SEQ ID NO: 59666 - DNA, 22 bp, Artificial Sequence
  chemically synthesized
aaaaaaaaagtgaaatgtttcc

SEQ ID NO: 59667 - DNA, 22 bp, Artificial Sequence
  chemically synthesized
cctcaaaataaacaaaacctgc

SEQ ID NO: 59668 - DNA, 22 bp, Artificial Sequence
  chemically synthesized
ctcaaaataaacaaaacctgca

SEQ ID NO: 59669 - DNA, 22 bp, Artificial Sequence
  chemically synthesized
aaaataaacaaaacctgcagaa

SEQ ID NO: 59670 - DNA, 22 bp, Artificial Sequence
  chemically synthesized
cagaagagtttattgtaagggt

SEQ ID NO: 59671 - DNA, 22 bp, Artificial Sequence
  chemically synthesized
attgtaagggtgaaaattaaag

SEQ ID NO: 59672 - DNA, 22 bp, Artificial Sequence
  chemically synthesized
ttgtaagggtgaaaattaaaga

SEQ ID NO: 59673 - DNA, 22 bp, Artificial Sequence
  chemically synthesized
taagggtgaaaattaaagagga

SEQ ID NO: 59674 - DNA, 22 bp, Artificial Sequence
  chemically synthesized
aagaggaacccatttgcctggg

SEQ ID NO: 59675 - DNA, 22 bp, Artificial Sequence
  chemically synthesized
gcctgggaacttttgaggaaaa

SEQ ID NO: 59676 - DNA, 22 bp, Artificial Sequence
  chemically synthesized
cctgggaacttttgaggaaaat

SEQ ID NO: 59677 - DNA, 22 bp, Artificial Sequence
  chemically synthesized
ggaacttttgaggaaaatttta

SEQ ID NO: 59678 - DNA, 22 bp, Artificial Sequence
  chemically synthesized
ttgaggaaaattttaatactcc

SEQ ID NO: 59679 - DNA, 22 bp, Artificial Sequence
  chemically synthesized
tgaggaaaattttaatactcct

SEQ ID NO: 59680 - DNA, 22 bp, Artificial Sequence
  chemically synthesized
gaggaaaattttaatactcctg

SEQ ID NO: 59681 - DNA, 22 bp, Artificial Sequence
  chemically synthesized
aggaaaattttaatactcctgc

SEQ ID NO: 59682 - DNA, 22 bp, Artificial Sequence
  chemically synthesized
taatactcctgcataaataatt

SEQ ID NO: 59683 - DNA, 22 bp, Artificial Sequence
  chemically synthesized
aatactcctgcataaataattt

SEQ ID NO: 59684 - DNA, 22 bp, Artificial Sequence
  chemically synthesized
atactcctgcataaataatttt

SEQ ID NO: 59685 - DNA, 22 bp, Artificial Sequence
  chemically synthesized
ctgcataaataattttgcaatt

SEQ ID NO: 59686 - DNA, 22 bp, Artificial Sequence
  chemically synthesized
cataaataattttgcaattatt

SEQ ID NO: 59687 - DNA, 22 bp, Artificial Sequence
  chemically synthesized
tgcaattatttttgattcctac

SEQ ID NO: 59688 - DNA, 22 bp, Artificial Sequence
  chemically synthesized
gcaattatttttgattcctacc

SEQ ID NO: 59689 - DNA, 22 bp, Artificial Sequence
  chemically synthesized
caattatttttgattcctacct

SEQ ID NO: 59690 - DNA, 22 bp, Artificial Sequence
  chemically synthesized
tttttgattcctacctaatcaa

SEQ ID NO: 59691 - DNA, 22 bp, Artificial Sequence
  chemically synthesized
ttgattcctacctaatcaatat

SEQ ID NO: 59692 - DNA, 22 bp, Artificial Sequence
  chemically synthesized
tgattcctacctaatcaatata

SEQ ID NO: 59693 - DNA, 22 bp, Artificial Sequence
  chemically synthesized
gattcctacctaatcaatatac

SEQ ID NO: 59694 - DNA, 22 bp, Artificial Sequence
  chemically synthesized
attcctacctaatcaatatacc

SEQ ID NO: 59695 - DNA, 22 bp, Artificial Sequence
  chemically synthesized
ctacctaatcaatataccttgc

SEQ ID NO: 59696 - DNA, 22 bp, Artificial Sequence
  chemically synthesized
cctaatcaatataccttgccac

SEQ ID NO: 59697 - DNA, 22 bp, Artificial Sequence
  chemically synthesized
atcaatataccttgccacgcaa

SEQ ID NO: 59698 - DNA, 22 bp, Artificial Sequence
  chemically synthesized
gccacgcaaggtatattctatt

SEQ ID NO: 59699 - DNA, 22 bp, Artificial Sequence
  chemically synthesized
ccacgcaaggtatattctatta

SEQ ID NO: 59700 - DNA, 22 bp, Artificial Sequence
  chemically synthesized
tattatctttggctttctgaat

SEQ ID NO: 59701 - DNA, 22 bp, Artificial Sequence
  chemically synthesized
ttatctttggctttctgaattt

SEQ ID NO: 59702 - DNA, 22 bp, Artificial Sequence
  chemically synthesized
tctttggctttctgaatttttc

SEQ ID NO: 59703 - DNA, 22 bp, Artificial Sequence
  chemically synthesized
tggctttctgaatttttcaatt

SEQ ID NO: 59704 - DNA, 22 bp, Artificial Sequence
  chemically synthesized
ggctttctgaatttttcaattt

SEQ ID NO: 59705 - DNA, 22 bp, Artificial Sequence
  chemically synthesized
gctttctgaatttttcaatttt

SEQ ID NO: 59706 - DNA, 22 bp, Artificial Sequence
  chemically synthesized
tctgaatttttcaattttcaga

SEQ ID NO: 59707 - DNA, 22 bp, Artificial Sequence
  chemically synthesized
ctgaatttttcaattttcagaa

SEQ ID NO: 59708 - DNA, 22 bp, Artificial Sequence
  chemically synthesized
tgaatttttcaattttcagaaa

SEQ ID NO: 59709 - DNA, 22 bp, Artificial Sequence
  chemically synthesized
aatttttcaattttcagaaaaa

SEQ ID NO: 59710 - DNA, 22 bp, Artificial Sequence
  chemically synthesized
ttcaattttcagaaaaagaagc

SEQ ID NO: 59711 - DNA, 22 bp, Artificial Sequence
  chemically synthesized
tcaattttcagaaaaagaagcc

SEQ ID NO: 59712 - DNA, 22 bp, Artificial Sequence
  chemically synthesized
caattttcagaaaaagaagcca

SEQ ID NO: 59713 - DNA, 22 bp, Artificial Sequence
  chemically synthesized
aattttcagaaaaagaagccat

SEQ ID NO: 59714 - DNA, 22 bp, Artificial Sequence
  chemically synthesized
tcagaaaaagaagccataatac

SEQ ID NO: 59715 - DNA, 22 bp, Artificial Sequence
  chemically synthesized
cagaaaaagaagccataatact

SEQ ID NO: 59716 - DNA, 22 bp, Artificial Sequence
  chemically synthesized
agaaaaagaagccataatacta

SEQ ID NO: 59717 - DNA, 22 bp, Artificial Sequence
  chemically synthesized
tatcatacacacatttgtgcat

SEQ ID NO: 59718 - DNA, 22 bp, Artificial Sequence
  chemically synthesized
gtgcataaatacacaggcataa

SEQ ID NO: 59719 - DNA, 22 bp, Artificial Sequence
  chemically synthesized
tgcataaatacacaggcataaa

SEQ ID NO: 59720 - DNA, 22 bp, Artificial Sequence
  chemically synthesized
aggccgaattatttgaagagga

SEQ ID NO: 59721 - DNA, 22 bp, Artificial Sequence
  chemically synthesized
ggccgaattatttgaagaggat

SEQ ID NO: 59722 - DNA, 22 bp, Artificial Sequence
  chemically synthesized
tttgaagaggatacaataattg

SEQ ID NO: 59723 - DNA, 22 bp, Artificial Sequence
  chemically synthesized
gaagaggatacaataattgctt

SEQ ID NO: 59724 - DNA, 22 bp, Artificial Sequence
  chemically synthesized
aagaggatacaataattgcttg

SEQ ID NO: 59725 - DNA, 22 bp, Artificial Sequence
  chemically synthesized
cttgccagtgacatgattctcc

SEQ ID NO: 59726 - DNA, 22 bp, Artificial Sequence
  chemically synthesized
gccagtgacatgattctcctgc

SEQ ID NO: 59727 - DNA, 22 bp, Artificial Sequence
  chemically synthesized
ccagtgacatgattctcctgcc

SEQ ID NO: 59728 - DNA, 22 bp, Artificial Sequence
  chemically synthesized
tcctgccagagagaggggagaa

SEQ ID NO: 59729 - DNA, 22 bp, Artificial Sequence
  chemically synthesized
ctgccagagagaggggagaata

SEQ ID NO: 59730 - DNA, 22 bp, Artificial Sequence
  chemically synthesized
ccagagagaggggagaataact

SEQ ID NO: 59731 - DNA, 22 bp, Artificial Sequence
  chemically synthesized
ggtgcaaacttttaacactcca

SEQ ID NO: 59732 - DNA, 22 bp, Artificial Sequence
  chemically synthesized
ttaacactccaagtctagagag

SEQ ID NO: 59733 - DNA, 22 bp, Artificial Sequence
  chemically synthesized
taacactccaagtctagagaga

SEQ ID NO: 59734 - DNA, 22 bp, Artificial Sequence
  chemically synthesized
aacactccaagtctagagagaa

SEQ ID NO: 59735 - DNA, 22 bp, Artificial Sequence
  chemically synthesized
acactccaagtctagagagaat

SEQ ID NO: 59736 - DNA, 22 bp, Artificial Sequence
  chemically synthesized
caagtctagagagaattatcca

SEQ ID NO: 59737 - DNA, 22 bp, Artificial Sequence
  chemically synthesized
gagagaattatccaagcatagc

SEQ ID NO: 59738 - DNA, 22 bp, Artificial Sequence
  chemically synthesized
tccaagcatagccatgaattcc

SEQ ID NO: 59739 - DNA, 22 bp, Artificial Sequence
  chemically synthesized
ctgagttatggattggcaaatg

SEQ ID NO: 59740 - DNA, 22 bp, Artificial Sequence
  chemically synthesized
agttatggattggcaaatgaca

SEQ ID NO: 59741 - DNA, 22 bp, Artificial Sequence
  chemically synthesized
tggattggcaaatgacaatgcc

SEQ ID NO: 59742 - DNA, 22 bp, Artificial Sequence
  chemically synthesized
gcaaatgacaatgcctatgaaa

SEQ ID NO: 59743 - DNA, 22 bp, Artificial Sequence
  chemically synthesized
tgaaaacgatctctttgtcttc

SEQ ID NO: 59744 - DNA, 22 bp, Artificial Sequence
  chemically synthesized
tttgtcttcactgagttttctt

SEQ ID NO: 59745 - DNA, 22 bp, Artificial Sequence
  chemically synthesized
tgtcttcactgagttttctttg

SEQ ID NO: 59746 - DNA, 22 bp, Artificial Sequence
  chemically synthesized
gtcttcactgagttttctttgt

SEQ ID NO: 59747 - DNA, 22 bp, Artificial Sequence
  chemically synthesized
tcttcactgagttttctttgtc

SEQ ID NO: 59748 - DNA, 22 bp, Artificial Sequence
  chemically synthesized
cactgagttttctttgtcattg

SEQ ID NO: 59749 - DNA, 22 bp, Artificial Sequence
  chemically synthesized
actgagttttctttgtcattgg

SEQ ID NO: 59750 - DNA, 22 bp, Artificial Sequence
  chemically synthesized
agttttctttgtcattggagta

SEQ ID NO: 59751 - DNA, 22 bp, Artificial Sequence
  chemically synthesized
tctttgtcattggagtaattta

SEQ ID NO: 59752 - DNA, 22 bp, Artificial Sequence
  chemically synthesized
ctttgtcattggagtaatttag

SEQ ID NO: 59753 - DNA, 22 bp, Artificial Sequence
  chemically synthesized
tttgtcattggagtaatttagg

SEQ ID NO: 59754 - DNA, 22 bp, Artificial Sequence
  chemically synthesized
tgtcattggagtaatttaggag

SEQ ID NO: 59755 - DNA, 22 bp, Artificial Sequence
  chemically synthesized
gtcattggagtaatttaggaga

SEQ ID NO: 59756 - DNA, 22 bp, Artificial Sequence
  chemically synthesized
tcattggagtaatttaggagaa

SEQ ID NO: 59757 - DNA, 22 bp, Artificial Sequence
  chemically synthesized
gagtaatttaggagaatacagg

SEQ ID NO: 59758 - DNA, 22 bp, Artificial Sequence
  chemically synthesized
aggagaatacaggatgtgactg

SEQ ID NO: 59759 - DNA, 22 bp, Artificial Sequence
  chemically synthesized
ggagaatacaggatgtgactgg

SEQ ID NO: 59760 - DNA, 22 bp, Artificial Sequence
  chemically synthesized
ggagccctttctgaataagcac

SEQ ID NO: 59761 - DNA, 22 bp, Artificial Sequence
  chemically synthesized
tctgaataagcacagtcccatg

SEQ ID NO: 59762 - DNA, 22 bp, Artificial Sequence
  chemically synthesized
ctgaataagcacagtcccatgc

SEQ ID NO: 59763 - DNA, 22 bp, Artificial Sequence
  chemically synthesized
tgaataagcacagtcccatgcc

SEQ ID NO: 59764 - DNA, 22 bp, Artificial Sequence
  chemically synthesized
aataagcacagtcccatgccca

SEQ ID NO: 59765 - DNA, 22 bp, Artificial Sequence
  chemically synthesized
ctaaaccagtggctcccagctg

SEQ ID NO: 59766 - DNA, 22 bp, Artificial Sequence
  chemically synthesized
aaccagtggctcccagctgcat

SEQ ID NO: 59767 - DNA, 22 bp, Artificial Sequence
  chemically synthesized
ccagctgcatgtgtcagaacag

SEQ ID NO: 59768 - DNA, 22 bp, Artificial Sequence
  chemically synthesized
catgtgtcagaacagaactggc

SEQ ID NO: 59769 - DNA, 22 bp, Artificial Sequence
  chemically synthesized
gcctcagaaatctacaagattc

SEQ ID NO: 59770 - DNA, 22 bp, Artificial Sequence
  chemically synthesized
agaaatctacaagattccagtg

SEQ ID NO: 59771 - DNA, 22 bp, Artificial Sequence
  chemically synthesized
caagattccagtggttccagcc

SEQ ID NO: 59772 - DNA, 22 bp, Artificial Sequence
  chemically synthesized
cagtggttccagcctcactttc

SEQ ID NO: 59773 - DNA, 22 bp, Artificial Sequence
  chemically synthesized
cagcctcactttctccagtggt

SEQ ID NO: 59774 - DNA, 22 bp, Artificial Sequence
  chemically synthesized
actttctccagtggtcaactta

SEQ ID NO: 59775 - DNA, 22 bp, Artificial Sequence
  chemically synthesized
tctccagtggtcaacttactgc

SEQ ID NO: 59776 - DNA, 22 bp, Artificial Sequence
  chemically synthesized
ctccagtggtcaacttactgct

SEQ ID NO: 59777 - DNA, 22 bp, Artificial Sequence
  chemically synthesized
tccagtggtcaacttactgctg

SEQ ID NO: 59778 - DNA, 22 bp, Artificial Sequence
  chemically synthesized
cagtggtcaacttactgctgtt

SEQ ID NO: 59779 - DNA, 22 bp, Artificial Sequence
  chemically synthesized
actgctgttgcaaagcacgtca

SEQ ID NO: 59780 - DNA, 22 bp, Artificial Sequence
  chemically synthesized
ctgctgttgcaaagcacgtcag

SEQ ID NO: 59781 - DNA, 22 bp, Artificial Sequence
  chemically synthesized
ctgttgcaaagcacgtcagatt

SEQ ID NO: 59782 - DNA, 22 bp, Artificial Sequence
  chemically synthesized
ttgcaaagcacgtcagatttca

SEQ ID NO: 59783 - DNA, 22 bp, Artificial Sequence
  chemically synthesized
caaagcacgtcagatttcagga

SEQ ID NO: 59784 - DNA, 22 bp, Artificial Sequence
  chemically synthesized
caggagcgatttctcttgtaag

SEQ ID NO: 59785 - DNA, 22 bp, Artificial Sequence
  chemically synthesized
aggagcgatttctcttgtaagg

SEQ ID NO: 59786 - DNA, 22 bp, Artificial Sequence
  chemically synthesized
ctcttgtaaggaaagaaggcag

SEQ ID NO: 59787 - DNA, 22 bp, Artificial Sequence
  chemically synthesized
tcttgtaaggaaagaaggcagg

SEQ ID NO: 59788 - DNA, 22 bp, Artificial Sequence
  chemically synthesized
ttgtaaggaaagaaggcaggca

SEQ ID NO: 59789 - DNA, 22 bp, Artificial Sequence
  chemically synthesized
gtaaggaaagaaggcaggcagg

SEQ ID NO: 59790 - DNA, 22 bp, Artificial Sequence
  chemically synthesized
taaggaaagaaggcaggcaggc

SEQ ID NO: 59791 - DNA, 22 bp, Artificial Sequence
  chemically synthesized
attttttctctgcagcatgagt

SEQ ID NO: 59792 - DNA, 22 bp, Artificial Sequence
  chemically synthesized
ttttttctctgcagcatgagtg

SEQ ID NO: 59793 - DNA, 22 bp, Artificial Sequence
  chemically synthesized
tttctctgcagcatgagtgcag

SEQ ID NO: 59794 - DNA, 22 bp, Artificial Sequence
  chemically synthesized
ttctctgcagcatgagtgcagt

SEQ ID NO: 59795 - DNA, 22 bp, Artificial Sequence
  chemically synthesized
tctctgcagcatgagtgcagtc

SEQ ID NO: 59796 - DNA, 22 bp, Artificial Sequence
  chemically synthesized
ctctgcagcatgagtgcagtca

SEQ ID NO: 59797 - DNA, 22 bp, Artificial Sequence
  chemically synthesized
tctgcagcatgagtgcagtcac

SEQ ID NO: 59798 - DNA, 22 bp, Artificial Sequence
  chemically synthesized
tgcagcatgagtgcagtcacct

SEQ ID NO: 59799 - DNA, 22 bp, Artificial Sequence
  chemically synthesized
cagcatgagtgcagtcaccttt

SEQ ID NO: 59800 - DNA, 22 bp, Artificial Sequence
  chemically synthesized
tttcctacgatgttccacaccc

SEQ ID NO: 59801 - DNA, 22 bp, Artificial Sequence
  chemically synthesized
ttcctacgatgttccacaccca

SEQ ID NO: 59802 - DNA, 22 bp, Artificial Sequence
  chemically synthesized
tcctacgatgttccacacccat

SEQ ID NO: 59803 - DNA, 22 bp, Artificial Sequence
  chemically synthesized
cctacgatgttccacacccatc

SEQ ID NO: 59804 - DNA, 22 bp, Artificial Sequence
  chemically synthesized
ctacgatgttccacacccatct

SEQ ID NO: 59805 - DNA, 22 bp, Artificial Sequence
  chemically synthesized
cgatgttccacacccatctctc

SEQ ID NO: 59806 - DNA, 22 bp, Artificial Sequence
  chemically synthesized
cacacccatctctccttacagg

SEQ ID NO: 59807 - DNA, 22 bp, Artificial Sequence
  chemically synthesized
tccttacaggttatagacacat

SEQ ID NO: 59808 - DNA, 22 bp, Artificial Sequence
  chemically synthesized
cttacaggttatagacacattt

SEQ ID NO: 59809 - DNA, 22 bp, Artificial Sequence
  chemically synthesized
acaggttatagacacatttttg

SEQ ID NO: 59810 - DNA, 22 bp, Artificial Sequence
  chemically synthesized
caggttatagacacatttttgg

SEQ ID NO: 59811 - DNA, 22 bp, Artificial Sequence
  chemically synthesized
tagacacatttttggcactgca

SEQ ID NO: 59812 - DNA, 22 bp, Artificial Sequence
  chemically synthesized
ttggcactgcataaagtaagcg

SEQ ID NO: 59813 - DNA, 22 bp, Artificial Sequence
  chemically synthesized
tggcactgcataaagtaagcgt

SEQ ID NO: 59814 - DNA, 22 bp, Artificial Sequence
  chemically synthesized
ggcactgcataaagtaagcgtt

SEQ ID NO: 59815 - DNA, 22 bp, Artificial Sequence
  chemically synthesized
gcactgcataaagtaagcgttc

SEQ ID NO: 59816 - DNA, 22 bp, Artificial Sequence
  chemically synthesized
cataaagtaagcgttccaacat

SEQ ID NO: 59817 - DNA, 22 bp, Artificial Sequence
  chemically synthesized
caacatgtttttaatctttaac

SEQ ID NO: 59818 - DNA, 22 bp, Artificial Sequence
  chemically synthesized
ttaatctttaactttcacatca

SEQ ID NO: 59819 - DNA, 22 bp, Artificial Sequence
  chemically synthesized
taatctttaactttcacatcat

SEQ ID NO: 59820 - DNA, 22 bp, Artificial Sequence
  chemically synthesized
aatctttaactttcacatcatt

SEQ ID NO: 59821 - DNA, 22 bp, Artificial Sequence
  chemically synthesized
atctttaactttcacatcatta

SEQ ID NO: 59822 - DNA, 22 bp, Artificial Sequence
  chemically synthesized
taactttcacatcattaaaaag

SEQ ID NO: 59823 - DNA, 22 bp, Artificial Sequence
  chemically synthesized
aactttcacatcattaaaaagc

SEQ ID NO: 59824 - DNA, 22 bp, Artificial Sequence
  chemically synthesized
actttcacatcattaaaaagct

SEQ ID NO: 59825 - DNA, 22 bp, Artificial Sequence
  chemically synthesized
tcacatcattaaaaagctgatg

SEQ ID NO: 59826 - DNA, 22 bp, Artificial Sequence
  chemically synthesized
cacatcattaaaaagctgatgt

SEQ ID NO: 59827 - DNA, 22 bp, Artificial Sequence
  chemically synthesized
acatcattaaaaagctgatgta

SEQ ID NO: 59828 - DNA, 22 bp, Artificial Sequence
  chemically synthesized
aaaagctgatgtactgactttc

SEQ ID NO: 59829 - DNA, 22 bp, Artificial Sequence
  chemically synthesized
atgtactgactttcagctgcct

SEQ ID NO: 59830 - DNA, 22 bp, Artificial Sequence
  chemically synthesized
actttcagctgcctggagatag

SEQ ID NO: 59831 - DNA, 22 bp, Artificial Sequence
  chemically synthesized
tcagctgcctggagatagttca

SEQ ID NO: 59832 - DNA, 22 bp, Artificial Sequence
  chemically synthesized
cagctgcctggagatagttcag

SEQ ID NO: 59833 - DNA, 22 bp, Artificial Sequence
  chemically synthesized
agctgcctggagatagttcagg

SEQ ID NO: 59834 - DNA, 22 bp, Artificial Sequence
  chemically synthesized
cctggagatagttcagggccca

SEQ ID NO: 59835 - DNA, 22 bp, Artificial Sequence
  chemically synthesized
gagatagttcagggcccagcac

SEQ ID NO: 59836 - DNA, 22 bp, Artificial Sequence
  chemically synthesized
agggcccagcacctgacaggtg

SEQ ID NO: 59837 - DNA, 22 bp, Artificial Sequence
  chemically synthesized
acaggtgtaatgttctgtgttt

SEQ ID NO: 59838 - DNA, 22 bp, Artificial Sequence
  chemically synthesized
tgtgttttatgtctctcaatat

SEQ ID NO: 59839 - DNA, 22 bp, Artificial Sequence
  chemically synthesized
tgttttatgtctctcaatatgg

SEQ ID NO: 59840 - DNA, 22 bp, Artificial Sequence
  chemically synthesized
tatgtctctcaatatggaggtt

SEQ ID NO: 59841 - DNA, 22 bp, Artificial Sequence
  chemically synthesized
atgtctctcaatatggaggtta

SEQ ID NO: 59842 - DNA, 22 bp, Artificial Sequence
  chemically synthesized
tgtctctcaatatggaggttat

SEQ ID NO: 59843 - DNA, 22 bp, Artificial Sequence
  chemically synthesized
tcaatatggaggttatagaatc

SEQ ID NO: 59844 - DNA, 22 bp, Artificial Sequence
  chemically synthesized
aatatggaggttatagaatcaa

SEQ ID NO: 59845 - DNA, 22 bp, Artificial Sequence
  chemically synthesized
tagaatcaaaaagaccgcaaaa

SEQ ID NO: 59846 - DNA, 22 bp, Artificial Sequence
  chemically synthesized
aaaggtgttgatacccatagac

SEQ ID NO: 59847 - DNA, 22 bp, Artificial Sequence
  chemically synthesized
aaggtgttgatacccatagaca

SEQ ID NO: 59848 - DNA, 22 bp, Artificial Sequence
  chemically synthesized
atacccatagacagagcatgca

SEQ ID NO: 59849 - DNA, 22 bp, Artificial Sequence
  chemically synthesized
aggttccctttcttgccccgct

SEQ ID NO: 59850 - DNA, 22 bp, Artificial Sequence
  chemically synthesized
cctttcttgccccgctttcaca

SEQ ID NO: 59851 - DNA, 22 bp, Artificial Sequence
  chemically synthesized
tcttgccccgctttcacaccta

SEQ ID NO: 59852 - DNA, 22 bp, Artificial Sequence
  chemically synthesized
cttgccccgctttcacacctat

SEQ ID NO: 59853 - DNA, 22 bp, Artificial Sequence
  chemically synthesized
ttgccccgctttcacacctatt

SEQ ID NO: 59854 - DNA, 22 bp, Artificial Sequence
  chemically synthesized
gccccgctttcacacctatttc

SEQ ID NO: 59855 - DNA, 22 bp, Artificial Sequence
  chemically synthesized
ccccgctttcacacctatttct

SEQ ID NO: 59856 - DNA, 22 bp, Artificial Sequence
  chemically synthesized
tcacacctatttctttttttgt

SEQ ID NO: 59857 - DNA, 22 bp, Artificial Sequence
  chemically synthesized
cacacctatttctttttttgta

SEQ ID NO: 59858 - DNA, 22 bp, Artificial Sequence
  chemically synthesized
acacctatttctttttttgtag

SEQ ID NO: 59859 - DNA, 22 bp, Artificial Sequence
  chemically synthesized
tttctttttttgtagcgcctgt

SEQ ID NO: 59860 - DNA, 22 bp, Artificial Sequence
  chemically synthesized
ctttttttgtagcgcctgtatt

SEQ ID NO: 59861 - DNA, 22 bp, Artificial Sequence
  chemically synthesized
tttttttgtagcgcctgtattt

SEQ ID NO: 59862 - DNA, 22 bp, Artificial Sequence
  chemically synthesized
tttttgtagcgcctgtatttga

SEQ ID NO: 59863 - DNA, 22 bp, Artificial Sequence
  chemically synthesized
ttttgtagcgcctgtatttgaa

SEQ ID NO: 59864 - DNA, 22 bp, Artificial Sequence
  chemically synthesized
tttgtagcgcctgtatttgaaa

SEQ ID NO: 59865 - DNA, 22 bp, Artificial Sequence
  chemically synthesized
ttgtagcgcctgtatttgaaag

SEQ ID NO: 59866 - DNA, 22 bp, Artificial Sequence
  chemically synthesized
tgtagcgcctgtatttgaaagg

SEQ ID NO: 59867 - DNA, 22 bp, Artificial Sequence
  chemically synthesized
gtagcgcctgtatttgaaaggg

SEQ ID NO: 59868 - DNA, 22 bp, Artificial Sequence
  chemically synthesized
tagcgcctgtatttgaaagggg

SEQ ID NO: 59869 - DNA, 22 bp, Artificial Sequence
  chemically synthesized
tatttgaaaggggttcctggtg

SEQ ID NO: 59870 - DNA, 22 bp, Artificial Sequence
  chemically synthesized
gaaaggggttcctggtgtactt

SEQ ID NO: 59871 - DNA, 22 bp, Artificial Sequence
  chemically synthesized
aaaggggttcctggtgtacttg

SEQ ID NO: 59872 - DNA, 22 bp, Artificial Sequence
  chemically synthesized
ctggtgtacttgggagaaaaga

SEQ ID NO: 59873 - DNA, 22 bp, Artificial Sequence
  chemically synthesized
gtgtacttgggagaaaagaagc

SEQ ID NO: 59874 - DNA, 22 bp, Artificial Sequence
  chemically synthesized
gggagaaaagaagcttcttggt

SEQ ID NO: 59875 - DNA, 22 bp, Artificial Sequence
  chemically synthesized
ggagaaaagaagcttcttggtt

SEQ ID NO: 59876 - DNA, 22 bp, Artificial Sequence
  chemically synthesized
cttggtttggtagtacctacca

SEQ ID NO: 59877 - DNA, 22 bp, Artificial Sequence
  chemically synthesized
ttggtttggtagtacctaccag

SEQ ID NO: 59878 - DNA, 22 bp, Artificial Sequence
  chemically synthesized
ggtttggtagtacctaccagag

SEQ ID NO: 59879 - DNA, 22 bp, Artificial Sequence
  chemically synthesized
gtttggtagtacctaccagaga

SEQ ID NO: 59880 - DNA, 22 bp, Artificial Sequence
  chemically synthesized
ggtagtacctaccagagactcc

SEQ ID NO: 59881 - DNA, 22 bp, Artificial Sequence
  chemically synthesized
gtagtacctaccagagactccc

SEQ ID NO: 59882 - DNA, 22 bp, Artificial Sequence
  chemically synthesized
ccagagactccctgtttcctgc

SEQ ID NO: 59883 - DNA, 22 bp, Artificial Sequence
  chemically synthesized
cctgtttcctgctggtatcagg

SEQ ID NO: 59884 - DNA, 22 bp, Artificial Sequence
  chemically synthesized
tttcctgctggtatcaggattg

SEQ ID NO: 59885 - DNA, 22 bp, Artificial Sequence
  chemically synthesized
cctgctggtatcaggattgaaa

SEQ ID NO: 59886 - DNA, 22 bp, Artificial Sequence
  chemically synthesized
ctgctggtatcaggattgaaaa

SEQ ID NO: 59887 - DNA, 22 bp, Artificial Sequence
  chemically synthesized
ctggtatcaggattgaaaaatc

SEQ ID NO: 59888 - DNA, 22 bp, Artificial Sequence
  chemically synthesized
gtatcaggattgaaaaatccca

SEQ ID NO: 59889 - DNA, 22 bp, Artificial Sequence
  chemically synthesized
aaaaatcccacttctgtccatt

SEQ ID NO: 59890 - DNA, 22 bp, Artificial Sequence
  chemically synthesized
ctgtccattttctctcaagagt

SEQ ID NO: 59891 - DNA, 22 bp, Artificial Sequence
  chemically synthesized
tgtccattttctctcaagagtt

SEQ ID NO: 59892 - DNA, 22 bp, Artificial Sequence
  chemically synthesized
tccattttctctcaagagttga

SEQ ID NO: 59893 - DNA, 22 bp, Artificial Sequence
  chemically synthesized
tctctcaagagttgagagatgt

SEQ ID NO: 59894 - DNA, 22 bp, Artificial Sequence
  chemically synthesized
ctctcaagagttgagagatgtg

SEQ ID NO: 59895 - DNA, 22 bp, Artificial Sequence
  chemically synthesized
tctcaagagttgagagatgtgt

SEQ ID NO: 59896 - DNA, 22 bp, Artificial Sequence
  chemically synthesized
tcaagagttgagagatgtgtgc

SEQ ID NO: 59897 - DNA, 22 bp, Artificial Sequence
  chemically synthesized
aagagttgagagatgtgtgcca

SEQ ID NO: 59898 - DNA, 22 bp, Artificial Sequence
  chemically synthesized
agagatgtgtgccatcgctctt

SEQ ID NO: 59899 - DNA, 22 bp, Artificial Sequence
  chemically synthesized
tttaaaagaaggaactctcctt

SEQ ID NO: 59900 - DNA, 22 bp, Artificial Sequence
  chemically synthesized
taaaagaaggaactctcctttt

SEQ ID NO: 59901 - DNA, 22 bp, Artificial Sequence
  chemically synthesized
aaaagaaggaactctccttttg

SEQ ID NO: 59902 - DNA, 22 bp, Artificial Sequence
  chemically synthesized
aaagaaggaactctccttttgc

SEQ ID NO: 59903 - DNA, 22 bp, Artificial Sequence
  chemically synthesized
tccttttgctgtggattgtagg

SEQ ID NO: 59904 - DNA, 22 bp, Artificial Sequence
  chemically synthesized
cttttgctgtggattgtaggga

SEQ ID NO: 59905 - DNA, 22 bp, Artificial Sequence
  chemically synthesized
ttgctgtggattgtagggagca

SEQ ID NO: 59906 - DNA, 22 bp, Artificial Sequence
  chemically synthesized
tgctgtggattgtagggagcag

SEQ ID NO: 59907 - DNA, 22 bp, Artificial Sequence
  chemically synthesized
gctgtggattgtagggagcaga

SEQ ID NO: 59908 - DNA, 22 bp, Artificial Sequence
  chemically synthesized
ctgtggattgtagggagcagat

SEQ ID NO: 59909 - DNA, 22 bp, Artificial Sequence
  chemically synthesized
tggattgtagggagcagatttg

SEQ ID NO: 59910 - DNA, 22 bp, Artificial Sequence
  chemically synthesized
tagggagcagatttggtgctta

SEQ ID NO: 59911 - DNA, 22 bp, Artificial Sequence
  chemically synthesized
ggtgcttactgtggcttcagga

SEQ ID NO: 59912 - DNA, 22 bp, Artificial Sequence
  chemically synthesized
gtgcttactgtggcttcaggac

SEQ ID NO: 59913 - DNA, 22 bp, Artificial Sequence
  chemically synthesized
actgtggcttcaggacccacct

SEQ ID NO: 59914 - DNA, 22 bp, Artificial Sequence
  chemically synthesized
ctgtggcttcaggacccacctt

SEQ ID NO: 59915 - DNA, 22 bp, Artificial Sequence
  chemically synthesized
tggcttcaggacccaccttgaa

SEQ ID NO: 59916 - DNA, 22 bp, Artificial Sequence
  chemically synthesized
caggacccaccttgaatgacag

SEQ ID NO: 59917 - DNA, 22 bp, Artificial Sequence
  chemically synthesized
aggacccaccttgaatgacaga

SEQ ID NO: 59918 - DNA, 22 bp, Artificial Sequence
  chemically synthesized
gaatgacagaatgtcagtaaca

SEQ ID NO: 59919 - DNA, 22 bp, Artificial Sequence
  chemically synthesized
aatgacagaatgtcagtaacaa

SEQ ID NO: 59920 - DNA, 22 bp, Artificial Sequence
  chemically synthesized
gtggtgaacgactgcctcttga

SEQ ID NO: 59921 - DNA, 22 bp, Artificial Sequence
  chemically synthesized
cctcttgatctttgcccatcga

SEQ ID NO: 59922 - DNA, 22 bp, Artificial Sequence
  chemically synthesized
ttgatctttgcccatcgagcaa

SEQ ID NO: 59923 - DNA, 22 bp, Artificial Sequence
  chemically synthesized
gatctttgcccatcgagcaaca

SEQ ID NO: 59924 - DNA, 22 bp, Artificial Sequence
  chemically synthesized
atctttgcccatcgagcaacac

SEQ ID NO: 59925 - DNA, 22 bp, Artificial Sequence
  chemically synthesized
tgcccatcgagcaacaccatgt

SEQ ID NO: 59926 - DNA, 22 bp, Artificial Sequence
  chemically synthesized
gcccatcgagcaacaccatgtg

SEQ ID NO: 59927 - DNA, 22 bp, Artificial Sequence
  chemically synthesized
cccatcgagcaacaccatgtgg

SEQ ID NO: 59928 - DNA, 22 bp, Artificial Sequence
  chemically synthesized
gacctgaacttgaacagtaatt

SEQ ID NO: 59929 - DNA, 22 bp, Artificial Sequence
  chemically synthesized
acctgaacttgaacagtaattg

SEQ ID NO: 59930 - DNA, 22 bp, Artificial Sequence
  chemically synthesized
aacttgaacagtaattgatgag

SEQ ID NO: 59931 - DNA, 22 bp, Artificial Sequence
  chemically synthesized
gaacagtaattgatgagtcctt

SEQ ID NO: 59932 - DNA, 22 bp, Artificial Sequence
  chemically synthesized
aacagtaattgatgagtcctta

SEQ ID NO: 59933 - DNA, 22 bp, Artificial Sequence
  chemically synthesized
atgagtccttaaaatccacgcc

SEQ ID NO: 59934 - DNA, 22 bp, Artificial Sequence
  chemically synthesized
aaaatccacgcccggcccccag

SEQ ID NO: 59935 - DNA, 22 bp, Artificial Sequence
  chemically synthesized
aaatccacgcccggcccccagg

SEQ ID NO: 59936 - DNA, 22 bp, Artificial Sequence
  chemically synthesized
ggggcaccccatcccacgttct

SEQ ID NO: 59937 - DNA, 22 bp, Artificial Sequence
  chemically synthesized
gggcaccccatcccacgttctg

SEQ ID NO: 59938 - DNA, 22 bp, Artificial Sequence
  chemically synthesized
tgattctggatggacttttaag

SEQ ID NO: 59939 - DNA, 22 bp, Artificial Sequence
  chemically synthesized
attctggatggacttttaagtg

SEQ ID NO: 59940 - DNA, 22 bp, Artificial Sequence
  chemically synthesized
tggatggacttttaagtgaact

SEQ ID NO: 59941 - DNA, 22 bp, Artificial Sequence
  chemically synthesized
gatggacttttaagtgaactct

SEQ ID NO: 59942 - DNA, 22 bp, Artificial Sequence
  chemically synthesized
ttaagtgaactctgatgatgag

SEQ ID NO: 59943 - DNA, 22 bp, Artificial Sequence
  chemically synthesized
taagtgaactctgatgatgagt

SEQ ID NO: 59944 - DNA, 22 bp, Artificial Sequence
  chemically synthesized
aagtgaactctgatgatgagta

SEQ ID NO: 59945 - DNA, 22 bp, Artificial Sequence
  chemically synthesized
agtgaactctgatgatgagtag

SEQ ID NO: 59946 - DNA, 22 bp, Artificial Sequence
  chemically synthesized
tgatgatgagtaggctcttaaa

SEQ ID NO: 59947 - DNA, 22 bp, Artificial Sequence
  chemically synthesized
atgatgagtaggctcttaaaac

SEQ ID NO: 59948 - DNA, 22 bp, Artificial Sequence
  chemically synthesized
ttaaaactctttctcaacgttc

SEQ ID NO: 59949 - DNA, 22 bp, Artificial Sequence
  chemically synthesized
aaaactctttctcaacgttctc

SEQ ID NO: 59950 - DNA, 22 bp, Artificial Sequence
  chemically synthesized
aaactctttctcaacgttctct

SEQ ID NO: 59951 - DNA, 22 bp, Artificial Sequence
  chemically synthesized
tttctcaacgttctctgctggg

SEQ ID NO: 59952 - DNA, 22 bp, Artificial Sequence
  chemically synthesized
tctcaacgttctctgctgggtt

SEQ ID NO: 59953 - DNA, 22 bp, Artificial Sequence
  chemically synthesized
ctcaacgttctctgctgggttt

SEQ ID NO: 59954 - DNA, 22 bp, Artificial Sequence
  chemically synthesized
tcaacgttctctgctgggtttg

SEQ ID NO: 59955 - DNA, 22 bp, Artificial Sequence
  chemically synthesized
aacgttctctgctgggtttgtg

SEQ ID NO: 59956 - DNA, 22 bp, Artificial Sequence
  chemically synthesized
tctgctgggtttgtgtgtcacc

SEQ ID NO: 59957 - DNA, 22 bp, Artificial Sequence
  chemically synthesized
tgctgggtttgtgtgtcacctc

SEQ ID NO: 59958 - DNA, 22 bp, Artificial Sequence
  chemically synthesized
ctgggtttgtgtgtcacctccc

SEQ ID NO: 59959 - DNA, 22 bp, Artificial Sequence
  chemically synthesized
ggtttgtgtgtcacctcccatg

SEQ ID NO: 59960 - DNA, 22 bp, Artificial Sequence
  chemically synthesized
gtgtgtcacctcccatgccctc

SEQ ID NO: 59961 - DNA, 22 bp, Artificial Sequence
  chemically synthesized
tgtgtcacctcccatgccctct

SEQ ID NO: 59962 - DNA, 22 bp, Artificial Sequence
  chemically synthesized
ccatgccctctctggtgtgtgg

SEQ ID NO: 59963 - DNA, 22 bp, Artificial Sequence
  chemically synthesized
tctggtgtgtggtgattctcag

SEQ ID NO: 59964 - DNA, 22 bp, Artificial Sequence
  chemically synthesized
tggtgtgtggtgattctcagat

SEQ ID NO: 59965 - DNA, 22 bp, Artificial Sequence
  chemically synthesized
gtgtgtggtgattctcagatct

SEQ ID NO: 59966 - DNA, 22 bp, Artificial Sequence
  chemically synthesized
tcagatctagagcaatgcttcc

SEQ ID NO: 59967 - DNA, 22 bp, Artificial Sequence
  chemically synthesized
agatctagagcaatgcttcctg

SEQ ID NO: 59968 - DNA, 22 bp, Artificial Sequence
  chemically synthesized
gagcaatgcttcctgccttgtc

SEQ ID NO: 59969 - DNA, 22 bp, Artificial Sequence
  chemically synthesized
cctgccttgtccccccatgcct

SEQ ID NO: 59970 - DNA, 22 bp, Artificial Sequence
  chemically synthesized
ctgccttgtccccccatgcctt

SEQ ID NO: 59971 - DNA, 22 bp, Artificial Sequence
  chemically synthesized
ccttgtccccccatgcctttgc

SEQ ID NO: 59972 - DNA, 22 bp, Artificial Sequence
  chemically synthesized
gtccccccatgcctttgcgtgt

SEQ ID NO: 59973 - DNA, 22 bp, Artificial Sequence
  chemically synthesized
tccccccatgcctttgcgtgtg

SEQ ID NO: 59974 - DNA, 22 bp, Artificial Sequence
  chemically synthesized
tgcgtgtgggaagctaaaattc

SEQ ID NO: 59975 - DNA, 22 bp, Artificial Sequence
  chemically synthesized
gcgtgtgggaagctaaaattca

SEQ ID NO: 59976 - DNA, 22 bp, Artificial Sequence
  chemically synthesized
cgtgtgggaagctaaaattcac

SEQ ID NO: 59977 - DNA, 22 bp, Artificial Sequence
  chemically synthesized
aaattcacatgtgcgatgccct

SEQ ID NO: 59978 - DNA, 22 bp, Artificial Sequence
  chemically synthesized
acatgtgcgatgccctcccatg

SEQ ID NO: 59979 - DNA, 22 bp, Artificial Sequence
  chemically synthesized
ccatgtgccatttttacctggt

SEQ ID NO: 59980 - DNA, 22 bp, Artificial Sequence
  chemically synthesized
ttacctggtcccttctgctcac

SEQ ID NO: 59981 - DNA, 22 bp, Artificial Sequence
  chemically synthesized
tacctggtcccttctgctcact

SEQ ID NO: 59982 - DNA, 22 bp, Artificial Sequence
  chemically synthesized
acctggtcccttctgctcactc

SEQ ID NO: 59983 - DNA, 22 bp, Artificial Sequence
  chemically synthesized
cctggtcccttctgctcactct

SEQ ID NO: 59984 - DNA, 22 bp, Artificial Sequence
  chemically synthesized
gtcccttctgctcactctttat

SEQ ID NO: 59985 - DNA, 22 bp, Artificial Sequence
  chemically synthesized
ctgctcactctttattcatatt

SEQ ID NO: 59986 - DNA, 22 bp, Artificial Sequence
  chemically synthesized
tgctcactctttattcatattt

SEQ ID NO: 59987 - DNA, 22 bp, Artificial Sequence
  chemically synthesized
ctcactctttattcatatttaa

SEQ ID NO: 59988 - DNA, 22 bp, Artificial Sequence
  chemically synthesized
actctttattcatatttaaatg

SEQ ID NO: 59989 - DNA, 22 bp, Artificial Sequence
  chemically synthesized
tttattcatatttaaatgcagg

SEQ ID NO: 59990 - DNA, 22 bp, Artificial Sequence
  chemically synthesized
tattcatatttaaatgcaggtg

SEQ ID NO: 59991 - DNA, 22 bp, Artificial Sequence
  chemically synthesized
attcatatttaaatgcaggtga

SEQ ID NO: 59992 - DNA, 22 bp, Artificial Sequence
  chemically synthesized
ttcatatttaaatgcaggtgag

SEQ ID NO: 59993 - DNA, 22 bp, Artificial Sequence
  chemically synthesized
atatttaaatgcaggtgagttg

SEQ ID NO: 59994 - DNA, 22 bp, Artificial Sequence
  chemically synthesized
aaatgcaggtgagttggaatgt

SEQ ID NO: 59995 - DNA, 22 bp, Artificial Sequence
  chemically synthesized
aatgcaggtgagttggaatgtc

SEQ ID NO: 59996 - DNA, 22 bp, Artificial Sequence
  chemically synthesized
gaatgtcatcttacaggcataa

SEQ ID NO: 59997 - DNA, 22 bp, Artificial Sequence
  chemically synthesized
acaggcataatcctgaatctgc

SEQ ID NO: 59998 - DNA, 22 bp, Artificial Sequence
  chemically synthesized
caggcataatcctgaatctgct

SEQ ID NO: 59999 - DNA, 22 bp, Artificial Sequence
  chemically synthesized
aatctgctctatcgcagacatt

SEQ ID NO: 60000 - DNA, 22 bp, Artificial Sequence
  chemically synthesized
ctctatcgcagacattttaaaa

SEQ ID NO: 60001 - DNA, 22 bp, Artificial Sequence
  chemically synthesized
tatcgcagacattttaaaacta

SEQ ID NO: 60002 - DNA, 22 bp, Artificial Sequence
  chemically synthesized
tcgcagacattttaaaactaaa

SEQ ID NO: 60003 - DNA, 22 bp, Artificial Sequence
  chemically synthesized
taaaactaaattaaatgttagt

SEQ ID NO: 60004 - DNA, 22 bp, Artificial Sequence
  chemically synthesized
aaaactaaattaaatgttagta

SEQ ID NO: 60005 - DNA, 22 bp, Artificial Sequence
  chemically synthesized
aaactaaattaaatgttagtac

SEQ ID NO: 60006 - DNA, 22 bp, Artificial Sequence
  chemically synthesized
aattaaatgttagtactaagta

SEQ ID NO: 60007 - DNA, 22 bp, Artificial Sequence
  chemically synthesized
aatgttagtactaagtagtagc

SEQ ID NO: 60008 - DNA, 22 bp, Artificial Sequence
  chemically synthesized
gtactaagtagtagccaaattc

SEQ ID NO: 60009 - DNA, 22 bp, Artificial Sequence
  chemically synthesized
agtagtagccaaattctctgag

SEQ ID NO: 60010 - DNA, 22 bp, Artificial Sequence
  chemically synthesized
tctgagtctgcttcatgacagg

SEQ ID NO: 60011 - DNA, 22 bp, Artificial Sequence
  chemically synthesized
tgagtctgcttcatgacaggct

SEQ ID NO: 60012 - DNA, 22 bp, Artificial Sequence
  chemically synthesized
agtctgcttcatgacaggctgt

SEQ ID NO: 60013 - DNA, 22 bp, Artificial Sequence
  chemically synthesized
cttcatgacaggctgtaacaca

SEQ ID NO: 60014 - DNA, 22 bp, Artificial Sequence
  chemically synthesized
catgacaggctgtaacacactg

SEQ ID NO: 60015 - DNA, 22 bp, Artificial Sequence
  chemically synthesized
atgacaggctgtaacacactgg

SEQ ID NO: 60016 - DNA, 22 bp, Artificial Sequence
  chemically synthesized
taacacactggtatggaacggt

SEQ ID NO: 60017 - DNA, 22 bp, Artificial Sequence
  chemically synthesized
gtatggaacggtaggtctaatc

SEQ ID NO: 60018 - DNA, 22 bp, Artificial Sequence
  chemically synthesized
atcctgtgactcctttatctat

SEQ ID NO: 60019 - DNA, 22 bp, Artificial Sequence
  chemically synthesized
tgactcctttatctatgatgtt

SEQ ID NO: 60020 - DNA, 22 bp, Artificial Sequence
  chemically synthesized
ctttatctatgatgttttatgt

SEQ ID NO: 60021 - DNA, 22 bp, Artificial Sequence
  chemically synthesized
tatctatgatgttttatgtatt

SEQ ID NO: 60022 - DNA, 22 bp, Artificial Sequence
  chemically synthesized
atctatgatgttttatgtatta

SEQ ID NO: 60023 - DNA, 22 bp, Artificial Sequence
  chemically synthesized
tctatgatgttttatgtattat

SEQ ID NO: 60024 - DNA, 22 bp, Artificial Sequence
  chemically synthesized
tgatgttttatgtattatgaga

SEQ ID NO: 60025 - DNA, 22 bp, Artificial Sequence
  chemically synthesized
tatgtattatgagagctcagca

SEQ ID NO: 60026 - DNA, 22 bp, Artificial Sequence
  chemically synthesized
atgtattatgagagctcagcag

SEQ ID NO: 60027 - DNA, 22 bp, Artificial Sequence
  chemically synthesized
tgtattatgagagctcagcaga

SEQ ID NO: 60028 - DNA, 22 bp, Artificial Sequence
  chemically synthesized
tgagagctcagcagatgttgac

SEQ ID NO: 60029 - DNA, 22 bp, Artificial Sequence
  chemically synthesized
agcagatgttgacagagggaat

SEQ ID NO: 60030 - DNA, 22 bp, Artificial Sequence
  chemically synthesized
acagagggaatgagacaagatg

SEQ ID NO: 60031 - DNA, 22 bp, Artificial Sequence
  chemically synthesized
taggtctaggtttgatagataa

SEQ ID NO: 60032 - DNA, 22 bp, Artificial Sequence
  chemically synthesized
aggtctaggtttgatagataaa

SEQ ID NO: 60033 - DNA, 22 bp, Artificial Sequence
  chemically synthesized
ggtctaggtttgatagataaaa

SEQ ID NO: 60034 - DNA, 22 bp, Artificial Sequence
  chemically synthesized
ggtttgatagataaaaaactgg

SEQ ID NO: 60035 - DNA, 22 bp, Artificial Sequence
  chemically synthesized
gatagataaaaaactgggccaa

SEQ ID NO: 60036 - DNA, 22 bp, Artificial Sequence
  chemically synthesized
atagataaaaaactgggccaaa

SEQ ID NO: 60037 - DNA, 22 bp, Artificial Sequence
  chemically synthesized
ggccaaattttatattttcttt

SEQ ID NO: 60038 - DNA, 22 bp, Artificial Sequence
  chemically synthesized
tatattttctttgaaaagatag

SEQ ID NO: 60039 - DNA, 22 bp, Artificial Sequence
  chemically synthesized
atattttctttgaaaagatagc

SEQ ID NO: 60040 - DNA, 22 bp, Artificial Sequence
  chemically synthesized
tattttctttgaaaagatagct

SEQ ID NO: 60041 - DNA, 22 bp, Artificial Sequence
  chemically synthesized
tctttgaaaagatagctaaatc

SEQ ID NO: 60042 - DNA, 22 bp, Artificial Sequence
  chemically synthesized
ctttgaaaagatagctaaatct

SEQ ID NO: 60043 - DNA, 22 bp, Artificial Sequence
  chemically synthesized
tttgaaaagatagctaaatctc

SEQ ID NO: 60044 - DNA, 22 bp, Artificial Sequence
  chemically synthesized
tgaaaagatagctaaatctcag

SEQ ID NO: 60045 - DNA, 22 bp, Artificial Sequence
  chemically synthesized
gaaaagatagctaaatctcagc

SEQ ID NO: 60046 - DNA, 22 bp, Artificial Sequence
  chemically synthesized
aaaagatagctaaatctcagca

SEQ ID NO: 60047 - DNA, 22 bp, Artificial Sequence
  chemically synthesized
aatctcagcaattattttattt

SEQ ID NO: 60048 - DNA, 22 bp, Artificial Sequence
  chemically synthesized
agcaattattttattttattta

SEQ ID NO: 60049 - DNA, 22 bp, Artificial Sequence
  chemically synthesized
ttttattttatttattaagctt

SEQ ID NO: 60050 - DNA, 22 bp, Artificial Sequence
  chemically synthesized
tattttatttattaagcttttt

SEQ ID NO: 60051 - DNA, 22 bp, Artificial Sequence
  chemically synthesized
attttatttattaagctttttg

SEQ ID NO: 60052 - DNA, 22 bp, Artificial Sequence
  chemically synthesized
ttttatttattaagctttttgt

SEQ ID NO: 60053 - DNA, 22 bp, Artificial Sequence
  chemically synthesized
tatttattaagctttttgtaga

SEQ ID NO: 60054 - DNA, 22 bp, Artificial Sequence
  chemically synthesized
atttattaagctttttgtagag

SEQ ID NO: 60055 - DNA, 22 bp, Artificial Sequence
  chemically synthesized
tttattaagctttttgtagaga

SEQ ID NO: 60056 - DNA, 22 bp, Artificial Sequence
  chemically synthesized
attaagctttttgtagagacag

SEQ ID NO: 60057 - DNA, 22 bp, Artificial Sequence
  chemically synthesized
ttaagctttttgtagagacagg

SEQ ID NO: 60058 - DNA, 22 bp, Artificial Sequence
  chemically synthesized
agctttttgtagagacagggtt

SEQ ID NO: 60059 - DNA, 22 bp, Artificial Sequence
  chemically synthesized
tttgtagagacagggttttgct

SEQ ID NO: 60060 - DNA, 22 bp, Artificial Sequence
  chemically synthesized
ttgtagagacagggttttgcta

SEQ ID NO: 60061 - DNA, 22 bp, Artificial Sequence
  chemically synthesized
tgtagagacagggttttgctat

SEQ ID NO: 60062 - DNA, 22 bp, Artificial Sequence
  chemically synthesized
gtagagacagggttttgctatg

SEQ ID NO: 60063 - DNA, 22 bp, Artificial Sequence
  chemically synthesized
tagagacagggttttgctatgt

SEQ ID NO: 60064 - DNA, 22 bp, Artificial Sequence
  chemically synthesized
tgctatgttgcccaggctggtc

SEQ ID NO: 60065 - DNA, 22 bp, Artificial Sequence
  chemically synthesized
gctatgttgcccaggctggtct

SEQ ID NO: 60066 - DNA, 22 bp, Artificial Sequence
  chemically synthesized
ctatgttgcccaggctggtctt

SEQ ID NO: 60067 - DNA, 22 bp, Artificial Sequence
  chemically synthesized
tgttgcccaggctggtcttgaa

SEQ ID NO: 60068 - DNA, 22 bp, Artificial Sequence
  chemically synthesized
cccaggctggtcttgaactcct

SEQ ID NO: 60069 - DNA, 22 bp, Artificial Sequence
  chemically synthesized
gtcttgaactcctagcttcaag

SEQ ID NO: 60070 - DNA, 22 bp, Artificial Sequence
  chemically synthesized
gaactcctagcttcaagcaatc

SEQ ID NO: 60071 - DNA, 22 bp, Artificial Sequence
  chemically synthesized
aactcctagcttcaagcaatct

SEQ ID NO: 60072 - DNA, 22 bp, Artificial Sequence
  chemically synthesized
ctagcttcaagcaatcttccct

SEQ ID NO: 60073 - DNA, 22 bp, Artificial Sequence
  chemically synthesized
gcttcaagcaatcttccctctg

SEQ ID NO: 60074 - DNA, 22 bp, Artificial Sequence
  chemically synthesized
caagcaatcttccctctgtggc

SEQ ID NO: 60075 - DNA, 22 bp, Artificial Sequence
  chemically synthesized
aagcaatcttccctctgtggcc

SEQ ID NO: 60076 - DNA, 22 bp, Artificial Sequence
  chemically synthesized
ccctctgtggccttccaaattt

SEQ ID NO: 60077 - DNA, 22 bp, Artificial Sequence
  chemically synthesized
cctctgtggccttccaaatttc

SEQ ID NO: 60078 - DNA, 22 bp, Artificial Sequence
  chemically synthesized
tgtggccttccaaatttctgag

SEQ ID NO: 60079 - DNA, 22 bp, Artificial Sequence
  chemically synthesized
tggccttccaaatttctgagat

SEQ ID NO: 60080 - DNA, 22 bp, Artificial Sequence
  chemically synthesized
ccaaatttctgagattataggc

SEQ ID NO: 60081 - DNA, 22 bp, Artificial Sequence
  chemically synthesized
caaatttctgagattataggca

SEQ ID NO: 60082 - DNA, 22 bp, Artificial Sequence
  chemically synthesized
ctgagattataggcataagcaa

SEQ ID NO: 60083 - DNA, 22 bp, Artificial Sequence
  chemically synthesized
tgagattataggcataagcaaa

SEQ ID NO: 60084 - DNA, 22 bp, Artificial Sequence
  chemically synthesized
agattataggcataagcaaatg

SEQ ID NO: 60085 - DNA, 22 bp, Artificial Sequence
  chemically synthesized
taggcataagcaaatgcctctg

SEQ ID NO: 60086 - DNA, 22 bp, Artificial Sequence
  chemically synthesized
tggccttcaagtaattaattta

SEQ ID NO: 60087 - DNA, 22 bp, Artificial Sequence
  chemically synthesized
gccttcaagtaattaatttaaa

SEQ ID NO: 60088 - DNA, 22 bp, Artificial Sequence
  chemically synthesized
caagtaattaatttaaagtctt

SEQ ID NO: 60089 - DNA, 22 bp, Artificial Sequence
  chemically synthesized
aagtaattaatttaaagtcttt

SEQ ID NO: 60090 - DNA, 22 bp, Artificial Sequence
  chemically synthesized
atttaaagtcttttaaaaattt

SEQ ID NO: 60091 - DNA, 22 bp, Artificial Sequence
  chemically synthesized
aaagtcttttaaaaattttctc

SEQ ID NO: 60092 - DNA, 22 bp, Artificial Sequence
  chemically synthesized
aagtcttttaaaaattttctct

SEQ ID NO: 60093 - DNA, 22 bp, Artificial Sequence
  chemically synthesized
ttaaaaattttctctcctcccc

SEQ ID NO: 60094 - DNA, 22 bp, Artificial Sequence
  chemically synthesized
taaaaattttctctcctcccct

SEQ ID NO: 60095 - DNA, 22 bp, Artificial Sequence
  chemically synthesized
aaaaattttctctcctccccta

SEQ ID NO: 60096 - DNA, 22 bp, Artificial Sequence
  chemically synthesized
aaaattttctctcctcccctaa

SEQ ID NO: 60097 - DNA, 22 bp, Artificial Sequence
  chemically synthesized
tctctcctcccctaaaattggg

SEQ ID NO: 60098 - DNA, 22 bp, Artificial Sequence
  chemically synthesized
ctctcctcccctaaaattgggt

SEQ ID NO: 60099 - DNA, 22 bp, Artificial Sequence
  chemically synthesized
tctcctcccctaaaattgggtt

SEQ ID NO: 60100 - DNA, 22 bp, Artificial Sequence
  chemically synthesized
tcctcccctaaaattgggtttt

SEQ ID NO: 60101 - DNA, 22 bp, Artificial Sequence
  chemically synthesized
ctcccctaaaattgggttttag

SEQ ID NO: 60102 - DNA, 22 bp, Artificial Sequence
  chemically synthesized
ccctaaaattgggttttagagt

SEQ ID NO: 60103 - DNA, 22 bp, Artificial Sequence
  chemically synthesized
aaattgggttttagagtaaggt

SEQ ID NO: 60104 - DNA, 22 bp, Artificial Sequence
  chemically synthesized
ggttttagagtaaggttcttgt

SEQ ID NO: 60105 - DNA, 22 bp, Artificial Sequence
  chemically synthesized
tagagtaaggttcttgttcctc

SEQ ID NO: 60106 - DNA, 22 bp, Artificial Sequence
  chemically synthesized
agagtaaggttcttgttcctct

SEQ ID NO: 60107 - DNA, 22 bp, Artificial Sequence
  chemically synthesized
gagtaaggttcttgttcctcta

SEQ ID NO: 60108 - DNA, 22 bp, Artificial Sequence
  chemically synthesized
ttgttcctctagtcgacaagag

SEQ ID NO: 60109 - DNA, 22 bp, Artificial Sequence
  chemically synthesized
gttcctctagtcgacaagagtt

SEQ ID NO: 60110 - DNA, 22 bp, Artificial Sequence
  chemically synthesized
ttcctctagtcgacaagagttt

SEQ ID NO: 60111 - DNA, 22 bp, Artificial Sequence
  chemically synthesized
ctctagtcgacaagagtttctg

SEQ ID NO: 60112 - DNA, 22 bp, Artificial Sequence
  chemically synthesized
tagtcgacaagagtttctgagg

SEQ ID NO: 60113 - DNA, 22 bp, Artificial Sequence
  chemically synthesized
gtcgacaagagtttctgaggaa

SEQ ID NO: 60114 - DNA, 22 bp, Artificial Sequence
  chemically synthesized
ctgaggaatcatagaagaaagc

SEQ ID NO: 60115 - DNA, 22 bp, Artificial Sequence
  chemically synthesized
tgaggaatcatagaagaaagca

SEQ ID NO: 60116 - DNA, 22 bp, Artificial Sequence
  chemically synthesized
aggaatcatagaagaaagcaca

SEQ ID NO: 60117 - DNA, 22 bp, Artificial Sequence
  chemically synthesized
tttgagcatagatagtttcctt

SEQ ID NO: 60118 - DNA, 22 bp, Artificial Sequence
  chemically synthesized
tgagcatagatagtttccttcg

SEQ ID NO: 60119 - DNA, 22 bp, Artificial Sequence
  chemically synthesized
gagcatagatagtttccttcgt

SEQ ID NO: 60120 - DNA, 22 bp, Artificial Sequence
  chemically synthesized
agcatagatagtttccttcgtg

SEQ ID NO: 60121 - DNA, 22 bp, Artificial Sequence
  chemically synthesized
ccttcgtggaaagccaaagtga

SEQ ID NO: 60122 - DNA, 22 bp, Artificial Sequence
  chemically synthesized
cttcgtggaaagccaaagtgaa

SEQ ID NO: 60123 - DNA, 22 bp, Artificial Sequence
  chemically synthesized
cgtggaaagccaaagtgaatac

SEQ ID NO: 60124 - DNA, 22 bp, Artificial Sequence
  chemically synthesized
gtggaaagccaaagtgaatact

SEQ ID NO: 60125 - DNA, 22 bp, Artificial Sequence
  chemically synthesized
attgagcatcttctatgtagac

SEQ ID NO: 60126 - DNA, 22 bp, Artificial Sequence
  chemically synthesized
ttgagcatcttctatgtagaca

SEQ ID NO: 60127 - DNA, 22 bp, Artificial Sequence
  chemically synthesized
agcatcttctatgtagacatag

SEQ ID NO: 60128 - DNA, 22 bp, Artificial Sequence
  chemically synthesized
ctatgtagacatagacttgtga

SEQ ID NO: 60129 - DNA, 22 bp, Artificial Sequence
  chemically synthesized
tatgtagacatagacttgtgaa

SEQ ID NO: 60130 - DNA, 22 bp, Artificial Sequence
  chemically synthesized
tgtagacatagacttgtgaagt

SEQ ID NO: 60131 - DNA, 22 bp, Artificial Sequence
  chemically synthesized
gtgaagtcatatcattaaccct

SEQ ID NO: 60132 - DNA, 22 bp, Artificial Sequence
  chemically synthesized
tgaagtcatatcattaaccctg

SEQ ID NO: 60133 - DNA, 22 bp, Artificial Sequence
  chemically synthesized
accctgtcattttacagatgag

SEQ ID NO: 60134 - DNA, 22 bp, Artificial Sequence
  chemically synthesized
tcattttacagatgagaaaggt

SEQ ID NO: 60135 - DNA, 22 bp, Artificial Sequence
  chemically synthesized
tacagatgagaaaggttgaggc

SEQ ID NO: 60136 - DNA, 22 bp, Artificial Sequence
  chemically synthesized
acagatgagaaaggttgaggct

SEQ ID NO: 60137 - DNA, 22 bp, Artificial Sequence
  chemically synthesized
cagatgagaaaggttgaggcta

SEQ ID NO: 60138 - DNA, 22 bp, Artificial Sequence
  chemically synthesized
aggctaagaggggagtgagtgc

SEQ ID NO: 60139 - DNA, 22 bp, Artificial Sequence
  chemically synthesized
agaggggagtgagtgccagagt

SEQ ID NO: 60140 - DNA, 22 bp, Artificial Sequence
  chemically synthesized
cttgctaggcagtggtagactt

SEQ ID NO: 60141 - DNA, 22 bp, Artificial Sequence
  chemically synthesized
gctaggcagtggtagacttggc

SEQ ID NO: 60142 - DNA, 22 bp, Artificial Sequence
  chemically synthesized
ctaggcagtggtagacttggcc

SEQ ID NO: 60143 - DNA, 22 bp, Artificial Sequence
  chemically synthesized
ggcagtggtagacttggcccag

SEQ ID NO: 60144 - DNA, 22 bp, Artificial Sequence
  chemically synthesized
ggcccagagcctggggcttccc

SEQ ID NO: 60145 - DNA, 22 bp, Artificial Sequence
  chemically synthesized
gcccagagcctggggcttccca

SEQ ID NO: 60146 - DNA, 22 bp, Artificial Sequence
  chemically synthesized
gggcttcccactttcattcctg

SEQ ID NO: 60147 - DNA, 22 bp, Artificial Sequence
  chemically synthesized
cccactttcattcctggctgac

SEQ ID NO: 60148 - DNA, 22 bp, Artificial Sequence
  chemically synthesized
ccactttcattcctggctgact

SEQ ID NO: 60149 - DNA, 22 bp, Artificial Sequence
  chemically synthesized
tcattcctggctgactgtacca

SEQ ID NO: 60150 - DNA, 22 bp, Artificial Sequence
  chemically synthesized
cattcctggctgactgtaccaa

SEQ ID NO: 60151 - DNA, 22 bp, Artificial Sequence
  chemically synthesized
attcctggctgactgtaccaat

SEQ ID NO: 60152 - DNA, 22 bp, Artificial Sequence
  chemically synthesized
ctggctgactgtaccaatcgca

SEQ ID NO: 60153 - DNA, 22 bp, Artificial Sequence
  chemically synthesized
gctgactgtaccaatcgcacat

SEQ ID NO: 60154 - DNA, 22 bp, Artificial Sequence
  chemically synthesized
actgtaccaatcgcacatggcc

SEQ ID NO: 60155 - DNA, 22 bp, Artificial Sequence
  chemically synthesized
taccaatcgcacatggcctctc

SEQ ID NO: 60156 - DNA, 22 bp, Artificial Sequence
  chemically synthesized
tccatggccagcaggagccaga

SEQ ID NO: 60157 - DNA, 22 bp, Artificial Sequence
  chemically synthesized
catggccagcaggagccagagg

SEQ ID NO: 60158 - DNA, 22 bp, Artificial Sequence
  chemically synthesized
tgcagaggaacttgcacccacg

SEQ ID NO: 60159 - DNA, 22 bp, Artificial Sequence
  chemically synthesized
gcagaggaacttgcacccacgc

SEQ ID NO: 60160 - DNA, 22 bp, Artificial Sequence
  chemically synthesized
cagaggaacttgcacccacgct

SEQ ID NO: 60161 - DNA, 22 bp, Artificial Sequence
  chemically synthesized
gcacccacgcttttatcggtga

SEQ ID NO: 60162 - DNA, 22 bp, Artificial Sequence
  chemically synthesized
cacccacgcttttatcggtgat

SEQ ID NO: 60163 - DNA, 22 bp, Artificial Sequence
  chemically synthesized
ttatcggtgatggctggaatgc

SEQ ID NO: 60164 - DNA, 22 bp, Artificial Sequence
  chemically synthesized
tatcggtgatggctggaatgct

SEQ ID NO: 60165 - DNA, 22 bp, Artificial Sequence
  chemically synthesized
atcggtgatggctggaatgctt

SEQ ID NO: 60166 - DNA, 22 bp, Artificial Sequence
  chemically synthesized
tcggtgatggctggaatgcttt

SEQ ID NO: 60167 - DNA, 22 bp, Artificial Sequence
  chemically synthesized
gaatgcttttcttaactggagc

SEQ ID NO: 60168 - DNA, 22 bp, Artificial Sequence
  chemically synthesized
ttcttaactggagctttgttga

SEQ ID NO: 60169 - DNA, 22 bp, Artificial Sequence
  chemically synthesized
tcttaactggagctttgttgaa

SEQ ID NO: 60170 - DNA, 22 bp, Artificial Sequence
  chemically synthesized
cttaactggagctttgttgaag

SEQ ID NO: 60171 - DNA, 22 bp, Artificial Sequence
  chemically synthesized
ttaactggagctttgttgaaga

SEQ ID NO: 60172 - DNA, 22 bp, Artificial Sequence
  chemically synthesized
aactggagctttgttgaagagc

SEQ ID NO: 60173 - DNA, 22 bp, Artificial Sequence
  chemically synthesized
actggagctttgttgaagagcc

SEQ ID NO: 60174 - DNA, 22 bp, Artificial Sequence
  chemically synthesized
gagctttgttgaagagcctggt

SEQ ID NO: 60175 - DNA, 22 bp, Artificial Sequence
  chemically synthesized
tgttgaagagcctggtgctttt

SEQ ID NO: 60176 - DNA, 22 bp, Artificial Sequence
  chemically synthesized
gttgaagagcctggtgcttttg

SEQ ID NO: 60177 - DNA, 22 bp, Artificial Sequence
  chemically synthesized
ttgaagagcctggtgcttttgt

SEQ ID NO: 60178 - DNA, 22 bp, Artificial Sequence
  chemically synthesized
aagagcctggtgcttttgtggc

SEQ ID NO: 60179 - DNA, 22 bp, Artificial Sequence
  chemically synthesized
gtgcttttgtggcagtgctaac

SEQ ID NO: 60180 - DNA, 22 bp, Artificial Sequence
  chemically synthesized
ttgtggcagtgctaacctgggg

SEQ ID NO: 60181 - DNA, 22 bp, Artificial Sequence
  chemically synthesized
tgtggcagtgctaacctgggga

SEQ ID NO: 60182 - DNA, 22 bp, Artificial Sequence
  chemically synthesized
gtggcagtgctaacctggggag

SEQ ID NO: 60183 - DNA, 22 bp, Artificial Sequence
  chemically synthesized
tggcagtgctaacctggggagc

SEQ ID NO: 60184 - DNA, 22 bp, Artificial Sequence
  chemically synthesized
acctggggagcccatggtaaaa

SEQ ID NO: 60185 - DNA, 22 bp, Artificial Sequence
  chemically synthesized
gggagcccatggtaaaacccaa

SEQ ID NO: 60186 - DNA, 22 bp, Artificial Sequence
  chemically synthesized
tgctgttgcagagaatggtcct

SEQ ID NO: 60187 - DNA, 22 bp, Artificial Sequence
  chemically synthesized
ttgcagagaatggtcctttgcc

SEQ ID NO: 60188 - DNA, 22 bp, Artificial Sequence
  chemically synthesized
cagagaatggtcctttgccctt

SEQ ID NO: 60189 - DNA, 22 bp, Artificial Sequence
  chemically synthesized
tgccctttcttcttgccttgtt

SEQ ID NO: 60190 - DNA, 22 bp, Artificial Sequence
  chemically synthesized
gccctttcttcttgccttgttc

SEQ ID NO: 60191 - DNA, 22 bp, Artificial Sequence
  chemically synthesized
ccctttcttcttgccttgttcc

SEQ ID NO: 60192 - DNA, 22 bp, Artificial Sequence
  chemically synthesized
tcttcttgccttgttcctttcc

SEQ ID NO: 60193 - DNA, 22 bp, Artificial Sequence
  chemically synthesized
cttcttgccttgttcctttccc

SEQ ID NO: 60194 - DNA, 22 bp, Artificial Sequence
  chemically synthesized
ttcttgccttgttcctttccct

SEQ ID NO: 60195 - DNA, 22 bp, Artificial Sequence
  chemically synthesized
cttgccttgttcctttccctgt

SEQ ID NO: 60196 - DNA, 22 bp, Artificial Sequence
  chemically synthesized
ttgccttgttcctttccctgtt

SEQ ID NO: 60197 - DNA, 22 bp, Artificial Sequence
  chemically synthesized
gccttgttcctttccctgtttt

SEQ ID NO: 60198 - DNA, 22 bp, Artificial Sequence
  chemically synthesized
ccttgttcctttccctgttttc

SEQ ID NO: 60199 - DNA, 22 bp, Artificial Sequence
  chemically synthesized
gttcctttccctgttttctctg

SEQ ID NO: 60200 - DNA, 22 bp, Artificial Sequence
  chemically synthesized
ttcctttccctgttttctctgc

SEQ ID NO: 60201 - DNA, 22 bp, Artificial Sequence
  chemically synthesized
ctttccctgttttctctgccct

SEQ ID NO: 60202 - DNA, 22 bp, Artificial Sequence
  chemically synthesized
tccctgttttctctgccctttt

SEQ ID NO: 60203 - DNA, 22 bp, Artificial Sequence
  chemically synthesized
ccctgttttctctgcccttttt

SEQ ID NO: 60204 - DNA, 22 bp, Artificial Sequence
  chemically synthesized
cctgttttctctgccctttttc

SEQ ID NO: 60205 - DNA, 22 bp, Artificial Sequence
  chemically synthesized
ttttctctgccctttttcgggg

SEQ ID NO: 60206 - DNA, 22 bp, Artificial Sequence
  chemically synthesized
tctctgccctttttcggggctg

SEQ ID NO: 60207 - DNA, 22 bp, Artificial Sequence
  chemically synthesized
ctctgccctttttcggggctgg

SEQ ID NO: 60208 - DNA, 22 bp, Artificial Sequence
  chemically synthesized
tctgccctttttcggggctggt

SEQ ID NO: 60209 - DNA, 22 bp, Artificial Sequence
  chemically synthesized
tgccctttttcggggctggtct

SEQ ID NO: 60210 - DNA, 22 bp, Artificial Sequence
  chemically synthesized
ccctttttcggggctggtcttc

SEQ ID NO: 60211 - DNA, 22 bp, Artificial Sequence
  chemically synthesized
tttcggggctggtcttcctacc

SEQ ID NO: 60212 - DNA, 22 bp, Artificial Sequence
  chemically synthesized
ttcggggctggtcttcctacca

SEQ ID NO: 60213 - DNA, 22 bp, Artificial Sequence
  chemically synthesized
tcggggctggtcttcctaccac

SEQ ID NO: 60214 - DNA, 22 bp, Artificial Sequence
  chemically synthesized
cggggctggtcttcctaccacc

SEQ ID NO: 60215 - DNA, 22 bp, Artificial Sequence
  chemically synthesized
ggggctggtcttcctaccacct

SEQ ID NO: 60216 - DNA, 22 bp, Artificial Sequence
  chemically synthesized
gtcttcctaccacctttcctgc

SEQ ID NO: 60217 - DNA, 22 bp, Artificial Sequence
  chemically synthesized
cctaccacctttcctgctaggg

SEQ ID NO: 60218 - DNA, 22 bp, Artificial Sequence
  chemically synthesized
ctaccacctttcctgctagggc

SEQ ID NO: 60219 - DNA, 22 bp, Artificial Sequence
  chemically synthesized
ccacctttcctgctagggctcc

SEQ ID NO: 60220 - DNA, 22 bp, Artificial Sequence
  chemically synthesized
tcctgctagggctcccaaagtg

SEQ ID NO: 60221 - DNA, 22 bp, Artificial Sequence
  chemically synthesized
cctgctagggctcccaaagtgt

SEQ ID NO: 60222 - DNA, 22 bp, Artificial Sequence
  chemically synthesized
ctgctagggctcccaaagtgtg

SEQ ID NO: 60223 - DNA, 22 bp, Artificial Sequence
  chemically synthesized
ctagggctcccaaagtgtggcc

SEQ ID NO: 60224 - DNA, 22 bp, Artificial Sequence
  chemically synthesized
gggctcccaaagtgtggccctt

SEQ ID NO: 60225 - DNA, 22 bp, Artificial Sequence
  chemically synthesized
ccaaagtgtggcccttctgggg

SEQ ID NO: 60226 - DNA, 22 bp, Artificial Sequence
  chemically synthesized
ctggggtttacatggtgtgccc

SEQ ID NO: 60227 - DNA, 22 bp, Artificial Sequence
  chemically synthesized
tggggtttacatggtgtgccca

SEQ ID NO: 60228 - DNA, 22 bp, Artificial Sequence
  chemically synthesized
gggtttacatggtgtgcccagg

SEQ ID NO: 60229 - DNA, 22 bp, Artificial Sequence
  chemically synthesized
acatggtgtgcccagggaatag

SEQ ID NO: 60230 - DNA, 22 bp, Artificial Sequence
  chemically synthesized
catggtgtgcccagggaatagc

SEQ ID NO: 60231 - DNA, 22 bp, Artificial Sequence
  chemically synthesized
ggcttttttattcagataactg

SEQ ID NO: 60232 - DNA, 22 bp, Artificial Sequence
  chemically synthesized
gcttttttattcagataactgg

SEQ ID NO: 60233 - DNA, 22 bp, Artificial Sequence
  chemically synthesized
ttttattcagataactggagat

SEQ ID NO: 60234 - DNA, 22 bp, Artificial Sequence
  chemically synthesized
tttattcagataactggagata

SEQ ID NO: 60235 - DNA, 22 bp, Artificial Sequence
  chemically synthesized
ttattcagataactggagataa

SEQ ID NO: 60236 - DNA, 22 bp, Artificial Sequence
  chemically synthesized
tattcagataactggagataat

SEQ ID NO: 60237 - DNA, 22 bp, Artificial Sequence
  chemically synthesized
attcagataactggagataatg

SEQ ID NO: 60238 - DNA, 22 bp, Artificial Sequence
  chemically synthesized
ttcagataactggagataatgg

SEQ ID NO: 60239 - DNA, 22 bp, Artificial Sequence
  chemically synthesized
agataactggagataatggagt

SEQ ID NO: 60240 - DNA, 22 bp, Artificial Sequence
  chemically synthesized
gagataatggagtagatggagt

SEQ ID NO: 60241 - DNA, 22 bp, Artificial Sequence
  chemically synthesized
gggtggtgaaggaacgtgtacc

SEQ ID NO: 60242 - DNA, 22 bp, Artificial Sequence
  chemically synthesized
tcaggggcagatggccctccag

SEQ ID NO: 60243 - DNA, 22 bp, Artificial Sequence
  chemically synthesized
aggggcagatggccctccagaa

SEQ ID NO: 60244 - DNA, 22 bp, Artificial Sequence
  chemically synthesized
cagaattggccagcccaacctc

SEQ ID NO: 60245 - DNA, 22 bp, Artificial Sequence
  chemically synthesized
gccagcccaacctcttcctcac

SEQ ID NO: 60246 - DNA, 22 bp, Artificial Sequence
  chemically synthesized
ttcctcaccaccctagttctat

SEQ ID NO: 60247 - DNA, 22 bp, Artificial Sequence
  chemically synthesized
cctcaccaccctagttctattt

SEQ ID NO: 60248 - DNA, 22 bp, Artificial Sequence
  chemically synthesized
ctcaccaccctagttctatttt

SEQ ID NO: 60249 - DNA, 22 bp, Artificial Sequence
  chemically synthesized
accaccctagttctatttttaa

SEQ ID NO: 60250 - DNA, 22 bp, Artificial Sequence
  chemically synthesized
gttctatttttaaagacacctc

SEQ ID NO: 60251 - DNA, 22 bp, Artificial Sequence
  chemically synthesized
tatttttaaagacacctctcaa

SEQ ID NO: 60252 - DNA, 22 bp, Artificial Sequence
  chemically synthesized
tttttaaagacacctctcaatc

SEQ ID NO: 60253 - DNA, 22 bp, Artificial Sequence
  chemically synthesized
ttaaagacacctctcaatcgca

SEQ ID NO: 60254 - DNA, 22 bp, Artificial Sequence
  chemically synthesized
taaagacacctctcaatcgcag

SEQ ID NO: 60255 - DNA, 22 bp, Artificial Sequence
  chemically synthesized
aaagacacctctcaatcgcagg

SEQ ID NO: 60256 - DNA, 22 bp, Artificial Sequence
  chemically synthesized
aagacacctctcaatcgcagga

SEQ ID NO: 60257 - DNA, 22 bp, Artificial Sequence
  chemically synthesized
tcaatcgcaggaaatccttcct

SEQ ID NO: 60258 - DNA, 22 bp, Artificial Sequence
  chemically synthesized
aatcgcaggaaatccttccttt

SEQ ID NO: 60259 - DNA, 22 bp, Artificial Sequence
  chemically synthesized
ccttttgtctaccttcgatccc

SEQ ID NO: 60260 - DNA, 22 bp, Artificial Sequence
  chemically synthesized
cttttgtctaccttcgatccct

SEQ ID NO: 60261 - DNA, 22 bp, Artificial Sequence
  chemically synthesized
ttgtctaccttcgatcccttat

SEQ ID NO: 60262 - DNA, 22 bp, Artificial Sequence
  chemically synthesized
tgtctaccttcgatcccttatg

SEQ ID NO: 60263 - DNA, 22 bp, Artificial Sequence
  chemically synthesized
gtctaccttcgatcccttatgc

SEQ ID NO: 60264 - DNA, 22 bp, Artificial Sequence
  chemically synthesized
tctaccttcgatcccttatgct

SEQ ID NO: 60265 - DNA, 22 bp, Artificial Sequence
  chemically synthesized
ccttcgatcccttatgcttcat

SEQ ID NO: 60266 - DNA, 22 bp, Artificial Sequence
  chemically synthesized
cgatcccttatgcttcatttta

SEQ ID NO: 60267 - DNA, 22 bp, Artificial Sequence
  chemically synthesized
gatcccttatgcttcattttaa

SEQ ID NO: 60268 - DNA, 22 bp, Artificial Sequence
  chemically synthesized
atgcttcattttaaacccattt

SEQ ID NO: 60269 - DNA, 22 bp, Artificial Sequence
  chemically synthesized
tgcttcattttaaacccatttc

SEQ ID NO: 60270 - DNA, 22 bp, Artificial Sequence
  chemically synthesized
cattttaaacccatttcctctt

SEQ ID NO: 60271 - DNA, 22 bp, Artificial Sequence
  chemically synthesized
attttaaacccatttcctcttc

SEQ ID NO: 60272 - DNA, 22 bp, Artificial Sequence
  chemically synthesized
taaacccatttcctcttcattc

SEQ ID NO: 60273 - DNA, 22 bp, Artificial Sequence
  chemically synthesized
aaacccatttcctcttcattcc

SEQ ID NO: 60274 - DNA, 22 bp, Artificial Sequence
  chemically synthesized
aacccatttcctcttcattcca

SEQ ID NO: 60275 - DNA, 22 bp, Artificial Sequence
  chemically synthesized
cctcttcattccagagacgaca

SEQ ID NO: 60276 - DNA, 22 bp, Artificial Sequence
  chemically synthesized
ctcttcattccagagacgacaa

SEQ ID NO: 60277 - DNA, 22 bp, Artificial Sequence
  chemically synthesized
ttcattccagagacgacaaagt

SEQ ID NO: 60278 - DNA, 22 bp, Artificial Sequence
  chemically synthesized
cattccagagacgacaaagtat

SEQ ID NO: 60279 - DNA, 22 bp, Artificial Sequence
  chemically synthesized
attccagagacgacaaagtatc

SEQ ID NO: 60280 - DNA, 22 bp, Artificial Sequence
  chemically synthesized
cagagacgacaaagtatctcat

SEQ ID NO: 60281 - DNA, 22 bp, Artificial Sequence
  chemically synthesized
atcaccagctttgggctgaaat

SEQ ID NO: 60282 - DNA, 22 bp, Artificial Sequence
  chemically synthesized
tgggctgaaatgcttcatattt

SEQ ID NO: 60283 - DNA, 22 bp, Artificial Sequence
  chemically synthesized
gggctgaaatgcttcatatttt

SEQ ID NO: 60284 - DNA, 22 bp, Artificial Sequence
  chemically synthesized
ggctgaaatgcttcatatttta

SEQ ID NO: 60285 - DNA, 22 bp, Artificial Sequence
  chemically synthesized
aaatgcttcatattttacattc

SEQ ID NO: 60286 - DNA, 22 bp, Artificial Sequence
  chemically synthesized
catattttacattcttcattcc

SEQ ID NO: 60287 - DNA, 22 bp, Artificial Sequence
  chemically synthesized
atattttacattcttcattcca

SEQ ID NO: 60288 - DNA, 22 bp, Artificial Sequence
  chemically synthesized
tacattcttcattccattctcc

SEQ ID NO: 60289 - DNA, 22 bp, Artificial Sequence
  chemically synthesized
acattcttcattccattctccg

SEQ ID NO: 60290 - DNA, 22 bp, Artificial Sequence
  chemically synthesized
cattcttcattccattctccgc

SEQ ID NO: 60291 - DNA, 22 bp, Artificial Sequence
  chemically synthesized
ttcattccattctccgccactt

SEQ ID NO: 60292 - DNA, 22 bp, Artificial Sequence
  chemically synthesized
cattccattctccgccacttct

SEQ ID NO: 60293 - DNA, 22 bp, Artificial Sequence
  chemically synthesized
attccattctccgccacttctt

SEQ ID NO: 60294 - DNA, 22 bp, Artificial Sequence
  chemically synthesized
cattctccgccacttcttcttc

SEQ ID NO: 60295 - DNA, 22 bp, Artificial Sequence
  chemically synthesized
tccgccacttcttcttcctaaa

SEQ ID NO: 60296 - DNA, 22 bp, Artificial Sequence
  chemically synthesized
cgccacttcttcttcctaaata

SEQ ID NO: 60297 - DNA, 22 bp, Artificial Sequence
  chemically synthesized
cttcttcctaaataatctcttt

SEQ ID NO: 60298 - DNA, 22 bp, Artificial Sequence
  chemically synthesized
ttcttcctaaataatctctttc

SEQ ID NO: 60299 - DNA, 22 bp, Artificial Sequence
  chemically synthesized
cttcctaaataatctctttcct

SEQ ID NO: 60300 - DNA, 22 bp, Artificial Sequence
  chemically synthesized
ttcctaaataatctctttcctg

SEQ ID NO: 60301 - DNA, 22 bp, Artificial Sequence
  chemically synthesized
cctaaataatctctttcctgaa

SEQ ID NO: 60302 - DNA, 22 bp, Artificial Sequence
  chemically synthesized
ctaaataatctctttcctgaac

SEQ ID NO: 60303 - DNA, 22 bp, Artificial Sequence
  chemically synthesized
aataatctctttcctgaacctg

SEQ ID NO: 60304 - DNA, 22 bp, Artificial Sequence
  chemically synthesized
tttcctgaacctgaactcatgg

SEQ ID NO: 60305 - DNA, 22 bp, Artificial Sequence
  chemically synthesized
tcctgaacctgaactcatggat

SEQ ID NO: 60306 - DNA, 22 bp, Artificial Sequence
  chemically synthesized
cctgaacctgaactcatggatc

SEQ ID NO: 60307 - DNA, 22 bp, Artificial Sequence
  chemically synthesized
ctgaacctgaactcatggatct

SEQ ID NO: 60308 - DNA, 22 bp, Artificial Sequence
  chemically synthesized
aacctgaactcatggatctatt

SEQ ID NO: 60309 - DNA, 22 bp, Artificial Sequence
  chemically synthesized
aactcatggatctattatcttg

SEQ ID NO: 60310 - DNA, 22 bp, Artificial Sequence
  chemically synthesized
atggatctattatcttgtaacc

SEQ ID NO: 60311 - DNA, 22 bp, Artificial Sequence
  chemically synthesized
ttatcttgtaacccatttattg

SEQ ID NO: 60312 - DNA, 22 bp, Artificial Sequence
  chemically synthesized
tcttgtaacccatttattgttt

SEQ ID NO: 60313 - DNA, 22 bp, Artificial Sequence
  chemically synthesized
gtaacccatttattgtttctat

SEQ ID NO: 60314 - DNA, 22 bp, Artificial Sequence
  chemically synthesized
taacccatttattgtttctatg

SEQ ID NO: 60315 - DNA, 22 bp, Artificial Sequence
  chemically synthesized
attgtttctatgcctctcttta

SEQ ID NO: 60316 - DNA, 22 bp, Artificial Sequence
  chemically synthesized
ttgtttctatgcctctctttag

SEQ ID NO: 60317 - DNA, 22 bp, Artificial Sequence
  chemically synthesized
tttctatgcctctctttagaat

SEQ ID NO: 60318 - DNA, 22 bp, Artificial Sequence
  chemically synthesized
ctatgcctctctttagaatctg

SEQ ID NO: 60319 - DNA, 22 bp, Artificial Sequence
  chemically synthesized
tatgcctctctttagaatctgc

SEQ ID NO: 60320 - DNA, 22 bp, Artificial Sequence
  chemically synthesized
tgcctctctttagaatctgctg

SEQ ID NO: 60321 - DNA, 22 bp, Artificial Sequence
  chemically synthesized
tctttagaatctgctggttttc

SEQ ID NO: 60322 - DNA, 22 bp, Artificial Sequence
  chemically synthesized
tttagaatctgctggttttcca

SEQ ID NO: 60323 - DNA, 22 bp, Artificial Sequence
  chemically synthesized
tagaatctgctggttttccagc

SEQ ID NO: 60324 - DNA, 22 bp, Artificial Sequence
  chemically synthesized
agaatctgctggttttccagct

SEQ ID NO: 60325 - DNA, 22 bp, Artificial Sequence
  chemically synthesized
gaatctgctggttttccagctc

SEQ ID NO: 60326 - DNA, 22 bp, Artificial Sequence
  chemically synthesized
ctggttttccagctcttttact

SEQ ID NO: 60327 - DNA, 22 bp, Artificial Sequence
  chemically synthesized
gttttccagctcttttactcaa

SEQ ID NO: 60328 - DNA, 22 bp, Artificial Sequence
  chemically synthesized
tccagctcttttactcaaacat

SEQ ID NO: 60329 - DNA, 22 bp, Artificial Sequence
  chemically synthesized
ccagctcttttactcaaacatt

SEQ ID NO: 60330 - DNA, 22 bp, Artificial Sequence
  chemically synthesized
cagctcttttactcaaacatta

SEQ ID NO: 60331 - DNA, 22 bp, Artificial Sequence
  chemically synthesized
ttttactcaaacattagtctga

SEQ ID NO: 60332 - DNA, 22 bp, Artificial Sequence
  chemically synthesized
ttactcaaacattagtctgata

SEQ ID NO: 60333 - DNA, 22 bp, Artificial Sequence
  chemically synthesized
tactcaaacattagtctgataa

SEQ ID NO: 60334 - DNA, 22 bp, Artificial Sequence
  chemically synthesized
actcaaacattagtctgataac

SEQ ID NO: 60335 - DNA, 22 bp, Artificial Sequence
  chemically synthesized
ctcaaacattagtctgataact

SEQ ID NO: 60336 - DNA, 22 bp, Artificial Sequence
  chemically synthesized
aaacattagtctgataactaca

SEQ ID NO: 60337 - DNA, 22 bp, Artificial Sequence
  chemically synthesized
gtctgataactacagagtccaa

SEQ ID NO: 60338 - DNA, 22 bp, Artificial Sequence
  chemically synthesized
ataactacagagtccaatggca

SEQ ID NO: 60339 - DNA, 22 bp, Artificial Sequence
  chemically synthesized
cagagtccaatggcaagatatc

SEQ ID NO: 60340 - DNA, 22 bp, Artificial Sequence
  chemically synthesized
agtgttttccacattctttagt

SEQ ID NO: 60341 - DNA, 22 bp, Artificial Sequence
  chemically synthesized
gtgttttccacattctttagtc

SEQ ID NO: 60342 - DNA, 22 bp, Artificial Sequence
  chemically synthesized
tccacattctttagtcttatgt

SEQ ID NO: 60343 - DNA, 22 bp, Artificial Sequence
  chemically synthesized
ccacattctttagtcttatgtc

SEQ ID NO: 60344 - DNA, 22 bp, Artificial Sequence
  chemically synthesized
cacattctttagtcttatgtct

SEQ ID NO: 60345 - DNA, 22 bp, Artificial Sequence
  chemically synthesized
tttagtcttatgtctgcactct

SEQ ID NO: 60346 - DNA, 22 bp, Artificial Sequence
  chemically synthesized
tagtcttatgtctgcactctta

SEQ ID NO: 60347 - DNA, 22 bp, Artificial Sequence
  chemically synthesized
agtcttatgtctgcactcttat

SEQ ID NO: 60348 - DNA, 22 bp, Artificial Sequence
  chemically synthesized
gtcttatgtctgcactcttatg

SEQ ID NO: 60349 - DNA, 22 bp, Artificial Sequence
  chemically synthesized
atgtctgcactcttatgtcctg

SEQ ID NO: 60350 - DNA, 22 bp, Artificial Sequence
  chemically synthesized
tgtctgcactcttatgtcctgc

SEQ ID NO: 60351 - DNA, 22 bp, Artificial Sequence
  chemically synthesized
cactcttatgtcctgcttgctt

SEQ ID NO: 60352 - DNA, 22 bp, Artificial Sequence
  chemically synthesized
ttatgtcctgcttgctttttta

SEQ ID NO: 60353 - DNA, 22 bp, Artificial Sequence
  chemically synthesized
atgtcctgcttgcttttttaaa

SEQ ID NO: 60354 - DNA, 22 bp, Artificial Sequence
  chemically synthesized
tgtcctgcttgcttttttaaaa

SEQ ID NO: 60355 - DNA, 22 bp, Artificial Sequence
  chemically synthesized
cttgcttttttaaaaaccagtg

SEQ ID NO: 60356 - DNA, 22 bp, Artificial Sequence
  chemically synthesized
gcttttttaaaaaccagtgctt

SEQ ID NO: 60357 - DNA, 22 bp, Artificial Sequence
  chemically synthesized
cttttttaaaaaccagtgcttc

SEQ ID NO: 60358 - DNA, 22 bp, Artificial Sequence
  chemically synthesized
ttttaaaaaccagtgcttcatt

SEQ ID NO: 60359 - DNA, 22 bp, Artificial Sequence
  chemically synthesized
tttaaaaaccagtgcttcattg

SEQ ID NO: 60360 - DNA, 22 bp, Artificial Sequence
  chemically synthesized
ttaaaaaccagtgcttcattga

SEQ ID NO: 60361 - DNA, 22 bp, Artificial Sequence
  chemically synthesized
taaaaaccagtgcttcattgat

SEQ ID NO: 60362 - DNA, 22 bp, Artificial Sequence
  chemically synthesized
aaaaaccagtgcttcattgatg

SEQ ID NO: 60363 - DNA, 22 bp, Artificial Sequence
  chemically synthesized
aaaaccagtgcttcattgatga

SEQ ID NO: 60364 - DNA, 22 bp, Artificial Sequence
  chemically synthesized
cattgatgactcatgctcagct

SEQ ID NO: 60365 - DNA, 22 bp, Artificial Sequence
  chemically synthesized
attgatgactcatgctcagctt

SEQ ID NO: 60366 - DNA, 22 bp, Artificial Sequence
  chemically synthesized
atgactcatgctcagcttggtg

SEQ ID NO: 60367 - DNA, 22 bp, Artificial Sequence
  chemically synthesized
atgctcagcttggtgtccacta

SEQ ID NO: 60368 - DNA, 22 bp, Artificial Sequence
  chemically synthesized
agcttggtgtccactaggaatg

SEQ ID NO: 60369 - DNA, 22 bp, Artificial Sequence
  chemically synthesized
ggtgtccactaggaatgctaga

SEQ ID NO: 60370 - DNA, 22 bp, Artificial Sequence
  chemically synthesized
gtgtccactaggaatgctagat

SEQ ID NO: 60371 - DNA, 22 bp, Artificial Sequence
  chemically synthesized
ggaatgctagatctttgtcagc

SEQ ID NO: 60372 - DNA, 22 bp, Artificial Sequence
  chemically synthesized
gatctttgtcagccatctttga

SEQ ID NO: 60373 - DNA, 22 bp, Artificial Sequence
  chemically synthesized
tgtcagccatctttgagggcag

SEQ ID NO: 60374 - DNA, 22 bp, Artificial Sequence
  chemically synthesized
gtcagccatctttgagggcagt

SEQ ID NO: 60375 - DNA, 22 bp, Artificial Sequence
  chemically synthesized
tcagccatctttgagggcagtt

SEQ ID NO: 60376 - DNA, 22 bp, Artificial Sequence
  chemically synthesized
tgagggcagttaaactttcact

SEQ ID NO: 60377 - DNA, 22 bp, Artificial Sequence
  chemically synthesized
gagggcagttaaactttcactc

SEQ ID NO: 60378 - DNA, 22 bp, Artificial Sequence
  chemically synthesized
agggcagttaaactttcactcc

SEQ ID NO: 60379 - DNA, 22 bp, Artificial Sequence
  chemically synthesized
aactttcactcccagttgtcct

SEQ ID NO: 60380 - DNA, 22 bp, Artificial Sequence
  chemically synthesized
tcactcccagttgtcctgatgc

SEQ ID NO: 60381 - DNA, 22 bp, Artificial Sequence
  chemically synthesized
cactcccagttgtcctgatgcc

SEQ ID NO: 60382 - DNA, 22 bp, Artificial Sequence
  chemically synthesized
actcccagttgtcctgatgcca

SEQ ID NO: 60383 - DNA, 22 bp, Artificial Sequence
  chemically synthesized
ccagttgtcctgatgccacatt

SEQ ID NO: 60384 - DNA, 22 bp, Artificial Sequence
  chemically synthesized
tcctgatgccacatttctccca

SEQ ID NO: 60385 - DNA, 22 bp, Artificial Sequence
  chemically synthesized
atgccacatttctcccatccca

SEQ ID NO: 60386 - DNA, 22 bp, Artificial Sequence
  chemically synthesized
ctcccatcccaggtgcccctct

SEQ ID NO: 60387 - DNA, 22 bp, Artificial Sequence
  chemically synthesized
tcccatcccaggtgcccctctc

SEQ ID NO: 60388 - DNA, 22 bp, Artificial Sequence
  chemically synthesized
ccatcccaggtgcccctctctg

SEQ ID NO: 60389 - DNA, 22 bp, Artificial Sequence
  chemically synthesized
tctgtccttgtccatattgagc

SEQ ID NO: 60390 - DNA, 22 bp, Artificial Sequence
  chemically synthesized
tgtccttgtccatattgagctt

SEQ ID NO: 60391 - DNA, 22 bp, Artificial Sequence
  chemically synthesized
tccttgtccatattgagcttag

SEQ ID NO: 60392 - DNA, 22 bp, Artificial Sequence
  chemically synthesized
gtccatattgagcttagctctc

SEQ ID NO: 60393 - DNA, 22 bp, Artificial Sequence
  chemically synthesized
tccatattgagcttagctctcc

SEQ ID NO: 60394 - DNA, 22 bp, Artificial Sequence
  chemically synthesized
agcttagctctccactcctgac

SEQ ID NO: 60395 - DNA, 22 bp, Artificial Sequence
  chemically synthesized
agctctccactcctgacacgag

SEQ ID NO: 60396 - DNA, 22 bp, Artificial Sequence
  chemically synthesized
gctctccactcctgacacgagt

SEQ ID NO: 60397 - DNA, 22 bp, Artificial Sequence
  chemically synthesized
tccactcctgacacgagttccc

SEQ ID NO: 60398 - DNA, 22 bp, Artificial Sequence
  chemically synthesized
cactcctgacacgagttccctg

SEQ ID NO: 60399 - DNA, 22 bp, Artificial Sequence
  chemically synthesized
ctgacacgagttccctgacttc

SEQ ID NO: 60400 - DNA, 22 bp, Artificial Sequence
  chemically synthesized
acacgagttccctgacttcctc

SEQ ID NO: 60401 - DNA, 22 bp, Artificial Sequence
  chemically synthesized
cctgacttcctctccacttccc

SEQ ID NO: 60402 - DNA, 22 bp, Artificial Sequence
  chemically synthesized
acttcctctccacttccccgga

SEQ ID NO: 60403 - DNA, 22 bp, Artificial Sequence
  chemically synthesized
cctctccacttccccggatgac

SEQ ID NO: 60404 - DNA, 22 bp, Artificial Sequence
  chemically synthesized
ctctccacttccccggatgacg

SEQ ID NO: 60405 - DNA, 22 bp, Artificial Sequence
  chemically synthesized
tccacttccccggatgacggtg

SEQ ID NO: 60406 - DNA, 22 bp, Artificial Sequence
  chemically synthesized
cacttccccggatgacggtgag

SEQ ID NO: 60407 - DNA, 22 bp, Artificial Sequence
  chemically synthesized
ccccggatgacggtgagttacg

SEQ ID NO: 60408 - DNA, 22 bp, Artificial Sequence
  chemically synthesized
cccggatgacggtgagttacga

SEQ ID NO: 60409 - DNA, 22 bp, Artificial Sequence
  chemically synthesized
cgatcttgtctcctaaggtgcc

SEQ ID NO: 60410 - DNA, 22 bp, Artificial Sequence
  chemically synthesized
gtctcctaaggtgccccctccc

SEQ ID NO: 60411 - DNA, 22 bp, Artificial Sequence
  chemically synthesized
tctcctaaggtgccccctccct

SEQ ID NO: 60412 - DNA, 22 bp, Artificial Sequence
  chemically synthesized
ctaaggtgccccctccctcttg

SEQ ID NO: 60413 - DNA, 22 bp, Artificial Sequence
  chemically synthesized
aggtgccccctccctcttggct

SEQ ID NO: 60414 - DNA, 22 bp, Artificial Sequence
  chemically synthesized
cctcttggctcctctcccagtg

SEQ ID NO: 60415 - DNA, 22 bp, Artificial Sequence
  chemically synthesized
ttggctcctctcccagtgacga

SEQ ID NO: 60416 - DNA, 22 bp, Artificial Sequence
  chemically synthesized
ggctcctctcccagtgacgact

SEQ ID NO: 60417 - DNA, 22 bp, Artificial Sequence
  chemically synthesized
gctcctctcccagtgacgactt

SEQ ID NO: 60418 - DNA, 22 bp, Artificial Sequence
  chemically synthesized
ctctcccagtgacgacttcatg

SEQ ID NO: 60419 - DNA, 22 bp, Artificial Sequence
  chemically synthesized
tcccagtgacgacttcatggag

SEQ ID NO: 60420 - DNA, 22 bp, Artificial Sequence
  chemically synthesized
ccagtgacgacttcatggaggc

SEQ ID NO: 60421 - DNA, 22 bp, Artificial Sequence
  chemically synthesized
catggaggctgagaaatatagt

SEQ ID NO: 60422 - DNA, 22 bp, Artificial Sequence
  chemically synthesized
atggaggctgagaaatatagtg

SEQ ID NO: 60423 - DNA, 22 bp, Artificial Sequence
  chemically synthesized
agaaatatagtgagtggccttt

SEQ ID NO: 60424 - DNA, 22 bp, Artificial Sequence
  chemically synthesized
tcttgcctcacttactgctcgg

SEQ ID NO: 60425 - DNA, 22 bp, Artificial Sequence
  chemically synthesized
cttgcctcacttactgctcggt

SEQ ID NO: 60426 - DNA, 22 bp, Artificial Sequence
  chemically synthesized
ttgcctcacttactgctcggta

SEQ ID NO: 60427 - DNA, 22 bp, Artificial Sequence
  chemically synthesized
gcctcacttactgctcggtaag

SEQ ID NO: 60428 - DNA, 22 bp, Artificial Sequence
  chemically synthesized
cctcacttactgctcggtaagt

SEQ ID NO: 60429 - DNA, 22 bp, Artificial Sequence
  chemically synthesized
acttactgctcggtaagttagc

SEQ ID NO: 60430 - DNA, 22 bp, Artificial Sequence
  chemically synthesized
actgctcggtaagttagctcag

SEQ ID NO: 60431 - DNA, 22 bp, Artificial Sequence
  chemically synthesized
ctgctcggtaagttagctcagg

SEQ ID NO: 60432 - DNA, 22 bp, Artificial Sequence
  chemically synthesized
ctcggtaagttagctcaggggg

SEQ ID NO: 60433 - DNA, 22 bp, Artificial Sequence
  chemically synthesized
ggtaagttagctcagggggaga

SEQ ID NO: 60434 - DNA, 22 bp, Artificial Sequence
  chemically synthesized
gctcagggggagagctgttcat

SEQ ID NO: 60435 - DNA, 22 bp, Artificial Sequence
  chemically synthesized
agggggagagctgttcataact

SEQ ID NO: 60436 - DNA, 22 bp, Artificial Sequence
  chemically synthesized
ttcataactttgcactgacatc

SEQ ID NO: 60437 - DNA, 22 bp, Artificial Sequence
  chemically synthesized
ataactttgcactgacatctgg

SEQ ID NO: 60438 - DNA, 22 bp, Artificial Sequence
  chemically synthesized
tgcactgacatctggagaacaa

SEQ ID NO: 60439 - DNA, 22 bp, Artificial Sequence
  chemically synthesized
gcactgacatctggagaacaaa

SEQ ID NO: 60440 - DNA, 22 bp, Artificial Sequence
  chemically synthesized
cactgacatctggagaacaaag

SEQ ID NO: 60441 - DNA, 22 bp, Artificial Sequence
  chemically synthesized
acatctggagaacaaaggtttt

SEQ ID NO: 60442 - DNA, 22 bp, Artificial Sequence
  chemically synthesized
gagaacaaaggttttggaagag

SEQ ID NO: 60443 - DNA, 22 bp, Artificial Sequence
  chemically synthesized
tggaagagcggagcccagattc

SEQ ID NO: 60444 - DNA, 22 bp, Artificial Sequence
  chemically synthesized
ggaagagcggagcccagattcc

SEQ ID NO: 60445 - DNA, 22 bp, Artificial Sequence
  chemically synthesized
gaagagcggagcccagattccc

SEQ ID NO: 60446 - DNA, 22 bp, Artificial Sequence
  chemically synthesized
cctgtgagccagcagagccaag

SEQ ID NO: 60447 - DNA, 22 bp, Artificial Sequence
  chemically synthesized
tgagccagcagagccaagtctt

SEQ ID NO: 60448 - DNA, 22 bp, Artificial Sequence
  chemically synthesized
ttttgagtttccagcaaaacct

SEQ ID NO: 60449 - DNA, 22 bp, Artificial Sequence
  chemically synthesized
tttgagtttccagcaaaacctg

SEQ ID NO: 60450 - DNA, 22 bp, Artificial Sequence
  chemically synthesized
ttgagtttccagcaaaacctgt

SEQ ID NO: 60451 - DNA, 22 bp, Artificial Sequence
  chemically synthesized
tgagtttccagcaaaacctgtg

SEQ ID NO: 60452 - DNA, 22 bp, Artificial Sequence
  chemically synthesized
gagtttccagcaaaacctgtgt

SEQ ID NO: 60453 - DNA, 22 bp, Artificial Sequence
  chemically synthesized
agtttccagcaaaacctgtgtt

SEQ ID NO: 60454 - DNA, 22 bp, Artificial Sequence
  chemically synthesized
ccagcaaaacctgtgttttaat

SEQ ID NO: 60455 - DNA, 22 bp, Artificial Sequence
  chemically synthesized
cagcaaaacctgtgttttaata

SEQ ID NO: 60456 - DNA, 22 bp, Artificial Sequence
  chemically synthesized
tgttttaataataggagtgggt

SEQ ID NO: 60457 - DNA, 22 bp, Artificial Sequence
  chemically synthesized
taataataggagtgggtcattg

SEQ ID NO: 60458 - DNA, 22 bp, Artificial Sequence
  chemically synthesized
aataataggagtgggtcattgt

SEQ ID NO: 60459 - DNA, 22 bp, Artificial Sequence
  chemically synthesized
ataataggagtgggtcattgtg

SEQ ID NO: 60460 - DNA, 22 bp, Artificial Sequence
  chemically synthesized
tgtttaatagtacaacaaaacc

SEQ ID NO: 60461 - DNA, 22 bp, Artificial Sequence
  chemically synthesized
aatagtacaacaaaacctaagt

SEQ ID NO: 60462 - DNA, 22 bp, Artificial Sequence
  chemically synthesized
atagtacaacaaaacctaagtg

SEQ ID NO: 60463 - DNA, 22 bp, Artificial Sequence
  chemically synthesized
agtgcacataataagcacatct

SEQ ID NO: 60464 - DNA, 22 bp, Artificial Sequence
  chemically synthesized
ttctgtgtgctggggtgaggag

SEQ ID NO: 60465 - DNA, 22 bp, Artificial Sequence
  chemically synthesized
tctgtgtgctggggtgaggaga

SEQ ID NO: 60466 - DNA, 22 bp, Artificial Sequence
  chemically synthesized
ctgtgtgctggggtgaggagag

SEQ ID NO: 60467 - DNA, 22 bp, Artificial Sequence
  chemically synthesized
tgtgtgctggggtgaggagagg

SEQ ID NO: 60468 - DNA, 22 bp, Artificial Sequence
  chemically synthesized
tgtgctggggtgaggagaggtg

SEQ ID NO: 60469 - DNA, 22 bp, Artificial Sequence
  chemically synthesized
gggtgaggagaggtgacagtga

SEQ ID NO: 60470 - DNA, 22 bp, Artificial Sequence
  chemically synthesized
cagacatgggaaagcatcttag

SEQ ID NO: 60471 - DNA, 22 bp, Artificial Sequence
  chemically synthesized
agagcacccaaagctggcatga

SEQ ID NO: 60472 - DNA, 22 bp, Artificial Sequence
  chemically synthesized
gagcacccaaagctggcatgag

SEQ ID NO: 60473 - DNA, 22 bp, Artificial Sequence
  chemically synthesized
gcatgagtcatcacaggcttat

SEQ ID NO: 60474 - DNA, 22 bp, Artificial Sequence
  chemically synthesized
atggccacaaggctagattttc

SEQ ID NO: 60475 - DNA, 22 bp, Artificial Sequence
  chemically synthesized
tggccacaaggctagattttca

SEQ ID NO: 60476 - DNA, 22 bp, Artificial Sequence
  chemically synthesized
gattttcaatccctgcttccct

SEQ ID NO: 60477 - DNA, 22 bp, Artificial Sequence
  chemically synthesized
tcaatccctgcttccctttttc

SEQ ID NO: 60478 - DNA, 22 bp, Artificial Sequence
  chemically synthesized
caatccctgcttccctttttca

SEQ ID NO: 60479 - DNA, 22 bp, Artificial Sequence
  chemically synthesized
aatccctgcttccctttttcat

SEQ ID NO: 60480 - DNA, 22 bp, Artificial Sequence
  chemically synthesized
cttccctttttcataacccagt

SEQ ID NO: 60481 - DNA, 22 bp, Artificial Sequence
  chemically synthesized
ccctttttcataacccagttca

SEQ ID NO: 60482 - DNA, 22 bp, Artificial Sequence
  chemically synthesized
cctttttcataacccagttcaa

SEQ ID NO: 60483 - DNA, 22 bp, Artificial Sequence
  chemically synthesized
tttcataacccagttcaatgaa

SEQ ID NO: 60484 - DNA, 22 bp, Artificial Sequence
  chemically synthesized
ttcataacccagttcaatgaag

SEQ ID NO: 60485 - DNA, 22 bp, Artificial Sequence
  chemically synthesized
tcataacccagttcaatgaaga

SEQ ID NO: 60486 - DNA, 22 bp, Artificial Sequence
  chemically synthesized
cataacccagttcaatgaagac

SEQ ID NO: 60487 - DNA, 22 bp, Artificial Sequence
  chemically synthesized
ataacccagttcaatgaagaca

SEQ ID NO: 60488 - DNA, 22 bp, Artificial Sequence
  chemically synthesized
aatgaagacataattgaagtgg

SEQ ID NO: 60489 - DNA, 22 bp, Artificial Sequence
  chemically synthesized
aagtggtgagaagaggggccac

SEQ ID NO: 60490 - DNA, 22 bp, Artificial Sequence
  chemically synthesized
cagactccagggtatttgtatt

SEQ ID NO: 60491 - DNA, 22 bp, Artificial Sequence
  chemically synthesized
agactccagggtatttgtattc

SEQ ID NO: 60492 - DNA, 22 bp, Artificial Sequence
  chemically synthesized
cagggtatttgtattccaggac

SEQ ID NO: 60493 - DNA, 22 bp, Artificial Sequence
  chemically synthesized
gtattccaggacccctccgtgg

SEQ ID NO: 60494 - DNA, 22 bp, Artificial Sequence
  chemically synthesized
tattccaggacccctccgtggg

SEQ ID NO: 60495 - DNA, 22 bp, Artificial Sequence
  chemically synthesized
caggacccctccgtgggtgttg

SEQ ID NO: 60496 - DNA, 22 bp, Artificial Sequence
  chemically synthesized
cgtgggtgttggcccagcggtg

SEQ ID NO: 60497 - DNA, 22 bp, Artificial Sequence
  chemically synthesized
gcccagcggtgcccagagaata

SEQ ID NO: 60498 - DNA, 22 bp, Artificial Sequence
  chemically synthesized
ccttattggatctttctcgaat

SEQ ID NO: 60499 - DNA, 22 bp, Artificial Sequence
  chemically synthesized
attggatctttctcgaattgac

SEQ ID NO: 60500 - DNA, 22 bp, Artificial Sequence
  chemically synthesized
ttggatctttctcgaattgact

SEQ ID NO: 60501 - DNA, 22 bp, Artificial Sequence
  chemically synthesized
gatctttctcgaattgacttgt

SEQ ID NO: 60502 - DNA, 22 bp, Artificial Sequence
  chemically synthesized
tctcgaattgacttgttcactt

SEQ ID NO: 60503 - DNA, 22 bp, Artificial Sequence
  chemically synthesized
ctcgaattgacttgttcacttc

SEQ ID NO: 60504 - DNA, 22 bp, Artificial Sequence
  chemically synthesized
tcgaattgacttgttcacttcc

SEQ ID NO: 60505 - DNA, 22 bp, Artificial Sequence
  chemically synthesized
gaattgacttgttcacttcctg

SEQ ID NO: 60506 - DNA, 22 bp, Artificial Sequence
  chemically synthesized
acttgttcacttcctgttcagc

SEQ ID NO: 60507 - DNA, 22 bp, Artificial Sequence
  chemically synthesized
gttcacttcctgttcagcgcag

SEQ ID NO: 60508 - DNA, 22 bp, Artificial Sequence
  chemically synthesized
ttcacttcctgttcagcgcagc

SEQ ID NO: 60509 - DNA, 22 bp, Artificial Sequence
  chemically synthesized
acttcctgttcagcgcagcctg

SEQ ID NO: 60510 - DNA, 22 bp, Artificial Sequence
  chemically synthesized
cctgttcagcgcagcctggtgg

SEQ ID NO: 60511 - DNA, 22 bp, Artificial Sequence
  chemically synthesized
ctgttcagcgcagcctggtggt

SEQ ID NO: 60512 - DNA, 22 bp, Artificial Sequence
  chemically synthesized
ttcagcgcagcctggtggtgac

SEQ ID NO: 60513 - DNA, 22 bp, Artificial Sequence
  chemically synthesized
agcgcagcctggtggtgactcg

SEQ ID NO: 60514 - DNA, 22 bp, Artificial Sequence
  chemically synthesized
gtggtgactcggtaatccccac

SEQ ID NO: 60515 - DNA, 22 bp, Artificial Sequence
  chemically synthesized
ggtaatccccacagtaagacct

SEQ ID NO: 60516 - DNA, 22 bp, Artificial Sequence
  chemically synthesized
acagtgggttgagtggcctggg

SEQ ID NO: 60517 - DNA, 22 bp, Artificial Sequence
  chemically synthesized
agtggcctgggagctcaagtca

SEQ ID NO: 60518 - DNA, 22 bp, Artificial Sequence
  chemically synthesized
ggagctcaagtcaggggcagaa

SEQ ID NO: 60519 - DNA, 22 bp, Artificial Sequence
  chemically synthesized
aagtcaggggcagaaatgggga

SEQ ID NO: 60520 - DNA, 22 bp, Artificial Sequence
  chemically synthesized
gaaagttgggtgatcaagagtc

SEQ ID NO: 60521 - DNA, 22 bp, Artificial Sequence
  chemically synthesized
ggtgatcaagagtcatttggaa

SEQ ID NO: 60522 - DNA, 22 bp, Artificial Sequence
  chemically synthesized
ggaagcccccatgtctgtgtca

SEQ ID NO: 60523 - DNA, 22 bp, Artificial Sequence
  chemically synthesized
gaagcccccatgtctgtgtcag

SEQ ID NO: 60524 - DNA, 22 bp, Artificial Sequence
  chemically synthesized
tgtcagtccactcacatctctg

SEQ ID NO: 60525 - DNA, 22 bp, Artificial Sequence
  chemically synthesized
acatctctgtccgccacccacc

SEQ ID NO: 60526 - DNA, 22 bp, Artificial Sequence
  chemically synthesized
tgtccgccacccaccaccactt

SEQ ID NO: 60527 - DNA, 22 bp, Artificial Sequence
  chemically synthesized
tccgccacccaccaccactttc

SEQ ID NO: 60528 - DNA, 22 bp, Artificial Sequence
  chemically synthesized
tctccctgcctgaaagcactgg

SEQ ID NO: 60529 - DNA, 22 bp, Artificial Sequence
  chemically synthesized
ctccctgcctgaaagcactggg

SEQ ID NO: 60530 - DNA, 22 bp, Artificial Sequence
  chemically synthesized
tccctgcctgaaagcactgggc

SEQ ID NO: 60531 - DNA, 22 bp, Artificial Sequence
  chemically synthesized
cctgcctgaaagcactgggctg

SEQ ID NO: 60532 - DNA, 22 bp, Artificial Sequence
  chemically synthesized
cctgaaagcactgggctgtgtt

SEQ ID NO: 60533 - DNA, 22 bp, Artificial Sequence
  chemically synthesized
aaagcactgggctgtgtttcag

SEQ ID NO: 60534 - DNA, 22 bp, Artificial Sequence
  chemically synthesized
ggctgtgtttcagagaggtagc

SEQ ID NO: 60535 - DNA, 22 bp, Artificial Sequence
  chemically synthesized
tgtttcagagaggtagctgggt

SEQ ID NO: 60536 - DNA, 22 bp, Artificial Sequence
  chemically synthesized
cagagaggtagctgggtcccac

SEQ ID NO: 60537 - DNA, 22 bp, Artificial Sequence
  chemically synthesized
agagaggtagctgggtcccaca

SEQ ID NO: 60538 - DNA, 22 bp, Artificial Sequence
  chemically synthesized
ggtcccacagatatttatggag

SEQ ID NO: 60539 - DNA, 22 bp, Artificial Sequence
  chemically synthesized
atggagggcttgtttctgtatc

SEQ ID NO: 60540 - DNA, 22 bp, Artificial Sequence
  chemically synthesized
tggagggcttgtttctgtatct

SEQ ID NO: 60541 - DNA, 22 bp, Artificial Sequence
  chemically synthesized
gtttctgtatctccttctagtg

SEQ ID NO: 60542 - DNA, 22 bp, Artificial Sequence
  chemically synthesized
tttctgtatctccttctagtgg

SEQ ID NO: 60543 - DNA, 22 bp, Artificial Sequence
  chemically synthesized
ctgtatctccttctagtgggct

SEQ ID NO: 60544 - DNA, 22 bp, Artificial Sequence
  chemically synthesized
tgtatctccttctagtgggctg

SEQ ID NO: 60545 - DNA, 22 bp, Artificial Sequence
  chemically synthesized
tatctccttctagtgggctgga

SEQ ID NO: 60546 - DNA, 22 bp, Artificial Sequence
  chemically synthesized
cttctagtgggctggacctccc

SEQ ID NO: 60547 - DNA, 22 bp, Artificial Sequence
  chemically synthesized
ctagtgggctggacctccccag

SEQ ID NO: 60548 - DNA, 22 bp, Artificial Sequence
  chemically synthesized
tagtgggctggacctccccagg

SEQ ID NO: 60549 - DNA, 22 bp, Artificial Sequence
  chemically synthesized
gtgggctggacctccccaggcc

SEQ ID NO: 60550 - DNA, 22 bp, Artificial Sequence
  chemically synthesized
gacctccccaggccatttttct

SEQ ID NO: 60551 - DNA, 22 bp, Artificial Sequence
  chemically synthesized
cccaggccatttttctaggtaa

SEQ ID NO: 60552 - DNA, 22 bp, Artificial Sequence
  chemically synthesized
ttctaggtaactaggaaggcct

SEQ ID NO: 60553 - DNA, 22 bp, Artificial Sequence
  chemically synthesized
tctaggtaactaggaaggcctg

SEQ ID NO: 60554 - DNA, 22 bp, Artificial Sequence
  chemically synthesized
ctaggtaactaggaaggcctga

SEQ ID NO: 60555 - DNA, 22 bp, Artificial Sequence
  chemically synthesized
taggtaactaggaaggcctgac

SEQ ID NO: 60556 - DNA, 22 bp, Artificial Sequence
  chemically synthesized
ggtaactaggaaggcctgactc

SEQ ID NO: 60557 - DNA, 22 bp, Artificial Sequence
  chemically synthesized
ggaaggcctgactctgtcagca

SEQ ID NO: 60558 - DNA, 22 bp, Artificial Sequence
  chemically synthesized
actctgtcagcaacttggcttt

SEQ ID NO: 60559 - DNA, 22 bp, Artificial Sequence
  chemically synthesized
tgtcagcaacttggctttcttt

SEQ ID NO: 60560 - DNA, 22 bp, Artificial Sequence
  chemically synthesized
tcagcaacttggctttctttgg

SEQ ID NO: 60561 - DNA, 22 bp, Artificial Sequence
  chemically synthesized
ggctttctttggaggaggtgtc

SEQ ID NO: 60562 - DNA, 22 bp, Artificial Sequence
  chemically synthesized
gctttctttggaggaggtgtca

SEQ ID NO: 60563 - DNA, 22 bp, Artificial Sequence
  chemically synthesized
tctttggaggaggtgtcactct

SEQ ID NO: 60564 - DNA, 22 bp, Artificial Sequence
  chemically synthesized
ctttggaggaggtgtcactctg

SEQ ID NO: 60565 - DNA, 22 bp, Artificial Sequence
  chemically synthesized
tttggaggaggtgtcactctgg

SEQ ID NO: 60566 - DNA, 22 bp, Artificial Sequence
  chemically synthesized
tggaggaggtgtcactctggga

SEQ ID NO: 60567 - DNA, 22 bp, Artificial Sequence
  chemically synthesized
ggaggaggtgtcactctgggat

SEQ ID NO: 60568 - DNA, 22 bp, Artificial Sequence
  chemically synthesized
gaggaggtgtcactctgggatt

SEQ ID NO: 60569 - DNA, 22 bp, Artificial Sequence
  chemically synthesized
tgggattagttaaaaggggatc

SEQ ID NO: 60570 - DNA, 22 bp, Artificial Sequence
  chemically synthesized
ggattagttaaaaggggatcag

SEQ ID NO: 60571 - DNA, 22 bp, Artificial Sequence
  chemically synthesized
gttaaaaggggatcagtggtat

SEQ ID NO: 60572 - DNA, 22 bp, Artificial Sequence
  chemically synthesized
aaaggggatcagtggtattcac

SEQ ID NO: 60573 - DNA, 22 bp, Artificial Sequence
  chemically synthesized
acattggctcgtgggtgtattt

SEQ ID NO: 60574 - DNA, 22 bp, Artificial Sequence
  chemically synthesized
gctcgtgggtgtattttctcct

SEQ ID NO: 60575 - DNA, 22 bp, Artificial Sequence
  chemically synthesized
gtgggtgtattttctcctcctc

SEQ ID NO: 60576 - DNA, 22 bp, Artificial Sequence
  chemically synthesized
tctcctcctcaaattataacct

SEQ ID NO: 60577 - DNA, 22 bp, Artificial Sequence
  chemically synthesized
ctcctcctcaaattataacctt

SEQ ID NO: 60578 - DNA, 22 bp, Artificial Sequence
  chemically synthesized
tcctcctcaaattataaccttt

SEQ ID NO: 60579 - DNA, 22 bp, Artificial Sequence
  chemically synthesized
ctcctcaaattataaccttttg

SEQ ID NO: 60580 - DNA, 22 bp, Artificial Sequence
  chemically synthesized
ctcaaattataaccttttggag

SEQ ID NO: 60581 - DNA, 22 bp, Artificial Sequence
  chemically synthesized
aaattataaccttttggagggc

SEQ ID NO: 60582 - DNA, 22 bp, Artificial Sequence
  chemically synthesized
taaccttttggagggcaggagt

SEQ ID NO: 60583 - DNA, 22 bp, Artificial Sequence
  chemically synthesized
ttggagggcaggagtcatgttt

SEQ ID NO: 60584 - DNA, 22 bp, Artificial Sequence
  chemically synthesized
tggagggcaggagtcatgtttt

SEQ ID NO: 60585 - DNA, 22 bp, Artificial Sequence
  chemically synthesized
ggagggcaggagtcatgtttta

SEQ ID NO: 60586 - DNA, 22 bp, Artificial Sequence
  chemically synthesized
gagggcaggagtcatgttttat

SEQ ID NO: 60587 - DNA, 22 bp, Artificial Sequence
  chemically synthesized
tattttttgtgccttcttggtg

SEQ ID NO: 60588 - DNA, 22 bp, Artificial Sequence
  chemically synthesized
attttttgtgccttcttggtgc

SEQ ID NO: 60589 - DNA, 22 bp, Artificial Sequence
  chemically synthesized
ttttttgtgccttcttggtgcc

SEQ ID NO: 60590 - DNA, 22 bp, Artificial Sequence
  chemically synthesized
tttgtgccttcttggtgcctaa

SEQ ID NO: 60591 - DNA, 22 bp, Artificial Sequence
  chemically synthesized
ttgtgccttcttggtgcctaac

SEQ ID NO: 60592 - DNA, 22 bp, Artificial Sequence
  chemically synthesized
tgtgccttcttggtgcctaaca

SEQ ID NO: 60593 - DNA, 22 bp, Artificial Sequence
  chemically synthesized
gtgccttcttggtgcctaacat

SEQ ID NO: 60594 - DNA, 22 bp, Artificial Sequence
  chemically synthesized
tgccttcttggtgcctaacata

SEQ ID NO: 60595 - DNA, 22 bp, Artificial Sequence
  chemically synthesized
cttggtgcctaacataatgctg

SEQ ID NO: 60596 - DNA, 22 bp, Artificial Sequence
  chemically synthesized
ttggtgcctaacataatgctgg

SEQ ID NO: 60597 - DNA, 22 bp, Artificial Sequence
  chemically synthesized
ggtgcctaacataatgctggtt

SEQ ID NO: 60598 - DNA, 22 bp, Artificial Sequence
  chemically synthesized
gtgcctaacataatgctggttc

SEQ ID NO: 60599 - DNA, 22 bp, Artificial Sequence
  chemically synthesized
acataatgctggttcatatgta

SEQ ID NO: 60600 - DNA, 22 bp, Artificial Sequence
  chemically synthesized
gttcatatgtagtatttaatct

SEQ ID NO: 60601 - DNA, 22 bp, Artificial Sequence
  chemically synthesized
atatgtagtatttaatctgtac

SEQ ID NO: 60602 - DNA, 22 bp, Artificial Sequence
  chemically synthesized
aatctgtactttgctcacgctg

SEQ ID NO: 60603 - DNA, 22 bp, Artificial Sequence
  chemically synthesized
atctgtactttgctcacgctgc

SEQ ID NO: 60604 - DNA, 22 bp, Artificial Sequence
  chemically synthesized
tactttgctcacgctgcttgat

SEQ ID NO: 60605 - DNA, 22 bp, Artificial Sequence
  chemically synthesized
tgctcacgctgcttgattgaac

SEQ ID NO: 60606 - DNA, 22 bp, Artificial Sequence
  chemically synthesized
gctcacgctgcttgattgaaca

SEQ ID NO: 60607 - DNA, 22 bp, Artificial Sequence
  chemically synthesized
ctcacgctgcttgattgaacag

SEQ ID NO: 60608 - DNA, 22 bp, Artificial Sequence
  chemically synthesized
acgctgcttgattgaacagaga

SEQ ID NO: 60609 - DNA, 22 bp, Artificial Sequence
  chemically synthesized
cttgattgaacagagaaagacc

SEQ ID NO: 60610 - DNA, 22 bp, Artificial Sequence
  chemically synthesized
gattgaacagagaaagaccggg

SEQ ID NO: 60611 - DNA, 22 bp, Artificial Sequence
  chemically synthesized
attgaacagagaaagaccgggc

SEQ ID NO: 60612 - DNA, 22 bp, Artificial Sequence
  chemically synthesized
aacagagaaagaccgggctttg

SEQ ID NO: 60613 - DNA, 22 bp, Artificial Sequence
  chemically synthesized
tgaatggatccccagctccctg

SEQ ID NO: 60614 - DNA, 22 bp, Artificial Sequence
  chemically synthesized
gaatggatccccagctccctgt

SEQ ID NO: 60615 - DNA, 22 bp, Artificial Sequence
  chemically synthesized
aatggatccccagctccctgtc

SEQ ID NO: 60616 - DNA, 22 bp, Artificial Sequence
  chemically synthesized
cctgtccagggaaggtgtgagg

SEQ ID NO: 60617 - DNA, 22 bp, Artificial Sequence
  chemically synthesized
tccagggaaggtgtgaggctgg

SEQ ID NO: 60618 - DNA, 22 bp, Artificial Sequence
  chemically synthesized
ggcaagtttatttcccccttcc

SEQ ID NO: 60619 - DNA, 22 bp, Artificial Sequence
  chemically synthesized
atttcccccttcctccctgggg

SEQ ID NO: 60620 - DNA, 22 bp, Artificial Sequence
  chemically synthesized
tttcccccttcctccctgggga

SEQ ID NO: 60621 - DNA, 22 bp, Artificial Sequence
  chemically synthesized
cccccttcctccctggggagaa

SEQ ID NO: 60622 - DNA, 22 bp, Artificial Sequence
  chemically synthesized
ccccttcctccctggggagaaa

SEQ ID NO: 60623 - DNA, 22 bp, Artificial Sequence
  chemically synthesized
cctccctggggagaaagtgaaa

SEQ ID NO: 60624 - DNA, 22 bp, Artificial Sequence
  chemically synthesized
ctccctggggagaaagtgaaaa

SEQ ID NO: 60625 - DNA, 22 bp, Artificial Sequence
  chemically synthesized
cctggggagaaagtgaaaaagt

SEQ ID NO: 60626 - DNA, 22 bp, Artificial Sequence
  chemically synthesized
gggagaaagtgaaaaagtgaaa

SEQ ID NO: 60627 - DNA, 22 bp, Artificial Sequence
  chemically synthesized
gggttgggatagctggtggtgt

SEQ ID NO: 60628 - DNA, 22 bp, Artificial Sequence
  chemically synthesized
ggatagctggtggtgtctttgt

SEQ ID NO: 60629 - DNA, 22 bp, Artificial Sequence
  chemically synthesized
gtggtgtctttgtggctttcac

SEQ ID NO: 60630 - DNA, 22 bp, Artificial Sequence
  chemically synthesized
tgtggctttcaccccatggtca

SEQ ID NO: 60631 - DNA, 22 bp, Artificial Sequence
  chemically synthesized
gtggctttcaccccatggtcaa

SEQ ID NO: 60632 - DNA, 22 bp, Artificial Sequence
  chemically synthesized
tggctttcaccccatggtcaag

SEQ ID NO: 60633 - DNA, 22 bp, Artificial Sequence
  chemically synthesized
tcaccccatggtcaagcagtga

SEQ ID NO: 60634 - DNA, 22 bp, Artificial Sequence
  chemically synthesized
caccccatggtcaagcagtgaa

SEQ ID NO: 60635 - DNA, 22 bp, Artificial Sequence
  chemically synthesized
accccatggtcaagcagtgaac

SEQ ID NO: 60636 - DNA, 22 bp, Artificial Sequence
  chemically synthesized
tgcttgcagattctgtctcgct

SEQ ID NO: 60637 - DNA, 22 bp, Artificial Sequence
  chemically synthesized
cttgcagattctgtctcgctca

SEQ ID NO: 60638 - DNA, 22 bp, Artificial Sequence
  chemically synthesized
gcagattctgtctcgctcacct

SEQ ID NO: 60639 - DNA, 22 bp, Artificial Sequence
  chemically synthesized
cagattctgtctcgctcacctg

SEQ ID NO: 60640 - DNA, 22 bp, Artificial Sequence
  chemically synthesized
tgtctcgctcacctggaagcca

SEQ ID NO: 60641 - DNA, 22 bp, Artificial Sequence
  chemically synthesized
tctcgctcacctggaagccagt

SEQ ID NO: 60642 - DNA, 22 bp, Artificial Sequence
  chemically synthesized
gctcacctggaagccagtgttg

SEQ ID NO: 60643 - DNA, 22 bp, Artificial Sequence
  chemically synthesized
acctggaagccagtgttgggga

SEQ ID NO: 60644 - DNA, 22 bp, Artificial Sequence
  chemically synthesized
gaagccagtgttggggaaggag

SEQ ID NO: 60645 - DNA, 22 bp, Artificial Sequence
  chemically synthesized
gggaaggagcacgtgggggagg

SEQ ID NO: 60646 - DNA, 22 bp, Artificial Sequence
  chemically synthesized
aggtctgggcaacactttggag

SEQ ID NO: 60647 - DNA, 22 bp, Artificial Sequence
  chemically synthesized
ggtctgggcaacactttggagt

SEQ ID NO: 60648 - DNA, 22 bp, Artificial Sequence
  chemically synthesized
ggcaacactttggagttagggg

SEQ ID NO: 60649 - DNA, 22 bp, Artificial Sequence
  chemically synthesized
tggagttagggggtcccctgga

SEQ ID NO: 60650 - DNA, 22 bp, Artificial Sequence
  chemically synthesized
ggagttagggggtcccctggag

SEQ ID NO: 60651 - DNA, 22 bp, Artificial Sequence
  chemically synthesized
gagttagggggtcccctggagg

SEQ ID NO: 60652 - DNA, 22 bp, Artificial Sequence
  chemically synthesized
gggggtcccctggaggtgtggg

SEQ ID NO: 60653 - DNA, 22 bp, Artificial Sequence
  chemically synthesized
gaggtgtgggaagctggtagtg

SEQ ID NO: 60654 - DNA, 22 bp, Artificial Sequence
  chemically synthesized
gtagtggcattctggaaacaag

SEQ ID NO: 60655 - DNA, 22 bp, Artificial Sequence
  chemically synthesized
tggaaacaagctagagcctgtc

SEQ ID NO: 60656 - DNA, 22 bp, Artificial Sequence
  chemically synthesized
gaaacaagctagagcctgtctc

SEQ ID NO: 60657 - DNA, 22 bp, Artificial Sequence
  chemically synthesized
gagcctgtctcaccagagggag

SEQ ID NO: 60658 - DNA, 22 bp, Artificial Sequence
  chemically synthesized
tctcaccagagggagaacggct

SEQ ID NO: 60659 - DNA, 22 bp, Artificial Sequence
  chemically synthesized
accagagggagaacggctgagt

SEQ ID NO: 60660 - DNA, 22 bp, Artificial Sequence
  chemically synthesized
agttcggaagggactggggcct

SEQ ID NO: 60661 - DNA, 22 bp, Artificial Sequence
  chemically synthesized
ggaagggactggggcctgcttt

SEQ ID NO: 60662 - DNA, 22 bp, Artificial Sequence
  chemically synthesized
gggcctgctttcctttgggtgg

SEQ ID NO: 60663 - DNA, 22 bp, Artificial Sequence
  chemically synthesized
ctttcctttgggtggctttgac

SEQ ID NO: 60664 - DNA, 22 bp, Artificial Sequence
  chemically synthesized
tcctttgggtggctttgactgg

SEQ ID NO: 60665 - DNA, 22 bp, Artificial Sequence
  chemically synthesized
cctttgggtggctttgactggc

SEQ ID NO: 60666 - DNA, 22 bp, Artificial Sequence
  chemically synthesized
ctttgggtggctttgactggct

SEQ ID NO: 60667 - DNA, 22 bp, Artificial Sequence
  chemically synthesized
tgggtggctttgactggctctt

SEQ ID NO: 60668 - DNA, 22 bp, Artificial Sequence
  chemically synthesized
gggtggctttgactggctcttg

SEQ ID NO: 60669 - DNA, 22 bp, Artificial Sequence
  chemically synthesized
ggtggctttgactggctcttgg

SEQ ID NO: 60670 - DNA, 22 bp, Artificial Sequence
  chemically synthesized
tgactggctcttggatgagttt

SEQ ID NO: 60671 - DNA, 22 bp, Artificial Sequence
  chemically synthesized
gactggctcttggatgagttta

SEQ ID NO: 60672 - DNA, 22 bp, Artificial Sequence
  chemically synthesized
actggctcttggatgagtttaa

SEQ ID NO: 60673 - DNA, 22 bp, Artificial Sequence
  chemically synthesized
gctcttggatgagtttaaaagg

SEQ ID NO: 60674 - DNA, 22 bp, Artificial Sequence
  chemically synthesized
ttggatgagtttaaaaggtgat

SEQ ID NO: 60675 - DNA, 22 bp, Artificial Sequence
  chemically synthesized
ggatgagtttaaaaggtgattc

SEQ ID NO: 60676 - DNA, 22 bp, Artificial Sequence
  chemically synthesized
gatgagtttaaaaggtgattct

SEQ ID NO: 60677 - DNA, 22 bp, Artificial Sequence
  chemically synthesized
aaaaggtgattctctctctctc

SEQ ID NO: 60678 - DNA, 22 bp, Artificial Sequence
  chemically synthesized
aaaggtgattctctctctctct

SEQ ID NO: 60679 - DNA, 22 bp, Artificial Sequence
  chemically synthesized
tctctctctctctgtctctctt

SEQ ID NO: 60680 - DNA, 22 bp, Artificial Sequence
  chemically synthesized
tctctctctctgtctctctttt

SEQ ID NO: 60681 - DNA, 22 bp, Artificial Sequence
  chemically synthesized
tctctctctgtctctcttttct

SEQ ID NO: 60682 - DNA, 22 bp, Artificial Sequence
  chemically synthesized
tctctctgtctctcttttcttt

SEQ ID NO: 60683 - DNA, 22 bp, Artificial Sequence
  chemically synthesized
tctctgtctctcttttcttttt

SEQ ID NO: 60684 - DNA, 22 bp, Artificial Sequence
  chemically synthesized
tctgtctctcttttcttttttt

SEQ ID NO: 60685 - DNA, 22 bp, Artificial Sequence
  chemically synthesized
tgtctctcttttcttttttttt

SEQ ID NO: 60686 - DNA, 22 bp, Artificial Sequence
  chemically synthesized
tctctcttttcttttttttttt

SEQ ID NO: 60687 - DNA, 22 bp, Artificial Sequence
  chemically synthesized
tcttttctttttttttttttct

SEQ ID NO: 60688 - DNA, 22 bp, Artificial Sequence
  chemically synthesized
ttttctttttttttttttcttt

SEQ ID NO: 60689 - DNA, 22 bp, Artificial Sequence
  chemically synthesized
ttctttttttttttttcttttt

SEQ ID NO: 60690 - DNA, 22 bp, Artificial Sequence
  chemically synthesized
tctttttttttttttctttttt

SEQ ID NO: 60691 - DNA, 22 bp, Artificial Sequence
  chemically synthesized
ctttttttttttttcttttttc

SEQ ID NO: 60692 - DNA, 22 bp, Artificial Sequence
  chemically synthesized
tttttttttttttcttttttct

SEQ ID NO: 60693 - DNA, 22 bp, Artificial Sequence
  chemically synthesized
tttttttttttcttttttctgt

SEQ ID NO: 60694 - DNA, 22 bp, Artificial Sequence
  chemically synthesized
ttttttttttcttttttctgtt

SEQ ID NO: 60695 - DNA, 22 bp, Artificial Sequence
  chemically synthesized
tttttttttcttttttctgttt

SEQ ID NO: 60696 - DNA, 22 bp, Artificial Sequence
  chemically synthesized
ttttttttcttttttctgtttt

SEQ ID NO: 60697 - DNA, 22 bp, Artificial Sequence
  chemically synthesized
tttttttcttttttctgtttta

SEQ ID NO: 60698 - DNA, 22 bp, Artificial Sequence
  chemically synthesized
ttttttcttttttctgttttag

SEQ ID NO: 60699 - DNA, 22 bp, Artificial Sequence
  chemically synthesized
tttttcttttttctgttttagt

SEQ ID NO: 60700 - DNA, 22 bp, Artificial Sequence
  chemically synthesized
ttttcttttttctgttttagtg

SEQ ID NO: 60701 - DNA, 22 bp, Artificial Sequence
  chemically synthesized
tttcttttttctgttttagtgt

SEQ ID NO: 60702 - DNA, 22 bp, Artificial Sequence
  chemically synthesized
ttcttttttctgttttagtgta

SEQ ID NO: 60703 - DNA, 22 bp, Artificial Sequence
  chemically synthesized
tcttttttctgttttagtgtat

SEQ ID NO: 60704 - DNA, 22 bp, Artificial Sequence
  chemically synthesized
cttttttctgttttagtgtatg

SEQ ID NO: 60705 - DNA, 22 bp, Artificial Sequence
  chemically synthesized
ttttttctgttttagtgtatgt

SEQ ID NO: 60706 - DNA, 22 bp, Artificial Sequence
  chemically synthesized
ttttctgttttagtgtatgtgt

SEQ ID NO: 60707 - DNA, 22 bp, Artificial Sequence
  chemically synthesized
tttctgttttagtgtatgtgta

SEQ ID NO: 60708 - DNA, 22 bp, Artificial Sequence
  chemically synthesized
ttctgttttagtgtatgtgtat

SEQ ID NO: 60709 - DNA, 22 bp, Artificial Sequence
  chemically synthesized
tctgttttagtgtatgtgtatg

SEQ ID NO: 60710 - DNA, 22 bp, Artificial Sequence
  chemically synthesized
ctgttttagtgtatgtgtatgc

SEQ ID NO: 60711 - DNA, 22 bp, Artificial Sequence
  chemically synthesized
tgttttagtgtatgtgtatgca

SEQ ID NO: 60712 - DNA, 22 bp, Artificial Sequence
  chemically synthesized
ttttagtgtatgtgtatgcaag

SEQ ID NO: 60713 - DNA, 22 bp, Artificial Sequence
  chemically synthesized
tagtgtatgtgtatgcaagacc

SEQ ID NO: 60714 - DNA, 22 bp, Artificial Sequence
  chemically synthesized
agtgtatgtgtatgcaagacct

SEQ ID NO: 60715 - DNA, 22 bp, Artificial Sequence
  chemically synthesized
gtgtatgtgtatgcaagacctt

SEQ ID NO: 60716 - DNA, 22 bp, Artificial Sequence
  chemically synthesized
tgatatttgagtagggaaatcc

SEQ ID NO: 60717 - DNA, 22 bp, Artificial Sequence
  chemically synthesized
gatatttgagtagggaaatcct

SEQ ID NO: 60718 - DNA, 22 bp, Artificial Sequence
  chemically synthesized
atatttgagtagggaaatcctc

SEQ ID NO: 60719 - DNA, 22 bp, Artificial Sequence
  chemically synthesized
gagtagggaaatcctctcttat

SEQ ID NO: 60720 - DNA, 22 bp, Artificial Sequence
  chemically synthesized
agtagggaaatcctctcttatc

SEQ ID NO: 60721 - DNA, 22 bp, Artificial Sequence
  chemically synthesized
tcttatcaatggaattcacagc

SEQ ID NO: 60722 - DNA, 22 bp, Artificial Sequence
  chemically synthesized
ttatcaatggaattcacagcct

SEQ ID NO: 60723 - DNA, 22 bp, Artificial Sequence
  chemically synthesized
atcaatggaattcacagcctct

SEQ ID NO: 60724 - DNA, 22 bp, Artificial Sequence
  chemically synthesized
tcaatggaattcacagcctctt

SEQ ID NO: 60725 - DNA, 22 bp, Artificial Sequence
  chemically synthesized
acagcctcttatggtgccttac

SEQ ID NO: 60726 - DNA, 22 bp, Artificial Sequence
  chemically synthesized
ttatggtgccttaccctttcat

SEQ ID NO: 60727 - DNA, 22 bp, Artificial Sequence
  chemically synthesized
atggtgccttaccctttcattg

SEQ ID NO: 60728 - DNA, 22 bp, Artificial Sequence
  chemically synthesized
tggtgccttaccctttcattgt

SEQ ID NO: 60729 - DNA, 22 bp, Artificial Sequence
  chemically synthesized
accctttcattgtgttgtaaag

SEQ ID NO: 60730 - DNA, 22 bp, Artificial Sequence
  chemically synthesized
ccctttcattgtgttgtaaaga

SEQ ID NO: 60731 - DNA, 22 bp, Artificial Sequence
  chemically synthesized
tcattgtgttgtaaagacagtc

SEQ ID NO: 60732 - DNA, 22 bp, Artificial Sequence
  chemically synthesized
cattgtgttgtaaagacagtca

SEQ ID NO: 60733 - DNA, 22 bp, Artificial Sequence
  chemically synthesized
attgtgttgtaaagacagtcag

SEQ ID NO: 60734 - DNA, 22 bp, Artificial Sequence
  chemically synthesized
tgttgtaaagacagtcagacca

SEQ ID NO: 60735 - DNA, 22 bp, Artificial Sequence
  chemically synthesized
taaagacagtcagaccaactag

SEQ ID NO: 60736 - DNA, 22 bp, Artificial Sequence
  chemically synthesized
gatttatttgcacaactctgat

SEQ ID NO: 60737 - DNA, 22 bp, Artificial Sequence
  chemically synthesized
atttgcacaactctgatttttt

SEQ ID NO: 60738 - DNA, 22 bp, Artificial Sequence
  chemically synthesized
tttgcacaactctgattttttt

SEQ ID NO: 60739 - DNA, 22 bp, Artificial Sequence
  chemically synthesized
gcacaactctgatttttttcct

SEQ ID NO: 60740 - DNA, 22 bp, Artificial Sequence
  chemically synthesized
cacaactctgatttttttccta

SEQ ID NO: 60741 - DNA, 22 bp, Artificial Sequence
  chemically synthesized
tgatttttttcctaagaaactc

SEQ ID NO: 60742 - DNA, 22 bp, Artificial Sequence
  chemically synthesized
atttttttcctaagaaactccc

SEQ ID NO: 60743 - DNA, 22 bp, Artificial Sequence
  chemically synthesized
ttttcctaagaaactcccccac

SEQ ID NO: 60744 - DNA, 22 bp, Artificial Sequence
  chemically synthesized
tttcctaagaaactcccccacc

SEQ ID NO: 60745 - DNA, 22 bp, Artificial Sequence
  chemically synthesized
ttcctaagaaactcccccaccc

SEQ ID NO: 60746 - DNA, 22 bp, Artificial Sequence
  chemically synthesized
tcctaagaaactcccccaccca

SEQ ID NO: 60747 - DNA, 22 bp, Artificial Sequence
  chemically synthesized
cctaagaaactcccccacccaa

SEQ ID NO: 60748 - DNA, 22 bp, Artificial Sequence
  chemically synthesized
ctaagaaactcccccacccaat

SEQ ID NO: 60749 - DNA, 22 bp, Artificial Sequence
  chemically synthesized
agaaactcccccacccaattta

SEQ ID NO: 60750 - DNA, 22 bp, Artificial Sequence
  chemically synthesized
ccccacccaatttaattttttt

SEQ ID NO: 60751 - DNA, 22 bp, Artificial Sequence
  chemically synthesized
aatttttttttttttttgagat

SEQ ID NO: 60752 - DNA, 22 bp, Artificial Sequence
  chemically synthesized
atttttttttttttttgagatg

SEQ ID NO: 60753 - DNA, 22 bp, Artificial Sequence
  chemically synthesized
ttttttttttttgagatggagt

SEQ ID NO: 60754 - DNA, 22 bp, Artificial Sequence
  chemically synthesized
tttttttttttgagatggagtc

SEQ ID NO: 60755 - DNA, 22 bp, Artificial Sequence
  chemically synthesized
ttttttttttgagatggagtct

SEQ ID NO: 60756 - DNA, 22 bp, Artificial Sequence
  chemically synthesized
tttttttttgagatggagtctc

SEQ ID NO: 60757 - DNA, 22 bp, Artificial Sequence
  chemically synthesized
ttttttttgagatggagtctcg

SEQ ID NO: 60758 - DNA, 22 bp, Artificial Sequence
  chemically synthesized
tttttttgagatggagtctcgc

SEQ ID NO: 60759 - DNA, 22 bp, Artificial Sequence
  chemically synthesized
ttttttgagatggagtctcgct

SEQ ID NO: 60760 - DNA, 22 bp, Artificial Sequence
  chemically synthesized
tttttgagatggagtctcgctc

SEQ ID NO: 60761 - DNA, 22 bp, Artificial Sequence
  chemically synthesized
ttttgagatggagtctcgctct

SEQ ID NO: 60762 - DNA, 22 bp, Artificial Sequence
  chemically synthesized
tttgagatggagtctcgctctg

SEQ ID NO: 60763 - DNA, 22 bp, Artificial Sequence
  chemically synthesized
ttgagatggagtctcgctctgt

SEQ ID NO: 60764 - DNA, 22 bp, Artificial Sequence
  chemically synthesized
tgagatggagtctcgctctgtc

SEQ ID NO: 60765 - DNA, 22 bp, Artificial Sequence
  chemically synthesized
gagatggagtctcgctctgtcg

SEQ ID NO: 60766 - DNA, 22 bp, Artificial Sequence
  chemically synthesized
agatggagtctcgctctgtcgc

SEQ ID NO: 60767 - DNA, 22 bp, Artificial Sequence
  chemically synthesized
gctctgtcgcccaggctggagt

SEQ ID NO: 60768 - DNA, 22 bp, Artificial Sequence
  chemically synthesized
tgtcgcccaggctggagtgcag

SEQ ID NO: 60769 - DNA, 22 bp, Artificial Sequence
  chemically synthesized
tcgcccaggctggagtgcagtg

SEQ ID NO: 60770 - DNA, 22 bp, Artificial Sequence
  chemically synthesized
gagtgcagtgctacgatctcgg

SEQ ID NO: 60771 - DNA, 22 bp, Artificial Sequence
  chemically synthesized
cgatctcggctcattgcagcct

SEQ ID NO: 60772 - DNA, 22 bp, Artificial Sequence
  chemically synthesized
ggctcattgcagcctccgcctc

SEQ ID NO: 60773 - DNA, 22 bp, Artificial Sequence
  chemically synthesized
attgcagcctccgcctcccagg

SEQ ID NO: 60774 - DNA, 22 bp, Artificial Sequence
  chemically synthesized
cagcctccgcctcccaggttca

SEQ ID NO: 60775 - DNA, 22 bp, Artificial Sequence
  chemically synthesized
cgcctcccaggttcaagtgatt

SEQ ID NO: 60776 - DNA, 22 bp, Artificial Sequence
  chemically synthesized
ccaggttcaagtgattctcctg

SEQ ID NO: 60777 - DNA, 22 bp, Artificial Sequence
  chemically synthesized
aagtgattctcctgcctcagcc

SEQ ID NO: 60778 - DNA, 22 bp, Artificial Sequence
  chemically synthesized
tcctgcctcagcctcccaagta

SEQ ID NO: 60779 - DNA, 22 bp, Artificial Sequence
  chemically synthesized
ctgcctcagcctcccaagtagc

SEQ ID NO: 60780 - DNA, 22 bp, Artificial Sequence
  chemically synthesized
cctcagcctcccaagtagctgg

SEQ ID NO: 60781 - DNA, 22 bp, Artificial Sequence
  chemically synthesized
agcctcccaagtagctgggatt

SEQ ID NO: 60782 - DNA, 22 bp, Artificial Sequence
  chemically synthesized
ccaagtagctgggattataggt

SEQ ID NO: 60783 - DNA, 22 bp, Artificial Sequence
  chemically synthesized
ggattataggtgcatgccatca

SEQ ID NO: 60784 - DNA, 22 bp, Artificial Sequence
  chemically synthesized
taggtgcatgccatcacacctg

SEQ ID NO: 60785 - DNA, 22 bp, Artificial Sequence
  chemically synthesized
gctgattttttttttttttttt

SEQ ID NO: 60786 - DNA, 22 bp, Artificial Sequence
  chemically synthesized
attttttttttttttttttttt

SEQ ID NO: 60787 - DNA, 22 bp, Artificial Sequence
  chemically synthesized
ttttttttttttttttttttaa

SEQ ID NO: 60788 - DNA, 22 bp, Artificial Sequence
  chemically synthesized
tttttttttttttttttttaag

SEQ ID NO: 60789 - DNA, 22 bp, Artificial Sequence
  chemically synthesized
ttttttttttttttttttaagt

SEQ ID NO: 60790 - DNA, 22 bp, Artificial Sequence
  chemically synthesized
tttttttttttttttttaagta

SEQ ID NO: 60791 - DNA, 22 bp, Artificial Sequence
  chemically synthesized
ttttttttttttttttaagtag

SEQ ID NO: 60792 - DNA, 22 bp, Artificial Sequence
  chemically synthesized
tttttttttttttttaagtaga

SEQ ID NO: 60793 - DNA, 22 bp, Artificial Sequence
  chemically synthesized
ttttttttttttttaagtagag

SEQ ID NO: 60794 - DNA, 22 bp, Artificial Sequence
  chemically synthesized
tttttttttttttaagtagaga

SEQ ID NO: 60795 - DNA, 22 bp, Artificial Sequence
  chemically synthesized
ttttttttttttaagtagagat

SEQ ID NO: 60796 - DNA, 22 bp, Artificial Sequence
  chemically synthesized
tttttttttttaagtagagatg

SEQ ID NO: 60797 - DNA, 22 bp, Artificial Sequence
  chemically synthesized
ttttttttttaagtagagatgg

SEQ ID NO: 60798 - DNA, 22 bp, Artificial Sequence
  chemically synthesized
tttttttttaagtagagatggg

SEQ ID NO: 60799 - DNA, 22 bp, Artificial Sequence
  chemically synthesized
ttttttttaagtagagatgggg

SEQ ID NO: 60800 - DNA, 22 bp, Artificial Sequence
  chemically synthesized
tttttttaagtagagatggggt

SEQ ID NO: 60801 - DNA, 22 bp, Artificial Sequence
  chemically synthesized
ttttttaagtagagatggggtt

SEQ ID NO: 60802 - DNA, 22 bp, Artificial Sequence
  chemically synthesized
tttttaagtagagatggggttt

SEQ ID NO: 60803 - DNA, 22 bp, Artificial Sequence
  chemically synthesized
ttttaagtagagatggggtttc

SEQ ID NO: 60804 - DNA, 22 bp, Artificial Sequence
  chemically synthesized
tttaagtagagatggggtttca

SEQ ID NO: 60805 - DNA, 22 bp, Artificial Sequence
  chemically synthesized
ttaagtagagatggggtttcac

SEQ ID NO: 60806 - DNA, 22 bp, Artificial Sequence
  chemically synthesized
taagtagagatggggtttcacc

SEQ ID NO: 60807 - DNA, 22 bp, Artificial Sequence
  chemically synthesized
aagtagagatggggtttcacca

SEQ ID NO: 60808 - DNA, 22 bp, Artificial Sequence
  chemically synthesized
agtagagatggggtttcaccat

SEQ ID NO: 60809 - DNA, 22 bp, Artificial Sequence
  chemically synthesized
caccatgttggctaggctggtc

SEQ ID NO: 60810 - DNA, 22 bp, Artificial Sequence
  chemically synthesized
accatgttggctaggctggtct

SEQ ID NO: 60811 - DNA, 22 bp, Artificial Sequence
  chemically synthesized
gctaggctggtcttgaactcct

SEQ ID NO: 60812 - DNA, 22 bp, Artificial Sequence
  chemically synthesized
ggctggtcttgaactcctgacc

SEQ ID NO: 60813 - DNA, 22 bp, Artificial Sequence
  chemically synthesized
gtcttgaactcctgacctcagg

SEQ ID NO: 60814 - DNA, 22 bp, Artificial Sequence
  chemically synthesized
gaactcctgacctcaggtgacc

SEQ ID NO: 60815 - DNA, 22 bp, Artificial Sequence
  chemically synthesized
aactcctgacctcaggtgaccc

SEQ ID NO: 60816 - DNA, 22 bp, Artificial Sequence
  chemically synthesized
ctgacctcaggtgacccacacg

SEQ ID NO: 60817 - DNA, 22 bp, Artificial Sequence
  chemically synthesized
acctcaggtgacccacacgcct

SEQ ID NO: 60818 - DNA, 22 bp, Artificial Sequence
  chemically synthesized
aggtgacccacacgcctcggcc

SEQ ID NO: 60819 - DNA, 22 bp, Artificial Sequence
  chemically synthesized
ggcctcccaaaatgctgagatt

SEQ ID NO: 60820 - DNA, 22 bp, Artificial Sequence
  chemically synthesized
ccaaaatgctgagattacaggt

SEQ ID NO: 60821 - DNA, 22 bp, Artificial Sequence
  chemically synthesized
agattacaggtgtgagccaccg

SEQ ID NO: 60822 - DNA, 22 bp, Artificial Sequence
  chemically synthesized
caggtgtgagccaccgcacctg

SEQ ID NO: 60823 - DNA, 22 bp, Artificial Sequence
  chemically synthesized
gctatttaattctattttcaga

SEQ ID NO: 60824 - DNA, 22 bp, Artificial Sequence
  chemically synthesized
tttaattctattttcagatggc

SEQ ID NO: 60825 - DNA, 22 bp, Artificial Sequence
  chemically synthesized
aattctattttcagatggcttg

SEQ ID NO: 60826 - DNA, 22 bp, Artificial Sequence
  chemically synthesized
attctattttcagatggcttgt

SEQ ID NO: 60827 - DNA, 22 bp, Artificial Sequence
  chemically synthesized
tattttcagatggcttgttctc

SEQ ID NO: 60828 - DNA, 22 bp, Artificial Sequence
  chemically synthesized
ttttcagatggcttgttctcca

SEQ ID NO: 60829 - DNA, 22 bp, Artificial Sequence
  chemically synthesized
tcagatggcttgttctccaagt

SEQ ID NO: 60830 - DNA, 22 bp, Artificial Sequence
  chemically synthesized
cagatggcttgttctccaagtc

SEQ ID NO: 60831 - DNA, 22 bp, Artificial Sequence
  chemically synthesized
agatggcttgttctccaagtct

SEQ ID NO: 60832 - DNA, 22 bp, Artificial Sequence
  chemically synthesized
gttctccaagtcttgggactgc

SEQ ID NO: 60833 - DNA, 22 bp, Artificial Sequence
  chemically synthesized
ttctccaagtcttgggactgcc

SEQ ID NO: 60834 - DNA, 22 bp, Artificial Sequence
  chemically synthesized
tccaagtcttgggactgcccag

SEQ ID NO: 60835 - DNA, 22 bp, Artificial Sequence
  chemically synthesized
caagtcttgggactgcccagaa

SEQ ID NO: 60836 - DNA, 22 bp, Artificial Sequence
  chemically synthesized
gggactgcccagaaatgggttg

SEQ ID NO: 60837 - DNA, 22 bp, Artificial Sequence
  chemically synthesized
ggactgcccagaaatgggttgc

SEQ ID NO: 60838 - DNA, 22 bp, Artificial Sequence
  chemically synthesized
cccagaaatgggttgcctggta

SEQ ID NO: 60839 - DNA, 22 bp, Artificial Sequence
  chemically synthesized
cctggtagggctcatggctcag

SEQ ID NO: 60840 - DNA, 22 bp, Artificial Sequence
  chemically synthesized
gtagggctcatggctcagcact

SEQ ID NO: 60841 - DNA, 22 bp, Artificial Sequence
  chemically synthesized
atggctcagcactgcgatccca

SEQ ID NO: 60842 - DNA, 22 bp, Artificial Sequence
  chemically synthesized
agcactgcgatcccaccagtgg

SEQ ID NO: 60843 - DNA, 22 bp, Artificial Sequence
  chemically synthesized
cgatcccaccagtggccggggt

SEQ ID NO: 60844 - DNA, 22 bp, Artificial Sequence
  chemically synthesized
cttagccttctagttcagttgt

SEQ ID NO: 60845 - DNA, 22 bp, Artificial Sequence
  chemically synthesized
agccttctagttcagttgtggc

SEQ ID NO: 60846 - DNA, 22 bp, Artificial Sequence
  chemically synthesized
gccttctagttcagttgtggcc

SEQ ID NO: 60847 - DNA, 22 bp, Artificial Sequence
  chemically synthesized
ctagttcagttgtggcccttct

SEQ ID NO: 60848 - DNA, 22 bp, Artificial Sequence
  chemically synthesized
tagttcagttgtggcccttctg

SEQ ID NO: 60849 - DNA, 22 bp, Artificial Sequence
  chemically synthesized
gttcagttgtggcccttctggg

SEQ ID NO: 60850 - DNA, 22 bp, Artificial Sequence
  chemically synthesized
agttgtggcccttctgggcttc

SEQ ID NO: 60851 - DNA, 22 bp, Artificial Sequence
  chemically synthesized
tggcccttctgggcttcctttg

SEQ ID NO: 60852 - DNA, 22 bp, Artificial Sequence
  chemically synthesized
ctgggcttcctttgctaccagt

SEQ ID NO: 60853 - DNA, 22 bp, Artificial Sequence
  chemically synthesized
tgggcttcctttgctaccagtt

SEQ ID NO: 60854 - DNA, 22 bp, Artificial Sequence
  chemically synthesized
ggcttcctttgctaccagtttc

SEQ ID NO: 60855 - DNA, 22 bp, Artificial Sequence
  chemically synthesized
cctttgctaccagtttccacca

SEQ ID NO: 60856 - DNA, 22 bp, Artificial Sequence
  chemically synthesized
ctttgctaccagtttccaccac

SEQ ID NO: 60857 - DNA, 22 bp, Artificial Sequence
  chemically synthesized
tgctaccagtttccaccacatg

SEQ ID NO: 60858 - DNA, 22 bp, Artificial Sequence
  chemically synthesized
gctaccagtttccaccacatgg

SEQ ID NO: 60859 - DNA, 22 bp, Artificial Sequence
  chemically synthesized
ctaccagtttccaccacatggc

SEQ ID NO: 60860 - DNA, 22 bp, Artificial Sequence
  chemically synthesized
ccagtttccaccacatggctgg

SEQ ID NO: 60861 - DNA, 22 bp, Artificial Sequence
  chemically synthesized
ccaccacatggctggaggtagc

SEQ ID NO: 60862 - DNA, 22 bp, Artificial Sequence
  chemically synthesized
caccacatggctggaggtagcc

SEQ ID NO: 60863 - DNA, 22 bp, Artificial Sequence
  chemically synthesized
gaggtagcccagcctggaagcc

SEQ ID NO: 60864 - DNA, 22 bp, Artificial Sequence
  chemically synthesized
gaagcctctcagagctccagcc

SEQ ID NO: 60865 - DNA, 22 bp, Artificial Sequence
  chemically synthesized
tcagagctccagcctggaagcc

SEQ ID NO: 60866 - DNA, 22 bp, Artificial Sequence
  chemically synthesized
agagctccagcctggaagcctc

SEQ ID NO: 60867 - DNA, 22 bp, Artificial Sequence
  chemically synthesized
cagcctggaagcctctcagaga

SEQ ID NO: 60868 - DNA, 22 bp, Artificial Sequence
  chemically synthesized
gaagcctctcagagagtgcttg

SEQ ID NO: 60869 - DNA, 22 bp, Artificial Sequence
  chemically synthesized
tcagagagtgcttggagcactg

SEQ ID NO: 60870 - DNA, 22 bp, Artificial Sequence
  chemically synthesized
agagagtgcttggagcactgct

SEQ ID NO: 60871 - DNA, 22 bp, Artificial Sequence
  chemically synthesized
ggagcactgctagctgcacgtg

SEQ ID NO: 60872 - DNA, 22 bp, Artificial Sequence
  chemically synthesized
gagcactgctagctgcacgtgc

SEQ ID NO: 60873 - DNA, 22 bp, Artificial Sequence
  chemically synthesized
ctagctgcacgtgctctcagga

SEQ ID NO: 60874 - DNA, 22 bp, Artificial Sequence
  chemically synthesized
gctgcacgtgctctcaggaaag

SEQ ID NO: 60875 - DNA, 22 bp, Artificial Sequence
  chemically synthesized
cacgtgctctcaggaaagtcca

SEQ ID NO: 60876 - DNA, 22 bp, Artificial Sequence
  chemically synthesized
tcaggaaagtccacaaggagat

SEQ ID NO: 60877 - DNA, 22 bp, Artificial Sequence
  chemically synthesized
aggaaagtccacaaggagatgg

SEQ ID NO: 60878 - DNA, 22 bp, Artificial Sequence
  chemically synthesized
gtgtggctcagagtccttgtgt

SEQ ID NO: 60879 - DNA, 22 bp, Artificial Sequence
  chemically synthesized
agagtccttgtgtgctgcctca

SEQ ID NO: 60880 - DNA, 22 bp, Artificial Sequence
  chemically synthesized
gtgtgctgcctcagcccatgcc

SEQ ID NO: 60881 - DNA, 22 bp, Artificial Sequence
  chemically synthesized
tgtgctgcctcagcccatgcca

SEQ ID NO: 60882 - DNA, 22 bp, Artificial Sequence
  chemically synthesized
cctcagcccatgccaggccacc

SEQ ID NO: 60883 - DNA, 22 bp, Artificial Sequence
  chemically synthesized
agcccatgccaggccacctgtg

SEQ ID NO: 60884 - DNA, 22 bp, Artificial Sequence
  chemically synthesized
tggctgtctgccctcaagtctg

SEQ ID NO: 60885 - DNA, 22 bp, Artificial Sequence
  chemically synthesized
tctgccctcaagtctgtccttc

SEQ ID NO: 60886 - DNA, 22 bp, Artificial Sequence
  chemically synthesized
ccctcaagtctgtccttctctg

SEQ ID NO: 60887 - DNA, 22 bp, Artificial Sequence
  chemically synthesized
aagtctgtccttctctgaggat

SEQ ID NO: 60888 - DNA, 22 bp, Artificial Sequence
  chemically synthesized
tccttctctgaggatttaggac

SEQ ID NO: 60889 - DNA, 22 bp, Artificial Sequence
  chemically synthesized
ctctgaggatttaggactgtga

SEQ ID NO: 60890 - DNA, 22 bp, Artificial Sequence
  chemically synthesized
tctgaggatttaggactgtgaa

SEQ ID NO: 60891 - DNA, 22 bp, Artificial Sequence
  chemically synthesized
tgaggatttaggactgtgaacc

SEQ ID NO: 60892 - DNA, 22 bp, Artificial Sequence
  chemically synthesized
aggatttaggactgtgaaccta

SEQ ID NO: 60893 - DNA, 22 bp, Artificial Sequence
  chemically synthesized
aggactgtgaacctagagaatt

SEQ ID NO: 60894 - DNA, 22 bp, Artificial Sequence
  chemically synthesized
ggactgtgaacctagagaattc

SEQ ID NO: 60895 - DNA, 22 bp, Artificial Sequence
  chemically synthesized
tgaacctagagaattcaaagta

SEQ ID NO: 60896 - DNA, 22 bp, Artificial Sequence
  chemically synthesized
gagaattcaaagtagtggaact

SEQ ID NO: 60897 - DNA, 22 bp, Artificial Sequence
  chemically synthesized
aaagtagtggaactagaatcca

SEQ ID NO: 60898 - DNA, 22 bp, Artificial Sequence
  chemically synthesized
gaatccaggtctcgactcaatc

SEQ ID NO: 60899 - DNA, 22 bp, Artificial Sequence
  chemically synthesized
gactcaatccagggagttttgc

SEQ ID NO: 60900 - DNA, 22 bp, Artificial Sequence
  chemically synthesized
aatccagggagttttgctcacc

SEQ ID NO: 60901 - DNA, 22 bp, Artificial Sequence
  chemically synthesized
tgctcaccacaagccaggaaca

SEQ ID NO: 60902 - DNA, 22 bp, Artificial Sequence
  chemically synthesized
gctcaccacaagccaggaacag

SEQ ID NO: 60903 - DNA, 22 bp, Artificial Sequence
  chemically synthesized
ctcaccacaagccaggaacagc

SEQ ID NO: 60904 - DNA, 22 bp, Artificial Sequence
  chemically synthesized
accacaagccaggaacagcttc

SEQ ID NO: 60905 - DNA, 22 bp, Artificial Sequence
  chemically synthesized
ctcttcatggaggtgcctgtct

SEQ ID NO: 60906 - DNA, 22 bp, Artificial Sequence
  chemically synthesized
tcttcatggaggtgcctgtctg

SEQ ID NO: 60907 - DNA, 22 bp, Artificial Sequence
  chemically synthesized
ttcatggaggtgcctgtctgga

SEQ ID NO: 60908 - DNA, 22 bp, Artificial Sequence
  chemically synthesized
catggaggtgcctgtctggaag

SEQ ID NO: 60909 - DNA, 22 bp, Artificial Sequence
  chemically synthesized
atggaggtgcctgtctggaagg

SEQ ID NO: 60910 - DNA, 22 bp, Artificial Sequence
  chemically synthesized
tctggaaggcagagaatctctg

SEQ ID NO: 60911 - DNA, 22 bp, Artificial Sequence
  chemically synthesized
gaaggcagagaatctctggctt

SEQ ID NO: 60912 - DNA, 22 bp, Artificial Sequence
  chemically synthesized
tggcttgttgagaagagagagt

SEQ ID NO: 60913 - DNA, 22 bp, Artificial Sequence
  chemically synthesized
gcttgttgagaagagagagtct

SEQ ID NO: 60914 - DNA, 22 bp, Artificial Sequence
  chemically synthesized
gttgagaagagagagtctgccc

SEQ ID NO: 60915 - DNA, 22 bp, Artificial Sequence
  chemically synthesized
ttgagaagagagagtctgccct

SEQ ID NO: 60916 - DNA, 22 bp, Artificial Sequence
  chemically synthesized
agaagagagagtctgcccttca

SEQ ID NO: 60917 - DNA, 22 bp, Artificial Sequence
  chemically synthesized
cccttcagactgcaaggtgttc

SEQ ID NO: 60918 - DNA, 22 bp, Artificial Sequence
  chemically synthesized
cagactgcaaggtgttcactgc

SEQ ID NO: 60919 - DNA, 22 bp, Artificial Sequence
  chemically synthesized
agactgcaaggtgttcactgca

SEQ ID NO: 60920 - DNA, 22 bp, Artificial Sequence
  chemically synthesized
caaggtgttcactgcataggac

SEQ ID NO: 60921 - DNA, 22 bp, Artificial Sequence
  chemically synthesized
actgcataggacccttcgtagg

SEQ ID NO: 60922 - DNA, 22 bp, Artificial Sequence
  chemically synthesized
cataggacccttcgtaggtgct

SEQ ID NO: 60923 - DNA, 22 bp, Artificial Sequence
  chemically synthesized
cgtaggtgctgacccagctgtg

SEQ ID NO: 60924 - DNA, 22 bp, Artificial Sequence
  chemically synthesized
gtaggtgctgacccagctgtgc

SEQ ID NO: 60925 - DNA, 22 bp, Artificial Sequence
  chemically synthesized
acccagctgtgcccagtgctag

SEQ ID NO: 60926 - DNA, 22 bp, Artificial Sequence
  chemically synthesized
tgcccagtgctagagctaggac

SEQ ID NO: 60927 - DNA, 22 bp, Artificial Sequence
  chemically synthesized
gagctaggactcagttctattt

SEQ ID NO: 60928 - DNA, 22 bp, Artificial Sequence
  chemically synthesized
ggactcagttctattttcccag

SEQ ID NO: 60929 - DNA, 22 bp, Artificial Sequence
  chemically synthesized
agttctattttcccagagagtg

SEQ ID NO: 60930 - DNA, 22 bp, Artificial Sequence
  chemically synthesized
tattttcccagagagtggtgtg

SEQ ID NO: 60931 - DNA, 22 bp, Artificial Sequence
  chemically synthesized
ttttcccagagagtggtgtgat

SEQ ID NO: 60932 - DNA, 22 bp, Artificial Sequence
  chemically synthesized
tcccagagagtggtgtgatggg

SEQ ID NO: 60933 - DNA, 22 bp, Artificial Sequence
  chemically synthesized
cccagagagtggtgtgatggga

SEQ ID NO: 60934 - DNA, 22 bp, Artificial Sequence
  chemically synthesized
ccagagagtggtgtgatgggag

SEQ ID NO: 60935 - DNA, 22 bp, Artificial Sequence
  chemically synthesized
tttctttttcttttttcagtcc

SEQ ID NO: 60936 - DNA, 22 bp, Artificial Sequence
  chemically synthesized
ctttttcttttttcagtcctga

SEQ ID NO: 60937 - DNA, 22 bp, Artificial Sequence
  chemically synthesized
tttttcttttttcagtcctgat

SEQ ID NO: 60938 - DNA, 22 bp, Artificial Sequence
  chemically synthesized
tttcttttttcagtcctgatca

SEQ ID NO: 60939 - DNA, 22 bp, Artificial Sequence
  chemically synthesized
ttcttttttcagtcctgatcag

SEQ ID NO: 60940 - DNA, 22 bp, Artificial Sequence
  chemically synthesized
tcttttttcagtcctgatcagg

SEQ ID NO: 60941 - DNA, 22 bp, Artificial Sequence
  chemically synthesized
cttttttcagtcctgatcaggg

SEQ ID NO: 60942 - DNA, 22 bp, Artificial Sequence
  chemically synthesized
ttttttcagtcctgatcaggga

SEQ ID NO: 60943 - DNA, 22 bp, Artificial Sequence
  chemically synthesized
ttttcagtcctgatcagggatg

SEQ ID NO: 60944 - DNA, 22 bp, Artificial Sequence
  chemically synthesized
tttcagtcctgatcagggatga

SEQ ID NO: 60945 - DNA, 22 bp, Artificial Sequence
  chemically synthesized
ttcagtcctgatcagggatgag

SEQ ID NO: 60946 - DNA, 22 bp, Artificial Sequence
  chemically synthesized
tcagtcctgatcagggatgagt

SEQ ID NO: 60947 - DNA, 22 bp, Artificial Sequence
  chemically synthesized
cagtcctgatcagggatgagtc

SEQ ID NO: 60948 - DNA, 22 bp, Artificial Sequence
  chemically synthesized
agtcctgatcagggatgagtcc

SEQ ID NO: 60949 - DNA, 22 bp, Artificial Sequence
  chemically synthesized
atcagggatgagtccgtgctgt

SEQ ID NO: 60950 - DNA, 22 bp, Artificial Sequence
  chemically synthesized
ttgggtttattcatttacttta

SEQ ID NO: 60951 - DNA, 22 bp, Artificial Sequence
  chemically synthesized
ggtttattcatttactttagcg

SEQ ID NO: 60952 - DNA, 22 bp, Artificial Sequence
  chemically synthesized
attcatttactttagcgtgtga

SEQ ID NO: 60953 - DNA, 22 bp, Artificial Sequence
  chemically synthesized
ttcatttactttagcgtgtgag

SEQ ID NO: 60954 - DNA, 22 bp, Artificial Sequence
  chemically synthesized
atttactttagcgtgtgagtgg

SEQ ID NO: 60955 - DNA, 22 bp, Artificial Sequence
  chemically synthesized
actttagcgtgtgagtggggag

SEQ ID NO: 60956 - DNA, 22 bp, Artificial Sequence
  chemically synthesized
ctttagcgtgtgagtggggaga

SEQ ID NO: 60957 - DNA, 22 bp, Artificial Sequence
  chemically synthesized
tagcgtgtgagtggggagatgg

SEQ ID NO: 60958 - DNA, 22 bp, Artificial Sequence
  chemically synthesized
agcgtgtgagtggggagatgga

SEQ ID NO: 60959 - DNA, 22 bp, Artificial Sequence
  chemically synthesized
gcgtgtgagtggggagatggat

SEQ ID NO: 60960 - DNA, 22 bp, Artificial Sequence
  chemically synthesized
ggcagcaggcccttggaagggt

SEQ ID NO: 60961 - DNA, 22 bp, Artificial Sequence
  chemically synthesized
ggaagggtgggaagattcagaa

SEQ ID NO: 60962 - DNA, 22 bp, Artificial Sequence
  chemically synthesized
gaagggtgggaagattcagaag

SEQ ID NO: 60963 - DNA, 22 bp, Artificial Sequence
  chemically synthesized
agaagagagagggcaggactgg

SEQ ID NO: 60964 - DNA, 22 bp, Artificial Sequence
  chemically synthesized
ggaagatccagacaggacatga

SEQ ID NO: 60965 - DNA, 22 bp, Artificial Sequence
  chemically synthesized
gctccacaaagagagaagcagc

SEQ ID NO: 60966 - DNA, 22 bp, Artificial Sequence
  chemically synthesized
ctccacaaagagagaagcagca

SEQ ID NO: 60967 - DNA, 22 bp, Artificial Sequence
  chemically synthesized
cacaaagagagaagcagcagga

SEQ ID NO: 60968 - DNA, 22 bp, Artificial Sequence
  chemically synthesized
tggctagaggctaacccaacac

SEQ ID NO: 60969 - DNA, 22 bp, Artificial Sequence
  chemically synthesized
gctagaggctaacccaacaccc

SEQ ID NO: 60970 - DNA, 22 bp, Artificial Sequence
  chemically synthesized
gaggctaacccaacacccacac

SEQ ID NO: 60971 - DNA, 22 bp, Artificial Sequence
  chemically synthesized
acccaacacccacacctgccaa

SEQ ID NO: 60972 - DNA, 22 bp, Artificial Sequence
  chemically synthesized
ccaaaggggttcccatggggtg

SEQ ID NO: 60973 - DNA, 22 bp, Artificial Sequence
  chemically synthesized
ccatggggtggctggcttgagg

SEQ ID NO: 60974 - DNA, 22 bp, Artificial Sequence
  chemically synthesized
gcttgaggggatctgggcgctg

SEQ ID NO: 60975 - DNA, 22 bp, Artificial Sequence
  chemically synthesized
gaggggatctgggcgctggttt

SEQ ID NO: 60976 - DNA, 22 bp, Artificial Sequence
  chemically synthesized
aggggatctgggcgctggtttc

SEQ ID NO: 60977 - DNA, 22 bp, Artificial Sequence
  chemically synthesized
ggcgctggtttctgctgtggac

SEQ ID NO: 60978 - DNA, 22 bp, Artificial Sequence
  chemically synthesized
gtttctgctgtggacagcctca

SEQ ID NO: 60979 - DNA, 22 bp, Artificial Sequence
  chemically synthesized
ctgctgtggacagcctcaagtg

SEQ ID NO: 60980 - DNA, 22 bp, Artificial Sequence
  chemically synthesized
tgctgtggacagcctcaagtgg

SEQ ID NO: 60981 - DNA, 22 bp, Artificial Sequence
  chemically synthesized
ctgtggacagcctcaagtgggg

SEQ ID NO: 60982 - DNA, 22 bp, Artificial Sequence
  chemically synthesized
tggacagcctcaagtggggcgt

SEQ ID NO: 60983 - DNA, 22 bp, Artificial Sequence
  chemically synthesized
aagtggggcgtggaggcagcat

SEQ ID NO: 60984 - DNA, 22 bp, Artificial Sequence
  chemically synthesized
cagaagcacccggcagatggct

SEQ ID NO: 60985 - DNA, 22 bp, Artificial Sequence
  chemically synthesized
ctgagggagcagggactccttc

SEQ ID NO: 60986 - DNA, 22 bp, Artificial Sequence
  chemically synthesized
agggagcagggactccttctag

SEQ ID NO: 60987 - DNA, 22 bp, Artificial Sequence
  chemically synthesized
cttctagtgccactcctgggac

SEQ ID NO: 60988 - DNA, 22 bp, Artificial Sequence
  chemically synthesized
ctagtgccactcctgggactaa

SEQ ID NO: 60989 - DNA, 22 bp, Artificial Sequence
  chemically synthesized
tagtgccactcctgggactaaa

SEQ ID NO: 60990 - DNA, 22 bp, Artificial Sequence
  chemically synthesized
gtgccactcctgggactaaatt

SEQ ID NO: 60991 - DNA, 22 bp, Artificial Sequence
  chemically synthesized
ctgggactaaattccttgtccc

SEQ ID NO: 60992 - DNA, 22 bp, Artificial Sequence
  chemically synthesized
ggactaaattccttgtcccctc

SEQ ID NO: 60993 - DNA, 22 bp, Artificial Sequence
  chemically synthesized
aattccttgtcccctccttgtc

SEQ ID NO: 60994 - DNA, 22 bp, Artificial Sequence
  chemically synthesized
cttgtcccctccttgtctcata

SEQ ID NO: 60995 - DNA, 22 bp, Artificial Sequence
  chemically synthesized
gtcccctccttgtctcatattt

SEQ ID NO: 60996 - DNA, 22 bp, Artificial Sequence
  chemically synthesized
tcccctccttgtctcatattta

SEQ ID NO: 60997 - DNA, 22 bp, Artificial Sequence
  chemically synthesized
cttgtctcatatttagcatctt

SEQ ID NO: 60998 - DNA, 22 bp, Artificial Sequence
  chemically synthesized
gtctcatatttagcatcttgga

SEQ ID NO: 60999 - DNA, 22 bp, Artificial Sequence
  chemically synthesized
tctcatatttagcatcttggag

SEQ ID NO: 61000 - DNA, 22 bp, Artificial Sequence
  chemically synthesized
atatttagcatcttggagccgt

SEQ ID NO: 61001 - DNA, 22 bp, Artificial Sequence
  chemically synthesized
agcatcttggagccgtgtcagc

SEQ ID NO: 61002 - DNA, 22 bp, Artificial Sequence
  chemically synthesized
gcatcttggagccgtgtcagct

SEQ ID NO: 61003 - DNA, 22 bp, Artificial Sequence
  chemically synthesized
ggagccgtgtcagctgcagaga

SEQ ID NO: 61004 - DNA, 22 bp, Artificial Sequence
  chemically synthesized
gagccgtgtcagctgcagagac

SEQ ID NO: 61005 - DNA, 22 bp, Artificial Sequence
  chemically synthesized
cagagactggagtccggggcat

SEQ ID NO: 61006 - DNA, 22 bp, Artificial Sequence
  chemically synthesized
gagtccggggcatgatggggat

SEQ ID NO: 61007 - DNA, 22 bp, Artificial Sequence
  chemically synthesized
aaacctagtgagagtcatcctg

SEQ ID NO: 61008 - DNA, 22 bp, Artificial Sequence
  chemically synthesized
gtgagagtcatcctgactctgg

SEQ ID NO: 61009 - DNA, 22 bp, Artificial Sequence
  chemically synthesized
actctggggaagagccgctcaa

SEQ ID NO: 61010 - DNA, 22 bp, Artificial Sequence
  chemically synthesized
tggggaagagccgctcaaagat

SEQ ID NO: 61011 - DNA, 22 bp, Artificial Sequence
  chemically synthesized
gggaagagccgctcaaagatga

SEQ ID NO: 61012 - DNA, 22 bp, Artificial Sequence
  chemically synthesized
aaagatgagaaagataaagtaa

SEQ ID NO: 61013 - DNA, 22 bp, Artificial Sequence
  chemically synthesized
gccacccccaacccctcacagg

SEQ ID NO: 61014 - DNA, 22 bp, Artificial Sequence
  chemically synthesized
ccacccccaacccctcacaggc

SEQ ID NO: 61015 - DNA, 22 bp, Artificial Sequence
  chemically synthesized
acaggctagactatccatggat

SEQ ID NO: 61016 - DNA, 22 bp, Artificial Sequence
  chemically synthesized
gactatccatggatttcagtgg

SEQ ID NO: 61017 - DNA, 22 bp, Artificial Sequence
  chemically synthesized
tccatggatttcagtggggtgg

SEQ ID NO: 61018 - DNA, 22 bp, Artificial Sequence
  chemically synthesized
cagtggggtggtgagtcctcat

SEQ ID NO: 61019 - DNA, 22 bp, Artificial Sequence
  chemically synthesized
agtggggtggtgagtcctcatg

SEQ ID NO: 61020 - DNA, 22 bp, Artificial Sequence
  chemically synthesized
atgatccctgaacctctcctca

SEQ ID NO: 61021 - DNA, 22 bp, Artificial Sequence
  chemically synthesized
aacctctcctcaaatggtgact

SEQ ID NO: 61022 - DNA, 22 bp, Artificial Sequence
  chemically synthesized
tcctcaaatggtgactgttctg

SEQ ID NO: 61023 - DNA, 22 bp, Artificial Sequence
  chemically synthesized
ctcaaatggtgactgttctggg

SEQ ID NO: 61024 - DNA, 22 bp, Artificial Sequence
  chemically synthesized
aaatggtgactgttctgggggt

SEQ ID NO: 61025 - DNA, 22 bp, Artificial Sequence
  chemically synthesized
ttctgggggtcctttctctgcc

SEQ ID NO: 61026 - DNA, 22 bp, Artificial Sequence
  chemically synthesized
tgggggtcctttctctgccttt

SEQ ID NO: 61027 - DNA, 22 bp, Artificial Sequence
  chemically synthesized
ggggtcctttctctgcctttct

SEQ ID NO: 61028 - DNA, 22 bp, Artificial Sequence
  chemically synthesized
tctctgcctttctcagggggta

SEQ ID NO: 61029 - DNA, 22 bp, Artificial Sequence
  chemically synthesized
ctctgcctttctcagggggtaa

SEQ ID NO: 61030 - DNA, 22 bp, Artificial Sequence
  chemically synthesized
tctgcctttctcagggggtaac

SEQ ID NO: 61031 - DNA, 22 bp, Artificial Sequence
  chemically synthesized
tgcctttctcagggggtaacca

SEQ ID NO: 61032 - DNA, 22 bp, Artificial Sequence
  chemically synthesized
cctttctcagggggtaaccaga

SEQ ID NO: 61033 - DNA, 22 bp, Artificial Sequence
  chemically synthesized
tctcagggggtaaccagaggtg

SEQ ID NO: 61034 - DNA, 22 bp, Artificial Sequence
  chemically synthesized
ctcagggggtaaccagaggtgg

SEQ ID NO: 61035 - DNA, 22 bp, Artificial Sequence
  chemically synthesized
tcagggggtaaccagaggtggt

SEQ ID NO: 61036 - DNA, 22 bp, Artificial Sequence
  chemically synthesized
agggggtaaccagaggtggtgg

SEQ ID NO: 61037 - DNA, 22 bp, Artificial Sequence
  chemically synthesized
tgactcgtcagctgttgctctg

SEQ ID NO: 61038 - DNA, 22 bp, Artificial Sequence
  chemically synthesized
gtcagctgttgctctgtgtgtt

SEQ ID NO: 61039 - DNA, 22 bp, Artificial Sequence
  chemically synthesized
ttgctctgtgtgttcatttttg

SEQ ID NO: 61040 - DNA, 22 bp, Artificial Sequence
  chemically synthesized
ctctgtgtgttcatttttgaga

SEQ ID NO: 61041 - DNA, 22 bp, Artificial Sequence
  chemically synthesized
tgtgtgttcatttttgagaaaa

SEQ ID NO: 61042 - DNA, 22 bp, Artificial Sequence
  chemically synthesized
tgtgttcatttttgagaaaatg

SEQ ID NO: 61043 - DNA, 22 bp, Artificial Sequence
  chemically synthesized
atttttgagaaaatgttaatct

SEQ ID NO: 61044 - DNA, 22 bp, Artificial Sequence
  chemically synthesized
ttgagaaaatgttaatctctga

SEQ ID NO: 61045 - DNA, 22 bp, Artificial Sequence
  chemically synthesized
tgagaaaatgttaatctctgag

SEQ ID NO: 61046 - DNA, 22 bp, Artificial Sequence
  chemically synthesized
gagaaaatgttaatctctgaga

SEQ ID NO: 61047 - DNA, 22 bp, Artificial Sequence
  chemically synthesized
agaaaatgttaatctctgagac

SEQ ID NO: 61048 - DNA, 22 bp, Artificial Sequence
  chemically synthesized
atctctgagacgtctaagaggt

SEQ ID NO: 61049 - DNA, 22 bp, Artificial Sequence
  chemically synthesized
tgagacgtctaagaggtgaaac

SEQ ID NO: 61050 - DNA, 22 bp, Artificial Sequence
  chemically synthesized
agacgtctaagaggtgaaactc

SEQ ID NO: 61051 - DNA, 22 bp, Artificial Sequence
  chemically synthesized
agaggtgaaactcctttctctg

SEQ ID NO: 61052 - DNA, 22 bp, Artificial Sequence
  chemically synthesized
ctttctctgtgtctcctccaaa

SEQ ID NO: 61053 - DNA, 22 bp, Artificial Sequence
  chemically synthesized
tctctgtgtctcctccaaatgg

SEQ ID NO: 61054 - DNA, 22 bp, Artificial Sequence
  chemically synthesized
ctctgtgtctcctccaaatgga

SEQ ID NO: 61055 - DNA, 22 bp, Artificial Sequence
  chemically synthesized
tctgtgtctcctccaaatggat

SEQ ID NO: 61056 - DNA, 22 bp, Artificial Sequence
  chemically synthesized
tgtgtctcctccaaatggatgc

SEQ ID NO: 61057 - DNA, 22 bp, Artificial Sequence
  chemically synthesized
tgtctcctccaaatggatgcca

SEQ ID NO: 61058 - DNA, 22 bp, Artificial Sequence
  chemically synthesized
ctccaaatggatgccatgtggg

SEQ ID NO: 61059 - DNA, 22 bp, Artificial Sequence
  chemically synthesized
caaatggatgccatgtgggtgg

SEQ ID NO: 61060 - DNA, 22 bp, Artificial Sequence
  chemically synthesized
ggtttattcatttactttaggt

SEQ ID NO: 61061 - DNA, 22 bp, Artificial Sequence
  chemically synthesized
attcatttactttaggtgtgta

SEQ ID NO: 61062 - DNA, 22 bp, Artificial Sequence
  chemically synthesized
ttcatttactttaggtgtgtat

SEQ ID NO: 61063 - DNA, 22 bp, Artificial Sequence
  chemically synthesized
atttactttaggtgtgtattgt

SEQ ID NO: 61064 - DNA, 22 bp, Artificial Sequence
  chemically synthesized
actttaggtgtgtattgtagta

SEQ ID NO: 61065 - DNA, 22 bp, Artificial Sequence
  chemically synthesized
ctttaggtgtgtattgtagtaa

SEQ ID NO: 61066 - DNA, 22 bp, Artificial Sequence
  chemically synthesized
taggtgtgtattgtagtaaaac

SEQ ID NO: 61067 - DNA, 22 bp, Artificial Sequence
  chemically synthesized
aggtgtgtattgtagtaaaacc

SEQ ID NO: 61068 - DNA, 22 bp, Artificial Sequence
  chemically synthesized
ggtgtgtattgtagtaaaacct

SEQ ID NO: 61069 - DNA, 22 bp, Artificial Sequence
  chemically synthesized
tagtaaaacctgcttgttctcc

SEQ ID NO: 61070 - DNA, 22 bp, Artificial Sequence
  chemically synthesized
cttgttctcctatccgtcatca

SEQ ID NO: 61071 - DNA, 22 bp, Artificial Sequence
  chemically synthesized
gttctcctatccgtcatcagag

SEQ ID NO: 61072 - DNA, 22 bp, Artificial Sequence
  chemically synthesized
ttctcctatccgtcatcagagg

SEQ ID NO: 61073 - DNA, 22 bp, Artificial Sequence
  chemically synthesized
tcctatccgtcatcagaggtga

SEQ ID NO: 61074 - DNA, 22 bp, Artificial Sequence
  chemically synthesized
ctatccgtcatcagaggtgact

SEQ ID NO: 61075 - DNA, 22 bp, Artificial Sequence
  chemically synthesized
tccgtcatcagaggtgactcat

SEQ ID NO: 61076 - DNA, 22 bp, Artificial Sequence
  chemically synthesized
atacttgagacactaaaagaga

SEQ ID NO: 61077 - DNA, 22 bp, Artificial Sequence
  chemically synthesized
gagacactaaaagagaataaac

SEQ ID NO: 61078 - DNA, 22 bp, Artificial Sequence
  chemically synthesized
agacactaaaagagaataaact

SEQ ID NO: 61079 - DNA, 22 bp, Artificial Sequence
  chemically synthesized
aaagagaataaactgtcttcat

SEQ ID NO: 61080 - DNA, 22 bp, Artificial Sequence
  chemically synthesized
tcttcataaggctgtgaacgtc

SEQ ID NO: 61081 - DNA, 22 bp, Artificial Sequence
  chemically synthesized
cataaggctgtgaacgtcgcca

SEQ ID NO: 61082 - DNA, 22 bp, Artificial Sequence
  chemically synthesized
ataaggctgtgaacgtcgccag

SEQ ID NO: 61083 - DNA, 22 bp, Artificial Sequence
  chemically synthesized
tgaacgtcgccagattatgaac

SEQ ID NO: 61084 - DNA, 22 bp, Artificial Sequence
  chemically synthesized
tgaaccaacttcaagtaacgta

SEQ ID NO: 61085 - DNA, 22 bp, Artificial Sequence
  chemically synthesized
caagtaacgtagggatgccttg

SEQ ID NO: 61086 - DNA, 22 bp, Artificial Sequence
  chemically synthesized
aagtaacgtagggatgccttga

SEQ ID NO: 61087 - DNA, 22 bp, Artificial Sequence
  chemically synthesized
gataattatattattgaaacca

SEQ ID NO: 61088 - DNA, 22 bp, Artificial Sequence
  chemically synthesized
ataattatattattgaaaccat

SEQ ID NO: 61089 - DNA, 22 bp, Artificial Sequence
  chemically synthesized
tattattgaaaccatctccaat

SEQ ID NO: 61090 - DNA, 22 bp, Artificial Sequence
  chemically synthesized
ttgaaaccatctccaattagat

SEQ ID NO: 61091 - DNA, 22 bp, Artificial Sequence
  chemically synthesized
aaaccatctccaattagatatg

SEQ ID NO: 61092 - DNA, 22 bp, Artificial Sequence
  chemically synthesized
caattagatatgcaaaatggag

SEQ ID NO: 61093 - DNA, 22 bp, Artificial Sequence
  chemically synthesized
gatatgcaaaatggagttgctg

SEQ ID NO: 61094 - DNA, 22 bp, Artificial Sequence
  chemically synthesized
ctgggggcttcagttttcttta

SEQ ID NO: 61095 - DNA, 22 bp, Artificial Sequence
  chemically synthesized
ggggcttcagttttctttagac

SEQ ID NO: 61096 - DNA, 22 bp, Artificial Sequence
  chemically synthesized
cagttttctttagaccaaataa

SEQ ID NO: 61097 - DNA, 22 bp, Artificial Sequence
  chemically synthesized
agttttctttagaccaaataat

SEQ ID NO: 61098 - DNA, 22 bp, Artificial Sequence
  chemically synthesized
tctttagaccaaataatttaga

SEQ ID NO: 61099 - DNA, 22 bp, Artificial Sequence
  chemically synthesized
ctttagaccaaataatttagag

SEQ ID NO: 61100 - DNA, 22 bp, Artificial Sequence
  chemically synthesized
tttagaccaaataatttagagc

SEQ ID NO: 61101 - DNA, 22 bp, Artificial Sequence
  chemically synthesized
tagaccaaataatttagagctg

SEQ ID NO: 61102 - DNA, 22 bp, Artificial Sequence
  chemically synthesized
agaccaaataatttagagctga

SEQ ID NO: 61103 - DNA, 22 bp, Artificial Sequence
  chemically synthesized
gaccaaataatttagagctgag

SEQ ID NO: 61104 - DNA, 22 bp, Artificial Sequence
  chemically synthesized
agagctgagaggagaggcagat

SEQ ID NO: 61105 - DNA, 22 bp, Artificial Sequence
  chemically synthesized
gagctgagaggagaggcagata

SEQ ID NO: 61106 - DNA, 22 bp, Artificial Sequence
  chemically synthesized
agaggagaggcagataccatct

SEQ ID NO: 61107 - DNA, 22 bp, Artificial Sequence
  chemically synthesized
gtctcactttttacaatttagc

SEQ ID NO: 61108 - DNA, 22 bp, Artificial Sequence
  chemically synthesized
actttttacaatttagcattgg

SEQ ID NO: 61109 - DNA, 22 bp, Artificial Sequence
  chemically synthesized
tttacaatttagcattggattt

SEQ ID NO: 61110 - DNA, 22 bp, Artificial Sequence
  chemically synthesized
ttacaatttagcattggatttg

SEQ ID NO: 61111 - DNA, 22 bp, Artificial Sequence
  chemically synthesized
tacaatttagcattggatttgt

SEQ ID NO: 61112 - DNA, 22 bp, Artificial Sequence
  chemically synthesized
acaatttagcattggatttgtt

SEQ ID NO: 61113 - DNA, 22 bp, Artificial Sequence
  chemically synthesized
caatttagcattggatttgttg

SEQ ID NO: 61114 - DNA, 22 bp, Artificial Sequence
  chemically synthesized
agcattggatttgttgagcatg

SEQ ID NO: 61115 - DNA, 22 bp, Artificial Sequence
  chemically synthesized
gcattggatttgttgagcatgt

SEQ ID NO: 61116 - DNA, 22 bp, Artificial Sequence
  chemically synthesized
gatttgttgagcatgtactctc

SEQ ID NO: 61117 - DNA, 22 bp, Artificial Sequence
  chemically synthesized
gttgagcatgtactctctgcag

SEQ ID NO: 61118 - DNA, 22 bp, Artificial Sequence
  chemically synthesized
ttgagcatgtactctctgcaga

SEQ ID NO: 61119 - DNA, 22 bp, Artificial Sequence
  chemically synthesized
agcatgtactctctgcagagca

SEQ ID NO: 61120 - DNA, 22 bp, Artificial Sequence
  chemically synthesized
tctgcagagcattgtgataggt

SEQ ID NO: 61121 - DNA, 22 bp, Artificial Sequence
  chemically synthesized
tgcagagcattgtgataggttc

SEQ ID NO: 61122 - DNA, 22 bp, Artificial Sequence
  chemically synthesized
cagagcattgtgataggttctg

SEQ ID NO: 61123 - DNA, 22 bp, Artificial Sequence
  chemically synthesized
tgataggttctgggttgggagg

SEQ ID NO: 61124 - DNA, 22 bp, Artificial Sequence
  chemically synthesized
tgggttgggaggggagccggga

SEQ ID NO: 61125 - DNA, 22 bp, Artificial Sequence
  chemically synthesized
ggttgggaggggagccgggaag

SEQ ID NO: 61126 - DNA, 22 bp, Artificial Sequence
  chemically synthesized
ggaggggagccgggaaggcaag

SEQ ID NO: 61127 - DNA, 22 bp, Artificial Sequence
  chemically synthesized
tctcaaagctgcctttctcatt

SEQ ID NO: 61128 - DNA, 22 bp, Artificial Sequence
  chemically synthesized
tcaaagctgcctttctcatttg

SEQ ID NO: 61129 - DNA, 22 bp, Artificial Sequence
  chemically synthesized
aaagctgcctttctcatttgag

SEQ ID NO: 61130 - DNA, 22 bp, Artificial Sequence
  chemically synthesized
cctttctcatttgagaggcgag

SEQ ID NO: 61131 - DNA, 22 bp, Artificial Sequence
  chemically synthesized
tctcatttgagaggcgagtgtg

SEQ ID NO: 61132 - DNA, 22 bp, Artificial Sequence
  chemically synthesized
ctcatttgagaggcgagtgtgt

SEQ ID NO: 61133 - DNA, 22 bp, Artificial Sequence
  chemically synthesized
tcatttgagaggcgagtgtgtg

SEQ ID NO: 61134 - DNA, 22 bp, Artificial Sequence
  chemically synthesized
atttgagaggcgagtgtgtgtg

SEQ ID NO: 61135 - DNA, 22 bp, Artificial Sequence
  chemically synthesized
gagaggcgagtgtgtgtggcac

SEQ ID NO: 61136 - DNA, 22 bp, Artificial Sequence
  chemically synthesized
agaggcgagtgtgtgtggcaca

SEQ ID NO: 61137 - DNA, 22 bp, Artificial Sequence
  chemically synthesized
tatacctgagagcaagatgtgc

SEQ ID NO: 61138 - DNA, 22 bp, Artificial Sequence
  chemically synthesized
atacctgagagcaagatgtgca

SEQ ID NO: 61139 - DNA, 22 bp, Artificial Sequence
  chemically synthesized
tacctgagagcaagatgtgcag

SEQ ID NO: 61140 - DNA, 22 bp, Artificial Sequence
  chemically synthesized
agagcaagatgtgcagccagga

SEQ ID NO: 61141 - DNA, 22 bp, Artificial Sequence
  chemically synthesized
aaggacacaggccaagggaggt

SEQ ID NO: 61142 - DNA, 22 bp, Artificial Sequence
  chemically synthesized
gcccaggccacccagttaccta

SEQ ID NO: 61143 - DNA, 22 bp, Artificial Sequence
  chemically synthesized
cccaggccacccagttacctag

SEQ ID NO: 61144 - DNA, 22 bp, Artificial Sequence
  chemically synthesized
cctagcacagctcagccacaag

SEQ ID NO: 61145 - DNA, 22 bp, Artificial Sequence
  chemically synthesized
gcacagctcagccacaagccca

SEQ ID NO: 61146 - DNA, 22 bp, Artificial Sequence
  chemically synthesized
agccacaagcccaaatgaatga

SEQ ID NO: 61147 - DNA, 22 bp, Artificial Sequence
  chemically synthesized
tgagttccacatcagcgcatcg

SEQ ID NO: 61148 - DNA, 22 bp, Artificial Sequence
  chemically synthesized
agttccacatcagcgcatcggg

SEQ ID NO: 61149 - DNA, 22 bp, Artificial Sequence
  chemically synthesized
cacatcagcgcatcgggcagcc

SEQ ID NO: 61150 - DNA, 22 bp, Artificial Sequence
  chemically synthesized
cacagtgacaggtggggctcta

SEQ ID NO: 61151 - DNA, 22 bp, Artificial Sequence
  chemically synthesized
taggtggcttcctttaaaacat

SEQ ID NO: 61152 - DNA, 22 bp, Artificial Sequence
  chemically synthesized
ggtggcttcctttaaaacatct

SEQ ID NO: 61153 - DNA, 22 bp, Artificial Sequence
  chemically synthesized
cctttaaaacatctgaggaaag

SEQ ID NO: 61154 - DNA, 22 bp, Artificial Sequence
  chemically synthesized
ctttaaaacatctgaggaaagc

SEQ ID NO: 61155 - DNA, 22 bp, Artificial Sequence
  chemically synthesized
taaaacatctgaggaaagcagg

SEQ ID NO: 61156 - DNA, 22 bp, Artificial Sequence
  chemically synthesized
aaaacatctgaggaaagcaggc

SEQ ID NO: 61157 - DNA, 22 bp, Artificial Sequence
  chemically synthesized
aaacatctgaggaaagcaggct

SEQ ID NO: 61158 - DNA, 22 bp, Artificial Sequence
  chemically synthesized
aggaaagcaggcttcctctctg

SEQ ID NO: 61159 - DNA, 22 bp, Artificial Sequence
  chemically synthesized
cctctctgactgctctccaggg

SEQ ID NO: 61160 - DNA, 22 bp, Artificial Sequence
  chemically synthesized
ctctctgactgctctccagggg

SEQ ID NO: 61161 - DNA, 22 bp, Artificial Sequence
  chemically synthesized
tctgactgctctccaggggtgg

SEQ ID NO: 61162 - DNA, 22 bp, Artificial Sequence
  chemically synthesized
tgactgctctccaggggtggtg

SEQ ID NO: 61163 - DNA, 22 bp, Artificial Sequence
  chemically synthesized
actgctctccaggggtggtgag

SEQ ID NO: 61164 - DNA, 22 bp, Artificial Sequence
  chemically synthesized
ctctccaggggtggtgagcaca

SEQ ID NO: 61165 - DNA, 22 bp, Artificial Sequence
  chemically synthesized
tccaggggtggtgagcacaggg

SEQ ID NO: 61166 - DNA, 22 bp, Artificial Sequence
  chemically synthesized
caggggtggtgagcacaggggt

SEQ ID NO: 61167 - DNA, 22 bp, Artificial Sequence
  chemically synthesized
atctgcagctccccagctccag

SEQ ID NO: 61168 - DNA, 22 bp, Artificial Sequence
  chemically synthesized
cagctccccagctccagtgctc

SEQ ID NO: 61169 - DNA, 22 bp, Artificial Sequence
  chemically synthesized
cccagctccagtgctccttagc

SEQ ID NO: 61170 - DNA, 22 bp, Artificial Sequence
  chemically synthesized
cagtgctccttagccttccaag

SEQ ID NO: 61171 - DNA, 22 bp, Artificial Sequence
  chemically synthesized
cttagccttccaagttgtttga

SEQ ID NO: 61172 - DNA, 22 bp, Artificial Sequence
  chemically synthesized
agccttccaagttgtttgaatt

SEQ ID NO: 61173 - DNA, 22 bp, Artificial Sequence
  chemically synthesized
gccttccaagttgtttgaatta

SEQ ID NO: 61174 - DNA, 22 bp, Artificial Sequence
  chemically synthesized
ccaagttgtttgaattaagttg

SEQ ID NO: 61175 - DNA, 22 bp, Artificial Sequence
  chemically synthesized
caagttgtttgaattaagttgc

SEQ ID NO: 61176 - DNA, 22 bp, Artificial Sequence
  chemically synthesized
tttgaattaagttgcaagccca

SEQ ID NO: 61177 - DNA, 22 bp, Artificial Sequence
  chemically synthesized
gaattaagttgcaagcccaggt

SEQ ID NO: 61178 - DNA, 22 bp, Artificial Sequence
  chemically synthesized
aattaagttgcaagcccaggtg

SEQ ID NO: 61179 - DNA, 22 bp, Artificial Sequence
  chemically synthesized
agttgcaagcccaggtggctgc

SEQ ID NO: 61180 - DNA, 22 bp, Artificial Sequence
  chemically synthesized
caagcccaggtggctgcacaca

SEQ ID NO: 61181 - DNA, 22 bp, Artificial Sequence
  chemically synthesized
cacacatattcattttggagtg

SEQ ID NO: 61182 - DNA, 22 bp, Artificial Sequence
  chemically synthesized
attttggagtgactgtgacact

SEQ ID NO: 61183 - DNA, 22 bp, Artificial Sequence
  chemically synthesized
tggagtgactgtgacacttgta

SEQ ID NO: 61184 - DNA, 22 bp, Artificial Sequence
  chemically synthesized
ggagtgactgtgacacttgtat

SEQ ID NO: 61185 - DNA, 22 bp, Artificial Sequence
  chemically synthesized
gagtgactgtgacacttgtatt

SEQ ID NO: 61186 - DNA, 22 bp, Artificial Sequence
  chemically synthesized
tgacacttgtatttcctgggaa

SEQ ID NO: 61187 - DNA, 22 bp, Artificial Sequence
  chemically synthesized
gtatttcctgggaagcgttact

SEQ ID NO: 61188 - DNA, 22 bp, Artificial Sequence
  chemically synthesized
tatttcctgggaagcgttacta

SEQ ID NO: 61189 - DNA, 22 bp, Artificial Sequence
  chemically synthesized
cctgggaagcgttactatgtct

SEQ ID NO: 61190 - DNA, 22 bp, Artificial Sequence
  chemically synthesized
ctgggaagcgttactatgtctt

SEQ ID NO: 61191 - DNA, 22 bp, Artificial Sequence
  chemically synthesized
ggaagcgttactatgtctttgg

SEQ ID NO: 61192 - DNA, 22 bp, Artificial Sequence
  chemically synthesized
ctatgtctttggccgagcaagt

SEQ ID NO: 61193 - DNA, 22 bp, Artificial Sequence
  chemically synthesized
tgtctttggccgagcaagtatt

SEQ ID NO: 61194 - DNA, 22 bp, Artificial Sequence
  chemically synthesized
tggccgagcaagtattacgcca

SEQ ID NO: 61195 - DNA, 22 bp, Artificial Sequence
  chemically synthesized
ggccgagcaagtattacgccat

SEQ ID NO: 61196 - DNA, 22 bp, Artificial Sequence
  chemically synthesized
gccgagcaagtattacgccatg

SEQ ID NO: 61197 - DNA, 22 bp, Artificial Sequence
  chemically synthesized
cgccatgagctggttccctttc

SEQ ID NO: 61198 - DNA, 22 bp, Artificial Sequence
  chemically synthesized
gttccctttcttttgcctttga

SEQ ID NO: 61199 - DNA, 22 bp, Artificial Sequence
  chemically synthesized
cctttcttttgcctttgaacac

SEQ ID NO: 61200 - DNA, 22 bp, Artificial Sequence
  chemically synthesized
tcttttgcctttgaacacctac

SEQ ID NO: 61201 - DNA, 22 bp, Artificial Sequence
  chemically synthesized
cttttgcctttgaacacctaca

SEQ ID NO: 61202 - DNA, 22 bp, Artificial Sequence
  chemically synthesized
ttttgcctttgaacacctacat

SEQ ID NO: 61203 - DNA, 22 bp, Artificial Sequence
  chemically synthesized
ttgcctttgaacacctacattg

SEQ ID NO: 61204 - DNA, 22 bp, Artificial Sequence
  chemically synthesized
tgcctttgaacacctacattgc

SEQ ID NO: 61205 - DNA, 22 bp, Artificial Sequence
  chemically synthesized
gcctttgaacacctacattgct

SEQ ID NO: 61206 - DNA, 22 bp, Artificial Sequence
  chemically synthesized
cctttgaacacctacattgctg

SEQ ID NO: 61207 - DNA, 22 bp, Artificial Sequence
  chemically synthesized
tgaacacctacattgctgggag

SEQ ID NO: 61208 - DNA, 22 bp, Artificial Sequence
  chemically synthesized
gaacacctacattgctgggagg

SEQ ID NO: 61209 - DNA, 22 bp, Artificial Sequence
  chemically synthesized
aacacctacattgctgggagga

SEQ ID NO: 61210 - DNA, 22 bp, Artificial Sequence
  chemically synthesized
cattgctgggaggataccttag

SEQ ID NO: 61211 - DNA, 22 bp, Artificial Sequence
  chemically synthesized
ctgggaggataccttagtgaga

SEQ ID NO: 61212 - DNA, 22 bp, Artificial Sequence
  chemically synthesized
ggaggataccttagtgagagtg

SEQ ID NO: 61213 - DNA, 22 bp, Artificial Sequence
  chemically synthesized
agtgagagtgcctgggccactg

SEQ ID NO: 61214 - DNA, 22 bp, Artificial Sequence
  chemically synthesized
gtgagagtgcctgggccactgg

SEQ ID NO: 61215 - DNA, 22 bp, Artificial Sequence
  chemically synthesized
ggccactgggcgtagcagagga

SEQ ID NO: 61216 - DNA, 22 bp, Artificial Sequence
  chemically synthesized
ggcgtagcagaggaagcacctc

SEQ ID NO: 61217 - DNA, 22 bp, Artificial Sequence
  chemically synthesized
atcattttactgatttatttga

SEQ ID NO: 61218 - DNA, 22 bp, Artificial Sequence
  chemically synthesized
tactgatttatttgaaagaaaa

SEQ ID NO: 61219 - DNA, 22 bp, Artificial Sequence
  chemically synthesized
actgatttatttgaaagaaaaa

SEQ ID NO: 61220 - DNA, 22 bp, Artificial Sequence
  chemically synthesized
ctgatttatttgaaagaaaaaa

SEQ ID NO: 61221 - DNA, 22 bp, Artificial Sequence
  chemically synthesized
atttatttgaaagaaaaaagct

SEQ ID NO: 61222 - DNA, 22 bp, Artificial Sequence
  chemically synthesized
atttgaaagaaaaaagctccct

SEQ ID NO: 61223 - DNA, 22 bp, Artificial Sequence
  chemically synthesized
tttgaaagaaaaaagctccctc

SEQ ID NO: 61224 - DNA, 22 bp, Artificial Sequence
  chemically synthesized
gaaagaaaaaagctccctccaa

SEQ ID NO: 61225 - DNA, 22 bp, Artificial Sequence
  chemically synthesized
aaagaaaaaagctccctccaac

SEQ ID NO: 61226 - DNA, 22 bp, Artificial Sequence
  chemically synthesized
cctccaacccttgccttcatag

SEQ ID NO: 61227 - DNA, 22 bp, Artificial Sequence
  chemically synthesized
caacccttgccttcatagaaac

SEQ ID NO: 61228 - DNA, 22 bp, Artificial Sequence
  chemically synthesized
gccttcatagaaacagagtgtt

SEQ ID NO: 61229 - DNA, 22 bp, Artificial Sequence
  chemically synthesized
ccttcatagaaacagagtgttg

SEQ ID NO: 61230 - DNA, 22 bp, Artificial Sequence
  chemically synthesized
catagaaacagagtgttgaaag

SEQ ID NO: 61231 - DNA, 22 bp, Artificial Sequence
  chemically synthesized
atagaaacagagtgttgaaagc

SEQ ID NO: 61232 - DNA, 22 bp, Artificial Sequence
  chemically synthesized
aaagcttggagaagaattaatg

SEQ ID NO: 61233 - DNA, 22 bp, Artificial Sequence
  chemically synthesized
ggagaagaattaatgactcccc

SEQ ID NO: 61234 - DNA, 22 bp, Artificial Sequence
  chemically synthesized
gagaagaattaatgactcccct

SEQ ID NO: 61235 - DNA, 22 bp, Artificial Sequence
  chemically synthesized
atgactcccctgccccttagtg

SEQ ID NO: 61236 - DNA, 22 bp, Artificial Sequence
  chemically synthesized
ccctgccccttagtgtcttaca

SEQ ID NO: 61237 - DNA, 22 bp, Artificial Sequence
  chemically synthesized
ccccttagtgtcttacatgact

SEQ ID NO: 61238 - DNA, 22 bp, Artificial Sequence
  chemically synthesized
agtgtcttacatgactagctgc

SEQ ID NO: 61239 - DNA, 22 bp, Artificial Sequence
  chemically synthesized
gtgtcttacatgactagctgct

SEQ ID NO: 61240 - DNA, 22 bp, Artificial Sequence
  chemically synthesized
acatgactagctgcttctttgc

SEQ ID NO: 61241 - DNA, 22 bp, Artificial Sequence
  chemically synthesized
catgactagctgcttctttgcc

SEQ ID NO: 61242 - DNA, 22 bp, Artificial Sequence
  chemically synthesized
gctgcttctttgcctactgcat

SEQ ID NO: 61243 - DNA, 22 bp, Artificial Sequence
  chemically synthesized
cttctttgcctactgcattttc

SEQ ID NO: 61244 - DNA, 22 bp, Artificial Sequence
  chemically synthesized
ctttgcctactgcattttcaac

SEQ ID NO: 61245 - DNA, 22 bp, Artificial Sequence
  chemically synthesized
tttgcctactgcattttcaact

SEQ ID NO: 61246 - DNA, 22 bp, Artificial Sequence
  chemically synthesized
tgcctactgcattttcaactta

SEQ ID NO: 61247 - DNA, 22 bp, Artificial Sequence
  chemically synthesized
gcctactgcattttcaacttat

SEQ ID NO: 61248 - DNA, 22 bp, Artificial Sequence
  chemically synthesized
cctactgcattttcaacttatt

SEQ ID NO: 61249 - DNA, 22 bp, Artificial Sequence
  chemically synthesized
ctgcattttcaacttatttcaa

SEQ ID NO: 61250 - DNA, 22 bp, Artificial Sequence
  chemically synthesized
cattttcaacttatttcaactt

SEQ ID NO: 61251 - DNA, 22 bp, Artificial Sequence
  chemically synthesized
tcaacttatttcaacttatttt

SEQ ID NO: 61252 - DNA, 22 bp, Artificial Sequence
  chemically synthesized
caacttatttcaacttattttc

SEQ ID NO: 61253 - DNA, 22 bp, Artificial Sequence
  chemically synthesized
aacttatttcaacttattttct

SEQ ID NO: 61254 - DNA, 22 bp, Artificial Sequence
  chemically synthesized
atttcaacttattttctgtggc

SEQ ID NO: 61255 - DNA, 22 bp, Artificial Sequence
  chemically synthesized
tttcaacttattttctgtggct

SEQ ID NO: 61256 - DNA, 22 bp, Artificial Sequence
  chemically synthesized
caacttattttctgtggcttgg

SEQ ID NO: 61257 - DNA, 22 bp, Artificial Sequence
  chemically synthesized
aacttattttctgtggcttgga

SEQ ID NO: 61258 - DNA, 22 bp, Artificial Sequence
  chemically synthesized
attttctgtggcttggaaaata

SEQ ID NO: 61259 - DNA, 22 bp, Artificial Sequence
  chemically synthesized
ttttctgtggcttggaaaatac

SEQ ID NO: 61260 - DNA, 22 bp, Artificial Sequence
  chemically synthesized
tctgtggcttggaaaatacgtt

SEQ ID NO: 61261 - DNA, 22 bp, Artificial Sequence
  chemically synthesized
ctgtggcttggaaaatacgttg

SEQ ID NO: 61262 - DNA, 22 bp, Artificial Sequence
  chemically synthesized
tgtggcttggaaaatacgttga

SEQ ID NO: 61263 - DNA, 22 bp, Artificial Sequence
  chemically synthesized
tggcttggaaaatacgttgact

SEQ ID NO: 61264 - DNA, 22 bp, Artificial Sequence
  chemically synthesized
ggaaaatacgttgactgagtga

SEQ ID NO: 61265 - DNA, 22 bp, Artificial Sequence
  chemically synthesized
gaaaatacgttgactgagtgat

SEQ ID NO: 61266 - DNA, 22 bp, Artificial Sequence
  chemically synthesized
actgagtgatgattgttttcat

SEQ ID NO: 61267 - DNA, 22 bp, Artificial Sequence
  chemically synthesized
agtgatgattgttttcatgaaa

SEQ ID NO: 61268 - DNA, 22 bp, Artificial Sequence
  chemically synthesized
ttttcatgaaatggtgcaacat

SEQ ID NO: 61269 - DNA, 22 bp, Artificial Sequence
  chemically synthesized
tcatgaaatggtgcaacatgta

SEQ ID NO: 61270 - DNA, 22 bp, Artificial Sequence
  chemically synthesized
catgaaatggtgcaacatgtaa

SEQ ID NO: 61271 - DNA, 22 bp, Artificial Sequence
  chemically synthesized
atgaaatggtgcaacatgtaaa

SEQ ID NO: 61272 - DNA, 22 bp, Artificial Sequence
  chemically synthesized
tcattaatagtgcagttatgta

SEQ ID NO: 61273 - DNA, 22 bp, Artificial Sequence
  chemically synthesized
atagtgcagttatgtagagtgt

SEQ ID NO: 61274 - DNA, 22 bp, Artificial Sequence
  chemically synthesized
tgtagagtgtagctctttgagt

SEQ ID NO: 61275 - DNA, 22 bp, Artificial Sequence
  chemically synthesized
tttgagtcttcagttttgaatc

SEQ ID NO: 61276 - DNA, 22 bp, Artificial Sequence
  chemically synthesized
tgagtcttcagttttgaatcag

SEQ ID NO: 61277 - DNA, 22 bp, Artificial Sequence
  chemically synthesized
gagtcttcagttttgaatcaga

SEQ ID NO: 61278 - DNA, 22 bp, Artificial Sequence
  chemically synthesized
agtcttcagttttgaatcagat

SEQ ID NO: 61279 - DNA, 22 bp, Artificial Sequence
  chemically synthesized
cagttttgaatcagattagcgc

SEQ ID NO: 61280 - DNA, 22 bp, Artificial Sequence
  chemically synthesized
agttttgaatcagattagcgct

SEQ ID NO: 61281 - DNA, 22 bp, Artificial Sequence
  chemically synthesized
tgaatcagattagcgctctgtt

SEQ ID NO: 61282 - DNA, 22 bp, Artificial Sequence
  chemically synthesized
gaatcagattagcgctctgtta

SEQ ID NO: 61283 - DNA, 22 bp, Artificial Sequence
  chemically synthesized
aatcagattagcgctctgttaa

SEQ ID NO: 61284 - DNA, 22 bp, Artificial Sequence
  chemically synthesized
gcgctctgttaacttaaaatag

SEQ ID NO: 61285 - DNA, 22 bp, Artificial Sequence
  chemically synthesized
tgttaacttaaaatagccccaa

SEQ ID NO: 61286 - DNA, 22 bp, Artificial Sequence
  chemically synthesized
ttaacttaaaatagccccaaaa

SEQ ID NO: 61287 - DNA, 22 bp, Artificial Sequence
  chemically synthesized
acttaaaatagccccaaaaaag

SEQ ID NO: 61288 - DNA, 22 bp, Artificial Sequence
  chemically synthesized
aaaatagccccaaaaaagaaga

SEQ ID NO: 61289 - DNA, 22 bp, Artificial Sequence
  chemically synthesized
aaatagccccaaaaaagaagaa

SEQ ID NO: 61290 - DNA, 22 bp, Artificial Sequence
  chemically synthesized
tcagaaatcagagggaaatatt

SEQ ID NO: 61291 - DNA, 22 bp, Artificial Sequence
  chemically synthesized
gcattatgaaacatggtaacaa

SEQ ID NO: 61292 - DNA, 22 bp, Artificial Sequence
  chemically synthesized
tgaaacatggtaacaagtggcc

SEQ ID NO: 61293 - DNA, 22 bp, Artificial Sequence
  chemically synthesized
gcactttatgtctgcatgaata

SEQ ID NO: 61294 - DNA, 22 bp, Artificial Sequence
  chemically synthesized
tatgtctgcatgaatagcatct

SEQ ID NO: 61295 - DNA, 22 bp, Artificial Sequence
  chemically synthesized
atgtctgcatgaatagcatctt

SEQ ID NO: 61296 - DNA, 22 bp, Artificial Sequence
  chemically synthesized
tgtctgcatgaatagcatcttt

SEQ ID NO: 61297 - DNA, 22 bp, Artificial Sequence
  chemically synthesized
catgaatagcatctttaagtgt

SEQ ID NO: 61298 - DNA, 22 bp, Artificial Sequence
  chemically synthesized
taagtgttttattggtaacgga

SEQ ID NO: 61299 - DNA, 22 bp, Artificial Sequence
  chemically synthesized
aagtgttttattggtaacggaa

SEQ ID NO: 61300 - DNA, 22 bp, Artificial Sequence
  chemically synthesized
agtgttttattggtaacggaaa

SEQ ID NO: 61301 - DNA, 22 bp, Artificial Sequence
  chemically synthesized
tattggtaacggaaaagagtgg

SEQ ID NO: 61302 - DNA, 22 bp, Artificial Sequence
  chemically synthesized
attggtaacggaaaagagtgga

SEQ ID NO: 61303 - DNA, 22 bp, Artificial Sequence
  chemically synthesized
ttggtaacggaaaagagtggag

SEQ ID NO: 61304 - DNA, 22 bp, Artificial Sequence
  chemically synthesized
gtaacggaaaagagtggagtca

SEQ ID NO: 61305 - DNA, 22 bp, Artificial Sequence
  chemically synthesized
cttcccaaattggcgagttctt

SEQ ID NO: 61306 - DNA, 22 bp, Artificial Sequence
  chemically synthesized
cccaaattggcgagttctttta

SEQ ID NO: 61307 - DNA, 22 bp, Artificial Sequence
  chemically synthesized
ccaaattggcgagttcttttaa

SEQ ID NO: 61308 - DNA, 22 bp, Artificial Sequence
  chemically synthesized
gcgagttcttttaattcagact

SEQ ID NO: 61309 - DNA, 22 bp, Artificial Sequence
  chemically synthesized
ttttaattcagacttctccttg

SEQ ID NO: 61310 - DNA, 22 bp, Artificial Sequence
  chemically synthesized
ttaattcagacttctccttgtt

SEQ ID NO: 61311 - DNA, 22 bp, Artificial Sequence
  chemically synthesized
taattcagacttctccttgtta

SEQ ID NO: 61312 - DNA, 22 bp, Artificial Sequence
  chemically synthesized
aattcagacttctccttgttat

SEQ ID NO: 61313 - DNA, 22 bp, Artificial Sequence
  chemically synthesized
attcagacttctccttgttatt

SEQ ID NO: 61314 - DNA, 22 bp, Artificial Sequence
  chemically synthesized
agacttctccttgttattgcct

SEQ ID NO: 61315 - DNA, 22 bp, Artificial Sequence
  chemically synthesized
ctccttgttattgcctactggg

SEQ ID NO: 61316 - DNA, 22 bp, Artificial Sequence
  chemically synthesized
tccttgttattgcctactgggg

SEQ ID NO: 61317 - DNA, 22 bp, Artificial Sequence
  chemically synthesized
cttgttattgcctactggggag

SEQ ID NO: 61318 - DNA, 22 bp, Artificial Sequence
  chemically synthesized
gttattgcctactggggagcac

SEQ ID NO: 61319 - DNA, 22 bp, Artificial Sequence
  chemically synthesized
ttattgcctactggggagcact

SEQ ID NO: 61320 - DNA, 22 bp, Artificial Sequence
  chemically synthesized
ttgcctactggggagcacttat

SEQ ID NO: 61321 - DNA, 22 bp, Artificial Sequence
  chemically synthesized
cctactggggagcacttattca

SEQ ID NO: 61322 - DNA, 22 bp, Artificial Sequence
  chemically synthesized
ctggggagcacttattcacctg

SEQ ID NO: 61323 - DNA, 22 bp, Artificial Sequence
  chemically synthesized
gggagcacttattcacctgtca

SEQ ID NO: 61324 - DNA, 22 bp, Artificial Sequence
  chemically synthesized
attcacctgtcaaattgtatgc

SEQ ID NO: 61325 - DNA, 22 bp, Artificial Sequence
  chemically synthesized
ttcacctgtcaaattgtatgct

SEQ ID NO: 61326 - DNA, 22 bp, Artificial Sequence
  chemically synthesized
acctgtcaaattgtatgctagg

SEQ ID NO: 61327 - DNA, 22 bp, Artificial Sequence
  chemically synthesized
tcaaattgtatgctagggtggg

SEQ ID NO: 61328 - DNA, 22 bp, Artificial Sequence
  chemically synthesized
tatgctagggtgggaaagggta

SEQ ID NO: 61329 - DNA, 22 bp, Artificial Sequence
  chemically synthesized
gggtgggaaagggtattttagc

SEQ ID NO: 61330 - DNA, 22 bp, Artificial Sequence
  chemically synthesized
tagcttttctggctgcatcccg

SEQ ID NO: 61331 - DNA, 22 bp, Artificial Sequence
  chemically synthesized
agcttttctggctgcatcccgg

SEQ ID NO: 61332 - DNA, 22 bp, Artificial Sequence
  chemically synthesized
gcttttctggctgcatcccggg

SEQ ID NO: 61333 - DNA, 22 bp, Artificial Sequence
  chemically synthesized
ttctggctgcatcccgggctct

SEQ ID NO: 61334 - DNA, 22 bp, Artificial Sequence
  chemically synthesized
tctggctgcatcccgggctctc

SEQ ID NO: 61335 - DNA, 22 bp, Artificial Sequence
  chemically synthesized
ctggctgcatcccgggctctca

SEQ ID NO: 61336 - DNA, 22 bp, Artificial Sequence
  chemically synthesized
tggctgcatcccgggctctcag

SEQ ID NO: 61337 - DNA, 22 bp, Artificial Sequence
  chemically synthesized
gctgcatcccgggctctcaggt

SEQ ID NO: 61338 - DNA, 22 bp, Artificial Sequence
  chemically synthesized
catcccgggctctcaggtagaa

SEQ ID NO: 61339 - DNA, 22 bp, Artificial Sequence
  chemically synthesized
tcaggtagaagggatttgtccc

SEQ ID NO: 61340 - DNA, 22 bp, Artificial Sequence
  chemically synthesized
aggtagaagggatttgtccctt

SEQ ID NO: 61341 - DNA, 22 bp, Artificial Sequence
  chemically synthesized
gtccctttgccatggcctcctt

SEQ ID NO: 61342 - DNA, 22 bp, Artificial Sequence
  chemically synthesized
tccctttgccatggcctccttc

SEQ ID NO: 61343 - DNA, 22 bp, Artificial Sequence
  chemically synthesized
tgccatggcctccttctctcct

SEQ ID NO: 61344 - DNA, 22 bp, Artificial Sequence
  chemically synthesized
gccatggcctccttctctcctg

SEQ ID NO: 61345 - DNA, 22 bp, Artificial Sequence
  chemically synthesized
ccatggcctccttctctcctgc

SEQ ID NO: 61346 - DNA, 22 bp, Artificial Sequence
  chemically synthesized
cttctctcctgccctccccagt

SEQ ID NO: 61347 - DNA, 22 bp, Artificial Sequence
  chemically synthesized
ctctcctgccctccccagtgcc

SEQ ID NO: 61348 - DNA, 22 bp, Artificial Sequence
  chemically synthesized
tctcctgccctccccagtgccc

SEQ ID NO: 61349 - DNA, 22 bp, Artificial Sequence
  chemically synthesized
tcctgccctccccagtgcccct

SEQ ID NO: 61350 - DNA, 22 bp, Artificial Sequence
  chemically synthesized
ctgccctccccagtgcccctgc

SEQ ID NO: 61351 - DNA, 22 bp, Artificial Sequence
  chemically synthesized
ccctccccagtgcccctgccag

SEQ ID NO: 61352 - DNA, 22 bp, Artificial Sequence
  chemically synthesized
cccagtgcccctgccaggagga

SEQ ID NO: 61353 - DNA, 22 bp, Artificial Sequence
  chemically synthesized
ccaggaggagggagaatctgaa

SEQ ID NO: 61354 - DNA, 22 bp, Artificial Sequence
  chemically synthesized
aaagcaagaatggagggagagt

SEQ ID NO: 61355 - DNA, 22 bp, Artificial Sequence
  chemically synthesized
ggatttgtgcctggccagtgcc

SEQ ID NO: 61356 - DNA, 22 bp, Artificial Sequence
  chemically synthesized
gtgcctggccagtgcccctgca

SEQ ID NO: 61357 - DNA, 22 bp, Artificial Sequence
  chemically synthesized
tgcctggccagtgcccctgcac

SEQ ID NO: 61358 - DNA, 22 bp, Artificial Sequence
  chemically synthesized
gccagtgcccctgcacagtatt

SEQ ID NO: 61359 - DNA, 22 bp, Artificial Sequence
  chemically synthesized
cacagtattggatatgagtatg

SEQ ID NO: 61360 - DNA, 22 bp, Artificial Sequence
  chemically synthesized
gatatgagtatgggcatctcag

SEQ ID NO: 61361 - DNA, 22 bp, Artificial Sequence
  chemically synthesized
agtgtgcctggaaacgcagttg

SEQ ID NO: 61362 - DNA, 22 bp, Artificial Sequence
  chemically synthesized
gaaacgcagttggctgcacagc

SEQ ID NO: 61363 - DNA, 22 bp, Artificial Sequence
  chemically synthesized
gctgcacagccccagtgggaag

SEQ ID NO: 61364 - DNA, 22 bp, Artificial Sequence
  chemically synthesized
cacagccccagtgggaagaact

SEQ ID NO: 61365 - DNA, 22 bp, Artificial Sequence
  chemically synthesized
tgaggaactgctggtggttggc

SEQ ID NO: 61366 - DNA, 22 bp, Artificial Sequence
  chemically synthesized
aggaactgctggtggttggctc

SEQ ID NO: 61367 - DNA, 22 bp, Artificial Sequence
  chemically synthesized
ctggtggttggctcttccccag

SEQ ID NO: 61368 - DNA, 22 bp, Artificial Sequence
  chemically synthesized
gtggttggctcttccccaggct

SEQ ID NO: 61369 - DNA, 22 bp, Artificial Sequence
  chemically synthesized
gctcttccccaggctctcagcc

SEQ ID NO: 61370 - DNA, 22 bp, Artificial Sequence
  chemically synthesized
ttccccaggctctcagcccctc

SEQ ID NO: 61371 - DNA, 22 bp, Artificial Sequence
  chemically synthesized
ccccaggctctcagcccctctt

SEQ ID NO: 61372 - DNA, 22 bp, Artificial Sequence
  chemically synthesized
cccaggctctcagcccctcttt

SEQ ID NO: 61373 - DNA, 22 bp, Artificial Sequence
  chemically synthesized
tcagcccctctttctagaggct

SEQ ID NO: 61374 - DNA, 22 bp, Artificial Sequence
  chemically synthesized
agcccctctttctagaggctcc

SEQ ID NO: 61375 - DNA, 22 bp, Artificial Sequence
  chemically synthesized
tttctagaggctccacctaagc

SEQ ID NO: 61376 - DNA, 22 bp, Artificial Sequence
  chemically synthesized
tctagaggctccacctaagcct

SEQ ID NO: 61377 - DNA, 22 bp, Artificial Sequence
  chemically synthesized
ctagaggctccacctaagcctt

SEQ ID NO: 61378 - DNA, 22 bp, Artificial Sequence
  chemically synthesized
tagaggctccacctaagcctta

SEQ ID NO: 61379 - DNA, 22 bp, Artificial Sequence
  chemically synthesized
gaggctccacctaagccttagg

SEQ ID NO: 61380 - DNA, 22 bp, Artificial Sequence
  chemically synthesized
cacctaagccttaggaaagact

SEQ ID NO: 61381 - DNA, 22 bp, Artificial Sequence
  chemically synthesized
agccttaggaaagactttcgtt

SEQ ID NO: 61382 - DNA, 22 bp, Artificial Sequence
  chemically synthesized
aggaaagactttcgtttggttt

SEQ ID NO: 61383 - DNA, 22 bp, Artificial Sequence
  chemically synthesized
ggaaagactttcgtttggtttt

SEQ ID NO: 61384 - DNA, 22 bp, Artificial Sequence
  chemically synthesized
tcgtttggttttaactggctcc

SEQ ID NO: 61385 - DNA, 22 bp, Artificial Sequence
  chemically synthesized
cgtttggttttaactggctcct

SEQ ID NO: 61386 - DNA, 22 bp, Artificial Sequence
  chemically synthesized
gtttggttttaactggctcctg

SEQ ID NO: 61387 - DNA, 22 bp, Artificial Sequence
  chemically synthesized
ggttttaactggctcctgtcaa

SEQ ID NO: 61388 - DNA, 22 bp, Artificial Sequence
  chemically synthesized
gttttaactggctcctgtcaag

SEQ ID NO: 61389 - DNA, 22 bp, Artificial Sequence
  chemically synthesized
taactggctcctgtcaagggtt

SEQ ID NO: 61390 - DNA, 22 bp, Artificial Sequence
  chemically synthesized
aactggctcctgtcaagggttc

SEQ ID NO: 61391 - DNA, 22 bp, Artificial Sequence
  chemically synthesized
actggctcctgtcaagggttcc

SEQ ID NO: 61392 - DNA, 22 bp, Artificial Sequence
  chemically synthesized
gctcctgtcaagggttccccca

SEQ ID NO: 61393 - DNA, 22 bp, Artificial Sequence
  chemically synthesized
ctgtcaagggttcccccaaacc

SEQ ID NO: 61394 - DNA, 22 bp, Artificial Sequence
  chemically synthesized
tcaagggttcccccaaaccagc

SEQ ID NO: 61395 - DNA, 22 bp, Artificial Sequence
  chemically synthesized
ccccaaaccagctcaacccctc

SEQ ID NO: 61396 - DNA, 22 bp, Artificial Sequence
  chemically synthesized
aacccctccatttacattataa

SEQ ID NO: 61397 - DNA, 22 bp, Artificial Sequence
  chemically synthesized
catttacattataatgcaaaag

SEQ ID NO: 61398 - DNA, 22 bp, Artificial Sequence
  chemically synthesized
acattataatgcaaaagctctt

SEQ ID NO: 61399 - DNA, 22 bp, Artificial Sequence
  chemically synthesized
cattataatgcaaaagctcttc

SEQ ID NO: 61400 - DNA, 22 bp, Artificial Sequence
  chemically synthesized
taatgcaaaagctcttccctgt

SEQ ID NO: 61401 - DNA, 22 bp, Artificial Sequence
  chemically synthesized
ttccctgtgggtctcagggcct

SEQ ID NO: 61402 - DNA, 22 bp, Artificial Sequence
  chemically synthesized
ccctgtgggtctcagggcctgt

SEQ ID NO: 61403 - DNA, 22 bp, Artificial Sequence
  chemically synthesized
cctgtgggtctcagggcctgtg

SEQ ID NO: 61404 - DNA, 22 bp, Artificial Sequence
  chemically synthesized
tgggtctcagggcctgtgggga

SEQ ID NO: 61405 - DNA, 22 bp, Artificial Sequence
  chemically synthesized
agggcctgtggggaaaatggaa

SEQ ID NO: 61406 - DNA, 22 bp, Artificial Sequence
  chemically synthesized
tggggaaaatggaatctggctc

SEQ ID NO: 61407 - DNA, 22 bp, Artificial Sequence
  chemically synthesized
gctcaaacccaagatccaaagc

SEQ ID NO: 61408 - DNA, 22 bp, Artificial Sequence
  chemically synthesized
aaacccaagatccaaagctaaa

SEQ ID NO: 61409 - DNA, 22 bp, Artificial Sequence
  chemically synthesized
aagtgcccccaggttgggctgc

SEQ ID NO: 61410 - DNA, 22 bp, Artificial Sequence
  chemically synthesized
ggctgcctgacagttttataga

SEQ ID NO: 61411 - DNA, 22 bp, Artificial Sequence
  chemically synthesized
cctgacagttttatagatatgg

SEQ ID NO: 61412 - DNA, 22 bp, Artificial Sequence
  chemically synthesized
acagttttatagatatggcatt

SEQ ID NO: 61413 - DNA, 22 bp, Artificial Sequence
  chemically synthesized
tatagatatggcattgagtggc

SEQ ID NO: 61414 - DNA, 22 bp, Artificial Sequence
  chemically synthesized
atagatatggcattgagtggcc

SEQ ID NO: 61415 - DNA, 22 bp, Artificial Sequence
  chemically synthesized
tagatatggcattgagtggcct

SEQ ID NO: 61416 - DNA, 22 bp, Artificial Sequence
  chemically synthesized
agtggcctcctggcagtttgga

SEQ ID NO: 61417 - DNA, 22 bp, Artificial Sequence
  chemically synthesized
ctggcagtttggaattgtgaag

SEQ ID NO: 61418 - DNA, 22 bp, Artificial Sequence
  chemically synthesized
gcagtttggaattgtgaaggtt

SEQ ID NO: 61419 - DNA, 22 bp, Artificial Sequence
  chemically synthesized
ggaattgtgaaggttcactcat

SEQ ID NO: 61420 - DNA, 22 bp, Artificial Sequence
  chemically synthesized
gaattgtgaaggttcactcatt

SEQ ID NO: 61421 - DNA, 22 bp, Artificial Sequence
  chemically synthesized
tgaaggttcactcattcatttt

SEQ ID NO: 61422 - DNA, 22 bp, Artificial Sequence
  chemically synthesized
actcattcatttttcaacaaat

SEQ ID NO: 61423 - DNA, 22 bp, Artificial Sequence
  chemically synthesized
attcatttttcaacaaatattt

SEQ ID NO: 61424 - DNA, 22 bp, Artificial Sequence
  chemically synthesized
atttttcaacaaatattttgaa

SEQ ID NO: 61425 - DNA, 22 bp, Artificial Sequence
  chemically synthesized
ttcaacaaatattttgaacacc

SEQ ID NO: 61426 - DNA, 22 bp, Artificial Sequence
  chemically synthesized
tcaacaaatattttgaacacct

SEQ ID NO: 61427 - DNA, 22 bp, Artificial Sequence
  chemically synthesized
caacaaatattttgaacacctg

SEQ ID NO: 61428 - DNA, 22 bp, Artificial Sequence
  chemically synthesized
aacaaatattttgaacacctgc

SEQ ID NO: 61429 - DNA, 22 bp, Artificial Sequence
  chemically synthesized
tgaacacctgccacatgctggg

SEQ ID NO: 61430 - DNA, 22 bp, Artificial Sequence
  chemically synthesized
gaacacctgccacatgctggga

SEQ ID NO: 61431 - DNA, 22 bp, Artificial Sequence
  chemically synthesized
aacacctgccacatgctgggaa

SEQ ID NO: 61432 - DNA, 22 bp, Artificial Sequence
  chemically synthesized
ccacatgctgggaacggttctt

SEQ ID NO: 61433 - DNA, 22 bp, Artificial Sequence
  chemically synthesized
ggaacggttcttggtgttgggc

SEQ ID NO: 61434 - DNA, 22 bp, Artificial Sequence
  chemically synthesized
ttggtgttgggcatagaaagcc

SEQ ID NO: 61435 - DNA, 22 bp, Artificial Sequence
  chemically synthesized
ggtgttgggcatagaaagcctt

SEQ ID NO: 61436 - DNA, 22 bp, Artificial Sequence
  chemically synthesized
gtgttgggcatagaaagcctta

SEQ ID NO: 61437 - DNA, 22 bp, Artificial Sequence
  chemically synthesized
ggcatagaaagccttaaaaact

SEQ ID NO: 61438 - DNA, 22 bp, Artificial Sequence
  chemically synthesized
aaaaactccctgctcttgtggc

SEQ ID NO: 61439 - DNA, 22 bp, Artificial Sequence
  chemically synthesized
aaaactccctgctcttgtggca

SEQ ID NO: 61440 - DNA, 22 bp, Artificial Sequence
  chemically synthesized
cctgctcttgtggcaccccctt

SEQ ID NO: 61441 - DNA, 22 bp, Artificial Sequence
  chemically synthesized
ctcttgtggcaccccctttcta

SEQ ID NO: 61442 - DNA, 22 bp, Artificial Sequence
  chemically synthesized
ttgtggcaccccctttctagct

SEQ ID NO: 61443 - DNA, 22 bp, Artificial Sequence
  chemically synthesized
gtggcaccccctttctagctgg

SEQ ID NO: 61444 - DNA, 22 bp, Artificial Sequence
  chemically synthesized
tggcaccccctttctagctggg

SEQ ID NO: 61445 - DNA, 22 bp, Artificial Sequence
  chemically synthesized
tctagctggggagagacagaag

SEQ ID NO: 61446 - DNA, 22 bp, Artificial Sequence
  chemically synthesized
ctagctggggagagacagaaga

SEQ ID NO: 61447 - DNA, 22 bp, Artificial Sequence
  chemically synthesized
tagctggggagagacagaagat

SEQ ID NO: 61448 - DNA, 22 bp, Artificial Sequence
  chemically synthesized
gctggggagagacagaagatgc

SEQ ID NO: 61449 - DNA, 22 bp, Artificial Sequence
  chemically synthesized
gggagagacagaagatgcacca

SEQ ID NO: 61450 - DNA, 22 bp, Artificial Sequence
  chemically synthesized
tatagtatggcaagagaagatc

SEQ ID NO: 61451 - DNA, 22 bp, Artificial Sequence
  chemically synthesized
cctgcacgaaaataaggtgggg

SEQ ID NO: 61452 - DNA, 22 bp, Artificial Sequence
  chemically synthesized
cacgaaaataaggtggggaaga

SEQ ID NO: 61453 - DNA, 22 bp, Artificial Sequence
  chemically synthesized
ttaaataggataattagggaag

SEQ ID NO: 61454 - DNA, 22 bp, Artificial Sequence
  chemically synthesized
taaataggataattagggaagg

SEQ ID NO: 61455 - DNA, 22 bp, Artificial Sequence
  chemically synthesized
aaataggataattagggaaggc

SEQ ID NO: 61456 - DNA, 22 bp, Artificial Sequence
  chemically synthesized
aataggataattagggaaggcc

SEQ ID NO: 61457 - DNA, 22 bp, Artificial Sequence
  chemically synthesized
gggaaggcccaatgagaagcaa

SEQ ID NO: 61458 - DNA, 22 bp, Artificial Sequence
  chemically synthesized
caaagaggtgaggaagttggcc

SEQ ID NO: 61459 - DNA, 22 bp, Artificial Sequence
  chemically synthesized
gccatgagaattttgagaagat

SEQ ID NO: 61460 - DNA, 22 bp, Artificial Sequence
  chemically synthesized
tgagaagatggttccaggaaga

SEQ ID NO: 61461 - DNA, 22 bp, Artificial Sequence
  chemically synthesized
gagaagatggttccaggaagag

SEQ ID NO: 61462 - DNA, 22 bp, Artificial Sequence
  chemically synthesized
agaagatggttccaggaagagt

SEQ ID NO: 61463 - DNA, 22 bp, Artificial Sequence
  chemically synthesized
caggaagagtgtgtagagagca

SEQ ID NO: 61464 - DNA, 22 bp, Artificial Sequence
  chemically synthesized
gtgtgtaatacgcctggctact

SEQ ID NO: 61465 - DNA, 22 bp, Artificial Sequence
  chemically synthesized
tgtgtaatacgcctggctactg

SEQ ID NO: 61466 - DNA, 22 bp, Artificial Sequence
  chemically synthesized
gctactggaggaggagcaaggg

SEQ ID NO: 61467 - DNA, 22 bp, Artificial Sequence
  chemically synthesized
ctggaggaggagcaaggggccc

SEQ ID NO: 61468 - DNA, 22 bp, Artificial Sequence
  chemically synthesized
gaggaggagcaaggggccctga

SEQ ID NO: 61469 - DNA, 22 bp, Artificial Sequence
  chemically synthesized
aggtcagagtggaaagagtgca

SEQ ID NO: 61470 - DNA, 22 bp, Artificial Sequence
  chemically synthesized
gctccttgaaggacgtagagca

SEQ ID NO: 61471 - DNA, 22 bp, Artificial Sequence
  chemically synthesized
cttgaaggacgtagagcaggga

SEQ ID NO: 61472 - DNA, 22 bp, Artificial Sequence
  chemically synthesized
gaaggacgtagagcagggattt

SEQ ID NO: 61473 - DNA, 22 bp, Artificial Sequence
  chemically synthesized
aaggacgtagagcagggatttt

SEQ ID NO: 61474 - DNA, 22 bp, Artificial Sequence
  chemically synthesized
ttggctctgactccaagggaga

SEQ ID NO: 61475 - DNA, 22 bp, Artificial Sequence
  chemically synthesized
tggctctgactccaagggagat

SEQ ID NO: 61476 - DNA, 22 bp, Artificial Sequence
  chemically synthesized
ggctctgactccaagggagatg

SEQ ID NO: 61477 - DNA, 22 bp, Artificial Sequence
  chemically synthesized
gctctgactccaagggagatgg

SEQ ID NO: 61478 - DNA, 22 bp, Artificial Sequence
  chemically synthesized
tgactccaagggagatggaagc

SEQ ID NO: 61479 - DNA, 22 bp, Artificial Sequence
  chemically synthesized
actccaagggagatggaagcca

SEQ ID NO: 61480 - DNA, 22 bp, Artificial Sequence
  chemically synthesized
caagggagatggaagccactgg

SEQ ID NO: 61481 - DNA, 22 bp, Artificial Sequence
  chemically synthesized
gaggagtgatgtcatatgactt

SEQ ID NO: 61482 - DNA, 22 bp, Artificial Sequence
  chemically synthesized
gcgcttccagagagtctcttgg

SEQ ID NO: 61483 - DNA, 22 bp, Artificial Sequence
  chemically synthesized
cgcttccagagagtctcttggg

SEQ ID NO: 61484 - DNA, 22 bp, Artificial Sequence
  chemically synthesized
ccagagagtctcttgggccgca

SEQ ID NO: 61485 - DNA, 22 bp, Artificial Sequence
  chemically synthesized
cagagagtctcttgggccgcat

SEQ ID NO: 61486 - DNA, 22 bp, Artificial Sequence
  chemically synthesized
ttgggccgcattttgagactca

SEQ ID NO: 61487 - DNA, 22 bp, Artificial Sequence
  chemically synthesized
gggccgcattttgagactcaag

SEQ ID NO: 61488 - DNA, 22 bp, Artificial Sequence
  chemically synthesized
ggccgcattttgagactcaagc

SEQ ID NO: 61489 - DNA, 22 bp, Artificial Sequence
  chemically synthesized
tgagactcaagcatgggaaagt

SEQ ID NO: 61490 - DNA, 22 bp, Artificial Sequence
  chemically synthesized
gagactcaagcatgggaaagtg

SEQ ID NO: 61491 - DNA, 22 bp, Artificial Sequence
  chemically synthesized
agactcaagcatgggaaagtga

SEQ ID NO: 61492 - DNA, 22 bp, Artificial Sequence
  chemically synthesized
aagcatgggaaagtgaggcaga

SEQ ID NO: 61493 - DNA, 22 bp, Artificial Sequence
  chemically synthesized
taggcaagtgatggtggcgtgg

SEQ ID NO: 61494 - DNA, 22 bp, Artificial Sequence
  chemically synthesized
aggcaagtgatggtggcgtgga

SEQ ID NO: 61495 - DNA, 22 bp, Artificial Sequence
  chemically synthesized
ggcaagtgatggtggcgtggac

SEQ ID NO: 61496 - DNA, 22 bp, Artificial Sequence
  chemically synthesized
gattctggacatacttcgaagg

SEQ ID NO: 61497 - DNA, 22 bp, Artificial Sequence
  chemically synthesized
tggacatacttcgaagggaaaa

SEQ ID NO: 61498 - DNA, 22 bp, Artificial Sequence
  chemically synthesized
gacatacttcgaagggaaaacc

SEQ ID NO: 61499 - DNA, 22 bp, Artificial Sequence
  chemically synthesized
cgaagggaaaaccggcaggatt

SEQ ID NO: 61500 - DNA, 22 bp, Artificial Sequence
  chemically synthesized
gaagggaaaaccggcaggattt

SEQ ID NO: 61501 - DNA, 22 bp, Artificial Sequence
  chemically synthesized
gctgactggtgggatgggttgt

SEQ ID NO: 61502 - DNA, 22 bp, Artificial Sequence
  chemically synthesized
ctgactggtgggatgggttgta

SEQ ID NO: 61503 - DNA, 22 bp, Artificial Sequence
  chemically synthesized
actggtgggatgggttgtatga

SEQ ID NO: 61504 - DNA, 22 bp, Artificial Sequence
  chemically synthesized
gtgggatgggttgtatgaaagg

SEQ ID NO: 61505 - DNA, 22 bp, Artificial Sequence
  chemically synthesized
tatgaaaggaagggaggagtca

SEQ ID NO: 61506 - DNA, 22 bp, Artificial Sequence
  chemically synthesized
ggtgactgggagaatagaattg

SEQ ID NO: 61507 - DNA, 22 bp, Artificial Sequence
  chemically synthesized
ggagaatagaattgctgtttat

SEQ ID NO: 61508 - DNA, 22 bp, Artificial Sequence
  chemically synthesized
ctgtttattgggatgggccaga

SEQ ID NO: 61509 - DNA, 22 bp, Artificial Sequence
  chemically synthesized
tttattgggatgggccagaaag

SEQ ID NO: 61510 - DNA, 22 bp, Artificial Sequence
  chemically synthesized
attgggatgggccagaaaggct

SEQ ID NO: 61511 - DNA, 22 bp, Artificial Sequence
  chemically synthesized
ttgggatgggccagaaaggctg

SEQ ID NO: 61512 - DNA, 22 bp, Artificial Sequence
  chemically synthesized
ggatgggccagaaaggctgtgg

SEQ ID NO: 61513 - DNA, 22 bp, Artificial Sequence
  chemically synthesized
tggaggtgctcagaggatgggt

SEQ ID NO: 61514 - DNA, 22 bp, Artificial Sequence
  chemically synthesized
agaggatgggtgtgtctggggc

SEQ ID NO: 61515 - DNA, 22 bp, Artificial Sequence
  chemically synthesized
gggctccttcaccacttcagga

SEQ ID NO: 61516 - DNA, 22 bp, Artificial Sequence
  chemically synthesized
cttcaccacttcaggacttcag

SEQ ID NO: 61517 - DNA, 22 bp, Artificial Sequence
  chemically synthesized
caccacttcaggacttcagtgg

SEQ ID NO: 61518 - DNA, 22 bp, Artificial Sequence
  chemically synthesized
accacttcaggacttcagtgga

SEQ ID NO: 61519 - DNA, 22 bp, Artificial Sequence
  chemically synthesized
caggacttcagtggatgctaga

SEQ ID NO: 61520 - DNA, 22 bp, Artificial Sequence
  chemically synthesized
aggacttcagtggatgctagac

SEQ ID NO: 61521 - DNA, 22 bp, Artificial Sequence
  chemically synthesized
cagtggatgctagactactgcc

SEQ ID NO: 61522 - DNA, 22 bp, Artificial Sequence
  chemically synthesized
agtggatgctagactactgccc

SEQ ID NO: 61523 - DNA, 22 bp, Artificial Sequence
  chemically synthesized
gactactgccctgttcaggaag

SEQ ID NO: 61524 - DNA, 22 bp, Artificial Sequence
  chemically synthesized
ctgccctgttcaggaagatcgt

SEQ ID NO: 61525 - DNA, 22 bp, Artificial Sequence
  chemically synthesized
ccctgttcaggaagatcgtgag

SEQ ID NO: 61526 - DNA, 22 bp, Artificial Sequence
  chemically synthesized
ttcaggaagatcgtgaggggaa

SEQ ID NO: 61527 - DNA, 22 bp, Artificial Sequence
  chemically synthesized
aggaagatcgtgaggggaaaga

SEQ ID NO: 61528 - DNA, 22 bp, Artificial Sequence
  chemically synthesized
tggctgttcggagagccccagt

SEQ ID NO: 61529 - DNA, 22 bp, Artificial Sequence
  chemically synthesized
ttcggagagccccagttgactg

SEQ ID NO: 61530 - DNA, 22 bp, Artificial Sequence
  chemically synthesized
ggagagccccagttgactgcct

SEQ ID NO: 61531 - DNA, 22 bp, Artificial Sequence
  chemically synthesized
actgcctatagctgagatgatt

SEQ ID NO: 61532 - DNA, 22 bp, Artificial Sequence
  chemically synthesized
cctatagctgagatgatttaag

SEQ ID NO: 61533 - DNA, 22 bp, Artificial Sequence
  chemically synthesized
tagctgagatgatttaagtcga

SEQ ID NO: 61534 - DNA, 22 bp, Artificial Sequence
  chemically synthesized
agatgatttaagtcgagttctt

SEQ ID NO: 61535 - DNA, 22 bp, Artificial Sequence
  chemically synthesized
aagtcgagttctttggggaggg

SEQ ID NO: 61536 - DNA, 22 bp, Artificial Sequence
  chemically synthesized
agtcgagttctttggggagggc

SEQ ID NO: 61537 - DNA, 22 bp, Artificial Sequence
  chemically synthesized
tttggggagggccaggtgtttt

SEQ ID NO: 61538 - DNA, 22 bp, Artificial Sequence
  chemically synthesized
tggggagggccaggtgtttttc

SEQ ID NO: 61539 - DNA, 22 bp, Artificial Sequence
  chemically synthesized
ggggagggccaggtgtttttct

SEQ ID NO: 61540 - DNA, 22 bp, Artificial Sequence
  chemically synthesized
gggagggccaggtgtttttctc

SEQ ID NO: 61541 - DNA, 22 bp, Artificial Sequence
  chemically synthesized
ttctcctcctcctaatcttttt

SEQ ID NO: 61542 - DNA, 22 bp, Artificial Sequence
  chemically synthesized
tctcctcctcctaatctttttg

SEQ ID NO: 61543 - DNA, 22 bp, Artificial Sequence
  chemically synthesized
ctcctcctcctaatctttttgt

SEQ ID NO: 61544 - DNA, 22 bp, Artificial Sequence
  chemically synthesized
tcctcctcctaatctttttgtt

SEQ ID NO: 61545 - DNA, 22 bp, Artificial Sequence
  chemically synthesized
ctcctcctaatctttttgttct

SEQ ID NO: 61546 - DNA, 22 bp, Artificial Sequence
  chemically synthesized
ctcctaatctttttgttctttt

SEQ ID NO: 61547 - DNA, 22 bp, Artificial Sequence
  chemically synthesized
ctaatctttttgttctttttcc

SEQ ID NO: 61548 - DNA, 22 bp, Artificial Sequence
  chemically synthesized
atctttttgttctttttccttc

SEQ ID NO: 61549 - DNA, 22 bp, Artificial Sequence
  chemically synthesized
tttgttctttttccttctctgt

SEQ ID NO: 61550 - DNA, 22 bp, Artificial Sequence
  chemically synthesized
ttgttctttttccttctctgtt

SEQ ID NO: 61551 - DNA, 22 bp, Artificial Sequence
  chemically synthesized
tgttctttttccttctctgttg

SEQ ID NO: 61552 - DNA, 22 bp, Artificial Sequence
  chemically synthesized
gttctttttccttctctgttgt

SEQ ID NO: 61553 - DNA, 22 bp, Artificial Sequence
  chemically synthesized
ttctttttccttctctgttgtt

SEQ ID NO: 61554 - DNA, 22 bp, Artificial Sequence
  chemically synthesized
tttttccttctctgttgttctt

SEQ ID NO: 61555 - DNA, 22 bp, Artificial Sequence
  chemically synthesized
tttccttctctgttgttcttta

SEQ ID NO: 61556 - DNA, 22 bp, Artificial Sequence
  chemically synthesized
ttccttctctgttgttctttag

SEQ ID NO: 61557 - DNA, 22 bp, Artificial Sequence
  chemically synthesized
tccttctctgttgttctttagc

SEQ ID NO: 61558 - DNA, 22 bp, Artificial Sequence
  chemically synthesized
ccttctctgttgttctttagct

SEQ ID NO: 61559 - DNA, 22 bp, Artificial Sequence
  chemically synthesized
cttctctgttgttctttagcta

SEQ ID NO: 61560 - DNA, 22 bp, Artificial Sequence
  chemically synthesized
ctctgttgttctttagctacca

SEQ ID NO: 61561 - DNA, 22 bp, Artificial Sequence
  chemically synthesized
tctgttgttctttagctaccaa

SEQ ID NO: 61562 - DNA, 22 bp, Artificial Sequence
  chemically synthesized
tgttgttctttagctaccaaag

SEQ ID NO: 61563 - DNA, 22 bp, Artificial Sequence
  chemically synthesized
ttgttctttagctaccaaagac

SEQ ID NO: 61564 - DNA, 22 bp, Artificial Sequence
  chemically synthesized
ttctttagctaccaaagacaac

SEQ ID NO: 61565 - DNA, 22 bp, Artificial Sequence
  chemically synthesized
tttagctaccaaagacaacttg

SEQ ID NO: 61566 - DNA, 22 bp, Artificial Sequence
  chemically synthesized
tagctaccaaagacaacttgat

SEQ ID NO: 61567 - DNA, 22 bp, Artificial Sequence
  chemically synthesized
agctaccaaagacaacttgatc

SEQ ID NO: 61568 - DNA, 22 bp, Artificial Sequence
  chemically synthesized
gctaccaaagacaacttgatct

SEQ ID NO: 61569 - DNA, 22 bp, Artificial Sequence
  chemically synthesized
ccaaagacaacttgatcttttg

SEQ ID NO: 61570 - DNA, 22 bp, Artificial Sequence
  chemically synthesized
gatcttttgatccagaaagatg

SEQ ID NO: 61571 - DNA, 22 bp, Artificial Sequence
  chemically synthesized
atcttttgatccagaaagatgc

SEQ ID NO: 61572 - DNA, 22 bp, Artificial Sequence
  chemically synthesized
ttgatccagaaagatgcgcttt

SEQ ID NO: 61573 - DNA, 22 bp, Artificial Sequence
  chemically synthesized
tgatccagaaagatgcgctttg

SEQ ID NO: 61574 - DNA, 22 bp, Artificial Sequence
  chemically synthesized
gatccagaaagatgcgctttgt

SEQ ID NO: 61575 - DNA, 22 bp, Artificial Sequence
  chemically synthesized
atccagaaagatgcgctttgtt

SEQ ID NO: 61576 - DNA, 22 bp, Artificial Sequence
  chemically synthesized
tgtttcttgcatttctttccct

SEQ ID NO: 61577 - DNA, 22 bp, Artificial Sequence
  chemically synthesized
gtttcttgcatttctttccctt

SEQ ID NO: 61578 - DNA, 22 bp, Artificial Sequence
  chemically synthesized
tttcttgcatttctttcccttc

SEQ ID NO: 61579 - DNA, 22 bp, Artificial Sequence
  chemically synthesized
cttgcatttctttcccttcgtt

SEQ ID NO: 61580 - DNA, 22 bp, Artificial Sequence
  chemically synthesized
ttgcatttctttcccttcgttt

SEQ ID NO: 61581 - DNA, 22 bp, Artificial Sequence
  chemically synthesized
gcatttctttcccttcgtttgt

SEQ ID NO: 61582 - DNA, 22 bp, Artificial Sequence
  chemically synthesized
catttctttcccttcgtttgtt

SEQ ID NO: 61583 - DNA, 22 bp, Artificial Sequence
  chemically synthesized
ctttcccttcgtttgttttctc

SEQ ID NO: 61584 - DNA, 22 bp, Artificial Sequence
  chemically synthesized
tttcccttcgtttgttttctca

SEQ ID NO: 61585 - DNA, 22 bp, Artificial Sequence
  chemically synthesized
tcccttcgtttgttttctcagg

SEQ ID NO: 61586 - DNA, 22 bp, Artificial Sequence
  chemically synthesized
cccttcgtttgttttctcaggt

SEQ ID NO: 61587 - DNA, 22 bp, Artificial Sequence
  chemically synthesized
ccttcgtttgttttctcaggtc

SEQ ID NO: 61588 - DNA, 22 bp, Artificial Sequence
  chemically synthesized
cgtttgttttctcaggtctcag

SEQ ID NO: 61589 - DNA, 22 bp, Artificial Sequence
  chemically synthesized
gtttgttttctcaggtctcagg

SEQ ID NO: 61590 - DNA, 22 bp, Artificial Sequence
  chemically synthesized
gttttctcaggtctcaggtaga

SEQ ID NO: 61591 - DNA, 22 bp, Artificial Sequence
  chemically synthesized
ttttctcaggtctcaggtagac

SEQ ID NO: 61592 - DNA, 22 bp, Artificial Sequence
  chemically synthesized
tctcaggtctcaggtagaccat

SEQ ID NO: 61593 - DNA, 22 bp, Artificial Sequence
  chemically synthesized
ctcaggtctcaggtagaccatc

SEQ ID NO: 61594 - DNA, 22 bp, Artificial Sequence
  chemically synthesized
tcaggtctcaggtagaccatcg

SEQ ID NO: 61595 - DNA, 22 bp, Artificial Sequence
  chemically synthesized
aggtctcaggtagaccatcgag

SEQ ID NO: 61596 - DNA, 22 bp, Artificial Sequence
  chemically synthesized
aggtagaccatcgagctgctgt

SEQ ID NO: 61597 - DNA, 22 bp, Artificial Sequence
  chemically synthesized
ctgttaattggtgatatttagg

SEQ ID NO: 61598 - DNA, 22 bp, Artificial Sequence
  chemically synthesized
ttaattggtgatatttaggaat

SEQ ID NO: 61599 - DNA, 22 bp, Artificial Sequence
  chemically synthesized
attggtgatatttaggaatggg

SEQ ID NO: 61600 - DNA, 22 bp, Artificial Sequence
  chemically synthesized
gtgatatttaggaatgggttgg

SEQ ID NO: 61601 - DNA, 22 bp, Artificial Sequence
  chemically synthesized
aggaatgggttggaagctgcat

SEQ ID NO: 61602 - DNA, 22 bp, Artificial Sequence
  chemically synthesized
ggaatgggttggaagctgcatc

SEQ ID NO: 61603 - DNA, 22 bp, Artificial Sequence
  chemically synthesized
gaagctgcatcttttcctggac

SEQ ID NO: 61604 - DNA, 22 bp, Artificial Sequence
  chemically synthesized
catcttttcctggacttctcag

SEQ ID NO: 61605 - DNA, 22 bp, Artificial Sequence
  chemically synthesized
ttcctggacttctcaggactct

SEQ ID NO: 61606 - DNA, 22 bp, Artificial Sequence
  chemically synthesized
tcctggacttctcaggactctc

SEQ ID NO: 61607 - DNA, 22 bp, Artificial Sequence
  chemically synthesized
cctggacttctcaggactctca

SEQ ID NO: 61608 - DNA, 22 bp, Artificial Sequence
  chemically synthesized
ctggacttctcaggactctcac

SEQ ID NO: 61609 - DNA, 22 bp, Artificial Sequence
  chemically synthesized
gacttctcaggactctcactgc

SEQ ID NO: 61610 - DNA, 22 bp, Artificial Sequence
  chemically synthesized
ctcaggactctcactgccacgt

SEQ ID NO: 61611 - DNA, 22 bp, Artificial Sequence
  chemically synthesized
tcaggactctcactgccacgtg

SEQ ID NO: 61612 - DNA, 22 bp, Artificial Sequence
  chemically synthesized
aggactctcactgccacgtgtc

SEQ ID NO: 61613 - DNA, 22 bp, Artificial Sequence
  chemically synthesized
tcactgccacgtgtcttgtgct

SEQ ID NO: 61614 - DNA, 22 bp, Artificial Sequence
  chemically synthesized
actgccacgtgtcttgtgcttc

SEQ ID NO: 61615 - DNA, 22 bp, Artificial Sequence
  chemically synthesized
ccacgtgtcttgtgcttccaca

SEQ ID NO: 61616 - DNA, 22 bp, Artificial Sequence
  chemically synthesized
gtgcttccacagaaccgttttc

SEQ ID NO: 61617 - DNA, 22 bp, Artificial Sequence
  chemically synthesized
tgcttccacagaaccgttttct

SEQ ID NO: 61618 - DNA, 22 bp, Artificial Sequence
  chemically synthesized
ccacagaaccgttttctgagac

SEQ ID NO: 61619 - DNA, 22 bp, Artificial Sequence
  chemically synthesized
cacagaaccgttttctgagacg

SEQ ID NO: 61620 - DNA, 22 bp, Artificial Sequence
  chemically synthesized
tctgagacgtccgtgtggctct

SEQ ID NO: 61621 - DNA, 22 bp, Artificial Sequence
  chemically synthesized
ctgagacgtccgtgtggctctg

SEQ ID NO: 61622 - DNA, 22 bp, Artificial Sequence
  chemically synthesized
tgagacgtccgtgtggctctgc

SEQ ID NO: 61623 - DNA, 22 bp, Artificial Sequence
  chemically synthesized
agacgtccgtgtggctctgctg

SEQ ID NO: 61624 - DNA, 22 bp, Artificial Sequence
  chemically synthesized
tgctgtgctcaggtccacggtt

SEQ ID NO: 61625 - DNA, 22 bp, Artificial Sequence
  chemically synthesized
ctgtgctcaggtccacggttag

SEQ ID NO: 61626 - DNA, 22 bp, Artificial Sequence
  chemically synthesized
tgctcaggtccacggttagccc

SEQ ID NO: 61627 - DNA, 22 bp, Artificial Sequence
  chemically synthesized
aggtccacggttagcccctggc

SEQ ID NO: 61628 - DNA, 22 bp, Artificial Sequence
  chemically synthesized
gcccctggcttggaatttcttc

SEQ ID NO: 61629 - DNA, 22 bp, Artificial Sequence
  chemically synthesized
gcttggaatttcttccggaaat

SEQ ID NO: 61630 - DNA, 22 bp, Artificial Sequence
  chemically synthesized
ggaatttcttccggaaatccgt

SEQ ID NO: 61631 - DNA, 22 bp, Artificial Sequence
  chemically synthesized
gaatttcttccggaaatccgtt

SEQ ID NO: 61632 - DNA, 22 bp, Artificial Sequence
  chemically synthesized
cttccggaaatccgttgtcctc

SEQ ID NO: 61633 - DNA, 22 bp, Artificial Sequence
  chemically synthesized
ttccggaaatccgttgtcctct

SEQ ID NO: 61634 - DNA, 22 bp, Artificial Sequence
  chemically synthesized
ccggaaatccgttgtcctcttt

SEQ ID NO: 61635 - DNA, 22 bp, Artificial Sequence
  chemically synthesized
cggaaatccgttgtcctctttt

SEQ ID NO: 61636 - DNA, 22 bp, Artificial Sequence
  chemically synthesized
tcctcttttccacaggttctcc

SEQ ID NO: 61637 - DNA, 22 bp, Artificial Sequence
  chemically synthesized
ttttccacaggttctcctcctc

SEQ ID NO: 61638 - DNA, 22 bp, Artificial Sequence
  chemically synthesized
ttccacaggttctcctcctccc

SEQ ID NO: 61639 - DNA, 22 bp, Artificial Sequence
  chemically synthesized
tccacaggttctcctcctccct

SEQ ID NO: 61640 - DNA, 22 bp, Artificial Sequence
  chemically synthesized
ccacaggttctcctcctccctt

SEQ ID NO: 61641 - DNA, 22 bp, Artificial Sequence
  chemically synthesized
cacaggttctcctcctcccttt

SEQ ID NO: 61642 - DNA, 22 bp, Artificial Sequence
  chemically synthesized
tcctcctccctttccccatttc

SEQ ID NO: 61643 - DNA, 22 bp, Artificial Sequence
  chemically synthesized
ctcctccctttccccatttctg

SEQ ID NO: 61644 - DNA, 22 bp, Artificial Sequence
  chemically synthesized
ctccctttccccatttctggaa

SEQ ID NO: 61645 - DNA, 22 bp, Artificial Sequence
  chemically synthesized
cctttccccatttctggaaaga

SEQ ID NO: 61646 - DNA, 22 bp, Artificial Sequence
  chemically synthesized
tccccatttctggaaagaagtg

SEQ ID NO: 61647 - DNA, 22 bp, Artificial Sequence
  chemically synthesized
ccccatttctggaaagaagtgg

SEQ ID NO: 61648 - DNA, 22 bp, Artificial Sequence
  chemically synthesized
cccatttctggaaagaagtggg

SEQ ID NO: 61649 - DNA, 22 bp, Artificial Sequence
  chemically synthesized
ctggaaagaagtgggctggcac

SEQ ID NO: 61650 - DNA, 22 bp, Artificial Sequence
  chemically synthesized
tggaaagaagtgggctggcaca

SEQ ID NO: 61651 - DNA, 22 bp, Artificial Sequence
  chemically synthesized
gaaagaagtgggctggcacata

SEQ ID NO: 61652 - DNA, 22 bp, Artificial Sequence
  chemically synthesized
gcacatagagcctttttccttg

SEQ ID NO: 61653 - DNA, 22 bp, Artificial Sequence
  chemically synthesized
tttccttgaaaggagagtgcag

SEQ ID NO: 61654 - DNA, 22 bp, Artificial Sequence
  chemically synthesized
ttccttgaaaggagagtgcaga

SEQ ID NO: 61655 - DNA, 22 bp, Artificial Sequence
  chemically synthesized
tccttgaaaggagagtgcagag

SEQ ID NO: 61656 - DNA, 22 bp, Artificial Sequence
  chemically synthesized
ccttgaaaggagagtgcagagc

SEQ ID NO: 61657 - DNA, 22 bp, Artificial Sequence
  chemically synthesized
cttgaaaggagagtgcagagcc

SEQ ID NO: 61658 - DNA, 22 bp, Artificial Sequence
  chemically synthesized
gaaaggagagtgcagagccctc

SEQ ID NO: 61659 - DNA, 22 bp, Artificial Sequence
  chemically synthesized
aaaggagagtgcagagccctct

SEQ ID NO: 61660 - DNA, 22 bp, Artificial Sequence
  chemically synthesized
taatggaaaagtaaaaaaattc

SEQ ID NO: 61661 - DNA, 22 bp, Artificial Sequence
  chemically synthesized
atggaaaagtaaaaaaattctt

SEQ ID NO: 61662 - DNA, 22 bp, Artificial Sequence
  chemically synthesized
ttggaatcctcataacatccaa

SEQ ID NO: 61663 - DNA, 22 bp, Artificial Sequence
  chemically synthesized
ggaatcctcataacatccaagc

SEQ ID NO: 61664 - DNA, 22 bp, Artificial Sequence
  chemically synthesized
gaatcctcataacatccaagcc

SEQ ID NO: 61665 - DNA, 22 bp, Artificial Sequence
  chemically synthesized
ataacatccaagccagccaaag

SEQ ID NO: 61666 - DNA, 22 bp, Artificial Sequence
  chemically synthesized
agaccaagtaaattattggggg

SEQ ID NO: 61667 - DNA, 22 bp, Artificial Sequence
  chemically synthesized
ttggggggtaatttgcaagggc

SEQ ID NO: 61668 - DNA, 22 bp, Artificial Sequence
  chemically synthesized
gggggtaatttgcaagggcctg

SEQ ID NO: 61669 - DNA, 22 bp, Artificial Sequence
  chemically synthesized
gcaagggcctgaatcaaacaaa

SEQ ID NO: 61670 - DNA, 22 bp, Artificial Sequence
  chemically synthesized
caagggcctgaatcaaacaaat

SEQ ID NO: 61671 - DNA, 22 bp, Artificial Sequence
  chemically synthesized
aatcaaacaaattgctttcttg

SEQ ID NO: 61672 - DNA, 22 bp, Artificial Sequence
  chemically synthesized
ctttcttgtttctcagcttgaa

SEQ ID NO: 61673 - DNA, 22 bp, Artificial Sequence
  chemically synthesized
tcttgtttctcagcttgaatct

SEQ ID NO: 61674 - DNA, 22 bp, Artificial Sequence
  chemically synthesized
cttgtttctcagcttgaatctt

SEQ ID NO: 61675 - DNA, 22 bp, Artificial Sequence
  chemically synthesized
ttgtttctcagcttgaatcttt

SEQ ID NO: 61676 - DNA, 22 bp, Artificial Sequence
  chemically synthesized
gtttctcagcttgaatctttag

SEQ ID NO: 61677 - DNA, 22 bp, Artificial Sequence
  chemically synthesized
tttctcagcttgaatctttaga

SEQ ID NO: 61678 - DNA, 22 bp, Artificial Sequence
  chemically synthesized
ctcagcttgaatctttagacca

SEQ ID NO: 61679 - DNA, 22 bp, Artificial Sequence
  chemically synthesized
tcagcttgaatctttagaccag

SEQ ID NO: 61680 - DNA, 22 bp, Artificial Sequence
  chemically synthesized
agcttgaatctttagaccagaa

SEQ ID NO: 61681 - DNA, 22 bp, Artificial Sequence
  chemically synthesized
gaatctttagaccagaagcctg

SEQ ID NO: 61682 - DNA, 22 bp, Artificial Sequence
  chemically synthesized
aatctttagaccagaagcctgt

SEQ ID NO: 61683 - DNA, 22 bp, Artificial Sequence
  chemically synthesized
tagaccagaagcctgtgatttc

SEQ ID NO: 61684 - DNA, 22 bp, Artificial Sequence
  chemically synthesized
agaccagaagcctgtgatttcg

SEQ ID NO: 61685 - DNA, 22 bp, Artificial Sequence
  chemically synthesized
gaccagaagcctgtgatttcgg

SEQ ID NO: 61686 - DNA, 22 bp, Artificial Sequence
  chemically synthesized
tgatttcggagtctgatgagaa

SEQ ID NO: 61687 - DNA, 22 bp, Artificial Sequence
  chemically synthesized
cggagtctgatgagaaataaga

SEQ ID NO: 61688 - DNA, 22 bp, Artificial Sequence
  chemically synthesized
ggagtctgatgagaaataagag

SEQ ID NO: 61689 - DNA, 22 bp, Artificial Sequence
  chemically synthesized
atgagaaataagagtcagtgtt

SEQ ID NO: 61690 - DNA, 22 bp, Artificial Sequence
  chemically synthesized
ctgtctgagccacttttctttg

SEQ ID NO: 61691 - DNA, 22 bp, Artificial Sequence
  chemically synthesized
tgtctgagccacttttctttgg

SEQ ID NO: 61692 - DNA, 22 bp, Artificial Sequence
  chemically synthesized
tctgagccacttttctttggag

SEQ ID NO: 61693 - DNA, 22 bp, Artificial Sequence
  chemically synthesized
agccacttttctttggaggagg

SEQ ID NO: 61694 - DNA, 22 bp, Artificial Sequence
  chemically synthesized
ttctttggaggaggtcctctag

SEQ ID NO: 61695 - DNA, 22 bp, Artificial Sequence
  chemically synthesized
tctttggaggaggtcctctagg

SEQ ID NO: 61696 - DNA, 22 bp, Artificial Sequence
  chemically synthesized
ctttggaggaggtcctctaggc

SEQ ID NO: 61697 - DNA, 22 bp, Artificial Sequence
  chemically synthesized
tttggaggaggtcctctaggct

SEQ ID NO: 61698 - DNA, 22 bp, Artificial Sequence
  chemically synthesized
tggaggaggtcctctaggcttt

SEQ ID NO: 61699 - DNA, 22 bp, Artificial Sequence
  chemically synthesized
ggaggaggtcctctaggcttta

SEQ ID NO: 61700 - DNA, 22 bp, Artificial Sequence
  chemically synthesized
gaggaggtcctctaggctttag

SEQ ID NO: 61701 - DNA, 22 bp, Artificial Sequence
  chemically synthesized
taggctttagcaatcacagaag

SEQ ID NO: 61702 - DNA, 22 bp, Artificial Sequence
  chemically synthesized
ggctttagcaatcacagaagaa

SEQ ID NO: 61703 - DNA, 22 bp, Artificial Sequence
  chemically synthesized
tagcaatcacagaagaaccagt

SEQ ID NO: 61704 - DNA, 22 bp, Artificial Sequence
  chemically synthesized
agcaatcacagaagaaccagtg

SEQ ID NO: 61705 - DNA, 22 bp, Artificial Sequence
  chemically synthesized
gcaatcacagaagaaccagtga

SEQ ID NO: 61706 - DNA, 22 bp, Artificial Sequence
  chemically synthesized
cttgtcataggagagctccttg

SEQ ID NO: 61707 - DNA, 22 bp, Artificial Sequence
  chemically synthesized
gtcataggagagctccttggtc

SEQ ID NO: 61708 - DNA, 22 bp, Artificial Sequence
  chemically synthesized
tcataggagagctccttggtcc

SEQ ID NO: 61709 - DNA, 22 bp, Artificial Sequence
  chemically synthesized
cttggtcctcaggattcaaaag

SEQ ID NO: 61710 - DNA, 22 bp, Artificial Sequence
  chemically synthesized
ggtcctcaggattcaaaagaca

SEQ ID NO: 61711 - DNA, 22 bp, Artificial Sequence
  chemically synthesized
gtcctcaggattcaaaagacac

SEQ ID NO: 61712 - DNA, 22 bp, Artificial Sequence
  chemically synthesized
aggattcaaaagacaccttaag

SEQ ID NO: 61713 - DNA, 22 bp, Artificial Sequence
  chemically synthesized
aaaagacaccttaagtagcagt

SEQ ID NO: 61714 - DNA, 22 bp, Artificial Sequence
  chemically synthesized
aagtagcagtgggtagggcgta

SEQ ID NO: 61715 - DNA, 22 bp, Artificial Sequence
  chemically synthesized
agtagcagtgggtagggcgtaa

SEQ ID NO: 61716 - DNA, 22 bp, Artificial Sequence
  chemically synthesized
aacatccctcaaggtaggcctt

SEQ ID NO: 61717 - DNA, 22 bp, Artificial Sequence
  chemically synthesized
acatccctcaaggtaggcctta

SEQ ID NO: 61718 - DNA, 22 bp, Artificial Sequence
  chemically synthesized
aaggtaggccttaggtttccct

SEQ ID NO: 61719 - DNA, 22 bp, Artificial Sequence
  chemically synthesized
aggtttccctctgtcccctcta

SEQ ID NO: 61720 - DNA, 22 bp, Artificial Sequence
  chemically synthesized
ggtttccctctgtcccctctat

SEQ ID NO: 61721 - DNA, 22 bp, Artificial Sequence
  chemically synthesized
ccctctgtcccctctatggtgc

SEQ ID NO: 61722 - DNA, 22 bp, Artificial Sequence
  chemically synthesized
cctctgtcccctctatggtgct

SEQ ID NO: 61723 - DNA, 22 bp, Artificial Sequence
  chemically synthesized
tgtcccctctatggtgctggct

SEQ ID NO: 61724 - DNA, 22 bp, Artificial Sequence
  chemically synthesized
tcccctctatggtgctggcttt

SEQ ID NO: 61725 - DNA, 22 bp, Artificial Sequence
  chemically synthesized
tatggtgctggctttgccacat

SEQ ID NO: 61726 - DNA, 22 bp, Artificial Sequence
  chemically synthesized
tggtgctggctttgccacatgt

SEQ ID NO: 61727 - DNA, 22 bp, Artificial Sequence
  chemically synthesized
gctttgccacatgtagaacaaa

SEQ ID NO: 61728 - DNA, 22 bp, Artificial Sequence
  chemically synthesized
tgccacatgtagaacaaactct

SEQ ID NO: 61729 - DNA, 22 bp, Artificial Sequence
  chemically synthesized
gccacatgtagaacaaactctt

SEQ ID NO: 61730 - DNA, 22 bp, Artificial Sequence
  chemically synthesized
ccacatgtagaacaaactcttc

SEQ ID NO: 61731 - DNA, 22 bp, Artificial Sequence
  chemically synthesized
ttctggaatcataggtaaccca

SEQ ID NO: 61732 - DNA, 22 bp, Artificial Sequence
  chemically synthesized
ctggaatcataggtaacccaag

SEQ ID NO: 61733 - DNA, 22 bp, Artificial Sequence
  chemically synthesized
tggaatcataggtaacccaagg

SEQ ID NO: 61734 - DNA, 22 bp, Artificial Sequence
  chemically synthesized
gaatcataggtaacccaagggg

SEQ ID NO: 61735 - DNA, 22 bp, Artificial Sequence
  chemically synthesized
agagaagagtccaggctgccag

SEQ ID NO: 61736 - DNA, 22 bp, Artificial Sequence
  chemically synthesized
ccagtgcaaaggtccagccctg

SEQ ID NO: 61737 - DNA, 22 bp, Artificial Sequence
  chemically synthesized
tcgccaaggagaccctcaggga

SEQ ID NO: 61738 - DNA, 22 bp, Artificial Sequence
  chemically synthesized
agggaaatgcacaggcctccag

SEQ ID NO: 61739 - DNA, 22 bp, Artificial Sequence
  chemically synthesized
cagctattcccacggcccctgt

SEQ ID NO: 61740 - DNA, 22 bp, Artificial Sequence
  chemically synthesized
ttcccacggcccctgtagctga

SEQ ID NO: 61741 - DNA, 22 bp, Artificial Sequence
  chemically synthesized
ccacggcccctgtagctgagcg

SEQ ID NO: 61742 - DNA, 22 bp, Artificial Sequence
  chemically synthesized
tagctgagcgccagcttcttcc

SEQ ID NO: 61743 - DNA, 22 bp, Artificial Sequence
  chemically synthesized
agcgccagcttcttcctgggcc

SEQ ID NO: 61744 - DNA, 22 bp, Artificial Sequence
  chemically synthesized
cttcctgggccaagctgaggct

SEQ ID NO: 61745 - DNA, 22 bp, Artificial Sequence
  chemically synthesized
ttcctgggccaagctgaggctg

SEQ ID NO: 61746 - DNA, 22 bp, Artificial Sequence
  chemically synthesized
cctgggccaagctgaggctgtt

SEQ ID NO: 61747 - DNA, 22 bp, Artificial Sequence
  chemically synthesized
ctgggccaagctgaggctgttt

SEQ ID NO: 61748 - DNA, 22 bp, Artificial Sequence
  chemically synthesized
ggccaagctgaggctgtttcct

SEQ ID NO: 61749 - DNA, 22 bp, Artificial Sequence
  chemically synthesized
aggctgtttcctgccgtgtcca

SEQ ID NO: 61750 - DNA, 22 bp, Artificial Sequence
  chemically synthesized
tttcctgccgtgtccattctcc

SEQ ID NO: 61751 - DNA, 22 bp, Artificial Sequence
  chemically synthesized
cctgccgtgtccattctcctag

SEQ ID NO: 61752 - DNA, 22 bp, Artificial Sequence
  chemically synthesized
ctgccgtgtccattctcctagc

SEQ ID NO: 61753 - DNA, 22 bp, Artificial Sequence
  chemically synthesized
ccgtgtccattctcctagcaac

SEQ ID NO: 61754 - DNA, 22 bp, Artificial Sequence
  chemically synthesized
tcctagcaacgcttctctttgg

SEQ ID NO: 61755 - DNA, 22 bp, Artificial Sequence
  chemically synthesized
ctagcaacgcttctctttggcc

SEQ ID NO: 61756 - DNA, 22 bp, Artificial Sequence
  chemically synthesized
gcaacgcttctctttggccagt

SEQ ID NO: 61757 - DNA, 22 bp, Artificial Sequence
  chemically synthesized
ctctttggccagtttgccatag

SEQ ID NO: 61758 - DNA, 22 bp, Artificial Sequence
  chemically synthesized
tctttggccagtttgccatagt

SEQ ID NO: 61759 - DNA, 22 bp, Artificial Sequence
  chemically synthesized
tttggccagtttgccatagtac

SEQ ID NO: 61760 - DNA, 22 bp, Artificial Sequence
  chemically synthesized
tggccagtttgccatagtacct

SEQ ID NO: 61761 - DNA, 22 bp, Artificial Sequence
  chemically synthesized
ggccagtttgccatagtacctg

SEQ ID NO: 61762 - DNA, 22 bp, Artificial Sequence
  chemically synthesized
gccagtttgccatagtacctga

SEQ ID NO: 61763 - DNA, 22 bp, Artificial Sequence
  chemically synthesized
gccatagtacctgaggtaagtt

SEQ ID NO: 61764 - DNA, 22 bp, Artificial Sequence
  chemically synthesized
ccatagtacctgaggtaagttt

SEQ ID NO: 61765 - DNA, 22 bp, Artificial Sequence
  chemically synthesized
aggtaagttttgtcctttgcct

SEQ ID NO: 61766 - DNA, 22 bp, Artificial Sequence
  chemically synthesized
tgtcctttgcctgccaaatgct

SEQ ID NO: 61767 - DNA, 22 bp, Artificial Sequence
  chemically synthesized
gtcctttgcctgccaaatgctt

SEQ ID NO: 61768 - DNA, 22 bp, Artificial Sequence
  chemically synthesized
tcctttgcctgccaaatgcttt

SEQ ID NO: 61769 - DNA, 22 bp, Artificial Sequence
  chemically synthesized
tgcctgccaaatgctttacatc

SEQ ID NO: 61770 - DNA, 22 bp, Artificial Sequence
  chemically synthesized
gcctgccaaatgctttacatcc

SEQ ID NO: 61771 - DNA, 22 bp, Artificial Sequence
  chemically synthesized
cctgccaaatgctttacatccc

SEQ ID NO: 61772 - DNA, 22 bp, Artificial Sequence
  chemically synthesized
ccaaatgctttacatcccggag

SEQ ID NO: 61773 - DNA, 22 bp, Artificial Sequence
  chemically synthesized
tacatcccggaggaaagcaaag

SEQ ID NO: 61774 - DNA, 22 bp, Artificial Sequence
  chemically synthesized
acatcccggaggaaagcaaagt

SEQ ID NO: 61775 - DNA, 22 bp, Artificial Sequence
  chemically synthesized
catcccggaggaaagcaaagtc

SEQ ID NO: 61776 - DNA, 22 bp, Artificial Sequence
  chemically synthesized
ttcagaacaggaaaagtccagt

SEQ ID NO: 61777 - DNA, 22 bp, Artificial Sequence
  chemically synthesized
cagaacaggaaaagtccagtgc

SEQ ID NO: 61778 - DNA, 22 bp, Artificial Sequence
  chemically synthesized
agaacaggaaaagtccagtgca

SEQ ID NO: 61779 - DNA, 22 bp, Artificial Sequence
  chemically synthesized
cacactgtgctattccagaacc

SEQ ID NO: 61780 - DNA, 22 bp, Artificial Sequence
  chemically synthesized
tgctattccagaacctcccagt

SEQ ID NO: 61781 - DNA, 22 bp, Artificial Sequence
  chemically synthesized
ttccagaacctcccagttgcat

SEQ ID NO: 61782 - DNA, 22 bp, Artificial Sequence
  chemically synthesized
cagaacctcccagttgcattcc

SEQ ID NO: 61783 - DNA, 22 bp, Artificial Sequence
  chemically synthesized
ccagttgcattcctttgccaac

SEQ ID NO: 61784 - DNA, 22 bp, Artificial Sequence
  chemically synthesized
cattcctttgccaactaggtaa

SEQ ID NO: 61785 - DNA, 22 bp, Artificial Sequence
  chemically synthesized
ctttgccaactaggtaatgtgc

SEQ ID NO: 61786 - DNA, 22 bp, Artificial Sequence
  chemically synthesized
tgccaactaggtaatgtgctag

SEQ ID NO: 61787 - DNA, 22 bp, Artificial Sequence
  chemically synthesized
gccaactaggtaatgtgctagg

SEQ ID NO: 61788 - DNA, 22 bp, Artificial Sequence
  chemically synthesized
ccaactaggtaatgtgctaggg

SEQ ID NO: 61789 - DNA, 22 bp, Artificial Sequence
  chemically synthesized
ggtaatgtgctagggatatttg

SEQ ID NO: 61790 - DNA, 22 bp, Artificial Sequence
  chemically synthesized
gggatatttgtctcgcagcaac

SEQ ID NO: 61791 - DNA, 22 bp, Artificial Sequence
  chemically synthesized
gtctcgcagcaactggcaaccc

SEQ ID NO: 61792 - DNA, 22 bp, Artificial Sequence
  chemically synthesized
tctcgcagcaactggcaacccc

SEQ ID NO: 61793 - DNA, 22 bp, Artificial Sequence
  chemically synthesized
gcagcaactggcaaccccctgt

SEQ ID NO: 61794 - DNA, 22 bp, Artificial Sequence
  chemically synthesized
gcaaccccctgtttgggtaaaa

SEQ ID NO: 61795 - DNA, 22 bp, Artificial Sequence
  chemically synthesized
tttgggtaaaagtcagactcag

SEQ ID NO: 61796 - DNA, 22 bp, Artificial Sequence
  chemically synthesized
gggtaaaagtcagactcaggga

SEQ ID NO: 61797 - DNA, 22 bp, Artificial Sequence
  chemically synthesized
ggtaaaagtcagactcagggac

SEQ ID NO: 61798 - DNA, 22 bp, Artificial Sequence
  chemically synthesized
agggacccggctgcagtgcttg

SEQ ID NO: 61799 - DNA, 22 bp, Artificial Sequence
  chemically synthesized
cagtgcttgctcctgtggcccc

SEQ ID NO: 61800 - DNA, 22 bp, Artificial Sequence
  chemically synthesized
gctcctgtggcccctgcaggga

SEQ ID NO: 61801 - DNA, 22 bp, Artificial Sequence
  chemically synthesized
ctcctgtggcccctgcagggag

SEQ ID NO: 61802 - DNA, 22 bp, Artificial Sequence
  chemically synthesized
ctgtggcccctgcagggagtgt

SEQ ID NO: 61803 - DNA, 22 bp, Artificial Sequence
  chemically synthesized
tggcccctgcagggagtgtggc

SEQ ID NO: 61804 - DNA, 22 bp, Artificial Sequence
  chemically synthesized
cagggagtgtggcctggggtgt

SEQ ID NO: 61805 - DNA, 22 bp, Artificial Sequence
  chemically synthesized
gggtgtaattctgcacacccag

SEQ ID NO: 61806 - DNA, 22 bp, Artificial Sequence
  chemically synthesized
tgcacacccaggaagcttctct

SEQ ID NO: 61807 - DNA, 22 bp, Artificial Sequence
  chemically synthesized
cacacccaggaagcttctctgt

SEQ ID NO: 61808 - DNA, 22 bp, Artificial Sequence
  chemically synthesized
ctctgtctcctctttcacatca

SEQ ID NO: 61809 - DNA, 22 bp, Artificial Sequence
  chemically synthesized
tctgtctcctctttcacatcag

SEQ ID NO: 61810 - DNA, 22 bp, Artificial Sequence
  chemically synthesized
tgtctcctctttcacatcaggc

SEQ ID NO: 61811 - DNA, 22 bp, Artificial Sequence
  chemically synthesized
tctcctctttcacatcaggcct

SEQ ID NO: 61812 - DNA, 22 bp, Artificial Sequence
  chemically synthesized
ctctttcacatcaggccttccc

SEQ ID NO: 61813 - DNA, 22 bp, Artificial Sequence
  chemically synthesized
tttcacatcaggccttccctgt

SEQ ID NO: 61814 - DNA, 22 bp, Artificial Sequence
  chemically synthesized
tcacatcaggccttccctgtgt

SEQ ID NO: 61815 - DNA, 22 bp, Artificial Sequence
  chemically synthesized
cacatcaggccttccctgtgtc

SEQ ID NO: 61816 - DNA, 22 bp, Artificial Sequence
  chemically synthesized
acatcaggccttccctgtgtcc

SEQ ID NO: 61817 - DNA, 22 bp, Artificial Sequence
  chemically synthesized
ccctgtgtcctgaaccaagtgt

SEQ ID NO: 61818 - DNA, 22 bp, Artificial Sequence
  chemically synthesized
cctgtgtcctgaaccaagtgtg

SEQ ID NO: 61819 - DNA, 22 bp, Artificial Sequence
  chemically synthesized
tgtcctgaaccaagtgtggatg

SEQ ID NO: 61820 - DNA, 22 bp, Artificial Sequence
  chemically synthesized
aaccaagtgtggatgagtttga

SEQ ID NO: 61821 - DNA, 22 bp, Artificial Sequence
  chemically synthesized
gagcttcctcctagtttttatt

SEQ ID NO: 61822 - DNA, 22 bp, Artificial Sequence
  chemically synthesized
agcttcctcctagtttttattt

SEQ ID NO: 61823 - DNA, 22 bp, Artificial Sequence
  chemically synthesized
cctcctagtttttatttgtgta

SEQ ID NO: 61824 - DNA, 22 bp, Artificial Sequence
  chemically synthesized
ctcctagtttttatttgtgtaa

SEQ ID NO: 61825 - DNA, 22 bp, Artificial Sequence
  chemically synthesized
ctagtttttatttgtgtaattt

SEQ ID NO: 61826 - DNA, 22 bp, Artificial Sequence
  chemically synthesized
gtttttatttgtgtaatttgtt

SEQ ID NO: 61827 - DNA, 22 bp, Artificial Sequence
  chemically synthesized
ttatttgtgtaatttgttgttg

SEQ ID NO: 61828 - DNA, 22 bp, Artificial Sequence
  chemically synthesized
tatttgtgtaatttgttgttgt

SEQ ID NO: 61829 - DNA, 22 bp, Artificial Sequence
  chemically synthesized
atttgtgtaatttgttgttgtt

SEQ ID NO: 61830 - DNA, 22 bp, Artificial Sequence
  chemically synthesized
tttgtgtaatttgttgttgttg

SEQ ID NO: 61831 - DNA, 22 bp, Artificial Sequence
  chemically synthesized
gtgtaatttgttgttgttgttg

SEQ ID NO: 61832 - DNA, 22 bp, Artificial Sequence
  chemically synthesized
tgtaatttgttgttgttgttgt

SEQ ID NO: 61833 - DNA, 22 bp, Artificial Sequence
  chemically synthesized
gttgttgttgttgttgtttggg

SEQ ID NO: 61834 - DNA, 22 bp, Artificial Sequence
  chemically synthesized
ttgttgttgttgttgtttgggg

SEQ ID NO: 61835 - DNA, 22 bp, Artificial Sequence
  chemically synthesized
ttgttgttgttgtttgggggtg

SEQ ID NO: 61836 - DNA, 22 bp, Artificial Sequence
  chemically synthesized
ttgttgttgtttgggggtgggg

SEQ ID NO: 61837 - DNA, 22 bp, Artificial Sequence
  chemically synthesized
ttgttgtttgggggtgggggta

SEQ ID NO: 61838 - DNA, 22 bp, Artificial Sequence
  chemically synthesized
ttgtttgggggtgggggtagac

SEQ ID NO: 61839 - DNA, 22 bp, Artificial Sequence
  chemically synthesized
tttgggggtgggggtagacagt

SEQ ID NO: 61840 - DNA, 22 bp, Artificial Sequence
  chemically synthesized
gggggtgggggtagacagtgct

SEQ ID NO: 61841 - DNA, 22 bp, Artificial Sequence
  chemically synthesized
ggggtgggggtagacagtgctg

SEQ ID NO: 61842 - DNA, 22 bp, Artificial Sequence
  chemically synthesized
ggcctgtcagaattttaggttg

SEQ ID NO: 61843 - DNA, 22 bp, Artificial Sequence
  chemically synthesized
tcagaattttaggttggttctt

SEQ ID NO: 61844 - DNA, 22 bp, Artificial Sequence
  chemically synthesized
taggttggttctttgagatgaa

SEQ ID NO: 61845 - DNA, 22 bp, Artificial Sequence
  chemically synthesized
aggttggttctttgagatgaat

SEQ ID NO: 61846 - DNA, 22 bp, Artificial Sequence
  chemically synthesized
ggttggttctttgagatgaata

SEQ ID NO: 61847 - DNA, 22 bp, Artificial Sequence
  chemically synthesized
gttctttgagatgaataactac

SEQ ID NO: 61848 - DNA, 22 bp, Artificial Sequence
  chemically synthesized
tttgagatgaataactacttag

SEQ ID NO: 61849 - DNA, 22 bp, Artificial Sequence
  chemically synthesized
tgagatgaataactacttagct

SEQ ID NO: 61850 - DNA, 22 bp, Artificial Sequence
  chemically synthesized
gagatgaataactacttagctg

SEQ ID NO: 61851 - DNA, 22 bp, Artificial Sequence
  chemically synthesized
agatgaataactacttagctgt

SEQ ID NO: 61852 - DNA, 22 bp, Artificial Sequence
  chemically synthesized
cttagctgttgctcaactactt

SEQ ID NO: 61853 - DNA, 22 bp, Artificial Sequence
  chemically synthesized
agctgttgctcaactacttttg

SEQ ID NO: 61854 - DNA, 22 bp, Artificial Sequence
  chemically synthesized
gctgttgctcaactacttttgt

SEQ ID NO: 61855 - DNA, 22 bp, Artificial Sequence
  chemically synthesized
ttgctcaactacttttgtttgt

SEQ ID NO: 61856 - DNA, 22 bp, Artificial Sequence
  chemically synthesized
ctcaactacttttgtttgtgaa

SEQ ID NO: 61857 - DNA, 22 bp, Artificial Sequence
  chemically synthesized
aactacttttgtttgtgaaaga

SEQ ID NO: 61858 - DNA, 22 bp, Artificial Sequence
  chemically synthesized
cttttgtttgtgaaagaaaggg

SEQ ID NO: 61859 - DNA, 22 bp, Artificial Sequence
  chemically synthesized
ttgtttgtgaaagaaagggcag

SEQ ID NO: 61860 - DNA, 22 bp, Artificial Sequence
  chemically synthesized
tgtttgtgaaagaaagggcagt

SEQ ID NO: 61861 - DNA, 22 bp, Artificial Sequence
  chemically synthesized
gtttgtgaaagaaagggcagta

SEQ ID NO: 61862 - DNA, 22 bp, Artificial Sequence
  chemically synthesized
tttgtgaaagaaagggcagtaa

SEQ ID NO: 61863 - DNA, 22 bp, Artificial Sequence
  chemically synthesized
gtgaaagaaagggcagtaagca

SEQ ID NO: 61864 - DNA, 22 bp, Artificial Sequence
  chemically synthesized
tgaaagaaagggcagtaagcac

SEQ ID NO: 61865 - DNA, 22 bp, Artificial Sequence
  chemically synthesized
caggtttattgtgatttctttt

SEQ ID NO: 61866 - DNA, 22 bp, Artificial Sequence
  chemically synthesized
aggtttattgtgatttcttttt

SEQ ID NO: 61867 - DNA, 22 bp, Artificial Sequence
  chemically synthesized
attgtgatttcttttttgtgtt

SEQ ID NO: 61868 - DNA, 22 bp, Artificial Sequence
  chemically synthesized
ttgtgatttcttttttgtgttt

SEQ ID NO: 61869 - DNA, 22 bp, Artificial Sequence
  chemically synthesized
tgatttcttttttgtgtttgca

SEQ ID NO: 61870 - DNA, 22 bp, Artificial Sequence
  chemically synthesized
cttttttgtgtttgcatctgtc

SEQ ID NO: 61871 - DNA, 22 bp, Artificial Sequence
  chemically synthesized
ttttttgtgtttgcatctgtcg

SEQ ID NO: 61872 - DNA, 22 bp, Artificial Sequence
  chemically synthesized
ttttgtgtttgcatctgtcgtg

SEQ ID NO: 61873 - DNA, 22 bp, Artificial Sequence
  chemically synthesized
tttgtgtttgcatctgtcgtgc

SEQ ID NO: 61874 - DNA, 22 bp, Artificial Sequence
  chemically synthesized
ttgtgtttgcatctgtcgtgct

SEQ ID NO: 61875 - DNA, 22 bp, Artificial Sequence
  chemically synthesized
tgtgtttgcatctgtcgtgctc

SEQ ID NO: 61876 - DNA, 22 bp, Artificial Sequence
  chemically synthesized
gtgtttgcatctgtcgtgctca

SEQ ID NO: 61877 - DNA, 22 bp, Artificial Sequence
  chemically synthesized
tgtttgcatctgtcgtgctcag

SEQ ID NO: 61878 - DNA, 22 bp, Artificial Sequence
  chemically synthesized
gcatctgtcgtgctcagttagg

SEQ ID NO: 61879 - DNA, 22 bp, Artificial Sequence
  chemically synthesized
catctgtcgtgctcagttaggg

SEQ ID NO: 61880 - DNA, 22 bp, Artificial Sequence
  chemically synthesized
tcgtgctcagttagggcattat

SEQ ID NO: 61881 - DNA, 22 bp, Artificial Sequence
  chemically synthesized
agttagggcattatccgtaacc

SEQ ID NO: 61882 - DNA, 22 bp, Artificial Sequence
  chemically synthesized
gggcattatccgtaaccccata

SEQ ID NO: 61883 - DNA, 22 bp, Artificial Sequence
  chemically synthesized
tccgtaaccccataggaaccaa

SEQ ID NO: 61884 - DNA, 22 bp, Artificial Sequence
  chemically synthesized
taaagctttagaaatctgcgtg

SEQ ID NO: 61885 - DNA, 22 bp, Artificial Sequence
  chemically synthesized
aaagctttagaaatctgcgtgt

SEQ ID NO: 61886 - DNA, 22 bp, Artificial Sequence
  chemically synthesized
aagctttagaaatctgcgtgtg

SEQ ID NO: 61887 - DNA, 22 bp, Artificial Sequence
  chemically synthesized
tagaaatctgcgtgtgtaatat

SEQ ID NO: 61888 - DNA, 22 bp, Artificial Sequence
  chemically synthesized
agaaatctgcgtgtgtaatatg

SEQ ID NO: 61889 - DNA, 22 bp, Artificial Sequence
  chemically synthesized
gaaatctgcgtgtgtaatatgt

SEQ ID NO: 61890 - DNA, 22 bp, Artificial Sequence
  chemically synthesized
cgtgtgtaatatgtcttttgtg

SEQ ID NO: 61891 - DNA, 22 bp, Artificial Sequence
  chemically synthesized
ttgtgaatttttttttgttctt

SEQ ID NO: 61892 - DNA, 22 bp, Artificial Sequence
  chemically synthesized
tgtgaatttttttttgttcttt

SEQ ID NO: 61893 - DNA, 22 bp, Artificial Sequence
  chemically synthesized
gtgaatttttttttgttctttt

SEQ ID NO: 61894 - DNA, 22 bp, Artificial Sequence
  chemically synthesized
tgaatttttttttgttcttttg

SEQ ID NO: 61895 - DNA, 22 bp, Artificial Sequence
  chemically synthesized
ttttttgttcttttgctttaga

SEQ ID NO: 61896 - DNA, 22 bp, Artificial Sequence
  chemically synthesized
tttttgttcttttgctttagaa

SEQ ID NO: 61897 - DNA, 22 bp, Artificial Sequence
  chemically synthesized
ttttgttcttttgctttagaaa

SEQ ID NO: 61898 - DNA, 22 bp, Artificial Sequence
  chemically synthesized
tttgttcttttgctttagaaac

SEQ ID NO: 61899 - DNA, 22 bp, Artificial Sequence
  chemically synthesized
ttgttcttttgctttagaaact

SEQ ID NO: 61900 - DNA, 22 bp, Artificial Sequence
  chemically synthesized
tgttcttttgctttagaaactg

SEQ ID NO: 61901 - DNA, 22 bp, Artificial Sequence
  chemically synthesized
gttcttttgctttagaaactgt

SEQ ID NO: 61902 - DNA, 22 bp, Artificial Sequence
  chemically synthesized
ttcttttgctttagaaactgta

SEQ ID NO: 61903 - DNA, 22 bp, Artificial Sequence
  chemically synthesized
ttttgctttagaaactgtaata

SEQ ID NO: 61904 - DNA, 22 bp, Artificial Sequence
  chemically synthesized
ttgctttagaaactgtaataat

SEQ ID NO: 61905 - DNA, 22 bp, Artificial Sequence
  chemically synthesized
tgctttagaaactgtaataata

SEQ ID NO: 61906 - DNA, 22 bp, Artificial Sequence
  chemically synthesized
gctttagaaactgtaataataa

SEQ ID NO: 61907 - DNA, 22 bp, Artificial Sequence
  chemically synthesized
ctttagaaactgtaataataat

SEQ ID NO: 61908 - DNA, 22 bp, Artificial Sequence
  chemically synthesized
tagaaactgtaataataatcca

SEQ ID NO: 61909 - DNA, 22 bp, Artificial Sequence
  chemically synthesized
agaaactgtaataataatccat

SEQ ID NO: 61910 - DNA, 22 bp, Artificial Sequence
  chemically synthesized
gaaactgtaataataatccata

SEQ ID NO: 61911 - DNA, 22 bp, Artificial Sequence
  chemically synthesized
taataataatccatagtaatta

SEQ ID NO: 61912 - DNA, 22 bp, Artificial Sequence
  chemically synthesized
tcccatagtatgctgtcctttg

SEQ ID NO: 61913 - DNA, 22 bp, Artificial Sequence
  chemically synthesized
tcctttgttacaggagcattgg

SEQ ID NO: 61914 - DNA, 22 bp, Artificial Sequence
  chemically synthesized
tgttacaggagcattggattac

SEQ ID NO: 61915 - DNA, 22 bp, Artificial Sequence
  chemically synthesized
gttacaggagcattggattact

SEQ ID NO: 61916 - DNA, 22 bp, Artificial Sequence
  chemically synthesized
ttacaggagcattggattactg

SEQ ID NO: 61917 - DNA, 22 bp, Artificial Sequence
  chemically synthesized
caggagcattggattactgtga

SEQ ID NO: 61918 - DNA, 22 bp, Artificial Sequence
  chemically synthesized
gattactgtgaagacgtgtcct

SEQ ID NO: 61919 - DNA, 22 bp, Artificial Sequence
  chemically synthesized
ctgtgaagacgtgtcctgtata

SEQ ID NO: 61920 - DNA, 22 bp, Artificial Sequence
  chemically synthesized
tgaagacgtgtcctgtatacag

SEQ ID NO: 61921 - DNA, 22 bp, Artificial Sequence
  chemically synthesized
tatacagtttcaacagcttgtt

SEQ ID NO: 61922 - DNA, 22 bp, Artificial Sequence
  chemically synthesized
caacagcttgtttttacttctt

SEQ ID NO: 61923 - DNA, 22 bp, Artificial Sequence
  chemically synthesized
aacagcttgtttttacttcttc

SEQ ID NO: 61924 - DNA, 22 bp, Artificial Sequence
  chemically synthesized
gtttttacttcttcccttctcc

SEQ ID NO: 61925 - DNA, 22 bp, Artificial Sequence
  chemically synthesized
tttttacttcttcccttctccc

SEQ ID NO: 61926 - DNA, 22 bp, Artificial Sequence
  chemically synthesized
ttacttcttcccttctccccgc

SEQ ID NO: 61927 - DNA, 22 bp, Artificial Sequence
  chemically synthesized
tacttcttcccttctccccgca

SEQ ID NO: 61928 - DNA, 22 bp, Artificial Sequence
  chemically synthesized
acttcttcccttctccccgcac

SEQ ID NO: 61929 - DNA, 22 bp, Artificial Sequence
  chemically synthesized
cttcttcccttctccccgcacc

SEQ ID NO: 61930 - DNA, 22 bp, Artificial Sequence
  chemically synthesized
cttcccttctccccgcacccgt

SEQ ID NO: 61931 - DNA, 22 bp, Artificial Sequence
  chemically synthesized
ttcccttctccccgcacccgtc

SEQ ID NO: 61932 - DNA, 22 bp, Artificial Sequence
  chemically synthesized
cccttctccccgcacccgtcgc

SEQ ID NO: 61933 - DNA, 22 bp, Artificial Sequence
  chemically synthesized
ccttctccccgcacccgtcgcc

SEQ ID NO: 61934 - DNA, 22 bp, Artificial Sequence
  chemically synthesized
ctccccgcacccgtcgcccccc

SEQ ID NO: 61935 - DNA, 22 bp, Artificial Sequence
  chemically synthesized
tccccgcacccgtcgcccccca

SEQ ID NO: 61936 - DNA, 22 bp, Artificial Sequence
  chemically synthesized
cccgcacccgtcgccccccacc

SEQ ID NO: 61937 - DNA, 22 bp, Artificial Sequence
  chemically synthesized
tctgtcttgtgctgtttggaag

SEQ ID NO: 61938 - DNA, 22 bp, Artificial Sequence
  chemically synthesized
ctgtcttgtgctgtttggaaga

SEQ ID NO: 61939 - DNA, 22 bp, Artificial Sequence
  chemically synthesized
tgtcttgtgctgtttggaagac

SEQ ID NO: 61940 - DNA, 22 bp, Artificial Sequence
  chemically synthesized
tcttgtgctgtttggaagacaa

SEQ ID NO: 61941 - DNA, 22 bp, Artificial Sequence
  chemically synthesized
gtgctgtttggaagacaatttc

SEQ ID NO: 61942 - DNA, 22 bp, Artificial Sequence
  chemically synthesized
tgctgtttggaagacaatttcc

SEQ ID NO: 61943 - DNA, 22 bp, Artificial Sequence
  chemically synthesized
tttggaagacaatttccacatt

SEQ ID NO: 61944 - DNA, 22 bp, Artificial Sequence
  chemically synthesized
ggaagacaatttccacatttct

SEQ ID NO: 61945 - DNA, 22 bp, Artificial Sequence
  chemically synthesized
gaagacaatttccacatttctg

SEQ ID NO: 61946 - DNA, 22 bp, Artificial Sequence
  chemically synthesized
ccacatttctgccatatgtctt

SEQ ID NO: 61947 - DNA, 22 bp, Artificial Sequence
  chemically synthesized
cacatttctgccatatgtctta

SEQ ID NO: 61948 - DNA, 22 bp, Artificial Sequence
  chemically synthesized
ctgccatatgtcttagaaaagc

SEQ ID NO: 61949 - DNA, 22 bp, Artificial Sequence
  chemically synthesized
tgccatatgtcttagaaaagct

SEQ ID NO: 61950 - DNA, 22 bp, Artificial Sequence
  chemically synthesized
ccatatgtcttagaaaagctgg

SEQ ID NO: 61951 - DNA, 22 bp, Artificial Sequence
  chemically synthesized
agaaaagctggggacttagaag

SEQ ID NO: 61952 - DNA, 22 bp, Artificial Sequence
  chemically synthesized
gaaaagctggggacttagaagc

SEQ ID NO: 61953 - DNA, 22 bp, Artificial Sequence
  chemically synthesized
gggacttagaagcagtagccga

SEQ ID NO: 61954 - DNA, 22 bp, Artificial Sequence
  chemically synthesized
agaagcagtagccgacttagga

SEQ ID NO: 61955 - DNA, 22 bp, Artificial Sequence
  chemically synthesized
gaagcagtagccgacttaggac

SEQ ID NO: 61956 - DNA, 22 bp, Artificial Sequence
  chemically synthesized
aggacagcaagctcagctcagg

SEQ ID NO: 61957 - DNA, 22 bp, Artificial Sequence
  chemically synthesized
ggacagcaagctcagctcaggt

SEQ ID NO: 61958 - DNA, 22 bp, Artificial Sequence
  chemically synthesized
agctcaggtgcggaggcagccc

SEQ ID NO: 61959 - DNA, 22 bp, Artificial Sequence
  chemically synthesized
aggtgcggaggcagccctgtgt

SEQ ID NO: 61960 - DNA, 22 bp, Artificial Sequence
  chemically synthesized
tgtaagagactctgttatgcag

SEQ ID NO: 61961 - DNA, 22 bp, Artificial Sequence
  chemically synthesized
tgttatgcagtgagctgttgaa

SEQ ID NO: 61962 - DNA, 22 bp, Artificial Sequence
  chemically synthesized
ttatgcagtgagctgttgaaac

SEQ ID NO: 61963 - DNA, 22 bp, Artificial Sequence
  chemically synthesized
tgcagtgagctgttgaaacagc

SEQ ID NO: 61964 - DNA, 22 bp, Artificial Sequence
  chemically synthesized
ttgaaacagctgcatgtggaaa

SEQ ID NO: 61965 - DNA, 22 bp, Artificial Sequence
  chemically synthesized
aaacagctgcatgtggaaacag

SEQ ID NO: 61966 - DNA, 22 bp, Artificial Sequence
  chemically synthesized
catgtggaaacagttcttcccc

SEQ ID NO: 61967 - DNA, 22 bp, Artificial Sequence
  chemically synthesized
ttccccttgcctgtcctcattt

SEQ ID NO: 61968 - DNA, 22 bp, Artificial Sequence
  chemically synthesized
ccccttgcctgtcctcatttct

SEQ ID NO: 61969 - DNA, 22 bp, Artificial Sequence
  chemically synthesized
cccttgcctgtcctcatttctt

SEQ ID NO: 61970 - DNA, 22 bp, Artificial Sequence
  chemically synthesized
gcctgtcctcatttcttgagag

SEQ ID NO: 61971 - DNA, 22 bp, Artificial Sequence
  chemically synthesized
cctgtcctcatttcttgagaga

SEQ ID NO: 61972 - DNA, 22 bp, Artificial Sequence
  chemically synthesized
tcctcatttcttgagagactcc

SEQ ID NO: 61973 - DNA, 22 bp, Artificial Sequence
  chemically synthesized
atttcttgagagactccaaaac

SEQ ID NO: 61974 - DNA, 22 bp, Artificial Sequence
  chemically synthesized
cttgagagactccaaaacatct

SEQ ID NO: 61975 - DNA, 22 bp, Artificial Sequence
  chemically synthesized
ttgagagactccaaaacatctg

SEQ ID NO: 61976 - DNA, 22 bp, Artificial Sequence
  chemically synthesized
gagagactccaaaacatctgaa

SEQ ID NO: 61977 - DNA, 22 bp, Artificial Sequence
  chemically synthesized
agagactccaaaacatctgaaa

SEQ ID NO: 61978 - DNA, 22 bp, Artificial Sequence
  chemically synthesized
caaaacatctgaaaatgtaaaa

SEQ ID NO: 61979 - DNA, 22 bp, Artificial Sequence
  chemically synthesized
aaaatgtaaaagcacttcacaa

SEQ ID NO: 61980 - DNA, 22 bp, Artificial Sequence
  chemically synthesized
cacaaggttttaacttttctgg

SEQ ID NO: 61981 - DNA, 22 bp, Artificial Sequence
  chemically synthesized
acaaggttttaacttttctggc

SEQ ID NO: 61982 - DNA, 22 bp, Artificial Sequence
  chemically synthesized
taacttttctggcttgaacgga

SEQ ID NO: 61983 - DNA, 22 bp, Artificial Sequence
  chemically synthesized
aacttttctggcttgaacggaa

SEQ ID NO: 61984 - DNA, 22 bp, Artificial Sequence
  chemically synthesized
acttttctggcttgaacggaag

SEQ ID NO: 61985 - DNA, 22 bp, Artificial Sequence
  chemically synthesized
ttctggcttgaacggaagcagc

SEQ ID NO: 61986 - DNA, 22 bp, Artificial Sequence
  chemically synthesized
tctggcttgaacggaagcagct

SEQ ID NO: 61987 - DNA, 22 bp, Artificial Sequence
  chemically synthesized
ctggcttgaacggaagcagctt

SEQ ID NO: 61988 - DNA, 22 bp, Artificial Sequence
  chemically synthesized
tggcttgaacggaagcagcttc

SEQ ID NO: 61989 - DNA, 22 bp, Artificial Sequence
  chemically synthesized
gcttgaacggaagcagcttcaa

SEQ ID NO: 61990 - DNA, 22 bp, Artificial Sequence
  chemically synthesized
gaacggaagcagcttcaagtca

SEQ ID NO: 61991 - DNA, 22 bp, Artificial Sequence
  chemically synthesized
aacggaagcagcttcaagtcaa

SEQ ID NO: 61992 - DNA, 22 bp, Artificial Sequence
  chemically synthesized
caagtcaacaagagcacaatag

SEQ ID NO: 61993 - DNA, 22 bp, Artificial Sequence
  chemically synthesized
aagtcaacaagagcacaatagt

SEQ ID NO: 61994 - DNA, 22 bp, Artificial Sequence
  chemically synthesized
tgtaggttttggacacagtttt

SEQ ID NO: 61995 - DNA, 22 bp, Artificial Sequence
  chemically synthesized
gtaggttttggacacagttttc

SEQ ID NO: 61996 - DNA, 22 bp, Artificial Sequence
  chemically synthesized
taggttttggacacagttttct

SEQ ID NO: 61997 - DNA, 22 bp, Artificial Sequence
  chemically synthesized
tggacacagttttctagctttt

SEQ ID NO: 61998 - DNA, 22 bp, Artificial Sequence
  chemically synthesized
ggacacagttttctagcttttc

SEQ ID NO: 61999 - DNA, 22 bp, Artificial Sequence
  chemically synthesized
gacacagttttctagcttttca

SEQ ID NO: 62000 - DNA, 22 bp, Artificial Sequence
  chemically synthesized
tctagcttttcaagaaaggcaa

SEQ ID NO: 62001 - DNA, 22 bp, Artificial Sequence
  chemically synthesized
ctagcttttcaagaaaggcaag

SEQ ID NO: 62002 - DNA, 22 bp, Artificial Sequence
  chemically synthesized
tagcttttcaagaaaggcaagg

SEQ ID NO: 62003 - DNA, 22 bp, Artificial Sequence
  chemically synthesized
gcttttcaagaaaggcaagggc

SEQ ID NO: 62004 - DNA, 22 bp, Artificial Sequence
  chemically synthesized
ttcaagaaaggcaagggccctc

SEQ ID NO: 62005 - DNA, 22 bp, Artificial Sequence
  chemically synthesized
tcaagaaaggcaagggccctcc

SEQ ID NO: 62006 - DNA, 22 bp, Artificial Sequence
  chemically synthesized
caagaaaggcaagggccctcct

SEQ ID NO: 62007 - DNA, 22 bp, Artificial Sequence
  chemically synthesized
aagaaaggcaagggccctcctt

SEQ ID NO: 62008 - DNA, 22 bp, Artificial Sequence
  chemically synthesized
cttccctccctcccttcccttc

SEQ ID NO: 62009 - DNA, 22 bp, Artificial Sequence
  chemically synthesized
ccctccctcccttcccttccct

SEQ ID NO: 62010 - DNA, 22 bp, Artificial Sequence
  chemically synthesized
cctccctcccttcccttccctt

SEQ ID NO: 62011 - DNA, 22 bp, Artificial Sequence
  chemically synthesized
cctcccttcccttcccttccct

SEQ ID NO: 62012 - DNA, 22 bp, Artificial Sequence
  chemically synthesized
ccttcccttcccttcccttccc

SEQ ID NO: 62013 - DNA, 22 bp, Artificial Sequence
  chemically synthesized
cccttcccttcccttcccttcc

SEQ ID NO: 62014 - DNA, 22 bp, Artificial Sequence
  chemically synthesized
ccttcccttcccttcccttccc

SEQ ID NO: 62015 - DNA, 22 bp, Artificial Sequence
  chemically synthesized
cccttcccttcccttcccttcc

SEQ ID NO: 62016 - DNA, 22 bp, Artificial Sequence
  chemically synthesized
ccttcccttcccttcccttccc

SEQ ID NO: 62017 - DNA, 22 bp, Artificial Sequence
  chemically synthesized
cccttcccttcccttcccttcc

SEQ ID NO: 62018 - DNA, 22 bp, Artificial Sequence
  chemically synthesized
ccttcccttcccttcccttccc

SEQ ID NO: 62019 - DNA, 22 bp, Artificial Sequence
  chemically synthesized
cccttcccttcccttcccttcc

SEQ ID NO: 62020 - DNA, 22 bp, Artificial Sequence
  chemically synthesized
ccttcccttcccttcccttccc

SEQ ID NO: 62021 - DNA, 22 bp, Artificial Sequence
  chemically synthesized
cccttcccttcccttcccttcc

SEQ ID NO: 62022 - DNA, 22 bp, Artificial Sequence
  chemically synthesized
ccttcccttcccttcccttccc

SEQ ID NO: 62023 - DNA, 22 bp, Artificial Sequence
  chemically synthesized
cccttcccttcccttcccttcc

SEQ ID NO: 62024 - DNA, 22 bp, Artificial Sequence
  chemically synthesized
ccttcccttcccttcccttccc

SEQ ID NO: 62025 - DNA, 22 bp, Artificial Sequence
  chemically synthesized
cccttcccttcccttcccttcc

SEQ ID NO: 62026 - DNA, 22 bp, Artificial Sequence
  chemically synthesized
ccttcccttcccttcccttccc

SEQ ID NO: 62027 - DNA, 22 bp, Artificial Sequence
  chemically synthesized
cccttcccttcccttcccttcc

SEQ ID NO: 62028 - DNA, 22 bp, Artificial Sequence
  chemically synthesized
ccttcccttcccttcccttccc

SEQ ID NO: 62029 - DNA, 22 bp, Artificial Sequence
  chemically synthesized
cccttcccttcccttcccctcc

SEQ ID NO: 62030 - DNA, 22 bp, Artificial Sequence
  chemically synthesized
ccttcccttcccttcccctccc

SEQ ID NO: 62031 - DNA, 22 bp, Artificial Sequence
  chemically synthesized
cccttcccttcccctcccctcc

SEQ ID NO: 62032 - DNA, 22 bp, Artificial Sequence
  chemically synthesized
ccttcccttcccctcccctccc

SEQ ID NO: 62033 - DNA, 22 bp, Artificial Sequence
  chemically synthesized
cccttcccctcccctcccctcc

SEQ ID NO: 62034 - DNA, 22 bp, Artificial Sequence
  chemically synthesized
ccttcccctcccctcccctccc

SEQ ID NO: 62035 - DNA, 22 bp, Artificial Sequence
  chemically synthesized
cccctcccctcccctcccctcc

SEQ ID NO: 62036 - DNA, 22 bp, Artificial Sequence
  chemically synthesized
ccctcccctcccctcccctccc

SEQ ID NO: 62037 - DNA, 22 bp, Artificial Sequence
  chemically synthesized
ccctcccctcccctcccctccc

SEQ ID NO: 62038 - DNA, 22 bp, Artificial Sequence
  chemically synthesized
ccctcccctcccctcccctccc

SEQ ID NO: 62039 - DNA, 22 bp, Artificial Sequence
  chemically synthesized
ccctcccctcccctcccctccc

SEQ ID NO: 62040 - DNA, 22 bp, Artificial Sequence
  chemically synthesized
ccctcccctcccctcccctccc

SEQ ID NO: 62041 - DNA, 22 bp, Artificial Sequence
  chemically synthesized
ccctcccctcccctcccctccc

SEQ ID NO: 62042 - DNA, 22 bp, Artificial Sequence
  chemically synthesized
ccctcccctcccctcccctccc

SEQ ID NO: 62043 - DNA, 22 bp, Artificial Sequence
  chemically synthesized
ccctcccctcccctcccctccc

SEQ ID NO: 62044 - DNA, 22 bp, Artificial Sequence
  chemically synthesized
ccctcccctcccctcccctccc

SEQ ID NO: 62045 - DNA, 22 bp, Artificial Sequence
  chemically synthesized
ccctcccctcccctcccctccc

SEQ ID NO: 62046 - DNA, 22 bp, Artificial Sequence
  chemically synthesized
ccctcccctcccctcccctccc

SEQ ID NO: 62047 - DNA, 22 bp, Artificial Sequence
  chemically synthesized
ccctcccctcccctcccctccc

SEQ ID NO: 62048 - DNA, 22 bp, Artificial Sequence
  chemically synthesized
ccctcccctcccctccctccct

SEQ ID NO: 62049 - DNA, 22 bp, Artificial Sequence
  chemically synthesized
ccctcccctccctccctccctt

SEQ ID NO: 62050 - DNA, 22 bp, Artificial Sequence
  chemically synthesized
ccctccctccctcccttccttc

SEQ ID NO: 62051 - DNA, 22 bp, Artificial Sequence
  chemically synthesized
cctccctcccttccttccttcc

SEQ ID NO: 62052 - DNA, 22 bp, Artificial Sequence
  chemically synthesized
cctcccttccttccttccttcc

SEQ ID NO: 62053 - DNA, 22 bp, Artificial Sequence
  chemically synthesized
ccttccttccttccttccttcc

SEQ ID NO: 62054 - DNA, 22 bp, Artificial Sequence
  chemically synthesized
ccttccttccttccttccttcc

SEQ ID NO: 62055 - DNA, 22 bp, Artificial Sequence
  chemically synthesized
cttccttccttccttccttcct

SEQ ID NO: 62056 - DNA, 22 bp, Artificial Sequence
  chemically synthesized
ccttccttccttccttcctttc

SEQ ID NO: 62057 - DNA, 22 bp, Artificial Sequence
  chemically synthesized
cttccttccttccttcctttct

SEQ ID NO: 62058 - DNA, 22 bp, Artificial Sequence
  chemically synthesized
ccttccttccttcctttcttcc

SEQ ID NO: 62059 - DNA, 22 bp, Artificial Sequence
  chemically synthesized
cttccttccttcctttcttcct

SEQ ID NO: 62060 - DNA, 22 bp, Artificial Sequence
  chemically synthesized
ccttccttcctttcttccttgt

SEQ ID NO: 62061 - DNA, 22 bp, Artificial Sequence
  chemically synthesized
cttccttcctttcttccttgtc

SEQ ID NO: 62062 - DNA, 22 bp, Artificial Sequence
  chemically synthesized
ccttcctttcttccttgtcttg

SEQ ID NO: 62063 - DNA, 22 bp, Artificial Sequence
  chemically synthesized
cttcctttcttccttgtcttgc

SEQ ID NO: 62064 - DNA, 22 bp, Artificial Sequence
  chemically synthesized
cctttcttccttgtcttgcttt

SEQ ID NO: 62065 - DNA, 22 bp, Artificial Sequence
  chemically synthesized
ctttcttccttgtcttgctttg

SEQ ID NO: 62066 - DNA, 22 bp, Artificial Sequence
  chemically synthesized
tcttccttgtcttgctttgcat

SEQ ID NO: 62067 - DNA, 22 bp, Artificial Sequence
  chemically synthesized
cttccttgtcttgctttgcatt

SEQ ID NO: 62068 - DNA, 22 bp, Artificial Sequence
  chemically synthesized
ttccttgtcttgctttgcattc

SEQ ID NO: 62069 - DNA, 22 bp, Artificial Sequence
  chemically synthesized
ccttgtcttgctttgcattctg

SEQ ID NO: 62070 - DNA, 22 bp, Artificial Sequence
  chemically synthesized
cttgtcttgctttgcattctgc

SEQ ID NO: 62071 - DNA, 22 bp, Artificial Sequence
  chemically synthesized
gtcttgctttgcattctgcaga

SEQ ID NO: 62072 - DNA, 22 bp, Artificial Sequence
  chemically synthesized
tcttgctttgcattctgcagag

SEQ ID NO: 62073 - DNA, 22 bp, Artificial Sequence
  chemically synthesized
gctttgcattctgcagagctag

SEQ ID NO: 62074 - DNA, 22 bp, Artificial Sequence
  chemically synthesized
ctttgcattctgcagagctaga

SEQ ID NO: 62075 - DNA, 22 bp, Artificial Sequence
  chemically synthesized
tgcattctgcagagctagaaga

SEQ ID NO: 62076 - DNA, 22 bp, Artificial Sequence
  chemically synthesized
gcattctgcagagctagaagag

SEQ ID NO: 62077 - DNA, 22 bp, Artificial Sequence
  chemically synthesized
cattctgcagagctagaagagc

SEQ ID NO: 62078 - DNA, 22 bp, Artificial Sequence
  chemically synthesized
tgcagagctagaagagcattta

SEQ ID NO: 62079 - DNA, 22 bp, Artificial Sequence
  chemically synthesized
cagagctagaagagcatttaat

SEQ ID NO: 62080 - DNA, 22 bp, Artificial Sequence
  chemically synthesized
gaagagcatttaatccttggcc

SEQ ID NO: 62081 - DNA, 22 bp, Artificial Sequence
  chemically synthesized
aatccttggccctctgtctgtt

SEQ ID NO: 62082 - DNA, 22 bp, Artificial Sequence
  chemically synthesized
atccttggccctctgtctgttg

SEQ ID NO: 62083 - DNA, 22 bp, Artificial Sequence
  chemically synthesized
ggccctctgtctgttgggatat

SEQ ID NO: 62084 - DNA, 22 bp, Artificial Sequence
  chemically synthesized
gccctctgtctgttgggatatt

SEQ ID NO: 62085 - DNA, 22 bp, Artificial Sequence
  chemically synthesized
tgtctgttgggatattatgttt

SEQ ID NO: 62086 - DNA, 22 bp, Artificial Sequence
  chemically synthesized
tctgttgggatattatgttttt

SEQ ID NO: 62087 - DNA, 22 bp, Artificial Sequence
  chemically synthesized
ttgggatattatgtttttttaa

SEQ ID NO: 62088 - DNA, 22 bp, Artificial Sequence
  chemically synthesized
ggatattatgtttttttaatag

SEQ ID NO: 62089 - DNA, 22 bp, Artificial Sequence
  chemically synthesized
tgtttttttaatagtgcttgtt

SEQ ID NO: 62090 - DNA, 22 bp, Artificial Sequence
  chemically synthesized
ttttaatagtgcttgtttatga

SEQ ID NO: 62091 - DNA, 22 bp, Artificial Sequence
  chemically synthesized
tttaatagtgcttgtttatgac

SEQ ID NO: 62092 - DNA, 22 bp, Artificial Sequence
  chemically synthesized
ttaatagtgcttgtttatgact

SEQ ID NO: 62093 - DNA, 22 bp, Artificial Sequence
  chemically synthesized
taatagtgcttgtttatgacta

SEQ ID NO: 62094 - DNA, 22 bp, Artificial Sequence
  chemically synthesized
aatagtgcttgtttatgactaa

SEQ ID NO: 62095 - DNA, 22 bp, Artificial Sequence
  chemically synthesized
atagtgcttgtttatgactaag

SEQ ID NO: 62096 - DNA, 22 bp, Artificial Sequence
  chemically synthesized
gtttatgactaaggtcaaagac

SEQ ID NO: 62097 - DNA, 22 bp, Artificial Sequence
  chemically synthesized
tttatgactaaggtcaaagaca

SEQ ID NO: 62098 - DNA, 22 bp, Artificial Sequence
  chemically synthesized
atgactaaggtcaaagacagta

SEQ ID NO: 62099 - DNA, 22 bp, Artificial Sequence
  chemically synthesized
tgactaaggtcaaagacagtat

SEQ ID NO: 62100 - DNA, 22 bp, Artificial Sequence
  chemically synthesized
aggtcaaagacagtatttcaga

SEQ ID NO: 62101 - DNA, 22 bp, Artificial Sequence
  chemically synthesized
cagaacaaaaattagagttagt

SEQ ID NO: 62102 - DNA, 22 bp, Artificial Sequence
  chemically synthesized
agaacaaaaattagagttagtt

SEQ ID NO: 62103 - DNA, 22 bp, Artificial Sequence
  chemically synthesized
gagttagttcataattgagtac

SEQ ID NO: 62104 - DNA, 22 bp, Artificial Sequence
  chemically synthesized
gttcataattgagtacatatgt

SEQ ID NO: 62105 - DNA, 22 bp, Artificial Sequence
  chemically synthesized
ataattgagtacatatgtacgt

SEQ ID NO: 62106 - DNA, 22 bp, Artificial Sequence
  chemically synthesized
agtacatatgtacgttactgtt

SEQ ID NO: 62107 - DNA, 22 bp, Artificial Sequence
  chemically synthesized
ctgtttatttttatagtttgct

SEQ ID NO: 62108 - DNA, 22 bp, Artificial Sequence
  chemically synthesized
tttatttttatagtttgctaat

SEQ ID NO: 62109 - DNA, 22 bp, Artificial Sequence
  chemically synthesized
atttttatagtttgctaattta

SEQ ID NO: 62110 - DNA, 22 bp, Artificial Sequence
  chemically synthesized
tttttatagtttgctaatttat

SEQ ID NO: 62111 - DNA, 22 bp, Artificial Sequence
  chemically synthesized
ttatagtttgctaatttatttt

SEQ ID NO: 62112 - DNA, 22 bp, Artificial Sequence
  chemically synthesized
tatagtttgctaatttattttt

SEQ ID NO: 62113 - DNA, 22 bp, Artificial Sequence
  chemically synthesized
atagtttgctaatttattttta

SEQ ID NO: 62114 - DNA, 22 bp, Artificial Sequence
  chemically synthesized
tagtttgctaatttatttttaa

SEQ ID NO: 62115 - DNA, 22 bp, Artificial Sequence
  chemically synthesized
gctaatttatttttaaacagct

SEQ ID NO: 62116 - DNA, 22 bp, Artificial Sequence
  chemically synthesized
ctaatttatttttaaacagctc

SEQ ID NO: 62117 - DNA, 22 bp, Artificial Sequence
  chemically synthesized
atttatttttaaacagctcagt

SEQ ID NO: 62118 - DNA, 22 bp, Artificial Sequence
  chemically synthesized
atttttaaacagctcagttacg

SEQ ID NO: 62119 - DNA, 22 bp, Artificial Sequence
  chemically synthesized
tttttaaacagctcagttacgc

SEQ ID NO: 62120 - DNA, 22 bp, Artificial Sequence
  chemically synthesized
ttaaacagctcagttacgccaa

SEQ ID NO: 62121 - DNA, 22 bp, Artificial Sequence
  chemically synthesized
taaacagctcagttacgccaac

SEQ ID NO: 62122 - DNA, 22 bp, Artificial Sequence
  chemically synthesized
aaacagctcagttacgccaaca

SEQ ID NO: 62123 - DNA, 22 bp, Artificial Sequence
  chemically synthesized
aacagctcagttacgccaacat

SEQ ID NO: 62124 - DNA, 22 bp, Artificial Sequence
  chemically synthesized
agttacgccaacatgtttatag

SEQ ID NO: 62125 - DNA, 22 bp, Artificial Sequence
  chemically synthesized
cgccaacatgtttatagctctg

SEQ ID NO: 62126 - DNA, 22 bp, Artificial Sequence
  chemically synthesized
atagctctgttcatcacatgcc

SEQ ID NO: 62127 - DNA, 22 bp, Artificial Sequence
  chemically synthesized
tagctctgttcatcacatgcct

SEQ ID NO: 62128 - DNA, 22 bp, Artificial Sequence
  chemically synthesized
tgttcatcacatgccttaccag

SEQ ID NO: 62129 - DNA, 22 bp, Artificial Sequence
  chemically synthesized
ttcatcacatgccttaccagtc

SEQ ID NO: 62130 - DNA, 22 bp, Artificial Sequence
  chemically synthesized
atcacatgccttaccagtcagg

SEQ ID NO: 62131 - DNA, 22 bp, Artificial Sequence
  chemically synthesized
accagtcagggtgttaaaaggc

SEQ ID NO: 62132 - DNA, 22 bp, Artificial Sequence
  chemically synthesized
ccagtcagggtgttaaaaggca

SEQ ID NO: 62133 - DNA, 22 bp, Artificial Sequence
  chemically synthesized
aaaggcacatgcttttcaatag

SEQ ID NO: 62134 - DNA, 22 bp, Artificial Sequence
  chemically synthesized
ttcaatagtttggatcccaagt

SEQ ID NO: 62135 - DNA, 22 bp, Artificial Sequence
  chemically synthesized
tcaatagtttggatcccaagtt

SEQ ID NO: 62136 - DNA, 22 bp, Artificial Sequence
  chemically synthesized
caatagtttggatcccaagtta

SEQ ID NO: 62137 - DNA, 22 bp, Artificial Sequence
  chemically synthesized
aatagtttggatcccaagttaa

SEQ ID NO: 62138 - DNA, 22 bp, Artificial Sequence
  chemically synthesized
ggatcccaagttaaattagata

SEQ ID NO: 62139 - DNA, 22 bp, Artificial Sequence
  chemically synthesized
gatcccaagttaaattagataa

SEQ ID NO: 62140 - DNA, 22 bp, Artificial Sequence
  chemically synthesized
aattagataatgccatcaggta

SEQ ID NO: 62141 - DNA, 22 bp, Artificial Sequence
  chemically synthesized
gataatgccatcaggtagcaat

SEQ ID NO: 62142 - DNA, 22 bp, Artificial Sequence
  chemically synthesized
aattacattaattgaatgttta

SEQ ID NO: 62143 - DNA, 22 bp, Artificial Sequence
  chemically synthesized
attacattaattgaatgtttag

SEQ ID NO: 62144 - DNA, 22 bp, Artificial Sequence
  chemically synthesized
cattaattgaatgtttaggcgg

SEQ ID NO: 62145 - DNA, 22 bp, Artificial Sequence
  chemically synthesized
attgaatgtttaggcggaaagg

SEQ ID NO: 62146 - DNA, 22 bp, Artificial Sequence
  chemically synthesized
aatgtttaggcggaaaggtagt

SEQ ID NO: 62147 - DNA, 22 bp, Artificial Sequence
  chemically synthesized
aggcggaaaggtagttttgcag

SEQ ID NO: 62148 - DNA, 22 bp, Artificial Sequence
  chemically synthesized
ggcggaaaggtagttttgcaga

SEQ ID NO: 62149 - DNA, 22 bp, Artificial Sequence
  chemically synthesized
tgcagaggctataatgaaatca

SEQ ID NO: 62150 - DNA, 22 bp, Artificial Sequence
  chemically synthesized
gcagaggctataatgaaatcac

SEQ ID NO: 62151 - DNA, 22 bp, Artificial Sequence
  chemically synthesized
cagaggctataatgaaatcaca

SEQ ID NO: 62152 - DNA, 22 bp, Artificial Sequence
  chemically synthesized
taatgaaatcacatttataagt

SEQ ID NO: 62153 - DNA, 22 bp, Artificial Sequence
  chemically synthesized
ataagtacccatgtataaatct

SEQ ID NO: 62154 - DNA, 22 bp, Artificial Sequence
  chemically synthesized
taagtacccatgtataaatctc

SEQ ID NO: 62155 - DNA, 22 bp, Artificial Sequence
  chemically synthesized
agcattatagacattatttgag

SEQ ID NO: 62156 - DNA, 22 bp, Artificial Sequence
  chemically synthesized
tagacattatttgaggttgctg

SEQ ID NO: 62157 - DNA, 22 bp, Artificial Sequence
  chemically synthesized
tttgaggttgctgacagaaaaa

SEQ ID NO: 62158 - DNA, 22 bp, Artificial Sequence
  chemically synthesized
gaggttgctgacagaaaaatgg

SEQ ID NO: 62159 - DNA, 22 bp, Artificial Sequence
  chemically synthesized
aggttgctgacagaaaaatgga

SEQ ID NO: 62160 - DNA, 22 bp, Artificial Sequence
  chemically synthesized
ctgacagaaaaatggatatata

SEQ ID NO: 62161 - DNA, 22 bp, Artificial Sequence
  chemically synthesized
acagaaaaatggatatatatca

SEQ ID NO: 62162 - DNA, 22 bp, Artificial Sequence
  chemically synthesized
aggaggaaacatgcggggggct

SEQ ID NO: 62163 - DNA, 22 bp, Artificial Sequence
  chemically synthesized
ggaggaaacatgcggggggctg

SEQ ID NO: 62164 - DNA, 22 bp, Artificial Sequence
  chemically synthesized
tcatcagtggtaaatgctgcct

SEQ ID NO: 62165 - DNA, 22 bp, Artificial Sequence
  chemically synthesized
ccttcgccatttaggagactgc

SEQ ID NO: 62166 - DNA, 22 bp, Artificial Sequence
  chemically synthesized
cgccatttaggagactgctggg

SEQ ID NO: 62167 - DNA, 22 bp, Artificial Sequence
  chemically synthesized
gccatttaggagactgctgggc

SEQ ID NO: 62168 - DNA, 22 bp, Artificial Sequence
  chemically synthesized
aggagactgctgggcacggtcg

SEQ ID NO: 62169 - DNA, 22 bp, Artificial Sequence
  chemically synthesized
ggagactgctgggcacggtcgt

SEQ ID NO: 62170 - DNA, 22 bp, Artificial Sequence
  chemically synthesized
ctgggcacggtcgttttcttag

SEQ ID NO: 62171 - DNA, 22 bp, Artificial Sequence
  chemically synthesized
ggcacggtcgttttcttagtga

SEQ ID NO: 62172 - DNA, 22 bp, Artificial Sequence
  chemically synthesized
tcttagtgagctgcctttatca

SEQ ID NO: 62173 - DNA, 22 bp, Artificial Sequence
  chemically synthesized
cttagtgagctgcctttatcat

SEQ ID NO: 62174 - DNA, 22 bp, Artificial Sequence
  chemically synthesized
ttagtgagctgcctttatcatt

SEQ ID NO: 62175 - DNA, 22 bp, Artificial Sequence
  chemically synthesized
agtgagctgcctttatcattag

SEQ ID NO: 62176 - DNA, 22 bp, Artificial Sequence
  chemically synthesized
gtgagctgcctttatcattagc

SEQ ID NO: 62177 - DNA, 22 bp, Artificial Sequence
  chemically synthesized
cctttatcattagccctctaag

SEQ ID NO: 62178 - DNA, 22 bp, Artificial Sequence
  chemically synthesized
tatcattagccctctaagcagc

SEQ ID NO: 62179 - DNA, 22 bp, Artificial Sequence
  chemically synthesized
atcattagccctctaagcagcc

SEQ ID NO: 62180 - DNA, 22 bp, Artificial Sequence
  chemically synthesized
tcattagccctctaagcagcca

SEQ ID NO: 62181 - DNA, 22 bp, Artificial Sequence
  chemically synthesized
gccctctaagcagccatgcaca

SEQ ID NO: 62182 - DNA, 22 bp, Artificial Sequence
  chemically synthesized
taagcagccatgcacaaaggca

SEQ ID NO: 62183 - DNA, 22 bp, Artificial Sequence
  chemically synthesized
agcagccatgcacaaaggcacg

SEQ ID NO: 62184 - DNA, 22 bp, Artificial Sequence
  chemically synthesized
tgttttgtatagccagggcttt

SEQ ID NO: 62185 - DNA, 22 bp, Artificial Sequence
  chemically synthesized
tgtatagccagggctttcctgg

SEQ ID NO: 62186 - DNA, 22 bp, Artificial Sequence
  chemically synthesized
gtatagccagggctttcctgga

SEQ ID NO: 62187 - DNA, 22 bp, Artificial Sequence
  chemically synthesized
tatagccagggctttcctggac

SEQ ID NO: 62188 - DNA, 22 bp, Artificial Sequence
  chemically synthesized
tcctggactcagcatgccagct

SEQ ID NO: 62189 - DNA, 22 bp, Artificial Sequence
  chemically synthesized
cctggactcagcatgccagctg

SEQ ID NO: 62190 - DNA, 22 bp, Artificial Sequence
  chemically synthesized
ctggactcagcatgccagctgg

SEQ ID NO: 62191 - DNA, 22 bp, Artificial Sequence
  chemically synthesized
gactcagcatgccagctggggc

SEQ ID NO: 62192 - DNA, 22 bp, Artificial Sequence
  chemically synthesized
agcatgccagctggggccggct

SEQ ID NO: 62193 - DNA, 22 bp, Artificial Sequence
  chemically synthesized
gggccggctcactgaggctgga

SEQ ID NO: 62194 - DNA, 22 bp, Artificial Sequence
  chemically synthesized
actgaggctggaaaaatgagat

SEQ ID NO: 62195 - DNA, 22 bp, Artificial Sequence
  chemically synthesized
aggctggaaaaatgagatacag

SEQ ID NO: 62196 - DNA, 22 bp, Artificial Sequence
  chemically synthesized
gaaaaatgagatacagtctagt

SEQ ID NO: 62197 - DNA, 22 bp, Artificial Sequence
  chemically synthesized
gtgaggtctttgtcaccttgga

SEQ ID NO: 62198 - DNA, 22 bp, Artificial Sequence
  chemically synthesized
tgtcaccttggagggtctgagg

SEQ ID NO: 62199 - DNA, 22 bp, Artificial Sequence
  chemically synthesized
gtcaccttggagggtctgagga

SEQ ID NO: 62200 - DNA, 22 bp, Artificial Sequence
  chemically synthesized
tcaccttggagggtctgaggac

SEQ ID NO: 62201 - DNA, 22 bp, Artificial Sequence
  chemically synthesized
ggagggtctgaggactggtgcg

SEQ ID NO: 62202 - DNA, 22 bp, Artificial Sequence
  chemically synthesized
gagggtctgaggactggtgcgc

SEQ ID NO: 62203 - DNA, 22 bp, Artificial Sequence
  chemically synthesized
aggactggtgcgctcgggttga

SEQ ID NO: 62204 - DNA, 22 bp, Artificial Sequence
  chemically synthesized
gtgcgctcgggttgacccatgt

SEQ ID NO: 62205 - DNA, 22 bp, Artificial Sequence
  chemically synthesized
gggttgacccatgtggcgtcct

SEQ ID NO: 62206 - DNA, 22 bp, Artificial Sequence
  chemically synthesized
acccatgtggcgtcctgagcca

SEQ ID NO: 62207 - DNA, 22 bp, Artificial Sequence
  chemically synthesized
agccagctctgtcctggatctg

SEQ ID NO: 62208 - DNA, 22 bp, Artificial Sequence
  chemically synthesized
tgtcctggatctgaggaacact

SEQ ID NO: 62209 - DNA, 22 bp, Artificial Sequence
  chemically synthesized
tcctggatctgaggaacactgt

SEQ ID NO: 62210 - DNA, 22 bp, Artificial Sequence
  chemically synthesized
gatctgaggaacactgtctgaa

SEQ ID NO: 62211 - DNA, 22 bp, Artificial Sequence
  chemically synthesized
aggaacactgtctgaagttttc

SEQ ID NO: 62212 - DNA, 22 bp, Artificial Sequence
  chemically synthesized
tctgaagttttccaggggtttg

SEQ ID NO: 62213 - DNA, 22 bp, Artificial Sequence
  chemically synthesized
aagttttccaggggtttgacag

SEQ ID NO: 62214 - DNA, 22 bp, Artificial Sequence
  chemically synthesized
tccaggggtttgacagaccaga

SEQ ID NO: 62215 - DNA, 22 bp, Artificial Sequence
  chemically synthesized
ccaggggtttgacagaccagaa

SEQ ID NO: 62216 - DNA, 22 bp, Artificial Sequence
  chemically synthesized
caggggtttgacagaccagaat

SEQ ID NO: 62217 - DNA, 22 bp, Artificial Sequence
  chemically synthesized
gacagaccagaatgggggccgc

SEQ ID NO: 62218 - DNA, 22 bp, Artificial Sequence
  chemically synthesized
acagaccagaatgggggccgct

SEQ ID NO: 62219 - DNA, 22 bp, Artificial Sequence
  chemically synthesized
gcagggcctggtggcattagat

SEQ ID NO: 62220 - DNA, 22 bp, Artificial Sequence
  chemically synthesized
gtggcattagatgtggcaagtc

SEQ ID NO: 62221 - DNA, 22 bp, Artificial Sequence
  chemically synthesized
gatgtggcaagtcagaccacag

SEQ ID NO: 62222 - DNA, 22 bp, Artificial Sequence
  chemically synthesized
gcctgtgaaggtgactcttcct

SEQ ID NO: 62223 - DNA, 22 bp, Artificial Sequence
  chemically synthesized
tgaaggtgactcttcctctgat

SEQ ID NO: 62224 - DNA, 22 bp, Artificial Sequence
  chemically synthesized
ttcctctgatgcagagagaatt

SEQ ID NO: 62225 - DNA, 22 bp, Artificial Sequence
  chemically synthesized
cctctgatgcagagagaattaa

SEQ ID NO: 62226 - DNA, 22 bp, Artificial Sequence
  chemically synthesized
ctctgatgcagagagaattaaa

SEQ ID NO: 62227 - DNA, 22 bp, Artificial Sequence
  chemically synthesized
tgatgcagagagaattaaatga

SEQ ID NO: 62228 - DNA, 22 bp, Artificial Sequence
  chemically synthesized
atgcagagagaattaaatgagg

SEQ ID NO: 62229 - DNA, 22 bp, Artificial Sequence
  chemically synthesized
aatgaggaggccagagccctag

SEQ ID NO: 62230 - DNA, 22 bp, Artificial Sequence
  chemically synthesized
gctgctgcctcccctccatgcc

SEQ ID NO: 62231 - DNA, 22 bp, Artificial Sequence
  chemically synthesized
ctgcctcccctccatgccctca

SEQ ID NO: 62232 - DNA, 22 bp, Artificial Sequence
  chemically synthesized
cctcccctccatgccctcagag

SEQ ID NO: 62233 - DNA, 22 bp, Artificial Sequence
  chemically synthesized
ccctccatgccctcagagaaag

SEQ ID NO: 62234 - DNA, 22 bp, Artificial Sequence
  chemically synthesized
catgccctcagagaaagtggga

SEQ ID NO: 62235 - DNA, 22 bp, Artificial Sequence
  chemically synthesized
agagaaagtgggagtgctggca

SEQ ID NO: 62236 - DNA, 22 bp, Artificial Sequence
  chemically synthesized
gcatttggctaacaggacaggc

SEQ ID NO: 62237 - DNA, 22 bp, Artificial Sequence
  chemically synthesized
ggctaacaggacaggctatttt

SEQ ID NO: 62238 - DNA, 22 bp, Artificial Sequence
  chemically synthesized
gctaacaggacaggctattttg

SEQ ID NO: 62239 - DNA, 22 bp, Artificial Sequence
  chemically synthesized
acaggacaggctattttgggcc

SEQ ID NO: 62240 - DNA, 22 bp, Artificial Sequence
  chemically synthesized
ttttgggcccaggtgttctttc

SEQ ID NO: 62241 - DNA, 22 bp, Artificial Sequence
  chemically synthesized
tgggcccaggtgttctttctga

SEQ ID NO: 62242 - DNA, 22 bp, Artificial Sequence
  chemically synthesized
gggcccaggtgttctttctgac

SEQ ID NO: 62243 - DNA, 22 bp, Artificial Sequence
  chemically synthesized
ggcccaggtgttctttctgacc

SEQ ID NO: 62244 - DNA, 22 bp, Artificial Sequence
  chemically synthesized
tttctgacctctctgtgatttc

SEQ ID NO: 62245 - DNA, 22 bp, Artificial Sequence
  chemically synthesized
tctgacctctctgtgatttcta

SEQ ID NO: 62246 - DNA, 22 bp, Artificial Sequence
  chemically synthesized
ctgacctctctgtgatttctat

SEQ ID NO: 62247 - DNA, 22 bp, Artificial Sequence
  chemically synthesized
tgacctctctgtgatttctatg

SEQ ID NO: 62248 - DNA, 22 bp, Artificial Sequence
  chemically synthesized
acctctctgtgatttctatggt

SEQ ID NO: 62249 - DNA, 22 bp, Artificial Sequence
  chemically synthesized
tctgtgatttctatggtgggtg

SEQ ID NO: 62250 - DNA, 22 bp, Artificial Sequence
  chemically synthesized
tgtgatttctatggtgggtgtc

SEQ ID NO: 62251 - DNA, 22 bp, Artificial Sequence
  chemically synthesized
tgatttctatggtgggtgtcaa

SEQ ID NO: 62252 - DNA, 22 bp, Artificial Sequence
  chemically synthesized
ctatggtgggtgtcaaaggatg

SEQ ID NO: 62253 - DNA, 22 bp, Artificial Sequence
  chemically synthesized
tatggtgggtgtcaaaggatgg

SEQ ID NO: 62254 - DNA, 22 bp, Artificial Sequence
  chemically synthesized
tggtgggtgtcaaaggatggct

SEQ ID NO: 62255 - DNA, 22 bp, Artificial Sequence
  chemically synthesized
ggaaaggggatttttaggtgtg

SEQ ID NO: 62256 - DNA, 22 bp, Artificial Sequence
  chemically synthesized
ttaggtgtgctaacatcccttg

SEQ ID NO: 62257 - DNA, 22 bp, Artificial Sequence
  chemically synthesized
taggtgtgctaacatcccttgc

SEQ ID NO: 62258 - DNA, 22 bp, Artificial Sequence
  chemically synthesized
aggtgtgctaacatcccttgcc

SEQ ID NO: 62259 - DNA, 22 bp, Artificial Sequence
  chemically synthesized
ggtgtgctaacatcccttgcct

SEQ ID NO: 62260 - DNA, 22 bp, Artificial Sequence
  chemically synthesized
acatcccttgcctatgagtgat

SEQ ID NO: 62261 - DNA, 22 bp, Artificial Sequence
  chemically synthesized
gcctatgagtgattcactatct

SEQ ID NO: 62262 - DNA, 22 bp, Artificial Sequence
  chemically synthesized
cctatgagtgattcactatctt

SEQ ID NO: 62263 - DNA, 22 bp, Artificial Sequence
  chemically synthesized
tgagtgattcactatcttctcg

SEQ ID NO: 62264 - DNA, 22 bp, Artificial Sequence
  chemically synthesized
actatcttctcgcaccatctgg

SEQ ID NO: 62265 - DNA, 22 bp, Artificial Sequence
  chemically synthesized
tcttctcgcaccatctggtttc

SEQ ID NO: 62266 - DNA, 22 bp, Artificial Sequence
  chemically synthesized
ctcgcaccatctggtttcaccc

SEQ ID NO: 62267 - DNA, 22 bp, Artificial Sequence
  chemically synthesized
tcgcaccatctggtttcacccg

SEQ ID NO: 62268 - DNA, 22 bp, Artificial Sequence
  chemically synthesized
gcaccatctggtttcacccggg

SEQ ID NO: 62269 - DNA, 22 bp, Artificial Sequence
  chemically synthesized
gtttcacccgggctgcaaagcc

SEQ ID NO: 62270 - DNA, 22 bp, Artificial Sequence
  chemically synthesized
cacccgggctgcaaagcctagt

SEQ ID NO: 62271 - DNA, 22 bp, Artificial Sequence
  chemically synthesized
acccgggctgcaaagcctagtg

SEQ ID NO: 62272 - DNA, 22 bp, Artificial Sequence
  chemically synthesized
caaagcctagtgtggtgtccca

SEQ ID NO: 62273 - DNA, 22 bp, Artificial Sequence
  chemically synthesized
gtgtggtgtcccataccctgca

SEQ ID NO: 62274 - DNA, 22 bp, Artificial Sequence
  chemically synthesized
caaagccctatttgggttattt

SEQ ID NO: 62275 - DNA, 22 bp, Artificial Sequence
  chemically synthesized
tttgggttatttaccaaatgcc

SEQ ID NO: 62276 - DNA, 22 bp, Artificial Sequence
  chemically synthesized
gggttatttaccaaatgccacc

SEQ ID NO: 62277 - DNA, 22 bp, Artificial Sequence
  chemically synthesized
ggttatttaccaaatgccacca

SEQ ID NO: 62278 - DNA, 22 bp, Artificial Sequence
  chemically synthesized
tttaccaaatgccaccatgcca

SEQ ID NO: 62279 - DNA, 22 bp, Artificial Sequence
  chemically synthesized
accaaatgccaccatgccatct

SEQ ID NO: 62280 - DNA, 22 bp, Artificial Sequence
  chemically synthesized
ccaaatgccaccatgccatctc

SEQ ID NO: 62281 - DNA, 22 bp, Artificial Sequence
  chemically synthesized
cacagcatctggcagacgaacc

SEQ ID NO: 62282 - DNA, 22 bp, Artificial Sequence
  chemically synthesized
gcagacgaaccaggtggggctg

SEQ ID NO: 62283 - DNA, 22 bp, Artificial Sequence
  chemically synthesized
ctattgcttctgggtatttacg

SEQ ID NO: 62284 - DNA, 22 bp, Artificial Sequence
  chemically synthesized
ttgcttctgggtatttacggga

SEQ ID NO: 62285 - DNA, 22 bp, Artificial Sequence
  chemically synthesized
cttctgggtatttacgggatgc

SEQ ID NO: 62286 - DNA, 22 bp, Artificial Sequence
  chemically synthesized
ctgggtatttacgggatgcaga

SEQ ID NO: 62287 - DNA, 22 bp, Artificial Sequence
  chemically synthesized
tgggtatttacgggatgcagat

SEQ ID NO: 62288 - DNA, 22 bp, Artificial Sequence
  chemically synthesized
ggtatttacgggatgcagattt

SEQ ID NO: 62289 - DNA, 22 bp, Artificial Sequence
  chemically synthesized
acgggatgcagatttttctgcc

SEQ ID NO: 62290 - DNA, 22 bp, Artificial Sequence
  chemically synthesized
cgggatgcagatttttctgccc

SEQ ID NO: 62291 - DNA, 22 bp, Artificial Sequence
  chemically synthesized
ttctgcccaccgttgttttggg

SEQ ID NO: 62292 - DNA, 22 bp, Artificial Sequence
  chemically synthesized
tctgcccaccgttgttttggga

SEQ ID NO: 62293 - DNA, 22 bp, Artificial Sequence
  chemically synthesized
ctgcccaccgttgttttgggag

SEQ ID NO: 62294 - DNA, 22 bp, Artificial Sequence
  chemically synthesized
tgcccaccgttgttttgggagg

SEQ ID NO: 62295 - DNA, 22 bp, Artificial Sequence
  chemically synthesized
cccaccgttgttttgggaggga

SEQ ID NO: 62296 - DNA, 22 bp, Artificial Sequence
  chemically synthesized
ttttgggagggatttccccctc

SEQ ID NO: 62297 - DNA, 22 bp, Artificial Sequence
  chemically synthesized
tgggagggatttccccctccct

SEQ ID NO: 62298 - DNA, 22 bp, Artificial Sequence
  chemically synthesized
gggagggatttccccctccctc

SEQ ID NO: 62299 - DNA, 22 bp, Artificial Sequence
  chemically synthesized
ggagggatttccccctccctca

SEQ ID NO: 62300 - DNA, 22 bp, Artificial Sequence
  chemically synthesized
ccccctccctcaggtagagttg

SEQ ID NO: 62301 - DNA, 22 bp, Artificial Sequence
  chemically synthesized
cccctccctcaggtagagttgt

SEQ ID NO: 62302 - DNA, 22 bp, Artificial Sequence
  chemically synthesized
cctcaggtagagttgttctcag

SEQ ID NO: 62303 - DNA, 22 bp, Artificial Sequence
  chemically synthesized
aggtagagttgttctcagagat

SEQ ID NO: 62304 - DNA, 22 bp, Artificial Sequence
  chemically synthesized
ttctcagagatatctgtaattg

SEQ ID NO: 62305 - DNA, 22 bp, Artificial Sequence
  chemically synthesized
tcagagatatctgtaattggcc

SEQ ID NO: 62306 - DNA, 22 bp, Artificial Sequence
  chemically synthesized
agagatatctgtaattggccct

SEQ ID NO: 62307 - DNA, 22 bp, Artificial Sequence
  chemically synthesized
taattggcccttcccatttaag

SEQ ID NO: 62308 - DNA, 22 bp, Artificial Sequence
  chemically synthesized
gcccttcccatttaagagtcag

SEQ ID NO: 62309 - DNA, 22 bp, Artificial Sequence
  chemically synthesized
cccatttaagagtcagccacga

SEQ ID NO: 62310 - DNA, 22 bp, Artificial Sequence
  chemically synthesized
ccatttaagagtcagccacgaa

SEQ ID NO: 62311 - DNA, 22 bp, Artificial Sequence
  chemically synthesized
aagagtcagccacgaatgattt

SEQ ID NO: 62312 - DNA, 22 bp, Artificial Sequence
  chemically synthesized
agagtcagccacgaatgattta

SEQ ID NO: 62313 - DNA, 22 bp, Artificial Sequence
  chemically synthesized
attctaaaatgatagacccagg

SEQ ID NO: 62314 - DNA, 22 bp, Artificial Sequence
  chemically synthesized
ttctaaaatgatagacccaggt

SEQ ID NO: 62315 - DNA, 22 bp, Artificial Sequence
  chemically synthesized
taaaatgatagacccaggtaga

SEQ ID NO: 62316 - DNA, 22 bp, Artificial Sequence
  chemically synthesized
aaatgatagacccaggtagaga

SEQ ID NO: 62317 - DNA, 22 bp, Artificial Sequence
  chemically synthesized
cccaccctccgtcacagagtgg

SEQ ID NO: 62318 - DNA, 22 bp, Artificial Sequence
  chemically synthesized
cgtcacagagtggccagctgtg

SEQ ID NO: 62319 - DNA, 22 bp, Artificial Sequence
  chemically synthesized
tgtcccctgcttccgggaggtg

SEQ ID NO: 62320 - DNA, 22 bp, Artificial Sequence
  chemically synthesized
cttccgggaggtgggaatgcat

SEQ ID NO: 62321 - DNA, 22 bp, Artificial Sequence
  chemically synthesized
ccgggaggtgggaatgcatgtg

SEQ ID NO: 62322 - DNA, 22 bp, Artificial Sequence
  chemically synthesized
cgggaggtgggaatgcatgtgg

SEQ ID NO: 62323 - DNA, 22 bp, Artificial Sequence
  chemically synthesized
tttcctaactctcttgctctgg

SEQ ID NO: 62324 - DNA, 22 bp, Artificial Sequence
  chemically synthesized
cctaactctcttgctctggcag

SEQ ID NO: 62325 - DNA, 22 bp, Artificial Sequence
  chemically synthesized
ctaactctcttgctctggcagc

SEQ ID NO: 62326 - DNA, 22 bp, Artificial Sequence
  chemically synthesized
actctcttgctctggcagcctg

SEQ ID NO: 62327 - DNA, 22 bp, Artificial Sequence
  chemically synthesized
tcttgctctggcagcctgaaga

SEQ ID NO: 62328 - DNA, 22 bp, Artificial Sequence
  chemically synthesized
ttgctctggcagcctgaagagc

SEQ ID NO: 62329 - DNA, 22 bp, Artificial Sequence
  chemically synthesized
gctctggcagcctgaagagctg

SEQ ID NO: 62330 - DNA, 22 bp, Artificial Sequence
  chemically synthesized
ctctggcagcctgaagagctgt

SEQ ID NO: 62331 - DNA, 22 bp, Artificial Sequence
  chemically synthesized
tggcagcctgaagagctgtctg

SEQ ID NO: 62332 - DNA, 22 bp, Artificial Sequence
  chemically synthesized
gcagcctgaagagctgtctgtg

SEQ ID NO: 62333 - DNA, 22 bp, Artificial Sequence
  chemically synthesized
aagagctgtctgtgccctgaac

SEQ ID NO: 62334 - DNA, 22 bp, Artificial Sequence
  chemically synthesized
tctgtgccctgaacaacagctt

SEQ ID NO: 62335 - DNA, 22 bp, Artificial Sequence
  chemically synthesized
tgccctgaacaacagcttaggg

SEQ ID NO: 62336 - DNA, 22 bp, Artificial Sequence
  chemically synthesized
aacaacagcttagggagctgga

SEQ ID NO: 62337 - DNA, 22 bp, Artificial Sequence
  chemically synthesized
agggagctggaggaaagagaag

SEQ ID NO: 62338 - DNA, 22 bp, Artificial Sequence
  chemically synthesized
gggagctggaggaaagagaagg

SEQ ID NO: 62339 - DNA, 22 bp, Artificial Sequence
  chemically synthesized
gaggaaagagaaggaggtatgc

SEQ ID NO: 62340 - DNA, 22 bp, Artificial Sequence
  chemically synthesized
gagggagagaggcccactgggt

SEQ ID NO: 62341 - DNA, 22 bp, Artificial Sequence
  chemically synthesized
agggagagaggcccactgggtt

SEQ ID NO: 62342 - DNA, 22 bp, Artificial Sequence
  chemically synthesized
ggttggacaagaaggtaaaaga

SEQ ID NO: 62343 - DNA, 22 bp, Artificial Sequence
  chemically synthesized
gacaagaaggtaaaagagggct

SEQ ID NO: 62344 - DNA, 22 bp, Artificial Sequence
  chemically synthesized
gtttggcccctaagggaaggac

SEQ ID NO: 62345 - DNA, 22 bp, Artificial Sequence
  chemically synthesized
ggcccctaagggaaggacagga

SEQ ID NO: 62346 - DNA, 22 bp, Artificial Sequence
  chemically synthesized
gcccctaagggaaggacaggaa

SEQ ID NO: 62347 - DNA, 22 bp, Artificial Sequence
  chemically synthesized
agggaaggacaggaaagcaccc

SEQ ID NO: 62348 - DNA, 22 bp, Artificial Sequence
  chemically synthesized
gttccctgtgtggatgcagtgt

SEQ ID NO: 62349 - DNA, 22 bp, Artificial Sequence
  chemically synthesized
ttccctgtgtggatgcagtgtt

SEQ ID NO: 62350 - DNA, 22 bp, Artificial Sequence
  chemically synthesized
cctgtgtggatgcagtgtttgt

SEQ ID NO: 62351 - DNA, 22 bp, Artificial Sequence
  chemically synthesized
tgtggatgcagtgtttgtccag

SEQ ID NO: 62352 - DNA, 22 bp, Artificial Sequence
  chemically synthesized
gtccagctgaaggcagcctcac

SEQ ID NO: 62353 - DNA, 22 bp, Artificial Sequence
  chemically synthesized
tccagctgaaggcagcctcact

SEQ ID NO: 62354 - DNA, 22 bp, Artificial Sequence
  chemically synthesized
aaggcagcctcactcggctgac

SEQ ID NO: 62355 - DNA, 22 bp, Artificial Sequence
  chemically synthesized
actcggctgactacctgatgag

SEQ ID NO: 62356 - DNA, 22 bp, Artificial Sequence
  chemically synthesized
ggctgactacctgatgagtgat

SEQ ID NO: 62357 - DNA, 22 bp, Artificial Sequence
  chemically synthesized
actacctgatgagtgattttcc

SEQ ID NO: 62358 - DNA, 22 bp, Artificial Sequence
  chemically synthesized
cctgatgagtgattttccccaa

SEQ ID NO: 62359 - DNA, 22 bp, Artificial Sequence
  chemically synthesized
atgagtgattttccccaagctg

SEQ ID NO: 62360 - DNA, 22 bp, Artificial Sequence
  chemically synthesized
tccccaagctgacagctgctcc

SEQ ID NO: 62361 - DNA, 22 bp, Artificial Sequence
  chemically synthesized
ccccaagctgacagctgctcca

SEQ ID NO: 62362 - DNA, 22 bp, Artificial Sequence
  chemically synthesized
cccaagctgacagctgctccaa

SEQ ID NO: 62363 - DNA, 22 bp, Artificial Sequence
  chemically synthesized
acagctgctccaacacatttca

SEQ ID NO: 62364 - DNA, 22 bp, Artificial Sequence
  chemically synthesized
ctccaacacatttcacctacaa

SEQ ID NO: 62365 - DNA, 22 bp, Artificial Sequence
  chemically synthesized
caacacatttcacctacaagtc

SEQ ID NO: 62366 - DNA, 22 bp, Artificial Sequence
  chemically synthesized
cacctacaagtcctgacaaagt

SEQ ID NO: 62367 - DNA, 22 bp, Artificial Sequence
  chemically synthesized
acctacaagtcctgacaaagtg

SEQ ID NO: 62368 - DNA, 22 bp, Artificial Sequence
  chemically synthesized
caagtcctgacaaagtggtgtg

SEQ ID NO: 62369 - DNA, 22 bp, Artificial Sequence
  chemically synthesized
acaaagtggtgtgttcttttgg

SEQ ID NO: 62370 - DNA, 22 bp, Artificial Sequence
  chemically synthesized
ttttggggctgttattactgca

SEQ ID NO: 62371 - DNA, 22 bp, Artificial Sequence
  chemically synthesized
ttggggctgttattactgcagc

SEQ ID NO: 62372 - DNA, 22 bp, Artificial Sequence
  chemically synthesized
tggggctgttattactgcagca

SEQ ID NO: 62373 - DNA, 22 bp, Artificial Sequence
  chemically synthesized
ggggctgttattactgcagcag

SEQ ID NO: 62374 - DNA, 22 bp, Artificial Sequence
  chemically synthesized
gggctgttattactgcagcagg

SEQ ID NO: 62375 - DNA, 22 bp, Artificial Sequence
  chemically synthesized
ttattactgcagcaggcatttg

SEQ ID NO: 62376 - DNA, 22 bp, Artificial Sequence
  chemically synthesized
ttactgcagcaggcatttggaa

SEQ ID NO: 62377 - DNA, 22 bp, Artificial Sequence
  chemically synthesized
ctgcagcaggcatttggaacaa

SEQ ID NO: 62378 - DNA, 22 bp, Artificial Sequence
  chemically synthesized
cagcaggcatttggaacaatct

SEQ ID NO: 62379 - DNA, 22 bp, Artificial Sequence
  chemically synthesized
ggaacaatctggaagaatgggg

SEQ ID NO: 62380 - DNA, 22 bp, Artificial Sequence
  chemically synthesized
gaacaatctggaagaatggggt

SEQ ID NO: 62381 - DNA, 22 bp, Artificial Sequence
  chemically synthesized
gaagaatggggtgccaaaggac

SEQ ID NO: 62382 - DNA, 22 bp, Artificial Sequence
  chemically synthesized
gaagccgtttctgagtatccgt

SEQ ID NO: 62383 - DNA, 22 bp, Artificial Sequence
  chemically synthesized
aagccgtttctgagtatccgtc

SEQ ID NO: 62384 - DNA, 22 bp, Artificial Sequence
  chemically synthesized
ctgagtatccgtcccttctttt

SEQ ID NO: 62385 - DNA, 22 bp, Artificial Sequence
  chemically synthesized
tgagtatccgtcccttcttttc

SEQ ID NO: 62386 - DNA, 22 bp, Artificial Sequence
  chemically synthesized
agtatccgtcccttcttttctc

SEQ ID NO: 62387 - DNA, 22 bp, Artificial Sequence
  chemically synthesized
cttttctctccgatcctctagc

SEQ ID NO: 62388 - DNA, 22 bp, Artificial Sequence
  chemically synthesized
ttttctctccgatcctctagct

SEQ ID NO: 62389 - DNA, 22 bp, Artificial Sequence
  chemically synthesized
ttctctccgatcctctagcttt

SEQ ID NO: 62390 - DNA, 22 bp, Artificial Sequence
  chemically synthesized
tctctccgatcctctagctttt

SEQ ID NO: 62391 - DNA, 22 bp, Artificial Sequence
  chemically synthesized
ctctccgatcctctagcttttt

SEQ ID NO: 62392 - DNA, 22 bp, Artificial Sequence
  chemically synthesized
tctccgatcctctagctttttt

SEQ ID NO: 62393 - DNA, 22 bp, Artificial Sequence
  chemically synthesized
tccgatcctctagcttttttgg

SEQ ID NO: 62394 - DNA, 22 bp, Artificial Sequence
  chemically synthesized
cgatcctctagcttttttggct

SEQ ID NO: 62395 - DNA, 22 bp, Artificial Sequence
  chemically synthesized
tagcttttttggcttatgaaaa

SEQ ID NO: 62396 - DNA, 22 bp, Artificial Sequence
  chemically synthesized
gcttttttggcttatgaaaaat

SEQ ID NO: 62397 - DNA, 22 bp, Artificial Sequence
  chemically synthesized
ttttggcttatgaaaaattggg

SEQ ID NO: 62398 - DNA, 22 bp, Artificial Sequence
  chemically synthesized
tttggcttatgaaaaattgggc

SEQ ID NO: 62399 - DNA, 22 bp, Artificial Sequence
  chemically synthesized
ttggcttatgaaaaattgggcc

SEQ ID NO: 62400 - DNA, 22 bp, Artificial Sequence
  chemically synthesized
tggcttatgaaaaattgggccc

SEQ ID NO: 62401 - DNA, 22 bp, Artificial Sequence
  chemically synthesized
ggcttatgaaaaattgggccca

SEQ ID NO: 62402 - DNA, 22 bp, Artificial Sequence
  chemically synthesized
gcttatgaaaaattgggcccat

SEQ ID NO: 62403 - DNA, 22 bp, Artificial Sequence
  chemically synthesized
atgaaaaattgggcccatccct

SEQ ID NO: 62404 - DNA, 22 bp, Artificial Sequence
  chemically synthesized
tgaaaaattgggcccatccctt

SEQ ID NO: 62405 - DNA, 22 bp, Artificial Sequence
  chemically synthesized
ggcccatccctttcgaatgtcc

SEQ ID NO: 62406 - DNA, 22 bp, Artificial Sequence
  chemically synthesized
tcgaatgtccattgtgctgtta

SEQ ID NO: 62407 - DNA, 22 bp, Artificial Sequence
  chemically synthesized
cgaatgtccattgtgctgttag

SEQ ID NO: 62408 - DNA, 22 bp, Artificial Sequence
  chemically synthesized
gaatgtccattgtgctgttagt

SEQ ID NO: 62409 - DNA, 22 bp, Artificial Sequence
  chemically synthesized
tgctgttagtaatgaggatacg

SEQ ID NO: 62410 - DNA, 22 bp, Artificial Sequence
  chemically synthesized
ttagtaatgaggatacggataa

SEQ ID NO: 62411 - DNA, 22 bp, Artificial Sequence
  chemically synthesized
gtaatgaggatacggataaaat

SEQ ID NO: 62412 - DNA, 22 bp, Artificial Sequence
  chemically synthesized
tttttttgagtaagccctttga

SEQ ID NO: 62413 - DNA, 22 bp, Artificial Sequence
  chemically synthesized
ttttttgagtaagccctttgag

SEQ ID NO: 62414 - DNA, 22 bp, Artificial Sequence
  chemically synthesized
tttttgagtaagccctttgagg

SEQ ID NO: 62415 - DNA, 22 bp, Artificial Sequence
  chemically synthesized
ttttgagtaagccctttgagga

SEQ ID NO: 62416 - DNA, 22 bp, Artificial Sequence
  chemically synthesized
tttgagtaagccctttgaggag

SEQ ID NO: 62417 - DNA, 22 bp, Artificial Sequence
  chemically synthesized
ttgagtaagccctttgaggagt

SEQ ID NO: 62418 - DNA, 22 bp, Artificial Sequence
  chemically synthesized
tgagtaagccctttgaggagta

SEQ ID NO: 62419 - DNA, 22 bp, Artificial Sequence
  chemically synthesized
gagtaagccctttgaggagtat

SEQ ID NO: 62420 - DNA, 22 bp, Artificial Sequence
  chemically synthesized
agtaagccctttgaggagtatt

SEQ ID NO: 62421 - DNA, 22 bp, Artificial Sequence
  chemically synthesized
tgaggagtattgtcaaattgag

SEQ ID NO: 62422 - DNA, 22 bp, Artificial Sequence
  chemically synthesized
gaggagtattgtcaaattgaga

SEQ ID NO: 62423 - DNA, 22 bp, Artificial Sequence
  chemically synthesized
aggagtattgtcaaattgagac

SEQ ID NO: 62424 - DNA, 22 bp, Artificial Sequence
  chemically synthesized
tcaaattgagactcacctcatg

SEQ ID NO: 62425 - DNA, 22 bp, Artificial Sequence
  chemically synthesized
agactcacctcatgagtaaccc

SEQ ID NO: 62426 - DNA, 22 bp, Artificial Sequence
  chemically synthesized
acctcatgagtaaccctgtgaa

SEQ ID NO: 62427 - DNA, 22 bp, Artificial Sequence
  chemically synthesized
atgagtaaccctgtgaagaggc

SEQ ID NO: 62428 - DNA, 22 bp, Artificial Sequence
  chemically synthesized
tgaagaggcaggagaaagggta

SEQ ID NO: 62429 - DNA, 22 bp, Artificial Sequence
  chemically synthesized
aagcttagagaggttaaatggc

SEQ ID NO: 62430 - DNA, 22 bp, Artificial Sequence
  chemically synthesized
agagaggttaaatggcaggtct

SEQ ID NO: 62431 - DNA, 22 bp, Artificial Sequence
  chemically synthesized
gagaggttaaatggcaggtctg

SEQ ID NO: 62432 - DNA, 22 bp, Artificial Sequence
  chemically synthesized
aatggcaggtctggtctcatgc

SEQ ID NO: 62433 - DNA, 22 bp, Artificial Sequence
  chemically synthesized
gtctcatgcagccgcaggggta

SEQ ID NO: 62434 - DNA, 22 bp, Artificial Sequence
  chemically synthesized
atgcagccgcaggggtagacta

SEQ ID NO: 62435 - DNA, 22 bp, Artificial Sequence
  chemically synthesized
gggattctgatccagaactcct

SEQ ID NO: 62436 - DNA, 22 bp, Artificial Sequence
  chemically synthesized
tgatccagaactccttatactt

SEQ ID NO: 62437 - DNA, 22 bp, Artificial Sequence
  chemically synthesized
atccagaactccttatacttct

SEQ ID NO: 62438 - DNA, 22 bp, Artificial Sequence
  chemically synthesized
cttatacttctgggtccacccc

SEQ ID NO: 62439 - DNA, 22 bp, Artificial Sequence
  chemically synthesized
atacttctgggtccaccccacg

SEQ ID NO: 62440 - DNA, 22 bp, Artificial Sequence
  chemically synthesized
tacttctgggtccaccccacgc

SEQ ID NO: 62441 - DNA, 22 bp, Artificial Sequence
  chemically synthesized
ctgggtccaccccacgcttcca

SEQ ID NO: 62442 - DNA, 22 bp, Artificial Sequence
  chemically synthesized
tgggtccaccccacgcttccac

SEQ ID NO: 62443 - DNA, 22 bp, Artificial Sequence
  chemically synthesized
ggtccaccccacgcttccacag

SEQ ID NO: 62444 - DNA, 22 bp, Artificial Sequence
  chemically synthesized
ccacagcctgcacacagggtag

SEQ ID NO: 62445 - DNA, 22 bp, Artificial Sequence
  chemically synthesized
cacagcctgcacacagggtagg

SEQ ID NO: 62446 - DNA, 22 bp, Artificial Sequence
  chemically synthesized
cacacagggtagggaagttgtg

SEQ ID NO: 62447 - DNA, 22 bp, Artificial Sequence
  chemically synthesized
tggcttgcagaaggctgttttt

SEQ ID NO: 62448 - DNA, 22 bp, Artificial Sequence
  chemically synthesized
gcagaaggctgtttttttgggg

SEQ ID NO: 62449 - DNA, 22 bp, Artificial Sequence
  chemically synthesized
cagaaggctgtttttttggggg

SEQ ID NO: 62450 - DNA, 22 bp, Artificial Sequence
  chemically synthesized
tttttttggggggacgctctgt

SEQ ID NO: 62451 - DNA, 22 bp, Artificial Sequence
  chemically synthesized
ttttggggggacgctctgtttt

SEQ ID NO: 62452 - DNA, 22 bp, Artificial Sequence
  chemically synthesized
tttggggggacgctctgtttta

SEQ ID NO: 62453 - DNA, 22 bp, Artificial Sequence
  chemically synthesized
ttggggggacgctctgttttaa

SEQ ID NO: 62454 - DNA, 22 bp, Artificial Sequence
  chemically synthesized
tggggggacgctctgttttaat

SEQ ID NO: 62455 - DNA, 22 bp, Artificial Sequence
  chemically synthesized
ggggggacgctctgttttaata

SEQ ID NO: 62456 - DNA, 22 bp, Artificial Sequence
  chemically synthesized
gggggacgctctgttttaatag

SEQ ID NO: 62457 - DNA, 22 bp, Artificial Sequence
  chemically synthesized
tgttttaatagtttggagcaag

SEQ ID NO: 62458 - DNA, 22 bp, Artificial Sequence
  chemically synthesized
ttttaatagtttggagcaagga

SEQ ID NO: 62459 - DNA, 22 bp, Artificial Sequence
  chemically synthesized
taatagtttggagcaaggaagc

SEQ ID NO: 62460 - DNA, 22 bp, Artificial Sequence
  chemically synthesized
aatagtttggagcaaggaagct

SEQ ID NO: 62461 - DNA, 22 bp, Artificial Sequence
  chemically synthesized
atagtttggagcaaggaagcta

SEQ ID NO: 62462 - DNA, 22 bp, Artificial Sequence
  chemically synthesized
ggagcaaggaagctagtggtgg

SEQ ID NO: 62463 - DNA, 22 bp, Artificial Sequence
  chemically synthesized
gagcaaggaagctagtggtggg

SEQ ID NO: 62464 - DNA, 22 bp, Artificial Sequence
  chemically synthesized
gtggtgggcgctcactggtagg

SEQ ID NO: 62465 - DNA, 22 bp, Artificial Sequence
  chemically synthesized
actggtaggggaggcatgtgat

SEQ ID NO: 62466 - DNA, 22 bp, Artificial Sequence
  chemically synthesized
gtaggggaggcatgtgatagga

SEQ ID NO: 62467 - DNA, 22 bp, Artificial Sequence
  chemically synthesized
gatcttttaagcattttcaggg

SEQ ID NO: 62468 - DNA, 22 bp, Artificial Sequence
  chemically synthesized
atcttttaagcattttcaggga

SEQ ID NO: 62469 - DNA, 22 bp, Artificial Sequence
  chemically synthesized
ttaagcattttcagggacagat

SEQ ID NO: 62470 - DNA, 22 bp, Artificial Sequence
  chemically synthesized
taagcattttcagggacagata

SEQ ID NO: 62471 - DNA, 22 bp, Artificial Sequence
  chemically synthesized
aagcattttcagggacagatat

SEQ ID NO: 62472 - DNA, 22 bp, Artificial Sequence
  chemically synthesized
agcattttcagggacagatatg

SEQ ID NO: 62473 - DNA, 22 bp, Artificial Sequence
  chemically synthesized
tcagggacagatatgtacctga

SEQ ID NO: 62474 - DNA, 22 bp, Artificial Sequence
  chemically synthesized
cagggacagatatgtacctgat

SEQ ID NO: 62475 - DNA, 22 bp, Artificial Sequence
  chemically synthesized
agggacagatatgtacctgata

SEQ ID NO: 62476 - DNA, 22 bp, Artificial Sequence
  chemically synthesized
atattccacctctctatataat

SEQ ID NO: 62477 - DNA, 22 bp, Artificial Sequence
  chemically synthesized
cacctctctatataatttcaag

SEQ ID NO: 62478 - DNA, 22 bp, Artificial Sequence
  chemically synthesized
tctatataatttcaagacttga

SEQ ID NO: 62479 - DNA, 22 bp, Artificial Sequence
  chemically synthesized
tatataatttcaagacttgatt

SEQ ID NO: 62480 - DNA, 22 bp, Artificial Sequence
  chemically synthesized
tataatttcaagacttgattgg

SEQ ID NO: 62481 - DNA, 22 bp, Artificial Sequence
  chemically synthesized
caagacttgattggcattgtcc

SEQ ID NO: 62482 - DNA, 22 bp, Artificial Sequence
  chemically synthesized
aagacttgattggcattgtccc

SEQ ID NO: 62483 - DNA, 22 bp, Artificial Sequence
  chemically synthesized
gattggcattgtccctaagcac

SEQ ID NO: 62484 - DNA, 22 bp, Artificial Sequence
  chemically synthesized
attggcattgtccctaagcacc

SEQ ID NO: 62485 - DNA, 22 bp, Artificial Sequence
  chemically synthesized
gcattgtccctaagcaccagta

SEQ ID NO: 62486 - DNA, 22 bp, Artificial Sequence
  chemically synthesized
tccctaagcaccagtagaaagc

SEQ ID NO: 62487 - DNA, 22 bp, Artificial Sequence
  chemically synthesized
agcaccagtagaaagcttgaag

SEQ ID NO: 62488 - DNA, 22 bp, Artificial Sequence
  chemically synthesized
gaagaagcttctcagtaaatac

SEQ ID NO: 62489 - DNA, 22 bp, Artificial Sequence
  chemically synthesized
aagaagcttctcagtaaataca

SEQ ID NO: 62490 - DNA, 22 bp, Artificial Sequence
  chemically synthesized
ctcagtaaatacatcagctgta

SEQ ID NO: 62491 - DNA, 22 bp, Artificial Sequence
  chemically synthesized
tcagtaaatacatcagctgtat

SEQ ID NO: 62492 - DNA, 22 bp, Artificial Sequence
  chemically synthesized
agtaaatacatcagctgtattt

SEQ ID NO: 62493 - DNA, 22 bp, Artificial Sequence
  chemically synthesized
tatttccaggtgagcagtacct

SEQ ID NO: 62494 - DNA, 22 bp, Artificial Sequence
  chemically synthesized
ccaggtgagcagtacctgctga

SEQ ID NO: 62495 - DNA, 22 bp, Artificial Sequence
  chemically synthesized
caggtgagcagtacctgctgaa

SEQ ID NO: 62496 - DNA, 22 bp, Artificial Sequence
  chemically synthesized
ctgaaatgctgagagaacgttc

SEQ ID NO: 62497 - DNA, 22 bp, Artificial Sequence
  chemically synthesized
aaatgctgagagaacgttctga

SEQ ID NO: 62498 - DNA, 22 bp, Artificial Sequence
  chemically synthesized
agagaacgttctgactaggagg

SEQ ID NO: 62499 - DNA, 22 bp, Artificial Sequence
  chemically synthesized
tgactaggagggcttgggggag

SEQ ID NO: 62500 - DNA, 22 bp, Artificial Sequence
  chemically synthesized
actaggagggcttgggggagac

SEQ ID NO: 62501 - DNA, 22 bp, Artificial Sequence
  chemically synthesized
ggagggcttgggggagacagag

SEQ ID NO: 62502 - DNA, 22 bp, Artificial Sequence
  chemically synthesized
gggggagacagagacagagttg

SEQ ID NO: 62503 - DNA, 22 bp, Artificial Sequence
  chemically synthesized
ggggagacagagacagagttgg

SEQ ID NO: 62504 - DNA, 22 bp, Artificial Sequence
  chemically synthesized
gctgtttcagcagactcattct

SEQ ID NO: 62505 - DNA, 22 bp, Artificial Sequence
  chemically synthesized
tttcagcagactcattctgcta

SEQ ID NO: 62506 - DNA, 22 bp, Artificial Sequence
  chemically synthesized
cagcagactcattctgctattt

SEQ ID NO: 62507 - DNA, 22 bp, Artificial Sequence
  chemically synthesized
agcagactcattctgctatttg

SEQ ID NO: 62508 - DNA, 22 bp, Artificial Sequence
  chemically synthesized
attctgctatttgctttttgcc

SEQ ID NO: 62509 - DNA, 22 bp, Artificial Sequence
  chemically synthesized
tgctatttgctttttgccttgg

SEQ ID NO: 62510 - DNA, 22 bp, Artificial Sequence
  chemically synthesized
ctatttgctttttgccttggag

SEQ ID NO: 62511 - DNA, 22 bp, Artificial Sequence
  chemically synthesized
tttgctttttgccttggagatt

SEQ ID NO: 62512 - DNA, 22 bp, Artificial Sequence
  chemically synthesized
gctttttgccttggagattatt

SEQ ID NO: 62513 - DNA, 22 bp, Artificial Sequence
  chemically synthesized
ctttttgccttggagattattt

SEQ ID NO: 62514 - DNA, 22 bp, Artificial Sequence
  chemically synthesized
tttgccttggagattatttttt

SEQ ID NO: 62515 - DNA, 22 bp, Artificial Sequence
  chemically synthesized
ttgccttggagattattttttc

SEQ ID NO: 62516 - DNA, 22 bp, Artificial Sequence
  chemically synthesized
tgccttggagattattttttct

SEQ ID NO: 62517 - DNA, 22 bp, Artificial Sequence
  chemically synthesized
gccttggagattattttttctg

SEQ ID NO: 62518 - DNA, 22 bp, Artificial Sequence
  chemically synthesized
ccttggagattattttttctgg

SEQ ID NO: 62519 - DNA, 22 bp, Artificial Sequence
  chemically synthesized
ggagattattttttctgggtgt

SEQ ID NO: 62520 - DNA, 22 bp, Artificial Sequence
  chemically synthesized
gagattattttttctgggtgtc

SEQ ID NO: 62521 - DNA, 22 bp, Artificial Sequence
  chemically synthesized
ttttttctgggtgtcccgatgc

SEQ ID NO: 62522 - DNA, 22 bp, Artificial Sequence
  chemically synthesized
tttctgggtgtcccgatgctga

SEQ ID NO: 62523 - DNA, 22 bp, Artificial Sequence
  chemically synthesized
ttctgggtgtcccgatgctgag

SEQ ID NO: 62524 - DNA, 22 bp, Artificial Sequence
  chemically synthesized
tctgggtgtcccgatgctgagc

SEQ ID NO: 62525 - DNA, 22 bp, Artificial Sequence
  chemically synthesized
ctgggtgtcccgatgctgagct

SEQ ID NO: 62526 - DNA, 22 bp, Artificial Sequence
  chemically synthesized
tgggtgtcccgatgctgagctc

SEQ ID NO: 62527 - DNA, 22 bp, Artificial Sequence
  chemically synthesized
ggtgtcccgatgctgagctccc

SEQ ID NO: 62528 - DNA, 22 bp, Artificial Sequence
  chemically synthesized
agctcccacttcaagaagaaca

SEQ ID NO: 62529 - DNA, 22 bp, Artificial Sequence
  chemically synthesized
ccacttcaagaagaacattggt

SEQ ID NO: 62530 - DNA, 22 bp, Artificial Sequence
  chemically synthesized
caagaagaacattggtataaat

SEQ ID NO: 62531 - DNA, 22 bp, Artificial Sequence
  chemically synthesized
aagaagaacattggtataaatt

SEQ ID NO: 62532 - DNA, 22 bp, Artificial Sequence
  chemically synthesized
gtataaatttacaaaccagaag

SEQ ID NO: 62533 - DNA, 22 bp, Artificial Sequence
  chemically synthesized
acaaaccagaagtagtcagagg

SEQ ID NO: 62534 - DNA, 22 bp, Artificial Sequence
  chemically synthesized
caaaccagaagtagtcagaggt

SEQ ID NO: 62535 - DNA, 22 bp, Artificial Sequence
  chemically synthesized
acttttttgttctgttattcct

SEQ ID NO: 62536 - DNA, 22 bp, Artificial Sequence
  chemically synthesized
ttttgttctgttattccttctt

SEQ ID NO: 62537 - DNA, 22 bp, Artificial Sequence
  chemically synthesized
tttgttctgttattccttcttt

SEQ ID NO: 62538 - DNA, 22 bp, Artificial Sequence
  chemically synthesized
ttgttctgttattccttctttg

SEQ ID NO: 62539 - DNA, 22 bp, Artificial Sequence
  chemically synthesized
tgttctgttattccttctttgg

SEQ ID NO: 62540 - DNA, 22 bp, Artificial Sequence
  chemically synthesized
gttctgttattccttctttggg

SEQ ID NO: 62541 - DNA, 22 bp, Artificial Sequence
  chemically synthesized
ttctgttattccttctttggga

SEQ ID NO: 62542 - DNA, 22 bp, Artificial Sequence
  chemically synthesized
tgttattccttctttgggagag

SEQ ID NO: 62543 - DNA, 22 bp, Artificial Sequence
  chemically synthesized
ttattccttctttgggagagca

SEQ ID NO: 62544 - DNA, 22 bp, Artificial Sequence
  chemically synthesized
ttccttctttgggagagcaggc

SEQ ID NO: 62545 - DNA, 22 bp, Artificial Sequence
  chemically synthesized
cttctttgggagagcaggctgg

SEQ ID NO: 62546 - DNA, 22 bp, Artificial Sequence
  chemically synthesized
ctttgggagagcaggctggcca

SEQ ID NO: 62547 - DNA, 22 bp, Artificial Sequence
  chemically synthesized
tttgggagagcaggctggccag

SEQ ID NO: 62548 - DNA, 22 bp, Artificial Sequence
  chemically synthesized
tgggagagcaggctggccagga

SEQ ID NO: 62549 - DNA, 22 bp, Artificial Sequence
  chemically synthesized
gggagagcaggctggccaggag

SEQ ID NO: 62550 - DNA, 22 bp, Artificial Sequence
  chemically synthesized
ggagagcaggctggccaggagg

SEQ ID NO: 62551 - DNA, 22 bp, Artificial Sequence
  chemically synthesized
gccaggaggaaggttcaagtgt

SEQ ID NO: 62552 - DNA, 22 bp, Artificial Sequence
  chemically synthesized
aagtgtgtcatatcctagcatt

SEQ ID NO: 62553 - DNA, 22 bp, Artificial Sequence
  chemically synthesized
gcattcagataggtggcctcct

SEQ ID NO: 62554 - DNA, 22 bp, Artificial Sequence
  chemically synthesized
agataggtggcctcctctgcct

SEQ ID NO: 62555 - DNA, 22 bp, Artificial Sequence
  chemically synthesized
ctctgccttttcagtgggtggc

SEQ ID NO: 62556 - DNA, 22 bp, Artificial Sequence
  chemically synthesized
tgccttttcagtgggtggctgg

SEQ ID NO: 62557 - DNA, 22 bp, Artificial Sequence
  chemically synthesized
ccttttcagtgggtggctgggc

SEQ ID NO: 62558 - DNA, 22 bp, Artificial Sequence
  chemically synthesized
ttcagtgggtggctgggctggg

SEQ ID NO: 62559 - DNA, 22 bp, Artificial Sequence
  chemically synthesized
tcagtgggtggctgggctgggt

SEQ ID NO: 62560 - DNA, 22 bp, Artificial Sequence
  chemically synthesized
cagtgggtggctgggctgggtg

SEQ ID NO: 62561 - DNA, 22 bp, Artificial Sequence
  chemically synthesized
agtgggtggctgggctgggtga

SEQ ID NO: 62562 - DNA, 22 bp, Artificial Sequence
  chemically synthesized
ggctgggtgaaatcttgcagtg

SEQ ID NO: 62563 - DNA, 22 bp, Artificial Sequence
  chemically synthesized
ggtgaaatcttgcagtgactaa

SEQ ID NO: 62564 - DNA, 22 bp, Artificial Sequence
  chemically synthesized
gcagtgactaagaaaggaaggg

SEQ ID NO: 62565 - DNA, 22 bp, Artificial Sequence
  chemically synthesized
cagtgactaagaaaggaagggt

SEQ ID NO: 62566 - DNA, 22 bp, Artificial Sequence
  chemically synthesized
agaaaggaagggtggacccagg

SEQ ID NO: 62567 - DNA, 22 bp, Artificial Sequence
  chemically synthesized
catcttcatcattgatcctgca

SEQ ID NO: 62568 - DNA, 22 bp, Artificial Sequence
  chemically synthesized
catcattgatcctgcatgcgtg

SEQ ID NO: 62569 - DNA, 22 bp, Artificial Sequence
  chemically synthesized
atcattgatcctgcatgcgtgc

SEQ ID NO: 62570 - DNA, 22 bp, Artificial Sequence
  chemically synthesized
atcctgcatgcgtgccggtagg

SEQ ID NO: 62571 - DNA, 22 bp, Artificial Sequence
  chemically synthesized
catgcgtgccggtaggcagcag

SEQ ID NO: 62572 - DNA, 22 bp, Artificial Sequence
  chemically synthesized
tggaattgctggggaaaccaca

SEQ ID NO: 62573 - DNA, 22 bp, Artificial Sequence
  chemically synthesized
gaattgctggggaaaccacagt

SEQ ID NO: 62574 - DNA, 22 bp, Artificial Sequence
  chemically synthesized
ctggggaaaccacagtgcagca

SEQ ID NO: 62575 - DNA, 22 bp, Artificial Sequence
  chemically synthesized
gggaaaccacagtgcagcatga

SEQ ID NO: 62576 - DNA, 22 bp, Artificial Sequence
  chemically synthesized
gggcctgctctcttgtgcccgg

SEQ ID NO: 62577 - DNA, 22 bp, Artificial Sequence
  chemically synthesized
ctctcttgtgcccggctgagca

SEQ ID NO: 62578 - DNA, 22 bp, Artificial Sequence
  chemically synthesized
tcttgtgcccggctgagcatct

SEQ ID NO: 62579 - DNA, 22 bp, Artificial Sequence
  chemically synthesized
ttgtgcccggctgagcatctct

SEQ ID NO: 62580 - DNA, 22 bp, Artificial Sequence
  chemically synthesized
gtgcccggctgagcatctctgt

SEQ ID NO: 62581 - DNA, 22 bp, Artificial Sequence
  chemically synthesized
tgcccggctgagcatctctgtt

SEQ ID NO: 62582 - DNA, 22 bp, Artificial Sequence
  chemically synthesized
agcatctctgttctgtttgggg

SEQ ID NO: 62583 - DNA, 22 bp, Artificial Sequence
  chemically synthesized
tgttctgtttggggagtcctgc

SEQ ID NO: 62584 - DNA, 22 bp, Artificial Sequence
  chemically synthesized
ttctgtttggggagtcctgcca

SEQ ID NO: 62585 - DNA, 22 bp, Artificial Sequence
  chemically synthesized
tgtttggggagtcctgccaggc

SEQ ID NO: 62586 - DNA, 22 bp, Artificial Sequence
  chemically synthesized
tttggggagtcctgccaggcaa

SEQ ID NO: 62587 - DNA, 22 bp, Artificial Sequence
  chemically synthesized
ggggagtcctgccaggcaagtg

SEQ ID NO: 62588 - DNA, 22 bp, Artificial Sequence
  chemically synthesized
gggagtcctgccaggcaagtgt

SEQ ID NO: 62589 - DNA, 22 bp, Artificial Sequence
  chemically synthesized
ccaggcaagtgtgagtcaaaga

SEQ ID NO: 62590 - DNA, 22 bp, Artificial Sequence
  chemically synthesized
tgtcatgggggcagtgtcggct

SEQ ID NO: 62591 - DNA, 22 bp, Artificial Sequence
  chemically synthesized
agtggtactcttcagagttctc

SEQ ID NO: 62592 - DNA, 22 bp, Artificial Sequence
  chemically synthesized
ttcagagttctcagaatgtgcc

SEQ ID NO: 62593 - DNA, 22 bp, Artificial Sequence
  chemically synthesized
cagagttctcagaatgtgccgc

SEQ ID NO: 62594 - DNA, 22 bp, Artificial Sequence
  chemically synthesized
agagttctcagaatgtgccgct

SEQ ID NO: 62595 - DNA, 22 bp, Artificial Sequence
  chemically synthesized
tcagaatgtgccgctcgaagcc

SEQ ID NO: 62596 - DNA, 22 bp, Artificial Sequence
  chemically synthesized
agaatgtgccgctcgaagccat

SEQ ID NO: 62597 - DNA, 22 bp, Artificial Sequence
  chemically synthesized
gaagccatgtaggcttccagca

SEQ ID NO: 62598 - DNA, 22 bp, Artificial Sequence
  chemically synthesized
ccagcaggcttctagcagatgg

SEQ ID NO: 62599 - DNA, 22 bp, Artificial Sequence
  chemically synthesized
cagcaggcttctagcagatggg

SEQ ID NO: 62600 - DNA, 22 bp, Artificial Sequence
  chemically synthesized
ctagcagatggggttttggctg

SEQ ID NO: 62601 - DNA, 22 bp, Artificial Sequence
  chemically synthesized
tagcagatggggttttggctgg

SEQ ID NO: 62602 - DNA, 22 bp, Artificial Sequence
  chemically synthesized
gcagatggggttttggctgggt

SEQ ID NO: 62603 - DNA, 22 bp, Artificial Sequence
  chemically synthesized
tggctgggttgggccttaatac

SEQ ID NO: 62604 - DNA, 22 bp, Artificial Sequence
  chemically synthesized
ggctgggttgggccttaatact

SEQ ID NO: 62605 - DNA, 22 bp, Artificial Sequence
  chemically synthesized
gctgggttgggccttaatactc

SEQ ID NO: 62606 - DNA, 22 bp, Artificial Sequence
  chemically synthesized
ggttgggccttaatactcagtg

SEQ ID NO: 62607 - DNA, 22 bp, Artificial Sequence
  chemically synthesized
ggccttaatactcagtgtcttt

SEQ ID NO: 62608 - DNA, 22 bp, Artificial Sequence
  chemically synthesized
aatactcagtgtctttcattcc

SEQ ID NO: 62609 - DNA, 22 bp, Artificial Sequence
  chemically synthesized
atactcagtgtctttcattccc

SEQ ID NO: 62610 - DNA, 22 bp, Artificial Sequence
  chemically synthesized
agtgtctttcattccctctctg

SEQ ID NO: 62611 - DNA, 22 bp, Artificial Sequence
  chemically synthesized
tcattccctctctgccccctcg

SEQ ID NO: 62612 - DNA, 22 bp, Artificial Sequence
  chemically synthesized
cattccctctctgccccctcgt

SEQ ID NO: 62613 - DNA, 22 bp, Artificial Sequence
  chemically synthesized
attccctctctgccccctcgtt

SEQ ID NO: 62614 - DNA, 22 bp, Artificial Sequence
  chemically synthesized
cctctctgccccctcgttcctt

SEQ ID NO: 62615 - DNA, 22 bp, Artificial Sequence
  chemically synthesized
tctgccccctcgttcctttcct

SEQ ID NO: 62616 - DNA, 22 bp, Artificial Sequence
  chemically synthesized
tgccccctcgttcctttcctgc

SEQ ID NO: 62617 - DNA, 22 bp, Artificial Sequence
  chemically synthesized
ccccctcgttcctttcctgcat

SEQ ID NO: 62618 - DNA, 22 bp, Artificial Sequence
  chemically synthesized
gttcctttcctgcatttcttgc

SEQ ID NO: 62619 - DNA, 22 bp, Artificial Sequence
  chemically synthesized
ctttcctgcatttcttgctttc

SEQ ID NO: 62620 - DNA, 22 bp, Artificial Sequence
  chemically synthesized
tcctgcatttcttgctttcttt

SEQ ID NO: 62621 - DNA, 22 bp, Artificial Sequence
  chemically synthesized
cctgcatttcttgctttctttt

SEQ ID NO: 62622 - DNA, 22 bp, Artificial Sequence
  chemically synthesized
ctgcatttcttgctttcttttt

SEQ ID NO: 62623 - DNA, 22 bp, Artificial Sequence
  chemically synthesized
catttcttgctttctttttttt

SEQ ID NO: 62624 - DNA, 22 bp, Artificial Sequence
  chemically synthesized
cttgctttcttttttttctaga

SEQ ID NO: 62625 - DNA, 22 bp, Artificial Sequence
  chemically synthesized
ttgctttcttttttttctagaa

SEQ ID NO: 62626 - DNA, 22 bp, Artificial Sequence
  chemically synthesized
gctttcttttttttctagaatc

SEQ ID NO: 62627 - DNA, 22 bp, Artificial Sequence
  chemically synthesized
ctttcttttttttctagaatca

SEQ ID NO: 62628 - DNA, 22 bp, Artificial Sequence
  chemically synthesized
tcttttttttctagaatcaacg

SEQ ID NO: 62629 - DNA, 22 bp, Artificial Sequence
  chemically synthesized
cttttttttctagaatcaacga

SEQ ID NO: 62630 - DNA, 22 bp, Artificial Sequence
  chemically synthesized
ttttttttctagaatcaacgaa

SEQ ID NO: 62631 - DNA, 22 bp, Artificial Sequence
  chemically synthesized
ttttttctagaatcaacgaagc

SEQ ID NO: 62632 - DNA, 22 bp, Artificial Sequence
  chemically synthesized
tttttctagaatcaacgaagca

SEQ ID NO: 62633 - DNA, 22 bp, Artificial Sequence
  chemically synthesized
ttttctagaatcaacgaagcag

SEQ ID NO: 62634 - DNA, 22 bp, Artificial Sequence
  chemically synthesized
tttctagaatcaacgaagcagc

SEQ ID NO: 62635 - DNA, 22 bp, Artificial Sequence
  chemically synthesized
ttctagaatcaacgaagcagcc

SEQ ID NO: 62636 - DNA, 22 bp, Artificial Sequence
  chemically synthesized
tctagaatcaacgaagcagcca

SEQ ID NO: 62637 - DNA, 22 bp, Artificial Sequence
  chemically synthesized
ctagaatcaacgaagcagccaa

SEQ ID NO: 62638 - DNA, 22 bp, Artificial Sequence
  chemically synthesized
tagaatcaacgaagcagccaat

SEQ ID NO: 62639 - DNA, 22 bp, Artificial Sequence
  chemically synthesized
gaatcaacgaagcagccaataa

SEQ ID NO: 62640 - DNA, 22 bp, Artificial Sequence
  chemically synthesized
tcaggaggtttagatgaatgtg

SEQ ID NO: 62641 - DNA, 22 bp, Artificial Sequence
  chemically synthesized
caggaggtttagatgaatgtga

SEQ ID NO: 62642 - DNA, 22 bp, Artificial Sequence
  chemically synthesized
aggaggtttagatgaatgtgaa

SEQ ID NO: 62643 - DNA, 22 bp, Artificial Sequence
  chemically synthesized
agatgaatgtgaattgctgttt

SEQ ID NO: 62644 - DNA, 22 bp, Artificial Sequence
  chemically synthesized
gatgaatgtgaattgctgttta

SEQ ID NO: 62645 - DNA, 22 bp, Artificial Sequence
  chemically synthesized
ctgtttaatataaaaattttat

SEQ ID NO: 62646 - DNA, 22 bp, Artificial Sequence
  chemically synthesized
tttaatataaaaattttattaa

SEQ ID NO: 62647 - DNA, 22 bp, Artificial Sequence
  chemically synthesized
aatataaaaattttattaaaat

SEQ ID NO: 62648 - DNA, 22 bp, Artificial Sequence
  chemically synthesized
atataaaaattttattaaaata

SEQ ID NO: 62649 - DNA, 22 bp, Artificial Sequence
  chemically synthesized
tattaaaataataaagctctga

SEQ ID NO: 62650 - DNA, 22 bp, Artificial Sequence
  chemically synthesized
attaaaataataaagctctgac

SEQ ID NO: 62651 - DNA, 22 bp, Artificial Sequence
  chemically synthesized
ttaaaataataaagctctgaca

SEQ ID NO: 62652 - DNA, 22 bp, Artificial Sequence
  chemically synthesized
aaataataaagctctgacaaaa

SEQ ID NO: 62653 - DNA, 22 bp, Artificial Sequence
  chemically synthesized
tgacaaaagatccagaatattg

SEQ ID NO: 62654 - DNA, 22 bp, Artificial Sequence
  chemically synthesized
acaaaagatccagaatattgtc

SEQ ID NO: 62655 - DNA, 22 bp, Artificial Sequence
  chemically synthesized
tcccttgcagtgggctttaggg

SEQ ID NO: 62656 - DNA, 22 bp, Artificial Sequence
  chemically synthesized
gcagtgggctttagggttgcat

SEQ ID NO: 62657 - DNA, 22 bp, Artificial Sequence
  chemically synthesized
cagtgggctttagggttgcatc

SEQ ID NO: 62658 - DNA, 22 bp, Artificial Sequence
  chemically synthesized
tagggttgcatcttggctccta

SEQ ID NO: 62659 - DNA, 22 bp, Artificial Sequence
  chemically synthesized
agggttgcatcttggctcctaa

SEQ ID NO: 62660 - DNA, 22 bp, Artificial Sequence
  chemically synthesized
gggttgcatcttggctcctaaa

SEQ ID NO: 62661 - DNA, 22 bp, Artificial Sequence
  chemically synthesized
catcttggctcctaaatcttct

SEQ ID NO: 62662 - DNA, 22 bp, Artificial Sequence
  chemically synthesized
ggctcctaaatcttctaggcgg

SEQ ID NO: 62663 - DNA, 22 bp, Artificial Sequence
  chemically synthesized
gctcctaaatcttctaggcggg

SEQ ID NO: 62664 - DNA, 22 bp, Artificial Sequence
  chemically synthesized
ctaaatcttctaggcgggttaa

SEQ ID NO: 62665 - DNA, 22 bp, Artificial Sequence
  chemically synthesized
aatcttctaggcgggttaaatt

SEQ ID NO: 62666 - DNA, 22 bp, Artificial Sequence
  chemically synthesized
ctaggcgggttaaattagtcct

SEQ ID NO: 62667 - DNA, 22 bp, Artificial Sequence
  chemically synthesized
taggcgggttaaattagtcctc

SEQ ID NO: 62668 - DNA, 22 bp, Artificial Sequence
  chemically synthesized
ggcgggttaaattagtcctcac

SEQ ID NO: 62669 - DNA, 22 bp, Artificial Sequence
  chemically synthesized
aattagtcctcacaaaatgtca

SEQ ID NO: 62670 - DNA, 22 bp, Artificial Sequence
  chemically synthesized
gtcctcacaaaatgtcacattt

SEQ ID NO: 62671 - DNA, 22 bp, Artificial Sequence
  chemically synthesized
acaaaatgtcacatttccctgg

SEQ ID NO: 62672 - DNA, 22 bp, Artificial Sequence
  chemically synthesized
ccctggcagctataggtttcca

SEQ ID NO: 62673 - DNA, 22 bp, Artificial Sequence
  chemically synthesized
cctggcagctataggtttccag

SEQ ID NO: 62674 - DNA, 22 bp, Artificial Sequence
  chemically synthesized
gcagctataggtttccaggagg

SEQ ID NO: 62675 - DNA, 22 bp, Artificial Sequence
  chemically synthesized
taggtttccaggagggtgaaca

SEQ ID NO: 62676 - DNA, 22 bp, Artificial Sequence
  chemically synthesized
ccaggagggtgaacaagggcca

SEQ ID NO: 62677 - DNA, 22 bp, Artificial Sequence
  chemically synthesized
caggagggtgaacaagggccat

SEQ ID NO: 62678 - DNA, 22 bp, Artificial Sequence
  chemically synthesized
ggtgtttgctgagggcttctca

SEQ ID NO: 62679 - DNA, 22 bp, Artificial Sequence
  chemically synthesized
gctgagggcttctcagtcctgg

SEQ ID NO: 62680 - DNA, 22 bp, Artificial Sequence
  chemically synthesized
ctgagggcttctcagtcctggg

SEQ ID NO: 62681 - DNA, 22 bp, Artificial Sequence
  chemically synthesized
agggcttctcagtcctgggtag

SEQ ID NO: 62682 - DNA, 22 bp, Artificial Sequence
  chemically synthesized
ctcagtcctgggtaggaactgc

SEQ ID NO: 62683 - DNA, 22 bp, Artificial Sequence
  chemically synthesized
tcagtcctgggtaggaactgct

SEQ ID NO: 62684 - DNA, 22 bp, Artificial Sequence
  chemically synthesized
agtcctgggtaggaactgctgg

SEQ ID NO: 62685 - DNA, 22 bp, Artificial Sequence
  chemically synthesized
ggtaggaactgctgggtgtgga

SEQ ID NO: 62686 - DNA, 22 bp, Artificial Sequence
  chemically synthesized
ctgggtgtggaaaccaccaagg

SEQ ID NO: 62687 - DNA, 22 bp, Artificial Sequence
  chemically synthesized
ggtgtggaaaccaccaaggctt

SEQ ID NO: 62688 - DNA, 22 bp, Artificial Sequence
  chemically synthesized
tgtaagcctgaaagagccactg

SEQ ID NO: 62689 - DNA, 22 bp, Artificial Sequence
  chemically synthesized
gtaagcctgaaagagccactgg

SEQ ID NO: 62690 - DNA, 22 bp, Artificial Sequence
  chemically synthesized
taagcctgaaagagccactggt

SEQ ID NO: 62691 - DNA, 22 bp, Artificial Sequence
  chemically synthesized
aaagagccactggtattgggag

SEQ ID NO: 62692 - DNA, 22 bp, Artificial Sequence
  chemically synthesized
gtattgggagcttggtctgcac

SEQ ID NO: 62693 - DNA, 22 bp, Artificial Sequence
  chemically synthesized
ggagcttggtctgcactcagac

SEQ ID NO: 62694 - DNA, 22 bp, Artificial Sequence
  chemically synthesized
ggtctgcactcagacctgagcg

SEQ ID NO: 62695 - DNA, 22 bp, Artificial Sequence
  chemically synthesized
gtctgcactcagacctgagcgc

SEQ ID NO: 62696 - DNA, 22 bp, Artificial Sequence
  chemically synthesized
cactcagacctgagcgccacac

SEQ ID NO: 62697 - DNA, 22 bp, Artificial Sequence
  chemically synthesized
agacctgagcgccacacattat

SEQ ID NO: 62698 - DNA, 22 bp, Artificial Sequence
  chemically synthesized
agcgccacacattattttccca

SEQ ID NO: 62699 - DNA, 22 bp, Artificial Sequence
  chemically synthesized
ttttcccagatttgggcaatct

SEQ ID NO: 62700 - DNA, 22 bp, Artificial Sequence
  chemically synthesized
tcccagatttgggcaatctaat

SEQ ID NO: 62701 - DNA, 22 bp, Artificial Sequence
  chemically synthesized
cccagatttgggcaatctaatg

SEQ ID NO: 62702 - DNA, 22 bp, Artificial Sequence
  chemically synthesized
ccagatttgggcaatctaatgg

SEQ ID NO: 62703 - DNA, 22 bp, Artificial Sequence
  chemically synthesized
gggcaatctaatggataggagg

SEQ ID NO: 62704 - DNA, 22 bp, Artificial Sequence
  chemically synthesized
ggcaatctaatggataggaggg

SEQ ID NO: 62705 - DNA, 22 bp, Artificial Sequence
  chemically synthesized
atggataggagggagggttatg

SEQ ID NO: 62706 - DNA, 22 bp, Artificial Sequence
  chemically synthesized
tgccccatctgtgaataggtgg

SEQ ID NO: 62707 - DNA, 22 bp, Artificial Sequence
  chemically synthesized
tgaataggtggaggagagggtc

SEQ ID NO: 62708 - DNA, 22 bp, Artificial Sequence
  chemically synthesized
ttgcagtgctcagaggaagcaa

SEQ ID NO: 62709 - DNA, 22 bp, Artificial Sequence
  chemically synthesized
cagtgctcagaggaagcaatag

SEQ ID NO: 62710 - DNA, 22 bp, Artificial Sequence
  chemically synthesized
agaggaagcaatagcctactgt

SEQ ID NO: 62711 - DNA, 22 bp, Artificial Sequence
  chemically synthesized
ctgtcttccagggacatgtctg

SEQ ID NO: 62712 - DNA, 22 bp, Artificial Sequence
  chemically synthesized
tcttccagggacatgtctggct

SEQ ID NO: 62713 - DNA, 22 bp, Artificial Sequence
  chemically synthesized
ccagggacatgtctggctcctg

SEQ ID NO: 62714 - DNA, 22 bp, Artificial Sequence
  chemically synthesized
cagggacatgtctggctcctgg

SEQ ID NO: 62715 - DNA, 22 bp, Artificial Sequence
  chemically synthesized
gctcctggaatgcctgtccagg

SEQ ID NO: 62716 - DNA, 22 bp, Artificial Sequence
  chemically synthesized
ctggaatgcctgtccaggctgc

SEQ ID NO: 62717 - DNA, 22 bp, Artificial Sequence
  chemically synthesized
gaatgcctgtccaggctgcggt

SEQ ID NO: 62718 - DNA, 22 bp, Artificial Sequence
  chemically synthesized
tccaggctgcggtgggtggcat

SEQ ID NO: 62719 - DNA, 22 bp, Artificial Sequence
  chemically synthesized
cggtgggtggcatgggtaaggg

SEQ ID NO: 62720 - DNA, 22 bp, Artificial Sequence
  chemically synthesized
ttaataaaaagtcacaatgcct

SEQ ID NO: 62721 - DNA, 22 bp, Artificial Sequence
  chemically synthesized
taataaaaagtcacaatgcctg

SEQ ID NO: 62722 - DNA, 22 bp, Artificial Sequence
  chemically synthesized
aataaaaagtcacaatgcctgg

SEQ ID NO: 62723 - DNA, 22 bp, Artificial Sequence
  chemically synthesized
ataaaaagtcacaatgcctgga

SEQ ID NO: 62724 - DNA, 22 bp, Artificial Sequence
  chemically synthesized
gagaagtgaggctccttgcagc

SEQ ID NO: 62725 - DNA, 22 bp, Artificial Sequence
  chemically synthesized
cttgcagccacctgccttttct

SEQ ID NO: 62726 - DNA, 22 bp, Artificial Sequence
  chemically synthesized
gcagccacctgccttttctgtc

SEQ ID NO: 62727 - DNA, 22 bp, Artificial Sequence
  chemically synthesized
cagccacctgccttttctgtct

SEQ ID NO: 62728 - DNA, 22 bp, Artificial Sequence
  chemically synthesized
ccttttctgtcttgggtctcct

SEQ ID NO: 62729 - DNA, 22 bp, Artificial Sequence
  chemically synthesized
ttctgtcttgggtctcctggtt

SEQ ID NO: 62730 - DNA, 22 bp, Artificial Sequence
  chemically synthesized
tctgtcttgggtctcctggttg

SEQ ID NO: 62731 - DNA, 22 bp, Artificial Sequence
  chemically synthesized
ctgtcttgggtctcctggttgg

SEQ ID NO: 62732 - DNA, 22 bp, Artificial Sequence
  chemically synthesized
tgtcttgggtctcctggttgga

SEQ ID NO: 62733 - DNA, 22 bp, Artificial Sequence
  chemically synthesized
tcttgggtctcctggttggacc

SEQ ID NO: 62734 - DNA, 22 bp, Artificial Sequence
  chemically synthesized
gggtctcctggttggaccccat

SEQ ID NO: 62735 - DNA, 22 bp, Artificial Sequence
  chemically synthesized
ggtctcctggttggaccccatt

SEQ ID NO: 62736 - DNA, 22 bp, Artificial Sequence
  chemically synthesized
ctggttggaccccattctggct

SEQ ID NO: 62737 - DNA, 22 bp, Artificial Sequence
  chemically synthesized
gttggaccccattctggctttc

SEQ ID NO: 62738 - DNA, 22 bp, Artificial Sequence
  chemically synthesized
gaccccattctggctttccacc

SEQ ID NO: 62739 - DNA, 22 bp, Artificial Sequence
  chemically synthesized
tggctttccacctggtcagagc

SEQ ID NO: 62740 - DNA, 22 bp, Artificial Sequence
  chemically synthesized
gctttccacctggtcagagcct

SEQ ID NO: 62741 - DNA, 22 bp, Artificial Sequence
  chemically synthesized
tccacctggtcagagcctcctg

SEQ ID NO: 62742 - DNA, 22 bp, Artificial Sequence
  chemically synthesized
ccacctggtcagagcctcctga

SEQ ID NO: 62743 - DNA, 22 bp, Artificial Sequence
  chemically synthesized
cacctggtcagagcctcctgag

SEQ ID NO: 62744 - DNA, 22 bp, Artificial Sequence
  chemically synthesized
gtcagagcctcctgaggctgca

SEQ ID NO: 62745 - DNA, 22 bp, Artificial Sequence
  chemically synthesized
ctgaggctgcagaatggggcta

SEQ ID NO: 62746 - DNA, 22 bp, Artificial Sequence
  chemically synthesized
aggctgcagaatggggctaaca

SEQ ID NO: 62747 - DNA, 22 bp, Artificial Sequence
  chemically synthesized
cagaatggggctaacatgatca

SEQ ID NO: 62748 - DNA, 22 bp, Artificial Sequence
  chemically synthesized
acatgatcaagggtgatgtggc

SEQ ID NO: 62749 - DNA, 22 bp, Artificial Sequence
  chemically synthesized
ctccatcttgggactaggagtg

SEQ ID NO: 62750 - DNA, 22 bp, Artificial Sequence
  chemically synthesized
tccatcttgggactaggagtga

SEQ ID NO: 62751 - DNA, 22 bp, Artificial Sequence
  chemically synthesized
catcttgggactaggagtgacc

SEQ ID NO: 62752 - DNA, 22 bp, Artificial Sequence
  chemically synthesized
gggactaggagtgaccaggttt

SEQ ID NO: 62753 - DNA, 22 bp, Artificial Sequence
  chemically synthesized
ggactaggagtgaccaggttta

SEQ ID NO: 62754 - DNA, 22 bp, Artificial Sequence
  chemically synthesized
ggagtgaccaggtttagagaag

SEQ ID NO: 62755 - DNA, 22 bp, Artificial Sequence
  chemically synthesized
agagaaggtggactcattcctg

SEQ ID NO: 62756 - DNA, 22 bp, Artificial Sequence
  chemically synthesized
gagaaggtggactcattcctgc

SEQ ID NO: 62757 - DNA, 22 bp, Artificial Sequence
  chemically synthesized
attcctgctcccattgccagga

SEQ ID NO: 62758 - DNA, 22 bp, Artificial Sequence
  chemically synthesized
ctgctcccattgccaggacaaa

SEQ ID NO: 62759 - DNA, 22 bp, Artificial Sequence
  chemically synthesized
ctcccattgccaggacaaatgc

SEQ ID NO: 62760 - DNA, 22 bp, Artificial Sequence
  chemically synthesized
ccattgccaggacaaatgcaga

SEQ ID NO: 62761 - DNA, 22 bp, Artificial Sequence
  chemically synthesized
ccaggacaaatgcagagtggat

SEQ ID NO: 62762 - DNA, 22 bp, Artificial Sequence
  chemically synthesized
ggtctgtcccttccacacagac

SEQ ID NO: 62763 - DNA, 22 bp, Artificial Sequence
  chemically synthesized
tcccttccacacagacaccttc

SEQ ID NO: 62764 - DNA, 22 bp, Artificial Sequence
  chemically synthesized
ccacacagacaccttcatttca

SEQ ID NO: 62765 - DNA, 22 bp, Artificial Sequence
  chemically synthesized
cacacagacaccttcatttcaa

SEQ ID NO: 62766 - DNA, 22 bp, Artificial Sequence
  chemically synthesized
catttcaacacattccgtgtgt

SEQ ID NO: 62767 - DNA, 22 bp, Artificial Sequence
  chemically synthesized
atttcaacacattccgtgtgta

SEQ ID NO: 62768 - DNA, 22 bp, Artificial Sequence
  chemically synthesized
caacacattccgtgtgtattaa

SEQ ID NO: 62769 - DNA, 22 bp, Artificial Sequence
  chemically synthesized
aacacattccgtgtgtattaag

SEQ ID NO: 62770 - DNA, 22 bp, Artificial Sequence
  chemically synthesized
cgtgtgtattaagatgacagac

SEQ ID NO: 62771 - DNA, 22 bp, Artificial Sequence
  chemically synthesized
agatgacagacacgttggtttt

SEQ ID NO: 62772 - DNA, 22 bp, Artificial Sequence
  chemically synthesized
gttttgctccaagccagtagcc

SEQ ID NO: 62773 - DNA, 22 bp, Artificial Sequence
  chemically synthesized
tgctccaagccagtagccatcc

SEQ ID NO: 62774 - DNA, 22 bp, Artificial Sequence
  chemically synthesized
gctccaagccagtagccatccc

SEQ ID NO: 62775 - DNA, 22 bp, Artificial Sequence
  chemically synthesized
ctccaagccagtagccatcccc

SEQ ID NO: 62776 - DNA, 22 bp, Artificial Sequence
  chemically synthesized
caagccagtagccatcccccta

SEQ ID NO: 62777 - DNA, 22 bp, Artificial Sequence
  chemically synthesized
gacagcccaggccttaaaagac

SEQ ID NO: 62778 - DNA, 22 bp, Artificial Sequence
  chemically synthesized
aaaagacaaggaggtgtttgga

SEQ ID NO: 62779 - DNA, 22 bp, Artificial Sequence
  chemically synthesized
aaagacaaggaggtgtttggac

SEQ ID NO: 62780 - DNA, 22 bp, Artificial Sequence
  chemically synthesized
ggacaagagcaagaaagaagtc

SEQ ID NO: 62781 - DNA, 22 bp, Artificial Sequence
  chemically synthesized
gacaagagcaagaaagaagtct

SEQ ID NO: 62782 - DNA, 22 bp, Artificial Sequence
  chemically synthesized
gctgtgtcttctgggagcccca

SEQ ID NO: 62783 - DNA, 22 bp, Artificial Sequence
  chemically synthesized
tgtcttctgggagccccagaca

SEQ ID NO: 62784 - DNA, 22 bp, Artificial Sequence
  chemically synthesized
ctgggagccccagacagaccag

SEQ ID NO: 62785 - DNA, 22 bp, Artificial Sequence
  chemically synthesized
tgggagccccagacagaccagt

SEQ ID NO: 62786 - DNA, 22 bp, Artificial Sequence
  chemically synthesized
ggagccccagacagaccagtgt

SEQ ID NO: 62787 - DNA, 22 bp, Artificial Sequence
  chemically synthesized
tttctcactggttcactccttc

SEQ ID NO: 62788 - DNA, 22 bp, Artificial Sequence
  chemically synthesized
tctcactggttcactccttccc

SEQ ID NO: 62789 - DNA, 22 bp, Artificial Sequence
  chemically synthesized
ctcactggttcactccttcccc

SEQ ID NO: 62790 - DNA, 22 bp, Artificial Sequence
  chemically synthesized
tcactggttcactccttcccca

SEQ ID NO: 62791 - DNA, 22 bp, Artificial Sequence
  chemically synthesized
actggttcactccttccccagc

SEQ ID NO: 62792 - DNA, 22 bp, Artificial Sequence
  chemically synthesized
gttcactccttccccagctcat

SEQ ID NO: 62793 - DNA, 22 bp, Artificial Sequence
  chemically synthesized
actccttccccagctcatttta

SEQ ID NO: 62794 - DNA, 22 bp, Artificial Sequence
  chemically synthesized
cttccccagctcattttaccca

SEQ ID NO: 62795 - DNA, 22 bp, Artificial Sequence
  chemically synthesized
ccccagctcattttacccactc

SEQ ID NO: 62796 - DNA, 22 bp, Artificial Sequence
  chemically synthesized
cccagctcattttacccactcg

SEQ ID NO: 62797 - DNA, 22 bp, Artificial Sequence
  chemically synthesized
attttacccactcgagacttga

SEQ ID NO: 62798 - DNA, 22 bp, Artificial Sequence
  chemically synthesized
tacccactcgagacttgattct

SEQ ID NO: 62799 - DNA, 22 bp, Artificial Sequence
  chemically synthesized
acccactcgagacttgattctc

SEQ ID NO: 62800 - DNA, 22 bp, Artificial Sequence
  chemically synthesized
cccactcgagacttgattctct

SEQ ID NO: 62801 - DNA, 22 bp, Artificial Sequence
  chemically synthesized
gagacttgattctcttagagat

SEQ ID NO: 62802 - DNA, 22 bp, Artificial Sequence
  chemically synthesized
gattctcttagagattaagtac

SEQ ID NO: 62803 - DNA, 22 bp, Artificial Sequence
  chemically synthesized
attctcttagagattaagtacc

SEQ ID NO: 62804 - DNA, 22 bp, Artificial Sequence
  chemically synthesized
tcttagagattaagtacctccc

SEQ ID NO: 62805 - DNA, 22 bp, Artificial Sequence
  chemically synthesized
ttagagattaagtacctcccct

SEQ ID NO: 62806 - DNA, 22 bp, Artificial Sequence
  chemically synthesized
agagattaagtacctcccctgg

SEQ ID NO: 62807 - DNA, 22 bp, Artificial Sequence
  chemically synthesized
gagattaagtacctcccctggt

SEQ ID NO: 62808 - DNA, 22 bp, Artificial Sequence
  chemically synthesized
agtacctcccctggtcacatag

SEQ ID NO: 62809 - DNA, 22 bp, Artificial Sequence
  chemically synthesized
ccctggtcacatagtttctggg

SEQ ID NO: 62810 - DNA, 22 bp, Artificial Sequence
  chemically synthesized
gtcacatagtttctgggtgaca

SEQ ID NO: 62811 - DNA, 22 bp, Artificial Sequence
  chemically synthesized
ctgggtgacaggactagaattt

SEQ ID NO: 62812 - DNA, 22 bp, Artificial Sequence
  chemically synthesized
tgggtgacaggactagaattta

SEQ ID NO: 62813 - DNA, 22 bp, Artificial Sequence
  chemically synthesized
ggtgacaggactagaatttatt

SEQ ID NO: 62814 - DNA, 22 bp, Artificial Sequence
  chemically synthesized
gaatttatttcttttgatcacc

SEQ ID NO: 62815 - DNA, 22 bp, Artificial Sequence
  chemically synthesized
atttcttttgatcaccaattga

SEQ ID NO: 62816 - DNA, 22 bp, Artificial Sequence
  chemically synthesized
tttcttttgatcaccaattgag

SEQ ID NO: 62817 - DNA, 22 bp, Artificial Sequence
  chemically synthesized
cttttgatcaccaattgagtgc

SEQ ID NO: 62818 - DNA, 22 bp, Artificial Sequence
  chemically synthesized
ttttgatcaccaattgagtgct

SEQ ID NO: 62819 - DNA, 22 bp, Artificial Sequence
  chemically synthesized
ttgatcaccaattgagtgctct

SEQ ID NO: 62820 - DNA, 22 bp, Artificial Sequence
  chemically synthesized
tgatcaccaattgagtgctctt

SEQ ID NO: 62821 - DNA, 22 bp, Artificial Sequence
  chemically synthesized
gatcaccaattgagtgctcttt

SEQ ID NO: 62822 - DNA, 22 bp, Artificial Sequence
  chemically synthesized
atcaccaattgagtgctctttc

SEQ ID NO: 62823 - DNA, 22 bp, Artificial Sequence
  chemically synthesized
agtgctctttctgctctactgt

SEQ ID NO: 62824 - DNA, 22 bp, Artificial Sequence
  chemically synthesized
tttctgctctactgtgctacca

SEQ ID NO: 62825 - DNA, 22 bp, Artificial Sequence
  chemically synthesized
tctgctctactgtgctaccatg

SEQ ID NO: 62826 - DNA, 22 bp, Artificial Sequence
  chemically synthesized
ctgctctactgtgctaccatga

SEQ ID NO: 62827 - DNA, 22 bp, Artificial Sequence
  chemically synthesized
tgctctactgtgctaccatgat

SEQ ID NO: 62828 - DNA, 22 bp, Artificial Sequence
  chemically synthesized
ctctactgtgctaccatgatca

SEQ ID NO: 62829 - DNA, 22 bp, Artificial Sequence
  chemically synthesized
tactgtgctaccatgatcagag

SEQ ID NO: 62830 - DNA, 22 bp, Artificial Sequence
  chemically synthesized
ctgtgctaccatgatcagaggt

SEQ ID NO: 62831 - DNA, 22 bp, Artificial Sequence
  chemically synthesized
tgctaccatgatcagaggtaaa

SEQ ID NO: 62832 - DNA, 22 bp, Artificial Sequence
  chemically synthesized
ccatgatcagaggtaaatttgt

SEQ ID NO: 62833 - DNA, 22 bp, Artificial Sequence
  chemically synthesized
gtttttctctgatgatgattga

SEQ ID NO: 62834 - DNA, 22 bp, Artificial Sequence
  chemically synthesized
tttttctctgatgatgattgaa

SEQ ID NO: 62835 - DNA, 22 bp, Artificial Sequence
  chemically synthesized
ttctctgatgatgattgaaaac

SEQ ID NO: 62836 - DNA, 22 bp, Artificial Sequence
  chemically synthesized
tctctgatgatgattgaaaaca

SEQ ID NO: 62837 - DNA, 22 bp, Artificial Sequence
  chemically synthesized
ctctgatgatgattgaaaacag

SEQ ID NO: 62838 - DNA, 22 bp, Artificial Sequence
  chemically synthesized
tctgatgatgattgaaaacagt

SEQ ID NO: 62839 - DNA, 22 bp, Artificial Sequence
  chemically synthesized
tgatgatgattgaaaacagttt

SEQ ID NO: 62840 - DNA, 22 bp, Artificial Sequence
  chemically synthesized
atgatgattgaaaacagtttta

SEQ ID NO: 62841 - DNA, 22 bp, Artificial Sequence
  chemically synthesized
aaaacagttttattaacatatc

SEQ ID NO: 62842 - DNA, 22 bp, Artificial Sequence
  chemically synthesized
tattaacatatcaagaacatta

SEQ ID NO: 62843 - DNA, 22 bp, Artificial Sequence
  chemically synthesized
attaacatatcaagaacattac

SEQ ID NO: 62844 - DNA, 22 bp, Artificial Sequence
  chemically synthesized
ttaacatatcaagaacattaca

SEQ ID NO: 62845 - DNA, 22 bp, Artificial Sequence
  chemically synthesized
acatatcaagaacattacaaca

SEQ ID NO: 62846 - DNA, 22 bp, Artificial Sequence
  chemically synthesized
caacacaaagagtttctggttt

SEQ ID NO: 62847 - DNA, 22 bp, Artificial Sequence
  chemically synthesized
ctggtttaaaaaatctcttttc

SEQ ID NO: 62848 - DNA, 22 bp, Artificial Sequence
  chemically synthesized
tggtttaaaaaatctcttttca

SEQ ID NO: 62849 - DNA, 22 bp, Artificial Sequence
  chemically synthesized
gtttaaaaaatctcttttcact

SEQ ID NO: 62850 - DNA, 22 bp, Artificial Sequence
  chemically synthesized
aaaaaatctcttttcactggta

SEQ ID NO: 62851 - DNA, 22 bp, Artificial Sequence
  chemically synthesized
aaaaatctcttttcactggtat

SEQ ID NO: 62852 - DNA, 22 bp, Artificial Sequence
  chemically synthesized
ttttcactggtatttcttaaat

SEQ ID NO: 62853 - DNA, 22 bp, Artificial Sequence
  chemically synthesized
ttcactggtatttcttaaattc

SEQ ID NO: 62854 - DNA, 22 bp, Artificial Sequence
  chemically synthesized
tcactggtatttcttaaattca

SEQ ID NO: 62855 - DNA, 22 bp, Artificial Sequence
  chemically synthesized
cactggtatttcttaaattcat

SEQ ID NO: 62856 - DNA, 22 bp, Artificial Sequence
  chemically synthesized
actggtatttcttaaattcata

SEQ ID NO: 62857 - DNA, 22 bp, Artificial Sequence
  chemically synthesized
gtatttcttaaattcatatttt

SEQ ID NO: 62858 - DNA, 22 bp, Artificial Sequence
  chemically synthesized
cttaaattcatattttaatatt

SEQ ID NO: 62859 - DNA, 22 bp, Artificial Sequence
  chemically synthesized
ttaaattcatattttaatatta

SEQ ID NO: 62860 - DNA, 22 bp, Artificial Sequence
  chemically synthesized
aaattcatattttaatattaga

SEQ ID NO: 62861 - DNA, 22 bp, Artificial Sequence
  chemically synthesized
aattcatattttaatattagaa

SEQ ID NO: 62862 - DNA, 22 bp, Artificial Sequence
  chemically synthesized
atattttaatattagaaagcat

SEQ ID NO: 62863 - DNA, 22 bp, Artificial Sequence
  chemically synthesized
taatattagaaagcatgggatt

SEQ ID NO: 62864 - DNA, 22 bp, Artificial Sequence
  chemically synthesized
aatattagaaagcatgggattg

SEQ ID NO: 62865 - DNA, 22 bp, Artificial Sequence
  chemically synthesized
atattagaaagcatgggattgg

SEQ ID NO: 62866 - DNA, 22 bp, Artificial Sequence
  chemically synthesized
gaaagcatgggattgggtgtga

SEQ ID NO: 62867 - DNA, 22 bp, Artificial Sequence
  chemically synthesized
ggtgtgaacactgcttttggat

SEQ ID NO: 62868 - DNA, 22 bp, Artificial Sequence
  chemically synthesized
cttttggatgttggaggaagat

SEQ ID NO: 62869 - DNA, 22 bp, Artificial Sequence
  chemically synthesized
ttggatgttggaggaagataag

SEQ ID NO: 62870 - DNA, 22 bp, Artificial Sequence
  chemically synthesized
tggatgttggaggaagataaga

SEQ ID NO: 62871 - DNA, 22 bp, Artificial Sequence
  chemically synthesized
ggatgttggaggaagataagag

SEQ ID NO: 62872 - DNA, 22 bp, Artificial Sequence
  chemically synthesized
gatgttggaggaagataagaga

SEQ ID NO: 62873 - DNA, 22 bp, Artificial Sequence
  chemically synthesized
gaggaagataagagaaggaagc

SEQ ID NO: 62874 - DNA, 22 bp, Artificial Sequence
  chemically synthesized
gctctttctttaggagcaatac

SEQ ID NO: 62875 - DNA, 22 bp, Artificial Sequence
  chemically synthesized
tttctttaggagcaatacctga

SEQ ID NO: 62876 - DNA, 22 bp, Artificial Sequence
  chemically synthesized
tctttaggagcaatacctgaga

SEQ ID NO: 62877 - DNA, 22 bp, Artificial Sequence
  chemically synthesized
ctttaggagcaatacctgagat

SEQ ID NO: 62878 - DNA, 22 bp, Artificial Sequence
  chemically synthesized
tttaggagcaatacctgagatc

SEQ ID NO: 62879 - DNA, 22 bp, Artificial Sequence
  chemically synthesized
taggagcaatacctgagatccc

SEQ ID NO: 62880 - DNA, 22 bp, Artificial Sequence
  chemically synthesized
aggagcaatacctgagatccca

SEQ ID NO: 62881 - DNA, 22 bp, Artificial Sequence
  chemically synthesized
ggagcaatacctgagatcccag

SEQ ID NO: 62882 - DNA, 22 bp, Artificial Sequence
  chemically synthesized
agatcccagaattgtatgtaca

SEQ ID NO: 62883 - DNA, 22 bp, Artificial Sequence
  chemically synthesized
tatgtacaaagtgtgtgatggc

SEQ ID NO: 62884 - DNA, 22 bp, Artificial Sequence
  chemically synthesized
aaatctgtgctagcgagaaacc

SEQ ID NO: 62885 - DNA, 22 bp, Artificial Sequence
  chemically synthesized
tgctagcgagaaaccccctgct

SEQ ID NO: 62886 - DNA, 22 bp, Artificial Sequence
  chemically synthesized
gcgagaaaccccctgctactct

SEQ ID NO: 62887 - DNA, 22 bp, Artificial Sequence
  chemically synthesized
ctactcttctgaatctgatgaa

SEQ ID NO: 62888 - DNA, 22 bp, Artificial Sequence
  chemically synthesized
ctcttctgaatctgatgaagaa

SEQ ID NO: 62889 - DNA, 22 bp, Artificial Sequence
  chemically synthesized
ttctgaatctgatgaagaagtt

SEQ ID NO: 62890 - DNA, 22 bp, Artificial Sequence
  chemically synthesized
ctgaatctgatgaagaagttat

SEQ ID NO: 62891 - DNA, 22 bp, Artificial Sequence
  chemically synthesized
tgaatctgatgaagaagttatt

SEQ ID NO: 62892 - DNA, 22 bp, Artificial Sequence
  chemically synthesized
aatctgatgaagaagttattct

SEQ ID NO: 62893 - DNA, 22 bp, Artificial Sequence
  chemically synthesized
atgaagaagttattctgtctgt

SEQ ID NO: 62894 - DNA, 22 bp, Artificial Sequence
  chemically synthesized
ttctgtctgtgcagttttatta

SEQ ID NO: 62895 - DNA, 22 bp, Artificial Sequence
  chemically synthesized
tgtctgtgcagttttattaggc

SEQ ID NO: 62896 - DNA, 22 bp, Artificial Sequence
  chemically synthesized
tctgtgcagttttattaggctg

SEQ ID NO: 62897 - DNA, 22 bp, Artificial Sequence
  chemically synthesized
tgcagttttattaggctgagac

SEQ ID NO: 62898 - DNA, 22 bp, Artificial Sequence
  chemically synthesized
tattaggctgagactttttccg

SEQ ID NO: 62899 - DNA, 22 bp, Artificial Sequence
  chemically synthesized
attaggctgagactttttccga

SEQ ID NO: 62900 - DNA, 22 bp, Artificial Sequence
  chemically synthesized
ttaggctgagactttttccgat

SEQ ID NO: 62901 - DNA, 22 bp, Artificial Sequence
  chemically synthesized
ggctgagactttttccgatggt

SEQ ID NO: 62902 - DNA, 22 bp, Artificial Sequence
  chemically synthesized
agactttttccgatggtttatt

SEQ ID NO: 62903 - DNA, 22 bp, Artificial Sequence
  chemically synthesized
tttccgatggtttatttttccg

SEQ ID NO: 62904 - DNA, 22 bp, Artificial Sequence
  chemically synthesized
ttccgatggtttatttttccgt

SEQ ID NO: 62905 - DNA, 22 bp, Artificial Sequence
  chemically synthesized
tccgatggtttatttttccgtt

SEQ ID NO: 62906 - DNA, 22 bp, Artificial Sequence
  chemically synthesized
ccgatggtttatttttccgttt

SEQ ID NO: 62907 - DNA, 22 bp, Artificial Sequence
  chemically synthesized
cgatggtttatttttccgtttg

SEQ ID NO: 62908 - DNA, 22 bp, Artificial Sequence
  chemically synthesized
atttttccgtttgctcacagaa

SEQ ID NO: 62909 - DNA, 22 bp, Artificial Sequence
  chemically synthesized
tttttccgtttgctcacagaat

SEQ ID NO: 62910 - DNA, 22 bp, Artificial Sequence
  chemically synthesized
ttccgtttgctcacagaatgta

SEQ ID NO: 62911 - DNA, 22 bp, Artificial Sequence
  chemically synthesized
tccgtttgctcacagaatgtag

SEQ ID NO: 62912 - DNA, 22 bp, Artificial Sequence
  chemically synthesized
ccgtttgctcacagaatgtaga

SEQ ID NO: 62913 - DNA, 22 bp, Artificial Sequence
  chemically synthesized
cgtttgctcacagaatgtagag

SEQ ID NO: 62914 - DNA, 22 bp, Artificial Sequence
  chemically synthesized
gctcacagaatgtagaggagag

SEQ ID NO: 62915 - DNA, 22 bp, Artificial Sequence
  chemically synthesized
ctcacagaatgtagaggagagc

SEQ ID NO: 62916 - DNA, 22 bp, Artificial Sequence
  chemically synthesized
acagaatgtagaggagagccag

SEQ ID NO: 62917 - DNA, 22 bp, Artificial Sequence
  chemically synthesized
acacgttcacactgtttaccta

SEQ ID NO: 62918 - DNA, 22 bp, Artificial Sequence
  chemically synthesized
acactgtttacctactccctga

SEQ ID NO: 62919 - DNA, 22 bp, Artificial Sequence
  chemically synthesized
tttacctactccctgactttgg

SEQ ID NO: 62920 - DNA, 22 bp, Artificial Sequence
  chemically synthesized
acctactccctgactttggagc

SEQ ID NO: 62921 - DNA, 22 bp, Artificial Sequence
  chemically synthesized
cctactccctgactttggagct

SEQ ID NO: 62922 - DNA, 22 bp, Artificial Sequence
  chemically synthesized
ctccctgactttggagctcagc

SEQ ID NO: 62923 - DNA, 22 bp, Artificial Sequence
  chemically synthesized
cctgactttggagctcagcaaa

SEQ ID NO: 62924 - DNA, 22 bp, Artificial Sequence
  chemically synthesized
actttggagctcagcaaatctg

SEQ ID NO: 62925 - DNA, 22 bp, Artificial Sequence
  chemically synthesized
tggagctcagcaaatctgctat

SEQ ID NO: 62926 - DNA, 22 bp, Artificial Sequence
  chemically synthesized
ggagctcagcaaatctgctatc

SEQ ID NO: 62927 - DNA, 22 bp, Artificial Sequence
  chemically synthesized
gagctcagcaaatctgctatcc

SEQ ID NO: 62928 - DNA, 22 bp, Artificial Sequence
  chemically synthesized
agcaaatctgctatccatcatt

SEQ ID NO: 62929 - DNA, 22 bp, Artificial Sequence
  chemically synthesized
ctatccatcattttgtttcacc

SEQ ID NO: 62930 - DNA, 22 bp, Artificial Sequence
  chemically synthesized
tccatcattttgtttcaccagc

SEQ ID NO: 62931 - DNA, 22 bp, Artificial Sequence
  chemically synthesized
tgtttcaccagcttttacaaag

SEQ ID NO: 62932 - DNA, 22 bp, Artificial Sequence
  chemically synthesized
gtttcaccagcttttacaaagc

SEQ ID NO: 62933 - DNA, 22 bp, Artificial Sequence
  chemically synthesized
tttcaccagcttttacaaagca

SEQ ID NO: 62934 - DNA, 22 bp, Artificial Sequence
  chemically synthesized
caccagcttttacaaagcagga

SEQ ID NO: 62935 - DNA, 22 bp, Artificial Sequence
  chemically synthesized
accagcttttacaaagcaggat

SEQ ID NO: 62936 - DNA, 22 bp, Artificial Sequence
  chemically synthesized
ttacaaagcaggatcataaact

SEQ ID NO: 62937 - DNA, 22 bp, Artificial Sequence
  chemically synthesized
tacaaagcaggatcataaactg

SEQ ID NO: 62938 - DNA, 22 bp, Artificial Sequence
  chemically synthesized
acaaagcaggatcataaactgt

SEQ ID NO: 62939 - DNA, 22 bp, Artificial Sequence
  chemically synthesized
caaagcaggatcataaactgta

SEQ ID NO: 62940 - DNA, 22 bp, Artificial Sequence
  chemically synthesized
taagctcatttggagggacctg

SEQ ID NO: 62941 - DNA, 22 bp, Artificial Sequence
  chemically synthesized
atttggagggacctgatctctg

SEQ ID NO: 62942 - DNA, 22 bp, Artificial Sequence
  chemically synthesized
ggagggacctgatctctgattg

SEQ ID NO: 62943 - DNA, 22 bp, Artificial Sequence
  chemically synthesized
gagggacctgatctctgattgt

SEQ ID NO: 62944 - DNA, 22 bp, Artificial Sequence
  chemically synthesized
atctctgattgttgctttgata

SEQ ID NO: 62945 - DNA, 22 bp, Artificial Sequence
  chemically synthesized
tgattgttgctttgataagtat

SEQ ID NO: 62946 - DNA, 22 bp, Artificial Sequence
  chemically synthesized
attgttgctttgataagtatct

SEQ ID NO: 62947 - DNA, 22 bp, Artificial Sequence
  chemically synthesized
ttgctttgataagtatctatac

SEQ ID NO: 62948 - DNA, 22 bp, Artificial Sequence
  chemically synthesized
ctttgataagtatctatacaaa

SEQ ID NO: 62949 - DNA, 22 bp, Artificial Sequence
  chemically synthesized
tgataagtatctatacaaatat

SEQ ID NO: 62950 - DNA, 22 bp, Artificial Sequence
  chemically synthesized
gataagtatctatacaaatatt

SEQ ID NO: 62951 - DNA, 22 bp, Artificial Sequence
  chemically synthesized
ataagtatctatacaaatattc

SEQ ID NO: 62952 - DNA, 22 bp, Artificial Sequence
  chemically synthesized
tacaaatattcatatcattctg

SEQ ID NO: 62953 - DNA, 22 bp, Artificial Sequence
  chemically synthesized
atatcattctgatagtcttgag

SEQ ID NO: 62954 - DNA, 22 bp, Artificial Sequence
  chemically synthesized
tgatagtcttgagttgcattgt

SEQ ID NO: 62955 - DNA, 22 bp, Artificial Sequence
  chemically synthesized
atagtcttgagttgcattgtta

SEQ ID NO: 62956 - DNA, 22 bp, Artificial Sequence
  chemically synthesized
gagttgcattgttacaacatgc

SEQ ID NO: 62957 - DNA, 22 bp, Artificial Sequence
  chemically synthesized
agttgcattgttacaacatgca

SEQ ID NO: 62958 - DNA, 22 bp, Artificial Sequence
  chemically synthesized
cattgttacaacatgcaaacct

SEQ ID NO: 62959 - DNA, 22 bp, Artificial Sequence
  chemically synthesized
ttacaacatgcaaacctctcag

SEQ ID NO: 62960 - DNA, 22 bp, Artificial Sequence
  chemically synthesized
caacatgcaaacctctcagttt

SEQ ID NO: 62961 - DNA, 22 bp, Artificial Sequence
  chemically synthesized
tcagttttccaggacttctggt

SEQ ID NO: 62962 - DNA, 22 bp, Artificial Sequence
  chemically synthesized
agttttccaggacttctggtgg

SEQ ID NO: 62963 - DNA, 22 bp, Artificial Sequence
  chemically synthesized
tccaggacttctggtggtacag

SEQ ID NO: 62964 - DNA, 22 bp, Artificial Sequence
  chemically synthesized
ccaggacttctggtggtacagc

SEQ ID NO: 62965 - DNA, 22 bp, Artificial Sequence
  chemically synthesized
caggacttctggtggtacagct

SEQ ID NO: 62966 - DNA, 22 bp, Artificial Sequence
  chemically synthesized
ctggtggtacagcttctctgtg

SEQ ID NO: 62967 - DNA, 22 bp, Artificial Sequence
  chemically synthesized
tggtggtacagcttctctgtgg

SEQ ID NO: 62968 - DNA, 22 bp, Artificial Sequence
  chemically synthesized
gtggtacagcttctctgtggag

SEQ ID NO: 62969 - DNA, 22 bp, Artificial Sequence
  chemically synthesized
ctctgtggagtgaggcatattt

SEQ ID NO: 62970 - DNA, 22 bp, Artificial Sequence
  chemically synthesized
tctgtggagtgaggcatatttt

SEQ ID NO: 62971 - DNA, 22 bp, Artificial Sequence
  chemically synthesized
tgtggagtgaggcatatttttg

SEQ ID NO: 62972 - DNA, 22 bp, Artificial Sequence
  chemically synthesized
tggagtgaggcatatttttggt

SEQ ID NO: 62973 - DNA, 22 bp, Artificial Sequence
  chemically synthesized
ttggtctggcctttcctccctg

SEQ ID NO: 62974 - DNA, 22 bp, Artificial Sequence
  chemically synthesized
tggtctggcctttcctccctga

SEQ ID NO: 62975 - DNA, 22 bp, Artificial Sequence
  chemically synthesized
ggtctggcctttcctccctgaa

SEQ ID NO: 62976 - DNA, 22 bp, Artificial Sequence
  chemically synthesized
gtctggcctttcctccctgaag

SEQ ID NO: 62977 - DNA, 22 bp, Artificial Sequence
  chemically synthesized
gcctttcctccctgaagctctg

SEQ ID NO: 62978 - DNA, 22 bp, Artificial Sequence
  chemically synthesized
tcctccctgaagctctgttagc

SEQ ID NO: 62979 - DNA, 22 bp, Artificial Sequence
  chemically synthesized
cctccctgaagctctgttagcc

SEQ ID NO: 62980 - DNA, 22 bp, Artificial Sequence
  chemically synthesized
ctccctgaagctctgttagcct

SEQ ID NO: 62981 - DNA, 22 bp, Artificial Sequence
  chemically synthesized
cctgaagctctgttagcctgag

SEQ ID NO: 62982 - DNA, 22 bp, Artificial Sequence
  chemically synthesized
aagctctgttagcctgagattt

SEQ ID NO: 62983 - DNA, 22 bp, Artificial Sequence
  chemically synthesized
tgttagcctgagatttcaccta

SEQ ID NO: 62984 - DNA, 22 bp, Artificial Sequence
  chemically synthesized
ttagcctgagatttcacctagt

SEQ ID NO: 62985 - DNA, 22 bp, Artificial Sequence
  chemically synthesized
gcctgagatttcacctagtgca

SEQ ID NO: 62986 - DNA, 22 bp, Artificial Sequence
  chemically synthesized
agatttcacctagtgcaacaca

SEQ ID NO: 62987 - DNA, 22 bp, Artificial Sequence
  chemically synthesized
cacctagtgcaacacaagttgt

SEQ ID NO: 62988 - DNA, 22 bp, Artificial Sequence
  chemically synthesized
acctagtgcaacacaagttgtg

SEQ ID NO: 62989 - DNA, 22 bp, Artificial Sequence
  chemically synthesized
gtgcaacacaagttgtgtagaa

SEQ ID NO: 62990 - DNA, 22 bp, Artificial Sequence
  chemically synthesized
tgtagaaagaaacataatacta

SEQ ID NO: 62991 - DNA, 22 bp, Artificial Sequence
  chemically synthesized
ctttattccataattcactagt

SEQ ID NO: 62992 - DNA, 22 bp, Artificial Sequence
  chemically synthesized
tattccataattcactagtaaa

SEQ ID NO: 62993 - DNA, 22 bp, Artificial Sequence
  chemically synthesized
attccataattcactagtaaaa

SEQ ID NO: 62994 - DNA, 22 bp, Artificial Sequence
  chemically synthesized
ttccataattcactagtaaaat

SEQ ID NO: 62995 - DNA, 22 bp, Artificial Sequence
  chemically synthesized
cataattcactagtaaaataat

SEQ ID NO: 62996 - DNA, 22 bp, Artificial Sequence
  chemically synthesized
actagtaaaataattagaataa

SEQ ID NO: 62997 - DNA, 22 bp, Artificial Sequence
  chemically synthesized
gtaaaataattagaataaaagg

SEQ ID NO: 62998 - DNA, 22 bp, Artificial Sequence
  chemically synthesized
gaataaaaggctgttttggaat

SEQ ID NO: 62999 - DNA, 22 bp, Artificial Sequence
  chemically synthesized
ttttggaatgtagagaggcaga

SEQ ID NO: 63000 - DNA, 22 bp, Artificial Sequence
  chemically synthesized
tggaatgtagagaggcagaggg

SEQ ID NO: 63001 - DNA, 22 bp, Artificial Sequence
  chemically synthesized
ggaatgtagagaggcagagggg

SEQ ID NO: 63002 - DNA, 22 bp, Artificial Sequence
  chemically synthesized
gaatgtagagaggcagaggggc

SEQ ID NO: 63003 - DNA, 22 bp, Artificial Sequence
  chemically synthesized
atataacttctcagaatgcatc

SEQ ID NO: 63004 - DNA, 22 bp, Artificial Sequence
  chemically synthesized
ctcagaatgcatcttcctgttt

SEQ ID NO: 63005 - DNA, 22 bp, Artificial Sequence
  chemically synthesized
tcagaatgcatcttcctgtttt

SEQ ID NO: 63006 - DNA, 22 bp, Artificial Sequence
  chemically synthesized
agaatgcatcttcctgttttcc

SEQ ID NO: 63007 - DNA, 22 bp, Artificial Sequence
  chemically synthesized
cctgttttcccgtcttaaattt

SEQ ID NO: 63008 - DNA, 22 bp, Artificial Sequence
  chemically synthesized
ctgttttcccgtcttaaatttt

SEQ ID NO: 63009 - DNA, 22 bp, Artificial Sequence
  chemically synthesized
ttttcccgtcttaaatttttat

SEQ ID NO: 63010 - DNA, 22 bp, Artificial Sequence
  chemically synthesized
tcccgtcttaaatttttatgtg

SEQ ID NO: 63011 - DNA, 22 bp, Artificial Sequence
  chemically synthesized
cccgtcttaaatttttatgtga

SEQ ID NO: 63012 - DNA, 22 bp, Artificial Sequence
  chemically synthesized
ccgtcttaaatttttatgtgag

SEQ ID NO: 63013 - DNA, 22 bp, Artificial Sequence
  chemically synthesized
aaatttttatgtgagatgagca

SEQ ID NO: 63014 - DNA, 22 bp, Artificial Sequence
  chemically synthesized
aatttttatgtgagatgagcac

SEQ ID NO: 63015 - DNA, 22 bp, Artificial Sequence
  chemically synthesized
ttatgtgagatgagcacactgc

SEQ ID NO: 63016 - DNA, 22 bp, Artificial Sequence
  chemically synthesized
tatgtgagatgagcacactgct

SEQ ID NO: 63017 - DNA, 22 bp, Artificial Sequence
  chemically synthesized
atgtgagatgagcacactgctg

SEQ ID NO: 63018 - DNA, 22 bp, Artificial Sequence
  chemically synthesized
tgtgagatgagcacactgctgt

SEQ ID NO: 63019 - DNA, 22 bp, Artificial Sequence
  chemically synthesized
ctgtaattaagaaagcagtgta

SEQ ID NO: 63020 - DNA, 22 bp, Artificial Sequence
  chemically synthesized
taattaagaaagcagtgtaagg

SEQ ID NO: 63021 - DNA, 22 bp, Artificial Sequence
  chemically synthesized
agaaagcagtgtaaggctgggc

SEQ ID NO: 63022 - DNA, 22 bp, Artificial Sequence
  chemically synthesized
ggcgcagtggctcacgtctgta

SEQ ID NO: 63023 - DNA, 22 bp, Artificial Sequence
  chemically synthesized
acgtctgtaattccagcacttt

SEQ ID NO: 63024 - DNA, 22 bp, Artificial Sequence
  chemically synthesized
taattccagcactttgggaggc

SEQ ID NO: 63025 - DNA, 22 bp, Artificial Sequence
  chemically synthesized
cagcactttgggaggccgaggt

SEQ ID NO: 63026 - DNA, 22 bp, Artificial Sequence
  chemically synthesized
tgggaggccgaggtgggtagat

SEQ ID NO: 63027 - DNA, 22 bp, Artificial Sequence
  chemically synthesized
gggaggccgaggtgggtagatc

SEQ ID NO: 63028 - DNA, 22 bp, Artificial Sequence
  chemically synthesized
ggaggccgaggtgggtagatca

SEQ ID NO: 63029 - DNA, 22 bp, Artificial Sequence
  chemically synthesized
aggtcaagagtttgagaccagc

SEQ ID NO: 63030 - DNA, 22 bp, Artificial Sequence
  chemically synthesized
gagaccagcctgaccaacatgg

SEQ ID NO: 63031 - DNA, 22 bp, Artificial Sequence
  chemically synthesized
agaccagcctgaccaacatgga

SEQ ID NO: 63032 - DNA, 22 bp, Artificial Sequence
  chemically synthesized
accaacatggagaaacctcatc

SEQ ID NO: 63033 - DNA, 22 bp, Artificial Sequence
  chemically synthesized
atctctattaaaaatataaact

SEQ ID NO: 63034 - DNA, 22 bp, Artificial Sequence
  chemically synthesized
tattaaaaatataaacttagcc

SEQ ID NO: 63035 - DNA, 22 bp, Artificial Sequence
  chemically synthesized
ttaaaaatataaacttagccag

SEQ ID NO: 63036 - DNA, 22 bp, Artificial Sequence
  chemically synthesized
aaaatataaacttagccaggca

SEQ ID NO: 63037 - DNA, 22 bp, Artificial Sequence
  chemically synthesized
agccaggcatggtcgcacatgc

SEQ ID NO: 63038 - DNA, 22 bp, Artificial Sequence
  chemically synthesized
gccaggcatggtcgcacatgcc

SEQ ID NO: 63039 - DNA, 22 bp, Artificial Sequence
  chemically synthesized
taatcccagctactcaggaggc

SEQ ID NO: 63040 - DNA, 22 bp, Artificial Sequence
  chemically synthesized
ctcaggaggctgagggaggaga

SEQ ID NO: 63041 - DNA, 22 bp, Artificial Sequence
  chemically synthesized
aggaggctgagggaggagaatt

SEQ ID NO: 63042 - DNA, 22 bp, Artificial Sequence
  chemically synthesized
agggaggagaattgcttgaacc

SEQ ID NO: 63043 - DNA, 22 bp, Artificial Sequence
  chemically synthesized
cttgaacccaggaggcagaggt

SEQ ID NO: 63044 - DNA, 22 bp, Artificial Sequence
  chemically synthesized
gaacccaggaggcagaggtggt

SEQ ID NO: 63045 - DNA, 22 bp, Artificial Sequence
  chemically synthesized
aacccaggaggcagaggtggtg

SEQ ID NO: 63046 - DNA, 22 bp, Artificial Sequence
  chemically synthesized
caccccagcctgggcaacaaga

SEQ ID NO: 63047 - DNA, 22 bp, Artificial Sequence
  chemically synthesized
ggcaacaagagcgaaactctgt

SEQ ID NO: 63048 - DNA, 22 bp, Artificial Sequence
  chemically synthesized
tgtctcaaaaaaaaaaaaaaaa

SEQ ID NO: 63049 - DNA, 22 bp, Artificial Sequence
  chemically synthesized
tctcaaaaaaaaaaaaaaaaaa

SEQ ID NO: 63050 - DNA, 22 bp, Artificial Sequence
  chemically synthesized
aaaaaaaaaaaaaaaaaaaaag

SEQ ID NO: 63051 - DNA, 22 bp, Artificial Sequence
  chemically synthesized
gcaaaaggcctttccctcttgc

SEQ ID NO: 63052 - DNA, 22 bp, Artificial Sequence
  chemically synthesized
caaaaggcctttccctcttgcc

SEQ ID NO: 63053 - DNA, 22 bp, Artificial Sequence
  chemically synthesized
tccctcttgccactcagggaag

SEQ ID NO: 63054 - DNA, 22 bp, Artificial Sequence
  chemically synthesized
ccctcttgccactcagggaagc

SEQ ID NO: 63055 - DNA, 22 bp, Artificial Sequence
  chemically synthesized
cctcttgccactcagggaagca

SEQ ID NO: 63056 - DNA, 22 bp, Artificial Sequence
  chemically synthesized
ttgccactcagggaagcacccg

SEQ ID NO: 63057 - DNA, 22 bp, Artificial Sequence
  chemically synthesized
gccactcagggaagcacccgaa

SEQ ID NO: 63058 - DNA, 22 bp, Artificial Sequence
  chemically synthesized
ccactcagggaagcacccgaaa

SEQ ID NO: 63059 - DNA, 22 bp, Artificial Sequence
  chemically synthesized
agggaagcacccgaaagagaac

SEQ ID NO: 63060 - DNA, 22 bp, Artificial Sequence
  chemically synthesized
acaaaccaggtaaagtatttgg

SEQ ID NO: 63061 - DNA, 22 bp, Artificial Sequence
  chemically synthesized
caaaccaggtaaagtatttgga

SEQ ID NO: 63062 - DNA, 22 bp, Artificial Sequence
  chemically synthesized
ggaagtgattaatcatattaca

SEQ ID NO: 63063 - DNA, 22 bp, Artificial Sequence
  chemically synthesized
gaagtgattaatcatattacaa

SEQ ID NO: 63064 - DNA, 22 bp, Artificial Sequence
  chemically synthesized
atcatattacaagagtgttctt

SEQ ID NO: 63065 - DNA, 22 bp, Artificial Sequence
  chemically synthesized
caagagtgttcttcatttcccc

SEQ ID NO: 63066 - DNA, 22 bp, Artificial Sequence
  chemically synthesized
ttcatttcccccaaaggaccat

SEQ ID NO: 63067 - DNA, 22 bp, Artificial Sequence
  chemically synthesized
catttcccccaaaggaccatgg

SEQ ID NO: 63068 - DNA, 22 bp, Artificial Sequence
  chemically synthesized
atttcccccaaaggaccatggc

SEQ ID NO: 63069 - DNA, 22 bp, Artificial Sequence
  chemically synthesized
cccccaaaggaccatggcttcc

SEQ ID NO: 63070 - DNA, 22 bp, Artificial Sequence
  chemically synthesized
ccccaaaggaccatggcttcct

SEQ ID NO: 63071 - DNA, 22 bp, Artificial Sequence
  chemically synthesized
cctgtgacacttacctgtgctc

SEQ ID NO: 63072 - DNA, 22 bp, Artificial Sequence
  chemically synthesized
ctgtgacacttacctgtgctct

SEQ ID NO: 63073 - DNA, 22 bp, Artificial Sequence
  chemically synthesized
tgacacttacctgtgctcttat

SEQ ID NO: 63074 - DNA, 22 bp, Artificial Sequence
  chemically synthesized
acctgtgctcttatagatatta

SEQ ID NO: 63075 - DNA, 22 bp, Artificial Sequence
  chemically synthesized
cctgtgctcttatagatattaa

SEQ ID NO: 63076 - DNA, 22 bp, Artificial Sequence
  chemically synthesized
tgctcttatagatattaaagac

SEQ ID NO: 63077 - DNA, 22 bp, Artificial Sequence
  chemically synthesized
ttatagatattaaagacagagc

SEQ ID NO: 63078 - DNA, 22 bp, Artificial Sequence
  chemically synthesized
atagatattaaagacagagcca

SEQ ID NO: 63079 - DNA, 22 bp, Artificial Sequence
  chemically synthesized
tagatattaaagacagagccac

SEQ ID NO: 63080 - DNA, 22 bp, Artificial Sequence
  chemically synthesized
aagacagagccactggactgtg

SEQ ID NO: 63081 - DNA, 22 bp, Artificial Sequence
  chemically synthesized
gactgtgagctccttgagggca

SEQ ID NO: 63082 - DNA, 22 bp, Artificial Sequence
  chemically synthesized
tgagctccttgagggcagggaa

SEQ ID NO: 63083 - DNA, 22 bp, Artificial Sequence
  chemically synthesized
cttgagggcagggaatgaggct

SEQ ID NO: 63084 - DNA, 22 bp, Artificial Sequence
  chemically synthesized
gagggcagggaatgaggctcat

SEQ ID NO: 63085 - DNA, 22 bp, Artificial Sequence
  chemically synthesized
agggcagggaatgaggctcatt

SEQ ID NO: 63086 - DNA, 22 bp, Artificial Sequence
  chemically synthesized
attccattttgttctggcaagt

SEQ ID NO: 63087 - DNA, 22 bp, Artificial Sequence
  chemically synthesized
cattttgttctggcaagtagca

SEQ ID NO: 63088 - DNA, 22 bp, Artificial Sequence
  chemically synthesized
tgttctggcaagtagcactaca

SEQ ID NO: 63089 - DNA, 22 bp, Artificial Sequence
  chemically synthesized
gttctggcaagtagcactacag

SEQ ID NO: 63090 - DNA, 22 bp, Artificial Sequence
  chemically synthesized
ttctggcaagtagcactacagg

SEQ ID NO: 63091 - DNA, 22 bp, Artificial Sequence
  chemically synthesized
tggcaagtagcactacaggttt

SEQ ID NO: 63092 - DNA, 22 bp, Artificial Sequence
  chemically synthesized
gcaagtagcactacaggtttgg

SEQ ID NO: 63093 - DNA, 22 bp, Artificial Sequence
  chemically synthesized
caggtttggaccaaatgaatta

SEQ ID NO: 63094 - DNA, 22 bp, Artificial Sequence
  chemically synthesized
ggaccaaatgaattaaattggc

SEQ ID NO: 63095 - DNA, 22 bp, Artificial Sequence
  chemically synthesized
gaccaaatgaattaaattggct

SEQ ID NO: 63096 - DNA, 22 bp, Artificial Sequence
  chemically synthesized
aattggctgccattgaatcaaa

SEQ ID NO: 63097 - DNA, 22 bp, Artificial Sequence
  chemically synthesized
gctgccattgaatcaaagcaga

SEQ ID NO: 63098 - DNA, 22 bp, Artificial Sequence
  chemically synthesized
ccattgaatcaaagcagaatga

SEQ ID NO: 63099 - DNA, 22 bp, Artificial Sequence
  chemically synthesized
aatcaaagcagaatgaaggtag

SEQ ID NO: 63100 - DNA, 22 bp, Artificial Sequence
  chemically synthesized
ctgaaacaataatataaataag

SEQ ID NO: 63101 - DNA, 22 bp, Artificial Sequence
  chemically synthesized
tgaaacaataatataaataagt

SEQ ID NO: 63102 - DNA, 22 bp, Artificial Sequence
  chemically synthesized
aaacaataatataaataagtgc

SEQ ID NO: 63103 - DNA, 22 bp, Artificial Sequence
  chemically synthesized
gatgtttaccaacaactttcca

SEQ ID NO: 63104 - DNA, 22 bp, Artificial Sequence
  chemically synthesized
accaacaactttccagaaacag

SEQ ID NO: 63105 - DNA, 22 bp, Artificial Sequence
  chemically synthesized
ccaacaactttccagaaacagg

SEQ ID NO: 63106 - DNA, 22 bp, Artificial Sequence
  chemically synthesized
tccagaaacaggtcttgtttca

SEQ ID NO: 63107 - DNA, 22 bp, Artificial Sequence
  chemically synthesized
ccagaaacaggtcttgtttcag

SEQ ID NO: 63108 - DNA, 22 bp, Artificial Sequence
  chemically synthesized
cagaaacaggtcttgtttcaga

SEQ ID NO: 63109 - DNA, 22 bp, Artificial Sequence
  chemically synthesized
gtttcagaagatgtgccaaaga

SEQ ID NO: 63110 - DNA, 22 bp, Artificial Sequence
  chemically synthesized
tttcagaagatgtgccaaagat

SEQ ID NO: 63111 - DNA, 22 bp, Artificial Sequence
  chemically synthesized
cagaagatgtgccaaagatgtc

SEQ ID NO: 63112 - DNA, 22 bp, Artificial Sequence
  chemically synthesized
agaagatgtgccaaagatgtct

SEQ ID NO: 63113 - DNA, 22 bp, Artificial Sequence
  chemically synthesized
atgtgggcagggctcctgtgga

SEQ ID NO: 63114 - DNA, 22 bp, Artificial Sequence
  chemically synthesized
ctgtggagacctctgttgctga

SEQ ID NO: 63115 - DNA, 22 bp, Artificial Sequence
  chemically synthesized
tggagacctctgttgctgagtg

SEQ ID NO: 63116 - DNA, 22 bp, Artificial Sequence
  chemically synthesized
tgttgctgagtgagtcaaccat

SEQ ID NO: 63117 - DNA, 22 bp, Artificial Sequence
  chemically synthesized
ttgctgagtgagtcaaccatga

SEQ ID NO: 63118 - DNA, 22 bp, Artificial Sequence
  chemically synthesized
ctgagtgagtcaaccatgaggt

SEQ ID NO: 63119 - DNA, 22 bp, Artificial Sequence
  chemically synthesized
agtgagtcaaccatgaggtcgg

SEQ ID NO: 63120 - DNA, 22 bp, Artificial Sequence
  chemically synthesized
agcagttcagggttctcccatt

SEQ ID NO: 63121 - DNA, 22 bp, Artificial Sequence
  chemically synthesized
agggttctcccattttacagag

SEQ ID NO: 63122 - DNA, 22 bp, Artificial Sequence
  chemically synthesized
tcccattttacagaggaggatg

SEQ ID NO: 63123 - DNA, 22 bp, Artificial Sequence
  chemically synthesized
ccattttacagaggaggatgca

SEQ ID NO: 63124 - DNA, 22 bp, Artificial Sequence
  chemically synthesized
tacagaggaggatgcagcgacc

SEQ ID NO: 63125 - DNA, 22 bp, Artificial Sequence
  chemically synthesized
acagaggaggatgcagcgaccc

SEQ ID NO: 63126 - DNA, 22 bp, Artificial Sequence
  chemically synthesized
cagaggaggatgcagcgaccca

SEQ ID NO: 63127 - DNA, 22 bp, Artificial Sequence
  chemically synthesized
gcaagcccacccagctaggctt

SEQ ID NO: 63128 - DNA, 22 bp, Artificial Sequence
  chemically synthesized
caagcccacccagctaggcttg

SEQ ID NO: 63129 - DNA, 22 bp, Artificial Sequence
  chemically synthesized
ggcttgcttcacagacactctt

SEQ ID NO: 63130 - DNA, 22 bp, Artificial Sequence
  chemically synthesized
gcttcacagacactcttttaac

SEQ ID NO: 63131 - DNA, 22 bp, Artificial Sequence
  chemically synthesized
cttcacagacactcttttaact

SEQ ID NO: 63132 - DNA, 22 bp, Artificial Sequence
  chemically synthesized
cacagacactcttttaactagt

SEQ ID NO: 63133 - DNA, 22 bp, Artificial Sequence
  chemically synthesized
acagacactcttttaactagtt

SEQ ID NO: 63134 - DNA, 22 bp, Artificial Sequence
  chemically synthesized
ttttaactagttccatcagcaa

SEQ ID NO: 63135 - DNA, 22 bp, Artificial Sequence
  chemically synthesized
ttaactagttccatcagcaacc

SEQ ID NO: 63136 - DNA, 22 bp, Artificial Sequence
  chemically synthesized
taactagttccatcagcaaccc

SEQ ID NO: 63137 - DNA, 22 bp, Artificial Sequence
  chemically synthesized
aactagttccatcagcaacccc

SEQ ID NO: 63138 - DNA, 22 bp, Artificial Sequence
  chemically synthesized
actagttccatcagcaacccca

SEQ ID NO: 63139 - DNA, 22 bp, Artificial Sequence
  chemically synthesized
gttccatcagcaaccccaggtt

SEQ ID NO: 63140 - DNA, 22 bp, Artificial Sequence
  chemically synthesized
catcagcaaccccaggttggcc

SEQ ID NO: 63141 - DNA, 22 bp, Artificial Sequence
  chemically synthesized
gccatacaatgtcatcatacac

SEQ ID NO: 63142 - DNA, 22 bp, Artificial Sequence
  chemically synthesized
taccagtgaagaaactgaggct

SEQ ID NO: 63143 - DNA, 22 bp, Artificial Sequence
  chemically synthesized
accagtgaagaaactgaggctt

SEQ ID NO: 63144 - DNA, 22 bp, Artificial Sequence
  chemically synthesized
ccagtgaagaaactgaggcttg

SEQ ID NO: 63145 - DNA, 22 bp, Artificial Sequence
  chemically synthesized
aggcttggagaggttaaagagc

SEQ ID NO: 63146 - DNA, 22 bp, Artificial Sequence
  chemically synthesized
ggagaggttaaagagctgctcc

SEQ ID NO: 63147 - DNA, 22 bp, Artificial Sequence
  chemically synthesized
gagaggttaaagagctgctccc

SEQ ID NO: 63148 - DNA, 22 bp, Artificial Sequence
  chemically synthesized
aagagctgctcccagacacaca

SEQ ID NO: 63149 - DNA, 22 bp, Artificial Sequence
  chemically synthesized
ctcccagacacacagccaggaa

SEQ ID NO: 63150 - DNA, 22 bp, Artificial Sequence
  chemically synthesized
ccagacacacagccaggaaatt

SEQ ID NO: 63151 - DNA, 22 bp, Artificial Sequence
  chemically synthesized
gtggtagatgaaggatccagct

SEQ ID NO: 63152 - DNA, 22 bp, Artificial Sequence
  chemically synthesized
atctgtctaacttgggagcctg

SEQ ID NO: 63153 - DNA, 22 bp, Artificial Sequence
  chemically synthesized
tctaacttgggagcctgagtgt

SEQ ID NO: 63154 - DNA, 22 bp, Artificial Sequence
  chemically synthesized
acttgggagcctgagtgttcat

SEQ ID NO: 63155 - DNA, 22 bp, Artificial Sequence
  chemically synthesized
gggagcctgagtgttcatctta

SEQ ID NO: 63156 - DNA, 22 bp, Artificial Sequence
  chemically synthesized
ggagcctgagtgttcatcttac

SEQ ID NO: 63157 - DNA, 22 bp, Artificial Sequence
  chemically synthesized
agtgttcatcttacctatccac

SEQ ID NO: 63158 - DNA, 22 bp, Artificial Sequence
  chemically synthesized
atcttacctatccaccaaggct

SEQ ID NO: 63159 - DNA, 22 bp, Artificial Sequence
  chemically synthesized
acctatccaccaaggcttgaag

SEQ ID NO: 63160 - DNA, 22 bp, Artificial Sequence
  chemically synthesized
cctatccaccaaggcttgaagt

SEQ ID NO: 63161 - DNA, 22 bp, Artificial Sequence
  chemically synthesized
tccaccaaggcttgaagtgagg

SEQ ID NO: 63162 - DNA, 22 bp, Artificial Sequence
  chemically synthesized
gaagtgaggtgccccgactgtg

SEQ ID NO: 63163 - DNA, 22 bp, Artificial Sequence
  chemically synthesized
aagtgaggtgccccgactgtga

SEQ ID NO: 63164 - DNA, 22 bp, Artificial Sequence
  chemically synthesized
tgagttccaggtttgatgccta

SEQ ID NO: 63165 - DNA, 22 bp, Artificial Sequence
  chemically synthesized
caggtttgatgcctacagccca

SEQ ID NO: 63166 - DNA, 22 bp, Artificial Sequence
  chemically synthesized
gatgcctacagcccatcagcct

SEQ ID NO: 63167 - DNA, 22 bp, Artificial Sequence
  chemically synthesized
atgcctacagcccatcagcctt

SEQ ID NO: 63168 - DNA, 22 bp, Artificial Sequence
  chemically synthesized
cagcccatcagccttatacctt

SEQ ID NO: 63169 - DNA, 22 bp, Artificial Sequence
  chemically synthesized
ataccttgtcttataccttaac

SEQ ID NO: 63170 - DNA, 22 bp, Artificial Sequence
  chemically synthesized
taccttgtcttataccttaact

SEQ ID NO: 63171 - DNA, 22 bp, Artificial Sequence
  chemically synthesized
gtcttataccttaactggtgga

SEQ ID NO: 63172 - DNA, 22 bp, Artificial Sequence
  chemically synthesized
tcttataccttaactggtggag

SEQ ID NO: 63173 - DNA, 22 bp, Artificial Sequence
  chemically synthesized
ataccttaactggtggagggtg

SEQ ID NO: 63174 - DNA, 22 bp, Artificial Sequence
  chemically synthesized
taccttaactggtggagggtgc

SEQ ID NO: 63175 - DNA, 22 bp, Artificial Sequence
  chemically synthesized
aactggtggagggtgctgtctc

SEQ ID NO: 63176 - DNA, 22 bp, Artificial Sequence
  chemically synthesized
actggtggagggtgctgtctct

SEQ ID NO: 63177 - DNA, 22 bp, Artificial Sequence
  chemically synthesized
gtggagggtgctgtctctgtgt

SEQ ID NO: 63178 - DNA, 22 bp, Artificial Sequence
  chemically synthesized
tctctgtgtagcagccaccagc

SEQ ID NO: 63179 - DNA, 22 bp, Artificial Sequence
  chemically synthesized
tgtgtagcagccaccagcctag

SEQ ID NO: 63180 - DNA, 22 bp, Artificial Sequence
  chemically synthesized
tgtagcagccaccagcctagct

SEQ ID NO: 63181 - DNA, 22 bp, Artificial Sequence
  chemically synthesized
gctctgaaccctgtcctgagga

SEQ ID NO: 63182 - DNA, 22 bp, Artificial Sequence
  chemically synthesized
tgaaccctgtcctgaggagttg

SEQ ID NO: 63183 - DNA, 22 bp, Artificial Sequence
  chemically synthesized
aaccctgtcctgaggagttggg

SEQ ID NO: 63184 - DNA, 22 bp, Artificial Sequence
  chemically synthesized
tcctgaggagttgggaagtgtg

SEQ ID NO: 63185 - DNA, 22 bp, Artificial Sequence
  chemically synthesized
aggagttgggaagtgtggggtg

SEQ ID NO: 63186 - DNA, 22 bp, Artificial Sequence
  chemically synthesized
ggaagtgtggggtgtctggttt

SEQ ID NO: 63187 - DNA, 22 bp, Artificial Sequence
  chemically synthesized
gtttattccatcaatacacgta

SEQ ID NO: 63188 - DNA, 22 bp, Artificial Sequence
  chemically synthesized
attccatcaatacacgtagtcc

SEQ ID NO: 63189 - DNA, 22 bp, Artificial Sequence
  chemically synthesized
ttccatcaatacacgtagtccc

SEQ ID NO: 63190 - DNA, 22 bp, Artificial Sequence
  chemically synthesized
catcaatacacgtagtcccttc

SEQ ID NO: 63191 - DNA, 22 bp, Artificial Sequence
  chemically synthesized
ccattcttctgccattttttct

SEQ ID NO: 63192 - DNA, 22 bp, Artificial Sequence
  chemically synthesized
cattcttctgccattttttctc

SEQ ID NO: 63193 - DNA, 22 bp, Artificial Sequence
  chemically synthesized
ttctgccattttttctcagggg

SEQ ID NO: 63194 - DNA, 22 bp, Artificial Sequence
  chemically synthesized
ctgccattttttctcaggggct

SEQ ID NO: 63195 - DNA, 22 bp, Artificial Sequence
  chemically synthesized
tgccattttttctcaggggctc

SEQ ID NO: 63196 - DNA, 22 bp, Artificial Sequence
  chemically synthesized
ccattttttctcaggggctctc

SEQ ID NO: 63197 - DNA, 22 bp, Artificial Sequence
  chemically synthesized
tttctcaggggctctccttcct

SEQ ID NO: 63198 - DNA, 22 bp, Artificial Sequence
  chemically synthesized
ttctcaggggctctccttcctt

SEQ ID NO: 63199 - DNA, 22 bp, Artificial Sequence
  chemically synthesized
tctcaggggctctccttccttc

SEQ ID NO: 63200 - DNA, 22 bp, Artificial Sequence
  chemically synthesized
ctcaggggctctccttccttcc

SEQ ID NO: 63201 - DNA, 22 bp, Artificial Sequence
  chemically synthesized
tcaggggctctccttccttccc

SEQ ID NO: 63202 - DNA, 22 bp, Artificial Sequence
  chemically synthesized
aggggctctccttccttccctg

SEQ ID NO: 63203 - DNA, 22 bp, Artificial Sequence
  chemically synthesized
tccttccttccctggctcttgg

SEQ ID NO: 63204 - DNA, 22 bp, Artificial Sequence
  chemically synthesized
cttccttccctggctcttgggt

SEQ ID NO: 63205 - DNA, 22 bp, Artificial Sequence
  chemically synthesized
ccttccctggctcttgggtagg

SEQ ID NO: 63206 - DNA, 22 bp, Artificial Sequence
  chemically synthesized
cttccctggctcttgggtaggc

SEQ ID NO: 63207 - DNA, 22 bp, Artificial Sequence
  chemically synthesized
ccctggctcttgggtaggctgc

SEQ ID NO: 63208 - DNA, 22 bp, Artificial Sequence
  chemically synthesized
cctggctcttgggtaggctgcc

SEQ ID NO: 63209 - DNA, 22 bp, Artificial Sequence
  chemically synthesized
gctcttgggtaggctgcctgct

SEQ ID NO: 63210 - DNA, 22 bp, Artificial Sequence
  chemically synthesized
ttgggtaggctgcctgctctga

SEQ ID NO: 63211 - DNA, 22 bp, Artificial Sequence
  chemically synthesized
gggtaggctgcctgctctgatg

SEQ ID NO: 63212 - DNA, 22 bp, Artificial Sequence
  chemically synthesized
ggtaggctgcctgctctgatgt

SEQ ID NO: 63213 - DNA, 22 bp, Artificial Sequence
  chemically synthesized
cctgctctgatgtaagttcctg

SEQ ID NO: 63214 - DNA, 22 bp, Artificial Sequence
  chemically synthesized
ctctgatgtaagttcctgctgg

SEQ ID NO: 63215 - DNA, 22 bp, Artificial Sequence
  chemically synthesized
tgatgtaagttcctgctgggat

SEQ ID NO: 63216 - DNA, 22 bp, Artificial Sequence
  chemically synthesized
atgtaagttcctgctgggatga

SEQ ID NO: 63217 - DNA, 22 bp, Artificial Sequence
  chemically synthesized
ctgctgggatgattgctctggc

SEQ ID NO: 63218 - DNA, 22 bp, Artificial Sequence
  chemically synthesized
ctgggatgattgctctggccag

SEQ ID NO: 63219 - DNA, 22 bp, Artificial Sequence
  chemically synthesized
ggatgattgctctggccaggcc

SEQ ID NO: 63220 - DNA, 22 bp, Artificial Sequence
  chemically synthesized
ctctggccaggcccccagctgc

SEQ ID NO: 63221 - DNA, 22 bp, Artificial Sequence
  chemically synthesized
tggccaggcccccagctgctcc

SEQ ID NO: 63222 - DNA, 22 bp, Artificial Sequence
  chemically synthesized
gccaggcccccagctgctccct

SEQ ID NO: 63223 - DNA, 22 bp, Artificial Sequence
  chemically synthesized
ctccctgcccttctctgaaggc

SEQ ID NO: 63224 - DNA, 22 bp, Artificial Sequence
  chemically synthesized
cctgcccttctctgaaggcaca

SEQ ID NO: 63225 - DNA, 22 bp, Artificial Sequence
  chemically synthesized
cccttctctgaaggcacatctg

SEQ ID NO: 63226 - DNA, 22 bp, Artificial Sequence
  chemically synthesized
ctctgaaggcacatctgtcagc

SEQ ID NO: 63227 - DNA, 22 bp, Artificial Sequence
  chemically synthesized
tctgaaggcacatctgtcagcc

SEQ ID NO: 63228 - DNA, 22 bp, Artificial Sequence
  chemically synthesized
tgaaggcacatctgtcagccca

SEQ ID NO: 63229 - DNA, 22 bp, Artificial Sequence
  chemically synthesized
aaggcacatctgtcagcccaca

SEQ ID NO: 63230 - DNA, 22 bp, Artificial Sequence
  chemically synthesized
tcagcccacagaggcacggtta

SEQ ID NO: 63231 - DNA, 22 bp, Artificial Sequence
  chemically synthesized
atggtggcggggaagcagaggc

SEQ ID NO: 63232 - DNA, 22 bp, Artificial Sequence
  chemically synthesized
gccccgggaacctcacctgccc

SEQ ID NO: 63233 - DNA, 22 bp, Artificial Sequence
  chemically synthesized
acctgccctatccctacctgcc

SEQ ID NO: 63234 - DNA, 22 bp, Artificial Sequence
  chemically synthesized
ccctatccctacctgccccctg

SEQ ID NO: 63235 - DNA, 22 bp, Artificial Sequence
  chemically synthesized
tccctacctgccccctgtcccc

SEQ ID NO: 63236 - DNA, 22 bp, Artificial Sequence
  chemically synthesized
cctgccccctgtcccctccccg

SEQ ID NO: 63237 - DNA, 22 bp, Artificial Sequence
  chemically synthesized
ccccctgtcccctccccgcctg

SEQ ID NO: 63238 - DNA, 22 bp, Artificial Sequence
  chemically synthesized
tcccctccccgcctgggcttga

SEQ ID NO: 63239 - DNA, 22 bp, Artificial Sequence
  chemically synthesized
cccgcctgggcttgacttgtcc

SEQ ID NO: 63240 - DNA, 22 bp, Artificial Sequence
  chemically synthesized
ggcttgacttgtccactttcac

SEQ ID NO: 63241 - DNA, 22 bp, Artificial Sequence
  chemically synthesized
gacttgtccactttcactctca

SEQ ID NO: 63242 - DNA, 22 bp, Artificial Sequence
  chemically synthesized
acttgtccactttcactctcaa

SEQ ID NO: 63243 - DNA, 22 bp, Artificial Sequence
  chemically synthesized
gtccactttcactctcaagacc

SEQ ID NO: 63244 - DNA, 22 bp, Artificial Sequence
  chemically synthesized
tccactttcactctcaagacca

SEQ ID NO: 63245 - DNA, 22 bp, Artificial Sequence
  chemically synthesized
tcactctcaagaccaccgctct

SEQ ID NO: 63246 - DNA, 22 bp, Artificial Sequence
  chemically synthesized
cactctcaagaccaccgctctc

SEQ ID NO: 63247 - DNA, 22 bp, Artificial Sequence
  chemically synthesized
actctcaagaccaccgctctca

SEQ ID NO: 63248 - DNA, 22 bp, Artificial Sequence
  chemically synthesized
tcaagaccaccgctctcacaca

SEQ ID NO: 63249 - DNA, 22 bp, Artificial Sequence
  chemically synthesized
aagaccaccgctctcacacaca

SEQ ID NO: 63250 - DNA, 22 bp, Artificial Sequence
  chemically synthesized
tcacacacaggtcctgtgctgc

SEQ ID NO: 63251 - DNA, 22 bp, Artificial Sequence
  chemically synthesized
acacacaggtcctgtgctgccc

SEQ ID NO: 63252 - DNA, 22 bp, Artificial Sequence
  chemically synthesized
tgctgcccccacagctttgcag

SEQ ID NO: 63253 - DNA, 22 bp, Artificial Sequence
  chemically synthesized
cccccacagctttgcaggctgc

SEQ ID NO: 63254 - DNA, 22 bp, Artificial Sequence
  chemically synthesized
tgcaggctgctggttttccatc

SEQ ID NO: 63255 - DNA, 22 bp, Artificial Sequence
  chemically synthesized
gcaggctgctggttttccatcc

SEQ ID NO: 63256 - DNA, 22 bp, Artificial Sequence
  chemically synthesized
caggctgctggttttccatcca

SEQ ID NO: 63257 - DNA, 22 bp, Artificial Sequence
  chemically synthesized
ctggttttccatccagggcaca

SEQ ID NO: 63258 - DNA, 22 bp, Artificial Sequence
  chemically synthesized
gttttccatccagggcacagcc

SEQ ID NO: 63259 - DNA, 22 bp, Artificial Sequence
  chemically synthesized
tccatccagggcacagccgcag

SEQ ID NO: 63260 - DNA, 22 bp, Artificial Sequence
  chemically synthesized
ccatccagggcacagccgcagg

SEQ ID NO: 63261 - DNA, 22 bp, Artificial Sequence
  chemically synthesized
catccagggcacagccgcaggc

SEQ ID NO: 63262 - DNA, 22 bp, Artificial Sequence
  chemically synthesized
tgggcaccctagccctcagtgc

SEQ ID NO: 63263 - DNA, 22 bp, Artificial Sequence
  chemically synthesized
ggcaccctagccctcagtgccc

SEQ ID NO: 63264 - DNA, 22 bp, Artificial Sequence
  chemically synthesized
gccctcagtgcccagggcaaag

SEQ ID NO: 63265 - DNA, 22 bp, Artificial Sequence
  chemically synthesized
agtgcccagggcaaagccctga

SEQ ID NO: 63266 - DNA, 22 bp, Artificial Sequence
  chemically synthesized
acatgcaatctcactggcaggc

SEQ ID NO: 63267 - DNA, 22 bp, Artificial Sequence
  chemically synthesized
actggcaggcagcctcaggcag

SEQ ID NO: 63268 - DNA, 22 bp, Artificial Sequence
  chemically synthesized
gcaggcagcctcaggcaggcct

SEQ ID NO: 63269 - DNA, 22 bp, Artificial Sequence
  chemically synthesized
aggcaggcctgggcagaggacc

SEQ ID NO: 63270 - DNA, 22 bp, Artificial Sequence
  chemically synthesized
ggcagaggaccgaaaggaggag

SEQ ID NO: 63271 - DNA, 22 bp, Artificial Sequence
  chemically synthesized
cagtagagcagacaggagacaa

SEQ ID NO: 63272 - DNA, 22 bp, Artificial Sequence
  chemically synthesized
agagtaaacagcctggcagtgg

SEQ ID NO: 63273 - DNA, 22 bp, Artificial Sequence
  chemically synthesized
gcagtggggtgagtgcctggct

SEQ ID NO: 63274 - DNA, 22 bp, Artificial Sequence
  chemically synthesized
gctggaggggctcacctgggct

SEQ ID NO: 63275 - DNA, 22 bp, Artificial Sequence
  chemically synthesized
gaggggctcacctgggctggcc

SEQ ID NO: 63276 - DNA, 22 bp, Artificial Sequence
  chemically synthesized
acctgggctggcctgcctggga

SEQ ID NO: 63277 - DNA, 22 bp, Artificial Sequence
  chemically synthesized
ggctggcctgcctgggaggagc

SEQ ID NO: 63278 - DNA, 22 bp, Artificial Sequence
  chemically synthesized
gcctgcctgggaggagccaggt

SEQ ID NO: 63279 - DNA, 22 bp, Artificial Sequence
  chemically synthesized
cctgggaggagccaggtcggtg

SEQ ID NO: 63280 - DNA, 22 bp, Artificial Sequence
  chemically synthesized
ggaggagccaggtcggtggctg

SEQ ID NO: 63281 - DNA, 22 bp, Artificial Sequence
  chemically synthesized
ctctctccgaatcttagtcctg

SEQ ID NO: 63282 - DNA, 22 bp, Artificial Sequence
  chemically synthesized
tctccgaatcttagtcctgctt

SEQ ID NO: 63283 - DNA, 22 bp, Artificial Sequence
  chemically synthesized
tccgaatcttagtcctgcttga

SEQ ID NO: 63284 - DNA, 22 bp, Artificial Sequence
  chemically synthesized
cgaatcttagtcctgcttgagg

SEQ ID NO: 63285 - DNA, 22 bp, Artificial Sequence
  chemically synthesized
agtcctgcttgaggtctagcag

SEQ ID NO: 63286 - DNA, 22 bp, Artificial Sequence
  chemically synthesized
gtcctgcttgaggtctagcagc

SEQ ID NO: 63287 - DNA, 22 bp, Artificial Sequence
  chemically synthesized
cttgaggtctagcagcttccgg

SEQ ID NO: 63288 - DNA, 22 bp, Artificial Sequence
  chemically synthesized
gaggtctagcagcttccggagc

SEQ ID NO: 63289 - DNA, 22 bp, Artificial Sequence
  chemically synthesized
aggtctagcagcttccggagct

SEQ ID NO: 63290 - DNA, 22 bp, Artificial Sequence
  chemically synthesized
gcagcttccggagctgcacatg

SEQ ID NO: 63291 - DNA, 22 bp, Artificial Sequence
  chemically synthesized
ccggagctgcacatggggcttg

SEQ ID NO: 63292 - DNA, 22 bp, Artificial Sequence
  chemically synthesized
cggagctgcacatggggcttga

SEQ ID NO: 63293 - DNA, 22 bp, Artificial Sequence
  chemically synthesized
cacatggggcttgaggtctggt

SEQ ID NO: 63294 - DNA, 22 bp, Artificial Sequence
  chemically synthesized
gaggtctggtgcttatggatta

SEQ ID NO: 63295 - DNA, 22 bp, Artificial Sequence
  chemically synthesized
aggtctggtgcttatggattag

SEQ ID NO: 63296 - DNA, 22 bp, Artificial Sequence
  chemically synthesized
gtgcttatggattaggaggaag

SEQ ID NO: 63297 - DNA, 22 bp, Artificial Sequence
  chemically synthesized
atggattaggaggaagagaaga

SEQ ID NO: 63298 - DNA, 22 bp, Artificial Sequence
  chemically synthesized
tggattaggaggaagagaagac

SEQ ID NO: 63299 - DNA, 22 bp, Artificial Sequence
  chemically synthesized
ggaggaagagaagacagatggc

SEQ ID NO: 63300 - DNA, 22 bp, Artificial Sequence
  chemically synthesized
aggaacatgtctccttccacat

SEQ ID NO: 63301 - DNA, 22 bp, Artificial Sequence
  chemically synthesized
ggaacatgtctccttccacatg

SEQ ID NO: 63302 - DNA, 22 bp, Artificial Sequence
  chemically synthesized
cttccacatgctgtggcccagg

SEQ ID NO: 63303 - DNA, 22 bp, Artificial Sequence
  chemically synthesized
ccacatgctgtggcccaggtgc

SEQ ID NO: 63304 - DNA, 22 bp, Artificial Sequence
  chemically synthesized
cacatgctgtggcccaggtgct

SEQ ID NO: 63305 - DNA, 22 bp, Artificial Sequence
  chemically synthesized
tggcccaggtgctgcccagagc

SEQ ID NO: 63306 - DNA, 22 bp, Artificial Sequence
  chemically synthesized
cccagagctgtttcacagcagc

SEQ ID NO: 63307 - DNA, 22 bp, Artificial Sequence
  chemically synthesized
tttcacagcagcctctccactc

SEQ ID NO: 63308 - DNA, 22 bp, Artificial Sequence
  chemically synthesized
cacagcagcctctccactcaag

SEQ ID NO: 63309 - DNA, 22 bp, Artificial Sequence
  chemically synthesized
acagcagcctctccactcaagg

SEQ ID NO: 63310 - DNA, 22 bp, Artificial Sequence
  chemically synthesized
tccactcaaggttgagcggttt

SEQ ID NO: 63311 - DNA, 22 bp, Artificial Sequence
  chemically synthesized
cactcaaggttgagcggtttcc

SEQ ID NO: 63312 - DNA, 22 bp, Artificial Sequence
  chemically synthesized
aaggttgagcggtttccttcag

SEQ ID NO: 63313 - DNA, 22 bp, Artificial Sequence
  chemically synthesized
agcggtttccttcagtgctgtc

SEQ ID NO: 63314 - DNA, 22 bp, Artificial Sequence
  chemically synthesized
ccttcagtgctgtccacccctt

SEQ ID NO: 63315 - DNA, 22 bp, Artificial Sequence
  chemically synthesized
cttcagtgctgtccaccccttt

SEQ ID NO: 63316 - DNA, 22 bp, Artificial Sequence
  chemically synthesized
cagtgctgtccacccctttggt

SEQ ID NO: 63317 - DNA, 22 bp, Artificial Sequence
  chemically synthesized
agtgctgtccacccctttggtc

SEQ ID NO: 63318 - DNA, 22 bp, Artificial Sequence
  chemically synthesized
tccacccctttggtccggggag

SEQ ID NO: 63319 - DNA, 22 bp, Artificial Sequence
  chemically synthesized
tggtccggggagcttcatgttc

SEQ ID NO: 63320 - DNA, 22 bp, Artificial Sequence
  chemically synthesized
ggtccggggagcttcatgttcc

SEQ ID NO: 63321 - DNA, 22 bp, Artificial Sequence
  chemically synthesized
gtccggggagcttcatgttcct

SEQ ID NO: 63322 - DNA, 22 bp, Artificial Sequence
  chemically synthesized
catgttcctgggcctcactgac

SEQ ID NO: 63323 - DNA, 22 bp, Artificial Sequence
  chemically synthesized
atgttcctgggcctcactgaca

SEQ ID NO: 63324 - DNA, 22 bp, Artificial Sequence
  chemically synthesized
ctgggcctcactgacacctgca

SEQ ID NO: 63325 - DNA, 22 bp, Artificial Sequence
  chemically synthesized
ggcctcactgacacctgcatgg

SEQ ID NO: 63326 - DNA, 22 bp, Artificial Sequence
  chemically synthesized
actgacacctgcatggggttgg

SEQ ID NO: 63327 - DNA, 22 bp, Artificial Sequence
  chemically synthesized
acacctgcatggggttggtggg

SEQ ID NO: 63328 - DNA, 22 bp, Artificial Sequence
  chemically synthesized
catggggttggtggggaggtat

SEQ ID NO: 63329 - DNA, 22 bp, Artificial Sequence
  chemically synthesized
gtggggaggtatgaggggttgg

SEQ ID NO: 63330 - DNA, 22 bp, Artificial Sequence
  chemically synthesized
gaggggtctttttgctagccct

SEQ ID NO: 63331 - DNA, 22 bp, Artificial Sequence
  chemically synthesized
tttgctagccctggcccgtggc

SEQ ID NO: 63332 - DNA, 22 bp, Artificial Sequence
  chemically synthesized
ttgctagccctggcccgtggca

SEQ ID NO: 63333 - DNA, 22 bp, Artificial Sequence
  chemically synthesized
tgctagccctggcccgtggcaa

SEQ ID NO: 63334 - DNA, 22 bp, Artificial Sequence
  chemically synthesized
gctagccctggcccgtggcaaa

SEQ ID NO: 63335 - DNA, 22 bp, Artificial Sequence
  chemically synthesized
ctagccctggcccgtggcaaac

SEQ ID NO: 63336 - DNA, 22 bp, Artificial Sequence
  chemically synthesized
gccctggcccgtggcaaacact

SEQ ID NO: 63337 - DNA, 22 bp, Artificial Sequence
  chemically synthesized
gcccgtggcaaacactgtcttg

SEQ ID NO: 63338 - DNA, 22 bp, Artificial Sequence
  chemically synthesized
tcttgagaaagtgggacgttga

SEQ ID NO: 63339 - DNA, 22 bp, Artificial Sequence
  chemically synthesized
gagaaagtgggacgttgaagga

SEQ ID NO: 63340 - DNA, 22 bp, Artificial Sequence
  chemically synthesized
agaaagtgggacgttgaaggag

SEQ ID NO: 63341 - DNA, 22 bp, Artificial Sequence
  chemically synthesized
aaggagcttggactctaaagtc

SEQ ID NO: 63342 - DNA, 22 bp, Artificial Sequence
  chemically synthesized
ggactctaaagtcagctacaca

SEQ ID NO: 63343 - DNA, 22 bp, Artificial Sequence
  chemically synthesized
gactctaaagtcagctacacat

SEQ ID NO: 63344 - DNA, 22 bp, Artificial Sequence
  chemically synthesized
taaagtcagctacacatgagtc

SEQ ID NO: 63345 - DNA, 22 bp, Artificial Sequence
  chemically synthesized
aagtcagctacacatgagtctt

SEQ ID NO: 63346 - DNA, 22 bp, Artificial Sequence
  chemically synthesized
cacatgagtcttttcacctgct

SEQ ID NO: 63347 - DNA, 22 bp, Artificial Sequence
  chemically synthesized
ttcacctgctggctaggtggcc

SEQ ID NO: 63348 - DNA, 22 bp, Artificial Sequence
  chemically synthesized
tcacctgctggctaggtggccc

SEQ ID NO: 63349 - DNA, 22 bp, Artificial Sequence
  chemically synthesized
cacctgctggctaggtggcccc

SEQ ID NO: 63350 - DNA, 22 bp, Artificial Sequence
  chemically synthesized
acctgctggctaggtggccccg

SEQ ID NO: 63351 - DNA, 22 bp, Artificial Sequence
  chemically synthesized
ctggctaggtggccccggacaa

SEQ ID NO: 63352 - DNA, 22 bp, Artificial Sequence
  chemically synthesized
gctaggtggccccggacaagtc

SEQ ID NO: 63353 - DNA, 22 bp, Artificial Sequence
  chemically synthesized
ggtggccccggacaagtcaatc

SEQ ID NO: 63354 - DNA, 22 bp, Artificial Sequence
  chemically synthesized
ttgggcctcaggctctttatct

SEQ ID NO: 63355 - DNA, 22 bp, Artificial Sequence
  chemically synthesized
ggcctcaggctctttatctata

SEQ ID NO: 63356 - DNA, 22 bp, Artificial Sequence
  chemically synthesized
aggctctttatctataaaatgg

SEQ ID NO: 63357 - DNA, 22 bp, Artificial Sequence
  chemically synthesized
tttatctataaaatggggctaa

SEQ ID NO: 63358 - DNA, 22 bp, Artificial Sequence
  chemically synthesized
tatctataaaatggggctaatt

SEQ ID NO: 63359 - DNA, 22 bp, Artificial Sequence
  chemically synthesized
atctataaaatggggctaattt

SEQ ID NO: 63360 - DNA, 22 bp, Artificial Sequence
  chemically synthesized
tctataaaatggggctaatttc

SEQ ID NO: 63361 - DNA, 22 bp, Artificial Sequence
  chemically synthesized
taaaatggggctaatttccttt

SEQ ID NO: 63362 - DNA, 22 bp, Artificial Sequence
  chemically synthesized
atttccttttttgcccctggga

SEQ ID NO: 63363 - DNA, 22 bp, Artificial Sequence
  chemically synthesized
ccttttttgcccctgggaagaa

SEQ ID NO: 63364 - DNA, 22 bp, Artificial Sequence
  chemically synthesized
cttttttgcccctgggaagaaa

SEQ ID NO: 63365 - DNA, 22 bp, Artificial Sequence
  chemically synthesized
ttttgcccctgggaagaaatat

SEQ ID NO: 63366 - DNA, 22 bp, Artificial Sequence
  chemically synthesized
tttgcccctgggaagaaatatc

SEQ ID NO: 63367 - DNA, 22 bp, Artificial Sequence
  chemically synthesized
ttgcccctgggaagaaatatca

SEQ ID NO: 63368 - DNA, 22 bp, Artificial Sequence
  chemically synthesized
tgcccctgggaagaaatatcac

SEQ ID NO: 63369 - DNA, 22 bp, Artificial Sequence
  chemically synthesized
gcccctgggaagaaatatcact

SEQ ID NO: 63370 - DNA, 22 bp, Artificial Sequence
  chemically synthesized
cccctgggaagaaatatcactt

SEQ ID NO: 63371 - DNA, 22 bp, Artificial Sequence
  chemically synthesized
ggaagaaatatcacttagagga

SEQ ID NO: 63372 - DNA, 22 bp, Artificial Sequence
  chemically synthesized
agaggagttacagaatgtgcaa

SEQ ID NO: 63373 - DNA, 22 bp, Artificial Sequence
  chemically synthesized
gaggagttacagaatgtgcaac

SEQ ID NO: 63374 - DNA, 22 bp, Artificial Sequence
  chemically synthesized
cagaatgtgcaacctttcccag

SEQ ID NO: 63375 - DNA, 22 bp, Artificial Sequence
  chemically synthesized
tcccaggagtattgctcctgaa

SEQ ID NO: 63376 - DNA, 22 bp, Artificial Sequence
  chemically synthesized
cccaggagtattgctcctgaag

SEQ ID NO: 63377 - DNA, 22 bp, Artificial Sequence
  chemically synthesized
ccaggagtattgctcctgaagg

SEQ ID NO: 63378 - DNA, 22 bp, Artificial Sequence
  chemically synthesized
ctcctgaaggaataaggcacga

SEQ ID NO: 63379 - DNA, 22 bp, Artificial Sequence
  chemically synthesized
ctgaaggaataaggcacgatgg

SEQ ID NO: 63380 - DNA, 22 bp, Artificial Sequence
  chemically synthesized
aaggaataaggcacgatgggct

SEQ ID NO: 63381 - DNA, 22 bp, Artificial Sequence
  chemically synthesized
tgacttcagcctccagcactgt

SEQ ID NO: 63382 - DNA, 22 bp, Artificial Sequence
  chemically synthesized
gacttcagcctccagcactgtg

SEQ ID NO: 63383 - DNA, 22 bp, Artificial Sequence
  chemically synthesized
acttcagcctccagcactgtgg

SEQ ID NO: 63384 - DNA, 22 bp, Artificial Sequence
  chemically synthesized
cagcctccagcactgtggccca

SEQ ID NO: 63385 - DNA, 22 bp, Artificial Sequence
  chemically synthesized
agcctccagcactgtggcccag

SEQ ID NO: 63386 - DNA, 22 bp, Artificial Sequence
  chemically synthesized
cagcactgtggcccagaagggt

SEQ ID NO: 63387 - DNA, 22 bp, Artificial Sequence
  chemically synthesized
tggcccagaagggtatggctgg

SEQ ID NO: 63388 - DNA, 22 bp, Artificial Sequence
  chemically synthesized
ggcaggggcgtcacacccctgc

SEQ ID NO: 63389 - DNA, 22 bp, Artificial Sequence
  chemically synthesized
cagctctgtgggagtgacggaa

SEQ ID NO: 63390 - DNA, 22 bp, Artificial Sequence
  chemically synthesized
tgtgggagtgacggaagggcgc

SEQ ID NO: 63391 - DNA, 22 bp, Artificial Sequence
  chemically synthesized
tgggagtgacggaagggcgcta

SEQ ID NO: 63392 - DNA, 22 bp, Artificial Sequence
  chemically synthesized
tccactcgccttgcacatggct

SEQ ID NO: 63393 - DNA, 22 bp, Artificial Sequence
  chemically synthesized
gccttgcacatggctgtcttgc

SEQ ID NO: 63394 - DNA, 22 bp, Artificial Sequence
  chemically synthesized
gcacatggctgtcttgctctac

SEQ ID NO: 63395 - DNA, 22 bp, Artificial Sequence
  chemically synthesized
cacatggctgtcttgctctacc

SEQ ID NO: 63396 - DNA, 22 bp, Artificial Sequence
  chemically synthesized
tcttgctctaccaggccttagg

SEQ ID NO: 63397 - DNA, 22 bp, Artificial Sequence
  chemically synthesized
gctctaccaggccttaggttct

SEQ ID NO: 63398 - DNA, 22 bp, Artificial Sequence
  chemically synthesized
ctctaccaggccttaggttctg

SEQ ID NO: 63399 - DNA, 22 bp, Artificial Sequence
  chemically synthesized
taccaggccttaggttctgtgg

SEQ ID NO: 63400 - DNA, 22 bp, Artificial Sequence
  chemically synthesized
ccaggccttaggttctgtggcc

SEQ ID NO: 63401 - DNA, 22 bp, Artificial Sequence
  chemically synthesized
aggttctgtggccagatactgt

SEQ ID NO: 63402 - DNA, 22 bp, Artificial Sequence
  chemically synthesized
ggttctgtggccagatactgtt

SEQ ID NO: 63403 - DNA, 22 bp, Artificial Sequence
  chemically synthesized
tgtggccagatactgttctcca

SEQ ID NO: 63404 - DNA, 22 bp, Artificial Sequence
  chemically synthesized
tggccagatactgttctccagc

SEQ ID NO: 63405 - DNA, 22 bp, Artificial Sequence
  chemically synthesized
ttctccagctctttggcttggg

SEQ ID NO: 63406 - DNA, 22 bp, Artificial Sequence
  chemically synthesized
tccagctctttggcttgggccc

SEQ ID NO: 63407 - DNA, 22 bp, Artificial Sequence
  chemically synthesized
cagctctttggcttgggccccg

SEQ ID NO: 63408 - DNA, 22 bp, Artificial Sequence
  chemically synthesized
tttggcttgggccccgagacca

SEQ ID NO: 63409 - DNA, 22 bp, Artificial Sequence
  chemically synthesized
tggcttgggccccgagaccaga

SEQ ID NO: 63410 - DNA, 22 bp, Artificial Sequence
  chemically synthesized
ggcttgggccccgagaccagag

SEQ ID NO: 63411 - DNA, 22 bp, Artificial Sequence
  chemically synthesized
gcttgggccccgagaccagaga

SEQ ID NO: 63412 - DNA, 22 bp, Artificial Sequence
  chemically synthesized
gggccccgagaccagagaagat

SEQ ID NO: 63413 - DNA, 22 bp, Artificial Sequence
  chemically synthesized
ggccccgagaccagagaagata

SEQ ID NO: 63414 - DNA, 22 bp, Artificial Sequence
  chemically synthesized
aatactggggaacacattgtag

SEQ ID NO: 63415 - DNA, 22 bp, Artificial Sequence
  chemically synthesized
gggaacacattgtagggtgatc

SEQ ID NO: 63416 - DNA, 22 bp, Artificial Sequence
  chemically synthesized
tagggtgatctcccagaaaagc

SEQ ID NO: 63417 - DNA, 22 bp, Artificial Sequence
  chemically synthesized
ccagaaaagccagcgagaaatg

SEQ ID NO: 63418 - DNA, 22 bp, Artificial Sequence
  chemically synthesized
tagctgtagcattcttcccttt

SEQ ID NO: 63419 - DNA, 22 bp, Artificial Sequence
  chemically synthesized
tagcattcttccctttggatgc

SEQ ID NO: 63420 - DNA, 22 bp, Artificial Sequence
  chemically synthesized
ttccctttggatgcctgtgtgg

SEQ ID NO: 63421 - DNA, 22 bp, Artificial Sequence
  chemically synthesized
ccctttggatgcctgtgtgggg

SEQ ID NO: 63422 - DNA, 22 bp, Artificial Sequence
  chemically synthesized
cctttggatgcctgtgtgggga

SEQ ID NO: 63423 - DNA, 22 bp, Artificial Sequence
  chemically synthesized
tggatgcctgtgtggggacaga

SEQ ID NO: 63424 - DNA, 22 bp, Artificial Sequence
  chemically synthesized
ggatgcctgtgtggggacagaa

SEQ ID NO: 63425 - DNA, 22 bp, Artificial Sequence
  chemically synthesized
gatgcctgtgtggggacagaat

SEQ ID NO: 63426 - DNA, 22 bp, Artificial Sequence
  chemically synthesized
tgtggggacagaatcagtggaa

SEQ ID NO: 63427 - DNA, 22 bp, Artificial Sequence
  chemically synthesized
gccctgcctctcatcaatgccc

SEQ ID NO: 63428 - DNA, 22 bp, Artificial Sequence
  chemically synthesized
cctctcatcaatgcccccccac

SEQ ID NO: 63429 - DNA, 22 bp, Artificial Sequence
  chemically synthesized
tcatcaatgcccccccaccacc

SEQ ID NO: 63430 - DNA, 22 bp, Artificial Sequence
  chemically synthesized
atcaatgcccccccaccaccca

SEQ ID NO: 63431 - DNA, 22 bp, Artificial Sequence
  chemically synthesized
cttcctgttctattagacaaac

SEQ ID NO: 63432 - DNA, 22 bp, Artificial Sequence
  chemically synthesized
cctgttctattagacaaacgta

SEQ ID NO: 63433 - DNA, 22 bp, Artificial Sequence
  chemically synthesized
ctgttctattagacaaacgtag

SEQ ID NO: 63434 - DNA, 22 bp, Artificial Sequence
  chemically synthesized
ttctattagacaaacgtagttt

SEQ ID NO: 63435 - DNA, 22 bp, Artificial Sequence
  chemically synthesized
tattagacaaacgtagtttctg

SEQ ID NO: 63436 - DNA, 22 bp, Artificial Sequence
  chemically synthesized
ttagacaaacgtagtttctgga

SEQ ID NO: 63437 - DNA, 22 bp, Artificial Sequence
  chemically synthesized
gacaaacgtagtttctggatga

SEQ ID NO: 63438 - DNA, 22 bp, Artificial Sequence
  chemically synthesized
ctggatgagttggacagtcatc

SEQ ID NO: 63439 - DNA, 22 bp, Artificial Sequence
  chemically synthesized
tggatgagttggacagtcatct

SEQ ID NO: 63440 - DNA, 22 bp, Artificial Sequence
  chemically synthesized
gatgagttggacagtcatctga

SEQ ID NO: 63441 - DNA, 22 bp, Artificial Sequence
  chemically synthesized
gacagtcatctgagtttgatca

SEQ ID NO: 63442 - DNA, 22 bp, Artificial Sequence
  chemically synthesized
agtttgatcaagatttacaggt

SEQ ID NO: 63443 - DNA, 22 bp, Artificial Sequence
  chemically synthesized
gatcaagatttacaggtaattc

SEQ ID NO: 63444 - DNA, 22 bp, Artificial Sequence
  chemically synthesized
atcaagatttacaggtaattca

SEQ ID NO: 63445 - DNA, 22 bp, Artificial Sequence
  chemically synthesized
acaggtaattcaaatgtatgta

SEQ ID NO: 63446 - DNA, 22 bp, Artificial Sequence
  chemically synthesized
caggtaattcaaatgtatgtat

SEQ ID NO: 63447 - DNA, 22 bp, Artificial Sequence
  chemically synthesized
aaatgtatgtataaggtacata

SEQ ID NO: 63448 - DNA, 22 bp, Artificial Sequence
  chemically synthesized
gtacatccatcagagaggcttc

SEQ ID NO: 63449 - DNA, 22 bp, Artificial Sequence
  chemically synthesized
ccttaagccacaagtctctagc

SEQ ID NO: 63450 - DNA, 22 bp, Artificial Sequence
  chemically synthesized
cttaagccacaagtctctagct

SEQ ID NO: 63451 - DNA, 22 bp, Artificial Sequence
  chemically synthesized
aagccacaagtctctagctcct

SEQ ID NO: 63452 - DNA, 22 bp, Artificial Sequence
  chemically synthesized
agccacaagtctctagctcctc

SEQ ID NO: 63453 - DNA, 22 bp, Artificial Sequence
  chemically synthesized
tagctcctcagagaactggcag

SEQ ID NO: 63454 - DNA, 22 bp, Artificial Sequence
  chemically synthesized
gctcctcagagaactggcagtc

SEQ ID NO: 63455 - DNA, 22 bp, Artificial Sequence
  chemically synthesized
ctcagagaactggcagtctggc

SEQ ID NO: 63456 - DNA, 22 bp, Artificial Sequence
  chemically synthesized
agagaactggcagtctggctgg

SEQ ID NO: 63457 - DNA, 22 bp, Artificial Sequence
  chemically synthesized
gcagtctggctgggtctgtacg

SEQ ID NO: 63458 - DNA, 22 bp, Artificial Sequence
  chemically synthesized
gctgggtctgtacgaacttgga

SEQ ID NO: 63459 - DNA, 22 bp, Artificial Sequence
  chemically synthesized
ggtctgtacgaacttggaccta

SEQ ID NO: 63460 - DNA, 22 bp, Artificial Sequence
  chemically synthesized
tacgaacttggacctatagatg

SEQ ID NO: 63461 - DNA, 22 bp, Artificial Sequence
  chemically synthesized
ggacctatagatgacctcactg

SEQ ID NO: 63462 - DNA, 22 bp, Artificial Sequence
  chemically synthesized
gacctatagatgacctcactgg

SEQ ID NO: 63463 - DNA, 22 bp, Artificial Sequence
  chemically synthesized
tagatgacctcactggtttctc

SEQ ID NO: 63464 - DNA, 22 bp, Artificial Sequence
  chemically synthesized
actggtttctccccttgtcacc

SEQ ID NO: 63465 - DNA, 22 bp, Artificial Sequence
  chemically synthesized
gtttctccccttgtcacctcat

SEQ ID NO: 63466 - DNA, 22 bp, Artificial Sequence
  chemically synthesized
ctccccttgtcacctcatctgc

SEQ ID NO: 63467 - DNA, 22 bp, Artificial Sequence
  chemically synthesized
tccccttgtcacctcatctgcc

SEQ ID NO: 63468 - DNA, 22 bp, Artificial Sequence
  chemically synthesized
cccttgtcacctcatctgcctg

SEQ ID NO: 63469 - DNA, 22 bp, Artificial Sequence
  chemically synthesized
gtcacctcatctgcctgcttcc

SEQ ID NO: 63470 - DNA, 22 bp, Artificial Sequence
  chemically synthesized
tcacctcatctgcctgcttcct

SEQ ID NO: 63471 - DNA, 22 bp, Artificial Sequence
  chemically synthesized
atctgcctgcttccttctcttt

SEQ ID NO: 63472 - DNA, 22 bp, Artificial Sequence
  chemically synthesized
cctgcttccttctctttactga

SEQ ID NO: 63473 - DNA, 22 bp, Artificial Sequence
  chemically synthesized
cttccttctctttactgatctt

SEQ ID NO: 63474 - DNA, 22 bp, Artificial Sequence
  chemically synthesized
ccttctctttactgatcttatg

SEQ ID NO: 63475 - DNA, 22 bp, Artificial Sequence
  chemically synthesized
cttctctttactgatcttatgt

SEQ ID NO: 63476 - DNA, 22 bp, Artificial Sequence
  chemically synthesized
ctctttactgatcttatgtgag

SEQ ID NO: 63477 - DNA, 22 bp, Artificial Sequence
  chemically synthesized
tctttactgatcttatgtgagt

SEQ ID NO: 63478 - DNA, 22 bp, Artificial Sequence
  chemically synthesized
tttactgatcttatgtgagtag

SEQ ID NO: 63479 - DNA, 22 bp, Artificial Sequence
  chemically synthesized
tactgatcttatgtgagtaggt

SEQ ID NO: 63480 - DNA, 22 bp, Artificial Sequence
  chemically synthesized
actgatcttatgtgagtaggta

SEQ ID NO: 63481 - DNA, 22 bp, Artificial Sequence
  chemically synthesized
ctgatcttatgtgagtaggtag

SEQ ID NO: 63482 - DNA, 22 bp, Artificial Sequence
  chemically synthesized
atcttatgtgagtaggtagagg

SEQ ID NO: 63483 - DNA, 22 bp, Artificial Sequence
  chemically synthesized
atgtgagtaggtagaggggtca

SEQ ID NO: 63484 - DNA, 22 bp, Artificial Sequence
  chemically synthesized
tgtgagtaggtagaggggtcag

SEQ ID NO: 63485 - DNA, 22 bp, Artificial Sequence
  chemically synthesized
tgctcagctctgcccagcacac

SEQ ID NO: 63486 - DNA, 22 bp, Artificial Sequence
  chemically synthesized
ctcagctctgcccagcacacta

SEQ ID NO: 63487 - DNA, 22 bp, Artificial Sequence
  chemically synthesized
agctctgcccagcacactaagc

SEQ ID NO: 63488 - DNA, 22 bp, Artificial Sequence
  chemically synthesized
tgcccagcacactaagcctatt

SEQ ID NO: 63489 - DNA, 22 bp, Artificial Sequence
  chemically synthesized
cccagcacactaagcctatttg

SEQ ID NO: 63490 - DNA, 22 bp, Artificial Sequence
  chemically synthesized
agcctatttgctattaaaattt

SEQ ID NO: 63491 - DNA, 22 bp, Artificial Sequence
  chemically synthesized
tttgctattaaaatttgaaaaa

SEQ ID NO: 63492 - DNA, 22 bp, Artificial Sequence
  chemically synthesized
gctattaaaatttgaaaaacaa

SEQ ID NO: 63493 - DNA, 22 bp, Artificial Sequence
  chemically synthesized
ctattaaaatttgaaaaacaaa

SEQ ID NO: 63494 - DNA, 22 bp, Artificial Sequence
  chemically synthesized
ttaaaatttgaaaaacaaatgc

SEQ ID NO: 63495 - DNA, 22 bp, Artificial Sequence
  chemically synthesized
aaatttgaaaaacaaatgcagg

SEQ ID NO: 63496 - DNA, 22 bp, Artificial Sequence
  chemically synthesized
gaaaaacaaatgcaggtgccag

SEQ ID NO: 63497 - DNA, 22 bp, Artificial Sequence
  chemically synthesized
aaaaacaaatgcaggtgccaga

SEQ ID NO: 63498 - DNA, 22 bp, Artificial Sequence
  chemically synthesized
aataatgaatgtcccaggccaa

SEQ ID NO: 63499 - DNA, 22 bp, Artificial Sequence
  chemically synthesized
taggaagggaagtgggtatggg

SEQ ID NO: 63500 - DNA, 22 bp, Artificial Sequence
  chemically synthesized
ggaagggaagtgggtatggggc

SEQ ID NO: 63501 - DNA, 22 bp, Artificial Sequence
  chemically synthesized
ccttcctggtaccaggatgatg

SEQ ID NO: 63502 - DNA, 22 bp, Artificial Sequence
  chemically synthesized
cctggtaccaggatgatgcaat

SEQ ID NO: 63503 - DNA, 22 bp, Artificial Sequence
  chemically synthesized
ctggtaccaggatgatgcaatg

SEQ ID NO: 63504 - DNA, 22 bp, Artificial Sequence
  chemically synthesized
gtaccaggatgatgcaatgctt

SEQ ID NO: 63505 - DNA, 22 bp, Artificial Sequence
  chemically synthesized
ggaggctgtgagctccccacct

SEQ ID NO: 63506 - DNA, 22 bp, Artificial Sequence
  chemically synthesized
gaggctgtgagctccccacctt

SEQ ID NO: 63507 - DNA, 22 bp, Artificial Sequence
  chemically synthesized
tgagctccccaccttctcaggg

SEQ ID NO: 63508 - DNA, 22 bp, Artificial Sequence
  chemically synthesized
cccaccttctcagggcacaccc

SEQ ID NO: 63509 - DNA, 22 bp, Artificial Sequence
  chemically synthesized
ctcagggcacaccctgtgatct

SEQ ID NO: 63510 - DNA, 22 bp, Artificial Sequence
  chemically synthesized
tcagggcacaccctgtgatctt

SEQ ID NO: 63511 - DNA, 22 bp, Artificial Sequence
  chemically synthesized
agggcacaccctgtgatcttgt

SEQ ID NO: 63512 - DNA, 22 bp, Artificial Sequence
  chemically synthesized
tgatcttgtgggacccctctgt

SEQ ID NO: 63513 - DNA, 22 bp, Artificial Sequence
  chemically synthesized
gtgggacccctctgtccagccc

SEQ ID NO: 63514 - DNA, 22 bp, Artificial Sequence
  chemically synthesized
tgggacccctctgtccagccca

SEQ ID NO: 63515 - DNA, 22 bp, Artificial Sequence
  chemically synthesized
tgtccagcccagcctgggtgtg

SEQ ID NO: 63516 - DNA, 22 bp, Artificial Sequence
  chemically synthesized
tccagcccagcctgggtgtgca

SEQ ID NO: 63517 - DNA, 22 bp, Artificial Sequence
  chemically synthesized
ggtgtgcatcttgtgtgcttgg

SEQ ID NO: 63518 - DNA, 22 bp, Artificial Sequence
  chemically synthesized
gtgtgcttggtcggcactgata

SEQ ID NO: 63519 - DNA, 22 bp, Artificial Sequence
  chemically synthesized
tgtgcttggtcggcactgatag

SEQ ID NO: 63520 - DNA, 22 bp, Artificial Sequence
  chemically synthesized
ggtcggcactgataggggtcgc

SEQ ID NO: 63521 - DNA, 22 bp, Artificial Sequence
  chemically synthesized
gtcggcactgataggggtcgcg

SEQ ID NO: 63522 - DNA, 22 bp, Artificial Sequence
  chemically synthesized
ataggggtcgcggtagggagtt

SEQ ID NO: 63523 - DNA, 22 bp, Artificial Sequence
  chemically synthesized
tcggcacacactgctgcatgtc

SEQ ID NO: 63524 - DNA, 22 bp, Artificial Sequence
  chemically synthesized
ctgcatgtcctgtgagcggtcc

SEQ ID NO: 63525 - DNA, 22 bp, Artificial Sequence
  chemically synthesized
catgtcctgtgagcggtcccca

SEQ ID NO: 63526 - DNA, 22 bp, Artificial Sequence
  chemically synthesized
tgagcggtccccaaggctgtgc

SEQ ID NO: 63527 - DNA, 22 bp, Artificial Sequence
  chemically synthesized
tgcccagccttcagtgtccagg

SEQ ID NO: 63528 - DNA, 22 bp, Artificial Sequence
  chemically synthesized
cagtgtccagggcctcttctga

SEQ ID NO: 63529 - DNA, 22 bp, Artificial Sequence
  chemically synthesized
agtgtccagggcctcttctgac

SEQ ID NO: 63530 - DNA, 22 bp, Artificial Sequence
  chemically synthesized
ttctgacaggccctgctggtta

SEQ ID NO: 63531 - DNA, 22 bp, Artificial Sequence
  chemically synthesized
ctgacaggccctgctggttatc

SEQ ID NO: 63532 - DNA, 22 bp, Artificial Sequence
  chemically synthesized
tgacaggccctgctggttatca

SEQ ID NO: 63533 - DNA, 22 bp, Artificial Sequence
  chemically synthesized
acaggccctgctggttatcact

SEQ ID NO: 63534 - DNA, 22 bp, Artificial Sequence
  chemically synthesized
ctggttatcactgttggcatta

SEQ ID NO: 63535 - DNA, 22 bp, Artificial Sequence
  chemically synthesized
gttatcactgttggcattatct

SEQ ID NO: 63536 - DNA, 22 bp, Artificial Sequence
  chemically synthesized
tcactgttggcattatctccac

SEQ ID NO: 63537 - DNA, 22 bp, Artificial Sequence
  chemically synthesized
ttggcattatctccacgcacca

SEQ ID NO: 63538 - DNA, 22 bp, Artificial Sequence
  chemically synthesized
gcattatctccacgcaccactt

SEQ ID NO: 63539 - DNA, 22 bp, Artificial Sequence
  chemically synthesized
tctccacgcaccacttctgtgc

SEQ ID NO: 63540 - DNA, 22 bp, Artificial Sequence
  chemically synthesized
cacgcaccacttctgtgcccag

SEQ ID NO: 63541 - DNA, 22 bp, Artificial Sequence
  chemically synthesized
ctgtgcccagggctgctgggtc

SEQ ID NO: 63542 - DNA, 22 bp, Artificial Sequence
  chemically synthesized
tgtgcccagggctgctgggtca

SEQ ID NO: 63543 - DNA, 22 bp, Artificial Sequence
  chemically synthesized
tgcccagggctgctgggtcacc

SEQ ID NO: 63544 - DNA, 22 bp, Artificial Sequence
  chemically synthesized
ctgggtcaccttaaggagccac

SEQ ID NO: 63545 - DNA, 22 bp, Artificial Sequence
  chemically synthesized
ggtcaccttaaggagccacaca

SEQ ID NO: 63546 - DNA, 22 bp, Artificial Sequence
  chemically synthesized
aaggagccacacacccgtctac

SEQ ID NO: 63547 - DNA, 22 bp, Artificial Sequence
  chemically synthesized
aggagccacacacccgtctaca

SEQ ID NO: 63548 - DNA, 22 bp, Artificial Sequence
  chemically synthesized
catagaggcccttcctgcttgg

SEQ ID NO: 63549 - DNA, 22 bp, Artificial Sequence
  chemically synthesized
cctgcttggggtctgacccagt

SEQ ID NO: 63550 - DNA, 22 bp, Artificial Sequence
  chemically synthesized
ctgcttggggtctgacccagtt

SEQ ID NO: 63551 - DNA, 22 bp, Artificial Sequence
  chemically synthesized
cttggggtctgacccagttatc

SEQ ID NO: 63552 - DNA, 22 bp, Artificial Sequence
  chemically synthesized
ggggtctgacccagttatcccc

SEQ ID NO: 63553 - DNA, 22 bp, Artificial Sequence
  chemically synthesized
gggtctgacccagttatcccct

SEQ ID NO: 63554 - DNA, 22 bp, Artificial Sequence
  chemically synthesized
acccagttatcccctccacacc

SEQ ID NO: 63555 - DNA, 22 bp, Artificial Sequence
  chemically synthesized
tcccctccacacctccattctc

SEQ ID NO: 63556 - DNA, 22 bp, Artificial Sequence
  chemically synthesized
cacacctccattctcccagact

SEQ ID NO: 63557 - DNA, 22 bp, Artificial Sequence
  chemically synthesized
cattctcccagacttttgactc

SEQ ID NO: 63558 - DNA, 22 bp, Artificial Sequence
  chemically synthesized
tcccagacttttgactcacccc

SEQ ID NO: 63559 - DNA, 22 bp, Artificial Sequence
  chemically synthesized
ccagacttttgactcaccccag

SEQ ID NO: 63560 - DNA, 22 bp, Artificial Sequence
  chemically synthesized
ttgactcaccccagccctgcta

SEQ ID NO: 63561 - DNA, 22 bp, Artificial Sequence
  chemically synthesized
tgactcaccccagccctgctaa

SEQ ID NO: 63562 - DNA, 22 bp, Artificial Sequence
  chemically synthesized
gactcaccccagccctgctaag

SEQ ID NO: 63563 - DNA, 22 bp, Artificial Sequence
  chemically synthesized
actcaccccagccctgctaaga

SEQ ID NO: 63564 - DNA, 22 bp, Artificial Sequence
  chemically synthesized
accccagccctgctaagagtga

SEQ ID NO: 63565 - DNA, 22 bp, Artificial Sequence
  chemically synthesized
ctaagagtgatgtcctccccca

SEQ ID NO: 63566 - DNA, 22 bp, Artificial Sequence
  chemically synthesized
agagtgatgtcctcccccaaag

SEQ ID NO: 63567 - DNA, 22 bp, Artificial Sequence
  chemically synthesized
ccccaaagagaagacccctgct

SEQ ID NO: 63568 - DNA, 22 bp, Artificial Sequence
  chemically synthesized
ctcttgagggtctgccaggtgg

SEQ ID NO: 63569 - DNA, 22 bp, Artificial Sequence
  chemically synthesized
ttgagggtctgccaggtgggtc

SEQ ID NO: 63570 - DNA, 22 bp, Artificial Sequence
  chemically synthesized
gagggtctgccaggtgggtccc

SEQ ID NO: 63571 - DNA, 22 bp, Artificial Sequence
  chemically synthesized
agggtctgccaggtgggtccct

SEQ ID NO: 63572 - DNA, 22 bp, Artificial Sequence
  chemically synthesized
ccaggtgggtccctcatctccc

SEQ ID NO: 63573 - DNA, 22 bp, Artificial Sequence
  chemically synthesized
atctccccacctccatgggcct

SEQ ID NO: 63574 - DNA, 22 bp, Artificial Sequence
  chemically synthesized
cccacctccatgggcctcttgg

SEQ ID NO: 63575 - DNA, 22 bp, Artificial Sequence
  chemically synthesized
catgggcctcttggattttgtg

SEQ ID NO: 63576 - DNA, 22 bp, Artificial Sequence
  chemically synthesized
ttggattttgtgcatagcaatc

SEQ ID NO: 63577 - DNA, 22 bp, Artificial Sequence
  chemically synthesized
ggattttgtgcatagcaatctc

SEQ ID NO: 63578 - DNA, 22 bp, Artificial Sequence
  chemically synthesized
gattttgtgcatagcaatctct

SEQ ID NO: 63579 - DNA, 22 bp, Artificial Sequence
  chemically synthesized
tgtgcatagcaatctctgcaac

SEQ ID NO: 63580 - DNA, 22 bp, Artificial Sequence
  chemically synthesized
gtgcatagcaatctctgcaaca

SEQ ID NO: 63581 - DNA, 22 bp, Artificial Sequence
  chemically synthesized
tgcatagcaatctctgcaacac

SEQ ID NO: 63582 - DNA, 22 bp, Artificial Sequence
  chemically synthesized
tgcaacaccctgacctttatgg

SEQ ID NO: 63583 - DNA, 22 bp, Artificial Sequence
  chemically synthesized
caacaccctgacctttatgggg

SEQ ID NO: 63584 - DNA, 22 bp, Artificial Sequence
  chemically synthesized
acctttatggggtcatcctcgg

SEQ ID NO: 63585 - DNA, 22 bp, Artificial Sequence
  chemically synthesized
tatggggtcatcctcggccaat

SEQ ID NO: 63586 - DNA, 22 bp, Artificial Sequence
  chemically synthesized
atggggtcatcctcggccaatg

SEQ ID NO: 63587 - DNA, 22 bp, Artificial Sequence
  chemically synthesized
tggggtcatcctcggccaatga

SEQ ID NO: 63588 - DNA, 22 bp, Artificial Sequence
  chemically synthesized
ggccaatgaagcggtgggtcca

SEQ ID NO: 63589 - DNA, 22 bp, Artificial Sequence
  chemically synthesized
ccccttctatcacctggctcac

SEQ ID NO: 63590 - DNA, 22 bp, Artificial Sequence
  chemically synthesized
ctatcacctggctcacttccat

SEQ ID NO: 63591 - DNA, 22 bp, Artificial Sequence
  chemically synthesized
tatcacctggctcacttccatc

SEQ ID NO: 63592 - DNA, 22 bp, Artificial Sequence
  chemically synthesized
tcacctggctcacttccatcct

SEQ ID NO: 63593 - DNA, 22 bp, Artificial Sequence
  chemically synthesized
gctcacttccatcctgcagagg

SEQ ID NO: 63594 - DNA, 22 bp, Artificial Sequence
  chemically synthesized
acttccatcctgcagaggaagc

SEQ ID NO: 63595 - DNA, 22 bp, Artificial Sequence
  chemically synthesized
ccatcctgcagaggaagcttgg

SEQ ID NO: 63596 - DNA, 22 bp, Artificial Sequence
  chemically synthesized
catcctgcagaggaagcttggt

SEQ ID NO: 63597 - DNA, 22 bp, Artificial Sequence
  chemically synthesized
cagaggaagcttggtttcattt

SEQ ID NO: 63598 - DNA, 22 bp, Artificial Sequence
  chemically synthesized
ggtttcatttaggacaatgtgc

SEQ ID NO: 63599 - DNA, 22 bp, Artificial Sequence
  chemically synthesized
gtttcatttaggacaatgtgca

SEQ ID NO: 63600 - DNA, 22 bp, Artificial Sequence
  chemically synthesized
catttaggacaatgtgcaggat

SEQ ID NO: 63601 - DNA, 22 bp, Artificial Sequence
  chemically synthesized
atttaggacaatgtgcaggatc

SEQ ID NO: 63602 - DNA, 22 bp, Artificial Sequence
  chemically synthesized
aggacaatgtgcaggatccttt

SEQ ID NO: 63603 - DNA, 22 bp, Artificial Sequence
  chemically synthesized
ggacaatgtgcaggatcctttt

SEQ ID NO: 63604 - DNA, 22 bp, Artificial Sequence
  chemically synthesized
ttgatcatttctctactggatc

SEQ ID NO: 63605 - DNA, 22 bp, Artificial Sequence
  chemically synthesized
tgatcatttctctactggatca

SEQ ID NO: 63606 - DNA, 22 bp, Artificial Sequence
  chemically synthesized
gatcatttctctactggatcat

SEQ ID NO: 63607 - DNA, 22 bp, Artificial Sequence
  chemically synthesized
atcatttctctactggatcatc

SEQ ID NO: 63608 - DNA, 22 bp, Artificial Sequence
  chemically synthesized
ctctactggatcatcagcaaag

SEQ ID NO: 63609 - DNA, 22 bp, Artificial Sequence
  chemically synthesized
tctactggatcatcagcaaagg

SEQ ID NO: 63610 - DNA, 22 bp, Artificial Sequence
  chemically synthesized
tactggatcatcagcaaaggga

SEQ ID NO: 63611 - DNA, 22 bp, Artificial Sequence
  chemically synthesized
ctggatcatcagcaaagggaga

SEQ ID NO: 63612 - DNA, 22 bp, Artificial Sequence
  chemically synthesized
gatcatcagcaaagggagaaat

SEQ ID NO: 63613 - DNA, 22 bp, Artificial Sequence
  chemically synthesized
agtcctttgggggaaatatgtg

SEQ ID NO: 63614 - DNA, 22 bp, Artificial Sequence
  chemically synthesized
tgggggaaatatgtgcctatag

SEQ ID NO: 63615 - DNA, 22 bp, Artificial Sequence
  chemically synthesized
gggggaaatatgtgcctatagt

SEQ ID NO: 63616 - DNA, 22 bp, Artificial Sequence
  chemically synthesized
ggggaaatatgtgcctatagta

SEQ ID NO: 63617 - DNA, 22 bp, Artificial Sequence
  chemically synthesized
tagtaaggtgatagttcagaga

SEQ ID NO: 63618 - DNA, 22 bp, Artificial Sequence
  chemically synthesized
agagaaagagaagagtaggagg

SEQ ID NO: 63619 - DNA, 22 bp, Artificial Sequence
  chemically synthesized
gacctgaaggccttccaaaaaa

SEQ ID NO: 63620 - DNA, 22 bp, Artificial Sequence
  chemically synthesized
aaggccttccaaaaaaagtaaa

SEQ ID NO: 63621 - DNA, 22 bp, Artificial Sequence
  chemically synthesized
ccaaaaaaagtaaaggatgtta

SEQ ID NO: 63622 - DNA, 22 bp, Artificial Sequence
  chemically synthesized
caaaaaaagtaaaggatgttaa

SEQ ID NO: 63623 - DNA, 22 bp, Artificial Sequence
  chemically synthesized
aattgctctggaaggtgcaaag

SEQ ID NO: 63624 - DNA, 22 bp, Artificial Sequence
  chemically synthesized
ctctggaaggtgcaaagtgcca

SEQ ID NO: 63625 - DNA, 22 bp, Artificial Sequence
  chemically synthesized
tggaaggtgcaaagtgccatcc

SEQ ID NO: 63626 - DNA, 22 bp, Artificial Sequence
  chemically synthesized
gaaggtgcaaagtgccatccag

SEQ ID NO: 63627 - DNA, 22 bp, Artificial Sequence
  chemically synthesized
ttattattattatcatcatcat

SEQ ID NO: 63628 - DNA, 22 bp, Artificial Sequence
  chemically synthesized
ttattattatcatcatcataat

SEQ ID NO: 63629 - DNA, 22 bp, Artificial Sequence
  chemically synthesized
ttattatcatcatcataatggt

SEQ ID NO: 63630 - DNA, 22 bp, Artificial Sequence
  chemically synthesized
ttatcatcatcataatggtcat

SEQ ID NO: 63631 - DNA, 22 bp, Artificial Sequence
  chemically synthesized
tcatcatcataatggtcattat

SEQ ID NO: 63632 - DNA, 22 bp, Artificial Sequence
  chemically synthesized
tcatcaccattataggatatgg

SEQ ID NO: 63633 - DNA, 22 bp, Artificial Sequence
  chemically synthesized
taggatatggcactgacgtagg

SEQ ID NO: 63634 - DNA, 22 bp, Artificial Sequence
  chemically synthesized
acgtaggtagtgactggtaaga

SEQ ID NO: 63635 - DNA, 22 bp, Artificial Sequence
  chemically synthesized
gtaagagccgattgagtttcta

SEQ ID NO: 63636 - DNA, 22 bp, Artificial Sequence
  chemically synthesized
agtttctagctgattcctgatg

SEQ ID NO: 63637 - DNA, 22 bp, Artificial Sequence
  chemically synthesized
ctagctgattcctgatgttagg

SEQ ID NO: 63638 - DNA, 22 bp, Artificial Sequence
  chemically synthesized
tagctgattcctgatgttaggg

SEQ ID NO: 63639 - DNA, 22 bp, Artificial Sequence
  chemically synthesized
gctgattcctgatgttaggggc

SEQ ID NO: 63640 - DNA, 22 bp, Artificial Sequence
  chemically synthesized
attcctgatgttaggggccatg

SEQ ID NO: 63641 - DNA, 22 bp, Artificial Sequence
  chemically synthesized
ctgatgttaggggccatgaatc

SEQ ID NO: 63642 - DNA, 22 bp, Artificial Sequence
  chemically synthesized
atgttaggggccatgaatctgt

SEQ ID NO: 63643 - DNA, 22 bp, Artificial Sequence
  chemically synthesized
ggggccatgaatctgtctacct

SEQ ID NO: 63644 - DNA, 22 bp, Artificial Sequence
  chemically synthesized
tctacctggaatgttctaattc

SEQ ID NO: 63645 - DNA, 22 bp, Artificial Sequence
  chemically synthesized
cctggaatgttctaattcaatt

SEQ ID NO: 63646 - DNA, 22 bp, Artificial Sequence
  chemically synthesized
gaatgttctaattcaattcagg

SEQ ID NO: 63647 - DNA, 22 bp, Artificial Sequence
  chemically synthesized
taattcaattcaggagcggcag

SEQ ID NO: 63648 - DNA, 22 bp, Artificial Sequence
  chemically synthesized
attcaattcaggagcggcagtt

SEQ ID NO: 63649 - DNA, 22 bp, Artificial Sequence
  chemically synthesized
aattcaggagcggcagtttaag

SEQ ID NO: 63650 - DNA, 22 bp, Artificial Sequence
  chemically synthesized
aggagcggcagtttaagtctag

SEQ ID NO: 63651 - DNA, 22 bp, Artificial Sequence
  chemically synthesized
aagtctagacttcaaagcactc

SEQ ID NO: 63652 - DNA, 22 bp, Artificial Sequence
  chemically synthesized
agtctagacttcaaagcactct

SEQ ID NO: 63653 - DNA, 22 bp, Artificial Sequence
  chemically synthesized
gacttcaaagcactctcatata

SEQ ID NO: 63654 - DNA, 22 bp, Artificial Sequence
  chemically synthesized
caaagcactctcatatatcctt

SEQ ID NO: 63655 - DNA, 22 bp, Artificial Sequence
  chemically synthesized
aaagcactctcatatatccttg

SEQ ID NO: 63656 - DNA, 22 bp, Artificial Sequence
  chemically synthesized
tcatatatccttggcctgctaa

SEQ ID NO: 63657 - DNA, 22 bp, Artificial Sequence
  chemically synthesized
atatatccttggcctgctaacc

SEQ ID NO: 63658 - DNA, 22 bp, Artificial Sequence
  chemically synthesized
ggcctgctaacctgagggctag

SEQ ID NO: 63659 - DNA, 22 bp, Artificial Sequence
  chemically synthesized
gcctgctaacctgagggctagt

SEQ ID NO: 63660 - DNA, 22 bp, Artificial Sequence
  chemically synthesized
ctaacctgagggctagtttcta

SEQ ID NO: 63661 - DNA, 22 bp, Artificial Sequence
  chemically synthesized
acctgagggctagtttctaggg

SEQ ID NO: 63662 - DNA, 22 bp, Artificial Sequence
  chemically synthesized
agggctagtttctagggattga

SEQ ID NO: 63663 - DNA, 22 bp, Artificial Sequence
  chemically synthesized
gtttctagggattgattaactt

SEQ ID NO: 63664 - DNA, 22 bp, Artificial Sequence
  chemically synthesized
ctagggattgattaacttaaag

SEQ ID NO: 63665 - DNA, 22 bp, Artificial Sequence
  chemically synthesized
tagggattgattaacttaaaga

SEQ ID NO: 63666 - DNA, 22 bp, Artificial Sequence
  chemically synthesized
gggattgattaacttaaagaca

SEQ ID NO: 63667 - DNA, 22 bp, Artificial Sequence
  chemically synthesized
attaacttaaagacagttcata

SEQ ID NO: 63668 - DNA, 22 bp, Artificial Sequence
  chemically synthesized
acttaaagacagttcatatatg

SEQ ID NO: 63669 - DNA, 22 bp, Artificial Sequence
  chemically synthesized
aaagacagttcatatatgcttg

SEQ ID NO: 63670 - DNA, 22 bp, Artificial Sequence
  chemically synthesized
aagacagttcatatatgcttga

SEQ ID NO: 63671 - DNA, 22 bp, Artificial Sequence
  chemically synthesized
atatatgcttgaatactagcta

SEQ ID NO: 63672 - DNA, 22 bp, Artificial Sequence
  chemically synthesized
gaatactagctattcatattct

SEQ ID NO: 63673 - DNA, 22 bp, Artificial Sequence
  chemically synthesized
aatactagctattcatattctg

SEQ ID NO: 63674 - DNA, 22 bp, Artificial Sequence
  chemically synthesized
gctattcatattctgaaaaatc

SEQ ID NO: 63675 - DNA, 22 bp, Artificial Sequence
  chemically synthesized
ttcatattctgaaaaatctgac

SEQ ID NO: 63676 - DNA, 22 bp, Artificial Sequence
  chemically synthesized
atattctgaaaaatctgacttg

SEQ ID NO: 63677 - DNA, 22 bp, Artificial Sequence
  chemically synthesized
tgaaaaatctgacttgatcaaa

SEQ ID NO: 63678 - DNA, 22 bp, Artificial Sequence
  chemically synthesized
aaaaatctgacttgatcaaaca

SEQ ID NO: 63679 - DNA, 22 bp, Artificial Sequence
  chemically synthesized
acttgatcaaacagagcagtta

SEQ ID NO: 63680 - DNA, 22 bp, Artificial Sequence
  chemically synthesized
gatcaaacagagcagttaaagg

SEQ ID NO: 63681 - DNA, 22 bp, Artificial Sequence
  chemically synthesized
atcaaacagagcagttaaaggc

SEQ ID NO: 63682 - DNA, 22 bp, Artificial Sequence
  chemically synthesized
aaggcgatgcttcgttttacaa

SEQ ID NO: 63683 - DNA, 22 bp, Artificial Sequence
  chemically synthesized
cgttttacaaaagattttcccc

SEQ ID NO: 63684 - DNA, 22 bp, Artificial Sequence
  chemically synthesized
gttttacaaaagattttccccc

SEQ ID NO: 63685 - DNA, 22 bp, Artificial Sequence
  chemically synthesized
tacaaaagattttcccccctct

SEQ ID NO: 63686 - DNA, 22 bp, Artificial Sequence
  chemically synthesized
acaaaagattttcccccctctt

SEQ ID NO: 63687 - DNA, 22 bp, Artificial Sequence
  chemically synthesized
caaaagattttcccccctcttt

SEQ ID NO: 63688 - DNA, 22 bp, Artificial Sequence
  chemically synthesized
tcccccctctttacaaaaggat

SEQ ID NO: 63689 - DNA, 22 bp, Artificial Sequence
  chemically synthesized
cccccctctttacaaaaggatg

SEQ ID NO: 63690 - DNA, 22 bp, Artificial Sequence
  chemically synthesized
ccccctctttacaaaaggatgc

SEQ ID NO: 63691 - DNA, 22 bp, Artificial Sequence
  chemically synthesized
tttacaaaaggatgcacagtgg

SEQ ID NO: 63692 - DNA, 22 bp, Artificial Sequence
  chemically synthesized
tacaaaaggatgcacagtggta

SEQ ID NO: 63693 - DNA, 22 bp, Artificial Sequence
  chemically synthesized
acaaaaggatgcacagtggtat

SEQ ID NO: 63694 - DNA, 22 bp, Artificial Sequence
  chemically synthesized
caaaaggatgcacagtggtatt

SEQ ID NO: 63695 - DNA, 22 bp, Artificial Sequence
  chemically synthesized
ctttcaatggaatgtttctcta

SEQ ID NO: 63696 - DNA, 22 bp, Artificial Sequence
  chemically synthesized
tcaatggaatgtttctctagct

SEQ ID NO: 63697 - DNA, 22 bp, Artificial Sequence
  chemically synthesized
caatggaatgtttctctagctc

SEQ ID NO: 63698 - DNA, 22 bp, Artificial Sequence
  chemically synthesized
aatggaatgtttctctagctca

SEQ ID NO: 63699 - DNA, 22 bp, Artificial Sequence
  chemically synthesized
ctctagctcattaagtgtttac

SEQ ID NO: 63700 - DNA, 22 bp, Artificial Sequence
  chemically synthesized
tctagctcattaagtgtttaca

SEQ ID NO: 63701 - DNA, 22 bp, Artificial Sequence
  chemically synthesized
tagctcattaagtgtttacagg

SEQ ID NO: 63702 - DNA, 22 bp, Artificial Sequence
  chemically synthesized
gctcattaagtgtttacaggtc

SEQ ID NO: 63703 - DNA, 22 bp, Artificial Sequence
  chemically synthesized
attaagtgtttacaggtcatta

SEQ ID NO: 63704 - DNA, 22 bp, Artificial Sequence
  chemically synthesized
agtgtttacaggtcattagcta

SEQ ID NO: 63705 - DNA, 22 bp, Artificial Sequence
  chemically synthesized
acaggtcattagctactgcatg

SEQ ID NO: 63706 - DNA, 22 bp, Artificial Sequence
  chemically synthesized
caggtcattagctactgcatgg

SEQ ID NO: 63707 - DNA, 22 bp, Artificial Sequence
  chemically synthesized
gctactgcatggaaggactttg

SEQ ID NO: 63708 - DNA, 22 bp, Artificial Sequence
  chemically synthesized
ctgcatggaaggactttgctag

SEQ ID NO: 63709 - DNA, 22 bp, Artificial Sequence
  chemically synthesized
catggaaggactttgctagaga

SEQ ID NO: 63710 - DNA, 22 bp, Artificial Sequence
  chemically synthesized
tgctagagaaaaggaaggctgc

SEQ ID NO: 63711 - DNA, 22 bp, Artificial Sequence
  chemically synthesized
gctagagaaaaggaaggctgca

SEQ ID NO: 63712 - DNA, 22 bp, Artificial Sequence
  chemically synthesized
ctagagaaaaggaaggctgcaa

SEQ ID NO: 63713 - DNA, 22 bp, Artificial Sequence
  chemically synthesized
gagaaaaggaaggctgcaagga

SEQ ID NO: 63714 - DNA, 22 bp, Artificial Sequence
  chemically synthesized
caaggaaatagctctagctcta

SEQ ID NO: 63715 - DNA, 22 bp, Artificial Sequence
  chemically synthesized
tagctctagctctagcttaggg

SEQ ID NO: 63716 - DNA, 22 bp, Artificial Sequence
  chemically synthesized
gctctagctctagcttagggga

SEQ ID NO: 63717 - DNA, 22 bp, Artificial Sequence
  chemically synthesized
tagctctagcttaggggatgct

SEQ ID NO: 63718 - DNA, 22 bp, Artificial Sequence
  chemically synthesized
gctctagcttaggggatgctag

SEQ ID NO: 63719 - DNA, 22 bp, Artificial Sequence
  chemically synthesized
tagcttaggggatgctagctaa

SEQ ID NO: 63720 - DNA, 22 bp, Artificial Sequence
  chemically synthesized
gcttaggggatgctagctaaag

SEQ ID NO: 63721 - DNA, 22 bp, Artificial Sequence
  chemically synthesized
aggggatgctagctaaagggaa

SEQ ID NO: 63722 - DNA, 22 bp, Artificial Sequence
  chemically synthesized
ggggatgctagctaaagggaat

SEQ ID NO: 63723 - DNA, 22 bp, Artificial Sequence
  chemically synthesized
gctaaagggaattagaattggt

SEQ ID NO: 63724 - DNA, 22 bp, Artificial Sequence
  chemically synthesized
aagggaattagaattggttggc

SEQ ID NO: 63725 - DNA, 22 bp, Artificial Sequence
  chemically synthesized
gaattggttggccaacaggtgt

SEQ ID NO: 63726 - DNA, 22 bp, Artificial Sequence
  chemically synthesized
gttggccaacaggtgtctgcgg

SEQ ID NO: 63727 - DNA, 22 bp, Artificial Sequence
  chemically synthesized
gccaacaggtgtctgcggtgta

SEQ ID NO: 63728 - DNA, 22 bp, Artificial Sequence
  chemically synthesized
cggtgtactccctgtccactca

SEQ ID NO: 63729 - DNA, 22 bp, Artificial Sequence
  chemically synthesized
cctgtccactcaacactggggg

SEQ ID NO: 63730 - DNA, 22 bp, Artificial Sequence
  chemically synthesized
tccactcaacactgggggagga

SEQ ID NO: 63731 - DNA, 22 bp, Artificial Sequence
  chemically synthesized
aacactgggggaggagtagaga

SEQ ID NO: 63732 - DNA, 22 bp, Artificial Sequence
  chemically synthesized
ggggaggagtagagatcttgct

SEQ ID NO: 63733 - DNA, 22 bp, Artificial Sequence
  chemically synthesized
gcttccttccatgtgagagctt

SEQ ID NO: 63734 - DNA, 22 bp, Artificial Sequence
  chemically synthesized
cttccttccatgtgagagctta

SEQ ID NO: 63735 - DNA, 22 bp, Artificial Sequence
  chemically synthesized
ccttccatgtgagagcttatag

SEQ ID NO: 63736 - DNA, 22 bp, Artificial Sequence
  chemically synthesized
cttccatgtgagagcttatagt

SEQ ID NO: 63737 - DNA, 22 bp, Artificial Sequence
  chemically synthesized
ccatgtgagagcttatagtccc

SEQ ID NO: 63738 - DNA, 22 bp, Artificial Sequence
  chemically synthesized
catgtgagagcttatagtccct

SEQ ID NO: 63739 - DNA, 22 bp, Artificial Sequence
  chemically synthesized
atagtccctttggaatccagat

SEQ ID NO: 63740 - DNA, 22 bp, Artificial Sequence
  chemically synthesized
tagtccctttggaatccagatt

SEQ ID NO: 63741 - DNA, 22 bp, Artificial Sequence
  chemically synthesized
tggaatccagatttatcgtgaa

SEQ ID NO: 63742 - DNA, 22 bp, Artificial Sequence
  chemically synthesized
ggaatccagatttatcgtgaag

SEQ ID NO: 63743 - DNA, 22 bp, Artificial Sequence
  chemically synthesized
gaatccagatttatcgtgaagt

SEQ ID NO: 63744 - DNA, 22 bp, Artificial Sequence
  chemically synthesized
atcgtgaagtaatcgtgaagac

SEQ ID NO: 63745 - DNA, 22 bp, Artificial Sequence
  chemically synthesized
tcgtgaagtaatcgtgaagaca

SEQ ID NO: 63746 - DNA, 22 bp, Artificial Sequence
  chemically synthesized
agtgctacattgtgttcactca

SEQ ID NO: 63747 - DNA, 22 bp, Artificial Sequence
  chemically synthesized
cattgtgttcactcatctctta

SEQ ID NO: 63748 - DNA, 22 bp, Artificial Sequence
  chemically synthesized
tgttcactcatctcttatgact

SEQ ID NO: 63749 - DNA, 22 bp, Artificial Sequence
  chemically synthesized
actcatctcttatgactgtcca

SEQ ID NO: 63750 - DNA, 22 bp, Artificial Sequence
  chemically synthesized
atctcttatgactgtccatggg

SEQ ID NO: 63751 - DNA, 22 bp, Artificial Sequence
  chemically synthesized
ttatgactgtccatggggaaat

SEQ ID NO: 63752 - DNA, 22 bp, Artificial Sequence
  chemically synthesized
atgactgtccatggggaaatgg

SEQ ID NO: 63753 - DNA, 22 bp, Artificial Sequence
  chemically synthesized
tgactgtccatggggaaatggg

SEQ ID NO: 63754 - DNA, 22 bp, Artificial Sequence
  chemically synthesized
tccatggggaaatgggtcctgc

SEQ ID NO: 63755 - DNA, 22 bp, Artificial Sequence
  chemically synthesized
ctttacaaaaattcagtttgca

SEQ ID NO: 63756 - DNA, 22 bp, Artificial Sequence
  chemically synthesized
tacaaaaattcagtttgcatgc

SEQ ID NO: 63757 - DNA, 22 bp, Artificial Sequence
  chemically synthesized
acaaaaattcagtttgcatgct

SEQ ID NO: 63758 - DNA, 22 bp, Artificial Sequence
  chemically synthesized
caaaaattcagtttgcatgctg

SEQ ID NO: 63759 - DNA, 22 bp, Artificial Sequence
  chemically synthesized
agtttgcatgctgcttttcagg

SEQ ID NO: 63760 - DNA, 22 bp, Artificial Sequence
  chemically synthesized
gcatgctgcttttcaggcctat

SEQ ID NO: 63761 - DNA, 22 bp, Artificial Sequence
  chemically synthesized
catgctgcttttcaggcctatg

SEQ ID NO: 63762 - DNA, 22 bp, Artificial Sequence
  chemically synthesized
cttttcaggcctatgactgtga

SEQ ID NO: 63763 - DNA, 22 bp, Artificial Sequence
  chemically synthesized
ttcaggcctatgactgtgacat

SEQ ID NO: 63764 - DNA, 22 bp, Artificial Sequence
  chemically synthesized
tcaggcctatgactgtgacatc

SEQ ID NO: 63765 - DNA, 22 bp, Artificial Sequence
  chemically synthesized
caggcctatgactgtgacatcc

SEQ ID NO: 63766 - DNA, 22 bp, Artificial Sequence
  chemically synthesized
aggcctatgactgtgacatcca

SEQ ID NO: 63767 - DNA, 22 bp, Artificial Sequence
  chemically synthesized
tgactgtgacatccagtgaggg

SEQ ID NO: 63768 - DNA, 22 bp, Artificial Sequence
  chemically synthesized
tgacatccagtgagggagattt

SEQ ID NO: 63769 - DNA, 22 bp, Artificial Sequence
  chemically synthesized
gaggaaggggttgatgtaagac

SEQ ID NO: 63770 - DNA, 22 bp, Artificial Sequence
  chemically synthesized
aggaaggggttgatgtaagact

SEQ ID NO: 63771 - DNA, 22 bp, Artificial Sequence
  chemically synthesized
atgtaagactcctcttgggagc

SEQ ID NO: 63772 - DNA, 22 bp, Artificial Sequence
  chemically synthesized
ctcttgggagcatagtgagaga

SEQ ID NO: 63773 - DNA, 22 bp, Artificial Sequence
  chemically synthesized
ttgggagcatagtgagagagag

SEQ ID NO: 63774 - DNA, 22 bp, Artificial Sequence
  chemically synthesized
gggagcatagtgagagagagag

SEQ ID NO: 63775 - DNA, 22 bp, Artificial Sequence
  chemically synthesized
ggagcatagtgagagagagaga

SEQ ID NO: 63776 - DNA, 22 bp, Artificial Sequence
  chemically synthesized
acagtggaacctagagtgggaa

SEQ ID NO: 63777 - DNA, 22 bp, Artificial Sequence
  chemically synthesized
gagtgggaaaggctacctggtg

SEQ ID NO: 63778 - DNA, 22 bp, Artificial Sequence
  chemically synthesized
cctggtggctgtcctggcatgt

SEQ ID NO: 63779 - DNA, 22 bp, Artificial Sequence
  chemically synthesized
gtggctgtcctggcatgtaagt

SEQ ID NO: 63780 - DNA, 22 bp, Artificial Sequence
  chemically synthesized
tcctggcatgtaagtaagtctg

SEQ ID NO: 63781 - DNA, 22 bp, Artificial Sequence
  chemically synthesized
gcatgtaagtaagtctgtgtgg

SEQ ID NO: 63782 - DNA, 22 bp, Artificial Sequence
  chemically synthesized
tgtggtcagggcttgcattcca

SEQ ID NO: 63783 - DNA, 22 bp, Artificial Sequence
  chemically synthesized
gcattccataaatggcccaggc

SEQ ID NO: 63784 - DNA, 22 bp, Artificial Sequence
  chemically synthesized
cattccataaatggcccaggcc

SEQ ID NO: 63785 - DNA, 22 bp, Artificial Sequence
  chemically synthesized
cataaatggcccaggcccctgc

SEQ ID NO: 63786 - DNA, 22 bp, Artificial Sequence
  chemically synthesized
ctggctgctgggagagaaagtc

SEQ ID NO: 63787 - DNA, 22 bp, Artificial Sequence
  chemically synthesized
gctgctgggagagaaagtcggt

SEQ ID NO: 63788 - DNA, 22 bp, Artificial Sequence
  chemically synthesized
ctgggagagaaagtcggtgagg

SEQ ID NO: 63789 - DNA, 22 bp, Artificial Sequence
  chemically synthesized
ggagagaaagtcggtgaggaga

SEQ ID NO: 63790 - DNA, 22 bp, Artificial Sequence
  chemically synthesized
tacaaggcaggagagatgtact

SEQ ID NO: 63791 - DNA, 22 bp, Artificial Sequence
  chemically synthesized
accaggctcttccagaaggggt

SEQ ID NO: 63792 - DNA, 22 bp, Artificial Sequence
  chemically synthesized
ttccagaaggggtaactgtctc

SEQ ID NO: 63793 - DNA, 22 bp, Artificial Sequence
  chemically synthesized
ccagaaggggtaactgtctcaa

SEQ ID NO: 63794 - DNA, 22 bp, Artificial Sequence
  chemically synthesized
cagaaggggtaactgtctcaaa

SEQ ID NO: 63795 - DNA, 22 bp, Artificial Sequence
  chemically synthesized
tctcaaatccttgccttgaacc

SEQ ID NO: 63796 - DNA, 22 bp, Artificial Sequence
  chemically synthesized
aaatccttgccttgaacctgca

SEQ ID NO: 63797 - DNA, 22 bp, Artificial Sequence
  chemically synthesized
gccttgaacctgcagcaaagtg

SEQ ID NO: 63798 - DNA, 22 bp, Artificial Sequence
  chemically synthesized
ccttgaacctgcagcaaagtgg

SEQ ID NO: 63799 - DNA, 22 bp, Artificial Sequence
  chemically synthesized
gaacctgcagcaaagtggaaga

SEQ ID NO: 63800 - DNA, 22 bp, Artificial Sequence
  chemically synthesized
aacctgcagcaaagtggaagat

SEQ ID NO: 63801 - DNA, 22 bp, Artificial Sequence
  chemically synthesized
cagcaaagtggaagataggtgt

SEQ ID NO: 63802 - DNA, 22 bp, Artificial Sequence
  chemically synthesized
tcctcctctcttccctctttcc

SEQ ID NO: 63803 - DNA, 22 bp, Artificial Sequence
  chemically synthesized
ctctcttccctctttcctgctt

SEQ ID NO: 63804 - DNA, 22 bp, Artificial Sequence
  chemically synthesized
tcttccctctttcctgcttcag

SEQ ID NO: 63805 - DNA, 22 bp, Artificial Sequence
  chemically synthesized
ttccctctttcctgcttcaggc

SEQ ID NO: 63806 - DNA, 22 bp, Artificial Sequence
  chemically synthesized
ccctctttcctgcttcaggcta

SEQ ID NO: 63807 - DNA, 22 bp, Artificial Sequence
  chemically synthesized
cctctttcctgcttcaggctac

SEQ ID NO: 63808 - DNA, 22 bp, Artificial Sequence
  chemically synthesized
tttcctgcttcaggctactctg

SEQ ID NO: 63809 - DNA, 22 bp, Artificial Sequence
  chemically synthesized
tcctgcttcaggctactctgaa

SEQ ID NO: 63810 - DNA, 22 bp, Artificial Sequence
  chemically synthesized
cctgcttcaggctactctgaac

SEQ ID NO: 63811 - DNA, 22 bp, Artificial Sequence
  chemically synthesized
ctgcttcaggctactctgaact

SEQ ID NO: 63812 - DNA, 22 bp, Artificial Sequence
  chemically synthesized
cttcaggctactctgaactcac

SEQ ID NO: 63813 - DNA, 22 bp, Artificial Sequence
  chemically synthesized
caggctactctgaactcacttt

SEQ ID NO: 63814 - DNA, 22 bp, Artificial Sequence
  chemically synthesized
aggctactctgaactcactttt

SEQ ID NO: 63815 - DNA, 22 bp, Artificial Sequence
  chemically synthesized
ctctgaactcacttttgctgtg

SEQ ID NO: 63816 - DNA, 22 bp, Artificial Sequence
  chemically synthesized
tgaactcacttttgctgtgtgt

SEQ ID NO: 63817 - DNA, 22 bp, Artificial Sequence
  chemically synthesized
aactcacttttgctgtgtgtcc

SEQ ID NO: 63818 - DNA, 22 bp, Artificial Sequence
  chemically synthesized
acttttgctgtgtgtccagagc

SEQ ID NO: 63819 - DNA, 22 bp, Artificial Sequence
  chemically synthesized
ttgctgtgtgtccagagctgac

SEQ ID NO: 63820 - DNA, 22 bp, Artificial Sequence
  chemically synthesized
tgctgtgtgtccagagctgacc

SEQ ID NO: 63821 - DNA, 22 bp, Artificial Sequence
  chemically synthesized
gctgtgtgtccagagctgacca

SEQ ID NO: 63822 - DNA, 22 bp, Artificial Sequence
  chemically synthesized
ctgtgtgtccagagctgaccag

SEQ ID NO: 63823 - DNA, 22 bp, Artificial Sequence
  chemically synthesized
tgtgtccagagctgaccagagg

SEQ ID NO: 63824 - DNA, 22 bp, Artificial Sequence
  chemically synthesized
accagaggacaatggcagactt

SEQ ID NO: 63825 - DNA, 22 bp, Artificial Sequence
  chemically synthesized
attgtcagactggcagcaccag

SEQ ID NO: 63826 - DNA, 22 bp, Artificial Sequence
  chemically synthesized
ttgtcagactggcagcaccagc

SEQ ID NO: 63827 - DNA, 22 bp, Artificial Sequence
  chemically synthesized
tcagactggcagcaccagccta

SEQ ID NO: 63828 - DNA, 22 bp, Artificial Sequence
  chemically synthesized
gcagcaccagcctagtgctctg

SEQ ID NO: 63829 - DNA, 22 bp, Artificial Sequence
  chemically synthesized
gtgctctgtctctgcctgggaa

SEQ ID NO: 63830 - DNA, 22 bp, Artificial Sequence
  chemically synthesized
tgtctctgcctgggaaatggtt

SEQ ID NO: 63831 - DNA, 22 bp, Artificial Sequence
  chemically synthesized
tctctgcctgggaaatggtttc

SEQ ID NO: 63832 - DNA, 22 bp, Artificial Sequence
  chemically synthesized
tgcctgggaaatggtttcacaa

SEQ ID NO: 63833 - DNA, 22 bp, Artificial Sequence
  chemically synthesized
cctgggaaatggtttcacaaag

SEQ ID NO: 63834 - DNA, 22 bp, Artificial Sequence
  chemically synthesized
ggaaatggtttcacaaagctcc

SEQ ID NO: 63835 - DNA, 22 bp, Artificial Sequence
  chemically synthesized
cacaaagctccagttctgccct

SEQ ID NO: 63836 - DNA, 22 bp, Artificial Sequence
  chemically synthesized
acaaagctccagttctgccctg

SEQ ID NO: 63837 - DNA, 22 bp, Artificial Sequence
  chemically synthesized
cagttctgccctggacacttgc

SEQ ID NO: 63838 - DNA, 22 bp, Artificial Sequence
  chemically synthesized
tgccctggacacttgcctcata

SEQ ID NO: 63839 - DNA, 22 bp, Artificial Sequence
  chemically synthesized
ccctggacacttgcctcatagg

SEQ ID NO: 63840 - DNA, 22 bp, Artificial Sequence
  chemically synthesized
gacacttgcctcatagggctat

SEQ ID NO: 63841 - DNA, 22 bp, Artificial Sequence
  chemically synthesized
gcctcatagggctatccctttg

SEQ ID NO: 63842 - DNA, 22 bp, Artificial Sequence
  chemically synthesized
cctcatagggctatccctttgc

SEQ ID NO: 63843 - DNA, 22 bp, Artificial Sequence
  chemically synthesized
atagggctatccctttgcccct

SEQ ID NO: 63844 - DNA, 22 bp, Artificial Sequence
  chemically synthesized
tccctttgcccctcagtaacac

SEQ ID NO: 63845 - DNA, 22 bp, Artificial Sequence
  chemically synthesized
tgcccctcagtaacaccactgg

SEQ ID NO: 63846 - DNA, 22 bp, Artificial Sequence
  chemically synthesized
gcccctcagtaacaccactggg

SEQ ID NO: 63847 - DNA, 22 bp, Artificial Sequence
  chemically synthesized
cccctcagtaacaccactggga

SEQ ID NO: 63848 - DNA, 22 bp, Artificial Sequence
  chemically synthesized
agtaacaccactgggatggtcc

SEQ ID NO: 63849 - DNA, 22 bp, Artificial Sequence
  chemically synthesized
ggatggtccactcccaccctgt

SEQ ID NO: 63850 - DNA, 22 bp, Artificial Sequence
  chemically synthesized
ccaccctgtcccccatctgtgg

SEQ ID NO: 63851 - DNA, 22 bp, Artificial Sequence
  chemically synthesized
tcccccatctgtggtagcctgt

SEQ ID NO: 63852 - DNA, 22 bp, Artificial Sequence
  chemically synthesized
tggtagcctgtgttgcctcgtg

SEQ ID NO: 63853 - DNA, 22 bp, Artificial Sequence
  chemically synthesized
tgttgcctcgtgggacaaggca

SEQ ID NO: 63854 - DNA, 22 bp, Artificial Sequence
  chemically synthesized
cctcgtgggacaaggcattctg

SEQ ID NO: 63855 - DNA, 22 bp, Artificial Sequence
  chemically synthesized
gtgggacaaggcattctgtaaa

SEQ ID NO: 63856 - DNA, 22 bp, Artificial Sequence
  chemically synthesized
tgtaaacgtgtattggacttcc

SEQ ID NO: 63857 - DNA, 22 bp, Artificial Sequence
  chemically synthesized
taaacgtgtattggacttccat

SEQ ID NO: 63858 - DNA, 22 bp, Artificial Sequence
  chemically synthesized
gacttccattgcttaagtcatg

SEQ ID NO: 63859 - DNA, 22 bp, Artificial Sequence
  chemically synthesized
ccattgcttaagtcatgatttg

SEQ ID NO: 63860 - DNA, 22 bp, Artificial Sequence
  chemically synthesized
cattgcttaagtcatgatttgt

SEQ ID NO: 63861 - DNA, 22 bp, Artificial Sequence
  chemically synthesized
cttaagtcatgatttgtttttc

SEQ ID NO: 63862 - DNA, 22 bp, Artificial Sequence
  chemically synthesized
aagtcatgatttgtttttccga

SEQ ID NO: 63863 - DNA, 22 bp, Artificial Sequence
  chemically synthesized
agtcatgatttgtttttccgac

SEQ ID NO: 63864 - DNA, 22 bp, Artificial Sequence
  chemically synthesized
gtttttccgacttccagaactt

SEQ ID NO: 63865 - DNA, 22 bp, Artificial Sequence
  chemically synthesized
tttttccgacttccagaacttt

SEQ ID NO: 63866 - DNA, 22 bp, Artificial Sequence
  chemically synthesized
ttccgacttccagaactttccc

SEQ ID NO: 63867 - DNA, 22 bp, Artificial Sequence
  chemically synthesized
tccgacttccagaactttcccg

SEQ ID NO: 63868 - DNA, 22 bp, Artificial Sequence
  chemically synthesized
ccgacttccagaactttcccgg

SEQ ID NO: 63869 - DNA, 22 bp, Artificial Sequence
  chemically synthesized
cgacttccagaactttcccggt

SEQ ID NO: 63870 - DNA, 22 bp, Artificial Sequence
  chemically synthesized
ccagaactttcccggttctggt

SEQ ID NO: 63871 - DNA, 22 bp, Artificial Sequence
  chemically synthesized
cagaactttcccggttctggtt

SEQ ID NO: 63872 - DNA, 22 bp, Artificial Sequence
  chemically synthesized
tcccggttctggttttctggga

SEQ ID NO: 63873 - DNA, 22 bp, Artificial Sequence
  chemically synthesized
cccggttctggttttctgggat

SEQ ID NO: 63874 - DNA, 22 bp, Artificial Sequence
  chemically synthesized
ccggttctggttttctgggatt

SEQ ID NO: 63875 - DNA, 22 bp, Artificial Sequence
  chemically synthesized
tggttttctgggatttcatgaa

SEQ ID NO: 63876 - DNA, 22 bp, Artificial Sequence
  chemically synthesized
gttttctgggatttcatgaaca

SEQ ID NO: 63877 - DNA, 22 bp, Artificial Sequence
  chemically synthesized
tctgggatttcatgaacaattc

SEQ ID NO: 63878 - DNA, 22 bp, Artificial Sequence
  chemically synthesized
ctgggatttcatgaacaattcc

SEQ ID NO: 63879 - DNA, 22 bp, Artificial Sequence
  chemically synthesized
tgggatttcatgaacaattccc

SEQ ID NO: 63880 - DNA, 22 bp, Artificial Sequence
  chemically synthesized
ggatttcatgaacaattccctg

SEQ ID NO: 63881 - DNA, 22 bp, Artificial Sequence
  chemically synthesized
catgaacaattccctgtttccg

SEQ ID NO: 63882 - DNA, 22 bp, Artificial Sequence
  chemically synthesized
atgaacaattccctgtttccgt

SEQ ID NO: 63883 - DNA, 22 bp, Artificial Sequence
  chemically synthesized
cctgtttccgtaatccatttcc

SEQ ID NO: 63884 - DNA, 22 bp, Artificial Sequence
  chemically synthesized
tttccgtaatccatttcctgca

SEQ ID NO: 63885 - DNA, 22 bp, Artificial Sequence
  chemically synthesized
ccgtaatccatttcctgcacag

SEQ ID NO: 63886 - DNA, 22 bp, Artificial Sequence
  chemically synthesized
cgtaatccatttcctgcacagg

SEQ ID NO: 63887 - DNA, 22 bp, Artificial Sequence
  chemically synthesized
cctgcacaggtgcattgctttc

SEQ ID NO: 63888 - DNA, 22 bp, Artificial Sequence
  chemically synthesized
ctgcacaggtgcattgctttca

SEQ ID NO: 63889 - DNA, 22 bp, Artificial Sequence
  chemically synthesized
cacaggtgcattgctttcaatc

SEQ ID NO: 63890 - DNA, 22 bp, Artificial Sequence
  chemically synthesized
ctttcaatcatctcccctccgg

SEQ ID NO: 63891 - DNA, 22 bp, Artificial Sequence
  chemically synthesized
tcaatcatctcccctccggtta

SEQ ID NO: 63892 - DNA, 22 bp, Artificial Sequence
  chemically synthesized
caatcatctcccctccggttat

SEQ ID NO: 63893 - DNA, 22 bp, Artificial Sequence
  chemically synthesized
aatcatctcccctccggttatc

SEQ ID NO: 63894 - DNA, 22 bp, Artificial Sequence
  chemically synthesized
ccctccggttatcctaaagcct

SEQ ID NO: 63895 - DNA, 22 bp, Artificial Sequence
  chemically synthesized
cggttatcctaaagccttcatt

SEQ ID NO: 63896 - DNA, 22 bp, Artificial Sequence
  chemically synthesized
tcctaaagccttcattatcaat

SEQ ID NO: 63897 - DNA, 22 bp, Artificial Sequence
  chemically synthesized
aagccttcattatcaattgact

SEQ ID NO: 63898 - DNA, 22 bp, Artificial Sequence
  chemically synthesized
cattatcaattgacttttcaca

SEQ ID NO: 63899 - DNA, 22 bp, Artificial Sequence
  chemically synthesized
attatcaattgacttttcacat

SEQ ID NO: 63900 - DNA, 22 bp, Artificial Sequence
  chemically synthesized
tcaattgacttttcacatatga

SEQ ID NO: 63901 - DNA, 22 bp, Artificial Sequence
  chemically synthesized
acttttcacatatgagggtgac

SEQ ID NO: 63902 - DNA, 22 bp, Artificial Sequence
  chemically synthesized
ttcacatatgagggtgacctct

SEQ ID NO: 63903 - DNA, 22 bp, Artificial Sequence
  chemically synthesized
tcacatatgagggtgacctctg

SEQ ID NO: 63904 - DNA, 22 bp, Artificial Sequence
  chemically synthesized
cacatatgagggtgacctctgg

SEQ ID NO: 63905 - DNA, 22 bp, Artificial Sequence
  chemically synthesized
acatatgagggtgacctctgga

SEQ ID NO: 63906 - DNA, 22 bp, Artificial Sequence
  chemically synthesized
tggatcccttctctttggtttg

SEQ ID NO: 63907 - DNA, 22 bp, Artificial Sequence
  chemically synthesized
gatcccttctctttggtttgtt

SEQ ID NO: 63908 - DNA, 22 bp, Artificial Sequence
  chemically synthesized
ctctttggtttgtttgttctct

SEQ ID NO: 63909 - DNA, 22 bp, Artificial Sequence
  chemically synthesized
tctttggtttgtttgttctctt

SEQ ID NO: 63910 - DNA, 22 bp, Artificial Sequence
  chemically synthesized
tttggtttgtttgttctctttt

SEQ ID NO: 63911 - DNA, 22 bp, Artificial Sequence
  chemically synthesized
tggtttgtttgttctcttttcc

SEQ ID NO: 63912 - DNA, 22 bp, Artificial Sequence
  chemically synthesized
ggtttgtttgttctcttttcca

SEQ ID NO: 63913 - DNA, 22 bp, Artificial Sequence
  chemically synthesized
gtttgtttgttctcttttccag

SEQ ID NO: 63914 - DNA, 22 bp, Artificial Sequence
  chemically synthesized
gtttgttctcttttccagagct

SEQ ID NO: 63915 - DNA, 22 bp, Artificial Sequence
  chemically synthesized
tttgttctcttttccagagctg

SEQ ID NO: 63916 - DNA, 22 bp, Artificial Sequence
  chemically synthesized
gttctcttttccagagctgcag

SEQ ID NO: 63917 - DNA, 22 bp, Artificial Sequence
  chemically synthesized
ttctcttttccagagctgcagt

SEQ ID NO: 63918 - DNA, 22 bp, Artificial Sequence
  chemically synthesized
tcttttccagagctgcagtatg

SEQ ID NO: 63919 - DNA, 22 bp, Artificial Sequence
  chemically synthesized
ttttccagagctgcagtatgtt

SEQ ID NO: 63920 - DNA, 22 bp, Artificial Sequence
  chemically synthesized
ttccagagctgcagtatgtttc

SEQ ID NO: 63921 - DNA, 22 bp, Artificial Sequence
  chemically synthesized
tccagagctgcagtatgtttct

SEQ ID NO: 63922 - DNA, 22 bp, Artificial Sequence
  chemically synthesized
ccagagctgcagtatgtttctt

SEQ ID NO: 63923 - DNA, 22 bp, Artificial Sequence
  chemically synthesized
cagagctgcagtatgtttctta

SEQ ID NO: 63924 - DNA, 22 bp, Artificial Sequence
  chemically synthesized
cagtatgtttcttaggtgtttt

SEQ ID NO: 63925 - DNA, 22 bp, Artificial Sequence
  chemically synthesized
cttaggtgttttaaaaaatagc

SEQ ID NO: 63926 - DNA, 22 bp, Artificial Sequence
  chemically synthesized
ttaggtgttttaaaaaatagct

SEQ ID NO: 63927 - DNA, 22 bp, Artificial Sequence
  chemically synthesized
aggtgttttaaaaaatagctaa

SEQ ID NO: 63928 - DNA, 22 bp, Artificial Sequence
  chemically synthesized
ggtgttttaaaaaatagctaag

SEQ ID NO: 63929 - DNA, 22 bp, Artificial Sequence
  chemically synthesized
taaaaaatagctaagaatagtg

SEQ ID NO: 63930 - DNA, 22 bp, Artificial Sequence
  chemically synthesized
aaaaaatagctaagaatagtga

SEQ ID NO: 63931 - DNA, 22 bp, Artificial Sequence
  chemically synthesized
aaaaatagctaagaatagtgaa

SEQ ID NO: 63932 - DNA, 22 bp, Artificial Sequence
  chemically synthesized
agaatagtgaaaacacccttgt

SEQ ID NO: 63933 - DNA, 22 bp, Artificial Sequence
  chemically synthesized
gtaatttagagactctcagaaa

SEQ ID NO: 63934 - DNA, 22 bp, Artificial Sequence
  chemically synthesized
taatttagagactctcagaaaa

SEQ ID NO: 63935 - DNA, 22 bp, Artificial Sequence
  chemically synthesized
agagactctcagaaaaatgaca

SEQ ID NO: 63936 - DNA, 22 bp, Artificial Sequence
  chemically synthesized
gagactctcagaaaaatgacag

SEQ ID NO: 63937 - DNA, 22 bp, Artificial Sequence
  chemically synthesized
tcagaaaaatgacagcaccatt

SEQ ID NO: 63938 - DNA, 22 bp, Artificial Sequence
  chemically synthesized
agaaaaatgacagcaccattta

SEQ ID NO: 63939 - DNA, 22 bp, Artificial Sequence
  chemically synthesized
agagcctggaattacagtttga

SEQ ID NO: 63940 - DNA, 22 bp, Artificial Sequence
  chemically synthesized
gagcctggaattacagtttgac

SEQ ID NO: 63941 - DNA, 22 bp, Artificial Sequence
  chemically synthesized
gaattacagtttgacttcactg

SEQ ID NO: 63942 - DNA, 22 bp, Artificial Sequence
  chemically synthesized
cagtttgacttcactgtgcctt

SEQ ID NO: 63943 - DNA, 22 bp, Artificial Sequence
  chemically synthesized
gacttcactgtgccttctctgc

SEQ ID NO: 63944 - DNA, 22 bp, Artificial Sequence
  chemically synthesized
acttcactgtgccttctctgcc

SEQ ID NO: 63945 - DNA, 22 bp, Artificial Sequence
  chemically synthesized
cactgtgccttctctgccccag

SEQ ID NO: 63946 - DNA, 22 bp, Artificial Sequence
  chemically synthesized
actgtgccttctctgccccagg

SEQ ID NO: 63947 - DNA, 22 bp, Artificial Sequence
  chemically synthesized
tgccttctctgccccaggctcc

SEQ ID NO: 63948 - DNA, 22 bp, Artificial Sequence
  chemically synthesized
ctctgccccaggctcccatggt

SEQ ID NO: 63949 - DNA, 22 bp, Artificial Sequence
  chemically synthesized
tctgccccaggctcccatggtg

SEQ ID NO: 63950 - DNA, 22 bp, Artificial Sequence
  chemically synthesized
tgccccaggctcccatggtggc

SEQ ID NO: 63951 - DNA, 22 bp, Artificial Sequence
  chemically synthesized
ccccaggctcccatggtggcaa

SEQ ID NO: 63952 - DNA, 22 bp, Artificial Sequence
  chemically synthesized
ccatggtggcaagggtttttgg

SEQ ID NO: 63953 - DNA, 22 bp, Artificial Sequence
  chemically synthesized
ttggttgggggaaggggtattg

SEQ ID NO: 63954 - DNA, 22 bp, Artificial Sequence
  chemically synthesized
tggttgggggaaggggtattga

SEQ ID NO: 63955 - DNA, 22 bp, Artificial Sequence
  chemically synthesized
ggttgggggaaggggtattgaa

SEQ ID NO: 63956 - DNA, 22 bp, Artificial Sequence
  chemically synthesized
gttgggggaaggggtattgaat

SEQ ID NO: 63957 - DNA, 22 bp, Artificial Sequence
  chemically synthesized
ggggaaggggtattgaattgcc

SEQ ID NO: 63958 - DNA, 22 bp, Artificial Sequence
  chemically synthesized
aattgcctgtctttgagcagga

SEQ ID NO: 63959 - DNA, 22 bp, Artificial Sequence
  chemically synthesized
cctgtctttgagcaggaaaaga

SEQ ID NO: 63960 - DNA, 22 bp, Artificial Sequence
  chemically synthesized
tctttgagcaggaaaagaatta

SEQ ID NO: 63961 - DNA, 22 bp, Artificial Sequence
  chemically synthesized
tgagcaggaaaagaattacagt

SEQ ID NO: 63962 - DNA, 22 bp, Artificial Sequence
  chemically synthesized
gagcaggaaaagaattacagtt

SEQ ID NO: 63963 - DNA, 22 bp, Artificial Sequence
  chemically synthesized
agcaggaaaagaattacagttt

SEQ ID NO: 63964 - DNA, 22 bp, Artificial Sequence
  chemically synthesized
cagttttccaggtaccttttgt

SEQ ID NO: 63965 - DNA, 22 bp, Artificial Sequence
  chemically synthesized
tccaggtaccttttgtgtgtat

SEQ ID NO: 63966 - DNA, 22 bp, Artificial Sequence
  chemically synthesized
ccaggtaccttttgtgtgtatg

SEQ ID NO: 63967 - DNA, 22 bp, Artificial Sequence
  chemically synthesized
caggtaccttttgtgtgtatgt

SEQ ID NO: 63968 - DNA, 22 bp, Artificial Sequence
  chemically synthesized
ttgtgtgtatgtgctgattgag

SEQ ID NO: 63969 - DNA, 22 bp, Artificial Sequence
  chemically synthesized
tgtgtgtatgtgctgattgagg

SEQ ID NO: 63970 - DNA, 22 bp, Artificial Sequence
  chemically synthesized
gtgtgtatgtgctgattgaggg

SEQ ID NO: 63971 - DNA, 22 bp, Artificial Sequence
  chemically synthesized
tgtgtatgtgctgattgagggc

SEQ ID NO: 63972 - DNA, 22 bp, Artificial Sequence
  chemically synthesized
attgagggcccattgagaatat

SEQ ID NO: 63973 - DNA, 22 bp, Artificial Sequence
  chemically synthesized
agggcccattgagaatattttg

SEQ ID NO: 63974 - DNA, 22 bp, Artificial Sequence
  chemically synthesized
agaatattttgacttttaggga

SEQ ID NO: 63975 - DNA, 22 bp, Artificial Sequence
  chemically synthesized
tgacttttagggaagctccaaa

SEQ ID NO: 63976 - DNA, 22 bp, Artificial Sequence
  chemically synthesized
gacttttagggaagctccaaac

SEQ ID NO: 63977 - DNA, 22 bp, Artificial Sequence
  chemically synthesized
acttttagggaagctccaaact

SEQ ID NO: 63978 - DNA, 22 bp, Artificial Sequence
  chemically synthesized
ttagggaagctccaaactctca

SEQ ID NO: 63979 - DNA, 22 bp, Artificial Sequence
  chemically synthesized
tagggaagctccaaactctcaa

SEQ ID NO: 63980 - DNA, 22 bp, Artificial Sequence
  chemically synthesized
agggaagctccaaactctcaaa

SEQ ID NO: 63981 - DNA, 22 bp, Artificial Sequence
  chemically synthesized
gggaagctccaaactctcaaac

SEQ ID NO: 63982 - DNA, 22 bp, Artificial Sequence
  chemically synthesized
caaactctcaaaccacagggat

SEQ ID NO: 63983 - DNA, 22 bp, Artificial Sequence
  chemically synthesized
tcaaaccacagggatcacaaca

SEQ ID NO: 63984 - DNA, 22 bp, Artificial Sequence
  chemically synthesized
aaaccacagggatcacaacaca

SEQ ID NO: 63985 - DNA, 22 bp, Artificial Sequence
  chemically synthesized
ttatgacgttatatgtaagcat

SEQ ID NO: 63986 - DNA, 22 bp, Artificial Sequence
  chemically synthesized
tgacgttatatgtaagcatcac

SEQ ID NO: 63987 - DNA, 22 bp, Artificial Sequence
  chemically synthesized
tatgtaagcatcacaacaggca

SEQ ID NO: 63988 - DNA, 22 bp, Artificial Sequence
  chemically synthesized
caccccaccctggaaaacagcc

SEQ ID NO: 63989 - DNA, 22 bp, Artificial Sequence
  chemically synthesized
gaaaacagcctgactgtgcccc

SEQ ID NO: 63990 - DNA, 22 bp, Artificial Sequence
  chemically synthesized
actgtgccccatgggcaaacca

SEQ ID NO: 63991 - DNA, 22 bp, Artificial Sequence
  chemically synthesized
tgccccatgggcaaaccagact

SEQ ID NO: 63992 - DNA, 22 bp, Artificial Sequence
  chemically synthesized
gtttatagggggttctactctg

SEQ ID NO: 63993 - DNA, 22 bp, Artificial Sequence
  chemically synthesized
atagggggttctactctgaggt

SEQ ID NO: 63994 - DNA, 22 bp, Artificial Sequence
  chemically synthesized
tagggggttctactctgaggta

SEQ ID NO: 63995 - DNA, 22 bp, Artificial Sequence
  chemically synthesized
tactctgaggtactgatggacc

SEQ ID NO: 63996 - DNA, 22 bp, Artificial Sequence
  chemically synthesized
ctctgaggtactgatggacctt

SEQ ID NO: 63997 - DNA, 22 bp, Artificial Sequence
  chemically synthesized
tgaggtactgatggaccttggg

SEQ ID NO: 63998 - DNA, 22 bp, Artificial Sequence
  chemically synthesized
aggtactgatggaccttgggtg

SEQ ID NO: 63999 - DNA, 22 bp, Artificial Sequence
  chemically synthesized
atggaccttgggtgctattcct

SEQ ID NO: 64000 - DNA, 22 bp, Artificial Sequence
  chemically synthesized
gggtgctattcctgtgataagg

SEQ ID NO: 64001 - DNA, 22 bp, Artificial Sequence
  chemically synthesized
ggtgctattcctgtgataagga

SEQ ID NO: 64002 - DNA, 22 bp, Artificial Sequence
  chemically synthesized
ttcctgtgataaggaaggcagc

SEQ ID NO: 64003 - DNA, 22 bp, Artificial Sequence
  chemically synthesized
ctgtgataaggaaggcagctag

SEQ ID NO: 64004 - DNA, 22 bp, Artificial Sequence
  chemically synthesized
tgataaggaaggcagctagaca

SEQ ID NO: 64005 - DNA, 22 bp, Artificial Sequence
  chemically synthesized
gacaggacttgggagttatctg

SEQ ID NO: 64006 - DNA, 22 bp, Artificial Sequence
  chemically synthesized
gggagttatctgtagtgagatg

SEQ ID NO: 64007 - DNA, 22 bp, Artificial Sequence
  chemically synthesized
ggagttatctgtagtgagatgg

SEQ ID NO: 64008 - DNA, 22 bp, Artificial Sequence
  chemically synthesized
tctgtagtgagatggctgaaaa

SEQ ID NO: 64009 - DNA, 22 bp, Artificial Sequence
  chemically synthesized
tagtgagatggctgaaaagcga

SEQ ID NO: 64010 - DNA, 22 bp, Artificial Sequence
  chemically synthesized
aaaagcgatacagggctggctc

SEQ ID NO: 64011 - DNA, 22 bp, Artificial Sequence
  chemically synthesized
gctctatgccccaggtgtgcat

SEQ ID NO: 64012 - DNA, 22 bp, Artificial Sequence
  chemically synthesized
tatgccccaggtgtgcataagt

SEQ ID NO: 64013 - DNA, 22 bp, Artificial Sequence
  chemically synthesized
tgccccaggtgtgcataagtaa

SEQ ID NO: 64014 - DNA, 22 bp, Artificial Sequence
  chemically synthesized
attccagtgcaaagtccataca

SEQ ID NO: 64015 - DNA, 22 bp, Artificial Sequence
  chemically synthesized
cagtgcaaagtccatacaggta

SEQ ID NO: 64016 - DNA, 22 bp, Artificial Sequence
  chemically synthesized
ctcttagacataacacaccagg

SEQ ID NO: 64017 - DNA, 22 bp, Artificial Sequence
  chemically synthesized
ttagacataacacaccagggtc

SEQ ID NO: 64018 - DNA, 22 bp, Artificial Sequence
  chemically synthesized
agacataacacaccagggtcaa

SEQ ID NO: 64019 - DNA, 22 bp, Artificial Sequence
  chemically synthesized
gacataacacaccagggtcaat

SEQ ID NO: 64020 - DNA, 22 bp, Artificial Sequence
  chemically synthesized
tgaagctagtctagtgcaagct

SEQ ID NO: 64021 - DNA, 22 bp, Artificial Sequence
  chemically synthesized
gaagctagtctagtgcaagcta

SEQ ID NO: 64022 - DNA, 22 bp, Artificial Sequence
  chemically synthesized
aagctagtctagtgcaagctaa

SEQ ID NO: 64023 - DNA, 22 bp, Artificial Sequence
  chemically synthesized
gtctagtgcaagctaacagttg

SEQ ID NO: 64024 - DNA, 22 bp, Artificial Sequence
  chemically synthesized
gtgcaagctaacagttgctttt

SEQ ID NO: 64025 - DNA, 22 bp, Artificial Sequence
  chemically synthesized
acagttgcttttatcacaggct

SEQ ID NO: 64026 - DNA, 22 bp, Artificial Sequence
  chemically synthesized
cttttatcacaggctccaggaa

SEQ ID NO: 64027 - DNA, 22 bp, Artificial Sequence
  chemically synthesized
ttatcacaggctccaggaaggg

SEQ ID NO: 64028 - DNA, 22 bp, Artificial Sequence
  chemically synthesized
tatcacaggctccaggaagggt

SEQ ID NO: 64029 - DNA, 22 bp, Artificial Sequence
  chemically synthesized
atcacaggctccaggaagggtt

SEQ ID NO: 64030 - DNA, 22 bp, Artificial Sequence
  chemically synthesized
tcacaggctccaggaagggttt

SEQ ID NO: 64031 - DNA, 22 bp, Artificial Sequence
  chemically synthesized
caggaagggtttggcctctgat

SEQ ID NO: 64032 - DNA, 22 bp, Artificial Sequence
  chemically synthesized
ggcctctgattagggtgggggc

SEQ ID NO: 64033 - DNA, 22 bp, Artificial Sequence
  chemically synthesized
gcctctgattagggtgggggcg

SEQ ID NO: 64034 - DNA, 22 bp, Artificial Sequence
  chemically synthesized
tgattagggtgggggcgtgggt

SEQ ID NO: 64035 - DNA, 22 bp, Artificial Sequence
  chemically synthesized
attagggtgggggcgtgggtgg

SEQ ID NO: 64036 - DNA, 22 bp, Artificial Sequence
  chemically synthesized
gggtgggggcgtgggtggggta

SEQ ID NO: 64037 - DNA, 22 bp, Artificial Sequence
  chemically synthesized
gcagacctctccatcggtggcc

SEQ ID NO: 64038 - DNA, 22 bp, Artificial Sequence
  chemically synthesized
tccatcggtggccgtttgccca

SEQ ID NO: 64039 - DNA, 22 bp, Artificial Sequence
  chemically synthesized
catcggtggccgtttgcccagg

SEQ ID NO: 64040 - DNA, 22 bp, Artificial Sequence
  chemically synthesized
gcccaggggggcctctttcgga

SEQ ID NO: 64041 - DNA, 22 bp, Artificial Sequence
  chemically synthesized
cccaggggggcctctttcggaa

SEQ ID NO: 64042 - DNA, 22 bp, Artificial Sequence
  chemically synthesized
tttcggaaggctctcttggtga

SEQ ID NO: 64043 - DNA, 22 bp, Artificial Sequence
  chemically synthesized
tcggaaggctctcttggtgatg

SEQ ID NO: 64044 - DNA, 22 bp, Artificial Sequence
  chemically synthesized
cggaaggctctcttggtgatgg

SEQ ID NO: 64045 - DNA, 22 bp, Artificial Sequence
  chemically synthesized
ggaaggctctcttggtgatgga

SEQ ID NO: 64046 - DNA, 22 bp, Artificial Sequence
  chemically synthesized
tcttggtgatggagaattggat

SEQ ID NO: 64047 - DNA, 22 bp, Artificial Sequence
  chemically synthesized
ttggtgatggagaattggattt

SEQ ID NO: 64048 - DNA, 22 bp, Artificial Sequence
  chemically synthesized
ggtgatggagaattggatttta

SEQ ID NO: 64049 - DNA, 22 bp, Artificial Sequence
  chemically synthesized
gtgatggagaattggattttat

SEQ ID NO: 64050 - DNA, 22 bp, Artificial Sequence
  chemically synthesized
gattttatttctcaatgggaat

SEQ ID NO: 64051 - DNA, 22 bp, Artificial Sequence
  chemically synthesized
tatttctcaatgggaatgaaat

SEQ ID NO: 64052 - DNA, 22 bp, Artificial Sequence
  chemically synthesized
atttctcaatgggaatgaaata

SEQ ID NO: 64053 - DNA, 22 bp, Artificial Sequence
  chemically synthesized
tttctcaatgggaatgaaataa

SEQ ID NO: 64054 - DNA, 22 bp, Artificial Sequence
  chemically synthesized
ctcaatgggaatgaaataattt

SEQ ID NO: 64055 - DNA, 22 bp, Artificial Sequence
  chemically synthesized
tcaatgggaatgaaataatttg

SEQ ID NO: 64056 - DNA, 22 bp, Artificial Sequence
  chemically synthesized
aatgggaatgaaataatttgta

SEQ ID NO: 64057 - DNA, 22 bp, Artificial Sequence
  chemically synthesized
gtatgccatgccgtgtggactc

SEQ ID NO: 64058 - DNA, 22 bp, Artificial Sequence
  chemically synthesized
tatgccatgccgtgtggactcc

SEQ ID NO: 64059 - DNA, 22 bp, Artificial Sequence
  chemically synthesized
ccaaaattgtaaaggaggtgaa

SEQ ID NO: 64060 - DNA, 22 bp, Artificial Sequence
  chemically synthesized
taaaggaggtgaagcttcccct

SEQ ID NO: 64061 - DNA, 22 bp, Artificial Sequence
  chemically synthesized
cccctgtctgcactctcccctc

SEQ ID NO: 64062 - DNA, 22 bp, Artificial Sequence
  chemically synthesized
ccctgtctgcactctcccctcc

SEQ ID NO: 64063 - DNA, 22 bp, Artificial Sequence
  chemically synthesized
tctgcactctcccctcctcata

SEQ ID NO: 64064 - DNA, 22 bp, Artificial Sequence
  chemically synthesized
cactctcccctcctcataattg

SEQ ID NO: 64065 - DNA, 22 bp, Artificial Sequence
  chemically synthesized
tcccctcctcataattgtccat

SEQ ID NO: 64066 - DNA, 22 bp, Artificial Sequence
  chemically synthesized
ccctcctcataattgtccattt

SEQ ID NO: 64067 - DNA, 22 bp, Artificial Sequence
  chemically synthesized
ctcataattgtccatttttcat

SEQ ID NO: 64068 - DNA, 22 bp, Artificial Sequence
  chemically synthesized
ataattgtccatttttcatctg

SEQ ID NO: 64069 - DNA, 22 bp, Artificial Sequence
  chemically synthesized
tccatttttcatctgtcgggct

SEQ ID NO: 64070 - DNA, 22 bp, Artificial Sequence
  chemically synthesized
ttcatctgtcgggctgtccacc

SEQ ID NO: 64071 - DNA, 22 bp, Artificial Sequence
  chemically synthesized
tcatctgtcgggctgtccaccc

SEQ ID NO: 64072 - DNA, 22 bp, Artificial Sequence
  chemically synthesized
catctgtcgggctgtccaccca

SEQ ID NO: 64073 - DNA, 22 bp, Artificial Sequence
  chemically synthesized
atctgtcgggctgtccacccat

SEQ ID NO: 64074 - DNA, 22 bp, Artificial Sequence
  chemically synthesized
tcgggctgtccacccatccatc

SEQ ID NO: 64075 - DNA, 22 bp, Artificial Sequence
  chemically synthesized
tccacccatccatcacatatag

SEQ ID NO: 64076 - DNA, 22 bp, Artificial Sequence
  chemically synthesized
tcaggtaccagctactgtgtta

SEQ ID NO: 64077 - DNA, 22 bp, Artificial Sequence
  chemically synthesized
ctgtgttaggatctgtgttccc

SEQ ID NO: 64078 - DNA, 22 bp, Artificial Sequence
  chemically synthesized
tgttaggatctgtgttcccaac

SEQ ID NO: 64079 - DNA, 22 bp, Artificial Sequence
  chemically synthesized
ggatctgtgttcccaactgact

SEQ ID NO: 64080 - DNA, 22 bp, Artificial Sequence
  chemically synthesized
tgttcccaactgacttgcctcc

SEQ ID NO: 64081 - DNA, 22 bp, Artificial Sequence
  chemically synthesized
ccaactgacttgcctccccctg

SEQ ID NO: 64082 - DNA, 22 bp, Artificial Sequence
  chemically synthesized
acttgcctccccctgacgtcat

SEQ ID NO: 64083 - DNA, 22 bp, Artificial Sequence
  chemically synthesized
gcctccccctgacgtcatattc

SEQ ID NO: 64084 - DNA, 22 bp, Artificial Sequence
  chemically synthesized
cctccccctgacgtcatattct

SEQ ID NO: 64085 - DNA, 22 bp, Artificial Sequence
  chemically synthesized
cccctgacgtcatattcttttc

SEQ ID NO: 64086 - DNA, 22 bp, Artificial Sequence
  chemically synthesized
acgtcatattcttttccttttt

SEQ ID NO: 64087 - DNA, 22 bp, Artificial Sequence
  chemically synthesized
ttttcctttttcctctcccttt

SEQ ID NO: 64088 - DNA, 22 bp, Artificial Sequence
  chemically synthesized
ttcctttttcctctcccttttc

SEQ ID NO: 64089 - DNA, 22 bp, Artificial Sequence
  chemically synthesized
tcctttttcctctcccttttcc

SEQ ID NO: 64090 - DNA, 22 bp, Artificial Sequence
  chemically synthesized
cctttttcctctcccttttccc

SEQ ID NO: 64091 - DNA, 22 bp, Artificial Sequence
  chemically synthesized
ctttttcctctcccttttccct

SEQ ID NO: 64092 - DNA, 22 bp, Artificial Sequence
  chemically synthesized
tttcctctcccttttccctttt

SEQ ID NO: 64093 - DNA, 22 bp, Artificial Sequence
  chemically synthesized
ttcctctcccttttcccttttc

SEQ ID NO: 64094 - DNA, 22 bp, Artificial Sequence
  chemically synthesized
tcctctcccttttcccttttct

SEQ ID NO: 64095 - DNA, 22 bp, Artificial Sequence
  chemically synthesized
cctctcccttttcccttttctt

SEQ ID NO: 64096 - DNA, 22 bp, Artificial Sequence
  chemically synthesized
ctctcccttttcccttttcttc

SEQ ID NO: 64097 - DNA, 22 bp, Artificial Sequence
  chemically synthesized
tcccttttcccttttcttctga

SEQ ID NO: 64098 - DNA, 22 bp, Artificial Sequence
  chemically synthesized
ccttttcccttttcttctgacc

SEQ ID NO: 64099 - DNA, 22 bp, Artificial Sequence
  chemically synthesized
ttcccttttcttctgacccaaa

SEQ ID NO: 64100 - DNA, 22 bp, Artificial Sequence
  chemically synthesized
tcccttttcttctgacccaaac

SEQ ID NO: 64101 - DNA, 22 bp, Artificial Sequence
  chemically synthesized
cccttttcttctgacccaaact

SEQ ID NO: 64102 - DNA, 22 bp, Artificial Sequence
  chemically synthesized
ccttttcttctgacccaaacta

SEQ ID NO: 64103 - DNA, 22 bp, Artificial Sequence
  chemically synthesized
ttcttctgacccaaactaggaa

SEQ ID NO: 64104 - DNA, 22 bp, Artificial Sequence
  chemically synthesized
tcttctgacccaaactaggaat

SEQ ID NO: 64105 - DNA, 22 bp, Artificial Sequence
  chemically synthesized
cttctgacccaaactaggaatt

SEQ ID NO: 64106 - DNA, 22 bp, Artificial Sequence
  chemically synthesized
ttctgacccaaactaggaattg

SEQ ID NO: 64107 - DNA, 22 bp, Artificial Sequence
  chemically synthesized
ctgacccaaactaggaattggg

SEQ ID NO: 64108 - DNA, 22 bp, Artificial Sequence
  chemically synthesized
tgacccaaactaggaattgggg

SEQ ID NO: 64109 - DNA, 22 bp, Artificial Sequence
  chemically synthesized
acccaaactaggaattggggaa

SEQ ID NO: 64110 - DNA, 22 bp, Artificial Sequence
  chemically synthesized
ggaattggggaaagggcctgat

SEQ ID NO: 64111 - DNA, 22 bp, Artificial Sequence
  chemically synthesized
gggaaagggcctgataactttg

SEQ ID NO: 64112 - DNA, 22 bp, Artificial Sequence
  chemically synthesized
ataactttgtttctgctgaggt

SEQ ID NO: 64113 - DNA, 22 bp, Artificial Sequence
  chemically synthesized
tgtttctgctgaggtgtaacta

SEQ ID NO: 64114 - DNA, 22 bp, Artificial Sequence
  chemically synthesized
gtttctgctgaggtgtaactaa

SEQ ID NO: 64115 - DNA, 22 bp, Artificial Sequence
  chemically synthesized
tttctgctgaggtgtaactaat

SEQ ID NO: 64116 - DNA, 22 bp, Artificial Sequence
  chemically synthesized
ctgctgaggtgtaactaataaa

SEQ ID NO: 64117 - DNA, 22 bp, Artificial Sequence
  chemically synthesized
tgctgaggtgtaactaataaat

SEQ ID NO: 64118 - DNA, 22 bp, Artificial Sequence
  chemically synthesized
ctgaggtgtaactaataaatac

SEQ ID NO: 64119 - DNA, 22 bp, Artificial Sequence
  chemically synthesized
aggtgtaactaataaataccag

SEQ ID NO: 64120 - DNA, 22 bp, Artificial Sequence
  chemically synthesized
ataaataccaggaggcagcatt

SEQ ID NO: 64121 - DNA, 22 bp, Artificial Sequence
  chemically synthesized
tagttcacaagctcggagcact

SEQ ID NO: 64122 - DNA, 22 bp, Artificial Sequence
  chemically synthesized
agttcacaagctcggagcactt

SEQ ID NO: 64123 - DNA, 22 bp, Artificial Sequence
  chemically synthesized
gttcacaagctcggagcactta

SEQ ID NO: 64124 - DNA, 22 bp, Artificial Sequence
  chemically synthesized
acaagctcggagcacttactct

SEQ ID NO: 64125 - DNA, 22 bp, Artificial Sequence
  chemically synthesized
ggagcacttactctgctctagg

SEQ ID NO: 64126 - DNA, 22 bp, Artificial Sequence
  chemically synthesized
actctgctctaggaactttaca

SEQ ID NO: 64127 - DNA, 22 bp, Artificial Sequence
  chemically synthesized
ctctgctctaggaactttacaa

SEQ ID NO: 64128 - DNA, 22 bp, Artificial Sequence
  chemically synthesized
tgctctaggaactttacaaata

SEQ ID NO: 64129 - DNA, 22 bp, Artificial Sequence
  chemically synthesized
ctctaggaactttacaaatacg

SEQ ID NO: 64130 - DNA, 22 bp, Artificial Sequence
  chemically synthesized
taggaactttacaaatacgcac

SEQ ID NO: 64131 - DNA, 22 bp, Artificial Sequence
  chemically synthesized
ggaactttacaaatacgcactc

SEQ ID NO: 64132 - DNA, 22 bp, Artificial Sequence
  chemically synthesized
tacaaatacgcactcattttat

SEQ ID NO: 64133 - DNA, 22 bp, Artificial Sequence
  chemically synthesized
acaaatacgcactcattttatt

SEQ ID NO: 64134 - DNA, 22 bp, Artificial Sequence
  chemically synthesized
caaatacgcactcattttattt

SEQ ID NO: 64135 - DNA, 22 bp, Artificial Sequence
  chemically synthesized
attttattttcatacaaaccct

SEQ ID NO: 64136 - DNA, 22 bp, Artificial Sequence
  chemically synthesized
tattttcatacaaaccctatga

SEQ ID NO: 64137 - DNA, 22 bp, Artificial Sequence
  chemically synthesized
attttcatacaaaccctatgaa

SEQ ID NO: 64138 - DNA, 22 bp, Artificial Sequence
  chemically synthesized
ttttcatacaaaccctatgaag

SEQ ID NO: 64139 - DNA, 22 bp, Artificial Sequence
  chemically synthesized
tcatacaaaccctatgaagcat

SEQ ID NO: 64140 - DNA, 22 bp, Artificial Sequence
  chemically synthesized
catacaaaccctatgaagcata

SEQ ID NO: 64141 - DNA, 22 bp, Artificial Sequence
  chemically synthesized
atacaaaccctatgaagcatat

SEQ ID NO: 64142 - DNA, 22 bp, Artificial Sequence
  chemically synthesized
tgaagcatatactattattatt

SEQ ID NO: 64143 - DNA, 22 bp, Artificial Sequence
  chemically synthesized
ttattattcctattttacggat

SEQ ID NO: 64144 - DNA, 22 bp, Artificial Sequence
  chemically synthesized
ttattcctattttacggatgag

SEQ ID NO: 64145 - DNA, 22 bp, Artificial Sequence
  chemically synthesized
ttcctattttacggatgagtcc

SEQ ID NO: 64146 - DNA, 22 bp, Artificial Sequence
  chemically synthesized
ctattttacggatgagtccata

SEQ ID NO: 64147 - DNA, 22 bp, Artificial Sequence
  chemically synthesized
ttttacggatgagtccatattt

SEQ ID NO: 64148 - DNA, 22 bp, Artificial Sequence
  chemically synthesized
tacggatgagtccatattttaa

SEQ ID NO: 64149 - DNA, 22 bp, Artificial Sequence
  chemically synthesized
acggatgagtccatattttaaa

SEQ ID NO: 64150 - DNA, 22 bp, Artificial Sequence
  chemically synthesized
cggatgagtccatattttaaat

SEQ ID NO: 64151 - DNA, 22 bp, Artificial Sequence
  chemically synthesized
taaattccagctgaagaaagaa

SEQ ID NO: 64152 - DNA, 22 bp, Artificial Sequence
  chemically synthesized
aaattccagctgaagaaagaac

SEQ ID NO: 64153 - DNA, 22 bp, Artificial Sequence
  chemically synthesized
aattccagctgaagaaagaaca

SEQ ID NO: 64154 - DNA, 22 bp, Artificial Sequence
  chemically synthesized
cagctgaagaaagaacatttgg

SEQ ID NO: 64155 - DNA, 22 bp, Artificial Sequence
  chemically synthesized
aagaaagaacatttggtgataa

SEQ ID NO: 64156 - DNA, 22 bp, Artificial Sequence
  chemically synthesized
ggtgataaatcattaggaatga

SEQ ID NO: 64157 - DNA, 22 bp, Artificial Sequence
  chemically synthesized
gtgataaatcattaggaatgag

SEQ ID NO: 64158 - DNA, 22 bp, Artificial Sequence
  chemically synthesized
ggaatgagctaggagttatttg

SEQ ID NO: 64159 - DNA, 22 bp, Artificial Sequence
  chemically synthesized
ggagttatttgtcatcacagaa

SEQ ID NO: 64160 - DNA, 22 bp, Artificial Sequence
  chemically synthesized
tttgtcatcacagaaccagtct

SEQ ID NO: 64161 - DNA, 22 bp, Artificial Sequence
  chemically synthesized
gtcatcacagaaccagtctgta

SEQ ID NO: 64162 - DNA, 22 bp, Artificial Sequence
  chemically synthesized
tcatcacagaaccagtctgtat

SEQ ID NO: 64163 - DNA, 22 bp, Artificial Sequence
  chemically synthesized
tattgccccaagtctggctttg

SEQ ID NO: 64164 - DNA, 22 bp, Artificial Sequence
  chemically synthesized
ccccaagtctggctttgccaat

SEQ ID NO: 64165 - DNA, 22 bp, Artificial Sequence
  chemically synthesized
gctttgccaattggagattagg

SEQ ID NO: 64166 - DNA, 22 bp, Artificial Sequence
  chemically synthesized
tgccaattggagattagggaga

SEQ ID NO: 64167 - DNA, 22 bp, Artificial Sequence
  chemically synthesized
gccaattggagattagggagat

SEQ ID NO: 64168 - DNA, 22 bp, Artificial Sequence
  chemically synthesized
ccaattggagattagggagatg

SEQ ID NO: 64169 - DNA, 22 bp, Artificial Sequence
  chemically synthesized
gagattagggagatggaatgaa

SEQ ID NO: 64170 - DNA, 22 bp, Artificial Sequence
  chemically synthesized
gggagatggaatgaacactttt

SEQ ID NO: 64171 - DNA, 22 bp, Artificial Sequence
  chemically synthesized
ttcgtcccctttgatatctcat

SEQ ID NO: 64172 - DNA, 22 bp, Artificial Sequence
  chemically synthesized
tcgtcccctttgatatctcatc

SEQ ID NO: 64173 - DNA, 22 bp, Artificial Sequence
  chemically synthesized
cgtcccctttgatatctcatct

SEQ ID NO: 64174 - DNA, 22 bp, Artificial Sequence
  chemically synthesized
gtcccctttgatatctcatctc

SEQ ID NO: 64175 - DNA, 22 bp, Artificial Sequence
  chemically synthesized
tgatatctcatctcactgagct

SEQ ID NO: 64176 - DNA, 22 bp, Artificial Sequence
  chemically synthesized
gatatctcatctcactgagctc

SEQ ID NO: 64177 - DNA, 22 bp, Artificial Sequence
  chemically synthesized
atatctcatctcactgagctct

SEQ ID NO: 64178 - DNA, 22 bp, Artificial Sequence
  chemically synthesized
atctcactgagctctgggccgt

SEQ ID NO: 64179 - DNA, 22 bp, Artificial Sequence
  chemically synthesized
actgagctctgggccgtttcca

SEQ ID NO: 64180 - DNA, 22 bp, Artificial Sequence
  chemically synthesized
agctctgggccgtttccactct

SEQ ID NO: 64181 - DNA, 22 bp, Artificial Sequence
  chemically synthesized
tgggccgtttccactcttctct

SEQ ID NO: 64182 - DNA, 22 bp, Artificial Sequence
  chemically synthesized
ggccgtttccactcttctctcc

SEQ ID NO: 64183 - DNA, 22 bp, Artificial Sequence
  chemically synthesized
ccactcttctctccccatactc

SEQ ID NO: 64184 - DNA, 22 bp, Artificial Sequence
  chemically synthesized
cactcttctctccccatactcc

SEQ ID NO: 64185 - DNA, 22 bp, Artificial Sequence
  chemically synthesized
ttctctccccatactcccatct

SEQ ID NO: 64186 - DNA, 22 bp, Artificial Sequence
  chemically synthesized
ctctccccatactcccatcttg

SEQ ID NO: 64187 - DNA, 22 bp, Artificial Sequence
  chemically synthesized
tctccccatactcccatcttgg

SEQ ID NO: 64188 - DNA, 22 bp, Artificial Sequence
  chemically synthesized
tccccatactcccatcttggca

SEQ ID NO: 64189 - DNA, 22 bp, Artificial Sequence
  chemically synthesized
cccatactcccatcttggcaaa

SEQ ID NO: 64190 - DNA, 22 bp, Artificial Sequence
  chemically synthesized
ccatcttggcaaaaattgcata

SEQ ID NO: 64191 - DNA, 22 bp, Artificial Sequence
  chemically synthesized
ggcaaaaattgcataagattta

SEQ ID NO: 64192 - DNA, 22 bp, Artificial Sequence
  chemically synthesized
gcaaaaattgcataagatttat

SEQ ID NO: 64193 - DNA, 22 bp, Artificial Sequence
  chemically synthesized
cataagatttataagacattag

SEQ ID NO: 64194 - DNA, 22 bp, Artificial Sequence
  chemically synthesized
ataagacattagggtattggag

SEQ ID NO: 64195 - DNA, 22 bp, Artificial Sequence
  chemically synthesized
taagacattagggtattggaga

SEQ ID NO: 64196 - DNA, 22 bp, Artificial Sequence
  chemically synthesized
gggtattggagataatttatta

SEQ ID NO: 64197 - DNA, 22 bp, Artificial Sequence
  chemically synthesized
gagataatttattacaacctcc

SEQ ID NO: 64198 - DNA, 22 bp, Artificial Sequence
  chemically synthesized
attacaacctccttgtttacag

SEQ ID NO: 64199 - DNA, 22 bp, Artificial Sequence
  chemically synthesized
ttacaacctccttgtttacaga

SEQ ID NO: 64200 - DNA, 22 bp, Artificial Sequence
  chemically synthesized
caacctccttgtttacagaggg

SEQ ID NO: 64201 - DNA, 22 bp, Artificial Sequence
  chemically synthesized
cttgtttacagaggggcaaccc

SEQ ID NO: 64202 - DNA, 22 bp, Artificial Sequence
  chemically synthesized
gtttacagaggggcaacccagg

SEQ ID NO: 64203 - DNA, 22 bp, Artificial Sequence
  chemically synthesized
tttacagaggggcaacccaggt

SEQ ID NO: 64204 - DNA, 22 bp, Artificial Sequence
  chemically synthesized
acagaggggcaacccaggtcca

SEQ ID NO: 64205 - DNA, 22 bp, Artificial Sequence
  chemically synthesized
cagaggggcaacccaggtccag

SEQ ID NO: 64206 - DNA, 22 bp, Artificial Sequence
  chemically synthesized
cccagtttagaggccatgcaca

SEQ ID NO: 64207 - DNA, 22 bp, Artificial Sequence
  chemically synthesized
agaggccatgcacagatgagaa

SEQ ID NO: 64208 - DNA, 22 bp, Artificial Sequence
  chemically synthesized
gaggccatgcacagatgagaag

SEQ ID NO: 64209 - DNA, 22 bp, Artificial Sequence
  chemically synthesized
ccagctcccagcccacgtcttc

SEQ ID NO: 64210 - DNA, 22 bp, Artificial Sequence
  chemically synthesized
ccagcccacgtcttcccactct

SEQ ID NO: 64211 - DNA, 22 bp, Artificial Sequence
  chemically synthesized
cccactctcccatgtggcctgt

SEQ ID NO: 64212 - DNA, 22 bp, Artificial Sequence
  chemically synthesized
ccactctcccatgtggcctgtc

SEQ ID NO: 64213 - DNA, 22 bp, Artificial Sequence
  chemically synthesized
tcccatgtggcctgtcagcatc

SEQ ID NO: 64214 - DNA, 22 bp, Artificial Sequence
  chemically synthesized
ccatgtggcctgtcagcatcac

SEQ ID NO: 64215 - DNA, 22 bp, Artificial Sequence
  chemically synthesized
tcagcatcaccctctctcactc

SEQ ID NO: 64216 - DNA, 22 bp, Artificial Sequence
  chemically synthesized
tctcactcttgcttagcctgtg

SEQ ID NO: 64217 - DNA, 22 bp, Artificial Sequence
  chemically synthesized
tcactcttgcttagcctgtgta

SEQ ID NO: 64218 - DNA, 22 bp, Artificial Sequence
  chemically synthesized
actcttgcttagcctgtgtagc

SEQ ID NO: 64219 - DNA, 22 bp, Artificial Sequence
  chemically synthesized
ttgcttagcctgtgtagctcaa

SEQ ID NO: 64220 - DNA, 22 bp, Artificial Sequence
  chemically synthesized
gcttagcctgtgtagctcaagg

SEQ ID NO: 64221 - DNA, 22 bp, Artificial Sequence
  chemically synthesized
cttagcctgtgtagctcaagga

SEQ ID NO: 64222 - DNA, 22 bp, Artificial Sequence
  chemically synthesized
agcctgtgtagctcaaggatgt

SEQ ID NO: 64223 - DNA, 22 bp, Artificial Sequence
  chemically synthesized
gcctgtgtagctcaaggatgta

SEQ ID NO: 64224 - DNA, 22 bp, Artificial Sequence
  chemically synthesized
tgtagctcaaggatgtatttat

SEQ ID NO: 64225 - DNA, 22 bp, Artificial Sequence
  chemically synthesized
aaggatgtatttattgccctag

SEQ ID NO: 64226 - DNA, 22 bp, Artificial Sequence
  chemically synthesized
attgccctaggcgtaagaatgt

SEQ ID NO: 64227 - DNA, 22 bp, Artificial Sequence
  chemically synthesized
ttgccctaggcgtaagaatgtg

SEQ ID NO: 64228 - DNA, 22 bp, Artificial Sequence
  chemically synthesized
ccctaggcgtaagaatgtgctc

SEQ ID NO: 64229 - DNA, 22 bp, Artificial Sequence
  chemically synthesized
ggcgtaagaatgtgctcaggtt

SEQ ID NO: 64230 - DNA, 22 bp, Artificial Sequence
  chemically synthesized
aggtttcttaagtaatgtaggt

SEQ ID NO: 64231 - DNA, 22 bp, Artificial Sequence
  chemically synthesized
cttaagtaatgtaggtgtgcct

SEQ ID NO: 64232 - DNA, 22 bp, Artificial Sequence
  chemically synthesized
ttaagtaatgtaggtgtgcctc

SEQ ID NO: 64233 - DNA, 22 bp, Artificial Sequence
  chemically synthesized
aagtaatgtaggtgtgcctcac

SEQ ID NO: 64234 - DNA, 22 bp, Artificial Sequence
  chemically synthesized
agtaatgtaggtgtgcctcacc

SEQ ID NO: 64235 - DNA, 22 bp, Artificial Sequence
  chemically synthesized
acccatggggcttcactttctc

SEQ ID NO: 64236 - DNA, 22 bp, Artificial Sequence
  chemically synthesized
cactttctctctgtttattgcc

SEQ ID NO: 64237 - DNA, 22 bp, Artificial Sequence
  chemically synthesized
actttctctctgtttattgcca

SEQ ID NO: 64238 - DNA, 22 bp, Artificial Sequence
  chemically synthesized
tctctctgtttattgccagtag

SEQ ID NO: 64239 - DNA, 22 bp, Artificial Sequence
  chemically synthesized
ctctctgtttattgccagtagt

SEQ ID NO: 64240 - DNA, 22 bp, Artificial Sequence
  chemically synthesized
tctctgtttattgccagtagtg

SEQ ID NO: 64241 - DNA, 22 bp, Artificial Sequence
  chemically synthesized
tctgtttattgccagtagtggt

SEQ ID NO: 64242 - DNA, 22 bp, Artificial Sequence
  chemically synthesized
tgtttattgccagtagtggtct

SEQ ID NO: 64243 - DNA, 22 bp, Artificial Sequence
  chemically synthesized
tttattgccagtagtggtctct

SEQ ID NO: 64244 - DNA, 22 bp, Artificial Sequence
  chemically synthesized
attgccagtagtggtctctgtt

SEQ ID NO: 64245 - DNA, 22 bp, Artificial Sequence
  chemically synthesized
ttgccagtagtggtctctgttc

SEQ ID NO: 64246 - DNA, 22 bp, Artificial Sequence
  chemically synthesized
ccagtagtggtctctgttctgt

SEQ ID NO: 64247 - DNA, 22 bp, Artificial Sequence
  chemically synthesized
tgttctgttttcttcagtttct

SEQ ID NO: 64248 - DNA, 22 bp, Artificial Sequence
  chemically synthesized
ttctgttttcttcagtttctcc

SEQ ID NO: 64249 - DNA, 22 bp, Artificial Sequence
  chemically synthesized
tgttttcttcagtttctccccc

SEQ ID NO: 64250 - DNA, 22 bp, Artificial Sequence
  chemically synthesized
ttttcttcagtttctccccctt

SEQ ID NO: 64251 - DNA, 22 bp, Artificial Sequence
  chemically synthesized
tcttcagtttctcccccttgca

SEQ ID NO: 64252 - DNA, 22 bp, Artificial Sequence
  chemically synthesized
cttcagtttctcccccttgcat

SEQ ID NO: 64253 - DNA, 22 bp, Artificial Sequence
  chemically synthesized
ttcagtttctcccccttgcatt

SEQ ID NO: 64254 - DNA, 22 bp, Artificial Sequence
  chemically synthesized
cagtttctcccccttgcattgt

SEQ ID NO: 64255 - DNA, 22 bp, Artificial Sequence
  chemically synthesized
agtttctcccccttgcattgtt

SEQ ID NO: 64256 - DNA, 22 bp, Artificial Sequence
  chemically synthesized
ctcccccttgcattgttgtcta

SEQ ID NO: 64257 - DNA, 22 bp, Artificial Sequence
  chemically synthesized
tcccccttgcattgttgtctaa

SEQ ID NO: 64258 - DNA, 22 bp, Artificial Sequence
  chemically synthesized
ccccttgcattgttgtctaaga

SEQ ID NO: 64259 - DNA, 22 bp, Artificial Sequence
  chemically synthesized
gcattgttgtctaagatggctg

SEQ ID NO: 64260 - DNA, 22 bp, Artificial Sequence
  chemically synthesized
cattgttgtctaagatggctgt

SEQ ID NO: 64261 - DNA, 22 bp, Artificial Sequence
  chemically synthesized
ttgtctaagatggctgtcctgt

SEQ ID NO: 64262 - DNA, 22 bp, Artificial Sequence
  chemically synthesized
tctaagatggctgtcctgtctt

SEQ ID NO: 64263 - DNA, 22 bp, Artificial Sequence
  chemically synthesized
agatggctgtcctgtcttttgt

SEQ ID NO: 64264 - DNA, 22 bp, Artificial Sequence
  chemically synthesized
tcctgtcttttgtccacttccc

SEQ ID NO: 64265 - DNA, 22 bp, Artificial Sequence
  chemically synthesized
tcttttgtccacttcccctcca

SEQ ID NO: 64266 - DNA, 22 bp, Artificial Sequence
  chemically synthesized
ttgtccacttcccctccactcc

SEQ ID NO: 64267 - DNA, 22 bp, Artificial Sequence
  chemically synthesized
tgtccacttcccctccactccc

SEQ ID NO: 64268 - DNA, 22 bp, Artificial Sequence
  chemically synthesized
gtccacttcccctccactcccc

SEQ ID NO: 64269 - DNA, 22 bp, Artificial Sequence
  chemically synthesized
tccacttcccctccactccccg

SEQ ID NO: 64270 - DNA, 22 bp, Artificial Sequence
  chemically synthesized
cccctccactccccgtaccttc

SEQ ID NO: 64271 - DNA, 22 bp, Artificial Sequence
  chemically synthesized
ccctccactccccgtaccttcc

SEQ ID NO: 64272 - DNA, 22 bp, Artificial Sequence
  chemically synthesized
cactccccgtaccttcctttaa

SEQ ID NO: 64273 - DNA, 22 bp, Artificial Sequence
  chemically synthesized
cccgtaccttcctttaatcagc

SEQ ID NO: 64274 - DNA, 22 bp, Artificial Sequence
  chemically synthesized
cctttaatcagcttccgccact

SEQ ID NO: 64275 - DNA, 22 bp, Artificial Sequence
  chemically synthesized
ctttaatcagcttccgccactg

SEQ ID NO: 64276 - DNA, 22 bp, Artificial Sequence
  chemically synthesized
taatcagcttccgccactgcct

SEQ ID NO: 64277 - DNA, 22 bp, Artificial Sequence
  chemically synthesized
aatcagcttccgccactgcctg

SEQ ID NO: 64278 - DNA, 22 bp, Artificial Sequence
  chemically synthesized
atcagcttccgccactgcctga

SEQ ID NO: 64279 - DNA, 22 bp, Artificial Sequence
  chemically synthesized
ccgccactgcctgaggccactc

SEQ ID NO: 64280 - DNA, 22 bp, Artificial Sequence
  chemically synthesized
cgccactgcctgaggccactca

SEQ ID NO: 64281 - DNA, 22 bp, Artificial Sequence
  chemically synthesized
cctgaggccactcagctctggt

SEQ ID NO: 64282 - DNA, 22 bp, Artificial Sequence
  chemically synthesized
aggccactcagctctggtccca

SEQ ID NO: 64283 - DNA, 22 bp, Artificial Sequence
  chemically synthesized
agctctggtcccactggaggcc

SEQ ID NO: 64284 - DNA, 22 bp, Artificial Sequence
  chemically synthesized
tggtcccactggaggccctgtc

SEQ ID NO: 64285 - DNA, 22 bp, Artificial Sequence
  chemically synthesized
gtcccactggaggccctgtctc

SEQ ID NO: 64286 - DNA, 22 bp, Artificial Sequence
  chemically synthesized
gaggccctgtctcccccagggg

SEQ ID NO: 64287 - DNA, 22 bp, Artificial Sequence
  chemically synthesized
tctcccccaggggtccttctgc

SEQ ID NO: 64288 - DNA, 22 bp, Artificial Sequence
  chemically synthesized
ccccaggggtccttctgcttcc

SEQ ID NO: 64289 - DNA, 22 bp, Artificial Sequence
  chemically synthesized
ctgcttcctgttcacctctgat

SEQ ID NO: 64290 - DNA, 22 bp, Artificial Sequence
  chemically synthesized
tgcttcctgttcacctctgatc

SEQ ID NO: 64291 - DNA, 22 bp, Artificial Sequence
  chemically synthesized
cttcctgttcacctctgatccc

SEQ ID NO: 64292 - DNA, 22 bp, Artificial Sequence
  chemically synthesized
cctgttcacctctgatccccca

SEQ ID NO: 64293 - DNA, 22 bp, Artificial Sequence
  chemically synthesized
ctgttcacctctgatcccccag

SEQ ID NO: 64294 - DNA, 22 bp, Artificial Sequence
  chemically synthesized
ttcacctctgatcccccagccc

SEQ ID NO: 64295 - DNA, 22 bp, Artificial Sequence
  chemically synthesized
acctctgatcccccagccctgc

SEQ ID NO: 64296 - DNA, 22 bp, Artificial Sequence
  chemically synthesized
tgatcccccagccctgccatgg

SEQ ID NO: 64297 - DNA, 22 bp, Artificial Sequence
  chemically synthesized
atcccccagccctgccatggcc

SEQ ID NO: 64298 - DNA, 22 bp, Artificial Sequence
  chemically synthesized
ccatggccaagctgatgaggat

SEQ ID NO: 64299 - DNA, 22 bp, Artificial Sequence
  chemically synthesized
atgaggatgggggagggggagg

SEQ ID NO: 64300 - DNA, 22 bp, Artificial Sequence
  chemically synthesized
aatttcctgcactgaagctttg

SEQ ID NO: 64301 - DNA, 22 bp, Artificial Sequence
  chemically synthesized
atttcctgcactgaagctttgc

SEQ ID NO: 64302 - DNA, 22 bp, Artificial Sequence
  chemically synthesized
cctgcactgaagctttgctgtc

SEQ ID NO: 64303 - DNA, 22 bp, Artificial Sequence
  chemically synthesized
ctgcactgaagctttgctgtcc

SEQ ID NO: 64304 - DNA, 22 bp, Artificial Sequence
  chemically synthesized
cactgaagctttgctgtccaca

SEQ ID NO: 64305 - DNA, 22 bp, Artificial Sequence
  chemically synthesized
aagctttgctgtccacagcact

SEQ ID NO: 64306 - DNA, 22 bp, Artificial Sequence
  chemically synthesized
tgctgtccacagcactgggcag

SEQ ID NO: 64307 - DNA, 22 bp, Artificial Sequence
  chemically synthesized
gctgtccacagcactgggcagc

SEQ ID NO: 64308 - DNA, 22 bp, Artificial Sequence
  chemically synthesized
ctgtccacagcactgggcagca

SEQ ID NO: 64309 - DNA, 22 bp, Artificial Sequence
  chemically synthesized
tccacagcactgggcagcagct

SEQ ID NO: 64310 - DNA, 22 bp, Artificial Sequence
  chemically synthesized
ggcagcagctgcctccctggag

SEQ ID NO: 64311 - DNA, 22 bp, Artificial Sequence
  chemically synthesized
cctccctggagtgttgtgtgag

SEQ ID NO: 64312 - DNA, 22 bp, Artificial Sequence
  chemically synthesized
cctggagtgttgtgtgagacct

SEQ ID NO: 64313 - DNA, 22 bp, Artificial Sequence
  chemically synthesized
gagtgttgtgtgagaccttgat

SEQ ID NO: 64314 - DNA, 22 bp, Artificial Sequence
  chemically synthesized
tgtgagaccttgatgctgtctt

SEQ ID NO: 64315 - DNA, 22 bp, Artificial Sequence
  chemically synthesized
gatgctgtctttcttcccaagg

SEQ ID NO: 64316 - DNA, 22 bp, Artificial Sequence
  chemically synthesized
atgctgtctttcttcccaaggc

SEQ ID NO: 64317 - DNA, 22 bp, Artificial Sequence
  chemically synthesized
tctttcttcccaaggcctttgg

SEQ ID NO: 64318 - DNA, 22 bp, Artificial Sequence
  chemically synthesized
tcttcccaaggcctttggcaag

SEQ ID NO: 64319 - DNA, 22 bp, Artificial Sequence
  chemically synthesized
cttcccaaggcctttggcaagg

SEQ ID NO: 64320 - DNA, 22 bp, Artificial Sequence
  chemically synthesized
ttcccaaggcctttggcaaggt

SEQ ID NO: 64321 - DNA, 22 bp, Artificial Sequence
  chemically synthesized
cccaaggcctttggcaaggtag

SEQ ID NO: 64322 - DNA, 22 bp, Artificial Sequence
  chemically synthesized
ccaaggcctttggcaaggtaga

SEQ ID NO: 64323 - DNA, 22 bp, Artificial Sequence
  chemically synthesized
tggcaaggtagaagtcatctcc

SEQ ID NO: 64324 - DNA, 22 bp, Artificial Sequence
  chemically synthesized
ggcaaggtagaagtcatctcct

SEQ ID NO: 64325 - DNA, 22 bp, Artificial Sequence
  chemically synthesized
gcaaggtagaagtcatctcctt

SEQ ID NO: 64326 - DNA, 22 bp, Artificial Sequence
  chemically synthesized
cttgactctccatgctgctaat

SEQ ID NO: 64327 - DNA, 22 bp, Artificial Sequence
  chemically synthesized
gactctccatgctgctaatggg

SEQ ID NO: 64328 - DNA, 22 bp, Artificial Sequence
  chemically synthesized
actctccatgctgctaatgggg

SEQ ID NO: 64329 - DNA, 22 bp, Artificial Sequence
  chemically synthesized
tccatgctgctaatgggggagg

SEQ ID NO: 64330 - DNA, 22 bp, Artificial Sequence
  chemically synthesized
catgctgctaatgggggaggtc

SEQ ID NO: 64331 - DNA, 22 bp, Artificial Sequence
  chemically synthesized
ctaatgggggaggtcaactaag

SEQ ID NO: 64332 - DNA, 22 bp, Artificial Sequence
  chemically synthesized
atgggggaggtcaactaagtcc

SEQ ID NO: 64333 - DNA, 22 bp, Artificial Sequence
  chemically synthesized
agtccatttctgagctagtggg

SEQ ID NO: 64334 - DNA, 22 bp, Artificial Sequence
  chemically synthesized
ctgagctagtgggggctcttag

SEQ ID NO: 64335 - DNA, 22 bp, Artificial Sequence
  chemically synthesized
tgagctagtgggggctcttagg

SEQ ID NO: 64336 - DNA, 22 bp, Artificial Sequence
  chemically synthesized
agctagtgggggctcttaggac

SEQ ID NO: 64337 - DNA, 22 bp, Artificial Sequence
  chemically synthesized
gtgggggctcttaggactccga

SEQ ID NO: 64338 - DNA, 22 bp, Artificial Sequence
  chemically synthesized
ttaggactccgaacaccacact

SEQ ID NO: 64339 - DNA, 22 bp, Artificial Sequence
  chemically synthesized
aggactccgaacaccacactta

SEQ ID NO: 64340 - DNA, 22 bp, Artificial Sequence
  chemically synthesized
ggactccgaacaccacacttaa

SEQ ID NO: 64341 - DNA, 22 bp, Artificial Sequence
  chemically synthesized
cgaacaccacacttaagttatc

SEQ ID NO: 64342 - DNA, 22 bp, Artificial Sequence
  chemically synthesized
aagttatctctgacccagagtc

SEQ ID NO: 64343 - DNA, 22 bp, Artificial Sequence
  chemically synthesized
agttatctctgacccagagtcc

SEQ ID NO: 64344 - DNA, 22 bp, Artificial Sequence
  chemically synthesized
tctctgacccagagtccaattt

SEQ ID NO: 64345 - DNA, 22 bp, Artificial Sequence
  chemically synthesized
tgacccagagtccaatttattt

SEQ ID NO: 64346 - DNA, 22 bp, Artificial Sequence
  chemically synthesized
acccagagtccaatttatttgg

SEQ ID NO: 64347 - DNA, 22 bp, Artificial Sequence
  chemically synthesized
atttggcctgattcaaatgaat

SEQ ID NO: 64348 - DNA, 22 bp, Artificial Sequence
  chemically synthesized
tttggcctgattcaaatgaatg

SEQ ID NO: 64349 - DNA, 22 bp, Artificial Sequence
  chemically synthesized
ggcctgattcaaatgaatgccc

SEQ ID NO: 64350 - DNA, 22 bp, Artificial Sequence
  chemically synthesized
gcctgattcaaatgaatgccca

SEQ ID NO: 64351 - DNA, 22 bp, Artificial Sequence
  chemically synthesized
attcaaatgaatgcccatttta

SEQ ID NO: 64352 - DNA, 22 bp, Artificial Sequence
  chemically synthesized
aaatgaatgcccattttaagaa

SEQ ID NO: 64353 - DNA, 22 bp, Artificial Sequence
  chemically synthesized
taagaatgttttggggtctctt

SEQ ID NO: 64354 - DNA, 22 bp, Artificial Sequence
  chemically synthesized
aagaatgttttggggtctcttc

SEQ ID NO: 64355 - DNA, 22 bp, Artificial Sequence
  chemically synthesized
agaatgttttggggtctcttcc

SEQ ID NO: 64356 - DNA, 22 bp, Artificial Sequence
  chemically synthesized
tggggtctcttcccatcatttc

SEQ ID NO: 64357 - DNA, 22 bp, Artificial Sequence
  chemically synthesized
ggggtctcttcccatcatttcc

SEQ ID NO: 64358 - DNA, 22 bp, Artificial Sequence
  chemically synthesized
gggtctcttcccatcatttcct

SEQ ID NO: 64359 - DNA, 22 bp, Artificial Sequence
  chemically synthesized
ttcccatcatttccttagtgta

SEQ ID NO: 64360 - DNA, 22 bp, Artificial Sequence
  chemically synthesized
cccatcatttccttagtgtagt

SEQ ID NO: 64361 - DNA, 22 bp, Artificial Sequence
  chemically synthesized
ccatcatttccttagtgtagtg

SEQ ID NO: 64362 - DNA, 22 bp, Artificial Sequence
  chemically synthesized
ccttagtgtagtggagaggttt

SEQ ID NO: 64363 - DNA, 22 bp, Artificial Sequence
  chemically synthesized
cttagtgtagtggagaggtttc

SEQ ID NO: 64364 - DNA, 22 bp, Artificial Sequence
  chemically synthesized
agtgtagtggagaggtttctat

SEQ ID NO: 64365 - DNA, 22 bp, Artificial Sequence
  chemically synthesized
gtgtagtggagaggtttctatt

SEQ ID NO: 64366 - DNA, 22 bp, Artificial Sequence
  chemically synthesized
ctattcggaataggatgacatt

SEQ ID NO: 64367 - DNA, 22 bp, Artificial Sequence
  chemically synthesized
tattcggaataggatgacattt

SEQ ID NO: 64368 - DNA, 22 bp, Artificial Sequence
  chemically synthesized
ttcggaataggatgacatttgg

SEQ ID NO: 64369 - DNA, 22 bp, Artificial Sequence
  chemically synthesized
ggaataggatgacatttggtag

SEQ ID NO: 64370 - DNA, 22 bp, Artificial Sequence
  chemically synthesized
ggtagctgagccaaacagatag

SEQ ID NO: 64371 - DNA, 22 bp, Artificial Sequence
  chemically synthesized
gtagctgagccaaacagatagc

SEQ ID NO: 64372 - DNA, 22 bp, Artificial Sequence
  chemically synthesized
agccaaacagatagctgggata

SEQ ID NO: 64373 - DNA, 22 bp, Artificial Sequence
  chemically synthesized
ggatatagggtttggagttgaa

SEQ ID NO: 64374 - DNA, 22 bp, Artificial Sequence
  chemically synthesized
ggagttgaactctccagggaat

SEQ ID NO: 64375 - DNA, 22 bp, Artificial Sequence
  chemically synthesized
gagttgaactctccagggaatg

SEQ ID NO: 64376 - DNA, 22 bp, Artificial Sequence
  chemically synthesized
aactctccagggaatggggtgg

SEQ ID NO: 64377 - DNA, 22 bp, Artificial Sequence
  chemically synthesized
tccagggaatggggtgggaggg

SEQ ID NO: 64378 - DNA, 22 bp, Artificial Sequence
  chemically synthesized
cagggaatggggtgggaggggg

SEQ ID NO: 64379 - DNA, 22 bp, Artificial Sequence
  chemically synthesized
gaggatgacaaaatgagggctc

SEQ ID NO: 64380 - DNA, 22 bp, Artificial Sequence
  chemically synthesized
cctggactcaaactcaaaacct

SEQ ID NO: 64381 - DNA, 22 bp, Artificial Sequence
  chemically synthesized
gactcaaactcaaaaccttttc

SEQ ID NO: 64382 - DNA, 22 bp, Artificial Sequence
  chemically synthesized
aaactcaaaaccttttctgtgt

SEQ ID NO: 64383 - DNA, 22 bp, Artificial Sequence
  chemically synthesized
aaaaccttttctgtgttctcga

SEQ ID NO: 64384 - DNA, 22 bp, Artificial Sequence
  chemically synthesized
ttctgtgttctcgaaatgcctt

SEQ ID NO: 64385 - DNA, 22 bp, Artificial Sequence
  chemically synthesized
tctgtgttctcgaaatgcctta

SEQ ID NO: 64386 - DNA, 22 bp, Artificial Sequence
  chemically synthesized
ctgtgttctcgaaatgccttag

SEQ ID NO: 64387 - DNA, 22 bp, Artificial Sequence
  chemically synthesized
tgtgttctcgaaatgccttaga

SEQ ID NO: 64388 - DNA, 22 bp, Artificial Sequence
  chemically synthesized
tgttctcgaaatgccttagatg

SEQ ID NO: 64389 - DNA, 22 bp, Artificial Sequence
  chemically synthesized
tcgaaatgccttagatgtttac

SEQ ID NO: 64390 - DNA, 22 bp, Artificial Sequence
  chemically synthesized
gaaatgccttagatgtttacct

SEQ ID NO: 64391 - DNA, 22 bp, Artificial Sequence
  chemically synthesized
agatgtttacctaagagaaatg

SEQ ID NO: 64392 - DNA, 22 bp, Artificial Sequence
  chemically synthesized
gatgtttacctaagagaaatgt

SEQ ID NO: 64393 - DNA, 22 bp, Artificial Sequence
  chemically synthesized
acctaagagaaatgtagacata

SEQ ID NO: 64394 - DNA, 22 bp, Artificial Sequence
  chemically synthesized
cctaagagaaatgtagacatac

SEQ ID NO: 64395 - DNA, 22 bp, Artificial Sequence
  chemically synthesized
agagaaatgtagacatacattc

SEQ ID NO: 64396 - DNA, 22 bp, Artificial Sequence
  chemically synthesized
ctataaacacatctacacagtg

SEQ ID NO: 64397 - DNA, 22 bp, Artificial Sequence
  chemically synthesized
taaacacatctacacagtgtcc

SEQ ID NO: 64398 - DNA, 22 bp, Artificial Sequence
  chemically synthesized
cacagtgtccattgtagcactg

SEQ ID NO: 64399 - DNA, 22 bp, Artificial Sequence
  chemically synthesized
tagcactgttcatagtggtcaa

SEQ ID NO: 64400 - DNA, 22 bp, Artificial Sequence
  chemically synthesized
ttcatagtggtcaaaaagtggt

SEQ ID NO: 64401 - DNA, 22 bp, Artificial Sequence
  chemically synthesized
atagtggtcaaaaagtggtcac

SEQ ID NO: 64402 - DNA, 22 bp, Artificial Sequence
  chemically synthesized
aatggataaacgccctatggtg

SEQ ID NO: 64403 - DNA, 22 bp, Artificial Sequence
  chemically synthesized
tggtggaatacaactcaacagt

SEQ ID NO: 64404 - DNA, 22 bp, Artificial Sequence
  chemically synthesized
aacagtagaagaatgaaagagt

SEQ ID NO: 64405 - DNA, 22 bp, Artificial Sequence
  chemically synthesized
cacaccatggatgaatcccaga

SEQ ID NO: 64406 - DNA, 22 bp, Artificial Sequence
  chemically synthesized
tgctctgtggaagaaattaaac

SEQ ID NO: 64407 - DNA, 22 bp, Artificial Sequence
  chemically synthesized
ctctgtggaagaaattaaacac

SEQ ID NO: 64408 - DNA, 22 bp, Artificial Sequence
  chemically synthesized
tgtggaagaaattaaacacaaa

SEQ ID NO: 64409 - DNA, 22 bp, Artificial Sequence
  chemically synthesized
tggaagaaattaaacacaaaag

SEQ ID NO: 64410 - DNA, 22 bp, Artificial Sequence
  chemically synthesized
aacacaaaagacgatatcctgt

SEQ ID NO: 64411 - DNA, 22 bp, Artificial Sequence
  chemically synthesized
tatgagtccatttgtaacaaat

SEQ ID NO: 64412 - DNA, 22 bp, Artificial Sequence
  chemically synthesized
gtaacaaattctagaattctca

SEQ ID NO: 64413 - DNA, 22 bp, Artificial Sequence
  chemically synthesized
taacaaattctagaattctcaa

SEQ ID NO: 64414 - DNA, 22 bp, Artificial Sequence
  chemically synthesized
tagaattctcaacactgtggtg

SEQ ID NO: 64415 - DNA, 22 bp, Artificial Sequence
  chemically synthesized
gaattctcaacactgtggtggt

SEQ ID NO: 64416 - DNA, 22 bp, Artificial Sequence
  chemically synthesized
tcaacactgtggtggtaggtgg

SEQ ID NO: 64417 - DNA, 22 bp, Artificial Sequence
  chemically synthesized
aacactgtggtggtaggtgggg

SEQ ID NO: 64418 - DNA, 22 bp, Artificial Sequence
  chemically synthesized
tggtggtaggtgggggttcagt

SEQ ID NO: 64419 - DNA, 22 bp, Artificial Sequence
  chemically synthesized
agtggttagaaggaaggggtca

SEQ ID NO: 64420 - DNA, 22 bp, Artificial Sequence
  chemically synthesized
gaaggaaggggtcagagggtta

SEQ ID NO: 64421 - DNA, 22 bp, Artificial Sequence
  chemically synthesized
gggaaggggattgacagcaaag

SEQ ID NO: 64422 - DNA, 22 bp, Artificial Sequence
  chemically synthesized
acagcaaaggggcatgaggggg

SEQ ID NO: 64423 - DNA, 22 bp, Artificial Sequence
  chemically synthesized
tctagactggtggacgtgttct

SEQ ID NO: 64424 - DNA, 22 bp, Artificial Sequence
  chemically synthesized
ctagactggtggacgtgttctg

SEQ ID NO: 64425 - DNA, 22 bp, Artificial Sequence
  chemically synthesized
tagactggtggacgtgttctgt

SEQ ID NO: 64426 - DNA, 22 bp, Artificial Sequence
  chemically synthesized
gactggtggacgtgttctgtat

SEQ ID NO: 64427 - DNA, 22 bp, Artificial Sequence
  chemically synthesized
gtggacgtgttctgtatcttga

SEQ ID NO: 64428 - DNA, 22 bp, Artificial Sequence
  chemically synthesized
tgtatcttgattttggtggagg

SEQ ID NO: 64429 - DNA, 22 bp, Artificial Sequence
  chemically synthesized
tatcttgattttggtggaggcc

SEQ ID NO: 64430 - DNA, 22 bp, Artificial Sequence
  chemically synthesized
gattttggtggaggccacacag

SEQ ID NO: 64431 - DNA, 22 bp, Artificial Sequence
  chemically synthesized
attttggtggaggccacacagc

SEQ ID NO: 64432 - DNA, 22 bp, Artificial Sequence
  chemically synthesized
tggtggaggccacacagctgta

SEQ ID NO: 64433 - DNA, 22 bp, Artificial Sequence
  chemically synthesized
ggtggaggccacacagctgtat

SEQ ID NO: 64434 - DNA, 22 bp, Artificial Sequence
  chemically synthesized
gtggaggccacacagctgtata

SEQ ID NO: 64435 - DNA, 22 bp, Artificial Sequence
  chemically synthesized
tatacaactggcaaattgaatc

SEQ ID NO: 64436 - DNA, 22 bp, Artificial Sequence
  chemically synthesized
gcaaattgaatccaactgtaca

SEQ ID NO: 64437 - DNA, 22 bp, Artificial Sequence
  chemically synthesized
aatccaactgtacacttaaaat

SEQ ID NO: 64438 - DNA, 22 bp, Artificial Sequence
  chemically synthesized
tacacttaaaatgaatgacttt

SEQ ID NO: 64439 - DNA, 22 bp, Artificial Sequence
  chemically synthesized
aaaatgaatgacttttgttgta

SEQ ID NO: 64440 - DNA, 22 bp, Artificial Sequence
  chemically synthesized
aaatgaatgacttttgttgtat

SEQ ID NO: 64441 - DNA, 22 bp, Artificial Sequence
  chemically synthesized
ttgttgtatgtaaagtatacct

SEQ ID NO: 64442 - DNA, 22 bp, Artificial Sequence
  chemically synthesized
tgttgtatgtaaagtatacctt

SEQ ID NO: 64443 - DNA, 22 bp, Artificial Sequence
  chemically synthesized
gttgtatgtaaagtatacctta

SEQ ID NO: 64444 - DNA, 22 bp, Artificial Sequence
  chemically synthesized
ttgtatgtaaagtataccttaa

SEQ ID NO: 64445 - DNA, 22 bp, Artificial Sequence
  chemically synthesized
tatgtaaagtataccttaataa

SEQ ID NO: 64446 - DNA, 22 bp, Artificial Sequence
  chemically synthesized
aataaagctaaagcgaaacaaa

SEQ ID NO: 64447 - DNA, 22 bp, Artificial Sequence
  chemically synthesized
ataaagctaaagcgaaacaaaa

SEQ ID NO: 64448 - DNA, 22 bp, Artificial Sequence
  chemically synthesized
aagcgaaacaaaacaaaacacc

SEQ ID NO: 64449 - DNA, 22 bp, Artificial Sequence
  chemically synthesized
gagtggaaccaagtctgtctgt

SEQ ID NO: 64450 - DNA, 22 bp, Artificial Sequence
  chemically synthesized
tctgtaacctttaactgtttgg

SEQ ID NO: 64451 - DNA, 22 bp, Artificial Sequence
  chemically synthesized
taacctttaactgtttgggtct

SEQ ID NO: 64452 - DNA, 22 bp, Artificial Sequence
  chemically synthesized
taactgtttgggtctcctcaag

SEQ ID NO: 64453 - DNA, 22 bp, Artificial Sequence
  chemically synthesized
aactgtttgggtctcctcaaga

SEQ ID NO: 64454 - DNA, 22 bp, Artificial Sequence
  chemically synthesized
actgtttgggtctcctcaagac

SEQ ID NO: 64455 - DNA, 22 bp, Artificial Sequence
  chemically synthesized
tttgggtctcctcaagactcta

SEQ ID NO: 64456 - DNA, 22 bp, Artificial Sequence
  chemically synthesized
gggtctcctcaagactctagcc

SEQ ID NO: 64457 - DNA, 22 bp, Artificial Sequence
  chemically synthesized
ggtctcctcaagactctagccg

SEQ ID NO: 64458 - DNA, 22 bp, Artificial Sequence
  chemically synthesized
ctcaagactctagccgtctttc

SEQ ID NO: 64459 - DNA, 22 bp, Artificial Sequence
  chemically synthesized
aagactctagccgtctttcagg

SEQ ID NO: 64460 - DNA, 22 bp, Artificial Sequence
  chemically synthesized
tagccgtctttcagggtagcac

SEQ ID NO: 64461 - DNA, 22 bp, Artificial Sequence
  chemically synthesized
gccgtctttcagggtagcacca

SEQ ID NO: 64462 - DNA, 22 bp, Artificial Sequence
  chemically synthesized
tcagggtagcaccaaagtacat

SEQ ID NO: 64463 - DNA, 22 bp, Artificial Sequence
  chemically synthesized
cagggtagcaccaaagtacatt

SEQ ID NO: 64464 - DNA, 22 bp, Artificial Sequence
  chemically synthesized
agggtagcaccaaagtacattt

SEQ ID NO: 64465 - DNA, 22 bp, Artificial Sequence
  chemically synthesized
cagggaaatgagaatgcccttt

SEQ ID NO: 64466 - DNA, 22 bp, Artificial Sequence
  chemically synthesized
agggaaatgagaatgccctttg

SEQ ID NO: 64467 - DNA, 22 bp, Artificial Sequence
  chemically synthesized
tgtattctgagattttatagaa

SEQ ID NO: 64468 - DNA, 22 bp, Artificial Sequence
  chemically synthesized
gtattctgagattttatagaag

SEQ ID NO: 64469 - DNA, 22 bp, Artificial Sequence
  chemically synthesized
tattctgagattttatagaagt

SEQ ID NO: 64470 - DNA, 22 bp, Artificial Sequence
  chemically synthesized
tgagattttatagaagttggta

SEQ ID NO: 64471 - DNA, 22 bp, Artificial Sequence
  chemically synthesized
agattttatagaagttggtaat

SEQ ID NO: 64472 - DNA, 22 bp, Artificial Sequence
  chemically synthesized
tatagaagttggtaatgacaga

SEQ ID NO: 64473 - DNA, 22 bp, Artificial Sequence
  chemically synthesized
atagaagttggtaatgacagag

SEQ ID NO: 64474 - DNA, 22 bp, Artificial Sequence
  chemically synthesized
tagaagttggtaatgacagaga

SEQ ID NO: 64475 - DNA, 22 bp, Artificial Sequence
  chemically synthesized
gtaatgacagagagagagagag

SEQ ID NO: 64476 - DNA, 22 bp, Artificial Sequence
  chemically synthesized
agatggggttatccaccataag

SEQ ID NO: 64477 - DNA, 22 bp, Artificial Sequence
  chemically synthesized
tccaccataagcagagcatttg

SEQ ID NO: 64478 - DNA, 22 bp, Artificial Sequence
  chemically synthesized
gggtctgagaagcgcatgagta

SEQ ID NO: 64479 - DNA, 22 bp, Artificial Sequence
  chemically synthesized
ggtctgagaagcgcatgagtac

SEQ ID NO: 64480 - DNA, 22 bp, Artificial Sequence
  chemically synthesized
agaagcgcatgagtactggtga

SEQ ID NO: 64481 - DNA, 22 bp, Artificial Sequence
  chemically synthesized
gtgagtatgtgaggaaggagag

SEQ ID NO: 64482 - DNA, 22 bp, Artificial Sequence
  chemically synthesized
ttttcctagaattccagcaggc

SEQ ID NO: 64483 - DNA, 22 bp, Artificial Sequence
  chemically synthesized
tcctagaattccagcaggcttc

SEQ ID NO: 64484 - DNA, 22 bp, Artificial Sequence
  chemically synthesized
cctagaattccagcaggcttca

SEQ ID NO: 64485 - DNA, 22 bp, Artificial Sequence
  chemically synthesized
ctagaattccagcaggcttcaa

SEQ ID NO: 64486 - DNA, 22 bp, Artificial Sequence
  chemically synthesized
gaattccagcaggcttcaaaaa

SEQ ID NO: 64487 - DNA, 22 bp, Artificial Sequence
  chemically synthesized
cagcaggcttcaaaaagtaaaa

SEQ ID NO: 64488 - DNA, 22 bp, Artificial Sequence
  chemically synthesized
caaaaagtaaaaaggggaggga

SEQ ID NO: 64489 - DNA, 22 bp, Artificial Sequence
  chemically synthesized
aaaaagtaaaaaggggagggag

SEQ ID NO: 64490 - DNA, 22 bp, Artificial Sequence
  chemically synthesized
agtttttttcttccctagaaat

SEQ ID NO: 64491 - DNA, 22 bp, Artificial Sequence
  chemically synthesized
ttttcttccctagaaatacatt

SEQ ID NO: 64492 - DNA, 22 bp, Artificial Sequence
  chemically synthesized
tttcttccctagaaatacattt

SEQ ID NO: 64493 - DNA, 22 bp, Artificial Sequence
  chemically synthesized
ttcttccctagaaatacattta

SEQ ID NO: 64494 - DNA, 22 bp, Artificial Sequence
  chemically synthesized
tcttccctagaaatacatttat

SEQ ID NO: 64495 - DNA, 22 bp, Artificial Sequence
  chemically synthesized
cttccctagaaatacatttatt

SEQ ID NO: 64496 - DNA, 22 bp, Artificial Sequence
  chemically synthesized
ttccctagaaatacatttattc

SEQ ID NO: 64497 - DNA, 22 bp, Artificial Sequence
  chemically synthesized
ccctagaaatacatttattcta

SEQ ID NO: 64498 - DNA, 22 bp, Artificial Sequence
  chemically synthesized
cctagaaatacatttattctaa

SEQ ID NO: 64499 - DNA, 22 bp, Artificial Sequence
  chemically synthesized
gaaatacatttattctaaacat

SEQ ID NO: 64500 - DNA, 22 bp, Artificial Sequence
  chemically synthesized
attctaaacattagcccaatta

SEQ ID NO: 64501 - DNA, 22 bp, Artificial Sequence
  chemically synthesized
ttctaaacattagcccaattag

SEQ ID NO: 64502 - DNA, 22 bp, Artificial Sequence
  chemically synthesized
taaacattagcccaattagttg

SEQ ID NO: 64503 - DNA, 22 bp, Artificial Sequence
  chemically synthesized
aacattagcccaattagttgtc

SEQ ID NO: 64504 - DNA, 22 bp, Artificial Sequence
  chemically synthesized
gcccaattagttgtcttttgtt

SEQ ID NO: 64505 - DNA, 22 bp, Artificial Sequence
  chemically synthesized
gttgtcttttgtttgtttgttt

SEQ ID NO: 64506 - DNA, 22 bp, Artificial Sequence
  chemically synthesized
tcttttgtttgtttgtttgttt

SEQ ID NO: 64507 - DNA, 22 bp, Artificial Sequence
  chemically synthesized
ttgtttgtttgtttgtttgttt

SEQ ID NO: 64508 - DNA, 22 bp, Artificial Sequence
  chemically synthesized
tgtttgtttgtttgtttgtttt

SEQ ID NO: 64509 - DNA, 22 bp, Artificial Sequence
  chemically synthesized
gtttgtttgtttgtttgttttt

SEQ ID NO: 64510 - DNA, 22 bp, Artificial Sequence
  chemically synthesized
tttgtttgtttgtttgtttttg

SEQ ID NO: 64511 - DNA, 22 bp, Artificial Sequence
  chemically synthesized
gtttgtttgtttgtttttgaga

SEQ ID NO: 64512 - DNA, 22 bp, Artificial Sequence
  chemically synthesized
tttgtttgtttgtttttgagac

SEQ ID NO: 64513 - DNA, 22 bp, Artificial Sequence
  chemically synthesized
gtttgtttgtttttgagacagg

SEQ ID NO: 64514 - DNA, 22 bp, Artificial Sequence
  chemically synthesized
tttgtttgtttttgagacaggg

SEQ ID NO: 64515 - DNA, 22 bp, Artificial Sequence
  chemically synthesized
gtttgtttttgagacagggtct

SEQ ID NO: 64516 - DNA, 22 bp, Artificial Sequence
  chemically synthesized
tttgtttttgagacagggtctc

SEQ ID NO: 64517 - DNA, 22 bp, Artificial Sequence
  chemically synthesized
gtttttgagacagggtctcgct

SEQ ID NO: 64518 - DNA, 22 bp, Artificial Sequence
  chemically synthesized
tttttgagacagggtctcgctg

SEQ ID NO: 64519 - DNA, 22 bp, Artificial Sequence
  chemically synthesized
ttgagacagggtctcgctgtgt

SEQ ID NO: 64520 - DNA, 22 bp, Artificial Sequence
  chemically synthesized
tgagacagggtctcgctgtgtt

SEQ ID NO: 64521 - DNA, 22 bp, Artificial Sequence
  chemically synthesized
gagacagggtctcgctgtgttg

SEQ ID NO: 64522 - DNA, 22 bp, Artificial Sequence
  chemically synthesized
agacagggtctcgctgtgttgc

SEQ ID NO: 64523 - DNA, 22 bp, Artificial Sequence
  chemically synthesized
gctgtgttgcctaggctagagt

SEQ ID NO: 64524 - DNA, 22 bp, Artificial Sequence
  chemically synthesized
tgttgcctaggctagagtgtag

SEQ ID NO: 64525 - DNA, 22 bp, Artificial Sequence
  chemically synthesized
cctaggctagagtgtagtggca

SEQ ID NO: 64526 - DNA, 22 bp, Artificial Sequence
  chemically synthesized
ggctagagtgtagtggcatgtt

SEQ ID NO: 64527 - DNA, 22 bp, Artificial Sequence
  chemically synthesized
gagtgtagtggcatgttcatag

SEQ ID NO: 64528 - DNA, 22 bp, Artificial Sequence
  chemically synthesized
atagctcactgcagccttgatc

SEQ ID NO: 64529 - DNA, 22 bp, Artificial Sequence
  chemically synthesized
actgcagccttgatctcctagg

SEQ ID NO: 64530 - DNA, 22 bp, Artificial Sequence
  chemically synthesized
cagccttgatctcctaggctca

SEQ ID NO: 64531 - DNA, 22 bp, Artificial Sequence
  chemically synthesized
gatctcctaggctcaagccatc

SEQ ID NO: 64532 - DNA, 22 bp, Artificial Sequence
  chemically synthesized
atctcctaggctcaagccatcc

SEQ ID NO: 64533 - DNA, 22 bp, Artificial Sequence
  chemically synthesized
ctaggctcaagccatcctgtca

SEQ ID NO: 64534 - DNA, 22 bp, Artificial Sequence
  chemically synthesized
ggctcaagccatcctgtcacct

SEQ ID NO: 64535 - DNA, 22 bp, Artificial Sequence
  chemically synthesized
aagccatcctgtcacctcagcc

SEQ ID NO: 64536 - DNA, 22 bp, Artificial Sequence
  chemically synthesized
tcacctcagcctcctgagtagc

SEQ ID NO: 64537 - DNA, 22 bp, Artificial Sequence
  chemically synthesized
agcctcctgagtagctgggacg

SEQ ID NO: 64538 - DNA, 22 bp, Artificial Sequence
  chemically synthesized
ctgagtagctgggacgacaggt

SEQ ID NO: 64539 - DNA, 22 bp, Artificial Sequence
  chemically synthesized
agtagctgggacgacaggtgca

SEQ ID NO: 64540 - DNA, 22 bp, Artificial Sequence
  chemically synthesized
ggacgacaggtgcatgccacca

SEQ ID NO: 64541 - DNA, 22 bp, Artificial Sequence
  chemically synthesized
gctaattttgtagagatggagt

SEQ ID NO: 64542 - DNA, 22 bp, Artificial Sequence
  chemically synthesized
attttgtagagatggagtttct

SEQ ID NO: 64543 - DNA, 22 bp, Artificial Sequence
  chemically synthesized
tgtagagatggagtttctccct

SEQ ID NO: 64544 - DNA, 22 bp, Artificial Sequence
  chemically synthesized
gtagagatggagtttctccctg

SEQ ID NO: 64545 - DNA, 22 bp, Artificial Sequence
  chemically synthesized
tagagatggagtttctccctgt

SEQ ID NO: 64546 - DNA, 22 bp, Artificial Sequence
  chemically synthesized
ctccctgttgcccaggctggtc

SEQ ID NO: 64547 - DNA, 22 bp, Artificial Sequence
  chemically synthesized
tccctgttgcccaggctggtct

SEQ ID NO: 64548 - DNA, 22 bp, Artificial Sequence
  chemically synthesized
cctgttgcccaggctggtcttg

SEQ ID NO: 64549 - DNA, 22 bp, Artificial Sequence
  chemically synthesized
ttgcccaggctggtcttgaact

SEQ ID NO: 64550 - DNA, 22 bp, Artificial Sequence
  chemically synthesized
cccaggctggtcttgaactcct

SEQ ID NO: 64551 - DNA, 22 bp, Artificial Sequence
  chemically synthesized
gtcttgaactcctgggctccag

SEQ ID NO: 64552 - DNA, 22 bp, Artificial Sequence
  chemically synthesized
gaactcctgggctccagtgatc

SEQ ID NO: 64553 - DNA, 22 bp, Artificial Sequence
  chemically synthesized
aactcctgggctccagtgatcc

SEQ ID NO: 64554 - DNA, 22 bp, Artificial Sequence
  chemically synthesized
ctgggctccagtgatcctcctg

SEQ ID NO: 64555 - DNA, 22 bp, Artificial Sequence
  chemically synthesized
ggctccagtgatcctcctgcct

SEQ ID NO: 64556 - DNA, 22 bp, Artificial Sequence
  chemically synthesized
cagtgatcctcctgccttgacc

SEQ ID NO: 64557 - DNA, 22 bp, Artificial Sequence
  chemically synthesized
ctgccttgacctcccaaagtgc

SEQ ID NO: 64558 - DNA, 22 bp, Artificial Sequence
  chemically synthesized
ccttgacctcccaaagtgctgg

SEQ ID NO: 64559 - DNA, 22 bp, Artificial Sequence
  chemically synthesized
gacctcccaaagtgctgggatt

SEQ ID NO: 64560 - DNA, 22 bp, Artificial Sequence
  chemically synthesized
acctcccaaagtgctgggatta

SEQ ID NO: 64561 - DNA, 22 bp, Artificial Sequence
  chemically synthesized
ccaaagtgctgggattacaggc

SEQ ID NO: 64562 - DNA, 22 bp, Artificial Sequence
  chemically synthesized
ggattacaggcgagagccactg

SEQ ID NO: 64563 - DNA, 22 bp, Artificial Sequence
  chemically synthesized
caggcgagagccactgtgcctg

SEQ ID NO: 64564 - DNA, 22 bp, Artificial Sequence
  chemically synthesized
tgcctgtcaccaactcagtctt

SEQ ID NO: 64565 - DNA, 22 bp, Artificial Sequence
  chemically synthesized
tcaccaactcagtcttattcat

SEQ ID NO: 64566 - DNA, 22 bp, Artificial Sequence
  chemically synthesized
agtcttattcatcagtatgtct

SEQ ID NO: 64567 - DNA, 22 bp, Artificial Sequence
  chemically synthesized
attcatcagtatgtcttctcct

SEQ ID NO: 64568 - DNA, 22 bp, Artificial Sequence
  chemically synthesized
ttcatcagtatgtcttctcctt

SEQ ID NO: 64569 - DNA, 22 bp, Artificial Sequence
  chemically synthesized
atcagtatgtcttctccttaag

SEQ ID NO: 64570 - DNA, 22 bp, Artificial Sequence
  chemically synthesized
ctccttaagcggagatgctaac

SEQ ID NO: 64571 - DNA, 22 bp, Artificial Sequence
  chemically synthesized
tccttaagcggagatgctaaca

SEQ ID NO: 64572 - DNA, 22 bp, Artificial Sequence
  chemically synthesized
cttaagcggagatgctaacaat

SEQ ID NO: 64573 - DNA, 22 bp, Artificial Sequence
  chemically synthesized
aagcggagatgctaacaatgta

SEQ ID NO: 64574 - DNA, 22 bp, Artificial Sequence
  chemically synthesized
agcggagatgctaacaatgtag

SEQ ID NO: 64575 - DNA, 22 bp, Artificial Sequence
  chemically synthesized
acaatgtagcatctcctgtgct

SEQ ID NO: 64576 - DNA, 22 bp, Artificial Sequence
  chemically synthesized
ctgtgctgaattcctgtaaagt

SEQ ID NO: 64577 - DNA, 22 bp, Artificial Sequence
  chemically synthesized
tgctgaattcctgtaaagtgag

SEQ ID NO: 64578 - DNA, 22 bp, Artificial Sequence
  chemically synthesized
aattcctgtaaagtgagggttt

SEQ ID NO: 64579 - DNA, 22 bp, Artificial Sequence
  chemically synthesized
ctgtaaagtgagggtttttgtt

SEQ ID NO: 64580 - DNA, 22 bp, Artificial Sequence
  chemically synthesized
taaagtgagggtttttgttttt

SEQ ID NO: 64581 - DNA, 22 bp, Artificial Sequence
  chemically synthesized
ttgtttttcctacatccatctt

SEQ ID NO: 64582 - DNA, 22 bp, Artificial Sequence
  chemically synthesized
tgtttttcctacatccatcttc

SEQ ID NO: 64583 - DNA, 22 bp, Artificial Sequence
  chemically synthesized
gtttttcctacatccatcttcc

SEQ ID NO: 64584 - DNA, 22 bp, Artificial Sequence
  chemically synthesized
tttttcctacatccatcttcct

SEQ ID NO: 64585 - DNA, 22 bp, Artificial Sequence
  chemically synthesized
ttcctacatccatcttcctctc

SEQ ID NO: 64586 - DNA, 22 bp, Artificial Sequence
  chemically synthesized
tcctacatccatcttcctctcc

SEQ ID NO: 64587 - DNA, 22 bp, Artificial Sequence
  chemically synthesized
cctacatccatcttcctctcca

SEQ ID NO: 64588 - DNA, 22 bp, Artificial Sequence
  chemically synthesized
ctacatccatcttcctctccag

SEQ ID NO: 64589 - DNA, 22 bp, Artificial Sequence
  chemically synthesized
catccatcttcctctccagatt

SEQ ID NO: 64590 - DNA, 22 bp, Artificial Sequence
  chemically synthesized
cctctccagattccctctcaat

SEQ ID NO: 64591 - DNA, 22 bp, Artificial Sequence
  chemically synthesized
ctctccagattccctctcaatt

SEQ ID NO: 64592 - DNA, 22 bp, Artificial Sequence
  chemically synthesized
tccagattccctctcaatttcc

SEQ ID NO: 64593 - DNA, 22 bp, Artificial Sequence
  chemically synthesized
cagattccctctcaatttccaa

SEQ ID NO: 64594 - DNA, 22 bp, Artificial Sequence
  chemically synthesized
cctctcaatttccaaggtattt

SEQ ID NO: 64595 - DNA, 22 bp, Artificial Sequence
  chemically synthesized
tcaatttccaaggtatttagcg

SEQ ID NO: 64596 - DNA, 22 bp, Artificial Sequence
  chemically synthesized
aatttccaaggtatttagcgta

SEQ ID NO: 64597 - DNA, 22 bp, Artificial Sequence
  chemically synthesized
ccaaggtatttagcgtaaatgc

SEQ ID NO: 64598 - DNA, 22 bp, Artificial Sequence
  chemically synthesized
caaggtatttagcgtaaatgca

SEQ ID NO: 64599 - DNA, 22 bp, Artificial Sequence
  chemically synthesized
agcgtaaatgcaatatctgaac

SEQ ID NO: 64600 - DNA, 22 bp, Artificial Sequence
  chemically synthesized
gcgtaaatgcaatatctgaact

SEQ ID NO: 64601 - DNA, 22 bp, Artificial Sequence
  chemically synthesized
aacttcatttatttggcagatt

SEQ ID NO: 64602 - DNA, 22 bp, Artificial Sequence
  chemically synthesized
catttatttggcagatttgtgt

SEQ ID NO: 64603 - DNA, 22 bp, Artificial Sequence
  chemically synthesized
atttatttggcagatttgtgtg

SEQ ID NO: 64604 - DNA, 22 bp, Artificial Sequence
  chemically synthesized
atttggcagatttgtgtggact

SEQ ID NO: 64605 - DNA, 22 bp, Artificial Sequence
  chemically synthesized
tttggcagatttgtgtggactg

SEQ ID NO: 64606 - DNA, 22 bp, Artificial Sequence
  chemically synthesized
ggcagatttgtgtggactgcct

SEQ ID NO: 64607 - DNA, 22 bp, Artificial Sequence
  chemically synthesized
gcagatttgtgtggactgcctt

SEQ ID NO: 64608 - DNA, 22 bp, Artificial Sequence
  chemically synthesized
gtgtggactgccttttctgaac

SEQ ID NO: 64609 - DNA, 22 bp, Artificial Sequence
  chemically synthesized
tgtggactgccttttctgaacc

SEQ ID NO: 64610 - DNA, 22 bp, Artificial Sequence
  chemically synthesized
ccttttctgaacctatttgggt

SEQ ID NO: 64611 - DNA, 22 bp, Artificial Sequence
  chemically synthesized
ttctgaacctatttgggtgcta

SEQ ID NO: 64612 - DNA, 22 bp, Artificial Sequence
  chemically synthesized
tctgaacctatttgggtgctaa

SEQ ID NO: 64613 - DNA, 22 bp, Artificial Sequence
  chemically synthesized
ctgaacctatttgggtgctaag

SEQ ID NO: 64614 - DNA, 22 bp, Artificial Sequence
  chemically synthesized
tgaacctatttgggtgctaagg

SEQ ID NO: 64615 - DNA, 22 bp, Artificial Sequence
  chemically synthesized
aacctatttgggtgctaaggac

SEQ ID NO: 64616 - DNA, 22 bp, Artificial Sequence
  chemically synthesized
tttgggtgctaaggactgtatg

SEQ ID NO: 64617 - DNA, 22 bp, Artificial Sequence
  chemically synthesized
gggtgctaaggactgtatggat

SEQ ID NO: 64618 - DNA, 22 bp, Artificial Sequence
  chemically synthesized
ggtgctaaggactgtatggatt

SEQ ID NO: 64619 - DNA, 22 bp, Artificial Sequence
  chemically synthesized
aggactgtatggatttgggttc

SEQ ID NO: 64620 - DNA, 22 bp, Artificial Sequence
  chemically synthesized
tatggatttgggttcttaacat

SEQ ID NO: 64621 - DNA, 22 bp, Artificial Sequence
  chemically synthesized
gggttcttaacatggaaaacgt

SEQ ID NO: 64622 - DNA, 22 bp, Artificial Sequence
  chemically synthesized
ggttcttaacatggaaaacgtc

SEQ ID NO: 64623 - DNA, 22 bp, Artificial Sequence
  chemically synthesized
ttaacatggaaaacgtctgtgc

SEQ ID NO: 64624 - DNA, 22 bp, Artificial Sequence
  chemically synthesized
aacatggaaaacgtctgtgcct

SEQ ID NO: 64625 - DNA, 22 bp, Artificial Sequence
  chemically synthesized
acatggaaaacgtctgtgcctg

SEQ ID NO: 64626 - DNA, 22 bp, Artificial Sequence
  chemically synthesized
tgcctgcgtagtgttgggtcct

SEQ ID NO: 64627 - DNA, 22 bp, Artificial Sequence
  chemically synthesized
cgtagtgttgggtcctacctgg

SEQ ID NO: 64628 - DNA, 22 bp, Artificial Sequence
  chemically synthesized
ggtcctacctggccacttggct

SEQ ID NO: 64629 - DNA, 22 bp, Artificial Sequence
  chemically synthesized
cctggccacttggctctcaaca

SEQ ID NO: 64630 - DNA, 22 bp, Artificial Sequence
  chemically synthesized
gccacttggctctcaacacgga

SEQ ID NO: 64631 - DNA, 22 bp, Artificial Sequence
  chemically synthesized
ggctctcaacacggagtgatga

SEQ ID NO: 64632 - DNA, 22 bp, Artificial Sequence
  chemically synthesized
gctctcaacacggagtgatgat

SEQ ID NO: 64633 - DNA, 22 bp, Artificial Sequence
  chemically synthesized
tcaacacggagtgatgatgcct

SEQ ID NO: 64634 - DNA, 22 bp, Artificial Sequence
  chemically synthesized
aacacggagtgatgatgcctag

SEQ ID NO: 64635 - DNA, 22 bp, Artificial Sequence
  chemically synthesized
gggtgttttgacgtgggcagtc

SEQ ID NO: 64636 - DNA, 22 bp, Artificial Sequence
  chemically synthesized
tgacgtgggcagtcagcccagc

SEQ ID NO: 64637 - DNA, 22 bp, Artificial Sequence
  chemically synthesized
gacgtgggcagtcagcccagcc

SEQ ID NO: 64638 - DNA, 22 bp, Artificial Sequence
  chemically synthesized
acgtgggcagtcagcccagcct

SEQ ID NO: 64639 - DNA, 22 bp, Artificial Sequence
  chemically synthesized
gagaactgaggggagcatttct

SEQ ID NO: 64640 - DNA, 22 bp, Artificial Sequence
  chemically synthesized
aggggagcatttctttcttttt

SEQ ID NO: 64641 - DNA, 22 bp, Artificial Sequence
  chemically synthesized
ctttcttttttttttttttctt

SEQ ID NO: 64642 - DNA, 22 bp, Artificial Sequence
  chemically synthesized
tttcttttttttttttttcttt

SEQ ID NO: 64643 - DNA, 22 bp, Artificial Sequence
  chemically synthesized
tcttttttttttttttcttttt

SEQ ID NO: 64644 - DNA, 22 bp, Artificial Sequence
  chemically synthesized
cttttttttttttttctttttt

SEQ ID NO: 64645 - DNA, 22 bp, Artificial Sequence
  chemically synthesized
ttttttttttttttcttttttc

SEQ ID NO: 64646 - DNA, 22 bp, Artificial Sequence
  chemically synthesized
ttttttttttttcttttttctt

SEQ ID NO: 64647 - DNA, 22 bp, Artificial Sequence
  chemically synthesized
tttttttttttcttttttcttt

SEQ ID NO: 64648 - DNA, 22 bp, Artificial Sequence
  chemically synthesized
ttttttttttcttttttctttt

SEQ ID NO: 64649 - DNA, 22 bp, Artificial Sequence
  chemically synthesized
tttttttttcttttttcttttt

SEQ ID NO: 64650 - DNA, 22 bp, Artificial Sequence
  chemically synthesized
ttttttttcttttttctttttt

SEQ ID NO: 64651 - DNA, 22 bp, Artificial Sequence
  chemically synthesized
tttttttcttttttcttttttt

SEQ ID NO: 64652 - DNA, 22 bp, Artificial Sequence
  chemically synthesized
ttttttcttttttctttttttg

SEQ ID NO: 64653 - DNA, 22 bp, Artificial Sequence
  chemically synthesized
tttttcttttttctttttttgg

SEQ ID NO: 64654 - DNA, 22 bp, Artificial Sequence
  chemically synthesized
ttttcttttttctttttttggt

SEQ ID NO: 64655 - DNA, 22 bp, Artificial Sequence
  chemically synthesized
tttcttttttctttttttggtg

SEQ ID NO: 64656 - DNA, 22 bp, Artificial Sequence
  chemically synthesized
ttcttttttctttttttggtga

SEQ ID NO: 64657 - DNA, 22 bp, Artificial Sequence
  chemically synthesized
tcttttttctttttttggtgag

SEQ ID NO: 64658 - DNA, 22 bp, Artificial Sequence
  chemically synthesized
cttttttctttttttggtgaga

SEQ ID NO: 64659 - DNA, 22 bp, Artificial Sequence
  chemically synthesized
ttttttctttttttggtgagac

SEQ ID NO: 64660 - DNA, 22 bp, Artificial Sequence
  chemically synthesized
ttttctttttttggtgagacgg

SEQ ID NO: 64661 - DNA, 22 bp, Artificial Sequence
  chemically synthesized
tttctttttttggtgagacgga

SEQ ID NO: 64662 - DNA, 22 bp, Artificial Sequence
  chemically synthesized
ttctttttttggtgagacggag

SEQ ID NO: 64663 - DNA, 22 bp, Artificial Sequence
  chemically synthesized
tctttttttggtgagacggaga

SEQ ID NO: 64664 - DNA, 22 bp, Artificial Sequence
  chemically synthesized
ctttttttggtgagacggagat

SEQ ID NO: 64665 - DNA, 22 bp, Artificial Sequence
  chemically synthesized
tttttttggtgagacggagatt

SEQ ID NO: 64666 - DNA, 22 bp, Artificial Sequence
  chemically synthesized
tttttggtgagacggagattta

SEQ ID NO: 64667 - DNA, 22 bp, Artificial Sequence
  chemically synthesized
ttttggtgagacggagatttac

SEQ ID NO: 64668 - DNA, 22 bp, Artificial Sequence
  chemically synthesized
tttggtgagacggagatttact

SEQ ID NO: 64669 - DNA, 22 bp, Artificial Sequence
  chemically synthesized
ttggtgagacggagatttactc

SEQ ID NO: 64670 - DNA, 22 bp, Artificial Sequence
  chemically synthesized
tggtgagacggagatttactct

SEQ ID NO: 64671 - DNA, 22 bp, Artificial Sequence
  chemically synthesized
ggtgagacggagatttactctt

SEQ ID NO: 64672 - DNA, 22 bp, Artificial Sequence
  chemically synthesized
gtgagacggagatttactcttg

SEQ ID NO: 64673 - DNA, 22 bp, Artificial Sequence
  chemically synthesized
actcttgttgcccgggctggaa

SEQ ID NO: 64674 - DNA, 22 bp, Artificial Sequence
  chemically synthesized
ctcttgttgcccgggctggaat

SEQ ID NO: 64675 - DNA, 22 bp, Artificial Sequence
  chemically synthesized
ttgttgcccgggctggaatgca

SEQ ID NO: 64676 - DNA, 22 bp, Artificial Sequence
  chemically synthesized
gttgcccgggctggaatgcaat

SEQ ID NO: 64677 - DNA, 22 bp, Artificial Sequence
  chemically synthesized
ttgcccgggctggaatgcaatg

SEQ ID NO: 64678 - DNA, 22 bp, Artificial Sequence
  chemically synthesized
cccgggctggaatgcaatggcg

SEQ ID NO: 64679 - DNA, 22 bp, Artificial Sequence
  chemically synthesized
gaatgcaatggcgcgatctcgg

SEQ ID NO: 64680 - DNA, 22 bp, Artificial Sequence
  chemically synthesized
ggctcactgcatcttctgcctc

SEQ ID NO: 64681 - DNA, 22 bp, Artificial Sequence
  chemically synthesized
actgcatcttctgcctcccagg

SEQ ID NO: 64682 - DNA, 22 bp, Artificial Sequence
  chemically synthesized
catcttctgcctcccaggttca

SEQ ID NO: 64683 - DNA, 22 bp, Artificial Sequence
  chemically synthesized
ctgcctcccaggttcaagcgat

SEQ ID NO: 64684 - DNA, 22 bp, Artificial Sequence
  chemically synthesized
tgcctcccaggttcaagcgatc

SEQ ID NO: 64685 - DNA, 22 bp, Artificial Sequence
  chemically synthesized
cctcccaggttcaagcgatctc

SEQ ID NO: 64686 - DNA, 22 bp, Artificial Sequence
  chemically synthesized
ccaggttcaagcgatctcctgc

SEQ ID NO: 64687 - DNA, 22 bp, Artificial Sequence
  chemically synthesized
aagcgatctcctgcctcagcct

SEQ ID NO: 64688 - DNA, 22 bp, Artificial Sequence
  chemically synthesized
ctgcctcagcctcccgagtagc

SEQ ID NO: 64689 - DNA, 22 bp, Artificial Sequence
  chemically synthesized
cctcagcctcccgagtagctga

SEQ ID NO: 64690 - DNA, 22 bp, Artificial Sequence
  chemically synthesized
agcctcccgagtagctgagatt

SEQ ID NO: 64691 - DNA, 22 bp, Artificial Sequence
  chemically synthesized
ccgagtagctgagattacaggc

SEQ ID NO: 64692 - DNA, 22 bp, Artificial Sequence
  chemically synthesized
agattacaggcatgtattacca

SEQ ID NO: 64693 - DNA, 22 bp, Artificial Sequence
  chemically synthesized
caggcatgtattaccatgcccg

SEQ ID NO: 64694 - DNA, 22 bp, Artificial Sequence
  chemically synthesized
ccatgcccggctaattttgtat

SEQ ID NO: 64695 - DNA, 22 bp, Artificial Sequence
  chemically synthesized
attttgtatttttagtagagac

SEQ ID NO: 64696 - DNA, 22 bp, Artificial Sequence
  chemically synthesized
tgtatttttagtagagacgggg

SEQ ID NO: 64697 - DNA, 22 bp, Artificial Sequence
  chemically synthesized
gtatttttagtagagacggggt

SEQ ID NO: 64698 - DNA, 22 bp, Artificial Sequence
  chemically synthesized
tatttttagtagagacggggtt

SEQ ID NO: 64699 - DNA, 22 bp, Artificial Sequence
  chemically synthesized
ttagtagagacggggtttcact

SEQ ID NO: 64700 - DNA, 22 bp, Artificial Sequence
  chemically synthesized
tagtagagacggggtttcactg

SEQ ID NO: 64701 - DNA, 22 bp, Artificial Sequence
  chemically synthesized
agtagagacggggtttcactgt

SEQ ID NO: 64702 - DNA, 22 bp, Artificial Sequence
  chemically synthesized
gtagagacggggtttcactgtg

SEQ ID NO: 64703 - DNA, 22 bp, Artificial Sequence
  chemically synthesized
cactgtgttgtccaaactgatc

SEQ ID NO: 64704 - DNA, 22 bp, Artificial Sequence
  chemically synthesized
actgtgttgtccaaactgatct

SEQ ID NO: 64705 - DNA, 22 bp, Artificial Sequence
  chemically synthesized
tgttgtccaaactgatcttgaa

SEQ ID NO: 64706 - DNA, 22 bp, Artificial Sequence
  chemically synthesized
tccaaactgatcttgaactcct

SEQ ID NO: 64707 - DNA, 22 bp, Artificial Sequence
  chemically synthesized
atcttgaactcctgacctcagg

SEQ ID NO: 64708 - DNA, 22 bp, Artificial Sequence
  chemically synthesized
gaactcctgacctcaggtgatc

SEQ ID NO: 64709 - DNA, 22 bp, Artificial Sequence
  chemically synthesized
aactcctgacctcaggtgatcc

SEQ ID NO: 64710 - DNA, 22 bp, Artificial Sequence
  chemically synthesized
ctgacctcaggtgatcctcctg

SEQ ID NO: 64711 - DNA, 22 bp, Artificial Sequence
  chemically synthesized
acctcaggtgatcctcctgccc

SEQ ID NO: 64712 - DNA, 22 bp, Artificial Sequence
  chemically synthesized
aggtgatcctcctgccccggcc

SEQ ID NO: 64713 - DNA, 22 bp, Artificial Sequence
  chemically synthesized
ctgccccggcctcccaaagtgc

SEQ ID NO: 64714 - DNA, 22 bp, Artificial Sequence
  chemically synthesized
ccccggcctcccaaagtgctgg

SEQ ID NO: 64715 - DNA, 22 bp, Artificial Sequence
  chemically synthesized
ccaaagtgctgggattacaggt

SEQ ID NO: 64716 - DNA, 22 bp, Artificial Sequence
  chemically synthesized
ggattacaggtgtgagccacag

SEQ ID NO: 64717 - DNA, 22 bp, Artificial Sequence
  chemically synthesized
caggtgtgagccacagcgcctg

SEQ ID NO: 64718 - DNA, 22 bp, Artificial Sequence
  chemically synthesized
gccgggagcatttcaaatgata

SEQ ID NO: 64719 - DNA, 22 bp, Artificial Sequence
  chemically synthesized
caaatgatagttaggacttcct

SEQ ID NO: 64720 - DNA, 22 bp, Artificial Sequence
  chemically synthesized
aaatgatagttaggacttcctt

SEQ ID NO: 64721 - DNA, 22 bp, Artificial Sequence
  chemically synthesized
ggacttccttttactgtactta

SEQ ID NO: 64722 - DNA, 22 bp, Artificial Sequence
  chemically synthesized
ccttttactgtacttaatagct

SEQ ID NO: 64723 - DNA, 22 bp, Artificial Sequence
  chemically synthesized
cttttactgtacttaatagctg

SEQ ID NO: 64724 - DNA, 22 bp, Artificial Sequence
  chemically synthesized
ttactgtacttaatagctgaag

SEQ ID NO: 64725 - DNA, 22 bp, Artificial Sequence
  chemically synthesized
tactgtacttaatagctgaagg

SEQ ID NO: 64726 - DNA, 22 bp, Artificial Sequence
  chemically synthesized
actgtacttaatagctgaaggg

SEQ ID NO: 64727 - DNA, 22 bp, Artificial Sequence
  chemically synthesized
ctgtacttaatagctgaagggg

SEQ ID NO: 64728 - DNA, 22 bp, Artificial Sequence
  chemically synthesized
tacttaatagctgaagggggcc

SEQ ID NO: 64729 - DNA, 22 bp, Artificial Sequence
  chemically synthesized
aatagctgaagggggccaaaag

SEQ ID NO: 64730 - DNA, 22 bp, Artificial Sequence
  chemically synthesized
atagctgaagggggccaaaagt

SEQ ID NO: 64731 - DNA, 22 bp, Artificial Sequence
  chemically synthesized
aagggggccaaaagtgtccatg

SEQ ID NO: 64732 - DNA, 22 bp, Artificial Sequence
  chemically synthesized
gctgccctctggcatcaaaatg

SEQ ID NO: 64733 - DNA, 22 bp, Artificial Sequence
  chemically synthesized
ctgccctctggcatcaaaatga

SEQ ID NO: 64734 - DNA, 22 bp, Artificial Sequence
  chemically synthesized
ccctctggcatcaaaatgaggt

SEQ ID NO: 64735 - DNA, 22 bp, Artificial Sequence
  chemically synthesized
tggcatcaaaatgaggtccttt

SEQ ID NO: 64736 - DNA, 22 bp, Artificial Sequence
  chemically synthesized
gcatcaaaatgaggtccttttt

SEQ ID NO: 64737 - DNA, 22 bp, Artificial Sequence
  chemically synthesized
tttagtagtgctgcatttaaaa

SEQ ID NO: 64738 - DNA, 22 bp, Artificial Sequence
  chemically synthesized
ttagtagtgctgcatttaaaac

SEQ ID NO: 64739 - DNA, 22 bp, Artificial Sequence
  chemically synthesized
tagtagtgctgcatttaaaaca

SEQ ID NO: 64740 - DNA, 22 bp, Artificial Sequence
  chemically synthesized
agtagtgctgcatttaaaacag

SEQ ID NO: 64741 - DNA, 22 bp, Artificial Sequence
  chemically synthesized
gtagtgctgcatttaaaacagc

SEQ ID NO: 64742 - DNA, 22 bp, Artificial Sequence
  chemically synthesized
catttaaaacagcattaagaat

SEQ ID NO: 64743 - DNA, 22 bp, Artificial Sequence
  chemically synthesized
aaaacagcattaagaatacgtt

SEQ ID NO: 64744 - DNA, 22 bp, Artificial Sequence
  chemically synthesized
aaacagcattaagaatacgttt

SEQ ID NO: 64745 - DNA, 22 bp, Artificial Sequence
  chemically synthesized
agaatacgtttttagaacttag

SEQ ID NO: 64746 - DNA, 22 bp, Artificial Sequence
  chemically synthesized
ttagaacttagctttttgcatt

SEQ ID NO: 64747 - DNA, 22 bp, Artificial Sequence
  chemically synthesized
tagaacttagctttttgcattg

SEQ ID NO: 64748 - DNA, 22 bp, Artificial Sequence
  chemically synthesized
agaacttagctttttgcattga

SEQ ID NO: 64749 - DNA, 22 bp, Artificial Sequence
  chemically synthesized
gaacttagctttttgcattgag

SEQ ID NO: 64750 - DNA, 22 bp, Artificial Sequence
  chemically synthesized
agctttttgcattgaggatgcg

SEQ ID NO: 64751 - DNA, 22 bp, Artificial Sequence
  chemically synthesized
gctttttgcattgaggatgcgc

SEQ ID NO: 64752 - DNA, 22 bp, Artificial Sequence
  chemically synthesized
tttgcattgaggatgcgcaggt

SEQ ID NO: 64753 - DNA, 22 bp, Artificial Sequence
  chemically synthesized
ttgcattgaggatgcgcaggtg

SEQ ID NO: 64754 - DNA, 22 bp, Artificial Sequence
  chemically synthesized
tgcattgaggatgcgcaggtgg

SEQ ID NO: 64755 - DNA, 22 bp, Artificial Sequence
  chemically synthesized
gcattgaggatgcgcaggtggc

SEQ ID NO: 64756 - DNA, 22 bp, Artificial Sequence
  chemically synthesized
cattgaggatgcgcaggtggct

SEQ ID NO: 64757 - DNA, 22 bp, Artificial Sequence
  chemically synthesized
aggatgcgcaggtggctgagac

SEQ ID NO: 64758 - DNA, 22 bp, Artificial Sequence
  chemically synthesized
agactaacttctttgcagatga

SEQ ID NO: 64759 - DNA, 22 bp, Artificial Sequence
  chemically synthesized
acttctttgcagatgaccatgg

SEQ ID NO: 64760 - DNA, 22 bp, Artificial Sequence
  chemically synthesized
ctttgcagatgaccatggttga

SEQ ID NO: 64761 - DNA, 22 bp, Artificial Sequence
  chemically synthesized
tttgcagatgaccatggttgaa

SEQ ID NO: 64762 - DNA, 22 bp, Artificial Sequence
  chemically synthesized
tgcagatgaccatggttgaaag

SEQ ID NO: 64763 - DNA, 22 bp, Artificial Sequence
  chemically synthesized
gcagatgaccatggttgaaagt

SEQ ID NO: 64764 - DNA, 22 bp, Artificial Sequence
  chemically synthesized
cagatgaccatggttgaaagtc

SEQ ID NO: 64765 - DNA, 22 bp, Artificial Sequence
  chemically synthesized
aaagtcagctatagagttgcac

SEQ ID NO: 64766 - DNA, 22 bp, Artificial Sequence
  chemically synthesized
tagagttgcacaaccacgtagt

SEQ ID NO: 64767 - DNA, 22 bp, Artificial Sequence
  chemically synthesized
cacaaccacgtagttgggcttc

SEQ ID NO: 64768 - DNA, 22 bp, Artificial Sequence
  chemically synthesized
ggcttcacatatagaagatgtt

SEQ ID NO: 64769 - DNA, 22 bp, Artificial Sequence
  chemically synthesized
cacatatagaagatgttgtcat

SEQ ID NO: 64770 - DNA, 22 bp, Artificial Sequence
  chemically synthesized
acatatagaagatgttgtcatt

SEQ ID NO: 64771 - DNA, 22 bp, Artificial Sequence
  chemically synthesized
tcattttttggtaactctgtca

SEQ ID NO: 64772 - DNA, 22 bp, Artificial Sequence
  chemically synthesized
tttggtaactctgtcagacttt

SEQ ID NO: 64773 - DNA, 22 bp, Artificial Sequence
  chemically synthesized
ttggtaactctgtcagacttta

SEQ ID NO: 64774 - DNA, 22 bp, Artificial Sequence
  chemically synthesized
tggtaactctgtcagactttac

SEQ ID NO: 64775 - DNA, 22 bp, Artificial Sequence
  chemically synthesized
ggtaactctgtcagactttacc

SEQ ID NO: 64776 - DNA, 22 bp, Artificial Sequence
  chemically synthesized
gtaactctgtcagactttacca

SEQ ID NO: 64777 - DNA, 22 bp, Artificial Sequence
  chemically synthesized
tgtcagactttaccaacctggc

SEQ ID NO: 64778 - DNA, 22 bp, Artificial Sequence
  chemically synthesized
tcagactttaccaacctggcgc

SEQ ID NO: 64779 - DNA, 22 bp, Artificial Sequence
  chemically synthesized
taccaacctggcgcacagtctg

SEQ ID NO: 64780 - DNA, 22 bp, Artificial Sequence
  chemically synthesized
accaacctggcgcacagtctgg

SEQ ID NO: 64781 - DNA, 22 bp, Artificial Sequence
  chemically synthesized
ccaacctggcgcacagtctggt

SEQ ID NO: 64782 - DNA, 22 bp, Artificial Sequence
  chemically synthesized
gcgcacagtctggttggcacat

SEQ ID NO: 64783 - DNA, 22 bp, Artificial Sequence
  chemically synthesized
gttggcacataaacttcacatt

SEQ ID NO: 64784 - DNA, 22 bp, Artificial Sequence
  chemically synthesized
gcacataaacttcacatttgct

SEQ ID NO: 64785 - DNA, 22 bp, Artificial Sequence
  chemically synthesized
cacatttgctcttctccagggt

SEQ ID NO: 64786 - DNA, 22 bp, Artificial Sequence
  chemically synthesized
acatttgctcttctccagggtg

SEQ ID NO: 64787 - DNA, 22 bp, Artificial Sequence
  chemically synthesized
gctcttctccagggtgtggggt

SEQ ID NO: 64788 - DNA, 22 bp, Artificial Sequence
  chemically synthesized
ctcttctccagggtgtggggtg

SEQ ID NO: 64789 - DNA, 22 bp, Artificial Sequence
  chemically synthesized
ttctccagggtgtggggtggct

SEQ ID NO: 64790 - DNA, 22 bp, Artificial Sequence
  chemically synthesized
ctccagggtgtggggtggctgt

SEQ ID NO: 64791 - DNA, 22 bp, Artificial Sequence
  chemically synthesized
tccagggtgtggggtggctgtt

SEQ ID NO: 64792 - DNA, 22 bp, Artificial Sequence
  chemically synthesized
cagggtgtggggtggctgttta

SEQ ID NO: 64793 - DNA, 22 bp, Artificial Sequence
  chemically synthesized
tttaaagagggtggatattcat

SEQ ID NO: 64794 - DNA, 22 bp, Artificial Sequence
  chemically synthesized
aaagagggtggatattcatgct

SEQ ID NO: 64795 - DNA, 22 bp, Artificial Sequence
  chemically synthesized
aagagggtggatattcatgcta

SEQ ID NO: 64796 - DNA, 22 bp, Artificial Sequence
  chemically synthesized
atgctaatctttgtgtagcata

SEQ ID NO: 64797 - DNA, 22 bp, Artificial Sequence
  chemically synthesized
atctttgtgtagcataacatgt

SEQ ID NO: 64798 - DNA, 22 bp, Artificial Sequence
  chemically synthesized
tgtgtagcataacatgttactg

SEQ ID NO: 64799 - DNA, 22 bp, Artificial Sequence
  chemically synthesized
gtgtagcataacatgttactgc

SEQ ID NO: 64800 - DNA, 22 bp, Artificial Sequence
  chemically synthesized
tgtagcataacatgttactgca

SEQ ID NO: 64801 - DNA, 22 bp, Artificial Sequence
  chemically synthesized
ctgcaacttgcttttttttttt

SEQ ID NO: 64802 - DNA, 22 bp, Artificial Sequence
  chemically synthesized
caacttgcttttttttttttat

SEQ ID NO: 64803 - DNA, 22 bp, Artificial Sequence
  chemically synthesized
gcttttttttttttatctgaaa

SEQ ID NO: 64804 - DNA, 22 bp, Artificial Sequence
  chemically synthesized
cttttttttttttatctgaaag

SEQ ID NO: 64805 - DNA, 22 bp, Artificial Sequence
  chemically synthesized
ttttttttttatctgaaagttc

SEQ ID NO: 64806 - DNA, 22 bp, Artificial Sequence
  chemically synthesized
tttttttttatctgaaagttca

SEQ ID NO: 64807 - DNA, 22 bp, Artificial Sequence
  chemically synthesized
ttttttttatctgaaagttcaa

SEQ ID NO: 64808 - DNA, 22 bp, Artificial Sequence
  chemically synthesized
tttttttatctgaaagttcaag

SEQ ID NO: 64809 - DNA, 22 bp, Artificial Sequence
  chemically synthesized
ttttttatctgaaagttcaagt

SEQ ID NO: 64810 - DNA, 22 bp, Artificial Sequence
  chemically synthesized
tttttatctgaaagttcaagta

SEQ ID NO: 64811 - DNA, 22 bp, Artificial Sequence
  chemically synthesized
ttttatctgaaagttcaagtag

SEQ ID NO: 64812 - DNA, 22 bp, Artificial Sequence
  chemically synthesized
tttatctgaaagttcaagtaga

SEQ ID NO: 64813 - DNA, 22 bp, Artificial Sequence
  chemically synthesized
ttatctgaaagttcaagtagat

SEQ ID NO: 64814 - DNA, 22 bp, Artificial Sequence
  chemically synthesized
tatctgaaagttcaagtagata

SEQ ID NO: 64815 - DNA, 22 bp, Artificial Sequence
  chemically synthesized
atctgaaagttcaagtagatat

SEQ ID NO: 64816 - DNA, 22 bp, Artificial Sequence
  chemically synthesized
tctgaaagttcaagtagatatc

SEQ ID NO: 64817 - DNA, 22 bp, Artificial Sequence
  chemically synthesized
aaagttcaagtagatatcagaa

SEQ ID NO: 64818 - DNA, 22 bp, Artificial Sequence
  chemically synthesized
aagtagatatcagaagggaaat

SEQ ID NO: 64819 - DNA, 22 bp, Artificial Sequence
  chemically synthesized
gtgggtgctaagaaggttaaaa

SEQ ID NO: 64820 - DNA, 22 bp, Artificial Sequence
  chemically synthesized
tgggtgctaagaaggttaaaat

SEQ ID NO: 64821 - DNA, 22 bp, Artificial Sequence
  chemically synthesized
agaaggttaaaattaccatttt

SEQ ID NO: 64822 - DNA, 22 bp, Artificial Sequence
  chemically synthesized
aaattaccattttgaacagaaa

SEQ ID NO: 64823 - DNA, 22 bp, Artificial Sequence
  chemically synthesized
ccattttgaacagaaatgatat

SEQ ID NO: 64824 - DNA, 22 bp, Artificial Sequence
  chemically synthesized
tgaacagaaatgatatttggaa

SEQ ID NO: 64825 - DNA, 22 bp, Artificial Sequence
  chemically synthesized
gaacagaaatgatatttggaaa

SEQ ID NO: 64826 - DNA, 22 bp, Artificial Sequence
  chemically synthesized
aacagaaatgatatttggaaaa

SEQ ID NO: 64827 - DNA, 22 bp, Artificial Sequence
  chemically synthesized
ggaaaaataacttcccttttag

SEQ ID NO: 64828 - DNA, 22 bp, Artificial Sequence
  chemically synthesized
gaaaaataacttcccttttagg

SEQ ID NO: 64829 - DNA, 22 bp, Artificial Sequence
  chemically synthesized
cccttttaggaaggtaaatcag

SEQ ID NO: 64830 - DNA, 22 bp, Artificial Sequence
  chemically synthesized
ccttttaggaaggtaaatcagt

SEQ ID NO: 64831 - DNA, 22 bp, Artificial Sequence
  chemically synthesized
ttaggaaggtaaatcagtcatt

SEQ ID NO: 64832 - DNA, 22 bp, Artificial Sequence
  chemically synthesized
taggaaggtaaatcagtcattt

SEQ ID NO: 64833 - DNA, 22 bp, Artificial Sequence
  chemically synthesized
aggaaggtaaatcagtcattta

SEQ ID NO: 64834 - DNA, 22 bp, Artificial Sequence
  chemically synthesized
ggaaggtaaatcagtcatttat

SEQ ID NO: 64835 - DNA, 22 bp, Artificial Sequence
  chemically synthesized
atatgctatttgttgaattcct

SEQ ID NO: 64836 - DNA, 22 bp, Artificial Sequence
  chemically synthesized
tatgctatttgttgaattccta

SEQ ID NO: 64837 - DNA, 22 bp, Artificial Sequence
  chemically synthesized
tttgttgaattcctagaatata

SEQ ID NO: 64838 - DNA, 22 bp, Artificial Sequence
  chemically synthesized
gttgaattcctagaatatatga

SEQ ID NO: 64839 - DNA, 22 bp, Artificial Sequence
  chemically synthesized
ttgaattcctagaatatatgaa

SEQ ID NO: 64840 - DNA, 22 bp, Artificial Sequence
  chemically synthesized
aattcctagaatatatgaatat

SEQ ID NO: 64841 - DNA, 22 bp, Artificial Sequence
  chemically synthesized
ctagaatatatgaatatcatgt

SEQ ID NO: 64842 - DNA, 22 bp, Artificial Sequence
  chemically synthesized
gaatatatgaatatcatgtcac

SEQ ID NO: 64843 - DNA, 22 bp, Artificial Sequence
  chemically synthesized
tgctggtactttcaaatataat

SEQ ID NO: 64844 - DNA, 22 bp, Artificial Sequence
  chemically synthesized
gtactttcaaatataatagaag

SEQ ID NO: 64845 - DNA, 22 bp, Artificial Sequence
  chemically synthesized
tcaaatataatagaagcaagta

SEQ ID NO: 64846 - DNA, 22 bp, Artificial Sequence
  chemically synthesized
caaatataatagaagcaagtag

SEQ ID NO: 64847 - DNA, 22 bp, Artificial Sequence
  chemically synthesized
aaatataatagaagcaagtagg

SEQ ID NO: 64848 - DNA, 22 bp, Artificial Sequence
  chemically synthesized
tattgaagaaactcattgggaa

SEQ ID NO: 64849 - DNA, 22 bp, Artificial Sequence
  chemically synthesized
aagaaactcattgggaacacat

SEQ ID NO: 64850 - DNA, 22 bp, Artificial Sequence
  chemically synthesized
attgggaacacatgaaattaat

SEQ ID NO: 64851 - DNA, 22 bp, Artificial Sequence
  chemically synthesized
ggaacacatgaaattaattaga

SEQ ID NO: 64852 - DNA, 22 bp, Artificial Sequence
  chemically synthesized
attagaggcatagagggttaac

SEQ ID NO: 64853 - DNA, 22 bp, Artificial Sequence
  chemically synthesized
gaggcatagagggttaaccagc

SEQ ID NO: 64854 - DNA, 22 bp, Artificial Sequence
  chemically synthesized
accagcaatgtaaggcctagat

SEQ ID NO: 64855 - DNA, 22 bp, Artificial Sequence
  chemically synthesized
gatatgagtcagggagtggtgc

SEQ ID NO: 64856 - DNA, 22 bp, Artificial Sequence
  chemically synthesized
tatgaggttggagaaggatgag

SEQ ID NO: 64857 - DNA, 22 bp, Artificial Sequence
  chemically synthesized
tgaggttggagaaggatgagat

SEQ ID NO: 64858 - DNA, 22 bp, Artificial Sequence
  chemically synthesized
gagaaggatgagattgattctt

SEQ ID NO: 64859 - DNA, 22 bp, Artificial Sequence
  chemically synthesized
attcttcttgctaaggtgacta

SEQ ID NO: 64860 - DNA, 22 bp, Artificial Sequence
  chemically synthesized
ttcttgctaaggtgactaggta

SEQ ID NO: 64861 - DNA, 22 bp, Artificial Sequence
  chemically synthesized
cttgctaaggtgactaggtaga

SEQ ID NO: 64862 - DNA, 22 bp, Artificial Sequence
  chemically synthesized
ttgctaaggtgactaggtagac

SEQ ID NO: 64863 - DNA, 22 bp, Artificial Sequence
  chemically synthesized
gctaaggtgactaggtagacct

SEQ ID NO: 64864 - DNA, 22 bp, Artificial Sequence
  chemically synthesized
ctaaggtgactaggtagacctt

SEQ ID NO: 64865 - DNA, 22 bp, Artificial Sequence
  chemically synthesized
aggtgactaggtagaccttcat

SEQ ID NO: 64866 - DNA, 22 bp, Artificial Sequence
  chemically synthesized
ggtagaccttcattgaggcctt

SEQ ID NO: 64867 - DNA, 22 bp, Artificial Sequence
  chemically synthesized
cattgaggccttgaagtatgag

SEQ ID NO: 64868 - DNA, 22 bp, Artificial Sequence
  chemically synthesized
attgaggccttgaagtatgagc

SEQ ID NO: 64869 - DNA, 22 bp, Artificial Sequence
  chemically synthesized
aggccttgaagtatgagcagga

SEQ ID NO: 64870 - DNA, 22 bp, Artificial Sequence
  chemically synthesized
gaagtatgagcaggattccagg

SEQ ID NO: 64871 - DNA, 22 bp, Artificial Sequence
  chemically synthesized
aagtatgagcaggattccagga

SEQ ID NO: 64872 - DNA, 22 bp, Artificial Sequence
  chemically synthesized
caggaggtaagagaagaagaag

SEQ ID NO: 64873 - DNA, 22 bp, Artificial Sequence
  chemically synthesized
ttacttgggcagaatattttcc

SEQ ID NO: 64874 - DNA, 22 bp, Artificial Sequence
  chemically synthesized
tacttgggcagaatattttcct

SEQ ID NO: 64875 - DNA, 22 bp, Artificial Sequence
  chemically synthesized
acttgggcagaatattttcctt

SEQ ID NO: 64876 - DNA, 22 bp, Artificial Sequence
  chemically synthesized
cttgggcagaatattttccttg

SEQ ID NO: 64877 - DNA, 22 bp, Artificial Sequence
  chemically synthesized
gggcagaatattttccttgatg

SEQ ID NO: 64878 - DNA, 22 bp, Artificial Sequence
  chemically synthesized
ggcagaatattttccttgatgg

SEQ ID NO: 64879 - DNA, 22 bp, Artificial Sequence
  chemically synthesized
tccttgatgggtacggggaact

SEQ ID NO: 64880 - DNA, 22 bp, Artificial Sequence
  chemically synthesized
ccttgatgggtacggggaacta

SEQ ID NO: 64881 - DNA, 22 bp, Artificial Sequence
  chemically synthesized
cttgatgggtacggggaactaa

SEQ ID NO: 64882 - DNA, 22 bp, Artificial Sequence
  chemically synthesized
gatgggtacggggaactaagac

SEQ ID NO: 64883 - DNA, 22 bp, Artificial Sequence
  chemically synthesized
atgggtacggggaactaagact

SEQ ID NO: 64884 - DNA, 22 bp, Artificial Sequence
  chemically synthesized
agactggaatagaaaattggag

SEQ ID NO: 64885 - DNA, 22 bp, Artificial Sequence
  chemically synthesized
gaatagaaaattggagttggat

SEQ ID NO: 64886 - DNA, 22 bp, Artificial Sequence
  chemically synthesized
gagttggattgtggagctctgg

SEQ ID NO: 64887 - DNA, 22 bp, Artificial Sequence
  chemically synthesized
gattgtggagctctggaatgat

SEQ ID NO: 64888 - DNA, 22 bp, Artificial Sequence
  chemically synthesized
tggagctctggaatgatggctt

SEQ ID NO: 64889 - DNA, 22 bp, Artificial Sequence
  chemically synthesized
tggaatgatggcttaaggagtt

SEQ ID NO: 64890 - DNA, 22 bp, Artificial Sequence
  chemically synthesized
gaatgatggcttaaggagttgg

SEQ ID NO: 64891 - DNA, 22 bp, Artificial Sequence
  chemically synthesized
aaggagttggaccatatcctat

SEQ ID NO: 64892 - DNA, 22 bp, Artificial Sequence
  chemically synthesized
aggagttggaccatatcctata

SEQ ID NO: 64893 - DNA, 22 bp, Artificial Sequence
  chemically synthesized
gaccatatcctatagatcacag

SEQ ID NO: 64894 - DNA, 22 bp, Artificial Sequence
  chemically synthesized
tagatcacagagggctgctgaa

SEQ ID NO: 64895 - DNA, 22 bp, Artificial Sequence
  chemically synthesized
ctgaaatactctgatcagaaga

SEQ ID NO: 64896 - DNA, 22 bp, Artificial Sequence
  chemically synthesized
aaatactctgatcagaagacaa

SEQ ID NO: 64897 - DNA, 22 bp, Artificial Sequence
  chemically synthesized
tgatcagaagacaaaggcagca

SEQ ID NO: 64898 - DNA, 22 bp, Artificial Sequence
  chemically synthesized
atcagaagacaaaggcagcatg

SEQ ID NO: 64899 - DNA, 22 bp, Artificial Sequence
  chemically synthesized
ggggatgttaagtgaggactct

SEQ ID NO: 64900 - DNA, 22 bp, Artificial Sequence
  chemically synthesized
agtgaggactctgcaaaggggg

SEQ ID NO: 64901 - DNA, 22 bp, Artificial Sequence
  chemically synthesized
tgcaaagggggtggatgagttg

SEQ ID NO: 64902 - DNA, 22 bp, Artificial Sequence
  chemically synthesized
caaagggggtggatgagttgtt

SEQ ID NO: 64903 - DNA, 22 bp, Artificial Sequence
  chemically synthesized
ttgaaattctctgttataccct

SEQ ID NO: 64904 - DNA, 22 bp, Artificial Sequence
  chemically synthesized
aaattctctgttatacccttca

SEQ ID NO: 64905 - DNA, 22 bp, Artificial Sequence
  chemically synthesized
tctgttatacccttcatgccga

SEQ ID NO: 64906 - DNA, 22 bp, Artificial Sequence
  chemically synthesized
tgttatacccttcatgccgagt

SEQ ID NO: 64907 - DNA, 22 bp, Artificial Sequence
  chemically synthesized
ttatacccttcatgccgagttc

SEQ ID NO: 64908 - DNA, 22 bp, Artificial Sequence
  chemically synthesized
tacccttcatgccgagttctcc

SEQ ID NO: 64909 - DNA, 22 bp, Artificial Sequence
  chemically synthesized
catgccgagttctcccctgttg

SEQ ID NO: 64910 - DNA, 22 bp, Artificial Sequence
  chemically synthesized
atgccgagttctcccctgttga

SEQ ID NO: 64911 - DNA, 22 bp, Artificial Sequence
  chemically synthesized
tcccctgttgacttatatgttc

SEQ ID NO: 64912 - DNA, 22 bp, Artificial Sequence
  chemically synthesized
ccctgttgacttatatgttcta

SEQ ID NO: 64913 - DNA, 22 bp, Artificial Sequence
  chemically synthesized
ttgacttatatgttctagagga

SEQ ID NO: 64914 - DNA, 22 bp, Artificial Sequence
  chemically synthesized
acttatatgttctagaggatgg

SEQ ID NO: 64915 - DNA, 22 bp, Artificial Sequence
  chemically synthesized
atatgttctagaggatggagtt

SEQ ID NO: 64916 - DNA, 22 bp, Artificial Sequence
  chemically synthesized
tatgttctagaggatggagttg

SEQ ID NO: 64917 - DNA, 22 bp, Artificial Sequence
  chemically synthesized
tagaggatggagttggttgacc

SEQ ID NO: 64918 - DNA, 22 bp, Artificial Sequence
  chemically synthesized
gaggatggagttggttgaccgt

SEQ ID NO: 64919 - DNA, 22 bp, Artificial Sequence
  chemically synthesized
gttgaccgtagggtttcctttc

SEQ ID NO: 64920 - DNA, 22 bp, Artificial Sequence
  chemically synthesized
accgtagggtttcctttcacta

SEQ ID NO: 64921 - DNA, 22 bp, Artificial Sequence
  chemically synthesized
cctttcactagcagaatggaac

SEQ ID NO: 64922 - DNA, 22 bp, Artificial Sequence
  chemically synthesized
ctttcactagcagaatggaacc

SEQ ID NO: 64923 - DNA, 22 bp, Artificial Sequence
  chemically synthesized
tcactagcagaatggaaccaga

SEQ ID NO: 64924 - DNA, 22 bp, Artificial Sequence
  chemically synthesized
cactagcagaatggaaccagat

SEQ ID NO: 64925 - DNA, 22 bp, Artificial Sequence
  chemically synthesized
actagcagaatggaaccagata

SEQ ID NO: 64926 - DNA, 22 bp, Artificial Sequence
  chemically synthesized
gcagaatggaaccagatattgt

SEQ ID NO: 64927 - DNA, 22 bp, Artificial Sequence
  chemically synthesized
taggagcctagcacatgggtct

SEQ ID NO: 64928 - DNA, 22 bp, Artificial Sequence
  chemically synthesized
gcacatgggtctgttactaata

SEQ ID NO: 64929 - DNA, 22 bp, Artificial Sequence
  chemically synthesized
ttactaatatagaggactgttt

SEQ ID NO: 64930 - DNA, 22 bp, Artificial Sequence
  chemically synthesized
ctaatatagaggactgtttaaa

SEQ ID NO: 64931 - DNA, 22 bp, Artificial Sequence
  chemically synthesized
atatagaggactgtttaaatct

SEQ ID NO: 64932 - DNA, 22 bp, Artificial Sequence
  chemically synthesized
tttaaatcttggaaagctttcc

SEQ ID NO: 64933 - DNA, 22 bp, Artificial Sequence
  chemically synthesized
aaatcttggaaagctttccttt

SEQ ID NO: 64934 - DNA, 22 bp, Artificial Sequence
  chemically synthesized
aatcttggaaagctttcctttt

SEQ ID NO: 64935 - DNA, 22 bp, Artificial Sequence
  chemically synthesized
ggaaagctttccttttgccttt

SEQ ID NO: 64936 - DNA, 22 bp, Artificial Sequence
  chemically synthesized
gaaagctttccttttgcctttg

SEQ ID NO: 64937 - DNA, 22 bp, Artificial Sequence
  chemically synthesized
tccttttgcctttgcccccatt

SEQ ID NO: 64938 - DNA, 22 bp, Artificial Sequence
  chemically synthesized
ccttttgcctttgcccccattg

SEQ ID NO: 64939 - DNA, 22 bp, Artificial Sequence
  chemically synthesized
cttttgcctttgcccccattgc

SEQ ID NO: 64940 - DNA, 22 bp, Artificial Sequence
  chemically synthesized
ttgcctttgcccccattgcaga

SEQ ID NO: 64941 - DNA, 22 bp, Artificial Sequence
  chemically synthesized
tgcctttgcccccattgcagat

SEQ ID NO: 64942 - DNA, 22 bp, Artificial Sequence
  chemically synthesized
gcctttgcccccattgcagatg

SEQ ID NO: 64943 - DNA, 22 bp, Artificial Sequence
  chemically synthesized
cctttgcccccattgcagatgg

SEQ ID NO: 64944 - DNA, 22 bp, Artificial Sequence
  chemically synthesized
tgcccccattgcagatggggag

SEQ ID NO: 64945 - DNA, 22 bp, Artificial Sequence
  chemically synthesized
gcccccattgcagatggggagt

SEQ ID NO: 64946 - DNA, 22 bp, Artificial Sequence
  chemically synthesized
cccccattgcagatggggagtg

SEQ ID NO: 64947 - DNA, 22 bp, Artificial Sequence
  chemically synthesized
cagatggggagtgggcaggaat

SEQ ID NO: 64948 - DNA, 22 bp, Artificial Sequence
  chemically synthesized
agaatcaagggcccatcagggt

SEQ ID NO: 64949 - DNA, 22 bp, Artificial Sequence
  chemically synthesized
tattggtcccttgtccctctcc

SEQ ID NO: 64950 - DNA, 22 bp, Artificial Sequence
  chemically synthesized
gtcccttgtccctctcctccag

SEQ ID NO: 64951 - DNA, 22 bp, Artificial Sequence
  chemically synthesized
gtccctctcctccagtccatcc

SEQ ID NO: 64952 - DNA, 22 bp, Artificial Sequence
  chemically synthesized
tccctctcctccagtccatcca

SEQ ID NO: 64953 - DNA, 22 bp, Artificial Sequence
  chemically synthesized
tcctccagtccatccatgttgg

SEQ ID NO: 64954 - DNA, 22 bp, Artificial Sequence
  chemically synthesized
ctccagtccatccatgttggga

SEQ ID NO: 64955 - DNA, 22 bp, Artificial Sequence
  chemically synthesized
cagtccatccatgttgggatac

SEQ ID NO: 64956 - DNA, 22 bp, Artificial Sequence
  chemically synthesized
ggatactcagggcatggatggt

SEQ ID NO: 64957 - DNA, 22 bp, Artificial Sequence
  chemically synthesized
agggcatggatggtgtttcatg

SEQ ID NO: 64958 - DNA, 22 bp, Artificial Sequence
  chemically synthesized
catgatagcatttatcattttg

SEQ ID NO: 64959 - DNA, 22 bp, Artificial Sequence
  chemically synthesized
atgatagcatttatcattttga

SEQ ID NO: 64960 - DNA, 22 bp, Artificial Sequence
  chemically synthesized
atcattttgatgatatgtgaca

SEQ ID NO: 64961 - DNA, 22 bp, Artificial Sequence
  chemically synthesized
tcattttgatgatatgtgacaa

SEQ ID NO: 64962 - DNA, 22 bp, Artificial Sequence
  chemically synthesized
tgatgatatgtgacaaaataag

SEQ ID NO: 64963 - DNA, 22 bp, Artificial Sequence
  chemically synthesized
gatgatatgtgacaaaataagg

SEQ ID NO: 64964 - DNA, 22 bp, Artificial Sequence
  chemically synthesized
atgatatgtgacaaaataaggc

SEQ ID NO: 64965 - DNA, 22 bp, Artificial Sequence
  chemically synthesized
atatccctgtgatctctcttta

SEQ ID NO: 64966 - DNA, 22 bp, Artificial Sequence
  chemically synthesized
tgatctctctttaatagtgtcc

SEQ ID NO: 64967 - DNA, 22 bp, Artificial Sequence
  chemically synthesized
tctttaatagtgtcctcctgct

SEQ ID NO: 64968 - DNA, 22 bp, Artificial Sequence
  chemically synthesized
tttaatagtgtcctcctgcttt

SEQ ID NO: 64969 - DNA, 22 bp, Artificial Sequence
  chemically synthesized
taatagtgtcctcctgctttgg

SEQ ID NO: 64970 - DNA, 22 bp, Artificial Sequence
  chemically synthesized
aatagtgtcctcctgctttggg

SEQ ID NO: 64971 - DNA, 22 bp, Artificial Sequence
  chemically synthesized
atagtgtcctcctgctttgggg

SEQ ID NO: 64972 - DNA, 22 bp, Artificial Sequence
  chemically synthesized
ctgctttgggggttattaagct

SEQ ID NO: 64973 - DNA, 22 bp, Artificial Sequence
  chemically synthesized
ctttgggggttattaagctagc

SEQ ID NO: 64974 - DNA, 22 bp, Artificial Sequence
  chemically synthesized
tgggggttattaagctagcctg

SEQ ID NO: 64975 - DNA, 22 bp, Artificial Sequence
  chemically synthesized
gggggttattaagctagcctga

SEQ ID NO: 64976 - DNA, 22 bp, Artificial Sequence
  chemically synthesized
ggggttattaagctagcctgaa

SEQ ID NO: 64977 - DNA, 22 bp, Artificial Sequence
  chemically synthesized
ttaagctagcctgaacttgagt

SEQ ID NO: 64978 - DNA, 22 bp, Artificial Sequence
  chemically synthesized
agctagcctgaacttgagtaaa

SEQ ID NO: 64979 - DNA, 22 bp, Artificial Sequence
  chemically synthesized
gcctgaacttgagtaaacattt

SEQ ID NO: 64980 - DNA, 22 bp, Artificial Sequence
  chemically synthesized
aacttgagtaaacatttttgga

SEQ ID NO: 64981 - DNA, 22 bp, Artificial Sequence
  chemically synthesized
gagtaaacatttttggatgggg

SEQ ID NO: 64982 - DNA, 22 bp, Artificial Sequence
  chemically synthesized
agtaaacatttttggatggggt

SEQ ID NO: 64983 - DNA, 22 bp, Artificial Sequence
  chemically synthesized
ttggatggggtgagaggggggc

SEQ ID NO: 64984 - DNA, 22 bp, Artificial Sequence
  chemically synthesized
tggatggggtgagaggggggct

SEQ ID NO: 64985 - DNA, 22 bp, Artificial Sequence
  chemically synthesized
ggatggggtgagaggggggctg

SEQ ID NO: 64986 - DNA, 22 bp, Artificial Sequence
  chemically synthesized
gatggggtgagaggggggctga

SEQ ID NO: 64987 - DNA, 22 bp, Artificial Sequence
  chemically synthesized
ataaaagtggttagtaaataga

SEQ ID NO: 64988 - DNA, 22 bp, Artificial Sequence
  chemically synthesized
gtaaatagacagttggaaagga

SEQ ID NO: 64989 - DNA, 22 bp, Artificial Sequence
  chemically synthesized
gaaaggagaacggcccgggggc

SEQ ID NO: 64990 - DNA, 22 bp, Artificial Sequence
  chemically synthesized
aggagatgagccagggaacaag

SEQ ID NO: 64991 - DNA, 22 bp, Artificial Sequence
  chemically synthesized
gtgacccagagtgtcctagagg

SEQ ID NO: 64992 - DNA, 22 bp, Artificial Sequence
  chemically synthesized
gaggggaaagaacctctgttag

SEQ ID NO: 64993 - DNA, 22 bp, Artificial Sequence
  chemically synthesized
tgttagaatttcaaatgtcaga

SEQ ID NO: 64994 - DNA, 22 bp, Artificial Sequence
  chemically synthesized
ttagaatttcaaatgtcagact

SEQ ID NO: 64995 - DNA, 22 bp, Artificial Sequence
  chemically synthesized
gaatttcaaatgtcagactttc

SEQ ID NO: 64996 - DNA, 22 bp, Artificial Sequence
  chemically synthesized
caaatgtcagactttcttttca

SEQ ID NO: 64997 - DNA, 22 bp, Artificial Sequence
  chemically synthesized
aaatgtcagactttcttttcag

SEQ ID NO: 64998 - DNA, 22 bp, Artificial Sequence
  chemically synthesized
tcttttcagcttccttcaggtg

SEQ ID NO: 64999 - DNA, 22 bp, Artificial Sequence
  chemically synthesized
cttttcagcttccttcaggtgc

SEQ ID NO: 65000 - DNA, 22 bp, Artificial Sequence
  chemically synthesized
ttttcagcttccttcaggtgct

SEQ ID NO: 65001 - DNA, 22 bp, Artificial Sequence
  chemically synthesized
ttcagcttccttcaggtgcttc

SEQ ID NO: 65002 - DNA, 22 bp, Artificial Sequence
  chemically synthesized
tcagcttccttcaggtgcttcc

SEQ ID NO: 65003 - DNA, 22 bp, Artificial Sequence
  chemically synthesized
cagcttccttcaggtgcttcct

SEQ ID NO: 65004 - DNA, 22 bp, Artificial Sequence
  chemically synthesized
agcttccttcaggtgcttcctc

SEQ ID NO: 65005 - DNA, 22 bp, Artificial Sequence
  chemically synthesized
ccttcaggtgcttcctcttcta

SEQ ID NO: 65006 - DNA, 22 bp, Artificial Sequence
  chemically synthesized
cttcaggtgcttcctcttctac

SEQ ID NO: 65007 - DNA, 22 bp, Artificial Sequence
  chemically synthesized
caggtgcttcctcttctactca

SEQ ID NO: 65008 - DNA, 22 bp, Artificial Sequence
  chemically synthesized
aggtgcttcctcttctactcag

SEQ ID NO: 65009 - DNA, 22 bp, Artificial Sequence
  chemically synthesized
cctcttctactcagaattttct

SEQ ID NO: 65010 - DNA, 22 bp, Artificial Sequence
  chemically synthesized
ctcttctactcagaattttctt

SEQ ID NO: 65011 - DNA, 22 bp, Artificial Sequence
  chemically synthesized
ttctactcagaattttcttttg

SEQ ID NO: 65012 - DNA, 22 bp, Artificial Sequence
  chemically synthesized
ctactcagaattttcttttgag

SEQ ID NO: 65013 - DNA, 22 bp, Artificial Sequence
  chemically synthesized
tactcagaattttcttttgaga

SEQ ID NO: 65014 - DNA, 22 bp, Artificial Sequence
  chemically synthesized
ctcagaattttcttttgagata

SEQ ID NO: 65015 - DNA, 22 bp, Artificial Sequence
  chemically synthesized
agaattttcttttgagataggt

SEQ ID NO: 65016 - DNA, 22 bp, Artificial Sequence
  chemically synthesized
tcttttgagataggtgctggtc

SEQ ID NO: 65017 - DNA, 22 bp, Artificial Sequence
  chemically synthesized
cttttgagataggtgctggtca

SEQ ID NO: 65018 - DNA, 22 bp, Artificial Sequence
  chemically synthesized
ttttgagataggtgctggtcaa

SEQ ID NO: 65019 - DNA, 22 bp, Artificial Sequence
  chemically synthesized
ttgagataggtgctggtcaaac

SEQ ID NO: 65020 - DNA, 22 bp, Artificial Sequence
  chemically synthesized
tgagataggtgctggtcaaaca

SEQ ID NO: 65021 - DNA, 22 bp, Artificial Sequence
  chemically synthesized
gagataggtgctggtcaaacaa

SEQ ID NO: 65022 - DNA, 22 bp, Artificial Sequence
  chemically synthesized
agataggtgctggtcaaacaag

SEQ ID NO: 65023 - DNA, 22 bp, Artificial Sequence
  chemically synthesized
gtcaaacaagcttttgtttgtg

SEQ ID NO: 65024 - DNA, 22 bp, Artificial Sequence
  chemically synthesized
ttgtttgtggctggtcacttgg

SEQ ID NO: 65025 - DNA, 22 bp, Artificial Sequence
  chemically synthesized
tgtttgtggctggtcacttggc

SEQ ID NO: 65026 - DNA, 22 bp, Artificial Sequence
  chemically synthesized
gtttgtggctggtcacttggca

SEQ ID NO: 65027 - DNA, 22 bp, Artificial Sequence
  chemically synthesized
tttgtggctggtcacttggcac

SEQ ID NO: 65028 - DNA, 22 bp, Artificial Sequence
  chemically synthesized
gtggctggtcacttggcacaca

SEQ ID NO: 65029 - DNA, 22 bp, Artificial Sequence
  chemically synthesized
tggctggtcacttggcacacag

SEQ ID NO: 65030 - DNA, 22 bp, Artificial Sequence
  chemically synthesized
gtcacttggcacacagtgtggc

SEQ ID NO: 65031 - DNA, 22 bp, Artificial Sequence
  chemically synthesized
ggcacacagtgtggctgtttgt

SEQ ID NO: 65032 - DNA, 22 bp, Artificial Sequence
  chemically synthesized
gcacacagtgtggctgtttgtc

SEQ ID NO: 65033 - DNA, 22 bp, Artificial Sequence
  chemically synthesized
tttgtcatcctggatgatgagg

SEQ ID NO: 65034 - DNA, 22 bp, Artificial Sequence
  chemically synthesized
gtcatcctggatgatgaggcag

SEQ ID NO: 65035 - DNA, 22 bp, Artificial Sequence
  chemically synthesized
tcatcctggatgatgaggcagc

SEQ ID NO: 65036 - DNA, 22 bp, Artificial Sequence
  chemically synthesized
gatgatgaggcagctattttaa

SEQ ID NO: 65037 - DNA, 22 bp, Artificial Sequence
  chemically synthesized
ttttaatggcacgcagggccgc

SEQ ID NO: 65038 - DNA, 22 bp, Artificial Sequence
  chemically synthesized
taatggcacgcagggccgccgt

SEQ ID NO: 65039 - DNA, 22 bp, Artificial Sequence
  chemically synthesized
aatggcacgcagggccgccgtg

SEQ ID NO: 65040 - DNA, 22 bp, Artificial Sequence
  chemically synthesized
atggcacgcagggccgccgtgt

SEQ ID NO: 65041 - DNA, 22 bp, Artificial Sequence
  chemically synthesized
actgccaagaaataagggcttc

SEQ ID NO: 65042 - DNA, 22 bp, Artificial Sequence
  chemically synthesized
ctgccaagaaataagggcttct

SEQ ID NO: 65043 - DNA, 22 bp, Artificial Sequence
  chemically synthesized
ccaagaaataagggcttctagg

SEQ ID NO: 65044 - DNA, 22 bp, Artificial Sequence
  chemically synthesized
ctaggagacttggtggctttag

SEQ ID NO: 65045 - DNA, 22 bp, Artificial Sequence
  chemically synthesized
taggagacttggtggctttagg

SEQ ID NO: 65046 - DNA, 22 bp, Artificial Sequence
  chemically synthesized
ggagacttggtggctttaggaa

SEQ ID NO: 65047 - DNA, 22 bp, Artificial Sequence
  chemically synthesized
ggtggctttaggaacaaacttc

SEQ ID NO: 65048 - DNA, 22 bp, Artificial Sequence
  chemically synthesized
gtggctttaggaacaaacttcc

SEQ ID NO: 65049 - DNA, 22 bp, Artificial Sequence
  chemically synthesized
taggaacaaacttccagcggca

SEQ ID NO: 65050 - DNA, 22 bp, Artificial Sequence
  chemically synthesized
aggaacaaacttccagcggcag

SEQ ID NO: 65051 - DNA, 22 bp, Artificial Sequence
  chemically synthesized
ggaacaaacttccagcggcaga

SEQ ID NO: 65052 - DNA, 22 bp, Artificial Sequence
  chemically synthesized
ccagcggcagaaattagttagg

SEQ ID NO: 65053 - DNA, 22 bp, Artificial Sequence
  chemically synthesized
cagcggcagaaattagttagga

SEQ ID NO: 65054 - DNA, 22 bp, Artificial Sequence
  chemically synthesized
gttaggaagcagagtagcactg

SEQ ID NO: 65055 - DNA, 22 bp, Artificial Sequence
  chemically synthesized
ggaagcagagtagcactgggtt

SEQ ID NO: 65056 - DNA, 22 bp, Artificial Sequence
  chemically synthesized
ggttccaaatgcctctattgta

SEQ ID NO: 65057 - DNA, 22 bp, Artificial Sequence
  chemically synthesized
caaatgcctctattgtatgaat

SEQ ID NO: 65058 - DNA, 22 bp, Artificial Sequence
  chemically synthesized
tattgtatgaatttggatatgt

SEQ ID NO: 65059 - DNA, 22 bp, Artificial Sequence
  chemically synthesized
ttgtatgaatttggatatgttg

SEQ ID NO: 65060 - DNA, 22 bp, Artificial Sequence
  chemically synthesized
tatgaatttggatatgttgtgg

SEQ ID NO: 65061 - DNA, 22 bp, Artificial Sequence
  chemically synthesized
ggatatgttgtgggcaaaatga

SEQ ID NO: 65062 - DNA, 22 bp, Artificial Sequence
  chemically synthesized
gatatgttgtgggcaaaatgac

SEQ ID NO: 65063 - DNA, 22 bp, Artificial Sequence
  chemically synthesized
tgggcaaaatgacataaaagaa

SEQ ID NO: 65064 - DNA, 22 bp, Artificial Sequence
  chemically synthesized
acaaggaccccattggcatgtg

SEQ ID NO: 65065 - DNA, 22 bp, Artificial Sequence
  chemically synthesized
gcatgtgggctagtgttgactg

SEQ ID NO: 65066 - DNA, 22 bp, Artificial Sequence
  chemically synthesized
gtgttgactggctctcacagtg

SEQ ID NO: 65067 - DNA, 22 bp, Artificial Sequence
  chemically synthesized
actggctctcacagtgtgaatt

SEQ ID NO: 65068 - DNA, 22 bp, Artificial Sequence
  chemically synthesized
gctctcacagtgtgaatttagt

SEQ ID NO: 65069 - DNA, 22 bp, Artificial Sequence
  chemically synthesized
tcacagtgtgaatttagttagg

SEQ ID NO: 65070 - DNA, 22 bp, Artificial Sequence
  chemically synthesized
acagtgtgaatttagttaggtg

SEQ ID NO: 65071 - DNA, 22 bp, Artificial Sequence
  chemically synthesized
agttaggtgtttccactttatt

SEQ ID NO: 65072 - DNA, 22 bp, Artificial Sequence
  chemically synthesized
gttaggtgtttccactttattt

SEQ ID NO: 65073 - DNA, 22 bp, Artificial Sequence
  chemically synthesized
ggtgtttccactttattttccc

SEQ ID NO: 65074 - DNA, 22 bp, Artificial Sequence
  chemically synthesized
ccactttattttccccaaactc

SEQ ID NO: 65075 - DNA, 22 bp, Artificial Sequence
  chemically synthesized
cactttattttccccaaactct

SEQ ID NO: 65076 - DNA, 22 bp, Artificial Sequence
  chemically synthesized
tattttccccaaactctaaagc

SEQ ID NO: 65077 - DNA, 22 bp, Artificial Sequence
  chemically synthesized
attttccccaaactctaaagca

SEQ ID NO: 65078 - DNA, 22 bp, Artificial Sequence
  chemically synthesized
ttttccccaaactctaaagcaa

SEQ ID NO: 65079 - DNA, 22 bp, Artificial Sequence
  chemically synthesized
tccccaaactctaaagcaacag

SEQ ID NO: 65080 - DNA, 22 bp, Artificial Sequence
  chemically synthesized
ccccaaactctaaagcaacagt

SEQ ID NO: 65081 - DNA, 22 bp, Artificial Sequence
  chemically synthesized
cccaaactctaaagcaacagtt

SEQ ID NO: 65082 - DNA, 22 bp, Artificial Sequence
  chemically synthesized
taaagcaacagtttaattgggg

SEQ ID NO: 65083 - DNA, 22 bp, Artificial Sequence
  chemically synthesized
aagcaacagtttaattggggtc

SEQ ID NO: 65084 - DNA, 22 bp, Artificial Sequence
  chemically synthesized
aattggggtctaaggtaccctt

SEQ ID NO: 65085 - DNA, 22 bp, Artificial Sequence
  chemically synthesized
attggggtctaaggtacccttt

SEQ ID NO: 65086 - DNA, 22 bp, Artificial Sequence
  chemically synthesized
gggtctaaggtaccctttagaa

SEQ ID NO: 65087 - DNA, 22 bp, Artificial Sequence
  chemically synthesized
aggtaccctttagaaacatttt

SEQ ID NO: 65088 - DNA, 22 bp, Artificial Sequence
  chemically synthesized
tagaaacattttgaccacctat

SEQ ID NO: 65089 - DNA, 22 bp, Artificial Sequence
  chemically synthesized
agaaacattttgaccacctatt

SEQ ID NO: 65090 - DNA, 22 bp, Artificial Sequence
  chemically synthesized
gaaacattttgaccacctatta

SEQ ID NO: 65091 - DNA, 22 bp, Artificial Sequence
  chemically synthesized
tgaccacctattatttaggaca

SEQ ID NO: 65092 - DNA, 22 bp, Artificial Sequence
  chemically synthesized
gaccacctattatttaggacac

SEQ ID NO: 65093 - DNA, 22 bp, Artificial Sequence
  chemically synthesized
accacctattatttaggacaca

SEQ ID NO: 65094 - DNA, 22 bp, Artificial Sequence
  chemically synthesized
ttatttaggacacacagcattt

SEQ ID NO: 65095 - DNA, 22 bp, Artificial Sequence
  chemically synthesized
tttaggacacacagcatttttt

SEQ ID NO: 65096 - DNA, 22 bp, Artificial Sequence
  chemically synthesized
aggacacacagcattttttttc

SEQ ID NO: 65097 - DNA, 22 bp, Artificial Sequence
  chemically synthesized
ggacacacagcattttttttct

SEQ ID NO: 65098 - DNA, 22 bp, Artificial Sequence
  chemically synthesized
tttttctttgaagataaatttg

SEQ ID NO: 65099 - DNA, 22 bp, Artificial Sequence
  chemically synthesized
ttttctttgaagataaatttgt

SEQ ID NO: 65100 - DNA, 22 bp, Artificial Sequence
  chemically synthesized
tttctttgaagataaatttgtt

SEQ ID NO: 65101 - DNA, 22 bp, Artificial Sequence
  chemically synthesized
ttctttgaagataaatttgttt

SEQ ID NO: 65102 - DNA, 22 bp, Artificial Sequence
  chemically synthesized
tctttgaagataaatttgtttt

SEQ ID NO: 65103 - DNA, 22 bp, Artificial Sequence
  chemically synthesized
ctttgaagataaatttgttttg

SEQ ID NO: 65104 - DNA, 22 bp, Artificial Sequence
  chemically synthesized
tttgaagataaatttgttttgg

SEQ ID NO: 65105 - DNA, 22 bp, Artificial Sequence
  chemically synthesized
tgaagataaatttgttttgggt

SEQ ID NO: 65106 - DNA, 22 bp, Artificial Sequence
  chemically synthesized
gaagataaatttgttttgggta

SEQ ID NO: 65107 - DNA, 22 bp, Artificial Sequence
  chemically synthesized
aagataaatttgttttgggtat

SEQ ID NO: 65108 - DNA, 22 bp, Artificial Sequence
  chemically synthesized
gttttgggtatggctgggtgtg

SEQ ID NO: 65109 - DNA, 22 bp, Artificial Sequence
  chemically synthesized
ttttgggtatggctgggtgtgg

SEQ ID NO: 65110 - DNA, 22 bp, Artificial Sequence
  chemically synthesized
tgggtatggctgggtgtggtag

SEQ ID NO: 65111 - DNA, 22 bp, Artificial Sequence
  chemically synthesized
gggtatggctgggtgtggtagc

SEQ ID NO: 65112 - DNA, 22 bp, Artificial Sequence
  chemically synthesized
ggtatggctgggtgtggtagct

SEQ ID NO: 65113 - DNA, 22 bp, Artificial Sequence
  chemically synthesized
ggtgtggtagcttatgcctata

SEQ ID NO: 65114 - DNA, 22 bp, Artificial Sequence
  chemically synthesized
atgcctataatcccagcacttt

SEQ ID NO: 65115 - DNA, 22 bp, Artificial Sequence
  chemically synthesized
tgcctataatcccagcactttg

SEQ ID NO: 65116 - DNA, 22 bp, Artificial Sequence
  chemically synthesized
taatcccagcactttgggaggc

SEQ ID NO: 65117 - DNA, 22 bp, Artificial Sequence
  chemically synthesized
tgggaggctgaggtgggtggat

SEQ ID NO: 65118 - DNA, 22 bp, Artificial Sequence
  chemically synthesized
gggaggctgaggtgggtggatc

SEQ ID NO: 65119 - DNA, 22 bp, Artificial Sequence
  chemically synthesized
ggaggctgaggtgggtggatca

SEQ ID NO: 65120 - DNA, 22 bp, Artificial Sequence
  chemically synthesized
aggtgggtggatcacctaaggt

SEQ ID NO: 65121 - DNA, 22 bp, Artificial Sequence
  chemically synthesized
aggtcgggagtttgagaccagc

SEQ ID NO: 65122 - DNA, 22 bp, Artificial Sequence
  chemically synthesized
gagaccagcctgaccaacatgg

SEQ ID NO: 65123 - DNA, 22 bp, Artificial Sequence
  chemically synthesized
agaccagcctgaccaacatgga

SEQ ID NO: 65124 - DNA, 22 bp, Artificial Sequence
  chemically synthesized
accaacatggagaaaccccgtc

SEQ ID NO: 65125 - DNA, 22 bp, Artificial Sequence
  chemically synthesized
taccaaaaatacagaaattagc

SEQ ID NO: 65126 - DNA, 22 bp, Artificial Sequence
  chemically synthesized
ccaaaaatacagaaattagccg

SEQ ID NO: 65127 - DNA, 22 bp, Artificial Sequence
  chemically synthesized
gccgcgtgtggtggcgcatgcc

SEQ ID NO: 65128 - DNA, 22 bp, Artificial Sequence
  chemically synthesized
taatcccagctacttgggaggc

SEQ ID NO: 65129 - DNA, 22 bp, Artificial Sequence
  chemically synthesized
cttgggaggctgaggcaggaga

SEQ ID NO: 65130 - DNA, 22 bp, Artificial Sequence
  chemically synthesized
gggaggctgaggcaggagaatc

SEQ ID NO: 65131 - DNA, 22 bp, Artificial Sequence
  chemically synthesized
ggaggctgaggcaggagaatcg

SEQ ID NO: 65132 - DNA, 22 bp, Artificial Sequence
  chemically synthesized
aggcaggagaatcgcttgaacc

SEQ ID NO: 65133 - DNA, 22 bp, Artificial Sequence
  chemically synthesized
gaacccgggaggcggagattgc

SEQ ID NO: 65134 - DNA, 22 bp, Artificial Sequence
  chemically synthesized
aacccgggaggcggagattgcg

SEQ ID NO: 65135 - DNA, 22 bp, Artificial Sequence
  chemically synthesized
cggtgagccgagattgcgccat

SEQ ID NO: 65136 - DNA, 22 bp, Artificial Sequence
  chemically synthesized
cgccattgcactccagcccggg

SEQ ID NO: 65137 - DNA, 22 bp, Artificial Sequence
  chemically synthesized
cactccagcccgggcaacaaga

SEQ ID NO: 65138 - DNA, 22 bp, Artificial Sequence
  chemically synthesized
cagcccgggcaacaagagcgaa

SEQ ID NO: 65139 - DNA, 22 bp, Artificial Sequence
  chemically synthesized
cacctcagaaacaaaaaacaaa

SEQ ID NO: 65140 - DNA, 22 bp, Artificial Sequence
  chemically synthesized
agaaacaaaaaacaaacaaaca

SEQ ID NO: 65141 - DNA, 22 bp, Artificial Sequence
  chemically synthesized
tgggtagcagtggctttaggct

SEQ ID NO: 65142 - DNA, 22 bp, Artificial Sequence
  chemically synthesized
gggtagcagtggctttaggctg

SEQ ID NO: 65143 - DNA, 22 bp, Artificial Sequence
  chemically synthesized
ggtagcagtggctttaggctgt

SEQ ID NO: 65144 - DNA, 22 bp, Artificial Sequence
  chemically synthesized
taggctgtttttggatctttgg

SEQ ID NO: 65145 - DNA, 22 bp, Artificial Sequence
  chemically synthesized
aggctgtttttggatctttggc

SEQ ID NO: 65146 - DNA, 22 bp, Artificial Sequence
  chemically synthesized
ggctgtttttggatctttggct

SEQ ID NO: 65147 - DNA, 22 bp, Artificial Sequence
  chemically synthesized
tttttggatctttggctattga

SEQ ID NO: 65148 - DNA, 22 bp, Artificial Sequence
  chemically synthesized
ttggatctttggctattgatac

SEQ ID NO: 65149 - DNA, 22 bp, Artificial Sequence
  chemically synthesized
tggatctttggctattgatact

SEQ ID NO: 65150 - DNA, 22 bp, Artificial Sequence
  chemically synthesized
ggatctttggctattgatactg

SEQ ID NO: 65151 - DNA, 22 bp, Artificial Sequence
  chemically synthesized
gatctttggctattgatactga

SEQ ID NO: 65152 - DNA, 22 bp, Artificial Sequence
  chemically synthesized
tggctattgatactgatttgaa

SEQ ID NO: 65153 - DNA, 22 bp, Artificial Sequence
  chemically synthesized
ggctattgatactgatttgaaa

SEQ ID NO: 65154 - DNA, 22 bp, Artificial Sequence
  chemically synthesized
gctattgatactgatttgaaat

SEQ ID NO: 65155 - DNA, 22 bp, Artificial Sequence
  chemically synthesized
ttgatactgatttgaaattttt

SEQ ID NO: 65156 - DNA, 22 bp, Artificial Sequence
  chemically synthesized
atactgatttgaaattttttgt

SEQ ID NO: 65157 - DNA, 22 bp, Artificial Sequence
  chemically synthesized
atttgaaattttttgttattat

SEQ ID NO: 65158 - DNA, 22 bp, Artificial Sequence
  chemically synthesized
gaaattttttgttattattttc

SEQ ID NO: 65159 - DNA, 22 bp, Artificial Sequence
  chemically synthesized
aaattttttgttattattttca

SEQ ID NO: 65160 - DNA, 22 bp, Artificial Sequence
  chemically synthesized
tttgttattattttcatgttaa

SEQ ID NO: 65161 - DNA, 22 bp, Artificial Sequence
  chemically synthesized
ttgttattattttcatgttaag

SEQ ID NO: 65162 - DNA, 22 bp, Artificial Sequence
  chemically synthesized
tgttattattttcatgttaagc

SEQ ID NO: 65163 - DNA, 22 bp, Artificial Sequence
  chemically synthesized
gttattattttcatgttaagca

SEQ ID NO: 65164 - DNA, 22 bp, Artificial Sequence
  chemically synthesized
ttattattttcatgttaagcaa

SEQ ID NO: 65165 - DNA, 22 bp, Artificial Sequence
  chemically synthesized
ttattttcatgttaagcaaaac

SEQ ID NO: 65166 - DNA, 22 bp, Artificial Sequence
  chemically synthesized
ttttcatgttaagcaaaactag

SEQ ID NO: 65167 - DNA, 22 bp, Artificial Sequence
  chemically synthesized
tcatgttaagcaaaactagaaa

SEQ ID NO: 65168 - DNA, 22 bp, Artificial Sequence
  chemically synthesized
catgttaagcaaaactagaaag

SEQ ID NO: 65169 - DNA, 22 bp, Artificial Sequence
  chemically synthesized
atgttaagcaaaactagaaagt

SEQ ID NO: 65170 - DNA, 22 bp, Artificial Sequence
  chemically synthesized
agcaaaactagaaagttttacc

SEQ ID NO: 65171 - DNA, 22 bp, Artificial Sequence
  chemically synthesized
gaaagttttaccgaattcccct

SEQ ID NO: 65172 - DNA, 22 bp, Artificial Sequence
  chemically synthesized
taccgaattcccctgcagtaca

SEQ ID NO: 65173 - DNA, 22 bp, Artificial Sequence
  chemically synthesized
accgaattcccctgcagtacag

SEQ ID NO: 65174 - DNA, 22 bp, Artificial Sequence
  chemically synthesized
ccgaattcccctgcagtacagt

SEQ ID NO: 65175 - DNA, 22 bp, Artificial Sequence
  chemically synthesized
ccctgcagtacagtaagtattt

SEQ ID NO: 65176 - DNA, 22 bp, Artificial Sequence
  chemically synthesized
cagtacagtaagtattttcttt

SEQ ID NO: 65177 - DNA, 22 bp, Artificial Sequence
  chemically synthesized
tctttcattgggggaagcaaac

SEQ ID NO: 65178 - DNA, 22 bp, Artificial Sequence
  chemically synthesized
ctttcattgggggaagcaaact

SEQ ID NO: 65179 - DNA, 22 bp, Artificial Sequence
  chemically synthesized
tttcattgggggaagcaaacta

SEQ ID NO: 65180 - DNA, 22 bp, Artificial Sequence
  chemically synthesized
tcattgggggaagcaaactatt

SEQ ID NO: 65181 - DNA, 22 bp, Artificial Sequence
  chemically synthesized
cattgggggaagcaaactattt

SEQ ID NO: 65182 - DNA, 22 bp, Artificial Sequence
  chemically synthesized
attgggggaagcaaactattta

SEQ ID NO: 65183 - DNA, 22 bp, Artificial Sequence
  chemically synthesized
ggggaagcaaactatttacagc

SEQ ID NO: 65184 - DNA, 22 bp, Artificial Sequence
  chemically synthesized
tttacagccataacagggtttc

SEQ ID NO: 65185 - DNA, 22 bp, Artificial Sequence
  chemically synthesized
acagccataacagggtttccag

SEQ ID NO: 65186 - DNA, 22 bp, Artificial Sequence
  chemically synthesized
cagccataacagggtttccagt

SEQ ID NO: 65187 - DNA, 22 bp, Artificial Sequence
  chemically synthesized
ccagtgaattgtataagtagca

SEQ ID NO: 65188 - DNA, 22 bp, Artificial Sequence
  chemically synthesized
cagtgaattgtataagtagcac

SEQ ID NO: 65189 - DNA, 22 bp, Artificial Sequence
  chemically synthesized
tataagtagcactgagttctgt

SEQ ID NO: 65190 - DNA, 22 bp, Artificial Sequence
  chemically synthesized
agttctgtgtcagcaaaaaatg

SEQ ID NO: 65191 - DNA, 22 bp, Artificial Sequence
  chemically synthesized
tgtgtcagcaaaaaatgaaaca

SEQ ID NO: 65192 - DNA, 22 bp, Artificial Sequence
  chemically synthesized
tgtcagcaaaaaatgaaacaaa

SEQ ID NO: 65193 - DNA, 22 bp, Artificial Sequence
  chemically synthesized
atcatagatgacattacctaaa

SEQ ID NO: 65194 - DNA, 22 bp, Artificial Sequence
  chemically synthesized
cctaaatgacagtacctacgtg

SEQ ID NO: 65195 - DNA, 22 bp, Artificial Sequence
  chemically synthesized
aatgacagtacctacgtgtgtc

SEQ ID NO: 65196 - DNA, 22 bp, Artificial Sequence
  chemically synthesized
cgtgtgtcctttctttcacatt

SEQ ID NO: 65197 - DNA, 22 bp, Artificial Sequence
  chemically synthesized
tctttcacatttgctgtaatcc

SEQ ID NO: 65198 - DNA, 22 bp, Artificial Sequence
  chemically synthesized
ctttcacatttgctgtaatcct

SEQ ID NO: 65199 - DNA, 22 bp, Artificial Sequence
  chemically synthesized
tttcacatttgctgtaatcctg

SEQ ID NO: 65200 - DNA, 22 bp, Artificial Sequence
  chemically synthesized
tcacatttgctgtaatcctgtt

SEQ ID NO: 65201 - DNA, 22 bp, Artificial Sequence
  chemically synthesized
cacatttgctgtaatcctgtta

SEQ ID NO: 65202 - DNA, 22 bp, Artificial Sequence
  chemically synthesized
acatttgctgtaatcctgttat

SEQ ID NO: 65203 - DNA, 22 bp, Artificial Sequence
  chemically synthesized
gctgtaatcctgttatggcatt

SEQ ID NO: 65204 - DNA, 22 bp, Artificial Sequence
  chemically synthesized
ctgtaatcctgttatggcattg

SEQ ID NO: 65205 - DNA, 22 bp, Artificial Sequence
  chemically synthesized
taatcctgttatggcattgtcc

SEQ ID NO: 65206 - DNA, 22 bp, Artificial Sequence
  chemically synthesized
ttatggcattgtcctattatct

SEQ ID NO: 65207 - DNA, 22 bp, Artificial Sequence
  chemically synthesized
tggcattgtcctattatctcaa

SEQ ID NO: 65208 - DNA, 22 bp, Artificial Sequence
  chemically synthesized
tcctattatctcaagtactgtc

SEQ ID NO: 65209 - DNA, 22 bp, Artificial Sequence
  chemically synthesized
ttatctcaagtactgtcatctt

SEQ ID NO: 65210 - DNA, 22 bp, Artificial Sequence
  chemically synthesized
tctcaagtactgtcatctttaa

SEQ ID NO: 65211 - DNA, 22 bp, Artificial Sequence
  chemically synthesized
aagtactgtcatctttaaatgc

SEQ ID NO: 65212 - DNA, 22 bp, Artificial Sequence
  chemically synthesized
tcatctttaaatgctgtcaaat

SEQ ID NO: 65213 - DNA, 22 bp, Artificial Sequence
  chemically synthesized
taaatgctgtcaaattgtaact

SEQ ID NO: 65214 - DNA, 22 bp, Artificial Sequence
  chemically synthesized
aaatgctgtcaaattgtaactg

SEQ ID NO: 65215 - DNA, 22 bp, Artificial Sequence
  chemically synthesized
aatgctgtcaaattgtaactgg

SEQ ID NO: 65216 - DNA, 22 bp, Artificial Sequence
  chemically synthesized
tcaaattgtaactggattgcca

SEQ ID NO: 65217 - DNA, 22 bp, Artificial Sequence
  chemically synthesized
taactggattgccaaggacaga

SEQ ID NO: 65218 - DNA, 22 bp, Artificial Sequence
  chemically synthesized
gattgccaaggacagaggagag

SEQ ID NO: 65219 - DNA, 22 bp, Artificial Sequence
  chemically synthesized
ccaaggacagaggagaggaacc

SEQ ID NO: 65220 - DNA, 22 bp, Artificial Sequence
  chemically synthesized
ccactgcaccaaagagacggtc

SEQ ID NO: 65221 - DNA, 22 bp, Artificial Sequence
  chemically synthesized
caccaaagagacggtcttcttc

SEQ ID NO: 65222 - DNA, 22 bp, Artificial Sequence
  chemically synthesized
cttccccctctcacagtctgaa

SEQ ID NO: 65223 - DNA, 22 bp, Artificial Sequence
  chemically synthesized
ttccccctctcacagtctgaat

SEQ ID NO: 65224 - DNA, 22 bp, Artificial Sequence
  chemically synthesized
ccccctctcacagtctgaattc

SEQ ID NO: 65225 - DNA, 22 bp, Artificial Sequence
  chemically synthesized
cccctctcacagtctgaattct

SEQ ID NO: 65226 - DNA, 22 bp, Artificial Sequence
  chemically synthesized
tcacagtctgaattcttggaga

SEQ ID NO: 65227 - DNA, 22 bp, Artificial Sequence
  chemically synthesized
acagtctgaattcttggagaca

SEQ ID NO: 65228 - DNA, 22 bp, Artificial Sequence
  chemically synthesized
aattcttggagacattgttcag

SEQ ID NO: 65229 - DNA, 22 bp, Artificial Sequence
  chemically synthesized
ttggagacattgttcagttaaa

SEQ ID NO: 65230 - DNA, 22 bp, Artificial Sequence
  chemically synthesized
ggagacattgttcagttaaaat

SEQ ID NO: 65231 - DNA, 22 bp, Artificial Sequence
  chemically synthesized
gagacattgttcagttaaaatc

SEQ ID NO: 65232 - DNA, 22 bp, Artificial Sequence
  chemically synthesized
ttcagttaaaatcatgactcag

SEQ ID NO: 65233 - DNA, 22 bp, Artificial Sequence
  chemically synthesized
agttaaaatcatgactcaggta

SEQ ID NO: 65234 - DNA, 22 bp, Artificial Sequence
  chemically synthesized
aaatcatgactcaggtatcttt

SEQ ID NO: 65235 - DNA, 22 bp, Artificial Sequence
  chemically synthesized
aggtatcttttacaggctttga

SEQ ID NO: 65236 - DNA, 22 bp, Artificial Sequence
  chemically synthesized
ttacaggctttgatgaaatagt

SEQ ID NO: 65237 - DNA, 22 bp, Artificial Sequence
  chemically synthesized
tacaggctttgatgaaatagtc

SEQ ID NO: 65238 - DNA, 22 bp, Artificial Sequence
  chemically synthesized
acaggctttgatgaaatagtca

SEQ ID NO: 65239 - DNA, 22 bp, Artificial Sequence
  chemically synthesized
caggctttgatgaaatagtcag

SEQ ID NO: 65240 - DNA, 22 bp, Artificial Sequence
  chemically synthesized
tgatgaaatagtcagattcact

SEQ ID NO: 65241 - DNA, 22 bp, Artificial Sequence
  chemically synthesized
gatgaaatagtcagattcactc

SEQ ID NO: 65242 - DNA, 22 bp, Artificial Sequence
  chemically synthesized
atgaaatagtcagattcactcc

SEQ ID NO: 65243 - DNA, 22 bp, Artificial Sequence
  chemically synthesized
actcctcatgttcctagaagga

SEQ ID NO: 65244 - DNA, 22 bp, Artificial Sequence
  chemically synthesized
ctcatgttcctagaaggaaagg

SEQ ID NO: 65245 - DNA, 22 bp, Artificial Sequence
  chemically synthesized
atgttcctagaaggaaaggaag

SEQ ID NO: 65246 - DNA, 22 bp, Artificial Sequence
  chemically synthesized
ctagaaggaaaggaagaaacac

SEQ ID NO: 65247 - DNA, 22 bp, Artificial Sequence
  chemically synthesized
gaaggaaaggaagaaacactct

SEQ ID NO: 65248 - DNA, 22 bp, Artificial Sequence
  chemically synthesized
tttgaacagcccgtgagacaaa

SEQ ID NO: 65249 - DNA, 22 bp, Artificial Sequence
  chemically synthesized
tgaacagcccgtgagacaaact

SEQ ID NO: 65250 - DNA, 22 bp, Artificial Sequence
  chemically synthesized
gaacagcccgtgagacaaactc

SEQ ID NO: 65251 - DNA, 22 bp, Artificial Sequence
  chemically synthesized
aacagcccgtgagacaaactct

SEQ ID NO: 65252 - DNA, 22 bp, Artificial Sequence
  chemically synthesized
ttccaggataatttaaatgttt

SEQ ID NO: 65253 - DNA, 22 bp, Artificial Sequence
  chemically synthesized
ccaggataatttaaatgtttct

SEQ ID NO: 65254 - DNA, 22 bp, Artificial Sequence
  chemically synthesized
caggataatttaaatgtttcta

SEQ ID NO: 65255 - DNA, 22 bp, Artificial Sequence
  chemically synthesized
aaatgtttctacataatgagaa

SEQ ID NO: 65256 - DNA, 22 bp, Artificial Sequence
  chemically synthesized
aatgtttctacataatgagaat

SEQ ID NO: 65257 - DNA, 22 bp, Artificial Sequence
  chemically synthesized
ctacataatgagaataaattgt

SEQ ID NO: 65258 - DNA, 22 bp, Artificial Sequence
  chemically synthesized
tacataatgagaataaattgta

SEQ ID NO: 65259 - DNA, 22 bp, Artificial Sequence
  chemically synthesized
cataatgagaataaattgtaag

SEQ ID NO: 65260 - DNA, 22 bp, Artificial Sequence
  chemically synthesized
taagtgttactgtgtttttaaa

SEQ ID NO: 65261 - DNA, 22 bp, Artificial Sequence
  chemically synthesized
ctgtgtttttaaaacccaggtc

SEQ ID NO: 65262 - DNA, 22 bp, Artificial Sequence
  chemically synthesized
tgtttttaaaacccaggtcaaa

SEQ ID NO: 65263 - DNA, 22 bp, Artificial Sequence
  chemically synthesized
ttaaaacccaggtcaaaagtaa

SEQ ID NO: 65264 - DNA, 22 bp, Artificial Sequence
  chemically synthesized
taaaacccaggtcaaaagtaat

SEQ ID NO: 65265 - DNA, 22 bp, Artificial Sequence
  chemically synthesized
aaaacccaggtcaaaagtaata

SEQ ID NO: 65266 - DNA, 22 bp, Artificial Sequence
  chemically synthesized
aaacccaggtcaaaagtaatag

SEQ ID NO: 65267 - DNA, 22 bp, Artificial Sequence
  chemically synthesized
taagcatttaatatctaattgt

SEQ ID NO: 65268 - DNA, 22 bp, Artificial Sequence
  chemically synthesized
aatatctaattgttcatatatt

SEQ ID NO: 65269 - DNA, 22 bp, Artificial Sequence
  chemically synthesized
atatctaattgttcatatattg

SEQ ID NO: 65270 - DNA, 22 bp, Artificial Sequence
  chemically synthesized
attgttcatatattgcttcccc

SEQ ID NO: 65271 - DNA, 22 bp, Artificial Sequence
  chemically synthesized
ttcatatattgcttccccaggt

SEQ ID NO: 65272 - DNA, 22 bp, Artificial Sequence
  chemically synthesized
atatattgcttccccaggttta

SEQ ID NO: 65273 - DNA, 22 bp, Artificial Sequence
  chemically synthesized
cttccccaggtttagatgaggg

SEQ ID NO: 65274 - DNA, 22 bp, Artificial Sequence
  chemically synthesized
ccccaggtttagatgagggctc

SEQ ID NO: 65275 - DNA, 22 bp, Artificial Sequence
  chemically synthesized
cccaggtttagatgagggctcc

SEQ ID NO: 65276 - DNA, 22 bp, Artificial Sequence
  chemically synthesized
agatgagggctccattctagag

SEQ ID NO: 65277 - DNA, 22 bp, Artificial Sequence
  chemically synthesized
gatgagggctccattctagagt

SEQ ID NO: 65278 - DNA, 22 bp, Artificial Sequence
  chemically synthesized
cattctagagttgggaaaacca

SEQ ID NO: 65279 - DNA, 22 bp, Artificial Sequence
  chemically synthesized
tagagttgggaaaaccaagtca

SEQ ID NO: 65280 - DNA, 22 bp, Artificial Sequence
  chemically synthesized
gagttgggaaaaccaagtcagt

SEQ ID NO: 65281 - DNA, 22 bp, Artificial Sequence
  chemically synthesized
ggaaaaccaagtcagtaaacct

SEQ ID NO: 65282 - DNA, 22 bp, Artificial Sequence
  chemically synthesized
tagtggcagatgttatcaggga

SEQ ID NO: 65283 - DNA, 22 bp, Artificial Sequence
  chemically synthesized
agtggcagatgttatcagggag

SEQ ID NO: 65284 - DNA, 22 bp, Artificial Sequence
  chemically synthesized
gtggcagatgttatcagggagc

SEQ ID NO: 65285 - DNA, 22 bp, Artificial Sequence
  chemically synthesized
tcagggagctggagttggagta

SEQ ID NO: 65286 - DNA, 22 bp, Artificial Sequence
  chemically synthesized
gagttggagtacttgcattttg

SEQ ID NO: 65287 - DNA, 22 bp, Artificial Sequence
  chemically synthesized
gagtacttgcattttgtgtttg

SEQ ID NO: 65288 - DNA, 22 bp, Artificial Sequence
  chemically synthesized
gcattttgtgtttgtgccagct

SEQ ID NO: 65289 - DNA, 22 bp, Artificial Sequence
  chemically synthesized
cattttgtgtttgtgccagctg

SEQ ID NO: 65290 - DNA, 22 bp, Artificial Sequence
  chemically synthesized
tgtgtttgtgccagctgtccat

SEQ ID NO: 65291 - DNA, 22 bp, Artificial Sequence
  chemically synthesized
gtgtttgtgccagctgtccatg

SEQ ID NO: 65292 - DNA, 22 bp, Artificial Sequence
  chemically synthesized
tgtttgtgccagctgtccatgt

SEQ ID NO: 65293 - DNA, 22 bp, Artificial Sequence
  chemically synthesized
gtgccagctgtccatgttcctc

SEQ ID NO: 65294 - DNA, 22 bp, Artificial Sequence
  chemically synthesized
tgccagctgtccatgttcctct

SEQ ID NO: 65295 - DNA, 22 bp, Artificial Sequence
  chemically synthesized
tccatgttcctcttcatatatt

SEQ ID NO: 65296 - DNA, 22 bp, Artificial Sequence
  chemically synthesized
ctcttcatatatttagaccaaa

SEQ ID NO: 65297 - DNA, 22 bp, Artificial Sequence
  chemically synthesized
ttcatatatttagaccaaattc

SEQ ID NO: 65298 - DNA, 22 bp, Artificial Sequence
  chemically synthesized
catatatttagaccaaattctt

SEQ ID NO: 65299 - DNA, 22 bp, Artificial Sequence
  chemically synthesized
atatatttagaccaaattctta

SEQ ID NO: 65300 - DNA, 22 bp, Artificial Sequence
  chemically synthesized
agaccaaattcttatccagatt

SEQ ID NO: 65301 - DNA, 22 bp, Artificial Sequence
  chemically synthesized
gaccaaattcttatccagattt

SEQ ID NO: 65302 - DNA, 22 bp, Artificial Sequence
  chemically synthesized
ttatccagatttcccattaaag

SEQ ID NO: 65303 - DNA, 22 bp, Artificial Sequence
  chemically synthesized
atccagatttcccattaaaggt

SEQ ID NO: 65304 - DNA, 22 bp, Artificial Sequence
  chemically synthesized
tccagatttcccattaaaggtt

SEQ ID NO: 65305 - DNA, 22 bp, Artificial Sequence
  chemically synthesized
cccattaaaggttcataaattt

SEQ ID NO: 65306 - DNA, 22 bp, Artificial Sequence
  chemically synthesized
ccattaaaggttcataaatttc

SEQ ID NO: 65307 - DNA, 22 bp, Artificial Sequence
  chemically synthesized
aaggttcataaatttccagttt

SEQ ID NO: 65308 - DNA, 22 bp, Artificial Sequence
  chemically synthesized
ataaatttccagttttcacctt

SEQ ID NO: 65309 - DNA, 22 bp, Artificial Sequence
  chemically synthesized
ccagttttcacctttctgcagc

SEQ ID NO: 65310 - DNA, 22 bp, Artificial Sequence
  chemically synthesized
cagttttcacctttctgcagct

SEQ ID NO: 65311 - DNA, 22 bp, Artificial Sequence
  chemically synthesized
tcacctttctgcagcttcctta

SEQ ID NO: 65312 - DNA, 22 bp, Artificial Sequence
  chemically synthesized
cacctttctgcagcttccttag

SEQ ID NO: 65313 - DNA, 22 bp, Artificial Sequence
  chemically synthesized
acctttctgcagcttccttaga

SEQ ID NO: 65314 - DNA, 22 bp, Artificial Sequence
  chemically synthesized
tctgcagcttccttagatagaa

SEQ ID NO: 65315 - DNA, 22 bp, Artificial Sequence
  chemically synthesized
ctgcagcttccttagatagaat

SEQ ID NO: 65316 - DNA, 22 bp, Artificial Sequence
  chemically synthesized
tgcagcttccttagatagaatg

SEQ ID NO: 65317 - DNA, 22 bp, Artificial Sequence
  chemically synthesized
cagcttccttagatagaatggt

SEQ ID NO: 65318 - DNA, 22 bp, Artificial Sequence
  chemically synthesized
ccttagatagaatggttgatga

SEQ ID NO: 65319 - DNA, 22 bp, Artificial Sequence
  chemically synthesized
cttagatagaatggttgatgag

SEQ ID NO: 65320 - DNA, 22 bp, Artificial Sequence
  chemically synthesized
agatagaatggttgatgagaaa

SEQ ID NO: 65321 - DNA, 22 bp, Artificial Sequence
  chemically synthesized
gatagaatggttgatgagaaaa

SEQ ID NO: 65322 - DNA, 22 bp, Artificial Sequence
  chemically synthesized
atgagaaaattaccgcattaaa

SEQ ID NO: 65323 - DNA, 22 bp, Artificial Sequence
  chemically synthesized
ccgcattaaaattaagcctctt

SEQ ID NO: 65324 - DNA, 22 bp, Artificial Sequence
  chemically synthesized
aaattaagcctcttgcttttta

SEQ ID NO: 65325 - DNA, 22 bp, Artificial Sequence
  chemically synthesized
agcctcttgctttttacattct

SEQ ID NO: 65326 - DNA, 22 bp, Artificial Sequence
  chemically synthesized
ttgctttttacattctgctgct

SEQ ID NO: 65327 - DNA, 22 bp, Artificial Sequence
  chemically synthesized
gctttttacattctgctgctca

SEQ ID NO: 65328 - DNA, 22 bp, Artificial Sequence
  chemically synthesized
ctttttacattctgctgctcat

SEQ ID NO: 65329 - DNA, 22 bp, Artificial Sequence
  chemically synthesized
tttacattctgctgctcataaa

SEQ ID NO: 65330 - DNA, 22 bp, Artificial Sequence
  chemically synthesized
ttacattctgctgctcataaat

SEQ ID NO: 65331 - DNA, 22 bp, Artificial Sequence
  chemically synthesized
tacattctgctgctcataaata

SEQ ID NO: 65332 - DNA, 22 bp, Artificial Sequence
  chemically synthesized
acattctgctgctcataaataa

SEQ ID NO: 65333 - DNA, 22 bp, Artificial Sequence
  chemically synthesized
cattctgctgctcataaataag

SEQ ID NO: 65334 - DNA, 22 bp, Artificial Sequence
  chemically synthesized
tgctgctcataaataagggagt

SEQ ID NO: 65335 - DNA, 22 bp, Artificial Sequence
  chemically synthesized
ctgctcataaataagggagtgg

SEQ ID NO: 65336 - DNA, 22 bp, Artificial Sequence
  chemically synthesized
ctcataaataagggagtgggaa

SEQ ID NO: 65337 - DNA, 22 bp, Artificial Sequence
  chemically synthesized
ataaataagggagtgggaaatg

SEQ ID NO: 65338 - DNA, 22 bp, Artificial Sequence
  chemically synthesized
ctttgaacaccctcgttaaagg

SEQ ID NO: 65339 - DNA, 22 bp, Artificial Sequence
  chemically synthesized
tgaacaccctcgttaaaggctg

SEQ ID NO: 65340 - DNA, 22 bp, Artificial Sequence
  chemically synthesized
gaacaccctcgttaaaggctgg

SEQ ID NO: 65341 - DNA, 22 bp, Artificial Sequence
  chemically synthesized
aacaccctcgttaaaggctggt

SEQ ID NO: 65342 - DNA, 22 bp, Artificial Sequence
  chemically synthesized
gttaaaggctggtgtggttgcc

SEQ ID NO: 65343 - DNA, 22 bp, Artificial Sequence
  chemically synthesized
aaggctggtgtggttgccagag

SEQ ID NO: 65344 - DNA, 22 bp, Artificial Sequence
  chemically synthesized
gtgtggttgccagagaataggg

SEQ ID NO: 65345 - DNA, 22 bp, Artificial Sequence
  chemically synthesized
ccagagaatagggctaacttaa

SEQ ID NO: 65346 - DNA, 22 bp, Artificial Sequence
  chemically synthesized
acttaagggggatccgctaagc

SEQ ID NO: 65347 - DNA, 22 bp, Artificial Sequence
  chemically synthesized
aagggggatccgctaagccttc

SEQ ID NO: 65348 - DNA, 22 bp, Artificial Sequence
  chemically synthesized
agggggatccgctaagccttct

SEQ ID NO: 65349 - DNA, 22 bp, Artificial Sequence
  chemically synthesized
agccttctttttcatgcctttt

SEQ ID NO: 65350 - DNA, 22 bp, Artificial Sequence
  chemically synthesized
ctttttcatgcctttttttgtt

SEQ ID NO: 65351 - DNA, 22 bp, Artificial Sequence
  chemically synthesized
tttttcatgcctttttttgttt

SEQ ID NO: 65352 - DNA, 22 bp, Artificial Sequence
  chemically synthesized
tttcatgcctttttttgttttg

SEQ ID NO: 65353 - DNA, 22 bp, Artificial Sequence
  chemically synthesized
ttcatgcctttttttgttttgt

SEQ ID NO: 65354 - DNA, 22 bp, Artificial Sequence
  chemically synthesized
tcatgcctttttttgttttgtt

SEQ ID NO: 65355 - DNA, 22 bp, Artificial Sequence
  chemically synthesized
catgcctttttttgttttgttt

SEQ ID NO: 65356 - DNA, 22 bp, Artificial Sequence
  chemically synthesized
atgcctttttttgttttgtttt

SEQ ID NO: 65357 - DNA, 22 bp, Artificial Sequence
  chemically synthesized
tttttgttttgttttgttctgg

SEQ ID NO: 65358 - DNA, 22 bp, Artificial Sequence
  chemically synthesized
ttttgttttgttttgttctgga

SEQ ID NO: 65359 - DNA, 22 bp, Artificial Sequence
  chemically synthesized
tttgttttgttttgttctggat

SEQ ID NO: 65360 - DNA, 22 bp, Artificial Sequence
  chemically synthesized
ttgttttgttttgttctggatt

SEQ ID NO: 65361 - DNA, 22 bp, Artificial Sequence
  chemically synthesized
tgttttgttttgttctggattt

SEQ ID NO: 65362 - DNA, 22 bp, Artificial Sequence
  chemically synthesized
gttttgttttgttctggatttt

SEQ ID NO: 65363 - DNA, 22 bp, Artificial Sequence
  chemically synthesized
ttttgttttgttctggatttta

SEQ ID NO: 65364 - DNA, 22 bp, Artificial Sequence
  chemically synthesized
tgttttgttctggattttataa

SEQ ID NO: 65365 - DNA, 22 bp, Artificial Sequence
  chemically synthesized
gttttgttctggattttataaa

SEQ ID NO: 65366 - DNA, 22 bp, Artificial Sequence
  chemically synthesized
ttttgttctggattttataaag

SEQ ID NO: 65367 - DNA, 22 bp, Artificial Sequence
  chemically synthesized
tgttctggattttataaaggca

SEQ ID NO: 65368 - DNA, 22 bp, Artificial Sequence
  chemically synthesized
gttctggattttataaaggcat

SEQ ID NO: 65369 - DNA, 22 bp, Artificial Sequence
  chemically synthesized
ttctggattttataaaggcatc

SEQ ID NO: 65370 - DNA, 22 bp, Artificial Sequence
  chemically synthesized
tggattttataaaggcatcatt

SEQ ID NO: 65371 - DNA, 22 bp, Artificial Sequence
  chemically synthesized
gattttataaaggcatcattta

SEQ ID NO: 65372 - DNA, 22 bp, Artificial Sequence
  chemically synthesized
tataaaggcatcatttagtttt

SEQ ID NO: 65373 - DNA, 22 bp, Artificial Sequence
  chemically synthesized
ataaaggcatcatttagttttc

SEQ ID NO: 65374 - DNA, 22 bp, Artificial Sequence
  chemically synthesized
taaaggcatcatttagttttcc

SEQ ID NO: 65375 - DNA, 22 bp, Artificial Sequence
  chemically synthesized
agttttcccttaatctgaatct

SEQ ID NO: 65376 - DNA, 22 bp, Artificial Sequence
  chemically synthesized
gttttcccttaatctgaatctg

SEQ ID NO: 65377 - DNA, 22 bp, Artificial Sequence
  chemically synthesized
tcccttaatctgaatctgtatt

SEQ ID NO: 65378 - DNA, 22 bp, Artificial Sequence
  chemically synthesized
cccttaatctgaatctgtattc

SEQ ID NO: 65379 - DNA, 22 bp, Artificial Sequence
  chemically synthesized
ccttaatctgaatctgtattca

SEQ ID NO: 65380 - DNA, 22 bp, Artificial Sequence
  chemically synthesized
aatctgaatctgtattcatttt

SEQ ID NO: 65381 - DNA, 22 bp, Artificial Sequence
  chemically synthesized
atctgaatctgtattcattttt

SEQ ID NO: 65382 - DNA, 22 bp, Artificial Sequence
  chemically synthesized
aatctgtattcatttttaaata

SEQ ID NO: 65383 - DNA, 22 bp, Artificial Sequence
  chemically synthesized
tattcatttttaaatatctaat

SEQ ID NO: 65384 - DNA, 22 bp, Artificial Sequence
  chemically synthesized
atttttaaatatctaatgttga

SEQ ID NO: 65385 - DNA, 22 bp, Artificial Sequence
  chemically synthesized
ttaaatatctaatgttgattag

SEQ ID NO: 65386 - DNA, 22 bp, Artificial Sequence
  chemically synthesized
taaatatctaatgttgattagt

SEQ ID NO: 65387 - DNA, 22 bp, Artificial Sequence
  chemically synthesized
aaatatctaatgttgattagta

SEQ ID NO: 65388 - DNA, 22 bp, Artificial Sequence
  chemically synthesized
aatatctaatgttgattagtat

SEQ ID NO: 65389 - DNA, 22 bp, Artificial Sequence
  chemically synthesized
atgttgattagtatgttctatt

SEQ ID NO: 65390 - DNA, 22 bp, Artificial Sequence
  chemically synthesized
attagtatgttctattatttat

SEQ ID NO: 65391 - DNA, 22 bp, Artificial Sequence
  chemically synthesized
gtatgttctattatttatagcc

SEQ ID NO: 65392 - DNA, 22 bp, Artificial Sequence
  chemically synthesized
tattatttatagccctccagaa

SEQ ID NO: 65393 - DNA, 22 bp, Artificial Sequence
  chemically synthesized
ttatttatagccctccagaagg

SEQ ID NO: 65394 - DNA, 22 bp, Artificial Sequence
  chemically synthesized
tttatagccctccagaaggatc

SEQ ID NO: 65395 - DNA, 22 bp, Artificial Sequence
  chemically synthesized
atagccctccagaaggatccca

SEQ ID NO: 65396 - DNA, 22 bp, Artificial Sequence
  chemically synthesized
tagccctccagaaggatcccaa

SEQ ID NO: 65397 - DNA, 22 bp, Artificial Sequence
  chemically synthesized
cagaaggatcccaagggaagat

SEQ ID NO: 65398 - DNA, 22 bp, Artificial Sequence
  chemically synthesized
catttgagaagacgatttccca

SEQ ID NO: 65399 - DNA, 22 bp, Artificial Sequence
  chemically synthesized
gagaagacgatttcccaatttc

SEQ ID NO: 65400 - DNA, 22 bp, Artificial Sequence
  chemically synthesized
agaagacgatttcccaatttcc

SEQ ID NO: 65401 - DNA, 22 bp, Artificial Sequence
  chemically synthesized
cccaatttccatacagatgacg

SEQ ID NO: 65402 - DNA, 22 bp, Artificial Sequence
  chemically synthesized
ccaatttccatacagatgacga

SEQ ID NO: 65403 - DNA, 22 bp, Artificial Sequence
  chemically synthesized
ccatacagatgacgaaaacgta

SEQ ID NO: 65404 - DNA, 22 bp, Artificial Sequence
  chemically synthesized
catacagatgacgaaaacgtaa

SEQ ID NO: 65405 - DNA, 22 bp, Artificial Sequence
  chemically synthesized
cccactacactgctccccctgc

SEQ ID NO: 65406 - DNA, 22 bp, Artificial Sequence
  chemically synthesized
cactgctccccctgctgaattt

SEQ ID NO: 65407 - DNA, 22 bp, Artificial Sequence
  chemically synthesized
ctccccctgctgaattttcttt

SEQ ID NO: 65408 - DNA, 22 bp, Artificial Sequence
  chemically synthesized
cccctgctgaattttctttttc

SEQ ID NO: 65409 - DNA, 22 bp, Artificial Sequence
  chemically synthesized
ctgaattttctttttccactct

SEQ ID NO: 65410 - DNA, 22 bp, Artificial Sequence
  chemically synthesized
aattttctttttccactctcgg

SEQ ID NO: 65411 - DNA, 22 bp, Artificial Sequence
  chemically synthesized
tctttttccactctcggtgtgt

SEQ ID NO: 65412 - DNA, 22 bp, Artificial Sequence
  chemically synthesized
ctttttccactctcggtgtgtg

SEQ ID NO: 65413 - DNA, 22 bp, Artificial Sequence
  chemically synthesized
tttttccactctcggtgtgtgg

SEQ ID NO: 65414 - DNA, 22 bp, Artificial Sequence
  chemically synthesized
tttccactctcggtgtgtggca

SEQ ID NO: 65415 - DNA, 22 bp, Artificial Sequence
  chemically synthesized
ttccactctcggtgtgtggcat

SEQ ID NO: 65416 - DNA, 22 bp, Artificial Sequence
  chemically synthesized
tccactctcggtgtgtggcatt

SEQ ID NO: 65417 - DNA, 22 bp, Artificial Sequence
  chemically synthesized
ccactctcggtgtgtggcattg

SEQ ID NO: 65418 - DNA, 22 bp, Artificial Sequence
  chemically synthesized
cactctcggtgtgtggcattgt

SEQ ID NO: 65419 - DNA, 22 bp, Artificial Sequence
  chemically synthesized
tcggtgtgtggcattgtggggt

SEQ ID NO: 65420 - DNA, 22 bp, Artificial Sequence
  chemically synthesized
ggtgtgtggcattgtggggtgc

SEQ ID NO: 65421 - DNA, 22 bp, Artificial Sequence
  chemically synthesized
tggggtgcagacacctgaaagc

SEQ ID NO: 65422 - DNA, 22 bp, Artificial Sequence
  chemically synthesized
aaagcctgactggagatgtaac

SEQ ID NO: 65423 - DNA, 22 bp, Artificial Sequence
  chemically synthesized
actggagatgtaacatgggctc

SEQ ID NO: 65424 - DNA, 22 bp, Artificial Sequence
  chemically synthesized
gagatgtaacatgggctctgct

SEQ ID NO: 65425 - DNA, 22 bp, Artificial Sequence
  chemically synthesized
tgctgacattagcatgaagagc

SEQ ID NO: 65426 - DNA, 22 bp, Artificial Sequence
  chemically synthesized
ctgacattagcatgaagagctt

SEQ ID NO: 65427 - DNA, 22 bp, Artificial Sequence
  chemically synthesized
acattagcatgaagagcttagc

SEQ ID NO: 65428 - DNA, 22 bp, Artificial Sequence
  chemically synthesized
gcatgaagagcttagctaatcg

SEQ ID NO: 65429 - DNA, 22 bp, Artificial Sequence
  chemically synthesized
agctaatcgacttgcaaaatat

SEQ ID NO: 65430 - DNA, 22 bp, Artificial Sequence
  chemically synthesized
gctaatcgacttgcaaaatata

SEQ ID NO: 65431 - DNA, 22 bp, Artificial Sequence
  chemically synthesized
atcgacttgcaaaatataggtt

SEQ ID NO: 65432 - DNA, 22 bp, Artificial Sequence
  chemically synthesized
gcaaaatataggttagggagtt

SEQ ID NO: 65433 - DNA, 22 bp, Artificial Sequence
  chemically synthesized
caaaatataggttagggagttt

SEQ ID NO: 65434 - DNA, 22 bp, Artificial Sequence
  chemically synthesized
gggagttttataggatatcaaa

SEQ ID NO: 65435 - DNA, 22 bp, Artificial Sequence
  chemically synthesized
tataggatatcaaattatctta

SEQ ID NO: 65436 - DNA, 22 bp, Artificial Sequence
  chemically synthesized
ataggatatcaaattatcttac

SEQ ID NO: 65437 - DNA, 22 bp, Artificial Sequence
  chemically synthesized
taggatatcaaattatcttact

SEQ ID NO: 65438 - DNA, 22 bp, Artificial Sequence
  chemically synthesized
tcttactctttcattgattaaa

SEQ ID NO: 65439 - DNA, 22 bp, Artificial Sequence
  chemically synthesized
actctttcattgattaaaggca

SEQ ID NO: 65440 - DNA, 22 bp, Artificial Sequence
  chemically synthesized
ctctttcattgattaaaggcaa

SEQ ID NO: 65441 - DNA, 22 bp, Artificial Sequence
  chemically synthesized
tttcattgattaaaggcaaaat

SEQ ID NO: 65442 - DNA, 22 bp, Artificial Sequence
  chemically synthesized
tcattgattaaaggcaaaatat

SEQ ID NO: 65443 - DNA, 22 bp, Artificial Sequence
  chemically synthesized
cattgattaaaggcaaaatatt

SEQ ID NO: 65444 - DNA, 22 bp, Artificial Sequence
  chemically synthesized
attgattaaaggcaaaatatta

SEQ ID NO: 65445 - DNA, 22 bp, Artificial Sequence
  chemically synthesized
attaaaggcaaaatattacatt

SEQ ID NO: 65446 - DNA, 22 bp, Artificial Sequence
  chemically synthesized
aaggcaaaatattacattaact

SEQ ID NO: 65447 - DNA, 22 bp, Artificial Sequence
  chemically synthesized
cattaactagatcattacatgg

SEQ ID NO: 65448 - DNA, 22 bp, Artificial Sequence
  chemically synthesized
actagatcattacatgggtaaa

SEQ ID NO: 65449 - DNA, 22 bp, Artificial Sequence
  chemically synthesized
gatcattacatgggtaaaaggt

SEQ ID NO: 65450 - DNA, 22 bp, Artificial Sequence
  chemically synthesized
catgggtaaaaggttagaactt

SEQ ID NO: 65451 - DNA, 22 bp, Artificial Sequence
  chemically synthesized
gaacttcacacacttaggggtg

SEQ ID NO: 65452 - DNA, 22 bp, Artificial Sequence
  chemically synthesized
cacacacttaggggtgttgcac

SEQ ID NO: 65453 - DNA, 22 bp, Artificial Sequence
  chemically synthesized
acacacttaggggtgttgcact

SEQ ID NO: 65454 - DNA, 22 bp, Artificial Sequence
  chemically synthesized
aggggtgttgcactatccttcc

SEQ ID NO: 65455 - DNA, 22 bp, Artificial Sequence
  chemically synthesized
ggggtgttgcactatccttccc

SEQ ID NO: 65456 - DNA, 22 bp, Artificial Sequence
  chemically synthesized
cactatccttccccttcctgcc

SEQ ID NO: 65457 - DNA, 22 bp, Artificial Sequence
  chemically synthesized
tccttccccttcctgccttgtg

SEQ ID NO: 65458 - DNA, 22 bp, Artificial Sequence
  chemically synthesized
ccccttcctgccttgtggcaaa

SEQ ID NO: 65459 - DNA, 22 bp, Artificial Sequence
  chemically synthesized
cccttcctgccttgtggcaaat

SEQ ID NO: 65460 - DNA, 22 bp, Artificial Sequence
  chemically synthesized
cctgccttgtggcaaatcacag

SEQ ID NO: 65461 - DNA, 22 bp, Artificial Sequence
  chemically synthesized
ctgccttgtggcaaatcacagg

SEQ ID NO: 65462 - DNA, 22 bp, Artificial Sequence
  chemically synthesized
ccttgtggcaaatcacaggttg

SEQ ID NO: 65463 - DNA, 22 bp, Artificial Sequence
  chemically synthesized
gtggcaaatcacaggttggagg

SEQ ID NO: 65464 - DNA, 22 bp, Artificial Sequence
  chemically synthesized
tggcaaatcacaggttggaggc

SEQ ID NO: 65465 - DNA, 22 bp, Artificial Sequence
  chemically synthesized
gaggcagggaaactcactgtgt

SEQ ID NO: 65466 - DNA, 22 bp, Artificial Sequence
  chemically synthesized
actgtgtctagcgctcctaaat

SEQ ID NO: 65467 - DNA, 22 bp, Artificial Sequence
  chemically synthesized
tgtctagcgctcctaaatgcct

SEQ ID NO: 65468 - DNA, 22 bp, Artificial Sequence
  chemically synthesized
gcgctcctaaatgcctgaatag

SEQ ID NO: 65469 - DNA, 22 bp, Artificial Sequence
  chemically synthesized
ctaaatgcctgaatagcaacgt

SEQ ID NO: 65470 - DNA, 22 bp, Artificial Sequence
  chemically synthesized
aatgcctgaatagcaacgttag

SEQ ID NO: 65471 - DNA, 22 bp, Artificial Sequence
  chemically synthesized
aatagcaacgttagacttaaag

SEQ ID NO: 65472 - DNA, 22 bp, Artificial Sequence
  chemically synthesized
gacttaaaggaggggcatttgc

SEQ ID NO: 65473 - DNA, 22 bp, Artificial Sequence
  chemically synthesized
aaaggaggggcatttgccttcg

SEQ ID NO: 65474 - DNA, 22 bp, Artificial Sequence
  chemically synthesized
aaggaggggcatttgccttcgc

SEQ ID NO: 65475 - DNA, 22 bp, Artificial Sequence
  chemically synthesized
gccttcgctttgaatctcccga

SEQ ID NO: 65476 - DNA, 22 bp, Artificial Sequence
  chemically synthesized
ccttcgctttgaatctcccgag

SEQ ID NO: 65477 - DNA, 22 bp, Artificial Sequence
  chemically synthesized
cgctttgaatctcccgagtctt

SEQ ID NO: 65478 - DNA, 22 bp, Artificial Sequence
  chemically synthesized
gctttgaatctcccgagtcttt

SEQ ID NO: 65479 - DNA, 22 bp, Artificial Sequence
  chemically synthesized
tgaatctcccgagtctttttta

SEQ ID NO: 65480 - DNA, 22 bp, Artificial Sequence
  chemically synthesized
gaatctcccgagtcttttttat

SEQ ID NO: 65481 - DNA, 22 bp, Artificial Sequence
  chemically synthesized
aatctcccgagtcttttttatt

SEQ ID NO: 65482 - DNA, 22 bp, Artificial Sequence
  chemically synthesized
ccgagtcttttttattctgata

SEQ ID NO: 65483 - DNA, 22 bp, Artificial Sequence
  chemically synthesized
ttttattctgatagaatagtaa

SEQ ID NO: 65484 - DNA, 22 bp, Artificial Sequence
  chemically synthesized
tttattctgatagaatagtaat

SEQ ID NO: 65485 - DNA, 22 bp, Artificial Sequence
  chemically synthesized
ttattctgatagaatagtaatc

SEQ ID NO: 65486 - DNA, 22 bp, Artificial Sequence
  chemically synthesized
tattctgatagaatagtaatct

SEQ ID NO: 65487 - DNA, 22 bp, Artificial Sequence
  chemically synthesized
attctgatagaatagtaatctt

SEQ ID NO: 65488 - DNA, 22 bp, Artificial Sequence
  chemically synthesized
ttctgatagaatagtaatctta

SEQ ID NO: 65489 - DNA, 22 bp, Artificial Sequence
  chemically synthesized
tgatagaatagtaatcttaaaa

SEQ ID NO: 65490 - DNA, 22 bp, Artificial Sequence
  chemically synthesized
atagaatagtaatcttaaaatt

SEQ ID NO: 65491 - DNA, 22 bp, Artificial Sequence
  chemically synthesized
aaaattaaatattaatttgttc

SEQ ID NO: 65492 - DNA, 22 bp, Artificial Sequence
  chemically synthesized
aaattaaatattaatttgttct

SEQ ID NO: 65493 - DNA, 22 bp, Artificial Sequence
  chemically synthesized
aatattaatttgttctgattcc

SEQ ID NO: 65494 - DNA, 22 bp, Artificial Sequence
  chemically synthesized
atttgttctgattccatttctg

SEQ ID NO: 65495 - DNA, 22 bp, Artificial Sequence
  chemically synthesized
gttctgattccatttctgttag

SEQ ID NO: 65496 - DNA, 22 bp, Artificial Sequence
  chemically synthesized
ttctgattccatttctgttagc

SEQ ID NO: 65497 - DNA, 22 bp, Artificial Sequence
  chemically synthesized
tgattccatttctgttagcagg

SEQ ID NO: 65498 - DNA, 22 bp, Artificial Sequence
  chemically synthesized
attccatttctgttagcaggga

SEQ ID NO: 65499 - DNA, 22 bp, Artificial Sequence
  chemically synthesized
catttctgttagcagggaaaag

SEQ ID NO: 65500 - DNA, 22 bp, Artificial Sequence
  chemically synthesized
ctgttagcagggaaaagggcaa

SEQ ID NO: 65501 - DNA, 22 bp, Artificial Sequence
  chemically synthesized
tgttagcagggaaaagggcaaa

SEQ ID NO: 65502 - DNA, 22 bp, Artificial Sequence
  chemically synthesized
ttagcagggaaaagggcaaata

SEQ ID NO: 65503 - DNA, 22 bp, Artificial Sequence
  chemically synthesized
gcagggaaaagggcaaatacat

SEQ ID NO: 65504 - DNA, 22 bp, Artificial Sequence
  chemically synthesized
agccatggccaggtttgagaga

SEQ ID NO: 65505 - DNA, 22 bp, Artificial Sequence
  chemically synthesized
gagagacagagtgattcgcagt

SEQ ID NO: 65506 - DNA, 22 bp, Artificial Sequence
  chemically synthesized
agagacagagtgattcgcagta

SEQ ID NO: 65507 - DNA, 22 bp, Artificial Sequence
  chemically synthesized
gcagtagtcttcccagggtgtt

SEQ ID NO: 65508 - DNA, 22 bp, Artificial Sequence
  chemically synthesized
cccagggtgttgagtgggaacg

SEQ ID NO: 65509 - DNA, 22 bp, Artificial Sequence
  chemically synthesized
ccagggtgttgagtgggaacgt

SEQ ID NO: 65510 - DNA, 22 bp, Artificial Sequence
  chemically synthesized
agtgggaacgtctccctgggaa

SEQ ID NO: 65511 - DNA, 22 bp, Artificial Sequence
  chemically synthesized
cctgggaagggatgtggtcatt

SEQ ID NO: 65512 - DNA, 22 bp, Artificial Sequence
  chemically synthesized
ggaagggatgtggtcattctca

SEQ ID NO: 65513 - DNA, 22 bp, Artificial Sequence
  chemically synthesized
tcagactgtgggctcagactct

SEQ ID NO: 65514 - DNA, 22 bp, Artificial Sequence
  chemically synthesized
agactgtgggctcagactctgt

SEQ ID NO: 65515 - DNA, 22 bp, Artificial Sequence
  chemically synthesized
tgggctcagactctgtcacact

SEQ ID NO: 65516 - DNA, 22 bp, Artificial Sequence
  chemically synthesized
agactctgtcacactgtaatac

SEQ ID NO: 65517 - DNA, 22 bp, Artificial Sequence
  chemically synthesized
tgtcacactgtaatacctctgt

SEQ ID NO: 65518 - DNA, 22 bp, Artificial Sequence
  chemically synthesized
tcacactgtaatacctctgtca

SEQ ID NO: 65519 - DNA, 22 bp, Artificial Sequence
  chemically synthesized
taatacctctgtcaaccatcta

SEQ ID NO: 65520 - DNA, 22 bp, Artificial Sequence
  chemically synthesized
tgtcaaccatctaatgctatca

SEQ ID NO: 65521 - DNA, 22 bp, Artificial Sequence
  chemically synthesized
tcaaccatctaatgctatcaag

SEQ ID NO: 65522 - DNA, 22 bp, Artificial Sequence
  chemically synthesized
atgctatcaaggccttcctgag

SEQ ID NO: 65523 - DNA, 22 bp, Artificial Sequence
  chemically synthesized
tcaaggccttcctgagagaagt

SEQ ID NO: 65524 - DNA, 22 bp, Artificial Sequence
  chemically synthesized
cctgagagaagtttcaggccca

SEQ ID NO: 65525 - DNA, 22 bp, Artificial Sequence
  chemically synthesized
ctgagagaagtttcaggcccaa

SEQ ID NO: 65526 - DNA, 22 bp, Artificial Sequence
  chemically synthesized
agagaagtttcaggcccaatcc

SEQ ID NO: 65527 - DNA, 22 bp, Artificial Sequence
  chemically synthesized
caggcccaatcctgatgttgag

SEQ ID NO: 65528 - DNA, 22 bp, Artificial Sequence
  chemically synthesized
aggcccaatcctgatgttgagt

SEQ ID NO: 65529 - DNA, 22 bp, Artificial Sequence
  chemically synthesized
atgttgagttggcatgttcaca

SEQ ID NO: 65530 - DNA, 22 bp, Artificial Sequence
  chemically synthesized
agttggcatgttcacatgtctg

SEQ ID NO: 65531 - DNA, 22 bp, Artificial Sequence
  chemically synthesized
gcatgttcacatgtctggtaat

SEQ ID NO: 65532 - DNA, 22 bp, Artificial Sequence
  chemically synthesized
acatgtctggtaataatctgcc

SEQ ID NO: 65533 - DNA, 22 bp, Artificial Sequence
  chemically synthesized
gtaataatctgccagctaatcc

SEQ ID NO: 65534 - DNA, 22 bp, Artificial Sequence
  chemically synthesized
ccagctaatccatcatgctgct

SEQ ID NO: 65535 - DNA, 22 bp, Artificial Sequence
  chemically synthesized
atccatcatgctgctcatttct

SEQ ID NO: 65536 - DNA, 22 bp, Artificial Sequence
  chemically synthesized
ctcatttctgtgcattattcat

SEQ ID NO: 65537 - DNA, 22 bp, Artificial Sequence
  chemically synthesized
atttctgtgcattattcatctc

SEQ ID NO: 65538 - DNA, 22 bp, Artificial Sequence
  chemically synthesized
ctgtgcattattcatctcaaag

SEQ ID NO: 65539 - DNA, 22 bp, Artificial Sequence
  chemically synthesized
tgtgcattattcatctcaaagc

SEQ ID NO: 65540 - DNA, 22 bp, Artificial Sequence
  chemically synthesized
tgcattattcatctcaaagcca

SEQ ID NO: 65541 - DNA, 22 bp, Artificial Sequence
  chemically synthesized
ttcatctcaaagccagaggatc

SEQ ID NO: 65542 - DNA, 22 bp, Artificial Sequence
  chemically synthesized
atctcaaagccagaggatctca

SEQ ID NO: 65543 - DNA, 22 bp, Artificial Sequence
  chemically synthesized
aaagccagaggatctcatgtcc

SEQ ID NO: 65544 - DNA, 22 bp, Artificial Sequence
  chemically synthesized
atgtccatcacagggctgtggt

SEQ ID NO: 65545 - DNA, 22 bp, Artificial Sequence
  chemically synthesized
tggtctgtggatagggaaaatt

SEQ ID NO: 65546 - DNA, 22 bp, Artificial Sequence
  chemically synthesized
tggatagggaaaatttcaaggc

SEQ ID NO: 65547 - DNA, 22 bp, Artificial Sequence
  chemically synthesized
caaggcttttctgggcctgatg

SEQ ID NO: 65548 - DNA, 22 bp, Artificial Sequence
  chemically synthesized
aaggcttttctgggcctgatgt

SEQ ID NO: 65549 - DNA, 22 bp, Artificial Sequence
  chemically synthesized
ttctgggcctgatgtagccatt

SEQ ID NO: 65550 - DNA, 22 bp, Artificial Sequence
  chemically synthesized
tctgggcctgatgtagccattt

SEQ ID NO: 65551 - DNA, 22 bp, Artificial Sequence
  chemically synthesized
ctgggcctgatgtagccatttt

SEQ ID NO: 65552 - DNA, 22 bp, Artificial Sequence
  chemically synthesized
tgggcctgatgtagccattttc

SEQ ID NO: 65553 - DNA, 22 bp, Artificial Sequence
  chemically synthesized
ggcctgatgtagccattttctt

SEQ ID NO: 65554 - DNA, 22 bp, Artificial Sequence
  chemically synthesized
atgtagccattttctttcagta

SEQ ID NO: 65555 - DNA, 22 bp, Artificial Sequence
  chemically synthesized
tctttcagtatcttagattggt

SEQ ID NO: 65556 - DNA, 22 bp, Artificial Sequence
  chemically synthesized
ctttcagtatcttagattggta

SEQ ID NO: 65557 - DNA, 22 bp, Artificial Sequence
  chemically synthesized
tttcagtatcttagattggtag

SEQ ID NO: 65558 - DNA, 22 bp, Artificial Sequence
  chemically synthesized
tcagtatcttagattggtaggt

SEQ ID NO: 65559 - DNA, 22 bp, Artificial Sequence
  chemically synthesized
cagtatcttagattggtaggtc

SEQ ID NO: 65560 - DNA, 22 bp, Artificial Sequence
  chemically synthesized
agtatcttagattggtaggtct

SEQ ID NO: 65561 - DNA, 22 bp, Artificial Sequence
  chemically synthesized
agattggtaggtctttagaaat

SEQ ID NO: 65562 - DNA, 22 bp, Artificial Sequence
  chemically synthesized
gattggtaggtctttagaaatt

SEQ ID NO: 65563 - DNA, 22 bp, Artificial Sequence
  chemically synthesized
gtaggtctttagaaattatctc

SEQ ID NO: 65564 - DNA, 22 bp, Artificial Sequence
  chemically synthesized
tagaaattatctctcaaaatgt

SEQ ID NO: 65565 - DNA, 22 bp, Artificial Sequence
  chemically synthesized
agaaattatctctcaaaatgtg

SEQ ID NO: 65566 - DNA, 22 bp, Artificial Sequence
  chemically synthesized
gaaattatctctcaaaatgtgt

SEQ ID NO: 65567 - DNA, 22 bp, Artificial Sequence
  chemically synthesized
tctctcaaaatgtgtgtgtgtg

SEQ ID NO: 65568 - DNA, 22 bp, Artificial Sequence
  chemically synthesized
tcaaaatgtgtgtgtgtgtgcc

SEQ ID NO: 65569 - DNA, 22 bp, Artificial Sequence
  chemically synthesized
aaaatgtgtgtgtgtgtgccta

SEQ ID NO: 65570 - DNA, 22 bp, Artificial Sequence
  chemically synthesized
agtatagttttcttgaatttct

SEQ ID NO: 65571 - DNA, 22 bp, Artificial Sequence
  chemically synthesized
tcttgaatttctcacttcagta

SEQ ID NO: 65572 - DNA, 22 bp, Artificial Sequence
  chemically synthesized
cttgaatttctcacttcagtac

SEQ ID NO: 65573 - DNA, 22 bp, Artificial Sequence
  chemically synthesized
ttgaatttctcacttcagtact

SEQ ID NO: 65574 - DNA, 22 bp, Artificial Sequence
  chemically synthesized
gaatttctcacttcagtactta

SEQ ID NO: 65575 - DNA, 22 bp, Artificial Sequence
  chemically synthesized
aatttctcacttcagtacttaa

SEQ ID NO: 65576 - DNA, 22 bp, Artificial Sequence
  chemically synthesized
ctcacttcagtacttaactaca

SEQ ID NO: 65577 - DNA, 22 bp, Artificial Sequence
  chemically synthesized
tcacttcagtacttaactacac

SEQ ID NO: 65578 - DNA, 22 bp, Artificial Sequence
  chemically synthesized
acttcagtacttaactacacat

SEQ ID NO: 65579 - DNA, 22 bp, Artificial Sequence
  chemically synthesized
cagtacttaactacacatatgt

SEQ ID NO: 65580 - DNA, 22 bp, Artificial Sequence
  chemically synthesized
agtacttaactacacatatgtg

SEQ ID NO: 65581 - DNA, 22 bp, Artificial Sequence
  chemically synthesized
aactacacatatgtgcagaaag

SEQ ID NO: 65582 - DNA, 22 bp, Artificial Sequence
  chemically synthesized
actacacatatgtgcagaaagt

SEQ ID NO: 65583 - DNA, 22 bp, Artificial Sequence
  chemically synthesized
cacatatgtgcagaaagtgaac

SEQ ID NO: 65584 - DNA, 22 bp, Artificial Sequence
  chemically synthesized
ttagaatttggctatccgttct

SEQ ID NO: 65585 - DNA, 22 bp, Artificial Sequence
  chemically synthesized
agaatttggctatccgttcttt

SEQ ID NO: 65586 - DNA, 22 bp, Artificial Sequence
  chemically synthesized
gaatttggctatccgttctttc

SEQ ID NO: 65587 - DNA, 22 bp, Artificial Sequence
  chemically synthesized
ggctatccgttctttctcattg

SEQ ID NO: 65588 - DNA, 22 bp, Artificial Sequence
  chemically synthesized
gctatccgttctttctcattgt

SEQ ID NO: 65589 - DNA, 22 bp, Artificial Sequence
  chemically synthesized
tccgttctttctcattgtgtga

SEQ ID NO: 65590 - DNA, 22 bp, Artificial Sequence
  chemically synthesized
tttctcattgtgtgagaaggag

SEQ ID NO: 65591 - DNA, 22 bp, Artificial Sequence
  chemically synthesized
tctcattgtgtgagaaggaggc

SEQ ID NO: 65592 - DNA, 22 bp, Artificial Sequence
  chemically synthesized
ctcattgtgtgagaaggaggca

SEQ ID NO: 65593 - DNA, 22 bp, Artificial Sequence
  chemically synthesized
tcattgtgtgagaaggaggcaa

SEQ ID NO: 65594 - DNA, 22 bp, Artificial Sequence
  chemically synthesized
attgtgtgagaaggaggcaaag

SEQ ID NO: 65595 - DNA, 22 bp, Artificial Sequence
  chemically synthesized
tgtgagaaggaggcaaagttgc

SEQ ID NO: 65596 - DNA, 22 bp, Artificial Sequence
  chemically synthesized
ccaaattggaggtggggcaagg

SEQ ID NO: 65597 - DNA, 22 bp, Artificial Sequence
  chemically synthesized
gaggtggggcaaggtgggccag

SEQ ID NO: 65598 - DNA, 22 bp, Artificial Sequence
  chemically synthesized
tgattggtgtctcactttgatg

SEQ ID NO: 65599 - DNA, 22 bp, Artificial Sequence
  chemically synthesized
gtgtctcactttgatgtgtagg

SEQ ID NO: 65600 - DNA, 22 bp, Artificial Sequence
  chemically synthesized
actttgatgtgtaggagagaga

SEQ ID NO: 65601 - DNA, 22 bp, Artificial Sequence
  chemically synthesized
tgatgtgtaggagagagaacaa

SEQ ID NO: 65602 - DNA, 22 bp, Artificial Sequence
  chemically synthesized
gatgtgtaggagagagaacaaa

SEQ ID NO: 65603 - DNA, 22 bp, Artificial Sequence
  chemically synthesized
atgtgtaggagagagaacaaat

SEQ ID NO: 65604 - DNA, 22 bp, Artificial Sequence
  chemically synthesized
tctggaaaggagccatggtcca

SEQ ID NO: 65605 - DNA, 22 bp, Artificial Sequence
  chemically synthesized
tggaaaggagccatggtccacc

SEQ ID NO: 65606 - DNA, 22 bp, Artificial Sequence
  chemically synthesized
gaaaggagccatggtccaccca

SEQ ID NO: 65607 - DNA, 22 bp, Artificial Sequence
  chemically synthesized
aaatccccagtaccagtctccc

SEQ ID NO: 65608 - DNA, 22 bp, Artificial Sequence
  chemically synthesized
cctaggatgtcttgcctttcag

SEQ ID NO: 65609 - DNA, 22 bp, Artificial Sequence
  chemically synthesized
ggatgtcttgcctttcagcagc

SEQ ID NO: 65610 - DNA, 22 bp, Artificial Sequence
  chemically synthesized
gcctttcagcagctgttcagtc

SEQ ID NO: 65611 - DNA, 22 bp, Artificial Sequence
  chemically synthesized
cctttcagcagctgttcagtca

SEQ ID NO: 65612 - DNA, 22 bp, Artificial Sequence
  chemically synthesized
tcagcagctgttcagtcaaatc

SEQ ID NO: 65613 - DNA, 22 bp, Artificial Sequence
  chemically synthesized
cagcagctgttcagtcaaatcc

SEQ ID NO: 65614 - DNA, 22 bp, Artificial Sequence
  chemically synthesized
agcagctgttcagtcaaatcca

SEQ ID NO: 65615 - DNA, 22 bp, Artificial Sequence
  chemically synthesized
ttcagtcaaatccatttcagaa

SEQ ID NO: 65616 - DNA, 22 bp, Artificial Sequence
  chemically synthesized
agtcaaatccatttcagaatgg

SEQ ID NO: 65617 - DNA, 22 bp, Artificial Sequence
  chemically synthesized
cagaatggagaacagcttgtca

SEQ ID NO: 65618 - DNA, 22 bp, Artificial Sequence
  chemically synthesized
agaatggagaacagcttgtcac

SEQ ID NO: 65619 - DNA, 22 bp, Artificial Sequence
  chemically synthesized
gtcacagttctctactcttgac

SEQ ID NO: 65620 - DNA, 22 bp, Artificial Sequence
  chemically synthesized
tcacagttctctactcttgacc

SEQ ID NO: 65621 - DNA, 22 bp, Artificial Sequence
  chemically synthesized
tctactcttgacctgctgatag

SEQ ID NO: 65622 - DNA, 22 bp, Artificial Sequence
  chemically synthesized
tactcttgacctgctgatagaa

SEQ ID NO: 65623 - DNA, 22 bp, Artificial Sequence
  chemically synthesized
ctcttgacctgctgatagaaca

SEQ ID NO: 65624 - DNA, 22 bp, Artificial Sequence
  chemically synthesized
ttgacctgctgatagaacaagg

SEQ ID NO: 65625 - DNA, 22 bp, Artificial Sequence
  chemically synthesized
gacctgctgatagaacaagggg

SEQ ID NO: 65626 - DNA, 22 bp, Artificial Sequence
  chemically synthesized
acctgctgatagaacaaggggc

SEQ ID NO: 65627 - DNA, 22 bp, Artificial Sequence
  chemically synthesized
ctgatagaacaaggggcttgga

SEQ ID NO: 65628 - DNA, 22 bp, Artificial Sequence
  chemically synthesized
atagaacaaggggcttggagat

SEQ ID NO: 65629 - DNA, 22 bp, Artificial Sequence
  chemically synthesized
ggagattttgggtagatatgga

SEQ ID NO: 65630 - DNA, 22 bp, Artificial Sequence
  chemically synthesized
gagattttgggtagatatggaa

SEQ ID NO: 65631 - DNA, 22 bp, Artificial Sequence
  chemically synthesized
tgggtagatatggaaatagatc

SEQ ID NO: 65632 - DNA, 22 bp, Artificial Sequence
  chemically synthesized
gggtagatatggaaatagatcc

SEQ ID NO: 65633 - DNA, 22 bp, Artificial Sequence
  chemically synthesized
ggtagatatggaaatagatccc

SEQ ID NO: 65634 - DNA, 22 bp, Artificial Sequence
  chemically synthesized
aacatactaaaaagattttttt

SEQ ID NO: 65635 - DNA, 22 bp, Artificial Sequence
  chemically synthesized
aaaagattttttttgtacgtgt

SEQ ID NO: 65636 - DNA, 22 bp, Artificial Sequence
  chemically synthesized
tttttgtacgtgtggtggggga

SEQ ID NO: 65637 - DNA, 22 bp, Artificial Sequence
  chemically synthesized
ttttgtacgtgtggtgggggag

SEQ ID NO: 65638 - DNA, 22 bp, Artificial Sequence
  chemically synthesized
tttgtacgtgtggtgggggaga

SEQ ID NO: 65639 - DNA, 22 bp, Artificial Sequence
  chemically synthesized
ttgtacgtgtggtgggggagag

SEQ ID NO: 65640 - DNA, 22 bp, Artificial Sequence
  chemically synthesized
tgtacgtgtggtgggggagagg

SEQ ID NO: 65641 - DNA, 22 bp, Artificial Sequence
  chemically synthesized
gtacgtgtggtgggggagagga

SEQ ID NO: 65642 - DNA, 22 bp, Artificial Sequence
  chemically synthesized
tacgtgtggtgggggagaggag

SEQ ID NO: 65643 - DNA, 22 bp, Artificial Sequence
  chemically synthesized
gagaaagaaagttggggaagga

SEQ ID NO: 65644 - DNA, 22 bp, Artificial Sequence
  chemically synthesized
gggaaggaaactaaaatgtgca

SEQ ID NO: 65645 - DNA, 22 bp, Artificial Sequence
  chemically synthesized
aaatgtgcaatctcattcctca

SEQ ID NO: 65646 - DNA, 22 bp, Artificial Sequence
  chemically synthesized
attcctcagccttcttgttgaa

SEQ ID NO: 65647 - DNA, 22 bp, Artificial Sequence
  chemically synthesized
ctcagccttcttgttgaaaatg

SEQ ID NO: 65648 - DNA, 22 bp, Artificial Sequence
  chemically synthesized
agccttcttgttgaaaatgaga

SEQ ID NO: 65649 - DNA, 22 bp, Artificial Sequence
  chemically synthesized
cttgttgaaaatgagaatcaga

SEQ ID NO: 65650 - DNA, 22 bp, Artificial Sequence
  chemically synthesized
ttgttgaaaatgagaatcagat

SEQ ID NO: 65651 - DNA, 22 bp, Artificial Sequence
  chemically synthesized
gttgaaaatgagaatcagatgc

SEQ ID NO: 65652 - DNA, 22 bp, Artificial Sequence
  chemically synthesized
ttgaaaatgagaatcagatgca

SEQ ID NO: 65653 - DNA, 22 bp, Artificial Sequence
  chemically synthesized
aaaatgagaatcagatgcagca

SEQ ID NO: 65654 - DNA, 22 bp, Artificial Sequence
  chemically synthesized
tttccaagagctatctggtgat

SEQ ID NO: 65655 - DNA, 22 bp, Artificial Sequence
  chemically synthesized
ccaagagctatctggtgatggg

SEQ ID NO: 65656 - DNA, 22 bp, Artificial Sequence
  chemically synthesized
caagagctatctggtgatggga

SEQ ID NO: 65657 - DNA, 22 bp, Artificial Sequence
  chemically synthesized
tctggtgatgggatccatctgg

SEQ ID NO: 65658 - DNA, 22 bp, Artificial Sequence
  chemically synthesized
gtgatgggatccatctggtgaa

SEQ ID NO: 65659 - DNA, 22 bp, Artificial Sequence
  chemically synthesized
gtgaagggctacttctggggga

SEQ ID NO: 65660 - DNA, 22 bp, Artificial Sequence
  chemically synthesized
cttctgggggacctggaattgc

SEQ ID NO: 65661 - DNA, 22 bp, Artificial Sequence
  chemically synthesized
ctgggggacctggaattgctgt

SEQ ID NO: 65662 - DNA, 22 bp, Artificial Sequence
  chemically synthesized
tgggggacctggaattgctgtg

SEQ ID NO: 65663 - DNA, 22 bp, Artificial Sequence
  chemically synthesized
ggggacctggaattgctgtgtg

SEQ ID NO: 65664 - DNA, 22 bp, Artificial Sequence
  chemically synthesized
gaattgctgtgtgacctttggg

SEQ ID NO: 65665 - DNA, 22 bp, Artificial Sequence
  chemically synthesized
ctgtgtgacctttgggaaacac

SEQ ID NO: 65666 - DNA, 22 bp, Artificial Sequence
  chemically synthesized
tgtgacctttgggaaacacttg

SEQ ID NO: 65667 - DNA, 22 bp, Artificial Sequence
  chemically synthesized
tgggaaacacttgccttctctg

SEQ ID NO: 65668 - DNA, 22 bp, Artificial Sequence
  chemically synthesized
gggaaacacttgccttctctgg

SEQ ID NO: 65669 - DNA, 22 bp, Artificial Sequence
  chemically synthesized
ggaaacacttgccttctctggg

SEQ ID NO: 65670 - DNA, 22 bp, Artificial Sequence
  chemically synthesized
gccttctctgggttgagctcag

SEQ ID NO: 65671 - DNA, 22 bp, Artificial Sequence
  chemically synthesized
ccttctctgggttgagctcagc

SEQ ID NO: 65672 - DNA, 22 bp, Artificial Sequence
  chemically synthesized
ctctgggttgagctcagcccgt

SEQ ID NO: 65673 - DNA, 22 bp, Artificial Sequence
  chemically synthesized
tctgggttgagctcagcccgta

SEQ ID NO: 65674 - DNA, 22 bp, Artificial Sequence
  chemically synthesized
tgggttgagctcagcccgtagt

SEQ ID NO: 65675 - DNA, 22 bp, Artificial Sequence
  chemically synthesized
ggttgagctcagcccgtagttc

SEQ ID NO: 65676 - DNA, 22 bp, Artificial Sequence
  chemically synthesized
agctcagcccgtagttcacaag

SEQ ID NO: 65677 - DNA, 22 bp, Artificial Sequence
  chemically synthesized
agcccgtagttcacaaggggca

SEQ ID NO: 65678 - DNA, 22 bp, Artificial Sequence
  chemically synthesized
acaaggggcattgctggtattt

SEQ ID NO: 65679 - DNA, 22 bp, Artificial Sequence
  chemically synthesized
ctggtatttatagactgtgttt

SEQ ID NO: 65680 - DNA, 22 bp, Artificial Sequence
  chemically synthesized
gtatttatagactgtgtttgac

SEQ ID NO: 65681 - DNA, 22 bp, Artificial Sequence
  chemically synthesized
atagactgtgtttgacagtccc

SEQ ID NO: 65682 - DNA, 22 bp, Artificial Sequence
  chemically synthesized
tagactgtgtttgacagtcccg

SEQ ID NO: 65683 - DNA, 22 bp, Artificial Sequence
  chemically synthesized
tgtttgacagtcccgagtgaaa

SEQ ID NO: 65684 - DNA, 22 bp, Artificial Sequence
  chemically synthesized
gacagtcccgagtgaaaggcaa

SEQ ID NO: 65685 - DNA, 22 bp, Artificial Sequence
  chemically synthesized
acagtcccgagtgaaaggcaac

SEQ ID NO: 65686 - DNA, 22 bp, Artificial Sequence
  chemically synthesized
cacttctcaccccagaatagca

SEQ ID NO: 65687 - DNA, 22 bp, Artificial Sequence
  chemically synthesized
acttctcaccccagaatagcaa

SEQ ID NO: 65688 - DNA, 22 bp, Artificial Sequence
  chemically synthesized
ctcaccccagaatagcaagcgt

SEQ ID NO: 65689 - DNA, 22 bp, Artificial Sequence
  chemically synthesized
tcaccccagaatagcaagcgtt

SEQ ID NO: 65690 - DNA, 22 bp, Artificial Sequence
  chemically synthesized
accccagaatagcaagcgttgt

SEQ ID NO: 65691 - DNA, 22 bp, Artificial Sequence
  chemically synthesized
tttctcatatctaggttgctgg

SEQ ID NO: 65692 - DNA, 22 bp, Artificial Sequence
  chemically synthesized
ctcatatctaggttgctgggac

SEQ ID NO: 65693 - DNA, 22 bp, Artificial Sequence
  chemically synthesized
tcatatctaggttgctgggaca

SEQ ID NO: 65694 - DNA, 22 bp, Artificial Sequence
  chemically synthesized
atatctaggttgctgggacagc

SEQ ID NO: 65695 - DNA, 22 bp, Artificial Sequence
  chemically synthesized
ggttgctgggacagcttcccag

SEQ ID NO: 65696 - DNA, 22 bp, Artificial Sequence
  chemically synthesized
ctgggacagcttcccaggaacc

SEQ ID NO: 65697 - DNA, 22 bp, Artificial Sequence
  chemically synthesized
ggacagcttcccaggaacctaa

SEQ ID NO: 65698 - DNA, 22 bp, Artificial Sequence
  chemically synthesized
cccaggaacctaatattcagca

SEQ ID NO: 65699 - DNA, 22 bp, Artificial Sequence
  chemically synthesized
ccaggaacctaatattcagcag

SEQ ID NO: 65700 - DNA, 22 bp, Artificial Sequence
  chemically synthesized
atattcagcagcttcgtgacgt

SEQ ID NO: 65701 - DNA, 22 bp, Artificial Sequence
  chemically synthesized
agcagcttcgtgacgttggatg

SEQ ID NO: 65702 - DNA, 22 bp, Artificial Sequence
  chemically synthesized
cgtgacgttggatggagggttt

SEQ ID NO: 65703 - DNA, 22 bp, Artificial Sequence
  chemically synthesized
gtgacgttggatggagggtttt

SEQ ID NO: 65704 - DNA, 22 bp, Artificial Sequence
  chemically synthesized
gatggagggtttttctttttaa

SEQ ID NO: 65705 - DNA, 22 bp, Artificial Sequence
  chemically synthesized
ttctttttaaatgagttgattg

SEQ ID NO: 65706 - DNA, 22 bp, Artificial Sequence
  chemically synthesized
tctttttaaatgagttgattgg

SEQ ID NO: 65707 - DNA, 22 bp, Artificial Sequence
  chemically synthesized
ctttttaaatgagttgattggc

SEQ ID NO: 65708 - DNA, 22 bp, Artificial Sequence
  chemically synthesized
tttttaaatgagttgattggct

SEQ ID NO: 65709 - DNA, 22 bp, Artificial Sequence
  chemically synthesized
tttaaatgagttgattggcttt

SEQ ID NO: 65710 - DNA, 22 bp, Artificial Sequence
  chemically synthesized
ttaaatgagttgattggctttt

SEQ ID NO: 65711 - DNA, 22 bp, Artificial Sequence
  chemically synthesized
taaatgagttgattggcttttg

SEQ ID NO: 65712 - DNA, 22 bp, Artificial Sequence
  chemically synthesized
aaatgagttgattggcttttgc

SEQ ID NO: 65713 - DNA, 22 bp, Artificial Sequence
  chemically synthesized
aatgagttgattggcttttgcc

SEQ ID NO: 65714 - DNA, 22 bp, Artificial Sequence
  chemically synthesized
attggcttttgccactttacac

SEQ ID NO: 65715 - DNA, 22 bp, Artificial Sequence
  chemically synthesized
gcttttgccactttacacattg

SEQ ID NO: 65716 - DNA, 22 bp, Artificial Sequence
  chemically synthesized
ttgccactttacacattgtttt

SEQ ID NO: 65717 - DNA, 22 bp, Artificial Sequence
  chemically synthesized
tgccactttacacattgttttc

SEQ ID NO: 65718 - DNA, 22 bp, Artificial Sequence
  chemically synthesized
gccactttacacattgttttcc

SEQ ID NO: 65719 - DNA, 22 bp, Artificial Sequence
  chemically synthesized
ccactttacacattgttttcca

SEQ ID NO: 65720 - DNA, 22 bp, Artificial Sequence
  chemically synthesized
tacacattgttttccaggtcta

SEQ ID NO: 65721 - DNA, 22 bp, Artificial Sequence
  chemically synthesized
acacattgttttccaggtctag

SEQ ID NO: 65722 - DNA, 22 bp, Artificial Sequence
  chemically synthesized
cacattgttttccaggtctagg

SEQ ID NO: 65723 - DNA, 22 bp, Artificial Sequence
  chemically synthesized
ttttccaggtctaggtttattt

SEQ ID NO: 65724 - DNA, 22 bp, Artificial Sequence
  chemically synthesized
tccaggtctaggtttatttttc

SEQ ID NO: 65725 - DNA, 22 bp, Artificial Sequence
  chemically synthesized
ccaggtctaggtttatttttcc

SEQ ID NO: 65726 - DNA, 22 bp, Artificial Sequence
  chemically synthesized
caggtctaggtttatttttccc

SEQ ID NO: 65727 - DNA, 22 bp, Artificial Sequence
  chemically synthesized
ggtttatttttcccttataggt

SEQ ID NO: 65728 - DNA, 22 bp, Artificial Sequence
  chemically synthesized
atttttcccttataggtagaat

SEQ ID NO: 65729 - DNA, 22 bp, Artificial Sequence
  chemically synthesized
tttttcccttataggtagaata

SEQ ID NO: 65730 - DNA, 22 bp, Artificial Sequence
  chemically synthesized
ttcccttataggtagaatataa

SEQ ID NO: 65731 - DNA, 22 bp, Artificial Sequence
  chemically synthesized
tcccttataggtagaatataaa

SEQ ID NO: 65732 - DNA, 22 bp, Artificial Sequence
  chemically synthesized
cccttataggtagaatataaaa

SEQ ID NO: 65733 - DNA, 22 bp, Artificial Sequence
  chemically synthesized
ccttataggtagaatataaaag

SEQ ID NO: 65734 - DNA, 22 bp, Artificial Sequence
  chemically synthesized
ataggtagaatataaaagagta

SEQ ID NO: 65735 - DNA, 22 bp, Artificial Sequence
  chemically synthesized
taggtagaatataaaagagtat

SEQ ID NO: 65736 - DNA, 22 bp, Artificial Sequence
  chemically synthesized
ccctggctcacaccgttctgtt

SEQ ID NO: 65737 - DNA, 22 bp, Artificial Sequence
  chemically synthesized
gctcacaccgttctgtttttgc

SEQ ID NO: 65738 - DNA, 22 bp, Artificial Sequence
  chemically synthesized
acaccgttctgtttttgcagtt

SEQ ID NO: 65739 - DNA, 22 bp, Artificial Sequence
  chemically synthesized
tgtttttgcagttagcttaaag

SEQ ID NO: 65740 - DNA, 22 bp, Artificial Sequence
  chemically synthesized
tttttgcagttagcttaaaggc

SEQ ID NO: 65741 - DNA, 22 bp, Artificial Sequence
  chemically synthesized
ttgcagttagcttaaaggcatg

SEQ ID NO: 65742 - DNA, 22 bp, Artificial Sequence
  chemically synthesized
tgcagttagcttaaaggcatgg

SEQ ID NO: 65743 - DNA, 22 bp, Artificial Sequence
  chemically synthesized
gcagttagcttaaaggcatgga

SEQ ID NO: 65744 - DNA, 22 bp, Artificial Sequence
  chemically synthesized
cagttagcttaaaggcatggag

SEQ ID NO: 65745 - DNA, 22 bp, Artificial Sequence
  chemically synthesized
gcttaaaggcatggaggacatt

SEQ ID NO: 65746 - DNA, 22 bp, Artificial Sequence
  chemically synthesized
aaaggcatggaggacattcctg

SEQ ID NO: 65747 - DNA, 22 bp, Artificial Sequence
  chemically synthesized
aaggcatggaggacattcctgg

SEQ ID NO: 65748 - DNA, 22 bp, Artificial Sequence
  chemically synthesized
ctgggactagcatctgctagcc

SEQ ID NO: 65749 - DNA, 22 bp, Artificial Sequence
  chemically synthesized
ggactagcatctgctagccaag

SEQ ID NO: 65750 - DNA, 22 bp, Artificial Sequence
  chemically synthesized
gcatctgctagccaagaacgaa

SEQ ID NO: 65751 - DNA, 22 bp, Artificial Sequence
  chemically synthesized
ctagccaagaacgaagatgaca

SEQ ID NO: 65752 - DNA, 22 bp, Artificial Sequence
  chemically synthesized
gccaagaacgaagatgacagca

SEQ ID NO: 65753 - DNA, 22 bp, Artificial Sequence
  chemically synthesized
ctggggctaataacccactgca

SEQ ID NO: 65754 - DNA, 22 bp, Artificial Sequence
  chemically synthesized
gggctaataacccactgcaggc

SEQ ID NO: 65755 - DNA, 22 bp, Artificial Sequence
  chemically synthesized
ataacccactgcaggctatcct

SEQ ID NO: 65756 - DNA, 22 bp, Artificial Sequence
  chemically synthesized
caggctatccttggcattcttg

SEQ ID NO: 65757 - DNA, 22 bp, Artificial Sequence
  chemically synthesized
tccttggcattcttgctggagt

SEQ ID NO: 65758 - DNA, 22 bp, Artificial Sequence
  chemically synthesized
ggcattcttgctggagtggcct

SEQ ID NO: 65759 - DNA, 22 bp, Artificial Sequence
  chemically synthesized
gcattcttgctggagtggcctt

SEQ ID NO: 65760 - DNA, 22 bp, Artificial Sequence
  chemically synthesized
ttgctggagtggccttgctcca

SEQ ID NO: 65761 - DNA, 22 bp, Artificial Sequence
  chemically synthesized
gctggagtggccttgctccacc

SEQ ID NO: 65762 - DNA, 22 bp, Artificial Sequence
  chemically synthesized
ctggagtggccttgctccaccc

SEQ ID NO: 65763 - DNA, 22 bp, Artificial Sequence
  chemically synthesized
gagtggccttgctccaccctac

SEQ ID NO: 65764 - DNA, 22 bp, Artificial Sequence
  chemically synthesized
gctccaccctacctggtcactg

SEQ ID NO: 65765 - DNA, 22 bp, Artificial Sequence
  chemically synthesized
ctccaccctacctggtcactgt

SEQ ID NO: 65766 - DNA, 22 bp, Artificial Sequence
  chemically synthesized
caccctacctggtcactgtgcc

SEQ ID NO: 65767 - DNA, 22 bp, Artificial Sequence
  chemically synthesized
cctggtcactgtgccgttcagt

SEQ ID NO: 65768 - DNA, 22 bp, Artificial Sequence
  chemically synthesized
gtcactgtgccgttcagtctgg

SEQ ID NO: 65769 - DNA, 22 bp, Artificial Sequence
  chemically synthesized
tgccgttcagtctgggctatgg

SEQ ID NO: 65770 - DNA, 22 bp, Artificial Sequence
  chemically synthesized
agtctgggctatggcctctcac

SEQ ID NO: 65771 - DNA, 22 bp, Artificial Sequence
  chemically synthesized
ggctatggcctctcaccccacc

SEQ ID NO: 65772 - DNA, 22 bp, Artificial Sequence
  chemically synthesized
tggcctctcaccccacctcatc

SEQ ID NO: 65773 - DNA, 22 bp, Artificial Sequence
  chemically synthesized
tcaccccacctcatcccattgc

SEQ ID NO: 65774 - DNA, 22 bp, Artificial Sequence
  chemically synthesized
accccacctcatcccattgcat

SEQ ID NO: 65775 - DNA, 22 bp, Artificial Sequence
  chemically synthesized
atcccattgcatttcataagcc

SEQ ID NO: 65776 - DNA, 22 bp, Artificial Sequence
  chemically synthesized
catttcataagccagtaactcc

SEQ ID NO: 65777 - DNA, 22 bp, Artificial Sequence
  chemically synthesized
cataagccagtaactccaaggc

SEQ ID NO: 65778 - DNA, 22 bp, Artificial Sequence
  chemically synthesized
ataagccagtaactccaaggcc

SEQ ID NO: 65779 - DNA, 22 bp, Artificial Sequence
  chemically synthesized
caaggccagacttccattacac

SEQ ID NO: 65780 - DNA, 22 bp, Artificial Sequence
  chemically synthesized
ccattacactctggatgactgc

SEQ ID NO: 65781 - DNA, 22 bp, Artificial Sequence
  chemically synthesized
cattacactctggatgactgca

SEQ ID NO: 65782 - DNA, 22 bp, Artificial Sequence
  chemically synthesized
cactctggatgactgcatttat

SEQ ID NO: 65783 - DNA, 22 bp, Artificial Sequence
  chemically synthesized
tggatgactgcatttatttgca

SEQ ID NO: 65784 - DNA, 22 bp, Artificial Sequence
  chemically synthesized
gatgactgcatttatttgcagt

SEQ ID NO: 65785 - DNA, 22 bp, Artificial Sequence
  chemically synthesized
catttatttgcagtgacttcaa

SEQ ID NO: 65786 - DNA, 22 bp, Artificial Sequence
  chemically synthesized
atttgcagtgacttcaaggaag

SEQ ID NO: 65787 - DNA, 22 bp, Artificial Sequence
  chemically synthesized
tttgcagtgacttcaaggaaga

SEQ ID NO: 65788 - DNA, 22 bp, Artificial Sequence
  chemically synthesized
gcagtgacttcaaggaagaagg

SEQ ID NO: 65789 - DNA, 22 bp, Artificial Sequence
  chemically synthesized
cagtgacttcaaggaagaaggg

SEQ ID NO: 65790 - DNA, 22 bp, Artificial Sequence
  chemically synthesized
caaggaagaaggggcctgttta

SEQ ID NO: 65791 - DNA, 22 bp, Artificial Sequence
  chemically synthesized
aaggaagaaggggcctgtttag

SEQ ID NO: 65792 - DNA, 22 bp, Artificial Sequence
  chemically synthesized
tttaggaaattaggcactggcc

SEQ ID NO: 65793 - DNA, 22 bp, Artificial Sequence
  chemically synthesized
aggaaattaggcactggcctgg

SEQ ID NO: 65794 - DNA, 22 bp, Artificial Sequence
  chemically synthesized
ggaaattaggcactggcctggt

SEQ ID NO: 65795 - DNA, 22 bp, Artificial Sequence
  chemically synthesized
ggcactggcctggtgaaaaggt

SEQ ID NO: 65796 - DNA, 22 bp, Artificial Sequence
  chemically synthesized
gcctggtgaaaaggtcaacttg

SEQ ID NO: 65797 - DNA, 22 bp, Artificial Sequence
  chemically synthesized
gtgaaaaggtcaacttgcgaaa

SEQ ID NO: 65798 - DNA, 22 bp, Artificial Sequence
  chemically synthesized
gcgaaattgtggctgcaaggga

SEQ ID NO: 65799 - DNA, 22 bp, Artificial Sequence
  chemically synthesized
cgaaattgtggctgcaagggat

SEQ ID NO: 65800 - DNA, 22 bp, Artificial Sequence
  chemically synthesized
tggctgcaagggatgccttttt

SEQ ID NO: 65801 - DNA, 22 bp, Artificial Sequence
  chemically synthesized
caagggatgcctttttcttcca

SEQ ID NO: 65802 - DNA, 22 bp, Artificial Sequence
  chemically synthesized
tttcttccaaggctatgccttg

SEQ ID NO: 65803 - DNA, 22 bp, Artificial Sequence
  chemically synthesized
ttcttccaaggctatgccttgg

SEQ ID NO: 65804 - DNA, 22 bp, Artificial Sequence
  chemically synthesized
tcttccaaggctatgccttggt

SEQ ID NO: 65805 - DNA, 22 bp, Artificial Sequence
  chemically synthesized
cttccaaggctatgccttggtg

SEQ ID NO: 65806 - DNA, 22 bp, Artificial Sequence
  chemically synthesized
ttccaaggctatgccttggtgg

SEQ ID NO: 65807 - DNA, 22 bp, Artificial Sequence
  chemically synthesized
ccaaggctatgccttggtggtg

SEQ ID NO: 65808 - DNA, 22 bp, Artificial Sequence
  chemically synthesized
caaggctatgccttggtggtgg

SEQ ID NO: 65809 - DNA, 22 bp, Artificial Sequence
  chemically synthesized
tgccttggtggtggtggtgagg

SEQ ID NO: 65810 - DNA, 22 bp, Artificial Sequence
  chemically synthesized
ggtggtggtggtgagggtgtac

SEQ ID NO: 65811 - DNA, 22 bp, Artificial Sequence
  chemically synthesized
gtggtggtggtgagggtgtaca

SEQ ID NO: 65812 - DNA, 22 bp, Artificial Sequence
  chemically synthesized
ttttttgtatttcctattttga

SEQ ID NO: 65813 - DNA, 22 bp, Artificial Sequence
  chemically synthesized
tttgtatttcctattttgattt

SEQ ID NO: 65814 - DNA, 22 bp, Artificial Sequence
  chemically synthesized
ttgtatttcctattttgattta

SEQ ID NO: 65815 - DNA, 22 bp, Artificial Sequence
  chemically synthesized
tgtatttcctattttgatttaa

SEQ ID NO: 65816 - DNA, 22 bp, Artificial Sequence
  chemically synthesized
gtatttcctattttgatttaaa

SEQ ID NO: 65817 - DNA, 22 bp, Artificial Sequence
  chemically synthesized
tatttcctattttgatttaaat

SEQ ID NO: 65818 - DNA, 22 bp, Artificial Sequence
  chemically synthesized
cctattttgatttaaatactgt

SEQ ID NO: 65819 - DNA, 22 bp, Artificial Sequence
  chemically synthesized
ctattttgatttaaatactgtt

SEQ ID NO: 65820 - DNA, 22 bp, Artificial Sequence
  chemically synthesized
ttttgatttaaatactgttttt

SEQ ID NO: 65821 - DNA, 22 bp, Artificial Sequence
  chemically synthesized
tgatttaaatactgttttttgt

SEQ ID NO: 65822 - DNA, 22 bp, Artificial Sequence
  chemically synthesized
gatttaaatactgttttttgtt

SEQ ID NO: 65823 - DNA, 22 bp, Artificial Sequence
  chemically synthesized
atttaaatactgttttttgttt

SEQ ID NO: 65824 - DNA, 22 bp, Artificial Sequence
  chemically synthesized
aaatactgttttttgtttggtt

SEQ ID NO: 65825 - DNA, 22 bp, Artificial Sequence
  chemically synthesized
aatactgttttttgtttggttg

SEQ ID NO: 65826 - DNA, 22 bp, Artificial Sequence
  chemically synthesized
ttttttgtttggttggttggtt

SEQ ID NO: 65827 - DNA, 22 bp, Artificial Sequence
  chemically synthesized
tttgtttggttggttggttttt

SEQ ID NO: 65828 - DNA, 22 bp, Artificial Sequence
  chemically synthesized
ttgtttggttggttggtttttt

SEQ ID NO: 65829 - DNA, 22 bp, Artificial Sequence
  chemically synthesized
tgtttggttggttggttttttt

SEQ ID NO: 65830 - DNA, 22 bp, Artificial Sequence
  chemically synthesized
gtttggttggttggtttttttt

SEQ ID NO: 65831 - DNA, 22 bp, Artificial Sequence
  chemically synthesized
tttggttggttggttttttttt

SEQ ID NO: 65832 - DNA, 22 bp, Artificial Sequence
  chemically synthesized
ggttggttggtttttttttttt

SEQ ID NO: 65833 - DNA, 22 bp, Artificial Sequence
  chemically synthesized
gttggttggttttttttttttt

SEQ ID NO: 65834 - DNA, 22 bp, Artificial Sequence
  chemically synthesized
gttggttttttttttttttttt

SEQ ID NO: 65835 - DNA, 22 bp, Artificial Sequence
  chemically synthesized
gttttttttttttttttttaag

SEQ ID NO: 65836 - DNA, 22 bp, Artificial Sequence
  chemically synthesized
tttttttttttttttaagtcct

SEQ ID NO: 65837 - DNA, 22 bp, Artificial Sequence
  chemically synthesized
ttttttttttttttaagtccta

SEQ ID NO: 65838 - DNA, 22 bp, Artificial Sequence
  chemically synthesized
tttttttttttttaagtcctaa

SEQ ID NO: 65839 - DNA, 22 bp, Artificial Sequence
  chemically synthesized
ttttttttttttaagtcctaaa

SEQ ID NO: 65840 - DNA, 22 bp, Artificial Sequence
  chemically synthesized
tttttttttttaagtcctaaac

SEQ ID NO: 65841 - DNA, 22 bp, Artificial Sequence
  chemically synthesized
ttttttttttaagtcctaaaca

SEQ ID NO: 65842 - DNA, 22 bp, Artificial Sequence
  chemically synthesized
tttttttttaagtcctaaacaa

SEQ ID NO: 65843 - DNA, 22 bp, Artificial Sequence
  chemically synthesized
ttttttttaagtcctaaacaag

SEQ ID NO: 65844 - DNA, 22 bp, Artificial Sequence
  chemically synthesized
tttttttaagtcctaaacaagt

SEQ ID NO: 65845 - DNA, 22 bp, Artificial Sequence
  chemically synthesized
ttttttaagtcctaaacaagtg

SEQ ID NO: 65846 - DNA, 22 bp, Artificial Sequence
  chemically synthesized
tttttaagtcctaaacaagtgc

SEQ ID NO: 65847 - DNA, 22 bp, Artificial Sequence
  chemically synthesized
ttttaagtcctaaacaagtgcc

SEQ ID NO: 65848 - DNA, 22 bp, Artificial Sequence
  chemically synthesized
tttaagtcctaaacaagtgcca

SEQ ID NO: 65849 - DNA, 22 bp, Artificial Sequence
  chemically synthesized
ttaagtcctaaacaagtgccac

SEQ ID NO: 65850 - DNA, 22 bp, Artificial Sequence
  chemically synthesized
taagtcctaaacaagtgccaca

SEQ ID NO: 65851 - DNA, 22 bp, Artificial Sequence
  chemically synthesized
aagtcctaaacaagtgccacag

SEQ ID NO: 65852 - DNA, 22 bp, Artificial Sequence
  chemically synthesized
agtcctaaacaagtgccacaga

SEQ ID NO: 65853 - DNA, 22 bp, Artificial Sequence
  chemically synthesized
aacaagtgccacagaggatttc

SEQ ID NO: 65854 - DNA, 22 bp, Artificial Sequence
  chemically synthesized
ctttttggcttgaacttgataa

SEQ ID NO: 65855 - DNA, 22 bp, Artificial Sequence
  chemically synthesized
tttttggcttgaacttgataaa

SEQ ID NO: 65856 - DNA, 22 bp, Artificial Sequence
  chemically synthesized
tttggcttgaacttgataaaat

SEQ ID NO: 65857 - DNA, 22 bp, Artificial Sequence
  chemically synthesized
ttggcttgaacttgataaaatt

SEQ ID NO: 65858 - DNA, 22 bp, Artificial Sequence
  chemically synthesized
tggcttgaacttgataaaattt

SEQ ID NO: 65859 - DNA, 22 bp, Artificial Sequence
  chemically synthesized
ggcttgaacttgataaaatttg

SEQ ID NO: 65860 - DNA, 22 bp, Artificial Sequence
  chemically synthesized
gcttgaacttgataaaatttgg

SEQ ID NO: 65861 - DNA, 22 bp, Artificial Sequence
  chemically synthesized
gaacttgataaaatttggagca

SEQ ID NO: 65862 - DNA, 22 bp, Artificial Sequence
  chemically synthesized
aacttgataaaatttggagcac

SEQ ID NO: 65863 - DNA, 22 bp, Artificial Sequence
  chemically synthesized
gataaaatttggagcacacaag

SEQ ID NO: 65864 - DNA, 22 bp, Artificial Sequence
  chemically synthesized
ataaaatttggagcacacaagt

SEQ ID NO: 65865 - DNA, 22 bp, Artificial Sequence
  chemically synthesized
ggagcacacaagtttacacaca

SEQ ID NO: 65866 - DNA, 22 bp, Artificial Sequence
  chemically synthesized
gagcacacaagtttacacacat

SEQ ID NO: 65867 - DNA, 22 bp, Artificial Sequence
  chemically synthesized
acacacatggtcatgaacacac

SEQ ID NO: 65868 - DNA, 22 bp, Artificial Sequence
  chemically synthesized
cacacatggtcatgaacacaca

SEQ ID NO: 65869 - DNA, 22 bp, Artificial Sequence
  chemically synthesized
ctcccatctccccagaccccca

SEQ ID NO: 65870 - DNA, 22 bp, Artificial Sequence
  chemically synthesized
tcccatctccccagacccccag

SEQ ID NO: 65871 - DNA, 22 bp, Artificial Sequence
  chemically synthesized
ccatctccccagacccccagca

SEQ ID NO: 65872 - DNA, 22 bp, Artificial Sequence
  chemically synthesized
cccagacccccagcacatatgt

SEQ ID NO: 65873 - DNA, 22 bp, Artificial Sequence
  chemically synthesized
cataatgaggtgttcctaagtg

SEQ ID NO: 65874 - DNA, 22 bp, Artificial Sequence
  chemically synthesized
ctaagtgagaattcccataatt

SEQ ID NO: 65875 - DNA, 22 bp, Artificial Sequence
  chemically synthesized
agtgagaattcccataatttga

SEQ ID NO: 65876 - DNA, 22 bp, Artificial Sequence
  chemically synthesized
ccataatttgaggttttatact

SEQ ID NO: 65877 - DNA, 22 bp, Artificial Sequence
  chemically synthesized
gaggttttatactggaatggtg

SEQ ID NO: 65878 - DNA, 22 bp, Artificial Sequence
  chemically synthesized
aggttttatactggaatggtga

SEQ ID NO: 65879 - DNA, 22 bp, Artificial Sequence
  chemically synthesized
tatactggaatggtgataaggg

SEQ ID NO: 65880 - DNA, 22 bp, Artificial Sequence
  chemically synthesized
atactggaatggtgataagggc

SEQ ID NO: 65881 - DNA, 22 bp, Artificial Sequence
  chemically synthesized
tactggaatggtgataagggca

SEQ ID NO: 65882 - DNA, 22 bp, Artificial Sequence
  chemically synthesized
gaatggtgataagggcaggaaa

SEQ ID NO: 65883 - DNA, 22 bp, Artificial Sequence
  chemically synthesized
agcccatgtgcattttttctcg

SEQ ID NO: 65884 - DNA, 22 bp, Artificial Sequence
  chemically synthesized
tttctcgagtggttaacctttc

SEQ ID NO: 65885 - DNA, 22 bp, Artificial Sequence
  chemically synthesized
ttctcgagtggttaacctttcc

SEQ ID NO: 65886 - DNA, 22 bp, Artificial Sequence
  chemically synthesized
tctcgagtggttaacctttcct

SEQ ID NO: 65887 - DNA, 22 bp, Artificial Sequence
  chemically synthesized
ctcgagtggttaacctttcctc

SEQ ID NO: 65888 - DNA, 22 bp, Artificial Sequence
  chemically synthesized
tcgagtggttaacctttcctct

SEQ ID NO: 65889 - DNA, 22 bp, Artificial Sequence
  chemically synthesized
gagtggttaacctttcctctct

SEQ ID NO: 65890 - DNA, 22 bp, Artificial Sequence
  chemically synthesized
acctttcctctctttctccttc

SEQ ID NO: 65891 - DNA, 22 bp, Artificial Sequence
  chemically synthesized
tcctctctttctccttcttttt

SEQ ID NO: 65892 - DNA, 22 bp, Artificial Sequence
  chemically synthesized
cctctctttctccttctttttt

SEQ ID NO: 65893 - DNA, 22 bp, Artificial Sequence
  chemically synthesized
ctctctttctccttcttttttt

SEQ ID NO: 65894 - DNA, 22 bp, Artificial Sequence
  chemically synthesized
tctttctccttctttttttgcc

SEQ ID NO: 65895 - DNA, 22 bp, Artificial Sequence
  chemically synthesized
tttctccttctttttttgcccc

SEQ ID NO: 65896 - DNA, 22 bp, Artificial Sequence
  chemically synthesized
tctccttctttttttgcccccc

SEQ ID NO: 65897 - DNA, 22 bp, Artificial Sequence
  chemically synthesized
ctccttctttttttgcccccct

SEQ ID NO: 65898 - DNA, 22 bp, Artificial Sequence
  chemically synthesized
tccttctttttttgcccccctc

SEQ ID NO: 65899 - DNA, 22 bp, Artificial Sequence
  chemically synthesized
cttctttttttgcccccctcca

SEQ ID NO: 65900 - DNA, 22 bp, Artificial Sequence
  chemically synthesized
ctttttttgcccccctccaaat

SEQ ID NO: 65901 - DNA, 22 bp, Artificial Sequence
  chemically synthesized
tttttttgcccccctccaaatt

SEQ ID NO: 65902 - DNA, 22 bp, Artificial Sequence
  chemically synthesized
tttttgcccccctccaaattcc

SEQ ID NO: 65903 - DNA, 22 bp, Artificial Sequence
  chemically synthesized
ttttgcccccctccaaattccc

SEQ ID NO: 65904 - DNA, 22 bp, Artificial Sequence
  chemically synthesized
tttgcccccctccaaattcccc

SEQ ID NO: 65905 - DNA, 22 bp, Artificial Sequence
  chemically synthesized
ttgcccccctccaaattccccc

SEQ ID NO: 65906 - DNA, 22 bp, Artificial Sequence
  chemically synthesized
tgcccccctccaaattccccct

SEQ ID NO: 65907 - DNA, 22 bp, Artificial Sequence
  chemically synthesized
gcccccctccaaattccccctt

SEQ ID NO: 65908 - DNA, 22 bp, Artificial Sequence
  chemically synthesized
cccccctccaaattcccccttc

SEQ ID NO: 65909 - DNA, 22 bp, Artificial Sequence
  chemically synthesized
caaattcccccttctcttaaga

SEQ ID NO: 65910 - DNA, 22 bp, Artificial Sequence
  chemically synthesized
ccccttctcttaagaaaaaaca

SEQ ID NO: 65911 - DNA, 22 bp, Artificial Sequence
  chemically synthesized
ctcttaagaaaaaacacgtgag

SEQ ID NO: 65912 - DNA, 22 bp, Artificial Sequence
  chemically synthesized
tcttaagaaaaaacacgtgagc

SEQ ID NO: 65913 - DNA, 22 bp, Artificial Sequence
  chemically synthesized
ttaagaaaaaacacgtgagcca

SEQ ID NO: 65914 - DNA, 22 bp, Artificial Sequence
  chemically synthesized
aagaaaaaacacgtgagccatg

SEQ ID NO: 65915 - DNA, 22 bp, Artificial Sequence
  chemically synthesized
agaaaaaacacgtgagccatgt

SEQ ID NO: 65916 - DNA, 22 bp, Artificial Sequence
  chemically synthesized
gaagtacagccttgacctcagc

SEQ ID NO: 65917 - DNA, 22 bp, Artificial Sequence
  chemically synthesized
gacctcagcctcaccaggtgcg

SEQ ID NO: 65918 - DNA, 22 bp, Artificial Sequence
  chemically synthesized
acctcagcctcaccaggtgcgg

SEQ ID NO: 65919 - DNA, 22 bp, Artificial Sequence
  chemically synthesized
agcctcaccaggtgcggctgct

SEQ ID NO: 65920 - DNA, 22 bp, Artificial Sequence
  chemically synthesized
accaggtgcggctgctgaccgg

SEQ ID NO: 65921 - DNA, 22 bp, Artificial Sequence
  chemically synthesized
ctgaccggtgcaaaaaaatagg

SEQ ID NO: 65922 - DNA, 22 bp, Artificial Sequence
  chemically synthesized
accggtgcaaaaaaataggaaa

SEQ ID NO: 65923 - DNA, 22 bp, Artificial Sequence
  chemically synthesized
tttaaaaggcagggaggggaga

SEQ ID NO: 65924 - DNA, 22 bp, Artificial Sequence
  chemically synthesized
aaaaggcagggaggggagagtt

SEQ ID NO: 65925 - DNA, 22 bp, Artificial Sequence
  chemically synthesized
aaaggcagggaggggagagttt

SEQ ID NO: 65926 - DNA, 22 bp, Artificial Sequence
  chemically synthesized
ctgttccacaatcactgctgtt

SEQ ID NO: 65927 - DNA, 22 bp, Artificial Sequence
  chemically synthesized
tgttccacaatcactgctgttt

SEQ ID NO: 65928 - DNA, 22 bp, Artificial Sequence
  chemically synthesized
ttccacaatcactgctgtttca

SEQ ID NO: 65929 - DNA, 22 bp, Artificial Sequence
  chemically synthesized
cacaatcactgctgtttcagtg

SEQ ID NO: 65930 - DNA, 22 bp, Artificial Sequence
  chemically synthesized
ctgtttcagtgaaaagcaaccc

SEQ ID NO: 65931 - DNA, 22 bp, Artificial Sequence
  chemically synthesized
tttcagtgaaaagcaacccggt

SEQ ID NO: 65932 - DNA, 22 bp, Artificial Sequence
  chemically synthesized
cagtgaaaagcaacccggttta

SEQ ID NO: 65933 - DNA, 22 bp, Artificial Sequence
  chemically synthesized
agtgaaaagcaacccggtttat

SEQ ID NO: 65934 - DNA, 22 bp, Artificial Sequence
  chemically synthesized
atctgtaaaacctacttccctt

SEQ ID NO: 65935 - DNA, 22 bp, Artificial Sequence
  chemically synthesized
tctgtaaaacctacttcccttt

SEQ ID NO: 65936 - DNA, 22 bp, Artificial Sequence
  chemically synthesized
taaaacctacttccctttctgg

SEQ ID NO: 65937 - DNA, 22 bp, Artificial Sequence
  chemically synthesized
cttccctttctggtgaatgtgg

SEQ ID NO: 65938 - DNA, 22 bp, Artificial Sequence
  chemically synthesized
ccctttctggtgaatgtggctg

SEQ ID NO: 65939 - DNA, 22 bp, Artificial Sequence
  chemically synthesized
cctttctggtgaatgtggctgt

SEQ ID NO: 65940 - DNA, 22 bp, Artificial Sequence
  chemically synthesized
tctggtgaatgtggctgttttt

SEQ ID NO: 65941 - DNA, 22 bp, Artificial Sequence
  chemically synthesized
ctggtgaatgtggctgtttttg

SEQ ID NO: 65942 - DNA, 22 bp, Artificial Sequence
  chemically synthesized
tggtgaatgtggctgtttttga

SEQ ID NO: 65943 - DNA, 22 bp, Artificial Sequence
  chemically synthesized
gtgaatgtggctgtttttgaca

SEQ ID NO: 65944 - DNA, 22 bp, Artificial Sequence
  chemically synthesized
tttttgacagcagaggacccca

SEQ ID NO: 65945 - DNA, 22 bp, Artificial Sequence
  chemically synthesized
ttgacagcagaggaccccagtt

SEQ ID NO: 65946 - DNA, 22 bp, Artificial Sequence
  chemically synthesized
tgacagcagaggaccccagttg

SEQ ID NO: 65947 - DNA, 22 bp, Artificial Sequence
  chemically synthesized
gacagcagaggaccccagttgt

SEQ ID NO: 65948 - DNA, 22 bp, Artificial Sequence
  chemically synthesized
acagcagaggaccccagttgtt

SEQ ID NO: 65949 - DNA, 22 bp, Artificial Sequence
  chemically synthesized
ttgaggactaaagagagagaag

SEQ ID NO: 65950 - DNA, 22 bp, Artificial Sequence
  chemically synthesized
aggactaaagagagagaagatg

SEQ ID NO: 65951 - DNA, 22 bp, Artificial Sequence
  chemically synthesized
aagagagagaagatgagaaaga

SEQ ID NO: 65952 - DNA, 22 bp, Artificial Sequence
  chemically synthesized
gaaacagaggttggagaaagag

SEQ ID NO: 65953 - DNA, 22 bp, Artificial Sequence
  chemically synthesized
gagaaagagaggcaaggaagta

SEQ ID NO: 65954 - DNA, 22 bp, Artificial Sequence
  chemically synthesized
gaattcgagctattttcagctg

SEQ ID NO: 65955 - DNA, 22 bp, Artificial Sequence
  chemically synthesized
gagctattttcagctgaatgtg

SEQ ID NO: 65956 - DNA, 22 bp, Artificial Sequence
  chemically synthesized
ttttcagctgaatgtgagtgca

SEQ ID NO: 65957 - DNA, 22 bp, Artificial Sequence
  chemically synthesized
tcagctgaatgtgagtgcagat

SEQ ID NO: 65958 - DNA, 22 bp, Artificial Sequence
  chemically synthesized
cagctgaatgtgagtgcagatt

SEQ ID NO: 65959 - DNA, 22 bp, Artificial Sequence
  chemically synthesized
agctgaatgtgagtgcagattt

SEQ ID NO: 65960 - DNA, 22 bp, Artificial Sequence
  chemically synthesized
aatgtgagtgcagatttcatca

SEQ ID NO: 65961 - DNA, 22 bp, Artificial Sequence
  chemically synthesized
catcaggcttctgggctacagg

SEQ ID NO: 65962 - DNA, 22 bp, Artificial Sequence
  chemically synthesized
atcaggcttctgggctacaggg

SEQ ID NO: 65963 - DNA, 22 bp, Artificial Sequence
  chemically synthesized
ctgggctacagggaaactgact

SEQ ID NO: 65964 - DNA, 22 bp, Artificial Sequence
  chemically synthesized
tgggctacagggaaactgactg

SEQ ID NO: 65965 - DNA, 22 bp, Artificial Sequence
  chemically synthesized
ggctacagggaaactgactgtg

SEQ ID NO: 65966 - DNA, 22 bp, Artificial Sequence
  chemically synthesized
cagggaaactgactgtgtgcgg

SEQ ID NO: 65967 - DNA, 22 bp, Artificial Sequence
  chemically synthesized
actgtgtgcggaccttgcgtgt

SEQ ID NO: 65968 - DNA, 22 bp, Artificial Sequence
  chemically synthesized
tgtgcggaccttgcgtgtaact
